United States Patent Application Publication US 2005/0244851 A1 - sequence listing, part 141

SEQ ID NO: 5505018 - DNA, 25 bp, Homo sapien
ggacaactggagagctatctagaaa

SEQ ID NO: 5505019 - DNA, 25 bp, Homo sapien
tatctagaaaaagatcagtggatct

SEQ ID NO: 5505020 - DNA, 25 bp, Homo sapien
tgagattaactagggacactgtaaa

SEQ ID NO: 5505021 - DNA, 25 bp, Homo sapien
atgggcccatatacaaatgagaatt

SEQ ID NO: 5505022 - DNA, 25 bp, Homo sapien
tatcagtgagttacaaatagactta

SEQ ID NO: 5505023 - DNA, 25 bp, Homo sapien
tcgtgcacgaccagggctcccgtgt

SEQ ID NO: 5505024 - DNA, 25 bp, Homo sapien
acacgggagccctggtcgtgcacga

SEQ ID NO: 5505025 - DNA, 25 bp, Homo sapien
ttcagctcgggagagatactttttt

SEQ ID NO: 5505026 - DNA, 25 bp, Homo sapien
tcatctaatggtacagtgtgcattt

SEQ ID NO: 5505027 - DNA, 25 bp, Homo sapien
gtcagtaggtacatagatatagcat

SEQ ID NO: 5505028 - DNA, 25 bp, Homo sapien
ctgtaatatggcttatggcaatttc

SEQ ID NO: 5505029 - DNA, 25 bp, Homo sapien
agtaccagcggctttaaaaatagaa

SEQ ID NO: 5505030 - DNA, 25 bp, Homo sapien
atatttctagtaccagcggctttaa

SEQ ID NO: 5505031 - DNA, 25 bp, Homo sapien
ttttaagtttcagctcgggagagat

SEQ ID NO: 5505032 - DNA, 25 bp, Homo sapien
ctatattatgtaaaaatgagtttcc

SEQ ID NO: 5505033 - DNA, 25 bp, Homo sapien
atgtcaattacttagcaagggttaa

SEQ ID NO: 5505034 - DNA, 25 bp, Homo sapien
agtaacaaagtaagatctgtaatat

SEQ ID NO: 5505035 - DNA, 25 bp, Homo sapien
atggcaatttctcaagtaagatttc

SEQ ID NO: 5505036 - DNA, 25 bp, Homo sapien
atggggcctagtaggcttaaggcca

SEQ ID NO: 5505037 - DNA, 25 bp, Homo sapien
ctagtaggcttaaggccacaggaag

SEQ ID NO: 5505038 - DNA, 25 bp, Homo sapien
ggaagcaaatgacccccagtctacc

SEQ ID NO: 5505039 - DNA, 25 bp, Homo sapien
ctccaattgaggaggcataacaagg

SEQ ID NO: 5505040 - DNA, 25 bp, Homo sapien
cacatcgactgttgtgaatgagtga

SEQ ID NO: 5505041 - DNA, 25 bp, Homo sapien
ctgtctccacaggtgtaaaggctcc

SEQ ID NO: 5505042 - DNA, 25 bp, Homo sapien
catggccttaggtaatggcaagtcc

SEQ ID NO: 5505043 - DNA, 25 bp, Homo sapien
caggaggctgtcacacatggcctta

SEQ ID NO: 5505044 - DNA, 25 bp, Homo sapien
tctgctccaaagctatcactgtctc

SEQ ID NO: 5505045 - DNA, 25 bp, Homo sapien
tgtctctgccatgcaggcccatcac

SEQ ID NO: 5505046 - DNA, 25 bp, Homo sapien
ggcaagtccttcctattcagctctc

SEQ ID NO: 5505047 - DNA, 25 bp, Homo sapien
cattgggcacaagttcaaatcctcc

SEQ ID NO: 5505048 - DNA, 25 bp, Homo sapien
gagtctgaccagccattgggcacaa

SEQ ID NO: 5505049 - DNA, 25 bp, Homo sapien
tagattaggacatcagaaaggacaa

SEQ ID NO: 5505050 - DNA, 25 bp, Homo sapien
aaatcctccaggagtactggatgtt

SEQ ID NO: 5505051 - DNA, 25 bp, Homo sapien
caggagtactggatgttttagatta

SEQ ID NO: 5505052 - DNA, 25 bp, Homo sapien
atcaagatacccctgtaggacaccc

SEQ ID NO: 5505053 - DNA, 25 bp, Homo sapien
attctcaatccaagagagtctgacc

SEQ ID NO: 5505054 - DNA, 25 bp, Homo sapien
aaatgatctgttctcagaaggaatc

SEQ ID NO: 5505055 - DNA, 25 bp, Homo sapien
gtctgaggaatggcaatccaacatt

SEQ ID NO: 5505056 - DNA, 25 bp, Homo sapien
gtcgacccactgcacttgttgccca

SEQ ID NO: 5505057 - DNA, 25 bp, Homo sapien
ctcagaaggaatcaagatacccctg

SEQ ID NO: 5505058 - DNA, 25 bp, Homo sapien
acaggtaatcagtcatgtatatgtg

SEQ ID NO: 5505059 - DNA, 25 bp, Homo sapien
actgagcctggcccatatgtttgta

SEQ ID NO: 5505060 - DNA, 25 bp, Homo sapien
atctgaaaatgaccatatgattgat

SEQ ID NO: 5505061 - DNA, 25 bp, Homo sapien
aatgaccatatgattgattgtgatc

SEQ ID NO: 5505062 - DNA, 25 bp, Homo sapien
tcagtcatgtatatgtgaaggtcta

SEQ ID NO: 5505063 - DNA, 25 bp, Homo sapien
gagaaatacagcattacaggtaatc

SEQ ID NO: 5505064 - DNA, 25 bp, Homo sapien
ctcaatgtgctacaagctgtgcttg

SEQ ID NO: 5505065 - DNA, 25 bp, Homo sapien
tttaggtgagaaatacagcattaca

SEQ ID NO: 5505066 - DNA, 25 bp, Homo sapien
tgtgaaggtctatattatctgaaaa

SEQ ID NO: 5505067 - DNA, 25 bp, Homo sapien
ataaaaagtgctgcaagttctattt

SEQ ID NO: 5505068 - DNA, 25 bp, Homo sapien
gaccatacaataactcaatgtgcta

SEQ ID NO: 5505069 - DNA, 25 bp, Homo sapien
tctgtctataatcctggaacctggc

SEQ ID NO: 5505070 - DNA, 25 bp, Homo sapien
tattatacagggctggtacagaata

SEQ ID NO: 5505071 - DNA, 25 bp, Homo sapien
gaaagtggtatgacaggactcttct

SEQ ID NO: 5505072 - DNA, 25 bp, Homo sapien
gattacatgaaattaggacttttcc

SEQ ID NO: 5505073 - DNA, 25 bp, Homo sapien
attgaaaacataacatcatagttgg

SEQ ID NO: 5505074 - DNA, 25 bp, Homo sapien
tgctgagtccccaaaacgttagttc

SEQ ID NO: 5505075 - DNA, 25 bp, Homo sapien
tagacctacctcagaggaaggtcct

SEQ ID NO: 5505076 - DNA, 25 bp, Homo sapien
gggctggtacagaataaagtctcaa

SEQ ID NO: 5505077 - DNA, 25 bp, Homo sapien
gagatgctgagtccccaaaacgtta

SEQ ID NO: 5505078 - DNA, 25 bp, Homo sapien
agatcagtatttagacctacctcag

SEQ ID NO: 5505079 - DNA, 25 bp, Homo sapien
tataatcctggaacctggcagagat

SEQ ID NO: 5505080 - DNA, 25 bp, Homo sapien
tctgaagtgcctacaaatgtgaacc

SEQ ID NO: 5505081 - DNA, 25 bp, Homo sapien
aaaaagccacagtcattaatatcag

SEQ ID NO: 5505082 - DNA, 25 bp, Homo sapien
ttttttgaatctggaaatgtctttc

SEQ ID NO: 5505083 - DNA, 25 bp, Homo sapien
tgctaacactgaggcagactgaaac

SEQ ID NO: 5505084 - DNA, 25 bp, Homo sapien
tgaggcagactgaaacatacataga

SEQ ID NO: 5505085 - DNA, 25 bp, Homo sapien
catacatagaagtttaaatcattgc

SEQ ID NO: 5505086 - DNA, 25 bp, Homo sapien
tcctgctgctaacactgaggcagac

SEQ ID NO: 5505087 - DNA, 25 bp, Homo sapien
tgcctacaaatgtgaaccaaacttc

SEQ ID NO: 5505088 - DNA, 25 bp, Homo sapien
gatgatatttctgaagtgcctacaa

SEQ ID NO: 5505089 - DNA, 25 bp, Homo sapien
catgctatgtgacttctgtggccac

SEQ ID NO: 5505090 - DNA, 25 bp, Homo sapien
cttctgtggccactattaaaaagcc

SEQ ID NO: 5505091 - DNA, 25 bp, Homo sapien
gacctgaataatctgagaggacttc

SEQ ID NO: 5505092 - DNA, 25 bp, Homo sapien
ggtgaacccataaatgtagagttgg

SEQ ID NO: 5505093 - DNA, 25 bp, Homo sapien
tagaggtccccaagcccgattttca

SEQ ID NO: 5505094 - DNA, 25 bp, Homo sapien
gagaggacttccaatagaaggtgtg

SEQ ID NO: 5505095 - DNA, 25 bp, Homo sapien
ttcagtgcctcaaggatttaggaaa

SEQ ID NO: 5505096 - DNA, 25 bp, Homo sapien
tagctctgggtggctaatgactgga

SEQ ID NO: 5505097 - DNA, 25 bp, Homo sapien
tgactggaagccacttccccagtgc

SEQ ID NO: 5505098 - DNA, 25 bp, Homo sapien
atttaggaaaatcacacatgctgct

SEQ ID NO: 5505099 - DNA, 25 bp, Homo sapien
aagctccaggatgggaaaactctta

SEQ ID NO: 5505100 - DNA, 25 bp, Homo sapien
gtggtttcctaaggccagatggctg

SEQ ID NO: 5505101 - DNA, 25 bp, Homo sapien
aactcttagttctcaaggggccttc

SEQ ID NO: 5505102 - DNA, 25 bp, Homo sapien
gtccggacctggaggccgtcgacgg

SEQ ID NO: 5505103 - DNA, 25 bp, Homo sapien
ccgtcgacggcctccaggtccggac

SEQ ID NO: 5505104 - DNA, 25 bp, Homo sapien
ccgtccggacctggaggccgtcgac

SEQ ID NO: 5505105 - DNA, 25 bp, Homo sapien
gtcgacggcctccaggtccggacgg

SEQ ID NO: 5505106 - DNA, 25 bp, Homo sapien
tggtagagcctctcaagatagcaag

SEQ ID NO: 5505107 - DNA, 25 bp, Homo sapien
tcacctggatgaatggatcaatgac

SEQ ID NO: 5505108 - DNA, 25 bp, Homo sapien
ttgtggtgttgtagaaagaatatgg

SEQ ID NO: 5505109 - DNA, 25 bp, Homo sapien
tgtatgtgcatgaatatatggctcc

SEQ ID NO: 5505110 - DNA, 25 bp, Homo sapien
ggagagatgccacaaaatatgatgc

SEQ ID NO: 5505111 - DNA, 25 bp, Homo sapien
tacgaaatagtgataatgttgtcca

SEQ ID NO: 5505112 - DNA, 25 bp, Homo sapien
tatgtaagctacctggaacagagtc

SEQ ID NO: 5505113 - DNA, 25 bp, Homo sapien
gttctagatgcatagtggcacggga

SEQ ID NO: 5505114 - DNA, 25 bp, Homo sapien
aatatggtctttggagtcagcctta

SEQ ID NO: 5505115 - DNA, 25 bp, Homo sapien
atagcaagagagcatattgtggtgt

SEQ ID NO: 5505116 - DNA, 25 bp, Homo sapien
gagttgcgacaattagaggttatat

SEQ ID NO: 5505117 - DNA, 25 bp, Homo sapien
atgcttatgaagacaaaaatgggtt

SEQ ID NO: 5505118 - DNA, 25 bp, Homo sapien
taactccagtagtgagtgtctcttc

SEQ ID NO: 5505119 - DNA, 25 bp, Homo sapien
acgaagaggactgcttaggtccagt

SEQ ID NO: 5505120 - DNA, 25 bp, Homo sapien
ttgaaagagactacaaacgaagagg

SEQ ID NO: 5505121 - DNA, 25 bp, Homo sapien
aagaatggccatattacgccaaact

SEQ ID NO: 5505122 - DNA, 25 bp, Homo sapien
ttgataagcagatattgaaagagac

SEQ ID NO: 5505123 - DNA, 25 bp, Homo sapien
ggtagactatggtgataaaaaagat

SEQ ID NO: 5505124 - DNA, 25 bp, Homo sapien
ctgagaagtcttcaagccctcgtat

SEQ ID NO: 5505125 - DNA, 25 bp, Homo sapien
attaagggctcagggacttcatata

SEQ ID NO: 5505126 - DNA, 25 bp, Homo sapien
gtagactaagatattctcgttgtcc

SEQ ID NO: 5505127 - DNA, 25 bp, Homo sapien
actctgaggaatgaatcatctttat

SEQ ID NO: 5505128 - DNA, 25 bp, Homo sapien
atgggattctgtccacctgacttta

SEQ ID NO: 5505129 - DNA, 25 bp, Homo sapien
ataagaaccaagaatggctgggaat

SEQ ID NO: 5505130 - DNA, 25 bp, Homo sapien
gaccagccagtttgagatcagcctg

SEQ ID NO: 5505131 - DNA, 25 bp, Homo sapien
agtttgagaccagccagtttgagat

SEQ ID NO: 5505132 - DNA, 25 bp, Homo sapien
aaaataaggaagactgacaaatgag

SEQ ID NO: 5505133 - DNA, 25 bp, Homo sapien
agtgctttagggaccagcatgaagg

SEQ ID NO: 5505134 - DNA, 25 bp, Homo sapien
ccgggagccctgattcatgggattc

SEQ ID NO: 5505135 - DNA, 25 bp, Homo sapien
aatacccaaaataaggaagactgac

SEQ ID NO: 5505136 - DNA, 25 bp, Homo sapien
cctgactttataagaaccaagaatg

SEQ ID NO: 5505137 - DNA, 25 bp, Homo sapien
agcagtagtgctttagggaccagca

SEQ ID NO: 5505138 - DNA, 25 bp, Homo sapien
gtggtggcacctgtctgtaatccta

SEQ ID NO: 5505139 - DNA, 25 bp, Homo sapien
ctaggcatggtggcatgcacctgta

SEQ ID NO: 5505140 - DNA, 25 bp, Homo sapien
ctactactaaattcgcggccgcgtc

SEQ ID NO: 5505141 - DNA, 25 bp, Homo sapien
acgcgtgcatgcgacgtcatagctc

SEQ ID NO: 5505142 - DNA, 25 bp, Homo sapien
acaaacacgggaaactgcttagtac

SEQ ID NO: 5505143 - DNA, 25 bp, Homo sapien
gaggaacacttgagcccaggatttc

SEQ ID NO: 5505144 - DNA, 25 bp, Homo sapien
gtgagctatgatcatgccactgccc

SEQ ID NO: 5505145 - DNA, 25 bp, Homo sapien
cagagcaagaccctgtgcccaaaaa

SEQ ID NO: 5505146 - DNA, 25 bp, Homo sapien
cctgagcccaggagttctagaataa

SEQ ID NO: 5505147 - DNA, 25 bp, Homo sapien
aaaaccccacacagatgttagctac

SEQ ID NO: 5505148 - DNA, 25 bp, Homo sapien
aggatccaagcttacgtacgcgtgc

SEQ ID NO: 5505149 - DNA, 25 bp, Homo sapien
tgggcaacacagcaagactatctct

SEQ ID NO: 5505150 - DNA, 25 bp, Homo sapien
aatgtctaccttattatgggctaat

SEQ ID NO: 5505151 - DNA, 25 bp, Homo sapien
ataaagcagtgtataatgtatgatt

SEQ ID NO: 5505152 - DNA, 25 bp, Homo sapien
acagtgacaaggttttgtagcaaac

SEQ ID NO: 5505153 - DNA, 25 bp, Homo sapien
tcttcaatgtaaaatcaggatagta

SEQ ID NO: 5505154 - DNA, 25 bp, Homo sapien
acatacctgaatttgaaacctaaac

SEQ ID NO: 5505155 - DNA, 25 bp, Homo sapien
ttaaagcacaaaaagtgtcgacgcg

SEQ ID NO: 5505156 - DNA, 25 bp, Homo sapien
accttactcactttagaggcagtct

SEQ ID NO: 5505157 - DNA, 25 bp, Homo sapien
aaatcaggatagtaatgtctacctt

SEQ ID NO: 5505158 - DNA, 25 bp, Homo sapien
tatgggctaatatgagaaatctgat

SEQ ID NO: 5505159 - DNA, 25 bp, Homo sapien
tagaggcagtctaacacagtgacaa

SEQ ID NO: 5505160 - DNA, 25 bp, Homo sapien
atgactagtataaaacgaaatctgt

SEQ ID NO: 5505161 - DNA, 25 bp, Homo sapien
ccaagcattctataaaaagagtttt

SEQ ID NO: 5505162 - DNA, 25 bp, Homo sapien
tatacaaggatcttaagagtttggc

SEQ ID NO: 5505163 - DNA, 25 bp, Homo sapien
ctcttaaccttagggctgtattagg

SEQ ID NO: 5505164 - DNA, 25 bp, Homo sapien
gggctgtattaggttccaaaaatgc

SEQ ID NO: 5505165 - DNA, 25 bp, Homo sapien
actgcggctatgctatacttccacc

SEQ ID NO: 5505166 - DNA, 25 bp, Homo sapien
aaaatgtgcaatatgaattcctcac

SEQ ID NO: 5505167 - DNA, 25 bp, Homo sapien
gatcttaagagtttggcataccagc

SEQ ID NO: 5505168 - DNA, 25 bp, Homo sapien
ccaccaaccaatggataaacccctc

SEQ ID NO: 5505169 - DNA, 25 bp, Homo sapien
ccacagtaactgcggctatgctata

SEQ ID NO: 5505170 - DNA, 25 bp, Homo sapien
aatggataaacccctccaagcattc

SEQ ID NO: 5505171 - DNA, 25 bp, Homo sapien
gatgcatcaccacagtaactgcggc

SEQ ID NO: 5505172 - DNA, 25 bp, Homo sapien
aaaaaataggagaggcaatatctta

SEQ ID NO: 5505173 - DNA, 25 bp, Homo sapien
tcctggcaatcctaaccaatgcaac

SEQ ID NO: 5505174 - DNA, 25 bp, Homo sapien
gttattacaatattcctggcaatcc

SEQ ID NO: 5505175 - DNA, 25 bp, Homo sapien
agaaaatcaaagtgtgttatcaatt

SEQ ID NO: 5505176 - DNA, 25 bp, Homo sapien
agagaaaaactcatgtgtagatgtc

SEQ ID NO: 5505177 - DNA, 25 bp, Homo sapien
cattaaataagaaagtagaacccga

SEQ ID NO: 5505178 - DNA, 25 bp, Homo sapien
aaaattaagaggcttacattttagc

SEQ ID NO: 5505179 - DNA, 25 bp, Homo sapien
atgtgtagatgtcatgactgcttat

SEQ ID NO: 5505180 - DNA, 25 bp, Homo sapien
acagtcggatttaaaggaacacaaa

SEQ ID NO: 5505181 - DNA, 25 bp, Homo sapien
ataagaaagtagaacccgattgagg

SEQ ID NO: 5505182 - DNA, 25 bp, Homo sapien
caattaaaaactatgggagtggccg

SEQ ID NO: 5505183 - DNA, 25 bp, Homo sapien
tgggactgccgtaactacaatgaat

SEQ ID NO: 5505184 - DNA, 25 bp, Homo sapien
cccaatgccatccttcctcctgtct

SEQ ID NO: 5505185 - DNA, 25 bp, Homo sapien
ccgtaactacaatgaataagaaagg

SEQ ID NO: 5505186 - DNA, 25 bp, Homo sapien
tggtaaccactagaataggcaatgt

SEQ ID NO: 5505187 - DNA, 25 bp, Homo sapien
acaggcatctggcctctaattctgc

SEQ ID NO: 5505188 - DNA, 25 bp, Homo sapien
agtggtacttacattcctgaagaca

SEQ ID NO: 5505189 - DNA, 25 bp, Homo sapien
actagaataggcaatgtaagaataa

SEQ ID NO: 5505190 - DNA, 25 bp, Homo sapien
aagttagtgattagacttaaacaaa

SEQ ID NO: 5505191 - DNA, 25 bp, Homo sapien
attctgacaaatattcacaggcatc

SEQ ID NO: 5505192 - DNA, 25 bp, Homo sapien
tgacaaatattcacaggcatctggc

SEQ ID NO: 5505193 - DNA, 25 bp, Homo sapien
tcctgtctcagtggtacttacattc

SEQ ID NO: 5505194 - DNA, 25 bp, Homo sapien
gggcgacagagattgactacaactt

SEQ ID NO: 5505195 - DNA, 25 bp, Homo sapien
aagttgtagtcaatctctgtcgccc

SEQ ID NO: 5505196 - DNA, 25 bp, Homo sapien
aaacagcatagactaaaacctggcc

SEQ ID NO: 5505197 - DNA, 25 bp, Homo sapien
gagcctgacattttcttagcaacta

SEQ ID NO: 5505198 - DNA, 25 bp, Homo sapien
ataggacaagtgataatttgtcacc

SEQ ID NO: 5505199 - DNA, 25 bp, Homo sapien
tggtagtcataattataggacaagt

SEQ ID NO: 5505200 - DNA, 25 bp, Homo sapien
cagctaagtgccatgccaggctaat

SEQ ID NO: 5505201 - DNA, 25 bp, Homo sapien
ctaagtggctgagaccacagctaag

SEQ ID NO: 5505202 - DNA, 25 bp, Homo sapien
ggaatgcagtgatactaacatggct

SEQ ID NO: 5505203 - DNA, 25 bp, Homo sapien
acctggccccctaaccgagcattct

SEQ ID NO: 5505204 - DNA, 25 bp, Homo sapien
actaacatggctcgcagcagccttg

SEQ ID NO: 5505205 - DNA, 25 bp, Homo sapien
tgagaccacagctaagtgccatgcc

SEQ ID NO: 5505206 - DNA, 25 bp, Homo sapien
gggtgagccatcacactcaggctga

SEQ ID NO: 5505207 - DNA, 25 bp, Homo sapien
ttcttcccctgtgcatcctcttcca

SEQ ID NO: 5505208 - DNA, 25 bp, Homo sapien
gccacacacgccaggtaaacaaaag

SEQ ID NO: 5505209 - DNA, 25 bp, Homo sapien
gctgccacacacgccaggtaaacaa

SEQ ID NO: 5505210 - DNA, 25 bp, Homo sapien
tgtgcatcctcttccagtttaaaaa

SEQ ID NO: 5505211 - DNA, 25 bp, Homo sapien
tttcttcccctgtgcatcctcttcc

SEQ ID NO: 5505212 - DNA, 25 bp, Homo sapien
tgccacacacgccaggtaaacaaaa

SEQ ID NO: 5505213 - DNA, 25 bp, Homo sapien
cgccaggtaaacaaaagccaacaaa

SEQ ID NO: 5505214 - DNA, 25 bp, Homo sapien
acgccaggtaaacaaaagccaacaa

SEQ ID NO: 5505215 - DNA, 25 bp, Homo sapien
ggctgccacacacgccaggtaaaca

SEQ ID NO: 5505216 - DNA, 25 bp, Homo sapien
ctgccacacacgccaggtaaacaaa

SEQ ID NO: 5505217 - DNA, 25 bp, Homo sapien
tcaatttcttcccctgtgcatcctc

SEQ ID NO: 5505218 - DNA, 25 bp, Homo sapien
aatctgatggaggtttaaaaggctc

SEQ ID NO: 5505219 - DNA, 25 bp, Homo sapien
gaaagaaacagagaatcaaagatga

SEQ ID NO: 5505220 - DNA, 25 bp, Homo sapien
aggtttaaaaggctcagttgtctgc

SEQ ID NO: 5505221 - DNA, 25 bp, Homo sapien
aaagtgatggactaaggatagattt

SEQ ID NO: 5505222 - DNA, 25 bp, Homo sapien
aaggctcagttgtctgcctggtgga

SEQ ID NO: 5505223 - DNA, 25 bp, Homo sapien
cccaggtaagaagtcattgcagggg

SEQ ID NO: 5505224 - DNA, 25 bp, Homo sapien
tgatggaggtttaaaaggctcagtt

SEQ ID NO: 5505225 - DNA, 25 bp, Homo sapien
tggacccaggtaagaagtcattgca

SEQ ID NO: 5505226 - DNA, 25 bp, Homo sapien
aaagaaacagagaatcaaagatgat

SEQ ID NO: 5505227 - DNA, 25 bp, Homo sapien
ggactaaggatagattttggaggca

SEQ ID NO: 5505228 - DNA, 25 bp, Homo sapien
agaggacaaatctgatggaggttta

SEQ ID NO: 5505229 - DNA, 25 bp, Homo sapien
taatggtcttaagtaacgagaatgt

SEQ ID NO: 5505230 - DNA, 25 bp, Homo sapien
ctactactaaattcgcggccgcgtc

SEQ ID NO: 5505231 - DNA, 25 bp, Homo sapien
attcccgggtcgactactactacta

SEQ ID NO: 5505232 - DNA, 25 bp, Homo sapien
cctcactataggaaaagctggtacg

SEQ ID NO: 5505233 - DNA, 25 bp, Homo sapien
attagatggaaaagttaatggtctt

SEQ ID NO: 5505234 - DNA, 25 bp, Homo sapien
acgcgtgcatgcgacgtcatagctc

SEQ ID NO: 5505235 - DNA, 25 bp, Homo sapien
ggccgctctagaggatccaagctta

SEQ ID NO: 5505236 - DNA, 25 bp, Homo sapien
tagaatacctacaagcactgactgc

SEQ ID NO: 5505237 - DNA, 25 bp, Homo sapien
aagcactgactgctatcagacatct

SEQ ID NO: 5505238 - DNA, 25 bp, Homo sapien
cggccgcgaatttagtagtagtagg

SEQ ID NO: 5505239 - DNA, 25 bp, Homo sapien
aggatccaagcttacgtacgcgtgc

SEQ ID NO: 5505240 - DNA, 25 bp, Homo sapien
tcggggtgtgacctgactgtttatg

SEQ ID NO: 5505241 - DNA, 25 bp, Homo sapien
ttattaacatgttcggggtgtgacc

SEQ ID NO: 5505242 - DNA, 25 bp, Homo sapien
tgtgtttatcaagaatgccagggcc

SEQ ID NO: 5505243 - DNA, 25 bp, Homo sapien
tttgagaattccacagatgattttg

SEQ ID NO: 5505244 - DNA, 25 bp, Homo sapien
gactgtttatgggtaagatcatgat

SEQ ID NO: 5505245 - DNA, 25 bp, Homo sapien
ctagggagaatgtataatgtgttta

SEQ ID NO: 5505246 - DNA, 25 bp, Homo sapien
accttactagggagaatgtataatg

SEQ ID NO: 5505247 - DNA, 25 bp, Homo sapien
atattgaaaattggttgatctaact

SEQ ID NO: 5505248 - DNA, 25 bp, Homo sapien
cgcgtcgacgtttaaatcatactgc

SEQ ID NO: 5505249 - DNA, 25 bp, Homo sapien
tgaaatgtcaccttactagggagaa

SEQ ID NO: 5505250 - DNA, 25 bp, Homo sapien
tatgggtaagatcatgatgcatgtt

SEQ ID NO: 5505251 - DNA, 25 bp, Homo sapien
gtgctgggtcttgttggtttgaaca

SEQ ID NO: 5505252 - DNA, 25 bp, Homo sapien
acacaaaatcctgctccaaaaaacc

SEQ ID NO: 5505253 - DNA, 25 bp, Homo sapien
gaaattctgctgtgtggtgatgaac

SEQ ID NO: 5505254 - DNA, 25 bp, Homo sapien
aagagaaccgctggctgcataataa

SEQ ID NO: 5505255 - DNA, 25 bp, Homo sapien
acaagcaaaatgtctgcatggtatc

SEQ ID NO: 5505256 - DNA, 25 bp, Homo sapien
gcaaagaacctgtcaatgcattctc

SEQ ID NO: 5505257 - DNA, 25 bp, Homo sapien
tgatgaacagaaaggtagtcccatc

SEQ ID NO: 5505258 - DNA, 25 bp, Homo sapien
gtcttctgaaacgtcacctgccccc

SEQ ID NO: 5505259 - DNA, 25 bp, Homo sapien
gggggaaaacacactgcatgtaaac

SEQ ID NO: 5505260 - DNA, 25 bp, Homo sapien
agctcggtgtcttctgaaacgtcac

SEQ ID NO: 5505261 - DNA, 25 bp, Homo sapien
aggtagtcccatccagctcggtgtc

SEQ ID NO: 5505262 - DNA, 25 bp, Homo sapien
gtccttcctgacataacacacatat

SEQ ID NO: 5505263 - DNA, 25 bp, Homo sapien
caagaggttaatactcaaaatggtg

SEQ ID NO: 5505264 - DNA, 25 bp, Homo sapien
aatgatctggtaagcagttagttag

SEQ ID NO: 5505265 - DNA, 25 bp, Homo sapien
agaaccaagatttctcagagagaat

SEQ ID NO: 5505266 - DNA, 25 bp, Homo sapien
atactcaaaatggtggtgtgtcatt

SEQ ID NO: 5505267 - DNA, 25 bp, Homo sapien
atgaaattctaatgatctggtaagc

SEQ ID NO: 5505268 - DNA, 25 bp, Homo sapien
ttggttctgccctaaggctcctttc

SEQ ID NO: 5505269 - DNA, 25 bp, Homo sapien
taagcagttagttagaatttggttc

SEQ ID NO: 5505270 - DNA, 25 bp, Homo sapien
aagctcaataacccccaaatgtaaa

SEQ ID NO: 5505271 - DNA, 25 bp, Homo sapien
ataggaaacttaaacaaaatctgag

SEQ ID NO: 5505272 - DNA, 25 bp, Homo sapien
acacacatatcaagaaccaagattt

SEQ ID NO: 5505273 - DNA, 25 bp, Homo sapien
cccgctggctcttgctcattgtctt

SEQ ID NO: 5505274 - DNA, 25 bp, Homo sapien
acatagtgagcacaggcgtttcgta

SEQ ID NO: 5505275 - DNA, 25 bp, Homo sapien
gaaagtccagatgtctccgaccaac

SEQ ID NO: 5505276 - DNA, 25 bp, Homo sapien
gtctccgaccaacagatccctggga

SEQ ID NO: 5505277 - DNA, 25 bp, Homo sapien
aggctgtccacatgaaagtccagat

SEQ ID NO: 5505278 - DNA, 25 bp, Homo sapien
ttgcctgctccctcacgcccctgct

SEQ ID NO: 5505279 - DNA, 25 bp, Homo sapien
tattattaacatagtgagcacaggc

SEQ ID NO: 5505280 - DNA, 25 bp, Homo sapien
ggagggcatgttcctccgagcccag

SEQ ID NO: 5505281 - DNA, 25 bp, Homo sapien
gcgtctgattttccagcagcgaagc

SEQ ID NO: 5505282 - DNA, 25 bp, Homo sapien
gtccctccgcgttgacccacagctt

SEQ ID NO: 5505283 - DNA, 25 bp, Homo sapien
gcccctgctctgcgtgttggatgtg

SEQ ID NO: 5505284 - DNA, 25 bp, Homo sapien
ccaaaaacaagactgtgggtgcaag

SEQ ID NO: 5505285 - DNA, 25 bp, Homo sapien
ttatgtcaaggactgagccttctcc

SEQ ID NO: 5505286 - DNA, 25 bp, Homo sapien
ttgaactgctgggcttacgctatct

SEQ ID NO: 5505287 - DNA, 25 bp, Homo sapien
ctcggagatgactctgtacacagtg

SEQ ID NO: 5505288 - DNA, 25 bp, Homo sapien
tacagtcaactgtccgcagatatct

SEQ ID NO: 5505289 - DNA, 25 bp, Homo sapien
ctgtgtaatccctcggagatgactc

SEQ ID NO: 5505290 - DNA, 25 bp, Homo sapien
atgcctggcagttatgagactttac

SEQ ID NO: 5505291 - DNA, 25 bp, Homo sapien
tcctgagttgaaagcaatgagtgat

SEQ ID NO: 5505292 - DNA, 25 bp, Homo sapien
tgcagcctggcattgagccaggtga

SEQ ID NO: 5505293 - DNA, 25 bp, Homo sapien
atttgtggagagagaaatatattgg

SEQ ID NO: 5505294 - DNA, 25 bp, Homo sapien
gtacacagtgaagctcgcgctcttc

SEQ ID NO: 5505295 - DNA, 25 bp, Homo sapien
gcctgtagcgctgaccagccaagac

SEQ ID NO: 5505296 - DNA, 25 bp, Homo sapien
caccgctgaacgtttagagggtgag

SEQ ID NO: 5505297 - DNA, 25 bp, Homo sapien
gtggcgttctctttactgggcgagc

SEQ ID NO: 5505298 - DNA, 25 bp, Homo sapien
tccccgcggtttccccgcagcctca

SEQ ID NO: 5505299 - DNA, 25 bp, Homo sapien
ccggtccaggatcctgccctggaac

SEQ ID NO: 5505300 - DNA, 25 bp, Homo sapien
caggagttacttgtggcgttctctt

SEQ ID NO: 5505301 - DNA, 25 bp, Homo sapien
ccaggatcctgccctggaacaggcg

SEQ ID NO: 5505302 - DNA, 25 bp, Homo sapien
aaatctttccaccgctgaacgttta

SEQ ID NO: 5505303 - DNA, 25 bp, Homo sapien
gttctctttactgggcgagctggag

SEQ ID NO: 5505304 - DNA, 25 bp, Homo sapien
cttgtggcgttctctttactgggcg

SEQ ID NO: 5505305 - DNA, 25 bp, Homo sapien
cgcggtttccccgcagcctcaggcg

SEQ ID NO: 5505306 - DNA, 25 bp, Homo sapien
tggtacatgtactaacccagttaat

SEQ ID NO: 5505307 - DNA, 25 bp, Homo sapien
caatcagaatagaactggaaccaga

SEQ ID NO: 5505308 - DNA, 25 bp, Homo sapien
catggtctctttgctgattgctttc

SEQ ID NO: 5505309 - DNA, 25 bp, Homo sapien
ctggaaccagaaactcatggctgaa

SEQ ID NO: 5505310 - DNA, 25 bp, Homo sapien
aaaggaaagtaacatattctaatac

SEQ ID NO: 5505311 - DNA, 25 bp, Homo sapien
aaagagcatttgtaacaatcagaat

SEQ ID NO: 5505312 - DNA, 25 bp, Homo sapien
gtatttggtgtctctgtggaattac

SEQ ID NO: 5505313 - DNA, 25 bp, Homo sapien
catggctgaaaagtcatggtctctt

SEQ ID NO: 5505314 - DNA, 25 bp, Homo sapien
agggggcttatgctgttcctggtac

SEQ ID NO: 5505315 - DNA, 25 bp, Homo sapien
aattaccaccaagtgtggcaggggg

SEQ ID NO: 5505316 - DNA, 25 bp, Homo sapien
gagttactgataaataaagagcatt

SEQ ID NO: 5505317 - DNA, 25 bp, Homo sapien
ggggaagtggctgattcatcttacc

SEQ ID NO: 5505318 - DNA, 25 bp, Homo sapien
tataatcctcttggctgttggggaa

SEQ ID NO: 5505319 - DNA, 25 bp, Homo sapien
ctttgtggacatctgatcatggaca

SEQ ID NO: 5505320 - DNA, 25 bp, Homo sapien
tctgatcatggacatggtgagtagg

SEQ ID NO: 5505321 - DNA, 25 bp, Homo sapien
ctgatcatggacatggtgagtaggt

SEQ ID NO: 5505322 - DNA, 25 bp, Homo sapien
ttctgagaaattccttataatcctc

SEQ ID NO: 5505323 - DNA, 25 bp, Homo sapien
agagtgacacatctttctgagaaat

SEQ ID NO: 5505324 - DNA, 25 bp, Homo sapien
cttctgcagtactctggtttccagc

SEQ ID NO: 5505325 - DNA, 25 bp, Homo sapien
ctgcagtactctggtttccagcagt

SEQ ID NO: 5505326 - DNA, 25 bp, Homo sapien
aatcctcttggctgttggggaagtg

SEQ ID NO: 5505327 - DNA, 25 bp, Homo sapien
catcttaccagtctgggtttaactt

SEQ ID NO: 5505328 - DNA, 25 bp, Homo sapien
gatctgtagatcctgttaagacagg

SEQ ID NO: 5505329 - DNA, 25 bp, Homo sapien
cctcaggccccaagaaacatactgt

SEQ ID NO: 5505330 - DNA, 25 bp, Homo sapien
gatgaacaagttctgaatacgtaag

SEQ ID NO: 5505331 - DNA, 25 bp, Homo sapien
ctgaatacgtaagatagaacatggg

SEQ ID NO: 5505332 - DNA, 25 bp, Homo sapien
gccccaagaaacatactgtcccctc

SEQ ID NO: 5505333 - DNA, 25 bp, Homo sapien
gttggtcaaagggtacacgctttca

SEQ ID NO: 5505334 - DNA, 25 bp, Homo sapien
gggtacacgctttcagttacaagat

SEQ ID NO: 5505335 - DNA, 25 bp, Homo sapien
aacagactaactccgttttcctcca

SEQ ID NO: 5505336 - DNA, 25 bp, Homo sapien
ctccgttttcctccactatcccctc

SEQ ID NO: 5505337 - DNA, 25 bp, Homo sapien
ctcccctgtccttgatctgtagatc

SEQ ID NO: 5505338 - DNA, 25 bp, Homo sapien
gaatacgtaagatagaacatgggag

SEQ ID NO: 5505339 - DNA, 25 bp, Homo sapien
gatggaaacagaaaataccagcttt

SEQ ID NO: 5505340 - DNA, 25 bp, Homo sapien
agagctgaggctattgtgctcatgc

SEQ ID NO: 5505341 - DNA, 25 bp, Homo sapien
aactccaatctgaaggtggtagaaa

SEQ ID NO: 5505342 - DNA, 25 bp, Homo sapien
tgtgttgattttgcagagggagaaa

SEQ ID NO: 5505343 - DNA, 25 bp, Homo sapien
gaggctattgtgctcatgcaaactc

SEQ ID NO: 5505344 - DNA, 25 bp, Homo sapien
ttaggcatcaggagttcataaatta

SEQ ID NO: 5505345 - DNA, 25 bp, Homo sapien
gggacagggatttcttaggcatcag

SEQ ID NO: 5505346 - DNA, 25 bp, Homo sapien
ccaatctgaaggtggtagaaactag

SEQ ID NO: 5505347 - DNA, 25 bp, Homo sapien
attgtgttgattttgcagagggaga

SEQ ID NO: 5505348 - DNA, 25 bp, Homo sapien
ggagaaaaacattacctctagagct

SEQ ID NO: 5505349 - DNA, 25 bp, Homo sapien
taaatgcttgtattaatgtggtgtt

SEQ ID NO: 5505350 - DNA, 25 bp, Homo sapien
tttttcaatgtatgtggcggtgagg

SEQ ID NO: 5505351 - DNA, 25 bp, Homo sapien
actcaagaggtcagttacttccttc

SEQ ID NO: 5505352 - DNA, 25 bp, Homo sapien
atctctgactcaagaggtcagttac

SEQ ID NO: 5505353 - DNA, 25 bp, Homo sapien
aaactcctcttctcaacccaggatc

SEQ ID NO: 5505354 - DNA, 25 bp, Homo sapien
ctggccagtgtggtccatttggtca

SEQ ID NO: 5505355 - DNA, 25 bp, Homo sapien
gggaaaaactcgagtgccatctctg

SEQ ID NO: 5505356 - DNA, 25 bp, Homo sapien
aacccaggatctctttgccctttag

SEQ ID NO: 5505357 - DNA, 25 bp, Homo sapien
ggtctcactgtcatcaggctcgagt

SEQ ID NO: 5505358 - DNA, 25 bp, Homo sapien
ggctcgagtgcagtgttacgatctc

SEQ ID NO: 5505359 - DNA, 25 bp, Homo sapien
ggagttcttcagccctttcccacat

SEQ ID NO: 5505360 - DNA, 25 bp, Homo sapien
atttggtcaagccccacagaaaggg

SEQ ID NO: 5505361 - DNA, 25 bp, Homo sapien
cagagttcctgcaagagactgaatc

SEQ ID NO: 5505362 - DNA, 25 bp, Homo sapien
gctacatgcaaatatgcacagggcc

SEQ ID NO: 5505363 - DNA, 25 bp, Homo sapien
accagttgacaaccagagttcctgc

SEQ ID NO: 5505364 - DNA, 25 bp, Homo sapien
gagactgaatctttggctacatgca

SEQ ID NO: 5505365 - DNA, 25 bp, Homo sapien
caggagagaatggtaaaattgtcct

SEQ ID NO: 5505366 - DNA, 25 bp, Homo sapien
acatctggtcggttttagattcccc

SEQ ID NO: 5505367 - DNA, 25 bp, Homo sapien
agacaaaggcaagatcaccagttga

SEQ ID NO: 5505368 - DNA, 25 bp, Homo sapien
acttcaaagggaattataaagaata

SEQ ID NO: 5505369 - DNA, 25 bp, Homo sapien
atatgcacagggcccttaacaatcc

SEQ ID NO: 5505370 - DNA, 25 bp, Homo sapien
ttaacaatccatagggaggtcgacg

SEQ ID NO: 5505371 - DNA, 25 bp, Homo sapien
acaaattcatgtaccggcactaaaa

SEQ ID NO: 5505372 - DNA, 25 bp, Homo sapien
atgagccaccatgtccagccactaa

SEQ ID NO: 5505373 - DNA, 25 bp, Homo sapien
ctctagagcggccgcctactactac

SEQ ID NO: 5505374 - DNA, 25 bp, Homo sapien
ctgtggatccagtagtaatcatgac

SEQ ID NO: 5505375 - DNA, 25 bp, Homo sapien
ctactactaaattcgcggccgcgtc

SEQ ID NO: 5505376 - DNA, 25 bp, Homo sapien
acgcgtacgtaagcttggatcctct

SEQ ID NO: 5505377 - DNA, 25 bp, Homo sapien
tgacatggtaaaaaaggaataaatc

SEQ ID NO: 5505378 - DNA, 25 bp, Homo sapien
acaatgtgctggaattagaggcatg

SEQ ID NO: 5505379 - DNA, 25 bp, Homo sapien
atgacgtcgcatgcacgcgtacgta

SEQ ID NO: 5505380 - DNA, 25 bp, Homo sapien
gaactcctgggttaaagctatcctc

SEQ ID NO: 5505381 - DNA, 25 bp, Homo sapien
tgtgaacacagctgactgcagcctc

SEQ ID NO: 5505382 - DNA, 25 bp, Homo sapien
ctccctctaggaaaagcagcaatat

SEQ ID NO: 5505383 - DNA, 25 bp, Homo sapien
aaagaagtaaggattgttttctata

SEQ ID NO: 5505384 - DNA, 25 bp, Homo sapien
cgcatgcacgcgtacgtaagcttgg

SEQ ID NO: 5505385 - DNA, 25 bp, Homo sapien
ctaaattcgcggccgcgtcgacttt

SEQ ID NO: 5505386 - DNA, 25 bp, Homo sapien
gtaagcttggatcctctagagcggc

SEQ ID NO: 5505387 - DNA, 25 bp, Homo sapien
ctactactaaattcgcggccgcgtc

SEQ ID NO: 5505388 - DNA, 25 bp, Homo sapien
acgcgtacgtaagcttggatcctct

SEQ ID NO: 5505389 - DNA, 25 bp, Homo sapien
ccggcccagagaaagatttataact

SEQ ID NO: 5505390 - DNA, 25 bp, Homo sapien
tgacgtcgcatgcacgcgtacgtaa

SEQ ID NO: 5505391 - DNA, 25 bp, Homo sapien
agagcggccgcctactactactaaa

SEQ ID NO: 5505392 - DNA, 25 bp, Homo sapien
gatcctctagagcggccgcctacta

SEQ ID NO: 5505393 - DNA, 25 bp, Homo sapien
aagaataattcccatgattttgttt

SEQ ID NO: 5505394 - DNA, 25 bp, Homo sapien
tgatgatatcatagggaaaaaactc

SEQ ID NO: 5505395 - DNA, 25 bp, Homo sapien
ctgccacaagaaaccaagcattgtt

SEQ ID NO: 5505396 - DNA, 25 bp, Homo sapien
accaagcattgttgagtcaacttct

SEQ ID NO: 5505397 - DNA, 25 bp, Homo sapien
tatcatagggaaaaaactcactgcc

SEQ ID NO: 5505398 - DNA, 25 bp, Homo sapien
tagggaaaaaactcactgccacaag

SEQ ID NO: 5505399 - DNA, 25 bp, Homo sapien
tccacaagctttccagcctggtctg

SEQ ID NO: 5505400 - DNA, 25 bp, Homo sapien
gcctggtctgctttatgtgtacatc

SEQ ID NO: 5505401 - DNA, 25 bp, Homo sapien
tatgtgtacatcctgaaaatttgcc

SEQ ID NO: 5505402 - DNA, 25 bp, Homo sapien
tgattctgtcagtggatgtctatcc

SEQ ID NO: 5505403 - DNA, 25 bp, Homo sapien
gcagcaacaactgatgatatcatag

SEQ ID NO: 5505404 - DNA, 25 bp, Homo sapien
ttaaatgattctgtcagtggatgtc

SEQ ID NO: 5505405 - DNA, 25 bp, Homo sapien
tgctacactgaggacccaagaagag

SEQ ID NO: 5505406 - DNA, 25 bp, Homo sapien
ggaaaagagagggatatttgcttcc

SEQ ID NO: 5505407 - DNA, 25 bp, Homo sapien
atgagtcttctgagctgaaagggca

SEQ ID NO: 5505408 - DNA, 25 bp, Homo sapien
agcaaatgccagtggtgcatctatc

SEQ ID NO: 5505409 - DNA, 25 bp, Homo sapien
tagctggaactgcagatacaagcca

SEQ ID NO: 5505410 - DNA, 25 bp, Homo sapien
ccataccaggcagacatgagttttc

SEQ ID NO: 5505411 - DNA, 25 bp, Homo sapien
aagggcaagaacttctcccacggtg

SEQ ID NO: 5505412 - DNA, 25 bp, Homo sapien
cccaagaagagtgttagagcctggg

SEQ ID NO: 5505413 - DNA, 25 bp, Homo sapien
atacaagccaccataccaggcagac

SEQ ID NO: 5505414 - DNA, 25 bp, Homo sapien
gagcaccaaggagagctatcataaa

SEQ ID NO: 5505415 - DNA, 25 bp, Homo sapien
tctcccacggtgctacactgaggac

SEQ ID NO: 5505416 - DNA, 25 bp, Homo sapien
gtatctctagtggaggcctaatcac

SEQ ID NO: 5505417 - DNA, 25 bp, Homo sapien
tcaaaacacattatcagaacaactt

SEQ ID NO: 5505418 - DNA, 25 bp, Homo sapien
ctgtcatgaagattcagtgttgatc

SEQ ID NO: 5505419 - DNA, 25 bp, Homo sapien
tattccttcagattagtgtggtttc

SEQ ID NO: 5505420 - DNA, 25 bp, Homo sapien
acacacacaccctcatacctccaag

SEQ ID NO: 5505421 - DNA, 25 bp, Homo sapien
attccctaacctgctactaaattac

SEQ ID NO: 5505422 - DNA, 25 bp, Homo sapien
ctcaaaagtatctctagtggaggcc

SEQ ID NO: 5505423 - DNA, 25 bp, Homo sapien
accctcatacctccaaggaaagaaa

SEQ ID NO: 5505424 - DNA, 25 bp, Homo sapien
aggaaagaaaatcttactgtcatga

SEQ ID NO: 5505425 - DNA, 25 bp, Homo sapien
ttatcagaacaactttagagcagcc

SEQ ID NO: 5505426 - DNA, 25 bp, Homo sapien
ataatctggtaccttgcccccaaat

SEQ ID NO: 5505427 - DNA, 25 bp, Homo sapien
gagggcaacaggtatgtcccaacca

SEQ ID NO: 5505428 - DNA, 25 bp, Homo sapien
tggggaactttagcagtcagcacta

SEQ ID NO: 5505429 - DNA, 25 bp, Homo sapien
aacagagggcaaattccagtctgga

SEQ ID NO: 5505430 - DNA, 25 bp, Homo sapien
actacagtacagctgtcagtgcatg

SEQ ID NO: 5505431 - DNA, 25 bp, Homo sapien
agtaaatggatattgaggacatgtc

SEQ ID NO: 5505432 - DNA, 25 bp, Homo sapien
tgtcgacctcgtaggggtcgacgcg

SEQ ID NO: 5505433 - DNA, 25 bp, Homo sapien
tgggttggcatcccggtcttgtcat

SEQ ID NO: 5505434 - DNA, 25 bp, Homo sapien
cagtgcatgggttctgcaaccaaac

SEQ ID NO: 5505435 - DNA, 25 bp, Homo sapien
ggagataagagtgtcgacctcgtag

SEQ ID NO: 5505436 - DNA, 25 bp, Homo sapien
ctaacaataaaggtgtgtgctgggg

SEQ ID NO: 5505437 - DNA, 25 bp, Homo sapien
cagtctggatctagagctatcagcc

SEQ ID NO: 5505438 - DNA, 25 bp, Homo sapien
gcaagaagtgtccagagtaactggt

SEQ ID NO: 5505439 - DNA, 25 bp, Homo sapien
gtgtggggatggacatcattaacat

SEQ ID NO: 5505440 - DNA, 25 bp, Homo sapien
cagagtaactggtaaattcaagaag

SEQ ID NO: 5505441 - DNA, 25 bp, Homo sapien
gtgtgtggctaaaaaggatatcaga

SEQ ID NO: 5505442 - DNA, 25 bp, Homo sapien
acctagagtcttggtcttgggcaga

SEQ ID NO: 5505443 - DNA, 25 bp, Homo sapien
aaaaaggatatcagacctagagtct

SEQ ID NO: 5505444 - DNA, 25 bp, Homo sapien
acaaacacagaaacagtttggttct

SEQ ID NO: 5505445 - DNA, 25 bp, Homo sapien
gtgttcacaaaactactccccattc

SEQ ID NO: 5505446 - DNA, 25 bp, Homo sapien
ttctgaaggttcaagatacaggcac

SEQ ID NO: 5505447 - DNA, 25 bp, Homo sapien
ggttcaagatacaggcacaagaagc

SEQ ID NO: 5505448 - DNA, 25 bp, Homo sapien
taccaccttactgcaaagttggggc

SEQ ID NO: 5505449 - DNA, 25 bp, Homo sapien
tccttcggaggacactcaccatctg

SEQ ID NO: 5505450 - DNA, 25 bp, Homo sapien
gaagaaagcactgcatttgggcgta

SEQ ID NO: 5505451 - DNA, 25 bp, Homo sapien
tacaaaaatgtcgtggcatacaata

SEQ ID NO: 5505452 - DNA, 25 bp, Homo sapien
acattaccaccccaagactgcaacc

SEQ ID NO: 5505453 - DNA, 25 bp, Homo sapien
agaggctgtaccccaacattaccac

SEQ ID NO: 5505454 - DNA, 25 bp, Homo sapien
gactgcaaccagactgcaggcctgg

SEQ ID NO: 5505455 - DNA, 25 bp, Homo sapien
ggcctgcatgtcacgctacacaaac

SEQ ID NO: 5505456 - DNA, 25 bp, Homo sapien
gtgaattggctgacagctgcaggtc

SEQ ID NO: 5505457 - DNA, 25 bp, Homo sapien
ccctggtatagcataaaaggttaaa

SEQ ID NO: 5505458 - DNA, 25 bp, Homo sapien
cgcactgatcctggtggaataatac

SEQ ID NO: 5505459 - DNA, 25 bp, Homo sapien
ttccacaagtctaggcctgcatgtc

SEQ ID NO: 5505460 - DNA, 25 bp, Homo sapien
cgctccggccccctcgtgcagggag

SEQ ID NO: 5505461 - DNA, 25 bp, Homo sapien
ctccctgcacgagggggccggagcg

SEQ ID NO: 5505462 - DNA, 25 bp, Homo sapien
tggtaaaaaaggcctgctatgtttc

SEQ ID NO: 5505463 - DNA, 25 bp, Homo sapien
aaaaaaatcttaacatgctccaaac

SEQ ID NO: 5505464 - DNA, 25 bp, Homo sapien
taaaaagaaccattcacatgtccta

SEQ ID NO: 5505465 - DNA, 25 bp, Homo sapien
caaccaatgcaagaagagatcactt

SEQ ID NO: 5505466 - DNA, 25 bp, Homo sapien
aaataacctgaaatagggtggatat

SEQ ID NO: 5505467 - DNA, 25 bp, Homo sapien
acttgacaccaacaaaaataacctg

SEQ ID NO: 5505468 - DNA, 25 bp, Homo sapien
aaagcctggtaaaaaaggcctgcta

SEQ ID NO: 5505469 - DNA, 25 bp, Homo sapien
caaggagtttatcttccaaatttcc

SEQ ID NO: 5505470 - DNA, 25 bp, Homo sapien
cctgaaatagggtggatataactaa

SEQ ID NO: 5505471 - DNA, 25 bp, Homo sapien
ttgattccagtgataacaagctgct

SEQ ID NO: 5505472 - DNA, 25 bp, Homo sapien
acaaatacaaccaatgcaagaagag

SEQ ID NO: 5505473 - DNA, 25 bp, Homo sapien
atggatacaggaaacagtatataaa

SEQ ID NO: 5505474 - DNA, 25 bp, Homo sapien
ttgccccatcccctttgctgcctct

SEQ ID NO: 5505475 - DNA, 25 bp, Homo sapien
aggctgagaccacagatgaacatca

SEQ ID NO: 5505476 - DNA, 25 bp, Homo sapien
atatcctgaaggatgagaaaaaggc

SEQ ID NO: 5505477 - DNA, 25 bp, Homo sapien
acagatgaacatcaccatgcctggt

SEQ ID NO: 5505478 - DNA, 25 bp, Homo sapien
ctgagaccacagatgaacatcacca

SEQ ID NO: 5505479 - DNA, 25 bp, Homo sapien
caacaaatatcctgaaggatgagaa

SEQ ID NO: 5505480 - DNA, 25 bp, Homo sapien
aaaaaagttccagatggtggctcac

SEQ ID NO: 5505481 - DNA, 25 bp, Homo sapien
agtatataaaaaagttccagatggt

SEQ ID NO: 5505482 - DNA, 25 bp, Homo sapien
ccaacatggtggaacctgtctctac

SEQ ID NO: 5505483 - DNA, 25 bp, Homo sapien
agtgctatggatacaggaaacagta

SEQ ID NO: 5505484 - DNA, 25 bp, Homo sapien
tgaagaactgaaatggactggtaaa

SEQ ID NO: 5505485 - DNA, 25 bp, Homo sapien
acagagacaggtgtttaaccatcca

SEQ ID NO: 5505486 - DNA, 25 bp, Homo sapien
tctaacctatgtggggctataagag

SEQ ID NO: 5505487 - DNA, 25 bp, Homo sapien
caaatgaatgcactctgtctcttac

SEQ ID NO: 5505488 - DNA, 25 bp, Homo sapien
tttagccttcatgggcaggtgaggt

SEQ ID NO: 5505489 - DNA, 25 bp, Homo sapien
tatgtgaggtaatttcttaagcatc

SEQ ID NO: 5505490 - DNA, 25 bp, Homo sapien
tagcttggtatacagcaaaagtagt

SEQ ID NO: 5505491 - DNA, 25 bp, Homo sapien
acaaatagccaagtatctccaatat

SEQ ID NO: 5505492 - DNA, 25 bp, Homo sapien
ccaaccctgggtgcaaatgaatgca

SEQ ID NO: 5505493 - DNA, 25 bp, Homo sapien
tggtaaaatgtttatgtgaggtaat

SEQ ID NO: 5505494 - DNA, 25 bp, Homo sapien
actgaaatggactggtaaacatcat

SEQ ID NO: 5505495 - DNA, 25 bp, Homo sapien
cagctttggtactgatgtcaacccc

SEQ ID NO: 5505496 - DNA, 25 bp, Homo sapien
tccagttctctgtagtagcccttcc

SEQ ID NO: 5505497 - DNA, 25 bp, Homo sapien
ggagcgagatagccatgacttttcc

SEQ ID NO: 5505498 - DNA, 25 bp, Homo sapien
tccctgaccatgtgactggaaacat

SEQ ID NO: 5505499 - DNA, 25 bp, Homo sapien
gtgactggaaacatactgaatttta

SEQ ID NO: 5505500 - DNA, 25 bp, Homo sapien
attttgtaccatggagacaagggga

SEQ ID NO: 5505501 - DNA, 25 bp, Homo sapien
atttactgagcatgtgtgactttca

SEQ ID NO: 5505502 - DNA, 25 bp, Homo sapien
tttgtagatgaagcaacttgaggac

SEQ ID NO: 5505503 - DNA, 25 bp, Homo sapien
atttggaggtcttgtctgaggttca

SEQ ID NO: 5505504 - DNA, 25 bp, Homo sapien
gactttcaaaaggctctgttactct

SEQ ID NO: 5505505 - DNA, 25 bp, Homo sapien
gcaacttgaggacagatatttggag

SEQ ID NO: 5505506 - DNA, 25 bp, Homo sapien
cacacctggcctcttggagcatttt

SEQ ID NO: 5505507 - DNA, 25 bp, Homo sapien
attgggccttttcaaggagagatac

SEQ ID NO: 5505508 - DNA, 25 bp, Homo sapien
gttggccgcactgatcttaaactcc

SEQ ID NO: 5505509 - DNA, 25 bp, Homo sapien
ccatgttggccgcactgatcttaaa

SEQ ID NO: 5505510 - DNA, 25 bp, Homo sapien
tttgtatctttagagcagacggagt

SEQ ID NO: 5505511 - DNA, 25 bp, Homo sapien
tctccaccctcccaatggaacaaac

SEQ ID NO: 5505512 - DNA, 25 bp, Homo sapien
gtatctttagagcagacggagtttc

SEQ ID NO: 5505513 - DNA, 25 bp, Homo sapien
aataaatattgggccttttcaagga

SEQ ID NO: 5505514 - DNA, 25 bp, Homo sapien
ctcccaatggaacaaactttgaggg

SEQ ID NO: 5505515 - DNA, 25 bp, Homo sapien
ccttttcaaggagagatacaacgtg

SEQ ID NO: 5505516 - DNA, 25 bp, Homo sapien
atacaacgtgtaatcctatatctgt

SEQ ID NO: 5505517 - DNA, 25 bp, Homo sapien
tagggccgtcgtacccgacacaaga

SEQ ID NO: 5505518 - DNA, 25 bp, Homo sapien
tcttgtgtcgggtacgacggcccta

SEQ ID NO: 5505519 - DNA, 25 bp, Homo sapien
atacaagtgtccttaaagactaaaa

SEQ ID NO: 5505520 - DNA, 25 bp, Homo sapien
gtaaataattggatttgtagaatat

SEQ ID NO: 5505521 - DNA, 25 bp, Homo sapien
agtaggttcagggtttagagtaaca

SEQ ID NO: 5505522 - DNA, 25 bp, Homo sapien
acttgggaagaataatgccttaacc

SEQ ID NO: 5505523 - DNA, 25 bp, Homo sapien
agtttaaacatcagtaggttcaggg

SEQ ID NO: 5505524 - DNA, 25 bp, Homo sapien
cgtgcctggccacttaacttttata

SEQ ID NO: 5505525 - DNA, 25 bp, Homo sapien
cagggtttagagtaacaaacatcat

SEQ ID NO: 5505526 - DNA, 25 bp, Homo sapien
ggcaacagatcctaatacaagtgtc

SEQ ID NO: 5505527 - DNA, 25 bp, Homo sapien
ctagatgacttgggaagaataatgc

SEQ ID NO: 5505528 - DNA, 25 bp, Homo sapien
gttttttactgaatgtcgacgcggc

SEQ ID NO: 5505529 - DNA, 25 bp, Homo sapien
tttataaggaggcaacagatcctaa

SEQ ID NO: 5505530 - DNA, 25 bp, Homo sapien
caggccttaaagaatcaccacgatt

SEQ ID NO: 5505531 - DNA, 25 bp, Homo sapien
tccaaaatgctaatggcagaacttc

SEQ ID NO: 5505532 - DNA, 25 bp, Homo sapien
atagaaatgctcaagtctcaaaaac

SEQ ID NO: 5505533 - DNA, 25 bp, Homo sapien
aacaagaaacttccagagaacctat

SEQ ID NO: 5505534 - DNA, 25 bp, Homo sapien
tcgcatccagcaacctaaagtactc

SEQ ID NO: 5505535 - DNA, 25 bp, Homo sapien
tggaaaaggtcgcctacaggcctta

SEQ ID NO: 5505536 - DNA, 25 bp, Homo sapien
gaccacaccacaactgtatcgcatc

SEQ ID NO: 5505537 - DNA, 25 bp, Homo sapien
taccgcacctctgggtacatccagc

SEQ ID NO: 5505538 - DNA, 25 bp, Homo sapien
caataaacttctggaaaaggtcgcc

SEQ ID NO: 5505539 - DNA, 25 bp, Homo sapien
cacttcaaattacggagatcccctc

SEQ ID NO: 5505540 - DNA, 25 bp, Homo sapien
tgtggttgctcatgtaaatacttgg

SEQ ID NO: 5505541 - DNA, 25 bp, Homo sapien
taataggtgcagagagacttgcacc

SEQ ID NO: 5505542 - DNA, 25 bp, Homo sapien
tcaacttaaacagccccctttggca

SEQ ID NO: 5505543 - DNA, 25 bp, Homo sapien
gattccaggcaagaggccaaactta

SEQ ID NO: 5505544 - DNA, 25 bp, Homo sapien
ccgtcgcagtgaaatttcagaattc

SEQ ID NO: 5505545 - DNA, 25 bp, Homo sapien
ctatacaactcaacagaataagaag

SEQ ID NO: 5505546 - DNA, 25 bp, Homo sapien
acccttccatggcaacagtagttat

SEQ ID NO: 5505547 - DNA, 25 bp, Homo sapien
gtgtctccaatccatgcagagcatt

SEQ ID NO: 5505548 - DNA, 25 bp, Homo sapien
aagaaggaagtatatacatcacttt

SEQ ID NO: 5505549 - DNA, 25 bp, Homo sapien
tagctgtatgtcaaagcggactgat

SEQ ID NO: 5505550 - DNA, 25 bp, Homo sapien
aaagcggactgataaaccagctcct

SEQ ID NO: 5505551 - DNA, 25 bp, Homo sapien
gccccctttggcataagtccacact

SEQ ID NO: 5505552 - DNA, 25 bp, Homo sapien
ggctgatctagtctggccttgactc

SEQ ID NO: 5505553 - DNA, 25 bp, Homo sapien
acttttaatgactgctgcaccaacc

SEQ ID NO: 5505554 - DNA, 25 bp, Homo sapien
tcccctctagaaaggaagctccatg

SEQ ID NO: 5505555 - DNA, 25 bp, Homo sapien
cacatgacacgcccctttgaaagtc

SEQ ID NO: 5505556 - DNA, 25 bp, Homo sapien
gaagctccatgagaatagaggccaa

SEQ ID NO: 5505557 - DNA, 25 bp, Homo sapien
gaatagaggccaaatctactcaaat

SEQ ID NO: 5505558 - DNA, 25 bp, Homo sapien
atgaggcacatgacacgcccctttg

SEQ ID NO: 5505559 - DNA, 25 bp, Homo sapien
actgctgcaccaacctattagaatc

SEQ ID NO: 5505560 - DNA, 25 bp, Homo sapien
ctctagaaaggaagctccatgagaa

SEQ ID NO: 5505561 - DNA, 25 bp, Homo sapien
gaaaggaagctccatgagaatagag

SEQ ID NO: 5505562 - DNA, 25 bp, Homo sapien
cttaggctgatctagtctggccttg

SEQ ID NO: 5505563 - DNA, 25 bp, Homo sapien
ctcaaatcactccaccttcccagca

SEQ ID NO: 5505564 - DNA, 25 bp, Homo sapien
tccgggaagctagatgctctcctag

SEQ ID NO: 5505565 - DNA, 25 bp, Homo sapien
gttgccaacccccgtctcctgactc

SEQ ID NO: 5505566 - DNA, 25 bp, Homo sapien
ccaccttcccagcacattgtttgtc

SEQ ID NO: 5505567 - DNA, 25 bp, Homo sapien
gctctcctagcactcggaacttgcc

SEQ ID NO: 5505568 - DNA, 25 bp, Homo sapien
cacccgtggttactgggtcaggttg

SEQ ID NO: 5505569 - DNA, 25 bp, Homo sapien
tactatcaatgaacggcagcaacgg

SEQ ID NO: 5505570 - DNA, 25 bp, Homo sapien
cccatcgccacatttgcacacccgt

SEQ ID NO: 5505571 - DNA, 25 bp, Homo sapien
gtcgtcgcgggttttgccattacta

SEQ ID NO: 5505572 - DNA, 25 bp, Homo sapien
gcactcggaacttgcccatcgccac

SEQ ID NO: 5505573 - DNA, 25 bp, Homo sapien
aaagtcaattccatggacagttagc

SEQ ID NO: 5505574 - DNA, 25 bp, Homo sapien
gcaattgaagatgattgcagtgagg

SEQ ID NO: 5505575 - DNA, 25 bp, Homo sapien
aaatctttggagaaagacagatctc

SEQ ID NO: 5505576 - DNA, 25 bp, Homo sapien
gggcagagcaattgaagatgattgc

SEQ ID NO: 5505577 - DNA, 25 bp, Homo sapien
gagaaagacagatctccacaaacac

SEQ ID NO: 5505578 - DNA, 25 bp, Homo sapien
tgaaatctttggagaaagacagatc

SEQ ID NO: 5505579 - DNA, 25 bp, Homo sapien
gggagttggatgaaatctttggaga

SEQ ID NO: 5505580 - DNA, 25 bp, Homo sapien
tgggaacctgttcctgagaacagcc

SEQ ID NO: 5505581 - DNA, 25 bp, Homo sapien
agttggatgaaatctttggagaaag

SEQ ID NO: 5505582 - DNA, 25 bp, Homo sapien
gaaagacagatctccacaaacaccc

SEQ ID NO: 5505583 - DNA, 25 bp, Homo sapien
tgtctaggtaagtcttcagggtggt

SEQ ID NO: 5505584 - DNA, 25 bp, Homo sapien
ggtgtctaggtaagtcttcagggtg

SEQ ID NO: 5505585 - DNA, 25 bp, Homo sapien
gggtgggcgggccacgcctcgagcg

SEQ ID NO: 5505586 - DNA, 25 bp, Homo sapien
cgctcgaggcgtggcccgcccaccc

SEQ ID NO: 5505587 - DNA, 25 bp, Homo sapien
ggtcgggtgggcgggccacgcctcg

SEQ ID NO: 5505588 - DNA, 25 bp, Homo sapien
cgaggcgtggcccgcccacccgacc

SEQ ID NO: 5505589 - DNA, 25 bp, Homo sapien
gaaaagtcggttagatataaggtta

SEQ ID NO: 5505590 - DNA, 25 bp, Homo sapien
taaccttatatctaaccgacttttc

SEQ ID NO: 5505591 - DNA, 25 bp, Homo sapien
ggtcgcccacttgtccgtccggtcg

SEQ ID NO: 5505592 - DNA, 25 bp, Homo sapien
cgaccggacggacaagtgggcgacc

SEQ ID NO: 5505593 - DNA, 25 bp, Homo sapien
cccagagcaccgagagagcccgcgg

SEQ ID NO: 5505594 - DNA, 25 bp, Homo sapien
ccgcgggctctctcggtgctctggg

SEQ ID NO: 5505595 - DNA, 25 bp, Homo sapien
gcgacgatctggggccccggggcgg

SEQ ID NO: 5505596 - DNA, 25 bp, Homo sapien
ccgccccggggccccagatcgtcgc

SEQ ID NO: 5505597 - DNA, 25 bp, Homo sapien
ggcgacgatctggggccccggggcg

SEQ ID NO: 5505598 - DNA, 25 bp, Homo sapien
cgccccggggccccagatcgtcgcc

SEQ ID NO: 5505599 - DNA, 25 bp, Homo sapien
tgactctgtcaaccaccgcctgctc

SEQ ID NO: 5505600 - DNA, 25 bp, Homo sapien
gtctgtccgtgagaaccccatcatc

SEQ ID NO: 5505601 - DNA, 25 bp, Homo sapien
ttgggcgtcccattgccatgctggt

SEQ ID NO: 5505602 - DNA, 25 bp, Homo sapien
ttgctcaagctcatcgagcggtccc

SEQ ID NO: 5505603 - DNA, 25 bp, Homo sapien
ccgcaccctgccacgctccatcacg

SEQ ID NO: 5505604 - DNA, 25 bp, Homo sapien
acatggcctacaacgtcatcacgcc

SEQ ID NO: 5505605 - DNA, 25 bp, Homo sapien
atcacgtacgtgagcatcatcatct

SEQ ID NO: 5505606 - DNA, 25 bp, Homo sapien
ggtgccagcatccacctggtgggtg

SEQ ID NO: 5505607 - DNA, 25 bp, Homo sapien
catggctctgtgagcgctgatgagg

SEQ ID NO: 5505608 - DNA, 25 bp, Homo sapien
acaagcccagtgttggggactactt

SEQ ID NO: 5505609 - DNA, 25 bp, Homo sapien
agccgagctgaaccggtctcttcct

SEQ ID NO: 5505610 - DNA, 25 bp, Homo sapien
ccccagtgaaagtacgtaccacgag

SEQ ID NO: 5505611 - DNA, 25 bp, Homo sapien
ctcgtggtacgtactttcactgggg

SEQ ID NO: 5505612 - DNA, 25 bp, Homo sapien
atgaagaaaaacggttgcctgtgat

SEQ ID NO: 5505613 - DNA, 25 bp, Homo sapien
catcgacatgaagaagagaaattct

SEQ ID NO: 5505614 - DNA, 25 bp, Homo sapien
atggaagtgacaaagtacgtgtgat

SEQ ID NO: 5505615 - DNA, 25 bp, Homo sapien
atggcagtaaagatcagacctcaaa

SEQ ID NO: 5505616 - DNA, 25 bp, Homo sapien
tccttatggcagatgctgatggagc

SEQ ID NO: 5505617 - DNA, 25 bp, Homo sapien
gatgatggatgaagctctgagctat

SEQ ID NO: 5505618 - DNA, 25 bp, Homo sapien
gagacagaaacgagatcctgcgttc

SEQ ID NO: 5505619 - DNA, 25 bp, Homo sapien
cggccgcagccctcgtactgatttc

SEQ ID NO: 5505620 - DNA, 25 bp, Homo sapien
ctcgaggagaaaagatccttatggc

SEQ ID NO: 5505621 - DNA, 25 bp, Homo sapien
tgagctatctagagaagagacagaa

SEQ ID NO: 5505622 - DNA, 25 bp, Homo sapien
cgtgtgataaccctggtgaagaatc

SEQ ID NO: 5505623 - DNA, 25 bp, Homo sapien
tgcttttatgtgaaccgacagagct

SEQ ID NO: 5505624 - DNA, 25 bp, Homo sapien
cctgaatcaggccacaaaactctcc

SEQ ID NO: 5505625 - DNA, 25 bp, Homo sapien
atgacgaaagccatgtgatcactgc

SEQ ID NO: 5505626 - DNA, 25 bp, Homo sapien
gtgaagtactgcgtggtgtatgata

SEQ ID NO: 5505627 - DNA, 25 bp, Homo sapien
ctccagattaacagaccccaactat

SEQ ID NO: 5505628 - DNA, 25 bp, Homo sapien
gaaccgacagagctttacaacatcc

SEQ ID NO: 5505629 - DNA, 25 bp, Homo sapien
tgcccttcgagtgaagaagaaaaat

SEQ ID NO: 5505630 - DNA, 25 bp, Homo sapien
gtgtatgataacaacagcagcaccc

SEQ ID NO: 5505631 - DNA, 25 bp, Homo sapien
ggatgtccgttccaaatgggagtat

SEQ ID NO: 5505632 - DNA, 25 bp, Homo sapien
cagtctgcacccaagaggtggaaga

SEQ ID NO: 5505633 - DNA, 25 bp, Homo sapien
gttccaaatgggagtatgacgaaag

SEQ ID NO: 5505634 - DNA, 25 bp, Homo sapien
acccctacagacttccattgaaaca

SEQ ID NO: 5505635 - DNA, 25 bp, Homo sapien
tgtttcaatggaagtctgtaggggt

SEQ ID NO: 5505636 - DNA, 25 bp, Homo sapien
tcaaaccctgagcaatgagatcatc

SEQ ID NO: 5505637 - DNA, 25 bp, Homo sapien
agaatggggacgcctatggctttta

SEQ ID NO: 5505638 - DNA, 25 bp, Homo sapien
atcatcatgtttgtggctggctttt

SEQ ID NO: 5505639 - DNA, 25 bp, Homo sapien
acccacagctgatcacgaaaccttc

SEQ ID NO: 5505640 - DNA, 25 bp, Homo sapien
agctggctatggctctcaaaccctg

SEQ ID NO: 5505641 - DNA, 25 bp, Homo sapien
ttggagggttacctcactgccccac

SEQ ID NO: 5505642 - DNA, 25 bp, Homo sapien
catactggatgcctgctgaaaagac

SEQ ID NO: 5505643 - DNA, 25 bp, Homo sapien
gcctgctgaaaagacagtacaagtc

SEQ ID NO: 5505644 - DNA, 25 bp, Homo sapien
catgaatgaccactacacaaacctc

SEQ ID NO: 5505645 - DNA, 25 bp, Homo sapien
gccgaaacctgcaggagtctactat

SEQ ID NO: 5505646 - DNA, 25 bp, Homo sapien
aaaaatgtaatggacaagaatgggg

SEQ ID NO: 5505647 - DNA, 25 bp, Homo sapien
caaggatatacccttcgtcatcaga

SEQ ID NO: 5505648 - DNA, 25 bp, Homo sapien
tctgatgacgaagggtatatccttg

SEQ ID NO: 5505649 - DNA, 25 bp, Homo sapien
gattgccactgggtcccccgtgtca

SEQ ID NO: 5505650 - DNA, 25 bp, Homo sapien
tggaacagttcaatcctgggctgcg

SEQ ID NO: 5505651 - DNA, 25 bp, Homo sapien
cccgtgtcaactgaactgggacatg

SEQ ID NO: 5505652 - DNA, 25 bp, Homo sapien
gagaaagctgtaaacgctatgatcc

SEQ ID NO: 5505653 - DNA, 25 bp, Homo sapien
gcctactacgatggagtggccaaga

SEQ ID NO: 5505654 - DNA, 25 bp, Homo sapien
gctgccgggcttaagccctccggga

SEQ ID NO: 5505655 - DNA, 25 bp, Homo sapien
ctaccggaatgttatggaacagttc

SEQ ID NO: 5505656 - DNA, 25 bp, Homo sapien
gaccaaagacacaagctcgagtttc

SEQ ID NO: 5505657 - DNA, 25 bp, Homo sapien
aactagtgcacttaagttggggagg

SEQ ID NO: 5505658 - DNA, 25 bp, Homo sapien
tatgatcctggcaggaaaagcctac

SEQ ID NO: 5505659 - DNA, 25 bp, Homo sapien
ggaatcagtgacccgtgctgtcctg

SEQ ID NO: 5505660 - DNA, 25 bp, Homo sapien
tgcgaccgacgtgcacgtctggtac

SEQ ID NO: 5505661 - DNA, 25 bp, Homo sapien
gtaccagacgtgcacgtcggtcgca

SEQ ID NO: 5505662 - DNA, 25 bp, Homo sapien
acccggaagcttagaataagagttc

SEQ ID NO: 5505663 - DNA, 25 bp, Homo sapien
tccagtcctaagagtacaaatccaa

SEQ ID NO: 5505664 - DNA, 25 bp, Homo sapien
acgcctggcctattctggatcctta

SEQ ID NO: 5505665 - DNA, 25 bp, Homo sapien
agaaatagcagcactggacaatccc

SEQ ID NO: 5505666 - DNA, 25 bp, Homo sapien
gagttagaatacttagatggttccc

SEQ ID NO: 5505667 - DNA, 25 bp, Homo sapien
atccaaagatccaacaacatgtagt

SEQ ID NO: 5505668 - DNA, 25 bp, Homo sapien
tggaattgcaggtatgagcaaccac

SEQ ID NO: 5505669 - DNA, 25 bp, Homo sapien
gaatgaaggccctgatcttagcccc

SEQ ID NO: 5505670 - DNA, 25 bp, Homo sapien
tactgaatagtaataggtccgtctc

SEQ ID NO: 5505671 - DNA, 25 bp, Homo sapien
catatgccaaagtggcgctgaagtg

SEQ ID NO: 5505672 - DNA, 25 bp, Homo sapien
ttaaaatgctggaacttgatgtctc

SEQ ID NO: 5505673 - DNA, 25 bp, Homo sapien
acgttacgactcattgttagtcaca

SEQ ID NO: 5505674 - DNA, 25 bp, Homo sapien
tgtgactaacaatgagtcgtaacgt

SEQ ID NO: 5505675 - DNA, 25 bp, Homo sapien
aggcgttccgtcactgcccgtgaga

SEQ ID NO: 5505676 - DNA, 25 bp, Homo sapien
tctcacgggcagtgacggaacgcct

SEQ ID NO: 5505677 - DNA, 25 bp, Homo sapien
tcggaggtctggtgaacctcggacc

SEQ ID NO: 5505678 - DNA, 25 bp, Homo sapien
ggtccgaggttcaccagacctccga

SEQ ID NO: 5505679 - DNA, 25 bp, Homo sapien
ctcagtcggggggcggtccgctcgg

SEQ ID NO: 5505680 - DNA, 25 bp, Homo sapien
ccgagcggaccgccccccgactgag

SEQ ID NO: 5505681 - DNA, 25 bp, Homo sapien
tcggggggcggtccgctcggcgcgg

SEQ ID NO: 5505682 - DNA, 25 bp, Homo sapien
ccgcgccgagcggaccgccccccga

SEQ ID NO: 5505683 - DNA, 25 bp, Homo sapien
gtcggggggcggtccgctcggcgcg

SEQ ID NO: 5505684 - DNA, 25 bp, Homo sapien
cgcgccgagcggaccgccccccgac

SEQ ID NO: 5505685 - DNA, 25 bp, Homo sapien
agtcggggggcggtccgctcggcgc

SEQ ID NO: 5505686 - DNA, 25 bp, Homo sapien
gcgccgagcggaccgccccccgact

SEQ ID NO: 5505687 - DNA, 25 bp, Homo sapien
aactcttgggcatccgagaccgtcg

SEQ ID NO: 5505688 - DNA, 25 bp, Homo sapien
cgacggtctcggatgcccaagagtt

SEQ ID NO: 5505689 - DNA, 25 bp, Homo sapien
accgtaactgtctcaccaaaactgt

SEQ ID NO: 5505690 - DNA, 25 bp, Homo sapien
acagttttggtgagacagttacggt

SEQ ID NO: 5505691 - DNA, 25 bp, Homo sapien
cgggacagtggctccggattgggtt

SEQ ID NO: 5505692 - DNA, 25 bp, Homo sapien
aacccaatccggagccactgtcccg

SEQ ID NO: 5505693 - DNA, 25 bp, Homo sapien
cccgccagtagtcgtactgaaaagt

SEQ ID NO: 5505694 - DNA, 25 bp, Homo sapien
acttttcagtacgactactggcggg

SEQ ID NO: 5505695 - DNA, 25 bp, Homo sapien
ctcgcccttggtttctggggaagcc

SEQ ID NO: 5505696 - DNA, 25 bp, Homo sapien
tccgcgagaactgccctcgcgctgc

SEQ ID NO: 5505697 - DNA, 25 bp, Homo sapien
tacaatggactccaccagagggtct

SEQ ID NO: 5505698 - DNA, 25 bp, Homo sapien
cgagaggtggaaactctcagactct

SEQ ID NO: 5505699 - DNA, 25 bp, Homo sapien
gctccgcgagtcgctcgcccttggt

SEQ ID NO: 5505700 - DNA, 25 bp, Homo sapien
tgtgtctctggtggtttgcctaaac

SEQ ID NO: 5505701 - DNA, 25 bp, Homo sapien
ggacgggcagttccctgtgtctctg

SEQ ID NO: 5505702 - DNA, 25 bp, Homo sapien
agcagtctgctgccccccgacatgt

SEQ ID NO: 5505703 - DNA, 25 bp, Homo sapien
cagagggtcttcaaggagttaaagt

SEQ ID NO: 5505704 - DNA, 25 bp, Homo sapien
ggctggggactataaatccgcgaga

SEQ ID NO: 5505705 - DNA, 25 bp, Homo sapien
ctcgcgctgccatccagctgggtag

SEQ ID NO: 5505706 - DNA, 25 bp, Homo sapien
gacagggtcttcttaaagatcggct

SEQ ID NO: 5505707 - DNA, 25 bp, Homo sapien
caacccagaaataagggcttccctc

SEQ ID NO: 5505708 - DNA, 25 bp, Homo sapien
aggaactaagtgatggcaattgcta

SEQ ID NO: 5505709 - DNA, 25 bp, Homo sapien
ataaaacctctactaaggcaaaagc

SEQ ID NO: 5505710 - DNA, 25 bp, Homo sapien
aggcaaaagctttatcagcccgagc

SEQ ID NO: 5505711 - DNA, 25 bp, Homo sapien
attttgacacacaggcaactgagca

SEQ ID NO: 5505712 - DNA, 25 bp, Homo sapien
atttaggtgtttgcctgctagtttc

SEQ ID NO: 5505713 - DNA, 25 bp, Homo sapien
cctcctgaaggtgttgacataaaac

SEQ ID NO: 5505714 - DNA, 25 bp, Homo sapien
agatcggctatcaacttcagaaata

SEQ ID NO: 5505715 - DNA, 25 bp, Homo sapien
ttctgccttcgccaggaactaagtg

SEQ ID NO: 5505716 - DNA, 25 bp, Homo sapien
tatcagcccgagctaggccttcaac

SEQ ID NO: 5505717 - DNA, 25 bp, Homo sapien
gaggagtaaagtaggtcgtgtaata

SEQ ID NO: 5505718 - DNA, 25 bp, Homo sapien
tattacacgacctactttactcctc

SEQ ID NO: 5505719 - DNA, 25 bp, Homo sapien
acagaccgcgatggtgggtgtctgg

SEQ ID NO: 5505720 - DNA, 25 bp, Homo sapien
ccagacacccaccatcgcggtctgt

SEQ ID NO: 5505721 - DNA, 25 bp, Homo sapien
tatcgtgagaccgcactcctgccta

SEQ ID NO: 5505722 - DNA, 25 bp, Homo sapien
ggacacagcagggattcatactgac

SEQ ID NO: 5505723 - DNA, 25 bp, Homo sapien
ggagtacctgctgcagcacaagatc

SEQ ID NO: 5505724 - DNA, 25 bp, Homo sapien
tcactccacaaagatgggcctgcca

SEQ ID NO: 5505725 - DNA, 25 bp, Homo sapien
tcctggagactctctgcacgctggg

SEQ ID NO: 5505726 - DNA, 25 bp, Homo sapien
ccaccatcccagcgctcctgttccc

SEQ ID NO: 5505727 - DNA, 25 bp, Homo sapien
ttcatactgacaagagccaggcatg

SEQ ID NO: 5505728 - DNA, 25 bp, Homo sapien
acgggcactgtggctgtctcactta

SEQ ID NO: 5505729 - DNA, 25 bp, Homo sapien
cctgacactgaaagtggcagttcgg

SEQ ID NO: 5505730 - DNA, 25 bp, Homo sapien
cagtgaactgttatcgtgagaccgc

SEQ ID NO: 5505731 - DNA, 25 bp, Homo sapien
gcagcacaagatcctggagactctc

SEQ ID NO: 5505732 - DNA, 25 bp, Homo sapien
gacagtttgttctgggagagcctca

SEQ ID NO: 5505733 - DNA, 25 bp, Homo sapien
tctttcagaacggtgacaagtacga

SEQ ID NO: 5505734 - DNA, 25 bp, Homo sapien
tggtcaggagacaccttctctggac

SEQ ID NO: 5505735 - DNA, 25 bp, Homo sapien
tttcgatatgaaggagaatggaaag

SEQ ID NO: 5505736 - DNA, 25 bp, Homo sapien
gacggctccacctacaagggacagt

SEQ ID NO: 5505737 - DNA, 25 bp, Homo sapien
gagtacaaagccggcggatgttatg

SEQ ID NO: 5505738 - DNA, 25 bp, Homo sapien
cacagcgacgtcttcagtggactgg

SEQ ID NO: 5505739 - DNA, 25 bp, Homo sapien
gacaagtgtaccagggctccttcca

SEQ ID NO: 5505740 - DNA, 25 bp, Homo sapien
agagcctcaaggctacggcgtcatg

SEQ ID NO: 5505741 - DNA, 25 bp, Homo sapien
gctccttccatgacaacaagaggca

SEQ ID NO: 5505742 - DNA, 25 bp, Homo sapien
taaagatggcagttattacgaaggg

SEQ ID NO: 5505743 - DNA, 25 bp, Homo sapien
gatatagaaaaaattgtagaagaac

SEQ ID NO: 5505744 - DNA, 25 bp, Homo sapien
tcgctggatcaatcgacttgcctac

SEQ ID NO: 5505745 - DNA, 25 bp, Homo sapien
agtggtgctcaacgtgtacgacatg

SEQ ID NO: 5505746 - DNA, 25 bp, Homo sapien
tcaggaattgaagtctatggcagag

SEQ ID NO: 5505747 - DNA, 25 bp, Homo sapien
cagagaatttgcttatggtggccat

SEQ ID NO: 5505748 - DNA, 25 bp, Homo sapien
tttagggagcacggacttcctagaa

SEQ ID NO: 5505749 - DNA, 25 bp, Homo sapien
ggggctaaccagttagtggtgctca

SEQ ID NO: 5505750 - DNA, 25 bp, Homo sapien
gtacgacatgtattggatgaacgaa

SEQ ID NO: 5505751 - DNA, 25 bp, Homo sapien
agaatacaaaggcaatgcttatcat

SEQ ID NO: 5505752 - DNA, 25 bp, Homo sapien
gcagccctgcagtctagtgtcagcc

SEQ ID NO: 5505753 - DNA, 25 bp, Homo sapien
tgggaaagagattcctcgctggatc

SEQ ID NO: 5505754 - DNA, 25 bp, Homo sapien
atggagtcgccgcccacgggcggac

SEQ ID NO: 5505755 - DNA, 25 bp, Homo sapien
gtccgcccgtgggcggcgactccat

SEQ ID NO: 5505756 - DNA, 25 bp, Homo sapien
tagaatcttcttattacactaaaag

SEQ ID NO: 5505757 - DNA, 25 bp, Homo sapien
cttttagtgtaataagaagattcta

SEQ ID NO: 5505758 - DNA, 25 bp, Homo sapien
agggagctggttcaagatcacagtt

SEQ ID NO: 5505759 - DNA, 25 bp, Homo sapien
gtggagaatgccagcatcgcctatg

SEQ ID NO: 5505760 - DNA, 25 bp, Homo sapien
accaaaggagatttagcagtaggtc

SEQ ID NO: 5505761 - DNA, 25 bp, Homo sapien
taaaatacaatgagaagtggctgct

SEQ ID NO: 5505762 - DNA, 25 bp, Homo sapien
aacccacgttaacatggagagagag

SEQ ID NO: 5505763 - DNA, 25 bp, Homo sapien
gaatgaatgcagtgtacccttcgtc

SEQ ID NO: 5505764 - DNA, 25 bp, Homo sapien
aagagagccctataaggacattggt

SEQ ID NO: 5505765 - DNA, 25 bp, Homo sapien
atcgcctatgcactgaagaatgtca

SEQ ID NO: 5505766 - DNA, 25 bp, Homo sapien
atgcagcaatgcatggtgcccacat

SEQ ID NO: 5505767 - DNA, 25 bp, Homo sapien
tcaggacacactacgggtcacactg

SEQ ID NO: 5505768 - DNA, 25 bp, Homo sapien
gaagagcaagatgttgggatattta

SEQ ID NO: 5505769 - DNA, 25 bp, Homo sapien
ctattttaggaaacttggtgatcag

SEQ ID NO: 5505770 - DNA, 25 bp, Homo sapien
tttgcagcctatggatttgctccca

SEQ ID NO: 5505771 - DNA, 25 bp, Homo sapien
aggccatacttcaagagtgtgctgt

SEQ ID NO: 5505772 - DNA, 25 bp, Homo sapien
ctccccgaggacacctcgcaccgga

SEQ ID NO: 5505773 - DNA, 25 bp, Homo sapien
atacttcaagagtgtgctgtggtgg

SEQ ID NO: 5505774 - DNA, 25 bp, Homo sapien
tattctcaccttcagctggcacaac

SEQ ID NO: 5505775 - DNA, 25 bp, Homo sapien
ttggagttttgctggctattttagg

SEQ ID NO: 5505776 - DNA, 25 bp, Homo sapien
ccaaggccatacttcaagagtgtgc

SEQ ID NO: 5505777 - DNA, 25 bp, Homo sapien
acggggaactttgcagcctatggat

SEQ ID NO: 5505778 - DNA, 25 bp, Homo sapien
ttaggaaacttggtgatcagtattt

SEQ ID NO: 5505779 - DNA, 25 bp, Homo sapien
aagagcacccaaggccatacttcaa

SEQ ID NO: 5505780 - DNA, 25 bp, Homo sapien
aaggaaagagccgttttcttcactc

SEQ ID NO: 5505781 - DNA, 25 bp, Homo sapien
aagtctacaaatccagcgacgtaac

SEQ ID NO: 5505782 - DNA, 25 bp, Homo sapien
gcatcagtgctgtgtgtaagataac

SEQ ID NO: 5505783 - DNA, 25 bp, Homo sapien
gagtcctggtgaactcctggaccgc

SEQ ID NO: 5505784 - DNA, 25 bp, Homo sapien
tggaccgcttctatcttggggtgat

SEQ ID NO: 5505785 - DNA, 25 bp, Homo sapien
aggggagcaatggtaatctcactct

SEQ ID NO: 5505786 - DNA, 25 bp, Homo sapien
tccagctcatcggcgttgaggtgca

SEQ ID NO: 5505787 - DNA, 25 bp, Homo sapien
agcgacgtaacctgtgcacatctgc

SEQ ID NO: 5505788 - DNA, 25 bp, Homo sapien
ggtaggcctttcgggcatcaaaatc

SEQ ID NO: 5505789 - DNA, 25 bp, Homo sapien
catggcctcttttgcaaggggagca

SEQ ID NO: 5505790 - DNA, 25 bp, Homo sapien
ggtctggtctgttgctcacctccaa

SEQ ID NO: 5505791 - DNA, 25 bp, Homo sapien
gttctgacctatactttgtctacgt

SEQ ID NO: 5505792 - DNA, 25 bp, Homo sapien
acgtagacaaagtataggtcagaac

SEQ ID NO: 5505793 - DNA, 25 bp, Homo sapien
gcatgccactaagccccatggccct

SEQ ID NO: 5505794 - DNA, 25 bp, Homo sapien
gtgcccggtgtgtccctcaggactt

SEQ ID NO: 5505795 - DNA, 25 bp, Homo sapien
ggggaactggagatcactttgtctc

SEQ ID NO: 5505796 - DNA, 25 bp, Homo sapien
gctgcccactgcttctccgggtccc

SEQ ID NO: 5505797 - DNA, 25 bp, Homo sapien
gcctccgcctgcggaggatgcacgt

SEQ ID NO: 5505798 - DNA, 25 bp, Homo sapien
caccgtgaggcagatcatcctgcac

SEQ ID NO: 5505799 - DNA, 25 bp, Homo sapien
cggatcctgcccgtctgcctcccgg

SEQ ID NO: 5505800 - DNA, 25 bp, Homo sapien
aactcatccgactaccaggtgcacc

SEQ ID NO: 5505801 - DNA, 25 bp, Homo sapien
agctcagtgtccccgtgaccctctc

SEQ ID NO: 5505802 - DNA, 25 bp, Homo sapien
ccctcaggactttgcagccagggtg

SEQ ID NO: 5505803 - DNA, 25 bp, Homo sapien
cgtgaccctctccagccggatcctg

SEQ ID NO: 5505804 - DNA, 25 bp, Homo sapien
ggtggcccagcttgccgatctcaag

SEQ ID NO: 5505805 - DNA, 25 bp, Homo sapien
taccgcttttaaagaagcatgccgc

SEQ ID NO: 5505806 - DNA, 25 bp, Homo sapien
tcacttcatacttggatggttgcac

SEQ ID NO: 5505807 - DNA, 25 bp, Homo sapien
gaagaggaactctgtgttagctgtt

SEQ ID NO: 5505808 - DNA, 25 bp, Homo sapien
gttaggatgacacaatagagaattt

SEQ ID NO: 5505809 - DNA, 25 bp, Homo sapien
acccacttagcacaaaagagtcacc

SEQ ID NO: 5505810 - DNA, 25 bp, Homo sapien
tttcctcttacagtggtggcccagc

SEQ ID NO: 5505811 - DNA, 25 bp, Homo sapien
aaagtttcttcgaagaggaactctg

SEQ ID NO: 5505812 - DNA, 25 bp, Homo sapien
aaaagagtcaccacctcatgccatc

SEQ ID NO: 5505813 - DNA, 25 bp, Homo sapien
gaggggctccttacttcccagatgg

SEQ ID NO: 5505814 - DNA, 25 bp, Homo sapien
agcatgccgcttacatataggtcat

SEQ ID NO: 5505815 - DNA, 25 bp, Homo sapien
aggtcaaggatacaaaatagcagat

SEQ ID NO: 5505816 - DNA, 25 bp, Homo sapien
taaggagctaaaatacacagaacga

SEQ ID NO: 5505817 - DNA, 25 bp, Homo sapien
agcagatatgtaggatgaacaagtt

SEQ ID NO: 5505818 - DNA, 25 bp, Homo sapien
aatgtccatcgatgggtgaggaatg

SEQ ID NO: 5505819 - DNA, 25 bp, Homo sapien
accacaacatagatggacctgaagg

SEQ ID NO: 5505820 - DNA, 25 bp, Homo sapien
gtgaggaatggctaaagaaattatg

SEQ ID NO: 5505821 - DNA, 25 bp, Homo sapien
taaatgagataagccagacaccaag

SEQ ID NO: 5505822 - DNA, 25 bp, Homo sapien
gtataccagcaaaagtaggatttac

SEQ ID NO: 5505823 - DNA, 25 bp, Homo sapien
acagaacgaaacagtggttactact

SEQ ID NO: 5505824 - DNA, 25 bp, Homo sapien
caagggagaggaaatcaccaccttg

SEQ ID NO: 5505825 - DNA, 25 bp, Homo sapien
ttttgaagattctgggtgcacagca

SEQ ID NO: 5505826 - DNA, 25 bp, Homo sapien
gtggtgggaatttaagcataaattc

SEQ ID NO: 5505827 - DNA, 25 bp, Homo sapien
ttagagaaccaaatgctgtttatga

SEQ ID NO: 5505828 - DNA, 25 bp, Homo sapien
tctcataactttcttggggtcaatt

SEQ ID NO: 5505829 - DNA, 25 bp, Homo sapien
gtaataatacccagcttgagacctc

SEQ ID NO: 5505830 - DNA, 25 bp, Homo sapien
aaagaaaagtgtttaaattgatctc

SEQ ID NO: 5505831 - DNA, 25 bp, Homo sapien
ttaaagctagagagtctgaaaagag

SEQ ID NO: 5505832 - DNA, 25 bp, Homo sapien
tttagaatactatgggggctgattt

SEQ ID NO: 5505833 - DNA, 25 bp, Homo sapien
ttatgatacagtttagtagagttgt

SEQ ID NO: 5505834 - DNA, 25 bp, Homo sapien
tacgtgatttcagaagtaatatgct

SEQ ID NO: 5505835 - DNA, 25 bp, Homo sapien
tgtaagagaaattatgagcatagtt

SEQ ID NO: 5505836 - DNA, 25 bp, Homo sapien
gcttgagacctcatgtacttgttgc

SEQ ID NO: 5505837 - DNA, 25 bp, Homo sapien
aggtacgttcttggagacacagcaa

SEQ ID NO: 5505838 - DNA, 25 bp, Homo sapien
agaagatggccaagtcccatgtttt

SEQ ID NO: 5505839 - DNA, 25 bp, Homo sapien
atgttttcttaagtgggatgggtgg

SEQ ID NO: 5505840 - DNA, 25 bp, Homo sapien
atctctgggtgttgtgattatgcac

SEQ ID NO: 5505841 - DNA, 25 bp, Homo sapien
aaagaagttaaaagtatgcagtcag

SEQ ID NO: 5505842 - DNA, 25 bp, Homo sapien
gtcagatatgtgactaagctctgtg

SEQ ID NO: 5505843 - DNA, 25 bp, Homo sapien
tcctataaaggaagttagatccaaa

SEQ ID NO: 5505844 - DNA, 25 bp, Homo sapien
gacacttttgagcaatgaagatagt

SEQ ID NO: 5505845 - DNA, 25 bp, Homo sapien
tatctggaagaatacgttgaaattt

SEQ ID NO: 5505846 - DNA, 25 bp, Homo sapien
cttggtttggaaattggtaagcaat

SEQ ID NO: 5505847 - DNA, 25 bp, Homo sapien
tccaaaatgttgatcagattgagtt

SEQ ID NO: 5505848 - DNA, 25 bp, Homo sapien
acagttaacaaaccagggaagtgtg

SEQ ID NO: 5505849 - DNA, 25 bp, Homo sapien
gggtgagctgcagagttacaacagc

SEQ ID NO: 5505850 - DNA, 25 bp, Homo sapien
cattgaaaagtgagtgtccattgca

SEQ ID NO: 5505851 - DNA, 25 bp, Homo sapien
tggtactggaaatcacaacaaagaa

SEQ ID NO: 5505852 - DNA, 25 bp, Homo sapien
attctttaagcaaaggcagagcagt

SEQ ID NO: 5505853 - DNA, 25 bp, Homo sapien
tgccgggcactatcatgggtgcttt

SEQ ID NO: 5505854 - DNA, 25 bp, Homo sapien
tctccagataggttaaaaaggccgc

SEQ ID NO: 5505855 - DNA, 25 bp, Homo sapien
tgagcagaaccttgtacagtgaaac

SEQ ID NO: 5505856 - DNA, 25 bp, Homo sapien
caggaattcagagagtaaccaactt

SEQ ID NO: 5505857 - DNA, 25 bp, Homo sapien
atgtcatcatcagtacgaggtccac

SEQ ID NO: 5505858 - DNA, 25 bp, Homo sapien
gccaggccaccagagcatttgaaaa

SEQ ID NO: 5505859 - DNA, 25 bp, Homo sapien
gcctctccactagctgccctggtct

SEQ ID NO: 5505860 - DNA, 25 bp, Homo sapien
caaccagagaaggtataagtctctt

SEQ ID NO: 5505861 - DNA, 25 bp, Homo sapien
gcctgagggcttagcacatcgccta

SEQ ID NO: 5505862 - DNA, 25 bp, Homo sapien
tccgctcctcacgtgtcctgtattc

SEQ ID NO: 5505863 - DNA, 25 bp, Homo sapien
tcccaaggtaggattaagtgcctct

SEQ ID NO: 5505864 - DNA, 25 bp, Homo sapien
tttcacctttgtagcctgagggctt

SEQ ID NO: 5505865 - DNA, 25 bp, Homo sapien
ttcacacctccctcccacacccagc

SEQ ID NO: 5505866 - DNA, 25 bp, Homo sapien
aacaacagctattctaagaagtgtc

SEQ ID NO: 5505867 - DNA, 25 bp, Homo sapien
aagaagtgtctcttgcccaaccaga

SEQ ID NO: 5505868 - DNA, 25 bp, Homo sapien
agtgcttcaagatttgtacttcccc

SEQ ID NO: 5505869 - DNA, 25 bp, Homo sapien
tgggtggactcaggcatattcccta

SEQ ID NO: 5505870 - DNA, 25 bp, Homo sapien
gtagagactccggtgggtaagacga

SEQ ID NO: 5505871 - DNA, 25 bp, Homo sapien
tcgtcttacccaccggagtctctac

SEQ ID NO: 5505872 - DNA, 25 bp, Homo sapien
gcgtgccaaggacggccaacaccga

SEQ ID NO: 5505873 - DNA, 25 bp, Homo sapien
tcggtgttggccgtccttggcacgc

SEQ ID NO: 5505874 - DNA, 25 bp, Homo sapien
cgtcgccattgcgtgccaaggacgg

SEQ ID NO: 5505875 - DNA, 25 bp, Homo sapien
ccgtccttggcacgcaatggcgacg

SEQ ID NO: 5505876 - DNA, 25 bp, Homo sapien
gtgaatgctgttcattattgataat

SEQ ID NO: 5505877 - DNA, 25 bp, Homo sapien
attatcaataatgaacagcattcac

SEQ ID NO: 5505878 - DNA, 25 bp, Homo sapien
gacccccaaggccagaccccgcgtc

SEQ ID NO: 5505879 - DNA, 25 bp, Homo sapien
gacgcggggtctggccttgggggtc

SEQ ID NO: 5505880 - DNA, 25 bp, Homo sapien
cgcgtaaccgtgaccgccgccgacg

SEQ ID NO: 5505881 - DNA, 25 bp, Homo sapien
cgtcggcggcggtcacggttacgcg

SEQ ID NO: 5505882 - DNA, 25 bp, Homo sapien
cccactgtccgtatgtggatgacgt

SEQ ID NO: 5505883 - DNA, 25 bp, Homo sapien
acgtcatccacatacggacagtggg

SEQ ID NO: 5505884 - DNA, 25 bp, Homo sapien
ctgaagacggaacggctccaacagt

SEQ ID NO: 5505885 - DNA, 25 bp, Homo sapien
actgttggagccgttccgtcttcag

SEQ ID NO: 5505886 - DNA, 25 bp, Homo sapien
tttagatactgtaaaaatcactcca

SEQ ID NO: 5505887 - DNA, 25 bp, Homo sapien
tggagtgatttttacagtatctaaa

SEQ ID NO: 5505888 - DNA, 25 bp, Homo sapien
gtacataacagtggtttctggtccc

SEQ ID NO: 5505889 - DNA, 25 bp, Homo sapien
aaaggctaaccattcatgggtccca

SEQ ID NO: 5505890 - DNA, 25 bp, Homo sapien
tctgacatcaagagagataaaaaaa

SEQ ID NO: 5505891 - DNA, 25 bp, Homo sapien
aaaaacaatgtgaaggaaggttcta

SEQ ID NO: 5505892 - DNA, 25 bp, Homo sapien
gaccaactaagagatccacttttgc

SEQ ID NO: 5505893 - DNA, 25 bp, Homo sapien
cacatggaggtgaaacctcagaaca

SEQ ID NO: 5505894 - DNA, 25 bp, Homo sapien
ttgcaccaatgaaacacatggaggt

SEQ ID NO: 5505895 - DNA, 25 bp, Homo sapien
caaatataccagtgaacatactatc

SEQ ID NO: 5505896 - DNA, 25 bp, Homo sapien
tcagaacaagcggagcttaagctca

SEQ ID NO: 5505897 - DNA, 25 bp, Homo sapien
aggaaggttctaagagtgaccaaat

SEQ ID NO: 5505898 - DNA, 25 bp, Homo sapien
aaagaaagaattaagtgaccaacta

SEQ ID NO: 5505899 - DNA, 25 bp, Homo sapien
gaagttatagtcctctacaattccc

SEQ ID NO: 5505900 - DNA, 25 bp, Homo sapien
gggaattgtagaggactataacttc

SEQ ID NO: 5505901 - DNA, 25 bp, Homo sapien
acaccaacccaatgaacttacttcg

SEQ ID NO: 5505902 - DNA, 25 bp, Homo sapien
cgaagtaagttcattgggttggtgt

SEQ ID NO: 5505903 - DNA, 25 bp, Homo sapien
taacctaaagagtgatagtatttag

SEQ ID NO: 5505904 - DNA, 25 bp, Homo sapien
ctaaatactatcactctttaggtta

SEQ ID NO: 5505905 - DNA, 25 bp, Homo sapien
ggtttaacctaaagagtgatagtat

SEQ ID NO: 5505906 - DNA, 25 bp, Homo sapien
atactatcactctttaggttaaacc

SEQ ID NO: 5505907 - DNA, 25 bp, Homo sapien
acctaaagtagattacctagcatcg

SEQ ID NO: 5505908 - DNA, 25 bp, Homo sapien
cgatgctaggtaatctactttaggt

SEQ ID NO: 5505909 - DNA, 25 bp, Homo sapien
ggtgggacagggatcgtccttctgg

SEQ ID NO: 5505910 - DNA, 25 bp, Homo sapien
ccagaaggacgatccctgtcccacc

SEQ ID NO: 5505911 - DNA, 25 bp, Homo sapien
taatgtacaaactttaatgttcaat

SEQ ID NO: 5505912 - DNA, 25 bp, Homo sapien
attgaacattaaagtttgtacatta

SEQ ID NO: 5505913 - DNA, 25 bp, Homo sapien
aatgtacaaactttaatgttcaatg

SEQ ID NO: 5505914 - DNA, 25 bp, Homo sapien
cattgaacattaaagtttgtacatt

SEQ ID NO: 5505915 - DNA, 25 bp, Homo sapien
ttccttcgaccatgtgggaaaggag

SEQ ID NO: 5505916 - DNA, 25 bp, Homo sapien
ctcctttcccacatggtcgaaggaa

SEQ ID NO: 5505917 - DNA, 25 bp, Homo sapien
tgcacacaacttggttcagatatat

SEQ ID NO: 5505918 - DNA, 25 bp, Homo sapien
gggcacaccagtattcagggcaaaa

SEQ ID NO: 5505919 - DNA, 25 bp, Homo sapien
atactatgaggtaaagacccgaaac

SEQ ID NO: 5505920 - DNA, 25 bp, Homo sapien
cagggaggctatgctgattctaact

SEQ ID NO: 5505921 - DNA, 25 bp, Homo sapien
ctctgctctgtccctgaagtcactc

SEQ ID NO: 5505922 - DNA, 25 bp, Homo sapien
cttaggctggggtattaatcaaaat

SEQ ID NO: 5505923 - DNA, 25 bp, Homo sapien
taccaccactggaaacagagagaga

SEQ ID NO: 5505924 - DNA, 25 bp, Homo sapien
ttcagggcaaaatctatgcagtgtc

SEQ ID NO: 5505925 - DNA, 25 bp, Homo sapien
tcaggattaaccccagctttcttta

SEQ ID NO: 5505926 - DNA, 25 bp, Homo sapien
cacggcatacctgggcacaccagta

SEQ ID NO: 5505927 - DNA, 25 bp, Homo sapien
tataactcttaggctggggtattaa

SEQ ID NO: 5505928 - DNA, 25 bp, Homo sapien
cgattgacacttaacaaaaatcctc

SEQ ID NO: 5505929 - DNA, 25 bp, Homo sapien
tacattaaagcctgtggtctgaata

SEQ ID NO: 5505930 - DNA, 25 bp, Homo sapien
tgcaaacacatctaaccttcctggg

SEQ ID NO: 5505931 - DNA, 25 bp, Homo sapien
tgaccttaggtgatttgccggcctc

SEQ ID NO: 5505932 - DNA, 25 bp, Homo sapien
ctcttgggatttaaagtagtactgg

SEQ ID NO: 5505933 - DNA, 25 bp, Homo sapien
agacatcacactgttctcttgggat

SEQ ID NO: 5505934 - DNA, 25 bp, Homo sapien
cttcctgggcttattccacagtatt

SEQ ID NO: 5505935 - DNA, 25 bp, Homo sapien
ttgggcaacttatttgcaaacacat

SEQ ID NO: 5505936 - DNA, 25 bp, Homo sapien
attgtgcagtaaatctggcttgctt

SEQ ID NO: 5505937 - DNA, 25 bp, Homo sapien
tactgggtactgcatattgtgcagt

SEQ ID NO: 5505938 - DNA, 25 bp, Homo sapien
tagacctgtatatattagacatcac

SEQ ID NO: 5505939 - DNA, 25 bp, Homo sapien
tataattttagcattgacaaagatt

SEQ ID NO: 5505940 - DNA, 25 bp, Homo sapien
aatctttgtcaatgctaaaattata

SEQ ID NO: 5505941 - DNA, 25 bp, Homo sapien
tgtccactctggtcgagtgccctag

SEQ ID NO: 5505942 - DNA, 25 bp, Homo sapien
ctagggcactcgaccagagtggaca

SEQ ID NO: 5505943 - DNA, 25 bp, Homo sapien
ttatgttcgttttgtctttctactg

SEQ ID NO: 5505944 - DNA, 25 bp, Homo sapien
cagtagaaagacaaaacgaacataa

SEQ ID NO: 5505945 - DNA, 25 bp, Homo sapien
cgaaacgatgtcgaagtcatactct

SEQ ID NO: 5505946 - DNA, 25 bp, Homo sapien
agagtatgacttcgacatcgtttcg

SEQ ID NO: 5505947 - DNA, 25 bp, Homo sapien
atcaggtatgaaaacattcaagctc

SEQ ID NO: 5505948 - DNA, 25 bp, Homo sapien
ttctaagccacattactacagttcc

SEQ ID NO: 5505949 - DNA, 25 bp, Homo sapien
ttttacagaaataggtgcccctctc

SEQ ID NO: 5505950 - DNA, 25 bp, Homo sapien
tttgaaaacatttaggccattatac

SEQ ID NO: 5505951 - DNA, 25 bp, Homo sapien
tctccacaggaacttacattttgaa

SEQ ID NO: 5505952 - DNA, 25 bp, Homo sapien
atcatcaacaccaatttggggattt

SEQ ID NO: 5505953 - DNA, 25 bp, Homo sapien
atcagttggctgacaaacatactgt

SEQ ID NO: 5505954 - DNA, 25 bp, Homo sapien
taccacgtaaacctcagatgatatg

SEQ ID NO: 5505955 - DNA, 25 bp, Homo sapien
cccctcagtccccccgtttgcaata

SEQ ID NO: 5505956 - DNA, 25 bp, Homo sapien
tgttataagactagttaccacgtaa

SEQ ID NO: 5505957 - DNA, 25 bp, Homo sapien
tcttcctcataggaaggggagagtg

SEQ ID NO: 5505958 - DNA, 25 bp, Homo sapien
aatcgaaaagagtcaatgtaaaagt

SEQ ID NO: 5505959 - DNA, 25 bp, Homo sapien
acttttacattgactcttttcgatt

SEQ ID NO: 5505960 - DNA, 25 bp, Homo sapien
actctcgacccctgagctcgtttga

SEQ ID NO: 5505961 - DNA, 25 bp, Homo sapien
tcaaacgagctcaggggtcgagagt

SEQ ID NO: 5505962 - DNA, 25 bp, Homo sapien
aacaagaaggagatgctaaaaatca

SEQ ID NO: 5505963 - DNA, 25 bp, Homo sapien
agtttgattcggacccgggcagtta

SEQ ID NO: 5505964 - DNA, 25 bp, Homo sapien
ggtgggagcgccaagtttcctttca

SEQ ID NO: 5505965 - DNA, 25 bp, Homo sapien
cgggcagttacccaggtcctagtac

SEQ ID NO: 5505966 - DNA, 25 bp, Homo sapien
ttcctttcaaccagtggggcctgca

SEQ ID NO: 5505967 - DNA, 25 bp, Homo sapien
ggctggatgatgacccacctccttc

SEQ ID NO: 5505968 - DNA, 25 bp, Homo sapien
ggttgatgatgtcgtgaaaagactc

SEQ ID NO: 5505969 - DNA, 25 bp, Homo sapien
gatccctggaggctcgaattattgc

SEQ ID NO: 5505970 - DNA, 25 bp, Homo sapien
aacccagaggacaccagatccctgg

SEQ ID NO: 5505971 - DNA, 25 bp, Homo sapien
cccctggaattgagaaggttgatga

SEQ ID NO: 5505972 - DNA, 25 bp, Homo sapien
gcggatatgtcgtccggaaaccagc

SEQ ID NO: 5505973 - DNA, 25 bp, Homo sapien
aagaacacttggagaaacatcgaaa

SEQ ID NO: 5505974 - DNA, 25 bp, Homo sapien
cttgtctgtcaagatccgcagttat

SEQ ID NO: 5505975 - DNA, 25 bp, Homo sapien
agatccgcagttatgaagaacactt

SEQ ID NO: 5505976 - DNA, 25 bp, Homo sapien
gctaatgagcattgaccagaggaaa

SEQ ID NO: 5505977 - DNA, 25 bp, Homo sapien
ggacaaagcccacaaacgctatctg

SEQ ID NO: 5505978 - DNA, 25 bp, Homo sapien
tattgccttgtctgtcaagatccgc

SEQ ID NO: 5505979 - DNA, 25 bp, Homo sapien
ccgcagttatgaagaacacttggag

SEQ ID NO: 5505980 - DNA, 25 bp, Homo sapien
taatgagcattgaccagaggaaaaa

SEQ ID NO: 5505981 - DNA, 25 bp, Homo sapien
gtcaagatccgcagttatgaagaac

SEQ ID NO: 5505982 - DNA, 25 bp, Homo sapien
aacacttggagaaacatcgaaagga

SEQ ID NO: 5505983 - DNA, 25 bp, Homo sapien
acaaacgctatctgctaatgagcat

SEQ ID NO: 5505984 - DNA, 25 bp, Homo sapien
tccagtcgtgtctaggagtcgccct

SEQ ID NO: 5505985 - DNA, 25 bp, Homo sapien
agggcgactcctagacacgactgga

SEQ ID NO: 5505986 - DNA, 25 bp, Homo sapien
gagggaggctcgtccccgccacccg

SEQ ID NO: 5505987 - DNA, 25 bp, Homo sapien
cgggtggcggggacgagcctccctc

SEQ ID NO: 5505988 - DNA, 25 bp, Homo sapien
cgtcgggacgtggtgcgcgagagtg

SEQ ID NO: 5505989 - DNA, 25 bp, Homo sapien
cactctcgcgcaccacgtcccgacg

SEQ ID NO: 5505990 - DNA, 25 bp, Homo sapien
aaaggcgtcgggacgtggtgcgcga

SEQ ID NO: 5505991 - DNA, 25 bp, Homo sapien
tcgcgcaccacgtcccgacgccttt

SEQ ID NO: 5505992 - DNA, 25 bp, Homo sapien
cggagacgatctcgtagtccgtact

SEQ ID NO: 5505993 - DNA, 25 bp, Homo sapien
agtacggactacgagatcgtctccg

SEQ ID NO: 5505994 - DNA, 25 bp, Homo sapien
ataaataagtgttaaccaaatggtc

SEQ ID NO: 5505995 - DNA, 25 bp, Homo sapien
gaccatttggttaacacttatttat

SEQ ID NO: 5505996 - DNA, 25 bp, Homo sapien
gctcacgcccttcggccccgccggg

SEQ ID NO: 5505997 - DNA, 25 bp, Homo sapien
cccggcggggccgaagggcgtgagc

SEQ ID NO: 5505998 - DNA, 25 bp, Homo sapien
gggacgtccggcgtggtccttctgt

SEQ ID NO: 5505999 - DNA, 25 bp, Homo sapien
acagaaggaccacgccggacgtccc

SEQ ID NO: 5506000 - DNA, 25 bp, Homo sapien
ctaactaaatcatggtgatttgttt

SEQ ID NO: 5506001 - DNA, 25 bp, Homo sapien
aaacaaatcaccatgatttagttag

SEQ ID NO: 5506002 - DNA, 25 bp, Homo sapien
ctgcccgctcttccgatgggacgtc

SEQ ID NO: 5506003 - DNA, 25 bp, Homo sapien
gacgtcccatcggaagagcgggcag

SEQ ID NO: 5506004 - DNA, 25 bp, Homo sapien
cctgtctgaacacctgggaccgatt

SEQ ID NO: 5506005 - DNA, 25 bp, Homo sapien
aatcggtcccaggtgttcagacagg

SEQ ID NO: 5506006 - DNA, 25 bp, Homo sapien
ctaggccagagctgtttggtccata

SEQ ID NO: 5506007 - DNA, 25 bp, Homo sapien
gactggcagagaaagcccatctctg

SEQ ID NO: 5506008 - DNA, 25 bp, Homo sapien
gtccgactcccacagacagacagca

SEQ ID NO: 5506009 - DNA, 25 bp, Homo sapien
tcccagagcttggcatctgtggctc

SEQ ID NO: 5506010 - DNA, 25 bp, Homo sapien
ggcgggcccagagtttatcttcatg

SEQ ID NO: 5506011 - DNA, 25 bp, Homo sapien
atagtccccttggagtggatgtgga

SEQ ID NO: 5506012 - DNA, 25 bp, Homo sapien
acctcaggtcgacaggtcctgctgg

SEQ ID NO: 5506013 - DNA, 25 bp, Homo sapien
atcttcaacaagcgagtgacagcag

SEQ ID NO: 5506014 - DNA, 25 bp, Homo sapien
agatgggcacaatgtccgactccca

SEQ ID NO: 5506015 - DNA, 25 bp, Homo sapien
ggagtgctggtttctggcactgggc

SEQ ID NO: 5506016 - DNA, 25 bp, Homo sapien
ggtccatagtcaagctcccagagct

SEQ ID NO: 5506017 - DNA, 25 bp, Homo sapien
taaaagacattaaattcaacagtat

SEQ ID NO: 5506018 - DNA, 25 bp, Homo sapien
atactgttgaatttaatgtctttta

SEQ ID NO: 5506019 - DNA, 25 bp, Homo sapien
aaaagacattaaattcaacagtatc

SEQ ID NO: 5506020 - DNA, 25 bp, Homo sapien
gatactgttgaatttaatgtctttt

SEQ ID NO: 5506021 - DNA, 25 bp, Homo sapien
tcttttgtataactagcatatacgg

SEQ ID NO: 5506022 - DNA, 25 bp, Homo sapien
ccgtatatgctagttatacaaaaga

SEQ ID NO: 5506023 - DNA, 25 bp, Homo sapien
gttaacaccagaagtgatgggttgt

SEQ ID NO: 5506024 - DNA, 25 bp, Homo sapien
tgggtgctgcactgccagtactctc

SEQ ID NO: 5506025 - DNA, 25 bp, Homo sapien
agggggatacagacccatcaccttc

SEQ ID NO: 5506026 - DNA, 25 bp, Homo sapien
taggaatgtggatgtaagttttgac

SEQ ID NO: 5506027 - DNA, 25 bp, Homo sapien
tgaggcagtgatgctctacaaacac

SEQ ID NO: 5506028 - DNA, 25 bp, Homo sapien
tctaccagtgtctagcaagggtgga

SEQ ID NO: 5506029 - DNA, 25 bp, Homo sapien
cgcttacgtcaatgatgggtgctgc

SEQ ID NO: 5506030 - DNA, 25 bp, Homo sapien
gtcgtgaatcagatgttaggggatg

SEQ ID NO: 5506031 - DNA, 25 bp, Homo sapien
cagtactctcgggagtcaagcatgg

SEQ ID NO: 5506032 - DNA, 25 bp, Homo sapien
ctggacaagacagccgcttacgtca

SEQ ID NO: 5506033 - DNA, 25 bp, Homo sapien
taaatgcagaagaccagctcaatac

SEQ ID NO: 5506034 - DNA, 25 bp, Homo sapien
tttgaagatggtcttgttcctggtg

SEQ ID NO: 5506035 - DNA, 25 bp, Homo sapien
caccaggaacaagaccatcttcaaa

SEQ ID NO: 5506036 - DNA, 25 bp, Homo sapien
tcaagtctatttaattgacaaagaa

SEQ ID NO: 5506037 - DNA, 25 bp, Homo sapien
ttctttgtcaattaaatagacttga

SEQ ID NO: 5506038 - DNA, 25 bp, Homo sapien
caggtgagacgtcgcaaagtaggtt

SEQ ID NO: 5506039 - DNA, 25 bp, Homo sapien
aacctactttgcgacgtctcacctg

SEQ ID NO: 5506040 - DNA, 25 bp, Homo sapien
tttttggaagattcgggttcagcac

SEQ ID NO: 5506041 - DNA, 25 bp, Homo sapien
tcgggttcagcacaggattccattt

SEQ ID NO: 5506042 - DNA, 25 bp, Homo sapien
ttcctatcagtggcaaagcggtaga

SEQ ID NO: 5506043 - DNA, 25 bp, Homo sapien
tccggaagtcattcctatcagtggc

SEQ ID NO: 5506044 - DNA, 25 bp, Homo sapien
gtcacagattgtaggctgttttttg

SEQ ID NO: 5506045 - DNA, 25 bp, Homo sapien
gccagccaaactcccgcagcaaaga

SEQ ID NO: 5506046 - DNA, 25 bp, Homo sapien
ccgcagcaaagagtcccaaatttag

SEQ ID NO: 5506047 - DNA, 25 bp, Homo sapien
ggtcaatgtcactcaagttcctggc

SEQ ID NO: 5506048 - DNA, 25 bp, Homo sapien
atttagtatcaagttcctccggaag

SEQ ID NO: 5506049 - DNA, 25 bp, Homo sapien
acgccccgaagccaatctcccacgt

SEQ ID NO: 5506050 - DNA, 25 bp, Homo sapien
agttcctggccagccaaactcccgc

SEQ ID NO: 5506051 - DNA, 25 bp, Homo sapien
ggggacctctcgcagatgatcaagt

SEQ ID NO: 5506052 - DNA, 25 bp, Homo sapien
atcgaagacaacgagctgaacattg

SEQ ID NO: 5506053 - DNA, 25 bp, Homo sapien
gctcgctggcggacttccagatcga

SEQ ID NO: 5506054 - DNA, 25 bp, Homo sapien
tactttaagaagcagaagcggctca

SEQ ID NO: 5506055 - DNA, 25 bp, Homo sapien
tgtgtcaaggagatcggcctcttga

SEQ ID NO: 5506056 - DNA, 25 bp, Homo sapien
ggcctcttgaagcaactgaaccacc

SEQ ID NO: 5506057 - DNA, 25 bp, Homo sapien
agatctttgagatgatggacgccaa

SEQ ID NO: 5506058 - DNA, 25 bp, Homo sapien
ggtgtacaaggccacctgcctgctg

SEQ ID NO: 5506059 - DNA, 25 bp, Homo sapien
atggagggagttccaacaacctctg

SEQ ID NO: 5506060 - DNA, 25 bp, Homo sapien
ctctgaagaaggtgcagatctttga

SEQ ID NO: 5506061 - DNA, 25 bp, Homo sapien
cagaggcatcccaacacgctgtctt

SEQ ID NO: 5506062 - DNA, 25 bp, Homo sapien
gaacgtacctacacctgtgactctt

SEQ ID NO: 5506063 - DNA, 25 bp, Homo sapien
aagagtcacaggtgtaggtacgttc

SEQ ID NO: 5506064 - DNA, 25 bp, Homo sapien
ccgaaataaatgagagatgagttgg

SEQ ID NO: 5506065 - DNA, 25 bp, Homo sapien
ttggtgaattgataagtaaaggcag

SEQ ID NO: 5506066 - DNA, 25 bp, Homo sapien
cagcctggcagtatgatggcctaga

SEQ ID NO: 5506067 - DNA, 25 bp, Homo sapien
aagcgaaaagaaatgaaaatgttac

SEQ ID NO: 5506068 - DNA, 25 bp, Homo sapien
acaaaagcagaataaaagcgaaaag

SEQ ID NO: 5506069 - DNA, 25 bp, Homo sapien
gaggctgtgctgtgtgccaatgttt

SEQ ID NO: 5506070 - DNA, 25 bp, Homo sapien
tttcatctgggagcagaaaacagca

SEQ ID NO: 5506071 - DNA, 25 bp, Homo sapien
atcctggaataaaagaagccgaaat

SEQ ID NO: 5506072 - DNA, 25 bp, Homo sapien
gtaaaggcagaaaagattatatgtc

SEQ ID NO: 5506073 - DNA, 25 bp, Homo sapien
tagatgcagagaaaacagctccttg

SEQ ID NO: 5506074 - DNA, 25 bp, Homo sapien
tgagaaatacaatgaagaggcaatg

SEQ ID NO: 5506075 - DNA, 25 bp, Homo sapien
ttggtctggcctactgggctgacat

SEQ ID NO: 5506076 - DNA, 25 bp, Homo sapien
gggggaagttaaatatgagccactg

SEQ ID NO: 5506077 - DNA, 25 bp, Homo sapien
gagcaaaggaagtggcttaatgatc

SEQ ID NO: 5506078 - DNA, 25 bp, Homo sapien
tgaatgtctcttagagggtgggctt

SEQ ID NO: 5506079 - DNA, 25 bp, Homo sapien
aaaagttgtttggatatggtagtgt

SEQ ID NO: 5506080 - DNA, 25 bp, Homo sapien
aaaacaagatgttaaggtatgcttc

SEQ ID NO: 5506081 - DNA, 25 bp, Homo sapien
aaagtatagagcttttggggaagga

SEQ ID NO: 5506082 - DNA, 25 bp, Homo sapien
cattaatttgggcaaggaaagtgtc

SEQ ID NO: 5506083 - DNA, 25 bp, Homo sapien
aattatgggaaatgcaaaagttgtt

SEQ ID NO: 5506084 - DNA, 25 bp, Homo sapien
gatatggtagtgtgtggttctcttt

SEQ ID NO: 5506085 - DNA, 25 bp, Homo sapien
tatagaaactgcagagcaaaggaag

SEQ ID NO: 5506086 - DNA, 25 bp, Homo sapien
ttggaagtgccctgcagcttcactg

SEQ ID NO: 5506087 - DNA, 25 bp, Homo sapien
agcttcactgaagaccgtgtgctct

SEQ ID NO: 5506088 - DNA, 25 bp, Homo sapien
tgacatttgccatggagagagttcc

SEQ ID NO: 5506089 - DNA, 25 bp, Homo sapien
gtgttagcattcagggccacttcct

SEQ ID NO: 5506090 - DNA, 25 bp, Homo sapien
gggctgacttgcatggacctgaaca

SEQ ID NO: 5506091 - DNA, 25 bp, Homo sapien
tgttctccgttggtgaaaaagaggc

SEQ ID NO: 5506092 - DNA, 25 bp, Homo sapien
cctgaacaagagctgacatttgcca

SEQ ID NO: 5506093 - DNA, 25 bp, Homo sapien
gaaagctcgacctggctctggaaag

SEQ ID NO: 5506094 - DNA, 25 bp, Homo sapien
aagacccagaatgaatccggacttc

SEQ ID NO: 5506095 - DNA, 25 bp, Homo sapien
cccagagggaatatatgcgttggag

SEQ ID NO: 5506096 - DNA, 25 bp, Homo sapien
tgaatattcccgagaaagaaccgaa

SEQ ID NO: 5506097 - DNA, 25 bp, Homo sapien
cgtcattccgaaataggaaatttag

SEQ ID NO: 5506098 - DNA, 25 bp, Homo sapien
ctaaatttcctatttcggaatgacg

SEQ ID NO: 5506099 - DNA, 25 bp, Homo sapien
atttaacgtcattccgaaataggaa

SEQ ID NO: 5506100 - DNA, 25 bp, Homo sapien
ttcctatttcggaatgacgttaaat

SEQ ID NO: 5506101 - DNA, 25 bp, Homo sapien
gtcggcgggcgccttggctctgtcc

SEQ ID NO: 5506102 - DNA, 25 bp, Homo sapien
ggacagagccaaggcgcccgccgac

SEQ ID NO: 5506103 - DNA, 25 bp, Homo sapien
cagccgatcagagccgctctagggg

SEQ ID NO: 5506104 - DNA, 25 bp, Homo sapien
atccacaggaagcatttaggagaac

SEQ ID NO: 5506105 - DNA, 25 bp, Homo sapien
ggtagcgttccggatcagtccttgc

SEQ ID NO: 5506106 - DNA, 25 bp, Homo sapien
ctggaatcccaactcggctccttgc

SEQ ID NO: 5506107 - DNA, 25 bp, Homo sapien
tcggtgtaatgagcaaaacataaac

SEQ ID NO: 5506108 - DNA, 25 bp, Homo sapien
catttaggagaactggctcaggtag

SEQ ID NO: 5506109 - DNA, 25 bp, Homo sapien
ggaccaagagattggcgtcaagtcc

SEQ ID NO: 5506110 - DNA, 25 bp, Homo sapien
cggagtgcccatttcggctggaatc

SEQ ID NO: 5506111 - DNA, 25 bp, Homo sapien
ccttggggtagttagttgacttctc

SEQ ID NO: 5506112 - DNA, 25 bp, Homo sapien
ccttactgtagtccggcaggacagc

SEQ ID NO: 5506113 - DNA, 25 bp, Homo sapien
aggggcctgggaattccctctccca

SEQ ID NO: 5506114 - DNA, 25 bp, Homo sapien
cctccagctgcaacatcgtcatcct

SEQ ID NO: 5506115 - DNA, 25 bp, Homo sapien
cgctcgtccttgctctcgccgctgc

SEQ ID NO: 5506116 - DNA, 25 bp, Homo sapien
tgaacaacgagaagactctccagtt

SEQ ID NO: 5506117 - DNA, 25 bp, Homo sapien
gcgacaaacttcgcagtgccgcgac

SEQ ID NO: 5506118 - DNA, 25 bp, Homo sapien
tttagctcagcgaacgctgggcgaa

SEQ ID NO: 5506119 - DNA, 25 bp, Homo sapien
tctcctcacgctcgcgcagtctccg

SEQ ID NO: 5506120 - DNA, 25 bp, Homo sapien
ctcctccctactccaagccctcggc

SEQ ID NO: 5506121 - DNA, 25 bp, Homo sapien
tccgccgcagtctcagctgcagctg

SEQ ID NO: 5506122 - DNA, 25 bp, Homo sapien
tccgctgaacgatgtcctacttcgc

SEQ ID NO: 5506123 - DNA, 25 bp, Homo sapien
ggccggcgccctcttccgaatgtcc

SEQ ID NO: 5506124 - DNA, 25 bp, Homo sapien
tcttccgaatgtcctgcggccccag

SEQ ID NO: 5506125 - DNA, 25 bp, Homo sapien
gactcctccggcccagacgtaggcg

SEQ ID NO: 5506126 - DNA, 25 bp, Homo sapien
cgcctacgtctgggccggaggagtc

SEQ ID NO: 5506127 - DNA, 25 bp, Homo sapien
cgagatgctttgagagcgttaggca

SEQ ID NO: 5506128 - DNA, 25 bp, Homo sapien
atttacttgaaaatggagagttggc

SEQ ID NO: 5506129 - DNA, 25 bp, Homo sapien
gaatgagtgctggcttgaacagttc

SEQ ID NO: 5506130 - DNA, 25 bp, Homo sapien
cattggtagctgcactgaaaggaaa

SEQ ID NO: 5506131 - DNA, 25 bp, Homo sapien
aaacagaacagaagtaatacgcatt

SEQ ID NO: 5506132 - DNA, 25 bp, Homo sapien
agggaaaatgtaacaagctggttgc

SEQ ID NO: 5506133 - DNA, 25 bp, Homo sapien
gaaataaatatcaggagcaacgggg

SEQ ID NO: 5506134 - DNA, 25 bp, Homo sapien
catggtggccactgttgcagctttg

SEQ ID NO: 5506135 - DNA, 25 bp, Homo sapien
tcctgccataggatagggaaaatgt

SEQ ID NO: 5506136 - DNA, 25 bp, Homo sapien
acggggaaagctttgtaaaagatca

SEQ ID NO: 5506137 - DNA, 25 bp, Homo sapien
ctgtggatgaagctggatttacttg

SEQ ID NO: 5506138 - DNA, 25 bp, Homo sapien
ccacaccttctggagggaaagttgc

SEQ ID NO: 5506139 - DNA, 25 bp, Homo sapien
tcatctacctggccaatctggaggc

SEQ ID NO: 5506140 - DNA, 25 bp, Homo sapien
cggctctggggactttctactcatc

SEQ ID NO: 5506141 - DNA, 25 bp, Homo sapien
gcacgcagagctgcacgcactcttc

SEQ ID NO: 5506142 - DNA, 25 bp, Homo sapien
ggccaagctggccatcatcttcagc

SEQ ID NO: 5506143 - DNA, 25 bp, Homo sapien
gtccgtgagtcccccttcgctgcgg

SEQ ID NO: 5506144 - DNA, 25 bp, Homo sapien
gacacatgtaccagctcaccaaggc

SEQ ID NO: 5506145 - DNA, 25 bp, Homo sapien
tcttcagccacatgcacgcagagct

SEQ ID NO: 5506146 - DNA, 25 bp, Homo sapien
aggcccccgcccacaccttctggag

SEQ ID NO: 5506147 - DNA, 25 bp, Homo sapien
ccggtccttcccggcacacgcgagg

SEQ ID NO: 5506148 - DNA, 25 bp, Homo sapien
gtcccccttcgctgcgggacctgct

SEQ ID NO: 5506149 - DNA, 25 bp, Homo sapien
atgacgactgaggattaagaagact

SEQ ID NO: 5506150 - DNA, 25 bp, Homo sapien
agtcttcttaatcctcagtcgtcat

SEQ ID NO: 5506151 - DNA, 25 bp, Homo sapien
ataagggaaggtgtataagttggta

SEQ ID NO: 5506152 - DNA, 25 bp, Homo sapien
taccaacttatacaccttcccttat

SEQ ID NO: 5506153 - DNA, 25 bp, Homo sapien
attcaatagatttatactactactg

SEQ ID NO: 5506154 - DNA, 25 bp, Homo sapien
cagtagtagtataaatctattgaat

SEQ ID NO: 5506155 - DNA, 25 bp, Homo sapien
cgtccgtcgaggttccaaggaacag

SEQ ID NO: 5506156 - DNA, 25 bp, Homo sapien
ctgttccttggaacctcgacggacg

SEQ ID NO: 5506157 - DNA, 25 bp, Homo sapien
cggacgcgtgggagccccgtctgcg

SEQ ID NO: 5506158 - DNA, 25 bp, Homo sapien
cgcagacggggctcccacgcgtccg

SEQ ID NO: 5506159 - DNA, 25 bp, Homo sapien
gaaaagaatcttatagtacatgtta

SEQ ID NO: 5506160 - DNA, 25 bp, Homo sapien
cacagatctgacgtaatcaaactcc

SEQ ID NO: 5506161 - DNA, 25 bp, Homo sapien
ggagttggcattggaagcttattct

SEQ ID NO: 5506162 - DNA, 25 bp, Homo sapien
atcaggctgagttttgtatgtatct

SEQ ID NO: 5506163 - DNA, 25 bp, Homo sapien
cttgcccgtgatggctccttggggt

SEQ ID NO: 5506164 - DNA, 25 bp, Homo sapien
acacccagtctgatcaggctgagtt

SEQ ID NO: 5506165 - DNA, 25 bp, Homo sapien
ccagcggtggaagtcattctgatat

SEQ ID NO: 5506166 - DNA, 25 bp, Homo sapien
cattctgatatggagttggcattgg

SEQ ID NO: 5506167 - DNA, 25 bp, Homo sapien
cctccttgaaggctaccccttggga

SEQ ID NO: 5506168 - DNA, 25 bp, Homo sapien
gccccatgccccattacaggctcac

SEQ ID NO: 5506169 - DNA, 25 bp, Homo sapien
caaactccagcccttgcccgtgatg

SEQ ID NO: 5506170 - DNA, 25 bp, Homo sapien
gggtcgcagtccactcgcacctccg

SEQ ID NO: 5506171 - DNA, 25 bp, Homo sapien
cggaggtgcgagtggactgcgaccc

SEQ ID NO: 5506172 - DNA, 25 bp, Homo sapien
agggtcgcagtccactcgcacctcc

SEQ ID NO: 5506173 - DNA, 25 bp, Homo sapien
ggaggtgcgagtggactgcgaccct

SEQ ID NO: 5506174 - DNA, 25 bp, Homo sapien
gcgtccgagcccgagctgcggctgc

SEQ ID NO: 5506175 - DNA, 25 bp, Homo sapien
gcagccgcagctcgggctcggacgc

SEQ ID NO: 5506176 - DNA, 25 bp, Homo sapien
aatctgttggtgtctcagtttggac

SEQ ID NO: 5506177 - DNA, 25 bp, Homo sapien
ggtttaatggtagataggagacaca

SEQ ID NO: 5506178 - DNA, 25 bp, Homo sapien
tattcttgataaagcccaacactgt

SEQ ID NO: 5506179 - DNA, 25 bp, Homo sapien
aagtcataagggtttaatggtagat

SEQ ID NO: 5506180 - DNA, 25 bp, Homo sapien
agtccaaggaaccggacagagttta

SEQ ID NO: 5506181 - DNA, 25 bp, Homo sapien
cccaacactgtaaaaactagacatc

SEQ ID NO: 5506182 - DNA, 25 bp, Homo sapien
agcttagactgaatgacacactatc

SEQ ID NO: 5506183 - DNA, 25 bp, Homo sapien
acacaagtccaaggaaccggacaga

SEQ ID NO: 5506184 - DNA, 25 bp, Homo sapien
tcaatgccaccaagatgtatatatg

SEQ ID NO: 5506185 - DNA, 25 bp, Homo sapien
attcttgataagataggagacacac

SEQ ID NO: 5506186 - DNA, 25 bp, Homo sapien
tagtgaaagtgctaacagcttagac

SEQ ID NO: 5506187 - DNA, 25 bp, Homo sapien
ttctatgtatcgttctatgtcccag

SEQ ID NO: 5506188 - DNA, 25 bp, Homo sapien
ctgggacatagaacgatacatagaa

SEQ ID NO: 5506189 - DNA, 25 bp, Homo sapien
gcccggaggcacattcagggttcct

SEQ ID NO: 5506190 - DNA, 25 bp, Homo sapien
aggaaccctgaatgtgcctccgggc

SEQ ID NO: 5506191 - DNA, 25 bp, Homo sapien
agtcatctacagtcacagtcattta

SEQ ID NO: 5506192 - DNA, 25 bp, Homo sapien
taaatgactgtgactgtagatgact

SEQ ID NO: 5506193 - DNA, 25 bp, Homo sapien
tttatttctactgtcaaagttaatg

SEQ ID NO: 5506194 - DNA, 25 bp, Homo sapien
cattaactttgacagtagaaataaa

SEQ ID NO: 5506195 - DNA, 25 bp, Homo sapien
ttttatttctactgtcaaagttaat

SEQ ID NO: 5506196 - DNA, 25 bp, Homo sapien
attaactttgacagtagaaataaaa

SEQ ID NO: 5506197 - DNA, 25 bp, Homo sapien
tttttatttctactgtcaaagttaa

SEQ ID NO: 5506198 - DNA, 25 bp, Homo sapien
ttaactttgacagtagaaataaaaa

SEQ ID NO: 5506199 - DNA, 25 bp, Homo sapien
gtccgtgtgtcccagatgctgtcat

SEQ ID NO: 5506200 - DNA, 25 bp, Homo sapien
ataaacaacgcattgccacggaaac

SEQ ID NO: 5506201 - DNA, 25 bp, Homo sapien
ctgacctacctcaaagggcagtttt

SEQ ID NO: 5506202 - DNA, 25 bp, Homo sapien
gtaagtgtagctcaaataggtcatc

SEQ ID NO: 5506203 - DNA, 25 bp, Homo sapien
tccaaccactgtgccactgacttgc

SEQ ID NO: 5506204 - DNA, 25 bp, Homo sapien
ctttttagaaagcattttgggatcc

SEQ ID NO: 5506205 - DNA, 25 bp, Homo sapien
accatgaacttgatacgtccgtgtg

SEQ ID NO: 5506206 - DNA, 25 bp, Homo sapien
gggtgtattctctgtaagtgtagct

SEQ ID NO: 5506207 - DNA, 25 bp, Homo sapien
gcattgccacggaaacatacagagg

SEQ ID NO: 5506208 - DNA, 25 bp, Homo sapien
gcacaggaattctcaagacctgagt

SEQ ID NO: 5506209 - DNA, 25 bp, Homo sapien
agggcagttttgaggcatgactaat

SEQ ID NO: 5506210 - DNA, 25 bp, Homo sapien
ttagaagtctttaacgttaggagta

SEQ ID NO: 5506211 - DNA, 25 bp, Homo sapien
tactcctaacgttaaagacttctaa

SEQ ID NO: 5506212 - DNA, 25 bp, Homo sapien
aggtacggatcttcaatgtcactgt

SEQ ID NO: 5506213 - DNA, 25 bp, Homo sapien
aagaatgcatttacatggatgaatt

SEQ ID NO: 5506214 - DNA, 25 bp, Homo sapien
taatctaagtagagaaaggaagaga

SEQ ID NO: 5506215 - DNA, 25 bp, Homo sapien
taagagtttaactgtacaaaggatc

SEQ ID NO: 5506216 - DNA, 25 bp, Homo sapien
taactgtacaaaggatcaaactata

SEQ ID NO: 5506217 - DNA, 25 bp, Homo sapien
aatggaaagggagatctacacattt

SEQ ID NO: 5506218 - DNA, 25 bp, Homo sapien
tcaatgtcactgtggaatggaaagg

SEQ ID NO: 5506219 - DNA, 25 bp, Homo sapien
tatccccccacttcttatgctgctt

SEQ ID NO: 5506220 - DNA, 25 bp, Homo sapien
accaacataaaaccaactactgctt

SEQ ID NO: 5506221 - DNA, 25 bp, Homo sapien
aacactagagagttacatgcaacct

SEQ ID NO: 5506222 - DNA, 25 bp, Homo sapien
aagataacctaaggtacggatcttc

SEQ ID NO: 5506223 - DNA, 25 bp, Homo sapien
actaatgggaggaatgtaatcagta

SEQ ID NO: 5506224 - DNA, 25 bp, Homo sapien
tgtaagtgaaacaaaggctcatttc

SEQ ID NO: 5506225 - DNA, 25 bp, Homo sapien
atacgccaatagtgtcttaggagtt

SEQ ID NO: 5506226 - DNA, 25 bp, Homo sapien
aatatacaatagtggacaaagtttc

SEQ ID NO: 5506227 - DNA, 25 bp, Homo sapien
aattaagtaggaatccagaagattt

SEQ ID NO: 5506228 - DNA, 25 bp, Homo sapien
atgaacaaatagatggtggcaagtg

SEQ ID NO: 5506229 - DNA, 25 bp, Homo sapien
acagggaataatggattgcagttag

SEQ ID NO: 5506230 - DNA, 25 bp, Homo sapien
actcagaaaacacaagttccgttcc

SEQ ID NO: 5506231 - DNA, 25 bp, Homo sapien
cataagatccaggagacagaagtaa

SEQ ID NO: 5506232 - DNA, 25 bp, Homo sapien
cagcgaaaaagccttccctgtaggt

SEQ ID NO: 5506233 - DNA, 25 bp, Homo sapien
ttccgttaagagccaaacccatgtc

SEQ ID NO: 5506234 - DNA, 25 bp, Homo sapien
atttgatgctcagtcaagatgggaa

SEQ ID NO: 5506235 - DNA, 25 bp, Homo sapien
ttacactcaagactggacaagggtt

SEQ ID NO: 5506236 - DNA, 25 bp, Homo sapien
caactttaaagaatgctggcatagg

SEQ ID NO: 5506237 - DNA, 25 bp, Homo sapien
ggattccagtggaaagaagaaccaa

SEQ ID NO: 5506238 - DNA, 25 bp, Homo sapien
aaagacaccattgtgtgggggattc

SEQ ID NO: 5506239 - DNA, 25 bp, Homo sapien
aaagaatgctggcataggccaggag

SEQ ID NO: 5506240 - DNA, 25 bp, Homo sapien
ggacaaaagacaccattgtgtgggg

SEQ ID NO: 5506241 - DNA, 25 bp, Homo sapien
ctggacaagggtttccataggacaa

SEQ ID NO: 5506242 - DNA, 25 bp, Homo sapien
gtgtgtgggcctcatttgatgctca

SEQ ID NO: 5506243 - DNA, 25 bp, Homo sapien
accaaggagtttgccacggccatgt

SEQ ID NO: 5506244 - DNA, 25 bp, Homo sapien
aaacacgagtttacactcaagactg

SEQ ID NO: 5506245 - DNA, 25 bp, Homo sapien
cggtgcttaacctgcaggaagaaat

SEQ ID NO: 5506246 - DNA, 25 bp, Homo sapien
tgatacgtgaaaaatccttgaaggg

SEQ ID NO: 5506247 - DNA, 25 bp, Homo sapien
aattgactgcccattgcggtgctta

SEQ ID NO: 5506248 - DNA, 25 bp, Homo sapien
gttgtttatgatacgtgaaaaatcc

SEQ ID NO: 5506249 - DNA, 25 bp, Homo sapien
gcctcttaacttctccattgcaaca

SEQ ID NO: 5506250 - DNA, 25 bp, Homo sapien
agggcaaagacggattctgagtctt

SEQ ID NO: 5506251 - DNA, 25 bp, Homo sapien
attgcggtgcttaacctgcaggaag

SEQ ID NO: 5506252 - DNA, 25 bp, Homo sapien
attgttccaacttattagaggccca

SEQ ID NO: 5506253 - DNA, 25 bp, Homo sapien
aatgaaaattatgaaagcactttgc

SEQ ID NO: 5506254 - DNA, 25 bp, Homo sapien
atatacactgcaattgactgcccat

SEQ ID NO: 5506255 - DNA, 25 bp, Homo sapien
tgactgcccattgcggtgcttaacc

SEQ ID NO: 5506256 - DNA, 25 bp, Homo sapien
gagaacacacgggatggaaggggtc

SEQ ID NO: 5506257 - DNA, 25 bp, Homo sapien
gaccccttccatcccgtgtgttctc

SEQ ID NO: 5506258 - DNA, 25 bp, Homo sapien
tggtgtcacatgtgagcctcccaca

SEQ ID NO: 5506259 - DNA, 25 bp, Homo sapien
ctctgtgattgaactctgctcttat

SEQ ID NO: 5506260 - DNA, 25 bp, Homo sapien
agttgggcaggcatgcctcattcct

SEQ ID NO: 5506261 - DNA, 25 bp, Homo sapien
gctcttattgactagggggcagttg

SEQ ID NO: 5506262 - DNA, 25 bp, Homo sapien
agcggctggcttgccaacacttggt

SEQ ID NO: 5506263 - DNA, 25 bp, Homo sapien
tattcactctccattccagctctgt

SEQ ID NO: 5506264 - DNA, 25 bp, Homo sapien
ccagctctgtgattgaactctgctc

SEQ ID NO: 5506265 - DNA, 25 bp, Homo sapien
tgctcttattgactagggggcagtt

SEQ ID NO: 5506266 - DNA, 25 bp, Homo sapien
actctgctcttattgactagggggc

SEQ ID NO: 5506267 - DNA, 25 bp, Homo sapien
agcctcccacatgtattcactctcc

SEQ ID NO: 5506268 - DNA, 25 bp, Homo sapien
tcattcctggaattgacagtcattc

SEQ ID NO: 5506269 - DNA, 25 bp, Homo sapien
acaagtcatttctatatcagttaaa

SEQ ID NO: 5506270 - DNA, 25 bp, Homo sapien
tttaactgatatagaaatgacttgt

SEQ ID NO: 5506271 - DNA, 25 bp, Homo sapien
tgatgttaatttgctgactgctgac

SEQ ID NO: 5506272 - DNA, 25 bp, Homo sapien
aaaaatggaagagtatgatgatgtt

SEQ ID NO: 5506273 - DNA, 25 bp, Homo sapien
cctccccttccagcagtgtcagcgg

SEQ ID NO: 5506274 - DNA, 25 bp, Homo sapien
cttcattagggcaccaaagcgaaga

SEQ ID NO: 5506275 - DNA, 25 bp, Homo sapien
caaagcgaagaaatcaaccagacta

SEQ ID NO: 5506276 - DNA, 25 bp, Homo sapien
ttgccgtgtgccatgaactctataa

SEQ ID NO: 5506277 - DNA, 25 bp, Homo sapien
ctgtagatcctattgccgtgtgcca

SEQ ID NO: 5506278 - DNA, 25 bp, Homo sapien
agagaagaagagctacctccccttc

SEQ ID NO: 5506279 - DNA, 25 bp, Homo sapien
gacttgatgaaaatccaacagaaac

SEQ ID NO: 5506280 - DNA, 25 bp, Homo sapien
tctgtgtcaacaccaggcccaagca

SEQ ID NO: 5506281 - DNA, 25 bp, Homo sapien
ttgatgatgggcaccattctgtgtc

SEQ ID NO: 5506282 - DNA, 25 bp, Homo sapien
ataagagaaagccttgaggataaga

SEQ ID NO: 5506283 - DNA, 25 bp, Homo sapien
ggggatgaaattaagcacagaagat

SEQ ID NO: 5506284 - DNA, 25 bp, Homo sapien
cttctagacccagctcctcggcgct

SEQ ID NO: 5506285 - DNA, 25 bp, Homo sapien
agtccaggttcccatgcggcctggg

SEQ ID NO: 5506286 - DNA, 25 bp, Homo sapien
actggactaaaggccagagtaggaa

SEQ ID NO: 5506287 - DNA, 25 bp, Homo sapien
tcgcaccaagggtgcgaaacgcaat

SEQ ID NO: 5506288 - DNA, 25 bp, Homo sapien
ggcgctggcgatattcgcaccaagg

SEQ ID NO: 5506289 - DNA, 25 bp, Homo sapien
gcgaatgcccggctacaagtagcct

SEQ ID NO: 5506290 - DNA, 25 bp, Homo sapien
ggtgaactggactaaaggccagagt

SEQ ID NO: 5506291 - DNA, 25 bp, Homo sapien
gcagaaaagtccaggttcccatgcg

SEQ ID NO: 5506292 - DNA, 25 bp, Homo sapien
ggctacaagtagcctgggactgaaa

SEQ ID NO: 5506293 - DNA, 25 bp, Homo sapien
gaggaggttaaagaccaatacgtag

SEQ ID NO: 5506294 - DNA, 25 bp, Homo sapien
ctacgtattggtctttaacctcctc

SEQ ID NO: 5506295 - DNA, 25 bp, Homo sapien
tgggcaaagttactatcgcgcaggg

SEQ ID NO: 5506296 - DNA, 25 bp, Homo sapien
caatattcaggccgtgctgttgccc

SEQ ID NO: 5506297 - DNA, 25 bp, Homo sapien
tgtgttcaggagatagcacagtcta

SEQ ID NO: 5506298 - DNA, 25 bp, Homo sapien
acctgaccgccaagatcctggagtt

SEQ ID NO: 5506299 - DNA, 25 bp, Homo sapien
cagggcggtgtcctgcccaatattc

SEQ ID NO: 5506300 - DNA, 25 bp, Homo sapien
ggcaaacaggactaatgagaaaatg

SEQ ID NO: 5506301 - DNA, 25 bp, Homo sapien
gcgtcaccccccgacgcctgcagct

SEQ ID NO: 5506302 - DNA, 25 bp, Homo sapien
acaagtgactgactaggcaaacagg

SEQ ID NO: 5506303 - DNA, 25 bp, Homo sapien
cgccaaggctaaaacgcactcttcc

SEQ ID NO: 5506304 - DNA, 25 bp, Homo sapien
aagctcaacaagctgttgggcaaag

SEQ ID NO: 5506305 - DNA, 25 bp, Homo sapien
gctcgccatccacgacgagaagctc

SEQ ID NO: 5506306 - DNA, 25 bp, Homo sapien
tgccatgagtatgagcaaattccct

SEQ ID NO: 5506307 - DNA, 25 bp, Homo sapien
tgagctgggaaatgcttttgccatg

SEQ ID NO: 5506308 - DNA, 25 bp, Homo sapien
gtcattttcagtcaaagagggcctc

SEQ ID NO: 5506309 - DNA, 25 bp, Homo sapien
gctccagagaaggtgaccattctca

SEQ ID NO: 5506310 - DNA, 25 bp, Homo sapien
aagatatggtagtgagagtaatttt

SEQ ID NO: 5506311 - DNA, 25 bp, Homo sapien
gagaaggacctcaaatcgccactct

SEQ ID NO: 5506312 - DNA, 25 bp, Homo sapien
aattccttgcaactagagcgctcct

SEQ ID NO: 5506313 - DNA, 25 bp, Homo sapien
gagcgctccttccccaagatatggt

SEQ ID NO: 5506314 - DNA, 25 bp, Homo sapien
acaagaaaaccatggccctcctttg

SEQ ID NO: 5506315 - DNA, 25 bp, Homo sapien
tagtctccatcagtaacagcaggcc

SEQ ID NO: 5506316 - DNA, 25 bp, Homo sapien
tcgccactctttgggcggcaggtgc

SEQ ID NO: 5506317 - DNA, 25 bp, Homo sapien
cgtcgcaccggtcggcctggcggga

SEQ ID NO: 5506318 - DNA, 25 bp, Homo sapien
tcccgccaggccgaccggtgcgacg

SEQ ID NO: 5506319 - DNA, 25 bp, Homo sapien
cctggcgggatgacgcgtggccccg

SEQ ID NO: 5506320 - DNA, 25 bp, Homo sapien
cggggccacgcgtcatcccgccagg

SEQ ID NO: 5506321 - DNA, 25 bp, Homo sapien
tgggccgccgtcagcgcgcctgctc

SEQ ID NO: 5506322 - DNA, 25 bp, Homo sapien
gagcaggcgcgctgacggcggccca

SEQ ID NO: 5506323 - DNA, 25 bp, Homo sapien
ccgtgggccgccgtcagcgcgcctg

SEQ ID NO: 5506324 - DNA, 25 bp, Homo sapien
caggcgcgctgacggcggcccacgg

SEQ ID NO: 5506325 - DNA, 25 bp, Homo sapien
agactacctcaataccttcgaaaag

SEQ ID NO: 5506326 - DNA, 25 bp, Homo sapien
cttttcgaaggtattgaggtagtct

SEQ ID NO: 5506327 - DNA, 25 bp, Homo sapien
aaaggtcaaagcataaggcattagg

SEQ ID NO: 5506328 - DNA, 25 bp, Homo sapien
agtgtgtgacagttaaatgggtttc

SEQ ID NO: 5506329 - DNA, 25 bp, Homo sapien
gggcagcagtgattagcagtttgac

SEQ ID NO: 5506330 - DNA, 25 bp, Homo sapien
gaggatggcgaaggataatacttcg

SEQ ID NO: 5506331 - DNA, 25 bp, Homo sapien
tcagaagcaccatggagattaaaga

SEQ ID NO: 5506332 - DNA, 25 bp, Homo sapien
gggattagataggttttagtgaggc

SEQ ID NO: 5506333 - DNA, 25 bp, Homo sapien
tgagtatcagggtgaatagaactta

SEQ ID NO: 5506334 - DNA, 25 bp, Homo sapien
agattaaagaattggagctagggat

SEQ ID NO: 5506335 - DNA, 25 bp, Homo sapien
aagctatgaaatgggtgagtcattc

SEQ ID NO: 5506336 - DNA, 25 bp, Homo sapien
ttaataggctagaacaaaaggtcaa

SEQ ID NO: 5506337 - DNA, 25 bp, Homo sapien
gggctgagaggatgtcccttatgat

SEQ ID NO: 5506338 - DNA, 25 bp, Homo sapien
gctcccagagccacttggtagtccc

SEQ ID NO: 5506339 - DNA, 25 bp, Homo sapien
cagggtccagccgtgactcccctaa

SEQ ID NO: 5506340 - DNA, 25 bp, Homo sapien
tcctcccccagaggaaggaggaaga

SEQ ID NO: 5506341 - DNA, 25 bp, Homo sapien
gtggcagctgaagtctcccggctgc

SEQ ID NO: 5506342 - DNA, 25 bp, Homo sapien
gcaggccatgggttactccttgccc

SEQ ID NO: 5506343 - DNA, 25 bp, Homo sapien
gctgcgggtgtcaccgtcatcccag

SEQ ID NO: 5506344 - DNA, 25 bp, Homo sapien
agatacggacttgatggtgctgttt

SEQ ID NO: 5506345 - DNA, 25 bp, Homo sapien
tgcaatggtttgttgagatacggac

SEQ ID NO: 5506346 - DNA, 25 bp, Homo sapien
ctggcacctgactcgctgtagctgt

SEQ ID NO: 5506347 - DNA, 25 bp, Homo sapien
ttgagaacattgacagaaattatgc

SEQ ID NO: 5506348 - DNA, 25 bp, Homo sapien
ccatccacctggaggaaagatattc

SEQ ID NO: 5506349 - DNA, 25 bp, Homo sapien
tggccacagctgagaagtgtttgca

SEQ ID NO: 5506350 - DNA, 25 bp, Homo sapien
aaggacacatttcaagagagttgca

SEQ ID NO: 5506351 - DNA, 25 bp, Homo sapien
attcagactgaagattggttgcctc

SEQ ID NO: 5506352 - DNA, 25 bp, Homo sapien
tggcacacctgggctcatagaacca

SEQ ID NO: 5506353 - DNA, 25 bp, Homo sapien
atgagcgtcaaaattatccgaaacc

SEQ ID NO: 5506354 - DNA, 25 bp, Homo sapien
atccgaaaccgcctcactgggatcc

SEQ ID NO: 5506355 - DNA, 25 bp, Homo sapien
tagaatttgcagatttggccacagc

SEQ ID NO: 5506356 - DNA, 25 bp, Homo sapien
ctgaagctcagggaattgaaataac

SEQ ID NO: 5506357 - DNA, 25 bp, Homo sapien
ccgaagacttgaaactctagacctc

SEQ ID NO: 5506358 - DNA, 25 bp, Homo sapien
gtccaaggcaacacaggtagtaaat

SEQ ID NO: 5506359 - DNA, 25 bp, Homo sapien
attgctgcctcccataaccgaagac

SEQ ID NO: 5506360 - DNA, 25 bp, Homo sapien
tattctttaaggaaatacgtacagt

SEQ ID NO: 5506361 - DNA, 25 bp, Homo sapien
actgtacgtatttccttaaagaata

SEQ ID NO: 5506362 - DNA, 25 bp, Homo sapien
tcgcacgcatccgttcagttgcttc

SEQ ID NO: 5506363 - DNA, 25 bp, Homo sapien
catacgtgatttcgaagggattgaa

SEQ ID NO: 5506364 - DNA, 25 bp, Homo sapien
ccacgtgacacgactcggctttgtg

SEQ ID NO: 5506365 - DNA, 25 bp, Homo sapien
gtgtcccaccatagaaaacttcatc

SEQ ID NO: 5506366 - DNA, 25 bp, Homo sapien
cctcgctcccctggggcatgtgtgc

SEQ ID NO: 5506367 - DNA, 25 bp, Homo sapien
aatggagatttcaagagttctcctc

SEQ ID NO: 5506368 - DNA, 25 bp, Homo sapien
tcgctgggtgtcactcagttgcgga

SEQ ID NO: 5506369 - DNA, 25 bp, Homo sapien
ccccagtcggttgtcgctgggtgtc

SEQ ID NO: 5506370 - DNA, 25 bp, Homo sapien
ggctttgtggaaaccatacgtgatt

SEQ ID NO: 5506371 - DNA, 25 bp, Homo sapien
gtcctcagctcgcacgcatccgttc

SEQ ID NO: 5506372 - DNA, 25 bp, Homo sapien
ctaccactccccagtcggttgtcgc

SEQ ID NO: 5506373 - DNA, 25 bp, Homo sapien
aatgactgcttaagttggagagagc

SEQ ID NO: 5506374 - DNA, 25 bp, Homo sapien
ggaacacaggttgcttaagagagta

SEQ ID NO: 5506375 - DNA, 25 bp, Homo sapien
gaggatgtagaagaatgcttaatac

SEQ ID NO: 5506376 - DNA, 25 bp, Homo sapien
tggaatgatgttaatggaaagtgga

SEQ ID NO: 5506377 - DNA, 25 bp, Homo sapien
tgtaactagaaaggcataggtgatg

SEQ ID NO: 5506378 - DNA, 25 bp, Homo sapien
aggtcactgagagtctaaggaagat

SEQ ID NO: 5506379 - DNA, 25 bp, Homo sapien
aaagtggaggacattaaactcagtg

SEQ ID NO: 5506380 - DNA, 25 bp, Homo sapien
aggggccaagatttttaggtcactg

SEQ ID NO: 5506381 - DNA, 25 bp, Homo sapien
atacctatagtggagtaagagaagg

SEQ ID NO: 5506382 - DNA, 25 bp, Homo sapien
cagaggtgtatgtggacatgtctgt

SEQ ID NO: 5506383 - DNA, 25 bp, Homo sapien
ggatgcccaggtttagggcaggaaa

SEQ ID NO: 5506384 - DNA, 25 bp, Homo sapien
gagaggaccaataccctgaccgggt

SEQ ID NO: 5506385 - DNA, 25 bp, Homo sapien
acccggtcagggtattggtcctctc

SEQ ID NO: 5506386 - DNA, 25 bp, Homo sapien
tgccagaagtcaatggatcaacatc

SEQ ID NO: 5506387 - DNA, 25 bp, Homo sapien
gagtgacagccaaaagggtatctca

SEQ ID NO: 5506388 - DNA, 25 bp, Homo sapien
tagtaaggcagactgtcaagaagaa

SEQ ID NO: 5506389 - DNA, 25 bp, Homo sapien
cagcaacactgaatgccagaagtca

SEQ ID NO: 5506390 - DNA, 25 bp, Homo sapien
attctccagcaaaatgaggatgaaa

SEQ ID NO: 5506391 - DNA, 25 bp, Homo sapien
ttgagagggcccaatacaatctaca

SEQ ID NO: 5506392 - DNA, 25 bp, Homo sapien
ctagagtgacagctatccagcagac

SEQ ID NO: 5506393 - DNA, 25 bp, Homo sapien
aaatggatgagaaatagactgctaa

SEQ ID NO: 5506394 - DNA, 25 bp, Homo sapien
aagaagaacatcaaagtgaagacat

SEQ ID NO: 5506395 - DNA, 25 bp, Homo sapien
agatgagagcatactgtctcgggct

SEQ ID NO: 5506396 - DNA, 25 bp, Homo sapien
aggatagaaggaagatattaaagtg

SEQ ID NO: 5506397 - DNA, 25 bp, Homo sapien
gtggtgatgacccagcaacagataa

SEQ ID NO: 5506398 - DNA, 25 bp, Homo sapien
agtgaattggaagataactacccag

SEQ ID NO: 5506399 - DNA, 25 bp, Homo sapien
tgagaatccaatagcgttaacaacc

SEQ ID NO: 5506400 - DNA, 25 bp, Homo sapien
catgaggctgcctagatcctgcttt

SEQ ID NO: 5506401 - DNA, 25 bp, Homo sapien
aacataagaaagaattagtgaattg

SEQ ID NO: 5506402 - DNA, 25 bp, Homo sapien
cagaatgaagcataaagagaccaag

SEQ ID NO: 5506403 - DNA, 25 bp, Homo sapien
tttttccgagtttcatgaggctgcc

SEQ ID NO: 5506404 - DNA, 25 bp, Homo sapien
ctgtgaaaagagtttgtggtgatga

SEQ ID NO: 5506405 - DNA, 25 bp, Homo sapien
ggagctgtggttgagattctatatg

SEQ ID NO: 5506406 - DNA, 25 bp, Homo sapien
taaataatggaatagaatgatggag

SEQ ID NO: 5506407 - DNA, 25 bp, Homo sapien
atgacattttgagatccagtgctgc

SEQ ID NO: 5506408 - DNA, 25 bp, Homo sapien
taaagcaggttggagtaccagcttt

SEQ ID NO: 5506409 - DNA, 25 bp, Homo sapien
ggttggagtaccagctttaggcttc

SEQ ID NO: 5506410 - DNA, 25 bp, Homo sapien
taaatgtcagtttaagatgtcttgg

SEQ ID NO: 5506411 - DNA, 25 bp, Homo sapien
ctggcctaaagccttggacagcctt

SEQ ID NO: 5506412 - DNA, 25 bp, Homo sapien
aaaacctccaattcttaaatgtcag

SEQ ID NO: 5506413 - DNA, 25 bp, Homo sapien
gcttctggcctaaagccttggacag

SEQ ID NO: 5506414 - DNA, 25 bp, Homo sapien
gcaggttggagtaccagctttaggc

SEQ ID NO: 5506415 - DNA, 25 bp, Homo sapien
cactcgcttccttccttggtctctc

SEQ ID NO: 5506416 - DNA, 25 bp, Homo sapien
tggacagcctttcacactcgcttcc

SEQ ID NO: 5506417 - DNA, 25 bp, Homo sapien
tcagtttaagatgtcttggaagatt

SEQ ID NO: 5506418 - DNA, 25 bp, Homo sapien
ttggaagattttctagaatgaataa

SEQ ID NO: 5506419 - DNA, 25 bp, Homo sapien
gtaataaagcatcttcgggagctac

SEQ ID NO: 5506420 - DNA, 25 bp, Homo sapien
gtagctcccgaagatgctttattac

SEQ ID NO: 5506421 - DNA, 25 bp, Homo sapien
gacgacaacgtagtcaccaagggaa

SEQ ID NO: 5506422 - DNA, 25 bp, Homo sapien
ttcccttggtgactacgttgtcgtc

SEQ ID NO: 5506423 - DNA, 25 bp, Homo sapien
cctagaggtccgaataactgatatt

SEQ ID NO: 5506424 - DNA, 25 bp, Homo sapien
aatatcagttattcggacctctagg

SEQ ID NO: 5506425 - DNA, 25 bp, Homo sapien
caggcttccctgtcacatgttttac

SEQ ID NO: 5506426 - DNA, 25 bp, Homo sapien
gttaaggcacatgttaaagtgtcag

SEQ ID NO: 5506427 - DNA, 25 bp, Homo sapien
gatccgaggaactagtatgtcactt

SEQ ID NO: 5506428 - DNA, 25 bp, Homo sapien
accatattaagtacatagaagccat

SEQ ID NO: 5506429 - DNA, 25 bp, Homo sapien
tctgtaccttagtatgcaagattgt

SEQ ID NO: 5506430 - DNA, 25 bp, Homo sapien
ttgtgtgcttttgaaaaaacatgaa

SEQ ID NO: 5506431 - DNA, 25 bp, Homo sapien
tgagttaactagtaaattgtgtgct

SEQ ID NO: 5506432 - DNA, 25 bp, Homo sapien
ttagtatgcaagattgttaaggcac

SEQ ID NO: 5506433 - DNA, 25 bp, Homo sapien
tagaagccatgtttgcagggcactt

SEQ ID NO: 5506434 - DNA, 25 bp, Homo sapien
aagtaaaagatccgaggaactagta

SEQ ID NO: 5506435 - DNA, 25 bp, Homo sapien
tgaaaaatgtaaattgacagcatac

SEQ ID NO: 5506436 - DNA, 25 bp, Homo sapien
gccccctgggacctcgcggccgaac

SEQ ID NO: 5506437 - DNA, 25 bp, Homo sapien
gttcggccgcgaggtcccagggggc

SEQ ID NO: 5506438 - DNA, 25 bp, Homo sapien
gaccggccccctgggacctcgcggc

SEQ ID NO: 5506439 - DNA, 25 bp, Homo sapien
gccgcgaggtcccagggggccggtc

SEQ ID NO: 5506440 - DNA, 25 bp, Homo sapien
gatgtgtgtctacagtggtaaactg

SEQ ID NO: 5506441 - DNA, 25 bp, Homo sapien
aaaaccactaagacactgaaattcc

SEQ ID NO: 5506442 - DNA, 25 bp, Homo sapien
gacctgaaggttgagattgagtatt

SEQ ID NO: 5506443 - DNA, 25 bp, Homo sapien
cacccagcagctttaacttgtagaa

SEQ ID NO: 5506444 - DNA, 25 bp, Homo sapien
tgccacctactgacactgacctgaa

SEQ ID NO: 5506445 - DNA, 25 bp, Homo sapien
gtattataaactagcacccagcagc

SEQ ID NO: 5506446 - DNA, 25 bp, Homo sapien
taagctatggtaaccctaaagaaca

SEQ ID NO: 5506447 - DNA, 25 bp, Homo sapien
agaacaaaggatacaatgcttgaac

SEQ ID NO: 5506448 - DNA, 25 bp, Homo sapien
tgtgcaagtttacagatgtgtgtct

SEQ ID NO: 5506449 - DNA, 25 bp, Homo sapien
ttctgctggagtgacagaataggtg

SEQ ID NO: 5506450 - DNA, 25 bp, Homo sapien
tgacagaataggtgatccttgccac

SEQ ID NO: 5506451 - DNA, 25 bp, Homo sapien
cctatgcatgaatgagggttgaagc

SEQ ID NO: 5506452 - DNA, 25 bp, Homo sapien
tcttgtacaagcactggaattagca

SEQ ID NO: 5506453 - DNA, 25 bp, Homo sapien
cacacatccagaaggctctgggttt

SEQ ID NO: 5506454 - DNA, 25 bp, Homo sapien
tgtcaaccgcttcaccctgagatgc

SEQ ID NO: 5506455 - DNA, 25 bp, Homo sapien
tttggagaagtgtgacctatgcatg

SEQ ID NO: 5506456 - DNA, 25 bp, Homo sapien
gcatggtatgtcagaaaggattaac

SEQ ID NO: 5506457 - DNA, 25 bp, Homo sapien
agggttgaagcctactacctcacac

SEQ ID NO: 5506458 - DNA, 25 bp, Homo sapien
aaggattaactggacaagcagaagc

SEQ ID NO: 5506459 - DNA, 25 bp, Homo sapien
ttagcagatgaagctagaagaagga

SEQ ID NO: 5506460 - DNA, 25 bp, Homo sapien
aaggagacagtttactgatgtcaac

SEQ ID NO: 5506461 - DNA, 25 bp, Homo sapien
ggagacaggccataccaactttgga

SEQ ID NO: 5506462 - DNA, 25 bp, Homo sapien
actccaagactagatctccagatgc

SEQ ID NO: 5506463 - DNA, 25 bp, Homo sapien
aagaatgtacgtaaatggcagaaat

SEQ ID NO: 5506464 - DNA, 25 bp, Homo sapien
caagccaactataaaggacaaaata

SEQ ID NO: 5506465 - DNA, 25 bp, Homo sapien
attgcaggccaattaagaatgtacg

SEQ ID NO: 5506466 - DNA, 25 bp, Homo sapien
gctggtgaagaatcacagatcatgc

SEQ ID NO: 5506467 - DNA, 25 bp, Homo sapien
ccaagcagggctattaactactcca

SEQ ID NO: 5506468 - DNA, 25 bp, Homo sapien
tgaaggtcagaagactatcacactc

SEQ ID NO: 5506469 - DNA, 25 bp, Homo sapien
cagatcatgcagaatttgaaaggtt

SEQ ID NO: 5506470 - DNA, 25 bp, Homo sapien
aggccaagatcagaggactttttga

SEQ ID NO: 5506471 - DNA, 25 bp, Homo sapien
ctgataatgagaatgttaggtaata

SEQ ID NO: 5506472 - DNA, 25 bp, Homo sapien
attcaaagtaatgaccaagcagggc

SEQ ID NO: 5506473 - DNA, 25 bp, Homo sapien
ctggtacacgagagcactccacccg

SEQ ID NO: 5506474 - DNA, 25 bp, Homo sapien
cgggtggagtgctctcgtgtaccag

SEQ ID NO: 5506475 - DNA, 25 bp, Homo sapien
aatgtatacacccgttgcccacgtt

SEQ ID NO: 5506476 - DNA, 25 bp, Homo sapien
agtatgtggtaaaaagtaagtctca

SEQ ID NO: 5506477 - DNA, 25 bp, Homo sapien
tgtgaatcaagaagtaatacaccta

SEQ ID NO: 5506478 - DNA, 25 bp, Homo sapien
atcactgtcccctaaccatcttgtt

SEQ ID NO: 5506479 - DNA, 25 bp, Homo sapien
actaggtaatacatgtatgaggtac

SEQ ID NO: 5506480 - DNA, 25 bp, Homo sapien
gcagtggtgtgcttatggcttacta

SEQ ID NO: 5506481 - DNA, 25 bp, Homo sapien
aaaaagtaagtctcatcactgtccc

SEQ ID NO: 5506482 - DNA, 25 bp, Homo sapien
ggcttactacaactttgacctgggc

SEQ ID NO: 5506483 - DNA, 25 bp, Homo sapien
tacaactttgacctgggcgatcctc

SEQ ID NO: 5506484 - DNA, 25 bp, Homo sapien
tactgtaatactgttttgtggtttc

SEQ ID NO: 5506485 - DNA, 25 bp, Homo sapien
ttcacctaacaatgtgttgtacatc

SEQ ID NO: 5506486 - DNA, 25 bp, Homo sapien
ggagggcatcggtcgagtccttgac

SEQ ID NO: 5506487 - DNA, 25 bp, Homo sapien
gtcaaggactcgaccgatgccctcc

SEQ ID NO: 5506488 - DNA, 25 bp, Homo sapien
cttcgtcgccggtcaggttctcgga

SEQ ID NO: 5506489 - DNA, 25 bp, Homo sapien
tccgagaacctgaccggcgacgaag

SEQ ID NO: 5506490 - DNA, 25 bp, Homo sapien
aaaactgaaagtagatgtcattcat

SEQ ID NO: 5506491 - DNA, 25 bp, Homo sapien
agaaatttaacagtgagaaagaaag

SEQ ID NO: 5506492 - DNA, 25 bp, Homo sapien
caaagaggaaagatgtctgtaagaa

SEQ ID NO: 5506493 - DNA, 25 bp, Homo sapien
tcgagatttcctaagtaaaccagac

SEQ ID NO: 5506494 - DNA, 25 bp, Homo sapien
aaaacattggagtgaagaagccaaa

SEQ ID NO: 5506495 - DNA, 25 bp, Homo sapien
aagttggtagtggaaaacatttcca

SEQ ID NO: 5506496 - DNA, 25 bp, Homo sapien
tgagaaacaaaagtgtaaacaaatc

SEQ ID NO: 5506497 - DNA, 25 bp, Homo sapien
atatattagttgcatctggtctcgc

SEQ ID NO: 5506498 - DNA, 25 bp, Homo sapien
atttgccaaggctgagttatccatg

SEQ ID NO: 5506499 - DNA, 25 bp, Homo sapien
tcctgaggaacttttgaatttgcca

SEQ ID NO: 5506500 - DNA, 25 bp, Homo sapien
ttcgtattagtaaaagatcacattc

SEQ ID NO: 5506501 - DNA, 25 bp, Homo sapien
tcgaaggaaatagtaacatttgtgc

SEQ ID NO: 5506502 - DNA, 25 bp, Homo sapien
aaaaccacagtggtaccacattctg

SEQ ID NO: 5506503 - DNA, 25 bp, Homo sapien
aatgctggactaaatttgtggaata

SEQ ID NO: 5506504 - DNA, 25 bp, Homo sapien
tgtgcagataaaaatcgaaggaaat

SEQ ID NO: 5506505 - DNA, 25 bp, Homo sapien
atatggaaattcagacttagagaag

SEQ ID NO: 5506506 - DNA, 25 bp, Homo sapien
tgagtgtatccaataaagcagtggt

SEQ ID NO: 5506507 - DNA, 25 bp, Homo sapien
aataaagcagtggtgaagctctatt

SEQ ID NO: 5506508 - DNA, 25 bp, Homo sapien
aaatgaacattgtggatatatgctc

SEQ ID NO: 5506509 - DNA, 25 bp, Homo sapien
ataacagagtatacaggaattcttt

SEQ ID NO: 5506510 - DNA, 25 bp, Homo sapien
tcaatagtaatcacaggtaggctct

SEQ ID NO: 5506511 - DNA, 25 bp, Homo sapien
ctcctaaaatagattgtgcagataa

SEQ ID NO: 5506512 - DNA, 25 bp, Homo sapien
ttcatgaagccacaaggccacagtg

SEQ ID NO: 5506513 - DNA, 25 bp, Homo sapien
ctgctttgcatggctgaaacagatc

SEQ ID NO: 5506514 - DNA, 25 bp, Homo sapien
taaggcctccagacacagcatcttc

SEQ ID NO: 5506515 - DNA, 25 bp, Homo sapien
taagtgaagtgacatcccaaacctt

SEQ ID NO: 5506516 - DNA, 25 bp, Homo sapien
gtgaagagggccacttaaactccat

SEQ ID NO: 5506517 - DNA, 25 bp, Homo sapien
ttttatgcacctagagagaaagaga

SEQ ID NO: 5506518 - DNA, 25 bp, Homo sapien
tcaggtattgcaactggaatggttt

SEQ ID NO: 5506519 - DNA, 25 bp, Homo sapien
aagcaaagggagaatatgcagttta

SEQ ID NO: 5506520 - DNA, 25 bp, Homo sapien
gccacccccagaaccacattcagtc

SEQ ID NO: 5506521 - DNA, 25 bp, Homo sapien
ctgaaggctccttaagtgaagtgac

SEQ ID NO: 5506522 - DNA, 25 bp, Homo sapien
agttaccctcaggcctggccacccc

SEQ ID NO: 5506523 - DNA, 25 bp, Homo sapien
catattatgtgggtgcttttgctcc

SEQ ID NO: 5506524 - DNA, 25 bp, Homo sapien
cctgtcattatgtatcaagaacctt

SEQ ID NO: 5506525 - DNA, 25 bp, Homo sapien
gctgcaaattgaaacaaagtgggaa

SEQ ID NO: 5506526 - DNA, 25 bp, Homo sapien
gatccctggagtaaatgaatgtatt

SEQ ID NO: 5506527 - DNA, 25 bp, Homo sapien
gttgataacaaatgctactgagagt

SEQ ID NO: 5506528 - DNA, 25 bp, Homo sapien
gtaaatgaacattaaaaatagctgc

SEQ ID NO: 5506529 - DNA, 25 bp, Homo sapien
aacttaacgtacatattgaggaaat

SEQ ID NO: 5506530 - DNA, 25 bp, Homo sapien
tgctactgagagttaatagtgttcc

SEQ ID NO: 5506531 - DNA, 25 bp, Homo sapien
aaaactttgtaagagatagaagaaa

SEQ ID NO: 5506532 - DNA, 25 bp, Homo sapien
ccttacagataaagtttgctgatcc

SEQ ID NO: 5506533 - DNA, 25 bp, Homo sapien
atcacaaaggtaaaaactgtcagat

SEQ ID NO: 5506534 - DNA, 25 bp, Homo sapien
ggatgtgaagggtattgactttgga

SEQ ID NO: 5506535 - DNA, 25 bp, Homo sapien
cttaaccaggagacatcgtggatgt

SEQ ID NO: 5506536 - DNA, 25 bp, Homo sapien
atgggttctagtggattctggagta

SEQ ID NO: 5506537 - DNA, 25 bp, Homo sapien
tctggttggtcgaatcactagctat

SEQ ID NO: 5506538 - DNA, 25 bp, Homo sapien
ggtctggacctaggatacagagtgg

SEQ ID NO: 5506539 - DNA, 25 bp, Homo sapien
attagacctggtagaaagtaagtga

SEQ ID NO: 5506540 - DNA, 25 bp, Homo sapien
atgcatgaaagaacacaaccctgac

SEQ ID NO: 5506541 - DNA, 25 bp, Homo sapien
atgctgtctagtgtgtatacctgcc

SEQ ID NO: 5506542 - DNA, 25 bp, Homo sapien
accctgactgaaacgtaggacactc

SEQ ID NO: 5506543 - DNA, 25 bp, Homo sapien
gcctgcaaggtagggcatcttgtag

SEQ ID NO: 5506544 - DNA, 25 bp, Homo sapien
taagtgatggaagcaaagctcttaa

SEQ ID NO: 5506545 - DNA, 25 bp, Homo sapien
ggggagtcagagatgatctctcact

SEQ ID NO: 5506546 - DNA, 25 bp, Homo sapien
gagaaaacagcccttaccaccagac

SEQ ID NO: 5506547 - DNA, 25 bp, Homo sapien
ttatgaagatccccatgaacacgtc

SEQ ID NO: 5506548 - DNA, 25 bp, Homo sapien
atgaacacgtcgatgatgtatatgc

SEQ ID NO: 5506549 - DNA, 25 bp, Homo sapien
ataagaggaaattaaagagtcatta

SEQ ID NO: 5506550 - DNA, 25 bp, Homo sapien
gtcgcagtcgaagagcccttttatt

SEQ ID NO: 5506551 - DNA, 25 bp, Homo sapien
acatgcagtaagccatcaagattcc

SEQ ID NO: 5506552 - DNA, 25 bp, Homo sapien
ggggctgcaacagacctgaataaat

SEQ ID NO: 5506553 - DNA, 25 bp, Homo sapien
taaaacaagccattcagtcgcagtc

SEQ ID NO: 5506554 - DNA, 25 bp, Homo sapien
tccatcccagggtaagtaagccata

SEQ ID NO: 5506555 - DNA, 25 bp, Homo sapien
atccagccaaagagcccatttacac

SEQ ID NO: 5506556 - DNA, 25 bp, Homo sapien
tgagtcagaaagcttgtatagggag

SEQ ID NO: 5506557 - DNA, 25 bp, Homo sapien
ttggagagacagactataaagttaa

SEQ ID NO: 5506558 - DNA, 25 bp, Homo sapien
aggctggtatcaatcctcccctgcc

SEQ ID NO: 5506559 - DNA, 25 bp, Homo sapien
acaggaggacagatatgatgtttgt

SEQ ID NO: 5506560 - DNA, 25 bp, Homo sapien
ttgaaataagttagtacagttcttc

SEQ ID NO: 5506561 - DNA, 25 bp, Homo sapien
cgtttgtactaaaggtacaggagga

SEQ ID NO: 5506562 - DNA, 25 bp, Homo sapien
tgatgctgagcatctcgatgatgat

SEQ ID NO: 5506563 - DNA, 25 bp, Homo sapien
cgatgatgatgttgagtcagaaagc

SEQ ID NO: 5506564 - DNA, 25 bp, Homo sapien
ttgtatagggagcataaacattcta

SEQ ID NO: 5506565 - DNA, 25 bp, Homo sapien
cagtcaacaggattaatgacaagtt

SEQ ID NO: 5506566 - DNA, 25 bp, Homo sapien
aatacacacagtgttggagtttgga

SEQ ID NO: 5506567 - DNA, 25 bp, Homo sapien
tcattgagtgctgttgtccccctac

SEQ ID NO: 5506568 - DNA, 25 bp, Homo sapien
aggcagggaagttagatttaaatgc

SEQ ID NO: 5506569 - DNA, 25 bp, Homo sapien
accaaattgtgacccagcctctatc

SEQ ID NO: 5506570 - DNA, 25 bp, Homo sapien
taaagtatcaagagacgtgccatct

SEQ ID NO: 5506571 - DNA, 25 bp, Homo sapien
gtgctccccatggaccctggatgtc

SEQ ID NO: 5506572 - DNA, 25 bp, Homo sapien
ggggtccatgtcctctggtgtgctc

SEQ ID NO: 5506573 - DNA, 25 bp, Homo sapien
tctgaacatcagcactgccgacgtt

SEQ ID NO: 5506574 - DNA, 25 bp, Homo sapien
ctttgtaagaatcacaggcggagtg

SEQ ID NO: 5506575 - DNA, 25 bp, Homo sapien
cacaagacgggaaatccaaattgac

SEQ ID NO: 5506576 - DNA, 25 bp, Homo sapien
cccagctgtactgaagtgtggggtc

SEQ ID NO: 5506577 - DNA, 25 bp, Homo sapien
actgccgacgtttggggccaaataa

SEQ ID NO: 5506578 - DNA, 25 bp, Homo sapien
ttccaaagaagtgatacagacggta

SEQ ID NO: 5506579 - DNA, 25 bp, Homo sapien
caggaagcttcggagttacaaatgc

SEQ ID NO: 5506580 - DNA, 25 bp, Homo sapien
aagcctgccataatttggggtctgc

SEQ ID NO: 5506581 - DNA, 25 bp, Homo sapien
tacattgtaggttaaagaggcttcc

SEQ ID NO: 5506582 - DNA, 25 bp, Homo sapien
ggccagctggaaatccaaccaccat

SEQ ID NO: 5506583 - DNA, 25 bp, Homo sapien
cattcctgagagtgacaatgtctcc

SEQ ID NO: 5506584 - DNA, 25 bp, Homo sapien
gaacgacgacaggactaataataca

SEQ ID NO: 5506585 - DNA, 25 bp, Homo sapien
gtccagcttggaagtcaggacacgt

SEQ ID NO: 5506586 - DNA, 25 bp, Homo sapien
tacagacggtaattgctatgaattc

SEQ ID NO: 5506587 - DNA, 25 bp, Homo sapien
tcacggtttaagtacaggaagcttc

SEQ ID NO: 5506588 - DNA, 25 bp, Homo sapien
gatgcccagggatgctcttcttgtc

SEQ ID NO: 5506589 - DNA, 25 bp, Homo sapien
actgcctgtggccaaatcctgccca

SEQ ID NO: 5506590 - DNA, 25 bp, Homo sapien
agaaaaagtgctgaccccagagata

SEQ ID NO: 5506591 - DNA, 25 bp, Homo sapien
aggggctggcaaaatactgcctgtg

SEQ ID NO: 5506592 - DNA, 25 bp, Homo sapien
ggagcagcaataaggaatgcataga

SEQ ID NO: 5506593 - DNA, 25 bp, Homo sapien
gattcaagagagtgcattcattttc

SEQ ID NO: 5506594 - DNA, 25 bp, Homo sapien
ctcaaatatgtgtgcagtgagggaa

SEQ ID NO: 5506595 - DNA, 25 bp, Homo sapien
gataaaacattggtataaggcaggg

SEQ ID NO: 5506596 - DNA, 25 bp, Homo sapien
ctggccgcattcacaatacaacatc

SEQ ID NO: 5506597 - DNA, 25 bp, Homo sapien
gtgagggaagtagattgttatttga

SEQ ID NO: 5506598 - DNA, 25 bp, Homo sapien
cagagcccttatgtcccgtgaagcc

SEQ ID NO: 5506599 - DNA, 25 bp, Homo sapien
gctgaccccagagataaggtaacct

SEQ ID NO: 5506600 - DNA, 25 bp, Homo sapien
tgaaagcttgcaaaaatgaactcgt

SEQ ID NO: 5506601 - DNA, 25 bp, Homo sapien
aaagtgcctagtacatatacatgtc

SEQ ID NO: 5506602 - DNA, 25 bp, Homo sapien
aatgacactcagatgcaatggaaac

SEQ ID NO: 5506603 - DNA, 25 bp, Homo sapien
ttctagcaacaagattgtgatctgc

SEQ ID NO: 5506604 - DNA, 25 bp, Homo sapien
tacttgtcctaaggcagttagcatt

SEQ ID NO: 5506605 - DNA, 25 bp, Homo sapien
gaggagccatagacttagagtgaaa

SEQ ID NO: 5506606 - DNA, 25 bp, Homo sapien
aggcagttagcatttaggagctcaa

SEQ ID NO: 5506607 - DNA, 25 bp, Homo sapien
gaaatatatcttaggtggctgtgag

SEQ ID NO: 5506608 - DNA, 25 bp, Homo sapien
caaattgatggtgccttgtacatac

SEQ ID NO: 5506609 - DNA, 25 bp, Homo sapien
atttaatagagaagtaaatgggagg

SEQ ID NO: 5506610 - DNA, 25 bp, Homo sapien
ccttaagcataagaaccattgttca

SEQ ID NO: 5506611 - DNA, 25 bp, Homo sapien
tttggctagagtatcaatgaataac

SEQ ID NO: 5506612 - DNA, 25 bp, Homo sapien
aaaaaaaggatgttagtggcaatag

SEQ ID NO: 5506613 - DNA, 25 bp, Homo sapien
ttaatgacaaaagttcaggcctgaa

SEQ ID NO: 5506614 - DNA, 25 bp, Homo sapien
gaaattgaatgatgggtacaaggga

SEQ ID NO: 5506615 - DNA, 25 bp, Homo sapien
aactgaccgtagctcaacgggttat

SEQ ID NO: 5506616 - DNA, 25 bp, Homo sapien
tggcaataggtaaaatttgaaaggc

SEQ ID NO: 5506617 - DNA, 25 bp, Homo sapien
caggcctgaaactaccaaataggga

SEQ ID NO: 5506618 - DNA, 25 bp, Homo sapien
tgaactcaggaaattttaggcacag

SEQ ID NO: 5506619 - DNA, 25 bp, Homo sapien
aaatagggaaggctgtcatcacttc

SEQ ID NO: 5506620 - DNA, 25 bp, Homo sapien
aatcagcccaatgaacagatgaatt

SEQ ID NO: 5506621 - DNA, 25 bp, Homo sapien
tggtcagtccaggcattaaagcact

SEQ ID NO: 5506622 - DNA, 25 bp, Homo sapien
agagataaaatatttctacactgag

SEQ ID NO: 5506623 - DNA, 25 bp, Homo sapien
gggtcccatgtgcaatagcatcaaa

SEQ ID NO: 5506624 - DNA, 25 bp, Homo sapien
aggggaagaaagcccatgttcatgg

SEQ ID NO: 5506625 - DNA, 25 bp, Homo sapien
tggatatatactcggaagtgagatt

SEQ ID NO: 5506626 - DNA, 25 bp, Homo sapien
ccggggtgcaatgttccccttcctg

SEQ ID NO: 5506627 - DNA, 25 bp, Homo sapien
gtgcatgtgtttggatatatactcg

SEQ ID NO: 5506628 - DNA, 25 bp, Homo sapien
gacatatggcttggttccaagtctt

SEQ ID NO: 5506629 - DNA, 25 bp, Homo sapien
ctacactgagaactacataagatta

SEQ ID NO: 5506630 - DNA, 25 bp, Homo sapien
actacataagattaataaaagaaat

SEQ ID NO: 5506631 - DNA, 25 bp, Homo sapien
tatatactcggaagtgagattgctg

SEQ ID NO: 5506632 - DNA, 25 bp, Homo sapien
gtgtttggatatatactcggaagtg

SEQ ID NO: 5506633 - DNA, 25 bp, Homo sapien
ggcacagaagacaccccagtgtcga

SEQ ID NO: 5506634 - DNA, 25 bp, Homo sapien
tcgacactggggtgtcttctgtgcc

SEQ ID NO: 5506635 - DNA, 25 bp, Homo sapien
ttttgagtccttggatggggaatag

SEQ ID NO: 5506636 - DNA, 25 bp, Homo sapien
atatgaaagacaatgggagttagtt

SEQ ID NO: 5506637 - DNA, 25 bp, Homo sapien
tggggtgtcattgtctgagcaagtt

SEQ ID NO: 5506638 - DNA, 25 bp, Homo sapien
gtctggtgtgaactggcagttagaa

SEQ ID NO: 5506639 - DNA, 25 bp, Homo sapien
tggctacatacagaggaattggtta

SEQ ID NO: 5506640 - DNA, 25 bp, Homo sapien
aagatgaagagttagagtctgagta

SEQ ID NO: 5506641 - DNA, 25 bp, Homo sapien
gaagattgggttcaacactactggt

SEQ ID NO: 5506642 - DNA, 25 bp, Homo sapien
agaagagtagatgaaccatgaagat

SEQ ID NO: 5506643 - DNA, 25 bp, Homo sapien
taaataaatcagatggggttgataa

SEQ ID NO: 5506644 - DNA, 25 bp, Homo sapien
tgtaaatatagcaaaggagaagagt

SEQ ID NO: 5506645 - DNA, 25 bp, Homo sapien
ctgcctataagggtgacccggcatg

SEQ ID NO: 5506646 - DNA, 25 bp, Homo sapien
acttgagaattctgggaaatacaat

SEQ ID NO: 5506647 - DNA, 25 bp, Homo sapien
agccagaccatatcagatggagtct

SEQ ID NO: 5506648 - DNA, 25 bp, Homo sapien
tccctcccacaacacttgagaattc

SEQ ID NO: 5506649 - DNA, 25 bp, Homo sapien
agtagctggtactataggtgcacac

SEQ ID NO: 5506650 - DNA, 25 bp, Homo sapien
aacccctgataaactcatgagatgt

SEQ ID NO: 5506651 - DNA, 25 bp, Homo sapien
tataggtgcacaccaccatgcctgg

SEQ ID NO: 5506652 - DNA, 25 bp, Homo sapien
tcatgagatgttgtgagacttattc

SEQ ID NO: 5506653 - DNA, 25 bp, Homo sapien
gcatgggaaagactggcccccatga

SEQ ID NO: 5506654 - DNA, 25 bp, Homo sapien
tggagtcttgctctgatgtccaggc

SEQ ID NO: 5506655 - DNA, 25 bp, Homo sapien
gccgtgcctggctgaaaggcacttc

SEQ ID NO: 5506656 - DNA, 25 bp, Homo sapien
gggcgccatctaggctcagtgcaac

SEQ ID NO: 5506657 - DNA, 25 bp, Homo sapien
acccaacagttgaagagaggtttgc

SEQ ID NO: 5506658 - DNA, 25 bp, Homo sapien
accatggcacataactaggagtctt

SEQ ID NO: 5506659 - DNA, 25 bp, Homo sapien
ggtcccagcctggtacagaaaaggc

SEQ ID NO: 5506660 - DNA, 25 bp, Homo sapien
cttgaacaggtgcactaatctctcc

SEQ ID NO: 5506661 - DNA, 25 bp, Homo sapien
agagcaagggtttcgtccctggcaa

SEQ ID NO: 5506662 - DNA, 25 bp, Homo sapien
gagtctccaggtaaacaacggcaga

SEQ ID NO: 5506663 - DNA, 25 bp, Homo sapien
gccaacaccctcagtccaaacaccc

SEQ ID NO: 5506664 - DNA, 25 bp, Homo sapien
gagaggtttgcccaattcaggcacc

SEQ ID NO: 5506665 - DNA, 25 bp, Homo sapien
taggagtcttcgtccagaatagcca

SEQ ID NO: 5506666 - DNA, 25 bp, Homo sapien
ctccagtgccagccatgagacaaga

SEQ ID NO: 5506667 - DNA, 25 bp, Homo sapien
taaaggtgataacttgaacaggtgc

SEQ ID NO: 5506668 - DNA, 25 bp, Homo sapien
tcatagctgttggttcaaagaactc

SEQ ID NO: 5506669 - DNA, 25 bp, Homo sapien
agaagcaataatccaggacaatgga

SEQ ID NO: 5506670 - DNA, 25 bp, Homo sapien
gaggcaggagtcactcatcattgct

SEQ ID NO: 5506671 - DNA, 25 bp, Homo sapien
tcaaagaactctgtacggtaaaatc

SEQ ID NO: 5506672 - DNA, 25 bp, Homo sapien
acggtaaaatctattgatgtgctct

SEQ ID NO: 5506673 - DNA, 25 bp, Homo sapien
gatgtgctctcttgtgataactttc

SEQ ID NO: 5506674 - DNA, 25 bp, Homo sapien
cagaaagacactatgcttggcacac

SEQ ID NO: 5506675 - DNA, 25 bp, Homo sapien
cattgctgtgagtgtgaatcattgc

SEQ ID NO: 5506676 - DNA, 25 bp, Homo sapien
gttgaatgcatgccagaaagacact

SEQ ID NO: 5506677 - DNA, 25 bp, Homo sapien
ataatccaggacaatggatgaggca

SEQ ID NO: 5506678 - DNA, 25 bp, Homo sapien
taactgcaagttctaactgcaagtt

SEQ ID NO: 5506679 - DNA, 25 bp, Homo sapien
atagagagccattacaaatcagtag

SEQ ID NO: 5506680 - DNA, 25 bp, Homo sapien
gaaaaggactgaaagatatgatgac

SEQ ID NO: 5506681 - DNA, 25 bp, Homo sapien
aagactaatagaaaacatgagagaa

SEQ ID NO: 5506682 - DNA, 25 bp, Homo sapien
tagcaaaactattaagatggaattc

SEQ ID NO: 5506683 - DNA, 25 bp, Homo sapien
caataaagatatggaaaggtgttca

SEQ ID NO: 5506684 - DNA, 25 bp, Homo sapien
atcagtaggaaacccctcaatggac

SEQ ID NO: 5506685 - DNA, 25 bp, Homo sapien
ctctggaaaaagggaattctaatgc

SEQ ID NO: 5506686 - DNA, 25 bp, Homo sapien
ccctcaatggacaagttagcaaaac

SEQ ID NO: 5506687 - DNA, 25 bp, Homo sapien
gaaaagggctttcaatgcatgccat

SEQ ID NO: 5506688 - DNA, 25 bp, Homo sapien
atgcatgccatcaaagccagaaata

SEQ ID NO: 5506689 - DNA, 25 bp, Homo sapien
aataaccagtgttggcaaggctctg

SEQ ID NO: 5506690 - DNA, 25 bp, Homo sapien
ttgttccatcaattccataagcctt

SEQ ID NO: 5506691 - DNA, 25 bp, Homo sapien
tgaataaccttcacactgctttgtc

SEQ ID NO: 5506692 - DNA, 25 bp, Homo sapien
acagcctgtctttgagttccctaat

SEQ ID NO: 5506693 - DNA, 25 bp, Homo sapien
tgattagctgtgatcttccagttcc

SEQ ID NO: 5506694 - DNA, 25 bp, Homo sapien
gattataatatatcttggggtattc

SEQ ID NO: 5506695 - DNA, 25 bp, Homo sapien
tgtctgaaagatcacaatccccatc

SEQ ID NO: 5506696 - DNA, 25 bp, Homo sapien
ctccaggtttggaaagtcctattat

SEQ ID NO: 5506697 - DNA, 25 bp, Homo sapien
cttggggtattcttatttgggttga

SEQ ID NO: 5506698 - DNA, 25 bp, Homo sapien
ggttgaatctgattgattagctgtg

SEQ ID NO: 5506699 - DNA, 25 bp, Homo sapien
tgattatttccaaacagcctgtctt

SEQ ID NO: 5506700 - DNA, 25 bp, Homo sapien
tcaactccggcatgtttgtggtttt

SEQ ID NO: 5506701 - DNA, 25 bp, Homo sapien
tggttaagataaagatataggtgta

SEQ ID NO: 5506702 - DNA, 25 bp, Homo sapien
tgagagtagcatcacataaagagat

SEQ ID NO: 5506703 - DNA, 25 bp, Homo sapien
tgtgagtggacttaatgctgcagaa

SEQ ID NO: 5506704 - DNA, 25 bp, Homo sapien
gaggttcttagagtaagtcagattc

SEQ ID NO: 5506705 - DNA, 25 bp, Homo sapien
tgtggcatatgcttacagtggaata

SEQ ID NO: 5506706 - DNA, 25 bp, Homo sapien
atacttgcagaggtgattctggcgg

SEQ ID NO: 5506707 - DNA, 25 bp, Homo sapien
ggagtgagtccctatgctgacccca

SEQ ID NO: 5506708 - DNA, 25 bp, Homo sapien
tcacaagattcctgagagtagcatc

SEQ ID NO: 5506709 - DNA, 25 bp, Homo sapien
ttcagtactacaggagattggttgc

SEQ ID NO: 5506710 - DNA, 25 bp, Homo sapien
agagatgtggacaatttggataagc

SEQ ID NO: 5506711 - DNA, 25 bp, Homo sapien
agctataaaagcaccttgaggacat

SEQ ID NO: 5506712 - DNA, 25 bp, Homo sapien
aagccaaggttagcagaaaatgatc

SEQ ID NO: 5506713 - DNA, 25 bp, Homo sapien
tatgaagttacaggaacatggagag

SEQ ID NO: 5506714 - DNA, 25 bp, Homo sapien
ggccaaaccaatatactagaacaat

SEQ ID NO: 5506715 - DNA, 25 bp, Homo sapien
ggtggaaactgagtctgaaaatctc

SEQ ID NO: 5506716 - DNA, 25 bp, Homo sapien
ttgtatagcaatattggccaaacca

SEQ ID NO: 5506717 - DNA, 25 bp, Homo sapien
atcctgtcatgttggctggatgcca

SEQ ID NO: 5506718 - DNA, 25 bp, Homo sapien
aatggatatgagcatgtatgaagtt

SEQ ID NO: 5506719 - DNA, 25 bp, Homo sapien
tacccatagtaatcaagtgcatttc

SEQ ID NO: 5506720 - DNA, 25 bp, Homo sapien
aaatctctgctcagcgacctgtgac

SEQ ID NO: 5506721 - DNA, 25 bp, Homo sapien
aagaaaaagcggctaaataaatgag

SEQ ID NO: 5506722 - DNA, 25 bp, Homo sapien
atagttaattcgggtggaaactgag

SEQ ID NO: 5506723 - DNA, 25 bp, Homo sapien
agaggtaccaaaggcccaattcttc

SEQ ID NO: 5506724 - DNA, 25 bp, Homo sapien
cagcaaaagctaagcatatgggtgc

SEQ ID NO: 5506725 - DNA, 25 bp, Homo sapien
gcatatgggtgcacagtaagttgct

SEQ ID NO: 5506726 - DNA, 25 bp, Homo sapien
agaagggagagaacataatctttgg

SEQ ID NO: 5506727 - DNA, 25 bp, Homo sapien
aagaagtgtgatgaaacaagaacat

SEQ ID NO: 5506728 - DNA, 25 bp, Homo sapien
agacagagacagcttcctaacagac

SEQ ID NO: 5506729 - DNA, 25 bp, Homo sapien
tgccaaggttaggtctgaaaacagt

SEQ ID NO: 5506730 - DNA, 25 bp, Homo sapien
gaaacaagaacatcaaagtaggact

SEQ ID NO: 5506731 - DNA, 25 bp, Homo sapien
ttcggccactaggtggcaggttaaa

SEQ ID NO: 5506732 - DNA, 25 bp, Homo sapien
aagttgctaaacgaagagatcagag

SEQ ID NO: 5506733 - DNA, 25 bp, Homo sapien
aaagtaggactgaccttgccaaggt

SEQ ID NO: 5506734 - DNA, 25 bp, Homo sapien
gttattatgaagagactgaggtgca

SEQ ID NO: 5506735 - DNA, 25 bp, Homo sapien
aggtgctgaagctgagatttgtaac

SEQ ID NO: 5506736 - DNA, 25 bp, Homo sapien
aatccaggggtcatgctcttcccat

SEQ ID NO: 5506737 - DNA, 25 bp, Homo sapien
ggtgcagagaagaaagttcacataa

SEQ ID NO: 5506738 - DNA, 25 bp, Homo sapien
cattttaagaggaattaggaaggaa

SEQ ID NO: 5506739 - DNA, 25 bp, Homo sapien
ccaagtgcctgaaatagtgcctagc

SEQ ID NO: 5506740 - DNA, 25 bp, Homo sapien
aaggtcagcctaagttgtcagcaat

SEQ ID NO: 5506741 - DNA, 25 bp, Homo sapien
aaataggtatataaaggtcagccta

SEQ ID NO: 5506742 - DNA, 25 bp, Homo sapien
tataggtagaataattgatgatgat

SEQ ID NO: 5506743 - DNA, 25 bp, Homo sapien
caataatgtacgttccaagtgcctg

SEQ ID NO: 5506744 - DNA, 25 bp, Homo sapien
tcacataactgctaggtgctgaagc

SEQ ID NO: 5506745 - DNA, 25 bp, Homo sapien
tcgatagggtctagcggcgcgccct

SEQ ID NO: 5506746 - DNA, 25 bp, Homo sapien
agggcgcgccgctagaccctatcga

SEQ ID NO: 5506747 - DNA, 25 bp, Homo sapien
ccgtgcacgtgcacgagcccccgtc

SEQ ID NO: 5506748 - DNA, 25 bp, Homo sapien
gacgggggctcgtgcacgtgcacgg

SEQ ID NO: 5506749 - DNA, 25 bp, Homo sapien
cctcttgctagtgggttaaatgttt

SEQ ID NO: 5506750 - DNA, 25 bp, Homo sapien
tagtatgcacattgaagtctaaact

SEQ ID NO: 5506751 - DNA, 25 bp, Homo sapien
taactagagtagatctgaatgagga

SEQ ID NO: 5506752 - DNA, 25 bp, Homo sapien
tagaccaccagtaaataatcctcct

SEQ ID NO: 5506753 - DNA, 25 bp, Homo sapien
attatagcagtagtagaagttttgt

SEQ ID NO: 5506754 - DNA, 25 bp, Homo sapien
gagtagatctgaatgaggataaccc

SEQ ID NO: 5506755 - DNA, 25 bp, Homo sapien
gaagtctaaactgtagaagagtcta

SEQ ID NO: 5506756 - DNA, 25 bp, Homo sapien
caattatgaagaagttgaaggtact

SEQ ID NO: 5506757 - DNA, 25 bp, Homo sapien
aaaggaaaatcattcaggaagaaat

SEQ ID NO: 5506758 - DNA, 25 bp, Homo sapien
ggataaccctaaaatcatgaggaat

SEQ ID NO: 5506759 - DNA, 25 bp, Homo sapien
aggaagaaatgacctgtctaaaaaa

SEQ ID NO: 5506760 - DNA, 25 bp, Homo sapien
gttttcagactcagcccacttgcac

SEQ ID NO: 5506761 - DNA, 25 bp, Homo sapien
ggacaatgggtcttatcatctcccc

SEQ ID NO: 5506762 - DNA, 25 bp, Homo sapien
ctctgctaacaatagataaccactt

SEQ ID NO: 5506763 - DNA, 25 bp, Homo sapien
tccaccattgtgacctgtccctgtc

SEQ ID NO: 5506764 - DNA, 25 bp, Homo sapien
gtccttctggttacatatgttctgc

SEQ ID NO: 5506765 - DNA, 25 bp, Homo sapien
tcagactcagcccacttgcactcaa

SEQ ID NO: 5506766 - DNA, 25 bp, Homo sapien
accaacattacaacattccaccatt

SEQ ID NO: 5506767 - DNA, 25 bp, Homo sapien
gctgaaaaaccacacaagaagtaaa

SEQ ID NO: 5506768 - DNA, 25 bp, Homo sapien
gggcagctgaaaaaccacacaagaa

SEQ ID NO: 5506769 - DNA, 25 bp, Homo sapien
tcttctggacaatgggtcttatcat

SEQ ID NO: 5506770 - DNA, 25 bp, Homo sapien
ctgatcaatcgaccttgtgacagtc

SEQ ID NO: 5506771 - DNA, 25 bp, Homo sapien
tttaatagttataagtgtgtagacc

SEQ ID NO: 5506772 - DNA, 25 bp, Homo sapien
ggtctacacacttataactattaaa

SEQ ID NO: 5506773 - DNA, 25 bp, Homo sapien
gtcttccatgatagtaaatttaaaa

SEQ ID NO: 5506774 - DNA, 25 bp, Homo sapien
ttttaaatttactatcatggaagac

SEQ ID NO: 5506775 - DNA, 25 bp, Homo sapien
agtcttccatgatagtaaatttaaa

SEQ ID NO: 5506776 - DNA, 25 bp, Homo sapien
tttaaatttactatcatggaagact

SEQ ID NO: 5506777 - DNA, 25 bp, Homo sapien
gaaccagactaaacagttccaagac

SEQ ID NO: 5506778 - DNA, 25 bp, Homo sapien
gtcttggaactgtttagtctggttc

SEQ ID NO: 5506779 - DNA, 25 bp, Homo sapien
aaaaatctacacaaacatattcact

SEQ ID NO: 5506780 - DNA, 25 bp, Homo sapien
agtgaatatgtttgtgtagattttt

SEQ ID NO: 5506781 - DNA, 25 bp, Homo sapien
atctattacaaaaaatgaggtcaac

SEQ ID NO: 5506782 - DNA, 25 bp, Homo sapien
gttgacctcattttttgtaatagat

SEQ ID NO: 5506783 - DNA, 25 bp, Homo sapien
ttcggtggtcctactcggcgagatt

SEQ ID NO: 5506784 - DNA, 25 bp, Homo sapien
aatctcgccgagtaggaccaccgaa

SEQ ID NO: 5506785 - DNA, 25 bp, Homo sapien
gtccacatccgttcacataattccg

SEQ ID NO: 5506786 - DNA, 25 bp, Homo sapien
cggaattatgtgaacggatgtggac

SEQ ID NO: 5506787 - DNA, 25 bp, Homo sapien
ttagagatgggttatctagacattc

SEQ ID NO: 5506788 - DNA, 25 bp, Homo sapien
agtgtcactgactctacaagaccta

SEQ ID NO: 5506789 - DNA, 25 bp, Homo sapien
tgctaaagagtggtaaagttggcat

SEQ ID NO: 5506790 - DNA, 25 bp, Homo sapien
tacaagacctaaacatgaaaagaaa

SEQ ID NO: 5506791 - DNA, 25 bp, Homo sapien
aagagatattcattacggaccacat

SEQ ID NO: 5506792 - DNA, 25 bp, Homo sapien
ttgcaaagcaaagaattacagaatc

SEQ ID NO: 5506793 - DNA, 25 bp, Homo sapien
tgttcctaccagcctggcacggggt

SEQ ID NO: 5506794 - DNA, 25 bp, Homo sapien
tgtggctcatggaagttaaagaact

SEQ ID NO: 5506795 - DNA, 25 bp, Homo sapien
acagatgaaaaaattgtggctcatg

SEQ ID NO: 5506796 - DNA, 25 bp, Homo sapien
tgggttaagaaagtaacaatgactc

SEQ ID NO: 5506797 - DNA, 25 bp, Homo sapien
gtctaagtaggatataagatgcctc

SEQ ID NO: 5506798 - DNA, 25 bp, Homo sapien
tcgtgatgcaggttaccagccctta

SEQ ID NO: 5506799 - DNA, 25 bp, Homo sapien
aggttataggttgaataggagaaaa

SEQ ID NO: 5506800 - DNA, 25 bp, Homo sapien
acatccacagaagagagataaatat

SEQ ID NO: 5506801 - DNA, 25 bp, Homo sapien
aatgcactagtggaaacaaattctt

SEQ ID NO: 5506802 - DNA, 25 bp, Homo sapien
ctcaagctcagggaatgaattcagg

SEQ ID NO: 5506803 - DNA, 25 bp, Homo sapien
tttggaagatgaataggtctaagtc

SEQ ID NO: 5506804 - DNA, 25 bp, Homo sapien
ctgcaaagcagcgcagtagatttcc

SEQ ID NO: 5506805 - DNA, 25 bp, Homo sapien
cttgcaaaagaagctggctgtgttc

SEQ ID NO: 5506806 - DNA, 25 bp, Homo sapien
tgattgactaacaggtacaaccttg

SEQ ID NO: 5506807 - DNA, 25 bp, Homo sapien
agtaaaaccttaagagtcaggacca

SEQ ID NO: 5506808 - DNA, 25 bp, Homo sapien
gaattcagggtctgatgagtgccat

SEQ ID NO: 5506809 - DNA, 25 bp, Homo sapien
tttacgttcgtctattttcaaataa

SEQ ID NO: 5506810 - DNA, 25 bp, Homo sapien
ttatttgaaaatagacgaacgtaaa

SEQ ID NO: 5506811 - DNA, 25 bp, Homo sapien
aagttacagtgagctcctcagattc

SEQ ID NO: 5506812 - DNA, 25 bp, Homo sapien
actggctaaagaaaatctacaagtg

SEQ ID NO: 5506813 - DNA, 25 bp, Homo sapien
tcttctagaaagtaaacaacccatc

SEQ ID NO: 5506814 - DNA, 25 bp, Homo sapien
cctattcagttatgcccaggggcag

SEQ ID NO: 5506815 - DNA, 25 bp, Homo sapien
gtgactcagtatgacttagtgtttc

SEQ ID NO: 5506816 - DNA, 25 bp, Homo sapien
atggtacattacaaattcctgagtc

SEQ ID NO: 5506817 - DNA, 25 bp, Homo sapien
aaatcagtatttggtgttcacgtaa

SEQ ID NO: 5506818 - DNA, 25 bp, Homo sapien
aagtgaaaagctctaatggtacatt

SEQ ID NO: 5506819 - DNA, 25 bp, Homo sapien
aaactctaggccatacttaggtcaa

SEQ ID NO: 5506820 - DNA, 25 bp, Homo sapien
aactagcatcctaaaagtgaaaagc

SEQ ID NO: 5506821 - DNA, 25 bp, Homo sapien
tctgtgtgagtatgaaaagagaaga

SEQ ID NO: 5506822 - DNA, 25 bp, Homo sapien
aaacaactgccaaccaagaatactg

SEQ ID NO: 5506823 - DNA, 25 bp, Homo sapien
caagaaatgctaaagtgactccaag

SEQ ID NO: 5506824 - DNA, 25 bp, Homo sapien
actagaactgcctcacaagaaatgc

SEQ ID NO: 5506825 - DNA, 25 bp, Homo sapien
gggggagcagtacatcgtactatta

SEQ ID NO: 5506826 - DNA, 25 bp, Homo sapien
ataaaggggactactacatatccag

SEQ ID NO: 5506827 - DNA, 25 bp, Homo sapien
gcagccaagacgcaagctactcatc

SEQ ID NO: 5506828 - DNA, 25 bp, Homo sapien
ctcatcacatacaagggagtcccca

SEQ ID NO: 5506829 - DNA, 25 bp, Homo sapien
aaagcaaaaccatggataaagggga

SEQ ID NO: 5506830 - DNA, 25 bp, Homo sapien
aatgaggatagaccaaaataagtcc

SEQ ID NO: 5506831 - DNA, 25 bp, Homo sapien
caggagagagtgaaataacatattc

SEQ ID NO: 5506832 - DNA, 25 bp, Homo sapien
aagaaaatgggtattcagactcaag

SEQ ID NO: 5506833 - DNA, 25 bp, Homo sapien
tgcattagtggggactcaaagccca

SEQ ID NO: 5506834 - DNA, 25 bp, Homo sapien
gaggcaccaccctgaccgtctgtct

SEQ ID NO: 5506835 - DNA, 25 bp, Homo sapien
ctccctccatgttaccaccagtgat

SEQ ID NO: 5506836 - DNA, 25 bp, Homo sapien
ttgaaagcacttgaatgttgtaatc

SEQ ID NO: 5506837 - DNA, 25 bp, Homo sapien
cattcatcgggtctgggcattgaag

SEQ ID NO: 5506838 - DNA, 25 bp, Homo sapien
ttaccaggcaaaggctcttgttgtc

SEQ ID NO: 5506839 - DNA, 25 bp, Homo sapien
gtagaagtattgtcttggtggtctt

SEQ ID NO: 5506840 - DNA, 25 bp, Homo sapien
ggttcttgcagacttgtagaagtat

SEQ ID NO: 5506841 - DNA, 25 bp, Homo sapien
atgcttgtggacattcatcgggtct

SEQ ID NO: 5506842 - DNA, 25 bp, Homo sapien
ttcacagtctaggcttgtttgcacc

SEQ ID NO: 5506843 - DNA, 25 bp, Homo sapien
ggggactcaaagcccagtaatgctc

SEQ ID NO: 5506844 - DNA, 25 bp, Homo sapien
agacacattgaagagctcctgccta

SEQ ID NO: 5506845 - DNA, 25 bp, Homo sapien
ataggcaggagctcttcaatgtgtc

SEQ ID NO: 5506846 - DNA, 25 bp, Homo sapien
aggacctaaaggatagatgagattt

SEQ ID NO: 5506847 - DNA, 25 bp, Homo sapien
taggaagcatttgcatgcatttctc

SEQ ID NO: 5506848 - DNA, 25 bp, Homo sapien
atttaggacctaaaggatagatgag

SEQ ID NO: 5506849 - DNA, 25 bp, Homo sapien
tgcttcctataggcaggagctcttc

SEQ ID NO: 5506850 - DNA, 25 bp, Homo sapien
aggatagatgagatttgtcagacac

SEQ ID NO: 5506851 - DNA, 25 bp, Homo sapien
gagaagtgatgtttaatttaggacc

SEQ ID NO: 5506852 - DNA, 25 bp, Homo sapien
agagctcctgcctataggaagcatt

SEQ ID NO: 5506853 - DNA, 25 bp, Homo sapien
atgtgtctgacaaatctcatctatc

SEQ ID NO: 5506854 - DNA, 25 bp, Homo sapien
tgtgatgcccaccttgactttccca

SEQ ID NO: 5506855 - DNA, 25 bp, Homo sapien
tttaatagatgagtcaaaagcataa

SEQ ID NO: 5506856 - DNA, 25 bp, Homo sapien
gtcctaattaggtaaagcatacaaa

SEQ ID NO: 5506857 - DNA, 25 bp, Homo sapien
cctgcttggtaaattttatagcctc

SEQ ID NO: 5506858 - DNA, 25 bp, Homo sapien
tccaaggacaaatatagagtcattt

SEQ ID NO: 5506859 - DNA, 25 bp, Homo sapien
ttatttaaataggacagcaggaaga

SEQ ID NO: 5506860 - DNA, 25 bp, Homo sapien
tatttttggaggacacattactatt

SEQ ID NO: 5506861 - DNA, 25 bp, Homo sapien
gataacaaatgcaagagtcagaata

SEQ ID NO: 5506862 - DNA, 25 bp, Homo sapien
aatgcaagagtcagaatatttgtcc

SEQ ID NO: 5506863 - DNA, 25 bp, Homo sapien
aaagcataatggtagatgatggatg

SEQ ID NO: 5506864 - DNA, 25 bp, Homo sapien
gaaatgcatcatctaaaggccaaac

SEQ ID NO: 5506865 - DNA, 25 bp, Homo sapien
agatgagtcaaaagcataatggtag

SEQ ID NO: 5506866 - DNA, 25 bp, Homo sapien
tggacctgagcctcagcgacctgaa

SEQ ID NO: 5506867 - DNA, 25 bp, Homo sapien
agacctgagtaagaacaagctgcag

SEQ ID NO: 5506868 - DNA, 25 bp, Homo sapien
cagctgccagcagactttggccgtc

SEQ ID NO: 5506869 - DNA, 25 bp, Homo sapien
ctaccgtcggatttctgtggcctca

SEQ ID NO: 5506870 - DNA, 25 bp, Homo sapien
gttaccatgaccaaggccggtagca

SEQ ID NO: 5506871 - DNA, 25 bp, Homo sapien
acacacctggtgaagctagacctga

SEQ ID NO: 5506872 - DNA, 25 bp, Homo sapien
ctcaagaacctgaagtggttggacc

SEQ ID NO: 5506873 - DNA, 25 bp, Homo sapien
gctggctgcccttccaaaggccacc

SEQ ID NO: 5506874 - DNA, 25 bp, Homo sapien
gcgacctgaatgaggtcccggtgaa

SEQ ID NO: 5506875 - DNA, 25 bp, Homo sapien
ggccgctgaactgacaagcgacatt

SEQ ID NO: 5506876 - DNA, 25 bp, Homo sapien
ctcctcaacaacaagctggtcacct

SEQ ID NO: 5506877 - DNA, 25 bp, Homo sapien
agttagacgtaagcgaagcatatct

SEQ ID NO: 5506878 - DNA, 25 bp, Homo sapien
aggggtttcgcattggtacacactt

SEQ ID NO: 5506879 - DNA, 25 bp, Homo sapien
tcaacgatcttaggcaccgaggaaa

SEQ ID NO: 5506880 - DNA, 25 bp, Homo sapien
gttttgcgagactcgacgagcaagc

SEQ ID NO: 5506881 - DNA, 25 bp, Homo sapien
ttgaaggtacggattcgcttgacaa

SEQ ID NO: 5506882 - DNA, 25 bp, Homo sapien
gctaaagactgacacaatcggacct

SEQ ID NO: 5506883 - DNA, 25 bp, Homo sapien
catccgtcctgaaaagttgagagcc

SEQ ID NO: 5506884 - DNA, 25 bp, Homo sapien
ggaacaaagactcgtacttgcgggc

SEQ ID NO: 5506885 - DNA, 25 bp, Homo sapien
gtcggtgctcattcagaagggaaca

SEQ ID NO: 5506886 - DNA, 25 bp, Homo sapien
gaagggaacaataacacatcggtct

SEQ ID NO: 5506887 - DNA, 25 bp, Homo sapien
gataccgcatgcggatcaggcatcc

SEQ ID NO: 5506888 - DNA, 25 bp, Homo sapien
gagagtggagctttgtataattggt

SEQ ID NO: 5506889 - DNA, 25 bp, Homo sapien
ttacgtaagtacggtctttgcagta

SEQ ID NO: 5506890 - DNA, 25 bp, Homo sapien
tgttgaaaatgacagtcaaccagag

SEQ ID NO: 5506891 - DNA, 25 bp, Homo sapien
accgcatgagctaatatgcagtatt

SEQ ID NO: 5506892 - DNA, 25 bp, Homo sapien
tattacacaataccgcatgagctaa

SEQ ID NO: 5506893 - DNA, 25 bp, Homo sapien
ttgcccaaagtgtatggctcagaag

SEQ ID NO: 5506894 - DNA, 25 bp, Homo sapien
taataaaggaagcctaccttatgta

SEQ ID NO: 5506895 - DNA, 25 bp, Homo sapien
agatggtctttctctgagggaaaaa

SEQ ID NO: 5506896 - DNA, 25 bp, Homo sapien
atgaagttgaaaatatgctcttaac

SEQ ID NO: 5506897 - DNA, 25 bp, Homo sapien
gtgtcatgtgaggcaatatgcattc

SEQ ID NO: 5506898 - DNA, 25 bp, Homo sapien
atttaggtaatgcattgaatgaagt

SEQ ID NO: 5506899 - DNA, 25 bp, Homo sapien
agcttctttgcgatgggttcgaact

SEQ ID NO: 5506900 - DNA, 25 bp, Homo sapien
gttgattgaatcagctactaaagct

SEQ ID NO: 5506901 - DNA, 25 bp, Homo sapien
cctttagctcggagaagtctgattc

SEQ ID NO: 5506902 - DNA, 25 bp, Homo sapien
ctcatcaaagtcattctgtgtccag

SEQ ID NO: 5506903 - DNA, 25 bp, Homo sapien
gggggagaagcgctctgatttttat

SEQ ID NO: 5506904 - DNA, 25 bp, Homo sapien
tgacatacagatggggttttggtgt

SEQ ID NO: 5506905 - DNA, 25 bp, Homo sapien
actaaagcttgtgcattcgtcacgt

SEQ ID NO: 5506906 - DNA, 25 bp, Homo sapien
aaggacttctctacactggttactc

SEQ ID NO: 5506907 - DNA, 25 bp, Homo sapien
cgtcacgtagttctcatgccatggt

SEQ ID NO: 5506908 - DNA, 25 bp, Homo sapien
tcctcgatgatggtgacatacagat

SEQ ID NO: 5506909 - DNA, 25 bp, Homo sapien
tacctttggtcctcgatgatggtga

SEQ ID NO: 5506910 - DNA, 25 bp, Homo sapien
atacctggacaatagtaatgagaac

SEQ ID NO: 5506911 - DNA, 25 bp, Homo sapien
ttcacggagattcctggaagaagct

SEQ ID NO: 5506912 - DNA, 25 bp, Homo sapien
tggtgtctaggcgcttgacatcctc

SEQ ID NO: 5506913 - DNA, 25 bp, Homo sapien
ccccaaaccctgctggtgtctaggc

SEQ ID NO: 5506914 - DNA, 25 bp, Homo sapien
ttatgcatagtaggcccacagatac

SEQ ID NO: 5506915 - DNA, 25 bp, Homo sapien
gtggtttggggctgctacctttatg

SEQ ID NO: 5506916 - DNA, 25 bp, Homo sapien
taattaatcaggagtgatggtaggt

SEQ ID NO: 5506917 - DNA, 25 bp, Homo sapien
ggatggagtattcacggagattcct

SEQ ID NO: 5506918 - DNA, 25 bp, Homo sapien
atttagggtgtagtatgtgcttaat

SEQ ID NO: 5506919 - DNA, 25 bp, Homo sapien
ttcaggtactgtccttggcataggc

SEQ ID NO: 5506920 - DNA, 25 bp, Homo sapien
gcatctgatagaaggtgatagcagt

SEQ ID NO: 5506921 - DNA, 25 bp, Homo sapien
actgtggctataattctgtggcata

SEQ ID NO: 5506922 - DNA, 25 bp, Homo sapien
gatgatatttgtcagaggtagcagt

SEQ ID NO: 5506923 - DNA, 25 bp, Homo sapien
acggcccctgcatcaggccccagtg

SEQ ID NO: 5506924 - DNA, 25 bp, Homo sapien
ctcatccctgtgtccgtgtgttctc

SEQ ID NO: 5506925 - DNA, 25 bp, Homo sapien
acatgcgtaagtaattaagtggtta

SEQ ID NO: 5506926 - DNA, 25 bp, Homo sapien
tctgtggcatatgtgatgatatttg

SEQ ID NO: 5506927 - DNA, 25 bp, Homo sapien
tatttccataggtgtttggggaaca

SEQ ID NO: 5506928 - DNA, 25 bp, Homo sapien
tcctgatgctctccccgctacggcc

SEQ ID NO: 5506929 - DNA, 25 bp, Homo sapien
tcagcttccgcttacaagtgagaac

SEQ ID NO: 5506930 - DNA, 25 bp, Homo sapien
gtggttacttgtgagattctggtgc

SEQ ID NO: 5506931 - DNA, 25 bp, Homo sapien
aggtggtatctggttacatgcgtaa

SEQ ID NO: 5506932 - DNA, 25 bp, Homo sapien
gtaagaccgccctccgggtggcgtc

SEQ ID NO: 5506933 - DNA, 25 bp, Homo sapien
gacgccacccggagggcggtcttac

SEQ ID NO: 5506934 - DNA, 25 bp, Homo sapien
agatctcccttcgaccattacggag

SEQ ID NO: 5506935 - DNA, 25 bp, Homo sapien
ctccgtaatggtcgaagggagatct

SEQ ID NO: 5506936 - DNA, 25 bp, Homo sapien
aaaaggacaactataggtctgaaaa

SEQ ID NO: 5506937 - DNA, 25 bp, Homo sapien
atcagaatcaagtttcccaatccct

SEQ ID NO: 5506938 - DNA, 25 bp, Homo sapien
tgtagttttaactggagaatcaaaa

SEQ ID NO: 5506939 - DNA, 25 bp, Homo sapien
atttattatgtgtggcatcagaatc

SEQ ID NO: 5506940 - DNA, 25 bp, Homo sapien
ggtgggctggcaatacctgaattca

SEQ ID NO: 5506941 - DNA, 25 bp, Homo sapien
ttaaacagcatttttaacagtgcaa

SEQ ID NO: 5506942 - DNA, 25 bp, Homo sapien
ctgcttcaaggattctagattcttc

SEQ ID NO: 5506943 - DNA, 25 bp, Homo sapien
ttaactggagaatcaaaaaggacaa

SEQ ID NO: 5506944 - DNA, 25 bp, Homo sapien
ctctttaagaagtcacaaaatgttt

SEQ ID NO: 5506945 - DNA, 25 bp, Homo sapien
tcccaatccctgcttcaaggattct

SEQ ID NO: 5506946 - DNA, 25 bp, Homo sapien
acaactataggtctgaaaaagtgag

SEQ ID NO: 5506947 - DNA, 25 bp, Homo sapien
gggtgtgcccatcagctcattgaga

SEQ ID NO: 5506948 - DNA, 25 bp, Homo sapien
catcagctcattgagaacgggccag

SEQ ID NO: 5506949 - DNA, 25 bp, Homo sapien
ggaaaagattgagaaatcggatggt

SEQ ID NO: 5506950 - DNA, 25 bp, Homo sapien
aggggcgcctctgtccagccgcccc

SEQ ID NO: 5506951 - DNA, 25 bp, Homo sapien
atgacaatggcggctttgtggaata

SEQ ID NO: 5506952 - DNA, 25 bp, Homo sapien
ccgcgtctgtgtagaaagaagtaga

SEQ ID NO: 5506953 - DNA, 25 bp, Homo sapien
gatggttgccgcgtctgtgtagaaa

SEQ ID NO: 5506954 - DNA, 25 bp, Homo sapien
agaagtagacatgggagacttttca

SEQ ID NO: 5506955 - DNA, 25 bp, Homo sapien
ccaccaccccgtctggggggtgtgc

SEQ ID NO: 5506956 - DNA, 25 bp, Homo sapien
gattgagaaatcggatggttgccgc

SEQ ID NO: 5506957 - DNA, 25 bp, Homo sapien
tctgtccagccgcccctactgggag

SEQ ID NO: 5506958 - DNA, 25 bp, Homo sapien
caccaccccgtttgggaggtatagc

SEQ ID NO: 5506959 - DNA, 25 bp, Homo sapien
caacagctcattgagaacgggccat

SEQ ID NO: 5506960 - DNA, 25 bp, Homo sapien
tgtctgtgtagaaagaggtagacag

SEQ ID NO: 5506961 - DNA, 25 bp, Homo sapien
ggaaaagattgagaaatcggatggt

SEQ ID NO: 5506962 - DNA, 25 bp, Homo sapien
caatggcggttttgtggaatagaaa

SEQ ID NO: 5506963 - DNA, 25 bp, Homo sapien
cgcttttgcccggccgcccctactg

SEQ ID NO: 5506964 - DNA, 25 bp, Homo sapien
gatggttgccatgtctgtgtagaaa

SEQ ID NO: 5506965 - DNA, 25 bp, Homo sapien
gattgagaaatcggatggttgccat

SEQ ID NO: 5506966 - DNA, 25 bp, Homo sapien
ggcgcttctgcccggccgcgcctaa

SEQ ID NO: 5506967 - DNA, 25 bp, Homo sapien
acgggccatgatgacaatggcggtt

SEQ ID NO: 5506968 - DNA, 25 bp, Homo sapien
tgggaggtatagccaacagctcatt

SEQ ID NO: 5506969 - DNA, 25 bp, Homo sapien
cccaggccaaaggactaaatttcta

SEQ ID NO: 5506970 - DNA, 25 bp, Homo sapien
agtccaaatcatgaggaacaagaag

SEQ ID NO: 5506971 - DNA, 25 bp, Homo sapien
tgatactgtgaatatgaaagaccgt

SEQ ID NO: 5506972 - DNA, 25 bp, Homo sapien
attgtggagacagactgatactgtg

SEQ ID NO: 5506973 - DNA, 25 bp, Homo sapien
tgatgcaatagaaagctgtgtggta

SEQ ID NO: 5506974 - DNA, 25 bp, Homo sapien
tacagataattgggtaggaagatga

SEQ ID NO: 5506975 - DNA, 25 bp, Homo sapien
agaggaaaccttgagtaaacatggc

SEQ ID NO: 5506976 - DNA, 25 bp, Homo sapien
aaatggcacaggttaatctggaaac

SEQ ID NO: 5506977 - DNA, 25 bp, Homo sapien
ggagctaatataagtggaaagacac

SEQ ID NO: 5506978 - DNA, 25 bp, Homo sapien
tggaaagacacacgttagtcccata

SEQ ID NO: 5506979 - DNA, 25 bp, Homo sapien
attgcatggtagtatataaacagtc

SEQ ID NO: 5506980 - DNA, 25 bp, Homo sapien
cacaaagacatatgaaggatccacg

SEQ ID NO: 5506981 - DNA, 25 bp, Homo sapien
cgtggatccttcatatgtctttgtg

SEQ ID NO: 5506982 - DNA, 25 bp, Homo sapien
aacaaggaataccaagagaaaattg

SEQ ID NO: 5506983 - DNA, 25 bp, Homo sapien
gtatcactgaagctaaaagaggatt

SEQ ID NO: 5506984 - DNA, 25 bp, Homo sapien
ttctaaaagtggaatgattggtttg

SEQ ID NO: 5506985 - DNA, 25 bp, Homo sapien
tggtttgactggttcatagggcttt

SEQ ID NO: 5506986 - DNA, 25 bp, Homo sapien
aactacggaaagcaagactccaact

SEQ ID NO: 5506987 - DNA, 25 bp, Homo sapien
gaaggaggaagtcaagaatttactc

SEQ ID NO: 5506988 - DNA, 25 bp, Homo sapien
aaagttaagtgaatgtagtctcttt

SEQ ID NO: 5506989 - DNA, 25 bp, Homo sapien
taactgaaactacggaaagcaagac

SEQ ID NO: 5506990 - DNA, 25 bp, Homo sapien
cacctattgttggaccatggttcac

SEQ ID NO: 5506991 - DNA, 25 bp, Homo sapien
tattactacaagcagtggcagagtg

SEQ ID NO: 5506992 - DNA, 25 bp, Homo sapien
taagagattaacaaccatgctacta

SEQ ID NO: 5506993 - DNA, 25 bp, Homo sapien
tgtgccacaaaggagatgctcaata

SEQ ID NO: 5506994 - DNA, 25 bp, Homo sapien
tctcataagcccaacgatggaaagc

SEQ ID NO: 5506995 - DNA, 25 bp, Homo sapien
ctcctttgggagaatgacatatctt

SEQ ID NO: 5506996 - DNA, 25 bp, Homo sapien
tgggaggagatcagacctttacaag

SEQ ID NO: 5506997 - DNA, 25 bp, Homo sapien
aagatcaagcaagtgctggagactt

SEQ ID NO: 5506998 - DNA, 25 bp, Homo sapien
atattagctgtgtccaaatgggttc

SEQ ID NO: 5506999 - DNA, 25 bp, Homo sapien
ggaatcattgaaaaccacctgtgtc

SEQ ID NO: 5507000 - DNA, 25 bp, Homo sapien
aggaagggcctgtacctccctacca

SEQ ID NO: 5507001 - DNA, 25 bp, Homo sapien
ttaccaagacagagaagtattgtat

SEQ ID NO: 5507002 - DNA, 25 bp, Homo sapien
taaagggtacatatgcatagtggga

SEQ ID NO: 5507003 - DNA, 25 bp, Homo sapien
tggagacttgacgcatgtgccacaa

SEQ ID NO: 5507004 - DNA, 25 bp, Homo sapien
aatgtttgatagtcaattttgtaga

SEQ ID NO: 5507005 - DNA, 25 bp, Homo sapien
tctacaaaattgactatcaaacatt

SEQ ID NO: 5507006 - DNA, 25 bp, Homo sapien
gccgggccacgtgcgcccgcgacgt

SEQ ID NO: 5507007 - DNA, 25 bp, Homo sapien
acgtcgcgggcgcacgtggcccggc

SEQ ID NO: 5507008 - DNA, 25 bp, Homo sapien
agggccgggccacgtgcgcccgcga

SEQ ID NO: 5507009 - DNA, 25 bp, Homo sapien
tcgcgggcgcacgtggcccggccct

SEQ ID NO: 5507010 - DNA, 25 bp, Homo sapien
gagggccgggccacgtgcgcccgcg

SEQ ID NO: 5507011 - DNA, 25 bp, Homo sapien
cgcgggcgcacgtggcccggccctc

SEQ ID NO: 5507012 - DNA, 25 bp, Homo sapien
tggcgcggaagaaggcctcggagga

SEQ ID NO: 5507013 - DNA, 25 bp, Homo sapien
tcctccgaggccttcttccgcgcca

SEQ ID NO: 5507014 - DNA, 25 bp, Homo sapien
cgagagagccgcatgacatcctctc

SEQ ID NO: 5507015 - DNA, 25 bp, Homo sapien
acatcctctcgaagacggtggtagg

SEQ ID NO: 5507016 - DNA, 25 bp, Homo sapien
gggcaggagcaacactgtcttgctc

SEQ ID NO: 5507017 - DNA, 25 bp, Homo sapien
tccaagggtcttgcccacctggagg

SEQ ID NO: 5507018 - DNA, 25 bp, Homo sapien
tcggcccctgacaggtgtcactctg

SEQ ID NO: 5507019 - DNA, 25 bp, Homo sapien
tcctggcagatgacacacttcttcc

SEQ ID NO: 5507020 - DNA, 25 bp, Homo sapien
aggatttcagtgcaggcctggcaca

SEQ ID NO: 5507021 - DNA, 25 bp, Homo sapien
gagtgtcctgtctccgggtcctaac

SEQ ID NO: 5507022 - DNA, 25 bp, Homo sapien
gccaactcgccagctgcagactgcg

SEQ ID NO: 5507023 - DNA, 25 bp, Homo sapien
gccccgcttcaggaagagtgtcctg

SEQ ID NO: 5507024 - DNA, 25 bp, Homo sapien
tgtcactctgatggtcctggcctcc

SEQ ID NO: 5507025 - DNA, 25 bp, Homo sapien
tcgtccccagtctggagtccggtga

SEQ ID NO: 5507026 - DNA, 25 bp, Homo sapien
ctgttcctgggagttgttggtacca

SEQ ID NO: 5507027 - DNA, 25 bp, Homo sapien
tattcccaatgttggagctgcttcc

SEQ ID NO: 5507028 - DNA, 25 bp, Homo sapien
cgcagtaataatcggcctcgtcccc

SEQ ID NO: 5507029 - DNA, 25 bp, Homo sapien
accttctgtcctggggccgcagata

SEQ ID NO: 5507030 - DNA, 25 bp, Homo sapien
aggagatggcgaccttctgtcctgg

SEQ ID NO: 5507031 - DNA, 25 bp, Homo sapien
ttgtcataaatgaggagtttggggg

SEQ ID NO: 5507032 - DNA, 25 bp, Homo sapien
gccaggaatccctgagggtcgctta

SEQ ID NO: 5507033 - DNA, 25 bp, Homo sapien
ggagctgcttccagagcaggagatg

SEQ ID NO: 5507034 - DNA, 25 bp, Homo sapien
ctcaggctgctatcccatgttccgc

SEQ ID NO: 5507035 - DNA, 25 bp, Homo sapien
gggagttgttggtaccaggatacat

SEQ ID NO: 5507036 - DNA, 25 bp, Homo sapien
gccgaagttgagtgcatacccggcc

SEQ ID NO: 5507037 - DNA, 25 bp, Homo sapien
gcctttgccgaagttgagtgcatac

SEQ ID NO: 5507038 - DNA, 25 bp, Homo sapien
gagtgcatacccggccatgcttgat

SEQ ID NO: 5507039 - DNA, 25 bp, Homo sapien
gtgcatacccggccatgcttgatgc

SEQ ID NO: 5507040 - DNA, 25 bp, Homo sapien
gcatacccggccatgcttgatgcac

SEQ ID NO: 5507041 - DNA, 25 bp, Homo sapien
catacccggccatgcttgatgcaca

SEQ ID NO: 5507042 - DNA, 25 bp, Homo sapien
cggccatgcttgatgcacagaagta

SEQ ID NO: 5507043 - DNA, 25 bp, Homo sapien
ctttgccgaagttgagtgcataccc

SEQ ID NO: 5507044 - DNA, 25 bp, Homo sapien
tgagtgcatacccggccatgcttga

SEQ ID NO: 5507045 - DNA, 25 bp, Homo sapien
ttgccgaagttgagtgcatacccgg

SEQ ID NO: 5507046 - DNA, 25 bp, Homo sapien
gttgagtgcatacccggccatgctt

SEQ ID NO: 5507047 - DNA, 25 bp, Homo sapien
tctgccatgttccgtggacagcgaa

SEQ ID NO: 5507048 - DNA, 25 bp, Homo sapien
ggctgggcttgtctcacgcccgcct

SEQ ID NO: 5507049 - DNA, 25 bp, Homo sapien
accggacataaggaattcagagaaa

SEQ ID NO: 5507050 - DNA, 25 bp, Homo sapien
acgggcttctggcccaccggacata

SEQ ID NO: 5507051 - DNA, 25 bp, Homo sapien
gggccggagccattacctactgtga

SEQ ID NO: 5507052 - DNA, 25 bp, Homo sapien
agggactccggtcctccgccttcca

SEQ ID NO: 5507053 - DNA, 25 bp, Homo sapien
ggtacatcccacccaggcgaagtca

SEQ ID NO: 5507054 - DNA, 25 bp, Homo sapien
cgccttccaccagcataggaggacg

SEQ ID NO: 5507055 - DNA, 25 bp, Homo sapien
ttcagagaaaaggctctgcaggtac

SEQ ID NO: 5507056 - DNA, 25 bp, Homo sapien
gcccgaaacagcccctgctggctct

SEQ ID NO: 5507057 - DNA, 25 bp, Homo sapien
gatcaaaaaacgaagaaagatgagc

SEQ ID NO: 5507058 - DNA, 25 bp, Homo sapien
gtggagacggccttgagtctcagta

SEQ ID NO: 5507059 - DNA, 25 bp, Homo sapien
caaagcctccacgactctgtttccc

SEQ ID NO: 5507060 - DNA, 25 bp, Homo sapien
tttttctgagagattcaaagcctcc

SEQ ID NO: 5507061 - DNA, 25 bp, Homo sapien
cttgagtctcagtacgagtgtgcgt

SEQ ID NO: 5507062 - DNA, 25 bp, Homo sapien
tgtgagccaccttggcaagtgcctg

SEQ ID NO: 5507063 - DNA, 25 bp, Homo sapien
catttgcactggttggagttgtgga

SEQ ID NO: 5507064 - DNA, 25 bp, Homo sapien
ccaccttggcaagtgcctgtgcagg

SEQ ID NO: 5507065 - DNA, 25 bp, Homo sapien
gagccaccttggcaagtgcctgtgc

SEQ ID NO: 5507066 - DNA, 25 bp, Homo sapien
ctgaatttaatttgcactaagtcat

SEQ ID NO: 5507067 - DNA, 25 bp, Homo sapien
actaagtcatttgcactggttggag

SEQ ID NO: 5507068 - DNA, 25 bp, Homo sapien
agtctcagtacgagtgtgcgtgagt

SEQ ID NO: 5507069 - DNA, 25 bp, Homo sapien
acgagagagagcagttaattcaatt

SEQ ID NO: 5507070 - DNA, 25 bp, Homo sapien
ctggaactgacaaaaattcactatc

SEQ ID NO: 5507071 - DNA, 25 bp, Homo sapien
ccttggtgtgaaaagattcccatgc

SEQ ID NO: 5507072 - DNA, 25 bp, Homo sapien
ccccttgtagatgaagactctgaga

SEQ ID NO: 5507073 - DNA, 25 bp, Homo sapien
ttcccatgcctcaccaacaggtttc

SEQ ID NO: 5507074 - DNA, 25 bp, Homo sapien
aacaggtttcttataaaggagctct

SEQ ID NO: 5507075 - DNA, 25 bp, Homo sapien
taagctaccccattgagggagaggg

SEQ ID NO: 5507076 - DNA, 25 bp, Homo sapien
gctgtccaagagcaccatctgctgg

SEQ ID NO: 5507077 - DNA, 25 bp, Homo sapien
aaaaagtctataggttaaatgccac

SEQ ID NO: 5507078 - DNA, 25 bp, Homo sapien
aatacaagagaaatctggaactgac

SEQ ID NO: 5507079 - DNA, 25 bp, Homo sapien
catctgctggatgaaggtatttaag

SEQ ID NO: 5507080 - DNA, 25 bp, Homo sapien
ctgtcaaaatgcaagactgcgtgat

SEQ ID NO: 5507081 - DNA, 25 bp, Homo sapien
cagagaaaggccaataaaaatgaat

SEQ ID NO: 5507082 - DNA, 25 bp, Homo sapien
tgcaagactgcgtgattatagatta

SEQ ID NO: 5507083 - DNA, 25 bp, Homo sapien
gcacaatggctttatggagtgggga

SEQ ID NO: 5507084 - DNA, 25 bp, Homo sapien
ggagccctatccagtggtgtctgag

SEQ ID NO: 5507085 - DNA, 25 bp, Homo sapien
gaacatcaccaccgccaaaataatt

SEQ ID NO: 5507086 - DNA, 25 bp, Homo sapien
attatagattaaaagggttggtgaa

SEQ ID NO: 5507087 - DNA, 25 bp, Homo sapien
ctaaactaagcaataccaggataac

SEQ ID NO: 5507088 - DNA, 25 bp, Homo sapien
ataacaaaactgcatccaaaagggg

SEQ ID NO: 5507089 - DNA, 25 bp, Homo sapien
atgcagtcctgctttggagccctat

SEQ ID NO: 5507090 - DNA, 25 bp, Homo sapien
aagggttggtgaatcattgacatga

SEQ ID NO: 5507091 - DNA, 25 bp, Homo sapien
atgtagaaggtttacacagcccttt

SEQ ID NO: 5507092 - DNA, 25 bp, Homo sapien
ccctctagatcatatgtggaaaaca

SEQ ID NO: 5507093 - DNA, 25 bp, Homo sapien
acaaagtgcattgtgatccagaggg

SEQ ID NO: 5507094 - DNA, 25 bp, Homo sapien
tgaagagagatcattacatccatgc

SEQ ID NO: 5507095 - DNA, 25 bp, Homo sapien
cttgggctagaaacttcagaaggaa

SEQ ID NO: 5507096 - DNA, 25 bp, Homo sapien
tttccaggatacatgtagattaaac

SEQ ID NO: 5507097 - DNA, 25 bp, Homo sapien
tgcaactaaagaaattgggaaacaa

SEQ ID NO: 5507098 - DNA, 25 bp, Homo sapien
atacatgtgactacagctaacttgt

SEQ ID NO: 5507099 - DNA, 25 bp, Homo sapien
tcagaaggaatatgataaacgccca

SEQ ID NO: 5507100 - DNA, 25 bp, Homo sapien
attagtgacgtgtagaaatcatgac

SEQ ID NO: 5507101 - DNA, 25 bp, Homo sapien
aataaatggttaagggatttgcaac

SEQ ID NO: 5507102 - DNA, 25 bp, Homo sapien
aaataaagagtttgttgcatagggt

SEQ ID NO: 5507103 - DNA, 25 bp, Homo sapien
accctatgcaacaaactctttattt

SEQ ID NO: 5507104 - DNA, 25 bp, Homo sapien
caagtcaacgacattaaaggtgttt

SEQ ID NO: 5507105 - DNA, 25 bp, Homo sapien
aaacacctttaatgtcgttgacttg

SEQ ID NO: 5507106 - DNA, 25 bp, Homo sapien
gccttcgaaagacgaccaaatctca

SEQ ID NO: 5507107 - DNA, 25 bp, Homo sapien
tgagatttggtcgtctttcgaaggc

SEQ ID NO: 5507108 - DNA, 25 bp, Homo sapien
atgcgtgacccttggcacggtcaac

SEQ ID NO: 5507109 - DNA, 25 bp, Homo sapien
gttgaccgtgccaagggtcacgcat

SEQ ID NO: 5507110 - DNA, 25 bp, Homo sapien
gaagatcttccaaattaaaatagta

SEQ ID NO: 5507111 - DNA, 25 bp, Homo sapien
tactattttaatttggaagatcttc

SEQ ID NO: 5507112 - DNA, 25 bp, Homo sapien
ctcgtggtgagagacgacttgtacc

SEQ ID NO: 5507113 - DNA, 25 bp, Homo sapien
ggtacaagtcgtctctcaccacgag

SEQ ID NO: 5507114 - DNA, 25 bp, Homo sapien
gtccgagcgggccagggaggaccgg

SEQ ID NO: 5507115 - DNA, 25 bp, Homo sapien
ccggtcctccctggcccgctcggac

SEQ ID NO: 5507116 - DNA, 25 bp, Homo sapien
gacctgaacctcagagagccgtgag

SEQ ID NO: 5507117 - DNA, 25 bp, Homo sapien
ctcacggctctctgaggttcaggtc

SEQ ID NO: 5507118 - DNA, 25 bp, Homo sapien
tccgggtccggacggccgcggagtc

SEQ ID NO: 5507119 - DNA, 25 bp, Homo sapien
gactccgcggccgtccggacccgga

SEQ ID NO: 5507120 - DNA, 25 bp, Homo sapien
ctgtaacaataacatactaagtgat

SEQ ID NO: 5507121 - DNA, 25 bp, Homo sapien
atcacttagtatgttattgttacag

SEQ ID NO: 5507122 - DNA, 25 bp, Homo sapien
ctcctggaccgggtcttctccaccg

SEQ ID NO: 5507123 - DNA, 25 bp, Homo sapien
cggtggagaagacccggtccaggag

SEQ ID NO: 5507124 - DNA, 25 bp, Homo sapien
acagataaagatgcagtatgaaatc

SEQ ID NO: 5507125 - DNA, 25 bp, Homo sapien
ttgcacacagactacgtgacgccat

SEQ ID NO: 5507126 - DNA, 25 bp, Homo sapien
catgggacccatatcaagtgctact

SEQ ID NO: 5507127 - DNA, 25 bp, Homo sapien
gtgctactaatgatggtggaagtgc

SEQ ID NO: 5507128 - DNA, 25 bp, Homo sapien
ccaagaagcagacaaaagtcatgac

SEQ ID NO: 5507129 - DNA, 25 bp, Homo sapien
tcaagggttgggagtattcacttaa

SEQ ID NO: 5507130 - DNA, 25 bp, Homo sapien
gtgtatcacagtaaaaagtgttctc

SEQ ID NO: 5507131 - DNA, 25 bp, Homo sapien
cgtgacgccattcacagtccagaga

SEQ ID NO: 5507132 - DNA, 25 bp, Homo sapien
gccattgtgatgagctcaagggttg

SEQ ID NO: 5507133 - DNA, 25 bp, Homo sapien
acttaaaatgccacgtgacgctaat

SEQ ID NO: 5507134 - DNA, 25 bp, Homo sapien
taaatgaatccagctgaaggcctat

SEQ ID NO: 5507135 - DNA, 25 bp, Homo sapien
ccggacttcccgacgacaggtgaac

SEQ ID NO: 5507136 - DNA, 25 bp, Homo sapien
gttcacctgtcgtcgggaagtccgg

SEQ ID NO: 5507137 - DNA, 25 bp, Homo sapien
aacctcattgtccaggtcaacaact

SEQ ID NO: 5507138 - DNA, 25 bp, Homo sapien
agttgttgacctggacaatgaggtt

SEQ ID NO: 5507139 - DNA, 25 bp, Homo sapien
cttcgctactactcgatcctaacgg

SEQ ID NO: 5507140 - DNA, 25 bp, Homo sapien
ccgttaggatcgagtagtagcgaag

SEQ ID NO: 5507141 - DNA, 25 bp, Homo sapien
actcgatcctaacggtcggtgacga

SEQ ID NO: 5507142 - DNA, 25 bp, Homo sapien
tcgtcaccgaccgttaggatcgagt

SEQ ID NO: 5507143 - DNA, 25 bp, Homo sapien
gtgtgcaagtaagcgagacggccgg

SEQ ID NO: 5507144 - DNA, 25 bp, Homo sapien
ccggccgtctcgcttacttgcacac

SEQ ID NO: 5507145 - DNA, 25 bp, Homo sapien
ccagaaattgtattagaaactataa

SEQ ID NO: 5507146 - DNA, 25 bp, Homo sapien
ttatagtttctaatacaatttctgg

SEQ ID NO: 5507147 - DNA, 25 bp, Homo sapien
agtcagaggccatctaacaaaccct

SEQ ID NO: 5507148 - DNA, 25 bp, Homo sapien
atctaacaaacccttgggcatgagg

SEQ ID NO: 5507149 - DNA, 25 bp, Homo sapien
tcattccacgtaggcctcagaagac

SEQ ID NO: 5507150 - DNA, 25 bp, Homo sapien
ggcccgcagctgttctagacaccag

SEQ ID NO: 5507151 - DNA, 25 bp, Homo sapien
ccccagcactaaagctaagcctgtt

SEQ ID NO: 5507152 - DNA, 25 bp, Homo sapien
tagacaccagatgtggtggcctcaa

SEQ ID NO: 5507153 - DNA, 25 bp, Homo sapien
tggcaatgcaccgtccgctccgtga

SEQ ID NO: 5507154 - DNA, 25 bp, Homo sapien
ccgctccgtgacatcagttggtatt

SEQ ID NO: 5507155 - DNA, 25 bp, Homo sapien
tttaatggcactctggtctgagcac

SEQ ID NO: 5507156 - DNA, 25 bp, Homo sapien
aaagtcaagttgaatcccacagagt

SEQ ID NO: 5507157 - DNA, 25 bp, Homo sapien
tgtgagtccttggcaatgcaccgtc

SEQ ID NO: 5507158 - DNA, 25 bp, Homo sapien
agtgtagtcctatcgggtccgaccc

SEQ ID NO: 5507159 - DNA, 25 bp, Homo sapien
gggtcggacccgataggactacact

SEQ ID NO: 5507160 - DNA, 25 bp, Homo sapien
ggaaaagtcaacccagaagagtcat

SEQ ID NO: 5507161 - DNA, 25 bp, Homo sapien
ccacctcggtgggttccatctcacc

SEQ ID NO: 5507162 - DNA, 25 bp, Homo sapien
aaagggcaggttctttctccatctt

SEQ ID NO: 5507163 - DNA, 25 bp, Homo sapien
aacccagaagagtcatcatcgcaga

SEQ ID NO: 5507164 - DNA, 25 bp, Homo sapien
gcagactaaaaccaactggagttcc

SEQ ID NO: 5507165 - DNA, 25 bp, Homo sapien
accagcctgcttgatgagcctctct

SEQ ID NO: 5507166 - DNA, 25 bp, Homo sapien
gagggctgcataatgaactggaaaa

SEQ ID NO: 5507167 - DNA, 25 bp, Homo sapien
gaacaggaagtaacacccagtttca

SEQ ID NO: 5507168 - DNA, 25 bp, Homo sapien
tcctgaaccacagcccggtgtttcc

SEQ ID NO: 5507169 - DNA, 25 bp, Homo sapien
attggtgtctgctaagtttgggagg

SEQ ID NO: 5507170 - DNA, 25 bp, Homo sapien
ctatggggtacccatggaacaggaa

SEQ ID NO: 5507171 - DNA, 25 bp, Homo sapien
agaaaggctgccactctggccattg

SEQ ID NO: 5507172 - DNA, 25 bp, Homo sapien
tgacccctcctgatccggctgatgg

SEQ ID NO: 5507173 - DNA, 25 bp, Homo sapien
ggccactagcaggctgtgtatcaac

SEQ ID NO: 5507174 - DNA, 25 bp, Homo sapien
tcccaagcctaaatgtaaagggcag

SEQ ID NO: 5507175 - DNA, 25 bp, Homo sapien
gttactggttaggccactagcaggc

SEQ ID NO: 5507176 - DNA, 25 bp, Homo sapien
ctccgagatgtcatgcaaatctgcc

SEQ ID NO: 5507177 - DNA, 25 bp, Homo sapien
tgtcatgcaaatctgccaggccctg

SEQ ID NO: 5507178 - DNA, 25 bp, Homo sapien
gccattggcagcgccagctctgtac

SEQ ID NO: 5507179 - DNA, 25 bp, Homo sapien
ctagcacgtttgatttttgcagggt

SEQ ID NO: 5507180 - DNA, 25 bp, Homo sapien
aggccctgggttactggttaggcca

SEQ ID NO: 5507181 - DNA, 25 bp, Homo sapien
actctggccattggcagcgccagct

SEQ ID NO: 5507182 - DNA, 25 bp, Homo sapien
cgcggaccaggcacgcctgccgacg

SEQ ID NO: 5507183 - DNA, 25 bp, Homo sapien
cgtcggcaggcgtgcctggtccgcg

SEQ ID NO: 5507184 - DNA, 25 bp, Homo sapien
cagaactcagtcgaagatgaagaac

SEQ ID NO: 5507185 - DNA, 25 bp, Homo sapien
gttcttcatcttcgactgagttctg

SEQ ID NO: 5507186 - DNA, 25 bp, Homo sapien
catgtagggcatgctcagccagtaa

SEQ ID NO: 5507187 - DNA, 25 bp, Homo sapien
ggtgcttcccgatccactgacggcc

SEQ ID NO: 5507188 - DNA, 25 bp, Homo sapien
ccgccggtgcttcccgatccactga

SEQ ID NO: 5507189 - DNA, 25 bp, Homo sapien
gccagtaatggttctccgcctcgat

SEQ ID NO: 5507190 - DNA, 25 bp, Homo sapien
tagggcatgctcagccagtaatggt

SEQ ID NO: 5507191 - DNA, 25 bp, Homo sapien
ccgcctcgatctccaggcggcggat

SEQ ID NO: 5507192 - DNA, 25 bp, Homo sapien
ctttatggcctcgaaggcctccctc

SEQ ID NO: 5507193 - DNA, 25 bp, Homo sapien
gtggcggccgcctttatggcctcga

SEQ ID NO: 5507194 - DNA, 25 bp, Homo sapien
gctcctgctcccgggtcatgtaggg

SEQ ID NO: 5507195 - DNA, 25 bp, Homo sapien
tcccgatccactgacggccgggaat

SEQ ID NO: 5507196 - DNA, 25 bp, Homo sapien
gctcagccagtaatggttctccgcc

SEQ ID NO: 5507197 - DNA, 25 bp, Homo sapien
agggaagcaactgtagatgattatg

SEQ ID NO: 5507198 - DNA, 25 bp, Homo sapien
aatgcaggatggtgcactgccattc

SEQ ID NO: 5507199 - DNA, 25 bp, Homo sapien
aagtcagagcctgctagaatgtgtc

SEQ ID NO: 5507200 - DNA, 25 bp, Homo sapien
ggtctgcatggcatgaccagccacc

SEQ ID NO: 5507201 - DNA, 25 bp, Homo sapien
ctccaaatgataaggagggtgagga

SEQ ID NO: 5507202 - DNA, 25 bp, Homo sapien
attggcatacatgttgggatggaac

SEQ ID NO: 5507203 - DNA, 25 bp, Homo sapien
tacaggtgtatgaaaccatggtacc

SEQ ID NO: 5507204 - DNA, 25 bp, Homo sapien
gaatgtgtagcaggagactcctttg

SEQ ID NO: 5507205 - DNA, 25 bp, Homo sapien
gtgaggagtcacatatggaacttcc

SEQ ID NO: 5507206 - DNA, 25 bp, Homo sapien
attttcaatgggttgtggggaatca

SEQ ID NO: 5507207 - DNA, 25 bp, Homo sapien
gatcagcacagggttccccagaagt

SEQ ID NO: 5507208 - DNA, 25 bp, Homo sapien
caacaacagtcttaggcagaggctt

SEQ ID NO: 5507209 - DNA, 25 bp, Homo sapien
gaggagaaagctgtaactctgtgaa

SEQ ID NO: 5507210 - DNA, 25 bp, Homo sapien
cacaaagcaggttctcagaagcttc

SEQ ID NO: 5507211 - DNA, 25 bp, Homo sapien
agcagtttcgcagaaagcttctttc

SEQ ID NO: 5507212 - DNA, 25 bp, Homo sapien
ttcaccatagctctctaagggcttt

SEQ ID NO: 5507213 - DNA, 25 bp, Homo sapien
tccacaagaacagccgtaataaacg

SEQ ID NO: 5507214 - DNA, 25 bp, Homo sapien
tgaattaacagaacacaaagcaggt

SEQ ID NO: 5507215 - DNA, 25 bp, Homo sapien
ttaacagaacacaaagcagtttcgc

SEQ ID NO: 5507216 - DNA, 25 bp, Homo sapien
tccacagaacacaaagcagtttccc

SEQ ID NO: 5507217 - DNA, 25 bp, Homo sapien
tctgggcttccaaatatcaccttgc

SEQ ID NO: 5507218 - DNA, 25 bp, Homo sapien
cagaggcttcttgaagggaaagctg

SEQ ID NO: 5507219 - DNA, 25 bp, Homo sapien
ttgtctgttgttggtgtataggaat

SEQ ID NO: 5507220 - DNA, 25 bp, Homo sapien
ctgttgttggtgtataggaatgctt

SEQ ID NO: 5507221 - DNA, 25 bp, Homo sapien
ctagataaacaatcatgtcgtctgc

SEQ ID NO: 5507222 - DNA, 25 bp, Homo sapien
aaacaatcatgtcgtctgcaaacag

SEQ ID NO: 5507223 - DNA, 25 bp, Homo sapien
tctgttgttggtgtataggaatgct

SEQ ID NO: 5507224 - DNA, 25 bp, Homo sapien
ataaacaatcatgtcgtctgcaaac

SEQ ID NO: 5507225 - DNA, 25 bp, Homo sapien
gtttgtctgttgttggtgtatagga

SEQ ID NO: 5507226 - DNA, 25 bp, Homo sapien
tttctagataaacaatcatgtcgtc

SEQ ID NO: 5507227 - DNA, 25 bp, Homo sapien
gtctgttgttggtgtataggaatgc

SEQ ID NO: 5507228 - DNA, 25 bp, Homo sapien
catgtggcttttgtctttggctctg

SEQ ID NO: 5507229 - DNA, 25 bp, Homo sapien
tattgatttgcatatattgaaccag

SEQ ID NO: 5507230 - DNA, 25 bp, Homo sapien
cgaacgttaagacacttagctcatt

SEQ ID NO: 5507231 - DNA, 25 bp, Homo sapien
aatgagctaagtgtcttaacgttcg

SEQ ID NO: 5507232 - DNA, 25 bp, Homo sapien
gtgcaagtctaatacctaccaaggg

SEQ ID NO: 5507233 - DNA, 25 bp, Homo sapien
tgattacagctgatgtcaaaaacaa

SEQ ID NO: 5507234 - DNA, 25 bp, Homo sapien
agcggcttcctctgtcagctgccac

SEQ ID NO: 5507235 - DNA, 25 bp, Homo sapien
aaagacctgaaggaatccacctgca

SEQ ID NO: 5507236 - DNA, 25 bp, Homo sapien
aatccacctgcataggccacgcgtt

SEQ ID NO: 5507237 - DNA, 25 bp, Homo sapien
attgtgaaggtatttgagcggcttc

SEQ ID NO: 5507238 - DNA, 25 bp, Homo sapien
agcacaggaatgattacagctgatg

SEQ ID NO: 5507239 - DNA, 25 bp, Homo sapien
gtgaaggtatttgagcggcttcctc

SEQ ID NO: 5507240 - DNA, 25 bp, Homo sapien
cagctgccacccggctcttcttaac

SEQ ID NO: 5507241 - DNA, 25 bp, Homo sapien
tgccacccggctcttcttaacctgt

SEQ ID NO: 5507242 - DNA, 25 bp, Homo sapien
ctgaaggaatccacctgcataggcc

SEQ ID NO: 5507243 - DNA, 25 bp, Homo sapien
taaccgtatctataatcaacaggac

SEQ ID NO: 5507244 - DNA, 25 bp, Homo sapien
gtcctgttgattatagatacggtta

SEQ ID NO: 5507245 - DNA, 25 bp, Homo sapien
tgacggaccggcgggcacgtcgggg

SEQ ID NO: 5507246 - DNA, 25 bp, Homo sapien
ccccgacgtgcccgccggtccgtca

SEQ ID NO: 5507247 - DNA, 25 bp, Homo sapien
gtccaagggcccctgtgcgcggacc

SEQ ID NO: 5507248 - DNA, 25 bp, Homo sapien
ggtccgcgcacaggggcccttggac

SEQ ID NO: 5507249 - DNA, 25 bp, Homo sapien
ttgggacagaaatttcatataagac

SEQ ID NO: 5507250 - DNA, 25 bp, Homo sapien
agagatgcatacatcaatggctatc

SEQ ID NO: 5507251 - DNA, 25 bp, Homo sapien
ttatagtacagccaagagatgcata

SEQ ID NO: 5507252 - DNA, 25 bp, Homo sapien
ttttaagagaattcattagcagatc

SEQ ID NO: 5507253 - DNA, 25 bp, Homo sapien
acacaagcaaagaacaaagtcattc

SEQ ID NO: 5507254 - DNA, 25 bp, Homo sapien
ttctgataaccaagaatacactaca

SEQ ID NO: 5507255 - DNA, 25 bp, Homo sapien
attcttctagatcctgtgtgtaggc

SEQ ID NO: 5507256 - DNA, 25 bp, Homo sapien
attttatgggactgagactgtacag

SEQ ID NO: 5507257 - DNA, 25 bp, Homo sapien
caaaatcccaaagctatatgagtat

SEQ ID NO: 5507258 - DNA, 25 bp, Homo sapien
atacagtatgtttttaagagaattc

SEQ ID NO: 5507259 - DNA, 25 bp, Homo sapien
acacacagcaacagaatacagtatg

SEQ ID NO: 5507260 - DNA, 25 bp, Homo sapien
ctcgaaccggtacgttcaacgacat

SEQ ID NO: 5507261 - DNA, 25 bp, Homo sapien
atgtcgttgaacgtaccggttcgag

SEQ ID NO: 5507262 - DNA, 25 bp, Homo sapien
ggatctttcgcatacactgagttat

SEQ ID NO: 5507263 - DNA, 25 bp, Homo sapien
ataactcagtgtatgcgaaagatcc

SEQ ID NO: 5507264 - DNA, 25 bp, Homo sapien
aagccatcacgaaaatactgaaagc

SEQ ID NO: 5507265 - DNA, 25 bp, Homo sapien
atattaaacaagcaacagacagatc

SEQ ID NO: 5507266 - DNA, 25 bp, Homo sapien
ggacagggaaagataatcacacctt

SEQ ID NO: 5507267 - DNA, 25 bp, Homo sapien
tgaaattgacagtggatagaaaacc

SEQ ID NO: 5507268 - DNA, 25 bp, Homo sapien
gcaacagacagatctaaaaagttcc

SEQ ID NO: 5507269 - DNA, 25 bp, Homo sapien
agctttagcaggcaggcttgaagat

SEQ ID NO: 5507270 - DNA, 25 bp, Homo sapien
gaagatgggagttttcatggcttga

SEQ ID NO: 5507271 - DNA, 25 bp, Homo sapien
cataatcacaatcaggaaggcaaag

SEQ ID NO: 5507272 - DNA, 25 bp, Homo sapien
ttcaataagcacatggacagggaaa

SEQ ID NO: 5507273 - DNA, 25 bp, Homo sapien
agtgaggcaggcaatcccttgttca

SEQ ID NO: 5507274 - DNA, 25 bp, Homo sapien
atctctgcaatgcagtgaggcaggc

SEQ ID NO: 5507275 - DNA, 25 bp, Homo sapien
gacaaaataggcattactatctgac

SEQ ID NO: 5507276 - DNA, 25 bp, Homo sapien
gtcagatagtaatgcctattttgtc

SEQ ID NO: 5507277 - DNA, 25 bp, Homo sapien
tctcacaccgcgagggccacctgcg

SEQ ID NO: 5507278 - DNA, 25 bp, Homo sapien
cgcaggtggccctcgcggtgtgaga

SEQ ID NO: 5507279 - DNA, 25 bp, Homo sapien
acgcgggtgtgacgggcgcgggagc

SEQ ID NO: 5507280 - DNA, 25 bp, Homo sapien
gctcccgcgcccgtcacacccgcgt

SEQ ID NO: 5507281 - DNA, 25 bp, Homo sapien
atctgcttgataaggtacccatgcc

SEQ ID NO: 5507282 - DNA, 25 bp, Homo sapien
agtatttgggcaaaaccagaatcta

SEQ ID NO: 5507283 - DNA, 25 bp, Homo sapien
tattaaagcatgcccagtatttggg

SEQ ID NO: 5507284 - DNA, 25 bp, Homo sapien
cactgtcacctaatacccatggctt

SEQ ID NO: 5507285 - DNA, 25 bp, Homo sapien
gagaaactgctgcacagatagctcc

SEQ ID NO: 5507286 - DNA, 25 bp, Homo sapien
tatgcacaactgtagagaaactgct

SEQ ID NO: 5507287 - DNA, 25 bp, Homo sapien
catggcttgatgggaagccatgagg

SEQ ID NO: 5507288 - DNA, 25 bp, Homo sapien
tgggatccaggagaaactttagtcc

SEQ ID NO: 5507289 - DNA, 25 bp, Homo sapien
aaatacaggttgaattctgggatcc

SEQ ID NO: 5507290 - DNA, 25 bp, Homo sapien
tttaagttatgtgaagtgaaatttc

SEQ ID NO: 5507291 - DNA, 25 bp, Homo sapien
taccaagctaacccaacaagttcat

SEQ ID NO: 5507292 - DNA, 25 bp, Homo sapien
ttctcttaatcgtgaccacctttcg

SEQ ID NO: 5507293 - DNA, 25 bp, Homo sapien
cgaaaggtggtcacgattaagagaa

SEQ ID NO: 5507294 - DNA, 25 bp, Homo sapien
tgaacagcaagcgcactccgtctgt

SEQ ID NO: 5507295 - DNA, 25 bp, Homo sapien
gtgaatgccataacagatcagctac

SEQ ID NO: 5507296 - DNA, 25 bp, Homo sapien
ctggccctccagtccgagatgcctg

SEQ ID NO: 5507297 - DNA, 25 bp, Homo sapien
gtcatacagtgaaaggacaaaagga

SEQ ID NO: 5507298 - DNA, 25 bp, Homo sapien
actctggctgagcattgagcctggg

SEQ ID NO: 5507299 - DNA, 25 bp, Homo sapien
gcacacttcgaatcctgaggtccac

SEQ ID NO: 5507300 - DNA, 25 bp, Homo sapien
ccctcaggaccccacagtgcctgca

SEQ ID NO: 5507301 - DNA, 25 bp, Homo sapien
cctgggcttcccgagactcgctgga

SEQ ID NO: 5507302 - DNA, 25 bp, Homo sapien
caggtgcctcacgacaagaaacact

SEQ ID NO: 5507303 - DNA, 25 bp, Homo sapien
tgaccatcatgcagcaagaggtgaa

SEQ ID NO: 5507304 - DNA, 25 bp, Homo sapien
taagagtaagttgctgaccttctgc

SEQ ID NO: 5507305 - DNA, 25 bp, Homo sapien
ttggtactgacacacatctacatac

SEQ ID NO: 5507306 - DNA, 25 bp, Homo sapien
tatgctactgaaacaactggtagaa

SEQ ID NO: 5507307 - DNA, 25 bp, Homo sapien
taatacagcagaaccacagtgccaa

SEQ ID NO: 5507308 - DNA, 25 bp, Homo sapien
ttcagcaaaaaagtatgcaatacag

SEQ ID NO: 5507309 - DNA, 25 bp, Homo sapien
aaggtaaaccaacaggagagattac

SEQ ID NO: 5507310 - DNA, 25 bp, Homo sapien
aagacatcacaaataatacagcaga

SEQ ID NO: 5507311 - DNA, 25 bp, Homo sapien
aaaagctcacaaacaataagacatc

SEQ ID NO: 5507312 - DNA, 25 bp, Homo sapien
tcaacagtgcatcttatggtaagtc

SEQ ID NO: 5507313 - DNA, 25 bp, Homo sapien
ccaagaaatgccaagaccaatatgc

SEQ ID NO: 5507314 - DNA, 25 bp, Homo sapien
gtttacagaaaaagtcttcagcaaa

SEQ ID NO: 5507315 - DNA, 25 bp, Homo sapien
tacagtcaactgaaacgcattgttc

SEQ ID NO: 5507316 - DNA, 25 bp, Homo sapien
gcgtcggggcgcggcccagccccgg

SEQ ID NO: 5507317 - DNA, 25 bp, Homo sapien
ccggggctgggccgcgccccgacgc

SEQ ID NO: 5507318 - DNA, 25 bp, Homo sapien
ggcgtcggggcgcggcccagccccg

SEQ ID NO: 5507319 - DNA, 25 bp, Homo sapien
cggggctgggccgcgccccgacgcc

SEQ ID NO: 5507320 - DNA, 25 bp, Homo sapien
gtcggggcgcggcccagccccggag

SEQ ID NO: 5507321 - DNA, 25 bp, Homo sapien
ctccggggctgggccgcgccccgac

SEQ ID NO: 5507322 - DNA, 25 bp, Homo sapien
gcacccaggaaatgtaaatgcaacc

SEQ ID NO: 5507323 - DNA, 25 bp, Homo sapien
atgaactaatcagagatgtgcatga

SEQ ID NO: 5507324 - DNA, 25 bp, Homo sapien
ctggataccaaagaaagtgagttat

SEQ ID NO: 5507325 - DNA, 25 bp, Homo sapien
aaccacaaggttgtacagcgttcac

SEQ ID NO: 5507326 - DNA, 25 bp, Homo sapien
cagattttggagattagcttagggc

SEQ ID NO: 5507327 - DNA, 25 bp, Homo sapien
gtgtgctttaacaatcagggctgct

SEQ ID NO: 5507328 - DNA, 25 bp, Homo sapien
aaggctttgcaaaaagcgtaagtcc

SEQ ID NO: 5507329 - DNA, 25 bp, Homo sapien
aagagtatgagctattaagagtttc

SEQ ID NO: 5507330 - DNA, 25 bp, Homo sapien
agtcatggaaggcagtgtataaata

SEQ ID NO: 5507331 - DNA, 25 bp, Homo sapien
cagggctgcttttggtatcaagagt

SEQ ID NO: 5507332 - DNA, 25 bp, Homo sapien
ttttcagaagctagtagtaacttgc

SEQ ID NO: 5507333 - DNA, 25 bp, Homo sapien
gtgtaaagactggtagtaatcaata

SEQ ID NO: 5507334 - DNA, 25 bp, Homo sapien
tattgattactaccagtctttacac

SEQ ID NO: 5507335 - DNA, 25 bp, Homo sapien
gagaagatgtttatattaaaggttg

SEQ ID NO: 5507336 - DNA, 25 bp, Homo sapien
caacctttaatataaacatcttctc

SEQ ID NO: 5507337 - DNA, 25 bp, Homo sapien
gcgcgagggcaccgcgcccgtgccg

SEQ ID NO: 5507338 - DNA, 25 bp, Homo sapien
cggcacgggcgcggtgccctcgcgc

SEQ ID NO: 5507339 - DNA, 25 bp, Homo sapien
cgcgcgagggcaccgcgcccgtgcc

SEQ ID NO: 5507340 - DNA, 25 bp, Homo sapien
ggcacgggcgcggtgccctcgcgcg

SEQ ID NO: 5507341 - DNA, 25 bp, Homo sapien
cgcgagggcaccgcgcccgtgccgt

SEQ ID NO: 5507342 - DNA, 25 bp, Homo sapien
acggcacgggcgcggtgccctcgcg

SEQ ID NO: 5507343 - DNA, 25 bp, Homo sapien
gcgagggcaccgcgcccgtgccgtg

SEQ ID NO: 5507344 - DNA, 25 bp, Homo sapien
cacggcacgggcgcggtgccctcgc

SEQ ID NO: 5507345 - DNA, 25 bp, Homo sapien
tccgtctctagcactttatacaaag

SEQ ID NO: 5507346 - DNA, 25 bp, Homo sapien
ctttgtataaagtgctagagacgga

SEQ ID NO: 5507347 - DNA, 25 bp, Homo sapien
tttctctcgggtcctctacggccac

SEQ ID NO: 5507348 - DNA, 25 bp, Homo sapien
gtggccgtagaggacccgagagaaa

SEQ ID NO: 5507349 - DNA, 25 bp, Homo sapien
ctaaaaagtatccgaacatgaagta

SEQ ID NO: 5507350 - DNA, 25 bp, Homo sapien
tacttcatgttcggatactttttag

SEQ ID NO: 5507351 - DNA, 25 bp, Homo sapien
cccaatgcaacccttgataagcctc

SEQ ID NO: 5507352 - DNA, 25 bp, Homo sapien
ccaaaaggaaaatgcacatctgtac

SEQ ID NO: 5507353 - DNA, 25 bp, Homo sapien
tataaggtatgctgaaccagaagaa

SEQ ID NO: 5507354 - DNA, 25 bp, Homo sapien
gttctgacaacttggtaacagcttt

SEQ ID NO: 5507355 - DNA, 25 bp, Homo sapien
ttattggtaaagtggtagaacatca

SEQ ID NO: 5507356 - DNA, 25 bp, Homo sapien
gataagcctccactgtgagcgtctg

SEQ ID NO: 5507357 - DNA, 25 bp, Homo sapien
tgctatgatacaaaggatacttaca

SEQ ID NO: 5507358 - DNA, 25 bp, Homo sapien
gccttaccagttagtgctgtggacc

SEQ ID NO: 5507359 - DNA, 25 bp, Homo sapien
ccaaaaatcgagaggacaatgtgta

SEQ ID NO: 5507360 - DNA, 25 bp, Homo sapien
agagggagaggcttcttccccaatg

SEQ ID NO: 5507361 - DNA, 25 bp, Homo sapien
actgtgagcgtctgtttggtccaaa

SEQ ID NO: 5507362 - DNA, 25 bp, Homo sapien
aaacccagtgggataacttatgtta

SEQ ID NO: 5507363 - DNA, 25 bp, Homo sapien
acaaagggaaatgagtacataaaac

SEQ ID NO: 5507364 - DNA, 25 bp, Homo sapien
tgcaaatggagtgatatggccttta

SEQ ID NO: 5507365 - DNA, 25 bp, Homo sapien
atggcctttaaggaaggagttagta

SEQ ID NO: 5507366 - DNA, 25 bp, Homo sapien
agaaaatccagagaaaatgatgtac

SEQ ID NO: 5507367 - DNA, 25 bp, Homo sapien
ataaatatgtttgggtgactggtaa

SEQ ID NO: 5507368 - DNA, 25 bp, Homo sapien
gcgaaattgctcatagtaacccatc

SEQ ID NO: 5507369 - DNA, 25 bp, Homo sapien
atatactaaaacaagggggttctga

SEQ ID NO: 5507370 - DNA, 25 bp, Homo sapien
cttcacaatacaagcaaagctgttt

SEQ ID NO: 5507371 - DNA, 25 bp, Homo sapien
ggggttctgaaagcgaaattgctca

SEQ ID NO: 5507372 - DNA, 25 bp, Homo sapien
taaaaaccaaccctggcatttgcac

SEQ ID NO: 5507373 - DNA, 25 bp, Homo sapien
gcaacattcaataatagcaatcact

SEQ ID NO: 5507374 - DNA, 25 bp, Homo sapien
aaaatggctgcctaccaatctgtct

SEQ ID NO: 5507375 - DNA, 25 bp, Homo sapien
tacctgctccagtcaccaatggtta

SEQ ID NO: 5507376 - DNA, 25 bp, Homo sapien
ggggagatcacagtctacagactca

SEQ ID NO: 5507377 - DNA, 25 bp, Homo sapien
taaccacatctcacctgcaacattc

SEQ ID NO: 5507378 - DNA, 25 bp, Homo sapien
ctttttagtttggggagatcacagt

SEQ ID NO: 5507379 - DNA, 25 bp, Homo sapien
tgcccccagttattttaagacacaa

SEQ ID NO: 5507380 - DNA, 25 bp, Homo sapien
atggatgcaattaaacaacttcagg

SEQ ID NO: 5507381 - DNA, 25 bp, Homo sapien
actacaaccataaagaacacaattc

SEQ ID NO: 5507382 - DNA, 25 bp, Homo sapien
tctgcaggctataattacctgctcc

SEQ ID NO: 5507383 - DNA, 25 bp, Homo sapien
gaacacaattccaagtactgtactt

SEQ ID NO: 5507384 - DNA, 25 bp, Homo sapien
tcagtctaatacgtcgggtaatatt

SEQ ID NO: 5507385 - DNA, 25 bp, Homo sapien
aatattacccgacgtattagactga

SEQ ID NO: 5507386 - DNA, 25 bp, Homo sapien
tctgctttgctcagcgtcagggtgc

SEQ ID NO: 5507387 - DNA, 25 bp, Homo sapien
acttcgcaggcgtagactttgtgtt

SEQ ID NO: 5507388 - DNA, 25 bp, Homo sapien
aggtgggggcacttctccctctaac

SEQ ID NO: 5507389 - DNA, 25 bp, Homo sapien
ttattcagcaggcacacaacagagg

SEQ ID NO: 5507390 - DNA, 25 bp, Homo sapien
gcataattaaagccaaggaggagga

SEQ ID NO: 5507391 - DNA, 25 bp, Homo sapien
gcaataggggtaggtcccctgtgga

SEQ ID NO: 5507392 - DNA, 25 bp, Homo sapien
ctttggcctctctgggatagaagtt

SEQ ID NO: 5507393 - DNA, 25 bp, Homo sapien
gggatagaagttattcagcaggcac

SEQ ID NO: 5507394 - DNA, 25 bp, Homo sapien
gttgaagctctttgtgacgggcgag

SEQ ID NO: 5507395 - DNA, 25 bp, Homo sapien
actgctcatcagatggcgggaagat

SEQ ID NO: 5507396 - DNA, 25 bp, Homo sapien
acacaacagaggcagttccagattt

SEQ ID NO: 5507397 - DNA, 25 bp, Homo sapien
ttgtgcttagctagtaggaagtgct

SEQ ID NO: 5507398 - DNA, 25 bp, Homo sapien
agctagtaggaagtgctgctcttag

SEQ ID NO: 5507399 - DNA, 25 bp, Homo sapien
agtgatggtttgtaatgtagtgaat

SEQ ID NO: 5507400 - DNA, 25 bp, Homo sapien
cagactagcagctcatcacggtggg

SEQ ID NO: 5507401 - DNA, 25 bp, Homo sapien
tgaaaaaacataattggtagagaaa

SEQ ID NO: 5507402 - DNA, 25 bp, Homo sapien
atagtcagataatgcataaacacaa

SEQ ID NO: 5507403 - DNA, 25 bp, Homo sapien
gaaaacccggcttctcaccatctcc

SEQ ID NO: 5507404 - DNA, 25 bp, Homo sapien
tgatagaaggtaaatagaaaaacag

SEQ ID NO: 5507405 - DNA, 25 bp, Homo sapien
gtcagggaatgttattcagactagc

SEQ ID NO: 5507406 - DNA, 25 bp, Homo sapien
gtagagaaaactgatagaaggtaaa

SEQ ID NO: 5507407 - DNA, 25 bp, Homo sapien
acatttagcatagagaaaacccggc

SEQ ID NO: 5507408 - DNA, 25 bp, Homo sapien
atgaaatgattgaaagtctttatga

SEQ ID NO: 5507409 - DNA, 25 bp, Homo sapien
ttgttaaatgcaaaggctaccagac

SEQ ID NO: 5507410 - DNA, 25 bp, Homo sapien
acttggtaaagcagatttagtcttc

SEQ ID NO: 5507411 - DNA, 25 bp, Homo sapien
catgcctggactgaactccacagct

SEQ ID NO: 5507412 - DNA, 25 bp, Homo sapien
acaacgcacaggtatagtgctgctc

SEQ ID NO: 5507413 - DNA, 25 bp, Homo sapien
gcaaaggctaccagacgaccattta

SEQ ID NO: 5507414 - DNA, 25 bp, Homo sapien
gggtactctctgctgagagaagttc

SEQ ID NO: 5507415 - DNA, 25 bp, Homo sapien
ctgctcacagtgcaggatggtagag

SEQ ID NO: 5507416 - DNA, 25 bp, Homo sapien
gaggactgaaacatgcaaccttaca

SEQ ID NO: 5507417 - DNA, 25 bp, Homo sapien
tagctgaaattgtctatcacgtagc

SEQ ID NO: 5507418 - DNA, 25 bp, Homo sapien
gctttgaactcgaagaatgggtact

SEQ ID NO: 5507419 - DNA, 25 bp, Homo sapien
gcctgctgctctcgcaggcaggggc

SEQ ID NO: 5507420 - DNA, 25 bp, Homo sapien
gctgcttacagcagtgcggccatct

SEQ ID NO: 5507421 - DNA, 25 bp, Homo sapien
tccccaccatacctctcgccacccc

SEQ ID NO: 5507422 - DNA, 25 bp, Homo sapien
ccagctttccctgccagcggtgctc

SEQ ID NO: 5507423 - DNA, 25 bp, Homo sapien
aagaaaaacgtgtagccaatgaaat

SEQ ID NO: 5507424 - DNA, 25 bp, Homo sapien
gaaataacatgttctgggccccacc

SEQ ID NO: 5507425 - DNA, 25 bp, Homo sapien
cgcaggcacagagctgattaactcg

SEQ ID NO: 5507426 - DNA, 25 bp, Homo sapien
ggcagcgatcattaagaaaaacgtg

SEQ ID NO: 5507427 - DNA, 25 bp, Homo sapien
taaacaaggctttgtccaaggacat

SEQ ID NO: 5507428 - DNA, 25 bp, Homo sapien
cagtgcggccatctcggcttctctc

SEQ ID NO: 5507429 - DNA, 25 bp, Homo sapien
cacatcgtctgtcacgcgctggtcc

SEQ ID NO: 5507430 - DNA, 25 bp, Homo sapien
agaagcatgccaagacagagcattt

SEQ ID NO: 5507431 - DNA, 25 bp, Homo sapien
aaatgctagaaacatggagatagtt

SEQ ID NO: 5507432 - DNA, 25 bp, Homo sapien
acccagccatgcagtccacatgctc

SEQ ID NO: 5507433 - DNA, 25 bp, Homo sapien
tctgcagaccaaagagtcccgtcaa

SEQ ID NO: 5507434 - DNA, 25 bp, Homo sapien
agggaaatataagatgcatgtaaac

SEQ ID NO: 5507435 - DNA, 25 bp, Homo sapien
gagctccagagacatccaccagtcc

SEQ ID NO: 5507436 - DNA, 25 bp, Homo sapien
aagtgataaaggacacctggaaagt

SEQ ID NO: 5507437 - DNA, 25 bp, Homo sapien
agggattactgaagtctgccttgcc

SEQ ID NO: 5507438 - DNA, 25 bp, Homo sapien
gcagacctctgagtacctggtgggg

SEQ ID NO: 5507439 - DNA, 25 bp, Homo sapien
cctgaccccacagagcccactaaga

SEQ ID NO: 5507440 - DNA, 25 bp, Homo sapien
gtttctctgctgaggaggaaagaag

SEQ ID NO: 5507441 - DNA, 25 bp, Homo sapien
gaagggattaatgattactacgttt

SEQ ID NO: 5507442 - DNA, 25 bp, Homo sapien
aaacgtagtaatcattaatcccttc

SEQ ID NO: 5507443 - DNA, 25 bp, Homo sapien
tgatgtataacaagtgaagtaagta

SEQ ID NO: 5507444 - DNA, 25 bp, Homo sapien
tgcttgaatactatgatgtgaacac

SEQ ID NO: 5507445 - DNA, 25 bp, Homo sapien
aaatcttatgctacagaaagctgac

SEQ ID NO: 5507446 - DNA, 25 bp, Homo sapien
tccacaaaaacaagcttaataacta

SEQ ID NO: 5507447 - DNA, 25 bp, Homo sapien
tgaactggcctaatctagagttacc

SEQ ID NO: 5507448 - DNA, 25 bp, Homo sapien
gatacaaaatacacctgaactggcc

SEQ ID NO: 5507449 - DNA, 25 bp, Homo sapien
tttccctcaacagaacagcataatc

SEQ ID NO: 5507450 - DNA, 25 bp, Homo sapien
gcttgaaatgagtccagtttaaccc

SEQ ID NO: 5507451 - DNA, 25 bp, Homo sapien
tttaacccaaataatcagtgatgta

SEQ ID NO: 5507452 - DNA, 25 bp, Homo sapien
gaagtaagtatgggaaaatcaaatc

SEQ ID NO: 5507453 - DNA, 25 bp, Homo sapien
gatgtgaacacaataaccaaaagtt

SEQ ID NO: 5507454 - DNA, 25 bp, Homo sapien
gagatgtcgtacgagctcctcctct

SEQ ID NO: 5507455 - DNA, 25 bp, Homo sapien
agaggaggagctcgtacgacatctc

SEQ ID NO: 5507456 - DNA, 25 bp, Homo sapien
caggggatacagaatcagaattgta

SEQ ID NO: 5507457 - DNA, 25 bp, Homo sapien
tgggataacccccaggggatacaga

SEQ ID NO: 5507458 - DNA, 25 bp, Homo sapien
accactcagtttagaagcacagggc

SEQ ID NO: 5507459 - DNA, 25 bp, Homo sapien
tacacatgctgagaatgaactaatc

SEQ ID NO: 5507460 - DNA, 25 bp, Homo sapien
atcgggatatatgtacaacgtaata

SEQ ID NO: 5507461 - DNA, 25 bp, Homo sapien
tcctaaagaagcaactgggataacc

SEQ ID NO: 5507462 - DNA, 25 bp, Homo sapien
atacgactaagtgcaactgagtgaa

SEQ ID NO: 5507463 - DNA, 25 bp, Homo sapien
agactaagcatgcaagacatacgac

SEQ ID NO: 5507464 - DNA, 25 bp, Homo sapien
aggtttgaactgaggtatgcgtact

SEQ ID NO: 5507465 - DNA, 25 bp, Homo sapien
atctaaaaaaagaaccgccctctgc

SEQ ID NO: 5507466 - DNA, 25 bp, Homo sapien
accaaactaaccagcaaccactcag

SEQ ID NO: 5507467 - DNA, 25 bp, Homo sapien
aatacagtgatcacagcacagttct

SEQ ID NO: 5507468 - DNA, 25 bp, Homo sapien
caaactgaaggatatatgccaagat

SEQ ID NO: 5507469 - DNA, 25 bp, Homo sapien
tctgcagtagccccataaaatctct

SEQ ID NO: 5507470 - DNA, 25 bp, Homo sapien
aatgaaaaatgctgaccaaagccta

SEQ ID NO: 5507471 - DNA, 25 bp, Homo sapien
taccaagcttatgagtggatgggag

SEQ ID NO: 5507472 - DNA, 25 bp, Homo sapien
gagtgaagcttcaaaagtaactgcc

SEQ ID NO: 5507473 - DNA, 25 bp, Homo sapien
tgccagagaagtttttgtaccaagc

SEQ ID NO: 5507474 - DNA, 25 bp, Homo sapien
agtggatgggagtgttacttttctt

SEQ ID NO: 5507475 - DNA, 25 bp, Homo sapien
ttgcgtgaccacagactgcccttta

SEQ ID NO: 5507476 - DNA, 25 bp, Homo sapien
ttggtctctgtagaggtacacaaaa

SEQ ID NO: 5507477 - DNA, 25 bp, Homo sapien
tttatacagaaagcagagtgaagct

SEQ ID NO: 5507478 - DNA, 25 bp, Homo sapien
tccgacatgcggataacgggtgacg

SEQ ID NO: 5507479 - DNA, 25 bp, Homo sapien
cgtcacccgttatccgcatgtcgga

SEQ ID NO: 5507480 - DNA, 25 bp, Homo sapien
tgtcggaacaggaggggtctcaggg

SEQ ID NO: 5507481 - DNA, 25 bp, Homo sapien
ccctgagacccctcctgttccgaca

SEQ ID NO: 5507482 - DNA, 25 bp, Homo sapien
ttctctgcccctggcaaagaaaggc

SEQ ID NO: 5507483 - DNA, 25 bp, Homo sapien
ctgtaacttcagaaaggccgccagg

SEQ ID NO: 5507484 - DNA, 25 bp, Homo sapien
accagatgttctgcatgcgagaggg

SEQ ID NO: 5507485 - DNA, 25 bp, Homo sapien
ggtgcagatcctaactggagatgac

SEQ ID NO: 5507486 - DNA, 25 bp, Homo sapien
aagccttaagacaaagggaccatcc

SEQ ID NO: 5507487 - DNA, 25 bp, Homo sapien
ttccaagacaacaggtgtgaacaga

SEQ ID NO: 5507488 - DNA, 25 bp, Homo sapien
caccacaaggaaacatggtacttac

SEQ ID NO: 5507489 - DNA, 25 bp, Homo sapien
ccagaacagagcatacaccacaagg

SEQ ID NO: 5507490 - DNA, 25 bp, Homo sapien
aggcactattacgaaggaaacaggt

SEQ ID NO: 5507491 - DNA, 25 bp, Homo sapien
caagcctgcccttgcacggcccttg

SEQ ID NO: 5507492 - DNA, 25 bp, Homo sapien
cgagagggctcccaaccacctgtaa

SEQ ID NO: 5507493 - DNA, 25 bp, Homo sapien
gaactcttaggcatttgtttactaa

SEQ ID NO: 5507494 - DNA, 25 bp, Homo sapien
ttagtaaacaaatgcctaagagttc

SEQ ID NO: 5507495 - DNA, 25 bp, Homo sapien
attgcctgtctactggggttcagtc

SEQ ID NO: 5507496 - DNA, 25 bp, Homo sapien
tttcaggtgcactggaatcactggg

SEQ ID NO: 5507497 - DNA, 25 bp, Homo sapien
aacagatgtgcttcagtagatagag

SEQ ID NO: 5507498 - DNA, 25 bp, Homo sapien
gcaggaaccagcattttaaacaacc

SEQ ID NO: 5507499 - DNA, 25 bp, Homo sapien
atcccaagagttactgggtagcttt

SEQ ID NO: 5507500 - DNA, 25 bp, Homo sapien
acaggtcacaaaagttcaattagct

SEQ ID NO: 5507501 - DNA, 25 bp, Homo sapien
ttaaaaaatacgtaggatccacatc

SEQ ID NO: 5507502 - DNA, 25 bp, Homo sapien
gtagatagagaattgtgtgcaggaa

SEQ ID NO: 5507503 - DNA, 25 bp, Homo sapien
aatgctatgcagcctagcgtgggaa

SEQ ID NO: 5507504 - DNA, 25 bp, Homo sapien
taaacaaccactgcagttggtccca

SEQ ID NO: 5507505 - DNA, 25 bp, Homo sapien
accccaacgtaccactaagcctgtg

SEQ ID NO: 5507506 - DNA, 25 bp, Homo sapien
ctttaagtggggttcactaggtaga

SEQ ID NO: 5507507 - DNA, 25 bp, Homo sapien
ttgtcctgagtagtaagccatggtg

SEQ ID NO: 5507508 - DNA, 25 bp, Homo sapien
cattaacaggagtgacaagcttctg

SEQ ID NO: 5507509 - DNA, 25 bp, Homo sapien
acatgtgtgactgatcctcccatta

SEQ ID NO: 5507510 - DNA, 25 bp, Homo sapien
tgaaatcacaccctgagcggggcat

SEQ ID NO: 5507511 - DNA, 25 bp, Homo sapien
agcggggcatacttgtcctgagtag

SEQ ID NO: 5507512 - DNA, 25 bp, Homo sapien
cccctcgcaagtccttggcaccaac

SEQ ID NO: 5507513 - DNA, 25 bp, Homo sapien
tggggaagcaacacacacaatgcta

SEQ ID NO: 5507514 - DNA, 25 bp, Homo sapien
aagccatggtgtcctctcctcaggg

SEQ ID NO: 5507515 - DNA, 25 bp, Homo sapien
ccttttccaagagattcaaatgctc

SEQ ID NO: 5507516 - DNA, 25 bp, Homo sapien
ttggtcaggctggataacattttta

SEQ ID NO: 5507517 - DNA, 25 bp, Homo sapien
ggatgaggtgcttcaaatcaaagtc

SEQ ID NO: 5507518 - DNA, 25 bp, Homo sapien
attatatgggatatgagcaaggaat

SEQ ID NO: 5507519 - DNA, 25 bp, Homo sapien
gatagtgttcgcattgaaagaagga

SEQ ID NO: 5507520 - DNA, 25 bp, Homo sapien
accaaggaaagttaagtactgcatc

SEQ ID NO: 5507521 - DNA, 25 bp, Homo sapien
agcaaggaattgaaacagataagat

SEQ ID NO: 5507522 - DNA, 25 bp, Homo sapien
atgtgctaggacaagtatacaagag

SEQ ID NO: 5507523 - DNA, 25 bp, Homo sapien
ttgatccttaagaaaggcggcagag

SEQ ID NO: 5507524 - DNA, 25 bp, Homo sapien
tggcaacatatggttagacaaaatc

SEQ ID NO: 5507525 - DNA, 25 bp, Homo sapien
agacaaaatcctcagtaagaatgcc

SEQ ID NO: 5507526 - DNA, 25 bp, Homo sapien
tggaatacacaaggcaatatctaca

SEQ ID NO: 5507527 - DNA, 25 bp, Homo sapien
tggaaaggggaagattcccaaatca

SEQ ID NO: 5507528 - DNA, 25 bp, Homo sapien
ttcagaacacaggtgatataatttc

SEQ ID NO: 5507529 - DNA, 25 bp, Homo sapien
cacagtctagtaaggtatgtttttg

SEQ ID NO: 5507530 - DNA, 25 bp, Homo sapien
aatcagacgaatgtatgagggtgta

SEQ ID NO: 5507531 - DNA, 25 bp, Homo sapien
gaacagaagtctcccaagtaccaat

SEQ ID NO: 5507532 - DNA, 25 bp, Homo sapien
tggtgcgatcagaattcactgcagc

SEQ ID NO: 5507533 - DNA, 25 bp, Homo sapien
aactcaatgaggacacaatctatat

SEQ ID NO: 5507534 - DNA, 25 bp, Homo sapien
atgtatgagggtgtataattgttat

SEQ ID NO: 5507535 - DNA, 25 bp, Homo sapien
tgaaatacagctaaagttttggatt

SEQ ID NO: 5507536 - DNA, 25 bp, Homo sapien
tataaactgtatcacccaaaaactc

SEQ ID NO: 5507537 - DNA, 25 bp, Homo sapien
ttacaagctcaaaatcagacgaatg

SEQ ID NO: 5507538 - DNA, 25 bp, Homo sapien
tccagtttagtcagtaagatacgtt

SEQ ID NO: 5507539 - DNA, 25 bp, Homo sapien
gggggttcaagtcacagtgctgaat

SEQ ID NO: 5507540 - DNA, 25 bp, Homo sapien
atgtgaaagatttgggggttcaagt

SEQ ID NO: 5507541 - DNA, 25 bp, Homo sapien
ttaaactgtagttctggcacacgaa

SEQ ID NO: 5507542 - DNA, 25 bp, Homo sapien
ctggcacacgaaatttgccccaaag

SEQ ID NO: 5507543 - DNA, 25 bp, Homo sapien
gaaagctatgggaatcaatgctacc

SEQ ID NO: 5507544 - DNA, 25 bp, Homo sapien
taaggcttacatccatgacagcatg

SEQ ID NO: 5507545 - DNA, 25 bp, Homo sapien
gatatggggtacttaggtcactaat

SEQ ID NO: 5507546 - DNA, 25 bp, Homo sapien
taatgacaggaattaggatcttgtc

SEQ ID NO: 5507547 - DNA, 25 bp, Homo sapien
ttgcaaagtttctgatatggggtac

SEQ ID NO: 5507548 - DNA, 25 bp, Homo sapien
gcaagggtctagcagacagtacttt

SEQ ID NO: 5507549 - DNA, 25 bp, Homo sapien
gtccctagatctgttttgcaaagtt

SEQ ID NO: 5507550 - DNA, 25 bp, Homo sapien
aagtacctaacatatgagcatgctc

SEQ ID NO: 5507551 - DNA, 25 bp, Homo sapien
atgttccatatagaaggcatgtatt

SEQ ID NO: 5507552 - DNA, 25 bp, Homo sapien
gttatgataggcacacccacaattc

SEQ ID NO: 5507553 - DNA, 25 bp, Homo sapien
gacaagtgtgcattaaagaattctc

SEQ ID NO: 5507554 - DNA, 25 bp, Homo sapien
caacactgattggtatgaattctga

SEQ ID NO: 5507555 - DNA, 25 bp, Homo sapien
gaggataaaatccacctgagcactc

SEQ ID NO: 5507556 - DNA, 25 bp, Homo sapien
ttgtagcaaagtcacttccctgtgt

SEQ ID NO: 5507557 - DNA, 25 bp, Homo sapien
ataaaaaggtaacattggtactata

SEQ ID NO: 5507558 - DNA, 25 bp, Homo sapien
ctcagatgtaccaacgctagaaaag

SEQ ID NO: 5507559 - DNA, 25 bp, Homo sapien
acaacatgcttgcgaggataaaatc

SEQ ID NO: 5507560 - DNA, 25 bp, Homo sapien
ccaacgctagaaaagtgttaagcac

SEQ ID NO: 5507561 - DNA, 25 bp, Homo sapien
ctgggcaaattaaagttgaggggta

SEQ ID NO: 5507562 - DNA, 25 bp, Homo sapien
gtggctactggcaaattataggcac

SEQ ID NO: 5507563 - DNA, 25 bp, Homo sapien
ggggtaaaggaagatctccatattc

SEQ ID NO: 5507564 - DNA, 25 bp, Homo sapien
acactgaggtataactgggcaaatt

SEQ ID NO: 5507565 - DNA, 25 bp, Homo sapien
tacattaggaacaaggacataaaac

SEQ ID NO: 5507566 - DNA, 25 bp, Homo sapien
gtgccaggtatcacagtactgctac

SEQ ID NO: 5507567 - DNA, 25 bp, Homo sapien
tttaatggcagcacggtgtaagaca

SEQ ID NO: 5507568 - DNA, 25 bp, Homo sapien
tacaaccaagaagcagttaagcact

SEQ ID NO: 5507569 - DNA, 25 bp, Homo sapien
gtgactgaaactctagaacagctgc

SEQ ID NO: 5507570 - DNA, 25 bp, Homo sapien
aaaacaagagaccacatcaaggcta

SEQ ID NO: 5507571 - DNA, 25 bp, Homo sapien
tgtgggtgtacttaggtgactgaaa

SEQ ID NO: 5507572 - DNA, 25 bp, Homo sapien
ctcgggggcgtcaggacagatgaag

SEQ ID NO: 5507573 - DNA, 25 bp, Homo sapien
cttcatctgtcctgacgcccccgag

SEQ ID NO: 5507574 - DNA, 25 bp, Homo sapien
aaatgaagagtctacttaaggcact

SEQ ID NO: 5507575 - DNA, 25 bp, Homo sapien
gtaattaacaaaaactggctgctcc

SEQ ID NO: 5507576 - DNA, 25 bp, Homo sapien
agtaaaaggtcaaccatatcccctc

SEQ ID NO: 5507577 - DNA, 25 bp, Homo sapien
gcaggtaaggaattcagaatctcac

SEQ ID NO: 5507578 - DNA, 25 bp, Homo sapien
acatggcagtagtattcccgtggtc

SEQ ID NO: 5507579 - DNA, 25 bp, Homo sapien
aagaaccacagcatagatttggcct

SEQ ID NO: 5507580 - DNA, 25 bp, Homo sapien
tcaaaaagcaaacagccagacattt

SEQ ID NO: 5507581 - DNA, 25 bp, Homo sapien
tggaactatacagattacatggcag

SEQ ID NO: 5507582 - DNA, 25 bp, Homo sapien
agtacaagaatagcaggtaaggaat

SEQ ID NO: 5507583 - DNA, 25 bp, Homo sapien
atttggcctgagacaagtacaagaa

SEQ ID NO: 5507584 - DNA, 25 bp, Homo sapien
aatctgtacaaatcagggcatcttc

SEQ ID NO: 5507585 - DNA, 25 bp, Homo sapien
tcttgtccagagagtttgaccgtag

SEQ ID NO: 5507586 - DNA, 25 bp, Homo sapien
ctacggtcaaactctctggacaaga

SEQ ID NO: 5507587 - DNA, 25 bp, Homo sapien
cctgagacgcgtgggcccgaggcgc

SEQ ID NO: 5507588 - DNA, 25 bp, Homo sapien
gcgcctcgggcccacgcgtctcagg

SEQ ID NO: 5507589 - DNA, 25 bp, Homo sapien
acgcccgccctgagacgcgtgggcc

SEQ ID NO: 5507590 - DNA, 25 bp, Homo sapien
ggcccacgcgtctcagggcgggcgt

SEQ ID NO: 5507591 - DNA, 25 bp, Homo sapien
cgacgacgcccgccctgagacgcgt

SEQ ID NO: 5507592 - DNA, 25 bp, Homo sapien
acgcgtctcagggcgggcgtcgtcg

SEQ ID NO: 5507593 - DNA, 25 bp, Homo sapien
gtggtgggaactgcctttgtctcca

SEQ ID NO: 5507594 - DNA, 25 bp, Homo sapien
ctgtcaccaaaaccctccgtccctc

SEQ ID NO: 5507595 - DNA, 25 bp, Homo sapien
cgctgacaaaggattctgccaagac

SEQ ID NO: 5507596 - DNA, 25 bp, Homo sapien
gcagtgaaagccctctcgggtcttg

SEQ ID NO: 5507597 - DNA, 25 bp, Homo sapien
ggccacctttgacccagcagaaggc

SEQ ID NO: 5507598 - DNA, 25 bp, Homo sapien
ccctcccagagcctcgaggagtttc

SEQ ID NO: 5507599 - DNA, 25 bp, Homo sapien
acagaatcccaaggtcacaggagag

SEQ ID NO: 5507600 - DNA, 25 bp, Homo sapien
ccttgtgtaaaccggtatcgcgtcc

SEQ ID NO: 5507601 - DNA, 25 bp, Homo sapien
gaggcaagatctggattcaggaatc

SEQ ID NO: 5507602 - DNA, 25 bp, Homo sapien
caacagggaacaattcaaggctgga

SEQ ID NO: 5507603 - DNA, 25 bp, Homo sapien
atacccattgattgaaagagctgtg

SEQ ID NO: 5507604 - DNA, 25 bp, Homo sapien
gtgaaagagatgaaccacgactaga

SEQ ID NO: 5507605 - DNA, 25 bp, Homo sapien
caaaagactctaagtgccaccagac

SEQ ID NO: 5507606 - DNA, 25 bp, Homo sapien
cacgactagaggctgacttagaaat

SEQ ID NO: 5507607 - DNA, 25 bp, Homo sapien
attggatatggatggtcagatgaaa

SEQ ID NO: 5507608 - DNA, 25 bp, Homo sapien
tgctgcattatggcacaaaagactc

SEQ ID NO: 5507609 - DNA, 25 bp, Homo sapien
tcaaagaaggtcaagtaacagtcat

SEQ ID NO: 5507610 - DNA, 25 bp, Homo sapien
gagaacattggatatggatggtcag

SEQ ID NO: 5507611 - DNA, 25 bp, Homo sapien
tgggaatgcttttcaaagaaggtca

SEQ ID NO: 5507612 - DNA, 25 bp, Homo sapien
tcatacagctagaaaagtccctgaa

SEQ ID NO: 5507613 - DNA, 25 bp, Homo sapien
tataaacaatgatgctgggtaatgt

SEQ ID NO: 5507614 - DNA, 25 bp, Homo sapien
ccagacagaaggaccagagtttctg

SEQ ID NO: 5507615 - DNA, 25 bp, Homo sapien
taccggcgactggtgcatcgacaag

SEQ ID NO: 5507616 - DNA, 25 bp, Homo sapien
cttgtcgatgcaccagtcgccggta

SEQ ID NO: 5507617 - DNA, 25 bp, Homo sapien
ttattattttagggatgacgcatga

SEQ ID NO: 5507618 - DNA, 25 bp, Homo sapien
ggtgaatagacaagactgagaattt

SEQ ID NO: 5507619 - DNA, 25 bp, Homo sapien
tgatttgtgttgaaaaggcaagggc

SEQ ID NO: 5507620 - DNA, 25 bp, Homo sapien
tctcaacacacatacaggatcttac

SEQ ID NO: 5507621 - DNA, 25 bp, Homo sapien
gcttctagaagaaaagtatctgcta

SEQ ID NO: 5507622 - DNA, 25 bp, Homo sapien
catggaattacatcaaggcacttgc

SEQ ID NO: 5507623 - DNA, 25 bp, Homo sapien
gtgtacaaagttccaaagaagacaa

SEQ ID NO: 5507624 - DNA, 25 bp, Homo sapien
ataagagggttaagcaatgatttac

SEQ ID NO: 5507625 - DNA, 25 bp, Homo sapien
ggcagcaacaggactcaaaccataa

SEQ ID NO: 5507626 - DNA, 25 bp, Homo sapien
agacaaaaaaaggtagcctattaca

SEQ ID NO: 5507627 - DNA, 25 bp, Homo sapien
cagtaggctgcaatacattaataac

SEQ ID NO: 5507628 - DNA, 25 bp, Homo sapien
aggggaaccgtaatccaagatcttc

SEQ ID NO: 5507629 - DNA, 25 bp, Homo sapien
gaagatcttggattacggttcccct

SEQ ID NO: 5507630 - DNA, 25 bp, Homo sapien
taagaacaataaggatcacagaact

SEQ ID NO: 5507631 - DNA, 25 bp, Homo sapien
ccacaaagcacctccctaagtaccc

SEQ ID NO: 5507632 - DNA, 25 bp, Homo sapien
gggagagttgctacacagcccatct

SEQ ID NO: 5507633 - DNA, 25 bp, Homo sapien
aggcatcactgggatggataaagaa

SEQ ID NO: 5507634 - DNA, 25 bp, Homo sapien
gtaacaatacgtagagaaacacaat

SEQ ID NO: 5507635 - DNA, 25 bp, Homo sapien
ggcccagggtcctagactgctgggt

SEQ ID NO: 5507636 - DNA, 25 bp, Homo sapien
cctgaatagaccagggacatcactg

SEQ ID NO: 5507637 - DNA, 25 bp, Homo sapien
tcacagaactcgaatggatcattat

SEQ ID NO: 5507638 - DNA, 25 bp, Homo sapien
acaaagaaacgtatggctcatctgt

SEQ ID NO: 5507639 - DNA, 25 bp, Homo sapien
agtaccctagtgtgttccctgggag

SEQ ID NO: 5507640 - DNA, 25 bp, Homo sapien
ctgggtaggtcctcagaggtatctg

SEQ ID NO: 5507641 - DNA, 25 bp, Homo sapien
tgttacactgtccatactgagatca

SEQ ID NO: 5507642 - DNA, 25 bp, Homo sapien
attacgcttcggcagtgcaaaggat

SEQ ID NO: 5507643 - DNA, 25 bp, Homo sapien
ctccactagcacactgaacaaacct

SEQ ID NO: 5507644 - DNA, 25 bp, Homo sapien
aaacatggtgagcaaagttcaactc

SEQ ID NO: 5507645 - DNA, 25 bp, Homo sapien
ctgagatcagcagagagctaagtaa

SEQ ID NO: 5507646 - DNA, 25 bp, Homo sapien
agcagagagctaagtaatacacaag

SEQ ID NO: 5507647 - DNA, 25 bp, Homo sapien
acaagtacaaacatggtgagcaaag

SEQ ID NO: 5507648 - DNA, 25 bp, Homo sapien
agttcaactcaggtaatagtgatta

SEQ ID NO: 5507649 - DNA, 25 bp, Homo sapien
aaaaacaaaacatgtagtgggtcac

SEQ ID NO: 5507650 - DNA, 25 bp, Homo sapien
acaagaagtctgtccagccattttg

SEQ ID NO: 5507651 - DNA, 25 bp, Homo sapien
acagaaagaaaggaatatgcatcca

SEQ ID NO: 5507652 - DNA, 25 bp, Homo sapien
cacaatgacttcagtgcaggagttt

SEQ ID NO: 5507653 - DNA, 25 bp, Homo sapien
atcattgcaggacaatggaagaagg

SEQ ID NO: 5507654 - DNA, 25 bp, Homo sapien
attcccccagagaacaaactgaaaa

SEQ ID NO: 5507655 - DNA, 25 bp, Homo sapien
aaacaaggtaagcagacacattcat

SEQ ID NO: 5507656 - DNA, 25 bp, Homo sapien
atggcagaatggtagctaaaccact

SEQ ID NO: 5507657 - DNA, 25 bp, Homo sapien
agttcagtggttgatcagtgtgctc

SEQ ID NO: 5507658 - DNA, 25 bp, Homo sapien
ccacttgagaacaggttaatgaaat

SEQ ID NO: 5507659 - DNA, 25 bp, Homo sapien
acatagatgcaaatgaaattccccc

SEQ ID NO: 5507660 - DNA, 25 bp, Homo sapien
tagatcaagttcactggaatcagtc

SEQ ID NO: 5507661 - DNA, 25 bp, Homo sapien
atagttgcgagtatacaaatgttcc

SEQ ID NO: 5507662 - DNA, 25 bp, Homo sapien
cacagatagctaaaaacatagatgc

SEQ ID NO: 5507663 - DNA, 25 bp, Homo sapien
tttaaaatactgtgtctctacattt

SEQ ID NO: 5507664 - DNA, 25 bp, Homo sapien
aaatgtagagacacagtattttaaa

SEQ ID NO: 5507665 - DNA, 25 bp, Homo sapien
aagaactaggttggattaatttaca

SEQ ID NO: 5507666 - DNA, 25 bp, Homo sapien
ttaaacagcagaattgcacaattat

SEQ ID NO: 5507667 - DNA, 25 bp, Homo sapien
gccaaggaggccaatagttcctgtt

SEQ ID NO: 5507668 - DNA, 25 bp, Homo sapien
ttacaagaagcagaacgcaccattt

SEQ ID NO: 5507669 - DNA, 25 bp, Homo sapien
taccttagataattgtgtggcacat

SEQ ID NO: 5507670 - DNA, 25 bp, Homo sapien
tccagagcagagttcatacaattcc

SEQ ID NO: 5507671 - DNA, 25 bp, Homo sapien
catcttaggtcagtactcaggcttt

SEQ ID NO: 5507672 - DNA, 25 bp, Homo sapien
gtgtggcacattagactgctcaaag

SEQ ID NO: 5507673 - DNA, 25 bp, Homo sapien
atcaacttaaaatatcggcccttcc

SEQ ID NO: 5507674 - DNA, 25 bp, Homo sapien
ccttccatttagggccaaggaggcc

SEQ ID NO: 5507675 - DNA, 25 bp, Homo sapien
acttccacggacatcctcccctccc

SEQ ID NO: 5507676 - DNA, 25 bp, Homo sapien
tcctggctggagaaccatttcttgc

SEQ ID NO: 5507677 - DNA, 25 bp, Homo sapien
ctaacaggacaatagcacatgaacc

SEQ ID NO: 5507678 - DNA, 25 bp, Homo sapien
gagggtagcttgtacactgtgacat

SEQ ID NO: 5507679 - DNA, 25 bp, Homo sapien
ttctgaattagagggtagcttgtac

SEQ ID NO: 5507680 - DNA, 25 bp, Homo sapien
tatgaagactattgactaacaggac

SEQ ID NO: 5507681 - DNA, 25 bp, Homo sapien
gaggaacaagaggtcattgtagtga

SEQ ID NO: 5507682 - DNA, 25 bp, Homo sapien
gaaacctatgggaaggctgcttccc

SEQ ID NO: 5507683 - DNA, 25 bp, Homo sapien
ttggcaagattggtttacaagttca

SEQ ID NO: 5507684 - DNA, 25 bp, Homo sapien
gctgggtgccaacagcacctctcac

SEQ ID NO: 5507685 - DNA, 25 bp, Homo sapien
atatcactgtgtgcagagaaaacgg

SEQ ID NO: 5507686 - DNA, 25 bp, Homo sapien
agaatcattgaggaacgtcagcagt

SEQ ID NO: 5507687 - DNA, 25 bp, Homo sapien
gtggtcctgaccaatcccctggagc

SEQ ID NO: 5507688 - DNA, 25 bp, Homo sapien
tatttcagaatcatcagggaggagc

SEQ ID NO: 5507689 - DNA, 25 bp, Homo sapien
aagcagaactccaaacccctgtggt

SEQ ID NO: 5507690 - DNA, 25 bp, Homo sapien
ttcagtccccagagaccatttccaa

SEQ ID NO: 5507691 - DNA, 25 bp, Homo sapien
tttctaaatggagtaggagagaaag

SEQ ID NO: 5507692 - DNA, 25 bp, Homo sapien
ctaaaagtgaatgttaagaaggaag

SEQ ID NO: 5507693 - DNA, 25 bp, Homo sapien
tcctgaggcagctctctcggctgct

SEQ ID NO: 5507694 - DNA, 25 bp, Homo sapien
acccctgtggtcatggcaatttccc

SEQ ID NO: 5507695 - DNA, 25 bp, Homo sapien
aaacacaagctgctaaaagtgaatg

SEQ ID NO: 5507696 - DNA, 25 bp, Homo sapien
gagccggtagcagaattatcccgtt

SEQ ID NO: 5507697 - DNA, 25 bp, Homo sapien
agtttttgagagaatcctgaggcag

SEQ ID NO: 5507698 - DNA, 25 bp, Homo sapien
ttattaatcaagagtaaagccgagc

SEQ ID NO: 5507699 - DNA, 25 bp, Homo sapien
agaactcaggaccaaaagaagacct

SEQ ID NO: 5507700 - DNA, 25 bp, Homo sapien
acaacaaaaagaacatcaaccttgt

SEQ ID NO: 5507701 - DNA, 25 bp, Homo sapien
acagagcaagaattgatcacgtttc

SEQ ID NO: 5507702 - DNA, 25 bp, Homo sapien
cctttgctcaaggtgggctaaatgg

SEQ ID NO: 5507703 - DNA, 25 bp, Homo sapien
tttatggcaaacagtgacttaattc

SEQ ID NO: 5507704 - DNA, 25 bp, Homo sapien
aggtgggctaaatggttttacgcaa

SEQ ID NO: 5507705 - DNA, 25 bp, Homo sapien
aaacaacacggaatctaccctttgc

SEQ ID NO: 5507706 - DNA, 25 bp, Homo sapien
atgtttaacaccacagagcaagaat

SEQ ID NO: 5507707 - DNA, 25 bp, Homo sapien
tacctttgaggtagcacaataatgc

SEQ ID NO: 5507708 - DNA, 25 bp, Homo sapien
aaagtataaagatagccctgcagtg

SEQ ID NO: 5507709 - DNA, 25 bp, Homo sapien
tctagagacgaaagtgtattttggt

SEQ ID NO: 5507710 - DNA, 25 bp, Homo sapien
accaaaatacactttcgtctctaga

SEQ ID NO: 5507711 - DNA, 25 bp, Homo sapien
aacccggcgatagcggcgccggagg

SEQ ID NO: 5507712 - DNA, 25 bp, Homo sapien
cctccggcgccgctatcgccgggtt

SEQ ID NO: 5507713 - DNA, 25 bp, Homo sapien
gaaacccggcgatagcggcgccgga

SEQ ID NO: 5507714 - DNA, 25 bp, Homo sapien
tccggcgccgctatcgccgggtttc

SEQ ID NO: 5507715 - DNA, 25 bp, Homo sapien
ccttatttcaatgcatcaatgcgca

SEQ ID NO: 5507716 - DNA, 25 bp, Homo sapien
ccagtggctcaacatattaaaatgc

SEQ ID NO: 5507717 - DNA, 25 bp, Homo sapien
aaataagtttagtgctcagagataa

SEQ ID NO: 5507718 - DNA, 25 bp, Homo sapien
gtgtggcacgtgcacatacgtgtgc

SEQ ID NO: 5507719 - DNA, 25 bp, Homo sapien
catcaatgcgcaaaaatttcaattc

SEQ ID NO: 5507720 - DNA, 25 bp, Homo sapien
taagtttagtgctcagagataaata

SEQ ID NO: 5507721 - DNA, 25 bp, Homo sapien
catatgtgtatgcaatgcctatttt

SEQ ID NO: 5507722 - DNA, 25 bp, Homo sapien
aaaaagtttgttgtaattgtgtatg

SEQ ID NO: 5507723 - DNA, 25 bp, Homo sapien
tcaattcaaaaaagccaaccactgc

SEQ ID NO: 5507724 - DNA, 25 bp, Homo sapien
acaaaaaatgtgtggcacgtgcaca

SEQ ID NO: 5507725 - DNA, 25 bp, Homo sapien
gtgtatgtaattctgacagtaattc

SEQ ID NO: 5507726 - DNA, 25 bp, Homo sapien
taaatatcatggaagttaaacatac

SEQ ID NO: 5507727 - DNA, 25 bp, Homo sapien
agtttaagttagatactggcatagt

SEQ ID NO: 5507728 - DNA, 25 bp, Homo sapien
atctcttggttatggtacctgtact

SEQ ID NO: 5507729 - DNA, 25 bp, Homo sapien
taagtcttgcagtgtagttaccctc

SEQ ID NO: 5507730 - DNA, 25 bp, Homo sapien
aaaaacagctaggaagtgcacttct

SEQ ID NO: 5507731 - DNA, 25 bp, Homo sapien
acataaggttctcattgtgtgttcc

SEQ ID NO: 5507732 - DNA, 25 bp, Homo sapien
ttcactaaagtcagggaagtaacca

SEQ ID NO: 5507733 - DNA, 25 bp, Homo sapien
aaggatagtgtcacatgctcaaacc

SEQ ID NO: 5507734 - DNA, 25 bp, Homo sapien
tctaaaaacagaactcctcacagga

SEQ ID NO: 5507735 - DNA, 25 bp, Homo sapien
cagggaagtaaccaaacaatattaa

SEQ ID NO: 5507736 - DNA, 25 bp, Homo sapien
ctccccccaacaaaaggatagtgtc

SEQ ID NO: 5507737 - DNA, 25 bp, Homo sapien
ctgattctgctgcccgagttcctat

SEQ ID NO: 5507738 - DNA, 25 bp, Homo sapien
gtgccagagtcctcatgtggcttgg

SEQ ID NO: 5507739 - DNA, 25 bp, Homo sapien
aaaggccaaaacagcagacttgatt

SEQ ID NO: 5507740 - DNA, 25 bp, Homo sapien
tttgagagagatttgtagaaacaac

SEQ ID NO: 5507741 - DNA, 25 bp, Homo sapien
atacaggtcttgctttgtgggtggg

SEQ ID NO: 5507742 - DNA, 25 bp, Homo sapien
gtagaaacaaccagcctggggctga

SEQ ID NO: 5507743 - DNA, 25 bp, Homo sapien
atttcccgtgagcatcaaaaggcgt

SEQ ID NO: 5507744 - DNA, 25 bp, Homo sapien
gctctggctccagttcccgaggttt

SEQ ID NO: 5507745 - DNA, 25 bp, Homo sapien
gctgagatcctgggcagaaatttcc

SEQ ID NO: 5507746 - DNA, 25 bp, Homo sapien
gcctgtgtagtctaaagattctgcc

SEQ ID NO: 5507747 - DNA, 25 bp, Homo sapien
ttctactacgaaaggccaaaacagc

SEQ ID NO: 5507748 - DNA, 25 bp, Homo sapien
gcggcgggtgcgcgccttcgggcgc

SEQ ID NO: 5507749 - DNA, 25 bp, Homo sapien
gcgcccgaaggcgcgcacccgccgc

SEQ ID NO: 5507750 - DNA, 25 bp, Homo sapien
ggcggcgggtgcgcgccttcgggcg

SEQ ID NO: 5507751 - DNA, 25 bp, Homo sapien
cgcccgaaggcgcgcacccgccgcc

SEQ ID NO: 5507752 - DNA, 25 bp, Homo sapien
gggcggcgggtgcgcgccttcgggc

SEQ ID NO: 5507753 - DNA, 25 bp, Homo sapien
gcccgaaggcgcgcacccgccgccc

SEQ ID NO: 5507754 - DNA, 25 bp, Homo sapien
ctgggcaatacagcaagactgtctc

SEQ ID NO: 5507755 - DNA, 25 bp, Homo sapien
ctagaaaaagttgccaatatatctc

SEQ ID NO: 5507756 - DNA, 25 bp, Homo sapien
agaacctcttgttgggcatgatggc

SEQ ID NO: 5507757 - DNA, 25 bp, Homo sapien
tagtcccagctacaaggtgggagga

SEQ ID NO: 5507758 - DNA, 25 bp, Homo sapien
aggattgcttaggcctgggtgattg

SEQ ID NO: 5507759 - DNA, 25 bp, Homo sapien
ggatgcaatgagctgtgattgtgcc

SEQ ID NO: 5507760 - DNA, 25 bp, Homo sapien
tgggcaacatagagaatccgtctca

SEQ ID NO: 5507761 - DNA, 25 bp, Homo sapien
atatctcttggatctgctgagcatg

SEQ ID NO: 5507762 - DNA, 25 bp, Homo sapien
agggacaaagctacaacttggcctg

SEQ ID NO: 5507763 - DNA, 25 bp, Homo sapien
tgtgcctttggaagctgaggcagga

SEQ ID NO: 5507764 - DNA, 25 bp, Homo sapien
gtgtgctgtgagctgtagtcccagc

SEQ ID NO: 5507765 - DNA, 25 bp, Homo sapien
ctatcactgtggtaaggcttcgtac

SEQ ID NO: 5507766 - DNA, 25 bp, Homo sapien
gtacgaagccttaccacagtgatag

SEQ ID NO: 5507767 - DNA, 25 bp, Homo sapien
ggctctgccagtgcgggagcggcga

SEQ ID NO: 5507768 - DNA, 25 bp, Homo sapien
tcgccgctcccgcactggcagagcc

SEQ ID NO: 5507769 - DNA, 25 bp, Homo sapien
gggctctgccagtgcgggagcggcg

SEQ ID NO: 5507770 - DNA, 25 bp, Homo sapien
cgccgctcccgcactggcagagccc

SEQ ID NO: 5507771 - DNA, 25 bp, Homo sapien
tggtctaagacggccttccccactc

SEQ ID NO: 5507772 - DNA, 25 bp, Homo sapien
gccagaaaaggccctacatccttga

SEQ ID NO: 5507773 - DNA, 25 bp, Homo sapien
ccaacctctatggtctaagacggcc

SEQ ID NO: 5507774 - DNA, 25 bp, Homo sapien
gattgctggtcaaggagccagatat

SEQ ID NO: 5507775 - DNA, 25 bp, Homo sapien
aagacatgatgtgggttttatgggg

SEQ ID NO: 5507776 - DNA, 25 bp, Homo sapien
agaggcgcttttcccacctggtggc

SEQ ID NO: 5507777 - DNA, 25 bp, Homo sapien
aggaagggctgccatcttggttttg

SEQ ID NO: 5507778 - DNA, 25 bp, Homo sapien
cccacgctcccatgccagggagggg

SEQ ID NO: 5507779 - DNA, 25 bp, Homo sapien
gtctgtcatcccaaggcctggactc

SEQ ID NO: 5507780 - DNA, 25 bp, Homo sapien
tcttggttttgtggcaacctgccgt

SEQ ID NO: 5507781 - DNA, 25 bp, Homo sapien
gcaacctgccgtatgaccgtgggca

SEQ ID NO: 5507782 - DNA, 25 bp, Homo sapien
tcagaataaggttctcagaagaaaa

SEQ ID NO: 5507783 - DNA, 25 bp, Homo sapien
aggtttggtaaagttgatgacattc

SEQ ID NO: 5507784 - DNA, 25 bp, Homo sapien
aacagtactaagttagctctggact

SEQ ID NO: 5507785 - DNA, 25 bp, Homo sapien
acaatgggagctgaaacactatata

SEQ ID NO: 5507786 - DNA, 25 bp, Homo sapien
taccttggtaacactggactaaaca

SEQ ID NO: 5507787 - DNA, 25 bp, Homo sapien
aaatggccagtaaaactactgcctt

SEQ ID NO: 5507788 - DNA, 25 bp, Homo sapien
agctctggacttagaaggtttggta

SEQ ID NO: 5507789 - DNA, 25 bp, Homo sapien
aaaatgccaagagtgaattgaatac

SEQ ID NO: 5507790 - DNA, 25 bp, Homo sapien
tttctaaaatggcaatagtacaagc

SEQ ID NO: 5507791 - DNA, 25 bp, Homo sapien
aatgctctgaaagaagttggtatac

SEQ ID NO: 5507792 - DNA, 25 bp, Homo sapien
aagactatgaacaccacaatgggag

SEQ ID NO: 5507793 - DNA, 25 bp, Homo sapien
ttagagtaatagtagtcttcgcact

SEQ ID NO: 5507794 - DNA, 25 bp, Homo sapien
agtgcgaagactactattactctaa

SEQ ID NO: 5507795 - DNA, 25 bp, Homo sapien
aagcagactctgagttggcttgagt

SEQ ID NO: 5507796 - DNA, 25 bp, Homo sapien
caggacactcagaaagcataagatc

SEQ ID NO: 5507797 - DNA, 25 bp, Homo sapien
tcacatcactgaggtaacaagactt

SEQ ID NO: 5507798 - DNA, 25 bp, Homo sapien
gtaaagacaccacgccaccctagtc

SEQ ID NO: 5507799 - DNA, 25 bp, Homo sapien
agggatcatcaagactgtgtggaca

SEQ ID NO: 5507800 - DNA, 25 bp, Homo sapien
ggtgggttccagtgtcctgtgaaga

SEQ ID NO: 5507801 - DNA, 25 bp, Homo sapien
gtgtggacatgctagctgaattgac

SEQ ID NO: 5507802 - DNA, 25 bp, Homo sapien
gttagctgcctgttacagagaggga

SEQ ID NO: 5507803 - DNA, 25 bp, Homo sapien
gggtcaacgaagtaagatctcagct

SEQ ID NO: 5507804 - DNA, 25 bp, Homo sapien
gacctgggccaaatgaccaagcttt

SEQ ID NO: 5507805 - DNA, 25 bp, Homo sapien
tgaagaaccagcaaggatgcttttt

SEQ ID NO: 5507806 - DNA, 25 bp, Homo sapien
ggtcgaccaacaggagcaccaacta

SEQ ID NO: 5507807 - DNA, 25 bp, Homo sapien
tagttggtgctcctgttggtcgacc

SEQ ID NO: 5507808 - DNA, 25 bp, Homo sapien
gatcagaatctgagcttcaacctac

SEQ ID NO: 5507809 - DNA, 25 bp, Homo sapien
ttttggtctctcagcagatattccc

SEQ ID NO: 5507810 - DNA, 25 bp, Homo sapien
tgcaaaagtctattgtaaggagtgc

SEQ ID NO: 5507811 - DNA, 25 bp, Homo sapien
ttcaacctacaggcagtgagatcaa

SEQ ID NO: 5507812 - DNA, 25 bp, Homo sapien
acatttatagggttacaggtggagg

SEQ ID NO: 5507813 - DNA, 25 bp, Homo sapien
gagatcaacagcccgtctggactct

SEQ ID NO: 5507814 - DNA, 25 bp, Homo sapien
ttgtttgaattgcccatgcagctct

SEQ ID NO: 5507815 - DNA, 25 bp, Homo sapien
tggactctgcttttgaacggttttc

SEQ ID NO: 5507816 - DNA, 25 bp, Homo sapien
cgggacccgccatttttacagacca

SEQ ID NO: 5507817 - DNA, 25 bp, Homo sapien
tgatttctgaatgggtactgcactt

SEQ ID NO: 5507818 - DNA, 25 bp, Homo sapien
aacggttttcaggaagtgtgatttc

SEQ ID NO: 5507819 - DNA, 25 bp, Homo sapien
caccatcttagttcaggctgagggt

SEQ ID NO: 5507820 - DNA, 25 bp, Homo sapien
tgtctgagctgagccactgtcacca

SEQ ID NO: 5507821 - DNA, 25 bp, Homo sapien
ttgcgctcagaactgccctacgtcc

SEQ ID NO: 5507822 - DNA, 25 bp, Homo sapien
ggaggggtctctccaggcattgttc

SEQ ID NO: 5507823 - DNA, 25 bp, Homo sapien
gcctgtccagaggagatcttctcgg

SEQ ID NO: 5507824 - DNA, 25 bp, Homo sapien
ctgcagtggttgcgctcagaactgc

SEQ ID NO: 5507825 - DNA, 25 bp, Homo sapien
cgtcatggcaaccttgatgaagctg

SEQ ID NO: 5507826 - DNA, 25 bp, Homo sapien
tccaggcattgttccagcacggagg

SEQ ID NO: 5507827 - DNA, 25 bp, Homo sapien
gctctgcagtactcgggcactgagg

SEQ ID NO: 5507828 - DNA, 25 bp, Homo sapien
aggcggcttttggcagtctacgcac

SEQ ID NO: 5507829 - DNA, 25 bp, Homo sapien
cttctcggctctgcagtactcgggc

SEQ ID NO: 5507830 - DNA, 25 bp, Homo sapien
gaaaaaaagagtcattaaagcacta

SEQ ID NO: 5507831 - DNA, 25 bp, Homo sapien
agactatatctacagcagcagaatt

SEQ ID NO: 5507832 - DNA, 25 bp, Homo sapien
aaaagtgcagttatgaattgttaac

SEQ ID NO: 5507833 - DNA, 25 bp, Homo sapien
actgctgattcatgtggagggcatt

SEQ ID NO: 5507834 - DNA, 25 bp, Homo sapien
agtcagaactgtaaaatcagcaaac

SEQ ID NO: 5507835 - DNA, 25 bp, Homo sapien
tctgtccaaataatgttaccctccc

SEQ ID NO: 5507836 - DNA, 25 bp, Homo sapien
agcagaattgaaactataagaccgc

SEQ ID NO: 5507837 - DNA, 25 bp, Homo sapien
tccatttaggtcagctttagtcaga

SEQ ID NO: 5507838 - DNA, 25 bp, Homo sapien
ctgcaagtataaatgtgatacagtt

SEQ ID NO: 5507839 - DNA, 25 bp, Homo sapien
agggcattaagagttgaaaaggctt

SEQ ID NO: 5507840 - DNA, 25 bp, Homo sapien
aaagctttcatgggttctagaacct

SEQ ID NO: 5507841 - DNA, 25 bp, Homo sapien
attttagggcaaagagaggaactct

SEQ ID NO: 5507842 - DNA, 25 bp, Homo sapien
agagttcctctctttgccctaaaat

SEQ ID NO: 5507843 - DNA, 25 bp, Homo sapien
gctcacttggggacactcaatttcc

SEQ ID NO: 5507844 - DNA, 25 bp, Homo sapien
tccactcctcaactactgaacctgc

SEQ ID NO: 5507845 - DNA, 25 bp, Homo sapien
ataaaatgagaagcgtaacagtttc

SEQ ID NO: 5507846 - DNA, 25 bp, Homo sapien
agagcttacagcgagtgcatttcac

SEQ ID NO: 5507847 - DNA, 25 bp, Homo sapien
taaaacacagaatcatgctacccct

SEQ ID NO: 5507848 - DNA, 25 bp, Homo sapien
ataaacaaagctcacttggggacac

SEQ ID NO: 5507849 - DNA, 25 bp, Homo sapien
ggtgctggcagacaagatttaacaa

SEQ ID NO: 5507850 - DNA, 25 bp, Homo sapien
tccatgcactcagcctagagcttac

SEQ ID NO: 5507851 - DNA, 25 bp, Homo sapien
caaaatgctgtgacctccacatgtt

SEQ ID NO: 5507852 - DNA, 25 bp, Homo sapien
tgctacataccaattaggagatcac

SEQ ID NO: 5507853 - DNA, 25 bp, Homo sapien
ccccttcataagcagagggggagga

SEQ ID NO: 5507854 - DNA, 25 bp, Homo sapien
caggtcctaaagacaggtgcagtaa

SEQ ID NO: 5507855 - DNA, 25 bp, Homo sapien
ttactgcacctgtctttaggacctg

SEQ ID NO: 5507856 - DNA, 25 bp, Homo sapien
gtcaatccactttgaagaaagacaa

SEQ ID NO: 5507857 - DNA, 25 bp, Homo sapien
ttgtctttcttcaaagtggattgac

SEQ ID NO: 5507858 - DNA, 25 bp, Homo sapien
ttgaataacagacactccagaaatc

SEQ ID NO: 5507859 - DNA, 25 bp, Homo sapien
gctgttccttcatgcgagctgtggg

SEQ ID NO: 5507860 - DNA, 25 bp, Homo sapien
ctgccccaaaatgttctgtgacccc

SEQ ID NO: 5507861 - DNA, 25 bp, Homo sapien
gagctctgacagccatccaccctcc

SEQ ID NO: 5507862 - DNA, 25 bp, Homo sapien
gtgaccccaaagacacaaagttgct

SEQ ID NO: 5507863 - DNA, 25 bp, Homo sapien
acacagtatctgcaagagctctgac

SEQ ID NO: 5507864 - DNA, 25 bp, Homo sapien
atgaagcactaagtgctgctccatc

SEQ ID NO: 5507865 - DNA, 25 bp, Homo sapien
accaagtatcaatagaggctgttcc

SEQ ID NO: 5507866 - DNA, 25 bp, Homo sapien
ctgggtccagggtcagtacaattaa

SEQ ID NO: 5507867 - DNA, 25 bp, Homo sapien
cgagctgtgggagtatatacatcat

SEQ ID NO: 5507868 - DNA, 25 bp, Homo sapien
tgtagatatctgcgtttgtaacttt

SEQ ID NO: 5507869 - DNA, 25 bp, Homo sapien
gttcttcagaccacgaggtggaacc

SEQ ID NO: 5507870 - DNA, 25 bp, Homo sapien
caaagctcacaccagaaaaaaccgc

SEQ ID NO: 5507871 - DNA, 25 bp, Homo sapien
tcccaaccctccacaacctcaactc

SEQ ID NO: 5507872 - DNA, 25 bp, Homo sapien
gtgttgaatacagctggtggaaacg

SEQ ID NO: 5507873 - DNA, 25 bp, Homo sapien
aacatggtgcttccgccgtgaacaa

SEQ ID NO: 5507874 - DNA, 25 bp, Homo sapien
accacgaggtggaaccatctcttca

SEQ ID NO: 5507875 - DNA, 25 bp, Homo sapien
ccgggctgttcgaaaaagattcggc

SEQ ID NO: 5507876 - DNA, 25 bp, Homo sapien
ccgccgtgaacaaaatcagcaagtg

SEQ ID NO: 5507877 - DNA, 25 bp, Homo sapien
tggtggaaacgtgcttcttgacagc

SEQ ID NO: 5507878 - DNA, 25 bp, Homo sapien
gcagaagagagtccttcaaatgagc

SEQ ID NO: 5507879 - DNA, 25 bp, Homo sapien
ataactgttaggaaacgcagaagag

SEQ ID NO: 5507880 - DNA, 25 bp, Homo sapien
ggagatgtggcagcttccctccagc

SEQ ID NO: 5507881 - DNA, 25 bp, Homo sapien
cgtatacagatagaattcaagactc

SEQ ID NO: 5507882 - DNA, 25 bp, Homo sapien
ggtcagagcaaccccttactatgtc

SEQ ID NO: 5507883 - DNA, 25 bp, Homo sapien
ttcaagactctagctacaatcatcc

SEQ ID NO: 5507884 - DNA, 25 bp, Homo sapien
aaagccagcctgcattatacaaagc

SEQ ID NO: 5507885 - DNA, 25 bp, Homo sapien
tcccaacaggtaagtcagactgctt

SEQ ID NO: 5507886 - DNA, 25 bp, Homo sapien
gactgcttagctaggagatgtggca

SEQ ID NO: 5507887 - DNA, 25 bp, Homo sapien
gtctggagatgcactgagtatcaac

SEQ ID NO: 5507888 - DNA, 25 bp, Homo sapien
caaagcaaattcctctgtcagttct

SEQ ID NO: 5507889 - DNA, 25 bp, Homo sapien
tgatcacctgattggtcagagcaac

SEQ ID NO: 5507890 - DNA, 25 bp, Homo sapien
cagtgcttttgtaaagccagcctgc

SEQ ID NO: 5507891 - DNA, 25 bp, Homo sapien
tcggttcccaactcatctctcgtgt

SEQ ID NO: 5507892 - DNA, 25 bp, Homo sapien
acacgagagatgagttgggaaccga

SEQ ID NO: 5507893 - DNA, 25 bp, Homo sapien
gccgtccccccagaacaagactgaa

SEQ ID NO: 5507894 - DNA, 25 bp, Homo sapien
actgtggcaactcacttcttagtgc

SEQ ID NO: 5507895 - DNA, 25 bp, Homo sapien
cataaatctacaacagaattcaaat

SEQ ID NO: 5507896 - DNA, 25 bp, Homo sapien
acacctcatcggaaacagaggggca

SEQ ID NO: 5507897 - DNA, 25 bp, Homo sapien
ctgtcacaacagactgcaaatgcga

SEQ ID NO: 5507898 - DNA, 25 bp, Homo sapien
cggagctccccgtgtctgtcacaac

SEQ ID NO: 5507899 - DNA, 25 bp, Homo sapien
acctgcaggattcatccaggactcc

SEQ ID NO: 5507900 - DNA, 25 bp, Homo sapien
tcacaacagactgcaaatgcgaggc

SEQ ID NO: 5507901 - DNA, 25 bp, Homo sapien
ccacaggatatacatctccagatgc

SEQ ID NO: 5507902 - DNA, 25 bp, Homo sapien
agtgcaggtcactcatccgtacacc

SEQ ID NO: 5507903 - DNA, 25 bp, Homo sapien
acttcttagtgcaggtcactcatcc

SEQ ID NO: 5507904 - DNA, 25 bp, Homo sapien
gaattccacccacaagctcagactc

SEQ ID NO: 5507905 - DNA, 25 bp, Homo sapien
gctttaatcaagacagctgtaaaac

SEQ ID NO: 5507906 - DNA, 25 bp, Homo sapien
gaaagaggctattcttcacagcaac

SEQ ID NO: 5507907 - DNA, 25 bp, Homo sapien
tacaagtgaaacaacacaatttgca

SEQ ID NO: 5507908 - DNA, 25 bp, Homo sapien
cagtgctggtcatatgcaaaacaag

SEQ ID NO: 5507909 - DNA, 25 bp, Homo sapien
tcagctaagccatgacctttacttc

SEQ ID NO: 5507910 - DNA, 25 bp, Homo sapien
cacaaaagacagattatgatacaaa

SEQ ID NO: 5507911 - DNA, 25 bp, Homo sapien
tcacagcaacatggaacacttggct

SEQ ID NO: 5507912 - DNA, 25 bp, Homo sapien
aaagcaacagtgtttgcagctacac

SEQ ID NO: 5507913 - DNA, 25 bp, Homo sapien
tcagactcaaggaattgaagatctc

SEQ ID NO: 5507914 - DNA, 25 bp, Homo sapien
catgcctttcagtcagtgctggtca

SEQ ID NO: 5507915 - DNA, 25 bp, Homo sapien
cagtatgtggctgagcatcatggac

SEQ ID NO: 5507916 - DNA, 25 bp, Homo sapien
atacggagttaagtttggtggatac

SEQ ID NO: 5507917 - DNA, 25 bp, Homo sapien
tggcaaagggcagacttactccttc

SEQ ID NO: 5507918 - DNA, 25 bp, Homo sapien
caaaaacgttgggcgatccttcagt

SEQ ID NO: 5507919 - DNA, 25 bp, Homo sapien
gagccctcaccaatcggggtccaca

SEQ ID NO: 5507920 - DNA, 25 bp, Homo sapien
tcttcataccggcatgtgcacacac

SEQ ID NO: 5507921 - DNA, 25 bp, Homo sapien
agccttgagagataattagtagttc

SEQ ID NO: 5507922 - DNA, 25 bp, Homo sapien
gacaccatatggagatacggagtta

SEQ ID NO: 5507923 - DNA, 25 bp, Homo sapien
agcaaaactgagaagcacatgcctg

SEQ ID NO: 5507924 - DNA, 25 bp, Homo sapien
atacaggcatatgcagagccctcac

SEQ ID NO: 5507925 - DNA, 25 bp, Homo sapien
ggaggatggtgcgtcatttaacatt

SEQ ID NO: 5507926 - DNA, 25 bp, Homo sapien
agtacaaaagctaaggtccagggaa

SEQ ID NO: 5507927 - DNA, 25 bp, Homo sapien
ttccctggaccttagcttttgtact

SEQ ID NO: 5507928 - DNA, 25 bp, Homo sapien
ataatgggggtcttggcctgttcgt

SEQ ID NO: 5507929 - DNA, 25 bp, Homo sapien
acgaacaggccaagacccccattat

SEQ ID NO: 5507930 - DNA, 25 bp, Homo sapien
acaccgggtggagaccattgacgga

SEQ ID NO: 5507931 - DNA, 25 bp, Homo sapien
tccgtcaatggtctccacccggtgt

SEQ ID NO: 5507932 - DNA, 25 bp, Homo sapien
caattgacaaaagcagaacaagtag

SEQ ID NO: 5507933 - DNA, 25 bp, Homo sapien
acagtccaggttataagaatccaag

SEQ ID NO: 5507934 - DNA, 25 bp, Homo sapien
gctaagccacataaacaatcagacc

SEQ ID NO: 5507935 - DNA, 25 bp, Homo sapien
agtagcatgattagacagagaagtc

SEQ ID NO: 5507936 - DNA, 25 bp, Homo sapien
aatgattagtccaggggtagaaaag

SEQ ID NO: 5507937 - DNA, 25 bp, Homo sapien
cccactggagctaaaacaaacttac

SEQ ID NO: 5507938 - DNA, 25 bp, Homo sapien
ggcacatagttagaggtcacacaca

SEQ ID NO: 5507939 - DNA, 25 bp, Homo sapien
ccaatgacagctactagaagatgct

SEQ ID NO: 5507940 - DNA, 25 bp, Homo sapien
gtagaaaagatgaggatggtttcat

SEQ ID NO: 5507941 - DNA, 25 bp, Homo sapien
agaagatgctttaggaaaccttagc

SEQ ID NO: 5507942 - DNA, 25 bp, Homo sapien
ctttttcaaaagggctatgagagta

SEQ ID NO: 5507943 - DNA, 25 bp, Homo sapien
gcttaaacaaggactaggctgagta

SEQ ID NO: 5507944 - DNA, 25 bp, Homo sapien
ggctttgaggcatgctacatggccc

SEQ ID NO: 5507945 - DNA, 25 bp, Homo sapien
agactagaagaaaatgcaccaaaca

SEQ ID NO: 5507946 - DNA, 25 bp, Homo sapien
cgacgttaaaatgaaaaaagcaaga

SEQ ID NO: 5507947 - DNA, 25 bp, Homo sapien
tatactgggataacaagatattaat

SEQ ID NO: 5507948 - DNA, 25 bp, Homo sapien
tttatcgcaggttcaagacaatttt

SEQ ID NO: 5507949 - DNA, 25 bp, Homo sapien
tcatgggaaaattgctcacgacgtt

SEQ ID NO: 5507950 - DNA, 25 bp, Homo sapien
aggctgagtaacctggctttgaggc

SEQ ID NO: 5507951 - DNA, 25 bp, Homo sapien
gttggaagctttatgtccgacctcc

SEQ ID NO: 5507952 - DNA, 25 bp, Homo sapien
attacaaagatacatgtgtcacacc

SEQ ID NO: 5507953 - DNA, 25 bp, Homo sapien
atgctgacagccccaaatgttttcc

SEQ ID NO: 5507954 - DNA, 25 bp, Homo sapien
agaaaccagcacaaagcactaccca

SEQ ID NO: 5507955 - DNA, 25 bp, Homo sapien
agtttagctgtcttggaagtcaaat

SEQ ID NO: 5507956 - DNA, 25 bp, Homo sapien
aaaggttgaattaaacagatgcttt

SEQ ID NO: 5507957 - DNA, 25 bp, Homo sapien
ccaccatgctggcttggacagaatt

SEQ ID NO: 5507958 - DNA, 25 bp, Homo sapien
taaaatgactgggaaatatatggaa

SEQ ID NO: 5507959 - DNA, 25 bp, Homo sapien
gggaaatatatggaagcagaaacca

SEQ ID NO: 5507960 - DNA, 25 bp, Homo sapien
aaaacaactctcaaaaccagcactc

SEQ ID NO: 5507961 - DNA, 25 bp, Homo sapien
gcagtcagaaatatacaaagggtta

SEQ ID NO: 5507962 - DNA, 25 bp, Homo sapien
aaattgcagttgaaaagtttagctg

SEQ ID NO: 5507963 - DNA, 25 bp, Homo sapien
cctataatatgaacagtgagcagtc

SEQ ID NO: 5507964 - DNA, 25 bp, Homo sapien
gaacagtgagcagtcagaaatatac

SEQ ID NO: 5507965 - DNA, 25 bp, Homo sapien
gttcagaatcagacccaccaagtgg

SEQ ID NO: 5507966 - DNA, 25 bp, Homo sapien
aagtccattacatgaggcgtgtgtg

SEQ ID NO: 5507967 - DNA, 25 bp, Homo sapien
gtaggagagatacttgttaagcagc

SEQ ID NO: 5507968 - DNA, 25 bp, Homo sapien
tcataggaagaaataaggttctgat

SEQ ID NO: 5507969 - DNA, 25 bp, Homo sapien
ctatgggtccaacacagcctctgac

SEQ ID NO: 5507970 - DNA, 25 bp, Homo sapien
tctataggccagatccaaagccaat

SEQ ID NO: 5507971 - DNA, 25 bp, Homo sapien
ggtctttggtgcatccagagaggga

SEQ ID NO: 5507972 - DNA, 25 bp, Homo sapien
cagagagggataaataatttgccat

SEQ ID NO: 5507973 - DNA, 25 bp, Homo sapien
ctctgaccactgagagtaggagaga

SEQ ID NO: 5507974 - DNA, 25 bp, Homo sapien
cagcacagtaacaacccatggaagc

SEQ ID NO: 5507975 - DNA, 25 bp, Homo sapien
gcaggcagcttaagttcataggaag

SEQ ID NO: 5507976 - DNA, 25 bp, Homo sapien
tgttaacagggaatcgacacttctc

SEQ ID NO: 5507977 - DNA, 25 bp, Homo sapien
tggtctgaggtgttgtctccagtac

SEQ ID NO: 5507978 - DNA, 25 bp, Homo sapien
caaaacaaagccttgcgtgatagac

SEQ ID NO: 5507979 - DNA, 25 bp, Homo sapien
aatgtgaggcagaactgatatccat

SEQ ID NO: 5507980 - DNA, 25 bp, Homo sapien
acgcctcaacctcaagtgggaaatg

SEQ ID NO: 5507981 - DNA, 25 bp, Homo sapien
tgatagacaatcaccaggcccacta

SEQ ID NO: 5507982 - DNA, 25 bp, Homo sapien
aaagagaaggtcaagatcagtaata

SEQ ID NO: 5507983 - DNA, 25 bp, Homo sapien
gaaacttggcaacgattctacattc

SEQ ID NO: 5507984 - DNA, 25 bp, Homo sapien
agagccccaagtattgattggcgta

SEQ ID NO: 5507985 - DNA, 25 bp, Homo sapien
attctacattcagtgagggaggact

SEQ ID NO: 5507986 - DNA, 25 bp, Homo sapien
agccatgaagcccactgcctcctgc

SEQ ID NO: 5507987 - DNA, 25 bp, Homo sapien
aagcaccacaacactaggccaccat

SEQ ID NO: 5507988 - DNA, 25 bp, Homo sapien
cagttggtgtaattgagatactaac

SEQ ID NO: 5507989 - DNA, 25 bp, Homo sapien
caaagttcatttgcacagttggtgt

SEQ ID NO: 5507990 - DNA, 25 bp, Homo sapien
aatcagaaatgcatgagctggactc

SEQ ID NO: 5507991 - DNA, 25 bp, Homo sapien
ctgtacatagcataaagacaaaaac

SEQ ID NO: 5507992 - DNA, 25 bp, Homo sapien
cacaaaggccaatgtagattatttc

SEQ ID NO: 5507993 - DNA, 25 bp, Homo sapien
atgcatgagctggactcccaccatt

SEQ ID NO: 5507994 - DNA, 25 bp, Homo sapien
aagtgggcctgagtattcagtatcc

SEQ ID NO: 5507995 - DNA, 25 bp, Homo sapien
taggccaccatgaaattacacacaa

SEQ ID NO: 5507996 - DNA, 25 bp, Homo sapien
aagaaatgtcactgtctaggacttc

SEQ ID NO: 5507997 - DNA, 25 bp, Homo sapien
actgaaatgacaaataacctactgc

SEQ ID NO: 5507998 - DNA, 25 bp, Homo sapien
atccttattagagacctacaggtca

SEQ ID NO: 5507999 - DNA, 25 bp, Homo sapien
tgacctgtaggtctctaataaggat

SEQ ID NO: 5508000 - DNA, 25 bp, Homo sapien
tttgccacaaactacctgctaacag

SEQ ID NO: 5508001 - DNA, 25 bp, Homo sapien
ttgttacttggtatggtgggctaat

SEQ ID NO: 5508002 - DNA, 25 bp, Homo sapien
aatgtgatacagtttccagagaaac

SEQ ID NO: 5508003 - DNA, 25 bp, Homo sapien
ccagagaaactgaatgctgtagctt

SEQ ID NO: 5508004 - DNA, 25 bp, Homo sapien
aggtaattgcctcttgggtaataag

SEQ ID NO: 5508005 - DNA, 25 bp, Homo sapien
aaaagcagctcattagtatacacac

SEQ ID NO: 5508006 - DNA, 25 bp, Homo sapien
caaacgtttacaattcgagccaatc

SEQ ID NO: 5508007 - DNA, 25 bp, Homo sapien
taaggtgacctaaagaaccatgaac

SEQ ID NO: 5508008 - DNA, 25 bp, Homo sapien
caaagatagctggtattaaggtgac

SEQ ID NO: 5508009 - DNA, 25 bp, Homo sapien
tggacacgttttagttgagaagttc

SEQ ID NO: 5508010 - DNA, 25 bp, Homo sapien
gttaaaattctgacatggacacgtt

SEQ ID NO: 5508011 - DNA, 25 bp, Homo sapien
gaggttgtgtttgctgaattagtgg

SEQ ID NO: 5508012 - DNA, 25 bp, Homo sapien
tggctctagacaccagcagcagtga

SEQ ID NO: 5508013 - DNA, 25 bp, Homo sapien
tgtgcccagtcgaatggattgacac

SEQ ID NO: 5508014 - DNA, 25 bp, Homo sapien
tccccgcacgtgcccatgtgcgcac

SEQ ID NO: 5508015 - DNA, 25 bp, Homo sapien
tgtgcagtcctaagcgctgcccgca

SEQ ID NO: 5508016 - DNA, 25 bp, Homo sapien
cagcagtctgctgtcctgtgcccag

SEQ ID NO: 5508017 - DNA, 25 bp, Homo sapien
gggaaatgtaaatgtgcagtcctaa

SEQ ID NO: 5508018 - DNA, 25 bp, Homo sapien
acaggggaataagtatggttctccc

SEQ ID NO: 5508019 - DNA, 25 bp, Homo sapien
tgtctgccaggtactgctggctggc

SEQ ID NO: 5508020 - DNA, 25 bp, Homo sapien
aatagagggaggatcactcataatc

SEQ ID NO: 5508021 - DNA, 25 bp, Homo sapien
tgcgcacacaccgaaggccatttaa

SEQ ID NO: 5508022 - DNA, 25 bp, Homo sapien
gaactgagttatttggacaagaacc

SEQ ID NO: 5508023 - DNA, 25 bp, Homo sapien
ggcactattaatgagggacggaaaa

SEQ ID NO: 5508024 - DNA, 25 bp, Homo sapien
aaaggcttgataaatattgtcactc

SEQ ID NO: 5508025 - DNA, 25 bp, Homo sapien
tgtccagcaggtagaattctttgtt

SEQ ID NO: 5508026 - DNA, 25 bp, Homo sapien
aagaatcctgctctaggactggatc

SEQ ID NO: 5508027 - DNA, 25 bp, Homo sapien
ttaaaggataatggtttacgatcat

SEQ ID NO: 5508028 - DNA, 25 bp, Homo sapien
tttaagagagaagataatccaatat

SEQ ID NO: 5508029 - DNA, 25 bp, Homo sapien
taaaaattgatgtgtgaaatccctt

SEQ ID NO: 5508030 - DNA, 25 bp, Homo sapien
tgagggacggaaaaatctacctgta

SEQ ID NO: 5508031 - DNA, 25 bp, Homo sapien
ttccaggtttctgtccagcaggtag

SEQ ID NO: 5508032 - DNA, 25 bp, Homo sapien
gccatgaatgatcgaagaatcctgc

SEQ ID NO: 5508033 - DNA, 25 bp, Homo sapien
agcatctggactcttcggaacctag

SEQ ID NO: 5508034 - DNA, 25 bp, Homo sapien
ggtatacagagacaagcacgtttct

SEQ ID NO: 5508035 - DNA, 25 bp, Homo sapien
ctttctagaaatgttaaggaggatt

SEQ ID NO: 5508036 - DNA, 25 bp, Homo sapien
atggttacttttagtggaggagttc

SEQ ID NO: 5508037 - DNA, 25 bp, Homo sapien
tttaccatgactcagaagagaaaca

SEQ ID NO: 5508038 - DNA, 25 bp, Homo sapien
taaggaggattttaaatgaacacat

SEQ ID NO: 5508039 - DNA, 25 bp, Homo sapien
gaacatctaccaagcatctggactc

SEQ ID NO: 5508040 - DNA, 25 bp, Homo sapien
cattctgcgggtatacagagacaag

SEQ ID NO: 5508041 - DNA, 25 bp, Homo sapien
aaaatggaccactgactatgtatgt

SEQ ID NO: 5508042 - DNA, 25 bp, Homo sapien
tctttatcagacgccactggcttcc

SEQ ID NO: 5508043 - DNA, 25 bp, Homo sapien
ggaactgacaaaacaggacaggttg

SEQ ID NO: 5508044 - DNA, 25 bp, Homo sapien
caaataagcagcagacctacagtgc

SEQ ID NO: 5508045 - DNA, 25 bp, Homo sapien
taaagtaaagaattagcaaacaata

SEQ ID NO: 5508046 - DNA, 25 bp, Homo sapien
cagtgcagccactagcttggtcttc

SEQ ID NO: 5508047 - DNA, 25 bp, Homo sapien
atgatattagaagggaaaatctgac

SEQ ID NO: 5508048 - DNA, 25 bp, Homo sapien
gcagacctacagtgcagccactagc

SEQ ID NO: 5508049 - DNA, 25 bp, Homo sapien
tcaaaataacagaattgaagcatgt

SEQ ID NO: 5508050 - DNA, 25 bp, Homo sapien
aaacaaagttcttaagagttatggc

SEQ ID NO: 5508051 - DNA, 25 bp, Homo sapien
aaaatacaacttacgccaaccatat

SEQ ID NO: 5508052 - DNA, 25 bp, Homo sapien
taagagttatggctttcaaaagcac

SEQ ID NO: 5508053 - DNA, 25 bp, Homo sapien
tgggcaggtagatacaaacattcta

SEQ ID NO: 5508054 - DNA, 25 bp, Homo sapien
gaagcatgttgctagaatttcagct

SEQ ID NO: 5508055 - DNA, 25 bp, Homo sapien
gtaaacacagtgagcaactcttatt

SEQ ID NO: 5508056 - DNA, 25 bp, Homo sapien
tgcatagattaagaagcaagctgcc

SEQ ID NO: 5508057 - DNA, 25 bp, Homo sapien
atatatacacaggtgcagagcttcc

SEQ ID NO: 5508058 - DNA, 25 bp, Homo sapien
aaggcagtaggtaaagtataatgtg

SEQ ID NO: 5508059 - DNA, 25 bp, Homo sapien
atgtgaaggacagtctaagataatc

SEQ ID NO: 5508060 - DNA, 25 bp, Homo sapien
atgtgccttagtggaataatcggag

SEQ ID NO: 5508061 - DNA, 25 bp, Homo sapien
ggaatgacatatcaccaagggagaa

SEQ ID NO: 5508062 - DNA, 25 bp, Homo sapien
ataagaaatgggtcggttttgtgat

SEQ ID NO: 5508063 - DNA, 25 bp, Homo sapien
gtgataagtgccaagactgttactg

SEQ ID NO: 5508064 - DNA, 25 bp, Homo sapien
catggagaaatctgtgatgtctggt

SEQ ID NO: 5508065 - DNA, 25 bp, Homo sapien
tacaccaatggtgcaatggagaata

SEQ ID NO: 5508066 - DNA, 25 bp, Homo sapien
gaaatcacagagggacttagtattc

SEQ ID NO: 5508067 - DNA, 25 bp, Homo sapien
taaaactcaggcctaggaatagctt

SEQ ID NO: 5508068 - DNA, 25 bp, Homo sapien
acaatctagtaacaaatggaaatgc

SEQ ID NO: 5508069 - DNA, 25 bp, Homo sapien
atctcaaaagacgcagaaaagacat

SEQ ID NO: 5508070 - DNA, 25 bp, Homo sapien
aaatggaaacattaagttcatcatc

SEQ ID NO: 5508071 - DNA, 25 bp, Homo sapien
caccacgcttggccttctaatttat

SEQ ID NO: 5508072 - DNA, 25 bp, Homo sapien
ggaatagcttggttcagaaatcaca

SEQ ID NO: 5508073 - DNA, 25 bp, Homo sapien
aaagacgcagaaaagacatttgcat

SEQ ID NO: 5508074 - DNA, 25 bp, Homo sapien
tttcccatgatccagcacatctagc

SEQ ID NO: 5508075 - DNA, 25 bp, Homo sapien
cctcttacctcagcaactaggacta

SEQ ID NO: 5508076 - DNA, 25 bp, Homo sapien
ggcgcaatcaaagcttgctgcagcc

SEQ ID NO: 5508077 - DNA, 25 bp, Homo sapien
agatgccagattcatagtgggatga

SEQ ID NO: 5508078 - DNA, 25 bp, Homo sapien
tcctgaacatgtcgtcaagcattgg

SEQ ID NO: 5508079 - DNA, 25 bp, Homo sapien
tgtatggccaaaacactagaagcat

SEQ ID NO: 5508080 - DNA, 25 bp, Homo sapien
aggcacgcctggaaatgtatacaca

SEQ ID NO: 5508081 - DNA, 25 bp, Homo sapien
caagcattggataaattaaacccct

SEQ ID NO: 5508082 - DNA, 25 bp, Homo sapien
aaaccccttggttgatgtatggcca

SEQ ID NO: 5508083 - DNA, 25 bp, Homo sapien
caggacacaggcacgcctggaaatg

SEQ ID NO: 5508084 - DNA, 25 bp, Homo sapien
aacctgtcaataaatagtgagatgc

SEQ ID NO: 5508085 - DNA, 25 bp, Homo sapien
gatacaacataaagaagatgtaaac

SEQ ID NO: 5508086 - DNA, 25 bp, Homo sapien
gaagcataagaagatgccagattca

SEQ ID NO: 5508087 - DNA, 25 bp, Homo sapien
tttaaaaagctacaggacacaggca

SEQ ID NO: 5508088 - DNA, 25 bp, Homo sapien
ccgacctggcacgacacgacttggg

SEQ ID NO: 5508089 - DNA, 25 bp, Homo sapien
cccaagtcgtgtcgtgccaggtcgg

SEQ ID NO: 5508090 - DNA, 25 bp, Homo sapien
ttccaaatccccccgaggaagctgc

SEQ ID NO: 5508091 - DNA, 25 bp, Homo sapien
cagtatccaggtaccaaggccctga

SEQ ID NO: 5508092 - DNA, 25 bp, Homo sapien
cacccgccccaattctgtggcagta

SEQ ID NO: 5508093 - DNA, 25 bp, Homo sapien
ttgtgaaaaggtgcaatacagaata

SEQ ID NO: 5508094 - DNA, 25 bp, Homo sapien
acaggacacacaatggtttagtttc

SEQ ID NO: 5508095 - DNA, 25 bp, Homo sapien
acagcatcaactacagaaaaggcca

SEQ ID NO: 5508096 - DNA, 25 bp, Homo sapien
caaaaggtagtttctggggaatctg

SEQ ID NO: 5508097 - DNA, 25 bp, Homo sapien
ggcgacagacacaggtgttccaaat

SEQ ID NO: 5508098 - DNA, 25 bp, Homo sapien
ggaggaaatgccccaaatactgagc

SEQ ID NO: 5508099 - DNA, 25 bp, Homo sapien
tactgagcatgttctttgggcaaaa

SEQ ID NO: 5508100 - DNA, 25 bp, Homo sapien
agaaaaggccaaacaagtgtgtaca

SEQ ID NO: 5508101 - DNA, 25 bp, Homo sapien
aaaaagcctgcaaatcgtgaatcac

SEQ ID NO: 5508102 - DNA, 25 bp, Homo sapien
acagctgaattgtagaactagttct

SEQ ID NO: 5508103 - DNA, 25 bp, Homo sapien
aggagaactgatgtgaagtcccata

SEQ ID NO: 5508104 - DNA, 25 bp, Homo sapien
caaacgagagatacattacagatgg

SEQ ID NO: 5508105 - DNA, 25 bp, Homo sapien
aactaacaatcaataaggagaactg

SEQ ID NO: 5508106 - DNA, 25 bp, Homo sapien
ctagttaatgaattgtatggcccac

SEQ ID NO: 5508107 - DNA, 25 bp, Homo sapien
ggttctttgtgagtgagtagagagg

SEQ ID NO: 5508108 - DNA, 25 bp, Homo sapien
aacaagagggatcaaactaacaatc

SEQ ID NO: 5508109 - DNA, 25 bp, Homo sapien
tatggcccacaagctcaaacgagag

SEQ ID NO: 5508110 - DNA, 25 bp, Homo sapien
gtacagaatggactacacaccagta

SEQ ID NO: 5508111 - DNA, 25 bp, Homo sapien
tgaatataatcatgaagtggggaaa

SEQ ID NO: 5508112 - DNA, 25 bp, Homo sapien
gaccgacacttatgaaagctttagg

SEQ ID NO: 5508113 - DNA, 25 bp, Homo sapien
cctaaagctttcataagtgtcggtc

SEQ ID NO: 5508114 - DNA, 25 bp, Homo sapien
tagaaaaaggatattcgttgttggc

SEQ ID NO: 5508115 - DNA, 25 bp, Homo sapien
aaaacctcacagcaagagtaatatt

SEQ ID NO: 5508116 - DNA, 25 bp, Homo sapien
agacaagtgcaacaaaaccggttac

SEQ ID NO: 5508117 - DNA, 25 bp, Homo sapien
tacattgagatggattaagttactt

SEQ ID NO: 5508118 - DNA, 25 bp, Homo sapien
gctcggctttccactgcaggtaagt

SEQ ID NO: 5508119 - DNA, 25 bp, Homo sapien
atacacgggcataaaaatagtaccc

SEQ ID NO: 5508120 - DNA, 25 bp, Homo sapien
tgcgtgaacttctctaggtgatacc

SEQ ID NO: 5508121 - DNA, 25 bp, Homo sapien
taggtgataccattgctgtgtgctc

SEQ ID NO: 5508122 - DNA, 25 bp, Homo sapien
gcaggtaagtgtttcagccacagac

SEQ ID NO: 5508123 - DNA, 25 bp, Homo sapien
aattacaggataaactgccactaac

SEQ ID NO: 5508124 - DNA, 25 bp, Homo sapien
ccggttactatacacaaagccacgc

SEQ ID NO: 5508125 - DNA, 25 bp, Homo sapien
cttagagaaggtcgtctccccctta

SEQ ID NO: 5508126 - DNA, 25 bp, Homo sapien
ctttaatgggccacaacagggctca

SEQ ID NO: 5508127 - DNA, 25 bp, Homo sapien
ggccaggacagcagcttataaacca

SEQ ID NO: 5508128 - DNA, 25 bp, Homo sapien
gagttaagaccagatacatgctacc

SEQ ID NO: 5508129 - DNA, 25 bp, Homo sapien
tatgtactgaagagtgttgctggag

SEQ ID NO: 5508130 - DNA, 25 bp, Homo sapien
agccctgaaccctcgccctaggtcc

SEQ ID NO: 5508131 - DNA, 25 bp, Homo sapien
ctggagaagtaagagctctgcatga

SEQ ID NO: 5508132 - DNA, 25 bp, Homo sapien
gcagggcctgaggaccctgttcttt

SEQ ID NO: 5508133 - DNA, 25 bp, Homo sapien
aaacccaatggtaagcccaagtctc

SEQ ID NO: 5508134 - DNA, 25 bp, Homo sapien
ttctggaagttaaagtagatacagc

SEQ ID NO: 5508135 - DNA, 25 bp, Homo sapien
aagcaacccacgggattccctcggc

SEQ ID NO: 5508136 - DNA, 25 bp, Homo sapien
ttctgaggcatagcaaaacacctac

SEQ ID NO: 5508137 - DNA, 25 bp, Homo sapien
acataaagctaacgcaatgacagtt

SEQ ID NO: 5508138 - DNA, 25 bp, Homo sapien
atacaaagcagcattatactactat

SEQ ID NO: 5508139 - DNA, 25 bp, Homo sapien
tcccaattcaacataaagctaacgc

SEQ ID NO: 5508140 - DNA, 25 bp, Homo sapien
cagattaacaaattctcagacagat

SEQ ID NO: 5508141 - DNA, 25 bp, Homo sapien
aagttgcattcatttaagaggtatc

SEQ ID NO: 5508142 - DNA, 25 bp, Homo sapien
aaagacaaacagcttcattaaaagt

SEQ ID NO: 5508143 - DNA, 25 bp, Homo sapien
aacacgaatttaagctttatgccac

SEQ ID NO: 5508144 - DNA, 25 bp, Homo sapien
aacagaaataaagcctaaacatcac

SEQ ID NO: 5508145 - DNA, 25 bp, Homo sapien
aacacctacatcaaaagttgcattc

SEQ ID NO: 5508146 - DNA, 25 bp, Homo sapien
ttatgaacacatagtgaaaatgtat

SEQ ID NO: 5508147 - DNA, 25 bp, Homo sapien
tgaagggcagtctacgagatagtcg

SEQ ID NO: 5508148 - DNA, 25 bp, Homo sapien
cgactatctcgtagactgcccttca

SEQ ID NO: 5508149 - DNA, 25 bp, Homo sapien
gggactgcctatgagcccaggatct

SEQ ID NO: 5508150 - DNA, 25 bp, Homo sapien
ccaggatcttgccctcaggatggga

SEQ ID NO: 5508151 - DNA, 25 bp, Homo sapien
tggggttggtgaggagccaacccca

SEQ ID NO: 5508152 - DNA, 25 bp, Homo sapien
gaggagccaaccccacctgtctcaa

SEQ ID NO: 5508153 - DNA, 25 bp, Homo sapien
tctcaagcctcaggctaggaacagc

SEQ ID NO: 5508154 - DNA, 25 bp, Homo sapien
gctaggaacagcacttggctgcagg

SEQ ID NO: 5508155 - DNA, 25 bp, Homo sapien
tctccagccacacattaagccagca

SEQ ID NO: 5508156 - DNA, 25 bp, Homo sapien
tgcttcacatatagaaccaggaaag

SEQ ID NO: 5508157 - DNA, 25 bp, Homo sapien
tatccagactgctgtacagtgcggc

SEQ ID NO: 5508158 - DNA, 25 bp, Homo sapien
cagcaagatggcccttttagtcaca

SEQ ID NO: 5508159 - DNA, 25 bp, Homo sapien
agactggatgaagcgccccattttg

SEQ ID NO: 5508160 - DNA, 25 bp, Homo sapien
taggtaggtgccacccagctacatt

SEQ ID NO: 5508161 - DNA, 25 bp, Homo sapien
aggaagagccctaacaaataattga

SEQ ID NO: 5508162 - DNA, 25 bp, Homo sapien
actacgtagcaacctaggtaggtgc

SEQ ID NO: 5508163 - DNA, 25 bp, Homo sapien
tcagtaatggattctcccaggcact

SEQ ID NO: 5508164 - DNA, 25 bp, Homo sapien
ctggagatctgctgccagagtctac

SEQ ID NO: 5508165 - DNA, 25 bp, Homo sapien
aatcacctcagaaaactgccagttc

SEQ ID NO: 5508166 - DNA, 25 bp, Homo sapien
tatacccaagagaaagtctactcac

SEQ ID NO: 5508167 - DNA, 25 bp, Homo sapien
caagtaaagtagataaaagtgaaag

SEQ ID NO: 5508168 - DNA, 25 bp, Homo sapien
gtagaatctgtgtcagcaaatgctg

SEQ ID NO: 5508169 - DNA, 25 bp, Homo sapien
tcaaggcagcttttagaggtaggaa

SEQ ID NO: 5508170 - DNA, 25 bp, Homo sapien
cctaaacttgggtctctggagatct

SEQ ID NO: 5508171 - DNA, 25 bp, Homo sapien
aacagagtctaaccaggaaaaggag

SEQ ID NO: 5508172 - DNA, 25 bp, Homo sapien
gagagatgcgaactcgctccccctc

SEQ ID NO: 5508173 - DNA, 25 bp, Homo sapien
atctggaagcagatctgccaacata

SEQ ID NO: 5508174 - DNA, 25 bp, Homo sapien
atgtgaaagtgatggtgctctaaaa

SEQ ID NO: 5508175 - DNA, 25 bp, Homo sapien
tctccaatggcgtctgcctccgggg

SEQ ID NO: 5508176 - DNA, 25 bp, Homo sapien
cctcagtgctgaaggatcctgtatt

SEQ ID NO: 5508177 - DNA, 25 bp, Homo sapien
atatagtattttcggggcagcattt

SEQ ID NO: 5508178 - DNA, 25 bp, Homo sapien
atttccccccaaagatccagcagca

SEQ ID NO: 5508179 - DNA, 25 bp, Homo sapien
cataagaatgtggttgaacagagtc

SEQ ID NO: 5508180 - DNA, 25 bp, Homo sapien
cacggaggctttcagaacacaaact

SEQ ID NO: 5508181 - DNA, 25 bp, Homo sapien
gccgccccctgctctgcgctgtctc

SEQ ID NO: 5508182 - DNA, 25 bp, Homo sapien
agtgggaattctacaaaagtcaggg

SEQ ID NO: 5508183 - DNA, 25 bp, Homo sapien
tagaaaggagttaaactgttctatc

SEQ ID NO: 5508184 - DNA, 25 bp, Homo sapien
tggccatagtgagaacagtgccttc

SEQ ID NO: 5508185 - DNA, 25 bp, Homo sapien
cagtccagataattgagagtctttg

SEQ ID NO: 5508186 - DNA, 25 bp, Homo sapien
agcttaaaaggacccaatttgaaca

SEQ ID NO: 5508187 - DNA, 25 bp, Homo sapien
agcatgattcatgtacagaatactc

SEQ ID NO: 5508188 - DNA, 25 bp, Homo sapien
aaaaacaatgctcttaagatcctgc

SEQ ID NO: 5508189 - DNA, 25 bp, Homo sapien
aacagtgccttcagtccagataatt

SEQ ID NO: 5508190 - DNA, 25 bp, Homo sapien
tcagtgagaatttgacagtgggaat

SEQ ID NO: 5508191 - DNA, 25 bp, Homo sapien
tcatctggccatagtgagaacagtg

SEQ ID NO: 5508192 - DNA, 25 bp, Homo sapien
taatacttaagtgatgtcctgattt

SEQ ID NO: 5508193 - DNA, 25 bp, Homo sapien
gctagcacaaattccaacagagtac

SEQ ID NO: 5508194 - DNA, 25 bp, Homo sapien
aggcacacagaactagtgctcaaac

SEQ ID NO: 5508195 - DNA, 25 bp, Homo sapien
tctaagggaaggaattatcactgaa

SEQ ID NO: 5508196 - DNA, 25 bp, Homo sapien
ttccatcaaatttagagactctccc

SEQ ID NO: 5508197 - DNA, 25 bp, Homo sapien
ctccatgaagtcagaatgagacaat

SEQ ID NO: 5508198 - DNA, 25 bp, Homo sapien
taagtgcaagtactagagaaatgtt

SEQ ID NO: 5508199 - DNA, 25 bp, Homo sapien
acctactggaagaattcctgggcta

SEQ ID NO: 5508200 - DNA, 25 bp, Homo sapien
tgagacaataagcagcattaacttc

SEQ ID NO: 5508201 - DNA, 25 bp, Homo sapien
agagtacataaggctaagtcactac

SEQ ID NO: 5508202 - DNA, 25 bp, Homo sapien
tgcttaaaggtgggattaattctcc

SEQ ID NO: 5508203 - DNA, 25 bp, Homo sapien
ctatgcatctaagggaaggaattat

SEQ ID NO: 5508204 - DNA, 25 bp, Homo sapien
atcgcagtaacacacccagtgccac

SEQ ID NO: 5508205 - DNA, 25 bp, Homo sapien
aaagataaaacagtgacacggtttc

SEQ ID NO: 5508206 - DNA, 25 bp, Homo sapien
aaccactcagcaggacacaagaatt

SEQ ID NO: 5508207 - DNA, 25 bp, Homo sapien
gtgccacagggtgataaaaatggta

SEQ ID NO: 5508208 - DNA, 25 bp, Homo sapien
tataaaacgcaagaactgagctact

SEQ ID NO: 5508209 - DNA, 25 bp, Homo sapien
gagtacatggcaccaaagaaagccc

SEQ ID NO: 5508210 - DNA, 25 bp, Homo sapien
ctgactgatctgagtacatggcacc

SEQ ID NO: 5508211 - DNA, 25 bp, Homo sapien
ttcgaaaactcagaagagatgacaa

SEQ ID NO: 5508212 - DNA, 25 bp, Homo sapien
ggggacatgtaaaacaagctgacca

SEQ ID NO: 5508213 - DNA, 25 bp, Homo sapien
acttgaagaagcacagctcagaatc

SEQ ID NO: 5508214 - DNA, 25 bp, Homo sapien
tcagaatcatcagtgtaatcgcagt

SEQ ID NO: 5508215 - DNA, 25 bp, Homo sapien
taaggcattactgtcccagggtgac

SEQ ID NO: 5508216 - DNA, 25 bp, Homo sapien
ggagtagaaagaccacagcaataat

SEQ ID NO: 5508217 - DNA, 25 bp, Homo sapien
acttgatgcaaaaaataagacacct

SEQ ID NO: 5508218 - DNA, 25 bp, Homo sapien
agctagatatatagaaccgatggtt

SEQ ID NO: 5508219 - DNA, 25 bp, Homo sapien
tctacttaaggtgactagtgccact

SEQ ID NO: 5508220 - DNA, 25 bp, Homo sapien
acagattaacacaaaaggtcccacc

SEQ ID NO: 5508221 - DNA, 25 bp, Homo sapien
acctgtaagggcaacttcctaaagc

SEQ ID NO: 5508222 - DNA, 25 bp, Homo sapien
agtcatcggcttgagggtaaactaa

SEQ ID NO: 5508223 - DNA, 25 bp, Homo sapien
tatcagtagccatggagtcatcggc

SEQ ID NO: 5508224 - DNA, 25 bp, Homo sapien
attcctgaaactgggggtctgatat

SEQ ID NO: 5508225 - DNA, 25 bp, Homo sapien
tagccaaataagatgactggggaga

SEQ ID NO: 5508226 - DNA, 25 bp, Homo sapien
ttggatacaaaaattcagttacaca

SEQ ID NO: 5508227 - DNA, 25 bp, Homo sapien
accatgggcttttgaatgtcctcac

SEQ ID NO: 5508228 - DNA, 25 bp, Homo sapien
aacaggcacaatattctaaaggcat

SEQ ID NO: 5508229 - DNA, 25 bp, Homo sapien
ttacacaaatacaaggttcatctgt

SEQ ID NO: 5508230 - DNA, 25 bp, Homo sapien
caaaatctacagaagcggcaaaaga

SEQ ID NO: 5508231 - DNA, 25 bp, Homo sapien
aaggtaggaaaagtagtactcaaga

SEQ ID NO: 5508232 - DNA, 25 bp, Homo sapien
aaggcatatgcattcaccatgggct

SEQ ID NO: 5508233 - DNA, 25 bp, Homo sapien
catagcagaaagaccaaaaaattga

SEQ ID NO: 5508234 - DNA, 25 bp, Homo sapien
attgaatgtaaaccatagctctccc

SEQ ID NO: 5508235 - DNA, 25 bp, Homo sapien
aaaaactaacaattgtgatggggga

SEQ ID NO: 5508236 - DNA, 25 bp, Homo sapien
aggttgcaaacacattgacagaggc

SEQ ID NO: 5508237 - DNA, 25 bp, Homo sapien
catttacacacagagccactgctgc

SEQ ID NO: 5508238 - DNA, 25 bp, Homo sapien
gcaggtagaaggcaactctgccaaa

SEQ ID NO: 5508239 - DNA, 25 bp, Homo sapien
cactaagagataaagggttgttaac

SEQ ID NO: 5508240 - DNA, 25 bp, Homo sapien
acaaacacaataacaaatggacatc

SEQ ID NO: 5508241 - DNA, 25 bp, Homo sapien
tgatgctgccggtaaactccactta

SEQ ID NO: 5508242 - DNA, 25 bp, Homo sapien
tggacatctgattgggatgaggcat

SEQ ID NO: 5508243 - DNA, 25 bp, Homo sapien
aagagtatctgaagaggctgaatca

SEQ ID NO: 5508244 - DNA, 25 bp, Homo sapien
cttttgaactggcaggtagaaggca

SEQ ID NO: 5508245 - DNA, 25 bp, Homo sapien
aggtaaacgaggcactttgtggcaa

SEQ ID NO: 5508246 - DNA, 25 bp, Homo sapien
aggctgaatcagagtaaggctgttt

SEQ ID NO: 5508247 - DNA, 25 bp, Homo sapien
ctgctgcacagcacaagagtatctg

SEQ ID NO: 5508248 - DNA, 25 bp, Homo sapien
aagacctggatctgaatcatggctc

SEQ ID NO: 5508249 - DNA, 25 bp, Homo sapien
gcaatggaggaagctatgtctcata

SEQ ID NO: 5508250 - DNA, 25 bp, Homo sapien
atgtagattgggcaggaacaatttt

SEQ ID NO: 5508251 - DNA, 25 bp, Homo sapien
aggagctgcaatctttagaggcaac

SEQ ID NO: 5508252 - DNA, 25 bp, Homo sapien
aaaaacacaggaagcatctcaaact

SEQ ID NO: 5508253 - DNA, 25 bp, Homo sapien
aaacaaacgtgatgaggtataggaa

SEQ ID NO: 5508254 - DNA, 25 bp, Homo sapien
gaaaggacactggaataagaatcag

SEQ ID NO: 5508255 - DNA, 25 bp, Homo sapien
ttctagtaaataaggagctgcaatc

SEQ ID NO: 5508256 - DNA, 25 bp, Homo sapien
ttttccaagttggtccgagtgcaag

SEQ ID NO: 5508257 - DNA, 25 bp, Homo sapien
ggcaacatggtatgctagaaaggac

SEQ ID NO: 5508258 - DNA, 25 bp, Homo sapien
aaagaaggagaacaacaattctaac

SEQ ID NO: 5508259 - DNA, 25 bp, Homo sapien
agaacaaacacaaggcttatggtac

SEQ ID NO: 5508260 - DNA, 25 bp, Homo sapien
ttcttttaaacgggcatagactcat

SEQ ID NO: 5508261 - DNA, 25 bp, Homo sapien
tgtacaaatatacctaatagctttc

SEQ ID NO: 5508262 - DNA, 25 bp, Homo sapien
taaacgggcatagactcatttgcag

SEQ ID NO: 5508263 - DNA, 25 bp, Homo sapien
ggaaaatacagtttagatcatatga

SEQ ID NO: 5508264 - DNA, 25 bp, Homo sapien
tattacaggcggtctttattttggc

SEQ ID NO: 5508265 - DNA, 25 bp, Homo sapien
caacctaacaaaataatatagaatg

SEQ ID NO: 5508266 - DNA, 25 bp, Homo sapien
ttctaacagattattacaggcggtc

SEQ ID NO: 5508267 - DNA, 25 bp, Homo sapien
tgtacatgtcaatgtaggttaggcc

SEQ ID NO: 5508268 - DNA, 25 bp, Homo sapien
atggtacttgttaggtaaacacaac

SEQ ID NO: 5508269 - DNA, 25 bp, Homo sapien
aaatgcaaaaatatgactttcttaa

SEQ ID NO: 5508270 - DNA, 25 bp, Homo sapien
gtctacacaaggacaagtatacaag

SEQ ID NO: 5508271 - DNA, 25 bp, Homo sapien
cttgtatacttgtccttgtgtagac

SEQ ID NO: 5508272 - DNA, 25 bp, Homo sapien
taaaaaagagggacaattcacatag

SEQ ID NO: 5508273 - DNA, 25 bp, Homo sapien
aatatgagactaaggaataggttac

SEQ ID NO: 5508274 - DNA, 25 bp, Homo sapien
tcggagaccgaaaaaatgatcaaaa

SEQ ID NO: 5508275 - DNA, 25 bp, Homo sapien
taattccaagacaaagtgtgattac

SEQ ID NO: 5508276 - DNA, 25 bp, Homo sapien
gattaatttagaagcacacgacgtc

SEQ ID NO: 5508277 - DNA, 25 bp, Homo sapien
catagttcaccacaatgggaccccc

SEQ ID NO: 5508278 - DNA, 25 bp, Homo sapien
aaagaaactatgagtaacaagctat

SEQ ID NO: 5508279 - DNA, 25 bp, Homo sapien
aggaataggttacatataggtctac

SEQ ID NO: 5508280 - DNA, 25 bp, Homo sapien
ctaaagccaagtaaaatatccattc

SEQ ID NO: 5508281 - DNA, 25 bp, Homo sapien
cacacgacgtcatgatgaaaaacac

SEQ ID NO: 5508282 - DNA, 25 bp, Homo sapien
gcattttagtagcaaggacttgatc

SEQ ID NO: 5508283 - DNA, 25 bp, Homo sapien
gccatgggtctgccatgcggctaca

SEQ ID NO: 5508284 - DNA, 25 bp, Homo sapien
aacaggtggtagaagcaacctattc

SEQ ID NO: 5508285 - DNA, 25 bp, Homo sapien
tgcggctacacccatgaggccctat

SEQ ID NO: 5508286 - DNA, 25 bp, Homo sapien
gaacagttaacagagcagcagttac

SEQ ID NO: 5508287 - DNA, 25 bp, Homo sapien
gaggccctattgtgaacaacgcaac

SEQ ID NO: 5508288 - DNA, 25 bp, Homo sapien
acgcgtagtatcagaatagaacagt

SEQ ID NO: 5508289 - DNA, 25 bp, Homo sapien
gcaacgttctccatcagcggggaag

SEQ ID NO: 5508290 - DNA, 25 bp, Homo sapien
tggccaccaagctttccgcctggtc

SEQ ID NO: 5508291 - DNA, 25 bp, Homo sapien
tgtacaaaggtaccacagcaggtta

SEQ ID NO: 5508292 - DNA, 25 bp, Homo sapien
agcagcagttactgaagacagacgg

SEQ ID NO: 5508293 - DNA, 25 bp, Homo sapien
agcaggttatggttcatacaggact

SEQ ID NO: 5508294 - DNA, 25 bp, Homo sapien
cacaaagtattctagctggctgccc

SEQ ID NO: 5508295 - DNA, 25 bp, Homo sapien
gctggcaaatctgtccgcaccgaaa

SEQ ID NO: 5508296 - DNA, 25 bp, Homo sapien
actggagagagctcgtgtcttctcc

SEQ ID NO: 5508297 - DNA, 25 bp, Homo sapien
tggagaatgaggcaatcaacaaaaa

SEQ ID NO: 5508298 - DNA, 25 bp, Homo sapien
accatgcaccatggggctgaaatgg

SEQ ID NO: 5508299 - DNA, 25 bp, Homo sapien
gggctgaaatggaaaacctcgctta

SEQ ID NO: 5508300 - DNA, 25 bp, Homo sapien
caccgaaaaatgtgcctgtggtttt

SEQ ID NO: 5508301 - DNA, 25 bp, Homo sapien
gagcagactgacacattcatcggcc

SEQ ID NO: 5508302 - DNA, 25 bp, Homo sapien
aaagacaaatgatgccaactggaga

SEQ ID NO: 5508303 - DNA, 25 bp, Homo sapien
gcagagatgaagtaagacaacctta

SEQ ID NO: 5508304 - DNA, 25 bp, Homo sapien
tgaatcaattggccagatggagttc

SEQ ID NO: 5508305 - DNA, 25 bp, Homo sapien
ttggatggtacagctggtctcttcc

SEQ ID NO: 5508306 - DNA, 25 bp, Homo sapien
agaaaaggccactcagatcgactct

SEQ ID NO: 5508307 - DNA, 25 bp, Homo sapien
ttcccagccagactgggaggacatg

SEQ ID NO: 5508308 - DNA, 25 bp, Homo sapien
agatcatcaagaccagggaagcatt

SEQ ID NO: 5508309 - DNA, 25 bp, Homo sapien
ggagatgatggattcagattcacag

SEQ ID NO: 5508310 - DNA, 25 bp, Homo sapien
gctaattttggcagggtgagaagaa

SEQ ID NO: 5508311 - DNA, 25 bp, Homo sapien
aggacatgccacaacctcccaaggc

SEQ ID NO: 5508312 - DNA, 25 bp, Homo sapien
taagtggaactgtatcatagctttc

SEQ ID NO: 5508313 - DNA, 25 bp, Homo sapien
gtgaacctaggaaataagtgctgac

SEQ ID NO: 5508314 - DNA, 25 bp, Homo sapien
gaagaaggggatatttaactgatac

SEQ ID NO: 5508315 - DNA, 25 bp, Homo sapien
tcagattcacaggtcatgcagatta

SEQ ID NO: 5508316 - DNA, 25 bp, Homo sapien
gcagtatgcagatgcttccctcttc

SEQ ID NO: 5508317 - DNA, 25 bp, Homo sapien
gtgtgctgtcttagaaatctgctgt

SEQ ID NO: 5508318 - DNA, 25 bp, Homo sapien
tttgaaggattttgagttgattgta

SEQ ID NO: 5508319 - DNA, 25 bp, Homo sapien
cctatgtgactagtgacttcggtac

SEQ ID NO: 5508320 - DNA, 25 bp, Homo sapien
gcttatcactggtggtgcagactgc

SEQ ID NO: 5508321 - DNA, 25 bp, Homo sapien
tgacacactcttaggcatggctggg

SEQ ID NO: 5508322 - DNA, 25 bp, Homo sapien
acttcggtactagtagtccagggct

SEQ ID NO: 5508323 - DNA, 25 bp, Homo sapien
gggggtctgaatgccactaaagaaa

SEQ ID NO: 5508324 - DNA, 25 bp, Homo sapien
tactagtagtccagggctagaggaa

SEQ ID NO: 5508325 - DNA, 25 bp, Homo sapien
tctagtggttaacacaggattaaga

SEQ ID NO: 5508326 - DNA, 25 bp, Homo sapien
aagagaccatccttaatgccactgt

SEQ ID NO: 5508327 - DNA, 25 bp, Homo sapien
ttacaggctccatgtggtgtttttc

SEQ ID NO: 5508328 - DNA, 25 bp, Homo sapien
atgctatttgcaggactaaacatct

SEQ ID NO: 5508329 - DNA, 25 bp, Homo sapien
aacaaggctagggattcctctggtt

SEQ ID NO: 5508330 - DNA, 25 bp, Homo sapien
acagaaacaaaacccggacatctac

SEQ ID NO: 5508331 - DNA, 25 bp, Homo sapien
acagacgtctgataaaacactaaac

SEQ ID NO: 5508332 - DNA, 25 bp, Homo sapien
aaaccaacaaggatgtggcagtttc

SEQ ID NO: 5508333 - DNA, 25 bp, Homo sapien
agcgagtacctcccctaacccctgc

SEQ ID NO: 5508334 - DNA, 25 bp, Homo sapien
ttgcccctaagggccctagcatccc

SEQ ID NO: 5508335 - DNA, 25 bp, Homo sapien
tccaagaatgctttacaggttgtgc

SEQ ID NO: 5508336 - DNA, 25 bp, Homo sapien
gtcacagactacaagaaagatgcta

SEQ ID NO: 5508337 - DNA, 25 bp, Homo sapien
gtcaaatatcaacagcgagtacctc

SEQ ID NO: 5508338 - DNA, 25 bp, Homo sapien
ggaggacacccctgtgtgttgctgc

SEQ ID NO: 5508339 - DNA, 25 bp, Homo sapien
gccagggtagcctccgatcaataac

SEQ ID NO: 5508340 - DNA, 25 bp, Homo sapien
agcaacaactgcagctcctgagacc

SEQ ID NO: 5508341 - DNA, 25 bp, Homo sapien
tggttctgtgtgcacactgggctct

SEQ ID NO: 5508342 - DNA, 25 bp, Homo sapien
tgttgctgctgccttccgtgctgtc

SEQ ID NO: 5508343 - DNA, 25 bp, Homo sapien
aactgatcagagtaatgagacttcg

SEQ ID NO: 5508344 - DNA, 25 bp, Homo sapien
catgatacaaccaccacaggcaatt

SEQ ID NO: 5508345 - DNA, 25 bp, Homo sapien
ggtactgagtggctggatcagttac

SEQ ID NO: 5508346 - DNA, 25 bp, Homo sapien
ttatacagaggaagttgcaaaatca

SEQ ID NO: 5508347 - DNA, 25 bp, Homo sapien
ctctagaagaatctgtggccaaatc

SEQ ID NO: 5508348 - DNA, 25 bp, Homo sapien
tgagacttcgagaggaatgcctata

SEQ ID NO: 5508349 - DNA, 25 bp, Homo sapien
ttgtgataaaatagttgagtggagc

SEQ ID NO: 5508350 - DNA, 25 bp, Homo sapien
tgctcgtttgcacacctcttcggcc

SEQ ID NO: 5508351 - DNA, 25 bp, Homo sapien
agctgctctgtgatcacacgtgcaa

SEQ ID NO: 5508352 - DNA, 25 bp, Homo sapien
aaatagttgagtggagcaatcacat

SEQ ID NO: 5508353 - DNA, 25 bp, Homo sapien
ataaaaacaggggctctcctgattt

SEQ ID NO: 5508354 - DNA, 25 bp, Homo sapien
gcagcccacccaatgaataccccag

SEQ ID NO: 5508355 - DNA, 25 bp, Homo sapien
ttcctccatggcagcccacccaatg

SEQ ID NO: 5508356 - DNA, 25 bp, Homo sapien
ggtgtagagagagttaagctttcat

SEQ ID NO: 5508357 - DNA, 25 bp, Homo sapien
cttcggcctatcccaaggaccttcc

SEQ ID NO: 5508358 - DNA, 25 bp, Homo sapien
cagatttttagggccattgcgggtc

SEQ ID NO: 5508359 - DNA, 25 bp, Homo sapien
cctcgttctagatagggagaagcag

SEQ ID NO: 5508360 - DNA, 25 bp, Homo sapien
taaagcagatacagatgataacagc

SEQ ID NO: 5508361 - DNA, 25 bp, Homo sapien
tcctctggggaaatttgctttgaat

SEQ ID NO: 5508362 - DNA, 25 bp, Homo sapien
cagaatccagaacttagtagaaacc

SEQ ID NO: 5508363 - DNA, 25 bp, Homo sapien
tcacacacagtgcaatctcccatcc

SEQ ID NO: 5508364 - DNA, 25 bp, Homo sapien
actctctggacaaagaaaaagattc

SEQ ID NO: 5508365 - DNA, 25 bp, Homo sapien
gcccagaataaagggatcgcctcag

SEQ ID NO: 5508366 - DNA, 25 bp, Homo sapien
gggggcagactacctggttcatacc

SEQ ID NO: 5508367 - DNA, 25 bp, Homo sapien
ggagaagtaccctcatgggagacag

SEQ ID NO: 5508368 - DNA, 25 bp, Homo sapien
aagagtaaaagcagtaacccaaatg

SEQ ID NO: 5508369 - DNA, 25 bp, Homo sapien
agctaaaagatgaacagctagaaaa

SEQ ID NO: 5508370 - DNA, 25 bp, Homo sapien
tgctttgaatactgtgtgggaatcc

SEQ ID NO: 5508371 - DNA, 25 bp, Homo sapien
gacatcttacatagggaaaaaagct

SEQ ID NO: 5508372 - DNA, 25 bp, Homo sapien
aaaggcagcctttgttactgttccc

SEQ ID NO: 5508373 - DNA, 25 bp, Homo sapien
atacagggcttcccaaccaggagtc

SEQ ID NO: 5508374 - DNA, 25 bp, Homo sapien
caggaagccctggtataacaatcac

SEQ ID NO: 5508375 - DNA, 25 bp, Homo sapien
ttgtgaccaaagacataaaggcagc

SEQ ID NO: 5508376 - DNA, 25 bp, Homo sapien
gagaagggtgttatgttcaggttta

SEQ ID NO: 5508377 - DNA, 25 bp, Homo sapien
accaggagtctgctggataggtatc

SEQ ID NO: 5508378 - DNA, 25 bp, Homo sapien
gataaagcaagccaaccaaattaac

SEQ ID NO: 5508379 - DNA, 25 bp, Homo sapien
tcaaaatttaatacagggcttccca

SEQ ID NO: 5508380 - DNA, 25 bp, Homo sapien
aacaactataccaaagcagctcttc

SEQ ID NO: 5508381 - DNA, 25 bp, Homo sapien
ttgagtctctcccgaaggtcaggaa

SEQ ID NO: 5508382 - DNA, 25 bp, Homo sapien
aatttgttgcatcttctactttaat

SEQ ID NO: 5508383 - DNA, 25 bp, Homo sapien
attaaagtagaagatgcaacaaatt

SEQ ID NO: 5508384 - DNA, 25 bp, Homo sapien
aatgcttgatatgaagtatgtaaaa

SEQ ID NO: 5508385 - DNA, 25 bp, Homo sapien
atatcaaaatacaccatcctcaact

SEQ ID NO: 5508386 - DNA, 25 bp, Homo sapien
ctcaggtaaaaagttagaaatgtat

SEQ ID NO: 5508387 - DNA, 25 bp, Homo sapien
tgatggtagtagactgattgcttac

SEQ ID NO: 5508388 - DNA, 25 bp, Homo sapien
gatggtagctttcagatgttccctc

SEQ ID NO: 5508389 - DNA, 25 bp, Homo sapien
ttataaagggttgctatctagtaca

SEQ ID NO: 5508390 - DNA, 25 bp, Homo sapien
aagactaaagagataactcaggtaa

SEQ ID NO: 5508391 - DNA, 25 bp, Homo sapien
agcttataatctgatggtagtagac

SEQ ID NO: 5508392 - DNA, 25 bp, Homo sapien
ttagtattgtgtagggtattttcca

SEQ ID NO: 5508393 - DNA, 25 bp, Homo sapien
atgtataaaacaccatcagacaggt

SEQ ID NO: 5508394 - DNA, 25 bp, Homo sapien
atataattggactgcaaaatgcttg

SEQ ID NO: 5508395 - DNA, 25 bp, Homo sapien
tccaggctgagctctacaggtcagc

SEQ ID NO: 5508396 - DNA, 25 bp, Homo sapien
tcccagagtagtgcagcatcctctc

SEQ ID NO: 5508397 - DNA, 25 bp, Homo sapien
caaccagcttaaatggcagtatccc

SEQ ID NO: 5508398 - DNA, 25 bp, Homo sapien
gattgaggtggtgactatccctttg

SEQ ID NO: 5508399 - DNA, 25 bp, Homo sapien
tgtaacctggagagaatactagtgc

SEQ ID NO: 5508400 - DNA, 25 bp, Homo sapien
tctaggtcctgctgtcagggctgag

SEQ ID NO: 5508401 - DNA, 25 bp, Homo sapien
tactagtgcagtcggtcttcatacc

SEQ ID NO: 5508402 - DNA, 25 bp, Homo sapien
tctgaaacctgagctatcatgacat

SEQ ID NO: 5508403 - DNA, 25 bp, Homo sapien
actgtgccaggctaaaccgtaacat

SEQ ID NO: 5508404 - DNA, 25 bp, Homo sapien
ttatattgccgaggctgaccttgaa

SEQ ID NO: 5508405 - DNA, 25 bp, Homo sapien
aaagcagctgctgttttggatctca

SEQ ID NO: 5508406 - DNA, 25 bp, Homo sapien
ctcttgtaaaaaagttgagcacact

SEQ ID NO: 5508407 - DNA, 25 bp, Homo sapien
gataacaaagggtctccaaattata

SEQ ID NO: 5508408 - DNA, 25 bp, Homo sapien
ttatttggataacaaagggtctcca

SEQ ID NO: 5508409 - DNA, 25 bp, Homo sapien
taaaagagaagaaaatacacataat

SEQ ID NO: 5508410 - DNA, 25 bp, Homo sapien
ttacacccagtgcttagaaataggc

SEQ ID NO: 5508411 - DNA, 25 bp, Homo sapien
atttatgtaaaagagaagaaaatac

SEQ ID NO: 5508412 - DNA, 25 bp, Homo sapien
ttagctcttcctttgcaagtgtctt

SEQ ID NO: 5508413 - DNA, 25 bp, Homo sapien
tgaaaaataaatccaagttaatatc

SEQ ID NO: 5508414 - DNA, 25 bp, Homo sapien
tagtgtgctaaagacattaactgat

SEQ ID NO: 5508415 - DNA, 25 bp, Homo sapien
caagcaatagaaaaaccaaagaaat

SEQ ID NO: 5508416 - DNA, 25 bp, Homo sapien
aataataacaagcaatagaaaaacc

SEQ ID NO: 5508417 - DNA, 25 bp, Homo sapien
aaggtagaagaataggatatcatga

SEQ ID NO: 5508418 - DNA, 25 bp, Homo sapien
gactcttggtgtgtttgcaggaagc

SEQ ID NO: 5508419 - DNA, 25 bp, Homo sapien
taaaggacatataatggataggcta

SEQ ID NO: 5508420 - DNA, 25 bp, Homo sapien
aggctagcttgggactcagattatt

SEQ ID NO: 5508421 - DNA, 25 bp, Homo sapien
gagtgcaccacatcgctgcagaaac

SEQ ID NO: 5508422 - DNA, 25 bp, Homo sapien
tcctcatcacaggaagagtgcacca

SEQ ID NO: 5508423 - DNA, 25 bp, Homo sapien
cagtcctcagaaaaagttaccaggc

SEQ ID NO: 5508424 - DNA, 25 bp, Homo sapien
gttaccaggcaacaaggtagaagaa

SEQ ID NO: 5508425 - DNA, 25 bp, Homo sapien
agggggcccagatgtttcctcatca

SEQ ID NO: 5508426 - DNA, 25 bp, Homo sapien
attttcctgcaaggcacctgacact

SEQ ID NO: 5508427 - DNA, 25 bp, Homo sapien
aatggataggctagattacagactc

SEQ ID NO: 5508428 - DNA, 25 bp, Homo sapien
gacgacgacaaacacgtcatgagga

SEQ ID NO: 5508429 - DNA, 25 bp, Homo sapien
ggacgccattgcagtgctcagcgtg

SEQ ID NO: 5508430 - DNA, 25 bp, Homo sapien
cgacgacaaacacgtcatgaggaag

SEQ ID NO: 5508431 - DNA, 25 bp, Homo sapien
gacgccattgcagtgctcagcgtgg

SEQ ID NO: 5508432 - DNA, 25 bp, Homo sapien
ggacgacgacaaacacgtcatgagg

SEQ ID NO: 5508433 - DNA, 25 bp, Homo sapien
gacgacaaacacgtcatgaggaagg

SEQ ID NO: 5508434 - DNA, 25 bp, Homo sapien
aggacgccattgcagtgctcagcgt

SEQ ID NO: 5508435 - DNA, 25 bp, Homo sapien
aaggacgacgacaaacacgtcatga

SEQ ID NO: 5508436 - DNA, 25 bp, Homo sapien
acgacaaacacgtcatgaggaagga

SEQ ID NO: 5508437 - DNA, 25 bp, Homo sapien
acgccattgcagtgctcagcgtggc

SEQ ID NO: 5508438 - DNA, 25 bp, Homo sapien
aggacgacgacaaacacgtcatgag

SEQ ID NO: 5508439 - DNA, 25 bp, Homo sapien
gggggtcctaactcgcaccgaggaa

SEQ ID NO: 5508440 - DNA, 25 bp, Homo sapien
ttcctcggtgcgagttaggaccccc

SEQ ID NO: 5508441 - DNA, 25 bp, Homo sapien
agttgaccgttataccaagatatat

SEQ ID NO: 5508442 - DNA, 25 bp, Homo sapien
atatatcttggtataacggtcaact

SEQ ID NO: 5508443 - DNA, 25 bp, Homo sapien
ctgttccacgaacgagtacattcag

SEQ ID NO: 5508444 - DNA, 25 bp, Homo sapien
ctgaatgtactcgttcgtggaacag

SEQ ID NO: 5508445 - DNA, 25 bp, Homo sapien
agtatctaataacataaagtgaaat

SEQ ID NO: 5508446 - DNA, 25 bp, Homo sapien
atttcactttatgttattagatact

SEQ ID NO: 5508447 - DNA, 25 bp, Homo sapien
cggaaaactcaaaagacccatagac

SEQ ID NO: 5508448 - DNA, 25 bp, Homo sapien
gtctatgggtcttttgagttttccg

SEQ ID NO: 5508449 - DNA, 25 bp, Homo sapien
cgacccgagtagaagtgcagggacc

SEQ ID NO: 5508450 - DNA, 25 bp, Homo sapien
ggtccctgcacttctactcgggtcg

SEQ ID NO: 5508451 - DNA, 25 bp, Homo sapien
aagtagttatagtttcaacaataca

SEQ ID NO: 5508452 - DNA, 25 bp, Homo sapien
tgtattgttgaaactataactactt

SEQ ID NO: 5508453 - DNA, 25 bp, Homo sapien
atttaggtagtagtattaagccaca

SEQ ID NO: 5508454 - DNA, 25 bp, Homo sapien
ctacaggtaaaaactacggcttgta

SEQ ID NO: 5508455 - DNA, 25 bp, Homo sapien
gatagatgcctttaaaagggctggt

SEQ ID NO: 5508456 - DNA, 25 bp, Homo sapien
acagaaacggtcccaagaaaatcta

SEQ ID NO: 5508457 - DNA, 25 bp, Homo sapien
tgaacactggtttacaagataatcc

SEQ ID NO: 5508458 - DNA, 25 bp, Homo sapien
tagaacagagagactgtagaaaaat

SEQ ID NO: 5508459 - DNA, 25 bp, Homo sapien
acagagaagtccaaactacaggtaa

SEQ ID NO: 5508460 - DNA, 25 bp, Homo sapien
aagggctggtaatgcagttacattc

SEQ ID NO: 5508461 - DNA, 25 bp, Homo sapien
acggcttgtactgtgaaaaatgtgc

SEQ ID NO: 5508462 - DNA, 25 bp, Homo sapien
aagataatccgtagaacagagagac

SEQ ID NO: 5508463 - DNA, 25 bp, Homo sapien
aaagctgcagctttcaacaggtttt

SEQ ID NO: 5508464 - DNA, 25 bp, Homo sapien
atacacaagtgtcaaatatgagcac

SEQ ID NO: 5508465 - DNA, 25 bp, Homo sapien
agaggcaagggacgccttgcttaga

SEQ ID NO: 5508466 - DNA, 25 bp, Homo sapien
aaagagaaaacggaatttcttgcat

SEQ ID NO: 5508467 - DNA, 25 bp, Homo sapien
agagtcctgtagagcagagtgattt

SEQ ID NO: 5508468 - DNA, 25 bp, Homo sapien
tctctggagcatcttttggtcacat

SEQ ID NO: 5508469 - DNA, 25 bp, Homo sapien
caacacgcaccccatcaggaattac

SEQ ID NO: 5508470 - DNA, 25 bp, Homo sapien
ttgcatagacagctgaagagtcctg

SEQ ID NO: 5508471 - DNA, 25 bp, Homo sapien
tcattcaaaagagagtccaatacac

SEQ ID NO: 5508472 - DNA, 25 bp, Homo sapien
caacaacgaaatgggaaaccacaat

SEQ ID NO: 5508473 - DNA, 25 bp, Homo sapien
aacttggagggcatttgtttgagag

SEQ ID NO: 5508474 - DNA, 25 bp, Homo sapien
aagttgcaggaatagaaaccctaac

SEQ ID NO: 5508475 - DNA, 25 bp, Homo sapien
agaaaattaagaaatcagatcataa

SEQ ID NO: 5508476 - DNA, 25 bp, Homo sapien
caaagcaggctcagaaatgcaaaaa

SEQ ID NO: 5508477 - DNA, 25 bp, Homo sapien
tttctcatgaatacaaagcaggctc

SEQ ID NO: 5508478 - DNA, 25 bp, Homo sapien
aataaggcacaatgtttgatatggc

SEQ ID NO: 5508479 - DNA, 25 bp, Homo sapien
acatgattgttgtaaagtgactgtt

SEQ ID NO: 5508480 - DNA, 25 bp, Homo sapien
ggtagaattgaagtagcccatatat

SEQ ID NO: 5508481 - DNA, 25 bp, Homo sapien
agagcatttagcattacaaggcaat

SEQ ID NO: 5508482 - DNA, 25 bp, Homo sapien
agatcttttgtacgtcctgggggag

SEQ ID NO: 5508483 - DNA, 25 bp, Homo sapien
tgcaggcacacgtctttacatgatt

SEQ ID NO: 5508484 - DNA, 25 bp, Homo sapien
cctcaactgcaggcacacgtcttta

SEQ ID NO: 5508485 - DNA, 25 bp, Homo sapien
aattcacagaggattggttaatata

SEQ ID NO: 5508486 - DNA, 25 bp, Homo sapien
gtacatctttgtaatacattgagta

SEQ ID NO: 5508487 - DNA, 25 bp, Homo sapien
tactcaatgtattacaaagatgtac

SEQ ID NO: 5508488 - DNA, 25 bp, Homo sapien
agttagaatatcagctaggaaaagg

SEQ ID NO: 5508489 - DNA, 25 bp, Homo sapien
atgaggattgtgtgtcgcacctgaa

SEQ ID NO: 5508490 - DNA, 25 bp, Homo sapien
tgacctcatgctctgaaaaggcaag

SEQ ID NO: 5508491 - DNA, 25 bp, Homo sapien
ccttgatcatcaagggcagcgcatg

SEQ ID NO: 5508492 - DNA, 25 bp, Homo sapien
ctcccagaagaaaggtttaagatgt

SEQ ID NO: 5508493 - DNA, 25 bp, Homo sapien
ggttggaaaatgaacgtgtgttgtc

SEQ ID NO: 5508494 - DNA, 25 bp, Homo sapien
cagcgcatgggtgatcctgttccca

SEQ ID NO: 5508495 - DNA, 25 bp, Homo sapien
aaaggcaaggaacccagaacttgcc

SEQ ID NO: 5508496 - DNA, 25 bp, Homo sapien
gacaggagcctcccctcactttcac

SEQ ID NO: 5508497 - DNA, 25 bp, Homo sapien
atgcactcccaggtttggggacctt

SEQ ID NO: 5508498 - DNA, 25 bp, Homo sapien
gagggatacagagcctgacctcatg

SEQ ID NO: 5508499 - DNA, 25 bp, Homo sapien
gccggtgtcggggcccttcctcgtg

SEQ ID NO: 5508500 - DNA, 25 bp, Homo sapien
cacgaggaagggccccgacaccggc

SEQ ID NO: 5508501 - DNA, 25 bp, Homo sapien
aagacctcaactacccaaaatgtgc

SEQ ID NO: 5508502 - DNA, 25 bp, Homo sapien
tgtgaatgtgaggaatacaattagt

SEQ ID NO: 5508503 - DNA, 25 bp, Homo sapien
ctaaaggcgaaaacaaaagacctca

SEQ ID NO: 5508504 - DNA, 25 bp, Homo sapien
atgtgctatagatgctctgtgctac

SEQ ID NO: 5508505 - DNA, 25 bp, Homo sapien
agcttagaaagctaaaggcgaaaac

SEQ ID NO: 5508506 - DNA, 25 bp, Homo sapien
aagcagccactgcaaattaatgtgc

SEQ ID NO: 5508507 - DNA, 25 bp, Homo sapien
ttcagaccaatggggattgtgaatg

SEQ ID NO: 5508508 - DNA, 25 bp, Homo sapien
tgtgctacgtgacttcagaccaatg

SEQ ID NO: 5508509 - DNA, 25 bp, Homo sapien
cagtccacattgtaagaaagcttag

SEQ ID NO: 5508510 - DNA, 25 bp, Homo sapien
tgccccctgatgatattgtaggctt

SEQ ID NO: 5508511 - DNA, 25 bp, Homo sapien
tcaaagagaatcctgcataaagccc

SEQ ID NO: 5508512 - DNA, 25 bp, Homo sapien
ccacgctccttcatcgggggtcttg

SEQ ID NO: 5508513 - DNA, 25 bp, Homo sapien
ggtgggtgtgagaaactcaaacacc

SEQ ID NO: 5508514 - DNA, 25 bp, Homo sapien
tgagacaggatatcacagggtcaca

SEQ ID NO: 5508515 - DNA, 25 bp, Homo sapien
gcccagaacacgtgcttgtagaggt

SEQ ID NO: 5508516 - DNA, 25 bp, Homo sapien
accacgttggcggtcacgtggcttc

SEQ ID NO: 5508517 - DNA, 25 bp, Homo sapien
gcgtagatggaagtccacgctcctt

SEQ ID NO: 5508518 - DNA, 25 bp, Homo sapien
gaagcttcttcgccagacgggtggc

SEQ ID NO: 5508519 - DNA, 25 bp, Homo sapien
ttgtataggtaacggccaccaactc

SEQ ID NO: 5508520 - DNA, 25 bp, Homo sapien
tgtctcaaaactagaggacagagcc

SEQ ID NO: 5508521 - DNA, 25 bp, Homo sapien
aaagcaaccagccgagaagcttctt

SEQ ID NO: 5508522 - DNA, 25 bp, Homo sapien
tgaagttctgcagaggttgaggcag

SEQ ID NO: 5508523 - DNA, 25 bp, Homo sapien
gatgagcgtagcagacaatagaaat

SEQ ID NO: 5508524 - DNA, 25 bp, Homo sapien
gagcctttcaacagtacagagccat

SEQ ID NO: 5508525 - DNA, 25 bp, Homo sapien
aggcacccctagagcaccatgcttc

SEQ ID NO: 5508526 - DNA, 25 bp, Homo sapien
aaaagtcgggccatcccatcgtgtg

SEQ ID NO: 5508527 - DNA, 25 bp, Homo sapien
ctacctcaaaacaccagacccactt

SEQ ID NO: 5508528 - DNA, 25 bp, Homo sapien
aagatgcaagctagatgaaacaact

SEQ ID NO: 5508529 - DNA, 25 bp, Homo sapien
gatgaaacaactgactgtagacatt

SEQ ID NO: 5508530 - DNA, 25 bp, Homo sapien
tacagagccatagattacaaagtta

SEQ ID NO: 5508531 - DNA, 25 bp, Homo sapien
atgtgtgcattaagtgaaagcaact

SEQ ID NO: 5508532 - DNA, 25 bp, Homo sapien
gccctaggctgggttctacctcaaa

SEQ ID NO: 5508533 - DNA, 25 bp, Homo sapien
aagcaactgaagggtttgtgtttta

SEQ ID NO: 5508534 - DNA, 25 bp, Homo sapien
gtaaaaaggaacactgatgatcact

SEQ ID NO: 5508535 - DNA, 25 bp, Homo sapien
tatgagtcacagaggtcccttggtc

SEQ ID NO: 5508536 - DNA, 25 bp, Homo sapien
aaagataaagggcccattaatcagg

SEQ ID NO: 5508537 - DNA, 25 bp, Homo sapien
agcaataaaacaactggacactcct

SEQ ID NO: 5508538 - DNA, 25 bp, Homo sapien
atcagtctaagagcccacccaacaa

SEQ ID NO: 5508539 - DNA, 25 bp, Homo sapien
gtgcataaattgtagaccaggtccc

SEQ ID NO: 5508540 - DNA, 25 bp, Homo sapien
tcatgggatgtttggaattaaggag

SEQ ID NO: 5508541 - DNA, 25 bp, Homo sapien
ccaacctgttggcaatatgacgctc

SEQ ID NO: 5508542 - DNA, 25 bp, Homo sapien
gctacttcaggattcagccagccct

SEQ ID NO: 5508543 - DNA, 25 bp, Homo sapien
actcctaggggacaccaaagataaa

SEQ ID NO: 5508544 - DNA, 25 bp, Homo sapien
attaatcaggtgtaggccagagaaa

SEQ ID NO: 5508545 - DNA, 25 bp, Homo sapien
tgcccaaagccgtgacatcccggcc

SEQ ID NO: 5508546 - DNA, 25 bp, Homo sapien
gtcattcagaattcaaaagaagttc

SEQ ID NO: 5508547 - DNA, 25 bp, Homo sapien
acagcttaccaaaccaaagtgccca

SEQ ID NO: 5508548 - DNA, 25 bp, Homo sapien
aaagaagttctaagtttattgcaag

SEQ ID NO: 5508549 - DNA, 25 bp, Homo sapien
gcagctccgtgtcccctgagaacca

SEQ ID NO: 5508550 - DNA, 25 bp, Homo sapien
ggtacagcttaccaaaccaaagtgc

SEQ ID NO: 5508551 - DNA, 25 bp, Homo sapien
cgtcagagaagtcattcagaattca

SEQ ID NO: 5508552 - DNA, 25 bp, Homo sapien
caaaccaaagtgcccaaagccgtga

SEQ ID NO: 5508553 - DNA, 25 bp, Homo sapien
ccactccgcaccccaccctctgtct

SEQ ID NO: 5508554 - DNA, 25 bp, Homo sapien
attgcaagaaaaaaaccctgccttc

SEQ ID NO: 5508555 - DNA, 25 bp, Homo sapien
tctgtctggtacagcttaccaaacc

SEQ ID NO: 5508556 - DNA, 25 bp, Homo sapien
gagaagattcgatcgtaacataaag

SEQ ID NO: 5508557 - DNA, 25 bp, Homo sapien
ctttatgttacgatcgaatcttctc

SEQ ID NO: 5508558 - DNA, 25 bp, Homo sapien
tacagtagatagaaacatgggaaag

SEQ ID NO: 5508559 - DNA, 25 bp, Homo sapien
aaacatgggaaagtacttacaatac

SEQ ID NO: 5508560 - DNA, 25 bp, Homo sapien
gtttccataactcctgtgacacagc

SEQ ID NO: 5508561 - DNA, 25 bp, Homo sapien
tttcaaccatggacacaaagtgtgt

SEQ ID NO: 5508562 - DNA, 25 bp, Homo sapien
taaaatatatactaggtacagccct

SEQ ID NO: 5508563 - DNA, 25 bp, Homo sapien
aatgaacacagatgttatagtggtg

SEQ ID NO: 5508564 - DNA, 25 bp, Homo sapien
ctcctctaccctcctcagtggcctt

SEQ ID NO: 5508565 - DNA, 25 bp, Homo sapien
atagacaaggaaatgtgttagtaac

SEQ ID NO: 5508566 - DNA, 25 bp, Homo sapien
aggacagaagatgagctatacaaat

SEQ ID NO: 5508567 - DNA, 25 bp, Homo sapien
acagggctaagagctttacatgaaa

SEQ ID NO: 5508568 - DNA, 25 bp, Homo sapien
aggtggtgaaggtagtattcaaaac

SEQ ID NO: 5508569 - DNA, 25 bp, Homo sapien
ggaatgagcgtggtccttgtccttt

SEQ ID NO: 5508570 - DNA, 25 bp, Homo sapien
ccgagagtgcaataacataaatcca

SEQ ID NO: 5508571 - DNA, 25 bp, Homo sapien
ggccttgtggtgttctggtcactgc

SEQ ID NO: 5508572 - DNA, 25 bp, Homo sapien
caatggtctgcaaataagaggtatt

SEQ ID NO: 5508573 - DNA, 25 bp, Homo sapien
atacgataaatcacaccgagagtgc

SEQ ID NO: 5508574 - DNA, 25 bp, Homo sapien
gtcagcagagggagttcacctcttc

SEQ ID NO: 5508575 - DNA, 25 bp, Homo sapien
ggctggagagacctcctcattcagt

SEQ ID NO: 5508576 - DNA, 25 bp, Homo sapien
acagcccgagattatgtgtacattg

SEQ ID NO: 5508577 - DNA, 25 bp, Homo sapien
attccaaatagtcagcagagggagt

SEQ ID NO: 5508578 - DNA, 25 bp, Homo sapien
aaagggtataggagtttacaactca

SEQ ID NO: 5508579 - DNA, 25 bp, Homo sapien
tcaaaacatcttgtgggccttgtgg

SEQ ID NO: 5508580 - DNA, 25 bp, Homo sapien
atacagattggataaaagataagcc

SEQ ID NO: 5508581 - DNA, 25 bp, Homo sapien
gaaacaattgatgtcagaagagatc

SEQ ID NO: 5508582 - DNA, 25 bp, Homo sapien
tctcagctaatgtgcacagaaatac

SEQ ID NO: 5508583 - DNA, 25 bp, Homo sapien
tgaccccacattgccacagaagagg

SEQ ID NO: 5508584 - DNA, 25 bp, Homo sapien
gctcatgccagctttccagagtccc

SEQ ID NO: 5508585 - DNA, 25 bp, Homo sapien
aatactactgaggtgcaaaatgtgt

SEQ ID NO: 5508586 - DNA, 25 bp, Homo sapien
accaaagctgggatctgaaaattat

SEQ ID NO: 5508587 - DNA, 25 bp, Homo sapien
agaagagatctgatacccataaagc

SEQ ID NO: 5508588 - DNA, 25 bp, Homo sapien
taagagtagaaccaaacaagttagc

SEQ ID NO: 5508589 - DNA, 25 bp, Homo sapien
acacgacagagcccaacaatgattt

SEQ ID NO: 5508590 - DNA, 25 bp, Homo sapien
atgtggatactttaggatacggccc

SEQ ID NO: 5508591 - DNA, 25 bp, Homo sapien
ctcatgacctgcatttcggacctgg

SEQ ID NO: 5508592 - DNA, 25 bp, Homo sapien
gtctcaagccctctaatggggactg

SEQ ID NO: 5508593 - DNA, 25 bp, Homo sapien
tcggacctggtcgtgtttgattaaa

SEQ ID NO: 5508594 - DNA, 25 bp, Homo sapien
tcaggtacaaggtctcaagccctct

SEQ ID NO: 5508595 - DNA, 25 bp, Homo sapien
aatgggttgttcaggtacaaggtct

SEQ ID NO: 5508596 - DNA, 25 bp, Homo sapien
cagcaggaagagctgctctgatctc

SEQ ID NO: 5508597 - DNA, 25 bp, Homo sapien
ttactacttagtgatctgcactggc

SEQ ID NO: 5508598 - DNA, 25 bp, Homo sapien
tcctaactatgctggacctgcccac

SEQ ID NO: 5508599 - DNA, 25 bp, Homo sapien
tcccaacaactgattgcaggggcca

SEQ ID NO: 5508600 - DNA, 25 bp, Homo sapien
aagcactgagtgcaaaatgggttgt

SEQ ID NO: 5508601 - DNA, 25 bp, Homo sapien
taacagctgcagaatggacttcttc

SEQ ID NO: 5508602 - DNA, 25 bp, Homo sapien
taagagagtcacaagccatggtcta

SEQ ID NO: 5508603 - DNA, 25 bp, Homo sapien
tagaccatggcttgtgactctctta

SEQ ID NO: 5508604 - DNA, 25 bp, Homo sapien
ttagataaaaacgcaggacactgat

SEQ ID NO: 5508605 - DNA, 25 bp, Homo sapien
caaaaaagccagttcaaacccaaga

SEQ ID NO: 5508606 - DNA, 25 bp, Homo sapien
agttcatcaattggagaaatggcca

SEQ ID NO: 5508607 - DNA, 25 bp, Homo sapien
gaaatggccaaccagcgacttggta

SEQ ID NO: 5508608 - DNA, 25 bp, Homo sapien
tggcaggagtagctttgtagtgttg

SEQ ID NO: 5508609 - DNA, 25 bp, Homo sapien
aatcatgtaagcaattgaggggaat

SEQ ID NO: 5508610 - DNA, 25 bp, Homo sapien
atgagaaagagctaaaaccaatggt

SEQ ID NO: 5508611 - DNA, 25 bp, Homo sapien
taaaatatgattaccccacagggcc

SEQ ID NO: 5508612 - DNA, 25 bp, Homo sapien
atcttcaggaaaagaaggttaagta

SEQ ID NO: 5508613 - DNA, 25 bp, Homo sapien
cttggtaaagaaacagaggttctgt

SEQ ID NO: 5508614 - DNA, 25 bp, Homo sapien
attgaggggaatcccaaatgagaaa

SEQ ID NO: 5508615 - DNA, 25 bp, Homo sapien
aaattgtgaaagtcgagagtactcc

SEQ ID NO: 5508616 - DNA, 25 bp, Homo sapien
ggagtactctcgactttcacaattt

SEQ ID NO: 5508617 - DNA, 25 bp, Homo sapien
gcacgggccctgtaccctccactga

SEQ ID NO: 5508618 - DNA, 25 bp, Homo sapien
tcagtggagggtacagggcccgtgc

SEQ ID NO: 5508619 - DNA, 25 bp, Homo sapien
acgggccctgtaccctccactgaca

SEQ ID NO: 5508620 - DNA, 25 bp, Homo sapien
tgtcagtggagggtacagggcccgt

SEQ ID NO: 5508621 - DNA, 25 bp, Homo sapien
tggctagggacattggaattctcta

SEQ ID NO: 5508622 - DNA, 25 bp, Homo sapien
tgcgtacatacaacataacacatcc

SEQ ID NO: 5508623 - DNA, 25 bp, Homo sapien
ctgccaattaagagaaagccaattt

SEQ ID NO: 5508624 - DNA, 25 bp, Homo sapien
cagtggaactggtcccttgtggcta

SEQ ID NO: 5508625 - DNA, 25 bp, Homo sapien
ccaggctagctccctctgacctcat

SEQ ID NO: 5508626 - DNA, 25 bp, Homo sapien
tctgttggaatctgtcagctgtgga

SEQ ID NO: 5508627 - DNA, 25 bp, Homo sapien
ctccggtccatatatgcgtacatac

SEQ ID NO: 5508628 - DNA, 25 bp, Homo sapien
taccccaaagatgagtttttagatc

SEQ ID NO: 5508629 - DNA, 25 bp, Homo sapien
acagcagcctgtatcttaataaccc

SEQ ID NO: 5508630 - DNA, 25 bp, Homo sapien
tataaactcagcagactccggtcca

SEQ ID NO: 5508631 - DNA, 25 bp, Homo sapien
atgaactgtgacaacctttggacac

SEQ ID NO: 5508632 - DNA, 25 bp, Homo sapien
ttcctgcccagactggataccggga

SEQ ID NO: 5508633 - DNA, 25 bp, Homo sapien
ctggcagacccccaagatctacctg

SEQ ID NO: 5508634 - DNA, 25 bp, Homo sapien
accaccacaagtaccggaagctggt

SEQ ID NO: 5508635 - DNA, 25 bp, Homo sapien
agtgcaaaaacgtgctgaagatccg

SEQ ID NO: 5508636 - DNA, 25 bp, Homo sapien
gcaatcctaccagtgtccgcccagc

SEQ ID NO: 5508637 - DNA, 25 bp, Homo sapien
actgtggctccaccgcaatcctacc

SEQ ID NO: 5508638 - DNA, 25 bp, Homo sapien
agcagatcaagttcgagaaagacct

SEQ ID NO: 5508639 - DNA, 25 bp, Homo sapien
gttgctgctgtgatccgtagtaata

SEQ ID NO: 5508640 - DNA, 25 bp, Homo sapien
caagatctacctgcggggcaaatga

SEQ ID NO: 5508641 - DNA, 25 bp, Homo sapien
cgcccttcccgcccgttgctgctgt

SEQ ID NO: 5508642 - DNA, 25 bp, Homo sapien
gcggaagatgaaccaccacaagtac

SEQ ID NO: 5508643 - DNA, 25 bp, Homo sapien
tagcatcgacgtcaagagacatctc

SEQ ID NO: 5508644 - DNA, 25 bp, Homo sapien
aactgtaaggtgctgtgcagatgtt

SEQ ID NO: 5508645 - DNA, 25 bp, Homo sapien
agaaaacggttagaaaagcatcact

SEQ ID NO: 5508646 - DNA, 25 bp, Homo sapien
gagattacactgaacgtggggaaaa

SEQ ID NO: 5508647 - DNA, 25 bp, Homo sapien
tcggattcaagtagctaaagaactc

SEQ ID NO: 5508648 - DNA, 25 bp, Homo sapien
aatgagaatgtgtgaacgttctttg

SEQ ID NO: 5508649 - DNA, 25 bp, Homo sapien
acatagcaacaacacaggcaaggaa

SEQ ID NO: 5508650 - DNA, 25 bp, Homo sapien
aagagacatctcgtaacaggttcac

SEQ ID NO: 5508651 - DNA, 25 bp, Homo sapien
acacggcttgaaatgcagcacatcc

SEQ ID NO: 5508652 - DNA, 25 bp, Homo sapien
aggagtgatgtcgaggaattcctat

SEQ ID NO: 5508653 - DNA, 25 bp, Homo sapien
gggaaaaggaagactactctgtata

SEQ ID NO: 5508654 - DNA, 25 bp, Homo sapien
actaaaggcaacaatgtaaagtatg

SEQ ID NO: 5508655 - DNA, 25 bp, Homo sapien
gcaaattcctcagttcagaagtccc

SEQ ID NO: 5508656 - DNA, 25 bp, Homo sapien
attaggttattatgggaaagctggg

SEQ ID NO: 5508657 - DNA, 25 bp, Homo sapien
aagctgggtctgctagtagtttcac

SEQ ID NO: 5508658 - DNA, 25 bp, Homo sapien
ttagcgagtcatacagaatggacac

SEQ ID NO: 5508659 - DNA, 25 bp, Homo sapien
gaagttaatgagctaaaatgttgcc

SEQ ID NO: 5508660 - DNA, 25 bp, Homo sapien
gtaaagtatgttgtagctaagtaaa

SEQ ID NO: 5508661 - DNA, 25 bp, Homo sapien
gccttgcaaagtaggttagcgagtc

SEQ ID NO: 5508662 - DNA, 25 bp, Homo sapien
tgtcagtgcctgtgagataactaaa

SEQ ID NO: 5508663 - DNA, 25 bp, Homo sapien
atcctgaaaacaatgagactttaat

SEQ ID NO: 5508664 - DNA, 25 bp, Homo sapien
ctttgacctatacagatgacacatc

SEQ ID NO: 5508665 - DNA, 25 bp, Homo sapien
accgcggaggtgccgcggacgaggt

SEQ ID NO: 5508666 - DNA, 25 bp, Homo sapien
acctcgtccgcggcacctccgcggt

SEQ ID NO: 5508667 - DNA, 25 bp, Homo sapien
ataagagcttttgatgtactgtttc

SEQ ID NO: 5508668 - DNA, 25 bp, Homo sapien
tctcatgaaaatgttgcacagttag

SEQ ID NO: 5508669 - DNA, 25 bp, Homo sapien
gttgcacagttagaatttgtcttgc

SEQ ID NO: 5508670 - DNA, 25 bp, Homo sapien
tttagggtattcagtcccagcaacc

SEQ ID NO: 5508671 - DNA, 25 bp, Homo sapien
ctgtaaaggcaatcttagaagatgc

SEQ ID NO: 5508672 - DNA, 25 bp, Homo sapien
ctgtttataacatggactctgataa

SEQ ID NO: 5508673 - DNA, 25 bp, Homo sapien
tacggttctttaggcacttacacat

SEQ ID NO: 5508674 - DNA, 25 bp, Homo sapien
gaaaaataagcaccattcatagcta

SEQ ID NO: 5508675 - DNA, 25 bp, Homo sapien
ttctgattggctactgtaaaggcaa

SEQ ID NO: 5508676 - DNA, 25 bp, Homo sapien
tagaagatgcatgtaaatataatat

SEQ ID NO: 5508677 - DNA, 25 bp, Homo sapien
tagaatcctgtcataacccaatatc

SEQ ID NO: 5508678 - DNA, 25 bp, Homo sapien
caaggcaggaaatgcttcagttatc

SEQ ID NO: 5508679 - DNA, 25 bp, Homo sapien
gagttaacagccaagcatactagtt

SEQ ID NO: 5508680 - DNA, 25 bp, Homo sapien
taaaaacagacataagtaacatctt

SEQ ID NO: 5508681 - DNA, 25 bp, Homo sapien
ctgtataagtgtattgaaatgtttc

SEQ ID NO: 5508682 - DNA, 25 bp, Homo sapien
atctttagagttaacagccaagcat

SEQ ID NO: 5508683 - DNA, 25 bp, Homo sapien
cagttatcatctaagtggagttgtt

SEQ ID NO: 5508684 - DNA, 25 bp, Homo sapien
ggaacagtttgggatccgcagtttc

SEQ ID NO: 5508685 - DNA, 25 bp, Homo sapien
gtgaatcagactgaatcacacacat

SEQ ID NO: 5508686 - DNA, 25 bp, Homo sapien
attttcacaaggcaggaaatgcttc

SEQ ID NO: 5508687 - DNA, 25 bp, Homo sapien
tatacaatgatataaagtgtccaaa

SEQ ID NO: 5508688 - DNA, 25 bp, Homo sapien
agaattctgtgaatcagactgaatc

SEQ ID NO: 5508689 - DNA, 25 bp, Homo sapien
gtgaactatatctctgggaaacctc

SEQ ID NO: 5508690 - DNA, 25 bp, Homo sapien
ttaatgtttgattggctaagggaca

SEQ ID NO: 5508691 - DNA, 25 bp, Homo sapien
cccactgcagtcattcttgaaaccc

SEQ ID NO: 5508692 - DNA, 25 bp, Homo sapien
tagagcgcaacaattaactgtgaac

SEQ ID NO: 5508693 - DNA, 25 bp, Homo sapien
tggctaagggacaattaaagcttac

SEQ ID NO: 5508694 - DNA, 25 bp, Homo sapien
gaaaagcaaatatcagtagtattac

SEQ ID NO: 5508695 - DNA, 25 bp, Homo sapien
aaatggtcagttgtattagagcgca

SEQ ID NO: 5508696 - DNA, 25 bp, Homo sapien
gaaataccagacagccttaggcaac

SEQ ID NO: 5508697 - DNA, 25 bp, Homo sapien
agcttacccagtgctaacacaagac

SEQ ID NO: 5508698 - DNA, 25 bp, Homo sapien
ctaacacaagactgctgataagaac

SEQ ID NO: 5508699 - DNA, 25 bp, Homo sapien
taatagatgaacaatgacatgttaa

SEQ ID NO: 5508700 - DNA, 25 bp, Homo sapien
ctgtcgcgggccagggaccgccgct

SEQ ID NO: 5508701 - DNA, 25 bp, Homo sapien
agcggcggtccctggcccgcgacag

SEQ ID NO: 5508702 - DNA, 25 bp, Homo sapien
aacatcgataaagactctaccataa

SEQ ID NO: 5508703 - DNA, 25 bp, Homo sapien
ttatggtagagtctttatcgatgtt

SEQ ID NO: 5508704 - DNA, 25 bp, Homo sapien
atcaagtactcaagagaaagctcaa

SEQ ID NO: 5508705 - DNA, 25 bp, Homo sapien
ttatattctactcagcagggtgtct

SEQ ID NO: 5508706 - DNA, 25 bp, Homo sapien
tagcataccattaattagaaacctc

SEQ ID NO: 5508707 - DNA, 25 bp, Homo sapien
tactcagcagggtgtctgtctgtac

SEQ ID NO: 5508708 - DNA, 25 bp, Homo sapien
tatgccttgtgatcactgatggcct

SEQ ID NO: 5508709 - DNA, 25 bp, Homo sapien
gccaaaacctcaagaatccatacat

SEQ ID NO: 5508710 - DNA, 25 bp, Homo sapien
gtgatcactgatggcctgcttatgt

SEQ ID NO: 5508711 - DNA, 25 bp, Homo sapien
atatgccacaaaaagccactcccat

SEQ ID NO: 5508712 - DNA, 25 bp, Homo sapien
ctgtctgtactccaaattagctctc

SEQ ID NO: 5508713 - DNA, 25 bp, Homo sapien
aaaacagtagaaactagcataccat

SEQ ID NO: 5508714 - DNA, 25 bp, Homo sapien
aagccactcccatcatccacaatac

SEQ ID NO: 5508715 - DNA, 25 bp, Homo sapien
ccaagtaccgagttaagactcctta

SEQ ID NO: 5508716 - DNA, 25 bp, Homo sapien
aacttagataattcaaagcccaatg

SEQ ID NO: 5508717 - DNA, 25 bp, Homo sapien
agatgaaaagctctgatcccaaatc

SEQ ID NO: 5508718 - DNA, 25 bp, Homo sapien
tggcttatagagttataagggtgat

SEQ ID NO: 5508719 - DNA, 25 bp, Homo sapien
taaagggcaaaacaatatagctgtt

SEQ ID NO: 5508720 - DNA, 25 bp, Homo sapien
agagttctactcatcccagtgaaaa

SEQ ID NO: 5508721 - DNA, 25 bp, Homo sapien
accatttataaatgaggatgagttt

SEQ ID NO: 5508722 - DNA, 25 bp, Homo sapien
taagttctttgacgattgagcacac

SEQ ID NO: 5508723 - DNA, 25 bp, Homo sapien
ttttactaaaagcagagttctactc

SEQ ID NO: 5508724 - DNA, 25 bp, Homo sapien
ttgacgattgagcacacattgtttc

SEQ ID NO: 5508725 - DNA, 25 bp, Homo sapien
atgaggatgagtttacaatggtttc

SEQ ID NO: 5508726 - DNA, 25 bp, Homo sapien
tgggcccagaaatcaagctaagcct

SEQ ID NO: 5508727 - DNA, 25 bp, Homo sapien
aggagacacagacaatagtcactac

SEQ ID NO: 5508728 - DNA, 25 bp, Homo sapien
gctaatggaccaagtggcctcaact

SEQ ID NO: 5508729 - DNA, 25 bp, Homo sapien
gttgagtagtgatcttgctgcccca

SEQ ID NO: 5508730 - DNA, 25 bp, Homo sapien
gatcatctggctaaactgctccccc

SEQ ID NO: 5508731 - DNA, 25 bp, Homo sapien
atttgtgacaagaacagacacacac

SEQ ID NO: 5508732 - DNA, 25 bp, Homo sapien
tgccacagtgtgaaaacgttgagta

SEQ ID NO: 5508733 - DNA, 25 bp, Homo sapien
catctcagagaaactagggcattat

SEQ ID NO: 5508734 - DNA, 25 bp, Homo sapien
taagccttaggtaacatcatgccac

SEQ ID NO: 5508735 - DNA, 25 bp, Homo sapien
tatgagatagacgcgcaccacttaa

SEQ ID NO: 5508736 - DNA, 25 bp, Homo sapien
atcttaagaacacagacagtgggcc

SEQ ID NO: 5508737 - DNA, 25 bp, Homo sapien
ttttgatgtatttgaatccacctcc

SEQ ID NO: 5508738 - DNA, 25 bp, Homo sapien
gcagcatgatcaggactcactgcag

SEQ ID NO: 5508739 - DNA, 25 bp, Homo sapien
ttgtccaagattgagtgcagcagca

SEQ ID NO: 5508740 - DNA, 25 bp, Homo sapien
tcccagcctcctcaaatctttccca

SEQ ID NO: 5508741 - DNA, 25 bp, Homo sapien
agcaggaatcacttctaaatgtctc

SEQ ID NO: 5508742 - DNA, 25 bp, Homo sapien
tgaatccacctccttctgaaagcag

SEQ ID NO: 5508743 - DNA, 25 bp, Homo sapien
atctttcccaagtttgatgcacttc

SEQ ID NO: 5508744 - DNA, 25 bp, Homo sapien
gctctgttgtccaagattgagtgca

SEQ ID NO: 5508745 - DNA, 25 bp, Homo sapien
ttttactctctgtagagatgcagtc

SEQ ID NO: 5508746 - DNA, 25 bp, Homo sapien
tgcagtcttgctatgctgtgcatgc

SEQ ID NO: 5508747 - DNA, 25 bp, Homo sapien
ctataaacacttagcagaggaaggg

SEQ ID NO: 5508748 - DNA, 25 bp, Homo sapien
tttgatggccagagacacttatgtt

SEQ ID NO: 5508749 - DNA, 25 bp, Homo sapien
tatggaaaaaagatgcaaaccaacc

SEQ ID NO: 5508750 - DNA, 25 bp, Homo sapien
aaggacacagttcagaagagctctt

SEQ ID NO: 5508751 - DNA, 25 bp, Homo sapien
tacaagagcaaaattcaagtaatac

SEQ ID NO: 5508752 - DNA, 25 bp, Homo sapien
aaaagatagccctacactggagcac

SEQ ID NO: 5508753 - DNA, 25 bp, Homo sapien
cttctattcaagtgaccatccaagc

SEQ ID NO: 5508754 - DNA, 25 bp, Homo sapien
accaatggcaaccttaaacacttcc

SEQ ID NO: 5508755 - DNA, 25 bp, Homo sapien
ttaacaatatggaaaaaagatgcaa

SEQ ID NO: 5508756 - DNA, 25 bp, Homo sapien
ctacactggagcaccaaaaagtttt

SEQ ID NO: 5508757 - DNA, 25 bp, Homo sapien
taagtaagtgtgatgaaggaatcat

SEQ ID NO: 5508758 - DNA, 25 bp, Homo sapien
aaagcactgctgtaaacaagatcac

SEQ ID NO: 5508759 - DNA, 25 bp, Homo sapien
tgccctggccctgttggcaatgggg

SEQ ID NO: 5508760 - DNA, 25 bp, Homo sapien
acccgctgttccctggggttcacgc

SEQ ID NO: 5508761 - DNA, 25 bp, Homo sapien
aggcccctgtgtgtactcttgccct

SEQ ID NO: 5508762 - DNA, 25 bp, Homo sapien
tgtgagaaacaaatgggataatcca

SEQ ID NO: 5508763 - DNA, 25 bp, Homo sapien
ataaatatcagctgtcattgtctgt

SEQ ID NO: 5508764 - DNA, 25 bp, Homo sapien
acgcttcctttcttgaggttgtgtc

SEQ ID NO: 5508765 - DNA, 25 bp, Homo sapien
aatgggataatccaagccgaatgct

SEQ ID NO: 5508766 - DNA, 25 bp, Homo sapien
cctgtgtgtactcttgccctggccc

SEQ ID NO: 5508767 - DNA, 25 bp, Homo sapien
ttaacagttgttagcttgattgata

SEQ ID NO: 5508768 - DNA, 25 bp, Homo sapien
tcttgaggttgtgtcctccttcccc

SEQ ID NO: 5508769 - DNA, 25 bp, Homo sapien
gccgaatgcttggcatggtgcaaat

SEQ ID NO: 5508770 - DNA, 25 bp, Homo sapien
tcccctctgaggactcgttcccact

SEQ ID NO: 5508771 - DNA, 25 bp, Homo sapien
agtgggaacgagtcctcagagggga

SEQ ID NO: 5508772 - DNA, 25 bp, Homo sapien
cgtccgttacgagaacatgtcctag

SEQ ID NO: 5508773 - DNA, 25 bp, Homo sapien
ctaggacatgttctcgtaacggacg

SEQ ID NO: 5508774 - DNA, 25 bp, Homo sapien
aacataatagagaaagagctaagac

SEQ ID NO: 5508775 - DNA, 25 bp, Homo sapien
tgacataacagacaagaaacagcca

SEQ ID NO: 5508776 - DNA, 25 bp, Homo sapien
atcaggagaacatcttggagcaatg

SEQ ID NO: 5508777 - DNA, 25 bp, Homo sapien
aggtccacaaccaacgaatagaaac

SEQ ID NO: 5508778 - DNA, 25 bp, Homo sapien
agagaaagagctaagacccattgct

SEQ ID NO: 5508779 - DNA, 25 bp, Homo sapien
agaaattcctgctgggaacagtggc

SEQ ID NO: 5508780 - DNA, 25 bp, Homo sapien
tcaagctacatcaggagaacatctt

SEQ ID NO: 5508781 - DNA, 25 bp, Homo sapien
tggagcaatgtcagttgccccctgg

SEQ ID NO: 5508782 - DNA, 25 bp, Homo sapien
gaagagcccctttctgaacaggact

SEQ ID NO: 5508783 - DNA, 25 bp, Homo sapien
ggtgtgagattgtccagagtcctat

SEQ ID NO: 5508784 - DNA, 25 bp, Homo sapien
aaagggaggatgataacataataga

SEQ ID NO: 5508785 - DNA, 25 bp, Homo sapien
ctttatccaggggtaaagtgaagag

SEQ ID NO: 5508786 - DNA, 25 bp, Homo sapien
agagcacacataagaagtcaagttc

SEQ ID NO: 5508787 - DNA, 25 bp, Homo sapien
tttaagatgcccaaaggctggttac

SEQ ID NO: 5508788 - DNA, 25 bp, Homo sapien
gcacacttgaattgttgcgctgatc

SEQ ID NO: 5508789 - DNA, 25 bp, Homo sapien
taatggcaacaagtcagtatctgct

SEQ ID NO: 5508790 - DNA, 25 bp, Homo sapien
aagtgaagaggcaaactatcctgtt

SEQ ID NO: 5508791 - DNA, 25 bp, Homo sapien
tcaagaagaaaattacaacaaactc

SEQ ID NO: 5508792 - DNA, 25 bp, Homo sapien
agcaggtgataaaacctagtatctc

SEQ ID NO: 5508793 - DNA, 25 bp, Homo sapien
gtgacaggcagtgaaagtgccttta

SEQ ID NO: 5508794 - DNA, 25 bp, Homo sapien
ccaccagtagtgatcctaacacgtt

SEQ ID NO: 5508795 - DNA, 25 bp, Homo sapien
ttgcgctgatcaacactacaatctt

SEQ ID NO: 5508796 - DNA, 25 bp, Homo sapien
ataataaatgaacgtgctgataaac

SEQ ID NO: 5508797 - DNA, 25 bp, Homo sapien
ctccctagggaactcttaaggcaaa

SEQ ID NO: 5508798 - DNA, 25 bp, Homo sapien
caatatttatgagaactggactttc

SEQ ID NO: 5508799 - DNA, 25 bp, Homo sapien
actcaaactcagataaaatacacat

SEQ ID NO: 5508800 - DNA, 25 bp, Homo sapien
agcacagtaagccaatgtttgatcc

SEQ ID NO: 5508801 - DNA, 25 bp, Homo sapien
ctacacaaaacgaaaagccctggta

SEQ ID NO: 5508802 - DNA, 25 bp, Homo sapien
ttaacagcatcttccagaacattcc

SEQ ID NO: 5508803 - DNA, 25 bp, Homo sapien
gtttgatccatgctgcaaaagctac

SEQ ID NO: 5508804 - DNA, 25 bp, Homo sapien
tcacacattagcacagtaagccaat

SEQ ID NO: 5508805 - DNA, 25 bp, Homo sapien
acaaaatccacaacgcaccctactc

SEQ ID NO: 5508806 - DNA, 25 bp, Homo sapien
aaaatacagtaacaccagattctca

SEQ ID NO: 5508807 - DNA, 25 bp, Homo sapien
tttcagaggttcataagacacagtc

SEQ ID NO: 5508808 - DNA, 25 bp, Homo sapien
ttatgcagataactacagaaagatt

SEQ ID NO: 5508809 - DNA, 25 bp, Homo sapien
cctgggacccatcaaacaaataaac

SEQ ID NO: 5508810 - DNA, 25 bp, Homo sapien
taaatagtagcaatagagttgtttc

SEQ ID NO: 5508811 - DNA, 25 bp, Homo sapien
gaaggcttgtacgtttcagaggttc

SEQ ID NO: 5508812 - DNA, 25 bp, Homo sapien
ccaagaagctacactgaggataatt

SEQ ID NO: 5508813 - DNA, 25 bp, Homo sapien
cacaaattgtcaacccaggagccag

SEQ ID NO: 5508814 - DNA, 25 bp, Homo sapien
gcccatgccgtgcacatagcaggca

SEQ ID NO: 5508815 - DNA, 25 bp, Homo sapien
aagacacagtctcaacaggagtttt

SEQ ID NO: 5508816 - DNA, 25 bp, Homo sapien
tgcccaatacgtaactaccgagatc

SEQ ID NO: 5508817 - DNA, 25 bp, Homo sapien
tcacacatatgggcccatgccgtgc

SEQ ID NO: 5508818 - DNA, 25 bp, Homo sapien
tcctaggggaacgcaattgttttca

SEQ ID NO: 5508819 - DNA, 25 bp, Homo sapien
gcttccttgaactaggggacacgtc

SEQ ID NO: 5508820 - DNA, 25 bp, Homo sapien
gagggaacaagcataccttgaagac

SEQ ID NO: 5508821 - DNA, 25 bp, Homo sapien
cagctgggaacacacatgctatgta

SEQ ID NO: 5508822 - DNA, 25 bp, Homo sapien
tttgatattccacgagctgggaggg

SEQ ID NO: 5508823 - DNA, 25 bp, Homo sapien
tacacatggctcccagatgagcacc

SEQ ID NO: 5508824 - DNA, 25 bp, Homo sapien
cagccgcctgtgacagaatcttcca

SEQ ID NO: 5508825 - DNA, 25 bp, Homo sapien
ggagaccacagcagatacgattctg

SEQ ID NO: 5508826 - DNA, 25 bp, Homo sapien
tctgtggacttgagaaccaaatcta

SEQ ID NO: 5508827 - DNA, 25 bp, Homo sapien
tcatgctaaagatggcgcttccttg

SEQ ID NO: 5508828 - DNA, 25 bp, Homo sapien
agcatctgcccacatcccagccgcc

SEQ ID NO: 5508829 - DNA, 25 bp, Homo sapien
aaactccaagtactgctttcacaag

SEQ ID NO: 5508830 - DNA, 25 bp, Homo sapien
cttgtgaaagcagtacttggagttt

SEQ ID NO: 5508831 - DNA, 25 bp, Homo sapien
aagtccatactaaaggaataagacc

SEQ ID NO: 5508832 - DNA, 25 bp, Homo sapien
ttggagcctctgttccagcagtggg

SEQ ID NO: 5508833 - DNA, 25 bp, Homo sapien
agttacaaggtatatgaataagtac

SEQ ID NO: 5508834 - DNA, 25 bp, Homo sapien
gctgctgcaaatatcacggcctctt

SEQ ID NO: 5508835 - DNA, 25 bp, Homo sapien
ggagacagacagcaaacaaaataaa

SEQ ID NO: 5508836 - DNA, 25 bp, Homo sapien
gaataagacctacatcaggtgggta

SEQ ID NO: 5508837 - DNA, 25 bp, Homo sapien
ggaaaggaaagcttctgcacaccta

SEQ ID NO: 5508838 - DNA, 25 bp, Homo sapien
tagtcacatggttactgggtaggga

SEQ ID NO: 5508839 - DNA, 25 bp, Homo sapien
ctggggatgcagtaatgaataataa

SEQ ID NO: 5508840 - DNA, 25 bp, Homo sapien
agttcataattctagggagctgttc

SEQ ID NO: 5508841 - DNA, 25 bp, Homo sapien
taagagcaatttgaggctgctgcaa

SEQ ID NO: 5508842 - DNA, 25 bp, Homo sapien
agccattgacctgttttcactcagt

SEQ ID NO: 5508843 - DNA, 25 bp, Homo sapien
actgagtgaaaacaggtcaatggct

SEQ ID NO: 5508844 - DNA, 25 bp, Homo sapien
agcagtagggtttaagacaaaacac

SEQ ID NO: 5508845 - DNA, 25 bp, Homo sapien
ctgcagtggctccttcaggatgctc

SEQ ID NO: 5508846 - DNA, 25 bp, Homo sapien
ccagccatgtcttaagagcgggaag

SEQ ID NO: 5508847 - DNA, 25 bp, Homo sapien
gaactacttgtgaagggcaaacagt

SEQ ID NO: 5508848 - DNA, 25 bp, Homo sapien
caagaaagcaaggctatgcaatacc

SEQ ID NO: 5508849 - DNA, 25 bp, Homo sapien
ttccgagtgaaatgtgtccagacag

SEQ ID NO: 5508850 - DNA, 25 bp, Homo sapien
aaaagcagcaaacaggctctatctc

SEQ ID NO: 5508851 - DNA, 25 bp, Homo sapien
gctcaaccctgggctctggaacacc

SEQ ID NO: 5508852 - DNA, 25 bp, Homo sapien
ttcaatgaagactgagctccagcca

SEQ ID NO: 5508853 - DNA, 25 bp, Homo sapien
gaagagcctccttggaacgaactaa

SEQ ID NO: 5508854 - DNA, 25 bp, Homo sapien
gacagcaggagagatctacttatct

SEQ ID NO: 5508855 - DNA, 25 bp, Homo sapien
ggcggccctacccctggaatataca

SEQ ID NO: 5508856 - DNA, 25 bp, Homo sapien
aaattgctttggtgagagtaaggag

SEQ ID NO: 5508857 - DNA, 25 bp, Homo sapien
cctctctgtgtaagaagatgggagc

SEQ ID NO: 5508858 - DNA, 25 bp, Homo sapien
agtaaggaggccatgaggcctcttc

SEQ ID NO: 5508859 - DNA, 25 bp, Homo sapien
cacgaccccatccccgcctccttcc

SEQ ID NO: 5508860 - DNA, 25 bp, Homo sapien
tacaatatgtacactggggaagcag

SEQ ID NO: 5508861 - DNA, 25 bp, Homo sapien
cctctgctaggtatgatacaggggg

SEQ ID NO: 5508862 - DNA, 25 bp, Homo sapien
aaggtggctaagggtctacacattt

SEQ ID NO: 5508863 - DNA, 25 bp, Homo sapien
gcaaaataaacaggagtcgcatcac

SEQ ID NO: 5508864 - DNA, 25 bp, Homo sapien
tcgcctggtctacagttagccccac

SEQ ID NO: 5508865 - DNA, 25 bp, Homo sapien
agaaatttaaggagtcagccctggc

SEQ ID NO: 5508866 - DNA, 25 bp, Homo sapien
tgtatgtgagtcccagacaagcagg

SEQ ID NO: 5508867 - DNA, 25 bp, Homo sapien
acacagaaacacccgtgcgtgtgca

SEQ ID NO: 5508868 - DNA, 25 bp, Homo sapien
acagagggccacatcgctgtccctc

SEQ ID NO: 5508869 - DNA, 25 bp, Homo sapien
tctacgattaacaacaggaactgat

SEQ ID NO: 5508870 - DNA, 25 bp, Homo sapien
ctacacattcaagcaaagccattcc

SEQ ID NO: 5508871 - DNA, 25 bp, Homo sapien
tcccacctacgggcaaaagagaaca

SEQ ID NO: 5508872 - DNA, 25 bp, Homo sapien
ataggaaccagaagctccaaggatt

SEQ ID NO: 5508873 - DNA, 25 bp, Homo sapien
atcttgccttgaaagcgggcagtgg

SEQ ID NO: 5508874 - DNA, 25 bp, Homo sapien
caaaacagaaaaggtcgatcttgcc

SEQ ID NO: 5508875 - DNA, 25 bp, Homo sapien
tcctctagctaggacgcagcaatcc

SEQ ID NO: 5508876 - DNA, 25 bp, Homo sapien
ctgccaaagcaggacacgttattct

SEQ ID NO: 5508877 - DNA, 25 bp, Homo sapien
ggtatcgatatggaggttcttgagt

SEQ ID NO: 5508878 - DNA, 25 bp, Homo sapien
actcaagaacctccatatcgatacc

SEQ ID NO: 5508879 - DNA, 25 bp, Homo sapien
acggcgcccgtgaagggtagtggtg

SEQ ID NO: 5508880 - DNA, 25 bp, Homo sapien
caccactacccttcacgggcgccgt

SEQ ID NO: 5508881 - DNA, 25 bp, Homo sapien
ttgctggatgaaatagtgcaccatc

SEQ ID NO: 5508882 - DNA, 25 bp, Homo sapien
tagccagtaccaataagttaacgtc

SEQ ID NO: 5508883 - DNA, 25 bp, Homo sapien
tgtaccacagaataatgactcccta

SEQ ID NO: 5508884 - DNA, 25 bp, Homo sapien
tcagattaatctgggaggctaattc

SEQ ID NO: 5508885 - DNA, 25 bp, Homo sapien
ctgggttgatggtggcttatcattt

SEQ ID NO: 5508886 - DNA, 25 bp, Homo sapien
tctcagatgaaaagcttgctggatg

SEQ ID NO: 5508887 - DNA, 25 bp, Homo sapien
ctcatacagccaaaccaaccagaag

SEQ ID NO: 5508888 - DNA, 25 bp, Homo sapien
cagatgaaacaagtgtgtccataaa

SEQ ID NO: 5508889 - DNA, 25 bp, Homo sapien
cataaagtaagcatagttcccattc

SEQ ID NO: 5508890 - DNA, 25 bp, Homo sapien
gtgggtggcttactgacttgcctaa

SEQ ID NO: 5508891 - DNA, 25 bp, Homo sapien
tatgagaattgctagatttggggct

SEQ ID NO: 5508892 - DNA, 25 bp, Homo sapien
aaagccactgtacaaatagaggaat

SEQ ID NO: 5508893 - DNA, 25 bp, Homo sapien
atgttcagttgaccacgagtgtgta

SEQ ID NO: 5508894 - DNA, 25 bp, Homo sapien
agacaaaaggcttgagatatctacc

SEQ ID NO: 5508895 - DNA, 25 bp, Homo sapien
atcattctaggtaaagacaaacact

SEQ ID NO: 5508896 - DNA, 25 bp, Homo sapien
gatgtggatgcctttggataggaaa

SEQ ID NO: 5508897 - DNA, 25 bp, Homo sapien
gtacaaatagaggaatgaatcactg

SEQ ID NO: 5508898 - DNA, 25 bp, Homo sapien
atggtttagagctttaagagcctta

SEQ ID NO: 5508899 - DNA, 25 bp, Homo sapien
aacaccagttggaatatagcttttt

SEQ ID NO: 5508900 - DNA, 25 bp, Homo sapien
aataggatagagcaccattgtgtaa

SEQ ID NO: 5508901 - DNA, 25 bp, Homo sapien
gaaatgcaagtgttcagatgcttct

SEQ ID NO: 5508902 - DNA, 25 bp, Homo sapien
tggatttaagaaagaagacatagga

SEQ ID NO: 5508903 - DNA, 25 bp, Homo sapien
tttccctgcaagaggctacttccct

SEQ ID NO: 5508904 - DNA, 25 bp, Homo sapien
actgggtaggcactccctgcctcta

SEQ ID NO: 5508905 - DNA, 25 bp, Homo sapien
gaatgccagtccccggtatgaggaa

SEQ ID NO: 5508906 - DNA, 25 bp, Homo sapien
gcctctaagaccacagccaagctga

SEQ ID NO: 5508907 - DNA, 25 bp, Homo sapien
gtacagaagtacaggcagtcccttc

SEQ ID NO: 5508908 - DNA, 25 bp, Homo sapien
tctttaacaggcacataggagattc

SEQ ID NO: 5508909 - DNA, 25 bp, Homo sapien
ggactgagctctggatgcatccact

SEQ ID NO: 5508910 - DNA, 25 bp, Homo sapien
cactaacaataaaggtagggtggta

SEQ ID NO: 5508911 - DNA, 25 bp, Homo sapien
cagcctgccgagttcttggccctgg

SEQ ID NO: 5508912 - DNA, 25 bp, Homo sapien
gccctgagcaaagtgtaaagggcaa

SEQ ID NO: 5508913 - DNA, 25 bp, Homo sapien
gaagcagtcctgaaccgcataaccc

SEQ ID NO: 5508914 - DNA, 25 bp, Homo sapien
gacacgtttgtcattctgcagcccc

SEQ ID NO: 5508915 - DNA, 25 bp, Homo sapien
tgactggcactccgacccaacagca

SEQ ID NO: 5508916 - DNA, 25 bp, Homo sapien
ctagtgaaatagcaaaagcagtttt

SEQ ID NO: 5508917 - DNA, 25 bp, Homo sapien
atgcaaccttaatggtgaaagcaaa

SEQ ID NO: 5508918 - DNA, 25 bp, Homo sapien
ttacacacagtttgggctgacattt

SEQ ID NO: 5508919 - DNA, 25 bp, Homo sapien
ccgacccaacagcatacacagatct

SEQ ID NO: 5508920 - DNA, 25 bp, Homo sapien
accgaaagagtagtttcaatttcac

SEQ ID NO: 5508921 - DNA, 25 bp, Homo sapien
gaaatcagtacataagtgaggatac

SEQ ID NO: 5508922 - DNA, 25 bp, Homo sapien
attcaataaagggttctaaagcctc

SEQ ID NO: 5508923 - DNA, 25 bp, Homo sapien
tcaaagatagttctagtgaaatagc

SEQ ID NO: 5508924 - DNA, 25 bp, Homo sapien
gtgaggatacacagccaaaatgagc

SEQ ID NO: 5508925 - DNA, 25 bp, Homo sapien
taaaatctaaggatgaaaaactatc

SEQ ID NO: 5508926 - DNA, 25 bp, Homo sapien
agatatgaaaacattgcagggacag

SEQ ID NO: 5508927 - DNA, 25 bp, Homo sapien
aacaaagaaagtatcagtcatatca

SEQ ID NO: 5508928 - DNA, 25 bp, Homo sapien
agcaacgtgtcagttggtgtgaatt

SEQ ID NO: 5508929 - DNA, 25 bp, Homo sapien
aatggttatgtcaagtacagacgtc

SEQ ID NO: 5508930 - DNA, 25 bp, Homo sapien
caagtacagacgtcagcaacgtgtc

SEQ ID NO: 5508931 - DNA, 25 bp, Homo sapien
agggacagctcaagtgccccattct

SEQ ID NO: 5508932 - DNA, 25 bp, Homo sapien
tatagtgggtatttcataggcattc

SEQ ID NO: 5508933 - DNA, 25 bp, Homo sapien
aataggaaaaatgacaacgtaaatc

SEQ ID NO: 5508934 - DNA, 25 bp, Homo sapien
aaggaatgctgttatagtgggtatt

SEQ ID NO: 5508935 - DNA, 25 bp, Homo sapien
agcaccagccaaccgtacaagtcat

SEQ ID NO: 5508936 - DNA, 25 bp, Homo sapien
agttagacatacatcgcaccttgcc

SEQ ID NO: 5508937 - DNA, 25 bp, Homo sapien
gtctgtgaagactgattcccacaac

SEQ ID NO: 5508938 - DNA, 25 bp, Homo sapien
gcactgagcacagagctcagcaata

SEQ ID NO: 5508939 - DNA, 25 bp, Homo sapien
cagaacaccaagggctcccaatgag

SEQ ID NO: 5508940 - DNA, 25 bp, Homo sapien
cctggctcacgtctgtctgtgaaga

SEQ ID NO: 5508941 - DNA, 25 bp, Homo sapien
caataagttagacatacatcgcacc

SEQ ID NO: 5508942 - DNA, 25 bp, Homo sapien
gagcacagagctcagcaataaccag

SEQ ID NO: 5508943 - DNA, 25 bp, Homo sapien
gcacagagctcagcaataaccaggg

SEQ ID NO: 5508944 - DNA, 25 bp, Homo sapien
gctgcctgccatcaataagttagac

SEQ ID NO: 5508945 - DNA, 25 bp, Homo sapien
gaacaccaagggctcccaatgaggg

SEQ ID NO: 5508946 - DNA, 25 bp, Homo sapien
acatacatcgcaccttgccgtcctc

SEQ ID NO: 5508947 - DNA, 25 bp, Homo sapien
gggccttgggcgttgcgccccgacg

SEQ ID NO: 5508948 - DNA, 25 bp, Homo sapien
cgtcggggcgcaacgcccaaggccc

SEQ ID NO: 5508949 - DNA, 25 bp, Homo sapien
tcagaatacagacctcggccgaatg

SEQ ID NO: 5508950 - DNA, 25 bp, Homo sapien
aagcaggaagttcagcgtcatttat

SEQ ID NO: 5508951 - DNA, 25 bp, Homo sapien
ggagccctgacattcgcctggtgtc

SEQ ID NO: 5508952 - DNA, 25 bp, Homo sapien
ctttgaaaaggcaaaacgctcaagc

SEQ ID NO: 5508953 - DNA, 25 bp, Homo sapien
ggtggggggcaattattatattctg

SEQ ID NO: 5508954 - DNA, 25 bp, Homo sapien
tatgtatgctaattggaagctcccc

SEQ ID NO: 5508955 - DNA, 25 bp, Homo sapien
aacgctcaagccactgaaaaacagt

SEQ ID NO: 5508956 - DNA, 25 bp, Homo sapien
ggtgtcagttcagcatcagggttga

SEQ ID NO: 5508957 - DNA, 25 bp, Homo sapien
ccctttggcactagtggtttgggag

SEQ ID NO: 5508958 - DNA, 25 bp, Homo sapien
agcaaaatataagcaggtcttggcc

SEQ ID NO: 5508959 - DNA, 25 bp, Homo sapien
cagtgcaacagaatccacgtgtttc

SEQ ID NO: 5508960 - DNA, 25 bp, Homo sapien
taaatgtacaaaatagttgaaatta

SEQ ID NO: 5508961 - DNA, 25 bp, Homo sapien
taactgacttcttaagagacgagga

SEQ ID NO: 5508962 - DNA, 25 bp, Homo sapien
acttcttaagagacgaggaaatgtc

SEQ ID NO: 5508963 - DNA, 25 bp, Homo sapien
gagacgaggaaatgtcaaaaatagc

SEQ ID NO: 5508964 - DNA, 25 bp, Homo sapien
tccaaaagcttaaaatcagatatct

SEQ ID NO: 5508965 - DNA, 25 bp, Homo sapien
tgatagcatttggaaaaaaatagca

SEQ ID NO: 5508966 - DNA, 25 bp, Homo sapien
cagtaatctatgaaacaggaatata

SEQ ID NO: 5508967 - DNA, 25 bp, Homo sapien
tgtcaaaaatagcaaatcaggcatt

SEQ ID NO: 5508968 - DNA, 25 bp, Homo sapien
gtatggagagttctgtcatttttga

SEQ ID NO: 5508969 - DNA, 25 bp, Homo sapien
gtgtcacaattaagtatggagagtt

SEQ ID NO: 5508970 - DNA, 25 bp, Homo sapien
agtccacaaacactgatagcatttg

SEQ ID NO: 5508971 - DNA, 25 bp, Homo sapien
cgtctcgtctcactcaaaccgcctc

SEQ ID NO: 5508972 - DNA, 25 bp, Homo sapien
cgtctcactcaaaccgcctcgaacc

SEQ ID NO: 5508973 - DNA, 25 bp, Homo sapien
tcactcaaaccgcctcgaaccccac

SEQ ID NO: 5508974 - DNA, 25 bp, Homo sapien
gcctcgaaccccacaccgacgagct

SEQ ID NO: 5508975 - DNA, 25 bp, Homo sapien
gcaccccacgccttcccacacgcac

SEQ ID NO: 5508976 - DNA, 25 bp, Homo sapien
gtctcgtctcgtctcactcaaaccg

SEQ ID NO: 5508977 - DNA, 25 bp, Homo sapien
gtccgcaccccacgccttcccacac

SEQ ID NO: 5508978 - DNA, 25 bp, Homo sapien
cgccttcccacacgcaccgccggcg

SEQ ID NO: 5508979 - DNA, 25 bp, Homo sapien
ccgcctcgaaccccacaccgacgag

SEQ ID NO: 5508980 - DNA, 25 bp, Homo sapien
gaacgacacaccaccgttcggcctc

SEQ ID NO: 5508981 - DNA, 25 bp, Homo sapien
gacacaccaccgttcggcctcgggc

SEQ ID NO: 5508982 - DNA, 25 bp, Homo sapien
tttctactccgaagaggagcaggag

SEQ ID NO: 5508983 - DNA, 25 bp, Homo sapien
aactagcaccaaatgcttgggcaaa

SEQ ID NO: 5508984 - DNA, 25 bp, Homo sapien
ataaacaagagattagaaactaaac

SEQ ID NO: 5508985 - DNA, 25 bp, Homo sapien
ttgcggtcacaaagagaaatcatca

SEQ ID NO: 5508986 - DNA, 25 bp, Homo sapien
ggaaggaaattctagagtcgttctg

SEQ ID NO: 5508987 - DNA, 25 bp, Homo sapien
gggtcaaaagagtatcaggttagtc

SEQ ID NO: 5508988 - DNA, 25 bp, Homo sapien
ggggtctgcagctgtttagtgttga

SEQ ID NO: 5508989 - DNA, 25 bp, Homo sapien
cttcagtttcctgggtgggaatgag

SEQ ID NO: 5508990 - DNA, 25 bp, Homo sapien
tagggagggattatggtgcctccct

SEQ ID NO: 5508991 - DNA, 25 bp, Homo sapien
caggctggatcctgagcctaattcc

SEQ ID NO: 5508992 - DNA, 25 bp, Homo sapien
cttggcatgtgtgaaagattcaggg

SEQ ID NO: 5508993 - DNA, 25 bp, Homo sapien
aaggcacgcctctcagatcgctaga

SEQ ID NO: 5508994 - DNA, 25 bp, Homo sapien
cgcctccgaagtcaacccacacacg

SEQ ID NO: 5508995 - DNA, 25 bp, Homo sapien
ccttccttccgaggcagagcgcctc

SEQ ID NO: 5508996 - DNA, 25 bp, Homo sapien
ccccaaggcacgcctctcagatcgc

SEQ ID NO: 5508997 - DNA, 25 bp, Homo sapien
ggccacctcgagcgttcgcgttcag

SEQ ID NO: 5508998 - DNA, 25 bp, Homo sapien
gagaaggcttttctcaccgagggtg

SEQ ID NO: 5508999 - DNA, 25 bp, Homo sapien
gaacccaccgcgatcgctcacacgg

SEQ ID NO: 5509000 - DNA, 25 bp, Homo sapien
ccacctcgagcgttcgcgttcaggg

SEQ ID NO: 5509001 - DNA, 25 bp, Homo sapien
tctcagatcgctagagaaggctttt

SEQ ID NO: 5509002 - DNA, 25 bp, Homo sapien
gtacccccaaggcacgcctctcaga

SEQ ID NO: 5509003 - DNA, 25 bp, Homo sapien
cgcctctcagatcgctagagaaggc

SEQ ID NO: 5509004 - DNA, 25 bp, Homo sapien
aatctagctgagctgctacaccttg

SEQ ID NO: 5509005 - DNA, 25 bp, Homo sapien
aaggacaagcttcatcccaagatgt

SEQ ID NO: 5509006 - DNA, 25 bp, Homo sapien
agaaaaagaataattgagataggta

SEQ ID NO: 5509007 - DNA, 25 bp, Homo sapien
ttcgtgcacagtaataaatctagct

SEQ ID NO: 5509008 - DNA, 25 bp, Homo sapien
aaccatcaccataaggacaagcttc

SEQ ID NO: 5509009 - DNA, 25 bp, Homo sapien
tcccctccccccacatacagattac

SEQ ID NO: 5509010 - DNA, 25 bp, Homo sapien
tgaaatgtagatatgaaagctatac

SEQ ID NO: 5509011 - DNA, 25 bp, Homo sapien
gagataggtatttactttcgtgcac

SEQ ID NO: 5509012 - DNA, 25 bp, Homo sapien
cagtttcctaacagatcccctcccc

SEQ ID NO: 5509013 - DNA, 25 bp, Homo sapien
tggatcgaatccagtcaatctttgt

SEQ ID NO: 5509014 - DNA, 25 bp, Homo sapien
tgttagttccagaatagcttcaagt

SEQ ID NO: 5509015 - DNA, 25 bp, Homo sapien
agcccaacttgccatgaagagattt

SEQ ID NO: 5509016 - DNA, 25 bp, Homo sapien
ttgtagatacaaagcgaaaaaataa

SEQ ID NO: 5509017 - DNA, 25 bp, Homo sapien
tcagacaggtcctatgttcagcccc

SEQ ID NO: 5509018 - DNA, 25 bp, Homo sapien
agctcactcagtttcagacaggtcc

SEQ ID NO: 5509019 - DNA, 25 bp, Homo sapien
atggctacaaaactggtaaacaaac

SEQ ID NO: 5509020 - DNA, 25 bp, Homo sapien
tgagtgcaaagtccattagcccaac

SEQ ID NO: 5509021 - DNA, 25 bp, Homo sapien
caagagtaactgcaagaacatataa

SEQ ID NO: 5509022 - DNA, 25 bp, Homo sapien
gacagggccactggcaagacttttt

SEQ ID NO: 5509023 - DNA, 25 bp, Homo sapien
gcccctaaacgaatggcacaatgcc

SEQ ID NO: 5509024 - DNA, 25 bp, Homo sapien
aaacccaaatgcatctagctcactc

SEQ ID NO: 5509025 - DNA, 25 bp, Homo sapien
aagatgcagtagtctcaaagcttaa

SEQ ID NO: 5509026 - DNA, 25 bp, Homo sapien
gagggaaagtcccatgcacttccta

SEQ ID NO: 5509027 - DNA, 25 bp, Homo sapien
ctcccacagatcacatacaccttgc

SEQ ID NO: 5509028 - DNA, 25 bp, Homo sapien
agagtttaaacacatgggaatgttc

SEQ ID NO: 5509029 - DNA, 25 bp, Homo sapien
acacaagtaatacggagaagttttc

SEQ ID NO: 5509030 - DNA, 25 bp, Homo sapien
tctgcttgaatgtaaggctatactt

SEQ ID NO: 5509031 - DNA, 25 bp, Homo sapien
tacaaagctatctaaggcaaaaata

SEQ ID NO: 5509032 - DNA, 25 bp, Homo sapien
ttaaatggcataactcccacagatc

SEQ ID NO: 5509033 - DNA, 25 bp, Homo sapien
aatgcatctaagaagtgaagagttt

SEQ ID NO: 5509034 - DNA, 25 bp, Homo sapien
ctaatggtacagtaagagctggagt

SEQ ID NO: 5509035 - DNA, 25 bp, Homo sapien
acaccttgccatattgactcagttc

SEQ ID NO: 5509036 - DNA, 25 bp, Homo sapien
tcaaaagtgttgaactgtctggaga

SEQ ID NO: 5509037 - DNA, 25 bp, Homo sapien
accaatcagctaagtcagcctcctc

SEQ ID NO: 5509038 - DNA, 25 bp, Homo sapien
atgttgagtatgaaacttgagcttc

SEQ ID NO: 5509039 - DNA, 25 bp, Homo sapien
ctcaaagtaaaactagccgtgttgc

SEQ ID NO: 5509040 - DNA, 25 bp, Homo sapien
gtcacacagaagattatgttgagta

SEQ ID NO: 5509041 - DNA, 25 bp, Homo sapien
cctggctacagcaatgttgacttac

SEQ ID NO: 5509042 - DNA, 25 bp, Homo sapien
atagtgaatttgccctgagagtatc

SEQ ID NO: 5509043 - DNA, 25 bp, Homo sapien
atgcatgaagaaataggcacagaga

SEQ ID NO: 5509044 - DNA, 25 bp, Homo sapien
caaagggaaattctggctcttggcc

SEQ ID NO: 5509045 - DNA, 25 bp, Homo sapien
cctttgaggcaattagaaccagatc

SEQ ID NO: 5509046 - DNA, 25 bp, Homo sapien
gtgcacagtgacatccattccgcca

SEQ ID NO: 5509047 - DNA, 25 bp, Homo sapien
agagaggctacatggcttgtccttt

SEQ ID NO: 5509048 - DNA, 25 bp, Homo sapien
aatctttgacaccagaagtggacag

SEQ ID NO: 5509049 - DNA, 25 bp, Homo sapien
atccaaaagagccaattatagcctg

SEQ ID NO: 5509050 - DNA, 25 bp, Homo sapien
aggtacgagggcaattcttcccaca

SEQ ID NO: 5509051 - DNA, 25 bp, Homo sapien
caacccgacgtgtttcatggaatac

SEQ ID NO: 5509052 - DNA, 25 bp, Homo sapien
ttcaaaagcaagaaagttgcctttc

SEQ ID NO: 5509053 - DNA, 25 bp, Homo sapien
tggaatacaaacatggggcttctac

SEQ ID NO: 5509054 - DNA, 25 bp, Homo sapien
tgatgagtgccagcttataaatgtc

SEQ ID NO: 5509055 - DNA, 25 bp, Homo sapien
tcaaggaagcccgtttcaagcacta

SEQ ID NO: 5509056 - DNA, 25 bp, Homo sapien
atccacacgtcccagagaaaggaga

SEQ ID NO: 5509057 - DNA, 25 bp, Homo sapien
aaaaaatgatagggcctggagaatt

SEQ ID NO: 5509058 - DNA, 25 bp, Homo sapien
ataataaatccaggaggtacgaggg

SEQ ID NO: 5509059 - DNA, 25 bp, Homo sapien
ttgtactactgcagctgaccaatcc

SEQ ID NO: 5509060 - DNA, 25 bp, Homo sapien
aaagccagtttacactcagcatgtg

SEQ ID NO: 5509061 - DNA, 25 bp, Homo sapien
cttcaaaggctgtatgtgagtatat

SEQ ID NO: 5509062 - DNA, 25 bp, Homo sapien
atataaaatccccaggtgaaagtcc

SEQ ID NO: 5509063 - DNA, 25 bp, Homo sapien
gtgagtatatgagggaaaactttcc

SEQ ID NO: 5509064 - DNA, 25 bp, Homo sapien
gctagtgctcagaacatctaggttc

SEQ ID NO: 5509065 - DNA, 25 bp, Homo sapien
atcctaggcaaatgagagcttgttt

SEQ ID NO: 5509066 - DNA, 25 bp, Homo sapien
gcagctgaccaatccaaagccagtt

SEQ ID NO: 5509067 - DNA, 25 bp, Homo sapien
gagccagagcccttcaaaggctgta

SEQ ID NO: 5509068 - DNA, 25 bp, Homo sapien
ttcatctcgctcaaggccatcaacc

SEQ ID NO: 5509069 - DNA, 25 bp, Homo sapien
gctcaaggccatcaaccggtcagag

SEQ ID NO: 5509070 - DNA, 25 bp, Homo sapien
gtaaacacttggatataaggcaaac

SEQ ID NO: 5509071 - DNA, 25 bp, Homo sapien
tagtatggataccaagacagcatga

SEQ ID NO: 5509072 - DNA, 25 bp, Homo sapien
ctgaaagaatgtgacctttgtgctc

SEQ ID NO: 5509073 - DNA, 25 bp, Homo sapien
gtcatgaatgatatggaaaagttgc

SEQ ID NO: 5509074 - DNA, 25 bp, Homo sapien
accaaagccctgtgtgtaagtagtc

SEQ ID NO: 5509075 - DNA, 25 bp, Homo sapien
gacggttaggtcatggatacaagta

SEQ ID NO: 5509076 - DNA, 25 bp, Homo sapien
atactagagaagaggacttttgcct

SEQ ID NO: 5509077 - DNA, 25 bp, Homo sapien
tcaaactgtggttcaggcactccag

SEQ ID NO: 5509078 - DNA, 25 bp, Homo sapien
gtagtcactgaagctaaccaggtag

SEQ ID NO: 5509079 - DNA, 25 bp, Homo sapien
atgttcaggcttaaaagatagcatt

SEQ ID NO: 5509080 - DNA, 25 bp, Homo sapien
gtggtggaaacaagtaatggaacca

SEQ ID NO: 5509081 - DNA, 25 bp, Homo sapien
aaatacatgtcaagtactgcaaact

SEQ ID NO: 5509082 - DNA, 25 bp, Homo sapien
tgtgaacagccaaagctaatatctc

SEQ ID NO: 5509083 - DNA, 25 bp, Homo sapien
ttacatgatgggtgtacaccatctt

SEQ ID NO: 5509084 - DNA, 25 bp, Homo sapien
gctattcactatcatcacaaccctc

SEQ ID NO: 5509085 - DNA, 25 bp, Homo sapien
tacagcaaaaacacacagaattcac

SEQ ID NO: 5509086 - DNA, 25 bp, Homo sapien
caatcgaacaatagatttgcaaaga

SEQ ID NO: 5509087 - DNA, 25 bp, Homo sapien
gagatggtgcctgctttttacatga

SEQ ID NO: 5509088 - DNA, 25 bp, Homo sapien
taaatagaagctgagtatatgcctt

SEQ ID NO: 5509089 - DNA, 25 bp, Homo sapien
tacagacgtaaaaatattcacacta

SEQ ID NO: 5509090 - DNA, 25 bp, Homo sapien
cacactagagcttcacaatcggttg

SEQ ID NO: 5509091 - DNA, 25 bp, Homo sapien
tgccctccccccatatacaggcctt

SEQ ID NO: 5509092 - DNA, 25 bp, Homo sapien
atactaatagaacgcaagtgggtgt

SEQ ID NO: 5509093 - DNA, 25 bp, Homo sapien
agctgaatggacaccaagctaggca

SEQ ID NO: 5509094 - DNA, 25 bp, Homo sapien
gatgcacaaggaaagataaagctta

SEQ ID NO: 5509095 - DNA, 25 bp, Homo sapien
aaggcacaattctactaaatagttc

SEQ ID NO: 5509096 - DNA, 25 bp, Homo sapien
gggctggttgctgcttatggccacc

SEQ ID NO: 5509097 - DNA, 25 bp, Homo sapien
aaataaatacaggattgggtcatgt

SEQ ID NO: 5509098 - DNA, 25 bp, Homo sapien
tatggccacctcatagagagttccc

SEQ ID NO: 5509099 - DNA, 25 bp, Homo sapien
caaagatatttcttggtcaggatgc

SEQ ID NO: 5509100 - DNA, 25 bp, Homo sapien
ggttacaaatgtaatgacaagtttg

SEQ ID NO: 5509101 - DNA, 25 bp, Homo sapien
aagctaggcacatagtgaaaaatcc

SEQ ID NO: 5509102 - DNA, 25 bp, Homo sapien
ttgggtcatgtaatataaaatagtc

SEQ ID NO: 5509103 - DNA, 25 bp, Homo sapien
atagtgcaaatgaatctgatacctc

SEQ ID NO: 5509104 - DNA, 25 bp, Homo sapien
acaacttggattcataagaaccttc

SEQ ID NO: 5509105 - DNA, 25 bp, Homo sapien
aaatggtgagaggtcatacacttac

SEQ ID NO: 5509106 - DNA, 25 bp, Homo sapien
taactgtagataaagtccaaccttc

SEQ ID NO: 5509107 - DNA, 25 bp, Homo sapien
aacttggaacatttgaaagcttttc

SEQ ID NO: 5509108 - DNA, 25 bp, Homo sapien
aagacttggtttgaaaatgtcgtac

SEQ ID NO: 5509109 - DNA, 25 bp, Homo sapien
aatgtccttgaaaagttaagacttg

SEQ ID NO: 5509110 - DNA, 25 bp, Homo sapien
caacaagctgatctggacagcagtc

SEQ ID NO: 5509111 - DNA, 25 bp, Homo sapien
ctctcacccagagctgttgctgtaa

SEQ ID NO: 5509112 - DNA, 25 bp, Homo sapien
acaatggggatgtatcagatctact

SEQ ID NO: 5509113 - DNA, 25 bp, Homo sapien
aaatgtcgtacatacaatggggatg

SEQ ID NO: 5509114 - DNA, 25 bp, Homo sapien
tagtgttaagtgaaagtaatgcatt

SEQ ID NO: 5509115 - DNA, 25 bp, Homo sapien
acaaatggaataatgtaacaaataa

SEQ ID NO: 5509116 - DNA, 25 bp, Homo sapien
aacctctgtacaaagcagcaactgc

SEQ ID NO: 5509117 - DNA, 25 bp, Homo sapien
ttgtgtgacaggtatattacagtat

SEQ ID NO: 5509118 - DNA, 25 bp, Homo sapien
agcagcaactgcaatactcaaggtt

SEQ ID NO: 5509119 - DNA, 25 bp, Homo sapien
gcttcaacactagctagcatctcta

SEQ ID NO: 5509120 - DNA, 25 bp, Homo sapien
aatcatccaccagagcttaaatctt

SEQ ID NO: 5509121 - DNA, 25 bp, Homo sapien
aatgaactgtcaaatgccatggcat

SEQ ID NO: 5509122 - DNA, 25 bp, Homo sapien
agaatgcatataaaaagaatgtaaa

SEQ ID NO: 5509123 - DNA, 25 bp, Homo sapien
cagacttacttagcagataatcatc

SEQ ID NO: 5509124 - DNA, 25 bp, Homo sapien
cgacctggtgtctagtgttaagtga

SEQ ID NO: 5509125 - DNA, 25 bp, Homo sapien
ggtcatagtattatactgtaggacc

SEQ ID NO: 5509126 - DNA, 25 bp, Homo sapien
ggtcctacagtataatactatgacc

SEQ ID NO: 5509127 - DNA, 25 bp, Homo sapien
gtggagtgagccacgctaccactaa

SEQ ID NO: 5509128 - DNA, 25 bp, Homo sapien
ccagagaaacgcactcccgtcatct

SEQ ID NO: 5509129 - DNA, 25 bp, Homo sapien
cccgcagagtgtacacgcatcaggg

SEQ ID NO: 5509130 - DNA, 25 bp, Homo sapien
agtcaacacagcttcgcccccaacc

SEQ ID NO: 5509131 - DNA, 25 bp, Homo sapien
cattcccccaaggtaggtgtggtgt

SEQ ID NO: 5509132 - DNA, 25 bp, Homo sapien
ccacagcagttaacgcgaagtgaac

SEQ ID NO: 5509133 - DNA, 25 bp, Homo sapien
tggtacgaaatcacacaaatgaaac

SEQ ID NO: 5509134 - DNA, 25 bp, Homo sapien
cacaagagctcctgcgaaagcagag

SEQ ID NO: 5509135 - DNA, 25 bp, Homo sapien
cactgaactcaagcacaagagctcc

SEQ ID NO: 5509136 - DNA, 25 bp, Homo sapien
gggacgccggcatctttgaatcgcc

SEQ ID NO: 5509137 - DNA, 25 bp, Homo sapien
gatggagatcaaacccagagaaacg

SEQ ID NO: 5509138 - DNA, 25 bp, Homo sapien
aaaatgattgtaacgttgaaacggc

SEQ ID NO: 5509139 - DNA, 25 bp, Homo sapien
acgttgaaacggcacttagtttaca

SEQ ID NO: 5509140 - DNA, 25 bp, Homo sapien
aacactataggctcagaacagattt

SEQ ID NO: 5509141 - DNA, 25 bp, Homo sapien
gtgtgaccatgtaataaaggccagt

SEQ ID NO: 5509142 - DNA, 25 bp, Homo sapien
aatgtgaagttctgatattgtatac

SEQ ID NO: 5509143 - DNA, 25 bp, Homo sapien
tcacaaagcaaacactataggctca

SEQ ID NO: 5509144 - DNA, 25 bp, Homo sapien
tgtaaaatactaatagccagatact

SEQ ID NO: 5509145 - DNA, 25 bp, Homo sapien
aggctagcaaaaaggtactcaatac

SEQ ID NO: 5509146 - DNA, 25 bp, Homo sapien
tgtagtcaccaagaactatggttcc

SEQ ID NO: 5509147 - DNA, 25 bp, Homo sapien
taactgcaactttatgtgtgaccat

SEQ ID NO: 5509148 - DNA, 25 bp, Homo sapien
aacaatcaggctagcaaaaaggtac

SEQ ID NO: 5509149 - DNA, 25 bp, Homo sapien
tgagtcataagttaaggtgaaagac

SEQ ID NO: 5509150 - DNA, 25 bp, Homo sapien
ttcaaggaggtaatacatagcccaa

SEQ ID NO: 5509151 - DNA, 25 bp, Homo sapien
gtgccttagtagcagccagtgtgtc

SEQ ID NO: 5509152 - DNA, 25 bp, Homo sapien
gcttacatgaaggccaggtcagtag

SEQ ID NO: 5509153 - DNA, 25 bp, Homo sapien
gtagacagatggcccaacttgatac

SEQ ID NO: 5509154 - DNA, 25 bp, Homo sapien
ccaccaccagctacagaggctagtg

SEQ ID NO: 5509155 - DNA, 25 bp, Homo sapien
agacaacacagtcttggaggagagt

SEQ ID NO: 5509156 - DNA, 25 bp, Homo sapien
tattcctgtgagcctagagtgggca

SEQ ID NO: 5509157 - DNA, 25 bp, Homo sapien
gagggggttttcacggtacatgata

SEQ ID NO: 5509158 - DNA, 25 bp, Homo sapien
atactccactgactgagaaagggct

SEQ ID NO: 5509159 - DNA, 25 bp, Homo sapien
tactcttggtgagaaaagacaacac

SEQ ID NO: 5509160 - DNA, 25 bp, Homo sapien
gcagtgctgtgtatggaagttttgt

SEQ ID NO: 5509161 - DNA, 25 bp, Homo sapien
tttactgggcagtgctgtgtatgga

SEQ ID NO: 5509162 - DNA, 25 bp, Homo sapien
cttgaagatgattgtctggttatac

SEQ ID NO: 5509163 - DNA, 25 bp, Homo sapien
gctatacctagcctgtgggactcca

SEQ ID NO: 5509164 - DNA, 25 bp, Homo sapien
ccaatgcttgtgagcaagaaggatc

SEQ ID NO: 5509165 - DNA, 25 bp, Homo sapien
ctctgagtcctaaagtggaggattc

SEQ ID NO: 5509166 - DNA, 25 bp, Homo sapien
gcataaccattgccagcagtgaact

SEQ ID NO: 5509167 - DNA, 25 bp, Homo sapien
gacaccatattaaagacagcaaaca

SEQ ID NO: 5509168 - DNA, 25 bp, Homo sapien
tttttaaaagcgatgtcacagtttg

SEQ ID NO: 5509169 - DNA, 25 bp, Homo sapien
ttgtggttgacgtgctttaactacc

SEQ ID NO: 5509170 - DNA, 25 bp, Homo sapien
tcaaaggaccaagtaacttgacacc

SEQ ID NO: 5509171 - DNA, 25 bp, Homo sapien
agtccaccacctgaagcctccagta

SEQ ID NO: 5509172 - DNA, 25 bp, Homo sapien
tactggaggcttcaggtggtggact

SEQ ID NO: 5509173 - DNA, 25 bp, Homo sapien
cctttcaagaaaggtagcttggtga

SEQ ID NO: 5509174 - DNA, 25 bp, Homo sapien
acctttgagtctcagttgcctcacc

SEQ ID NO: 5509175 - DNA, 25 bp, Homo sapien
tgaagggctggctatatatgcattg

SEQ ID NO: 5509176 - DNA, 25 bp, Homo sapien
atttaatatgtagtgaaagttatgg

SEQ ID NO: 5509177 - DNA, 25 bp, Homo sapien
tatatgcattgatgattgtcctatt

SEQ ID NO: 5509178 - DNA, 25 bp, Homo sapien
tcccagtcagggctctgctactaat

SEQ ID NO: 5509179 - DNA, 25 bp, Homo sapien
agatatgaagggctggctatatatg

SEQ ID NO: 5509180 - DNA, 25 bp, Homo sapien
aacataaacatttggacctttcaag

SEQ ID NO: 5509181 - DNA, 25 bp, Homo sapien
cttcaaactatgtcccagtcagggc

SEQ ID NO: 5509182 - DNA, 25 bp, Homo sapien
caagaaaggtagcttggtgaagttt

SEQ ID NO: 5509183 - DNA, 25 bp, Homo sapien
agtggaaagagtagttgaaaacata

SEQ ID NO: 5509184 - DNA, 25 bp, Homo sapien
tataactctgttatgctgaggaaga

SEQ ID NO: 5509185 - DNA, 25 bp, Homo sapien
gggaaaaagccaattgcttctctta

SEQ ID NO: 5509186 - DNA, 25 bp, Homo sapien
tgtatgagtcaaactgaaaatgatt

SEQ ID NO: 5509187 - DNA, 25 bp, Homo sapien
tctgttatgctgaggaagaaattca

SEQ ID NO: 5509188 - DNA, 25 bp, Homo sapien
gaactggatactctctaaggtcact

SEQ ID NO: 5509189 - DNA, 25 bp, Homo sapien
aatgaaagaactggatactctctaa

SEQ ID NO: 5509190 - DNA, 25 bp, Homo sapien
ttctcttagaaagctcaactaaatt

SEQ ID NO: 5509191 - DNA, 25 bp, Homo sapien
tccagccctgtcattctataactct

SEQ ID NO: 5509192 - DNA, 25 bp, Homo sapien
tcacattgtgttaactgtatgagtc

SEQ ID NO: 5509193 - DNA, 25 bp, Homo sapien
caactaaatttgagaagaataatct

SEQ ID NO: 5509194 - DNA, 25 bp, Homo sapien
aaggtcacttccagccctgtcattc

SEQ ID NO: 5509195 - DNA, 25 bp, Homo sapien
ataatcaccagcaacacccgggaca

SEQ ID NO: 5509196 - DNA, 25 bp, Homo sapien
tgggctttggcgtctttggccagtc

SEQ ID NO: 5509197 - DNA, 25 bp, Homo sapien
tccagtgggggacccctcttctcca

SEQ ID NO: 5509198 - DNA, 25 bp, Homo sapien
cagcattcccatcacggtgctccag

SEQ ID NO: 5509199 - DNA, 25 bp, Homo sapien
cacctacccccacctgaacttcagc

SEQ ID NO: 5509200 - DNA, 25 bp, Homo sapien
tgctgcagaccacgtgtgctgtgca

SEQ ID NO: 5509201 - DNA, 25 bp, Homo sapien
ggggccgtgtggtatttgccactca

SEQ ID NO: 5509202 - DNA, 25 bp, Homo sapien
ttctccaaccactcaggaaacctcc

SEQ ID NO: 5509203 - DNA, 25 bp, Homo sapien
cagcaacacccgggacaataatacg

SEQ ID NO: 5509204 - DNA, 25 bp, Homo sapien
tgaatggcacgcccgtaatgctgca

SEQ ID NO: 5509205 - DNA, 25 bp, Homo sapien
catcctttcggctgtggtgcaggtg

SEQ ID NO: 5509206 - DNA, 25 bp, Homo sapien
acccaagtttggtgaccttgcttta

SEQ ID NO: 5509207 - DNA, 25 bp, Homo sapien
tgcaacattcaagagggcttgggga

SEQ ID NO: 5509208 - DNA, 25 bp, Homo sapien
aaggagaccgaggtgtgatatttaa

SEQ ID NO: 5509209 - DNA, 25 bp, Homo sapien
gacgtcagagccatgagtaacaata

SEQ ID NO: 5509210 - DNA, 25 bp, Homo sapien
gagtggaatcctgatgtaccccttc

SEQ ID NO: 5509211 - DNA, 25 bp, Homo sapien
ccttgctttaggtacctgggctgct

SEQ ID NO: 5509212 - DNA, 25 bp, Homo sapien
taacagccagtgctgcgtatggcca

SEQ ID NO: 5509213 - DNA, 25 bp, Homo sapien
taacaataacgaaccagggctatga

SEQ ID NO: 5509214 - DNA, 25 bp, Homo sapien
gagccatgagtaacaataacgaacc

SEQ ID NO: 5509215 - DNA, 25 bp, Homo sapien
agtgctgcgtatggccatcagcaga

SEQ ID NO: 5509216 - DNA, 25 bp, Homo sapien
cttccccatcttaacagccagtgct

SEQ ID NO: 5509217 - DNA, 25 bp, Homo sapien
ttccccaacactagcctgatggagt

SEQ ID NO: 5509218 - DNA, 25 bp, Homo sapien
ctttggaattcacatggaaggctgc

SEQ ID NO: 5509219 - DNA, 25 bp, Homo sapien
atggagtcctgtatccgcaccgtgc

SEQ ID NO: 5509220 - DNA, 25 bp, Homo sapien
ataagcatccgcacagaatatattc

SEQ ID NO: 5509221 - DNA, 25 bp, Homo sapien
gcaccgtgccgtcaaactggctggt

SEQ ID NO: 5509222 - DNA, 25 bp, Homo sapien
aaagcaatggagagtcagctctccc

SEQ ID NO: 5509223 - DNA, 25 bp, Homo sapien
ttctcagagaaacacacaagtaacc

SEQ ID NO: 5509224 - DNA, 25 bp, Homo sapien
gcaaaaactgcataacctgaaccct

SEQ ID NO: 5509225 - DNA, 25 bp, Homo sapien
gtgatggcaactgaagtttaaaccc

SEQ ID NO: 5509226 - DNA, 25 bp, Homo sapien
acctgaaccctgctgtgatggcaac

SEQ ID NO: 5509227 - DNA, 25 bp, Homo sapien
tgcctatcagccagtgttgaaacag

SEQ ID NO: 5509228 - DNA, 25 bp, Homo sapien
ggctctaacagtacaggacaaatgc

SEQ ID NO: 5509229 - DNA, 25 bp, Homo sapien
gcagcatccccgcctcccagtcatt

SEQ ID NO: 5509230 - DNA, 25 bp, Homo sapien
tctgggaaagatgacataaactgga

SEQ ID NO: 5509231 - DNA, 25 bp, Homo sapien
caatcaaaagtggttcaagctaaga

SEQ ID NO: 5509232 - DNA, 25 bp, Homo sapien
ttcattaaggttcaccaggacacag

SEQ ID NO: 5509233 - DNA, 25 bp, Homo sapien
aatctacaaaggaccagtaaggcac

SEQ ID NO: 5509234 - DNA, 25 bp, Homo sapien
tgttgtttaagaaattgagagggga

SEQ ID NO: 5509235 - DNA, 25 bp, Homo sapien
cactgtgcctaagacggccccttca

SEQ ID NO: 5509236 - DNA, 25 bp, Homo sapien
caagctaagaatatctagaacagat

SEQ ID NO: 5509237 - DNA, 25 bp, Homo sapien
atgcagacataggtgtgaaaaattc

SEQ ID NO: 5509238 - DNA, 25 bp, Homo sapien
tacagtaataatgggacaacaccta

SEQ ID NO: 5509239 - DNA, 25 bp, Homo sapien
tgaccagaaacccagtgatcagagg

SEQ ID NO: 5509240 - DNA, 25 bp, Homo sapien
cctctgatcactgggtttctggtca

SEQ ID NO: 5509241 - DNA, 25 bp, Homo sapien
aatagtactccaactaaacaaatag

SEQ ID NO: 5509242 - DNA, 25 bp, Homo sapien
ctatttgtttagttggagtactatt

SEQ ID NO: 5509243 - DNA, 25 bp, Homo sapien
taggaatactataatggtggcacat

SEQ ID NO: 5509244 - DNA, 25 bp, Homo sapien
atcaagctcatgtctaggaatacta

SEQ ID NO: 5509245 - DNA, 25 bp, Homo sapien
ggctaagggcaattaagacacaata

SEQ ID NO: 5509246 - DNA, 25 bp, Homo sapien
agcaacaattcaataaggatccttc

SEQ ID NO: 5509247 - DNA, 25 bp, Homo sapien
taaacacaatacaaataatgaaccc

SEQ ID NO: 5509248 - DNA, 25 bp, Homo sapien
aagacacaataatgtgtggcacgtt

SEQ ID NO: 5509249 - DNA, 25 bp, Homo sapien
caaagtaaggcacaactacatgatc

SEQ ID NO: 5509250 - DNA, 25 bp, Homo sapien
gtgtggcacgttataattacagaat

SEQ ID NO: 5509251 - DNA, 25 bp, Homo sapien
ccagttcaaggaattacagaatgtc

SEQ ID NO: 5509252 - DNA, 25 bp, Homo sapien
catgatcacaagtagtaaacacaat

SEQ ID NO: 5509253 - DNA, 25 bp, Homo sapien
ctacacagaaagaacttagtgactt

SEQ ID NO: 5509254 - DNA, 25 bp, Homo sapien
cacacatgctaaaaagtggactgtc

SEQ ID NO: 5509255 - DNA, 25 bp, Homo sapien
aatgctccaacctaccctctccccc

SEQ ID NO: 5509256 - DNA, 25 bp, Homo sapien
aaaaaacacgtatcagactctggga

SEQ ID NO: 5509257 - DNA, 25 bp, Homo sapien
agactctgggaaaacattcagaccc

SEQ ID NO: 5509258 - DNA, 25 bp, Homo sapien
ttttccacagcccaacaatcatttc

SEQ ID NO: 5509259 - DNA, 25 bp, Homo sapien
agcaataaacccatgttgaacctac

SEQ ID NO: 5509260 - DNA, 25 bp, Homo sapien
taaacctaaagctatcccctggatc

SEQ ID NO: 5509261 - DNA, 25 bp, Homo sapien
ctcttctggcaaaaaaaaacacgta

SEQ ID NO: 5509262 - DNA, 25 bp, Homo sapien
catccaggttactacaggctgaatt

SEQ ID NO: 5509263 - DNA, 25 bp, Homo sapien
aggcccacggttaagacattaaaca

SEQ ID NO: 5509264 - DNA, 25 bp, Homo sapien
aagttacgttggtgagccgaagtta

SEQ ID NO: 5509265 - DNA, 25 bp, Homo sapien
ggaccaaggctagcccactgaacat

SEQ ID NO: 5509266 - DNA, 25 bp, Homo sapien
ccaatggcatacgattgctgggaga

SEQ ID NO: 5509267 - DNA, 25 bp, Homo sapien
gagtcacacactgtccctgaggacc

SEQ ID NO: 5509268 - DNA, 25 bp, Homo sapien
tatgctagattgatcatggtcagtc

SEQ ID NO: 5509269 - DNA, 25 bp, Homo sapien
gcagcagcaatgggttatttgggaa

SEQ ID NO: 5509270 - DNA, 25 bp, Homo sapien
gccagtagaggtcccagatatcttt

SEQ ID NO: 5509271 - DNA, 25 bp, Homo sapien
gttaggaagaccactagagtcacac

SEQ ID NO: 5509272 - DNA, 25 bp, Homo sapien
ttatagtacatgagggtttccaaaa

SEQ ID NO: 5509273 - DNA, 25 bp, Homo sapien
cagattgataagagatattggccat

SEQ ID NO: 5509274 - DNA, 25 bp, Homo sapien
tgtgaaagctggatctaattgaaat

SEQ ID NO: 5509275 - DNA, 25 bp, Homo sapien
atcagcaaataacaaaggaagcata

SEQ ID NO: 5509276 - DNA, 25 bp, Homo sapien
ttgttaccatatatgcaggcaacta

SEQ ID NO: 5509277 - DNA, 25 bp, Homo sapien
tatgattctgatttaggtcctagct

SEQ ID NO: 5509278 - DNA, 25 bp, Homo sapien
ccaaactaagataggataaacatcc

SEQ ID NO: 5509279 - DNA, 25 bp, Homo sapien
atatgcaggcaactatgattctgat

SEQ ID NO: 5509280 - DNA, 25 bp, Homo sapien
tatgtgtaaaattgatagaaacgtc

SEQ ID NO: 5509281 - DNA, 25 bp, Homo sapien
ttgtcatcaactgaactttgcctcc

SEQ ID NO: 5509282 - DNA, 25 bp, Homo sapien
ttacttaagtgagatatatggtttc

SEQ ID NO: 5509283 - DNA, 25 bp, Homo sapien
caaatgcacacgaccttgttaccat

SEQ ID NO: 5509284 - DNA, 25 bp, Homo sapien
tacagcatcagtaacatatacacaa

SEQ ID NO: 5509285 - DNA, 25 bp, Homo sapien
aaacatccagtatcttagtatctcc

SEQ ID NO: 5509286 - DNA, 25 bp, Homo sapien
atagaaacgtcagcaatatcactct

SEQ ID NO: 5509287 - DNA, 25 bp, Homo sapien
aatgaccatacgtattgaaaaagtt

SEQ ID NO: 5509288 - DNA, 25 bp, Homo sapien
aactttttcaatacgtatggtcatt

SEQ ID NO: 5509289 - DNA, 25 bp, Homo sapien
gtgacagaacgtttgtgagaactgc

SEQ ID NO: 5509290 - DNA, 25 bp, Homo sapien
agcagcagctcagctggtcaggctt

SEQ ID NO: 5509291 - DNA, 25 bp, Homo sapien
tagtctgtttgttaagcgttaccac

SEQ ID NO: 5509292 - DNA, 25 bp, Homo sapien
attagaacagaaatgaaacaccagt

SEQ ID NO: 5509293 - DNA, 25 bp, Homo sapien
ctgctggaatcacaagctgcggcag

SEQ ID NO: 5509294 - DNA, 25 bp, Homo sapien
gttggaattatacaagctgcttctt

SEQ ID NO: 5509295 - DNA, 25 bp, Homo sapien
ccccagcttggcacagtaggttttg

SEQ ID NO: 5509296 - DNA, 25 bp, Homo sapien
tccagggaatctagcatgtcacaca

SEQ ID NO: 5509297 - DNA, 25 bp, Homo sapien
ctccgttcacatatagcgccccagc

SEQ ID NO: 5509298 - DNA, 25 bp, Homo sapien
ggaggcggtactcattcagcccttt

SEQ ID NO: 5509299 - DNA, 25 bp, Homo sapien
ctttcttgagacactggcctgacag

SEQ ID NO: 5509300 - DNA, 25 bp, Homo sapien
tcgaggaagttttgcacctggagag

SEQ ID NO: 5509301 - DNA, 25 bp, Homo sapien
ctggagatcaagttctgcgcctgaa

SEQ ID NO: 5509302 - DNA, 25 bp, Homo sapien
gataaacaaattagaggccaagagg

SEQ ID NO: 5509303 - DNA, 25 bp, Homo sapien
cctgaagaggctgccaaaagtcaaa

SEQ ID NO: 5509304 - DNA, 25 bp, Homo sapien
cacaaaagataaacaaattagaggc

SEQ ID NO: 5509305 - DNA, 25 bp, Homo sapien
aaagataaacaaattagaggccaag

SEQ ID NO: 5509306 - DNA, 25 bp, Homo sapien
tgaagaggctgccaaaagtcaaaag

SEQ ID NO: 5509307 - DNA, 25 bp, Homo sapien
atggtggaaatattccaaaattcaa

SEQ ID NO: 5509308 - DNA, 25 bp, Homo sapien
tcaagttctgcgcctgaagaggctg

SEQ ID NO: 5509309 - DNA, 25 bp, Homo sapien
tttgggatttatacacaaaagataa

SEQ ID NO: 5509310 - DNA, 25 bp, Homo sapien
gctgactcgaggaagttttgcacct

SEQ ID NO: 5509311 - DNA, 25 bp, Homo sapien
aaagtcagaaacacaaatccacccc

SEQ ID NO: 5509312 - DNA, 25 bp, Homo sapien
gcacttgcccgaatccactgaaggc

SEQ ID NO: 5509313 - DNA, 25 bp, Homo sapien
accccaccactccctcacatacctt

SEQ ID NO: 5509314 - DNA, 25 bp, Homo sapien
atgcagtttgcagaaaagttcaaca

SEQ ID NO: 5509315 - DNA, 25 bp, Homo sapien
ccctcaacaactccctactccaacc

SEQ ID NO: 5509316 - DNA, 25 bp, Homo sapien
gccaaagactttgcacttgcccgaa

SEQ ID NO: 5509317 - DNA, 25 bp, Homo sapien
gcttttggtaacatatggaatttgc

SEQ ID NO: 5509318 - DNA, 25 bp, Homo sapien
ttacaattgagaagacaacagcttt

SEQ ID NO: 5509319 - DNA, 25 bp, Homo sapien
tttgtcacacaataggccaaagact

SEQ ID NO: 5509320 - DNA, 25 bp, Homo sapien
tagactaatgataagagaagcagca

SEQ ID NO: 5509321 - DNA, 25 bp, Homo sapien
tcacagtgacttttgggctaggaaa

SEQ ID NO: 5509322 - DNA, 25 bp, Homo sapien
tcaggataacggaaatgattttggc

SEQ ID NO: 5509323 - DNA, 25 bp, Homo sapien
gggataagatggcaggttctcccct

SEQ ID NO: 5509324 - DNA, 25 bp, Homo sapien
caggaagtcccctgcccccactacg

SEQ ID NO: 5509325 - DNA, 25 bp, Homo sapien
ggcagaggcccctcagtacaccatc

SEQ ID NO: 5509326 - DNA, 25 bp, Homo sapien
gggcttgggactgttatcagctccc

SEQ ID NO: 5509327 - DNA, 25 bp, Homo sapien
gaaaccgcactggccttggcctgtc

SEQ ID NO: 5509328 - DNA, 25 bp, Homo sapien
cccccactacgatggtgggggctct

SEQ ID NO: 5509329 - DNA, 25 bp, Homo sapien
ttggcctgtcttgggacctgaactt

SEQ ID NO: 5509330 - DNA, 25 bp, Homo sapien
ggcctgctgttcaccctgccacctc

SEQ ID NO: 5509331 - DNA, 25 bp, Homo sapien
cacccagatcttgggagcgatggaa

SEQ ID NO: 5509332 - DNA, 25 bp, Homo sapien
tacagtacatgaatctcgagggttt

SEQ ID NO: 5509333 - DNA, 25 bp, Homo sapien
gcctttaccaggttaaatgacagaa

SEQ ID NO: 5509334 - DNA, 25 bp, Homo sapien
acttgtcacacacgaagcagagaga

SEQ ID NO: 5509335 - DNA, 25 bp, Homo sapien
agaaactgaatcatactgatgaggt

SEQ ID NO: 5509336 - DNA, 25 bp, Homo sapien
ggcagggcactctttctcagcagcc

SEQ ID NO: 5509337 - DNA, 25 bp, Homo sapien
tgtatcattggcatcgaaaagtaaa

SEQ ID NO: 5509338 - DNA, 25 bp, Homo sapien
cctgggagagtccaattgataagag

SEQ ID NO: 5509339 - DNA, 25 bp, Homo sapien
ctcagcagccaagataacttgtcac

SEQ ID NO: 5509340 - DNA, 25 bp, Homo sapien
ttccatcagtttagtgcaatgtatc

SEQ ID NO: 5509341 - DNA, 25 bp, Homo sapien
taaacaagatgttatacagtacttt

SEQ ID NO: 5509342 - DNA, 25 bp, Homo sapien
tatgaccataaaggaaatgaaccat

SEQ ID NO: 5509343 - DNA, 25 bp, Homo sapien
gagagaatgcacccgatgaaaatct

SEQ ID NO: 5509344 - DNA, 25 bp, Homo sapien
ctggtttggttttcagaggtccacc

SEQ ID NO: 5509345 - DNA, 25 bp, Homo sapien
tctgtgtacaaaactgaccatctat

SEQ ID NO: 5509346 - DNA, 25 bp, Homo sapien
acagtggctcaagaaaacaagctgc

SEQ ID NO: 5509347 - DNA, 25 bp, Homo sapien
gtcgagaaacacattaagaaggcac

SEQ ID NO: 5509348 - DNA, 25 bp, Homo sapien
ttacaaagaacaggtgttaacacac

SEQ ID NO: 5509349 - DNA, 25 bp, Homo sapien
tgtaactccaggtagtgcaaaatgc

SEQ ID NO: 5509350 - DNA, 25 bp, Homo sapien
catacactccaagcctgaaacacac

SEQ ID NO: 5509351 - DNA, 25 bp, Homo sapien
aaaaacaaaatttagacagtggctc

SEQ ID NO: 5509352 - DNA, 25 bp, Homo sapien
aaatctctggaggaaaatacaagca

SEQ ID NO: 5509353 - DNA, 25 bp, Homo sapien
atgcatagattgatgtacagtaacc

SEQ ID NO: 5509354 - DNA, 25 bp, Homo sapien
taagaaggcacatgtacagtctaca

SEQ ID NO: 5509355 - DNA, 25 bp, Homo sapien
gaacagcatgggttactgaaaccat

SEQ ID NO: 5509356 - DNA, 25 bp, Homo sapien
tctgggaaacatcatgtcagctgcc

SEQ ID NO: 5509357 - DNA, 25 bp, Homo sapien
ttttcaacatagggagaaagacgta

SEQ ID NO: 5509358 - DNA, 25 bp, Homo sapien
atggagacagctagtacaaaagttt

SEQ ID NO: 5509359 - DNA, 25 bp, Homo sapien
aaatgtgcaacagtaaagagtcctt

SEQ ID NO: 5509360 - DNA, 25 bp, Homo sapien
aaatggctcttttggtctggaccct

SEQ ID NO: 5509361 - DNA, 25 bp, Homo sapien
ccatttattcagaaagcagaggaaa

SEQ ID NO: 5509362 - DNA, 25 bp, Homo sapien
tgataatggaacatgggagaacatg

SEQ ID NO: 5509363 - DNA, 25 bp, Homo sapien
tataggaagttccaaatggcagcag

SEQ ID NO: 5509364 - DNA, 25 bp, Homo sapien
gggagaacatgctgtaaatggctct

SEQ ID NO: 5509365 - DNA, 25 bp, Homo sapien
atgtcagctgccaagccatgaattt

SEQ ID NO: 5509366 - DNA, 25 bp, Homo sapien
acgcgggactgcgaccctctggcga

SEQ ID NO: 5509367 - DNA, 25 bp, Homo sapien
tcgccagagggtcgcagtcccgcgt

SEQ ID NO: 5509368 - DNA, 25 bp, Homo sapien
cgccacgcgggactgcgaccctctg

SEQ ID NO: 5509369 - DNA, 25 bp, Homo sapien
cagagggtcgcagtcccgcgtggcg

SEQ ID NO: 5509370 - DNA, 25 bp, Homo sapien
tcagctgctgttacgttcagagaat

SEQ ID NO: 5509371 - DNA, 25 bp, Homo sapien
agagaataagagcaaccataactta

SEQ ID NO: 5509372 - DNA, 25 bp, Homo sapien
agcttcagcctttggacactggggc

SEQ ID NO: 5509373 - DNA, 25 bp, Homo sapien
aagcaaatcttggcagtgtagaaag

SEQ ID NO: 5509374 - DNA, 25 bp, Homo sapien
aggcaaaatttgaaacacaggtcat

SEQ ID NO: 5509375 - DNA, 25 bp, Homo sapien
ctgggtgattaatgtcagaattgtt

SEQ ID NO: 5509376 - DNA, 25 bp, Homo sapien
gtagaaagatggcagatgaatacta

SEQ ID NO: 5509377 - DNA, 25 bp, Homo sapien
gacactggggctataatgaagttag

SEQ ID NO: 5509378 - DNA, 25 bp, Homo sapien
ctgcagacctaaaattagagttcac

SEQ ID NO: 5509379 - DNA, 25 bp, Homo sapien
ttgggaggaggtttcctctaaatca

SEQ ID NO: 5509380 - DNA, 25 bp, Homo sapien
tggaagatgttaaaactgcagacct

SEQ ID NO: 5509381 - DNA, 25 bp, Homo sapien
tcagcttacacttcacctcggttct

SEQ ID NO: 5509382 - DNA, 25 bp, Homo sapien
agaaccgaggtgaagtgtaagctga

SEQ ID NO: 5509383 - DNA, 25 bp, Homo sapien
aaagcttgcacatgagagacttgga

SEQ ID NO: 5509384 - DNA, 25 bp, Homo sapien
taatactgattagctgaggttcctc

SEQ ID NO: 5509385 - DNA, 25 bp, Homo sapien
aattaccagcaagctgagggaactg

SEQ ID NO: 5509386 - DNA, 25 bp, Homo sapien
aatctataggacacctgaggtagta

SEQ ID NO: 5509387 - DNA, 25 bp, Homo sapien
tagaagttagcccttaagccctgga

SEQ ID NO: 5509388 - DNA, 25 bp, Homo sapien
gtgggcatggtgatctacaaagtaa

SEQ ID NO: 5509389 - DNA, 25 bp, Homo sapien
gagggaactgcaaacaaactcaaac

SEQ ID NO: 5509390 - DNA, 25 bp, Homo sapien
cataaaatggcaagagtgcatcctt

SEQ ID NO: 5509391 - DNA, 25 bp, Homo sapien
agtgaactttggtagaagaaaaatc

SEQ ID NO: 5509392 - DNA, 25 bp, Homo sapien
cacagtaaggtgctaatagaagtta

SEQ ID NO: 5509393 - DNA, 25 bp, Homo sapien
tgaggtagtagaaactggaataaac

SEQ ID NO: 5509394 - DNA, 25 bp, Homo sapien
gtgtccaaggacaaccagttaagta

SEQ ID NO: 5509395 - DNA, 25 bp, Homo sapien
ggggactaacctatcgagaaggcat

SEQ ID NO: 5509396 - DNA, 25 bp, Homo sapien
ttgctgaggaaatacacaatacagg

SEQ ID NO: 5509397 - DNA, 25 bp, Homo sapien
atggccatgctaataaaaaggatat

SEQ ID NO: 5509398 - DNA, 25 bp, Homo sapien
acaaaatcaaggagttgcaaccata

SEQ ID NO: 5509399 - DNA, 25 bp, Homo sapien
ctaaaggcagattaagataagaagg

SEQ ID NO: 5509400 - DNA, 25 bp, Homo sapien
gtatgtagcaaccaggtctgcagcc

SEQ ID NO: 5509401 - DNA, 25 bp, Homo sapien
tttaggagacaaagaccaatccatt

SEQ ID NO: 5509402 - DNA, 25 bp, Homo sapien
atttgaccctacactggctccagcc

SEQ ID NO: 5509403 - DNA, 25 bp, Homo sapien
caaccataagaaggatgagtgtcca

SEQ ID NO: 5509404 - DNA, 25 bp, Homo sapien
gagaaggcatgtatattgctgagga

SEQ ID NO: 5509405 - DNA, 25 bp, Homo sapien
ccggccatccgcgacccaggagtcg

SEQ ID NO: 5509406 - DNA, 25 bp, Homo sapien
cgactcctgggtcgcggatggccgg

SEQ ID NO: 5509407 - DNA, 25 bp, Homo sapien
gatcccccacgagccggccatccgc

SEQ ID NO: 5509408 - DNA, 25 bp, Homo sapien
gcggatggccggctcgtgggggatc

SEQ ID NO: 5509409 - DNA, 25 bp, Homo sapien
agcggtgtcaataaagcttaggtcc

SEQ ID NO: 5509410 - DNA, 25 bp, Homo sapien
ggacctaagctttattgacaccgct

SEQ ID NO: 5509411 - DNA, 25 bp, Homo sapien
tgaaagcctcaattgctggactgac

SEQ ID NO: 5509412 - DNA, 25 bp, Homo sapien
gaggattatagagtgagcaacatat

SEQ ID NO: 5509413 - DNA, 25 bp, Homo sapien
atggtggccctgaacttgagccaac

SEQ ID NO: 5509414 - DNA, 25 bp, Homo sapien
tataacactgaactatgaaagcctc

SEQ ID NO: 5509415 - DNA, 25 bp, Homo sapien
tcctaaaccaaacgcatacatgtga

SEQ ID NO: 5509416 - DNA, 25 bp, Homo sapien
ataagggtatacatgtttgacagga

SEQ ID NO: 5509417 - DNA, 25 bp, Homo sapien
tcttgttaggtatatgatggtggcc

SEQ ID NO: 5509418 - DNA, 25 bp, Homo sapien
gttagccataggaggattatagagt

SEQ ID NO: 5509419 - DNA, 25 bp, Homo sapien
agtggcagaactatcctagaggtta

SEQ ID NO: 5509420 - DNA, 25 bp, Homo sapien
tgctggactgacaacaagaatttta

SEQ ID NO: 5509421 - DNA, 25 bp, Homo sapien
aaagcttaagatggaaaaatacaaa

SEQ ID NO: 5509422 - DNA, 25 bp, Homo sapien
tttagggctatcaccatgtctggct

SEQ ID NO: 5509423 - DNA, 25 bp, Homo sapien
atcctcctagggtcaataaagaaaa

SEQ ID NO: 5509424 - DNA, 25 bp, Homo sapien
tgcagctttcaggcagtcactgtcc

SEQ ID NO: 5509425 - DNA, 25 bp, Homo sapien
tctttttgatacagctgatggcctt

SEQ ID NO: 5509426 - DNA, 25 bp, Homo sapien
tggagatgtaaagcagcaatactga

SEQ ID NO: 5509427 - DNA, 25 bp, Homo sapien
aagctgcagcaactcaaatcctcct

SEQ ID NO: 5509428 - DNA, 25 bp, Homo sapien
ttgggagaatatccaatattgattc

SEQ ID NO: 5509429 - DNA, 25 bp, Homo sapien
gtcctggcatcgaaagcttattctg

SEQ ID NO: 5509430 - DNA, 25 bp, Homo sapien
ataagcaaagcagtactaaaagcat

SEQ ID NO: 5509431 - DNA, 25 bp, Homo sapien
tcacaattagtgaacatggcaattt

SEQ ID NO: 5509432 - DNA, 25 bp, Homo sapien
atgcattgaaaagagctcctgcagc

SEQ ID NO: 5509433 - DNA, 25 bp, Homo sapien
aaaagaataactatcttagtagtaa

SEQ ID NO: 5509434 - DNA, 25 bp, Homo sapien
ttactactaagatagttattctttt

SEQ ID NO: 5509435 - DNA, 25 bp, Homo sapien
aaaaagaataactatcttagtagta

SEQ ID NO: 5509436 - DNA, 25 bp, Homo sapien
tactactaagatagttattcttttt

SEQ ID NO: 5509437 - DNA, 25 bp, Homo sapien
cacagaacacagactctggcctgcc

SEQ ID NO: 5509438 - DNA, 25 bp, Homo sapien
agaggaaaacctgccgaagtcctaa

SEQ ID NO: 5509439 - DNA, 25 bp, Homo sapien
gttaagtcagggtctatgatagaat

SEQ ID NO: 5509440 - DNA, 25 bp, Homo sapien
tcagaatagaacaagcagatttttc

SEQ ID NO: 5509441 - DNA, 25 bp, Homo sapien
gagtgaagggatatctcagagaact

SEQ ID NO: 5509442 - DNA, 25 bp, Homo sapien
aaatttagaaaagcttggtcagtga

SEQ ID NO: 5509443 - DNA, 25 bp, Homo sapien
atcaatggccaaatgccaagcagag

SEQ ID NO: 5509444 - DNA, 25 bp, Homo sapien
gggcacggatctcaagcaaagtgtt

SEQ ID NO: 5509445 - DNA, 25 bp, Homo sapien
gcaggagatggacaaagcaatcctg

SEQ ID NO: 5509446 - DNA, 25 bp, Homo sapien
caccaaaggcctgttgcagaccttc

SEQ ID NO: 5509447 - DNA, 25 bp, Homo sapien
agcaatcctgtggaggaaagaatga

SEQ ID NO: 5509448 - DNA, 25 bp, Homo sapien
aacaggtctaaatattactgataaa

SEQ ID NO: 5509449 - DNA, 25 bp, Homo sapien
tttatcagtaatatttagacctgtt

SEQ ID NO: 5509450 - DNA, 25 bp, Homo sapien
gacagctgctgtttgcgaaaatact

SEQ ID NO: 5509451 - DNA, 25 bp, Homo sapien
gtgacccaggcaagttagtaaatgt

SEQ ID NO: 5509452 - DNA, 25 bp, Homo sapien
ggcacagcaatagcacatagtaagc

SEQ ID NO: 5509453 - DNA, 25 bp, Homo sapien
atactgagcaagaataaagatatac

SEQ ID NO: 5509454 - DNA, 25 bp, Homo sapien
ctggaagaacggattgcctatgcaa

SEQ ID NO: 5509455 - DNA, 25 bp, Homo sapien
caaaccttgagaaggattgagagtg

SEQ ID NO: 5509456 - DNA, 25 bp, Homo sapien
cagaacagtgaacttagacagctgc

SEQ ID NO: 5509457 - DNA, 25 bp, Homo sapien
gttttatgcaaagctgggcaagtcc

SEQ ID NO: 5509458 - DNA, 25 bp, Homo sapien
agtcagggagtataggcaactcttt

SEQ ID NO: 5509459 - DNA, 25 bp, Homo sapien
aggtaagaagacaggtttcagatac

SEQ ID NO: 5509460 - DNA, 25 bp, Homo sapien
tatgcaagaggaattagcaaacctt

SEQ ID NO: 5509461 - DNA, 25 bp, Homo sapien
tggccgagggctcaagacccgtaaa

SEQ ID NO: 5509462 - DNA, 25 bp, Homo sapien
tttacgggtcttgagccctcggcca

SEQ ID NO: 5509463 - DNA, 25 bp, Homo sapien
atcgtctaaagtcgccgtactcact

SEQ ID NO: 5509464 - DNA, 25 bp, Homo sapien
agtgagtacggcgactttagacgat

SEQ ID NO: 5509465 - DNA, 25 bp, Homo sapien
caacttagagacaaatgaggaaaaa

SEQ ID NO: 5509466 - DNA, 25 bp, Homo sapien
ttaacatagcaaaatgtggggagga

SEQ ID NO: 5509467 - DNA, 25 bp, Homo sapien
gaaaacaactaaacaggctgaggct

SEQ ID NO: 5509468 - DNA, 25 bp, Homo sapien
tgccagtctgataataaataccgtc

SEQ ID NO: 5509469 - DNA, 25 bp, Homo sapien
tgtggggaggacacaattgttttat

SEQ ID NO: 5509470 - DNA, 25 bp, Homo sapien
ataaataccgtcccagaaaagcgag

SEQ ID NO: 5509471 - DNA, 25 bp, Homo sapien
ctgtacagcaaaagaggtaatattt

SEQ ID NO: 5509472 - DNA, 25 bp, Homo sapien
ctctgtcccctccaacaaagccttc

SEQ ID NO: 5509473 - DNA, 25 bp, Homo sapien
aattacagactgtcaaggctgttcc

SEQ ID NO: 5509474 - DNA, 25 bp, Homo sapien
ttaaagatacagaagaacattcaaa

SEQ ID NO: 5509475 - DNA, 25 bp, Homo sapien
acctatggagttaggcttgccagtc

SEQ ID NO: 5509476 - DNA, 25 bp, Homo sapien
gggttctttgcagggctcttgggaa

SEQ ID NO: 5509477 - DNA, 25 bp, Homo sapien
attccaggattaggacaaaggaagg

SEQ ID NO: 5509478 - DNA, 25 bp, Homo sapien
gcataggcagacacctctaagccac

SEQ ID NO: 5509479 - DNA, 25 bp, Homo sapien
ttgtggtggttgttgaatcctacaa

SEQ ID NO: 5509480 - DNA, 25 bp, Homo sapien
cctctaagccactccctcccacctc

SEQ ID NO: 5509481 - DNA, 25 bp, Homo sapien
catccaaataggaaactggggttct

SEQ ID NO: 5509482 - DNA, 25 bp, Homo sapien
gacctcttacagcaccaacaccccc

SEQ ID NO: 5509483 - DNA, 25 bp, Homo sapien
agaaaaagtgccccattcaaagttg

SEQ ID NO: 5509484 - DNA, 25 bp, Homo sapien
ttggctttaagcataggcagacacc

SEQ ID NO: 5509485 - DNA, 25 bp, Homo sapien
ccatcccatcccagtgccaaaatgc

SEQ ID NO: 5509486 - DNA, 25 bp, Homo sapien
aggcaaagcagagactgtctgcctt

SEQ ID NO: 5509487 - DNA, 25 bp, Homo sapien
caggtccgcaaaggcttctgaagaa

SEQ ID NO: 5509488 - DNA, 25 bp, Homo sapien
gcactgacaggaaaccttccgtcgt

SEQ ID NO: 5509489 - DNA, 25 bp, Homo sapien
ggtccgcaaaggcttctgaagaaga

SEQ ID NO: 5509490 - DNA, 25 bp, Homo sapien
cttgggtcctggacgttgataggaa

SEQ ID NO: 5509491 - DNA, 25 bp, Homo sapien
ggtcaggtccgcaaaggcttctgaa

SEQ ID NO: 5509492 - DNA, 25 bp, Homo sapien
acaggaaaccttccgtcgtgaggga

SEQ ID NO: 5509493 - DNA, 25 bp, Homo sapien
cagcttgggtcctggacgttgatag

SEQ ID NO: 5509494 - DNA, 25 bp, Homo sapien
aggacaccagctgggtccagctagc

SEQ ID NO: 5509495 - DNA, 25 bp, Homo sapien
accagctgggtccagctagcagcca

SEQ ID NO: 5509496 - DNA, 25 bp, Homo sapien
gcgtcagacccaggactgttcaggg

SEQ ID NO: 5509497 - DNA, 25 bp, Homo sapien
accgcactgacaggaaaccttccgt

SEQ ID NO: 5509498 - DNA, 25 bp, Homo sapien
ccttaagtaaactggaggagtcagc

SEQ ID NO: 5509499 - DNA, 25 bp, Homo sapien
atggggaaagtgtacaaaaataatg

SEQ ID NO: 5509500 - DNA, 25 bp, Homo sapien
actaggctataaaagtagagttcat

SEQ ID NO: 5509501 - DNA, 25 bp, Homo sapien
ccttaacatggggaaagtgtacaaa

SEQ ID NO: 5509502 - DNA, 25 bp, Homo sapien
aggagaacttgggctttctttggtc

SEQ ID NO: 5509503 - DNA, 25 bp, Homo sapien
tatcagcagtaaagaagtttagttt

SEQ ID NO: 5509504 - DNA, 25 bp, Homo sapien
agagtgctctttagcttcaggcttc

SEQ ID NO: 5509505 - DNA, 25 bp, Homo sapien
ggtcaggtctggaaatgcagctatt

SEQ ID NO: 5509506 - DNA, 25 bp, Homo sapien
ctattttcggtgacggactatgagc

SEQ ID NO: 5509507 - DNA, 25 bp, Homo sapien
aaggaatacagttcgcccaaagcac

SEQ ID NO: 5509508 - DNA, 25 bp, Homo sapien
agaatacaggaaacatatcagcagt

SEQ ID NO: 5509509 - DNA, 25 bp, Homo sapien
caccaaagaagagtttgatgatgac

SEQ ID NO: 5509510 - DNA, 25 bp, Homo sapien
acctgtttcaggaactctagtggtg

SEQ ID NO: 5509511 - DNA, 25 bp, Homo sapien
cagtggaggtctaattacagctggg

SEQ ID NO: 5509512 - DNA, 25 bp, Homo sapien
cagctaagtacacagtggaggtcta

SEQ ID NO: 5509513 - DNA, 25 bp, Homo sapien
ggtactgtcacatcaaaagcgtggc

SEQ ID NO: 5509514 - DNA, 25 bp, Homo sapien
gatgacatcctcagtgggggaatca

SEQ ID NO: 5509515 - DNA, 25 bp, Homo sapien
taattcacacaccaaagaagagttt

SEQ ID NO: 5509516 - DNA, 25 bp, Homo sapien
ggggaatcactctgcggtactgtca

SEQ ID NO: 5509517 - DNA, 25 bp, Homo sapien
aatgaggtaagaactgtgcaatgtt

SEQ ID NO: 5509518 - DNA, 25 bp, Homo sapien
taaccaagaaacatattgcagaatt

SEQ ID NO: 5509519 - DNA, 25 bp, Homo sapien
catcaaaagcgtggctccccaaagt

SEQ ID NO: 5509520 - DNA, 25 bp, Homo sapien
acaatttgcataatccggcacagtt

SEQ ID NO: 5509521 - DNA, 25 bp, Homo sapien
cacagtgtaaatgccgcccttattc

SEQ ID NO: 5509522 - DNA, 25 bp, Homo sapien
ccagatttcatgacactgttcctag

SEQ ID NO: 5509523 - DNA, 25 bp, Homo sapien
gtctccatgagagtagttccctgtc

SEQ ID NO: 5509524 - DNA, 25 bp, Homo sapien
taatatagcgcctatgttggatttc

SEQ ID NO: 5509525 - DNA, 25 bp, Homo sapien
tacttggcactgacaatattcctct

SEQ ID NO: 5509526 - DNA, 25 bp, Homo sapien
tacttgcacagtgtaaatgccgccc

SEQ ID NO: 5509527 - DNA, 25 bp, Homo sapien
ttaaactttgatcagtaacaactac

SEQ ID NO: 5509528 - DNA, 25 bp, Homo sapien
tccggcacagtttgtaatatagcgc

SEQ ID NO: 5509529 - DNA, 25 bp, Homo sapien
acttgattataagagagaaactgtc

SEQ ID NO: 5509530 - DNA, 25 bp, Homo sapien
attctatgcagtaaaagttaaacct

SEQ ID NO: 5509531 - DNA, 25 bp, Homo sapien
tggccagtaacagcttttgcaacat

SEQ ID NO: 5509532 - DNA, 25 bp, Homo sapien
aggtaggcaactagcaaaaatacac

SEQ ID NO: 5509533 - DNA, 25 bp, Homo sapien
aactctctggcactgtagcctcctc

SEQ ID NO: 5509534 - DNA, 25 bp, Homo sapien
gctctgcataggaataaagttcaat

SEQ ID NO: 5509535 - DNA, 25 bp, Homo sapien
tttatctcagaaggtaggcaactag

SEQ ID NO: 5509536 - DNA, 25 bp, Homo sapien
aaatgaagacttctgcatggtatat

SEQ ID NO: 5509537 - DNA, 25 bp, Homo sapien
ttggatccattgcaagattgtgctt

SEQ ID NO: 5509538 - DNA, 25 bp, Homo sapien
aaaggaagagcacaatgcaactttt

SEQ ID NO: 5509539 - DNA, 25 bp, Homo sapien
aaagcaaaagagacaataactctct

SEQ ID NO: 5509540 - DNA, 25 bp, Homo sapien
tacctaactgggttattggatccat

SEQ ID NO: 5509541 - DNA, 25 bp, Homo sapien
cacacacacaatctacagcaaactt

SEQ ID NO: 5509542 - DNA, 25 bp, Homo sapien
aaggtaattccaccaactggagacc

SEQ ID NO: 5509543 - DNA, 25 bp, Homo sapien
aaggccgttaaagatactgacaccc

SEQ ID NO: 5509544 - DNA, 25 bp, Homo sapien
tgcctctacgagaacttggaataaa

SEQ ID NO: 5509545 - DNA, 25 bp, Homo sapien
tctatggagatgttgttgatggttg

SEQ ID NO: 5509546 - DNA, 25 bp, Homo sapien
ataaatttaggaaacagccaacagt

SEQ ID NO: 5509547 - DNA, 25 bp, Homo sapien
ctgacacccacgtgatcacagtact

SEQ ID NO: 5509548 - DNA, 25 bp, Homo sapien
cacagtactagtggaataacctcac

SEQ ID NO: 5509549 - DNA, 25 bp, Homo sapien
gttgatggttggcacaagtttaggg

SEQ ID NO: 5509550 - DNA, 25 bp, Homo sapien
accaagaatgaaggccgttaaagat

SEQ ID NO: 5509551 - DNA, 25 bp, Homo sapien
acatgaatgaggtgctttacaatac

SEQ ID NO: 5509552 - DNA, 25 bp, Homo sapien
gggtgagtgggcatatcaaataaaa

SEQ ID NO: 5509553 - DNA, 25 bp, Homo sapien
taaaccaatcagatgcttagctatc

SEQ ID NO: 5509554 - DNA, 25 bp, Homo sapien
caggagccatgtgtgattttaataa

SEQ ID NO: 5509555 - DNA, 25 bp, Homo sapien
tattagaaaaaaggaggtatgccta

SEQ ID NO: 5509556 - DNA, 25 bp, Homo sapien
tcagctcagtggtaaagcagtaaac

SEQ ID NO: 5509557 - DNA, 25 bp, Homo sapien
ggaggtatgcctaacattgtgtcac

SEQ ID NO: 5509558 - DNA, 25 bp, Homo sapien
gacacaccagtgtgagaaacctcca

SEQ ID NO: 5509559 - DNA, 25 bp, Homo sapien
caagtaatcatgtgagaggaaacag

SEQ ID NO: 5509560 - DNA, 25 bp, Homo sapien
aatggaaaacacggcatttcagctc

SEQ ID NO: 5509561 - DNA, 25 bp, Homo sapien
ttgtcagctaacactgtagcagtgg

SEQ ID NO: 5509562 - DNA, 25 bp, Homo sapien
acgatatgacagttcaaggaagcat

SEQ ID NO: 5509563 - DNA, 25 bp, Homo sapien
caatcgtcttgaagaatatggagaa

SEQ ID NO: 5509564 - DNA, 25 bp, Homo sapien
agagctgacatttgtactgcgcact

SEQ ID NO: 5509565 - DNA, 25 bp, Homo sapien
ctcatgctcaaattaagactggatc

SEQ ID NO: 5509566 - DNA, 25 bp, Homo sapien
gactggatcacggatagtgaagatc

SEQ ID NO: 5509567 - DNA, 25 bp, Homo sapien
agaaagcacacataccctaccggca

SEQ ID NO: 5509568 - DNA, 25 bp, Homo sapien
ggtaattacatggtcggatgaggtc

SEQ ID NO: 5509569 - DNA, 25 bp, Homo sapien
ggatagtgaagatctgccctagcat

SEQ ID NO: 5509570 - DNA, 25 bp, Homo sapien
gtgtagatgactaaattttgctctc

SEQ ID NO: 5509571 - DNA, 25 bp, Homo sapien
tcagaaggggcttagtaaaaaatga

SEQ ID NO: 5509572 - DNA, 25 bp, Homo sapien
tacaaagaacagactgtcagctttc

SEQ ID NO: 5509573 - DNA, 25 bp, Homo sapien
ggatgaggtcctcactctcagggga

SEQ ID NO: 5509574 - DNA, 25 bp, Homo sapien
ctgccctagcattgaagatttactt

SEQ ID NO: 5509575 - DNA, 25 bp, Homo sapien
acctattcgtatctctgggagaccc

SEQ ID NO: 5509576 - DNA, 25 bp, Homo sapien
gggtctcccagagatacgaataggt

SEQ ID NO: 5509577 - DNA, 25 bp, Homo sapien
agcagctaatcgtgactttggtaaa

SEQ ID NO: 5509578 - DNA, 25 bp, Homo sapien
cctctgccctccatccctgactccc

SEQ ID NO: 5509579 - DNA, 25 bp, Homo sapien
ctcacccggtccttcccagtcctgg

SEQ ID NO: 5509580 - DNA, 25 bp, Homo sapien
gctggagcttgtcacacgtcctcaa

SEQ ID NO: 5509581 - DNA, 25 bp, Homo sapien
ctcaaacccccacatccactccctc

SEQ ID NO: 5509582 - DNA, 25 bp, Homo sapien
accatgccccaagaccaccttccct

SEQ ID NO: 5509583 - DNA, 25 bp, Homo sapien
ggccccaccacaagcagctaatcgt

SEQ ID NO: 5509584 - DNA, 25 bp, Homo sapien
ttgcatgcaacacccacaaaaagga

SEQ ID NO: 5509585 - DNA, 25 bp, Homo sapien
tccctccggtcacctgctctgcacc

SEQ ID NO: 5509586 - DNA, 25 bp, Homo sapien
atccctgactccctccggacccctc

SEQ ID NO: 5509587 - DNA, 25 bp, Homo sapien
ccccggtgcactcacccggtccttc

SEQ ID NO: 5509588 - DNA, 25 bp, Homo sapien
aacagtaacaacaattgaacttaaa

SEQ ID NO: 5509589 - DNA, 25 bp, Homo sapien
tttaagttcaattgttgttactgtt

SEQ ID NO: 5509590 - DNA, 25 bp, Homo sapien
atactatgtcgacccaaaggcagga

SEQ ID NO: 5509591 - DNA, 25 bp, Homo sapien
gccaagcacttggtacatgatggtg

SEQ ID NO: 5509592 - DNA, 25 bp, Homo sapien
tgccagtggataaaagcaaaacaca

SEQ ID NO: 5509593 - DNA, 25 bp, Homo sapien
tcaaaaggtaggattgtagctaagg

SEQ ID NO: 5509594 - DNA, 25 bp, Homo sapien
tgagcaccttgactactacaggcct

SEQ ID NO: 5509595 - DNA, 25 bp, Homo sapien
aatgaaggcccactatgtgccaagc

SEQ ID NO: 5509596 - DNA, 25 bp, Homo sapien
tcaaggagctaaaaatgccagtgga

SEQ ID NO: 5509597 - DNA, 25 bp, Homo sapien
ggcacccgatggcaatacaaaatcc

SEQ ID NO: 5509598 - DNA, 25 bp, Homo sapien
agcaaggctcacaaaccacccaaac

SEQ ID NO: 5509599 - DNA, 25 bp, Homo sapien
tgcaataaatgcaatgaggggaaaa

SEQ ID NO: 5509600 - DNA, 25 bp, Homo sapien
tagcattttgctagggaccatggga

SEQ ID NO: 5509601 - DNA, 25 bp, Homo sapien
tggctctgtgctgtcacacccagcc

SEQ ID NO: 5509602 - DNA, 25 bp, Homo sapien
ctcataaactctaagggagagagag

SEQ ID NO: 5509603 - DNA, 25 bp, Homo sapien
acatcctacaggaatacaggcatta

SEQ ID NO: 5509604 - DNA, 25 bp, Homo sapien
aagttacaagaattgcgttgctgtc

SEQ ID NO: 5509605 - DNA, 25 bp, Homo sapien
atcaaatgtagaaatggtatcactc

SEQ ID NO: 5509606 - DNA, 25 bp, Homo sapien
agggtgctccactcaggaactccca

SEQ ID NO: 5509607 - DNA, 25 bp, Homo sapien
gacaagacagtctcaaggaaaaaca

SEQ ID NO: 5509608 - DNA, 25 bp, Homo sapien
caaggctccacagatcagctggctt

SEQ ID NO: 5509609 - DNA, 25 bp, Homo sapien
cacccagcctccaacagcgccttga

SEQ ID NO: 5509610 - DNA, 25 bp, Homo sapien
gggttcaaagaggagacatcctcca

SEQ ID NO: 5509611 - DNA, 25 bp, Homo sapien
tgaaagatggggctatttacacaag

SEQ ID NO: 5509612 - DNA, 25 bp, Homo sapien
agtctgagaaacatagtgagaactc

SEQ ID NO: 5509613 - DNA, 25 bp, Homo sapien
ggagttcgagaccagtctgagaaac

SEQ ID NO: 5509614 - DNA, 25 bp, Homo sapien
accaaatcctggccaggtgtggtgg

SEQ ID NO: 5509615 - DNA, 25 bp, Homo sapien
ccatcccggctaacatggtgaaacc

SEQ ID NO: 5509616 - DNA, 25 bp, Homo sapien
agtgagaactcaccttaaaaaacaa

SEQ ID NO: 5509617 - DNA, 25 bp, Homo sapien
ccagctatttgagaggctgaggcgg

SEQ ID NO: 5509618 - DNA, 25 bp, Homo sapien
gctcatgcctgtaagcccagctatt

SEQ ID NO: 5509619 - DNA, 25 bp, Homo sapien
taaacaaccaaatcctggccaggtg

SEQ ID NO: 5509620 - DNA, 25 bp, Homo sapien
aggagatcaagaccatcccggctaa

SEQ ID NO: 5509621 - DNA, 25 bp, Homo sapien
ctgttatgtgagaacagactggagg

SEQ ID NO: 5509622 - DNA, 25 bp, Homo sapien
aaaaccaaaactactctgttatgtg

SEQ ID NO: 5509623 - DNA, 25 bp, Homo sapien
tactgctccaatcacaggagtctgc

SEQ ID NO: 5509624 - DNA, 25 bp, Homo sapien
tagcccatggcaatgtagagaaatg

SEQ ID NO: 5509625 - DNA, 25 bp, Homo sapien
caggtgagatctagtctgatgttgc

SEQ ID NO: 5509626 - DNA, 25 bp, Homo sapien
aggagtctgcagtttctagaaaatc

SEQ ID NO: 5509627 - DNA, 25 bp, Homo sapien
cagcacactgggtttagcccatggc

SEQ ID NO: 5509628 - DNA, 25 bp, Homo sapien
agtcactaggcaccgacgtcctgat

SEQ ID NO: 5509629 - DNA, 25 bp, Homo sapien
ttgacccagtgtcccttggttgcta

SEQ ID NO: 5509630 - DNA, 25 bp, Homo sapien
caatccagttgggtagtctaatttt

SEQ ID NO: 5509631 - DNA, 25 bp, Homo sapien
gctaacaacgtattcctaggtactc

SEQ ID NO: 5509632 - DNA, 25 bp, Homo sapien
ctttctctggagacaagtcaggctg

SEQ ID NO: 5509633 - DNA, 25 bp, Homo sapien
agtctgcatctgaacttggtctttc

SEQ ID NO: 5509634 - DNA, 25 bp, Homo sapien
ggagaagcttgggcacaaactccca

SEQ ID NO: 5509635 - DNA, 25 bp, Homo sapien
ggtactatgggcaggatgcccctga

SEQ ID NO: 5509636 - DNA, 25 bp, Homo sapien
ctcagattttggccaagagagggcc

SEQ ID NO: 5509637 - DNA, 25 bp, Homo sapien
ggagacaatttaagactgaagggaa

SEQ ID NO: 5509638 - DNA, 25 bp, Homo sapien
agtggccctgcaaggctatcatccc

SEQ ID NO: 5509639 - DNA, 25 bp, Homo sapien
caggcagccagaacctacctaccaa

SEQ ID NO: 5509640 - DNA, 25 bp, Homo sapien
tccctggatcttgctggagtggaca

SEQ ID NO: 5509641 - DNA, 25 bp, Homo sapien
gagaatacacagcacaagggttaca

SEQ ID NO: 5509642 - DNA, 25 bp, Homo sapien
ctgcttggccctgagagtgagcaga

SEQ ID NO: 5509643 - DNA, 25 bp, Homo sapien
actgaagacagaggaatcatacttc

SEQ ID NO: 5509644 - DNA, 25 bp, Homo sapien
agagctgcatgagtgctaggcttca

SEQ ID NO: 5509645 - DNA, 25 bp, Homo sapien
tcgaagtacaaatgatgatccatgt

SEQ ID NO: 5509646 - DNA, 25 bp, Homo sapien
acatggatcatcatttgtacttcga

SEQ ID NO: 5509647 - DNA, 25 bp, Homo sapien
agcagagatgtcagacttcagaggc

SEQ ID NO: 5509648 - DNA, 25 bp, Homo sapien
ccagaaaagatggactcatgagcac

SEQ ID NO: 5509649 - DNA, 25 bp, Homo sapien
ggcatttgggggactcttcagatcc

SEQ ID NO: 5509650 - DNA, 25 bp, Homo sapien
ttgcttacaaatggaatagggtggg

SEQ ID NO: 5509651 - DNA, 25 bp, Homo sapien
gactcctagggctaagcagagatgt

SEQ ID NO: 5509652 - DNA, 25 bp, Homo sapien
tttaggaggtgacatcaacaatgac

SEQ ID NO: 5509653 - DNA, 25 bp, Homo sapien
cagttcactaccgcttgggcagcag

SEQ ID NO: 5509654 - DNA, 25 bp, Homo sapien
atgaggaactgatagccagtgatac

SEQ ID NO: 5509655 - DNA, 25 bp, Homo sapien
ctttgtggcagccagaaagtgaagg

SEQ ID NO: 5509656 - DNA, 25 bp, Homo sapien
actctgtcaggctgtatatggggag

SEQ ID NO: 5509657 - DNA, 25 bp, Homo sapien
ggggagcaacacatatggctttgtg

SEQ ID NO: 5509658 - DNA, 25 bp, Homo sapien
tatcctgcaatgcccggcaggtgcc

SEQ ID NO: 5509659 - DNA, 25 bp, Homo sapien
gctgcagtagatggatgcaatactg

SEQ ID NO: 5509660 - DNA, 25 bp, Homo sapien
gctgccctcaggatgtgtagctgca

SEQ ID NO: 5509661 - DNA, 25 bp, Homo sapien
acacacacatacagctgaaggcagc

SEQ ID NO: 5509662 - DNA, 25 bp, Homo sapien
atcctgtcagtaacacaactccagc

SEQ ID NO: 5509663 - DNA, 25 bp, Homo sapien
gggtgcacgtgcatcccagacacca

SEQ ID NO: 5509664 - DNA, 25 bp, Homo sapien
ctcttctgacgcatcagggagcagt

SEQ ID NO: 5509665 - DNA, 25 bp, Homo sapien
agtcacaggccccactggatatcct

SEQ ID NO: 5509666 - DNA, 25 bp, Homo sapien
accaccatggaggctgctactgtta

SEQ ID NO: 5509667 - DNA, 25 bp, Homo sapien
caaggcaaagttgaatataacacaa

SEQ ID NO: 5509668 - DNA, 25 bp, Homo sapien
tctggcttcagtagggttcacttcc

SEQ ID NO: 5509669 - DNA, 25 bp, Homo sapien
gtgggcggacacacactcataaaac

SEQ ID NO: 5509670 - DNA, 25 bp, Homo sapien
ctcccccagggctccccacttaaca

SEQ ID NO: 5509671 - DNA, 25 bp, Homo sapien
aaggggtttattctcaagcgtctaa

SEQ ID NO: 5509672 - DNA, 25 bp, Homo sapien
ctcaagcgtctaagggtttacaaac

SEQ ID NO: 5509673 - DNA, 25 bp, Homo sapien
ttttaaacatgcggcgttttgtgaa

SEQ ID NO: 5509674 - DNA, 25 bp, Homo sapien
gagaagatgacatctatgacttttt

SEQ ID NO: 5509675 - DNA, 25 bp, Homo sapien
gaatatcatgataataacaagagtc

SEQ ID NO: 5509676 - DNA, 25 bp, Homo sapien
agggctccccacttaacactgaagg

SEQ ID NO: 5509677 - DNA, 25 bp, Homo sapien
acatgcggcgttttgtgaatatcat

SEQ ID NO: 5509678 - DNA, 25 bp, Homo sapien
ggaccagccatgcaaccttccggca

SEQ ID NO: 5509679 - DNA, 25 bp, Homo sapien
atgataataacaagagtcaacaggc

SEQ ID NO: 5509680 - DNA, 25 bp, Homo sapien
ttcacagatatataacgggagattt

SEQ ID NO: 5509681 - DNA, 25 bp, Homo sapien
cacctcccctcatttcccaagcctt

SEQ ID NO: 5509682 - DNA, 25 bp, Homo sapien
tccaaggctgactcttcgcttcccc

SEQ ID NO: 5509683 - DNA, 25 bp, Homo sapien
aagcctttgtcgagggcccctctct

SEQ ID NO: 5509684 - DNA, 25 bp, Homo sapien
caagacctttctgacgacagtaaac

SEQ ID NO: 5509685 - DNA, 25 bp, Homo sapien
aaccaaaacacaagacctttctgac

SEQ ID NO: 5509686 - DNA, 25 bp, Homo sapien
ctgctggcttcctccccgccatcct

SEQ ID NO: 5509687 - DNA, 25 bp, Homo sapien
tccctacaccccagaggcatacagc

SEQ ID NO: 5509688 - DNA, 25 bp, Homo sapien
tatataacgggagatttggatgaaa

SEQ ID NO: 5509689 - DNA, 25 bp, Homo sapien
cgggagatttggatgaaataattac

SEQ ID NO: 5509690 - DNA, 25 bp, Homo sapien
cagtgtccttcgtgatcatgatgac

SEQ ID NO: 5509691 - DNA, 25 bp, Homo sapien
agtcggagctcggtcttctctggcg

SEQ ID NO: 5509692 - DNA, 25 bp, Homo sapien
cgccagagaagaccgagctccgact

SEQ ID NO: 5509693 - DNA, 25 bp, Homo sapien
tgagaatccagcccaagctagctgc

SEQ ID NO: 5509694 - DNA, 25 bp, Homo sapien
cggcctcactagccagtgtgatgcc

SEQ ID NO: 5509695 - DNA, 25 bp, Homo sapien
ctgctaaagaaggaccataaggtaa

SEQ ID NO: 5509696 - DNA, 25 bp, Homo sapien
cttaccttatggagtgagcccagac

SEQ ID NO: 5509697 - DNA, 25 bp, Homo sapien
aggacacgctcagatgaaaacatgc

SEQ ID NO: 5509698 - DNA, 25 bp, Homo sapien
ggactgatgtccaagtgcaatcacc

SEQ ID NO: 5509699 - DNA, 25 bp, Homo sapien
ggggacaagatattcacggcctcac

SEQ ID NO: 5509700 - DNA, 25 bp, Homo sapien
ggaaaagcttgggtagaacaatcca

SEQ ID NO: 5509701 - DNA, 25 bp, Homo sapien
gacctgacaatgcagctgtagcctc

SEQ ID NO: 5509702 - DNA, 25 bp, Homo sapien
ctgtagcctctgcaagtgaaaatcc

SEQ ID NO: 5509703 - DNA, 25 bp, Homo sapien
gtgaaaatccaggccgacttgcagt

SEQ ID NO: 5509704 - DNA, 25 bp, Homo sapien
cctaggttcgcgtgtcggcccaggg

SEQ ID NO: 5509705 - DNA, 25 bp, Homo sapien
ccctgggccgacacgcgaacctagg

SEQ ID NO: 5509706 - DNA, 25 bp, Homo sapien
atcagaagatggaaggctaatttat

SEQ ID NO: 5509707 - DNA, 25 bp, Homo sapien
catcatgggaagctttacggtgatc

SEQ ID NO: 5509708 - DNA, 25 bp, Homo sapien
taatgggttatgacaaagaagaatt

SEQ ID NO: 5509709 - DNA, 25 bp, Homo sapien
ttattgggaaggatatgttcgattc

SEQ ID NO: 5509710 - DNA, 25 bp, Homo sapien
gagcagtgtttggtgtgaaatgttt

SEQ ID NO: 5509711 - DNA, 25 bp, Homo sapien
gggtcgagcgcagatccctgtttat

SEQ ID NO: 5509712 - DNA, 25 bp, Homo sapien
agaatgatgtgaagattccagatgc

SEQ ID NO: 5509713 - DNA, 25 bp, Homo sapien
catgaggccacaacagacacttata

SEQ ID NO: 5509714 - DNA, 25 bp, Homo sapien
cggtgatcaccccagtgctgcttca

SEQ ID NO: 5509715 - DNA, 25 bp, Homo sapien
ctatgcttgcagaaacgagtacagt

SEQ ID NO: 5509716 - DNA, 25 bp, Homo sapien
tatactggcaatatggcccgagcag

SEQ ID NO: 5509717 - DNA, 25 bp, Homo sapien
tatgagatgatgttagatgaaatga

SEQ ID NO: 5509718 - DNA, 25 bp, Homo sapien
tttggcaatgacagtttaggttaac

SEQ ID NO: 5509719 - DNA, 25 bp, Homo sapien
caaatagcattggaggatcactttc

SEQ ID NO: 5509720 - DNA, 25 bp, Homo sapien
acattaaacaggtacaggtgctaag

SEQ ID NO: 5509721 - DNA, 25 bp, Homo sapien
aaaaaaatagagaatgccaagataa

SEQ ID NO: 5509722 - DNA, 25 bp, Homo sapien
ttaaaaaaggctgacaaactgacca

SEQ ID NO: 5509723 - DNA, 25 bp, Homo sapien
acaggtgctaagaaagtttaagact

SEQ ID NO: 5509724 - DNA, 25 bp, Homo sapien
tgttagggtcacacctgccaatgcc

SEQ ID NO: 5509725 - DNA, 25 bp, Homo sapien
tggccttgaatcgactgttagggtc

SEQ ID NO: 5509726 - DNA, 25 bp, Homo sapien
ctcttgacagaggagcaatatgaga

SEQ ID NO: 5509727 - DNA, 25 bp, Homo sapien
actgatggctcttacctaggctgtg

SEQ ID NO: 5509728 - DNA, 25 bp, Homo sapien
tccaaacaaactcaccagacaggtt

SEQ ID NO: 5509729 - DNA, 25 bp, Homo sapien
ggtctcacacagaaattaaagtctc

SEQ ID NO: 5509730 - DNA, 25 bp, Homo sapien
tacagctggacaacgtatgaacctt

SEQ ID NO: 5509731 - DNA, 25 bp, Homo sapien
tagggtccaatgcagacagttccat

SEQ ID NO: 5509732 - DNA, 25 bp, Homo sapien
aaataaagctgagttaggttgtcca

SEQ ID NO: 5509733 - DNA, 25 bp, Homo sapien
cccaagcccctcaagggcctttgcc

SEQ ID NO: 5509734 - DNA, 25 bp, Homo sapien
tctagtccagtttagggtccaatgc

SEQ ID NO: 5509735 - DNA, 25 bp, Homo sapien
ccagacaggttacataagatagtgt

SEQ ID NO: 5509736 - DNA, 25 bp, Homo sapien
tcaaatgaacttacagctggacaac

SEQ ID NO: 5509737 - DNA, 25 bp, Homo sapien
acgtatgaaccttgaagatgcctct

SEQ ID NO: 5509738 - DNA, 25 bp, Homo sapien
ctaaaacgcatcagggtattacatc

SEQ ID NO: 5509739 - DNA, 25 bp, Homo sapien
tttaagttagccatgagtacagtca

SEQ ID NO: 5509740 - DNA, 25 bp, Homo sapien
caagtatcagtcaagtgagggatca

SEQ ID NO: 5509741 - DNA, 25 bp, Homo sapien
ttacatactggggatagtagatggg

SEQ ID NO: 5509742 - DNA, 25 bp, Homo sapien
atgagtacagtcagtccctccccca

SEQ ID NO: 5509743 - DNA, 25 bp, Homo sapien
aggaccctaaagccacctggatgac

SEQ ID NO: 5509744 - DNA, 25 bp, Homo sapien
ggagggagcacctgactagttctaa

SEQ ID NO: 5509745 - DNA, 25 bp, Homo sapien
ctacagggaactcctacacagatcc

SEQ ID NO: 5509746 - DNA, 25 bp, Homo sapien
gatccatccagacctccccagtgcc

SEQ ID NO: 5509747 - DNA, 25 bp, Homo sapien
tgtaggggacagccttattttaata

SEQ ID NO: 5509748 - DNA, 25 bp, Homo sapien
ttaaagatcaggtaggattagaggg

SEQ ID NO: 5509749 - DNA, 25 bp, Homo sapien
taaggctttagatacaatgcagttg

SEQ ID NO: 5509750 - DNA, 25 bp, Homo sapien
aaacgtaaatccacaaagttattga

SEQ ID NO: 5509751 - DNA, 25 bp, Homo sapien
tcaataactttgtggatttacgttt

SEQ ID NO: 5509752 - DNA, 25 bp, Homo sapien
agcagtatataaataggttacctac

SEQ ID NO: 5509753 - DNA, 25 bp, Homo sapien
cttcccttttcaactggcagcactt

SEQ ID NO: 5509754 - DNA, 25 bp, Homo sapien
tccatgaaatgaaagtttgtgctgt

SEQ ID NO: 5509755 - DNA, 25 bp, Homo sapien
gatgaatcacagtatgttatggtta

SEQ ID NO: 5509756 - DNA, 25 bp, Homo sapien
ataagacaatacaacttgaatcaac

SEQ ID NO: 5509757 - DNA, 25 bp, Homo sapien
aaatcaatgtcaacagataaactcc

SEQ ID NO: 5509758 - DNA, 25 bp, Homo sapien
gaaagtttgtgctgtttgatgaatc

SEQ ID NO: 5509759 - DNA, 25 bp, Homo sapien
aacaagtgacagtttaaatcaatgt

SEQ ID NO: 5509760 - DNA, 25 bp, Homo sapien
acaaactcgttgaaatggaaatgct

SEQ ID NO: 5509761 - DNA, 25 bp, Homo sapien
tgtcttccacaacaaaagtagcaat

SEQ ID NO: 5509762 - DNA, 25 bp, Homo sapien
gttcccacatgataaaacaagtgac

SEQ ID NO: 5509763 - DNA, 25 bp, Homo sapien
gaggtaatggagaatttggaacacc

SEQ ID NO: 5509764 - DNA, 25 bp, Homo sapien
gcaaaaagaatagcatgagaaaggc

SEQ ID NO: 5509765 - DNA, 25 bp, Homo sapien
gaggtcatcgcatgaggtgatgtca

SEQ ID NO: 5509766 - DNA, 25 bp, Homo sapien
aagatataaaggaagaaaggctttg

SEQ ID NO: 5509767 - DNA, 25 bp, Homo sapien
tgggaccaaagagcaatctaagcaa

SEQ ID NO: 5509768 - DNA, 25 bp, Homo sapien
gagagtaatgaaggctgatgaatat

SEQ ID NO: 5509769 - DNA, 25 bp, Homo sapien
aaggctgtaggaagtttgaatctgt

SEQ ID NO: 5509770 - DNA, 25 bp, Homo sapien
aggcaagagcttgtaagacatcagt

SEQ ID NO: 5509771 - DNA, 25 bp, Homo sapien
ggagagctcagtcagaagatataaa

SEQ ID NO: 5509772 - DNA, 25 bp, Homo sapien
ctcaaaagataagtgctgaggcagc

SEQ ID NO: 5509773 - DNA, 25 bp, Homo sapien
atcaaggtgaatatgctagagagta

SEQ ID NO: 5509774 - DNA, 25 bp, Homo sapien
aaccaaaccaccagtcttctacaac

SEQ ID NO: 5509775 - DNA, 25 bp, Homo sapien
attgtagtagttgaaaccactgttc

SEQ ID NO: 5509776 - DNA, 25 bp, Homo sapien
acaatttaggaagctttaagatcat

SEQ ID NO: 5509777 - DNA, 25 bp, Homo sapien
tctgcatagccacaagggatccaca

SEQ ID NO: 5509778 - DNA, 25 bp, Homo sapien
ttctagtgggcagttagaacagttg

SEQ ID NO: 5509779 - DNA, 25 bp, Homo sapien
tttatcatcagagatcggtaaagat

SEQ ID NO: 5509780 - DNA, 25 bp, Homo sapien
taactctgaatcacggaagtattac

SEQ ID NO: 5509781 - DNA, 25 bp, Homo sapien
ttccccacagagctgcccaagttat

SEQ ID NO: 5509782 - DNA, 25 bp, Homo sapien
ttatctgctcctggggttggaccat

SEQ ID NO: 5509783 - DNA, 25 bp, Homo sapien
caacaagcaggtctaaagttctgag

SEQ ID NO: 5509784 - DNA, 25 bp, Homo sapien
gaggtaggtatctgcatagccacaa

SEQ ID NO: 5509785 - DNA, 25 bp, Homo sapien
cacaggttgcctcccagattgcttc

SEQ ID NO: 5509786 - DNA, 25 bp, Homo sapien
tagcagtaagattagtttccctcta

SEQ ID NO: 5509787 - DNA, 25 bp, Homo sapien
tagattattaatttgcagggccccg

SEQ ID NO: 5509788 - DNA, 25 bp, Homo sapien
taaattccaaaacacgaacattcac

SEQ ID NO: 5509789 - DNA, 25 bp, Homo sapien
tgctctaaagagaatttgtaaaatt

SEQ ID NO: 5509790 - DNA, 25 bp, Homo sapien
tgcagggccccgcaaagttattaaa

SEQ ID NO: 5509791 - DNA, 25 bp, Homo sapien
agcataaaatctaccacaggttgcc

SEQ ID NO: 5509792 - DNA, 25 bp, Homo sapien
aaatcaacagaggttacattaacat

SEQ ID NO: 5509793 - DNA, 25 bp, Homo sapien
tttctgtcaggcctactataaagta

SEQ ID NO: 5509794 - DNA, 25 bp, Homo sapien
atgttcaaaaggcacttcaagaaac

SEQ ID NO: 5509795 - DNA, 25 bp, Homo sapien
gtagtacaacacactgcttagcagt

SEQ ID NO: 5509796 - DNA, 25 bp, Homo sapien
aactaggataagaaagacacctgca

SEQ ID NO: 5509797 - DNA, 25 bp, Homo sapien
gatgttagtcactttggagaagcta

SEQ ID NO: 5509798 - DNA, 25 bp, Homo sapien
gcccctgcccctagagtatctgatt

SEQ ID NO: 5509799 - DNA, 25 bp, Homo sapien
aatatagtgtgatcctggactacac

SEQ ID NO: 5509800 - DNA, 25 bp, Homo sapien
tagtacttaatgagcccttcctgcc

SEQ ID NO: 5509801 - DNA, 25 bp, Homo sapien
agaaagacacctgcagagtttgctt

SEQ ID NO: 5509802 - DNA, 25 bp, Homo sapien
aatcacgtaggttgttgggtattgg

SEQ ID NO: 5509803 - DNA, 25 bp, Homo sapien
actaaacttggagaattacagattt

SEQ ID NO: 5509804 - DNA, 25 bp, Homo sapien
attaggtcacacaaaacagaatgaa

SEQ ID NO: 5509805 - DNA, 25 bp, Homo sapien
gggcagtaatcttcagtgtgtttca

SEQ ID NO: 5509806 - DNA, 25 bp, Homo sapien
gtagatctgatctgagatgaggccc

SEQ ID NO: 5509807 - DNA, 25 bp, Homo sapien
aaagtaccataattacaggcctacc

SEQ ID NO: 5509808 - DNA, 25 bp, Homo sapien
tggtacatggtcacataagaacaaa

SEQ ID NO: 5509809 - DNA, 25 bp, Homo sapien
gtaagtcctggaagacagttgcaga

SEQ ID NO: 5509810 - DNA, 25 bp, Homo sapien
caggacagaatttagtgaacgcaac

SEQ ID NO: 5509811 - DNA, 25 bp, Homo sapien
ttatagctggcttggtacatggtca

SEQ ID NO: 5509812 - DNA, 25 bp, Homo sapien
aggaaaacaagtggataattctatt

SEQ ID NO: 5509813 - DNA, 25 bp, Homo sapien
ggaagattagaatcccagggctgtt

SEQ ID NO: 5509814 - DNA, 25 bp, Homo sapien
tttagcaaaggtaagacaaatacta

SEQ ID NO: 5509815 - DNA, 25 bp, Homo sapien
gaacaggctgatcctacttctagaa

SEQ ID NO: 5509816 - DNA, 25 bp, Homo sapien
taagtgccagtaagtcctggaagac

SEQ ID NO: 5509817 - DNA, 25 bp, Homo sapien
aatgcttggcaaattggaacaggct

SEQ ID NO: 5509818 - DNA, 25 bp, Homo sapien
tttcacaatgcaaaaagaagacaaa

SEQ ID NO: 5509819 - DNA, 25 bp, Homo sapien
ttcaaatctaggtagaacttccacc

SEQ ID NO: 5509820 - DNA, 25 bp, Homo sapien
tgctcagtgcagggatgagcataca

SEQ ID NO: 5509821 - DNA, 25 bp, Homo sapien
aaactagcatgtacctgcgccccct

SEQ ID NO: 5509822 - DNA, 25 bp, Homo sapien
ctcaagttagcaatgtgaaacacat

SEQ ID NO: 5509823 - DNA, 25 bp, Homo sapien
acctcccccatggctactgcttgtc

SEQ ID NO: 5509824 - DNA, 25 bp, Homo sapien
catatctgtgctcagtgcagggatg

SEQ ID NO: 5509825 - DNA, 25 bp, Homo sapien
ttacaaactgaatcaactgaaactc

SEQ ID NO: 5509826 - DNA, 25 bp, Homo sapien
cctcccggggtcctatctttgtcac

SEQ ID NO: 5509827 - DNA, 25 bp, Homo sapien
atcagcagtccgttttgtgtggttt

SEQ ID NO: 5509828 - DNA, 25 bp, Homo sapien
actgtggtaattgaaactagcatgt

SEQ ID NO: 5509829 - DNA, 25 bp, Homo sapien
taatggaatatggctaatgtaaagt

SEQ ID NO: 5509830 - DNA, 25 bp, Homo sapien
aggtaaatggtaatgggacaatatg

SEQ ID NO: 5509831 - DNA, 25 bp, Homo sapien
tcaaagccagttgcctcatgaggac

SEQ ID NO: 5509832 - DNA, 25 bp, Homo sapien
cattacacatctgggatagagctct

SEQ ID NO: 5509833 - DNA, 25 bp, Homo sapien
tctttgatagaggactccagcaccc

SEQ ID NO: 5509834 - DNA, 25 bp, Homo sapien
gagaaacgaaagagaaccactctcc

SEQ ID NO: 5509835 - DNA, 25 bp, Homo sapien
gtctattctacaaggctggaggcac

SEQ ID NO: 5509836 - DNA, 25 bp, Homo sapien
agtggtaattagcgtagctcctgtc

SEQ ID NO: 5509837 - DNA, 25 bp, Homo sapien
tgaggaccgacatttgacttaagct

SEQ ID NO: 5509838 - DNA, 25 bp, Homo sapien
tcttctaccacaagaacgggcatgc

SEQ ID NO: 5509839 - DNA, 25 bp, Homo sapien
ctgtctgcccctgagaaacgaaaga

SEQ ID NO: 5509840 - DNA, 25 bp, Homo sapien
gctcaggcctaagatggttgtgttc

SEQ ID NO: 5509841 - DNA, 25 bp, Homo sapien
tgttcagctaccaggagagaaaatt

SEQ ID NO: 5509842 - DNA, 25 bp, Homo sapien
ccaaacaaggacaacctgacaaaac

SEQ ID NO: 5509843 - DNA, 25 bp, Homo sapien
ttattgagaaagttcggcaagcaga

SEQ ID NO: 5509844 - DNA, 25 bp, Homo sapien
gctttcataggaactggagagcaat

SEQ ID NO: 5509845 - DNA, 25 bp, Homo sapien
aactctggctgacggcagcctgttc

SEQ ID NO: 5509846 - DNA, 25 bp, Homo sapien
ggtcagactcacaggtccgtctcct

SEQ ID NO: 5509847 - DNA, 25 bp, Homo sapien
acctagttgagggatccaaacaagg

SEQ ID NO: 5509848 - DNA, 25 bp, Homo sapien
gagagcaattgtcaacaagggaaac

SEQ ID NO: 5509849 - DNA, 25 bp, Homo sapien
aggagccctggtcccaagctctggt

SEQ ID NO: 5509850 - DNA, 25 bp, Homo sapien
ggatgaggttaaagaaacacgtcca

SEQ ID NO: 5509851 - DNA, 25 bp, Homo sapien
tgaaagtagtccactatggggatcc

SEQ ID NO: 5509852 - DNA, 25 bp, Homo sapien
ggatctaggccaagcaccaaacaca

SEQ ID NO: 5509853 - DNA, 25 bp, Homo sapien
ataaacttccgtaacagtgggggca

SEQ ID NO: 5509854 - DNA, 25 bp, Homo sapien
ggggatccccaaacaaccagtagca

SEQ ID NO: 5509855 - DNA, 25 bp, Homo sapien
gtagcataatgagttcctgacaggc

SEQ ID NO: 5509856 - DNA, 25 bp, Homo sapien
gtgtgtgagctaatcatggtgcacc

SEQ ID NO: 5509857 - DNA, 25 bp, Homo sapien
tatcagataatagaagcacagcctt

SEQ ID NO: 5509858 - DNA, 25 bp, Homo sapien
taaaaggctgggtatccataagtgc

SEQ ID NO: 5509859 - DNA, 25 bp, Homo sapien
gctgttgggactaagaaagccttct

SEQ ID NO: 5509860 - DNA, 25 bp, Homo sapien
gcatggttcatggctgttgggacta

SEQ ID NO: 5509861 - DNA, 25 bp, Homo sapien
atcctagccaatcagtagggagggt

SEQ ID NO: 5509862 - DNA, 25 bp, Homo sapien
cattcagtgtcatagggaggatttt

SEQ ID NO: 5509863 - DNA, 25 bp, Homo sapien
acttagccaatggagaagacacttc

SEQ ID NO: 5509864 - DNA, 25 bp, Homo sapien
cccaatactgacaaggattctagtt

SEQ ID NO: 5509865 - DNA, 25 bp, Homo sapien
ttttagaagtcacaggaactatatc

SEQ ID NO: 5509866 - DNA, 25 bp, Homo sapien
tagagatactgaataaggcttaaac

SEQ ID NO: 5509867 - DNA, 25 bp, Homo sapien
tgacagtgattagcagtaataaggc

SEQ ID NO: 5509868 - DNA, 25 bp, Homo sapien
tttagcaccctcagtgggggaaaca

SEQ ID NO: 5509869 - DNA, 25 bp, Homo sapien
atgtaactggcatccccaagaattc

SEQ ID NO: 5509870 - DNA, 25 bp, Homo sapien
cacagaaccagtacactcaaagttt

SEQ ID NO: 5509871 - DNA, 25 bp, Homo sapien
aatagaggtgaatgaagtgaccttt

SEQ ID NO: 5509872 - DNA, 25 bp, Homo sapien
ctcgtgaagctttcctgagcatgtc

SEQ ID NO: 5509873 - DNA, 25 bp, Homo sapien
tcgagatcagcattgttacagtaac

SEQ ID NO: 5509874 - DNA, 25 bp, Homo sapien
tcacctcagggtcacgttcatttat

SEQ ID NO: 5509875 - DNA, 25 bp, Homo sapien
tcacaatgagcaggaaacatacttg

SEQ ID NO: 5509876 - DNA, 25 bp, Homo sapien
tcagtttgaaagttccatgtggttc

SEQ ID NO: 5509877 - DNA, 25 bp, Homo sapien
agtgggcagtatctcagcgccaaca

SEQ ID NO: 5509878 - DNA, 25 bp, Homo sapien
tagaaaaacaccaagaacatcattt

SEQ ID NO: 5509879 - DNA, 25 bp, Homo sapien
attttggtacagttcgagatcagca

SEQ ID NO: 5509880 - DNA, 25 bp, Homo sapien
ttgtacattgcaaaggctgttcata

SEQ ID NO: 5509881 - DNA, 25 bp, Homo sapien
ctcagcgccaacaaacaactcaatt

SEQ ID NO: 5509882 - DNA, 25 bp, Homo sapien
ccatgaacatcaagtgcactggctt

SEQ ID NO: 5509883 - DNA, 25 bp, Homo sapien
atcaagtgcactggcttgggtcact

SEQ ID NO: 5509884 - DNA, 25 bp, Homo sapien
gacaatcgctgccccccaacctcgt

SEQ ID NO: 5509885 - DNA, 25 bp, Homo sapien
agcagctcacgcgcctctacgactg

SEQ ID NO: 5509886 - DNA, 25 bp, Homo sapien
ctacggaagcgcctcaacctagagg

SEQ ID NO: 5509887 - DNA, 25 bp, Homo sapien
gcctcaacctagaggagtggatcct

SEQ ID NO: 5509888 - DNA, 25 bp, Homo sapien
ggagctgctggttgactgttacaaa

SEQ ID NO: 5509889 - DNA, 25 bp, Homo sapien
tcccagaactggagattgacgtgga

SEQ ID NO: 5509890 - DNA, 25 bp, Homo sapien
ccacagaggccttcatttctggcct

SEQ ID NO: 5509891 - DNA, 25 bp, Homo sapien
cgcgcctctacgactgccaggaaga

SEQ ID NO: 5509892 - DNA, 25 bp, Homo sapien
tgccccccaacctcgtagcaacagc

SEQ ID NO: 5509893 - DNA, 25 bp, Homo sapien
gcccaggaccacgcgtctactttca

SEQ ID NO: 5509894 - DNA, 25 bp, Homo sapien
acgcgtctactttcagagccccccc

SEQ ID NO: 5509895 - DNA, 25 bp, Homo sapien
aaactgtgcctccaacagaggggca

SEQ ID NO: 5509896 - DNA, 25 bp, Homo sapien
cggcctgggaaagatctccctcctt

SEQ ID NO: 5509897 - DNA, 25 bp, Homo sapien
taggctggttgaagtacagaactca

SEQ ID NO: 5509898 - DNA, 25 bp, Homo sapien
ctgatttgttagcaagtgccagctt

SEQ ID NO: 5509899 - DNA, 25 bp, Homo sapien
cttcaaacatcaggggttgtgaggg

SEQ ID NO: 5509900 - DNA, 25 bp, Homo sapien
acagaactcagaggaaaaaagaaat

SEQ ID NO: 5509901 - DNA, 25 bp, Homo sapien
agcttgtaggctggttgaagtacag

SEQ ID NO: 5509902 - DNA, 25 bp, Homo sapien
ggtccatgtgagtgacagaaatggt

SEQ ID NO: 5509903 - DNA, 25 bp, Homo sapien
cctctctggcaccatcaaacacttc

SEQ ID NO: 5509904 - DNA, 25 bp, Homo sapien
caggggctcttgtagagagatccct

SEQ ID NO: 5509905 - DNA, 25 bp, Homo sapien
gttagcaagtgccagcttgtaggct

SEQ ID NO: 5509906 - DNA, 25 bp, Homo sapien
tttgaaactgatgcttaatgatggc

SEQ ID NO: 5509907 - DNA, 25 bp, Homo sapien
tacaggtatcgtcagagatcatctc

SEQ ID NO: 5509908 - DNA, 25 bp, Homo sapien
tcgtatcagactgatgtgggggttt

SEQ ID NO: 5509909 - DNA, 25 bp, Homo sapien
gatggcagtgatttttaagtgtggt

SEQ ID NO: 5509910 - DNA, 25 bp, Homo sapien
ctcagtttaagggccaacaaaggaa

SEQ ID NO: 5509911 - DNA, 25 bp, Homo sapien
tggaaaaagtaaatcatgaatggct

SEQ ID NO: 5509912 - DNA, 25 bp, Homo sapien
tcaagatggtactagtaacagattc

SEQ ID NO: 5509913 - DNA, 25 bp, Homo sapien
gtttgacatcagttggtgagcctgt

SEQ ID NO: 5509914 - DNA, 25 bp, Homo sapien
tggagaaaagtgcatcgtaagtttt

SEQ ID NO: 5509915 - DNA, 25 bp, Homo sapien
aacaaacgttttgggagcatgtatc

SEQ ID NO: 5509916 - DNA, 25 bp, Homo sapien
caaagtgtgtagtactagcaagtgc

SEQ ID NO: 5509917 - DNA, 25 bp, Homo sapien
tgcttaaagcatgtggcaccacgat

SEQ ID NO: 5509918 - DNA, 25 bp, Homo sapien
gcaagtcagatgtggtggttgcatt

SEQ ID NO: 5509919 - DNA, 25 bp, Homo sapien
agtggaacactgcttaggacttgtc

SEQ ID NO: 5509920 - DNA, 25 bp, Homo sapien
tcagaaaatcaggagtaattacgta

SEQ ID NO: 5509921 - DNA, 25 bp, Homo sapien
ctaggatcgcaaaactgtaaaattc

SEQ ID NO: 5509922 - DNA, 25 bp, Homo sapien
gcacttctgactgagcgtctgggac

SEQ ID NO: 5509923 - DNA, 25 bp, Homo sapien
tagcacatagtcagagtaaagcatt

SEQ ID NO: 5509924 - DNA, 25 bp, Homo sapien
caggcctggaaccacccttagtgga

SEQ ID NO: 5509925 - DNA, 25 bp, Homo sapien
aaattcccccagtcaactccacggc

SEQ ID NO: 5509926 - DNA, 25 bp, Homo sapien
cttataggatggacaaagatacact

SEQ ID NO: 5509927 - DNA, 25 bp, Homo sapien
aggaaagtctacattgggcaagtca

SEQ ID NO: 5509928 - DNA, 25 bp, Homo sapien
agtttgaaagccaccagcctagagg

SEQ ID NO: 5509929 - DNA, 25 bp, Homo sapien
tcctaacacagctgaaggaaaaggg

SEQ ID NO: 5509930 - DNA, 25 bp, Homo sapien
ggctgagttagaacaggacatccta

SEQ ID NO: 5509931 - DNA, 25 bp, Homo sapien
ttccaacatgatttgcagaaggcac

SEQ ID NO: 5509932 - DNA, 25 bp, Homo sapien
gactgatttatgatggaaggcacgt

SEQ ID NO: 5509933 - DNA, 25 bp, Homo sapien
aggagtcggttcctgaagaacagat

SEQ ID NO: 5509934 - DNA, 25 bp, Homo sapien
actctgcacagatcggtggtgcatc

SEQ ID NO: 5509935 - DNA, 25 bp, Homo sapien
agcctagagggttctgaaaacttct

SEQ ID NO: 5509936 - DNA, 25 bp, Homo sapien
ctcggcggcagtgactattattcag

SEQ ID NO: 5509937 - DNA, 25 bp, Homo sapien
gggcatgtggaggcccctttctccc

SEQ ID NO: 5509938 - DNA, 25 bp, Homo sapien
ctggaaagtagacctttggcatttc

SEQ ID NO: 5509939 - DNA, 25 bp, Homo sapien
agcctgcttaagagggaccctaact

SEQ ID NO: 5509940 - DNA, 25 bp, Homo sapien
ctccttgaggagtaaggagtcagag

SEQ ID NO: 5509941 - DNA, 25 bp, Homo sapien
gtcgcattttgagtagaagtcgtcc

SEQ ID NO: 5509942 - DNA, 25 bp, Homo sapien
tatagtgtgaatatctggggagttc

SEQ ID NO: 5509943 - DNA, 25 bp, Homo sapien
gtggtaagaaatagaagcctgctta

SEQ ID NO: 5509944 - DNA, 25 bp, Homo sapien
agtgcattaggaactagccaaggag

SEQ ID NO: 5509945 - DNA, 25 bp, Homo sapien
gtccttaatgggagggctcctgtca

SEQ ID NO: 5509946 - DNA, 25 bp, Homo sapien
acttctggatgaaaaaggaaaccaa

SEQ ID NO: 5509947 - DNA, 25 bp, Homo sapien
cattacggtcacggattctacagcc

SEQ ID NO: 5509948 - DNA, 25 bp, Homo sapien
agaggaagaccctaagctcaccatt

SEQ ID NO: 5509949 - DNA, 25 bp, Homo sapien
tctacagccacaaatgcccgcagtc

SEQ ID NO: 5509950 - DNA, 25 bp, Homo sapien
tagaggctcttcctcaggccgctac

SEQ ID NO: 5509951 - DNA, 25 bp, Homo sapien
gtagcggcctgaggaagagcctcta

SEQ ID NO: 5509952 - DNA, 25 bp, Homo sapien
ctgtctagcgagacagaaagagcag

SEQ ID NO: 5509953 - DNA, 25 bp, Homo sapien
cacatgagaatacacaccagtttgc

SEQ ID NO: 5509954 - DNA, 25 bp, Homo sapien
gcagtgaggcgttttcttggatctt

SEQ ID NO: 5509955 - DNA, 25 bp, Homo sapien
agaagaatgcaaacggagtcatcta

SEQ ID NO: 5509956 - DNA, 25 bp, Homo sapien
ttggatcttagcagctgaagggttc

SEQ ID NO: 5509957 - DNA, 25 bp, Homo sapien
gagaatacacacggtaggtagtttc

SEQ ID NO: 5509958 - DNA, 25 bp, Homo sapien
gaaagagcagggtttacaatagtgc

SEQ ID NO: 5509959 - DNA, 25 bp, Homo sapien
agaacagttaaggttaaggcagtga

SEQ ID NO: 5509960 - DNA, 25 bp, Homo sapien
tttttagcgccaggaagaacagtta

SEQ ID NO: 5509961 - DNA, 25 bp, Homo sapien
gtcatcaagggcttgctggttggtt

SEQ ID NO: 5509962 - DNA, 25 bp, Homo sapien
gctgggctgtgcaaaccacatgaga

SEQ ID NO: 5509963 - DNA, 25 bp, Homo sapien
atggctctcaagtctgaaagcttag

SEQ ID NO: 5509964 - DNA, 25 bp, Homo sapien
tccaattctagcaaagtcagcataa

SEQ ID NO: 5509965 - DNA, 25 bp, Homo sapien
tacaagcctgactgatgagagtaat

SEQ ID NO: 5509966 - DNA, 25 bp, Homo sapien
gaaataaaagtggcaattgtctact

SEQ ID NO: 5509967 - DNA, 25 bp, Homo sapien
ggtaggaggaaactgcaattgttcc

SEQ ID NO: 5509968 - DNA, 25 bp, Homo sapien
tatgcagcatccactacaaagatat

SEQ ID NO: 5509969 - DNA, 25 bp, Homo sapien
gtggtaaggaatagatcatacaagc

SEQ ID NO: 5509970 - DNA, 25 bp, Homo sapien
cagtctaagagaagtgaatgtaatt

SEQ ID NO: 5509971 - DNA, 25 bp, Homo sapien
attgcagagcctaaaccataaattc

SEQ ID NO: 5509972 - DNA, 25 bp, Homo sapien
acacagaccatatgaagggtaggag

SEQ ID NO: 5509973 - DNA, 25 bp, Homo sapien
atgagagtaatagctttgtgaaaac

SEQ ID NO: 5509974 - DNA, 25 bp, Homo sapien
accggaggtgtctttaaagtgattg

SEQ ID NO: 5509975 - DNA, 25 bp, Homo sapien
caatcactttaaagacacctccggt

SEQ ID NO: 5509976 - DNA, 25 bp, Homo sapien
agggaccactgagagatgtatttga

SEQ ID NO: 5509977 - DNA, 25 bp, Homo sapien
tcttgattgatatggaagaaggggt

SEQ ID NO: 5509978 - DNA, 25 bp, Homo sapien
tcggcagtctttaccaagaccagat

SEQ ID NO: 5509979 - DNA, 25 bp, Homo sapien
cgcggtcaaccagaaaggaatttat

SEQ ID NO: 5509980 - DNA, 25 bp, Homo sapien
gtcggcagagcactgtgattgcttg

SEQ ID NO: 5509981 - DNA, 25 bp, Homo sapien
gtgggtcacaaagttttcggcagtc

SEQ ID NO: 5509982 - DNA, 25 bp, Homo sapien
aattctgcagggaccactgagagat

SEQ ID NO: 5509983 - DNA, 25 bp, Homo sapien
aggggtagtgaatgaaattctgcag

SEQ ID NO: 5509984 - DNA, 25 bp, Homo sapien
ttataatacattccatgggaggagg

SEQ ID NO: 5509985 - DNA, 25 bp, Homo sapien
ggctcaggaaataattgggccgtgg

SEQ ID NO: 5509986 - DNA, 25 bp, Homo sapien
tgtatttgatacgaaacagctcatc

SEQ ID NO: 5509987 - DNA, 25 bp, Homo sapien
gcggagtgcggagggtctcgccgga

SEQ ID NO: 5509988 - DNA, 25 bp, Homo sapien
tccggcgagaccctccgcactccgc

SEQ ID NO: 5509989 - DNA, 25 bp, Homo sapien
acacagtaatcaaagacagcagctt

SEQ ID NO: 5509990 - DNA, 25 bp, Homo sapien
acatgtgttggttacctgggaggta

SEQ ID NO: 5509991 - DNA, 25 bp, Homo sapien
cagtattggaaatgagcagactcaa

SEQ ID NO: 5509992 - DNA, 25 bp, Homo sapien
gtacagccccactgttcgtggtgtc

SEQ ID NO: 5509993 - DNA, 25 bp, Homo sapien
tcttggggctacacaatggaataaa

SEQ ID NO: 5509994 - DNA, 25 bp, Homo sapien
ccctaattagaggaatggaaatggt

SEQ ID NO: 5509995 - DNA, 25 bp, Homo sapien
tggaaagaacaagaagtggtattga

SEQ ID NO: 5509996 - DNA, 25 bp, Homo sapien
aatggaaatggtgatgtgactacat

SEQ ID NO: 5509997 - DNA, 25 bp, Homo sapien
agagtgagccagccctaaaaaaatg

SEQ ID NO: 5509998 - DNA, 25 bp, Homo sapien
atgtgactacatattgcagcggcaa

SEQ ID NO: 5509999 - DNA, 25 bp, Homo sapien
ctttagattaggcctgacagagtga

SEQ ID NO: 5510000 - DNA, 25 bp, Homo sapien
cagcagtgacataatgtaacaacac

SEQ ID NO: 5510001 - DNA, 25 bp, Homo sapien
ctggaatagcccaaaaagtagaagt

SEQ ID NO: 5510002 - DNA, 25 bp, Homo sapien
taaaagtgatctctcagggggcttt

SEQ ID NO: 5510003 - DNA, 25 bp, Homo sapien
ctttgaactaaggtcggcaagattt

SEQ ID NO: 5510004 - DNA, 25 bp, Homo sapien
gtttatctcaaggcaaacagggctc

SEQ ID NO: 5510005 - DNA, 25 bp, Homo sapien
tggacagattgtctaaagcctgctt

SEQ ID NO: 5510006 - DNA, 25 bp, Homo sapien
aatgccagaaaatgccaaggccgtt

SEQ ID NO: 5510007 - DNA, 25 bp, Homo sapien
ttactgtagaaatggacagattgtc

SEQ ID NO: 5510008 - DNA, 25 bp, Homo sapien
tagggctctggtcagaaataacacc

SEQ ID NO: 5510009 - DNA, 25 bp, Homo sapien
cggcaagatttgaaatggggcttca

SEQ ID NO: 5510010 - DNA, 25 bp, Homo sapien
ttggttattgcagaactagggctct

SEQ ID NO: 5510011 - DNA, 25 bp, Homo sapien
tttggagacgttcgcgggtcagaac

SEQ ID NO: 5510012 - DNA, 25 bp, Homo sapien
gttctgacccgcgaacgtctccaaa

SEQ ID NO: 5510013 - DNA, 25 bp, Homo sapien
ttaacacaaggaagtctactttgtc

SEQ ID NO: 5510014 - DNA, 25 bp, Homo sapien
ctgtagacagatatagttaaggaaa

SEQ ID NO: 5510015 - DNA, 25 bp, Homo sapien
attggtatgtgtacaggcccaagtg

SEQ ID NO: 5510016 - DNA, 25 bp, Homo sapien
aatgcaaattacagtaccagttaac

SEQ ID NO: 5510017 - DNA, 25 bp, Homo sapien
tttattgcagaggtgcaaaacggag

SEQ ID NO: 5510018 - DNA, 25 bp, Homo sapien
gcaaaacggagcaacaaacttgaat

SEQ ID NO: 5510019 - DNA, 25 bp, Homo sapien
tttaagatggaagtggtcacgctaa

SEQ ID NO: 5510020 - DNA, 25 bp, Homo sapien
tcagtcacagaggcattcaagtagt

SEQ ID NO: 5510021 - DNA, 25 bp, Homo sapien
ggcccaagtgatccatcggcaacac

SEQ ID NO: 5510022 - DNA, 25 bp, Homo sapien
gaagtggtcacgctaattggtatgt

SEQ ID NO: 5510023 - DNA, 25 bp, Homo sapien
tacaggcaagcagattttcatacaa

SEQ ID NO: 5510024 - DNA, 25 bp, Homo sapien
agaacccaattagagagagggtatc

SEQ ID NO: 5510025 - DNA, 25 bp, Homo sapien
gcccacagaaacacatgacagtgac

SEQ ID NO: 5510026 - DNA, 25 bp, Homo sapien
tctggggtggaaacacttctctctg

SEQ ID NO: 5510027 - DNA, 25 bp, Homo sapien
tggacagcaaacgcgacattcaaca

SEQ ID NO: 5510028 - DNA, 25 bp, Homo sapien
gctgatggctgctccctatggctgg

SEQ ID NO: 5510029 - DNA, 25 bp, Homo sapien
ctaaacttctaggacgagtggacag

SEQ ID NO: 5510030 - DNA, 25 bp, Homo sapien
aggcctactgtaacccaagtgggtg

SEQ ID NO: 5510031 - DNA, 25 bp, Homo sapien
ggacagacagaagcagttctgactc

SEQ ID NO: 5510032 - DNA, 25 bp, Homo sapien
tagcccccaacaatcctgagaatcc

SEQ ID NO: 5510033 - DNA, 25 bp, Homo sapien
gtgcactgacccaccctccagaacc

SEQ ID NO: 5510034 - DNA, 25 bp, Homo sapien
gacttggaccccacagataggaagg

SEQ ID NO: 5510035 - DNA, 25 bp, Homo sapien
cttatctcgggagaagaagctaaac

SEQ ID NO: 5510036 - DNA, 25 bp, Homo sapien
ttgctctgtgtaaccgtcatcgcgg

SEQ ID NO: 5510037 - DNA, 25 bp, Homo sapien
tggccaggcgcttcttatctcggga

SEQ ID NO: 5510038 - DNA, 25 bp, Homo sapien
gacagtctgtttgaggggtcagttt

SEQ ID NO: 5510039 - DNA, 25 bp, Homo sapien
tatcctacgggatcagagtcatcta

SEQ ID NO: 5510040 - DNA, 25 bp, Homo sapien
ttagaaacagtgatagccctgggta

SEQ ID NO: 5510041 - DNA, 25 bp, Homo sapien
gaagttaacgcagaagtctggcctc

SEQ ID NO: 5510042 - DNA, 25 bp, Homo sapien
tcgcttgatgcccgactccggctgg

SEQ ID NO: 5510043 - DNA, 25 bp, Homo sapien
tagtggcaagtgatgtatttggctt

SEQ ID NO: 5510044 - DNA, 25 bp, Homo sapien
ggggtcagttttcagggtgcatctg

SEQ ID NO: 5510045 - DNA, 25 bp, Homo sapien
ggtgcatctgcaccgagaggcttga

SEQ ID NO: 5510046 - DNA, 25 bp, Homo sapien
ggccccgtcgcgggagcgtggacgg

SEQ ID NO: 5510047 - DNA, 25 bp, Homo sapien
ccgtccacgctcccgcgacggggcc

SEQ ID NO: 5510048 - DNA, 25 bp, Homo sapien
ccaccacttcctgagatgagatgtc

SEQ ID NO: 5510049 - DNA, 25 bp, Homo sapien
acttcagtgatacaacagacgtttt

SEQ ID NO: 5510050 - DNA, 25 bp, Homo sapien
aaggagtgaagatcatttacggcac

SEQ ID NO: 5510051 - DNA, 25 bp, Homo sapien
gttggggttagacttgattcagtgc

SEQ ID NO: 5510052 - DNA, 25 bp, Homo sapien
agatgagatgtctaggtataggagg

SEQ ID NO: 5510053 - DNA, 25 bp, Homo sapien
tacaataagagcacatgcacaggaa

SEQ ID NO: 5510054 - DNA, 25 bp, Homo sapien
cttctaaaagtggatcttggggatc

SEQ ID NO: 5510055 - DNA, 25 bp, Homo sapien
acggcacatgtggattatggtttac

SEQ ID NO: 5510056 - DNA, 25 bp, Homo sapien
acctggaagcttctcactgctggat

SEQ ID NO: 5510057 - DNA, 25 bp, Homo sapien
actgctggatgagaatggcttctaa

SEQ ID NO: 5510058 - DNA, 25 bp, Homo sapien
tttgccctcggataaggagtgaaga

SEQ ID NO: 5510059 - DNA, 25 bp, Homo sapien
gggcaattagcagaaaaattcactc

SEQ ID NO: 5510060 - DNA, 25 bp, Homo sapien
ttccagtgactggaagccaacacga

SEQ ID NO: 5510061 - DNA, 25 bp, Homo sapien
tttgtttcaaagacggtgatgaaag

SEQ ID NO: 5510062 - DNA, 25 bp, Homo sapien
catgaagagttagaaatagcagttt

SEQ ID NO: 5510063 - DNA, 25 bp, Homo sapien
gccaacacgacaagaatgaaatggt

SEQ ID NO: 5510064 - DNA, 25 bp, Homo sapien
ctgtatttgaggctatcttgagtct

SEQ ID NO: 5510065 - DNA, 25 bp, Homo sapien
aatgaaatggtatgacctgtgaatt

SEQ ID NO: 5510066 - DNA, 25 bp, Homo sapien
agatctgggtcactaaggcttctgg

SEQ ID NO: 5510067 - DNA, 25 bp, Homo sapien
aacaagccttccaatgaatgtccaa

SEQ ID NO: 5510068 - DNA, 25 bp, Homo sapien
tctggttgagatctgggtcactaag

SEQ ID NO: 5510069 - DNA, 25 bp, Homo sapien
ttagttgtaggaattctggttaaga

SEQ ID NO: 5510070 - DNA, 25 bp, Homo sapien
agcctgggtgccctagacccagtca

SEQ ID NO: 5510071 - DNA, 25 bp, Homo sapien
cccaacaataaaccacagagctgac

SEQ ID NO: 5510072 - DNA, 25 bp, Homo sapien
tcactgtagtgaacaatggatattt

SEQ ID NO: 5510073 - DNA, 25 bp, Homo sapien
ggtgtgcacctctgaacagcccata

SEQ ID NO: 5510074 - DNA, 25 bp, Homo sapien
aaggagattgggcagaaccaattag

SEQ ID NO: 5510075 - DNA, 25 bp, Homo sapien
tttccaggagctctgccacatattc

SEQ ID NO: 5510076 - DNA, 25 bp, Homo sapien
aggctggtaggaaatcagctgaatc

SEQ ID NO: 5510077 - DNA, 25 bp, Homo sapien
agcagctctgcgaaatgtttgtaat

SEQ ID NO: 5510078 - DNA, 25 bp, Homo sapien
cttcctggcccgtaccaagtctctt

SEQ ID NO: 5510079 - DNA, 25 bp, Homo sapien
acagagctgacaaaaatgccaccta

SEQ ID NO: 5510080 - DNA, 25 bp, Homo sapien
gtaatgcatgtggatagtacacggt

SEQ ID NO: 5510081 - DNA, 25 bp, Homo sapien
acatgcaaattgaaagtgaatctat

SEQ ID NO: 5510082 - DNA, 25 bp, Homo sapien
ctttaatatggtagcagcaggatgc

SEQ ID NO: 5510083 - DNA, 25 bp, Homo sapien
aaatgggaatgatcaaagctaacac

SEQ ID NO: 5510084 - DNA, 25 bp, Homo sapien
ccagagtaactgtcgatatgtgaac

SEQ ID NO: 5510085 - DNA, 25 bp, Homo sapien
cataagaataaaaaccctgaatagc

SEQ ID NO: 5510086 - DNA, 25 bp, Homo sapien
aaaccctgaatagcatagccaaatc

SEQ ID NO: 5510087 - DNA, 25 bp, Homo sapien
aaaacctatgaaatgggaatgatca

SEQ ID NO: 5510088 - DNA, 25 bp, Homo sapien
atttggtatccagaggaggaaacaa

SEQ ID NO: 5510089 - DNA, 25 bp, Homo sapien
ggaaacaaaacacaggcacttaatc

SEQ ID NO: 5510090 - DNA, 25 bp, Homo sapien
cgatatgtgaactgtagattagaac

SEQ ID NO: 5510091 - DNA, 25 bp, Homo sapien
gttcaccaaaaaagtagcatacacc

SEQ ID NO: 5510092 - DNA, 25 bp, Homo sapien
aagaaggactgcatgtgaaatgctt

SEQ ID NO: 5510093 - DNA, 25 bp, Homo sapien
tcaatggttagtgtaaaattctgta

SEQ ID NO: 5510094 - DNA, 25 bp, Homo sapien
atgtgaaatgctttgcctaagttgt

SEQ ID NO: 5510095 - DNA, 25 bp, Homo sapien
ttgcctaagttgtaaggctcctgtc

SEQ ID NO: 5510096 - DNA, 25 bp, Homo sapien
ttagggtagtgcacatgtacttaaa

SEQ ID NO: 5510097 - DNA, 25 bp, Homo sapien
ctttattgacaatagacaagtcttt

SEQ ID NO: 5510098 - DNA, 25 bp, Homo sapien
ttcaggtgaaactgtagcagatcct

SEQ ID NO: 5510099 - DNA, 25 bp, Homo sapien
ttcccaggagatttaagaaatagta

SEQ ID NO: 5510100 - DNA, 25 bp, Homo sapien
ttacgctatcattaaaggccaaaaa

SEQ ID NO: 5510101 - DNA, 25 bp, Homo sapien
agacaagtcttttagggtagtgcac

SEQ ID NO: 5510102 - DNA, 25 bp, Homo sapien
gaaatagtatttctgaacaggaata

SEQ ID NO: 5510103 - DNA, 25 bp, Homo sapien
ttggaaagaagttcatagtgtattc

SEQ ID NO: 5510104 - DNA, 25 bp, Homo sapien
gctggaagggaccttgtagatcatt

SEQ ID NO: 5510105 - DNA, 25 bp, Homo sapien
atgatgtaattacagaatggcggcg

SEQ ID NO: 5510106 - DNA, 25 bp, Homo sapien
catgcctggcagtcacttgtgtatg

SEQ ID NO: 5510107 - DNA, 25 bp, Homo sapien
gagtcccattccagtgttcgttcag

SEQ ID NO: 5510108 - DNA, 25 bp, Homo sapien
ctgtgctgagagtatcattctggtt

SEQ ID NO: 5510109 - DNA, 25 bp, Homo sapien
actgtgatatttgtaggaacaccac

SEQ ID NO: 5510110 - DNA, 25 bp, Homo sapien
accaaagcatttactcggaagttac

SEQ ID NO: 5510111 - DNA, 25 bp, Homo sapien
aagaaaacgttaatgactcgctccc

SEQ ID NO: 5510112 - DNA, 25 bp, Homo sapien
cataaggaagtcatcataaaggttt

SEQ ID NO: 5510113 - DNA, 25 bp, Homo sapien
aggaacaccacactattgctgtatc

SEQ ID NO: 5510114 - DNA, 25 bp, Homo sapien
taacagtcacccactacagacattc

SEQ ID NO: 5510115 - DNA, 25 bp, Homo sapien
tgagattagcaccattgtagaatgc

SEQ ID NO: 5510116 - DNA, 25 bp, Homo sapien
tgaactaaatagggattatagcaca

SEQ ID NO: 5510117 - DNA, 25 bp, Homo sapien
gtgcagcactcaaaagggaaataca

SEQ ID NO: 5510118 - DNA, 25 bp, Homo sapien
caagttaccagtctgttcaccgttc

SEQ ID NO: 5510119 - DNA, 25 bp, Homo sapien
tatgttaacatgttgtgcagcactc

SEQ ID NO: 5510120 - DNA, 25 bp, Homo sapien
caagtctcaaatctgtcatgggaac

SEQ ID NO: 5510121 - DNA, 25 bp, Homo sapien
gtcatgggaactcaaacaagttacc

SEQ ID NO: 5510122 - DNA, 25 bp, Homo sapien
tttggcatagatgttgctcctcttc

SEQ ID NO: 5510123 - DNA, 25 bp, Homo sapien
tcccctgtgggatgtcatactgcat

SEQ ID NO: 5510124 - DNA, 25 bp, Homo sapien
cctagactttagaacacgtggttgt

SEQ ID NO: 5510125 - DNA, 25 bp, Homo sapien
aatgtcccaaaacagagctaatatt

SEQ ID NO: 5510126 - DNA, 25 bp, Homo sapien
acatgcaatgtggaagctgtaccaa

SEQ ID NO: 5510127 - DNA, 25 bp, Homo sapien
ttatatatacggaaaaaaatgcagc

SEQ ID NO: 5510128 - DNA, 25 bp, Homo sapien
ctatgctatcgaacaaggatagttc

SEQ ID NO: 5510129 - DNA, 25 bp, Homo sapien
attgagataaatattaggagaccct

SEQ ID NO: 5510130 - DNA, 25 bp, Homo sapien
tttaacagtaaatgttgggaggcac

SEQ ID NO: 5510131 - DNA, 25 bp, Homo sapien
aatactaaagtgaacatgcaatgtg

SEQ ID NO: 5510132 - DNA, 25 bp, Homo sapien
tcccattctgaaagaagacatgtta

SEQ ID NO: 5510133 - DNA, 25 bp, Homo sapien
taagatttctcgggtgtgttcatga

SEQ ID NO: 5510134 - DNA, 25 bp, Homo sapien
aaatgttgggaggcacacatatatt

SEQ ID NO: 5510135 - DNA, 25 bp, Homo sapien
aggagaccctgacaatcaccagaac

SEQ ID NO: 5510136 - DNA, 25 bp, Homo sapien
aatagaataggaaatagcagccact

SEQ ID NO: 5510137 - DNA, 25 bp, Homo sapien
tcaggactgtggctagattttgccc

SEQ ID NO: 5510138 - DNA, 25 bp, Homo sapien
cagttctaggaaagtttggtgcctc

SEQ ID NO: 5510139 - DNA, 25 bp, Homo sapien
acactgtatagagaaagaaagcttt

SEQ ID NO: 5510140 - DNA, 25 bp, Homo sapien
cttgcaccggagacttgaaagttat

SEQ ID NO: 5510141 - DNA, 25 bp, Homo sapien
ctattaaacagcaagaaatgcctat

SEQ ID NO: 5510142 - DNA, 25 bp, Homo sapien
accaccagataaaacagatgttctc

SEQ ID NO: 5510143 - DNA, 25 bp, Homo sapien
ccagctgggcatcccagaagcctgg

SEQ ID NO: 5510144 - DNA, 25 bp, Homo sapien
tacattcagccccaacctacgtcac

SEQ ID NO: 5510145 - DNA, 25 bp, Homo sapien
aactagtactcccgggcacctgtga

SEQ ID NO: 5510146 - DNA, 25 bp, Homo sapien
ttggtgcctcctcaagaagtcacta

SEQ ID NO: 5510147 - DNA, 25 bp, Homo sapien
aaagacacaaaagtttagcatttac

SEQ ID NO: 5510148 - DNA, 25 bp, Homo sapien
ctgaaataatctgagtgtctttaga

SEQ ID NO: 5510149 - DNA, 25 bp, Homo sapien
aatttgtgccttaacagtgaggtcc

SEQ ID NO: 5510150 - DNA, 25 bp, Homo sapien
caccaacttctctgtacataccctc

SEQ ID NO: 5510151 - DNA, 25 bp, Homo sapien
ttgtgccttaacagtgaggtcctac

SEQ ID NO: 5510152 - DNA, 25 bp, Homo sapien
gagaaattcaaagtcttccactgtc

SEQ ID NO: 5510153 - DNA, 25 bp, Homo sapien
caaacataccatatatgagaaattc

SEQ ID NO: 5510154 - DNA, 25 bp, Homo sapien
tctgagtgtctttagagtaacttcc

SEQ ID NO: 5510155 - DNA, 25 bp, Homo sapien
aaggcaaaagacacaaaagtttagc

SEQ ID NO: 5510156 - DNA, 25 bp, Homo sapien
cagtgaggtcctacatcaaacatac

SEQ ID NO: 5510157 - DNA, 25 bp, Homo sapien
tgactttttaaatggtgttgacacc

SEQ ID NO: 5510158 - DNA, 25 bp, Homo sapien
gagcctctggacgtcacttggggcc

SEQ ID NO: 5510159 - DNA, 25 bp, Homo sapien
ggccccaagtgacgtccagaggctc

SEQ ID NO: 5510160 - DNA, 25 bp, Homo sapien
ttctgaggaacaaaattggccattt

SEQ ID NO: 5510161 - DNA, 25 bp, Homo sapien
ttttaagagtcaggtcacaacagaa

SEQ ID NO: 5510162 - DNA, 25 bp, Homo sapien
agtctgtcgaccctgcccatggaaa

SEQ ID NO: 5510163 - DNA, 25 bp, Homo sapien
ggaaagctccagaatgggtgtatat

SEQ ID NO: 5510164 - DNA, 25 bp, Homo sapien
ctaaatctcaagggcatctcaggtt

SEQ ID NO: 5510165 - DNA, 25 bp, Homo sapien
tgccctagagcttccattaccctgg

SEQ ID NO: 5510166 - DNA, 25 bp, Homo sapien
agggcatctcaggttgtgtctgctc

SEQ ID NO: 5510167 - DNA, 25 bp, Homo sapien
tatcctgtgactcctggccagatcc

SEQ ID NO: 5510168 - DNA, 25 bp, Homo sapien
tatagcagaggcagacctgatttga

SEQ ID NO: 5510169 - DNA, 25 bp, Homo sapien
tctagtgagtaaagaggtttctcag

SEQ ID NO: 5510170 - DNA, 25 bp, Homo sapien
gaaatcactgaaaagagagtctgtc

SEQ ID NO: 5510171 - DNA, 25 bp, Homo sapien
catatagttgaccagccagaaagcc

SEQ ID NO: 5510172 - DNA, 25 bp, Homo sapien
tttagcataggagcaaatttgaagc

SEQ ID NO: 5510173 - DNA, 25 bp, Homo sapien
ctaagaactaatatcaggccatggt

SEQ ID NO: 5510174 - DNA, 25 bp, Homo sapien
taaagtcatgacagggaagattgta

SEQ ID NO: 5510175 - DNA, 25 bp, Homo sapien
agccagagagctaagtataagataa

SEQ ID NO: 5510176 - DNA, 25 bp, Homo sapien
tttgccacaagaagctctaagaact

SEQ ID NO: 5510177 - DNA, 25 bp, Homo sapien
aaggaagttcaatagccagagagct

SEQ ID NO: 5510178 - DNA, 25 bp, Homo sapien
ttacagtactcggaggaatgaacaa

SEQ ID NO: 5510179 - DNA, 25 bp, Homo sapien
ggccatggttaatgaaaagtagaac

SEQ ID NO: 5510180 - DNA, 25 bp, Homo sapien
tgggggatcgttaccaccaaaatca

SEQ ID NO: 5510181 - DNA, 25 bp, Homo sapien
agggaagattgtacaagtgtgaaca

SEQ ID NO: 5510182 - DNA, 25 bp, Homo sapien
catgtgatgctaactctgctgtgtg

SEQ ID NO: 5510183 - DNA, 25 bp, Homo sapien
gcttgctgaaagttgcatagctact

SEQ ID NO: 5510184 - DNA, 25 bp, Homo sapien
gcttgtagagttaagtagcttgctg

SEQ ID NO: 5510185 - DNA, 25 bp, Homo sapien
ttgaatctaggtgtgacaattacaa

SEQ ID NO: 5510186 - DNA, 25 bp, Homo sapien
tctattgagtacagttgtgtgccag

SEQ ID NO: 5510187 - DNA, 25 bp, Homo sapien
attggcttagctggaatttgaatct

SEQ ID NO: 5510188 - DNA, 25 bp, Homo sapien
agggttaggacccaagtttgatgac

SEQ ID NO: 5510189 - DNA, 25 bp, Homo sapien
tgggcaggcctgtcatgacatcagg

SEQ ID NO: 5510190 - DNA, 25 bp, Homo sapien
gacatcaggacaggtgctgaacttc

SEQ ID NO: 5510191 - DNA, 25 bp, Homo sapien
ctgctgtgtggttttagactatgta

SEQ ID NO: 5510192 - DNA, 25 bp, Homo sapien
ataggcttaagtatggttatgagta

SEQ ID NO: 5510193 - DNA, 25 bp, Homo sapien
ttatgttaacttatactccgtattt

SEQ ID NO: 5510194 - DNA, 25 bp, Homo sapien
aaatacggagtataagttaacataa

SEQ ID NO: 5510195 - DNA, 25 bp, Homo sapien
tctttacaactggcagcaatgcagc

SEQ ID NO: 5510196 - DNA, 25 bp, Homo sapien
cgtaggttggcaaagagttatcaca

SEQ ID NO: 5510197 - DNA, 25 bp, Homo sapien
ccagatatgggtttcgtaggttggc

SEQ ID NO: 5510198 - DNA, 25 bp, Homo sapien
tactagaagacaaacacctgaggca

SEQ ID NO: 5510199 - DNA, 25 bp, Homo sapien
gaggcatgcaatctgcttggagtgc

SEQ ID NO: 5510200 - DNA, 25 bp, Homo sapien
tcgtatctcagatgcatggcctact

SEQ ID NO: 5510201 - DNA, 25 bp, Homo sapien
ccacagggcagaacttgcctccatt

SEQ ID NO: 5510202 - DNA, 25 bp, Homo sapien
ttaatggatttgatcgtcgggtgca

SEQ ID NO: 5510203 - DNA, 25 bp, Homo sapien
atcgtcgggtgcaaatttgagcatt

SEQ ID NO: 5510204 - DNA, 25 bp, Homo sapien
tttacatgaagctgctcacgggagc

SEQ ID NO: 5510205 - DNA, 25 bp, Homo sapien
cacgggagctggtgattcttccaga

SEQ ID NO: 5510206 - DNA, 25 bp, Homo sapien
tgcatttgtgaacacagatgccaaa

SEQ ID NO: 5510207 - DNA, 25 bp, Homo sapien
atatgaaaagcatcttggagaaata

SEQ ID NO: 5510208 - DNA, 25 bp, Homo sapien
tctccaaagtcatgggttgggatat

SEQ ID NO: 5510209 - DNA, 25 bp, Homo sapien
acgctggactacaaatgcaggtttc

SEQ ID NO: 5510210 - DNA, 25 bp, Homo sapien
ctgagttagtaacaaacaaatgtac

SEQ ID NO: 5510211 - DNA, 25 bp, Homo sapien
tgtgcagttatgcgtcaaatgcgac

SEQ ID NO: 5510212 - DNA, 25 bp, Homo sapien
aatgcacaaccaagagtatacactg

SEQ ID NO: 5510213 - DNA, 25 bp, Homo sapien
ggaccaaatgaaaacgctggactac

SEQ ID NO: 5510214 - DNA, 25 bp, Homo sapien
ataaaggtgatttgctaacacatgc

SEQ ID NO: 5510215 - DNA, 25 bp, Homo sapien
gacacagaagcagttatcctgggat

SEQ ID NO: 5510216 - DNA, 25 bp, Homo sapien
cgtcaaatgcgactgacacagaagc

SEQ ID NO: 5510217 - DNA, 25 bp, Homo sapien
atagcagaaccgtcaatcaacaatc

SEQ ID NO: 5510218 - DNA, 25 bp, Homo sapien
agattgaggactaaacagaaaacag

SEQ ID NO: 5510219 - DNA, 25 bp, Homo sapien
caacaatcacgtggggttgaaaagc

SEQ ID NO: 5510220 - DNA, 25 bp, Homo sapien
agggcacgcacattatagcagaacc

SEQ ID NO: 5510221 - DNA, 25 bp, Homo sapien
tgaaacttgaagggcacgcacatta

SEQ ID NO: 5510222 - DNA, 25 bp, Homo sapien
aaacacagggtaaagttgacaaata

SEQ ID NO: 5510223 - DNA, 25 bp, Homo sapien
tacaaagagtatgcactacagctta

SEQ ID NO: 5510224 - DNA, 25 bp, Homo sapien
gccccaaaatataacagaagatcac

SEQ ID NO: 5510225 - DNA, 25 bp, Homo sapien
agaagatcacaaacacgttcggaga

SEQ ID NO: 5510226 - DNA, 25 bp, Homo sapien
tgttacaggtaatcacgaagcttcc

SEQ ID NO: 5510227 - DNA, 25 bp, Homo sapien
attgaagtgaaatgattgggaaagt

SEQ ID NO: 5510228 - DNA, 25 bp, Homo sapien
agatgtttagaaatgagaatgtggc

SEQ ID NO: 5510229 - DNA, 25 bp, Homo sapien
tgggtgacccgataggtcccatcca

SEQ ID NO: 5510230 - DNA, 25 bp, Homo sapien
aatttatgactgtaagactgggctg

SEQ ID NO: 5510231 - DNA, 25 bp, Homo sapien
cagcgatcaccccaggacaactaca

SEQ ID NO: 5510232 - DNA, 25 bp, Homo sapien
cttgggtgatttggcaaaattagac

SEQ ID NO: 5510233 - DNA, 25 bp, Homo sapien
aggccaaactttaggcaaagcattc

SEQ ID NO: 5510234 - DNA, 25 bp, Homo sapien
gaaatatgaaacagagcagagtcag

SEQ ID NO: 5510235 - DNA, 25 bp, Homo sapien
ttggagcaagcaactgaaatatgaa

SEQ ID NO: 5510236 - DNA, 25 bp, Homo sapien
aggaactaagaggtaggaatttatg

SEQ ID NO: 5510237 - DNA, 25 bp, Homo sapien
caataagtgtgcacacagaggctga

SEQ ID NO: 5510238 - DNA, 25 bp, Homo sapien
gtcccatccaagaaatgcaaactcc

SEQ ID NO: 5510239 - DNA, 25 bp, Homo sapien
ccacttagaagtcggagtaagataa

SEQ ID NO: 5510240 - DNA, 25 bp, Homo sapien
ttatcttactccgacttctaagtgg

SEQ ID NO: 5510241 - DNA, 25 bp, Homo sapien
taaagctaagaaagcatggctaagg

SEQ ID NO: 5510242 - DNA, 25 bp, Homo sapien
ggtaggtagggcaattaacactatc

SEQ ID NO: 5510243 - DNA, 25 bp, Homo sapien
taagggctagcaacactcagataaa

SEQ ID NO: 5510244 - DNA, 25 bp, Homo sapien
ctatgcctaggaacaggcgagaata

SEQ ID NO: 5510245 - DNA, 25 bp, Homo sapien
gagcagtgagccatagctctggttc

SEQ ID NO: 5510246 - DNA, 25 bp, Homo sapien
cgacctgggtttaagccacacagag

SEQ ID NO: 5510247 - DNA, 25 bp, Homo sapien
gttccgcatgactagggagtagaat

SEQ ID NO: 5510248 - DNA, 25 bp, Homo sapien
aatgtataaagcaatggcgacctgg

SEQ ID NO: 5510249 - DNA, 25 bp, Homo sapien
gagaaagggctggacaatccattaa

SEQ ID NO: 5510250 - DNA, 25 bp, Homo sapien
ctagttagtagaagcatagggaata

SEQ ID NO: 5510251 - DNA, 25 bp, Homo sapien
agcggttaagatctcgaggctagtt

SEQ ID NO: 5510252 - DNA, 25 bp, Homo sapien
taggaagatggccccccaaaaatga

SEQ ID NO: 5510253 - DNA, 25 bp, Homo sapien
cttgacacaggatttacattggcgt

SEQ ID NO: 5510254 - DNA, 25 bp, Homo sapien
atagctgaatctagcagtgcctgtc

SEQ ID NO: 5510255 - DNA, 25 bp, Homo sapien
ctcccctgtcaggctgtgtgtagca

SEQ ID NO: 5510256 - DNA, 25 bp, Homo sapien
ggctgtgtgtagcattaggaagatg

SEQ ID NO: 5510257 - DNA, 25 bp, Homo sapien
taaaggcaagtttggttgtcaggta

SEQ ID NO: 5510258 - DNA, 25 bp, Homo sapien
tggttgtcaggtaaaagctaaaatg

SEQ ID NO: 5510259 - DNA, 25 bp, Homo sapien
ttacatatacacagcaaagattctc

SEQ ID NO: 5510260 - DNA, 25 bp, Homo sapien
ctaactgtagtaaaaagcaccattc

SEQ ID NO: 5510261 - DNA, 25 bp, Homo sapien
cagaagaatctgagaaaatcatcca

SEQ ID NO: 5510262 - DNA, 25 bp, Homo sapien
gagcaccaattctagggatggggta

SEQ ID NO: 5510263 - DNA, 25 bp, Homo sapien
atagcaattgacactgaagttgtat

SEQ ID NO: 5510264 - DNA, 25 bp, Homo sapien
tctacctcaaaaccaggagtcctga

SEQ ID NO: 5510265 - DNA, 25 bp, Homo sapien
tgagtctgtagatgaaccatgacaa

SEQ ID NO: 5510266 - DNA, 25 bp, Homo sapien
aagagaaccagctcagcccaactaa

SEQ ID NO: 5510267 - DNA, 25 bp, Homo sapien
tctgtgattgtaacatggaagatcc

SEQ ID NO: 5510268 - DNA, 25 bp, Homo sapien
cttgtcctgtacagtgggcagtcag

SEQ ID NO: 5510269 - DNA, 25 bp, Homo sapien
actggtgaaaagtgtttaattggac

SEQ ID NO: 5510270 - DNA, 25 bp, Homo sapien
tacaactcggactaaatactggtga

SEQ ID NO: 5510271 - DNA, 25 bp, Homo sapien
ggtttagctacccctgtggcaattc

SEQ ID NO: 5510272 - DNA, 25 bp, Homo sapien
ttccaaaccaagtactgcagtgatc

SEQ ID NO: 5510273 - DNA, 25 bp, Homo sapien
accagcacaatttcacaagagaacc

SEQ ID NO: 5510274 - DNA, 25 bp, Homo sapien
ttacaacaggtcttcccagagcttt

SEQ ID NO: 5510275 - DNA, 25 bp, Homo sapien
ttaatgtgcagacaggcatgtgaac

SEQ ID NO: 5510276 - DNA, 25 bp, Homo sapien
tttgggaaatgtggttctactagcc

SEQ ID NO: 5510277 - DNA, 25 bp, Homo sapien
ttctgtgagttaagctgtatatagc

SEQ ID NO: 5510278 - DNA, 25 bp, Homo sapien
agaaaatcataaggcatgagtgttt

SEQ ID NO: 5510279 - DNA, 25 bp, Homo sapien
caaaatcaaggaatcaaggtgcttc

SEQ ID NO: 5510280 - DNA, 25 bp, Homo sapien
tatatagcatatgggtgtatcattc

SEQ ID NO: 5510281 - DNA, 25 bp, Homo sapien
aaggtgcttcacaaaaggaacatct

SEQ ID NO: 5510282 - DNA, 25 bp, Homo sapien
tgtgaacctctgataaagagaggga

SEQ ID NO: 5510283 - DNA, 25 bp, Homo sapien
ggcatgagtgtttaaggagcacact

SEQ ID NO: 5510284 - DNA, 25 bp, Homo sapien
aaagatggacatgttgaattatttt

SEQ ID NO: 5510285 - DNA, 25 bp, Homo sapien
aaaagtgcagtgtagaagctgatga

SEQ ID NO: 5510286 - DNA, 25 bp, Homo sapien
ttcttacagggaccacattaatatc

SEQ ID NO: 5510287 - DNA, 25 bp, Homo sapien
tgcaacaaatcaagacacaagttat

SEQ ID NO: 5510288 - DNA, 25 bp, Homo sapien
acaagcaactgttaaacggacatta

SEQ ID NO: 5510289 - DNA, 25 bp, Homo sapien
atgaacctgtggtaacaaaagtatt

SEQ ID NO: 5510290 - DNA, 25 bp, Homo sapien
tggaatagatatcaaagtgtgttaa

SEQ ID NO: 5510291 - DNA, 25 bp, Homo sapien
tttctgacagtactaggctgggcaa

SEQ ID NO: 5510292 - DNA, 25 bp, Homo sapien
ggctgggcaacatcatcttaagagt

SEQ ID NO: 5510293 - DNA, 25 bp, Homo sapien
taaatgacagcaatgaacctgtggt

SEQ ID NO: 5510294 - DNA, 25 bp, Homo sapien
ttgtgttctgtgtgaatagtgctcc

SEQ ID NO: 5510295 - DNA, 25 bp, Homo sapien
tgtgcaagtcagtggccctgaacat

SEQ ID NO: 5510296 - DNA, 25 bp, Homo sapien
ttttatagcaagcacaagggcagtg

SEQ ID NO: 5510297 - DNA, 25 bp, Homo sapien
ggcgaatgtgctctcaggatcccaa

SEQ ID NO: 5510298 - DNA, 25 bp, Homo sapien
aagtacagttgacatgaatagtgat

SEQ ID NO: 5510299 - DNA, 25 bp, Homo sapien
gcagtgagaacatcaacaaggtcca

SEQ ID NO: 5510300 - DNA, 25 bp, Homo sapien
acagtttggtagtaaggagactggg

SEQ ID NO: 5510301 - DNA, 25 bp, Homo sapien
acggcaacaacataagagatggtga

SEQ ID NO: 5510302 - DNA, 25 bp, Homo sapien
gtgtatacaactggcaagcataagc

SEQ ID NO: 5510303 - DNA, 25 bp, Homo sapien
aaggagactgggcttccatcttgca

SEQ ID NO: 5510304 - DNA, 25 bp, Homo sapien
tgatagggagtctataccaaagtac

SEQ ID NO: 5510305 - DNA, 25 bp, Homo sapien
ataaaaacagataggaaacagtgca

SEQ ID NO: 5510306 - DNA, 25 bp, Homo sapien
ggtgattaaatgtctgggtcagccc

SEQ ID NO: 5510307 - DNA, 25 bp, Homo sapien
atatagaaataaataggacggcact

SEQ ID NO: 5510308 - DNA, 25 bp, Homo sapien
ttagtatgatattaaaaggcactta

SEQ ID NO: 5510309 - DNA, 25 bp, Homo sapien
taaaaggcacttataacacacaata

SEQ ID NO: 5510310 - DNA, 25 bp, Homo sapien
attaaataggaagatgatgatgcaa

SEQ ID NO: 5510311 - DNA, 25 bp, Homo sapien
cttctcaatggggttataaaaatac

SEQ ID NO: 5510312 - DNA, 25 bp, Homo sapien
aaaatgtccagaagctcacacttag

SEQ ID NO: 5510313 - DNA, 25 bp, Homo sapien
ttgttcttgatacaggttgataatc

SEQ ID NO: 5510314 - DNA, 25 bp, Homo sapien
tacaggttgataatcaagctgaaat

SEQ ID NO: 5510315 - DNA, 25 bp, Homo sapien
acaccataaatgtggacacctcctc

SEQ ID NO: 5510316 - DNA, 25 bp, Homo sapien
taaaattgataggacatttcatttc

SEQ ID NO: 5510317 - DNA, 25 bp, Homo sapien
aataagatacttagaaacccatctc

SEQ ID NO: 5510318 - DNA, 25 bp, Homo sapien
ccttatcgtagttaagcttagcgtg

SEQ ID NO: 5510319 - DNA, 25 bp, Homo sapien
cacgctaagcttaactacgataagg

SEQ ID NO: 5510320 - DNA, 25 bp, Homo sapien
ctcatcagtcccctggtctgtgaac

SEQ ID NO: 5510321 - DNA, 25 bp, Homo sapien
gttcacagaccaggggactgatgag

SEQ ID NO: 5510322 - DNA, 25 bp, Homo sapien
aacactgaacacaaaaaagaaacat

SEQ ID NO: 5510323 - DNA, 25 bp, Homo sapien
aaaaagaaacatgaatggcagagaa

SEQ ID NO: 5510324 - DNA, 25 bp, Homo sapien
ttggcaaataacaaagtctgcattt

SEQ ID NO: 5510325 - DNA, 25 bp, Homo sapien
aaagaaacaaaggaaatcagatgac

SEQ ID NO: 5510326 - DNA, 25 bp, Homo sapien
ttagaggtgaaattgtatcaatatt

SEQ ID NO: 5510327 - DNA, 25 bp, Homo sapien
aaggaacatggtaaaaagccaaatg

SEQ ID NO: 5510328 - DNA, 25 bp, Homo sapien
taacagaaaacgatccactgtactc

SEQ ID NO: 5510329 - DNA, 25 bp, Homo sapien
gaaaccaatattccgctcccctgaa

SEQ ID NO: 5510330 - DNA, 25 bp, Homo sapien
attggacgtaaatttttcatgaatc

SEQ ID NO: 5510331 - DNA, 25 bp, Homo sapien
agaatgtttgccagggtttaaatta

SEQ ID NO: 5510332 - DNA, 25 bp, Homo sapien
aatggcagagaaaactgaaaacaac

SEQ ID NO: 5510333 - DNA, 25 bp, Homo sapien
ccccgttctggaaacagcgatctgc

SEQ ID NO: 5510334 - DNA, 25 bp, Homo sapien
ggccagtcctagaacagtactcacc

SEQ ID NO: 5510335 - DNA, 25 bp, Homo sapien
tcagatgggctgataaggcccaaac

SEQ ID NO: 5510336 - DNA, 25 bp, Homo sapien
aagtaacatgttgctggaaaaaatt

SEQ ID NO: 5510337 - DNA, 25 bp, Homo sapien
tataaaccaaagctgcaggtctcta

SEQ ID NO: 5510338 - DNA, 25 bp, Homo sapien
agtactcaccacaagctgcatgcca

SEQ ID NO: 5510339 - DNA, 25 bp, Homo sapien
cactgaagaccaaatagaaccactc

SEQ ID NO: 5510340 - DNA, 25 bp, Homo sapien
agggaaggtgaactaattataatga

SEQ ID NO: 5510341 - DNA, 25 bp, Homo sapien
cagtacctataaccagatgtcctcc

SEQ ID NO: 5510342 - DNA, 25 bp, Homo sapien
tgctgaatcagtagtgtttggagtg

SEQ ID NO: 5510343 - DNA, 25 bp, Homo sapien
tatgaactaatgaggctaaaacact

SEQ ID NO: 5510344 - DNA, 25 bp, Homo sapien
agtccctgacacatcgcgtccagtg

SEQ ID NO: 5510345 - DNA, 25 bp, Homo sapien
cactggacgcgatgtgtcagggact

SEQ ID NO: 5510346 - DNA, 25 bp, Homo sapien
acagcccaatggtaaaaaacagaat

SEQ ID NO: 5510347 - DNA, 25 bp, Homo sapien
acctagaaaatgaacatatacacat

SEQ ID NO: 5510348 - DNA, 25 bp, Homo sapien
aacagaattctcgaactatggaaac

SEQ ID NO: 5510349 - DNA, 25 bp, Homo sapien
ctatggaaactagtgtgtgaaagac

SEQ ID NO: 5510350 - DNA, 25 bp, Homo sapien
tgaaactaacagaattacacaagct

SEQ ID NO: 5510351 - DNA, 25 bp, Homo sapien
gcacccaacagtatgtctttgacac

SEQ ID NO: 5510352 - DNA, 25 bp, Homo sapien
ttccacagaataaaaagccatacat

SEQ ID NO: 5510353 - DNA, 25 bp, Homo sapien
ctcataggaattcaacaggactgat

SEQ ID NO: 5510354 - DNA, 25 bp, Homo sapien
tctttgaggagtttccataattacc

SEQ ID NO: 5510355 - DNA, 25 bp, Homo sapien
gtgaacattcacagcccaatggtaa

SEQ ID NO: 5510356 - DNA, 25 bp, Homo sapien
aacaggactgatattgtgaacattc

SEQ ID NO: 5510357 - DNA, 25 bp, Homo sapien
tataaatagcagtaggaaaatgtaa

SEQ ID NO: 5510358 - DNA, 25 bp, Homo sapien
atcccactgctgaacactttgccgt

SEQ ID NO: 5510359 - DNA, 25 bp, Homo sapien
caaaagtggaagcataagactaaag

SEQ ID NO: 5510360 - DNA, 25 bp, Homo sapien
gtgctttaatgtggggataaaaggc

SEQ ID NO: 5510361 - DNA, 25 bp, Homo sapien
aaggcatcctctgaatggaataaca

SEQ ID NO: 5510362 - DNA, 25 bp, Homo sapien
atctcacacaaaattagcacctcac

SEQ ID NO: 5510363 - DNA, 25 bp, Homo sapien
ctagataaaagagctgaaacccatt

SEQ ID NO: 5510364 - DNA, 25 bp, Homo sapien
tttgccgttgtgatatgccctgaaa

SEQ ID NO: 5510365 - DNA, 25 bp, Homo sapien
tgtgaatctgagacaaaagtggaag

SEQ ID NO: 5510366 - DNA, 25 bp, Homo sapien
attagggagaacagactgtttcccc

SEQ ID NO: 5510367 - DNA, 25 bp, Homo sapien
tttgaatgacagacaatttggtttt

SEQ ID NO: 5510368 - DNA, 25 bp, Homo sapien
cagagagctgggttccacaaatcta

SEQ ID NO: 5510369 - DNA, 25 bp, Homo sapien
agggagtggaatcataaactgcttc

SEQ ID NO: 5510370 - DNA, 25 bp, Homo sapien
caggactgttactaagccggttctc

SEQ ID NO: 5510371 - DNA, 25 bp, Homo sapien
gcttgcgaagatcaggactgttact

SEQ ID NO: 5510372 - DNA, 25 bp, Homo sapien
agattttctagtgcagcggaaggtc

SEQ ID NO: 5510373 - DNA, 25 bp, Homo sapien
gcggttagaaactcagctagaagac

SEQ ID NO: 5510374 - DNA, 25 bp, Homo sapien
gcggaaggtctgagtctcatcatgc

SEQ ID NO: 5510375 - DNA, 25 bp, Homo sapien
acaaatctaacacgagtctgcccac

SEQ ID NO: 5510376 - DNA, 25 bp, Homo sapien
gtattggttgttgtatcggtaagcc

SEQ ID NO: 5510377 - DNA, 25 bp, Homo sapien
ctgcccactaaggagaagtgactca

SEQ ID NO: 5510378 - DNA, 25 bp, Homo sapien
cccagctcagagatttgcgtcgttt

SEQ ID NO: 5510379 - DNA, 25 bp, Homo sapien
caaaaaaaatcaaggtgagcaaaac

SEQ ID NO: 5510380 - DNA, 25 bp, Homo sapien
gataagattatgcttcaggaggctt

SEQ ID NO: 5510381 - DNA, 25 bp, Homo sapien
ttttacaatgcagctttagggtttc

SEQ ID NO: 5510382 - DNA, 25 bp, Homo sapien
tgacctacaaacaccagaacctcca

SEQ ID NO: 5510383 - DNA, 25 bp, Homo sapien
agctttagggtttctgacaggtatt

SEQ ID NO: 5510384 - DNA, 25 bp, Homo sapien
caaatatgtagcagcgtattactaa

SEQ ID NO: 5510385 - DNA, 25 bp, Homo sapien
agaaactcatgtggttagagagcat

SEQ ID NO: 5510386 - DNA, 25 bp, Homo sapien
caaccaagtagcaaaattgaaaggt

SEQ ID NO: 5510387 - DNA, 25 bp, Homo sapien
tagagagcattaagtctgagatttt

SEQ ID NO: 5510388 - DNA, 25 bp, Homo sapien
gtctgttcagtgacctacaaacacc

SEQ ID NO: 5510389 - DNA, 25 bp, Homo sapien
tcaaggtgagcaaaaccatttgggg

SEQ ID NO: 5510390 - DNA, 25 bp, Homo sapien
ctccactcaaagagcagggaaattt

SEQ ID NO: 5510391 - DNA, 25 bp, Homo sapien
gaagtagcatcatacccaaaacagg

SEQ ID NO: 5510392 - DNA, 25 bp, Homo sapien
caagaagactcctttggtgtttttc

SEQ ID NO: 5510393 - DNA, 25 bp, Homo sapien
aacattctaagcatacaagagtagt

SEQ ID NO: 5510394 - DNA, 25 bp, Homo sapien
agctgctacagcttaaccaattgct

SEQ ID NO: 5510395 - DNA, 25 bp, Homo sapien
aatgggatacttatgggcacaggta

SEQ ID NO: 5510396 - DNA, 25 bp, Homo sapien
caaaacaggtttagccttctgagaa

SEQ ID NO: 5510397 - DNA, 25 bp, Homo sapien
ggcacaggtatttaaaactggaaca

SEQ ID NO: 5510398 - DNA, 25 bp, Homo sapien
aacacacattcatgaaatgggatac

SEQ ID NO: 5510399 - DNA, 25 bp, Homo sapien
caacagtccaccgaaattgagttta

SEQ ID NO: 5510400 - DNA, 25 bp, Homo sapien
agacaatatgttctgaagtagcatc

SEQ ID NO: 5510401 - DNA, 25 bp, Homo sapien
atggaagataaattctaacgggcac

SEQ ID NO: 5510402 - DNA, 25 bp, Homo sapien
tcattagactcaatgggagaaatac

SEQ ID NO: 5510403 - DNA, 25 bp, Homo sapien
ccttgggaggaagtttcacctcatc

SEQ ID NO: 5510404 - DNA, 25 bp, Homo sapien
ctctgccatgttcaagcacttgggc

SEQ ID NO: 5510405 - DNA, 25 bp, Homo sapien
aatgggagaaatactttatggaaga

SEQ ID NO: 5510406 - DNA, 25 bp, Homo sapien
gaaagacctaggcaaagtatacatc

SEQ ID NO: 5510407 - DNA, 25 bp, Homo sapien
gagggatctgcgtgaattacagcaa

SEQ ID NO: 5510408 - DNA, 25 bp, Homo sapien
tctcatcagatgcatggtgtttttc

SEQ ID NO: 5510409 - DNA, 25 bp, Homo sapien
taacgggcacagccaaagtaacaaa

SEQ ID NO: 5510410 - DNA, 25 bp, Homo sapien
aaaaaggggcaacatttatgaatta

SEQ ID NO: 5510411 - DNA, 25 bp, Homo sapien
acaactgatccaaacaggaagtaaa

SEQ ID NO: 5510412 - DNA, 25 bp, Homo sapien
tcgaatattacttagagcaccttgc

SEQ ID NO: 5510413 - DNA, 25 bp, Homo sapien
agatgaactgctctcccatgaacac

SEQ ID NO: 5510414 - DNA, 25 bp, Homo sapien
agccaattacagcacgggaaggtgc

SEQ ID NO: 5510415 - DNA, 25 bp, Homo sapien
gggaaggtgcaatgtaaacatggat

SEQ ID NO: 5510416 - DNA, 25 bp, Homo sapien
aagcactacagaccttgcctcactg

SEQ ID NO: 5510417 - DNA, 25 bp, Homo sapien
tagaagcaatgccatagtgttacac

SEQ ID NO: 5510418 - DNA, 25 bp, Homo sapien
tccgctttaaggcatgcagcttgat

SEQ ID NO: 5510419 - DNA, 25 bp, Homo sapien
gcagcttgatgtgcaggataatttt

SEQ ID NO: 5510420 - DNA, 25 bp, Homo sapien
aataagatacagtgtcagaattaac

SEQ ID NO: 5510421 - DNA, 25 bp, Homo sapien
tccaaaggtagttaaagaagcacta

SEQ ID NO: 5510422 - DNA, 25 bp, Homo sapien
atgaacacagtcctagagtttccgc

SEQ ID NO: 5510423 - DNA, 25 bp, Homo sapien
ccaaattaagaccaccaactccacc

SEQ ID NO: 5510424 - DNA, 25 bp, Homo sapien
catagaaactccctggtgctggtgc

SEQ ID NO: 5510425 - DNA, 25 bp, Homo sapien
agggtcacaggttgcccctgcatct

SEQ ID NO: 5510426 - DNA, 25 bp, Homo sapien
cactaaggttgccatagaaactccc

SEQ ID NO: 5510427 - DNA, 25 bp, Homo sapien
tacagacatcagcctttggtatttg

SEQ ID NO: 5510428 - DNA, 25 bp, Homo sapien
tgtgatctccatccaataaggtctc

SEQ ID NO: 5510429 - DNA, 25 bp, Homo sapien
ctccaagaaaacaacgtagagttga

SEQ ID NO: 5510430 - DNA, 25 bp, Homo sapien
gccttgtgacatgctgttccaatcc

SEQ ID NO: 5510431 - DNA, 25 bp, Homo sapien
gttaattaacagccttgtgacatgc

SEQ ID NO: 5510432 - DNA, 25 bp, Homo sapien
accctttgccccatatacagacatc

SEQ ID NO: 5510433 - DNA, 25 bp, Homo sapien
aaaacaacgtagagttgaggtattc

SEQ ID NO: 5510434 - DNA, 25 bp, Homo sapien
gacaacacacaagactgagatgcac

SEQ ID NO: 5510435 - DNA, 25 bp, Homo sapien
tccgccacctctaggataggcaaac

SEQ ID NO: 5510436 - DNA, 25 bp, Homo sapien
ttgaatggtatcacccagggaatac

SEQ ID NO: 5510437 - DNA, 25 bp, Homo sapien
ttcctgagaaaccaagtccttagtg

SEQ ID NO: 5510438 - DNA, 25 bp, Homo sapien
tatggcttaaattggtcaggtttgc

SEQ ID NO: 5510439 - DNA, 25 bp, Homo sapien
agctagggagaggctctatatgcta

SEQ ID NO: 5510440 - DNA, 25 bp, Homo sapien
tctaactgccagcaagcactgtaca

SEQ ID NO: 5510441 - DNA, 25 bp, Homo sapien
ctgagccacaagtacattaagacat

SEQ ID NO: 5510442 - DNA, 25 bp, Homo sapien
agtgggaagggtatccctttgacca

SEQ ID NO: 5510443 - DNA, 25 bp, Homo sapien
gtggtggtaattcacgcagaaggaa

SEQ ID NO: 5510444 - DNA, 25 bp, Homo sapien
cagggaatacgtaaccagacaacac

SEQ ID NO: 5510445 - DNA, 25 bp, Homo sapien
caatttcaattgtaatagggctatt

SEQ ID NO: 5510446 - DNA, 25 bp, Homo sapien
tatacaaatgtatctcaggttagag

SEQ ID NO: 5510447 - DNA, 25 bp, Homo sapien
ttaaatacataaaatgcaacaattt

SEQ ID NO: 5510448 - DNA, 25 bp, Homo sapien
ttataggtcatctgtactgtcaatc

SEQ ID NO: 5510449 - DNA, 25 bp, Homo sapien
tcaggttagagattgatttttgacc

SEQ ID NO: 5510450 - DNA, 25 bp, Homo sapien
gaactatatgatgcagtaactactg

SEQ ID NO: 5510451 - DNA, 25 bp, Homo sapien
agtaaaactatcacccacatcaaga

SEQ ID NO: 5510452 - DNA, 25 bp, Homo sapien
tttaaatagatgtatatcgatgtac

SEQ ID NO: 5510453 - DNA, 25 bp, Homo sapien
atacatacagaaggattactcaata

SEQ ID NO: 5510454 - DNA, 25 bp, Homo sapien
aatagggctatttaaccagtttata

SEQ ID NO: 5510455 - DNA, 25 bp, Homo sapien
atcacccacatcaagatctggaaca

SEQ ID NO: 5510456 - DNA, 25 bp, Homo sapien
atcttctaattaaaggtcaatttat

SEQ ID NO: 5510457 - DNA, 25 bp, Homo sapien
ataaattgacctttaattagaagat

SEQ ID NO: 5510458 - DNA, 25 bp, Homo sapien
gaaggcccagtgattgcaagctggg

SEQ ID NO: 5510459 - DNA, 25 bp, Homo sapien
ccaaactagcggggtttctaggaca

SEQ ID NO: 5510460 - DNA, 25 bp, Homo sapien
gatgcctcaaattaagtctgaccac

SEQ ID NO: 5510461 - DNA, 25 bp, Homo sapien
cccacccgcaccctcgagtggggaa

SEQ ID NO: 5510462 - DNA, 25 bp, Homo sapien
ctccaaccccttggataggagggga

SEQ ID NO: 5510463 - DNA, 25 bp, Homo sapien
tcctcctgccaaaaggagagccaag

SEQ ID NO: 5510464 - DNA, 25 bp, Homo sapien
tgtacgtgtcttcactagatgcctc

SEQ ID NO: 5510465 - DNA, 25 bp, Homo sapien
accccagacgctaccatcccaaact

SEQ ID NO: 5510466 - DNA, 25 bp, Homo sapien
ttccttggtggatttgtacgtgtct

SEQ ID NO: 5510467 - DNA, 25 bp, Homo sapien
gatggcagagtcattggtgtaatga

SEQ ID NO: 5510468 - DNA, 25 bp, Homo sapien
gtgtaatgaagcaggctcctcctgc

SEQ ID NO: 5510469 - DNA, 25 bp, Homo sapien
cctgtaaggtgaatacacgaaaaag

SEQ ID NO: 5510470 - DNA, 25 bp, Homo sapien
ctttttcgtgtattcaccttacagg

SEQ ID NO: 5510471 - DNA, 25 bp, Homo sapien
tctgagtggaactgctagaaaactt

SEQ ID NO: 5510472 - DNA, 25 bp, Homo sapien
ataaggacacatgcaattaaaacag

SEQ ID NO: 5510473 - DNA, 25 bp, Homo sapien
aaaggctactaatacacaatgctgc

SEQ ID NO: 5510474 - DNA, 25 bp, Homo sapien
ctcaaagtgagtatgtcaaaagatc

SEQ ID NO: 5510475 - DNA, 25 bp, Homo sapien
gtcaaaagatcagttataaagccct

SEQ ID NO: 5510476 - DNA, 25 bp, Homo sapien
atagcatgaactaagtcaaagttgc

SEQ ID NO: 5510477 - DNA, 25 bp, Homo sapien
cacaatgctgctgctataaggacac

SEQ ID NO: 5510478 - DNA, 25 bp, Homo sapien
tcctgggcatatgccactcaaagtg

SEQ ID NO: 5510479 - DNA, 25 bp, Homo sapien
ctgtgatagcactagcaatacacca

SEQ ID NO: 5510480 - DNA, 25 bp, Homo sapien
ccccttaaagttatctgagtggaac

SEQ ID NO: 5510481 - DNA, 25 bp, Homo sapien
tttcacatgtatcagtaaacacaat

SEQ ID NO: 5510482 - DNA, 25 bp, Homo sapien
aaggtgattgcaatacttggtgtac

SEQ ID NO: 5510483 - DNA, 25 bp, Homo sapien
aaagctagtaaatggtgaatgagtt

SEQ ID NO: 5510484 - DNA, 25 bp, Homo sapien
actggagatttcatggtattgctat

SEQ ID NO: 5510485 - DNA, 25 bp, Homo sapien
aacatgaaatacaaagcaatacaat

SEQ ID NO: 5510486 - DNA, 25 bp, Homo sapien
gctgcactaaagagcaaaaggcaac

SEQ ID NO: 5510487 - DNA, 25 bp, Homo sapien
aaaaggcaacagtcaaaacgattac

SEQ ID NO: 5510488 - DNA, 25 bp, Homo sapien
tgtaaatttgcaagagttggcattt

SEQ ID NO: 5510489 - DNA, 25 bp, Homo sapien
catgtacaacaagagaaaggtgatt

SEQ ID NO: 5510490 - DNA, 25 bp, Homo sapien
tacaagccaagcaaagcacaatgtg

SEQ ID NO: 5510491 - DNA, 25 bp, Homo sapien
aagcaccaaaactgtaggttgttac

SEQ ID NO: 5510492 - DNA, 25 bp, Homo sapien
acccagaaccgataaaaatcatgtc

SEQ ID NO: 5510493 - DNA, 25 bp, Homo sapien
cgactgctacaggcagtgcatggat

SEQ ID NO: 5510494 - DNA, 25 bp, Homo sapien
ggcagtgcatggatgtgtaaacaaa

SEQ ID NO: 5510495 - DNA, 25 bp, Homo sapien
tgccgcctctactgcagctccccca

SEQ ID NO: 5510496 - DNA, 25 bp, Homo sapien
ggaggagccttctctctgccacccc

SEQ ID NO: 5510497 - DNA, 25 bp, Homo sapien
gtgcccatggatccggtgtctggga

SEQ ID NO: 5510498 - DNA, 25 bp, Homo sapien
agctcccccaggggcccattctctc

SEQ ID NO: 5510499 - DNA, 25 bp, Homo sapien
cgaagctgtgacaatcgactgctac

SEQ ID NO: 5510500 - DNA, 25 bp, Homo sapien
gtgggttagtgcccatggaaccctc

SEQ ID NO: 5510501 - DNA, 25 bp, Homo sapien
ctaccatccaaaagtcgaagctgtg

SEQ ID NO: 5510502 - DNA, 25 bp, Homo sapien
tctgacctcctgagtgtggaaaccc

SEQ ID NO: 5510503 - DNA, 25 bp, Homo sapien
ggggccaaggcccactgttacattc

SEQ ID NO: 5510504 - DNA, 25 bp, Homo sapien
gtatattgaatgcaaggtctgatat

SEQ ID NO: 5510505 - DNA, 25 bp, Homo sapien
ttaatagaatgaagtaaaaagccta

SEQ ID NO: 5510506 - DNA, 25 bp, Homo sapien
acagtgacagtacccgcctcttcta

SEQ ID NO: 5510507 - DNA, 25 bp, Homo sapien
tctacctggagttaggaatggtgga

SEQ ID NO: 5510508 - DNA, 25 bp, Homo sapien
atgctatggatatgaacacctagtg

SEQ ID NO: 5510509 - DNA, 25 bp, Homo sapien
aatgctaacgcctgtctggggctgg

SEQ ID NO: 5510510 - DNA, 25 bp, Homo sapien
cacaggctgcccccatctgatgacc

SEQ ID NO: 5510511 - DNA, 25 bp, Homo sapien
tcttccctggaatcaggccgctggt

SEQ ID NO: 5510512 - DNA, 25 bp, Homo sapien
gcaggtctgcaaagagtcaattgca

SEQ ID NO: 5510513 - DNA, 25 bp, Homo sapien
cccatctgatgacccagccaggctt

SEQ ID NO: 5510514 - DNA, 25 bp, Homo sapien
aaaaactgagctaacaaaaacagcc

SEQ ID NO: 5510515 - DNA, 25 bp, Homo sapien
tataagcatgggccttctgaatctc

SEQ ID NO: 5510516 - DNA, 25 bp, Homo sapien
aaaagaatcaatggatacctccttt

SEQ ID NO: 5510517 - DNA, 25 bp, Homo sapien
acctgggctccactgtttacttgct

SEQ ID NO: 5510518 - DNA, 25 bp, Homo sapien
agtaaaagaatgtaagatatggagt

SEQ ID NO: 5510519 - DNA, 25 bp, Homo sapien
tctgaatctcagcatgacatgttat

SEQ ID NO: 5510520 - DNA, 25 bp, Homo sapien
aacacaaagaaatactgaaatagtc

SEQ ID NO: 5510521 - DNA, 25 bp, Homo sapien
atagctcagaaaggaatagtagaaa

SEQ ID NO: 5510522 - DNA, 25 bp, Homo sapien
atatgtgaagagctataaaaataac

SEQ ID NO: 5510523 - DNA, 25 bp, Homo sapien
aaggaatagtagaaaacaaacacaa

SEQ ID NO: 5510524 - DNA, 25 bp, Homo sapien
aacacgtaaatgtacatgaaagctc

SEQ ID NO: 5510525 - DNA, 25 bp, Homo sapien
ttgctacatgtcctaagaaagtttc

SEQ ID NO: 5510526 - DNA, 25 bp, Homo sapien
aacgtccgaggtggttccctcacag

SEQ ID NO: 5510527 - DNA, 25 bp, Homo sapien
ctgtgagggaaccacctcggacgtt

SEQ ID NO: 5510528 - DNA, 25 bp, Homo sapien
tagggaaaagaataagtgaatcaat

SEQ ID NO: 5510529 - DNA, 25 bp, Homo sapien
ataagccagaaatcgtacatacaaa

SEQ ID NO: 5510530 - DNA, 25 bp, Homo sapien
agtgaatcaatgaattgtggttctc

SEQ ID NO: 5510531 - DNA, 25 bp, Homo sapien
accataatgaataagaggctggggt

SEQ ID NO: 5510532 - DNA, 25 bp, Homo sapien
tataagataaatgatcagccttccc

SEQ ID NO: 5510533 - DNA, 25 bp, Homo sapien
gatggagcttttagtctcgatgacc

SEQ ID NO: 5510534 - DNA, 25 bp, Homo sapien
ggtcacaaaactagagcaagttgtt

SEQ ID NO: 5510535 - DNA, 25 bp, Homo sapien
taaataagttagcagaaaacacaaa

SEQ ID NO: 5510536 - DNA, 25 bp, Homo sapien
aaggaatttgtgctcagttgtggtc

SEQ ID NO: 5510537 - DNA, 25 bp, Homo sapien
agtctcgatgaccaaaaccaaaccc

SEQ ID NO: 5510538 - DNA, 25 bp, Homo sapien
tcaaaagtacacaaggtcacaaaac

SEQ ID NO: 5510539 - DNA, 25 bp, Homo sapien
ctgtaaatggtacttaggtaggcgc

SEQ ID NO: 5510540 - DNA, 25 bp, Homo sapien
aatatacaaggttatgattggagta

SEQ ID NO: 5510541 - DNA, 25 bp, Homo sapien
aggaaaagcaacaccacccaaagag

SEQ ID NO: 5510542 - DNA, 25 bp, Homo sapien
gtgtgtgttatccagtgtgcggtaa

SEQ ID NO: 5510543 - DNA, 25 bp, Homo sapien
ctgctggaaccttctccggattggg

SEQ ID NO: 5510544 - DNA, 25 bp, Homo sapien
tcctcgctgtcaagaggagaagtag

SEQ ID NO: 5510545 - DNA, 25 bp, Homo sapien
gttatgattggagtatgatgtgagg

SEQ ID NO: 5510546 - DNA, 25 bp, Homo sapien
agctagaaggagagtaaactatcct

SEQ ID NO: 5510547 - DNA, 25 bp, Homo sapien
aaaccaaaatgactgcgtaatatac

SEQ ID NO: 5510548 - DNA, 25 bp, Homo sapien
acaaaataatgacagccagagtcac

SEQ ID NO: 5510549 - DNA, 25 bp, Homo sapien
tccggattgggttcatgagcatttt

SEQ ID NO: 5510550 - DNA, 25 bp, Homo sapien
gttgtgaagatcaacgtggcttgtg

SEQ ID NO: 5510551 - DNA, 25 bp, Homo sapien
gccctcgggctgctctgacattggg

SEQ ID NO: 5510552 - DNA, 25 bp, Homo sapien
ttgcccaggtttccactcaagttgc

SEQ ID NO: 5510553 - DNA, 25 bp, Homo sapien
tcacagttaacacctcgatcccaac

SEQ ID NO: 5510554 - DNA, 25 bp, Homo sapien
tggatggaatcacagttaacacctc

SEQ ID NO: 5510555 - DNA, 25 bp, Homo sapien
gctatgagactcaggacaccctggg

SEQ ID NO: 5510556 - DNA, 25 bp, Homo sapien
gtgactcacagcggtcctccagcaa

SEQ ID NO: 5510557 - DNA, 25 bp, Homo sapien
cagggctgcttctcttgggtgaccc

SEQ ID NO: 5510558 - DNA, 25 bp, Homo sapien
gcactcgctggatggaatcacagtt

SEQ ID NO: 5510559 - DNA, 25 bp, Homo sapien
cccagggtcgttgtgaagatcaacg

SEQ ID NO: 5510560 - DNA, 25 bp, Homo sapien
agactcaggacaccctgggctcctg

SEQ ID NO: 5510561 - DNA, 25 bp, Homo sapien
ggcgggtaggttcatcgctgtctat

SEQ ID NO: 5510562 - DNA, 25 bp, Homo sapien
ccagttattatggcaggccccagtg

SEQ ID NO: 5510563 - DNA, 25 bp, Homo sapien
ggtccaacctgggcattggtacctg

SEQ ID NO: 5510564 - DNA, 25 bp, Homo sapien
tgctgccacagaattgctgagaccc

SEQ ID NO: 5510565 - DNA, 25 bp, Homo sapien
aaggaaagctatgactgcaagcagc

SEQ ID NO: 5510566 - DNA, 25 bp, Homo sapien
gggcattggtacctgggccagttat

SEQ ID NO: 5510567 - DNA, 25 bp, Homo sapien
aggcacccatgagccactaggagct

SEQ ID NO: 5510568 - DNA, 25 bp, Homo sapien
agggtttgtgggcaccccacccaga

SEQ ID NO: 5510569 - DNA, 25 bp, Homo sapien
gagccactaggagctgtggctggtg

SEQ ID NO: 5510570 - DNA, 25 bp, Homo sapien
tgagaccccccaggttagatccctg

SEQ ID NO: 5510571 - DNA, 25 bp, Homo sapien
tgcattgcctgccgccatcacctct

SEQ ID NO: 5510572 - DNA, 25 bp, Homo sapien
taatactcaactagtcggttctatc

SEQ ID NO: 5510573 - DNA, 25 bp, Homo sapien
cactgttcccagctacaagcgatcc

SEQ ID NO: 5510574 - DNA, 25 bp, Homo sapien
ttcacatggtactgtgggaccataa

SEQ ID NO: 5510575 - DNA, 25 bp, Homo sapien
ttaataatcaatagggaaaatgatg

SEQ ID NO: 5510576 - DNA, 25 bp, Homo sapien
tgttcacggcaaactgccatactcc

SEQ ID NO: 5510577 - DNA, 25 bp, Homo sapien
tttccctgaagtaagcactgttccc

SEQ ID NO: 5510578 - DNA, 25 bp, Homo sapien
caaagtagtttgaatagggcttgcc

SEQ ID NO: 5510579 - DNA, 25 bp, Homo sapien
tttatttgaataagtggggagaaga

SEQ ID NO: 5510580 - DNA, 25 bp, Homo sapien
ccataaaaatggtcctgcaatctta

SEQ ID NO: 5510581 - DNA, 25 bp, Homo sapien
cagctacaagcgatcctcatttcac

SEQ ID NO: 5510582 - DNA, 25 bp, Homo sapien
tctaagtttgggtcagcttccaccc

SEQ ID NO: 5510583 - DNA, 25 bp, Homo sapien
agagaaggtaaacagaatcaaagta

SEQ ID NO: 5510584 - DNA, 25 bp, Homo sapien
gcccacggtgttcaaaatgcacagc

SEQ ID NO: 5510585 - DNA, 25 bp, Homo sapien
gggcagaaaaagattcatctgtcct

SEQ ID NO: 5510586 - DNA, 25 bp, Homo sapien
aggaaagaagctcacaagtacagtt

SEQ ID NO: 5510587 - DNA, 25 bp, Homo sapien
tctgttagtagtgctgaaaccacac

SEQ ID NO: 5510588 - DNA, 25 bp, Homo sapien
atattccattgtgaagaaggggcag

SEQ ID NO: 5510589 - DNA, 25 bp, Homo sapien
gctgtaggtcctatggcatccattc

SEQ ID NO: 5510590 - DNA, 25 bp, Homo sapien
tggaattgtcatcagagaaggtaaa

SEQ ID NO: 5510591 - DNA, 25 bp, Homo sapien
gctggactcagataagatgcacaca

SEQ ID NO: 5510592 - DNA, 25 bp, Homo sapien
gcacagcagtaccagatggctggac

SEQ ID NO: 5510593 - DNA, 25 bp, Homo sapien
agttatggtcaaatgaggtagaaac

SEQ ID NO: 5510594 - DNA, 25 bp, Homo sapien
actcagccctaaaagctcaacagac

SEQ ID NO: 5510595 - DNA, 25 bp, Homo sapien
gttgaataagaaagacatggaagat

SEQ ID NO: 5510596 - DNA, 25 bp, Homo sapien
agaaactggatttaaaacacctgat

SEQ ID NO: 5510597 - DNA, 25 bp, Homo sapien
ttgaactgcaagagatgaattttaa

SEQ ID NO: 5510598 - DNA, 25 bp, Homo sapien
ctcttgagaaaagagttaaagcttt

SEQ ID NO: 5510599 - DNA, 25 bp, Homo sapien
aggttctaggggaaacctgatcaag

SEQ ID NO: 5510600 - DNA, 25 bp, Homo sapien
gctcaacagacaattaagggcttaa

SEQ ID NO: 5510601 - DNA, 25 bp, Homo sapien
ttctctacagggtagggatcactac

SEQ ID NO: 5510602 - DNA, 25 bp, Homo sapien
gtatgaaaggcaattactcagccct

SEQ ID NO: 5510603 - DNA, 25 bp, Homo sapien
aaggacggtggtacactcttgagaa

SEQ ID NO: 5510604 - DNA, 25 bp, Homo sapien
acctgattctaaggacggtggtaca

SEQ ID NO: 5510605 - DNA, 25 bp, Homo sapien
ctcaacaatacaacatggttacaca

SEQ ID NO: 5510606 - DNA, 25 bp, Homo sapien
ttgataaattatattcctgggagta

SEQ ID NO: 5510607 - DNA, 25 bp, Homo sapien
caggatgtaccgttagagcaaatta

SEQ ID NO: 5510608 - DNA, 25 bp, Homo sapien
aacaaaagccatattattcgtcacc

SEQ ID NO: 5510609 - DNA, 25 bp, Homo sapien
ctaaaaggctatgcagaattctgtc

SEQ ID NO: 5510610 - DNA, 25 bp, Homo sapien
tccaagcgacagttacaaaagttaa

SEQ ID NO: 5510611 - DNA, 25 bp, Homo sapien
tggaagcagataatatcaaccaaga

SEQ ID NO: 5510612 - DNA, 25 bp, Homo sapien
tttacaggatgtaccgttagagcaa

SEQ ID NO: 5510613 - DNA, 25 bp, Homo sapien
tgtaaaaacacctaaaaggctatgc

SEQ ID NO: 5510614 - DNA, 25 bp, Homo sapien
tcctgggagtaaaaatgtttgctat

SEQ ID NO: 5510615 - DNA, 25 bp, Homo sapien
tgagttatttccaagcgacagttac

SEQ ID NO: 5510616 - DNA, 25 bp, Homo sapien
gaggctctgtaacaagtcattcacc

SEQ ID NO: 5510617 - DNA, 25 bp, Homo sapien
gaatgggaaaatatagtttgaccaa

SEQ ID NO: 5510618 - DNA, 25 bp, Homo sapien
tccaagtctgatgtggacattgttt

SEQ ID NO: 5510619 - DNA, 25 bp, Homo sapien
aacagccagaaaacccaccaatctc

SEQ ID NO: 5510620 - DNA, 25 bp, Homo sapien
agtcattcacctcagaaaaacagcc

SEQ ID NO: 5510621 - DNA, 25 bp, Homo sapien
atgatatcaaaaggaaatacaagat

SEQ ID NO: 5510622 - DNA, 25 bp, Homo sapien
atagtaaatggttggaaaactcagt

SEQ ID NO: 5510623 - DNA, 25 bp, Homo sapien
aataccgtaacaagttggcagtcgt

SEQ ID NO: 5510624 - DNA, 25 bp, Homo sapien
gttggcagtcgtaaaattaaaatga

SEQ ID NO: 5510625 - DNA, 25 bp, Homo sapien
tttgaagtgagaagttccaagtctg

SEQ ID NO: 5510626 - DNA, 25 bp, Homo sapien
ttgaaatttcttactgaggctctgt

SEQ ID NO: 5510627 - DNA, 25 bp, Homo sapien
ttaaaaaaagctagttggctgatgg

SEQ ID NO: 5510628 - DNA, 25 bp, Homo sapien
aaccggtctggggattaacagacag

SEQ ID NO: 5510629 - DNA, 25 bp, Homo sapien
agttttacagtgctttgagggcctt

SEQ ID NO: 5510630 - DNA, 25 bp, Homo sapien
cctttgcccaccggctgtgcacagg

SEQ ID NO: 5510631 - DNA, 25 bp, Homo sapien
cacagggagagcctgaaattccatt

SEQ ID NO: 5510632 - DNA, 25 bp, Homo sapien
ttgagggcctttagagatgaatata

SEQ ID NO: 5510633 - DNA, 25 bp, Homo sapien
aaagacaaactatgtacagacaccc

SEQ ID NO: 5510634 - DNA, 25 bp, Homo sapien
acatgttcataagcgggagaaaaat

SEQ ID NO: 5510635 - DNA, 25 bp, Homo sapien
tctgtatgtacaaaacctaggccac

SEQ ID NO: 5510636 - DNA, 25 bp, Homo sapien
acctaggccacagagatccagttta

SEQ ID NO: 5510637 - DNA, 25 bp, Homo sapien
agcaactggaaaatgcaaccggtct

SEQ ID NO: 5510638 - DNA, 25 bp, Homo sapien
aagtcttatgtagcaatccaaaaac

SEQ ID NO: 5510639 - DNA, 25 bp, Homo sapien
atggtgtccttaaatggcaaagtag

SEQ ID NO: 5510640 - DNA, 25 bp, Homo sapien
agataaactacagagactgaaagac

SEQ ID NO: 5510641 - DNA, 25 bp, Homo sapien
caatactccaatgtcactgaaaatc

SEQ ID NO: 5510642 - DNA, 25 bp, Homo sapien
tacagagactgaaagacaaaaattc

SEQ ID NO: 5510643 - DNA, 25 bp, Homo sapien
tgtacagagtgttgtgctgaagtga

SEQ ID NO: 5510644 - DNA, 25 bp, Homo sapien
atcctgaatgcattatagacaaagt

SEQ ID NO: 5510645 - DNA, 25 bp, Homo sapien
tggcaaagtagaatatcagactgaa

SEQ ID NO: 5510646 - DNA, 25 bp, Homo sapien
tgaaatgtacagagtgttgtgctga

SEQ ID NO: 5510647 - DNA, 25 bp, Homo sapien
ctaaaactagaaattggcaagaagc

SEQ ID NO: 5510648 - DNA, 25 bp, Homo sapien
aaatggaaagaaagtcttatgtagc

SEQ ID NO: 5510649 - DNA, 25 bp, Homo sapien
agaaaacatgttccccatctggtgc

SEQ ID NO: 5510650 - DNA, 25 bp, Homo sapien
gtagatccagtatttgatgaaactc

SEQ ID NO: 5510651 - DNA, 25 bp, Homo sapien
tgaaatgcaccaaatgaattgagtt

SEQ ID NO: 5510652 - DNA, 25 bp, Homo sapien
gcttgtggatgactctgtaacagac

SEQ ID NO: 5510653 - DNA, 25 bp, Homo sapien
catctggtgctcttaggaaggagta

SEQ ID NO: 5510654 - DNA, 25 bp, Homo sapien
gactaattggaattgttgaagctgc

SEQ ID NO: 5510655 - DNA, 25 bp, Homo sapien
aggacgcactatatgtgactgtgac

SEQ ID NO: 5510656 - DNA, 25 bp, Homo sapien
aggaggacggattgattccacattc

SEQ ID NO: 5510657 - DNA, 25 bp, Homo sapien
gggtggagcccatcttgcccctcct

SEQ ID NO: 5510658 - DNA, 25 bp, Homo sapien
ctggagagtaatctgggacatctta

SEQ ID NO: 5510659 - DNA, 25 bp, Homo sapien
taggaaggagtatagtaaatgcctc

SEQ ID NO: 5510660 - DNA, 25 bp, Homo sapien
aggagcaaaaggcttcaatggcctc

SEQ ID NO: 5510661 - DNA, 25 bp, Homo sapien
aaactagagttgcacatttgaaaac

SEQ ID NO: 5510662 - DNA, 25 bp, Homo sapien
aagtccacgctcacactccagcaac

SEQ ID NO: 5510663 - DNA, 25 bp, Homo sapien
caagtgcattggttcctagccatac

SEQ ID NO: 5510664 - DNA, 25 bp, Homo sapien
aagagaataagaagtaagtagtgtt

SEQ ID NO: 5510665 - DNA, 25 bp, Homo sapien
cattttcacggtaagaggagcaaaa

SEQ ID NO: 5510666 - DNA, 25 bp, Homo sapien
tccagcaacagcagatccattaact

SEQ ID NO: 5510667 - DNA, 25 bp, Homo sapien
tgtcatcactgcatcaagtccacgc

SEQ ID NO: 5510668 - DNA, 25 bp, Homo sapien
aataatgaatgtaaagaaccaaatt

SEQ ID NO: 5510669 - DNA, 25 bp, Homo sapien
caacagcatcagactaaaatacgtg

SEQ ID NO: 5510670 - DNA, 25 bp, Homo sapien
gaaaaaatacaacagcatcagacta

SEQ ID NO: 5510671 - DNA, 25 bp, Homo sapien
tgaaaacctggatcaaacgggtgca

SEQ ID NO: 5510672 - DNA, 25 bp, Homo sapien
atacaaacaagccacctatggttac

SEQ ID NO: 5510673 - DNA, 25 bp, Homo sapien
cacctatggttactacctaggaaac

SEQ ID NO: 5510674 - DNA, 25 bp, Homo sapien
tttcctgggaagaatacaaacaagc

SEQ ID NO: 5510675 - DNA, 25 bp, Homo sapien
taatgtcgccaaagtctggaaggat

SEQ ID NO: 5510676 - DNA, 25 bp, Homo sapien
agaccttcgaccagctcaccccgga

SEQ ID NO: 5510677 - DNA, 25 bp, Homo sapien
ggaggactccaagaccttcgaccag

SEQ ID NO: 5510678 - DNA, 25 bp, Homo sapien
cgggtgcagaaaagatacatctttg

SEQ ID NO: 5510679 - DNA, 25 bp, Homo sapien
ttgataatgtcgccaaagtctggaa

SEQ ID NO: 5510680 - DNA, 25 bp, Homo sapien
aggagctgaaaacctggatcaaacg

SEQ ID NO: 5510681 - DNA, 25 bp, Homo sapien
gtctggaaggattatgatagggaca

SEQ ID NO: 5510682 - DNA, 25 bp, Homo sapien
gctactctactggaggctccgggag

SEQ ID NO: 5510683 - DNA, 25 bp, Homo sapien
agggagattgcttgtgacgctactc

SEQ ID NO: 5510684 - DNA, 25 bp, Homo sapien
ttggcaccgttctcagctctgattc

SEQ ID NO: 5510685 - DNA, 25 bp, Homo sapien
ccggtccccaggcttcgtaacactg

SEQ ID NO: 5510686 - DNA, 25 bp, Homo sapien
ttcgtaacactgaaaagtgggcagc

SEQ ID NO: 5510687 - DNA, 25 bp, Homo sapien
gggagaggggtctcttcacttcctg

SEQ ID NO: 5510688 - DNA, 25 bp, Homo sapien
gatacccctccatcactggccagga

SEQ ID NO: 5510689 - DNA, 25 bp, Homo sapien
gaggacccctgtagagatacccctc

SEQ ID NO: 5510690 - DNA, 25 bp, Homo sapien
cctccatcactggccaggatagggg

SEQ ID NO: 5510691 - DNA, 25 bp, Homo sapien
gggcatcgttggattttggcaccgt

SEQ ID NO: 5510692 - DNA, 25 bp, Homo sapien
gtgacgctactctactggaggctcc

SEQ ID NO: 5510693 - DNA, 25 bp, Homo sapien
tcaactgctgcaaggtgctatgagg

SEQ ID NO: 5510694 - DNA, 25 bp, Homo sapien
cccatcccagtgtctgtgtgcgtcc

SEQ ID NO: 5510695 - DNA, 25 bp, Homo sapien
gactcgctggagaacatccccgaga

SEQ ID NO: 5510696 - DNA, 25 bp, Homo sapien
aagcctacgactacctcgagtgctc

SEQ ID NO: 5510697 - DNA, 25 bp, Homo sapien
gtgcgcatccaagcctacgactacc

SEQ ID NO: 5510698 - DNA, 25 bp, Homo sapien
cctcgagtgctctgccaagaccaag

SEQ ID NO: 5510699 - DNA, 25 bp, Homo sapien
ctgtgtgcgtccagctgtgttgcac

SEQ ID NO: 5510700 - DNA, 25 bp, Homo sapien
ttctgtcccaatgtgcccatcatcc

SEQ ID NO: 5510701 - DNA, 25 bp, Homo sapien
cagaacggctgcatcaactgctgca

SEQ ID NO: 5510702 - DNA, 25 bp, Homo sapien
gggcgcccccatcccagtgtctgtg

SEQ ID NO: 5510703 - DNA, 25 bp, Homo sapien
cttgttgcgccaggacttggcgtgg

SEQ ID NO: 5510704 - DNA, 25 bp, Homo sapien
aacaccacttagtaccactcgacaa

SEQ ID NO: 5510705 - DNA, 25 bp, Homo sapien
ttgtcgagtggtactaagtggtgtt

SEQ ID NO: 5510706 - DNA, 25 bp, Homo sapien
taccagcgcagttactgggtagagc

SEQ ID NO: 5510707 - DNA, 25 bp, Homo sapien
ttccacagccataccttacagaccc

SEQ ID NO: 5510708 - DNA, 25 bp, Homo sapien
ctcaccattgtatcaccaagaactc

SEQ ID NO: 5510709 - DNA, 25 bp, Homo sapien
caaagtaattttggggaacatataa

SEQ ID NO: 5510710 - DNA, 25 bp, Homo sapien
gcagttactgggtagagcaaaataa

SEQ ID NO: 5510711 - DNA, 25 bp, Homo sapien
gctcagtgcgtctatgtaccagcgc

SEQ ID NO: 5510712 - DNA, 25 bp, Homo sapien
tgctggtgacagattcaaagtaatt

SEQ ID NO: 5510713 - DNA, 25 bp, Homo sapien
taatctgtgatgtcttacggtaatc

SEQ ID NO: 5510714 - DNA, 25 bp, Homo sapien
aaggtaataacaatagtgtcaaaac

SEQ ID NO: 5510715 - DNA, 25 bp, Homo sapien
aaagtttgtttgctcagtgcgtcta

SEQ ID NO: 5510716 - DNA, 25 bp, Homo sapien
accttacagacccacataaaccttc

SEQ ID NO: 5510717 - DNA, 25 bp, Homo sapien
cctgttaatcagggagggtaatttc

SEQ ID NO: 5510718 - DNA, 25 bp, Homo sapien
tatccaactgggacctggaccccaa

SEQ ID NO: 5510719 - DNA, 25 bp, Homo sapien
aacagatgcaacatagctccgttcc

SEQ ID NO: 5510720 - DNA, 25 bp, Homo sapien
aataaatgtgagctggcctaaatcc

SEQ ID NO: 5510721 - DNA, 25 bp, Homo sapien
tctggtaacagcattaacaagagtc

SEQ ID NO: 5510722 - DNA, 25 bp, Homo sapien
agccccgtggtgtcttgtacaagtc

SEQ ID NO: 5510723 - DNA, 25 bp, Homo sapien
tctgaatgccaaaaggcacactctc

SEQ ID NO: 5510724 - DNA, 25 bp, Homo sapien
ttggctggtgcatgtagaacttata

SEQ ID NO: 5510725 - DNA, 25 bp, Homo sapien
aacagactcagaagttatggacatc

SEQ ID NO: 5510726 - DNA, 25 bp, Homo sapien
attgagacacttgtagggattctgc

SEQ ID NO: 5510727 - DNA, 25 bp, Homo sapien
accttaatgaggaaacacacttatc

SEQ ID NO: 5510728 - DNA, 25 bp, Homo sapien
cttccctgaaggtgtttgtatcccc

SEQ ID NO: 5510729 - DNA, 25 bp, Homo sapien
tatccccccatcttgagtagcgagg

SEQ ID NO: 5510730 - DNA, 25 bp, Homo sapien
gacccagcagaggatgcttcaaaga

SEQ ID NO: 5510731 - DNA, 25 bp, Homo sapien
caatccccagcacagcacagtaaca

SEQ ID NO: 5510732 - DNA, 25 bp, Homo sapien
ccccatcttgagtagcgaggggtta

SEQ ID NO: 5510733 - DNA, 25 bp, Homo sapien
cctgaaggtgtttgtatccccccat

SEQ ID NO: 5510734 - DNA, 25 bp, Homo sapien
tagcgaggggttaccaatcccatca

SEQ ID NO: 5510735 - DNA, 25 bp, Homo sapien
gacagccaatccatccacacacccc

SEQ ID NO: 5510736 - DNA, 25 bp, Homo sapien
cgccaatccccagcacagcacagta

SEQ ID NO: 5510737 - DNA, 25 bp, Homo sapien
accaatcccatcagacagccaatcc

SEQ ID NO: 5510738 - DNA, 25 bp, Homo sapien
gcagaggatgcttcaaagaactgga

SEQ ID NO: 5510739 - DNA, 25 bp, Homo sapien
tccaaagactaaggaatgaatctta

SEQ ID NO: 5510740 - DNA, 25 bp, Homo sapien
ttaaagtgcagagttaagcattctt

SEQ ID NO: 5510741 - DNA, 25 bp, Homo sapien
agagttacacagcttccacagagac

SEQ ID NO: 5510742 - DNA, 25 bp, Homo sapien
gttcaggtacagggaatacataagt

SEQ ID NO: 5510743 - DNA, 25 bp, Homo sapien
acagggaatacataagtacagcgta

SEQ ID NO: 5510744 - DNA, 25 bp, Homo sapien
aagtacagcgtaacaataccgatta

SEQ ID NO: 5510745 - DNA, 25 bp, Homo sapien
tggtcagagtagaacttaaagtgca

SEQ ID NO: 5510746 - DNA, 25 bp, Homo sapien
caagactgtataaacaaaatgctgt

SEQ ID NO: 5510747 - DNA, 25 bp, Homo sapien
tgaaagccaaccactgaaagcaaag

SEQ ID NO: 5510748 - DNA, 25 bp, Homo sapien
aagtaaatgcagtagtggcaaattt

SEQ ID NO: 5510749 - DNA, 25 bp, Homo sapien
ctagtcttggacatagtgaaagcta

SEQ ID NO: 5510750 - DNA, 25 bp, Homo sapien
ccttcaggggaagtattgaaagtca

SEQ ID NO: 5510751 - DNA, 25 bp, Homo sapien
gctcttgatgggcacccgtaaggag

SEQ ID NO: 5510752 - DNA, 25 bp, Homo sapien
aagctatgctcttgatgggcacccg

SEQ ID NO: 5510753 - DNA, 25 bp, Homo sapien
aaattgttcagtatctggggaattc

SEQ ID NO: 5510754 - DNA, 25 bp, Homo sapien
caacaggagaataatttggtcttca

SEQ ID NO: 5510755 - DNA, 25 bp, Homo sapien
catgactgatgtaaactgttgcata

SEQ ID NO: 5510756 - DNA, 25 bp, Homo sapien
tttgccctgacgcagttccgcacag

SEQ ID NO: 5510757 - DNA, 25 bp, Homo sapien
tgcatagtttcgcaaaggctttctc

SEQ ID NO: 5510758 - DNA, 25 bp, Homo sapien
gccatccacggacctcaacaggaga

SEQ ID NO: 5510759 - DNA, 25 bp, Homo sapien
ctacatgcattagagatggagcctc

SEQ ID NO: 5510760 - DNA, 25 bp, Homo sapien
tatctggggaattcaaagccctttc

SEQ ID NO: 5510761 - DNA, 25 bp, Homo sapien
taacataataagcttagtgacattc

SEQ ID NO: 5510762 - DNA, 25 bp, Homo sapien
actacattgtctgattggaaatttc

SEQ ID NO: 5510763 - DNA, 25 bp, Homo sapien
gtgacattcaacttcaacagtggac

SEQ ID NO: 5510764 - DNA, 25 bp, Homo sapien
attgtgctaattattgcaggccttc

SEQ ID NO: 5510765 - DNA, 25 bp, Homo sapien
aatcaaaatgtgcatgaaatgttgc

SEQ ID NO: 5510766 - DNA, 25 bp, Homo sapien
aatgttgcacgtaccacactgtatc

SEQ ID NO: 5510767 - DNA, 25 bp, Homo sapien
actgtatctggcttctggtaggttt

SEQ ID NO: 5510768 - DNA, 25 bp, Homo sapien
tcaaaaaaatgaacatgtaagaaaa

SEQ ID NO: 5510769 - DNA, 25 bp, Homo sapien
tagagtaagcctttgcaccacaatc

SEQ ID NO: 5510770 - DNA, 25 bp, Homo sapien
ggccttcatgcacgtaaacctcaac

SEQ ID NO: 5510771 - DNA, 25 bp, Homo sapien
cattccatagtccagaaggttactt

SEQ ID NO: 5510772 - DNA, 25 bp, Homo sapien
gacagagcgtagtgtcttttgcttc

SEQ ID NO: 5510773 - DNA, 25 bp, Homo sapien
ttaacactataaaggaaacattgaa

SEQ ID NO: 5510774 - DNA, 25 bp, Homo sapien
gactttcaaggattgagatgcaagc

SEQ ID NO: 5510775 - DNA, 25 bp, Homo sapien
caatcacacagcctacagacatgca

SEQ ID NO: 5510776 - DNA, 25 bp, Homo sapien
aaaaaggaaatatattagcagcatt

SEQ ID NO: 5510777 - DNA, 25 bp, Homo sapien
agataaaatgacagagcgtagtgtc

SEQ ID NO: 5510778 - DNA, 25 bp, Homo sapien
tattttccgcaatcacacagcctac

SEQ ID NO: 5510779 - DNA, 25 bp, Homo sapien
cagacatgcagactaactctgtatc

SEQ ID NO: 5510780 - DNA, 25 bp, Homo sapien
acaccaaaacccgcctggcagctgg

SEQ ID NO: 5510781 - DNA, 25 bp, Homo sapien
gcagtgatgtagtgctttgccccgc

SEQ ID NO: 5510782 - DNA, 25 bp, Homo sapien
tgagatgcaagctttgtatgcaatt

SEQ ID NO: 5510783 - DNA, 25 bp, Homo sapien
acaccagcgtgcaggaggagtaccg

SEQ ID NO: 5510784 - DNA, 25 bp, Homo sapien
cggtactcctcctgcacgctggtgt

SEQ ID NO: 5510785 - DNA, 25 bp, Homo sapien
gagacacacaccagcgtgcaggagg

SEQ ID NO: 5510786 - DNA, 25 bp, Homo sapien
cctcctgcacgctggtgtgtgtctc

SEQ ID NO: 5510787 - DNA, 25 bp, Homo sapien
aaaccatagacagacaacctctttg

SEQ ID NO: 5510788 - DNA, 25 bp, Homo sapien
acatacaaaccccaaatgtctgatt

SEQ ID NO: 5510789 - DNA, 25 bp, Homo sapien
ctttatattataaaggcacagggag

SEQ ID NO: 5510790 - DNA, 25 bp, Homo sapien
atctgatagtgaacatcttgatagc

SEQ ID NO: 5510791 - DNA, 25 bp, Homo sapien
actgcgtctattaatgggcaatgat

SEQ ID NO: 5510792 - DNA, 25 bp, Homo sapien
aacagtaacttacagtacaaaagac

SEQ ID NO: 5510793 - DNA, 25 bp, Homo sapien
tctgcaattgcaatcacacttccaa

SEQ ID NO: 5510794 - DNA, 25 bp, Homo sapien
acctcaagtagcaatcaccgctggc

SEQ ID NO: 5510795 - DNA, 25 bp, Homo sapien
aagatcattaaaagttgtagaaaca

SEQ ID NO: 5510796 - DNA, 25 bp, Homo sapien
tcttgatagcaaagtgaacaaaata

SEQ ID NO: 5510797 - DNA, 25 bp, Homo sapien
agcaatcaccgctggcagtgttttc

SEQ ID NO: 5510798 - DNA, 25 bp, Homo sapien
tcggcggtaggaccggccatcccca

SEQ ID NO: 5510799 - DNA, 25 bp, Homo sapien
tggggatggccggtcctaccgccga

SEQ ID NO: 5510800 - DNA, 25 bp, Homo sapien
gatcagtttgagtccaagtatagcc

SEQ ID NO: 5510801 - DNA, 25 bp, Homo sapien
aggcaggctattatttcagcaggcc

SEQ ID NO: 5510802 - DNA, 25 bp, Homo sapien
caagaaaaagacccattaaagagtg

SEQ ID NO: 5510803 - DNA, 25 bp, Homo sapien
taccaaagtacagagaaacgttatc

SEQ ID NO: 5510804 - DNA, 25 bp, Homo sapien
tccaggccaagctgttttggacatg

SEQ ID NO: 5510805 - DNA, 25 bp, Homo sapien
tgcatgggacactactaggctgaaa

SEQ ID NO: 5510806 - DNA, 25 bp, Homo sapien
tgtgacaatacaaatggtgcccctc

SEQ ID NO: 5510807 - DNA, 25 bp, Homo sapien
aaaaactgaggaaagacttctagcc

SEQ ID NO: 5510808 - DNA, 25 bp, Homo sapien
tctagcccccttccgtcacccacaa

SEQ ID NO: 5510809 - DNA, 25 bp, Homo sapien
tggtcacaacttttagaggcaggct

SEQ ID NO: 5510810 - DNA, 25 bp, Homo sapien
gctacaaagagcatgtgcatgggac

SEQ ID NO: 5510811 - DNA, 25 bp, Homo sapien
gcaggaaggagtcaagactttgctg

SEQ ID NO: 5510812 - DNA, 25 bp, Homo sapien
ctttgggattgaagtagctggtaaa

SEQ ID NO: 5510813 - DNA, 25 bp, Homo sapien
gcagttcccagtgacggcacttgcc

SEQ ID NO: 5510814 - DNA, 25 bp, Homo sapien
cgagtcaccccaagggcttggagag

SEQ ID NO: 5510815 - DNA, 25 bp, Homo sapien
agacagggacagacatcctcatttc

SEQ ID NO: 5510816 - DNA, 25 bp, Homo sapien
tgggagtaaggtatctgcagattca

SEQ ID NO: 5510817 - DNA, 25 bp, Homo sapien
caagtctgagcatctggtgcagttc

SEQ ID NO: 5510818 - DNA, 25 bp, Homo sapien
ctccaacagctcctggaagccgagt

SEQ ID NO: 5510819 - DNA, 25 bp, Homo sapien
cacacaacacagtaagaaggcaaag

SEQ ID NO: 5510820 - DNA, 25 bp, Homo sapien
tctggcctagctatctgggactctt

SEQ ID NO: 5510821 - DNA, 25 bp, Homo sapien
gttagtctggctttggagcagtgaa

SEQ ID NO: 5510822 - DNA, 25 bp, Homo sapien
acctgagaaggtttaaagtgttgca

SEQ ID NO: 5510823 - DNA, 25 bp, Homo sapien
ttgagctatcccggttgtcagtccc

SEQ ID NO: 5510824 - DNA, 25 bp, Homo sapien
tacctatgggagtcatcaatgggga

SEQ ID NO: 5510825 - DNA, 25 bp, Homo sapien
agagaaccctccactgtagggccgc

SEQ ID NO: 5510826 - DNA, 25 bp, Homo sapien
ctggagtggcataaaagatttgttt

SEQ ID NO: 5510827 - DNA, 25 bp, Homo sapien
tgaagataagtggcctcaaactgaa

SEQ ID NO: 5510828 - DNA, 25 bp, Homo sapien
agagacaataacagaaagactggat

SEQ ID NO: 5510829 - DNA, 25 bp, Homo sapien
ttgtcagtcccacagtggccgtgca

SEQ ID NO: 5510830 - DNA, 25 bp, Homo sapien
ctctgccgggtcacagtcagagaag

SEQ ID NO: 5510831 - DNA, 25 bp, Homo sapien
gggccgctcatgcaccgccacagaa

SEQ ID NO: 5510832 - DNA, 25 bp, Homo sapien
actgaaaccaagcagggctgtttgt

SEQ ID NO: 5510833 - DNA, 25 bp, Homo sapien
cctgcagagtcaccagctcacaata

SEQ ID NO: 5510834 - DNA, 25 bp, Homo sapien
caaccctaataccactcaggcctgc

SEQ ID NO: 5510835 - DNA, 25 bp, Homo sapien
taataccactcaggcctgcagagtc

SEQ ID NO: 5510836 - DNA, 25 bp, Homo sapien
ataaacgtgtatgcaacaacattcc

SEQ ID NO: 5510837 - DNA, 25 bp, Homo sapien
ctgaagttaattatagacagtaagg

SEQ ID NO: 5510838 - DNA, 25 bp, Homo sapien
aagcagcatcatttaaatagtggtt

SEQ ID NO: 5510839 - DNA, 25 bp, Homo sapien
atgcaacaacattccacaaccctaa

SEQ ID NO: 5510840 - DNA, 25 bp, Homo sapien
aatagtggttaactcataaacgtgt

SEQ ID NO: 5510841 - DNA, 25 bp, Homo sapien
ttatcctgccccaaacacttaaagc

SEQ ID NO: 5510842 - DNA, 25 bp, Homo sapien
ataattcagtgctctgaaagctggg

SEQ ID NO: 5510843 - DNA, 25 bp, Homo sapien
gtatcctccctccaaaatagtgtgt

SEQ ID NO: 5510844 - DNA, 25 bp, Homo sapien
aggcttttaagcggtataaggtgct

SEQ ID NO: 5510845 - DNA, 25 bp, Homo sapien
atagtatttggtgtagaagatggag

SEQ ID NO: 5510846 - DNA, 25 bp, Homo sapien
tactgggaatagctgttgttaaatc

SEQ ID NO: 5510847 - DNA, 25 bp, Homo sapien
tccgagccagaagattgcctttgtg

SEQ ID NO: 5510848 - DNA, 25 bp, Homo sapien
gaggctagttagctgcagcagaatg

SEQ ID NO: 5510849 - DNA, 25 bp, Homo sapien
gtggtgtgcaggttcctcccttcct

SEQ ID NO: 5510850 - DNA, 25 bp, Homo sapien
taagaacagtagtaaagaacagtcc

SEQ ID NO: 5510851 - DNA, 25 bp, Homo sapien
aatgtggtgtgcaggttccaatgtg

SEQ ID NO: 5510852 - DNA, 25 bp, Homo sapien
gggagagttattgcatagcacttcc

SEQ ID NO: 5510853 - DNA, 25 bp, Homo sapien
aaatagtccataaggtagaaaaatc

SEQ ID NO: 5510854 - DNA, 25 bp, Homo sapien
ataaggtgctacctgggagagttat

SEQ ID NO: 5510855 - DNA, 25 bp, Homo sapien
tcactccttagactgtcgtcctgag

SEQ ID NO: 5510856 - DNA, 25 bp, Homo sapien
ctcaggacgacagtctaaggagtga

SEQ ID NO: 5510857 - DNA, 25 bp, Homo sapien
gcagcccactcttgagctccccagt

SEQ ID NO: 5510858 - DNA, 25 bp, Homo sapien
gggtgcacattgcagcccactcttg

SEQ ID NO: 5510859 - DNA, 25 bp, Homo sapien
tgactttagaagcaagctgagtatc

SEQ ID NO: 5510860 - DNA, 25 bp, Homo sapien
cccagttcctagaattggagaaagg

SEQ ID NO: 5510861 - DNA, 25 bp, Homo sapien
cgaagactctaaaggagagactcac

SEQ ID NO: 5510862 - DNA, 25 bp, Homo sapien
ggagagactcactcagtaattcagt

SEQ ID NO: 5510863 - DNA, 25 bp, Homo sapien
ctgttgagaatggttaagtacgtgg

SEQ ID NO: 5510864 - DNA, 25 bp, Homo sapien
agctattcctgaggggtgcacattg

SEQ ID NO: 5510865 - DNA, 25 bp, Homo sapien
gggacagggcatacttctagtgatt

SEQ ID NO: 5510866 - DNA, 25 bp, Homo sapien
ttgcctctgagtagtagactcttca

SEQ ID NO: 5510867 - DNA, 25 bp, Homo sapien
ctggaatttggttgccgaagactct

SEQ ID NO: 5510868 - DNA, 25 bp, Homo sapien
gcctccggttgccttacaccacgcc

SEQ ID NO: 5510869 - DNA, 25 bp, Homo sapien
gcggagctggtcgacataatctctg

SEQ ID NO: 5510870 - DNA, 25 bp, Homo sapien
tgtaattaagtcacaggcaggaccc

SEQ ID NO: 5510871 - DNA, 25 bp, Homo sapien
gcagttgcagacgtctgtgcctagc

SEQ ID NO: 5510872 - DNA, 25 bp, Homo sapien
ccccgctgctccagctgcggagctg

SEQ ID NO: 5510873 - DNA, 25 bp, Homo sapien
agcccctgagcttcagggaaggggc

SEQ ID NO: 5510874 - DNA, 25 bp, Homo sapien
ttatagcaagatgatacaatggtat

SEQ ID NO: 5510875 - DNA, 25 bp, Homo sapien
ccgcccccagggccttcccttctgc

SEQ ID NO: 5510876 - DNA, 25 bp, Homo sapien
cgcctctggcatcgcctccggttgc

SEQ ID NO: 5510877 - DNA, 25 bp, Homo sapien
cagggagccccggtcctatcttaga

SEQ ID NO: 5510878 - DNA, 25 bp, Homo sapien
acaccacgccttcacctgcagtcgc

SEQ ID NO: 5510879 - DNA, 25 bp, Homo sapien
acggtctacattggagaggtttcaa

SEQ ID NO: 5510880 - DNA, 25 bp, Homo sapien
ttgaaacctctccaatgtagaccgt

SEQ ID NO: 5510881 - DNA, 25 bp, Homo sapien
cagataccattgctgcaggtggctc

SEQ ID NO: 5510882 - DNA, 25 bp, Homo sapien
gaagcagtgacagctcttgggcttt

SEQ ID NO: 5510883 - DNA, 25 bp, Homo sapien
aggcagagtccacgcattcttccca

SEQ ID NO: 5510884 - DNA, 25 bp, Homo sapien
tggtccctctggccccacccagcct

SEQ ID NO: 5510885 - DNA, 25 bp, Homo sapien
ccacattatctggctgtgagggtga

SEQ ID NO: 5510886 - DNA, 25 bp, Homo sapien
cccaaggtgaagtacgctttctcag

SEQ ID NO: 5510887 - DNA, 25 bp, Homo sapien
ctgcccctaagcactgaggagggca

SEQ ID NO: 5510888 - DNA, 25 bp, Homo sapien
gctttctcaggtccccaaggatggg

SEQ ID NO: 5510889 - DNA, 25 bp, Homo sapien
cagctcttgggctttgagggaaatg

SEQ ID NO: 5510890 - DNA, 25 bp, Homo sapien
acacctagcaaggaattaaggcgag

SEQ ID NO: 5510891 - DNA, 25 bp, Homo sapien
aaatctgagaacacctagcaaggaa

SEQ ID NO: 5510892 - DNA, 25 bp, Homo sapien
tgaagaggccacttccaacagcacg

SEQ ID NO: 5510893 - DNA, 25 bp, Homo sapien
cgtgctgttggaagtggcctcttca

SEQ ID NO: 5510894 - DNA, 25 bp, Homo sapien
tttcattaggagcataaaaaacacc

SEQ ID NO: 5510895 - DNA, 25 bp, Homo sapien
agtgggtcctctgattcaaacaata

SEQ ID NO: 5510896 - DNA, 25 bp, Homo sapien
tgttttgagctatggattctacttc

SEQ ID NO: 5510897 - DNA, 25 bp, Homo sapien
gcacaaccaggagaacccatgtggt

SEQ ID NO: 5510898 - DNA, 25 bp, Homo sapien
ttgatgggcaatgacgtaactattt

SEQ ID NO: 5510899 - DNA, 25 bp, Homo sapien
agaaatgctggtaaagattgaagtt

SEQ ID NO: 5510900 - DNA, 25 bp, Homo sapien
aaagtcatggaaagcattaagaaat

SEQ ID NO: 5510901 - DNA, 25 bp, Homo sapien
catgtggtttgtaacagtgaaattc

SEQ ID NO: 5510902 - DNA, 25 bp, Homo sapien
aagaagccttgattccagtgggtcc

SEQ ID NO: 5510903 - DNA, 25 bp, Homo sapien
tcaaactcagtgacacacaggtaga

SEQ ID NO: 5510904 - DNA, 25 bp, Homo sapien
aatagacacacaaacgaattacatt

SEQ ID NO: 5510905 - DNA, 25 bp, Homo sapien
atggcccaccaagtcaaacctccta

SEQ ID NO: 5510906 - DNA, 25 bp, Homo sapien
tatccaaagtagacaaaaatcccaa

SEQ ID NO: 5510907 - DNA, 25 bp, Homo sapien
ttctgttctggctacgagcatctac

SEQ ID NO: 5510908 - DNA, 25 bp, Homo sapien
tgaaaatggaaagtaagcctcccca

SEQ ID NO: 5510909 - DNA, 25 bp, Homo sapien
aatagtaaggtagtagttgggtcta

SEQ ID NO: 5510910 - DNA, 25 bp, Homo sapien
tatcctgagaaaactgctgctggtc

SEQ ID NO: 5510911 - DNA, 25 bp, Homo sapien
acctgttcatagagaagtggggtag

SEQ ID NO: 5510912 - DNA, 25 bp, Homo sapien
tttaacagaaacatagaatcgtcct

SEQ ID NO: 5510913 - DNA, 25 bp, Homo sapien
gtggggtagagcatttatcctgaga

SEQ ID NO: 5510914 - DNA, 25 bp, Homo sapien
cccccagagaaagctacttgaatac

SEQ ID NO: 5510915 - DNA, 25 bp, Homo sapien
ttgtagagaggtgtataaatatgaa

SEQ ID NO: 5510916 - DNA, 25 bp, Homo sapien
tactgttcggcttcccaagaatttc

SEQ ID NO: 5510917 - DNA, 25 bp, Homo sapien
gctaaaaactcatgtgcacctcctt

SEQ ID NO: 5510918 - DNA, 25 bp, Homo sapien
gcaggaaactttaaggcaagaatat

SEQ ID NO: 5510919 - DNA, 25 bp, Homo sapien
ttcaatcagcaagtttagttcacac

SEQ ID NO: 5510920 - DNA, 25 bp, Homo sapien
tagagctaatcatggaatattaatg

SEQ ID NO: 5510921 - DNA, 25 bp, Homo sapien
caaacgttaaggcacagagtcatga

SEQ ID NO: 5510922 - DNA, 25 bp, Homo sapien
gaagtgtgttaaagtaatctgctcc

SEQ ID NO: 5510923 - DNA, 25 bp, Homo sapien
aaaatgaagatttagcatgcttgtc

SEQ ID NO: 5510924 - DNA, 25 bp, Homo sapien
gaaatttgcaggaaactttaaggca

SEQ ID NO: 5510925 - DNA, 25 bp, Homo sapien
acagagtcatgaaacgaactgattt

SEQ ID NO: 5510926 - DNA, 25 bp, Homo sapien
gttcacacaaacgttaaggcacaga

SEQ ID NO: 5510927 - DNA, 25 bp, Homo sapien
acattagacaatttaggccagtcct

SEQ ID NO: 5510928 - DNA, 25 bp, Homo sapien
aacacagatcaaacaacattagtag

SEQ ID NO: 5510929 - DNA, 25 bp, Homo sapien
taaagtcagtgcattgtcaacaagt

SEQ ID NO: 5510930 - DNA, 25 bp, Homo sapien
agttacagataaacaggtacacccc

SEQ ID NO: 5510931 - DNA, 25 bp, Homo sapien
tttaatgggaatggacagattttat

SEQ ID NO: 5510932 - DNA, 25 bp, Homo sapien
acattagtagattgagctacctgct

SEQ ID NO: 5510933 - DNA, 25 bp, Homo sapien
ttactggcctcagatatcagaacac

SEQ ID NO: 5510934 - DNA, 25 bp, Homo sapien
caaggtgaatgtagttaatagttaa

SEQ ID NO: 5510935 - DNA, 25 bp, Homo sapien
acaaccagtataacaaacacagatc

SEQ ID NO: 5510936 - DNA, 25 bp, Homo sapien
ccaaatgctctgagaactagatatt

SEQ ID NO: 5510937 - DNA, 25 bp, Homo sapien
aaaggatttcaatttaggtagccat

SEQ ID NO: 5510938 - DNA, 25 bp, Homo sapien
ggaggtagcaaacatccccaacacc

SEQ ID NO: 5510939 - DNA, 25 bp, Homo sapien
ccttatcctaggcagaaaaaggggc

SEQ ID NO: 5510940 - DNA, 25 bp, Homo sapien
cagagagcttggccatgcatcttaa

SEQ ID NO: 5510941 - DNA, 25 bp, Homo sapien
gggtcctaccatagtgggagaacca

SEQ ID NO: 5510942 - DNA, 25 bp, Homo sapien
tacctcagagcatgagaaggtagtc

SEQ ID NO: 5510943 - DNA, 25 bp, Homo sapien
atgttataaacaagggacaggatag

SEQ ID NO: 5510944 - DNA, 25 bp, Homo sapien
gctgcagaggcagtagtacctcaga

SEQ ID NO: 5510945 - DNA, 25 bp, Homo sapien
cagtatgtgccctagaaaacctctc

SEQ ID NO: 5510946 - DNA, 25 bp, Homo sapien
ccatgcatcttaaaaacggggtccc

SEQ ID NO: 5510947 - DNA, 25 bp, Homo sapien
tgacaagccacaatgctggccaggg

SEQ ID NO: 5510948 - DNA, 25 bp, Homo sapien
cagggtatcatgtcaggccaccaaa

SEQ ID NO: 5510949 - DNA, 25 bp, Homo sapien
tagaaggcccttagactccatgatg

SEQ ID NO: 5510950 - DNA, 25 bp, Homo sapien
aactctgggggcttcactttctatc

SEQ ID NO: 5510951 - DNA, 25 bp, Homo sapien
caaacaagatttgtgaggagctgga

SEQ ID NO: 5510952 - DNA, 25 bp, Homo sapien
gacagtggtacaccagaaataaccc

SEQ ID NO: 5510953 - DNA, 25 bp, Homo sapien
ttctttgaaggcagtttagggattc

SEQ ID NO: 5510954 - DNA, 25 bp, Homo sapien
ttgaaaaccagagagtagaatgtaa

SEQ ID NO: 5510955 - DNA, 25 bp, Homo sapien
gtttagggattccacagatgggctt

SEQ ID NO: 5510956 - DNA, 25 bp, Homo sapien
aatgtgtatggaaaactgagtgaat

SEQ ID NO: 5510957 - DNA, 25 bp, Homo sapien
aggggcgtgatctaatagtaaggaa

SEQ ID NO: 5510958 - DNA, 25 bp, Homo sapien
agagagtagaatgtaagcaataccc

SEQ ID NO: 5510959 - DNA, 25 bp, Homo sapien
taacatgtagttataaggggcgtga

SEQ ID NO: 5510960 - DNA, 25 bp, Homo sapien
tccttagtctagcagcatccttagt

SEQ ID NO: 5510961 - DNA, 25 bp, Homo sapien
tacatataggaggtgaatgtgagat

SEQ ID NO: 5510962 - DNA, 25 bp, Homo sapien
agcctaggctttaactgggagtttc

SEQ ID NO: 5510963 - DNA, 25 bp, Homo sapien
gagagcagcgtaatggtaactttga

SEQ ID NO: 5510964 - DNA, 25 bp, Homo sapien
aagtttaatggcatccaaaatactc

SEQ ID NO: 5510965 - DNA, 25 bp, Homo sapien
cttaaaagcatgatagacccctctg

SEQ ID NO: 5510966 - DNA, 25 bp, Homo sapien
tgggagaaattcttaggacatgatt

SEQ ID NO: 5510967 - DNA, 25 bp, Homo sapien
atccctagttcatttacaagagagc

SEQ ID NO: 5510968 - DNA, 25 bp, Homo sapien
attatcatttgaatgggagaaattc

SEQ ID NO: 5510969 - DNA, 25 bp, Homo sapien
gtaacaatacgtgataatttaagcc

SEQ ID NO: 5510970 - DNA, 25 bp, Homo sapien
ctaaaaaaaattgctagcctaggct

SEQ ID NO: 5510971 - DNA, 25 bp, Homo sapien
tgactattttgaggggaacaaggag

SEQ ID NO: 5510972 - DNA, 25 bp, Homo sapien
taatgaagattcaatttgcatggga

SEQ ID NO: 5510973 - DNA, 25 bp, Homo sapien
aaatgaacccacattagagtaatgc

SEQ ID NO: 5510974 - DNA, 25 bp, Homo sapien
ggacaaagggaaagtctgtcagaaa

SEQ ID NO: 5510975 - DNA, 25 bp, Homo sapien
aaaaaaagttgagcttcttgcctag

SEQ ID NO: 5510976 - DNA, 25 bp, Homo sapien
atgcataaagaagttaccccattcc

SEQ ID NO: 5510977 - DNA, 25 bp, Homo sapien
tgtagtgatttaaggctgcaagata

SEQ ID NO: 5510978 - DNA, 25 bp, Homo sapien
aggggaacaaggagattatcctaca

SEQ ID NO: 5510979 - DNA, 25 bp, Homo sapien
aaaaacagtgataaatttgaatgca

SEQ ID NO: 5510980 - DNA, 25 bp, Homo sapien
gtcataactagaaaggacaaaggga

SEQ ID NO: 5510981 - DNA, 25 bp, Homo sapien
taacatactgacaacaaccccattt

SEQ ID NO: 5510982 - DNA, 25 bp, Homo sapien
ggacgattgtctaccgtatttctcg

SEQ ID NO: 5510983 - DNA, 25 bp, Homo sapien
cgagaaatacggtagacaatcgtcc

SEQ ID NO: 5510984 - DNA, 25 bp, Homo sapien
ttcgaaagatgaggtttgcagttca

SEQ ID NO: 5510985 - DNA, 25 bp, Homo sapien
tgggctcatgagcactcctgcagga

SEQ ID NO: 5510986 - DNA, 25 bp, Homo sapien
aaaaaatgagacagtcaagtcctcc

SEQ ID NO: 5510987 - DNA, 25 bp, Homo sapien
tgacgagtcatgctagagtccctca

SEQ ID NO: 5510988 - DNA, 25 bp, Homo sapien
gttccaagcatgactgacaatgaat

SEQ ID NO: 5510989 - DNA, 25 bp, Homo sapien
aaaggaagaacaaaatacattatga

SEQ ID NO: 5510990 - DNA, 25 bp, Homo sapien
gggtgtgcatctgacgagtcatgct

SEQ ID NO: 5510991 - DNA, 25 bp, Homo sapien
ctcctgcaggaaagttagaatctca

SEQ ID NO: 5510992 - DNA, 25 bp, Homo sapien
gtatggtccacgccggtcattaaac

SEQ ID NO: 5510993 - DNA, 25 bp, Homo sapien
ttgctactgccagaacgctggattc

SEQ ID NO: 5510994 - DNA, 25 bp, Homo sapien
catgaaagctaaatttgtgggcaaa

SEQ ID NO: 5510995 - DNA, 25 bp, Homo sapien
gccctaaagacagcacacgctccag

SEQ ID NO: 5510996 - DNA, 25 bp, Homo sapien
gttgtaaggtacagagacacacttt

SEQ ID NO: 5510997 - DNA, 25 bp, Homo sapien
aacagagcttggaccagccaatgct

SEQ ID NO: 5510998 - DNA, 25 bp, Homo sapien
cccacacagtgatcgccccacggga

SEQ ID NO: 5510999 - DNA, 25 bp, Homo sapien
agacagaaaggttaatgacacactt

SEQ ID NO: 5511000 - DNA, 25 bp, Homo sapien
gaatggggtccccacacagtgatcg

SEQ ID NO: 5511001 - DNA, 25 bp, Homo sapien
cacttgggtcctgaatcgctgttgt

SEQ ID NO: 5511002 - DNA, 25 bp, Homo sapien
ttggacatgggccccagtcaccaca

SEQ ID NO: 5511003 - DNA, 25 bp, Homo sapien
ttttttatggcgcaaagagacagaa

SEQ ID NO: 5511004 - DNA, 25 bp, Homo sapien
acagaatatgccaggaattgtcttg

SEQ ID NO: 5511005 - DNA, 25 bp, Homo sapien
gattacgacacaccaaagctgttcc

SEQ ID NO: 5511006 - DNA, 25 bp, Homo sapien
tggcccttgtgcacgtcctttgaca

SEQ ID NO: 5511007 - DNA, 25 bp, Homo sapien
tgtcaaaggacgtgcacaagggcca

SEQ ID NO: 5511008 - DNA, 25 bp, Homo sapien
cctagggagcccatcgccctctgaa

SEQ ID NO: 5511009 - DNA, 25 bp, Homo sapien
ctcctttttgctgtggggcttccct

SEQ ID NO: 5511010 - DNA, 25 bp, Homo sapien
ctatatggctctgtgtggagtgcag

SEQ ID NO: 5511011 - DNA, 25 bp, Homo sapien
agaccatgtggcctgagcccctttg

SEQ ID NO: 5511012 - DNA, 25 bp, Homo sapien
ttccaggtcggcatcctccggcaat

SEQ ID NO: 5511013 - DNA, 25 bp, Homo sapien
ggatgagtcattccaggtcggcatc

SEQ ID NO: 5511014 - DNA, 25 bp, Homo sapien
gccctctgaaccccagctgtgcttc

SEQ ID NO: 5511015 - DNA, 25 bp, Homo sapien
cggcaatggcagctgaccctatatg

SEQ ID NO: 5511016 - DNA, 25 bp, Homo sapien
ctgaacccccaaaatacgggagaga

SEQ ID NO: 5511017 - DNA, 25 bp, Homo sapien
gggcacccagtgaggcccttctgca

SEQ ID NO: 5511018 - DNA, 25 bp, Homo sapien
ccatccctaagggcacccagtgagg

SEQ ID NO: 5511019 - DNA, 25 bp, Homo sapien
atccccccaaactgaagtgaaatac

SEQ ID NO: 5511020 - DNA, 25 bp, Homo sapien
tggtcaagttgatgtagattttttt

SEQ ID NO: 5511021 - DNA, 25 bp, Homo sapien
atgaataaggacaagatatcaaact

SEQ ID NO: 5511022 - DNA, 25 bp, Homo sapien
atgaaagaggcttgtgccagaatga

SEQ ID NO: 5511023 - DNA, 25 bp, Homo sapien
tacaacaatgaataaggacaagata

SEQ ID NO: 5511024 - DNA, 25 bp, Homo sapien
atggcaggaagttgtaatttatgga

SEQ ID NO: 5511025 - DNA, 25 bp, Homo sapien
aactatttgtgagctgtccagaatg

SEQ ID NO: 5511026 - DNA, 25 bp, Homo sapien
tatattctggcacaagtaccttatt

SEQ ID NO: 5511027 - DNA, 25 bp, Homo sapien
ttgcttagaggaaggctattcaaag

SEQ ID NO: 5511028 - DNA, 25 bp, Homo sapien
cttattactgactagagcaggggtc

SEQ ID NO: 5511029 - DNA, 25 bp, Homo sapien
aggaaggctattcaaagcatggtcc

SEQ ID NO: 5511030 - DNA, 25 bp, Homo sapien
cctccctggaagaatctgaggggaa

SEQ ID NO: 5511031 - DNA, 25 bp, Homo sapien
tcagcgaagtgctgcagaaactcca

SEQ ID NO: 5511032 - DNA, 25 bp, Homo sapien
tcaaagacctctcggatgggatcca

SEQ ID NO: 5511033 - DNA, 25 bp, Homo sapien
aacataaacaagacctcacagagaa

SEQ ID NO: 5511034 - DNA, 25 bp, Homo sapien
tgaaggagatacagacctcagccaa

SEQ ID NO: 5511035 - DNA, 25 bp, Homo sapien
agaaggtgcagtctttgcaagccac

SEQ ID NO: 5511036 - DNA, 25 bp, Homo sapien
gaggccctgagaagtacccttcaga

SEQ ID NO: 5511037 - DNA, 25 bp, Homo sapien
agacctcagccaagtccagagagtg

SEQ ID NO: 5511038 - DNA, 25 bp, Homo sapien
gacggagctcaccaaatccatcaac

SEQ ID NO: 5511039 - DNA, 25 bp, Homo sapien
aggatttgaaagccttaaaggaagc

SEQ ID NO: 5511040 - DNA, 25 bp, Homo sapien
gacatgaaggcaaaggttgcctccc

SEQ ID NO: 5511041 - DNA, 25 bp, Homo sapien
ttggtgggacaaaactaatatgcat

SEQ ID NO: 5511042 - DNA, 25 bp, Homo sapien
ctttcagaacagtaacatgacatta

SEQ ID NO: 5511043 - DNA, 25 bp, Homo sapien
tcacactcggcaaggctagaatatt

SEQ ID NO: 5511044 - DNA, 25 bp, Homo sapien
ttaaaaatcaagtcagaagagaagt

SEQ ID NO: 5511045 - DNA, 25 bp, Homo sapien
gtggtccaaagaataaatggcccca

SEQ ID NO: 5511046 - DNA, 25 bp, Homo sapien
ccattcaaagataggcttggtggga

SEQ ID NO: 5511047 - DNA, 25 bp, Homo sapien
agttgtgcaactagaacagatgttt

SEQ ID NO: 5511048 - DNA, 25 bp, Homo sapien
taaagaagctagagtagttgtgcaa

SEQ ID NO: 5511049 - DNA, 25 bp, Homo sapien
agaacttcagaagtagccagtggtc

SEQ ID NO: 5511050 - DNA, 25 bp, Homo sapien
aagtcagaagagaagtaaaactcat

SEQ ID NO: 5511051 - DNA, 25 bp, Homo sapien
aaaagcttgaatacacgactcctcc

SEQ ID NO: 5511052 - DNA, 25 bp, Homo sapien
aaatagcattttgggggcatttcta

SEQ ID NO: 5511053 - DNA, 25 bp, Homo sapien
aaggcatggcttgttaataatttat

SEQ ID NO: 5511054 - DNA, 25 bp, Homo sapien
atataaacagtaaatgcccaaacat

SEQ ID NO: 5511055 - DNA, 25 bp, Homo sapien
gtgtgtcatgatggaggctactaca

SEQ ID NO: 5511056 - DNA, 25 bp, Homo sapien
cgtcatacacaactacaagagtaac

SEQ ID NO: 5511057 - DNA, 25 bp, Homo sapien
aagatgaaacacataaggcatggct

SEQ ID NO: 5511058 - DNA, 25 bp, Homo sapien
aattcataaatgtagtaagtgtgtc

SEQ ID NO: 5511059 - DNA, 25 bp, Homo sapien
aagtgagcaagcacgtcaaatcatt

SEQ ID NO: 5511060 - DNA, 25 bp, Homo sapien
gaatagtactatcagcacttggaat

SEQ ID NO: 5511061 - DNA, 25 bp, Homo sapien
gaccaagtcaatcaagtgagcaagc

SEQ ID NO: 5511062 - DNA, 25 bp, Homo sapien
tagaatcaaggattagaatctaggt

SEQ ID NO: 5511063 - DNA, 25 bp, Homo sapien
agggttgggacatacacctatttta

SEQ ID NO: 5511064 - DNA, 25 bp, Homo sapien
gagtattgtagctcagagatcaagt

SEQ ID NO: 5511065 - DNA, 25 bp, Homo sapien
ctgtataaaaaagggttgggacata

SEQ ID NO: 5511066 - DNA, 25 bp, Homo sapien
ttgtagctcagagatcaagtactgg

SEQ ID NO: 5511067 - DNA, 25 bp, Homo sapien
atgtagttggagatggcagttataa

SEQ ID NO: 5511068 - DNA, 25 bp, Homo sapien
atggtggcaagtggacactataatc

SEQ ID NO: 5511069 - DNA, 25 bp, Homo sapien
actgagggtatatctgcgcatccat

SEQ ID NO: 5511070 - DNA, 25 bp, Homo sapien
tagaatagtgtcgacatacatttac

SEQ ID NO: 5511071 - DNA, 25 bp, Homo sapien
atgactgaactgagggtatatctgc

SEQ ID NO: 5511072 - DNA, 25 bp, Homo sapien
atcataaggatgtagttggagatgg

SEQ ID NO: 5511073 - DNA, 25 bp, Homo sapien
ccaatctatgactgaactgagggta

SEQ ID NO: 5511074 - DNA, 25 bp, Homo sapien
tcttgaacactgcagtcacaaactc

SEQ ID NO: 5511075 - DNA, 25 bp, Homo sapien
tccagacaaaggaatatcaaaacac

SEQ ID NO: 5511076 - DNA, 25 bp, Homo sapien
actgagatcacaactgaagtgtatg

SEQ ID NO: 5511077 - DNA, 25 bp, Homo sapien
tgaagtgtatggtttttagtgtgtg

SEQ ID NO: 5511078 - DNA, 25 bp, Homo sapien
cctgttgattccaaggtgaacaaaa

SEQ ID NO: 5511079 - DNA, 25 bp, Homo sapien
cttcggcacaagtacaacaaaggca

SEQ ID NO: 5511080 - DNA, 25 bp, Homo sapien
aaaggcatgggaagatcatgataat

SEQ ID NO: 5511081 - DNA, 25 bp, Homo sapien
gtgtgtgccagagacattaaattat

SEQ ID NO: 5511082 - DNA, 25 bp, Homo sapien
taaaaagcagaaacttgctggttaa

SEQ ID NO: 5511083 - DNA, 25 bp, Homo sapien
tgaactacttggtcaactgaacatc

SEQ ID NO: 5511084 - DNA, 25 bp, Homo sapien
gtagaaaacaaggatgctgagttct

SEQ ID NO: 5511085 - DNA, 25 bp, Homo sapien
atcgtggagtactctcagggacaaa

SEQ ID NO: 5511086 - DNA, 25 bp, Homo sapien
tgctatcctaaccacagacacattc

SEQ ID NO: 5511087 - DNA, 25 bp, Homo sapien
tgccatataagggaatcaagaacct

SEQ ID NO: 5511088 - DNA, 25 bp, Homo sapien
ctctctaatgcttaaggaacgcctc

SEQ ID NO: 5511089 - DNA, 25 bp, Homo sapien
atccagtgtggaaataagaagtcta

SEQ ID NO: 5511090 - DNA, 25 bp, Homo sapien
tttaagcactgagaaataagtattc

SEQ ID NO: 5511091 - DNA, 25 bp, Homo sapien
atttaaaatgactggtgaggcaaaa

SEQ ID NO: 5511092 - DNA, 25 bp, Homo sapien
ggtgaggcaaaacaattgattagtc

SEQ ID NO: 5511093 - DNA, 25 bp, Homo sapien
ttaacaaaatggtatggtggcataa

SEQ ID NO: 5511094 - DNA, 25 bp, Homo sapien
tcaagaacctagtaatcgtggagta

SEQ ID NO: 5511095 - DNA, 25 bp, Homo sapien
ggaacgcctctgcctgattgccata

SEQ ID NO: 5511096 - DNA, 25 bp, Homo sapien
cgtggcttcctttgtacatgcggct

SEQ ID NO: 5511097 - DNA, 25 bp, Homo sapien
acaaaggcatctaggcaccccttcc

SEQ ID NO: 5511098 - DNA, 25 bp, Homo sapien
tgaaaaaatgacaggtaccaatatt

SEQ ID NO: 5511099 - DNA, 25 bp, Homo sapien
agacaggatagacgtggcttccttt

SEQ ID NO: 5511100 - DNA, 25 bp, Homo sapien
tgcggcttttagaggcatctggagc

SEQ ID NO: 5511101 - DNA, 25 bp, Homo sapien
catctggagctctattcacacacgc

SEQ ID NO: 5511102 - DNA, 25 bp, Homo sapien
aagaggttacaaaacaggaaaagca

SEQ ID NO: 5511103 - DNA, 25 bp, Homo sapien
attcacacacgctagagatctcttt

SEQ ID NO: 5511104 - DNA, 25 bp, Homo sapien
tgaacaaagtacaaagaggttacaa

SEQ ID NO: 5511105 - DNA, 25 bp, Homo sapien
ttaaaaggcatcaaagtcactaaca

SEQ ID NO: 5511106 - DNA, 25 bp, Homo sapien
ttacaagtcaccatgaacaaagtac

SEQ ID NO: 5511107 - DNA, 25 bp, Homo sapien
acagcagtgctcttctcaaccgggg

SEQ ID NO: 5511108 - DNA, 25 bp, Homo sapien
cacaatcagaatcaacaacactgtt

SEQ ID NO: 5511109 - DNA, 25 bp, Homo sapien
accatttggatggtggtacaaggag

SEQ ID NO: 5511110 - DNA, 25 bp, Homo sapien
ggcaaggctgagacagcctgctctg

SEQ ID NO: 5511111 - DNA, 25 bp, Homo sapien
acatcctacaaggaacaggacagtc

SEQ ID NO: 5511112 - DNA, 25 bp, Homo sapien
gtttagagactattgtcacaactgg

SEQ ID NO: 5511113 - DNA, 25 bp, Homo sapien
ctcttctcaaccggggcaattttcc

SEQ ID NO: 5511114 - DNA, 25 bp, Homo sapien
ggagaacagtgcccctggcatctag

SEQ ID NO: 5511115 - DNA, 25 bp, Homo sapien
catttgacaatgtttagagactatt

SEQ ID NO: 5511116 - DNA, 25 bp, Homo sapien
tctaagagatttgataacaccattt

SEQ ID NO: 5511117 - DNA, 25 bp, Homo sapien
acaggagagccgaggctcattactt

SEQ ID NO: 5511118 - DNA, 25 bp, Homo sapien
ggggagcaagcaccttacagtgcca

SEQ ID NO: 5511119 - DNA, 25 bp, Homo sapien
cttcgccgccaccatgggcactttg

SEQ ID NO: 5511120 - DNA, 25 bp, Homo sapien
agacggatcctgcaaatgggattgc

SEQ ID NO: 5511121 - DNA, 25 bp, Homo sapien
agaaccatggtagagtagtgctcat

SEQ ID NO: 5511122 - DNA, 25 bp, Homo sapien
tctctacagaggcatgtgcacagac

SEQ ID NO: 5511123 - DNA, 25 bp, Homo sapien
ggaaacccacagcattggaagggac

SEQ ID NO: 5511124 - DNA, 25 bp, Homo sapien
atggcacttggcaatgcaaaaggga

SEQ ID NO: 5511125 - DNA, 25 bp, Homo sapien
ccttttaggatgtgtcttggggagc

SEQ ID NO: 5511126 - DNA, 25 bp, Homo sapien
aaaagcagctgaaataggccatctt

SEQ ID NO: 5511127 - DNA, 25 bp, Homo sapien
tcagggagccagtcattttcgtcaa

SEQ ID NO: 5511128 - DNA, 25 bp, Homo sapien
tgtatagaacgttaagtcagggagc

SEQ ID NO: 5511129 - DNA, 25 bp, Homo sapien
tgaatctccaaacgtgggggtctag

SEQ ID NO: 5511130 - DNA, 25 bp, Homo sapien
tttgtgacattggaatttgtggatt

SEQ ID NO: 5511131 - DNA, 25 bp, Homo sapien
tgccatcaccagaccctggggttcc

SEQ ID NO: 5511132 - DNA, 25 bp, Homo sapien
tccctgccatcaccagaccctgggg

SEQ ID NO: 5511133 - DNA, 25 bp, Homo sapien
acactgttgcctgctcctctgagga

SEQ ID NO: 5511134 - DNA, 25 bp, Homo sapien
ccatccctgccatcaccagaccctg

SEQ ID NO: 5511135 - DNA, 25 bp, Homo sapien
gtgacattggaatttgtggattttc

SEQ ID NO: 5511136 - DNA, 25 bp, Homo sapien
gatcgtgactctgtttatcccacac

SEQ ID NO: 5511137 - DNA, 25 bp, Homo sapien
ctggggttcctctgatcgtgactct

SEQ ID NO: 5511138 - DNA, 25 bp, Homo sapien
aggacgaagacagaagttttgaatc

SEQ ID NO: 5511139 - DNA, 25 bp, Homo sapien
gcctgctcctctgaggaaaagtata

SEQ ID NO: 5511140 - DNA, 25 bp, Homo sapien
cagaggagagattgtcagtttgtaa

SEQ ID NO: 5511141 - DNA, 25 bp, Homo sapien
gtcctcccagcaatgccgcacccaa

SEQ ID NO: 5511142 - DNA, 25 bp, Homo sapien
gccgcacccaatgccacaagtatgc

SEQ ID NO: 5511143 - DNA, 25 bp, Homo sapien
tacagtctgtgcagaaacaagtggc

SEQ ID NO: 5511144 - DNA, 25 bp, Homo sapien
gtgcagaaacaagtggctcctaact

SEQ ID NO: 5511145 - DNA, 25 bp, Homo sapien
tacaaaccaaaagtcaatcgcctcc

SEQ ID NO: 5511146 - DNA, 25 bp, Homo sapien
acaagtatgcctgtccaccagaact

SEQ ID NO: 5511147 - DNA, 25 bp, Homo sapien
ctgggggctcttaccaaaacctgcc

SEQ ID NO: 5511148 - DNA, 25 bp, Homo sapien
ctatgaacacaaatacagaggagag

SEQ ID NO: 5511149 - DNA, 25 bp, Homo sapien
tcaatcgcctcccaagacgtggtcc

SEQ ID NO: 5511150 - DNA, 25 bp, Homo sapien
ggaccagataacaaaaggagaccaa

SEQ ID NO: 5511151 - DNA, 25 bp, Homo sapien
atacctagtacgaagcagacagaat

SEQ ID NO: 5511152 - DNA, 25 bp, Homo sapien
tctgagggaatgacttccaactgtg

SEQ ID NO: 5511153 - DNA, 25 bp, Homo sapien
tgatagtattttagggactcaactc

SEQ ID NO: 5511154 - DNA, 25 bp, Homo sapien
aactgtgtaacaggaccctttgtct

SEQ ID NO: 5511155 - DNA, 25 bp, Homo sapien
gatgacgaagttaaggttcagagag

SEQ ID NO: 5511156 - DNA, 25 bp, Homo sapien
taccacgtgggatgcattgtgaaat

SEQ ID NO: 5511157 - DNA, 25 bp, Homo sapien
agcagacagaataagaaccactaac

SEQ ID NO: 5511158 - DNA, 25 bp, Homo sapien
cctaggcccaaaatctgagggaatg

SEQ ID NO: 5511159 - DNA, 25 bp, Homo sapien
atccaacctggacatggtacatgct

SEQ ID NO: 5511160 - DNA, 25 bp, Homo sapien
aagaaaaatgagggtcacattttag

SEQ ID NO: 5511161 - DNA, 25 bp, Homo sapien
tcttagaattagcccatgatagtat

SEQ ID NO: 5511162 - DNA, 25 bp, Homo sapien
ctcagacgactctatcgtaagtaaa

SEQ ID NO: 5511163 - DNA, 25 bp, Homo sapien
tttacttacgatagagtcgtctgag

SEQ ID NO: 5511164 - DNA, 25 bp, Homo sapien
cgatcactgggcacgttttggagta

SEQ ID NO: 5511165 - DNA, 25 bp, Homo sapien
gttttagatgaagattgcaagatgg

SEQ ID NO: 5511166 - DNA, 25 bp, Homo sapien
aaggttggccagaccataggcttac

SEQ ID NO: 5511167 - DNA, 25 bp, Homo sapien
attcaggggtgtcttctacgttttc

SEQ ID NO: 5511168 - DNA, 25 bp, Homo sapien
aggcttacattgtggtgagcttgcc

SEQ ID NO: 5511169 - DNA, 25 bp, Homo sapien
actggcatgaaatgagagctgtttt

SEQ ID NO: 5511170 - DNA, 25 bp, Homo sapien
acagttcccaaaagcaaggttggcc

SEQ ID NO: 5511171 - DNA, 25 bp, Homo sapien
gaaacctggtgcatatggccccaaa

SEQ ID NO: 5511172 - DNA, 25 bp, Homo sapien
gaatatcttgtgacggtgcaggttt

SEQ ID NO: 5511173 - DNA, 25 bp, Homo sapien
gtgcaggtttgagcaaaactggcat

SEQ ID NO: 5511174 - DNA, 25 bp, Homo sapien
tacataagcaagacagctgaaggtt

SEQ ID NO: 5511175 - DNA, 25 bp, Homo sapien
tgtggttgtgccaaaataggttttg

SEQ ID NO: 5511176 - DNA, 25 bp, Homo sapien
aagaaatttctgagctccaaaccat

SEQ ID NO: 5511177 - DNA, 25 bp, Homo sapien
acatgccctgctgactagaaggtcc

SEQ ID NO: 5511178 - DNA, 25 bp, Homo sapien
tgagctattaggacaagtattcttc

SEQ ID NO: 5511179 - DNA, 25 bp, Homo sapien
aaccatgaggaatcagaatcacaac

SEQ ID NO: 5511180 - DNA, 25 bp, Homo sapien
ctaggatttaaagtgcaaaggtact

SEQ ID NO: 5511181 - DNA, 25 bp, Homo sapien
taaaaataaggtatagtctaagcta

SEQ ID NO: 5511182 - DNA, 25 bp, Homo sapien
tcaaaaatcatggcgtattaacatt

SEQ ID NO: 5511183 - DNA, 25 bp, Homo sapien
tctaaagcataggaagctaattttg

SEQ ID NO: 5511184 - DNA, 25 bp, Homo sapien
gcttgactaacagcaaagacatgtt

SEQ ID NO: 5511185 - DNA, 25 bp, Homo sapien
gcagaaaacaaatcctgtgcttgac

SEQ ID NO: 5511186 - DNA, 25 bp, Homo sapien
ataagtggttttacaagtaactcta

SEQ ID NO: 5511187 - DNA, 25 bp, Homo sapien
tagagttacttgtaaaaccacttat

SEQ ID NO: 5511188 - DNA, 25 bp, Homo sapien
gagtaactacacagaccacccacac

SEQ ID NO: 5511189 - DNA, 25 bp, Homo sapien
aaggggaacctcaaatgagatgtct

SEQ ID NO: 5511190 - DNA, 25 bp, Homo sapien
ttggtcaacgcatatcagtaagata

SEQ ID NO: 5511191 - DNA, 25 bp, Homo sapien
tctccatgggatttggtcaacgcat

SEQ ID NO: 5511192 - DNA, 25 bp, Homo sapien
atatgaaggtcattctccaagtatt

SEQ ID NO: 5511193 - DNA, 25 bp, Homo sapien
atgtgtaagggaataaggcctttat

SEQ ID NO: 5511194 - DNA, 25 bp, Homo sapien
atcactggatagttgaaacaaagaa

SEQ ID NO: 5511195 - DNA, 25 bp, Homo sapien
ttagaacagaatacggatggaatca

SEQ ID NO: 5511196 - DNA, 25 bp, Homo sapien
gctttgttgtatggggagtaactac

SEQ ID NO: 5511197 - DNA, 25 bp, Homo sapien
acggatggaatcacttcagtaaagt

SEQ ID NO: 5511198 - DNA, 25 bp, Homo sapien
caaaaatcgcatgtgtaagggaata

SEQ ID NO: 5511199 - DNA, 25 bp, Homo sapien
gtcgaaacggtattacgaatgagac

SEQ ID NO: 5511200 - DNA, 25 bp, Homo sapien
gtctcattcgtaataccgtttcgac

SEQ ID NO: 5511201 - DNA, 25 bp, Homo sapien
caaaaccagtgaccgcattggaata

SEQ ID NO: 5511202 - DNA, 25 bp, Homo sapien
tgtgggttatgcttcagactctcaa

SEQ ID NO: 5511203 - DNA, 25 bp, Homo sapien
gatgaggttccaaaataccgtgacc

SEQ ID NO: 5511204 - DNA, 25 bp, Homo sapien
ttgaacagaagggtccagtttatgt

SEQ ID NO: 5511205 - DNA, 25 bp, Homo sapien
ttatgggttcctggctgcactcttc

SEQ ID NO: 5511206 - DNA, 25 bp, Homo sapien
tgtcctgatggagcactttttgaac

SEQ ID NO: 5511207 - DNA, 25 bp, Homo sapien
tcgtatgcagggtacattgaagacc

SEQ ID NO: 5511208 - DNA, 25 bp, Homo sapien
tccctcaaccagagcctggccgagt

SEQ ID NO: 5511209 - DNA, 25 bp, Homo sapien
tcaagcatgcagtggtatgaatgat

SEQ ID NO: 5511210 - DNA, 25 bp, Homo sapien
ctacaacccgaccaccggagaattc

SEQ ID NO: 5511211 - DNA, 25 bp, Homo sapien
accgtgaccagattcctagcccagg

SEQ ID NO: 5511212 - DNA, 25 bp, Homo sapien
accgcacccaacgccactgggtccg

SEQ ID NO: 5511213 - DNA, 25 bp, Homo sapien
tcttctgtgagcaaagcacactttc

SEQ ID NO: 5511214 - DNA, 25 bp, Homo sapien
ggggcctgtccttctggttttgctc

SEQ ID NO: 5511215 - DNA, 25 bp, Homo sapien
gaggaggaccactgtcatctctctc

SEQ ID NO: 5511216 - DNA, 25 bp, Homo sapien
ggcagcacagccatacagccactgt

SEQ ID NO: 5511217 - DNA, 25 bp, Homo sapien
gcccttgtacaaagaggaacaactc

SEQ ID NO: 5511218 - DNA, 25 bp, Homo sapien
accacccggctgcttccgctggaat

SEQ ID NO: 5511219 - DNA, 25 bp, Homo sapien
agtgttgaaagtaaccgcagacctg

SEQ ID NO: 5511220 - DNA, 25 bp, Homo sapien
gggtccgagctcccccatgacctta

SEQ ID NO: 5511221 - DNA, 25 bp, Homo sapien
ggaacaactcgcttgctcagggtag

SEQ ID NO: 5511222 - DNA, 25 bp, Homo sapien
ttacagcagcgtccccctcaaccgc

SEQ ID NO: 5511223 - DNA, 25 bp, Homo sapien
agccatagagctttatcccagtgtc

SEQ ID NO: 5511224 - DNA, 25 bp, Homo sapien
cacacacagactcagacctccttcc

SEQ ID NO: 5511225 - DNA, 25 bp, Homo sapien
aaaagaaagatggctacatgtatgc

SEQ ID NO: 5511226 - DNA, 25 bp, Homo sapien
atagggaaaatgtctaactcaatag

SEQ ID NO: 5511227 - DNA, 25 bp, Homo sapien
aacagctgtgttgacgattagagat

SEQ ID NO: 5511228 - DNA, 25 bp, Homo sapien
ccaaaccgaggattcccatagggaa

SEQ ID NO: 5511229 - DNA, 25 bp, Homo sapien
tagggctccaaagctaagggagcga

SEQ ID NO: 5511230 - DNA, 25 bp, Homo sapien
caaattcagtggaagaacagctgtg

SEQ ID NO: 5511231 - DNA, 25 bp, Homo sapien
aaggaaaaagctcctcctcgcccca

SEQ ID NO: 5511232 - DNA, 25 bp, Homo sapien
tcttgtccactaactttagggctcc

SEQ ID NO: 5511233 - DNA, 25 bp, Homo sapien
ctcccttacatgacagggggtgtgt

SEQ ID NO: 5511234 - DNA, 25 bp, Homo sapien
cacgcacgtgtgcacactccctctc

SEQ ID NO: 5511235 - DNA, 25 bp, Homo sapien
gattgtgctatcagggtgtgtccct

SEQ ID NO: 5511236 - DNA, 25 bp, Homo sapien
ctctctctgagtgtgtccaataaac

SEQ ID NO: 5511237 - DNA, 25 bp, Homo sapien
tgctggatagcaacacacacgcacg

SEQ ID NO: 5511238 - DNA, 25 bp, Homo sapien
gggacccagctctgctcagacacaa

SEQ ID NO: 5511239 - DNA, 25 bp, Homo sapien
tcgggccccctcctattgcagatgc

SEQ ID NO: 5511240 - DNA, 25 bp, Homo sapien
gaagactatgtctagagcgaaggct

SEQ ID NO: 5511241 - DNA, 25 bp, Homo sapien
tccacgtgctggatagcaacacaca

SEQ ID NO: 5511242 - DNA, 25 bp, Homo sapien
tctccggcaccttcagaacccagaa

SEQ ID NO: 5511243 - DNA, 25 bp, Homo sapien
ggctacacagaccccacgatggggg

SEQ ID NO: 5511244 - DNA, 25 bp, Homo sapien
tgctcagacacaatgccagctcttc

SEQ ID NO: 5511245 - DNA, 25 bp, Homo sapien
ctttgtagaaatggttgacgtagaa

SEQ ID NO: 5511246 - DNA, 25 bp, Homo sapien
tggttgacgtagaacagtatagaat

SEQ ID NO: 5511247 - DNA, 25 bp, Homo sapien
cgagtcttaaaggctgtaaaggctc

SEQ ID NO: 5511248 - DNA, 25 bp, Homo sapien
taaaggctgtaaaggctcagaaagt

SEQ ID NO: 5511249 - DNA, 25 bp, Homo sapien
aacaaaaaatgtagctgtagacagt

SEQ ID NO: 5511250 - DNA, 25 bp, Homo sapien
atagatgtaaatatgtgctgtatac

SEQ ID NO: 5511251 - DNA, 25 bp, Homo sapien
ttagaatcaacagatgtgcattgtc

SEQ ID NO: 5511252 - DNA, 25 bp, Homo sapien
gatacaaggttgattctggcatctg

SEQ ID NO: 5511253 - DNA, 25 bp, Homo sapien
tagctactaagcattcatgggtttg

SEQ ID NO: 5511254 - DNA, 25 bp, Homo sapien
gcatctggataaccaagaaagctgc

SEQ ID NO: 5511255 - DNA, 25 bp, Homo sapien
aagtgccagctcatgtgggtctctg

SEQ ID NO: 5511256 - DNA, 25 bp, Homo sapien
gatgttcaagaaaggggttcatttc

SEQ ID NO: 5511257 - DNA, 25 bp, Homo sapien
ggggttcatttcagcaccagggtgc

SEQ ID NO: 5511258 - DNA, 25 bp, Homo sapien
tgtctctgagctgtgagcccgatga

SEQ ID NO: 5511259 - DNA, 25 bp, Homo sapien
tacaaagcagtgtccacagaagcag

SEQ ID NO: 5511260 - DNA, 25 bp, Homo sapien
ggcagacaacatgtgagagtaaatg

SEQ ID NO: 5511261 - DNA, 25 bp, Homo sapien
gacacacagaccaactggcaatgct

SEQ ID NO: 5511262 - DNA, 25 bp, Homo sapien
tgtttcccgttagaggagaggacta

SEQ ID NO: 5511263 - DNA, 25 bp, Homo sapien
tgtgggagacagctttgatgttcaa

SEQ ID NO: 5511264 - DNA, 25 bp, Homo sapien
tatgcaaatctgaggtgtttcccgt

SEQ ID NO: 5511265 - DNA, 25 bp, Homo sapien
agcacatccactaagaggcaccctg

SEQ ID NO: 5511266 - DNA, 25 bp, Homo sapien
gagaggactatgcagatgatcacat

SEQ ID NO: 5511267 - DNA, 25 bp, Homo sapien
tcagctcctggttcaacgaggccat

SEQ ID NO: 5511268 - DNA, 25 bp, Homo sapien
cagtacaagagcatccctgtggagg

SEQ ID NO: 5511269 - DNA, 25 bp, Homo sapien
tgagggtcactaccagtacaagagc

SEQ ID NO: 5511270 - DNA, 25 bp, Homo sapien
gtactagcgtccctgacagcgcgga

SEQ ID NO: 5511271 - DNA, 25 bp, Homo sapien
ctgggtgcagttcctgcagtacccc

SEQ ID NO: 5511272 - DNA, 25 bp, Homo sapien
ttcctcaaaggaggatacgaagcgt

SEQ ID NO: 5511273 - DNA, 25 bp, Homo sapien
ttctgtacctgggcagtgcgtatca

SEQ ID NO: 5511274 - DNA, 25 bp, Homo sapien
ccgcaaggacatgctggatgccttg

SEQ ID NO: 5511275 - DNA, 25 bp, Homo sapien
aacagtcgacccccatggggctcag

SEQ ID NO: 5511276 - DNA, 25 bp, Homo sapien
tccatcaagaatgctggaggaaggg

SEQ ID NO: 5511277 - DNA, 25 bp, Homo sapien
cccactctacgatcagggtggcccg

SEQ ID NO: 5511278 - DNA, 25 bp, Homo sapien
aagacagaggtacatttaacagaga

SEQ ID NO: 5511279 - DNA, 25 bp, Homo sapien
acgcgccctgaccctcattgcctca

SEQ ID NO: 5511280 - DNA, 25 bp, Homo sapien
gaccatccccttagggaggcaccac

SEQ ID NO: 5511281 - DNA, 25 bp, Homo sapien
ctcccaccacaggagtctgcagacg

SEQ ID NO: 5511282 - DNA, 25 bp, Homo sapien
cggtcagagctggtaagtgctctac

SEQ ID NO: 5511283 - DNA, 25 bp, Homo sapien
agaaatctgaccacagcgtacacac

SEQ ID NO: 5511284 - DNA, 25 bp, Homo sapien
ttaacagagaaaacacgcctggaag

SEQ ID NO: 5511285 - DNA, 25 bp, Homo sapien
aatgagacagcttaaagacagaggt

SEQ ID NO: 5511286 - DNA, 25 bp, Homo sapien
ccacagagttggggaactaattgta

SEQ ID NO: 5511287 - DNA, 25 bp, Homo sapien
cccagcaagacacggtcagagctgg

SEQ ID NO: 5511288 - DNA, 25 bp, Homo sapien
tctaggcaagacatgccagcgatta

SEQ ID NO: 5511289 - DNA, 25 bp, Homo sapien
tagtgcatgcaaatcaacgaccctc

SEQ ID NO: 5511290 - DNA, 25 bp, Homo sapien
agcaaagacatattgagctgcaagt

SEQ ID NO: 5511291 - DNA, 25 bp, Homo sapien
gtctgtgacctggtaaagagaccac

SEQ ID NO: 5511292 - DNA, 25 bp, Homo sapien
gccaagtttgcctgctgtcaaccca

SEQ ID NO: 5511293 - DNA, 25 bp, Homo sapien
aacgaccctcaaagtgacagtcatt

SEQ ID NO: 5511294 - DNA, 25 bp, Homo sapien
ctccaatacaaggccccagagtagt

SEQ ID NO: 5511295 - DNA, 25 bp, Homo sapien
gtctagggagatctgctatgccata

SEQ ID NO: 5511296 - DNA, 25 bp, Homo sapien
aaaagggaaaagccaacttcatctg

SEQ ID NO: 5511297 - DNA, 25 bp, Homo sapien
tctgatgcctgaatccctaagtctc

SEQ ID NO: 5511298 - DNA, 25 bp, Homo sapien
aagactaaagaaagggtgaatattc

SEQ ID NO: 5511299 - DNA, 25 bp, Homo sapien
gctgcaagtacaatgagtaagtatc

SEQ ID NO: 5511300 - DNA, 25 bp, Homo sapien
gttcaaaccagcctggcaaatatgg

SEQ ID NO: 5511301 - DNA, 25 bp, Homo sapien
gcactgctctcaggccactctatcc

SEQ ID NO: 5511302 - DNA, 25 bp, Homo sapien
ggctgaatccaagcactgctctcag

SEQ ID NO: 5511303 - DNA, 25 bp, Homo sapien
tcatgtcaccgctctaggttcattc

SEQ ID NO: 5511304 - DNA, 25 bp, Homo sapien
aacatcaaccaaagttacaaaacaa

SEQ ID NO: 5511305 - DNA, 25 bp, Homo sapien
gccgagcatcatatcacatgcctgt

SEQ ID NO: 5511306 - DNA, 25 bp, Homo sapien
tccctgctccacccccgcctcttgg

SEQ ID NO: 5511307 - DNA, 25 bp, Homo sapien
gtaaacaaaaatcagccgagcatca

SEQ ID NO: 5511308 - DNA, 25 bp, Homo sapien
caaaatggagggccttaacatcaac

SEQ ID NO: 5511309 - DNA, 25 bp, Homo sapien
cccccgcctcttggtgcctgtatcc

SEQ ID NO: 5511310 - DNA, 25 bp, Homo sapien
ttttctctacacaccaccgggcacc

SEQ ID NO: 5511311 - DNA, 25 bp, Homo sapien
agttggtgcactaccgtcaccttcg

SEQ ID NO: 5511312 - DNA, 25 bp, Homo sapien
cgaaggtgacggtagtgcaccaact

SEQ ID NO: 5511313 - DNA, 25 bp, Homo sapien
ccacttttggacaagaacagacagg

SEQ ID NO: 5511314 - DNA, 25 bp, Homo sapien
gagagctgttggatccacaccgata

SEQ ID NO: 5511315 - DNA, 25 bp, Homo sapien
actgatttggctgtaaatggagaaa

SEQ ID NO: 5511316 - DNA, 25 bp, Homo sapien
gcatcaaccaactgggaaatagtgc

SEQ ID NO: 5511317 - DNA, 25 bp, Homo sapien
ggagaccgcacacaacatcttttgt

SEQ ID NO: 5511318 - DNA, 25 bp, Homo sapien
aaatagtgctgcaagaattcggggg

SEQ ID NO: 5511319 - DNA, 25 bp, Homo sapien
tcaacccccatgcaatgtgactccc

SEQ ID NO: 5511320 - DNA, 25 bp, Homo sapien
agaaccgtcaactcaacccccatgc

SEQ ID NO: 5511321 - DNA, 25 bp, Homo sapien
gcaatgtgactccctggagagctgt

SEQ ID NO: 5511322 - DNA, 25 bp, Homo sapien
aatacaacactgacatgaaatcatt

SEQ ID NO: 5511323 - DNA, 25 bp, Homo sapien
tttggtctcgggggtttacatatca

SEQ ID NO: 5511324 - DNA, 25 bp, Homo sapien
tgcttgggatctgaatggccctgga

SEQ ID NO: 5511325 - DNA, 25 bp, Homo sapien
gtgaacgaatcactggcgtgaagtt

SEQ ID NO: 5511326 - DNA, 25 bp, Homo sapien
ggtgcacgcacgtggttactgagtg

SEQ ID NO: 5511327 - DNA, 25 bp, Homo sapien
ccgtgcggccctcgctctctcctgg

SEQ ID NO: 5511328 - DNA, 25 bp, Homo sapien
tcttaactactgagaaaggatgcgg

SEQ ID NO: 5511329 - DNA, 25 bp, Homo sapien
cgggtcagtccatgagctcgtttca

SEQ ID NO: 5511330 - DNA, 25 bp, Homo sapien
ttcttgcactcaaagagagagacac

SEQ ID NO: 5511331 - DNA, 25 bp, Homo sapien
atatctctgcttcgggtggttgtac

SEQ ID NO: 5511332 - DNA, 25 bp, Homo sapien
aaaggcaggatcagaaaacaactga

SEQ ID NO: 5511333 - DNA, 25 bp, Homo sapien
agagagagacacagtcagatgtgtc

SEQ ID NO: 5511334 - DNA, 25 bp, Homo sapien
gagggcaccaaggctttctcaagat

SEQ ID NO: 5511335 - DNA, 25 bp, Homo sapien
gcacttgggcaaatcataattgctc

SEQ ID NO: 5511336 - DNA, 25 bp, Homo sapien
tcaaaccgaatcacaacatagtctt

SEQ ID NO: 5511337 - DNA, 25 bp, Homo sapien
acttgacaaactattgacaggatgt

SEQ ID NO: 5511338 - DNA, 25 bp, Homo sapien
tatactaagaagggatttggcaatt

SEQ ID NO: 5511339 - DNA, 25 bp, Homo sapien
aatatcacttgggaaaaaatttcac

SEQ ID NO: 5511340 - DNA, 25 bp, Homo sapien
tagatttgttgtattgcacttgggc

SEQ ID NO: 5511341 - DNA, 25 bp, Homo sapien
cttcaccaaaggaatcaaacccaaa

SEQ ID NO: 5511342 - DNA, 25 bp, Homo sapien
cattgaggctaactgtagcacagta

SEQ ID NO: 5511343 - DNA, 25 bp, Homo sapien
aggtaaagtgttgtagggtgcttaa

SEQ ID NO: 5511344 - DNA, 25 bp, Homo sapien
tattgaaagaattttgatacagttc

SEQ ID NO: 5511345 - DNA, 25 bp, Homo sapien
tgttcaagtagaaaatgtgaaatat

SEQ ID NO: 5511346 - DNA, 25 bp, Homo sapien
accagccacttaccaagagaaagcc

SEQ ID NO: 5511347 - DNA, 25 bp, Homo sapien
cccaaagcaaccaccagccctggga

SEQ ID NO: 5511348 - DNA, 25 bp, Homo sapien
tggaaaagtgtggtcatcccatcat

SEQ ID NO: 5511349 - DNA, 25 bp, Homo sapien
agacagcacacatcctacataaata

SEQ ID NO: 5511350 - DNA, 25 bp, Homo sapien
gagaggagcacttttagaacatgga

SEQ ID NO: 5511351 - DNA, 25 bp, Homo sapien
ctgtagacccaaagcaaccaccagc

SEQ ID NO: 5511352 - DNA, 25 bp, Homo sapien
gggtaagacgtagctgtagacccaa

SEQ ID NO: 5511353 - DNA, 25 bp, Homo sapien
ctttttaatgaaagtgtcggccacg

SEQ ID NO: 5511354 - DNA, 25 bp, Homo sapien
catcccatcattagacagcacacat

SEQ ID NO: 5511355 - DNA, 25 bp, Homo sapien
gtggctgagctcagattgcagctgc

SEQ ID NO: 5511356 - DNA, 25 bp, Homo sapien
ttgcagctgctaagacaccagccac

SEQ ID NO: 5511357 - DNA, 25 bp, Homo sapien
ttcccttttgagaagcccaaggagc

SEQ ID NO: 5511358 - DNA, 25 bp, Homo sapien
catacacaactgcaggtaaaaacat

SEQ ID NO: 5511359 - DNA, 25 bp, Homo sapien
cagtgtccaggcttcaggtcagata

SEQ ID NO: 5511360 - DNA, 25 bp, Homo sapien
gacaatgaggaagccagttctcacc

SEQ ID NO: 5511361 - DNA, 25 bp, Homo sapien
ggagcaacccagagcttcttactgt

SEQ ID NO: 5511362 - DNA, 25 bp, Homo sapien
ctttttcttgcgacctgaagggccc

SEQ ID NO: 5511363 - DNA, 25 bp, Homo sapien
atccaactagatcagcaacacggct

SEQ ID NO: 5511364 - DNA, 25 bp, Homo sapien
aattttggcacgtaagtgagctctt

SEQ ID NO: 5511365 - DNA, 25 bp, Homo sapien
aacacggctggaatacttcgtagtt

SEQ ID NO: 5511366 - DNA, 25 bp, Homo sapien
gcaaaaagcttcaatcgcacaattc

SEQ ID NO: 5511367 - DNA, 25 bp, Homo sapien
aggtcagatagcccccagggctcag

SEQ ID NO: 5511368 - DNA, 25 bp, Homo sapien
gagtgaggactgggaggtcgtggac

SEQ ID NO: 5511369 - DNA, 25 bp, Homo sapien
gtccacgacctcccagtcctcactc

SEQ ID NO: 5511370 - DNA, 25 bp, Homo sapien
cataatatttgtctggcgaaaccat

SEQ ID NO: 5511371 - DNA, 25 bp, Homo sapien
ttgaagggtagaaaacaaaatcatg

SEQ ID NO: 5511372 - DNA, 25 bp, Homo sapien
gaatgtgctgatatcgtgttaaact

SEQ ID NO: 5511373 - DNA, 25 bp, Homo sapien
tttctgggctacatcacataatatt

SEQ ID NO: 5511374 - DNA, 25 bp, Homo sapien
tgagccaacaccttgatgatgacaa

SEQ ID NO: 5511375 - DNA, 25 bp, Homo sapien
atacagatttgggtaaaggagattt

SEQ ID NO: 5511376 - DNA, 25 bp, Homo sapien
tacgagaacatatgggaaaagctta

SEQ ID NO: 5511377 - DNA, 25 bp, Homo sapien
ttatagggatttgagaaagtacgag

SEQ ID NO: 5511378 - DNA, 25 bp, Homo sapien
gatttgagaaagtacgagaacatat

SEQ ID NO: 5511379 - DNA, 25 bp, Homo sapien
tggcgaaaccataatacagatttgg

SEQ ID NO: 5511380 - DNA, 25 bp, Homo sapien
agggactaagcacatgattattcaa

SEQ ID NO: 5511381 - DNA, 25 bp, Homo sapien
gcggcgggccgaacacgggcggtcc

SEQ ID NO: 5511382 - DNA, 25 bp, Homo sapien
ggaccgcccgtgttcggcccgccgc

SEQ ID NO: 5511383 - DNA, 25 bp, Homo sapien
gtggcggcgggccgaacacgggcgg

SEQ ID NO: 5511384 - DNA, 25 bp, Homo sapien
ccgcccgtgttcggcccgccgccac

SEQ ID NO: 5511385 - DNA, 25 bp, Homo sapien
agttgcccagtctctggggcaggag

SEQ ID NO: 5511386 - DNA, 25 bp, Homo sapien
acaagggaaaaacctgtcttgggca

SEQ ID NO: 5511387 - DNA, 25 bp, Homo sapien
gaccctggggccacctcattatccc

SEQ ID NO: 5511388 - DNA, 25 bp, Homo sapien
ttcttctggtgagtccccagcccac

SEQ ID NO: 5511389 - DNA, 25 bp, Homo sapien
tacgtcatagaaacagccagttgcc

SEQ ID NO: 5511390 - DNA, 25 bp, Homo sapien
ttacacccaggtgcacatgagcaca

SEQ ID NO: 5511391 - DNA, 25 bp, Homo sapien
gaagcccatgatcacaccagcagct

SEQ ID NO: 5511392 - DNA, 25 bp, Homo sapien
cctctctgaagatggtacaagggaa

SEQ ID NO: 5511393 - DNA, 25 bp, Homo sapien
gcctcaggggcgtcctgaggaaaga

SEQ ID NO: 5511394 - DNA, 25 bp, Homo sapien
tagtggttatccatagcgacccccc

SEQ ID NO: 5511395 - DNA, 25 bp, Homo sapien
tgagtaacacaaccagataacagtc

SEQ ID NO: 5511396 - DNA, 25 bp, Homo sapien
gcggacgggcctcccccgtcatcag

SEQ ID NO: 5511397 - DNA, 25 bp, Homo sapien
aaatccaaacacaactcacccctct

SEQ ID NO: 5511398 - DNA, 25 bp, Homo sapien
gcctcccccgtcatcagctccaggg

SEQ ID NO: 5511399 - DNA, 25 bp, Homo sapien
ccggccacagcctttcgtccacctc

SEQ ID NO: 5511400 - DNA, 25 bp, Homo sapien
ggccttggacaagctcctggcccca

SEQ ID NO: 5511401 - DNA, 25 bp, Homo sapien
ccaggaggtctcaagacacacttct

SEQ ID NO: 5511402 - DNA, 25 bp, Homo sapien
ctccacaaaagcagctgtgtgtatg

SEQ ID NO: 5511403 - DNA, 25 bp, Homo sapien
aaagaagtctaataaaactgaagag

SEQ ID NO: 5511404 - DNA, 25 bp, Homo sapien
acgtctgccggccacagcctttcgt

SEQ ID NO: 5511405 - DNA, 25 bp, Homo sapien
tcgtccacctccacaaaagcagctg

SEQ ID NO: 5511406 - DNA, 25 bp, Homo sapien
acaactcacccctctaagcacgccc

SEQ ID NO: 5511407 - DNA, 25 bp, Homo sapien
tgcaattgcatatggcacacgcatt

SEQ ID NO: 5511408 - DNA, 25 bp, Homo sapien
gacaggtccacttatctgcaggagc

SEQ ID NO: 5511409 - DNA, 25 bp, Homo sapien
tcagagtgaacatgacagccattaa

SEQ ID NO: 5511410 - DNA, 25 bp, Homo sapien
ctgtaaggccataaaattgaactat

SEQ ID NO: 5511411 - DNA, 25 bp, Homo sapien
aagattaaccacatgacaggtccac

SEQ ID NO: 5511412 - DNA, 25 bp, Homo sapien
cagtacacagttaatgaattggctt

SEQ ID NO: 5511413 - DNA, 25 bp, Homo sapien
tgcatgaaaggaactgcagtgtcag

SEQ ID NO: 5511414 - DNA, 25 bp, Homo sapien
taagccattggagcaaaaataaaat

SEQ ID NO: 5511415 - DNA, 25 bp, Homo sapien
agagagtttccattaggggcatgat

SEQ ID NO: 5511416 - DNA, 25 bp, Homo sapien
gtacagtaggatagttatatggaaa

SEQ ID NO: 5511417 - DNA, 25 bp, Homo sapien
cagtgtcagctgcaaacaaaataaa

SEQ ID NO: 5511418 - DNA, 25 bp, Homo sapien
gatctaaagagagaaaatctgaatt

SEQ ID NO: 5511419 - DNA, 25 bp, Homo sapien
gaggacactggaacatgtgaaacaa

SEQ ID NO: 5511420 - DNA, 25 bp, Homo sapien
ctgaacaccgggtatatgaggataa

SEQ ID NO: 5511421 - DNA, 25 bp, Homo sapien
tacataattcagactacaggaaatt

SEQ ID NO: 5511422 - DNA, 25 bp, Homo sapien
tagatctaactaccaactcacagga

SEQ ID NO: 5511423 - DNA, 25 bp, Homo sapien
atgaggataaaagaattactggtaa

SEQ ID NO: 5511424 - DNA, 25 bp, Homo sapien
tctgtaaaaaaattaggagccaatc

SEQ ID NO: 5511425 - DNA, 25 bp, Homo sapien
taaagttgatgatctaaagagagaa

SEQ ID NO: 5511426 - DNA, 25 bp, Homo sapien
aggagccaatctagaaaatctgaac

SEQ ID NO: 5511427 - DNA, 25 bp, Homo sapien
tctagaaaatctgaacaccgggtat

SEQ ID NO: 5511428 - DNA, 25 bp, Homo sapien
tccaagttgatgatctaaagttgat

SEQ ID NO: 5511429 - DNA, 25 bp, Homo sapien
cagtctgttctcgtccgggaccaaa

SEQ ID NO: 5511430 - DNA, 25 bp, Homo sapien
tttggtcccggacgagaacagactg

SEQ ID NO: 5511431 - DNA, 25 bp, Homo sapien
gtagtagaacatgccctgcaggaag

SEQ ID NO: 5511432 - DNA, 25 bp, Homo sapien
atgtcgactcagctaaccatatgtc

SEQ ID NO: 5511433 - DNA, 25 bp, Homo sapien
cagagtgattctacatgggaaaaac

SEQ ID NO: 5511434 - DNA, 25 bp, Homo sapien
ttcagaaatatgatgtagtagaaca

SEQ ID NO: 5511435 - DNA, 25 bp, Homo sapien
cctgcgtatgttaagaggaaatcag

SEQ ID NO: 5511436 - DNA, 25 bp, Homo sapien
ccaggttgctgcagagtttctttca

SEQ ID NO: 5511437 - DNA, 25 bp, Homo sapien
tttaagtcagtgaggttggaagata

SEQ ID NO: 5511438 - DNA, 25 bp, Homo sapien
gagtgttgcctgctgaactcggagg

SEQ ID NO: 5511439 - DNA, 25 bp, Homo sapien
atgcctgctaatcaaatgtcgactc

SEQ ID NO: 5511440 - DNA, 25 bp, Homo sapien
taagaggaaatcagtttaaaatgcc

SEQ ID NO: 5511441 - DNA, 25 bp, Homo sapien
ttttcagagagtgaccgaataggaa

SEQ ID NO: 5511442 - DNA, 25 bp, Homo sapien
agcaggggtgttgactatccctcct

SEQ ID NO: 5511443 - DNA, 25 bp, Homo sapien
tgtgtcaaggacacagtgaaaggag

SEQ ID NO: 5511444 - DNA, 25 bp, Homo sapien
tctatttacagcctgtggggagaag

SEQ ID NO: 5511445 - DNA, 25 bp, Homo sapien
ccagctcagaccccataaatcagtg

SEQ ID NO: 5511446 - DNA, 25 bp, Homo sapien
ttttagttgttgccagagaggtgtg

SEQ ID NO: 5511447 - DNA, 25 bp, Homo sapien
tcagaagcaggaaattttagttgtt

SEQ ID NO: 5511448 - DNA, 25 bp, Homo sapien
taaatcagtgtgtgagtgacagaga

SEQ ID NO: 5511449 - DNA, 25 bp, Homo sapien
gcagcgggttcaccacctacctggg

SEQ ID NO: 5511450 - DNA, 25 bp, Homo sapien
ctgtccatcctgcaggaacagccca

SEQ ID NO: 5511451 - DNA, 25 bp, Homo sapien
gcataaaacaagaggactgatagac

SEQ ID NO: 5511452 - DNA, 25 bp, Homo sapien
gggtggaaggctttgtccaacactg

SEQ ID NO: 5511453 - DNA, 25 bp, Homo sapien
agcccgcaccctcaccacagttcca

SEQ ID NO: 5511454 - DNA, 25 bp, Homo sapien
ctgggtctcaggagtcgtcctatca

SEQ ID NO: 5511455 - DNA, 25 bp, Homo sapien
aaggaactgttcacggtcttctggg

SEQ ID NO: 5511456 - DNA, 25 bp, Homo sapien
gaagagtagcaagaattcaatcagc

SEQ ID NO: 5511457 - DNA, 25 bp, Homo sapien
gtgggccctggattcccgcacttct

SEQ ID NO: 5511458 - DNA, 25 bp, Homo sapien
ccaggaagcccagtttgaaaaacaa

SEQ ID NO: 5511459 - DNA, 25 bp, Homo sapien
gcaactcctgatgtggacaaacaac

SEQ ID NO: 5511460 - DNA, 25 bp, Homo sapien
acaaaccacgcctgtaaactgagtt

SEQ ID NO: 5511461 - DNA, 25 bp, Homo sapien
ctgaatccactggccgaccccagag

SEQ ID NO: 5511462 - DNA, 25 bp, Homo sapien
ttcgtcttcatccccagccagagcc

SEQ ID NO: 5511463 - DNA, 25 bp, Homo sapien
gtcgtcctatcacctgagcgtgctc

SEQ ID NO: 5511464 - DNA, 25 bp, Homo sapien
ctgaatatgcagcggatccttgggt

SEQ ID NO: 5511465 - DNA, 25 bp, Homo sapien
aagaaaaatgcggatgcctacagtt

SEQ ID NO: 5511466 - DNA, 25 bp, Homo sapien
aggaaatgtactgtgggaactattc

SEQ ID NO: 5511467 - DNA, 25 bp, Homo sapien
caggaaactacactaaaggtggacc

SEQ ID NO: 5511468 - DNA, 25 bp, Homo sapien
aaaggtggaccagatttctcaaacc

SEQ ID NO: 5511469 - DNA, 25 bp, Homo sapien
tggagcagaaatctcaggaaactac

SEQ ID NO: 5511470 - DNA, 25 bp, Homo sapien
cggatgcctacagttaacagattgc

SEQ ID NO: 5511471 - DNA, 25 bp, Homo sapien
tcttacaaagacaaagagagatgca

SEQ ID NO: 5511472 - DNA, 25 bp, Homo sapien
cagagaaagcttacattagagagat

SEQ ID NO: 5511473 - DNA, 25 bp, Homo sapien
gagatgcagcaaattgttggacttc

SEQ ID NO: 5511474 - DNA, 25 bp, Homo sapien
ccttgggtgcaagaccaaatgcaga

SEQ ID NO: 5511475 - DNA, 25 bp, Homo sapien
agtgccatctgtgcgatcgtgcctt

SEQ ID NO: 5511476 - DNA, 25 bp, Homo sapien
tcgcgctccgatcacctggcgctgc

SEQ ID NO: 5511477 - DNA, 25 bp, Homo sapien
gccaccggccattccagtgccatct

SEQ ID NO: 5511478 - DNA, 25 bp, Homo sapien
tgggaaaagaccacgatcctccttg

SEQ ID NO: 5511479 - DNA, 25 bp, Homo sapien
agctcacgcgccactaccgaaagca

SEQ ID NO: 5511480 - DNA, 25 bp, Homo sapien
catgaaacggcacatgtagccggga

SEQ ID NO: 5511481 - DNA, 25 bp, Homo sapien
aaggcgcatctgcgcacgcacacag

SEQ ID NO: 5511482 - DNA, 25 bp, Homo sapien
tcccaccgggtctacactagaggat

SEQ ID NO: 5511483 - DNA, 25 bp, Homo sapien
gcggccccctcccaaactgtgactg

SEQ ID NO: 5511484 - DNA, 25 bp, Homo sapien
cccagcccccgtctgtgactgaagg

SEQ ID NO: 5511485 - DNA, 25 bp, Homo sapien
ggtgagaagccctaccactgcaact

SEQ ID NO: 5511486 - DNA, 25 bp, Homo sapien
ggggagcccatatgtaaattctttc

SEQ ID NO: 5511487 - DNA, 25 bp, Homo sapien
aaggtcaaacccagctggtaagtag

SEQ ID NO: 5511488 - DNA, 25 bp, Homo sapien
acacagagccaaagacacctcagag

SEQ ID NO: 5511489 - DNA, 25 bp, Homo sapien
gacacctcagagaaattaggagaca

SEQ ID NO: 5511490 - DNA, 25 bp, Homo sapien
tcatcagctatgggactcaaactct

SEQ ID NO: 5511491 - DNA, 25 bp, Homo sapien
ttgaaagttaaaggacatatgctcc

SEQ ID NO: 5511492 - DNA, 25 bp, Homo sapien
agagatagtctgggtataagctgac

SEQ ID NO: 5511493 - DNA, 25 bp, Homo sapien
tgggtataagctgaccactaggtcc

SEQ ID NO: 5511494 - DNA, 25 bp, Homo sapien
ctcaaactcttggaggagtggagag

SEQ ID NO: 5511495 - DNA, 25 bp, Homo sapien
cctgacatctgactacgcaatatac

SEQ ID NO: 5511496 - DNA, 25 bp, Homo sapien
tggtaagtagtgaagctagaaattc

SEQ ID NO: 5511497 - DNA, 25 bp, Homo sapien
aagctagtctgaaagaccatgagcc

SEQ ID NO: 5511498 - DNA, 25 bp, Homo sapien
tgatataaggaatggagtcaagttg

SEQ ID NO: 5511499 - DNA, 25 bp, Homo sapien
caggacaaggcttgatataaggaat

SEQ ID NO: 5511500 - DNA, 25 bp, Homo sapien
tgctgagtagtgactttcaagagat

SEQ ID NO: 5511501 - DNA, 25 bp, Homo sapien
catgagccttagcaggtggcttgac

SEQ ID NO: 5511502 - DNA, 25 bp, Homo sapien
aaatcctgctacaagagacaaagcc

SEQ ID NO: 5511503 - DNA, 25 bp, Homo sapien
ggtgaccactaaggttgaaagattc

SEQ ID NO: 5511504 - DNA, 25 bp, Homo sapien
agggtgatggccatggatatattta

SEQ ID NO: 5511505 - DNA, 25 bp, Homo sapien
tagtgcatgtcagatgctgagtagt

SEQ ID NO: 5511506 - DNA, 25 bp, Homo sapien
ctgatttggaatgttgaagctagtc

SEQ ID NO: 5511507 - DNA, 25 bp, Homo sapien
actctgatctcaggattccccgtcc

SEQ ID NO: 5511508 - DNA, 25 bp, Homo sapien
gtttcccaaacgctgtgcctttctc

SEQ ID NO: 5511509 - DNA, 25 bp, Homo sapien
tcagcttccagaacaccacactctc

SEQ ID NO: 5511510 - DNA, 25 bp, Homo sapien
ccatttcccagagagcccaagggct

SEQ ID NO: 5511511 - DNA, 25 bp, Homo sapien
tgtacccacactcccagagaacttc

SEQ ID NO: 5511512 - DNA, 25 bp, Homo sapien
tcagagacaatctcagtggcccctc

SEQ ID NO: 5511513 - DNA, 25 bp, Homo sapien
tgtggtgccctgccagatcccttca

SEQ ID NO: 5511514 - DNA, 25 bp, Homo sapien
ggggcccaactacacaagtggctta

SEQ ID NO: 5511515 - DNA, 25 bp, Homo sapien
cccaggctattgcaggaaaagtctt

SEQ ID NO: 5511516 - DNA, 25 bp, Homo sapien
ctcttgccttcaaccctggaggggc

SEQ ID NO: 5511517 - DNA, 25 bp, Homo sapien
caataaatgactgataaaggctttc

SEQ ID NO: 5511518 - DNA, 25 bp, Homo sapien
tgacatgctgatggttcagtagggg

SEQ ID NO: 5511519 - DNA, 25 bp, Homo sapien
cggcatccaggctgagatatccata

SEQ ID NO: 5511520 - DNA, 25 bp, Homo sapien
gaaggatttgggtaaagcaactcta

SEQ ID NO: 5511521 - DNA, 25 bp, Homo sapien
tggaccagctaaaggcagttgttca

SEQ ID NO: 5511522 - DNA, 25 bp, Homo sapien
cctcatcatctgagggaagtggagg

SEQ ID NO: 5511523 - DNA, 25 bp, Homo sapien
atttctttctgcatgggggacaact

SEQ ID NO: 5511524 - DNA, 25 bp, Homo sapien
tgtgaaggatgtgcatcactgggaa

SEQ ID NO: 5511525 - DNA, 25 bp, Homo sapien
tccagaacaaagcagccaatgtgaa

SEQ ID NO: 5511526 - DNA, 25 bp, Homo sapien
gggtaaagcaactctagaggctgcc

SEQ ID NO: 5511527 - DNA, 25 bp, Homo sapien
agtcaccaagtcatggctggagaag

SEQ ID NO: 5511528 - DNA, 25 bp, Homo sapien
gagcctctagcaccattaagcatcc

SEQ ID NO: 5511529 - DNA, 25 bp, Homo sapien
agcatccagcagcttcctcggcatc

SEQ ID NO: 5511530 - DNA, 25 bp, Homo sapien
ttaaaaactttgaggctgctggaca

SEQ ID NO: 5511531 - DNA, 25 bp, Homo sapien
agcctgtttggtaaaggagaatgga

SEQ ID NO: 5511532 - DNA, 25 bp, Homo sapien
ttaaaaagatgcaaatgaatggaat

SEQ ID NO: 5511533 - DNA, 25 bp, Homo sapien
tttaagggccaaattgagcactgtt

SEQ ID NO: 5511534 - DNA, 25 bp, Homo sapien
gctgctggacactcagtaaggaatc

SEQ ID NO: 5511535 - DNA, 25 bp, Homo sapien
actagtgaacattaagaaatcttgc

SEQ ID NO: 5511536 - DNA, 25 bp, Homo sapien
ctcagtaaggaatcagaagtttttt

SEQ ID NO: 5511537 - DNA, 25 bp, Homo sapien
aaggagaatggatgacccacctttt

SEQ ID NO: 5511538 - DNA, 25 bp, Homo sapien
gaatgtgtcatttcaaagcctgttt

SEQ ID NO: 5511539 - DNA, 25 bp, Homo sapien
caattttgtatagaggctgtatagt

SEQ ID NO: 5511540 - DNA, 25 bp, Homo sapien
taaacaatggttataactagtgaac

SEQ ID NO: 5511541 - DNA, 25 bp, Homo sapien
agaatatacatagaggcactttagt

SEQ ID NO: 5511542 - DNA, 25 bp, Homo sapien
ctgagccagaccaaatttatcctgc

SEQ ID NO: 5511543 - DNA, 25 bp, Homo sapien
acatggtgttattgcagacctgggt

SEQ ID NO: 5511544 - DNA, 25 bp, Homo sapien
attgcagacctgggttaactcggga

SEQ ID NO: 5511545 - DNA, 25 bp, Homo sapien
aatttgcaatgaggaaaagatgtaa

SEQ ID NO: 5511546 - DNA, 25 bp, Homo sapien
gatggccatatcaaaggaggatgat

SEQ ID NO: 5511547 - DNA, 25 bp, Homo sapien
tttgagccaagtctctatctgcacc

SEQ ID NO: 5511548 - DNA, 25 bp, Homo sapien
tggcacatggaattacctgcacaca

SEQ ID NO: 5511549 - DNA, 25 bp, Homo sapien
ttccatatagtgtgtagaaagtcac

SEQ ID NO: 5511550 - DNA, 25 bp, Homo sapien
tagaggcactttagttaaggaacag

SEQ ID NO: 5511551 - DNA, 25 bp, Homo sapien
cacatagcacagataactcgccatc

SEQ ID NO: 5511552 - DNA, 25 bp, Homo sapien
gtctcatacccaaaaggtagaacac

SEQ ID NO: 5511553 - DNA, 25 bp, Homo sapien
caaagcagcttaggtgaaaaacaat

SEQ ID NO: 5511554 - DNA, 25 bp, Homo sapien
aaaattgaactcagtaggcaaagct

SEQ ID NO: 5511555 - DNA, 25 bp, Homo sapien
attggagttgaagcagtttttaacc

SEQ ID NO: 5511556 - DNA, 25 bp, Homo sapien
actcagtaggcaaagctaattgaac

SEQ ID NO: 5511557 - DNA, 25 bp, Homo sapien
ttgaggaattagtgatattagtctc

SEQ ID NO: 5511558 - DNA, 25 bp, Homo sapien
aataagcagttgttctcaaaagaga

SEQ ID NO: 5511559 - DNA, 25 bp, Homo sapien
gagccatgataactattgaggaatt

SEQ ID NO: 5511560 - DNA, 25 bp, Homo sapien
atgcttagcaaggtcacaagctgat

SEQ ID NO: 5511561 - DNA, 25 bp, Homo sapien
taattaattaagatagagccatgat

SEQ ID NO: 5511562 - DNA, 25 bp, Homo sapien
agttcaaagtcgtactgtctgatcc

SEQ ID NO: 5511563 - DNA, 25 bp, Homo sapien
cttgaagttcaagaagttgtagcta

SEQ ID NO: 5511564 - DNA, 25 bp, Homo sapien
caagttctagaaagcatataccctc

SEQ ID NO: 5511565 - DNA, 25 bp, Homo sapien
gtttttgcagaagaatggcaaacac

SEQ ID NO: 5511566 - DNA, 25 bp, Homo sapien
aaaaaatattagtggagataaatta

SEQ ID NO: 5511567 - DNA, 25 bp, Homo sapien
aatgtctagccttaacttgaagttc

SEQ ID NO: 5511568 - DNA, 25 bp, Homo sapien
catcaaagcacatgttaacaaaaac

SEQ ID NO: 5511569 - DNA, 25 bp, Homo sapien
tgaaatgaggattttatctctgagt

SEQ ID NO: 5511570 - DNA, 25 bp, Homo sapien
gcattaaactgctttccggaatccc

SEQ ID NO: 5511571 - DNA, 25 bp, Homo sapien
ctaatgaaaacgtctttagcaggga

SEQ ID NO: 5511572 - DNA, 25 bp, Homo sapien
aaatgaaatagccctggaaacaccc

SEQ ID NO: 5511573 - DNA, 25 bp, Homo sapien
tatgaactgcatactagatatagtt

SEQ ID NO: 5511574 - DNA, 25 bp, Homo sapien
aagagctttaaatatgagggttgtg

SEQ ID NO: 5511575 - DNA, 25 bp, Homo sapien
gaccattagacttgagaagacgacc

SEQ ID NO: 5511576 - DNA, 25 bp, Homo sapien
tgcaaagccctgggtacttgccttc

SEQ ID NO: 5511577 - DNA, 25 bp, Homo sapien
aaacacatgcagagtcacatcctca

SEQ ID NO: 5511578 - DNA, 25 bp, Homo sapien
tctttttcttggggtagagcgtgaa

SEQ ID NO: 5511579 - DNA, 25 bp, Homo sapien
tggcagtttgagaccgctaccctga

SEQ ID NO: 5511580 - DNA, 25 bp, Homo sapien
agagcgtgaaatccagacctgtttt

SEQ ID NO: 5511581 - DNA, 25 bp, Homo sapien
ggacaagccgctcatggaccattag

SEQ ID NO: 5511582 - DNA, 25 bp, Homo sapien
agaaacttggggaagtgttttctga

SEQ ID NO: 5511583 - DNA, 25 bp, Homo sapien
gtgactgggacgatgcttcctctca

SEQ ID NO: 5511584 - DNA, 25 bp, Homo sapien
tgtgcttagaaaggttgcagatttc

SEQ ID NO: 5511585 - DNA, 25 bp, Homo sapien
tgtgtgcttaatcctcaagacctac

SEQ ID NO: 5511586 - DNA, 25 bp, Homo sapien
taggataacagtacataaagcacat

SEQ ID NO: 5511587 - DNA, 25 bp, Homo sapien
aagtgaaaagttggacgatcctcta

SEQ ID NO: 5511588 - DNA, 25 bp, Homo sapien
agacctacacacaattagaatcagc

SEQ ID NO: 5511589 - DNA, 25 bp, Homo sapien
taggattcccataaatggcttgcat

SEQ ID NO: 5511590 - DNA, 25 bp, Homo sapien
gtgtggcagaaaaggagtttttaca

SEQ ID NO: 5511591 - DNA, 25 bp, Homo sapien
aagcagactagtgtaagagtgaatt

SEQ ID NO: 5511592 - DNA, 25 bp, Homo sapien
ccaaggtaagtgaaaagttggacga

SEQ ID NO: 5511593 - DNA, 25 bp, Homo sapien
cagaagtttgtgaaatttgtgtgct

SEQ ID NO: 5511594 - DNA, 25 bp, Homo sapien
tttacagaaggctgagtttgtttac

SEQ ID NO: 5511595 - DNA, 25 bp, Homo sapien
taaacagctggaaataagcagacta

SEQ ID NO: 5511596 - DNA, 25 bp, Homo sapien
catactgcaatgtttcaataggacc

SEQ ID NO: 5511597 - DNA, 25 bp, Homo sapien
taatttaagctatgtccaccctggc

SEQ ID NO: 5511598 - DNA, 25 bp, Homo sapien
caccctggctaaagtacaatcatac

SEQ ID NO: 5511599 - DNA, 25 bp, Homo sapien
ttaaatcatttgaaaagcatggtgc

SEQ ID NO: 5511600 - DNA, 25 bp, Homo sapien
ttgtaccacactgatcatgatgacc

SEQ ID NO: 5511601 - DNA, 25 bp, Homo sapien
aatttctcttagaagtaggcagcat

SEQ ID NO: 5511602 - DNA, 25 bp, Homo sapien
gaccagcatacacatgataatggct

SEQ ID NO: 5511603 - DNA, 25 bp, Homo sapien
gttagagaataaagatcttagatga

SEQ ID NO: 5511604 - DNA, 25 bp, Homo sapien
aaatcccgtatgaatcagtggcatt

SEQ ID NO: 5511605 - DNA, 25 bp, Homo sapien
aataggaccaagaacgttagagaat

SEQ ID NO: 5511606 - DNA, 25 bp, Homo sapien
ctcttgggtttaacattgcagtagt

SEQ ID NO: 5511607 - DNA, 25 bp, Homo sapien
cataaaagctgaactagacacccct

SEQ ID NO: 5511608 - DNA, 25 bp, Homo sapien
aaaagcaaatagccctgggtgacca

SEQ ID NO: 5511609 - DNA, 25 bp, Homo sapien
cattagagatataactgagccagct

SEQ ID NO: 5511610 - DNA, 25 bp, Homo sapien
tgctgctacccgggacattagagat

SEQ ID NO: 5511611 - DNA, 25 bp, Homo sapien
cttgtggtgagataaattcaatgtc

SEQ ID NO: 5511612 - DNA, 25 bp, Homo sapien
ctaaaataagtcaggatggatcaac

SEQ ID NO: 5511613 - DNA, 25 bp, Homo sapien
tgagccagctgagatgacatttaca

SEQ ID NO: 5511614 - DNA, 25 bp, Homo sapien
aacatatttttagagggaggtgctg

SEQ ID NO: 5511615 - DNA, 25 bp, Homo sapien
attaggaaacttagcaaagacagtc

SEQ ID NO: 5511616 - DNA, 25 bp, Homo sapien
agtgaaacagcgaagtaaacatatt

SEQ ID NO: 5511617 - DNA, 25 bp, Homo sapien
aactagaaatcggaagctgccattt

SEQ ID NO: 5511618 - DNA, 25 bp, Homo sapien
acataagcaggtatcatcagagttt

SEQ ID NO: 5511619 - DNA, 25 bp, Homo sapien
ccagaagatctgagacttaaatttc

SEQ ID NO: 5511620 - DNA, 25 bp, Homo sapien
tgttgatgtgctactcaaggggaag

SEQ ID NO: 5511621 - DNA, 25 bp, Homo sapien
aaggggaagtgttgtttatgcatct

SEQ ID NO: 5511622 - DNA, 25 bp, Homo sapien
cacagattagccaaaacaggccttc

SEQ ID NO: 5511623 - DNA, 25 bp, Homo sapien
tcatcagagtttgcacagattagcc

SEQ ID NO: 5511624 - DNA, 25 bp, Homo sapien
acaggccttcaataggtagtggttt

SEQ ID NO: 5511625 - DNA, 25 bp, Homo sapien
gtacaatgctgtatgttgatgtgct

SEQ ID NO: 5511626 - DNA, 25 bp, Homo sapien
agcagtgtggaaaagaatccacata

SEQ ID NO: 5511627 - DNA, 25 bp, Homo sapien
acagtataaaggttacaaaggtata

SEQ ID NO: 5511628 - DNA, 25 bp, Homo sapien
attaggaacacaaatactgccctgt

SEQ ID NO: 5511629 - DNA, 25 bp, Homo sapien
tccacctaccgtacacggtcgggca

SEQ ID NO: 5511630 - DNA, 25 bp, Homo sapien
tgcccgaccgtgtacggtaggtgga

SEQ ID NO: 5511631 - DNA, 25 bp, Homo sapien
actgaatccagagatcaggtctctc

SEQ ID NO: 5511632 - DNA, 25 bp, Homo sapien
aagtacagttgttaggcacggttaa

SEQ ID NO: 5511633 - DNA, 25 bp, Homo sapien
atattgcccgaaggtatcttagggt

SEQ ID NO: 5511634 - DNA, 25 bp, Homo sapien
agatcaggtctctcggctgtgctgg

SEQ ID NO: 5511635 - DNA, 25 bp, Homo sapien
ttcagtagcaagagcccaaaaatgg

SEQ ID NO: 5511636 - DNA, 25 bp, Homo sapien
taaaagggatgatacacacaaacta

SEQ ID NO: 5511637 - DNA, 25 bp, Homo sapien
ctcgaagagctaaaagcactgaatc

SEQ ID NO: 5511638 - DNA, 25 bp, Homo sapien
atcttagggtaaactcgaagagcta

SEQ ID NO: 5511639 - DNA, 25 bp, Homo sapien
tcagaaatgacctgaagagcttttg

SEQ ID NO: 5511640 - DNA, 25 bp, Homo sapien
acagttctgagaaaaaatccaattc

SEQ ID NO: 5511641 - DNA, 25 bp, Homo sapien
ccaaaaatggtgttccaagccaaga

SEQ ID NO: 5511642 - DNA, 25 bp, Homo sapien
cggatgcaggtaaagctagaattct

SEQ ID NO: 5511643 - DNA, 25 bp, Homo sapien
tacaaatgaggcacaggttaactta

SEQ ID NO: 5511644 - DNA, 25 bp, Homo sapien
aagcagtagataaacagcaaggagt

SEQ ID NO: 5511645 - DNA, 25 bp, Homo sapien
aggggcatggctgctatcacccata

SEQ ID NO: 5511646 - DNA, 25 bp, Homo sapien
tccagctcccacaagtgaggcagga

SEQ ID NO: 5511647 - DNA, 25 bp, Homo sapien
gactgtgagttcaggaaaagaagga

SEQ ID NO: 5511648 - DNA, 25 bp, Homo sapien
aaaactgaatcagcggatgcaggta

SEQ ID NO: 5511649 - DNA, 25 bp, Homo sapien
caggaaccatgtctgagatgccagg

SEQ ID NO: 5511650 - DNA, 25 bp, Homo sapien
tccagccctgatagaggcaaagcta

SEQ ID NO: 5511651 - DNA, 25 bp, Homo sapien
gacatcagacaagacacacatagcc

SEQ ID NO: 5511652 - DNA, 25 bp, Homo sapien
ggacaagatagtgagcacagcatta

SEQ ID NO: 5511653 - DNA, 25 bp, Homo sapien
aagtggttaacatacacaggaaaac

SEQ ID NO: 5511654 - DNA, 25 bp, Homo sapien
aaatcaaaattggcagctcactgaa

SEQ ID NO: 5511655 - DNA, 25 bp, Homo sapien
gatacagagtataatttccaaacac

SEQ ID NO: 5511656 - DNA, 25 bp, Homo sapien
acaatcactctaaaaccaaagcagg

SEQ ID NO: 5511657 - DNA, 25 bp, Homo sapien
ttccaaacacagtattgctgctttt

SEQ ID NO: 5511658 - DNA, 25 bp, Homo sapien
aaattggcagctcactgaatgctta

SEQ ID NO: 5511659 - DNA, 25 bp, Homo sapien
aaataatttgggtaaagagcaacac

SEQ ID NO: 5511660 - DNA, 25 bp, Homo sapien
tgcattgaatgcctcacaatcactc

SEQ ID NO: 5511661 - DNA, 25 bp, Homo sapien
acaggaaaaccagatacagagtata

SEQ ID NO: 5511662 - DNA, 25 bp, Homo sapien
atttaagtggttaacatacacagga

SEQ ID NO: 5511663 - DNA, 25 bp, Homo sapien
ataatttgggtaaagagcaacacaa

SEQ ID NO: 5511664 - DNA, 25 bp, Homo sapien
tctggtatcatgatggtgaggaaca

SEQ ID NO: 5511665 - DNA, 25 bp, Homo sapien
tgtcttgacatttgcagccctgagg

SEQ ID NO: 5511666 - DNA, 25 bp, Homo sapien
acattgcttgcttgagacattggat

SEQ ID NO: 5511667 - DNA, 25 bp, Homo sapien
tggctgaccagcacttgttactcta

SEQ ID NO: 5511668 - DNA, 25 bp, Homo sapien
tgaggacacaggcagatagttccta

SEQ ID NO: 5511669 - DNA, 25 bp, Homo sapien
aattgagagcttgtacaacatgtat

SEQ ID NO: 5511670 - DNA, 25 bp, Homo sapien
gccaagtaccctacaaatcagcatc

SEQ ID NO: 5511671 - DNA, 25 bp, Homo sapien
atcttgtttgaagggagattgagga

SEQ ID NO: 5511672 - DNA, 25 bp, Homo sapien
tgaggaacagggttatgtcttgaca

SEQ ID NO: 5511673 - DNA, 25 bp, Homo sapien
actggcttaagatccagaaggcatc

SEQ ID NO: 5511674 - DNA, 25 bp, Homo sapien
ctgaggacctccactgacaactggc

SEQ ID NO: 5511675 - DNA, 25 bp, Homo sapien
gcgccgctgagagcgcgaggccccg

SEQ ID NO: 5511676 - DNA, 25 bp, Homo sapien
cggggcctcgcgctctcagcggcgc

SEQ ID NO: 5511677 - DNA, 25 bp, Homo sapien
gcgggggcgccgctgagagcgcgag

SEQ ID NO: 5511678 - DNA, 25 bp, Homo sapien
ctcgcgctctcagcggcgcccccgc

SEQ ID NO: 5511679 - DNA, 25 bp, Homo sapien
ggggcgccgctgagagcgcgaggcc

SEQ ID NO: 5511680 - DNA, 25 bp, Homo sapien
ggcctcgcgctctcagcggcgcccc

SEQ ID NO: 5511681 - DNA, 25 bp, Homo sapien
gtgccgcgggggcgccgctgagagc

SEQ ID NO: 5511682 - DNA, 25 bp, Homo sapien
gctctcagcggcgcccccgcggcac

SEQ ID NO: 5511683 - DNA, 25 bp, Homo sapien
gggtcggtcccgcaccgtctcccca

SEQ ID NO: 5511684 - DNA, 25 bp, Homo sapien
tggggagacggtgcgggaccgaccc

SEQ ID NO: 5511685 - DNA, 25 bp, Homo sapien
gccaagatctgcgacagtcccaaca

SEQ ID NO: 5511686 - DNA, 25 bp, Homo sapien
gaatgcaaaactagcctcaggtgac

SEQ ID NO: 5511687 - DNA, 25 bp, Homo sapien
accatgcccacatagagggggcaga

SEQ ID NO: 5511688 - DNA, 25 bp, Homo sapien
gagtggtagtttgagccatgaggta

SEQ ID NO: 5511689 - DNA, 25 bp, Homo sapien
ccccccgttcctgagggacaggatg

SEQ ID NO: 5511690 - DNA, 25 bp, Homo sapien
gggggcagacacatgtctgggtttc

SEQ ID NO: 5511691 - DNA, 25 bp, Homo sapien
tctggtcacatggatacaggaagga

SEQ ID NO: 5511692 - DNA, 25 bp, Homo sapien
ctttaatatagcgactgaggagtgg

SEQ ID NO: 5511693 - DNA, 25 bp, Homo sapien
gaggcataccaacaagaaacgaagc

SEQ ID NO: 5511694 - DNA, 25 bp, Homo sapien
ggggagccagaatccacttagtgag

SEQ ID NO: 5511695 - DNA, 25 bp, Homo sapien
gaagaactgtaagaagccaagatct

SEQ ID NO: 5511696 - DNA, 25 bp, Homo sapien
ttcgggccctcgactgctccgaggt

SEQ ID NO: 5511697 - DNA, 25 bp, Homo sapien
tgcgttcttcgagcaccttcgggcc

SEQ ID NO: 5511698 - DNA, 25 bp, Homo sapien
ctgacctctaccaggccaccatggc

SEQ ID NO: 5511699 - DNA, 25 bp, Homo sapien
ggcggcgccttcgccttggccgccg

SEQ ID NO: 5511700 - DNA, 25 bp, Homo sapien
gcgcgactgtgtgcgcttcctgcgc

SEQ ID NO: 5511701 - DNA, 25 bp, Homo sapien
gccaccatggcgttgggctattggc

SEQ ID NO: 5511702 - DNA, 25 bp, Homo sapien
ggggcctgacagcctccacctacag

SEQ ID NO: 5511703 - DNA, 25 bp, Homo sapien
gccgccgagttcgagctcttcttcc

SEQ ID NO: 5511704 - DNA, 25 bp, Homo sapien
ctgctctgcctggtcagctacgcca

SEQ ID NO: 5511705 - DNA, 25 bp, Homo sapien
ctccacctacagctacctgggcggc

SEQ ID NO: 5511706 - DNA, 25 bp, Homo sapien
ccccagacacggatcctgcgttctt

SEQ ID NO: 5511707 - DNA, 25 bp, Homo sapien
acccgcgtcgtggacgcgtctcgac

SEQ ID NO: 5511708 - DNA, 25 bp, Homo sapien
gtcgagacgcgtccacgacgcgggt

SEQ ID NO: 5511709 - DNA, 25 bp, Homo sapien
gcactggcagttagatgcaaagaat

SEQ ID NO: 5511710 - DNA, 25 bp, Homo sapien
ttgttgaatcagaaagcattcttac

SEQ ID NO: 5511711 - DNA, 25 bp, Homo sapien
atcagagattagatacaaaaactaa

SEQ ID NO: 5511712 - DNA, 25 bp, Homo sapien
ttaataagaaatgtacaacgattta

SEQ ID NO: 5511713 - DNA, 25 bp, Homo sapien
tttaatatgagcaaagattggcaac

SEQ ID NO: 5511714 - DNA, 25 bp, Homo sapien
tttatgctacatcagaaaagaggat

SEQ ID NO: 5511715 - DNA, 25 bp, Homo sapien
tggcaactgagaagtggttcacttg

SEQ ID NO: 5511716 - DNA, 25 bp, Homo sapien
tgtgactggtcatctactggcagtt

SEQ ID NO: 5511717 - DNA, 25 bp, Homo sapien
gagcaaagattggcaactgagaagt

SEQ ID NO: 5511718 - DNA, 25 bp, Homo sapien
aggataaggaaacagtttgataaca

SEQ ID NO: 5511719 - DNA, 25 bp, Homo sapien
agaaaaaaaatggcaggtataacat

SEQ ID NO: 5511720 - DNA, 25 bp, Homo sapien
aggtttgcgttttgggagtgcctta

SEQ ID NO: 5511721 - DNA, 25 bp, Homo sapien
tctctagataggcatgtggtctgag

SEQ ID NO: 5511722 - DNA, 25 bp, Homo sapien
tggcctagtccagatgagtgtatat

SEQ ID NO: 5511723 - DNA, 25 bp, Homo sapien
gtcatgagcaggaacaacttgtgct

SEQ ID NO: 5511724 - DNA, 25 bp, Homo sapien
agagaaggacaagactgatgtttac

SEQ ID NO: 5511725 - DNA, 25 bp, Homo sapien
ggtgaactgaaagagactgcttcca

SEQ ID NO: 5511726 - DNA, 25 bp, Homo sapien
aacaacttgtgctgtacggaggtga

SEQ ID NO: 5511727 - DNA, 25 bp, Homo sapien
ttaaggcatccacaaaatgtccctc

SEQ ID NO: 5511728 - DNA, 25 bp, Homo sapien
gtcctcacacaggcaactgcattcc

SEQ ID NO: 5511729 - DNA, 25 bp, Homo sapien
taatgagaaatatagtgtaaaaaac

SEQ ID NO: 5511730 - DNA, 25 bp, Homo sapien
caagacacatgaaagtcaccagcac

SEQ ID NO: 5511731 - DNA, 25 bp, Homo sapien
agaaaataatggcaggatcatgact

SEQ ID NO: 5511732 - DNA, 25 bp, Homo sapien
taatgtaggggcttactaagaagtc

SEQ ID NO: 5511733 - DNA, 25 bp, Homo sapien
gctttatagggattcagagacagac

SEQ ID NO: 5511734 - DNA, 25 bp, Homo sapien
ccctgttaggtagaagtgggagtaa

SEQ ID NO: 5511735 - DNA, 25 bp, Homo sapien
gccaggccttgaagaactgaagaga

SEQ ID NO: 5511736 - DNA, 25 bp, Homo sapien
ataaaacactggcaggatagatgac

SEQ ID NO: 5511737 - DNA, 25 bp, Homo sapien
cattctcatgagggagacaagacta

SEQ ID NO: 5511738 - DNA, 25 bp, Homo sapien
ctgaagagacttaagttgaggtccc

SEQ ID NO: 5511739 - DNA, 25 bp, Homo sapien
taccagctaggaacagtacaagaca

SEQ ID NO: 5511740 - DNA, 25 bp, Homo sapien
ttttttgaggaatcaggaacaaggc

SEQ ID NO: 5511741 - DNA, 25 bp, Homo sapien
gtttaagtagcctggagacatccta

SEQ ID NO: 5511742 - DNA, 25 bp, Homo sapien
cagttgtataaagagaggcactact

SEQ ID NO: 5511743 - DNA, 25 bp, Homo sapien
tacacattgggatctaaaactatta

SEQ ID NO: 5511744 - DNA, 25 bp, Homo sapien
agagaggcactacttttatccacga

SEQ ID NO: 5511745 - DNA, 25 bp, Homo sapien
tattgagatgtaaatcaggaagtag

SEQ ID NO: 5511746 - DNA, 25 bp, Homo sapien
tgtttgaataggaaattgctaaatt

SEQ ID NO: 5511747 - DNA, 25 bp, Homo sapien
ttatccacgaaaagcatcaaaattt

SEQ ID NO: 5511748 - DNA, 25 bp, Homo sapien
tatgaaaaagtaagtataatgttta

SEQ ID NO: 5511749 - DNA, 25 bp, Homo sapien
aaaactattagtaaacagcaacaat

SEQ ID NO: 5511750 - DNA, 25 bp, Homo sapien
aaaaaacatactaatgagatcctgt

SEQ ID NO: 5511751 - DNA, 25 bp, Homo sapien
cagcaacaatagagactacgtattt

SEQ ID NO: 5511752 - DNA, 25 bp, Homo sapien
atcaggaagtagttatttgcgttac

SEQ ID NO: 5511753 - DNA, 25 bp, Homo sapien
tccagtagacacaccagatgaggac

SEQ ID NO: 5511754 - DNA, 25 bp, Homo sapien
acagtggtgacatccaagtggtcac

SEQ ID NO: 5511755 - DNA, 25 bp, Homo sapien
gccaccaacacggtgtcagagccat

SEQ ID NO: 5511756 - DNA, 25 bp, Homo sapien
ggccaccaccaggtggggtatattc

SEQ ID NO: 5511757 - DNA, 25 bp, Homo sapien
aacaggctagaacccctgaggcttg

SEQ ID NO: 5511758 - DNA, 25 bp, Homo sapien
tctcctgtgggaccctccagtagac

SEQ ID NO: 5511759 - DNA, 25 bp, Homo sapien
attgtctgggacatcgccaccaaca

SEQ ID NO: 5511760 - DNA, 25 bp, Homo sapien
gtggatgttcgagatgagccaccag

SEQ ID NO: 5511761 - DNA, 25 bp, Homo sapien
ggtggggtatattcaacaggctaga

SEQ ID NO: 5511762 - DNA, 25 bp, Homo sapien
ttcacatgagacgccacggtgtctc

SEQ ID NO: 5511763 - DNA, 25 bp, Homo sapien
acagtgcccaggaaagttcacatga

SEQ ID NO: 5511764 - DNA, 25 bp, Homo sapien
gtggctcaattaggcaaagtgtagg

SEQ ID NO: 5511765 - DNA, 25 bp, Homo sapien
tttgaagtagaccagtttagttgac

SEQ ID NO: 5511766 - DNA, 25 bp, Homo sapien
acctggaacctggtccagaccctca

SEQ ID NO: 5511767 - DNA, 25 bp, Homo sapien
ttaggcaaagtgtaggaatctcatt

SEQ ID NO: 5511768 - DNA, 25 bp, Homo sapien
gacaagaggtgtgcacacccacatg

SEQ ID NO: 5511769 - DNA, 25 bp, Homo sapien
atgccaatggacatacctatacttt

SEQ ID NO: 5511770 - DNA, 25 bp, Homo sapien
ggtctcactcttcacacaggcccac

SEQ ID NO: 5511771 - DNA, 25 bp, Homo sapien
ctggtccagaccctcacccactcta

SEQ ID NO: 5511772 - DNA, 25 bp, Homo sapien
acacaggcccactatttttgaagta

SEQ ID NO: 5511773 - DNA, 25 bp, Homo sapien
agaaaagtccaatgttacaaaatca

SEQ ID NO: 5511774 - DNA, 25 bp, Homo sapien
cacccacatgtggtctcactcttca

SEQ ID NO: 5511775 - DNA, 25 bp, Homo sapien
agctgccagaaaacctggtagtggc

SEQ ID NO: 5511776 - DNA, 25 bp, Homo sapien
agaatcagaatcaaaagtcactctg

SEQ ID NO: 5511777 - DNA, 25 bp, Homo sapien
aataatgtggccacagctgccagaa

SEQ ID NO: 5511778 - DNA, 25 bp, Homo sapien
ccagaaaacctggtagtggctcaat

SEQ ID NO: 5511779 - DNA, 25 bp, Homo sapien
gccgctccatacaaaacataaagaa

SEQ ID NO: 5511780 - DNA, 25 bp, Homo sapien
acagataaaagtgccgctccataca

SEQ ID NO: 5511781 - DNA, 25 bp, Homo sapien
agaatcaaaagtcactctgaacata

SEQ ID NO: 5511782 - DNA, 25 bp, Homo sapien
caaataatgtggccacagctgccag

SEQ ID NO: 5511783 - DNA, 25 bp, Homo sapien
aaacctggtagtggctcaattaggc

SEQ ID NO: 5511784 - DNA, 25 bp, Homo sapien
aaacacagataaaagtgccgctcca

SEQ ID NO: 5511785 - DNA, 25 bp, Homo sapien
cacagctgccagaaaacctggtagt

SEQ ID NO: 5511786 - DNA, 25 bp, Homo sapien
aatagctaagatgtggctgagttga

SEQ ID NO: 5511787 - DNA, 25 bp, Homo sapien
atgatgaactcaagaacaaagataa

SEQ ID NO: 5511788 - DNA, 25 bp, Homo sapien
agcagatcttccacgagggtttggc

SEQ ID NO: 5511789 - DNA, 25 bp, Homo sapien
acatcaacaactgtggaactgtatc

SEQ ID NO: 5511790 - DNA, 25 bp, Homo sapien
gtgggctgacttcacgtgagcagca

SEQ ID NO: 5511791 - DNA, 25 bp, Homo sapien
ccattttcgatggttgtgggtattg

SEQ ID NO: 5511792 - DNA, 25 bp, Homo sapien
ggtcggactgtgttggactgttcta

SEQ ID NO: 5511793 - DNA, 25 bp, Homo sapien
cacgtgagcagcataccaaacacct

SEQ ID NO: 5511794 - DNA, 25 bp, Homo sapien
gagttgaaagcacttccaatagtat

SEQ ID NO: 5511795 - DNA, 25 bp, Homo sapien
acaaagataatggttgcagcagatc

SEQ ID NO: 5511796 - DNA, 25 bp, Homo sapien
tacatggtatgctaaatgctcttgc

SEQ ID NO: 5511797 - DNA, 25 bp, Homo sapien
gtgcctaggaaatctacagtagaac

SEQ ID NO: 5511798 - DNA, 25 bp, Homo sapien
accataccagcataagttgatcttc

SEQ ID NO: 5511799 - DNA, 25 bp, Homo sapien
ctaggcttcccaatctgacccattc

SEQ ID NO: 5511800 - DNA, 25 bp, Homo sapien
caaatgcatggctgactaaaaatag

SEQ ID NO: 5511801 - DNA, 25 bp, Homo sapien
ttcaacagagcagtgcctaggaaat

SEQ ID NO: 5511802 - DNA, 25 bp, Homo sapien
agtgaaaggcttactggaaaaaata

SEQ ID NO: 5511803 - DNA, 25 bp, Homo sapien
ccattcaacccagaggtgctcagcc

SEQ ID NO: 5511804 - DNA, 25 bp, Homo sapien
taaatcagaatgttgctaaagactt

SEQ ID NO: 5511805 - DNA, 25 bp, Homo sapien
aaaaacgtacataagcaattcagat

SEQ ID NO: 5511806 - DNA, 25 bp, Homo sapien
tcccaaagggcaccatgtatgatca

SEQ ID NO: 5511807 - DNA, 25 bp, Homo sapien
gcgtaggtaaacattggtcacagat

SEQ ID NO: 5511808 - DNA, 25 bp, Homo sapien
atatcagaggcccatggagtaaaaa

SEQ ID NO: 5511809 - DNA, 25 bp, Homo sapien
actctccagtggcaacctcacattc

SEQ ID NO: 5511810 - DNA, 25 bp, Homo sapien
gctccaactgtgcaaagtggagacc

SEQ ID NO: 5511811 - DNA, 25 bp, Homo sapien
cattcttcgagcattgtggaccaca

SEQ ID NO: 5511812 - DNA, 25 bp, Homo sapien
acacacacacgaacagaaggattca

SEQ ID NO: 5511813 - DNA, 25 bp, Homo sapien
tctctctgggtggaaaattattgcc

SEQ ID NO: 5511814 - DNA, 25 bp, Homo sapien
gagttagaggagaacagctccaact

SEQ ID NO: 5511815 - DNA, 25 bp, Homo sapien
tagatgaaaagacctctcaagctag

SEQ ID NO: 5511816 - DNA, 25 bp, Homo sapien
tttgcctctgtaacggtgataccat

SEQ ID NO: 5511817 - DNA, 25 bp, Homo sapien
accataatcataaccgtgccacatc

SEQ ID NO: 5511818 - DNA, 25 bp, Homo sapien
gaaggattcaaaaagcagacactgg

SEQ ID NO: 5511819 - DNA, 25 bp, Homo sapien
tcctcagcaggtcagatatagattt

SEQ ID NO: 5511820 - DNA, 25 bp, Homo sapien
aaatgactaagttggaagcattagc

SEQ ID NO: 5511821 - DNA, 25 bp, Homo sapien
acaactgatccctgcaacagctgac

SEQ ID NO: 5511822 - DNA, 25 bp, Homo sapien
aatatagagagaggatcttatgttt

SEQ ID NO: 5511823 - DNA, 25 bp, Homo sapien
ttggcagggcatataaaattagact

SEQ ID NO: 5511824 - DNA, 25 bp, Homo sapien
gaggctataatgggcttaatgctgc

SEQ ID NO: 5511825 - DNA, 25 bp, Homo sapien
ctgcaatagatgaggacattggcag

SEQ ID NO: 5511826 - DNA, 25 bp, Homo sapien
aacacagcacaatgtgggttcacca

SEQ ID NO: 5511827 - DNA, 25 bp, Homo sapien
aagcattagcaaactcaaggaaggg

SEQ ID NO: 5511828 - DNA, 25 bp, Homo sapien
gaagggacaattcagaggctataat

SEQ ID NO: 5511829 - DNA, 25 bp, Homo sapien
gacatgcccagatgcctcagagtac

SEQ ID NO: 5511830 - DNA, 25 bp, Homo sapien
ctcatttggtctcacccacctgggg

SEQ ID NO: 5511831 - DNA, 25 bp, Homo sapien
gtgggagttgggtgccctcccatct

SEQ ID NO: 5511832 - DNA, 25 bp, Homo sapien
cccaactcctgccgggtcccactca

SEQ ID NO: 5511833 - DNA, 25 bp, Homo sapien
cttcatggcatcaaaatataactcc

SEQ ID NO: 5511834 - DNA, 25 bp, Homo sapien
ccaagtttaagtgctgggtaaggga

SEQ ID NO: 5511835 - DNA, 25 bp, Homo sapien
ctgctgttgcatgcttgtgggagtt

SEQ ID NO: 5511836 - DNA, 25 bp, Homo sapien
catctccctgtgagggttgccctgc

SEQ ID NO: 5511837 - DNA, 25 bp, Homo sapien
acctggggcagacccccaattccta

SEQ ID NO: 5511838 - DNA, 25 bp, Homo sapien
ggtcccactcagctaggagccatct

SEQ ID NO: 5511839 - DNA, 25 bp, Homo sapien
acagccatcacaggctgcctgggcc

SEQ ID NO: 5511840 - DNA, 25 bp, Homo sapien
ataactccagaccaagaccagtgac

SEQ ID NO: 5511841 - DNA, 25 bp, Homo sapien
gaggctcagcgttggtaataccatg

SEQ ID NO: 5511842 - DNA, 25 bp, Homo sapien
aacttgggccttgcttcaagcaggc

SEQ ID NO: 5511843 - DNA, 25 bp, Homo sapien
agcagacagcaggttgaataaaacc

SEQ ID NO: 5511844 - DNA, 25 bp, Homo sapien
agtccacaaggatccaggtaccttc

SEQ ID NO: 5511845 - DNA, 25 bp, Homo sapien
ctgacagaaacatccccaacagggc

SEQ ID NO: 5511846 - DNA, 25 bp, Homo sapien
attgaagaatgcactttggtactgt

SEQ ID NO: 5511847 - DNA, 25 bp, Homo sapien
taaataacaacacatcagcccactt

SEQ ID NO: 5511848 - DNA, 25 bp, Homo sapien
tctccaatcctaaagcagacagcag

SEQ ID NO: 5511849 - DNA, 25 bp, Homo sapien
aatatttgtacaaagagttgagagt

SEQ ID NO: 5511850 - DNA, 25 bp, Homo sapien
aacagggcatgccctggtccaagtc

SEQ ID NO: 5511851 - DNA, 25 bp, Homo sapien
agcccacttgattccatgccatgtc

SEQ ID NO: 5511852 - DNA, 25 bp, Homo sapien
ctggcaaaacgtttaggctgaattt

SEQ ID NO: 5511853 - DNA, 25 bp, Homo sapien
tgacaacaacaaaagatgaggaaat

SEQ ID NO: 5511854 - DNA, 25 bp, Homo sapien
tgcaacagcagacactagtaaaaac

SEQ ID NO: 5511855 - DNA, 25 bp, Homo sapien
tgagaccccaaatttgcagtgtaga

SEQ ID NO: 5511856 - DNA, 25 bp, Homo sapien
atataataatagacacaggcaggga

SEQ ID NO: 5511857 - DNA, 25 bp, Homo sapien
gcagggaggattaataaatgataaa

SEQ ID NO: 5511858 - DNA, 25 bp, Homo sapien
atggtgatggacaaactagaccttc

SEQ ID NO: 5511859 - DNA, 25 bp, Homo sapien
ggctgaggttggaaactcacagcat

SEQ ID NO: 5511860 - DNA, 25 bp, Homo sapien
ctaaaagggacagatctcctagacc

SEQ ID NO: 5511861 - DNA, 25 bp, Homo sapien
taaaactcaggcagagaatgtcttc

SEQ ID NO: 5511862 - DNA, 25 bp, Homo sapien
ctagtaaaaacaaaggcacagtaaa

SEQ ID NO: 5511863 - DNA, 25 bp, Homo sapien
aattcatggcaggtgaaaagataat

SEQ ID NO: 5511864 - DNA, 25 bp, Homo sapien
ttcaggttaagagcaacaccaggga

SEQ ID NO: 5511865 - DNA, 25 bp, Homo sapien
actgaaggtttcaccatggaaaaac

SEQ ID NO: 5511866 - DNA, 25 bp, Homo sapien
aaaagtgcaaacaaggttagtgatt

SEQ ID NO: 5511867 - DNA, 25 bp, Homo sapien
aatcccaaagaaaacctgtatgtca

SEQ ID NO: 5511868 - DNA, 25 bp, Homo sapien
cagaaacccacgttaagttggccat

SEQ ID NO: 5511869 - DNA, 25 bp, Homo sapien
caccagggaatacagaaacccacgt

SEQ ID NO: 5511870 - DNA, 25 bp, Homo sapien
gatcctagtgcaagcagtggtgtac

SEQ ID NO: 5511871 - DNA, 25 bp, Homo sapien
agtatggcaactgattatgagttca

SEQ ID NO: 5511872 - DNA, 25 bp, Homo sapien
tgtatgtcaaaaacagaactgttcc

SEQ ID NO: 5511873 - DNA, 25 bp, Homo sapien
tgttcaccctgagtgctcttgcctc

SEQ ID NO: 5511874 - DNA, 25 bp, Homo sapien
acacggtcaaaagcttaagggacag

SEQ ID NO: 5511875 - DNA, 25 bp, Homo sapien
tcctgaccctacttgcactgctgtg

SEQ ID NO: 5511876 - DNA, 25 bp, Homo sapien
tggtgttagatgacatgattaataa

SEQ ID NO: 5511877 - DNA, 25 bp, Homo sapien
tgattgtgattagagaaccttggac

SEQ ID NO: 5511878 - DNA, 25 bp, Homo sapien
tctgtgagataactgtgcctgctac

SEQ ID NO: 5511879 - DNA, 25 bp, Homo sapien
cgtatgtcacagtttggggcaacgg

SEQ ID NO: 5511880 - DNA, 25 bp, Homo sapien
tggggcaacggaagtcttttagtga

SEQ ID NO: 5511881 - DNA, 25 bp, Homo sapien
tgtgcctgctaccaagtgttaatcc

SEQ ID NO: 5511882 - DNA, 25 bp, Homo sapien
ttttagtgatggctaatgggtctgg

SEQ ID NO: 5511883 - DNA, 25 bp, Homo sapien
aagtgacaaacacggtcaaaagctt

SEQ ID NO: 5511884 - DNA, 25 bp, Homo sapien
gggacaggttttatggttgcttgtg

SEQ ID NO: 5511885 - DNA, 25 bp, Homo sapien
gcgtgctctccggcgccgacctgac

SEQ ID NO: 5511886 - DNA, 25 bp, Homo sapien
gtcaggtcggcgccggagagcacgc

SEQ ID NO: 5511887 - DNA, 25 bp, Homo sapien
gtcgtcctactcctctagaccgtcg

SEQ ID NO: 5511888 - DNA, 25 bp, Homo sapien
cgacggtctagaggagtaggacgac

SEQ ID NO: 5511889 - DNA, 25 bp, Homo sapien
cacaacagcgacactttgcactatc

SEQ ID NO: 5511890 - DNA, 25 bp, Homo sapien
ataaatattaggcatgtatgtccat

SEQ ID NO: 5511891 - DNA, 25 bp, Homo sapien
attaaagagtcctgtggcaatcctt

SEQ ID NO: 5511892 - DNA, 25 bp, Homo sapien
gaggtgccggtcaccacatttaggc

SEQ ID NO: 5511893 - DNA, 25 bp, Homo sapien
ataagcacatcaaactgtccaggga

SEQ ID NO: 5511894 - DNA, 25 bp, Homo sapien
cacagcagatcaataggtgtcagtc

SEQ ID NO: 5511895 - DNA, 25 bp, Homo sapien
ttgccctcaacaattatgacgttac

SEQ ID NO: 5511896 - DNA, 25 bp, Homo sapien
ctcaaaaagttatgtgaggtgccgg

SEQ ID NO: 5511897 - DNA, 25 bp, Homo sapien
ggtgtcagtcaccagcttaagttac

SEQ ID NO: 5511898 - DNA, 25 bp, Homo sapien
gcactatcaacaatgaagcttgccc

SEQ ID NO: 5511899 - DNA, 25 bp, Homo sapien
ctaatgcgcttaagacataacactc

SEQ ID NO: 5511900 - DNA, 25 bp, Homo sapien
atgcgtgcaacaagatgtttaatac

SEQ ID NO: 5511901 - DNA, 25 bp, Homo sapien
ctgatgacctcaaatgcgtgcaaca

SEQ ID NO: 5511902 - DNA, 25 bp, Homo sapien
gctgatgctgggtcagctgactcta

SEQ ID NO: 5511903 - DNA, 25 bp, Homo sapien
catgaaagcatttgaacagagttca

SEQ ID NO: 5511904 - DNA, 25 bp, Homo sapien
atatccaacatttctaaagggggga

SEQ ID NO: 5511905 - DNA, 25 bp, Homo sapien
acaaattttgcaccctgatgacctc

SEQ ID NO: 5511906 - DNA, 25 bp, Homo sapien
tctcagaagattttcggagttaaaa

SEQ ID NO: 5511907 - DNA, 25 bp, Homo sapien
cggagttaaaagaagtgtttatatc

SEQ ID NO: 5511908 - DNA, 25 bp, Homo sapien
aatcgttccaagcataccgtgaatt

SEQ ID NO: 5511909 - DNA, 25 bp, Homo sapien
tttccaacccagagtgtggctgatg

SEQ ID NO: 5511910 - DNA, 25 bp, Homo sapien
accaactttgatgtctaggctattc

SEQ ID NO: 5511911 - DNA, 25 bp, Homo sapien
tttctgaacactgcactgagggtag

SEQ ID NO: 5511912 - DNA, 25 bp, Homo sapien
acaatctcagattaggggacttcac

SEQ ID NO: 5511913 - DNA, 25 bp, Homo sapien
aacaatgacagttgggcagatttga

SEQ ID NO: 5511914 - DNA, 25 bp, Homo sapien
attgtgcagataagacaggtaactt

SEQ ID NO: 5511915 - DNA, 25 bp, Homo sapien
ttaggagttcagcaacaacaatgac

SEQ ID NO: 5511916 - DNA, 25 bp, Homo sapien
tgtgagataagaggcctacaaatca

SEQ ID NO: 5511917 - DNA, 25 bp, Homo sapien
taggggacttcacgcccatccttcc

SEQ ID NO: 5511918 - DNA, 25 bp, Homo sapien
agtttcaagagtgtgagataagagg

SEQ ID NO: 5511919 - DNA, 25 bp, Homo sapien
attttaccgactacctgaagccatt

SEQ ID NO: 5511920 - DNA, 25 bp, Homo sapien
gaagcatcagggactaaaataacac

SEQ ID NO: 5511921 - DNA, 25 bp, Homo sapien
gcactgagggtagacccccaaaatc

SEQ ID NO: 5511922 - DNA, 25 bp, Homo sapien
attatgtacacaaggaaagaagctg

SEQ ID NO: 5511923 - DNA, 25 bp, Homo sapien
aacagactttcagccagtacagtac

SEQ ID NO: 5511924 - DNA, 25 bp, Homo sapien
aagagaggtggtattgcacttgctt

SEQ ID NO: 5511925 - DNA, 25 bp, Homo sapien
ctatctgcagcttggacactgacac

SEQ ID NO: 5511926 - DNA, 25 bp, Homo sapien
tgcaataagtctcaaaagctagttt

SEQ ID NO: 5511927 - DNA, 25 bp, Homo sapien
agtattacaaaatcctatctgcagc

SEQ ID NO: 5511928 - DNA, 25 bp, Homo sapien
cataggctacaaaggaaaccctagg

SEQ ID NO: 5511929 - DNA, 25 bp, Homo sapien
tgcagcttggacactgacacaaaaa

SEQ ID NO: 5511930 - DNA, 25 bp, Homo sapien
agtctcaaaagctagtttaactccc

SEQ ID NO: 5511931 - DNA, 25 bp, Homo sapien
ttacagtagtatatctccgttacac

SEQ ID NO: 5511932 - DNA, 25 bp, Homo sapien
gctacaaaggaaaccctaggagaga

SEQ ID NO: 5511933 - DNA, 25 bp, Homo sapien
caaactgagatgctgaaaagaatat

SEQ ID NO: 5511934 - DNA, 25 bp, Homo sapien
agacaatgacctgtaagagcgatta

SEQ ID NO: 5511935 - DNA, 25 bp, Homo sapien
aaatgccggcaattacgataccttc

SEQ ID NO: 5511936 - DNA, 25 bp, Homo sapien
ccatgaagatgataatatgccaggg

SEQ ID NO: 5511937 - DNA, 25 bp, Homo sapien
agagcgattatcaaaaggtcaagtt

SEQ ID NO: 5511938 - DNA, 25 bp, Homo sapien
aaagcttaagaatgaattacaggac

SEQ ID NO: 5511939 - DNA, 25 bp, Homo sapien
agtgatgactgagagccacaatatc

SEQ ID NO: 5511940 - DNA, 25 bp, Homo sapien
atgcagagtaggaacactgagaata

SEQ ID NO: 5511941 - DNA, 25 bp, Homo sapien
tacaggacagtcagaagatttatag

SEQ ID NO: 5511942 - DNA, 25 bp, Homo sapien
agtgacaacgcagaaagaacacttt

SEQ ID NO: 5511943 - DNA, 25 bp, Homo sapien
ataccataggacaaagtgatgactg

SEQ ID NO: 5511944 - DNA, 25 bp, Homo sapien
ttaaagtgcagtgatggtctggaga

SEQ ID NO: 5511945 - DNA, 25 bp, Homo sapien
ggggcaccctaaggctctgataccc

SEQ ID NO: 5511946 - DNA, 25 bp, Homo sapien
gaaggctctgaaaagtaggattttg

SEQ ID NO: 5511947 - DNA, 25 bp, Homo sapien
gagtatagcctcagagcatagtcct

SEQ ID NO: 5511948 - DNA, 25 bp, Homo sapien
agggtgccgttgaggattcttcctt

SEQ ID NO: 5511949 - DNA, 25 bp, Homo sapien
ctgataccccagaagggactagtcc

SEQ ID NO: 5511950 - DNA, 25 bp, Homo sapien
gggactagtccttatgaagtgtcac

SEQ ID NO: 5511951 - DNA, 25 bp, Homo sapien
gctctcatgggcacagagtatagcc

SEQ ID NO: 5511952 - DNA, 25 bp, Homo sapien
gcatgaggatgtttgaggttccaga

SEQ ID NO: 5511953 - DNA, 25 bp, Homo sapien
cttcatgttccgggaggttacaggt

SEQ ID NO: 5511954 - DNA, 25 bp, Homo sapien
taaccagaatagttcaggaaaagcc

SEQ ID NO: 5511955 - DNA, 25 bp, Homo sapien
ctacaaactatctcccgccctcccc

SEQ ID NO: 5511956 - DNA, 25 bp, Homo sapien
ccagccccacccacacacccattat

SEQ ID NO: 5511957 - DNA, 25 bp, Homo sapien
aagtgaagtacaaagtagaaaagga

SEQ ID NO: 5511958 - DNA, 25 bp, Homo sapien
gtatactgaatgggagttgtaactc

SEQ ID NO: 5511959 - DNA, 25 bp, Homo sapien
cattggaaactagcaaaatgcattc

SEQ ID NO: 5511960 - DNA, 25 bp, Homo sapien
aaaccaaccctgaaaactgataatc

SEQ ID NO: 5511961 - DNA, 25 bp, Homo sapien
aggctcaagggaaagtaacttatta

SEQ ID NO: 5511962 - DNA, 25 bp, Homo sapien
tctgaacaggccttatgcatgtgac

SEQ ID NO: 5511963 - DNA, 25 bp, Homo sapien
aggaagacagctaattgatttacag

SEQ ID NO: 5511964 - DNA, 25 bp, Homo sapien
gagcctgagaaactatgatccacat

SEQ ID NO: 5511965 - DNA, 25 bp, Homo sapien
aagcaattatctaagggagcctgag

SEQ ID NO: 5511966 - DNA, 25 bp, Homo sapien
atgttacgacaaaacacctctctaa

SEQ ID NO: 5511967 - DNA, 25 bp, Homo sapien
ttagagaggtgttttgtcgtaacat

SEQ ID NO: 5511968 - DNA, 25 bp, Homo sapien
tgagataattctagtacaaagtata

SEQ ID NO: 5511969 - DNA, 25 bp, Homo sapien
aactagatgtataataaacccttta

SEQ ID NO: 5511970 - DNA, 25 bp, Homo sapien
tcttactgcacaatcaaaatgacat

SEQ ID NO: 5511971 - DNA, 25 bp, Homo sapien
tactggacaaagtaatgttactcta

SEQ ID NO: 5511972 - DNA, 25 bp, Homo sapien
cattggtaagtgtacaagtggtgga

SEQ ID NO: 5511973 - DNA, 25 bp, Homo sapien
cattgataggaatgaactccagagg

SEQ ID NO: 5511974 - DNA, 25 bp, Homo sapien
acgacctgtacctctcaacttttgc

SEQ ID NO: 5511975 - DNA, 25 bp, Homo sapien
cctggtgctcagtcgtacgacctgt

SEQ ID NO: 5511976 - DNA, 25 bp, Homo sapien
atttgatacatagtgtgcatttctc

SEQ ID NO: 5511977 - DNA, 25 bp, Homo sapien
tgctcgtgcgttgccacactgtgtt

SEQ ID NO: 5511978 - DNA, 25 bp, Homo sapien
taatggttacttgctcgtgcgttgc

SEQ ID NO: 5511979 - DNA, 25 bp, Homo sapien
tcaggggcttgtaaacattgaccac

SEQ ID NO: 5511980 - DNA, 25 bp, Homo sapien
aaagtctctttagctggggagaaga

SEQ ID NO: 5511981 - DNA, 25 bp, Homo sapien
cccctgcattggctgcggcaggggt

SEQ ID NO: 5511982 - DNA, 25 bp, Homo sapien
acttcctcacagggttaaggcctct

SEQ ID NO: 5511983 - DNA, 25 bp, Homo sapien
attgaccactctcagaaggggatgg

SEQ ID NO: 5511984 - DNA, 25 bp, Homo sapien
gggagtatttacaggagcaggtaaa

SEQ ID NO: 5511985 - DNA, 25 bp, Homo sapien
gggggggttacattcagtcacaaca

SEQ ID NO: 5511986 - DNA, 25 bp, Homo sapien
atgggccccctaagtccaaagtctc

SEQ ID NO: 5511987 - DNA, 25 bp, Homo sapien
cttttcagggacgctaacactgtgg

SEQ ID NO: 5511988 - DNA, 25 bp, Homo sapien
ctctccaggctcatgggccccctaa

SEQ ID NO: 5511989 - DNA, 25 bp, Homo sapien
gtcacaacaggagtctcccccacac

SEQ ID NO: 5511990 - DNA, 25 bp, Homo sapien
atcccaactgccaaaagcaaaaggc

SEQ ID NO: 5511991 - DNA, 25 bp, Homo sapien
ttaaatcagtttggggacacatcag

SEQ ID NO: 5511992 - DNA, 25 bp, Homo sapien
tgtacacaagggcacttcagtagaa

SEQ ID NO: 5511993 - DNA, 25 bp, Homo sapien
ttacagacatgggtatatgagaacc

SEQ ID NO: 5511994 - DNA, 25 bp, Homo sapien
gcctagaacactaagtatgaccacc

SEQ ID NO: 5511995 - DNA, 25 bp, Homo sapien
aaacaatggtcaaagcagcaattac

SEQ ID NO: 5511996 - DNA, 25 bp, Homo sapien
tagaatccaacagcaaatgagtcat

SEQ ID NO: 5511997 - DNA, 25 bp, Homo sapien
caaccaatgggagagtcaattgttc

SEQ ID NO: 5511998 - DNA, 25 bp, Homo sapien
cttggaagtggaagaactccatgat

SEQ ID NO: 5511999 - DNA, 25 bp, Homo sapien
gcaaaaggcaggccatcacaagttg

SEQ ID NO: 5512000 - DNA, 25 bp, Homo sapien
tatgagaaccatggaggtgctaaag

SEQ ID NO: 5512001 - DNA, 25 bp, Homo sapien
cttcagagccatggcatggcccagc

SEQ ID NO: 5512002 - DNA, 25 bp, Homo sapien
catgtgggtcctacaagacttgcac

SEQ ID NO: 5512003 - DNA, 25 bp, Homo sapien
tgtttactgacatagggaaatcctc

SEQ ID NO: 5512004 - DNA, 25 bp, Homo sapien
aggtaattcgtcaagtgcaggcaca

SEQ ID NO: 5512005 - DNA, 25 bp, Homo sapien
ggcacacaaactggcctgcaagcac

SEQ ID NO: 5512006 - DNA, 25 bp, Homo sapien
ataagatacctagagaccatgtccc

SEQ ID NO: 5512007 - DNA, 25 bp, Homo sapien
cctgcaagcacgttcaggggcttat

SEQ ID NO: 5512008 - DNA, 25 bp, Homo sapien
tctaagggatgaggaatttatttca

SEQ ID NO: 5512009 - DNA, 25 bp, Homo sapien
tccaaagctaggaaaacatgtgggt

SEQ ID NO: 5512010 - DNA, 25 bp, Homo sapien
agcacctcctaagaacacggggcat

SEQ ID NO: 5512011 - DNA, 25 bp, Homo sapien
gaaagatgatgccttggagctctgt

SEQ ID NO: 5512012 - DNA, 25 bp, Homo sapien
cctgatgtcagggtaaagctaatgg

SEQ ID NO: 5512013 - DNA, 25 bp, Homo sapien
tccagtggtagcaaaagcaatgtga

SEQ ID NO: 5512014 - DNA, 25 bp, Homo sapien
agttcagatgagtagagtatgtgga

SEQ ID NO: 5512015 - DNA, 25 bp, Homo sapien
tcacgtaagaatagacaagagtcca

SEQ ID NO: 5512016 - DNA, 25 bp, Homo sapien
gacaactgtagtacaagatggggca

SEQ ID NO: 5512017 - DNA, 25 bp, Homo sapien
agacagcaaaaggtactccacaaga

SEQ ID NO: 5512018 - DNA, 25 bp, Homo sapien
aagatgagtaagacccagtcctaac

SEQ ID NO: 5512019 - DNA, 25 bp, Homo sapien
ggcaggatggtcaacattcgcattt

SEQ ID NO: 5512020 - DNA, 25 bp, Homo sapien
gggagccctaggaaacaccattatc

SEQ ID NO: 5512021 - DNA, 25 bp, Homo sapien
gtatatccagttagtgaggcagagg

SEQ ID NO: 5512022 - DNA, 25 bp, Homo sapien
gaagtcacggtctgacgcaagtttc

SEQ ID NO: 5512023 - DNA, 25 bp, Homo sapien
ggtttatttgaaagatataagtgat

SEQ ID NO: 5512024 - DNA, 25 bp, Homo sapien
atctctatgagcaaatttggtttat

SEQ ID NO: 5512025 - DNA, 25 bp, Homo sapien
ctatgaaataagaactatccgctat

SEQ ID NO: 5512026 - DNA, 25 bp, Homo sapien
tgataataggtagcagaatgatgag

SEQ ID NO: 5512027 - DNA, 25 bp, Homo sapien
ggggagttctcagcactatcatttt

SEQ ID NO: 5512028 - DNA, 25 bp, Homo sapien
actagagaacatttgtaagttgtca

SEQ ID NO: 5512029 - DNA, 25 bp, Homo sapien
attgtgataataggtagcagaatga

SEQ ID NO: 5512030 - DNA, 25 bp, Homo sapien
aagttgtcaaagaagcctacaggtg

SEQ ID NO: 5512031 - DNA, 25 bp, Homo sapien
cagaatgatgagcatccctatcact

SEQ ID NO: 5512032 - DNA, 25 bp, Homo sapien
gatataagtgattctagatacaaac

SEQ ID NO: 5512033 - DNA, 25 bp, Homo sapien
acagtactatgaaataagaactatc

SEQ ID NO: 5512034 - DNA, 25 bp, Homo sapien
gtgtacaaaagcaacagactgtgat

SEQ ID NO: 5512035 - DNA, 25 bp, Homo sapien
taaaatgtgctaaatggaggactaa

SEQ ID NO: 5512036 - DNA, 25 bp, Homo sapien
ataggccatgaaaataaaacgccat

SEQ ID NO: 5512037 - DNA, 25 bp, Homo sapien
gaaaaaattagcaaaccaaagcatg

SEQ ID NO: 5512038 - DNA, 25 bp, Homo sapien
gacaggagaatgagtcactctgcca

SEQ ID NO: 5512039 - DNA, 25 bp, Homo sapien
cctgccttggatttgtagaggattt

SEQ ID NO: 5512040 - DNA, 25 bp, Homo sapien
agactgtgatagaaaaaggtatgtg

SEQ ID NO: 5512041 - DNA, 25 bp, Homo sapien
ctaaggtacctgcttataggccatg

SEQ ID NO: 5512042 - DNA, 25 bp, Homo sapien
tgtcgaaccccaatatgagaaatgt

SEQ ID NO: 5512043 - DNA, 25 bp, Homo sapien
aagcatgataaatggatgaagcact

SEQ ID NO: 5512044 - DNA, 25 bp, Homo sapien
tggaggactaaagagttaccttata

SEQ ID NO: 5512045 - DNA, 25 bp, Homo sapien
aggtggcaatggctaactaaagata

SEQ ID NO: 5512046 - DNA, 25 bp, Homo sapien
gacgggatctaggagtatttcaagc

SEQ ID NO: 5512047 - DNA, 25 bp, Homo sapien
cattacatatcaggtggcaatggct

SEQ ID NO: 5512048 - DNA, 25 bp, Homo sapien
aaaatcactgacgggatctaggagt

SEQ ID NO: 5512049 - DNA, 25 bp, Homo sapien
gcttataggtagcactttgcagctt

SEQ ID NO: 5512050 - DNA, 25 bp, Homo sapien
aaagataaacttggcatcatgcacc

SEQ ID NO: 5512051 - DNA, 25 bp, Homo sapien
actacaaaggaactgcaagtcaatc

SEQ ID NO: 5512052 - DNA, 25 bp, Homo sapien
aatgcaatgcagaaattaggttttt

SEQ ID NO: 5512053 - DNA, 25 bp, Homo sapien
atgcaccaaaaatgaccacagtaac

SEQ ID NO: 5512054 - DNA, 25 bp, Homo sapien
tatgcatagataaggccaaagttac

SEQ ID NO: 5512055 - DNA, 25 bp, Homo sapien
ctgaattggataaaggcaaaataac

SEQ ID NO: 5512056 - DNA, 25 bp, Homo sapien
aacaacgtagatgtaaaaaactgct

SEQ ID NO: 5512057 - DNA, 25 bp, Homo sapien
tgagtgctaggaatactgcacggtc

SEQ ID NO: 5512058 - DNA, 25 bp, Homo sapien
atggacagcggttgtgaaaattaca

SEQ ID NO: 5512059 - DNA, 25 bp, Homo sapien
cattttagaaagcaacaacgtagat

SEQ ID NO: 5512060 - DNA, 25 bp, Homo sapien
tttcagtttagtaggtaacatcctc

SEQ ID NO: 5512061 - DNA, 25 bp, Homo sapien
tacgaattttgcaaagttaggctta

SEQ ID NO: 5512062 - DNA, 25 bp, Homo sapien
tatgtgtaagtagatatggaatgaa

SEQ ID NO: 5512063 - DNA, 25 bp, Homo sapien
gttgctggtgtatgtgtaagtagat

SEQ ID NO: 5512064 - DNA, 25 bp, Homo sapien
tcgatctgctaaccccacactggcc

SEQ ID NO: 5512065 - DNA, 25 bp, Homo sapien
ggcaagttgcagtcataaaagatgg

SEQ ID NO: 5512066 - DNA, 25 bp, Homo sapien
aaatagggtgattacattgagtgct

SEQ ID NO: 5512067 - DNA, 25 bp, Homo sapien
gagcctacagagattccaaagttgc

SEQ ID NO: 5512068 - DNA, 25 bp, Homo sapien
agagactggatagagattagcaatt

SEQ ID NO: 5512069 - DNA, 25 bp, Homo sapien
aggtagaagtgtgaagagcactttc

SEQ ID NO: 5512070 - DNA, 25 bp, Homo sapien
gtgtttgagaaagtggactcaggca

SEQ ID NO: 5512071 - DNA, 25 bp, Homo sapien
aaagttgcatagtgaggtttgtgtt

SEQ ID NO: 5512072 - DNA, 25 bp, Homo sapien
gagcggaatctccatgtgccaagtc

SEQ ID NO: 5512073 - DNA, 25 bp, Homo sapien
acatgctctaccaggtatgggggct

SEQ ID NO: 5512074 - DNA, 25 bp, Homo sapien
ccacgcaaaagagggattaatagaa

SEQ ID NO: 5512075 - DNA, 25 bp, Homo sapien
tttcagtggtagttacaggacaaag

SEQ ID NO: 5512076 - DNA, 25 bp, Homo sapien
taatctggggttagtcaagcaggta

SEQ ID NO: 5512077 - DNA, 25 bp, Homo sapien
atgggggcttctctaagacacaaga

SEQ ID NO: 5512078 - DNA, 25 bp, Homo sapien
acaatgaaaatgccgaggccttggg

SEQ ID NO: 5512079 - DNA, 25 bp, Homo sapien
taaaatgtgcttgaatgaagggagg

SEQ ID NO: 5512080 - DNA, 25 bp, Homo sapien
ctagtatagaagagatgatgaacat

SEQ ID NO: 5512081 - DNA, 25 bp, Homo sapien
tccctgtaggcccgtaaaatgtgct

SEQ ID NO: 5512082 - DNA, 25 bp, Homo sapien
cagcaacagtgtgaattaggagtgt

SEQ ID NO: 5512083 - DNA, 25 bp, Homo sapien
aatgttgtacaaccggtaaggcggc

SEQ ID NO: 5512084 - DNA, 25 bp, Homo sapien
taagcaaatgtaagactgcagctct

SEQ ID NO: 5512085 - DNA, 25 bp, Homo sapien
gatgtcaggaagtaagcaaatgtaa

SEQ ID NO: 5512086 - DNA, 25 bp, Homo sapien
tcaaataatatagaggtggagatgg

SEQ ID NO: 5512087 - DNA, 25 bp, Homo sapien
cccacaggtagagggttacatgttc

SEQ ID NO: 5512088 - DNA, 25 bp, Homo sapien
cacagcaaatgtgcgcccacaggta

SEQ ID NO: 5512089 - DNA, 25 bp, Homo sapien
tatctcaggagataaacagttctgg

SEQ ID NO: 5512090 - DNA, 25 bp, Homo sapien
tcccctgaaatggtgccagagggag

SEQ ID NO: 5512091 - DNA, 25 bp, Homo sapien
ttctgcctttacagggatggccttt

SEQ ID NO: 5512092 - DNA, 25 bp, Homo sapien
ctgactccttgaaccatggtctagc

SEQ ID NO: 5512093 - DNA, 25 bp, Homo sapien
tgtaaatcactggtcagctctagtc

SEQ ID NO: 5512094 - DNA, 25 bp, Homo sapien
atggtctagcaaagccctcagatcc

SEQ ID NO: 5512095 - DNA, 25 bp, Homo sapien
tttgctgagtggccagatctaagag

SEQ ID NO: 5512096 - DNA, 25 bp, Homo sapien
cctctggtcccagatgtgtctcctg

SEQ ID NO: 5512097 - DNA, 25 bp, Homo sapien
tggctgcagctctctggagtaatcc

SEQ ID NO: 5512098 - DNA, 25 bp, Homo sapien
ggagcaaccaaccagaaaacaccta

SEQ ID NO: 5512099 - DNA, 25 bp, Homo sapien
ctcagatcctgcatgagagcgcttc

SEQ ID NO: 5512100 - DNA, 25 bp, Homo sapien
aggatcattaccaatatatagcacc

SEQ ID NO: 5512101 - DNA, 25 bp, Homo sapien
caaaggaagaaacccagtttaatca

SEQ ID NO: 5512102 - DNA, 25 bp, Homo sapien
ggagagggtattcacatcacgcaaa

SEQ ID NO: 5512103 - DNA, 25 bp, Homo sapien
gacctctgtcctcaaaagatttgcc

SEQ ID NO: 5512104 - DNA, 25 bp, Homo sapien
actgaaaacccgtgttagtatcgta

SEQ ID NO: 5512105 - DNA, 25 bp, Homo sapien
tccaaaggaatttttcacgccatta

SEQ ID NO: 5512106 - DNA, 25 bp, Homo sapien
atgatcacgagttaccaagaaaata

SEQ ID NO: 5512107 - DNA, 25 bp, Homo sapien
acatccatgctgaaaatttgcaatt

SEQ ID NO: 5512108 - DNA, 25 bp, Homo sapien
tgcccagggacagatgcttttcttt

SEQ ID NO: 5512109 - DNA, 25 bp, Homo sapien
aaaagatttgcccagggacagatgc

SEQ ID NO: 5512110 - DNA, 25 bp, Homo sapien
gttagtatcgtagaataagaagttg

SEQ ID NO: 5512111 - DNA, 25 bp, Homo sapien
cagcaaatactgagtgtccactgca

SEQ ID NO: 5512112 - DNA, 25 bp, Homo sapien
gaaatctcaaacgagtaagttgtcc

SEQ ID NO: 5512113 - DNA, 25 bp, Homo sapien
aaaaatcagaagggatccataggaa

SEQ ID NO: 5512114 - DNA, 25 bp, Homo sapien
atgacattaaaagtggcatgagccc

SEQ ID NO: 5512115 - DNA, 25 bp, Homo sapien
gaagggatccataggaaggaattta

SEQ ID NO: 5512116 - DNA, 25 bp, Homo sapien
actcatatgaaagagcaagttgctc

SEQ ID NO: 5512117 - DNA, 25 bp, Homo sapien
tgtccttagggatagaaggtgctaa

SEQ ID NO: 5512118 - DNA, 25 bp, Homo sapien
agggaaaggaatttgatatttaggc

SEQ ID NO: 5512119 - DNA, 25 bp, Homo sapien
gagtgtccactgcatgcaaggtacc

SEQ ID NO: 5512120 - DNA, 25 bp, Homo sapien
tgcaaggtaccctgccagaaatctc

SEQ ID NO: 5512121 - DNA, 25 bp, Homo sapien
atgagccctagaatgatatgtgtat

SEQ ID NO: 5512122 - DNA, 25 bp, Homo sapien
tagaaaggcaaaataagcatggcag

SEQ ID NO: 5512123 - DNA, 25 bp, Homo sapien
actatgacagatgcacgtggaaaat

SEQ ID NO: 5512124 - DNA, 25 bp, Homo sapien
ataggaatagaaagcatgctcccaa

SEQ ID NO: 5512125 - DNA, 25 bp, Homo sapien
gtgtgtacataacagtggcaagagc

SEQ ID NO: 5512126 - DNA, 25 bp, Homo sapien
atcacacagctatcaggagtggtgc

SEQ ID NO: 5512127 - DNA, 25 bp, Homo sapien
aaggcttactcaagaaaaaggaggc

SEQ ID NO: 5512128 - DNA, 25 bp, Homo sapien
ggcctgctaagcacagatgctgagc

SEQ ID NO: 5512129 - DNA, 25 bp, Homo sapien
tccacctgacagacgatgaaaacga

SEQ ID NO: 5512130 - DNA, 25 bp, Homo sapien
ggaaaatgaggcgtcagtgaattaa

SEQ ID NO: 5512131 - DNA, 25 bp, Homo sapien
tctctagaggagtcagaaagttcta

SEQ ID NO: 5512132 - DNA, 25 bp, Homo sapien
gagtggtgccaagatatgaacccac

SEQ ID NO: 5512133 - DNA, 25 bp, Homo sapien
atttatatcgaatgtaacttagctt

SEQ ID NO: 5512134 - DNA, 25 bp, Homo sapien
aagctaagttacattcgatataaat

SEQ ID NO: 5512135 - DNA, 25 bp, Homo sapien
tccgccactatcctcggaccttggg

SEQ ID NO: 5512136 - DNA, 25 bp, Homo sapien
cccaaggtccgaggatagtggcgga

SEQ ID NO: 5512137 - DNA, 25 bp, Homo sapien
gaccttccgccactatcctcggacc

SEQ ID NO: 5512138 - DNA, 25 bp, Homo sapien
ggtccgaggatagtggcggaaggtc

SEQ ID NO: 5512139 - DNA, 25 bp, Homo sapien
agtgagtagacttatgccctggtgc

SEQ ID NO: 5512140 - DNA, 25 bp, Homo sapien
ttggctcttcacaggatgcaaaaac

SEQ ID NO: 5512141 - DNA, 25 bp, Homo sapien
aggtcccagcacagcaaaacattca

SEQ ID NO: 5512142 - DNA, 25 bp, Homo sapien
caaagaatgcaagatgaatgatgtg

SEQ ID NO: 5512143 - DNA, 25 bp, Homo sapien
cagcttggccttgtctggcatgcac

SEQ ID NO: 5512144 - DNA, 25 bp, Homo sapien
aaaacattgggttcacacacaggcc

SEQ ID NO: 5512145 - DNA, 25 bp, Homo sapien
caggcctggacaaagcttcccactt

SEQ ID NO: 5512146 - DNA, 25 bp, Homo sapien
aacattcagggagttagagtgttgc

SEQ ID NO: 5512147 - DNA, 25 bp, Homo sapien
gacaaacagatataagtgagtagac

SEQ ID NO: 5512148 - DNA, 25 bp, Homo sapien
tgatgtgcaataccatggctatggc

SEQ ID NO: 5512149 - DNA, 25 bp, Homo sapien
ttgacctggatggttagtgtcccaa

SEQ ID NO: 5512150 - DNA, 25 bp, Homo sapien
gttagtgaccaccacgaaagaggaa

SEQ ID NO: 5512151 - DNA, 25 bp, Homo sapien
ttaaaaacacccacagatctgtatt

SEQ ID NO: 5512152 - DNA, 25 bp, Homo sapien
gataggtaaacaagatttaggcact

SEQ ID NO: 5512153 - DNA, 25 bp, Homo sapien
tcaaaggctatgcaaatatagaaca

SEQ ID NO: 5512154 - DNA, 25 bp, Homo sapien
tctgcatcaagtaaggttagtgacc

SEQ ID NO: 5512155 - DNA, 25 bp, Homo sapien
tgcaccaactctcactagcccaggc

SEQ ID NO: 5512156 - DNA, 25 bp, Homo sapien
aggaatccccagacctcctaggcac

SEQ ID NO: 5512157 - DNA, 25 bp, Homo sapien
ttcctctttagtagatggtcatctc

SEQ ID NO: 5512158 - DNA, 25 bp, Homo sapien
cctcctaggcactaagaaatatttc

SEQ ID NO: 5512159 - DNA, 25 bp, Homo sapien
cacacacaagaatttgcaccaactc

SEQ ID NO: 5512160 - DNA, 25 bp, Homo sapien
aataaaacaccagataggttgagtt

SEQ ID NO: 5512161 - DNA, 25 bp, Homo sapien
atcgtgatacagagaacacccgaag

SEQ ID NO: 5512162 - DNA, 25 bp, Homo sapien
caactgataaagatcccaaggaaga

SEQ ID NO: 5512163 - DNA, 25 bp, Homo sapien
gaagtccccgtctccagttcagggc

SEQ ID NO: 5512164 - DNA, 25 bp, Homo sapien
tcagtgaagaggagataccattcaa

SEQ ID NO: 5512165 - DNA, 25 bp, Homo sapien
gaggaagaagacgattctgccctcc

SEQ ID NO: 5512166 - DNA, 25 bp, Homo sapien
aggaagaagagatgttaatcagtga

SEQ ID NO: 5512167 - DNA, 25 bp, Homo sapien
ggcaagaagagtccgcgactcctat

SEQ ID NO: 5512168 - DNA, 25 bp, Homo sapien
gtccaagaccggttcattgcagctc

SEQ ID NO: 5512169 - DNA, 25 bp, Homo sapien
gagatgagacctacaaaccccactt

SEQ ID NO: 5512170 - DNA, 25 bp, Homo sapien
gaagagcatcagtctccaggtggca

SEQ ID NO: 5512171 - DNA, 25 bp, Homo sapien
aagatgatccaagagatgagaccta

SEQ ID NO: 5512172 - DNA, 25 bp, Homo sapien
accctggcttctataacaagtgagt

SEQ ID NO: 5512173 - DNA, 25 bp, Homo sapien
ctgatatttgagaatacagtggtga

SEQ ID NO: 5512174 - DNA, 25 bp, Homo sapien
aaacagtgtagtttggtacaataac

SEQ ID NO: 5512175 - DNA, 25 bp, Homo sapien
tcccacacccagatactaagacata

SEQ ID NO: 5512176 - DNA, 25 bp, Homo sapien
ttaaagacagtattgcagaatggct

SEQ ID NO: 5512177 - DNA, 25 bp, Homo sapien
acagtggtgaataacacaaactcca

SEQ ID NO: 5512178 - DNA, 25 bp, Homo sapien
gcacttagtaggccagatactcttc

SEQ ID NO: 5512179 - DNA, 25 bp, Homo sapien
agagagagcctatttcaggtcttcc

SEQ ID NO: 5512180 - DNA, 25 bp, Homo sapien
acaagtgagtatacattaaagacag

SEQ ID NO: 5512181 - DNA, 25 bp, Homo sapien
tcttcctagctcatccacacacatc

SEQ ID NO: 5512182 - DNA, 25 bp, Homo sapien
ttgcagaatggcttcaggattaatt

SEQ ID NO: 5512183 - DNA, 25 bp, Homo sapien
ttgtaaggcttctgaggattaaggg

SEQ ID NO: 5512184 - DNA, 25 bp, Homo sapien
atgggagagtaaatgaatcacctct

SEQ ID NO: 5512185 - DNA, 25 bp, Homo sapien
agacagcccaaagtgcaagttctac

SEQ ID NO: 5512186 - DNA, 25 bp, Homo sapien
agaatggcacaggaaattgttatga

SEQ ID NO: 5512187 - DNA, 25 bp, Homo sapien
ggtactgactggtctaaagccactc

SEQ ID NO: 5512188 - DNA, 25 bp, Homo sapien
tcataagatggtccctggaaggaag

SEQ ID NO: 5512189 - DNA, 25 bp, Homo sapien
caaggatagatggagccactcctat

SEQ ID NO: 5512190 - DNA, 25 bp, Homo sapien
ctccccggacactgctaactctagc

SEQ ID NO: 5512191 - DNA, 25 bp, Homo sapien
gctcatcgctcaggacttgacaatc

SEQ ID NO: 5512192 - DNA, 25 bp, Homo sapien
gcaccatgcacaaagagcaaggtac

SEQ ID NO: 5512193 - DNA, 25 bp, Homo sapien
cccaaatactagaacagacagccca

SEQ ID NO: 5512194 - DNA, 25 bp, Homo sapien
gcaaaggggtgttaacagtatgtat

SEQ ID NO: 5512195 - DNA, 25 bp, Homo sapien
aaagagcagagggtttgtaattcct

SEQ ID NO: 5512196 - DNA, 25 bp, Homo sapien
accttcctgaagtgtctgaggggca

SEQ ID NO: 5512197 - DNA, 25 bp, Homo sapien
gttctaaatatggtggcctggaggt

SEQ ID NO: 5512198 - DNA, 25 bp, Homo sapien
tactgagtatcagacgacgcaagtc

SEQ ID NO: 5512199 - DNA, 25 bp, Homo sapien
gactgagaagccaacagactgtttt

SEQ ID NO: 5512200 - DNA, 25 bp, Homo sapien
gtaaatcaatggcgagttaaggctt

SEQ ID NO: 5512201 - DNA, 25 bp, Homo sapien
cgggtgcaggtacagtttattcttc

SEQ ID NO: 5512202 - DNA, 25 bp, Homo sapien
gcctggaggtcccatagaaaaagca

SEQ ID NO: 5512203 - DNA, 25 bp, Homo sapien
ggagtaacatgcggacaaaaagcta

SEQ ID NO: 5512204 - DNA, 25 bp, Homo sapien
gcctccaagatgcagactgagaagc

SEQ ID NO: 5512205 - DNA, 25 bp, Homo sapien
cagaatttgtgcaagaagctccatg

SEQ ID NO: 5512206 - DNA, 25 bp, Homo sapien
gactaaacagattcaagaggctcac

SEQ ID NO: 5512207 - DNA, 25 bp, Homo sapien
agaggctcactgatgtgcacttggc

SEQ ID NO: 5512208 - DNA, 25 bp, Homo sapien
ttctggcccttcaggaaggctggca

SEQ ID NO: 5512209 - DNA, 25 bp, Homo sapien
gagggcttcaggccaccccacttct

SEQ ID NO: 5512210 - DNA, 25 bp, Homo sapien
caggctgatatgaggccaacccatg

SEQ ID NO: 5512211 - DNA, 25 bp, Homo sapien
ggggcaatacctcaagcagagagag

SEQ ID NO: 5512212 - DNA, 25 bp, Homo sapien
actcaattccacacaggggcaatac

SEQ ID NO: 5512213 - DNA, 25 bp, Homo sapien
gggaacctccagggctactggatca

SEQ ID NO: 5512214 - DNA, 25 bp, Homo sapien
agaggagatccaggctaaattttct

SEQ ID NO: 5512215 - DNA, 25 bp, Homo sapien
tccagtcctagcaggtaaaagagga

SEQ ID NO: 5512216 - DNA, 25 bp, Homo sapien
atggctttcctaagggacagtcccc

SEQ ID NO: 5512217 - DNA, 25 bp, Homo sapien
gcaattgcaaagtattgggaatcac

SEQ ID NO: 5512218 - DNA, 25 bp, Homo sapien
tgagcagtgaaactatagatacgta

SEQ ID NO: 5512219 - DNA, 25 bp, Homo sapien
tagatgtcagtatgaaacaagcaaa

SEQ ID NO: 5512220 - DNA, 25 bp, Homo sapien
cctagacaggaagggtttcagttaa

SEQ ID NO: 5512221 - DNA, 25 bp, Homo sapien
ttagcaattaggagtaaagacaaac

SEQ ID NO: 5512222 - DNA, 25 bp, Homo sapien
aaagctgaacattgcaaactgacct

SEQ ID NO: 5512223 - DNA, 25 bp, Homo sapien
tagatacgtagagtcattcaggttt

SEQ ID NO: 5512224 - DNA, 25 bp, Homo sapien
gtagcagctggtatatgagcagtga

SEQ ID NO: 5512225 - DNA, 25 bp, Homo sapien
aagaagtggacagctaccctagatt

SEQ ID NO: 5512226 - DNA, 25 bp, Homo sapien
ttaataagttatggtgcagaggagt

SEQ ID NO: 5512227 - DNA, 25 bp, Homo sapien
atttgaggtatgccattttgaagac

SEQ ID NO: 5512228 - DNA, 25 bp, Homo sapien
aaattaatttggttgctgttggttc

SEQ ID NO: 5512229 - DNA, 25 bp, Homo sapien
gttggttctgaacaaataatgagtt

SEQ ID NO: 5512230 - DNA, 25 bp, Homo sapien
ggtatgccattttgaagactgagac

SEQ ID NO: 5512231 - DNA, 25 bp, Homo sapien
acgttggagttttatcctagaggat

SEQ ID NO: 5512232 - DNA, 25 bp, Homo sapien
ttatcctagaggataaaggaaatct

SEQ ID NO: 5512233 - DNA, 25 bp, Homo sapien
tgagttcttttatttgaggtatgcc

SEQ ID NO: 5512234 - DNA, 25 bp, Homo sapien
tgaagactgagacgttggagtttta

SEQ ID NO: 5512235 - DNA, 25 bp, Homo sapien
taatttggttgctgttggttctgaa

SEQ ID NO: 5512236 - DNA, 25 bp, Homo sapien
cattttgaagactgagacgttggag

SEQ ID NO: 5512237 - DNA, 25 bp, Homo sapien
ccggtgacttaagagattaaaatta

SEQ ID NO: 5512238 - DNA, 25 bp, Homo sapien
gagaaacagaaatgccaacaacagt

SEQ ID NO: 5512239 - DNA, 25 bp, Homo sapien
aatgtcaattgttaccaagagatct

SEQ ID NO: 5512240 - DNA, 25 bp, Homo sapien
ctaggtgaggcaatatgtaaatttc

SEQ ID NO: 5512241 - DNA, 25 bp, Homo sapien
acaactacttgaaagagaaacagaa

SEQ ID NO: 5512242 - DNA, 25 bp, Homo sapien
cttattagaagctgacaaagtatgc

SEQ ID NO: 5512243 - DNA, 25 bp, Homo sapien
taaagtgaatgctttgtgcagtttt

SEQ ID NO: 5512244 - DNA, 25 bp, Homo sapien
tacttaggtagaaacactaaagcat

SEQ ID NO: 5512245 - DNA, 25 bp, Homo sapien
ttctgttgcaaaagatcagtggaca

SEQ ID NO: 5512246 - DNA, 25 bp, Homo sapien
aaagatcagtggacaaaaatcctcc

SEQ ID NO: 5512247 - DNA, 25 bp, Homo sapien
cagacaaaacatctctaggtgaggc

SEQ ID NO: 5512248 - DNA, 25 bp, Homo sapien
gactcaagagtaagacattatgcat

SEQ ID NO: 5512249 - DNA, 25 bp, Homo sapien
gcaggggacagggctcccccgcgtc

SEQ ID NO: 5512250 - DNA, 25 bp, Homo sapien
gacgcgggggagccctgtcccctgc

SEQ ID NO: 5512251 - DNA, 25 bp, Homo sapien
catctgcttcgtatgtggcgttttc

SEQ ID NO: 5512252 - DNA, 25 bp, Homo sapien
aaaatgtttgaagcaacaagattgc

SEQ ID NO: 5512253 - DNA, 25 bp, Homo sapien
tccgggcggcataaagctttttgca

SEQ ID NO: 5512254 - DNA, 25 bp, Homo sapien
catatttaccctgtgtgctgctctt

SEQ ID NO: 5512255 - DNA, 25 bp, Homo sapien
caacaccagattgaaatggtttgcc

SEQ ID NO: 5512256 - DNA, 25 bp, Homo sapien
ttggaactggattgctgtggcttcc

SEQ ID NO: 5512257 - DNA, 25 bp, Homo sapien
ataccctcggcaatcttgctgcgtt

SEQ ID NO: 5512258 - DNA, 25 bp, Homo sapien
cctgtgaagcaactgaagaaaatgt

SEQ ID NO: 5512259 - DNA, 25 bp, Homo sapien
ttttaatgggacctgtgaagcaact

SEQ ID NO: 5512260 - DNA, 25 bp, Homo sapien
cccatatgcaagggatgcagttatt

SEQ ID NO: 5512261 - DNA, 25 bp, Homo sapien
cgcaggtcctggatgcctcatccct

SEQ ID NO: 5512262 - DNA, 25 bp, Homo sapien
gaagaaatgattaaatttgttcctc

SEQ ID NO: 5512263 - DNA, 25 bp, Homo sapien
tctaggaaaccaagtttagctgaaa

SEQ ID NO: 5512264 - DNA, 25 bp, Homo sapien
taacagtctattctaggaaaccaag

SEQ ID NO: 5512265 - DNA, 25 bp, Homo sapien
ctgaaaacttcagggatgaagatca

SEQ ID NO: 5512266 - DNA, 25 bp, Homo sapien
gatgaagatcatctgttgtagcagc

SEQ ID NO: 5512267 - DNA, 25 bp, Homo sapien
cctcccagaagtatatacacagttc

SEQ ID NO: 5512268 - DNA, 25 bp, Homo sapien
tcacaccttgatcaaacctgaatta

SEQ ID NO: 5512269 - DNA, 25 bp, Homo sapien
gaaccaggagttgcactatactgat

SEQ ID NO: 5512270 - DNA, 25 bp, Homo sapien
gattagtgcttaacagaagaaatga

SEQ ID NO: 5512271 - DNA, 25 bp, Homo sapien
caaacctgaattataaacttagcac

SEQ ID NO: 5512272 - DNA, 25 bp, Homo sapien
ctgttgtagcagcattcaaatatat

SEQ ID NO: 5512273 - DNA, 25 bp, Homo sapien
gagagctaatggaacctggtgctaa

SEQ ID NO: 5512274 - DNA, 25 bp, Homo sapien
tccctgagcagagtctgacaggcat

SEQ ID NO: 5512275 - DNA, 25 bp, Homo sapien
aggagggaatcagacccttcaggtc

SEQ ID NO: 5512276 - DNA, 25 bp, Homo sapien
ggatgaaacagagcctggtatgaag

SEQ ID NO: 5512277 - DNA, 25 bp, Homo sapien
gtgctaagtcaccccgtaggcaact

SEQ ID NO: 5512278 - DNA, 25 bp, Homo sapien
agaagtgcacatggtaggttacctg

SEQ ID NO: 5512279 - DNA, 25 bp, Homo sapien
tgtgtcggctccagagattggctaa

SEQ ID NO: 5512280 - DNA, 25 bp, Homo sapien
ctcacacactgcagcactccagggt

SEQ ID NO: 5512281 - DNA, 25 bp, Homo sapien
tctgtactctcagggtcacgggaag

SEQ ID NO: 5512282 - DNA, 25 bp, Homo sapien
ctcaagcgccaaaagtactgggtgg

SEQ ID NO: 5512283 - DNA, 25 bp, Homo sapien
gattggctaagcatttggagcaggc

SEQ ID NO: 5512284 - DNA, 25 bp, Homo sapien
tgtagaaaaagcaggtctggactta

SEQ ID NO: 5512285 - DNA, 25 bp, Homo sapien
tgcatggcgattaaaatagaaaacc

SEQ ID NO: 5512286 - DNA, 25 bp, Homo sapien
gtgggacactagaaaagatatactg

SEQ ID NO: 5512287 - DNA, 25 bp, Homo sapien
agctttgggaaggtttcacgttgag

SEQ ID NO: 5512288 - DNA, 25 bp, Homo sapien
agcaacaagactccgtagaggatgc

SEQ ID NO: 5512289 - DNA, 25 bp, Homo sapien
gcaggtctggacttagcaaagaaac

SEQ ID NO: 5512290 - DNA, 25 bp, Homo sapien
acagccataacagagagtgatgtgg

SEQ ID NO: 5512291 - DNA, 25 bp, Homo sapien
ggatgccaccctgggagaattgcaa

SEQ ID NO: 5512292 - DNA, 25 bp, Homo sapien
tacatcagtggtcaacaatggagca

SEQ ID NO: 5512293 - DNA, 25 bp, Homo sapien
aggctgaagcacaactggtaatagc

SEQ ID NO: 5512294 - DNA, 25 bp, Homo sapien
atatagtttggagaaggcatgaaat

SEQ ID NO: 5512295 - DNA, 25 bp, Homo sapien
agctgagtagcttaaaggaaacacc

SEQ ID NO: 5512296 - DNA, 25 bp, Homo sapien
gtgatatactggttgaaaaagaact

SEQ ID NO: 5512297 - DNA, 25 bp, Homo sapien
agcaagaaacttgaactgataaagc

SEQ ID NO: 5512298 - DNA, 25 bp, Homo sapien
ctaacaaaaggttgaatgtgtagcc

SEQ ID NO: 5512299 - DNA, 25 bp, Homo sapien
acatggtagaaaagtacaaaactat

SEQ ID NO: 5512300 - DNA, 25 bp, Homo sapien
tcaggcagcagagaatccaataaat

SEQ ID NO: 5512301 - DNA, 25 bp, Homo sapien
taaaattgcatcagaaaaaagtatt

SEQ ID NO: 5512302 - DNA, 25 bp, Homo sapien
aaagaactgaagtaggagtttcctc

SEQ ID NO: 5512303 - DNA, 25 bp, Homo sapien
agtattatgaaaagcaagaaacttg

SEQ ID NO: 5512304 - DNA, 25 bp, Homo sapien
gtcagagttataatgccttttggtc

SEQ ID NO: 5512305 - DNA, 25 bp, Homo sapien
acccgagggatcatgtatgtacaga

SEQ ID NO: 5512306 - DNA, 25 bp, Homo sapien
attgagcaatatgtcatggatgtct

SEQ ID NO: 5512307 - DNA, 25 bp, Homo sapien
ctgtggttgaagggcatcaaacagt

SEQ ID NO: 5512308 - DNA, 25 bp, Homo sapien
tctgtcctctgttgatgaatttcca

SEQ ID NO: 5512309 - DNA, 25 bp, Homo sapien
tcctggtcagtaaatacaggtttgt

SEQ ID NO: 5512310 - DNA, 25 bp, Homo sapien
ggatggtggatccgtttggtttgat

SEQ ID NO: 5512311 - DNA, 25 bp, Homo sapien
ataagaggaactgttgaaatcagaa

SEQ ID NO: 5512312 - DNA, 25 bp, Homo sapien
cattggcaatgtttcgatagacagc

SEQ ID NO: 5512313 - DNA, 25 bp, Homo sapien
gagtgaagggaacacatctgtacat

SEQ ID NO: 5512314 - DNA, 25 bp, Homo sapien
ttaaatgagtctctagcagttcatc

SEQ ID NO: 5512315 - DNA, 25 bp, Homo sapien
tcccctacatcctcaaggtggggac

SEQ ID NO: 5512316 - DNA, 25 bp, Homo sapien
tcgatagacagcataatcccctaca

SEQ ID NO: 5512317 - DNA, 25 bp, Homo sapien
gaaagtgcacttaaagctgtttgcc

SEQ ID NO: 5512318 - DNA, 25 bp, Homo sapien
cagggacagaattcagtcaaaaaga

SEQ ID NO: 5512319 - DNA, 25 bp, Homo sapien
gtttgccagcaattaaaaagtagct

SEQ ID NO: 5512320 - DNA, 25 bp, Homo sapien
tcagtcaaaaagaataagcagtgta

SEQ ID NO: 5512321 - DNA, 25 bp, Homo sapien
cttaattagatatggcaggggaaaa

SEQ ID NO: 5512322 - DNA, 25 bp, Homo sapien
tggaagtgtaatcaaagaaagtgca

SEQ ID NO: 5512323 - DNA, 25 bp, Homo sapien
tagtggtacataaaaggcttcagaa

SEQ ID NO: 5512324 - DNA, 25 bp, Homo sapien
cccagctatatttgaggactgaagt

SEQ ID NO: 5512325 - DNA, 25 bp, Homo sapien
agggggagactgagtctatctcata

SEQ ID NO: 5512326 - DNA, 25 bp, Homo sapien
gaataagcagtgtaaaggcaataaa

SEQ ID NO: 5512327 - DNA, 25 bp, Homo sapien
ttaacaaaaaatggaagtgtaatca

SEQ ID NO: 5512328 - DNA, 25 bp, Homo sapien
tagctgcatggctgtcccaatgagc

SEQ ID NO: 5512329 - DNA, 25 bp, Homo sapien
aagttaagacttcccaaaggctgaa

SEQ ID NO: 5512330 - DNA, 25 bp, Homo sapien
caggggcagctctcatcacaggctg

SEQ ID NO: 5512331 - DNA, 25 bp, Homo sapien
gccatgagaatcgtgtttcagagtc

SEQ ID NO: 5512332 - DNA, 25 bp, Homo sapien
ctaatggttagaaaatcaatgtcaa

SEQ ID NO: 5512333 - DNA, 25 bp, Homo sapien
gatgaaatttggacagctcagttcc

SEQ ID NO: 5512334 - DNA, 25 bp, Homo sapien
ttgttccaagtaaatgctagatcat

SEQ ID NO: 5512335 - DNA, 25 bp, Homo sapien
gacagggcttcagtcggctctgata

SEQ ID NO: 5512336 - DNA, 25 bp, Homo sapien
tatttcccaggaggcaagttaagca

SEQ ID NO: 5512337 - DNA, 25 bp, Homo sapien
aagagtcaggccagagtcactctaa

SEQ ID NO: 5512338 - DNA, 25 bp, Homo sapien
ttaagcatcaggtgcctgaggggta

SEQ ID NO: 5512339 - DNA, 25 bp, Homo sapien
ggcctgcctcaagagggacttccag

SEQ ID NO: 5512340 - DNA, 25 bp, Homo sapien
gtcacacgagcatccacccgtcatc

SEQ ID NO: 5512341 - DNA, 25 bp, Homo sapien
cagaacgttctggatgaaggaaatg

SEQ ID NO: 5512342 - DNA, 25 bp, Homo sapien
cactacagtggccgtggcattgagt

SEQ ID NO: 5512343 - DNA, 25 bp, Homo sapien
ctcggaacacagtggctgtatgtgc

SEQ ID NO: 5512344 - DNA, 25 bp, Homo sapien
aaacataaaaggtcagcaaagtcac

SEQ ID NO: 5512345 - DNA, 25 bp, Homo sapien
aagagatcttgctggctagacagtc

SEQ ID NO: 5512346 - DNA, 25 bp, Homo sapien
cctcagggtgaaggttcccattgca

SEQ ID NO: 5512347 - DNA, 25 bp, Homo sapien
gagcagtgatgtccacagaacgttc

SEQ ID NO: 5512348 - DNA, 25 bp, Homo sapien
gcagccaacaacacagggtgtcctg

SEQ ID NO: 5512349 - DNA, 25 bp, Homo sapien
gtctactgttgggtagcatgggaag

SEQ ID NO: 5512350 - DNA, 25 bp, Homo sapien
ctgggaatcccattagaacacactg

SEQ ID NO: 5512351 - DNA, 25 bp, Homo sapien
ttgggaatgaagacccatgggaaaa

SEQ ID NO: 5512352 - DNA, 25 bp, Homo sapien
gcagcccagcccataactcctccct

SEQ ID NO: 5512353 - DNA, 25 bp, Homo sapien
tccaaactaagcagagtgaactttc

SEQ ID NO: 5512354 - DNA, 25 bp, Homo sapien
ctcttttgggtagatggaccatcac

SEQ ID NO: 5512355 - DNA, 25 bp, Homo sapien
agagtatcgttcactaaagcagatc

SEQ ID NO: 5512356 - DNA, 25 bp, Homo sapien
ataaaaagcaaaggttccagaacaa

SEQ ID NO: 5512357 - DNA, 25 bp, Homo sapien
ccatcccaagtccaccctcccacca

SEQ ID NO: 5512358 - DNA, 25 bp, Homo sapien
gatggaccatcacaaaaggagctct

SEQ ID NO: 5512359 - DNA, 25 bp, Homo sapien
cacacaccgtaggtgtaggaactgc

SEQ ID NO: 5512360 - DNA, 25 bp, Homo sapien
acaccagcatcaataggacagaaga

SEQ ID NO: 5512361 - DNA, 25 bp, Homo sapien
cattggctgttctgggagtattatc

SEQ ID NO: 5512362 - DNA, 25 bp, Homo sapien
tatagggcatttaccattggctgtt

SEQ ID NO: 5512363 - DNA, 25 bp, Homo sapien
taaaatggtgcattaccacagcatc

SEQ ID NO: 5512364 - DNA, 25 bp, Homo sapien
ttccctgaagagaaatagcagtatc

SEQ ID NO: 5512365 - DNA, 25 bp, Homo sapien
actacaggtttcacttagaagcttt

SEQ ID NO: 5512366 - DNA, 25 bp, Homo sapien
aagtaagactcaagtatagggcatt

SEQ ID NO: 5512367 - DNA, 25 bp, Homo sapien
agaacaatttagggtctattaagac

SEQ ID NO: 5512368 - DNA, 25 bp, Homo sapien
atgttggcataggatgattacaatt

SEQ ID NO: 5512369 - DNA, 25 bp, Homo sapien
ttagaagctttgctgcccggcagtt

SEQ ID NO: 5512370 - DNA, 25 bp, Homo sapien
caaatgacttcagagactgccactc

SEQ ID NO: 5512371 - DNA, 25 bp, Homo sapien
caattatgtgagcatgcaacattgc

SEQ ID NO: 5512372 - DNA, 25 bp, Homo sapien
gcagtcttacacaaatagctccctc

SEQ ID NO: 5512373 - DNA, 25 bp, Homo sapien
aacacaggtaacatttggtccccac

SEQ ID NO: 5512374 - DNA, 25 bp, Homo sapien
aaatagcaatcaacagcaaaaacac

SEQ ID NO: 5512375 - DNA, 25 bp, Homo sapien
tttaagaagctgtgtgaagaaaaca

SEQ ID NO: 5512376 - DNA, 25 bp, Homo sapien
actgaggcagtcaatacactaaatt

SEQ ID NO: 5512377 - DNA, 25 bp, Homo sapien
aaaagatggatgtcaaattaatgga

SEQ ID NO: 5512378 - DNA, 25 bp, Homo sapien
aaggtttccaatagaggtcacactc

SEQ ID NO: 5512379 - DNA, 25 bp, Homo sapien
taatggactgtaaggaaatacattc

SEQ ID NO: 5512380 - DNA, 25 bp, Homo sapien
cagtgaacataatcaggaagcttgc

SEQ ID NO: 5512381 - DNA, 25 bp, Homo sapien
gataaattgtgtcactgaggcagtc

SEQ ID NO: 5512382 - DNA, 25 bp, Homo sapien
cacactgtaagcagaaccgaaagag

SEQ ID NO: 5512383 - DNA, 25 bp, Homo sapien
aggcaggacgaagcaactttccatt

SEQ ID NO: 5512384 - DNA, 25 bp, Homo sapien
tttatgcaaaatgattgagaaaatt

SEQ ID NO: 5512385 - DNA, 25 bp, Homo sapien
gctaagttttgaacagataacatat

SEQ ID NO: 5512386 - DNA, 25 bp, Homo sapien
atgtgatgcatgcgtgctctgctaa

SEQ ID NO: 5512387 - DNA, 25 bp, Homo sapien
agaggaaaatattcacagtatacca

SEQ ID NO: 5512388 - DNA, 25 bp, Homo sapien
tgatgccttcctgcaggtttagaac

SEQ ID NO: 5512389 - DNA, 25 bp, Homo sapien
taccacagtatacaatgatgccttc

SEQ ID NO: 5512390 - DNA, 25 bp, Homo sapien
atagtttctcaagaagaggatgaac

SEQ ID NO: 5512391 - DNA, 25 bp, Homo sapien
tacggcaaccatcaaaaaccattgg

SEQ ID NO: 5512392 - DNA, 25 bp, Homo sapien
cagatcttctgttacggcaaccatc

SEQ ID NO: 5512393 - DNA, 25 bp, Homo sapien
aaactcctctaaggcaggacgaagc

SEQ ID NO: 5512394 - DNA, 25 bp, Homo sapien
ggaaaaaataggcactcatacgtaa

SEQ ID NO: 5512395 - DNA, 25 bp, Homo sapien
actacaggtgttattcactggttac

SEQ ID NO: 5512396 - DNA, 25 bp, Homo sapien
attatttcagaagtaaaatgggtat

SEQ ID NO: 5512397 - DNA, 25 bp, Homo sapien
aacagccaacattttaacccaacaa

SEQ ID NO: 5512398 - DNA, 25 bp, Homo sapien
tcaaccctaagctgggtagatggtt

SEQ ID NO: 5512399 - DNA, 25 bp, Homo sapien
attaaaacgctttgagaactcagta

SEQ ID NO: 5512400 - DNA, 25 bp, Homo sapien
gaaattaaagctggtcataaagcaa

SEQ ID NO: 5512401 - DNA, 25 bp, Homo sapien
gagaactcagtagccagtcttggcc

SEQ ID NO: 5512402 - DNA, 25 bp, Homo sapien
tatgaatctctagggttgttattat

SEQ ID NO: 5512403 - DNA, 25 bp, Homo sapien
gctgggtagatggttttaggtatct

SEQ ID NO: 5512404 - DNA, 25 bp, Homo sapien
gtggtacaataacaaacatgaaagt

SEQ ID NO: 5512405 - DNA, 25 bp, Homo sapien
caatacccaactgcctgattccttt

SEQ ID NO: 5512406 - DNA, 25 bp, Homo sapien
agaaaagtcagtaaaacatttgtac

SEQ ID NO: 5512407 - DNA, 25 bp, Homo sapien
gtgagagtgagccaaagcttcctta

SEQ ID NO: 5512408 - DNA, 25 bp, Homo sapien
taagatgaaaataactaagagcact

SEQ ID NO: 5512409 - DNA, 25 bp, Homo sapien
tcccctcttcaagtgagagtgagcc

SEQ ID NO: 5512410 - DNA, 25 bp, Homo sapien
atgaatgagagcaccaaataacata

SEQ ID NO: 5512411 - DNA, 25 bp, Homo sapien
agccataaaaaggcaggaaaaacaa

SEQ ID NO: 5512412 - DNA, 25 bp, Homo sapien
aactaagagcactgacacaattttc

SEQ ID NO: 5512413 - DNA, 25 bp, Homo sapien
agtactacaacaccaagatcccctc

SEQ ID NO: 5512414 - DNA, 25 bp, Homo sapien
aaataagtcagtgaatgattagctt

SEQ ID NO: 5512415 - DNA, 25 bp, Homo sapien
agactttagacagccataaaaaggc

SEQ ID NO: 5512416 - DNA, 25 bp, Homo sapien
gtaagacattcgtagtgatggtcac

SEQ ID NO: 5512417 - DNA, 25 bp, Homo sapien
aggaggactaagttaacaagtgctc

SEQ ID NO: 5512418 - DNA, 25 bp, Homo sapien
aataactcaacgagcccaagcacac

SEQ ID NO: 5512419 - DNA, 25 bp, Homo sapien
acgagtgcattatgcaggaggacta

SEQ ID NO: 5512420 - DNA, 25 bp, Homo sapien
cctctgacttaaggggagatagtga

SEQ ID NO: 5512421 - DNA, 25 bp, Homo sapien
attttcagtagagtagggacctgga

SEQ ID NO: 5512422 - DNA, 25 bp, Homo sapien
cagagaacaagatagcttcaggaac

SEQ ID NO: 5512423 - DNA, 25 bp, Homo sapien
gcccaagcacacggatcataaaatc

SEQ ID NO: 5512424 - DNA, 25 bp, Homo sapien
tcactgagtaagacaaaaagcccta

SEQ ID NO: 5512425 - DNA, 25 bp, Homo sapien
tccaatgaccagaacatacggtata

SEQ ID NO: 5512426 - DNA, 25 bp, Homo sapien
ggggagatagtgaagattatatttt

SEQ ID NO: 5512427 - DNA, 25 bp, Homo sapien
agggcgagattaggatttaacaaat

SEQ ID NO: 5512428 - DNA, 25 bp, Homo sapien
atttgttaaatcctaatctcgccct

SEQ ID NO: 5512429 - DNA, 25 bp, Homo sapien
agaggactgtgacagacccccctcg

SEQ ID NO: 5512430 - DNA, 25 bp, Homo sapien
cgaggggggtctgtcacagtcctct

SEQ ID NO: 5512431 - DNA, 25 bp, Homo sapien
catccgagtgagtgtctttatattc

SEQ ID NO: 5512432 - DNA, 25 bp, Homo sapien
gacctacctgttggcaggaagattc

SEQ ID NO: 5512433 - DNA, 25 bp, Homo sapien
acaatagctcgtacaatgaccatca

SEQ ID NO: 5512434 - DNA, 25 bp, Homo sapien
ggtcattgggacattacgaaaagtc

SEQ ID NO: 5512435 - DNA, 25 bp, Homo sapien
tgagaaggaacagtacattgacata

SEQ ID NO: 5512436 - DNA, 25 bp, Homo sapien
ttgtgtgatctgacacttgggttgc

SEQ ID NO: 5512437 - DNA, 25 bp, Homo sapien
tgtccagcaggacctacctgttggc

SEQ ID NO: 5512438 - DNA, 25 bp, Homo sapien
accgccagcagcatgtgacactgta

SEQ ID NO: 5512439 - DNA, 25 bp, Homo sapien
acgaaaagtcggaaattagactcca

SEQ ID NO: 5512440 - DNA, 25 bp, Homo sapien
acacatcatgtggtaaacagcactc

SEQ ID NO: 5512441 - DNA, 25 bp, Homo sapien
gacactgtacttactgagaaggaac

SEQ ID NO: 5512442 - DNA, 25 bp, Homo sapien
ccaaaagcccccataaattagagtg

SEQ ID NO: 5512443 - DNA, 25 bp, Homo sapien
atgtactagttaagaaccaaggagt

SEQ ID NO: 5512444 - DNA, 25 bp, Homo sapien
tagagtggctagacacattcaagtc

SEQ ID NO: 5512445 - DNA, 25 bp, Homo sapien
ggaaagaggacaacaatgtaaccta

SEQ ID NO: 5512446 - DNA, 25 bp, Homo sapien
agacctttgcagacgtttagagtac

SEQ ID NO: 5512447 - DNA, 25 bp, Homo sapien
atgtaacctaaaagggagctactgg

SEQ ID NO: 5512448 - DNA, 25 bp, Homo sapien
tttgggtctcacagattaagaatgt

SEQ ID NO: 5512449 - DNA, 25 bp, Homo sapien
aaccaaggagttatacccagttcac

SEQ ID NO: 5512450 - DNA, 25 bp, Homo sapien
ctcttgcctagaagctaaagcctta

SEQ ID NO: 5512451 - DNA, 25 bp, Homo sapien
ttgaagataacaatggagcaagctt

SEQ ID NO: 5512452 - DNA, 25 bp, Homo sapien
agtctagcagaaagaaacttgaaat

SEQ ID NO: 5512453 - DNA, 25 bp, Homo sapien
aatgaggaacctgagttatggaatg

SEQ ID NO: 5512454 - DNA, 25 bp, Homo sapien
gtgccttacatgtctgaaagtgctc

SEQ ID NO: 5512455 - DNA, 25 bp, Homo sapien
aagtagtaatggttgggtctaccac

SEQ ID NO: 5512456 - DNA, 25 bp, Homo sapien
ggcttggcacacaccagcactaatg

SEQ ID NO: 5512457 - DNA, 25 bp, Homo sapien
ggtaggtaggacaattatgagtttc

SEQ ID NO: 5512458 - DNA, 25 bp, Homo sapien
gtctaccacataggcagattcctgg

SEQ ID NO: 5512459 - DNA, 25 bp, Homo sapien
tatggaatgctggaaaagcttttct

SEQ ID NO: 5512460 - DNA, 25 bp, Homo sapien
gacttgaggaggcagttaatcctat

SEQ ID NO: 5512461 - DNA, 25 bp, Homo sapien
ggtcaacagcccacgggcttggcac

SEQ ID NO: 5512462 - DNA, 25 bp, Homo sapien
tggtgagaagttggtatacatagca

SEQ ID NO: 5512463 - DNA, 25 bp, Homo sapien
caggattaccgaacagaaaaacaaa

SEQ ID NO: 5512464 - DNA, 25 bp, Homo sapien
atttggccgtgccattatcgtacgt

SEQ ID NO: 5512465 - DNA, 25 bp, Homo sapien
acgtacgataatggcacggccaaat

SEQ ID NO: 5512466 - DNA, 25 bp, Homo sapien
ggtcacctggagctggtttggtgga

SEQ ID NO: 5512467 - DNA, 25 bp, Homo sapien
cctgcatgtccttgtggtggccagt

SEQ ID NO: 5512468 - DNA, 25 bp, Homo sapien
gggagatacaagctgtgagtactct

SEQ ID NO: 5512469 - DNA, 25 bp, Homo sapien
gacctccgaggctcaatcgataccc

SEQ ID NO: 5512470 - DNA, 25 bp, Homo sapien
tgagtcttcctggtcccgacagttc

SEQ ID NO: 5512471 - DNA, 25 bp, Homo sapien
ggcctgggctttttggaatgagtct

SEQ ID NO: 5512472 - DNA, 25 bp, Homo sapien
acctacaccaagtgacgtgagcatc

SEQ ID NO: 5512473 - DNA, 25 bp, Homo sapien
ccagttggtcctgaagtccttcctc

SEQ ID NO: 5512474 - DNA, 25 bp, Homo sapien
ttcctcaaagaggcgatcctgaaac

SEQ ID NO: 5512475 - DNA, 25 bp, Homo sapien
tttcttatgcaggccccagttggtc

SEQ ID NO: 5512476 - DNA, 25 bp, Homo sapien
ccaggctgatctcgacctccgaggc

SEQ ID NO: 5512477 - DNA, 25 bp, Homo sapien
tcagtgttagagaaacccctcccac

SEQ ID NO: 5512478 - DNA, 25 bp, Homo sapien
agctcatggaatagaagtcagtgtt

SEQ ID NO: 5512479 - DNA, 25 bp, Homo sapien
gctacagactgatcttccgggtggc

SEQ ID NO: 5512480 - DNA, 25 bp, Homo sapien
aaataagcgccttgaaaaagctcat

SEQ ID NO: 5512481 - DNA, 25 bp, Homo sapien
ctacatggcctgataggaaagcaaa

SEQ ID NO: 5512482 - DNA, 25 bp, Homo sapien
cttcaggtgaggtatgtaaacattg

SEQ ID NO: 5512483 - DNA, 25 bp, Homo sapien
tccaagcttggatttcagtgagggc

SEQ ID NO: 5512484 - DNA, 25 bp, Homo sapien
atcctctggctccacaccgcatcct

SEQ ID NO: 5512485 - DNA, 25 bp, Homo sapien
acagaagcacaagaagtctacaaga

SEQ ID NO: 5512486 - DNA, 25 bp, Homo sapien
taacatagtagaaatccaggcccaa

SEQ ID NO: 5512487 - DNA, 25 bp, Homo sapien
tcaaagaagtttaatacgctgccat

SEQ ID NO: 5512488 - DNA, 25 bp, Homo sapien
ttgaagagctaatgttgaaacaacc

SEQ ID NO: 5512489 - DNA, 25 bp, Homo sapien
acaaatgaaacaacaaactgacagt

SEQ ID NO: 5512490 - DNA, 25 bp, Homo sapien
tcaaaaagttcaatgatggagcaat

SEQ ID NO: 5512491 - DNA, 25 bp, Homo sapien
acaccctccagaaaaatcaggtatt

SEQ ID NO: 5512492 - DNA, 25 bp, Homo sapien
aggcacataggaccagattttgata

SEQ ID NO: 5512493 - DNA, 25 bp, Homo sapien
agttgtgaattacaggaacaccctc

SEQ ID NO: 5512494 - DNA, 25 bp, Homo sapien
tgtaaagcatacacccatgataatt

SEQ ID NO: 5512495 - DNA, 25 bp, Homo sapien
atgtgtaaatcaaatgagtgatgct

SEQ ID NO: 5512496 - DNA, 25 bp, Homo sapien
gatggagcaatagtatcacaattta

SEQ ID NO: 5512497 - DNA, 25 bp, Homo sapien
ttgcccatgtgtctacagttgtgaa

SEQ ID NO: 5512498 - DNA, 25 bp, Homo sapien
aacctggagattcttaagatgactt

SEQ ID NO: 5512499 - DNA, 25 bp, Homo sapien
ttttaaactacacgagcagaacatg

SEQ ID NO: 5512500 - DNA, 25 bp, Homo sapien
atgtgtgtgcgctgatattgtttaa

SEQ ID NO: 5512501 - DNA, 25 bp, Homo sapien
ccagggatagtctgccatgcatgtg

SEQ ID NO: 5512502 - DNA, 25 bp, Homo sapien
aaggcaaggcacatcttgtggtaga

SEQ ID NO: 5512503 - DNA, 25 bp, Homo sapien
tacttattctcggaaggcaaggcac

SEQ ID NO: 5512504 - DNA, 25 bp, Homo sapien
gcagaacatgcagctatgtgtgtgc

SEQ ID NO: 5512505 - DNA, 25 bp, Homo sapien
gtctgccatgcatgtgtgtcagcgc

SEQ ID NO: 5512506 - DNA, 25 bp, Homo sapien
aggtaaagagttggttctcgtcgcg

SEQ ID NO: 5512507 - DNA, 25 bp, Homo sapien
tgtgtgcaatgtgggtccctccctt

SEQ ID NO: 5512508 - DNA, 25 bp, Homo sapien
ccatgcaaagttaggtaaagagttg

SEQ ID NO: 5512509 - DNA, 25 bp, Homo sapien
ggagtccttgactaagcaccatgca

SEQ ID NO: 5512510 - DNA, 25 bp, Homo sapien
gaagttgagaattttgccaggtcat

SEQ ID NO: 5512511 - DNA, 25 bp, Homo sapien
gtgtttagtgtgtttcggtgaagct

SEQ ID NO: 5512512 - DNA, 25 bp, Homo sapien
tagtgtgtttcggtgaagctctcca

SEQ ID NO: 5512513 - DNA, 25 bp, Homo sapien
ggagaagcctgccgttctgaaggct

SEQ ID NO: 5512514 - DNA, 25 bp, Homo sapien
ctccaagtgtgttgaatcagcgtgc

SEQ ID NO: 5512515 - DNA, 25 bp, Homo sapien
tgttgaatcagcgtgcctagcctca

SEQ ID NO: 5512516 - DNA, 25 bp, Homo sapien
gccccaaagacttcgccgccgagaa

SEQ ID NO: 5512517 - DNA, 25 bp, Homo sapien
ttcggtgaagctctccaagtgtgtt

SEQ ID NO: 5512518 - DNA, 25 bp, Homo sapien
ccctttgtctcggcagcctgacggc

SEQ ID NO: 5512519 - DNA, 25 bp, Homo sapien
cgcggtaccctttgtctcggcagcc

SEQ ID NO: 5512520 - DNA, 25 bp, Homo sapien
gcctgccgttctgaaggctcgggac

SEQ ID NO: 5512521 - DNA, 25 bp, Homo sapien
caggcagtttggggctcatttgctt

SEQ ID NO: 5512522 - DNA, 25 bp, Homo sapien
aacacacccagctttgaacagactc

SEQ ID NO: 5512523 - DNA, 25 bp, Homo sapien
ggcaggatttgtgcagtgtttcaac

SEQ ID NO: 5512524 - DNA, 25 bp, Homo sapien
agactcaacaatacctggggagggg

SEQ ID NO: 5512525 - DNA, 25 bp, Homo sapien
ggaaaccacaagaggattttgccta

SEQ ID NO: 5512526 - DNA, 25 bp, Homo sapien
ggtacctagaagatgctagaagagc

SEQ ID NO: 5512527 - DNA, 25 bp, Homo sapien
ctgtgcctcacagtgctcctgactc

SEQ ID NO: 5512528 - DNA, 25 bp, Homo sapien
aatgaaacaaatatgcccaacaccc

SEQ ID NO: 5512529 - DNA, 25 bp, Homo sapien
ctttcaggagccaacatcaaaacct

SEQ ID NO: 5512530 - DNA, 25 bp, Homo sapien
acaacaactgtgactagtgcaaaat

SEQ ID NO: 5512531 - DNA, 25 bp, Homo sapien
ttctgggagatgttctgtgcctcac

SEQ ID NO: 5512532 - DNA, 25 bp, Homo sapien
ggcctggggcttctattacctggtc

SEQ ID NO: 5512533 - DNA, 25 bp, Homo sapien
gccggcagcatcaatgtctggaaca

SEQ ID NO: 5512534 - DNA, 25 bp, Homo sapien
aacgtgtggcgcttcccctacctgt

SEQ ID NO: 5512535 - DNA, 25 bp, Homo sapien
ctggttggaggaatccccattttct

SEQ ID NO: 5512536 - DNA, 25 bp, Homo sapien
acttcatcatgtcgtgcgtgggctt

SEQ ID NO: 5512537 - DNA, 25 bp, Homo sapien
gcggaggtgtgttccttattcccta

SEQ ID NO: 5512538 - DNA, 25 bp, Homo sapien
agttctgggagaacaaagtcttgag

SEQ ID NO: 5512539 - DNA, 25 bp, Homo sapien
ccctacctgtgctacaagaacggcg

SEQ ID NO: 5512540 - DNA, 25 bp, Homo sapien
tcaatgtctggaacatctgtcccct

SEQ ID NO: 5512541 - DNA, 25 bp, Homo sapien
ccctgtcatcgagttctgggagaac

SEQ ID NO: 5512542 - DNA, 25 bp, Homo sapien
ggccagttcatgaaggccggcagca

SEQ ID NO: 5512543 - DNA, 25 bp, Homo sapien
gactgcgtggagatcttccgccatg

SEQ ID NO: 5512544 - DNA, 25 bp, Homo sapien
cctacgtcctgatcgccctggttgg

SEQ ID NO: 5512545 - DNA, 25 bp, Homo sapien
cttattccctacgtcctgatcgccc

SEQ ID NO: 5512546 - DNA, 25 bp, Homo sapien
caagtcctttaccaccacgctgccc

SEQ ID NO: 5512547 - DNA, 25 bp, Homo sapien
ttcttagagatctcgctgggccagt

SEQ ID NO: 5512548 - DNA, 25 bp, Homo sapien
cactcccgactgcgtggagatcttc

SEQ ID NO: 5512549 - DNA, 25 bp, Homo sapien
cacctggaacactcccgactgcgtg

SEQ ID NO: 5512550 - DNA, 25 bp, Homo sapien
cagcctggccaacctcacctgtgac

SEQ ID NO: 5512551 - DNA, 25 bp, Homo sapien
cctttaccaccacgctgccctgggc

SEQ ID NO: 5512552 - DNA, 25 bp, Homo sapien
gatcttccgccatgaagactgtgcc

SEQ ID NO: 5512553 - DNA, 25 bp, Homo sapien
tgtcccctgttcaaaggcctgggct

SEQ ID NO: 5512554 - DNA, 25 bp, Homo sapien
ggcaggtgtcaaaggtaaactgaaa

SEQ ID NO: 5512555 - DNA, 25 bp, Homo sapien
acgtcgtgtctgccaaacgctattc

SEQ ID NO: 5512556 - DNA, 25 bp, Homo sapien
atccactgtggatggcgtcctctga

SEQ ID NO: 5512557 - DNA, 25 bp, Homo sapien
acaaagaactacgactggctcccta

SEQ ID NO: 5512558 - DNA, 25 bp, Homo sapien
aagaaagaggattacaaagaactac

SEQ ID NO: 5512559 - DNA, 25 bp, Homo sapien
ttagaaacaggaaaagtgtcaaatg

SEQ ID NO: 5512560 - DNA, 25 bp, Homo sapien
aggtaaactgaaaacgtcgtgtctg

SEQ ID NO: 5512561 - DNA, 25 bp, Homo sapien
cacctgcaaacgaacacgaatccac

SEQ ID NO: 5512562 - DNA, 25 bp, Homo sapien
ttcagcaaagcaggtttggaagaaa

SEQ ID NO: 5512563 - DNA, 25 bp, Homo sapien
gtgtcaaatgaaaaggtactcgctc

SEQ ID NO: 5512564 - DNA, 25 bp, Homo sapien
tctcagagacacttgggaatgtttg

SEQ ID NO: 5512565 - DNA, 25 bp, Homo sapien
ttggagttcgacggtcctgttggaa

SEQ ID NO: 5512566 - DNA, 25 bp, Homo sapien
ttccaacaggaccgtcgaactccaa

SEQ ID NO: 5512567 - DNA, 25 bp, Homo sapien
aatttgatctgatatccataagaac

SEQ ID NO: 5512568 - DNA, 25 bp, Homo sapien
gttcttatggatatcagatcaaatt

SEQ ID NO: 5512569 - DNA, 25 bp, Homo sapien
aaaatttatctggtatagaagtaag

SEQ ID NO: 5512570 - DNA, 25 bp, Homo sapien
cttacttctataccagataaatttt

SEQ ID NO: 5512571 - DNA, 25 bp, Homo sapien
ctgctcccaggggaaaaactaatac

SEQ ID NO: 5512572 - DNA, 25 bp, Homo sapien
aaaactaataccagagagggatcag

SEQ ID NO: 5512573 - DNA, 25 bp, Homo sapien
gttggcggcactgttgtagtttaac

SEQ ID NO: 5512574 - DNA, 25 bp, Homo sapien
gggaagcatgtgagatcagctatct

SEQ ID NO: 5512575 - DNA, 25 bp, Homo sapien
gccacaacctcaaacagggctctcc

SEQ ID NO: 5512576 - DNA, 25 bp, Homo sapien
cacccacctgtcacccgggtttgac

SEQ ID NO: 5512577 - DNA, 25 bp, Homo sapien
ttggcaggcagcttgcctctgcctc

SEQ ID NO: 5512578 - DNA, 25 bp, Homo sapien
actaaacttgtcacagcttctgctt

SEQ ID NO: 5512579 - DNA, 25 bp, Homo sapien
gccaaggaataaacaagagtttgac

SEQ ID NO: 5512580 - DNA, 25 bp, Homo sapien
cccgggtttgactcccacctctgcc

SEQ ID NO: 5512581 - DNA, 25 bp, Homo sapien
ttcctgcaagacttggtgttggcgg

SEQ ID NO: 5512582 - DNA, 25 bp, Homo sapien
caaccctcagggataatgcaggatt

SEQ ID NO: 5512583 - DNA, 25 bp, Homo sapien
tcgagaaagttccagggtatctcct

SEQ ID NO: 5512584 - DNA, 25 bp, Homo sapien
cacagaggtttcatccagaagtctt

SEQ ID NO: 5512585 - DNA, 25 bp, Homo sapien
attggagaactgcacccagaatctt

SEQ ID NO: 5512586 - DNA, 25 bp, Homo sapien
gaagaacgtacctgaacaaccctca

SEQ ID NO: 5512587 - DNA, 25 bp, Homo sapien
acaccacaagctaactgtaggatat

SEQ ID NO: 5512588 - DNA, 25 bp, Homo sapien
acaaagatctagattcccagtggtg

SEQ ID NO: 5512589 - DNA, 25 bp, Homo sapien
ttccatctacagccagcctaggcaa

SEQ ID NO: 5512590 - DNA, 25 bp, Homo sapien
tgaatgttaaggtactcacagaggt

SEQ ID NO: 5512591 - DNA, 25 bp, Homo sapien
attcaagagttgtgcagcctacacc

SEQ ID NO: 5512592 - DNA, 25 bp, Homo sapien
aggaaccctacacccattagcagtt

SEQ ID NO: 5512593 - DNA, 25 bp, Homo sapien
agcagcggctccaaggctgaattca

SEQ ID NO: 5512594 - DNA, 25 bp, Homo sapien
atggatcttctgggacctagcctcg

SEQ ID NO: 5512595 - DNA, 25 bp, Homo sapien
cttcgtctctcaggatggcgagtag

SEQ ID NO: 5512596 - DNA, 25 bp, Homo sapien
gtagccttgcctagtgtaggagccc

SEQ ID NO: 5512597 - DNA, 25 bp, Homo sapien
ggccaggcatccccagttgctgtac

SEQ ID NO: 5512598 - DNA, 25 bp, Homo sapien
gtgaagctagaatctcagaaggcca

SEQ ID NO: 5512599 - DNA, 25 bp, Homo sapien
atcaacatcaccaacggcgaggaag

SEQ ID NO: 5512600 - DNA, 25 bp, Homo sapien
tggtatggtcaggaaaaagactaca

SEQ ID NO: 5512601 - DNA, 25 bp, Homo sapien
aatataaactggtacggaagatcgg

SEQ ID NO: 5512602 - DNA, 25 bp, Homo sapien
gtctggctccttcggggacatctat

SEQ ID NO: 5512603 - DNA, 25 bp, Homo sapien
ttcattgtcggagggaaatataaac

SEQ ID NO: 5512604 - DNA, 25 bp, Homo sapien
catggatggaatttgaatcagtggt

SEQ ID NO: 5512605 - DNA, 25 bp, Homo sapien
tgaatcagtggtataaacatgttgc

SEQ ID NO: 5512606 - DNA, 25 bp, Homo sapien
aatgaccactaaaaggtgaactcac

SEQ ID NO: 5512607 - DNA, 25 bp, Homo sapien
gttatgaaatgacaaatgaccacta

SEQ ID NO: 5512608 - DNA, 25 bp, Homo sapien
aacacagttctggagccatcctgtt

SEQ ID NO: 5512609 - DNA, 25 bp, Homo sapien
ggagccatcctgttgaaccagtgcc

SEQ ID NO: 5512610 - DNA, 25 bp, Homo sapien
accaaacattagaaaaacacagttc

SEQ ID NO: 5512611 - DNA, 25 bp, Homo sapien
atcacagtgaaccaaaatgcatagt

SEQ ID NO: 5512612 - DNA, 25 bp, Homo sapien
ttgcagtcactaaatatagatcatc

SEQ ID NO: 5512613 - DNA, 25 bp, Homo sapien
gaactcacagcccatacaccaatat

SEQ ID NO: 5512614 - DNA, 25 bp, Homo sapien
aaaaagcacaagaacattatacaag

SEQ ID NO: 5512615 - DNA, 25 bp, Homo sapien
cctccctgggcagaatgtagctttt

SEQ ID NO: 5512616 - DNA, 25 bp, Homo sapien
tctcaccaagcgccagctggaaaat

SEQ ID NO: 5512617 - DNA, 25 bp, Homo sapien
ccccaatgccttagagagaggaggg

SEQ ID NO: 5512618 - DNA, 25 bp, Homo sapien
ggctacttcaaaggcatccaggcgc

SEQ ID NO: 5512619 - DNA, 25 bp, Homo sapien
tccttagatcccagaggagggaaga

SEQ ID NO: 5512620 - DNA, 25 bp, Homo sapien
caggcgcgtgtcatctaccagatgc

SEQ ID NO: 5512621 - DNA, 25 bp, Homo sapien
aggggagcgagaaattgctttttct

SEQ ID NO: 5512622 - DNA, 25 bp, Homo sapien
cagctcaacggcctggccggctact

SEQ ID NO: 5512623 - DNA, 25 bp, Homo sapien
atactaaaggaagggatcatagaat

SEQ ID NO: 5512624 - DNA, 25 bp, Homo sapien
cgggtatggccaatgccttccggac

SEQ ID NO: 5512625 - DNA, 25 bp, Homo sapien
gtgctgcctatgggccctctgctcc

SEQ ID NO: 5512626 - DNA, 25 bp, Homo sapien
tgggaatggcacccagggtgctgaa

SEQ ID NO: 5512627 - DNA, 25 bp, Homo sapien
tctagaaactaaacgctgggaatgg

SEQ ID NO: 5512628 - DNA, 25 bp, Homo sapien
atgttttcagtggggagagaaatag

SEQ ID NO: 5512629 - DNA, 25 bp, Homo sapien
tcagactctggagtcagacggcttc

SEQ ID NO: 5512630 - DNA, 25 bp, Homo sapien
ttcacacatatggggctatggcaac

SEQ ID NO: 5512631 - DNA, 25 bp, Homo sapien
gggtgctgaattccagggtctcctc

SEQ ID NO: 5512632 - DNA, 25 bp, Homo sapien
ggcaggcccattacgccatgagcca

SEQ ID NO: 5512633 - DNA, 25 bp, Homo sapien
tctagataagttacagggcaattgc

SEQ ID NO: 5512634 - DNA, 25 bp, Homo sapien
cctctctatagggtactagccgggg

SEQ ID NO: 5512635 - DNA, 25 bp, Homo sapien
gaggcctcagacaagtaactcagct

SEQ ID NO: 5512636 - DNA, 25 bp, Homo sapien
ggaattgaaaggaactagccttggc

SEQ ID NO: 5512637 - DNA, 25 bp, Homo sapien
aagctcccattccaggtgtcagccc

SEQ ID NO: 5512638 - DNA, 25 bp, Homo sapien
ctgagaacgaggaattgtgtcattt

SEQ ID NO: 5512639 - DNA, 25 bp, Homo sapien
tcatggaatgatagcctcaaccaac

SEQ ID NO: 5512640 - DNA, 25 bp, Homo sapien
cagcctagctgcacataagaagcat

SEQ ID NO: 5512641 - DNA, 25 bp, Homo sapien
tactggcacttagtctggtacatgc

SEQ ID NO: 5512642 - DNA, 25 bp, Homo sapien
ggtgtcagccctgtagtggttctcc

SEQ ID NO: 5512643 - DNA, 25 bp, Homo sapien
ccaggatgattcaaccgaagattcc

SEQ ID NO: 5512644 - DNA, 25 bp, Homo sapien
gtgagggaacagatgtcaactatca

SEQ ID NO: 5512645 - DNA, 25 bp, Homo sapien
cgaagattccgaaaggtcctcaggt

SEQ ID NO: 5512646 - DNA, 25 bp, Homo sapien
aaaataaagatagagatgtaggcat

SEQ ID NO: 5512647 - DNA, 25 bp, Homo sapien
gtgattccaaagtgcagcccgtgtt

SEQ ID NO: 5512648 - DNA, 25 bp, Homo sapien
catattgtatagataaatgagtgac

SEQ ID NO: 5512649 - DNA, 25 bp, Homo sapien
catcggccaacctagaaacgttttc

SEQ ID NO: 5512650 - DNA, 25 bp, Homo sapien
agagtagatccgactttagaagcct

SEQ ID NO: 5512651 - DNA, 25 bp, Homo sapien
aaatagatgattataacggggcaga

SEQ ID NO: 5512652 - DNA, 25 bp, Homo sapien
atagaagatcaagagtagatccgac

SEQ ID NO: 5512653 - DNA, 25 bp, Homo sapien
agcctactttgtgaccaaggagctc

SEQ ID NO: 5512654 - DNA, 25 bp, Homo sapien
taagcttaagtgtgacaggactgat

SEQ ID NO: 5512655 - DNA, 25 bp, Homo sapien
tggaggtgcagttaaacttttaagc

SEQ ID NO: 5512656 - DNA, 25 bp, Homo sapien
tataagtgtgagaaagtatatgctt

SEQ ID NO: 5512657 - DNA, 25 bp, Homo sapien
aggaaaaaacatcggccaacctaga

SEQ ID NO: 5512658 - DNA, 25 bp, Homo sapien
ttcgtcattccaagagagagagagg

SEQ ID NO: 5512659 - DNA, 25 bp, Homo sapien
gtacagggctgtaaactactttgct

SEQ ID NO: 5512660 - DNA, 25 bp, Homo sapien
ttgtaaggctgtacagggctgtaaa

SEQ ID NO: 5512661 - DNA, 25 bp, Homo sapien
acagtcacctaaatgctaaagaaag

SEQ ID NO: 5512662 - DNA, 25 bp, Homo sapien
actgtgatcagtaattcgtggatat

SEQ ID NO: 5512663 - DNA, 25 bp, Homo sapien
cttgttactagtgcagtttaaggcc

SEQ ID NO: 5512664 - DNA, 25 bp, Homo sapien
ttaaggccgacaatggccatatatc

SEQ ID NO: 5512665 - DNA, 25 bp, Homo sapien
ttcgtggatattggtaaaatgatac

SEQ ID NO: 5512666 - DNA, 25 bp, Homo sapien
taattgaagctaatatgaagtctaa

SEQ ID NO: 5512667 - DNA, 25 bp, Homo sapien
atatcaaactgccgaacagtcacct

SEQ ID NO: 5512668 - DNA, 25 bp, Homo sapien
taatataccatgggatgcagaggaa

SEQ ID NO: 5512669 - DNA, 25 bp, Homo sapien
tgaagtcaccatagagtcaatagct

SEQ ID NO: 5512670 - DNA, 25 bp, Homo sapien
accacggcgacctatggaaatcgag

SEQ ID NO: 5512671 - DNA, 25 bp, Homo sapien
ctcgatttccataggtcgccgtggt

SEQ ID NO: 5512672 - DNA, 25 bp, Homo sapien
gcgtccggccgctcttggcttgcgg

SEQ ID NO: 5512673 - DNA, 25 bp, Homo sapien
ggcgagcacccccagcctgtatgaa

SEQ ID NO: 5512674 - DNA, 25 bp, Homo sapien
aatcccgaatatgttgtcaatgacg

SEQ ID NO: 5512675 - DNA, 25 bp, Homo sapien
ggactaacagatttgttggatggat

SEQ ID NO: 5512676 - DNA, 25 bp, Homo sapien
ttgctcgaaactgggccaatcaaag

SEQ ID NO: 5512677 - DNA, 25 bp, Homo sapien
tgtatgaaaacccatggacaatccc

SEQ ID NO: 5512678 - DNA, 25 bp, Homo sapien
acgagaattggcttggccccagttc

SEQ ID NO: 5512679 - DNA, 25 bp, Homo sapien
tgggctatttgattattgaagaaga

SEQ ID NO: 5512680 - DNA, 25 bp, Homo sapien
ttggatggatttattgctcgaaact

SEQ ID NO: 5512681 - DNA, 25 bp, Homo sapien
tgtcaatgacgagaattggcttggc

SEQ ID NO: 5512682 - DNA, 25 bp, Homo sapien
ggccgctcttggcttgcggctgccc

SEQ ID NO: 5512683 - DNA, 25 bp, Homo sapien
cgggactttctacatgtgtgagacc

SEQ ID NO: 5512684 - DNA, 25 bp, Homo sapien
gcaagggcgacctcatccagcccaa

SEQ ID NO: 5512685 - DNA, 25 bp, Homo sapien
ccaagatcgccatcggcctgctgga

SEQ ID NO: 5512686 - DNA, 25 bp, Homo sapien
acatgtgtgagaccacactggccaa

SEQ ID NO: 5512687 - DNA, 25 bp, Homo sapien
cacctacgacttcaagatggccgac

SEQ ID NO: 5512688 - DNA, 25 bp, Homo sapien
agcacagcaccgactgcacctacgg

SEQ ID NO: 5512689 - DNA, 25 bp, Homo sapien
gggccaagatcgccatcggcctgct

SEQ ID NO: 5512690 - DNA, 25 bp, Homo sapien
ccacggctcttacgggactttctac

SEQ ID NO: 5512691 - DNA, 25 bp, Homo sapien
ggctacacagccacctacgacttca

SEQ ID NO: 5512692 - DNA, 25 bp, Homo sapien
ggaggagctcttccacggctcttac

SEQ ID NO: 5512693 - DNA, 25 bp, Homo sapien
cttccacggctcttacgggactttc

SEQ ID NO: 5512694 - DNA, 25 bp, Homo sapien
actttagaattgacacattttaaat

SEQ ID NO: 5512695 - DNA, 25 bp, Homo sapien
atttaaaatgtgtcaattctaaagt

SEQ ID NO: 5512696 - DNA, 25 bp, Homo sapien
gggattaacataaaggggatatgcc

SEQ ID NO: 5512697 - DNA, 25 bp, Homo sapien
ggtgactggcctggaaattatggca

SEQ ID NO: 5512698 - DNA, 25 bp, Homo sapien
ttcaattggcatgggtacaacctga

SEQ ID NO: 5512699 - DNA, 25 bp, Homo sapien
aataacaggtagtataaagacttgc

SEQ ID NO: 5512700 - DNA, 25 bp, Homo sapien
aaaaagatcctggtgaaatggcatc

SEQ ID NO: 5512701 - DNA, 25 bp, Homo sapien
ggatgaagccctactggacttagac

SEQ ID NO: 5512702 - DNA, 25 bp, Homo sapien
ggcaaggatgagttaaaatggatca

SEQ ID NO: 5512703 - DNA, 25 bp, Homo sapien
tctaaggctagtagtgcatagtagt

SEQ ID NO: 5512704 - DNA, 25 bp, Homo sapien
cattattaagggagagaatggtaca

SEQ ID NO: 5512705 - DNA, 25 bp, Homo sapien
acttgccaaagtggtaacaggaaac

SEQ ID NO: 5512706 - DNA, 25 bp, Homo sapien
acaggaaaccagtgcctctaaggct

SEQ ID NO: 5512707 - DNA, 25 bp, Homo sapien
gcacaagcatgtaataaaagagcac

SEQ ID NO: 5512708 - DNA, 25 bp, Homo sapien
agccattgagaagccattcagtgcc

SEQ ID NO: 5512709 - DNA, 25 bp, Homo sapien
ggtagggacctgagactttccagaa

SEQ ID NO: 5512710 - DNA, 25 bp, Homo sapien
ataccagcaaatatattatggcctc

SEQ ID NO: 5512711 - DNA, 25 bp, Homo sapien
tcaacagtagtaaatagaggaagct

SEQ ID NO: 5512712 - DNA, 25 bp, Homo sapien
attcagtgccctggtagggacctga

SEQ ID NO: 5512713 - DNA, 25 bp, Homo sapien
agctgtccagatgaattaggctgct

SEQ ID NO: 5512714 - DNA, 25 bp, Homo sapien
cacacagcagtctatgatccctcaa

SEQ ID NO: 5512715 - DNA, 25 bp, Homo sapien
atggcctcatagtagtaactgaacc

SEQ ID NO: 5512716 - DNA, 25 bp, Homo sapien
actgaattacaaaacctgcacaagc

SEQ ID NO: 5512717 - DNA, 25 bp, Homo sapien
ttccaaagtgcctggtagctgtcca

SEQ ID NO: 5512718 - DNA, 25 bp, Homo sapien
cgttagtgagtggcatgattacaaa

SEQ ID NO: 5512719 - DNA, 25 bp, Homo sapien
tcctacaaccaaagcacatacacac

SEQ ID NO: 5512720 - DNA, 25 bp, Homo sapien
ctgctacagaaataaaatcgttagt

SEQ ID NO: 5512721 - DNA, 25 bp, Homo sapien
gctgaaccagcctctcaaataggaa

SEQ ID NO: 5512722 - DNA, 25 bp, Homo sapien
agaaataaaatcgttagtgagtggc

SEQ ID NO: 5512723 - DNA, 25 bp, Homo sapien
gttaaggcctgagtttcagaaatcc

SEQ ID NO: 5512724 - DNA, 25 bp, Homo sapien
acacacacattaacaccttacatag

SEQ ID NO: 5512725 - DNA, 25 bp, Homo sapien
ctggaataacagaagtaacaaaaac

SEQ ID NO: 5512726 - DNA, 25 bp, Homo sapien
agaaacatccactttggctgtatat

SEQ ID NO: 5512727 - DNA, 25 bp, Homo sapien
caacctattggttaaggcctgagtt

SEQ ID NO: 5512728 - DNA, 25 bp, Homo sapien
aacagaagtaacaaaaactcacatt

SEQ ID NO: 5512729 - DNA, 25 bp, Homo sapien
ctgaagagcatctagtgaggcctca

SEQ ID NO: 5512730 - DNA, 25 bp, Homo sapien
ataagttaaactgaagcaaaacatc

SEQ ID NO: 5512731 - DNA, 25 bp, Homo sapien
aagtcaggtgtgtcctgctggtttc

SEQ ID NO: 5512732 - DNA, 25 bp, Homo sapien
ggaaaccagcaagtaaagaagcaat

SEQ ID NO: 5512733 - DNA, 25 bp, Homo sapien
aggggaagtcaacacaaaatccgtc

SEQ ID NO: 5512734 - DNA, 25 bp, Homo sapien
aaaggaatctaaaaatgcaggattt

SEQ ID NO: 5512735 - DNA, 25 bp, Homo sapien
aagaagcaatttgccagggtaaggg

SEQ ID NO: 5512736 - DNA, 25 bp, Homo sapien
tttattagtagacagatgggcagaa

SEQ ID NO: 5512737 - DNA, 25 bp, Homo sapien
tcctttccagtggagagctgcacat

SEQ ID NO: 5512738 - DNA, 25 bp, Homo sapien
atgtgccccaaacgtaaggaaacca

SEQ ID NO: 5512739 - DNA, 25 bp, Homo sapien
gaatcaacagcagaatcatatactt

SEQ ID NO: 5512740 - DNA, 25 bp, Homo sapien
ctgctatgagcactgtaagaaaaac

SEQ ID NO: 5512741 - DNA, 25 bp, Homo sapien
tataagccagttgggaagctgttaa

SEQ ID NO: 5512742 - DNA, 25 bp, Homo sapien
aggaacaaggcttcagtgcagttgt

SEQ ID NO: 5512743 - DNA, 25 bp, Homo sapien
tgagctctacaccagccgagaggaa

SEQ ID NO: 5512744 - DNA, 25 bp, Homo sapien
cttaaatggtcaccgaggctacagc

SEQ ID NO: 5512745 - DNA, 25 bp, Homo sapien
cacacaacatgcagatgagctctac

SEQ ID NO: 5512746 - DNA, 25 bp, Homo sapien
gcaagcactactgtcagcagcaaca

SEQ ID NO: 5512747 - DNA, 25 bp, Homo sapien
aacagcatctgagcctcatgggtta

SEQ ID NO: 5512748 - DNA, 25 bp, Homo sapien
gtgggtgaaaatgacagatttattc

SEQ ID NO: 5512749 - DNA, 25 bp, Homo sapien
ggacagcaggactcgtgtttaagtg

SEQ ID NO: 5512750 - DNA, 25 bp, Homo sapien
gtttaagtgtcagaggcttagaggg

SEQ ID NO: 5512751 - DNA, 25 bp, Homo sapien
tcgcgacccctctttcacccgcgga

SEQ ID NO: 5512752 - DNA, 25 bp, Homo sapien
tccgcgggtgaaagaggggtcgcga

SEQ ID NO: 5512753 - DNA, 25 bp, Homo sapien
gccctagagcaatggttccagcgtg

SEQ ID NO: 5512754 - DNA, 25 bp, Homo sapien
gcctccccaacgcgaagactcaatt

SEQ ID NO: 5512755 - DNA, 25 bp, Homo sapien
tcaattctggccaaggttctggggg

SEQ ID NO: 5512756 - DNA, 25 bp, Homo sapien
tgcggcagtggccctacttccacct

SEQ ID NO: 5512757 - DNA, 25 bp, Homo sapien
aaaggaatcccagtcgtgtgcttgt

SEQ ID NO: 5512758 - DNA, 25 bp, Homo sapien
ctgggaaagaggacatcttacttct

SEQ ID NO: 5512759 - DNA, 25 bp, Homo sapien
aaggtttcgtgcactggctgaattc

SEQ ID NO: 5512760 - DNA, 25 bp, Homo sapien
gtgattgtgcaaacctgggaaagag

SEQ ID NO: 5512761 - DNA, 25 bp, Homo sapien
cagaagaacatgcaaaggtttcgtg

SEQ ID NO: 5512762 - DNA, 25 bp, Homo sapien
ataaaatagcaagccccagtgggtt

SEQ ID NO: 5512763 - DNA, 25 bp, Homo sapien
agggaagaagtacagtttcagaaga

SEQ ID NO: 5512764 - DNA, 25 bp, Homo sapien
tggagtcatgaaatattgagaaccc

SEQ ID NO: 5512765 - DNA, 25 bp, Homo sapien
cacagagtcctaaataacagccacc

SEQ ID NO: 5512766 - DNA, 25 bp, Homo sapien
tcatgaaggcattgtgtaaatattc

SEQ ID NO: 5512767 - DNA, 25 bp, Homo sapien
ccagggccccagaatagctttttga

SEQ ID NO: 5512768 - DNA, 25 bp, Homo sapien
tctgaatttggtggaatgagacaac

SEQ ID NO: 5512769 - DNA, 25 bp, Homo sapien
gccaccctcctccgcggcaggtatc

SEQ ID NO: 5512770 - DNA, 25 bp, Homo sapien
tttctcaggcattaaaaacagcact

SEQ ID NO: 5512771 - DNA, 25 bp, Homo sapien
taagtctacccctaaagtgcatttc

SEQ ID NO: 5512772 - DNA, 25 bp, Homo sapien
ctccgcggcaggtatcttctcttac

SEQ ID NO: 5512773 - DNA, 25 bp, Homo sapien
tacagagttcaagctgagctgtgac

SEQ ID NO: 5512774 - DNA, 25 bp, Homo sapien
cttcatttgagaggctacagagttc

SEQ ID NO: 5512775 - DNA, 25 bp, Homo sapien
tgtagtggcataatttaaaagatcc

SEQ ID NO: 5512776 - DNA, 25 bp, Homo sapien
ctcctgatgctggtagagataaaac

SEQ ID NO: 5512777 - DNA, 25 bp, Homo sapien
atacccttaaagcagtgattcctcc

SEQ ID NO: 5512778 - DNA, 25 bp, Homo sapien
tcactgtaaatagaaggcactaggc

SEQ ID NO: 5512779 - DNA, 25 bp, Homo sapien
aagacaaatctaaaaatcacgcacc

SEQ ID NO: 5512780 - DNA, 25 bp, Homo sapien
agagataaactaggtatgatatggt

SEQ ID NO: 5512781 - DNA, 25 bp, Homo sapien
tcccaggttcccagtgcaaatttac

SEQ ID NO: 5512782 - DNA, 25 bp, Homo sapien
ctgtttagctgtgcaaaatagactt

SEQ ID NO: 5512783 - DNA, 25 bp, Homo sapien
aaatagacttgaaatgatacatcct

SEQ ID NO: 5512784 - DNA, 25 bp, Homo sapien
tagaaggcactaggcattacataat

SEQ ID NO: 5512785 - DNA, 25 bp, Homo sapien
tcacgcaccaaaaattatcagtcac

SEQ ID NO: 5512786 - DNA, 25 bp, Homo sapien
caagatactttcctgggcgagaatt

SEQ ID NO: 5512787 - DNA, 25 bp, Homo sapien
tggctgagtttaggggttacttcat

SEQ ID NO: 5512788 - DNA, 25 bp, Homo sapien
gcaagttcacactcagcaggtcgcc

SEQ ID NO: 5512789 - DNA, 25 bp, Homo sapien
taatccaagataaacaatgtcacat

SEQ ID NO: 5512790 - DNA, 25 bp, Homo sapien
tttcagataacctggagggaaatgt

SEQ ID NO: 5512791 - DNA, 25 bp, Homo sapien
agggattgcttgtttcgtgagtctc

SEQ ID NO: 5512792 - DNA, 25 bp, Homo sapien
agcaggtcgccagatgtattacatt

SEQ ID NO: 5512793 - DNA, 25 bp, Homo sapien
tgattaaaggtaagcattgaaattc

SEQ ID NO: 5512794 - DNA, 25 bp, Homo sapien
taccttatggatggcagagattgtc

SEQ ID NO: 5512795 - DNA, 25 bp, Homo sapien
ggcgagaatttagggattgcttgtt

SEQ ID NO: 5512796 - DNA, 25 bp, Homo sapien
gaaacaagattgtgagagttcagag

SEQ ID NO: 5512797 - DNA, 25 bp, Homo sapien
tcttaggctccaagggttgaaattc

SEQ ID NO: 5512798 - DNA, 25 bp, Homo sapien
aagaaaagcgaaaggattgttcttc

SEQ ID NO: 5512799 - DNA, 25 bp, Homo sapien
caataaaggtgtaaaaatgctatac

SEQ ID NO: 5512800 - DNA, 25 bp, Homo sapien
tttgctgtcaggaaaacaatctaca

SEQ ID NO: 5512801 - DNA, 25 bp, Homo sapien
ttcaagaaaacttcctgtgtgtatc

SEQ ID NO: 5512802 - DNA, 25 bp, Homo sapien
cttcctattaggaggtgggtttata

SEQ ID NO: 5512803 - DNA, 25 bp, Homo sapien
ctgactgtgaaaatgagcattattc

SEQ ID NO: 5512804 - DNA, 25 bp, Homo sapien
ctgtatcaaatagtacttggcttcc

SEQ ID NO: 5512805 - DNA, 25 bp, Homo sapien
gatagatcctgaattaggaaatgac

SEQ ID NO: 5512806 - DNA, 25 bp, Homo sapien
tgaaattcacaggacacagcttgga

SEQ ID NO: 5512807 - DNA, 25 bp, Homo sapien
gcagaagggactaaactctcacctc

SEQ ID NO: 5512808 - DNA, 25 bp, Homo sapien
cgacacccaactccagagtctgagg

SEQ ID NO: 5512809 - DNA, 25 bp, Homo sapien
tgagaacatggaaaatagagtttat

SEQ ID NO: 5512810 - DNA, 25 bp, Homo sapien
cttcgcctatgtctgctctgaaatc

SEQ ID NO: 5512811 - DNA, 25 bp, Homo sapien
attacagtgtttgaaacctaaagaa

SEQ ID NO: 5512812 - DNA, 25 bp, Homo sapien
tgaaatcaagctgtgtctgtctacc

SEQ ID NO: 5512813 - DNA, 25 bp, Homo sapien
aaatgaatttgcaaagaaaaaccag

SEQ ID NO: 5512814 - DNA, 25 bp, Homo sapien
tagattcatcttccaagggtccata

SEQ ID NO: 5512815 - DNA, 25 bp, Homo sapien
ggatatccagtctcttgagtggctg

SEQ ID NO: 5512816 - DNA, 25 bp, Homo sapien
taacatttgtctggactcagcacac

SEQ ID NO: 5512817 - DNA, 25 bp, Homo sapien
atttggatgtgtatataaataacat

SEQ ID NO: 5512818 - DNA, 25 bp, Homo sapien
tcttccaagggtccatagctggtaa

SEQ ID NO: 5512819 - DNA, 25 bp, Homo sapien
ccttgctctgggatctgcctcattc

SEQ ID NO: 5512820 - DNA, 25 bp, Homo sapien
ctcgcgtgtgtttctgtcaaccctc

SEQ ID NO: 5512821 - DNA, 25 bp, Homo sapien
atggcattatgaatcccagagggtg

SEQ ID NO: 5512822 - DNA, 25 bp, Homo sapien
aatcccagagggtgtaaccaatatg

SEQ ID NO: 5512823 - DNA, 25 bp, Homo sapien
cattaaggcaaaactgtaccctgaa

SEQ ID NO: 5512824 - DNA, 25 bp, Homo sapien
tcactagtagagcacatgtggagag

SEQ ID NO: 5512825 - DNA, 25 bp, Homo sapien
atcccaaacacagaagttcccatat

SEQ ID NO: 5512826 - DNA, 25 bp, Homo sapien
aatacatgtggtcagttcagtctcc

SEQ ID NO: 5512827 - DNA, 25 bp, Homo sapien
ctaataggaaaacgaagacccaaga

SEQ ID NO: 5512828 - DNA, 25 bp, Homo sapien
catcagtcttacagtaggacatccc

SEQ ID NO: 5512829 - DNA, 25 bp, Homo sapien
gggcctgtgtggcagttcctacttt

SEQ ID NO: 5512830 - DNA, 25 bp, Homo sapien
aatatgcagctggtaaagtgattgc

SEQ ID NO: 5512831 - DNA, 25 bp, Homo sapien
tacctatgtgggtgcaatatgcagc

SEQ ID NO: 5512832 - DNA, 25 bp, Homo sapien
gagatggctgagttcaaaaggctca

SEQ ID NO: 5512833 - DNA, 25 bp, Homo sapien
gaggggtaattctttgaggctgctt

SEQ ID NO: 5512834 - DNA, 25 bp, Homo sapien
tccaattgtgacaaccggaaatgtc

SEQ ID NO: 5512835 - DNA, 25 bp, Homo sapien
aaaatgaagagttacctatgtgggt

SEQ ID NO: 5512836 - DNA, 25 bp, Homo sapien
gaaagaatatatagagatggctgag

SEQ ID NO: 5512837 - DNA, 25 bp, Homo sapien
accggaaatgtctctaagaattgcc

SEQ ID NO: 5512838 - DNA, 25 bp, Homo sapien
gatctttacatcagggtttctcagc

SEQ ID NO: 5512839 - DNA, 25 bp, Homo sapien
agtttataactgggactgatcttta

SEQ ID NO: 5512840 - DNA, 25 bp, Homo sapien
ttcacccttgacttaaagcagcagt

SEQ ID NO: 5512841 - DNA, 25 bp, Homo sapien
aggtggtaaccccaacattcataac

SEQ ID NO: 5512842 - DNA, 25 bp, Homo sapien
aggacaggtactgactggcaacatt

SEQ ID NO: 5512843 - DNA, 25 bp, Homo sapien
tctagaaaagaagcttgtcatctgt

SEQ ID NO: 5512844 - DNA, 25 bp, Homo sapien
agacagaactagagtacctcggaac

SEQ ID NO: 5512845 - DNA, 25 bp, Homo sapien
caattttcccctaaatgcaggtggt

SEQ ID NO: 5512846 - DNA, 25 bp, Homo sapien
tcacagggagttaacactgatggac

SEQ ID NO: 5512847 - DNA, 25 bp, Homo sapien
actgatggactttagacacattttc

SEQ ID NO: 5512848 - DNA, 25 bp, Homo sapien
caggaaagcacagaacacaattttc

SEQ ID NO: 5512849 - DNA, 25 bp, Homo sapien
cttggttgaaagacagaactagagt

SEQ ID NO: 5512850 - DNA, 25 bp, Homo sapien
acctcggaacaagataccaggaaag

SEQ ID NO: 5512851 - DNA, 25 bp, Homo sapien
tctttcgtagagagctttcagcatt

SEQ ID NO: 5512852 - DNA, 25 bp, Homo sapien
ccagtacacataagaaaaggattta

SEQ ID NO: 5512853 - DNA, 25 bp, Homo sapien
aatgcactaatgaaaagggtaaggc

SEQ ID NO: 5512854 - DNA, 25 bp, Homo sapien
taaaagtagtaaaggcatataccaa

SEQ ID NO: 5512855 - DNA, 25 bp, Homo sapien
agctgctgagctctgtaacaactga

SEQ ID NO: 5512856 - DNA, 25 bp, Homo sapien
attgatagcatctcctgtggccttc

SEQ ID NO: 5512857 - DNA, 25 bp, Homo sapien
cagagtgtctgaattgatggaccac

SEQ ID NO: 5512858 - DNA, 25 bp, Homo sapien
agtcctaacacggtttgagtggaac

SEQ ID NO: 5512859 - DNA, 25 bp, Homo sapien
ttgggcaagtaataaactgtagaac

SEQ ID NO: 5512860 - DNA, 25 bp, Homo sapien
acacattgtcagaaaggcagtggac

SEQ ID NO: 5512861 - DNA, 25 bp, Homo sapien
agtggaacagctgagaaacagcata

SEQ ID NO: 5512862 - DNA, 25 bp, Homo sapien
ataccaagcatacgtgactccacac

SEQ ID NO: 5512863 - DNA, 25 bp, Homo sapien
cagtaagagttctaacgggcaactc

SEQ ID NO: 5512864 - DNA, 25 bp, Homo sapien
ggcaactcagcggcctccctctgtc

SEQ ID NO: 5512865 - DNA, 25 bp, Homo sapien
ttggagttcggaaaattagcacacg

SEQ ID NO: 5512866 - DNA, 25 bp, Homo sapien
agagattacagaaggtttggtccca

SEQ ID NO: 5512867 - DNA, 25 bp, Homo sapien
acacgcagtcacacaacacctcaca

SEQ ID NO: 5512868 - DNA, 25 bp, Homo sapien
cctgctcccacagctaggcaggcgg

SEQ ID NO: 5512869 - DNA, 25 bp, Homo sapien
ttgactccaggttccatccagctct

SEQ ID NO: 5512870 - DNA, 25 bp, Homo sapien
gtttattgggtgcccaccgctggct

SEQ ID NO: 5512871 - DNA, 25 bp, Homo sapien
agtcccatggaacggtccagaaaac

SEQ ID NO: 5512872 - DNA, 25 bp, Homo sapien
gctgggactcataggttcgagcaga

SEQ ID NO: 5512873 - DNA, 25 bp, Homo sapien
agagtccactgagcccattcacaac

SEQ ID NO: 5512874 - DNA, 25 bp, Homo sapien
aaggagagcatgttctgcccacata

SEQ ID NO: 5512875 - DNA, 25 bp, Homo sapien
gctttgttccctgtggacgcagctc

SEQ ID NO: 5512876 - DNA, 25 bp, Homo sapien
gcaaagctaaggagtgaaagcattt

SEQ ID NO: 5512877 - DNA, 25 bp, Homo sapien
agcaggctgctcccaagtacagatt

SEQ ID NO: 5512878 - DNA, 25 bp, Homo sapien
gacagtggacttgagcatcctggca

SEQ ID NO: 5512879 - DNA, 25 bp, Homo sapien
cagatttggtagaactggaaaggga

SEQ ID NO: 5512880 - DNA, 25 bp, Homo sapien
tttctgaaagggattgtgacagtgg

SEQ ID NO: 5512881 - DNA, 25 bp, Homo sapien
cccacatagagcactccagggagga

SEQ ID NO: 5512882 - DNA, 25 bp, Homo sapien
ttgtagaaagatacttcagaggccc

SEQ ID NO: 5512883 - DNA, 25 bp, Homo sapien
gtagtggagcttgtctgcgtttgta

SEQ ID NO: 5512884 - DNA, 25 bp, Homo sapien
caggccatagagaagacaccttcca

SEQ ID NO: 5512885 - DNA, 25 bp, Homo sapien
tgttttacagggacaccgattacaa

SEQ ID NO: 5512886 - DNA, 25 bp, Homo sapien
aggagacctctgaacagctatagcc

SEQ ID NO: 5512887 - DNA, 25 bp, Homo sapien
tctttgcaaagactcgacacactgt

SEQ ID NO: 5512888 - DNA, 25 bp, Homo sapien
actattactagtgatgcagggtgct

SEQ ID NO: 5512889 - DNA, 25 bp, Homo sapien
ataaacctggcccttacgtagagaa

SEQ ID NO: 5512890 - DNA, 25 bp, Homo sapien
ctgaaagtaatctgtggggattgtt

SEQ ID NO: 5512891 - DNA, 25 bp, Homo sapien
gctaaatgatatggcaaaataaccc

SEQ ID NO: 5512892 - DNA, 25 bp, Homo sapien
ttttaaagacagccatgtggagcat

SEQ ID NO: 5512893 - DNA, 25 bp, Homo sapien
gtttcaagaaccaacatgtgcaagc

SEQ ID NO: 5512894 - DNA, 25 bp, Homo sapien
catgtggagcatctgtgaaaaccag

SEQ ID NO: 5512895 - DNA, 25 bp, Homo sapien
gcttccaagcataacaaagaggaca

SEQ ID NO: 5512896 - DNA, 25 bp, Homo sapien
ctctgccccataatgaggcacccct

SEQ ID NO: 5512897 - DNA, 25 bp, Homo sapien
aaacaaaaggccttctgcagctagg

SEQ ID NO: 5512898 - DNA, 25 bp, Homo sapien
cttctgcagctaggacaagcaatca

SEQ ID NO: 5512899 - DNA, 25 bp, Homo sapien
aatgcttagaaccaagattcagatc

SEQ ID NO: 5512900 - DNA, 25 bp, Homo sapien
attaggatctggaaataaaactgcc

SEQ ID NO: 5512901 - DNA, 25 bp, Homo sapien
gtagagacataaaagatatacattt

SEQ ID NO: 5512902 - DNA, 25 bp, Homo sapien
taaaactgccctaatcaaggtaatc

SEQ ID NO: 5512903 - DNA, 25 bp, Homo sapien
tgagcttgctacaccaagaggctac

SEQ ID NO: 5512904 - DNA, 25 bp, Homo sapien
gaggctacagtgacatgtgtgacaa

SEQ ID NO: 5512905 - DNA, 25 bp, Homo sapien
aaatatggtctgagtagagacataa

SEQ ID NO: 5512906 - DNA, 25 bp, Homo sapien
tagaaacagtcaaactatgaacacc

SEQ ID NO: 5512907 - DNA, 25 bp, Homo sapien
agaggtgactaacaggctctgagtg

SEQ ID NO: 5512908 - DNA, 25 bp, Homo sapien
caggcagggttttggtgtcaatttt

SEQ ID NO: 5512909 - DNA, 25 bp, Homo sapien
tccattacaatgcaggcagggtttt

SEQ ID NO: 5512910 - DNA, 25 bp, Homo sapien
ggcgtcttggctactggatgtaaac

SEQ ID NO: 5512911 - DNA, 25 bp, Homo sapien
gctggaaaactgtgggtgtcctttg

SEQ ID NO: 5512912 - DNA, 25 bp, Homo sapien
gtgacagcctctgcccaagactggc

SEQ ID NO: 5512913 - DNA, 25 bp, Homo sapien
ggaggatctagacacttgatgattc

SEQ ID NO: 5512914 - DNA, 25 bp, Homo sapien
ctttggataaagcatacaggagtta

SEQ ID NO: 5512915 - DNA, 25 bp, Homo sapien
gtccagagtgagaattagaacatac

SEQ ID NO: 5512916 - DNA, 25 bp, Homo sapien
agactggctcactgaggcgtcttgg

SEQ ID NO: 5512917 - DNA, 25 bp, Homo sapien
ttctcagtgaccagatccaggctca

SEQ ID NO: 5512918 - DNA, 25 bp, Homo sapien
tggaaatatgagtcggcttgtagta

SEQ ID NO: 5512919 - DNA, 25 bp, Homo sapien
atgtcaactactgcaatgtcaaacc

SEQ ID NO: 5512920 - DNA, 25 bp, Homo sapien
tacacatctgtagtttgaggttcca

SEQ ID NO: 5512921 - DNA, 25 bp, Homo sapien
aacaaaggaagcatcttcagtgatt

SEQ ID NO: 5512922 - DNA, 25 bp, Homo sapien
aacttgaagttcttggaaaacagcc

SEQ ID NO: 5512923 - DNA, 25 bp, Homo sapien
taaaaatatagtcagggagaaggaa

SEQ ID NO: 5512924 - DNA, 25 bp, Homo sapien
ggttataggtttggaaatatgagtc

SEQ ID NO: 5512925 - DNA, 25 bp, Homo sapien
ccttcatgcagaacaagtctttagc

SEQ ID NO: 5512926 - DNA, 25 bp, Homo sapien
tacacaggagatcagcaattggtta

SEQ ID NO: 5512927 - DNA, 25 bp, Homo sapien
ctcagagaatcataaatacagaata

SEQ ID NO: 5512928 - DNA, 25 bp, Homo sapien
atacaaaagcatttctcagagaatc

SEQ ID NO: 5512929 - DNA, 25 bp, Homo sapien
tcaacttggaccctaagaatgaact

SEQ ID NO: 5512930 - DNA, 25 bp, Homo sapien
aaaacaatcatatggcaaaggcctc

SEQ ID NO: 5512931 - DNA, 25 bp, Homo sapien
tcatgagccatgagtgtcacttttt

SEQ ID NO: 5512932 - DNA, 25 bp, Homo sapien
tatctgaaggcaaatatcaagccat

SEQ ID NO: 5512933 - DNA, 25 bp, Homo sapien
ttcgaatgtagttagtggtgttcac

SEQ ID NO: 5512934 - DNA, 25 bp, Homo sapien
ctgaatgcccaatcaacaggaaaga

SEQ ID NO: 5512935 - DNA, 25 bp, Homo sapien
acagttacagggcaagcaaacattt

SEQ ID NO: 5512936 - DNA, 25 bp, Homo sapien
tggaattggagaggcttttcgaatg

SEQ ID NO: 5512937 - DNA, 25 bp, Homo sapien
atagctcacagactggccacttgtt

SEQ ID NO: 5512938 - DNA, 25 bp, Homo sapien
tatagacttggaatgtggaattgga

SEQ ID NO: 5512939 - DNA, 25 bp, Homo sapien
tctagaccaggtgttgggaactata

SEQ ID NO: 5512940 - DNA, 25 bp, Homo sapien
cgggagacagtaataaatacgtgcc

SEQ ID NO: 5512941 - DNA, 25 bp, Homo sapien
agcgtctgccttcgggctgtcagta

SEQ ID NO: 5512942 - DNA, 25 bp, Homo sapien
gggcagcagaaatgccactgagcta

SEQ ID NO: 5512943 - DNA, 25 bp, Homo sapien
tttaccagcgaaaggactgaacaga

SEQ ID NO: 5512944 - DNA, 25 bp, Homo sapien
gacattctgcccagagcaacggagg

SEQ ID NO: 5512945 - DNA, 25 bp, Homo sapien
aatggcctggcactagtggtaattc

SEQ ID NO: 5512946 - DNA, 25 bp, Homo sapien
gtggtaattccagcagacaaacagc

SEQ ID NO: 5512947 - DNA, 25 bp, Homo sapien
attttttatgtgcaggagagagtac

SEQ ID NO: 5512948 - DNA, 25 bp, Homo sapien
acctgtatacgaaggatagtcctgg

SEQ ID NO: 5512949 - DNA, 25 bp, Homo sapien
tactgaacagaaagaccttgggtga

SEQ ID NO: 5512950 - DNA, 25 bp, Homo sapien
gagagagtacaaaccaacatgcaac

SEQ ID NO: 5512951 - DNA, 25 bp, Homo sapien
agccacacaaatgccccgagtgcag

SEQ ID NO: 5512952 - DNA, 25 bp, Homo sapien
actcgtagatggagatttgggaaaa

SEQ ID NO: 5512953 - DNA, 25 bp, Homo sapien
ctcgctgtcacagcatcagcgggcc

SEQ ID NO: 5512954 - DNA, 25 bp, Homo sapien
gtccaatctcaacgtgcatcggcgc

SEQ ID NO: 5512955 - DNA, 25 bp, Homo sapien
gtcgcctccaagcttgcactgcacc

SEQ ID NO: 5512956 - DNA, 25 bp, Homo sapien
gttggcagcccttcacgtagcctcc

SEQ ID NO: 5512957 - DNA, 25 bp, Homo sapien
gggacagttgaggcaactcgtagat

SEQ ID NO: 5512958 - DNA, 25 bp, Homo sapien
aaggtggttgggcaagcacctatat

SEQ ID NO: 5512959 - DNA, 25 bp, Homo sapien
ccgttgccatccagtccgcagtggg

SEQ ID NO: 5512960 - DNA, 25 bp, Homo sapien
ggaggcttgctgaggcttctctaaa

SEQ ID NO: 5512961 - DNA, 25 bp, Homo sapien
ctatatagtatcacggggacagttg

SEQ ID NO: 5512962 - DNA, 25 bp, Homo sapien
gtatgtcagagcgctgtgagtaaca

SEQ ID NO: 5512963 - DNA, 25 bp, Homo sapien
aaatagcgagaatactgacagtcac

SEQ ID NO: 5512964 - DNA, 25 bp, Homo sapien
taataaattgtgccagtagaagctt

SEQ ID NO: 5512965 - DNA, 25 bp, Homo sapien
aatgtaaaccagtacacaggaatct

SEQ ID NO: 5512966 - DNA, 25 bp, Homo sapien
aatactgacagtcacgacgacaggc

SEQ ID NO: 5512967 - DNA, 25 bp, Homo sapien
accacatgaaagtatgtcagagcgc

SEQ ID NO: 5512968 - DNA, 25 bp, Homo sapien
tcaaggaaaaatatgtggaataata

SEQ ID NO: 5512969 - DNA, 25 bp, Homo sapien
ctgtgagtaacaacatggcacgact

SEQ ID NO: 5512970 - DNA, 25 bp, Homo sapien
tggcacgactataaaatagcgagaa

SEQ ID NO: 5512971 - DNA, 25 bp, Homo sapien
tcctgagaaagaacctaccacatga

SEQ ID NO: 5512972 - DNA, 25 bp, Homo sapien
cagcagacttgagtatgccactcac

SEQ ID NO: 5512973 - DNA, 25 bp, Homo sapien
gcaccccaagactctaacagggcag

SEQ ID NO: 5512974 - DNA, 25 bp, Homo sapien
ggctgtgctctctatggggaaatct

SEQ ID NO: 5512975 - DNA, 25 bp, Homo sapien
ccacttggtgtcaatgaagtccacc

SEQ ID NO: 5512976 - DNA, 25 bp, Homo sapien
cagataataagaaaaagcgtggtat

SEQ ID NO: 5512977 - DNA, 25 bp, Homo sapien
agcacctgaaagcctatgagctctc

SEQ ID NO: 5512978 - DNA, 25 bp, Homo sapien
actgaagtgtgtgataaaaagcatc

SEQ ID NO: 5512979 - DNA, 25 bp, Homo sapien
ccaaccttactaatggaggctgtgc

SEQ ID NO: 5512980 - DNA, 25 bp, Homo sapien
ttcccaacgacagaaccaccatatc

SEQ ID NO: 5512981 - DNA, 25 bp, Homo sapien
ccctgccactggtgtcaatgtgacc

SEQ ID NO: 5512982 - DNA, 25 bp, Homo sapien
aacagggcagatctcaattagcacc

SEQ ID NO: 5512983 - DNA, 25 bp, Homo sapien
acaaatcttggcatgggaaaatatc

SEQ ID NO: 5512984 - DNA, 25 bp, Homo sapien
atttggtaacatgagaatagctttc

SEQ ID NO: 5512985 - DNA, 25 bp, Homo sapien
gtacaaatacaggaaaaggtgaaga

SEQ ID NO: 5512986 - DNA, 25 bp, Homo sapien
acagattctgtattggaagatagtc

SEQ ID NO: 5512987 - DNA, 25 bp, Homo sapien
gcaaagtgacctgaaaaatgccacc

SEQ ID NO: 5512988 - DNA, 25 bp, Homo sapien
tggaaatatgacagaaacaatgcac

SEQ ID NO: 5512989 - DNA, 25 bp, Homo sapien
gaagatagtctctgcaggttgggaa

SEQ ID NO: 5512990 - DNA, 25 bp, Homo sapien
aaacacaagcataaatagacagatt

SEQ ID NO: 5512991 - DNA, 25 bp, Homo sapien
ctcaaatgagcaccaacacagattg

SEQ ID NO: 5512992 - DNA, 25 bp, Homo sapien
aagggaaccgactcccactgtcacc

SEQ ID NO: 5512993 - DNA, 25 bp, Homo sapien
tgttatagaagcaaagtgacctgaa

SEQ ID NO: 5512994 - DNA, 25 bp, Homo sapien
atatgcgcagatagaatttggtaac

SEQ ID NO: 5512995 - DNA, 25 bp, Homo sapien
aaaaatcaaatgaagtatgtcactt

SEQ ID NO: 5512996 - DNA, 25 bp, Homo sapien
gcctgaggttcactgcacattcttg

SEQ ID NO: 5512997 - DNA, 25 bp, Homo sapien
tagcacagttcaagtgcctggaaac

SEQ ID NO: 5512998 - DNA, 25 bp, Homo sapien
acttgccagtcagtaccaatgagtc

SEQ ID NO: 5512999 - DNA, 25 bp, Homo sapien
ttgataggaagtttaaaacacacat

SEQ ID NO: 5513000 - DNA, 25 bp, Homo sapien
taaatatcagagttgtcttgggtta

SEQ ID NO: 5513001 - DNA, 25 bp, Homo sapien
tgaaaaaacatatccaaagtaactc

SEQ ID NO: 5513002 - DNA, 25 bp, Homo sapien
acttttgagatatacagctgttggc

SEQ ID NO: 5513003 - DNA, 25 bp, Homo sapien
cttggtgtgttaggtatttactcgt

SEQ ID NO: 5513004 - DNA, 25 bp, Homo sapien
ctgttggcttgttttgggaccacac

SEQ ID NO: 5513005 - DNA, 25 bp, Homo sapien
ctttaaagcagaatacttgccagtc

SEQ ID NO: 5513006 - DNA, 25 bp, Homo sapien
cagaataatgctgatggcaagccat

SEQ ID NO: 5513007 - DNA, 25 bp, Homo sapien
tccacctgttgataaccaaggcttt

SEQ ID NO: 5513008 - DNA, 25 bp, Homo sapien
acaaagtggacaactcctgagcctt

SEQ ID NO: 5513009 - DNA, 25 bp, Homo sapien
aatgctgactgtaatttggggaagg

SEQ ID NO: 5513010 - DNA, 25 bp, Homo sapien
tggatttcaacaaagtggacaactc

SEQ ID NO: 5513011 - DNA, 25 bp, Homo sapien
tatcacatcaactgggcatatgcaa

SEQ ID NO: 5513012 - DNA, 25 bp, Homo sapien
gaactgaaccctcggaccagaatac

SEQ ID NO: 5513013 - DNA, 25 bp, Homo sapien
catcttgactaaaggaactgaaccc

SEQ ID NO: 5513014 - DNA, 25 bp, Homo sapien
taacactaacaagcctaccagaata

SEQ ID NO: 5513015 - DNA, 25 bp, Homo sapien
ggcatatgcaaaaacaacggataat

SEQ ID NO: 5513016 - DNA, 25 bp, Homo sapien
caaggctttatatggcaagacaatg

SEQ ID NO: 5513017 - DNA, 25 bp, Homo sapien
aagctaacaggatcatttctacatt

SEQ ID NO: 5513018 - DNA, 25 bp, Homo sapien
caagctaggaagatatcaaaatatt

SEQ ID NO: 5513019 - DNA, 25 bp, Homo sapien
agtcctattggctgtcactgtcaca

SEQ ID NO: 5513020 - DNA, 25 bp, Homo sapien
actgtcacagatctgaagatatgtt

SEQ ID NO: 5513021 - DNA, 25 bp, Homo sapien
tgtagtaagaaaggtaatttgagaa

SEQ ID NO: 5513022 - DNA, 25 bp, Homo sapien
ccaaagatgttctcgctagccatta

SEQ ID NO: 5513023 - DNA, 25 bp, Homo sapien
tgcaaacagtgtagtaagaaaggta

SEQ ID NO: 5513024 - DNA, 25 bp, Homo sapien
aaattcatcaagctaggaagatatc

SEQ ID NO: 5513025 - DNA, 25 bp, Homo sapien
ccctggatattattggtttgaagct

SEQ ID NO: 5513026 - DNA, 25 bp, Homo sapien
tcttcaagtatagtgagaaaaaaac

SEQ ID NO: 5513027 - DNA, 25 bp, Homo sapien
ttccatgggtaaaacactctgcctg

SEQ ID NO: 5513028 - DNA, 25 bp, Homo sapien
gttgcccacagacagacttgacctt

SEQ ID NO: 5513029 - DNA, 25 bp, Homo sapien
tgttgcctgacacagggcctttaac

SEQ ID NO: 5513030 - DNA, 25 bp, Homo sapien
gaggcagtgctgtctcgctcagtct

SEQ ID NO: 5513031 - DNA, 25 bp, Homo sapien
ggggatggactccatgcacagtcca

SEQ ID NO: 5513032 - DNA, 25 bp, Homo sapien
gtggcacatggaacttcacgggtca

SEQ ID NO: 5513033 - DNA, 25 bp, Homo sapien
agggtcatcgatgcatcctgggctg

SEQ ID NO: 5513034 - DNA, 25 bp, Homo sapien
gattaagcgggttctgtgcgatttt

SEQ ID NO: 5513035 - DNA, 25 bp, Homo sapien
gccagaactgtccagagctgtgagt

SEQ ID NO: 5513036 - DNA, 25 bp, Homo sapien
gacttgacctttgtgccagaactgt

SEQ ID NO: 5513037 - DNA, 25 bp, Homo sapien
gacggaccctgttgcctgctcctgg

SEQ ID NO: 5513038 - DNA, 25 bp, Homo sapien
actgtggctggagacccattttttc

SEQ ID NO: 5513039 - DNA, 25 bp, Homo sapien
aactagccactattggacaagtagc

SEQ ID NO: 5513040 - DNA, 25 bp, Homo sapien
ggagacaggattcagaagatcactt

SEQ ID NO: 5513041 - DNA, 25 bp, Homo sapien
tctgggtaaactctagatactagta

SEQ ID NO: 5513042 - DNA, 25 bp, Homo sapien
tgtgagtgagaggtactatctcgaa

SEQ ID NO: 5513043 - DNA, 25 bp, Homo sapien
agtataaacttaaggcacagtgaat

SEQ ID NO: 5513044 - DNA, 25 bp, Homo sapien
gaaaaggtcaggttagcatgtttta

SEQ ID NO: 5513045 - DNA, 25 bp, Homo sapien
agcactaagttataaagggtttaca

SEQ ID NO: 5513046 - DNA, 25 bp, Homo sapien
tacacccatgaataaaaagattacc

SEQ ID NO: 5513047 - DNA, 25 bp, Homo sapien
actagtacctctagggagacaggat

SEQ ID NO: 5513048 - DNA, 25 bp, Homo sapien
tggtaaactataattcatgggacat

SEQ ID NO: 5513049 - DNA, 25 bp, Homo sapien
tggacaagtagcaaaagtaaaattc

SEQ ID NO: 5513050 - DNA, 25 bp, Homo sapien
tcatagactgagaacctgagcatgc

SEQ ID NO: 5513051 - DNA, 25 bp, Homo sapien
ttctgagaaatgcagatgagaggag

SEQ ID NO: 5513052 - DNA, 25 bp, Homo sapien
ggccaccctgagccccaaaccacat

SEQ ID NO: 5513053 - DNA, 25 bp, Homo sapien
agtagccaaaatgatcctgcaccaa

SEQ ID NO: 5513054 - DNA, 25 bp, Homo sapien
ggtgaagggatgtctgctttgtaaa

SEQ ID NO: 5513055 - DNA, 25 bp, Homo sapien
ttccagcaagggttagcattgttac

SEQ ID NO: 5513056 - DNA, 25 bp, Homo sapien
ctgcagacaatggtcatccacagac

SEQ ID NO: 5513057 - DNA, 25 bp, Homo sapien
accacacgtgtggtggctttggcaa

SEQ ID NO: 5513058 - DNA, 25 bp, Homo sapien
ctgggctccaggtagaactccatag

SEQ ID NO: 5513059 - DNA, 25 bp, Homo sapien
gctgtgtcaaaacccagggcaaggg

SEQ ID NO: 5513060 - DNA, 25 bp, Homo sapien
aggctgtgagcacaggctgtgtcaa

SEQ ID NO: 5513061 - DNA, 25 bp, Homo sapien
agttaggcacacagttgacacttac

SEQ ID NO: 5513062 - DNA, 25 bp, Homo sapien
atgcagcaacaacggaatgtaagtt

SEQ ID NO: 5513063 - DNA, 25 bp, Homo sapien
cccttgtaatacaggagccatgctc

SEQ ID NO: 5513064 - DNA, 25 bp, Homo sapien
aagaaagaaagtattgatagaacag

SEQ ID NO: 5513065 - DNA, 25 bp, Homo sapien
taagaagacagtttaagctacatct

SEQ ID NO: 5513066 - DNA, 25 bp, Homo sapien
aagaattttccaaggagtgacaaaa

SEQ ID NO: 5513067 - DNA, 25 bp, Homo sapien
tctggtagcacttaactgattgatt

SEQ ID NO: 5513068 - DNA, 25 bp, Homo sapien
aattggtacactttctggtagcact

SEQ ID NO: 5513069 - DNA, 25 bp, Homo sapien
atgtaagttgttggattaagaagac

SEQ ID NO: 5513070 - DNA, 25 bp, Homo sapien
aataaaaggatgcagcaacaacgga

SEQ ID NO: 5513071 - DNA, 25 bp, Homo sapien
tgatagaacagttaggcacacagtt

SEQ ID NO: 5513072 - DNA, 25 bp, Homo sapien
ccaccttccttgaggccagggtagg

SEQ ID NO: 5513073 - DNA, 25 bp, Homo sapien
gattccagtgtgtcaagaggagtgg

SEQ ID NO: 5513074 - DNA, 25 bp, Homo sapien
ggtgggctccggcccctagtctcat

SEQ ID NO: 5513075 - DNA, 25 bp, Homo sapien
tcagcttgcaaaataggagtgtttc

SEQ ID NO: 5513076 - DNA, 25 bp, Homo sapien
accttccatgccaagatgaaggcca

SEQ ID NO: 5513077 - DNA, 25 bp, Homo sapien
gaaggccaaataagtcaaagtgagg

SEQ ID NO: 5513078 - DNA, 25 bp, Homo sapien
aacaacaaaaccagacaaccatcat

SEQ ID NO: 5513079 - DNA, 25 bp, Homo sapien
gtgaggactttgaaatgcagaagat

SEQ ID NO: 5513080 - DNA, 25 bp, Homo sapien
agtctcatgggatagagagcttgtc

SEQ ID NO: 5513081 - DNA, 25 bp, Homo sapien
tgaagggagagcttctctgctgtga

SEQ ID NO: 5513082 - DNA, 25 bp, Homo sapien
ctgcccttacacacgcaagaatatc

SEQ ID NO: 5513083 - DNA, 25 bp, Homo sapien
tgggagatataaacatgcagtaagc

SEQ ID NO: 5513084 - DNA, 25 bp, Homo sapien
agggcatggacagcctaacaagaaa

SEQ ID NO: 5513085 - DNA, 25 bp, Homo sapien
acccatccttagggcatggacagcc

SEQ ID NO: 5513086 - DNA, 25 bp, Homo sapien
ttggatgaaactgcgtgatgccaca

SEQ ID NO: 5513087 - DNA, 25 bp, Homo sapien
gcaaggataaacaggaacccatcct

SEQ ID NO: 5513088 - DNA, 25 bp, Homo sapien
ataactgggcaggatttgaatttac

SEQ ID NO: 5513089 - DNA, 25 bp, Homo sapien
ggtttagttggacaaaagatcactc

SEQ ID NO: 5513090 - DNA, 25 bp, Homo sapien
gtagggctcctacctggaattctcc

SEQ ID NO: 5513091 - DNA, 25 bp, Homo sapien
caagctttgtgtgtgaccaagatac

SEQ ID NO: 5513092 - DNA, 25 bp, Homo sapien
ctaggatcacctaaagtagggctcc

SEQ ID NO: 5513093 - DNA, 25 bp, Homo sapien
tgttacaaaagaaagtggatgcttc

SEQ ID NO: 5513094 - DNA, 25 bp, Homo sapien
cagaaaagttaaagccttcagtggg

SEQ ID NO: 5513095 - DNA, 25 bp, Homo sapien
ttccattaaaggtaggcacaactct

SEQ ID NO: 5513096 - DNA, 25 bp, Homo sapien
tagactccaagattgcaggcgtgaa

SEQ ID NO: 5513097 - DNA, 25 bp, Homo sapien
agaaacacatggacatacttgggtt

SEQ ID NO: 5513098 - DNA, 25 bp, Homo sapien
agagacaaggcaacctagactccaa

SEQ ID NO: 5513099 - DNA, 25 bp, Homo sapien
tgtaaagttaagtagccgaaaatgc

SEQ ID NO: 5513100 - DNA, 25 bp, Homo sapien
aggaatgctagaagtagttctcctc

SEQ ID NO: 5513101 - DNA, 25 bp, Homo sapien
aaagtgaaatgtgacaaacactcac

SEQ ID NO: 5513102 - DNA, 25 bp, Homo sapien
taagaggaatgtaaagttaagtagc

SEQ ID NO: 5513103 - DNA, 25 bp, Homo sapien
caggcgtgaaaaaactagtaccaga

SEQ ID NO: 5513104 - DNA, 25 bp, Homo sapien
cagtgggaaaaccatggtaaatgac

SEQ ID NO: 5513105 - DNA, 25 bp, Homo sapien
ttcctgaaggtggtcattgagtcaa

SEQ ID NO: 5513106 - DNA, 25 bp, Homo sapien
tacggatctcacatacggaataatc

SEQ ID NO: 5513107 - DNA, 25 bp, Homo sapien
atgaaatgctgatacggatctcaca

SEQ ID NO: 5513108 - DNA, 25 bp, Homo sapien
tcctcacaggtgtaactcaggttaa

SEQ ID NO: 5513109 - DNA, 25 bp, Homo sapien
agaacaaacccaggtaatgaaatgc

SEQ ID NO: 5513110 - DNA, 25 bp, Homo sapien
gttgaactgggaattgaaatgtttc

SEQ ID NO: 5513111 - DNA, 25 bp, Homo sapien
aggttaatgtgctgctgtctgctta

SEQ ID NO: 5513112 - DNA, 25 bp, Homo sapien
gctactagcacaaaaatatggcttt

SEQ ID NO: 5513113 - DNA, 25 bp, Homo sapien
cactcttattaaggccctggagatg

SEQ ID NO: 5513114 - DNA, 25 bp, Homo sapien
tgtacatgtacaagaactgtcaaaa

SEQ ID NO: 5513115 - DNA, 25 bp, Homo sapien
ttgtaaaatagtcgtgtgttaacac

SEQ ID NO: 5513116 - DNA, 25 bp, Homo sapien
gaatccaatgtgataaaccaatgat

SEQ ID NO: 5513117 - DNA, 25 bp, Homo sapien
tgtaagacaacattatagaagtata

SEQ ID NO: 5513118 - DNA, 25 bp, Homo sapien
ttagaaaccaagtacacatatcctc

SEQ ID NO: 5513119 - DNA, 25 bp, Homo sapien
atcaaaaaaggaacctgaatttgaa

SEQ ID NO: 5513120 - DNA, 25 bp, Homo sapien
caatgattaaggtactggtgggtag

SEQ ID NO: 5513121 - DNA, 25 bp, Homo sapien
cttaacacattgaaacagtacagta

SEQ ID NO: 5513122 - DNA, 25 bp, Homo sapien
aaaatcacaagcatggaaaacaaat

SEQ ID NO: 5513123 - DNA, 25 bp, Homo sapien
atcacaatagcatacagtagatatc

SEQ ID NO: 5513124 - DNA, 25 bp, Homo sapien
taggtaaatacaaagtataggctct

SEQ ID NO: 5513125 - DNA, 25 bp, Homo sapien
tgtcaggaaaataatgaatctagac

SEQ ID NO: 5513126 - DNA, 25 bp, Homo sapien
gaaaaaagagcttctgaaatttaca

SEQ ID NO: 5513127 - DNA, 25 bp, Homo sapien
tgaaatggcaaaatcggtttaccta

SEQ ID NO: 5513128 - DNA, 25 bp, Homo sapien
atcaaactttaattggggagccaga

SEQ ID NO: 5513129 - DNA, 25 bp, Homo sapien
aaggcaaatctgatagttattgtca

SEQ ID NO: 5513130 - DNA, 25 bp, Homo sapien
gaggatacgttttgataaatgctat

SEQ ID NO: 5513131 - DNA, 25 bp, Homo sapien
atcacaggtacactaacaaacactt

SEQ ID NO: 5513132 - DNA, 25 bp, Homo sapien
ataaagtctatgaggatacgttttg

SEQ ID NO: 5513133 - DNA, 25 bp, Homo sapien
aatcggtttacctagcctgaattgc

SEQ ID NO: 5513134 - DNA, 25 bp, Homo sapien
tagtaaaaaacataacacatttctc

SEQ ID NO: 5513135 - DNA, 25 bp, Homo sapien
tttgcagcaggttttataagactct

SEQ ID NO: 5513136 - DNA, 25 bp, Homo sapien
agtgaagtactataatcacaggtac

SEQ ID NO: 5513137 - DNA, 25 bp, Homo sapien
ggggagccagataatattgcctttt

SEQ ID NO: 5513138 - DNA, 25 bp, Homo sapien
cacgtaaagcgcatctcactccgga

SEQ ID NO: 5513139 - DNA, 25 bp, Homo sapien
gactagccaggtttcaagcacgtga

SEQ ID NO: 5513140 - DNA, 25 bp, Homo sapien
tctcactccggactagccaggtttc

SEQ ID NO: 5513141 - DNA, 25 bp, Homo sapien
cgaatacgctccgcggttatgcccc

SEQ ID NO: 5513142 - DNA, 25 bp, Homo sapien
aagcacgtgatagccgcacaaggct

SEQ ID NO: 5513143 - DNA, 25 bp, Homo sapien
gatcgtcactcagtgccgggtgacc

SEQ ID NO: 5513144 - DNA, 25 bp, Homo sapien
gggtatggtgtgtctggcttccctc

SEQ ID NO: 5513145 - DNA, 25 bp, Homo sapien
tcttgtcctcggtgctcaaaccatt

SEQ ID NO: 5513146 - DNA, 25 bp, Homo sapien
gctcaagagaaatcggaatcagaca

SEQ ID NO: 5513147 - DNA, 25 bp, Homo sapien
ccgaaacgcgctcaagagaaatcgg

SEQ ID NO: 5513148 - DNA, 25 bp, Homo sapien
cccctcacctcactgcactgcaaat

SEQ ID NO: 5513149 - DNA, 25 bp, Homo sapien
agttttatgtggttgcagtggttac

SEQ ID NO: 5513150 - DNA, 25 bp, Homo sapien
gtggttgcagtggttacacgaatct

SEQ ID NO: 5513151 - DNA, 25 bp, Homo sapien
aaccttaggagtaatttgctgagtg

SEQ ID NO: 5513152 - DNA, 25 bp, Homo sapien
ttatactgataggagaaaagtggtt

SEQ ID NO: 5513153 - DNA, 25 bp, Homo sapien
ccaggaaaacagtgcaaatatatct

SEQ ID NO: 5513154 - DNA, 25 bp, Homo sapien
gtttggatggagtgtaagcataaaa

SEQ ID NO: 5513155 - DNA, 25 bp, Homo sapien
aaacatgtaaaaattcgtcaaatcc

SEQ ID NO: 5513156 - DNA, 25 bp, Homo sapien
aaatatatctcataggtgaatggat

SEQ ID NO: 5513157 - DNA, 25 bp, Homo sapien
gagtgtaagcataaaaaggtagcat

SEQ ID NO: 5513158 - DNA, 25 bp, Homo sapien
tgaatggataaactactacatcaaa

SEQ ID NO: 5513159 - DNA, 25 bp, Homo sapien
gtagcatgagggactttgtgttcat

SEQ ID NO: 5513160 - DNA, 25 bp, Homo sapien
ctgatagcattcacagagcaggaga

SEQ ID NO: 5513161 - DNA, 25 bp, Homo sapien
tggaagcaattgaatgtgtaaactc

SEQ ID NO: 5513162 - DNA, 25 bp, Homo sapien
ctgcatacctgactcctgggctgcc

SEQ ID NO: 5513163 - DNA, 25 bp, Homo sapien
cagaatgatgagttggctaaaattt

SEQ ID NO: 5513164 - DNA, 25 bp, Homo sapien
gcccactgaaagtctcacgtgtgcc

SEQ ID NO: 5513165 - DNA, 25 bp, Homo sapien
gtgtttgaagtggacaggtcattgc

SEQ ID NO: 5513166 - DNA, 25 bp, Homo sapien
gtgcttcggaagaacgtacatagac

SEQ ID NO: 5513167 - DNA, 25 bp, Homo sapien
tgctacccctgttggagaagctatg

SEQ ID NO: 5513168 - DNA, 25 bp, Homo sapien
gagcagacactgacaatgcaatgcc

SEQ ID NO: 5513169 - DNA, 25 bp, Homo sapien
gagcaggagattcacccttggaagc

SEQ ID NO: 5513170 - DNA, 25 bp, Homo sapien
gtacatagacccagcccaaggttgg

SEQ ID NO: 5513171 - DNA, 25 bp, Homo sapien
aggatggtcctggccctccctaaac

SEQ ID NO: 5513172 - DNA, 25 bp, Homo sapien
ccctccaaaagccatgatcttgccc

SEQ ID NO: 5513173 - DNA, 25 bp, Homo sapien
cttggcagtgattgctgctagggca

SEQ ID NO: 5513174 - DNA, 25 bp, Homo sapien
gaggaatgaaggagtgactcctctg

SEQ ID NO: 5513175 - DNA, 25 bp, Homo sapien
ccttttgtatatgctgggagggtat

SEQ ID NO: 5513176 - DNA, 25 bp, Homo sapien
tgctagggcagccatcttggcccca

SEQ ID NO: 5513177 - DNA, 25 bp, Homo sapien
tggccccaaaaacagtagctgggga

SEQ ID NO: 5513178 - DNA, 25 bp, Homo sapien
tggaacttggtacattcagtaggaa

SEQ ID NO: 5513179 - DNA, 25 bp, Homo sapien
ggggaaaaggctgccattttgatga

SEQ ID NO: 5513180 - DNA, 25 bp, Homo sapien
gtggttaacattcagggagcctgtc

SEQ ID NO: 5513181 - DNA, 25 bp, Homo sapien
gtaggaaattcgtcactcaggctgt

SEQ ID NO: 5513182 - DNA, 25 bp, Homo sapien
tcatgctaattgagaactctgggga

SEQ ID NO: 5513183 - DNA, 25 bp, Homo sapien
acatggtaaagtaatcaagaaagat

SEQ ID NO: 5513184 - DNA, 25 bp, Homo sapien
aaatcaggccgttttgcatccagat

SEQ ID NO: 5513185 - DNA, 25 bp, Homo sapien
actgggaaattagttactgaacatc

SEQ ID NO: 5513186 - DNA, 25 bp, Homo sapien
tccctaaggcaggcatgtgtcttaa

SEQ ID NO: 5513187 - DNA, 25 bp, Homo sapien
aattctgggccataactgggaaatt

SEQ ID NO: 5513188 - DNA, 25 bp, Homo sapien
tgaaagctgtgcattactaatctac

SEQ ID NO: 5513189 - DNA, 25 bp, Homo sapien
tgtccaaagttgatagtgcttggtc

SEQ ID NO: 5513190 - DNA, 25 bp, Homo sapien
ttaaaggaaactctgactgtagtaa

SEQ ID NO: 5513191 - DNA, 25 bp, Homo sapien
cattacccaggtacaagtcgggtgg

SEQ ID NO: 5513192 - DNA, 25 bp, Homo sapien
agtcgggtggccattataaacgtta

SEQ ID NO: 5513193 - DNA, 25 bp, Homo sapien
cgagtgggactctccaacgcccaag

SEQ ID NO: 5513194 - DNA, 25 bp, Homo sapien
gacagcgccaacaacatccagttcc

SEQ ID NO: 5513195 - DNA, 25 bp, Homo sapien
actacgtactctcggtggagcagta

SEQ ID NO: 5513196 - DNA, 25 bp, Homo sapien
ccgaatgaccttaaaggtgatcggc

SEQ ID NO: 5513197 - DNA, 25 bp, Homo sapien
gtgtcgcagtccaccacggtggtga

SEQ ID NO: 5513198 - DNA, 25 bp, Homo sapien
attgtcctgtggcacaacccgagtg

SEQ ID NO: 5513199 - DNA, 25 bp, Homo sapien
atgagactgctgttacgacccacac

SEQ ID NO: 5513200 - DNA, 25 bp, Homo sapien
catccagttcctgcggcagagcgag

SEQ ID NO: 5513201 - DNA, 25 bp, Homo sapien
taaaggtgatcggctttaacgaata

SEQ ID NO: 5513202 - DNA, 25 bp, Homo sapien
gctacgacgggtactacgtactctc

SEQ ID NO: 5513203 - DNA, 25 bp, Homo sapien
gccgctcacgccctgcccacattgt

SEQ ID NO: 5513204 - DNA, 25 bp, Homo sapien
atgaagccacttttaacatggaatg

SEQ ID NO: 5513205 - DNA, 25 bp, Homo sapien
catctgtttgaggatacacagtttg

SEQ ID NO: 5513206 - DNA, 25 bp, Homo sapien
atactgactctagcacagcagaaaa

SEQ ID NO: 5513207 - DNA, 25 bp, Homo sapien
taaaggatgttaatctgagataaac

SEQ ID NO: 5513208 - DNA, 25 bp, Homo sapien
aaacaaacgttttgcaaagcactac

SEQ ID NO: 5513209 - DNA, 25 bp, Homo sapien
aatcagcgtgctggaaatagagaaa

SEQ ID NO: 5513210 - DNA, 25 bp, Homo sapien
ttttaaatcaaatcagcgtgctgga

SEQ ID NO: 5513211 - DNA, 25 bp, Homo sapien
agtggtcgctttcaatgactgaaca

SEQ ID NO: 5513212 - DNA, 25 bp, Homo sapien
agggcacgacaatagttcagacatt

SEQ ID NO: 5513213 - DNA, 25 bp, Homo sapien
catttgtcagtagctatgaagccac

SEQ ID NO: 5513214 - DNA, 25 bp, Homo sapien
tccagttttgaagggcacgacaata

SEQ ID NO: 5513215 - DNA, 25 bp, Homo sapien
atgacttgctgaccatggaacagtg

SEQ ID NO: 5513216 - DNA, 25 bp, Homo sapien
gaccctggatggcacagacataatt

SEQ ID NO: 5513217 - DNA, 25 bp, Homo sapien
aattcatgtagagtgacagactttc

SEQ ID NO: 5513218 - DNA, 25 bp, Homo sapien
ctaaaagtagccatagaatagctgt

SEQ ID NO: 5513219 - DNA, 25 bp, Homo sapien
tcagaaaaagattaacaacagaccc

SEQ ID NO: 5513220 - DNA, 25 bp, Homo sapien
aacatttagcatatcacacgaccac

SEQ ID NO: 5513221 - DNA, 25 bp, Homo sapien
tagagtgatagacttccaaggttcc

SEQ ID NO: 5513222 - DNA, 25 bp, Homo sapien
cccacaccacataccacaaaaacac

SEQ ID NO: 5513223 - DNA, 25 bp, Homo sapien
aattccataaacactcccacaccac

SEQ ID NO: 5513224 - DNA, 25 bp, Homo sapien
aaactgagttggtcaaatttgagca

SEQ ID NO: 5513225 - DNA, 25 bp, Homo sapien
aagtgcatagtacaagccctttatc

SEQ ID NO: 5513226 - DNA, 25 bp, Homo sapien
aactaaacactggctaatgtctcca

SEQ ID NO: 5513227 - DNA, 25 bp, Homo sapien
gtatatgcacagagagacctcacta

SEQ ID NO: 5513228 - DNA, 25 bp, Homo sapien
ttggaagtacctcattacaaggcaa

SEQ ID NO: 5513229 - DNA, 25 bp, Homo sapien
aatgtctccaacaaggaggaacaca

SEQ ID NO: 5513230 - DNA, 25 bp, Homo sapien
attatgccattgttaggggtctttt

SEQ ID NO: 5513231 - DNA, 25 bp, Homo sapien
tgaagttcaaaatgtccccatgcta

SEQ ID NO: 5513232 - DNA, 25 bp, Homo sapien
aacaaggaggaacacattacaaatt

SEQ ID NO: 5513233 - DNA, 25 bp, Homo sapien
ttagatttgattggtgcacacattt

SEQ ID NO: 5513234 - DNA, 25 bp, Homo sapien
tacaaggcaatgtcaaaggttccag

SEQ ID NO: 5513235 - DNA, 25 bp, Homo sapien
atcaggtctgttcgttagtaagtaa

SEQ ID NO: 5513236 - DNA, 25 bp, Homo sapien
ctcttctgttggcaaagctaaattg

SEQ ID NO: 5513237 - DNA, 25 bp, Homo sapien
gcagagcataacgatgtcacccatc

SEQ ID NO: 5513238 - DNA, 25 bp, Homo sapien
tacatgggcagtagactataagtgt

SEQ ID NO: 5513239 - DNA, 25 bp, Homo sapien
tccagctgatagatttgtgtaagaa

SEQ ID NO: 5513240 - DNA, 25 bp, Homo sapien
ttggcctcttagccggagctgatcc

SEQ ID NO: 5513241 - DNA, 25 bp, Homo sapien
tgtattaggccagttggaaaccatc

SEQ ID NO: 5513242 - DNA, 25 bp, Homo sapien
tgatcaccagagtagtttcagacta

SEQ ID NO: 5513243 - DNA, 25 bp, Homo sapien
tgatgaccccagagattatgacagt

SEQ ID NO: 5513244 - DNA, 25 bp, Homo sapien
ggatatagtacaagaagaaaaagag

SEQ ID NO: 5513245 - DNA, 25 bp, Homo sapien
cggagctgatccttacatgggcagt

SEQ ID NO: 5513246 - DNA, 25 bp, Homo sapien
aaaagagaatacagatgacatcggg

SEQ ID NO: 5513247 - DNA, 25 bp, Homo sapien
tatttacaggcaaaggatatagtac

SEQ ID NO: 5513248 - DNA, 25 bp, Homo sapien
gcagtcatagtcagtcagatgcacc

SEQ ID NO: 5513249 - DNA, 25 bp, Homo sapien
gggtccttggaatctctcagcagtc

SEQ ID NO: 5513250 - DNA, 25 bp, Homo sapien
tgccaacctgggcatactggaaaag

SEQ ID NO: 5513251 - DNA, 25 bp, Homo sapien
agccacctgccttggaacatgtacc

SEQ ID NO: 5513252 - DNA, 25 bp, Homo sapien
cgggtcgtcctaactagcaggctga

SEQ ID NO: 5513253 - DNA, 25 bp, Homo sapien
cgcactgcaccataatgagtaccac

SEQ ID NO: 5513254 - DNA, 25 bp, Homo sapien
gagtaccacacaaagccagaggatg

SEQ ID NO: 5513255 - DNA, 25 bp, Homo sapien
caagggcagctgagtcaatctcctt

SEQ ID NO: 5513256 - DNA, 25 bp, Homo sapien
tctcactgcacatggagaggttagc

SEQ ID NO: 5513257 - DNA, 25 bp, Homo sapien
gtatctgtaagcctatttgggtgtc

SEQ ID NO: 5513258 - DNA, 25 bp, Homo sapien
ggggatgccttcactcagaggaagt

SEQ ID NO: 5513259 - DNA, 25 bp, Homo sapien
tagtcagttgaccacagaggatttt

SEQ ID NO: 5513260 - DNA, 25 bp, Homo sapien
ctgcgatacgcagtagtcagttgac

SEQ ID NO: 5513261 - DNA, 25 bp, Homo sapien
taattaatctgggtggctgaaagtg

SEQ ID NO: 5513262 - DNA, 25 bp, Homo sapien
cctctaggacagaaccagacttaac

SEQ ID NO: 5513263 - DNA, 25 bp, Homo sapien
ctcaccagagacaccagtcccttgc

SEQ ID NO: 5513264 - DNA, 25 bp, Homo sapien
cacctaccagcaactgtgcagtctt

SEQ ID NO: 5513265 - DNA, 25 bp, Homo sapien
ttgcctctgtcgctaagcccagaac

SEQ ID NO: 5513266 - DNA, 25 bp, Homo sapien
tacacacagtgtgaacacatgcttt

SEQ ID NO: 5513267 - DNA, 25 bp, Homo sapien
atgctttaaatatgcagtggaggag

SEQ ID NO: 5513268 - DNA, 25 bp, Homo sapien
ctgggtggctgaaagtgttttaacc

SEQ ID NO: 5513269 - DNA, 25 bp, Homo sapien
cccaagtaacttaagacatgaatta

SEQ ID NO: 5513270 - DNA, 25 bp, Homo sapien
ccctatcccagaaatcagcccttgc

SEQ ID NO: 5513271 - DNA, 25 bp, Homo sapien
gtggggcatgatattggatgcttgg

SEQ ID NO: 5513272 - DNA, 25 bp, Homo sapien
tctatgtagcaattgatgggccctg

SEQ ID NO: 5513273 - DNA, 25 bp, Homo sapien
gctcaaagcagaaacagttgtgtcc

SEQ ID NO: 5513274 - DNA, 25 bp, Homo sapien
gtgtcctagagagggtctgttaaac

SEQ ID NO: 5513275 - DNA, 25 bp, Homo sapien
caaagtacaggcagcttctaggcca

SEQ ID NO: 5513276 - DNA, 25 bp, Homo sapien
cagcccttgccacagcctagaatcc

SEQ ID NO: 5513277 - DNA, 25 bp, Homo sapien
atcatgcaagtcacagcactctggg

SEQ ID NO: 5513278 - DNA, 25 bp, Homo sapien
attggatgcttggctcaggaaacaa

SEQ ID NO: 5513279 - DNA, 25 bp, Homo sapien
tgaggccctggacagtttctccctc

SEQ ID NO: 5513280 - DNA, 25 bp, Homo sapien
gcttctaggccattgagtggggcat

SEQ ID NO: 5513281 - DNA, 25 bp, Homo sapien
gtccacgacgtcctcggggaaacga

SEQ ID NO: 5513282 - DNA, 25 bp, Homo sapien
tcgtttccccgaggacgtcgtggac

SEQ ID NO: 5513283 - DNA, 25 bp, Homo sapien
tcaaccttaggactgtatgttcact

SEQ ID NO: 5513284 - DNA, 25 bp, Homo sapien
agtgaacatacagtcctaaggttga

SEQ ID NO: 5513285 - DNA, 25 bp, Homo sapien
aatatttcagaattcagggtagcaa

SEQ ID NO: 5513286 - DNA, 25 bp, Homo sapien
tcccctccaagtaaagctaatgcta

SEQ ID NO: 5513287 - DNA, 25 bp, Homo sapien
tggaaaagtaagaatacatcaaatc

SEQ ID NO: 5513288 - DNA, 25 bp, Homo sapien
gtattgcaagaatttggcccacttc

SEQ ID NO: 5513289 - DNA, 25 bp, Homo sapien
gaataaaaagaaccatgtgaaatgt

SEQ ID NO: 5513290 - DNA, 25 bp, Homo sapien
cattattatgtcaaagggtaaattt

SEQ ID NO: 5513291 - DNA, 25 bp, Homo sapien
atgtgaaatgtaagagatgtcagac

SEQ ID NO: 5513292 - DNA, 25 bp, Homo sapien
catattgcccataagcctctccagc

SEQ ID NO: 5513293 - DNA, 25 bp, Homo sapien
tcagaattcagggtagcaaatttta

SEQ ID NO: 5513294 - DNA, 25 bp, Homo sapien
attgaatagggtgtattgcaagaat

SEQ ID NO: 5513295 - DNA, 25 bp, Homo sapien
agatgtcagacattaaaagtatttt

SEQ ID NO: 5513296 - DNA, 25 bp, Homo sapien
gctcctgacgcctgtgcttgtttcc

SEQ ID NO: 5513297 - DNA, 25 bp, Homo sapien
gcttcgaacccggctgctgatcaca

SEQ ID NO: 5513298 - DNA, 25 bp, Homo sapien
ttccgtcagcaagaggttcaccttg

SEQ ID NO: 5513299 - DNA, 25 bp, Homo sapien
gcctgttaagcctgaacgtgggctg

SEQ ID NO: 5513300 - DNA, 25 bp, Homo sapien
gccaggccctgcatctgaggtcctg

SEQ ID NO: 5513301 - DNA, 25 bp, Homo sapien
tcaccttgctgaggtgcaggtgcag

SEQ ID NO: 5513302 - DNA, 25 bp, Homo sapien
gataacgtggttagttcaggcaagg

SEQ ID NO: 5513303 - DNA, 25 bp, Homo sapien
tggcacaggctctctcagctcaagc

SEQ ID NO: 5513304 - DNA, 25 bp, Homo sapien
cctggcttttgtcaaggcagggccc

SEQ ID NO: 5513305 - DNA, 25 bp, Homo sapien
ttcaggcaaggcatgcacttggaat

SEQ ID NO: 5513306 - DNA, 25 bp, Homo sapien
agccccacagcttggcacaggctct

SEQ ID NO: 5513307 - DNA, 25 bp, Homo sapien
tgtggcaggttaaacatcaggcata

SEQ ID NO: 5513308 - DNA, 25 bp, Homo sapien
ttcatgggtaaacaaaagatgtgga

SEQ ID NO: 5513309 - DNA, 25 bp, Homo sapien
tgtggaagacacagccaaccttaag

SEQ ID NO: 5513310 - DNA, 25 bp, Homo sapien
gttgcagtacaaacatgtggcaggt

SEQ ID NO: 5513311 - DNA, 25 bp, Homo sapien
aacttctactgacggatgctctggc

SEQ ID NO: 5513312 - DNA, 25 bp, Homo sapien
acacagaacaagatggtcacagttc

SEQ ID NO: 5513313 - DNA, 25 bp, Homo sapien
aggacaaatactgaaacgcaaaggg

SEQ ID NO: 5513314 - DNA, 25 bp, Homo sapien
caagtgagccaataagggcacattt

SEQ ID NO: 5513315 - DNA, 25 bp, Homo sapien
agcagaaagaagtcacgtcccatct

SEQ ID NO: 5513316 - DNA, 25 bp, Homo sapien
tggttaagtgatacgaagtaggaaa

SEQ ID NO: 5513317 - DNA, 25 bp, Homo sapien
ggccagagatcccaagtcgcttaac

SEQ ID NO: 5513318 - DNA, 25 bp, Homo sapien
tgaaacttctaaaagccagccccac

SEQ ID NO: 5513319 - DNA, 25 bp, Homo sapien
ccttaccaaaagccaagcccctcag

SEQ ID NO: 5513320 - DNA, 25 bp, Homo sapien
agctcaaggtgcttgtggcaagtca

SEQ ID NO: 5513321 - DNA, 25 bp, Homo sapien
ctcagagctgctaatgtttcacgaa

SEQ ID NO: 5513322 - DNA, 25 bp, Homo sapien
ggacataaacttggggctgcaccct

SEQ ID NO: 5513323 - DNA, 25 bp, Homo sapien
gtttcacgaagtaaaacagagagct

SEQ ID NO: 5513324 - DNA, 25 bp, Homo sapien
cctaccaccaccgattaagcacccc

SEQ ID NO: 5513325 - DNA, 25 bp, Homo sapien
ttctacaaggcagctgctctggcca

SEQ ID NO: 5513326 - DNA, 25 bp, Homo sapien
tgtggcaagtcagactataagtccc

SEQ ID NO: 5513327 - DNA, 25 bp, Homo sapien
gcacccccactggatggctgctgaa

SEQ ID NO: 5513328 - DNA, 25 bp, Homo sapien
tagctgcaagcgtgtgaaacttcta

SEQ ID NO: 5513329 - DNA, 25 bp, Homo sapien
caggttttgcttagtaaagggcagc

SEQ ID NO: 5513330 - DNA, 25 bp, Homo sapien
tacaagcacactcacacgaaacctg

SEQ ID NO: 5513331 - DNA, 25 bp, Homo sapien
agattgtctatgaacacaggtcctt

SEQ ID NO: 5513332 - DNA, 25 bp, Homo sapien
cattaatgagttggtggaaaaagtc

SEQ ID NO: 5513333 - DNA, 25 bp, Homo sapien
catggctcaaggggttaacttctca

SEQ ID NO: 5513334 - DNA, 25 bp, Homo sapien
ccagaatgctgtccaaggaaccatc

SEQ ID NO: 5513335 - DNA, 25 bp, Homo sapien
ttgattgtaaagagaccacatggct

SEQ ID NO: 5513336 - DNA, 25 bp, Homo sapien
ttagcagggtttgccgaagaaatat

SEQ ID NO: 5513337 - DNA, 25 bp, Homo sapien
gagttggtggaaaaagtcctcagat

SEQ ID NO: 5513338 - DNA, 25 bp, Homo sapien
cgttttcaagggtgaaccgcagtta

SEQ ID NO: 5513339 - DNA, 25 bp, Homo sapien
ccttccaactcggagctcaagattt

SEQ ID NO: 5513340 - DNA, 25 bp, Homo sapien
gtgctagggaaataaagcctcctca

SEQ ID NO: 5513341 - DNA, 25 bp, Homo sapien
ttcccatggaaatgacaacacaggc

SEQ ID NO: 5513342 - DNA, 25 bp, Homo sapien
tagcagatctcgtggaaagagttct

SEQ ID NO: 5513343 - DNA, 25 bp, Homo sapien
tagcacttcaggtagactttggatg

SEQ ID NO: 5513344 - DNA, 25 bp, Homo sapien
agtgataagagtctgaaagtctagc

SEQ ID NO: 5513345 - DNA, 25 bp, Homo sapien
cctgtcttagaggcctggaactagc

SEQ ID NO: 5513346 - DNA, 25 bp, Homo sapien
tgaggtttgacagttgaagcccttc

SEQ ID NO: 5513347 - DNA, 25 bp, Homo sapien
aactgtctgacagaaataggggatg

SEQ ID NO: 5513348 - DNA, 25 bp, Homo sapien
ggggatgaggtctataaaatggaaa

SEQ ID NO: 5513349 - DNA, 25 bp, Homo sapien
gatttggaatagaagcatacagaac

SEQ ID NO: 5513350 - DNA, 25 bp, Homo sapien
caaggacgttagtgtacatggcctg

SEQ ID NO: 5513351 - DNA, 25 bp, Homo sapien
aatcttctacggtttttgaagtata

SEQ ID NO: 5513352 - DNA, 25 bp, Homo sapien
tatacttcaaaaaccgtagaagatt

SEQ ID NO: 5513353 - DNA, 25 bp, Homo sapien
tatgatgcaacagtttggctcatgc

SEQ ID NO: 5513354 - DNA, 25 bp, Homo sapien
atcacaacaaaggccacacactctt

SEQ ID NO: 5513355 - DNA, 25 bp, Homo sapien
tcccatgcagtagatttcaccttcc

SEQ ID NO: 5513356 - DNA, 25 bp, Homo sapien
acagtggagttctcacttgtggctc

SEQ ID NO: 5513357 - DNA, 25 bp, Homo sapien
tggctccttgcgtggaatcgaacca

SEQ ID NO: 5513358 - DNA, 25 bp, Homo sapien
agggtggacaaagatgatcaaaata

SEQ ID NO: 5513359 - DNA, 25 bp, Homo sapien
tatctacggttaacagccaagaact

SEQ ID NO: 5513360 - DNA, 25 bp, Homo sapien
ttccgtcctgaccaaccacaactgt

SEQ ID NO: 5513361 - DNA, 25 bp, Homo sapien
ccattaatatggcgctgtggaggag

SEQ ID NO: 5513362 - DNA, 25 bp, Homo sapien
ttggctgtgttagaccagtgcttat

SEQ ID NO: 5513363 - DNA, 25 bp, Homo sapien
agccaagaactaataagggtggaca

SEQ ID NO: 5513364 - DNA, 25 bp, Homo sapien
tatgtgtcattctaaagactagcac

SEQ ID NO: 5513365 - DNA, 25 bp, Homo sapien
ataatgcactaagcttggcaaatac

SEQ ID NO: 5513366 - DNA, 25 bp, Homo sapien
acactggacggaacctctgttttac

SEQ ID NO: 5513367 - DNA, 25 bp, Homo sapien
cagcatacatggctttgaatgacct

SEQ ID NO: 5513368 - DNA, 25 bp, Homo sapien
ataaataaaggtatcataatgcact

SEQ ID NO: 5513369 - DNA, 25 bp, Homo sapien
aaagactagcacatttacagcatac

SEQ ID NO: 5513370 - DNA, 25 bp, Homo sapien
ctgtaggagctctgacagaatccac

SEQ ID NO: 5513371 - DNA, 25 bp, Homo sapien
tagggacaaaactgtattatacaat

SEQ ID NO: 5513372 - DNA, 25 bp, Homo sapien
tgaatgacctaagaatatataaaac

SEQ ID NO: 5513373 - DNA, 25 bp, Homo sapien
gcaactgtgctctgtaggagctctg

SEQ ID NO: 5513374 - DNA, 25 bp, Homo sapien
tggcaaatacaattgtgtagggaca

SEQ ID NO: 5513375 - DNA, 25 bp, Homo sapien
tcagctgctctgtatccccccccac

SEQ ID NO: 5513376 - DNA, 25 bp, Homo sapien
ggagctgactcagaggacagtctaa

SEQ ID NO: 5513377 - DNA, 25 bp, Homo sapien
actgcagctcaccctgggctgagga

SEQ ID NO: 5513378 - DNA, 25 bp, Homo sapien
gtcccatcccgcctgactgcagctc

SEQ ID NO: 5513379 - DNA, 25 bp, Homo sapien
cgtttagaggaggtatttttcagag

SEQ ID NO: 5513380 - DNA, 25 bp, Homo sapien
tgaagcacaaaactccaaatacaag

SEQ ID NO: 5513381 - DNA, 25 bp, Homo sapien
cctcactttagcaaggggccagaag

SEQ ID NO: 5513382 - DNA, 25 bp, Homo sapien
gaactggagagccctgcttccgttt

SEQ ID NO: 5513383 - DNA, 25 bp, Homo sapien
aaatacaaattgatcagctgctctg

SEQ ID NO: 5513384 - DNA, 25 bp, Homo sapien
gacctctggcctgcccgtcccatcc

SEQ ID NO: 5513385 - DNA, 25 bp, Homo sapien
tcttctctgctaggagctggctgac

SEQ ID NO: 5513386 - DNA, 25 bp, Homo sapien
tgaaagacatgatcagttgctggta

SEQ ID NO: 5513387 - DNA, 25 bp, Homo sapien
gggagtcggttggtgatctctaaga

SEQ ID NO: 5513388 - DNA, 25 bp, Homo sapien
agagaaaaagcatcatgacacaagc

SEQ ID NO: 5513389 - DNA, 25 bp, Homo sapien
ccaagcacctggtgttgggaaagtc

SEQ ID NO: 5513390 - DNA, 25 bp, Homo sapien
tgacacaagcacagtagatggtaga

SEQ ID NO: 5513391 - DNA, 25 bp, Homo sapien
gcactgagtcaggtgaagctacatg

SEQ ID NO: 5513392 - DNA, 25 bp, Homo sapien
aggtgaagctacatggttcgctgtt

SEQ ID NO: 5513393 - DNA, 25 bp, Homo sapien
caggaaggatacactgaggtatatg

SEQ ID NO: 5513394 - DNA, 25 bp, Homo sapien
cactgaggtatatggtaagaaaagg

SEQ ID NO: 5513395 - DNA, 25 bp, Homo sapien
aagaaaagggatatgaatactagag

SEQ ID NO: 5513396 - DNA, 25 bp, Homo sapien
tttataaggcttgacacaggaagga

SEQ ID NO: 5513397 - DNA, 25 bp, Homo sapien
ccactggtaacattactgtctgagg

SEQ ID NO: 5513398 - DNA, 25 bp, Homo sapien
cctcagacagtaatgttaccagtgg

SEQ ID NO: 5513399 - DNA, 25 bp, Homo sapien
attatactactgagaggattcacac

SEQ ID NO: 5513400 - DNA, 25 bp, Homo sapien
gtgtgaatcctctcagtagtataat

SEQ ID NO: 5513401 - DNA, 25 bp, Homo sapien
ctcttacaatagtcagggcagcaac

SEQ ID NO: 5513402 - DNA, 25 bp, Homo sapien
tagccctactaataaaagtggtgag

SEQ ID NO: 5513403 - DNA, 25 bp, Homo sapien
actgaatctgctacaaggagagcca

SEQ ID NO: 5513404 - DNA, 25 bp, Homo sapien
ttcatatggtgatgaagtgtggagt

SEQ ID NO: 5513405 - DNA, 25 bp, Homo sapien
ggcagcaagtccaaaggttgaattc

SEQ ID NO: 5513406 - DNA, 25 bp, Homo sapien
atacagcatccgcttagctagcttc

SEQ ID NO: 5513407 - DNA, 25 bp, Homo sapien
aggtctgtggactgaatctgctaca

SEQ ID NO: 5513408 - DNA, 25 bp, Homo sapien
tcacattaggaaaatggtcattctc

SEQ ID NO: 5513409 - DNA, 25 bp, Homo sapien
aaaacaaagtgaatacaagagtaaa

SEQ ID NO: 5513410 - DNA, 25 bp, Homo sapien
ttaatggcaagttactagttgatac

SEQ ID NO: 5513411 - DNA, 25 bp, Homo sapien
tattgcaagataatgacactgtgtt

SEQ ID NO: 5513412 - DNA, 25 bp, Homo sapien
tgtgggaaccataattttgcctgtg

SEQ ID NO: 5513413 - DNA, 25 bp, Homo sapien
tgctgagaatctgcagcgaccagac

SEQ ID NO: 5513414 - DNA, 25 bp, Homo sapien
ttatttggacatggctagtgaggaa

SEQ ID NO: 5513415 - DNA, 25 bp, Homo sapien
ctagcatacacgacatacagacagc

SEQ ID NO: 5513416 - DNA, 25 bp, Homo sapien
gtgaagaccacatgaaaatacgctc

SEQ ID NO: 5513417 - DNA, 25 bp, Homo sapien
gaggaaggctcgctcccaatatttg

SEQ ID NO: 5513418 - DNA, 25 bp, Homo sapien
aacacacagtctagtagtcaatccc

SEQ ID NO: 5513419 - DNA, 25 bp, Homo sapien
tttccaaagctgaaaggcagctcct

SEQ ID NO: 5513420 - DNA, 25 bp, Homo sapien
acctcaaaggaacatgaaatcagaa

SEQ ID NO: 5513421 - DNA, 25 bp, Homo sapien
ctactgaggatatcacctagcatac

SEQ ID NO: 5513422 - DNA, 25 bp, Homo sapien
cagcgaccagacagaacataaattt

SEQ ID NO: 5513423 - DNA, 25 bp, Homo sapien
tttggagctccttgtgtgtcaataa

SEQ ID NO: 5513424 - DNA, 25 bp, Homo sapien
gcactactcccaaaatccaaatccc

SEQ ID NO: 5513425 - DNA, 25 bp, Homo sapien
tgtccagagttatcacttaggcctt

SEQ ID NO: 5513426 - DNA, 25 bp, Homo sapien
accaggtaaccatagtacaacaatc

SEQ ID NO: 5513427 - DNA, 25 bp, Homo sapien
tatgaatataggatcctcaggtgcc

SEQ ID NO: 5513428 - DNA, 25 bp, Homo sapien
gtgcaacatacacagggctataccc

SEQ ID NO: 5513429 - DNA, 25 bp, Homo sapien
tgtgagtgattctgaacaataagtt

SEQ ID NO: 5513430 - DNA, 25 bp, Homo sapien
ctcaggtgccattcaacattttgcc

SEQ ID NO: 5513431 - DNA, 25 bp, Homo sapien
ttgcagacatcttgacccactactc

SEQ ID NO: 5513432 - DNA, 25 bp, Homo sapien
ttgtaaaaataggccacagtgctcc

SEQ ID NO: 5513433 - DNA, 25 bp, Homo sapien
atacaaagggaatctaccaggtaac

SEQ ID NO: 5513434 - DNA, 25 bp, Homo sapien
aaggtcaaccaactgggaagcaatt

SEQ ID NO: 5513435 - DNA, 25 bp, Homo sapien
tgtgatggtgctctaggcaacttca

SEQ ID NO: 5513436 - DNA, 25 bp, Homo sapien
taaggtaattcatgatggaagcttc

SEQ ID NO: 5513437 - DNA, 25 bp, Homo sapien
gcacagggctaaatcaggcattata

SEQ ID NO: 5513438 - DNA, 25 bp, Homo sapien
aagcttcctagctgtgatggtgctc

SEQ ID NO: 5513439 - DNA, 25 bp, Homo sapien
agagcgaagacctgttaaagttcct

SEQ ID NO: 5513440 - DNA, 25 bp, Homo sapien
tatctaatgacaagagcgaagacct

SEQ ID NO: 5513441 - DNA, 25 bp, Homo sapien
tgggagtgattaactgagccacagg

SEQ ID NO: 5513442 - DNA, 25 bp, Homo sapien
tcagagaatgaagatagaagttatg

SEQ ID NO: 5513443 - DNA, 25 bp, Homo sapien
aaacaatgtataagtgatggaatca

SEQ ID NO: 5513444 - DNA, 25 bp, Homo sapien
acagctcaaagttgtgggagtgatt

SEQ ID NO: 5513445 - DNA, 25 bp, Homo sapien
agcacagccttcacgttttgccctc

SEQ ID NO: 5513446 - DNA, 25 bp, Homo sapien
cagcattggactcccggaagaacta

SEQ ID NO: 5513447 - DNA, 25 bp, Homo sapien
gaaaaacttcatcacccgagagaac

SEQ ID NO: 5513448 - DNA, 25 bp, Homo sapien
tggtgttgcttatgaggaaggttca

SEQ ID NO: 5513449 - DNA, 25 bp, Homo sapien
atgtatgtatcatggcggaagagtt

SEQ ID NO: 5513450 - DNA, 25 bp, Homo sapien
tcccggaagaactacaactgggcca

SEQ ID NO: 5513451 - DNA, 25 bp, Homo sapien
cctggaataaagcagttggtgttgc

SEQ ID NO: 5513452 - DNA, 25 bp, Homo sapien
ggaagaactacaactgggccatcac

SEQ ID NO: 5513453 - DNA, 25 bp, Homo sapien
cttcatcacccgagagaacctggag

SEQ ID NO: 5513454 - DNA, 25 bp, Homo sapien
cgccagggaccatgtatgtatcatg

SEQ ID NO: 5513455 - DNA, 25 bp, Homo sapien
aagagttggccctgacctggaataa

SEQ ID NO: 5513456 - DNA, 25 bp, Homo sapien
ttcagtaagagtagaaccactttct

SEQ ID NO: 5513457 - DNA, 25 bp, Homo sapien
aataaagcagctggtgattttgtca

SEQ ID NO: 5513458 - DNA, 25 bp, Homo sapien
caggtgcaaggaaacaagcatatat

SEQ ID NO: 5513459 - DNA, 25 bp, Homo sapien
ctcccttctgagctgccacaagatt

SEQ ID NO: 5513460 - DNA, 25 bp, Homo sapien
ccacaagatttaaaaggcaggactg

SEQ ID NO: 5513461 - DNA, 25 bp, Homo sapien
atttattgcctacaggggaaggaaa

SEQ ID NO: 5513462 - DNA, 25 bp, Homo sapien
tctcagctgagcagttttggtcaag

SEQ ID NO: 5513463 - DNA, 25 bp, Homo sapien
catcatgtgtgagcagtaaccaatc

SEQ ID NO: 5513464 - DNA, 25 bp, Homo sapien
tagcaagctacaattacatggcact

SEQ ID NO: 5513465 - DNA, 25 bp, Homo sapien
tggcagagagtgttaaatggttaaa

SEQ ID NO: 5513466 - DNA, 25 bp, Homo sapien
tgtcagagagaatgtgttcagtaag

SEQ ID NO: 5513467 - DNA, 25 bp, Homo sapien
gagaaggcgaacgccaaagcccccg

SEQ ID NO: 5513468 - DNA, 25 bp, Homo sapien
cgggggctttggcgttcgccttctc

SEQ ID NO: 5513469 - DNA, 25 bp, Homo sapien
gcgagaaggcgaacgccaaagcccc

SEQ ID NO: 5513470 - DNA, 25 bp, Homo sapien
ggggctttggcgttcgccttctcgc

SEQ ID NO: 5513471 - DNA, 25 bp, Homo sapien
gtcatggtggaatcaggaatacata

SEQ ID NO: 5513472 - DNA, 25 bp, Homo sapien
aagggaacagattctaggaaattta

SEQ ID NO: 5513473 - DNA, 25 bp, Homo sapien
gaacctcagagaacaatgccaacca

SEQ ID NO: 5513474 - DNA, 25 bp, Homo sapien
agctcatagaaacacaaagggaaga

SEQ ID NO: 5513475 - DNA, 25 bp, Homo sapien
atggtggggttccaatacctgacta

SEQ ID NO: 5513476 - DNA, 25 bp, Homo sapien
agtctgaaatagatgcttgggccac

SEQ ID NO: 5513477 - DNA, 25 bp, Homo sapien
caacatggatctataaagggaacag

SEQ ID NO: 5513478 - DNA, 25 bp, Homo sapien
agctcagggtgttttcaggatactt

SEQ ID NO: 5513479 - DNA, 25 bp, Homo sapien
gggccacacatgaaggctagaagga

SEQ ID NO: 5513480 - DNA, 25 bp, Homo sapien
gcaagtgaggctataagtgaatttc

SEQ ID NO: 5513481 - DNA, 25 bp, Homo sapien
gtggatctttgatgcggagcttgtg

SEQ ID NO: 5513482 - DNA, 25 bp, Homo sapien
ttgggggaattgaatatgatatgca

SEQ ID NO: 5513483 - DNA, 25 bp, Homo sapien
catctcctaggttggcatgagacca

SEQ ID NO: 5513484 - DNA, 25 bp, Homo sapien
gtggccacagagatagatcatctgc

SEQ ID NO: 5513485 - DNA, 25 bp, Homo sapien
cacagaacaaggaaacaccatagat

SEQ ID NO: 5513486 - DNA, 25 bp, Homo sapien
agagacgtgagagctattgttcctc

SEQ ID NO: 5513487 - DNA, 25 bp, Homo sapien
gaataaattagaaagagcagttggg

SEQ ID NO: 5513488 - DNA, 25 bp, Homo sapien
agaccagcctggtccccagttgaat

SEQ ID NO: 5513489 - DNA, 25 bp, Homo sapien
tgcaaattgcataaggtgacatctc

SEQ ID NO: 5513490 - DNA, 25 bp, Homo sapien
gcttagttagaatctgatgaggaga

SEQ ID NO: 5513491 - DNA, 25 bp, Homo sapien
ggctccttgatctgagggaagcctc

SEQ ID NO: 5513492 - DNA, 25 bp, Homo sapien
tcaggcctatcgagaggcaactgca

SEQ ID NO: 5513493 - DNA, 25 bp, Homo sapien
gtggacctactggttcttctgtaat

SEQ ID NO: 5513494 - DNA, 25 bp, Homo sapien
attacagaagaaccagtaggtccac

SEQ ID NO: 5513495 - DNA, 25 bp, Homo sapien
atcatacaaaccacagaagcttcat

SEQ ID NO: 5513496 - DNA, 25 bp, Homo sapien
ttagaagcagacaatacaaggtgct

SEQ ID NO: 5513497 - DNA, 25 bp, Homo sapien
acagcagcagtatttggtgaatggt

SEQ ID NO: 5513498 - DNA, 25 bp, Homo sapien
atgcatagaaccaacttggaggatc

SEQ ID NO: 5513499 - DNA, 25 bp, Homo sapien
aaacaggtagcacatgtacaccaac

SEQ ID NO: 5513500 - DNA, 25 bp, Homo sapien
tctgaggactgctcaatggcttttt

SEQ ID NO: 5513501 - DNA, 25 bp, Homo sapien
ctattgtcaagcagcaagatggcaa

SEQ ID NO: 5513502 - DNA, 25 bp, Homo sapien
attagtcgcttgagagtccataacc

SEQ ID NO: 5513503 - DNA, 25 bp, Homo sapien
acttggaggatcgtgttaaacattc

SEQ ID NO: 5513504 - DNA, 25 bp, Homo sapien
actataggacactttagaagcagac

SEQ ID NO: 5513505 - DNA, 25 bp, Homo sapien
tgcatcatagcagaccacagaatat

SEQ ID NO: 5513506 - DNA, 25 bp, Homo sapien
aaagtcaagaactcgtggttgaaag

SEQ ID NO: 5513507 - DNA, 25 bp, Homo sapien
ctttcaaccacgagttcttgacttt

SEQ ID NO: 5513508 - DNA, 25 bp, Homo sapien
ttgcagcatttccacctgagtgttc

SEQ ID NO: 5513509 - DNA, 25 bp, Homo sapien
gggtaagaggtcctgtgcctttcat

SEQ ID NO: 5513510 - DNA, 25 bp, Homo sapien
attagattaaataaggtgttccctc

SEQ ID NO: 5513511 - DNA, 25 bp, Homo sapien
tatcgcaaaagatcaacccagaatc

SEQ ID NO: 5513512 - DNA, 25 bp, Homo sapien
gggagcttctcaggattgcagcatt

SEQ ID NO: 5513513 - DNA, 25 bp, Homo sapien
tcaaatgcctagggtcacacaggga

SEQ ID NO: 5513514 - DNA, 25 bp, Homo sapien
cctgggttcctaggatcttggagat

SEQ ID NO: 5513515 - DNA, 25 bp, Homo sapien
tgagaaggcagataaattgattcaa

SEQ ID NO: 5513516 - DNA, 25 bp, Homo sapien
atatgacagatgcactgagaaggca

SEQ ID NO: 5513517 - DNA, 25 bp, Homo sapien
cagaaaggctaagtcaaatgcctag

SEQ ID NO: 5513518 - DNA, 25 bp, Homo sapien
tcacagccatagaggttatcgcaaa

SEQ ID NO: 5513519 - DNA, 25 bp, Homo sapien
atgacggagttgaaactagaaaaaa

SEQ ID NO: 5513520 - DNA, 25 bp, Homo sapien
taccatagatacaaagttcccagaa

SEQ ID NO: 5513521 - DNA, 25 bp, Homo sapien
gttcccagaagatgcttacccaagc

SEQ ID NO: 5513522 - DNA, 25 bp, Homo sapien
agaaagttgaattcacatatccacc

SEQ ID NO: 5513523 - DNA, 25 bp, Homo sapien
tccaaatgggtcaatgtgacgaatg

SEQ ID NO: 5513524 - DNA, 25 bp, Homo sapien
tgtgaagccagaattctttagaaac

SEQ ID NO: 5513525 - DNA, 25 bp, Homo sapien
atgtgacgaatgttttcagtgacta

SEQ ID NO: 5513526 - DNA, 25 bp, Homo sapien
tcaaaatggagtgaaagaaacatga

SEQ ID NO: 5513527 - DNA, 25 bp, Homo sapien
acccaactttcacaatcactgcctc

SEQ ID NO: 5513528 - DNA, 25 bp, Homo sapien
aagaaacatgagtcaatgtgaagcc

SEQ ID NO: 5513529 - DNA, 25 bp, Homo sapien
tgcacaaatggtcaatggaattaaa

SEQ ID NO: 5513530 - DNA, 25 bp, Homo sapien
ttctcaacacggtgatggatgccat

SEQ ID NO: 5513531 - DNA, 25 bp, Homo sapien
gccagccagctactagccacagctc

SEQ ID NO: 5513532 - DNA, 25 bp, Homo sapien
tgatctgctctcatgggatggtgca

SEQ ID NO: 5513533 - DNA, 25 bp, Homo sapien
tagacccccgtcccctggtcagcca

SEQ ID NO: 5513534 - DNA, 25 bp, Homo sapien
ccaaaccctctgctcactgggaagt

SEQ ID NO: 5513535 - DNA, 25 bp, Homo sapien
cacaatatccagccaacgtcccacc

SEQ ID NO: 5513536 - DNA, 25 bp, Homo sapien
ggtgaagagctgcacctcgtaaggc

SEQ ID NO: 5513537 - DNA, 25 bp, Homo sapien
ctcgtaaggcaccttggagcaggtg

SEQ ID NO: 5513538 - DNA, 25 bp, Homo sapien
aggcactcctggggatacagatttg

SEQ ID NO: 5513539 - DNA, 25 bp, Homo sapien
gccaaacacgagaggtgtcctatgg

SEQ ID NO: 5513540 - DNA, 25 bp, Homo sapien
tcagacaccctattagacccccgtc

SEQ ID NO: 5513541 - DNA, 25 bp, Homo sapien
gcaaccagacgtcggtgtgctggtg

SEQ ID NO: 5513542 - DNA, 25 bp, Homo sapien
cggcagaacacgtctcagaaggccg

SEQ ID NO: 5513543 - DNA, 25 bp, Homo sapien
ggacatcaagggcgagtctctattc

SEQ ID NO: 5513544 - DNA, 25 bp, Homo sapien
cgctatcggctgcaccccaagttcg

SEQ ID NO: 5513545 - DNA, 25 bp, Homo sapien
gccggcgccttcaaccactcagacc

SEQ ID NO: 5513546 - DNA, 25 bp, Homo sapien
ggcggctcttccgcgagcgctatcg

SEQ ID NO: 5513547 - DNA, 25 bp, Homo sapien
agctggtgcgcacccaccacatcct

SEQ ID NO: 5513548 - DNA, 25 bp, Homo sapien
cctgagcctacgctgcgatgagctg

SEQ ID NO: 5513549 - DNA, 25 bp, Homo sapien
tcgtggacaacgatggcctctacga

SEQ ID NO: 5513550 - DNA, 25 bp, Homo sapien
gccgcctactacttcgagagggaca

SEQ ID NO: 5513551 - DNA, 25 bp, Homo sapien
cccaccatccagatcgagctgcggc

SEQ ID NO: 5513552 - DNA, 25 bp, Homo sapien
cacgttactgcagacggtcagatgc

SEQ ID NO: 5513553 - DNA, 25 bp, Homo sapien
tgaacagagacaattatatccgttc

SEQ ID NO: 5513554 - DNA, 25 bp, Homo sapien
tccttccacgttactgcagacggtc

SEQ ID NO: 5513555 - DNA, 25 bp, Homo sapien
gggggaaacctgcatactccttcca

SEQ ID NO: 5513556 - DNA, 25 bp, Homo sapien
gctacccgatggctgcactctcata

SEQ ID NO: 5513557 - DNA, 25 bp, Homo sapien
atcagccaccctggcaataagagcc

SEQ ID NO: 5513558 - DNA, 25 bp, Homo sapien
agccaccctggcaataagagccctg

SEQ ID NO: 5513559 - DNA, 25 bp, Homo sapien
ctgtaaattgctacccgatggctgc

SEQ ID NO: 5513560 - DNA, 25 bp, Homo sapien
cctggcaataagagccctgtctccc

SEQ ID NO: 5513561 - DNA, 25 bp, Homo sapien
gttactgcagacggtcagatgcagc

SEQ ID NO: 5513562 - DNA, 25 bp, Homo sapien
tatatccgttcctgtaaattgctac

SEQ ID NO: 5513563 - DNA, 25 bp, Homo sapien
accatggctgcacgatccacaattc

SEQ ID NO: 5513564 - DNA, 25 bp, Homo sapien
gacacaccccatggaatgatgagaa

SEQ ID NO: 5513565 - DNA, 25 bp, Homo sapien
aactatggctgcaggttccacagtt

SEQ ID NO: 5513566 - DNA, 25 bp, Homo sapien
gcgcaacactggcctggctttgcac

SEQ ID NO: 5513567 - DNA, 25 bp, Homo sapien
tgccaggaactgcccttcagaacct

SEQ ID NO: 5513568 - DNA, 25 bp, Homo sapien
ttcagaacctttgggcccaggtcac

SEQ ID NO: 5513569 - DNA, 25 bp, Homo sapien
tggcctctccatgcagagttggccc

SEQ ID NO: 5513570 - DNA, 25 bp, Homo sapien
ggtggagctctgtaagaccctgaac

SEQ ID NO: 5513571 - DNA, 25 bp, Homo sapien
cccttcccacagcaagcctggggct

SEQ ID NO: 5513572 - DNA, 25 bp, Homo sapien
gcaagccctcggtcaagatatagtc

SEQ ID NO: 5513573 - DNA, 25 bp, Homo sapien
attgtaagtaatgcgcaacactggc

SEQ ID NO: 5513574 - DNA, 25 bp, Homo sapien
gtgtgtcagttaaacatggggatgt

SEQ ID NO: 5513575 - DNA, 25 bp, Homo sapien
cagcatacaaatggaccaattctct

SEQ ID NO: 5513576 - DNA, 25 bp, Homo sapien
tcatgaagtataaggatgattatgc

SEQ ID NO: 5513577 - DNA, 25 bp, Homo sapien
aagacattacagcacacaactgagc

SEQ ID NO: 5513578 - DNA, 25 bp, Homo sapien
tgtaagatcaatgcagctatttccc

SEQ ID NO: 5513579 - DNA, 25 bp, Homo sapien
tatgctcatgtaagatcaatgcagc

SEQ ID NO: 5513580 - DNA, 25 bp, Homo sapien
aaaatggggattgtactaataatcc

SEQ ID NO: 5513581 - DNA, 25 bp, Homo sapien
atggggatgtatatccatgtgaaga

SEQ ID NO: 5513582 - DNA, 25 bp, Homo sapien
cttttggcaagtaatagaaatacag

SEQ ID NO: 5513583 - DNA, 25 bp, Homo sapien
gtctttgaagacaccataacagttt

SEQ ID NO: 5513584 - DNA, 25 bp, Homo sapien
tccatgtgaagagaatggaaacaag

SEQ ID NO: 5513585 - DNA, 25 bp, Homo sapien
tcaaaaagcagtaagaaagtagcta

SEQ ID NO: 5513586 - DNA, 25 bp, Homo sapien
ttattcaggccaggatagaagctta

SEQ ID NO: 5513587 - DNA, 25 bp, Homo sapien
gcaaggttgtaaagttaaatgagga

SEQ ID NO: 5513588 - DNA, 25 bp, Homo sapien
atttcattagcggagaagcaaaggt

SEQ ID NO: 5513589 - DNA, 25 bp, Homo sapien
acaggcttggttcgaaatagagttc

SEQ ID NO: 5513590 - DNA, 25 bp, Homo sapien
tcctggacccacttcgcaaggttgt

SEQ ID NO: 5513591 - DNA, 25 bp, Homo sapien
ggaatgcaggacaatgcccattact

SEQ ID NO: 5513592 - DNA, 25 bp, Homo sapien
aggatatggcttgatctctgagacc

SEQ ID NO: 5513593 - DNA, 25 bp, Homo sapien
atggaaataaggcctgaggatatgg

SEQ ID NO: 5513594 - DNA, 25 bp, Homo sapien
aaagtagctattgagaaagaaggag

SEQ ID NO: 5513595 - DNA, 25 bp, Homo sapien
aatgaacagaggtcttgccagctca

SEQ ID NO: 5513596 - DNA, 25 bp, Homo sapien
cttggacaatatatgggagcattgc

SEQ ID NO: 5513597 - DNA, 25 bp, Homo sapien
tcagagtcctggtgactatatcccc

SEQ ID NO: 5513598 - DNA, 25 bp, Homo sapien
caggccagccctccagatctctata

SEQ ID NO: 5513599 - DNA, 25 bp, Homo sapien
acttagagagagtctcaaaggagct

SEQ ID NO: 5513600 - DNA, 25 bp, Homo sapien
tggatggtgccatagatcaactttt

SEQ ID NO: 5513601 - DNA, 25 bp, Homo sapien
gagcattgcagagcattgtgcctct

SEQ ID NO: 5513602 - DNA, 25 bp, Homo sapien
catcgaaaccaagcttaacagagac

SEQ ID NO: 5513603 - DNA, 25 bp, Homo sapien
agttgtgtgtataaatgtgtatgcc

SEQ ID NO: 5513604 - DNA, 25 bp, Homo sapien
gcagcactcggaacagatgtatagt

SEQ ID NO: 5513605 - DNA, 25 bp, Homo sapien
tttacggaacatgttgcagaaaagc

SEQ ID NO: 5513606 - DNA, 25 bp, Homo sapien
catactggccaaaattggatggtgc

SEQ ID NO: 5513607 - DNA, 25 bp, Homo sapien
aactatggcaaatattgtgaaaggc

SEQ ID NO: 5513608 - DNA, 25 bp, Homo sapien
ttgttacagccttttccaagagggc

SEQ ID NO: 5513609 - DNA, 25 bp, Homo sapien
ggtcacaccttcaactatggcaaat

SEQ ID NO: 5513610 - DNA, 25 bp, Homo sapien
tttctgttgggattggaactgtttg

SEQ ID NO: 5513611 - DNA, 25 bp, Homo sapien
tgaaaggcctgtataccctcagacc

SEQ ID NO: 5513612 - DNA, 25 bp, Homo sapien
gagggcagtggttctgtatgtgttt

SEQ ID NO: 5513613 - DNA, 25 bp, Homo sapien
atggcaaatattgtgaaaggcctgt

SEQ ID NO: 5513614 - DNA, 25 bp, Homo sapien
tacagccttttccaagagggcagtg

SEQ ID NO: 5513615 - DNA, 25 bp, Homo sapien
atattgtgaaaggcctgtataccct

SEQ ID NO: 5513616 - DNA, 25 bp, Homo sapien
tgttgggattggaactgtttgttac

SEQ ID NO: 5513617 - DNA, 25 bp, Homo sapien
gcaaatattgtgaaaggcctgtata

SEQ ID NO: 5513618 - DNA, 25 bp, Homo sapien
aggcgttgctgaatactgtccacta

SEQ ID NO: 5513619 - DNA, 25 bp, Homo sapien
accaaaatatccgctggaatgccat

SEQ ID NO: 5513620 - DNA, 25 bp, Homo sapien
attgacatagttgaaatgcactcat

SEQ ID NO: 5513621 - DNA, 25 bp, Homo sapien
caaacaacatcaaccacagaacata

SEQ ID NO: 5513622 - DNA, 25 bp, Homo sapien
ttcaaagcatttaaatagagggtaa

SEQ ID NO: 5513623 - DNA, 25 bp, Homo sapien
ggaatgccatagaaataaataactt

SEQ ID NO: 5513624 - DNA, 25 bp, Homo sapien
acaaaatattgactgcatgcctcgc

SEQ ID NO: 5513625 - DNA, 25 bp, Homo sapien
aaacagacattggttaaagaactgc

SEQ ID NO: 5513626 - DNA, 25 bp, Homo sapien
catgcctcgcaaacaccaaaatatc

SEQ ID NO: 5513627 - DNA, 25 bp, Homo sapien
aaggccaaagaagctatcaggcgtt

SEQ ID NO: 5513628 - DNA, 25 bp, Homo sapien
aaaacaggcttcagattatcttggc

SEQ ID NO: 5513629 - DNA, 25 bp, Homo sapien
actcgccttaggcaggataagaagt

SEQ ID NO: 5513630 - DNA, 25 bp, Homo sapien
aaactgcctggccttccagagcggg

SEQ ID NO: 5513631 - DNA, 25 bp, Homo sapien
atactgagctatccagtggaggcca

SEQ ID NO: 5513632 - DNA, 25 bp, Homo sapien
tggaggccagcatcgtgtttttgct

SEQ ID NO: 5513633 - DNA, 25 bp, Homo sapien
aagctaacagccaaccaacaaatac

SEQ ID NO: 5513634 - DNA, 25 bp, Homo sapien
ggcaggataagaagttgtaaactca

SEQ ID NO: 5513635 - DNA, 25 bp, Homo sapien
agggttaataaagacgctgttggta

SEQ ID NO: 5513636 - DNA, 25 bp, Homo sapien
gtaaactcacccatcagcagctgcc

SEQ ID NO: 5513637 - DNA, 25 bp, Homo sapien
tgttggtaacgcgtacagaactatc

SEQ ID NO: 5513638 - DNA, 25 bp, Homo sapien
catagtgaagaatctcaacaggttt

SEQ ID NO: 5513639 - DNA, 25 bp, Homo sapien
tgatctgctgagctcaaggactgga

SEQ ID NO: 5513640 - DNA, 25 bp, Homo sapien
attattaaatggctctctaggaact

SEQ ID NO: 5513641 - DNA, 25 bp, Homo sapien
gaaaatgataggagacaaatattac

SEQ ID NO: 5513642 - DNA, 25 bp, Homo sapien
ggaggggcttaccaaatgatgaata

SEQ ID NO: 5513643 - DNA, 25 bp, Homo sapien
aactactgcctgagaataaagccct

SEQ ID NO: 5513644 - DNA, 25 bp, Homo sapien
aacagctctgtcaagcctctggctc

SEQ ID NO: 5513645 - DNA, 25 bp, Homo sapien
aaatgccaagtctaaggtactacac

SEQ ID NO: 5513646 - DNA, 25 bp, Homo sapien
agccaaaaggcttctgagagtcatc

SEQ ID NO: 5513647 - DNA, 25 bp, Homo sapien
tggctctctaggaacttagaaactc

SEQ ID NO: 5513648 - DNA, 25 bp, Homo sapien
gccctcacacataagtaacagctct

SEQ ID NO: 5513649 - DNA, 25 bp, Homo sapien
ggtactacacagtttaagataagcc

SEQ ID NO: 5513650 - DNA, 25 bp, Homo sapien
ctatcaaaaataaatgccaagtcta

SEQ ID NO: 5513651 - DNA, 25 bp, Homo sapien
aagaacacgttggcaaaactttatg

SEQ ID NO: 5513652 - DNA, 25 bp, Homo sapien
cacacaagataactgattagggttt

SEQ ID NO: 5513653 - DNA, 25 bp, Homo sapien
tgcaaaaccaccccagaactgagtt

SEQ ID NO: 5513654 - DNA, 25 bp, Homo sapien
tctacaaggaatactatggagtttc

SEQ ID NO: 5513655 - DNA, 25 bp, Homo sapien
ttgaaatgacaaaagcccaattcta

SEQ ID NO: 5513656 - DNA, 25 bp, Homo sapien
atcaacttgtactgtgccggcagcg

SEQ ID NO: 5513657 - DNA, 25 bp, Homo sapien
gggcgtgtgctaaggcatgtaaata

SEQ ID NO: 5513658 - DNA, 25 bp, Homo sapien
cattctggttgttccggcgacaggg

SEQ ID NO: 5513659 - DNA, 25 bp, Homo sapien
aaaagcaggacatttacaaagaatc

SEQ ID NO: 5513660 - DNA, 25 bp, Homo sapien
atacatacagaaaaaagaacacgtt

SEQ ID NO: 5513661 - DNA, 25 bp, Homo sapien
tacaattggatacggtgaaatatac

SEQ ID NO: 5513662 - DNA, 25 bp, Homo sapien
taaatcatattaaacgcaagcacta

SEQ ID NO: 5513663 - DNA, 25 bp, Homo sapien
ctgaacagcaaggtgggttattcaa

SEQ ID NO: 5513664 - DNA, 25 bp, Homo sapien
aacaccagccctaatgaccaagaca

SEQ ID NO: 5513665 - DNA, 25 bp, Homo sapien
cacagaaatgtgaaaacaccagccc

SEQ ID NO: 5513666 - DNA, 25 bp, Homo sapien
aaatccaccttgaccacagaaatgt

SEQ ID NO: 5513667 - DNA, 25 bp, Homo sapien
ttgtttccagtaggatgtgggctga

SEQ ID NO: 5513668 - DNA, 25 bp, Homo sapien
aacgcaagcactatgatgcacagac

SEQ ID NO: 5513669 - DNA, 25 bp, Homo sapien
accaagacaatgtttcaaagacaac

SEQ ID NO: 5513670 - DNA, 25 bp, Homo sapien
atgcacagacgtgagcactgaatat

SEQ ID NO: 5513671 - DNA, 25 bp, Homo sapien
ctaaaatattctaaggggacataaa

SEQ ID NO: 5513672 - DNA, 25 bp, Homo sapien
aaatcattttacggggaatctattc

SEQ ID NO: 5513673 - DNA, 25 bp, Homo sapien
agaaaacagtattacagcaaagctt

SEQ ID NO: 5513674 - DNA, 25 bp, Homo sapien
ttcaagaaccataaactgacagaat

SEQ ID NO: 5513675 - DNA, 25 bp, Homo sapien
tgctctcctgcaataccaccccttc

SEQ ID NO: 5513676 - DNA, 25 bp, Homo sapien
tgctgcagtaaccagtgtttgggaa

SEQ ID NO: 5513677 - DNA, 25 bp, Homo sapien
atacagtaggtttccaaattgcaat

SEQ ID NO: 5513678 - DNA, 25 bp, Homo sapien
ttgtagtgcacatgacagtaagcga

SEQ ID NO: 5513679 - DNA, 25 bp, Homo sapien
tacagcaaagcttagatagtttaac

SEQ ID NO: 5513680 - DNA, 25 bp, Homo sapien
gatgaggatgcctattcagacaatc

SEQ ID NO: 5513681 - DNA, 25 bp, Homo sapien
gtttgggaaaggacatcagtcttca

SEQ ID NO: 5513682 - DNA, 25 bp, Homo sapien
gttttgggtaaatatagatgaggat

SEQ ID NO: 5513683 - DNA, 25 bp, Homo sapien
gcacatgacagtaagcgaggttttg

SEQ ID NO: 5513684 - DNA, 25 bp, Homo sapien
agtagtcatcattgctggctccctc

SEQ ID NO: 5513685 - DNA, 25 bp, Homo sapien
gtctcgacctgtggaactgagtgac

SEQ ID NO: 5513686 - DNA, 25 bp, Homo sapien
gtattacatccagcagccagaatgc

SEQ ID NO: 5513687 - DNA, 25 bp, Homo sapien
atgattcaagatggaaaaggtgatg

SEQ ID NO: 5513688 - DNA, 25 bp, Homo sapien
ctggtggagctgtctaaggctcaag

SEQ ID NO: 5513689 - DNA, 25 bp, Homo sapien
aagccttggaccaaaaggaatggat

SEQ ID NO: 5513690 - DNA, 25 bp, Homo sapien
aaagggcattgaaatcttgactgac

SEQ ID NO: 5513691 - DNA, 25 bp, Homo sapien
gacaagccagcccagatccgcttca

SEQ ID NO: 5513692 - DNA, 25 bp, Homo sapien
ccgcttcagcaacatttccgccgcc

SEQ ID NO: 5513693 - DNA, 25 bp, Homo sapien
gctcaagatatagaagcaggagatg

SEQ ID NO: 5513694 - DNA, 25 bp, Homo sapien
caggagatggcaccacatcagtagt

SEQ ID NO: 5513695 - DNA, 25 bp, Homo sapien
ttagagattctaacatgcgatgccg

SEQ ID NO: 5513696 - DNA, 25 bp, Homo sapien
cttagtaatgtcagggttgtgccag

SEQ ID NO: 5513697 - DNA, 25 bp, Homo sapien
atgcgatgccgaaaaatcctaacat

SEQ ID NO: 5513698 - DNA, 25 bp, Homo sapien
ttaaacagactagtgaatttgtgtc

SEQ ID NO: 5513699 - DNA, 25 bp, Homo sapien
gaaatatgtggaacaccagtcaata

SEQ ID NO: 5513700 - DNA, 25 bp, Homo sapien
ggaagactctggatacaaacacatt

SEQ ID NO: 5513701 - DNA, 25 bp, Homo sapien
tagacgtacaaaaggacacccatat

SEQ ID NO: 5513702 - DNA, 25 bp, Homo sapien
gcgtatggatattaggagagcattg

SEQ ID NO: 5513703 - DNA, 25 bp, Homo sapien
tctgggtgtagtaccaagtggttat

SEQ ID NO: 5513704 - DNA, 25 bp, Homo sapien
actggttacctaggcctagacgtac

SEQ ID NO: 5513705 - DNA, 25 bp, Homo sapien
gttaatggtatgatattggccttca

SEQ ID NO: 5513706 - DNA, 25 bp, Homo sapien
atcgcttgtgggaataaatacttat

SEQ ID NO: 5513707 - DNA, 25 bp, Homo sapien
gactttgaaggaaatggtacatatt

SEQ ID NO: 5513708 - DNA, 25 bp, Homo sapien
tccaaaagctgctaggagacagttt

SEQ ID NO: 5513709 - DNA, 25 bp, Homo sapien
gaatttgccaagacatctgaagtat

SEQ ID NO: 5513710 - DNA, 25 bp, Homo sapien
aagtgatatatagtccaaaagctgc

SEQ ID NO: 5513711 - DNA, 25 bp, Homo sapien
tttgatacagcataggctaggatga

SEQ ID NO: 5513712 - DNA, 25 bp, Homo sapien
taatctaggtatacattagagcttc

SEQ ID NO: 5513713 - DNA, 25 bp, Homo sapien
ttacagttctggcactgacactttt

SEQ ID NO: 5513714 - DNA, 25 bp, Homo sapien
ttaaatgagatggaataatgttgtt

SEQ ID NO: 5513715 - DNA, 25 bp, Homo sapien
gagacagtttggacgtgtagaatat

SEQ ID NO: 5513716 - DNA, 25 bp, Homo sapien
ataggctaggatgactttgaaggaa

SEQ ID NO: 5513717 - DNA, 25 bp, Homo sapien
tttcaggaagcacaattattgtagc

SEQ ID NO: 5513718 - DNA, 25 bp, Homo sapien
ccctctcccttgctgtgaaataatt

SEQ ID NO: 5513719 - DNA, 25 bp, Homo sapien
taggcaagttccactacatcagctc

SEQ ID NO: 5513720 - DNA, 25 bp, Homo sapien
ggacctgaatgtgctaggcaagttc

SEQ ID NO: 5513721 - DNA, 25 bp, Homo sapien
gcgttaaggtggatacctgccaaag

SEQ ID NO: 5513722 - DNA, 25 bp, Homo sapien
aagtttgttcaaagacacctgtgtc

SEQ ID NO: 5513723 - DNA, 25 bp, Homo sapien
aggagatgagagcatgctctgccaa

SEQ ID NO: 5513724 - DNA, 25 bp, Homo sapien
tcagctcaagaacataaacaaaaat

SEQ ID NO: 5513725 - DNA, 25 bp, Homo sapien
gcatgctctgccaactggctgggac

SEQ ID NO: 5513726 - DNA, 25 bp, Homo sapien
tcatctcctagtgctgtcctcattc

SEQ ID NO: 5513727 - DNA, 25 bp, Homo sapien
attattgtagcgttaaggtggatac

SEQ ID NO: 5513728 - DNA, 25 bp, Homo sapien
tatgggtatgaatttaagcagggac

SEQ ID NO: 5513729 - DNA, 25 bp, Homo sapien
gttcactgtgtgtcctagcctgcca

SEQ ID NO: 5513730 - DNA, 25 bp, Homo sapien
gtgaactacaacagagatgaaaaac

SEQ ID NO: 5513731 - DNA, 25 bp, Homo sapien
atttgcccaagcatgagaggagaaa

SEQ ID NO: 5513732 - DNA, 25 bp, Homo sapien
actgcagtggtgtcataccgactca

SEQ ID NO: 5513733 - DNA, 25 bp, Homo sapien
gcggtatcccaaggtggtccatgca

SEQ ID NO: 5513734 - DNA, 25 bp, Homo sapien
tgtgttcctgatagcaagtgcatag

SEQ ID NO: 5513735 - DNA, 25 bp, Homo sapien
ttaagcagggaccaactttacagtc

SEQ ID NO: 5513736 - DNA, 25 bp, Homo sapien
gtccatgcatggcacacggattcac

SEQ ID NO: 5513737 - DNA, 25 bp, Homo sapien
ttccatcagcaaggcggatgttgat

SEQ ID NO: 5513738 - DNA, 25 bp, Homo sapien
gcaaattagcagaacagtcgattcc

SEQ ID NO: 5513739 - DNA, 25 bp, Homo sapien
cctggcagatcgtgaccagtcacgg

SEQ ID NO: 5513740 - DNA, 25 bp, Homo sapien
accgcttgggtctcaatgaaggttt

SEQ ID NO: 5513741 - DNA, 25 bp, Homo sapien
ggcccaccagccaggctaggtcaaa

SEQ ID NO: 5513742 - DNA, 25 bp, Homo sapien
cctgtcactacggatgaggaagagg

SEQ ID NO: 5513743 - DNA, 25 bp, Homo sapien
ccttcaatgcggcctgtgagaaaga

SEQ ID NO: 5513744 - DNA, 25 bp, Homo sapien
gacacctgtgtgagctgcctagtct

SEQ ID NO: 5513745 - DNA, 25 bp, Homo sapien
gggacaaggcctatgaaagtgttta

SEQ ID NO: 5513746 - DNA, 25 bp, Homo sapien
ttcactggggtgttatcaggatgga

SEQ ID NO: 5513747 - DNA, 25 bp, Homo sapien
tcttctccaggggaagctactgcaa

SEQ ID NO: 5513748 - DNA, 25 bp, Homo sapien
cggagtggaagctatcatgatcaaa

SEQ ID NO: 5513749 - DNA, 25 bp, Homo sapien
gacccaaacatgagggttctggggc

SEQ ID NO: 5513750 - DNA, 25 bp, Homo sapien
ttgcaaaaatttcgaggcgggtaca

SEQ ID NO: 5513751 - DNA, 25 bp, Homo sapien
gatcaaggggcccaaattcgcagaa

SEQ ID NO: 5513752 - DNA, 25 bp, Homo sapien
ggcgggtacatgaatgactgaaatt

SEQ ID NO: 5513753 - DNA, 25 bp, Homo sapien
tgcgagaaacagacacccaatcaaa

SEQ ID NO: 5513754 - DNA, 25 bp, Homo sapien
acacagtcacagctccagggtttct

SEQ ID NO: 5513755 - DNA, 25 bp, Homo sapien
tgcaaagcctgaacagcctccctaa

SEQ ID NO: 5513756 - DNA, 25 bp, Homo sapien
gaatgtatcctgacaagggacgctc

SEQ ID NO: 5513757 - DNA, 25 bp, Homo sapien
caggcgcctgtgattcctctggtcc

SEQ ID NO: 5513758 - DNA, 25 bp, Homo sapien
aaatggacagttggtacacagatat

SEQ ID NO: 5513759 - DNA, 25 bp, Homo sapien
agctcccatcagaggatcaaggggc

SEQ ID NO: 5513760 - DNA, 25 bp, Homo sapien
tgttcaggtaagggacctgcaaagc

SEQ ID NO: 5513761 - DNA, 25 bp, Homo sapien
aatagctcctaaacagggggatgaa

SEQ ID NO: 5513762 - DNA, 25 bp, Homo sapien
ataaggctgggattcacatcttttt

SEQ ID NO: 5513763 - DNA, 25 bp, Homo sapien
catcatagcttcaaaggcttccctg

SEQ ID NO: 5513764 - DNA, 25 bp, Homo sapien
tgatgaattcaagtctaacacgatt

SEQ ID NO: 5513765 - DNA, 25 bp, Homo sapien
tccaatacataggctaagtggtttc

SEQ ID NO: 5513766 - DNA, 25 bp, Homo sapien
taaaagcaggatagctcttcataaa

SEQ ID NO: 5513767 - DNA, 25 bp, Homo sapien
ttcataaatagttgagaagctctaa

SEQ ID NO: 5513768 - DNA, 25 bp, Homo sapien
tgagaagctctaaagtgattttggc

SEQ ID NO: 5513769 - DNA, 25 bp, Homo sapien
cgtaaggaaagaaacactaacagta

SEQ ID NO: 5513770 - DNA, 25 bp, Homo sapien
agtcttaagagcaatataatgaaac

SEQ ID NO: 5513771 - DNA, 25 bp, Homo sapien
tttaagaattaaactgccacctcag

SEQ ID NO: 5513772 - DNA, 25 bp, Homo sapien
tgataaggataagtttttggaggaa

SEQ ID NO: 5513773 - DNA, 25 bp, Homo sapien
aatagaaatgtgattgaagatttgc

SEQ ID NO: 5513774 - DNA, 25 bp, Homo sapien
gttaatatgagcaagtaaatcttta

SEQ ID NO: 5513775 - DNA, 25 bp, Homo sapien
cccagatgctgcctacagcagtttc

SEQ ID NO: 5513776 - DNA, 25 bp, Homo sapien
gattgaagatttgcattcccagatg

SEQ ID NO: 5513777 - DNA, 25 bp, Homo sapien
aaacacatgccaatctcagtgaact

SEQ ID NO: 5513778 - DNA, 25 bp, Homo sapien
tagatacaaagtaaaaacacatgcc

SEQ ID NO: 5513779 - DNA, 25 bp, Homo sapien
aagaagacatgttaacatgcttaga

SEQ ID NO: 5513780 - DNA, 25 bp, Homo sapien
tagggcacattaattcttggagagt

SEQ ID NO: 5513781 - DNA, 25 bp, Homo sapien
tccaagtgtttgagaatagaaatgt

SEQ ID NO: 5513782 - DNA, 25 bp, Homo sapien
ttgcattgaagtctgaatgtaaatt

SEQ ID NO: 5513783 - DNA, 25 bp, Homo sapien
tcgagggacgtcagcgccgccacgg

SEQ ID NO: 5513784 - DNA, 25 bp, Homo sapien
ccgtggcggcgctgacgtccctcga

SEQ ID NO: 5513785 - DNA, 25 bp, Homo sapien
tgtaattcaatactgaggaactccc

SEQ ID NO: 5513786 - DNA, 25 bp, Homo sapien
aaaccacatggcaaaacaatacttt

SEQ ID NO: 5513787 - DNA, 25 bp, Homo sapien
ctgaggaactcccacaacactgtct

SEQ ID NO: 5513788 - DNA, 25 bp, Homo sapien
aggtagaaagatgacatactggcac

SEQ ID NO: 5513789 - DNA, 25 bp, Homo sapien
catagatttaactgggaaagtctcc

SEQ ID NO: 5513790 - DNA, 25 bp, Homo sapien
taggaaattacaatgtgaaagttgc

SEQ ID NO: 5513791 - DNA, 25 bp, Homo sapien
aggcctgagtgcacacatgtaattc

SEQ ID NO: 5513792 - DNA, 25 bp, Homo sapien
attaacatggacaaaccccagcttc

SEQ ID NO: 5513793 - DNA, 25 bp, Homo sapien
ctgaaagggcatatgataaagtata

SEQ ID NO: 5513794 - DNA, 25 bp, Homo sapien
aaatacctggtttctgaaagggcat

SEQ ID NO: 5513795 - DNA, 25 bp, Homo sapien
caatgattggaacagcaggttaaac

SEQ ID NO: 5513796 - DNA, 25 bp, Homo sapien
agtttacattttgtagactcttaag

SEQ ID NO: 5513797 - DNA, 25 bp, Homo sapien
cttaagagtctacaaaatgtaaact

SEQ ID NO: 5513798 - DNA, 25 bp, Homo sapien
ggaaccgagccggaggtggcacccg

SEQ ID NO: 5513799 - DNA, 25 bp, Homo sapien
cgggtgccacctccggctcggttcc

SEQ ID NO: 5513800 - DNA, 25 bp, Homo sapien
gaggtgacggaatgcttgttttgca

SEQ ID NO: 5513801 - DNA, 25 bp, Homo sapien
ccgtgcaagcacaaatttaccttcc

SEQ ID NO: 5513802 - DNA, 25 bp, Homo sapien
tgacattattaaagaggtgacggaa

SEQ ID NO: 5513803 - DNA, 25 bp, Homo sapien
aatgtacaattcagagcaggtgtcc

SEQ ID NO: 5513804 - DNA, 25 bp, Homo sapien
ctcaaggtactcacggtctgaaata

SEQ ID NO: 5513805 - DNA, 25 bp, Homo sapien
caatttactgggacaaaaatgaaca

SEQ ID NO: 5513806 - DNA, 25 bp, Homo sapien
aattcacaggattcaaatagttgct

SEQ ID NO: 5513807 - DNA, 25 bp, Homo sapien
tacaaaatgatccccgtgcaagcac

SEQ ID NO: 5513808 - DNA, 25 bp, Homo sapien
cacagttgctcagatctcaaggtac

SEQ ID NO: 5513809 - DNA, 25 bp, Homo sapien
gagcaggtgtccatagaaacaacta

SEQ ID NO: 5513810 - DNA, 25 bp, Homo sapien
cactgtggaccattgctattacttc

SEQ ID NO: 5513811 - DNA, 25 bp, Homo sapien
ggcactagtaatatccttcaggcgt

SEQ ID NO: 5513812 - DNA, 25 bp, Homo sapien
atggggtgtcagaaatgtacacatc

SEQ ID NO: 5513813 - DNA, 25 bp, Homo sapien
gtgtatattatgtatggggtgtcag

SEQ ID NO: 5513814 - DNA, 25 bp, Homo sapien
aggataagttttagtgcagaaagtc

SEQ ID NO: 5513815 - DNA, 25 bp, Homo sapien
tgtagagtagtatcatcaaaaatgc

SEQ ID NO: 5513816 - DNA, 25 bp, Homo sapien
ccaggcacgattctgcacatgagtc

SEQ ID NO: 5513817 - DNA, 25 bp, Homo sapien
attagattgtgggtttcaagtttcc

SEQ ID NO: 5513818 - DNA, 25 bp, Homo sapien
atgagtctgatctgtgtagagtagt

SEQ ID NO: 5513819 - DNA, 25 bp, Homo sapien
cataaataatgttggctgcactgat

SEQ ID NO: 5513820 - DNA, 25 bp, Homo sapien
cttccaagttgatgcgaacacgcag

SEQ ID NO: 5513821 - DNA, 25 bp, Homo sapien
attgttgtacatatgaggataagtt

SEQ ID NO: 5513822 - DNA, 25 bp, Homo sapien
ttggtgagaagtgatatacttcaac

SEQ ID NO: 5513823 - DNA, 25 bp, Homo sapien
aagcggaacatctaaaaggcactgc

SEQ ID NO: 5513824 - DNA, 25 bp, Homo sapien
aaaaggcactgcacaatggagttaa

SEQ ID NO: 5513825 - DNA, 25 bp, Homo sapien
tgaagactttatagaaagcggaaca

SEQ ID NO: 5513826 - DNA, 25 bp, Homo sapien
cttgaaagattgaatcaaagttgtc

SEQ ID NO: 5513827 - DNA, 25 bp, Homo sapien
gaagaaaccaagaatggaacagttc

SEQ ID NO: 5513828 - DNA, 25 bp, Homo sapien
tgactctacccacttggtgagaagt

SEQ ID NO: 5513829 - DNA, 25 bp, Homo sapien
agggacaaacagccaactgactcta

SEQ ID NO: 5513830 - DNA, 25 bp, Homo sapien
aagcaggtaactagtgaagtcacct

SEQ ID NO: 5513831 - DNA, 25 bp, Homo sapien
aaaatacagagctatcagatacccc

SEQ ID NO: 5513832 - DNA, 25 bp, Homo sapien
gcacaatggagttaagattacttac

SEQ ID NO: 5513833 - DNA, 25 bp, Homo sapien
agttagcttgacaacagtttaaaac

SEQ ID NO: 5513834 - DNA, 25 bp, Homo sapien
agaaaatgaaaagcttgagttatca

SEQ ID NO: 5513835 - DNA, 25 bp, Homo sapien
tgagttatcagtgtacgagagattt

SEQ ID NO: 5513836 - DNA, 25 bp, Homo sapien
tgatggtcccagttaaatctgtaca

SEQ ID NO: 5513837 - DNA, 25 bp, Homo sapien
aaaaggacaaagcacagtcctatac

SEQ ID NO: 5513838 - DNA, 25 bp, Homo sapien
tcagaatcttgcgtcttaaagcaga

SEQ ID NO: 5513839 - DNA, 25 bp, Homo sapien
ctctgtcagaaattcaaaactaaac

SEQ ID NO: 5513840 - DNA, 25 bp, Homo sapien
tgtacaactgtatgagaaaatgaaa

SEQ ID NO: 5513841 - DNA, 25 bp, Homo sapien
agtgtacgagagattttaaactact

SEQ ID NO: 5513842 - DNA, 25 bp, Homo sapien
taaagcagatgattattagttagct

SEQ ID NO: 5513843 - DNA, 25 bp, Homo sapien
gcccaacatgggtcacattgcaaaa

SEQ ID NO: 5513844 - DNA, 25 bp, Homo sapien
gagattaatgctttgaggctggata

SEQ ID NO: 5513845 - DNA, 25 bp, Homo sapien
caggctttctggattagtcaacatt

SEQ ID NO: 5513846 - DNA, 25 bp, Homo sapien
ccagattatgttgcatcaggctttc

SEQ ID NO: 5513847 - DNA, 25 bp, Homo sapien
agaataagtgcaagtccccacccca

SEQ ID NO: 5513848 - DNA, 25 bp, Homo sapien
ttgaggctggatatggtatttctac

SEQ ID NO: 5513849 - DNA, 25 bp, Homo sapien
gctaaagcatgttatagtgctgtac

SEQ ID NO: 5513850 - DNA, 25 bp, Homo sapien
ccccacccccccaagctaaagcatg

SEQ ID NO: 5513851 - DNA, 25 bp, Homo sapien
tttgacaaccaaactgtaacactcc

SEQ ID NO: 5513852 - DNA, 25 bp, Homo sapien
ctatatcatagatggctctcccttc

SEQ ID NO: 5513853 - DNA, 25 bp, Homo sapien
attttagagaataagtgcaagtccc

SEQ ID NO: 5513854 - DNA, 25 bp, Homo sapien
tacaaatgtaccaaagcagttttcc

SEQ ID NO: 5513855 - DNA, 25 bp, Homo sapien
tctcttgcttaggaacaaagggcca

SEQ ID NO: 5513856 - DNA, 25 bp, Homo sapien
aaaaactgcttctgactgctggggc

SEQ ID NO: 5513857 - DNA, 25 bp, Homo sapien
gacattcaagaatcagcaataactt

SEQ ID NO: 5513858 - DNA, 25 bp, Homo sapien
gtggcagaagtacagacctgtgtag

SEQ ID NO: 5513859 - DNA, 25 bp, Homo sapien
gtagaaaaatacacccaagcagctg

SEQ ID NO: 5513860 - DNA, 25 bp, Homo sapien
atgcccttcatcagagagcaagtcc

SEQ ID NO: 5513861 - DNA, 25 bp, Homo sapien
acatcaaacacaggtgcaggaattc

SEQ ID NO: 5513862 - DNA, 25 bp, Homo sapien
tggggcactgaacgacatgcccttc

SEQ ID NO: 5513863 - DNA, 25 bp, Homo sapien
ttgatagccgacccagttatataac

SEQ ID NO: 5513864 - DNA, 25 bp, Homo sapien
tcatggggaagcatctttggtcttc

SEQ ID NO: 5513865 - DNA, 25 bp, Homo sapien
aagcagctgttctaagcagtaattc

SEQ ID NO: 5513866 - DNA, 25 bp, Homo sapien
ttctagactgtggcctttcccattc

SEQ ID NO: 5513867 - DNA, 25 bp, Homo sapien
cccacccagcatacataacaaacac

SEQ ID NO: 5513868 - DNA, 25 bp, Homo sapien
aaacacaaagcttgtgatgatatac

SEQ ID NO: 5513869 - DNA, 25 bp, Homo sapien
ttaaaggactggaatataaaccaca

SEQ ID NO: 5513870 - DNA, 25 bp, Homo sapien
cagcccttccagcattaaaggactg

SEQ ID NO: 5513871 - DNA, 25 bp, Homo sapien
ataaaagcacaatatcccacccagc

SEQ ID NO: 5513872 - DNA, 25 bp, Homo sapien
ttgtgaacagttagcatatatcctt

SEQ ID NO: 5513873 - DNA, 25 bp, Homo sapien
caaactaggaacacactctgccatt

SEQ ID NO: 5513874 - DNA, 25 bp, Homo sapien
aaaaatgcgatcacatatgttacat

SEQ ID NO: 5513875 - DNA, 25 bp, Homo sapien
ttcctggaacaaggcaggtacaaac

SEQ ID NO: 5513876 - DNA, 25 bp, Homo sapien
ccaatcccattcctggggggttatc

SEQ ID NO: 5513877 - DNA, 25 bp, Homo sapien
gttgatggaacagaaagatacgtta

SEQ ID NO: 5513878 - DNA, 25 bp, Homo sapien
ttgatcctggtttgttggtgctgtt

SEQ ID NO: 5513879 - DNA, 25 bp, Homo sapien
atggaatcctggaaaatgcacgatt

SEQ ID NO: 5513880 - DNA, 25 bp, Homo sapien
caaagcactgagaagtccaacatgg

SEQ ID NO: 5513881 - DNA, 25 bp, Homo sapien
tcttgaggcttctatgtggagagaa

SEQ ID NO: 5513882 - DNA, 25 bp, Homo sapien
agaaaatcaaacagacgaatgtcct

SEQ ID NO: 5513883 - DNA, 25 bp, Homo sapien
tgctgctgctatctacccaggcaac

SEQ ID NO: 5513884 - DNA, 25 bp, Homo sapien
aggtggtcctaagtagctgcatgta

SEQ ID NO: 5513885 - DNA, 25 bp, Homo sapien
tttcgtgagacgaacgcatgtactg

SEQ ID NO: 5513886 - DNA, 25 bp, Homo sapien
agttgtaagagctttcgtgagacga

SEQ ID NO: 5513887 - DNA, 25 bp, Homo sapien
agacacaaaaccatactgctgcaac

SEQ ID NO: 5513888 - DNA, 25 bp, Homo sapien
tattgcattgaagtgggaaatgagc

SEQ ID NO: 5513889 - DNA, 25 bp, Homo sapien
tacctcttgaagcatccaacactgc

SEQ ID NO: 5513890 - DNA, 25 bp, Homo sapien
acgaacctatacggtgtcctttcta

SEQ ID NO: 5513891 - DNA, 25 bp, Homo sapien
aagtcggtaaagtagtaatagatct

SEQ ID NO: 5513892 - DNA, 25 bp, Homo sapien
tttagccagttttcagtattgcatt

SEQ ID NO: 5513893 - DNA, 25 bp, Homo sapien
gagacaccatcggaaagacatatta

SEQ ID NO: 5513894 - DNA, 25 bp, Homo sapien
tgtgctaataaaataggattatacc

SEQ ID NO: 5513895 - DNA, 25 bp, Homo sapien
caaagcaccaacacttgggagacac

SEQ ID NO: 5513896 - DNA, 25 bp, Homo sapien
ccaacactgcactatttcacaagcc

SEQ ID NO: 5513897 - DNA, 25 bp, Homo sapien
catgcacaccatggagaatgaagaa

SEQ ID NO: 5513898 - DNA, 25 bp, Homo sapien
ctctaattagctagcaagtttgtgc

SEQ ID NO: 5513899 - DNA, 25 bp, Homo sapien
caaaaacatacacaagataggaatc

SEQ ID NO: 5513900 - DNA, 25 bp, Homo sapien
acgagggatagttgatgcttccaga

SEQ ID NO: 5513901 - DNA, 25 bp, Homo sapien
tcaacaatcacgacgagggatagtt

SEQ ID NO: 5513902 - DNA, 25 bp, Homo sapien
taaggtgatttttagccaacgattg

SEQ ID NO: 5513903 - DNA, 25 bp, Homo sapien
agccaacgattgtcctagaattttc

SEQ ID NO: 5513904 - DNA, 25 bp, Homo sapien
attcagaaggattatggcctcttcc

SEQ ID NO: 5513905 - DNA, 25 bp, Homo sapien
aaaccaaaagcatgcccttcgtcct

SEQ ID NO: 5513906 - DNA, 25 bp, Homo sapien
gcactgctctgcgttggttaggcga

SEQ ID NO: 5513907 - DNA, 25 bp, Homo sapien
cgtcagcacatcgcttcagccacac

SEQ ID NO: 5513908 - DNA, 25 bp, Homo sapien
ttagtgccaacaattcagaaggatt

SEQ ID NO: 5513909 - DNA, 25 bp, Homo sapien
tccagagatcatgctggctcctgtt

SEQ ID NO: 5513910 - DNA, 25 bp, Homo sapien
cgtctggatcacgtaccgaggtgtg

SEQ ID NO: 5513911 - DNA, 25 bp, Homo sapien
cacacctcggtacgtgatccagacg

SEQ ID NO: 5513912 - DNA, 25 bp, Homo sapien
acatgggaccataagccagtacgtt

SEQ ID NO: 5513913 - DNA, 25 bp, Homo sapien
attcataacgggaagaaaaagtcaa

SEQ ID NO: 5513914 - DNA, 25 bp, Homo sapien
tgctaaaggcactcagattctgggc

SEQ ID NO: 5513915 - DNA, 25 bp, Homo sapien
aaaaaaagacgtagaacagaattca

SEQ ID NO: 5513916 - DNA, 25 bp, Homo sapien
aactgctcacaatggtaggggttct

SEQ ID NO: 5513917 - DNA, 25 bp, Homo sapien
tcagtagaagcgttttatgagaagc

SEQ ID NO: 5513918 - DNA, 25 bp, Homo sapien
aggggttctcccctgccaagaaagc

SEQ ID NO: 5513919 - DNA, 25 bp, Homo sapien
tcagattctgggcttaacggagaca

SEQ ID NO: 5513920 - DNA, 25 bp, Homo sapien
tagctacccagaaaggaagtttaca

SEQ ID NO: 5513921 - DNA, 25 bp, Homo sapien
acaatgatttggctagaagaaaaaa

SEQ ID NO: 5513922 - DNA, 25 bp, Homo sapien
cagccagagtgacagtaactgctca

SEQ ID NO: 5513923 - DNA, 25 bp, Homo sapien
gtcgaccgctctacccccggcgaag

SEQ ID NO: 5513924 - DNA, 25 bp, Homo sapien
cttcgccgggggtagagcggtcgac

SEQ ID NO: 5513925 - DNA, 25 bp, Homo sapien
ttaaaaagctaatggatggaaccca

SEQ ID NO: 5513926 - DNA, 25 bp, Homo sapien
ttaggcaacactggcaccccttgtt

SEQ ID NO: 5513927 - DNA, 25 bp, Homo sapien
ttgagggccccagtttaagctaata

SEQ ID NO: 5513928 - DNA, 25 bp, Homo sapien
cagaagatgattacgtggtggttta

SEQ ID NO: 5513929 - DNA, 25 bp, Homo sapien
taaaaggtcactaaagaagtcatac

SEQ ID NO: 5513930 - DNA, 25 bp, Homo sapien
aacactggttgtaaaggaatgtgcc

SEQ ID NO: 5513931 - DNA, 25 bp, Homo sapien
agatcaacaggctgctctttgaggg

SEQ ID NO: 5513932 - DNA, 25 bp, Homo sapien
taataaggaaagctagagtctgtaa

SEQ ID NO: 5513933 - DNA, 25 bp, Homo sapien
ttcagtagtaaaggtatacagttta

SEQ ID NO: 5513934 - DNA, 25 bp, Homo sapien
acaggaaggaaatcaataccagatc

SEQ ID NO: 5513935 - DNA, 25 bp, Homo sapien
actccacctggacacagttaaactc

SEQ ID NO: 5513936 - DNA, 25 bp, Homo sapien
tacgccctctacggacagagactga

SEQ ID NO: 5513937 - DNA, 25 bp, Homo sapien
ctccccctacgccctctacggacag

SEQ ID NO: 5513938 - DNA, 25 bp, Homo sapien
ccttctccccactttcacctcccca

SEQ ID NO: 5513939 - DNA, 25 bp, Homo sapien
ctactccaagagcccgcttcccacg

SEQ ID NO: 5513940 - DNA, 25 bp, Homo sapien
aaagttgaaaaaatatcatttgact

SEQ ID NO: 5513941 - DNA, 25 bp, Homo sapien
cacccctactccaagagcccgcttc

SEQ ID NO: 5513942 - DNA, 25 bp, Homo sapien
tatctatctacccgacagcagcgac

SEQ ID NO: 5513943 - DNA, 25 bp, Homo sapien
tttatgttagctccaagcggaccgg

SEQ ID NO: 5513944 - DNA, 25 bp, Homo sapien
gcagccgctaccacccctactccaa

SEQ ID NO: 5513945 - DNA, 25 bp, Homo sapien
aaggaaagaaatgtataccgtatct

SEQ ID NO: 5513946 - DNA, 25 bp, Homo sapien
taccgtatctatctacccgacagca

SEQ ID NO: 5513947 - DNA, 25 bp, Homo sapien
tggggacaagagtaccatacatgta

SEQ ID NO: 5513948 - DNA, 25 bp, Homo sapien
aaggtaatagcatggcaaatagtat

SEQ ID NO: 5513949 - DNA, 25 bp, Homo sapien
gaatatctgctagtggggaatttac

SEQ ID NO: 5513950 - DNA, 25 bp, Homo sapien
acccagaggttaacagcttgccatg

SEQ ID NO: 5513951 - DNA, 25 bp, Homo sapien
gtacttattctgaggcaggggatgg

SEQ ID NO: 5513952 - DNA, 25 bp, Homo sapien
ctgtctccaggttagagcatgggtg

SEQ ID NO: 5513953 - DNA, 25 bp, Homo sapien
acagatacaccaacacagagatacc

SEQ ID NO: 5513954 - DNA, 25 bp, Homo sapien
tgccatgcatgcaactgtgtgcgca

SEQ ID NO: 5513955 - DNA, 25 bp, Homo sapien
gctcaaagccagatgactatcacct

SEQ ID NO: 5513956 - DNA, 25 bp, Homo sapien
aagacaggtggtgaacaaattcata

SEQ ID NO: 5513957 - DNA, 25 bp, Homo sapien
gtggttggaagttctcagaagagct

SEQ ID NO: 5513958 - DNA, 25 bp, Homo sapien
ttggcattaattgtgactgaaatac

SEQ ID NO: 5513959 - DNA, 25 bp, Homo sapien
ccaaagccactttcccacctgctgc

SEQ ID NO: 5513960 - DNA, 25 bp, Homo sapien
attcaggttgtcagaatgcagtcct

SEQ ID NO: 5513961 - DNA, 25 bp, Homo sapien
gctcacaaaataagttccaggatat

SEQ ID NO: 5513962 - DNA, 25 bp, Homo sapien
actatgtcaacaattggatgtactc

SEQ ID NO: 5513963 - DNA, 25 bp, Homo sapien
ttctgcctcattgtggtaaggacaa

SEQ ID NO: 5513964 - DNA, 25 bp, Homo sapien
ctgtgtggattcagagctcacaaac

SEQ ID NO: 5513965 - DNA, 25 bp, Homo sapien
aagaagtcgatataatagcaaaatt

SEQ ID NO: 5513966 - DNA, 25 bp, Homo sapien
ggatgtactcatcaagtcaccctta

SEQ ID NO: 5513967 - DNA, 25 bp, Homo sapien
gtcatttaaggctgaggtgtatgct

SEQ ID NO: 5513968 - DNA, 25 bp, Homo sapien
agatctctgtgaattgaaaccaagt

SEQ ID NO: 5513969 - DNA, 25 bp, Homo sapien
ttctgccccaggggctcagccagca

SEQ ID NO: 5513970 - DNA, 25 bp, Homo sapien
agataaacacacaccagctccagcc

SEQ ID NO: 5513971 - DNA, 25 bp, Homo sapien
ggcctgcccctccctagccagtgcc

SEQ ID NO: 5513972 - DNA, 25 bp, Homo sapien
cccaccctcacagtggcctgggcag

SEQ ID NO: 5513973 - DNA, 25 bp, Homo sapien
gggttcaggccgccccacttctgtc

SEQ ID NO: 5513974 - DNA, 25 bp, Homo sapien
cagctccagccacaggcttggaccg

SEQ ID NO: 5513975 - DNA, 25 bp, Homo sapien
gcatatcctaaatgtgcaggggccg

SEQ ID NO: 5513976 - DNA, 25 bp, Homo sapien
ccctcacctggctctgctgtgggag

SEQ ID NO: 5513977 - DNA, 25 bp, Homo sapien
gcctcagacacccctgccgggttcc

SEQ ID NO: 5513978 - DNA, 25 bp, Homo sapien
ccagacggaaaatgcatctcccaag

SEQ ID NO: 5513979 - DNA, 25 bp, Homo sapien
gccaccacaagacatcctgggggac

SEQ ID NO: 5513980 - DNA, 25 bp, Homo sapien
taagttccatataagagaaagcaac

SEQ ID NO: 5513981 - DNA, 25 bp, Homo sapien
aagagaaagcaacaatacgtgaaat

SEQ ID NO: 5513982 - DNA, 25 bp, Homo sapien
aattcatgctcattaaaggactaga

SEQ ID NO: 5513983 - DNA, 25 bp, Homo sapien
tcaataaaacaagaggcaacacttg

SEQ ID NO: 5513984 - DNA, 25 bp, Homo sapien
acacaaaaatagccaaagtcgtcgt

SEQ ID NO: 5513985 - DNA, 25 bp, Homo sapien
ttaggaatgtaaactctaggaatac

SEQ ID NO: 5513986 - DNA, 25 bp, Homo sapien
aggtaagaggtacacaataagttcc

SEQ ID NO: 5513987 - DNA, 25 bp, Homo sapien
acatatggagaacatttacacaaat

SEQ ID NO: 5513988 - DNA, 25 bp, Homo sapien
actaagcaacaaatgtagaagtata

SEQ ID NO: 5513989 - DNA, 25 bp, Homo sapien
agttacaaagtatagaagacaatat

SEQ ID NO: 5513990 - DNA, 25 bp, Homo sapien
ccatagccttaagaaggtagggaac

SEQ ID NO: 5513991 - DNA, 25 bp, Homo sapien
cacaggggcggtcggtcaccgacgt

SEQ ID NO: 5513992 - DNA, 25 bp, Homo sapien
acgtcggtgaccgaccgcccctgtg

SEQ ID NO: 5513993 - DNA, 25 bp, Homo sapien
gagggcgtcgtcccaggggcctcgt

SEQ ID NO: 5513994 - DNA, 25 bp, Homo sapien
acgaggcccctgggacgacgccctc

SEQ ID NO: 5513995 - DNA, 25 bp, Homo sapien
aggaatgaacttagtaggccaaaag

SEQ ID NO: 5513996 - DNA, 25 bp, Homo sapien
ttagagcatcaagttgtccacaaaa

SEQ ID NO: 5513997 - DNA, 25 bp, Homo sapien
aaacaaattgcataaaggtaccatc

SEQ ID NO: 5513998 - DNA, 25 bp, Homo sapien
aaggctgtgacaattatactcccac

SEQ ID NO: 5513999 - DNA, 25 bp, Homo sapien
cctatggcatacaagatgggtaatg

SEQ ID NO: 5514000 - DNA, 25 bp, Homo sapien
atgggtaatgtaattggaagtgctt

SEQ ID NO: 5514001 - DNA, 25 bp, Homo sapien
attatagaaatatgtaaagccaccc

SEQ ID NO: 5514002 - DNA, 25 bp, Homo sapien
agaacaaaggtgcaatgactttgct

SEQ ID NO: 5514003 - DNA, 25 bp, Homo sapien
gaagtgcttgttcaaatcatggtgc

SEQ ID NO: 5514004 - DNA, 25 bp, Homo sapien
tgacagggcatttgggctagtttta

SEQ ID NO: 5514005 - DNA, 25 bp, Homo sapien
attaggcagtttcctaggaatgaac

SEQ ID NO: 5514006 - DNA, 25 bp, Homo sapien
attcataagaatactaggcatggaa

SEQ ID NO: 5514007 - DNA, 25 bp, Homo sapien
agacaagaacaggtaacattaacac

SEQ ID NO: 5514008 - DNA, 25 bp, Homo sapien
cccacaagatagagaataaggactt

SEQ ID NO: 5514009 - DNA, 25 bp, Homo sapien
aagaagttaacaagccacttgacac

SEQ ID NO: 5514010 - DNA, 25 bp, Homo sapien
ggacttggacagagaaacaatacaa

SEQ ID NO: 5514011 - DNA, 25 bp, Homo sapien
ttagcctttggcatctggtctatca

SEQ ID NO: 5514012 - DNA, 25 bp, Homo sapien
tggtcccaagaggctccaacatatt

SEQ ID NO: 5514013 - DNA, 25 bp, Homo sapien
ctaggcatggaattaaacagtgact

SEQ ID NO: 5514014 - DNA, 25 bp, Homo sapien
ctgtcgctcatcggttggtcccaag

SEQ ID NO: 5514015 - DNA, 25 bp, Homo sapien
aaatctaaacatgaaactgtcgctc

SEQ ID NO: 5514016 - DNA, 25 bp, Homo sapien
ttaacactgcacgtgacagatattc

SEQ ID NO: 5514017 - DNA, 25 bp, Homo sapien
tgttgtggtagaaatctgttatatt

SEQ ID NO: 5514018 - DNA, 25 bp, Homo sapien
aatataacagatttctaccacaaca

SEQ ID NO: 5514019 - DNA, 25 bp, Homo sapien
taaattgtatacagtgcgtcacact

SEQ ID NO: 5514020 - DNA, 25 bp, Homo sapien
ggaagggcctccagtctttgtgtct

SEQ ID NO: 5514021 - DNA, 25 bp, Homo sapien
ttgtcatccaaagtcaaaatccctg

SEQ ID NO: 5514022 - DNA, 25 bp, Homo sapien
tctgaagcagatttccctctgactt

SEQ ID NO: 5514023 - DNA, 25 bp, Homo sapien
ggaaggtcttgacgtgcatgagacc

SEQ ID NO: 5514024 - DNA, 25 bp, Homo sapien
cgtacccaactcagcaagacggaag

SEQ ID NO: 5514025 - DNA, 25 bp, Homo sapien
tccctgctggaagctgagtttggat

SEQ ID NO: 5514026 - DNA, 25 bp, Homo sapien
ccagggaagctaagctgagacctgg

SEQ ID NO: 5514027 - DNA, 25 bp, Homo sapien
acaccccacttctgcctccgtaccc

SEQ ID NO: 5514028 - DNA, 25 bp, Homo sapien
tcaaagttgcatattaagagcatat

SEQ ID NO: 5514029 - DNA, 25 bp, Homo sapien
ttgacgtgcatgagacccacgatgg

SEQ ID NO: 5514030 - DNA, 25 bp, Homo sapien
cacaaaatctctggagatgagggtg

SEQ ID NO: 5514031 - DNA, 25 bp, Homo sapien
gaagaaattgggtattaaatgtgcc

SEQ ID NO: 5514032 - DNA, 25 bp, Homo sapien
ggcctatcacccggtaagctgagcc

SEQ ID NO: 5514033 - DNA, 25 bp, Homo sapien
acacaagagaagagttaaccgttac

SEQ ID NO: 5514034 - DNA, 25 bp, Homo sapien
atgtgccatcaaagttggggcctca

SEQ ID NO: 5514035 - DNA, 25 bp, Homo sapien
gaaaaaaacataagaggcacttcca

SEQ ID NO: 5514036 - DNA, 25 bp, Homo sapien
gacagacaaacaagagactctcagc

SEQ ID NO: 5514037 - DNA, 25 bp, Homo sapien
ctagaagtggttcctgccaggtttc

SEQ ID NO: 5514038 - DNA, 25 bp, Homo sapien
ccagacccacaaccatagacacaaa

SEQ ID NO: 5514039 - DNA, 25 bp, Homo sapien
ttaggcaaaggtactctagaagtgg

SEQ ID NO: 5514040 - DNA, 25 bp, Homo sapien
tgtgtgtgtcttatggggcctatca

SEQ ID NO: 5514041 - DNA, 25 bp, Homo sapien
agggagggtctcaccctattgctcg

SEQ ID NO: 5514042 - DNA, 25 bp, Homo sapien
ggaacgaagccatgccggctctaaa

SEQ ID NO: 5514043 - DNA, 25 bp, Homo sapien
atccaccacttggtagagactgggc

SEQ ID NO: 5514044 - DNA, 25 bp, Homo sapien
cttggtagagactgggccagtcttc

SEQ ID NO: 5514045 - DNA, 25 bp, Homo sapien
agcaaatagctccccgtgcccctac

SEQ ID NO: 5514046 - DNA, 25 bp, Homo sapien
attgcagatatgctgaagacaagtg

SEQ ID NO: 5514047 - DNA, 25 bp, Homo sapien
cgtatccaggctccctcaggaatgg

SEQ ID NO: 5514048 - DNA, 25 bp, Homo sapien
caacctcccgggttgtgcacttgcc

SEQ ID NO: 5514049 - DNA, 25 bp, Homo sapien
gtgcacttgcccgtatccaggctcc

SEQ ID NO: 5514050 - DNA, 25 bp, Homo sapien
aagtggtctaaggtcatttagcata

SEQ ID NO: 5514051 - DNA, 25 bp, Homo sapien
gaatgatcctcagttatgcagaaaa

SEQ ID NO: 5514052 - DNA, 25 bp, Homo sapien
gagagacagcaccgctcatattccc

SEQ ID NO: 5514053 - DNA, 25 bp, Homo sapien
acaaggtccagcacgcaagttatca

SEQ ID NO: 5514054 - DNA, 25 bp, Homo sapien
gagaaatgtagaaggactcccaata

SEQ ID NO: 5514055 - DNA, 25 bp, Homo sapien
tttcccaagcctacagcccctgcag

SEQ ID NO: 5514056 - DNA, 25 bp, Homo sapien
accacctcagaattgtcactgcctc

SEQ ID NO: 5514057 - DNA, 25 bp, Homo sapien
gagtgcagagttatctaagagaaat

SEQ ID NO: 5514058 - DNA, 25 bp, Homo sapien
ccaagaaaacgtgtgtctcccaggg

SEQ ID NO: 5514059 - DNA, 25 bp, Homo sapien
acaatagccacccagagtgcagagt

SEQ ID NO: 5514060 - DNA, 25 bp, Homo sapien
tctaaagggcacttttgagagagac

SEQ ID NO: 5514061 - DNA, 25 bp, Homo sapien
aggggaaatatttggctaacaggca

SEQ ID NO: 5514062 - DNA, 25 bp, Homo sapien
ttacagcagacaaatgcatctacac

SEQ ID NO: 5514063 - DNA, 25 bp, Homo sapien
tggccacagctgcctataagctcat

SEQ ID NO: 5514064 - DNA, 25 bp, Homo sapien
gagtacctattatgggcaaggcact

SEQ ID NO: 5514065 - DNA, 25 bp, Homo sapien
catattttcactggccacagctgcc

SEQ ID NO: 5514066 - DNA, 25 bp, Homo sapien
aaaaaagtcatgaacaataaattac

SEQ ID NO: 5514067 - DNA, 25 bp, Homo sapien
ctaggaactaactgtacaaccccat

SEQ ID NO: 5514068 - DNA, 25 bp, Homo sapien
taagtgacaactagtgcaaaataac

SEQ ID NO: 5514069 - DNA, 25 bp, Homo sapien
gtgcaaaataacattctaggaacta

SEQ ID NO: 5514070 - DNA, 25 bp, Homo sapien
agaaagaactattctgtgtgctatt

SEQ ID NO: 5514071 - DNA, 25 bp, Homo sapien
taatgacaaagtatcccttagcacc

SEQ ID NO: 5514072 - DNA, 25 bp, Homo sapien
ataaatcatggcaaaagactctatg

SEQ ID NO: 5514073 - DNA, 25 bp, Homo sapien
tgctggtgaattactttgtagctgc

SEQ ID NO: 5514074 - DNA, 25 bp, Homo sapien
cagcctctaggaaagacatcctgcc

SEQ ID NO: 5514075 - DNA, 25 bp, Homo sapien
tgaaaatgaaaacgacacagaaatc

SEQ ID NO: 5514076 - DNA, 25 bp, Homo sapien
gaaacgacttatgtcaatgaggctt

SEQ ID NO: 5514077 - DNA, 25 bp, Homo sapien
ccaacttcggaaatactgtaactgc

SEQ ID NO: 5514078 - DNA, 25 bp, Homo sapien
gacatgcagctttcaagacaactac

SEQ ID NO: 5514079 - DNA, 25 bp, Homo sapien
taaataacagaaatcagtgacacat

SEQ ID NO: 5514080 - DNA, 25 bp, Homo sapien
ctgaagagttcaatcaagaaacgac

SEQ ID NO: 5514081 - DNA, 25 bp, Homo sapien
tttgaaaggcctacaaagagaactc

SEQ ID NO: 5514082 - DNA, 25 bp, Homo sapien
gtgtacagtgatgtgacatgcagct

SEQ ID NO: 5514083 - DNA, 25 bp, Homo sapien
cacggtgcatgagtaataccaaagc

SEQ ID NO: 5514084 - DNA, 25 bp, Homo sapien
gacctctatggaatgcaaacacgta

SEQ ID NO: 5514085 - DNA, 25 bp, Homo sapien
gcacacgggaacatctgatggacta

SEQ ID NO: 5514086 - DNA, 25 bp, Homo sapien
acaatcaatttggcataaaagaggc

SEQ ID NO: 5514087 - DNA, 25 bp, Homo sapien
agcagtcaaaaagcgtggcaaatta

SEQ ID NO: 5514088 - DNA, 25 bp, Homo sapien
gttttctgagaggcctcagcaggtc

SEQ ID NO: 5514089 - DNA, 25 bp, Homo sapien
gagaggcctcagcaggtcataaatt

SEQ ID NO: 5514090 - DNA, 25 bp, Homo sapien
agcgtggcaaattacctagaagttt

SEQ ID NO: 5514091 - DNA, 25 bp, Homo sapien
tgccatgggcaaactacttggtccc

SEQ ID NO: 5514092 - DNA, 25 bp, Homo sapien
acacaaacaggaagaattacgtatt

SEQ ID NO: 5514093 - DNA, 25 bp, Homo sapien
agctgtcttgctagtatgctcagtt

SEQ ID NO: 5514094 - DNA, 25 bp, Homo sapien
cacaaacaggtaaaaaacgaatgct

SEQ ID NO: 5514095 - DNA, 25 bp, Homo sapien
atttttacagggtattggtgagcag

SEQ ID NO: 5514096 - DNA, 25 bp, Homo sapien
taacagtaaccccaagaaaggcatc

SEQ ID NO: 5514097 - DNA, 25 bp, Homo sapien
taggacagtattcaaagccttttta

SEQ ID NO: 5514098 - DNA, 25 bp, Homo sapien
agtggttgtttgagtgacacagcac

SEQ ID NO: 5514099 - DNA, 25 bp, Homo sapien
aacctgcagctaacaggatgtctgc

SEQ ID NO: 5514100 - DNA, 25 bp, Homo sapien
gcttgctgaacaggtatggaagctg

SEQ ID NO: 5514101 - DNA, 25 bp, Homo sapien
tagctactgtagaggtctcagacct

SEQ ID NO: 5514102 - DNA, 25 bp, Homo sapien
gaacaggtatggaagctgtctttgc

SEQ ID NO: 5514103 - DNA, 25 bp, Homo sapien
atgcttttgctgtggatgtagtgta

SEQ ID NO: 5514104 - DNA, 25 bp, Homo sapien
tgtggatgtagtgtagcttgctgaa

SEQ ID NO: 5514105 - DNA, 25 bp, Homo sapien
tgacacagcacaaggccttgatttc

SEQ ID NO: 5514106 - DNA, 25 bp, Homo sapien
accccaagaaaggcatcagggttct

SEQ ID NO: 5514107 - DNA, 25 bp, Homo sapien
ggaggccatccgaggtttcactgcc

SEQ ID NO: 5514108 - DNA, 25 bp, Homo sapien
ttgtattgacctgatggaggccatc

SEQ ID NO: 5514109 - DNA, 25 bp, Homo sapien
ttgatgcagtacatagggctggtaa

SEQ ID NO: 5514110 - DNA, 25 bp, Homo sapien
gggtaagtatgtcagtctggcatgt

SEQ ID NO: 5514111 - DNA, 25 bp, Homo sapien
atgcgctccgtgcatgctgatggtg

SEQ ID NO: 5514112 - DNA, 25 bp, Homo sapien
ttttgagataagtgtgaatccacat

SEQ ID NO: 5514113 - DNA, 25 bp, Homo sapien
aggagcagggcttgttttatgcgct

SEQ ID NO: 5514114 - DNA, 25 bp, Homo sapien
tcactgccattaggagcagggcttg

SEQ ID NO: 5514115 - DNA, 25 bp, Homo sapien
caaccagtactgagacatgacataa

SEQ ID NO: 5514116 - DNA, 25 bp, Homo sapien
tcacaacctgggttgagaaaggtca

SEQ ID NO: 5514117 - DNA, 25 bp, Homo sapien
aaaaggtgccattcaaggaacactt

SEQ ID NO: 5514118 - DNA, 25 bp, Homo sapien
taaggcaaaaggttctagcagatgt

SEQ ID NO: 5514119 - DNA, 25 bp, Homo sapien
attggtgaatagttaaggcaaaagg

SEQ ID NO: 5514120 - DNA, 25 bp, Homo sapien
aaagacatgaaacataaacctaatt

SEQ ID NO: 5514121 - DNA, 25 bp, Homo sapien
caagagcttattgtgatgacattac

SEQ ID NO: 5514122 - DNA, 25 bp, Homo sapien
tcagtcataggtaaatcagctccac

SEQ ID NO: 5514123 - DNA, 25 bp, Homo sapien
attaagataacaaatattagccatc

SEQ ID NO: 5514124 - DNA, 25 bp, Homo sapien
ctaaggacccagttttagtcaatat

SEQ ID NO: 5514125 - DNA, 25 bp, Homo sapien
ttattgaacagatgtgtcattaatt

SEQ ID NO: 5514126 - DNA, 25 bp, Homo sapien
ttcaagtaatcatgacctcagaaat

SEQ ID NO: 5514127 - DNA, 25 bp, Homo sapien
aatggaaccaagacaagattctaat

SEQ ID NO: 5514128 - DNA, 25 bp, Homo sapien
ctccacctggaatttctaaggaccc

SEQ ID NO: 5514129 - DNA, 25 bp, Homo sapien
attactgtcagactgcaatgcaagt

SEQ ID NO: 5514130 - DNA, 25 bp, Homo sapien
caaactaaagctggccaaaaacttc

SEQ ID NO: 5514131 - DNA, 25 bp, Homo sapien
tttcctaggtatgtgtgtctgtttc

SEQ ID NO: 5514132 - DNA, 25 bp, Homo sapien
aggagtcctcaaactaaagctggcc

SEQ ID NO: 5514133 - DNA, 25 bp, Homo sapien
acatggtcatatactggctagtgct

SEQ ID NO: 5514134 - DNA, 25 bp, Homo sapien
ttagcaagcttatcaaggagtcctc

SEQ ID NO: 5514135 - DNA, 25 bp, Homo sapien
tggctagtgctctctaaaagtagac

SEQ ID NO: 5514136 - DNA, 25 bp, Homo sapien
tctgccccaatgaaggcaggaggag

SEQ ID NO: 5514137 - DNA, 25 bp, Homo sapien
tggaagtgtctcagggcactctgaa

SEQ ID NO: 5514138 - DNA, 25 bp, Homo sapien
actgcaatgcaagtctgccccaatg

SEQ ID NO: 5514139 - DNA, 25 bp, Homo sapien
agggcactctgaaagtttagcaagc

SEQ ID NO: 5514140 - DNA, 25 bp, Homo sapien
agaagggtgagacttattgctgaat

SEQ ID NO: 5514141 - DNA, 25 bp, Homo sapien
gtgagggggcatctactcctcttgc

SEQ ID NO: 5514142 - DNA, 25 bp, Homo sapien
caggctgcccctagcactccacgtt

SEQ ID NO: 5514143 - DNA, 25 bp, Homo sapien
gtctgaggctatggaagtctccctc

SEQ ID NO: 5514144 - DNA, 25 bp, Homo sapien
ccaattagaagctgttggggcgtat

SEQ ID NO: 5514145 - DNA, 25 bp, Homo sapien
ctcagctttaaaggggacctggaag

SEQ ID NO: 5514146 - DNA, 25 bp, Homo sapien
aaaagtgacctgccttggagcctta

SEQ ID NO: 5514147 - DNA, 25 bp, Homo sapien
ctgaaaaaatctagacaggcccttt

SEQ ID NO: 5514148 - DNA, 25 bp, Homo sapien
ctagttcactagcaggttccccatc

SEQ ID NO: 5514149 - DNA, 25 bp, Homo sapien
gtgagctgtaaggtaaagcaagttc

SEQ ID NO: 5514150 - DNA, 25 bp, Homo sapien
gtagaacagcctaaggaaaagtgac

SEQ ID NO: 5514151 - DNA, 25 bp, Homo sapien
ctttacaagagccatattcacatac

SEQ ID NO: 5514152 - DNA, 25 bp, Homo sapien
tatgggaccatcattacacgtggct

SEQ ID NO: 5514153 - DNA, 25 bp, Homo sapien
attacacgtggcttcacaggatgct

SEQ ID NO: 5514154 - DNA, 25 bp, Homo sapien
aggatgctgtgctggattttggttc

SEQ ID NO: 5514155 - DNA, 25 bp, Homo sapien
ttcaatgcctatgtacagtttcccc

SEQ ID NO: 5514156 - DNA, 25 bp, Homo sapien
agacgagctgtggcactgctatttt

SEQ ID NO: 5514157 - DNA, 25 bp, Homo sapien
ctaaaagggcttaaataattccata

SEQ ID NO: 5514158 - DNA, 25 bp, Homo sapien
tggttcttaggaacacacctcctcc

SEQ ID NO: 5514159 - DNA, 25 bp, Homo sapien
tagtgtgttacacgtcaaagacgaa

SEQ ID NO: 5514160 - DNA, 25 bp, Homo sapien
tagaacaaagcaagtaatggtaaac

SEQ ID NO: 5514161 - DNA, 25 bp, Homo sapien
aacagaatacagagcataagctaaa

SEQ ID NO: 5514162 - DNA, 25 bp, Homo sapien
tctaagaactaacatggcctggagg

SEQ ID NO: 5514163 - DNA, 25 bp, Homo sapien
tatatccggtaataagaagcccaga

SEQ ID NO: 5514164 - DNA, 25 bp, Homo sapien
catccaggtatgcaatgtgacatta

SEQ ID NO: 5514165 - DNA, 25 bp, Homo sapien
acaaaacagggttcatgaggaaaat

SEQ ID NO: 5514166 - DNA, 25 bp, Homo sapien
tatgtccgtgtgtcttctgtgtctt

SEQ ID NO: 5514167 - DNA, 25 bp, Homo sapien
aaatctacaaactaggaggaaggac

SEQ ID NO: 5514168 - DNA, 25 bp, Homo sapien
ttccaagttgctacagggctctatt

SEQ ID NO: 5514169 - DNA, 25 bp, Homo sapien
attaatccgtagtgacattccctgg

SEQ ID NO: 5514170 - DNA, 25 bp, Homo sapien
actggctaggcacaattagacacat

SEQ ID NO: 5514171 - DNA, 25 bp, Homo sapien
aagaagcccagattactgcagataa

SEQ ID NO: 5514172 - DNA, 25 bp, Homo sapien
tgattgacttgcattgacaacacac

SEQ ID NO: 5514173 - DNA, 25 bp, Homo sapien
tgttcgtggtgaagagcccattttt

SEQ ID NO: 5514174 - DNA, 25 bp, Homo sapien
gaattcagcagcagacccacaccta

SEQ ID NO: 5514175 - DNA, 25 bp, Homo sapien
ttaaagcactgagagccaagacaaa

SEQ ID NO: 5514176 - DNA, 25 bp, Homo sapien
cttatcgtgtggtaggattagtggt

SEQ ID NO: 5514177 - DNA, 25 bp, Homo sapien
ttggacccaaaggagcaactattaa

SEQ ID NO: 5514178 - DNA, 25 bp, Homo sapien
atgcgtacaggaaactatatagagc

SEQ ID NO: 5514179 - DNA, 25 bp, Homo sapien
atgttgccatggccaaaagagagat

SEQ ID NO: 5514180 - DNA, 25 bp, Homo sapien
tttgaagtgacagggatgcctgaaa

SEQ ID NO: 5514181 - DNA, 25 bp, Homo sapien
ccctgggaggattatcatgtagtcc

SEQ ID NO: 5514182 - DNA, 25 bp, Homo sapien
gagcagagataaggaacctgtcttt

SEQ ID NO: 5514183 - DNA, 25 bp, Homo sapien
tgaaaatgttgaccgagcacgggaa

SEQ ID NO: 5514184 - DNA, 25 bp, Homo sapien
aatatgacttcccagcggcaaagct

SEQ ID NO: 5514185 - DNA, 25 bp, Homo sapien
tgtacaagcaattgctgtttgggga

SEQ ID NO: 5514186 - DNA, 25 bp, Homo sapien
tctctctattgctcaggatggtttc

SEQ ID NO: 5514187 - DNA, 25 bp, Homo sapien
tctgtagagaacattgtgtgtcaca

SEQ ID NO: 5514188 - DNA, 25 bp, Homo sapien
ccagcggcaaagcttgcacctatgg

SEQ ID NO: 5514189 - DNA, 25 bp, Homo sapien
tagtctagcttaagatgcaaaatga

SEQ ID NO: 5514190 - DNA, 25 bp, Homo sapien
gggacacagccaacctcatacatat

SEQ ID NO: 5514191 - DNA, 25 bp, Homo sapien
tgcccagctgagaagcaaacttcta

SEQ ID NO: 5514192 - DNA, 25 bp, Homo sapien
atgacataagatagaagaagttttc

SEQ ID NO: 5514193 - DNA, 25 bp, Homo sapien
acatattgcacctggtggcaggcag

SEQ ID NO: 5514194 - DNA, 25 bp, Homo sapien
actgaaaaggctgatgcaaatgaca

SEQ ID NO: 5514195 - DNA, 25 bp, Homo sapien
taaacaataacattcagtgatctac

SEQ ID NO: 5514196 - DNA, 25 bp, Homo sapien
atttccacaatgaacaagtacttac

SEQ ID NO: 5514197 - DNA, 25 bp, Homo sapien
cactaacccaaatgcttaccctgcc

SEQ ID NO: 5514198 - DNA, 25 bp, Homo sapien
tagatcatgtttataagcagcatac

SEQ ID NO: 5514199 - DNA, 25 bp, Homo sapien
agcagcatacaaaaagttaagtttc

SEQ ID NO: 5514200 - DNA, 25 bp, Homo sapien
gtatcagtagattaagaaagtaaaa

SEQ ID NO: 5514201 - DNA, 25 bp, Homo sapien
tttcccaagcactgatttatagatc

SEQ ID NO: 5514202 - DNA, 25 bp, Homo sapien
cacgtatggttttagtcaaggacac

SEQ ID NO: 5514203 - DNA, 25 bp, Homo sapien
attcagaactacaaacatggtttcc

SEQ ID NO: 5514204 - DNA, 25 bp, Homo sapien
tagaagcttgaatctgctctgggaa

SEQ ID NO: 5514205 - DNA, 25 bp, Homo sapien
aaagccttccaacacagcattattc

SEQ ID NO: 5514206 - DNA, 25 bp, Homo sapien
cacgcgccagaaatcaacagtcatg

SEQ ID NO: 5514207 - DNA, 25 bp, Homo sapien
taccgcgtcttccagctagccaggc

SEQ ID NO: 5514208 - DNA, 25 bp, Homo sapien
tggtcccctgaagtacaggagacct

SEQ ID NO: 5514209 - DNA, 25 bp, Homo sapien
ttcacaactctgcctccacgcgcca

SEQ ID NO: 5514210 - DNA, 25 bp, Homo sapien
agacacattacgagatatgggctac

SEQ ID NO: 5514211 - DNA, 25 bp, Homo sapien
aagggagcacagaaaactgcctttg

SEQ ID NO: 5514212 - DNA, 25 bp, Homo sapien
tgggctacagcatttgtggattcac

SEQ ID NO: 5514213 - DNA, 25 bp, Homo sapien
gaggctctaagtggacacagacaca

SEQ ID NO: 5514214 - DNA, 25 bp, Homo sapien
tgggagatcgcgactaatagtccta

SEQ ID NO: 5514215 - DNA, 25 bp, Homo sapien
agaaaaccgccacgggcactaattc

SEQ ID NO: 5514216 - DNA, 25 bp, Homo sapien
cctgtccctgccataccgcgtcttc

SEQ ID NO: 5514217 - DNA, 25 bp, Homo sapien
accaatgggctgcaccatcaccctg

SEQ ID NO: 5514218 - DNA, 25 bp, Homo sapien
gggcagttcccgagcccccatcacc

SEQ ID NO: 5514219 - DNA, 25 bp, Homo sapien
ccccagcacgccttcaacgccctaa

SEQ ID NO: 5514220 - DNA, 25 bp, Homo sapien
gccggatttgcaccctgctgcaggc

SEQ ID NO: 5514221 - DNA, 25 bp, Homo sapien
acgccaggaaggtcccctctatgtg

SEQ ID NO: 5514222 - DNA, 25 bp, Homo sapien
acatgaatgccacgagcggcatcag

SEQ ID NO: 5514223 - DNA, 25 bp, Homo sapien
cgccctaatgggcgagcacatacac

SEQ ID NO: 5514224 - DNA, 25 bp, Homo sapien
ctcccagttcatgggtcccccggtg

SEQ ID NO: 5514225 - DNA, 25 bp, Homo sapien
ccccacaaccactacatgccggatt

SEQ ID NO: 5514226 - DNA, 25 bp, Homo sapien
ccctctatgtgctgctgagccggtc

SEQ ID NO: 5514227 - DNA, 25 bp, Homo sapien
cgcggccaggtttaacaactcccag

SEQ ID NO: 5514228 - DNA, 25 bp, Homo sapien
ctggtcccacctaatgctatcacat

SEQ ID NO: 5514229 - DNA, 25 bp, Homo sapien
tgagatggtactggataggtaaata

SEQ ID NO: 5514230 - DNA, 25 bp, Homo sapien
gggcacaaacaatatactcagtaac

SEQ ID NO: 5514231 - DNA, 25 bp, Homo sapien
tataatgaaagctacaaaacaaatg

SEQ ID NO: 5514232 - DNA, 25 bp, Homo sapien
tgaagaacagtgagaagtttatgtc

SEQ ID NO: 5514233 - DNA, 25 bp, Homo sapien
ttacaggcagttattcttatgagat

SEQ ID NO: 5514234 - DNA, 25 bp, Homo sapien
aatctcttagaagtcaacccacatc

SEQ ID NO: 5514235 - DNA, 25 bp, Homo sapien
taggtaaatatcaagggaactgtct

SEQ ID NO: 5514236 - DNA, 25 bp, Homo sapien
aacaaatgagttctctggtcccacc

SEQ ID NO: 5514237 - DNA, 25 bp, Homo sapien
aagagataagcataacaaaaaatcc

SEQ ID NO: 5514238 - DNA, 25 bp, Homo sapien
aagcagtcctatctcagtgaagaac

SEQ ID NO: 5514239 - DNA, 25 bp, Homo sapien
aggcagttgccagctaaatgaataa

SEQ ID NO: 5514240 - DNA, 25 bp, Homo sapien
gcaaggtgctctctaaaggtgtgat

SEQ ID NO: 5514241 - DNA, 25 bp, Homo sapien
agagagcctaaaggtaaatccctca

SEQ ID NO: 5514242 - DNA, 25 bp, Homo sapien
atgaataaaagcgagatttcctcaa

SEQ ID NO: 5514243 - DNA, 25 bp, Homo sapien
ttgaggggttagtacttgaaagata

SEQ ID NO: 5514244 - DNA, 25 bp, Homo sapien
agccaagcaccagaggtctgcaata

SEQ ID NO: 5514245 - DNA, 25 bp, Homo sapien
taaatcactggtgacagagagccta

SEQ ID NO: 5514246 - DNA, 25 bp, Homo sapien
gagtcctgactgctgaattaccacc

SEQ ID NO: 5514247 - DNA, 25 bp, Homo sapien
aagacctaaaagacaaagtggtatc

SEQ ID NO: 5514248 - DNA, 25 bp, Homo sapien
ttgtatgtgtgggcttttttgaggg

SEQ ID NO: 5514249 - DNA, 25 bp, Homo sapien
tataaaagcttagagtcctgactgc

SEQ ID NO: 5514250 - DNA, 25 bp, Homo sapien
aattttgcaaaggtctcggtggatt

SEQ ID NO: 5514251 - DNA, 25 bp, Homo sapien
gtgggctggataagtttttggtagc

SEQ ID NO: 5514252 - DNA, 25 bp, Homo sapien
tcggtggattttggtgtatgctaca

SEQ ID NO: 5514253 - DNA, 25 bp, Homo sapien
atcggaagtttggtaataagcctta

SEQ ID NO: 5514254 - DNA, 25 bp, Homo sapien
tctaaggcacccagaaatgtgttca

SEQ ID NO: 5514255 - DNA, 25 bp, Homo sapien
tatttacaacatggtgagaaggggt

SEQ ID NO: 5514256 - DNA, 25 bp, Homo sapien
gttcatacacgttacaggaccattc

SEQ ID NO: 5514257 - DNA, 25 bp, Homo sapien
ggagagagaactgaagacaattctt

SEQ ID NO: 5514258 - DNA, 25 bp, Homo sapien
aactggtcaatggatcaatgattcc

SEQ ID NO: 5514259 - DNA, 25 bp, Homo sapien
tccaaacactcctagggtgggctgg

SEQ ID NO: 5514260 - DNA, 25 bp, Homo sapien
aggaccattcacaaagagagtgtac

SEQ ID NO: 5514261 - DNA, 25 bp, Homo sapien
cctgcttgtgctgagatcaggagag

SEQ ID NO: 5514262 - DNA, 25 bp, Homo sapien
gctggcatggatacaacttgatgac

SEQ ID NO: 5514263 - DNA, 25 bp, Homo sapien
tgtgccgattcttaggtgcctgtga

SEQ ID NO: 5514264 - DNA, 25 bp, Homo sapien
acctacccagtgggtgccatggagg

SEQ ID NO: 5514265 - DNA, 25 bp, Homo sapien
gggggtagctcatcatccaaggaga

SEQ ID NO: 5514266 - DNA, 25 bp, Homo sapien
atgagacccaatctgatatgacccc

SEQ ID NO: 5514267 - DNA, 25 bp, Homo sapien
ggtaaaggatgacccactccagctg

SEQ ID NO: 5514268 - DNA, 25 bp, Homo sapien
agctgttggaatatgagatgagtca

SEQ ID NO: 5514269 - DNA, 25 bp, Homo sapien
aaatgctgactgaggcctcatggaa

SEQ ID NO: 5514270 - DNA, 25 bp, Homo sapien
gcccaaggcaaagtggtaggccttg

SEQ ID NO: 5514271 - DNA, 25 bp, Homo sapien
cctcatggaagttctgtgccgattc

SEQ ID NO: 5514272 - DNA, 25 bp, Homo sapien
ttgcacgatgttgggaaatttgttc

SEQ ID NO: 5514273 - DNA, 25 bp, Homo sapien
tcccaaacagtgcaagtgaatcaga

SEQ ID NO: 5514274 - DNA, 25 bp, Homo sapien
aaatatcagctaaaagtgtgcatac

SEQ ID NO: 5514275 - DNA, 25 bp, Homo sapien
aatacacgtgacattgtgaggcagc

SEQ ID NO: 5514276 - DNA, 25 bp, Homo sapien
tactaaaggctccaagtgacaatcc

SEQ ID NO: 5514277 - DNA, 25 bp, Homo sapien
gtgggtgcctgccaagcaattaatc

SEQ ID NO: 5514278 - DNA, 25 bp, Homo sapien
tgtgctgaaaattcagaagacatcc

SEQ ID NO: 5514279 - DNA, 25 bp, Homo sapien
actctgccagtcacaccgtgcacat

SEQ ID NO: 5514280 - DNA, 25 bp, Homo sapien
gtacatggatgcatcagtaaagttc

SEQ ID NO: 5514281 - DNA, 25 bp, Homo sapien
tgcaagtgaatcagaagtgactgct

SEQ ID NO: 5514282 - DNA, 25 bp, Homo sapien
cctcagtggaaatgtacatggatgc

SEQ ID NO: 5514283 - DNA, 25 bp, Homo sapien
gacgaatattgtggacacaggctgc

SEQ ID NO: 5514284 - DNA, 25 bp, Homo sapien
tatatctcagcacctggagagctgt

SEQ ID NO: 5514285 - DNA, 25 bp, Homo sapien
ctgtcgaggactgacgaatattgtg

SEQ ID NO: 5514286 - DNA, 25 bp, Homo sapien
ccctaatcctggaccaactagaaac

SEQ ID NO: 5514287 - DNA, 25 bp, Homo sapien
gcgcttgagaggatttaaatgccct

SEQ ID NO: 5514288 - DNA, 25 bp, Homo sapien
taccccacatccctaatcctggacc

SEQ ID NO: 5514289 - DNA, 25 bp, Homo sapien
agtgggtgctgcaggattttaccct

SEQ ID NO: 5514290 - DNA, 25 bp, Homo sapien
gagaggatttaaatgccctataccc

SEQ ID NO: 5514291 - DNA, 25 bp, Homo sapien
ggccaccttcaggaaaattaagagc

SEQ ID NO: 5514292 - DNA, 25 bp, Homo sapien
aggactgacgaatattgtggacaca

SEQ ID NO: 5514293 - DNA, 25 bp, Homo sapien
ttcaggaaaattaagagcagtattt

SEQ ID NO: 5514294 - DNA, 25 bp, Homo sapien
tcttccgctagggataaagcagatg

SEQ ID NO: 5514295 - DNA, 25 bp, Homo sapien
accctgacaggtgccctcaggggtc

SEQ ID NO: 5514296 - DNA, 25 bp, Homo sapien
acgtccagtgccacagtccccagta

SEQ ID NO: 5514297 - DNA, 25 bp, Homo sapien
ggatgaccctgacaggtgccctcag

SEQ ID NO: 5514298 - DNA, 25 bp, Homo sapien
gggtctgggaaatccaactctctcc

SEQ ID NO: 5514299 - DNA, 25 bp, Homo sapien
tgctccagccacgtccagtgccaca

SEQ ID NO: 5514300 - DNA, 25 bp, Homo sapien
gtgccacagtccccagtagcctcaa

SEQ ID NO: 5514301 - DNA, 25 bp, Homo sapien
ctcactcttccgctagggataaagc

SEQ ID NO: 5514302 - DNA, 25 bp, Homo sapien
aaatccaactctctccacagtgtga

SEQ ID NO: 5514303 - DNA, 25 bp, Homo sapien
tctgcaaggccctggcctaagacag

SEQ ID NO: 5514304 - DNA, 25 bp, Homo sapien
gagcgccttctgcaaggccctggcc

SEQ ID NO: 5514305 - DNA, 25 bp, Homo sapien
agctatttagtggcagacaatcccg

SEQ ID NO: 5514306 - DNA, 25 bp, Homo sapien
gaaggtggcatttatctcaatctgt

SEQ ID NO: 5514307 - DNA, 25 bp, Homo sapien
cggcgtttgctttattgtgggtgga

SEQ ID NO: 5514308 - DNA, 25 bp, Homo sapien
atgtgtttggcattgactctggtta

SEQ ID NO: 5514309 - DNA, 25 bp, Homo sapien
catactatgtgtttggcattgactc

SEQ ID NO: 5514310 - DNA, 25 bp, Homo sapien
actgcaaccttgaaggtggcattta

SEQ ID NO: 5514311 - DNA, 25 bp, Homo sapien
gtgactccagctatttagtggcaga

SEQ ID NO: 5514312 - DNA, 25 bp, Homo sapien
gggactcacattcacaagacgggac

SEQ ID NO: 5514313 - DNA, 25 bp, Homo sapien
ataaattcatcacataggattatgc

SEQ ID NO: 5514314 - DNA, 25 bp, Homo sapien
taggattatgcttttcactgcaacc

SEQ ID NO: 5514315 - DNA, 25 bp, Homo sapien
tctcaatctgtgactccagctattt

SEQ ID NO: 5514316 - DNA, 25 bp, Homo sapien
tggttaactcttgtgcagcaacacc

SEQ ID NO: 5514317 - DNA, 25 bp, Homo sapien
cgagatgctatcacacacgcgccag

SEQ ID NO: 5514318 - DNA, 25 bp, Homo sapien
aataagcacaatcaaatttttaacc

SEQ ID NO: 5514319 - DNA, 25 bp, Homo sapien
aacgactgcacctcacgtggtggcg

SEQ ID NO: 5514320 - DNA, 25 bp, Homo sapien
ctacgagatgctatcacacacgcgc

SEQ ID NO: 5514321 - DNA, 25 bp, Homo sapien
gaagtgcaaaacatagatgaccatt

SEQ ID NO: 5514322 - DNA, 25 bp, Homo sapien
ttcacgtagctgaagtgcaaaacat

SEQ ID NO: 5514323 - DNA, 25 bp, Homo sapien
agctgaagtgcaaaacatagatgac

SEQ ID NO: 5514324 - DNA, 25 bp, Homo sapien
ttgtgcagcaacacctacgagatgc

SEQ ID NO: 5514325 - DNA, 25 bp, Homo sapien
tgcaccagccgctgcaacgactgca

SEQ ID NO: 5514326 - DNA, 25 bp, Homo sapien
taaccacagaatgtctacaagaatt

SEQ ID NO: 5514327 - DNA, 25 bp, Homo sapien
ggcatgccacccttatgtaggacac

SEQ ID NO: 5514328 - DNA, 25 bp, Homo sapien
ttttaccacagccagtgggcatgcc

SEQ ID NO: 5514329 - DNA, 25 bp, Homo sapien
gtcactcccaaagcaatgaggatta

SEQ ID NO: 5514330 - DNA, 25 bp, Homo sapien
ctacataaggtataaaacaaggtat

SEQ ID NO: 5514331 - DNA, 25 bp, Homo sapien
aagtttgcaggggaattatgtctat

SEQ ID NO: 5514332 - DNA, 25 bp, Homo sapien
tcaaaaggccttaagtcactcccaa

SEQ ID NO: 5514333 - DNA, 25 bp, Homo sapien
tgaatttaggcaatgtgctttgctc

SEQ ID NO: 5514334 - DNA, 25 bp, Homo sapien
tgagaatcccaatctggcccaagac

SEQ ID NO: 5514335 - DNA, 25 bp, Homo sapien
caagacttctctttggccagctgga

SEQ ID NO: 5514336 - DNA, 25 bp, Homo sapien
ctggtttaacatacagagaaagata

SEQ ID NO: 5514337 - DNA, 25 bp, Homo sapien
tggccagctggaataatagcaccta

SEQ ID NO: 5514338 - DNA, 25 bp, Homo sapien
gggccccttaagcatggatagagac

SEQ ID NO: 5514339 - DNA, 25 bp, Homo sapien
caacatatgacccatgggggaagga

SEQ ID NO: 5514340 - DNA, 25 bp, Homo sapien
cacaggagagaaacgtgataaatta

SEQ ID NO: 5514341 - DNA, 25 bp, Homo sapien
gaggaagtctctgttatgggctgtt

SEQ ID NO: 5514342 - DNA, 25 bp, Homo sapien
tccttgccctgttagtggggtccga

SEQ ID NO: 5514343 - DNA, 25 bp, Homo sapien
ctctaagaggcagtagcttcagagc

SEQ ID NO: 5514344 - DNA, 25 bp, Homo sapien
gtgcaaaaccatcagtgtgggcgtc

SEQ ID NO: 5514345 - DNA, 25 bp, Homo sapien
aggccagaaattaacagggaccctg

SEQ ID NO: 5514346 - DNA, 25 bp, Homo sapien
gcaatctacggcaaggaacatagtt

SEQ ID NO: 5514347 - DNA, 25 bp, Homo sapien
gatgagcggtgtagtcttcttgttc

SEQ ID NO: 5514348 - DNA, 25 bp, Homo sapien
agagcaggaaagtggctttcgatac

SEQ ID NO: 5514349 - DNA, 25 bp, Homo sapien
ttgcctcgatacagggtagctagag

SEQ ID NO: 5514350 - DNA, 25 bp, Homo sapien
agccagccccaccaggctgcaggat

SEQ ID NO: 5514351 - DNA, 25 bp, Homo sapien
ggtaaagaggcacgatctgatttat

SEQ ID NO: 5514352 - DNA, 25 bp, Homo sapien
acaccccttgtgccgggctcagtct

SEQ ID NO: 5514353 - DNA, 25 bp, Homo sapien
gcaggatcaggcttggcaaacttta

SEQ ID NO: 5514354 - DNA, 25 bp, Homo sapien
tctaggaaacaccctctgggaggaa

SEQ ID NO: 5514355 - DNA, 25 bp, Homo sapien
agccaggccatctcacgtgtacata

SEQ ID NO: 5514356 - DNA, 25 bp, Homo sapien
ttgcttcgaaagccaagggtaaaga

SEQ ID NO: 5514357 - DNA, 25 bp, Homo sapien
acgtcagacgtgaacatcaatttgc

SEQ ID NO: 5514358 - DNA, 25 bp, Homo sapien
tggtaaaagaataccccagccagcc

SEQ ID NO: 5514359 - DNA, 25 bp, Homo sapien
tattgtacaaaccatgtgagcccgg

SEQ ID NO: 5514360 - DNA, 25 bp, Homo sapien
gcatcttaatgacaatggcaaaatc

SEQ ID NO: 5514361 - DNA, 25 bp, Homo sapien
aatggcaaaatcacataagagttgt

SEQ ID NO: 5514362 - DNA, 25 bp, Homo sapien
gtaacttacgggctaattacatagc

SEQ ID NO: 5514363 - DNA, 25 bp, Homo sapien
agacatcttccaggtagcagcagtg

SEQ ID NO: 5514364 - DNA, 25 bp, Homo sapien
aaatgctggcaaataggcaaaacat

SEQ ID NO: 5514365 - DNA, 25 bp, Homo sapien
acataagagttgtagaaaatgaagt

SEQ ID NO: 5514366 - DNA, 25 bp, Homo sapien
gtcctgaatggcaccaatgtgactg

SEQ ID NO: 5514367 - DNA, 25 bp, Homo sapien
tctttttgcgttaggaacctctgtc

SEQ ID NO: 5514368 - DNA, 25 bp, Homo sapien
tctaaagctctaatttgacggtctt

SEQ ID NO: 5514369 - DNA, 25 bp, Homo sapien
tgcattaatacagaaactataggaa

SEQ ID NO: 5514370 - DNA, 25 bp, Homo sapien
atggcaccaatgtgactggaaaact

SEQ ID NO: 5514371 - DNA, 25 bp, Homo sapien
ggactcaggatgtgcgaccttgttt

SEQ ID NO: 5514372 - DNA, 25 bp, Homo sapien
atcaagcagctgatggtatccagga

SEQ ID NO: 5514373 - DNA, 25 bp, Homo sapien
ttgatggcttctctgagaggtttaa

SEQ ID NO: 5514374 - DNA, 25 bp, Homo sapien
gatggtatccaggaacaacagagac

SEQ ID NO: 5514375 - DNA, 25 bp, Homo sapien
tggattgtttgaagaagcagagaaa

SEQ ID NO: 5514376 - DNA, 25 bp, Homo sapien
attggaaatggtgtggtaattcatc

SEQ ID NO: 5514377 - DNA, 25 bp, Homo sapien
tgagaggtttaaagttctagctaac

SEQ ID NO: 5514378 - DNA, 25 bp, Homo sapien
tatctgacagagctcatattgtatt

SEQ ID NO: 5514379 - DNA, 25 bp, Homo sapien
ttcgtccaaagctgctcggagtgga

SEQ ID NO: 5514380 - DNA, 25 bp, Homo sapien
tgttgtggattctgtggaatatgat

SEQ ID NO: 5514381 - DNA, 25 bp, Homo sapien
tgctggccatacagttgttgtggat

SEQ ID NO: 5514382 - DNA, 25 bp, Homo sapien
tggcatggatcaaagcctgagtatc

SEQ ID NO: 5514383 - DNA, 25 bp, Homo sapien
gtatataaggactttcagcagatga

SEQ ID NO: 5514384 - DNA, 25 bp, Homo sapien
cttaaatgtgcttggagtcctttca

SEQ ID NO: 5514385 - DNA, 25 bp, Homo sapien
tttggtaaaaatatgaagtgatgaa

SEQ ID NO: 5514386 - DNA, 25 bp, Homo sapien
gaaataaggggttgataaaatatgc

SEQ ID NO: 5514387 - DNA, 25 bp, Homo sapien
tttccagtttgccagatccagataa

SEQ ID NO: 5514388 - DNA, 25 bp, Homo sapien
gggtggaaatgaatacagcaattag

SEQ ID NO: 5514389 - DNA, 25 bp, Homo sapien
aaaagaccagcctacttaaatgtgc

SEQ ID NO: 5514390 - DNA, 25 bp, Homo sapien
gctgttacagttaaagaagcatttt

SEQ ID NO: 5514391 - DNA, 25 bp, Homo sapien
aaatcatgcatgatgaaaagaccag

SEQ ID NO: 5514392 - DNA, 25 bp, Homo sapien
ccagatccagataaacagacttgta

SEQ ID NO: 5514393 - DNA, 25 bp, Homo sapien
gaaatattaaagatggatcagggat

SEQ ID NO: 5514394 - DNA, 25 bp, Homo sapien
aaaatgggtatgcctgaatgtacac

SEQ ID NO: 5514395 - DNA, 25 bp, Homo sapien
tgcctgaatgtacacaaaagggcat

SEQ ID NO: 5514396 - DNA, 25 bp, Homo sapien
ttgggttatagctatatatcaggac

SEQ ID NO: 5514397 - DNA, 25 bp, Homo sapien
ctttagagttcaaagaaatagttaa

SEQ ID NO: 5514398 - DNA, 25 bp, Homo sapien
caaattgattaaaatgggtatgcct

SEQ ID NO: 5514399 - DNA, 25 bp, Homo sapien
gatctcagtttaaggaatcctgcct

SEQ ID NO: 5514400 - DNA, 25 bp, Homo sapien
atatcaggacaggtaaatacattat

SEQ ID NO: 5514401 - DNA, 25 bp, Homo sapien
tcctgccttctgtatgatgatgtct

SEQ ID NO: 5514402 - DNA, 25 bp, Homo sapien
taaagatggatcagggatctcagtt

SEQ ID NO: 5514403 - DNA, 25 bp, Homo sapien
tatgtataaaggaaaatatccaaga

SEQ ID NO: 5514404 - DNA, 25 bp, Homo sapien
tggagcacataaacgccaagtgtcc

SEQ ID NO: 5514405 - DNA, 25 bp, Homo sapien
ctgaaaggttaaaggttatggtcca

SEQ ID NO: 5514406 - DNA, 25 bp, Homo sapien
agaccatagccatcgtggagcacat

SEQ ID NO: 5514407 - DNA, 25 bp, Homo sapien
ctgtgaagttggcagacaaagtgaa

SEQ ID NO: 5514408 - DNA, 25 bp, Homo sapien
gagaagagagtaaacatggccttcc

SEQ ID NO: 5514409 - DNA, 25 bp, Homo sapien
ccagattaacaccagcggagaagag

SEQ ID NO: 5514410 - DNA, 25 bp, Homo sapien
accataggaagctttgggcatgatc

SEQ ID NO: 5514411 - DNA, 25 bp, Homo sapien
catccctgctgaaccggtttgagcc

SEQ ID NO: 5514412 - DNA, 25 bp, Homo sapien
ggcgagaactacgttcaggaactgc

SEQ ID NO: 5514413 - DNA, 25 bp, Homo sapien
aaacctgcagacatggtgatcgagg

SEQ ID NO: 5514414 - DNA, 25 bp, Homo sapien
aacagttcctggcagagaaaaggtt

SEQ ID NO: 5514415 - DNA, 25 bp, Homo sapien
ctgatcagtcggcatgatgacgaag

SEQ ID NO: 5514416 - DNA, 25 bp, Homo sapien
gaggcttcgtgacggagttatcaga

SEQ ID NO: 5514417 - DNA, 25 bp, Homo sapien
ggtgatcctggtagaagccccatta

SEQ ID NO: 5514418 - DNA, 25 bp, Homo sapien
agaagcactgccgagcttgtgagaa

SEQ ID NO: 5514419 - DNA, 25 bp, Homo sapien
gccccattagggtcactgtccagtg

SEQ ID NO: 5514420 - DNA, 25 bp, Homo sapien
tggacagacaacacgagtttgtgtg

SEQ ID NO: 5514421 - DNA, 25 bp, Homo sapien
atcaaataaaggacagtgggtcata

SEQ ID NO: 5514422 - DNA, 25 bp, Homo sapien
tagtagcatccacctgagtagtctg

SEQ ID NO: 5514423 - DNA, 25 bp, Homo sapien
ttagggttgttactgagaagcactg

SEQ ID NO: 5514424 - DNA, 25 bp, Homo sapien
gttatcagagacattgagaggcaaa

SEQ ID NO: 5514425 - DNA, 25 bp, Homo sapien
ttgatggagagtagcttagtagtat

SEQ ID NO: 5514426 - DNA, 25 bp, Homo sapien
ggtagatccttgagggtcagtagtt

SEQ ID NO: 5514427 - DNA, 25 bp, Homo sapien
tgcaattccgagtgagcaaatcgca

SEQ ID NO: 5514428 - DNA, 25 bp, Homo sapien
acttgcagcaagtccaaacgctcct

SEQ ID NO: 5514429 - DNA, 25 bp, Homo sapien
gcctggcaccgaaagcactttgtct

SEQ ID NO: 5514430 - DNA, 25 bp, Homo sapien
tatatattctaggttgggtggtggt

SEQ ID NO: 5514431 - DNA, 25 bp, Homo sapien
actaaagacacaaatggcgttctgc

SEQ ID NO: 5514432 - DNA, 25 bp, Homo sapien
gcatagctgtagaatgtgcgtgctt

SEQ ID NO: 5514433 - DNA, 25 bp, Homo sapien
ggcgtacatcgtcaccaagggtcag

SEQ ID NO: 5514434 - DNA, 25 bp, Homo sapien
tgggaggagttttccagaatgcaat

SEQ ID NO: 5514435 - DNA, 25 bp, Homo sapien
gactaccagcgtgtggaagatctgg

SEQ ID NO: 5514436 - DNA, 25 bp, Homo sapien
tgtgccgagaccatcctaagggtcc

SEQ ID NO: 5514437 - DNA, 25 bp, Homo sapien
taattaattatgagaaggaacagac

SEQ ID NO: 5514438 - DNA, 25 bp, Homo sapien
tttagcaccaataaccacaggaatt

SEQ ID NO: 5514439 - DNA, 25 bp, Homo sapien
aaagtcacaggaacctggcaatttc

SEQ ID NO: 5514440 - DNA, 25 bp, Homo sapien
ttgcaagatgcagtcagtttcagtg

SEQ ID NO: 5514441 - DNA, 25 bp, Homo sapien
aaggaacagacagtacaatagatct

SEQ ID NO: 5514442 - DNA, 25 bp, Homo sapien
agaatcctgcagtacacaccactcc

SEQ ID NO: 5514443 - DNA, 25 bp, Homo sapien
caagatctggtttgaatcgcctttc

SEQ ID NO: 5514444 - DNA, 25 bp, Homo sapien
cagtttcagtgaagtccccaaatgc

SEQ ID NO: 5514445 - DNA, 25 bp, Homo sapien
atagatctgataagatgtagcattc

SEQ ID NO: 5514446 - DNA, 25 bp, Homo sapien
ggcagaggcattgttagaatcctgc

SEQ ID NO: 5514447 - DNA, 25 bp, Homo sapien
tgaccaatcagaaagcactatgcaa

SEQ ID NO: 5514448 - DNA, 25 bp, Homo sapien
taacatcagtagccagaacataccc

SEQ ID NO: 5514449 - DNA, 25 bp, Homo sapien
atccgctctgcccccccactaccga

SEQ ID NO: 5514450 - DNA, 25 bp, Homo sapien
taaaaaacatacacgattgcagatt

SEQ ID NO: 5514451 - DNA, 25 bp, Homo sapien
ctggtaactaaggcaaccaaaggac

SEQ ID NO: 5514452 - DNA, 25 bp, Homo sapien
ttgaaaaggtggagtgtcctttctc

SEQ ID NO: 5514453 - DNA, 25 bp, Homo sapien
tcaatcaatccaaaggacatgactc

SEQ ID NO: 5514454 - DNA, 25 bp, Homo sapien
tatctcgctgattttgaaagggggc

SEQ ID NO: 5514455 - DNA, 25 bp, Homo sapien
acaagcaatctgtaaagatggcttt

SEQ ID NO: 5514456 - DNA, 25 bp, Homo sapien
aaaagagttaagacacagaaacttc

SEQ ID NO: 5514457 - DNA, 25 bp, Homo sapien
gcaacgtgcagaaaattaattaaaa

SEQ ID NO: 5514458 - DNA, 25 bp, Homo sapien
ggggctagtggttgatgatttaacc

SEQ ID NO: 5514459 - DNA, 25 bp, Homo sapien
atgaggtatataatctggcagccac

SEQ ID NO: 5514460 - DNA, 25 bp, Homo sapien
tggcagccactctgaaacgcctctc

SEQ ID NO: 5514461 - DNA, 25 bp, Homo sapien
gtagatttgctgactgaccgcttcc

SEQ ID NO: 5514462 - DNA, 25 bp, Homo sapien
ctggagctgttcctgcagcaactcc

SEQ ID NO: 5514463 - DNA, 25 bp, Homo sapien
ctacaagtgagtggctttcctcctc

SEQ ID NO: 5514464 - DNA, 25 bp, Homo sapien
tcctagatgaggatgaggtatataa

SEQ ID NO: 5514465 - DNA, 25 bp, Homo sapien
ggagcttgaagagctgttacaggta

SEQ ID NO: 5514466 - DNA, 25 bp, Homo sapien
ttcactttcttcagccgggcggact

SEQ ID NO: 5514467 - DNA, 25 bp, Homo sapien
gctggacaatgggacaccccaaaca

SEQ ID NO: 5514468 - DNA, 25 bp, Homo sapien
ggcggactttgcccgcagccagcta

SEQ ID NO: 5514469 - DNA, 25 bp, Homo sapien
gcccgcagccagctagtagatttgc

SEQ ID NO: 5514470 - DNA, 25 bp, Homo sapien
aagatagggaccaagttgagtattt

SEQ ID NO: 5514471 - DNA, 25 bp, Homo sapien
ggatggaaggtgagtctctgaatta

SEQ ID NO: 5514472 - DNA, 25 bp, Homo sapien
attgtttagtgccaggatggaaggt

SEQ ID NO: 5514473 - DNA, 25 bp, Homo sapien
gttctgtcgttagcataccctccct

SEQ ID NO: 5514474 - DNA, 25 bp, Homo sapien
tgctgaaagaacgctcccagctggg

SEQ ID NO: 5514475 - DNA, 25 bp, Homo sapien
gcatggtatgaggaccagttatccc

SEQ ID NO: 5514476 - DNA, 25 bp, Homo sapien
aagacagaacaatcccctccggtgt

SEQ ID NO: 5514477 - DNA, 25 bp, Homo sapien
cctctaacctgctggaagataggga

SEQ ID NO: 5514478 - DNA, 25 bp, Homo sapien
ctgtgaattgtcctgccagtggggt

SEQ ID NO: 5514479 - DNA, 25 bp, Homo sapien
ctccggtgtcacaggcactgttctg

SEQ ID NO: 5514480 - DNA, 25 bp, Homo sapien
tatcctgcttaagtgagagaaattc

SEQ ID NO: 5514481 - DNA, 25 bp, Homo sapien
atactcaaggggccatttggagagt

SEQ ID NO: 5514482 - DNA, 25 bp, Homo sapien
agcaaatgtatgcatgtcaggggga

SEQ ID NO: 5514483 - DNA, 25 bp, Homo sapien
gtcagagggaagacacttctcccag

SEQ ID NO: 5514484 - DNA, 25 bp, Homo sapien
tgtgggaccaattcatccaagcccc

SEQ ID NO: 5514485 - DNA, 25 bp, Homo sapien
gagagtgcaacagtgcagaaaatac

SEQ ID NO: 5514486 - DNA, 25 bp, Homo sapien
cattagtgcaacaggtaagagcaat

SEQ ID NO: 5514487 - DNA, 25 bp, Homo sapien
gggtcacatgagcagtggactcatc

SEQ ID NO: 5514488 - DNA, 25 bp, Homo sapien
caagatttgtgttgaaaggagcagg

SEQ ID NO: 5514489 - DNA, 25 bp, Homo sapien
taagagcaattaagcacagacggag

SEQ ID NO: 5514490 - DNA, 25 bp, Homo sapien
gcttaaggcagggtatatctgtggg

SEQ ID NO: 5514491 - DNA, 25 bp, Homo sapien
ctggtcacaaaccaagagggatcca

SEQ ID NO: 5514492 - DNA, 25 bp, Homo sapien
agggaatgctgacaggccataatac

SEQ ID NO: 5514493 - DNA, 25 bp, Homo sapien
accatgaccacagggctacatgtcc

SEQ ID NO: 5514494 - DNA, 25 bp, Homo sapien
cagctgactctgagggtttacattg

SEQ ID NO: 5514495 - DNA, 25 bp, Homo sapien
taaggaatggctagtatccagagta

SEQ ID NO: 5514496 - DNA, 25 bp, Homo sapien
gttggcagctccgcattctaggcct

SEQ ID NO: 5514497 - DNA, 25 bp, Homo sapien
ttctaggcctaaggtttggagggca

SEQ ID NO: 5514498 - DNA, 25 bp, Homo sapien
catgtccccccaaggatgggagaca

SEQ ID NO: 5514499 - DNA, 25 bp, Homo sapien
tggcctaaaatagttcagctgactc

SEQ ID NO: 5514500 - DNA, 25 bp, Homo sapien
gacagaaggctgtgttagtgtgcct

SEQ ID NO: 5514501 - DNA, 25 bp, Homo sapien
tcaaaagggtgaatgttatgttggc

SEQ ID NO: 5514502 - DNA, 25 bp, Homo sapien
gagcaagtggcaataatggctgtgt

SEQ ID NO: 5514503 - DNA, 25 bp, Homo sapien
gcgcaggaacgcgagggaccggacc

SEQ ID NO: 5514504 - DNA, 25 bp, Homo sapien
ggtccggtccctcgcgttcctgcgc

SEQ ID NO: 5514505 - DNA, 25 bp, Homo sapien
gtcggcgcaggaacgcgagggaccg

SEQ ID NO: 5514506 - DNA, 25 bp, Homo sapien
cggtccctcgcgttcctgcgccgac

SEQ ID NO: 5514507 - DNA, 25 bp, Homo sapien
tcacgtgcccctgagccctatttcc

SEQ ID NO: 5514508 - DNA, 25 bp, Homo sapien
ttgggaccaaactgcttggatcttt

SEQ ID NO: 5514509 - DNA, 25 bp, Homo sapien
ccatgtatcacgtggagttgctcct

SEQ ID NO: 5514510 - DNA, 25 bp, Homo sapien
gggcagtgtctggtctgttttctaa

SEQ ID NO: 5514511 - DNA, 25 bp, Homo sapien
gctgatcctcccagcaacggggtgg

SEQ ID NO: 5514512 - DNA, 25 bp, Homo sapien
agttgctccttaccacacctcacgt

SEQ ID NO: 5514513 - DNA, 25 bp, Homo sapien
tctgggctggacttccccgttctcc

SEQ ID NO: 5514514 - DNA, 25 bp, Homo sapien
cctatgatcgattaaggaaggtggt

SEQ ID NO: 5514515 - DNA, 25 bp, Homo sapien
tttgtatgtcaaggaggagtttaag

SEQ ID NO: 5514516 - DNA, 25 bp, Homo sapien
aggcctttccgaccaccttgtgttc

SEQ ID NO: 5514517 - DNA, 25 bp, Homo sapien
actttctagtcctgctgatcctccc

SEQ ID NO: 5514518 - DNA, 25 bp, Homo sapien
cttttatgtattgttgaaggagttt

SEQ ID NO: 5514519 - DNA, 25 bp, Homo sapien
aaactccttcaacaatacataaaag

SEQ ID NO: 5514520 - DNA, 25 bp, Homo sapien
aaaagactgaaacccctagaatgac

SEQ ID NO: 5514521 - DNA, 25 bp, Homo sapien
gctatttggcccgggtataaagcaa

SEQ ID NO: 5514522 - DNA, 25 bp, Homo sapien
agcaccctgtgtcatccagaagtgc

SEQ ID NO: 5514523 - DNA, 25 bp, Homo sapien
acctaaacaaatcaaccaacgccaa

SEQ ID NO: 5514524 - DNA, 25 bp, Homo sapien
gtcaggaagcttatgttaaaggaat

SEQ ID NO: 5514525 - DNA, 25 bp, Homo sapien
taccacgactgggctactgtggaga

SEQ ID NO: 5514526 - DNA, 25 bp, Homo sapien
caggtgttatgtgctatttggcccg

SEQ ID NO: 5514527 - DNA, 25 bp, Homo sapien
tgaatgtgcgaacttcaggcagttc

SEQ ID NO: 5514528 - DNA, 25 bp, Homo sapien
gagaccaagtctcctgcacagaagg

SEQ ID NO: 5514529 - DNA, 25 bp, Homo sapien
acactgataaggctggtagtctaga

SEQ ID NO: 5514530 - DNA, 25 bp, Homo sapien
aggctggtagtctagatgcatcttc

SEQ ID NO: 5514531 - DNA, 25 bp, Homo sapien
tatgactatgcccccaaacactggt

SEQ ID NO: 5514532 - DNA, 25 bp, Homo sapien
gcaagagacccataaaggaagctga

SEQ ID NO: 5514533 - DNA, 25 bp, Homo sapien
tacatgccgtaaaaggtattgtttc

SEQ ID NO: 5514534 - DNA, 25 bp, Homo sapien
ctgaagcaatgcataagataatctg

SEQ ID NO: 5514535 - DNA, 25 bp, Homo sapien
tacccaagttgggacatcagagcag

SEQ ID NO: 5514536 - DNA, 25 bp, Homo sapien
gtttggatggagccttcactggtat

SEQ ID NO: 5514537 - DNA, 25 bp, Homo sapien
gccgggaaaatacctcagaattgga

SEQ ID NO: 5514538 - DNA, 25 bp, Homo sapien
ctctggctataataaaggatggttt

SEQ ID NO: 5514539 - DNA, 25 bp, Homo sapien
cttatttgataggcaagagacccat

SEQ ID NO: 5514540 - DNA, 25 bp, Homo sapien
tcactggtatagagaatgaccttct

SEQ ID NO: 5514541 - DNA, 25 bp, Homo sapien
agcagcaactaaaatccaggtcttc

SEQ ID NO: 5514542 - DNA, 25 bp, Homo sapien
aatcatgaaagaagttaaaaaacac

SEQ ID NO: 5514543 - DNA, 25 bp, Homo sapien
atgtactaggccacaaagatgcaac

SEQ ID NO: 5514544 - DNA, 25 bp, Homo sapien
ctaaattaactatgtactaggccac

SEQ ID NO: 5514545 - DNA, 25 bp, Homo sapien
caggaatcaacgaaacatgtcagag

SEQ ID NO: 5514546 - DNA, 25 bp, Homo sapien
cacaaagatgcaacaatatactcca

SEQ ID NO: 5514547 - DNA, 25 bp, Homo sapien
agcaaactaaatatctaagaaaacc

SEQ ID NO: 5514548 - DNA, 25 bp, Homo sapien
tgattctgggagattaatataatag

SEQ ID NO: 5514549 - DNA, 25 bp, Homo sapien
tatgagaaaagtctaataaagcatt

SEQ ID NO: 5514550 - DNA, 25 bp, Homo sapien
ttcaagtacaactggaagcattcac

SEQ ID NO: 5514551 - DNA, 25 bp, Homo sapien
aaaacagtaccagtcaaaacttatg

SEQ ID NO: 5514552 - DNA, 25 bp, Homo sapien
ccttcagttaaaaggaaatcatgaa

SEQ ID NO: 5514553 - DNA, 25 bp, Homo sapien
ctttgtctcgccctgggtgagcaca

SEQ ID NO: 5514554 - DNA, 25 bp, Homo sapien
ttaatcttggaggccacttggagga

SEQ ID NO: 5514555 - DNA, 25 bp, Homo sapien
aggcggaactggccaagtctttgat

SEQ ID NO: 5514556 - DNA, 25 bp, Homo sapien
tctttgatgaccatgtgaagaagcc

SEQ ID NO: 5514557 - DNA, 25 bp, Homo sapien
aagccgctaattaacaacatgagtc

SEQ ID NO: 5514558 - DNA, 25 bp, Homo sapien
tggtgatgcacgtggttgtttctca

SEQ ID NO: 5514559 - DNA, 25 bp, Homo sapien
agggatgctctgattcaggaggctg

SEQ ID NO: 5514560 - DNA, 25 bp, Homo sapien
ggtccaggcttgtcgccccctcgat

SEQ ID NO: 5514561 - DNA, 25 bp, Homo sapien
gtgtttgttggtgaactgatgcgtc

SEQ ID NO: 5514562 - DNA, 25 bp, Homo sapien
cccagcactagcagcactgaatcgt

SEQ ID NO: 5514563 - DNA, 25 bp, Homo sapien
cagtatggtttgccaaagggatgct

SEQ ID NO: 5514564 - DNA, 25 bp, Homo sapien
ttgctcgaggtcacatagtaaagtc

SEQ ID NO: 5514565 - DNA, 25 bp, Homo sapien
agagaagttaaatcatttgctcgag

SEQ ID NO: 5514566 - DNA, 25 bp, Homo sapien
caattgaaatactactggcagaaac

SEQ ID NO: 5514567 - DNA, 25 bp, Homo sapien
atactactggcagaaacatacagaa

SEQ ID NO: 5514568 - DNA, 25 bp, Homo sapien
ggttgaatgatcaagatctggccac

SEQ ID NO: 5514569 - DNA, 25 bp, Homo sapien
ttcttccgaagagttgaaagcattc

SEQ ID NO: 5514570 - DNA, 25 bp, Homo sapien
aagagaagtggaaatatgcatcaaa

SEQ ID NO: 5514571 - DNA, 25 bp, Homo sapien
cataacatctctatgaggtaggcaa

SEQ ID NO: 5514572 - DNA, 25 bp, Homo sapien
tgaggtaggcaatggttagtatcat

SEQ ID NO: 5514573 - DNA, 25 bp, Homo sapien
tagtaaagtcaatgctggaacaggg

SEQ ID NO: 5514574 - DNA, 25 bp, Homo sapien
ccgaagagttgaaagcattcgtgct

SEQ ID NO: 5514575 - DNA, 25 bp, Homo sapien
agcaaacatgtgactacggaataag

SEQ ID NO: 5514576 - DNA, 25 bp, Homo sapien
gagtgtccagtgaagtgataataat

SEQ ID NO: 5514577 - DNA, 25 bp, Homo sapien
catgtagttacagtgccttggctca

SEQ ID NO: 5514578 - DNA, 25 bp, Homo sapien
agcagatgctgaataaatgtaatgt

SEQ ID NO: 5514579 - DNA, 25 bp, Homo sapien
tagccaaagaaacaggaccttacaa

SEQ ID NO: 5514580 - DNA, 25 bp, Homo sapien
tgtaatcagatgtagccaaagaaac

SEQ ID NO: 5514581 - DNA, 25 bp, Homo sapien
tgactacggaataagagtgagttac

SEQ ID NO: 5514582 - DNA, 25 bp, Homo sapien
tatggtcaagttagagtgtccagtg

SEQ ID NO: 5514583 - DNA, 25 bp, Homo sapien
gtgaaccaatgagcaagcaaacatg

SEQ ID NO: 5514584 - DNA, 25 bp, Homo sapien
gaggtccatctaggttgttgagagt

SEQ ID NO: 5514585 - DNA, 25 bp, Homo sapien
ggatatgggagctgtttacagtttt

SEQ ID NO: 5514586 - DNA, 25 bp, Homo sapien
ggcttcctgtgccagagcccagcca

SEQ ID NO: 5514587 - DNA, 25 bp, Homo sapien
gtctcccatgatggtgtggtacagc

SEQ ID NO: 5514588 - DNA, 25 bp, Homo sapien
gtgcatgcatggtcctctctgagcc

SEQ ID NO: 5514589 - DNA, 25 bp, Homo sapien
tggctggttccgtctgctctgctgc

SEQ ID NO: 5514590 - DNA, 25 bp, Homo sapien
ctgctgctacaggacctgggattgc

SEQ ID NO: 5514591 - DNA, 25 bp, Homo sapien
tcctgagttcaggctctgcacggca

SEQ ID NO: 5514592 - DNA, 25 bp, Homo sapien
agcaggtgcaggtgtcatcctgagt

SEQ ID NO: 5514593 - DNA, 25 bp, Homo sapien
gtggattcttgggtccctgtgggac

SEQ ID NO: 5514594 - DNA, 25 bp, Homo sapien
ccaaggtgctccgtgaagagcatgg

SEQ ID NO: 5514595 - DNA, 25 bp, Homo sapien
agtgagatgctcagaataactgctg

SEQ ID NO: 5514596 - DNA, 25 bp, Homo sapien
gctgttgtctggctatggcatggct

SEQ ID NO: 5514597 - DNA, 25 bp, Homo sapien
ctgccagcggttcctggactaagtc

SEQ ID NO: 5514598 - DNA, 25 bp, Homo sapien
tggactaagtccggctcgttcaaga

SEQ ID NO: 5514599 - DNA, 25 bp, Homo sapien
ttgcactaaagccaaaccacaccgc

SEQ ID NO: 5514600 - DNA, 25 bp, Homo sapien
gcagggtctgcttttacttggggtg

SEQ ID NO: 5514601 - DNA, 25 bp, Homo sapien
taaagccaaaccacaccgctgtccc

SEQ ID NO: 5514602 - DNA, 25 bp, Homo sapien
tcgttcaagaacataagctaccacc

SEQ ID NO: 5514603 - DNA, 25 bp, Homo sapien
ggggtcccaccactcaaagtgcctc

SEQ ID NO: 5514604 - DNA, 25 bp, Homo sapien
gccgctggaagaaagcctgccagcg

SEQ ID NO: 5514605 - DNA, 25 bp, Homo sapien
aaagtgcctctaaagaaaccagctt

SEQ ID NO: 5514606 - DNA, 25 bp, Homo sapien
cctccaggatcggagtcaccctgag

SEQ ID NO: 5514607 - DNA, 25 bp, Homo sapien
cgccttgtcctccaggatcggagtc

SEQ ID NO: 5514608 - DNA, 25 bp, Homo sapien
cctaaagaggctatgctacagtctc

SEQ ID NO: 5514609 - DNA, 25 bp, Homo sapien
ctctagctaaatggaagacacattc

SEQ ID NO: 5514610 - DNA, 25 bp, Homo sapien
actgatttagacaaggtattatggt

SEQ ID NO: 5514611 - DNA, 25 bp, Homo sapien
catttaatgttggtgagagagtgat

SEQ ID NO: 5514612 - DNA, 25 bp, Homo sapien
cagcttctctggggaacttgttttt

SEQ ID NO: 5514613 - DNA, 25 bp, Homo sapien
gatccaccaacacctaaagaggcta

SEQ ID NO: 5514614 - DNA, 25 bp, Homo sapien
atccaaagacttgaaccacattccc

SEQ ID NO: 5514615 - DNA, 25 bp, Homo sapien
agtttcctagccatgaagccctgct

SEQ ID NO: 5514616 - DNA, 25 bp, Homo sapien
aagaactgctgacgtactgtggatg

SEQ ID NO: 5514617 - DNA, 25 bp, Homo sapien
actgtggatgtagagtataaaactt

SEQ ID NO: 5514618 - DNA, 25 bp, Homo sapien
ttggtgagagagtgatctatcctaa

SEQ ID NO: 5514619 - DNA, 25 bp, Homo sapien
cgacacaaaacaatttagataattt

SEQ ID NO: 5514620 - DNA, 25 bp, Homo sapien
aaattatctaaattgttttgtgtcg

SEQ ID NO: 5514621 - DNA, 25 bp, Homo sapien
ggccccataccacgacacagctttt

SEQ ID NO: 5514622 - DNA, 25 bp, Homo sapien
actaagcagttgaaaggcctgtctc

SEQ ID NO: 5514623 - DNA, 25 bp, Homo sapien
gaagggccaagcaataatctataag

SEQ ID NO: 5514624 - DNA, 25 bp, Homo sapien
aagccttaggaacaacagaacatac

SEQ ID NO: 5514625 - DNA, 25 bp, Homo sapien
ttttggttggtcttgctgagtgcct

SEQ ID NO: 5514626 - DNA, 25 bp, Homo sapien
aatgtgtccaaggtgaaaaagcaaa

SEQ ID NO: 5514627 - DNA, 25 bp, Homo sapien
ttcataagcaaggacatactaacac

SEQ ID NO: 5514628 - DNA, 25 bp, Homo sapien
tctataagagtgacctattagcaat

SEQ ID NO: 5514629 - DNA, 25 bp, Homo sapien
ccataaaacactaggtcaaagggcc

SEQ ID NO: 5514630 - DNA, 25 bp, Homo sapien
ctgatcacggtggccccataccacg

SEQ ID NO: 5514631 - DNA, 25 bp, Homo sapien
agttaacgtactgatgagtgtcccc

SEQ ID NO: 5514632 - DNA, 25 bp, Homo sapien
gccacaacatgacttcagctatgcc

SEQ ID NO: 5514633 - DNA, 25 bp, Homo sapien
tagctaaggtttaaaacagacatcc

SEQ ID NO: 5514634 - DNA, 25 bp, Homo sapien
taagaaagcaagcttaacttccgtc

SEQ ID NO: 5514635 - DNA, 25 bp, Homo sapien
ttaaataagaatagtcaagtcaaac

SEQ ID NO: 5514636 - DNA, 25 bp, Homo sapien
aaaacaggtttgggatagctgtgtg

SEQ ID NO: 5514637 - DNA, 25 bp, Homo sapien
ttccgtcagctcagctagtccttcc

SEQ ID NO: 5514638 - DNA, 25 bp, Homo sapien
tgggatgactaaaatgatagctaag

SEQ ID NO: 5514639 - DNA, 25 bp, Homo sapien
atccctagaccctgaacagcatttc

SEQ ID NO: 5514640 - DNA, 25 bp, Homo sapien
agctctcaggctacacaaaaatatg

SEQ ID NO: 5514641 - DNA, 25 bp, Homo sapien
tctaagccttgcggttaagaaagca

SEQ ID NO: 5514642 - DNA, 25 bp, Homo sapien
tagctgtgtgttaaggagtccctaa

SEQ ID NO: 5514643 - DNA, 25 bp, Homo sapien
aagggatctgagtcactaaatgtga

SEQ ID NO: 5514644 - DNA, 25 bp, Homo sapien
tctgccccagctcaacctatggaat

SEQ ID NO: 5514645 - DNA, 25 bp, Homo sapien
aagagcactaggaattgccacatac

SEQ ID NO: 5514646 - DNA, 25 bp, Homo sapien
ctccaggagccattaatttctgccc

SEQ ID NO: 5514647 - DNA, 25 bp, Homo sapien
aagctaaattctgtccaaatgggaa

SEQ ID NO: 5514648 - DNA, 25 bp, Homo sapien
agaagtaatcaacagcacaaaagct

SEQ ID NO: 5514649 - DNA, 25 bp, Homo sapien
gaagagtaatgtcatacaagagcac

SEQ ID NO: 5514650 - DNA, 25 bp, Homo sapien
tagaagtgaacaattggctaccagt

SEQ ID NO: 5514651 - DNA, 25 bp, Homo sapien
agcaaaaggaacaaacattactgat

SEQ ID NO: 5514652 - DNA, 25 bp, Homo sapien
ggctaccagtttagtacagaagtaa

SEQ ID NO: 5514653 - DNA, 25 bp, Homo sapien
gcaaaggacttacacaaagggatct

SEQ ID NO: 5514654 - DNA, 25 bp, Homo sapien
caaaataaggccgtcaatattcgac

SEQ ID NO: 5514655 - DNA, 25 bp, Homo sapien
gtcgaatattgacggccttattttg

SEQ ID NO: 5514656 - DNA, 25 bp, Homo sapien
ggaaaatgagaaactcatgcgcctt

SEQ ID NO: 5514657 - DNA, 25 bp, Homo sapien
aatacgtattgataccagaggattc

SEQ ID NO: 5514658 - DNA, 25 bp, Homo sapien
aactgaaagggcataatccctatac

SEQ ID NO: 5514659 - DNA, 25 bp, Homo sapien
taacagcaataaatacaccgaaata

SEQ ID NO: 5514660 - DNA, 25 bp, Homo sapien
tgcgccttataaatgaatgtgtgac

SEQ ID NO: 5514661 - DNA, 25 bp, Homo sapien
cagaggattcaaacacatagtggtc

SEQ ID NO: 5514662 - DNA, 25 bp, Homo sapien
tcaaaaatacatacagctgtgcttt

SEQ ID NO: 5514663 - DNA, 25 bp, Homo sapien
aacacatagtggtctgaaaatgatt

SEQ ID NO: 5514664 - DNA, 25 bp, Homo sapien
acaatgctcgtacatgggaaaatga

SEQ ID NO: 5514665 - DNA, 25 bp, Homo sapien
aagttttgagggacatcatttgacc

SEQ ID NO: 5514666 - DNA, 25 bp, Homo sapien
gaaacacctggaaacaagaaggcaa

SEQ ID NO: 5514667 - DNA, 25 bp, Homo sapien
atacaatctgtgtgtagccaagtac

SEQ ID NO: 5514668 - DNA, 25 bp, Homo sapien
ctgtgtgtagccaagtacagagact

SEQ ID NO: 5514669 - DNA, 25 bp, Homo sapien
aaatgcaggtatccataagaagagc

SEQ ID NO: 5514670 - DNA, 25 bp, Homo sapien
gcaggtatccataagaagagcatta

SEQ ID NO: 5514671 - DNA, 25 bp, Homo sapien
aacagcaaaaaggatctcacaaaag

SEQ ID NO: 5514672 - DNA, 25 bp, Homo sapien
atagtccacaagttaaatgcaggta

SEQ ID NO: 5514673 - DNA, 25 bp, Homo sapien
atccataagaagagcattaacaata

SEQ ID NO: 5514674 - DNA, 25 bp, Homo sapien
aaaaggatctcacaaaagtacaaat

SEQ ID NO: 5514675 - DNA, 25 bp, Homo sapien
gtccacaagttaaatgcaggtatcc

SEQ ID NO: 5514676 - DNA, 25 bp, Homo sapien
tagatattgtgtttacatagtccac

SEQ ID NO: 5514677 - DNA, 25 bp, Homo sapien
gtgtagccaagtacagagacttaaa

SEQ ID NO: 5514678 - DNA, 25 bp, Homo sapien
ttcagaagttaacctattttgtaat

SEQ ID NO: 5514679 - DNA, 25 bp, Homo sapien
attacaaaataggttaacttctgaa

SEQ ID NO: 5514680 - DNA, 25 bp, Homo sapien
cagacaagattggccattagctcct

SEQ ID NO: 5514681 - DNA, 25 bp, Homo sapien
agagtcatccaaaactgaggggaaa

SEQ ID NO: 5514682 - DNA, 25 bp, Homo sapien
aataaacataagtgaggcagagttg

SEQ ID NO: 5514683 - DNA, 25 bp, Homo sapien
acaacaacaaaacggctgtagttca

SEQ ID NO: 5514684 - DNA, 25 bp, Homo sapien
acgagcattatctgacacctgggag

SEQ ID NO: 5514685 - DNA, 25 bp, Homo sapien
gggtgaggctcatataagcgcacaa

SEQ ID NO: 5514686 - DNA, 25 bp, Homo sapien
ttgtccccttctgtggtcaaccacc

SEQ ID NO: 5514687 - DNA, 25 bp, Homo sapien
tgcaaccaacgaacttaatggattc

SEQ ID NO: 5514688 - DNA, 25 bp, Homo sapien
gcaggacctcagatagcccaacaga

SEQ ID NO: 5514689 - DNA, 25 bp, Homo sapien
caaagaactcagacaagattggcca

SEQ ID NO: 5514690 - DNA, 25 bp, Homo sapien
tgagatgatggactaaggcatttac

SEQ ID NO: 5514691 - DNA, 25 bp, Homo sapien
gtcccatgcggctgctggcctcccg

SEQ ID NO: 5514692 - DNA, 25 bp, Homo sapien
cgggaggccagcagccgcatgggac

SEQ ID NO: 5514693 - DNA, 25 bp, Homo sapien
aggaaattaatcaaccataagcttc

SEQ ID NO: 5514694 - DNA, 25 bp, Homo sapien
aaggtgtctgtacttatgaaaacat

SEQ ID NO: 5514695 - DNA, 25 bp, Homo sapien
acctccagtgtaccccagcaaaata

SEQ ID NO: 5514696 - DNA, 25 bp, Homo sapien
tcaataggtccatgtaacgtagtaa

SEQ ID NO: 5514697 - DNA, 25 bp, Homo sapien
ccatgtaaccactgataggataatt

SEQ ID NO: 5514698 - DNA, 25 bp, Homo sapien
tgtgatcagagaaaagacattttgg

SEQ ID NO: 5514699 - DNA, 25 bp, Homo sapien
tcagtgtctccaaccccatgtaacc

SEQ ID NO: 5514700 - DNA, 25 bp, Homo sapien
ttcaacaaagctagtctgggtttac

SEQ ID NO: 5514701 - DNA, 25 bp, Homo sapien
ttcctaaataacagcgatcaacttc

SEQ ID NO: 5514702 - DNA, 25 bp, Homo sapien
atgtaacgtagtaattaggtctttc

SEQ ID NO: 5514703 - DNA, 25 bp, Homo sapien
catagctgtgctgttaggaaattaa

SEQ ID NO: 5514704 - DNA, 25 bp, Homo sapien
agcaaaggtagagttcatctgtggc

SEQ ID NO: 5514705 - DNA, 25 bp, Homo sapien
ggatacaagacagcctcgactctgc

SEQ ID NO: 5514706 - DNA, 25 bp, Homo sapien
caagggtaacttgtcagaagagaac

SEQ ID NO: 5514707 - DNA, 25 bp, Homo sapien
tcgactctgctaccaccgtgcgctc

SEQ ID NO: 5514708 - DNA, 25 bp, Homo sapien
ctgggccagtcacatctgaacgcta

SEQ ID NO: 5514709 - DNA, 25 bp, Homo sapien
tggtgcacacacagccttggagtgc

SEQ ID NO: 5514710 - DNA, 25 bp, Homo sapien
taagtggttctgaaagcaaaggtag

SEQ ID NO: 5514711 - DNA, 25 bp, Homo sapien
gtgcgctctctggctggtgcacaca

SEQ ID NO: 5514712 - DNA, 25 bp, Homo sapien
ataaggcacatacatcgcaagaatc

SEQ ID NO: 5514713 - DNA, 25 bp, Homo sapien
gagtgctgattgggcaacaccaact

SEQ ID NO: 5514714 - DNA, 25 bp, Homo sapien
tgggcaacaccaactggtccctctc

SEQ ID NO: 5514715 - DNA, 25 bp, Homo sapien
ttctatgaggaggtccattagaggg

SEQ ID NO: 5514716 - DNA, 25 bp, Homo sapien
tgttttgctaagaggtagataaaac

SEQ ID NO: 5514717 - DNA, 25 bp, Homo sapien
ccctaacctaagcaagtggagctgc

SEQ ID NO: 5514718 - DNA, 25 bp, Homo sapien
aacaaagctatagaaagtgagagag

SEQ ID NO: 5514719 - DNA, 25 bp, Homo sapien
gccagccccctctagaagggaagag

SEQ ID NO: 5514720 - DNA, 25 bp, Homo sapien
cagggcaaaggatcctgcttcacct

SEQ ID NO: 5514721 - DNA, 25 bp, Homo sapien
ctagagccaactgggcccccattga

SEQ ID NO: 5514722 - DNA, 25 bp, Homo sapien
gaggtgtaggatctcaaagaaaccc

SEQ ID NO: 5514723 - DNA, 25 bp, Homo sapien
gttgaagaggtctcagctctggttt

SEQ ID NO: 5514724 - DNA, 25 bp, Homo sapien
tcccccaactacaaagacggcctga

SEQ ID NO: 5514725 - DNA, 25 bp, Homo sapien
aactacaaagacggcctgaatgagt

SEQ ID NO: 5514726 - DNA, 25 bp, Homo sapien
cctatgccatcaatgggaagatctc

SEQ ID NO: 5514727 - DNA, 25 bp, Homo sapien
tggtggacatgccagccaacaacaa

SEQ ID NO: 5514728 - DNA, 25 bp, Homo sapien
cagccctcctggaggacctgggaaa

SEQ ID NO: 5514729 - DNA, 25 bp, Homo sapien
ggaagatctccccccagagcaacgt

SEQ ID NO: 5514730 - DNA, 25 bp, Homo sapien
cagagcaacgtggactttgacctga

SEQ ID NO: 5514731 - DNA, 25 bp, Homo sapien
cacctgctcaaacccagggccctgc

SEQ ID NO: 5514732 - DNA, 25 bp, Homo sapien
acctgatgctcagatgcaggaaccc

SEQ ID NO: 5514733 - DNA, 25 bp, Homo sapien
atgtcagccccctgcgctgcacgga

SEQ ID NO: 5514734 - DNA, 25 bp, Homo sapien
cttcagagcagcaggacacctgctc

SEQ ID NO: 5514735 - DNA, 25 bp, Homo sapien
tgctctgcatcaacatggcccatgt

SEQ ID NO: 5514736 - DNA, 25 bp, Homo sapien
tcatcacctacgggccctatgccat

SEQ ID NO: 5514737 - DNA, 25 bp, Homo sapien
gggagaaaccactcagagatggatc

SEQ ID NO: 5514738 - DNA, 25 bp, Homo sapien
gctctaggtccaggtgatgactgca

SEQ ID NO: 5514739 - DNA, 25 bp, Homo sapien
ctaaaggtctcacagcaaaggagca

SEQ ID NO: 5514740 - DNA, 25 bp, Homo sapien
tttcaagctgggcagaccccaggat

SEQ ID NO: 5514741 - DNA, 25 bp, Homo sapien
accttgggcatggccactctgccct

SEQ ID NO: 5514742 - DNA, 25 bp, Homo sapien
caggactcccaggcccctgtaccct

SEQ ID NO: 5514743 - DNA, 25 bp, Homo sapien
ggagcaggccactactgcccagaga

SEQ ID NO: 5514744 - DNA, 25 bp, Homo sapien
ggctcccaaaagaccctgcgcagcc

SEQ ID NO: 5514745 - DNA, 25 bp, Homo sapien
ctgcctggcctgattcagggccttg

SEQ ID NO: 5514746 - DNA, 25 bp, Homo sapien
ggccttgtggcccccagcttctgtt

SEQ ID NO: 5514747 - DNA, 25 bp, Homo sapien
agggactgcagatcctgtcagacct

SEQ ID NO: 5514748 - DNA, 25 bp, Homo sapien
aggagataagcatgacaaaatatag

SEQ ID NO: 5514749 - DNA, 25 bp, Homo sapien
tctgtcgtcttctaccactaactcc

SEQ ID NO: 5514750 - DNA, 25 bp, Homo sapien
tattccaaggagtctgggaatcagg

SEQ ID NO: 5514751 - DNA, 25 bp, Homo sapien
actccatgtctgactgcaagtgaaa

SEQ ID NO: 5514752 - DNA, 25 bp, Homo sapien
tctcaaataagaaggcagtactggg

SEQ ID NO: 5514753 - DNA, 25 bp, Homo sapien
atatagggaagaaatgacttttgcc

SEQ ID NO: 5514754 - DNA, 25 bp, Homo sapien
gcagaaccactgatagctgtggagc

SEQ ID NO: 5514755 - DNA, 25 bp, Homo sapien
aggctctgaacctgtggcagaacca

SEQ ID NO: 5514756 - DNA, 25 bp, Homo sapien
tgtgtacaattgaagcctctgcttt

SEQ ID NO: 5514757 - DNA, 25 bp, Homo sapien
gcatgacaaaatatagggaagaaat

SEQ ID NO: 5514758 - DNA, 25 bp, Homo sapien
tcagggggattatcaagatcattgt

SEQ ID NO: 5514759 - DNA, 25 bp, Homo sapien
cagtagctgtcaccatgcaggttac

SEQ ID NO: 5514760 - DNA, 25 bp, Homo sapien
agggactcagcctgctttcctatcc

SEQ ID NO: 5514761 - DNA, 25 bp, Homo sapien
cctcagtagctgtcaccatgcaggt

SEQ ID NO: 5514762 - DNA, 25 bp, Homo sapien
taccttcttggctgaaagttcacac

SEQ ID NO: 5514763 - DNA, 25 bp, Homo sapien
agctgtcaccatgcaggttacccct

SEQ ID NO: 5514764 - DNA, 25 bp, Homo sapien
tgaaagttcacactcggaattccag

SEQ ID NO: 5514765 - DNA, 25 bp, Homo sapien
tcacactcggaattccagagcagtc

SEQ ID NO: 5514766 - DNA, 25 bp, Homo sapien
actcggaattccagagcagtccatg

SEQ ID NO: 5514767 - DNA, 25 bp, Homo sapien
ggaattccagagcagtccatggcca

SEQ ID NO: 5514768 - DNA, 25 bp, Homo sapien
ccatcccctcagtagctgtcaccat

SEQ ID NO: 5514769 - DNA, 25 bp, Homo sapien
ccatgcaggttaccccttctgtcgt

SEQ ID NO: 5514770 - DNA, 25 bp, Homo sapien
acaaacccaaaccacttagagcttc

SEQ ID NO: 5514771 - DNA, 25 bp, Homo sapien
agctgctttagcaagtgaagaggta

SEQ ID NO: 5514772 - DNA, 25 bp, Homo sapien
gcaactaaaacagagaattccaaaa

SEQ ID NO: 5514773 - DNA, 25 bp, Homo sapien
tttaagagccagaaaactcaggcct

SEQ ID NO: 5514774 - DNA, 25 bp, Homo sapien
acctccgtatggcagatcaaagtcc

SEQ ID NO: 5514775 - DNA, 25 bp, Homo sapien
gtcggtattcaggatgctgtgggaa

SEQ ID NO: 5514776 - DNA, 25 bp, Homo sapien
tttgattttgaggcatggctgttcc

SEQ ID NO: 5514777 - DNA, 25 bp, Homo sapien
tacaaatcagatggtaagcctaatt

SEQ ID NO: 5514778 - DNA, 25 bp, Homo sapien
aaggatctcgctaaggttaaacaac

SEQ ID NO: 5514779 - DNA, 25 bp, Homo sapien
cagaaaactcaggcctcagcaacta

SEQ ID NO: 5514780 - DNA, 25 bp, Homo sapien
attgctgcagttaaaggatctcgct

SEQ ID NO: 5514781 - DNA, 25 bp, Homo sapien
ataggacatccaagtaacaccgact

SEQ ID NO: 5514782 - DNA, 25 bp, Homo sapien
tgggggcaaacaaatcagtatatat

SEQ ID NO: 5514783 - DNA, 25 bp, Homo sapien
aaagatcacgatataggcagatacc

SEQ ID NO: 5514784 - DNA, 25 bp, Homo sapien
gccaagacaggcatgagttcctagg

SEQ ID NO: 5514785 - DNA, 25 bp, Homo sapien
ggggattgaagaatggataaactca

SEQ ID NO: 5514786 - DNA, 25 bp, Homo sapien
cacccactcgacctccaccaagcgg

SEQ ID NO: 5514787 - DNA, 25 bp, Homo sapien
aaagtgggtattttataggacatcc

SEQ ID NO: 5514788 - DNA, 25 bp, Homo sapien
aatacaacaggttcgcacaacatcc

SEQ ID NO: 5514789 - DNA, 25 bp, Homo sapien
cccttcgttgttggctaggcctctc

SEQ ID NO: 5514790 - DNA, 25 bp, Homo sapien
tatattagatgtacagggactgcag

SEQ ID NO: 5514791 - DNA, 25 bp, Homo sapien
ctcagaaccaaaatacaggaaaaaa

SEQ ID NO: 5514792 - DNA, 25 bp, Homo sapien
gtgaagtcgggccccctaagatcaa

SEQ ID NO: 5514793 - DNA, 25 bp, Homo sapien
ggcccagaatggccagtcccccatg

SEQ ID NO: 5514794 - DNA, 25 bp, Homo sapien
gtggctgtccacatccacagagggg

SEQ ID NO: 5514795 - DNA, 25 bp, Homo sapien
tgactgcagttgcaagaacagcaag

SEQ ID NO: 5514796 - DNA, 25 bp, Homo sapien
cagttgcaagaacagcaaggaaaag

SEQ ID NO: 5514797 - DNA, 25 bp, Homo sapien
cctctccagaaccagaaggtgaagt

SEQ ID NO: 5514798 - DNA, 25 bp, Homo sapien
gaaaaggaagccctctccagaacca

SEQ ID NO: 5514799 - DNA, 25 bp, Homo sapien
gccagtcccccatggcagccctgat

SEQ ID NO: 5514800 - DNA, 25 bp, Homo sapien
cagaggggctcaagatccccatgac

SEQ ID NO: 5514801 - DNA, 25 bp, Homo sapien
gggcccttcgagagcaagtttaaga

SEQ ID NO: 5514802 - DNA, 25 bp, Homo sapien
ggcccagccgtggctgtccacatcc

SEQ ID NO: 5514803 - DNA, 25 bp, Homo sapien
ttattgaggttttggtctttttgca

SEQ ID NO: 5514804 - DNA, 25 bp, Homo sapien
tactgctcttttgaatgatgattag

SEQ ID NO: 5514805 - DNA, 25 bp, Homo sapien
acaagaattttccagtaagaatata

SEQ ID NO: 5514806 - DNA, 25 bp, Homo sapien
agagtacagtgtgcaatcatagctc

SEQ ID NO: 5514807 - DNA, 25 bp, Homo sapien
tctaattagtagcttgtacaagaac

SEQ ID NO: 5514808 - DNA, 25 bp, Homo sapien
gtaagaatatactgggacataacaa

SEQ ID NO: 5514809 - DNA, 25 bp, Homo sapien
gtctcccaggctagagtacagtgtg

SEQ ID NO: 5514810 - DNA, 25 bp, Homo sapien
tcttgtaacagtaatatgaatccac

SEQ ID NO: 5514811 - DNA, 25 bp, Homo sapien
cttcaggcagatcaaaacaagaatt

SEQ ID NO: 5514812 - DNA, 25 bp, Homo sapien
caacaacattcataaggtacattcc

SEQ ID NO: 5514813 - DNA, 25 bp, Homo sapien
accaaaataccaaaagtgattcagc

SEQ ID NO: 5514814 - DNA, 25 bp, Homo sapien
ctgcagggtccagtggccctgctcg

SEQ ID NO: 5514815 - DNA, 25 bp, Homo sapien
tttacaccagtgagaatggaaacaa

SEQ ID NO: 5514816 - DNA, 25 bp, Homo sapien
catagacattggaaactggagttga

SEQ ID NO: 5514817 - DNA, 25 bp, Homo sapien
tggaaacaaaggtggtatcgatgtt

SEQ ID NO: 5514818 - DNA, 25 bp, Homo sapien
tagaaaagtgtgaaaatagagttcc

SEQ ID NO: 5514819 - DNA, 25 bp, Homo sapien
gggatgttaatggaggtctgaaaac

SEQ ID NO: 5514820 - DNA, 25 bp, Homo sapien
atccagacagacagcctcaagtgaa

SEQ ID NO: 5514821 - DNA, 25 bp, Homo sapien
ggcccccgaagtacagaatgctggg

SEQ ID NO: 5514822 - DNA, 25 bp, Homo sapien
ggactcggaaggctccatagaaaag

SEQ ID NO: 5514823 - DNA, 25 bp, Homo sapien
aagttttataacaagagagaaggcc

SEQ ID NO: 5514824 - DNA, 25 bp, Homo sapien
tcctccagcagaacttggccatgcc

SEQ ID NO: 5514825 - DNA, 25 bp, Homo sapien
ggtaacacagatagcttctgggtgt

SEQ ID NO: 5514826 - DNA, 25 bp, Homo sapien
aaagtgcaaagaatagaccttcatg

SEQ ID NO: 5514827 - DNA, 25 bp, Homo sapien
tgttttacatgccctagagcctagc

SEQ ID NO: 5514828 - DNA, 25 bp, Homo sapien
tccattaactgcgggagacaactgg

SEQ ID NO: 5514829 - DNA, 25 bp, Homo sapien
gcgtatctcaaatggtgatcagctc

SEQ ID NO: 5514830 - DNA, 25 bp, Homo sapien
ctatgaaaaatagtagagtgttcac

SEQ ID NO: 5514831 - DNA, 25 bp, Homo sapien
gtagcaagctacactcacatgtgcg

SEQ ID NO: 5514832 - DNA, 25 bp, Homo sapien
cctgagagagtccagtccctctcca

SEQ ID NO: 5514833 - DNA, 25 bp, Homo sapien
ttctgggtgttcttgagagcagttt

SEQ ID NO: 5514834 - DNA, 25 bp, Homo sapien
caaattcacaaaccgaaatgacatt

SEQ ID NO: 5514835 - DNA, 25 bp, Homo sapien
acatgtgcgttaagccgcgtatctc

SEQ ID NO: 5514836 - DNA, 25 bp, Homo sapien
gcttgggcctcgacttcgaggactc

SEQ ID NO: 5514837 - DNA, 25 bp, Homo sapien
ccggcttgggcctcgacttcgagga

SEQ ID NO: 5514838 - DNA, 25 bp, Homo sapien
tggcttaggatcttcggatcggcca

SEQ ID NO: 5514839 - DNA, 25 bp, Homo sapien
cctcgacttcgaggactccgtgtgg

SEQ ID NO: 5514840 - DNA, 25 bp, Homo sapien
tgcagcagaaacggctccgtagaaa

SEQ ID NO: 5514841 - DNA, 25 bp, Homo sapien
ggcttaggatcttcggatcggccac

SEQ ID NO: 5514842 - DNA, 25 bp, Homo sapien
ctcgacttcgaggactccgtgtgga

SEQ ID NO: 5514843 - DNA, 25 bp, Homo sapien
aaccctgacatcaagtcagagttcg

SEQ ID NO: 5514844 - DNA, 25 bp, Homo sapien
tgggcctcgacttcgaggactccgt

SEQ ID NO: 5514845 - DNA, 25 bp, Homo sapien
cggggtccgtaccactggtcaccca

SEQ ID NO: 5514846 - DNA, 25 bp, Homo sapien
agaagtcaaccctgacatcaagtca

SEQ ID NO: 5514847 - DNA, 25 bp, Homo sapien
gagccgcctgtgcatccctttggtc

SEQ ID NO: 5514848 - DNA, 25 bp, Homo sapien
tgcagaaacagaagcctccagattg

SEQ ID NO: 5514849 - DNA, 25 bp, Homo sapien
taattgtgttcagagacagactttc

SEQ ID NO: 5514850 - DNA, 25 bp, Homo sapien
gggtcagatgagacgtgtccatttc

SEQ ID NO: 5514851 - DNA, 25 bp, Homo sapien
gcagatgctaacgtggcccactttg

SEQ ID NO: 5514852 - DNA, 25 bp, Homo sapien
agatcaaggacctagctctcgtggc

SEQ ID NO: 5514853 - DNA, 25 bp, Homo sapien
catcggtgacaggctgaattcagag

SEQ ID NO: 5514854 - DNA, 25 bp, Homo sapien
ggaaaaaattgtgcgagtttgagac

SEQ ID NO: 5514855 - DNA, 25 bp, Homo sapien
gctctcgtggcagaatgcagaaaca

SEQ ID NO: 5514856 - DNA, 25 bp, Homo sapien
tttggaactcttagctggccctggg

SEQ ID NO: 5514857 - DNA, 25 bp, Homo sapien
actggcaaagatgtcacgttccact

SEQ ID NO: 5514858 - DNA, 25 bp, Homo sapien
gccagacgagattcacagtgcattg

SEQ ID NO: 5514859 - DNA, 25 bp, Homo sapien
ggcttcattacgagagagaaacata

SEQ ID NO: 5514860 - DNA, 25 bp, Homo sapien
tggagaagcctcgattgtggtcaat

SEQ ID NO: 5514861 - DNA, 25 bp, Homo sapien
gaggcaagaagttttgaaagatggt

SEQ ID NO: 5514862 - DNA, 25 bp, Homo sapien
tgaggacttgcacacctgccgtctc

SEQ ID NO: 5514863 - DNA, 25 bp, Homo sapien
agtgggactgactgtacatacctct

SEQ ID NO: 5514864 - DNA, 25 bp, Homo sapien
gtgattctacaagttccagtgggac

SEQ ID NO: 5514865 - DNA, 25 bp, Homo sapien
gctatcatcggccgcacagtgaaga

SEQ ID NO: 5514866 - DNA, 25 bp, Homo sapien
tttgtccaaggagtctgaagttctc

SEQ ID NO: 5514867 - DNA, 25 bp, Homo sapien
ctgccaatggaacaagatgaagtat

SEQ ID NO: 5514868 - DNA, 25 bp, Homo sapien
tatgtggatccgtatgagttggctt

SEQ ID NO: 5514869 - DNA, 25 bp, Homo sapien
gaaggcctcgatcaacccagaaaca

SEQ ID NO: 5514870 - DNA, 25 bp, Homo sapien
tgtttctgggttgatcgaggccttc

SEQ ID NO: 5514871 - DNA, 25 bp, Homo sapien
tgtgcaattgtgagggacatgctca

SEQ ID NO: 5514872 - DNA, 25 bp, Homo sapien
gctgatggcttgacatgtgcaattg

SEQ ID NO: 5514873 - DNA, 25 bp, Homo sapien
tcacctctagccttaaggggggcag

SEQ ID NO: 5514874 - DNA, 25 bp, Homo sapien
agttacctactgagtaggcggcgat

SEQ ID NO: 5514875 - DNA, 25 bp, Homo sapien
gtgtgatgcgccttgctgatggctt

SEQ ID NO: 5514876 - DNA, 25 bp, Homo sapien
ggctgagctgagcttcggttctcca

SEQ ID NO: 5514877 - DNA, 25 bp, Homo sapien
cggttctccagaatgtaagaaaaca

SEQ ID NO: 5514878 - DNA, 25 bp, Homo sapien
agtaggcggcgatttttgtatgtta

SEQ ID NO: 5514879 - DNA, 25 bp, Homo sapien
gaatgcgctttattgcccatgggat

SEQ ID NO: 5514880 - DNA, 25 bp, Homo sapien
cttggtgccttttgtgtgatgcgcc

SEQ ID NO: 5514881 - DNA, 25 bp, Homo sapien
ttcaggagttggaatgttgtagtta

SEQ ID NO: 5514882 - DNA, 25 bp, Homo sapien
actgcaaacccagccaagtgcagcc

SEQ ID NO: 5514883 - DNA, 25 bp, Homo sapien
tacgtggggtgtataattaagacat

SEQ ID NO: 5514884 - DNA, 25 bp, Homo sapien
ccgtgcaatcccatcaggtggcggt

SEQ ID NO: 5514885 - DNA, 25 bp, Homo sapien
tgggaggcttcaatgccaggtactt

SEQ ID NO: 5514886 - DNA, 25 bp, Homo sapien
aatctgtgtatctgactgcaaaccc

SEQ ID NO: 5514887 - DNA, 25 bp, Homo sapien
ggagggctccaaatctcgggttctg

SEQ ID NO: 5514888 - DNA, 25 bp, Homo sapien
aagaatacccaaaccgtgcaatccc

SEQ ID NO: 5514889 - DNA, 25 bp, Homo sapien
aaagaggttctcccaggtgaaatct

SEQ ID NO: 5514890 - DNA, 25 bp, Homo sapien
aagtgagtcatttaagtcccagcta

SEQ ID NO: 5514891 - DNA, 25 bp, Homo sapien
ccaacagaaattaacgcgtggcggg

SEQ ID NO: 5514892 - DNA, 25 bp, Homo sapien
ccccgcacatcaatggaggaaaagg

SEQ ID NO: 5514893 - DNA, 25 bp, Homo sapien
tgaatgccattaaaacagaagaaat

SEQ ID NO: 5514894 - DNA, 25 bp, Homo sapien
atcccgaactcccaacagcatctgc

SEQ ID NO: 5514895 - DNA, 25 bp, Homo sapien
ctgcaaaggaatggaaatcttctga

SEQ ID NO: 5514896 - DNA, 25 bp, Homo sapien
tgacagcgcagtaacagaataattc

SEQ ID NO: 5514897 - DNA, 25 bp, Homo sapien
ttattgagattcacacaagatgcac

SEQ ID NO: 5514898 - DNA, 25 bp, Homo sapien
agaagaaatgaacataatcccgaac

SEQ ID NO: 5514899 - DNA, 25 bp, Homo sapien
attcaagcggaactgaagatctatc

SEQ ID NO: 5514900 - DNA, 25 bp, Homo sapien
tcatccaagaaacagacaaatcacc

SEQ ID NO: 5514901 - DNA, 25 bp, Homo sapien
cttctgaaaatgacagcgcagtaac

SEQ ID NO: 5514902 - DNA, 25 bp, Homo sapien
ctgaaatcagggttgtgtttggcaa

SEQ ID NO: 5514903 - DNA, 25 bp, Homo sapien
tggtttcacaaaggcatgtccatac

SEQ ID NO: 5514904 - DNA, 25 bp, Homo sapien
gacgccccaggccccagagagggtg

SEQ ID NO: 5514905 - DNA, 25 bp, Homo sapien
caccctctctggggcctggggcgtc

SEQ ID NO: 5514906 - DNA, 25 bp, Homo sapien
ggcggacgccccaggccccagagag

SEQ ID NO: 5514907 - DNA, 25 bp, Homo sapien
ctctctggggcctggggcgtccgcc

SEQ ID NO: 5514908 - DNA, 25 bp, Homo sapien
atacaggcctaactgagaccgctca

SEQ ID NO: 5514909 - DNA, 25 bp, Homo sapien
aagaactgtataaagcaatattgtc

SEQ ID NO: 5514910 - DNA, 25 bp, Homo sapien
gagaccgctcagaatttagaaatgt

SEQ ID NO: 5514911 - DNA, 25 bp, Homo sapien
agccaccaaaaagagactcattctt

SEQ ID NO: 5514912 - DNA, 25 bp, Homo sapien
gacacagctgtgtcaagactgacat

SEQ ID NO: 5514913 - DNA, 25 bp, Homo sapien
ttagacaagatatagctggaacaga

SEQ ID NO: 5514914 - DNA, 25 bp, Homo sapien
atctgcaggcttaagcattgcaaat

SEQ ID NO: 5514915 - DNA, 25 bp, Homo sapien
tatgacaatggttttaggaagattc

SEQ ID NO: 5514916 - DNA, 25 bp, Homo sapien
gtggtcacattacgtatctgcaggc

SEQ ID NO: 5514917 - DNA, 25 bp, Homo sapien
gtcaacacaaaacagtggtcacatt

SEQ ID NO: 5514918 - DNA, 25 bp, Homo sapien
tggcatacagaagagaaattgtgtc

SEQ ID NO: 5514919 - DNA, 25 bp, Homo sapien
tcatgtacatcaggatcaaccatta

SEQ ID NO: 5514920 - DNA, 25 bp, Homo sapien
aaaaatacacacgtcagtgacttcc

SEQ ID NO: 5514921 - DNA, 25 bp, Homo sapien
gcatcccacaataaaaggcaccgaa

SEQ ID NO: 5514922 - DNA, 25 bp, Homo sapien
tgtaaacagcatgtaaacaaacaaa

SEQ ID NO: 5514923 - DNA, 25 bp, Homo sapien
tcactggcaagtgtgctaagcagtt

SEQ ID NO: 5514924 - DNA, 25 bp, Homo sapien
tgcagcaaacagagcccactgtgta

SEQ ID NO: 5514925 - DNA, 25 bp, Homo sapien
tgagaaggatgatctcaaggcagtg

SEQ ID NO: 5514926 - DNA, 25 bp, Homo sapien
aaaagtaattagagccaaagttata

SEQ ID NO: 5514927 - DNA, 25 bp, Homo sapien
gctaagcagttaaaagtttcactct

SEQ ID NO: 5514928 - DNA, 25 bp, Homo sapien
aaaggcaccgaaaactggtcactta

SEQ ID NO: 5514929 - DNA, 25 bp, Homo sapien
tctcaaggcagtgccctttgggaaa

SEQ ID NO: 5514930 - DNA, 25 bp, Homo sapien
gtggtaacatgcgtcctgcacatca

SEQ ID NO: 5514931 - DNA, 25 bp, Homo sapien
atagactgataggtaataaaaggca

SEQ ID NO: 5514932 - DNA, 25 bp, Homo sapien
ctagagtaaaaagcacatgagtgga

SEQ ID NO: 5514933 - DNA, 25 bp, Homo sapien
ttatgtggcttagtaaaggtgtaat

SEQ ID NO: 5514934 - DNA, 25 bp, Homo sapien
aaaaagcacatgagtggaaagtcaa

SEQ ID NO: 5514935 - DNA, 25 bp, Homo sapien
agtcaacaggactcaatggccacat

SEQ ID NO: 5514936 - DNA, 25 bp, Homo sapien
ttaggcatttgtgagtgtggtaaca

SEQ ID NO: 5514937 - DNA, 25 bp, Homo sapien
aaggtgtaatagagtactaaaacta

SEQ ID NO: 5514938 - DNA, 25 bp, Homo sapien
catactcaagtacagcccagattcc

SEQ ID NO: 5514939 - DNA, 25 bp, Homo sapien
caggtggtatatctggcagttacac

SEQ ID NO: 5514940 - DNA, 25 bp, Homo sapien
gcacatcaggacacagtgatctgtt

SEQ ID NO: 5514941 - DNA, 25 bp, Homo sapien
agagctgaaggaaaatcatcaggtc

SEQ ID NO: 5514942 - DNA, 25 bp, Homo sapien
tcagaaaacacaaagtgatctagtg

SEQ ID NO: 5514943 - DNA, 25 bp, Homo sapien
ctttgttcctcagggaagagggaag

SEQ ID NO: 5514944 - DNA, 25 bp, Homo sapien
actacaatatagaagatcagccatt

SEQ ID NO: 5514945 - DNA, 25 bp, Homo sapien
taactgtcaacagaagagctgtatt

SEQ ID NO: 5514946 - DNA, 25 bp, Homo sapien
tcacttggattgtggaaaaagcacc

SEQ ID NO: 5514947 - DNA, 25 bp, Homo sapien
ggttagatagtgtaataagtgcttc

SEQ ID NO: 5514948 - DNA, 25 bp, Homo sapien
ggaaaaagcaccttcagagagctga

SEQ ID NO: 5514949 - DNA, 25 bp, Homo sapien
catcaggtcaagcaagcccttggtc

SEQ ID NO: 5514950 - DNA, 25 bp, Homo sapien
caaagtcagagtaagtaaacagaag

SEQ ID NO: 5514951 - DNA, 25 bp, Homo sapien
tcagaaataacgacagatacaactc

SEQ ID NO: 5514952 - DNA, 25 bp, Homo sapien
ggtccgagcacgagcccggtacctg

SEQ ID NO: 5514953 - DNA, 25 bp, Homo sapien
caggtaccgggctcgtgctcggacc

SEQ ID NO: 5514954 - DNA, 25 bp, Homo sapien
gatgtctcaacagcacagggttcca

SEQ ID NO: 5514955 - DNA, 25 bp, Homo sapien
ggactggcgagttttcaagagaaac

SEQ ID NO: 5514956 - DNA, 25 bp, Homo sapien
tctcggcctaagataagtggagaag

SEQ ID NO: 5514957 - DNA, 25 bp, Homo sapien
ggatccatgtacgttcttgaagagc

SEQ ID NO: 5514958 - DNA, 25 bp, Homo sapien
tttcctatcagtgagtgcagcaggc

SEQ ID NO: 5514959 - DNA, 25 bp, Homo sapien
ttcgtgagaaaatcaggatccatgt

SEQ ID NO: 5514960 - DNA, 25 bp, Homo sapien
cttgaagagctgtctctcggcctaa

SEQ ID NO: 5514961 - DNA, 25 bp, Homo sapien
aactccaaatccagacaggtgtgtg

SEQ ID NO: 5514962 - DNA, 25 bp, Homo sapien
cagactgtctggacagcccaacagg

SEQ ID NO: 5514963 - DNA, 25 bp, Homo sapien
agggttccatcgggacttcgtgaga

SEQ ID NO: 5514964 - DNA, 25 bp, Homo sapien
aaatactgaatggagccagctagac

SEQ ID NO: 5514965 - DNA, 25 bp, Homo sapien
aaaaaaggtattagatcatagagtt

SEQ ID NO: 5514966 - DNA, 25 bp, Homo sapien
ttaggaatctgaattgatgacaccc

SEQ ID NO: 5514967 - DNA, 25 bp, Homo sapien
gagaaaacataaagtaaccagcaga

SEQ ID NO: 5514968 - DNA, 25 bp, Homo sapien
tctcacaagaggcaaacttcagcca

SEQ ID NO: 5514969 - DNA, 25 bp, Homo sapien
agagaaagggttatttaggaatctg

SEQ ID NO: 5514970 - DNA, 25 bp, Homo sapien
agatcaaacaatctggcccagggct

SEQ ID NO: 5514971 - DNA, 25 bp, Homo sapien
taggggatacctattaatctgggct

SEQ ID NO: 5514972 - DNA, 25 bp, Homo sapien
attgatgacaccctgtggtcagctc

SEQ ID NO: 5514973 - DNA, 25 bp, Homo sapien
cttagagccaccaaagatggatatc

SEQ ID NO: 5514974 - DNA, 25 bp, Homo sapien
agatcatagagttgggattagggta

SEQ ID NO: 5514975 - DNA, 25 bp, Homo sapien
tagtcaactgaacttgagaaaacat

SEQ ID NO: 5514976 - DNA, 25 bp, Homo sapien
ccggttcccaagataggtgcggttg

SEQ ID NO: 5514977 - DNA, 25 bp, Homo sapien
atggctcttcttgcttctggctcac

SEQ ID NO: 5514978 - DNA, 25 bp, Homo sapien
acaactcagttgatccaatctccac

SEQ ID NO: 5514979 - DNA, 25 bp, Homo sapien
taggtgcggttgaggttctcgcaca

SEQ ID NO: 5514980 - DNA, 25 bp, Homo sapien
ttcaaggttaaaatagaccatcagc

SEQ ID NO: 5514981 - DNA, 25 bp, Homo sapien
aatgcttagcaaatgaatgagactc

SEQ ID NO: 5514982 - DNA, 25 bp, Homo sapien
acatagcaccccagtttcacatcat

SEQ ID NO: 5514983 - DNA, 25 bp, Homo sapien
gaatgagactctggctgagtaaaat

SEQ ID NO: 5514984 - DNA, 25 bp, Homo sapien
tgaggttctcgcacaaggtgactta

SEQ ID NO: 5514985 - DNA, 25 bp, Homo sapien
tttgtgctgaagacaaaaaggatag

SEQ ID NO: 5514986 - DNA, 25 bp, Homo sapien
atagctatgaagactaaaatggctc

SEQ ID NO: 5514987 - DNA, 25 bp, Homo sapien
aattaaaggcacatttggcagctac

SEQ ID NO: 5514988 - DNA, 25 bp, Homo sapien
ttgagtggtagtccaatgtgaccca

SEQ ID NO: 5514989 - DNA, 25 bp, Homo sapien
aataaccgtgctactaaacaaaggc

SEQ ID NO: 5514990 - DNA, 25 bp, Homo sapien
caggtgcgctctccctaagccacac

SEQ ID NO: 5514991 - DNA, 25 bp, Homo sapien
cttacatcaaagaccgaccgacaga

SEQ ID NO: 5514992 - DNA, 25 bp, Homo sapien
ttgcaccccagagttccctgcccaa

SEQ ID NO: 5514993 - DNA, 25 bp, Homo sapien
tgaacatggttaggtacaaaggcca

SEQ ID NO: 5514994 - DNA, 25 bp, Homo sapien
tggcagctactgaaagtggcatgca

SEQ ID NO: 5514995 - DNA, 25 bp, Homo sapien
atgccagaaaaataacagccgttat

SEQ ID NO: 5514996 - DNA, 25 bp, Homo sapien
ccaaatactgctgcacacagagtac

SEQ ID NO: 5514997 - DNA, 25 bp, Homo sapien
aaatcccgaccccaaatgctgactt

SEQ ID NO: 5514998 - DNA, 25 bp, Homo sapien
aagacattaagttagtcacagattt

SEQ ID NO: 5514999 - DNA, 25 bp, Homo sapien
caaaaatatttggtggtacaattct

SEQ ID NO: 5515000 - DNA, 25 bp, Homo sapien
atctgaagatcaaccacacatagca

SEQ ID NO: 5515001 - DNA, 25 bp, Homo sapien
atgacagtataagtgtcgttgtcgt

SEQ ID NO: 5515002 - DNA, 25 bp, Homo sapien
aatatggaaaacagcagacctcaca

SEQ ID NO: 5515003 - DNA, 25 bp, Homo sapien
taacatagactgatacaaaaataac

SEQ ID NO: 5515004 - DNA, 25 bp, Homo sapien
tgtgctatttcaaggatacactagt

SEQ ID NO: 5515005 - DNA, 25 bp, Homo sapien
aaaatgtatgcaaaagtcctcctcc

SEQ ID NO: 5515006 - DNA, 25 bp, Homo sapien
tcaccattaatcaggggagaaaaca

SEQ ID NO: 5515007 - DNA, 25 bp, Homo sapien
ttctttcttaaaggcagtagcataa

SEQ ID NO: 5515008 - DNA, 25 bp, Homo sapien
gatacaaaaataactgtgatcagtc

SEQ ID NO: 5515009 - DNA, 25 bp, Homo sapien
tggagcactatggtcccagctttcc

SEQ ID NO: 5515010 - DNA, 25 bp, Homo sapien
tgagagaaaacacaccatcccaacc

SEQ ID NO: 5515011 - DNA, 25 bp, Homo sapien
caagacgagggatgttcccaaattc

SEQ ID NO: 5515012 - DNA, 25 bp, Homo sapien
agaggacacagcccctcagtcagtc

SEQ ID NO: 5515013 - DNA, 25 bp, Homo sapien
tggaacctgtgctgtgcagaagaga

SEQ ID NO: 5515014 - DNA, 25 bp, Homo sapien
aagatggacaagaggaccctcataa

SEQ ID NO: 5515015 - DNA, 25 bp, Homo sapien
ggtcaaactagggtaatgaatgctc

SEQ ID NO: 5515016 - DNA, 25 bp, Homo sapien
gcccccactgtgaggcttgaagatg

SEQ ID NO: 5515017 - DNA, 25 bp, Homo sapien
caacccaagcaactaggacccaaat

SEQ ID NO: 5515018 - DNA, 25 bp, Homo sapien
aggacccaaattgtctgaaggctcc

SEQ ID NO: 5515019 - DNA, 25 bp, Homo sapien
ccagggcccagaagcaattcctgta

SEQ ID NO: 5515020 - DNA, 25 bp, Homo sapien
cccggcgtgtgctcacgtgtgtatg

SEQ ID NO: 5515021 - DNA, 25 bp, Homo sapien
gggtgcgagctcatccccctctctc

SEQ ID NO: 5515022 - DNA, 25 bp, Homo sapien
ttcttattgactgggagactgtgct

SEQ ID NO: 5515023 - DNA, 25 bp, Homo sapien
tgtcagaagtctagcctcaggtttc

SEQ ID NO: 5515024 - DNA, 25 bp, Homo sapien
ccatgcggagttgatgctttgggaa

SEQ ID NO: 5515025 - DNA, 25 bp, Homo sapien
atattttggataagggtctgtggtc

SEQ ID NO: 5515026 - DNA, 25 bp, Homo sapien
aagaccaaaccaagctaggacatta

SEQ ID NO: 5515027 - DNA, 25 bp, Homo sapien
gtgtgcaaagtatccatgcggagtt

SEQ ID NO: 5515028 - DNA, 25 bp, Homo sapien
tacaggttgagcttcaagatggttt

SEQ ID NO: 5515029 - DNA, 25 bp, Homo sapien
gccaagggaggagcatttcatttgg

SEQ ID NO: 5515030 - DNA, 25 bp, Homo sapien
gggaattggctcatgaaggttcttc

SEQ ID NO: 5515031 - DNA, 25 bp, Homo sapien
cctacagtaagcttctcacccagtg

SEQ ID NO: 5515032 - DNA, 25 bp, Homo sapien
caaactttaaacaagaggatggttc

SEQ ID NO: 5515033 - DNA, 25 bp, Homo sapien
caagaggatggttcagaatattcac

SEQ ID NO: 5515034 - DNA, 25 bp, Homo sapien
cagtaataggacacagtgtgcagca

SEQ ID NO: 5515035 - DNA, 25 bp, Homo sapien
aaaccaggagatttacagtaatagg

SEQ ID NO: 5515036 - DNA, 25 bp, Homo sapien
ttgtgaaggtaattatgttctcctc

SEQ ID NO: 5515037 - DNA, 25 bp, Homo sapien
tacaactgtaggacaatcctgatca

SEQ ID NO: 5515038 - DNA, 25 bp, Homo sapien
tttgggtgactgccctacagtaagc

SEQ ID NO: 5515039 - DNA, 25 bp, Homo sapien
acactgctgccatggtaatagatac

SEQ ID NO: 5515040 - DNA, 25 bp, Homo sapien
ccataagaattataaaccaggagat

SEQ ID NO: 5515041 - DNA, 25 bp, Homo sapien
acacaactgcagcatcttaacacta

SEQ ID NO: 5515042 - DNA, 25 bp, Homo sapien
agaaggtgtctgattacacagcgtg

SEQ ID NO: 5515043 - DNA, 25 bp, Homo sapien
agtagaaacctacgcatgaagaata

SEQ ID NO: 5515044 - DNA, 25 bp, Homo sapien
agaagctctgtgtccaacaaggtcc

SEQ ID NO: 5515045 - DNA, 25 bp, Homo sapien
aatagaatgcagacagaatatagtt

SEQ ID NO: 5515046 - DNA, 25 bp, Homo sapien
tcaaagatggctcagagaatggtaa

SEQ ID NO: 5515047 - DNA, 25 bp, Homo sapien
agtgggtgagtgatatgttccaaca

SEQ ID NO: 5515048 - DNA, 25 bp, Homo sapien
cagctgtacttgtcgagaaggtgtc

SEQ ID NO: 5515049 - DNA, 25 bp, Homo sapien
cctttgctataacagaggagtgggt

SEQ ID NO: 5515050 - DNA, 25 bp, Homo sapien
gcgtgtaccatcccagctggccctt

SEQ ID NO: 5515051 - DNA, 25 bp, Homo sapien
aaaggcatcttgagaagaaactaac

SEQ ID NO: 5515052 - DNA, 25 bp, Homo sapien
gaccagaggcacagtttcaggtaaa

SEQ ID NO: 5515053 - DNA, 25 bp, Homo sapien
tgcaaattcagggtgtctgagccac

SEQ ID NO: 5515054 - DNA, 25 bp, Homo sapien
tatgatatgaaggcctaaattagga

SEQ ID NO: 5515055 - DNA, 25 bp, Homo sapien
aaataagaaggattcatccccatac

SEQ ID NO: 5515056 - DNA, 25 bp, Homo sapien
ggcgcacacagtggtgttctcgcta

SEQ ID NO: 5515057 - DNA, 25 bp, Homo sapien
gtgagctgtgcaaattcagggtgtc

SEQ ID NO: 5515058 - DNA, 25 bp, Homo sapien
aaaagtctatgatggacaatgtatc

SEQ ID NO: 5515059 - DNA, 25 bp, Homo sapien
ctaaattaggaaagctaggtgagct

SEQ ID NO: 5515060 - DNA, 25 bp, Homo sapien
ggtgaggtgagcaaagcactcacct

SEQ ID NO: 5515061 - DNA, 25 bp, Homo sapien
acctgttgtttggtgtgtgatgggg

SEQ ID NO: 5515062 - DNA, 25 bp, Homo sapien
ttcattcctattggtccaggccacc

SEQ ID NO: 5515063 - DNA, 25 bp, Homo sapien
tcaaatcacagaaacagggacgtaa

SEQ ID NO: 5515064 - DNA, 25 bp, Homo sapien
aacattgagatggaatgatagggtt

SEQ ID NO: 5515065 - DNA, 25 bp, Homo sapien
aatgatagggtttcccagaatcagg

SEQ ID NO: 5515066 - DNA, 25 bp, Homo sapien
tccactttgggtgctagcagtacac

SEQ ID NO: 5515067 - DNA, 25 bp, Homo sapien
taaataagcaagtaactggatccac

SEQ ID NO: 5515068 - DNA, 25 bp, Homo sapien
tagggacttgtatgcatggactact

SEQ ID NO: 5515069 - DNA, 25 bp, Homo sapien
tctaccatgttagggacttgtatgc

SEQ ID NO: 5515070 - DNA, 25 bp, Homo sapien
cgggaggcaacatcatctaccatgt

SEQ ID NO: 5515071 - DNA, 25 bp, Homo sapien
gggtgctagcagtacacagtgttac

SEQ ID NO: 5515072 - DNA, 25 bp, Homo sapien
ttgtattctttctgagcagggccgg

SEQ ID NO: 5515073 - DNA, 25 bp, Homo sapien
ttcaaccacgcattaactcaagatc

SEQ ID NO: 5515074 - DNA, 25 bp, Homo sapien
ataggcaactgcccttctggttttc

SEQ ID NO: 5515075 - DNA, 25 bp, Homo sapien
tgaggtagtgagctccctgtcaaga

SEQ ID NO: 5515076 - DNA, 25 bp, Homo sapien
tggttgtgattatctgaagggctgc

SEQ ID NO: 5515077 - DNA, 25 bp, Homo sapien
attgcatgcaagatgacaggtaatc

SEQ ID NO: 5515078 - DNA, 25 bp, Homo sapien
catgtgtggaaattgaaaccctgtc

SEQ ID NO: 5515079 - DNA, 25 bp, Homo sapien
gtttgcagagatcatgtgtggaaat

SEQ ID NO: 5515080 - DNA, 25 bp, Homo sapien
aagggctgctatgtagatgaagtat

SEQ ID NO: 5515081 - DNA, 25 bp, Homo sapien
agtaggggaaggtcctgcccctatg

SEQ ID NO: 5515082 - DNA, 25 bp, Homo sapien
agatcccacaatgaaatgacctgcc

SEQ ID NO: 5515083 - DNA, 25 bp, Homo sapien
ttttcaagcaatgggtagaagacca

SEQ ID NO: 5515084 - DNA, 25 bp, Homo sapien
gtagtggcactgtggtgttacctta

SEQ ID NO: 5515085 - DNA, 25 bp, Homo sapien
gtgttgcaaaaagtgggctaaacca

SEQ ID NO: 5515086 - DNA, 25 bp, Homo sapien
aagctgagtgttttaagggtgtgat

SEQ ID NO: 5515087 - DNA, 25 bp, Homo sapien
aaaaggcatagtatatttggtattg

SEQ ID NO: 5515088 - DNA, 25 bp, Homo sapien
agggtacagcttttctagagggcaa

SEQ ID NO: 5515089 - DNA, 25 bp, Homo sapien
tgttttaagggtgtgatgaaatgga

SEQ ID NO: 5515090 - DNA, 25 bp, Homo sapien
ataaacatacgaaaagataatcacc

SEQ ID NO: 5515091 - DNA, 25 bp, Homo sapien
ccactggaaaagggtacagcttttc

SEQ ID NO: 5515092 - DNA, 25 bp, Homo sapien
agtagacaaaggtcatgagcagttc

SEQ ID NO: 5515093 - DNA, 25 bp, Homo sapien
ataaatgagaaagaagtaaacccaa

SEQ ID NO: 5515094 - DNA, 25 bp, Homo sapien
acatgtacaaggatgctactgcaac

SEQ ID NO: 5515095 - DNA, 25 bp, Homo sapien
tggacaccattacacaggactgcct

SEQ ID NO: 5515096 - DNA, 25 bp, Homo sapien
tctagagggcaataggtgatttcta

SEQ ID NO: 5515097 - DNA, 25 bp, Homo sapien
aaaagcaagcagatactgcaggatg

SEQ ID NO: 5515098 - DNA, 25 bp, Homo sapien
acaggaacaatttcaacatctcact

SEQ ID NO: 5515099 - DNA, 25 bp, Homo sapien
aggaaagtagttaccaagcacagga

SEQ ID NO: 5515100 - DNA, 25 bp, Homo sapien
aaacaaattgtgaataaaggcatat

SEQ ID NO: 5515101 - DNA, 25 bp, Homo sapien
cttaacttctaatagactgggggaa

SEQ ID NO: 5515102 - DNA, 25 bp, Homo sapien
caccatatgtggcagtaagaaactt

SEQ ID NO: 5515103 - DNA, 25 bp, Homo sapien
taaaaggcacgcataagctgatttc

SEQ ID NO: 5515104 - DNA, 25 bp, Homo sapien
tattttaagtccaggctactctctt

SEQ ID NO: 5515105 - DNA, 25 bp, Homo sapien
aaaattaaaaggcacgcataagctg

SEQ ID NO: 5515106 - DNA, 25 bp, Homo sapien
attaaagactggatggtgtatatta

SEQ ID NO: 5515107 - DNA, 25 bp, Homo sapien
actggagtctccaaaagcaagcaga

SEQ ID NO: 5515108 - DNA, 25 bp, Homo sapien
cctaaagttcatgaagggaagaaaa

SEQ ID NO: 5515109 - DNA, 25 bp, Homo sapien
cataagttatgtgtacctaaagttc

SEQ ID NO: 5515110 - DNA, 25 bp, Homo sapien
tcacagattgaatacaagaggtctc

SEQ ID NO: 5515111 - DNA, 25 bp, Homo sapien
tggagaatgttaaataagtgaaaat

SEQ ID NO: 5515112 - DNA, 25 bp, Homo sapien
gacaaatattgaggctatacgggtg

SEQ ID NO: 5515113 - DNA, 25 bp, Homo sapien
tacaaactaggtataaaagaccata

SEQ ID NO: 5515114 - DNA, 25 bp, Homo sapien
gcagtgtagcgagcacaacctttct

SEQ ID NO: 5515115 - DNA, 25 bp, Homo sapien
tatgggtcagaatttaagtgtcttc

SEQ ID NO: 5515116 - DNA, 25 bp, Homo sapien
gctatacgggtgtacggattaatac

SEQ ID NO: 5515117 - DNA, 25 bp, Homo sapien
ggaacgtgtgaaccgaacaatgttc

SEQ ID NO: 5515118 - DNA, 25 bp, Homo sapien
atgcttgatgttgtttggagaatgt

SEQ ID NO: 5515119 - DNA, 25 bp, Homo sapien
cggtggtgggcctcctccctcgcgc

SEQ ID NO: 5515120 - DNA, 25 bp, Homo sapien
gcgcgagggaggaggcccaccaccg

SEQ ID NO: 5515121 - DNA, 25 bp, Homo sapien
cgacgcggtggtgggcctcctccct

SEQ ID NO: 5515122 - DNA, 25 bp, Homo sapien
agggaggaggcccaccaccgcgtcg

SEQ ID NO: 5515123 - DNA, 25 bp, Homo sapien
tttcaagtgttcagagacgaattcc

SEQ ID NO: 5515124 - DNA, 25 bp, Homo sapien
gccagaacaaatttgataagctcac

SEQ ID NO: 5515125 - DNA, 25 bp, Homo sapien
atgcttgccaatactgacatggtta

SEQ ID NO: 5515126 - DNA, 25 bp, Homo sapien
gggggaagataaatgcttgccaata

SEQ ID NO: 5515127 - DNA, 25 bp, Homo sapien
tgacatggttaattaacagacaggc

SEQ ID NO: 5515128 - DNA, 25 bp, Homo sapien
tccagcaagacttctggtttgagtc

SEQ ID NO: 5515129 - DNA, 25 bp, Homo sapien
aagaaattgggttataagcaaagga

SEQ ID NO: 5515130 - DNA, 25 bp, Homo sapien
agagggaagattatgtcactaagca

SEQ ID NO: 5515131 - DNA, 25 bp, Homo sapien
tcagagacgaattccagcaagactt

SEQ ID NO: 5515132 - DNA, 25 bp, Homo sapien
tataagcaaaggaacataagtgtaa

SEQ ID NO: 5515133 - DNA, 25 bp, Homo sapien
aattaacagacaggcttgaaaggag

SEQ ID NO: 5515134 - DNA, 25 bp, Homo sapien
ggacaaggatgaaccatgatagata

SEQ ID NO: 5515135 - DNA, 25 bp, Homo sapien
ttgagagaaggtcttcacagcagac

SEQ ID NO: 5515136 - DNA, 25 bp, Homo sapien
ctccaacagccctaaggtccgagag

SEQ ID NO: 5515137 - DNA, 25 bp, Homo sapien
gtgtatgatcgaagcaaagaaagtt

SEQ ID NO: 5515138 - DNA, 25 bp, Homo sapien
taagtgccacaacccctgatagctg

SEQ ID NO: 5515139 - DNA, 25 bp, Homo sapien
gggaggagagtcctcactaagtgcc

SEQ ID NO: 5515140 - DNA, 25 bp, Homo sapien
gtcaggtgtgtatgtgtcatcagca

SEQ ID NO: 5515141 - DNA, 25 bp, Homo sapien
tctgactctgcatttggacaaggat

SEQ ID NO: 5515142 - DNA, 25 bp, Homo sapien
atggagaacacgagccttcaccatc

SEQ ID NO: 5515143 - DNA, 25 bp, Homo sapien
gtcacaaaacacggctgcaatgaac

SEQ ID NO: 5515144 - DNA, 25 bp, Homo sapien
atgatctggcatggactcccaaatg

SEQ ID NO: 5515145 - DNA, 25 bp, Homo sapien
ggcgtgcctcgtctgtgtcttcttg

SEQ ID NO: 5515146 - DNA, 25 bp, Homo sapien
cagctgcttgtgagcctccccctgt

SEQ ID NO: 5515147 - DNA, 25 bp, Homo sapien
catgtacttcgcctggctgggcttc

SEQ ID NO: 5515148 - DNA, 25 bp, Homo sapien
gctgggcttctacacgtcggctatg

SEQ ID NO: 5515149 - DNA, 25 bp, Homo sapien
aggtcatgctggccctgcttgtcag

SEQ ID NO: 5515150 - DNA, 25 bp, Homo sapien
tcaatgacatggaaaattaccggct

SEQ ID NO: 5515151 - DNA, 25 bp, Homo sapien
cattcacagaggctgatcagacaag

SEQ ID NO: 5515152 - DNA, 25 bp, Homo sapien
cgcccccagttcaggggcgtgcgac

SEQ ID NO: 5515153 - DNA, 25 bp, Homo sapien
caacgtgatctggtcgacgctgttc

SEQ ID NO: 5515154 - DNA, 25 bp, Homo sapien
tatcagccccatcacgcgggccgag

SEQ ID NO: 5515155 - DNA, 25 bp, Homo sapien
ccgaggagttctactacccgccctg

SEQ ID NO: 5515156 - DNA, 25 bp, Homo sapien
ataatgaagggtaaaataaagagta

SEQ ID NO: 5515157 - DNA, 25 bp, Homo sapien
ctgatggttgatcgataccaggttc

SEQ ID NO: 5515158 - DNA, 25 bp, Homo sapien
tgatggtcgtttagataaggaactt

SEQ ID NO: 5515159 - DNA, 25 bp, Homo sapien
gggcaatgggtgatgttgttatttt

SEQ ID NO: 5515160 - DNA, 25 bp, Homo sapien
taaataagagtgctttggaccccac

SEQ ID NO: 5515161 - DNA, 25 bp, Homo sapien
ctacagacgtgcttgcttggtacac

SEQ ID NO: 5515162 - DNA, 25 bp, Homo sapien
acaagcgaatcctttggacacgggg

SEQ ID NO: 5515163 - DNA, 25 bp, Homo sapien
gaccccacaccaaagcatgaatgtc

SEQ ID NO: 5515164 - DNA, 25 bp, Homo sapien
ccatgggtgtaaaaagtttggaatc

SEQ ID NO: 5515165 - DNA, 25 bp, Homo sapien
aaagcgaagagaactgaagtttgat

SEQ ID NO: 5515166 - DNA, 25 bp, Homo sapien
tgtgaaaaaggattacatgtgggtc

SEQ ID NO: 5515167 - DNA, 25 bp, Homo sapien
ccaagtcaaagttagagtcaaagat

SEQ ID NO: 5515168 - DNA, 25 bp, Homo sapien
tagaatcctagaaattgcaaatgca

SEQ ID NO: 5515169 - DNA, 25 bp, Homo sapien
aaacagtattggcacagtaattctc

SEQ ID NO: 5515170 - DNA, 25 bp, Homo sapien
gagtcaaagatacttcaaagattcc

SEQ ID NO: 5515171 - DNA, 25 bp, Homo sapien
caaaagaaagaactctgcatattta

SEQ ID NO: 5515172 - DNA, 25 bp, Homo sapien
tgtgtactgtattggggcacatcca

SEQ ID NO: 5515173 - DNA, 25 bp, Homo sapien
tacatgtaattctaaaggatatctc

SEQ ID NO: 5515174 - DNA, 25 bp, Homo sapien
tccatgaaatgatctgaaaacaaat

SEQ ID NO: 5515175 - DNA, 25 bp, Homo sapien
cttcatgatattgggtcaagagggg

SEQ ID NO: 5515176 - DNA, 25 bp, Homo sapien
aaggaaggtccaccaccaagtcaaa

SEQ ID NO: 5515177 - DNA, 25 bp, Homo sapien
ggaaacattgttgatggtacagttc

SEQ ID NO: 5515178 - DNA, 25 bp, Homo sapien
ctaatttactgactgcaacactgaa

SEQ ID NO: 5515179 - DNA, 25 bp, Homo sapien
ttcagtgttgcagtcagtaaattag

SEQ ID NO: 5515180 - DNA, 25 bp, Homo sapien
gacaactgacaacgcaaccaaccaa

SEQ ID NO: 5515181 - DNA, 25 bp, Homo sapien
tgtgtttctgataaacggggctggg

SEQ ID NO: 5515182 - DNA, 25 bp, Homo sapien
catccactgaagggtttggagtttt

SEQ ID NO: 5515183 - DNA, 25 bp, Homo sapien
gctgggtggcagttccaatttcctt

SEQ ID NO: 5515184 - DNA, 25 bp, Homo sapien
agaccccctcaacccacaggacaag

SEQ ID NO: 5515185 - DNA, 25 bp, Homo sapien
aagcaccagctgaaaagttataggc

SEQ ID NO: 5515186 - DNA, 25 bp, Homo sapien
aaccaaccaattgagccaccatgct

SEQ ID NO: 5515187 - DNA, 25 bp, Homo sapien
agttataggctgctaaaaccgttac

SEQ ID NO: 5515188 - DNA, 25 bp, Homo sapien
caaggaaacatggcagcctcacttc

SEQ ID NO: 5515189 - DNA, 25 bp, Homo sapien
ttccctaagtaaaagcaccagctga

SEQ ID NO: 5515190 - DNA, 25 bp, Homo sapien
tccacaaacaggaagctatgttcta

SEQ ID NO: 5515191 - DNA, 25 bp, Homo sapien
ctccttctcaaagaggacagcgcgg

SEQ ID NO: 5515192 - DNA, 25 bp, Homo sapien
ggaggccaacttcagccctggcttc

SEQ ID NO: 5515193 - DNA, 25 bp, Homo sapien
ttttgtaaaacggcagaaatgcaat

SEQ ID NO: 5515194 - DNA, 25 bp, Homo sapien
tgtgcacaggccccagtcctgagta

SEQ ID NO: 5515195 - DNA, 25 bp, Homo sapien
gccccttctggcacacccgcctcct

SEQ ID NO: 5515196 - DNA, 25 bp, Homo sapien
gacaaaggaaggaatctctaagtgc

SEQ ID NO: 5515197 - DNA, 25 bp, Homo sapien
aggccccagtcctgagtaagactcc

SEQ ID NO: 5515198 - DNA, 25 bp, Homo sapien
ttgacccatgagggcctcctcccaa

SEQ ID NO: 5515199 - DNA, 25 bp, Homo sapien
atatttcaacagtgcccgaggtcag

SEQ ID NO: 5515200 - DNA, 25 bp, Homo sapien
acggcccagatttggaggccaactt

SEQ ID NO: 5515201 - DNA, 25 bp, Homo sapien
cctcctggaacatcgtctggggagc

SEQ ID NO: 5515202 - DNA, 25 bp, Homo sapien
tatgtcataccgtgacagcccgcag

SEQ ID NO: 5515203 - DNA, 25 bp, Homo sapien
ggaggggaatatacacattgctttt

SEQ ID NO: 5515204 - DNA, 25 bp, Homo sapien
cgcaggatcaggtgacttctagcag

SEQ ID NO: 5515205 - DNA, 25 bp, Homo sapien
cattccttaggaggactttggtaat

SEQ ID NO: 5515206 - DNA, 25 bp, Homo sapien
ttcagggagctcgcattctcttgtg

SEQ ID NO: 5515207 - DNA, 25 bp, Homo sapien
tttgccaaattgactgtcacgcggc

SEQ ID NO: 5515208 - DNA, 25 bp, Homo sapien
gacttctagcagagaccctggtttt

SEQ ID NO: 5515209 - DNA, 25 bp, Homo sapien
cccatcccctgatgcccaggtcacc

SEQ ID NO: 5515210 - DNA, 25 bp, Homo sapien
tgttcgtgttgccctcgtgcccatc

SEQ ID NO: 5515211 - DNA, 25 bp, Homo sapien
cgtgcccatcaagtgcagtcgggac

SEQ ID NO: 5515212 - DNA, 25 bp, Homo sapien
gatgggaaatctgcctatgtcatac

SEQ ID NO: 5515213 - DNA, 25 bp, Homo sapien
aagcatcggtcaatagcaagaaatc

SEQ ID NO: 5515214 - DNA, 25 bp, Homo sapien
tcttttggcacagtgaagcatcggt

SEQ ID NO: 5515215 - DNA, 25 bp, Homo sapien
acagtagaaataagacgaagcctgg

SEQ ID NO: 5515216 - DNA, 25 bp, Homo sapien
tgctttcaaggcagtggtcctggca

SEQ ID NO: 5515217 - DNA, 25 bp, Homo sapien
agtgtggaaaggttccctgatgtac

SEQ ID NO: 5515218 - DNA, 25 bp, Homo sapien
taaagctgtagcccgttgcctgcaa

SEQ ID NO: 5515219 - DNA, 25 bp, Homo sapien
tgccacatacgtacacggatggggg

SEQ ID NO: 5515220 - DNA, 25 bp, Homo sapien
attgcttggcccaaggagaccacag

SEQ ID NO: 5515221 - DNA, 25 bp, Homo sapien
atggaagttgcgacaaaaacagtag

SEQ ID NO: 5515222 - DNA, 25 bp, Homo sapien
ggagaccacagttagagaaccacta

SEQ ID NO: 5515223 - DNA, 25 bp, Homo sapien
ggaagggacataaatcaatggaagt

SEQ ID NO: 5515224 - DNA, 25 bp, Homo sapien
ctcatacagctgacttcttagagcc

SEQ ID NO: 5515225 - DNA, 25 bp, Homo sapien
gaatagggctggtcagcaatagatc

SEQ ID NO: 5515226 - DNA, 25 bp, Homo sapien
ggtcagcaatagatctctgagtgct

SEQ ID NO: 5515227 - DNA, 25 bp, Homo sapien
gccaactcatgaggaatagggctgg

SEQ ID NO: 5515228 - DNA, 25 bp, Homo sapien
gaggtagacacgactgtaacgattt

SEQ ID NO: 5515229 - DNA, 25 bp, Homo sapien
atgatatggtcacgcctgctcatac

SEQ ID NO: 5515230 - DNA, 25 bp, Homo sapien
cttcttagagccaaaagagaatttt

SEQ ID NO: 5515231 - DNA, 25 bp, Homo sapien
gtccccagtctgttccttgtcttcc

SEQ ID NO: 5515232 - DNA, 25 bp, Homo sapien
acaatggctttccccccgccaactc

SEQ ID NO: 5515233 - DNA, 25 bp, Homo sapien
ccaaaacagcagcctaaatacagat

SEQ ID NO: 5515234 - DNA, 25 bp, Homo sapien
aattagaatctcaccaaaacagcag

SEQ ID NO: 5515235 - DNA, 25 bp, Homo sapien
tgtacacaccgtgctggaagacaga

SEQ ID NO: 5515236 - DNA, 25 bp, Homo sapien
actgaacaggtcaaaatgcaaactc

SEQ ID NO: 5515237 - DNA, 25 bp, Homo sapien
tatcaaacaagtgtaacaggcctac

SEQ ID NO: 5515238 - DNA, 25 bp, Homo sapien
agacagacactgaacaggtcaaaat

SEQ ID NO: 5515239 - DNA, 25 bp, Homo sapien
agaaatcagatacttgccacgttat

SEQ ID NO: 5515240 - DNA, 25 bp, Homo sapien
ctgagactgtcatgaaaaaggtatc

SEQ ID NO: 5515241 - DNA, 25 bp, Homo sapien
aatatataacaacaccaccccacac

SEQ ID NO: 5515242 - DNA, 25 bp, Homo sapien
aatgatactttggctgtcagcgaat

SEQ ID NO: 5515243 - DNA, 25 bp, Homo sapien
cacgttattgcaaagtcaaagctgc

SEQ ID NO: 5515244 - DNA, 25 bp, Homo sapien
aaaattagtgaccatgaggctttcc

SEQ ID NO: 5515245 - DNA, 25 bp, Homo sapien
tttgaagaagtgtacacaccgtgct

SEQ ID NO: 5515246 - DNA, 25 bp, Homo sapien
tccctcctcgccggcctcagtttac

SEQ ID NO: 5515247 - DNA, 25 bp, Homo sapien
acggtcagggtcttcttgcgacccg

SEQ ID NO: 5515248 - DNA, 25 bp, Homo sapien
tcgccggcctcagtttaccacgtct

SEQ ID NO: 5515249 - DNA, 25 bp, Homo sapien
gcccaggtcacctccgggcttccgc

SEQ ID NO: 5515250 - DNA, 25 bp, Homo sapien
ccgggcttccgcagccccctccaag

SEQ ID NO: 5515251 - DNA, 25 bp, Homo sapien
gcgcggttaccgctacttggaggag

SEQ ID NO: 5515252 - DNA, 25 bp, Homo sapien
agggtcttcttgcgacccggcccgc

SEQ ID NO: 5515253 - DNA, 25 bp, Homo sapien
acaggggttcgaaaatacagctgaa

SEQ ID NO: 5515254 - DNA, 25 bp, Homo sapien
ccgagtcccgcgctgtcttcaaagg

SEQ ID NO: 5515255 - DNA, 25 bp, Homo sapien
acaaggtgcgcggttaccgctactt

SEQ ID NO: 5515256 - DNA, 25 bp, Homo sapien
cttcaaaggcccctgtctcccctcc

SEQ ID NO: 5515257 - DNA, 25 bp, Homo sapien
cccgcctcaagagacacataggctc

SEQ ID NO: 5515258 - DNA, 25 bp, Homo sapien
gcctgggtagagacttctaagctgc

SEQ ID NO: 5515259 - DNA, 25 bp, Homo sapien
tctggagtagggagctctatttacg

SEQ ID NO: 5515260 - DNA, 25 bp, Homo sapien
gtagactccagaggctatgtcattc

SEQ ID NO: 5515261 - DNA, 25 bp, Homo sapien
ccaaggctgatcagatgaaagtttc

SEQ ID NO: 5515262 - DNA, 25 bp, Homo sapien
ctatggtcaggaatcaatgagcatc

SEQ ID NO: 5515263 - DNA, 25 bp, Homo sapien
tcctgcacaaaaaatggcctctcac

SEQ ID NO: 5515264 - DNA, 25 bp, Homo sapien
ttcgccaaagtcaccctgcaccaag

SEQ ID NO: 5515265 - DNA, 25 bp, Homo sapien
caagactgagtcctaagcacatttc

SEQ ID NO: 5515266 - DNA, 25 bp, Homo sapien
tgtggtggataatcgaaaacaagac

SEQ ID NO: 5515267 - DNA, 25 bp, Homo sapien
atgttaaggacacaactaccaaccc

SEQ ID NO: 5515268 - DNA, 25 bp, Homo sapien
tctgtctctcgaggaactaggctcc

SEQ ID NO: 5515269 - DNA, 25 bp, Homo sapien
gaagtcgaggcctcatgacaacatc

SEQ ID NO: 5515270 - DNA, 25 bp, Homo sapien
gaatgtgaactttgaggatccagcc

SEQ ID NO: 5515271 - DNA, 25 bp, Homo sapien
acgccgtgtttgttaagaatgcctc

SEQ ID NO: 5515272 - DNA, 25 bp, Homo sapien
cttggcctctgtgacgctgccttcc

SEQ ID NO: 5515273 - DNA, 25 bp, Homo sapien
agaagatcaacaaggccatcgtctc

SEQ ID NO: 5515274 - DNA, 25 bp, Homo sapien
agaatgcctctgaaattgaagtgcc

SEQ ID NO: 5515275 - DNA, 25 bp, Homo sapien
ctctccccatgggattgcgtcggtc

SEQ ID NO: 5515276 - DNA, 25 bp, Homo sapien
taaagacattgtgacagtggctaac

SEQ ID NO: 5515277 - DNA, 25 bp, Homo sapien
ggtgatgagatacggcgtaaatgga

SEQ ID NO: 5515278 - DNA, 25 bp, Homo sapien
gaaaccagggatatgattgacaatc

SEQ ID NO: 5515279 - DNA, 25 bp, Homo sapien
cgaaacattaactagctgtactggt

SEQ ID NO: 5515280 - DNA, 25 bp, Homo sapien
accagtacagctagttaatgtttcg

SEQ ID NO: 5515281 - DNA, 25 bp, Homo sapien
aaagtcagtctgagagaagaatatt

SEQ ID NO: 5515282 - DNA, 25 bp, Homo sapien
aaagaatatcaaagctaaaacactc

SEQ ID NO: 5515283 - DNA, 25 bp, Homo sapien
aagaagagaatcttgtgctccggac

SEQ ID NO: 5515284 - DNA, 25 bp, Homo sapien
ctgtacgcttagaaaacaagcagaa

SEQ ID NO: 5515285 - DNA, 25 bp, Homo sapien
accacaaatggcacccgttgactgt

SEQ ID NO: 5515286 - DNA, 25 bp, Homo sapien
cccaaactaaggatggttggaacag

SEQ ID NO: 5515287 - DNA, 25 bp, Homo sapien
tgtgctccggactgtaaatacatga

SEQ ID NO: 5515288 - DNA, 25 bp, Homo sapien
tcggcatgggcacatacatagttaa

SEQ ID NO: 5515289 - DNA, 25 bp, Homo sapien
tattgctcgacttcggcatgggcac

SEQ ID NO: 5515290 - DNA, 25 bp, Homo sapien
ttcggggcaacaaactatgtgcaaa

SEQ ID NO: 5515291 - DNA, 25 bp, Homo sapien
tagtgttgtaaagtaaagcgaatta

SEQ ID NO: 5515292 - DNA, 25 bp, Homo sapien
gggaggactgttaggctacttctgt

SEQ ID NO: 5515293 - DNA, 25 bp, Homo sapien
gaggtccccaagaagctgaatcttc

SEQ ID NO: 5515294 - DNA, 25 bp, Homo sapien
gcccagcctaaaatcaaagtgccac

SEQ ID NO: 5515295 - DNA, 25 bp, Homo sapien
tcgatggaaataaagtctcaagtgc

SEQ ID NO: 5515296 - DNA, 25 bp, Homo sapien
taccaatgtcgagtcagaacccttc

SEQ ID NO: 5515297 - DNA, 25 bp, Homo sapien
ctgtgagacttctgcctgcccagcc

SEQ ID NO: 5515298 - DNA, 25 bp, Homo sapien
ttcagaagaggttactacaatgcag

SEQ ID NO: 5515299 - DNA, 25 bp, Homo sapien
agtgttggtttggacgtctagtgaa

SEQ ID NO: 5515300 - DNA, 25 bp, Homo sapien
cccgaatgggttataaatgtggctt

SEQ ID NO: 5515301 - DNA, 25 bp, Homo sapien
atatgaatatgggctctgaggtccc

SEQ ID NO: 5515302 - DNA, 25 bp, Homo sapien
aacccttcatggccggcccgaatgg

SEQ ID NO: 5515303 - DNA, 25 bp, Homo sapien
acgaatacacgcacgcgtgcaggct

SEQ ID NO: 5515304 - DNA, 25 bp, Homo sapien
agcctgcacgcgtgcgtgtattcgt

SEQ ID NO: 5515305 - DNA, 25 bp, Homo sapien
gtgaaaatactgacaaacttgcctt

SEQ ID NO: 5515306 - DNA, 25 bp, Homo sapien
catcactttatacgcagggaatctt

SEQ ID NO: 5515307 - DNA, 25 bp, Homo sapien
aagcagaattccagacaagaactac

SEQ ID NO: 5515308 - DNA, 25 bp, Homo sapien
gaagggatgtcggaaatctaatcta

SEQ ID NO: 5515309 - DNA, 25 bp, Homo sapien
aaaatcacatatgtagggcatcact

SEQ ID NO: 5515310 - DNA, 25 bp, Homo sapien
ttctagactaggaagctgcttgagt

SEQ ID NO: 5515311 - DNA, 25 bp, Homo sapien
ccagctagttaatgccaacgccaac

SEQ ID NO: 5515312 - DNA, 25 bp, Homo sapien
aacttgccttcacgaactgacttcc

SEQ ID NO: 5515313 - DNA, 25 bp, Homo sapien
atgttatttctgggcggatggtact

SEQ ID NO: 5515314 - DNA, 25 bp, Homo sapien
aacgccaacagaaacaccctgatcc

SEQ ID NO: 5515315 - DNA, 25 bp, Homo sapien
ctgggcggatggtacttatatttta

SEQ ID NO: 5515316 - DNA, 25 bp, Homo sapien
taggtgtggacgcacaaccttcaac

SEQ ID NO: 5515317 - DNA, 25 bp, Homo sapien
agaggatttaaataatgcgacgtgc

SEQ ID NO: 5515318 - DNA, 25 bp, Homo sapien
tgcgacgtgctttccactgagccac

SEQ ID NO: 5515319 - DNA, 25 bp, Homo sapien
tgcttttgccaggctgttgggacct

SEQ ID NO: 5515320 - DNA, 25 bp, Homo sapien
tctatctaagagtggttggtacaca

SEQ ID NO: 5515321 - DNA, 25 bp, Homo sapien
aaccgctgcgtttcttaaggccaca

SEQ ID NO: 5515322 - DNA, 25 bp, Homo sapien
ctagacactaagccagaaaagcctt

SEQ ID NO: 5515323 - DNA, 25 bp, Homo sapien
agccaatgtacagcaccccccaaca

SEQ ID NO: 5515324 - DNA, 25 bp, Homo sapien
tgtaaacctaaagtccctgagtggc

SEQ ID NO: 5515325 - DNA, 25 bp, Homo sapien
ttactaagccgaccagggctagaca

SEQ ID NO: 5515326 - DNA, 25 bp, Homo sapien
actgagccactaagtaggtgtggac

SEQ ID NO: 5515327 - DNA, 25 bp, Homo sapien
atatagtacagaacatttgcaaaat

SEQ ID NO: 5515328 - DNA, 25 bp, Homo sapien
gaattgagctagagcacatttttgc

SEQ ID NO: 5515329 - DNA, 25 bp, Homo sapien
tacctcagtttacacagggagaacc

SEQ ID NO: 5515330 - DNA, 25 bp, Homo sapien
gaaaacaatgggtgaattagtattc

SEQ ID NO: 5515331 - DNA, 25 bp, Homo sapien
tgaagactctccatattaggcacta

SEQ ID NO: 5515332 - DNA, 25 bp, Homo sapien
aaacatgtaaagaatcatatagttc

SEQ ID NO: 5515333 - DNA, 25 bp, Homo sapien
ggaatagccggactacctcagttta

SEQ ID NO: 5515334 - DNA, 25 bp, Homo sapien
ctgacaagcaagaatatatactatt

SEQ ID NO: 5515335 - DNA, 25 bp, Homo sapien
tgcaacttttgagctagaatcttcc

SEQ ID NO: 5515336 - DNA, 25 bp, Homo sapien
atctagaaaccaccacattaacatc

SEQ ID NO: 5515337 - DNA, 25 bp, Homo sapien
tattaggactcacaacacctgggcg

SEQ ID NO: 5515338 - DNA, 25 bp, Homo sapien
tttctgagtggcgatctgagttcca

SEQ ID NO: 5515339 - DNA, 25 bp, Homo sapien
tgagttccaggattaatgcccctcc

SEQ ID NO: 5515340 - DNA, 25 bp, Homo sapien
cacccagcttggacccaagccccag

SEQ ID NO: 5515341 - DNA, 25 bp, Homo sapien
caaccagtctacagatgcaaaaact

SEQ ID NO: 5515342 - DNA, 25 bp, Homo sapien
ctccaataactacatcacccagctt

SEQ ID NO: 5515343 - DNA, 25 bp, Homo sapien
ctcgcctcctatgcaaagaactttc

SEQ ID NO: 5515344 - DNA, 25 bp, Homo sapien
tgcccctccaataactacatcaccc

SEQ ID NO: 5515345 - DNA, 25 bp, Homo sapien
cggacctacaaacccaaccagtcta

SEQ ID NO: 5515346 - DNA, 25 bp, Homo sapien
cagcgtgccgaacctcgcctcctat

SEQ ID NO: 5515347 - DNA, 25 bp, Homo sapien
caaagaactttctgagtggcgatct

SEQ ID NO: 5515348 - DNA, 25 bp, Homo sapien
acaaacccaaccagtctacagatgc

SEQ ID NO: 5515349 - DNA, 25 bp, Homo sapien
ttttgattgggtgagcattatttgc

SEQ ID NO: 5515350 - DNA, 25 bp, Homo sapien
atacaaaatgaagattggagggaaa

SEQ ID NO: 5515351 - DNA, 25 bp, Homo sapien
taaaaaatagcatgtaagtgtataa

SEQ ID NO: 5515352 - DNA, 25 bp, Homo sapien
atttccctgtagataagaggggaag

SEQ ID NO: 5515353 - DNA, 25 bp, Homo sapien
tcagcatgggttatacaaaaggtgg

SEQ ID NO: 5515354 - DNA, 25 bp, Homo sapien
ttcatggatgattagacaagggaca

SEQ ID NO: 5515355 - DNA, 25 bp, Homo sapien
gacaagggacactgaatcacttacc

SEQ ID NO: 5515356 - DNA, 25 bp, Homo sapien
cattgcattgcactaacctgtccat

SEQ ID NO: 5515357 - DNA, 25 bp, Homo sapien
gaggggaagtaggattctttctagc

SEQ ID NO: 5515358 - DNA, 25 bp, Homo sapien
ctggtaccaaattccagaaggcctt

SEQ ID NO: 5515359 - DNA, 25 bp, Homo sapien
ggttatacaaaaggtggactccatc

SEQ ID NO: 5515360 - DNA, 25 bp, Homo sapien
acaaaaaaagaaactgcctggtgct

SEQ ID NO: 5515361 - DNA, 25 bp, Homo sapien
gactagaggctgacctccatgggga

SEQ ID NO: 5515362 - DNA, 25 bp, Homo sapien
gacctccatggggaagcttaccatt

SEQ ID NO: 5515363 - DNA, 25 bp, Homo sapien
aggttccccagtcttggggaaggca

SEQ ID NO: 5515364 - DNA, 25 bp, Homo sapien
ctatgaaaggatacacaacatatag

SEQ ID NO: 5515365 - DNA, 25 bp, Homo sapien
tgtagtttctacaagggaagggatc

SEQ ID NO: 5515366 - DNA, 25 bp, Homo sapien
gtgattaactctggagaggggacta

SEQ ID NO: 5515367 - DNA, 25 bp, Homo sapien
aaagtgttgagcttactgggccaca

SEQ ID NO: 5515368 - DNA, 25 bp, Homo sapien
tgaatatacagtggtgaacaggaca

SEQ ID NO: 5515369 - DNA, 25 bp, Homo sapien
tgcctggtgctgaatatacagtggt

SEQ ID NO: 5515370 - DNA, 25 bp, Homo sapien
agcaaatgggcagataaaccctttt

SEQ ID NO: 5515371 - DNA, 25 bp, Homo sapien
agttccccatggtggacatggaggt

SEQ ID NO: 5515372 - DNA, 25 bp, Homo sapien
acaaggaaatcagtaggaatatcat

SEQ ID NO: 5515373 - DNA, 25 bp, Homo sapien
attcccagcaggtttggtgagacaa

SEQ ID NO: 5515374 - DNA, 25 bp, Homo sapien
aatgaaaaccatgtagcctgcacac

SEQ ID NO: 5515375 - DNA, 25 bp, Homo sapien
atggtggacatggaggttctttcca

SEQ ID NO: 5515376 - DNA, 25 bp, Homo sapien
tccacggaggagtttcttatctgtt

SEQ ID NO: 5515377 - DNA, 25 bp, Homo sapien
gaaaatatgcaaagatctgaaacac

SEQ ID NO: 5515378 - DNA, 25 bp, Homo sapien
agttaacagtaatttccacggagga

SEQ ID NO: 5515379 - DNA, 25 bp, Homo sapien
aatttagtgactgataaactgccct

SEQ ID NO: 5515380 - DNA, 25 bp, Homo sapien
atgcttagaaaatgtgaactgaaat

SEQ ID NO: 5515381 - DNA, 25 bp, Homo sapien
atgtaggattcattcccagcaggtt

SEQ ID NO: 5515382 - DNA, 25 bp, Homo sapien
actctacagtttgacaccttgcttt

SEQ ID NO: 5515383 - DNA, 25 bp, Homo sapien
tacttaactatcttagagctctttc

SEQ ID NO: 5515384 - DNA, 25 bp, Homo sapien
tcttctggccaaccagtatgccact

SEQ ID NO: 5515385 - DNA, 25 bp, Homo sapien
accctttcagagattatgtgtgtac

SEQ ID NO: 5515386 - DNA, 25 bp, Homo sapien
atataaaatgataaagagtgaaaat

SEQ ID NO: 5515387 - DNA, 25 bp, Homo sapien
gtcctcccaattcttctggccaacc

SEQ ID NO: 5515388 - DNA, 25 bp, Homo sapien
gggattagaagtgtgcaccaccaca

SEQ ID NO: 5515389 - DNA, 25 bp, Homo sapien
aaatgataaagagtgaaaattattc

SEQ ID NO: 5515390 - DNA, 25 bp, Homo sapien
taaatggaaacatactctacagttt

SEQ ID NO: 5515391 - DNA, 25 bp, Homo sapien
tgccttagcctacggagtagctggg

SEQ ID NO: 5515392 - DNA, 25 bp, Homo sapien
gccaaccagtatgccacttttaccc

SEQ ID NO: 5515393 - DNA, 25 bp, Homo sapien
aggtgtaacagaaaacaagaaaatc

SEQ ID NO: 5515394 - DNA, 25 bp, Homo sapien
ttagttggggtaatgaagtatttca

SEQ ID NO: 5515395 - DNA, 25 bp, Homo sapien
aaaggcaaatgactcaaggtgtaac

SEQ ID NO: 5515396 - DNA, 25 bp, Homo sapien
tcaggataatcagaccaccacaggt

SEQ ID NO: 5515397 - DNA, 25 bp, Homo sapien
tgggggcaaaatatgttttcagttc

SEQ ID NO: 5515398 - DNA, 25 bp, Homo sapien
tgtggaagagatgtccattggagaa

SEQ ID NO: 5515399 - DNA, 25 bp, Homo sapien
tctcacgttgaggtctgtggaagag

SEQ ID NO: 5515400 - DNA, 25 bp, Homo sapien
acttgaagcattttgggatggtctt

SEQ ID NO: 5515401 - DNA, 25 bp, Homo sapien
tggagaaatggctggtagttactct

SEQ ID NO: 5515402 - DNA, 25 bp, Homo sapien
atagaaactagagcagttctcacgt

SEQ ID NO: 5515403 - DNA, 25 bp, Homo sapien
tagagtttggatgtgtaactgaggc

SEQ ID NO: 5515404 - DNA, 25 bp, Homo sapien
cacagtcagctcaccctgatggaga

SEQ ID NO: 5515405 - DNA, 25 bp, Homo sapien
gtgtgcaagaggtacataaataaac

SEQ ID NO: 5515406 - DNA, 25 bp, Homo sapien
gggacttgcataggttgatgagtgt

SEQ ID NO: 5515407 - DNA, 25 bp, Homo sapien
tgagtgtgcaagaggtacataaata

SEQ ID NO: 5515408 - DNA, 25 bp, Homo sapien
gcataggttgatgagtgtgcaagag

SEQ ID NO: 5515409 - DNA, 25 bp, Homo sapien
tgcgtcctgcacactctgctgtcag

SEQ ID NO: 5515410 - DNA, 25 bp, Homo sapien
ttgcctccctgtgtgtgtgagacgg

SEQ ID NO: 5515411 - DNA, 25 bp, Homo sapien
gcacactctgctgtcaggtggggtg

SEQ ID NO: 5515412 - DNA, 25 bp, Homo sapien
acgaggtggcccatccatcccactt

SEQ ID NO: 5515413 - DNA, 25 bp, Homo sapien
ctcaccctgatggagagtgaacaag

SEQ ID NO: 5515414 - DNA, 25 bp, Homo sapien
ccctgctgattccaaacgaggtggc

SEQ ID NO: 5515415 - DNA, 25 bp, Homo sapien
cggcctcttagccagtgggttctag

SEQ ID NO: 5515416 - DNA, 25 bp, Homo sapien
ctagaacccactggctaagaggccg

SEQ ID NO: 5515417 - DNA, 25 bp, Homo sapien
agagaaatataagaaggctatggtt

SEQ ID NO: 5515418 - DNA, 25 bp, Homo sapien
gcagccacgctggcctctctgggtg

SEQ ID NO: 5515419 - DNA, 25 bp, Homo sapien
ggcagcggagacacctccatctcca

SEQ ID NO: 5515420 - DNA, 25 bp, Homo sapien
tcgtaacatgccgggcctgtctgca

SEQ ID NO: 5515421 - DNA, 25 bp, Homo sapien
tccatcgacaccgaggcatccatca

SEQ ID NO: 5515422 - DNA, 25 bp, Homo sapien
ccctaaaagatatgttgctggagct

SEQ ID NO: 5515423 - DNA, 25 bp, Homo sapien
agctagacaatgaaaagacaaactt

SEQ ID NO: 5515424 - DNA, 25 bp, Homo sapien
agaacagctggctgaatctaggcgg

SEQ ID NO: 5515425 - DNA, 25 bp, Homo sapien
cagggaaatcaaggactctctagca

SEQ ID NO: 5515426 - DNA, 25 bp, Homo sapien
aaagattttactgagaaggggtctc

SEQ ID NO: 5515427 - DNA, 25 bp, Homo sapien
aagcccggctcgctgcaaaacgggc

SEQ ID NO: 5515428 - DNA, 25 bp, Homo sapien
gtcttgggcaaccatcatgcctggc

SEQ ID NO: 5515429 - DNA, 25 bp, Homo sapien
taatttaactgtcttgggcaaccat

SEQ ID NO: 5515430 - DNA, 25 bp, Homo sapien
atttcagatgaaggacataacagag

SEQ ID NO: 5515431 - DNA, 25 bp, Homo sapien
cagagccctaataaaatacagaatt

SEQ ID NO: 5515432 - DNA, 25 bp, Homo sapien
ttttggttaccatgtacagagaaca

SEQ ID NO: 5515433 - DNA, 25 bp, Homo sapien
gatgaggctttgggtaattaacctg

SEQ ID NO: 5515434 - DNA, 25 bp, Homo sapien
gatgaaggacataacagagccctaa

SEQ ID NO: 5515435 - DNA, 25 bp, Homo sapien
aaaaactacaagaacagtatgttac

SEQ ID NO: 5515436 - DNA, 25 bp, Homo sapien
gaatctccagtaccaagcatacacc

SEQ ID NO: 5515437 - DNA, 25 bp, Homo sapien
acagagaacaattgctcagcatggc

SEQ ID NO: 5515438 - DNA, 25 bp, Homo sapien
tcactgacactgctagaaatatttc

SEQ ID NO: 5515439 - DNA, 25 bp, Homo sapien
cagagcactcactggctacatgacc

SEQ ID NO: 5515440 - DNA, 25 bp, Homo sapien
tggttctgatcattactggcctcct

SEQ ID NO: 5515441 - DNA, 25 bp, Homo sapien
agtacttaagtagtgggtagaactg

SEQ ID NO: 5515442 - DNA, 25 bp, Homo sapien
atggtgacttaagtcccaccccacc

SEQ ID NO: 5515443 - DNA, 25 bp, Homo sapien
ggtatgtgtacccatgagtagagct

SEQ ID NO: 5515444 - DNA, 25 bp, Homo sapien
ggggcagataatcctcaggagattg

SEQ ID NO: 5515445 - DNA, 25 bp, Homo sapien
gctacatgaccttgggtattccacc

SEQ ID NO: 5515446 - DNA, 25 bp, Homo sapien
tatttcatagtgtggtctggtggag

SEQ ID NO: 5515447 - DNA, 25 bp, Homo sapien
atcctcaggagattgcaagaagaat

SEQ ID NO: 5515448 - DNA, 25 bp, Homo sapien
taatgtctacaattcctggagccct

SEQ ID NO: 5515449 - DNA, 25 bp, Homo sapien
cagcagtcctgcaacaggagcactt

SEQ ID NO: 5515450 - DNA, 25 bp, Homo sapien
tcccgtcaccagcagatcttgcatt

SEQ ID NO: 5515451 - DNA, 25 bp, Homo sapien
atcttgcattggaaaaggaaaataa

SEQ ID NO: 5515452 - DNA, 25 bp, Homo sapien
aacaaaagaaacaccagtcaagcat

SEQ ID NO: 5515453 - DNA, 25 bp, Homo sapien
ccagtcacctcttcaggagtgtccc

SEQ ID NO: 5515454 - DNA, 25 bp, Homo sapien
gtggtgcggaaactcaccgccaaac

SEQ ID NO: 5515455 - DNA, 25 bp, Homo sapien
cagacttgactgccttcggtgaagg

SEQ ID NO: 5515456 - DNA, 25 bp, Homo sapien
aattgtctcagcttgggaccaaagt

SEQ ID NO: 5515457 - DNA, 25 bp, Homo sapien
aaggcacacggcaagttcttctgac

SEQ ID NO: 5515458 - DNA, 25 bp, Homo sapien
agcctgaatggaggtcgaattcatt

SEQ ID NO: 5515459 - DNA, 25 bp, Homo sapien
tttacaaagcaagcgaacaagagac

SEQ ID NO: 5515460 - DNA, 25 bp, Homo sapien
aggagtgtcccatgtgtcagctgac

SEQ ID NO: 5515461 - DNA, 25 bp, Homo sapien
acatctctaaaggccactcaggtgg

SEQ ID NO: 5515462 - DNA, 25 bp, Homo sapien
ggagaggatcgaacctgtcaaaata

SEQ ID NO: 5515463 - DNA, 25 bp, Homo sapien
ttaaattaggcagtcttgggctgga

SEQ ID NO: 5515464 - DNA, 25 bp, Homo sapien
ttcccatgaatgagacagtggttat

SEQ ID NO: 5515465 - DNA, 25 bp, Homo sapien
ctacaaagtgtgcttgctccaaggc

SEQ ID NO: 5515466 - DNA, 25 bp, Homo sapien
tcaagacattgaaaatcgacagaag

SEQ ID NO: 5515467 - DNA, 25 bp, Homo sapien
tcaggtgggacaccatcaagacatt

SEQ ID NO: 5515468 - DNA, 25 bp, Homo sapien
gtgctctaaaataaggcagcccttc

SEQ ID NO: 5515469 - DNA, 25 bp, Homo sapien
tccaaggcagtgcaaactagaagtt

SEQ ID NO: 5515470 - DNA, 25 bp, Homo sapien
ggcttgttccagaatgcagaaatcc

SEQ ID NO: 5515471 - DNA, 25 bp, Homo sapien
ctggtcccacggtttctgaagcttc

SEQ ID NO: 5515472 - DNA, 25 bp, Homo sapien
gagaattgaattgtgataaccaggt

SEQ ID NO: 5515473 - DNA, 25 bp, Homo sapien
gaaaagcaaaacgagactgcctctt

SEQ ID NO: 5515474 - DNA, 25 bp, Homo sapien
ctacaccttggagtccaccgccaat

SEQ ID NO: 5515475 - DNA, 25 bp, Homo sapien
ggctggcccagaatatggtagatac

SEQ ID NO: 5515476 - DNA, 25 bp, Homo sapien
ctaacaagtctgaggatgaaatggt

SEQ ID NO: 5515477 - DNA, 25 bp, Homo sapien
attccatgatggtgcaacaattgca

SEQ ID NO: 5515478 - DNA, 25 bp, Homo sapien
aagacgtgggctgtaaaaataaagc

SEQ ID NO: 5515479 - DNA, 25 bp, Homo sapien
cgtatcctcatgaaagacgtgggct

SEQ ID NO: 5515480 - DNA, 25 bp, Homo sapien
caggtgtaataaaggcagttgcata

SEQ ID NO: 5515481 - DNA, 25 bp, Homo sapien
ctcaagaccaagaaatgtactccta

SEQ ID NO: 5515482 - DNA, 25 bp, Homo sapien
gcacaaactagaagatatctgcatc

SEQ ID NO: 5515483 - DNA, 25 bp, Homo sapien
ggtatgtgctcactggagacaaaac

SEQ ID NO: 5515484 - DNA, 25 bp, Homo sapien
tcaggtggaagtctcacagagacca

SEQ ID NO: 5515485 - DNA, 25 bp, Homo sapien
cactgtgccagtggattcacactac

SEQ ID NO: 5515486 - DNA, 25 bp, Homo sapien
ggagacaaaacagtgcacacctgtc

SEQ ID NO: 5515487 - DNA, 25 bp, Homo sapien
tataaaatccgcatggtatgtgctc

SEQ ID NO: 5515488 - DNA, 25 bp, Homo sapien
ccacttaaaactggggtcaggtgga

SEQ ID NO: 5515489 - DNA, 25 bp, Homo sapien
cagtcatcaggtcaaacattcagct

SEQ ID NO: 5515490 - DNA, 25 bp, Homo sapien
agcttacaatagagcagccaggtct

SEQ ID NO: 5515491 - DNA, 25 bp, Homo sapien
tcacagagaccacgtctgtaccgcg

SEQ ID NO: 5515492 - DNA, 25 bp, Homo sapien
agagcagccaggtctcagcactgct

SEQ ID NO: 5515493 - DNA, 25 bp, Homo sapien
gaatcatatctggacatctgttgca

SEQ ID NO: 5515494 - DNA, 25 bp, Homo sapien
gcagtagcgcaacctcgactcactg

SEQ ID NO: 5515495 - DNA, 25 bp, Homo sapien
cacttgacctgtcagctggtccttg

SEQ ID NO: 5515496 - DNA, 25 bp, Homo sapien
tgttttgtggcatagataagtgtct

SEQ ID NO: 5515497 - DNA, 25 bp, Homo sapien
aagctgggcagttagtctacccgtt

SEQ ID NO: 5515498 - DNA, 25 bp, Homo sapien
ataattaggtcaatggaatcctgtt

SEQ ID NO: 5515499 - DNA, 25 bp, Homo sapien
ggctttgcagcatttgtcactttct

SEQ ID NO: 5515500 - DNA, 25 bp, Homo sapien
atgtgttcaaagaccagaaaaggcc

SEQ ID NO: 5515501 - DNA, 25 bp, Homo sapien
ataaatgtgacaaattcagctgttt

SEQ ID NO: 5515502 - DNA, 25 bp, Homo sapien
ctggtccttgaacagctgtaggttt

SEQ ID NO: 5515503 - DNA, 25 bp, Homo sapien
tagataagtgtctaagctgggcagt

SEQ ID NO: 5515504 - DNA, 25 bp, Homo sapien
accagaaaaggccacacttgacctg

SEQ ID NO: 5515505 - DNA, 25 bp, Homo sapien
gaacttgaacacaacacatccgtag

SEQ ID NO: 5515506 - DNA, 25 bp, Homo sapien
ctacggatgtgttgtgttcaagttc

SEQ ID NO: 5515507 - DNA, 25 bp, Homo sapien
taaatatcgtacatgagatttcatc

SEQ ID NO: 5515508 - DNA, 25 bp, Homo sapien
aaccagacatcagaagtcaaatgga

SEQ ID NO: 5515509 - DNA, 25 bp, Homo sapien
tatttggacaaaagcagagtgtaag

SEQ ID NO: 5515510 - DNA, 25 bp, Homo sapien
aaaagcacatcactataaatatcgt

SEQ ID NO: 5515511 - DNA, 25 bp, Homo sapien
atttaaataagacacaggaacttct

SEQ ID NO: 5515512 - DNA, 25 bp, Homo sapien
agcgcaatggctagaattaaacagt

SEQ ID NO: 5515513 - DNA, 25 bp, Homo sapien
tgtaatgctaaaccagacatcagaa

SEQ ID NO: 5515514 - DNA, 25 bp, Homo sapien
ccttgtgtaaagccatattatatgg

SEQ ID NO: 5515515 - DNA, 25 bp, Homo sapien
ctcaaatactgttcagcgcaatggc

SEQ ID NO: 5515516 - DNA, 25 bp, Homo sapien
aaagcagagtgtaagatcaacatat

SEQ ID NO: 5515517 - DNA, 25 bp, Homo sapien
atcaccaaaaaagcatattcagtcc

SEQ ID NO: 5515518 - DNA, 25 bp, Homo sapien
ttgctctgacttctgcagtttacat

SEQ ID NO: 5515519 - DNA, 25 bp, Homo sapien
tacagagcttgtacagaagtaactc

SEQ ID NO: 5515520 - DNA, 25 bp, Homo sapien
ctcatggaatcgcaactgtgatggc

SEQ ID NO: 5515521 - DNA, 25 bp, Homo sapien
gcagctttagaattataaaacagta

SEQ ID NO: 5515522 - DNA, 25 bp, Homo sapien
atttcatgctactgttggtgttctt

SEQ ID NO: 5515523 - DNA, 25 bp, Homo sapien
agtcataaagcagctactcatggaa

SEQ ID NO: 5515524 - DNA, 25 bp, Homo sapien
ccagatagtacaaaaagcagtcata

SEQ ID NO: 5515525 - DNA, 25 bp, Homo sapien
gtacagaagtaactctgggcacatc

SEQ ID NO: 5515526 - DNA, 25 bp, Homo sapien
gcacatccagatagtacaaaaagca

SEQ ID NO: 5515527 - DNA, 25 bp, Homo sapien
agatacagagcttgtacagaagtaa

SEQ ID NO: 5515528 - DNA, 25 bp, Homo sapien
aagcagctactcatggaatcgcaac

SEQ ID NO: 5515529 - DNA, 25 bp, Homo sapien
agctggaagcttatattgaaaacta

SEQ ID NO: 5515530 - DNA, 25 bp, Homo sapien
tagaggtaattgctaagctggaagc

SEQ ID NO: 5515531 - DNA, 25 bp, Homo sapien
acaaaatgtaggcacttgctctgac

SEQ ID NO: 5515532 - DNA, 25 bp, Homo sapien
ttgtacatggctctgtagtaatgcc

SEQ ID NO: 5515533 - DNA, 25 bp, Homo sapien
gaagtggtgagagtttacaagtctt

SEQ ID NO: 5515534 - DNA, 25 bp, Homo sapien
gatattacaagaagtggtgagagtt

SEQ ID NO: 5515535 - DNA, 25 bp, Homo sapien
ataagcaaaataacctgagggggaa

SEQ ID NO: 5515536 - DNA, 25 bp, Homo sapien
gaggcaactcatgggtaccataagc

SEQ ID NO: 5515537 - DNA, 25 bp, Homo sapien
ttatctatgtacagagagaggcaac

SEQ ID NO: 5515538 - DNA, 25 bp, Homo sapien
tttgccccaaacagaactaggaatc

SEQ ID NO: 5515539 - DNA, 25 bp, Homo sapien
tgagggggaacatttgatattacaa

SEQ ID NO: 5515540 - DNA, 25 bp, Homo sapien
aaaatggcaatattaaatcggtaac

SEQ ID NO: 5515541 - DNA, 25 bp, Homo sapien
gaaagagcagaataatagtacacgc

SEQ ID NO: 5515542 - DNA, 25 bp, Homo sapien
aatcggtaacaaaacgatccacatt

SEQ ID NO: 5515543 - DNA, 25 bp, Homo sapien
aatgattacacagcaagaggcctga

SEQ ID NO: 5515544 - DNA, 25 bp, Homo sapien
tacaaaaactgctactgcttggctc

SEQ ID NO: 5515545 - DNA, 25 bp, Homo sapien
atacatgacaagagtatgggaaaga

SEQ ID NO: 5515546 - DNA, 25 bp, Homo sapien
tacataggtcatgaaaatcagagaa

SEQ ID NO: 5515547 - DNA, 25 bp, Homo sapien
gtggaggtaggctaacaacacattt

SEQ ID NO: 5515548 - DNA, 25 bp, Homo sapien
atatagcaccgttgaaaccattcat

SEQ ID NO: 5515549 - DNA, 25 bp, Homo sapien
atcagagaacctaatatagcaccgt

SEQ ID NO: 5515550 - DNA, 25 bp, Homo sapien
gtacacgcagttttaaaagctatgc

SEQ ID NO: 5515551 - DNA, 25 bp, Homo sapien
agtaggtcatatcttcaggggaaac

SEQ ID NO: 5515552 - DNA, 25 bp, Homo sapien
gctgcacatcactcaaggaggtcat

SEQ ID NO: 5515553 - DNA, 25 bp, Homo sapien
caagttaattgggataaagaataaa

SEQ ID NO: 5515554 - DNA, 25 bp, Homo sapien
atcatcactgggtacctgtccttac

SEQ ID NO: 5515555 - DNA, 25 bp, Homo sapien
taagttagcttatgcagacacactg

SEQ ID NO: 5515556 - DNA, 25 bp, Homo sapien
tgttatctggtatctaaagcacagc

SEQ ID NO: 5515557 - DNA, 25 bp, Homo sapien
gtcaataatcaaggtacagaaactc

SEQ ID NO: 5515558 - DNA, 25 bp, Homo sapien
tatgtgagtagttctagtaggtcat

SEQ ID NO: 5515559 - DNA, 25 bp, Homo sapien
gacacactgaagatcgcacactcac

SEQ ID NO: 5515560 - DNA, 25 bp, Homo sapien
ggaggtcatagtgcaatcgagtgct

SEQ ID NO: 5515561 - DNA, 25 bp, Homo sapien
atgttgtgaaccagttccccacccc

SEQ ID NO: 5515562 - DNA, 25 bp, Homo sapien
gcatcaccaacaatagtatgtacct

SEQ ID NO: 5515563 - DNA, 25 bp, Homo sapien
tttactaaatggtgaggatagctgc

SEQ ID NO: 5515564 - DNA, 25 bp, Homo sapien
aaatagcaagttgaggtgtaaaagc

SEQ ID NO: 5515565 - DNA, 25 bp, Homo sapien
aaagaaagtttattggagattatta

SEQ ID NO: 5515566 - DNA, 25 bp, Homo sapien
aatcagtaaaagggaatatccttaa

SEQ ID NO: 5515567 - DNA, 25 bp, Homo sapien
aataaagttgggtattgttagtata

SEQ ID NO: 5515568 - DNA, 25 bp, Homo sapien
ttggattgcagacatactcttgccc

SEQ ID NO: 5515569 - DNA, 25 bp, Homo sapien
ggatggtgacgacaatctgcaatta

SEQ ID NO: 5515570 - DNA, 25 bp, Homo sapien
ttacacaattggacagtgaggagca

SEQ ID NO: 5515571 - DNA, 25 bp, Homo sapien
aattactggtcagagtgaagcgaag

SEQ ID NO: 5515572 - DNA, 25 bp, Homo sapien
aaggcaagtcctagatcagatttaa

SEQ ID NO: 5515573 - DNA, 25 bp, Homo sapien
aactataaaagatgaagctggtaat

SEQ ID NO: 5515574 - DNA, 25 bp, Homo sapien
agcaccaaaccgatgggaggttttg

SEQ ID NO: 5515575 - DNA, 25 bp, Homo sapien
gcagatggtcagcaggttcaaattg

SEQ ID NO: 5515576 - DNA, 25 bp, Homo sapien
tgtgcctcttggtctgccaggaaat

SEQ ID NO: 5515577 - DNA, 25 bp, Homo sapien
gggagttgcaattggtggttcatct

SEQ ID NO: 5515578 - DNA, 25 bp, Homo sapien
gataccacagatccagtcagcagat

SEQ ID NO: 5515579 - DNA, 25 bp, Homo sapien
caagtgggcagtatgttcttcccct

SEQ ID NO: 5515580 - DNA, 25 bp, Homo sapien
tagtccagattccaagtgctgctac

SEQ ID NO: 5515581 - DNA, 25 bp, Homo sapien
ctggtcaagtccaggttcagggagt

SEQ ID NO: 5515582 - DNA, 25 bp, Homo sapien
tctcagacaatgactgcaggcatta

SEQ ID NO: 5515583 - DNA, 25 bp, Homo sapien
aggctcttcagataatgggggtata

SEQ ID NO: 5515584 - DNA, 25 bp, Homo sapien
aagtaaaaagctgtaatgaactagc

SEQ ID NO: 5515585 - DNA, 25 bp, Homo sapien
gcccatcctgaactaaagcactgac

SEQ ID NO: 5515586 - DNA, 25 bp, Homo sapien
atagagctaatacgagtcatgtttt

SEQ ID NO: 5515587 - DNA, 25 bp, Homo sapien
attaatagcaagaggcaaatgtttt

SEQ ID NO: 5515588 - DNA, 25 bp, Homo sapien
accagagtagagtagtttagaaaag

SEQ ID NO: 5515589 - DNA, 25 bp, Homo sapien
aatgagctctcaccagagtagagta

SEQ ID NO: 5515590 - DNA, 25 bp, Homo sapien
aaaggtaaatggcatagtttgttgc

SEQ ID NO: 5515591 - DNA, 25 bp, Homo sapien
agataatgtgcttagttcctggaaa

SEQ ID NO: 5515592 - DNA, 25 bp, Homo sapien
aaggcttcttgtggtaaatgagctc

SEQ ID NO: 5515593 - DNA, 25 bp, Homo sapien
tctgccttcaagtaagaggtaaaag

SEQ ID NO: 5515594 - DNA, 25 bp, Homo sapien
aggtacagtatctacggggttatta

SEQ ID NO: 5515595 - DNA, 25 bp, Homo sapien
aactgtctattgctggtagtgtgat

SEQ ID NO: 5515596 - DNA, 25 bp, Homo sapien
agttatttacggaactggctattgt

SEQ ID NO: 5515597 - DNA, 25 bp, Homo sapien
tttgtgattgctagtgtaccaacac

SEQ ID NO: 5515598 - DNA, 25 bp, Homo sapien
caaaccaaaacacgtattaaaatca

SEQ ID NO: 5515599 - DNA, 25 bp, Homo sapien
ttacacactgtatctagaagcagat

SEQ ID NO: 5515600 - DNA, 25 bp, Homo sapien
tggtacacacctgatttgaaacata

SEQ ID NO: 5515601 - DNA, 25 bp, Homo sapien
tttcagaaacagcaactacacactt

SEQ ID NO: 5515602 - DNA, 25 bp, Homo sapien
aaagaaaccatatttgtgattgcta

SEQ ID NO: 5515603 - DNA, 25 bp, Homo sapien
tctctggatgtagagtttggatcac

SEQ ID NO: 5515604 - DNA, 25 bp, Homo sapien
cacacttcgccatgttatgactgat

SEQ ID NO: 5515605 - DNA, 25 bp, Homo sapien
tattgctggtagtgtgatttcattt

SEQ ID NO: 5515606 - DNA, 25 bp, Homo sapien
agtggatgcttgaagaaactcagtc

SEQ ID NO: 5515607 - DNA, 25 bp, Homo sapien
atgtgaagccactcagggctgtgca

SEQ ID NO: 5515608 - DNA, 25 bp, Homo sapien
cggccagctatcagcacgagttgga

SEQ ID NO: 5515609 - DNA, 25 bp, Homo sapien
tggtctccccgacttaggaagcacc

SEQ ID NO: 5515610 - DNA, 25 bp, Homo sapien
cacccagtcaggccactcaagtctt

SEQ ID NO: 5515611 - DNA, 25 bp, Homo sapien
taaggtccattatgagggtgaggaa

SEQ ID NO: 5515612 - DNA, 25 bp, Homo sapien
aggtctggattagagacaggaatct

SEQ ID NO: 5515613 - DNA, 25 bp, Homo sapien
gaagacactgaccaagagatgtgaa

SEQ ID NO: 5515614 - DNA, 25 bp, Homo sapien
ttctcagcctggtagcacaagtgga

SEQ ID NO: 5515615 - DNA, 25 bp, Homo sapien
ggttaaatgatgcccagatggggtc

SEQ ID NO: 5515616 - DNA, 25 bp, Homo sapien
ggtgacactcccaaggtcccagcta

SEQ ID NO: 5515617 - DNA, 25 bp, Homo sapien
tgacctatgaggcaacagaaagtga

SEQ ID NO: 5515618 - DNA, 25 bp, Homo sapien
acaaccaaaatcctagagagtctta

SEQ ID NO: 5515619 - DNA, 25 bp, Homo sapien
acacagaaagtacaatcacaagttt

SEQ ID NO: 5515620 - DNA, 25 bp, Homo sapien
atgtgggacaaatgcattactggtt

SEQ ID NO: 5515621 - DNA, 25 bp, Homo sapien
cagagctaattcacccagcaaggtc

SEQ ID NO: 5515622 - DNA, 25 bp, Homo sapien
aatcaggaattcagatgcaaggaac

SEQ ID NO: 5515623 - DNA, 25 bp, Homo sapien
tgcaaggaacagacacaaacctgtc

SEQ ID NO: 5515624 - DNA, 25 bp, Homo sapien
tgcttaacagtcagggaaaaacaac

SEQ ID NO: 5515625 - DNA, 25 bp, Homo sapien
atgaatgacaaaaactaagagacct

SEQ ID NO: 5515626 - DNA, 25 bp, Homo sapien
aagaaggaagcttgaatctatgatt

SEQ ID NO: 5515627 - DNA, 25 bp, Homo sapien
gttgtagagagtgtttcagagctaa

SEQ ID NO: 5515628 - DNA, 25 bp, Homo sapien
accaaaaccagaaggccaactggct

SEQ ID NO: 5515629 - DNA, 25 bp, Homo sapien
tggtccatggtgcaatttggcagac

SEQ ID NO: 5515630 - DNA, 25 bp, Homo sapien
aagtcacaaggaagtggatgttttc

SEQ ID NO: 5515631 - DNA, 25 bp, Homo sapien
aatttggcagacaagttggtgaaag

SEQ ID NO: 5515632 - DNA, 25 bp, Homo sapien
acagtgaaaggagttacagcactcc

SEQ ID NO: 5515633 - DNA, 25 bp, Homo sapien
ggtgaaaggtaagttgtctccagag

SEQ ID NO: 5515634 - DNA, 25 bp, Homo sapien
cagagatttcaatcagggacgtggc

SEQ ID NO: 5515635 - DNA, 25 bp, Homo sapien
caccactcagagaacaccaacatac

SEQ ID NO: 5515636 - DNA, 25 bp, Homo sapien
gaagatgccagggagtcctcttata

SEQ ID NO: 5515637 - DNA, 25 bp, Homo sapien
aatgggggacttacaaatccagact

SEQ ID NO: 5515638 - DNA, 25 bp, Homo sapien
caggcctagacttgatgcagccact

SEQ ID NO: 5515639 - DNA, 25 bp, Homo sapien
gctccggtgtcctctggaaagcaga

SEQ ID NO: 5515640 - DNA, 25 bp, Homo sapien
ttgcaaaacagctatgtgaggcagc

SEQ ID NO: 5515641 - DNA, 25 bp, Homo sapien
agaacgaacataagctgaaacacac

SEQ ID NO: 5515642 - DNA, 25 bp, Homo sapien
tggccaaagggactatgtacattct

SEQ ID NO: 5515643 - DNA, 25 bp, Homo sapien
cacacaatataacatggagacccgc

SEQ ID NO: 5515644 - DNA, 25 bp, Homo sapien
tcaacaaagctcagtcgacccctca

SEQ ID NO: 5515645 - DNA, 25 bp, Homo sapien
caggacgatggacaaatgtgtcatc

SEQ ID NO: 5515646 - DNA, 25 bp, Homo sapien
agtgggaagctcagtaaacacacaa

SEQ ID NO: 5515647 - DNA, 25 bp, Homo sapien
cgggttaagagtgaaaaatgcaaca

SEQ ID NO: 5515648 - DNA, 25 bp, Homo sapien
accctaaaaatcagaagccgccttc

SEQ ID NO: 5515649 - DNA, 25 bp, Homo sapien
ggagactgggtgtctgaacccctca

SEQ ID NO: 5515650 - DNA, 25 bp, Homo sapien
gatagtaatccaaaacaataggtcc

SEQ ID NO: 5515651 - DNA, 25 bp, Homo sapien
tcattcaaggaaaggcaacttagtt

SEQ ID NO: 5515652 - DNA, 25 bp, Homo sapien
tatactttgaagagagtcatatact

SEQ ID NO: 5515653 - DNA, 25 bp, Homo sapien
cgtggtggcaagcatctgtaatacc

SEQ ID NO: 5515654 - DNA, 25 bp, Homo sapien
taaacataaccacggaacgagcaga

SEQ ID NO: 5515655 - DNA, 25 bp, Homo sapien
ttgaagagagtcatatactatagtc

SEQ ID NO: 5515656 - DNA, 25 bp, Homo sapien
tgttttattcagacagggttcattc

SEQ ID NO: 5515657 - DNA, 25 bp, Homo sapien
gacagggttcattcaaggaaaggca

SEQ ID NO: 5515658 - DNA, 25 bp, Homo sapien
ttgacacatctgaaccaaagcattc

SEQ ID NO: 5515659 - DNA, 25 bp, Homo sapien
ccatgaaattctcagatagtaatcc

SEQ ID NO: 5515660 - DNA, 25 bp, Homo sapien
atagtcttaaacataaccacggaac

SEQ ID NO: 5515661 - DNA, 25 bp, Homo sapien
gataggacacgagagtctgaaattc

SEQ ID NO: 5515662 - DNA, 25 bp, Homo sapien
ttgcctggccgtctctcccctgtct

SEQ ID NO: 5515663 - DNA, 25 bp, Homo sapien
catatccgcaagttcactggcactc

SEQ ID NO: 5515664 - DNA, 25 bp, Homo sapien
tggcactcttctggcacctgggcaa

SEQ ID NO: 5515665 - DNA, 25 bp, Homo sapien
atgcccaaaaggccttacgtgaaat

SEQ ID NO: 5515666 - DNA, 25 bp, Homo sapien
accagcttgaagtggtttgagaagc

SEQ ID NO: 5515667 - DNA, 25 bp, Homo sapien
gtactcatgacttgagagacgtgga

SEQ ID NO: 5515668 - DNA, 25 bp, Homo sapien
gtttgagaagctggaagcaaacatg

SEQ ID NO: 5515669 - DNA, 25 bp, Homo sapien
gaaatggtcagcctaggataggaca

SEQ ID NO: 5515670 - DNA, 25 bp, Homo sapien
acgtgaaattccagcccagagtact

SEQ ID NO: 5515671 - DNA, 25 bp, Homo sapien
gccacggaagcatgaactgtatcct

SEQ ID NO: 5515672 - DNA, 25 bp, Homo sapien
atatggagaatgtgttaaaagagca

SEQ ID NO: 5515673 - DNA, 25 bp, Homo sapien
aggagcaggtgtgattctacaaatt

SEQ ID NO: 5515674 - DNA, 25 bp, Homo sapien
ggggaagtaacaggtctattgtgtg

SEQ ID NO: 5515675 - DNA, 25 bp, Homo sapien
cagaatgatggaagcctggtctttg

SEQ ID NO: 5515676 - DNA, 25 bp, Homo sapien
aattcaatatgaggcaccagtggga

SEQ ID NO: 5515677 - DNA, 25 bp, Homo sapien
ttggtctatagtttgtgaggttcac

SEQ ID NO: 5515678 - DNA, 25 bp, Homo sapien
catgaaatattaggagtgctcgtga

SEQ ID NO: 5515679 - DNA, 25 bp, Homo sapien
tattaaaattgtgcgagtagtcttc

SEQ ID NO: 5515680 - DNA, 25 bp, Homo sapien
gaagtcaattggatgagcacatgaa

SEQ ID NO: 5515681 - DNA, 25 bp, Homo sapien
gacatatgcattgcagtgatggcat

SEQ ID NO: 5515682 - DNA, 25 bp, Homo sapien
gacaactttggggtcagtgaattat

SEQ ID NO: 5515683 - DNA, 25 bp, Homo sapien
agcaggccgcttactacggacagac

SEQ ID NO: 5515684 - DNA, 25 bp, Homo sapien
atgccgggccctcactctctcgcct

SEQ ID NO: 5515685 - DNA, 25 bp, Homo sapien
ccgcttactacggacagaccccagg

SEQ ID NO: 5515686 - DNA, 25 bp, Homo sapien
atattacagacagcaggccgcttac

SEQ ID NO: 5515687 - DNA, 25 bp, Homo sapien
attttgttctgtttgggggcttctg

SEQ ID NO: 5515688 - DNA, 25 bp, Homo sapien
tcaatgaatcgaatgaatgtgaact

SEQ ID NO: 5515689 - DNA, 25 bp, Homo sapien
ctctctcgcctgttctgtgtctcac

SEQ ID NO: 5515690 - DNA, 25 bp, Homo sapien
gcaggctcaatgaatcgaatgaatg

SEQ ID NO: 5515691 - DNA, 25 bp, Homo sapien
ccagccagactacagtgccgcctgg

SEQ ID NO: 5515692 - DNA, 25 bp, Homo sapien
gcctgggaagagtattacaaaaaga

SEQ ID NO: 5515693 - DNA, 25 bp, Homo sapien
agtattacaaaaagatcggccagca

SEQ ID NO: 5515694 - DNA, 25 bp, Homo sapien
ccgacccctctacgccacctagacc

SEQ ID NO: 5515695 - DNA, 25 bp, Homo sapien
ggtctaggtggcgtagaggggtcgg

SEQ ID NO: 5515696 - DNA, 25 bp, Homo sapien
cgcactctcgcgcccccacagaagt

SEQ ID NO: 5515697 - DNA, 25 bp, Homo sapien
acttctgtgggggcgcgagagtgcg

SEQ ID NO: 5515698 - DNA, 25 bp, Homo sapien
tggtcgggccttttgagctcaaaca

SEQ ID NO: 5515699 - DNA, 25 bp, Homo sapien
agacatccatgtgtacagtatcaaa

SEQ ID NO: 5515700 - DNA, 25 bp, Homo sapien
atcaaccgaaatactggatggaggg

SEQ ID NO: 5515701 - DNA, 25 bp, Homo sapien
gcacttgacaagttagcacggttaa

SEQ ID NO: 5515702 - DNA, 25 bp, Homo sapien
accaaggttactggtattgcagttc

SEQ ID NO: 5515703 - DNA, 25 bp, Homo sapien
agaggaaactccataaatctaggtt

SEQ ID NO: 5515704 - DNA, 25 bp, Homo sapien
gaatataacatgatctagaggaaac

SEQ ID NO: 5515705 - DNA, 25 bp, Homo sapien
agaaaatgaaatcaaccgaaatact

SEQ ID NO: 5515706 - DNA, 25 bp, Homo sapien
actggtattgcagttcgtggaaggg

SEQ ID NO: 5515707 - DNA, 25 bp, Homo sapien
aacaccacgtacaaacgggagtaga

SEQ ID NO: 5515708 - DNA, 25 bp, Homo sapien
atataatactagaactctgaggccg

SEQ ID NO: 5515709 - DNA, 25 bp, Homo sapien
tagatatgaataaagaagatggctc

SEQ ID NO: 5515710 - DNA, 25 bp, Homo sapien
agatgcctaaccacacaatgtagat

SEQ ID NO: 5515711 - DNA, 25 bp, Homo sapien
tttgtgactcagctagtgaccatta

SEQ ID NO: 5515712 - DNA, 25 bp, Homo sapien
aagatggctcagaagagtgtactag

SEQ ID NO: 5515713 - DNA, 25 bp, Homo sapien
ctgggaagtagtgatgcctatcttc

SEQ ID NO: 5515714 - DNA, 25 bp, Homo sapien
tttccaggggcatctctgggaagta

SEQ ID NO: 5515715 - DNA, 25 bp, Homo sapien
acacactactaggatttgaaaaact

SEQ ID NO: 5515716 - DNA, 25 bp, Homo sapien
gctttttggcaagacagaaaaaaca

SEQ ID NO: 5515717 - DNA, 25 bp, Homo sapien
tctttgaggtgtgctgctttttggc

SEQ ID NO: 5515718 - DNA, 25 bp, Homo sapien
tgtgacaccacataacagatgccta

SEQ ID NO: 5515719 - DNA, 25 bp, Homo sapien
tccctcggaagcactaataacccta

SEQ ID NO: 5515720 - DNA, 25 bp, Homo sapien
atctgttggacagagtcagcaatcc

SEQ ID NO: 5515721 - DNA, 25 bp, Homo sapien
tcagcaatcctaccagacaaaactc

SEQ ID NO: 5515722 - DNA, 25 bp, Homo sapien
aggttagcagcactcccaaagaagc

SEQ ID NO: 5515723 - DNA, 25 bp, Homo sapien
tgtttaacctaatgggctgaggaag

SEQ ID NO: 5515724 - DNA, 25 bp, Homo sapien
ttttaaaacagaggtatgtggcagt

SEQ ID NO: 5515725 - DNA, 25 bp, Homo sapien
gaaatcacctagggcagccaagctg

SEQ ID NO: 5515726 - DNA, 25 bp, Homo sapien
tgaagaaccatgtaactctgctgcc

SEQ ID NO: 5515727 - DNA, 25 bp, Homo sapien
gtggctgtgcattgctgtgtgtcct

SEQ ID NO: 5515728 - DNA, 25 bp, Homo sapien
aggagcttgagaaatcacctagggc

SEQ ID NO: 5515729 - DNA, 25 bp, Homo sapien
tctgctgccttgcacggtccccttt

SEQ ID NO: 5515730 - DNA, 25 bp, Homo sapien
gaggcagccaggaaattatacccat

SEQ ID NO: 5515731 - DNA, 25 bp, Homo sapien
gaaaaccaagcccagttcaggcaaa

SEQ ID NO: 5515732 - DNA, 25 bp, Homo sapien
ttggcagatgaaagataatagaaca

SEQ ID NO: 5515733 - DNA, 25 bp, Homo sapien
atacctgatgctcacaccaccttcc

SEQ ID NO: 5515734 - DNA, 25 bp, Homo sapien
ggttattctgggcacagcaatggtg

SEQ ID NO: 5515735 - DNA, 25 bp, Homo sapien
gaaaaggtcattccccaatggttgc

SEQ ID NO: 5515736 - DNA, 25 bp, Homo sapien
ggctttcttgtgggaagcctggatg

SEQ ID NO: 5515737 - DNA, 25 bp, Homo sapien
atgggactaggaaaacacatgtttc

SEQ ID NO: 5515738 - DNA, 25 bp, Homo sapien
ggtttagacccacatcatggctttc

SEQ ID NO: 5515739 - DNA, 25 bp, Homo sapien
tgcagatatcagacaagatttaatc

SEQ ID NO: 5515740 - DNA, 25 bp, Homo sapien
ataagctctgcatctctgggtcttc

SEQ ID NO: 5515741 - DNA, 25 bp, Homo sapien
gttcaggcaaagagttcctttcttc

SEQ ID NO: 5515742 - DNA, 25 bp, Homo sapien
cttaaagcaaggagaaccatcccaa

SEQ ID NO: 5515743 - DNA, 25 bp, Homo sapien
tgtctagtgaggatcacggtctgca

SEQ ID NO: 5515744 - DNA, 25 bp, Homo sapien
cccgtctcctatcaaggcttaaagc

SEQ ID NO: 5515745 - DNA, 25 bp, Homo sapien
aacactgtcccctttttggcacctg

SEQ ID NO: 5515746 - DNA, 25 bp, Homo sapien
agtctgcagccttaagcagttaccc

SEQ ID NO: 5515747 - DNA, 25 bp, Homo sapien
aaggtcacacattttctgatccagc

SEQ ID NO: 5515748 - DNA, 25 bp, Homo sapien
ctccgcatgaaaacccatggcttac

SEQ ID NO: 5515749 - DNA, 25 bp, Homo sapien
gatccagcaatgccccaatcagatt

SEQ ID NO: 5515750 - DNA, 25 bp, Homo sapien
ttaagcagttaccctctcagacaac

SEQ ID NO: 5515751 - DNA, 25 bp, Homo sapien
agggttggcctccccgtctcctatc

SEQ ID NO: 5515752 - DNA, 25 bp, Homo sapien
cctctgtctagtgaggatcacggtc

SEQ ID NO: 5515753 - DNA, 25 bp, Homo sapien
gggtcgccttcctccacacagccac

SEQ ID NO: 5515754 - DNA, 25 bp, Homo sapien
tccctgctggtcttgggacaagcga

SEQ ID NO: 5515755 - DNA, 25 bp, Homo sapien
cgaggcgcttctagctgataggaca

SEQ ID NO: 5515756 - DNA, 25 bp, Homo sapien
tgatctacagcggcagtatattcac

SEQ ID NO: 5515757 - DNA, 25 bp, Homo sapien
ttaggagctcgcacctccctgcctc

SEQ ID NO: 5515758 - DNA, 25 bp, Homo sapien
ggaagcatttcctgttgaaggggat

SEQ ID NO: 5515759 - DNA, 25 bp, Homo sapien
acgggctcggacagttccctgtccc

SEQ ID NO: 5515760 - DNA, 25 bp, Homo sapien
ctgtgagatgccatgcacctgttgc

SEQ ID NO: 5515761 - DNA, 25 bp, Homo sapien
gttgcagctgtcagcggttgttgcc

SEQ ID NO: 5515762 - DNA, 25 bp, Homo sapien
aggaaaccaatcttgtgctgggggt

SEQ ID NO: 5515763 - DNA, 25 bp, Homo sapien
cccttgttggccatggaaaagatac

SEQ ID NO: 5515764 - DNA, 25 bp, Homo sapien
atgctttagcatgtatcagtccctc

SEQ ID NO: 5515765 - DNA, 25 bp, Homo sapien
atacgttgccttttgtgtctgcctt

SEQ ID NO: 5515766 - DNA, 25 bp, Homo sapien
tccagatgcatataaatccgaagtt

SEQ ID NO: 5515767 - DNA, 25 bp, Homo sapien
tatcctagtgaagcgtacagaatgc

SEQ ID NO: 5515768 - DNA, 25 bp, Homo sapien
gcaaaaatgcgctcaaggctcatcc

SEQ ID NO: 5515769 - DNA, 25 bp, Homo sapien
accatgttgtgcaatcatccccaat

SEQ ID NO: 5515770 - DNA, 25 bp, Homo sapien
aaatgcactcatgcaatacgttgcc

SEQ ID NO: 5515771 - DNA, 25 bp, Homo sapien
gcgtacagaatgctattgttatgac

SEQ ID NO: 5515772 - DNA, 25 bp, Homo sapien
cacttggcaaaaatgcgctcaaggc

SEQ ID NO: 5515773 - DNA, 25 bp, Homo sapien
catccccaataagtagttccagaac

SEQ ID NO: 5515774 - DNA, 25 bp, Homo sapien
accattagtgacattgagtaccttc

SEQ ID NO: 5515775 - DNA, 25 bp, Homo sapien
caggtgattagtgcctggtgtgtgg

SEQ ID NO: 5515776 - DNA, 25 bp, Homo sapien
aacagtgtgtagagagcatagtatt

SEQ ID NO: 5515777 - DNA, 25 bp, Homo sapien
aataaaaaggcaggagctgattaca

SEQ ID NO: 5515778 - DNA, 25 bp, Homo sapien
gagatgttggttaaatcggatgcat

SEQ ID NO: 5515779 - DNA, 25 bp, Homo sapien
aagatacagtgcagatcacctttcc

SEQ ID NO: 5515780 - DNA, 25 bp, Homo sapien
cagtaatgtctgagaaaggaccctg

SEQ ID NO: 5515781 - DNA, 25 bp, Homo sapien
agaagatcaacacacagctaacgcc

SEQ ID NO: 5515782 - DNA, 25 bp, Homo sapien
gaaataaaatggctagaactctaac

SEQ ID NO: 5515783 - DNA, 25 bp, Homo sapien
tcatcaaaggaagcatagccaacaa

SEQ ID NO: 5515784 - DNA, 25 bp, Homo sapien
tagccaacaaacccaagatacagtg

SEQ ID NO: 5515785 - DNA, 25 bp, Homo sapien
gccatatacagcatgcagtaatgtc

SEQ ID NO: 5515786 - DNA, 25 bp, Homo sapien
ggctactccccaagaaatgacacat

SEQ ID NO: 5515787 - DNA, 25 bp, Homo sapien
atcactctgaccaaaaatgactgtc

SEQ ID NO: 5515788 - DNA, 25 bp, Homo sapien
cagcttaagctgattccaagatttc

SEQ ID NO: 5515789 - DNA, 25 bp, Homo sapien
aactgaaggcacagaacaaaccaaa

SEQ ID NO: 5515790 - DNA, 25 bp, Homo sapien
tatgaacaagtttccgtcaccaaat

SEQ ID NO: 5515791 - DNA, 25 bp, Homo sapien
atgccaccaggttcaatgtaagtat

SEQ ID NO: 5515792 - DNA, 25 bp, Homo sapien
aggatatttgttgatggatggctac

SEQ ID NO: 5515793 - DNA, 25 bp, Homo sapien
gttgatggatggctactccccaaga

SEQ ID NO: 5515794 - DNA, 25 bp, Homo sapien
aaaatgagagtgaagaaatttcttc

SEQ ID NO: 5515795 - DNA, 25 bp, Homo sapien
gagcagggaaaaaacttgttccatg

SEQ ID NO: 5515796 - DNA, 25 bp, Homo sapien
aaatactcattatgccaccaggttc

SEQ ID NO: 5515797 - DNA, 25 bp, Homo sapien
tgctcctagtgtaggagggacaagg

SEQ ID NO: 5515798 - DNA, 25 bp, Homo sapien
agaccccaaactccgagaccaaaga

SEQ ID NO: 5515799 - DNA, 25 bp, Homo sapien
agctttgggcttgcccgagagagag

SEQ ID NO: 5515800 - DNA, 25 bp, Homo sapien
cctgcctaacctggacccacacctc

SEQ ID NO: 5515801 - DNA, 25 bp, Homo sapien
cacccaccagttagagactgagatt

SEQ ID NO: 5515802 - DNA, 25 bp, Homo sapien
tttttcacatgggcagcagaagatg

SEQ ID NO: 5515803 - DNA, 25 bp, Homo sapien
agcaggacagaaacatatagcagag

SEQ ID NO: 5515804 - DNA, 25 bp, Homo sapien
ggagtgtcattggagccccctcctc

SEQ ID NO: 5515805 - DNA, 25 bp, Homo sapien
gttcaccctagccctggggatagga

SEQ ID NO: 5515806 - DNA, 25 bp, Homo sapien
agagatggggctacttgaattcttg

SEQ ID NO: 5515807 - DNA, 25 bp, Homo sapien
ttgcattgaatgtgccttgggtctt

SEQ ID NO: 5515808 - DNA, 25 bp, Homo sapien
tacacagcagatacaaaagtacctt

SEQ ID NO: 5515809 - DNA, 25 bp, Homo sapien
tttgatggtagatttcagagtaagc

SEQ ID NO: 5515810 - DNA, 25 bp, Homo sapien
aagaagtcaggttaaaaggctttgc

SEQ ID NO: 5515811 - DNA, 25 bp, Homo sapien
cagccttggctcaaaccctggtctc

SEQ ID NO: 5515812 - DNA, 25 bp, Homo sapien
ttaaggtcacatgattgggcatttg

SEQ ID NO: 5515813 - DNA, 25 bp, Homo sapien
gcagtggcagaacagcaattactta

SEQ ID NO: 5515814 - DNA, 25 bp, Homo sapien
accaaagaaagatctgcttataacc

SEQ ID NO: 5515815 - DNA, 25 bp, Homo sapien
agaaatcagattattgggctgctac

SEQ ID NO: 5515816 - DNA, 25 bp, Homo sapien
accatatattccaaggctcagcccc

SEQ ID NO: 5515817 - DNA, 25 bp, Homo sapien
ggaccgtacagttcaagctgcccct

SEQ ID NO: 5515818 - DNA, 25 bp, Homo sapien
cagacttgggtaaaacaagtgtgtt

SEQ ID NO: 5515819 - DNA, 25 bp, Homo sapien
tgcgacagcagatttcctgcgggcc

SEQ ID NO: 5515820 - DNA, 25 bp, Homo sapien
cacgaaaacagttcattcaggtatg

SEQ ID NO: 5515821 - DNA, 25 bp, Homo sapien
cacaagaaaccacagacttcaaccc

SEQ ID NO: 5515822 - DNA, 25 bp, Homo sapien
ctctttgctaggtcccctggtttcc

SEQ ID NO: 5515823 - DNA, 25 bp, Homo sapien
tgtttagagaaagcttctgggtgtg

SEQ ID NO: 5515824 - DNA, 25 bp, Homo sapien
tgttcagcgccttgataggggatag

SEQ ID NO: 5515825 - DNA, 25 bp, Homo sapien
gggtgatcaaagcactcacgaaaac

SEQ ID NO: 5515826 - DNA, 25 bp, Homo sapien
gaagtaagtcaaagccctcctcttg

SEQ ID NO: 5515827 - DNA, 25 bp, Homo sapien
tgtttctaggatactggtgaagttg

SEQ ID NO: 5515828 - DNA, 25 bp, Homo sapien
gcgggccacctgttcagcgccttga

SEQ ID NO: 5515829 - DNA, 25 bp, Homo sapien
agatccacaggacccttctactggt

SEQ ID NO: 5515830 - DNA, 25 bp, Homo sapien
acaaaaatgattaaaggtgctttag

SEQ ID NO: 5515831 - DNA, 25 bp, Homo sapien
gataaaagatagacaaccaactgct

SEQ ID NO: 5515832 - DNA, 25 bp, Homo sapien
gctgcttgcaggtggaatgtcttta

SEQ ID NO: 5515833 - DNA, 25 bp, Homo sapien
gtctttaccagaagtgcctgagggc

SEQ ID NO: 5515834 - DNA, 25 bp, Homo sapien
aatcggcaaaccacagcagtgcttt

SEQ ID NO: 5515835 - DNA, 25 bp, Homo sapien
taaatggaccataaatcggcaaacc

SEQ ID NO: 5515836 - DNA, 25 bp, Homo sapien
taggaatacaataaagaggttctgc

SEQ ID NO: 5515837 - DNA, 25 bp, Homo sapien
aatgttagccaaagttcaaagtgta

SEQ ID NO: 5515838 - DNA, 25 bp, Homo sapien
agccagataaacccgccaaagcctt

SEQ ID NO: 5515839 - DNA, 25 bp, Homo sapien
tgaactttccagaagaagcacccta

SEQ ID NO: 5515840 - DNA, 25 bp, Homo sapien
tgagggccccactcctactccatca

SEQ ID NO: 5515841 - DNA, 25 bp, Homo sapien
gacagtacaggagataactttattg

SEQ ID NO: 5515842 - DNA, 25 bp, Homo sapien
tcttcagctggctctggcatgaatt

SEQ ID NO: 5515843 - DNA, 25 bp, Homo sapien
aggggacagcccggctctctcttca

SEQ ID NO: 5515844 - DNA, 25 bp, Homo sapien
tgcctaaaacagtatggaggcgggg

SEQ ID NO: 5515845 - DNA, 25 bp, Homo sapien
aacaaaaaagcattagaaagtggga

SEQ ID NO: 5515846 - DNA, 25 bp, Homo sapien
taaaatgaattactgaggggacagc

SEQ ID NO: 5515847 - DNA, 25 bp, Homo sapien
tagcaggggttggaattcattttga

SEQ ID NO: 5515848 - DNA, 25 bp, Homo sapien
tccacctgaggaacaccatgcattt

SEQ ID NO: 5515849 - DNA, 25 bp, Homo sapien
gcaaatggcattgaacagatgaatc

SEQ ID NO: 5515850 - DNA, 25 bp, Homo sapien
gcatttgagaaacacggactctgtc

SEQ ID NO: 5515851 - DNA, 25 bp, Homo sapien
tctgtcacataaacggtgctgccta

SEQ ID NO: 5515852 - DNA, 25 bp, Homo sapien
gcatacagaatagagtaccccaacc

SEQ ID NO: 5515853 - DNA, 25 bp, Homo sapien
aggcctgagaatagcttgagacaca

SEQ ID NO: 5515854 - DNA, 25 bp, Homo sapien
agcacactcacggcttgagacatcc

SEQ ID NO: 5515855 - DNA, 25 bp, Homo sapien
tagagaaacatggcataaatgatcc

SEQ ID NO: 5515856 - DNA, 25 bp, Homo sapien
ctaccaacgagatgatgttgccacc

SEQ ID NO: 5515857 - DNA, 25 bp, Homo sapien
gaatgctgggtttacctgcaggtag

SEQ ID NO: 5515858 - DNA, 25 bp, Homo sapien
gcctagggattatggaactggttta

SEQ ID NO: 5515859 - DNA, 25 bp, Homo sapien
atgtacatcagtgtgcaaaagtgac

SEQ ID NO: 5515860 - DNA, 25 bp, Homo sapien
aatccctggagtacaggcctaggga

SEQ ID NO: 5515861 - DNA, 25 bp, Homo sapien
atggagaatgcttaaagaatgagcc

SEQ ID NO: 5515862 - DNA, 25 bp, Homo sapien
ggaactggtttaagcatggagaatg

SEQ ID NO: 5515863 - DNA, 25 bp, Homo sapien
gagtattccacgtcccgcggcttcc

SEQ ID NO: 5515864 - DNA, 25 bp, Homo sapien
accccaactctcctgagcgcgtgac

SEQ ID NO: 5515865 - DNA, 25 bp, Homo sapien
aactattgtgagtcgaggtatcatt

SEQ ID NO: 5515866 - DNA, 25 bp, Homo sapien
ggcccgggagctcatgtactcggga

SEQ ID NO: 5515867 - DNA, 25 bp, Homo sapien
gtactcgggagccctgctcttcttc

SEQ ID NO: 5515868 - DNA, 25 bp, Homo sapien
gtgccaacatgctggtggagtattc

SEQ ID NO: 5515869 - DNA, 25 bp, Homo sapien
cgagctgctggaaaatctggctaaa

SEQ ID NO: 5515870 - DNA, 25 bp, Homo sapien
gcgcgtgacctttgtgtccagagcc

SEQ ID NO: 5515871 - DNA, 25 bp, Homo sapien
cattttctgcactcagcggacgggg

SEQ ID NO: 5515872 - DNA, 25 bp, Homo sapien
tgttcagcctgatggaccccaactc

SEQ ID NO: 5515873 - DNA, 25 bp, Homo sapien
agcaaaacagtgcagcagacttgtc

SEQ ID NO: 5515874 - DNA, 25 bp, Homo sapien
agaacgtcgggtatccaaatgtttc

SEQ ID NO: 5515875 - DNA, 25 bp, Homo sapien
ccaaacatgagctggttgtccgaga

SEQ ID NO: 5515876 - DNA, 25 bp, Homo sapien
ggcaggaagcccacggtattcctga

SEQ ID NO: 5515877 - DNA, 25 bp, Homo sapien
tgggggtcctctttgatggagcttt

SEQ ID NO: 5515878 - DNA, 25 bp, Homo sapien
atgtgacagttggccttgagtagtt

SEQ ID NO: 5515879 - DNA, 25 bp, Homo sapien
attcctgacttggagtcgagggaga

SEQ ID NO: 5515880 - DNA, 25 bp, Homo sapien
cagtgtcccaccagctgctaccctg

SEQ ID NO: 5515881 - DNA, 25 bp, Homo sapien
aactattgccgggccaagtgtccag

SEQ ID NO: 5515882 - DNA, 25 bp, Homo sapien
taagcagacattccagagctcacag

SEQ ID NO: 5515883 - DNA, 25 bp, Homo sapien
aggctagaagccagcactcagcttc

SEQ ID NO: 5515884 - DNA, 25 bp, Homo sapien
gagctcacagatcagtgtcccacca

SEQ ID NO: 5515885 - DNA, 25 bp, Homo sapien
catgatcgctcaaagccgagcacgc

SEQ ID NO: 5515886 - DNA, 25 bp, Homo sapien
gcacgtcaaggacatcccactccgc

SEQ ID NO: 5515887 - DNA, 25 bp, Homo sapien
ggggcacgctctgcagttgagctat

SEQ ID NO: 5515888 - DNA, 25 bp, Homo sapien
tatctggaaaacagttgcgcagtgc

SEQ ID NO: 5515889 - DNA, 25 bp, Homo sapien
taatggccagccaatgaaaaccaac

SEQ ID NO: 5515890 - DNA, 25 bp, Homo sapien
agttgcgcagtgcgtgcttaatggc

SEQ ID NO: 5515891 - DNA, 25 bp, Homo sapien
ctcaacaggcaaaaataagatattc

SEQ ID NO: 5515892 - DNA, 25 bp, Homo sapien
acaggcacttcccacggctgagttc

SEQ ID NO: 5515893 - DNA, 25 bp, Homo sapien
ctggcaccagcacaaggctttagac

SEQ ID NO: 5515894 - DNA, 25 bp, Homo sapien
tggctccgatataaataatgggcta

SEQ ID NO: 5515895 - DNA, 25 bp, Homo sapien
tcaaaagaagttaaatgggagatat

SEQ ID NO: 5515896 - DNA, 25 bp, Homo sapien
tgcaagcccttcgaaagtgagattt

SEQ ID NO: 5515897 - DNA, 25 bp, Homo sapien
atgtccttgacgtgctgaaagacgg

SEQ ID NO: 5515898 - DNA, 25 bp, Homo sapien
taaagccttgtgctggtgccagtag

SEQ ID NO: 5515899 - DNA, 25 bp, Homo sapien
tcataaaggtgccaaaaccaggtgt

SEQ ID NO: 5515900 - DNA, 25 bp, Homo sapien
tttccagatacgggtttatagccca

SEQ ID NO: 5515901 - DNA, 25 bp, Homo sapien
tgtccccagcggttggcctctttaa

SEQ ID NO: 5515902 - DNA, 25 bp, Homo sapien
atcggagccataaacttgaacaata

SEQ ID NO: 5515903 - DNA, 25 bp, Homo sapien
ggccattaagcacgcactgcgcaac

SEQ ID NO: 5515904 - DNA, 25 bp, Homo sapien
cggctttgagcgatcatggagctct

SEQ ID NO: 5515905 - DNA, 25 bp, Homo sapien
cagagcgtgccccttagagctcctg

SEQ ID NO: 5515906 - DNA, 25 bp, Homo sapien
gctcaactgcagagcgtgcccctta

SEQ ID NO: 5515907 - DNA, 25 bp, Homo sapien
aagagggaaaaatgtcaaactattg

SEQ ID NO: 5515908 - DNA, 25 bp, Homo sapien
attggtcacagtgaaacacagggct

SEQ ID NO: 5515909 - DNA, 25 bp, Homo sapien
ctgagcaatccatgatgagtgtgtg

SEQ ID NO: 5515910 - DNA, 25 bp, Homo sapien
cagtgaccaggagtccttaggctac

SEQ ID NO: 5515911 - DNA, 25 bp, Homo sapien
ccagtgacatgctccaagttaggcc

SEQ ID NO: 5515912 - DNA, 25 bp, Homo sapien
cacagggctgacaacccatccagga

SEQ ID NO: 5515913 - DNA, 25 bp, Homo sapien
cagctctgccctaaaggaactctga

SEQ ID NO: 5515914 - DNA, 25 bp, Homo sapien
gcagccaccctacccagtgaccagg

SEQ ID NO: 5515915 - DNA, 25 bp, Homo sapien
taggctacctggatgcaagtcttgc

SEQ ID NO: 5515916 - DNA, 25 bp, Homo sapien
atgatctcaatgtaaaagagggaaa

SEQ ID NO: 5515917 - DNA, 25 bp, Homo sapien
ggcctggagccttcccctgcctctt

SEQ ID NO: 5515918 - DNA, 25 bp, Homo sapien
aagccataatcacagatatgcttat

SEQ ID NO: 5515919 - DNA, 25 bp, Homo sapien
aggggtccccaaccagatataagcc

SEQ ID NO: 5515920 - DNA, 25 bp, Homo sapien
aataacagaactgtgattgagaaat

SEQ ID NO: 5515921 - DNA, 25 bp, Homo sapien
ctccttaccaaactttggggcacaa

SEQ ID NO: 5515922 - DNA, 25 bp, Homo sapien
gggcacaaaggcctttcaggttgaa

SEQ ID NO: 5515923 - DNA, 25 bp, Homo sapien
ttaatgttgtaaacctgtaggtctc

SEQ ID NO: 5515924 - DNA, 25 bp, Homo sapien
gccgaatttcagtctaccatgtgcc

SEQ ID NO: 5515925 - DNA, 25 bp, Homo sapien
aacctgtactaaaaagaatggctta

SEQ ID NO: 5515926 - DNA, 25 bp, Homo sapien
tgcacagtagctgttgccgaatttc

SEQ ID NO: 5515927 - DNA, 25 bp, Homo sapien
actgtccaatcaagtattggccaat

SEQ ID NO: 5515928 - DNA, 25 bp, Homo sapien
ttgagaaatggagcttaacctgtac

SEQ ID NO: 5515929 - DNA, 25 bp, Homo sapien
gtcgggaagacatcactcatgaacc

SEQ ID NO: 5515930 - DNA, 25 bp, Homo sapien
caggacaggaacggttccagtctct

SEQ ID NO: 5515931 - DNA, 25 bp, Homo sapien
tccaggccagtccccgagatcctga

SEQ ID NO: 5515932 - DNA, 25 bp, Homo sapien
gtacaaagccacaataggagctgac

SEQ ID NO: 5515933 - DNA, 25 bp, Homo sapien
gtgtggccttctacagaggtgcaga

SEQ ID NO: 5515934 - DNA, 25 bp, Homo sapien
gaatgcacttaagcaggaaacggag

SEQ ID NO: 5515935 - DNA, 25 bp, Homo sapien
gtcacaatgcagatatgggacacag

SEQ ID NO: 5515936 - DNA, 25 bp, Homo sapien
atcatcctgggagattctggagtcg

SEQ ID NO: 5515937 - DNA, 25 bp, Homo sapien
caaaaccctagatagctggagagat

SEQ ID NO: 5515938 - DNA, 25 bp, Homo sapien
gtggatgacaggctagtcacaatgc

SEQ ID NO: 5515939 - DNA, 25 bp, Homo sapien
gaggtgcagactgctgcgttctggt

SEQ ID NO: 5515940 - DNA, 25 bp, Homo sapien
agaccacagaattcaccagataccc

SEQ ID NO: 5515941 - DNA, 25 bp, Homo sapien
tacgtaatgatggacaataaatgac

SEQ ID NO: 5515942 - DNA, 25 bp, Homo sapien
gctagacaccacagatacgtaatga

SEQ ID NO: 5515943 - DNA, 25 bp, Homo sapien
aatacgtgttcaggtagaagtaggt

SEQ ID NO: 5515944 - DNA, 25 bp, Homo sapien
gacatgatgtggagagttcacccac

SEQ ID NO: 5515945 - DNA, 25 bp, Homo sapien
gaggaatgtgctagacaccacagat

SEQ ID NO: 5515946 - DNA, 25 bp, Homo sapien
aaatacttatggagagagtcagtct

SEQ ID NO: 5515947 - DNA, 25 bp, Homo sapien
catgcatcacccagtagagacaaac

SEQ ID NO: 5515948 - DNA, 25 bp, Homo sapien
ggtagaagtaggtacaatgacagaa

SEQ ID NO: 5515949 - DNA, 25 bp, Homo sapien
accagatacccaagctgggtggtgc

SEQ ID NO: 5515950 - DNA, 25 bp, Homo sapien
agtctctccatttagtgggaaaccc

SEQ ID NO: 5515951 - DNA, 25 bp, Homo sapien
gaccctcaggggtccttggaccaca

SEQ ID NO: 5515952 - DNA, 25 bp, Homo sapien
acctgcagatatcctgggttgcggg

SEQ ID NO: 5515953 - DNA, 25 bp, Homo sapien
gtattaacagttgatgaagcagctt

SEQ ID NO: 5515954 - DNA, 25 bp, Homo sapien
gaagcagcttggcattgcctctctt

SEQ ID NO: 5515955 - DNA, 25 bp, Homo sapien
tggtgtggcagccgactttaaccca

SEQ ID NO: 5515956 - DNA, 25 bp, Homo sapien
ctcttttctcctagggaagggataa

SEQ ID NO: 5515957 - DNA, 25 bp, Homo sapien
gtgcatcagatagccaaggaaagtg

SEQ ID NO: 5515958 - DNA, 25 bp, Homo sapien
acattctagaacagagagagccatg

SEQ ID NO: 5515959 - DNA, 25 bp, Homo sapien
actgtctttttgtgaggcatggttg

SEQ ID NO: 5515960 - DNA, 25 bp, Homo sapien
gtgaggcatggttgtgttatgtcag

SEQ ID NO: 5515961 - DNA, 25 bp, Homo sapien
gttatgtcaggtgggagcctgattt

SEQ ID NO: 5515962 - DNA, 25 bp, Homo sapien
tatggttgttgagttttgtgtgagt

SEQ ID NO: 5515963 - DNA, 25 bp, Homo sapien
taagcccaaatcatcagtaatcacc

SEQ ID NO: 5515964 - DNA, 25 bp, Homo sapien
atgcagggttgttttatggttgttg

SEQ ID NO: 5515965 - DNA, 25 bp, Homo sapien
tatttctctgtgaggccccttgtta

SEQ ID NO: 5515966 - DNA, 25 bp, Homo sapien
gattctgaaacctggttaaagtcac

SEQ ID NO: 5515967 - DNA, 25 bp, Homo sapien
ccaacaattgttaatgacgctcagt

SEQ ID NO: 5515968 - DNA, 25 bp, Homo sapien
gtgtatttgtgtgtgcctctccttc

SEQ ID NO: 5515969 - DNA, 25 bp, Homo sapien
tgaacctgtaaaggtaaggcccaga

SEQ ID NO: 5515970 - DNA, 25 bp, Homo sapien
aaggattcagacagctataatgcta

SEQ ID NO: 5515971 - DNA, 25 bp, Homo sapien
ctggcctaccagagttccatggatt

SEQ ID NO: 5515972 - DNA, 25 bp, Homo sapien
gtaaaggtaaggcccagattctgaa

SEQ ID NO: 5515973 - DNA, 25 bp, Homo sapien
gatagcagtctcaggtagatgtgat

SEQ ID NO: 5515974 - DNA, 25 bp, Homo sapien
ggtggcatgaccaaaggctttctca

SEQ ID NO: 5515975 - DNA, 25 bp, Homo sapien
agcagggttattccacagatgccac

SEQ ID NO: 5515976 - DNA, 25 bp, Homo sapien
taacccacacaataaaaacatctac

SEQ ID NO: 5515977 - DNA, 25 bp, Homo sapien
tgtacaaataatgcacatagtgtct

SEQ ID NO: 5515978 - DNA, 25 bp, Homo sapien
taaagacagaatggtactggtagtc

SEQ ID NO: 5515979 - DNA, 25 bp, Homo sapien
gaccaaaggctttctcacgtgttac

SEQ ID NO: 5515980 - DNA, 25 bp, Homo sapien
tcacgtgttacattagcagggttat

SEQ ID NO: 5515981 - DNA, 25 bp, Homo sapien
ctgatattctgtaagcagaagagtg

SEQ ID NO: 5515982 - DNA, 25 bp, Homo sapien
ttccacagatgccacggagtaaaga

SEQ ID NO: 5515983 - DNA, 25 bp, Homo sapien
tttggcccagtgtctcacagggagg

SEQ ID NO: 5515984 - DNA, 25 bp, Homo sapien
cacgcacaaaccagcacaaaagcgc

SEQ ID NO: 5515985 - DNA, 25 bp, Homo sapien
agcacatctggtttccacaaatgcc

SEQ ID NO: 5515986 - DNA, 25 bp, Homo sapien
agcacacgcacaaaccagcacaaaa

SEQ ID NO: 5515987 - DNA, 25 bp, Homo sapien
tgccacttccccctaagctgccagc

SEQ ID NO: 5515988 - DNA, 25 bp, Homo sapien
ggggagacctgacctgtccttcctc

SEQ ID NO: 5515989 - DNA, 25 bp, Homo sapien
agctgccagcacatctggtttccac

SEQ ID NO: 5515990 - DNA, 25 bp, Homo sapien
ccatccaggactccaaaagcatagc

SEQ ID NO: 5515991 - DNA, 25 bp, Homo sapien
aatagagaggctccataggaattgg

SEQ ID NO: 5515992 - DNA, 25 bp, Homo sapien
gaggtaaaatagagaggctccatag

SEQ ID NO: 5515993 - DNA, 25 bp, Homo sapien
ctccccccagattcccatccaggac

SEQ ID NO: 5515994 - DNA, 25 bp, Homo sapien
aggctccataggaattgggaggagt

SEQ ID NO: 5515995 - DNA, 25 bp, Homo sapien
tccgacttcgcgctcctatgacgtt

SEQ ID NO: 5515996 - DNA, 25 bp, Homo sapien
aacgtcataggagcgcgaagtcgga

SEQ ID NO: 5515997 - DNA, 25 bp, Homo sapien
ggacctcaagtctgagggtgaggat

SEQ ID NO: 5515998 - DNA, 25 bp, Homo sapien
gaccctagaaggtctgatggccatc

SEQ ID NO: 5515999 - DNA, 25 bp, Homo sapien
ccaaaacacgacatctaggccaggc

SEQ ID NO: 5516000 - DNA, 25 bp, Homo sapien
tcagggacggtcacccatacctagg

SEQ ID NO: 5516001 - DNA, 25 bp, Homo sapien
tgatgagagggtcactagacaatta

SEQ ID NO: 5516002 - DNA, 25 bp, Homo sapien
ggtgaggatggctgaatctacctcg

SEQ ID NO: 5516003 - DNA, 25 bp, Homo sapien
attctacgacatgagacagagactc

SEQ ID NO: 5516004 - DNA, 25 bp, Homo sapien
cctcgcttatgtctcagggacggtc

SEQ ID NO: 5516005 - DNA, 25 bp, Homo sapien
ttccttcctgggcagggctgaatgt

SEQ ID NO: 5516006 - DNA, 25 bp, Homo sapien
gaaacttttaagggacacatgaata

SEQ ID NO: 5516007 - DNA, 25 bp, Homo sapien
gaaaacacagcatccaaaacacgac

SEQ ID NO: 5516008 - DNA, 25 bp, Homo sapien
tcagtaagcactaaatggtaagggc

SEQ ID NO: 5516009 - DNA, 25 bp, Homo sapien
atggatgcttttaaatagggaaatc

SEQ ID NO: 5516010 - DNA, 25 bp, Homo sapien
cccagctctaggagatgtgtctttc

SEQ ID NO: 5516011 - DNA, 25 bp, Homo sapien
ttaagaagacacaaacagctctagc

SEQ ID NO: 5516012 - DNA, 25 bp, Homo sapien
ccagtttagggtatggtctgtaaat

SEQ ID NO: 5516013 - DNA, 25 bp, Homo sapien
tgacttcatactaggactggccaat

SEQ ID NO: 5516014 - DNA, 25 bp, Homo sapien
tgctggtagcaagccagtaaggaat

SEQ ID NO: 5516015 - DNA, 25 bp, Homo sapien
aatgttagggacacattcccagctc

SEQ ID NO: 5516016 - DNA, 25 bp, Homo sapien
ggatccaaggcacaagcctggtttc

SEQ ID NO: 5516017 - DNA, 25 bp, Homo sapien
cagaaggcataaaggaactgtttca

SEQ ID NO: 5516018 - DNA, 25 bp, Homo sapien
tcctaaaaagactgagatcgtgatc

SEQ ID NO: 5516019 - DNA, 25 bp, Homo sapien
cgctcgctcctggagaccaacgaaa

SEQ ID NO: 5516020 - DNA, 25 bp, Homo sapien
gccagcaacagcaagaaacatagca

SEQ ID NO: 5516021 - DNA, 25 bp, Homo sapien
cccctcgcttatcctgtgggggccg

SEQ ID NO: 5516022 - DNA, 25 bp, Homo sapien
gacacgatgcgtcctgacacgctgc

SEQ ID NO: 5516023 - DNA, 25 bp, Homo sapien
gcggcaagaccactctggctcacat

SEQ ID NO: 5516024 - DNA, 25 bp, Homo sapien
aacatagcataaggtttgtgacatt

SEQ ID NO: 5516025 - DNA, 25 bp, Homo sapien
gccaagacaaatgatgtgcgagatg

SEQ ID NO: 5516026 - DNA, 25 bp, Homo sapien
gagaccaacgaaatcccctcgctta

SEQ ID NO: 5516027 - DNA, 25 bp, Homo sapien
gctgcaggattacttcgggcagagc

SEQ ID NO: 5516028 - DNA, 25 bp, Homo sapien
atctgcaacaaatgccaagacaaat

SEQ ID NO: 5516029 - DNA, 25 bp, Homo sapien
gtgcgagatgtcataaaacaagctc

SEQ ID NO: 5516030 - DNA, 25 bp, Homo sapien
agagaaaacttagcattagatcagc

SEQ ID NO: 5516031 - DNA, 25 bp, Homo sapien
ccatctgtaaagtctgcactgtgtc

SEQ ID NO: 5516032 - DNA, 25 bp, Homo sapien
tgtggggcatgttcaagcacctaca

SEQ ID NO: 5516033 - DNA, 25 bp, Homo sapien
tgaccgtcacaaatactagggctac

SEQ ID NO: 5516034 - DNA, 25 bp, Homo sapien
aatggtaaggtaaatgattccaaac

SEQ ID NO: 5516035 - DNA, 25 bp, Homo sapien
actgagtcagtacacagagaaaact

SEQ ID NO: 5516036 - DNA, 25 bp, Homo sapien
ttcatggaaggcttaactgtgatcc

SEQ ID NO: 5516037 - DNA, 25 bp, Homo sapien
ccacatgaatacagtgtagtgacac

SEQ ID NO: 5516038 - DNA, 25 bp, Homo sapien
ctagggctacaactgtgtctgtggg

SEQ ID NO: 5516039 - DNA, 25 bp, Homo sapien
taatggacaaagacaagacaagata

SEQ ID NO: 5516040 - DNA, 25 bp, Homo sapien
aagtcctctgagagcataatgctcc

SEQ ID NO: 5516041 - DNA, 25 bp, Homo sapien
attgatggagtcctgtagtagtttc

SEQ ID NO: 5516042 - DNA, 25 bp, Homo sapien
tgtgtagggtcaagttatttttata

SEQ ID NO: 5516043 - DNA, 25 bp, Homo sapien
actttgaatgttgctaaaaggacat

SEQ ID NO: 5516044 - DNA, 25 bp, Homo sapien
ctaaaaggacattttgtgtagggtc

SEQ ID NO: 5516045 - DNA, 25 bp, Homo sapien
actaaaagttggactcattgatgga

SEQ ID NO: 5516046 - DNA, 25 bp, Homo sapien
gctgtgtaagggcattcgtactcat

SEQ ID NO: 5516047 - DNA, 25 bp, Homo sapien
agtagtttcagtgttagatacagtt

SEQ ID NO: 5516048 - DNA, 25 bp, Homo sapien
atgcaccattcagacttgttagagt

SEQ ID NO: 5516049 - DNA, 25 bp, Homo sapien
tttagaatctgtgctgtgtaagggc

SEQ ID NO: 5516050 - DNA, 25 bp, Homo sapien
gatgtgggtttatgactgccaagtt

SEQ ID NO: 5516051 - DNA, 25 bp, Homo sapien
acttgttagagtagatgtgggttta

SEQ ID NO: 5516052 - DNA, 25 bp, Homo sapien
aaggggagaaaagatctattgttca

SEQ ID NO: 5516053 - DNA, 25 bp, Homo sapien
tatcaggctaggtaattttcacaaa

SEQ ID NO: 5516054 - DNA, 25 bp, Homo sapien
cacaagacagtatcccattagtttc

SEQ ID NO: 5516055 - DNA, 25 bp, Homo sapien
acaaaagtgtcaagagaacaaaata

SEQ ID NO: 5516056 - DNA, 25 bp, Homo sapien
tgagataactgtgtgaactagaaat

SEQ ID NO: 5516057 - DNA, 25 bp, Homo sapien
aaaaaagacagctttactaggtcac

SEQ ID NO: 5516058 - DNA, 25 bp, Homo sapien
ttcctaaaagcatgatccgacactc

SEQ ID NO: 5516059 - DNA, 25 bp, Homo sapien
aactcaactggcatctacacaagac

SEQ ID NO: 5516060 - DNA, 25 bp, Homo sapien
tagtttcagtggaatttgagataac

SEQ ID NO: 5516061 - DNA, 25 bp, Homo sapien
ttgacattctgctatgggaaacaat

SEQ ID NO: 5516062 - DNA, 25 bp, Homo sapien
aaataaggtagatgaagagttgtct

SEQ ID NO: 5516063 - DNA, 25 bp, Homo sapien
tagaattagtagacagaagccttgg

SEQ ID NO: 5516064 - DNA, 25 bp, Homo sapien
caagcaaaacacaagaccaatagaa

SEQ ID NO: 5516065 - DNA, 25 bp, Homo sapien
tttccagtagatatgttggaggggc

SEQ ID NO: 5516066 - DNA, 25 bp, Homo sapien
agtgcagtaaccaaagaacctaatg

SEQ ID NO: 5516067 - DNA, 25 bp, Homo sapien
tgttgttgagtgaagtactttccgc

SEQ ID NO: 5516068 - DNA, 25 bp, Homo sapien
gcatcagtaaatacaggtcaggaag

SEQ ID NO: 5516069 - DNA, 25 bp, Homo sapien
gagagagataaagttaaccagcaga

SEQ ID NO: 5516070 - DNA, 25 bp, Homo sapien
agagaagcaggcaaatgtgtcctgt

SEQ ID NO: 5516071 - DNA, 25 bp, Homo sapien
gacatgaatgccatctggaggatcc

SEQ ID NO: 5516072 - DNA, 25 bp, Homo sapien
tactttttgtgaacaggtgggcaac

SEQ ID NO: 5516073 - DNA, 25 bp, Homo sapien
tttccgctgaaatgggaaatgaacc

SEQ ID NO: 5516074 - DNA, 25 bp, Homo sapien
tcataataagagctttgtgaaaaac

SEQ ID NO: 5516075 - DNA, 25 bp, Homo sapien
aaggaagattcagtgtattggatgt

SEQ ID NO: 5516076 - DNA, 25 bp, Homo sapien
ttggagcatctaaagtgggtcatta

SEQ ID NO: 5516077 - DNA, 25 bp, Homo sapien
ccccactgcccaattctgctgaaca

SEQ ID NO: 5516078 - DNA, 25 bp, Homo sapien
tttggcagcttaacaggaatgaatg

SEQ ID NO: 5516079 - DNA, 25 bp, Homo sapien
aaagagtattggtgagaaatgcttc

SEQ ID NO: 5516080 - DNA, 25 bp, Homo sapien
tataagaaaagtcacccccactgcc

SEQ ID NO: 5516081 - DNA, 25 bp, Homo sapien
tctaagccaagaatccaaggtaagc

SEQ ID NO: 5516082 - DNA, 25 bp, Homo sapien
tacagtagtgccaaataaaccaaat

SEQ ID NO: 5516083 - DNA, 25 bp, Homo sapien
ctgaacattttaagccaaagagtat

SEQ ID NO: 5516084 - DNA, 25 bp, Homo sapien
tctcaagacatacatggaagggatg

SEQ ID NO: 5516085 - DNA, 25 bp, Homo sapien
tcacacatctgtgaaaggggaaggt

SEQ ID NO: 5516086 - DNA, 25 bp, Homo sapien
gcacccacagtacagaacctctcac

SEQ ID NO: 5516087 - DNA, 25 bp, Homo sapien
gtagcatgttttagccagaggtgga

SEQ ID NO: 5516088 - DNA, 25 bp, Homo sapien
gttaccactttgaagaaagcaaatc

SEQ ID NO: 5516089 - DNA, 25 bp, Homo sapien
gactcagcttgtattttgtggtgtt

SEQ ID NO: 5516090 - DNA, 25 bp, Homo sapien
acctctactcacaaagagatgctgt

SEQ ID NO: 5516091 - DNA, 25 bp, Homo sapien
tatgatgcacccacagtacagaacc

SEQ ID NO: 5516092 - DNA, 25 bp, Homo sapien
tttaaaaccgatcatgaaccacagc

SEQ ID NO: 5516093 - DNA, 25 bp, Homo sapien
gaaccacagcattactaacagggaa

SEQ ID NO: 5516094 - DNA, 25 bp, Homo sapien
attccaagtgtttaagactcagctt

SEQ ID NO: 5516095 - DNA, 25 bp, Homo sapien
taacagggaaaatgaacttttgctg

SEQ ID NO: 5516096 - DNA, 25 bp, Homo sapien
atgatattggacatggagtaaaggt

SEQ ID NO: 5516097 - DNA, 25 bp, Homo sapien
ccagccaaccttgaacgaccagttc

SEQ ID NO: 5516098 - DNA, 25 bp, Homo sapien
gccctagaagaaaccaaagcctaca

SEQ ID NO: 5516099 - DNA, 25 bp, Homo sapien
gctacacaaatctggaacgggtggc

SEQ ID NO: 5516100 - DNA, 25 bp, Homo sapien
gtggccgattactgcgagaacaact

SEQ ID NO: 5516101 - DNA, 25 bp, Homo sapien
ttggccaacaatgtcctgcagatgc

SEQ ID NO: 5516102 - DNA, 25 bp, Homo sapien
aaccaaagcctacaccacccaatcc

SEQ ID NO: 5516103 - DNA, 25 bp, Homo sapien
atacagtcagcagataagcagagag

SEQ ID NO: 5516104 - DNA, 25 bp, Homo sapien
gatatccaggcatcccagctacgaa

SEQ ID NO: 5516105 - DNA, 25 bp, Homo sapien
ccagctacgaaggatggaatcttca

SEQ ID NO: 5516106 - DNA, 25 bp, Homo sapien
gaaagttgcaagaagagaaattggt

SEQ ID NO: 5516107 - DNA, 25 bp, Homo sapien
gaatttcatcactggggaggaactc

SEQ ID NO: 5516108 - DNA, 25 bp, Homo sapien
aggaggctcccaagactctgacaca

SEQ ID NO: 5516109 - DNA, 25 bp, Homo sapien
gaggcccgtcatctgggtctgaagg

SEQ ID NO: 5516110 - DNA, 25 bp, Homo sapien
cagacaaggtaacagccaccaaaca

SEQ ID NO: 5516111 - DNA, 25 bp, Homo sapien
ttagctgcaaaagggaatcgtttaa

SEQ ID NO: 5516112 - DNA, 25 bp, Homo sapien
accacggagcatttcagtcaaggtc

SEQ ID NO: 5516113 - DNA, 25 bp, Homo sapien
gcagccacctcagcacacctcctcc

SEQ ID NO: 5516114 - DNA, 25 bp, Homo sapien
agggcgaacaatgcctctcagcagc

SEQ ID NO: 5516115 - DNA, 25 bp, Homo sapien
aactccagggtgttctaggacagtg

SEQ ID NO: 5516116 - DNA, 25 bp, Homo sapien
acacggacatcgagctaagctatga

SEQ ID NO: 5516117 - DNA, 25 bp, Homo sapien
tacagctgctccttggacagaggga

SEQ ID NO: 5516118 - DNA, 25 bp, Homo sapien
atctgaggccttagggtccttcggt

SEQ ID NO: 5516119 - DNA, 25 bp, Homo sapien
tgcaccgccaatccccccgtctctg

SEQ ID NO: 5516120 - DNA, 25 bp, Homo sapien
gcagatcaccaatgcgcagacgaaa

SEQ ID NO: 5516121 - DNA, 25 bp, Homo sapien
tgaaccttaggaatcccttggcacc

SEQ ID NO: 5516122 - DNA, 25 bp, Homo sapien
ggggggtctctggattattgttctg

SEQ ID NO: 5516123 - DNA, 25 bp, Homo sapien
gcccgttggcggattctcgatttcc

SEQ ID NO: 5516124 - DNA, 25 bp, Homo sapien
ggactgaccgctactgactgcaccg

SEQ ID NO: 5516125 - DNA, 25 bp, Homo sapien
agtgtccacgtctcctcgctgaacc

SEQ ID NO: 5516126 - DNA, 25 bp, Homo sapien
atgaagtgattctgagtatcggggg

SEQ ID NO: 5516127 - DNA, 25 bp, Homo sapien
taccgtcacctttgatgggctccac

SEQ ID NO: 5516128 - DNA, 25 bp, Homo sapien
gccgactgcgacctgcagatcacca

SEQ ID NO: 5516129 - DNA, 25 bp, Homo sapien
gatgaaaaaactaagaatcagactg

SEQ ID NO: 5516130 - DNA, 25 bp, Homo sapien
gcaacataggaatacttaataacac

SEQ ID NO: 5516131 - DNA, 25 bp, Homo sapien
cccccatcgtcacctaagacatttc

SEQ ID NO: 5516132 - DNA, 25 bp, Homo sapien
aacactgtaataactctatcatctc

SEQ ID NO: 5516133 - DNA, 25 bp, Homo sapien
tatttgccagtcagagtcaactttt

SEQ ID NO: 5516134 - DNA, 25 bp, Homo sapien
atcataggcagaaacataattatac

SEQ ID NO: 5516135 - DNA, 25 bp, Homo sapien
aaatcatgtgaatataaacagtatt

SEQ ID NO: 5516136 - DNA, 25 bp, Homo sapien
ttgcaaaatgcaacataggaatact

SEQ ID NO: 5516137 - DNA, 25 bp, Homo sapien
aacttcctcaacatcataggcagaa

SEQ ID NO: 5516138 - DNA, 25 bp, Homo sapien
ttgagcacctcctatattccagaac

SEQ ID NO: 5516139 - DNA, 25 bp, Homo sapien
attccagaaccaaaaacatgtttgt

SEQ ID NO: 5516140 - DNA, 25 bp, Homo sapien
aacaggaagggaatgcatctttttt

SEQ ID NO: 5516141 - DNA, 25 bp, Homo sapien
aaagcagggatgagactaactcatt

SEQ ID NO: 5516142 - DNA, 25 bp, Homo sapien
aaaaacatggtaagagtgtgaacag

SEQ ID NO: 5516143 - DNA, 25 bp, Homo sapien
acagataatccccagttgtcaccac

SEQ ID NO: 5516144 - DNA, 25 bp, Homo sapien
attcaagaacagtaaatttggggag

SEQ ID NO: 5516145 - DNA, 25 bp, Homo sapien
agaaaacccatgatgttacacttac

SEQ ID NO: 5516146 - DNA, 25 bp, Homo sapien
ttgattccgataactaatgacactt

SEQ ID NO: 5516147 - DNA, 25 bp, Homo sapien
aataaatagtttgagaatgtcattc

SEQ ID NO: 5516148 - DNA, 25 bp, Homo sapien
ctaatgacacttaaaaagcatctat

SEQ ID NO: 5516149 - DNA, 25 bp, Homo sapien
aatccaatacacaatcttagaacat

SEQ ID NO: 5516150 - DNA, 25 bp, Homo sapien
aatttggggagttacagataatccc

SEQ ID NO: 5516151 - DNA, 25 bp, Homo sapien
cagctgagatttgccagcatccccc

SEQ ID NO: 5516152 - DNA, 25 bp, Homo sapien
ttccgcatatacaggagaatgaggt

SEQ ID NO: 5516153 - DNA, 25 bp, Homo sapien
ctcctgaccactcagccctggagct

SEQ ID NO: 5516154 - DNA, 25 bp, Homo sapien
ggagaatgaggtcgttatgtacaat

SEQ ID NO: 5516155 - DNA, 25 bp, Homo sapien
ctcttccaaccagatagggagtgtc

SEQ ID NO: 5516156 - DNA, 25 bp, Homo sapien
taaaatagcacaagaaacacttacc

SEQ ID NO: 5516157 - DNA, 25 bp, Homo sapien
aatggacagctgcccctccccacta

SEQ ID NO: 5516158 - DNA, 25 bp, Homo sapien
taaacaggtcacgtgataaaatagc

SEQ ID NO: 5516159 - DNA, 25 bp, Homo sapien
ggacaggaaaatctttgggctgttg

SEQ ID NO: 5516160 - DNA, 25 bp, Homo sapien
aatactttgggcaaatggacagctg

SEQ ID NO: 5516161 - DNA, 25 bp, Homo sapien
cctacagtcgttggaaatatcacag

SEQ ID NO: 5516162 - DNA, 25 bp, Homo sapien
cacccacctgacccatccaagggcc

SEQ ID NO: 5516163 - DNA, 25 bp, Homo sapien
cacccaatctggagaaaggtgtgga

SEQ ID NO: 5516164 - DNA, 25 bp, Homo sapien
ccccgacagatactcccaccacctt

SEQ ID NO: 5516165 - DNA, 25 bp, Homo sapien
cctatctgagagcatgagatctgct

SEQ ID NO: 5516166 - DNA, 25 bp, Homo sapien
cccaagcacagatcccacatacaga

SEQ ID NO: 5516167 - DNA, 25 bp, Homo sapien
tagagaacacagtaaccgtgcttcc

SEQ ID NO: 5516168 - DNA, 25 bp, Homo sapien
atggtacagtaacaagtgcaaaata

SEQ ID NO: 5516169 - DNA, 25 bp, Homo sapien
tctgtggttaaccaagcaagccccg

SEQ ID NO: 5516170 - DNA, 25 bp, Homo sapien
tggcagtaggacaactttgagctca

SEQ ID NO: 5516171 - DNA, 25 bp, Homo sapien
gaaaggtgtggaggttacatcttta

SEQ ID NO: 5516172 - DNA, 25 bp, Homo sapien
agagccagcactgtgacaaaagaac

SEQ ID NO: 5516173 - DNA, 25 bp, Homo sapien
ccccacagcacacaccacgagggga

SEQ ID NO: 5516174 - DNA, 25 bp, Homo sapien
aggctagaacgtccttcaaacactg

SEQ ID NO: 5516175 - DNA, 25 bp, Homo sapien
ggctggaccgtgatgttatcaatag

SEQ ID NO: 5516176 - DNA, 25 bp, Homo sapien
ctttgtgagctctggtggtccaggg

SEQ ID NO: 5516177 - DNA, 25 bp, Homo sapien
acacttacctgtccctctactggcc

SEQ ID NO: 5516178 - DNA, 25 bp, Homo sapien
atctcctcctgtgggcaatcacgcg

SEQ ID NO: 5516179 - DNA, 25 bp, Homo sapien
atgttatcaataggctagaacgtcc

SEQ ID NO: 5516180 - DNA, 25 bp, Homo sapien
tcaaacactgaacctgcatctttcc

SEQ ID NO: 5516181 - DNA, 25 bp, Homo sapien
ctactggcccagctcatctcctcct

SEQ ID NO: 5516182 - DNA, 25 bp, Homo sapien
ttggccctggacacttacctgtccc

SEQ ID NO: 5516183 - DNA, 25 bp, Homo sapien
ttactactgaacactttgtgagctc

SEQ ID NO: 5516184 - DNA, 25 bp, Homo sapien
ctgggttcggctccattctgacctc

SEQ ID NO: 5516185 - DNA, 25 bp, Homo sapien
gctaatgctttctgtccactctgag

SEQ ID NO: 5516186 - DNA, 25 bp, Homo sapien
tgagctcgtggacgctaatgctttc

SEQ ID NO: 5516187 - DNA, 25 bp, Homo sapien
tgccttcccaccacccgtccaggaa

SEQ ID NO: 5516188 - DNA, 25 bp, Homo sapien
tctgacctccctgaagcgctgggtt

SEQ ID NO: 5516189 - DNA, 25 bp, Homo sapien
ctgtttctgacacggaaatgcaccc

SEQ ID NO: 5516190 - DNA, 25 bp, Homo sapien
cattctgacctccctgaagcgctgg

SEQ ID NO: 5516191 - DNA, 25 bp, Homo sapien
agacgggcaccatcagcccacctca

SEQ ID NO: 5516192 - DNA, 25 bp, Homo sapien
gacctccctgaagcgctgggttaga

SEQ ID NO: 5516193 - DNA, 25 bp, Homo sapien
agcactgctgctcaataaataaatg

SEQ ID NO: 5516194 - DNA, 25 bp, Homo sapien
gtgggactcggtactgtttctgaca

SEQ ID NO: 5516195 - DNA, 25 bp, Homo sapien
gggactttgtgcaggatacagttca

SEQ ID NO: 5516196 - DNA, 25 bp, Homo sapien
ggcactaagctctgtgaggccagtc

SEQ ID NO: 5516197 - DNA, 25 bp, Homo sapien
agcttagagcaagagcagacattaa

SEQ ID NO: 5516198 - DNA, 25 bp, Homo sapien
tgggatcttgcccaggtgccagaag

SEQ ID NO: 5516199 - DNA, 25 bp, Homo sapien
gtagaagctggctctgtccacgtct

SEQ ID NO: 5516200 - DNA, 25 bp, Homo sapien
gtgaacttgcggatatggaagattg

SEQ ID NO: 5516201 - DNA, 25 bp, Homo sapien
tgggctggaatttcacgtaaggcct

SEQ ID NO: 5516202 - DNA, 25 bp, Homo sapien
aacatattgaagatacatggcccgc

SEQ ID NO: 5516203 - DNA, 25 bp, Homo sapien
catggcccgccactcttctggagct

SEQ ID NO: 5516204 - DNA, 25 bp, Homo sapien
tcatgagtactctgggctggaattt

SEQ ID NO: 5516205 - DNA, 25 bp, Homo sapien
gatcacataataagacaacctgccc

SEQ ID NO: 5516206 - DNA, 25 bp, Homo sapien
acaaaatgcgtcactccaaagggag

SEQ ID NO: 5516207 - DNA, 25 bp, Homo sapien
aagcagacttaagaaagaaagtatg

SEQ ID NO: 5516208 - DNA, 25 bp, Homo sapien
gatgactgacagttctggtgcacag

SEQ ID NO: 5516209 - DNA, 25 bp, Homo sapien
aatagagtaaaacagcattagggtt

SEQ ID NO: 5516210 - DNA, 25 bp, Homo sapien
gcattagggttgttttgtaagcttc

SEQ ID NO: 5516211 - DNA, 25 bp, Homo sapien
gtaggtgaccaaacaaatacgcact

SEQ ID NO: 5516212 - DNA, 25 bp, Homo sapien
ccaaagggagagattccatgcatat

SEQ ID NO: 5516213 - DNA, 25 bp, Homo sapien
gttaaggcatccaatctgctggttt

SEQ ID NO: 5516214 - DNA, 25 bp, Homo sapien
ctggtgcacagttacaatgtacaag

SEQ ID NO: 5516215 - DNA, 25 bp, Homo sapien
tgtaagcttccaaagcaaaggatac

SEQ ID NO: 5516216 - DNA, 25 bp, Homo sapien
acagctaatacaagtgtaggtgacc

SEQ ID NO: 5516217 - DNA, 25 bp, Homo sapien
tataactatgaggtaactgtactgg

SEQ ID NO: 5516218 - DNA, 25 bp, Homo sapien
ccagtacagttacctcatagttata

SEQ ID NO: 5516219 - DNA, 25 bp, Homo sapien
ggcacaaccctgtctttggctctcc

SEQ ID NO: 5516220 - DNA, 25 bp, Homo sapien
ttgccaacgccgctcctctccttac

SEQ ID NO: 5516221 - DNA, 25 bp, Homo sapien
atgtgcaatctcacttgggggccca

SEQ ID NO: 5516222 - DNA, 25 bp, Homo sapien
agtatcactgatattctcatggttc

SEQ ID NO: 5516223 - DNA, 25 bp, Homo sapien
cagtagttaaatgtgcaatctcact

SEQ ID NO: 5516224 - DNA, 25 bp, Homo sapien
ggtaaggcacaaccctgtctttggc

SEQ ID NO: 5516225 - DNA, 25 bp, Homo sapien
ggtgaggagtttcctcccctgcacc

SEQ ID NO: 5516226 - DNA, 25 bp, Homo sapien
ttggctctcctggtgaggagtttcc

SEQ ID NO: 5516227 - DNA, 25 bp, Homo sapien
gggcagcctgtcctgcgtgaaagag

SEQ ID NO: 5516228 - DNA, 25 bp, Homo sapien
ggttcacatttgccaacgccgctcc

SEQ ID NO: 5516229 - DNA, 25 bp, Homo sapien
ctggtggttggtgattctccattca

SEQ ID NO: 5516230 - DNA, 25 bp, Homo sapien
cacagaaactgagaacactaggtcg

SEQ ID NO: 5516231 - DNA, 25 bp, Homo sapien
cgacctagtgttctcagtttctgtg

SEQ ID NO: 5516232 - DNA, 25 bp, Homo sapien
cggccgtgtaaatgaagatcgggtg

SEQ ID NO: 5516233 - DNA, 25 bp, Homo sapien
aaagacagtcctcgtcagcactgac

SEQ ID NO: 5516234 - DNA, 25 bp, Homo sapien
ctgcccttcaccgcgggcgccaatg

SEQ ID NO: 5516235 - DNA, 25 bp, Homo sapien
gctaccccctctccgagcgccagca

SEQ ID NO: 5516236 - DNA, 25 bp, Homo sapien
gagcacgaatatatacagccctgct

SEQ ID NO: 5516237 - DNA, 25 bp, Homo sapien
tggcccttctcatgcagatgacggc

SEQ ID NO: 5516238 - DNA, 25 bp, Homo sapien
ggtgggtgccctaaagcaccacagc

SEQ ID NO: 5516239 - DNA, 25 bp, Homo sapien
ctttcagctatggaatcgcagacgg

SEQ ID NO: 5516240 - DNA, 25 bp, Homo sapien
gcaagcggaagctgcccttcaccgc

SEQ ID NO: 5516241 - DNA, 25 bp, Homo sapien
accaagaccccaaaactggagcgtg

SEQ ID NO: 5516242 - DNA, 25 bp, Homo sapien
cctgctctgggacacacctccattg

SEQ ID NO: 5516243 - DNA, 25 bp, Homo sapien
aagaatccacgcatttaagaaactc

SEQ ID NO: 5516244 - DNA, 25 bp, Homo sapien
tacttgagccctaataggttggccc

SEQ ID NO: 5516245 - DNA, 25 bp, Homo sapien
gataaatgaacaagaatccacgcat

SEQ ID NO: 5516246 - DNA, 25 bp, Homo sapien
atgctctctttttagggaaggcttt

SEQ ID NO: 5516247 - DNA, 25 bp, Homo sapien
ttgtgataaacagaagtggaaatgt

SEQ ID NO: 5516248 - DNA, 25 bp, Homo sapien
ggaggaaaagtgccaaattagtgtc

SEQ ID NO: 5516249 - DNA, 25 bp, Homo sapien
tcaaacacatgcattggtataacat

SEQ ID NO: 5516250 - DNA, 25 bp, Homo sapien
taaaagagacatattcagagataaa

SEQ ID NO: 5516251 - DNA, 25 bp, Homo sapien
gaaaagtgtggaccatgtagatatt

SEQ ID NO: 5516252 - DNA, 25 bp, Homo sapien
agtgtctctatgactggcatgctct

SEQ ID NO: 5516253 - DNA, 25 bp, Homo sapien
aattgtgccaaaatataaaagagac

SEQ ID NO: 5516254 - DNA, 25 bp, Homo sapien
ctgttctcaagtagtcctggcctca

SEQ ID NO: 5516255 - DNA, 25 bp, Homo sapien
tccccataatctcacgtatacacat

SEQ ID NO: 5516256 - DNA, 25 bp, Homo sapien
ttaccacatggtatgaattagtcca

SEQ ID NO: 5516257 - DNA, 25 bp, Homo sapien
cactgctgtaataatctaagaaaac

SEQ ID NO: 5516258 - DNA, 25 bp, Homo sapien
cactgcttatgaattgaatgttaaa

SEQ ID NO: 5516259 - DNA, 25 bp, Homo sapien
accccattctcaagtgcacccttct

SEQ ID NO: 5516260 - DNA, 25 bp, Homo sapien
ctgtgcatccagaacttacatctat

SEQ ID NO: 5516261 - DNA, 25 bp, Homo sapien
aaagaggtataaacactgcttatga

SEQ ID NO: 5516262 - DNA, 25 bp, Homo sapien
ttccagcttacagctaagcaacaac

SEQ ID NO: 5516263 - DNA, 25 bp, Homo sapien
gctaagcaacaactactgtgcatcc

SEQ ID NO: 5516264 - DNA, 25 bp, Homo sapien
catggtatgaattagtccaagtgtt

SEQ ID NO: 5516265 - DNA, 25 bp, Homo sapien
caggccaccaaagtgaagatgggtg

SEQ ID NO: 5516266 - DNA, 25 bp, Homo sapien
ggccgcaccacaaaatggcagtcgc

SEQ ID NO: 5516267 - DNA, 25 bp, Homo sapien
aagtccagtgagcgctctaggtttc

SEQ ID NO: 5516268 - DNA, 25 bp, Homo sapien
aaatgccgtgactccctccccctgc

SEQ ID NO: 5516269 - DNA, 25 bp, Homo sapien
gcgggcgcacgccacctttactcag

SEQ ID NO: 5516270 - DNA, 25 bp, Homo sapien
cctaggaaaaattagtgaaagacgc

SEQ ID NO: 5516271 - DNA, 25 bp, Homo sapien
cggagaagcacctgctaaatgccgt

SEQ ID NO: 5516272 - DNA, 25 bp, Homo sapien
cccaactcgcagcgttagcgtcagg

SEQ ID NO: 5516273 - DNA, 25 bp, Homo sapien
cgctgagtcctaacgtactgagccc

SEQ ID NO: 5516274 - DNA, 25 bp, Homo sapien
ccaatgctttggcggccacgctgag

SEQ ID NO: 5516275 - DNA, 25 bp, Homo sapien
cccgccaacaacgcggcgcctttgt

SEQ ID NO: 5516276 - DNA, 25 bp, Homo sapien
tcactcgaagccctctagatcccat

SEQ ID NO: 5516277 - DNA, 25 bp, Homo sapien
ccacacaatttgggagccaataggc

SEQ ID NO: 5516278 - DNA, 25 bp, Homo sapien
agagaccaagtctgagtgcttatcc

SEQ ID NO: 5516279 - DNA, 25 bp, Homo sapien
actcatagggtcataaaactcaaac

SEQ ID NO: 5516280 - DNA, 25 bp, Homo sapien
tatcccatcgaccaccattattccc

SEQ ID NO: 5516281 - DNA, 25 bp, Homo sapien
accaagcttgggaatttcaggtatc

SEQ ID NO: 5516282 - DNA, 25 bp, Homo sapien
aatgaaccttcaagaggaaacattt

SEQ ID NO: 5516283 - DNA, 25 bp, Homo sapien
ttcaaatgtaatctcctgtccaccc

SEQ ID NO: 5516284 - DNA, 25 bp, Homo sapien
tgcacagccttatactgagcattac

SEQ ID NO: 5516285 - DNA, 25 bp, Homo sapien
tatgactgcatacgcctcactctac

SEQ ID NO: 5516286 - DNA, 25 bp, Homo sapien
ttcaggtatccaaaggtaattatat

SEQ ID NO: 5516287 - DNA, 25 bp, Homo sapien
ctcgccagtttagaagatgagcagg

SEQ ID NO: 5516288 - DNA, 25 bp, Homo sapien
tctcattaaaaagcccagagggcaa

SEQ ID NO: 5516289 - DNA, 25 bp, Homo sapien
tttcctaacacacgtgtgggaagag

SEQ ID NO: 5516290 - DNA, 25 bp, Homo sapien
gaactatagggctcgccagtttaga

SEQ ID NO: 5516291 - DNA, 25 bp, Homo sapien
gccgcatgcgccaagcctctcatta

SEQ ID NO: 5516292 - DNA, 25 bp, Homo sapien
atactgagcattgtctctggggagc

SEQ ID NO: 5516293 - DNA, 25 bp, Homo sapien
gtctgtgtatgaatgaatactgagc

SEQ ID NO: 5516294 - DNA, 25 bp, Homo sapien
ctcgggcatgcctcctcctgtggtt

SEQ ID NO: 5516295 - DNA, 25 bp, Homo sapien
agggcaagttcacgggcatttccta

SEQ ID NO: 5516296 - DNA, 25 bp, Homo sapien
cctcctgtggttacctgccctgctc

SEQ ID NO: 5516297 - DNA, 25 bp, Homo sapien
gctccagatgaaatgcagatgagga

SEQ ID NO: 5516298 - DNA, 25 bp, Homo sapien
cccgcgcgcgtttccaaacttggtc

SEQ ID NO: 5516299 - DNA, 25 bp, Homo sapien
cgcccttgtgatcttggggccacgg

SEQ ID NO: 5516300 - DNA, 25 bp, Homo sapien
gccggctcgccttcgctacgccctt

SEQ ID NO: 5516301 - DNA, 25 bp, Homo sapien
caacactcaacagacatggggctgg

SEQ ID NO: 5516302 - DNA, 25 bp, Homo sapien
gccctccccaagctcggcgttgcga

SEQ ID NO: 5516303 - DNA, 25 bp, Homo sapien
ttcctatgaaacagctccaagaaaa

SEQ ID NO: 5516304 - DNA, 25 bp, Homo sapien
gggtaccgaggcactcctcggagac

SEQ ID NO: 5516305 - DNA, 25 bp, Homo sapien
ttccaaacttggtcacgctcggcgg

SEQ ID NO: 5516306 - DNA, 25 bp, Homo sapien
ctggggtaccgaggcactcctcgga

SEQ ID NO: 5516307 - DNA, 25 bp, Homo sapien
acaggaattcctatgaaacagctcc

SEQ ID NO: 5516308 - DNA, 25 bp, Homo sapien
aataacaaagcaacactcaacagac

SEQ ID NO: 5516309 - DNA, 25 bp, Homo sapien
agacttgacactcagcaaaaaatcc

SEQ ID NO: 5516310 - DNA, 25 bp, Homo sapien
ggattttttgctgagtgtcaagtct

SEQ ID NO: 5516311 - DNA, 25 bp, Homo sapien
agcgtggagtaatgtatgctcagtc

SEQ ID NO: 5516312 - DNA, 25 bp, Homo sapien
agctctgcactccacactgaaagtc

SEQ ID NO: 5516313 - DNA, 25 bp, Homo sapien
agttaattatttgtagcgtggagta

SEQ ID NO: 5516314 - DNA, 25 bp, Homo sapien
gaggactggctttattagcactttt

SEQ ID NO: 5516315 - DNA, 25 bp, Homo sapien
acaaggttttcaattgctaactgcc

SEQ ID NO: 5516316 - DNA, 25 bp, Homo sapien
ttgaaataacttgctttgctgactc

SEQ ID NO: 5516317 - DNA, 25 bp, Homo sapien
cttaacctaggaaacacatgtgtgc

SEQ ID NO: 5516318 - DNA, 25 bp, Homo sapien
gtcccaggtactctgctaggtactt

SEQ ID NO: 5516319 - DNA, 25 bp, Homo sapien
ttctcctcaatggtaggccatggtt

SEQ ID NO: 5516320 - DNA, 25 bp, Homo sapien
tcattgtggcctatgtcaagctctc

SEQ ID NO: 5516321 - DNA, 25 bp, Homo sapien
acacccatgccaaacacacaaatga

SEQ ID NO: 5516322 - DNA, 25 bp, Homo sapien
gggagagaccatgaacattggaatt

SEQ ID NO: 5516323 - DNA, 25 bp, Homo sapien
aaggaggataaaatggatctgatct

SEQ ID NO: 5516324 - DNA, 25 bp, Homo sapien
agaaagactttaggaaatcagtacc

SEQ ID NO: 5516325 - DNA, 25 bp, Homo sapien
acacattaagagtcccaagagaagg

SEQ ID NO: 5516326 - DNA, 25 bp, Homo sapien
agaatataggtttaaagggagagac

SEQ ID NO: 5516327 - DNA, 25 bp, Homo sapien
ttgttgtgatcagttgccatggttc

SEQ ID NO: 5516328 - DNA, 25 bp, Homo sapien
acacccggcctcagggcaattttgc

SEQ ID NO: 5516329 - DNA, 25 bp, Homo sapien
tatgatgctgagaagtcaagatatt

SEQ ID NO: 5516330 - DNA, 25 bp, Homo sapien
aagagtcatggataattagaaatac

SEQ ID NO: 5516331 - DNA, 25 bp, Homo sapien
catagtcccagggaaaggtaacata

SEQ ID NO: 5516332 - DNA, 25 bp, Homo sapien
ctataatgtaaaaggggtagaatat

SEQ ID NO: 5516333 - DNA, 25 bp, Homo sapien
tatatattcaggttgagataatcta

SEQ ID NO: 5516334 - DNA, 25 bp, Homo sapien
tagattatctcaacctgaatatata

SEQ ID NO: 5516335 - DNA, 25 bp, Homo sapien
tttgagagatggataagagttttcc

SEQ ID NO: 5516336 - DNA, 25 bp, Homo sapien
aggggcaaaactgtaggctccaata

SEQ ID NO: 5516337 - DNA, 25 bp, Homo sapien
cttctcacgcttggcatgctgttcc

SEQ ID NO: 5516338 - DNA, 25 bp, Homo sapien
ccaaggggtaagctctgaccatttt

SEQ ID NO: 5516339 - DNA, 25 bp, Homo sapien
agcttaacctgcatgagaatccctc

SEQ ID NO: 5516340 - DNA, 25 bp, Homo sapien
tcaccagtcagaaagttgaccctgc

SEQ ID NO: 5516341 - DNA, 25 bp, Homo sapien
tctgaccattttgcaggggacagaa

SEQ ID NO: 5516342 - DNA, 25 bp, Homo sapien
ttgaccctgcacagccaaggggtaa

SEQ ID NO: 5516343 - DNA, 25 bp, Homo sapien
cctgccaggtttggtgtcatccctt

SEQ ID NO: 5516344 - DNA, 25 bp, Homo sapien
gattgcgtgaaaagttcctgccagg

SEQ ID NO: 5516345 - DNA, 25 bp, Homo sapien
ggagcagcagaagcttaacctgcat

SEQ ID NO: 5516346 - DNA, 25 bp, Homo sapien
gatcgtaagaacagaagatctacag

SEQ ID NO: 5516347 - DNA, 25 bp, Homo sapien
ctgtagatcttctgttcttacgatc

SEQ ID NO: 5516348 - DNA, 25 bp, Homo sapien
ggtagggatctcagagtgcattgtt

SEQ ID NO: 5516349 - DNA, 25 bp, Homo sapien
ggtggatgctcccccgcccacttcc

SEQ ID NO: 5516350 - DNA, 25 bp, Homo sapien
ctacccatgtcaggccttgcgctac

SEQ ID NO: 5516351 - DNA, 25 bp, Homo sapien
cctgaatgtccccatgagtagggct

SEQ ID NO: 5516352 - DNA, 25 bp, Homo sapien
gagtgcattgttagagcctcggggt

SEQ ID NO: 5516353 - DNA, 25 bp, Homo sapien
taggattctctaggaacagaagctc

SEQ ID NO: 5516354 - DNA, 25 bp, Homo sapien
gcagcctgggccaatcaagcctcta

SEQ ID NO: 5516355 - DNA, 25 bp, Homo sapien
atggatgttaggtgcctcgagtcag

SEQ ID NO: 5516356 - DNA, 25 bp, Homo sapien
cagggccacctcaatggacccactt

SEQ ID NO: 5516357 - DNA, 25 bp, Homo sapien
ccccagaagtcgctggcctgtgttg

SEQ ID NO: 5516358 - DNA, 25 bp, Homo sapien
agaagctcaacagtgacaaaccatg

SEQ ID NO: 5516359 - DNA, 25 bp, Homo sapien
gtcctactagaaaatgttgcaggtt

SEQ ID NO: 5516360 - DNA, 25 bp, Homo sapien
ttaattgccagtaatggaggactac

SEQ ID NO: 5516361 - DNA, 25 bp, Homo sapien
cttgtcagtattggcacataatgat

SEQ ID NO: 5516362 - DNA, 25 bp, Homo sapien
gaggctgtcctcaatatggaaagat

SEQ ID NO: 5516363 - DNA, 25 bp, Homo sapien
tgcctaatcaaagaaccacataatg

SEQ ID NO: 5516364 - DNA, 25 bp, Homo sapien
atagaaaagctgtttgcaatacttt

SEQ ID NO: 5516365 - DNA, 25 bp, Homo sapien
acataatgataaagtactgctaaat

SEQ ID NO: 5516366 - DNA, 25 bp, Homo sapien
aatggaggactactataaaaattta

SEQ ID NO: 5516367 - DNA, 25 bp, Homo sapien
agcctagtagtgttataaaagtatt

SEQ ID NO: 5516368 - DNA, 25 bp, Homo sapien
gtgggttgctccttaattgccagta

SEQ ID NO: 5516369 - DNA, 25 bp, Homo sapien
aaaaatataaagcctagtagtgtta

SEQ ID NO: 5516370 - DNA, 25 bp, Homo sapien
gtccccaggaaatgtccctagccac

SEQ ID NO: 5516371 - DNA, 25 bp, Homo sapien
tccccgactttggcagcttcaacac

SEQ ID NO: 5516372 - DNA, 25 bp, Homo sapien
ccgctcccccaggctttgcattcac

SEQ ID NO: 5516373 - DNA, 25 bp, Homo sapien
tccttccccaaggtgagctgcaccc

SEQ ID NO: 5516374 - DNA, 25 bp, Homo sapien
ccccagctctccagtgggaggatgg

SEQ ID NO: 5516375 - DNA, 25 bp, Homo sapien
gagggtcacagacatcacgcctatg

SEQ ID NO: 5516376 - DNA, 25 bp, Homo sapien
catcacgcctatgtgcacacgcgcg

SEQ ID NO: 5516377 - DNA, 25 bp, Homo sapien
ggccagcaattccaaaggggtctgg

SEQ ID NO: 5516378 - DNA, 25 bp, Homo sapien
ggaaacaagcccctgactggctcct

SEQ ID NO: 5516379 - DNA, 25 bp, Homo sapien
gcattcattctgggggaaatgtgac

SEQ ID NO: 5516380 - DNA, 25 bp, Homo sapien
ctgaggcatgaggtttccttcccca

SEQ ID NO: 5516381 - DNA, 25 bp, Homo sapien
gaaatggtagactcagtttagcctc

SEQ ID NO: 5516382 - DNA, 25 bp, Homo sapien
tcccaagaattggaaggacatctac

SEQ ID NO: 5516383 - DNA, 25 bp, Homo sapien
taaaatggacctagaatatggaaaa

SEQ ID NO: 5516384 - DNA, 25 bp, Homo sapien
tggtacattccacatgctaaacact

SEQ ID NO: 5516385 - DNA, 25 bp, Homo sapien
cactagaacataaatgtatacgtac

SEQ ID NO: 5516386 - DNA, 25 bp, Homo sapien
actggcaattctcaaaaaataggta

SEQ ID NO: 5516387 - DNA, 25 bp, Homo sapien
tcctaggtcagaagttatccacatt

SEQ ID NO: 5516388 - DNA, 25 bp, Homo sapien
ggaaggacatctacagtctgtgctt

SEQ ID NO: 5516389 - DNA, 25 bp, Homo sapien
gtcacaacatagatatatttggtac

SEQ ID NO: 5516390 - DNA, 25 bp, Homo sapien
aatatggaaaattggattcacttta

SEQ ID NO: 5516391 - DNA, 25 bp, Homo sapien
gctaaacactgtacaactggcaatt

SEQ ID NO: 5516392 - DNA, 25 bp, Homo sapien
accagcatggactagccaaaaactt

SEQ ID NO: 5516393 - DNA, 25 bp, Homo sapien
tgttagaaagattccaagtgtgaac

SEQ ID NO: 5516394 - DNA, 25 bp, Homo sapien
ttacagggtttaccaccagcatgga

SEQ ID NO: 5516395 - DNA, 25 bp, Homo sapien
gaagatgtgcattcagacaaaagtt

SEQ ID NO: 5516396 - DNA, 25 bp, Homo sapien
gccaaaaacttgaagatgtgcattc

SEQ ID NO: 5516397 - DNA, 25 bp, Homo sapien
agttagcatatggcaaatatccttc

SEQ ID NO: 5516398 - DNA, 25 bp, Homo sapien
ccctggccaaaaaaccagttagcat

SEQ ID NO: 5516399 - DNA, 25 bp, Homo sapien
agatcttaccaagagagccaccagc

SEQ ID NO: 5516400 - DNA, 25 bp, Homo sapien
agccaccagccctatttctccccta

SEQ ID NO: 5516401 - DNA, 25 bp, Homo sapien
cagacaaaagttggtaacacatttc

SEQ ID NO: 5516402 - DNA, 25 bp, Homo sapien
agattccaagtgtgaacaaaccccc

SEQ ID NO: 5516403 - DNA, 25 bp, Homo sapien
aaacatgttcatggggttggtccta

SEQ ID NO: 5516404 - DNA, 25 bp, Homo sapien
gtagaaacatgagacaaacgtgaca

SEQ ID NO: 5516405 - DNA, 25 bp, Homo sapien
tatgacagcaatcgcctattcctac

SEQ ID NO: 5516406 - DNA, 25 bp, Homo sapien
tttgccccaagattcgatgttactc

SEQ ID NO: 5516407 - DNA, 25 bp, Homo sapien
atcaatccaaggcacactagctagt

SEQ ID NO: 5516408 - DNA, 25 bp, Homo sapien
ccaggtgttgggaatttagtatttc

SEQ ID NO: 5516409 - DNA, 25 bp, Homo sapien
tgtgcttaagcaaaactgggtttaa

SEQ ID NO: 5516410 - DNA, 25 bp, Homo sapien
tcaggaaaacatggcgcctttcaat

SEQ ID NO: 5516411 - DNA, 25 bp, Homo sapien
gagacaaacgtgacaaaacatgttc

SEQ ID NO: 5516412 - DNA, 25 bp, Homo sapien
agccagagtcaattccaagagtaac

SEQ ID NO: 5516413 - DNA, 25 bp, Homo sapien
gccactctctggaaggtcattgttt

SEQ ID NO: 5516414 - DNA, 25 bp, Homo sapien
tggggagtgctgtttactttgctga

SEQ ID NO: 5516415 - DNA, 25 bp, Homo sapien
ttcacaatgtggatattacaggtcc

SEQ ID NO: 5516416 - DNA, 25 bp, Homo sapien
agtaacgtgtactgaaagactaacc

SEQ ID NO: 5516417 - DNA, 25 bp, Homo sapien
atacttcaacccagtgacaacacgt

SEQ ID NO: 5516418 - DNA, 25 bp, Homo sapien
aggcacataaagaatctaaactaac

SEQ ID NO: 5516419 - DNA, 25 bp, Homo sapien
attacacagaataaagttcaggatt

SEQ ID NO: 5516420 - DNA, 25 bp, Homo sapien
aaacaaggtcagagatgacacatca

SEQ ID NO: 5516421 - DNA, 25 bp, Homo sapien
tgacaacacgtaacttggaaactac

SEQ ID NO: 5516422 - DNA, 25 bp, Homo sapien
acaggtccaccagtaaaattaatga

SEQ ID NO: 5516423 - DNA, 25 bp, Homo sapien
atgatggtcaccaatatgtgcttct

SEQ ID NO: 5516424 - DNA, 25 bp, Homo sapien
aaatcctccaaatgaaacagatatg

SEQ ID NO: 5516425 - DNA, 25 bp, Homo sapien
tgattatactcaaaggagcagaggc

SEQ ID NO: 5516426 - DNA, 25 bp, Homo sapien
tctgaaaagcgaaatgaggaattca

SEQ ID NO: 5516427 - DNA, 25 bp, Homo sapien
caccccatgatctgaaaagcgaaat

SEQ ID NO: 5516428 - DNA, 25 bp, Homo sapien
gagtatgagaccaagaaaaatagat

SEQ ID NO: 5516429 - DNA, 25 bp, Homo sapien
aaattagtgtggagaaaacaagcaa

SEQ ID NO: 5516430 - DNA, 25 bp, Homo sapien
ttcaccctaaaattagtgtggagaa

SEQ ID NO: 5516431 - DNA, 25 bp, Homo sapien
tactaagtgactacataaaaaactg

SEQ ID NO: 5516432 - DNA, 25 bp, Homo sapien
tggaacctcaaatatcactgattat

SEQ ID NO: 5516433 - DNA, 25 bp, Homo sapien
aaaaaactgagtatgagaccaagaa

SEQ ID NO: 5516434 - DNA, 25 bp, Homo sapien
aaagcgaaatgaggaattcacccta

SEQ ID NO: 5516435 - DNA, 25 bp, Homo sapien
tcacacacacaaccatccccctcac

SEQ ID NO: 5516436 - DNA, 25 bp, Homo sapien
tcaagcatctcctaatagcctcaag

SEQ ID NO: 5516437 - DNA, 25 bp, Homo sapien
ggattgggattttgttgagttcttc

SEQ ID NO: 5516438 - DNA, 25 bp, Homo sapien
taaatataaatatgtgcaaagtttg

SEQ ID NO: 5516439 - DNA, 25 bp, Homo sapien
ttgacttggattgggattttgttga

SEQ ID NO: 5516440 - DNA, 25 bp, Homo sapien
atgtgcaaagtttgacttggattgg

SEQ ID NO: 5516441 - DNA, 25 bp, Homo sapien
atctcctaatagcctcaagggcctg

SEQ ID NO: 5516442 - DNA, 25 bp, Homo sapien
aaactgttccaggtaattccatcgc

SEQ ID NO: 5516443 - DNA, 25 bp, Homo sapien
ttgtcactgatcagtgctatggcag

SEQ ID NO: 5516444 - DNA, 25 bp, Homo sapien
tacattcctgtaaattgtcactgat

SEQ ID NO: 5516445 - DNA, 25 bp, Homo sapien
taatagcctcaagggcctgagtagg

SEQ ID NO: 5516446 - DNA, 25 bp, Homo sapien
ggtaattccatcgctgctacattcc

SEQ ID NO: 5516447 - DNA, 25 bp, Homo sapien
aaaggttattgaaaaataggctaca

SEQ ID NO: 5516448 - DNA, 25 bp, Homo sapien
gtcctctggaagataaacaagtttc

SEQ ID NO: 5516449 - DNA, 25 bp, Homo sapien
ttaaaggtatctgtacaatacacac

SEQ ID NO: 5516450 - DNA, 25 bp, Homo sapien
tttcaggtttctagtgccaccaact

SEQ ID NO: 5516451 - DNA, 25 bp, Homo sapien
caacaatcttggtgtcaaaaaaaat

SEQ ID NO: 5516452 - DNA, 25 bp, Homo sapien
atagaatcctcttgaaaagtttcat

SEQ ID NO: 5516453 - DNA, 25 bp, Homo sapien
tgaaaaataggctacataaagcata

SEQ ID NO: 5516454 - DNA, 25 bp, Homo sapien
acagtgtaatcaaattaaaggtatc

SEQ ID NO: 5516455 - DNA, 25 bp, Homo sapien
gcagtcaaaatggatagcgatttgc

SEQ ID NO: 5516456 - DNA, 25 bp, Homo sapien
accagggtagcatatataacaacat

SEQ ID NO: 5516457 - DNA, 25 bp, Homo sapien
aaatattttcaccagggtagcatat

SEQ ID NO: 5516458 - DNA, 25 bp, Homo sapien
tcttcacagagacccctatcccacc

SEQ ID NO: 5516459 - DNA, 25 bp, Homo sapien
agaaacagatctagctgacacactg

SEQ ID NO: 5516460 - DNA, 25 bp, Homo sapien
gaaaaagtctgaaagaatgcacacc

SEQ ID NO: 5516461 - DNA, 25 bp, Homo sapien
tatcccaccaacctccaatcctccc

SEQ ID NO: 5516462 - DNA, 25 bp, Homo sapien
atacagcattaatagtagtgaaagt

SEQ ID NO: 5516463 - DNA, 25 bp, Homo sapien
tcggctaagtgaagtgagatttaaa

SEQ ID NO: 5516464 - DNA, 25 bp, Homo sapien
atgaaagtctattggtgtatacagc

SEQ ID NO: 5516465 - DNA, 25 bp, Homo sapien
tgacacactgtgtacctagaaatga

SEQ ID NO: 5516466 - DNA, 25 bp, Homo sapien
gtacctagaaatgattttggatctc

SEQ ID NO: 5516467 - DNA, 25 bp, Homo sapien
gtgttgggaatttttgacagtgagc

SEQ ID NO: 5516468 - DNA, 25 bp, Homo sapien
ataacaatataggaatgatcacatc

SEQ ID NO: 5516469 - DNA, 25 bp, Homo sapien
aaagcctccaagtcaccccaggacc

SEQ ID NO: 5516470 - DNA, 25 bp, Homo sapien
tgctttcggctcctgggggagataa

SEQ ID NO: 5516471 - DNA, 25 bp, Homo sapien
gcagcttgcgccctcccgtaccttt

SEQ ID NO: 5516472 - DNA, 25 bp, Homo sapien
aggttcaggctgcccttttaggccc

SEQ ID NO: 5516473 - DNA, 25 bp, Homo sapien
atcggacacaaaactgatcaggagt

SEQ ID NO: 5516474 - DNA, 25 bp, Homo sapien
actgatcaggagttggaccatctcc

SEQ ID NO: 5516475 - DNA, 25 bp, Homo sapien
aaggaatacacatgaaattggtaac

SEQ ID NO: 5516476 - DNA, 25 bp, Homo sapien
agaagcagcgcttgatttcctgggg

SEQ ID NO: 5516477 - DNA, 25 bp, Homo sapien
taaaacagagttaaaggaatacaca

SEQ ID NO: 5516478 - DNA, 25 bp, Homo sapien
actgacaaaaggaaatgaacagttt

SEQ ID NO: 5516479 - DNA, 25 bp, Homo sapien
ccaggacccagctagttccagtgtc

SEQ ID NO: 5516480 - DNA, 25 bp, Homo sapien
aggcagtggaactcagtgccctcct

SEQ ID NO: 5516481 - DNA, 25 bp, Homo sapien
caggagcagactaggcatatctttt

SEQ ID NO: 5516482 - DNA, 25 bp, Homo sapien
gtcaagttcttcgtggagcctcatc

SEQ ID NO: 5516483 - DNA, 25 bp, Homo sapien
ctgcctcaaccaggtgtgcaggcga

SEQ ID NO: 5516484 - DNA, 25 bp, Homo sapien
ttggactgcagtttacgggtagcaa

SEQ ID NO: 5516485 - DNA, 25 bp, Homo sapien
gtagcaaaggtgaaagtttatggct

SEQ ID NO: 5516486 - DNA, 25 bp, Homo sapien
atggctaaacctgagaaaccggatc

SEQ ID NO: 5516487 - DNA, 25 bp, Homo sapien
cagatggatgggctagccccttaca

SEQ ID NO: 5516488 - DNA, 25 bp, Homo sapien
tgcacatcaaggaggccctcttggc

SEQ ID NO: 5516489 - DNA, 25 bp, Homo sapien
tgagaaaccggatctcccagcagat

SEQ ID NO: 5516490 - DNA, 25 bp, Homo sapien
gccagccctctccgagtccggggct

SEQ ID NO: 5516491 - DNA, 25 bp, Homo sapien
agtgagcaagtttgtaatgaatacc

SEQ ID NO: 5516492 - DNA, 25 bp, Homo sapien
atatgcaagtaaactgactcattcc

SEQ ID NO: 5516493 - DNA, 25 bp, Homo sapien
tgtctatggccaattcaagtacctt

SEQ ID NO: 5516494 - DNA, 25 bp, Homo sapien
ctgggtttcacaggaagttaatctc

SEQ ID NO: 5516495 - DNA, 25 bp, Homo sapien
acttgatacctcagagcactggctg

SEQ ID NO: 5516496 - DNA, 25 bp, Homo sapien
ctcaagccacagttgtctaagacac

SEQ ID NO: 5516497 - DNA, 25 bp, Homo sapien
tagatagcaaagaaactaaggacaa

SEQ ID NO: 5516498 - DNA, 25 bp, Homo sapien
tgagggaaaacgataacacttcatt

SEQ ID NO: 5516499 - DNA, 25 bp, Homo sapien
tgatgggaaggcattttatctaatt

SEQ ID NO: 5516500 - DNA, 25 bp, Homo sapien
atcagggcatctattggccatctat

SEQ ID NO: 5516501 - DNA, 25 bp, Homo sapien
ttcagactcagatgagggaaaacga

SEQ ID NO: 5516502 - DNA, 25 bp, Homo sapien
acttcgagactattccattgattat

SEQ ID NO: 5516503 - DNA, 25 bp, Homo sapien
ataatcaatggaatagtctcgaagt

SEQ ID NO: 5516504 - DNA, 25 bp, Homo sapien
ataggaacatgtaggatccacaatt

SEQ ID NO: 5516505 - DNA, 25 bp, Homo sapien
acatccaaataatgaagctgaccat

SEQ ID NO: 5516506 - DNA, 25 bp, Homo sapien
tcacagccatgttaactgggggcca

SEQ ID NO: 5516507 - DNA, 25 bp, Homo sapien
gtgtgttatgtttggaactgctgct

SEQ ID NO: 5516508 - DNA, 25 bp, Homo sapien
tttagagaatgaacataggaacatg

SEQ ID NO: 5516509 - DNA, 25 bp, Homo sapien
tcaaatactgggagacaaacactga

SEQ ID NO: 5516510 - DNA, 25 bp, Homo sapien
gtgatcctgcgagacactgtgtcca

SEQ ID NO: 5516511 - DNA, 25 bp, Homo sapien
ggggccactccctgctgccgtacca

SEQ ID NO: 5516512 - DNA, 25 bp, Homo sapien
taatgagattagcaaagtagcagca

SEQ ID NO: 5516513 - DNA, 25 bp, Homo sapien
gcaaagtagcagcacaaaaggtaag

SEQ ID NO: 5516514 - DNA, 25 bp, Homo sapien
acctatgcacaaacacagctaagct

SEQ ID NO: 5516515 - DNA, 25 bp, Homo sapien
ccgtgtgcgcttctgagctggaaga

SEQ ID NO: 5516516 - DNA, 25 bp, Homo sapien
tgccctccgcgctcatctggggccg

SEQ ID NO: 5516517 - DNA, 25 bp, Homo sapien
agagccgccagtgtttctcagggat

SEQ ID NO: 5516518 - DNA, 25 bp, Homo sapien
gcacctgcttgccctccgcgctcat

SEQ ID NO: 5516519 - DNA, 25 bp, Homo sapien
tggacaccctggccctctcggggca

SEQ ID NO: 5516520 - DNA, 25 bp, Homo sapien
ggccgcagcatgcctatggttccgc

SEQ ID NO: 5516521 - DNA, 25 bp, Homo sapien
gcctggggaggcatttgcctctgta

SEQ ID NO: 5516522 - DNA, 25 bp, Homo sapien
gctggcttcagccaggctcggtgga

SEQ ID NO: 5516523 - DNA, 25 bp, Homo sapien
caggcccagtgtgagcctgctctgc

SEQ ID NO: 5516524 - DNA, 25 bp, Homo sapien
tctgtaccatcgcctttgccgctgc

SEQ ID NO: 5516525 - DNA, 25 bp, Homo sapien
gtgtgcagactcaccctaaagggcg

SEQ ID NO: 5516526 - DNA, 25 bp, Homo sapien
tatttatcaatgttacgaagtctct

SEQ ID NO: 5516527 - DNA, 25 bp, Homo sapien
agagacttcgtaacattgataaata

SEQ ID NO: 5516528 - DNA, 25 bp, Homo sapien
attcttgaaagacagctggattaac

SEQ ID NO: 5516529 - DNA, 25 bp, Homo sapien
ctggaattctggacctgaggatctt

SEQ ID NO: 5516530 - DNA, 25 bp, Homo sapien
accgggtgcactgcttgaatcactc

SEQ ID NO: 5516531 - DNA, 25 bp, Homo sapien
agccaaccagtggctgtaacagccg

SEQ ID NO: 5516532 - DNA, 25 bp, Homo sapien
acagctggattaactggcaaaagcc

SEQ ID NO: 5516533 - DNA, 25 bp, Homo sapien
tttcaagatggtataaaaatgcttc

SEQ ID NO: 5516534 - DNA, 25 bp, Homo sapien
tccaggatatagtcagcatattcac

SEQ ID NO: 5516535 - DNA, 25 bp, Homo sapien
ttgccaactctgattgtgaggtact

SEQ ID NO: 5516536 - DNA, 25 bp, Homo sapien
tgtgaggtactgatacaatggatca

SEQ ID NO: 5516537 - DNA, 25 bp, Homo sapien
ctccatatttagagatcaggggaac

SEQ ID NO: 5516538 - DNA, 25 bp, Homo sapien
ctgtaacagccgaattagccataat

SEQ ID NO: 5516539 - DNA, 25 bp, Homo sapien
cggcccgggtgaggcaccaactaga

SEQ ID NO: 5516540 - DNA, 25 bp, Homo sapien
tctagttggtgcctcacccgggccg

SEQ ID NO: 5516541 - DNA, 25 bp, Homo sapien
attaaaatcgtaacagggaaagaca

SEQ ID NO: 5516542 - DNA, 25 bp, Homo sapien
gggaaagacaaaatgtgaaatgcat

SEQ ID NO: 5516543 - DNA, 25 bp, Homo sapien
gaatttaacatatgctaggatcacc

SEQ ID NO: 5516544 - DNA, 25 bp, Homo sapien
gcaggtgcttacagtctatcaagtg

SEQ ID NO: 5516545 - DNA, 25 bp, Homo sapien
cagtataagtgtgcatttgatggat

SEQ ID NO: 5516546 - DNA, 25 bp, Homo sapien
taggatcacctaaacttgtcataca

SEQ ID NO: 5516547 - DNA, 25 bp, Homo sapien
tacacactaaatatttgggacacaa

SEQ ID NO: 5516548 - DNA, 25 bp, Homo sapien
tataatagaaagcatgacttcactc

SEQ ID NO: 5516549 - DNA, 25 bp, Homo sapien
caatcagataacagtataagtgtgc

SEQ ID NO: 5516550 - DNA, 25 bp, Homo sapien
gggacacaaagttaagcaggtgctt

SEQ ID NO: 5516551 - DNA, 25 bp, Homo sapien
atttgatggataaccgaagccaagt

SEQ ID NO: 5516552 - DNA, 25 bp, Homo sapien
tcaagggataaccaggtaagataat

SEQ ID NO: 5516553 - DNA, 25 bp, Homo sapien
cataaactgcaaagtgggtgagttg

SEQ ID NO: 5516554 - DNA, 25 bp, Homo sapien
ctttggaccaggaaataatacataa

SEQ ID NO: 5516555 - DNA, 25 bp, Homo sapien
ggtaagataatggtttctatgttcc

SEQ ID NO: 5516556 - DNA, 25 bp, Homo sapien
ttggggcatatcactacaaacaaga

SEQ ID NO: 5516557 - DNA, 25 bp, Homo sapien
taaaagtgtggatcacataaactgc

SEQ ID NO: 5516558 - DNA, 25 bp, Homo sapien
attcgcaggctgaatgcaatttttc

SEQ ID NO: 5516559 - DNA, 25 bp, Homo sapien
caatctgcaaccattcgcaggctga

SEQ ID NO: 5516560 - DNA, 25 bp, Homo sapien
ggtgagttgctacggagaattttgt

SEQ ID NO: 5516561 - DNA, 25 bp, Homo sapien
atgttccagaagtcccacaaatggg

SEQ ID NO: 5516562 - DNA, 25 bp, Homo sapien
tgaaatcaatcactattggggcata

SEQ ID NO: 5516563 - DNA, 25 bp, Homo sapien
gagtcaagacatgggaatatcacat

SEQ ID NO: 5516564 - DNA, 25 bp, Homo sapien
gaaccaccaatcccaagaaaatctg

SEQ ID NO: 5516565 - DNA, 25 bp, Homo sapien
atatcacatggttcaggactctgcc

SEQ ID NO: 5516566 - DNA, 25 bp, Homo sapien
accagggtgttgagattttccatcc

SEQ ID NO: 5516567 - DNA, 25 bp, Homo sapien
aattcacaacattagaaaagaggtt

SEQ ID NO: 5516568 - DNA, 25 bp, Homo sapien
tttggcaaatgccactgggagtcaa

SEQ ID NO: 5516569 - DNA, 25 bp, Homo sapien
ttagacccaaggtgagcatttccac

SEQ ID NO: 5516570 - DNA, 25 bp, Homo sapien
aggttgggaaagacctaggataata

SEQ ID NO: 5516571 - DNA, 25 bp, Homo sapien
ggactctgcccactggactctcctc

SEQ ID NO: 5516572 - DNA, 25 bp, Homo sapien
aaaggtagcaagggcttgcacctgt

SEQ ID NO: 5516573 - DNA, 25 bp, Homo sapien
gtttccgcagccagtcccatgtata

SEQ ID NO: 5516574 - DNA, 25 bp, Homo sapien
caaaaatcaggaagaagcctctggt

SEQ ID NO: 5516575 - DNA, 25 bp, Homo sapien
cactgacagtcctgcagcccaggga

SEQ ID NO: 5516576 - DNA, 25 bp, Homo sapien
gtgagtgcttctactgtgtgatgaa

SEQ ID NO: 5516577 - DNA, 25 bp, Homo sapien
tgagctgttagctagtgagtgcttc

SEQ ID NO: 5516578 - DNA, 25 bp, Homo sapien
gtcaggccttccttgggagtgtgcc

SEQ ID NO: 5516579 - DNA, 25 bp, Homo sapien
gaagctcagctgttccacatgaccc

SEQ ID NO: 5516580 - DNA, 25 bp, Homo sapien
ggctgctgccccagctgagctgtta

SEQ ID NO: 5516581 - DNA, 25 bp, Homo sapien
gggagcatcacttgcaggcctccat

SEQ ID NO: 5516582 - DNA, 25 bp, Homo sapien
ggctgtatgattccccagtcaggcc

SEQ ID NO: 5516583 - DNA, 25 bp, Homo sapien
cctcacacaacaagcactgacagtc

SEQ ID NO: 5516584 - DNA, 25 bp, Homo sapien
ctgggtttttgaagggcctcatttc

SEQ ID NO: 5516585 - DNA, 25 bp, Homo sapien
cgcatttaatttcgaagtgggggga

SEQ ID NO: 5516586 - DNA, 25 bp, Homo sapien
ataaagaaatgggtatgttattacc

SEQ ID NO: 5516587 - DNA, 25 bp, Homo sapien
actataccatgaactgacagaaccc

SEQ ID NO: 5516588 - DNA, 25 bp, Homo sapien
accctgcatgaaggatgaaaaactc

SEQ ID NO: 5516589 - DNA, 25 bp, Homo sapien
gcaaaaacaaggaatccaccacttc

SEQ ID NO: 5516590 - DNA, 25 bp, Homo sapien
agcacagctgagacaccaccatttt

SEQ ID NO: 5516591 - DNA, 25 bp, Homo sapien
aatggttgaagttccaggctctaac

SEQ ID NO: 5516592 - DNA, 25 bp, Homo sapien
ccaaagtcaagaatcacacagcagc

SEQ ID NO: 5516593 - DNA, 25 bp, Homo sapien
aaagtgagttaaaacagatgagttt

SEQ ID NO: 5516594 - DNA, 25 bp, Homo sapien
aatgtgcacagcacagctgagacac

SEQ ID NO: 5516595 - DNA, 25 bp, Homo sapien
ttaatttgacaaggttggaatgtgc

SEQ ID NO: 5516596 - DNA, 25 bp, Homo sapien
tttgtctactgacgtcaggtgacgg

SEQ ID NO: 5516597 - DNA, 25 bp, Homo sapien
ccgtcacctgacgtcagtagacaaa

SEQ ID NO: 5516598 - DNA, 25 bp, Homo sapien
cgcggcccagtctcgccgctcgtgc

SEQ ID NO: 5516599 - DNA, 25 bp, Homo sapien
gctgcccaatgtgctgttcgcctac

SEQ ID NO: 5516600 - DNA, 25 bp, Homo sapien
cacacccctggctctagactgcgcc

SEQ ID NO: 5516601 - DNA, 25 bp, Homo sapien
gaggtcgcccgcatcctgctgggcg

SEQ ID NO: 5516602 - DNA, 25 bp, Homo sapien
gcgagatcatctttaccgggcccgg

SEQ ID NO: 5516603 - DNA, 25 bp, Homo sapien
cgccctgtatcacggcggtgacgac

SEQ ID NO: 5516604 - DNA, 25 bp, Homo sapien
acccgcatccccgcgatagtcagcc

SEQ ID NO: 5516605 - DNA, 25 bp, Homo sapien
ctcctggcctggaccaacgaaaatg

SEQ ID NO: 5516606 - DNA, 25 bp, Homo sapien
ggtgcccagcaagtcttcgcctctg

SEQ ID NO: 5516607 - DNA, 25 bp, Homo sapien
gacgacgcgctgctctctgacttct

SEQ ID NO: 5516608 - DNA, 25 bp, Homo sapien
accaaccagaaaggctacacgctgg

SEQ ID NO: 5516609 - DNA, 25 bp, Homo sapien
ggccatacatggaggatcacactcc

SEQ ID NO: 5516610 - DNA, 25 bp, Homo sapien
atactcctagagcccaagtgaccac

SEQ ID NO: 5516611 - DNA, 25 bp, Homo sapien
agctttcaagtaaggactcagggtc

SEQ ID NO: 5516612 - DNA, 25 bp, Homo sapien
gctccagcagcaaggctgacatgtg

SEQ ID NO: 5516613 - DNA, 25 bp, Homo sapien
gtaggagcctggagtatttctgcca

SEQ ID NO: 5516614 - DNA, 25 bp, Homo sapien
ccctgatcctcaaggccaggtgggg

SEQ ID NO: 5516615 - DNA, 25 bp, Homo sapien
cagaagcatcaagccactgactttt

SEQ ID NO: 5516616 - DNA, 25 bp, Homo sapien
gggtcagggtctcacaactcctcca

SEQ ID NO: 5516617 - DNA, 25 bp, Homo sapien
actccctcagacgtcatcagcccca

SEQ ID NO: 5516618 - DNA, 25 bp, Homo sapien
atggtctgaggtgacgtatactcct

SEQ ID NO: 5516619 - DNA, 25 bp, Homo sapien
gggcaagaaataagagtccaaaaga

SEQ ID NO: 5516620 - DNA, 25 bp, Homo sapien
agcagcatcctctactcagggacac

SEQ ID NO: 5516621 - DNA, 25 bp, Homo sapien
actcagggacacattatgttgctat

SEQ ID NO: 5516622 - DNA, 25 bp, Homo sapien
accttgcagtcaaaagccaaactac

SEQ ID NO: 5516623 - DNA, 25 bp, Homo sapien
gatgctgctcctctagtttgtcttc

SEQ ID NO: 5516624 - DNA, 25 bp, Homo sapien
aatcagtgcttcataaaggcatcct

SEQ ID NO: 5516625 - DNA, 25 bp, Homo sapien
tgaactcacgcatagcagcatcctc

SEQ ID NO: 5516626 - DNA, 25 bp, Homo sapien
aaaaccatgtaatcaacttgtgtcc

SEQ ID NO: 5516627 - DNA, 25 bp, Homo sapien
tgtccatgaactcacgcatagcagc

SEQ ID NO: 5516628 - DNA, 25 bp, Homo sapien
gccaaactacctgggatgctgctcc

SEQ ID NO: 5516629 - DNA, 25 bp, Homo sapien
gtcttcagctaaggatagaggcaaa

SEQ ID NO: 5516630 - DNA, 25 bp, Homo sapien
acctaccatgaaataagaagaatcc

SEQ ID NO: 5516631 - DNA, 25 bp, Homo sapien
aaaccgtgtctctctcatcaaaacc

SEQ ID NO: 5516632 - DNA, 25 bp, Homo sapien
ggttttgatgagagagacacggttt

SEQ ID NO: 5516633 - DNA, 25 bp, Homo sapien
ctcctgtgaggtcctgatgagtatc

SEQ ID NO: 5516634 - DNA, 25 bp, Homo sapien
gtacgactgtccgaagaacacattc

SEQ ID NO: 5516635 - DNA, 25 bp, Homo sapien
caagggtgacatgtgctagacccaa

SEQ ID NO: 5516636 - DNA, 25 bp, Homo sapien
aacgaatcgtccctagagcaggtgt

SEQ ID NO: 5516637 - DNA, 25 bp, Homo sapien
accagatgtgaaacaacgtggacaa

SEQ ID NO: 5516638 - DNA, 25 bp, Homo sapien
gctggggtaaaactgcagcagtcat

SEQ ID NO: 5516639 - DNA, 25 bp, Homo sapien
caaagacagctgactgctggggtaa

SEQ ID NO: 5516640 - DNA, 25 bp, Homo sapien
acaaggagggttttctgtaagatgt

SEQ ID NO: 5516641 - DNA, 25 bp, Homo sapien
aaaacgtatggttgacaaagacagc

SEQ ID NO: 5516642 - DNA, 25 bp, Homo sapien
aagagcgaaagaggccactctatta

SEQ ID NO: 5516643 - DNA, 25 bp, Homo sapien
gcagcagtcataatcgaagagcgaa

SEQ ID NO: 5516644 - DNA, 25 bp, Homo sapien
cccctgacctgtgcgagccggacgt

SEQ ID NO: 5516645 - DNA, 25 bp, Homo sapien
acgtccggctcgcacaggtcagggg

SEQ ID NO: 5516646 - DNA, 25 bp, Homo sapien
aaggttgtagaaaaataggatccag

SEQ ID NO: 5516647 - DNA, 25 bp, Homo sapien
ggctgtcttgcgaagtttggggaca

SEQ ID NO: 5516648 - DNA, 25 bp, Homo sapien
agcctaacttaggtactggcggtga

SEQ ID NO: 5516649 - DNA, 25 bp, Homo sapien
tacaacatgggaatcggttaagaga

SEQ ID NO: 5516650 - DNA, 25 bp, Homo sapien
agcaagtcactgtaaacggaacatc

SEQ ID NO: 5516651 - DNA, 25 bp, Homo sapien
aacggaacatcacatggtcatggtc

SEQ ID NO: 5516652 - DNA, 25 bp, Homo sapien
aagcacttgtgacttcagggctgtc

SEQ ID NO: 5516653 - DNA, 25 bp, Homo sapien
gaaccctgcctgggatccgagattc

SEQ ID NO: 5516654 - DNA, 25 bp, Homo sapien
ctgaacgatgtcactgaaaggttgt

SEQ ID NO: 5516655 - DNA, 25 bp, Homo sapien
taggatccagccattagaggtcagg

SEQ ID NO: 5516656 - DNA, 25 bp, Homo sapien
aaggtttggaaatgtgaaccctgcc

SEQ ID NO: 5516657 - DNA, 25 bp, Homo sapien
tacagaggactaagatgttccccaa

SEQ ID NO: 5516658 - DNA, 25 bp, Homo sapien
tggcagcaaagtttcaagttgtgca

SEQ ID NO: 5516659 - DNA, 25 bp, Homo sapien
ccaacactggagtcaaaggaatgga

SEQ ID NO: 5516660 - DNA, 25 bp, Homo sapien
cttgaagcaccagtgctgggttcag

SEQ ID NO: 5516661 - DNA, 25 bp, Homo sapien
gtggcctccagaagtgtcgttttgt

SEQ ID NO: 5516662 - DNA, 25 bp, Homo sapien
ttgaacaaagacgtgctaccttctc

SEQ ID NO: 5516663 - DNA, 25 bp, Homo sapien
tgatgcagtaaagataccaagagtt

SEQ ID NO: 5516664 - DNA, 25 bp, Homo sapien
aacacaaagcaattggtgagtccac

SEQ ID NO: 5516665 - DNA, 25 bp, Homo sapien
caagtagcctgaagtaacaggtcac

SEQ ID NO: 5516666 - DNA, 25 bp, Homo sapien
ggtgcagcagttaacagcccaacac

SEQ ID NO: 5516667 - DNA, 25 bp, Homo sapien
gcatatggcccaacagtgcctaccc

SEQ ID NO: 5516668 - DNA, 25 bp, Homo sapien
aggatatcttaagagccaaaaggtc

SEQ ID NO: 5516669 - DNA, 25 bp, Homo sapien
tttaacccaagtaatcataagaata

SEQ ID NO: 5516670 - DNA, 25 bp, Homo sapien
ggaaggattcggctaagacaactat

SEQ ID NO: 5516671 - DNA, 25 bp, Homo sapien
cacacgtctgctagttcagtaaact

SEQ ID NO: 5516672 - DNA, 25 bp, Homo sapien
attagaagttgagttagttcctcta

SEQ ID NO: 5516673 - DNA, 25 bp, Homo sapien
agacaactatggaagtgtaacaacc

SEQ ID NO: 5516674 - DNA, 25 bp, Homo sapien
cataagaatatggaaggattcggct

SEQ ID NO: 5516675 - DNA, 25 bp, Homo sapien
tagtagtctgccaaatgagagttaa

SEQ ID NO: 5516676 - DNA, 25 bp, Homo sapien
atcttaagagccaaaaggtcctcac

SEQ ID NO: 5516677 - DNA, 25 bp, Homo sapien
aatgttaaaacatgacagtgccata

SEQ ID NO: 5516678 - DNA, 25 bp, Homo sapien
tgtgattagtagtagtctgccaaat

SEQ ID NO: 5516679 - DNA, 25 bp, Homo sapien
ggcaggtctactccagggctgattt

SEQ ID NO: 5516680 - DNA, 25 bp, Homo sapien
gggctgatttctggatgccggttcc

SEQ ID NO: 5516681 - DNA, 25 bp, Homo sapien
actaacccgctaccacgagaagaga

SEQ ID NO: 5516682 - DNA, 25 bp, Homo sapien
ttaccaagtagggtggtcaccttgc

SEQ ID NO: 5516683 - DNA, 25 bp, Homo sapien
agttgaaagttcaggcccctgctct

SEQ ID NO: 5516684 - DNA, 25 bp, Homo sapien
gaacaagcagattggagttaagaac

SEQ ID NO: 5516685 - DNA, 25 bp, Homo sapien
atggggccttaaaagaagcacattg

SEQ ID NO: 5516686 - DNA, 25 bp, Homo sapien
cactcaagttacaaaaatggggcct

SEQ ID NO: 5516687 - DNA, 25 bp, Homo sapien
taagaacactgaaacactaacccgc

SEQ ID NO: 5516688 - DNA, 25 bp, Homo sapien
acctggtcattctgggtggtgaaag

SEQ ID NO: 5516689 - DNA, 25 bp, Homo sapien
ccttgccctagtgcagccctggatt

SEQ ID NO: 5516690 - DNA, 25 bp, Homo sapien
gataaggttctccatgggctttttc

SEQ ID NO: 5516691 - DNA, 25 bp, Homo sapien
tttaatacgctttgagcatcagggc

SEQ ID NO: 5516692 - DNA, 25 bp, Homo sapien
tgggagcttgttaaagataaggttc

SEQ ID NO: 5516693 - DNA, 25 bp, Homo sapien
acagaagctttgctaaaaggtcacc

SEQ ID NO: 5516694 - DNA, 25 bp, Homo sapien
cattgagaaaagttggaattttgtt

SEQ ID NO: 5516695 - DNA, 25 bp, Homo sapien
tgctccatccatcgcaggcgctgcg

SEQ ID NO: 5516696 - DNA, 25 bp, Homo sapien
aaatcattggatgggaaactgcatt

SEQ ID NO: 5516697 - DNA, 25 bp, Homo sapien
aactagatcagattaacaagaggct

SEQ ID NO: 5516698 - DNA, 25 bp, Homo sapien
tgcacagcatgaaagcttgggtcca

SEQ ID NO: 5516699 - DNA, 25 bp, Homo sapien
ggagtggaatgttctgcaactcatt

SEQ ID NO: 5516700 - DNA, 25 bp, Homo sapien
aagcttgggtccatctgtgccacac

SEQ ID NO: 5516701 - DNA, 25 bp, Homo sapien
tactaaactagactccaggaaagtg

SEQ ID NO: 5516702 - DNA, 25 bp, Homo sapien
ctagactccaggaaagtggtatcaa

SEQ ID NO: 5516703 - DNA, 25 bp, Homo sapien
gacacacatcttttcaggcattaca

SEQ ID NO: 5516704 - DNA, 25 bp, Homo sapien
aattcacattcccaatagcactgtc

SEQ ID NO: 5516705 - DNA, 25 bp, Homo sapien
aacaattgtacttagaagaagctct

SEQ ID NO: 5516706 - DNA, 25 bp, Homo sapien
ttagagcatatcaaaccatagttta

SEQ ID NO: 5516707 - DNA, 25 bp, Homo sapien
tacatgcatgtacaaagattgaaat

SEQ ID NO: 5516708 - DNA, 25 bp, Homo sapien
taaaaaaaacactcataaatatcca

SEQ ID NO: 5516709 - DNA, 25 bp, Homo sapien
ctataagtattgagtcaaaggagac

SEQ ID NO: 5516710 - DNA, 25 bp, Homo sapien
atctcagcgtatttccagttataac

SEQ ID NO: 5516711 - DNA, 25 bp, Homo sapien
aatatccagatttaaatgtcagcat

SEQ ID NO: 5516712 - DNA, 25 bp, Homo sapien
aagactactgtaaagcatccatccc

SEQ ID NO: 5516713 - DNA, 25 bp, Homo sapien
aaataggtcattgcaaaaagaacac

SEQ ID NO: 5516714 - DNA, 25 bp, Homo sapien
ggttggctcgacataagatgccgcc

SEQ ID NO: 5516715 - DNA, 25 bp, Homo sapien
gccgccatcagcagaattataaaac

SEQ ID NO: 5516716 - DNA, 25 bp, Homo sapien
gagtaggtgactggtaatgctttct

SEQ ID NO: 5516717 - DNA, 25 bp, Homo sapien
cagaagacataatggcacagaattc

SEQ ID NO: 5516718 - DNA, 25 bp, Homo sapien
aaatggtcaagggtgttgtccaaaa

SEQ ID NO: 5516719 - DNA, 25 bp, Homo sapien
aggaggcacaaaaataggctgttta

SEQ ID NO: 5516720 - DNA, 25 bp, Homo sapien
tgggttccacaaagaagactgtatc

SEQ ID NO: 5516721 - DNA, 25 bp, Homo sapien
tacacaaggtttacatctgagaatg

SEQ ID NO: 5516722 - DNA, 25 bp, Homo sapien
taaaagttgtacaatctggcagttt

SEQ ID NO: 5516723 - DNA, 25 bp, Homo sapien
ctccctgcgacggtcagcccctcgg

SEQ ID NO: 5516724 - DNA, 25 bp, Homo sapien
ccgaggggctgaccgtcgcagggag

SEQ ID NO: 5516725 - DNA, 25 bp, Homo sapien
tgtggtttttctgctaaggtgataa

SEQ ID NO: 5516726 - DNA, 25 bp, Homo sapien
ggaggcatggttaagctccattctt

SEQ ID NO: 5516727 - DNA, 25 bp, Homo sapien
tgatatatataggggcataatgggg

SEQ ID NO: 5516728 - DNA, 25 bp, Homo sapien
tagacttcccaatggaggcatggtt

SEQ ID NO: 5516729 - DNA, 25 bp, Homo sapien
tgtacctggctcaaagtctagactt

SEQ ID NO: 5516730 - DNA, 25 bp, Homo sapien
tatcaaaataagtcatgtggcaaac

SEQ ID NO: 5516731 - DNA, 25 bp, Homo sapien
taaagtcagttacatcaagttgtcc

SEQ ID NO: 5516732 - DNA, 25 bp, Homo sapien
gtggcaaacttaatgaatcagaggc

SEQ ID NO: 5516733 - DNA, 25 bp, Homo sapien
attggtgaattaatgccgctaacgc

SEQ ID NO: 5516734 - DNA, 25 bp, Homo sapien
gagaaaagaatcataaggttttatc

SEQ ID NO: 5516735 - DNA, 25 bp, Homo sapien
ctaagtgagttaatgtatccaaaat

SEQ ID NO: 5516736 - DNA, 25 bp, Homo sapien
ccagtgaatcaggcctgggtgataa

SEQ ID NO: 5516737 - DNA, 25 bp, Homo sapien
ggaaaaagttccatgcctgcaggca

SEQ ID NO: 5516738 - DNA, 25 bp, Homo sapien
cgttctgccatcactcaccgagctt

SEQ ID NO: 5516739 - DNA, 25 bp, Homo sapien
ggagggacagttgttggccctctcc

SEQ ID NO: 5516740 - DNA, 25 bp, Homo sapien
tcagagccagcccaatctgcgtttc

SEQ ID NO: 5516741 - DNA, 25 bp, Homo sapien
ctgagacagtgcatgcaccactgca

SEQ ID NO: 5516742 - DNA, 25 bp, Homo sapien
ccactgcacactgccgagtcagtcc

SEQ ID NO: 5516743 - DNA, 25 bp, Homo sapien
agcatctccgccaggccagtgaatc

SEQ ID NO: 5516744 - DNA, 25 bp, Homo sapien
tctcccccgaccatgccttagaagc

SEQ ID NO: 5516745 - DNA, 25 bp, Homo sapien
aagcaaaacaggtctagaaaagttg

SEQ ID NO: 5516746 - DNA, 25 bp, Homo sapien
taaatgtctgcttgcttgggtgggg

SEQ ID NO: 5516747 - DNA, 25 bp, Homo sapien
gaaaaaccatgaggttggaacaatc

SEQ ID NO: 5516748 - DNA, 25 bp, Homo sapien
ctctgggcgctcacacttgaaaaac

SEQ ID NO: 5516749 - DNA, 25 bp, Homo sapien
ctgtggcagcgcatgctctcttagc

SEQ ID NO: 5516750 - DNA, 25 bp, Homo sapien
aggggtcgtgacatcatgacatcta

SEQ ID NO: 5516751 - DNA, 25 bp, Homo sapien
aaatctgaggtgagtcaactgagtt

SEQ ID NO: 5516752 - DNA, 25 bp, Homo sapien
gtgggggcattgtaattacgtctcc

SEQ ID NO: 5516753 - DNA, 25 bp, Homo sapien
cagtacttccagcatgggctctgtc

SEQ ID NO: 5516754 - DNA, 25 bp, Homo sapien
tccaaatgctaacagctgtggcagc

SEQ ID NO: 5516755 - DNA, 25 bp, Homo sapien
agaatgatgatgctaaagccagccc

SEQ ID NO: 5516756 - DNA, 25 bp, Homo sapien
gtgcttattagcaggtgtgggatgt

SEQ ID NO: 5516757 - DNA, 25 bp, Homo sapien
acaggagaattaactgcaggccttc

SEQ ID NO: 5516758 - DNA, 25 bp, Homo sapien
acaatatgttaaatggcatgaactc

SEQ ID NO: 5516759 - DNA, 25 bp, Homo sapien
actgttagcgcaatttaaatctccc

SEQ ID NO: 5516760 - DNA, 25 bp, Homo sapien
cgtgagatatgctagaatgggttct

SEQ ID NO: 5516761 - DNA, 25 bp, Homo sapien
ataatagctaggagaatacagcatt

SEQ ID NO: 5516762 - DNA, 25 bp, Homo sapien
actaagcacaacaatggacaactac

SEQ ID NO: 5516763 - DNA, 25 bp, Homo sapien
gcagatcaaagtagaattccttttc

SEQ ID NO: 5516764 - DNA, 25 bp, Homo sapien
tctagagtctagagttagttgataa

SEQ ID NO: 5516765 - DNA, 25 bp, Homo sapien
cagacccaacaaggaaaaatatttg

SEQ ID NO: 5516766 - DNA, 25 bp, Homo sapien
tggacaactacaaatttagagcata

SEQ ID NO: 5516767 - DNA, 25 bp, Homo sapien
taggtgatatctagtgaaaacccat

SEQ ID NO: 5516768 - DNA, 25 bp, Homo sapien
ttttaaaaattgcacgtgagatatg

SEQ ID NO: 5516769 - DNA, 25 bp, Homo sapien
taaccaacgtggccttgccaggctg

SEQ ID NO: 5516770 - DNA, 25 bp, Homo sapien
ccttgccaggctggagaagtttttc

SEQ ID NO: 5516771 - DNA, 25 bp, Homo sapien
aagcagcccaaagcagcaatgatat

SEQ ID NO: 5516772 - DNA, 25 bp, Homo sapien
ttgtactgaatcactgggtccccca

SEQ ID NO: 5516773 - DNA, 25 bp, Homo sapien
gcacaaagattaaacaagcccgcgt

SEQ ID NO: 5516774 - DNA, 25 bp, Homo sapien
tgctttgaatgagtgaaggagtgaa

SEQ ID NO: 5516775 - DNA, 25 bp, Homo sapien
aagcccgcgttgcatcccttggatt

SEQ ID NO: 5516776 - DNA, 25 bp, Homo sapien
acatgggaaagggactattaaccaa

SEQ ID NO: 5516777 - DNA, 25 bp, Homo sapien
aagggacatatttgtaggagctgga

SEQ ID NO: 5516778 - DNA, 25 bp, Homo sapien
gcacatgagtgaggtgtaaatgtca

SEQ ID NO: 5516779 - DNA, 25 bp, Homo sapien
gtcagcagtaccacagctaaaggca

SEQ ID NO: 5516780 - DNA, 25 bp, Homo sapien
agaaattaaatgtgagctactttta

SEQ ID NO: 5516781 - DNA, 25 bp, Homo sapien
gcatggatcaaattccgtacatttc

SEQ ID NO: 5516782 - DNA, 25 bp, Homo sapien
atgaaagttacaatatgcatgccat

SEQ ID NO: 5516783 - DNA, 25 bp, Homo sapien
atgagataggctgtattccaaaatt

SEQ ID NO: 5516784 - DNA, 25 bp, Homo sapien
caatatggtcatgagataggctgta

SEQ ID NO: 5516785 - DNA, 25 bp, Homo sapien
gtgaatactatttatactggaatgc

SEQ ID NO: 5516786 - DNA, 25 bp, Homo sapien
tcaaataatgcacacatagtatcgc

SEQ ID NO: 5516787 - DNA, 25 bp, Homo sapien
tgcacacatagtatcgcatggatca

SEQ ID NO: 5516788 - DNA, 25 bp, Homo sapien
tatactggaatgcaaattcacataa

SEQ ID NO: 5516789 - DNA, 25 bp, Homo sapien
atgcatgccatattgacacctattc

SEQ ID NO: 5516790 - DNA, 25 bp, Homo sapien
catttgttccacggtttgaataaaa

SEQ ID NO: 5516791 - DNA, 25 bp, Homo sapien
aaagaagaagtggtttcacattata

SEQ ID NO: 5516792 - DNA, 25 bp, Homo sapien
aaagcaaatgcctacacactggtct

SEQ ID NO: 5516793 - DNA, 25 bp, Homo sapien
tagtgttgacagaaaataagcataa

SEQ ID NO: 5516794 - DNA, 25 bp, Homo sapien
gaccagtttgtgttgccaaaagact

SEQ ID NO: 5516795 - DNA, 25 bp, Homo sapien
tggcttaacctgaacatacctgcat

SEQ ID NO: 5516796 - DNA, 25 bp, Homo sapien
aatatcatagacacacaagtttggt

SEQ ID NO: 5516797 - DNA, 25 bp, Homo sapien
tattcctcggcattaaaatggagca

SEQ ID NO: 5516798 - DNA, 25 bp, Homo sapien
gataagaaatacagatattcgcatg

SEQ ID NO: 5516799 - DNA, 25 bp, Homo sapien
aactcagtatgtaactcctgcagtt

SEQ ID NO: 5516800 - DNA, 25 bp, Homo sapien
cttatgtataaggagttcagatcat

SEQ ID NO: 5516801 - DNA, 25 bp, Homo sapien
gtctttgcagcaaataagggtattt

SEQ ID NO: 5516802 - DNA, 25 bp, Homo sapien
ctcaaaacggaaggtacattaataa

SEQ ID NO: 5516803 - DNA, 25 bp, Homo sapien
ttataccataaacaacagaagaaca

SEQ ID NO: 5516804 - DNA, 25 bp, Homo sapien
atacacacgaacacatgcaatactg

SEQ ID NO: 5516805 - DNA, 25 bp, Homo sapien
tctcaaagcacaagccatttccata

SEQ ID NO: 5516806 - DNA, 25 bp, Homo sapien
aaatgtagcattataagccaaaaat

SEQ ID NO: 5516807 - DNA, 25 bp, Homo sapien
aagacagaataaaactgggcttctc

SEQ ID NO: 5516808 - DNA, 25 bp, Homo sapien
tcagagccctcccaatcctcgaacc

SEQ ID NO: 5516809 - DNA, 25 bp, Homo sapien
gtagaacagcacagcttaacctagc

SEQ ID NO: 5516810 - DNA, 25 bp, Homo sapien
aaacaaccatcagtagaacagcaca

SEQ ID NO: 5516811 - DNA, 25 bp, Homo sapien
tcctcgaaccacaatctatacacac

SEQ ID NO: 5516812 - DNA, 25 bp, Homo sapien
cctagaaggaggatatcattatatt

SEQ ID NO: 5516813 - DNA, 25 bp, Homo sapien
aagacaattaagaaactataggact

SEQ ID NO: 5516814 - DNA, 25 bp, Homo sapien
gagcaatagaaaacttcgagataac

SEQ ID NO: 5516815 - DNA, 25 bp, Homo sapien
gatgacctagattgcatacatgtgc

SEQ ID NO: 5516816 - DNA, 25 bp, Homo sapien
tggaagaaaacatcccctagtctcc

SEQ ID NO: 5516817 - DNA, 25 bp, Homo sapien
tttcagatccacgagcggtgaaagt

SEQ ID NO: 5516818 - DNA, 25 bp, Homo sapien
ctcagtgaatggctgcttctgtttc

SEQ ID NO: 5516819 - DNA, 25 bp, Homo sapien
aactatccagatactcagggccaca

SEQ ID NO: 5516820 - DNA, 25 bp, Homo sapien
tgttaaatatggacggcatgaagac

SEQ ID NO: 5516821 - DNA, 25 bp, Homo sapien
gtttggaaaatgaggttgatacttc

SEQ ID NO: 5516822 - DNA, 25 bp, Homo sapien
cagggccacaatctcaaatctaggg

SEQ ID NO: 5516823 - DNA, 25 bp, Homo sapien
cggtgaaagtaatgctggtttggaa

SEQ ID NO: 5516824 - DNA, 25 bp, Homo sapien
ctagagaaaatgattgggaaaatac

SEQ ID NO: 5516825 - DNA, 25 bp, Homo sapien
agattaaaatgaacaggctaaatgt

SEQ ID NO: 5516826 - DNA, 25 bp, Homo sapien
attatcccagcaaacattacactag

SEQ ID NO: 5516827 - DNA, 25 bp, Homo sapien
acattcagaattatgcgaaacaatt

SEQ ID NO: 5516828 - DNA, 25 bp, Homo sapien
tgggaaaatacaaataagttcatta

SEQ ID NO: 5516829 - DNA, 25 bp, Homo sapien
aaaactttaatgttgccactgattc

SEQ ID NO: 5516830 - DNA, 25 bp, Homo sapien
cacaaagggatatattaaggcgctt

SEQ ID NO: 5516831 - DNA, 25 bp, Homo sapien
gtgtagtgccttccacaaagggata

SEQ ID NO: 5516832 - DNA, 25 bp, Homo sapien
taaggcgctttacaaatataccaat

SEQ ID NO: 5516833 - DNA, 25 bp, Homo sapien
atataaaagtaaactgtgtagtgcc

SEQ ID NO: 5516834 - DNA, 25 bp, Homo sapien
tatctaaaataccttgggtaacagc

SEQ ID NO: 5516835 - DNA, 25 bp, Homo sapien
ctgagattttcagaagccacagggg

SEQ ID NO: 5516836 - DNA, 25 bp, Homo sapien
ggaagaccataaaagcaagattttc

SEQ ID NO: 5516837 - DNA, 25 bp, Homo sapien
caaattccacctgggacctgcagtg

SEQ ID NO: 5516838 - DNA, 25 bp, Homo sapien
ggcccacgcacaaggcccttgttct

SEQ ID NO: 5516839 - DNA, 25 bp, Homo sapien
ctgcagtgaccagcctcgagtctgg

SEQ ID NO: 5516840 - DNA, 25 bp, Homo sapien
gcctcgagtctggaggctcaaagca

SEQ ID NO: 5516841 - DNA, 25 bp, Homo sapien
aggcccttgttcttgagggcgaggg

SEQ ID NO: 5516842 - DNA, 25 bp, Homo sapien
cctgggaaggcctctcccctgaatc

SEQ ID NO: 5516843 - DNA, 25 bp, Homo sapien
cagccccaaaccacccagagagggg

SEQ ID NO: 5516844 - DNA, 25 bp, Homo sapien
gcctctcccctgaatccaggccttc

SEQ ID NO: 5516845 - DNA, 25 bp, Homo sapien
tcagcctcatctgtccctgagattt

SEQ ID NO: 5516846 - DNA, 25 bp, Homo sapien
gcgacgtgctgtccaaccgcaagat

SEQ ID NO: 5516847 - DNA, 25 bp, Homo sapien
aagaccccaaggatcgttgtgtctc

SEQ ID NO: 5516848 - DNA, 25 bp, Homo sapien
attaatactgaggaacacgtggatg

SEQ ID NO: 5516849 - DNA, 25 bp, Homo sapien
gagcaacgtcctccacgagaagtcc

SEQ ID NO: 5516850 - DNA, 25 bp, Homo sapien
ctcctaaagaggtaccagcagaaag

SEQ ID NO: 5516851 - DNA, 25 bp, Homo sapien
gctcaagaccgccttccccagcgtc

SEQ ID NO: 5516852 - DNA, 25 bp, Homo sapien
tacagaggatcttcgaaagtacgtc

SEQ ID NO: 5516853 - DNA, 25 bp, Homo sapien
ccgaatatacagcttgggcaatggt

SEQ ID NO: 5516854 - DNA, 25 bp, Homo sapien
tgtgtggctgtaaatggtaaaccca

SEQ ID NO: 5516855 - DNA, 25 bp, Homo sapien
atgcagctgatcaggaggttatctt

SEQ ID NO: 5516856 - DNA, 25 bp, Homo sapien
ggtaccagcagaaagtgttactgtc

SEQ ID NO: 5516857 - DNA, 25 bp, Homo sapien
atgagaggtaatgaatgcagaaata

SEQ ID NO: 5516858 - DNA, 25 bp, Homo sapien
caactatgaagttaggaaatgctgt

SEQ ID NO: 5516859 - DNA, 25 bp, Homo sapien
actagaacaaacatctgcgacaact

SEQ ID NO: 5516860 - DNA, 25 bp, Homo sapien
cagcttgacaactaccatgtggcac

SEQ ID NO: 5516861 - DNA, 25 bp, Homo sapien
agactaactgtggaaaggactttga

SEQ ID NO: 5516862 - DNA, 25 bp, Homo sapien
agaaaaaagtgtacatgactaccac

SEQ ID NO: 5516863 - DNA, 25 bp, Homo sapien
tatagcagacaggaaaaaatacatt

SEQ ID NO: 5516864 - DNA, 25 bp, Homo sapien
gatagtgaacaatgccacatgagtc

SEQ ID NO: 5516865 - DNA, 25 bp, Homo sapien
aaaagtgaataagcagactgagatt

SEQ ID NO: 5516866 - DNA, 25 bp, Homo sapien
tacaagtatggaaaggcatgatagt

SEQ ID NO: 5516867 - DNA, 25 bp, Homo sapien
ctagaaaaatgattgtggcattagc

SEQ ID NO: 5516868 - DNA, 25 bp, Homo sapien
atgacttctgagaacagagggtgtg

SEQ ID NO: 5516869 - DNA, 25 bp, Homo sapien
accaggagaacatgtgacaactcta

SEQ ID NO: 5516870 - DNA, 25 bp, Homo sapien
gggtgtgtgtagcaatcctgctggc

SEQ ID NO: 5516871 - DNA, 25 bp, Homo sapien
ctctctgggctgctcagaaaccaaa

SEQ ID NO: 5516872 - DNA, 25 bp, Homo sapien
ggctgcccaggcagatgacttctga

SEQ ID NO: 5516873 - DNA, 25 bp, Homo sapien
gagcccttcaaacctcagaggcctc

SEQ ID NO: 5516874 - DNA, 25 bp, Homo sapien
tctcttctggagagttgtgagaggg

SEQ ID NO: 5516875 - DNA, 25 bp, Homo sapien
gtgcccatagcacagggattgggga

SEQ ID NO: 5516876 - DNA, 25 bp, Homo sapien
tctgaaacgaagacaggaatctgag

SEQ ID NO: 5516877 - DNA, 25 bp, Homo sapien
taaagtctggttcagccccaatcac

SEQ ID NO: 5516878 - DNA, 25 bp, Homo sapien
tttgctcaggaaaaagccaaggcaa

SEQ ID NO: 5516879 - DNA, 25 bp, Homo sapien
ttgcagccactgatccttgagacct

SEQ ID NO: 5516880 - DNA, 25 bp, Homo sapien
aaagctgtgataactccagagtgtc

SEQ ID NO: 5516881 - DNA, 25 bp, Homo sapien
tggagagggtcaactcgttacatac

SEQ ID NO: 5516882 - DNA, 25 bp, Homo sapien
cttcaggggaaacttagcattttgc

SEQ ID NO: 5516883 - DNA, 25 bp, Homo sapien
tgagaccttggatgctttggtggac

SEQ ID NO: 5516884 - DNA, 25 bp, Homo sapien
agagttaggtcttcaagccagagat

SEQ ID NO: 5516885 - DNA, 25 bp, Homo sapien
gcaggtgaagtgcaccggtttagaa

SEQ ID NO: 5516886 - DNA, 25 bp, Homo sapien
acttagagcaatggctgttccggga

SEQ ID NO: 5516887 - DNA, 25 bp, Homo sapien
cacagtcagaaacaataggattatc

SEQ ID NO: 5516888 - DNA, 25 bp, Homo sapien
ctgtagacagaagcaaactgcacat

SEQ ID NO: 5516889 - DNA, 25 bp, Homo sapien
cttcacagttgtctggagagggtca

SEQ ID NO: 5516890 - DNA, 25 bp, Homo sapien
atgtgctatgtaggtataaaaaaat

SEQ ID NO: 5516891 - DNA, 25 bp, Homo sapien
ggaacaaaaccgacgctatgcctgc

SEQ ID NO: 5516892 - DNA, 25 bp, Homo sapien
aacaaggtccccaaatgacccacat

SEQ ID NO: 5516893 - DNA, 25 bp, Homo sapien
aaaacgaatggcaggtcttgactgt

SEQ ID NO: 5516894 - DNA, 25 bp, Homo sapien
tccaacctgcaagagaaaacgaatg

SEQ ID NO: 5516895 - DNA, 25 bp, Homo sapien
atgacccacatgattcaaagtgcaa

SEQ ID NO: 5516896 - DNA, 25 bp, Homo sapien
ataggatgaatgttctaagtcacgc

SEQ ID NO: 5516897 - DNA, 25 bp, Homo sapien
aattgtagcagctgaaccatatctg

SEQ ID NO: 5516898 - DNA, 25 bp, Homo sapien
atattccagaatagtagatacttca

SEQ ID NO: 5516899 - DNA, 25 bp, Homo sapien
agccgccagactgcaaccaaaaaca

SEQ ID NO: 5516900 - DNA, 25 bp, Homo sapien
agtcacgcaactgaatcaaggcacc

SEQ ID NO: 5516901 - DNA, 25 bp, Homo sapien
tcccgtccactgctctgcgccctga

SEQ ID NO: 5516902 - DNA, 25 bp, Homo sapien
atgggaatcccgtcgccctcagctg

SEQ ID NO: 5516903 - DNA, 25 bp, Homo sapien
tcgcctcttcggccgaggtaggaat

SEQ ID NO: 5516904 - DNA, 25 bp, Homo sapien
gcgtgaaggggtcattgccccattt

SEQ ID NO: 5516905 - DNA, 25 bp, Homo sapien
agttttgcaggttgtgaagacccct

SEQ ID NO: 5516906 - DNA, 25 bp, Homo sapien
cggggccgactcccttgaccctctg

SEQ ID NO: 5516907 - DNA, 25 bp, Homo sapien
tgaagtggctgaaaagtgctcttaa

SEQ ID NO: 5516908 - DNA, 25 bp, Homo sapien
ttttacagtcctcggcctggcggaa

SEQ ID NO: 5516909 - DNA, 25 bp, Homo sapien
cacctgtgtgttaaggaggcatttc

SEQ ID NO: 5516910 - DNA, 25 bp, Homo sapien
tgccccatttagggatgcgcacctc

SEQ ID NO: 5516911 - DNA, 25 bp, Homo sapien
cccaagttttggtccagcaggggag

SEQ ID NO: 5516912 - DNA, 25 bp, Homo sapien
tacgagagcataagtgaatacaaaa

SEQ ID NO: 5516913 - DNA, 25 bp, Homo sapien
tttgaagagtatgagaaaaaagaat

SEQ ID NO: 5516914 - DNA, 25 bp, Homo sapien
aaacatgtaggcaatttcagaatag

SEQ ID NO: 5516915 - DNA, 25 bp, Homo sapien
aatacaaaagattaacagaaggaaa

SEQ ID NO: 5516916 - DNA, 25 bp, Homo sapien
aaaagtactcaatgtacgagagcat

SEQ ID NO: 5516917 - DNA, 25 bp, Homo sapien
ataactggtattgaaacatgtaggc

SEQ ID NO: 5516918 - DNA, 25 bp, Homo sapien
tgacaggtttattgaaaatttccag

SEQ ID NO: 5516919 - DNA, 25 bp, Homo sapien
taacagagttactaagtttggcaaa

SEQ ID NO: 5516920 - DNA, 25 bp, Homo sapien
gaaatgaattcaaactgggatgttc

SEQ ID NO: 5516921 - DNA, 25 bp, Homo sapien
tacatgaattaaccagctgcagaac

SEQ ID NO: 5516922 - DNA, 25 bp, Homo sapien
ctgtaaactccgtaaaaactgctta

SEQ ID NO: 5516923 - DNA, 25 bp, Homo sapien
catggttccaggatatttccacccc

SEQ ID NO: 5516924 - DNA, 25 bp, Homo sapien
tccaccccagaattctaaatcagtc

SEQ ID NO: 5516925 - DNA, 25 bp, Homo sapien
aaatcagtcacagaatcataccttc

SEQ ID NO: 5516926 - DNA, 25 bp, Homo sapien
ccccaaagagtttgttactcaaaga

SEQ ID NO: 5516927 - DNA, 25 bp, Homo sapien
ctcttgctcaatacacttccctctt

SEQ ID NO: 5516928 - DNA, 25 bp, Homo sapien
gatagatagatatgtaagtaagtac

SEQ ID NO: 5516929 - DNA, 25 bp, Homo sapien
gatatgtaagtaagtacagtcagcc

SEQ ID NO: 5516930 - DNA, 25 bp, Homo sapien
atctatagacacacgtaacagaatc

SEQ ID NO: 5516931 - DNA, 25 bp, Homo sapien
gacacacgtaacagaatcaaaatat

SEQ ID NO: 5516932 - DNA, 25 bp, Homo sapien
tgttactcaaagatagatagatatg

SEQ ID NO: 5516933 - DNA, 25 bp, Homo sapien
gattagaatgaaacaatctatagac

SEQ ID NO: 5516934 - DNA, 25 bp, Homo sapien
catctaaaacgcacaagagacctcc

SEQ ID NO: 5516935 - DNA, 25 bp, Homo sapien
cacaactgatgagaaacgactagtc

SEQ ID NO: 5516936 - DNA, 25 bp, Homo sapien
ctgggaaacaatgctggcactctat

SEQ ID NO: 5516937 - DNA, 25 bp, Homo sapien
taagatagaaacaatgcagtagttc

SEQ ID NO: 5516938 - DNA, 25 bp, Homo sapien
tttagtagataacaggtcagggatt

SEQ ID NO: 5516939 - DNA, 25 bp, Homo sapien
tacctggaatgaacccaagatttgt

SEQ ID NO: 5516940 - DNA, 25 bp, Homo sapien
agggcatttggcaatatctggaacc

SEQ ID NO: 5516941 - DNA, 25 bp, Homo sapien
cagaatgttagaagttgaaagatgc

SEQ ID NO: 5516942 - DNA, 25 bp, Homo sapien
gtgataatgatcagggactatgttc

SEQ ID NO: 5516943 - DNA, 25 bp, Homo sapien
tgggggcgattactgtcctctaaag

SEQ ID NO: 5516944 - DNA, 25 bp, Homo sapien
agttgaaagatgcatctaggatatc

SEQ ID NO: 5516945 - DNA, 25 bp, Homo sapien
tgagatacaacttcggggaactgaa

SEQ ID NO: 5516946 - DNA, 25 bp, Homo sapien
tggaggacaaaagccctagactaat

SEQ ID NO: 5516947 - DNA, 25 bp, Homo sapien
tcagacaatagaaaggtatacagaa

SEQ ID NO: 5516948 - DNA, 25 bp, Homo sapien
atcagttcagcaaagtataccccct

SEQ ID NO: 5516949 - DNA, 25 bp, Homo sapien
aagtcatagtgaataggtataacct

SEQ ID NO: 5516950 - DNA, 25 bp, Homo sapien
acaaagatgccctgcctagactgtg

SEQ ID NO: 5516951 - DNA, 25 bp, Homo sapien
gcttgtggatctgatggaaaacaaa

SEQ ID NO: 5516952 - DNA, 25 bp, Homo sapien
ttgccaagtactgggttagtcctta

SEQ ID NO: 5516953 - DNA, 25 bp, Homo sapien
aaagtaaaatagtcaaggcagcatt

SEQ ID NO: 5516954 - DNA, 25 bp, Homo sapien
ttgagcagacagattaacaacgtca

SEQ ID NO: 5516955 - DNA, 25 bp, Homo sapien
cgtccctggccccaaccagcaacac

SEQ ID NO: 5516956 - DNA, 25 bp, Homo sapien
aaaattaatgagccagcagtccaat

SEQ ID NO: 5516957 - DNA, 25 bp, Homo sapien
cctaacacagaggcatcactgaagg

SEQ ID NO: 5516958 - DNA, 25 bp, Homo sapien
gatgagacactgataaaggatatcc

SEQ ID NO: 5516959 - DNA, 25 bp, Homo sapien
gcagtccaatctacagatgagacac

SEQ ID NO: 5516960 - DNA, 25 bp, Homo sapien
ggttttgcatccagggagaagttcc

SEQ ID NO: 5516961 - DNA, 25 bp, Homo sapien
gagttcaggctgaggcatcctaaca

SEQ ID NO: 5516962 - DNA, 25 bp, Homo sapien
tgttcccagtgaaaattgtggccac

SEQ ID NO: 5516963 - DNA, 25 bp, Homo sapien
ttagggaacagctatacacaaatgt

SEQ ID NO: 5516964 - DNA, 25 bp, Homo sapien
tggccactcagtgaagagttcaggc

SEQ ID NO: 5516965 - DNA, 25 bp, Homo sapien
tttcccatagtcactgcagaatacc

SEQ ID NO: 5516966 - DNA, 25 bp, Homo sapien
aaccgatagaacattcaaggctttc

SEQ ID NO: 5516967 - DNA, 25 bp, Homo sapien
agtaggtagggtaaaatgtcttcat

SEQ ID NO: 5516968 - DNA, 25 bp, Homo sapien
tatgcaaaatagtaatgatgaaatc

SEQ ID NO: 5516969 - DNA, 25 bp, Homo sapien
gaagccacagtggttatgcccattc

SEQ ID NO: 5516970 - DNA, 25 bp, Homo sapien
gtcttgtcaacgagcttctgcagca

SEQ ID NO: 5516971 - DNA, 25 bp, Homo sapien
tccaaggagtgtaaaatataacatt

SEQ ID NO: 5516972 - DNA, 25 bp, Homo sapien
tccaacaaagtgaagtgcaaattgc

SEQ ID NO: 5516973 - DNA, 25 bp, Homo sapien
ttattgagtgctatgggatattcca

SEQ ID NO: 5516974 - DNA, 25 bp, Homo sapien
acagacaatagtgcttaacctaggt

SEQ ID NO: 5516975 - DNA, 25 bp, Homo sapien
cgacacagccctcctgacatcggca

SEQ ID NO: 5516976 - DNA, 25 bp, Homo sapien
gccacacgcattacccgacacagcc

SEQ ID NO: 5516977 - DNA, 25 bp, Homo sapien
tgacatcggcactctagcagctgag

SEQ ID NO: 5516978 - DNA, 25 bp, Homo sapien
tgggcagctctgggtccttaatgat

SEQ ID NO: 5516979 - DNA, 25 bp, Homo sapien
gaacagaggactgagatacatactg

SEQ ID NO: 5516980 - DNA, 25 bp, Homo sapien
caaattacagactatggtataactg

SEQ ID NO: 5516981 - DNA, 25 bp, Homo sapien
aaaaattccacgtatcaagcgcttc

SEQ ID NO: 5516982 - DNA, 25 bp, Homo sapien
tgtaattgtcattagcaaccaaagt

SEQ ID NO: 5516983 - DNA, 25 bp, Homo sapien
gatatagagaaaaattccacgtatc

SEQ ID NO: 5516984 - DNA, 25 bp, Homo sapien
aagcgcttcgtacctgacttggtgc

SEQ ID NO: 5516985 - DNA, 25 bp, Homo sapien
gtggaatctctgggaacagaggact

SEQ ID NO: 5516986 - DNA, 25 bp, Homo sapien
ttgcttccctattagaacaaagaga

SEQ ID NO: 5516987 - DNA, 25 bp, Homo sapien
agaggactgagatacatactgtgtt

SEQ ID NO: 5516988 - DNA, 25 bp, Homo sapien
tgttgtattaatgtgttcctggctc

SEQ ID NO: 5516989 - DNA, 25 bp, Homo sapien
cttctttattaagggggctgctggt

SEQ ID NO: 5516990 - DNA, 25 bp, Homo sapien
tacccaactagacaaaagtccagac

SEQ ID NO: 5516991 - DNA, 25 bp, Homo sapien
gtatatagagtcttgggtgagtgca

SEQ ID NO: 5516992 - DNA, 25 bp, Homo sapien
gggcagggtggattccattctctaa

SEQ ID NO: 5516993 - DNA, 25 bp, Homo sapien
gcagctgatgactgcctgaggtgga

SEQ ID NO: 5516994 - DNA, 25 bp, Homo sapien
ggctgctggtgtagaactgtctacc

SEQ ID NO: 5516995 - DNA, 25 bp, Homo sapien
tctgagcaagcaagtatatagagtc

SEQ ID NO: 5516996 - DNA, 25 bp, Homo sapien
gtgagtgcagacacatgagactaca

SEQ ID NO: 5516997 - DNA, 25 bp, Homo sapien
gaggtggaaggtataaactaatctc

SEQ ID NO: 5516998 - DNA, 25 bp, Homo sapien
cagacatgatgtaaacaatccactc

SEQ ID NO: 5516999 - DNA, 25 bp, Homo sapien
tgagacaaagactgcttcaagtatt

SEQ ID NO: 5517000 - DNA, 25 bp, Homo sapien
agtatgcattggaaagggacattga

SEQ ID NO: 5517001 - DNA, 25 bp, Homo sapien
ttaagtgttgacagcctaagcgtct

SEQ ID NO: 5517002 - DNA, 25 bp, Homo sapien
cttgtccacggaccatggccagtgg

SEQ ID NO: 5517003 - DNA, 25 bp, Homo sapien
ggcccacaggaatgtcttgtccacg

SEQ ID NO: 5517004 - DNA, 25 bp, Homo sapien
ctgagtgaacagaaatccaaaacac

SEQ ID NO: 5517005 - DNA, 25 bp, Homo sapien
ggccagtggccccatcaatgggtct

SEQ ID NO: 5517006 - DNA, 25 bp, Homo sapien
gcgagaccccacaagtacacatttt

SEQ ID NO: 5517007 - DNA, 25 bp, Homo sapien
tttagttctatcatgtggggcccac

SEQ ID NO: 5517008 - DNA, 25 bp, Homo sapien
ggaagaaacgtccaatgacaggagt

SEQ ID NO: 5517009 - DNA, 25 bp, Homo sapien
ttttgatcccccccggtgtgccatg

SEQ ID NO: 5517010 - DNA, 25 bp, Homo sapien
tggggcccacgttacaagttccatc

SEQ ID NO: 5517011 - DNA, 25 bp, Homo sapien
tgagccccctagacacagaatagtc

SEQ ID NO: 5517012 - DNA, 25 bp, Homo sapien
agtgactgggctatcatctgaggaa

SEQ ID NO: 5517013 - DNA, 25 bp, Homo sapien
gacccacacacagtgcttgagcccc

SEQ ID NO: 5517014 - DNA, 25 bp, Homo sapien
tgacgggagacttttaagggtcatc

SEQ ID NO: 5517015 - DNA, 25 bp, Homo sapien
cgtgacctgaggaccccagttattt

SEQ ID NO: 5517016 - DNA, 25 bp, Homo sapien
cctagtgcaacagctctggccagaa

SEQ ID NO: 5517017 - DNA, 25 bp, Homo sapien
tatggcattcttggggcaaacagca

SEQ ID NO: 5517018 - DNA, 25 bp, Homo sapien
tggccagaacccagcctggtctaca

SEQ ID NO: 5517019 - DNA, 25 bp, Homo sapien
ttggggagtctgagcccatttccac

SEQ ID NO: 5517020 - DNA, 25 bp, Homo sapien
agaaggccagacactcccataggtt

SEQ ID NO: 5517021 - DNA, 25 bp, Homo sapien
tctgaggaatagtcagcttcccccc

SEQ ID NO: 5517022 - DNA, 25 bp, Homo sapien
gcactgaggtcgatctcgtgatgct

SEQ ID NO: 5517023 - DNA, 25 bp, Homo sapien
tgttgctttagacctgaagggcagc

SEQ ID NO: 5517024 - DNA, 25 bp, Homo sapien
gagctctgcacgtgacctccacctc

SEQ ID NO: 5517025 - DNA, 25 bp, Homo sapien
gcttaaggcctagacgtgtggctga

SEQ ID NO: 5517026 - DNA, 25 bp, Homo sapien
tccccccatgggtgcagatccttta

SEQ ID NO: 5517027 - DNA, 25 bp, Homo sapien
cagccgagatgtccagatgttgctt

SEQ ID NO: 5517028 - DNA, 25 bp, Homo sapien
gcgctcctccaggaaagcgattggc

SEQ ID NO: 5517029 - DNA, 25 bp, Homo sapien
ccaggttgcctttgatggggaatct

SEQ ID NO: 5517030 - DNA, 25 bp, Homo sapien
ccatcaccccaagtagggccaggag

SEQ ID NO: 5517031 - DNA, 25 bp, Homo sapien
gggaaaggaatgccatcaacccctc

SEQ ID NO: 5517032 - DNA, 25 bp, Homo sapien
gtccagtaggctgggaccctctatg

SEQ ID NO: 5517033 - DNA, 25 bp, Homo sapien
gcctctttggcagtcgacttcaact

SEQ ID NO: 5517034 - DNA, 25 bp, Homo sapien
tgcaaatccaagtgaaaggaaaaag

SEQ ID NO: 5517035 - DNA, 25 bp, Homo sapien
cctggcattgtcggaaatagaaaac

SEQ ID NO: 5517036 - DNA, 25 bp, Homo sapien
gaggtttgtgtccagctggagagaa

SEQ ID NO: 5517037 - DNA, 25 bp, Homo sapien
aattaggaagagacaatcacaactc

SEQ ID NO: 5517038 - DNA, 25 bp, Homo sapien
acttaatgcattagcgccgtaaggt

SEQ ID NO: 5517039 - DNA, 25 bp, Homo sapien
tcagagcagagtgatacacaagttt

SEQ ID NO: 5517040 - DNA, 25 bp, Homo sapien
gcactactgtgaagcctaacggcaa

SEQ ID NO: 5517041 - DNA, 25 bp, Homo sapien
tacaacgtcaatgaagcctcctggc

SEQ ID NO: 5517042 - DNA, 25 bp, Homo sapien
aaggaaaaagcactactgtgaagcc

SEQ ID NO: 5517043 - DNA, 25 bp, Homo sapien
ttacagcacaattaggaagagacaa

SEQ ID NO: 5517044 - DNA, 25 bp, Homo sapien
ttagcatacagagcagcttcttatc

SEQ ID NO: 5517045 - DNA, 25 bp, Homo sapien
ccttgggctgccttcatacccctgc

SEQ ID NO: 5517046 - DNA, 25 bp, Homo sapien
caggacctgtgctgaagggtccctg

SEQ ID NO: 5517047 - DNA, 25 bp, Homo sapien
ggagagaaagctttagcatacagag

SEQ ID NO: 5517048 - DNA, 25 bp, Homo sapien
gcaggtccccttctggaatgcactc

SEQ ID NO: 5517049 - DNA, 25 bp, Homo sapien
ctcgaagaatagcaggtccccttct

SEQ ID NO: 5517050 - DNA, 25 bp, Homo sapien
ggccagagtgttgaccatcagcaaa

SEQ ID NO: 5517051 - DNA, 25 bp, Homo sapien
tctgctctatccctggctgtagctc

SEQ ID NO: 5517052 - DNA, 25 bp, Homo sapien
agggtccactgcctcgaagaatagc

SEQ ID NO: 5517053 - DNA, 25 bp, Homo sapien
aaatattgaagatctgggaaaggaa

SEQ ID NO: 5517054 - DNA, 25 bp, Homo sapien
cacacttctccacagggacatgggg

SEQ ID NO: 5517055 - DNA, 25 bp, Homo sapien
gaggctgacagtacagcagtcacct

SEQ ID NO: 5517056 - DNA, 25 bp, Homo sapien
tcaggaagtccctgcagcgaccttg

SEQ ID NO: 5517057 - DNA, 25 bp, Homo sapien
cgccaaacttgggaaacgatctggg

SEQ ID NO: 5517058 - DNA, 25 bp, Homo sapien
ctcgctgggtccgatatcccccttc

SEQ ID NO: 5517059 - DNA, 25 bp, Homo sapien
ggagatgcaagggccttggtaattg

SEQ ID NO: 5517060 - DNA, 25 bp, Homo sapien
tgtcttcggtgcatcttcagggcca

SEQ ID NO: 5517061 - DNA, 25 bp, Homo sapien
gtgcccaagctgctaggctgctctt

SEQ ID NO: 5517062 - DNA, 25 bp, Homo sapien
ttagctggcactgcacgaatgcctc

SEQ ID NO: 5517063 - DNA, 25 bp, Homo sapien
ggtctggagccctgagttgtaacca

SEQ ID NO: 5517064 - DNA, 25 bp, Homo sapien
cacaatagaggagttgagcattcta

SEQ ID NO: 5517065 - DNA, 25 bp, Homo sapien
ggcaccgacagcaaatcgccaaact

SEQ ID NO: 5517066 - DNA, 25 bp, Homo sapien
tgtgtagtgtccctgggaaatgctt

SEQ ID NO: 5517067 - DNA, 25 bp, Homo sapien
tataggagtaattacagacaatgat

SEQ ID NO: 5517068 - DNA, 25 bp, Homo sapien
aagttatccaaaagatgtagtgatc

SEQ ID NO: 5517069 - DNA, 25 bp, Homo sapien
atgagataccaagcagtcaaaacgg

SEQ ID NO: 5517070 - DNA, 25 bp, Homo sapien
tgaggcatcgtgacaaaatagtgca

SEQ ID NO: 5517071 - DNA, 25 bp, Homo sapien
aattataaagactgtgtagtgtccc

SEQ ID NO: 5517072 - DNA, 25 bp, Homo sapien
agacaatgatagaaaagtttgaggc

SEQ ID NO: 5517073 - DNA, 25 bp, Homo sapien
tgggaaatgcttacaatgagatacc

SEQ ID NO: 5517074 - DNA, 25 bp, Homo sapien
caagcagtcaaaacggaatctaacc

SEQ ID NO: 5517075 - DNA, 25 bp, Homo sapien
aataaaagattataggagtaattac

SEQ ID NO: 5517076 - DNA, 25 bp, Homo sapien
aaatagtgcaaaagcctaagttatc

SEQ ID NO: 5517077 - DNA, 25 bp, Homo sapien
tttgctaatgatacacagtctacac

SEQ ID NO: 5517078 - DNA, 25 bp, Homo sapien
tggtgttctggtattgcgactgttt

SEQ ID NO: 5517079 - DNA, 25 bp, Homo sapien
aaatgcctagaaatcttgagatatt

SEQ ID NO: 5517080 - DNA, 25 bp, Homo sapien
gcacctgtacagtagttacaaaggt

SEQ ID NO: 5517081 - DNA, 25 bp, Homo sapien
attagacataggaaaatgcctagaa

SEQ ID NO: 5517082 - DNA, 25 bp, Homo sapien
acaaacgactacaatggtgttctgg

SEQ ID NO: 5517083 - DNA, 25 bp, Homo sapien
tgcatgaacacagtaaagaagtcac

SEQ ID NO: 5517084 - DNA, 25 bp, Homo sapien
acaaaggtattacaaagcttgtctc

SEQ ID NO: 5517085 - DNA, 25 bp, Homo sapien
cagagagaacatcctactattagac

SEQ ID NO: 5517086 - DNA, 25 bp, Homo sapien
acggaatctaaccacgcacctgtac

SEQ ID NO: 5517087 - DNA, 25 bp, Homo sapien
agcttgtctctgcatgaacacagta

SEQ ID NO: 5517088 - DNA, 25 bp, Homo sapien
tttcttctgaaatggagtaaagcaa

SEQ ID NO: 5517089 - DNA, 25 bp, Homo sapien
gagtaacgagaggtcattttaacac

SEQ ID NO: 5517090 - DNA, 25 bp, Homo sapien
aagcaaacacatacccaaggatctt

SEQ ID NO: 5517091 - DNA, 25 bp, Homo sapien
ctcccaacaacgtcagaggtccggg

SEQ ID NO: 5517092 - DNA, 25 bp, Homo sapien
ccttactcaagaggtctgggtgtgg

SEQ ID NO: 5517093 - DNA, 25 bp, Homo sapien
ctcaacgcgactcagtcactggctc

SEQ ID NO: 5517094 - DNA, 25 bp, Homo sapien
ttgtggatcccagtcttggtgccaa

SEQ ID NO: 5517095 - DNA, 25 bp, Homo sapien
gcagtgtctacaaagttgtggatcc

SEQ ID NO: 5517096 - DNA, 25 bp, Homo sapien
ggtgtgggtaacagccacctcccaa

SEQ ID NO: 5517097 - DNA, 25 bp, Homo sapien
ataactactgtggagtaacgagagg

SEQ ID NO: 5517098 - DNA, 25 bp, Homo sapien
aggtccgggttcagaattcctcaac

SEQ ID NO: 5517099 - DNA, 25 bp, Homo sapien
atggctgtgagtaatgtgtttctgt

SEQ ID NO: 5517100 - DNA, 25 bp, Homo sapien
tccattcttggacgttctgcctctg

SEQ ID NO: 5517101 - DNA, 25 bp, Homo sapien
gggaaggagaccctcctggattatg

SEQ ID NO: 5517102 - DNA, 25 bp, Homo sapien
aagtcattccatctgaaactctgtc

SEQ ID NO: 5517103 - DNA, 25 bp, Homo sapien
ctggattatggtgaatatttagctc

SEQ ID NO: 5517104 - DNA, 25 bp, Homo sapien
tttacaaatttcagacaagtcattc

SEQ ID NO: 5517105 - DNA, 25 bp, Homo sapien
atttgatttactgcctttgggttcc

SEQ ID NO: 5517106 - DNA, 25 bp, Homo sapien
cacaaaggactataataaaacattc

SEQ ID NO: 5517107 - DNA, 25 bp, Homo sapien
tgtccaagatatacatggctgtgag

SEQ ID NO: 5517108 - DNA, 25 bp, Homo sapien
tctgtgaaagtcttttggatgaaaa

SEQ ID NO: 5517109 - DNA, 25 bp, Homo sapien
tcttgctaaatattcagactgagac

SEQ ID NO: 5517110 - DNA, 25 bp, Homo sapien
tgtaaagaatacagtatcgtgccca

SEQ ID NO: 5517111 - DNA, 25 bp, Homo sapien
agtagctgtagggccataaaaatgt

SEQ ID NO: 5517112 - DNA, 25 bp, Homo sapien
ttatatacttgcagggataagaagt

SEQ ID NO: 5517113 - DNA, 25 bp, Homo sapien
taagtgttcgtaaaagatagtggtc

SEQ ID NO: 5517114 - DNA, 25 bp, Homo sapien
gcagattcagaaacatgagatcctt

SEQ ID NO: 5517115 - DNA, 25 bp, Homo sapien
agatagtggtcttcagaaacacccc

SEQ ID NO: 5517116 - DNA, 25 bp, Homo sapien
cgtgcccatacacaactgcaaacac

SEQ ID NO: 5517117 - DNA, 25 bp, Homo sapien
ttcagattggcaaactttcagagtt

SEQ ID NO: 5517118 - DNA, 25 bp, Homo sapien
atatatagatagtaagcaaacattt

SEQ ID NO: 5517119 - DNA, 25 bp, Homo sapien
ttaccggcaaaatacatcaatgact

SEQ ID NO: 5517120 - DNA, 25 bp, Homo sapien
ttcagagttcaaaagtgcatgtatt

SEQ ID NO: 5517121 - DNA, 25 bp, Homo sapien
aaagaggaaggtcaccaacttgctt

SEQ ID NO: 5517122 - DNA, 25 bp, Homo sapien
tttagaaaaggaattgcatagaaga

SEQ ID NO: 5517123 - DNA, 25 bp, Homo sapien
aaaaacgacaaagcacaaaacctca

SEQ ID NO: 5517124 - DNA, 25 bp, Homo sapien
gacagaataaatgcaggcaatttac

SEQ ID NO: 5517125 - DNA, 25 bp, Homo sapien
cacacacagtgatgttccctgcaac

SEQ ID NO: 5517126 - DNA, 25 bp, Homo sapien
tgttccatatcggaaaagccaaggt

SEQ ID NO: 5517127 - DNA, 25 bp, Homo sapien
tgcatagaagatacagcaagaggga

SEQ ID NO: 5517128 - DNA, 25 bp, Homo sapien
gtaggtggatgacactgcctcttca

SEQ ID NO: 5517129 - DNA, 25 bp, Homo sapien
tcttcaacacgactgctggggattt

SEQ ID NO: 5517130 - DNA, 25 bp, Homo sapien
gcaagagggaactccacaacaacaa

SEQ ID NO: 5517131 - DNA, 25 bp, Homo sapien
tccctgcaactgggctcgatgcatt

SEQ ID NO: 5517132 - DNA, 25 bp, Homo sapien
gggtcggcagaggagcgccggaggc

SEQ ID NO: 5517133 - DNA, 25 bp, Homo sapien
gcctccggcgctcctctgccgaccc

SEQ ID NO: 5517134 - DNA, 25 bp, Homo sapien
tgacccgccaccttaccccacagct

SEQ ID NO: 5517135 - DNA, 25 bp, Homo sapien
agctgtggggtaaggtggcgggtca

SEQ ID NO: 5517136 - DNA, 25 bp, Homo sapien
ctttactcagggagagataaaaacg

SEQ ID NO: 5517137 - DNA, 25 bp, Homo sapien
aaggccaggaagaacccatggccta

SEQ ID NO: 5517138 - DNA, 25 bp, Homo sapien
agggtaatgtggcaaatcattggcc

SEQ ID NO: 5517139 - DNA, 25 bp, Homo sapien
tggtggaattatgggctagcttaaa

SEQ ID NO: 5517140 - DNA, 25 bp, Homo sapien
catgaactgaaacttggtgtgggat

SEQ ID NO: 5517141 - DNA, 25 bp, Homo sapien
atgggctagcttaaagggtaatgtg

SEQ ID NO: 5517142 - DNA, 25 bp, Homo sapien
aagaagataagaacccagtcctttg

SEQ ID NO: 5517143 - DNA, 25 bp, Homo sapien
atgattaaaagaccgagaaaaagaa

SEQ ID NO: 5517144 - DNA, 25 bp, Homo sapien
tagtaggaagaccaattcaaacatc

SEQ ID NO: 5517145 - DNA, 25 bp, Homo sapien
aagccttctatgggcaaagaagcac

SEQ ID NO: 5517146 - DNA, 25 bp, Homo sapien
attctgtgggaatcaccagtgtcct

SEQ ID NO: 5517147 - DNA, 25 bp, Homo sapien
ctcgggcccttgaagaggccttgga

SEQ ID NO: 5517148 - DNA, 25 bp, Homo sapien
gggcccttgaagaggccttggaagc

SEQ ID NO: 5517149 - DNA, 25 bp, Homo sapien
tcttccaaatacgcggatgagaggg

SEQ ID NO: 5517150 - DNA, 25 bp, Homo sapien
agccgaggagaaaaacatctcttcc

SEQ ID NO: 5517151 - DNA, 25 bp, Homo sapien
ctgcagagacagcttcacgagtatg

SEQ ID NO: 5517152 - DNA, 25 bp, Homo sapien
gacagcttcacgagtatgagacgga

SEQ ID NO: 5517153 - DNA, 25 bp, Homo sapien
aacaaaatgctcaaagccgaaatgg

SEQ ID NO: 5517154 - DNA, 25 bp, Homo sapien
tgtccaacctggaaaagaagcagag

SEQ ID NO: 5517155 - DNA, 25 bp, Homo sapien
ttgatcagttgttagccgaggagaa

SEQ ID NO: 5517156 - DNA, 25 bp, Homo sapien
agaagcagaggaaatttgatcagtt

SEQ ID NO: 5517157 - DNA, 25 bp, Homo sapien
ctcgagcggaccaacaaaatgctca

SEQ ID NO: 5517158 - DNA, 25 bp, Homo sapien
gtgtggtgcttgaaagcagacactt

SEQ ID NO: 5517159 - DNA, 25 bp, Homo sapien
ggcctgtgcttaactgacgtgagag

SEQ ID NO: 5517160 - DNA, 25 bp, Homo sapien
ggcctaaatgagaagcatagagcct

SEQ ID NO: 5517161 - DNA, 25 bp, Homo sapien
agagcagaggtagttagcttgatga

SEQ ID NO: 5517162 - DNA, 25 bp, Homo sapien
acgtgagagccagactttgaactcc

SEQ ID NO: 5517163 - DNA, 25 bp, Homo sapien
agggtgacttggagctttcaattcc

SEQ ID NO: 5517164 - DNA, 25 bp, Homo sapien
atgaatgctgtgttgataaggactg

SEQ ID NO: 5517165 - DNA, 25 bp, Homo sapien
atgtttttagtattggtggggagct

SEQ ID NO: 5517166 - DNA, 25 bp, Homo sapien
catggactaagtcatctgggtgggt

SEQ ID NO: 5517167 - DNA, 25 bp, Homo sapien
tgaggaagtacccttggaaagaaga

SEQ ID NO: 5517168 - DNA, 25 bp, Homo sapien
cttgggccaactgagatcacttttc

SEQ ID NO: 5517169 - DNA, 25 bp, Homo sapien
agtggctacacttgacagattctcc

SEQ ID NO: 5517170 - DNA, 25 bp, Homo sapien
tgctatgaggagaccaacacaaaga

SEQ ID NO: 5517171 - DNA, 25 bp, Homo sapien
atcagaacaacaccaaagtggctac

SEQ ID NO: 5517172 - DNA, 25 bp, Homo sapien
gctgtgagcaaacagtgctatgagg

SEQ ID NO: 5517173 - DNA, 25 bp, Homo sapien
agggccacagcattgactatcaggg

SEQ ID NO: 5517174 - DNA, 25 bp, Homo sapien
cattcagaaacacaagacaccacac

SEQ ID NO: 5517175 - DNA, 25 bp, Homo sapien
gacaccacacccaagagaagaaagg

SEQ ID NO: 5517176 - DNA, 25 bp, Homo sapien
aaactccctacagggtctgggctcc

SEQ ID NO: 5517177 - DNA, 25 bp, Homo sapien
agcttgctcaaggcaccagactagc

SEQ ID NO: 5517178 - DNA, 25 bp, Homo sapien
accaagagcaagaacacaacactct

SEQ ID NO: 5517179 - DNA, 25 bp, Homo sapien
gggcaaggagctatagatgccatgc

SEQ ID NO: 5517180 - DNA, 25 bp, Homo sapien
gactaataaggaggctgttgctata

SEQ ID NO: 5517181 - DNA, 25 bp, Homo sapien
ctagcagtgatcaataagcagtaac

SEQ ID NO: 5517182 - DNA, 25 bp, Homo sapien
aatggtgaaagcaatgcagtgacat

SEQ ID NO: 5517183 - DNA, 25 bp, Homo sapien
tagagggcatcaatgaaggtttcct

SEQ ID NO: 5517184 - DNA, 25 bp, Homo sapien
gatgaagtggcatactgagacctta

SEQ ID NO: 5517185 - DNA, 25 bp, Homo sapien
agaattggtaaaaaggacaaatgaa

SEQ ID NO: 5517186 - DNA, 25 bp, Homo sapien
agtgtgccaagtgtatgtctgggaa

SEQ ID NO: 5517187 - DNA, 25 bp, Homo sapien
gaatggatagtaagggcacctaatc

SEQ ID NO: 5517188 - DNA, 25 bp, Homo sapien
agggcacctaatctagagggcatca

SEQ ID NO: 5517189 - DNA, 25 bp, Homo sapien
agagatataacagtgaacaaggctt

SEQ ID NO: 5517190 - DNA, 25 bp, Homo sapien
tttaggtaggttgatggcctgaatt

SEQ ID NO: 5517191 - DNA, 25 bp, Homo sapien
cttagcgcccagtagggctatcgga

SEQ ID NO: 5517192 - DNA, 25 bp, Homo sapien
aatcatgggttaagaagcatctaga

SEQ ID NO: 5517193 - DNA, 25 bp, Homo sapien
aattctgagggtaatgattcacaac

SEQ ID NO: 5517194 - DNA, 25 bp, Homo sapien
tgcagcccttcaggtgaccagggga

SEQ ID NO: 5517195 - DNA, 25 bp, Homo sapien
tggctgggccaatacctctgctggc

SEQ ID NO: 5517196 - DNA, 25 bp, Homo sapien
tccagccctttgtggctgcagagaa

SEQ ID NO: 5517197 - DNA, 25 bp, Homo sapien
caacaatcttagcgcccagtagggc

SEQ ID NO: 5517198 - DNA, 25 bp, Homo sapien
gaagcagtttcagcctcccccagcc

SEQ ID NO: 5517199 - DNA, 25 bp, Homo sapien
aaaggcaaacacacccattaggaat

SEQ ID NO: 5517200 - DNA, 25 bp, Homo sapien
ccaccgggcaactcacttcagtccc

SEQ ID NO: 5517201 - DNA, 25 bp, Homo sapien
cctcccctcctggcgcccaaggaat

SEQ ID NO: 5517202 - DNA, 25 bp, Homo sapien
aatatggcttaggaaggtcttggtg

SEQ ID NO: 5517203 - DNA, 25 bp, Homo sapien
agacagaattgaaacccaggtctct

SEQ ID NO: 5517204 - DNA, 25 bp, Homo sapien
agggaaacgctgctcacaccattac

SEQ ID NO: 5517205 - DNA, 25 bp, Homo sapien
caagagcaggaatgcttctgtccct

SEQ ID NO: 5517206 - DNA, 25 bp, Homo sapien
tgcctggcatgtactaggggttcaa

SEQ ID NO: 5517207 - DNA, 25 bp, Homo sapien
aggccccaagtgggctgcatcacat

SEQ ID NO: 5517208 - DNA, 25 bp, Homo sapien
aggtcttggtggttaacaaggctcc

SEQ ID NO: 5517209 - DNA, 25 bp, Homo sapien
atagctagctaataagaggtggaga

SEQ ID NO: 5517210 - DNA, 25 bp, Homo sapien
agagaggagtccatagctagctaat

SEQ ID NO: 5517211 - DNA, 25 bp, Homo sapien
gagagtcttgtctccaaggcaggct

SEQ ID NO: 5517212 - DNA, 25 bp, Homo sapien
aaggctcccaaataggacccagaac

SEQ ID NO: 5517213 - DNA, 25 bp, Homo sapien
aaagagtttgataagaaatgcagaa

SEQ ID NO: 5517214 - DNA, 25 bp, Homo sapien
ttcagagagtgtgtggaacctctgg

SEQ ID NO: 5517215 - DNA, 25 bp, Homo sapien
gatggggcccaagaattagcattta

SEQ ID NO: 5517216 - DNA, 25 bp, Homo sapien
ctcattttgagaactgctggactgt

SEQ ID NO: 5517217 - DNA, 25 bp, Homo sapien
gtgaccagttcagcctcaaggagta

SEQ ID NO: 5517218 - DNA, 25 bp, Homo sapien
ttacccccaggtttcgatgcagtag

SEQ ID NO: 5517219 - DNA, 25 bp, Homo sapien
gaaatgcagaatattgggttttacc

SEQ ID NO: 5517220 - DNA, 25 bp, Homo sapien
tgctggactgtgctggatcccagtt

SEQ ID NO: 5517221 - DNA, 25 bp, Homo sapien
ttctcacgcactgtggcctgaggac

SEQ ID NO: 5517222 - DNA, 25 bp, Homo sapien
tttcgatgcagtagctctgatgggg

SEQ ID NO: 5517223 - DNA, 25 bp, Homo sapien
tttaacaaacagccaagcaagttct

SEQ ID NO: 5517224 - DNA, 25 bp, Homo sapien
ggatgtgatgtttactgggacagca

SEQ ID NO: 5517225 - DNA, 25 bp, Homo sapien
tgttggaccggagtccatagcacat

SEQ ID NO: 5517226 - DNA, 25 bp, Homo sapien
ggagccatgatgctgctggaatctc

SEQ ID NO: 5517227 - DNA, 25 bp, Homo sapien
ttacagtcactcaggatgggaggaa

SEQ ID NO: 5517228 - DNA, 25 bp, Homo sapien
caggcagaaaggctgtttgaaaatc

SEQ ID NO: 5517229 - DNA, 25 bp, Homo sapien
tccgagtgaccttcttgatgctggc

SEQ ID NO: 5517230 - DNA, 25 bp, Homo sapien
tccgagacacccattgaggggaaga

SEQ ID NO: 5517231 - DNA, 25 bp, Homo sapien
gaggggaagaacatgtcctttgtga

SEQ ID NO: 5517232 - DNA, 25 bp, Homo sapien
gccgatgcatacaagggactatttg

SEQ ID NO: 5517233 - DNA, 25 bp, Homo sapien
ggatgggaggaagatttatttcacc

SEQ ID NO: 5517234 - DNA, 25 bp, Homo sapien
ggtgaaatagagaccattgcccggt

SEQ ID NO: 5517235 - DNA, 25 bp, Homo sapien
atgcaggaagctaaccaacactgtc

SEQ ID NO: 5517236 - DNA, 25 bp, Homo sapien
aaactcatcttgccaacagggcctc

SEQ ID NO: 5517237 - DNA, 25 bp, Homo sapien
accttgtaagagcaaagagttcatt

SEQ ID NO: 5517238 - DNA, 25 bp, Homo sapien
tgcactgctcgttagacaccatctc

SEQ ID NO: 5517239 - DNA, 25 bp, Homo sapien
atggaaaaaaacgatgtacaaacag

SEQ ID NO: 5517240 - DNA, 25 bp, Homo sapien
gccaacagggcctctattgcaccgc

SEQ ID NO: 5517241 - DNA, 25 bp, Homo sapien
atgtcaccagtgtaagcttttgtct

SEQ ID NO: 5517242 - DNA, 25 bp, Homo sapien
aaaggaggtgacattcccatgccta

SEQ ID NO: 5517243 - DNA, 25 bp, Homo sapien
tttgattcagagtaagcttgatggg

SEQ ID NO: 5517244 - DNA, 25 bp, Homo sapien
gtccagctctccagcaaaactcatc

SEQ ID NO: 5517245 - DNA, 25 bp, Homo sapien
accaattatgagaagtacgaacctc

SEQ ID NO: 5517246 - DNA, 25 bp, Homo sapien
attacaaatgttcatatggccaatc

SEQ ID NO: 5517247 - DNA, 25 bp, Homo sapien
actagttaggatcacagaataaaac

SEQ ID NO: 5517248 - DNA, 25 bp, Homo sapien
ccaacagaagagactttagcccctt

SEQ ID NO: 5517249 - DNA, 25 bp, Homo sapien
attaaaaggaactagttaggatcac

SEQ ID NO: 5517250 - DNA, 25 bp, Homo sapien
tacatacaggtagtcagcaggttta

SEQ ID NO: 5517251 - DNA, 25 bp, Homo sapien
taaaagaactctcaagttgggtgga

SEQ ID NO: 5517252 - DNA, 25 bp, Homo sapien
tctcaagttgggtggaatatgtttt

SEQ ID NO: 5517253 - DNA, 25 bp, Homo sapien
tagtcagcaggtttacaaagtaatt

SEQ ID NO: 5517254 - DNA, 25 bp, Homo sapien
tctcaagcagcagtagttatatatt

SEQ ID NO: 5517255 - DNA, 25 bp, Homo sapien
ggtccaaacctaatggcaagattac

SEQ ID NO: 5517256 - DNA, 25 bp, Homo sapien
aacaaaatatggcaggtccaaacct

SEQ ID NO: 5517257 - DNA, 25 bp, Homo sapien
tctgagggccacttcctaccacagc

SEQ ID NO: 5517258 - DNA, 25 bp, Homo sapien
ctgcctccttgactctgagggccac

SEQ ID NO: 5517259 - DNA, 25 bp, Homo sapien
gcggtacaaatttaggctgtgtgtc

SEQ ID NO: 5517260 - DNA, 25 bp, Homo sapien
cctgaagggtgtgcataatcccatc

SEQ ID NO: 5517261 - DNA, 25 bp, Homo sapien
ttagtatgaaacatgcggtacaaat

SEQ ID NO: 5517262 - DNA, 25 bp, Homo sapien
cctaccacagctagggtcccttttc

SEQ ID NO: 5517263 - DNA, 25 bp, Homo sapien
gcaatttgattaacaaggagacagg

SEQ ID NO: 5517264 - DNA, 25 bp, Homo sapien
atgtgcaaactcagagggagttagt

SEQ ID NO: 5517265 - DNA, 25 bp, Homo sapien
caggactccagacaaaacagatctc

SEQ ID NO: 5517266 - DNA, 25 bp, Homo sapien
gggagtggattctgtgattagtagg

SEQ ID NO: 5517267 - DNA, 25 bp, Homo sapien
aggctgtgtgtcagcaagctcattc

SEQ ID NO: 5517268 - DNA, 25 bp, Homo sapien
ctgaaaacttactggtaaagtatac

SEQ ID NO: 5517269 - DNA, 25 bp, Homo sapien
aatgtggccattttactatggacaa

SEQ ID NO: 5517270 - DNA, 25 bp, Homo sapien
attttagacaaagggctgacaatct

SEQ ID NO: 5517271 - DNA, 25 bp, Homo sapien
gggctgacaatctcagaaactagtt

SEQ ID NO: 5517272 - DNA, 25 bp, Homo sapien
gacagaagtcaatcattaatactgc

SEQ ID NO: 5517273 - DNA, 25 bp, Homo sapien
ccattattttagacaaagggctgac

SEQ ID NO: 5517274 - DNA, 25 bp, Homo sapien
ccaggtaactatggcagtgacagaa

SEQ ID NO: 5517275 - DNA, 25 bp, Homo sapien
ggctgacaatccaggtaactatggc

SEQ ID NO: 5517276 - DNA, 25 bp, Homo sapien
tggaactctttaggactttagacaa

SEQ ID NO: 5517277 - DNA, 25 bp, Homo sapien
cctactgtaaagaatcaccaaccac

SEQ ID NO: 5517278 - DNA, 25 bp, Homo sapien
gggagatagggaacttgttactcca

SEQ ID NO: 5517279 - DNA, 25 bp, Homo sapien
gaatttagggtgccttgtgaaataa

SEQ ID NO: 5517280 - DNA, 25 bp, Homo sapien
tctaagaaggagactcatctgaggt

SEQ ID NO: 5517281 - DNA, 25 bp, Homo sapien
tgatgaggtaattagctgtcatatc

SEQ ID NO: 5517282 - DNA, 25 bp, Homo sapien
tctgtgtaacctgggcaagttatct

SEQ ID NO: 5517283 - DNA, 25 bp, Homo sapien
ctgttcgagagaccaagactctatc

SEQ ID NO: 5517284 - DNA, 25 bp, Homo sapien
gccagtgaccaccccaaacacagct

SEQ ID NO: 5517285 - DNA, 25 bp, Homo sapien
gcactccagcctgttcgagagacca

SEQ ID NO: 5517286 - DNA, 25 bp, Homo sapien
aacacagctgttggaaacatgacac

SEQ ID NO: 5517287 - DNA, 25 bp, Homo sapien
atgtgccattctgagatacggtccc

SEQ ID NO: 5517288 - DNA, 25 bp, Homo sapien
ttgtaacactctaagaaggagactc

SEQ ID NO: 5517289 - DNA, 25 bp, Homo sapien
gatacggtcccctcctgccagtgac

SEQ ID NO: 5517290 - DNA, 25 bp, Homo sapien
ggcgcttgtaagagatgttgagtca

SEQ ID NO: 5517291 - DNA, 25 bp, Homo sapien
gcttcctggagaaactcaaaggcgc

SEQ ID NO: 5517292 - DNA, 25 bp, Homo sapien
agagtccacagatgcagagatgtaa

SEQ ID NO: 5517293 - DNA, 25 bp, Homo sapien
tgagaaaacctcagcgcttcctgga

SEQ ID NO: 5517294 - DNA, 25 bp, Homo sapien
gggagtcggaccagcttttcaaaca

SEQ ID NO: 5517295 - DNA, 25 bp, Homo sapien
aatgaaaagcagaaatggtttaagg

SEQ ID NO: 5517296 - DNA, 25 bp, Homo sapien
tgtcagattcttgggaggactggaa

SEQ ID NO: 5517297 - DNA, 25 bp, Homo sapien
ggaaggacttgcaggctgtccatga

SEQ ID NO: 5517298 - DNA, 25 bp, Homo sapien
cttgctcctggagacgataggagag

SEQ ID NO: 5517299 - DNA, 25 bp, Homo sapien
ctggccggcatcaacatgctgctca

SEQ ID NO: 5517300 - DNA, 25 bp, Homo sapien
gagtcagcaggcctctgagcctctt

SEQ ID NO: 5517301 - DNA, 25 bp, Homo sapien
gtctacactgccgtgcaagtgggga

SEQ ID NO: 5517302 - DNA, 25 bp, Homo sapien
ctaagtgggtctccaagcccctctt

SEQ ID NO: 5517303 - DNA, 25 bp, Homo sapien
gagggacgcattagttgatccaggt

SEQ ID NO: 5517304 - DNA, 25 bp, Homo sapien
ggtgcataatcaaataaggaaggct

SEQ ID NO: 5517305 - DNA, 25 bp, Homo sapien
cctcttggggaccatgactagagag

SEQ ID NO: 5517306 - DNA, 25 bp, Homo sapien
cagtgagtgtgagctatggttattg

SEQ ID NO: 5517307 - DNA, 25 bp, Homo sapien
tgaggtattagtcatgagtggagct

SEQ ID NO: 5517308 - DNA, 25 bp, Homo sapien
gtaagacaattgtgggctccagagc

SEQ ID NO: 5517309 - DNA, 25 bp, Homo sapien
gcagacagctgaaataatgaggtat

SEQ ID NO: 5517310 - DNA, 25 bp, Homo sapien
atccaggtgaaacactgagaatggt

SEQ ID NO: 5517311 - DNA, 25 bp, Homo sapien
aggaaggctgccattgctttcacct

SEQ ID NO: 5517312 - DNA, 25 bp, Homo sapien
agattggagattaagaaatagcctc

SEQ ID NO: 5517313 - DNA, 25 bp, Homo sapien
tacatacaaacactggatttcccag

SEQ ID NO: 5517314 - DNA, 25 bp, Homo sapien
ttagtcaagacaaaatacacattac

SEQ ID NO: 5517315 - DNA, 25 bp, Homo sapien
tgtgagatattaagactgaaaatac

SEQ ID NO: 5517316 - DNA, 25 bp, Homo sapien
ttctaaggtcatttatgtgagatat

SEQ ID NO: 5517317 - DNA, 25 bp, Homo sapien
attctagctctggcaggaaagtcaa

SEQ ID NO: 5517318 - DNA, 25 bp, Homo sapien
attatttacttaagaagagggacaa

SEQ ID NO: 5517319 - DNA, 25 bp, Homo sapien
cttcccaaggagattggagattaag

SEQ ID NO: 5517320 - DNA, 25 bp, Homo sapien
aagaaatagcctctgcccctcaatc

SEQ ID NO: 5517321 - DNA, 25 bp, Homo sapien
ggagttaagattctagctctggcag

SEQ ID NO: 5517322 - DNA, 25 bp, Homo sapien
ccagagtcgtcttttaaaggagtta

SEQ ID NO: 5517323 - DNA, 25 bp, Homo sapien
cgcgggaacgctcctaccccatctg

SEQ ID NO: 5517324 - DNA, 25 bp, Homo sapien
aaggagggcttaatgtggccttttc

SEQ ID NO: 5517325 - DNA, 25 bp, Homo sapien
tcggtctatctgaaatgggggaaaa

SEQ ID NO: 5517326 - DNA, 25 bp, Homo sapien
cagctctgggacttgcttcctgacc

SEQ ID NO: 5517327 - DNA, 25 bp, Homo sapien
ctgaaagccaaaggagggcttaatg

SEQ ID NO: 5517328 - DNA, 25 bp, Homo sapien
gcgaccacctcgtgtcccggagttg

SEQ ID NO: 5517329 - DNA, 25 bp, Homo sapien
tgagaagaggagattccacgtctcc

SEQ ID NO: 5517330 - DNA, 25 bp, Homo sapien
gtgctgcgtcctgataggaccccca

SEQ ID NO: 5517331 - DNA, 25 bp, Homo sapien
gccttccgagccctctcccagcgac

SEQ ID NO: 5517332 - DNA, 25 bp, Homo sapien
ggggacacatgtctgcctgtcggtc

SEQ ID NO: 5517333 - DNA, 25 bp, Homo sapien
agatgtgagaaggtgtcaccctgaa

SEQ ID NO: 5517334 - DNA, 25 bp, Homo sapien
ctcacaggcccctcgttgggctgtc

SEQ ID NO: 5517335 - DNA, 25 bp, Homo sapien
agaagcacaagcccagtatcccaat

SEQ ID NO: 5517336 - DNA, 25 bp, Homo sapien
tgctgatgtcatatctggtggggag

SEQ ID NO: 5517337 - DNA, 25 bp, Homo sapien
atagcaagaccgcatctgtaccaaa

SEQ ID NO: 5517338 - DNA, 25 bp, Homo sapien
gtgtctctcagggcaggtttcaaaa

SEQ ID NO: 5517339 - DNA, 25 bp, Homo sapien
gagcagctctcggtgacataagcct

SEQ ID NO: 5517340 - DNA, 25 bp, Homo sapien
ggcaggtttcaaaaaggcagcctcc

SEQ ID NO: 5517341 - DNA, 25 bp, Homo sapien
ctgtcaggcctgaggtgtctctcag

SEQ ID NO: 5517342 - DNA, 25 bp, Homo sapien
aggcgtttgacgttctaggttatcc

SEQ ID NO: 5517343 - DNA, 25 bp, Homo sapien
aagccttgaagtccgagtcctcagg

SEQ ID NO: 5517344 - DNA, 25 bp, Homo sapien
cccagcagatctgcggtcctccctg

SEQ ID NO: 5517345 - DNA, 25 bp, Homo sapien
agtgaataacgtcaaacaacgtacg

SEQ ID NO: 5517346 - DNA, 25 bp, Homo sapien
cgtacgttgtttgacgttattcact

SEQ ID NO: 5517347 - DNA, 25 bp, Homo sapien
aagtgcgatggagacaatttgttag

SEQ ID NO: 5517348 - DNA, 25 bp, Homo sapien
gagagagaacgattacctagaaaca

SEQ ID NO: 5517349 - DNA, 25 bp, Homo sapien
aaagggcaaaagttcttcagattac

SEQ ID NO: 5517350 - DNA, 25 bp, Homo sapien
cattggaaaatgtaagaaactttga

SEQ ID NO: 5517351 - DNA, 25 bp, Homo sapien
agttgatttagggtggtagaagtaa

SEQ ID NO: 5517352 - DNA, 25 bp, Homo sapien
cagatttccaaaaaacagtaggtac

SEQ ID NO: 5517353 - DNA, 25 bp, Homo sapien
tgttacacagacgcttgagaagttt

SEQ ID NO: 5517354 - DNA, 25 bp, Homo sapien
aaagatggagtaaaatatgtataaa

SEQ ID NO: 5517355 - DNA, 25 bp, Homo sapien
taaaaaatagggacctggctgttga

SEQ ID NO: 5517356 - DNA, 25 bp, Homo sapien
cttgagaagtttgttgagagagaac

SEQ ID NO: 5517357 - DNA, 25 bp, Homo sapien
tgttagaacatgtggcttgttacac

SEQ ID NO: 5517358 - DNA, 25 bp, Homo sapien
gaggtccaggtcacccttgacgacg

SEQ ID NO: 5517359 - DNA, 25 bp, Homo sapien
cgtcgtcaagggtgacctggacctc

SEQ ID NO: 5517360 - DNA, 25 bp, Homo sapien
tactctgagggttgtttcactgtta

SEQ ID NO: 5517361 - DNA, 25 bp, Homo sapien
tacatatttcgaagagacaacagat

SEQ ID NO: 5517362 - DNA, 25 bp, Homo sapien
tgacagaatctctactccaggtctc

SEQ ID NO: 5517363 - DNA, 25 bp, Homo sapien
cacgaaggcatactctgagggttgt

SEQ ID NO: 5517364 - DNA, 25 bp, Homo sapien
tgttacagcagtacatatttcgaag

SEQ ID NO: 5517365 - DNA, 25 bp, Homo sapien
tcgaagagacaacagattccatttc

SEQ ID NO: 5517366 - DNA, 25 bp, Homo sapien
agcccacacgaaggcatactctgag

SEQ ID NO: 5517367 - DNA, 25 bp, Homo sapien
acacagacagttcccccaagttcaa

SEQ ID NO: 5517368 - DNA, 25 bp, Homo sapien
cagccagttgcatattcttgaccca

SEQ ID NO: 5517369 - DNA, 25 bp, Homo sapien
caatgtgcccagccagttgcatatt

SEQ ID NO: 5517370 - DNA, 25 bp, Homo sapien
cttgacccaaacacagacagttccc

SEQ ID NO: 5517371 - DNA, 25 bp, Homo sapien
gcccacctcagaaaaggtcacactg

SEQ ID NO: 5517372 - DNA, 25 bp, Homo sapien
aaggctggcagtaaacattaacatt

SEQ ID NO: 5517373 - DNA, 25 bp, Homo sapien
tgtccaaacaatcaagagccacttc

SEQ ID NO: 5517374 - DNA, 25 bp, Homo sapien
aatcaacacaacgtagcaaccctcc

SEQ ID NO: 5517375 - DNA, 25 bp, Homo sapien
aactcttctagacccagcctgattc

SEQ ID NO: 5517376 - DNA, 25 bp, Homo sapien
tgtgtaactgtgaaaaatgcacgtt

SEQ ID NO: 5517377 - DNA, 25 bp, Homo sapien
atagtcacaactgcaaactggcatt

SEQ ID NO: 5517378 - DNA, 25 bp, Homo sapien
actggcattgctatgcaaggctggc

SEQ ID NO: 5517379 - DNA, 25 bp, Homo sapien
atacaggcctacagtctgataactc

SEQ ID NO: 5517380 - DNA, 25 bp, Homo sapien
tagcttgcaaaattaatacaggcct

SEQ ID NO: 5517381 - DNA, 25 bp, Homo sapien
ctgtatgcactgtatgaaccttgtc

SEQ ID NO: 5517382 - DNA, 25 bp, Homo sapien
tgagatccaggtcagttgtgattaa

SEQ ID NO: 5517383 - DNA, 25 bp, Homo sapien
accctaggtcctgtgtcagcaccac

SEQ ID NO: 5517384 - DNA, 25 bp, Homo sapien
gctgtatagctgtgtcaggtggcag

SEQ ID NO: 5517385 - DNA, 25 bp, Homo sapien
ttgagctttgtcctaggatgcagtg

SEQ ID NO: 5517386 - DNA, 25 bp, Homo sapien
tccttacacacatgcgctgatcagt

SEQ ID NO: 5517387 - DNA, 25 bp, Homo sapien
gtggcagtgcccatctagggtttct

SEQ ID NO: 5517388 - DNA, 25 bp, Homo sapien
gtagtcccagaggtacttttgagct

SEQ ID NO: 5517389 - DNA, 25 bp, Homo sapien
cagtgccccataaatcatgaggttt

SEQ ID NO: 5517390 - DNA, 25 bp, Homo sapien
atgcagtgtgatcctttcaggtcct

SEQ ID NO: 5517391 - DNA, 25 bp, Homo sapien
ctactggatgctagacattgtacat

SEQ ID NO: 5517392 - DNA, 25 bp, Homo sapien
ggcctgaggtggttccttacacaca

SEQ ID NO: 5517393 - DNA, 25 bp, Homo sapien
gaggatgtctatgcaaagttggatt

SEQ ID NO: 5517394 - DNA, 25 bp, Homo sapien
gtctgctgatatttgtggaaaaaaa

SEQ ID NO: 5517395 - DNA, 25 bp, Homo sapien
gtattgcacatctgaactgggactg

SEQ ID NO: 5517396 - DNA, 25 bp, Homo sapien
taagatcgggttccttttctgccag

SEQ ID NO: 5517397 - DNA, 25 bp, Homo sapien
actgattgcgattctgaggatgtct

SEQ ID NO: 5517398 - DNA, 25 bp, Homo sapien
ccaggagtagctggaaattaagatc

SEQ ID NO: 5517399 - DNA, 25 bp, Homo sapien
attttcgtgtgtactatggtgtgtg

SEQ ID NO: 5517400 - DNA, 25 bp, Homo sapien
agtagctggaaattaagatcgggtt

SEQ ID NO: 5517401 - DNA, 25 bp, Homo sapien
aactgggactgttaacactgatgcc

SEQ ID NO: 5517402 - DNA, 25 bp, Homo sapien
cctactgtatcaaaggggagtctgg

SEQ ID NO: 5517403 - DNA, 25 bp, Homo sapien
gaagggcaaccccatgactgattgc

SEQ ID NO: 5517404 - DNA, 25 bp, Homo sapien
atctgttagctgaagagagaaacta

SEQ ID NO: 5517405 - DNA, 25 bp, Homo sapien
ggaaatgcttctggaactgaaaaat

SEQ ID NO: 5517406 - DNA, 25 bp, Homo sapien
tatgaagactatttgcaatgtgggc

SEQ ID NO: 5517407 - DNA, 25 bp, Homo sapien
tggtgtctttgtctggaaaactttc

SEQ ID NO: 5517408 - DNA, 25 bp, Homo sapien
aaaattccaggtcaacaggtagtac

SEQ ID NO: 5517409 - DNA, 25 bp, Homo sapien
atgaagaaatctttgcaagtgttct

SEQ ID NO: 5517410 - DNA, 25 bp, Homo sapien
tcttggtatatgaaatgctgagtta

SEQ ID NO: 5517411 - DNA, 25 bp, Homo sapien
gaaatgctgagttaagaaatgggac

SEQ ID NO: 5517412 - DNA, 25 bp, Homo sapien
tcagtgcaaatcaaagcttcaagtt

SEQ ID NO: 5517413 - DNA, 25 bp, Homo sapien
aaaagaacagataaagtacttgagg

SEQ ID NO: 5517414 - DNA, 25 bp, Homo sapien
tatccaagttaattcagtgcaaatc

SEQ ID NO: 5517415 - DNA, 25 bp, Homo sapien
aaatttcgaagcatactttgacaga

SEQ ID NO: 5517416 - DNA, 25 bp, Homo sapien
tctgtcaaagtatgcttcgaaattt

SEQ ID NO: 5517417 - DNA, 25 bp, Homo sapien
cggaaacctactgcggcgtccactc

SEQ ID NO: 5517418 - DNA, 25 bp, Homo sapien
gagtggacgccgcagtaggtttccg

SEQ ID NO: 5517419 - DNA, 25 bp, Homo sapien
caagctgaacgtagaacgatattcc

SEQ ID NO: 5517420 - DNA, 25 bp, Homo sapien
tattaccagggactgaagtgagttg

SEQ ID NO: 5517421 - DNA, 25 bp, Homo sapien
cctggtggctttagctcccctggtc

SEQ ID NO: 5517422 - DNA, 25 bp, Homo sapien
tggagtgcagcttaagtgcgaatca

SEQ ID NO: 5517423 - DNA, 25 bp, Homo sapien
aatatgtatgtgtggactagattac

SEQ ID NO: 5517424 - DNA, 25 bp, Homo sapien
ccctccgatagccctactgggcgct

SEQ ID NO: 5517425 - DNA, 25 bp, Homo sapien
actgggcgctaagattgttgtgaat

SEQ ID NO: 5517426 - DNA, 25 bp, Homo sapien
ggggaggctgaaactgcttcccttc

SEQ ID NO: 5517427 - DNA, 25 bp, Homo sapien
tctgcagccacaaagggctggattc

SEQ ID NO: 5517428 - DNA, 25 bp, Homo sapien
tcccctggtcacctgaagggctgca

SEQ ID NO: 5517429 - DNA, 25 bp, Homo sapien
gctgcagtgacccctcctggccagc

SEQ ID NO: 5517430 - DNA, 25 bp, Homo sapien
acagaatcccagcttcgagcaggag

SEQ ID NO: 5517431 - DNA, 25 bp, Homo sapien
aggcagagagaacatctatggaaat

SEQ ID NO: 5517432 - DNA, 25 bp, Homo sapien
gatttcaatgaagcccaggtgagga

SEQ ID NO: 5517433 - DNA, 25 bp, Homo sapien
atggctatggttctgttgctgggac

SEQ ID NO: 5517434 - DNA, 25 bp, Homo sapien
ttgggcaggatagactaaatcacat

SEQ ID NO: 5517435 - DNA, 25 bp, Homo sapien
cctcagtatgctgcaggtgaggcag

SEQ ID NO: 5517436 - DNA, 25 bp, Homo sapien
ggggaacctggataaagtagccaga

SEQ ID NO: 5517437 - DNA, 25 bp, Homo sapien
tcaggaactgagaaactgccaaaat

SEQ ID NO: 5517438 - DNA, 25 bp, Homo sapien
tcacattttgggtagtagttgggag

SEQ ID NO: 5517439 - DNA, 25 bp, Homo sapien
caacttgctgtgttgagaagaggcc

SEQ ID NO: 5517440 - DNA, 25 bp, Homo sapien
gagcaggagctggctatatccttga

SEQ ID NO: 5517441 - DNA, 25 bp, Homo sapien
tgccagttcatgttgtccgtgcctt

SEQ ID NO: 5517442 - DNA, 25 bp, Homo sapien
agtctgcaattgtgggaggcatttt

SEQ ID NO: 5517443 - DNA, 25 bp, Homo sapien
ttttccagcccgataaccatccttc

SEQ ID NO: 5517444 - DNA, 25 bp, Homo sapien
taacatagatgttgtagggtgaaga

SEQ ID NO: 5517445 - DNA, 25 bp, Homo sapien
tcaaagttggattgtgctgcaaatc

SEQ ID NO: 5517446 - DNA, 25 bp, Homo sapien
cacaagtgacatgtctacaggacac

SEQ ID NO: 5517447 - DNA, 25 bp, Homo sapien
gtaaaatgagtgagtctgcaattgt

SEQ ID NO: 5517448 - DNA, 25 bp, Homo sapien
tggtcccaagaaaaggtgttgacaa

SEQ ID NO: 5517449 - DNA, 25 bp, Homo sapien
cattgagaggctccaaagcatcagt

SEQ ID NO: 5517450 - DNA, 25 bp, Homo sapien
tacaggacacggtatccactgactt

SEQ ID NO: 5517451 - DNA, 25 bp, Homo sapien
tcgtaagaactaagaggtaaaatca

SEQ ID NO: 5517452 - DNA, 25 bp, Homo sapien
ggccagcctgtgctgaccagtacac

SEQ ID NO: 5517453 - DNA, 25 bp, Homo sapien
tccaccgcctagaaaacagactgca

SEQ ID NO: 5517454 - DNA, 25 bp, Homo sapien
caagaagacgtgacaacaccagaaa

SEQ ID NO: 5517455 - DNA, 25 bp, Homo sapien
cgtgacaacaccagaaacaagaaca

SEQ ID NO: 5517456 - DNA, 25 bp, Homo sapien
ctggccagcctgtgctgaccagtac

SEQ ID NO: 5517457 - DNA, 25 bp, Homo sapien
tctctggccagcctgtgctgaccag

SEQ ID NO: 5517458 - DNA, 25 bp, Homo sapien
gaccagtacacagtgaatcacacac

SEQ ID NO: 5517459 - DNA, 25 bp, Homo sapien
gtgctgaccagtacacagtgaatca

SEQ ID NO: 5517460 - DNA, 25 bp, Homo sapien
caccgcctagaaaacagactgcaaa

SEQ ID NO: 5517461 - DNA, 25 bp, Homo sapien
gtacacagtgaatcacacacagaaa

SEQ ID NO: 5517462 - DNA, 25 bp, Homo sapien
gaagacgtgacaacaccagaaacaa

SEQ ID NO: 5517463 - DNA, 25 bp, Homo sapien
tgggttaaggcaaaaaccatccagc

SEQ ID NO: 5517464 - DNA, 25 bp, Homo sapien
catgtgattggcatagtgacagcta

SEQ ID NO: 5517465 - DNA, 25 bp, Homo sapien
cttgtgaacacatgacgtcagatca

SEQ ID NO: 5517466 - DNA, 25 bp, Homo sapien
ctccagattggcagaaagttgatat

SEQ ID NO: 5517467 - DNA, 25 bp, Homo sapien
caggaagtgggaaaactctatccac

SEQ ID NO: 5517468 - DNA, 25 bp, Homo sapien
tttacaggtcagttgaggcaaaaaa

SEQ ID NO: 5517469 - DNA, 25 bp, Homo sapien
cagttgaggcaaaaaactatgggtt

SEQ ID NO: 5517470 - DNA, 25 bp, Homo sapien
agggagtgagccagcttctttgtct

SEQ ID NO: 5517471 - DNA, 25 bp, Homo sapien
attcaaagttgatgttggagggagt

SEQ ID NO: 5517472 - DNA, 25 bp, Homo sapien
ccagtaaaaggagaccatgtgattg

SEQ ID NO: 5517473 - DNA, 25 bp, Homo sapien
actggagatagtatttggaatgaat

SEQ ID NO: 5517474 - DNA, 25 bp, Homo sapien
ccagagatggtctgtattgacagct

SEQ ID NO: 5517475 - DNA, 25 bp, Homo sapien
aaagtgactctgggcttaattagaa

SEQ ID NO: 5517476 - DNA, 25 bp, Homo sapien
aaagaaacagaccaaatgtgcaggt

SEQ ID NO: 5517477 - DNA, 25 bp, Homo sapien
gacatggaaccagagatggtctgta

SEQ ID NO: 5517478 - DNA, 25 bp, Homo sapien
gtcttacttgtcatttgaaggtgca

SEQ ID NO: 5517479 - DNA, 25 bp, Homo sapien
tgctaataaagacatggaaccagag

SEQ ID NO: 5517480 - DNA, 25 bp, Homo sapien
atgtgcaggttggagatctcatcta

SEQ ID NO: 5517481 - DNA, 25 bp, Homo sapien
cgagccaatggaatgggtgtcattg

SEQ ID NO: 5517482 - DNA, 25 bp, Homo sapien
tgctttttaaagtgactctgggctt

SEQ ID NO: 5517483 - DNA, 25 bp, Homo sapien
tgaaggtgcaactaaaagaaacaga

SEQ ID NO: 5517484 - DNA, 25 bp, Homo sapien
caatggaatgggtgtcattggacag

SEQ ID NO: 5517485 - DNA, 25 bp, Homo sapien
atggcagaggggcttcttttagcta

SEQ ID NO: 5517486 - DNA, 25 bp, Homo sapien
tagccgtctgagtgagctgtgtatg

SEQ ID NO: 5517487 - DNA, 25 bp, Homo sapien
cacgacagcactacacagcatctcc

SEQ ID NO: 5517488 - DNA, 25 bp, Homo sapien
aagagtctagagtggtttttgcagc

SEQ ID NO: 5517489 - DNA, 25 bp, Homo sapien
ctcaagaaatttagacgcccacgac

SEQ ID NO: 5517490 - DNA, 25 bp, Homo sapien
aagcctactgtgcgtgagatcctct

SEQ ID NO: 5517491 - DNA, 25 bp, Homo sapien
tgtgtatgaacaagtcccaggagtt

SEQ ID NO: 5517492 - DNA, 25 bp, Homo sapien
gaccaacatgccaggtgacattggc

SEQ ID NO: 5517493 - DNA, 25 bp, Homo sapien
gtgacattggcccctagaccctctc

SEQ ID NO: 5517494 - DNA, 25 bp, Homo sapien
gggttgagtgtacaaagcctactgt

SEQ ID NO: 5517495 - DNA, 25 bp, Homo sapien
tagccatgagactccttgtggcctc

SEQ ID NO: 5517496 - DNA, 25 bp, Homo sapien
gacgccgtccaccttaaggtgtggg

SEQ ID NO: 5517497 - DNA, 25 bp, Homo sapien
cccacaccttaaggtggacggcgtc

SEQ ID NO: 5517498 - DNA, 25 bp, Homo sapien
agcaagggaatacacatggtactga

SEQ ID NO: 5517499 - DNA, 25 bp, Homo sapien
acaaacatgttacctggaagcaaat

SEQ ID NO: 5517500 - DNA, 25 bp, Homo sapien
ggaagcaaatgtacccttaaggatg

SEQ ID NO: 5517501 - DNA, 25 bp, Homo sapien
acaactggtcgtggcaataatttgg

SEQ ID NO: 5517502 - DNA, 25 bp, Homo sapien
aataagacagtcaaaaaggaaagct

SEQ ID NO: 5517503 - DNA, 25 bp, Homo sapien
acaatcactgggatagcattcagcc

SEQ ID NO: 5517504 - DNA, 25 bp, Homo sapien
cttgaaaagtactacaataaggaca

SEQ ID NO: 5517505 - DNA, 25 bp, Homo sapien
taaaaaatgaatgaagactataatg

SEQ ID NO: 5517506 - DNA, 25 bp, Homo sapien
aaatatcccaaacagacaaagcaga

SEQ ID NO: 5517507 - DNA, 25 bp, Homo sapien
gcaaacagggcacgtacaatcactg

SEQ ID NO: 5517508 - DNA, 25 bp, Homo sapien
gcagaacatggaatagatatatgca

SEQ ID NO: 5517509 - DNA, 25 bp, Homo sapien
atattccagtaggggcagcattttg

SEQ ID NO: 5517510 - DNA, 25 bp, Homo sapien
caaggcaaaataacaattaggtgat

SEQ ID NO: 5517511 - DNA, 25 bp, Homo sapien
aagacagcttcatgagagagctgcc

SEQ ID NO: 5517512 - DNA, 25 bp, Homo sapien
attaagttgatctaggagatggtgg

SEQ ID NO: 5517513 - DNA, 25 bp, Homo sapien
aggaggcaaattggtgaattaagtt

SEQ ID NO: 5517514 - DNA, 25 bp, Homo sapien
gataaataaatagtgtgtggatgtc

SEQ ID NO: 5517515 - DNA, 25 bp, Homo sapien
gatggtggctgacatacactaacgg

SEQ ID NO: 5517516 - DNA, 25 bp, Homo sapien
taagtgaaataaacagtctggtctg

SEQ ID NO: 5517517 - DNA, 25 bp, Homo sapien
ttcccccaggcaaaatgatctcaat

SEQ ID NO: 5517518 - DNA, 25 bp, Homo sapien
agcatgggagtagttaacttccccc

SEQ ID NO: 5517519 - DNA, 25 bp, Homo sapien
tctcatgggacagatggcattttta

SEQ ID NO: 5517520 - DNA, 25 bp, Homo sapien
gcaggaaagaatgttcatggcatgt

SEQ ID NO: 5517521 - DNA, 25 bp, Homo sapien
gggtgggttttctcagcaagaggaa

SEQ ID NO: 5517522 - DNA, 25 bp, Homo sapien
acgtggagcttcctgtgggctcatc

SEQ ID NO: 5517523 - DNA, 25 bp, Homo sapien
ggttgggtgagtcatggtcctcaaa

SEQ ID NO: 5517524 - DNA, 25 bp, Homo sapien
taagtccaaagtgagagaatacatt

SEQ ID NO: 5517525 - DNA, 25 bp, Homo sapien
agccagtcatatagaaaagcccatc

SEQ ID NO: 5517526 - DNA, 25 bp, Homo sapien
gcgcatggatggaattaccaggcaa

SEQ ID NO: 5517527 - DNA, 25 bp, Homo sapien
ctgaggcctggtgcatgtagctcag

SEQ ID NO: 5517528 - DNA, 25 bp, Homo sapien
aaagaccatggcatagttggatatc

SEQ ID NO: 5517529 - DNA, 25 bp, Homo sapien
caaggaatctggtagctcagactgc

SEQ ID NO: 5517530 - DNA, 25 bp, Homo sapien
tgggctcatctgcagaaggtctaag

SEQ ID NO: 5517531 - DNA, 25 bp, Homo sapien
gatgtacatgcaaatggtgagaaaa

SEQ ID NO: 5517532 - DNA, 25 bp, Homo sapien
aaatctgaaaagtcactgaaatatt

SEQ ID NO: 5517533 - DNA, 25 bp, Homo sapien
taagagtaagctataacataagatt

SEQ ID NO: 5517534 - DNA, 25 bp, Homo sapien
cataagattgagttcccaccctgtg

SEQ ID NO: 5517535 - DNA, 25 bp, Homo sapien
accctgtgtttgctactgatgtgat

SEQ ID NO: 5517536 - DNA, 25 bp, Homo sapien
cacagcggctaacaagaaataaatc

SEQ ID NO: 5517537 - DNA, 25 bp, Homo sapien
agataatgattagacacatgaactc

SEQ ID NO: 5517538 - DNA, 25 bp, Homo sapien
ttggtcaggttgaaccactgcacaa

SEQ ID NO: 5517539 - DNA, 25 bp, Homo sapien
ttacttcccagcagcataataccac

SEQ ID NO: 5517540 - DNA, 25 bp, Homo sapien
gtagcaccaaatagacacagcggct

SEQ ID NO: 5517541 - DNA, 25 bp, Homo sapien
gaaaacaattggaaagacatgatgt

SEQ ID NO: 5517542 - DNA, 25 bp, Homo sapien
gacgtagaaagagcatgaatatgtc

SEQ ID NO: 5517543 - DNA, 25 bp, Homo sapien
attgctagagacatacatccagtcc

SEQ ID NO: 5517544 - DNA, 25 bp, Homo sapien
atccctgcaggccaaaaaaaattgc

SEQ ID NO: 5517545 - DNA, 25 bp, Homo sapien
ttagtcaaatgaacaaatgcaaaca

SEQ ID NO: 5517546 - DNA, 25 bp, Homo sapien
gcaaggcataagaaaatggttaatc

SEQ ID NO: 5517547 - DNA, 25 bp, Homo sapien
aaaacaacttttggcacaagaatgc

SEQ ID NO: 5517548 - DNA, 25 bp, Homo sapien
gtatgttgccattacagtgtactgc

SEQ ID NO: 5517549 - DNA, 25 bp, Homo sapien
atgtcaatagcaaggcataagaaaa

SEQ ID NO: 5517550 - DNA, 25 bp, Homo sapien
tcagccactagacgtagaaagagca

SEQ ID NO: 5517551 - DNA, 25 bp, Homo sapien
atctcaacatgaggatacaacccct

SEQ ID NO: 5517552 - DNA, 25 bp, Homo sapien
tagaaagtacctcgtattgctagag

SEQ ID NO: 5517553 - DNA, 25 bp, Homo sapien
atgaaagactgaccagtagaaggtg

SEQ ID NO: 5517554 - DNA, 25 bp, Homo sapien
agacaagcattcattgtgtaatatc

SEQ ID NO: 5517555 - DNA, 25 bp, Homo sapien
gccaccacatcccatatacacatct

SEQ ID NO: 5517556 - DNA, 25 bp, Homo sapien
ctggcaagtaagaactgttcagaca

SEQ ID NO: 5517557 - DNA, 25 bp, Homo sapien
actataatccaaaggacttccattt

SEQ ID NO: 5517558 - DNA, 25 bp, Homo sapien
tctgttttcacccttcaacgggaga

SEQ ID NO: 5517559 - DNA, 25 bp, Homo sapien
tgatgatgtactctagactgtcacc

SEQ ID NO: 5517560 - DNA, 25 bp, Homo sapien
tccattgacaaggcaagttcacatt

SEQ ID NO: 5517561 - DNA, 25 bp, Homo sapien
ggcttacagaataatccagaacttt

SEQ ID NO: 5517562 - DNA, 25 bp, Homo sapien
cattcagcaaagtgccaccacatcc

SEQ ID NO: 5517563 - DNA, 25 bp, Homo sapien
aagtgatgaaagactgaccagtaga

SEQ ID NO: 5517564 - DNA, 25 bp, Homo sapien
aatgtaaataggataataactggcc

SEQ ID NO: 5517565 - DNA, 25 bp, Homo sapien
aactggcctaaggtacaagacatcc

SEQ ID NO: 5517566 - DNA, 25 bp, Homo sapien
atcagtacatgaaacaaatgagctc

SEQ ID NO: 5517567 - DNA, 25 bp, Homo sapien
catgaaaaaagattagtgaaaacac

SEQ ID NO: 5517568 - DNA, 25 bp, Homo sapien
atgcttgctgatggggtaatcaact

SEQ ID NO: 5517569 - DNA, 25 bp, Homo sapien
tggttgacatcatgccaaggtgccc

SEQ ID NO: 5517570 - DNA, 25 bp, Homo sapien
agagaaggaaacatgcttgttggga

SEQ ID NO: 5517571 - DNA, 25 bp, Homo sapien
aggcaatgactattcagggcaaacc

SEQ ID NO: 5517572 - DNA, 25 bp, Homo sapien
cccataatggccagtgttagagaag

SEQ ID NO: 5517573 - DNA, 25 bp, Homo sapien
tgaaatacaagcataagaaagaatt

SEQ ID NO: 5517574 - DNA, 25 bp, Homo sapien
cttcctgaaacgtgcaaagttgtgc

SEQ ID NO: 5517575 - DNA, 25 bp, Homo sapien
cctgccccgccggcccgacgtgacc

SEQ ID NO: 5517576 - DNA, 25 bp, Homo sapien
ggtcacgtcgggccggcggggcagg

SEQ ID NO: 5517577 - DNA, 25 bp, Homo sapien
ccctgccccgccggcccgacgtgac

SEQ ID NO: 5517578 - DNA, 25 bp, Homo sapien
gtcacgtcgggccggcggggcaggg

SEQ ID NO: 5517579 - DNA, 25 bp, Homo sapien
aaatggtatacttgaaaagagtagc

SEQ ID NO: 5517580 - DNA, 25 bp, Homo sapien
catctgcaccacaaaaaggttaatc

SEQ ID NO: 5517581 - DNA, 25 bp, Homo sapien
agagtagaataccctgtcacctgat

SEQ ID NO: 5517582 - DNA, 25 bp, Homo sapien
aatcacagtctgtagagatatgttt

SEQ ID NO: 5517583 - DNA, 25 bp, Homo sapien
cctgatacttagaaccatctgcacc

SEQ ID NO: 5517584 - DNA, 25 bp, Homo sapien
caagagctggtcccaactgctatac

SEQ ID NO: 5517585 - DNA, 25 bp, Homo sapien
cagggtcctcaaaataaaaggaggc

SEQ ID NO: 5517586 - DNA, 25 bp, Homo sapien
gtgcatgcatcaacacacacatatt

SEQ ID NO: 5517587 - DNA, 25 bp, Homo sapien
aattgactagaaagagtagaatacc

SEQ ID NO: 5517588 - DNA, 25 bp, Homo sapien
ggcacagctggttagtttatgaatc

SEQ ID NO: 5517589 - DNA, 25 bp, Homo sapien
attatagtgactacagggtcctcaa

SEQ ID NO: 5517590 - DNA, 25 bp, Homo sapien
gaacgaattcattggctcagtattt

SEQ ID NO: 5517591 - DNA, 25 bp, Homo sapien
atgaagtggttagtcaacgaccgca

SEQ ID NO: 5517592 - DNA, 25 bp, Homo sapien
cgaccgcaccgacccttaagcgttc

SEQ ID NO: 5517593 - DNA, 25 bp, Homo sapien
tcacttcgaaatgaatgtggaaatg

SEQ ID NO: 5517594 - DNA, 25 bp, Homo sapien
aagcgttcttaagacgagagctgtg

SEQ ID NO: 5517595 - DNA, 25 bp, Homo sapien
ggacgagcctaatgaagtggttagt

SEQ ID NO: 5517596 - DNA, 25 bp, Homo sapien
ctgaaaattaacaggccctctccca

SEQ ID NO: 5517597 - DNA, 25 bp, Homo sapien
tgtggaaatgctgtcacgccttatt

SEQ ID NO: 5517598 - DNA, 25 bp, Homo sapien
ctacgcaaggagcccttttccctta

SEQ ID NO: 5517599 - DNA, 25 bp, Homo sapien
taatcttacatagctgaacgaattc

SEQ ID NO: 5517600 - DNA, 25 bp, Homo sapien
aaaaaggcgaaagccttgaggttga

SEQ ID NO: 5517601 - DNA, 25 bp, Homo sapien
agggataaaggctgaactcatcatc

SEQ ID NO: 5517602 - DNA, 25 bp, Homo sapien
gaagtctcgaatgccagccacctgt

SEQ ID NO: 5517603 - DNA, 25 bp, Homo sapien
agttacatctagcggaaccacgagg

SEQ ID NO: 5517604 - DNA, 25 bp, Homo sapien
gcaactgagagaatcaaaagaaact

SEQ ID NO: 5517605 - DNA, 25 bp, Homo sapien
gtcaaggaagtgacctgtgactgca

SEQ ID NO: 5517606 - DNA, 25 bp, Homo sapien
ttttaccccaggattaagagatgcc

SEQ ID NO: 5517607 - DNA, 25 bp, Homo sapien
tcctatggaatagaagacgtggtta

SEQ ID NO: 5517608 - DNA, 25 bp, Homo sapien
tctcctcgtgaaatggccggggaga

SEQ ID NO: 5517609 - DNA, 25 bp, Homo sapien
ttacacagtgactggctgcaagcag

SEQ ID NO: 5517610 - DNA, 25 bp, Homo sapien
agacgtggttacagtgataaagatc

SEQ ID NO: 5517611 - DNA, 25 bp, Homo sapien
cacagtgagtctaagtatggcaatc

SEQ ID NO: 5517612 - DNA, 25 bp, Homo sapien
ctgcttgcctgcaagcagggcacag

SEQ ID NO: 5517613 - DNA, 25 bp, Homo sapien
tattggagcttggaatgtcatagca

SEQ ID NO: 5517614 - DNA, 25 bp, Homo sapien
tctgggacagtctttattggagctt

SEQ ID NO: 5517615 - DNA, 25 bp, Homo sapien
gcaggcattttgcagttagggagaa

SEQ ID NO: 5517616 - DNA, 25 bp, Homo sapien
tggaatgtcatagcaattcgccctc

SEQ ID NO: 5517617 - DNA, 25 bp, Homo sapien
ctcatcagaggcagactgtgagaaa

SEQ ID NO: 5517618 - DNA, 25 bp, Homo sapien
cttacactcacacctgcgcactcgc

SEQ ID NO: 5517619 - DNA, 25 bp, Homo sapien
acaggcgcacacgcatacactctcc

SEQ ID NO: 5517620 - DNA, 25 bp, Homo sapien
ctggaagctgcaggcattttgcagt

SEQ ID NO: 5517621 - DNA, 25 bp, Homo sapien
cacacctgcgcactcgctgccggtg

SEQ ID NO: 5517622 - DNA, 25 bp, Homo sapien
attcgccctcatcagaggcagactg

SEQ ID NO: 5517623 - DNA, 25 bp, Homo sapien
catgactacgtgattaaggggtata

SEQ ID NO: 5517624 - DNA, 25 bp, Homo sapien
atggatcccatcagcatgtaattac

SEQ ID NO: 5517625 - DNA, 25 bp, Homo sapien
cagtacagaaaatgatctgagaatg

SEQ ID NO: 5517626 - DNA, 25 bp, Homo sapien
gaaagcaaagttatcttctcatgac

SEQ ID NO: 5517627 - DNA, 25 bp, Homo sapien
aaacctgggtgcaatggatcccatc

SEQ ID NO: 5517628 - DNA, 25 bp, Homo sapien
caggccaaggtcaaaaacctgggtg

SEQ ID NO: 5517629 - DNA, 25 bp, Homo sapien
agtctagcatttacaggccaaggtc

SEQ ID NO: 5517630 - DNA, 25 bp, Homo sapien
attgctgtggtctggagaccagcag

SEQ ID NO: 5517631 - DNA, 25 bp, Homo sapien
agaaaaagaataacaagatatcata

SEQ ID NO: 5517632 - DNA, 25 bp, Homo sapien
taaggggtatatataaggatgaatt

SEQ ID NO: 5517633 - DNA, 25 bp, Homo sapien
ttctatggaaagacagaattgcaaa

SEQ ID NO: 5517634 - DNA, 25 bp, Homo sapien
acctgaaaataccactagggctgaa

SEQ ID NO: 5517635 - DNA, 25 bp, Homo sapien
ttttgagtttgtaagctgcagtgcc

SEQ ID NO: 5517636 - DNA, 25 bp, Homo sapien
atgtactttatgtggaggactttat

SEQ ID NO: 5517637 - DNA, 25 bp, Homo sapien
ctcccattgctccggcgcgttctca

SEQ ID NO: 5517638 - DNA, 25 bp, Homo sapien
cctactttttcatgggccggctccc

SEQ ID NO: 5517639 - DNA, 25 bp, Homo sapien
cgcgttctcaagggcttgcagctgt

SEQ ID NO: 5517640 - DNA, 25 bp, Homo sapien
gagccacttaatgcctaaagactct

SEQ ID NO: 5517641 - DNA, 25 bp, Homo sapien
atgagagagttgataccacaaaagt

SEQ ID NO: 5517642 - DNA, 25 bp, Homo sapien
gctgtatgaaaaacgacaggagtcc

SEQ ID NO: 5517643 - DNA, 25 bp, Homo sapien
atgacaggacttcagctgagattgc

SEQ ID NO: 5517644 - DNA, 25 bp, Homo sapien
ctgaagccctcactgagccacttaa

SEQ ID NO: 5517645 - DNA, 25 bp, Homo sapien
ttgtaaagtagatattatccttagt

SEQ ID NO: 5517646 - DNA, 25 bp, Homo sapien
actaaggataatatctactttacaa

SEQ ID NO: 5517647 - DNA, 25 bp, Homo sapien
cggtatccactaaacagacagatcc

SEQ ID NO: 5517648 - DNA, 25 bp, Homo sapien
gaagcttactgtctactggtgtgga

SEQ ID NO: 5517649 - DNA, 25 bp, Homo sapien
gagagggccatgagtaattatttca

SEQ ID NO: 5517650 - DNA, 25 bp, Homo sapien
ttgaaaactccatggcaagtgcatt

SEQ ID NO: 5517651 - DNA, 25 bp, Homo sapien
tgccacccaagaaagtacagtacaa

SEQ ID NO: 5517652 - DNA, 25 bp, Homo sapien
aacaaagtgaaaactgtctgacacc

SEQ ID NO: 5517653 - DNA, 25 bp, Homo sapien
tgagtggcagctatgactgtccttc

SEQ ID NO: 5517654 - DNA, 25 bp, Homo sapien
atcacttacaggtagagaagcttac

SEQ ID NO: 5517655 - DNA, 25 bp, Homo sapien
gcaaaggtcactggggtttgactaa

SEQ ID NO: 5517656 - DNA, 25 bp, Homo sapien
ctggtctattaaaggatacacggta

SEQ ID NO: 5517657 - DNA, 25 bp, Homo sapien
cccagaggattgtaacaccaccaca

SEQ ID NO: 5517658 - DNA, 25 bp, Homo sapien
gttccttagggactgcctgctgcga

SEQ ID NO: 5517659 - DNA, 25 bp, Homo sapien
aggcattggaaaatttggtggctgc

SEQ ID NO: 5517660 - DNA, 25 bp, Homo sapien
ggtccccgctaccttgccaggtgcc

SEQ ID NO: 5517661 - DNA, 25 bp, Homo sapien
aagccgccccagttgacctcctggc

SEQ ID NO: 5517662 - DNA, 25 bp, Homo sapien
ctgctgcgacgccatacgctcttcc

SEQ ID NO: 5517663 - DNA, 25 bp, Homo sapien
cagggcttccttgaaggtgaaccgt

SEQ ID NO: 5517664 - DNA, 25 bp, Homo sapien
ctcttccactgcgtcctgggccctg

SEQ ID NO: 5517665 - DNA, 25 bp, Homo sapien
ggtgaaccgtaaaccctgacagcac

SEQ ID NO: 5517666 - DNA, 25 bp, Homo sapien
cacccccacctgaccaaatgctcct

SEQ ID NO: 5517667 - DNA, 25 bp, Homo sapien
tgaagccagttaaatgcaagattgc

SEQ ID NO: 5517668 - DNA, 25 bp, Homo sapien
gacctcctggccgctttcgacgggc

SEQ ID NO: 5517669 - DNA, 25 bp, Homo sapien
ccctaacaggcatttggggtgcaga

SEQ ID NO: 5517670 - DNA, 25 bp, Homo sapien
tatcagggcaacaccacacactgca

SEQ ID NO: 5517671 - DNA, 25 bp, Homo sapien
acggactgccctacaaggtcacctc

SEQ ID NO: 5517672 - DNA, 25 bp, Homo sapien
acagaagctcaaacatggagtagtc

SEQ ID NO: 5517673 - DNA, 25 bp, Homo sapien
agggctcctccggcagttactcact

SEQ ID NO: 5517674 - DNA, 25 bp, Homo sapien
tcttctgaataggatttgaggtaac

SEQ ID NO: 5517675 - DNA, 25 bp, Homo sapien
atcaaggtactatcaggatgaagtc

SEQ ID NO: 5517676 - DNA, 25 bp, Homo sapien
gaagtcacagtaggaaaatcaaggt

SEQ ID NO: 5517677 - DNA, 25 bp, Homo sapien
tttgaggtaacttaggaaactgctc

SEQ ID NO: 5517678 - DNA, 25 bp, Homo sapien
tacaaggtcacctcagagagatggg

SEQ ID NO: 5517679 - DNA, 25 bp, Homo sapien
atctgaaaagtatcagggcaacacc

SEQ ID NO: 5517680 - DNA, 25 bp, Homo sapien
cattcacatgctctggccccgtgcc

SEQ ID NO: 5517681 - DNA, 25 bp, Homo sapien
cttcccaagacaaccaatgacccac

SEQ ID NO: 5517682 - DNA, 25 bp, Homo sapien
tccataactggaaataaaaaggcat

SEQ ID NO: 5517683 - DNA, 25 bp, Homo sapien
tatcatgaaccataggaagaagtac

SEQ ID NO: 5517684 - DNA, 25 bp, Homo sapien
ggtgagaaccaaactcgagccacaa

SEQ ID NO: 5517685 - DNA, 25 bp, Homo sapien
gggctgggtaacaacatatgctcaa

SEQ ID NO: 5517686 - DNA, 25 bp, Homo sapien
agtccgcagtctgaatgtggaaggt

SEQ ID NO: 5517687 - DNA, 25 bp, Homo sapien
acaccattaagccagggctgggtaa

SEQ ID NO: 5517688 - DNA, 25 bp, Homo sapien
attcaatgtcacagaggaaagaacg

SEQ ID NO: 5517689 - DNA, 25 bp, Homo sapien
ggcaggtcacagctgtccaaccatg

SEQ ID NO: 5517690 - DNA, 25 bp, Homo sapien
aaggcatttatgaagtgtagtccgc

SEQ ID NO: 5517691 - DNA, 25 bp, Homo sapien
tggggattggaaggccaatctgtta

SEQ ID NO: 5517692 - DNA, 25 bp, Homo sapien
gatactctgatacgcctaattctcc

SEQ ID NO: 5517693 - DNA, 25 bp, Homo sapien
taaatgtcgatgttcaagggtaggg

SEQ ID NO: 5517694 - DNA, 25 bp, Homo sapien
tgacaaatgtgtgaaataccagatt

SEQ ID NO: 5517695 - DNA, 25 bp, Homo sapien
tcccctcacgaatctagtccattta

SEQ ID NO: 5517696 - DNA, 25 bp, Homo sapien
actcatcctaaaaagcaggactttc

SEQ ID NO: 5517697 - DNA, 25 bp, Homo sapien
caccctgtgtaactgtggcactttt

SEQ ID NO: 5517698 - DNA, 25 bp, Homo sapien
gctgaatccacttccggtgttctgc

SEQ ID NO: 5517699 - DNA, 25 bp, Homo sapien
gccccagcgcattagcactcacttt

SEQ ID NO: 5517700 - DNA, 25 bp, Homo sapien
aacttacaaacttggctgaatccac

SEQ ID NO: 5517701 - DNA, 25 bp, Homo sapien
accagatttccgtatgccccagcgc

SEQ ID NO: 5517702 - DNA, 25 bp, Homo sapien
atttgcaaagctcccgggatccttc

SEQ ID NO: 5517703 - DNA, 25 bp, Homo sapien
ccatcctccagcccccgaacaggtg

SEQ ID NO: 5517704 - DNA, 25 bp, Homo sapien
gcacctctcatgagtggaccgtcac

SEQ ID NO: 5517705 - DNA, 25 bp, Homo sapien
cgatccccatcgagccgcagatctg

SEQ ID NO: 5517706 - DNA, 25 bp, Homo sapien
tccctggagtcacatagcacctctc

SEQ ID NO: 5517707 - DNA, 25 bp, Homo sapien
gcccacagccccgatccccatcgag

SEQ ID NO: 5517708 - DNA, 25 bp, Homo sapien
gtgctccaggaactacctcgcctcc

SEQ ID NO: 5517709 - DNA, 25 bp, Homo sapien
caggccacctgtgctgttatgaagc

SEQ ID NO: 5517710 - DNA, 25 bp, Homo sapien
gggagtcacctgggacatttcctgg

SEQ ID NO: 5517711 - DNA, 25 bp, Homo sapien
ctgtcctttgatgaggagtaccgcc

SEQ ID NO: 5517712 - DNA, 25 bp, Homo sapien
atcccatcttagagaggctgggaaa

SEQ ID NO: 5517713 - DNA, 25 bp, Homo sapien
tacagcacaaaagcctttggtagtt

SEQ ID NO: 5517714 - DNA, 25 bp, Homo sapien
gccctgggaaacactcccctatctc

SEQ ID NO: 5517715 - DNA, 25 bp, Homo sapien
ccagccaaaagtgctgaaggagtga

SEQ ID NO: 5517716 - DNA, 25 bp, Homo sapien
attaggccagaaccacactatttaa

SEQ ID NO: 5517717 - DNA, 25 bp, Homo sapien
acaggaaaaggattactacagcaca

SEQ ID NO: 5517718 - DNA, 25 bp, Homo sapien
tggggctccaacaagtgacctccag

SEQ ID NO: 5517719 - DNA, 25 bp, Homo sapien
atcgtcacttgccagtggaagtcac

SEQ ID NO: 5517720 - DNA, 25 bp, Homo sapien
attggcaacattagaaaatccccag

SEQ ID NO: 5517721 - DNA, 25 bp, Homo sapien
cactgactagtaaaccattggtaat

SEQ ID NO: 5517722 - DNA, 25 bp, Homo sapien
aacaagtgacctccagccaaaagtg

SEQ ID NO: 5517723 - DNA, 25 bp, Homo sapien
caggttgtcctcgggccacctttta

SEQ ID NO: 5517724 - DNA, 25 bp, Homo sapien
ggagagggcagttagtaattaatgc

SEQ ID NO: 5517725 - DNA, 25 bp, Homo sapien
tcagtaggcacatttcttggaacaa

SEQ ID NO: 5517726 - DNA, 25 bp, Homo sapien
taacctgccagaactttcatgcttc

SEQ ID NO: 5517727 - DNA, 25 bp, Homo sapien
attttagacaagggctttgttgaaa

SEQ ID NO: 5517728 - DNA, 25 bp, Homo sapien
aactaaatgaatcttgggagagggc

SEQ ID NO: 5517729 - DNA, 25 bp, Homo sapien
ctttcagatgaaacaattagcagtc

SEQ ID NO: 5517730 - DNA, 25 bp, Homo sapien
ctgaagagtacttaaaagatcccat

SEQ ID NO: 5517731 - DNA, 25 bp, Homo sapien
ttcttggaacaaactgaagagtact

SEQ ID NO: 5517732 - DNA, 25 bp, Homo sapien
tccctagtgctgctcataacctgcc

SEQ ID NO: 5517733 - DNA, 25 bp, Homo sapien
aatgcatttagaaactgatagcgct

SEQ ID NO: 5517734 - DNA, 25 bp, Homo sapien
cctagtttacggatactgtttgaac

SEQ ID NO: 5517735 - DNA, 25 bp, Homo sapien
aaaaagactgatataatgaaaaatt

SEQ ID NO: 5517736 - DNA, 25 bp, Homo sapien
aaattatgtagcagtgttaagcaaa

SEQ ID NO: 5517737 - DNA, 25 bp, Homo sapien
cctaaagcagcatgttacttccctg

SEQ ID NO: 5517738 - DNA, 25 bp, Homo sapien
gtagcagtgttaagcaaattcagtt

SEQ ID NO: 5517739 - DNA, 25 bp, Homo sapien
cttttggcagacaaaatcatgcttc

SEQ ID NO: 5517740 - DNA, 25 bp, Homo sapien
aataaacaacaaactgctcaccttt

SEQ ID NO: 5517741 - DNA, 25 bp, Homo sapien
ttatctaggtcaagaaaaacgggca

SEQ ID NO: 5517742 - DNA, 25 bp, Homo sapien
gacttagatctatggaatctgtttc

SEQ ID NO: 5517743 - DNA, 25 bp, Homo sapien
tctggagaaacattgacttagatct

SEQ ID NO: 5517744 - DNA, 25 bp, Homo sapien
ttagatctggatttctcaaagtgta

SEQ ID NO: 5517745 - DNA, 25 bp, Homo sapien
ggttgacatttattagatctggatt

SEQ ID NO: 5517746 - DNA, 25 bp, Homo sapien
tccttggcaagcatcccctcaggga

SEQ ID NO: 5517747 - DNA, 25 bp, Homo sapien
aggcaattgctgggcagttgtcctt

SEQ ID NO: 5517748 - DNA, 25 bp, Homo sapien
ggagcccagatccacagcgttgtca

SEQ ID NO: 5517749 - DNA, 25 bp, Homo sapien
aaggagagtacacacgccatagtaa

SEQ ID NO: 5517750 - DNA, 25 bp, Homo sapien
gagaacagaacattacaaggagagt

SEQ ID NO: 5517751 - DNA, 25 bp, Homo sapien
ttccacccctctgatgtcagcccca

SEQ ID NO: 5517752 - DNA, 25 bp, Homo sapien
gctacaaacatcaataacaaaggtc

SEQ ID NO: 5517753 - DNA, 25 bp, Homo sapien
ccatatgcctattcagggaggtcaa

SEQ ID NO: 5517754 - DNA, 25 bp, Homo sapien
gagagaggttctctagaagaataga

SEQ ID NO: 5517755 - DNA, 25 bp, Homo sapien
cagcgttgtcagcctaagagagagg

SEQ ID NO: 5517756 - DNA, 25 bp, Homo sapien
gaagaatagatgttagcttgagaac

SEQ ID NO: 5517757 - DNA, 25 bp, Homo sapien
attcttttacagagaagggaactaa

SEQ ID NO: 5517758 - DNA, 25 bp, Homo sapien
accagaattcaaatttggacctgtc

SEQ ID NO: 5517759 - DNA, 25 bp, Homo sapien
aagcatatttgggttacagaaaaac

SEQ ID NO: 5517760 - DNA, 25 bp, Homo sapien
aaattgctacctgaaggcagaggca

SEQ ID NO: 5517761 - DNA, 25 bp, Homo sapien
gtacaggttcaggggttagtaatga

SEQ ID NO: 5517762 - DNA, 25 bp, Homo sapien
cagaaaaacatttgagagatctaac

SEQ ID NO: 5517763 - DNA, 25 bp, Homo sapien
ggacctgtctgataccaaaacccat

SEQ ID NO: 5517764 - DNA, 25 bp, Homo sapien
tactcagaatgctgaggttggaagg

SEQ ID NO: 5517765 - DNA, 25 bp, Homo sapien
ttgataaatgaaaggtagaaccaga

SEQ ID NO: 5517766 - DNA, 25 bp, Homo sapien
tagtaatgaatatcacagtgagaat

SEQ ID NO: 5517767 - DNA, 25 bp, Homo sapien
ctacacgataagactgaaatatttt

SEQ ID NO: 5517768 - DNA, 25 bp, Homo sapien
gagcaccggctgccttgttacttcc

SEQ ID NO: 5517769 - DNA, 25 bp, Homo sapien
ggaagtaacaaggcagccggtgctc

SEQ ID NO: 5517770 - DNA, 25 bp, Homo sapien
tttgggggatggtccatcattaatt

SEQ ID NO: 5517771 - DNA, 25 bp, Homo sapien
actagagacaactaccagtaagatc

SEQ ID NO: 5517772 - DNA, 25 bp, Homo sapien
gcactgcttcaagggaacctccgtc

SEQ ID NO: 5517773 - DNA, 25 bp, Homo sapien
cttctagttttggttacaggctccc

SEQ ID NO: 5517774 - DNA, 25 bp, Homo sapien
acctccgtccatcccagaagttacc

SEQ ID NO: 5517775 - DNA, 25 bp, Homo sapien
ccatggttaaaagccttcagccttg

SEQ ID NO: 5517776 - DNA, 25 bp, Homo sapien
gttacaggctcccaagtggtcctct

SEQ ID NO: 5517777 - DNA, 25 bp, Homo sapien
ggtagatttaggttggcactgcttc

SEQ ID NO: 5517778 - DNA, 25 bp, Homo sapien
gtaagatcagttgaaagaagggtca

SEQ ID NO: 5517779 - DNA, 25 bp, Homo sapien
taaagcataggaatacatcaactga

SEQ ID NO: 5517780 - DNA, 25 bp, Homo sapien
aagtggtcctctccaacctcaggtt

SEQ ID NO: 5517781 - DNA, 25 bp, Homo sapien
catcaagaccaggggtgccccctgt

SEQ ID NO: 5517782 - DNA, 25 bp, Homo sapien
ttactgagaggactcagtgcccact

SEQ ID NO: 5517783 - DNA, 25 bp, Homo sapien
gtggctagcagcaagattcctgact

SEQ ID NO: 5517784 - DNA, 25 bp, Homo sapien
caggagcatcaagagcactaccaga

SEQ ID NO: 5517785 - DNA, 25 bp, Homo sapien
agcccccaagctgatgcacctttca

SEQ ID NO: 5517786 - DNA, 25 bp, Homo sapien
gtaggtcaggcaataagtggtttgc

SEQ ID NO: 5517787 - DNA, 25 bp, Homo sapien
tgctctctgagcttgcagaggggac

SEQ ID NO: 5517788 - DNA, 25 bp, Homo sapien
tttgtgccaaccagacacaggagca

SEQ ID NO: 5517789 - DNA, 25 bp, Homo sapien
ggacggagtaaacccatactgcagg

SEQ ID NO: 5517790 - DNA, 25 bp, Homo sapien
tgcccactcccagacgagaagtcac

SEQ ID NO: 5517791 - DNA, 25 bp, Homo sapien
ggagtactggaagttcaggctcaac

SEQ ID NO: 5517792 - DNA, 25 bp, Homo sapien
aacataatatgacagacaaggaaaa

SEQ ID NO: 5517793 - DNA, 25 bp, Homo sapien
actaagattggccataagagacatt

SEQ ID NO: 5517794 - DNA, 25 bp, Homo sapien
ggccttagctttaactgcagagtag

SEQ ID NO: 5517795 - DNA, 25 bp, Homo sapien
cacggttatacagttaagcatagcc

SEQ ID NO: 5517796 - DNA, 25 bp, Homo sapien
agacaaggaaaaaactgactaatag

SEQ ID NO: 5517797 - DNA, 25 bp, Homo sapien
gtaaaacaggttagcaggctgacat

SEQ ID NO: 5517798 - DNA, 25 bp, Homo sapien
ctcatggctaaaatcccccacggtt

SEQ ID NO: 5517799 - DNA, 25 bp, Homo sapien
ttctgtgtatgcaaaactggacttt

SEQ ID NO: 5517800 - DNA, 25 bp, Homo sapien
tgcagtgagtgttaggtctgtttac

SEQ ID NO: 5517801 - DNA, 25 bp, Homo sapien
cacaaaaggatgcagtgagtgttag

SEQ ID NO: 5517802 - DNA, 25 bp, Homo sapien
catgcgcacataccaaaagggcaaa

SEQ ID NO: 5517803 - DNA, 25 bp, Homo sapien
ttatctggacagacaacgagacaga

SEQ ID NO: 5517804 - DNA, 25 bp, Homo sapien
tgggggagtcaagacatttcctgaa

SEQ ID NO: 5517805 - DNA, 25 bp, Homo sapien
ccccacccatgtaaagcttgtccca

SEQ ID NO: 5517806 - DNA, 25 bp, Homo sapien
ggggtgactcatggctgaagcctta

SEQ ID NO: 5517807 - DNA, 25 bp, Homo sapien
ctaagtcagttgaggagtgacatcg

SEQ ID NO: 5517808 - DNA, 25 bp, Homo sapien
catctgattccaagaagtagaaaag

SEQ ID NO: 5517809 - DNA, 25 bp, Homo sapien
gctcacatacagagtacatggggga

SEQ ID NO: 5517810 - DNA, 25 bp, Homo sapien
acagacaacgagacagaaaattgag

SEQ ID NO: 5517811 - DNA, 25 bp, Homo sapien
ggaagaagctgacctgcaatgtgtc

SEQ ID NO: 5517812 - DNA, 25 bp, Homo sapien
tggggtagcaagactgtcctcctaa

SEQ ID NO: 5517813 - DNA, 25 bp, Homo sapien
tgaaaatccctcagaggtgagtgag

SEQ ID NO: 5517814 - DNA, 25 bp, Homo sapien
gtttaaggagcctgagaagaatttc

SEQ ID NO: 5517815 - DNA, 25 bp, Homo sapien
cattaatattaaggtgcaaagatct

SEQ ID NO: 5517816 - DNA, 25 bp, Homo sapien
accaagaaagaaaacctcatgtcct

SEQ ID NO: 5517817 - DNA, 25 bp, Homo sapien
atacaacatgcattgaatactctgt

SEQ ID NO: 5517818 - DNA, 25 bp, Homo sapien
taacttggtggcacatacaacatgc

SEQ ID NO: 5517819 - DNA, 25 bp, Homo sapien
aggtgcaaagatcttggacaaaaac

SEQ ID NO: 5517820 - DNA, 25 bp, Homo sapien
actaatgtatagctgatgatttctg

SEQ ID NO: 5517821 - DNA, 25 bp, Homo sapien
cagtaactaaataggatcctgcatc

SEQ ID NO: 5517822 - DNA, 25 bp, Homo sapien
gttaatagtaacttggtggcacata

SEQ ID NO: 5517823 - DNA, 25 bp, Homo sapien
tacctgaaacagtccattaatatta

SEQ ID NO: 5517824 - DNA, 25 bp, Homo sapien
gagaagaatttcacaactattgact

SEQ ID NO: 5517825 - DNA, 25 bp, Homo sapien
tgtaaatttaaaagcgtgactctca

SEQ ID NO: 5517826 - DNA, 25 bp, Homo sapien
attgggttagattttagggtacata

SEQ ID NO: 5517827 - DNA, 25 bp, Homo sapien
ggactgtctgttggaagcataatac

SEQ ID NO: 5517828 - DNA, 25 bp, Homo sapien
agggactgtctgttggaagcataat

SEQ ID NO: 5517829 - DNA, 25 bp, Homo sapien
taaactttatatgagagggactgtc

SEQ ID NO: 5517830 - DNA, 25 bp, Homo sapien
tgtagagtaagcaaaccagaaattc

SEQ ID NO: 5517831 - DNA, 25 bp, Homo sapien
aaagcgtgactctcatttgaataac

SEQ ID NO: 5517832 - DNA, 25 bp, Homo sapien
ccatgttaacagtgaatggaaagta

SEQ ID NO: 5517833 - DNA, 25 bp, Homo sapien
ctcaatctattggcaacgggacagg

SEQ ID NO: 5517834 - DNA, 25 bp, Homo sapien
ttgaataactgtagagtaagcaaac

SEQ ID NO: 5517835 - DNA, 25 bp, Homo sapien
ctatctaagatgttgggaattgtgt

SEQ ID NO: 5517836 - DNA, 25 bp, Homo sapien
ggactcagatgacttcgaggccctg

SEQ ID NO: 5517837 - DNA, 25 bp, Homo sapien
caccccgcttcgacatgccagactt

SEQ ID NO: 5517838 - DNA, 25 bp, Homo sapien
gaggccctgtgcaatgtgctacgcc

SEQ ID NO: 5517839 - DNA, 25 bp, Homo sapien
gcctcgatgacaatctgggagtgtg

SEQ ID NO: 5517840 - DNA, 25 bp, Homo sapien
ggcctgagttgtacccaccacctgc

SEQ ID NO: 5517841 - DNA, 25 bp, Homo sapien
acctgcgctaccctacgacccctac

SEQ ID NO: 5517842 - DNA, 25 bp, Homo sapien
cacctacacagagtgctgctgcctg

SEQ ID NO: 5517843 - DNA, 25 bp, Homo sapien
cttaggtccaccttaccagggcctc

SEQ ID NO: 5517844 - DNA, 25 bp, Homo sapien
caggtggctttggactcccctacga

SEQ ID NO: 5517845 - DNA, 25 bp, Homo sapien
cctacgagtacggcccagacttagg

SEQ ID NO: 5517846 - DNA, 25 bp, Homo sapien
ccagggcctcccatatgggcctgag

SEQ ID NO: 5517847 - DNA, 25 bp, Homo sapien
tgagatgctgacttaatgcagtatc

SEQ ID NO: 5517848 - DNA, 25 bp, Homo sapien
gctgctggctataaatattaggata

SEQ ID NO: 5517849 - DNA, 25 bp, Homo sapien
gttgatatactgatgtcagaggttt

SEQ ID NO: 5517850 - DNA, 25 bp, Homo sapien
gtgagtgggctgttaaaagttgata

SEQ ID NO: 5517851 - DNA, 25 bp, Homo sapien
accaatctaaagctcgacactatgt

SEQ ID NO: 5517852 - DNA, 25 bp, Homo sapien
ccaccctgtttaggtaggaaaatga

SEQ ID NO: 5517853 - DNA, 25 bp, Homo sapien
catcagcctttatgttgaaccaccc

SEQ ID NO: 5517854 - DNA, 25 bp, Homo sapien
acaccactgtttctgagatgctgac

SEQ ID NO: 5517855 - DNA, 25 bp, Homo sapien
acaaacaaagtaacagctgctggct

SEQ ID NO: 5517856 - DNA, 25 bp, Homo sapien
aatgcagtatcctacaggtggtttt

SEQ ID NO: 5517857 - DNA, 25 bp, Homo sapien
agataaaatacaaaacggacacaac

SEQ ID NO: 5517858 - DNA, 25 bp, Homo sapien
atatgtaagtagcaaagaaaaaaac

SEQ ID NO: 5517859 - DNA, 25 bp, Homo sapien
ttgtggcctaagagtcacctgactt

SEQ ID NO: 5517860 - DNA, 25 bp, Homo sapien
tggacgaaacattgggaacctcaca

SEQ ID NO: 5517861 - DNA, 25 bp, Homo sapien
atgtcatacaaaagggcatgatctc

SEQ ID NO: 5517862 - DNA, 25 bp, Homo sapien
gtgttccagcatctccccatagggc

SEQ ID NO: 5517863 - DNA, 25 bp, Homo sapien
taaaaccatgctgtacactgaagac

SEQ ID NO: 5517864 - DNA, 25 bp, Homo sapien
catagggcactatcagtagagattt

SEQ ID NO: 5517865 - DNA, 25 bp, Homo sapien
acctaaatcacaaaactggtggcac

SEQ ID NO: 5517866 - DNA, 25 bp, Homo sapien
gaacctcacaaaaggaaagaaggca

SEQ ID NO: 5517867 - DNA, 25 bp, Homo sapien
aggcagcagcaactaacatgacaca

SEQ ID NO: 5517868 - DNA, 25 bp, Homo sapien
gtcacccactaaagcaacctaaatc

SEQ ID NO: 5517869 - DNA, 25 bp, Homo sapien
aaatcaaaggagttcataaagcaag

SEQ ID NO: 5517870 - DNA, 25 bp, Homo sapien
gatccaggagacttgaacgcttggg

SEQ ID NO: 5517871 - DNA, 25 bp, Homo sapien
ggtctgtgcgtactcggtgttgtta

SEQ ID NO: 5517872 - DNA, 25 bp, Homo sapien
gttataaaggtagtccaagagtgga

SEQ ID NO: 5517873 - DNA, 25 bp, Homo sapien
attcagaattggagacatcttgctt

SEQ ID NO: 5517874 - DNA, 25 bp, Homo sapien
cataaagcaagattagtgacagagg

SEQ ID NO: 5517875 - DNA, 25 bp, Homo sapien
agaaggacagaataatagagaacct

SEQ ID NO: 5517876 - DNA, 25 bp, Homo sapien
gttgtacagagccagtgctcaggga

SEQ ID NO: 5517877 - DNA, 25 bp, Homo sapien
ttaaagcagcagctaaaatcccatc

SEQ ID NO: 5517878 - DNA, 25 bp, Homo sapien
ttccagtttggaagaaggacagaat

SEQ ID NO: 5517879 - DNA, 25 bp, Homo sapien
actgacaggaattcccgacagctcc

SEQ ID NO: 5517880 - DNA, 25 bp, Homo sapien
aactcaaagatgaaacaaaggcaac

SEQ ID NO: 5517881 - DNA, 25 bp, Homo sapien
aatgtcaaaaatacagcacgctgtt

SEQ ID NO: 5517882 - DNA, 25 bp, Homo sapien
gctgttaagagttctgtcagtgctc

SEQ ID NO: 5517883 - DNA, 25 bp, Homo sapien
tgcagaaattctaaggtacaaaaac

SEQ ID NO: 5517884 - DNA, 25 bp, Homo sapien
ctgctgtctggactcaccatgcttt

SEQ ID NO: 5517885 - DNA, 25 bp, Homo sapien
ttcttgagagaaacataccaaactt

SEQ ID NO: 5517886 - DNA, 25 bp, Homo sapien
acagagttatgtacaaatcaagtca

SEQ ID NO: 5517887 - DNA, 25 bp, Homo sapien
aggacgtactaacagggagtttcca

SEQ ID NO: 5517888 - DNA, 25 bp, Homo sapien
aaaggcaacgccatcaataaccacc

SEQ ID NO: 5517889 - DNA, 25 bp, Homo sapien
ccacaaagggcaaactcaaagatga

SEQ ID NO: 5517890 - DNA, 25 bp, Homo sapien
ccactagatcccacaaagggcaaac

SEQ ID NO: 5517891 - DNA, 25 bp, Homo sapien
gaatttggcaggaacatcagacatt

SEQ ID NO: 5517892 - DNA, 25 bp, Homo sapien
gagacctcaagcaccaagctgacct

SEQ ID NO: 5517893 - DNA, 25 bp, Homo sapien
atcagacattggaaggttagatgag

SEQ ID NO: 5517894 - DNA, 25 bp, Homo sapien
taccactgccaccaagagcagggag

SEQ ID NO: 5517895 - DNA, 25 bp, Homo sapien
gctcattcccagatgaagaggcagc

SEQ ID NO: 5517896 - DNA, 25 bp, Homo sapien
aacaggtgagaaaactcttagggtc

SEQ ID NO: 5517897 - DNA, 25 bp, Homo sapien
gaagtccctgaaagtgcctctctac

SEQ ID NO: 5517898 - DNA, 25 bp, Homo sapien
accaggggatacaaactccaaatcc

SEQ ID NO: 5517899 - DNA, 25 bp, Homo sapien
cagcattgagatctcacagaggggc

SEQ ID NO: 5517900 - DNA, 25 bp, Homo sapien
cattatttcaagcaacaggaggagg

SEQ ID NO: 5517901 - DNA, 25 bp, Homo sapien
ttagggtccccagacagcattgaga

SEQ ID NO: 5517902 - DNA, 25 bp, Homo sapien
tgcaactgtgagacaaagttgggtc

SEQ ID NO: 5517903 - DNA, 25 bp, Homo sapien
gctggggacactggatttttgccct

SEQ ID NO: 5517904 - DNA, 25 bp, Homo sapien
caaagttgggtcatcatgtgctggg

SEQ ID NO: 5517905 - DNA, 25 bp, Homo sapien
gagggaaaggcaacaattattataa

SEQ ID NO: 5517906 - DNA, 25 bp, Homo sapien
agacactggtcaatctagaacctgc

SEQ ID NO: 5517907 - DNA, 25 bp, Homo sapien
atgacaggtaataaatctaaactta

SEQ ID NO: 5517908 - DNA, 25 bp, Homo sapien
cacaggatcaggaaaaacacagtga

SEQ ID NO: 5517909 - DNA, 25 bp, Homo sapien
ctcatgtgcaagacactggtcaatc

SEQ ID NO: 5517910 - DNA, 25 bp, Homo sapien
tttagttgctggcttagtggagagg

SEQ ID NO: 5517911 - DNA, 25 bp, Homo sapien
atctacagcaacagtggaattacac

SEQ ID NO: 5517912 - DNA, 25 bp, Homo sapien
gaggccaaccaaaagtatcagcccc

SEQ ID NO: 5517913 - DNA, 25 bp, Homo sapien
tagagcaaataagagagtatttagc

SEQ ID NO: 5517914 - DNA, 25 bp, Homo sapien
cttgacatactcatctgccagacac

SEQ ID NO: 5517915 - DNA, 25 bp, Homo sapien
aagaaacatttcatagtggcaaaat

SEQ ID NO: 5517916 - DNA, 25 bp, Homo sapien
tagtacactagagcaaataagagag

SEQ ID NO: 5517917 - DNA, 25 bp, Homo sapien
tagtgcactgccaaagtgctacaat

SEQ ID NO: 5517918 - DNA, 25 bp, Homo sapien
atagtggtctatttaagaggcctta

SEQ ID NO: 5517919 - DNA, 25 bp, Homo sapien
tctgatttacagaagtacatctact

SEQ ID NO: 5517920 - DNA, 25 bp, Homo sapien
ctgccagacacaaaaaatagtggtc

SEQ ID NO: 5517921 - DNA, 25 bp, Homo sapien
tgcaaacactactggactagtacac

SEQ ID NO: 5517922 - DNA, 25 bp, Homo sapien
tgtggctgtgtgcgtatttcaaaac

SEQ ID NO: 5517923 - DNA, 25 bp, Homo sapien
agggaaaactgttgattgggtagac

SEQ ID NO: 5517924 - DNA, 25 bp, Homo sapien
acagtaaatgagactaaagagattc

SEQ ID NO: 5517925 - DNA, 25 bp, Homo sapien
gaatctctttagtctcatttactgt

SEQ ID NO: 5517926 - DNA, 25 bp, Homo sapien
gtaggatatcatttggacaactgga

SEQ ID NO: 5517927 - DNA, 25 bp, Homo sapien
ctctcaaattggaagtctagcactc

SEQ ID NO: 5517928 - DNA, 25 bp, Homo sapien
aatgataggctacagaaaaccacac

SEQ ID NO: 5517929 - DNA, 25 bp, Homo sapien
atgtcaaaggtcatccaggattaac

SEQ ID NO: 5517930 - DNA, 25 bp, Homo sapien
aactgcacattaggacatgagggca

SEQ ID NO: 5517931 - DNA, 25 bp, Homo sapien
tggatagagtaggcagaaaatccta

SEQ ID NO: 5517932 - DNA, 25 bp, Homo sapien
aatagaaactgaaagggcatttgta

SEQ ID NO: 5517933 - DNA, 25 bp, Homo sapien
ggacatgagggcaatttaatggaaa

SEQ ID NO: 5517934 - DNA, 25 bp, Homo sapien
atgaatttcactgcagtaaacagac

SEQ ID NO: 5517935 - DNA, 25 bp, Homo sapien
aatactctccataggaaggcatttc

SEQ ID NO: 5517936 - DNA, 25 bp, Homo sapien
catcagtagccaaatggaacttgat

SEQ ID NO: 5517937 - DNA, 25 bp, Homo sapien
agtccagtggaaaaatactagccat

SEQ ID NO: 5517938 - DNA, 25 bp, Homo sapien
tttaatgtaaccacctagcacctta

SEQ ID NO: 5517939 - DNA, 25 bp, Homo sapien
tacaaaaccaccagtcatagtgact

SEQ ID NO: 5517940 - DNA, 25 bp, Homo sapien
tccagctcactacacagggaaggct

SEQ ID NO: 5517941 - DNA, 25 bp, Homo sapien
tgaatacaatctaaaggagtttcca

SEQ ID NO: 5517942 - DNA, 25 bp, Homo sapien
gactgattatacactgtgctgtgct

SEQ ID NO: 5517943 - DNA, 25 bp, Homo sapien
tcaacaaacaatagtccagtggaaa

SEQ ID NO: 5517944 - DNA, 25 bp, Homo sapien
ggcaagaatgatagatcagaaggca

SEQ ID NO: 5517945 - DNA, 25 bp, Homo sapien
acacatgaggtattctgggtggttc

SEQ ID NO: 5517946 - DNA, 25 bp, Homo sapien
actgaacccagcttacaaaaccacc

SEQ ID NO: 5517947 - DNA, 25 bp, Homo sapien
tcagaaggcataagccaaccagtgg

SEQ ID NO: 5517948 - DNA, 25 bp, Homo sapien
cccacggtcccaagtgaactagaac

SEQ ID NO: 5517949 - DNA, 25 bp, Homo sapien
gagcccccgttggccttgactgtgg

SEQ ID NO: 5517950 - DNA, 25 bp, Homo sapien
gggcacccactcagtacgcagccag

SEQ ID NO: 5517951 - DNA, 25 bp, Homo sapien
acgtcatgaatgaaaggctgagttt

SEQ ID NO: 5517952 - DNA, 25 bp, Homo sapien
gaactagaacccatccagggtcctc

SEQ ID NO: 5517953 - DNA, 25 bp, Homo sapien
gtggttcccacgccgtctgacaaac

SEQ ID NO: 5517954 - DNA, 25 bp, Homo sapien
gaaggttccagaagccgcctttctc

SEQ ID NO: 5517955 - DNA, 25 bp, Homo sapien
cagaggtagagagtagttttatgtt

SEQ ID NO: 5517956 - DNA, 25 bp, Homo sapien
acctgagtttcaggcgtggttccca

SEQ ID NO: 5517957 - DNA, 25 bp, Homo sapien
caactgtacagatgcgtgaccctta

SEQ ID NO: 5517958 - DNA, 25 bp, Homo sapien
ctggacagccacttacgggtcccac

SEQ ID NO: 5517959 - DNA, 25 bp, Homo sapien
cagggctgacaacttgaccaccatg

SEQ ID NO: 5517960 - DNA, 25 bp, Homo sapien
gagccaggatgcaagtctgtgacta

SEQ ID NO: 5517961 - DNA, 25 bp, Homo sapien
caccaccaccaacagcttcgtcctc

SEQ ID NO: 5517962 - DNA, 25 bp, Homo sapien
agagtccaaactgatcagggctgac

SEQ ID NO: 5517963 - DNA, 25 bp, Homo sapien
aatgcacctatgagttacagagtcc

SEQ ID NO: 5517964 - DNA, 25 bp, Homo sapien
acagaagtaaggaactaggaactgt

SEQ ID NO: 5517965 - DNA, 25 bp, Homo sapien
ttgaaggacatgtaagatttgtact

SEQ ID NO: 5517966 - DNA, 25 bp, Homo sapien
tattggaaaaagctggtattaacat

SEQ ID NO: 5517967 - DNA, 25 bp, Homo sapien
attcgagagtaccaggaaatgtaag

SEQ ID NO: 5517968 - DNA, 25 bp, Homo sapien
ttccagggatccagagacatacttt

SEQ ID NO: 5517969 - DNA, 25 bp, Homo sapien
gtgaacgcccgtacattcgagagta

SEQ ID NO: 5517970 - DNA, 25 bp, Homo sapien
gtgcatgtcacattaaaatcatcac

SEQ ID NO: 5517971 - DNA, 25 bp, Homo sapien
atcctttaataaactggggtctgaa

SEQ ID NO: 5517972 - DNA, 25 bp, Homo sapien
aactggggtctgaacatttgaaaga

SEQ ID NO: 5517973 - DNA, 25 bp, Homo sapien
attaaacagaagtgggtaattagta

SEQ ID NO: 5517974 - DNA, 25 bp, Homo sapien
tcatttgagcccaaaggctgaggtt

SEQ ID NO: 5517975 - DNA, 25 bp, Homo sapien
tagtaaaggctaaaattaaattgca

SEQ ID NO: 5517976 - DNA, 25 bp, Homo sapien
tttgaaagacaatgcctatcctgtt

SEQ ID NO: 5517977 - DNA, 25 bp, Homo sapien
cacctacttttcaacgggagagatc

SEQ ID NO: 5517978 - DNA, 25 bp, Homo sapien
gcagaagtaaactggcaaggatttt

SEQ ID NO: 5517979 - DNA, 25 bp, Homo sapien
atgtacctgctgttaaaaattggaa

SEQ ID NO: 5517980 - DNA, 25 bp, Homo sapien
aacgggagagatcataaaatttagc

SEQ ID NO: 5517981 - DNA, 25 bp, Homo sapien
aattaagaatgtacccaagatcccc

SEQ ID NO: 5517982 - DNA, 25 bp, Homo sapien
ctgtttgacacttgtggcaggggaa

SEQ ID NO: 5517983 - DNA, 25 bp, Homo sapien
atccttagtgtcatggaggagaatc

SEQ ID NO: 5517984 - DNA, 25 bp, Homo sapien
ggaggagaatcatcatagctactga

SEQ ID NO: 5517985 - DNA, 25 bp, Homo sapien
gctgggcttagagtttgctacacca

SEQ ID NO: 5517986 - DNA, 25 bp, Homo sapien
cttgcaagtcaagcgtgaagaataa

SEQ ID NO: 5517987 - DNA, 25 bp, Homo sapien
gtggcaggggaatatcccacttgca

SEQ ID NO: 5517988 - DNA, 25 bp, Homo sapien
gagagctgtttggtggtgttatctc

SEQ ID NO: 5517989 - DNA, 25 bp, Homo sapien
caaccaagctgtaggaaaatctccc

SEQ ID NO: 5517990 - DNA, 25 bp, Homo sapien
aataaaaagattaaccatggccatg

SEQ ID NO: 5517991 - DNA, 25 bp, Homo sapien
tgtccagtcacaacacaggaagaat

SEQ ID NO: 5517992 - DNA, 25 bp, Homo sapien
gcccggccaccaggatttctacagg

SEQ ID NO: 5517993 - DNA, 25 bp, Homo sapien
gcatccagagacctgcccttctacc

SEQ ID NO: 5517994 - DNA, 25 bp, Homo sapien
ctgttcttccgtggccaaccatggc

SEQ ID NO: 5517995 - DNA, 25 bp, Homo sapien
gtactcacacccgctcccgcccaca

SEQ ID NO: 5517996 - DNA, 25 bp, Homo sapien
ggcagccgtccaccaaacactacgt

SEQ ID NO: 5517997 - DNA, 25 bp, Homo sapien
aacactacgtgacgagctaacgcca

SEQ ID NO: 5517998 - DNA, 25 bp, Homo sapien
ttccctggacagtgccctcgcagga

SEQ ID NO: 5517999 - DNA, 25 bp, Homo sapien
atgaatctcctggacgcagaggtga

SEQ ID NO: 5518000 - DNA, 25 bp, Homo sapien
gctcgggagttatgcatccagagac

SEQ ID NO: 5518001 - DNA, 25 bp, Homo sapien
cccgctccggccactttccctggac

SEQ ID NO: 5518002 - DNA, 25 bp, Homo sapien
gactggcttgacgcctcccagcagc

SEQ ID NO: 5518003 - DNA, 25 bp, Homo sapien
gggccgccttcgcagtctacacccc

SEQ ID NO: 5518004 - DNA, 25 bp, Homo sapien
cagaccttcgtgaccaccccatccc

SEQ ID NO: 5518005 - DNA, 25 bp, Homo sapien
gcttcccagcctacacccagaccca

SEQ ID NO: 5518006 - DNA, 25 bp, Homo sapien
tgcacttcctggtactgacggcgtc

SEQ ID NO: 5518007 - DNA, 25 bp, Homo sapien
gtccgccgtcccctgtggttcttgc

SEQ ID NO: 5518008 - DNA, 25 bp, Homo sapien
cccagacccagctcagaccttcgtg

SEQ ID NO: 5518009 - DNA, 25 bp, Homo sapien
gacgacgtgcgcttcctcatcgcct

SEQ ID NO: 5518010 - DNA, 25 bp, Homo sapien
ccatccctttctccggctggctggg

SEQ ID NO: 5518011 - DNA, 25 bp, Homo sapien
gcctcctggtaagcccgcaaagttg

SEQ ID NO: 5518012 - DNA, 25 bp, Homo sapien
ggggcatccctctctgtcgctggct

SEQ ID NO: 5518013 - DNA, 25 bp, Homo sapien
acgtccctgcgtctcttacaccccc

SEQ ID NO: 5518014 - DNA, 25 bp, Homo sapien
attgatgtatccagaggttggcagg

SEQ ID NO: 5518015 - DNA, 25 bp, Homo sapien
ctccaagtcccaaatgagtggtgcc

SEQ ID NO: 5518016 - DNA, 25 bp, Homo sapien
gcttggctcagtgcagaacagatca

SEQ ID NO: 5518017 - DNA, 25 bp, Homo sapien
agcttgtgaaagggccattgttgtg

SEQ ID NO: 5518018 - DNA, 25 bp, Homo sapien
tgaggagtaggtttcactagtctat

SEQ ID NO: 5518019 - DNA, 25 bp, Homo sapien
acaggttctggataaaagcagtctc

SEQ ID NO: 5518020 - DNA, 25 bp, Homo sapien
caggtccagtggtcactacacccct

SEQ ID NO: 5518021 - DNA, 25 bp, Homo sapien
ttcaggcagattcgcttcatcaggt

SEQ ID NO: 5518022 - DNA, 25 bp, Homo sapien
tcttacccatgtgaggagtaggttt

SEQ ID NO: 5518023 - DNA, 25 bp, Homo sapien
aaggcgtattaaatttcaggcagat

SEQ ID NO: 5518024 - DNA, 25 bp, Homo sapien
acttgtggcagaacttagattgtcc

SEQ ID NO: 5518025 - DNA, 25 bp, Homo sapien
gtcgtggaagctgagcccatattaa

SEQ ID NO: 5518026 - DNA, 25 bp, Homo sapien
aagtcgaattcatggtcgtggaagc

SEQ ID NO: 5518027 - DNA, 25 bp, Homo sapien
ccatattaagagatgtcaggcgtcc

SEQ ID NO: 5518028 - DNA, 25 bp, Homo sapien
tgtggccttctgcgacgcgcagtcc

SEQ ID NO: 5518029 - DNA, 25 bp, Homo sapien
ggatcagaagcctgagcactttggc

SEQ ID NO: 5518030 - DNA, 25 bp, Homo sapien
cttcagtgattgccgcggatcagaa

SEQ ID NO: 5518031 - DNA, 25 bp, Homo sapien
cgcacttgctcaacaagggcctgcc

SEQ ID NO: 5518032 - DNA, 25 bp, Homo sapien
ctttggctcgagacaattaaggacg

SEQ ID NO: 5518033 - DNA, 25 bp, Homo sapien
ttgtaagactttgaccccgacgcag

SEQ ID NO: 5518034 - DNA, 25 bp, Homo sapien
tccgacctccgatcatgaacgggcc

SEQ ID NO: 5518035 - DNA, 25 bp, Homo sapien
agaaggtaccaccacgtggtcgcct

SEQ ID NO: 5518036 - DNA, 25 bp, Homo sapien
caagttttagatggagcaggattag

SEQ ID NO: 5518037 - DNA, 25 bp, Homo sapien
atggagcaggattagatattgattt

SEQ ID NO: 5518038 - DNA, 25 bp, Homo sapien
cctcgatagcgacttcacctttacc

SEQ ID NO: 5518039 - DNA, 25 bp, Homo sapien
ggagacaacagtacctgacgcctct

SEQ ID NO: 5518040 - DNA, 25 bp, Homo sapien
aggagtgcttctaccagcccatgcc

SEQ ID NO: 5518041 - DNA, 25 bp, Homo sapien
tgtagagactgaagttggtgattac

SEQ ID NO: 5518042 - DNA, 25 bp, Homo sapien
acaaagaaaatcagatggagttcac

SEQ ID NO: 5518043 - DNA, 25 bp, Homo sapien
gatggagttcacactgtagagactg

SEQ ID NO: 5518044 - DNA, 25 bp, Homo sapien
ccccgtgctccttctggccgctctg

SEQ ID NO: 5518045 - DNA, 25 bp, Homo sapien
cgctggagatcgagtaccaagtttt

SEQ ID NO: 5518046 - DNA, 25 bp, Homo sapien
tgacgcctctttcagcccgggatcg

SEQ ID NO: 5518047 - DNA, 25 bp, Homo sapien
ccaacaagactaaaatatccccaac

SEQ ID NO: 5518048 - DNA, 25 bp, Homo sapien
taggtaagaattttgaccatgaccc

SEQ ID NO: 5518049 - DNA, 25 bp, Homo sapien
cagattcttcagagcatggctaacc

SEQ ID NO: 5518050 - DNA, 25 bp, Homo sapien
ataaaactgatttgaggcatattac

SEQ ID NO: 5518051 - DNA, 25 bp, Homo sapien
gaagttaacctagcactgagattta

SEQ ID NO: 5518052 - DNA, 25 bp, Homo sapien
aatcaggaagtgttttattgagagc

SEQ ID NO: 5518053 - DNA, 25 bp, Homo sapien
agagacagaaaccatagaataaatt

SEQ ID NO: 5518054 - DNA, 25 bp, Homo sapien
taaagcatagggaataatccagtat

SEQ ID NO: 5518055 - DNA, 25 bp, Homo sapien
cagagcatggctaacccaacaagac

SEQ ID NO: 5518056 - DNA, 25 bp, Homo sapien
gaccatgacccagcaaatcagtaac

SEQ ID NO: 5518057 - DNA, 25 bp, Homo sapien
attgagagcagtggtttaaagcata

SEQ ID NO: 5518058 - DNA, 25 bp, Homo sapien
gcacctggccatcaccgacaggagc

SEQ ID NO: 5518059 - DNA, 25 bp, Homo sapien
ctccgtcaacagtgactgcgagacc

SEQ ID NO: 5518060 - DNA, 25 bp, Homo sapien
gcggatgacctgcgcatcaacctct

SEQ ID NO: 5518061 - DNA, 25 bp, Homo sapien
gccctgtgtgacaagcattccaagc

SEQ ID NO: 5518062 - DNA, 25 bp, Homo sapien
agctctttgaagagcctgaggaccc

SEQ ID NO: 5518063 - DNA, 25 bp, Homo sapien
gacaggagcttcaacatcgtggaca

SEQ ID NO: 5518064 - DNA, 25 bp, Homo sapien
tgaggaccccagtaaccgctcattc

SEQ ID NO: 5518065 - DNA, 25 bp, Homo sapien
gcgcatcaacctctggcacctggcc

SEQ ID NO: 5518066 - DNA, 25 bp, Homo sapien
cagtgactgcgagacctacatgtcg

SEQ ID NO: 5518067 - DNA, 25 bp, Homo sapien
acagcatctgagttccatccgcacc

SEQ ID NO: 5518068 - DNA, 25 bp, Homo sapien
ttacggaggtgatcacagcatctga

SEQ ID NO: 5518069 - DNA, 25 bp, Homo sapien
atccttagactacatagagtatgat

SEQ ID NO: 5518070 - DNA, 25 bp, Homo sapien
aaataagtcactttagggatacata

SEQ ID NO: 5518071 - DNA, 25 bp, Homo sapien
tcgaacaaatctattaaaaagagag

SEQ ID NO: 5518072 - DNA, 25 bp, Homo sapien
tatctgcatggctgttcctaaaact

SEQ ID NO: 5518073 - DNA, 25 bp, Homo sapien
gaaaatgacagctataaaacaataa

SEQ ID NO: 5518074 - DNA, 25 bp, Homo sapien
taggtgatgagttattatgcttgat

SEQ ID NO: 5518075 - DNA, 25 bp, Homo sapien
aaacttgtgaattctagagacatgt

SEQ ID NO: 5518076 - DNA, 25 bp, Homo sapien
gctcaaatagataaaatacaagcac

SEQ ID NO: 5518077 - DNA, 25 bp, Homo sapien
attcttaagttaggtgatgagttat

SEQ ID NO: 5518078 - DNA, 25 bp, Homo sapien
taacccaacaatgaaatatacatca

SEQ ID NO: 5518079 - DNA, 25 bp, Homo sapien
agataggagaagagctcaaatagat

SEQ ID NO: 5518080 - DNA, 25 bp, Homo sapien
caagaaaaccaaatgtccccacatc

SEQ ID NO: 5518081 - DNA, 25 bp, Homo sapien
caggaacgcactctcccaactgtac

SEQ ID NO: 5518082 - DNA, 25 bp, Homo sapien
gtttgagattcaagggcacaaaggc

SEQ ID NO: 5518083 - DNA, 25 bp, Homo sapien
gctctgggtaccaagcagatcccca

SEQ ID NO: 5518084 - DNA, 25 bp, Homo sapien
ggttggacacaatgaccagagctct

SEQ ID NO: 5518085 - DNA, 25 bp, Homo sapien
aggagaactgacctaaatcaactgc

SEQ ID NO: 5518086 - DNA, 25 bp, Homo sapien
gggccctgacactagtgggcaccct

SEQ ID NO: 5518087 - DNA, 25 bp, Homo sapien
gacactagtgggcaccctgtggttc

SEQ ID NO: 5518088 - DNA, 25 bp, Homo sapien
gggcaccagcatggcttagctactt

SEQ ID NO: 5518089 - DNA, 25 bp, Homo sapien
accctcctgtgccagtgacagaaaa

SEQ ID NO: 5518090 - DNA, 25 bp, Homo sapien
tggaggaaataaataggtagactag

SEQ ID NO: 5518091 - DNA, 25 bp, Homo sapien
aaatatacagttggcaaaacaattt

SEQ ID NO: 5518092 - DNA, 25 bp, Homo sapien
gtaagtcaaccactaaaagcctctc

SEQ ID NO: 5518093 - DNA, 25 bp, Homo sapien
agaagtctatgaataatgcccacct

SEQ ID NO: 5518094 - DNA, 25 bp, Homo sapien
tgaacacctacttcaggcatcactc

SEQ ID NO: 5518095 - DNA, 25 bp, Homo sapien
atgtagaagtctatgaataatgccc

SEQ ID NO: 5518096 - DNA, 25 bp, Homo sapien
ttcacataaatgagaatgttgaaat

SEQ ID NO: 5518097 - DNA, 25 bp, Homo sapien
tctctctcagtataacgcaaagtat

SEQ ID NO: 5518098 - DNA, 25 bp, Homo sapien
tacataaatatacagttggcaaaac

SEQ ID NO: 5518099 - DNA, 25 bp, Homo sapien
gagaatgttgaaatagtataatttt

SEQ ID NO: 5518100 - DNA, 25 bp, Homo sapien
gttcacacattatcttaagagaatt

SEQ ID NO: 5518101 - DNA, 25 bp, Homo sapien
tcaggcatcactcagtaagtcaacc

SEQ ID NO: 5518102 - DNA, 25 bp, Homo sapien
tgtgcgccttagacctggaattgct

SEQ ID NO: 5518103 - DNA, 25 bp, Homo sapien
gaattgctgggaaactgaaacattc

SEQ ID NO: 5518104 - DNA, 25 bp, Homo sapien
aagtagcaagaaggaaatgtctaaa

SEQ ID NO: 5518105 - DNA, 25 bp, Homo sapien
tggagtgggtttttagattgatgtg

SEQ ID NO: 5518106 - DNA, 25 bp, Homo sapien
gtgttgctcttgaaaaagtggacag

SEQ ID NO: 5518107 - DNA, 25 bp, Homo sapien
tcctggattacctgaggaagaagag

SEQ ID NO: 5518108 - DNA, 25 bp, Homo sapien
aaaacccaccagtcaaggaaagtca

SEQ ID NO: 5518109 - DNA, 25 bp, Homo sapien
cctaaaagggaactgtgcgccttag

SEQ ID NO: 5518110 - DNA, 25 bp, Homo sapien
gctcattgcatgaaaagtggaaaag

SEQ ID NO: 5518111 - DNA, 25 bp, Homo sapien
tggcaatacaggtaagaacagtgtt

SEQ ID NO: 5518112 - DNA, 25 bp, Homo sapien
atcgcagcaagaagtctatgtgccc

SEQ ID NO: 5518113 - DNA, 25 bp, Homo sapien
ctacctgatatgccaagaagccgag

SEQ ID NO: 5518114 - DNA, 25 bp, Homo sapien
tgcctcactaaacctgctgcccagt

SEQ ID NO: 5518115 - DNA, 25 bp, Homo sapien
ccgaggcatagctacaagaatccac

SEQ ID NO: 5518116 - DNA, 25 bp, Homo sapien
gagagcagaagaatgaatttattta

SEQ ID NO: 5518117 - DNA, 25 bp, Homo sapien
agctacaagaatccacagcagcagc

SEQ ID NO: 5518118 - DNA, 25 bp, Homo sapien
ttcagtttgaagcaaggaatgtgac

SEQ ID NO: 5518119 - DNA, 25 bp, Homo sapien
ctggtcagagaattagctcacctcc

SEQ ID NO: 5518120 - DNA, 25 bp, Homo sapien
tcgcatgaagcaagctcctgttgac

SEQ ID NO: 5518121 - DNA, 25 bp, Homo sapien
aaacactgaagtacatgaatccacc

SEQ ID NO: 5518122 - DNA, 25 bp, Homo sapien
gaggctcttggtcagagaggtttca

SEQ ID NO: 5518123 - DNA, 25 bp, Homo sapien
aaaacagccccatgaaacaggaatt

SEQ ID NO: 5518124 - DNA, 25 bp, Homo sapien
aggaaaaagagcagagctaaataat

SEQ ID NO: 5518125 - DNA, 25 bp, Homo sapien
atatagccattaggaaaaagagcag

SEQ ID NO: 5518126 - DNA, 25 bp, Homo sapien
acctacatacaactagcagtgcaat

SEQ ID NO: 5518127 - DNA, 25 bp, Homo sapien
tgagaaatgtaaacttggtaggtag

SEQ ID NO: 5518128 - DNA, 25 bp, Homo sapien
cagtgcaataagataagcagaaagc

SEQ ID NO: 5518129 - DNA, 25 bp, Homo sapien
atagactcaagattgccattgcttc

SEQ ID NO: 5518130 - DNA, 25 bp, Homo sapien
tacccaaaatatccaagtctagcgc

SEQ ID NO: 5518131 - DNA, 25 bp, Homo sapien
tggtaggtagattcaagtataaaag

SEQ ID NO: 5518132 - DNA, 25 bp, Homo sapien
ctcttgtaccagaatgaaagggttt

SEQ ID NO: 5518133 - DNA, 25 bp, Homo sapien
ctcttagtaggaccaccaacgatta

SEQ ID NO: 5518134 - DNA, 25 bp, Homo sapien
tgtgacaactcaaaaaagctgcatt

SEQ ID NO: 5518135 - DNA, 25 bp, Homo sapien
tagaagaatgtccttgggtagcatg

SEQ ID NO: 5518136 - DNA, 25 bp, Homo sapien
acgtgcatcccgagggcttctagga

SEQ ID NO: 5518137 - DNA, 25 bp, Homo sapien
ctaggatgaagtagtccactggaag

SEQ ID NO: 5518138 - DNA, 25 bp, Homo sapien
gccggtactggttccccagctagga

SEQ ID NO: 5518139 - DNA, 25 bp, Homo sapien
ttctagggacctacccaagctaggc

SEQ ID NO: 5518140 - DNA, 25 bp, Homo sapien
tcttccagtgaaacgtgcatcccga

SEQ ID NO: 5518141 - DNA, 25 bp, Homo sapien
tctctccagagctggacagtgcacc

SEQ ID NO: 5518142 - DNA, 25 bp, Homo sapien
gtgtttgtgccaacagcacccgcgc

SEQ ID NO: 5518143 - DNA, 25 bp, Homo sapien
catccttccttttagagagtggggg

SEQ ID NO: 5518144 - DNA, 25 bp, Homo sapien
ccactggaaggcaccagctcttcct

SEQ ID NO: 5518145 - DNA, 25 bp, Homo sapien
tgacaacatatataaagagccaggc

SEQ ID NO: 5518146 - DNA, 25 bp, Homo sapien
accacagggatttgtcacagatctc

SEQ ID NO: 5518147 - DNA, 25 bp, Homo sapien
ggagagcagtcaccctgcagaacca

SEQ ID NO: 5518148 - DNA, 25 bp, Homo sapien
tggccccggctaatgtttgactgta

SEQ ID NO: 5518149 - DNA, 25 bp, Homo sapien
ggccccatgcagaaccacctagaac

SEQ ID NO: 5518150 - DNA, 25 bp, Homo sapien
aatacagaacagaccagggttgact

SEQ ID NO: 5518151 - DNA, 25 bp, Homo sapien
tttgactgtagcacatgtgagaggc

SEQ ID NO: 5518152 - DNA, 25 bp, Homo sapien
attgtcagccatgtaagtgagtttc

SEQ ID NO: 5518153 - DNA, 25 bp, Homo sapien
aaccacctagaaccatggagagcag

SEQ ID NO: 5518154 - DNA, 25 bp, Homo sapien
gactacaagatcaatgggacagaat

SEQ ID NO: 5518155 - DNA, 25 bp, Homo sapien
atgagtaagttaagcttaggggtgg

SEQ ID NO: 5518156 - DNA, 25 bp, Homo sapien
gcagaaataagtaaacagagcactc

SEQ ID NO: 5518157 - DNA, 25 bp, Homo sapien
ttggtgtttataaaagctgaactcc

SEQ ID NO: 5518158 - DNA, 25 bp, Homo sapien
acatgaagatgtaaatttgagagtt

SEQ ID NO: 5518159 - DNA, 25 bp, Homo sapien
tgagaaagtccagtgtaatactagc

SEQ ID NO: 5518160 - DNA, 25 bp, Homo sapien
gaagggcttttgtacaaatacgcat

SEQ ID NO: 5518161 - DNA, 25 bp, Homo sapien
agtgttgactgactgaagaactcac

SEQ ID NO: 5518162 - DNA, 25 bp, Homo sapien
agaaattctttgtgagtggattgac

SEQ ID NO: 5518163 - DNA, 25 bp, Homo sapien
aaacaggtttagtgttgactgactg

SEQ ID NO: 5518164 - DNA, 25 bp, Homo sapien
tgaagaactcactacaggttttact

SEQ ID NO: 5518165 - DNA, 25 bp, Homo sapien
agctgaactccttttgaagggcttt

SEQ ID NO: 5518166 - DNA, 25 bp, Homo sapien
tactgtgtaaggtaagtacatctat

SEQ ID NO: 5518167 - DNA, 25 bp, Homo sapien
aggagagagttgaccaaagtctaca

SEQ ID NO: 5518168 - DNA, 25 bp, Homo sapien
tgaagaatgcatagtgacaacaatt

SEQ ID NO: 5518169 - DNA, 25 bp, Homo sapien
agttagttggtaggtgaatttctca

SEQ ID NO: 5518170 - DNA, 25 bp, Homo sapien
aactgcaaaccaaattcaggggtac

SEQ ID NO: 5518171 - DNA, 25 bp, Homo sapien
aaactggatacactagaaattggca

SEQ ID NO: 5518172 - DNA, 25 bp, Homo sapien
tccaaagtgctaaaaaagttgccca

SEQ ID NO: 5518173 - DNA, 25 bp, Homo sapien
ggtacatattttctagggtggagtc

SEQ ID NO: 5518174 - DNA, 25 bp, Homo sapien
agatgcaaaggaatataccagttac

SEQ ID NO: 5518175 - DNA, 25 bp, Homo sapien
gaaagtgctgagaaccctaactgca

SEQ ID NO: 5518176 - DNA, 25 bp, Homo sapien
tacggaaaggatatctatggaatac

SEQ ID NO: 5518177 - DNA, 25 bp, Homo sapien
aatttaccagaaagattgatgactc

SEQ ID NO: 5518178 - DNA, 25 bp, Homo sapien
tgtcaaaatgaccctgtacagcctc

SEQ ID NO: 5518179 - DNA, 25 bp, Homo sapien
tggggttgcaaggatgaattttgca

SEQ ID NO: 5518180 - DNA, 25 bp, Homo sapien
tgcaagcttgcttacagagacctgt

SEQ ID NO: 5518181 - DNA, 25 bp, Homo sapien
tggagtaaacaaaatgcttcaaggc

SEQ ID NO: 5518182 - DNA, 25 bp, Homo sapien
aaaagcgggaaaagcatattgaata

SEQ ID NO: 5518183 - DNA, 25 bp, Homo sapien
ttatctagagtgggagatagtagta

SEQ ID NO: 5518184 - DNA, 25 bp, Homo sapien
tcctcttagaaaagcgggaaaagca

SEQ ID NO: 5518185 - DNA, 25 bp, Homo sapien
gatagtagtaggggaactgtttata

SEQ ID NO: 5518186 - DNA, 25 bp, Homo sapien
atataaaggagtgtgattttcagtt

SEQ ID NO: 5518187 - DNA, 25 bp, Homo sapien
ccttgacaaggcctttggagtaaac

SEQ ID NO: 5518188 - DNA, 25 bp, Homo sapien
tataggtaaaatggtatactgactc

SEQ ID NO: 5518189 - DNA, 25 bp, Homo sapien
tgcttcaaggctcctggtgaatggg

SEQ ID NO: 5518190 - DNA, 25 bp, Homo sapien
gtgctctggccccagaacggccact

SEQ ID NO: 5518191 - DNA, 25 bp, Homo sapien
gcctgtttgaaacggcgagaagagg

SEQ ID NO: 5518192 - DNA, 25 bp, Homo sapien
catcgagccaacaccaacctgacaa

SEQ ID NO: 5518193 - DNA, 25 bp, Homo sapien
gcggaacctgaatcccaaagcagcc

SEQ ID NO: 5518194 - DNA, 25 bp, Homo sapien
tggagacccccagatggtgctttca

SEQ ID NO: 5518195 - DNA, 25 bp, Homo sapien
tgcacctcaagtcggacaaagcgca

SEQ ID NO: 5518196 - DNA, 25 bp, Homo sapien
gggcgcatgtgccagatgcacctca

SEQ ID NO: 5518197 - DNA, 25 bp, Homo sapien
gacaaagcgcagaccaagctgctca

SEQ ID NO: 5518198 - DNA, 25 bp, Homo sapien
gctccccacccaggcctgagcgaag

SEQ ID NO: 5518199 - DNA, 25 bp, Homo sapien
cgggcacatgtgaaaggtatgcctc

SEQ ID NO: 5518200 - DNA, 25 bp, Homo sapien
cactcgagaccccgggcttcatcca

SEQ ID NO: 5518201 - DNA, 25 bp, Homo sapien
gtatttgagagtatgtagatgtggg

SEQ ID NO: 5518202 - DNA, 25 bp, Homo sapien
ttgcagtgttgtcagaattagtgtg

SEQ ID NO: 5518203 - DNA, 25 bp, Homo sapien
atctgtactggtagctagctgggga

SEQ ID NO: 5518204 - DNA, 25 bp, Homo sapien
taggggagcatgcaaatatcaaaaa

SEQ ID NO: 5518205 - DNA, 25 bp, Homo sapien
agctagctggggactactaaatagt

SEQ ID NO: 5518206 - DNA, 25 bp, Homo sapien
tgtggcttaacaatagaatcctacc

SEQ ID NO: 5518207 - DNA, 25 bp, Homo sapien
aaacaatttcatgggacacggtggt

SEQ ID NO: 5518208 - DNA, 25 bp, Homo sapien
gttcaggagaattgtggttcgctct

SEQ ID NO: 5518209 - DNA, 25 bp, Homo sapien
atctctagcagggttcaggagaatt

SEQ ID NO: 5518210 - DNA, 25 bp, Homo sapien
cattgccacagccagtccatagggg

SEQ ID NO: 5518211 - DNA, 25 bp, Homo sapien
ttgaggaagtgagaaccaccactta

SEQ ID NO: 5518212 - DNA, 25 bp, Homo sapien
aagaagatgtcttcacatattgtat

SEQ ID NO: 5518213 - DNA, 25 bp, Homo sapien
aggaaacacagagtcagacagtttg

SEQ ID NO: 5518214 - DNA, 25 bp, Homo sapien
cctataaaacaggtcaatacagtac

SEQ ID NO: 5518215 - DNA, 25 bp, Homo sapien
aaacaggtcaatacagtacaggcag

SEQ ID NO: 5518216 - DNA, 25 bp, Homo sapien
aaacacagagtcagacagtttgggg

SEQ ID NO: 5518217 - DNA, 25 bp, Homo sapien
tgtattacagctgccagtgcaagac

SEQ ID NO: 5518218 - DNA, 25 bp, Homo sapien
aaaaaggcacctataaaacaggtca

SEQ ID NO: 5518219 - DNA, 25 bp, Homo sapien
agtggggcgagttccctttgtatta

SEQ ID NO: 5518220 - DNA, 25 bp, Homo sapien
cctttgtattacagctgccagtgca

SEQ ID NO: 5518221 - DNA, 25 bp, Homo sapien
ggcctgttgtcagccccagaggaag

SEQ ID NO: 5518222 - DNA, 25 bp, Homo sapien
gtcaggggcctgttgtcagccccag

SEQ ID NO: 5518223 - DNA, 25 bp, Homo sapien
ggcgcactgggtccctcagttgttc

SEQ ID NO: 5518224 - DNA, 25 bp, Homo sapien
ggaggagaaagcacttccaatcctc

SEQ ID NO: 5518225 - DNA, 25 bp, Homo sapien
tccctaagacctaagctcccctgac

SEQ ID NO: 5518226 - DNA, 25 bp, Homo sapien
cctgacctcacctgggtggaggaga

SEQ ID NO: 5518227 - DNA, 25 bp, Homo sapien
tcagttgttcggcagctccaaaagc

SEQ ID NO: 5518228 - DNA, 25 bp, Homo sapien
tggaaaacagaacctctgaccccaa

SEQ ID NO: 5518229 - DNA, 25 bp, Homo sapien
ctattcactagtgcgggatggaagg

SEQ ID NO: 5518230 - DNA, 25 bp, Homo sapien
agaaaaggagacaagtccttcccca

SEQ ID NO: 5518231 - DNA, 25 bp, Homo sapien
ccagcgtgggaattgttcctctcgc

SEQ ID NO: 5518232 - DNA, 25 bp, Homo sapien
ctcgcacctcgttttcgggggaaga

SEQ ID NO: 5518233 - DNA, 25 bp, Homo sapien
gcatgatccaggcctatctcacccc

SEQ ID NO: 5518234 - DNA, 25 bp, Homo sapien
ttggaaacagtctatgaattgatga

SEQ ID NO: 5518235 - DNA, 25 bp, Homo sapien
gaattgatgaaccctgccgtgttcc

SEQ ID NO: 5518236 - DNA, 25 bp, Homo sapien
gcccaggagtatggctgtgtgttta

SEQ ID NO: 5518237 - DNA, 25 bp, Homo sapien
tgcattgtgcagtggttaaagacac

SEQ ID NO: 5518238 - DNA, 25 bp, Homo sapien
agagacatgggctgatctcagctgg

SEQ ID NO: 5518239 - DNA, 25 bp, Homo sapien
cattcgtacctttgggcacaggaac

SEQ ID NO: 5518240 - DNA, 25 bp, Homo sapien
atgaatgtcatgcctcgtagtaaac

SEQ ID NO: 5518241 - DNA, 25 bp, Homo sapien
gacacagatgcctagtggaaaagtt

SEQ ID NO: 5518242 - DNA, 25 bp, Homo sapien
agagtggctgtctttaggaaaacag

SEQ ID NO: 5518243 - DNA, 25 bp, Homo sapien
ttatcaagggaattcgaaaagacac

SEQ ID NO: 5518244 - DNA, 25 bp, Homo sapien
ctgctcttggaaacggcatccctgt

SEQ ID NO: 5518245 - DNA, 25 bp, Homo sapien
cacctacaaagccttaaagagcccc

SEQ ID NO: 5518246 - DNA, 25 bp, Homo sapien
aactgagataggcagcccccttcat

SEQ ID NO: 5518247 - DNA, 25 bp, Homo sapien
acctcccgccaactgagataggcag

SEQ ID NO: 5518248 - DNA, 25 bp, Homo sapien
gactccagagagctacctccagtgg

SEQ ID NO: 5518249 - DNA, 25 bp, Homo sapien
tccagtggctggtcttgcacatcca

SEQ ID NO: 5518250 - DNA, 25 bp, Homo sapien
gggatccttggaccaggactcactt

SEQ ID NO: 5518251 - DNA, 25 bp, Homo sapien
tcccatgtctggtagaaaagcaggc

SEQ ID NO: 5518252 - DNA, 25 bp, Homo sapien
tggtctctgggtaggcccttgtatc

SEQ ID NO: 5518253 - DNA, 25 bp, Homo sapien
tttcatcttcgggacaccagcccca

SEQ ID NO: 5518254 - DNA, 25 bp, Homo sapien
gggcatcattggctggacatctcct

SEQ ID NO: 5518255 - DNA, 25 bp, Homo sapien
aaggactaggctgactctctctggt

SEQ ID NO: 5518256 - DNA, 25 bp, Homo sapien
gtatccagtggcatcgagggtatta

SEQ ID NO: 5518257 - DNA, 25 bp, Homo sapien
atgttagggagagcaaaatataata

SEQ ID NO: 5518258 - DNA, 25 bp, Homo sapien
acatagttgttctaggcccacagcc

SEQ ID NO: 5518259 - DNA, 25 bp, Homo sapien
caatatggtaaggataaggttggag

SEQ ID NO: 5518260 - DNA, 25 bp, Homo sapien
tcaaagtatgagatgggtgaattca

SEQ ID NO: 5518261 - DNA, 25 bp, Homo sapien
gcccacagcctaaggcctcagcgtc

SEQ ID NO: 5518262 - DNA, 25 bp, Homo sapien
ccacgcataggaggtacaaaataaa

SEQ ID NO: 5518263 - DNA, 25 bp, Homo sapien
aagatgaaggagcataaccctgctt

SEQ ID NO: 5518264 - DNA, 25 bp, Homo sapien
ggaaaacaactggggatacttcaca

SEQ ID NO: 5518265 - DNA, 25 bp, Homo sapien
acttcacaatgagaaacaggaatgc

SEQ ID NO: 5518266 - DNA, 25 bp, Homo sapien
tgcaccctggactatcccacgcata

SEQ ID NO: 5518267 - DNA, 25 bp, Homo sapien
tctgctggagaactgctcacttaac

SEQ ID NO: 5518268 - DNA, 25 bp, Homo sapien
tcagagcaatcatgcatgtgactac

SEQ ID NO: 5518269 - DNA, 25 bp, Homo sapien
tacagtcaagggcacaatcacattt

SEQ ID NO: 5518270 - DNA, 25 bp, Homo sapien
agggtgcaaatggaatgtaatacat

SEQ ID NO: 5518271 - DNA, 25 bp, Homo sapien
cctgcagcacacgccaaccaatcta

SEQ ID NO: 5518272 - DNA, 25 bp, Homo sapien
tgatcaaggtcatatgggtactgca

SEQ ID NO: 5518273 - DNA, 25 bp, Homo sapien
tacatccatcctgtgggagagttaa

SEQ ID NO: 5518274 - DNA, 25 bp, Homo sapien
gcactttggtacagtcaagggcaca

SEQ ID NO: 5518275 - DNA, 25 bp, Homo sapien
catgatacaggagtgatgaaccttc

SEQ ID NO: 5518276 - DNA, 25 bp, Homo sapien
ttccactcagaaggtagataaccac

SEQ ID NO: 5518277 - DNA, 25 bp, Homo sapien
aatctagagcgaaaagtaaacacga

SEQ ID NO: 5518278 - DNA, 25 bp, Homo sapien
ctgcccgttcctgcagccaactcag

SEQ ID NO: 5518279 - DNA, 25 bp, Homo sapien
cctggagctgcccgttcctgcagcc

SEQ ID NO: 5518280 - DNA, 25 bp, Homo sapien
ccatctcccagatggacagcgggga

SEQ ID NO: 5518281 - DNA, 25 bp, Homo sapien
gaaggcatcagcaaagggtttgcag

SEQ ID NO: 5518282 - DNA, 25 bp, Homo sapien
gcgcacatccacgcagaaggcatca

SEQ ID NO: 5518283 - DNA, 25 bp, Homo sapien
cacaccccacagtgcctccgcacgc

SEQ ID NO: 5518284 - DNA, 25 bp, Homo sapien
tcagcaaagggtttgcagtcccgaa

SEQ ID NO: 5518285 - DNA, 25 bp, Homo sapien
ctggcgtgctgtgttcacaccccac

SEQ ID NO: 5518286 - DNA, 25 bp, Homo sapien
gcttctgctcctggcgtgctgtgtt

SEQ ID NO: 5518287 - DNA, 25 bp, Homo sapien
cccctccaggctgtaacgcacagtg

SEQ ID NO: 5518288 - DNA, 25 bp, Homo sapien
gcgcccctccaggctgtaacgcaca

SEQ ID NO: 5518289 - DNA, 25 bp, Homo sapien
cacgcctcgaataccacctgcccgt

SEQ ID NO: 5518290 - DNA, 25 bp, Homo sapien
ccccacgcctcgaataccacctgcc

SEQ ID NO: 5518291 - DNA, 25 bp, Homo sapien
gtcggtcagttcgttgcgctgccaa

SEQ ID NO: 5518292 - DNA, 25 bp, Homo sapien
aataccacctgcccgttgaggaagc

SEQ ID NO: 5518293 - DNA, 25 bp, Homo sapien
ggcacttattgagctgcaggaagcg

SEQ ID NO: 5518294 - DNA, 25 bp, Homo sapien
ggccccacgcctcgaataccacctg

SEQ ID NO: 5518295 - DNA, 25 bp, Homo sapien
gcctcgaataccacctgcccgttga

SEQ ID NO: 5518296 - DNA, 25 bp, Homo sapien
gtcagttcgttgcgctgccaagagg

SEQ ID NO: 5518297 - DNA, 25 bp, Homo sapien
tcgaataccacctgcccgttgagga

SEQ ID NO: 5518298 - DNA, 25 bp, Homo sapien
cggcaccagctcgtgccgaagcacg

SEQ ID NO: 5518299 - DNA, 25 bp, Homo sapien
gccgggcacttattgagctgcagga

SEQ ID NO: 5518300 - DNA, 25 bp, Homo sapien
gttttctgtggtgtagctgaggata

SEQ ID NO: 5518301 - DNA, 25 bp, Homo sapien
caccagagataatcaccatttgacc

SEQ ID NO: 5518302 - DNA, 25 bp, Homo sapien
gaccataaataacaagcaatctgtc

SEQ ID NO: 5518303 - DNA, 25 bp, Homo sapien
tatttctagtgagtctgtgggttga

SEQ ID NO: 5518304 - DNA, 25 bp, Homo sapien
gcagcatggtggctagcttccaaaa

SEQ ID NO: 5518305 - DNA, 25 bp, Homo sapien
gtagctgaggatacacccacattca

SEQ ID NO: 5518306 - DNA, 25 bp, Homo sapien
ataaaaggaaagctgccagtctctt

SEQ ID NO: 5518307 - DNA, 25 bp, Homo sapien
ccacattcagctgggagcttaaggc

SEQ ID NO: 5518308 - DNA, 25 bp, Homo sapien
ggagcttaaggctggaacatccaag

SEQ ID NO: 5518309 - DNA, 25 bp, Homo sapien
attgggatcgactgagtagttcctc

SEQ ID NO: 5518310 - DNA, 25 bp, Homo sapien
aaaggaaactacagataggcataac

SEQ ID NO: 5518311 - DNA, 25 bp, Homo sapien
tcaaatatagcaacagtcactacat

SEQ ID NO: 5518312 - DNA, 25 bp, Homo sapien
aatacaatgtagtgtatgtggaaag

SEQ ID NO: 5518313 - DNA, 25 bp, Homo sapien
aataatgagcattgtgcatcgcacc

SEQ ID NO: 5518314 - DNA, 25 bp, Homo sapien
gtgcatcgcaccttctgataatctc

SEQ ID NO: 5518315 - DNA, 25 bp, Homo sapien
tattctgacgcctatgctggagtgc

SEQ ID NO: 5518316 - DNA, 25 bp, Homo sapien
acgtgtcttgtactaggataaaata

SEQ ID NO: 5518317 - DNA, 25 bp, Homo sapien
taggcagatggctggtttttgtagg

SEQ ID NO: 5518318 - DNA, 25 bp, Homo sapien
ttttgtaggattaagcagtgaggaa

SEQ ID NO: 5518319 - DNA, 25 bp, Homo sapien
ttcgtataccggttgcactgattca

SEQ ID NO: 5518320 - DNA, 25 bp, Homo sapien
tttactgttagatgttatacgtgtc

SEQ ID NO: 5518321 - DNA, 25 bp, Homo sapien
gtatgtggaaagatcttgcctaata

SEQ ID NO: 5518322 - DNA, 25 bp, Homo sapien
gtgatcaacaacaagagtgaaggag

SEQ ID NO: 5518323 - DNA, 25 bp, Homo sapien
gagctacagagaaccccagcatgaa

SEQ ID NO: 5518324 - DNA, 25 bp, Homo sapien
acgtgactgtcaggtacagagctac

SEQ ID NO: 5518325 - DNA, 25 bp, Homo sapien
ggaatggatccaacgagcgtcttag

SEQ ID NO: 5518326 - DNA, 25 bp, Homo sapien
aagactaagcccaaaggtgatcaac

SEQ ID NO: 5518327 - DNA, 25 bp, Homo sapien
gtcatccagggacaaagtgaccttt

SEQ ID NO: 5518328 - DNA, 25 bp, Homo sapien
ggagttgtgagcgctcaacaccatt

SEQ ID NO: 5518329 - DNA, 25 bp, Homo sapien
ttgatagactgacagatgcatgcac

SEQ ID NO: 5518330 - DNA, 25 bp, Homo sapien
caccattacaaagaagggatcgggg

SEQ ID NO: 5518331 - DNA, 25 bp, Homo sapien
tacattggcctgtgtttggtcatcc

SEQ ID NO: 5518332 - DNA, 25 bp, Homo sapien
gctggggcaaaacaagcccagtaag

SEQ ID NO: 5518333 - DNA, 25 bp, Homo sapien
cgtctcccaggcgtccgtcccggct

SEQ ID NO: 5518334 - DNA, 25 bp, Homo sapien
agccgggacggacgcctgggagacg

SEQ ID NO: 5518335 - DNA, 25 bp, Homo sapien
tcatgtgagacaacagaaaggataa

SEQ ID NO: 5518336 - DNA, 25 bp, Homo sapien
aagatgcattctgatacactagtga

SEQ ID NO: 5518337 - DNA, 25 bp, Homo sapien
gtcaacctcaaaacagatgatactc

SEQ ID NO: 5518338 - DNA, 25 bp, Homo sapien
gttgtttctactggtcggtgctcgc

SEQ ID NO: 5518339 - DNA, 25 bp, Homo sapien
ccatcccatgcttgtcatgtgagac

SEQ ID NO: 5518340 - DNA, 25 bp, Homo sapien
cagaaaggataaagaatactctatt

SEQ ID NO: 5518341 - DNA, 25 bp, Homo sapien
attgggatacttaaataacagattt

SEQ ID NO: 5518342 - DNA, 25 bp, Homo sapien
tctattaacagggttatgtcacacc

SEQ ID NO: 5518343 - DNA, 25 bp, Homo sapien
actgatgagcttaccaactggacct

SEQ ID NO: 5518344 - DNA, 25 bp, Homo sapien
tgatacactagtgaactgggggtga

SEQ ID NO: 5518345 - DNA, 25 bp, Homo sapien
tactggtcggtgctcgctcactaat

SEQ ID NO: 5518346 - DNA, 25 bp, Homo sapien
tcacgacgcaccttaagacgtctac

SEQ ID NO: 5518347 - DNA, 25 bp, Homo sapien
gtagacgtcttaaggtgcgtcgtga

SEQ ID NO: 5518348 - DNA, 25 bp, Homo sapien
ttcaagcaccactcagcaatgtaat

SEQ ID NO: 5518349 - DNA, 25 bp, Homo sapien
aatgcacaggtgacaacactgacat

SEQ ID NO: 5518350 - DNA, 25 bp, Homo sapien
tactcatgaagtgtacagaaaacat

SEQ ID NO: 5518351 - DNA, 25 bp, Homo sapien
attaagtttttcacaggagctggac

SEQ ID NO: 5518352 - DNA, 25 bp, Homo sapien
gaagaatacttgtgctgtggctatc

SEQ ID NO: 5518353 - DNA, 25 bp, Homo sapien
gccattgggccttttctcgtgctga

SEQ ID NO: 5518354 - DNA, 25 bp, Homo sapien
cagaaaacatgtaccattgaatgtc

SEQ ID NO: 5518355 - DNA, 25 bp, Homo sapien
agctttacagagtttgcagaaattc

SEQ ID NO: 5518356 - DNA, 25 bp, Homo sapien
agctggacaatggtccattcaaggc

SEQ ID NO: 5518357 - DNA, 25 bp, Homo sapien
cattcaaggctggaggatttatgct

SEQ ID NO: 5518358 - DNA, 25 bp, Homo sapien
ctcgtgctgacccttgctaacacca

SEQ ID NO: 5518359 - DNA, 25 bp, Homo sapien
taaaatgcaattatgggttggttac

SEQ ID NO: 5518360 - DNA, 25 bp, Homo sapien
gaggatgacactcactaaaggagac

SEQ ID NO: 5518361 - DNA, 25 bp, Homo sapien
gcaaatgcagcctgataaagcttcc

SEQ ID NO: 5518362 - DNA, 25 bp, Homo sapien
atcttttgaaatggatgagaggatg

SEQ ID NO: 5518363 - DNA, 25 bp, Homo sapien
ttcccctagtgggtacatggaatgc

SEQ ID NO: 5518364 - DNA, 25 bp, Homo sapien
atttggacaggttcaaaaatagtcc

SEQ ID NO: 5518365 - DNA, 25 bp, Homo sapien
atcgaaccacgacaagtaaaatgca

SEQ ID NO: 5518366 - DNA, 25 bp, Homo sapien
tggggcgccacagctttatcctagc

SEQ ID NO: 5518367 - DNA, 25 bp, Homo sapien
aaaggagacagctcaacagtgtgtt

SEQ ID NO: 5518368 - DNA, 25 bp, Homo sapien
tgctgggttcccatcgctgtctccc

SEQ ID NO: 5518369 - DNA, 25 bp, Homo sapien
gatttggttccagaaaggcagacaa

SEQ ID NO: 5518370 - DNA, 25 bp, Homo sapien
gagagactgatctcttttttcctta

SEQ ID NO: 5518371 - DNA, 25 bp, Homo sapien
taaggaaaaaagagatcagtctctc

SEQ ID NO: 5518372 - DNA, 25 bp, Homo sapien
accccaaactggatgactgtggcca

SEQ ID NO: 5518373 - DNA, 25 bp, Homo sapien
gggaccagtgaccagactgtcaagg

SEQ ID NO: 5518374 - DNA, 25 bp, Homo sapien
aaggagacacatgaaactcaaacca

SEQ ID NO: 5518375 - DNA, 25 bp, Homo sapien
attccaggctcacgtgtagatatat

SEQ ID NO: 5518376 - DNA, 25 bp, Homo sapien
accaacaggtggcctgtgaatgcga

SEQ ID NO: 5518377 - DNA, 25 bp, Homo sapien
ggaagaaagatcgagttgtgtgctc

SEQ ID NO: 5518378 - DNA, 25 bp, Homo sapien
tgtgctcaagtcaacctaggccagg

SEQ ID NO: 5518379 - DNA, 25 bp, Homo sapien
caaggaagtacattcagtgggtgtg

SEQ ID NO: 5518380 - DNA, 25 bp, Homo sapien
tgaatgcgagtaaacacatctaagg

SEQ ID NO: 5518381 - DNA, 25 bp, Homo sapien
tctaggtgctgtgctaagtatgtac

SEQ ID NO: 5518382 - DNA, 25 bp, Homo sapien
agcgttcagttaaataaaggaagat

SEQ ID NO: 5518383 - DNA, 25 bp, Homo sapien
ctggcatcataatatagagctcggc

SEQ ID NO: 5518384 - DNA, 25 bp, Homo sapien
aaccaactggctcaagtgaatggga

SEQ ID NO: 5518385 - DNA, 25 bp, Homo sapien
aagtgaatgggatcaaacccaactt

SEQ ID NO: 5518386 - DNA, 25 bp, Homo sapien
gatgttcatatatacagtggagtcc

SEQ ID NO: 5518387 - DNA, 25 bp, Homo sapien
cacactgtgggttacctggcatcat

SEQ ID NO: 5518388 - DNA, 25 bp, Homo sapien
ataaggtcattagtatcaagaattc

SEQ ID NO: 5518389 - DNA, 25 bp, Homo sapien
atacagtggagtccacactgtgggt

SEQ ID NO: 5518390 - DNA, 25 bp, Homo sapien
tccatatgtgctatctgtgcttaac

SEQ ID NO: 5518391 - DNA, 25 bp, Homo sapien
ttaagcccagattgcttcccaagcc

SEQ ID NO: 5518392 - DNA, 25 bp, Homo sapien
tagagctcggcaagctatgtgtaca

SEQ ID NO: 5518393 - DNA, 25 bp, Homo sapien
attgccagtacagtgatttaatatg

SEQ ID NO: 5518394 - DNA, 25 bp, Homo sapien
agtttcacagaatacctacatagga

SEQ ID NO: 5518395 - DNA, 25 bp, Homo sapien
aaatgcattcatgagcaaggcactt

SEQ ID NO: 5518396 - DNA, 25 bp, Homo sapien
gacaagacaactaaggctcagcaga

SEQ ID NO: 5518397 - DNA, 25 bp, Homo sapien
cctttagacaagacaactaaggctc

SEQ ID NO: 5518398 - DNA, 25 bp, Homo sapien
ttcgaagtgaatagcaaaaatgcat

SEQ ID NO: 5518399 - DNA, 25 bp, Homo sapien
tttcaggtcaataatttccactaac

SEQ ID NO: 5518400 - DNA, 25 bp, Homo sapien
aaggcttcctttcgaagtgaatagc

SEQ ID NO: 5518401 - DNA, 25 bp, Homo sapien
cctacataggaacaatttctgatac

SEQ ID NO: 5518402 - DNA, 25 bp, Homo sapien
tacactaacaatatgatatggtttc

SEQ ID NO: 5518403 - DNA, 25 bp, Homo sapien
atgaacacatgaacataaacatatt

SEQ ID NO: 5518404 - DNA, 25 bp, Homo sapien
actaaggctcagcagaaatattcac

SEQ ID NO: 5518405 - DNA, 25 bp, Homo sapien
agttgcaagaaaatgctgatggaaa

SEQ ID NO: 5518406 - DNA, 25 bp, Homo sapien
gacccaaatgacacgccatgcatct

SEQ ID NO: 5518407 - DNA, 25 bp, Homo sapien
gtgcactgccatatactctgagctc

SEQ ID NO: 5518408 - DNA, 25 bp, Homo sapien
caaggctaattctacccgagcaccc

SEQ ID NO: 5518409 - DNA, 25 bp, Homo sapien
gcatcttgagtgaccgtgcactgcc

SEQ ID NO: 5518410 - DNA, 25 bp, Homo sapien
tacgagaaagcctgattgattttac

SEQ ID NO: 5518411 - DNA, 25 bp, Homo sapien
agagacaaatacagatcagtaggta

SEQ ID NO: 5518412 - DNA, 25 bp, Homo sapien
gagatagcatgaacacattagtctc

SEQ ID NO: 5518413 - DNA, 25 bp, Homo sapien
tgagctctactacaggtaatgttac

SEQ ID NO: 5518414 - DNA, 25 bp, Homo sapien
ggaaataacttacgagaaagcctga

SEQ ID NO: 5518415 - DNA, 25 bp, Homo sapien
gagcacccatcaaagcgacccaaat

SEQ ID NO: 5518416 - DNA, 25 bp, Homo sapien
atttgcaaagtaactggacacgaac

SEQ ID NO: 5518417 - DNA, 25 bp, Homo sapien
cacttggcaagtgttaggccacagc

SEQ ID NO: 5518418 - DNA, 25 bp, Homo sapien
caagaaaggtgaagtttaatttgca

SEQ ID NO: 5518419 - DNA, 25 bp, Homo sapien
aggccacagcacaaacccctctgtc

SEQ ID NO: 5518420 - DNA, 25 bp, Homo sapien
cagggatgtgtaaacaccagcctaa

SEQ ID NO: 5518421 - DNA, 25 bp, Homo sapien
actggacacgaacgatatgcttctc

SEQ ID NO: 5518422 - DNA, 25 bp, Homo sapien
aagcagcacagggattactattcac

SEQ ID NO: 5518423 - DNA, 25 bp, Homo sapien
ctgaggacagtaatcagatgacctc

SEQ ID NO: 5518424 - DNA, 25 bp, Homo sapien
cgggatgcctaggccagctctcttt

SEQ ID NO: 5518425 - DNA, 25 bp, Homo sapien
atcagatgacctcatgtgcggacag

SEQ ID NO: 5518426 - DNA, 25 bp, Homo sapien
gtgaaaaatgaaatgagctgtgtaa

SEQ ID NO: 5518427 - DNA, 25 bp, Homo sapien
aacagacaaggaaatttttagacat

SEQ ID NO: 5518428 - DNA, 25 bp, Homo sapien
cattagataacgttttggaaagtaa

SEQ ID NO: 5518429 - DNA, 25 bp, Homo sapien
agaaactgtaaagatggttacaaaa

SEQ ID NO: 5518430 - DNA, 25 bp, Homo sapien
acattgggcccattagataacgttt

SEQ ID NO: 5518431 - DNA, 25 bp, Homo sapien
tctttgaaaagaatacaccatttcc

SEQ ID NO: 5518432 - DNA, 25 bp, Homo sapien
agtaatgccattgttaactggtagt

SEQ ID NO: 5518433 - DNA, 25 bp, Homo sapien
accatttaaatcaacagacaaggaa

SEQ ID NO: 5518434 - DNA, 25 bp, Homo sapien
cttgaggtacacattgggcccatta

SEQ ID NO: 5518435 - DNA, 25 bp, Homo sapien
ttacagacatttcagaaccatttaa

SEQ ID NO: 5518436 - DNA, 25 bp, Homo sapien
acaacccaagttttccaagcaaaga

SEQ ID NO: 5518437 - DNA, 25 bp, Homo sapien
tttatcttgaggtacacattgggcc

SEQ ID NO: 5518438 - DNA, 25 bp, Homo sapien
ggctggataatgagctggcaaaata

SEQ ID NO: 5518439 - DNA, 25 bp, Homo sapien
gagcctaaacgtgtaggtgagtgct

SEQ ID NO: 5518440 - DNA, 25 bp, Homo sapien
ggcaggctccatcccaccatcaccc

SEQ ID NO: 5518441 - DNA, 25 bp, Homo sapien
agtggaaggaactgcaatcaaattc

SEQ ID NO: 5518442 - DNA, 25 bp, Homo sapien
cacactcatagaacagaaaggaaag

SEQ ID NO: 5518443 - DNA, 25 bp, Homo sapien
ttccagcacagatagacagcccata

SEQ ID NO: 5518444 - DNA, 25 bp, Homo sapien
gcaggaaaggctcccactctatggc

SEQ ID NO: 5518445 - DNA, 25 bp, Homo sapien
ttctgacacgacctgcaaatcctcc

SEQ ID NO: 5518446 - DNA, 25 bp, Homo sapien
tgcgcctgaaccatagccccacatt

SEQ ID NO: 5518447 - DNA, 25 bp, Homo sapien
acccagaagaatcgtaattgcagac

SEQ ID NO: 5518448 - DNA, 25 bp, Homo sapien
tattagctgcagttaagcgggcagg

SEQ ID NO: 5518449 - DNA, 25 bp, Homo sapien
gtcgctggacctgttgctctgcatc

SEQ ID NO: 5518450 - DNA, 25 bp, Homo sapien
agcggaacaaggatcccatcttgca

SEQ ID NO: 5518451 - DNA, 25 bp, Homo sapien
tggtggacatgccagccaacaacaa

SEQ ID NO: 5518452 - DNA, 25 bp, Homo sapien
ggacacagccctcctggaggacctg

SEQ ID NO: 5518453 - DNA, 25 bp, Homo sapien
gaaaggccagtggcctgctcctgga

SEQ ID NO: 5518454 - DNA, 25 bp, Homo sapien
atgtcagccccctgcgctgcacgga

SEQ ID NO: 5518455 - DNA, 25 bp, Homo sapien
cttcagagcagcaggacacctgctc

SEQ ID NO: 5518456 - DNA, 25 bp, Homo sapien
ggccttccccctggccgagtggcag

SEQ ID NO: 5518457 - DNA, 25 bp, Homo sapien
tcatcacctacggggaacccagaat

SEQ ID NO: 5518458 - DNA, 25 bp, Homo sapien
ccatcttgcacgtgctgcggcagta

SEQ ID NO: 5518459 - DNA, 25 bp, Homo sapien
cacctgctcaaacccagggccctgc

SEQ ID NO: 5518460 - DNA, 25 bp, Homo sapien
cggtccctaaccatcgatcggacga

SEQ ID NO: 5518461 - DNA, 25 bp, Homo sapien
tcgtccgatcgatggttagggaccg

SEQ ID NO: 5518462 - DNA, 25 bp, Homo sapien
gggttacatccaacacaagggctgt

SEQ ID NO: 5518463 - DNA, 25 bp, Homo sapien
tgcatactagcacttcaccccttcc

SEQ ID NO: 5518464 - DNA, 25 bp, Homo sapien
aaatacagcgtaattggtcatcaaa

SEQ ID NO: 5518465 - DNA, 25 bp, Homo sapien
aagggctgtttactattatggcatc

SEQ ID NO: 5518466 - DNA, 25 bp, Homo sapien
tcaaaatacaaaacagctaatctta

SEQ ID NO: 5518467 - DNA, 25 bp, Homo sapien
atgggaaataaagaccttacagaac

SEQ ID NO: 5518468 - DNA, 25 bp, Homo sapien
catgccaacgatcaaattgtactgc

SEQ ID NO: 5518469 - DNA, 25 bp, Homo sapien
atctgagaggaaaatgtctgcagaa

SEQ ID NO: 5518470 - DNA, 25 bp, Homo sapien
tcagtgcattcatgaggaaagacaa

SEQ ID NO: 5518471 - DNA, 25 bp, Homo sapien
acataatagaaaagtggaagacaaa

SEQ ID NO: 5518472 - DNA, 25 bp, Homo sapien
actagagcaccacaaaaacagacat

SEQ ID NO: 5518473 - DNA, 25 bp, Homo sapien
cgtttctatgggcattgggattggg

SEQ ID NO: 5518474 - DNA, 25 bp, Homo sapien
tctaataataaacggttgaagtata

SEQ ID NO: 5518475 - DNA, 25 bp, Homo sapien
cctcactcgataactgcacaacctc

SEQ ID NO: 5518476 - DNA, 25 bp, Homo sapien
atctccaatagtaatccccaggtgt

SEQ ID NO: 5518477 - DNA, 25 bp, Homo sapien
tagtaatccccaggtgttgagggag

SEQ ID NO: 5518478 - DNA, 25 bp, Homo sapien
attgggggtggtttatactttctca

SEQ ID NO: 5518479 - DNA, 25 bp, Homo sapien
aactgcacaacctctggacacaaag

SEQ ID NO: 5518480 - DNA, 25 bp, Homo sapien
ctaatagaaagtactccaaaatgtt

SEQ ID NO: 5518481 - DNA, 25 bp, Homo sapien
ggacacaaagaggccgaattgtccc

SEQ ID NO: 5518482 - DNA, 25 bp, Homo sapien
atcaggagaaaaacctattatatga

SEQ ID NO: 5518483 - DNA, 25 bp, Homo sapien
gaaaaggcaactcactatccatttg

SEQ ID NO: 5518484 - DNA, 25 bp, Homo sapien
ttctgggaagctgccacttactatt

SEQ ID NO: 5518485 - DNA, 25 bp, Homo sapien
catctgtggccaaaatcatgatggc

SEQ ID NO: 5518486 - DNA, 25 bp, Homo sapien
gggcacagcctaggccaaataaccc

SEQ ID NO: 5518487 - DNA, 25 bp, Homo sapien
taacccaaatttctgggaagctgcc

SEQ ID NO: 5518488 - DNA, 25 bp, Homo sapien
tcacaggctgaactttgctgacccc

SEQ ID NO: 5518489 - DNA, 25 bp, Homo sapien
taaatggcgctcatttccagtgttc

SEQ ID NO: 5518490 - DNA, 25 bp, Homo sapien
acaaagcacagtaaataatgaagtt

SEQ ID NO: 5518491 - DNA, 25 bp, Homo sapien
tgaaattaccgacttcctcagcctg

SEQ ID NO: 5518492 - DNA, 25 bp, Homo sapien
cttaaaagtcaaggaagatgaagag

SEQ ID NO: 5518493 - DNA, 25 bp, Homo sapien
tgccttgttaccagttatgccatac

SEQ ID NO: 5518494 - DNA, 25 bp, Homo sapien
tgacccctggcttacatacagcatc

SEQ ID NO: 5518495 - DNA, 25 bp, Homo sapien
aggatctggagacagcccatcatca

SEQ ID NO: 5518496 - DNA, 25 bp, Homo sapien
agtataaaggaacacggtgatctgc

SEQ ID NO: 5518497 - DNA, 25 bp, Homo sapien
ataaagcctggctcagaatccccat

SEQ ID NO: 5518498 - DNA, 25 bp, Homo sapien
atcttagaagaggaatcaaactttc

SEQ ID NO: 5518499 - DNA, 25 bp, Homo sapien
tgtatatacacagggaaagaatgca

SEQ ID NO: 5518500 - DNA, 25 bp, Homo sapien
ggtgagagactggtgcattttatgg

SEQ ID NO: 5518501 - DNA, 25 bp, Homo sapien
agacccagaatgacctgtgagactc

SEQ ID NO: 5518502 - DNA, 25 bp, Homo sapien
tttatgggaaaaggcatgtatatac

SEQ ID NO: 5518503 - DNA, 25 bp, Homo sapien
gttggggagcctattctagacccag

SEQ ID NO: 5518504 - DNA, 25 bp, Homo sapien
cccatgactctgggactcaggcagt

SEQ ID NO: 5518505 - DNA, 25 bp, Homo sapien
gcagaggttatagcccatacaatgg

SEQ ID NO: 5518506 - DNA, 25 bp, Homo sapien
taagtaatgggggctgcattcttag

SEQ ID NO: 5518507 - DNA, 25 bp, Homo sapien
atagttaaacttggagtgtgcagat

SEQ ID NO: 5518508 - DNA, 25 bp, Homo sapien
ttggagtgtgcagataagctcacta

SEQ ID NO: 5518509 - DNA, 25 bp, Homo sapien
cctttacagagtagagtgtcctcag

SEQ ID NO: 5518510 - DNA, 25 bp, Homo sapien
gtcagcctgggatgtggttattttc

SEQ ID NO: 5518511 - DNA, 25 bp, Homo sapien
agagtagagtgtcctcagaaagcag

SEQ ID NO: 5518512 - DNA, 25 bp, Homo sapien
taggacatttggacattctgcaggc

SEQ ID NO: 5518513 - DNA, 25 bp, Homo sapien
gttatatttaagtaatgggggctgc

SEQ ID NO: 5518514 - DNA, 25 bp, Homo sapien
gcaggcttggtggaacatgttctgt

SEQ ID NO: 5518515 - DNA, 25 bp, Homo sapien
atccacgaccattaatcctgcaacc

SEQ ID NO: 5518516 - DNA, 25 bp, Homo sapien
tcaggccataagcatgaaccttgta

SEQ ID NO: 5518517 - DNA, 25 bp, Homo sapien
tggcttcaaagatgagaagagccac

SEQ ID NO: 5518518 - DNA, 25 bp, Homo sapien
tgctcaggctcagattgcgcaatgg

SEQ ID NO: 5518519 - DNA, 25 bp, Homo sapien
tcatccacctctcagcgcgcttatc

SEQ ID NO: 5518520 - DNA, 25 bp, Homo sapien
gccggtgctgcaccctaacacacac

SEQ ID NO: 5518521 - DNA, 25 bp, Homo sapien
gtggttgtctgtttcagggagcaca

SEQ ID NO: 5518522 - DNA, 25 bp, Homo sapien
tgacagacaccaacgccttcgcttg

SEQ ID NO: 5518523 - DNA, 25 bp, Homo sapien
tggggtttatgtttcaggctgagac

SEQ ID NO: 5518524 - DNA, 25 bp, Homo sapien
atggcaggaagcatattaggtgcta

SEQ ID NO: 5518525 - DNA, 25 bp, Homo sapien
taacacacacctaatgacagacacc

SEQ ID NO: 5518526 - DNA, 25 bp, Homo sapien
agggagcacatcgctcctggggcat

SEQ ID NO: 5518527 - DNA, 25 bp, Homo sapien
cctgggatcagatatgacattgcac

SEQ ID NO: 5518528 - DNA, 25 bp, Homo sapien
cgacacgatgcgaccgaaccgaagg

SEQ ID NO: 5518529 - DNA, 25 bp, Homo sapien
ccttcggttcggtcgcatcgtgtcg

SEQ ID NO: 5518530 - DNA, 25 bp, Homo sapien
ctgtgcactattttcagggccactc

SEQ ID NO: 5518531 - DNA, 25 bp, Homo sapien
gtgctggtgttttcatctggggagg

SEQ ID NO: 5518532 - DNA, 25 bp, Homo sapien
tgcccgtggtctcgtgccacaccaa

SEQ ID NO: 5518533 - DNA, 25 bp, Homo sapien
ctccctgagaccaaagcacaaaaca

SEQ ID NO: 5518534 - DNA, 25 bp, Homo sapien
gggcagccttcccaccaccgcagca

SEQ ID NO: 5518535 - DNA, 25 bp, Homo sapien
gcccctgcactcgccttcctcactg

SEQ ID NO: 5518536 - DNA, 25 bp, Homo sapien
acactgttcacacctgcccggctgc

SEQ ID NO: 5518537 - DNA, 25 bp, Homo sapien
gttcacacctgcccggctgcccact

SEQ ID NO: 5518538 - DNA, 25 bp, Homo sapien
cgccttcctcactgctgggcagcct

SEQ ID NO: 5518539 - DNA, 25 bp, Homo sapien
agggtgctccctgagaccaaagcac

SEQ ID NO: 5518540 - DNA, 25 bp, Homo sapien
ggtgccccacggtacccttgtcaca

SEQ ID NO: 5518541 - DNA, 25 bp, Homo sapien
gagacctaccaggtccatgactacc

SEQ ID NO: 5518542 - DNA, 25 bp, Homo sapien
ccccgacatgaccttcacgaccgca

SEQ ID NO: 5518543 - DNA, 25 bp, Homo sapien
ggggcctacaacaacttcttccgca

SEQ ID NO: 5518544 - DNA, 25 bp, Homo sapien
cagcaagccccgggctgtgctcaag

SEQ ID NO: 5518545 - DNA, 25 bp, Homo sapien
catgactaccttcggagcaagctct

SEQ ID NO: 5518546 - DNA, 25 bp, Homo sapien
ggacaaggtaaactctgacatgcac

SEQ ID NO: 5518547 - DNA, 25 bp, Homo sapien
tccctgtacgagaacgactgcattt

SEQ ID NO: 5518548 - DNA, 25 bp, Homo sapien
ttcaccaagaagatcctgcacacgg

SEQ ID NO: 5518549 - DNA, 25 bp, Homo sapien
cagcctcatgcaagtcatccccgac

SEQ ID NO: 5518550 - DNA, 25 bp, Homo sapien
cggcgtgatgacatcagtgtggaca

SEQ ID NO: 5518551 - DNA, 25 bp, Homo sapien
cgacaagtttgaatgtgcctggaac

SEQ ID NO: 5518552 - DNA, 25 bp, Homo sapien
tgaaaaatcagactaccacaatccc

SEQ ID NO: 5518553 - DNA, 25 bp, Homo sapien
gtgattcaggtaatgacaagcagcc

SEQ ID NO: 5518554 - DNA, 25 bp, Homo sapien
aacttgctgaaacccagaggaatgc

SEQ ID NO: 5518555 - DNA, 25 bp, Homo sapien
cacctgcctttggaaaaccaccctc

SEQ ID NO: 5518556 - DNA, 25 bp, Homo sapien
ttagaggcttttctgagacactgtc

SEQ ID NO: 5518557 - DNA, 25 bp, Homo sapien
aagctcttggccccacaggagatag

SEQ ID NO: 5518558 - DNA, 25 bp, Homo sapien
tggctgtgtatgacaaaagagcatc

SEQ ID NO: 5518559 - DNA, 25 bp, Homo sapien
aaagctgattttgcatgtggacctc

SEQ ID NO: 5518560 - DNA, 25 bp, Homo sapien
gctgctctgataattacgggggaaa

SEQ ID NO: 5518561 - DNA, 25 bp, Homo sapien
aggccagaagcctcccactgagtct

SEQ ID NO: 5518562 - DNA, 25 bp, Homo sapien
aacccagaggaatgctggctgtgta

SEQ ID NO: 5518563 - DNA, 25 bp, Homo sapien
agacagggtctttaagatggggtct

SEQ ID NO: 5518564 - DNA, 25 bp, Homo sapien
tgccaggctctgatgttgatatttt

SEQ ID NO: 5518565 - DNA, 25 bp, Homo sapien
caggagttagtatgaagtattcttc

SEQ ID NO: 5518566 - DNA, 25 bp, Homo sapien
cacaagaacgacagctgaatactct

SEQ ID NO: 5518567 - DNA, 25 bp, Homo sapien
cctttttcacaagaacgacagctga

SEQ ID NO: 5518568 - DNA, 25 bp, Homo sapien
gatgatcaggagttagtatgaagta

SEQ ID NO: 5518569 - DNA, 25 bp, Homo sapien
ctgttgttatgtctgctgtaagatg

SEQ ID NO: 5518570 - DNA, 25 bp, Homo sapien
tagttaccacagttaaaatgcattt

SEQ ID NO: 5518571 - DNA, 25 bp, Homo sapien
actctttcatgtgatgcctgatatt

SEQ ID NO: 5518572 - DNA, 25 bp, Homo sapien
actgtgccaggctctgatgttgata

SEQ ID NO: 5518573 - DNA, 25 bp, Homo sapien
atgtctgctgtaagatgatcaggag

SEQ ID NO: 5518574 - DNA, 25 bp, Homo sapien
ccggcccggactgcagaggacccgc

SEQ ID NO: 5518575 - DNA, 25 bp, Homo sapien
gcgggtcctctgcagtccgggccgg

SEQ ID NO: 5518576 - DNA, 25 bp, Homo sapien
ccatataaaacttatacgtaaccag

SEQ ID NO: 5518577 - DNA, 25 bp, Homo sapien
ctggttacgtataagttttatatgg

SEQ ID NO: 5518578 - DNA, 25 bp, Homo sapien
accctgcccaatgttgcgacgctag

SEQ ID NO: 5518579 - DNA, 25 bp, Homo sapien
agcagatttatgttgagaaaacttc

SEQ ID NO: 5518580 - DNA, 25 bp, Homo sapien
agggtttcaagatagtagatatgtc

SEQ ID NO: 5518581 - DNA, 25 bp, Homo sapien
gcggcttcacgtcccctccacccac

SEQ ID NO: 5518582 - DNA, 25 bp, Homo sapien
gtagatatgtctgctgggatgtttt

SEQ ID NO: 5518583 - DNA, 25 bp, Homo sapien
ataactcgacatctagaagggtttc

SEQ ID NO: 5518584 - DNA, 25 bp, Homo sapien
aaccatcatctcagggcggcttcac

SEQ ID NO: 5518585 - DNA, 25 bp, Homo sapien
gcgacgctaggagtttccttgacac

SEQ ID NO: 5518586 - DNA, 25 bp, Homo sapien
aaggcccaacctgttagcaaaaata

SEQ ID NO: 5518587 - DNA, 25 bp, Homo sapien
aatgaaggaaatgtctccaaggtct

SEQ ID NO: 5518588 - DNA, 25 bp, Homo sapien
gggcgtcccagactcgacacttcct

SEQ ID NO: 5518589 - DNA, 25 bp, Homo sapien
tgtggaatgtgtatcagtttaaatc

SEQ ID NO: 5518590 - DNA, 25 bp, Homo sapien
ttcttaggagtacccatacagtatt

SEQ ID NO: 5518591 - DNA, 25 bp, Homo sapien
ggagaaccagctgtgaatgtgacag

SEQ ID NO: 5518592 - DNA, 25 bp, Homo sapien
acatgatctggcatcaagctgcaat

SEQ ID NO: 5518593 - DNA, 25 bp, Homo sapien
tacagtattagaaggccctattaac

SEQ ID NO: 5518594 - DNA, 25 bp, Homo sapien
attggaataagctgaatttacagta

SEQ ID NO: 5518595 - DNA, 25 bp, Homo sapien
agtcatgatactgaagaatccaacc

SEQ ID NO: 5518596 - DNA, 25 bp, Homo sapien
cacttggcaactatggtaaaaccac

SEQ ID NO: 5518597 - DNA, 25 bp, Homo sapien
tgtgacaggaggcctcataacttct

SEQ ID NO: 5518598 - DNA, 25 bp, Homo sapien
cacactttggagcataagcagaatc

SEQ ID NO: 5518599 - DNA, 25 bp, Homo sapien
taaagagacttcctcagagtactac

SEQ ID NO: 5518600 - DNA, 25 bp, Homo sapien
tgtgaggagcaattttcagcaaatc

SEQ ID NO: 5518601 - DNA, 25 bp, Homo sapien
gagaaatggaaatttccaagacgcc

SEQ ID NO: 5518602 - DNA, 25 bp, Homo sapien
atgtgaaaaaataggaccagctaag

SEQ ID NO: 5518603 - DNA, 25 bp, Homo sapien
cagaactatagaacattaacgtact

SEQ ID NO: 5518604 - DNA, 25 bp, Homo sapien
agagggaaactgctgaaatatcatt

SEQ ID NO: 5518605 - DNA, 25 bp, Homo sapien
aacttgatagccacatgccagaatg

SEQ ID NO: 5518606 - DNA, 25 bp, Homo sapien
gcaaatctgacaaacagcaagagtc

SEQ ID NO: 5518607 - DNA, 25 bp, Homo sapien
catcaatttgcaaaggcctgaggta

SEQ ID NO: 5518608 - DNA, 25 bp, Homo sapien
tgcacaaaactaggaccaagaggga

SEQ ID NO: 5518609 - DNA, 25 bp, Homo sapien
atgaaagggatgaatttttaggaac

SEQ ID NO: 5518610 - DNA, 25 bp, Homo sapien
agaaagggaggtattaacaatatca

SEQ ID NO: 5518611 - DNA, 25 bp, Homo sapien
ttgcttcggcatggctttcctcctc

SEQ ID NO: 5518612 - DNA, 25 bp, Homo sapien
tttattagtactgtgtagggaaggc

SEQ ID NO: 5518613 - DNA, 25 bp, Homo sapien
caaagcaaatacccatggcatgaac

SEQ ID NO: 5518614 - DNA, 25 bp, Homo sapien
ttgcaaacctggataagtagatatt

SEQ ID NO: 5518615 - DNA, 25 bp, Homo sapien
agactccaagtccaaagcaaatacc

SEQ ID NO: 5518616 - DNA, 25 bp, Homo sapien
gatgctgggctataacatccaggtt

SEQ ID NO: 5518617 - DNA, 25 bp, Homo sapien
caggttacaatttggtgacggattt

SEQ ID NO: 5518618 - DNA, 25 bp, Homo sapien
aagcacgctacaagaaaattcacac

SEQ ID NO: 5518619 - DNA, 25 bp, Homo sapien
tgaacaaataggatgcctaagattc

SEQ ID NO: 5518620 - DNA, 25 bp, Homo sapien
agaatcactcagaaaggacaaagct

SEQ ID NO: 5518621 - DNA, 25 bp, Homo sapien
tttcctagatgggacaatggcaaga

SEQ ID NO: 5518622 - DNA, 25 bp, Homo sapien
aaactatcccagagcatgtcaattc

SEQ ID NO: 5518623 - DNA, 25 bp, Homo sapien
agatggacattttttctagagaaac

SEQ ID NO: 5518624 - DNA, 25 bp, Homo sapien
tctgaggttagaatggaagataatg

SEQ ID NO: 5518625 - DNA, 25 bp, Homo sapien
ttattaatagaaaacacacatgcca

SEQ ID NO: 5518626 - DNA, 25 bp, Homo sapien
atatgcatttgtaatgaggcacagc

SEQ ID NO: 5518627 - DNA, 25 bp, Homo sapien
aacaacagcactcaaacatcatatg

SEQ ID NO: 5518628 - DNA, 25 bp, Homo sapien
gcatttgtaatgaggcacagcaatc

SEQ ID NO: 5518629 - DNA, 25 bp, Homo sapien
gtaatgaggcacagcaatcaatttt

SEQ ID NO: 5518630 - DNA, 25 bp, Homo sapien
ttagaatggaagataatgaaacaag

SEQ ID NO: 5518631 - DNA, 25 bp, Homo sapien
aataatttcaaacaacagcactcaa

SEQ ID NO: 5518632 - DNA, 25 bp, Homo sapien
ttgtcaaactatcccagagcatgtc

SEQ ID NO: 5518633 - DNA, 25 bp, Homo sapien
atggttgaccaagaaaaacacttat

SEQ ID NO: 5518634 - DNA, 25 bp, Homo sapien
tggctataaaatgacatggttgacc

SEQ ID NO: 5518635 - DNA, 25 bp, Homo sapien
tacctgcccctgaccaagtcctgtt

SEQ ID NO: 5518636 - DNA, 25 bp, Homo sapien
aaagtataattcatggcaggactct

SEQ ID NO: 5518637 - DNA, 25 bp, Homo sapien
gactctcataacaccctcggagcgc

SEQ ID NO: 5518638 - DNA, 25 bp, Homo sapien
acaccctcggagcgctcactctctt

SEQ ID NO: 5518639 - DNA, 25 bp, Homo sapien
tcttttcaaagtcgtgtggattaat

SEQ ID NO: 5518640 - DNA, 25 bp, Homo sapien
gccacaatatgatcaatagggtttc

SEQ ID NO: 5518641 - DNA, 25 bp, Homo sapien
attcaagaaatcatactgagccttt

SEQ ID NO: 5518642 - DNA, 25 bp, Homo sapien
ctgaacatttaagactacctgcccc

SEQ ID NO: 5518643 - DNA, 25 bp, Homo sapien
gatcaatagggtttcagacagtgac

SEQ ID NO: 5518644 - DNA, 25 bp, Homo sapien
atggctacatgttaaggaacatctc

SEQ ID NO: 5518645 - DNA, 25 bp, Homo sapien
gcttccagctatttaaccaggtgac

SEQ ID NO: 5518646 - DNA, 25 bp, Homo sapien
tgtagataacaagcactcaaaggtt

SEQ ID NO: 5518647 - DNA, 25 bp, Homo sapien
aataagtaaatagccccagactatc

SEQ ID NO: 5518648 - DNA, 25 bp, Homo sapien
aagaggctcttaataacgcagaagc

SEQ ID NO: 5518649 - DNA, 25 bp, Homo sapien
aataacgcagaagcaaaaatctttc

SEQ ID NO: 5518650 - DNA, 25 bp, Homo sapien
agatgcactaatattcgtgagaact

SEQ ID NO: 5518651 - DNA, 25 bp, Homo sapien
tcaggcttcagatatggaaataaag

SEQ ID NO: 5518652 - DNA, 25 bp, Homo sapien
aggttaatgagtgaaggagataacc

SEQ ID NO: 5518653 - DNA, 25 bp, Homo sapien
ttcaaatggtagacttggcttactt

SEQ ID NO: 5518654 - DNA, 25 bp, Homo sapien
gtgacaaatcaaagtgacaagatgc

SEQ ID NO: 5518655 - DNA, 25 bp, Homo sapien
tctcagcctgaccccctgaagaatc

SEQ ID NO: 5518656 - DNA, 25 bp, Homo sapien
ccgcattgagagttgtacattggta

SEQ ID NO: 5518657 - DNA, 25 bp, Homo sapien
gaatggaagatccgtgtccctggtt

SEQ ID NO: 5518658 - DNA, 25 bp, Homo sapien
atattttggttagaggaaagcacag

SEQ ID NO: 5518659 - DNA, 25 bp, Homo sapien
tacattggtaatggctacacgtata

SEQ ID NO: 5518660 - DNA, 25 bp, Homo sapien
cacacgggagaaatctgttccaatg

SEQ ID NO: 5518661 - DNA, 25 bp, Homo sapien
atacggtaatatgcccactgcagcc

SEQ ID NO: 5518662 - DNA, 25 bp, Homo sapien
ccgtgtccctggttagaagtagagc

SEQ ID NO: 5518663 - DNA, 25 bp, Homo sapien
gtggcggcaactccgcattgagagt

SEQ ID NO: 5518664 - DNA, 25 bp, Homo sapien
tattcagcagcatttgattgggggc

SEQ ID NO: 5518665 - DNA, 25 bp, Homo sapien
aagtgagcggagtaaaaacattcac

SEQ ID NO: 5518666 - DNA, 25 bp, Homo sapien
cccagccaagataagaagagctaga

SEQ ID NO: 5518667 - DNA, 25 bp, Homo sapien
acaccacaggttctgcccgcccttt

SEQ ID NO: 5518668 - DNA, 25 bp, Homo sapien
agcccagccaagaccaatagaaatg

SEQ ID NO: 5518669 - DNA, 25 bp, Homo sapien
aggagaactgagtagtccacctgtc

SEQ ID NO: 5518670 - DNA, 25 bp, Homo sapien
cctagactagtaaagcagctgatcc

SEQ ID NO: 5518671 - DNA, 25 bp, Homo sapien
ttgaaatcactgggttgtagggtgt

SEQ ID NO: 5518672 - DNA, 25 bp, Homo sapien
atgggctggtatgagttgcctccta

SEQ ID NO: 5518673 - DNA, 25 bp, Homo sapien
atcctagacatgtgtgagatcccag

SEQ ID NO: 5518674 - DNA, 25 bp, Homo sapien
taaacagtagacccatgggctggta

SEQ ID NO: 5518675 - DNA, 25 bp, Homo sapien
accctgcagctgactgggtacaggt

SEQ ID NO: 5518676 - DNA, 25 bp, Homo sapien
aggcttggaaaagtggttgcatatt

SEQ ID NO: 5518677 - DNA, 25 bp, Homo sapien
gtcgagaccgacgatgacccactct

SEQ ID NO: 5518678 - DNA, 25 bp, Homo sapien
agagtgggtcatcgtcggtctcgac

SEQ ID NO: 5518679 - DNA, 25 bp, Homo sapien
cagggccccaattgactggatagag

SEQ ID NO: 5518680 - DNA, 25 bp, Homo sapien
gctgcgtggaagattgacatcccaa

SEQ ID NO: 5518681 - DNA, 25 bp, Homo sapien
ggcactggaagccctagtacagctg

SEQ ID NO: 5518682 - DNA, 25 bp, Homo sapien
gttcctcgccgacgaggagttcgac

SEQ ID NO: 5518683 - DNA, 25 bp, Homo sapien
cccagtgttcaggctggctagacgg

SEQ ID NO: 5518684 - DNA, 25 bp, Homo sapien
catcaacagatacgaaaggaagaaa

SEQ ID NO: 5518685 - DNA, 25 bp, Homo sapien
actggatagaggaatacaccacagg

SEQ ID NO: 5518686 - DNA, 25 bp, Homo sapien
cctgaaaagctggatgacctagtcc

SEQ ID NO: 5518687 - DNA, 25 bp, Homo sapien
gtgtgcgaccaggtgtctgcctgta

SEQ ID NO: 5518688 - DNA, 25 bp, Homo sapien
tcttaaacgactatacagggcccca

SEQ ID NO: 5518689 - DNA, 25 bp, Homo sapien
acatcccaagattgggagagggttc

SEQ ID NO: 5518690 - DNA, 25 bp, Homo sapien
gccgggcacccgaccactaccggca

SEQ ID NO: 5518691 - DNA, 25 bp, Homo sapien
tgccggtagtggtcgggtgcccggc

SEQ ID NO: 5518692 - DNA, 25 bp, Homo sapien
tccagaacagttcacggcctcctct

SEQ ID NO: 5518693 - DNA, 25 bp, Homo sapien
aacaaagtgcatatgaaggtctgac

SEQ ID NO: 5518694 - DNA, 25 bp, Homo sapien
cttgtttccgcacgtcgagaccctt

SEQ ID NO: 5518695 - DNA, 25 bp, Homo sapien
cctccaggagcctccgctgtcaggg

SEQ ID NO: 5518696 - DNA, 25 bp, Homo sapien
cccactatctaggcaaggagcaggg

SEQ ID NO: 5518697 - DNA, 25 bp, Homo sapien
gtaaagtcactggcccgtggtcatt

SEQ ID NO: 5518698 - DNA, 25 bp, Homo sapien
gccaagacaactgaggccaagtaac

SEQ ID NO: 5518699 - DNA, 25 bp, Homo sapien
tcatttaggcagagcgcaacagata

SEQ ID NO: 5518700 - DNA, 25 bp, Homo sapien
aggcaggagctgcagtctcttaaag

SEQ ID NO: 5518701 - DNA, 25 bp, Homo sapien
aggtgccaagtcccgcacccggttc

SEQ ID NO: 5518702 - DNA, 25 bp, Homo sapien
gtgggcagacgtatttcctggcatc

SEQ ID NO: 5518703 - DNA, 25 bp, Homo sapien
gaaagattggggtaattaatatgga

SEQ ID NO: 5518704 - DNA, 25 bp, Homo sapien
gcacaaaggggcccttctcgcccta

SEQ ID NO: 5518705 - DNA, 25 bp, Homo sapien
accaggctggcctatcacattctgt

SEQ ID NO: 5518706 - DNA, 25 bp, Homo sapien
tctgtgccatttggtaatgcctgac

SEQ ID NO: 5518707 - DNA, 25 bp, Homo sapien
gcttgactagacacacaggaaaatt

SEQ ID NO: 5518708 - DNA, 25 bp, Homo sapien
tttggtccatgaaatagaacactcc

SEQ ID NO: 5518709 - DNA, 25 bp, Homo sapien
tcaaggactttcccctcaagggcac

SEQ ID NO: 5518710 - DNA, 25 bp, Homo sapien
agttactgagaatctgtatcccttc

SEQ ID NO: 5518711 - DNA, 25 bp, Homo sapien
cctcaagggcacacgagattgtttt

SEQ ID NO: 5518712 - DNA, 25 bp, Homo sapien
gcatatcaaccagtagagaaaggac

SEQ ID NO: 5518713 - DNA, 25 bp, Homo sapien
agaacactccagatattacgctttt

SEQ ID NO: 5518714 - DNA, 25 bp, Homo sapien
tatgtggattcaaggtacaaaattc

SEQ ID NO: 5518715 - DNA, 25 bp, Homo sapien
aagagaacgtatggcttaagcaatt

SEQ ID NO: 5518716 - DNA, 25 bp, Homo sapien
catcctctagtactgaagtgccctc

SEQ ID NO: 5518717 - DNA, 25 bp, Homo sapien
gtagacacattcctagagaacattt

SEQ ID NO: 5518718 - DNA, 25 bp, Homo sapien
ttcatgtacaagagttcacacctga

SEQ ID NO: 5518719 - DNA, 25 bp, Homo sapien
tactgaagtgccctcaaggtggtag

SEQ ID NO: 5518720 - DNA, 25 bp, Homo sapien
tgaatccgctctgcagaatcacagt

SEQ ID NO: 5518721 - DNA, 25 bp, Homo sapien
tcacacctgatgaatgtagacacat

SEQ ID NO: 5518722 - DNA, 25 bp, Homo sapien
agtcaaaagtgatgaactcaagaaa

SEQ ID NO: 5518723 - DNA, 25 bp, Homo sapien
aaaacattggaaagcctactgaatc

SEQ ID NO: 5518724 - DNA, 25 bp, Homo sapien
ttcatttagtgaagtagtggaaggc

SEQ ID NO: 5518725 - DNA, 25 bp, Homo sapien
caaggttagggctttgaaacattcc

SEQ ID NO: 5518726 - DNA, 25 bp, Homo sapien
gatgaaggctgagatacttagatac

SEQ ID NO: 5518727 - DNA, 25 bp, Homo sapien
tctgcagcatagaagaccacctgtt

SEQ ID NO: 5518728 - DNA, 25 bp, Homo sapien
tagatactgcggacatcagggttat

SEQ ID NO: 5518729 - DNA, 25 bp, Homo sapien
tcaagggagccttatgtcataccac

SEQ ID NO: 5518730 - DNA, 25 bp, Homo sapien
cctagtagagttaatggatgaaggc

SEQ ID NO: 5518731 - DNA, 25 bp, Homo sapien
agggttatggagcaaagtgttatga

SEQ ID NO: 5518732 - DNA, 25 bp, Homo sapien
tacctcctagtggaaatggtggctg

SEQ ID NO: 5518733 - DNA, 25 bp, Homo sapien
gttatgaacaatagctacagagagc

SEQ ID NO: 5518734 - DNA, 25 bp, Homo sapien
ttggtgcacattggtatcaaaggtg

SEQ ID NO: 5518735 - DNA, 25 bp, Homo sapien
agctggctagctagttaggcatatt

SEQ ID NO: 5518736 - DNA, 25 bp, Homo sapien
aggatgaggttggtacataacgttt

SEQ ID NO: 5518737 - DNA, 25 bp, Homo sapien
tacgacaaacttagggttagcatcc

SEQ ID NO: 5518738 - DNA, 25 bp, Homo sapien
tgaacacatggctcaaggtttccct

SEQ ID NO: 5518739 - DNA, 25 bp, Homo sapien
actgcccacattaaaaggctgcaca

SEQ ID NO: 5518740 - DNA, 25 bp, Homo sapien
gtatacagcatgagacacagcgttg

SEQ ID NO: 5518741 - DNA, 25 bp, Homo sapien
tccaggataacctgaaacagaggcc

SEQ ID NO: 5518742 - DNA, 25 bp, Homo sapien
gacatctggattgcccaagacggtt

SEQ ID NO: 5518743 - DNA, 25 bp, Homo sapien
ctgctgctctcgggctctagcccca

SEQ ID NO: 5518744 - DNA, 25 bp, Homo sapien
agggcgccactttctgagtgtgggc

SEQ ID NO: 5518745 - DNA, 25 bp, Homo sapien
ggttgcacaggatgcagactccaaa

SEQ ID NO: 5518746 - DNA, 25 bp, Homo sapien
cactggaggttaagaacccagcagg

SEQ ID NO: 5518747 - DNA, 25 bp, Homo sapien
atactgacaatgactgaacagaagt

SEQ ID NO: 5518748 - DNA, 25 bp, Homo sapien
tccatggagcttagcagaaagcaga

SEQ ID NO: 5518749 - DNA, 25 bp, Homo sapien
ctgagattttgatgtggtaggtcta

SEQ ID NO: 5518750 - DNA, 25 bp, Homo sapien
agaaagcagatgttgaataaatacc

SEQ ID NO: 5518751 - DNA, 25 bp, Homo sapien
ctgctggcgttaaactcctgagttc

SEQ ID NO: 5518752 - DNA, 25 bp, Homo sapien
ctttgaagtggaagctactcttggc

SEQ ID NO: 5518753 - DNA, 25 bp, Homo sapien
acacacacatgaggaactttgaagt

SEQ ID NO: 5518754 - DNA, 25 bp, Homo sapien
ggcaggtgccaataagcctggctca

SEQ ID NO: 5518755 - DNA, 25 bp, Homo sapien
ctgaaagggttaaatcaggtagcac

SEQ ID NO: 5518756 - DNA, 25 bp, Homo sapien
gagaagggatggatcaaacattaaa

SEQ ID NO: 5518757 - DNA, 25 bp, Homo sapien
cagaagtcacaatgttagcacacac

SEQ ID NO: 5518758 - DNA, 25 bp, Homo sapien
tcagagctgtgttcagttggtgtgc

SEQ ID NO: 5518759 - DNA, 25 bp, Homo sapien
ggaagccatgaccatgggagaacat

SEQ ID NO: 5518760 - DNA, 25 bp, Homo sapien
gcaatgcagaactcaaaggatggag

SEQ ID NO: 5518761 - DNA, 25 bp, Homo sapien
gactcaggcttggcagttttgggtc

SEQ ID NO: 5518762 - DNA, 25 bp, Homo sapien
acaggtggacatcaaagtcacattg

SEQ ID NO: 5518763 - DNA, 25 bp, Homo sapien
cactttactcaggttggaagcagaa

SEQ ID NO: 5518764 - DNA, 25 bp, Homo sapien
acaccctttagagggaacgaagagc

SEQ ID NO: 5518765 - DNA, 25 bp, Homo sapien
atgggatgaactcagcacacacact

SEQ ID NO: 5518766 - DNA, 25 bp, Homo sapien
tcaaagtcacattgtggcagctggc

SEQ ID NO: 5518767 - DNA, 25 bp, Homo sapien
ctgtttttgcaagagtaggaataaa

SEQ ID NO: 5518768 - DNA, 25 bp, Homo sapien
gaataaaaagagtgcacacccttta

SEQ ID NO: 5518769 - DNA, 25 bp, Homo sapien
tagatcttaggctcaagggcatgtg

SEQ ID NO: 5518770 - DNA, 25 bp, Homo sapien
aaaaaatacttctaagctcaggctc

SEQ ID NO: 5518771 - DNA, 25 bp, Homo sapien
tataaaagcgtaactctacattgct

SEQ ID NO: 5518772 - DNA, 25 bp, Homo sapien
ttgatgttatgacaatttagcaagt

SEQ ID NO: 5518773 - DNA, 25 bp, Homo sapien
aagctcaggctcttaacatataaat

SEQ ID NO: 5518774 - DNA, 25 bp, Homo sapien
atactgcaaaaaaccacccacctac

SEQ ID NO: 5518775 - DNA, 25 bp, Homo sapien
ttgtaaagtgctagatcttaggctc

SEQ ID NO: 5518776 - DNA, 25 bp, Homo sapien
ctgctacattccatcaagaaatttc

SEQ ID NO: 5518777 - DNA, 25 bp, Homo sapien
catgaaatacttataaaagcgtaac

SEQ ID NO: 5518778 - DNA, 25 bp, Homo sapien
agggcatgtggtgtctgctacaact

SEQ ID NO: 5518779 - DNA, 25 bp, Homo sapien
gtggtgtctgctacaactactcaac

SEQ ID NO: 5518780 - DNA, 25 bp, Homo sapien
acaggcacatgtttacaggttgata

SEQ ID NO: 5518781 - DNA, 25 bp, Homo sapien
gtgctaacatagattggagacctgt

SEQ ID NO: 5518782 - DNA, 25 bp, Homo sapien
aggtggaccattaagcaggtaataa

SEQ ID NO: 5518783 - DNA, 25 bp, Homo sapien
ttattgtggtggctttctcccctac

SEQ ID NO: 5518784 - DNA, 25 bp, Homo sapien
gatgagagtgatggaactaatctta

SEQ ID NO: 5518785 - DNA, 25 bp, Homo sapien
tgccaggccctaattctgagcactc

SEQ ID NO: 5518786 - DNA, 25 bp, Homo sapien
atctcccggtcaaaacaacactgtc

SEQ ID NO: 5518787 - DNA, 25 bp, Homo sapien
tatataatccaaggggtaacagagg

SEQ ID NO: 5518788 - DNA, 25 bp, Homo sapien
aacagaggctgagccacatagtgct

SEQ ID NO: 5518789 - DNA, 25 bp, Homo sapien
tttggaagtaagttacaggcacatg

SEQ ID NO: 5518790 - DNA, 25 bp, Homo sapien
gtaaagcacaaaagtagtctccagc

SEQ ID NO: 5518791 - DNA, 25 bp, Homo sapien
tccggagcttgacttcttggacctc

SEQ ID NO: 5518792 - DNA, 25 bp, Homo sapien
ttatatttgcaaaggggctgtctat

SEQ ID NO: 5518793 - DNA, 25 bp, Homo sapien
agctccagaaactcccaactcgtct

SEQ ID NO: 5518794 - DNA, 25 bp, Homo sapien
agattgtggccagtgaggatattat

SEQ ID NO: 5518795 - DNA, 25 bp, Homo sapien
cagtagtcctggactcgaaagggaa

SEQ ID NO: 5518796 - DNA, 25 bp, Homo sapien
gccacgactctgggcacttcccctg

SEQ ID NO: 5518797 - DNA, 25 bp, Homo sapien
gtcccactcccgtgctcgcctcgac

SEQ ID NO: 5518798 - DNA, 25 bp, Homo sapien
cttagcaatttgaagggttgggaag

SEQ ID NO: 5518799 - DNA, 25 bp, Homo sapien
cttggtgtagccggttccccggcca

SEQ ID NO: 5518800 - DNA, 25 bp, Homo sapien
tcccccgccccaattccaagctcca

SEQ ID NO: 5518801 - DNA, 25 bp, Homo sapien
accagtggggccttagcaatttgaa

SEQ ID NO: 5518802 - DNA, 25 bp, Homo sapien
ggaagagtctcgccggcaggaccga

SEQ ID NO: 5518803 - DNA, 25 bp, Homo sapien
tcggtcctgccggcgagactcttcc

SEQ ID NO: 5518804 - DNA, 25 bp, Homo sapien
tcaagactttgacaaaatgatcccc

SEQ ID NO: 5518805 - DNA, 25 bp, Homo sapien
ttcagtccaaagtcagtattaagtc

SEQ ID NO: 5518806 - DNA, 25 bp, Homo sapien
tctgagatagattaccaacttagtt

SEQ ID NO: 5518807 - DNA, 25 bp, Homo sapien
attagaacaccacagtagtaactgc

SEQ ID NO: 5518808 - DNA, 25 bp, Homo sapien
acagtaagtttacagtagcgaatcc

SEQ ID NO: 5518809 - DNA, 25 bp, Homo sapien
gccaggactgggtaactttattcaa

SEQ ID NO: 5518810 - DNA, 25 bp, Homo sapien
ctagcagacaccaccttagcatagt

SEQ ID NO: 5518811 - DNA, 25 bp, Homo sapien
tacagtagcgaatcctagcagacac

SEQ ID NO: 5518812 - DNA, 25 bp, Homo sapien
caaggaaaacacagtaagtttacag

SEQ ID NO: 5518813 - DNA, 25 bp, Homo sapien
taaatccagaactgacaactcttcc

SEQ ID NO: 5518814 - DNA, 25 bp, Homo sapien
ttaaaaagtccagatgtgaaatttc

SEQ ID NO: 5518815 - DNA, 25 bp, Homo sapien
gcatacagataaatagtacaaagaa

SEQ ID NO: 5518816 - DNA, 25 bp, Homo sapien
ctagctattgcatacagacacattt

SEQ ID NO: 5518817 - DNA, 25 bp, Homo sapien
gagtaatgacttaagacacaggcat

SEQ ID NO: 5518818 - DNA, 25 bp, Homo sapien
aattgaccacatatgacagagatcc

SEQ ID NO: 5518819 - DNA, 25 bp, Homo sapien
aaaattagaacatgagtaatgactt

SEQ ID NO: 5518820 - DNA, 25 bp, Homo sapien
aatactgaagaacaagcatacagat

SEQ ID NO: 5518821 - DNA, 25 bp, Homo sapien
tctgaaaatacgacatacagtcatg

SEQ ID NO: 5518822 - DNA, 25 bp, Homo sapien
atcacctagtgatgccacagccatt

SEQ ID NO: 5518823 - DNA, 25 bp, Homo sapien
aacattctcaaaaggcaagagctgt

SEQ ID NO: 5518824 - DNA, 25 bp, Homo sapien
caaaaggcaagagctgtatttgtga

SEQ ID NO: 5518825 - DNA, 25 bp, Homo sapien
cacacaagtgatgattacctattcc

SEQ ID NO: 5518826 - DNA, 25 bp, Homo sapien
agagggttgactgccagctcactct

SEQ ID NO: 5518827 - DNA, 25 bp, Homo sapien
tggcagaagcctccccccacattac

SEQ ID NO: 5518828 - DNA, 25 bp, Homo sapien
catgacacatccctgacgagtagtt

SEQ ID NO: 5518829 - DNA, 25 bp, Homo sapien
ctcccagacacgtgtcagatgccag

SEQ ID NO: 5518830 - DNA, 25 bp, Homo sapien
gaggaccaggtcaattcagattttc

SEQ ID NO: 5518831 - DNA, 25 bp, Homo sapien
tagttttgttaagggtgtggcagaa

SEQ ID NO: 5518832 - DNA, 25 bp, Homo sapien
cctaacggaagtcagcctgtctcgg

SEQ ID NO: 5518833 - DNA, 25 bp, Homo sapien
gagagtaaacagatggtgctgatac

SEQ ID NO: 5518834 - DNA, 25 bp, Homo sapien
gctgataccagcaaaggactcaaac

SEQ ID NO: 5518835 - DNA, 25 bp, Homo sapien
ggactcaaactcagctgccgacgct

SEQ ID NO: 5518836 - DNA, 25 bp, Homo sapien
tgccgacgctgcctaacggaagtca

SEQ ID NO: 5518837 - DNA, 25 bp, Homo sapien
aaaggcatgtaactgaaaggtaaca

SEQ ID NO: 5518838 - DNA, 25 bp, Homo sapien
tttgggactaaggtgattatcattt

SEQ ID NO: 5518839 - DNA, 25 bp, Homo sapien
agctccaaggaagacatgtcctatt

SEQ ID NO: 5518840 - DNA, 25 bp, Homo sapien
gataaaaggccaatgatactgagta

SEQ ID NO: 5518841 - DNA, 25 bp, Homo sapien
taagtgctgataaccacaggcagat

SEQ ID NO: 5518842 - DNA, 25 bp, Homo sapien
actaatgcccacagctccaaggaag

SEQ ID NO: 5518843 - DNA, 25 bp, Homo sapien
aaatacaagttgagggcattgtgat

SEQ ID NO: 5518844 - DNA, 25 bp, Homo sapien
gcttctgaactaatgcccacagctc

SEQ ID NO: 5518845 - DNA, 25 bp, Homo sapien
agtagagaattttaggatcaaaggc

SEQ ID NO: 5518846 - DNA, 25 bp, Homo sapien
cacaggcagattgcaaagaactgat

SEQ ID NO: 5518847 - DNA, 25 bp, Homo sapien
tgatactgagtaggatatatgcgta

SEQ ID NO: 5518848 - DNA, 25 bp, Homo sapien
ctagaacgtccccgcagatgaatga

SEQ ID NO: 5518849 - DNA, 25 bp, Homo sapien
actgcaagcaagtaaccagcttctc

SEQ ID NO: 5518850 - DNA, 25 bp, Homo sapien
tggagagagtccacatcttcagctc

SEQ ID NO: 5518851 - DNA, 25 bp, Homo sapien
aagaatgtagagagcgcatcctttt

SEQ ID NO: 5518852 - DNA, 25 bp, Homo sapien
accagaagttgtaccatgatgttgt

SEQ ID NO: 5518853 - DNA, 25 bp, Homo sapien
ttttgatctcctgggcggagtgaac

SEQ ID NO: 5518854 - DNA, 25 bp, Homo sapien
gttttgacccctgtgagctgatggc

SEQ ID NO: 5518855 - DNA, 25 bp, Homo sapien
ggcatcagtgctgatgtgggagctg

SEQ ID NO: 5518856 - DNA, 25 bp, Homo sapien
gcatcagcacatggatttaagagtt

SEQ ID NO: 5518857 - DNA, 25 bp, Homo sapien
ggggactgtggcatttaagaatgta

SEQ ID NO: 5518858 - DNA, 25 bp, Homo sapien
tcagctccgtgtggacatctccctg

SEQ ID NO: 5518859 - DNA, 25 bp, Homo sapien
attagcaggcactaaggcagaatat

SEQ ID NO: 5518860 - DNA, 25 bp, Homo sapien
gagtgcagtgagcatgactaaacac

SEQ ID NO: 5518861 - DNA, 25 bp, Homo sapien
ggaaggctgaacctctgctggtaca

SEQ ID NO: 5518862 - DNA, 25 bp, Homo sapien
ggaaatgctgcagaacaaacatgga

SEQ ID NO: 5518863 - DNA, 25 bp, Homo sapien
gctggtacaggcataaaactcctcc

SEQ ID NO: 5518864 - DNA, 25 bp, Homo sapien
aaaggcctgtgtcagcagtatggat

SEQ ID NO: 5518865 - DNA, 25 bp, Homo sapien
aatgcttcaggtgacaaaggcctgt

SEQ ID NO: 5518866 - DNA, 25 bp, Homo sapien
atgatgcttacaaagtggagttcac

SEQ ID NO: 5518867 - DNA, 25 bp, Homo sapien
aaggccaaggtcaacctaagaagtc

SEQ ID NO: 5518868 - DNA, 25 bp, Homo sapien
aagagcaagaataaaggagtcttca

SEQ ID NO: 5518869 - DNA, 25 bp, Homo sapien
attggcagcacaggactatgcacaa

SEQ ID NO: 5518870 - DNA, 25 bp, Homo sapien
taaatgaagccagtagctacactat

SEQ ID NO: 5518871 - DNA, 25 bp, Homo sapien
ctgactagagtacaggtgacctgat

SEQ ID NO: 5518872 - DNA, 25 bp, Homo sapien
taggttgttacgaattttagatctg

SEQ ID NO: 5518873 - DNA, 25 bp, Homo sapien
aaacacgtatactcccaaacgagat

SEQ ID NO: 5518874 - DNA, 25 bp, Homo sapien
ctccaagaatatatacagtgctgac

SEQ ID NO: 5518875 - DNA, 25 bp, Homo sapien
tacagtgctgactagagtacaggtg

SEQ ID NO: 5518876 - DNA, 25 bp, Homo sapien
actcagtgtggttgctaagtcccat

SEQ ID NO: 5518877 - DNA, 25 bp, Homo sapien
aagatagcaaaagtatgagtttagt

SEQ ID NO: 5518878 - DNA, 25 bp, Homo sapien
ttgagagagctatataaaatgtgaa

SEQ ID NO: 5518879 - DNA, 25 bp, Homo sapien
taaatgttacaaaaagctatgcaat

SEQ ID NO: 5518880 - DNA, 25 bp, Homo sapien
gtcccatgtacaaactccaagaata

SEQ ID NO: 5518881 - DNA, 25 bp, Homo sapien
atgtcctacgccatccggtgcgcct

SEQ ID NO: 5518882 - DNA, 25 bp, Homo sapien
tccccacggtccgtggaccaggtca

SEQ ID NO: 5518883 - DNA, 25 bp, Homo sapien
agaccaccatggaccccaacgatgt

SEQ ID NO: 5518884 - DNA, 25 bp, Homo sapien
ctacctgtcgctgctgtccggactg

SEQ ID NO: 5518885 - DNA, 25 bp, Homo sapien
cctctggaggcgtcctggacgctag

SEQ ID NO: 5518886 - DNA, 25 bp, Homo sapien
atgctgcagctgctctacctgtcgc

SEQ ID NO: 5518887 - DNA, 25 bp, Homo sapien
tcctggccacgcacgccagcgtgga

SEQ ID NO: 5518888 - DNA, 25 bp, Homo sapien
caacctgctgcacctgtcgggtctg

SEQ ID NO: 5518889 - DNA, 25 bp, Homo sapien
tccggtgcgccttctaccagctgct

SEQ ID NO: 5518890 - DNA, 25 bp, Homo sapien
cgctagcggcgattaccgcgtctac

SEQ ID NO: 5518891 - DNA, 25 bp, Homo sapien
cagcgtggacaacctgctgcacctg

SEQ ID NO: 5518892 - DNA, 25 bp, Homo sapien
ttccagacaagccatgtagaaccag

SEQ ID NO: 5518893 - DNA, 25 bp, Homo sapien
cctgacccctcccggcaactgctag

SEQ ID NO: 5518894 - DNA, 25 bp, Homo sapien
atgtagaaccagcatgccttgggac

SEQ ID NO: 5518895 - DNA, 25 bp, Homo sapien
agtctgagtcagagcatcccatcat

SEQ ID NO: 5518896 - DNA, 25 bp, Homo sapien
gcagggagacgagtttctatgctga

SEQ ID NO: 5518897 - DNA, 25 bp, Homo sapien
gcgaaggcaggcaaatacattattg

SEQ ID NO: 5518898 - DNA, 25 bp, Homo sapien
ggaagcacatcaaccgggtctggta

SEQ ID NO: 5518899 - DNA, 25 bp, Homo sapien
ggaaagtatgcctcacggacctcta

SEQ ID NO: 5518900 - DNA, 25 bp, Homo sapien
agtgcgaagattttattaggcggta

SEQ ID NO: 5518901 - DNA, 25 bp, Homo sapien
aggccaggcctctaccctaagcgag

SEQ ID NO: 5518902 - DNA, 25 bp, Homo sapien
cgggtctggtaggcatagccttctt

SEQ ID NO: 5518903 - DNA, 25 bp, Homo sapien
tgtcttaatctagcagagaccactt

SEQ ID NO: 5518904 - DNA, 25 bp, Homo sapien
tcagaagctaataaaggatcacact

SEQ ID NO: 5518905 - DNA, 25 bp, Homo sapien
aggggatagcaagaagctctttttc

SEQ ID NO: 5518906 - DNA, 25 bp, Homo sapien
cagcgcactggcaagtgcagtgcct

SEQ ID NO: 5518907 - DNA, 25 bp, Homo sapien
ggaatgtgtgcaagatcagtttggc

SEQ ID NO: 5518908 - DNA, 25 bp, Homo sapien
gatgaggtggagttctccgtgattc

SEQ ID NO: 5518909 - DNA, 25 bp, Homo sapien
ccatatgaaagaagttgaggatggc

SEQ ID NO: 5518910 - DNA, 25 bp, Homo sapien
ctttttgaaaagtccagaccagggc

SEQ ID NO: 5518911 - DNA, 25 bp, Homo sapien
accagggccaaaatgcacaaactat

SEQ ID NO: 5518912 - DNA, 25 bp, Homo sapien
agtgcctggaatgtttggcgagtct

SEQ ID NO: 5518913 - DNA, 25 bp, Homo sapien
cattaactatgaagtaggggatagc

SEQ ID NO: 5518914 - DNA, 25 bp, Homo sapien
ggacagactcctcagaatgaaaagg

SEQ ID NO: 5518915 - DNA, 25 bp, Homo sapien
tcactgtgtacacacatgtcctggc

SEQ ID NO: 5518916 - DNA, 25 bp, Homo sapien
actcccgtgtagactataaatatgc

SEQ ID NO: 5518917 - DNA, 25 bp, Homo sapien
ctcctcagaatgaaaaggaaggcat

SEQ ID NO: 5518918 - DNA, 25 bp, Homo sapien
caggccgtgttgccctctggacttc

SEQ ID NO: 5518919 - DNA, 25 bp, Homo sapien
ctataaatatgcacagaagggacag

SEQ ID NO: 5518920 - DNA, 25 bp, Homo sapien
tgtacacacatgtcctggctgcaca

SEQ ID NO: 5518921 - DNA, 25 bp, Homo sapien
cacaagtgcactatttcccatttgc

SEQ ID NO: 5518922 - DNA, 25 bp, Homo sapien
aaagttgcatcagacactcccgtgt

SEQ ID NO: 5518923 - DNA, 25 bp, Homo sapien
ggaatgactctctaagtagtgtagt

SEQ ID NO: 5518924 - DNA, 25 bp, Homo sapien
ctacccttcgggttcagggcttcag

SEQ ID NO: 5518925 - DNA, 25 bp, Homo sapien
ccgcccgtgtccgcagcaggcccgg

SEQ ID NO: 5518926 - DNA, 25 bp, Homo sapien
ccgggcctgctgcggacacgggcgg

SEQ ID NO: 5518927 - DNA, 25 bp, Homo sapien
gcgggccccgcccgtccgcgcacat

SEQ ID NO: 5518928 - DNA, 25 bp, Homo sapien
atgtgcgcggacgggcggggcccgc

SEQ ID NO: 5518929 - DNA, 25 bp, Homo sapien
cgcgggccccgcccgtccgcgcaca

SEQ ID NO: 5518930 - DNA, 25 bp, Homo sapien
tgtgcgcggacgggcggggcccgcg

SEQ ID NO: 5518931 - DNA, 25 bp, Homo sapien
cgggccccgcccgtccgcgcacatg

SEQ ID NO: 5518932 - DNA, 25 bp, Homo sapien
catgtgcgcggacgggcggggcccg

SEQ ID NO: 5518933 - DNA, 25 bp, Homo sapien
actcccaaagcaaactgactgtctc

SEQ ID NO: 5518934 - DNA, 25 bp, Homo sapien
aatctaaactgacatgacgggacgt

SEQ ID NO: 5518935 - DNA, 25 bp, Homo sapien
actgtagtggaaatttagtatgtcc

SEQ ID NO: 5518936 - DNA, 25 bp, Homo sapien
gctattaaatggtcacagaactatc

SEQ ID NO: 5518937 - DNA, 25 bp, Homo sapien
agatactatgaaatagggagcaccg

SEQ ID NO: 5518938 - DNA, 25 bp, Homo sapien
accctggtgaaacgttttgctgtcc

SEQ ID NO: 5518939 - DNA, 25 bp, Homo sapien
tctgaactgcatgagaaccctggtg

SEQ ID NO: 5518940 - DNA, 25 bp, Homo sapien
gacaaggagaaccctgaccctgtaa

SEQ ID NO: 5518941 - DNA, 25 bp, Homo sapien
aatgtctggatctgtggacagtggg

SEQ ID NO: 5518942 - DNA, 25 bp, Homo sapien
caattctaagtgacaaggagaaccc

SEQ ID NO: 5518943 - DNA, 25 bp, Homo sapien
cggccgatctcagaggtggattttt

SEQ ID NO: 5518944 - DNA, 25 bp, Homo sapien
aggacatgtggaattctacgacgag

SEQ ID NO: 5518945 - DNA, 25 bp, Homo sapien
ctcgtcgtagaattccacatgtcct

SEQ ID NO: 5518946 - DNA, 25 bp, Homo sapien
tgaagggagaaaaacttactcgctg

SEQ ID NO: 5518947 - DNA, 25 bp, Homo sapien
ggctacgcgctgcgagataacaaga

SEQ ID NO: 5518948 - DNA, 25 bp, Homo sapien
cgggaagacttggaatgccttattc

SEQ ID NO: 5518949 - DNA, 25 bp, Homo sapien
agccaaggcgtgattaccactcctc

SEQ ID NO: 5518950 - DNA, 25 bp, Homo sapien
gcagaggaaacgagttactcagatc

SEQ ID NO: 5518951 - DNA, 25 bp, Homo sapien
gcaaagtcctgcctttcgggaagac

SEQ ID NO: 5518952 - DNA, 25 bp, Homo sapien
cttgtagacttgtttggatgggcac

SEQ ID NO: 5518953 - DNA, 25 bp, Homo sapien
cgacaagacttcaacatgatggagc

SEQ ID NO: 5518954 - DNA, 25 bp, Homo sapien
cccagaatacattagggagaggaac

SEQ ID NO: 5518955 - DNA, 25 bp, Homo sapien
aacatgagctcagatgccagccaag

SEQ ID NO: 5518956 - DNA, 25 bp, Homo sapien
ctcagtcttggcatggtcacaccta

SEQ ID NO: 5518957 - DNA, 25 bp, Homo sapien
acctgtcaaatgaagggagaacaaa

SEQ ID NO: 5518958 - DNA, 25 bp, Homo sapien
tcttaaagctgttcaacgagaaagc

SEQ ID NO: 5518959 - DNA, 25 bp, Homo sapien
aatcaggatcgtgtcttagagtctt

SEQ ID NO: 5518960 - DNA, 25 bp, Homo sapien
gattactaaccaagttgctaagatt

SEQ ID NO: 5518961 - DNA, 25 bp, Homo sapien
agctgtgaaaataatcttaggtagt

SEQ ID NO: 5518962 - DNA, 25 bp, Homo sapien
tttctgacaaattggtagctgtgaa

SEQ ID NO: 5518963 - DNA, 25 bp, Homo sapien
aaatgacacaaatcaggatcgtgtc

SEQ ID NO: 5518964 - DNA, 25 bp, Homo sapien
ggagagactgagaacacctgtcaaa

SEQ ID NO: 5518965 - DNA, 25 bp, Homo sapien
agacatgcaaccccaccaagaacta

SEQ ID NO: 5518966 - DNA, 25 bp, Homo sapien
tgaagggagaacaaatctgatactt

SEQ ID NO: 5518967 - DNA, 25 bp, Homo sapien
aacgagaaagcttttgctaaactgc

SEQ ID NO: 5518968 - DNA, 25 bp, Homo sapien
cttggtatgaagactgtggtaacta

SEQ ID NO: 5518969 - DNA, 25 bp, Homo sapien
cttggaagacagatgtgcattgttc

SEQ ID NO: 5518970 - DNA, 25 bp, Homo sapien
ataataaaatattggctgccctaaa

SEQ ID NO: 5518971 - DNA, 25 bp, Homo sapien
gtggtaactaagaaagtgcagaagt

SEQ ID NO: 5518972 - DNA, 25 bp, Homo sapien
acaaacacggtaagaacagtgtctg

SEQ ID NO: 5518973 - DNA, 25 bp, Homo sapien
acaaaatcttggaagacagatgtgc

SEQ ID NO: 5518974 - DNA, 25 bp, Homo sapien
tggcttcaaaattgtaacctgtacc

SEQ ID NO: 5518975 - DNA, 25 bp, Homo sapien
aagaaagtgcagaagtttaaccatt

SEQ ID NO: 5518976 - DNA, 25 bp, Homo sapien
aagaaccagcttgctaggtacattt

SEQ ID NO: 5518977 - DNA, 25 bp, Homo sapien
acggtaagaacagtgtctgaattcc

SEQ ID NO: 5518978 - DNA, 25 bp, Homo sapien
cttggttaaagaggcagctacaaag

SEQ ID NO: 5518979 - DNA, 25 bp, Homo sapien
tgtagtgaagtatagtagcaataat

SEQ ID NO: 5518980 - DNA, 25 bp, Homo sapien
gagagaacttacaggacacagattt

SEQ ID NO: 5518981 - DNA, 25 bp, Homo sapien
atgctggtcagtgggacattttgtc

SEQ ID NO: 5518982 - DNA, 25 bp, Homo sapien
ttgtcaactatgggtattgggtgct

SEQ ID NO: 5518983 - DNA, 25 bp, Homo sapien
acatgaagattttagaaggagagaa

SEQ ID NO: 5518984 - DNA, 25 bp, Homo sapien
actgtgacactattggatgtgattc

SEQ ID NO: 5518985 - DNA, 25 bp, Homo sapien
gccatgtgaatgttgtatacgattg

SEQ ID NO: 5518986 - DNA, 25 bp, Homo sapien
tgtatacgattgtaaggcttatgtc

SEQ ID NO: 5518987 - DNA, 25 bp, Homo sapien
aaatggcaatgagtagaaaagttaa

SEQ ID NO: 5518988 - DNA, 25 bp, Homo sapien
tagatccacagtacatgagaatcct

SEQ ID NO: 5518989 - DNA, 25 bp, Homo sapien
gggtattgggtgcttaactgtctaa

SEQ ID NO: 5518990 - DNA, 25 bp, Homo sapien
aaggactgtcacacagtggagttcc

SEQ ID NO: 5518991 - DNA, 25 bp, Homo sapien
actgtaacaatattcctagccccac

SEQ ID NO: 5518992 - DNA, 25 bp, Homo sapien
atgctaaaccctagtatgtcctgcc

SEQ ID NO: 5518993 - DNA, 25 bp, Homo sapien
tcaccctaacctgaggcagggattc

SEQ ID NO: 5518994 - DNA, 25 bp, Homo sapien
tcccaaggaatgccaaaagtagggc

SEQ ID NO: 5518995 - DNA, 25 bp, Homo sapien
ctgaaaacaggcccttttaccagac

SEQ ID NO: 5518996 - DNA, 25 bp, Homo sapien
ataagatctgatctcaggggctggg

SEQ ID NO: 5518997 - DNA, 25 bp, Homo sapien
aggcagggattcatctttgcagagc

SEQ ID NO: 5518998 - DNA, 25 bp, Homo sapien
gccccacctaggaagacattggcta

SEQ ID NO: 5518999 - DNA, 25 bp, Homo sapien
cttgaacaacaactgaggctcccaa

SEQ ID NO: 5519000 - DNA, 25 bp, Homo sapien
cagcacggagataactttggccttg

SEQ ID NO: 5519001 - DNA, 25 bp, Homo sapien
cccctgagggcctcatcaaaggggc

SEQ ID NO: 5519002 - DNA, 25 bp, Homo sapien
gaggggagcctgtaaagcctattta

SEQ ID NO: 5519003 - DNA, 25 bp, Homo sapien
tgctgctcaacgagtctgggtttgc

SEQ ID NO: 5519004 - DNA, 25 bp, Homo sapien
acagaagagatatacgtgcagagta

SEQ ID NO: 5519005 - DNA, 25 bp, Homo sapien
aaccagctgcagctagaaagaatgc

SEQ ID NO: 5519006 - DNA, 25 bp, Homo sapien
aagtgtgttgaaatgtggaagttat

SEQ ID NO: 5519007 - DNA, 25 bp, Homo sapien
tgtggactttaagcaggagccttga

SEQ ID NO: 5519008 - DNA, 25 bp, Homo sapien
aggctgcaagctgtgaataagatgc

SEQ ID NO: 5519009 - DNA, 25 bp, Homo sapien
catattctagattgggcagtgggat

SEQ ID NO: 5519010 - DNA, 25 bp, Homo sapien
ggggctcttatccaggccgaagcac

SEQ ID NO: 5519011 - DNA, 25 bp, Homo sapien
gcaggatcaaggtaatgacctctcc

SEQ ID NO: 5519012 - DNA, 25 bp, Homo sapien
agacagctgaggactgaacttctta

SEQ ID NO: 5519013 - DNA, 25 bp, Homo sapien
cataacattacaactgaggcggccg

SEQ ID NO: 5519014 - DNA, 25 bp, Homo sapien
tactattcccatgctaaagacccct

SEQ ID NO: 5519015 - DNA, 25 bp, Homo sapien
gttaagacgagataattcaatgttc

SEQ ID NO: 5519016 - DNA, 25 bp, Homo sapien
aaagagtgaaggatacagaattatc

SEQ ID NO: 5519017 - DNA, 25 bp, Homo sapien
gtgctgttcatactagttgccccca

SEQ ID NO: 5519018 - DNA, 25 bp, Homo sapien
tatttactgagaatgacagctctga

SEQ ID NO: 5519019 - DNA, 25 bp, Homo sapien
tttctgaatataaagccaactgtgg

SEQ ID NO: 5519020 - DNA, 25 bp, Homo sapien
agagaaagagacctgtaaatagtgc

SEQ ID NO: 5519021 - DNA, 25 bp, Homo sapien
gctctgaatcaaaggcaagagaaag

SEQ ID NO: 5519022 - DNA, 25 bp, Homo sapien
gcccccagtagttcccaggcctcac

SEQ ID NO: 5519023 - DNA, 25 bp, Homo sapien
agcgtccccaacagacccctcactc

SEQ ID NO: 5519024 - DNA, 25 bp, Homo sapien
agtccactagcgcgcctcctccttg

SEQ ID NO: 5519025 - DNA, 25 bp, Homo sapien
gctgaccagtccagacctaagccac

SEQ ID NO: 5519026 - DNA, 25 bp, Homo sapien
tccaacctctgaagagggtggtcac

SEQ ID NO: 5519027 - DNA, 25 bp, Homo sapien
ccagagactctcccagcgtccccaa

SEQ ID NO: 5519028 - DNA, 25 bp, Homo sapien
tgctgggaatatgcttggctctccc

SEQ ID NO: 5519029 - DNA, 25 bp, Homo sapien
ccctttgggacgcttctagaactgt

SEQ ID NO: 5519030 - DNA, 25 bp, Homo sapien
agagccttaaggaatccaccggtcc

SEQ ID NO: 5519031 - DNA, 25 bp, Homo sapien
ggtgaggaactcggatcttccctcc

SEQ ID NO: 5519032 - DNA, 25 bp, Homo sapien
tggtatcgccgagtcttggcaactc

SEQ ID NO: 5519033 - DNA, 25 bp, Homo sapien
ctaagccacttcacaccagagactc

SEQ ID NO: 5519034 - DNA, 25 bp, Homo sapien
ggcatcctcgtttgaaaggggctgt

SEQ ID NO: 5519035 - DNA, 25 bp, Homo sapien
acagcagatcgtggcgctgtgatca

SEQ ID NO: 5519036 - DNA, 25 bp, Homo sapien
aggcgtttggtacatgggaatcgct

SEQ ID NO: 5519037 - DNA, 25 bp, Homo sapien
gctccgcctttgaccagcgtgcagc

SEQ ID NO: 5519038 - DNA, 25 bp, Homo sapien
gggtacactcaagctgtgggtccct

SEQ ID NO: 5519039 - DNA, 25 bp, Homo sapien
tcctccgcacccagcgcttggaagg

SEQ ID NO: 5519040 - DNA, 25 bp, Homo sapien
tagcaccgtgcatggcacgtggtag

SEQ ID NO: 5519041 - DNA, 25 bp, Homo sapien
ggcaggtcactgactcttcgggcgc

SEQ ID NO: 5519042 - DNA, 25 bp, Homo sapien
cctgcagccttgctggtcggtgagg

SEQ ID NO: 5519043 - DNA, 25 bp, Homo sapien
gagggatctgtgcacctagcaccgt

SEQ ID NO: 5519044 - DNA, 25 bp, Homo sapien
aaggtgctccatcacggtgacagac

SEQ ID NO: 5519045 - DNA, 25 bp, Homo sapien
cactggggagtcaccatcgtcataa

SEQ ID NO: 5519046 - DNA, 25 bp, Homo sapien
ccacctgagtcagacacagagtctc

SEQ ID NO: 5519047 - DNA, 25 bp, Homo sapien
aaacacacagaatctggcccccctt

SEQ ID NO: 5519048 - DNA, 25 bp, Homo sapien
tggcccccctttgcactggggagtc

SEQ ID NO: 5519049 - DNA, 25 bp, Homo sapien
atttatttacaaagaggttagagaa

SEQ ID NO: 5519050 - DNA, 25 bp, Homo sapien
gcactctgcagggaccacctgagtc

SEQ ID NO: 5519051 - DNA, 25 bp, Homo sapien
taattgtccagggatcgaagtgaaa

SEQ ID NO: 5519052 - DNA, 25 bp, Homo sapien
ttgcatacatggacacttactgtac

SEQ ID NO: 5519053 - DNA, 25 bp, Homo sapien
gggatatcttaagggtccagggaca

SEQ ID NO: 5519054 - DNA, 25 bp, Homo sapien
ggggtcatgagatagaaaccatctt

SEQ ID NO: 5519055 - DNA, 25 bp, Homo sapien
aatactagattggaacagctgaggg

SEQ ID NO: 5519056 - DNA, 25 bp, Homo sapien
tgttgggtatattgggtattgatcc

SEQ ID NO: 5519057 - DNA, 25 bp, Homo sapien
caccagcatcacacgcagctgtccc

SEQ ID NO: 5519058 - DNA, 25 bp, Homo sapien
gaccacgaggacccaatgaaaatgt

SEQ ID NO: 5519059 - DNA, 25 bp, Homo sapien
gcaaggccgtaatgaccggcacaag

SEQ ID NO: 5519060 - DNA, 25 bp, Homo sapien
ggaaccccgctctccctccggcatg

SEQ ID NO: 5519061 - DNA, 25 bp, Homo sapien
gtgccccatgtcagagccctaaacc

SEQ ID NO: 5519062 - DNA, 25 bp, Homo sapien
cccctttcaccatgatcggcagccc

SEQ ID NO: 5519063 - DNA, 25 bp, Homo sapien
catcccttggctcggagtccctgtg

SEQ ID NO: 5519064 - DNA, 25 bp, Homo sapien
tggacatgaactgacccgcaaagca

SEQ ID NO: 5519065 - DNA, 25 bp, Homo sapien
tgcctgcactgtgtccggcagacaa

SEQ ID NO: 5519066 - DNA, 25 bp, Homo sapien
agatgcacagagctgccctgacatc

SEQ ID NO: 5519067 - DNA, 25 bp, Homo sapien
aattacagcctttgagagatgattg

SEQ ID NO: 5519068 - DNA, 25 bp, Homo sapien
atttgggacacttgggtggttttca

SEQ ID NO: 5519069 - DNA, 25 bp, Homo sapien
agttgaggttcccatcatgactgac

SEQ ID NO: 5519070 - DNA, 25 bp, Homo sapien
tcaaaagcagcatacagtcattcaa

SEQ ID NO: 5519071 - DNA, 25 bp, Homo sapien
caggtccccgccaacagtgttgatg

SEQ ID NO: 5519072 - DNA, 25 bp, Homo sapien
ggagaggattccttggacttacaga

SEQ ID NO: 5519073 - DNA, 25 bp, Homo sapien
tttacagagttgtgaccactgcctt

SEQ ID NO: 5519074 - DNA, 25 bp, Homo sapien
ccaattggaacaaagaagtgtgggt

SEQ ID NO: 5519075 - DNA, 25 bp, Homo sapien
aggagtcttctgtgtccaggtcccc

SEQ ID NO: 5519076 - DNA, 25 bp, Homo sapien
tgtcccagcactggagtacagccca

SEQ ID NO: 5519077 - DNA, 25 bp, Homo sapien
atgactgactcatttggcgggaaaa

SEQ ID NO: 5519078 - DNA, 25 bp, Homo sapien
tccaactagtgggctttatgggcca

SEQ ID NO: 5519079 - DNA, 25 bp, Homo sapien
tgtgtggggtactacgtccctccac

SEQ ID NO: 5519080 - DNA, 25 bp, Homo sapien
acactgagaatccgaaagccaagat

SEQ ID NO: 5519081 - DNA, 25 bp, Homo sapien
gcttccaggagggtacttactctcc

SEQ ID NO: 5519082 - DNA, 25 bp, Homo sapien
gcaggggcgtgtctcaacccttctg

SEQ ID NO: 5519083 - DNA, 25 bp, Homo sapien
tgtagaagcccctctgtgagactga

SEQ ID NO: 5519084 - DNA, 25 bp, Homo sapien
ggctctgcatgtctggtccccaacc

SEQ ID NO: 5519085 - DNA, 25 bp, Homo sapien
gagagaatacttccaggggctctgc

SEQ ID NO: 5519086 - DNA, 25 bp, Homo sapien
gaaagccaagatgcccaagattcta

SEQ ID NO: 5519087 - DNA, 25 bp, Homo sapien
ctacgatggactgtcagatcagcag

SEQ ID NO: 5519088 - DNA, 25 bp, Homo sapien
cttctaggttgtgcagactgccact

SEQ ID NO: 5519089 - DNA, 25 bp, Homo sapien
ccctgcccctgcctagaaatgcatc

SEQ ID NO: 5519090 - DNA, 25 bp, Homo sapien
tgtggcaagatgagaaccaaattcc

SEQ ID NO: 5519091 - DNA, 25 bp, Homo sapien
aaagaggtctctacaccatagccac

SEQ ID NO: 5519092 - DNA, 25 bp, Homo sapien
gaaacataaagttgctgaatgaggt

SEQ ID NO: 5519093 - DNA, 25 bp, Homo sapien
gctccggctgccctttaggaaacgc

SEQ ID NO: 5519094 - DNA, 25 bp, Homo sapien
ctgaatgaggtaatagaaaacatcc

SEQ ID NO: 5519095 - DNA, 25 bp, Homo sapien
gaaataacaagcaaagtgaaatgtc

SEQ ID NO: 5519096 - DNA, 25 bp, Homo sapien
gtcacctttgagctgctccggctgc

SEQ ID NO: 5519097 - DNA, 25 bp, Homo sapien
actgtacagcggacacaaaaaaatc

SEQ ID NO: 5519098 - DNA, 25 bp, Homo sapien
tttaggaaacgcacccctgtggcaa

SEQ ID NO: 5519099 - DNA, 25 bp, Homo sapien
atctgtggatacacccacgctgccc

SEQ ID NO: 5519100 - DNA, 25 bp, Homo sapien
caactgatagctgcaatattgtatt

SEQ ID NO: 5519101 - DNA, 25 bp, Homo sapien
attggaccataaaagtcaattgctc

SEQ ID NO: 5519102 - DNA, 25 bp, Homo sapien
gtcaattgctcaactttaaggaaaa

SEQ ID NO: 5519103 - DNA, 25 bp, Homo sapien
tgcaaatggcttcataagaaaattt

SEQ ID NO: 5519104 - DNA, 25 bp, Homo sapien
gtaaagaagcattaagtaatactgt

SEQ ID NO: 5519105 - DNA, 25 bp, Homo sapien
acggctcttcaggatgtagatgtgt

SEQ ID NO: 5519106 - DNA, 25 bp, Homo sapien
atattctccaactgatagctgcaat

SEQ ID NO: 5519107 - DNA, 25 bp, Homo sapien
agttataaacggctcttcaggatgt

SEQ ID NO: 5519108 - DNA, 25 bp, Homo sapien
aataataagttcatcattggaccat

SEQ ID NO: 5519109 - DNA, 25 bp, Homo sapien
taatgagaagcctcacagttaactc

SEQ ID NO: 5519110 - DNA, 25 bp, Homo sapien
caggatgtagatgtgttctagcctt

SEQ ID NO: 5519111 - DNA, 25 bp, Homo sapien
ggagcatggcatacaccagcttggg

SEQ ID NO: 5519112 - DNA, 25 bp, Homo sapien
cttaacaatgaaggcagaagaagaa

SEQ ID NO: 5519113 - DNA, 25 bp, Homo sapien
ttgaaaattagtttgccaagcagcc

SEQ ID NO: 5519114 - DNA, 25 bp, Homo sapien
aaagcgggtctgtaatgttccagcc

SEQ ID NO: 5519115 - DNA, 25 bp, Homo sapien
atcggctgcttttgggcaacaccca

SEQ ID NO: 5519116 - DNA, 25 bp, Homo sapien
ccagcctctggttggctccatcggc

SEQ ID NO: 5519117 - DNA, 25 bp, Homo sapien
caagcagccaatttagtgaatgacc

SEQ ID NO: 5519118 - DNA, 25 bp, Homo sapien
gggcaacacccagctttagagatct

SEQ ID NO: 5519119 - DNA, 25 bp, Homo sapien
tatacagtttagaaggagatagtct

SEQ ID NO: 5519120 - DNA, 25 bp, Homo sapien
gcagaagaagaacatagtagaaaca

SEQ ID NO: 5519121 - DNA, 25 bp, Homo sapien
tgctgtgttgctctctgagggttag

SEQ ID NO: 5519122 - DNA, 25 bp, Homo sapien
ggcccacccttgacacgctgcacga

SEQ ID NO: 5519123 - DNA, 25 bp, Homo sapien
ctctggccctgtacaagatgttcag

SEQ ID NO: 5519124 - DNA, 25 bp, Homo sapien
gagcatgccgagtctccagacgtga

SEQ ID NO: 5519125 - DNA, 25 bp, Homo sapien
gcggaagagatcgccaattacaggc

SEQ ID NO: 5519126 - DNA, 25 bp, Homo sapien
aggcactccaggacactctggccct

SEQ ID NO: 5519127 - DNA, 25 bp, Homo sapien
gctgatgacattgatgcctggatgc

SEQ ID NO: 5519128 - DNA, 25 bp, Homo sapien
gaggcctccctgctgcaccagttcc

SEQ ID NO: 5519129 - DNA, 25 bp, Homo sapien
agttccaggcagatgctgatgacat

SEQ ID NO: 5519130 - DNA, 25 bp, Homo sapien
tagagcagctctcggccattcggaa

SEQ ID NO: 5519131 - DNA, 25 bp, Homo sapien
aagattgtctccagcagcgacgtgg

SEQ ID NO: 5519132 - DNA, 25 bp, Homo sapien
ggagaagatccgtgagaggatcatt

SEQ ID NO: 5519133 - DNA, 25 bp, Homo sapien
aagtttcttctttgaggattcatag

SEQ ID NO: 5519134 - DNA, 25 bp, Homo sapien
ctatgaatcctcaaagaagaaactt

SEQ ID NO: 5519135 - DNA, 25 bp, Homo sapien
caggggatgacactgcatctgtgca

SEQ ID NO: 5519136 - DNA, 25 bp, Homo sapien
agagaaggctgttgagacattgtaa

SEQ ID NO: 5519137 - DNA, 25 bp, Homo sapien
ttatgagtaatgaaatgtggaggct

SEQ ID NO: 5519138 - DNA, 25 bp, Homo sapien
catactcagcccaacaggggatgac

SEQ ID NO: 5519139 - DNA, 25 bp, Homo sapien
caggtctacccgggggttcactctg

SEQ ID NO: 5519140 - DNA, 25 bp, Homo sapien
gatgcagcatgaaattttaggtgtc

SEQ ID NO: 5519141 - DNA, 25 bp, Homo sapien
aaagagtttagcagtctgttggggg

SEQ ID NO: 5519142 - DNA, 25 bp, Homo sapien
gaaagccattaggctgaggacctgg

SEQ ID NO: 5519143 - DNA, 25 bp, Homo sapien
tatttgggtgacgtcatgcatcccc

SEQ ID NO: 5519144 - DNA, 25 bp, Homo sapien
cccttgagggatatgcttgactaat

SEQ ID NO: 5519145 - DNA, 25 bp, Homo sapien
gacattaggaaggccacaattatga

SEQ ID NO: 5519146 - DNA, 25 bp, Homo sapien
ctgacatttggttctctggaaaggc

SEQ ID NO: 5519147 - DNA, 25 bp, Homo sapien
aggtagtgtttaaaatgaatgtcta

SEQ ID NO: 5519148 - DNA, 25 bp, Homo sapien
accacaaagctctgagtatctcccc

SEQ ID NO: 5519149 - DNA, 25 bp, Homo sapien
tggttctctggaaaggcagtttagt

SEQ ID NO: 5519150 - DNA, 25 bp, Homo sapien
atttcaggatagatgaccaaggtga

SEQ ID NO: 5519151 - DNA, 25 bp, Homo sapien
acattcaggccaatactaactaagc

SEQ ID NO: 5519152 - DNA, 25 bp, Homo sapien
agtatactgataaccacaaagctct

SEQ ID NO: 5519153 - DNA, 25 bp, Homo sapien
gaaaggcagtttagttatccaagac

SEQ ID NO: 5519154 - DNA, 25 bp, Homo sapien
tctatattaactgaggtagtgttta

SEQ ID NO: 5519155 - DNA, 25 bp, Homo sapien
cccaaagtaagtgatataggcagat

SEQ ID NO: 5519156 - DNA, 25 bp, Homo sapien
ataggcagatatgataaggtataca

SEQ ID NO: 5519157 - DNA, 25 bp, Homo sapien
gcgaggaggcgcgtcttcgcggccg

SEQ ID NO: 5519158 - DNA, 25 bp, Homo sapien
cggccgcgaagacgcgcctcctcgc

SEQ ID NO: 5519159 - DNA, 25 bp, Homo sapien
aaacaaatggtataaagtagtattc

SEQ ID NO: 5519160 - DNA, 25 bp, Homo sapien
tatgaatagtgtaaattgaggatta

SEQ ID NO: 5519161 - DNA, 25 bp, Homo sapien
atagtcaatgaaagcagaaaccaac

SEQ ID NO: 5519162 - DNA, 25 bp, Homo sapien
ttgataccaaaagcaagggccttgg

SEQ ID NO: 5519163 - DNA, 25 bp, Homo sapien
ctatagtatgtacaaaggcaacaat

SEQ ID NO: 5519164 - DNA, 25 bp, Homo sapien
tagaccagataagcaaagaataaac

SEQ ID NO: 5519165 - DNA, 25 bp, Homo sapien
aggcaacaattgagaagtgaaaatc

SEQ ID NO: 5519166 - DNA, 25 bp, Homo sapien
attgaggattattaagcagtgaaac

SEQ ID NO: 5519167 - DNA, 25 bp, Homo sapien
agggccttggctacctgagcacttt

SEQ ID NO: 5519168 - DNA, 25 bp, Homo sapien
agcagtgaaacaaatattcagctcc

SEQ ID NO: 5519169 - DNA, 25 bp, Homo sapien
cctatgggttcatgagggttgatac

SEQ ID NO: 5519170 - DNA, 25 bp, Homo sapien
ttctcttgcacttctccaccgaccc

SEQ ID NO: 5519171 - DNA, 25 bp, Homo sapien
tcttgcacttctccaccgacccagt

SEQ ID NO: 5519172 - DNA, 25 bp, Homo sapien
ggagttcaaggccgacatcaagttc

SEQ ID NO: 5519173 - DNA, 25 bp, Homo sapien
tgtgcctggcgtgtacttcacctgt

SEQ ID NO: 5519174 - DNA, 25 bp, Homo sapien
agttcaaggccgacatcaagttcaa

SEQ ID NO: 5519175 - DNA, 25 bp, Homo sapien
tgtacttcacctgtccgctcactgg

SEQ ID NO: 5519176 - DNA, 25 bp, Homo sapien
aacttcaagccgaagccaccgtcag

SEQ ID NO: 5519177 - DNA, 25 bp, Homo sapien
agaaaggaacttcaagccgaagcca

SEQ ID NO: 5519178 - DNA, 25 bp, Homo sapien
gcctggcgtgtacttcacctgtccg

SEQ ID NO: 5519179 - DNA, 25 bp, Homo sapien
cccacatcgcaggacaccatccgaa

SEQ ID NO: 5519180 - DNA, 25 bp, Homo sapien
aggaacttcaagccgaagccaccgt

SEQ ID NO: 5519181 - DNA, 25 bp, Homo sapien
gacgccgtagcccccgccgtagccc

SEQ ID NO: 5519182 - DNA, 25 bp, Homo sapien
gggctacggcgggggctacggcgtc

SEQ ID NO: 5519183 - DNA, 25 bp, Homo sapien
gtacatgaaatttggagggacacta

SEQ ID NO: 5519184 - DNA, 25 bp, Homo sapien
aggcatccactggggatcttgcaaa

SEQ ID NO: 5519185 - DNA, 25 bp, Homo sapien
ttcagcttgataaaattagaattct

SEQ ID NO: 5519186 - DNA, 25 bp, Homo sapien
gctgttaagtgccaaattcataaac

SEQ ID NO: 5519187 - DNA, 25 bp, Homo sapien
ctatatcacacaagcaacataatgc

SEQ ID NO: 5519188 - DNA, 25 bp, Homo sapien
aggggtggctactgttaagtcacat

SEQ ID NO: 5519189 - DNA, 25 bp, Homo sapien
acattgtgacattccaggtgtacat

SEQ ID NO: 5519190 - DNA, 25 bp, Homo sapien
ttagttctgctgttaagtgccaaat

SEQ ID NO: 5519191 - DNA, 25 bp, Homo sapien
acataatgcctcttttgacacagta

SEQ ID NO: 5519192 - DNA, 25 bp, Homo sapien
ttggagggacactattcactatatc

SEQ ID NO: 5519193 - DNA, 25 bp, Homo sapien
atcatagggatatgtatgcatagga

SEQ ID NO: 5519194 - DNA, 25 bp, Homo sapien
tttggacacttgtagcacttataag

SEQ ID NO: 5519195 - DNA, 25 bp, Homo sapien
cttataagtgctacaagtgtccaaa

SEQ ID NO: 5519196 - DNA, 25 bp, Homo sapien
ctttggcccccgattgcctggctct

SEQ ID NO: 5519197 - DNA, 25 bp, Homo sapien
ggtcagcccaccacgggccatttct

SEQ ID NO: 5519198 - DNA, 25 bp, Homo sapien
ctggcaggacccgacttagttacag

SEQ ID NO: 5519199 - DNA, 25 bp, Homo sapien
aggcgagcacccccatctttggccc

SEQ ID NO: 5519200 - DNA, 25 bp, Homo sapien
aatatgcacaacggtggaacagtct

SEQ ID NO: 5519201 - DNA, 25 bp, Homo sapien
ggagggtgttcctggataccccaca

SEQ ID NO: 5519202 - DNA, 25 bp, Homo sapien
catgggacagggttcccatcccctg

SEQ ID NO: 5519203 - DNA, 25 bp, Homo sapien
cagctcccactgtggtttggcgggg

SEQ ID NO: 5519204 - DNA, 25 bp, Homo sapien
gtccccaccccacctgaactcgcca

SEQ ID NO: 5519205 - DNA, 25 bp, Homo sapien
ccacaaggcactacagatgcagact

SEQ ID NO: 5519206 - DNA, 25 bp, Homo sapien
ttcctgtctcccaaggggcacagaa

SEQ ID NO: 5519207 - DNA, 25 bp, Homo sapien
tcagtgcccgtgctgcacgcgtcca

SEQ ID NO: 5519208 - DNA, 25 bp, Homo sapien
atccctttaggaaggtcgtggatgg

SEQ ID NO: 5519209 - DNA, 25 bp, Homo sapien
ccctgccgacctgagatcctctctc

SEQ ID NO: 5519210 - DNA, 25 bp, Homo sapien
ggatccgggtccttcagactcgtct

SEQ ID NO: 5519211 - DNA, 25 bp, Homo sapien
ctctctcgcctccgcagtgcattcc

SEQ ID NO: 5519212 - DNA, 25 bp, Homo sapien
gctggctcgagtcatggactctgct

SEQ ID NO: 5519213 - DNA, 25 bp, Homo sapien
catcttggccgacttgctggctcga

SEQ ID NO: 5519214 - DNA, 25 bp, Homo sapien
gatggcgcttacagccctcgaggag

SEQ ID NO: 5519215 - DNA, 25 bp, Homo sapien
gtctacctgactcagcaggtgggcc

SEQ ID NO: 5519216 - DNA, 25 bp, Homo sapien
aggcgaagtacactcctcaggagcc

SEQ ID NO: 5519217 - DNA, 25 bp, Homo sapien
gcctggagaacttccaaggcgaagt

SEQ ID NO: 5519218 - DNA, 25 bp, Homo sapien
ctgcgtcttgtggcagaagatggtg

SEQ ID NO: 5519219 - DNA, 25 bp, Homo sapien
tcactggagcatctccggaagcaga

SEQ ID NO: 5519220 - DNA, 25 bp, Homo sapien
ggatgagacctgcgtcttgtggcag

SEQ ID NO: 5519221 - DNA, 25 bp, Homo sapien
aggatgcgttgctgttccaagccca

SEQ ID NO: 5519222 - DNA, 25 bp, Homo sapien
tgagttcgagcgtcttcgccgtttg

SEQ ID NO: 5519223 - DNA, 25 bp, Homo sapien
cacctagctgagctcatcgccgagc

SEQ ID NO: 5519224 - DNA, 25 bp, Homo sapien
tgagctcatcgccgagctcgagggc

SEQ ID NO: 5519225 - DNA, 25 bp, Homo sapien
tgctgttccaagcccaggcggatga

SEQ ID NO: 5519226 - DNA, 25 bp, Homo sapien
tcttcgccgtttgctggcagaggag

SEQ ID NO: 5519227 - DNA, 25 bp, Homo sapien
gcatctccggaagcagatgcaggat

SEQ ID NO: 5519228 - DNA, 25 bp, Homo sapien
agagcgcccacctagctgagctcat

SEQ ID NO: 5519229 - DNA, 25 bp, Homo sapien
gtctaaagcttgagggctccacatg

SEQ ID NO: 5519230 - DNA, 25 bp, Homo sapien
aggaaagcagcattatgaggtctca

SEQ ID NO: 5519231 - DNA, 25 bp, Homo sapien
ggtctcaagataatgggagccacct

SEQ ID NO: 5519232 - DNA, 25 bp, Homo sapien
gagccacctgaaaacggagataaaa

SEQ ID NO: 5519233 - DNA, 25 bp, Homo sapien
ggcccaccaaaagccaggacaatgc

SEQ ID NO: 5519234 - DNA, 25 bp, Homo sapien
accagaatgcccagaccactgagtt

SEQ ID NO: 5519235 - DNA, 25 bp, Homo sapien
gaggagcaacatgtaaaacagtggt

SEQ ID NO: 5519236 - DNA, 25 bp, Homo sapien
agcaggtaatggcacagtatctcac

SEQ ID NO: 5519237 - DNA, 25 bp, Homo sapien
gccagacaccctgcatgccagcttc

SEQ ID NO: 5519238 - DNA, 25 bp, Homo sapien
gagtagctctgtgctgactagcgtc

SEQ ID NO: 5519239 - DNA, 25 bp, Homo sapien
gaacaaaagccaacaggaaccaatg

SEQ ID NO: 5519240 - DNA, 25 bp, Homo sapien
aaatcgtagtttaaggaagccatag

SEQ ID NO: 5519241 - DNA, 25 bp, Homo sapien
taacactggtacaatggcagtagca

SEQ ID NO: 5519242 - DNA, 25 bp, Homo sapien
gcctggcctcattatgtagcaaagc

SEQ ID NO: 5519243 - DNA, 25 bp, Homo sapien
gggagcatatgataaatcgtagttt

SEQ ID NO: 5519244 - DNA, 25 bp, Homo sapien
taaaacataaccagatgcaccttgg

SEQ ID NO: 5519245 - DNA, 25 bp, Homo sapien
ggaagccatagcacttacagagttc

SEQ ID NO: 5519246 - DNA, 25 bp, Homo sapien
agatgcaccttggttgtttacattc

SEQ ID NO: 5519247 - DNA, 25 bp, Homo sapien
tcagtaaaagatgcaaggtagaaca

SEQ ID NO: 5519248 - DNA, 25 bp, Homo sapien
tcgtagtttaaggaagccatagcac

SEQ ID NO: 5519249 - DNA, 25 bp, Homo sapien
tgtctatatgatttccacaggactt

SEQ ID NO: 5519250 - DNA, 25 bp, Homo sapien
gcagctttgcaaatgtttgtctata

SEQ ID NO: 5519251 - DNA, 25 bp, Homo sapien
gatgatgtgtcagagggctctgaag

SEQ ID NO: 5519252 - DNA, 25 bp, Homo sapien
ccgccaggtgttctccatggcagcc

SEQ ID NO: 5519253 - DNA, 25 bp, Homo sapien
cccccaggcaaaccagccctacctg

SEQ ID NO: 5519254 - DNA, 25 bp, Homo sapien
gcttctgttgccaccgggccagact

SEQ ID NO: 5519255 - DNA, 25 bp, Homo sapien
agcttctgttgccaccgggccagac

SEQ ID NO: 5519256 - DNA, 25 bp, Homo sapien
cggcacccgccaggtgttctccatg

SEQ ID NO: 5519257 - DNA, 25 bp, Homo sapien
tcccccgtgcctttgcccccaggca

SEQ ID NO: 5519258 - DNA, 25 bp, Homo sapien
gcctttgcccccaggcaaaccagcc

SEQ ID NO: 5519259 - DNA, 25 bp, Homo sapien
ccagcaccaccagcttaacggcgag

SEQ ID NO: 5519260 - DNA, 25 bp, Homo sapien
tccatggcagccatgaacaaggaag

SEQ ID NO: 5519261 - DNA, 25 bp, Homo sapien
tttgcccccaggcaaaccagcccta

SEQ ID NO: 5519262 - DNA, 25 bp, Homo sapien
gcccacacgtccagctgtctccagc

SEQ ID NO: 5519263 - DNA, 25 bp, Homo sapien
ctttgcctcagaccccaagtacgcc

SEQ ID NO: 5519264 - DNA, 25 bp, Homo sapien
tgcccatcgtccgggatggcaagaa

SEQ ID NO: 5519265 - DNA, 25 bp, Homo sapien
attacttgctgcccgagcgaccatc

SEQ ID NO: 5519266 - DNA, 25 bp, Homo sapien
tgcccaccacccagagctttgcctc

SEQ ID NO: 5519267 - DNA, 25 bp, Homo sapien
tgtcccctcaaggctcgaggacacc

SEQ ID NO: 5519268 - DNA, 25 bp, Homo sapien
tgcccgagcgaccatcctacctgga

SEQ ID NO: 5519269 - DNA, 25 bp, Homo sapien
agccccctggtaccacctggcagct

SEQ ID NO: 5519270 - DNA, 25 bp, Homo sapien
gcagagatcttccaggcgctacagc

SEQ ID NO: 5519271 - DNA, 25 bp, Homo sapien
caagtacgccaccccccaggtgatc

SEQ ID NO: 5519272 - DNA, 25 bp, Homo sapien
gctctcaagctcacctgggaagacc

SEQ ID NO: 5519273 - DNA, 25 bp, Homo sapien
acagtagctcccagcagagtcctgt

SEQ ID NO: 5519274 - DNA, 25 bp, Homo sapien
tgaaaacaattcaggtgaccaagca

SEQ ID NO: 5519275 - DNA, 25 bp, Homo sapien
tgaccaagcacttcgagtttcacac

SEQ ID NO: 5519276 - DNA, 25 bp, Homo sapien
gctgaggtgctgctaagacttgaat

SEQ ID NO: 5519277 - DNA, 25 bp, Homo sapien
ccgtacccctgaaggcaaacatttc

SEQ ID NO: 5519278 - DNA, 25 bp, Homo sapien
aagaatcaggtccaagaatagggtg

SEQ ID NO: 5519279 - DNA, 25 bp, Homo sapien
ttcacacactgaaggtgggcctttt

SEQ ID NO: 5519280 - DNA, 25 bp, Homo sapien
ctgaaaatggaaggcaacatttgac

SEQ ID NO: 5519281 - DNA, 25 bp, Homo sapien
aacagtataagataaagtgctcaac

SEQ ID NO: 5519282 - DNA, 25 bp, Homo sapien
atttggaaatccagcctgaactttt

SEQ ID NO: 5519283 - DNA, 25 bp, Homo sapien
atgtaaagaatgctttccgtacccc

SEQ ID NO: 5519284 - DNA, 25 bp, Homo sapien
cactccaactagtcagaggggacct

SEQ ID NO: 5519285 - DNA, 25 bp, Homo sapien
aggtcccctctgactagttggagtg

SEQ ID NO: 5519286 - DNA, 25 bp, Homo sapien
ggtcaaaaatggtgcccagaatttc

SEQ ID NO: 5519287 - DNA, 25 bp, Homo sapien
gtcttcaatggtcaaaaatggtgcc

SEQ ID NO: 5519288 - DNA, 25 bp, Homo sapien
aagaagacatcaacatggtgatttt

SEQ ID NO: 5519289 - DNA, 25 bp, Homo sapien
aagatgagcaaggtataatcctcca

SEQ ID NO: 5519290 - DNA, 25 bp, Homo sapien
aacagatgcaggtaagtagtttatc

SEQ ID NO: 5519291 - DNA, 25 bp, Homo sapien
ttgtgccaagatgagcaaggtataa

SEQ ID NO: 5519292 - DNA, 25 bp, Homo sapien
tctttatacgcaacttggcctactc

SEQ ID NO: 5519293 - DNA, 25 bp, Homo sapien
ttggcctactcaagaagacatcaac

SEQ ID NO: 5519294 - DNA, 25 bp, Homo sapien
tagaatggagatgctttgtgaagtt

SEQ ID NO: 5519295 - DNA, 25 bp, Homo sapien
tgtaagagataaggtttatatgaac

SEQ ID NO: 5519296 - DNA, 25 bp, Homo sapien
gaacaagatagaatggagatgcttt

SEQ ID NO: 5519297 - DNA, 25 bp, Homo sapien
cctctcagcacaagtattgaaggcc

SEQ ID NO: 5519298 - DNA, 25 bp, Homo sapien
aagaaactccaacacaatctctcct

SEQ ID NO: 5519299 - DNA, 25 bp, Homo sapien
tcatgttaaagctgcatcatcgttt

SEQ ID NO: 5519300 - DNA, 25 bp, Homo sapien
ctcctgaatgggaacattttcttac

SEQ ID NO: 5519301 - DNA, 25 bp, Homo sapien
attgaaggccaatcactgctcacta

SEQ ID NO: 5519302 - DNA, 25 bp, Homo sapien
catcgttttggatgaaacgtggtta

SEQ ID NO: 5519303 - DNA, 25 bp, Homo sapien
tgcccataattaacatccctcacgg

SEQ ID NO: 5519304 - DNA, 25 bp, Homo sapien
tacaaagggaacatagataataatt

SEQ ID NO: 5519305 - DNA, 25 bp, Homo sapien
tactctaaaccatgaagacctaacc

SEQ ID NO: 5519306 - DNA, 25 bp, Homo sapien
tgaagacctaacctaggacagggca

SEQ ID NO: 5519307 - DNA, 25 bp, Homo sapien
aacgtggttaaaggtggacaccaca

SEQ ID NO: 5519308 - DNA, 25 bp, Homo sapien
ctgaaggtattttattttcgtggtc

SEQ ID NO: 5519309 - DNA, 25 bp, Homo sapien
ttttcgtggtcctcatgaactcact

SEQ ID NO: 5519310 - DNA, 25 bp, Homo sapien
agattaaaagtagactcaaacaact

SEQ ID NO: 5519311 - DNA, 25 bp, Homo sapien
ataaagtaccagtgtttagctgctt

SEQ ID NO: 5519312 - DNA, 25 bp, Homo sapien
ctgcctgggtgatttatagaaggat

SEQ ID NO: 5519313 - DNA, 25 bp, Homo sapien
tatagaaggattgtataagggcctt

SEQ ID NO: 5519314 - DNA, 25 bp, Homo sapien
tgaactcactagagattaaaagtag

SEQ ID NO: 5519315 - DNA, 25 bp, Homo sapien
cttcctgcctgggtgatttatagaa

SEQ ID NO: 5519316 - DNA, 25 bp, Homo sapien
taatgaatatttatagatctgtaac

SEQ ID NO: 5519317 - DNA, 25 bp, Homo sapien
ctgggtgatttatagaaggattgta

SEQ ID NO: 5519318 - DNA, 25 bp, Homo sapien
aaagtcaggaaaataatagaaatca

SEQ ID NO: 5519319 - DNA, 25 bp, Homo sapien
cgttcctgatggtgagcgacgcgct

SEQ ID NO: 5519320 - DNA, 25 bp, Homo sapien
agcgcgtcgctcaccatcaggaacg

SEQ ID NO: 5519321 - DNA, 25 bp, Homo sapien
ggccgggatgtgaccaccctcttca

SEQ ID NO: 5519322 - DNA, 25 bp, Homo sapien
gagagccaagcatattcccagcacc

SEQ ID NO: 5519323 - DNA, 25 bp, Homo sapien
agggctgagaacagttctagaagcg

SEQ ID NO: 5519324 - DNA, 25 bp, Homo sapien
gccaagactcggcgataccaaggat

SEQ ID NO: 5519325 - DNA, 25 bp, Homo sapien
gattccttaaggctctgaagggctg

SEQ ID NO: 5519326 - DNA, 25 bp, Homo sapien
acagttctagaagcgtcccaaaggg

SEQ ID NO: 5519327 - DNA, 25 bp, Homo sapien
gagggaagatccgagttcctcaccg

SEQ ID NO: 5519328 - DNA, 25 bp, Homo sapien
cagccggtcctgcccacgcttcagg

SEQ ID NO: 5519329 - DNA, 25 bp, Homo sapien
gaccggtggattccttaaggctctg

SEQ ID NO: 5519330 - DNA, 25 bp, Homo sapien
agggagagccaagcatattcccagc

SEQ ID NO: 5519331 - DNA, 25 bp, Homo sapien
gagttgccaagactcggcgatacca

SEQ ID NO: 5519332 - DNA, 25 bp, Homo sapien
agggtcagtttaagataagttttca

SEQ ID NO: 5519333 - DNA, 25 bp, Homo sapien
cactcggtagagttttagaagtttc

SEQ ID NO: 5519334 - DNA, 25 bp, Homo sapien
aatgaagactcactcaaagggaagg

SEQ ID NO: 5519335 - DNA, 25 bp, Homo sapien
ggagaggaatgaagactcactcaaa

SEQ ID NO: 5519336 - DNA, 25 bp, Homo sapien
tcaagacaattgactgaagccacag

SEQ ID NO: 5519337 - DNA, 25 bp, Homo sapien
ttgagtcactcaggacttggctgtc

SEQ ID NO: 5519338 - DNA, 25 bp, Homo sapien
ggacttggctgtcctcgcacccgtg

SEQ ID NO: 5519339 - DNA, 25 bp, Homo sapien
ccgggaaggtgtctttcagcctctt

SEQ ID NO: 5519340 - DNA, 25 bp, Homo sapien
accaaagtgcccaaatagaaggagc

SEQ ID NO: 5519341 - DNA, 25 bp, Homo sapien
ggttcccacatgggagaggaatgaa

SEQ ID NO: 5519342 - DNA, 25 bp, Homo sapien
ggagcagcgaacttgcccaaaacag

SEQ ID NO: 5519343 - DNA, 25 bp, Homo sapien
attgctaaatgtggtctttgccaac

SEQ ID NO: 5519344 - DNA, 25 bp, Homo sapien
gcctgtggacatttaggcctgggtg

SEQ ID NO: 5519345 - DNA, 25 bp, Homo sapien
taaataaagtcatgatcagtgtgca

SEQ ID NO: 5519346 - DNA, 25 bp, Homo sapien
ctaaaagagcatgtacaaaagtggc

SEQ ID NO: 5519347 - DNA, 25 bp, Homo sapien
tgtgccaatgtatcaatgtagagtt

SEQ ID NO: 5519348 - DNA, 25 bp, Homo sapien
catgtacaaaagtggcctgtggaca

SEQ ID NO: 5519349 - DNA, 25 bp, Homo sapien
caagatcttttcagagtggtgtttc

SEQ ID NO: 5519350 - DNA, 25 bp, Homo sapien
cttacctagcgaacaagatcttttc

SEQ ID NO: 5519351 - DNA, 25 bp, Homo sapien
tacatggaagactaaactcatgctt

SEQ ID NO: 5519352 - DNA, 25 bp, Homo sapien
gccaactaaatttaagatgcagcat

SEQ ID NO: 5519353 - DNA, 25 bp, Homo sapien
ggcctgggtgatgcatttgctcttc

SEQ ID NO: 5519354 - DNA, 25 bp, Homo sapien
aggatttcgtaaacactggtaggtg

SEQ ID NO: 5519355 - DNA, 25 bp, Homo sapien
tggcaagaagtggcactgaatacat

SEQ ID NO: 5519356 - DNA, 25 bp, Homo sapien
ggtatgcactaccatgtccatgcct

SEQ ID NO: 5519357 - DNA, 25 bp, Homo sapien
atagaaaaagcatcccaaatacagg

SEQ ID NO: 5519358 - DNA, 25 bp, Homo sapien
taatgttctcctgcactagtgatcc

SEQ ID NO: 5519359 - DNA, 25 bp, Homo sapien
gcactagtgatcccacccagaacac

SEQ ID NO: 5519360 - DNA, 25 bp, Homo sapien
gaatacattactacaaacccttgac

SEQ ID NO: 5519361 - DNA, 25 bp, Homo sapien
attgcaaagtgatggcaagaagtgg

SEQ ID NO: 5519362 - DNA, 25 bp, Homo sapien
acacaaatgtggctccatctcccat

SEQ ID NO: 5519363 - DNA, 25 bp, Homo sapien
tggtaggtgaacaagtgcaatttta

SEQ ID NO: 5519364 - DNA, 25 bp, Homo sapien
tcagaagaaaatgtaatgttctcct

SEQ ID NO: 5519365 - DNA, 25 bp, Homo sapien
tgaaatattatactaaactttccat

SEQ ID NO: 5519366 - DNA, 25 bp, Homo sapien
atggaaagtttagtataatatttca

SEQ ID NO: 5519367 - DNA, 25 bp, Homo sapien
atgaaatattatactaaactttcca

SEQ ID NO: 5519368 - DNA, 25 bp, Homo sapien
tggaaagtttagtataatatttcat

SEQ ID NO: 5519369 - DNA, 25 bp, Homo sapien
gatgaaatattatactaaactttcc

SEQ ID NO: 5519370 - DNA, 25 bp, Homo sapien
ggaaagtttagtataatatttcatc

SEQ ID NO: 5519371 - DNA, 25 bp, Homo sapien
ggcgtgggctctccatagtgtgtat

SEQ ID NO: 5519372 - DNA, 25 bp, Homo sapien
caagatgtgaacagtgcacgtgtta

SEQ ID NO: 5519373 - DNA, 25 bp, Homo sapien
ggcactacccagagagcttgctgct

SEQ ID NO: 5519374 - DNA, 25 bp, Homo sapien
gttgactctagcggctcagagagga

SEQ ID NO: 5519375 - DNA, 25 bp, Homo sapien
cctactgcaggggtccgtttagtaa

SEQ ID NO: 5519376 - DNA, 25 bp, Homo sapien
tggatgattctgcaattcgggacct

SEQ ID NO: 5519377 - DNA, 25 bp, Homo sapien
gctccttgcacttggaacagggctc

SEQ ID NO: 5519378 - DNA, 25 bp, Homo sapien
gtgtgtatgaaaagcttgttgactc

SEQ ID NO: 5519379 - DNA, 25 bp, Homo sapien
ccctgtcctgcggcctcaaagttct

SEQ ID NO: 5519380 - DNA, 25 bp, Homo sapien
cattctctaggatttgggaagctcc

SEQ ID NO: 5519381 - DNA, 25 bp, Homo sapien
ccgtgctgaccatgctggaattgga

SEQ ID NO: 5519382 - DNA, 25 bp, Homo sapien
cccggagtcgcttgtgtgccaggtc

SEQ ID NO: 5519383 - DNA, 25 bp, Homo sapien
gacctggcacacaagcgactccggg

SEQ ID NO: 5519384 - DNA, 25 bp, Homo sapien
cacttaatgcaaacacaggggtctg

SEQ ID NO: 5519385 - DNA, 25 bp, Homo sapien
tgagggagagattgatccgatttca

SEQ ID NO: 5519386 - DNA, 25 bp, Homo sapien
aggcactgtattttgcagcaggagc

SEQ ID NO: 5519387 - DNA, 25 bp, Homo sapien
actttggtccaaaaatcaggtgcgg

SEQ ID NO: 5519388 - DNA, 25 bp, Homo sapien
gcagaagaatgaagcagttaaaacc

SEQ ID NO: 5519389 - DNA, 25 bp, Homo sapien
gtgacttcagcaggtccactgatcc

SEQ ID NO: 5519390 - DNA, 25 bp, Homo sapien
ccagcaaagctgcaaagtaggaaag

SEQ ID NO: 5519391 - DNA, 25 bp, Homo sapien
tccgatttcaacgatgtggccactt

SEQ ID NO: 5519392 - DNA, 25 bp, Homo sapien
ctgcaaacctaagtcacatgagtcc

SEQ ID NO: 5519393 - DNA, 25 bp, Homo sapien
caggggtctgatgctgcaaacctaa

SEQ ID NO: 5519394 - DNA, 25 bp, Homo sapien
ccttcctaggttggctcacaagtgg

SEQ ID NO: 5519395 - DNA, 25 bp, Homo sapien
gaaactgcacccctcaaccaacctc

SEQ ID NO: 5519396 - DNA, 25 bp, Homo sapien
cataatcagataagccccagggcaa

SEQ ID NO: 5519397 - DNA, 25 bp, Homo sapien
tggcctatgggctagtcaatctttt

SEQ ID NO: 5519398 - DNA, 25 bp, Homo sapien
ttctcactagtccccaggcgacagc

SEQ ID NO: 5519399 - DNA, 25 bp, Homo sapien
cagccaagaggcaaccctgttcctc

SEQ ID NO: 5519400 - DNA, 25 bp, Homo sapien
ggcgacagccactagaactgactta

SEQ ID NO: 5519401 - DNA, 25 bp, Homo sapien
tggcctacaccagaaactgcacccc

SEQ ID NO: 5519402 - DNA, 25 bp, Homo sapien
ggggcagaactatcaatcaaggctt

SEQ ID NO: 5519403 - DNA, 25 bp, Homo sapien
cagcaaacccagaatggaactcagc

SEQ ID NO: 5519404 - DNA, 25 bp, Homo sapien
atcccaaccaaactacagcaaaccc

SEQ ID NO: 5519405 - DNA, 25 bp, Homo sapien
ctttaattctgcagtggggccatgg

SEQ ID NO: 5519406 - DNA, 25 bp, Homo sapien
agtacgtgtccctgtgcgacctgga

SEQ ID NO: 5519407 - DNA, 25 bp, Homo sapien
gggctggacctcctccctcagtacg

SEQ ID NO: 5519408 - DNA, 25 bp, Homo sapien
tcctggtgcggctgcccttcatcaa

SEQ ID NO: 5519409 - DNA, 25 bp, Homo sapien
gagctcaccaggtgctcaccttcct

SEQ ID NO: 5519410 - DNA, 25 bp, Homo sapien
gaatgttcgtggcatcagagagaaa

SEQ ID NO: 5519411 - DNA, 25 bp, Homo sapien
ttcgtgatcacctcggtggcctctg

SEQ ID NO: 5519412 - DNA, 25 bp, Homo sapien
accatctgctctgtccgccgcttcc

SEQ ID NO: 5519413 - DNA, 25 bp, Homo sapien
ggcctctttgggctgacgtttgcct

SEQ ID NO: 5519414 - DNA, 25 bp, Homo sapien
gaggacgagaccatctgctctgtcc

SEQ ID NO: 5519415 - DNA, 25 bp, Homo sapien
gtggcctctgaaaacgccagcacat

SEQ ID NO: 5519416 - DNA, 25 bp, Homo sapien
acgccagcacatcccgaggctgtgg

SEQ ID NO: 5519417 - DNA, 25 bp, Homo sapien
gatgctacctttatcggtgagtgac

SEQ ID NO: 5519418 - DNA, 25 bp, Homo sapien
atacatacagacagagtaaacaagg

SEQ ID NO: 5519419 - DNA, 25 bp, Homo sapien
tttagaggttttgccagcttttgac

SEQ ID NO: 5519420 - DNA, 25 bp, Homo sapien
taaaatcatggcaggtctggtgaag

SEQ ID NO: 5519421 - DNA, 25 bp, Homo sapien
atcaaacacagccaagaaattaagt

SEQ ID NO: 5519422 - DNA, 25 bp, Homo sapien
aaaaccatgcataggaactgttatc

SEQ ID NO: 5519423 - DNA, 25 bp, Homo sapien
ggagagaggtattctgaagaaagaa

SEQ ID NO: 5519424 - DNA, 25 bp, Homo sapien
aaaaagaaaacttagtgagcacgta

SEQ ID NO: 5519425 - DNA, 25 bp, Homo sapien
agcacgtaagtcatggagtttgagc

SEQ ID NO: 5519426 - DNA, 25 bp, Homo sapien
ttcattaaagaggaagaataaggtg

SEQ ID NO: 5519427 - DNA, 25 bp, Homo sapien
cagggggagatcctcctccaccttt

SEQ ID NO: 5519428 - DNA, 25 bp, Homo sapien
tgagaaattgtaccatgcagagatg

SEQ ID NO: 5519429 - DNA, 25 bp, Homo sapien
acaaaatgaaaccaacgaagatcac

SEQ ID NO: 5519430 - DNA, 25 bp, Homo sapien
aggagcaaactgagttattgtaggc

SEQ ID NO: 5519431 - DNA, 25 bp, Homo sapien
tttcacctatggaacagagaagaat

SEQ ID NO: 5519432 - DNA, 25 bp, Homo sapien
gacagcatagaaaaggacactaaca

SEQ ID NO: 5519433 - DNA, 25 bp, Homo sapien
acataattcctggggagcacaaggt

SEQ ID NO: 5519434 - DNA, 25 bp, Homo sapien
gtaggcaatacggtactaaagtgtc

SEQ ID NO: 5519435 - DNA, 25 bp, Homo sapien
cccagagtttggaatttaaggagca

SEQ ID NO: 5519436 - DNA, 25 bp, Homo sapien
aagaatactgcaaggtaacaagctc

SEQ ID NO: 5519437 - DNA, 25 bp, Homo sapien
gttacagagacagactgagcttcac

SEQ ID NO: 5519438 - DNA, 25 bp, Homo sapien
agaaatatagcaagtaagaaataac

SEQ ID NO: 5519439 - DNA, 25 bp, Homo sapien
gtatcagtgggacccgaacttgttc

SEQ ID NO: 5519440 - DNA, 25 bp, Homo sapien
taaaggaacatataggtcacacatc

SEQ ID NO: 5519441 - DNA, 25 bp, Homo sapien
taagggatagcatctaaggagatac

SEQ ID NO: 5519442 - DNA, 25 bp, Homo sapien
gctgagctgctgttctgcatgactc

SEQ ID NO: 5519443 - DNA, 25 bp, Homo sapien
acgcactccgtggaggtgtgttttc

SEQ ID NO: 5519444 - DNA, 25 bp, Homo sapien
caaaatccattggaacatggggccg

SEQ ID NO: 5519445 - DNA, 25 bp, Homo sapien
aaggagataccaagataaaggaaca

SEQ ID NO: 5519446 - DNA, 25 bp, Homo sapien
gggcttctcgacgtcgctgcgtttt

SEQ ID NO: 5519447 - DNA, 25 bp, Homo sapien
agctctcccctaagaggagccgttc

SEQ ID NO: 5519448 - DNA, 25 bp, Homo sapien
aacctgggatttagatacagacttc

SEQ ID NO: 5519449 - DNA, 25 bp, Homo sapien
ttctcggcgtcgtcttttgggcttc

SEQ ID NO: 5519450 - DNA, 25 bp, Homo sapien
ttgactcacaagcaggtgtaggccc

SEQ ID NO: 5519451 - DNA, 25 bp, Homo sapien
gggcctacacctgcttgtgagtcaa

SEQ ID NO: 5519452 - DNA, 25 bp, Homo sapien
aagtcgaacggactacactataaca

SEQ ID NO: 5519453 - DNA, 25 bp, Homo sapien
tgttatagtgtagtccgttcgactt

SEQ ID NO: 5519454 - DNA, 25 bp, Homo sapien
agaaatggcattggtactaacttgg

SEQ ID NO: 5519455 - DNA, 25 bp, Homo sapien
tgtgtaggtgccatcgtttgcaagt

SEQ ID NO: 5519456 - DNA, 25 bp, Homo sapien
caagttggatatgcacaaaaagatg

SEQ ID NO: 5519457 - DNA, 25 bp, Homo sapien
tccaaatacaggagaaatggcattg

SEQ ID NO: 5519458 - DNA, 25 bp, Homo sapien
caaaaagatgttccgcagaggttat

SEQ ID NO: 5519459 - DNA, 25 bp, Homo sapien
tacaggagaaatggcattggtacta

SEQ ID NO: 5519460 - DNA, 25 bp, Homo sapien
tatagccatgttagccgtggattcc

SEQ ID NO: 5519461 - DNA, 25 bp, Homo sapien
aggtgccatcgtttgcaagttggat

SEQ ID NO: 5519462 - DNA, 25 bp, Homo sapien
tccgcagaggttatatagccatgtt

SEQ ID NO: 5519463 - DNA, 25 bp, Homo sapien
tagccgtggattccaaatacaggag

SEQ ID NO: 5519464 - DNA, 25 bp, Homo sapien
ggatatgcacaaaaagatgttccgc

SEQ ID NO: 5519465 - DNA, 25 bp, Homo sapien
gaggatcggacgatacgatatgtcc

SEQ ID NO: 5519466 - DNA, 25 bp, Homo sapien
ctgaccgccgactgcagcttaagaa

SEQ ID NO: 5519467 - DNA, 25 bp, Homo sapien
gatatgaatccgagctacaaatgcc

SEQ ID NO: 5519468 - DNA, 25 bp, Homo sapien
tctagtaatgcaagaactgcggtcc

SEQ ID NO: 5519469 - DNA, 25 bp, Homo sapien
gcccgatatcatgagactgatcacc

SEQ ID NO: 5519470 - DNA, 25 bp, Homo sapien
gtgcggctgctgtcttcgtccctga

SEQ ID NO: 5519471 - DNA, 25 bp, Homo sapien
atccgagctacaaatgcccgatatc

SEQ ID NO: 5519472 - DNA, 25 bp, Homo sapien
atcaccaaagatctgtccgaaccct

SEQ ID NO: 5519473 - DNA, 25 bp, Homo sapien
gtcttcgtccctgaccgccgactgc

SEQ ID NO: 5519474 - DNA, 25 bp, Homo sapien
agatctgtccgaaccctactccatt

SEQ ID NO: 5519475 - DNA, 25 bp, Homo sapien
cgatatgtccgatatgaatccgagc

SEQ ID NO: 5519476 - DNA, 25 bp, Homo sapien
ccacacgggtcctcatagtctcttc

SEQ ID NO: 5519477 - DNA, 25 bp, Homo sapien
gaagagactatgaggacccgtgtgg

SEQ ID NO: 5519478 - DNA, 25 bp, Homo sapien
taaaaatataggaaatttcatgcag

SEQ ID NO: 5519479 - DNA, 25 bp, Homo sapien
catagcaattggcagactttaatat

SEQ ID NO: 5519480 - DNA, 25 bp, Homo sapien
tattaactgcaaaagctgtaagaaa

SEQ ID NO: 5519481 - DNA, 25 bp, Homo sapien
catgcagacatgaagcttccaattc

SEQ ID NO: 5519482 - DNA, 25 bp, Homo sapien
gatatgagggataaattaacaaatg

SEQ ID NO: 5519483 - DNA, 25 bp, Homo sapien
taagcacagtggactatctcctccc

SEQ ID NO: 5519484 - DNA, 25 bp, Homo sapien
gcataccctatatctgcactgcttc

SEQ ID NO: 5519485 - DNA, 25 bp, Homo sapien
tccaattcagcttttgtggcaactt

SEQ ID NO: 5519486 - DNA, 25 bp, Homo sapien
gcttacatactttagtagctaggac

SEQ ID NO: 5519487 - DNA, 25 bp, Homo sapien
gcactgcttcagaatatagaaatta

SEQ ID NO: 5519488 - DNA, 25 bp, Homo sapien
tagaatgagagttacatataaatac

SEQ ID NO: 5519489 - DNA, 25 bp, Homo sapien
tttaattaggctgggtaatgtgcac

SEQ ID NO: 5519490 - DNA, 25 bp, Homo sapien
ctgtatcacaggtgaaactgttacc

SEQ ID NO: 5519491 - DNA, 25 bp, Homo sapien
gtgatcgtgtctctgctgaatggtg

SEQ ID NO: 5519492 - DNA, 25 bp, Homo sapien
agatcacagactaaggagcagtcag

SEQ ID NO: 5519493 - DNA, 25 bp, Homo sapien
acacctgttttaattaggctgggta

SEQ ID NO: 5519494 - DNA, 25 bp, Homo sapien
tgtcaaacctaagcactttgcagtt

SEQ ID NO: 5519495 - DNA, 25 bp, Homo sapien
gcagttcactacttttgggaaaatg

SEQ ID NO: 5519496 - DNA, 25 bp, Homo sapien
tctagggaactgtatcacaggtgaa

SEQ ID NO: 5519497 - DNA, 25 bp, Homo sapien
acctaagcactttgcagttcactac

SEQ ID NO: 5519498 - DNA, 25 bp, Homo sapien
agcaaagatcacagactaaggagca

SEQ ID NO: 5519499 - DNA, 25 bp, Homo sapien
ctggtgtgatcgtgtctctgctgaa

SEQ ID NO: 5519500 - DNA, 25 bp, Homo sapien
acagcacaattcataaggcaaaaat

SEQ ID NO: 5519501 - DNA, 25 bp, Homo sapien
gctaaaaaggtacatgttcagaggt

SEQ ID NO: 5519502 - DNA, 25 bp, Homo sapien
aggtacatgttcagaggtaaaatac

SEQ ID NO: 5519503 - DNA, 25 bp, Homo sapien
taaaagacatatggataacaatttt

SEQ ID NO: 5519504 - DNA, 25 bp, Homo sapien
taaggcaaaaatataggcattatca

SEQ ID NO: 5519505 - DNA, 25 bp, Homo sapien
ttgcaagagagtacaaatattagta

SEQ ID NO: 5519506 - DNA, 25 bp, Homo sapien
accacaatgatacacacaaataacc

SEQ ID NO: 5519507 - DNA, 25 bp, Homo sapien
ctctgcagagatgtaaactggattt

SEQ ID NO: 5519508 - DNA, 25 bp, Homo sapien
aataaatgggacttacacataactt

SEQ ID NO: 5519509 - DNA, 25 bp, Homo sapien
ctgttaaaatcaaaaccgttgctgg

SEQ ID NO: 5519510 - DNA, 25 bp, Homo sapien
aaaaccctgatgctaaaaaggtaca

SEQ ID NO: 5519511 - DNA, 25 bp, Homo sapien
agaatgatcagatgagtcacctgtg

SEQ ID NO: 5519512 - DNA, 25 bp, Homo sapien
atacttaagagaggcataaattgcc

SEQ ID NO: 5519513 - DNA, 25 bp, Homo sapien
gttacacgatgcatatttcagtgac

SEQ ID NO: 5519514 - DNA, 25 bp, Homo sapien
cacagcgaaggtaacaaagatttaa

SEQ ID NO: 5519515 - DNA, 25 bp, Homo sapien
aatttcaattcacagcgaaggtaac

SEQ ID NO: 5519516 - DNA, 25 bp, Homo sapien
ttatgatgggcacaagccatgtatt

SEQ ID NO: 5519517 - DNA, 25 bp, Homo sapien
caaagctaagccttcagtctgaatc

SEQ ID NO: 5519518 - DNA, 25 bp, Homo sapien
tttaaacagccaacatcacaaatgt

SEQ ID NO: 5519519 - DNA, 25 bp, Homo sapien
aatatatagaatgatcagatgagtc

SEQ ID NO: 5519520 - DNA, 25 bp, Homo sapien
tttaacatggatacaggaaaagaaa

SEQ ID NO: 5519521 - DNA, 25 bp, Homo sapien
tgaaaaaaccaaagctaagccttca

SEQ ID NO: 5519522 - DNA, 25 bp, Homo sapien
attcagagcataacatagacagggc

SEQ ID NO: 5519523 - DNA, 25 bp, Homo sapien
tttcaaccagtttatgagagaatga

SEQ ID NO: 5519524 - DNA, 25 bp, Homo sapien
atgaaaagaatgaaagtgaaaattt

SEQ ID NO: 5519525 - DNA, 25 bp, Homo sapien
tttatgagagaatgaaaagaatgaa

SEQ ID NO: 5519526 - DNA, 25 bp, Homo sapien
cacattaaaaacagtagaggaaaac

SEQ ID NO: 5519527 - DNA, 25 bp, Homo sapien
ctttaccgagacctattcagagcat

SEQ ID NO: 5519528 - DNA, 25 bp, Homo sapien
tcaagttaatcaacagtggctagtt

SEQ ID NO: 5519529 - DNA, 25 bp, Homo sapien
tagaggaaaacaagcaaacatgata

SEQ ID NO: 5519530 - DNA, 25 bp, Homo sapien
actagaaaccacttaccaaattgcc

SEQ ID NO: 5519531 - DNA, 25 bp, Homo sapien
tgacacctttgttggtagtacagtg

SEQ ID NO: 5519532 - DNA, 25 bp, Homo sapien
ggcagcacaagcaactgacaccttt

SEQ ID NO: 5519533 - DNA, 25 bp, Homo sapien
ggctaacaatacaaatagagagaaa

SEQ ID NO: 5519534 - DNA, 25 bp, Homo sapien
cacccgtaaagccaaattcaacagt

SEQ ID NO: 5519535 - DNA, 25 bp, Homo sapien
tgtgttagtttgaagcatatgaaaa

SEQ ID NO: 5519536 - DNA, 25 bp, Homo sapien
cttcaagaataaaatgcaccatcag

SEQ ID NO: 5519537 - DNA, 25 bp, Homo sapien
atgaattgaggatttcaggaaaacc

SEQ ID NO: 5519538 - DNA, 25 bp, Homo sapien
ctgtctcgtacaagtaaatgacctt

SEQ ID NO: 5519539 - DNA, 25 bp, Homo sapien
tcacttcaagatggctaacaataca

SEQ ID NO: 5519540 - DNA, 25 bp, Homo sapien
gtggaacatcagttagagttatact

SEQ ID NO: 5519541 - DNA, 25 bp, Homo sapien
cctacccctggccctcaacttacaa

SEQ ID NO: 5519542 - DNA, 25 bp, Homo sapien
gcaccatcagtatttggagagtttg

SEQ ID NO: 5519543 - DNA, 25 bp, Homo sapien
agagtttggggtctcagatactgat

SEQ ID NO: 5519544 - DNA, 25 bp, Homo sapien
aaaaggtagcatgaagcaaagctta

SEQ ID NO: 5519545 - DNA, 25 bp, Homo sapien
tgtatcatggtttgggagagttatc

SEQ ID NO: 5519546 - DNA, 25 bp, Homo sapien
ggttcttgaagtgagcccgaaagta

SEQ ID NO: 5519547 - DNA, 25 bp, Homo sapien
cacctttgagaatatgccatgagaa

SEQ ID NO: 5519548 - DNA, 25 bp, Homo sapien
attggataaaggttacacaacattc

SEQ ID NO: 5519549 - DNA, 25 bp, Homo sapien
gaaagtactgctggtgttatgtatc

SEQ ID NO: 5519550 - DNA, 25 bp, Homo sapien
tctgagcatacttaagatgagaaac

SEQ ID NO: 5519551 - DNA, 25 bp, Homo sapien
gattgaaatacagacaaaaggtagc

SEQ ID NO: 5519552 - DNA, 25 bp, Homo sapien
gtatctgaaagaacaagactgaccc

SEQ ID NO: 5519553 - DNA, 25 bp, Homo sapien
gccatatagagtagggcacccctat

SEQ ID NO: 5519554 - DNA, 25 bp, Homo sapien
aatagcaacatggtaggtgtaggtt

SEQ ID NO: 5519555 - DNA, 25 bp, Homo sapien
agggccaagtcctactgacacctgt

SEQ ID NO: 5519556 - DNA, 25 bp, Homo sapien
aaaaccagtaaggatacagacaata

SEQ ID NO: 5519557 - DNA, 25 bp, Homo sapien
cttgcacttaggagcggctctctat

SEQ ID NO: 5519558 - DNA, 25 bp, Homo sapien
ttgaaaggtaagaatgtaattatga

SEQ ID NO: 5519559 - DNA, 25 bp, Homo sapien
ctctatggagagaggtccacatcaa

SEQ ID NO: 5519560 - DNA, 25 bp, Homo sapien
attaaaagtacggcaccatcaaata

SEQ ID NO: 5519561 - DNA, 25 bp, Homo sapien
ctgttcctgccacttgttgtccccc

SEQ ID NO: 5519562 - DNA, 25 bp, Homo sapien
attagtaagaattcatgctccatgc

SEQ ID NO: 5519563 - DNA, 25 bp, Homo sapien
caactcagcagaattaagaactagc

SEQ ID NO: 5519564 - DNA, 25 bp, Homo sapien
gacactgttttaaaggatcctgttc

SEQ ID NO: 5519565 - DNA, 25 bp, Homo sapien
aaaatgtagtactaacaggtccatc

SEQ ID NO: 5519566 - DNA, 25 bp, Homo sapien
tagatctagaagcagacatgaaaca

SEQ ID NO: 5519567 - DNA, 25 bp, Homo sapien
tttaaagaaccttctctgctgagag

SEQ ID NO: 5519568 - DNA, 25 bp, Homo sapien
tcatggggacccaaagttgctttta

SEQ ID NO: 5519569 - DNA, 25 bp, Homo sapien
gactcatggggacccaaagttgctt

SEQ ID NO: 5519570 - DNA, 25 bp, Homo sapien
gggcagctgcatcatccttggactc

SEQ ID NO: 5519571 - DNA, 25 bp, Homo sapien
cttcctccttgtagtcacagggcag

SEQ ID NO: 5519572 - DNA, 25 bp, Homo sapien
ctagaagcagacatgaaacaataaa

SEQ ID NO: 5519573 - DNA, 25 bp, Homo sapien
taatttacatgtggttcattgcctc

SEQ ID NO: 5519574 - DNA, 25 bp, Homo sapien
gcatcatccttggactcatggggac

SEQ ID NO: 5519575 - DNA, 25 bp, Homo sapien
cctccttgtagtcacagggcagctg

SEQ ID NO: 5519576 - DNA, 25 bp, Homo sapien
tgtggttcattgcctctactaattc

SEQ ID NO: 5519577 - DNA, 25 bp, Homo sapien
actcggagtccgcccctggtggcgt

SEQ ID NO: 5519578 - DNA, 25 bp, Homo sapien
acgccaccaggggcggactccgagt

SEQ ID NO: 5519579 - DNA, 25 bp, Homo sapien
taagacgcaacaatcaaaccaacct

SEQ ID NO: 5519580 - DNA, 25 bp, Homo sapien
tgacagcaacagtggcctggctgtt

SEQ ID NO: 5519581 - DNA, 25 bp, Homo sapien
gattgtgaaatccctgctgcgatgc

SEQ ID NO: 5519582 - DNA, 25 bp, Homo sapien
tctgtccagaggaagtcttagctcc

SEQ ID NO: 5519583 - DNA, 25 bp, Homo sapien
ctttggtgttaacctgtggtcttcc

SEQ ID NO: 5519584 - DNA, 25 bp, Homo sapien
tgagatgagaagagctcacatcgat

SEQ ID NO: 5519585 - DNA, 25 bp, Homo sapien
ccaccctccctggcgcttggatggg

SEQ ID NO: 5519586 - DNA, 25 bp, Homo sapien
atccctgctgcgatgctgggtatct

SEQ ID NO: 5519587 - DNA, 25 bp, Homo sapien
tcacctcagtgaactctgccctgcc

SEQ ID NO: 5519588 - DNA, 25 bp, Homo sapien
aggcgacacagtatgggattgtgaa

SEQ ID NO: 5519589 - DNA, 25 bp, Homo sapien
agaggcaattaagacgcaacaatca

SEQ ID NO: 5519590 - DNA, 25 bp, Homo sapien
taaacgtcaatttagatagacatgc

SEQ ID NO: 5519591 - DNA, 25 bp, Homo sapien
gttcccctgaacatagtgagtactg

SEQ ID NO: 5519592 - DNA, 25 bp, Homo sapien
tgatagccatcattaacacagtact

SEQ ID NO: 5519593 - DNA, 25 bp, Homo sapien
cacagccagcccacaaatttcctac

SEQ ID NO: 5519594 - DNA, 25 bp, Homo sapien
ggtgtagtatcttgagtttagggaa

SEQ ID NO: 5519595 - DNA, 25 bp, Homo sapien
agatagacatgcaatttgtgctgta

SEQ ID NO: 5519596 - DNA, 25 bp, Homo sapien
tactgcccacttctggtgtagtatc

SEQ ID NO: 5519597 - DNA, 25 bp, Homo sapien
attgtacataataggagccactgcc

SEQ ID NO: 5519598 - DNA, 25 bp, Homo sapien
cagtaaaactgcatgagtaatatcc

SEQ ID NO: 5519599 - DNA, 25 bp, Homo sapien
tgtgctgtagtaagtgacctaattc

SEQ ID NO: 5519600 - DNA, 25 bp, Homo sapien
cctgaacatagtgagtactgcccac

SEQ ID NO: 5519601 - DNA, 25 bp, Homo sapien
tttatctgacaagtgaacaatgaca

SEQ ID NO: 5519602 - DNA, 25 bp, Homo sapien
caaagtccaggcattaaaacaattt

SEQ ID NO: 5519603 - DNA, 25 bp, Homo sapien
caggctatgtaacaatgcaagatgc

SEQ ID NO: 5519604 - DNA, 25 bp, Homo sapien
aaaaagttgaaatcctaggcttctc

SEQ ID NO: 5519605 - DNA, 25 bp, Homo sapien
actcaagggagaaaaaatgaattca

SEQ ID NO: 5519606 - DNA, 25 bp, Homo sapien
aggaatcctctgacaaaaagttgaa

SEQ ID NO: 5519607 - DNA, 25 bp, Homo sapien
ggagggcaaattcgctcgtagatta

SEQ ID NO: 5519608 - DNA, 25 bp, Homo sapien
tggcacagctgtatatagattgagt

SEQ ID NO: 5519609 - DNA, 25 bp, Homo sapien
cggagaggcaggtatccttcatttt

SEQ ID NO: 5519610 - DNA, 25 bp, Homo sapien
atggaaaataaaaagtcgagataaa

SEQ ID NO: 5519611 - DNA, 25 bp, Homo sapien
taaagctgtcccaacaggaatcctc

SEQ ID NO: 5519612 - DNA, 25 bp, Homo sapien
tactggactatcaactagagggccg

SEQ ID NO: 5519613 - DNA, 25 bp, Homo sapien
ggatgtatgcacaggtgcgaccatc

SEQ ID NO: 5519614 - DNA, 25 bp, Homo sapien
tccaacgctgacactctaggacaga

SEQ ID NO: 5519615 - DNA, 25 bp, Homo sapien
ctggagacggtacaataacatcatt

SEQ ID NO: 5519616 - DNA, 25 bp, Homo sapien
cagaaaataggagtgacacccactt

SEQ ID NO: 5519617 - DNA, 25 bp, Homo sapien
cagtgttaagaaattatgggtatcc

SEQ ID NO: 5519618 - DNA, 25 bp, Homo sapien
aggaccctgggacaggttatacttg

SEQ ID NO: 5519619 - DNA, 25 bp, Homo sapien
aagctgcatatacataagtgaaccc

SEQ ID NO: 5519620 - DNA, 25 bp, Homo sapien
tgttagtcacagctgagcaagagga

SEQ ID NO: 5519621 - DNA, 25 bp, Homo sapien
gtgcccccacatgcacagggatgta

SEQ ID NO: 5519622 - DNA, 25 bp, Homo sapien
atctgggttgaacagtcaagctgca

SEQ ID NO: 5519623 - DNA, 25 bp, Homo sapien
gaaatcaccaatcaaggcctccgtt

SEQ ID NO: 5519624 - DNA, 25 bp, Homo sapien
gaaaaaagctcagtcagtgaggatc

SEQ ID NO: 5519625 - DNA, 25 bp, Homo sapien
tcaggcattcataaggcaggcacta

SEQ ID NO: 5519626 - DNA, 25 bp, Homo sapien
gggagttggcagaagttccatgtat

SEQ ID NO: 5519627 - DNA, 25 bp, Homo sapien
aggcagaggtaatgcagaaatctgt

SEQ ID NO: 5519628 - DNA, 25 bp, Homo sapien
agtactcagtgtagaaatcgctagc

SEQ ID NO: 5519629 - DNA, 25 bp, Homo sapien
ttctattatttgaggggagttggca

SEQ ID NO: 5519630 - DNA, 25 bp, Homo sapien
ttatcacattagactggggcagaac

SEQ ID NO: 5519631 - DNA, 25 bp, Homo sapien
agcaactgagatcaaagcactcttc

SEQ ID NO: 5519632 - DNA, 25 bp, Homo sapien
gcaacaaagtaaggtcaggattaga

SEQ ID NO: 5519633 - DNA, 25 bp, Homo sapien
cagaaagtgtacgccaactaaggga

SEQ ID NO: 5519634 - DNA, 25 bp, Homo sapien
cgggaggcctacgtaataaactgca

SEQ ID NO: 5519635 - DNA, 25 bp, Homo sapien
cggcctgacggtcaaggctcatgat

SEQ ID NO: 5519636 - DNA, 25 bp, Homo sapien
gttccccatctaaggaaggagagag

SEQ ID NO: 5519637 - DNA, 25 bp, Homo sapien
tattggtccactgggaagaaactgt

SEQ ID NO: 5519638 - DNA, 25 bp, Homo sapien
agttccccacagtcctagagtaggt

SEQ ID NO: 5519639 - DNA, 25 bp, Homo sapien
gagacattcaatgtgaggctaggga

SEQ ID NO: 5519640 - DNA, 25 bp, Homo sapien
actgtgtcagcccaagccatccgta

SEQ ID NO: 5519641 - DNA, 25 bp, Homo sapien
tgatagaagagctacagtgagccaa

SEQ ID NO: 5519642 - DNA, 25 bp, Homo sapien
agaggcacacggctataacttccac

SEQ ID NO: 5519643 - DNA, 25 bp, Homo sapien
catggtagtgcctgaagtggcctaa

SEQ ID NO: 5519644 - DNA, 25 bp, Homo sapien
tcagtaaggtctgattgcggcctga

SEQ ID NO: 5519645 - DNA, 25 bp, Homo sapien
cgacactcctagtccccaggccttc

SEQ ID NO: 5519646 - DNA, 25 bp, Homo sapien
gaaggcctggggactaggagtgtcg

SEQ ID NO: 5519647 - DNA, 25 bp, Homo sapien
atcctcactgcggcaacaagacctg

SEQ ID NO: 5519648 - DNA, 25 bp, Homo sapien
ttcttgagtgcctgaatgtggtggc

SEQ ID NO: 5519649 - DNA, 25 bp, Homo sapien
tccggcaggacccaagtcctctgta

SEQ ID NO: 5519650 - DNA, 25 bp, Homo sapien
cggccttcgctgcagccccactctg

SEQ ID NO: 5519651 - DNA, 25 bp, Homo sapien
gtattcagaggccgaccctgctttc

SEQ ID NO: 5519652 - DNA, 25 bp, Homo sapien
gacctggccaccaccctcacctcga

SEQ ID NO: 5519653 - DNA, 25 bp, Homo sapien
tggtggctcttagggtaaccccaga

SEQ ID NO: 5519654 - DNA, 25 bp, Homo sapien
tgctttccagagactcacgaggtgg

SEQ ID NO: 5519655 - DNA, 25 bp, Homo sapien
ggctgctcacgtgccagcacccact

SEQ ID NO: 5519656 - DNA, 25 bp, Homo sapien
ctcacctcgaccaccacggccttcg

SEQ ID NO: 5519657 - DNA, 25 bp, Homo sapien
ccactggccaagcatcctccggcag

SEQ ID NO: 5519658 - DNA, 25 bp, Homo sapien
gggggcagctgtccctatcttccac

SEQ ID NO: 5519659 - DNA, 25 bp, Homo sapien
gcggccaccctgatggcacttccca

SEQ ID NO: 5519660 - DNA, 25 bp, Homo sapien
ttgtaaaacaccagtcagaacctca

SEQ ID NO: 5519661 - DNA, 25 bp, Homo sapien
taagcacctgtgaaaagaagaggaa

SEQ ID NO: 5519662 - DNA, 25 bp, Homo sapien
ccatagctggggaagtcctcccttg

SEQ ID NO: 5519663 - DNA, 25 bp, Homo sapien
ggatctgacagatgagaattagggg

SEQ ID NO: 5519664 - DNA, 25 bp, Homo sapien
tcaaattgtgctgcaggcctgacga

SEQ ID NO: 5519665 - DNA, 25 bp, Homo sapien
tgggcataggaagtcaaattgtgct

SEQ ID NO: 5519666 - DNA, 25 bp, Homo sapien
ctgtctgtcagtgtccgtcccatgt

SEQ ID NO: 5519667 - DNA, 25 bp, Homo sapien
ctcactcagacaccagatacaggct

SEQ ID NO: 5519668 - DNA, 25 bp, Homo sapien
tgttggattgaaatgaccaggtgtt

SEQ ID NO: 5519669 - DNA, 25 bp, Homo sapien
gcagctgaaattctggaaaatctat

SEQ ID NO: 5519670 - DNA, 25 bp, Homo sapien
tgagggctcgcatccaaaagaatat

SEQ ID NO: 5519671 - DNA, 25 bp, Homo sapien
tactttcaatccgaagggccagtac

SEQ ID NO: 5519672 - DNA, 25 bp, Homo sapien
aggagcagcagatccttaaaagtaa

SEQ ID NO: 5519673 - DNA, 25 bp, Homo sapien
ctgaattggcaaaagagaatattaa

SEQ ID NO: 5519674 - DNA, 25 bp, Homo sapien
ttaaaagtaaagccacagagcatgc

SEQ ID NO: 5519675 - DNA, 25 bp, Homo sapien
ccacagagcatgcaactgaattggc

SEQ ID NO: 5519676 - DNA, 25 bp, Homo sapien
gttgggctggatcttgatagcagtt

SEQ ID NO: 5519677 - DNA, 25 bp, Homo sapien
aaaagaatataacactccaagcatg

SEQ ID NO: 5519678 - DNA, 25 bp, Homo sapien
attaaatgtttctttgagggctcgc

SEQ ID NO: 5519679 - DNA, 25 bp, Homo sapien
tgtcacccgatgcctatctccagtt

SEQ ID NO: 5519680 - DNA, 25 bp, Homo sapien
cttgttacatcaaaccaaaactgca

SEQ ID NO: 5519681 - DNA, 25 bp, Homo sapien
acagaataagaaagtggtaaactcc

SEQ ID NO: 5519682 - DNA, 25 bp, Homo sapien
tccacacagaaaggttctaagtgaa

SEQ ID NO: 5519683 - DNA, 25 bp, Homo sapien
gtaaactccaaaaatctataggcat

SEQ ID NO: 5519684 - DNA, 25 bp, Homo sapien
ttcaaagtagaatctgaccacccaa

SEQ ID NO: 5519685 - DNA, 25 bp, Homo sapien
attcacaaatatagtactctgtctc

SEQ ID NO: 5519686 - DNA, 25 bp, Homo sapien
aatccagaaaaatggtaacatatat

SEQ ID NO: 5519687 - DNA, 25 bp, Homo sapien
gatacagaataagaaagtggtaaac

SEQ ID NO: 5519688 - DNA, 25 bp, Homo sapien
acaatgaatgccagattatacagca

SEQ ID NO: 5519689 - DNA, 25 bp, Homo sapien
gatcagtcagtcaggttaaaatata

SEQ ID NO: 5519690 - DNA, 25 bp, Homo sapien
tgccagattatacagcagaaagcaa

SEQ ID NO: 5519691 - DNA, 25 bp, Homo sapien
tacaattattcgtggacaggcaggt

SEQ ID NO: 5519692 - DNA, 25 bp, Homo sapien
acaaatgtgttgtgcactaagtcac

SEQ ID NO: 5519693 - DNA, 25 bp, Homo sapien
tccgtgagaatttaaggccatttgt

SEQ ID NO: 5519694 - DNA, 25 bp, Homo sapien
tcatttccaggaattccgtgagaat

SEQ ID NO: 5519695 - DNA, 25 bp, Homo sapien
acaaaagacttccagcctgtgcacc

SEQ ID NO: 5519696 - DNA, 25 bp, Homo sapien
aagtcaccctaggtcaacttgggac

SEQ ID NO: 5519697 - DNA, 25 bp, Homo sapien
caggtcagtatataggagtaggtta

SEQ ID NO: 5519698 - DNA, 25 bp, Homo sapien
agaaaacaatgtacagtagaaataa

SEQ ID NO: 5519699 - DNA, 25 bp, Homo sapien
gcaccttgtgtggcaacgtggaatg

SEQ ID NO: 5519700 - DNA, 25 bp, Homo sapien
ttgatactgttagatatgtggatgt

SEQ ID NO: 5519701 - DNA, 25 bp, Homo sapien
aatagaatatataggtaaggaaaaa

SEQ ID NO: 5519702 - DNA, 25 bp, Homo sapien
tttacagacatgaagctcgaaaatg

SEQ ID NO: 5519703 - DNA, 25 bp, Homo sapien
tggccagtgatgccatctggcggtt

SEQ ID NO: 5519704 - DNA, 25 bp, Homo sapien
ctggcggttagttcagaaattgttt

SEQ ID NO: 5519705 - DNA, 25 bp, Homo sapien
aatcaggatcttaccatcgggaccc

SEQ ID NO: 5519706 - DNA, 25 bp, Homo sapien
agtactgcatacagacacactgagt

SEQ ID NO: 5519707 - DNA, 25 bp, Homo sapien
ttgaagtgagacattagtccaccct

SEQ ID NO: 5519708 - DNA, 25 bp, Homo sapien
atgacagtaaagagaaaccatttac

SEQ ID NO: 5519709 - DNA, 25 bp, Homo sapien
aggtagtaaacagtcctggccagtg

SEQ ID NO: 5519710 - DNA, 25 bp, Homo sapien
tatccaactgaatgaaaaacgtatt

SEQ ID NO: 5519711 - DNA, 25 bp, Homo sapien
atcgggaccctctccaaaaccacac

SEQ ID NO: 5519712 - DNA, 25 bp, Homo sapien
accccattcgccctagagtggcttc

SEQ ID NO: 5519713 - DNA, 25 bp, Homo sapien
cacatgtaagcagtggatcgaatgc

SEQ ID NO: 5519714 - DNA, 25 bp, Homo sapien
atctctacaaagaaagcgtggatac

SEQ ID NO: 5519715 - DNA, 25 bp, Homo sapien
cgggaagccatagctctgcatggtc

SEQ ID NO: 5519716 - DNA, 25 bp, Homo sapien
ttagtggtgcaatggctagtataag

SEQ ID NO: 5519717 - DNA, 25 bp, Homo sapien
tcagattggctatcagcgacgcaat

SEQ ID NO: 5519718 - DNA, 25 bp, Homo sapien
tgtagagactgatttgcaacccttc

SEQ ID NO: 5519719 - DNA, 25 bp, Homo sapien
tagagctcccccaagactgactgta

SEQ ID NO: 5519720 - DNA, 25 bp, Homo sapien
cagctctacaaagaccgagtgtgtc

SEQ ID NO: 5519721 - DNA, 25 bp, Homo sapien
gacgcaataaggatgtgttggcttg

SEQ ID NO: 5519722 - DNA, 25 bp, Homo sapien
ctagtataagcgtgcgttcgagtac

SEQ ID NO: 5519723 - DNA, 25 bp, Homo sapien
ttcgtcgagaagatttgatcagctt

SEQ ID NO: 5519724 - DNA, 25 bp, Homo sapien
agccatgctcagaacgctgcagtct

SEQ ID NO: 5519725 - DNA, 25 bp, Homo sapien
taagacgaagagagcttctgttccc

SEQ ID NO: 5519726 - DNA, 25 bp, Homo sapien
cagaactaaggagctatgacgtcta

SEQ ID NO: 5519727 - DNA, 25 bp, Homo sapien
tcagagaatctggcttaagacgaag

SEQ ID NO: 5519728 - DNA, 25 bp, Homo sapien
ttcctgagggaaatcattacgcttc

SEQ ID NO: 5519729 - DNA, 25 bp, Homo sapien
gaacgctgcagtctaaggatgaact

SEQ ID NO: 5519730 - DNA, 25 bp, Homo sapien
gcccatgccaagttagggcgacagg

SEQ ID NO: 5519731 - DNA, 25 bp, Homo sapien
cattgaagaatctgactgcaggtct

SEQ ID NO: 5519732 - DNA, 25 bp, Homo sapien
tcagctagcacagggaaacccttga

SEQ ID NO: 5519733 - DNA, 25 bp, Homo sapien
actgggtgacgaattcattaggtgc

SEQ ID NO: 5519734 - DNA, 25 bp, Homo sapien
tgacgtctaaaagaatcagagaatc

SEQ ID NO: 5519735 - DNA, 25 bp, Homo sapien
attgagacatgggatgagtatcata

SEQ ID NO: 5519736 - DNA, 25 bp, Homo sapien
ttgcagcagctgttggtttccattc

SEQ ID NO: 5519737 - DNA, 25 bp, Homo sapien
tatcaatactgaaatggttggcaat

SEQ ID NO: 5519738 - DNA, 25 bp, Homo sapien
gggagtaagagaacacatccagaaa

SEQ ID NO: 5519739 - DNA, 25 bp, Homo sapien
ctgtgaagactacgcttgcaggaga

SEQ ID NO: 5519740 - DNA, 25 bp, Homo sapien
ctaatgcaagtatggccagatctac

SEQ ID NO: 5519741 - DNA, 25 bp, Homo sapien
aaaaaatgtcaggaagccactccct

SEQ ID NO: 5519742 - DNA, 25 bp, Homo sapien
gaaaaacagtgtttgcagcagctgt

SEQ ID NO: 5519743 - DNA, 25 bp, Homo sapien
aaggcaagacagtcactaatgcaag

SEQ ID NO: 5519744 - DNA, 25 bp, Homo sapien
ttgtgggttgcttaagtgtggttaa

SEQ ID NO: 5519745 - DNA, 25 bp, Homo sapien
tggttaggttctgagtgtagccttc

SEQ ID NO: 5519746 - DNA, 25 bp, Homo sapien
acatggaagaagccgtattgcagat

SEQ ID NO: 5519747 - DNA, 25 bp, Homo sapien
catccagccctgtgcccaatgtcac

SEQ ID NO: 5519748 - DNA, 25 bp, Homo sapien
ttttacacaaggtggtttgaggcag

SEQ ID NO: 5519749 - DNA, 25 bp, Homo sapien
ctctcaaacagcacaccatccagcc

SEQ ID NO: 5519750 - DNA, 25 bp, Homo sapien
aatggagaagcagaaactgccctaa

SEQ ID NO: 5519751 - DNA, 25 bp, Homo sapien
ccttaacagggcactgacccaaatc

SEQ ID NO: 5519752 - DNA, 25 bp, Homo sapien
atgtcaccaggcaatctgtgggatc

SEQ ID NO: 5519753 - DNA, 25 bp, Homo sapien
ggcagcaggcacctacctcttcccc

SEQ ID NO: 5519754 - DNA, 25 bp, Homo sapien
ggatctgaggaggtccttagcctcc

SEQ ID NO: 5519755 - DNA, 25 bp, Homo sapien
ggctagatttgtactgggcaaggcc

SEQ ID NO: 5519756 - DNA, 25 bp, Homo sapien
taagactccccggaattggaagata

SEQ ID NO: 5519757 - DNA, 25 bp, Homo sapien
aatatcaggtgcttcagagtttttc

SEQ ID NO: 5519758 - DNA, 25 bp, Homo sapien
tatggggctcccaagaatatcttcc

SEQ ID NO: 5519759 - DNA, 25 bp, Homo sapien
ctacagtactgaggttgtcacacac

SEQ ID NO: 5519760 - DNA, 25 bp, Homo sapien
tccagctctgttcaaggtcaagttt

SEQ ID NO: 5519761 - DNA, 25 bp, Homo sapien
ttttctgaagttgtgcttaggattt

SEQ ID NO: 5519762 - DNA, 25 bp, Homo sapien
cgcccacacccacaccttggtcccc

SEQ ID NO: 5519763 - DNA, 25 bp, Homo sapien
ttggtccccacatcaagcagctcct

SEQ ID NO: 5519764 - DNA, 25 bp, Homo sapien
actaggatacattccgcccacaccc

SEQ ID NO: 5519765 - DNA, 25 bp, Homo sapien
ttcggtaactgaggtagaatatggg

SEQ ID NO: 5519766 - DNA, 25 bp, Homo sapien
tacaaaagagattaggttcccaatc

SEQ ID NO: 5519767 - DNA, 25 bp, Homo sapien
cacagcaggaagacatccgctatca

SEQ ID NO: 5519768 - DNA, 25 bp, Homo sapien
cttggaaaagtctcagcagtcatat

SEQ ID NO: 5519769 - DNA, 25 bp, Homo sapien
ctctctaaaaagccttcttgcctcc

SEQ ID NO: 5519770 - DNA, 25 bp, Homo sapien
ttgcctccttggtgcagtaagcagc

SEQ ID NO: 5519771 - DNA, 25 bp, Homo sapien
ttggtgcagtaagcagcatgtcttg

SEQ ID NO: 5519772 - DNA, 25 bp, Homo sapien
gcaaaatgactgtcttggaagcagg

SEQ ID NO: 5519773 - DNA, 25 bp, Homo sapien
cacaatccacaaagaaagaggggtg

SEQ ID NO: 5519774 - DNA, 25 bp, Homo sapien
tatatactatgataagctctgcttc

SEQ ID NO: 5519775 - DNA, 25 bp, Homo sapien
agcagcatgtcttgtaaaaagccta

SEQ ID NO: 5519776 - DNA, 25 bp, Homo sapien
gtggacctaagtgacagggtactaa

SEQ ID NO: 5519777 - DNA, 25 bp, Homo sapien
ttggggaaacggttatcatgcaaaa

SEQ ID NO: 5519778 - DNA, 25 bp, Homo sapien
gtgacagggtactaaacatatatac

SEQ ID NO: 5519779 - DNA, 25 bp, Homo sapien
ctggtgtacagtatttgtctatccc

SEQ ID NO: 5519780 - DNA, 25 bp, Homo sapien
tgattacttttggccctaactcatc

SEQ ID NO: 5519781 - DNA, 25 bp, Homo sapien
ttgaagaaaactgacacatttataa

SEQ ID NO: 5519782 - DNA, 25 bp, Homo sapien
cagaacattttgatcactcctccca

SEQ ID NO: 5519783 - DNA, 25 bp, Homo sapien
acagaaatcccaattggaatcttag

SEQ ID NO: 5519784 - DNA, 25 bp, Homo sapien
tttccccagggactgcaacatcatc

SEQ ID NO: 5519785 - DNA, 25 bp, Homo sapien
tcccaaactccataggcattgactt

SEQ ID NO: 5519786 - DNA, 25 bp, Homo sapien
tgtgtgaatttggttttgatctccc

SEQ ID NO: 5519787 - DNA, 25 bp, Homo sapien
ctccctattgagagactggtgtaca

SEQ ID NO: 5519788 - DNA, 25 bp, Homo sapien
ttaaaattgtgttgtctatggacca

SEQ ID NO: 5519789 - DNA, 25 bp, Homo sapien
cccagggactgcaacatcatctgtc

SEQ ID NO: 5519790 - DNA, 25 bp, Homo sapien
cactacactaggcagaacgcagaat

SEQ ID NO: 5519791 - DNA, 25 bp, Homo sapien
attctgcgttctgcctagtgtagtg

SEQ ID NO: 5519792 - DNA, 25 bp, Homo sapien
cttaaagggataagaggattttaca

SEQ ID NO: 5519793 - DNA, 25 bp, Homo sapien
gtgagtagaaattagaagccagcat

SEQ ID NO: 5519794 - DNA, 25 bp, Homo sapien
atttagtgcacacgtagaaagggga

SEQ ID NO: 5519795 - DNA, 25 bp, Homo sapien
ctacaagaaagttccactagcattc

SEQ ID NO: 5519796 - DNA, 25 bp, Homo sapien
tccagaaagcaatatgtttagcagc

SEQ ID NO: 5519797 - DNA, 25 bp, Homo sapien
tactatcaaaggagctccaaccatc

SEQ ID NO: 5519798 - DNA, 25 bp, Homo sapien
gaagaaacgcttttggatgttggta

SEQ ID NO: 5519799 - DNA, 25 bp, Homo sapien
tgctcacgagttagttcaaatacat

SEQ ID NO: 5519800 - DNA, 25 bp, Homo sapien
caaccatctggtatgtctggaagac

SEQ ID NO: 5519801 - DNA, 25 bp, Homo sapien
gacatgaaagcctaaaccggcctta

SEQ ID NO: 5519802 - DNA, 25 bp, Homo sapien
ttcaaccagctagtgacaaattatc

SEQ ID NO: 5519803 - DNA, 25 bp, Homo sapien
aaacattcccacctaactcacctaa

SEQ ID NO: 5519804 - DNA, 25 bp, Homo sapien
ttaggtgagttaggtgggaatgttt

SEQ ID NO: 5519805 - DNA, 25 bp, Homo sapien
cacgccaggctacacatggaaatac

SEQ ID NO: 5519806 - DNA, 25 bp, Homo sapien
aatactttctcacacgccaggctac

SEQ ID NO: 5519807 - DNA, 25 bp, Homo sapien
actccttgaagggcaaaagtgatgt

SEQ ID NO: 5519808 - DNA, 25 bp, Homo sapien
ttcacctgaaccatgaaactggcat

SEQ ID NO: 5519809 - DNA, 25 bp, Homo sapien
aggggaatgatcacagactttcacc

SEQ ID NO: 5519810 - DNA, 25 bp, Homo sapien
gcctggtagaactgggtctatgttc

SEQ ID NO: 5519811 - DNA, 25 bp, Homo sapien
cgcggcaactccttgaagggcaaaa

SEQ ID NO: 5519812 - DNA, 25 bp, Homo sapien
ggaaatactgtaagcaaagcccaaa

SEQ ID NO: 5519813 - DNA, 25 bp, Homo sapien
gcagttacactgccggtagttatgt

SEQ ID NO: 5519814 - DNA, 25 bp, Homo sapien
agcccaaagcagccctgtctggtgt

SEQ ID NO: 5519815 - DNA, 25 bp, Homo sapien
gttcccaacactggccttgcctggt

SEQ ID NO: 5519816 - DNA, 25 bp, Homo sapien
ggagcaggaaaccaggtaaattgct

SEQ ID NO: 5519817 - DNA, 25 bp, Homo sapien
attgtttaatgggaagaggttgcaa

SEQ ID NO: 5519818 - DNA, 25 bp, Homo sapien
aaattcagggaactcttttgctgca

SEQ ID NO: 5519819 - DNA, 25 bp, Homo sapien
catggacttgacagcctaattgttc

SEQ ID NO: 5519820 - DNA, 25 bp, Homo sapien
ttgctgcaatttacactccccaatc

SEQ ID NO: 5519821 - DNA, 25 bp, Homo sapien
attatgtcaacatctaggttcctat

SEQ ID NO: 5519822 - DNA, 25 bp, Homo sapien
gctgtagtggtttatttatggtctt

SEQ ID NO: 5519823 - DNA, 25 bp, Homo sapien
attgcttaccaaacacccctcttcc

SEQ ID NO: 5519824 - DNA, 25 bp, Homo sapien
ttcatcccaaaactcaagcctgctt

SEQ ID NO: 5519825 - DNA, 25 bp, Homo sapien
ctgtagacttcttcatggacttgac

SEQ ID NO: 5519826 - DNA, 25 bp, Homo sapien
tcaagcctgcttttctgtagacttc

SEQ ID NO: 5519827 - DNA, 25 bp, Homo sapien
acaacaggcactcagcaattacagc

SEQ ID NO: 5519828 - DNA, 25 bp, Homo sapien
tgtagaacaaattgtaagaggacaa

SEQ ID NO: 5519829 - DNA, 25 bp, Homo sapien
tgagaggtgcaccaagtgacttttt

SEQ ID NO: 5519830 - DNA, 25 bp, Homo sapien
agagtgcaagtggtcaatgaccatt

SEQ ID NO: 5519831 - DNA, 25 bp, Homo sapien
acagagcaaatcaaagcaggtaaat

SEQ ID NO: 5519832 - DNA, 25 bp, Homo sapien
tgtctgttgattcaggggcagagag

SEQ ID NO: 5519833 - DNA, 25 bp, Homo sapien
ctctgagtcattgccaaggtcccag

SEQ ID NO: 5519834 - DNA, 25 bp, Homo sapien
tcataacgaggtctggttagcagtc

SEQ ID NO: 5519835 - DNA, 25 bp, Homo sapien
aggagggctaacaacacactttcaa

SEQ ID NO: 5519836 - DNA, 25 bp, Homo sapien
aagaatacaaaagaactgaccagtt

SEQ ID NO: 5519837 - DNA, 25 bp, Homo sapien
attacagctgcaggaaaaatacaga

SEQ ID NO: 5519838 - DNA, 25 bp, Homo sapien
gtctggacgtcccaagcaagaaccc

SEQ ID NO: 5519839 - DNA, 25 bp, Homo sapien
gggttcttgcttgggacgtccagac

SEQ ID NO: 5519840 - DNA, 25 bp, Homo sapien
ggcagcaggaaatactttgttcccg

SEQ ID NO: 5519841 - DNA, 25 bp, Homo sapien
gcatcccaaagagttaaggcagcag

SEQ ID NO: 5519842 - DNA, 25 bp, Homo sapien
atcagaataacatgggaaacctgct

SEQ ID NO: 5519843 - DNA, 25 bp, Homo sapien
atgcagtttccagcagacttggttt

SEQ ID NO: 5519844 - DNA, 25 bp, Homo sapien
tattcctgtgtagaaaagccccttc

SEQ ID NO: 5519845 - DNA, 25 bp, Homo sapien
cagtaggaactgtacagatgattgg

SEQ ID NO: 5519846 - DNA, 25 bp, Homo sapien
ttttaacaagcattccaaggattct

SEQ ID NO: 5519847 - DNA, 25 bp, Homo sapien
gggaaacctgctgaaatgcagtttc

SEQ ID NO: 5519848 - DNA, 25 bp, Homo sapien
gatgcagatcgtatcctgaccacac

SEQ ID NO: 5519849 - DNA, 25 bp, Homo sapien
tacagatgattggtagtggctctca

SEQ ID NO: 5519850 - DNA, 25 bp, Homo sapien
ataccttgtaggaaatgaagttatt

SEQ ID NO: 5519851 - DNA, 25 bp, Homo sapien
aagctatacacacaaaatgaaatcc

SEQ ID NO: 5519852 - DNA, 25 bp, Homo sapien
aatgagaatgtgtatctccaggaat

SEQ ID NO: 5519853 - DNA, 25 bp, Homo sapien
atggaagtgcatgcttttaacctta

SEQ ID NO: 5519854 - DNA, 25 bp, Homo sapien
aaatgttctcagtgactggcattgc

SEQ ID NO: 5519855 - DNA, 25 bp, Homo sapien
cagtttagaaagatatcaacagctt

SEQ ID NO: 5519856 - DNA, 25 bp, Homo sapien
attaaggtattgaattcactgggtt

SEQ ID NO: 5519857 - DNA, 25 bp, Homo sapien
tgaattcactgggttttagaaggct

SEQ ID NO: 5519858 - DNA, 25 bp, Homo sapien
caacagcttggaaatataaaaacct

SEQ ID NO: 5519859 - DNA, 25 bp, Homo sapien
aaaagatgcatctagaagaataatt

SEQ ID NO: 5519860 - DNA, 25 bp, Homo sapien
actctccccaaaagcaagtatgcat

SEQ ID NO: 5519861 - DNA, 25 bp, Homo sapien
ccctcaaaaggtttccaacagaagc

SEQ ID NO: 5519862 - DNA, 25 bp, Homo sapien
gtgatgacgcagccgtccctgtcac

SEQ ID NO: 5519863 - DNA, 25 bp, Homo sapien
gtgaccccatggaagtgagttttgg

SEQ ID NO: 5519864 - DNA, 25 bp, Homo sapien
ccttgcgtgcatgcccacgaaaggc

SEQ ID NO: 5519865 - DNA, 25 bp, Homo sapien
gtcaccctcggggtcgtccttgagc

SEQ ID NO: 5519866 - DNA, 25 bp, Homo sapien
cagttagctggagcttccgagtgag

SEQ ID NO: 5519867 - DNA, 25 bp, Homo sapien
agggtgtggaagatcctacagttag

SEQ ID NO: 5519868 - DNA, 25 bp, Homo sapien
tcaagctgaagccttagggtgtgga

SEQ ID NO: 5519869 - DNA, 25 bp, Homo sapien
ctttggtatggaatgaagctctatc

SEQ ID NO: 5519870 - DNA, 25 bp, Homo sapien
gggtgtataggcacatggtgtgata

SEQ ID NO: 5519871 - DNA, 25 bp, Homo sapien
cacacccctacaggaggacctttgt

SEQ ID NO: 5519872 - DNA, 25 bp, Homo sapien
tcccagccctaagtggccatggcac

SEQ ID NO: 5519873 - DNA, 25 bp, Homo sapien
tggtgcttcccagaccctgtggagc

SEQ ID NO: 5519874 - DNA, 25 bp, Homo sapien
tttggcacaagttctatcactcctt

SEQ ID NO: 5519875 - DNA, 25 bp, Homo sapien
cgggggcgtccagccctacctatag

SEQ ID NO: 5519876 - DNA, 25 bp, Homo sapien
ttactatgctagacacataatagac

SEQ ID NO: 5519877 - DNA, 25 bp, Homo sapien
gtgcttcccagaccctgtggagcct

SEQ ID NO: 5519878 - DNA, 25 bp, Homo sapien
cttctggtcatggggttagaagaca

SEQ ID NO: 5519879 - DNA, 25 bp, Homo sapien
tgtggagcctcccagcaccaacttg

SEQ ID NO: 5519880 - DNA, 25 bp, Homo sapien
attaaaatctgggcatttatatgca

SEQ ID NO: 5519881 - DNA, 25 bp, Homo sapien
tttatatgcaatttagagccatttt

SEQ ID NO: 5519882 - DNA, 25 bp, Homo sapien
ccctacctatagaagggccgagcac

SEQ ID NO: 5519883 - DNA, 25 bp, Homo sapien
tcttgcttctggtcatggggttaga

SEQ ID NO: 5519884 - DNA, 25 bp, Homo sapien
acaaataatggcacaaggatagggt

SEQ ID NO: 5519885 - DNA, 25 bp, Homo sapien
gcagtggaaggcagatataaataca

SEQ ID NO: 5519886 - DNA, 25 bp, Homo sapien
ttactaaattggcagcagtggaagg

SEQ ID NO: 5519887 - DNA, 25 bp, Homo sapien
acctggagggttaacattttctgct

SEQ ID NO: 5519888 - DNA, 25 bp, Homo sapien
gagacgggtcaaatgtaaaaatatc

SEQ ID NO: 5519889 - DNA, 25 bp, Homo sapien
acaaggatagggtgtgctacttttg

SEQ ID NO: 5519890 - DNA, 25 bp, Homo sapien
agcagcaaatacaaaagttcgagtg

SEQ ID NO: 5519891 - DNA, 25 bp, Homo sapien
gatgacaactgggggttctattcct

SEQ ID NO: 5519892 - DNA, 25 bp, Homo sapien
attgtcgattgtataggagatgctt

SEQ ID NO: 5519893 - DNA, 25 bp, Homo sapien
ctgtggtgtctaaaaaagctgatga

SEQ ID NO: 5519894 - DNA, 25 bp, Homo sapien
tgtgcttaagaaagaaacctggagg

SEQ ID NO: 5519895 - DNA, 25 bp, Homo sapien
tcctcctctgcataaggggctgtca

SEQ ID NO: 5519896 - DNA, 25 bp, Homo sapien
tggggggtttgatgcttcctgcatc

SEQ ID NO: 5519897 - DNA, 25 bp, Homo sapien
ggggccagcctcgactcaccccagc

SEQ ID NO: 5519898 - DNA, 25 bp, Homo sapien
agtggtctccagcgttcagggagca

SEQ ID NO: 5519899 - DNA, 25 bp, Homo sapien
ccctcccactcggggcttctctttc

SEQ ID NO: 5519900 - DNA, 25 bp, Homo sapien
ctttcctcctctgcataaggggctg

SEQ ID NO: 5519901 - DNA, 25 bp, Homo sapien
cctcgactcaccccagctgtgtcac

SEQ ID NO: 5519902 - DNA, 25 bp, Homo sapien
tcccactcggggcttctctttcctc

SEQ ID NO: 5519903 - DNA, 25 bp, Homo sapien
ggacaaaccagggcatctaagctgt

SEQ ID NO: 5519904 - DNA, 25 bp, Homo sapien
ccgacagtggtctccagcgttcagg

SEQ ID NO: 5519905 - DNA, 25 bp, Homo sapien
caaaccagggcatctaagctgtgct

SEQ ID NO: 5519906 - DNA, 25 bp, Homo sapien
acttgcaggcttgagacccttgggt

SEQ ID NO: 5519907 - DNA, 25 bp, Homo sapien
cgacccctgactgggaggaattttc

SEQ ID NO: 5519908 - DNA, 25 bp, Homo sapien
tgtggggttaattgctgcattgccc

SEQ ID NO: 5519909 - DNA, 25 bp, Homo sapien
gctgatcctgtgaagtggactgtac

SEQ ID NO: 5519910 - DNA, 25 bp, Homo sapien
ttgggtcccccgtcctgcactggac

SEQ ID NO: 5519911 - DNA, 25 bp, Homo sapien
tcttgtaggtctctgggatcatttc

SEQ ID NO: 5519912 - DNA, 25 bp, Homo sapien
gtgggtaggtcgcttcgtgtcttta

SEQ ID NO: 5519913 - DNA, 25 bp, Homo sapien
ttttctaacgaggtgagacagaaga

SEQ ID NO: 5519914 - DNA, 25 bp, Homo sapien
ccaaggaaagcttaactcccagtgc

SEQ ID NO: 5519915 - DNA, 25 bp, Homo sapien
tgaggagagccttcagtttcaactc

SEQ ID NO: 5519916 - DNA, 25 bp, Homo sapien
aactacagaaaacgatgtggggtta

SEQ ID NO: 5519917 - DNA, 25 bp, Homo sapien
caggaaacaccagaaaaagtgatgg

SEQ ID NO: 5519918 - DNA, 25 bp, Homo sapien
ttggaatcacaaaagcacaggaaac

SEQ ID NO: 5519919 - DNA, 25 bp, Homo sapien
ttaggttccagtagtaagcagccct

SEQ ID NO: 5519920 - DNA, 25 bp, Homo sapien
ttctgtggtacaaatggatcatctt

SEQ ID NO: 5519921 - DNA, 25 bp, Homo sapien
tcacttagaagtcacagctgtgtgt

SEQ ID NO: 5519922 - DNA, 25 bp, Homo sapien
cagctgtgtgtgagattctaggctt

SEQ ID NO: 5519923 - DNA, 25 bp, Homo sapien
ttaaaagtcaggctgtgtgtgattc

SEQ ID NO: 5519924 - DNA, 25 bp, Homo sapien
aggctgtgtgtgattctgtgactat

SEQ ID NO: 5519925 - DNA, 25 bp, Homo sapien
gactatttaaggacatgagggagaa

SEQ ID NO: 5519926 - DNA, 25 bp, Homo sapien
aaaagtgatggtacaaacaacaggt

SEQ ID NO: 5519927 - DNA, 25 bp, Homo sapien
aacttatgaacagacttggaatcac

SEQ ID NO: 5519928 - DNA, 25 bp, Homo sapien
tgctgcccaacctgctggagcacga

SEQ ID NO: 5519929 - DNA, 25 bp, Homo sapien
aggtcttcctctgctcgctcttcgc

SEQ ID NO: 5519930 - DNA, 25 bp, Homo sapien
tgctcgctcttcgcgcccgtctgcc

SEQ ID NO: 5519931 - DNA, 25 bp, Homo sapien
tggaccggcccatctacccgtgtcg

SEQ ID NO: 5519932 - DNA, 25 bp, Homo sapien
gcgagtacgactacgtgagcttcca

SEQ ID NO: 5519933 - DNA, 25 bp, Homo sapien
agccacctcagtgcgtggacatccc

SEQ ID NO: 5519934 - DNA, 25 bp, Homo sapien
tacgtgagcttccagtcggacatcg

SEQ ID NO: 5519935 - DNA, 25 bp, Homo sapien
ggcccgagatgcttaagtgtgacaa

SEQ ID NO: 5519936 - DNA, 25 bp, Homo sapien
ggcccatctacccgtgtcgctggct

SEQ ID NO: 5519937 - DNA, 25 bp, Homo sapien
cgggcgcttctacaccaagccacct

SEQ ID NO: 5519938 - DNA, 25 bp, Homo sapien
ttcggcttctactggcccgagatgc

SEQ ID NO: 5519939 - DNA, 25 bp, Homo sapien
tgaaagatgaataagccacgctctt

SEQ ID NO: 5519940 - DNA, 25 bp, Homo sapien
aggcaggatgtgattgtgccacctg

SEQ ID NO: 5519941 - DNA, 25 bp, Homo sapien
agatgggactctggttttgtgtgga

SEQ ID NO: 5519942 - DNA, 25 bp, Homo sapien
ctgaactctgcatgtgtgtactttt

SEQ ID NO: 5519943 - DNA, 25 bp, Homo sapien
tgtgggccagaagttttaggcagga

SEQ ID NO: 5519944 - DNA, 25 bp, Homo sapien
ccctaaagaaaccttgaagtgcagg

SEQ ID NO: 5519945 - DNA, 25 bp, Homo sapien
ctgtcaggtcagagtaattaatcat

SEQ ID NO: 5519946 - DNA, 25 bp, Homo sapien
aggttttggtgttaagcagagaaag

SEQ ID NO: 5519947 - DNA, 25 bp, Homo sapien
tttcagagcaccagcatatagtctc

SEQ ID NO: 5519948 - DNA, 25 bp, Homo sapien
gttacagatgacagagttgggtaga

SEQ ID NO: 5519949 - DNA, 25 bp, Homo sapien
caagagagttatcactggttgttac

SEQ ID NO: 5519950 - DNA, 25 bp, Homo sapien
tgttacagcttagcacaaggcatcc

SEQ ID NO: 5519951 - DNA, 25 bp, Homo sapien
caaggcatccaacacaaacaggcat

SEQ ID NO: 5519952 - DNA, 25 bp, Homo sapien
ttaaagcaagcagctgtatacagac

SEQ ID NO: 5519953 - DNA, 25 bp, Homo sapien
catccaggtgcttcaaatgtcgtgc

SEQ ID NO: 5519954 - DNA, 25 bp, Homo sapien
ttattttagacatgcaaggaaagct

SEQ ID NO: 5519955 - DNA, 25 bp, Homo sapien
gtgagaatgttaagaatggaaaatc

SEQ ID NO: 5519956 - DNA, 25 bp, Homo sapien
tgaataatatattgtggggcaggag

SEQ ID NO: 5519957 - DNA, 25 bp, Homo sapien
atgtcgtgcattacagtgagaatgt

SEQ ID NO: 5519958 - DNA, 25 bp, Homo sapien
ttcccacctgattgatagcacatcc

SEQ ID NO: 5519959 - DNA, 25 bp, Homo sapien
aaacaggcatgagacaatgcatatt

SEQ ID NO: 5519960 - DNA, 25 bp, Homo sapien
cagacagcaaaagaagcaacatttt

SEQ ID NO: 5519961 - DNA, 25 bp, Homo sapien
gcacaaggcgctttcaaccgctgac

SEQ ID NO: 5519962 - DNA, 25 bp, Homo sapien
gtcagcggttgaaagcgccttgtgc

SEQ ID NO: 5519963 - DNA, 25 bp, Homo sapien
ttgagactgcataaaaaacgtactg

SEQ ID NO: 5519964 - DNA, 25 bp, Homo sapien
gacagtagtacaataacctgtgccc

SEQ ID NO: 5519965 - DNA, 25 bp, Homo sapien
caatcacttatccaaggtggggttt

SEQ ID NO: 5519966 - DNA, 25 bp, Homo sapien
aggtaacaaatgggatatgggttga

SEQ ID NO: 5519967 - DNA, 25 bp, Homo sapien
tggaaagtatctgtgatgaagcttc

SEQ ID NO: 5519968 - DNA, 25 bp, Homo sapien
atagcaagtacgatttgacagtagt

SEQ ID NO: 5519969 - DNA, 25 bp, Homo sapien
tacagagtaaagcgaaaataactgc

SEQ ID NO: 5519970 - DNA, 25 bp, Homo sapien
gggatatgggttgagactgcataaa

SEQ ID NO: 5519971 - DNA, 25 bp, Homo sapien
gagaaactggaaagtatctgtgatg

SEQ ID NO: 5519972 - DNA, 25 bp, Homo sapien
gtactgctggttgaatatctgaggt

SEQ ID NO: 5519973 - DNA, 25 bp, Homo sapien
tctgaggtaaatgatgttcaatcaa

SEQ ID NO: 5519974 - DNA, 25 bp, Homo sapien
ctatgaacctcacaaactacgaact

SEQ ID NO: 5519975 - DNA, 25 bp, Homo sapien
agttcgtagtttgtgaggttcatag

SEQ ID NO: 5519976 - DNA, 25 bp, Homo sapien
atccgagacttccggtctagcgcgg

SEQ ID NO: 5519977 - DNA, 25 bp, Homo sapien
ttcctcaatgggtctccgcagaaca

SEQ ID NO: 5519978 - DNA, 25 bp, Homo sapien
caacctcatcccaggctcgcgtgcg

SEQ ID NO: 5519979 - DNA, 25 bp, Homo sapien
tggacaaagtcatagtgctgtggac

SEQ ID NO: 5519980 - DNA, 25 bp, Homo sapien
aggaggtgttcgtacccttcagcgc

SEQ ID NO: 5519981 - DNA, 25 bp, Homo sapien
gctgcgcaccattgagctcggtctg

SEQ ID NO: 5519982 - DNA, 25 bp, Homo sapien
ttccaggcctcaacgacacagccga

SEQ ID NO: 5519983 - DNA, 25 bp, Homo sapien
aacgacctcgtgttcgatggctggg

SEQ ID NO: 5519984 - DNA, 25 bp, Homo sapien
ggacatctcgtcgctgaacctggcc

SEQ ID NO: 5519985 - DNA, 25 bp, Homo sapien
gaattcatcgcggccaaccagagcg

SEQ ID NO: 5519986 - DNA, 25 bp, Homo sapien
ggagcgcttctgtgaggtgattcca

SEQ ID NO: 5519987 - DNA, 25 bp, Homo sapien
acctaaaagtgagtgagaaaagatt

SEQ ID NO: 5519988 - DNA, 25 bp, Homo sapien
gtaaggagaatagcatatagaacct

SEQ ID NO: 5519989 - DNA, 25 bp, Homo sapien
tggaagcaacgattaagcaaaacta

SEQ ID NO: 5519990 - DNA, 25 bp, Homo sapien
tagtacccaaatcctagggttgctc

SEQ ID NO: 5519991 - DNA, 25 bp, Homo sapien
gaaaattatcaagctggaaaagtat

SEQ ID NO: 5519992 - DNA, 25 bp, Homo sapien
gcaaaggacttattagcacagtgtg

SEQ ID NO: 5519993 - DNA, 25 bp, Homo sapien
ccaaggtagagttgtcatttacttc

SEQ ID NO: 5519994 - DNA, 25 bp, Homo sapien
gcacagtgtgtgagacttaaatcaa

SEQ ID NO: 5519995 - DNA, 25 bp, Homo sapien
taagaatcatattggaagcaacgat

SEQ ID NO: 5519996 - DNA, 25 bp, Homo sapien
tagggttgctctagaatccaataat

SEQ ID NO: 5519997 - DNA, 25 bp, Homo sapien
ttaacgttacgtaaggagaatagca

SEQ ID NO: 5519998 - DNA, 25 bp, Homo sapien
gcacttgcctggcggtgtctgtgat

SEQ ID NO: 5519999 - DNA, 25 bp, Homo sapien
cacctgctcacccacactgtctccc

SEQ ID NO: 5520000 - DNA, 25 bp, Homo sapien
catgaagcccctggtctaatgctcc

SEQ ID NO: 5520001 - DNA, 25 bp, Homo sapien
ggccccaggctcctgtagctcctgc

SEQ ID NO: 5520002 - DNA, 25 bp, Homo sapien
actgtctccctatctcccatgccac

SEQ ID NO: 5520003 - DNA, 25 bp, Homo sapien
gctggttgcaaagccagggctttct

SEQ ID NO: 5520004 - DNA, 25 bp, Homo sapien
atttgggcaccgtggtgctcctgtg

SEQ ID NO: 5520005 - DNA, 25 bp, Homo sapien
atgctccaagacccatttgggcacc

SEQ ID NO: 5520006 - DNA, 25 bp, Homo sapien
cacaccaggcactctgctgcttggc

SEQ ID NO: 5520007 - DNA, 25 bp, Homo sapien
cttcctgagacaggtaggtagaagc

SEQ ID NO: 5520008 - DNA, 25 bp, Homo sapien
aggtgcaaggctcaggcacttcctg

SEQ ID NO: 5520009 - DNA, 25 bp, Homo sapien
tcctactaagtgttgcgaccagctc

SEQ ID NO: 5520010 - DNA, 25 bp, Homo sapien
ccacagggctgtgacaccatagtta

SEQ ID NO: 5520011 - DNA, 25 bp, Homo sapien
caatgacagcttgcctgggtatgcc

SEQ ID NO: 5520012 - DNA, 25 bp, Homo sapien
atagaaagatcgttaacatgtttgc

SEQ ID NO: 5520013 - DNA, 25 bp, Homo sapien
taacacagatgccaagtcggtgctg

SEQ ID NO: 5520014 - DNA, 25 bp, Homo sapien
atcccaaatggaaaggccctgtaaa

SEQ ID NO: 5520015 - DNA, 25 bp, Homo sapien
aaagtcattagcagtcataacgtac

SEQ ID NO: 5520016 - DNA, 25 bp, Homo sapien
aaatacctgcaagaatgtccacatc

SEQ ID NO: 5520017 - DNA, 25 bp, Homo sapien
gtcggtgctgtgagattttctttct

SEQ ID NO: 5520018 - DNA, 25 bp, Homo sapien
ggtgatttggaccagtttgtctccc

SEQ ID NO: 5520019 - DNA, 25 bp, Homo sapien
atataaaggccccactagtccaggt

SEQ ID NO: 5520020 - DNA, 25 bp, Homo sapien
ggggttgtagctgccagcagcatgg

SEQ ID NO: 5520021 - DNA, 25 bp, Homo sapien
tgggatcctgtgagacagcaatgca

SEQ ID NO: 5520022 - DNA, 25 bp, Homo sapien
ctgcagtcgcaggccctgaaatgca

SEQ ID NO: 5520023 - DNA, 25 bp, Homo sapien
aataactttgtcatccggcggaacc

SEQ ID NO: 5520024 - DNA, 25 bp, Homo sapien
ggacaccgaagaaaccatcacgtac

SEQ ID NO: 5520025 - DNA, 25 bp, Homo sapien
tacacgcaatgcactgacggatatg

SEQ ID NO: 5520026 - DNA, 25 bp, Homo sapien
tgtgtcaaccactatggaggatacc

SEQ ID NO: 5520027 - DNA, 25 bp, Homo sapien
cagacgcttgtaaaggtggaatgaa

SEQ ID NO: 5520028 - DNA, 25 bp, Homo sapien
aactatgctgactctggcgctggtc

SEQ ID NO: 5520029 - DNA, 25 bp, Homo sapien
gcatggcaaccagtggagtgttgcc

SEQ ID NO: 5520030 - DNA, 25 bp, Homo sapien
tgaaatgcagactggccgaaataac

SEQ ID NO: 5520031 - DNA, 25 bp, Homo sapien
ctgcccatcagagctctgcggaagg

SEQ ID NO: 5520032 - DNA, 25 bp, Homo sapien
agctggagaaaggttattccccgtg

SEQ ID NO: 5520033 - DNA, 25 bp, Homo sapien
ggttcccagaaggactcaactgacc

SEQ ID NO: 5520034 - DNA, 25 bp, Homo sapien
gtgtgcccaagcaggatgctcaaaa

SEQ ID NO: 5520035 - DNA, 25 bp, Homo sapien
agcgaggacacactcagacaaaact

SEQ ID NO: 5520036 - DNA, 25 bp, Homo sapien
cagtcccacccaaaggttagccgtg

SEQ ID NO: 5520037 - DNA, 25 bp, Homo sapien
caaattagacaatgaacagcgagga

SEQ ID NO: 5520038 - DNA, 25 bp, Homo sapien
actgaagcttaaacccagcagcagc

SEQ ID NO: 5520039 - DNA, 25 bp, Homo sapien
gcagaagtttctggtgctgggaaga

SEQ ID NO: 5520040 - DNA, 25 bp, Homo sapien
ctgcggaaggctcccttgttccctg

SEQ ID NO: 5520041 - DNA, 25 bp, Homo sapien
aatggggtatagacaacaccaagct

SEQ ID NO: 5520042 - DNA, 25 bp, Homo sapien
ctgtatgtgaaaacctctgagtgac

SEQ ID NO: 5520043 - DNA, 25 bp, Homo sapien
gtaaagcaacaaattgcccattaac

SEQ ID NO: 5520044 - DNA, 25 bp, Homo sapien
acgatatgacattacaaagtgaccc

SEQ ID NO: 5520045 - DNA, 25 bp, Homo sapien
agatacaagatgtctgaataactcc

SEQ ID NO: 5520046 - DNA, 25 bp, Homo sapien
cacacgcactgcagcaaggttaatc

SEQ ID NO: 5520047 - DNA, 25 bp, Homo sapien
ttttatagctttaatgcggtccatc

SEQ ID NO: 5520048 - DNA, 25 bp, Homo sapien
ttggctacaagaataatgatcatat

SEQ ID NO: 5520049 - DNA, 25 bp, Homo sapien
caatgaaattgtagttacagcatct

SEQ ID NO: 5520050 - DNA, 25 bp, Homo sapien
atcaacagcaacgatatgacattac

SEQ ID NO: 5520051 - DNA, 25 bp, Homo sapien
tgtatatacacccagatagcacagg

SEQ ID NO: 5520052 - DNA, 25 bp, Homo sapien
atcactgagtgaaaaaaatctggct

SEQ ID NO: 5520053 - DNA, 25 bp, Homo sapien
gggcagttggtggttttgccatccc

SEQ ID NO: 5520054 - DNA, 25 bp, Homo sapien
tcccctcagggacctcaagctgttg

SEQ ID NO: 5520055 - DNA, 25 bp, Homo sapien
gaggttggcacgcatcccatctcca

SEQ ID NO: 5520056 - DNA, 25 bp, Homo sapien
ctaaggtaccccaagactcactttc

SEQ ID NO: 5520057 - DNA, 25 bp, Homo sapien
gtgagttgcattagggcttgccact

SEQ ID NO: 5520058 - DNA, 25 bp, Homo sapien
cacctaagcaccaggatgagggtga

SEQ ID NO: 5520059 - DNA, 25 bp, Homo sapien
cagactagccaaggcctaaggtacc

SEQ ID NO: 5520060 - DNA, 25 bp, Homo sapien
gatttatttgaggggctgttgtagg

SEQ ID NO: 5520061 - DNA, 25 bp, Homo sapien
ggccttgatgacctgagttggcatc

SEQ ID NO: 5520062 - DNA, 25 bp, Homo sapien
ctcttctggcaccaaggaagaccag

SEQ ID NO: 5520063 - DNA, 25 bp, Homo sapien
agggtcctgtggtagtgccctcttc

SEQ ID NO: 5520064 - DNA, 25 bp, Homo sapien
tttgtcagcttgtcgtcaagggagg

SEQ ID NO: 5520065 - DNA, 25 bp, Homo sapien
cttttttcgccttcggggcttcaga

SEQ ID NO: 5520066 - DNA, 25 bp, Homo sapien
ttcgccttcggggcttcagactcag

SEQ ID NO: 5520067 - DNA, 25 bp, Homo sapien
atccggctctggtgttttgaggagg

SEQ ID NO: 5520068 - DNA, 25 bp, Homo sapien
actccgatctccgccgtctccgcca

SEQ ID NO: 5520069 - DNA, 25 bp, Homo sapien
ccggactccgatctccgccgtctcc

SEQ ID NO: 5520070 - DNA, 25 bp, Homo sapien
gtcctcttctgcaaggtccggctgc

SEQ ID NO: 5520071 - DNA, 25 bp, Homo sapien
gggatccggctctggtgttttgagg

SEQ ID NO: 5520072 - DNA, 25 bp, Homo sapien
tcagggaactcgctcatggctttct

SEQ ID NO: 5520073 - DNA, 25 bp, Homo sapien
gagctgactgcggttcccttcgtga

SEQ ID NO: 5520074 - DNA, 25 bp, Homo sapien
atctccgccgtctccgccaccatca

SEQ ID NO: 5520075 - DNA, 25 bp, Homo sapien
aggaactcaagagcagactacctca

SEQ ID NO: 5520076 - DNA, 25 bp, Homo sapien
agagagagtttttacagggtgctac

SEQ ID NO: 5520077 - DNA, 25 bp, Homo sapien
cctcaccaagtgtcatctaccggcc

SEQ ID NO: 5520078 - DNA, 25 bp, Homo sapien
cttggtgtgtatgaatcaggaactc

SEQ ID NO: 5520079 - DNA, 25 bp, Homo sapien
agaggctttcaaaagtgcgagatca

SEQ ID NO: 5520080 - DNA, 25 bp, Homo sapien
aaaagggctatgaacgattaaaaga

SEQ ID NO: 5520081 - DNA, 25 bp, Homo sapien
cttgcgatggcagtgatgatatttt

SEQ ID NO: 5520082 - DNA, 25 bp, Homo sapien
aggacaactataatgcagagagaga

SEQ ID NO: 5520083 - DNA, 25 bp, Homo sapien
aagaactcgcaaaagctcagaggga

SEQ ID NO: 5520084 - DNA, 25 bp, Homo sapien
gggtgctactataacagaggcttgc

SEQ ID NO: 5520085 - DNA, 25 bp, Homo sapien
ttgggttgagtactgatagtctgtc

SEQ ID NO: 5520086 - DNA, 25 bp, Homo sapien
gatagtacaatgaacatctgtcgac

SEQ ID NO: 5520087 - DNA, 25 bp, Homo sapien
attcagtggcagacactgtggtaat

SEQ ID NO: 5520088 - DNA, 25 bp, Homo sapien
acctagagtcaccaagtgttgtcat

SEQ ID NO: 5520089 - DNA, 25 bp, Homo sapien
catagccacagtacaaatgtctcac

SEQ ID NO: 5520090 - DNA, 25 bp, Homo sapien
gagaccccccgcttctataacgcac

SEQ ID NO: 5520091 - DNA, 25 bp, Homo sapien
cacagcaaagccacattgatagtac

SEQ ID NO: 5520092 - DNA, 25 bp, Homo sapien
aacgcacttaaaaaagctggccatg

SEQ ID NO: 5520093 - DNA, 25 bp, Homo sapien
tatccttctccccgccacccaactc

SEQ ID NO: 5520094 - DNA, 25 bp, Homo sapien
ctgtcgaccagtcacctagagtcac

SEQ ID NO: 5520095 - DNA, 25 bp, Homo sapien
ttttaagaatgcaattaccaaacat

SEQ ID NO: 5520096 - DNA, 25 bp, Homo sapien
tcaaacccacagcaaagccacattg

SEQ ID NO: 5520097 - DNA, 25 bp, Homo sapien
tccactagctaagacgtcgagtgcc

SEQ ID NO: 5520098 - DNA, 25 bp, Homo sapien
aaatcaggagtgaccacaaagcctg

SEQ ID NO: 5520099 - DNA, 25 bp, Homo sapien
tgctccaaggattgagacccaagtc

SEQ ID NO: 5520100 - DNA, 25 bp, Homo sapien
ggattttgtggtgcctgagatggcc

SEQ ID NO: 5520101 - DNA, 25 bp, Homo sapien
tgcccgagttaaaactgcaggccac

SEQ ID NO: 5520102 - DNA, 25 bp, Homo sapien
gcgagataaaagtccacggtgtcaa

SEQ ID NO: 5520103 - DNA, 25 bp, Homo sapien
agctgtatgtgtgaggaatttggtg

SEQ ID NO: 5520104 - DNA, 25 bp, Homo sapien
cttccagccgaggtttggacaaagt

SEQ ID NO: 5520105 - DNA, 25 bp, Homo sapien
cttagagagagaactgtgcttccaa

SEQ ID NO: 5520106 - DNA, 25 bp, Homo sapien
cctaaaacatgggtgaccgtacatt

SEQ ID NO: 5520107 - DNA, 25 bp, Homo sapien
agaactggcacaattggtttgggtc

SEQ ID NO: 5520108 - DNA, 25 bp, Homo sapien
tcccactaacaatcctgcaacataa

SEQ ID NO: 5520109 - DNA, 25 bp, Homo sapien
ttatgttgcaggattgttagtggga

SEQ ID NO: 5520110 - DNA, 25 bp, Homo sapien
cccccacaacgaggatgtggggtgg

SEQ ID NO: 5520111 - DNA, 25 bp, Homo sapien
ttgacaacaaacagacaaaggagag

SEQ ID NO: 5520112 - DNA, 25 bp, Homo sapien
cagatgtctttattggggctcgagc

SEQ ID NO: 5520113 - DNA, 25 bp, Homo sapien
tgcccaaggcttcccttctcggacc

SEQ ID NO: 5520114 - DNA, 25 bp, Homo sapien
gggtcacctggcctctgctattgca

SEQ ID NO: 5520115 - DNA, 25 bp, Homo sapien
agatgggcagacagatcctttccct

SEQ ID NO: 5520116 - DNA, 25 bp, Homo sapien
aggaagtacagtattgcaactggtc

SEQ ID NO: 5520117 - DNA, 25 bp, Homo sapien
ggggacagctttagaaaaggactga

SEQ ID NO: 5520118 - DNA, 25 bp, Homo sapien
ggccactgaccaggaagtacagtat

SEQ ID NO: 5520119 - DNA, 25 bp, Homo sapien
tttagaaaaggactgaccaacacca

SEQ ID NO: 5520120 - DNA, 25 bp, Homo sapien
tattgcacgcatcctctggccactg

SEQ ID NO: 5520121 - DNA, 25 bp, Homo sapien
caaagcaattgagtaagcatttttc

SEQ ID NO: 5520122 - DNA, 25 bp, Homo sapien
agctaatatgacaaggctttgttgt

SEQ ID NO: 5520123 - DNA, 25 bp, Homo sapien
aaatgatattgtgataagaaagaaa

SEQ ID NO: 5520124 - DNA, 25 bp, Homo sapien
gaaatagcaacatggctcttgcacc

SEQ ID NO: 5520125 - DNA, 25 bp, Homo sapien
ttgaatttctgtggaaaaggataaa

SEQ ID NO: 5520126 - DNA, 25 bp, Homo sapien
acccaggccagacagttgttgctta

SEQ ID NO: 5520127 - DNA, 25 bp, Homo sapien
gcaaagagcttattaggctaatgtt

SEQ ID NO: 5520128 - DNA, 25 bp, Homo sapien
aaagaaacaccaagcaactgacctg

SEQ ID NO: 5520129 - DNA, 25 bp, Homo sapien
accatagcagtagcaaagagcttat

SEQ ID NO: 5520130 - DNA, 25 bp, Homo sapien
ggtgctacagctacatgaatgaatg

SEQ ID NO: 5520131 - DNA, 25 bp, Homo sapien
gatgccagcaaattggtgctacagc

SEQ ID NO: 5520132 - DNA, 25 bp, Homo sapien
tacccaggctgtagaaatcccagat

SEQ ID NO: 5520133 - DNA, 25 bp, Homo sapien
cacccgcctcagagtgcttgtcctg

SEQ ID NO: 5520134 - DNA, 25 bp, Homo sapien
aatctcccagaagccttggtgtggc

SEQ ID NO: 5520135 - DNA, 25 bp, Homo sapien
ctgaacttccacccggtcatgggcc

SEQ ID NO: 5520136 - DNA, 25 bp, Homo sapien
tgtcagcctagtccaaagagcaatg

SEQ ID NO: 5520137 - DNA, 25 bp, Homo sapien
tggaatcagagtgtaaaaccccctc

SEQ ID NO: 5520138 - DNA, 25 bp, Homo sapien
tacatgtgtgtgaaacctgggtgaa

SEQ ID NO: 5520139 - DNA, 25 bp, Homo sapien
aaataaccttgcacagggtccttcc

SEQ ID NO: 5520140 - DNA, 25 bp, Homo sapien
ttgaagcagacaccaaaactgaact

SEQ ID NO: 5520141 - DNA, 25 bp, Homo sapien
atccaggagtgtgttagatactaac

SEQ ID NO: 5520142 - DNA, 25 bp, Homo sapien
gctcttctgctgtggctttaggggc

SEQ ID NO: 5520143 - DNA, 25 bp, Homo sapien
agaaaaaagttgtaacatgaaattg

SEQ ID NO: 5520144 - DNA, 25 bp, Homo sapien
agtaaatcaaaatcttgacctctca

SEQ ID NO: 5520145 - DNA, 25 bp, Homo sapien
catgaaattgacttgttttgcttgg

SEQ ID NO: 5520146 - DNA, 25 bp, Homo sapien
acttacacttcaaagattgtgcagc

SEQ ID NO: 5520147 - DNA, 25 bp, Homo sapien
ccaaccctcaggccaaacaagataa

SEQ ID NO: 5520148 - DNA, 25 bp, Homo sapien
caaagattgtgcagctgacaactcc

SEQ ID NO: 5520149 - DNA, 25 bp, Homo sapien
gacttgttttgcttggaaataagat

SEQ ID NO: 5520150 - DNA, 25 bp, Homo sapien
gattgtgcagctgacaactccccca

SEQ ID NO: 5520151 - DNA, 25 bp, Homo sapien
tcaggccaaacaagataaaaagaaa

SEQ ID NO: 5520152 - DNA, 25 bp, Homo sapien
acacttcaaagattgtgcagctgac

SEQ ID NO: 5520153 - DNA, 25 bp, Homo sapien
gtgcagctgacaactcccccaaatc

SEQ ID NO: 5520154 - DNA, 25 bp, Homo sapien
agaaaaaagtggacacccctccatc

SEQ ID NO: 5520155 - DNA, 25 bp, Homo sapien
tgtgaacctgtagcctaccaaggac

SEQ ID NO: 5520156 - DNA, 25 bp, Homo sapien
ccttggaggccttgatttgaagctg

SEQ ID NO: 5520157 - DNA, 25 bp, Homo sapien
gactcacgtcgcttaaagaccagtt

SEQ ID NO: 5520158 - DNA, 25 bp, Homo sapien
cagcgactcatgcttcctggcttgc

SEQ ID NO: 5520159 - DNA, 25 bp, Homo sapien
tccactgcaccggagcacctttgtt

SEQ ID NO: 5520160 - DNA, 25 bp, Homo sapien
ccctccatcaccaattcagcgactc

SEQ ID NO: 5520161 - DNA, 25 bp, Homo sapien
ccgttgtgaacactgctccagaagc

SEQ ID NO: 5520162 - DNA, 25 bp, Homo sapien
gacagtaaaaacattcccgttgtga

SEQ ID NO: 5520163 - DNA, 25 bp, Homo sapien
aaactgtgatgtaagagaataaaat

SEQ ID NO: 5520164 - DNA, 25 bp, Homo sapien
tgcactcctgtgcttgcgacactaa

SEQ ID NO: 5520165 - DNA, 25 bp, Homo sapien
agatgtccaggatgctaagcttgtc

SEQ ID NO: 5520166 - DNA, 25 bp, Homo sapien
tgtcccaacagccatagcctcggtc

SEQ ID NO: 5520167 - DNA, 25 bp, Homo sapien
acagctgcataaaggtagaatgtta

SEQ ID NO: 5520168 - DNA, 25 bp, Homo sapien
atagcctcggtctgctcaggccaat

SEQ ID NO: 5520169 - DNA, 25 bp, Homo sapien
gtgaggttctttgacaagatgtcca

SEQ ID NO: 5520170 - DNA, 25 bp, Homo sapien
tccagctcccaggaccctgatggct

SEQ ID NO: 5520171 - DNA, 25 bp, Homo sapien
ggccaatcagaatgctgtgagcacc

SEQ ID NO: 5520172 - DNA, 25 bp, Homo sapien
taaacctaagcctgccagcaccacc

SEQ ID NO: 5520173 - DNA, 25 bp, Homo sapien
taggaatgtgatgtattcaaacgcc

SEQ ID NO: 5520174 - DNA, 25 bp, Homo sapien
accatgttggagagacctgtttgtt

SEQ ID NO: 5520175 - DNA, 25 bp, Homo sapien
ggaccctgatggctcagggagcaac

SEQ ID NO: 5520176 - DNA, 25 bp, Homo sapien
ggctgtgaggtactgcaagccctat

SEQ ID NO: 5520177 - DNA, 25 bp, Homo sapien
taggaaggcccattgtgatcatctg

SEQ ID NO: 5520178 - DNA, 25 bp, Homo sapien
cagccaagcctcagcaaagatatgc

SEQ ID NO: 5520179 - DNA, 25 bp, Homo sapien
aggaactgccccaggtctcaatcaa

SEQ ID NO: 5520180 - DNA, 25 bp, Homo sapien
cagaccaggagctctaatgttcaca

SEQ ID NO: 5520181 - DNA, 25 bp, Homo sapien
gagaccagtcagcagctctggctct

SEQ ID NO: 5520182 - DNA, 25 bp, Homo sapien
gctccatagggccctgccacctctg

SEQ ID NO: 5520183 - DNA, 25 bp, Homo sapien
aggcaaagaggataactcctaacac

SEQ ID NO: 5520184 - DNA, 25 bp, Homo sapien
atggccacagcctgacatcaatccc

SEQ ID NO: 5520185 - DNA, 25 bp, Homo sapien
ctatcataagcccctcagccaagcc

SEQ ID NO: 5520186 - DNA, 25 bp, Homo sapien
accagctaatgcgtactgggtaccc

SEQ ID NO: 5520187 - DNA, 25 bp, Homo sapien
gtcgctcacacactgggattcccac

SEQ ID NO: 5520188 - DNA, 25 bp, Homo sapien
ggtggcagacattagtgcccagctg

SEQ ID NO: 5520189 - DNA, 25 bp, Homo sapien
cccagaggccaccatcaaaagggag

SEQ ID NO: 5520190 - DNA, 25 bp, Homo sapien
gtggtccataaagaaagacagatac

SEQ ID NO: 5520191 - DNA, 25 bp, Homo sapien
gcacacgactcacttaggcctgggc

SEQ ID NO: 5520192 - DNA, 25 bp, Homo sapien
tcgctggaccccaggtcagatagca

SEQ ID NO: 5520193 - DNA, 25 bp, Homo sapien
cactgtaacatagtcggtggcagac

SEQ ID NO: 5520194 - DNA, 25 bp, Homo sapien
gatttaacccaggcagtccaagagg

SEQ ID NO: 5520195 - DNA, 25 bp, Homo sapien
attgtaagtcaatagaagaaggcct

SEQ ID NO: 5520196 - DNA, 25 bp, Homo sapien
tgtcccaaggactctgcccgagtac

SEQ ID NO: 5520197 - DNA, 25 bp, Homo sapien
atacttggatgcaaccaccagggga

SEQ ID NO: 5520198 - DNA, 25 bp, Homo sapien
ctcagaacagtaagtgaaatggaac

SEQ ID NO: 5520199 - DNA, 25 bp, Homo sapien
cacagaaccttgaaaccctcctcag

SEQ ID NO: 5520200 - DNA, 25 bp, Homo sapien
aggttgttagggattctggaatatg

SEQ ID NO: 5520201 - DNA, 25 bp, Homo sapien
aagtgaaatggaacagatctttccc

SEQ ID NO: 5520202 - DNA, 25 bp, Homo sapien
tgtaaatgtgcaaaaggctagctta

SEQ ID NO: 5520203 - DNA, 25 bp, Homo sapien
atttagtacaggttgttagggattc

SEQ ID NO: 5520204 - DNA, 25 bp, Homo sapien
tatgttctacagacaggtaaatcct

SEQ ID NO: 5520205 - DNA, 25 bp, Homo sapien
ccccaagaaaacaaagccttgttgc

SEQ ID NO: 5520206 - DNA, 25 bp, Homo sapien
caaaacataaataagacagcatagt

SEQ ID NO: 5520207 - DNA, 25 bp, Homo sapien
attcaagaagaaacatgtcaatgta

SEQ ID NO: 5520208 - DNA, 25 bp, Homo sapien
agatatgctgcaacagtccaaattc

SEQ ID NO: 5520209 - DNA, 25 bp, Homo sapien
gggacgagctttggaagcttggtca

SEQ ID NO: 5520210 - DNA, 25 bp, Homo sapien
taaacagtagaaatcaaaggaagtc

SEQ ID NO: 5520211 - DNA, 25 bp, Homo sapien
agcacagaccacaagcacgtcacaa

SEQ ID NO: 5520212 - DNA, 25 bp, Homo sapien
tgtggtatgcaacaaaacccaggcc

SEQ ID NO: 5520213 - DNA, 25 bp, Homo sapien
agcgggaaagcttcagtcccagctc

SEQ ID NO: 5520214 - DNA, 25 bp, Homo sapien
cagcaggaatgaaatagcaccaaga

SEQ ID NO: 5520215 - DNA, 25 bp, Homo sapien
agaggtgtgcgctacatgttacata

SEQ ID NO: 5520216 - DNA, 25 bp, Homo sapien
ctgcttttgcaggcagggaaacagc

SEQ ID NO: 5520217 - DNA, 25 bp, Homo sapien
tatagaatgagactggctgagtttt

SEQ ID NO: 5520218 - DNA, 25 bp, Homo sapien
gtacgtttgggatatagaatgagac

SEQ ID NO: 5520219 - DNA, 25 bp, Homo sapien
aacccaggccacaaaatcgtaatta

SEQ ID NO: 5520220 - DNA, 25 bp, Homo sapien
aaagacttcccattccagtgtggcc

SEQ ID NO: 5520221 - DNA, 25 bp, Homo sapien
agtgtggcctgcatccctcacctct

SEQ ID NO: 5520222 - DNA, 25 bp, Homo sapien
gccagggtctctcagtgtactactc

SEQ ID NO: 5520223 - DNA, 25 bp, Homo sapien
acaggttagtggtacaaagtcacag

SEQ ID NO: 5520224 - DNA, 25 bp, Homo sapien
gggtggccattgctgatctgggtta

SEQ ID NO: 5520225 - DNA, 25 bp, Homo sapien
cacacccaggtttgaaccacaggtt

SEQ ID NO: 5520226 - DNA, 25 bp, Homo sapien
ctcctagagatgtagtctgggaagg

SEQ ID NO: 5520227 - DNA, 25 bp, Homo sapien
cttggacagtcttccagcagaagag

SEQ ID NO: 5520228 - DNA, 25 bp, Homo sapien
cagtaaaaatgtggaaccaatttgc

SEQ ID NO: 5520229 - DNA, 25 bp, Homo sapien
accagctcaagaaaccccaagactt

SEQ ID NO: 5520230 - DNA, 25 bp, Homo sapien
gtgtactactccaaacaggcctctc

SEQ ID NO: 5520231 - DNA, 25 bp, Homo sapien
actgtccaggtgtaaagcatggatt

SEQ ID NO: 5520232 - DNA, 25 bp, Homo sapien
ggagaatgtattcaaacgtgcaatc

SEQ ID NO: 5520233 - DNA, 25 bp, Homo sapien
acccctttggtgtctgagctagcag

SEQ ID NO: 5520234 - DNA, 25 bp, Homo sapien
tgccaatgactgtggcgtcaggcag

SEQ ID NO: 5520235 - DNA, 25 bp, Homo sapien
ccgaacaacctcagtcttgggagaa

SEQ ID NO: 5520236 - DNA, 25 bp, Homo sapien
acgtgcaatctctgaagtccctgtc

SEQ ID NO: 5520237 - DNA, 25 bp, Homo sapien
attggcgttgatgcagagacttaca

SEQ ID NO: 5520238 - DNA, 25 bp, Homo sapien
agagaggccctctgaatacacagta

SEQ ID NO: 5520239 - DNA, 25 bp, Homo sapien
ggtggcttttgggacaagtgaatta

SEQ ID NO: 5520240 - DNA, 25 bp, Homo sapien
gtgtctgagctagcagctgcagaga

SEQ ID NO: 5520241 - DNA, 25 bp, Homo sapien
ttgtgtgattggactacaggaatta

SEQ ID NO: 5520242 - DNA, 25 bp, Homo sapien
gctctgcaaaatacttctcccatcc

SEQ ID NO: 5520243 - DNA, 25 bp, Homo sapien
aagacattgaaaaacccctttgctc

SEQ ID NO: 5520244 - DNA, 25 bp, Homo sapien
gatacaacacagttaatggcatttc

SEQ ID NO: 5520245 - DNA, 25 bp, Homo sapien
ccagcacacagattgacttcctact

SEQ ID NO: 5520246 - DNA, 25 bp, Homo sapien
ttcaaggccttagtgagaatattat

SEQ ID NO: 5520247 - DNA, 25 bp, Homo sapien
taggatcctacctcatggcaggctt

SEQ ID NO: 5520248 - DNA, 25 bp, Homo sapien
ggacattgatagctctgcaaaatac

SEQ ID NO: 5520249 - DNA, 25 bp, Homo sapien
ttctgaaagcaaaagacattgaaaa

SEQ ID NO: 5520250 - DNA, 25 bp, Homo sapien
atcccaaaccctcaaactccttcca

SEQ ID NO: 5520251 - DNA, 25 bp, Homo sapien
ttccacataaccaacaaaaccagca

SEQ ID NO: 5520252 - DNA, 25 bp, Homo sapien
attttaaaccacgatacaacacagt

SEQ ID NO: 5520253 - DNA, 25 bp, Homo sapien
cccaaaagaggatcagtagtataat

SEQ ID NO: 5520254 - DNA, 25 bp, Homo sapien
gaaaccggaccaaaatgaagtctgc

SEQ ID NO: 5520255 - DNA, 25 bp, Homo sapien
acagctactcctggacactgatgcc

SEQ ID NO: 5520256 - DNA, 25 bp, Homo sapien
agtgctcaatgagagacagtacatc

SEQ ID NO: 5520257 - DNA, 25 bp, Homo sapien
tggaacaatgaataagtagtgaata

SEQ ID NO: 5520258 - DNA, 25 bp, Homo sapien
aagaaaacgagttgaacacacttaa

SEQ ID NO: 5520259 - DNA, 25 bp, Homo sapien
cactagatatgtgggaagaaaacga

SEQ ID NO: 5520260 - DNA, 25 bp, Homo sapien
cactgatgcccgaggcatgctgtgg

SEQ ID NO: 5520261 - DNA, 25 bp, Homo sapien
acccagcacaacccagacacaaatg

SEQ ID NO: 5520262 - DNA, 25 bp, Homo sapien
caggaatcaggaacctaccagagtg

SEQ ID NO: 5520263 - DNA, 25 bp, Homo sapien
atgaagtctgcgttagtaagtctag

SEQ ID NO: 5520264 - DNA, 25 bp, Homo sapien
tctgctgctcgattgtcatccactg

SEQ ID NO: 5520265 - DNA, 25 bp, Homo sapien
ctgaaatgacacaatacaagttctc

SEQ ID NO: 5520266 - DNA, 25 bp, Homo sapien
accaatgtaatgcaattagtgcttt

SEQ ID NO: 5520267 - DNA, 25 bp, Homo sapien
ctgagaaagtttagagtttggtttg

SEQ ID NO: 5520268 - DNA, 25 bp, Homo sapien
tgcttcacaaaacaataatggctat

SEQ ID NO: 5520269 - DNA, 25 bp, Homo sapien
caagtcatgactgatctcaagtgta

SEQ ID NO: 5520270 - DNA, 25 bp, Homo sapien
aaactgcagcattaaagggtaggca

SEQ ID NO: 5520271 - DNA, 25 bp, Homo sapien
ttaaagggtaggcacaccattcttc

SEQ ID NO: 5520272 - DNA, 25 bp, Homo sapien
ttacaatcttcaggtctcaggactt

SEQ ID NO: 5520273 - DNA, 25 bp, Homo sapien
catgaaattcaaaagggaccactag

SEQ ID NO: 5520274 - DNA, 25 bp, Homo sapien
aagggaccactagctaatttcaacc

SEQ ID NO: 5520275 - DNA, 25 bp, Homo sapien
aggcagccatacattctgtaagctc

SEQ ID NO: 5520276 - DNA, 25 bp, Homo sapien
ggacattacaaaggccattagattt

SEQ ID NO: 5520277 - DNA, 25 bp, Homo sapien
tagtccaggacgtgctcctagtatc

SEQ ID NO: 5520278 - DNA, 25 bp, Homo sapien
gattctaactgcaatgctgtgccat

SEQ ID NO: 5520279 - DNA, 25 bp, Homo sapien
cctccgtgaaatgacagaggacatt

SEQ ID NO: 5520280 - DNA, 25 bp, Homo sapien
acttctgactccagcagcaactacc

SEQ ID NO: 5520281 - DNA, 25 bp, Homo sapien
tcaaaggaagctataaggttgttgc

SEQ ID NO: 5520282 - DNA, 25 bp, Homo sapien
gcaccatacgtgaggataaaaaact

SEQ ID NO: 5520283 - DNA, 25 bp, Homo sapien
cccaaatccagtatagcctagcacc

SEQ ID NO: 5520284 - DNA, 25 bp, Homo sapien
cagagactattacttaggcagccat

SEQ ID NO: 5520285 - DNA, 25 bp, Homo sapien
gccatctgttgaagaaagaaatcac

SEQ ID NO: 5520286 - DNA, 25 bp, Homo sapien
tgcccgtgccatcagtcctacaaaa

SEQ ID NO: 5520287 - DNA, 25 bp, Homo sapien
aagtggtaacaactgccttttcttc

SEQ ID NO: 5520288 - DNA, 25 bp, Homo sapien
ataagcaaagcattaaccaatactc

SEQ ID NO: 5520289 - DNA, 25 bp, Homo sapien
aaggtaatgagagctgatacaatcc

SEQ ID NO: 5520290 - DNA, 25 bp, Homo sapien
ctctccaccacaatctgccaccagt

SEQ ID NO: 5520291 - DNA, 25 bp, Homo sapien
ctatgtgcaggtgtcagaaattact

SEQ ID NO: 5520292 - DNA, 25 bp, Homo sapien
gccaccagtgcccttacagtaatct

SEQ ID NO: 5520293 - DNA, 25 bp, Homo sapien
tttgaatggtgaaaagtggtaacaa

SEQ ID NO: 5520294 - DNA, 25 bp, Homo sapien
ttgcttctgcatgaacacgttttac

SEQ ID NO: 5520295 - DNA, 25 bp, Homo sapien
tcttaaatgtgattctgcccgtgcc

SEQ ID NO: 5520296 - DNA, 25 bp, Homo sapien
tctaagagacaagcccattttttga

SEQ ID NO: 5520297 - DNA, 25 bp, Homo sapien
ccaggatgaaacataagggttagtt

SEQ ID NO: 5520298 - DNA, 25 bp, Homo sapien
aaaaacacttgggatagggtgtgtg

SEQ ID NO: 5520299 - DNA, 25 bp, Homo sapien
tggctgtggactctaccatgctcct

SEQ ID NO: 5520300 - DNA, 25 bp, Homo sapien
gtgtacatcatggggccaggatgaa

SEQ ID NO: 5520301 - DNA, 25 bp, Homo sapien
agaaacacaggcatcatggtttgtc

SEQ ID NO: 5520302 - DNA, 25 bp, Homo sapien
gtgcaaagtacaaaggatctcccag

SEQ ID NO: 5520303 - DNA, 25 bp, Homo sapien
tgtgtgtgtgaactgtgcaaagtac

SEQ ID NO: 5520304 - DNA, 25 bp, Homo sapien
gtcggctgagcctgttttgaagtgc

SEQ ID NO: 5520305 - DNA, 25 bp, Homo sapien
tcttaaccgccaaacatgtgtaccc

SEQ ID NO: 5520306 - DNA, 25 bp, Homo sapien
gtgtaccctttgaggcaagatggcc

SEQ ID NO: 5520307 - DNA, 25 bp, Homo sapien
tgttttgaagtgcccggcctggcat

SEQ ID NO: 5520308 - DNA, 25 bp, Homo sapien
gtggtaaatacatgcagtggaatat

SEQ ID NO: 5520309 - DNA, 25 bp, Homo sapien
gtatggattttattagagacttctt

SEQ ID NO: 5520310 - DNA, 25 bp, Homo sapien
cccaaacgtccaccaacagatgaat

SEQ ID NO: 5520311 - DNA, 25 bp, Homo sapien
aaatggcaggaaatcctatcacatt

SEQ ID NO: 5520312 - DNA, 25 bp, Homo sapien
ctatagttgggttgttgtaaaatcc

SEQ ID NO: 5520313 - DNA, 25 bp, Homo sapien
tttatatgaggtatctaaagtagtg

SEQ ID NO: 5520314 - DNA, 25 bp, Homo sapien
tggaggcaacccaaacgtccaccaa

SEQ ID NO: 5520315 - DNA, 25 bp, Homo sapien
agcttagaaggaacaacaataatac

SEQ ID NO: 5520316 - DNA, 25 bp, Homo sapien
cagccttaaaatggcaggaaatcct

SEQ ID NO: 5520317 - DNA, 25 bp, Homo sapien
tttaatgggtatagagtcccagatt

SEQ ID NO: 5520318 - DNA, 25 bp, Homo sapien
tatagagtcccagatttgccagatg

SEQ ID NO: 5520319 - DNA, 25 bp, Homo sapien
tgctcatacaccttaagtactcccc

SEQ ID NO: 5520320 - DNA, 25 bp, Homo sapien
tctgtatacaacagttctggagtga

SEQ ID NO: 5520321 - DNA, 25 bp, Homo sapien
cattgaccctgaagctggaatgagg

SEQ ID NO: 5520322 - DNA, 25 bp, Homo sapien
tgcaccttggaaaacttaatcgttc

SEQ ID NO: 5520323 - DNA, 25 bp, Homo sapien
tgttgatacaattttcagggcacaa

SEQ ID NO: 5520324 - DNA, 25 bp, Homo sapien
cgttcccatggtaacacagagactc

SEQ ID NO: 5520325 - DNA, 25 bp, Homo sapien
ggagtgacctggataacaatttgtt

SEQ ID NO: 5520326 - DNA, 25 bp, Homo sapien
gttctctgggtaatgagagtcactc

SEQ ID NO: 5520327 - DNA, 25 bp, Homo sapien
cacagagactcttgcctaccacttc

SEQ ID NO: 5520328 - DNA, 25 bp, Homo sapien
cactctgtacagatagtaggtatgt

SEQ ID NO: 5520329 - DNA, 25 bp, Homo sapien
ctctgagctagtaagtcattgaccc

SEQ ID NO: 5520330 - DNA, 25 bp, Homo sapien
gaaacaaaccacctcagaataaaca

SEQ ID NO: 5520331 - DNA, 25 bp, Homo sapien
tacgctgtacataaagctgtcagac

SEQ ID NO: 5520332 - DNA, 25 bp, Homo sapien
gaaaaactgaggacattgtgagaac

SEQ ID NO: 5520333 - DNA, 25 bp, Homo sapien
gcacaggatatagaaggtgacctag

SEQ ID NO: 5520334 - DNA, 25 bp, Homo sapien
cgcagtacacacacaaatggccttg

SEQ ID NO: 5520335 - DNA, 25 bp, Homo sapien
tgctagaacaagatgtctaaagcca

SEQ ID NO: 5520336 - DNA, 25 bp, Homo sapien
tctaaagccaactagaaagcacagg

SEQ ID NO: 5520337 - DNA, 25 bp, Homo sapien
gggagagagctgctaccatcattgt

SEQ ID NO: 5520338 - DNA, 25 bp, Homo sapien
cagacaacctgaaaaactgaggaca

SEQ ID NO: 5520339 - DNA, 25 bp, Homo sapien
acaaatggccttgacagaaggagag

SEQ ID NO: 5520340 - DNA, 25 bp, Homo sapien
cacacacacctgccgcagtacacac

SEQ ID NO: 5520341 - DNA, 25 bp, Homo sapien
atccccttggctagagaattccctt

SEQ ID NO: 5520342 - DNA, 25 bp, Homo sapien
ttttgccggtatgcggatgagatga

SEQ ID NO: 5520343 - DNA, 25 bp, Homo sapien
tgaagccgtcctaccgcaatgccat

SEQ ID NO: 5520344 - DNA, 25 bp, Homo sapien
attgaaacgggcagcttcccctaca

SEQ ID NO: 5520345 - DNA, 25 bp, Homo sapien
ccgcaatgccatcaccgtacccttc

SEQ ID NO: 5520346 - DNA, 25 bp, Homo sapien
gccagaccatcgcgctgcctgcgca

SEQ ID NO: 5520347 - DNA, 25 bp, Homo sapien
agggataagctttatgagcgacgtg

SEQ ID NO: 5520348 - DNA, 25 bp, Homo sapien
gagggcacctccatcaccgtggact

SEQ ID NO: 5520349 - DNA, 25 bp, Homo sapien
gctgcaacaaatacggggtgtttct

SEQ ID NO: 5520350 - DNA, 25 bp, Homo sapien
accgtggactccaagcgcttcttct

SEQ ID NO: 5520351 - DNA, 25 bp, Homo sapien
tgaaagaaatccaggaacgacagag

SEQ ID NO: 5520352 - DNA, 25 bp, Homo sapien
gttgggccaggcattatcatatagc

SEQ ID NO: 5520353 - DNA, 25 bp, Homo sapien
tgatcttaagaaagctcaggggata

SEQ ID NO: 5520354 - DNA, 25 bp, Homo sapien
gggatagcaccagaagataaaggta

SEQ ID NO: 5520355 - DNA, 25 bp, Homo sapien
tgtaagacacagtattcatggtaaa

SEQ ID NO: 5520356 - DNA, 25 bp, Homo sapien
tgttcaacagacactacagaatgcc

SEQ ID NO: 5520357 - DNA, 25 bp, Homo sapien
tctggttagtctagtcgagagctca

SEQ ID NO: 5520358 - DNA, 25 bp, Homo sapien
tcaagttgaatgtggctataacctt

SEQ ID NO: 5520359 - DNA, 25 bp, Homo sapien
gagagctcagcattgtaagacacag

SEQ ID NO: 5520360 - DNA, 25 bp, Homo sapien
ccagaagataaaggtaagttggcag

SEQ ID NO: 5520361 - DNA, 25 bp, Homo sapien
gttggcagcttttgtagtgaaagtt

SEQ ID NO: 5520362 - DNA, 25 bp, Homo sapien
actacagaatgcctgctgttgggcc

SEQ ID NO: 5520363 - DNA, 25 bp, Homo sapien
cagccgattcctccagccctggtgc

SEQ ID NO: 5520364 - DNA, 25 bp, Homo sapien
cactctcgagttaaagatggggaaa

SEQ ID NO: 5520365 - DNA, 25 bp, Homo sapien
gtcctgacaccaggcaagaaaagcg

SEQ ID NO: 5520366 - DNA, 25 bp, Homo sapien
cctgccaaaaagtggctggaagagt

SEQ ID NO: 5520367 - DNA, 25 bp, Homo sapien
ctctccgaagtctgatccctgccaa

SEQ ID NO: 5520368 - DNA, 25 bp, Homo sapien
ccatgtgggctacagcatgtaccac

SEQ ID NO: 5520369 - DNA, 25 bp, Homo sapien
cgcagagaaatcggtgtctgacgat

SEQ ID NO: 5520370 - DNA, 25 bp, Homo sapien
agcagaattgacagttgaacagagc

SEQ ID NO: 5520371 - DNA, 25 bp, Homo sapien
ggcagagaggttaacagatttatct

SEQ ID NO: 5520372 - DNA, 25 bp, Homo sapien
gtggctggaagagtcccttagtact

SEQ ID NO: 5520373 - DNA, 25 bp, Homo sapien
gggactctacacggcccatgtgggc

SEQ ID NO: 5520374 - DNA, 25 bp, Homo sapien
tctcaaagcccattacagagtgcat

SEQ ID NO: 5520375 - DNA, 25 bp, Homo sapien
gtgaccaccgaatctgggtcgagtc

SEQ ID NO: 5520376 - DNA, 25 bp, Homo sapien
acactggtcaccatcgccaagagct

SEQ ID NO: 5520377 - DNA, 25 bp, Homo sapien
cctccatcctggagtggctgcgaag

SEQ ID NO: 5520378 - DNA, 25 bp, Homo sapien
agtccttcccacagcccggaggaga

SEQ ID NO: 5520379 - DNA, 25 bp, Homo sapien
tggaaggattactgcacactggtca

SEQ ID NO: 5520380 - DNA, 25 bp, Homo sapien
gcacaagtgcccctacagtggctgt

SEQ ID NO: 5520381 - DNA, 25 bp, Homo sapien
cgccaagagcttgttggacctgaac

SEQ ID NO: 5520382 - DNA, 25 bp, Homo sapien
acctgaacaagtaccgacccatcca

SEQ ID NO: 5520383 - DNA, 25 bp, Homo sapien
cgcctccgaaaagaggcacaagtgc

SEQ ID NO: 5520384 - DNA, 25 bp, Homo sapien
gacccatccagaccccctccgtgtg

SEQ ID NO: 5520385 - DNA, 25 bp, Homo sapien
caactccaagcgctacctgatcctc

SEQ ID NO: 5520386 - DNA, 25 bp, Homo sapien
tggacctgctgacctacacagacct

SEQ ID NO: 5520387 - DNA, 25 bp, Homo sapien
gtgagtcagtcaccctggacctgct

SEQ ID NO: 5520388 - DNA, 25 bp, Homo sapien
acaagacagggaacttcaaacagtt

SEQ ID NO: 5520389 - DNA, 25 bp, Homo sapien
ggcgagttcgatgctggcttcattg

SEQ ID NO: 5520390 - DNA, 25 bp, Homo sapien
tactccgtggagtttgacaggattc

SEQ ID NO: 5520391 - DNA, 25 bp, Homo sapien
ctggagtccctgcggaaccgcaaga

SEQ ID NO: 5520392 - DNA, 25 bp, Homo sapien
gcccctcccgtaccagggcaagcca

SEQ ID NO: 5520393 - DNA, 25 bp, Homo sapien
tcactcagagtagtgagtcagtcac

SEQ ID NO: 5520394 - DNA, 25 bp, Homo sapien
gtcatatgctggagtcagccctcac

SEQ ID NO: 5520395 - DNA, 25 bp, Homo sapien
tgcagggcatcatccggtcactgaa

SEQ ID NO: 5520396 - DNA, 25 bp, Homo sapien
ctgatacaggtaaggaaacagttgg

SEQ ID NO: 5520397 - DNA, 25 bp, Homo sapien
agaaaaagttggtgattgcattggg

SEQ ID NO: 5520398 - DNA, 25 bp, Homo sapien
gataaggcttttactgaccccactg

SEQ ID NO: 5520399 - DNA, 25 bp, Homo sapien
gtgtccttgtgatactgttgctctt

SEQ ID NO: 5520400 - DNA, 25 bp, Homo sapien
ttggtgattgcattgggaaattccc

SEQ ID NO: 5520401 - DNA, 25 bp, Homo sapien
cagggtattactggacctatgtggt

SEQ ID NO: 5520402 - DNA, 25 bp, Homo sapien
gattttgctgaataaagtaaagtct

SEQ ID NO: 5520403 - DNA, 25 bp, Homo sapien
ctatattagtggtctgaggaagagc

SEQ ID NO: 5520404 - DNA, 25 bp, Homo sapien
aactatggatggtctgataaggctt

SEQ ID NO: 5520405 - DNA, 25 bp, Homo sapien
tgacaaaatcaaaccagcattcccc

SEQ ID NO: 5520406 - DNA, 25 bp, Homo sapien
ttgtattctaaggagtgacgtattt

SEQ ID NO: 5520407 - DNA, 25 bp, Homo sapien
atctagttgatgaagttaaaatatt

SEQ ID NO: 5520408 - DNA, 25 bp, Homo sapien
gaggatgaagaaacttaattatact

SEQ ID NO: 5520409 - DNA, 25 bp, Homo sapien
aagttgacattgaggatgaagaaac

SEQ ID NO: 5520410 - DNA, 25 bp, Homo sapien
tactccagttatatgaaaccaaatt

SEQ ID NO: 5520411 - DNA, 25 bp, Homo sapien
taatcactattgtcagcttggttgc

SEQ ID NO: 5520412 - DNA, 25 bp, Homo sapien
ttgtcagcttggttgctacacattt

SEQ ID NO: 5520413 - DNA, 25 bp, Homo sapien
aatataaagttgacattgaggatga

SEQ ID NO: 5520414 - DNA, 25 bp, Homo sapien
aatggttagataaagtagaatttgt

SEQ ID NO: 5520415 - DNA, 25 bp, Homo sapien
gctactgaggagatacatctagttg

SEQ ID NO: 5520416 - DNA, 25 bp, Homo sapien
tggatgtaccagttactatgctact

SEQ ID NO: 5520417 - DNA, 25 bp, Homo sapien
gtatcaagtaactcggatttcagat

SEQ ID NO: 5520418 - DNA, 25 bp, Homo sapien
aaaaacaaacaggaagtacagcttc

SEQ ID NO: 5520419 - DNA, 25 bp, Homo sapien
aaagatacagacacaggaatctgct

SEQ ID NO: 5520420 - DNA, 25 bp, Homo sapien
acacacactggaaagatacagacac

SEQ ID NO: 5520421 - DNA, 25 bp, Homo sapien
tctctaaatgatggggtacatgaac

SEQ ID NO: 5520422 - DNA, 25 bp, Homo sapien
tagggcttattgacagcagaaatgt

SEQ ID NO: 5520423 - DNA, 25 bp, Homo sapien
tctggtgctcagaacactatggatt

SEQ ID NO: 5520424 - DNA, 25 bp, Homo sapien
ccacaagacatggtgcagtatctac

SEQ ID NO: 5520425 - DNA, 25 bp, Homo sapien
aatggcaaagtcttgactggggctt

SEQ ID NO: 5520426 - DNA, 25 bp, Homo sapien
atggggtacatgaactgtctgtttc

SEQ ID NO: 5520427 - DNA, 25 bp, Homo sapien
tccatggaaattcaaactgcatctc

SEQ ID NO: 5520428 - DNA, 25 bp, Homo sapien
aggaagagagcacttaagaaaaaaa

SEQ ID NO: 5520429 - DNA, 25 bp, Homo sapien
atcagaccatctagatcccactttc

SEQ ID NO: 5520430 - DNA, 25 bp, Homo sapien
gtcaatatttgacttggaccaggac

SEQ ID NO: 5520431 - DNA, 25 bp, Homo sapien
attgaacctgtctaaacccgtctcc

SEQ ID NO: 5520432 - DNA, 25 bp, Homo sapien
tatggtagatcactaggatcagacc

SEQ ID NO: 5520433 - DNA, 25 bp, Homo sapien
aaaggaccattagaaaaggccagtc

SEQ ID NO: 5520434 - DNA, 25 bp, Homo sapien
tactgtttgtgaggagtcaatattt

SEQ ID NO: 5520435 - DNA, 25 bp, Homo sapien
atgagctgacgtaaaactaagtaat

SEQ ID NO: 5520436 - DNA, 25 bp, Homo sapien
atcaatgatgatgaaatgagctgac

SEQ ID NO: 5520437 - DNA, 25 bp, Homo sapien
catgtaaagtggaatcaaaggcatc

SEQ ID NO: 5520438 - DNA, 25 bp, Homo sapien
cataggatggagataagtatttcac

SEQ ID NO: 5520439 - DNA, 25 bp, Homo sapien
ttcacggactgagattgttagtggg

SEQ ID NO: 5520440 - DNA, 25 bp, Homo sapien
ctgcaaacgtttacacaagaccctt

SEQ ID NO: 5520441 - DNA, 25 bp, Homo sapien
gagggatgatggattagtattaact

SEQ ID NO: 5520442 - DNA, 25 bp, Homo sapien
cttgcatgtaaagacaaaggttgtc

SEQ ID NO: 5520443 - DNA, 25 bp, Homo sapien
gggtcagcctgtcataattggatcc

SEQ ID NO: 5520444 - DNA, 25 bp, Homo sapien
caacataaaagcacaagagccagag

SEQ ID NO: 5520445 - DNA, 25 bp, Homo sapien
caagacccttgaatggagaacatgc

SEQ ID NO: 5520446 - DNA, 25 bp, Homo sapien
gctcgctttggggccaactcagagc

SEQ ID NO: 5520447 - DNA, 25 bp, Homo sapien
gagaagagttcagcatagctcgctt

SEQ ID NO: 5520448 - DNA, 25 bp, Homo sapien
tgggaaccaataacaggtctagagc

SEQ ID NO: 5520449 - DNA, 25 bp, Homo sapien
agcaagggtgaaccaatcctagctg

SEQ ID NO: 5520450 - DNA, 25 bp, Homo sapien
agaggtgagttctccaaagctgcac

SEQ ID NO: 5520451 - DNA, 25 bp, Homo sapien
acattttttggaaaggatggattta

SEQ ID NO: 5520452 - DNA, 25 bp, Homo sapien
aacctgatggtttgcatttgctgtt

SEQ ID NO: 5520453 - DNA, 25 bp, Homo sapien
tgcacctcccccataggcttgtttc

SEQ ID NO: 5520454 - DNA, 25 bp, Homo sapien
aattacactggacctaggcaaaacc

SEQ ID NO: 5520455 - DNA, 25 bp, Homo sapien
attcctggtaatacagctcagtgtc

SEQ ID NO: 5520456 - DNA, 25 bp, Homo sapien
atgtagaaggccatacctggaattt

SEQ ID NO: 5520457 - DNA, 25 bp, Homo sapien
ttatgtcagagcagttgggttttac

SEQ ID NO: 5520458 - DNA, 25 bp, Homo sapien
gatggatttagaggagagattctaa

SEQ ID NO: 5520459 - DNA, 25 bp, Homo sapien
aaaaccactgaagaacaagtgttcc

SEQ ID NO: 5520460 - DNA, 25 bp, Homo sapien
gctattaaatgtagaaggccatacc

SEQ ID NO: 5520461 - DNA, 25 bp, Homo sapien
acaggtagttttgggtcagttatat

SEQ ID NO: 5520462 - DNA, 25 bp, Homo sapien
gggtcactctagtccggcctcgaca

SEQ ID NO: 5520463 - DNA, 25 bp, Homo sapien
tgtcgaggccggactagagtgaccc

SEQ ID NO: 5520464 - DNA, 25 bp, Homo sapien
gaagctacgtaacagtcggatgcca

SEQ ID NO: 5520465 - DNA, 25 bp, Homo sapien
ttcaagaaggaaattgatcctagtg

SEQ ID NO: 5520466 - DNA, 25 bp, Homo sapien
actggtttatgccacatgaacagag

SEQ ID NO: 5520467 - DNA, 25 bp, Homo sapien
atgaacagagaatcacaagtttggt

SEQ ID NO: 5520468 - DNA, 25 bp, Homo sapien
gtcggatgccagttttggaagattc

SEQ ID NO: 5520469 - DNA, 25 bp, Homo sapien
tacatgttatgtacaaaactggttt

SEQ ID NO: 5520470 - DNA, 25 bp, Homo sapien
ttaatggacatgatgctgagattca

SEQ ID NO: 5520471 - DNA, 25 bp, Homo sapien
tgatcctagtgatttcagcccatgc

SEQ ID NO: 5520472 - DNA, 25 bp, Homo sapien
acatgaaacacctggctgtgaaaac

SEQ ID NO: 5520473 - DNA, 25 bp, Homo sapien
ggaagattcaccatgcgttctgacc

SEQ ID NO: 5520474 - DNA, 25 bp, Homo sapien
gaatgagaagaaagctgttctgtat

SEQ ID NO: 5520475 - DNA, 25 bp, Homo sapien
cccggtcccctgtagctagtgtcca

SEQ ID NO: 5520476 - DNA, 25 bp, Homo sapien
acaatcagtagactttgggtgtggc

SEQ ID NO: 5520477 - DNA, 25 bp, Homo sapien
ggtgaaggcttcccactttggtgac

SEQ ID NO: 5520478 - DNA, 25 bp, Homo sapien
ctttggtgacttgcatgtgcccctc

SEQ ID NO: 5520479 - DNA, 25 bp, Homo sapien
aaactgctagaccatgtgccaattc

SEQ ID NO: 5520480 - DNA, 25 bp, Homo sapien
ggccaggaatcaacgaactttggac

SEQ ID NO: 5520481 - DNA, 25 bp, Homo sapien
agttagagcgctgacctcccatctc

SEQ ID NO: 5520482 - DNA, 25 bp, Homo sapien
gcccagaatcctctgcccggtcccc

SEQ ID NO: 5520483 - DNA, 25 bp, Homo sapien
ctccactgagcccagttagagcgct

SEQ ID NO: 5520484 - DNA, 25 bp, Homo sapien
gtccagacactggtcacagacctcc

SEQ ID NO: 5520485 - DNA, 25 bp, Homo sapien
tgacttgtagccactaggaccctgt

SEQ ID NO: 5520486 - DNA, 25 bp, Homo sapien
ctttgaacctggtagtgagctcagc

SEQ ID NO: 5520487 - DNA, 25 bp, Homo sapien
tcaagtaccacaggatcggagaaaa

SEQ ID NO: 5520488 - DNA, 25 bp, Homo sapien
gaagacacactttggaaacacctat

SEQ ID NO: 5520489 - DNA, 25 bp, Homo sapien
gaggtgaagaaattgaagtccacag

SEQ ID NO: 5520490 - DNA, 25 bp, Homo sapien
aggagtacttgaaacctagagttgc

SEQ ID NO: 5520491 - DNA, 25 bp, Homo sapien
agttccagatagcaacagctgattg

SEQ ID NO: 5520492 - DNA, 25 bp, Homo sapien
ctcccaggctcccctggagggatgt

SEQ ID NO: 5520493 - DNA, 25 bp, Homo sapien
tgcgttttcacttgagaagacacac

SEQ ID NO: 5520494 - DNA, 25 bp, Homo sapien
aaagtgcagggtttttggatattca

SEQ ID NO: 5520495 - DNA, 25 bp, Homo sapien
acacacacaaaaggcaaacgatgat

SEQ ID NO: 5520496 - DNA, 25 bp, Homo sapien
ctacatgcttagactgggagagcag

SEQ ID NO: 5520497 - DNA, 25 bp, Homo sapien
tgacttccgaaccaagtttgagacg

SEQ ID NO: 5520498 - DNA, 25 bp, Homo sapien
acctgcgggacaagattcttggtgc

SEQ ID NO: 5520499 - DNA, 25 bp, Homo sapien
tggaggccgacatcaacggcctgcg

SEQ ID NO: 5520500 - DNA, 25 bp, Homo sapien
gcgggacaagattcttggtgccacc

SEQ ID NO: 5520501 - DNA, 25 bp, Homo sapien
actacagccactactacacgaccat

SEQ ID NO: 5520502 - DNA, 25 bp, Homo sapien
tacagccactactacacgaccatcc

SEQ ID NO: 5520503 - DNA, 25 bp, Homo sapien
gtgccaccattgagaactccaggat

SEQ ID NO: 5520504 - DNA, 25 bp, Homo sapien
ggccgacatcaacggcctgcgcagg

SEQ ID NO: 5520505 - DNA, 25 bp, Homo sapien
cttggtgccaccattgagaactcca

SEQ ID NO: 5520506 - DNA, 25 bp, Homo sapien
cactactacacgaccatccaggacc

SEQ ID NO: 5520507 - DNA, 25 bp, Homo sapien
ccgaaccaagtttgagacggaacag

SEQ ID NO: 5520508 - DNA, 25 bp, Homo sapien
taaatagtataggataggctgtatc

SEQ ID NO: 5520509 - DNA, 25 bp, Homo sapien
actatggattcttatgatgtacact

SEQ ID NO: 5520510 - DNA, 25 bp, Homo sapien
gtacacttcaccgggatcaggagaa

SEQ ID NO: 5520511 - DNA, 25 bp, Homo sapien
ccaccacattctgacataggaaaat

SEQ ID NO: 5520512 - DNA, 25 bp, Homo sapien
ttatgatgtacacttcaccgggatc

SEQ ID NO: 5520513 - DNA, 25 bp, Homo sapien
cttggtgcaatggtacttcaaagta

SEQ ID NO: 5520514 - DNA, 25 bp, Homo sapien
cataggaaaattttgtgtattggtt

SEQ ID NO: 5520515 - DNA, 25 bp, Homo sapien
taaataagcaggagcttagatctta

SEQ ID NO: 5520516 - DNA, 25 bp, Homo sapien
aaaaaaaatcgcaagcacaccaaat

SEQ ID NO: 5520517 - DNA, 25 bp, Homo sapien
agtgtgactatgaattcagtcagac

SEQ ID NO: 5520518 - DNA, 25 bp, Homo sapien
cagtcagacatcttggtgcaatggt

SEQ ID NO: 5520519 - DNA, 25 bp, Homo sapien
aaacacaatttgaagcagtaacaac

SEQ ID NO: 5520520 - DNA, 25 bp, Homo sapien
ccaatgaagctgttcttgatgtcac

SEQ ID NO: 5520521 - DNA, 25 bp, Homo sapien
accatatcagagcaataggcaagga

SEQ ID NO: 5520522 - DNA, 25 bp, Homo sapien
gtctccttggagaacaaaaaatata

SEQ ID NO: 5520523 - DNA, 25 bp, Homo sapien
ttatggctcaggtgactaaacacaa

SEQ ID NO: 5520524 - DNA, 25 bp, Homo sapien
tgaagcagtaacaacactcataagc

SEQ ID NO: 5520525 - DNA, 25 bp, Homo sapien
caaagaatatgccaatgaagctgtt

SEQ ID NO: 5520526 - DNA, 25 bp, Homo sapien
ccctactacaactgatttatggctc

SEQ ID NO: 5520527 - DNA, 25 bp, Homo sapien
gaggtggcaaactagataagtctcc

SEQ ID NO: 5520528 - DNA, 25 bp, Homo sapien
catctctaggaaccagtaaccaaaa

SEQ ID NO: 5520529 - DNA, 25 bp, Homo sapien
ggagggaaaaccatatcagagcaat

SEQ ID NO: 5520530 - DNA, 25 bp, Homo sapien
gaaaaccaaagagtaaggaatgtca

SEQ ID NO: 5520531 - DNA, 25 bp, Homo sapien
gaaaacaaaagaccactgtgatatt

SEQ ID NO: 5520532 - DNA, 25 bp, Homo sapien
ttactgatatacaaagaaagctgaa

SEQ ID NO: 5520533 - DNA, 25 bp, Homo sapien
gcacaagagaacaattcagacgtgg

SEQ ID NO: 5520534 - DNA, 25 bp, Homo sapien
taaaagcttaggtaacatgctatcc

SEQ ID NO: 5520535 - DNA, 25 bp, Homo sapien
tttgaacaatctagagaagtacata

SEQ ID NO: 5520536 - DNA, 25 bp, Homo sapien
gttttgtcagtaaggtgtagcaggt

SEQ ID NO: 5520537 - DNA, 25 bp, Homo sapien
ctagagaagtacatattaaccaagc

SEQ ID NO: 5520538 - DNA, 25 bp, Homo sapien
tccatgcaaatgatcagacatcaaa

SEQ ID NO: 5520539 - DNA, 25 bp, Homo sapien
taaccaagcacaagagaacaattca

SEQ ID NO: 5520540 - DNA, 25 bp, Homo sapien
atacaaagaaagctgaaaagaaatc

SEQ ID NO: 5520541 - DNA, 25 bp, Homo sapien
gactttgaaaataaacatggcacaa

SEQ ID NO: 5520542 - DNA, 25 bp, Homo sapien
tactaggcctgtaaatgtagaccac

SEQ ID NO: 5520543 - DNA, 25 bp, Homo sapien
ctctaagccggtctagttctagtac

SEQ ID NO: 5520544 - DNA, 25 bp, Homo sapien
aacatggcacaatatacacaaaagt

SEQ ID NO: 5520545 - DNA, 25 bp, Homo sapien
caacagagggatatctcccactctc

SEQ ID NO: 5520546 - DNA, 25 bp, Homo sapien
caaaggattccccatctcagccccc

SEQ ID NO: 5520547 - DNA, 25 bp, Homo sapien
cagtgttttgcttcccttggtgttc

SEQ ID NO: 5520548 - DNA, 25 bp, Homo sapien
actgcacccggctgaaagcctgtat

SEQ ID NO: 5520549 - DNA, 25 bp, Homo sapien
ttcccttaagatggaggtctctcac

SEQ ID NO: 5520550 - DNA, 25 bp, Homo sapien
tgtagaccacaatcctggtgaagtc

SEQ ID NO: 5520551 - DNA, 25 bp, Homo sapien
tttatctttcgatggacaacagagg

SEQ ID NO: 5520552 - DNA, 25 bp, Homo sapien
cttggacagaggttgctgaacttta

SEQ ID NO: 5520553 - DNA, 25 bp, Homo sapien
atagtggtaacttttcaaacagccc

SEQ ID NO: 5520554 - DNA, 25 bp, Homo sapien
caataagctggaagtttgttgtagt

SEQ ID NO: 5520555 - DNA, 25 bp, Homo sapien
gttgtaaatacttggacagaggttg

SEQ ID NO: 5520556 - DNA, 25 bp, Homo sapien
gtatgcttaacgtgaaaagaaaatg

SEQ ID NO: 5520557 - DNA, 25 bp, Homo sapien
aaaaggtgttctagctgtttgcatc

SEQ ID NO: 5520558 - DNA, 25 bp, Homo sapien
gtagtatgcctcaaatataactgac

SEQ ID NO: 5520559 - DNA, 25 bp, Homo sapien
aaaaatagattgacatcagcctgat

SEQ ID NO: 5520560 - DNA, 25 bp, Homo sapien
tgaaagacacagatacccagtatgc

SEQ ID NO: 5520561 - DNA, 25 bp, Homo sapien
taaaaatgcttgttgtgaaagacac

SEQ ID NO: 5520562 - DNA, 25 bp, Homo sapien
aaaaaaattgtagatgcttgctttt

SEQ ID NO: 5520563 - DNA, 25 bp, Homo sapien
tgaccgcgaagttgtcatgtgccgt

SEQ ID NO: 5520564 - DNA, 25 bp, Homo sapien
gtgaactggcctttgggaaagatca

SEQ ID NO: 5520565 - DNA, 25 bp, Homo sapien
cttagaaccaagggaaatactgctc

SEQ ID NO: 5520566 - DNA, 25 bp, Homo sapien
ttgctgacgtagtgctctcatgggc

SEQ ID NO: 5520567 - DNA, 25 bp, Homo sapien
gggcacagttaggcctggatgtttg

SEQ ID NO: 5520568 - DNA, 25 bp, Homo sapien
tatttaccattgtgtagggggctgt

SEQ ID NO: 5520569 - DNA, 25 bp, Homo sapien
attgctggtgactctgtgtgaactg

SEQ ID NO: 5520570 - DNA, 25 bp, Homo sapien
ttttcctgggagttatgaccgcgaa

SEQ ID NO: 5520571 - DNA, 25 bp, Homo sapien
tgcatagccaggatgacggctttca

SEQ ID NO: 5520572 - DNA, 25 bp, Homo sapien
atgccgcgggtcctgtttccttact

SEQ ID NO: 5520573 - DNA, 25 bp, Homo sapien
gatgtttgcctggtccgtgagatgc

SEQ ID NO: 5520574 - DNA, 25 bp, Homo sapien
atccattctggggaactcgggaaaa

SEQ ID NO: 5520575 - DNA, 25 bp, Homo sapien
gctgaccaagggaacccactatggc

SEQ ID NO: 5520576 - DNA, 25 bp, Homo sapien
gctacacctcagcccatgcggagac

SEQ ID NO: 5520577 - DNA, 25 bp, Homo sapien
agatgacatccagaggtacatgcac

SEQ ID NO: 5520578 - DNA, 25 bp, Homo sapien
caaaatacacagaagcaaaggctgc

SEQ ID NO: 5520579 - DNA, 25 bp, Homo sapien
aaaggcctcggtggtctcacctcag

SEQ ID NO: 5520580 - DNA, 25 bp, Homo sapien
cctaatgtcccaaaggcatggtcct

SEQ ID NO: 5520581 - DNA, 25 bp, Homo sapien
atggccgaaatgtggcagccaatca

SEQ ID NO: 5520582 - DNA, 25 bp, Homo sapien
ttgcatgtggctgagattcaatacc

SEQ ID NO: 5520583 - DNA, 25 bp, Homo sapien
tgcaaagaatgctggacacagtgtt

SEQ ID NO: 5520584 - DNA, 25 bp, Homo sapien
agtgtgtccaggtgacaaaagtcac

SEQ ID NO: 5520585 - DNA, 25 bp, Homo sapien
aacaagtgagtactaaagaaactaa

SEQ ID NO: 5520586 - DNA, 25 bp, Homo sapien
ttagtttctttagtactcacttgtt

SEQ ID NO: 5520587 - DNA, 25 bp, Homo sapien
caagtgagtactaaagaaactaaag

SEQ ID NO: 5520588 - DNA, 25 bp, Homo sapien
ctttagtttctttagtactcacttg

SEQ ID NO: 5520589 - DNA, 25 bp, Homo sapien
tttacgcaatttacagaagcaagtt

SEQ ID NO: 5520590 - DNA, 25 bp, Homo sapien
agaaaaagattatagtagttaaggc

SEQ ID NO: 5520591 - DNA, 25 bp, Homo sapien
aggtaactggcaaacaaggtttaca

SEQ ID NO: 5520592 - DNA, 25 bp, Homo sapien
agttaaggcttgagatcatgcattc

SEQ ID NO: 5520593 - DNA, 25 bp, Homo sapien
agttaacactggttcctcactggtc

SEQ ID NO: 5520594 - DNA, 25 bp, Homo sapien
taaaggcatcttggttaggttattc

SEQ ID NO: 5520595 - DNA, 25 bp, Homo sapien
gaagcagtttccacaataaagcatt

SEQ ID NO: 5520596 - DNA, 25 bp, Homo sapien
aacggagcttagataaagcaccagc

SEQ ID NO: 5520597 - DNA, 25 bp, Homo sapien
aagcaccagctgtcacattgtcacc

SEQ ID NO: 5520598 - DNA, 25 bp, Homo sapien
ccaagaaatagaaaacggagcttag

SEQ ID NO: 5520599 - DNA, 25 bp, Homo sapien
tccataacatgatggagagcaggag

SEQ ID NO: 5520600 - DNA, 25 bp, Homo sapien
agatgaagactaatatagatatatc

SEQ ID NO: 5520601 - DNA, 25 bp, Homo sapien
gacactcagaaatacacctggggct

SEQ ID NO: 5520602 - DNA, 25 bp, Homo sapien
ttttactgggattgcaacggaaaga

SEQ ID NO: 5520603 - DNA, 25 bp, Homo sapien
gttatctgggtaagataggcaggaa

SEQ ID NO: 5520604 - DNA, 25 bp, Homo sapien
atttaaacaaagagtaggcctgagt

SEQ ID NO: 5520605 - DNA, 25 bp, Homo sapien
catgcttgaaattaacactgttgac

SEQ ID NO: 5520606 - DNA, 25 bp, Homo sapien
gcaacggaaagatttgttctggtat

SEQ ID NO: 5520607 - DNA, 25 bp, Homo sapien
aaccaaaatagacagaatcgggaat

SEQ ID NO: 5520608 - DNA, 25 bp, Homo sapien
gagagccaaaccaggtcttatctaa

SEQ ID NO: 5520609 - DNA, 25 bp, Homo sapien
accttcaaagaaagttatctgggta

SEQ ID NO: 5520610 - DNA, 25 bp, Homo sapien
agagtaggcctgagtctcatgcctt

SEQ ID NO: 5520611 - DNA, 25 bp, Homo sapien
cctgacctcggcctgctggcctatg

SEQ ID NO: 5520612 - DNA, 25 bp, Homo sapien
cttccctgcacccgcgcccgggtga

SEQ ID NO: 5520613 - DNA, 25 bp, Homo sapien
gtgagcccccgagcctcttgggcta

SEQ ID NO: 5520614 - DNA, 25 bp, Homo sapien
ctcttgggctacctgagcctgcgag

SEQ ID NO: 5520615 - DNA, 25 bp, Homo sapien
acctcggcctgctggcctatgagcc

SEQ ID NO: 5520616 - DNA, 25 bp, Homo sapien
ccagcctcctgacctcggcctgctg

SEQ ID NO: 5520617 - DNA, 25 bp, Homo sapien
tgggcccagcgctcctcttggcccc

SEQ ID NO: 5520618 - DNA, 25 bp, Homo sapien
ccgagcctcttgggctacctgagcc

SEQ ID NO: 5520619 - DNA, 25 bp, Homo sapien
cggcctgctggcctatgagccgttg

SEQ ID NO: 5520620 - DNA, 25 bp, Homo sapien
gagcccccgagcctcttgggctacc

SEQ ID NO: 5520621 - DNA, 25 bp, Homo sapien
agcctcctgacctcggcctgctggc

SEQ ID NO: 5520622 - DNA, 25 bp, Homo sapien
tactgcaatgcaaaaatgcaccatc

SEQ ID NO: 5520623 - DNA, 25 bp, Homo sapien
accctgcagtttgaaagacaaatgc

SEQ ID NO: 5520624 - DNA, 25 bp, Homo sapien
actgtaggtgacgtgcttagatgtt

SEQ ID NO: 5520625 - DNA, 25 bp, Homo sapien
tatacatccatgctcctagtgactc

SEQ ID NO: 5520626 - DNA, 25 bp, Homo sapien
tacagcacccaaatcaaatacaccc

SEQ ID NO: 5520627 - DNA, 25 bp, Homo sapien
ttgaccatgaccagcagtaaaaaat

SEQ ID NO: 5520628 - DNA, 25 bp, Homo sapien
gtcttagagaatatgggtacatagc

SEQ ID NO: 5520629 - DNA, 25 bp, Homo sapien
aataggctatttcctgggccaggat

SEQ ID NO: 5520630 - DNA, 25 bp, Homo sapien
aggatgaagacttgttcactgccta

SEQ ID NO: 5520631 - DNA, 25 bp, Homo sapien
catcacaaaactgtaggtgacgtgc

SEQ ID NO: 5520632 - DNA, 25 bp, Homo sapien
atcccatgtcctagcaaattgcctt

SEQ ID NO: 5520633 - DNA, 25 bp, Homo sapien
aatggtggcacctccttcgagtgag

SEQ ID NO: 5520634 - DNA, 25 bp, Homo sapien
cccgctttcgcaagaacacgggcac

SEQ ID NO: 5520635 - DNA, 25 bp, Homo sapien
ctggctctcccggtgtccctccacc

SEQ ID NO: 5520636 - DNA, 25 bp, Homo sapien
cctgggacctggtcaccagccttct

SEQ ID NO: 5520637 - DNA, 25 bp, Homo sapien
cttgttcctgctgcacgtgacccgg

SEQ ID NO: 5520638 - DNA, 25 bp, Homo sapien
gtgatgagttctggctgtgtccacg

SEQ ID NO: 5520639 - DNA, 25 bp, Homo sapien
gctaccaaagctgaaatggtggcac

SEQ ID NO: 5520640 - DNA, 25 bp, Homo sapien
gtctgcggattctgcgtgacagtca

SEQ ID NO: 5520641 - DNA, 25 bp, Homo sapien
ctctgtccagcactcgtggccagca

SEQ ID NO: 5520642 - DNA, 25 bp, Homo sapien
gtcaccagccttctctgggaggcct

SEQ ID NO: 5520643 - DNA, 25 bp, Homo sapien
ggacgccagcctctgtgatgagttc

SEQ ID NO: 5520644 - DNA, 25 bp, Homo sapien
tcgtcacaggagtctttgtaatgct

SEQ ID NO: 5520645 - DNA, 25 bp, Homo sapien
tatgcacagattaaacttcacctac

SEQ ID NO: 5520646 - DNA, 25 bp, Homo sapien
tggaaagctttgaacaattgtgttt

SEQ ID NO: 5520647 - DNA, 25 bp, Homo sapien
atgtctctacccactatgcacagat

SEQ ID NO: 5520648 - DNA, 25 bp, Homo sapien
tccctgaaactgagtctgtggacac

SEQ ID NO: 5520649 - DNA, 25 bp, Homo sapien
ctgtggacactgtggaaagctttga

SEQ ID NO: 5520650 - DNA, 25 bp, Homo sapien
aatatgatctgtggagaatgtacac

SEQ ID NO: 5520651 - DNA, 25 bp, Homo sapien
gcttgtacagttgatgtcgatgctc

SEQ ID NO: 5520652 - DNA, 25 bp, Homo sapien
attttaaatctgaaggttctggtaa

SEQ ID NO: 5520653 - DNA, 25 bp, Homo sapien
gaaggttctggtaacctgtggtgta

SEQ ID NO: 5520654 - DNA, 25 bp, Homo sapien
gatgtcgatgctcactgcttctgct

SEQ ID NO: 5520655 - DNA, 25 bp, Homo sapien
gggacaaatgaccctggtctcaggc

SEQ ID NO: 5520656 - DNA, 25 bp, Homo sapien
aataaataacaggtactagcaacag

SEQ ID NO: 5520657 - DNA, 25 bp, Homo sapien
gagctcagcagccacacggctgagg

SEQ ID NO: 5520658 - DNA, 25 bp, Homo sapien
aataacaggtactagcaacagcagg

SEQ ID NO: 5520659 - DNA, 25 bp, Homo sapien
ttggggacaaatgaccctggtctca

SEQ ID NO: 5520660 - DNA, 25 bp, Homo sapien
ccgtggctcagtcttgccccaaagc

SEQ ID NO: 5520661 - DNA, 25 bp, Homo sapien
gagggacgcatccccgtactgaatg

SEQ ID NO: 5520662 - DNA, 25 bp, Homo sapien
ggtctcaggctttgggagctcttgg

SEQ ID NO: 5520663 - DNA, 25 bp, Homo sapien
gtgctggacaggcctccaggtaata

SEQ ID NO: 5520664 - DNA, 25 bp, Homo sapien
gacaggcctccaggtaataaataac

SEQ ID NO: 5520665 - DNA, 25 bp, Homo sapien
cccttcccccgtggctcagtcttgc

SEQ ID NO: 5520666 - DNA, 25 bp, Homo sapien
ccactggttagagcctgcccagctc

SEQ ID NO: 5520667 - DNA, 25 bp, Homo sapien
ataagccctgcgcttctgggatgga

SEQ ID NO: 5520668 - DNA, 25 bp, Homo sapien
gcgtgccttggactccagaagactc

SEQ ID NO: 5520669 - DNA, 25 bp, Homo sapien
gctctctggaggaccactggttaga

SEQ ID NO: 5520670 - DNA, 25 bp, Homo sapien
gtggtcaacgctgctctctggagga

SEQ ID NO: 5520671 - DNA, 25 bp, Homo sapien
ctgctctctggaggaccactggtta

SEQ ID NO: 5520672 - DNA, 25 bp, Homo sapien
tgcaggaccagagcctcctgtcacg

SEQ ID NO: 5520673 - DNA, 25 bp, Homo sapien
ggaccactggttagagcctgcccag

SEQ ID NO: 5520674 - DNA, 25 bp, Homo sapien
aggccaaagcagatgctgcaccaga

SEQ ID NO: 5520675 - DNA, 25 bp, Homo sapien
gccaaagcagatgctgcaccagagg

SEQ ID NO: 5520676 - DNA, 25 bp, Homo sapien
tcagaaaaataagccctgcgcttct

SEQ ID NO: 5520677 - DNA, 25 bp, Homo sapien
tcagaagcctgttttaaggaagccc

SEQ ID NO: 5520678 - DNA, 25 bp, Homo sapien
ggctcttgacattagggggctttgc

SEQ ID NO: 5520679 - DNA, 25 bp, Homo sapien
cccctcgatgccagtctgagctcgg

SEQ ID NO: 5520680 - DNA, 25 bp, Homo sapien
aaggaagccctaaaatgtggactgg

SEQ ID NO: 5520681 - DNA, 25 bp, Homo sapien
ggcgctccctaccatggcacccaga

SEQ ID NO: 5520682 - DNA, 25 bp, Homo sapien
cctgccctaaagggatgtcgaggat

SEQ ID NO: 5520683 - DNA, 25 bp, Homo sapien
ggtagcagctcagtccgcccctacc

SEQ ID NO: 5520684 - DNA, 25 bp, Homo sapien
gcccctaccccaggcccctcgatgc

SEQ ID NO: 5520685 - DNA, 25 bp, Homo sapien
ggtgcacacatgttgctggccagga

SEQ ID NO: 5520686 - DNA, 25 bp, Homo sapien
gctggctgttcgctcgtgctatggg

SEQ ID NO: 5520687 - DNA, 25 bp, Homo sapien
ttattgaggaggtgttttggcaaaa

SEQ ID NO: 5520688 - DNA, 25 bp, Homo sapien
cctctcgctggccaacatcagcggc

SEQ ID NO: 5520689 - DNA, 25 bp, Homo sapien
gccaatgccttccggacggtgtacc

SEQ ID NO: 5520690 - DNA, 25 bp, Homo sapien
tctcaccaagcgccagctggaaaat

SEQ ID NO: 5520691 - DNA, 25 bp, Homo sapien
ggctacttcaaaggcatccaggcgc

SEQ ID NO: 5520692 - DNA, 25 bp, Homo sapien
tcgggtatggccaatgccttccgga

SEQ ID NO: 5520693 - DNA, 25 bp, Homo sapien
cagctcaacggcctggccggctact

SEQ ID NO: 5520694 - DNA, 25 bp, Homo sapien
caggcgcgtgtcatctaccagatgc

SEQ ID NO: 5520695 - DNA, 25 bp, Homo sapien
gagctccatactaaaggaagggatc

SEQ ID NO: 5520696 - DNA, 25 bp, Homo sapien
accagatgccctccaccgccatttc

SEQ ID NO: 5520697 - DNA, 25 bp, Homo sapien
gcctgcatccagccccttgccctct

SEQ ID NO: 5520698 - DNA, 25 bp, Homo sapien
gccagctggaaaatcgagctccata

SEQ ID NO: 5520699 - DNA, 25 bp, Homo sapien
gatgtcatcaggcccaaaatgtctc

SEQ ID NO: 5520700 - DNA, 25 bp, Homo sapien
ttggtatcaactaggagactctctc

SEQ ID NO: 5520701 - DNA, 25 bp, Homo sapien
ataaaatgcatcacagagcgattta

SEQ ID NO: 5520702 - DNA, 25 bp, Homo sapien
aagtgaaaagtctaggagtcacatc

SEQ ID NO: 5520703 - DNA, 25 bp, Homo sapien
gagcgatttattgatgcaaaggaac

SEQ ID NO: 5520704 - DNA, 25 bp, Homo sapien
ttacagctttagggcaaggataaac

SEQ ID NO: 5520705 - DNA, 25 bp, Homo sapien
tttaggcatcgctggatccaggtgc

SEQ ID NO: 5520706 - DNA, 25 bp, Homo sapien
taggagtcacatctttaggcatcgc

SEQ ID NO: 5520707 - DNA, 25 bp, Homo sapien
acatgctccatggcagctccaggct

SEQ ID NO: 5520708 - DNA, 25 bp, Homo sapien
cagctccaggctcacacatacttag

SEQ ID NO: 5520709 - DNA, 25 bp, Homo sapien
tgatgcaaaggaaccgttttggctc

SEQ ID NO: 5520710 - DNA, 25 bp, Homo sapien
caaaagcataatcagtaagagggag

SEQ ID NO: 5520711 - DNA, 25 bp, Homo sapien
ctcaggactaatcttgtttcggttc

SEQ ID NO: 5520712 - DNA, 25 bp, Homo sapien
cagcttgcagccattgttaactcag

SEQ ID NO: 5520713 - DNA, 25 bp, Homo sapien
tgcagccattgttaactcaggacta

SEQ ID NO: 5520714 - DNA, 25 bp, Homo sapien
acaccccaaacacaaaattactgat

SEQ ID NO: 5520715 - DNA, 25 bp, Homo sapien
attccatgtatccagcttgcagcca

SEQ ID NO: 5520716 - DNA, 25 bp, Homo sapien
tagaaagtaacaataaagagtgagc

SEQ ID NO: 5520717 - DNA, 25 bp, Homo sapien
ggagaaaagtgtgctgaattccatg

SEQ ID NO: 5520718 - DNA, 25 bp, Homo sapien
tggagttaaaattttatgcagaagc

SEQ ID NO: 5520719 - DNA, 25 bp, Homo sapien
tttatttgtcaattagaaagtaaca

SEQ ID NO: 5520720 - DNA, 25 bp, Homo sapien
gagtgagcttataagttatggagtt

SEQ ID NO: 5520721 - DNA, 25 bp, Homo sapien
ctttccgaaagcacgcgaacttaag

SEQ ID NO: 5520722 - DNA, 25 bp, Homo sapien
tgggacgctgcaataatgcctgagg

SEQ ID NO: 5520723 - DNA, 25 bp, Homo sapien
agtggagttaatggaggttcctaga

SEQ ID NO: 5520724 - DNA, 25 bp, Homo sapien
acgcaccctgtcggcccctttccga

SEQ ID NO: 5520725 - DNA, 25 bp, Homo sapien
aatccacatttcaaaaggctcccct

SEQ ID NO: 5520726 - DNA, 25 bp, Homo sapien
agcgacttcctggaacctcaaacaa

SEQ ID NO: 5520727 - DNA, 25 bp, Homo sapien
aacaatgtgggacgctgcaataatg

SEQ ID NO: 5520728 - DNA, 25 bp, Homo sapien
aatggaggttcctagagacactcac

SEQ ID NO: 5520729 - DNA, 25 bp, Homo sapien
ggagttaatggaggttcctagagac

SEQ ID NO: 5520730 - DNA, 25 bp, Homo sapien
tgtcggcccctttccgaaagcacgc

SEQ ID NO: 5520731 - DNA, 25 bp, Homo sapien
acgctgcaataatgcctgagggctt

SEQ ID NO: 5520732 - DNA, 25 bp, Homo sapien
tttttacaacagcacgaagacttac

SEQ ID NO: 5520733 - DNA, 25 bp, Homo sapien
gggtggcttcgtggtctcttcgcca

SEQ ID NO: 5520734 - DNA, 25 bp, Homo sapien
aaatcgcgtggaaaaccacgacctc

SEQ ID NO: 5520735 - DNA, 25 bp, Homo sapien
gcacgaagacttacaagtgagcgta

SEQ ID NO: 5520736 - DNA, 25 bp, Homo sapien
tcgccagccaaatcgcgtggaaaac

SEQ ID NO: 5520737 - DNA, 25 bp, Homo sapien
cgacctcaatttttacaacagcacg

SEQ ID NO: 5520738 - DNA, 25 bp, Homo sapien
agcctctgaaatgggcttggaagtt

SEQ ID NO: 5520739 - DNA, 25 bp, Homo sapien
aacagcacgaagacttacaagtgag

SEQ ID NO: 5520740 - DNA, 25 bp, Homo sapien
tcgtggtctcttcgccagccaaatc

SEQ ID NO: 5520741 - DNA, 25 bp, Homo sapien
aacccaggatctggatagcaagcaa

SEQ ID NO: 5520742 - DNA, 25 bp, Homo sapien
tcttcgccagccaaatcgcgtggaa

SEQ ID NO: 5520743 - DNA, 25 bp, Homo sapien
ccccactgttgagagtgccacattc

SEQ ID NO: 5520744 - DNA, 25 bp, Homo sapien
aatagattttatttcaggtggggat

SEQ ID NO: 5520745 - DNA, 25 bp, Homo sapien
tcaattagaacacaaataaggagga

SEQ ID NO: 5520746 - DNA, 25 bp, Homo sapien
gaaggaagtctctatgttctgaagg

SEQ ID NO: 5520747 - DNA, 25 bp, Homo sapien
cggtggaagcactacatcatcgaat

SEQ ID NO: 5520748 - DNA, 25 bp, Homo sapien
atcatcgaatgggaaatcaacaaat

SEQ ID NO: 5520749 - DNA, 25 bp, Homo sapien
tcatcaattctcggtggaagcacta

SEQ ID NO: 5520750 - DNA, 25 bp, Homo sapien
gcctgagggagcactccccctagtg

SEQ ID NO: 5520751 - DNA, 25 bp, Homo sapien
tctgaaggactgcctaccccactgt

SEQ ID NO: 5520752 - DNA, 25 bp, Homo sapien
atccattcacagtaagcaccatttt

SEQ ID NO: 5520753 - DNA, 25 bp, Homo sapien
ctgtggcttcctgttaaaatgactg

SEQ ID NO: 5520754 - DNA, 25 bp, Homo sapien
atcctatctcaggaaggcgatgaac

SEQ ID NO: 5520755 - DNA, 25 bp, Homo sapien
ctcattaaggccaaggtcacagtca

SEQ ID NO: 5520756 - DNA, 25 bp, Homo sapien
acagtgtgttcaggaatgatgtctc

SEQ ID NO: 5520757 - DNA, 25 bp, Homo sapien
gagatataaatttggctggacgact

SEQ ID NO: 5520758 - DNA, 25 bp, Homo sapien
ggcaaggttgccacacattccccat

SEQ ID NO: 5520759 - DNA, 25 bp, Homo sapien
aaggtcacagtcagagtcacactct

SEQ ID NO: 5520760 - DNA, 25 bp, Homo sapien
cacactctgagtggtgctgtttggc

SEQ ID NO: 5520761 - DNA, 25 bp, Homo sapien
ttggctggacgactcacctacagta

SEQ ID NO: 5520762 - DNA, 25 bp, Homo sapien
ggcgatgaacaccaccacagagcca

SEQ ID NO: 5520763 - DNA, 25 bp, Homo sapien
aatatatacaggttgggactggcaa

SEQ ID NO: 5520764 - DNA, 25 bp, Homo sapien
agagccacagacccttagcaatgtt

SEQ ID NO: 5520765 - DNA, 25 bp, Homo sapien
atagctgagaaaggatagcttccca

SEQ ID NO: 5520766 - DNA, 25 bp, Homo sapien
ggtctagtggctcaaaagatgtcac

SEQ ID NO: 5520767 - DNA, 25 bp, Homo sapien
gatggtggtggtgccaaaccacata

SEQ ID NO: 5520768 - DNA, 25 bp, Homo sapien
acagggtccactcatgaagatggtg

SEQ ID NO: 5520769 - DNA, 25 bp, Homo sapien
aaaagttctgaggtagctctgcttc

SEQ ID NO: 5520770 - DNA, 25 bp, Homo sapien
tcacaatggctctgtggccaagggg

SEQ ID NO: 5520771 - DNA, 25 bp, Homo sapien
tgattgacacaagccaaacagggtc

SEQ ID NO: 5520772 - DNA, 25 bp, Homo sapien
aagatgtcaccaaggacctagtttc

SEQ ID NO: 5520773 - DNA, 25 bp, Homo sapien
cttcaggtaaagcttggtctagtgg

SEQ ID NO: 5520774 - DNA, 25 bp, Homo sapien
cttaggctccatatggtagcacctg

SEQ ID NO: 5520775 - DNA, 25 bp, Homo sapien
gtagcacctggaagcttgagaatct

SEQ ID NO: 5520776 - DNA, 25 bp, Homo sapien
taaaagagtaccaagagagacctct

SEQ ID NO: 5520777 - DNA, 25 bp, Homo sapien
ccatacgatggtatctgcaggtagg

SEQ ID NO: 5520778 - DNA, 25 bp, Homo sapien
ttcatgacatacttgagcatcttct

SEQ ID NO: 5520779 - DNA, 25 bp, Homo sapien
ttctacccattaccaggatttccat

SEQ ID NO: 5520780 - DNA, 25 bp, Homo sapien
tcccccaaattcacaggctgaaatc

SEQ ID NO: 5520781 - DNA, 25 bp, Homo sapien
cacaggctgaaatcaaatcccccat

SEQ ID NO: 5520782 - DNA, 25 bp, Homo sapien
tccagttattggcagatattactct

SEQ ID NO: 5520783 - DNA, 25 bp, Homo sapien
ataaggttttatgctggaaacagct

SEQ ID NO: 5520784 - DNA, 25 bp, Homo sapien
gctggaaacagctatacacaatttc

SEQ ID NO: 5520785 - DNA, 25 bp, Homo sapien
gctacaaaacgaatgtttgtcccgc

SEQ ID NO: 5520786 - DNA, 25 bp, Homo sapien
acgaatgtttgtcccgcttccccca

SEQ ID NO: 5520787 - DNA, 25 bp, Homo sapien
gtggtgtcttttgccaagaagaggc

SEQ ID NO: 5520788 - DNA, 25 bp, Homo sapien
tgctgcacctatcgccgcctcctac

SEQ ID NO: 5520789 - DNA, 25 bp, Homo sapien
gattccacattgaaggcacgagtgc

SEQ ID NO: 5520790 - DNA, 25 bp, Homo sapien
aagaagaggcaacaacattataatg

SEQ ID NO: 5520791 - DNA, 25 bp, Homo sapien
tgtacagtcatgcagttctccgttc

SEQ ID NO: 5520792 - DNA, 25 bp, Homo sapien
attagtgcagcagaaacacagaaac

SEQ ID NO: 5520793 - DNA, 25 bp, Homo sapien
aggactgtgctgaggttaaccagtt

SEQ ID NO: 5520794 - DNA, 25 bp, Homo sapien
cccaccccctggcaattagtgcagc

SEQ ID NO: 5520795 - DNA, 25 bp, Homo sapien
tgtggaatcaacactgtggctgccc

SEQ ID NO: 5520796 - DNA, 25 bp, Homo sapien
gaaacacagaaacgagaggactgtg

SEQ ID NO: 5520797 - DNA, 25 bp, Homo sapien
aggcacgagtgcatataatgttggt

SEQ ID NO: 5520798 - DNA, 25 bp, Homo sapien
cttcaaacgtgagtaggtcccaaga

SEQ ID NO: 5520799 - DNA, 25 bp, Homo sapien
acctagctggcactctgcaagtgtc

SEQ ID NO: 5520800 - DNA, 25 bp, Homo sapien
gaccgatggctggcaccctcagcca

SEQ ID NO: 5520801 - DNA, 25 bp, Homo sapien
aagcggcaaaagatctaacctagct

SEQ ID NO: 5520802 - DNA, 25 bp, Homo sapien
agataaaaatgacctgaccgatggc

SEQ ID NO: 5520803 - DNA, 25 bp, Homo sapien
agagctaagaagatggattcctacc

SEQ ID NO: 5520804 - DNA, 25 bp, Homo sapien
gtggaaacgaaatcctgccctgagc

SEQ ID NO: 5520805 - DNA, 25 bp, Homo sapien
atcaaaagtttaagggtgtaccagc

SEQ ID NO: 5520806 - DNA, 25 bp, Homo sapien
ccctcagccagagctaagaagatgg

SEQ ID NO: 5520807 - DNA, 25 bp, Homo sapien
ctgaagcagcacacaaggctactta

SEQ ID NO: 5520808 - DNA, 25 bp, Homo sapien
atgaaatatgtgagaataaggtttt

SEQ ID NO: 5520809 - DNA, 25 bp, Homo sapien
ggacgttcagagctcatgtggataa

SEQ ID NO: 5520810 - DNA, 25 bp, Homo sapien
tgtagcactcggatcggtcctgttt

SEQ ID NO: 5520811 - DNA, 25 bp, Homo sapien
aggcccattgaaatagcaaacgcac

SEQ ID NO: 5520812 - DNA, 25 bp, Homo sapien
gccccaaacgccaaaatgcaacagg

SEQ ID NO: 5520813 - DNA, 25 bp, Homo sapien
gcaaacgcacagtcatgtagcactc

SEQ ID NO: 5520814 - DNA, 25 bp, Homo sapien
aaaaggaaatgacagtaatggatat

SEQ ID NO: 5520815 - DNA, 25 bp, Homo sapien
tggatgaacagacgctaccatgcca

SEQ ID NO: 5520816 - DNA, 25 bp, Homo sapien
ctccgaccagatgtcgtggccagag

SEQ ID NO: 5520817 - DNA, 25 bp, Homo sapien
tcctctgctgatgggatgccaagga

SEQ ID NO: 5520818 - DNA, 25 bp, Homo sapien
agctggctttgtagtcgttcaggcc

SEQ ID NO: 5520819 - DNA, 25 bp, Homo sapien
acttctagagtccagatcggccaca

SEQ ID NO: 5520820 - DNA, 25 bp, Homo sapien
ggataaaaaagaagcataatcaatc

SEQ ID NO: 5520821 - DNA, 25 bp, Homo sapien
cctgatatgtttggtatgaagatac

SEQ ID NO: 5520822 - DNA, 25 bp, Homo sapien
aataatggataaattggccttgcaa

SEQ ID NO: 5520823 - DNA, 25 bp, Homo sapien
tgatgtcttagggattgaccacttc

SEQ ID NO: 5520824 - DNA, 25 bp, Homo sapien
aagtcgtgtgaaatcctcaatcaac

SEQ ID NO: 5520825 - DNA, 25 bp, Homo sapien
tgcaaactatgcagggaaccctgat

SEQ ID NO: 5520826 - DNA, 25 bp, Homo sapien
tttgctagagtttgtgtaagccaat

SEQ ID NO: 5520827 - DNA, 25 bp, Homo sapien
atcacacaaagcactagaagggtag

SEQ ID NO: 5520828 - DNA, 25 bp, Homo sapien
attggccttgcaacagaaaaacaaa

SEQ ID NO: 5520829 - DNA, 25 bp, Homo sapien
cagaaaagttacagtctagagatgt

SEQ ID NO: 5520830 - DNA, 25 bp, Homo sapien
tggtatgaagatacttgggattcaa

SEQ ID NO: 5520831 - DNA, 25 bp, Homo sapien
gaaaacagaactaggaacccagtca

SEQ ID NO: 5520832 - DNA, 25 bp, Homo sapien
aggatcaaagaaatgtctggactac

SEQ ID NO: 5520833 - DNA, 25 bp, Homo sapien
tcagcatgcccaacgaacatacatc

SEQ ID NO: 5520834 - DNA, 25 bp, Homo sapien
agctgattcaagaggggatatttta

SEQ ID NO: 5520835 - DNA, 25 bp, Homo sapien
gtatgtcacaccttgggcccagaac

SEQ ID NO: 5520836 - DNA, 25 bp, Homo sapien
gctgggtagttagaccgcctcaaag

SEQ ID NO: 5520837 - DNA, 25 bp, Homo sapien
gagaagcaattagtgggaaatgtat

SEQ ID NO: 5520838 - DNA, 25 bp, Homo sapien
gaatatttaagcaagacagggcaat

SEQ ID NO: 5520839 - DNA, 25 bp, Homo sapien
acagggcaataaatggactgcacat

SEQ ID NO: 5520840 - DNA, 25 bp, Homo sapien
ggacaagaatccaaaccactctgcc

SEQ ID NO: 5520841 - DNA, 25 bp, Homo sapien
acccagtcaaagcctccagctgttc

SEQ ID NO: 5520842 - DNA, 25 bp, Homo sapien
gtctgatatgtatgttaaagtgctt

SEQ ID NO: 5520843 - DNA, 25 bp, Homo sapien
aaaaaagatacacaggttacattta

SEQ ID NO: 5520844 - DNA, 25 bp, Homo sapien
ttgattgacaacaggaactccttac

SEQ ID NO: 5520845 - DNA, 25 bp, Homo sapien
ctacataacccaaggataccctgga

SEQ ID NO: 5520846 - DNA, 25 bp, Homo sapien
caagattggattcacacacaagtac

SEQ ID NO: 5520847 - DNA, 25 bp, Homo sapien
cctgaaaaacccacgtcagtttgtc

SEQ ID NO: 5520848 - DNA, 25 bp, Homo sapien
ggtaaattagaacaaatatgattcc

SEQ ID NO: 5520849 - DNA, 25 bp, Homo sapien
tgttgacaagatttggtgtttagaa

SEQ ID NO: 5520850 - DNA, 25 bp, Homo sapien
tatcttgtccttgagagggtgaaca

SEQ ID NO: 5520851 - DNA, 25 bp, Homo sapien
ggttcaagtgtaacacagagcattc

SEQ ID NO: 5520852 - DNA, 25 bp, Homo sapien
agagggtgaacagctccaatcagat

SEQ ID NO: 5520853 - DNA, 25 bp, Homo sapien
ggcctctctgcgggcctaggcttct

SEQ ID NO: 5520854 - DNA, 25 bp, Homo sapien
cgcaaggacctcagagacgttcttt

SEQ ID NO: 5520855 - DNA, 25 bp, Homo sapien
acctggactcctggccaatcaaggc

SEQ ID NO: 5520856 - DNA, 25 bp, Homo sapien
gaggccccacacgaaagactcttac

SEQ ID NO: 5520857 - DNA, 25 bp, Homo sapien
ttcctgcacccgttcccgagcgaaa

SEQ ID NO: 5520858 - DNA, 25 bp, Homo sapien
tgtattttgtcccagagagaaaggc

SEQ ID NO: 5520859 - DNA, 25 bp, Homo sapien
gccaatcaaggcttgcccagctggg

SEQ ID NO: 5520860 - DNA, 25 bp, Homo sapien
gaccttcctgcacccgttcccgagc

SEQ ID NO: 5520861 - DNA, 25 bp, Homo sapien
tgcccagcgcccctgctcagggcga

SEQ ID NO: 5520862 - DNA, 25 bp, Homo sapien
ttattaaaaacgcaaggacctcaga

SEQ ID NO: 5520863 - DNA, 25 bp, Homo sapien
acgttcttttctgtatggacccttc

SEQ ID NO: 5520864 - DNA, 25 bp, Homo sapien
aggagccggacacttgtctcccgtc

SEQ ID NO: 5520865 - DNA, 25 bp, Homo sapien
gcaagagctgctgtgatggtttatg

SEQ ID NO: 5520866 - DNA, 25 bp, Homo sapien
aggtcgtgataaactgtgccattcc

SEQ ID NO: 5520867 - DNA, 25 bp, Homo sapien
aagggttgaagtacaatcaagctac

SEQ ID NO: 5520868 - DNA, 25 bp, Homo sapien
cttcgcaagtgccatgatgcatgcc

SEQ ID NO: 5520869 - DNA, 25 bp, Homo sapien
cagagtatctgtcaggcaagagctg

SEQ ID NO: 5520870 - DNA, 25 bp, Homo sapien
acaacacattcagagtggtgggcag

SEQ ID NO: 5520871 - DNA, 25 bp, Homo sapien
ggtggctcaactggattcagcagag

SEQ ID NO: 5520872 - DNA, 25 bp, Homo sapien
aggaaacagggccaacattgcctag

SEQ ID NO: 5520873 - DNA, 25 bp, Homo sapien
gagatgctagacaggtgtatggtct

SEQ ID NO: 5520874 - DNA, 25 bp, Homo sapien
tgatgatgccaataagaagtgggtg

SEQ ID NO: 5520875 - DNA, 25 bp, Homo sapien
cagctttgcattgtcaccccatcac

SEQ ID NO: 5520876 - DNA, 25 bp, Homo sapien
tctggacaatgtacttagggaccta

SEQ ID NO: 5520877 - DNA, 25 bp, Homo sapien
aacacttgtcaagctgagtagactg

SEQ ID NO: 5520878 - DNA, 25 bp, Homo sapien
atgatgatgatattaggtgcccact

SEQ ID NO: 5520879 - DNA, 25 bp, Homo sapien
tcccactcagaaatgaggagcaagg

SEQ ID NO: 5520880 - DNA, 25 bp, Homo sapien
cgtgagtcatgagaaagattccctg

SEQ ID NO: 5520881 - DNA, 25 bp, Homo sapien
gattcaagaagtatatggggctaaa

SEQ ID NO: 5520882 - DNA, 25 bp, Homo sapien
aataactaaatagggcgtgagtcat

SEQ ID NO: 5520883 - DNA, 25 bp, Homo sapien
aggagcaaggtgtatgactttagat

SEQ ID NO: 5520884 - DNA, 25 bp, Homo sapien
ctcaaaatagggtagtagcattaat

SEQ ID NO: 5520885 - DNA, 25 bp, Homo sapien
cttggcaaaaaccttcagaacaatt

SEQ ID NO: 5520886 - DNA, 25 bp, Homo sapien
ctcagagcatcaagacagtggtgag

SEQ ID NO: 5520887 - DNA, 25 bp, Homo sapien
attaaaacaaggactatctgggtac

SEQ ID NO: 5520888 - DNA, 25 bp, Homo sapien
ctgctgagacatttgagtccgagta

SEQ ID NO: 5520889 - DNA, 25 bp, Homo sapien
tctgggtaccccttgaggcttctgt

SEQ ID NO: 5520890 - DNA, 25 bp, Homo sapien
gtaaacctacataaagagggcagcc

SEQ ID NO: 5520891 - DNA, 25 bp, Homo sapien
acagtggtgagagaacccatcatta

SEQ ID NO: 5520892 - DNA, 25 bp, Homo sapien
agcccaacagcaaaacaagagttgt

SEQ ID NO: 5520893 - DNA, 25 bp, Homo sapien
aaatttgggtgaagattaatattcc

SEQ ID NO: 5520894 - DNA, 25 bp, Homo sapien
atgtcagtgatcagaatagttatac

SEQ ID NO: 5520895 - DNA, 25 bp, Homo sapien
ggaagaggtaacttgctcagagcat

SEQ ID NO: 5520896 - DNA, 25 bp, Homo sapien
gaaatcactcgaaagctgtgtcatc

SEQ ID NO: 5520897 - DNA, 25 bp, Homo sapien
acctcggtactcggaggggtgagac

SEQ ID NO: 5520898 - DNA, 25 bp, Homo sapien
gtctcacccctccgagtaccgaggt

SEQ ID NO: 5520899 - DNA, 25 bp, Homo sapien
gtggtcatcgcaatttggcccaatt

SEQ ID NO: 5520900 - DNA, 25 bp, Homo sapien
gcaggtcatgtagggagtccttttt

SEQ ID NO: 5520901 - DNA, 25 bp, Homo sapien
agggtgattagacaagttgacaagt

SEQ ID NO: 5520902 - DNA, 25 bp, Homo sapien
aaggttcaaggtaagctcctgtatt

SEQ ID NO: 5520903 - DNA, 25 bp, Homo sapien
tggcccaattcaaaggttcaaggta

SEQ ID NO: 5520904 - DNA, 25 bp, Homo sapien
aagccacttgtgttctgaagagaga

SEQ ID NO: 5520905 - DNA, 25 bp, Homo sapien
ttccaggatgcagtggtcatcgcaa

SEQ ID NO: 5520906 - DNA, 25 bp, Homo sapien
agattcagctagaagccacttgtgt

SEQ ID NO: 5520907 - DNA, 25 bp, Homo sapien
agggagtcctttttagaatggcttc

SEQ ID NO: 5520908 - DNA, 25 bp, Homo sapien
aaagaggcaactggcttagtacaaa

SEQ ID NO: 5520909 - DNA, 25 bp, Homo sapien
tgacaagttgttttgaaagaggcaa

SEQ ID NO: 5520910 - DNA, 25 bp, Homo sapien
tctgatagaggcgatgatcttttcc

SEQ ID NO: 5520911 - DNA, 25 bp, Homo sapien
gtaacctaataccagccgcagggag

SEQ ID NO: 5520912 - DNA, 25 bp, Homo sapien
agagctgtcatttgccagtgagagc

SEQ ID NO: 5520913 - DNA, 25 bp, Homo sapien
tctctctgttgggtcttgtggcatc

SEQ ID NO: 5520914 - DNA, 25 bp, Homo sapien
cttgggagtgctccttgcacagagc

SEQ ID NO: 5520915 - DNA, 25 bp, Homo sapien
tctcctaaagggctacaccactgtc

SEQ ID NO: 5520916 - DNA, 25 bp, Homo sapien
accctaagtgtctgatagaggcgat

SEQ ID NO: 5520917 - DNA, 25 bp, Homo sapien
tggttccttcggtgccaatggtaac

SEQ ID NO: 5520918 - DNA, 25 bp, Homo sapien
agggcagctctgaaattatggatat

SEQ ID NO: 5520919 - DNA, 25 bp, Homo sapien
ccgcagggagcgccatttctcctaa

SEQ ID NO: 5520920 - DNA, 25 bp, Homo sapien
caaaattgccagaccaggaccctaa

SEQ ID NO: 5520921 - DNA, 25 bp, Homo sapien
tctagggtactaagtgtctgatcac

SEQ ID NO: 5520922 - DNA, 25 bp, Homo sapien
taataaggatagcataattggcttt

SEQ ID NO: 5520923 - DNA, 25 bp, Homo sapien
tctcagaaataggtaattggcagct

SEQ ID NO: 5520924 - DNA, 25 bp, Homo sapien
gtaattggcagctcaaggcagttag

SEQ ID NO: 5520925 - DNA, 25 bp, Homo sapien
acctcagcgaaaacaagatacaaat

SEQ ID NO: 5520926 - DNA, 25 bp, Homo sapien
aggaagtagtaaagcttggaagtat

SEQ ID NO: 5520927 - DNA, 25 bp, Homo sapien
tgaaatgacttacagaggaagtagt

SEQ ID NO: 5520928 - DNA, 25 bp, Homo sapien
tcccagtcccagttagccaccttcc

SEQ ID NO: 5520929 - DNA, 25 bp, Homo sapien
tcaagttgagacacgtattcccagt

SEQ ID NO: 5520930 - DNA, 25 bp, Homo sapien
tctggccaccctgagtcccttcgca

SEQ ID NO: 5520931 - DNA, 25 bp, Homo sapien
aaaaccaggaagattgtgatgttac

SEQ ID NO: 5520932 - DNA, 25 bp, Homo sapien
atttagggctagaaaacatcttttg

SEQ ID NO: 5520933 - DNA, 25 bp, Homo sapien
cttaggacacttatattaggtaggt

SEQ ID NO: 5520934 - DNA, 25 bp, Homo sapien
acagtgttcaaaatgccaatgctcc

SEQ ID NO: 5520935 - DNA, 25 bp, Homo sapien
taacttcagttgaaagcagagatac

SEQ ID NO: 5520936 - DNA, 25 bp, Homo sapien
ttgttctcaatagctagtgtactcc

SEQ ID NO: 5520937 - DNA, 25 bp, Homo sapien
gcttttacaaacagcaggcggaagt

SEQ ID NO: 5520938 - DNA, 25 bp, Homo sapien
tcctaaagtgactaaacacctgtta

SEQ ID NO: 5520939 - DNA, 25 bp, Homo sapien
gttctaagtgtggatattatgtacc

SEQ ID NO: 5520940 - DNA, 25 bp, Homo sapien
catagttaagtttaaggatctgggt

SEQ ID NO: 5520941 - DNA, 25 bp, Homo sapien
aatacacagacaaaacagttccgga

SEQ ID NO: 5520942 - DNA, 25 bp, Homo sapien
agttccggaagtttacatacatgtc

SEQ ID NO: 5520943 - DNA, 25 bp, Homo sapien
agggtgagacgcccaaataaaatgc

SEQ ID NO: 5520944 - DNA, 25 bp, Homo sapien
aaatgctccctggtggaacaaagtc

SEQ ID NO: 5520945 - DNA, 25 bp, Homo sapien
tgaacatgatgagaaagcaaagctc

SEQ ID NO: 5520946 - DNA, 25 bp, Homo sapien
gtcagaggtggcttacaacagcttt

SEQ ID NO: 5520947 - DNA, 25 bp, Homo sapien
acctccactggcagaagtaagaatt

SEQ ID NO: 5520948 - DNA, 25 bp, Homo sapien
tattcttggttgacaagggaatgtt

SEQ ID NO: 5520949 - DNA, 25 bp, Homo sapien
gcacaaagggtgcagtgttctacta

SEQ ID NO: 5520950 - DNA, 25 bp, Homo sapien
catctaaataatggagaactggcat

SEQ ID NO: 5520951 - DNA, 25 bp, Homo sapien
aatgcagtagagaaacaaaaacact

SEQ ID NO: 5520952 - DNA, 25 bp, Homo sapien
tgcaataaaagactagtgggatgaa

SEQ ID NO: 5520953 - DNA, 25 bp, Homo sapien
tacagacaggaccccatgacctttc

SEQ ID NO: 5520954 - DNA, 25 bp, Homo sapien
aggggaataataacagagataaaca

SEQ ID NO: 5520955 - DNA, 25 bp, Homo sapien
atgcacacacatacagggatgtttt

SEQ ID NO: 5520956 - DNA, 25 bp, Homo sapien
atacagcacattaggcccaggcctt

SEQ ID NO: 5520957 - DNA, 25 bp, Homo sapien
atcacatacactccccaacacacac

SEQ ID NO: 5520958 - DNA, 25 bp, Homo sapien
tctgcagtgagagtaccttaatttt

SEQ ID NO: 5520959 - DNA, 25 bp, Homo sapien
aaacaaacacccagatcacatacac

SEQ ID NO: 5520960 - DNA, 25 bp, Homo sapien
tagattgcagcaaaagttaactatc

SEQ ID NO: 5520961 - DNA, 25 bp, Homo sapien
tggtagaagtaaaactgaggacata

SEQ ID NO: 5520962 - DNA, 25 bp, Homo sapien
gtcacaaggcttcataatacagcac

SEQ ID NO: 5520963 - DNA, 25 bp, Homo sapien
agagttgactaaaataaagctaaag

SEQ ID NO: 5520964 - DNA, 25 bp, Homo sapien
ctgcagtaacatgtgagattgaatt

SEQ ID NO: 5520965 - DNA, 25 bp, Homo sapien
aaacaatattttatacactacaatg

SEQ ID NO: 5520966 - DNA, 25 bp, Homo sapien
cattgtagtgtataaaatattgttt

SEQ ID NO: 5520967 - DNA, 25 bp, Homo sapien
gacgacatcgttagaagatacgccc

SEQ ID NO: 5520968 - DNA, 25 bp, Homo sapien
ttaagtagcagctcccatgggtagc

SEQ ID NO: 5520969 - DNA, 25 bp, Homo sapien
gcaggaagaatatactaatggtgac

SEQ ID NO: 5520970 - DNA, 25 bp, Homo sapien
catgggtagcaatggcaatctaatc

SEQ ID NO: 5520971 - DNA, 25 bp, Homo sapien
tatttatacgagcagagaaggagta

SEQ ID NO: 5520972 - DNA, 25 bp, Homo sapien
cttcaaaggtatagtggccaccaac

SEQ ID NO: 5520973 - DNA, 25 bp, Homo sapien
ggagtaaattgcaaaggagtagtgc

SEQ ID NO: 5520974 - DNA, 25 bp, Homo sapien
atttgaggtgggaataattaagtag

SEQ ID NO: 5520975 - DNA, 25 bp, Homo sapien
ctttccatgtagaagtgggcaacct

SEQ ID NO: 5520976 - DNA, 25 bp, Homo sapien
caaggtgaaatagtggcaagttaat

SEQ ID NO: 5520977 - DNA, 25 bp, Homo sapien
agtgctaacttgagagctgggaatt

SEQ ID NO: 5520978 - DNA, 25 bp, Homo sapien
acagcatgatggcaaaatgttcccc

SEQ ID NO: 5520979 - DNA, 25 bp, Homo sapien
tgaagcatgtaaacaaagtgcgtgc

SEQ ID NO: 5520980 - DNA, 25 bp, Homo sapien
ttaaacagcttaaagatgattcctt

SEQ ID NO: 5520981 - DNA, 25 bp, Homo sapien
aaatgttccccaagcacaggtcctg

SEQ ID NO: 5520982 - DNA, 25 bp, Homo sapien
tatcagcaagtgaacagaaaattat

SEQ ID NO: 5520983 - DNA, 25 bp, Homo sapien
tactatcctactgaacttggggagt

SEQ ID NO: 5520984 - DNA, 25 bp, Homo sapien
acctttggaccacaggatgtgagac

SEQ ID NO: 5520985 - DNA, 25 bp, Homo sapien
tccttggtacaagagaacagcatga

SEQ ID NO: 5520986 - DNA, 25 bp, Homo sapien
tgagaagggaccaaccccacaatat

SEQ ID NO: 5520987 - DNA, 25 bp, Homo sapien
ttgtgtggtacccttctagaaaata

SEQ ID NO: 5520988 - DNA, 25 bp, Homo sapien
tgaaatcaacttagcacgacttctc

SEQ ID NO: 5520989 - DNA, 25 bp, Homo sapien
ggaggccctgaactagcattagaca

SEQ ID NO: 5520990 - DNA, 25 bp, Homo sapien
ttcacaatctagggtctggcacaac

SEQ ID NO: 5520991 - DNA, 25 bp, Homo sapien
tgcaaatgatcatgtggaagagagg

SEQ ID NO: 5520992 - DNA, 25 bp, Homo sapien
atgcccatgaagcgatgtgacattg

SEQ ID NO: 5520993 - DNA, 25 bp, Homo sapien
gagctcgtacaacagaagaacagtg

SEQ ID NO: 5520994 - DNA, 25 bp, Homo sapien
gaaggcatgctaggaaataggttta

SEQ ID NO: 5520995 - DNA, 25 bp, Homo sapien
aacagaagcctcattgggagttacc

SEQ ID NO: 5520996 - DNA, 25 bp, Homo sapien
ctgtacaaatcaatgcctggaggcc

SEQ ID NO: 5520997 - DNA, 25 bp, Homo sapien
tgaggttaaggaaacatccacgcag

SEQ ID NO: 5520998 - DNA, 25 bp, Homo sapien
tatcagcctcgcagaagagccaata

SEQ ID NO: 5520999 - DNA, 25 bp, Homo sapien
acccagatgctccatgggccatgcc

SEQ ID NO: 5521000 - DNA, 25 bp, Homo sapien
gatgagcgacacaaatgttagccat

SEQ ID NO: 5521001 - DNA, 25 bp, Homo sapien
atgcaaaagtataggatgacaaagt

SEQ ID NO: 5521002 - DNA, 25 bp, Homo sapien
agctttaaggacagcgtaggaaatc

SEQ ID NO: 5521003 - DNA, 25 bp, Homo sapien
aatatgattagagtgatgagcgaca

SEQ ID NO: 5521004 - DNA, 25 bp, Homo sapien
cttggccaaggctaactgctatcct

SEQ ID NO: 5521005 - DNA, 25 bp, Homo sapien
tgaagaggcagctcagacctattta

SEQ ID NO: 5521006 - DNA, 25 bp, Homo sapien
ttagaaacagattattcccagcacc

SEQ ID NO: 5521007 - DNA, 25 bp, Homo sapien
gtaggaaatcttagtagttgccatc

SEQ ID NO: 5521008 - DNA, 25 bp, Homo sapien
tcccagcaccagataaatgccccct

SEQ ID NO: 5521009 - DNA, 25 bp, Homo sapien
acacatgcagaaaaatacacatatc

SEQ ID NO: 5521010 - DNA, 25 bp, Homo sapien
aggatgacaaagtatgtaatgattc

SEQ ID NO: 5521011 - DNA, 25 bp, Homo sapien
gggccatggctttcatcctgtgtcc

SEQ ID NO: 5521012 - DNA, 25 bp, Homo sapien
attcctatgctggggtacacagtga

SEQ ID NO: 5521013 - DNA, 25 bp, Homo sapien
ctggaaccagcaagtcccagacaag

SEQ ID NO: 5521014 - DNA, 25 bp, Homo sapien
ccctatatgcacccctggaaccagc

SEQ ID NO: 5521015 - DNA, 25 bp, Homo sapien
ccagctttaagggttgtgagcccct

SEQ ID NO: 5521016 - DNA, 25 bp, Homo sapien
cccactggatctggcttacaggggg

SEQ ID NO: 5521017 - DNA, 25 bp, Homo sapien
ctgcttgtactaagccaggaggctt

SEQ ID NO: 5521018 - DNA, 25 bp, Homo sapien
agcctccagttgtagcaggtttcac

SEQ ID NO: 5521019 - DNA, 25 bp, Homo sapien
aagccaggaggctttaagctccagc

SEQ ID NO: 5521020 - DNA, 25 bp, Homo sapien
aaggtgaggcgttctcctgcttgta

SEQ ID NO: 5521021 - DNA, 25 bp, Homo sapien
tgtcctcaccgtctcgggggttgtg

SEQ ID NO: 5521022 - DNA, 25 bp, Homo sapien
ctggtgtcacaagaagtgcctcaac

SEQ ID NO: 5521023 - DNA, 25 bp, Homo sapien
cataaatccctgagcggagacattt

SEQ ID NO: 5521024 - DNA, 25 bp, Homo sapien
tagaaagtcatcataggtcaataac

SEQ ID NO: 5521025 - DNA, 25 bp, Homo sapien
taacgctacttgggaactggtgtca

SEQ ID NO: 5521026 - DNA, 25 bp, Homo sapien
cctgtagtgaaaagtgtcagggaca

SEQ ID NO: 5521027 - DNA, 25 bp, Homo sapien
gataaaatgttaagactagaaagtc

SEQ ID NO: 5521028 - DNA, 25 bp, Homo sapien
tctacaaaaggaaagcctacaaatc

SEQ ID NO: 5521029 - DNA, 25 bp, Homo sapien
acacaggcccaattattaacgctac

SEQ ID NO: 5521030 - DNA, 25 bp, Homo sapien
gcactgtctgcaataatccaccata

SEQ ID NO: 5521031 - DNA, 25 bp, Homo sapien
gatcatgttctaacgcccacccccc

SEQ ID NO: 5521032 - DNA, 25 bp, Homo sapien
gttggtcagttactaagtccagccc

SEQ ID NO: 5521033 - DNA, 25 bp, Homo sapien
gaagcaaggcagagatcatttttct

SEQ ID NO: 5521034 - DNA, 25 bp, Homo sapien
tactcgtagcacagagacaaaccca

SEQ ID NO: 5521035 - DNA, 25 bp, Homo sapien
ggcacagagccgacttcacctctcc

SEQ ID NO: 5521036 - DNA, 25 bp, Homo sapien
actgacaaatctgatgaagtccacc

SEQ ID NO: 5521037 - DNA, 25 bp, Homo sapien
cccctgtaagccagaatgtgaagaa

SEQ ID NO: 5521038 - DNA, 25 bp, Homo sapien
ttgatttttcaggatggcacagagc

SEQ ID NO: 5521039 - DNA, 25 bp, Homo sapien
ctttaaaacaaggaaggactgacaa

SEQ ID NO: 5521040 - DNA, 25 bp, Homo sapien
tcaaatattggacagagccagaata

SEQ ID NO: 5521041 - DNA, 25 bp, Homo sapien
ggagcaaggcaccagaattctatgc

SEQ ID NO: 5521042 - DNA, 25 bp, Homo sapien
aatgtgaagaaagcctactcgtagc

SEQ ID NO: 5521043 - DNA, 25 bp, Homo sapien
agaacataaaaaatcaggtaagaat

SEQ ID NO: 5521044 - DNA, 25 bp, Homo sapien
aggaaagactcggtcattagggaaa

SEQ ID NO: 5521045 - DNA, 25 bp, Homo sapien
aggcacccatggagaatgggataat

SEQ ID NO: 5521046 - DNA, 25 bp, Homo sapien
gggggatcctgtctcaggagaaaga

SEQ ID NO: 5521047 - DNA, 25 bp, Homo sapien
aatttccagtaaggaggccaaagtc

SEQ ID NO: 5521048 - DNA, 25 bp, Homo sapien
gaagcaagtacaaacaccagtcaac

SEQ ID NO: 5521049 - DNA, 25 bp, Homo sapien
acagctcagtgtgtgcaaacagcag

SEQ ID NO: 5521050 - DNA, 25 bp, Homo sapien
gcaagtgtgccatgcagctaaggtt

SEQ ID NO: 5521051 - DNA, 25 bp, Homo sapien
tgggataattcaacaggaaagactc

SEQ ID NO: 5521052 - DNA, 25 bp, Homo sapien
aggtctgggtgcacccctgaatcta

SEQ ID NO: 5521053 - DNA, 25 bp, Homo sapien
agcccctgtacaacaaaggagcaaa

SEQ ID NO: 5521054 - DNA, 25 bp, Homo sapien
gcactaactgggacagcccctgtac

SEQ ID NO: 5521055 - DNA, 25 bp, Homo sapien
tattttaaaaaggcgctacagtggc

SEQ ID NO: 5521056 - DNA, 25 bp, Homo sapien
aaccaggaccactgattgtaagtct

SEQ ID NO: 5521057 - DNA, 25 bp, Homo sapien
caacaaaagccttcatgaatgcctc

SEQ ID NO: 5521058 - DNA, 25 bp, Homo sapien
ggggacacacagtgtaagtggtaga

SEQ ID NO: 5521059 - DNA, 25 bp, Homo sapien
aagtggtagattttccaagacttcc

SEQ ID NO: 5521060 - DNA, 25 bp, Homo sapien
gccaagatatctgcccccaatgcta

SEQ ID NO: 5521061 - DNA, 25 bp, Homo sapien
cactaggtccctcagcatcatttct

SEQ ID NO: 5521062 - DNA, 25 bp, Homo sapien
tgcgagcctaagcaagactcaagag

SEQ ID NO: 5521063 - DNA, 25 bp, Homo sapien
tgaaaatctgggtgtcctaccccat

SEQ ID NO: 5521064 - DNA, 25 bp, Homo sapien
taccccataaccaggccaagatatc

SEQ ID NO: 5521065 - DNA, 25 bp, Homo sapien
tcagtagcataggattcaacaaaag

SEQ ID NO: 5521066 - DNA, 25 bp, Homo sapien
taaaatcagtgacaagaaacattcc

SEQ ID NO: 5521067 - DNA, 25 bp, Homo sapien
tgttggcaagtaaatgcagtactgt

SEQ ID NO: 5521068 - DNA, 25 bp, Homo sapien
cagctgagtgataaaggctgagtgt

SEQ ID NO: 5521069 - DNA, 25 bp, Homo sapien
ggagtagtgattgttgaaggaaaaa

SEQ ID NO: 5521070 - DNA, 25 bp, Homo sapien
aattaaactggcaagtggaaatgtt

SEQ ID NO: 5521071 - DNA, 25 bp, Homo sapien
gtgattgaagctgagtacattttgc

SEQ ID NO: 5521072 - DNA, 25 bp, Homo sapien
tcacagagaatgcagttgtcttgac

SEQ ID NO: 5521073 - DNA, 25 bp, Homo sapien
gaaggaaaaaatccagctgagtgat

SEQ ID NO: 5521074 - DNA, 25 bp, Homo sapien
gaatgcattgtgaaacgactggagt

SEQ ID NO: 5521075 - DNA, 25 bp, Homo sapien
gctgagtgttgaggaaatttctgca

SEQ ID NO: 5521076 - DNA, 25 bp, Homo sapien
gaaacattccaaacaagcaacagtc

SEQ ID NO: 5521077 - DNA, 25 bp, Homo sapien
tgggggaggtatcccaatcaatttc

SEQ ID NO: 5521078 - DNA, 25 bp, Homo sapien
aaggaagaatttgacattatggcac

SEQ ID NO: 5521079 - DNA, 25 bp, Homo sapien
atgtagcaccccagcagaatgtttt

SEQ ID NO: 5521080 - DNA, 25 bp, Homo sapien
tggcttccagttacagacttgagtt

SEQ ID NO: 5521081 - DNA, 25 bp, Homo sapien
acactgaaaagtgcctgatgtcatc

SEQ ID NO: 5521082 - DNA, 25 bp, Homo sapien
caaccgcatttagtgagatacagaa

SEQ ID NO: 5521083 - DNA, 25 bp, Homo sapien
acattaagtgctggtgaataggatg

SEQ ID NO: 5521084 - DNA, 25 bp, Homo sapien
aacatttctaaggatgacaaatact

SEQ ID NO: 5521085 - DNA, 25 bp, Homo sapien
caaaaaccatcacatacaaagtaca

SEQ ID NO: 5521086 - DNA, 25 bp, Homo sapien
aaccaaccacctggcttccagttac

SEQ ID NO: 5521087 - DNA, 25 bp, Homo sapien
tacagacttgagttggtttggggga

SEQ ID NO: 5521088 - DNA, 25 bp, Homo sapien
gagtcttaataataccagagagttc

SEQ ID NO: 5521089 - DNA, 25 bp, Homo sapien
actggcttgagggttataaataatt

SEQ ID NO: 5521090 - DNA, 25 bp, Homo sapien
taccagagagaaatgtgacaatatt

SEQ ID NO: 5521091 - DNA, 25 bp, Homo sapien
tcagtgttaggtagtaagtcaatcc

SEQ ID NO: 5521092 - DNA, 25 bp, Homo sapien
aaagtgaccctgacagaatgctgtt

SEQ ID NO: 5521093 - DNA, 25 bp, Homo sapien
acactcaagtggttataaatctcat

SEQ ID NO: 5521094 - DNA, 25 bp, Homo sapien
taaaaatcaactggcttgagggtta

SEQ ID NO: 5521095 - DNA, 25 bp, Homo sapien
ccctgtccctgattctgtgtgagtc

SEQ ID NO: 5521096 - DNA, 25 bp, Homo sapien
aaaacagcgctcagtgttaggtagt

SEQ ID NO: 5521097 - DNA, 25 bp, Homo sapien
tgttacacttgaatgcagggttggg

SEQ ID NO: 5521098 - DNA, 25 bp, Homo sapien
tgggatagtaatattaggagcagag

SEQ ID NO: 5521099 - DNA, 25 bp, Homo sapien
atttaaagaggaataggcaaataga

SEQ ID NO: 5521100 - DNA, 25 bp, Homo sapien
agcgcagtgctcttcatgaagtctg

SEQ ID NO: 5521101 - DNA, 25 bp, Homo sapien
ttcaagactggctaaatgatgataa

SEQ ID NO: 5521102 - DNA, 25 bp, Homo sapien
tctaggagactctataagataacca

SEQ ID NO: 5521103 - DNA, 25 bp, Homo sapien
cattctagtcattcagcaaggtgcc

SEQ ID NO: 5521104 - DNA, 25 bp, Homo sapien
taagcatatgtgaaaagcaaaaatt

SEQ ID NO: 5521105 - DNA, 25 bp, Homo sapien
tgtcagtaaaagaatgtatgtgctc

SEQ ID NO: 5521106 - DNA, 25 bp, Homo sapien
tcagtgaagttctgtgatgggcaca

SEQ ID NO: 5521107 - DNA, 25 bp, Homo sapien
ggttctggttctccctgcaggatga

SEQ ID NO: 5521108 - DNA, 25 bp, Homo sapien
taagaggttttaggctttaagcata

SEQ ID NO: 5521109 - DNA, 25 bp, Homo sapien
aggcaaatagagctgctgtggttct

SEQ ID NO: 5521110 - DNA, 25 bp, Homo sapien
gacgccaaccacaacatgcagatct

SEQ ID NO: 5521111 - DNA, 25 bp, Homo sapien
aagaaagagcttgttgcgcatttga

SEQ ID NO: 5521112 - DNA, 25 bp, Homo sapien
ctacgtgtcctggctcatcgacgcc

SEQ ID NO: 5521113 - DNA, 25 bp, Homo sapien
ccatcacgggcctgaccttctggga

SEQ ID NO: 5521114 - DNA, 25 bp, Homo sapien
ccttgatccagacaaagtgtgccga

SEQ ID NO: 5521115 - DNA, 25 bp, Homo sapien
gcagatctggaccactggagaatac

SEQ ID NO: 5521116 - DNA, 25 bp, Homo sapien
tcccaaggacacttgtagcccggag

SEQ ID NO: 5521117 - DNA, 25 bp, Homo sapien
gcaccgatccagaccactcctccca

SEQ ID NO: 5521118 - DNA, 25 bp, Homo sapien
ttgtggcatccttcgtggagctacc

SEQ ID NO: 5521119 - DNA, 25 bp, Homo sapien
agacacacctcaaggcctcctgggg

SEQ ID NO: 5521120 - DNA, 25 bp, Homo sapien
atgaccctggtactaaagaaagagc

SEQ ID NO: 5521121 - DNA, 25 bp, Homo sapien
tactgtggttacgttaggacttctc

SEQ ID NO: 5521122 - DNA, 25 bp, Homo sapien
aatgttgaaccaaactagaagtcta

SEQ ID NO: 5521123 - DNA, 25 bp, Homo sapien
atttactaagaagcacctacgtgcc

SEQ ID NO: 5521124 - DNA, 25 bp, Homo sapien
ctgtggcaacactgagcaagtttat

SEQ ID NO: 5521125 - DNA, 25 bp, Homo sapien
tagtagcaacatgactaaggtctca

SEQ ID NO: 5521126 - DNA, 25 bp, Homo sapien
tcttaggcggtcatatgccctactt

SEQ ID NO: 5521127 - DNA, 25 bp, Homo sapien
attggtaatgtaactctgtggcaac

SEQ ID NO: 5521128 - DNA, 25 bp, Homo sapien
ttttcttggagacaagggtcactct

SEQ ID NO: 5521129 - DNA, 25 bp, Homo sapien
agcacctacgtgccagatttgagtt

SEQ ID NO: 5521130 - DNA, 25 bp, Homo sapien
ctttgatggctataaaacaaccctc

SEQ ID NO: 5521131 - DNA, 25 bp, Homo sapien
ccacatatagtaagactccccttcc

SEQ ID NO: 5521132 - DNA, 25 bp, Homo sapien
acgattatgcacatgaccagaggcg

SEQ ID NO: 5521133 - DNA, 25 bp, Homo sapien
actgttcgcaaaacagtgcgggctg

SEQ ID NO: 5521134 - DNA, 25 bp, Homo sapien
cgggctgcgatctgctctctgttcc

SEQ ID NO: 5521135 - DNA, 25 bp, Homo sapien
atccagcaggccaataataaaatgt

SEQ ID NO: 5521136 - DNA, 25 bp, Homo sapien
cttttcagattgtgggctggaaagg

SEQ ID NO: 5521137 - DNA, 25 bp, Homo sapien
catgctaatgacaggatgttcctcg

SEQ ID NO: 5521138 - DNA, 25 bp, Homo sapien
tgttcccctggatccgcctatgcac

SEQ ID NO: 5521139 - DNA, 25 bp, Homo sapien
gagggagacgtgaagcctatttaaa

SEQ ID NO: 5521140 - DNA, 25 bp, Homo sapien
taaaatgagcctgtgacgattatgc

SEQ ID NO: 5521141 - DNA, 25 bp, Homo sapien
tggccgcagtccttgcgaactgttc

SEQ ID NO: 5521142 - DNA, 25 bp, Homo sapien
gtgggtcagcgtcacatgctaatga

SEQ ID NO: 5521143 - DNA, 25 bp, Homo sapien
tgataaaagctgttgacttggctct

SEQ ID NO: 5521144 - DNA, 25 bp, Homo sapien
tagtggtcgctaaaaatgtagaaat

SEQ ID NO: 5521145 - DNA, 25 bp, Homo sapien
caaatgtggtgaaagtctgagtctt

SEQ ID NO: 5521146 - DNA, 25 bp, Homo sapien
ccaagtatgatattctgagagtgtc

SEQ ID NO: 5521147 - DNA, 25 bp, Homo sapien
agcaaatgcccaaataatagactac

SEQ ID NO: 5521148 - DNA, 25 bp, Homo sapien
catgggtaaaatctgaatctggctc

SEQ ID NO: 5521149 - DNA, 25 bp, Homo sapien
gggcagctgttgactcagattcggc

SEQ ID NO: 5521150 - DNA, 25 bp, Homo sapien
tggggaatgtcttccactagtggtc

SEQ ID NO: 5521151 - DNA, 25 bp, Homo sapien
tgtagaaatatcatagggagtgcaa

SEQ ID NO: 5521152 - DNA, 25 bp, Homo sapien
attgctggtcagagagtaaattctt

SEQ ID NO: 5521153 - DNA, 25 bp, Homo sapien
catagggagtgcaaattacattgtc

SEQ ID NO: 5521154 - DNA, 25 bp, Homo sapien
attttacacagcaagttacctatta

SEQ ID NO: 5521155 - DNA, 25 bp, Homo sapien
tattaacagatctatttggacaatc

SEQ ID NO: 5521156 - DNA, 25 bp, Homo sapien
taaacccccatcacagagcagaaat

SEQ ID NO: 5521157 - DNA, 25 bp, Homo sapien
ttggacaatcagatttccttgagat

SEQ ID NO: 5521158 - DNA, 25 bp, Homo sapien
aaaaggttaactcattcaaacacat

SEQ ID NO: 5521159 - DNA, 25 bp, Homo sapien
aacagtggagtaattttattcacat

SEQ ID NO: 5521160 - DNA, 25 bp, Homo sapien
tttattcacatagggttgcgattaa

SEQ ID NO: 5521161 - DNA, 25 bp, Homo sapien
tacaaataaacccccatcacagagc

SEQ ID NO: 5521162 - DNA, 25 bp, Homo sapien
cacatagggttgcgattaaaaggtt

SEQ ID NO: 5521163 - DNA, 25 bp, Homo sapien
aattatatcacaaatggagcacaat

SEQ ID NO: 5521164 - DNA, 25 bp, Homo sapien
atcacaaatggagcacaataagtat

SEQ ID NO: 5521165 - DNA, 25 bp, Homo sapien
agacggccggcccctcgctccatcc

SEQ ID NO: 5521166 - DNA, 25 bp, Homo sapien
ggatggagcgaggggccggccgtct

SEQ ID NO: 5521167 - DNA, 25 bp, Homo sapien
gacggccggcccctcgctccatccc

SEQ ID NO: 5521168 - DNA, 25 bp, Homo sapien
gggatggagcgaggggccggccgtc

SEQ ID NO: 5521169 - DNA, 25 bp, Homo sapien
cgtgggaacccacacctgcttgtaa

SEQ ID NO: 5521170 - DNA, 25 bp, Homo sapien
agcctctgcagcaaactgcggtcac

SEQ ID NO: 5521171 - DNA, 25 bp, Homo sapien
cgtaagactgtaaccatggtcatgt

SEQ ID NO: 5521172 - DNA, 25 bp, Homo sapien
gagacgaaaggctgttttttgaggc

SEQ ID NO: 5521173 - DNA, 25 bp, Homo sapien
gtttgttgttccaagcagtgggctc

SEQ ID NO: 5521174 - DNA, 25 bp, Homo sapien
gaccagcaaccaggacagtttgttg

SEQ ID NO: 5521175 - DNA, 25 bp, Homo sapien
ctataatcgctcctgtggcacagag

SEQ ID NO: 5521176 - DNA, 25 bp, Homo sapien
ggccactctgtgcccacgtgggaac

SEQ ID NO: 5521177 - DNA, 25 bp, Homo sapien
tatccttgagattgcgtgggagaca

SEQ ID NO: 5521178 - DNA, 25 bp, Homo sapien
accccaacatgacaacgtaagactg

SEQ ID NO: 5521179 - DNA, 25 bp, Homo sapien
tcatgtgagttatgagctaggaacc

SEQ ID NO: 5521180 - DNA, 25 bp, Homo sapien
aaaacatgagcaaatcagcattctc

SEQ ID NO: 5521181 - DNA, 25 bp, Homo sapien
gcatggaggcatgtgctcacagata

SEQ ID NO: 5521182 - DNA, 25 bp, Homo sapien
gtcaatagaggactggtttggaaga

SEQ ID NO: 5521183 - DNA, 25 bp, Homo sapien
gcctcggtggtgactttgtaccctc

SEQ ID NO: 5521184 - DNA, 25 bp, Homo sapien
tgagtaaagagtataaaatagatgc

SEQ ID NO: 5521185 - DNA, 25 bp, Homo sapien
ctgtgcccaccagctggggcataga

SEQ ID NO: 5521186 - DNA, 25 bp, Homo sapien
tctatggtggtccccagtccagaat

SEQ ID NO: 5521187 - DNA, 25 bp, Homo sapien
ggggcatagaagggtttctgcctca

SEQ ID NO: 5521188 - DNA, 25 bp, Homo sapien
tatggatttctggtcaatagaggac

SEQ ID NO: 5521189 - DNA, 25 bp, Homo sapien
aatagatgctaagcctcggtggtga

SEQ ID NO: 5521190 - DNA, 25 bp, Homo sapien
cacagaaagtaaaagtcacccagca

SEQ ID NO: 5521191 - DNA, 25 bp, Homo sapien
attccaacaagtaccataaaacgtc

SEQ ID NO: 5521192 - DNA, 25 bp, Homo sapien
tcagagaagattccatgacactgtg

SEQ ID NO: 5521193 - DNA, 25 bp, Homo sapien
taagtcccaattccaacaagtacca

SEQ ID NO: 5521194 - DNA, 25 bp, Homo sapien
atataagcaactgctcttgagcaag

SEQ ID NO: 5521195 - DNA, 25 bp, Homo sapien
ttctgaccaatttctccagggaact

SEQ ID NO: 5521196 - DNA, 25 bp, Homo sapien
gttttcaaatggttctgacagatca

SEQ ID NO: 5521197 - DNA, 25 bp, Homo sapien
aagcatatagtagtacataagcagg

SEQ ID NO: 5521198 - DNA, 25 bp, Homo sapien
taaaatgcgattttgagaaacaatc

SEQ ID NO: 5521199 - DNA, 25 bp, Homo sapien
tcccaccctcagagatggttactcc

SEQ ID NO: 5521200 - DNA, 25 bp, Homo sapien
tccatgacactgtgggtagacaaac

SEQ ID NO: 5521201 - DNA, 25 bp, Homo sapien
tgtcccaagtgttaaatgtcaaagt

SEQ ID NO: 5521202 - DNA, 25 bp, Homo sapien
aaggagttatgtgaggtcagctaaa

SEQ ID NO: 5521203 - DNA, 25 bp, Homo sapien
atgtgaggtcagctaaaactaatta

SEQ ID NO: 5521204 - DNA, 25 bp, Homo sapien
gaataaggaatccattatcaatgac

SEQ ID NO: 5521205 - DNA, 25 bp, Homo sapien
gagaaggtcataggaattttcatcc

SEQ ID NO: 5521206 - DNA, 25 bp, Homo sapien
tctcaggcctgctcctactatgtcc

SEQ ID NO: 5521207 - DNA, 25 bp, Homo sapien
actctatattgccaaagggataatc

SEQ ID NO: 5521208 - DNA, 25 bp, Homo sapien
tcagtcgtctggagttctcagaata

SEQ ID NO: 5521209 - DNA, 25 bp, Homo sapien
tgaatatttgatgacctgacacctc

SEQ ID NO: 5521210 - DNA, 25 bp, Homo sapien
tacttcttggcaaagcatgtttact

SEQ ID NO: 5521211 - DNA, 25 bp, Homo sapien
aggaaaaactaaggctagagaatat

SEQ ID NO: 5521212 - DNA, 25 bp, Homo sapien
tagagaaaccatgggtttggagagg

SEQ ID NO: 5521213 - DNA, 25 bp, Homo sapien
ctcatttgtcaggagaaagaaaggt

SEQ ID NO: 5521214 - DNA, 25 bp, Homo sapien
atttactgtactctcagacagactc

SEQ ID NO: 5521215 - DNA, 25 bp, Homo sapien
tggctcatatgtttgtccaaaaccc

SEQ ID NO: 5521216 - DNA, 25 bp, Homo sapien
aaagaaaggtacatacaaagtagta

SEQ ID NO: 5521217 - DNA, 25 bp, Homo sapien
aaggaaacatcccaaaagacattta

SEQ ID NO: 5521218 - DNA, 25 bp, Homo sapien
tctcagacagactcatataaaataa

SEQ ID NO: 5521219 - DNA, 25 bp, Homo sapien
catgaaaaagatacttggatgatgg

SEQ ID NO: 5521220 - DNA, 25 bp, Homo sapien
taaaataacctcatttgtcaggaga

SEQ ID NO: 5521221 - DNA, 25 bp, Homo sapien
aataaacatgaaaaagatacttgga

SEQ ID NO: 5521222 - DNA, 25 bp, Homo sapien
aaagtagtaaattatgagttttgac

SEQ ID NO: 5521223 - DNA, 25 bp, Homo sapien
atttcaggaaaaataaactgtatta

SEQ ID NO: 5521224 - DNA, 25 bp, Homo sapien
agaagttgtaagaagaattgagcta

SEQ ID NO: 5521225 - DNA, 25 bp, Homo sapien
tatgaaaaagctaaggtgtagaaaa

SEQ ID NO: 5521226 - DNA, 25 bp, Homo sapien
tggagacgcgtacctaagctttttc

SEQ ID NO: 5521227 - DNA, 25 bp, Homo sapien
taggaaatgctgtcatgaattcttc

SEQ ID NO: 5521228 - DNA, 25 bp, Homo sapien
agggctttttgaaagcagcgcctgc

SEQ ID NO: 5521229 - DNA, 25 bp, Homo sapien
gatgatttgggcagggctttttgaa

SEQ ID NO: 5521230 - DNA, 25 bp, Homo sapien
tccagctattgaaattaggggaggg

SEQ ID NO: 5521231 - DNA, 25 bp, Homo sapien
aatgggcaaaaatgtcttcaaggat

SEQ ID NO: 5521232 - DNA, 25 bp, Homo sapien
aagaaaccatcatttggagacgcgt

SEQ ID NO: 5521233 - DNA, 25 bp, Homo sapien
tttggagtctagtgcataaattggt

SEQ ID NO: 5521234 - DNA, 25 bp, Homo sapien
atcgacttttacactggggagacca

SEQ ID NO: 5521235 - DNA, 25 bp, Homo sapien
gcggtgttgataactgacgtgatgt

SEQ ID NO: 5521236 - DNA, 25 bp, Homo sapien
ttctacaccagagaatgaagaccca

SEQ ID NO: 5521237 - DNA, 25 bp, Homo sapien
atgagcaaaagggatcttgaccaaa

SEQ ID NO: 5521238 - DNA, 25 bp, Homo sapien
ttcaagcctggtgtggctgtaggaa

SEQ ID NO: 5521239 - DNA, 25 bp, Homo sapien
ccatggaatgggcatccctctagac

SEQ ID NO: 5521240 - DNA, 25 bp, Homo sapien
taccacacacaagcagagatgtcag

SEQ ID NO: 5521241 - DNA, 25 bp, Homo sapien
attctaaggttgaaccacagggtcc

SEQ ID NO: 5521242 - DNA, 25 bp, Homo sapien
gaaagagcctacaggaaacagattc

SEQ ID NO: 5521243 - DNA, 25 bp, Homo sapien
tgatgtgggctaaacagacatgtta

SEQ ID NO: 5521244 - DNA, 25 bp, Homo sapien
aagggataaatgtctgataggaacc

SEQ ID NO: 5521245 - DNA, 25 bp, Homo sapien
tgagtatgaaaccctggatgagcaa

SEQ ID NO: 5521246 - DNA, 25 bp, Homo sapien
ttcactgaagtccaaaagccatccc

SEQ ID NO: 5521247 - DNA, 25 bp, Homo sapien
gagaatacctcagacgaccacagat

SEQ ID NO: 5521248 - DNA, 25 bp, Homo sapien
cttgctaaaggtcaattcaggatat

SEQ ID NO: 5521249 - DNA, 25 bp, Homo sapien
aagattctatcaagactgaggcaaa

SEQ ID NO: 5521250 - DNA, 25 bp, Homo sapien
tcctgtgaccactggagcactagta

SEQ ID NO: 5521251 - DNA, 25 bp, Homo sapien
aaatgcatcagctaaactgggttat

SEQ ID NO: 5521252 - DNA, 25 bp, Homo sapien
tatacagtactgaagcgttatcaac

SEQ ID NO: 5521253 - DNA, 25 bp, Homo sapien
tatcaacaatgagtagcagaaattc

SEQ ID NO: 5521254 - DNA, 25 bp, Homo sapien
actgggttatagcatggagaatacc

SEQ ID NO: 5521255 - DNA, 25 bp, Homo sapien
attgacagaacactagaaaacaagt

SEQ ID NO: 5521256 - DNA, 25 bp, Homo sapien
tacaagaacaaggtatttactgtca

SEQ ID NO: 5521257 - DNA, 25 bp, Homo sapien
aggtgttaccaaaagttagctactc

SEQ ID NO: 5521258 - DNA, 25 bp, Homo sapien
cccctagtagggtgatatataagcg

SEQ ID NO: 5521259 - DNA, 25 bp, Homo sapien
gggtgatatataagcgacatggtcc

SEQ ID NO: 5521260 - DNA, 25 bp, Homo sapien
cttgcttagaagggaaaattatatc

SEQ ID NO: 5521261 - DNA, 25 bp, Homo sapien
gaaaacgtgtgaatttgctttatat

SEQ ID NO: 5521262 - DNA, 25 bp, Homo sapien
tacaaaactatttagcactgccatt

SEQ ID NO: 5521263 - DNA, 25 bp, Homo sapien
cttatcagaaggaaaccaccatttc

SEQ ID NO: 5521264 - DNA, 25 bp, Homo sapien
aatgcaaatgcatctgaaaaatatt

SEQ ID NO: 5521265 - DNA, 25 bp, Homo sapien
acatcatgtaacagaatttcagtcc

SEQ ID NO: 5521266 - DNA, 25 bp, Homo sapien
atcaaaatttcaagactgaggtttc

SEQ ID NO: 5521267 - DNA, 25 bp, Homo sapien
atggtaaaacagtgtcatgattttt

SEQ ID NO: 5521268 - DNA, 25 bp, Homo sapien
agatgtgtttcagtggagtctccca

SEQ ID NO: 5521269 - DNA, 25 bp, Homo sapien
tttctcagggtaaaagcttaggaca

SEQ ID NO: 5521270 - DNA, 25 bp, Homo sapien
tgctataggaggtaaagcacaagtt

SEQ ID NO: 5521271 - DNA, 25 bp, Homo sapien
agagaggctctaacactgctgtgta

SEQ ID NO: 5521272 - DNA, 25 bp, Homo sapien
aatagactgcaatcagaagatagat

SEQ ID NO: 5521273 - DNA, 25 bp, Homo sapien
tgtctcggctgtgctataggaggta

SEQ ID NO: 5521274 - DNA, 25 bp, Homo sapien
atttctaagagtaatggacaaaaga

SEQ ID NO: 5521275 - DNA, 25 bp, Homo sapien
aacttagtggtctagcagatgtgtt

SEQ ID NO: 5521276 - DNA, 25 bp, Homo sapien
tgattggttcagtgacaaaagggaa

SEQ ID NO: 5521277 - DNA, 25 bp, Homo sapien
ttgtttcactacagagaggctctaa

SEQ ID NO: 5521278 - DNA, 25 bp, Homo sapien
aaactgggtgacaaggataaactta

SEQ ID NO: 5521279 - DNA, 25 bp, Homo sapien
tttcggccaatcaaaggtggccaac

SEQ ID NO: 5521280 - DNA, 25 bp, Homo sapien
gggggtattggtgctgttaaatcaa

SEQ ID NO: 5521281 - DNA, 25 bp, Homo sapien
tccaccacgtggctgtgttcaagac

SEQ ID NO: 5521282 - DNA, 25 bp, Homo sapien
aaaggatgtgtaaacagactgcaac

SEQ ID NO: 5521283 - DNA, 25 bp, Homo sapien
tgtgccaatcactgagtttcggcca

SEQ ID NO: 5521284 - DNA, 25 bp, Homo sapien
agaaggaggaatgcgccattctttg

SEQ ID NO: 5521285 - DNA, 25 bp, Homo sapien
gctgagctataaccagtctggctgt

SEQ ID NO: 5521286 - DNA, 25 bp, Homo sapien
acgactttgttacagggtagggcat

SEQ ID NO: 5521287 - DNA, 25 bp, Homo sapien
ataagaaattctaaggagctgtcat

SEQ ID NO: 5521288 - DNA, 25 bp, Homo sapien
tcaaataaggccaatgctgagctat

SEQ ID NO: 5521289 - DNA, 25 bp, Homo sapien
caggaggcttctagatttgtgaatt

SEQ ID NO: 5521290 - DNA, 25 bp, Homo sapien
aaagcagtgctgtcgactagaaata

SEQ ID NO: 5521291 - DNA, 25 bp, Homo sapien
aagggctccgagcacttcgaaagta

SEQ ID NO: 5521292 - DNA, 25 bp, Homo sapien
agctcctggtccctcgtaggggacc

SEQ ID NO: 5521293 - DNA, 25 bp, Homo sapien
agaggcgtgctgtgtctgcattttc

SEQ ID NO: 5521294 - DNA, 25 bp, Homo sapien
cgactagaaatattgtgcgatacac

SEQ ID NO: 5521295 - DNA, 25 bp, Homo sapien
ggttccgcctccccactcctgcgtc

SEQ ID NO: 5521296 - DNA, 25 bp, Homo sapien
cacttcgaaagtataaaccgcggtc

SEQ ID NO: 5521297 - DNA, 25 bp, Homo sapien
cttctctgacaccgcgttgggttcc

SEQ ID NO: 5521298 - DNA, 25 bp, Homo sapien
gccccggagcttcctccctggagcc

SEQ ID NO: 5521299 - DNA, 25 bp, Homo sapien
gtaggggaccccacttctctgacac

SEQ ID NO: 5521300 - DNA, 25 bp, Homo sapien
agcctcgcgcggctcttccgcagct

SEQ ID NO: 5521301 - DNA, 25 bp, Homo sapien
atgaaactctgggagaagcacttca

SEQ ID NO: 5521302 - DNA, 25 bp, Homo sapien
atggatgaatactgttgggccctac

SEQ ID NO: 5521303 - DNA, 25 bp, Homo sapien
tgaattggaatttagtggtctggat

SEQ ID NO: 5521304 - DNA, 25 bp, Homo sapien
ccaatatggggtattgttggtgagg

SEQ ID NO: 5521305 - DNA, 25 bp, Homo sapien
tcaagataaagaggaagttgtctta

SEQ ID NO: 5521306 - DNA, 25 bp, Homo sapien
atctaactagtgaaggaaaggtgaa

SEQ ID NO: 5521307 - DNA, 25 bp, Homo sapien
gcacttcaaggggttgaattggaat

SEQ ID NO: 5521308 - DNA, 25 bp, Homo sapien
gatgatgtgatgccagccacttact

SEQ ID NO: 5521309 - DNA, 25 bp, Homo sapien
cattctgtgtggggtcaaaaaaaag

SEQ ID NO: 5521310 - DNA, 25 bp, Homo sapien
taatggaaatcgaattgttgatgtt

SEQ ID NO: 5521311 - DNA, 25 bp, Homo sapien
tgggccctaccataatcgtcaagaa

SEQ ID NO: 5521312 - DNA, 25 bp, Homo sapien
tcacctggtgggttgctaaaagatg

SEQ ID NO: 5521313 - DNA, 25 bp, Homo sapien
tataataggataacaggtagatgag

SEQ ID NO: 5521314 - DNA, 25 bp, Homo sapien
ctcgtactgttgctctgaggggagt

SEQ ID NO: 5521315 - DNA, 25 bp, Homo sapien
gttgatgctgtcatctgatagggga

SEQ ID NO: 5521316 - DNA, 25 bp, Homo sapien
ctaaaagatgcagattagccctttc

SEQ ID NO: 5521317 - DNA, 25 bp, Homo sapien
aggcaataaggtggtttatggttac

SEQ ID NO: 5521318 - DNA, 25 bp, Homo sapien
ggggatgttgctcgtactgttgctc

SEQ ID NO: 5521319 - DNA, 25 bp, Homo sapien
gtgaagtttgaggtaggtatctttc

SEQ ID NO: 5521320 - DNA, 25 bp, Homo sapien
ataatgatgtgaagtttgaggtagg

SEQ ID NO: 5521321 - DNA, 25 bp, Homo sapien
cccaggaatgaggctagaacattta

SEQ ID NO: 5521322 - DNA, 25 bp, Homo sapien
tgaggggagtacatcttgagtattt

SEQ ID NO: 5521323 - DNA, 25 bp, Homo sapien
ggctggaaaagccaacaatctttac

SEQ ID NO: 5521324 - DNA, 25 bp, Homo sapien
tccaaaaagtttggaacacagccac

SEQ ID NO: 5521325 - DNA, 25 bp, Homo sapien
ctcccctgtgtgtacctatccttgc

SEQ ID NO: 5521326 - DNA, 25 bp, Homo sapien
cctggtggcggcttcatgccactac

SEQ ID NO: 5521327 - DNA, 25 bp, Homo sapien
agccacatgcactggtgcgtggccc

SEQ ID NO: 5521328 - DNA, 25 bp, Homo sapien
ccaagccctgcttcactcccctgtg

SEQ ID NO: 5521329 - DNA, 25 bp, Homo sapien
tgaaaagatgtaaaagggtaatatc

SEQ ID NO: 5521330 - DNA, 25 bp, Homo sapien
tagttactcccagccccacggattc

SEQ ID NO: 5521331 - DNA, 25 bp, Homo sapien
gattcaaaggaaatcccagacatcc

SEQ ID NO: 5521332 - DNA, 25 bp, Homo sapien
tgcacagcccaaatgttaagaatga

SEQ ID NO: 5521333 - DNA, 25 bp, Homo sapien
tgggcccaccagctgtttttgcaca

SEQ ID NO: 5521334 - DNA, 25 bp, Homo sapien
tggatgacatcctggactccgcgga

SEQ ID NO: 5521335 - DNA, 25 bp, Homo sapien
gcctccgaccctgccgcctatgtct

SEQ ID NO: 5521336 - DNA, 25 bp, Homo sapien
cctgccgcctatgtctcccacctcc

SEQ ID NO: 5521337 - DNA, 25 bp, Homo sapien
acggcctggattggctcaagatcca

SEQ ID NO: 5521338 - DNA, 25 bp, Homo sapien
cttgcaacggcctgcagcattatgc

SEQ ID NO: 5521339 - DNA, 25 bp, Homo sapien
gattggctcaagatccacctggtca

SEQ ID NO: 5521340 - DNA, 25 bp, Homo sapien
ggtcaatctcacggggttgaagaag

SEQ ID NO: 5521341 - DNA, 25 bp, Homo sapien
tccacctggtcaatctcacggggtt

SEQ ID NO: 5521342 - DNA, 25 bp, Homo sapien
gaggtgatggatgacatcctggact

SEQ ID NO: 5521343 - DNA, 25 bp, Homo sapien
agcattatgctgctctgggccgcga

SEQ ID NO: 5521344 - DNA, 25 bp, Homo sapien
ctcccacctccccgtccatcaggac

SEQ ID NO: 5521345 - DNA, 25 bp, Homo sapien
gagtgagttcatttaggataatggc

SEQ ID NO: 5521346 - DNA, 25 bp, Homo sapien
gtagggcccagaggcttaatcagaa

SEQ ID NO: 5521347 - DNA, 25 bp, Homo sapien
atgtctttgttcgaaagagggaaaa

SEQ ID NO: 5521348 - DNA, 25 bp, Homo sapien
atcagaattttcagacaaaactgga

SEQ ID NO: 5521349 - DNA, 25 bp, Homo sapien
ggtgtaggattctccaggttctcca

SEQ ID NO: 5521350 - DNA, 25 bp, Homo sapien
ataaaaagcatagtaccagataggt

SEQ ID NO: 5521351 - DNA, 25 bp, Homo sapien
tgtgtaggcttgctatataggtaaa

SEQ ID NO: 5521352 - DNA, 25 bp, Homo sapien
tgtagtccttgggcaaaccaatgtc

SEQ ID NO: 5521353 - DNA, 25 bp, Homo sapien
cttccatgctccgacctcaggtagg

SEQ ID NO: 5521354 - DNA, 25 bp, Homo sapien
tccacgttgctgcacaggacatgat

SEQ ID NO: 5521355 - DNA, 25 bp, Homo sapien
taaattgcatgtcaccagggtttgt

SEQ ID NO: 5521356 - DNA, 25 bp, Homo sapien
tttgcttaaagcagtgttgacacaa

SEQ ID NO: 5521357 - DNA, 25 bp, Homo sapien
accaaaatgcaatgtagagacccaa

SEQ ID NO: 5521358 - DNA, 25 bp, Homo sapien
gaagtgcaataaatcaaggcatgcc

SEQ ID NO: 5521359 - DNA, 25 bp, Homo sapien
agtttaccgtgttatatgggtgcgg

SEQ ID NO: 5521360 - DNA, 25 bp, Homo sapien
caaggcatgcctgtatactctctcc

SEQ ID NO: 5521361 - DNA, 25 bp, Homo sapien
ctggggaaatgccaccctttaggga

SEQ ID NO: 5521362 - DNA, 25 bp, Homo sapien
tgtcagagcatacagatggctcatc

SEQ ID NO: 5521363 - DNA, 25 bp, Homo sapien
tgcccctggcaccttcccacacctg

SEQ ID NO: 5521364 - DNA, 25 bp, Homo sapien
ggttcatggcgccccgaaacaatta

SEQ ID NO: 5521365 - DNA, 25 bp, Homo sapien
gcccctctgcacccctgcccctggc

SEQ ID NO: 5521366 - DNA, 25 bp, Homo sapien
gtagagacccaaaatgggcacatgc

SEQ ID NO: 5521367 - DNA, 25 bp, Homo sapien
gaagctccaattaatgaagagtctt

SEQ ID NO: 5521368 - DNA, 25 bp, Homo sapien
tagcaatgggcaaatacacattttc

SEQ ID NO: 5521369 - DNA, 25 bp, Homo sapien
gggacaaataaatacaaaatggcat

SEQ ID NO: 5521370 - DNA, 25 bp, Homo sapien
aaagacacttgggacaaataaatac

SEQ ID NO: 5521371 - DNA, 25 bp, Homo sapien
agggaccaagacatctgaatcaaca

SEQ ID NO: 5521372 - DNA, 25 bp, Homo sapien
aacagaaagctgaacacaacatgtg

SEQ ID NO: 5521373 - DNA, 25 bp, Homo sapien
tctaggactattcagggaccaagac

SEQ ID NO: 5521374 - DNA, 25 bp, Homo sapien
taataaaattttcagaggcatactc

SEQ ID NO: 5521375 - DNA, 25 bp, Homo sapien
tagtttgcatgaatagagcctgttc

SEQ ID NO: 5521376 - DNA, 25 bp, Homo sapien
gatgttgcccagaagctccaattaa

SEQ ID NO: 5521377 - DNA, 25 bp, Homo sapien
tggcaaataatataaaacagaaagc

SEQ ID NO: 5521378 - DNA, 25 bp, Homo sapien
tcagccgagctgactagcctagcta

SEQ ID NO: 5521379 - DNA, 25 bp, Homo sapien
gtgcaacagcctgtacaaccctgtc

SEQ ID NO: 5521380 - DNA, 25 bp, Homo sapien
caggtttgagcattgataaacactc

SEQ ID NO: 5521381 - DNA, 25 bp, Homo sapien
gaactcaagctcatgcctgaaattc

SEQ ID NO: 5521382 - DNA, 25 bp, Homo sapien
gctgacagttaataagaactcaagc

SEQ ID NO: 5521383 - DNA, 25 bp, Homo sapien
acaccaccgcaatacagcctgtgca

SEQ ID NO: 5521384 - DNA, 25 bp, Homo sapien
gactagcctagctaggaaagagcca

SEQ ID NO: 5521385 - DNA, 25 bp, Homo sapien
cttgaggcccttaggtcaagaccaa

SEQ ID NO: 5521386 - DNA, 25 bp, Homo sapien
ctgaaattcacagtgctttaggagg

SEQ ID NO: 5521387 - DNA, 25 bp, Homo sapien
gaaagagccagtcaggctgacagtt

SEQ ID NO: 5521388 - DNA, 25 bp, Homo sapien
tccatagtaataagcctgtcctccc

SEQ ID NO: 5521389 - DNA, 25 bp, Homo sapien
gggagaagggatattccacatcaca

SEQ ID NO: 5521390 - DNA, 25 bp, Homo sapien
gaccttctagaagtgcagctgtagg

SEQ ID NO: 5521391 - DNA, 25 bp, Homo sapien
ttccaatcaggtgcactgatggggc

SEQ ID NO: 5521392 - DNA, 25 bp, Homo sapien
gaaacggatcctagcgcccagtttc

SEQ ID NO: 5521393 - DNA, 25 bp, Homo sapien
ctagcgcccagtttccaggacctga

SEQ ID NO: 5521394 - DNA, 25 bp, Homo sapien
agaatcggacaggctgaccttctag

SEQ ID NO: 5521395 - DNA, 25 bp, Homo sapien
atgacctgaaatcgtctggtgtgcc

SEQ ID NO: 5521396 - DNA, 25 bp, Homo sapien
tccaggacctgaaatctagtgtgtt

SEQ ID NO: 5521397 - DNA, 25 bp, Homo sapien
tggtgtgccttggacatggccaatt

SEQ ID NO: 5521398 - DNA, 25 bp, Homo sapien
atctagtgtgttccaatcaggtgca

SEQ ID NO: 5521399 - DNA, 25 bp, Homo sapien
cacagtgcttgcacccccatgtgcc

SEQ ID NO: 5521400 - DNA, 25 bp, Homo sapien
aagggaagagggcatcctttcaata

SEQ ID NO: 5521401 - DNA, 25 bp, Homo sapien
acagtcaatggaaaggtcaatgttc

SEQ ID NO: 5521402 - DNA, 25 bp, Homo sapien
ctggctgcttgaaagacagtcaatg

SEQ ID NO: 5521403 - DNA, 25 bp, Homo sapien
aaggcttaaagaaagacgcagcatt

SEQ ID NO: 5521404 - DNA, 25 bp, Homo sapien
gttagctccaaacaggccctagacc

SEQ ID NO: 5521405 - DNA, 25 bp, Homo sapien
cttgtccatgcctcggaagaaggtc

SEQ ID NO: 5521406 - DNA, 25 bp, Homo sapien
tctgcatgttctctggggcttgtcc

SEQ ID NO: 5521407 - DNA, 25 bp, Homo sapien
caactgcaagatcattggagaggaa

SEQ ID NO: 5521408 - DNA, 25 bp, Homo sapien
ggactcagccaagcctagttagctc

SEQ ID NO: 5521409 - DNA, 25 bp, Homo sapien
tgggaaaaggctaaaacaatctgga

SEQ ID NO: 5521410 - DNA, 25 bp, Homo sapien
aatatgtcatggaagaaccccactt

SEQ ID NO: 5521411 - DNA, 25 bp, Homo sapien
tttaaagccggcacaaagtgtgtgt

SEQ ID NO: 5521412 - DNA, 25 bp, Homo sapien
tctgtaggccatgcagactggcttt

SEQ ID NO: 5521413 - DNA, 25 bp, Homo sapien
ttttctggtatgtcaggagccaatc

SEQ ID NO: 5521414 - DNA, 25 bp, Homo sapien
cccatgtacgtgaatgaggcatgcg

SEQ ID NO: 5521415 - DNA, 25 bp, Homo sapien
cagactggctttgtgctgggttctt

SEQ ID NO: 5521416 - DNA, 25 bp, Homo sapien
aaaagaaaagcaagtaatcattgtc

SEQ ID NO: 5521417 - DNA, 25 bp, Homo sapien
aggagccaatcaaacaggcaaatac

SEQ ID NO: 5521418 - DNA, 25 bp, Homo sapien
tataaggtgtggtcaccgaagtctt

SEQ ID NO: 5521419 - DNA, 25 bp, Homo sapien
taaaagtgtagggtcttcttatgac

SEQ ID NO: 5521420 - DNA, 25 bp, Homo sapien
ggcttaacctatgaatacgtgtgac

SEQ ID NO: 5521421 - DNA, 25 bp, Homo sapien
acgtgtgactttgtagactctccca

SEQ ID NO: 5521422 - DNA, 25 bp, Homo sapien
aactgaaattcatgccctgggcttt

SEQ ID NO: 5521423 - DNA, 25 bp, Homo sapien
aagtgcctgtaaagattcgaataga

SEQ ID NO: 5521424 - DNA, 25 bp, Homo sapien
tacccagacatcttcgaggagtgcg

SEQ ID NO: 5521425 - DNA, 25 bp, Homo sapien
cttccggcactacccagacatcttc

SEQ ID NO: 5521426 - DNA, 25 bp, Homo sapien
ttcgaatagattagacttgccaccc

SEQ ID NO: 5521427 - DNA, 25 bp, Homo sapien
ggagttgagcctgaccttggcacga

SEQ ID NO: 5521428 - DNA, 25 bp, Homo sapien
tgtgctcttccggcactacccagac

SEQ ID NO: 5521429 - DNA, 25 bp, Homo sapien
tgccctgggctttcctcaaggatcc

SEQ ID NO: 5521430 - DNA, 25 bp, Homo sapien
aaaagaaaagtgcctgtaaagattc

SEQ ID NO: 5521431 - DNA, 25 bp, Homo sapien
gcaccagtggatccaccgctcctgc

SEQ ID NO: 5521432 - DNA, 25 bp, Homo sapien
gggactccggaactgaaattcatgc

SEQ ID NO: 5521433 - DNA, 25 bp, Homo sapien
ttataaatcgaaatgacaccaaaga

SEQ ID NO: 5521434 - DNA, 25 bp, Homo sapien
tcaacgtcagaaatggatatggatt

SEQ ID NO: 5521435 - DNA, 25 bp, Homo sapien
aaatatctgcgcagtgtaggagatg

SEQ ID NO: 5521436 - DNA, 25 bp, Homo sapien
ggagtcgttacgctgcagatcggcg

SEQ ID NO: 5521437 - DNA, 25 bp, Homo sapien
tggcactgtcaaatggttcaacgtc

SEQ ID NO: 5521438 - DNA, 25 bp, Homo sapien
aaagttctcgccaccaaagtccttg

SEQ ID NO: 5521439 - DNA, 25 bp, Homo sapien
acgacctgccccagcagttggagag

SEQ ID NO: 5521440 - DNA, 25 bp, Homo sapien
aagaagaataacccacggaaatatc

SEQ ID NO: 5521441 - DNA, 25 bp, Homo sapien
ctgtagagtttgatgtggttgaagg

SEQ ID NO: 5521442 - DNA, 25 bp, Homo sapien
agggaccggttcatcgaaatccaac

SEQ ID NO: 5521443 - DNA, 25 bp, Homo sapien
catcagactgccatcaagaagaata

SEQ ID NO: 5521444 - DNA, 25 bp, Homo sapien
atgcataagtatggagctaagtgcc

SEQ ID NO: 5521445 - DNA, 25 bp, Homo sapien
cttggaagagcatttatggagatac

SEQ ID NO: 5521446 - DNA, 25 bp, Homo sapien
tggagctaagtgccttttggaggat

SEQ ID NO: 5521447 - DNA, 25 bp, Homo sapien
tcagacttggtataatggaagaggc

SEQ ID NO: 5521448 - DNA, 25 bp, Homo sapien
ttgcttcagggtatactcttcggtt

SEQ ID NO: 5521449 - DNA, 25 bp, Homo sapien
gctcagtgtaatgtgcagaatgatt

SEQ ID NO: 5521450 - DNA, 25 bp, Homo sapien
gccatacccatgagcaaacagtttg

SEQ ID NO: 5521451 - DNA, 25 bp, Homo sapien
taaaaactgattgctaaggtgaaac

SEQ ID NO: 5521452 - DNA, 25 bp, Homo sapien
tttatggagatacttaagggaggta

SEQ ID NO: 5521453 - DNA, 25 bp, Homo sapien
gataaaggaataatggtggtctagc

SEQ ID NO: 5521454 - DNA, 25 bp, Homo sapien
ctagttcttgtaaaagtgatgcctc

SEQ ID NO: 5521455 - DNA, 25 bp, Homo sapien
atgaggcagacgaacctagctttga

SEQ ID NO: 5521456 - DNA, 25 bp, Homo sapien
tggcttgaggaatgaatgctctgac

SEQ ID NO: 5521457 - DNA, 25 bp, Homo sapien
cagccgttgcccaaatgaggcagac

SEQ ID NO: 5521458 - DNA, 25 bp, Homo sapien
tacactgaggaggtattaaagctag

SEQ ID NO: 5521459 - DNA, 25 bp, Homo sapien
ggtgtctctggccacagaaacaggc

SEQ ID NO: 5521460 - DNA, 25 bp, Homo sapien
tgtcaacattgatgcccggtgtctc

SEQ ID NO: 5521461 - DNA, 25 bp, Homo sapien
ctagctgattcactgggtggcactg

SEQ ID NO: 5521462 - DNA, 25 bp, Homo sapien
tctcaatgagtgtaggaaatggatg

SEQ ID NO: 5521463 - DNA, 25 bp, Homo sapien
gagataggaatagcagtccctacac

SEQ ID NO: 5521464 - DNA, 25 bp, Homo sapien
tgctctgactgaagaaagaatgcct

SEQ ID NO: 5521465 - DNA, 25 bp, Homo sapien
catgaggcctaaatgtgtgaatggc

SEQ ID NO: 5521466 - DNA, 25 bp, Homo sapien
aagtagcagaacaatagtcaatgat

SEQ ID NO: 5521467 - DNA, 25 bp, Homo sapien
acattacaaacagatcgtaccacac

SEQ ID NO: 5521468 - DNA, 25 bp, Homo sapien
cacctaggtcacaactcacaagatt

SEQ ID NO: 5521469 - DNA, 25 bp, Homo sapien
cgcaagtgctttaaactgtaggaaa

SEQ ID NO: 5521470 - DNA, 25 bp, Homo sapien
agcatagttgcgtgcatagtgactc

SEQ ID NO: 5521471 - DNA, 25 bp, Homo sapien
aaatagttggacgagtgtttaatac

SEQ ID NO: 5521472 - DNA, 25 bp, Homo sapien
cgtaccacactgaacgcaagtgctt

SEQ ID NO: 5521473 - DNA, 25 bp, Homo sapien
atttcgccatgttaagcatagttgc

SEQ ID NO: 5521474 - DNA, 25 bp, Homo sapien
agtctgaaagtaaaccctaggtagc

SEQ ID NO: 5521475 - DNA, 25 bp, Homo sapien
ccctaggtagctgaacaaatgatgc

SEQ ID NO: 5521476 - DNA, 25 bp, Homo sapien
atcaacatccaagtagcagaacaat

SEQ ID NO: 5521477 - DNA, 25 bp, Homo sapien
cacgatggtggcatgctcatgcttc

SEQ ID NO: 5521478 - DNA, 25 bp, Homo sapien
ttctgtcatccaggggagcttcttg

SEQ ID NO: 5521479 - DNA, 25 bp, Homo sapien
gaagtacccgcggctcctcaccttc

SEQ ID NO: 5521480 - DNA, 25 bp, Homo sapien
ccttctaccccagcaaccacgagcg

SEQ ID NO: 5521481 - DNA, 25 bp, Homo sapien
agggccacatagacgtgtggtggat

SEQ ID NO: 5521482 - DNA, 25 bp, Homo sapien
gagcttcttggagagctatggcgag

SEQ ID NO: 5521483 - DNA, 25 bp, Homo sapien
ggcatgcggcataactccgtggtgc

SEQ ID NO: 5521484 - DNA, 25 bp, Homo sapien
tcatccagtcctgtggcctgggagg

SEQ ID NO: 5521485 - DNA, 25 bp, Homo sapien
ttcattgacaccgtgcgctgcacta

SEQ ID NO: 5521486 - DNA, 25 bp, Homo sapien
gcaagggcctgaccattgttggttc

SEQ ID NO: 5521487 - DNA, 25 bp, Homo sapien
ggggctggcccacctcatccagtcc

SEQ ID NO: 5521488 - DNA, 25 bp, Homo sapien
tgtgaggaatcgattatgctcgtgt

SEQ ID NO: 5521489 - DNA, 25 bp, Homo sapien
cttggcactaaagagagattgtctc

SEQ ID NO: 5521490 - DNA, 25 bp, Homo sapien
catagctagcaagcagcagaactga

SEQ ID NO: 5521491 - DNA, 25 bp, Homo sapien
aactgaggcccgtacccatgtctgt

SEQ ID NO: 5521492 - DNA, 25 bp, Homo sapien
tctggtctctagccactgggcctcc

SEQ ID NO: 5521493 - DNA, 25 bp, Homo sapien
gtctggaagactgtaactgcctatc

SEQ ID NO: 5521494 - DNA, 25 bp, Homo sapien
cctcactgtagccacagagaacatt

SEQ ID NO: 5521495 - DNA, 25 bp, Homo sapien
ttagaatgctgagtcagattgggga

SEQ ID NO: 5521496 - DNA, 25 bp, Homo sapien
tgtctggctcaaggcatatactgat

SEQ ID NO: 5521497 - DNA, 25 bp, Homo sapien
gtgttaccagtaaggaatccaaggc

SEQ ID NO: 5521498 - DNA, 25 bp, Homo sapien
agagattgtctcgcagtctggaaga

SEQ ID NO: 5521499 - DNA, 25 bp, Homo sapien
gaaatgactcttacctggacctaag

SEQ ID NO: 5521500 - DNA, 25 bp, Homo sapien
cttaggtccaggtaagagtcatttc

SEQ ID NO: 5521501 - DNA, 25 bp, Homo sapien
gagaatatccctcatgaaggggatt

SEQ ID NO: 5521502 - DNA, 25 bp, Homo sapien
aacagtattactaaggcaactcatc

SEQ ID NO: 5521503 - DNA, 25 bp, Homo sapien
gctgaagtcccatccagtatgctat

SEQ ID NO: 5521504 - DNA, 25 bp, Homo sapien
ccctcatgaaggggattaatgccct

SEQ ID NO: 5521505 - DNA, 25 bp, Homo sapien
agaatgactagatgctatggtctga

SEQ ID NO: 5521506 - DNA, 25 bp, Homo sapien
catgcctcaggtctaataaatctta

SEQ ID NO: 5521507 - DNA, 25 bp, Homo sapien
catcactgatgtagtattaagaggt

SEQ ID NO: 5521508 - DNA, 25 bp, Homo sapien
taataaaaccagaatgactagatgc

SEQ ID NO: 5521509 - DNA, 25 bp, Homo sapien
cccacccaattgatacattgaaccc

SEQ ID NO: 5521510 - DNA, 25 bp, Homo sapien
gggtctttggcaggtgattaagtca

SEQ ID NO: 5521511 - DNA, 25 bp, Homo sapien
ggcaactcatcgatgctgaagtccc

SEQ ID NO: 5521512 - DNA, 25 bp, Homo sapien
ggtgtcacccatgcgctgggcagaa

SEQ ID NO: 5521513 - DNA, 25 bp, Homo sapien
caccagcactttgggcacccctggc

SEQ ID NO: 5521514 - DNA, 25 bp, Homo sapien
cccacgtgcaccagactggcacgca

SEQ ID NO: 5521515 - DNA, 25 bp, Homo sapien
gagccgccatctgtcacccacacca

SEQ ID NO: 5521516 - DNA, 25 bp, Homo sapien
actgcccacgtgcaccagactggca

SEQ ID NO: 5521517 - DNA, 25 bp, Homo sapien
gccgggcacctgatgcttcagcaaa

SEQ ID NO: 5521518 - DNA, 25 bp, Homo sapien
ggcagcctcacccgagctgtgctgg

SEQ ID NO: 5521519 - DNA, 25 bp, Homo sapien
caaacagctgttccttggcatagac

SEQ ID NO: 5521520 - DNA, 25 bp, Homo sapien
ctgttccttggcatagaccagcgcc

SEQ ID NO: 5521521 - DNA, 25 bp, Homo sapien
cagtgtgggtgtcacccatgcgctg

SEQ ID NO: 5521522 - DNA, 25 bp, Homo sapien
ttccttggcatagaccagcgccagg

SEQ ID NO: 5521523 - DNA, 25 bp, Homo sapien
gctttagcaacccgaatagtatctc

SEQ ID NO: 5521524 - DNA, 25 bp, Homo sapien
attgaagagcggacatatgtttgca

SEQ ID NO: 5521525 - DNA, 25 bp, Homo sapien
taaacattgacaagcttggggaaca

SEQ ID NO: 5521526 - DNA, 25 bp, Homo sapien
tgccctggagatatttaacacagca

SEQ ID NO: 5521527 - DNA, 25 bp, Homo sapien
ttagagtgaatctgtgcttcgctac

SEQ ID NO: 5521528 - DNA, 25 bp, Homo sapien
tgcaaatcacagtgtgcatgggcat

SEQ ID NO: 5521529 - DNA, 25 bp, Homo sapien
tacacatgtagattttccaaggccc

SEQ ID NO: 5521530 - DNA, 25 bp, Homo sapien
gcatgggcatgcattacatggttca

SEQ ID NO: 5521531 - DNA, 25 bp, Homo sapien
cagggcaacaagtgcaatgaacaat

SEQ ID NO: 5521532 - DNA, 25 bp, Homo sapien
atttttggaatgataagggataatt

SEQ ID NO: 5521533 - DNA, 25 bp, Homo sapien
ttccaaggcccatgcacacacttct

SEQ ID NO: 5521534 - DNA, 25 bp, Homo sapien
catctgaatagtacagtcaacaagc

SEQ ID NO: 5521535 - DNA, 25 bp, Homo sapien
ataacaaaacttgataaagatagca

SEQ ID NO: 5521536 - DNA, 25 bp, Homo sapien
attaaaagtgtcatcaggattagat

SEQ ID NO: 5521537 - DNA, 25 bp, Homo sapien
tttcacaatgaccaagtagtatttg

SEQ ID NO: 5521538 - DNA, 25 bp, Homo sapien
aaaagcctgaataaaccaataacta

SEQ ID NO: 5521539 - DNA, 25 bp, Homo sapien
tgttccagaaatacaagtttggttc

SEQ ID NO: 5521540 - DNA, 25 bp, Homo sapien
acagtcaacaagcaacaaccagtac

SEQ ID NO: 5521541 - DNA, 25 bp, Homo sapien
attagatctaggtgacataaaatac

SEQ ID NO: 5521542 - DNA, 25 bp, Homo sapien
taaaatccactcatgtagcaaatca

SEQ ID NO: 5521543 - DNA, 25 bp, Homo sapien
aacaaccagtacaatcagcaataat

SEQ ID NO: 5521544 - DNA, 25 bp, Homo sapien
tatgtcacagagaatgtatatacct

SEQ ID NO: 5521545 - DNA, 25 bp, Homo sapien
gaaaaccaccggaaagcatagtgat

SEQ ID NO: 5521546 - DNA, 25 bp, Homo sapien
ggtgagagttgagctaagatttgaa

SEQ ID NO: 5521547 - DNA, 25 bp, Homo sapien
cagtgaacattgagaggatattatc

SEQ ID NO: 5521548 - DNA, 25 bp, Homo sapien
tgaattacacggaacagcaaaaacc

SEQ ID NO: 5521549 - DNA, 25 bp, Homo sapien
gaacaaagaggtgagtttatcctca

SEQ ID NO: 5521550 - DNA, 25 bp, Homo sapien
tgggaggcacaagatttcgattgta

SEQ ID NO: 5521551 - DNA, 25 bp, Homo sapien
ttccaatgcacttgggaggcacaag

SEQ ID NO: 5521552 - DNA, 25 bp, Homo sapien
tatcagtagataagggcatcaacat

SEQ ID NO: 5521553 - DNA, 25 bp, Homo sapien
ggtgaatacactacagctttgcctt

SEQ ID NO: 5521554 - DNA, 25 bp, Homo sapien
actcgccccagatcaaaaagatatc

SEQ ID NO: 5521555 - DNA, 25 bp, Homo sapien
ttgcaaatggcaacacaaagttgat

SEQ ID NO: 5521556 - DNA, 25 bp, Homo sapien
catacctcacccgaagatccctgtt

SEQ ID NO: 5521557 - DNA, 25 bp, Homo sapien
aatgacattggcaaggaaatgctct

SEQ ID NO: 5521558 - DNA, 25 bp, Homo sapien
acccaaagaatccaaaggaagctcc

SEQ ID NO: 5521559 - DNA, 25 bp, Homo sapien
gaccagcaaggaatccaaatgcatc

SEQ ID NO: 5521560 - DNA, 25 bp, Homo sapien
gcagactggtgctggaaaatcttat

SEQ ID NO: 5521561 - DNA, 25 bp, Homo sapien
attcagatgcaaggcaactcgacca

SEQ ID NO: 5521562 - DNA, 25 bp, Homo sapien
ctgaggaaacttggctgtaacttca

SEQ ID NO: 5521563 - DNA, 25 bp, Homo sapien
cattaaaatgtcgggagcctcagtg

SEQ ID NO: 5521564 - DNA, 25 bp, Homo sapien
ctgtccgggtaaggcccttcaattc

SEQ ID NO: 5521565 - DNA, 25 bp, Homo sapien
gcggctcctgttgacccggtccgcc

SEQ ID NO: 5521566 - DNA, 25 bp, Homo sapien
agccaggctggcatcattccacagt

SEQ ID NO: 5521567 - DNA, 25 bp, Homo sapien
tgctaggaagctgttccagactgca

SEQ ID NO: 5521568 - DNA, 25 bp, Homo sapien
caaggccctgtttggtacagcttgc

SEQ ID NO: 5521569 - DNA, 25 bp, Homo sapien
atttccctagagggtcgggtatcat

SEQ ID NO: 5521570 - DNA, 25 bp, Homo sapien
gggaagggctaatcagaaatgcctc

SEQ ID NO: 5521571 - DNA, 25 bp, Homo sapien
ataccccaggaagcattgtgagtta

SEQ ID NO: 5521572 - DNA, 25 bp, Homo sapien
gattaaagagtgatactaggaaaat

SEQ ID NO: 5521573 - DNA, 25 bp, Homo sapien
tcccccaaatggctagcacgggaaa

SEQ ID NO: 5521574 - DNA, 25 bp, Homo sapien
agaacttgtgcctcagtagactgtt

SEQ ID NO: 5521575 - DNA, 25 bp, Homo sapien
gtgagttactacggaggccatgaaa

SEQ ID NO: 5521576 - DNA, 25 bp, Homo sapien
gtgctgatgagagagtagaatttaa

SEQ ID NO: 5521577 - DNA, 25 bp, Homo sapien
cagcatggctgtgaaatcctaaagg

SEQ ID NO: 5521578 - DNA, 25 bp, Homo sapien
agggaagttggaagctttagctatc

SEQ ID NO: 5521579 - DNA, 25 bp, Homo sapien
tcaacagagacaggcggattttttg

SEQ ID NO: 5521580 - DNA, 25 bp, Homo sapien
gaatcgatgaaaatgccagcagtga

SEQ ID NO: 5521581 - DNA, 25 bp, Homo sapien
caggaactgatgaggagtttcaaca

SEQ ID NO: 5521582 - DNA, 25 bp, Homo sapien
ccactcacagccgtaccacaggtat

SEQ ID NO: 5521583 - DNA, 25 bp, Homo sapien
ccacatatacaggtgaagggcctgc

SEQ ID NO: 5521584 - DNA, 25 bp, Homo sapien
gaaattgaaatctgaaggacgtcgg

SEQ ID NO: 5521585 - DNA, 25 bp, Homo sapien
gtataaaccttgtagaggcggacac

SEQ ID NO: 5521586 - DNA, 25 bp, Homo sapien
accacggctccacgcctgctgcagt

SEQ ID NO: 5521587 - DNA, 25 bp, Homo sapien
tgctgcagttccctgagctgaggct

SEQ ID NO: 5521588 - DNA, 25 bp, Homo sapien
ggacgtcgggtgctgattttatcac

SEQ ID NO: 5521589 - DNA, 25 bp, Homo sapien
tctacggggccacagacatcttggg

SEQ ID NO: 5521590 - DNA, 25 bp, Homo sapien
cccaagatgtctgtggccccgtaga

SEQ ID NO: 5521591 - DNA, 25 bp, Homo sapien
aggaaagtagagcagaaaacttcaa

SEQ ID NO: 5521592 - DNA, 25 bp, Homo sapien
aggaagaggtcttgacgtttggtaa

SEQ ID NO: 5521593 - DNA, 25 bp, Homo sapien
aggactggatcattgactggagctt

SEQ ID NO: 5521594 - DNA, 25 bp, Homo sapien
cgaggcacattcacaggccaagacc

SEQ ID NO: 5521595 - DNA, 25 bp, Homo sapien
ggcatctcaggggtaactccattcc

SEQ ID NO: 5521596 - DNA, 25 bp, Homo sapien
tcgcagatgagtaaactgatgtccc

SEQ ID NO: 5521597 - DNA, 25 bp, Homo sapien
acgtttggtaagagctgacaatgtc

SEQ ID NO: 5521598 - DNA, 25 bp, Homo sapien
tcagactcaaagagaactgagaggc

SEQ ID NO: 5521599 - DNA, 25 bp, Homo sapien
gttcacaggctgctgccaaggaaag

SEQ ID NO: 5521600 - DNA, 25 bp, Homo sapien
tccttgaagcaaccctgaggtaggt

SEQ ID NO: 5521601 - DNA, 25 bp, Homo sapien
aactgagaggccacaacagtctttc

SEQ ID NO: 5521602 - DNA, 25 bp, Homo sapien
gtccctttacgagagtcaaacatgc

SEQ ID NO: 5521603 - DNA, 25 bp, Homo sapien
atttaagattggcctgcaagtctat

SEQ ID NO: 5521604 - DNA, 25 bp, Homo sapien
ctacagggacatccctaaccccacc

SEQ ID NO: 5521605 - DNA, 25 bp, Homo sapien
caaaacacacccaaagtgcatttgt

SEQ ID NO: 5521606 - DNA, 25 bp, Homo sapien
tctctcgcactgacacttacaaaaa

SEQ ID NO: 5521607 - DNA, 25 bp, Homo sapien
gcagcagctactaacgtccctttac

SEQ ID NO: 5521608 - DNA, 25 bp, Homo sapien
ttacgagagtcaaacatgcctatta

SEQ ID NO: 5521609 - DNA, 25 bp, Homo sapien
tacaaacacaagagtcaaatgtctc

SEQ ID NO: 5521610 - DNA, 25 bp, Homo sapien
actgggaattgtacatggggtttcc

SEQ ID NO: 5521611 - DNA, 25 bp, Homo sapien
ataaaaaggagatacaaacacaaga

SEQ ID NO: 5521612 - DNA, 25 bp, Homo sapien
acatgggtaggtacagcaatcataa

SEQ ID NO: 5521613 - DNA, 25 bp, Homo sapien
aatttgcagaatataggaggtacgc

SEQ ID NO: 5521614 - DNA, 25 bp, Homo sapien
ttaagggaggccataaacaactcaa

SEQ ID NO: 5521615 - DNA, 25 bp, Homo sapien
tgtaaaatgccttaagggaggccat

SEQ ID NO: 5521616 - DNA, 25 bp, Homo sapien
tctattgtaggcttatgggtttgta

SEQ ID NO: 5521617 - DNA, 25 bp, Homo sapien
ttggccatagcaaatgttagttttt

SEQ ID NO: 5521618 - DNA, 25 bp, Homo sapien
atggtgaagatgagaaaaccctatt

SEQ ID NO: 5521619 - DNA, 25 bp, Homo sapien
caactcaaagaagagatggtgtgga

SEQ ID NO: 5521620 - DNA, 25 bp, Homo sapien
ttccccaagaagcatcatctatgaa

SEQ ID NO: 5521621 - DNA, 25 bp, Homo sapien
ataggaggtacgcaataaatgttta

SEQ ID NO: 5521622 - DNA, 25 bp, Homo sapien
cagtctatactggtaatgtgcacat

SEQ ID NO: 5521623 - DNA, 25 bp, Homo sapien
aaacaatcagtgaactccaacagtc

SEQ ID NO: 5521624 - DNA, 25 bp, Homo sapien
actccgcaccaataccaggtccagt

SEQ ID NO: 5521625 - DNA, 25 bp, Homo sapien
caggctacaacacagagtgctgagg

SEQ ID NO: 5521626 - DNA, 25 bp, Homo sapien
gtaaagaactggcaactcaaggtag

SEQ ID NO: 5521627 - DNA, 25 bp, Homo sapien
tgcatttagacaagggatattcccc

SEQ ID NO: 5521628 - DNA, 25 bp, Homo sapien
gaatggcatctaccaggaaagcagc

SEQ ID NO: 5521629 - DNA, 25 bp, Homo sapien
gaggaagagccccgctaacttctct

SEQ ID NO: 5521630 - DNA, 25 bp, Homo sapien
acaaacaaagctgctatccagggcc

SEQ ID NO: 5521631 - DNA, 25 bp, Homo sapien
tactctcaggctgtcctagggtctc

SEQ ID NO: 5521632 - DNA, 25 bp, Homo sapien
ctcaaaactgtagcctggcagagtg

SEQ ID NO: 5521633 - DNA, 25 bp, Homo sapien
gcaggatagtacaggctacaacaca

SEQ ID NO: 5521634 - DNA, 25 bp, Homo sapien
cagggatgtcagataacagaaaccc

SEQ ID NO: 5521635 - DNA, 25 bp, Homo sapien
ccccggcccccaatgcactttacgc

SEQ ID NO: 5521636 - DNA, 25 bp, Homo sapien
tgcactttacgcgcgaagaagttgc

SEQ ID NO: 5521637 - DNA, 25 bp, Homo sapien
ccggatggttgtccctgtcccgggc

SEQ ID NO: 5521638 - DNA, 25 bp, Homo sapien
cgagtgtttacagatccggccagga

SEQ ID NO: 5521639 - DNA, 25 bp, Homo sapien
tgccggatggttgtccctgtcccgg

SEQ ID NO: 5521640 - DNA, 25 bp, Homo sapien
cgcttcccggtgccccgggcatgag

SEQ ID NO: 5521641 - DNA, 25 bp, Homo sapien
aggaatgaacaagtgtcagtcgagt

SEQ ID NO: 5521642 - DNA, 25 bp, Homo sapien
cgccaggtcctgcgagtgaacctgg

SEQ ID NO: 5521643 - DNA, 25 bp, Homo sapien
gtgtcagtcgagtgtttacagatcc

SEQ ID NO: 5521644 - DNA, 25 bp, Homo sapien
cttccccaccatccgcgtcggcagc

SEQ ID NO: 5521645 - DNA, 25 bp, Homo sapien
cgacgctgaccaccttccccaccat

SEQ ID NO: 5521646 - DNA, 25 bp, Homo sapien
tcccagctccgcacaggctgatgct

SEQ ID NO: 5521647 - DNA, 25 bp, Homo sapien
ggcgctgcccacccacctcatcacc

SEQ ID NO: 5521648 - DNA, 25 bp, Homo sapien
gatgctccccgcccccaactgtggc

SEQ ID NO: 5521649 - DNA, 25 bp, Homo sapien
gtcatcttccacgacacccaggcgc

SEQ ID NO: 5521650 - DNA, 25 bp, Homo sapien
tcctgcgctacgacagcgccgtgga

SEQ ID NO: 5521651 - DNA, 25 bp, Homo sapien
ccccccaacgccgatggccataagg

SEQ ID NO: 5521652 - DNA, 25 bp, Homo sapien
gtggactgcatctgccagcccagca

SEQ ID NO: 5521653 - DNA, 25 bp, Homo sapien
cacctcatcacctgcgagcacgtgc

SEQ ID NO: 5521654 - DNA, 25 bp, Homo sapien
cccagacacttaaccgaaggggcca

SEQ ID NO: 5521655 - DNA, 25 bp, Homo sapien
aaggggccaccctctggcctcctgc

SEQ ID NO: 5521656 - DNA, 25 bp, Homo sapien
gcctccctctgcgggctccagaagg

SEQ ID NO: 5521657 - DNA, 25 bp, Homo sapien
agttagcccttgcccagccttcccc

SEQ ID NO: 5521658 - DNA, 25 bp, Homo sapien
gtgaactggcactagtccatgaacc

SEQ ID NO: 5521659 - DNA, 25 bp, Homo sapien
tgagcctattggtcaagttagccct

SEQ ID NO: 5521660 - DNA, 25 bp, Homo sapien
cttcaagtgggcctggccaacaaga

SEQ ID NO: 5521661 - DNA, 25 bp, Homo sapien
tgcttttctagatgggtagaagaaa

SEQ ID NO: 5521662 - DNA, 25 bp, Homo sapien
tatggtctcacaatccagtggttat

SEQ ID NO: 5521663 - DNA, 25 bp, Homo sapien
ccatttaaagataagaacttgaagg

SEQ ID NO: 5521664 - DNA, 25 bp, Homo sapien
gattgttcaaatgtcctatggtctc

SEQ ID NO: 5521665 - DNA, 25 bp, Homo sapien
catccagcctttgggagacactgaa

SEQ ID NO: 5521666 - DNA, 25 bp, Homo sapien
ccatgaaccaaactttgagtacctc

SEQ ID NO: 5521667 - DNA, 25 bp, Homo sapien
actgaatctattgagcctattggtc

SEQ ID NO: 5521668 - DNA, 25 bp, Homo sapien
gacggtgtgggtctaggggtcgacc

SEQ ID NO: 5521669 - DNA, 25 bp, Homo sapien
ggtcgacccctagacccacaccgtc

SEQ ID NO: 5521670 - DNA, 25 bp, Homo sapien
ttaccctaatagcatgaagatcgtg

SEQ ID NO: 5521671 - DNA, 25 bp, Homo sapien
acctccggagtaaacggctcttcat

SEQ ID NO: 5521672 - DNA, 25 bp, Homo sapien
ctcttcattagcttggagtggccgc

SEQ ID NO: 5521673 - DNA, 25 bp, Homo sapien
ctgtgaagatgaaattaccctaata

SEQ ID NO: 5521674 - DNA, 25 bp, Homo sapien
gactcacctccggagtaaacggctc

SEQ ID NO: 5521675 - DNA, 25 bp, Homo sapien
ccgtttctctgggaattggtgattt

SEQ ID NO: 5521676 - DNA, 25 bp, Homo sapien
ggaggaagcggcctccgcttcgctg

SEQ ID NO: 5521677 - DNA, 25 bp, Homo sapien
tcgctggcgccgcctttttagcttg

SEQ ID NO: 5521678 - DNA, 25 bp, Homo sapien
gcctttttagcttggacttcagtcc

SEQ ID NO: 5521679 - DNA, 25 bp, Homo sapien
tttccaggactgtccggtacagccc

SEQ ID NO: 5521680 - DNA, 25 bp, Homo sapien
cctcctcacactcggctccgcgccg

SEQ ID NO: 5521681 - DNA, 25 bp, Homo sapien
tccaaagtcgccacttgtccctggg

SEQ ID NO: 5521682 - DNA, 25 bp, Homo sapien
ccaaagtcatggacaagtcctctct

SEQ ID NO: 5521683 - DNA, 25 bp, Homo sapien
aggagaagccagatcttttcatccg

SEQ ID NO: 5521684 - DNA, 25 bp, Homo sapien
cgcttcctcatagcagagttgggag

SEQ ID NO: 5521685 - DNA, 25 bp, Homo sapien
gaggaatggagtttccaaagtcgcc

SEQ ID NO: 5521686 - DNA, 25 bp, Homo sapien
tgaacttcgtggttttaagcacaga

SEQ ID NO: 5521687 - DNA, 25 bp, Homo sapien
cccaccactctcctcgtgatgtcat

SEQ ID NO: 5521688 - DNA, 25 bp, Homo sapien
tcattttgcagaggaatggagtttc

SEQ ID NO: 5521689 - DNA, 25 bp, Homo sapien
tctcccatccccttgacactcttcc

SEQ ID NO: 5521690 - DNA, 25 bp, Homo sapien
cttttcatccgcaggccccaccact

SEQ ID NO: 5521691 - DNA, 25 bp, Homo sapien
gacagacaggcatgattcagagcca

SEQ ID NO: 5521692 - DNA, 25 bp, Homo sapien
aggtctcgaccaccgcgcacgaagg

SEQ ID NO: 5521693 - DNA, 25 bp, Homo sapien
ccttcgtgcgcggtggtcgagacct

SEQ ID NO: 5521694 - DNA, 25 bp, Homo sapien
cttgtctttactatgggagaaaccc

SEQ ID NO: 5521695 - DNA, 25 bp, Homo sapien
gcctcgatttgaagcctaaaaactc

SEQ ID NO: 5521696 - DNA, 25 bp, Homo sapien
ctaaagccacaacccctcaccctac

SEQ ID NO: 5521697 - DNA, 25 bp, Homo sapien
atcatttggtccaccaggcctagcc

SEQ ID NO: 5521698 - DNA, 25 bp, Homo sapien
ctggaaagtcaatgcctaccctgtc

SEQ ID NO: 5521699 - DNA, 25 bp, Homo sapien
ttcatactggactaagataccttgt

SEQ ID NO: 5521700 - DNA, 25 bp, Homo sapien
cagtacatagaaacttacagcactc

SEQ ID NO: 5521701 - DNA, 25 bp, Homo sapien
aggcctagccttgatatgttgaacc

SEQ ID NO: 5521702 - DNA, 25 bp, Homo sapien
ctacatcttcagggtgggaacagta

SEQ ID NO: 5521703 - DNA, 25 bp, Homo sapien
tccaagccaaagagaataggatttt

SEQ ID NO: 5521704 - DNA, 25 bp, Homo sapien
gttcaaggttactggaatgtggttc

SEQ ID NO: 5521705 - DNA, 25 bp, Homo sapien
cagactacagtataagttcaaaggc

SEQ ID NO: 5521706 - DNA, 25 bp, Homo sapien
acagccctgtaggaaagaagacttt

SEQ ID NO: 5521707 - DNA, 25 bp, Homo sapien
gtataagttcaaaggcactagaaac

SEQ ID NO: 5521708 - DNA, 25 bp, Homo sapien
tatacattaggaaattgggcagaca

SEQ ID NO: 5521709 - DNA, 25 bp, Homo sapien
taattcacagccctgtaggaaagaa

SEQ ID NO: 5521710 - DNA, 25 bp, Homo sapien
aattttggccagcatacagtattat

SEQ ID NO: 5521711 - DNA, 25 bp, Homo sapien
ttgggcagacattggtgtacttaaa

SEQ ID NO: 5521712 - DNA, 25 bp, Homo sapien
attatagtaatgctactgaagttat

SEQ ID NO: 5521713 - DNA, 25 bp, Homo sapien
gaaagcatggcttttgaaactgatg

SEQ ID NO: 5521714 - DNA, 25 bp, Homo sapien
tgaaactgatgcaacaaactgtaat

SEQ ID NO: 5521715 - DNA, 25 bp, Homo sapien
tgtacttaaatgtaaacgctaccca

SEQ ID NO: 5521716 - DNA, 25 bp, Homo sapien
ctggccaagcaagtagcctccgaga

SEQ ID NO: 5521717 - DNA, 25 bp, Homo sapien
agcggcctcaagcgccgcttcagcc

SEQ ID NO: 5521718 - DNA, 25 bp, Homo sapien
gggcgcttcctgtggacgctgcgcc

SEQ ID NO: 5521719 - DNA, 25 bp, Homo sapien
cagcggcctcaagcgccgcttcagc

SEQ ID NO: 5521720 - DNA, 25 bp, Homo sapien
gaccagcggcctcaagcgccgcttc

SEQ ID NO: 5521721 - DNA, 25 bp, Homo sapien
ccagcggcctcaagcgccgcttcag

SEQ ID NO: 5521722 - DNA, 25 bp, Homo sapien
tggccaagcaagtagcctccgagat

SEQ ID NO: 5521723 - DNA, 25 bp, Homo sapien
ggcgcttcctgtggacgctgcgcct

SEQ ID NO: 5521724 - DNA, 25 bp, Homo sapien
gcctcaagcgccgcttcagccgcct

SEQ ID NO: 5521725 - DNA, 25 bp, Homo sapien
gcggcctcaagcgccgcttcagccg

SEQ ID NO: 5521726 - DNA, 25 bp, Homo sapien
accagcggcctcaagcgccgcttca

SEQ ID NO: 5521727 - DNA, 25 bp, Homo sapien
ttccagtgtcagacggcacctcaat

SEQ ID NO: 5521728 - DNA, 25 bp, Homo sapien
atagttaaggactcaggcataggaa

SEQ ID NO: 5521729 - DNA, 25 bp, Homo sapien
ttccccacacaaggtctgcccagat

SEQ ID NO: 5521730 - DNA, 25 bp, Homo sapien
ccagcccagctgctctgaagaatcc

SEQ ID NO: 5521731 - DNA, 25 bp, Homo sapien
tccccactgatagtcggaacgcggg

SEQ ID NO: 5521732 - DNA, 25 bp, Homo sapien
ataggaatgaagggcaccctattcc

SEQ ID NO: 5521733 - DNA, 25 bp, Homo sapien
cagaagcctctagcctacccccagg

SEQ ID NO: 5521734 - DNA, 25 bp, Homo sapien
gaagaatcctacgtgctaacagctc

SEQ ID NO: 5521735 - DNA, 25 bp, Homo sapien
tgaactcaggtgacatccagctgtg

SEQ ID NO: 5521736 - DNA, 25 bp, Homo sapien
aggttggaaatatagttaaggactc

SEQ ID NO: 5521737 - DNA, 25 bp, Homo sapien
cttgcccttgcaccctggggcttcc

SEQ ID NO: 5521738 - DNA, 25 bp, Homo sapien
tgagcatggctactttgatcctttt

SEQ ID NO: 5521739 - DNA, 25 bp, Homo sapien
catggataatataactcaagagtac

SEQ ID NO: 5521740 - DNA, 25 bp, Homo sapien
ttacccttccactgagcatggctac

SEQ ID NO: 5521741 - DNA, 25 bp, Homo sapien
aatagcgactcaactgcacttctct

SEQ ID NO: 5521742 - DNA, 25 bp, Homo sapien
aacaattccatggttggcagtgtcc

SEQ ID NO: 5521743 - DNA, 25 bp, Homo sapien
atctctgctaagagttccttaccct

SEQ ID NO: 5521744 - DNA, 25 bp, Homo sapien
tggttggcagtgtccaagtggttaa

SEQ ID NO: 5521745 - DNA, 25 bp, Homo sapien
tctttaatagcgactcaactgcact

SEQ ID NO: 5521746 - DNA, 25 bp, Homo sapien
tctctgatattaagaccatggataa

SEQ ID NO: 5521747 - DNA, 25 bp, Homo sapien
gtgtccaagtggttaaaaacatgtc

SEQ ID NO: 5521748 - DNA, 25 bp, Homo sapien
ttccaggtactaagttatctctccc

SEQ ID NO: 5521749 - DNA, 25 bp, Homo sapien
ctacccctgcacgcactgcgccaag

SEQ ID NO: 5521750 - DNA, 25 bp, Homo sapien
gctccccctctcctctcgtccctcc

SEQ ID NO: 5521751 - DNA, 25 bp, Homo sapien
ctgcacgcactgcgccaagtgcttc

SEQ ID NO: 5521752 - DNA, 25 bp, Homo sapien
ttgccgtgagctccccctctcctct

SEQ ID NO: 5521753 - DNA, 25 bp, Homo sapien
tgcgccaagtgcttccgctacaagc

SEQ ID NO: 5521754 - DNA, 25 bp, Homo sapien
gcatcacctgctggagcaccagcgc

SEQ ID NO: 5521755 - DNA, 25 bp, Homo sapien
agtcgctcaagtaccacctgcggac

SEQ ID NO: 5521756 - DNA, 25 bp, Homo sapien
cgctacaagcagtcgctcaagtacc

SEQ ID NO: 5521757 - DNA, 25 bp, Homo sapien
cgtccctcctcccaaggacatgggg

SEQ ID NO: 5521758 - DNA, 25 bp, Homo sapien
gcagtgagaccaggtcccttgctgc

SEQ ID NO: 5521759 - DNA, 25 bp, Homo sapien
tcacgcagaagcatcacctgctgga

SEQ ID NO: 5521760 - DNA, 25 bp, Homo sapien
tgcggcggcctttgccgcctcgccc

SEQ ID NO: 5521761 - DNA, 25 bp, Homo sapien
acagcagtatgatgaactggaggct

SEQ ID NO: 5521762 - DNA, 25 bp, Homo sapien
ggaggagaagctgaccctcaaacag

SEQ ID NO: 5521763 - DNA, 25 bp, Homo sapien
gaaacgcttctgcaggagtcagcat

SEQ ID NO: 5521764 - DNA, 25 bp, Homo sapien
ggggcatcgcgctgctcattcatcc

SEQ ID NO: 5521765 - DNA, 25 bp, Homo sapien
agaggcatttgggcagtccttctcc

SEQ ID NO: 5521766 - DNA, 25 bp, Homo sapien
tccatccaccggaaggttgctgaag

SEQ ID NO: 5521767 - DNA, 25 bp, Homo sapien
ctggaggctgagtacgacagcctca

SEQ ID NO: 5521768 - DNA, 25 bp, Homo sapien
gtattgcagacggtggaccattata

SEQ ID NO: 5521769 - DNA, 25 bp, Homo sapien
ctcgtcagtttctcgggcggtgtag

SEQ ID NO: 5521770 - DNA, 25 bp, Homo sapien
cattataagactgagatagagaggc

SEQ ID NO: 5521771 - DNA, 25 bp, Homo sapien
ataaaatatggagtaatggaagcta

SEQ ID NO: 5521772 - DNA, 25 bp, Homo sapien
atatgatattaggtttgtgttacaa

SEQ ID NO: 5521773 - DNA, 25 bp, Homo sapien
atcatacacggttactattccaatc

SEQ ID NO: 5521774 - DNA, 25 bp, Homo sapien
ataacacatccagatgaaatttatc

SEQ ID NO: 5521775 - DNA, 25 bp, Homo sapien
tatgatgttaagtatggatatattc

SEQ ID NO: 5521776 - DNA, 25 bp, Homo sapien
atgccattttaagcaaaagacacag

SEQ ID NO: 5521777 - DNA, 25 bp, Homo sapien
aagcgtcttaccaatttagtgttct

SEQ ID NO: 5521778 - DNA, 25 bp, Homo sapien
atggaagctatgttacatggatatt

SEQ ID NO: 5521779 - DNA, 25 bp, Homo sapien
aaaaagctctgttctactcatttac

SEQ ID NO: 5521780 - DNA, 25 bp, Homo sapien
ctttcatgcagacaaaaataaacaa

SEQ ID NO: 5521781 - DNA, 25 bp, Homo sapien
aatatggagtaatggaagctatgtt

SEQ ID NO: 5521782 - DNA, 25 bp, Homo sapien
gatgacaaggatacttggggatcat

SEQ ID NO: 5521783 - DNA, 25 bp, Homo sapien
tctcaatggaaagctgactgtcagt

SEQ ID NO: 5521784 - DNA, 25 bp, Homo sapien
tgacagttgttaaataccaggagca

SEQ ID NO: 5521785 - DNA, 25 bp, Homo sapien
tggcagaaaaggtccaaagcttctg

SEQ ID NO: 5521786 - DNA, 25 bp, Homo sapien
tacacaagggtgttggtgaaattct

SEQ ID NO: 5521787 - DNA, 25 bp, Homo sapien
ctggtatgaaggatttggccaagaa

SEQ ID NO: 5521788 - DNA, 25 bp, Homo sapien
tgcttattcagaggtggacagacaa

SEQ ID NO: 5521789 - DNA, 25 bp, Homo sapien
gtcacataaaggaagtaacgtacac

SEQ ID NO: 5521790 - DNA, 25 bp, Homo sapien
ctcaagaagtggtacctggtatgaa

SEQ ID NO: 5521791 - DNA, 25 bp, Homo sapien
agtcaccatagaagacagtcaactc

SEQ ID NO: 5521792 - DNA, 25 bp, Homo sapien
gtgctggcataaagtgcaggtctca

SEQ ID NO: 5521793 - DNA, 25 bp, Homo sapien
tttggcagagatcactctcgatgtt

SEQ ID NO: 5521794 - DNA, 25 bp, Homo sapien
tcaagtcaaaggattagttggcaat

SEQ ID NO: 5521795 - DNA, 25 bp, Homo sapien
aaaggtcaactgccactaggtgtcc

SEQ ID NO: 5521796 - DNA, 25 bp, Homo sapien
agataaagaaaatgggcttagagag

SEQ ID NO: 5521797 - DNA, 25 bp, Homo sapien
tctgagtgcaagataaaaaggaaat

SEQ ID NO: 5521798 - DNA, 25 bp, Homo sapien
tatgatgtactgattcagaggtccc

SEQ ID NO: 5521799 - DNA, 25 bp, Homo sapien
cagaggtcccaaatcagtaacctga

SEQ ID NO: 5521800 - DNA, 25 bp, Homo sapien
gatagatcctcaaaggtcaactgcc

SEQ ID NO: 5521801 - DNA, 25 bp, Homo sapien
tctaaaaataccatctgagtgcaag

SEQ ID NO: 5521802 - DNA, 25 bp, Homo sapien
tcatgctgcctggattggggcatgg

SEQ ID NO: 5521803 - DNA, 25 bp, Homo sapien
gggcatggctaagcactcaagtcaa

SEQ ID NO: 5521804 - DNA, 25 bp, Homo sapien
ccaaggtcctgggttaggcattttg

SEQ ID NO: 5521805 - DNA, 25 bp, Homo sapien
aagcacagatatactctgggggctg

SEQ ID NO: 5521806 - DNA, 25 bp, Homo sapien
aagacgacattattgcaaacggcac

SEQ ID NO: 5521807 - DNA, 25 bp, Homo sapien
gacctcccttagctcaggcaggggg

SEQ ID NO: 5521808 - DNA, 25 bp, Homo sapien
ttgggtaacagcatttggaattatc

SEQ ID NO: 5521809 - DNA, 25 bp, Homo sapien
ccccgctaaataaataagacgacat

SEQ ID NO: 5521810 - DNA, 25 bp, Homo sapien
tgtgcttctggtcctgcagtagctc

SEQ ID NO: 5521811 - DNA, 25 bp, Homo sapien
gggatgagtagaatttccaaggtcc

SEQ ID NO: 5521812 - DNA, 25 bp, Homo sapien
caaaggcttgggaaaccgcactttg

SEQ ID NO: 5521813 - DNA, 25 bp, Homo sapien
gcagtagctccaaacagggttgtgg

SEQ ID NO: 5521814 - DNA, 25 bp, Homo sapien
gcacttaaaccccccctgagagata

SEQ ID NO: 5521815 - DNA, 25 bp, Homo sapien
gactactgaaaaggctaaatggata

SEQ ID NO: 5521816 - DNA, 25 bp, Homo sapien
ttgaagaggtccataaggcatctga

SEQ ID NO: 5521817 - DNA, 25 bp, Homo sapien
acaaataggttgtctacggccatac

SEQ ID NO: 5521818 - DNA, 25 bp, Homo sapien
ggctaaccacattcttgaagaggtc

SEQ ID NO: 5521819 - DNA, 25 bp, Homo sapien
aaagttgaatcaattggctaaccac

SEQ ID NO: 5521820 - DNA, 25 bp, Homo sapien
ttctagcagtttgaaatagctcatt

SEQ ID NO: 5521821 - DNA, 25 bp, Homo sapien
aacaaataggtttacatgagagcat

SEQ ID NO: 5521822 - DNA, 25 bp, Homo sapien
cctgaacgcgcccgatctcgtctga

SEQ ID NO: 5521823 - DNA, 25 bp, Homo sapien
agatggctagggagttaccaaatat

SEQ ID NO: 5521824 - DNA, 25 bp, Homo sapien
ctagtgttatagatggctagggagt

SEQ ID NO: 5521825 - DNA, 25 bp, Homo sapien
gtctgatctcggaaacaaataggtt

SEQ ID NO: 5521826 - DNA, 25 bp, Homo sapien
actgttccaaagtatgagttgttct

SEQ ID NO: 5521827 - DNA, 25 bp, Homo sapien
aatagcataaagagtaatcatacct

SEQ ID NO: 5521828 - DNA, 25 bp, Homo sapien
atacaggaaataatatgctaaaatc

SEQ ID NO: 5521829 - DNA, 25 bp, Homo sapien
gaggaagacaaattctcacagcagc

SEQ ID NO: 5521830 - DNA, 25 bp, Homo sapien
ttagaaggacaaaaaggatttatca

SEQ ID NO: 5521831 - DNA, 25 bp, Homo sapien
ttacaataggacatcttagaaggac

SEQ ID NO: 5521832 - DNA, 25 bp, Homo sapien
ggtccagggctcagaaacatttttg

SEQ ID NO: 5521833 - DNA, 25 bp, Homo sapien
ctgcgcatcagtcaatcatatcatc

SEQ ID NO: 5521834 - DNA, 25 bp, Homo sapien
accaaatggcatataaagtaatagc

SEQ ID NO: 5521835 - DNA, 25 bp, Homo sapien
tctgatttgcgggaagttgctctaa

SEQ ID NO: 5521836 - DNA, 25 bp, Homo sapien
tacatgctctggactgcgcatcagt

SEQ ID NO: 5521837 - DNA, 25 bp, Homo sapien
gcggcgcgctccttgggcgcgggag

SEQ ID NO: 5521838 - DNA, 25 bp, Homo sapien
ctcccgcgcccaaggagcgcgccgc

SEQ ID NO: 5521839 - DNA, 25 bp, Homo sapien
acgcggcgcgctccttgggcgcggg

SEQ ID NO: 5521840 - DNA, 25 bp, Homo sapien
cccgcgcccaaggagcgcgccgcgt

SEQ ID NO: 5521841 - DNA, 25 bp, Homo sapien
acccagctctggaaagagccacctt

SEQ ID NO: 5521842 - DNA, 25 bp, Homo sapien
cgtgtgatgcccaaggcaagtcttg

SEQ ID NO: 5521843 - DNA, 25 bp, Homo sapien
aactggagagaacatatatgcgttt

SEQ ID NO: 5521844 - DNA, 25 bp, Homo sapien
agggaaacgctgaccattagaaacc

SEQ ID NO: 5521845 - DNA, 25 bp, Homo sapien
aaggaaatgacactttgaggaactg

SEQ ID NO: 5521846 - DNA, 25 bp, Homo sapien
acaagaaacctacgaacccagctct

SEQ ID NO: 5521847 - DNA, 25 bp, Homo sapien
tacgcttggctttcgggaaatactc

SEQ ID NO: 5521848 - DNA, 25 bp, Homo sapien
atttgtaggataaaggaaatgacac

SEQ ID NO: 5521849 - DNA, 25 bp, Homo sapien
ctgcataagacgttgtaaggaggaa

SEQ ID NO: 5521850 - DNA, 25 bp, Homo sapien
gggatgtgtgtcagtttacgcctct

SEQ ID NO: 5521851 - DNA, 25 bp, Homo sapien
ggtgaggtggaaattccagcaagaa

SEQ ID NO: 5521852 - DNA, 25 bp, Homo sapien
tgtaaaaatttcacctaggaggata

SEQ ID NO: 5521853 - DNA, 25 bp, Homo sapien
agcaaacaactttccagacctctac

SEQ ID NO: 5521854 - DNA, 25 bp, Homo sapien
aaatagaaaagccgaatattccttc

SEQ ID NO: 5521855 - DNA, 25 bp, Homo sapien
gcccagctgctatacattgttaaac

SEQ ID NO: 5521856 - DNA, 25 bp, Homo sapien
ctcccctctacctcaattcccttca

SEQ ID NO: 5521857 - DNA, 25 bp, Homo sapien
aaatacaccagtacatgtttgttgt

SEQ ID NO: 5521858 - DNA, 25 bp, Homo sapien
caattcccttcagaggtaacacagc

SEQ ID NO: 5521859 - DNA, 25 bp, Homo sapien
ctaaaacacaaagagcattacagct

SEQ ID NO: 5521860 - DNA, 25 bp, Homo sapien
agagcattacagcttgctatgcatt

SEQ ID NO: 5521861 - DNA, 25 bp, Homo sapien
tagagacagcgtttcgccacattgg

SEQ ID NO: 5521862 - DNA, 25 bp, Homo sapien
taggaggatataaaatagaaaagcc

SEQ ID NO: 5521863 - DNA, 25 bp, Homo sapien
ccccgtgctcttgcggtcgaggctg

SEQ ID NO: 5521864 - DNA, 25 bp, Homo sapien
cagcctcgaccgcaagagcacgggg

SEQ ID NO: 5521865 - DNA, 25 bp, Homo sapien
tggaaatctgcctttcgtgggacca

SEQ ID NO: 5521866 - DNA, 25 bp, Homo sapien
tcgtgcagcacccacccctgcgaca

SEQ ID NO: 5521867 - DNA, 25 bp, Homo sapien
gcccctcactggtgtggatggaaat

SEQ ID NO: 5521868 - DNA, 25 bp, Homo sapien
ggatcagggtcctcttagggagtga

SEQ ID NO: 5521869 - DNA, 25 bp, Homo sapien
ttgctgaagaatatatggaaagggt

SEQ ID NO: 5521870 - DNA, 25 bp, Homo sapien
gtggcatttgcgtcacgtggaccag

SEQ ID NO: 5521871 - DNA, 25 bp, Homo sapien
tgcctttcgtgggaccaaacaggac

SEQ ID NO: 5521872 - DNA, 25 bp, Homo sapien
tgccatgcaaactctcaagaggcca

SEQ ID NO: 5521873 - DNA, 25 bp, Homo sapien
aaacaggactccttggacgattagt

SEQ ID NO: 5521874 - DNA, 25 bp, Homo sapien
ttaacatgttgaaacgacaatattc

SEQ ID NO: 5521875 - DNA, 25 bp, Homo sapien
ccttggacgattagttcaggttggg

SEQ ID NO: 5521876 - DNA, 25 bp, Homo sapien
acatggccaggaatatattggcctc

SEQ ID NO: 5521877 - DNA, 25 bp, Homo sapien
gtccctggtccacgtgacgcaaatg

SEQ ID NO: 5521878 - DNA, 25 bp, Homo sapien
cccatttatgcaatgatatgtagct

SEQ ID NO: 5521879 - DNA, 25 bp, Homo sapien
tttcaccgcaaaaataagtgagaaa

SEQ ID NO: 5521880 - DNA, 25 bp, Homo sapien
tggcctcttgagagtttgcatggca

SEQ ID NO: 5521881 - DNA, 25 bp, Homo sapien
tgcatggctctaagtttattttaag

SEQ ID NO: 5521882 - DNA, 25 bp, Homo sapien
atattggcctcttgagagtttgcat

SEQ ID NO: 5521883 - DNA, 25 bp, Homo sapien
taaattgtttctgagcactgctgat

SEQ ID NO: 5521884 - DNA, 25 bp, Homo sapien
ccacgtgacgcaaatgccacccttt

SEQ ID NO: 5521885 - DNA, 25 bp, Homo sapien
tattgatgcaagattcatcagtatt

SEQ ID NO: 5521886 - DNA, 25 bp, Homo sapien
ttagaatattgtcgtttcaacatgt

SEQ ID NO: 5521887 - DNA, 25 bp, Homo sapien
gtcctctgcgtcctggatgaggcgt

SEQ ID NO: 5521888 - DNA, 25 bp, Homo sapien
gtggaatagtacagcattaggacct

SEQ ID NO: 5521889 - DNA, 25 bp, Homo sapien
aaaatgttaaacctagagtcctctg

SEQ ID NO: 5521890 - DNA, 25 bp, Homo sapien
aaactcttgcatgccctcgactttc

SEQ ID NO: 5521891 - DNA, 25 bp, Homo sapien
tacagcattaggacctttgttctcc

SEQ ID NO: 5521892 - DNA, 25 bp, Homo sapien
cctagagtcctctgcgtcctggatg

SEQ ID NO: 5521893 - DNA, 25 bp, Homo sapien
aagctgctggcatttgcatggctct

SEQ ID NO: 5521894 - DNA, 25 bp, Homo sapien
tgtagctatgagttaatcacggtat

SEQ ID NO: 5521895 - DNA, 25 bp, Homo sapien
atgaaatccattaagctgctggcat

SEQ ID NO: 5521896 - DNA, 25 bp, Homo sapien
cttgcatgccctcgactttcaccgc

SEQ ID NO: 5521897 - DNA, 25 bp, Homo sapien
cttggcttctggaagagaaactctt

SEQ ID NO: 5521898 - DNA, 25 bp, Homo sapien
gctctttccaagatagtacattgcc

SEQ ID NO: 5521899 - DNA, 25 bp, Homo sapien
tgaaatatggatactgatcaaacag

SEQ ID NO: 5521900 - DNA, 25 bp, Homo sapien
ataagtagatgtaatacagtttctt

SEQ ID NO: 5521901 - DNA, 25 bp, Homo sapien
aacatgccacttacaggtgtccttc

SEQ ID NO: 5521902 - DNA, 25 bp, Homo sapien
tagttctacatcagagggctaaaac

SEQ ID NO: 5521903 - DNA, 25 bp, Homo sapien
ccaaggaggtgatatcatttgtgaa

SEQ ID NO: 5521904 - DNA, 25 bp, Homo sapien
ttagtgaataaccaaagaccaatac

SEQ ID NO: 5521905 - DNA, 25 bp, Homo sapien
acagtaaggcttatgaaatatggat

SEQ ID NO: 5521906 - DNA, 25 bp, Homo sapien
cagagggctaaaactgagattaaaa

SEQ ID NO: 5521907 - DNA, 25 bp, Homo sapien
actaacagtttcccaaggaggtgat

SEQ ID NO: 5521908 - DNA, 25 bp, Homo sapien
taaaactcagatgtctggctctttc

SEQ ID NO: 5521909 - DNA, 25 bp, Homo sapien
ggctctgaagaaccttgctgattgt

SEQ ID NO: 5521910 - DNA, 25 bp, Homo sapien
tcagaggtatgtctttgttgagtgc

SEQ ID NO: 5521911 - DNA, 25 bp, Homo sapien
aacattaattaggctctgaagaacc

SEQ ID NO: 5521912 - DNA, 25 bp, Homo sapien
aaagtagccacttgtcacatagggc

SEQ ID NO: 5521913 - DNA, 25 bp, Homo sapien
gcaaaacagttgaggaattaatctt

SEQ ID NO: 5521914 - DNA, 25 bp, Homo sapien
tctttgttgagtgcaaaacagttga

SEQ ID NO: 5521915 - DNA, 25 bp, Homo sapien
ctggttgccaactcagaggtatgtc

SEQ ID NO: 5521916 - DNA, 25 bp, Homo sapien
tgctgattgttaactggatgattgt

SEQ ID NO: 5521917 - DNA, 25 bp, Homo sapien
atcaccactggcccgttatccaccc

SEQ ID NO: 5521918 - DNA, 25 bp, Homo sapien
tatccaccctgctggttgccaactc

SEQ ID NO: 5521919 - DNA, 25 bp, Homo sapien
atactcagctaaacgtggtggctca

SEQ ID NO: 5521920 - DNA, 25 bp, Homo sapien
ctgatggcatgttcaccaacccact

SEQ ID NO: 5521921 - DNA, 25 bp, Homo sapien
acccccaggttatggtcctctgcct

SEQ ID NO: 5521922 - DNA, 25 bp, Homo sapien
tgtgtttgaagctcctaatgtatcc

SEQ ID NO: 5521923 - DNA, 25 bp, Homo sapien
ggttgtactggcctcaaaaactgaa

SEQ ID NO: 5521924 - DNA, 25 bp, Homo sapien
gtgaagccatctgttcctagagttt

SEQ ID NO: 5521925 - DNA, 25 bp, Homo sapien
ttgagaaattatatgtgtttgaagc

SEQ ID NO: 5521926 - DNA, 25 bp, Homo sapien
ggcacaaccaatctctagtatgacc

SEQ ID NO: 5521927 - DNA, 25 bp, Homo sapien
gcagttgtgacaaggcacaaccaat

SEQ ID NO: 5521928 - DNA, 25 bp, Homo sapien
ccctgacccccaggttatggtcctc

SEQ ID NO: 5521929 - DNA, 25 bp, Homo sapien
ttctggtttctggtcccccccatgc

SEQ ID NO: 5521930 - DNA, 25 bp, Homo sapien
ttgttatcaaggttgtactggcctc

SEQ ID NO: 5521931 - DNA, 25 bp, Homo sapien
ggcagaggctcctttaagacggtct

SEQ ID NO: 5521932 - DNA, 25 bp, Homo sapien
aggtctggacactgaaaccaccgtg

SEQ ID NO: 5521933 - DNA, 25 bp, Homo sapien
gggaatgtctaacgatggccgcttt

SEQ ID NO: 5521934 - DNA, 25 bp, Homo sapien
tcatctgcgactccaatgccactgc

SEQ ID NO: 5521935 - DNA, 25 bp, Homo sapien
acactgaaaccaccgtggaagtcgc

SEQ ID NO: 5521936 - DNA, 25 bp, Homo sapien
cagcaggatgatatcgaagagctgg

SEQ ID NO: 5521937 - DNA, 25 bp, Homo sapien
actggagcttcccggccttcctctt

SEQ ID NO: 5521938 - DNA, 25 bp, Homo sapien
agacggtctacaaaggtctggacac

SEQ ID NO: 5521939 - DNA, 25 bp, Homo sapien
cgatggccgctttctcaagtttgac

SEQ ID NO: 5521940 - DNA, 25 bp, Homo sapien
gtttgacatcgaaatcggcagaggc

SEQ ID NO: 5521941 - DNA, 25 bp, Homo sapien
ccgccaccgccacttcccaggtagc

SEQ ID NO: 5521942 - DNA, 25 bp, Homo sapien
tatgacacgaataggttagagttcc

SEQ ID NO: 5521943 - DNA, 25 bp, Homo sapien
tttatgactcatgcagcaaaaggtc

SEQ ID NO: 5521944 - DNA, 25 bp, Homo sapien
cacaccgggcaaatccttacctgga

SEQ ID NO: 5521945 - DNA, 25 bp, Homo sapien
gcagcaaaaggtcaatatgacacga

SEQ ID NO: 5521946 - DNA, 25 bp, Homo sapien
aaaatacacaccgggcaaatcctta

SEQ ID NO: 5521947 - DNA, 25 bp, Homo sapien
tacgagcttattttagaacctgatg

SEQ ID NO: 5521948 - DNA, 25 bp, Homo sapien
gccttacaaatgctggctacatttc

SEQ ID NO: 5521949 - DNA, 25 bp, Homo sapien
agggcaaagagattcaaatgtcgat

SEQ ID NO: 5521950 - DNA, 25 bp, Homo sapien
tcactatcaaaagaaacactatgct

SEQ ID NO: 5521951 - DNA, 25 bp, Homo sapien
ggaggaactgtggcttggttattca

SEQ ID NO: 5521952 - DNA, 25 bp, Homo sapien
actctccatttgaggaggaactgtg

SEQ ID NO: 5521953 - DNA, 25 bp, Homo sapien
ttgatgaccacccatgctgtacatt

SEQ ID NO: 5521954 - DNA, 25 bp, Homo sapien
tttatagtgtccaccaggtttattc

SEQ ID NO: 5521955 - DNA, 25 bp, Homo sapien
caaattaacacattgatgaccaccc

SEQ ID NO: 5521956 - DNA, 25 bp, Homo sapien
caattaagtgggatcatgaagtatt

SEQ ID NO: 5521957 - DNA, 25 bp, Homo sapien
tctgtaatggttaccacagtcaaat

SEQ ID NO: 5521958 - DNA, 25 bp, Homo sapien
tctggactctagtaaccaccgttcc

SEQ ID NO: 5521959 - DNA, 25 bp, Homo sapien
ctctgcctcggagtttaagttttta

SEQ ID NO: 5521960 - DNA, 25 bp, Homo sapien
tacattaaatctccagaacgtgttc

SEQ ID NO: 5521961 - DNA, 25 bp, Homo sapien
atgaagtatttgcctatgtctgcct

SEQ ID NO: 5521962 - DNA, 25 bp, Homo sapien
agtaaccaccgttcctccctctgcc

SEQ ID NO: 5521963 - DNA, 25 bp, Homo sapien
tcatgtgacaaatgtcaggatttcc

SEQ ID NO: 5521964 - DNA, 25 bp, Homo sapien
tcggtgtccaactgagtctcatcgc

SEQ ID NO: 5521965 - DNA, 25 bp, Homo sapien
gggctttcttaggctgtaaaatcac

SEQ ID NO: 5521966 - DNA, 25 bp, Homo sapien
tctgtctgtccactgcttcaactcc

SEQ ID NO: 5521967 - DNA, 25 bp, Homo sapien
ggctgtgggcagctttaccataagt

SEQ ID NO: 5521968 - DNA, 25 bp, Homo sapien
attgcaacacctaggccctgggctt

SEQ ID NO: 5521969 - DNA, 25 bp, Homo sapien
taggccctgggctttcccccagcat

SEQ ID NO: 5521970 - DNA, 25 bp, Homo sapien
ctagcacctcatgttttgggggcac

SEQ ID NO: 5521971 - DNA, 25 bp, Homo sapien
tgctctctcggtgtccaactgagtc

SEQ ID NO: 5521972 - DNA, 25 bp, Homo sapien
aaaacaaaaagcatctgccaaccac

SEQ ID NO: 5521973 - DNA, 25 bp, Homo sapien
cccccagcattcattcactagcacc

SEQ ID NO: 5521974 - DNA, 25 bp, Homo sapien
tatgaaatgctgcagacagggaatt

SEQ ID NO: 5521975 - DNA, 25 bp, Homo sapien
gtatcagagtaattgaaataacttc

SEQ ID NO: 5521976 - DNA, 25 bp, Homo sapien
tgaatagctcaggaccaagaattgc

SEQ ID NO: 5521977 - DNA, 25 bp, Homo sapien
ttcatatacaggtagtaaagcacac

SEQ ID NO: 5521978 - DNA, 25 bp, Homo sapien
agtaaagcacacggggataatgtga

SEQ ID NO: 5521979 - DNA, 25 bp, Homo sapien
gctgttagcctttgaaagagaaata

SEQ ID NO: 5521980 - DNA, 25 bp, Homo sapien
gtagataatacagcgcagttaatgt

SEQ ID NO: 5521981 - DNA, 25 bp, Homo sapien
acccagaatctgcagcaaaaccatt

SEQ ID NO: 5521982 - DNA, 25 bp, Homo sapien
tggagcatgacaatgcaacgctaat

SEQ ID NO: 5521983 - DNA, 25 bp, Homo sapien
tgtatgaactgaatagctcaggacc

SEQ ID NO: 5521984 - DNA, 25 bp, Homo sapien
tcaggaccaagaattgctgttagcc

SEQ ID NO: 5521985 - DNA, 25 bp, Homo sapien
atacagatatcacatgctggagcat

SEQ ID NO: 5521986 - DNA, 25 bp, Homo sapien
ctccttactccccagcgtcttgtgt

SEQ ID NO: 5521987 - DNA, 25 bp, Homo sapien
acacaagacgctggggagtaaggag

SEQ ID NO: 5521988 - DNA, 25 bp, Homo sapien
caaagaactacatttgacaaagttt

SEQ ID NO: 5521989 - DNA, 25 bp, Homo sapien
ccccacacagccttggaagtcaaga

SEQ ID NO: 5521990 - DNA, 25 bp, Homo sapien
atatgcggcgtttcaagctccattc

SEQ ID NO: 5521991 - DNA, 25 bp, Homo sapien
caagagccttaatcagaaaacacat

SEQ ID NO: 5521992 - DNA, 25 bp, Homo sapien
gcagaatcctaggacgttttattaa

SEQ ID NO: 5521993 - DNA, 25 bp, Homo sapien
aagttttatatcagtccaagagccc

SEQ ID NO: 5521994 - DNA, 25 bp, Homo sapien
ggagcaagaatatgcggcgtttcaa

SEQ ID NO: 5521995 - DNA, 25 bp, Homo sapien
ccactatccttgtgggagcaagaat

SEQ ID NO: 5521996 - DNA, 25 bp, Homo sapien
attaattcatgatgcccactatcct

SEQ ID NO: 5521997 - DNA, 25 bp, Homo sapien
gaagtcaagagccttaatcagaaaa

SEQ ID NO: 5521998 - DNA, 25 bp, Homo sapien
tatccttgtgggagcaagaatatgc

SEQ ID NO: 5521999 - DNA, 25 bp, Homo sapien
gagctttcagatttgatgggggtga

SEQ ID NO: 5522000 - DNA, 25 bp, Homo sapien
gagatcagaataaggatgtttgact

SEQ ID NO: 5522001 - DNA, 25 bp, Homo sapien
tgactcctttactgacaggggaccc

SEQ ID NO: 5522002 - DNA, 25 bp, Homo sapien
aggggaccctacatgagtccaggtt

SEQ ID NO: 5522003 - DNA, 25 bp, Homo sapien
aacaccaatattaggccaaggggca

SEQ ID NO: 5522004 - DNA, 25 bp, Homo sapien
ctcttagtgttgagaaggagtcagg

SEQ ID NO: 5522005 - DNA, 25 bp, Homo sapien
aggttgtggactgagtaatgatgtc

SEQ ID NO: 5522006 - DNA, 25 bp, Homo sapien
ggagtcaggctcaagctaaacacca

SEQ ID NO: 5522007 - DNA, 25 bp, Homo sapien
gacaggaagtgacatatccagggtc

SEQ ID NO: 5522008 - DNA, 25 bp, Homo sapien
ggaaggacagacttgtggaatttcc

SEQ ID NO: 5522009 - DNA, 25 bp, Homo sapien
tggtatacctggtgggcttgactga

SEQ ID NO: 5522010 - DNA, 25 bp, Homo sapien
tctggtgaatactcaaaattgtagc

SEQ ID NO: 5522011 - DNA, 25 bp, Homo sapien
gagctaagaaatatggaatacattg

SEQ ID NO: 5522012 - DNA, 25 bp, Homo sapien
gaaagaagacagtgcatcagttatc

SEQ ID NO: 5522013 - DNA, 25 bp, Homo sapien
gactgacagtctctggaagtcaagg

SEQ ID NO: 5522014 - DNA, 25 bp, Homo sapien
cagtctttagcagtgtggtactcac

SEQ ID NO: 5522015 - DNA, 25 bp, Homo sapien
acatcttattgggagtagttttcag

SEQ ID NO: 5522016 - DNA, 25 bp, Homo sapien
taaagagccagtaaaatcaagttgc

SEQ ID NO: 5522017 - DNA, 25 bp, Homo sapien
ccaagctgaattacagaagggtatc

SEQ ID NO: 5522018 - DNA, 25 bp, Homo sapien
gtaaaaataggagattgtccaaaca

SEQ ID NO: 5522019 - DNA, 25 bp, Homo sapien
caaaccctcaataagaactcaaaac

SEQ ID NO: 5522020 - DNA, 25 bp, Homo sapien
tgtccaaacagattgaccctgatac

SEQ ID NO: 5522021 - DNA, 25 bp, Homo sapien
cgaaggccaaattttccaggaggac

SEQ ID NO: 5522022 - DNA, 25 bp, Homo sapien
accgaagttataatgtagctacagg

SEQ ID NO: 5522023 - DNA, 25 bp, Homo sapien
gcattgaagtgagtattaataggat

SEQ ID NO: 5522024 - DNA, 25 bp, Homo sapien
gaagagtccagaattcaggtaggtt

SEQ ID NO: 5522025 - DNA, 25 bp, Homo sapien
tttgcagatctgggccttcaataac

SEQ ID NO: 5522026 - DNA, 25 bp, Homo sapien
tcaaaacctgccatgatgatgtgaa

SEQ ID NO: 5522027 - DNA, 25 bp, Homo sapien
atggctactcatgattgaagagtcc

SEQ ID NO: 5522028 - DNA, 25 bp, Homo sapien
aatgtagctacaggccagctgttat

SEQ ID NO: 5522029 - DNA, 25 bp, Homo sapien
taaaggagacaatgaattagtagct

SEQ ID NO: 5522030 - DNA, 25 bp, Homo sapien
tcaggtaggttgattttgaaatgaa

SEQ ID NO: 5522031 - DNA, 25 bp, Homo sapien
agtactgtttgggaaatgagacccc

SEQ ID NO: 5522032 - DNA, 25 bp, Homo sapien
taaaagccagtcaagttggtactgg

SEQ ID NO: 5522033 - DNA, 25 bp, Homo sapien
aaagcagtgcttttcgatccatccc

SEQ ID NO: 5522034 - DNA, 25 bp, Homo sapien
gtgtgtgtgacaataattaaaagcc

SEQ ID NO: 5522035 - DNA, 25 bp, Homo sapien
tcccagcaataaatgatactatgat

SEQ ID NO: 5522036 - DNA, 25 bp, Homo sapien
ggaggtattccttcctatgcatttc

SEQ ID NO: 5522037 - DNA, 25 bp, Homo sapien
tcagtatgaactatggtaagatttc

SEQ ID NO: 5522038 - DNA, 25 bp, Homo sapien
agtcaagttggtactggaaaatcat

SEQ ID NO: 5522039 - DNA, 25 bp, Homo sapien
aaggcatattatttaggaggtattc

SEQ ID NO: 5522040 - DNA, 25 bp, Homo sapien
tatgcatactagactttatcatcag

SEQ ID NO: 5522041 - DNA, 25 bp, Homo sapien
aagttggtactggaaaatcattttg

SEQ ID NO: 5522042 - DNA, 25 bp, Homo sapien
gatccatcccagcaataaatgatac

SEQ ID NO: 5522043 - DNA, 25 bp, Homo sapien
ctcaggggttagcatcttagcagta

SEQ ID NO: 5522044 - DNA, 25 bp, Homo sapien
actcagtcggattcaatggacggtc

SEQ ID NO: 5522045 - DNA, 25 bp, Homo sapien
tttgcaaactggatgaactagattg

SEQ ID NO: 5522046 - DNA, 25 bp, Homo sapien
aaaagtgtcagaagttaccatttga

SEQ ID NO: 5522047 - DNA, 25 bp, Homo sapien
caatggacggtcacagtgctattac

SEQ ID NO: 5522048 - DNA, 25 bp, Homo sapien
actggatgaactagattgcttgatc

SEQ ID NO: 5522049 - DNA, 25 bp, Homo sapien
cttctggtgaacattggctcagggg

SEQ ID NO: 5522050 - DNA, 25 bp, Homo sapien
gctgtcttcttactggctgtaccac

SEQ ID NO: 5522051 - DNA, 25 bp, Homo sapien
gctgtaccacttttgaagaagctct

SEQ ID NO: 5522052 - DNA, 25 bp, Homo sapien
gaaaaccctgctgattctgaaaagt

SEQ ID NO: 5522053 - DNA, 25 bp, Homo sapien
aatccgtatcctctgcttctggtga

SEQ ID NO: 5522054 - DNA, 25 bp, Homo sapien
gggtgccgacggacgggcgcaaggg

SEQ ID NO: 5522055 - DNA, 25 bp, Homo sapien
cccttgcgcccgtccgtcggcaccc

SEQ ID NO: 5522056 - DNA, 25 bp, Homo sapien
gtacagtcagtacagtagctctcct

SEQ ID NO: 5522057 - DNA, 25 bp, Homo sapien
aaattacaagaagcaatgccgagga

SEQ ID NO: 5522058 - DNA, 25 bp, Homo sapien
gaggaccgtgaactgtatacagaag

SEQ ID NO: 5522059 - DNA, 25 bp, Homo sapien
atgaagcgctgcattccacaagtac

SEQ ID NO: 5522060 - DNA, 25 bp, Homo sapien
agaagccttgtggatctagaaacca

SEQ ID NO: 5522061 - DNA, 25 bp, Homo sapien
aaaaaaatcagtacagagtagtgtc

SEQ ID NO: 5522062 - DNA, 25 bp, Homo sapien
gggatggaaaaattacaagaagcaa

SEQ ID NO: 5522063 - DNA, 25 bp, Homo sapien
aaccaaccctggatggaaaatactc

SEQ ID NO: 5522064 - DNA, 25 bp, Homo sapien
aacagtgtgtgaacttaggacattc

SEQ ID NO: 5522065 - DNA, 25 bp, Homo sapien
gatctagaaaccaacagtgtgtgaa

SEQ ID NO: 5522066 - DNA, 25 bp, Homo sapien
tataaagtatacttgaggatgtgca

SEQ ID NO: 5522067 - DNA, 25 bp, Homo sapien
cgtgccggcgggaacagaggacgac

SEQ ID NO: 5522068 - DNA, 25 bp, Homo sapien
gtcgtcctctgttcccgccggcacg

SEQ ID NO: 5522069 - DNA, 25 bp, Homo sapien
acagcagattctacattggcagcac

SEQ ID NO: 5522070 - DNA, 25 bp, Homo sapien
gcagcaacagcaaaataacacatcg

SEQ ID NO: 5522071 - DNA, 25 bp, Homo sapien
gtagggcaagaccatctcctggaac

SEQ ID NO: 5522072 - DNA, 25 bp, Homo sapien
cagcactattcccggaagcggatgc

SEQ ID NO: 5522073 - DNA, 25 bp, Homo sapien
ggatgcgccttcagcaagccttggc

SEQ ID NO: 5522074 - DNA, 25 bp, Homo sapien
gattaagaatggaaaagttaggtgc

SEQ ID NO: 5522075 - DNA, 25 bp, Homo sapien
gagtagcggagtcactgacctcttt

SEQ ID NO: 5522076 - DNA, 25 bp, Homo sapien
aactggatacaaacgaggcacttaa

SEQ ID NO: 5522077 - DNA, 25 bp, Homo sapien
ggtgggccaccaagtatactgaatt

SEQ ID NO: 5522078 - DNA, 25 bp, Homo sapien
ctctaagatgtagtgagagtagcgg

SEQ ID NO: 5522079 - DNA, 25 bp, Homo sapien
tcctgacatatagtagggcaagacc

SEQ ID NO: 5522080 - DNA, 25 bp, Homo sapien
agcaggatttattttggtaatgatc

SEQ ID NO: 5522081 - DNA, 25 bp, Homo sapien
aggttttaagtgtctatgtaatgtt

SEQ ID NO: 5522082 - DNA, 25 bp, Homo sapien
gatcctgcttccttataaacaacta

SEQ ID NO: 5522083 - DNA, 25 bp, Homo sapien
aacgtggggtatgaacagatttttg

SEQ ID NO: 5522084 - DNA, 25 bp, Homo sapien
aaactaggctttaaaacatgattcc

SEQ ID NO: 5522085 - DNA, 25 bp, Homo sapien
aatgttcgagatattacgatcactc

SEQ ID NO: 5522086 - DNA, 25 bp, Homo sapien
agtgtctatgtaatgttcgagatat

SEQ ID NO: 5522087 - DNA, 25 bp, Homo sapien
aaagcatagtatgttttgaaaccaa

SEQ ID NO: 5522088 - DNA, 25 bp, Homo sapien
cttgtgttaaggagtacaatgaggc

SEQ ID NO: 5522089 - DNA, 25 bp, Homo sapien
aataaacaaccaggcatatcaatat

SEQ ID NO: 5522090 - DNA, 25 bp, Homo sapien
ttatcctactagcaaaaattagcaa

SEQ ID NO: 5522091 - DNA, 25 bp, Homo sapien
aaagttagatacacaatttggtaca

SEQ ID NO: 5522092 - DNA, 25 bp, Homo sapien
aatgatggtcacttggaatctgctc

SEQ ID NO: 5522093 - DNA, 25 bp, Homo sapien
gctacagctactacaagaaatatgg

SEQ ID NO: 5522094 - DNA, 25 bp, Homo sapien
taagtaaagattaaataatgccatc

SEQ ID NO: 5522095 - DNA, 25 bp, Homo sapien
aatgccatcttagaaaggatctgtt

SEQ ID NO: 5522096 - DNA, 25 bp, Homo sapien
aagctatattcagaaggtttgcacc

SEQ ID NO: 5522097 - DNA, 25 bp, Homo sapien
tgtttggtccaaaatgaaagctata

SEQ ID NO: 5522098 - DNA, 25 bp, Homo sapien
cactgcattggatacttggattgtt

SEQ ID NO: 5522099 - DNA, 25 bp, Homo sapien
tcatttgcatatatagaacctgttc

SEQ ID NO: 5522100 - DNA, 25 bp, Homo sapien
gtgcaagcagtgtaaaattgaagtc

SEQ ID NO: 5522101 - DNA, 25 bp, Homo sapien
tgtacaaaataaagtgcaagcagtg

SEQ ID NO: 5522102 - DNA, 25 bp, Homo sapien
cagtggattctggaggctctacttc

SEQ ID NO: 5522103 - DNA, 25 bp, Homo sapien
gcctttgatgaaaagggcagtggat

SEQ ID NO: 5522104 - DNA, 25 bp, Homo sapien
attcagagtaacatgagcaaaacct

SEQ ID NO: 5522105 - DNA, 25 bp, Homo sapien
ttatgttcatttggagagtcagggc

SEQ ID NO: 5522106 - DNA, 25 bp, Homo sapien
gattgtgaaatgtctcgtgagtatg

SEQ ID NO: 5522107 - DNA, 25 bp, Homo sapien
taagtggcatggattgtgcatgatc

SEQ ID NO: 5522108 - DNA, 25 bp, Homo sapien
aaagtatgcattaggattgtgaaat

SEQ ID NO: 5522109 - DNA, 25 bp, Homo sapien
agtatgccaatcctgagggtggaac

SEQ ID NO: 5522110 - DNA, 25 bp, Homo sapien
ggaggctctacttcaggtgctgcta

SEQ ID NO: 5522111 - DNA, 25 bp, Homo sapien
atgcagtgattgtcccagctagctc

SEQ ID NO: 5522112 - DNA, 25 bp, Homo sapien
taaattgtgtaggaaactgcagtgg

SEQ ID NO: 5522113 - DNA, 25 bp, Homo sapien
atgcaagaaaactcaagtgccacaa

SEQ ID NO: 5522114 - DNA, 25 bp, Homo sapien
ataataaacccacgaggttaaggca

SEQ ID NO: 5522115 - DNA, 25 bp, Homo sapien
taagtaccatcctgttggagcttcc

SEQ ID NO: 5522116 - DNA, 25 bp, Homo sapien
tgttggagcttcctaacgcccctgc

SEQ ID NO: 5522117 - DNA, 25 bp, Homo sapien
tccctatgaggtaataataaaccca

SEQ ID NO: 5522118 - DNA, 25 bp, Homo sapien
tactctggatggcttaattataaca

SEQ ID NO: 5522119 - DNA, 25 bp, Homo sapien
aacttcagcagaacctttccctccc

SEQ ID NO: 5522120 - DNA, 25 bp, Homo sapien
acacccataaactgctgtcaggagg

SEQ ID NO: 5522121 - DNA, 25 bp, Homo sapien
aagaagttgatgacaaacttggttt

SEQ ID NO: 5522122 - DNA, 25 bp, Homo sapien
gtatatatctagttgaggagaaaaa

SEQ ID NO: 5522123 - DNA, 25 bp, Homo sapien
tcaagtttgtgatgaaagaacagtc

SEQ ID NO: 5522124 - DNA, 25 bp, Homo sapien
gagacacagaataagaagcaactga

SEQ ID NO: 5522125 - DNA, 25 bp, Homo sapien
tggactaggaaatctgagacacaga

SEQ ID NO: 5522126 - DNA, 25 bp, Homo sapien
aaagccaagtgtatttgcacaactc

SEQ ID NO: 5522127 - DNA, 25 bp, Homo sapien
ctttgagagtcttctgagtgacatg

SEQ ID NO: 5522128 - DNA, 25 bp, Homo sapien
aagcaactgattacacaccctagtc

SEQ ID NO: 5522129 - DNA, 25 bp, Homo sapien
gagttctcttaggtgactctgggtc

SEQ ID NO: 5522130 - DNA, 25 bp, Homo sapien
ctgccaaagtaagtcaagaaaaatg

SEQ ID NO: 5522131 - DNA, 25 bp, Homo sapien
actgggtccaagtgatgacacattc

SEQ ID NO: 5522132 - DNA, 25 bp, Homo sapien
ctagtcatttaagttggaagagttc

SEQ ID NO: 5522133 - DNA, 25 bp, Homo sapien
gtaaactcgaacatccagaatctga

SEQ ID NO: 5522134 - DNA, 25 bp, Homo sapien
agaatgatgtgaatggattagaatc

SEQ ID NO: 5522135 - DNA, 25 bp, Homo sapien
cacccaatgaaaaagaatacaacac

SEQ ID NO: 5522136 - DNA, 25 bp, Homo sapien
tgataaacagatgctggccaatgtt

SEQ ID NO: 5522137 - DNA, 25 bp, Homo sapien
cacaatggacaaactgcatgccttt

SEQ ID NO: 5522138 - DNA, 25 bp, Homo sapien
agtcaaaaagtttatgtaaccaatc

SEQ ID NO: 5522139 - DNA, 25 bp, Homo sapien
aaacaaactgtcacaatggacaaac

SEQ ID NO: 5522140 - DNA, 25 bp, Homo sapien
tcaccaaacatacttggaaatgtcc

SEQ ID NO: 5522141 - DNA, 25 bp, Homo sapien
tatcacagacataaattgcctaatt

SEQ ID NO: 5522142 - DNA, 25 bp, Homo sapien
ctaaggacttggtattaaaaactga

SEQ ID NO: 5522143 - DNA, 25 bp, Homo sapien
ggccaatgttaagactcctaaggac

SEQ ID NO: 5522144 - DNA, 25 bp, Homo sapien
tatcaccctgacatcacccaatgaa

SEQ ID NO: 5522145 - DNA, 25 bp, Homo sapien
catgaatgtctggttatcaccctga

SEQ ID NO: 5522146 - DNA, 25 bp, Homo sapien
ggcggggggcccgacgttgcacgcg

SEQ ID NO: 5522147 - DNA, 25 bp, Homo sapien
cgcgtgcaacgtcgggccccccgcc

SEQ ID NO: 5522148 - DNA, 25 bp, Homo sapien
ttgcctcccggccacgtcccgtgac

SEQ ID NO: 5522149 - DNA, 25 bp, Homo sapien
gtcacgggacgtggccgggaggcaa

SEQ ID NO: 5522150 - DNA, 25 bp, Homo sapien
ggcggaaactgtcggcggcccggcg

SEQ ID NO: 5522151 - DNA, 25 bp, Homo sapien
cgccgggccgccgacagtttccgcc

SEQ ID NO: 5522152 - DNA, 25 bp, Homo sapien
cggcggaaactgtcggcggcccggc

SEQ ID NO: 5522153 - DNA, 25 bp, Homo sapien
gccgggccgccgacagtttccgccg

SEQ ID NO: 5522154 - DNA, 25 bp, Homo sapien
acagggaatcatatcataaaacatt

SEQ ID NO: 5522155 - DNA, 25 bp, Homo sapien
gttataaggtgattacaaactcctc

SEQ ID NO: 5522156 - DNA, 25 bp, Homo sapien
gactgaactacacaccaaggatctt

SEQ ID NO: 5522157 - DNA, 25 bp, Homo sapien
aaatatataacaggatgctccatcc

SEQ ID NO: 5522158 - DNA, 25 bp, Homo sapien
aaaaaaatgtcctgatgagccagac

SEQ ID NO: 5522159 - DNA, 25 bp, Homo sapien
acagagtcacagttgctagggattg

SEQ ID NO: 5522160 - DNA, 25 bp, Homo sapien
tatactgcaagactgaactacacac

SEQ ID NO: 5522161 - DNA, 25 bp, Homo sapien
ggagaacacgccagaacatgtctgt

SEQ ID NO: 5522162 - DNA, 25 bp, Homo sapien
gaacatgtctgtagtgacacccacc

SEQ ID NO: 5522163 - DNA, 25 bp, Homo sapien
tgctaaatacagagtcacagttgct

SEQ ID NO: 5522164 - DNA, 25 bp, Homo sapien
ggaggcaagacccacattctcagct

SEQ ID NO: 5522165 - DNA, 25 bp, Homo sapien
tggctaatgcttcgggacccttgat

SEQ ID NO: 5522166 - DNA, 25 bp, Homo sapien
gagtatgatgtggccacccctgaca

SEQ ID NO: 5522167 - DNA, 25 bp, Homo sapien
ttaccatcgaccgcatcaagccagc

SEQ ID NO: 5522168 - DNA, 25 bp, Homo sapien
tggctttgtccttagaggaggtgcc

SEQ ID NO: 5522169 - DNA, 25 bp, Homo sapien
cctccggaacaagtcagtcattacc

SEQ ID NO: 5522170 - DNA, 25 bp, Homo sapien
ggaacactgctcgctgcttgaggcc

SEQ ID NO: 5522171 - DNA, 25 bp, Homo sapien
tccatcgatggcaccagcatggaac

SEQ ID NO: 5522172 - DNA, 25 bp, Homo sapien
cagccacgaggcactctttcaggtg

SEQ ID NO: 5522173 - DNA, 25 bp, Homo sapien
gccagcatttcagagaaggtgcggc

SEQ ID NO: 5522174 - DNA, 25 bp, Homo sapien
tgaggccaccaagctcctggccagc

SEQ ID NO: 5522175 - DNA, 25 bp, Homo sapien
acaggctgctcagcgtcgatggaat

SEQ ID NO: 5522176 - DNA, 25 bp, Homo sapien
acaagagtatgtccttcgtacaatt

SEQ ID NO: 5522177 - DNA, 25 bp, Homo sapien
aattgtacgaaggacatactcttgt

SEQ ID NO: 5522178 - DNA, 25 bp, Homo sapien
agtaactttccaggaagctgccggc

SEQ ID NO: 5522179 - DNA, 25 bp, Homo sapien
gtgcagggctctcagagttcaccta

SEQ ID NO: 5522180 - DNA, 25 bp, Homo sapien
tgaggggaatgacacagccctctca

SEQ ID NO: 5522181 - DNA, 25 bp, Homo sapien
caatccgaggctcatatcgagactt

SEQ ID NO: 5522182 - DNA, 25 bp, Homo sapien
acagtttataaatggggaaggtcag

SEQ ID NO: 5522183 - DNA, 25 bp, Homo sapien
tgtttgagcgagacttcaaggtcaa

SEQ ID NO: 5522184 - DNA, 25 bp, Homo sapien
tacgccgtcaatgcagcaggcaatg

SEQ ID NO: 5522185 - DNA, 25 bp, Homo sapien
gagggtctccatcataggcgcccca

SEQ ID NO: 5522186 - DNA, 25 bp, Homo sapien
aaatccctcgtccgcgccgagtgca

SEQ ID NO: 5522187 - DNA, 25 bp, Homo sapien
cggaacgtagtcaatctcggctctg

SEQ ID NO: 5522188 - DNA, 25 bp, Homo sapien
ccggctccaacaagaagtaactttc

SEQ ID NO: 5522189 - DNA, 25 bp, Homo sapien
tgcacttataaatgatgactgaccc

SEQ ID NO: 5522190 - DNA, 25 bp, Homo sapien
ttctggattactgcaatagcctcac

SEQ ID NO: 5522191 - DNA, 25 bp, Homo sapien
attgctctgaaagttctggaaattc

SEQ ID NO: 5522192 - DNA, 25 bp, Homo sapien
tcttaaagacatagtattgagcaaa

SEQ ID NO: 5522193 - DNA, 25 bp, Homo sapien
attgagcaaaataatcagtacacac

SEQ ID NO: 5522194 - DNA, 25 bp, Homo sapien
gccacatgcaacaatacagagaatc

SEQ ID NO: 5522195 - DNA, 25 bp, Homo sapien
gactgacccactatcaaggaaagta

SEQ ID NO: 5522196 - DNA, 25 bp, Homo sapien
atcaccacgcccagtcttccccaac

SEQ ID NO: 5522197 - DNA, 25 bp, Homo sapien
atcaaaaataaactcagccacatgc

SEQ ID NO: 5522198 - DNA, 25 bp, Homo sapien
actcactaaacagcaccgtcatcca

SEQ ID NO: 5522199 - DNA, 25 bp, Homo sapien
taccactgaagtctaagccattgtc

SEQ ID NO: 5522200 - DNA, 25 bp, Homo sapien
aggacgtcaccatagcaacaacact

SEQ ID NO: 5522201 - DNA, 25 bp, Homo sapien
cagcaaaaggacgtcaccatagcaa

SEQ ID NO: 5522202 - DNA, 25 bp, Homo sapien
gatgggaggttccagatgctggaac

SEQ ID NO: 5522203 - DNA, 25 bp, Homo sapien
tgctgagctctgactcaccctgtcc

SEQ ID NO: 5522204 - DNA, 25 bp, Homo sapien
aaagatgaccccgagtttggcttct

SEQ ID NO: 5522205 - DNA, 25 bp, Homo sapien
tcacaatatttacagacacgcccac

SEQ ID NO: 5522206 - DNA, 25 bp, Homo sapien
ataaatacacagagtgccagacagt

SEQ ID NO: 5522207 - DNA, 25 bp, Homo sapien
ctgatccacagaaaagataagataa

SEQ ID NO: 5522208 - DNA, 25 bp, Homo sapien
cagatgctggaacgcataaatacac

SEQ ID NO: 5522209 - DNA, 25 bp, Homo sapien
cactgtgggcgacttgctctctact

SEQ ID NO: 5522210 - DNA, 25 bp, Homo sapien
ggcctggaagactccccactcagaa

SEQ ID NO: 5522211 - DNA, 25 bp, Homo sapien
attggtatatgcaggaaaccagaag

SEQ ID NO: 5522212 - DNA, 25 bp, Homo sapien
agaaagataattatgtagctcagac

SEQ ID NO: 5522213 - DNA, 25 bp, Homo sapien
ctgaaatgtcagttggtacacacct

SEQ ID NO: 5522214 - DNA, 25 bp, Homo sapien
aaacaaactccaactagaaagataa

SEQ ID NO: 5522215 - DNA, 25 bp, Homo sapien
attagctcagctcagtgaaaatagc

SEQ ID NO: 5522216 - DNA, 25 bp, Homo sapien
agaagcgacgacattgagttcaaaa

SEQ ID NO: 5522217 - DNA, 25 bp, Homo sapien
ttagaattgtagacaggccacaagg

SEQ ID NO: 5522218 - DNA, 25 bp, Homo sapien
caggttaagaaatttgtacgtgcat

SEQ ID NO: 5522219 - DNA, 25 bp, Homo sapien
tagctcagacattgataacaggtta

SEQ ID NO: 5522220 - DNA, 25 bp, Homo sapien
ctcagtgaaaatagctcaggaaaaa

SEQ ID NO: 5522221 - DNA, 25 bp, Homo sapien
aatgcagctacctttgagccacaaa

SEQ ID NO: 5522222 - DNA, 25 bp, Homo sapien
atggtaccacttatgagggtatctt

SEQ ID NO: 5522223 - DNA, 25 bp, Homo sapien
tggatgctgtgcaccggaaagcatc

SEQ ID NO: 5522224 - DNA, 25 bp, Homo sapien
atgtaaaggtgaaaaatggtaccac

SEQ ID NO: 5522225 - DNA, 25 bp, Homo sapien
ttcaagacgctaagctcaaagtttg

SEQ ID NO: 5522226 - DNA, 25 bp, Homo sapien
taaagacaagttcaccgattcagcc

SEQ ID NO: 5522227 - DNA, 25 bp, Homo sapien
gtttgaaggcgtctacaacaattcc

SEQ ID NO: 5522228 - DNA, 25 bp, Homo sapien
tccttacagctgttgtgggctccac

SEQ ID NO: 5522229 - DNA, 25 bp, Homo sapien
gaggacattgtggacaccatggtgt

SEQ ID NO: 5522230 - DNA, 25 bp, Homo sapien
gtgtttaagccaagtgatgtcatgc

SEQ ID NO: 5522231 - DNA, 25 bp, Homo sapien
tgggctccacttgtgatgtaaaggt

SEQ ID NO: 5522232 - DNA, 25 bp, Homo sapien
caaagtttgaactagccgtggatgc

SEQ ID NO: 5522233 - DNA, 25 bp, Homo sapien
ttaagacatattaataaaagccaga

SEQ ID NO: 5522234 - DNA, 25 bp, Homo sapien
atgtaacaactgtctgtaccataac

SEQ ID NO: 5522235 - DNA, 25 bp, Homo sapien
ccagaagtaggcattatgtaaaatc

SEQ ID NO: 5522236 - DNA, 25 bp, Homo sapien
ttgcacaaatatcccctagaactgg

SEQ ID NO: 5522237 - DNA, 25 bp, Homo sapien
caaaacaaaatctgtactagtatgt

SEQ ID NO: 5522238 - DNA, 25 bp, Homo sapien
atccccagagtatgccaattggaac

SEQ ID NO: 5522239 - DNA, 25 bp, Homo sapien
aagcagaacaatctcataagacatc

SEQ ID NO: 5522240 - DNA, 25 bp, Homo sapien
aagacatctaccagaagtaggcatt

SEQ ID NO: 5522241 - DNA, 25 bp, Homo sapien
ttttttaagtgatcatccccagagt

SEQ ID NO: 5522242 - DNA, 25 bp, Homo sapien
acagaacaagaaacagctatgtaca

SEQ ID NO: 5522243 - DNA, 25 bp, Homo sapien
cacactttaaagtagcagcagctca

SEQ ID NO: 5522244 - DNA, 25 bp, Homo sapien
catggacagatatgtctcaacgacc

SEQ ID NO: 5522245 - DNA, 25 bp, Homo sapien
tgatgattgctgtgagtcagagaca

SEQ ID NO: 5522246 - DNA, 25 bp, Homo sapien
ccagttcttgtgacagagactgagc

SEQ ID NO: 5522247 - DNA, 25 bp, Homo sapien
atgggtgaagatgctcagagcatca

SEQ ID NO: 5522248 - DNA, 25 bp, Homo sapien
gttcctggcagtgtgactttggtca

SEQ ID NO: 5522249 - DNA, 25 bp, Homo sapien
cacacaggctctgagtagattccct

SEQ ID NO: 5522250 - DNA, 25 bp, Homo sapien
caggcactacacaaggtgggtcctg

SEQ ID NO: 5522251 - DNA, 25 bp, Homo sapien
ggtttacatatgaggaggtcatgga

SEQ ID NO: 5522252 - DNA, 25 bp, Homo sapien
aaattatttggtagactgggcagca

SEQ ID NO: 5522253 - DNA, 25 bp, Homo sapien
ctcaacgaccaaatgggtgaagatg

SEQ ID NO: 5522254 - DNA, 25 bp, Homo sapien
atggaggttcaggaaagtcacttat

SEQ ID NO: 5522255 - DNA, 25 bp, Homo sapien
tgaggaattgatttaggacaggttc

SEQ ID NO: 5522256 - DNA, 25 bp, Homo sapien
ggagagcgcgtcactgctattgaat

SEQ ID NO: 5522257 - DNA, 25 bp, Homo sapien
cggcaggccttgctagcacacgccg

SEQ ID NO: 5522258 - DNA, 25 bp, Homo sapien
atgtctccgcgtctcaggcacttct

SEQ ID NO: 5522259 - DNA, 25 bp, Homo sapien
tcaggcacttctgtgaaatgttctc

SEQ ID NO: 5522260 - DNA, 25 bp, Homo sapien
catactgaaaaaaacctcagctgat

SEQ ID NO: 5522261 - DNA, 25 bp, Homo sapien
accagccatgtctccgcgtctcagg

SEQ ID NO: 5522262 - DNA, 25 bp, Homo sapien
tcagctgatgttatctgtgggggct

SEQ ID NO: 5522263 - DNA, 25 bp, Homo sapien
tctcagaaccctgtggtgactgcgg

SEQ ID NO: 5522264 - DNA, 25 bp, Homo sapien
ggctgttgccattctttcgtagggt

SEQ ID NO: 5522265 - DNA, 25 bp, Homo sapien
agtataaatactggctctaagcttt

SEQ ID NO: 5522266 - DNA, 25 bp, Homo sapien
caacagatacaaaaagagatagaac

SEQ ID NO: 5522267 - DNA, 25 bp, Homo sapien
agcagcatctcccgtgggatactat

SEQ ID NO: 5522268 - DNA, 25 bp, Homo sapien
aaaaagagatagaaccaatgatatt

SEQ ID NO: 5522269 - DNA, 25 bp, Homo sapien
cagacgtgcactagtgagtgtatac

SEQ ID NO: 5522270 - DNA, 25 bp, Homo sapien
gtgagtgtatactgagaagggatta

SEQ ID NO: 5522271 - DNA, 25 bp, Homo sapien
tgggatactatttcagacgtgcact

SEQ ID NO: 5522272 - DNA, 25 bp, Homo sapien
tcatgtatgagggcgcttaccttta

SEQ ID NO: 5522273 - DNA, 25 bp, Homo sapien
gtctagcagctccaaagtaactgta

SEQ ID NO: 5522274 - DNA, 25 bp, Homo sapien
gaggaggcacgttctctcacagaga

SEQ ID NO: 5522275 - DNA, 25 bp, Homo sapien
acacagaaaaccagtctagcagctc

SEQ ID NO: 5522276 - DNA, 25 bp, Homo sapien
tagcaatgcacaatagaaaacggat

SEQ ID NO: 5522277 - DNA, 25 bp, Homo sapien
taatatgaacacacaaggtataaga

SEQ ID NO: 5522278 - DNA, 25 bp, Homo sapien
tattgggtttcttgagctctgttta

SEQ ID NO: 5522279 - DNA, 25 bp, Homo sapien
taagcaggtgagaatttatttatcc

SEQ ID NO: 5522280 - DNA, 25 bp, Homo sapien
actgagagatccacaacaatacata

SEQ ID NO: 5522281 - DNA, 25 bp, Homo sapien
gaaggaaataattcattgatcccgc

SEQ ID NO: 5522282 - DNA, 25 bp, Homo sapien
aaaagttagtatgtgactgtcccaa

SEQ ID NO: 5522283 - DNA, 25 bp, Homo sapien
aaaaaggcttatgtgtttcaattgc

SEQ ID NO: 5522284 - DNA, 25 bp, Homo sapien
aggtataagataaatgtttgagaag

SEQ ID NO: 5522285 - DNA, 25 bp, Homo sapien
ttcccattgctgactagtaggtttt

SEQ ID NO: 5522286 - DNA, 25 bp, Homo sapien
tagcatttaccatatgcaaggcacc

SEQ ID NO: 5522287 - DNA, 25 bp, Homo sapien
ccatgttaaacactgagagatccac

SEQ ID NO: 5522288 - DNA, 25 bp, Homo sapien
acatgagtcctcgtagtatatcaag

SEQ ID NO: 5522289 - DNA, 25 bp, Homo sapien
cttgatatactacgaggactcatgt

SEQ ID NO: 5522290 - DNA, 25 bp, Homo sapien
tgtctaccaacaactgccgtctctc

SEQ ID NO: 5522291 - DNA, 25 bp, Homo sapien
atccaaaggagtagccatttccagt

SEQ ID NO: 5522292 - DNA, 25 bp, Homo sapien
gctgagtctgtcctgaccctgggta

SEQ ID NO: 5522293 - DNA, 25 bp, Homo sapien
tggtacagaaatggcaccgtcactt

SEQ ID NO: 5522294 - DNA, 25 bp, Homo sapien
taatttgtggagtcgagtcgtttgt

SEQ ID NO: 5522295 - DNA, 25 bp, Homo sapien
ctgggcagaattaagtgatatagaa

SEQ ID NO: 5522296 - DNA, 25 bp, Homo sapien
agtctctgatgatcccaaaggcact

SEQ ID NO: 5522297 - DNA, 25 bp, Homo sapien
aggctcaaaatgaacagggagattc

SEQ ID NO: 5522298 - DNA, 25 bp, Homo sapien
tggcaccgtcacttccctgggacct

SEQ ID NO: 5522299 - DNA, 25 bp, Homo sapien
agtgatatagaaggtttgctgagtc

SEQ ID NO: 5522300 - DNA, 25 bp, Homo sapien
gttccaagcaactgggaaatgaggt

SEQ ID NO: 5522301 - DNA, 25 bp, Homo sapien
atagcctggttcaacaagccaactc

SEQ ID NO: 5522302 - DNA, 25 bp, Homo sapien
tcttggaagcatatagcctggttca

SEQ ID NO: 5522303 - DNA, 25 bp, Homo sapien
atccaaactgcacaccacatgacat

SEQ ID NO: 5522304 - DNA, 25 bp, Homo sapien
gagcacacagagtccgtctccacca

SEQ ID NO: 5522305 - DNA, 25 bp, Homo sapien
aacacttagtgcctgaggtagagat

SEQ ID NO: 5522306 - DNA, 25 bp, Homo sapien
catgacattagattgctggttaacc

SEQ ID NO: 5522307 - DNA, 25 bp, Homo sapien
gaggtagagatttctgtaagagatt

SEQ ID NO: 5522308 - DNA, 25 bp, Homo sapien
gaacaaaattagcaatgagtgatct

SEQ ID NO: 5522309 - DNA, 25 bp, Homo sapien
ctttggcactagaacaggtgattcc

SEQ ID NO: 5522310 - DNA, 25 bp, Homo sapien
ctgaaatgcagaactagtacctttt

SEQ ID NO: 5522311 - DNA, 25 bp, Homo sapien
taaaacacaattgagagtataatac

SEQ ID NO: 5522312 - DNA, 25 bp, Homo sapien
gctgtacagaagttttcacccctcc

SEQ ID NO: 5522313 - DNA, 25 bp, Homo sapien
aagggttcgatttaggctagccaac

SEQ ID NO: 5522314 - DNA, 25 bp, Homo sapien
aaagagagttggttcacctgagtcc

SEQ ID NO: 5522315 - DNA, 25 bp, Homo sapien
cagatatagagtgtgcatccctgac

SEQ ID NO: 5522316 - DNA, 25 bp, Homo sapien
tcctagaacccagtgacttcccgtc

SEQ ID NO: 5522317 - DNA, 25 bp, Homo sapien
ctcgcactagcgcacacagaatgtt

SEQ ID NO: 5522318 - DNA, 25 bp, Homo sapien
gcaggtgactgtagaagatcctctc

SEQ ID NO: 5522319 - DNA, 25 bp, Homo sapien
ttaaagatttggaggtacagtttgc

SEQ ID NO: 5522320 - DNA, 25 bp, Homo sapien
ctgagcgaaaaaacctctccgtccc

SEQ ID NO: 5522321 - DNA, 25 bp, Homo sapien
tctaagatagattcccaaagagagt

SEQ ID NO: 5522322 - DNA, 25 bp, Homo sapien
taggctagccaacatgtaggtcttt

SEQ ID NO: 5522323 - DNA, 25 bp, Homo sapien
acacgtaatacaagatctggggaaa

SEQ ID NO: 5522324 - DNA, 25 bp, Homo sapien
tcaacaacggatctaacaattctat

SEQ ID NO: 5522325 - DNA, 25 bp, Homo sapien
gttttgcagcagttcataagtattc

SEQ ID NO: 5522326 - DNA, 25 bp, Homo sapien
atcagctcttacggaatcactactc

SEQ ID NO: 5522327 - DNA, 25 bp, Homo sapien
taggcatcgtccaccctgaatggca

SEQ ID NO: 5522328 - DNA, 25 bp, Homo sapien
atcaaagttggcaacggattgagga

SEQ ID NO: 5522329 - DNA, 25 bp, Homo sapien
agcggtggaatctttaggcatcgtc

SEQ ID NO: 5522330 - DNA, 25 bp, Homo sapien
aacactgcttggaaatggcagtatt

SEQ ID NO: 5522331 - DNA, 25 bp, Homo sapien
aaaaatattagcggtggaatcttta

SEQ ID NO: 5522332 - DNA, 25 bp, Homo sapien
tgtgctcgtctgaaaaaaacacgta

SEQ ID NO: 5522333 - DNA, 25 bp, Homo sapien
tcacatccacagcacccattcaatc

SEQ ID NO: 5522334 - DNA, 25 bp, Homo sapien
tttgagttgagttgagaattactac

SEQ ID NO: 5522335 - DNA, 25 bp, Homo sapien
ggctctatccagacaaaaagcatct

SEQ ID NO: 5522336 - DNA, 25 bp, Homo sapien
aattactacaagaggaggttaggaa

SEQ ID NO: 5522337 - DNA, 25 bp, Homo sapien
gggggctctgtgacaatcaaacatg

SEQ ID NO: 5522338 - DNA, 25 bp, Homo sapien
taggttgcaagtataacagaaaaac

SEQ ID NO: 5522339 - DNA, 25 bp, Homo sapien
tcactatagacagagtattcggggg

SEQ ID NO: 5522340 - DNA, 25 bp, Homo sapien
tctaaaaaacgcaaaatggtgaggc

SEQ ID NO: 5522341 - DNA, 25 bp, Homo sapien
aggcatgccaggatcaaagatatct

SEQ ID NO: 5522342 - DNA, 25 bp, Homo sapien
agcagaaccgaagcagtgattatgc

SEQ ID NO: 5522343 - DNA, 25 bp, Homo sapien
taaatggcacctaaaatcaaagaat

SEQ ID NO: 5522344 - DNA, 25 bp, Homo sapien
aacatggctgccatgagtaagggag

SEQ ID NO: 5522345 - DNA, 25 bp, Homo sapien
cagacccaccaaagaaaagcggtcg

SEQ ID NO: 5522346 - DNA, 25 bp, Homo sapien
ggtgctgtcactcacgtgtgccctc

SEQ ID NO: 5522347 - DNA, 25 bp, Homo sapien
acccccagtcttcggccggctctgg

SEQ ID NO: 5522348 - DNA, 25 bp, Homo sapien
ttcctgcgtctccaggaagccggga

SEQ ID NO: 5522349 - DNA, 25 bp, Homo sapien
aggatcgtcttagtagctggccaga

SEQ ID NO: 5522350 - DNA, 25 bp, Homo sapien
gcctcctcaccagcctacctgttgc

SEQ ID NO: 5522351 - DNA, 25 bp, Homo sapien
aggtgcgtgcagacccaccaaagaa

SEQ ID NO: 5522352 - DNA, 25 bp, Homo sapien
ctttccccgcctgcccggataggtg

SEQ ID NO: 5522353 - DNA, 25 bp, Homo sapien
gtgtgccctcgaccctcccgttcac

SEQ ID NO: 5522354 - DNA, 25 bp, Homo sapien
ttcagtgcaaggtgctgtcactcac

SEQ ID NO: 5522355 - DNA, 25 bp, Homo sapien
accctcccgttcacccgcagccttc

SEQ ID NO: 5522356 - DNA, 25 bp, Homo sapien
ttttaaattctagtagcaactacct

SEQ ID NO: 5522357 - DNA, 25 bp, Homo sapien
aggtagttgctactagaatttaaaa

SEQ ID NO: 5522358 - DNA, 25 bp, Homo sapien
gaggctcctgcccataatcccacca

SEQ ID NO: 5522359 - DNA, 25 bp, Homo sapien
tgggcacggaggctcctgcccataa

SEQ ID NO: 5522360 - DNA, 25 bp, Homo sapien
ccgtgcaaaaacccatcacagagag

SEQ ID NO: 5522361 - DNA, 25 bp, Homo sapien
ctcaacccctgtagaaccccaagca

SEQ ID NO: 5522362 - DNA, 25 bp, Homo sapien
tcaccacacgtgggttccaactgct

SEQ ID NO: 5522363 - DNA, 25 bp, Homo sapien
aaaaacccatcacagagagaaggac

SEQ ID NO: 5522364 - DNA, 25 bp, Homo sapien
caaaccctgtggtctcacatgaggc

SEQ ID NO: 5522365 - DNA, 25 bp, Homo sapien
cctgtggtctcacatgaggcaggga

SEQ ID NO: 5522366 - DNA, 25 bp, Homo sapien
acacgtgggttccaactgcttctcc

SEQ ID NO: 5522367 - DNA, 25 bp, Homo sapien
agaaggaaagtccccactgtccatc

SEQ ID NO: 5522368 - DNA, 25 bp, Homo sapien
atggagcccctgcaaagccatcatg

SEQ ID NO: 5522369 - DNA, 25 bp, Homo sapien
tgacatcacctcccaaggctctcaa

SEQ ID NO: 5522370 - DNA, 25 bp, Homo sapien
gccatcaagaataagcattaaggta

SEQ ID NO: 5522371 - DNA, 25 bp, Homo sapien
cttaaatagaagtcctagatgatat

SEQ ID NO: 5522372 - DNA, 25 bp, Homo sapien
cctacagcaaatgcactgtgccatt

SEQ ID NO: 5522373 - DNA, 25 bp, Homo sapien
gccaaaccacattcctacagcaaat

SEQ ID NO: 5522374 - DNA, 25 bp, Homo sapien
gtgtgtataaaacaatgccaaacca

SEQ ID NO: 5522375 - DNA, 25 bp, Homo sapien
gcactgtgccatttataaccctgac

SEQ ID NO: 5522376 - DNA, 25 bp, Homo sapien
ccaaggctctcaaggaagatttatt

SEQ ID NO: 5522377 - DNA, 25 bp, Homo sapien
tagatgatattgtttaggaatttaa

SEQ ID NO: 5522378 - DNA, 25 bp, Homo sapien
ctgacagatgccatcaagaataagc

SEQ ID NO: 5522379 - DNA, 25 bp, Homo sapien
ataagcattaaggtataaaaaatac

SEQ ID NO: 5522380 - DNA, 25 bp, Homo sapien
ttctagatgtaagttcctaaagctt

SEQ ID NO: 5522381 - DNA, 25 bp, Homo sapien
aacttgactaatgaagatcagcgtc

SEQ ID NO: 5522382 - DNA, 25 bp, Homo sapien
taattattctagattccaggctttc

SEQ ID NO: 5522383 - DNA, 25 bp, Homo sapien
acttggaattctacatggaaaagcc

SEQ ID NO: 5522384 - DNA, 25 bp, Homo sapien
agcgtcactaataaaagtctgcaac

SEQ ID NO: 5522385 - DNA, 25 bp, Homo sapien
agtatgttaatgtcacttggaattc

SEQ ID NO: 5522386 - DNA, 25 bp, Homo sapien
tttcaatggcaaaagccccaattac

SEQ ID NO: 5522387 - DNA, 25 bp, Homo sapien
aacttagcatgtcaactggaaattt

SEQ ID NO: 5522388 - DNA, 25 bp, Homo sapien
taaaatgtcaaggtttcatgtttac

SEQ ID NO: 5522389 - DNA, 25 bp, Homo sapien
aagtctgcaactgtagtattaggtt

SEQ ID NO: 5522390 - DNA, 25 bp, Homo sapien
atatcaagtacaatggtatatatac

SEQ ID NO: 5522391 - DNA, 25 bp, Homo sapien
taaggtagtgctgctgagaacttca

SEQ ID NO: 5522392 - DNA, 25 bp, Homo sapien
tcatgaagtctaaggtagtgctgct

SEQ ID NO: 5522393 - DNA, 25 bp, Homo sapien
gaatggaaggctctactgatatggc

SEQ ID NO: 5522394 - DNA, 25 bp, Homo sapien
cctggaagacaggttattgggaaaa

SEQ ID NO: 5522395 - DNA, 25 bp, Homo sapien
acaagttgataggcagcactagaga

SEQ ID NO: 5522396 - DNA, 25 bp, Homo sapien
atatgcaagacaacagaatcacgct

SEQ ID NO: 5522397 - DNA, 25 bp, Homo sapien
cagctaactgtaccacctggaagac

SEQ ID NO: 5522398 - DNA, 25 bp, Homo sapien
ggggtggaaaagctacatagcattg

SEQ ID NO: 5522399 - DNA, 25 bp, Homo sapien
ctgagaacttcagatgtggcaaagg

SEQ ID NO: 5522400 - DNA, 25 bp, Homo sapien
gagagaaagaaatagcatgaaatta

SEQ ID NO: 5522401 - DNA, 25 bp, Homo sapien
gaatcacgctgctcagatatggttc

SEQ ID NO: 5522402 - DNA, 25 bp, Homo sapien
ggcagcataaaaatggttctcccct

SEQ ID NO: 5522403 - DNA, 25 bp, Homo sapien
tggtgaaattatggtttagaacaac

SEQ ID NO: 5522404 - DNA, 25 bp, Homo sapien
tctcccctacattgctggtgaaatt

SEQ ID NO: 5522405 - DNA, 25 bp, Homo sapien
aagctcactataagtgggggaaagg

SEQ ID NO: 5522406 - DNA, 25 bp, Homo sapien
gcaatttggcaatataacaagaact

SEQ ID NO: 5522407 - DNA, 25 bp, Homo sapien
ggtggggaattaagagaactatata

SEQ ID NO: 5522408 - DNA, 25 bp, Homo sapien
aattctgttagccacacagggatca

SEQ ID NO: 5522409 - DNA, 25 bp, Homo sapien
tacccaattctcacaagggcagcat

SEQ ID NO: 5522410 - DNA, 25 bp, Homo sapien
aatatgactcctgggcatctgttcc

SEQ ID NO: 5522411 - DNA, 25 bp, Homo sapien
atggaaaaatcgttgttaaaatatg

SEQ ID NO: 5522412 - DNA, 25 bp, Homo sapien
tgttaaaatatggcaaatggttata

SEQ ID NO: 5522413 - DNA, 25 bp, Homo sapien
actgaattgtcgaacctccagggtc

SEQ ID NO: 5522414 - DNA, 25 bp, Homo sapien
gaccctggaggttcgacaattcagt

SEQ ID NO: 5522415 - DNA, 25 bp, Homo sapien
cattcccgggctgcagccaaagttg

SEQ ID NO: 5522416 - DNA, 25 bp, Homo sapien
ttattacaagacaaccagggaagaa

SEQ ID NO: 5522417 - DNA, 25 bp, Homo sapien
tatatgacatatgagagaaccgagg

SEQ ID NO: 5522418 - DNA, 25 bp, Homo sapien
ctagcaattgcttggggcaagtctc

SEQ ID NO: 5522419 - DNA, 25 bp, Homo sapien
cctcagattataaaggccagggggt

SEQ ID NO: 5522420 - DNA, 25 bp, Homo sapien
tcagggtccttgcaagcctcttgtc

SEQ ID NO: 5522421 - DNA, 25 bp, Homo sapien
gggtcggtaaggattcactgactca

SEQ ID NO: 5522422 - DNA, 25 bp, Homo sapien
gtggagctggagtcctcacctccta

SEQ ID NO: 5522423 - DNA, 25 bp, Homo sapien
atgggcactagctgttaaggatctc

SEQ ID NO: 5522424 - DNA, 25 bp, Homo sapien
gaatgtgggctaataaaggaatctg

SEQ ID NO: 5522425 - DNA, 25 bp, Homo sapien
agcgtttgagccatcaccacccagg

SEQ ID NO: 5522426 - DNA, 25 bp, Homo sapien
gtaactgtaaattctgtagggagga

SEQ ID NO: 5522427 - DNA, 25 bp, Homo sapien
gcacacctggctatctgaatcagac

SEQ ID NO: 5522428 - DNA, 25 bp, Homo sapien
ttaacaatccaggactgtggaggac

SEQ ID NO: 5522429 - DNA, 25 bp, Homo sapien
acagaaacaagcctcgaagagatca

SEQ ID NO: 5522430 - DNA, 25 bp, Homo sapien
gatcacaatatggtggagtgcatgc

SEQ ID NO: 5522431 - DNA, 25 bp, Homo sapien
gagtgcatgcatggcacacctggct

SEQ ID NO: 5522432 - DNA, 25 bp, Homo sapien
ggagcgaggcaaccttaagccataa

SEQ ID NO: 5522433 - DNA, 25 bp, Homo sapien
ctgtgtgtgtgatgaagacagtagt

SEQ ID NO: 5522434 - DNA, 25 bp, Homo sapien
tcactgattacagatgaggagcgag

SEQ ID NO: 5522435 - DNA, 25 bp, Homo sapien
cttaaaagctggagaagccctcaaa

SEQ ID NO: 5522436 - DNA, 25 bp, Homo sapien
tggaatggacagagagtaactgtaa

SEQ ID NO: 5522437 - DNA, 25 bp, Homo sapien
ccttttgcgcggaccccattacaat

SEQ ID NO: 5522438 - DNA, 25 bp, Homo sapien
atcgtgttcctgtgtcccctgcatg

SEQ ID NO: 5522439 - DNA, 25 bp, Homo sapien
tccaccccagctccagccctggtct

SEQ ID NO: 5522440 - DNA, 25 bp, Homo sapien
atcctgtttctggctctggaaaaaa

SEQ ID NO: 5522441 - DNA, 25 bp, Homo sapien
ggccctggccatgtcatcgtgttcc

SEQ ID NO: 5522442 - DNA, 25 bp, Homo sapien
ccagggcctagaggtgcttcctggg

SEQ ID NO: 5522443 - DNA, 25 bp, Homo sapien
aagaagttgtggccctggccatgtc

SEQ ID NO: 5522444 - DNA, 25 bp, Homo sapien
gggggaatgcagccagtgtccccct

SEQ ID NO: 5522445 - DNA, 25 bp, Homo sapien
ccctgcatgtaccccaccctccacc

SEQ ID NO: 5522446 - DNA, 25 bp, Homo sapien
agccagtgtccccctcccctcttcc

SEQ ID NO: 5522447 - DNA, 25 bp, Homo sapien
tccccacgacagaagaagttgtggc

SEQ ID NO: 5522448 - DNA, 25 bp, Homo sapien
cctgggcggatgtccggagaggcac

SEQ ID NO: 5522449 - DNA, 25 bp, Homo sapien
gtgcctctccggacatccgcccagg

SEQ ID NO: 5522450 - DNA, 25 bp, Homo sapien
aagtctgaaatggccagacggtcac

SEQ ID NO: 5522451 - DNA, 25 bp, Homo sapien
gcagagagggctttcttacgactgt

SEQ ID NO: 5522452 - DNA, 25 bp, Homo sapien
tggtttcgaggtttggaaagaatga

SEQ ID NO: 5522453 - DNA, 25 bp, Homo sapien
gcaatgacaacagccgcctcatctc

SEQ ID NO: 5522454 - DNA, 25 bp, Homo sapien
aaacttatctgacagggcgaacgag

SEQ ID NO: 5522455 - DNA, 25 bp, Homo sapien
gactgttggcccatccgagaaggca

SEQ ID NO: 5522456 - DNA, 25 bp, Homo sapien
tgcggctgacagtaaagcactgata

SEQ ID NO: 5522457 - DNA, 25 bp, Homo sapien
attctcacaggatcagcaatgacaa

SEQ ID NO: 5522458 - DNA, 25 bp, Homo sapien
ggagccccatgtgaaatgaaaaagc

SEQ ID NO: 5522459 - DNA, 25 bp, Homo sapien
aatgccagacacaaaggcgtactgc

SEQ ID NO: 5522460 - DNA, 25 bp, Homo sapien
actgctgaagaatggaaaccctttt

SEQ ID NO: 5522461 - DNA, 25 bp, Homo sapien
tccacgactgcccatcattgctgtt

SEQ ID NO: 5522462 - DNA, 25 bp, Homo sapien
aagtcctccaggatctgatcttgcc

SEQ ID NO: 5522463 - DNA, 25 bp, Homo sapien
aatggcacaagttggggtttatgtt

SEQ ID NO: 5522464 - DNA, 25 bp, Homo sapien
tcagatgaacccgtccccttagagg

SEQ ID NO: 5522465 - DNA, 25 bp, Homo sapien
gacggggtgatgtgatcacatctgc

SEQ ID NO: 5522466 - DNA, 25 bp, Homo sapien
tggtgtcctccatgctggagtcagc

SEQ ID NO: 5522467 - DNA, 25 bp, Homo sapien
acagctgtttatgaagccaagagag

SEQ ID NO: 5522468 - DNA, 25 bp, Homo sapien
ccccaactccacgactgcccatcat

SEQ ID NO: 5522469 - DNA, 25 bp, Homo sapien
ttataaagaatggcacaagttgggg

SEQ ID NO: 5522470 - DNA, 25 bp, Homo sapien
ccgtccccttagaggacacaatccc

SEQ ID NO: 5522471 - DNA, 25 bp, Homo sapien
atgtttactcagatgaacccgtccc

SEQ ID NO: 5522472 - DNA, 25 bp, Homo sapien
acggagatgtcaacagcaacaaagt

SEQ ID NO: 5522473 - DNA, 25 bp, Homo sapien
aacagcaacaaagtggtcatgagtg

SEQ ID NO: 5522474 - DNA, 25 bp, Homo sapien
gaggagaactgcctctcggcctcag

SEQ ID NO: 5522475 - DNA, 25 bp, Homo sapien
tgcctctcggcctcagccgcgcaga

SEQ ID NO: 5522476 - DNA, 25 bp, Homo sapien
gctcagaaaccgcccctgacctggt

SEQ ID NO: 5522477 - DNA, 25 bp, Homo sapien
acctggtcctcaatgcggagatggt

SEQ ID NO: 5522478 - DNA, 25 bp, Homo sapien
gattcgccagcaacgccttccagga

SEQ ID NO: 5522479 - DNA, 25 bp, Homo sapien
ctgacctggtcctcaatgcggagat

SEQ ID NO: 5522480 - DNA, 25 bp, Homo sapien
gatggtgcagcagaccacctacctg

SEQ ID NO: 5522481 - DNA, 25 bp, Homo sapien
ttgcctgctcagaaaccgcccctga

SEQ ID NO: 5522482 - DNA, 25 bp, Homo sapien
agcaacgccttccaggagacctggt

SEQ ID NO: 5522483 - DNA, 25 bp, Homo sapien
atgattgccaatgactagcagcttc

SEQ ID NO: 5522484 - DNA, 25 bp, Homo sapien
ttatagttcacaagaaatgcaacat

SEQ ID NO: 5522485 - DNA, 25 bp, Homo sapien
ttttaaaggcatatgcagcaaaatg

SEQ ID NO: 5522486 - DNA, 25 bp, Homo sapien
atgcttgcaaagaatatgaatgaca

SEQ ID NO: 5522487 - DNA, 25 bp, Homo sapien
atggactccaatagaagtagatatc

SEQ ID NO: 5522488 - DNA, 25 bp, Homo sapien
tgctaaaatgctaaagtaatgcttg

SEQ ID NO: 5522489 - DNA, 25 bp, Homo sapien
acctaacaacgctgctgtctgctcc

SEQ ID NO: 5522490 - DNA, 25 bp, Homo sapien
cacagctatcggcccacacagtaag

SEQ ID NO: 5522491 - DNA, 25 bp, Homo sapien
taagtggctttagttagagtcccat

SEQ ID NO: 5522492 - DNA, 25 bp, Homo sapien
agaacccttcagtacctaacaacgc

SEQ ID NO: 5522493 - DNA, 25 bp, Homo sapien
aatgacaaatgttatccagcagctt

SEQ ID NO: 5522494 - DNA, 25 bp, Homo sapien
gggaacagacacctagctcacacct

SEQ ID NO: 5522495 - DNA, 25 bp, Homo sapien
ggacactggtgaccacaaagaacac

SEQ ID NO: 5522496 - DNA, 25 bp, Homo sapien
taagagctttactgactgaagacca

SEQ ID NO: 5522497 - DNA, 25 bp, Homo sapien
gcgcggtggctgataattatttgtg

SEQ ID NO: 5522498 - DNA, 25 bp, Homo sapien
cagaaagcagataacaaaggcatgt

SEQ ID NO: 5522499 - DNA, 25 bp, Homo sapien
gtatttctgatgtaggaacagtatt

SEQ ID NO: 5522500 - DNA, 25 bp, Homo sapien
tcaaaagcctaggtcctgaagggaa

SEQ ID NO: 5522501 - DNA, 25 bp, Homo sapien
ctcttcccagacgcccctcatgacc

SEQ ID NO: 5522502 - DNA, 25 bp, Homo sapien
ggagtgatgaaaatctcagggaagg

SEQ ID NO: 5522503 - DNA, 25 bp, Homo sapien
ggttcaagcatcccagtgacctggc

SEQ ID NO: 5522504 - DNA, 25 bp, Homo sapien
gcatcatggcaactcagctaatcct

SEQ ID NO: 5522505 - DNA, 25 bp, Homo sapien
ataattgaacagtacctgagaactt

SEQ ID NO: 5522506 - DNA, 25 bp, Homo sapien
ttgagtgtatcaccaatgaagtctc

SEQ ID NO: 5522507 - DNA, 25 bp, Homo sapien
tgagacagtgaccaacattattagc

SEQ ID NO: 5522508 - DNA, 25 bp, Homo sapien
tcacttctaaagggttcacctggtc

SEQ ID NO: 5522509 - DNA, 25 bp, Homo sapien
acattcatcacagccaaaggtattt

SEQ ID NO: 5522510 - DNA, 25 bp, Homo sapien
acccagtaaaaattgagtgtatcac

SEQ ID NO: 5522511 - DNA, 25 bp, Homo sapien
acgctggttacccaaaagctttgtg

SEQ ID NO: 5522512 - DNA, 25 bp, Homo sapien
ggtattctgctgggatctacattca

SEQ ID NO: 5522513 - DNA, 25 bp, Homo sapien
atacatttaagaacgctggttaccc

SEQ ID NO: 5522514 - DNA, 25 bp, Homo sapien
agggttcacctggtcaaaaaccata

SEQ ID NO: 5522515 - DNA, 25 bp, Homo sapien
taagcatctacaaatactcagtcaa

SEQ ID NO: 5522516 - DNA, 25 bp, Homo sapien
accacaagataacacgttgcgtgat

SEQ ID NO: 5522517 - DNA, 25 bp, Homo sapien
atcaggtaggttacagtgtcgttac

SEQ ID NO: 5522518 - DNA, 25 bp, Homo sapien
gaagctcttgggtgagtaaggttca

SEQ ID NO: 5522519 - DNA, 25 bp, Homo sapien
cattggtcggtgaaaatccacccac

SEQ ID NO: 5522520 - DNA, 25 bp, Homo sapien
gatgtggtacagaatactggactcc

SEQ ID NO: 5522521 - DNA, 25 bp, Homo sapien
aactccactgagcaaaagaaagaac

SEQ ID NO: 5522522 - DNA, 25 bp, Homo sapien
tcgggcacgtccagacaatccaaga

SEQ ID NO: 5522523 - DNA, 25 bp, Homo sapien
ctggactccagtgaagtggaaagaa

SEQ ID NO: 5522524 - DNA, 25 bp, Homo sapien
acggattaaattacagaggtgaatg

SEQ ID NO: 5522525 - DNA, 25 bp, Homo sapien
ctccactatggagcacacacggcaa

SEQ ID NO: 5522526 - DNA, 25 bp, Homo sapien
ccgtcagaagaggatatcattggtc

SEQ ID NO: 5522527 - DNA, 25 bp, Homo sapien
gctaggcctcggcgaggcctcggag

SEQ ID NO: 5522528 - DNA, 25 bp, Homo sapien
cgccgcctcggacacaaagccggcg

SEQ ID NO: 5522529 - DNA, 25 bp, Homo sapien
gacgcttcttctcgccggatcctcc

SEQ ID NO: 5522530 - DNA, 25 bp, Homo sapien
ggcctcggagcacttcctcaccacc

SEQ ID NO: 5522531 - DNA, 25 bp, Homo sapien
gccgaggctccctgacgcttcttct

SEQ ID NO: 5522532 - DNA, 25 bp, Homo sapien
cgtttccgtcgccttgaggcccgga

SEQ ID NO: 5522533 - DNA, 25 bp, Homo sapien
gccccctgccgctcgggggctctca

SEQ ID NO: 5522534 - DNA, 25 bp, Homo sapien
tttttgtgttggccccctgccgctc

SEQ ID NO: 5522535 - DNA, 25 bp, Homo sapien
cgccggatcctccgcgcttcgctcg

SEQ ID NO: 5522536 - DNA, 25 bp, Homo sapien
gcttcgctcgcctttcgtttccgtc

SEQ ID NO: 5522537 - DNA, 25 bp, Homo sapien
cggcctcacgcctcctcctggcttc

SEQ ID NO: 5522538 - DNA, 25 bp, Homo sapien
gcccccgatcggcccttcgtgtgtc

SEQ ID NO: 5522539 - DNA, 25 bp, Homo sapien
gctgtgccatctgtggccagacctt

SEQ ID NO: 5522540 - DNA, 25 bp, Homo sapien
ccatctgtggccagaccttcgacga

SEQ ID NO: 5522541 - DNA, 25 bp, Homo sapien
cctgtcccgactgcgaccgcagctt

SEQ ID NO: 5522542 - DNA, 25 bp, Homo sapien
agccagaagtccaacctcatcaccc

SEQ ID NO: 5522543 - DNA, 25 bp, Homo sapien
acctcatcacccaccgcaagagcca

SEQ ID NO: 5522544 - DNA, 25 bp, Homo sapien
cccgactgcgaccgcagcttcagcc

SEQ ID NO: 5522545 - DNA, 25 bp, Homo sapien
caaggccttccgccacaaaccctac

SEQ ID NO: 5522546 - DNA, 25 bp, Homo sapien
agccagaagtccaacctggtgtcgc

SEQ ID NO: 5522547 - DNA, 25 bp, Homo sapien
agactcctggcccaccagaagaagc

SEQ ID NO: 5522548 - DNA, 25 bp, Homo sapien
cagcttcagccagaagtccaacctc

SEQ ID NO: 5522549 - DNA, 25 bp, Homo sapien
ttgcccggtgcaagagcctgggtct

SEQ ID NO: 5522550 - DNA, 25 bp, Homo sapien
agacccaggctcttgcaccgggcaa

SEQ ID NO: 5522551 - DNA, 25 bp, Homo sapien
taaagctgggcacatgtccatttat

SEQ ID NO: 5522552 - DNA, 25 bp, Homo sapien
tgtaatgtaaacaccgacacgtgaa

SEQ ID NO: 5522553 - DNA, 25 bp, Homo sapien
aagcagagctgcctgatactagcca

SEQ ID NO: 5522554 - DNA, 25 bp, Homo sapien
tgtaggagcataagaatgcactgat

SEQ ID NO: 5522555 - DNA, 25 bp, Homo sapien
ggaagacaagtgaattggacaatac

SEQ ID NO: 5522556 - DNA, 25 bp, Homo sapien
acacgtgaaataaagtacaaggatc

SEQ ID NO: 5522557 - DNA, 25 bp, Homo sapien
caacgatgccatacggaagtctgat

SEQ ID NO: 5522558 - DNA, 25 bp, Homo sapien
gaaagcctctgaaatccaacgatgc

SEQ ID NO: 5522559 - DNA, 25 bp, Homo sapien
gtggaggccaagattaaattgtacc

SEQ ID NO: 5522560 - DNA, 25 bp, Homo sapien
actggcagaaggcaacattcagatt

SEQ ID NO: 5522561 - DNA, 25 bp, Homo sapien
tcacctggttatacagactggcaga

SEQ ID NO: 5522562 - DNA, 25 bp, Homo sapien
ctcagaccagccatttgcctcttcc

SEQ ID NO: 5522563 - DNA, 25 bp, Homo sapien
gcttctacggagctcaggtgtcatt

SEQ ID NO: 5522564 - DNA, 25 bp, Homo sapien
gctccgagtgtccctggtgactgga

SEQ ID NO: 5522565 - DNA, 25 bp, Homo sapien
tcatttatggggttgccagagcaag

SEQ ID NO: 5522566 - DNA, 25 bp, Homo sapien
aggagggtccacctgaatctttgca

SEQ ID NO: 5522567 - DNA, 25 bp, Homo sapien
tcttccaaaaagctggggctaagca

SEQ ID NO: 5522568 - DNA, 25 bp, Homo sapien
agcaagctgttaaagggcgaatttg

SEQ ID NO: 5522569 - DNA, 25 bp, Homo sapien
ggcgaatttggtaagactgagctca

SEQ ID NO: 5522570 - DNA, 25 bp, Homo sapien
cacagagcttctggctgcatctcag

SEQ ID NO: 5522571 - DNA, 25 bp, Homo sapien
agaagagagcagacatcacactgct

SEQ ID NO: 5522572 - DNA, 25 bp, Homo sapien
atcaaacttacggtgcctggcagac

SEQ ID NO: 5522573 - DNA, 25 bp, Homo sapien
tagattttaacaccaccaatgcaat

SEQ ID NO: 5522574 - DNA, 25 bp, Homo sapien
gcgactcctggaaaacttcaagctt

SEQ ID NO: 5522575 - DNA, 25 bp, Homo sapien
aacacttttaaaatgcgactcctgg

SEQ ID NO: 5522576 - DNA, 25 bp, Homo sapien
tctttgaaagccatgagctacagct

SEQ ID NO: 5522577 - DNA, 25 bp, Homo sapien
caatctacctagcaagaagactatt

SEQ ID NO: 5522578 - DNA, 25 bp, Homo sapien
aagccatgagctacagctaagcttc

SEQ ID NO: 5522579 - DNA, 25 bp, Homo sapien
gtagtgttctaccttcatagtgcct

SEQ ID NO: 5522580 - DNA, 25 bp, Homo sapien
ctggaagaattgtctaagtatttca

SEQ ID NO: 5522581 - DNA, 25 bp, Homo sapien
ttcagtgttaaatcaggcttctgac

SEQ ID NO: 5522582 - DNA, 25 bp, Homo sapien
aattagtttgaagagtacacatttc

SEQ ID NO: 5522583 - DNA, 25 bp, Homo sapien
taatgtagccaagatgtgcagagta

SEQ ID NO: 5522584 - DNA, 25 bp, Homo sapien
tagtttttccgttgtagatcccgac

SEQ ID NO: 5522585 - DNA, 25 bp, Homo sapien
gtcgggatctacaacggaaaaacta

SEQ ID NO: 5522586 - DNA, 25 bp, Homo sapien
gaggatgcatccgagtttggaaacc

SEQ ID NO: 5522587 - DNA, 25 bp, Homo sapien
gtggagtaattgtaactagagggag

SEQ ID NO: 5522588 - DNA, 25 bp, Homo sapien
ggggatcacattaaacggaaaatgc

SEQ ID NO: 5522589 - DNA, 25 bp, Homo sapien
gcgccttggtggctttggttgctct

SEQ ID NO: 5522590 - DNA, 25 bp, Homo sapien
accgctcgcctgaatcgtgggcttt

SEQ ID NO: 5522591 - DNA, 25 bp, Homo sapien
gccagtcgtgcagtgagacttctgt

SEQ ID NO: 5522592 - DNA, 25 bp, Homo sapien
tcattttctcgaaggaagcgccaga

SEQ ID NO: 5522593 - DNA, 25 bp, Homo sapien
ttaaaatgccacagtccacggcccg

SEQ ID NO: 5522594 - DNA, 25 bp, Homo sapien
acggaaaatgccaacgacttctacc

SEQ ID NO: 5522595 - DNA, 25 bp, Homo sapien
tctgtcaacatggaaaacctctgct

SEQ ID NO: 5522596 - DNA, 25 bp, Homo sapien
aaccccacttaagggatggagcctg

SEQ ID NO: 5522597 - DNA, 25 bp, Homo sapien
aagggcactggtatcctgaaaagcc

SEQ ID NO: 5522598 - DNA, 25 bp, Homo sapien
ttgatgatgttcgtggcaatctgcc

SEQ ID NO: 5522599 - DNA, 25 bp, Homo sapien
tggacccagtgattgaacaagcatc

SEQ ID NO: 5522600 - DNA, 25 bp, Homo sapien
aacaagcatccaaagagagtggttt

SEQ ID NO: 5522601 - DNA, 25 bp, Homo sapien
cttcccaggagacgtgtcaacattt

SEQ ID NO: 5522602 - DNA, 25 bp, Homo sapien
gtgaaggtgctttacgtggatgata

SEQ ID NO: 5522603 - DNA, 25 bp, Homo sapien
agagtggtttggacattgatgatgt

SEQ ID NO: 5522604 - DNA, 25 bp, Homo sapien
tcagtgtccagctctccatcgcctc

SEQ ID NO: 5522605 - DNA, 25 bp, Homo sapien
tgcccataagtgacccagcctcatc

SEQ ID NO: 5522606 - DNA, 25 bp, Homo sapien
atgaaaatggatgtgagttggataa

SEQ ID NO: 5522607 - DNA, 25 bp, Homo sapien
aaaacagctttaacccagaggccca

SEQ ID NO: 5522608 - DNA, 25 bp, Homo sapien
ctaacactgcaaaaaccattcaagc

SEQ ID NO: 5522609 - DNA, 25 bp, Homo sapien
cagtaggatcagagtacctgtgact

SEQ ID NO: 5522610 - DNA, 25 bp, Homo sapien
aatggtggcatgatggtacacctgg

SEQ ID NO: 5522611 - DNA, 25 bp, Homo sapien
taaaaaagcatgcaagaggcagtaa

SEQ ID NO: 5522612 - DNA, 25 bp, Homo sapien
tgtagcaccaataatggtggcatga

SEQ ID NO: 5522613 - DNA, 25 bp, Homo sapien
ctaaaccaggggtctggtgaacttg

SEQ ID NO: 5522614 - DNA, 25 bp, Homo sapien
gaggcagtaaaataagcccaaataa

SEQ ID NO: 5522615 - DNA, 25 bp, Homo sapien
caattacgaatataggaaacagtcc

SEQ ID NO: 5522616 - DNA, 25 bp, Homo sapien
ataggaaacagtccacagtaggatc

SEQ ID NO: 5522617 - DNA, 25 bp, Homo sapien
gatatagaattttaggaccacatgc

SEQ ID NO: 5522618 - DNA, 25 bp, Homo sapien
agacaacctctaaaccaggggtctg

SEQ ID NO: 5522619 - DNA, 25 bp, Homo sapien
tgcaaacagtccaaccaaaaacgaa

SEQ ID NO: 5522620 - DNA, 25 bp, Homo sapien
ttgcaaagtagattgatgtccattc

SEQ ID NO: 5522621 - DNA, 25 bp, Homo sapien
ctgttatgaagcgctcagctaccgc

SEQ ID NO: 5522622 - DNA, 25 bp, Homo sapien
cccaacatttggctatggagggcac

SEQ ID NO: 5522623 - DNA, 25 bp, Homo sapien
gctcagctaccgcgggctttccttt

SEQ ID NO: 5522624 - DNA, 25 bp, Homo sapien
cacacagtaagaacataagaacatc

SEQ ID NO: 5522625 - DNA, 25 bp, Homo sapien
cagtgcaatgttgaaatagcctcca

SEQ ID NO: 5522626 - DNA, 25 bp, Homo sapien
aaacccaattagaaagaatacaaga

SEQ ID NO: 5522627 - DNA, 25 bp, Homo sapien
tacaagagcaatattggagacatcc

SEQ ID NO: 5522628 - DNA, 25 bp, Homo sapien
ggagacatccccaaataccacgtac

SEQ ID NO: 5522629 - DNA, 25 bp, Homo sapien
ttcacatgtgaaccaaatggcgtta

SEQ ID NO: 5522630 - DNA, 25 bp, Homo sapien
ttccccacctgagactggaagctat

SEQ ID NO: 5522631 - DNA, 25 bp, Homo sapien
taagctggctgctagccaaggctca

SEQ ID NO: 5522632 - DNA, 25 bp, Homo sapien
tcctgacttcagactgtgggcagca

SEQ ID NO: 5522633 - DNA, 25 bp, Homo sapien
ccaagaccttgtagcaggctcaggg

SEQ ID NO: 5522634 - DNA, 25 bp, Homo sapien
ttccagtgctcttaaaaacatgccc

SEQ ID NO: 5522635 - DNA, 25 bp, Homo sapien
tccccatctgcaaattggaggttac

SEQ ID NO: 5522636 - DNA, 25 bp, Homo sapien
gggtgcaagccaagaccttgtagca

SEQ ID NO: 5522637 - DNA, 25 bp, Homo sapien
cacattgtgatgttaggaaaccaaa

SEQ ID NO: 5522638 - DNA, 25 bp, Homo sapien
aaacatgcccaaagcagggacattc

SEQ ID NO: 5522639 - DNA, 25 bp, Homo sapien
gaaatctgggatcccaagagaagcc

SEQ ID NO: 5522640 - DNA, 25 bp, Homo sapien
tttctgaaggaccctgcatggggta

SEQ ID NO: 5522641 - DNA, 25 bp, Homo sapien
actatcaaatgtgggaattaggttc

SEQ ID NO: 5522642 - DNA, 25 bp, Homo sapien
gaatacatggagcataacgccattc

SEQ ID NO: 5522643 - DNA, 25 bp, Homo sapien
tgaaaagttgcagaatacatggagc

SEQ ID NO: 5522644 - DNA, 25 bp, Homo sapien
catggcaaaatgtaacaactatcaa

SEQ ID NO: 5522645 - DNA, 25 bp, Homo sapien
aaacaatatttaaacgtgcaggagt

SEQ ID NO: 5522646 - DNA, 25 bp, Homo sapien
aagtataaacacaagtaagggaatg

SEQ ID NO: 5522647 - DNA, 25 bp, Homo sapien
agtaagggaatgatatccacaaact

SEQ ID NO: 5522648 - DNA, 25 bp, Homo sapien
acttagacctttaaacaaacatggc

SEQ ID NO: 5522649 - DNA, 25 bp, Homo sapien
tgggaattaggttcatgagtgtgct

SEQ ID NO: 5522650 - DNA, 25 bp, Homo sapien
aatgtatgatgaaaagttgcagaat

SEQ ID NO: 5522651 - DNA, 25 bp, Homo sapien
taaacgtgcaggagtaaatagaata

SEQ ID NO: 5522652 - DNA, 25 bp, Homo sapien
gggaagttggacaaatgccttacaa

SEQ ID NO: 5522653 - DNA, 25 bp, Homo sapien
aaggatcgaaaacgccacaaaaaca

SEQ ID NO: 5522654 - DNA, 25 bp, Homo sapien
ctctctagtcaaccagcctgcctgc

SEQ ID NO: 5522655 - DNA, 25 bp, Homo sapien
aacgcaaatgaaaggctcatgcagc

SEQ ID NO: 5522656 - DNA, 25 bp, Homo sapien
ccttgaggctaatgaaaaaggggaa

SEQ ID NO: 5522657 - DNA, 25 bp, Homo sapien
actccatggtctaaagctgagctta

SEQ ID NO: 5522658 - DNA, 25 bp, Homo sapien
gagcttagagccatcataaagactt

SEQ ID NO: 5522659 - DNA, 25 bp, Homo sapien
tcgatgctttgagtacagtaaccct

SEQ ID NO: 5522660 - DNA, 25 bp, Homo sapien
tgcagaggcatctaaaggattatac

SEQ ID NO: 5522661 - DNA, 25 bp, Homo sapien
ttttaaatcggtatgcagaggcatc

SEQ ID NO: 5522662 - DNA, 25 bp, Homo sapien
catgcagcacatgaacctggattgc

SEQ ID NO: 5522663 - DNA, 25 bp, Homo sapien
actccaacatatttgaggtctcgac

SEQ ID NO: 5522664 - DNA, 25 bp, Homo sapien
gtcgagacctcaaatatgttggagt

SEQ ID NO: 5522665 - DNA, 25 bp, Homo sapien
agccacagatggccagaaactttgg

SEQ ID NO: 5522666 - DNA, 25 bp, Homo sapien
ttgtttaatggtggcacagcctgcg

SEQ ID NO: 5522667 - DNA, 25 bp, Homo sapien
aggacattcagaaccctccagccac

SEQ ID NO: 5522668 - DNA, 25 bp, Homo sapien
ctccagccacagatggccagaaact

SEQ ID NO: 5522669 - DNA, 25 bp, Homo sapien
cattcagaaccctccagccacagat

SEQ ID NO: 5522670 - DNA, 25 bp, Homo sapien
ccaggaccttcccaaaccctcagga

SEQ ID NO: 5522671 - DNA, 25 bp, Homo sapien
ccagccacagatggccagaaacttt

SEQ ID NO: 5522672 - DNA, 25 bp, Homo sapien
gcccagacaaagctcaccagctcca

SEQ ID NO: 5522673 - DNA, 25 bp, Homo sapien
cacagccgctcttgtttaatggtgg

SEQ ID NO: 5522674 - DNA, 25 bp, Homo sapien
gctcttgtttaatggtggcacagcc

SEQ ID NO: 5522675 - DNA, 25 bp, Homo sapien
agccgctcttgtttaatggtggcac

SEQ ID NO: 5522676 - DNA, 25 bp, Homo sapien
ccccagtgcaagcccacaagctttt

SEQ ID NO: 5522677 - DNA, 25 bp, Homo sapien
gcttaaatccaggaagcaggcttta

SEQ ID NO: 5522678 - DNA, 25 bp, Homo sapien
ggctgaactggctctttgaacacta

SEQ ID NO: 5522679 - DNA, 25 bp, Homo sapien
atattgggacagtacatttcagatt

SEQ ID NO: 5522680 - DNA, 25 bp, Homo sapien
gaatggcattcaaaagggacctcaa

SEQ ID NO: 5522681 - DNA, 25 bp, Homo sapien
aaatgcttgagaggtctagtgaatg

SEQ ID NO: 5522682 - DNA, 25 bp, Homo sapien
aaaagacaaaaatgcagtttaactc

SEQ ID NO: 5522683 - DNA, 25 bp, Homo sapien
ttagctggttattggaaaagattcc

SEQ ID NO: 5522684 - DNA, 25 bp, Homo sapien
tggatgtagcaatgaaacaaaatgc

SEQ ID NO: 5522685 - DNA, 25 bp, Homo sapien
caaaggcacaacaattgaaacacag

SEQ ID NO: 5522686 - DNA, 25 bp, Homo sapien
tcccgcattgtggacttgtgaggcg

SEQ ID NO: 5522687 - DNA, 25 bp, Homo sapien
tttttgggattcagtggttattctc

SEQ ID NO: 5522688 - DNA, 25 bp, Homo sapien
ccctgcccagtcagtgaccctactg

SEQ ID NO: 5522689 - DNA, 25 bp, Homo sapien
caagcgcagtgactttttgggattc

SEQ ID NO: 5522690 - DNA, 25 bp, Homo sapien
gcctgcatgaccgctgcttcggaga

SEQ ID NO: 5522691 - DNA, 25 bp, Homo sapien
tacttggatcagatcaagcgcagtg

SEQ ID NO: 5522692 - DNA, 25 bp, Homo sapien
gctgcagccaccgtcctgacgttca

SEQ ID NO: 5522693 - DNA, 25 bp, Homo sapien
gccctggttccctgctgcagccacc

SEQ ID NO: 5522694 - DNA, 25 bp, Homo sapien
cacaaaagcctgcatgaccgctgct

SEQ ID NO: 5522695 - DNA, 25 bp, Homo sapien
gaccctactggacagatccaaggcc

SEQ ID NO: 5522696 - DNA, 25 bp, Homo sapien
gcacattgagtccccattgagtccc

SEQ ID NO: 5522697 - DNA, 25 bp, Homo sapien
gtcctgacgttcatcggagcaggcc

SEQ ID NO: 5522698 - DNA, 25 bp, Homo sapien
gtcaagacctatgcagggactctgc

SEQ ID NO: 5522699 - DNA, 25 bp, Homo sapien
ctccctgcgcatgtatggggttggg

SEQ ID NO: 5522700 - DNA, 25 bp, Homo sapien
agaggcagctagtcaagacctatgc

SEQ ID NO: 5522701 - DNA, 25 bp, Homo sapien
ggcccagattcccacagggatctgc

SEQ ID NO: 5522702 - DNA, 25 bp, Homo sapien
ggacacagagcccacctacagatac

SEQ ID NO: 5522703 - DNA, 25 bp, Homo sapien
cagggtctgagctccgagttataca

SEQ ID NO: 5522704 - DNA, 25 bp, Homo sapien
gacctatgcagggactctgccaggg

SEQ ID NO: 5522705 - DNA, 25 bp, Homo sapien
cagagcccacctacagatacatcct

SEQ ID NO: 5522706 - DNA, 25 bp, Homo sapien
gctccgagttatacagacctgggtc

SEQ ID NO: 5522707 - DNA, 25 bp, Homo sapien
gggtgggagactatctaccagctcc

SEQ ID NO: 5522708 - DNA, 25 bp, Homo sapien
taggagctccctgcgcatgtatggg

SEQ ID NO: 5522709 - DNA, 25 bp, Homo sapien
ccctggagagaacctgaactcccag

SEQ ID NO: 5522710 - DNA, 25 bp, Homo sapien
atccacaggacccaagaagtaaaac

SEQ ID NO: 5522711 - DNA, 25 bp, Homo sapien
gacccaaagcatcagcagggcacaa

SEQ ID NO: 5522712 - DNA, 25 bp, Homo sapien
tgtggaaacacaacgccccattgtc

SEQ ID NO: 5522713 - DNA, 25 bp, Homo sapien
ggcgagataaacacacacctggagc

SEQ ID NO: 5522714 - DNA, 25 bp, Homo sapien
gtgtgcgacaccaccccagaaacaa

SEQ ID NO: 5522715 - DNA, 25 bp, Homo sapien
tgggcaagaacttggaaagcctcat

SEQ ID NO: 5522716 - DNA, 25 bp, Homo sapien
ggaggctgccccagatactgggcaa

SEQ ID NO: 5522717 - DNA, 25 bp, Homo sapien
atggcagaataaaagatgctgggat

SEQ ID NO: 5522718 - DNA, 25 bp, Homo sapien
tgtcatagcacaaggtgaggaaaat

SEQ ID NO: 5522719 - DNA, 25 bp, Homo sapien
ccttaaagccacacttgggaggagg

SEQ ID NO: 5522720 - DNA, 25 bp, Homo sapien
atccaagtacaaatgttaaaagcag

SEQ ID NO: 5522721 - DNA, 25 bp, Homo sapien
gagagctaacatgtaaacctgaata

SEQ ID NO: 5522722 - DNA, 25 bp, Homo sapien
taaaagcagagtaacttaagcaatt

SEQ ID NO: 5522723 - DNA, 25 bp, Homo sapien
agaatacactttgaactgtgaggta

SEQ ID NO: 5522724 - DNA, 25 bp, Homo sapien
tactttgtgcctgggctagcagcat

SEQ ID NO: 5522725 - DNA, 25 bp, Homo sapien
atacaaaggtatacagacactgtag

SEQ ID NO: 5522726 - DNA, 25 bp, Homo sapien
aatgttactgatctatagaatacac

SEQ ID NO: 5522727 - DNA, 25 bp, Homo sapien
agacataagcattttatccaagtac

SEQ ID NO: 5522728 - DNA, 25 bp, Homo sapien
ttgctgcatagtaaattgcaattac

SEQ ID NO: 5522729 - DNA, 25 bp, Homo sapien
tttaatactttgtgcctgggctagc

SEQ ID NO: 5522730 - DNA, 25 bp, Homo sapien
taatggcacagcagttttaatacaa

SEQ ID NO: 5522731 - DNA, 25 bp, Homo sapien
cttcgagtgaaactgcttcggaact

SEQ ID NO: 5522732 - DNA, 25 bp, Homo sapien
cttcggaactagaacagataaggag

SEQ ID NO: 5522733 - DNA, 25 bp, Homo sapien
gaaattacaaagaaacgcgtcaatc

SEQ ID NO: 5522734 - DNA, 25 bp, Homo sapien
cacttagtgacacatggagagagaa

SEQ ID NO: 5522735 - DNA, 25 bp, Homo sapien
tcaaggtatacaactgaacattgct

SEQ ID NO: 5522736 - DNA, 25 bp, Homo sapien
agctgcaaccaggactgcacaactt

SEQ ID NO: 5522737 - DNA, 25 bp, Homo sapien
gcgtcaatctacacgaaacgaaggc

SEQ ID NO: 5522738 - DNA, 25 bp, Homo sapien
aggactgcacaacttcgagtgaaac

SEQ ID NO: 5522739 - DNA, 25 bp, Homo sapien
ttctctttgctatagaaggcacaaa

SEQ ID NO: 5522740 - DNA, 25 bp, Homo sapien
agagaaaaaaacctgcagcagtaaa

SEQ ID NO: 5522741 - DNA, 25 bp, Homo sapien
tctaactgcagattcaaggtataca

SEQ ID NO: 5522742 - DNA, 25 bp, Homo sapien
agaggcaaggattctaactacatac

SEQ ID NO: 5522743 - DNA, 25 bp, Homo sapien
ggccaccaacactgcaaggtttgcc

SEQ ID NO: 5522744 - DNA, 25 bp, Homo sapien
ccttgatctggtaagtgacaccgtc

SEQ ID NO: 5522745 - DNA, 25 bp, Homo sapien
tacgaataagcacacacagaatcct

SEQ ID NO: 5522746 - DNA, 25 bp, Homo sapien
tcagggtttgtgtactcaaagatat

SEQ ID NO: 5522747 - DNA, 25 bp, Homo sapien
aactcttcagaggatgctaatacat

SEQ ID NO: 5522748 - DNA, 25 bp, Homo sapien
tcagacaatagaaggcaactggaaa

SEQ ID NO: 5522749 - DNA, 25 bp, Homo sapien
taagggcctagtatgtgccagatat

SEQ ID NO: 5522750 - DNA, 25 bp, Homo sapien
aagtgacaccgtcttcagggtttgt

SEQ ID NO: 5522751 - DNA, 25 bp, Homo sapien
aagacgtgtgacgtaatgctggtca

SEQ ID NO: 5522752 - DNA, 25 bp, Homo sapien
aataaaacggtgaccaagacgtgtg

SEQ ID NO: 5522753 - DNA, 25 bp, Homo sapien
tggtacaaaggtatctcctactgcc

SEQ ID NO: 5522754 - DNA, 25 bp, Homo sapien
ccatgtgcccctgtgataaagtgac

SEQ ID NO: 5522755 - DNA, 25 bp, Homo sapien
attggcaaactcagggccaagatct

SEQ ID NO: 5522756 - DNA, 25 bp, Homo sapien
tcaggctgataaatctggttccttc

SEQ ID NO: 5522757 - DNA, 25 bp, Homo sapien
cacaaaggaattagtggtagctgga

SEQ ID NO: 5522758 - DNA, 25 bp, Homo sapien
tggagatgaggttcgaataaagtca

SEQ ID NO: 5522759 - DNA, 25 bp, Homo sapien
ccgtggctggactctgcccacaaag

SEQ ID NO: 5522760 - DNA, 25 bp, Homo sapien
gataaagtgacacacgagtcaaccc

SEQ ID NO: 5522761 - DNA, 25 bp, Homo sapien
cacggcatctttaattggcaaactc

SEQ ID NO: 5522762 - DNA, 25 bp, Homo sapien
ggactgagatgtacactggaaatta

SEQ ID NO: 5522763 - DNA, 25 bp, Homo sapien
ttcattacttgacacccgaacagtg

SEQ ID NO: 5522764 - DNA, 25 bp, Homo sapien
agccgtatcagtgcgaaccagctga

SEQ ID NO: 5522765 - DNA, 25 bp, Homo sapien
taaacaggcaatttcagagtgcttc

SEQ ID NO: 5522766 - DNA, 25 bp, Homo sapien
gcttctcaaatgcagcgggaagtcc

SEQ ID NO: 5522767 - DNA, 25 bp, Homo sapien
cagatggcgctgcaaagcttctcaa

SEQ ID NO: 5522768 - DNA, 25 bp, Homo sapien
tgggactctcagtaccacgcccacc

SEQ ID NO: 5522769 - DNA, 25 bp, Homo sapien
gcctgcctgagggcactcccctcac

SEQ ID NO: 5522770 - DNA, 25 bp, Homo sapien
tttaacaaactggttgagccgtatc

SEQ ID NO: 5522771 - DNA, 25 bp, Homo sapien
gctgaatgtcagcgctgttccctcc

SEQ ID NO: 5522772 - DNA, 25 bp, Homo sapien
agaagcagtagcaactccatgattc

SEQ ID NO: 5522773 - DNA, 25 bp, Homo sapien
actgacacaagaacgacaatgcact

SEQ ID NO: 5522774 - DNA, 25 bp, Homo sapien
tgcttcaagatgaaggcgcaaagca

SEQ ID NO: 5522775 - DNA, 25 bp, Homo sapien
tttgtggcttgtcttatgtcgtgat

SEQ ID NO: 5522776 - DNA, 25 bp, Homo sapien
tcataggatttgttcacatagtgtt

SEQ ID NO: 5522777 - DNA, 25 bp, Homo sapien
tccctctggctccccgtctcatttc

SEQ ID NO: 5522778 - DNA, 25 bp, Homo sapien
caagtgccagtcggattgctctgta

SEQ ID NO: 5522779 - DNA, 25 bp, Homo sapien
agttaatgtctacctcagcacctcc

SEQ ID NO: 5522780 - DNA, 25 bp, Homo sapien
agcctaattttaggaggttgcccaa

SEQ ID NO: 5522781 - DNA, 25 bp, Homo sapien
ccagcctcctggtgtgtatcatagg

SEQ ID NO: 5522782 - DNA, 25 bp, Homo sapien
atcttcgtaaggttaagaagccgtg

SEQ ID NO: 5522783 - DNA, 25 bp, Homo sapien
tatgtcgtgatagcacaagtgccag

SEQ ID NO: 5522784 - DNA, 25 bp, Homo sapien
acatagtgttatgcatgatcttcgt

SEQ ID NO: 5522785 - DNA, 25 bp, Homo sapien
tggtggtgcaccatgacatccaacc

SEQ ID NO: 5522786 - DNA, 25 bp, Homo sapien
aataggaaagagaaacattgtgcta

SEQ ID NO: 5522787 - DNA, 25 bp, Homo sapien
tgctatatggacacaaggtggcagt

SEQ ID NO: 5522788 - DNA, 25 bp, Homo sapien
aaggagcccaccatatgcccacaat

SEQ ID NO: 5522789 - DNA, 25 bp, Homo sapien
gcctgctagcagctctagtgcgcac

SEQ ID NO: 5522790 - DNA, 25 bp, Homo sapien
agtgcgcactcagcttcggcttcct

SEQ ID NO: 5522791 - DNA, 25 bp, Homo sapien
caaaggaacatgatgagccttgccc

SEQ ID NO: 5522792 - DNA, 25 bp, Homo sapien
aaaacacaagctgaccctctggcct

SEQ ID NO: 5522793 - DNA, 25 bp, Homo sapien
aaaaatgggtctaaagcaagtgatg

SEQ ID NO: 5522794 - DNA, 25 bp, Homo sapien
tgcccacaatgggacaaaagagaca

SEQ ID NO: 5522795 - DNA, 25 bp, Homo sapien
aggcagccctattcaagagcaggtc

SEQ ID NO: 5522796 - DNA, 25 bp, Homo sapien
gccttgcccagtatgctcggctccc

SEQ ID NO: 5522797 - DNA, 25 bp, Homo sapien
atcttggtggtatcaaggaaaggac

SEQ ID NO: 5522798 - DNA, 25 bp, Homo sapien
gtcctttccttgataccaccaagat

SEQ ID NO: 5522799 - DNA, 25 bp, Homo sapien
acaatagcgttgagataaatccata

SEQ ID NO: 5522800 - DNA, 25 bp, Homo sapien
acacatcttgatagccaaaactctc

SEQ ID NO: 5522801 - DNA, 25 bp, Homo sapien
tggaaatagccaacctgcaaaacac

SEQ ID NO: 5522802 - DNA, 25 bp, Homo sapien
cgaattagtgctctgatgaatgctg

SEQ ID NO: 5522803 - DNA, 25 bp, Homo sapien
aagaactttatggagtgatgggctg

SEQ ID NO: 5522804 - DNA, 25 bp, Homo sapien
atcacttggtgcagctaagaacttt

SEQ ID NO: 5522805 - DNA, 25 bp, Homo sapien
aaacacagccattaaacaatagcgt

SEQ ID NO: 5522806 - DNA, 25 bp, Homo sapien
ggaaggcatggtttacaagatttca

SEQ ID NO: 5522807 - DNA, 25 bp, Homo sapien
gtgatgggctgataatggaaatagc

SEQ ID NO: 5522808 - DNA, 25 bp, Homo sapien
cagatagatcacattaaacacagcc

SEQ ID NO: 5522809 - DNA, 25 bp, Homo sapien
tcaacccaggaattcaattaacctc

SEQ ID NO: 5522810 - DNA, 25 bp, Homo sapien
gtggatgtacaagagcactggctaa

SEQ ID NO: 5522811 - DNA, 25 bp, Homo sapien
cagagaagatctgaaacggttcttg

SEQ ID NO: 5522812 - DNA, 25 bp, Homo sapien
ctttccctaaatggcaggctgaccc

SEQ ID NO: 5522813 - DNA, 25 bp, Homo sapien
tctatcactggaactgagaaaaatt

SEQ ID NO: 5522814 - DNA, 25 bp, Homo sapien
ctatggctccttagggtgctgtgtg

SEQ ID NO: 5522815 - DNA, 25 bp, Homo sapien
ggctgggctcccatcttgatgtcag

SEQ ID NO: 5522816 - DNA, 25 bp, Homo sapien
tctttgatggtgactatggctcctt

SEQ ID NO: 5522817 - DNA, 25 bp, Homo sapien
ctattaagactggcagaggatgtat

SEQ ID NO: 5522818 - DNA, 25 bp, Homo sapien
agcagcactgcgtcagagcttctct

SEQ ID NO: 5522819 - DNA, 25 bp, Homo sapien
agggccttagggttgagtctttgat

SEQ ID NO: 5522820 - DNA, 25 bp, Homo sapien
gcactttgagatcttgaagggcctt

SEQ ID NO: 5522821 - DNA, 25 bp, Homo sapien
taattcgttataagtgtacagttca

SEQ ID NO: 5522822 - DNA, 25 bp, Homo sapien
actgtgcctggcttacactaacatt

SEQ ID NO: 5522823 - DNA, 25 bp, Homo sapien
taggtgctcacatctatgttgccca

SEQ ID NO: 5522824 - DNA, 25 bp, Homo sapien
tcagtggcattaaataccttcacat

SEQ ID NO: 5522825 - DNA, 25 bp, Homo sapien
gctaccatcactaccatctatctac

SEQ ID NO: 5522826 - DNA, 25 bp, Homo sapien
ctaagttttgatattgaccacacct

SEQ ID NO: 5522827 - DNA, 25 bp, Homo sapien
atttttagagataggtgctcacatc

SEQ ID NO: 5522828 - DNA, 25 bp, Homo sapien
tctatgacaggtactttttccagca

SEQ ID NO: 5522829 - DNA, 25 bp, Homo sapien
ggttggcactacaggtgaatgccac

SEQ ID NO: 5522830 - DNA, 25 bp, Homo sapien
tactgttcacagagaaatcagatac

SEQ ID NO: 5522831 - DNA, 25 bp, Homo sapien
actcaggcttaaaaggtctcccatc

SEQ ID NO: 5522832 - DNA, 25 bp, Homo sapien
ggcagaggccagtcccttctgtcgt

SEQ ID NO: 5522833 - DNA, 25 bp, Homo sapien
gtttaggaggtcagaaatactgaag

SEQ ID NO: 5522834 - DNA, 25 bp, Homo sapien
attagagtttaggaggtcagaaata

SEQ ID NO: 5522835 - DNA, 25 bp, Homo sapien
ttctgtcgtcttctcgcagccgtat

SEQ ID NO: 5522836 - DNA, 25 bp, Homo sapien
cagccgtatagtagtagtaggcggc

SEQ ID NO: 5522837 - DNA, 25 bp, Homo sapien
gctgtaagcatgactttattagagt

SEQ ID NO: 5522838 - DNA, 25 bp, Homo sapien
tctcgcagccgtatagtagtagtag

SEQ ID NO: 5522839 - DNA, 25 bp, Homo sapien
tttattagagtttaggaggtcagaa

SEQ ID NO: 5522840 - DNA, 25 bp, Homo sapien
agaaatactgaagtcaaggtgtggg

SEQ ID NO: 5522841 - DNA, 25 bp, Homo sapien
tgactttattagagtttaggaggtc

SEQ ID NO: 5522842 - DNA, 25 bp, Homo sapien
taggaggtcagaaatactgaagtca

SEQ ID NO: 5522843 - DNA, 25 bp, Homo sapien
tgtccaaagatgagacagtctgttt

SEQ ID NO: 5522844 - DNA, 25 bp, Homo sapien
tgggccaaaaccagcctgtaccacc

SEQ ID NO: 5522845 - DNA, 25 bp, Homo sapien
tcagttaagggcatcccagtccatc

SEQ ID NO: 5522846 - DNA, 25 bp, Homo sapien
gggagatttgagggatatctgtcca

SEQ ID NO: 5522847 - DNA, 25 bp, Homo sapien
tgggcctgtggtgtcctttccagac

SEQ ID NO: 5522848 - DNA, 25 bp, Homo sapien
taagctcatccaggcagtttaggtc

SEQ ID NO: 5522849 - DNA, 25 bp, Homo sapien
tccagacagcagacctcagttaagg

SEQ ID NO: 5522850 - DNA, 25 bp, Homo sapien
cctgatggggcgtctacagttttta

SEQ ID NO: 5522851 - DNA, 25 bp, Homo sapien
ctagagtgatcacttgctgggccaa

SEQ ID NO: 5522852 - DNA, 25 bp, Homo sapien
taccacaaggtgtcgctgttgaaca

SEQ ID NO: 5522853 - DNA, 25 bp, Homo sapien
ggtgcagtctagtgcatagctgtcc

SEQ ID NO: 5522854 - DNA, 25 bp, Homo sapien
tcgacggcgggctcgggtcacccgc

SEQ ID NO: 5522855 - DNA, 25 bp, Homo sapien
gcgggtgacccgagcccgccgtcga

SEQ ID NO: 5522856 - DNA, 25 bp, Homo sapien
gggtgaagccagatttggtgttgtg

SEQ ID NO: 5522857 - DNA, 25 bp, Homo sapien
gctgcttgggagcttgtccaatgcc

SEQ ID NO: 5522858 - DNA, 25 bp, Homo sapien
gctgacactgatgaaatgagtgcca

SEQ ID NO: 5522859 - DNA, 25 bp, Homo sapien
tgaactagatcgagctgatagagac

SEQ ID NO: 5522860 - DNA, 25 bp, Homo sapien
ctcagtatcttggtagtggctgggt

SEQ ID NO: 5522861 - DNA, 25 bp, Homo sapien
gttacgccccgggagtctctcagta

SEQ ID NO: 5522862 - DNA, 25 bp, Homo sapien
gaaagcatctgccgtgtagaaacgt

SEQ ID NO: 5522863 - DNA, 25 bp, Homo sapien
aatcctgcgaatatgggtagtgctt

SEQ ID NO: 5522864 - DNA, 25 bp, Homo sapien
gggcataccactgagatcctgaggc

SEQ ID NO: 5522865 - DNA, 25 bp, Homo sapien
tactaggaataaagaaagtgatcat

SEQ ID NO: 5522866 - DNA, 25 bp, Homo sapien
caccgaattccaagaagccgggagg

SEQ ID NO: 5522867 - DNA, 25 bp, Homo sapien
gcggaagccgttggactttacatct

SEQ ID NO: 5522868 - DNA, 25 bp, Homo sapien
gtctgaacgagcagactggcagtat

SEQ ID NO: 5522869 - DNA, 25 bp, Homo sapien
tcgaccccttctgcccggcgcttcg

SEQ ID NO: 5522870 - DNA, 25 bp, Homo sapien
atttagtgagctatgttgcctcttc

SEQ ID NO: 5522871 - DNA, 25 bp, Homo sapien
caccttgtccagggaagattgcttc

SEQ ID NO: 5522872 - DNA, 25 bp, Homo sapien
ccgctcctctgtcgggccagtctgc

SEQ ID NO: 5522873 - DNA, 25 bp, Homo sapien
gcgtcggctgcggttctctctcgac

SEQ ID NO: 5522874 - DNA, 25 bp, Homo sapien
aaattagcgtttttgccacctgatc

SEQ ID NO: 5522875 - DNA, 25 bp, Homo sapien
acactgatgtgtgatgaaagcggaa

SEQ ID NO: 5522876 - DNA, 25 bp, Homo sapien
ttctagagaaaaagatgctattgag

SEQ ID NO: 5522877 - DNA, 25 bp, Homo sapien
gccacctgatccaacttacacactg

SEQ ID NO: 5522878 - DNA, 25 bp, Homo sapien
ggcatgactgagaatgaagcccatt

SEQ ID NO: 5522879 - DNA, 25 bp, Homo sapien
ggacagtggtggtgtttgtattatt

SEQ ID NO: 5522880 - DNA, 25 bp, Homo sapien
ccaagacatatgatcccacaaagcc

SEQ ID NO: 5522881 - DNA, 25 bp, Homo sapien
tgaaggggccttacacagtttagaa

SEQ ID NO: 5522882 - DNA, 25 bp, Homo sapien
agagccgccttggagatacaaattt

SEQ ID NO: 5522883 - DNA, 25 bp, Homo sapien
ttgaaaccaacaagaggaacttgaa

SEQ ID NO: 5522884 - DNA, 25 bp, Homo sapien
aaattaacactcaagggctgcctct

SEQ ID NO: 5522885 - DNA, 25 bp, Homo sapien
gctctggtcagtgccctggccaact

SEQ ID NO: 5522886 - DNA, 25 bp, Homo sapien
aaagccattgccaacccacagacat

SEQ ID NO: 5522887 - DNA, 25 bp, Homo sapien
aacacaagtggatggtcaccacatc

SEQ ID NO: 5522888 - DNA, 25 bp, Homo sapien
ttctgtgagcttagagcactgaggt

SEQ ID NO: 5522889 - DNA, 25 bp, Homo sapien
gcatttggatggacgtcatcgtgac

SEQ ID NO: 5522890 - DNA, 25 bp, Homo sapien
ggccattgaggaagtctattatgac

SEQ ID NO: 5522891 - DNA, 25 bp, Homo sapien
tggacgcaccgctttggaactctcc

SEQ ID NO: 5522892 - DNA, 25 bp, Homo sapien
gcctactatgcggacaaggaagaga

SEQ ID NO: 5522893 - DNA, 25 bp, Homo sapien
gaagagaccaagctcaaaggtgtca

SEQ ID NO: 5522894 - DNA, 25 bp, Homo sapien
ggcagttcagctggcctgagctgct

SEQ ID NO: 5522895 - DNA, 25 bp, Homo sapien
agccccgaagccatgcgcatttgga

SEQ ID NO: 5522896 - DNA, 25 bp, Homo sapien
ctacatggtggctccgagccccgaa

SEQ ID NO: 5522897 - DNA, 25 bp, Homo sapien
gctgtgccttcaagagccccaaccc

SEQ ID NO: 5522898 - DNA, 25 bp, Homo sapien
acgaaaaccacgccccctgagtggc

SEQ ID NO: 5522899 - DNA, 25 bp, Homo sapien
ggcgttcctaggccccgcccactgc

SEQ ID NO: 5522900 - DNA, 25 bp, Homo sapien
gacaaggaggagataaacatttagt

SEQ ID NO: 5522901 - DNA, 25 bp, Homo sapien
actaaatgtttatctcctccttgtc

SEQ ID NO: 5522902 - DNA, 25 bp, Homo sapien
gaaattccttttgaacttatattac

SEQ ID NO: 5522903 - DNA, 25 bp, Homo sapien
gtaatataagttcaaaaggaatttc

SEQ ID NO: 5522904 - DNA, 25 bp, Homo sapien
gtgcatgctcacccatacaccagcc

SEQ ID NO: 5522905 - DNA, 25 bp, Homo sapien
acaccagccacacacaagtactcat

SEQ ID NO: 5522906 - DNA, 25 bp, Homo sapien
gccgtgagcaggacctgcttccccg

SEQ ID NO: 5522907 - DNA, 25 bp, Homo sapien
ggctcacagtacagtttcgggaaca

SEQ ID NO: 5522908 - DNA, 25 bp, Homo sapien
ccgggtacctgcacagccacatata

SEQ ID NO: 5522909 - DNA, 25 bp, Homo sapien
acatgcccacacacaaagtacacac

SEQ ID NO: 5522910 - DNA, 25 bp, Homo sapien
cgcagcccctctcctcagaactcgc

SEQ ID NO: 5522911 - DNA, 25 bp, Homo sapien
tctggggcctcagaacaatctgccc

SEQ ID NO: 5522912 - DNA, 25 bp, Homo sapien
gccctgctccactgaggggcaagag

SEQ ID NO: 5522913 - DNA, 25 bp, Homo sapien
acaatctgcccccgccgtgggctca

SEQ ID NO: 5522914 - DNA, 25 bp, Homo sapien
gggctgttttggcacatctggggcc

SEQ ID NO: 5522915 - DNA, 25 bp, Homo sapien
tcactgaaatccagggtccagagtt

SEQ ID NO: 5522916 - DNA, 25 bp, Homo sapien
aggagacttcagaaaggagattaac

SEQ ID NO: 5522917 - DNA, 25 bp, Homo sapien
ggaataacctaagtgatggccagcg

SEQ ID NO: 5522918 - DNA, 25 bp, Homo sapien
cacccaggaaggttgaacctcgaag

SEQ ID NO: 5522919 - DNA, 25 bp, Homo sapien
ctgattggttggatagcataagacc

SEQ ID NO: 5522920 - DNA, 25 bp, Homo sapien
ggctgtgcatttggatcagctgcta

SEQ ID NO: 5522921 - DNA, 25 bp, Homo sapien
gaacctcgaagatcagacccaggga

SEQ ID NO: 5522922 - DNA, 25 bp, Homo sapien
ccagcggactgtgacaggtattata

SEQ ID NO: 5522923 - DNA, 25 bp, Homo sapien
gagattaacaagtggtggaataacc

SEQ ID NO: 5522924 - DNA, 25 bp, Homo sapien
aacaaaaatgcggattcagaaaagc

SEQ ID NO: 5522925 - DNA, 25 bp, Homo sapien
ggtgaagcatacaagagaagtgctt

SEQ ID NO: 5522926 - DNA, 25 bp, Homo sapien
atcttgtggttaggaaaatggacct

SEQ ID NO: 5522927 - DNA, 25 bp, Homo sapien
ccagcaagagatactgcaccctcct

SEQ ID NO: 5522928 - DNA, 25 bp, Homo sapien
gttctaggaaactctggatctcagc

SEQ ID NO: 5522929 - DNA, 25 bp, Homo sapien
aaaggcacagtgatgagctataaag

SEQ ID NO: 5522930 - DNA, 25 bp, Homo sapien
ctataaaggtagtgatgagagctat

SEQ ID NO: 5522931 - DNA, 25 bp, Homo sapien
ctataaaggtagtgatgaaagcaag

SEQ ID NO: 5522932 - DNA, 25 bp, Homo sapien
tcctgaccgagcagtcaggcttccc

SEQ ID NO: 5522933 - DNA, 25 bp, Homo sapien
agctttgcctggaccttgctagggg

SEQ ID NO: 5522934 - DNA, 25 bp, Homo sapien
aaatggacctagagagattatgtgg

SEQ ID NO: 5522935 - DNA, 25 bp, Homo sapien
cggcaagctttgacaatgtaacatc

SEQ ID NO: 5522936 - DNA, 25 bp, Homo sapien
tcctagccatcctaagttgcgttct

SEQ ID NO: 5522937 - DNA, 25 bp, Homo sapien
gtgctgggaacttgatcagtcccct

SEQ ID NO: 5522938 - DNA, 25 bp, Homo sapien
gtccggtttttgttgccagggctgc

SEQ ID NO: 5522939 - DNA, 25 bp, Homo sapien
cactcttggtaaatcaggtgggtgg

SEQ ID NO: 5522940 - DNA, 25 bp, Homo sapien
tcatttctcacgagggtgctgggaa

SEQ ID NO: 5522941 - DNA, 25 bp, Homo sapien
caaggtgataggcataaactaagac

SEQ ID NO: 5522942 - DNA, 25 bp, Homo sapien
atatacaacccaggatgacaaaatc

SEQ ID NO: 5522943 - DNA, 25 bp, Homo sapien
ccatgactagctccagaagctgggc

SEQ ID NO: 5522944 - DNA, 25 bp, Homo sapien
ccttcggggatgacagttatatgtg

SEQ ID NO: 5522945 - DNA, 25 bp, Homo sapien
ctggtcacaacaggagcacaaagaa

SEQ ID NO: 5522946 - DNA, 25 bp, Homo sapien
aaacaactgcataatctgggatcac

SEQ ID NO: 5522947 - DNA, 25 bp, Homo sapien
gtggaggtgtatttggcctgtagaa

SEQ ID NO: 5522948 - DNA, 25 bp, Homo sapien
ctcccactgcatgggagggtgtaac

SEQ ID NO: 5522949 - DNA, 25 bp, Homo sapien
gcctcatgtacagtgggcattgggc

SEQ ID NO: 5522950 - DNA, 25 bp, Homo sapien
ttgagaccccgctttgtgggggaga

SEQ ID NO: 5522951 - DNA, 25 bp, Homo sapien
aaggccccagacccatcatgcagcc

SEQ ID NO: 5522952 - DNA, 25 bp, Homo sapien
gctgtattaagagaggggtcctctc

SEQ ID NO: 5522953 - DNA, 25 bp, Homo sapien
tggcacaatcaagggcataagagga

SEQ ID NO: 5522954 - DNA, 25 bp, Homo sapien
gctctgtgtccagaacaagggagca

SEQ ID NO: 5522955 - DNA, 25 bp, Homo sapien
tttcctggtggccaaaacagaacat

SEQ ID NO: 5522956 - DNA, 25 bp, Homo sapien
cattgggcccgcccctgggatattg

SEQ ID NO: 5522957 - DNA, 25 bp, Homo sapien
agaggggtcctctctgtgtatgccc

SEQ ID NO: 5522958 - DNA, 25 bp, Homo sapien
ttttcccagggctctgtgtccagaa

SEQ ID NO: 5522959 - DNA, 25 bp, Homo sapien
cgcggctcacgtttcggaacacgtc

SEQ ID NO: 5522960 - DNA, 25 bp, Homo sapien
gagcgtgttgtcctctgacgccgtc

SEQ ID NO: 5522961 - DNA, 25 bp, Homo sapien
tgcctttcatgcctcccgaagagcc

SEQ ID NO: 5522962 - DNA, 25 bp, Homo sapien
cgtcagaacctgagctccctgcgag

SEQ ID NO: 5522963 - DNA, 25 bp, Homo sapien
gggctttgcgaccgcagtgtcttcc

SEQ ID NO: 5522964 - DNA, 25 bp, Homo sapien
ggtatttggtgaagacttgatgtgt

SEQ ID NO: 5522965 - DNA, 25 bp, Homo sapien
gctgggactccgccgtgtcttcatt

SEQ ID NO: 5522966 - DNA, 25 bp, Homo sapien
tttccggccgctctcactccttccc

SEQ ID NO: 5522967 - DNA, 25 bp, Homo sapien
ggtgcacagagtagaaaattcaagg

SEQ ID NO: 5522968 - DNA, 25 bp, Homo sapien
gccgttccatggtaagcggtgctac

SEQ ID NO: 5522969 - DNA, 25 bp, Homo sapien
cttccttctgtccccggtcgtgcgc

SEQ ID NO: 5522970 - DNA, 25 bp, Homo sapien
cagctttctgtcctgctgagaggcc

SEQ ID NO: 5522971 - DNA, 25 bp, Homo sapien
aattcgaccaaccttggacatggct

SEQ ID NO: 5522972 - DNA, 25 bp, Homo sapien
ggctggtctgaaagactggattctt

SEQ ID NO: 5522973 - DNA, 25 bp, Homo sapien
accatggcaggtactcacctccctg

SEQ ID NO: 5522974 - DNA, 25 bp, Homo sapien
cacctccctgaaaaagggtggcagg

SEQ ID NO: 5522975 - DNA, 25 bp, Homo sapien
aacaaatgtaggaaatgggtaacag

SEQ ID NO: 5522976 - DNA, 25 bp, Homo sapien
tggacatggcttagatgctgcccac

SEQ ID NO: 5522977 - DNA, 25 bp, Homo sapien
tggaaccacagctcagctttctgtc

SEQ ID NO: 5522978 - DNA, 25 bp, Homo sapien
ggtaacagagcaatgcacctagctc

SEQ ID NO: 5522979 - DNA, 25 bp, Homo sapien
cagaaacccttaggattccccattc

SEQ ID NO: 5522980 - DNA, 25 bp, Homo sapien
ggacagggaggatcctgcttacttc

SEQ ID NO: 5522981 - DNA, 25 bp, Homo sapien
gctgagggagcaattttgtgatcat

SEQ ID NO: 5522982 - DNA, 25 bp, Homo sapien
ccctgcacaccgttgcgaatcgcgg

SEQ ID NO: 5522983 - DNA, 25 bp, Homo sapien
atcaacgagaagtctgtctggtgct

SEQ ID NO: 5522984 - DNA, 25 bp, Homo sapien
tgatcatccgctggagcactgtgag

SEQ ID NO: 5522985 - DNA, 25 bp, Homo sapien
gaccctcaggagcctattgcaagag

SEQ ID NO: 5522986 - DNA, 25 bp, Homo sapien
gggcacctagagagtacccagatcc

SEQ ID NO: 5522987 - DNA, 25 bp, Homo sapien
cagatccttctcgaagctggcgcgg

SEQ ID NO: 5522988 - DNA, 25 bp, Homo sapien
ctccatgatgcagcttacgtcgggg

SEQ ID NO: 5522989 - DNA, 25 bp, Homo sapien
tggacttcctcatccggaagggggc

SEQ ID NO: 5522990 - DNA, 25 bp, Homo sapien
agcacccctgtctaccacgcctctc

SEQ ID NO: 5522991 - DNA, 25 bp, Homo sapien
ggcaccatcgcagcacccctgtcta

SEQ ID NO: 5522992 - DNA, 25 bp, Homo sapien
catcagcctgggctcaccgagtcta

SEQ ID NO: 5522993 - DNA, 25 bp, Homo sapien
ggcccacagccatctaggtgcagac

SEQ ID NO: 5522994 - DNA, 25 bp, Homo sapien
cctagctcccaccccggcatcgaag

SEQ ID NO: 5522995 - DNA, 25 bp, Homo sapien
tctcgggcccacctccgcatcctca

SEQ ID NO: 5522996 - DNA, 25 bp, Homo sapien
ggactgcacggtccatcagcctggg

SEQ ID NO: 5522997 - DNA, 25 bp, Homo sapien
ggctgccgacaggttcctgaccagc

SEQ ID NO: 5522998 - DNA, 25 bp, Homo sapien
cttccctgcccgcccgattgagggc

SEQ ID NO: 5522999 - DNA, 25 bp, Homo sapien
gcctcttcccggcagtaggaggcct

SEQ ID NO: 5523000 - DNA, 25 bp, Homo sapien
gccgacaggttcctgaccagcgagc

SEQ ID NO: 5523001 - DNA, 25 bp, Homo sapien
tggctcaaactggactgcacggtcc

SEQ ID NO: 5523002 - DNA, 25 bp, Homo sapien
gcgctggcctcttcccggcagtagg

SEQ ID NO: 5523003 - DNA, 25 bp, Homo sapien
ttaagggattacatatctgagtgac

SEQ ID NO: 5523004 - DNA, 25 bp, Homo sapien
tggagaaaacaggaagttacactca

SEQ ID NO: 5523005 - DNA, 25 bp, Homo sapien
tgttatgttgtgagccgtggtatta

SEQ ID NO: 5523006 - DNA, 25 bp, Homo sapien
acttagatgtagataaaagaccaca

SEQ ID NO: 5523007 - DNA, 25 bp, Homo sapien
tgagtgacaagtacatacaaacgca

SEQ ID NO: 5523008 - DNA, 25 bp, Homo sapien
ttctgtcccagagcggtacaggaat

SEQ ID NO: 5523009 - DNA, 25 bp, Homo sapien
ggatcacacagaccagtgggatgtt

SEQ ID NO: 5523010 - DNA, 25 bp, Homo sapien
gttcatggaatgagccgctctgtta

SEQ ID NO: 5523011 - DNA, 25 bp, Homo sapien
aaagtgtaggatataaaccaagaat

SEQ ID NO: 5523012 - DNA, 25 bp, Homo sapien
cggtacaggaatctgcgtagtgttt

SEQ ID NO: 5523013 - DNA, 25 bp, Homo sapien
tttgcccagatgatagaattcgaaa

SEQ ID NO: 5523014 - DNA, 25 bp, Homo sapien
gtgctgggtacaatctagtgtgctc

SEQ ID NO: 5523015 - DNA, 25 bp, Homo sapien
tctccgtaacgtttgtgggcagcag

SEQ ID NO: 5523016 - DNA, 25 bp, Homo sapien
ccccgtgaattgaggcaactgtaga

SEQ ID NO: 5523017 - DNA, 25 bp, Homo sapien
attcctcaccgctggatggcttgtc

SEQ ID NO: 5523018 - DNA, 25 bp, Homo sapien
ttctaaaaaggctgtgaggttatgt

SEQ ID NO: 5523019 - DNA, 25 bp, Homo sapien
tctaacctggatcagaggagtgaaa

SEQ ID NO: 5523020 - DNA, 25 bp, Homo sapien
tactgcatgtcattggtaggtcatc

SEQ ID NO: 5523021 - DNA, 25 bp, Homo sapien
gtgctctttatagacacgaggccac

SEQ ID NO: 5523022 - DNA, 25 bp, Homo sapien
gaagggtgagaactattgctagatt

SEQ ID NO: 5523023 - DNA, 25 bp, Homo sapien
gaacatggcagagattcctcaccgc

SEQ ID NO: 5523024 - DNA, 25 bp, Homo sapien
acgaggccacagatgtatcaactac

SEQ ID NO: 5523025 - DNA, 25 bp, Homo sapien
ggtcaagttcacgctgtctgagatc

SEQ ID NO: 5523026 - DNA, 25 bp, Homo sapien
actcggtggagtgccctttttgtga

SEQ ID NO: 5523027 - DNA, 25 bp, Homo sapien
gcagatgctgcttaacggcctctac

SEQ ID NO: 5523028 - DNA, 25 bp, Homo sapien
tataaccgctgcaagggtagtatat

SEQ ID NO: 5523029 - DNA, 25 bp, Homo sapien
cacgagaatgtggtcaacttgattg

SEQ ID NO: 5523030 - DNA, 25 bp, Homo sapien
aatacgagaagctcgccaagatcgg

SEQ ID NO: 5523031 - DNA, 25 bp, Homo sapien
aagatcctgcatagggacatgaagg

SEQ ID NO: 5523032 - DNA, 25 bp, Homo sapien
tcgacttctgcgagcatgaccttgc

SEQ ID NO: 5523033 - DNA, 25 bp, Homo sapien
gaggggttccccattacagccttgc

SEQ ID NO: 5523034 - DNA, 25 bp, Homo sapien
ggacatgaaggctgctaatgtgctt

SEQ ID NO: 5523035 - DNA, 25 bp, Homo sapien
ttgcgggagatcaagatccttcagc

SEQ ID NO: 5523036 - DNA, 25 bp, Homo sapien
tacataatgtagggggataaataat

SEQ ID NO: 5523037 - DNA, 25 bp, Homo sapien
aagttccaagagggaattaactcta

SEQ ID NO: 5523038 - DNA, 25 bp, Homo sapien
aattcaggactatacagtgacgatt

SEQ ID NO: 5523039 - DNA, 25 bp, Homo sapien
aagaattgtttgacagacaaccctt

SEQ ID NO: 5523040 - DNA, 25 bp, Homo sapien
tttttgagcaatgctggacttctgc

SEQ ID NO: 5523041 - DNA, 25 bp, Homo sapien
gcaggcccagacatctctcacagtt

SEQ ID NO: 5523042 - DNA, 25 bp, Homo sapien
tacatgacaggaaacacaatgtcct

SEQ ID NO: 5523043 - DNA, 25 bp, Homo sapien
aagtaactactgaagaacaaagaaa

SEQ ID NO: 5523044 - DNA, 25 bp, Homo sapien
ggacttctgcaggcccagacatctc

SEQ ID NO: 5523045 - DNA, 25 bp, Homo sapien
gattaggagctgagttcatgccttt

SEQ ID NO: 5523046 - DNA, 25 bp, Homo sapien
atacagtgacgattaggagctgagt

SEQ ID NO: 5523047 - DNA, 25 bp, Homo sapien
aatagttactagagaaaacagatta

SEQ ID NO: 5523048 - DNA, 25 bp, Homo sapien
agtacctccacagtctggccagctc

SEQ ID NO: 5523049 - DNA, 25 bp, Homo sapien
caatttccctgaagttagttagagc

SEQ ID NO: 5523050 - DNA, 25 bp, Homo sapien
aaatagaaaaacaatagacttagat

SEQ ID NO: 5523051 - DNA, 25 bp, Homo sapien
aggacaaataggaatactgaatgcc

SEQ ID NO: 5523052 - DNA, 25 bp, Homo sapien
aaatacaaagagtacctccacagtc

SEQ ID NO: 5523053 - DNA, 25 bp, Homo sapien
ctcaacctgcataaagttctctctc

SEQ ID NO: 5523054 - DNA, 25 bp, Homo sapien
attaacagtgaaaaagcatttaccc

SEQ ID NO: 5523055 - DNA, 25 bp, Homo sapien
tacccaaagtcaatgttacaaaata

SEQ ID NO: 5523056 - DNA, 25 bp, Homo sapien
ggtactatggtaataactaagatat

SEQ ID NO: 5523057 - DNA, 25 bp, Homo sapien
taatagcagctgtaacaccagtcaa

SEQ ID NO: 5523058 - DNA, 25 bp, Homo sapien
taactgagtgaggcctttcctgaga

SEQ ID NO: 5523059 - DNA, 25 bp, Homo sapien
ggtgcatggacctggaaatctctgc

SEQ ID NO: 5523060 - DNA, 25 bp, Homo sapien
cacgccaggaagtctcagtacctct

SEQ ID NO: 5523061 - DNA, 25 bp, Homo sapien
cttgaactcctaggggcttccttta

SEQ ID NO: 5523062 - DNA, 25 bp, Homo sapien
ttcagggagtctctggttagccctg

SEQ ID NO: 5523063 - DNA, 25 bp, Homo sapien
cagcaaatttctgaatgggggaggt

SEQ ID NO: 5523064 - DNA, 25 bp, Homo sapien
tttcctgagaattgagcacatgagc

SEQ ID NO: 5523065 - DNA, 25 bp, Homo sapien
agccattggcttagaaaccagattc

SEQ ID NO: 5523066 - DNA, 25 bp, Homo sapien
gcacatgagctttggtgcatggacc

SEQ ID NO: 5523067 - DNA, 25 bp, Homo sapien
ctggggcctatctcagaggtcctca

SEQ ID NO: 5523068 - DNA, 25 bp, Homo sapien
ctaaccctgagtctgggaatgcctc

SEQ ID NO: 5523069 - DNA, 25 bp, Homo sapien
gtcatagtgggaaataagttgaccc

SEQ ID NO: 5523070 - DNA, 25 bp, Homo sapien
tttacagaatggtgcacacaaagcc

SEQ ID NO: 5523071 - DNA, 25 bp, Homo sapien
tctccccctacaaggcacagcctca

SEQ ID NO: 5523072 - DNA, 25 bp, Homo sapien
gctccggaccctggagaatacagga

SEQ ID NO: 5523073 - DNA, 25 bp, Homo sapien
ggccgtgtccctagggcatggccta

SEQ ID NO: 5523074 - DNA, 25 bp, Homo sapien
tgtctagatggacctgcatcaggcc

SEQ ID NO: 5523075 - DNA, 25 bp, Homo sapien
atggcctaggctaatctgagctgtc

SEQ ID NO: 5523076 - DNA, 25 bp, Homo sapien
ctgtccctaagcagctcagggccaa

SEQ ID NO: 5523077 - DNA, 25 bp, Homo sapien
cagctctgtgccatgcccccaagga

SEQ ID NO: 5523078 - DNA, 25 bp, Homo sapien
agggccaagccagatccccttaccc

SEQ ID NO: 5523079 - DNA, 25 bp, Homo sapien
atgcccccaaggactcacctgtccc

SEQ ID NO: 5523080 - DNA, 25 bp, Homo sapien
cctgttcaaagttgtggaaatcacc

SEQ ID NO: 5523081 - DNA, 25 bp, Homo sapien
gttggctttctgacatggacttcct

SEQ ID NO: 5523082 - DNA, 25 bp, Homo sapien
tacccactgagtaaggcagttaagg

SEQ ID NO: 5523083 - DNA, 25 bp, Homo sapien
gtggaagtgctgctctcactggtac

SEQ ID NO: 5523084 - DNA, 25 bp, Homo sapien
gcagaggcttctgggtaagtttgta

SEQ ID NO: 5523085 - DNA, 25 bp, Homo sapien
ggaacagaatggcaaaccagtgtct

SEQ ID NO: 5523086 - DNA, 25 bp, Homo sapien
cagtgtctggccgtagtccccattg

SEQ ID NO: 5523087 - DNA, 25 bp, Homo sapien
ggtctcaagcctagccccagtggaa

SEQ ID NO: 5523088 - DNA, 25 bp, Homo sapien
ttttcatctgaggagcctgtgaagc

SEQ ID NO: 5523089 - DNA, 25 bp, Homo sapien
agagggtagtcttgtggaccattca

SEQ ID NO: 5523090 - DNA, 25 bp, Homo sapien
ctcattattaagggttgggagaggg

SEQ ID NO: 5523091 - DNA, 25 bp, Homo sapien
ctgattaagtgaaagtggtatcatc

SEQ ID NO: 5523092 - DNA, 25 bp, Homo sapien
tgccactgttaaatagttgggaaat

SEQ ID NO: 5523093 - DNA, 25 bp, Homo sapien
tcctaggtaagcttatttcagaaca

SEQ ID NO: 5523094 - DNA, 25 bp, Homo sapien
aaacttgaaaaagccctgttcttca

SEQ ID NO: 5523095 - DNA, 25 bp, Homo sapien
gaaatagtgaataggaatacaatgc

SEQ ID NO: 5523096 - DNA, 25 bp, Homo sapien
gaaagtggtatcatcctaggtaagc

SEQ ID NO: 5523097 - DNA, 25 bp, Homo sapien
tcagacatttgaagaactatagtaa

SEQ ID NO: 5523098 - DNA, 25 bp, Homo sapien
ttcttcagaagttgagtgggttgag

SEQ ID NO: 5523099 - DNA, 25 bp, Homo sapien
aagcaatcaagaaagataatgtgaa

SEQ ID NO: 5523100 - DNA, 25 bp, Homo sapien
gggaggcagtaatatgaagtgactg

SEQ ID NO: 5523101 - DNA, 25 bp, Homo sapien
gaaaggatgaatgtcagacatttga

SEQ ID NO: 5523102 - DNA, 25 bp, Homo sapien
atttttaggattacaaaagcatgga

SEQ ID NO: 5523103 - DNA, 25 bp, Homo sapien
tagaacaactagacattaatatttt

SEQ ID NO: 5523104 - DNA, 25 bp, Homo sapien
agggcttgcatagagcgcaaatgtg

SEQ ID NO: 5523105 - DNA, 25 bp, Homo sapien
ataactaggctaccatagaaaaatt

SEQ ID NO: 5523106 - DNA, 25 bp, Homo sapien
taacatacagctgatagcttttttc

SEQ ID NO: 5523107 - DNA, 25 bp, Homo sapien
tacaaaagcatggaaaccataaaat

SEQ ID NO: 5523108 - DNA, 25 bp, Homo sapien
tctcacattgaaaccaggctcaaat

SEQ ID NO: 5523109 - DNA, 25 bp, Homo sapien
ctgttccaagggcttgcatagagcg

SEQ ID NO: 5523110 - DNA, 25 bp, Homo sapien
gcatagagcgcaaatgtggttataa

SEQ ID NO: 5523111 - DNA, 25 bp, Homo sapien
aaccaggctcaaataactaggctac

SEQ ID NO: 5523112 - DNA, 25 bp, Homo sapien
acaacatgttagtaagagtctctct

SEQ ID NO: 5523113 - DNA, 25 bp, Homo sapien
ttagcttgaaggcccttagtgggtg

SEQ ID NO: 5523114 - DNA, 25 bp, Homo sapien
gtgaagcctgagtccccagtcatgg

SEQ ID NO: 5523115 - DNA, 25 bp, Homo sapien
tccagagtctctagatgaggcatcc

SEQ ID NO: 5523116 - DNA, 25 bp, Homo sapien
ccgtgaatagggaacttatagcaat

SEQ ID NO: 5523117 - DNA, 25 bp, Homo sapien
gttgctaaggagatcaaccaggcaa

SEQ ID NO: 5523118 - DNA, 25 bp, Homo sapien
gctagagtaaaagaccatgagttgc

SEQ ID NO: 5523119 - DNA, 25 bp, Homo sapien
ggtatcctgtgggccgccctctgct

SEQ ID NO: 5523120 - DNA, 25 bp, Homo sapien
ggtgatgtattgtatggaaaggtat

SEQ ID NO: 5523121 - DNA, 25 bp, Homo sapien
acgaagagggactgcttcatgtgtt

SEQ ID NO: 5523122 - DNA, 25 bp, Homo sapien
atgaggcatccatctgctagagtaa

SEQ ID NO: 5523123 - DNA, 25 bp, Homo sapien
tctgagtgcctaatacgaagaggga

SEQ ID NO: 5523124 - DNA, 25 bp, Homo sapien
agggttcatggtcctccgttccacc

SEQ ID NO: 5523125 - DNA, 25 bp, Homo sapien
tgtctcacacgttcagttgcagctc

SEQ ID NO: 5523126 - DNA, 25 bp, Homo sapien
acgggatgacattcaactgggactt

SEQ ID NO: 5523127 - DNA, 25 bp, Homo sapien
cgtcaacgcacctttaagggcgaga

SEQ ID NO: 5523128 - DNA, 25 bp, Homo sapien
tcccgccgcctctcagcctatctgc

SEQ ID NO: 5523129 - DNA, 25 bp, Homo sapien
gagttcatgggcatctctcccgccg

SEQ ID NO: 5523130 - DNA, 25 bp, Homo sapien
ttacaagcataggaccaaggcagaa

SEQ ID NO: 5523131 - DNA, 25 bp, Homo sapien
acgcaaagagacattcaccttccac

SEQ ID NO: 5523132 - DNA, 25 bp, Homo sapien
cacctgaatccagctagagagcgag

SEQ ID NO: 5523133 - DNA, 25 bp, Homo sapien
gcgctgaggcactgtcacgcaaaga

SEQ ID NO: 5523134 - DNA, 25 bp, Homo sapien
cttgcctcaccttggcttgggggac

SEQ ID NO: 5523135 - DNA, 25 bp, Homo sapien
gcagaatctgcgctcgcttctccgc

SEQ ID NO: 5523136 - DNA, 25 bp, Homo sapien
gtggtggaggtcaccactctgccct

SEQ ID NO: 5523137 - DNA, 25 bp, Homo sapien
tgcccggcaggatcgggtttattta

SEQ ID NO: 5523138 - DNA, 25 bp, Homo sapien
gagctgatttatacgcagaatctgc

SEQ ID NO: 5523139 - DNA, 25 bp, Homo sapien
cctggggactgcacagttccctctg

SEQ ID NO: 5523140 - DNA, 25 bp, Homo sapien
cactctgccctaaggtcggaaagga

SEQ ID NO: 5523141 - DNA, 25 bp, Homo sapien
tgctccagagctgatttatacgcag

SEQ ID NO: 5523142 - DNA, 25 bp, Homo sapien
atttattgcctctagcccggagccg

SEQ ID NO: 5523143 - DNA, 25 bp, Homo sapien
gcactacctcgcacggacccagtgg

SEQ ID NO: 5523144 - DNA, 25 bp, Homo sapien
attctgcactacctcgcacggaccc

SEQ ID NO: 5523145 - DNA, 25 bp, Homo sapien
tcgcttctccgctccctcccccgtc

SEQ ID NO: 5523146 - DNA, 25 bp, Homo sapien
gcggcagaattgaaagatccaacag

SEQ ID NO: 5523147 - DNA, 25 bp, Homo sapien
aacttggcagccttcgtggagtata

SEQ ID NO: 5523148 - DNA, 25 bp, Homo sapien
tccgattttgatggaggagtttatc

SEQ ID NO: 5523149 - DNA, 25 bp, Homo sapien
caccagagtatcccatgaaaccacc

SEQ ID NO: 5523150 - DNA, 25 bp, Homo sapien
gagggcccccagactccgattttga

SEQ ID NO: 5523151 - DNA, 25 bp, Homo sapien
tttgagcatctcaggccatcatcct

SEQ ID NO: 5523152 - DNA, 25 bp, Homo sapien
cggatagtactgccaccagagtatc

SEQ ID NO: 5523153 - DNA, 25 bp, Homo sapien
gagtttatcacgggcggatagtact

SEQ ID NO: 5523154 - DNA, 25 bp, Homo sapien
gaagtgggcaagaaaatctgtttga

SEQ ID NO: 5523155 - DNA, 25 bp, Homo sapien
gtggagtataaggacagcattatta

SEQ ID NO: 5523156 - DNA, 25 bp, Homo sapien
aatggcacttcacggttagagggcc

SEQ ID NO: 5523157 - DNA, 25 bp, Homo sapien
ccatcgaagacggcaatttggagga

SEQ ID NO: 5523158 - DNA, 25 bp, Homo sapien
cattaaggatgacgctgaagtagaa

SEQ ID NO: 5523159 - DNA, 25 bp, Homo sapien
ccggacgatgagactctgaaccaaa

SEQ ID NO: 5523160 - DNA, 25 bp, Homo sapien
cgtggactacagtgacgccctcacg

SEQ ID NO: 5523161 - DNA, 25 bp, Homo sapien
acgaagaaatgtggataaagatcct

SEQ ID NO: 5523162 - DNA, 25 bp, Homo sapien
acggcttaagaagcgaaaaagacga

SEQ ID NO: 5523163 - DNA, 25 bp, Homo sapien
cctttttatgcggatggacatggac

SEQ ID NO: 5523164 - DNA, 25 bp, Homo sapien
caaaagtcttcaagccacgagcgga

SEQ ID NO: 5523165 - DNA, 25 bp, Homo sapien
tcctgcaggccatcttggagcatga

SEQ ID NO: 5523166 - DNA, 25 bp, Homo sapien
ctgaagtagaaaggctcacctgtga

SEQ ID NO: 5523167 - DNA, 25 bp, Homo sapien
attgctcgacgagaagaagaatttg

SEQ ID NO: 5523168 - DNA, 25 bp, Homo sapien
agtcacaggaaaagctttcaaggga

SEQ ID NO: 5523169 - DNA, 25 bp, Homo sapien
cccataacctggcacactaacaatc

SEQ ID NO: 5523170 - DNA, 25 bp, Homo sapien
gcataaggaccgatctgtgcctgaa

SEQ ID NO: 5523171 - DNA, 25 bp, Homo sapien
gtgacagagcctgggttgctatatt

SEQ ID NO: 5523172 - DNA, 25 bp, Homo sapien
tttacattagcactgggaaatgctg

SEQ ID NO: 5523173 - DNA, 25 bp, Homo sapien
taacaatcagatgcagtgacagagc

SEQ ID NO: 5523174 - DNA, 25 bp, Homo sapien
gtattcctaataagagaagagctgg

SEQ ID NO: 5523175 - DNA, 25 bp, Homo sapien
ggactctttgatggcgcataaggac

SEQ ID NO: 5523176 - DNA, 25 bp, Homo sapien
acaaagcaagctagactcaagacct

SEQ ID NO: 5523177 - DNA, 25 bp, Homo sapien
tacactgataaggttcctccccact

SEQ ID NO: 5523178 - DNA, 25 bp, Homo sapien
agggctgagctccttttgaaagttt

SEQ ID NO: 5523179 - DNA, 25 bp, Homo sapien
agcccatcccgtgctggtgtccctt

SEQ ID NO: 5523180 - DNA, 25 bp, Homo sapien
atcaatgcagacccaccatgtgtgc

SEQ ID NO: 5523181 - DNA, 25 bp, Homo sapien
gctcccatgagctctagaggtcaca

SEQ ID NO: 5523182 - DNA, 25 bp, Homo sapien
tttcatcccaggagcccatcccgtg

SEQ ID NO: 5523183 - DNA, 25 bp, Homo sapien
cacagctgcgttcagctgatgggga

SEQ ID NO: 5523184 - DNA, 25 bp, Homo sapien
ttgagttaacagcacacaggtaaga

SEQ ID NO: 5523185 - DNA, 25 bp, Homo sapien
tagtgcattcacagtgtggtgtggc

SEQ ID NO: 5523186 - DNA, 25 bp, Homo sapien
acacaggtaagagtcagagacattt

SEQ ID NO: 5523187 - DNA, 25 bp, Homo sapien
gtggtgtggctgcctccactgtaac

SEQ ID NO: 5523188 - DNA, 25 bp, Homo sapien
ggaggccgtgttctggttgtttgcc

SEQ ID NO: 5523189 - DNA, 25 bp, Homo sapien
tgtgcacgtgtgacatgtcttatca

SEQ ID NO: 5523190 - DNA, 25 bp, Homo sapien
atcatagacttgctctcatccattc

SEQ ID NO: 5523191 - DNA, 25 bp, Homo sapien
ttgaaattctgcagtcttgaaatac

SEQ ID NO: 5523192 - DNA, 25 bp, Homo sapien
gtttcagtagaaatatttggcaaga

SEQ ID NO: 5523193 - DNA, 25 bp, Homo sapien
atggcagtcaagtttagtctcattc

SEQ ID NO: 5523194 - DNA, 25 bp, Homo sapien
agggaggtttgagagtcccatcatt

SEQ ID NO: 5523195 - DNA, 25 bp, Homo sapien
gatggagaaagaggttactctgatt

SEQ ID NO: 5523196 - DNA, 25 bp, Homo sapien
ttttgccttgctgaaactgggtttc

SEQ ID NO: 5523197 - DNA, 25 bp, Homo sapien
aaggagtttaaatgacaaccaaatc

SEQ ID NO: 5523198 - DNA, 25 bp, Homo sapien
tctggtcctacagcatattacagac

SEQ ID NO: 5523199 - DNA, 25 bp, Homo sapien
gatgttactgtgtagccgaagattt

SEQ ID NO: 5523200 - DNA, 25 bp, Homo sapien
aaatgacaaccaaatccaaggcctg

SEQ ID NO: 5523201 - DNA, 25 bp, Homo sapien
gaggggttcacaatgaaactgtcac

SEQ ID NO: 5523202 - DNA, 25 bp, Homo sapien
ttgtcgtttcggccagcatgaactg

SEQ ID NO: 5523203 - DNA, 25 bp, Homo sapien
gttctctacgtgccaccactgcagc

SEQ ID NO: 5523204 - DNA, 25 bp, Homo sapien
tggattgaatgtaaacgttgaaaac

SEQ ID NO: 5523205 - DNA, 25 bp, Homo sapien
ctcactgacctttggcaagagcaaa

SEQ ID NO: 5523206 - DNA, 25 bp, Homo sapien
aaaatacaaaatggatgcaagtcca

SEQ ID NO: 5523207 - DNA, 25 bp, Homo sapien
accactgcagcaaatgcactcactc

SEQ ID NO: 5523208 - DNA, 25 bp, Homo sapien
atgcaagtccataaaccattgtcgt

SEQ ID NO: 5523209 - DNA, 25 bp, Homo sapien
ttttttgagaggggttcacaatgaa

SEQ ID NO: 5523210 - DNA, 25 bp, Homo sapien
aatatacaaaggcttggattgaatg

SEQ ID NO: 5523211 - DNA, 25 bp, Homo sapien
caagacttaaagtgttgcacagctc

SEQ ID NO: 5523212 - DNA, 25 bp, Homo sapien
tctgactacttccctgaccccaatc

SEQ ID NO: 5523213 - DNA, 25 bp, Homo sapien
tcaggctttgtcacgtctatcactt

SEQ ID NO: 5523214 - DNA, 25 bp, Homo sapien
tcctggattagttgccccttctgtc

SEQ ID NO: 5523215 - DNA, 25 bp, Homo sapien
ttctgtcgtcttctcgcagccgtat

SEQ ID NO: 5523216 - DNA, 25 bp, Homo sapien
ccaatcctggattagttgccccttc

SEQ ID NO: 5523217 - DNA, 25 bp, Homo sapien
ttcattcttcaggctttgtcacgtc

SEQ ID NO: 5523218 - DNA, 25 bp, Homo sapien
ttcttcaggctttgtcacgtctatc

SEQ ID NO: 5523219 - DNA, 25 bp, Homo sapien
ctcgcagccgtatagtagtagtagg

SEQ ID NO: 5523220 - DNA, 25 bp, Homo sapien
attgcttgaagccctttactttccc

SEQ ID NO: 5523221 - DNA, 25 bp, Homo sapien
ttctccacgtctttggctgactttc

SEQ ID NO: 5523222 - DNA, 25 bp, Homo sapien
gccgtatagtagtagtaggcggccg

SEQ ID NO: 5523223 - DNA, 25 bp, Homo sapien
gaaagtagcataatgttcagccaat

SEQ ID NO: 5523224 - DNA, 25 bp, Homo sapien
tcaataaagtgatatagccaaccct

SEQ ID NO: 5523225 - DNA, 25 bp, Homo sapien
ttccaggatgggaaactaacatgat

SEQ ID NO: 5523226 - DNA, 25 bp, Homo sapien
aacacatcggggaacttcccactgt

SEQ ID NO: 5523227 - DNA, 25 bp, Homo sapien
gggtgctaatgggcttgctagttac

SEQ ID NO: 5523228 - DNA, 25 bp, Homo sapien
tgtacaaagattttccaggatggga

SEQ ID NO: 5523229 - DNA, 25 bp, Homo sapien
tcagccaataggcattggtacaacc

SEQ ID NO: 5523230 - DNA, 25 bp, Homo sapien
gttacattctgtgcacaaaggaagg

SEQ ID NO: 5523231 - DNA, 25 bp, Homo sapien
agaattatctgggtgctaatgggct

SEQ ID NO: 5523232 - DNA, 25 bp, Homo sapien
ttcattgcaacatagaagagaagag

SEQ ID NO: 5523233 - DNA, 25 bp, Homo sapien
ctttagagtaagactagaatacatt

SEQ ID NO: 5523234 - DNA, 25 bp, Homo sapien
agaaaataagtgatagacgtgacaa

SEQ ID NO: 5523235 - DNA, 25 bp, Homo sapien
aactaatccaggattggggtcaggg

SEQ ID NO: 5523236 - DNA, 25 bp, Homo sapien
caaagcctgaagaatgaatgaaagt

SEQ ID NO: 5523237 - DNA, 25 bp, Homo sapien
aggggcaactaatccaggattgggg

SEQ ID NO: 5523238 - DNA, 25 bp, Homo sapien
gggcaactaatccaggattggggtc

SEQ ID NO: 5523239 - DNA, 25 bp, Homo sapien
agtagtcagaaaataagtgatagac

SEQ ID NO: 5523240 - DNA, 25 bp, Homo sapien
gtaaagggcttcaagcaattgtaaa

SEQ ID NO: 5523241 - DNA, 25 bp, Homo sapien
aaagtaaagggcttcaagcaattgt

SEQ ID NO: 5523242 - DNA, 25 bp, Homo sapien
aaataagtgatagacgtgacaaagc

SEQ ID NO: 5523243 - DNA, 25 bp, Homo sapien
gacaaagcctgaagaatgaatgaaa

SEQ ID NO: 5523244 - DNA, 25 bp, Homo sapien
tcagaaaataagtgatagacgtgac

SEQ ID NO: 5523245 - DNA, 25 bp, Homo sapien
aatttaacactggtctaagggagat

SEQ ID NO: 5523246 - DNA, 25 bp, Homo sapien
atatcctgagggctacaactgtatt

SEQ ID NO: 5523247 - DNA, 25 bp, Homo sapien
caaaatgtgtctgcaggatactcca

SEQ ID NO: 5523248 - DNA, 25 bp, Homo sapien
tggttgtagaatgttgtagtacata

SEQ ID NO: 5523249 - DNA, 25 bp, Homo sapien
tgagattgttggtttactgactgtc

SEQ ID NO: 5523250 - DNA, 25 bp, Homo sapien
acctgtcccagtacctcaacaaaat

SEQ ID NO: 5523251 - DNA, 25 bp, Homo sapien
aaactaaacaagaatcggttatcac

SEQ ID NO: 5523252 - DNA, 25 bp, Homo sapien
caataaaagtataatgaagatccct

SEQ ID NO: 5523253 - DNA, 25 bp, Homo sapien
tgtagtacataaagcaaaatgtgtc

SEQ ID NO: 5523254 - DNA, 25 bp, Homo sapien
taagggagatatagaattaaactaa

SEQ ID NO: 5523255 - DNA, 25 bp, Homo sapien
aaggaaaactggagtcacaaaacat

SEQ ID NO: 5523256 - DNA, 25 bp, Homo sapien
gagagccgtaaatgaaaagtgcatt

SEQ ID NO: 5523257 - DNA, 25 bp, Homo sapien
ggtgatgtgccacttggatagttcc

SEQ ID NO: 5523258 - DNA, 25 bp, Homo sapien
cccagttccccggaatgtcagggtc

SEQ ID NO: 5523259 - DNA, 25 bp, Homo sapien
ggccacttgagtgtcacgaggcaga

SEQ ID NO: 5523260 - DNA, 25 bp, Homo sapien
aggaaagaaaggactgttgttgcct

SEQ ID NO: 5523261 - DNA, 25 bp, Homo sapien
agcacttagggccaagattgtcgtg

SEQ ID NO: 5523262 - DNA, 25 bp, Homo sapien
agtgcattcacggagaacatgctcc

SEQ ID NO: 5523263 - DNA, 25 bp, Homo sapien
atgtggaggaagtaaggtttcacaa

SEQ ID NO: 5523264 - DNA, 25 bp, Homo sapien
tgccagtgctcatatctgaggccac

SEQ ID NO: 5523265 - DNA, 25 bp, Homo sapien
cccggcagcttctctctaagtgacc

SEQ ID NO: 5523266 - DNA, 25 bp, Homo sapien
gccaggacatcccagtaccccactt

SEQ ID NO: 5523267 - DNA, 25 bp, Homo sapien
tcaatttgaggtatcatgacaaaaa

SEQ ID NO: 5523268 - DNA, 25 bp, Homo sapien
caatttgcttccaaacaggagtctc

SEQ ID NO: 5523269 - DNA, 25 bp, Homo sapien
aataacatcaactcacaaatgactt

SEQ ID NO: 5523270 - DNA, 25 bp, Homo sapien
ctaaagtatgtcctgttaaaccaac

SEQ ID NO: 5523271 - DNA, 25 bp, Homo sapien
agaataagttgactgaaaagcagtt

SEQ ID NO: 5523272 - DNA, 25 bp, Homo sapien
agagattgtgattccacagagaatt

SEQ ID NO: 5523273 - DNA, 25 bp, Homo sapien
cacaaatgacttttagaagccaaat

SEQ ID NO: 5523274 - DNA, 25 bp, Homo sapien
caaaggtctttatgtcaatgtatgt

SEQ ID NO: 5523275 - DNA, 25 bp, Homo sapien
caaacaggagtctcttttgagaagc

SEQ ID NO: 5523276 - DNA, 25 bp, Homo sapien
ttttagagaatagtatgtaatacat

SEQ ID NO: 5523277 - DNA, 25 bp, Homo sapien
tctgacctataaaactaggaagtat

SEQ ID NO: 5523278 - DNA, 25 bp, Homo sapien
gaccaaatccgtccataaaaatacg

SEQ ID NO: 5523279 - DNA, 25 bp, Homo sapien
cgtatttttatggacggatttggtc

SEQ ID NO: 5523280 - DNA, 25 bp, Homo sapien
ggtccctgggaccttgagtcttcag

SEQ ID NO: 5523281 - DNA, 25 bp, Homo sapien
gtactggcaccagaggatcttgatc

SEQ ID NO: 5523282 - DNA, 25 bp, Homo sapien
tctttacaggctcagagaccatgga

SEQ ID NO: 5523283 - DNA, 25 bp, Homo sapien
tgagccagagggaccatttttatta

SEQ ID NO: 5523284 - DNA, 25 bp, Homo sapien
tctcaatgtattccgtatggggggc

SEQ ID NO: 5523285 - DNA, 25 bp, Homo sapien
gtcaaggggagctctcaatgtattc

SEQ ID NO: 5523286 - DNA, 25 bp, Homo sapien
ttgactggccctgagaccactaaac

SEQ ID NO: 5523287 - DNA, 25 bp, Homo sapien
aggggagcactctcactgtcagctc

SEQ ID NO: 5523288 - DNA, 25 bp, Homo sapien
gattcttcagaggttcagggactat

SEQ ID NO: 5523289 - DNA, 25 bp, Homo sapien
caggtgccacaactgcagaatcgtg

SEQ ID NO: 5523290 - DNA, 25 bp, Homo sapien
tgattcttcacggactcggggacca

SEQ ID NO: 5523291 - DNA, 25 bp, Homo sapien
catcacagatatgtacacagatgtg

SEQ ID NO: 5523292 - DNA, 25 bp, Homo sapien
aatttagcttagaggctgacacata

SEQ ID NO: 5523293 - DNA, 25 bp, Homo sapien
tccagggtattttggaagtcctgtg

SEQ ID NO: 5523294 - DNA, 25 bp, Homo sapien
acacagatgtgcacaacacacagat

SEQ ID NO: 5523295 - DNA, 25 bp, Homo sapien
aacagatcatggtaatggaatgggg

SEQ ID NO: 5523296 - DNA, 25 bp, Homo sapien
aaacctaagcaaaagatggaaggag

SEQ ID NO: 5523297 - DNA, 25 bp, Homo sapien
aacagtcacagcacatataccaaac

SEQ ID NO: 5523298 - DNA, 25 bp, Homo sapien
caatacagttaaatgtaacagtcac

SEQ ID NO: 5523299 - DNA, 25 bp, Homo sapien
gatgtgccacccctatctgccaagg

SEQ ID NO: 5523300 - DNA, 25 bp, Homo sapien
accaaacaacgaattcatcacagat

SEQ ID NO: 5523301 - DNA, 25 bp, Homo sapien
tctgccaagggctcacaaataaatg

SEQ ID NO: 5523302 - DNA, 25 bp, Homo sapien
tccagcagtcttacagcaattgaac

SEQ ID NO: 5523303 - DNA, 25 bp, Homo sapien
ggggatatggattcctgtcagtgac

SEQ ID NO: 5523304 - DNA, 25 bp, Homo sapien
ggcccaagcacaaaacaagaccaag

SEQ ID NO: 5523305 - DNA, 25 bp, Homo sapien
actttcacccatgtgaggatcggcc

SEQ ID NO: 5523306 - DNA, 25 bp, Homo sapien
cattcagaagtttggggatatggat

SEQ ID NO: 5523307 - DNA, 25 bp, Homo sapien
tttgaaagaatgctaaagatgttat

SEQ ID NO: 5523308 - DNA, 25 bp, Homo sapien
aaggcagttgctgtgtttggtggat

SEQ ID NO: 5523309 - DNA, 25 bp, Homo sapien
tgaccttttttgtggggctggctat

SEQ ID NO: 5523310 - DNA, 25 bp, Homo sapien
aaatgctacccaaataaccagctcc

SEQ ID NO: 5523311 - DNA, 25 bp, Homo sapien
ggctggctattgggactcttttttc

SEQ ID NO: 5523312 - DNA, 25 bp, Homo sapien
gctagccttcagcgaggatgtgctg

SEQ ID NO: 5523313 - DNA, 25 bp, Homo sapien
cggtcggacgtcacggtagtgttca

SEQ ID NO: 5523314 - DNA, 25 bp, Homo sapien
tgaacactaccgtgacgtccgaccg

SEQ ID NO: 5523315 - DNA, 25 bp, Homo sapien
aaaaaagctaagtaggagcagatgt

SEQ ID NO: 5523316 - DNA, 25 bp, Homo sapien
aatgggaaaatgtcaaaaatgttcc

SEQ ID NO: 5523317 - DNA, 25 bp, Homo sapien
ccatccaaggaatgttagaaggtcc

SEQ ID NO: 5523318 - DNA, 25 bp, Homo sapien
gctgggaagccactgcctctactac

SEQ ID NO: 5523319 - DNA, 25 bp, Homo sapien
aaaaggaatactgtgtaagaaccac

SEQ ID NO: 5523320 - DNA, 25 bp, Homo sapien
tacaagccttagccccaaggctggg

SEQ ID NO: 5523321 - DNA, 25 bp, Homo sapien
aacagtcagcatagaatgtagagac

SEQ ID NO: 5523322 - DNA, 25 bp, Homo sapien
gaaaagaaaggaggagtctctttca

SEQ ID NO: 5523323 - DNA, 25 bp, Homo sapien
tgaaaagctaagaacagcctttatt

SEQ ID NO: 5523324 - DNA, 25 bp, Homo sapien
gtacataagttggtcacagtgacac

SEQ ID NO: 5523325 - DNA, 25 bp, Homo sapien
taccattcaaactgggggagtagag

SEQ ID NO: 5523326 - DNA, 25 bp, Homo sapien
ggaacctgtggccctcagtgacaca

SEQ ID NO: 5523327 - DNA, 25 bp, Homo sapien
gacagatgttagaggaacctgtggc

SEQ ID NO: 5523328 - DNA, 25 bp, Homo sapien
ttcacacaactgaaaggagagaaat

SEQ ID NO: 5523329 - DNA, 25 bp, Homo sapien
tgaagtgacagtgacagatgttaga

SEQ ID NO: 5523330 - DNA, 25 bp, Homo sapien
tttaatttgctaatggaacccaggc

SEQ ID NO: 5523331 - DNA, 25 bp, Homo sapien
ctgtccagaactcttggaggccagg

SEQ ID NO: 5523332 - DNA, 25 bp, Homo sapien
tgtccctccaccgagcatctgggca

SEQ ID NO: 5523333 - DNA, 25 bp, Homo sapien
accaactcccaagtagtagcaggct

SEQ ID NO: 5523334 - DNA, 25 bp, Homo sapien
aaggagagaaatcggaaatcactct

SEQ ID NO: 5523335 - DNA, 25 bp, Homo sapien
tcctattgcagagattcagaagttc

SEQ ID NO: 5523336 - DNA, 25 bp, Homo sapien
aggcctcatgagtcaaaggccatca

SEQ ID NO: 5523337 - DNA, 25 bp, Homo sapien
tcagtttaccaagatgatgccagta

SEQ ID NO: 5523338 - DNA, 25 bp, Homo sapien
ctctctagaaacagtgcactgattt

SEQ ID NO: 5523339 - DNA, 25 bp, Homo sapien
ttgggaacaatttgatgaagtttgc

SEQ ID NO: 5523340 - DNA, 25 bp, Homo sapien
cgcgtacagaagctaacggaacttg

SEQ ID NO: 5523341 - DNA, 25 bp, Homo sapien
aaaagtatatggtttggacaggtat

SEQ ID NO: 5523342 - DNA, 25 bp, Homo sapien
aagacaaaaagagcagaatcagtta

SEQ ID NO: 5523343 - DNA, 25 bp, Homo sapien
tcagccccctcgcctctggaagaga

SEQ ID NO: 5523344 - DNA, 25 bp, Homo sapien
tctggaagagacaccagactgcaaa

SEQ ID NO: 5523345 - DNA, 25 bp, Homo sapien
gatgccagtatagctagtgagatgc

SEQ ID NO: 5523346 - DNA, 25 bp, Homo sapien
gcagaatcagttagtgtgacacaac

SEQ ID NO: 5523347 - DNA, 25 bp, Homo sapien
acaaagtgtttgtaaatgcagaggg

SEQ ID NO: 5523348 - DNA, 25 bp, Homo sapien
gtcatagtgtatgccaaggatttac

SEQ ID NO: 5523349 - DNA, 25 bp, Homo sapien
ctaagtaaacagaatgacatggaat

SEQ ID NO: 5523350 - DNA, 25 bp, Homo sapien
aacggcaacatcgtaataagattgt

SEQ ID NO: 5523351 - DNA, 25 bp, Homo sapien
ctagaaacaaataaagcatacactc

SEQ ID NO: 5523352 - DNA, 25 bp, Homo sapien
atcacagtggagattaacttatgtt

SEQ ID NO: 5523353 - DNA, 25 bp, Homo sapien
tcaagtattcagagagcagtacatt

SEQ ID NO: 5523354 - DNA, 25 bp, Homo sapien
taagattgtgaaaaggtataactaa

SEQ ID NO: 5523355 - DNA, 25 bp, Homo sapien
tgggagagtaatgaagttgtttgtc

SEQ ID NO: 5523356 - DNA, 25 bp, Homo sapien
tctcagctatcagatgtgggatttc

SEQ ID NO: 5523357 - DNA, 25 bp, Homo sapien
caaggatttacagcactctagaatt

SEQ ID NO: 5523358 - DNA, 25 bp, Homo sapien
gggtagtgcaagtgctaagtaaaca

SEQ ID NO: 5523359 - DNA, 25 bp, Homo sapien
gtgcccacatcctggctgcgagaag

SEQ ID NO: 5523360 - DNA, 25 bp, Homo sapien
ggcctacacctcggagacctacctg

SEQ ID NO: 5523361 - DNA, 25 bp, Homo sapien
agcacaacaaggacaagccctacaa

SEQ ID NO: 5523362 - DNA, 25 bp, Homo sapien
gataagtccttccggcagctctccc

SEQ ID NO: 5523363 - DNA, 25 bp, Homo sapien
catcaagcacgccaaggcctactgc

SEQ ID NO: 5523364 - DNA, 25 bp, Homo sapien
ctgcgagaaggctttcactcagctc

SEQ ID NO: 5523365 - DNA, 25 bp, Homo sapien
aagtgtcccaactgctaccgggcct

SEQ ID NO: 5523366 - DNA, 25 bp, Homo sapien
accgggcctattcggactccgcttc

SEQ ID NO: 5523367 - DNA, 25 bp, Homo sapien
tacaggtgtaaggtatgcccactga

SEQ ID NO: 5523368 - DNA, 25 bp, Homo sapien
tccactccaagtcgcacacagaggc

SEQ ID NO: 5523369 - DNA, 25 bp, Homo sapien
gggcgtcaagccctaccactgctcc

SEQ ID NO: 5523370 - DNA, 25 bp, Homo sapien
gacggaattgggaccccagtgtcac

SEQ ID NO: 5523371 - DNA, 25 bp, Homo sapien
gtgacactggggtcccaattccgtc

SEQ ID NO: 5523372 - DNA, 25 bp, Homo sapien
ttggcaacactggacttgtgtgtac

SEQ ID NO: 5523373 - DNA, 25 bp, Homo sapien
atcactgtaagtaggctgacagagg

SEQ ID NO: 5523374 - DNA, 25 bp, Homo sapien
tgaggggaccaagcttctttctata

SEQ ID NO: 5523375 - DNA, 25 bp, Homo sapien
acacaacagcatagaactgagggga

SEQ ID NO: 5523376 - DNA, 25 bp, Homo sapien
atgtgctccaggactagttgggcta

SEQ ID NO: 5523377 - DNA, 25 bp, Homo sapien
gcacaaagcgaaccaggtcagattt

SEQ ID NO: 5523378 - DNA, 25 bp, Homo sapien
gattgctctgcaacttccggggaac

SEQ ID NO: 5523379 - DNA, 25 bp, Homo sapien
tccggggaacattatctgagtcaca

SEQ ID NO: 5523380 - DNA, 25 bp, Homo sapien
tagttgggctatgacagacaccaca

SEQ ID NO: 5523381 - DNA, 25 bp, Homo sapien
gacggcatgtaccaaccaggccaca

SEQ ID NO: 5523382 - DNA, 25 bp, Homo sapien
gaaaaatcagcacaagtaaggaact

SEQ ID NO: 5523383 - DNA, 25 bp, Homo sapien
tctggtgcacacaaatgtacattaa

SEQ ID NO: 5523384 - DNA, 25 bp, Homo sapien
taaaaggcaagtctttctggtattc

SEQ ID NO: 5523385 - DNA, 25 bp, Homo sapien
cctctcccttggctcgctggcaaat

SEQ ID NO: 5523386 - DNA, 25 bp, Homo sapien
ataaaaaagtgtaagagtacatttc

SEQ ID NO: 5523387 - DNA, 25 bp, Homo sapien
aagagcacattccattctggtgcac

SEQ ID NO: 5523388 - DNA, 25 bp, Homo sapien
tcaaatacatggataagataacaca

SEQ ID NO: 5523389 - DNA, 25 bp, Homo sapien
gctcgctggcaaatgattcacaacc

SEQ ID NO: 5523390 - DNA, 25 bp, Homo sapien
gagtacatttcaagggaatccctgc

SEQ ID NO: 5523391 - DNA, 25 bp, Homo sapien
tgggatatgtgacttaaggaataaa

SEQ ID NO: 5523392 - DNA, 25 bp, Homo sapien
ggcaggatgaggaaatgatttatca

SEQ ID NO: 5523393 - DNA, 25 bp, Homo sapien
gtctgaagcaaccactgtccagctc

SEQ ID NO: 5523394 - DNA, 25 bp, Homo sapien
acaccaggtattaaagtacaacaaa

SEQ ID NO: 5523395 - DNA, 25 bp, Homo sapien
aaacatagtaacgtcaatattttat

SEQ ID NO: 5523396 - DNA, 25 bp, Homo sapien
ttggaatcactggtcatctaagagg

SEQ ID NO: 5523397 - DNA, 25 bp, Homo sapien
atttgtagacaatgtgctttgaaac

SEQ ID NO: 5523398 - DNA, 25 bp, Homo sapien
aatcagtgtttatgtacaaatatta

SEQ ID NO: 5523399 - DNA, 25 bp, Homo sapien
tgggcaaacaatctccttggtggtc

SEQ ID NO: 5523400 - DNA, 25 bp, Homo sapien
tttctggaactgtacaccaggtatt

SEQ ID NO: 5523401 - DNA, 25 bp, Homo sapien
gaaactctgggcaaacaatctcctt

SEQ ID NO: 5523402 - DNA, 25 bp, Homo sapien
atgctctattagatctgatgttctc

SEQ ID NO: 5523403 - DNA, 25 bp, Homo sapien
gtcatctaagaggaatattaatatc

SEQ ID NO: 5523404 - DNA, 25 bp, Homo sapien
gacaatgtgctttgaaactctgggc

SEQ ID NO: 5523405 - DNA, 25 bp, Homo sapien
aaaattcgttagcttcatggagagg

SEQ ID NO: 5523406 - DNA, 25 bp, Homo sapien
cctctccatgaagctaacgaatttt

SEQ ID NO: 5523407 - DNA, 25 bp, Homo sapien
gcagggttatgagaataaagctaca

SEQ ID NO: 5523408 - DNA, 25 bp, Homo sapien
cagatgtctcaagctcatttatgcc

SEQ ID NO: 5523409 - DNA, 25 bp, Homo sapien
tgctctcatggagctgtggtctggt

SEQ ID NO: 5523410 - DNA, 25 bp, Homo sapien
taagtgctagtgatatattggtaag

SEQ ID NO: 5523411 - DNA, 25 bp, Homo sapien
ggggatatctcacacaggatggtta

SEQ ID NO: 5523412 - DNA, 25 bp, Homo sapien
gctcaaggaagccttctgtggccct

SEQ ID NO: 5523413 - DNA, 25 bp, Homo sapien
attggtaagcaaagaccttgctctc

SEQ ID NO: 5523414 - DNA, 25 bp, Homo sapien
gtgtaccaggcatagttttaagtgc

SEQ ID NO: 5523415 - DNA, 25 bp, Homo sapien
tataaatctgtgagaagtgttataa

SEQ ID NO: 5523416 - DNA, 25 bp, Homo sapien
tcactttctcaagggctcaaggaag

SEQ ID NO: 5523417 - DNA, 25 bp, Homo sapien
ccttcagaactcagatgcaaatcac

SEQ ID NO: 5523418 - DNA, 25 bp, Homo sapien
ttacactcaggaacactaatgaaat

SEQ ID NO: 5523419 - DNA, 25 bp, Homo sapien
cagccttggtgacaaggaagataat

SEQ ID NO: 5523420 - DNA, 25 bp, Homo sapien
aatgaatatatgcggaaacaaacat

SEQ ID NO: 5523421 - DNA, 25 bp, Homo sapien
aatgcaaatttacccaaacggtgct

SEQ ID NO: 5523422 - DNA, 25 bp, Homo sapien
atcttccctaccctcaatgaccacc

SEQ ID NO: 5523423 - DNA, 25 bp, Homo sapien
ttagatagctaaaaggttataaaca

SEQ ID NO: 5523424 - DNA, 25 bp, Homo sapien
tattgaatgatggaagacaaggaaa

SEQ ID NO: 5523425 - DNA, 25 bp, Homo sapien
cagctatcctgagtatggaatacgt

SEQ ID NO: 5523426 - DNA, 25 bp, Homo sapien
atggcttcagtaaagtttgcaagta

SEQ ID NO: 5523427 - DNA, 25 bp, Homo sapien
aaggaagataatgaatatggcttca

SEQ ID NO: 5523428 - DNA, 25 bp, Homo sapien
atgaccaccactcgagaaaagttac

SEQ ID NO: 5523429 - DNA, 25 bp, Homo sapien
cagtatctagtaaggaggaaaacag

SEQ ID NO: 5523430 - DNA, 25 bp, Homo sapien
attcacatgtaagaggcagaaaaga

SEQ ID NO: 5523431 - DNA, 25 bp, Homo sapien
ttctagcaaagtaaaaagccagtaa

SEQ ID NO: 5523432 - DNA, 25 bp, Homo sapien
tggtctaatgtcaacgtgatgcttt

SEQ ID NO: 5523433 - DNA, 25 bp, Homo sapien
agtagttgggaatcaaaagtatttg

SEQ ID NO: 5523434 - DNA, 25 bp, Homo sapien
agaccagtaaggctcttgggtttcc

SEQ ID NO: 5523435 - DNA, 25 bp, Homo sapien
aaaaattctcactatgggaaagcac

SEQ ID NO: 5523436 - DNA, 25 bp, Homo sapien
gtgagagaagcaagaagtctttata

SEQ ID NO: 5523437 - DNA, 25 bp, Homo sapien
taaaaagctgtcagtcttggaagtt

SEQ ID NO: 5523438 - DNA, 25 bp, Homo sapien
aaaattgcagcggtaaagtcagttt

SEQ ID NO: 5523439 - DNA, 25 bp, Homo sapien
ggaagttacagaagaccagtaaggc

SEQ ID NO: 5523440 - DNA, 25 bp, Homo sapien
ggctgaccttggctctccatctggt

SEQ ID NO: 5523441 - DNA, 25 bp, Homo sapien
accagatggagagccaaggtcagcc

SEQ ID NO: 5523442 - DNA, 25 bp, Homo sapien
tcttttgtgccactggaggtggagc

SEQ ID NO: 5523443 - DNA, 25 bp, Homo sapien
ttattcaaatgggcagagataaaaa

SEQ ID NO: 5523444 - DNA, 25 bp, Homo sapien
ggagcgtacaaatttgagcaggatt

SEQ ID NO: 5523445 - DNA, 25 bp, Homo sapien
gcttttattcaaatgggcagagata

SEQ ID NO: 5523446 - DNA, 25 bp, Homo sapien
ggacgcaaaggcaatctgcacttta

SEQ ID NO: 5523447 - DNA, 25 bp, Homo sapien
agagataaaaacttctcgagtctcc

SEQ ID NO: 5523448 - DNA, 25 bp, Homo sapien
tatacgctttcccactcatgacatg

SEQ ID NO: 5523449 - DNA, 25 bp, Homo sapien
aggcaatctgcactttatacgcttt

SEQ ID NO: 5523450 - DNA, 25 bp, Homo sapien
gtggagcgtacaaatttgagcagga

SEQ ID NO: 5523451 - DNA, 25 bp, Homo sapien
actcatgacatgcctgcttttattc

SEQ ID NO: 5523452 - DNA, 25 bp, Homo sapien
acttctcgagtctccacactgtctt

SEQ ID NO: 5523453 - DNA, 25 bp, Homo sapien
cagtagcaagtggtgaaataatttc

SEQ ID NO: 5523454 - DNA, 25 bp, Homo sapien
aaatgaagattaaaggtacgctagt

SEQ ID NO: 5523455 - DNA, 25 bp, Homo sapien
aaaaataatgccagtagcaagtggt

SEQ ID NO: 5523456 - DNA, 25 bp, Homo sapien
tatggtaatttgattgttaaaaata

SEQ ID NO: 5523457 - DNA, 25 bp, Homo sapien
gagtcaaatgaagattaaaggtacg

SEQ ID NO: 5523458 - DNA, 25 bp, Homo sapien
tgaagattaaaggtacgctagtgat

SEQ ID NO: 5523459 - DNA, 25 bp, Homo sapien
gattaaaggtacgctagtgatagga

SEQ ID NO: 5523460 - DNA, 25 bp, Homo sapien
gttaaaaataatgccagtagcaagt

SEQ ID NO: 5523461 - DNA, 25 bp, Homo sapien
ctcacagtatgcattttttagctta

SEQ ID NO: 5523462 - DNA, 25 bp, Homo sapien
gtcaaatgaagattaaaggtacgct

SEQ ID NO: 5523463 - DNA, 25 bp, Homo sapien
ctagtgataggagttggccatctag

SEQ ID NO: 5523464 - DNA, 25 bp, Homo sapien
ggcgaccggcgcgtccctccactcc

SEQ ID NO: 5523465 - DNA, 25 bp, Homo sapien
ggagtggagggacgcgccggtcgcc

SEQ ID NO: 5523466 - DNA, 25 bp, Homo sapien
gggcgccaagatttccaagcaaccc

SEQ ID NO: 5523467 - DNA, 25 bp, Homo sapien
gatatgtgtgctgaaagaactttgc

SEQ ID NO: 5523468 - DNA, 25 bp, Homo sapien
attgtccttcataagggatggcctc

SEQ ID NO: 5523469 - DNA, 25 bp, Homo sapien
gaagcatccttaggcagcacgtgac

SEQ ID NO: 5523470 - DNA, 25 bp, Homo sapien
aatttattagttcgtgttgggccac

SEQ ID NO: 5523471 - DNA, 25 bp, Homo sapien
aaccaaggctgttactactgagggg

SEQ ID NO: 5523472 - DNA, 25 bp, Homo sapien
agcatgaatgcccttgttatagccc

SEQ ID NO: 5523473 - DNA, 25 bp, Homo sapien
tggacccaggaacagaacttggtct

SEQ ID NO: 5523474 - DNA, 25 bp, Homo sapien
cttattgtgtagcacggctgtgagg

SEQ ID NO: 5523475 - DNA, 25 bp, Homo sapien
cacgtgactgcatgcagatatgtgt

SEQ ID NO: 5523476 - DNA, 25 bp, Homo sapien
ccaggacactgattaacagcacagc

SEQ ID NO: 5523477 - DNA, 25 bp, Homo sapien
gtgagattaagtatagagtgaagac

SEQ ID NO: 5523478 - DNA, 25 bp, Homo sapien
tgttcaggagtgcagatgttctttg

SEQ ID NO: 5523479 - DNA, 25 bp, Homo sapien
taggaccttgacagacaaatcgatt

SEQ ID NO: 5523480 - DNA, 25 bp, Homo sapien
tgttaggcagaatgctcccctaccc

SEQ ID NO: 5523481 - DNA, 25 bp, Homo sapien
ctgggcagtagaggaattccatata

SEQ ID NO: 5523482 - DNA, 25 bp, Homo sapien
tatatacagcaccatagtccagggg

SEQ ID NO: 5523483 - DNA, 25 bp, Homo sapien
tcctgagagcattagattgggcaaa

SEQ ID NO: 5523484 - DNA, 25 bp, Homo sapien
caggatttcttcagggtgtgttcag

SEQ ID NO: 5523485 - DNA, 25 bp, Homo sapien
ttacaaggtcaattcccaggatttc

SEQ ID NO: 5523486 - DNA, 25 bp, Homo sapien
aggagaaagctatcttccagaggct

SEQ ID NO: 5523487 - DNA, 25 bp, Homo sapien
ctgcctcatcaacacgtcaccaccc

SEQ ID NO: 5523488 - DNA, 25 bp, Homo sapien
ttcaggaagccacagtgttcaactg

SEQ ID NO: 5523489 - DNA, 25 bp, Homo sapien
acaagatgccgatagtagctggctt

SEQ ID NO: 5523490 - DNA, 25 bp, Homo sapien
agtagctggcttattaatgtacatt

SEQ ID NO: 5523491 - DNA, 25 bp, Homo sapien
ttgatatttcaggaagccacagtgt

SEQ ID NO: 5523492 - DNA, 25 bp, Homo sapien
atttttacaagatgccgatagtagc

SEQ ID NO: 5523493 - DNA, 25 bp, Homo sapien
agtaatgcaaagaaaattgcaatat

SEQ ID NO: 5523494 - DNA, 25 bp, Homo sapien
aaagaaaattgcaatatgattatac

SEQ ID NO: 5523495 - DNA, 25 bp, Homo sapien
atttttttagacaggttatcactct

SEQ ID NO: 5523496 - DNA, 25 bp, Homo sapien
aggggtgtgattgtagctcattgca

SEQ ID NO: 5523497 - DNA, 25 bp, Homo sapien
caactgtgaactacagagtcctgta

SEQ ID NO: 5523498 - DNA, 25 bp, Homo sapien
tcaactatgtgatatccaggatttt

SEQ ID NO: 5523499 - DNA, 25 bp, Homo sapien
cgaccctcgtttgacccctgggagc

SEQ ID NO: 5523500 - DNA, 25 bp, Homo sapien
aattcggccgtttcctactgacagg

SEQ ID NO: 5523501 - DNA, 25 bp, Homo sapien
caggtatattgagaaaaaaagcagt

SEQ ID NO: 5523502 - DNA, 25 bp, Homo sapien
taataaaatcctagacagaactttc

SEQ ID NO: 5523503 - DNA, 25 bp, Homo sapien
tcctctttatccaccctgcagccgg

SEQ ID NO: 5523504 - DNA, 25 bp, Homo sapien
tgcatataatagtcccgtgtcagtt

SEQ ID NO: 5523505 - DNA, 25 bp, Homo sapien
gtctgaaaatttttgcacgtggatt

SEQ ID NO: 5523506 - DNA, 25 bp, Homo sapien
gagtccagtttggtgatgtccattt

SEQ ID NO: 5523507 - DNA, 25 bp, Homo sapien
aaacttgcactgataaccgccattt

SEQ ID NO: 5523508 - DNA, 25 bp, Homo sapien
accgccattttaccagggcaggatt

SEQ ID NO: 5523509 - DNA, 25 bp, Homo sapien
cagctgtatgtatcctcaaacttgc

SEQ ID NO: 5523510 - DNA, 25 bp, Homo sapien
atcctgtgctacagctcggtggaga

SEQ ID NO: 5523511 - DNA, 25 bp, Homo sapien
taggcaaggagtattcccacctccc

SEQ ID NO: 5523512 - DNA, 25 bp, Homo sapien
tttgtctaaattgtccgcctgtctt

SEQ ID NO: 5523513 - DNA, 25 bp, Homo sapien
acttaacaggagtgtaagctgtgca

SEQ ID NO: 5523514 - DNA, 25 bp, Homo sapien
ctccagcctaggcaaggagtattcc

SEQ ID NO: 5523515 - DNA, 25 bp, Homo sapien
gagaagaaaagtctgccatcccatt

SEQ ID NO: 5523516 - DNA, 25 bp, Homo sapien
gcagtgtctctgtaaactccagcct

SEQ ID NO: 5523517 - DNA, 25 bp, Homo sapien
catattgaaaggatctaacgggtac

SEQ ID NO: 5523518 - DNA, 25 bp, Homo sapien
ctcagctgttacaagaaactgcaca

SEQ ID NO: 5523519 - DNA, 25 bp, Homo sapien
tgtctgtcctcatgagttgctaggg

SEQ ID NO: 5523520 - DNA, 25 bp, Homo sapien
gagagaagcacaaaactgtcatatt

SEQ ID NO: 5523521 - DNA, 25 bp, Homo sapien
ctgaaagaagaggtatttttccacc

SEQ ID NO: 5523522 - DNA, 25 bp, Homo sapien
attggcatagctatatggtagtctc

SEQ ID NO: 5523523 - DNA, 25 bp, Homo sapien
gtcctcaataaagtaacacagtaac

SEQ ID NO: 5523524 - DNA, 25 bp, Homo sapien
caccaccactccaaggaacacgtaa

SEQ ID NO: 5523525 - DNA, 25 bp, Homo sapien
aatccacataaactctgaaagaaga

SEQ ID NO: 5523526 - DNA, 25 bp, Homo sapien
acaatgaacagagttatgaagcttc

SEQ ID NO: 5523527 - DNA, 25 bp, Homo sapien
aagaaagctaagatttacaatgaac

SEQ ID NO: 5523528 - DNA, 25 bp, Homo sapien
gtaacacagtaacaaaacatgtaac

SEQ ID NO: 5523529 - DNA, 25 bp, Homo sapien
tacaaattgcaaatgtgagtacttg

SEQ ID NO: 5523530 - DNA, 25 bp, Homo sapien
aaggtaaggcacagctcaagcttat

SEQ ID NO: 5523531 - DNA, 25 bp, Homo sapien
ttaacaacacaaagggactagctgt

SEQ ID NO: 5523532 - DNA, 25 bp, Homo sapien
ggagttccccttaggatggccactg

SEQ ID NO: 5523533 - DNA, 25 bp, Homo sapien
agcaacacccatttgggagttcccc

SEQ ID NO: 5523534 - DNA, 25 bp, Homo sapien
gggactgcctagaaagacaggcagc

SEQ ID NO: 5523535 - DNA, 25 bp, Homo sapien
catttttcctctagggggactgcct

SEQ ID NO: 5523536 - DNA, 25 bp, Homo sapien
ttcctcgggaaggtcatcctgtccc

SEQ ID NO: 5523537 - DNA, 25 bp, Homo sapien
gaaaggcatcttacacccacggtgc

SEQ ID NO: 5523538 - DNA, 25 bp, Homo sapien
ggcagccaagcagcctagatctata

SEQ ID NO: 5523539 - DNA, 25 bp, Homo sapien
tatccaaagcctctacccgcatacc

SEQ ID NO: 5523540 - DNA, 25 bp, Homo sapien
gagcagaagaaaacctatccaaagc

SEQ ID NO: 5523541 - DNA, 25 bp, Homo sapien
ccgcatacctcagagcttggggctt

SEQ ID NO: 5523542 - DNA, 25 bp, Homo sapien
aggcaacctgcaggcactgccaaat

SEQ ID NO: 5523543 - DNA, 25 bp, Homo sapien
cacggagtaggaactctccaacatc

SEQ ID NO: 5523544 - DNA, 25 bp, Homo sapien
tcagtgagatttttagcagtagatt

SEQ ID NO: 5523545 - DNA, 25 bp, Homo sapien
agctgggatgggttgtttattttca

SEQ ID NO: 5523546 - DNA, 25 bp, Homo sapien
gaaacaaagaacatgaacaatttac

SEQ ID NO: 5523547 - DNA, 25 bp, Homo sapien
gctgcaaaccatttagggagtcatc

SEQ ID NO: 5523548 - DNA, 25 bp, Homo sapien
tcattcgcagactatcaggctcatt

SEQ ID NO: 5523549 - DNA, 25 bp, Homo sapien
aaaagcttacagctgggatgggttg

SEQ ID NO: 5523550 - DNA, 25 bp, Homo sapien
cttgcagaatgaacaaacgagcacg

SEQ ID NO: 5523551 - DNA, 25 bp, Homo sapien
tagaactgagttatcacggagtagg

SEQ ID NO: 5523552 - DNA, 25 bp, Homo sapien
gcctgccacctaggaagcattaagc

SEQ ID NO: 5523553 - DNA, 25 bp, Homo sapien
ttcaatgcataggaaagtgtttttc

SEQ ID NO: 5523554 - DNA, 25 bp, Homo sapien
attaactggaatgggatcttggaac

SEQ ID NO: 5523555 - DNA, 25 bp, Homo sapien
aacaattcacatccaagagatttcc

SEQ ID NO: 5523556 - DNA, 25 bp, Homo sapien
cagcaaaagctacggaataattcta

SEQ ID NO: 5523557 - DNA, 25 bp, Homo sapien
gagtaatcagcaaaagctacggaat

SEQ ID NO: 5523558 - DNA, 25 bp, Homo sapien
attaaaaccaaggatccatgagggg

SEQ ID NO: 5523559 - DNA, 25 bp, Homo sapien
caatgtatattgagcactagttcct

SEQ ID NO: 5523560 - DNA, 25 bp, Homo sapien
tatgaaccagtcagctatctgtctt

SEQ ID NO: 5523561 - DNA, 25 bp, Homo sapien
aagggcaaatgagtaaacaacctca

SEQ ID NO: 5523562 - DNA, 25 bp, Homo sapien
ctgagaaaatcttaataaaagccac

SEQ ID NO: 5523563 - DNA, 25 bp, Homo sapien
taaaagccacttgaagtaacaattc

SEQ ID NO: 5523564 - DNA, 25 bp, Homo sapien
acctccaagtaagtctgagaaaatc

SEQ ID NO: 5523565 - DNA, 25 bp, Homo sapien
gaaggtggagctcagcaccatacat

SEQ ID NO: 5523566 - DNA, 25 bp, Homo sapien
gaggttttgccaaacaacagaaggc

SEQ ID NO: 5523567 - DNA, 25 bp, Homo sapien
tacactccctacaggccaggtagac

SEQ ID NO: 5523568 - DNA, 25 bp, Homo sapien
tcagcacagcaaagatcatgtctgt

SEQ ID NO: 5523569 - DNA, 25 bp, Homo sapien
atacatcaggcaaatgtcctgggct

SEQ ID NO: 5523570 - DNA, 25 bp, Homo sapien
ggagtaaagctctgagtgaggtttt

SEQ ID NO: 5523571 - DNA, 25 bp, Homo sapien
tttgagacatgaacaagaaaagagc

SEQ ID NO: 5523572 - DNA, 25 bp, Homo sapien
actcagaaaggtctgagggagtaaa

SEQ ID NO: 5523573 - DNA, 25 bp, Homo sapien
acaacagaaggctaaatctggcttc

SEQ ID NO: 5523574 - DNA, 25 bp, Homo sapien
aggccaggtagacacaagtttctca

SEQ ID NO: 5523575 - DNA, 25 bp, Homo sapien
aagagagagttcctctgaaggtgga

SEQ ID NO: 5523576 - DNA, 25 bp, Homo sapien
gaacagaaggatcctctagaagagc

SEQ ID NO: 5523577 - DNA, 25 bp, Homo sapien
agtgacagtcatgttgaaaagaaag

SEQ ID NO: 5523578 - DNA, 25 bp, Homo sapien
ttcacgaacacgaaaatggaaagtc

SEQ ID NO: 5523579 - DNA, 25 bp, Homo sapien
gcaccccgaccgcttctcccacgac

SEQ ID NO: 5523580 - DNA, 25 bp, Homo sapien
cgacagaactgcacttgtagccgga

SEQ ID NO: 5523581 - DNA, 25 bp, Homo sapien
gagcgaacagaaggatcctctagaa

SEQ ID NO: 5523582 - DNA, 25 bp, Homo sapien
ctctagaagagcctaaagcaaagaa

SEQ ID NO: 5523583 - DNA, 25 bp, Homo sapien
tctgatcggtttcacgaacacgaaa

SEQ ID NO: 5523584 - DNA, 25 bp, Homo sapien
tctcccacgacagaactgcacttgt

SEQ ID NO: 5523585 - DNA, 25 bp, Homo sapien
gcacttgtagccggagacaactgta

SEQ ID NO: 5523586 - DNA, 25 bp, Homo sapien
tagccggagacaactgtaacctctc

SEQ ID NO: 5523587 - DNA, 25 bp, Homo sapien
ttcaaggacgttctacaacagaaac

SEQ ID NO: 5523588 - DNA, 25 bp, Homo sapien
aggttctgtgaagatccgatgacat

SEQ ID NO: 5523589 - DNA, 25 bp, Homo sapien
gagtgtctgcagccccattcgcttt

SEQ ID NO: 5523590 - DNA, 25 bp, Homo sapien
tcgctttgagatgtgaatgtgttaa

SEQ ID NO: 5523591 - DNA, 25 bp, Homo sapien
agcaaaattccaggtctggtggttt

SEQ ID NO: 5523592 - DNA, 25 bp, Homo sapien
caacagaaactggactgtactcttc

SEQ ID NO: 5523593 - DNA, 25 bp, Homo sapien
ttctcgcattgaaaggctgcttggc

SEQ ID NO: 5523594 - DNA, 25 bp, Homo sapien
aaggctgcttggctaaggttctgtg

SEQ ID NO: 5523595 - DNA, 25 bp, Homo sapien
tgttaacccagggtggacaatggtg

SEQ ID NO: 5523596 - DNA, 25 bp, Homo sapien
tatgactactagatcttgctcggtt

SEQ ID NO: 5523597 - DNA, 25 bp, Homo sapien
tatgaaacagaagttaaacagttgt

SEQ ID NO: 5523598 - DNA, 25 bp, Homo sapien
cttctgacaccaggaaagatgagtc

SEQ ID NO: 5523599 - DNA, 25 bp, Homo sapien
gaaaagaagcttatccaacgccaac

SEQ ID NO: 5523600 - DNA, 25 bp, Homo sapien
ctttataatggctcagagaaggaca

SEQ ID NO: 5523601 - DNA, 25 bp, Homo sapien
tgtcaaagagcaagtctgaatctaa

SEQ ID NO: 5523602 - DNA, 25 bp, Homo sapien
gtcccgcctccctgggagctccgca

SEQ ID NO: 5523603 - DNA, 25 bp, Homo sapien
atggagaacctgatcgaacttcgct

SEQ ID NO: 5523604 - DNA, 25 bp, Homo sapien
agctccgcacgggatttgcagattt

SEQ ID NO: 5523605 - DNA, 25 bp, Homo sapien
tcttggtgatagcaaagatgtcctt

SEQ ID NO: 5523606 - DNA, 25 bp, Homo sapien
agcaagtcctcatagccagggtttt

SEQ ID NO: 5523607 - DNA, 25 bp, Homo sapien
gttgtagcaaacagtgacgaatctc

SEQ ID NO: 5523608 - DNA, 25 bp, Homo sapien
tctttcattatggagggaggtttgg

SEQ ID NO: 5523609 - DNA, 25 bp, Homo sapien
aattggcccacagaccggtttgcta

SEQ ID NO: 5523610 - DNA, 25 bp, Homo sapien
taaggctgctgtaccaaaataccac

SEQ ID NO: 5523611 - DNA, 25 bp, Homo sapien
caagttcgcagactctccggtatcc

SEQ ID NO: 5523612 - DNA, 25 bp, Homo sapien
aggaaaatcagacacggcccttctc

SEQ ID NO: 5523613 - DNA, 25 bp, Homo sapien
tgtacaaaaacagacggtgagtaaa

SEQ ID NO: 5523614 - DNA, 25 bp, Homo sapien
ctgggtactgtgcaagatccttcct

SEQ ID NO: 5523615 - DNA, 25 bp, Homo sapien
gcaggtaagtatcagaggtgtttta

SEQ ID NO: 5523616 - DNA, 25 bp, Homo sapien
ccctgggcttaagagatctgtccac

SEQ ID NO: 5523617 - DNA, 25 bp, Homo sapien
tgtgaactgtgtgaactgcataggc

SEQ ID NO: 5523618 - DNA, 25 bp, Homo sapien
ggtatccagatactacggctctcat

SEQ ID NO: 5523619 - DNA, 25 bp, Homo sapien
tccaccgaagcattcacttggcacc

SEQ ID NO: 5523620 - DNA, 25 bp, Homo sapien
aatcccacataacagtagcgatctt

SEQ ID NO: 5523621 - DNA, 25 bp, Homo sapien
atctggtgcaaaaacagaaaggtga

SEQ ID NO: 5523622 - DNA, 25 bp, Homo sapien
acaatatagcatgaagtaaaattac

SEQ ID NO: 5523623 - DNA, 25 bp, Homo sapien
aatgtaaacatgaagcaactaaaac

SEQ ID NO: 5523624 - DNA, 25 bp, Homo sapien
agcgatcttattttacagcgtgtac

SEQ ID NO: 5523625 - DNA, 25 bp, Homo sapien
ttgcagcatgctaacacaaagcgtt

SEQ ID NO: 5523626 - DNA, 25 bp, Homo sapien
catttacagccacataacacacaat

SEQ ID NO: 5523627 - DNA, 25 bp, Homo sapien
ttatgttgaacagctgaatgtaaac

SEQ ID NO: 5523628 - DNA, 25 bp, Homo sapien
gcaaaaacagaaaggtgaacattat

SEQ ID NO: 5523629 - DNA, 25 bp, Homo sapien
caaggaactgattcttatctggtgc

SEQ ID NO: 5523630 - DNA, 25 bp, Homo sapien
aaactaaatatccacctccaaactc

SEQ ID NO: 5523631 - DNA, 25 bp, Homo sapien
atggtcagcagaattatcaagtgtg

SEQ ID NO: 5523632 - DNA, 25 bp, Homo sapien
tataggaaagtctaaagctctaaga

SEQ ID NO: 5523633 - DNA, 25 bp, Homo sapien
atagtagtaaaatggtaaattatcc

SEQ ID NO: 5523634 - DNA, 25 bp, Homo sapien
aactggctttagaactggagcaata

SEQ ID NO: 5523635 - DNA, 25 bp, Homo sapien
taagttaccagaacagttgatgaac

SEQ ID NO: 5523636 - DNA, 25 bp, Homo sapien
tcccaacaaaaagagtccatcaaaa

SEQ ID NO: 5523637 - DNA, 25 bp, Homo sapien
aactgtaggttagctgcttatggtc

SEQ ID NO: 5523638 - DNA, 25 bp, Homo sapien
acatactgttttgaaatgaaggttc

SEQ ID NO: 5523639 - DNA, 25 bp, Homo sapien
atgaaggttcataagttagagggca

SEQ ID NO: 5523640 - DNA, 25 bp, Homo sapien
ttaaaacacaggctattcatgtcac

SEQ ID NO: 5523641 - DNA, 25 bp, Homo sapien
cttatcaaactacaggacttcccac

SEQ ID NO: 5523642 - DNA, 25 bp, Homo sapien
gatgtcaggctggtaatcagagatc

SEQ ID NO: 5523643 - DNA, 25 bp, Homo sapien
aggttagcaaccttgaggtcatacc

SEQ ID NO: 5523644 - DNA, 25 bp, Homo sapien
aatcagagatccatgtgccagatac

SEQ ID NO: 5523645 - DNA, 25 bp, Homo sapien
ctaagcaccaaataggatagttctc

SEQ ID NO: 5523646 - DNA, 25 bp, Homo sapien
acacacaccaaaaagatacagatta

SEQ ID NO: 5523647 - DNA, 25 bp, Homo sapien
aagaaatggcaacaactggtacgta

SEQ ID NO: 5523648 - DNA, 25 bp, Homo sapien
tgaaagaacgcctaaaacctaatca

SEQ ID NO: 5523649 - DNA, 25 bp, Homo sapien
atacgttgtaactgaggggatttgt

SEQ ID NO: 5523650 - DNA, 25 bp, Homo sapien
gggatttgttgatgtcaggctggta

SEQ ID NO: 5523651 - DNA, 25 bp, Homo sapien
ttaccatgagtgaccaggttagcaa

SEQ ID NO: 5523652 - DNA, 25 bp, Homo sapien
atacaaagctgccaatcagagtttc

SEQ ID NO: 5523653 - DNA, 25 bp, Homo sapien
gctgctgctgttgagatactgtgct

SEQ ID NO: 5523654 - DNA, 25 bp, Homo sapien
aaggtggctggaacatctatttttc

SEQ ID NO: 5523655 - DNA, 25 bp, Homo sapien
gctgctaaaaccccatgttggctgc

SEQ ID NO: 5523656 - DNA, 25 bp, Homo sapien
ttgggtacaaggcatttctgacatt

SEQ ID NO: 5523657 - DNA, 25 bp, Homo sapien
tgagatactgtgctttgggagtaaa

SEQ ID NO: 5523658 - DNA, 25 bp, Homo sapien
aagctaccttttgtaagtgccatgt

SEQ ID NO: 5523659 - DNA, 25 bp, Homo sapien
taaaaccccatgttggctgctgctg

SEQ ID NO: 5523660 - DNA, 25 bp, Homo sapien
gattggtcttaaaagactagacagt

SEQ ID NO: 5523661 - DNA, 25 bp, Homo sapien
tccagggaacatactgattggtctt

SEQ ID NO: 5523662 - DNA, 25 bp, Homo sapien
agcacttgttttgggtacaaggcat

SEQ ID NO: 5523663 - DNA, 25 bp, Homo sapien
tctagaagaatgtacaccaaaataa

SEQ ID NO: 5523664 - DNA, 25 bp, Homo sapien
gttgggacaatctctatgggaagca

SEQ ID NO: 5523665 - DNA, 25 bp, Homo sapien
ctattactgcatttgggagggatct

SEQ ID NO: 5523666 - DNA, 25 bp, Homo sapien
atcggatctgaacactggtcttggt

SEQ ID NO: 5523667 - DNA, 25 bp, Homo sapien
gaaaagtaatagtgaagctggccta

SEQ ID NO: 5523668 - DNA, 25 bp, Homo sapien
ggaggttggtatagtaatagctgac

SEQ ID NO: 5523669 - DNA, 25 bp, Homo sapien
tcagacaggtttcagagatggttgg

SEQ ID NO: 5523670 - DNA, 25 bp, Homo sapien
gggagggatctgtcatagcttcctt

SEQ ID NO: 5523671 - DNA, 25 bp, Homo sapien
ttttaggtagaaacaacagcatgct

SEQ ID NO: 5523672 - DNA, 25 bp, Homo sapien
tgactatggacctatggagttggga

SEQ ID NO: 5523673 - DNA, 25 bp, Homo sapien
ggtatatggcatgtgggctagtttc

SEQ ID NO: 5523674 - DNA, 25 bp, Homo sapien
taatcttaggctaagggaaggatgc

SEQ ID NO: 5523675 - DNA, 25 bp, Homo sapien
gagcgaggtgttccgcgcgcgcgcc

SEQ ID NO: 5523676 - DNA, 25 bp, Homo sapien
ggcgcgcgcgcggaacacctcgctc

SEQ ID NO: 5523677 - DNA, 25 bp, Homo sapien
cgcaggagcgaggtgttccgcgcgc

SEQ ID NO: 5523678 - DNA, 25 bp, Homo sapien
gcgcgcggaacacctcgctcctgcg

SEQ ID NO: 5523679 - DNA, 25 bp, Homo sapien
ccgcaggagcgaggtgttccgcgcg

SEQ ID NO: 5523680 - DNA, 25 bp, Homo sapien
cgcgcggaacacctcgctcctgcgg

SEQ ID NO: 5523681 - DNA, 25 bp, Homo sapien
accgtagtatcgtaaggaactcaac

SEQ ID NO: 5523682 - DNA, 25 bp, Homo sapien
gaccacctacccacagagggctcat

SEQ ID NO: 5523683 - DNA, 25 bp, Homo sapien
gcagatgccaagtgtgaccacctac

SEQ ID NO: 5523684 - DNA, 25 bp, Homo sapien
ttcacctggtggtcaccgcacgaca

SEQ ID NO: 5523685 - DNA, 25 bp, Homo sapien
gggcacggtggtgattcaaattgca

SEQ ID NO: 5523686 - DNA, 25 bp, Homo sapien
gggccacgtcaatgctgcagatgcc

SEQ ID NO: 5523687 - DNA, 25 bp, Homo sapien
tgcaggcttgtatatgtgaacactc

SEQ ID NO: 5523688 - DNA, 25 bp, Homo sapien
ctagatgtctgaatacaagctgctc

SEQ ID NO: 5523689 - DNA, 25 bp, Homo sapien
gagccttgggatatgctcctggccc

SEQ ID NO: 5523690 - DNA, 25 bp, Homo sapien
tttgctccacacagagagcggtcag

SEQ ID NO: 5523691 - DNA, 25 bp, Homo sapien
ggggctctagcacccggctttcacc

SEQ ID NO: 5523692 - DNA, 25 bp, Homo sapien
gggtttgaccccactgtgtgatctc

SEQ ID NO: 5523693 - DNA, 25 bp, Homo sapien
aaggaatcactattaaggctgaggc

SEQ ID NO: 5523694 - DNA, 25 bp, Homo sapien
gcttttgaaagtactgagcgtggct

SEQ ID NO: 5523695 - DNA, 25 bp, Homo sapien
aaataagtgctataccaggttttcc

SEQ ID NO: 5523696 - DNA, 25 bp, Homo sapien
ttcgcacatgctctcgaagggagga

SEQ ID NO: 5523697 - DNA, 25 bp, Homo sapien
tgaggcatgtaaaggcaataccata

SEQ ID NO: 5523698 - DNA, 25 bp, Homo sapien
acatgtgcttgaagcgatgcgagat

SEQ ID NO: 5523699 - DNA, 25 bp, Homo sapien
tttgtagattcacgctccagcatgt

SEQ ID NO: 5523700 - DNA, 25 bp, Homo sapien
gtttctctccgctgtgggttcgcac

SEQ ID NO: 5523701 - DNA, 25 bp, Homo sapien
ttacggttgaacactctcccaggtc

SEQ ID NO: 5523702 - DNA, 25 bp, Homo sapien
ttctcacgtgcacacgaagggacga

SEQ ID NO: 5523703 - DNA, 25 bp, Homo sapien
actctcctgccgggatgtccatgtc

SEQ ID NO: 5523704 - DNA, 25 bp, Homo sapien
aacccccttggaggactctcctgcc

SEQ ID NO: 5523705 - DNA, 25 bp, Homo sapien
gcctttgctccgagctggggtctca

SEQ ID NO: 5523706 - DNA, 25 bp, Homo sapien
gtccatgtccgcctttgctccgagc

SEQ ID NO: 5523707 - DNA, 25 bp, Homo sapien
gggagtgattttgcaacacagttgc

SEQ ID NO: 5523708 - DNA, 25 bp, Homo sapien
tcacatcttctgacaggattccttg

SEQ ID NO: 5523709 - DNA, 25 bp, Homo sapien
catgtccgcctttgctccgagctgg

SEQ ID NO: 5523710 - DNA, 25 bp, Homo sapien
tccgcctttgctccgagctggggtc

SEQ ID NO: 5523711 - DNA, 25 bp, Homo sapien
taggggagtgattttgcaacacagt

SEQ ID NO: 5523712 - DNA, 25 bp, Homo sapien
gccgggatgtccatgtccgcctttg

SEQ ID NO: 5523713 - DNA, 25 bp, Homo sapien
cccccttggaggactctcctgccgg

SEQ ID NO: 5523714 - DNA, 25 bp, Homo sapien
cggtcgtggccgacggcgaaccagg

SEQ ID NO: 5523715 - DNA, 25 bp, Homo sapien
cctggttcgccgtcggccacgaccg

SEQ ID NO: 5523716 - DNA, 25 bp, Homo sapien
tcaaggaatcctgtcagaagatgtg

SEQ ID NO: 5523717 - DNA, 25 bp, Homo sapien
ccaagtactcttgatggggcagtga

SEQ ID NO: 5523718 - DNA, 25 bp, Homo sapien
agaagatgtgaaatgcaactgtgtt

SEQ ID NO: 5523719 - DNA, 25 bp, Homo sapien
tctgaagaacgtaatgtcaataaac

SEQ ID NO: 5523720 - DNA, 25 bp, Homo sapien
gactctgctctggaagaagatctcc

SEQ ID NO: 5523721 - DNA, 25 bp, Homo sapien
ccctaccgtcagggctctggattcc

SEQ ID NO: 5523722 - DNA, 25 bp, Homo sapien
gattccagcaccacagacatgagac

SEQ ID NO: 5523723 - DNA, 25 bp, Homo sapien
gaggcccatcactcgctggtgctca

SEQ ID NO: 5523724 - DNA, 25 bp, Homo sapien
tgcgcacctgtaccacgctgagcgg

SEQ ID NO: 5523725 - DNA, 25 bp, Homo sapien
ctccaagggggtttgttactctgaa

SEQ ID NO: 5523726 - DNA, 25 bp, Homo sapien
tggatccacccagcccaggcactca

SEQ ID NO: 5523727 - DNA, 25 bp, Homo sapien
ctctttcgggaaacgttggtgctgt

SEQ ID NO: 5523728 - DNA, 25 bp, Homo sapien
acagcaccaacgtttcccgaaagag

SEQ ID NO: 5523729 - DNA, 25 bp, Homo sapien
gcatggttggattaaggaaatagtc

SEQ ID NO: 5523730 - DNA, 25 bp, Homo sapien
tgtgtagacatgagataccgctgta

SEQ ID NO: 5523731 - DNA, 25 bp, Homo sapien
gtgtcagtgtctagtgcttccggga

SEQ ID NO: 5523732 - DNA, 25 bp, Homo sapien
aaatagtcaaaggcaagcaagacaa

SEQ ID NO: 5523733 - DNA, 25 bp, Homo sapien
tctgcagtacatggagtgcaaaaga

SEQ ID NO: 5523734 - DNA, 25 bp, Homo sapien
ccctaggttgtcttggtcatgcgtc

SEQ ID NO: 5523735 - DNA, 25 bp, Homo sapien
ggagggtctaccaatgagtgtcagt

SEQ ID NO: 5523736 - DNA, 25 bp, Homo sapien
gctagggaatcctgagcccaaagct

SEQ ID NO: 5523737 - DNA, 25 bp, Homo sapien
agctttattaggagaaggctgtggt

SEQ ID NO: 5523738 - DNA, 25 bp, Homo sapien
ccccctcaagaagttgttggagctt

SEQ ID NO: 5523739 - DNA, 25 bp, Homo sapien
tcctccaatcagtgcacgcgatggg

SEQ ID NO: 5523740 - DNA, 25 bp, Homo sapien
aaacatactggtgtcaccaggagag

SEQ ID NO: 5523741 - DNA, 25 bp, Homo sapien
ctctcctggtgacaccagtatgttt

SEQ ID NO: 5523742 - DNA, 25 bp, Homo sapien
tgtagcaaaagtttactgacacatc

SEQ ID NO: 5523743 - DNA, 25 bp, Homo sapien
cccatgtcctggattgatggctggg

SEQ ID NO: 5523744 - DNA, 25 bp, Homo sapien
ttcctgtctagggagcagacaaaca

SEQ ID NO: 5523745 - DNA, 25 bp, Homo sapien
gcacagtgaccaatgaggatccaaa

SEQ ID NO: 5523746 - DNA, 25 bp, Homo sapien
tgctacaagttcagagttcagagac

SEQ ID NO: 5523747 - DNA, 25 bp, Homo sapien
ccacagaaagtactggtggagcaga

SEQ ID NO: 5523748 - DNA, 25 bp, Homo sapien
ggatgatgggctgtaacaatgaatg

SEQ ID NO: 5523749 - DNA, 25 bp, Homo sapien
gagactgtatggcctgaaacaccta

SEQ ID NO: 5523750 - DNA, 25 bp, Homo sapien
ttgctgtgtgccactgaaagtcacc

SEQ ID NO: 5523751 - DNA, 25 bp, Homo sapien
catctaaggctactgttgtgctaca

SEQ ID NO: 5523752 - DNA, 25 bp, Homo sapien
agacaaacacaaccactctggcaca

SEQ ID NO: 5523753 - DNA, 25 bp, Homo sapien
catacagtcaggtggttccaaggaa

SEQ ID NO: 5523754 - DNA, 25 bp, Homo sapien
tgaagactctgaaagaggagatgaa

SEQ ID NO: 5523755 - DNA, 25 bp, Homo sapien
aaagatgaagactctgaaagaggag

SEQ ID NO: 5523756 - DNA, 25 bp, Homo sapien
cttcctgaacataaggagccgaggt

SEQ ID NO: 5523757 - DNA, 25 bp, Homo sapien
gtctgagatggaccttcctgaacat

SEQ ID NO: 5523758 - DNA, 25 bp, Homo sapien
tggaccttcctgaacataaggagcc

SEQ ID NO: 5523759 - DNA, 25 bp, Homo sapien
tgggccatacagtcaggtggttcca

SEQ ID NO: 5523760 - DNA, 25 bp, Homo sapien
gccgaagtccacaccgctaaggaga

SEQ ID NO: 5523761 - DNA, 25 bp, Homo sapien
tcagaaaacatctctgggccataca

SEQ ID NO: 5523762 - DNA, 25 bp, Homo sapien
cctggaaagcagatgacctcagaaa

SEQ ID NO: 5523763 - DNA, 25 bp, Homo sapien
ccgaagtccacaccgctaaggagag

SEQ ID NO: 5523764 - DNA, 25 bp, Homo sapien
taaagatttaggatacaaaggagac

SEQ ID NO: 5523765 - DNA, 25 bp, Homo sapien
tgtgacaacaccagctatcggcaga

SEQ ID NO: 5523766 - DNA, 25 bp, Homo sapien
caccttcggattccaggcagttgtg

SEQ ID NO: 5523767 - DNA, 25 bp, Homo sapien
atctttggtctgggccggataatga

SEQ ID NO: 5523768 - DNA, 25 bp, Homo sapien
gcagggtgttccgcttacagctagt

SEQ ID NO: 5523769 - DNA, 25 bp, Homo sapien
aaaatggaggcataacatgtcctag

SEQ ID NO: 5523770 - DNA, 25 bp, Homo sapien
gaagacccccgtctccccacagctg

SEQ ID NO: 5523771 - DNA, 25 bp, Homo sapien
ttaatagtgtttcagggagtgacag

SEQ ID NO: 5523772 - DNA, 25 bp, Homo sapien
tccaggcagttgtgacaacaccagc

SEQ ID NO: 5523773 - DNA, 25 bp, Homo sapien
agtcaggaccctgagtcccccacgt

SEQ ID NO: 5523774 - DNA, 25 bp, Homo sapien
tatcggcagagctattaatagtgtt

SEQ ID NO: 5523775 - DNA, 25 bp, Homo sapien
tccaagctagattacagaagtcttt

SEQ ID NO: 5523776 - DNA, 25 bp, Homo sapien
gaaagtttggagcttcctggagact

SEQ ID NO: 5523777 - DNA, 25 bp, Homo sapien
atactctgagttccaagcaaacaac

SEQ ID NO: 5523778 - DNA, 25 bp, Homo sapien
aagtgtggaagcacctttggaactg

SEQ ID NO: 5523779 - DNA, 25 bp, Homo sapien
acagtgatgtggacgattaagtcca

SEQ ID NO: 5523780 - DNA, 25 bp, Homo sapien
aagtccctcatgtgccaagtgtaga

SEQ ID NO: 5523781 - DNA, 25 bp, Homo sapien
tttaaccaaaatgctgacagtgatg

SEQ ID NO: 5523782 - DNA, 25 bp, Homo sapien
aagatacttgaaagtgtggaagcac

SEQ ID NO: 5523783 - DNA, 25 bp, Homo sapien
cagactaatacaggaatttggtacc

SEQ ID NO: 5523784 - DNA, 25 bp, Homo sapien
tatattgggaagagctcaaaagtct

SEQ ID NO: 5523785 - DNA, 25 bp, Homo sapien
ttgaatcagggctcactttgttagc

SEQ ID NO: 5523786 - DNA, 25 bp, Homo sapien
accttaggatcctgggccaactgtc

SEQ ID NO: 5523787 - DNA, 25 bp, Homo sapien
tgagtctacaagtggcatttgcttc

SEQ ID NO: 5523788 - DNA, 25 bp, Homo sapien
tggcaggagccttgtacacactctg

SEQ ID NO: 5523789 - DNA, 25 bp, Homo sapien
ctttcaaggcagaagcctgtgattc

SEQ ID NO: 5523790 - DNA, 25 bp, Homo sapien
atgaccaccacggacttgccctttc

SEQ ID NO: 5523791 - DNA, 25 bp, Homo sapien
gagaatgaagtccagagtttgagtc

SEQ ID NO: 5523792 - DNA, 25 bp, Homo sapien
tagacattctaggtgacagcagtta

SEQ ID NO: 5523793 - DNA, 25 bp, Homo sapien
agcagttatgaaagaggtgtctcta

SEQ ID NO: 5523794 - DNA, 25 bp, Homo sapien
cctgggggaatgtgcttctttcaag

SEQ ID NO: 5523795 - DNA, 25 bp, Homo sapien
aataatataggctgcacctgggcat

SEQ ID NO: 5523796 - DNA, 25 bp, Homo sapien
agaaggtgcttagagaatagacatt

SEQ ID NO: 5523797 - DNA, 25 bp, Homo sapien
taacttgctggcaaagctgcagaag

SEQ ID NO: 5523798 - DNA, 25 bp, Homo sapien
tcaagcagctgaaccagcggaaaaa

SEQ ID NO: 5523799 - DNA, 25 bp, Homo sapien
agggcgagttcatcgactgcttcca

SEQ ID NO: 5523800 - DNA, 25 bp, Homo sapien
cggcccccctctgagggcgagttca

SEQ ID NO: 5523801 - DNA, 25 bp, Homo sapien
atccccttccagcaccgcggcgggg

SEQ ID NO: 5523802 - DNA, 25 bp, Homo sapien
caaagctgcagaagcacatccagaa

SEQ ID NO: 5523803 - DNA, 25 bp, Homo sapien
gcttccagaaaatcaagctggcgat

SEQ ID NO: 5523804 - DNA, 25 bp, Homo sapien
aagctggcgattaacttgctggcaa

SEQ ID NO: 5523805 - DNA, 25 bp, Homo sapien
atcctgcctcctccccagggcccgg

SEQ ID NO: 5523806 - DNA, 25 bp, Homo sapien
gcagccgaggctttcaagcagctga

SEQ ID NO: 5523807 - DNA, 25 bp, Homo sapien
ggcagcggcagtccatcctgcctcc

SEQ ID NO: 5523808 - DNA, 25 bp, Homo sapien
tgcgtcccgccgttcggaccttctc

SEQ ID NO: 5523809 - DNA, 25 bp, Homo sapien
gagaaggtccgaacggcgggacgca

SEQ ID NO: 5523810 - DNA, 25 bp, Homo sapien
ttgttgacttggcaggctcacactt

SEQ ID NO: 5523811 - DNA, 25 bp, Homo sapien
aggtataaactgtctggggtcctat

SEQ ID NO: 5523812 - DNA, 25 bp, Homo sapien
tacatgtgcgctaaaggcatacttg

SEQ ID NO: 5523813 - DNA, 25 bp, Homo sapien
tcctcaagtgctctaaaagtgtttc

SEQ ID NO: 5523814 - DNA, 25 bp, Homo sapien
aaaacagcaaatggaaggtataaac

SEQ ID NO: 5523815 - DNA, 25 bp, Homo sapien
aaacagttacagaatgtggcaaaat

SEQ ID NO: 5523816 - DNA, 25 bp, Homo sapien
aggccacacgagatttaggaagtgc

SEQ ID NO: 5523817 - DNA, 25 bp, Homo sapien
tgaaaaaggcaaacagtatatacac

SEQ ID NO: 5523818 - DNA, 25 bp, Homo sapien
aggaagtgcaggctatttacatgtg

SEQ ID NO: 5523819 - DNA, 25 bp, Homo sapien
tatatacacgaaacaaaagatgaaa

SEQ ID NO: 5523820 - DNA, 25 bp, Homo sapien
aggcatacttgttgacttggcaggc

SEQ ID NO: 5523821 - DNA, 25 bp, Homo sapien
gacttaattctctttattcgtaaac

SEQ ID NO: 5523822 - DNA, 25 bp, Homo sapien
gtttacgaataaagagaattaagtc

SEQ ID NO: 5523823 - DNA, 25 bp, Homo sapien
ctgctgcaagaataattgcgattac

SEQ ID NO: 5523824 - DNA, 25 bp, Homo sapien
ctgaacagtaagtaccatggatgcc

SEQ ID NO: 5523825 - DNA, 25 bp, Homo sapien
gatgaaaggcaagtaactggttgtt

SEQ ID NO: 5523826 - DNA, 25 bp, Homo sapien
gacccaagtcaaattaatctgctgc

SEQ ID NO: 5523827 - DNA, 25 bp, Homo sapien
cacaaacattctagccagaggcatc

SEQ ID NO: 5523828 - DNA, 25 bp, Homo sapien
attttgcagaagtaagggctgctga

SEQ ID NO: 5523829 - DNA, 25 bp, Homo sapien
atggatgccaacacaaattcagacc

SEQ ID NO: 5523830 - DNA, 25 bp, Homo sapien
attgcgattactccagcagagggca

SEQ ID NO: 5523831 - DNA, 25 bp, Homo sapien
actccagcagagggcactctgctcc

SEQ ID NO: 5523832 - DNA, 25 bp, Homo sapien
agaaattgtatgatgaaaggcaagt

SEQ ID NO: 5523833 - DNA, 25 bp, Homo sapien
ggttgttgaattcatgacccaagtc

SEQ ID NO: 5523834 - DNA, 25 bp, Homo sapien
caaatgttaagcaagggaaactgaa

SEQ ID NO: 5523835 - DNA, 25 bp, Homo sapien
attgaagcgaattaaataggatttt

SEQ ID NO: 5523836 - DNA, 25 bp, Homo sapien
gggggttgtaaatctcaagaggtca

SEQ ID NO: 5523837 - DNA, 25 bp, Homo sapien
aactctacaggcacagtaactacac

SEQ ID NO: 5523838 - DNA, 25 bp, Homo sapien
acaggagcacatgccaaagtgcctg

SEQ ID NO: 5523839 - DNA, 25 bp, Homo sapien
atggtaagccaaaagtggacttgtc

SEQ ID NO: 5523840 - DNA, 25 bp, Homo sapien
agtgcagcattatcagtgggccttt

SEQ ID NO: 5523841 - DNA, 25 bp, Homo sapien
ttcccatgatgtaggcatgaagtgg

SEQ ID NO: 5523842 - DNA, 25 bp, Homo sapien
gcatgtgttggagcagatctccatg

SEQ ID NO: 5523843 - DNA, 25 bp, Homo sapien
atgtggattgttagcagtgatctgc

SEQ ID NO: 5523844 - DNA, 25 bp, Homo sapien
ctgggaggtgccaataaaatcaaga

SEQ ID NO: 5523845 - DNA, 25 bp, Homo sapien
atagataactagatacaatagaaat

SEQ ID NO: 5523846 - DNA, 25 bp, Homo sapien
gaatcaatagtttcaggtctaaaaa

SEQ ID NO: 5523847 - DNA, 25 bp, Homo sapien
gttctacatggttctaatgctggaa

SEQ ID NO: 5523848 - DNA, 25 bp, Homo sapien
cctgaccattcatactatactagcc

SEQ ID NO: 5523849 - DNA, 25 bp, Homo sapien
cagtctccgctaagccaatacaatt

SEQ ID NO: 5523850 - DNA, 25 bp, Homo sapien
tacacttaacatacagtctccgcta

SEQ ID NO: 5523851 - DNA, 25 bp, Homo sapien
cgtgggacaacgcatttaaactacc

SEQ ID NO: 5523852 - DNA, 25 bp, Homo sapien
acctaaactgcacaatttcacaatc

SEQ ID NO: 5523853 - DNA, 25 bp, Homo sapien
tctaatgctggaaatctgctgtaca

SEQ ID NO: 5523854 - DNA, 25 bp, Homo sapien
ttaggatattttaactgtgaagaaa

SEQ ID NO: 5523855 - DNA, 25 bp, Homo sapien
aacactgatgataaattgaatcaat

SEQ ID NO: 5523856 - DNA, 25 bp, Homo sapien
gctgtccagattcaaggcggtagtg

SEQ ID NO: 5523857 - DNA, 25 bp, Homo sapien
cgcttcagcagtgaggatcctctgg

SEQ ID NO: 5523858 - DNA, 25 bp, Homo sapien
aaccacctgaggtagctgtccagat

SEQ ID NO: 5523859 - DNA, 25 bp, Homo sapien
tcctgacagaactgccgcctgcttg

SEQ ID NO: 5523860 - DNA, 25 bp, Homo sapien
agccctcttagccccgtaggtcggc

SEQ ID NO: 5523861 - DNA, 25 bp, Homo sapien
tatgagaagtggaatcaccagatgt

SEQ ID NO: 5523862 - DNA, 25 bp, Homo sapien
aggggctgtgtcccacgtccccaaa

SEQ ID NO: 5523863 - DNA, 25 bp, Homo sapien
gtgtatttatcacggggtccgcggc

SEQ ID NO: 5523864 - DNA, 25 bp, Homo sapien
tattctcccagcggtgagctatgag

SEQ ID NO: 5523865 - DNA, 25 bp, Homo sapien
ggcggtagtgattttgtgtgtctgt

SEQ ID NO: 5523866 - DNA, 25 bp, Homo sapien
ctgacctaggtatcaggctggtcgc

SEQ ID NO: 5523867 - DNA, 25 bp, Homo sapien
agcaaagaggctatgacctatggct

SEQ ID NO: 5523868 - DNA, 25 bp, Homo sapien
ggtacaaaatacattcagagccccc

SEQ ID NO: 5523869 - DNA, 25 bp, Homo sapien
actgcctagggaggctactccaata

SEQ ID NO: 5523870 - DNA, 25 bp, Homo sapien
gtgggaagctactggtatccagggt

SEQ ID NO: 5523871 - DNA, 25 bp, Homo sapien
aagggaggccaacccctccactgct

SEQ ID NO: 5523872 - DNA, 25 bp, Homo sapien
gctttgcatggccaggttccaaggg

SEQ ID NO: 5523873 - DNA, 25 bp, Homo sapien
ggggcagcccaaatcctacagatga

SEQ ID NO: 5523874 - DNA, 25 bp, Homo sapien
gggaagtgtgccacaggtctaatcc

SEQ ID NO: 5523875 - DNA, 25 bp, Homo sapien
gatggtgttgacctgaggaatcttc

SEQ ID NO: 5523876 - DNA, 25 bp, Homo sapien
ccaccagcaaagaactgacccaggt

SEQ ID NO: 5523877 - DNA, 25 bp, Homo sapien
tcttcaggcagaagcttgtggtcag

SEQ ID NO: 5523878 - DNA, 25 bp, Homo sapien
aaggagaatctagaaatacagtatg

SEQ ID NO: 5523879 - DNA, 25 bp, Homo sapien
agtagcttgacttgtgaagtgactc

SEQ ID NO: 5523880 - DNA, 25 bp, Homo sapien
agcgagcttgctcgccaggtgtgtc

SEQ ID NO: 5523881 - DNA, 25 bp, Homo sapien
gagaatgttgtgacccagcagaaaa

SEQ ID NO: 5523882 - DNA, 25 bp, Homo sapien
acccgcaactcgccacccctcctgc

SEQ ID NO: 5523883 - DNA, 25 bp, Homo sapien
atgtacaccgcatccttgggccgtg

SEQ ID NO: 5523884 - DNA, 25 bp, Homo sapien
tggtgctggggttgatttgttatta

SEQ ID NO: 5523885 - DNA, 25 bp, Homo sapien
taaggagcacctgtaaaacagtagc

SEQ ID NO: 5523886 - DNA, 25 bp, Homo sapien
aatctgacaccagtcagggagagga

SEQ ID NO: 5523887 - DNA, 25 bp, Homo sapien
aagtgactctgtacaaaggagaatc

SEQ ID NO: 5523888 - DNA, 25 bp, Homo sapien
aatctctccccgggcttgcgagctt

SEQ ID NO: 5523889 - DNA, 25 bp, Homo sapien
gcctgacaagcaacagccctcttcc

SEQ ID NO: 5523890 - DNA, 25 bp, Homo sapien
aactttcaggtcagcacgagtgaag

SEQ ID NO: 5523891 - DNA, 25 bp, Homo sapien
agagcaatgcaggcgctatgattca

SEQ ID NO: 5523892 - DNA, 25 bp, Homo sapien
gaattgctgcatggaaaacactgaa

SEQ ID NO: 5523893 - DNA, 25 bp, Homo sapien
cttccccacaaagcaggacagttcc

SEQ ID NO: 5523894 - DNA, 25 bp, Homo sapien
gaatataggcagaacaatctctcgc

SEQ ID NO: 5523895 - DNA, 25 bp, Homo sapien
gcctgccaaatgcaagggaagcaga

SEQ ID NO: 5523896 - DNA, 25 bp, Homo sapien
aggaggcggagtttttcaaaatcga

SEQ ID NO: 5523897 - DNA, 25 bp, Homo sapien
ctgataagatcatgcctgtgcagcc

SEQ ID NO: 5523898 - DNA, 25 bp, Homo sapien
actgtgaacgtcaacaagaagaatt

SEQ ID NO: 5523899 - DNA, 25 bp, Homo sapien
ggctgcatgcagacctcccctgtca

SEQ ID NO: 5523900 - DNA, 25 bp, Homo sapien
gtcgcgaaacgcaaatagtcgagaa

SEQ ID NO: 5523901 - DNA, 25 bp, Homo sapien
ggaacacagcagttgtggaagtgaa

SEQ ID NO: 5523902 - DNA, 25 bp, Homo sapien
ggttcggcttgctcaggtctctgtc

SEQ ID NO: 5523903 - DNA, 25 bp, Homo sapien
agcagtgagacatcgaagagtttta

SEQ ID NO: 5523904 - DNA, 25 bp, Homo sapien
tcgcttttcctgggcagagcgggaa

SEQ ID NO: 5523905 - DNA, 25 bp, Homo sapien
atcgctgaataactaccgggcagga

SEQ ID NO: 5523906 - DNA, 25 bp, Homo sapien
agtgactgaacaacagcagtgagac

SEQ ID NO: 5523907 - DNA, 25 bp, Homo sapien
tggaaagtgatgggcactgctttct

SEQ ID NO: 5523908 - DNA, 25 bp, Homo sapien
tcaaatatgtggggaaatctgacct

SEQ ID NO: 5523909 - DNA, 25 bp, Homo sapien
gcccaggttccttccgagggctcgc

SEQ ID NO: 5523910 - DNA, 25 bp, Homo sapien
tacaaatggctcccagaagatccac

SEQ ID NO: 5523911 - DNA, 25 bp, Homo sapien
agagaagcaataccaccgtcagctc

SEQ ID NO: 5523912 - DNA, 25 bp, Homo sapien
aacccatctggaagtgcaaatatgc

SEQ ID NO: 5523913 - DNA, 25 bp, Homo sapien
gctgtacaagagtcacaaaagagag

SEQ ID NO: 5523914 - DNA, 25 bp, Homo sapien
ctgcttgcatttggcagtgggagcc

SEQ ID NO: 5523915 - DNA, 25 bp, Homo sapien
tcgtttcatcagattgggaggtatt

SEQ ID NO: 5523916 - DNA, 25 bp, Homo sapien
cactgataacatgcagagaagcaat

SEQ ID NO: 5523917 - DNA, 25 bp, Homo sapien
atgaaaagcaccagatgtacacact

SEQ ID NO: 5523918 - DNA, 25 bp, Homo sapien
ccccaggccacagagttgtccctaa

SEQ ID NO: 5523919 - DNA, 25 bp, Homo sapien
cacctgaaagaccttgactgacacc

SEQ ID NO: 5523920 - DNA, 25 bp, Homo sapien
agcatgctgcctgagggcacataac

SEQ ID NO: 5523921 - DNA, 25 bp, Homo sapien
cagtgggagccctaaccaatttctc

SEQ ID NO: 5523922 - DNA, 25 bp, Homo sapien
gatccctctgggttgagagctcttc

SEQ ID NO: 5523923 - DNA, 25 bp, Homo sapien
gcccacctccgcatcgcagctcact

SEQ ID NO: 5523924 - DNA, 25 bp, Homo sapien
agctctgcacattggtcatcccctc

SEQ ID NO: 5523925 - DNA, 25 bp, Homo sapien
gtgagctctgcacattggtcatccc

SEQ ID NO: 5523926 - DNA, 25 bp, Homo sapien
atcgcagctcacttttacggagcac

SEQ ID NO: 5523927 - DNA, 25 bp, Homo sapien
accacccacaggacacatttgtgtg

SEQ ID NO: 5523928 - DNA, 25 bp, Homo sapien
tgggttgagagctcttccccctcca

SEQ ID NO: 5523929 - DNA, 25 bp, Homo sapien
aaccttcctggtcagatccctctgg

SEQ ID NO: 5523930 - DNA, 25 bp, Homo sapien
agcttgcccacctccgcatcgcagc

SEQ ID NO: 5523931 - DNA, 25 bp, Homo sapien
acattggtcatcccctcactgcagg

SEQ ID NO: 5523932 - DNA, 25 bp, Homo sapien
ggtcagatccctctgggttgagagc

SEQ ID NO: 5523933 - DNA, 25 bp, Homo sapien
acacatactgtctgcaggggcttcc

SEQ ID NO: 5523934 - DNA, 25 bp, Homo sapien
actttcagaaggtctatggtcactc

SEQ ID NO: 5523935 - DNA, 25 bp, Homo sapien
tttacggagcactttctctctgttc

SEQ ID NO: 5523936 - DNA, 25 bp, Homo sapien
cggcagagaccatttggccagcaaa

SEQ ID NO: 5523937 - DNA, 25 bp, Homo sapien
aaaacacatactgtctgcaggggct

SEQ ID NO: 5523938 - DNA, 25 bp, Homo sapien
catactcattcactttcagaaggtc

SEQ ID NO: 5523939 - DNA, 25 bp, Homo sapien
ttggaacacagtcatactcattcac

SEQ ID NO: 5523940 - DNA, 25 bp, Homo sapien
ctatggtcactctgcagccacaatg

SEQ ID NO: 5523941 - DNA, 25 bp, Homo sapien
gaaggtctatggtcactctgcagcc

SEQ ID NO: 5523942 - DNA, 25 bp, Homo sapien
ttggccagcaaagcctaaaacacat

SEQ ID NO: 5523943 - DNA, 25 bp, Homo sapien
agagaccatttggccagcaaagcct

SEQ ID NO: 5523944 - DNA, 25 bp, Homo sapien
attcacgaatacaatgctggtcatt

SEQ ID NO: 5523945 - DNA, 25 bp, Homo sapien
gaaataggcagctaatactggattt

SEQ ID NO: 5523946 - DNA, 25 bp, Homo sapien
tcccaatggaatcagaattatcttc

SEQ ID NO: 5523947 - DNA, 25 bp, Homo sapien
gatctctgcaagtattaagtgtctg

SEQ ID NO: 5523948 - DNA, 25 bp, Homo sapien
taagtgtctgaaataggcagctaat

SEQ ID NO: 5523949 - DNA, 25 bp, Homo sapien
gaaacttcagcagtacaggaaaaac

SEQ ID NO: 5523950 - DNA, 25 bp, Homo sapien
gctggtcatttgaggaaatgtatac

SEQ ID NO: 5523951 - DNA, 25 bp, Homo sapien
acaatgagggtgattctttaaaaac

SEQ ID NO: 5523952 - DNA, 25 bp, Homo sapien
attcgcaccctaagagtacatttac

SEQ ID NO: 5523953 - DNA, 25 bp, Homo sapien
ttccacactgttcactgcaagatac

SEQ ID NO: 5523954 - DNA, 25 bp, Homo sapien
aaaacttcagtgtggtaaatgtaac

SEQ ID NO: 5523955 - DNA, 25 bp, Homo sapien
ccttagccatgatctgcaggggtct

SEQ ID NO: 5523956 - DNA, 25 bp, Homo sapien
atggccctgtagttaggcctggctc

SEQ ID NO: 5523957 - DNA, 25 bp, Homo sapien
gtggaaggaccctgtgccctccttc

SEQ ID NO: 5523958 - DNA, 25 bp, Homo sapien
ctccagtatgacagaggaggatgta

SEQ ID NO: 5523959 - DNA, 25 bp, Homo sapien
tggattgtggatgtggacttttttg

SEQ ID NO: 5523960 - DNA, 25 bp, Homo sapien
ggcccggcctattgcttgggtctct

SEQ ID NO: 5523961 - DNA, 25 bp, Homo sapien
tcgccaaggcctaggacctatgttg

SEQ ID NO: 5523962 - DNA, 25 bp, Homo sapien
cagagatggacagagaactttattt

SEQ ID NO: 5523963 - DNA, 25 bp, Homo sapien
ctgcacctttccagggaggtggaag

SEQ ID NO: 5523964 - DNA, 25 bp, Homo sapien
gaggatgtaaggccttagccatgat

SEQ ID NO: 5523965 - DNA, 25 bp, Homo sapien
ctaagcttctagaggctcatggccc

SEQ ID NO: 5523966 - DNA, 25 bp, Homo sapien
taccaagactactacgaggtggtgc

SEQ ID NO: 5523967 - DNA, 25 bp, Homo sapien
ggccacgtatgtccgcagctactac

SEQ ID NO: 5523968 - DNA, 25 bp, Homo sapien
ctgcgcttggattgctagactcctc

SEQ ID NO: 5523969 - DNA, 25 bp, Homo sapien
gtgccccccaatgcacacgaggcca

SEQ ID NO: 5523970 - DNA, 25 bp, Homo sapien
ctacagcccgtaccaagactactac

SEQ ID NO: 5523971 - DNA, 25 bp, Homo sapien
tccgcagctactacggaccgcccta

SEQ ID NO: 5523972 - DNA, 25 bp, Homo sapien
gctactacggaccgccctacgcagg

SEQ ID NO: 5523973 - DNA, 25 bp, Homo sapien
gagcactgacccctgcgcttggatt

SEQ ID NO: 5523974 - DNA, 25 bp, Homo sapien
tgcgcgtctacagcccgtaccaaga

SEQ ID NO: 5523975 - DNA, 25 bp, Homo sapien
cctggaccccatcctctaccatcca

SEQ ID NO: 5523976 - DNA, 25 bp, Homo sapien
agaccaaggatgatgccctagcatg

SEQ ID NO: 5523977 - DNA, 25 bp, Homo sapien
aactccaccccggtgcgcgtctaca

SEQ ID NO: 5523978 - DNA, 25 bp, Homo sapien
cattagctccttccgggtttggacc

SEQ ID NO: 5523979 - DNA, 25 bp, Homo sapien
catgggaagaagctatcatcacagg

SEQ ID NO: 5523980 - DNA, 25 bp, Homo sapien
tctaccatccaagccctgtcccact

SEQ ID NO: 5523981 - DNA, 25 bp, Homo sapien
agctccttccgggtttggaccattc

SEQ ID NO: 5523982 - DNA, 25 bp, Homo sapien
tggccctatcctctccattagctcc

SEQ ID NO: 5523983 - DNA, 25 bp, Homo sapien
aatccccacatgggaagaagctatc

SEQ ID NO: 5523984 - DNA, 25 bp, Homo sapien
ccactccctacccttaatccccaca

SEQ ID NO: 5523985 - DNA, 25 bp, Homo sapien
cacatgggaagaagctatcatcaca

SEQ ID NO: 5523986 - DNA, 25 bp, Homo sapien
ccttaatccccacatgggaagaagc

SEQ ID NO: 5523987 - DNA, 25 bp, Homo sapien
ccaagccctgtcccactttggccct

SEQ ID NO: 5523988 - DNA, 25 bp, Homo sapien
attcttcccaagcgtgagagagtga

SEQ ID NO: 5523989 - DNA, 25 bp, Homo sapien
acacatgatcaaggacaatggctgg

SEQ ID NO: 5523990 - DNA, 25 bp, Homo sapien
ggtgaccggcctctaaatcgctgtc

SEQ ID NO: 5523991 - DNA, 25 bp, Homo sapien
ccagtgtccacgtgaacgccattca

SEQ ID NO: 5523992 - DNA, 25 bp, Homo sapien
gagagagtgactgacacttggttcc

SEQ ID NO: 5523993 - DNA, 25 bp, Homo sapien
gggctggaaatacgaacatgctttt

SEQ ID NO: 5523994 - DNA, 25 bp, Homo sapien
aagtcaaggacgagcatacctcttt

SEQ ID NO: 5523995 - DNA, 25 bp, Homo sapien
gcgagtgttgctaacaggactgcat

SEQ ID NO: 5523996 - DNA, 25 bp, Homo sapien
ctcagtagttaatgtgggctgtggg

SEQ ID NO: 5523997 - DNA, 25 bp, Homo sapien
ctgtcgccggtcattccaaggaagt

SEQ ID NO: 5523998 - DNA, 25 bp, Homo sapien
tgggactgattggacagcatctacc

SEQ ID NO: 5523999 - DNA, 25 bp, Homo sapien
ctgtggaaaaagatacagaagcatc

SEQ ID NO: 5524000 - DNA, 25 bp, Homo sapien
acaccagacattatgctgtggaaaa

SEQ ID NO: 5524001 - DNA, 25 bp, Homo sapien
gggcctggccccatgccatgctttt

SEQ ID NO: 5524002 - DNA, 25 bp, Homo sapien
gatggggtgtgatagccattttaat

SEQ ID NO: 5524003 - DNA, 25 bp, Homo sapien
cactggttggactctcactgggcag

SEQ ID NO: 5524004 - DNA, 25 bp, Homo sapien
taaggaagaagatcatcatggatgg

SEQ ID NO: 5524005 - DNA, 25 bp, Homo sapien
tcagagtatgattaaggaagaagat

SEQ ID NO: 5524006 - DNA, 25 bp, Homo sapien
cacagaaagatcctcagagtatgat

SEQ ID NO: 5524007 - DNA, 25 bp, Homo sapien
aatagctccccatcacaccagacat

SEQ ID NO: 5524008 - DNA, 25 bp, Homo sapien
atgtctttcgtgggtcacaatcacc

SEQ ID NO: 5524009 - DNA, 25 bp, Homo sapien
agcacgagagacgtgacattcgttc

SEQ ID NO: 5524010 - DNA, 25 bp, Homo sapien
ggggagagatttcgtgcagtttctt

SEQ ID NO: 5524011 - DNA, 25 bp, Homo sapien
cccgaaatggatggcccccacttta

SEQ ID NO: 5524012 - DNA, 25 bp, Homo sapien
accacaaggttagtctgagttctga

SEQ ID NO: 5524013 - DNA, 25 bp, Homo sapien
tcttagagggatgtttgctcgttcc

SEQ ID NO: 5524014 - DNA, 25 bp, Homo sapien
gcggggtcggctttcatttgtctcc

SEQ ID NO: 5524015 - DNA, 25 bp, Homo sapien
tccagatttcaggacagagcagagt

SEQ ID NO: 5524016 - DNA, 25 bp, Homo sapien
ggctgctgcccctcgcttgttctgc

SEQ ID NO: 5524017 - DNA, 25 bp, Homo sapien
ttttgctgcagccacgaacctacgt

SEQ ID NO: 5524018 - DNA, 25 bp, Homo sapien
acaattgtttgagaaaccggctgtt

SEQ ID NO: 5524019 - DNA, 25 bp, Homo sapien
cttggtgatgaggtaatgagttcca

SEQ ID NO: 5524020 - DNA, 25 bp, Homo sapien
tattcgtaaacatctgggcaaaccc

SEQ ID NO: 5524021 - DNA, 25 bp, Homo sapien
gagaccacggaaataacacgttctc

SEQ ID NO: 5524022 - DNA, 25 bp, Homo sapien
gggataggcatctcgaccctcgctc

SEQ ID NO: 5524023 - DNA, 25 bp, Homo sapien
ccgacctacaaggaacgcctcgtaa

SEQ ID NO: 5524024 - DNA, 25 bp, Homo sapien
ggggctccacatcaaggaaatcctc

SEQ ID NO: 5524025 - DNA, 25 bp, Homo sapien
tctctttctagacgcgcgcctgcca

SEQ ID NO: 5524026 - DNA, 25 bp, Homo sapien
catcaaggaaatcctcagcccggga

SEQ ID NO: 5524027 - DNA, 25 bp, Homo sapien
aaccccgcaataacttggctgggcg

SEQ ID NO: 5524028 - DNA, 25 bp, Homo sapien
catctcgcggcgaccaatctctttc

SEQ ID NO: 5524029 - DNA, 25 bp, Homo sapien
ttccaagctttgggataggcatctc

SEQ ID NO: 5524030 - DNA, 25 bp, Homo sapien
gatgcccgtccgacctacaaggaac

SEQ ID NO: 5524031 - DNA, 25 bp, Homo sapien
gaccctcgctctctacccacgtttc

SEQ ID NO: 5524032 - DNA, 25 bp, Homo sapien
agtgctaggaacagaaactaacaat

SEQ ID NO: 5524033 - DNA, 25 bp, Homo sapien
ctaggtggaaacattggattcaagc

SEQ ID NO: 5524034 - DNA, 25 bp, Homo sapien
taaggcattactattgaaagcaaat

SEQ ID NO: 5524035 - DNA, 25 bp, Homo sapien
tactgaataaaaagactaggtggaa

SEQ ID NO: 5524036 - DNA, 25 bp, Homo sapien
gctgtaactggtaatataacttcac

SEQ ID NO: 5524037 - DNA, 25 bp, Homo sapien
tacagttctagtgccatatgggtca

SEQ ID NO: 5524038 - DNA, 25 bp, Homo sapien
tttggcttgattgtaatgtggttta

SEQ ID NO: 5524039 - DNA, 25 bp, Homo sapien
ggattcaagcaatgccaagagtatc

SEQ ID NO: 5524040 - DNA, 25 bp, Homo sapien
gcaatgccaagagtatcagctgatt

SEQ ID NO: 5524041 - DNA, 25 bp, Homo sapien
gccatatgggtcaataagatctatc

SEQ ID NO: 5524042 - DNA, 25 bp, Homo sapien
aacaaacattggaaaagactgatga

SEQ ID NO: 5524043 - DNA, 25 bp, Homo sapien
gctcgttttccagaccgccatgatc

SEQ ID NO: 5524044 - DNA, 25 bp, Homo sapien
ctcaatactcagggcagagataggc

SEQ ID NO: 5524045 - DNA, 25 bp, Homo sapien
agagtggtggacatccatcaacacc

SEQ ID NO: 5524046 - DNA, 25 bp, Homo sapien
tcccaaggtactcagtcacagagag

SEQ ID NO: 5524047 - DNA, 25 bp, Homo sapien
tcacagctcagtttagtgggggaag

SEQ ID NO: 5524048 - DNA, 25 bp, Homo sapien
cttgggcaagtaagtccctttcctc

SEQ ID NO: 5524049 - DNA, 25 bp, Homo sapien
cctgccacttggcagctgtggccct

SEQ ID NO: 5524050 - DNA, 25 bp, Homo sapien
aggagaataacggtcccttacctgc

SEQ ID NO: 5524051 - DNA, 25 bp, Homo sapien
ccatcggcacggaattagctcgttt

SEQ ID NO: 5524052 - DNA, 25 bp, Homo sapien
agagataggcccctctagggctgca

SEQ ID NO: 5524053 - DNA, 25 bp, Homo sapien
ctgcagaaaagaggctaaactcatg

SEQ ID NO: 5524054 - DNA, 25 bp, Homo sapien
gttcttgacgtgaccagtggtctct

SEQ ID NO: 5524055 - DNA, 25 bp, Homo sapien
agagaccactggtcacgtcaagaac

SEQ ID NO: 5524056 - DNA, 25 bp, Homo sapien
tggtggcagccgccttggttcatta

SEQ ID NO: 5524057 - DNA, 25 bp, Homo sapien
gccactcaaaggaaacagcacagtg

SEQ ID NO: 5524058 - DNA, 25 bp, Homo sapien
ctcaaaggaaacagcacagtgagtg

SEQ ID NO: 5524059 - DNA, 25 bp, Homo sapien
ccacagtgagaacgaaaccacaatg

SEQ ID NO: 5524060 - DNA, 25 bp, Homo sapien
acagtttaagtgctcagaaataaat

SEQ ID NO: 5524061 - DNA, 25 bp, Homo sapien
gtgcagacgtcatggttgaatgcct

SEQ ID NO: 5524062 - DNA, 25 bp, Homo sapien
ggcccaaaacagagccttctcagtt

SEQ ID NO: 5524063 - DNA, 25 bp, Homo sapien
tgagaacgaaaccacaatgacatgt

SEQ ID NO: 5524064 - DNA, 25 bp, Homo sapien
atgttactaacactgtgcagacgtc

SEQ ID NO: 5524065 - DNA, 25 bp, Homo sapien
gttctgttccttcctggtggcagcc

SEQ ID NO: 5524066 - DNA, 25 bp, Homo sapien
agtggtagttggctacaactggaac

SEQ ID NO: 5524067 - DNA, 25 bp, Homo sapien
cgcttcacataggtaaagacgaaaa

SEQ ID NO: 5524068 - DNA, 25 bp, Homo sapien
ttatatgggtattgtacaccgcggg

SEQ ID NO: 5524069 - DNA, 25 bp, Homo sapien
aaaaagttcaggtcatgaatgcccc

SEQ ID NO: 5524070 - DNA, 25 bp, Homo sapien
ggaaacagaagactccatggttaca

SEQ ID NO: 5524071 - DNA, 25 bp, Homo sapien
tctggcagacctaaattgtgtaagt

SEQ ID NO: 5524072 - DNA, 25 bp, Homo sapien
acagaatgcaccattgggttatgac

SEQ ID NO: 5524073 - DNA, 25 bp, Homo sapien
gtatacactggccatcagctctgtc

SEQ ID NO: 5524074 - DNA, 25 bp, Homo sapien
gtaaaagcagccagcaattcccctc

SEQ ID NO: 5524075 - DNA, 25 bp, Homo sapien
gcgggccacgctctgtatacactgg

SEQ ID NO: 5524076 - DNA, 25 bp, Homo sapien
tacatctaaattataagacggcgcc

SEQ ID NO: 5524077 - DNA, 25 bp, Homo sapien
attgtgtaagtaaacagcctggtgc

SEQ ID NO: 5524078 - DNA, 25 bp, Homo sapien
ctcatgactccaacagaattagcac

SEQ ID NO: 5524079 - DNA, 25 bp, Homo sapien
acattgcccttgtgcatggggcctt

SEQ ID NO: 5524080 - DNA, 25 bp, Homo sapien
caattcccgtgtggtgagcaaaaaa

SEQ ID NO: 5524081 - DNA, 25 bp, Homo sapien
gagcagatcgtagcacaccattccc

SEQ ID NO: 5524082 - DNA, 25 bp, Homo sapien
ttggagcagcaagacaatgtatatc

SEQ ID NO: 5524083 - DNA, 25 bp, Homo sapien
gtgacaataacagcatgggcagaat

SEQ ID NO: 5524084 - DNA, 25 bp, Homo sapien
ttttggtgtcacagctatgaaagct

SEQ ID NO: 5524085 - DNA, 25 bp, Homo sapien
cagaatgaaggcatatagagcaaat

SEQ ID NO: 5524086 - DNA, 25 bp, Homo sapien
tcccactggccaagtggttgaaccc

SEQ ID NO: 5524087 - DNA, 25 bp, Homo sapien
ctgcatccaagacccagtgagcagc

SEQ ID NO: 5524088 - DNA, 25 bp, Homo sapien
tgaggtgcaacctctgggcctctca

SEQ ID NO: 5524089 - DNA, 25 bp, Homo sapien
gagcttgccaagtaggatctattgc

SEQ ID NO: 5524090 - DNA, 25 bp, Homo sapien
ttcagtcaagaaacagtctgcatgc

SEQ ID NO: 5524091 - DNA, 25 bp, Homo sapien
tccagtaagaacactaatgatttgc

SEQ ID NO: 5524092 - DNA, 25 bp, Homo sapien
taccagctagagataatggtgttag

SEQ ID NO: 5524093 - DNA, 25 bp, Homo sapien
tgcagatgtgagatgaaatatagcc

SEQ ID NO: 5524094 - DNA, 25 bp, Homo sapien
tgctaaaagggaatgatatatcagt

SEQ ID NO: 5524095 - DNA, 25 bp, Homo sapien
ttctgatgaccaagaaaggaaaaat

SEQ ID NO: 5524096 - DNA, 25 bp, Homo sapien
ctagagaaaactgctaaaagggaat

SEQ ID NO: 5524097 - DNA, 25 bp, Homo sapien
aaatatagccagtgaatatgcatac

SEQ ID NO: 5524098 - DNA, 25 bp, Homo sapien
atcctttggaagtcactactggtct

SEQ ID NO: 5524099 - DNA, 25 bp, Homo sapien
gtctgcatgcagtaaattgaatttt

SEQ ID NO: 5524100 - DNA, 25 bp, Homo sapien
ctctgtaggctagactcagtccttg

SEQ ID NO: 5524101 - DNA, 25 bp, Homo sapien
gggattggtttagtggctcttctga

SEQ ID NO: 5524102 - DNA, 25 bp, Homo sapien
aaatctgactagttaaggtggcata

SEQ ID NO: 5524103 - DNA, 25 bp, Homo sapien
caaaagttaagactggtgaatctcc

SEQ ID NO: 5524104 - DNA, 25 bp, Homo sapien
gcatgaatgtagagaaaacacaatg

SEQ ID NO: 5524105 - DNA, 25 bp, Homo sapien
ccaggttcacatgagaaggtaaccc

SEQ ID NO: 5524106 - DNA, 25 bp, Homo sapien
aggctgctgtatgttctctgtaggc

SEQ ID NO: 5524107 - DNA, 25 bp, Homo sapien
taaggtggcataactagtgataaag

SEQ ID NO: 5524108 - DNA, 25 bp, Homo sapien
tgatacaaccacagacccctcggat

SEQ ID NO: 5524109 - DNA, 25 bp, Homo sapien
tcacgtggaagaggtttattacaaa

SEQ ID NO: 5524110 - DNA, 25 bp, Homo sapien
gataagactgtggtccaaagaaggc

SEQ ID NO: 5524111 - DNA, 25 bp, Homo sapien
caggaccagtagctaggagatctgg

SEQ ID NO: 5524112 - DNA, 25 bp, Homo sapien
ttatcccaagtagacagacaacttc

SEQ ID NO: 5524113 - DNA, 25 bp, Homo sapien
caacccatgaaaataactagcttac

SEQ ID NO: 5524114 - DNA, 25 bp, Homo sapien
gagagagaagtcattgccttggttc

SEQ ID NO: 5524115 - DNA, 25 bp, Homo sapien
aatggaagaggttttgacaatgtca

SEQ ID NO: 5524116 - DNA, 25 bp, Homo sapien
ctcatctaggtcctcagcatccttc

SEQ ID NO: 5524117 - DNA, 25 bp, Homo sapien
ctgaatgcttgctcagaagagaaac

SEQ ID NO: 5524118 - DNA, 25 bp, Homo sapien
agacaacttcagtagtagccatctc

SEQ ID NO: 5524119 - DNA, 25 bp, Homo sapien
aaaaatggatgagcaacccatgaaa

SEQ ID NO: 5524120 - DNA, 25 bp, Homo sapien
tctgacactaagtaacccttttgcc

SEQ ID NO: 5524121 - DNA, 25 bp, Homo sapien
gtttatacctgccctgaatgcttgc

SEQ ID NO: 5524122 - DNA, 25 bp, Homo sapien
aaatgacaggctcatagaaaaattc

SEQ ID NO: 5524123 - DNA, 25 bp, Homo sapien
actaagatcgtaagttgcactctcc

SEQ ID NO: 5524124 - DNA, 25 bp, Homo sapien
tcttatggatgtattggggagttag

SEQ ID NO: 5524125 - DNA, 25 bp, Homo sapien
acaatgaatggacagtcatatggtt

SEQ ID NO: 5524126 - DNA, 25 bp, Homo sapien
tacaagtacatgggaaagcaatttc

SEQ ID NO: 5524127 - DNA, 25 bp, Homo sapien
tcctttaaacaatgcagaggacaag

SEQ ID NO: 5524128 - DNA, 25 bp, Homo sapien
gacaagaaatcctctatgtgatggc

SEQ ID NO: 5524129 - DNA, 25 bp, Homo sapien
atcctaaaagattgaatgagtactc

SEQ ID NO: 5524130 - DNA, 25 bp, Homo sapien
tagaaaacataggctacaatgaatg

SEQ ID NO: 5524131 - DNA, 25 bp, Homo sapien
atccagcatgatttgtagttgtcct

SEQ ID NO: 5524132 - DNA, 25 bp, Homo sapien
caggattgcaagaggttctacgtaa

SEQ ID NO: 5524133 - DNA, 25 bp, Homo sapien
tggtcctcacgcattcacagaactg

SEQ ID NO: 5524134 - DNA, 25 bp, Homo sapien
tggatggaaaaatcagtttgcctgg

SEQ ID NO: 5524135 - DNA, 25 bp, Homo sapien
gaactgtctgcttaggttacagcac

SEQ ID NO: 5524136 - DNA, 25 bp, Homo sapien
ctttggtgacctccaccgtggctgc

SEQ ID NO: 5524137 - DNA, 25 bp, Homo sapien
gtttgcctgggcatctgtaaacctt

SEQ ID NO: 5524138 - DNA, 25 bp, Homo sapien
atgacaattgaggagagttaaagaa

SEQ ID NO: 5524139 - DNA, 25 bp, Homo sapien
gctgcagacttcaggtggtcctcac

SEQ ID NO: 5524140 - DNA, 25 bp, Homo sapien
ttatatatgacaattgaggagagtt

SEQ ID NO: 5524141 - DNA, 25 bp, Homo sapien
tgtaaacctttgggcaagtgaattc

SEQ ID NO: 5524142 - DNA, 25 bp, Homo sapien
caccgtggctgcagacttcaggtgg

SEQ ID NO: 5524143 - DNA, 25 bp, Homo sapien
aaagaacaagataattctggatgga

SEQ ID NO: 5524144 - DNA, 25 bp, Homo sapien
tcttggccatgaagaaataagttag

SEQ ID NO: 5524145 - DNA, 25 bp, Homo sapien
agaagccgttctaagttttgttgta

SEQ ID NO: 5524146 - DNA, 25 bp, Homo sapien
tatcgagataagttagggtagtttc

SEQ ID NO: 5524147 - DNA, 25 bp, Homo sapien
agttagggtagtttcttggccatga

SEQ ID NO: 5524148 - DNA, 25 bp, Homo sapien
aagaaataagttagaagccgttcta

SEQ ID NO: 5524149 - DNA, 25 bp, Homo sapien
ccctgacatccgaaagaatctggat

SEQ ID NO: 5524150 - DNA, 25 bp, Homo sapien
agaatctggatcaaaggcaaacttt

SEQ ID NO: 5524151 - DNA, 25 bp, Homo sapien
ttctgtaaccttctgattaggctaa

SEQ ID NO: 5524152 - DNA, 25 bp, Homo sapien
tacacattagaaataagacagaact

SEQ ID NO: 5524153 - DNA, 25 bp, Homo sapien
gacatgtcaatgtgaatatccctga

SEQ ID NO: 5524154 - DNA, 25 bp, Homo sapien
ggaacactaaaaagacatgtcaatg

SEQ ID NO: 5524155 - DNA, 25 bp, Homo sapien
ctctgataccagagtgcagccatgc

SEQ ID NO: 5524156 - DNA, 25 bp, Homo sapien
gtgcccctgaccattaacgactgtt

SEQ ID NO: 5524157 - DNA, 25 bp, Homo sapien
acaaaatgcattacacctgtagtgt

SEQ ID NO: 5524158 - DNA, 25 bp, Homo sapien
ccgactcctttcaccaaattgctcc

SEQ ID NO: 5524159 - DNA, 25 bp, Homo sapien
ctcactttccccttgtggggtagga

SEQ ID NO: 5524160 - DNA, 25 bp, Homo sapien
agctctggtcacccgactcctttca

SEQ ID NO: 5524161 - DNA, 25 bp, Homo sapien
aaaagagaagtcagtgctcactttt

SEQ ID NO: 5524162 - DNA, 25 bp, Homo sapien
ctcctaactggaagatctcactttc

SEQ ID NO: 5524163 - DNA, 25 bp, Homo sapien
acacctgtagtgtaaagtggccact

SEQ ID NO: 5524164 - DNA, 25 bp, Homo sapien
ggatgtgcccctgaccattaacgac

SEQ ID NO: 5524165 - DNA, 25 bp, Homo sapien
tgccctccacactatccttacttct

SEQ ID NO: 5524166 - DNA, 25 bp, Homo sapien
ccagctttgcccaactgttgcttct

SEQ ID NO: 5524167 - DNA, 25 bp, Homo sapien
caggtttccttgtggggaatggttc

SEQ ID NO: 5524168 - DNA, 25 bp, Homo sapien
cagccctgaactcttgagacaactc

SEQ ID NO: 5524169 - DNA, 25 bp, Homo sapien
cttccgcgagctgcacctgctcatg

SEQ ID NO: 5524170 - DNA, 25 bp, Homo sapien
ctgccccatggtttgaatgaggcca

SEQ ID NO: 5524171 - DNA, 25 bp, Homo sapien
agacaactctctccagcaatagctg

SEQ ID NO: 5524172 - DNA, 25 bp, Homo sapien
cttgtgcacccactggcccatgagc

SEQ ID NO: 5524173 - DNA, 25 bp, Homo sapien
cccagagtgcctgccccatggtttg

SEQ ID NO: 5524174 - DNA, 25 bp, Homo sapien
cactggcccatgagcctctgcctgg

SEQ ID NO: 5524175 - DNA, 25 bp, Homo sapien
gcacctgctcatggccagtctggac

SEQ ID NO: 5524176 - DNA, 25 bp, Homo sapien
ccagcaatagctgcccagctttgcc

SEQ ID NO: 5524177 - DNA, 25 bp, Homo sapien
tcaaaagaggccacattcctatgac

SEQ ID NO: 5524178 - DNA, 25 bp, Homo sapien
aaatctattggagatgacaatttag

SEQ ID NO: 5524179 - DNA, 25 bp, Homo sapien
tatgacacttggccaagaaatgtag

SEQ ID NO: 5524180 - DNA, 25 bp, Homo sapien
ggagacttgattcaattaggccttt

SEQ ID NO: 5524181 - DNA, 25 bp, Homo sapien
acacttggccaagaaatgtaggaaa

SEQ ID NO: 5524182 - DNA, 25 bp, Homo sapien
ttttgcatctttggaagtggggagg

SEQ ID NO: 5524183 - DNA, 25 bp, Homo sapien
tcaatggtaagaacattaaaagtat

SEQ ID NO: 5524184 - DNA, 25 bp, Homo sapien
aatggcatattcaatggtaagaaca

SEQ ID NO: 5524185 - DNA, 25 bp, Homo sapien
tggagatgacaatttagagagctgg

SEQ ID NO: 5524186 - DNA, 25 bp, Homo sapien
aaaatgtctcctgccagatggaaag

SEQ ID NO: 5524187 - DNA, 25 bp, Homo sapien
gacaatttagagagctggacaaaaa

SEQ ID NO: 5524188 - DNA, 25 bp, Homo sapien
aagcattgagaaaaacggtgaattt

SEQ ID NO: 5524189 - DNA, 25 bp, Homo sapien
gctggcaaaggagaagtaacttttg

SEQ ID NO: 5524190 - DNA, 25 bp, Homo sapien
aaagacacctgacatatgcggaatt

SEQ ID NO: 5524191 - DNA, 25 bp, Homo sapien
tgggattcagaatttgtgcaactac

SEQ ID NO: 5524192 - DNA, 25 bp, Homo sapien
tggaacttttaagtggagtggtgga

SEQ ID NO: 5524193 - DNA, 25 bp, Homo sapien
agcaagcctttgtgcaacgggacaa

SEQ ID NO: 5524194 - DNA, 25 bp, Homo sapien
ggtggatcagaccaaagatggatta

SEQ ID NO: 5524195 - DNA, 25 bp, Homo sapien
cctttgaatctgtcctgtgtgcccc

SEQ ID NO: 5524196 - DNA, 25 bp, Homo sapien
tggacagaccacaattcatcaacat

SEQ ID NO: 5524197 - DNA, 25 bp, Homo sapien
tttttggagaaagccagcctaatcc

SEQ ID NO: 5524198 - DNA, 25 bp, Homo sapien
tgaggatgttaagcaagtttttgga

SEQ ID NO: 5524199 - DNA, 25 bp, Homo sapien
tggacttgagattcagaccagatct

SEQ ID NO: 5524200 - DNA, 25 bp, Homo sapien
ttaagatatctgtgcgccagcctac

SEQ ID NO: 5524201 - DNA, 25 bp, Homo sapien
acacagcagcaattagtagccattt

SEQ ID NO: 5524202 - DNA, 25 bp, Homo sapien
gtgcgccagcctacaagaaatacaa

SEQ ID NO: 5524203 - DNA, 25 bp, Homo sapien
acagggtaaaatcctagctggatca

SEQ ID NO: 5524204 - DNA, 25 bp, Homo sapien
ccaccatgccttgccgagtttttgt

SEQ ID NO: 5524205 - DNA, 25 bp, Homo sapien
agaccagatctgtaagccactgcac

SEQ ID NO: 5524206 - DNA, 25 bp, Homo sapien
ttattgagttgtggtttatgcctgt

SEQ ID NO: 5524207 - DNA, 25 bp, Homo sapien
tgcacccggccttgatagccatttg

SEQ ID NO: 5524208 - DNA, 25 bp, Homo sapien
aaatacaaatgtacagggtaaaatc

SEQ ID NO: 5524209 - DNA, 25 bp, Homo sapien
ttgaactctggactggtctggactt

SEQ ID NO: 5524210 - DNA, 25 bp, Homo sapien
tggaagtggtcaaaacatacaacca

SEQ ID NO: 5524211 - DNA, 25 bp, Homo sapien
attttcataggtggaagtggtcaaa

SEQ ID NO: 5524212 - DNA, 25 bp, Homo sapien
ttaagggtagacacatgacaatgaa

SEQ ID NO: 5524213 - DNA, 25 bp, Homo sapien
gcatataaactgacaagaggaaccc

SEQ ID NO: 5524214 - DNA, 25 bp, Homo sapien
tccccaagtcccacatgccaaaatg

SEQ ID NO: 5524215 - DNA, 25 bp, Homo sapien
aatagcaattttaagggtagacaca

SEQ ID NO: 5524216 - DNA, 25 bp, Homo sapien
actaggttctgtaccacctgctccc

SEQ ID NO: 5524217 - DNA, 25 bp, Homo sapien
atgttgggaataatatgacaacctt

SEQ ID NO: 5524218 - DNA, 25 bp, Homo sapien
aaaccctgagaaaggtgtactattc

SEQ ID NO: 5524219 - DNA, 25 bp, Homo sapien
accatgaacagaacaggttgccttc

SEQ ID NO: 5524220 - DNA, 25 bp, Homo sapien
gaggaacccagaagtgactaaatac

SEQ ID NO: 5524221 - DNA, 25 bp, Homo sapien
aaaggtggcagcatgtttacatgag

SEQ ID NO: 5524222 - DNA, 25 bp, Homo sapien
atttgagttctctgagaaagaagaa

SEQ ID NO: 5524223 - DNA, 25 bp, Homo sapien
caacatagaagtaaccatatcaaac

SEQ ID NO: 5524224 - DNA, 25 bp, Homo sapien
ggaacacagcttgaaatactgacaa

SEQ ID NO: 5524225 - DNA, 25 bp, Homo sapien
tggataaatataactagaaggttga

SEQ ID NO: 5524226 - DNA, 25 bp, Homo sapien
tcactgtccagtagggtttactcac

SEQ ID NO: 5524227 - DNA, 25 bp, Homo sapien
atatcatttacactggggttgggaa

SEQ ID NO: 5524228 - DNA, 25 bp, Homo sapien
ttacacaaatggaatcccgattatg

SEQ ID NO: 5524229 - DNA, 25 bp, Homo sapien
aagcaaaaatgacaaactatagcaa

SEQ ID NO: 5524230 - DNA, 25 bp, Homo sapien
agattacatatgctagatcactggt

SEQ ID NO: 5524231 - DNA, 25 bp, Homo sapien
atcaaactaagaaaggaacacagct

SEQ ID NO: 5524232 - DNA, 25 bp, Homo sapien
aaaggtaggaacttacagtgctcca

SEQ ID NO: 5524233 - DNA, 25 bp, Homo sapien
tgaatcatgggaacaaatacagctt

SEQ ID NO: 5524234 - DNA, 25 bp, Homo sapien
ctgagtccagctgaaggctgcaaca

SEQ ID NO: 5524235 - DNA, 25 bp, Homo sapien
gagaccctggccaaacggctcttct

SEQ ID NO: 5524236 - DNA, 25 bp, Homo sapien
tttgatcccatcagccagtggagcc

SEQ ID NO: 5524237 - DNA, 25 bp, Homo sapien
cagtgatgacaggctgtcctgctgc

SEQ ID NO: 5524238 - DNA, 25 bp, Homo sapien
tgttgaaagcctaaattggagaccc

SEQ ID NO: 5524239 - DNA, 25 bp, Homo sapien
ggatatacaaggagggtctttgatc

SEQ ID NO: 5524240 - DNA, 25 bp, Homo sapien
ggctgcaacaggaagcccctcagcc

SEQ ID NO: 5524241 - DNA, 25 bp, Homo sapien
ccagtggagccgacataatgtataa

SEQ ID NO: 5524242 - DNA, 25 bp, Homo sapien
agtggcctggtaatagagtacaggt

SEQ ID NO: 5524243 - DNA, 25 bp, Homo sapien
ggcaacgaagaagacaaccatcttc

SEQ ID NO: 5524244 - DNA, 25 bp, Homo sapien
agaaaaattgcacacgaaaaatgcc

SEQ ID NO: 5524245 - DNA, 25 bp, Homo sapien
agcgctgtgcagatttgatatttca

SEQ ID NO: 5524246 - DNA, 25 bp, Homo sapien
aataacaggttaacaggcagttgtt

SEQ ID NO: 5524247 - DNA, 25 bp, Homo sapien
acatgatgtgccggcagtttcttgc

SEQ ID NO: 5524248 - DNA, 25 bp, Homo sapien
gggaggcccacttccacagcctaca

SEQ ID NO: 5524249 - DNA, 25 bp, Homo sapien
gcggcctctgacatgatgtgccggc

SEQ ID NO: 5524250 - DNA, 25 bp, Homo sapien
acttccacatcaaccagaccctgag

SEQ ID NO: 5524251 - DNA, 25 bp, Homo sapien
ggccggatccagccctaacacgcct

SEQ ID NO: 5524252 - DNA, 25 bp, Homo sapien
acagagtcttcaggcagtgacagtg

SEQ ID NO: 5524253 - DNA, 25 bp, Homo sapien
ctaacacgcctcagcccgtgcccga

SEQ ID NO: 5524254 - DNA, 25 bp, Homo sapien
tgctggaaatgagcagctgccttct

SEQ ID NO: 5524255 - DNA, 25 bp, Homo sapien
cacctaccatagcgcaaagaaggag

SEQ ID NO: 5524256 - DNA, 25 bp, Homo sapien
ccttaaacaggaacagccaacaggc

SEQ ID NO: 5524257 - DNA, 25 bp, Homo sapien
tgaaagcactcatgtgaaaagcttc

SEQ ID NO: 5524258 - DNA, 25 bp, Homo sapien
cctatgatgggtaaacacctaccat

SEQ ID NO: 5524259 - DNA, 25 bp, Homo sapien
acaggcctaccagtccttgtactct

SEQ ID NO: 5524260 - DNA, 25 bp, Homo sapien
gaaaatgtccttggactgcagtcat

SEQ ID NO: 5524261 - DNA, 25 bp, Homo sapien
atttagactggccaaaaaccaggga

SEQ ID NO: 5524262 - DNA, 25 bp, Homo sapien
tcagcatgaagtgtaatcaccacat

SEQ ID NO: 5524263 - DNA, 25 bp, Homo sapien
gctacttcccctgctggaaatgagc

SEQ ID NO: 5524264 - DNA, 25 bp, Homo sapien
ttcatgaatgaactgatggaaattt

SEQ ID NO: 5524265 - DNA, 25 bp, Homo sapien
acacgcctctaccgtggagaagcgc

SEQ ID NO: 5524266 - DNA, 25 bp, Homo sapien
attctctggctagttagaaggcact

SEQ ID NO: 5524267 - DNA, 25 bp, Homo sapien
atgaccaacatgtacagtagttgac

SEQ ID NO: 5524268 - DNA, 25 bp, Homo sapien
atcaagccttcgcttctgtgacgtc

SEQ ID NO: 5524269 - DNA, 25 bp, Homo sapien
tcgaattaaattatggtatgagttt

SEQ ID NO: 5524270 - DNA, 25 bp, Homo sapien
attatgagccatcatcaggagggaa

SEQ ID NO: 5524271 - DNA, 25 bp, Homo sapien
atgtacagtagttgacacgatgcac

SEQ ID NO: 5524272 - DNA, 25 bp, Homo sapien
ccctcacacccccagctcaagatgc

SEQ ID NO: 5524273 - DNA, 25 bp, Homo sapien
cctacagccttaacaccagcctgct

SEQ ID NO: 5524274 - DNA, 25 bp, Homo sapien
gcctgctaaactgagaacacgcctc

SEQ ID NO: 5524275 - DNA, 25 bp, Homo sapien
gctagttagaaggcactgtcatggg

SEQ ID NO: 5524276 - DNA, 25 bp, Homo sapien
aattccattggtgtagactttagca

SEQ ID NO: 5524277 - DNA, 25 bp, Homo sapien
acacatttaatgatggtccagtatt

SEQ ID NO: 5524278 - DNA, 25 bp, Homo sapien
gtttgcagtctgtacttgagtagtg

SEQ ID NO: 5524279 - DNA, 25 bp, Homo sapien
cttgagtagtgtttatttagtggac

SEQ ID NO: 5524280 - DNA, 25 bp, Homo sapien
gtggactttggtaaagcccttcata

SEQ ID NO: 5524281 - DNA, 25 bp, Homo sapien
gggtatgcagcaatagtaatcaatt

SEQ ID NO: 5524282 - DNA, 25 bp, Homo sapien
aaagctagcagttgtgagttgtatt

SEQ ID NO: 5524283 - DNA, 25 bp, Homo sapien
cacagatacattttggtttgcagtc

SEQ ID NO: 5524284 - DNA, 25 bp, Homo sapien
gcaattaatgtcgtaacacagatac

SEQ ID NO: 5524285 - DNA, 25 bp, Homo sapien
cccaccccccaaagctagcagttgt

SEQ ID NO: 5524286 - DNA, 25 bp, Homo sapien
ccccatcccaccccgggtatgcagc

SEQ ID NO: 5524287 - DNA, 25 bp, Homo sapien
gcaatactgtgccgtaagaacatac

SEQ ID NO: 5524288 - DNA, 25 bp, Homo sapien
tcgaactaaaggtcagcaatactgt

SEQ ID NO: 5524289 - DNA, 25 bp, Homo sapien
aagaacaaaattgcaagctcccagc

SEQ ID NO: 5524290 - DNA, 25 bp, Homo sapien
caacaaccgacaaaacctcgaacta

SEQ ID NO: 5524291 - DNA, 25 bp, Homo sapien
ctacagaaataagtgagagtcagat

SEQ ID NO: 5524292 - DNA, 25 bp, Homo sapien
tggtctgcatgtattgactggatct

SEQ ID NO: 5524293 - DNA, 25 bp, Homo sapien
tgagagtcagatggagaactctgca

SEQ ID NO: 5524294 - DNA, 25 bp, Homo sapien
tggatagcacttgcaagaggaagaa

SEQ ID NO: 5524295 - DNA, 25 bp, Homo sapien
agaaacttcacacactcacatggat

SEQ ID NO: 5524296 - DNA, 25 bp, Homo sapien
cacctccctcactagtcctcccccc

SEQ ID NO: 5524297 - DNA, 25 bp, Homo sapien
tgactggatctgaatattaacgttt

SEQ ID NO: 5524298 - DNA, 25 bp, Homo sapien
tggtacctgccctccccttggtctc

SEQ ID NO: 5524299 - DNA, 25 bp, Homo sapien
tctgtccctagattgtgtgactccc

SEQ ID NO: 5524300 - DNA, 25 bp, Homo sapien
gtgtgactcccttcaggcagtcctt

SEQ ID NO: 5524301 - DNA, 25 bp, Homo sapien
tagcatccttaggtcttggacagac

SEQ ID NO: 5524302 - DNA, 25 bp, Homo sapien
gtcaagaatccaccttgggcagttc

SEQ ID NO: 5524303 - DNA, 25 bp, Homo sapien
ctcccagtcacagccctcttctttt

SEQ ID NO: 5524304 - DNA, 25 bp, Homo sapien
tcaatatgaacaccttgtagcatcc

SEQ ID NO: 5524305 - DNA, 25 bp, Homo sapien
cctgggcaccccatgctcaatatga

SEQ ID NO: 5524306 - DNA, 25 bp, Homo sapien
cttggacagacctcggtcagctctg

SEQ ID NO: 5524307 - DNA, 25 bp, Homo sapien
gtcagctctggcacagtcaagaatc

SEQ ID NO: 5524308 - DNA, 25 bp, Homo sapien
tggtctcatgagcgtcttttcagct

SEQ ID NO: 5524309 - DNA, 25 bp, Homo sapien
cagacctgtcactcaacagcgctcc

SEQ ID NO: 5524310 - DNA, 25 bp, Homo sapien
actgaacttagaaaggtagactttc

SEQ ID NO: 5524311 - DNA, 25 bp, Homo sapien
aggacagatggatttcactagggga

SEQ ID NO: 5524312 - DNA, 25 bp, Homo sapien
gctcctgagatccctctggcgagcc

SEQ ID NO: 5524313 - DNA, 25 bp, Homo sapien
ctggcgagcccttgcggctccacat

SEQ ID NO: 5524314 - DNA, 25 bp, Homo sapien
tcggtgaggagactcagtcttactc

SEQ ID NO: 5524315 - DNA, 25 bp, Homo sapien
taaaagctactgcatcagacctgtc

SEQ ID NO: 5524316 - DNA, 25 bp, Homo sapien
ctcgggatacagccagatctcttcg

SEQ ID NO: 5524317 - DNA, 25 bp, Homo sapien
agggttcccttcaggacagatggat

SEQ ID NO: 5524318 - DNA, 25 bp, Homo sapien
caaaggtttcagagactcgggatac

SEQ ID NO: 5524319 - DNA, 25 bp, Homo sapien
gaatccgtgcggcctccctttggtg

SEQ ID NO: 5524320 - DNA, 25 bp, Homo sapien
tgccttatggtcccctagagggtct

SEQ ID NO: 5524321 - DNA, 25 bp, Homo sapien
gataatggggtcaccagtcatttcc

SEQ ID NO: 5524322 - DNA, 25 bp, Homo sapien
caattaaggagaaacttgggcctat

SEQ ID NO: 5524323 - DNA, 25 bp, Homo sapien
tgcatttggcaaagagagtgcatac

SEQ ID NO: 5524324 - DNA, 25 bp, Homo sapien
agatcaagaatttcggcagcactgc

SEQ ID NO: 5524325 - DNA, 25 bp, Homo sapien
gttgtgctggtagtatatagatccc

SEQ ID NO: 5524326 - DNA, 25 bp, Homo sapien
agtaatgatgcccaaatgaggtaat

SEQ ID NO: 5524327 - DNA, 25 bp, Homo sapien
tagaattaacagagtaatgatgccc

SEQ ID NO: 5524328 - DNA, 25 bp, Homo sapien
tgtcagatcagagaaattgcaatcc

SEQ ID NO: 5524329 - DNA, 25 bp, Homo sapien
tccacgttacacaaaagcacatgca

SEQ ID NO: 5524330 - DNA, 25 bp, Homo sapien
aacaatgatgataatggggtcacca

SEQ ID NO: 5524331 - DNA, 25 bp, Homo sapien
cgttctccgcaccgtgcagaggcgg

SEQ ID NO: 5524332 - DNA, 25 bp, Homo sapien
tacaagtggcagaagcatagaaata

SEQ ID NO: 5524333 - DNA, 25 bp, Homo sapien
agatgccatgagagctgctgatcag

SEQ ID NO: 5524334 - DNA, 25 bp, Homo sapien
ctgagaaaatgatgcatcctgttgc

SEQ ID NO: 5524335 - DNA, 25 bp, Homo sapien
gctgcctgccactccgtcttggccc

SEQ ID NO: 5524336 - DNA, 25 bp, Homo sapien
aaatgaaacacacttgcagactaca

SEQ ID NO: 5524337 - DNA, 25 bp, Homo sapien
ccagctttctgtgggcctggcaagc

SEQ ID NO: 5524338 - DNA, 25 bp, Homo sapien
gttgccagcagtaatccagctttct

SEQ ID NO: 5524339 - DNA, 25 bp, Homo sapien
gttcccagccgctgggaagccccta

SEQ ID NO: 5524340 - DNA, 25 bp, Homo sapien
tggtttgtcagaggcaagacccatt

SEQ ID NO: 5524341 - DNA, 25 bp, Homo sapien
tacagccacacagtcaaccacaaac

SEQ ID NO: 5524342 - DNA, 25 bp, Homo sapien
ttccttgaccctggagaacgaggat

SEQ ID NO: 5524343 - DNA, 25 bp, Homo sapien
ttggtgaggatgacacagtcctcta

SEQ ID NO: 5524344 - DNA, 25 bp, Homo sapien
gtgaccgagtcaccaagatgaccac

SEQ ID NO: 5524345 - DNA, 25 bp, Homo sapien
gcagtcacgtcgtgaaggcagtgtg

SEQ ID NO: 5524346 - DNA, 25 bp, Homo sapien
ttcactgcatcccaggaaaaggctg

SEQ ID NO: 5524347 - DNA, 25 bp, Homo sapien
cacaaggtcaagtcgaaaacacgac

SEQ ID NO: 5524348 - DNA, 25 bp, Homo sapien
atcgagttcatggatgggatttcac

SEQ ID NO: 5524349 - DNA, 25 bp, Homo sapien
gaacagcccctcagcgacgtctgat

SEQ ID NO: 5524350 - DNA, 25 bp, Homo sapien
gatcttggccagtagctgctgtgac

SEQ ID NO: 5524351 - DNA, 25 bp, Homo sapien
gcaggacccttcacatgtggcctca

SEQ ID NO: 5524352 - DNA, 25 bp, Homo sapien
tggcagatgtaatgagcttggtgag

SEQ ID NO: 5524353 - DNA, 25 bp, Homo sapien
agaggcaagtctacagagatcaaag

SEQ ID NO: 5524354 - DNA, 25 bp, Homo sapien
taatagcatttagggtaagcaagga

SEQ ID NO: 5524355 - DNA, 25 bp, Homo sapien
agcggacagcaaacaccatactcag

SEQ ID NO: 5524356 - DNA, 25 bp, Homo sapien
tgggggtagtaaactctaagactga

SEQ ID NO: 5524357 - DNA, 25 bp, Homo sapien
gatggctgctgaactgtgactatac

SEQ ID NO: 5524358 - DNA, 25 bp, Homo sapien
agaaacagacaccttggagaattta

SEQ ID NO: 5524359 - DNA, 25 bp, Homo sapien
tcaaagtagcctaggggtgcctagg

SEQ ID NO: 5524360 - DNA, 25 bp, Homo sapien
acaccatactcagagtgatggaatt

SEQ ID NO: 5524361 - DNA, 25 bp, Homo sapien
tctctatgtcatgtccagaagaggc

SEQ ID NO: 5524362 - DNA, 25 bp, Homo sapien
tacacacactcttgaagctcttggc

SEQ ID NO: 5524363 - DNA, 25 bp, Homo sapien
aagctcttggcattcagcggacagc

SEQ ID NO: 5524364 - DNA, 25 bp, Homo sapien
tttattttgggcgccagcggagaaa

SEQ ID NO: 5524365 - DNA, 25 bp, Homo sapien
ctggagcagggcctgttttccaaag

SEQ ID NO: 5524366 - DNA, 25 bp, Homo sapien
tctgttgcctgggtaccaccagagg

SEQ ID NO: 5524367 - DNA, 25 bp, Homo sapien
ggcagagtgctcttaaaggaaatcc

SEQ ID NO: 5524368 - DNA, 25 bp, Homo sapien
aaaatgtgaatcaagaagtggtgga

SEQ ID NO: 5524369 - DNA, 25 bp, Homo sapien
tgctggccagtaatatcaaggattc

SEQ ID NO: 5524370 - DNA, 25 bp, Homo sapien
gaagcttcgggaagacttcaggatg

SEQ ID NO: 5524371 - DNA, 25 bp, Homo sapien
caaagtcacgctcattggccggagg

SEQ ID NO: 5524372 - DNA, 25 bp, Homo sapien
gaaaagttggatgactacgcctctg

SEQ ID NO: 5524373 - DNA, 25 bp, Homo sapien
gccgaaacagaagccctgtcgaagc

SEQ ID NO: 5524374 - DNA, 25 bp, Homo sapien
ggaagctcaccttcgacgaggaagc

SEQ ID NO: 5524375 - DNA, 25 bp, Homo sapien
agggcttgtggccagcagatttaga

SEQ ID NO: 5524376 - DNA, 25 bp, Homo sapien
tacggcgagaatcattacaatgcac

SEQ ID NO: 5524377 - DNA, 25 bp, Homo sapien
aactttggatacagcaggttggtag

SEQ ID NO: 5524378 - DNA, 25 bp, Homo sapien
gaatacgccccagaaacatgacttt

SEQ ID NO: 5524379 - DNA, 25 bp, Homo sapien
ctgctgaagtattctcacataaagc

SEQ ID NO: 5524380 - DNA, 25 bp, Homo sapien
tgtggccagcagatttagaagtgaa

SEQ ID NO: 5524381 - DNA, 25 bp, Homo sapien
ctattacctgactacggcgagaatc

SEQ ID NO: 5524382 - DNA, 25 bp, Homo sapien
agatgtgtatctttagcagggcttg

SEQ ID NO: 5524383 - DNA, 25 bp, Homo sapien
aaagcaagtattatccagttgacat

SEQ ID NO: 5524384 - DNA, 25 bp, Homo sapien
aggaaatttcggttggatactatta

SEQ ID NO: 5524385 - DNA, 25 bp, Homo sapien
cttgtcagctacttgaatacgcccc

SEQ ID NO: 5524386 - DNA, 25 bp, Homo sapien
aggcactggttagaaagctgatgac

SEQ ID NO: 5524387 - DNA, 25 bp, Homo sapien
tccagaagcccaatccagtggtcac

SEQ ID NO: 5524388 - DNA, 25 bp, Homo sapien
ctccaaaccatggtgtgcctgccgt

SEQ ID NO: 5524389 - DNA, 25 bp, Homo sapien
atggccggcagttcctcaaagctaa

SEQ ID NO: 5524390 - DNA, 25 bp, Homo sapien
aatcaaccatcaccggagcaaggct

SEQ ID NO: 5524391 - DNA, 25 bp, Homo sapien
tcaaagctaaagctggtgcgtgaat

SEQ ID NO: 5524392 - DNA, 25 bp, Homo sapien
tggaggcttcagcaggtcttcaacg

SEQ ID NO: 5524393 - DNA, 25 bp, Homo sapien
tgccgtggccacacctgtcaggcta

SEQ ID NO: 5524394 - DNA, 25 bp, Homo sapien
aggaccccctgagacctgaacatca

SEQ ID NO: 5524395 - DNA, 25 bp, Homo sapien
cctgacagatggcacgttgacagtg

SEQ ID NO: 5524396 - DNA, 25 bp, Homo sapien
gaacatcagatgtctggctggaggc

SEQ ID NO: 5524397 - DNA, 25 bp, Homo sapien
tcaagtctgggtccttggagaatgt

SEQ ID NO: 5524398 - DNA, 25 bp, Homo sapien
tgacagtgtgtctggagacagagaa

SEQ ID NO: 5524399 - DNA, 25 bp, Homo sapien
cagtatatgaaaatgacagtgtgtc

SEQ ID NO: 5524400 - DNA, 25 bp, Homo sapien
tgtccagaaactcttgggccagttc

SEQ ID NO: 5524401 - DNA, 25 bp, Homo sapien
tgctgaaagggtcgctcctcttcac

SEQ ID NO: 5524402 - DNA, 25 bp, Homo sapien
aagagcggtttggcttccctgcatt

SEQ ID NO: 5524403 - DNA, 25 bp, Homo sapien
agcggcatctctcgcctgacctggc

SEQ ID NO: 5524404 - DNA, 25 bp, Homo sapien
actcttgatggaggaattcgctttc

SEQ ID NO: 5524405 - DNA, 25 bp, Homo sapien
agcgaaaggaagatcagtatatgaa

SEQ ID NO: 5524406 - DNA, 25 bp, Homo sapien
gagaatgtgccaaatgtaggagtga

SEQ ID NO: 5524407 - DNA, 25 bp, Homo sapien
agagaagaaaagtccactgtcatgg

SEQ ID NO: 5524408 - DNA, 25 bp, Homo sapien
gcacaaaggtatggacagtgaaaca

SEQ ID NO: 5524409 - DNA, 25 bp, Homo sapien
tttcacactgaggagacttagttac

SEQ ID NO: 5524410 - DNA, 25 bp, Homo sapien
tgctcctttaaaacggaggcgaaca

SEQ ID NO: 5524411 - DNA, 25 bp, Homo sapien
aatgaagtccatgtgacagaagtac

SEQ ID NO: 5524412 - DNA, 25 bp, Homo sapien
tatgttggcgtcaacgttgacaaca

SEQ ID NO: 5524413 - DNA, 25 bp, Homo sapien
atcagtagtagaagcacaaaggtat

SEQ ID NO: 5524414 - DNA, 25 bp, Homo sapien
aaggaagcatgagaccacgtctatc

SEQ ID NO: 5524415 - DNA, 25 bp, Homo sapien
gtacaaataagtagagcttcctgtc

SEQ ID NO: 5524416 - DNA, 25 bp, Homo sapien
gacagaagtaatttggaagtgcatc

SEQ ID NO: 5524417 - DNA, 25 bp, Homo sapien
aggataggggttacaatgctccttt

SEQ ID NO: 5524418 - DNA, 25 bp, Homo sapien
tacgcataataaacacaacacatac

SEQ ID NO: 5524419 - DNA, 25 bp, Homo sapien
acacctctatgtcccactgatgctc

SEQ ID NO: 5524420 - DNA, 25 bp, Homo sapien
aacatggtaatgcagagacctccta

SEQ ID NO: 5524421 - DNA, 25 bp, Homo sapien
gggggtattcaagcaaatgacaacc

SEQ ID NO: 5524422 - DNA, 25 bp, Homo sapien
agtctgtgagcctggtaatggatac

SEQ ID NO: 5524423 - DNA, 25 bp, Homo sapien
gattctggacgagctccaaaggaga

SEQ ID NO: 5524424 - DNA, 25 bp, Homo sapien
ttcaagggggtattcaagcaaatga

SEQ ID NO: 5524425 - DNA, 25 bp, Homo sapien
ttgcaggtaaatatgtgtgtgaggc

SEQ ID NO: 5524426 - DNA, 25 bp, Homo sapien
atacaagagactggtaattgatgga

SEQ ID NO: 5524427 - DNA, 25 bp, Homo sapien
tgtaaaatggttcttcagacacctc

SEQ ID NO: 5524428 - DNA, 25 bp, Homo sapien
ctgatggattctggacgagctccaa

SEQ ID NO: 5524429 - DNA, 25 bp, Homo sapien
cattaagcacttgagatcttgatac

SEQ ID NO: 5524430 - DNA, 25 bp, Homo sapien
ttacaaaagatgatgaacaagaggg

SEQ ID NO: 5524431 - DNA, 25 bp, Homo sapien
aaggaagtagaagctatgttaatac

SEQ ID NO: 5524432 - DNA, 25 bp, Homo sapien
agcagaaaagatctacaatgggacc

SEQ ID NO: 5524433 - DNA, 25 bp, Homo sapien
tttatttggtagcagaaaagatcta

SEQ ID NO: 5524434 - DNA, 25 bp, Homo sapien
ctgaaccggaataaaattaagtcta

SEQ ID NO: 5524435 - DNA, 25 bp, Homo sapien
acaatgggacctttacaaaagatga

SEQ ID NO: 5524436 - DNA, 25 bp, Homo sapien
gttgtcaaaatttgggatgatcatc

SEQ ID NO: 5524437 - DNA, 25 bp, Homo sapien
gggatgatcatcagtaatcaagaac

SEQ ID NO: 5524438 - DNA, 25 bp, Homo sapien
aatgtgcatgtaacatcagatgtta

SEQ ID NO: 5524439 - DNA, 25 bp, Homo sapien
aatgcatgaactatttagacagatt

SEQ ID NO: 5524440 - DNA, 25 bp, Homo sapien
acagagattatactgaaccggaata

SEQ ID NO: 5524441 - DNA, 25 bp, Homo sapien
gcaaagaaaaagatccccgctgtgg

SEQ ID NO: 5524442 - DNA, 25 bp, Homo sapien
aaaaacagcaaattgtgacttgtac

SEQ ID NO: 5524443 - DNA, 25 bp, Homo sapien
tcctgtacagttgtgcaaagtctgc

SEQ ID NO: 5524444 - DNA, 25 bp, Homo sapien
gtacaggcaacagtataaagctgat

SEQ ID NO: 5524445 - DNA, 25 bp, Homo sapien
acattcactgagctgtacaggcaac

SEQ ID NO: 5524446 - DNA, 25 bp, Homo sapien
gcaaagtctgcaaaacgatagtgat

SEQ ID NO: 5524447 - DNA, 25 bp, Homo sapien
atggaaatatatgaagaggactttt

SEQ ID NO: 5524448 - DNA, 25 bp, Homo sapien
acgatagtgattcaatggtggtttc

SEQ ID NO: 5524449 - DNA, 25 bp, Homo sapien
gcagccagacactaaaaagcagcac

SEQ ID NO: 5524450 - DNA, 25 bp, Homo sapien
ataaagctgattagaagtagatttt

SEQ ID NO: 5524451 - DNA, 25 bp, Homo sapien
caatggtggtttcaaaagcaaagaa

SEQ ID NO: 5524452 - DNA, 25 bp, Homo sapien
aagcagaaagtcctcagccacgtca

SEQ ID NO: 5524453 - DNA, 25 bp, Homo sapien
ctcagccacgtcaacagcggctgcc

SEQ ID NO: 5524454 - DNA, 25 bp, Homo sapien
gtcgcccatcgacatggacacgcag

SEQ ID NO: 5524455 - DNA, 25 bp, Homo sapien
cgaagcgcctgtctacgcgaacctg

SEQ ID NO: 5524456 - DNA, 25 bp, Homo sapien
agcccgccgttgtcgcccatcgaca

SEQ ID NO: 5524457 - DNA, 25 bp, Homo sapien
ctgtctacgcgaacctgagcagcta

SEQ ID NO: 5524458 - DNA, 25 bp, Homo sapien
tcgccttcgctgccgaacctgtgcc

SEQ ID NO: 5524459 - DNA, 25 bp, Homo sapien
gcagctcaagcagaaagtcctcagc

SEQ ID NO: 5524460 - DNA, 25 bp, Homo sapien
agtcctcagccacgtcaacagcggc

SEQ ID NO: 5524461 - DNA, 25 bp, Homo sapien
gagcgcatctcgcgcctggaagaga

SEQ ID NO: 5524462 - DNA, 25 bp, Homo sapien
cggtcgccttcgctgccgaacctgt

SEQ ID NO: 5524463 - DNA, 25 bp, Homo sapien
gagagaaatcagaagcaagtttgtc

SEQ ID NO: 5524464 - DNA, 25 bp, Homo sapien
ctgacaagggtcaacacatgaatac

SEQ ID NO: 5524465 - DNA, 25 bp, Homo sapien
gtcagagcaaaataacagatgtgtt

SEQ ID NO: 5524466 - DNA, 25 bp, Homo sapien
gggtgtgctatttgggtatgtttgt

SEQ ID NO: 5524467 - DNA, 25 bp, Homo sapien
ccccaggctccaatgaaatgctgac

SEQ ID NO: 5524468 - DNA, 25 bp, Homo sapien
agatctgtgttaatgctcgggctgg

SEQ ID NO: 5524469 - DNA, 25 bp, Homo sapien
ggcaggcactgttcagcagtcagat

SEQ ID NO: 5524470 - DNA, 25 bp, Homo sapien
gctcagttgcacatatcagggtttc

SEQ ID NO: 5524471 - DNA, 25 bp, Homo sapien
cctgggaaattggtatcgatgaggg

SEQ ID NO: 5524472 - DNA, 25 bp, Homo sapien
aattcttgctagagagagactcgct

SEQ ID NO: 5524473 - DNA, 25 bp, Homo sapien
gaaacaactgttgaggcattgagct

SEQ ID NO: 5524474 - DNA, 25 bp, Homo sapien
cgaagatcacggtgaccagagattt

SEQ ID NO: 5524475 - DNA, 25 bp, Homo sapien
atattagagaaggtagctaaaggca

SEQ ID NO: 5524476 - DNA, 25 bp, Homo sapien
tttagagcaacaagctgggttactt

SEQ ID NO: 5524477 - DNA, 25 bp, Homo sapien
caggctactgaggtattttagagca

SEQ ID NO: 5524478 - DNA, 25 bp, Homo sapien
caccaaaggaaaaagactgtccaaa

SEQ ID NO: 5524479 - DNA, 25 bp, Homo sapien
atctctagtataacactcaggctac

SEQ ID NO: 5524480 - DNA, 25 bp, Homo sapien
gagagtaaattgggaatgtatgacc

SEQ ID NO: 5524481 - DNA, 25 bp, Homo sapien
agcttgactggaactgagagtaaat

SEQ ID NO: 5524482 - DNA, 25 bp, Homo sapien
tcttagaccctgaaaaatggcagaa

SEQ ID NO: 5524483 - DNA, 25 bp, Homo sapien
ctttcagagcaaccagcttgactgg

SEQ ID NO: 5524484 - DNA, 25 bp, Homo sapien
cggtgaccagagatttctaggagtc

SEQ ID NO: 5524485 - DNA, 25 bp, Homo sapien
ggagacatctgggcaagatgagttt

SEQ ID NO: 5524486 - DNA, 25 bp, Homo sapien
ctgaaccttgctgccagaatctctg

SEQ ID NO: 5524487 - DNA, 25 bp, Homo sapien
cctccctttgtcagtgcccagtttc

SEQ ID NO: 5524488 - DNA, 25 bp, Homo sapien
gagttgaggaatcaccgaccacttt

SEQ ID NO: 5524489 - DNA, 25 bp, Homo sapien
tcatccaaaccagacaccacctcgt

SEQ ID NO: 5524490 - DNA, 25 bp, Homo sapien
caggggaagctctcaaaacctcagt

SEQ ID NO: 5524491 - DNA, 25 bp, Homo sapien
gactctggggtcgaatttgagccaa

SEQ ID NO: 5524492 - DNA, 25 bp, Homo sapien
tcccaaccccaccagagctgactct

SEQ ID NO: 5524493 - DNA, 25 bp, Homo sapien
cgttttgcagagtcctcaggggaag

SEQ ID NO: 5524494 - DNA, 25 bp, Homo sapien
tgtcctcaaagggaagaagtaagaa

SEQ ID NO: 5524495 - DNA, 25 bp, Homo sapien
aagatgagtttgaaggtcccttatg

SEQ ID NO: 5524496 - DNA, 25 bp, Homo sapien
aggcccatgtgggctgtgcgtttct

SEQ ID NO: 5524497 - DNA, 25 bp, Homo sapien
gccccgctgtccttgcccctggtgg

SEQ ID NO: 5524498 - DNA, 25 bp, Homo sapien
ttgacaagttccgcagcgtgctggt

SEQ ID NO: 5524499 - DNA, 25 bp, Homo sapien
gcgtgctggtggtgaccacccacga

SEQ ID NO: 5524500 - DNA, 25 bp, Homo sapien
ttccctccagtccttgccgcacgcg

SEQ ID NO: 5524501 - DNA, 25 bp, Homo sapien
gcccctggtggttccgctgtggggc

SEQ ID NO: 5524502 - DNA, 25 bp, Homo sapien
ctctgctcccctgagcccaggcgga

SEQ ID NO: 5524503 - DNA, 25 bp, Homo sapien
gcggcgctcccagctgctcatgctg

SEQ ID NO: 5524504 - DNA, 25 bp, Homo sapien
gggtgaggccgcatccttcaaggcc

SEQ ID NO: 5524505 - DNA, 25 bp, Homo sapien
cgcacgcgtaggcatctccacgctg

SEQ ID NO: 5524506 - DNA, 25 bp, Homo sapien
cacgaggaccctgtcattgccgtct

SEQ ID NO: 5524507 - DNA, 25 bp, Homo sapien
ctcactacttatacgtgcaacaaag

SEQ ID NO: 5524508 - DNA, 25 bp, Homo sapien
ctttgttgcacgtataagtagtgag

SEQ ID NO: 5524509 - DNA, 25 bp, Homo sapien
ttaaaatgcagtgacatcatcaatg

SEQ ID NO: 5524510 - DNA, 25 bp, Homo sapien
atttgattaggttatgaaggctaaa

SEQ ID NO: 5524511 - DNA, 25 bp, Homo sapien
gataagaaggttgacaaaagctgtc

SEQ ID NO: 5524512 - DNA, 25 bp, Homo sapien
ataaagaggaggatttaaatgttac

SEQ ID NO: 5524513 - DNA, 25 bp, Homo sapien
ttggtggaagaatattggataagaa

SEQ ID NO: 5524514 - DNA, 25 bp, Homo sapien
aaatgttactcctgcccccaataat

SEQ ID NO: 5524515 - DNA, 25 bp, Homo sapien
ttatgaaggctaaaaaaagccacat

SEQ ID NO: 5524516 - DNA, 25 bp, Homo sapien
ttggagttttagtgtcataggcata

SEQ ID NO: 5524517 - DNA, 25 bp, Homo sapien
tttttacggccagcaataaagagga

SEQ ID NO: 5524518 - DNA, 25 bp, Homo sapien
tcaaacagttgcaccttatacattc

SEQ ID NO: 5524519 - DNA, 25 bp, Homo sapien
tgtttcatagcgttggtggaagaat

SEQ ID NO: 5524520 - DNA, 25 bp, Homo sapien
cagaagtcccaaaaaacctcagaac

SEQ ID NO: 5524521 - DNA, 25 bp, Homo sapien
aagagagcagatttaagaaagattc

SEQ ID NO: 5524522 - DNA, 25 bp, Homo sapien
tagtcaagactgtacatatggcatt

SEQ ID NO: 5524523 - DNA, 25 bp, Homo sapien
gtcaaccccatcgaaacaaagctcc

SEQ ID NO: 5524524 - DNA, 25 bp, Homo sapien
cctggagcaaattggagccactaga

SEQ ID NO: 5524525 - DNA, 25 bp, Homo sapien
gatgacttcacgtgagctactgacc

SEQ ID NO: 5524526 - DNA, 25 bp, Homo sapien
cggctatgcaggtggcttcttgatg

SEQ ID NO: 5524527 - DNA, 25 bp, Homo sapien
aaagcaccgggaattaccatgaggt

SEQ ID NO: 5524528 - DNA, 25 bp, Homo sapien
atggaagcttcggaaggtattgctc

SEQ ID NO: 5524529 - DNA, 25 bp, Homo sapien
taaaccttgcatgtgctggccccag

SEQ ID NO: 5524530 - DNA, 25 bp, Homo sapien
accatgaggtaatggatacggctat

SEQ ID NO: 5524531 - DNA, 25 bp, Homo sapien
gcccattctgcaaagaggaaaaata

SEQ ID NO: 5524532 - DNA, 25 bp, Homo sapien
ttagtggggatgttcataaatcacc

SEQ ID NO: 5524533 - DNA, 25 bp, Homo sapien
ataggagtatatttgataatgagct

SEQ ID NO: 5524534 - DNA, 25 bp, Homo sapien
cttggtgacaaaacctgaccaaact

SEQ ID NO: 5524535 - DNA, 25 bp, Homo sapien
tgcaaagcagtactaccccaaactg

SEQ ID NO: 5524536 - DNA, 25 bp, Homo sapien
tgaccaaacttgatctgaggctctt

SEQ ID NO: 5524537 - DNA, 25 bp, Homo sapien
taaatcaccacaaaaataggagtat

SEQ ID NO: 5524538 - DNA, 25 bp, Homo sapien
ttgataatgagctgccatcccagac

SEQ ID NO: 5524539 - DNA, 25 bp, Homo sapien
ttgatgcaaaacacagctagaccta

SEQ ID NO: 5524540 - DNA, 25 bp, Homo sapien
ttagttatacttagtggggatgttc

SEQ ID NO: 5524541 - DNA, 25 bp, Homo sapien
aaaaaaggacagagacacaatttct

SEQ ID NO: 5524542 - DNA, 25 bp, Homo sapien
aagacaatattagtgggatgaagaa

SEQ ID NO: 5524543 - DNA, 25 bp, Homo sapien
tggttgacaacatctaagacaatat

SEQ ID NO: 5524544 - DNA, 25 bp, Homo sapien
ggtgagcccttttgtcaggctgcaa

SEQ ID NO: 5524545 - DNA, 25 bp, Homo sapien
actaagtccagagacatgcaggtga

SEQ ID NO: 5524546 - DNA, 25 bp, Homo sapien
tatggttcatggatttagtggtgac

SEQ ID NO: 5524547 - DNA, 25 bp, Homo sapien
ccgctctctcaaaaggaacttggga

SEQ ID NO: 5524548 - DNA, 25 bp, Homo sapien
taagtgaagtagaagaaattgagta

SEQ ID NO: 5524549 - DNA, 25 bp, Homo sapien
ggatttagtggtgactgataagatt

SEQ ID NO: 5524550 - DNA, 25 bp, Homo sapien
aaatagaagcagaatagtaaaggtt

SEQ ID NO: 5524551 - DNA, 25 bp, Homo sapien
tcaggctgcaaatcatgacatgccg

SEQ ID NO: 5524552 - DNA, 25 bp, Homo sapien
atcatgacatgccgatggttgttta

SEQ ID NO: 5524553 - DNA, 25 bp, Homo sapien
atatgataccaaaaagaaccctagc

SEQ ID NO: 5524554 - DNA, 25 bp, Homo sapien
ctccacaaaagtaagaaaggtattc

SEQ ID NO: 5524555 - DNA, 25 bp, Homo sapien
ctgtaaagggccagactgtaaatta

SEQ ID NO: 5524556 - DNA, 25 bp, Homo sapien
gttggaggtcaaattcttagcatca

SEQ ID NO: 5524557 - DNA, 25 bp, Homo sapien
ttgcaatcttataaaaacaggacac

SEQ ID NO: 5524558 - DNA, 25 bp, Homo sapien
attttgaccatgagtcagcaaactt

SEQ ID NO: 5524559 - DNA, 25 bp, Homo sapien
aaacaaatgagcatagctgggttgc

SEQ ID NO: 5524560 - DNA, 25 bp, Homo sapien
acaaaagcagccatatacaaaacat

SEQ ID NO: 5524561 - DNA, 25 bp, Homo sapien
ttagcatcagatgtaactccacaaa

SEQ ID NO: 5524562 - DNA, 25 bp, Homo sapien
aaaatgtttgcttagttggaggtca

SEQ ID NO: 5524563 - DNA, 25 bp, Homo sapien
accactgtaacacaaaagcagccat

SEQ ID NO: 5524564 - DNA, 25 bp, Homo sapien
tcagtgcatgatgattcagtgggcg

SEQ ID NO: 5524565 - DNA, 25 bp, Homo sapien
agacacaggtccagcgacaatgatt

SEQ ID NO: 5524566 - DNA, 25 bp, Homo sapien
tgagaaacgaggctttatttgctcc

SEQ ID NO: 5524567 - DNA, 25 bp, Homo sapien
tacagtgaatatgttacaggtttgc

SEQ ID NO: 5524568 - DNA, 25 bp, Homo sapien
gagaaaggactttccaagcatgacc

SEQ ID NO: 5524569 - DNA, 25 bp, Homo sapien
attaaaagtatgagaaccacaacca

SEQ ID NO: 5524570 - DNA, 25 bp, Homo sapien
aaatgatgcatgaggaataatgatt

SEQ ID NO: 5524571 - DNA, 25 bp, Homo sapien
aagcatgacctcaaaggctagagca

SEQ ID NO: 5524572 - DNA, 25 bp, Homo sapien
aggctagagcataagagtcttcgtt

SEQ ID NO: 5524573 - DNA, 25 bp, Homo sapien
aatgggcagttatcacagcagaaca

SEQ ID NO: 5524574 - DNA, 25 bp, Homo sapien
caggtggcatttcggtcagtgcatg

SEQ ID NO: 5524575 - DNA, 25 bp, Homo sapien
attttcaacagtgtggggatggata

SEQ ID NO: 5524576 - DNA, 25 bp, Homo sapien
ctcctatgaagcccagtgactatgc

SEQ ID NO: 5524577 - DNA, 25 bp, Homo sapien
tgcaaacacaatgatcagggagcat

SEQ ID NO: 5524578 - DNA, 25 bp, Homo sapien
aacattgactacaagggggaaatga

SEQ ID NO: 5524579 - DNA, 25 bp, Homo sapien
ttaagaaattaccaaagatagagcc

SEQ ID NO: 5524580 - DNA, 25 bp, Homo sapien
gaagaaatgctgaacctgcaaacac

SEQ ID NO: 5524581 - DNA, 25 bp, Homo sapien
cctaaaaggtgatgtcaatttgtac

SEQ ID NO: 5524582 - DNA, 25 bp, Homo sapien
aagatagagccaaagagatatatac

SEQ ID NO: 5524583 - DNA, 25 bp, Homo sapien
ccccagcaatgtgaatccccctctt

SEQ ID NO: 5524584 - DNA, 25 bp, Homo sapien
tgttaatcagtgagagggtaaagtt

SEQ ID NO: 5524585 - DNA, 25 bp, Homo sapien
ggatggataaggtagaaccactaga

SEQ ID NO: 5524586 - DNA, 25 bp, Homo sapien
acatgtcttgatgtgattggtggcc

SEQ ID NO: 5524587 - DNA, 25 bp, Homo sapien
cagaagtggagactgaataaaaatg

SEQ ID NO: 5524588 - DNA, 25 bp, Homo sapien
cctaagataaaagggacctaattca

SEQ ID NO: 5524589 - DNA, 25 bp, Homo sapien
gtagctctatggactgaacatgggc

SEQ ID NO: 5524590 - DNA, 25 bp, Homo sapien
aaaaaggcttactgaaattatacta

SEQ ID NO: 5524591 - DNA, 25 bp, Homo sapien
ctgaacatgggcaattcaggcagaa

SEQ ID NO: 5524592 - DNA, 25 bp, Homo sapien
acccttttaggccagtgatacatgt

SEQ ID NO: 5524593 - DNA, 25 bp, Homo sapien
aaatggaactatcagctcttatctc

SEQ ID NO: 5524594 - DNA, 25 bp, Homo sapien
atctgttgtcagatgtagacatcct

SEQ ID NO: 5524595 - DNA, 25 bp, Homo sapien
ggacacacctggagctaaagtagct

SEQ ID NO: 5524596 - DNA, 25 bp, Homo sapien
tacccacagccgtaaagaagacatt

SEQ ID NO: 5524597 - DNA, 25 bp, Homo sapien
gctggttggcaaaactgcccctcct

SEQ ID NO: 5524598 - DNA, 25 bp, Homo sapien
tctaaattggtgctggacttgaaat

SEQ ID NO: 5524599 - DNA, 25 bp, Homo sapien
tgacatcacaatgagaagaagtttc

SEQ ID NO: 5524600 - DNA, 25 bp, Homo sapien
caaaataacttgggtgacaggtaca

SEQ ID NO: 5524601 - DNA, 25 bp, Homo sapien
tgtcaaaagagcccactacccagtt

SEQ ID NO: 5524602 - DNA, 25 bp, Homo sapien
agaacaaaaaaggtccctgaccaca

SEQ ID NO: 5524603 - DNA, 25 bp, Homo sapien
gtcaggtaaagacaggtggtttcat

SEQ ID NO: 5524604 - DNA, 25 bp, Homo sapien
cagatggttgctggtagtgtcattc

SEQ ID NO: 5524605 - DNA, 25 bp, Homo sapien
aaatcaggaaatgtaaagtccttct

SEQ ID NO: 5524606 - DNA, 25 bp, Homo sapien
aatggacctgtacagatggttgctg

SEQ ID NO: 5524607 - DNA, 25 bp, Homo sapien
tgcaggaactcactcaggccttgtc

SEQ ID NO: 5524608 - DNA, 25 bp, Homo sapien
gtggctgtttgttggcagaaacatt

SEQ ID NO: 5524609 - DNA, 25 bp, Homo sapien
tggaaagtcatgaagatgctgccca

SEQ ID NO: 5524610 - DNA, 25 bp, Homo sapien
ggccatgcacagaagcctcctgctt

SEQ ID NO: 5524611 - DNA, 25 bp, Homo sapien
tagaggaagctaagtcacatttgga

SEQ ID NO: 5524612 - DNA, 25 bp, Homo sapien
tccaggaatgactctcagaacacta

SEQ ID NO: 5524613 - DNA, 25 bp, Homo sapien
caatccccaccagcaaaatggatgc

SEQ ID NO: 5524614 - DNA, 25 bp, Homo sapien
ctgaaggagcagcctttagtctgac

SEQ ID NO: 5524615 - DNA, 25 bp, Homo sapien
actggctgtccagaagagatgctat

SEQ ID NO: 5524616 - DNA, 25 bp, Homo sapien
tgctgcccattgctggctccagagc

SEQ ID NO: 5524617 - DNA, 25 bp, Homo sapien
caccctggggtctctgttattgctc

SEQ ID NO: 5524618 - DNA, 25 bp, Homo sapien
gtaggtacatctgcatagaggaagc

SEQ ID NO: 5524619 - DNA, 25 bp, Homo sapien
ttctgtcacagatacgtggccgcat

SEQ ID NO: 5524620 - DNA, 25 bp, Homo sapien
ggaagagaggagctcttttgctagc

SEQ ID NO: 5524621 - DNA, 25 bp, Homo sapien
gcaaaggcgagagctcgcctggtac

SEQ ID NO: 5524622 - DNA, 25 bp, Homo sapien
tcttttgctagcaaaggcgagagct

SEQ ID NO: 5524623 - DNA, 25 bp, Homo sapien
caggaaatgtccttggttcgcgaac

SEQ ID NO: 5524624 - DNA, 25 bp, Homo sapien
gcacaatccagcccagggcgttctg

SEQ ID NO: 5524625 - DNA, 25 bp, Homo sapien
gttcgcgaactacagctggcacaat

SEQ ID NO: 5524626 - DNA, 25 bp, Homo sapien
gtaacgcacgtgagaactgccattt

SEQ ID NO: 5524627 - DNA, 25 bp, Homo sapien
ccacgtcccgggagataaacattag

SEQ ID NO: 5524628 - DNA, 25 bp, Homo sapien
gggcgttctgtgagctgtagtctcc

SEQ ID NO: 5524629 - DNA, 25 bp, Homo sapien
aacattagtgtgagcgcacgctaga

SEQ ID NO: 5524630 - DNA, 25 bp, Homo sapien
gacgacaaagcatcacgaaggcttc

SEQ ID NO: 5524631 - DNA, 25 bp, Homo sapien
cgccgacttcggaccgcagttcact

SEQ ID NO: 5524632 - DNA, 25 bp, Homo sapien
ggccgcagtaccagcgcttcatgcg

SEQ ID NO: 5524633 - DNA, 25 bp, Homo sapien
tcactgcgcgcttcttccacccgga

SEQ ID NO: 5524634 - DNA, 25 bp, Homo sapien
ggagtgggaatgtcctgatacttac

SEQ ID NO: 5524635 - DNA, 25 bp, Homo sapien
ggcctcatcgggatttggttggtga

SEQ ID NO: 5524636 - DNA, 25 bp, Homo sapien
gaaggcttcacaaactggccgagtc

SEQ ID NO: 5524637 - DNA, 25 bp, Homo sapien
tgatctgatctggtctgatggggag

SEQ ID NO: 5524638 - DNA, 25 bp, Homo sapien
tggccgagtcctgtgtcttggaact

SEQ ID NO: 5524639 - DNA, 25 bp, Homo sapien
atgccagagctgtacgaccttgtta

SEQ ID NO: 5524640 - DNA, 25 bp, Homo sapien
ccgcccggcttcagctacgccgact

SEQ ID NO: 5524641 - DNA, 25 bp, Homo sapien
ctctcttataaaagaggggttggca

SEQ ID NO: 5524642 - DNA, 25 bp, Homo sapien
cagctggaatgtattcaatatagag

SEQ ID NO: 5524643 - DNA, 25 bp, Homo sapien
agaaatgaaatgacacactaatata

SEQ ID NO: 5524644 - DNA, 25 bp, Homo sapien
atggcaaatggttgtgtccagtatt

SEQ ID NO: 5524645 - DNA, 25 bp, Homo sapien
atcaacagtctagaaatgaaatgac

SEQ ID NO: 5524646 - DNA, 25 bp, Homo sapien
aaaatatgtatcaaaatcagttctc

SEQ ID NO: 5524647 - DNA, 25 bp, Homo sapien
aaaagatggcaaatggttgtgtcca

SEQ ID NO: 5524648 - DNA, 25 bp, Homo sapien
aaaagaaaagtcattatcagctgga

SEQ ID NO: 5524649 - DNA, 25 bp, Homo sapien
tccccacccactctatgggatgata

SEQ ID NO: 5524650 - DNA, 25 bp, Homo sapien
ggggttggcagtacattctcagacc

SEQ ID NO: 5524651 - DNA, 25 bp, Homo sapien
ctgaggctgatatcaccaaggtgaa

SEQ ID NO: 5524652 - DNA, 25 bp, Homo sapien
tgtccaaaatgttgagtacagtata

SEQ ID NO: 5524653 - DNA, 25 bp, Homo sapien
ataaataaaggaactcacaggtagg

SEQ ID NO: 5524654 - DNA, 25 bp, Homo sapien
tcacaggtagggagttctttttcac

SEQ ID NO: 5524655 - DNA, 25 bp, Homo sapien
gaaagagccttcatgtaaaatacag

SEQ ID NO: 5524656 - DNA, 25 bp, Homo sapien
taaatgggaccaacatgctcacttt

SEQ ID NO: 5524657 - DNA, 25 bp, Homo sapien
tattagagcagatacagttgtgaaa

SEQ ID NO: 5524658 - DNA, 25 bp, Homo sapien
cagctttcccagcgtaaggagctat

SEQ ID NO: 5524659 - DNA, 25 bp, Homo sapien
atgtaaaatacagctgtgcacattt

SEQ ID NO: 5524660 - DNA, 25 bp, Homo sapien
cattggcagacttcatgtgctgtcc

SEQ ID NO: 5524661 - DNA, 25 bp, Homo sapien
taacaacccattagaaagagccttc

SEQ ID NO: 5524662 - DNA, 25 bp, Homo sapien
ttcccagcgtaaggagctatagggt

SEQ ID NO: 5524663 - DNA, 25 bp, Homo sapien
acagacctttgctcactggggaccc

SEQ ID NO: 5524664 - DNA, 25 bp, Homo sapien
ctctggccaactgtccgccgccttt

SEQ ID NO: 5524665 - DNA, 25 bp, Homo sapien
cctaaccagcatcaggggttctggg

SEQ ID NO: 5524666 - DNA, 25 bp, Homo sapien
ctccattctgcaaaccggggagctc

SEQ ID NO: 5524667 - DNA, 25 bp, Homo sapien
acaaagggacaaggacagacctttg

SEQ ID NO: 5524668 - DNA, 25 bp, Homo sapien
ctccttagtgtcaagggcgtgaagg

SEQ ID NO: 5524669 - DNA, 25 bp, Homo sapien
ggtgagcggttcctaaccagcatca

SEQ ID NO: 5524670 - DNA, 25 bp, Homo sapien
agaggaggtggctccttcaacttcc

SEQ ID NO: 5524671 - DNA, 25 bp, Homo sapien
tccaagtcgtcctgccttaagacac

SEQ ID NO: 5524672 - DNA, 25 bp, Homo sapien
ccatccctctggccaactgtccgcc

SEQ ID NO: 5524673 - DNA, 25 bp, Homo sapien
agggccccccactccttagtgtcaa

SEQ ID NO: 5524674 - DNA, 25 bp, Homo sapien
tctgtgctctggtcaaggaatatgc

SEQ ID NO: 5524675 - DNA, 25 bp, Homo sapien
cagtctagaaagttacatcagtgaa

SEQ ID NO: 5524676 - DNA, 25 bp, Homo sapien
tcaccacaacccaacagtcaacatc

SEQ ID NO: 5524677 - DNA, 25 bp, Homo sapien
ggcccatagccagatactccagttg

SEQ ID NO: 5524678 - DNA, 25 bp, Homo sapien
agttggacagaggatttaagatttt

SEQ ID NO: 5524679 - DNA, 25 bp, Homo sapien
atatgagtacccatggcccatagcc

SEQ ID NO: 5524680 - DNA, 25 bp, Homo sapien
tttaagacaaagggtatatgagtac

SEQ ID NO: 5524681 - DNA, 25 bp, Homo sapien
aacagatcagtttaagacaaagggt

SEQ ID NO: 5524682 - DNA, 25 bp, Homo sapien
taggcagggcagtgttttcacaatg

SEQ ID NO: 5524683 - DNA, 25 bp, Homo sapien
attaagaagcataagtaatctgtgc

SEQ ID NO: 5524684 - DNA, 25 bp, Homo sapien
acagcaaactcaggctacttctagc

SEQ ID NO: 5524685 - DNA, 25 bp, Homo sapien
cacccgcttcctcaccacccccact

SEQ ID NO: 5524686 - DNA, 25 bp, Homo sapien
cagaaaccatactgggctcagatca

SEQ ID NO: 5524687 - DNA, 25 bp, Homo sapien
acagcaccaacccagcatggtccca

SEQ ID NO: 5524688 - DNA, 25 bp, Homo sapien
gctagtcctggccagggaaatcaga

SEQ ID NO: 5524689 - DNA, 25 bp, Homo sapien
tgaagtcctactacgccctcccctc

SEQ ID NO: 5524690 - DNA, 25 bp, Homo sapien
ttctccactgccacgtccctcatgc

SEQ ID NO: 5524691 - DNA, 25 bp, Homo sapien
agcatggtcccactgaagtcctact

SEQ ID NO: 5524692 - DNA, 25 bp, Homo sapien
tcctcatgcagcagtgtgctggggc

SEQ ID NO: 5524693 - DNA, 25 bp, Homo sapien
gccaaggccaaaattgggctagtcc

SEQ ID NO: 5524694 - DNA, 25 bp, Homo sapien
gctcagatcagagctccgaagcggt

SEQ ID NO: 5524695 - DNA, 25 bp, Homo sapien
agggcggctcaactcctcccacagc

SEQ ID NO: 5524696 - DNA, 25 bp, Homo sapien
taaacagtttggtcaaaggaggaca

SEQ ID NO: 5524697 - DNA, 25 bp, Homo sapien
ctctgcctgcttgctgtttgctgac

SEQ ID NO: 5524698 - DNA, 25 bp, Homo sapien
tatgccttctgatagagatactcta

SEQ ID NO: 5524699 - DNA, 25 bp, Homo sapien
atctgtctccgtagagaaagatgcc

SEQ ID NO: 5524700 - DNA, 25 bp, Homo sapien
cttgagactttggacacaatgtcct

SEQ ID NO: 5524701 - DNA, 25 bp, Homo sapien
gacttttggaccaggtcagaaggaa

SEQ ID NO: 5524702 - DNA, 25 bp, Homo sapien
caaaggaggacagaaaagtccttat

SEQ ID NO: 5524703 - DNA, 25 bp, Homo sapien
ctaggctcggttaaacagtttggtc

SEQ ID NO: 5524704 - DNA, 25 bp, Homo sapien
ttgcatccatgccttcgagaaacct

SEQ ID NO: 5524705 - DNA, 25 bp, Homo sapien
aaatcattagcaggagtggttgcaa

SEQ ID NO: 5524706 - DNA, 25 bp, Homo sapien
aaaagtccttatgagggcctctgcc

SEQ ID NO: 5524707 - DNA, 25 bp, Homo sapien
gatggttgatgctaataagtactat

SEQ ID NO: 5524708 - DNA, 25 bp, Homo sapien
aacgagaaaggtagtgattgcttct

SEQ ID NO: 5524709 - DNA, 25 bp, Homo sapien
ccaaggtcatataaagaaacatcca

SEQ ID NO: 5524710 - DNA, 25 bp, Homo sapien
taataagttcaaataccaaagcgta

SEQ ID NO: 5524711 - DNA, 25 bp, Homo sapien
ccaaagcgtaaagatgatgtaacac

SEQ ID NO: 5524712 - DNA, 25 bp, Homo sapien
cagtgcctatgctgcatggttacac

SEQ ID NO: 5524713 - DNA, 25 bp, Homo sapien
tggtgattatcaagatggttgatgc

SEQ ID NO: 5524714 - DNA, 25 bp, Homo sapien
tacacaaatgaaacgagaaaggtag

SEQ ID NO: 5524715 - DNA, 25 bp, Homo sapien
taaaatgctgtcgaatatggaactt

SEQ ID NO: 5524716 - DNA, 25 bp, Homo sapien
aaagatgatgtaacacagtgcctat

SEQ ID NO: 5524717 - DNA, 25 bp, Homo sapien
aaaggtttattgcagtctaggtatt

SEQ ID NO: 5524718 - DNA, 25 bp, Homo sapien
gacccaagggtggaagacttgaacc

SEQ ID NO: 5524719 - DNA, 25 bp, Homo sapien
ggttcaagtcttccacccttgggtc

SEQ ID NO: 5524720 - DNA, 25 bp, Homo sapien
tctggctgaaggtctctcatgaaat

SEQ ID NO: 5524721 - DNA, 25 bp, Homo sapien
tgagcacatcctacgcacaagacac

SEQ ID NO: 5524722 - DNA, 25 bp, Homo sapien
tttcccagaaattgtatgagctata

SEQ ID NO: 5524723 - DNA, 25 bp, Homo sapien
aattgccccaaatttagcggcgtac

SEQ ID NO: 5524724 - DNA, 25 bp, Homo sapien
cggtcaagctattagacagggctgc

SEQ ID NO: 5524725 - DNA, 25 bp, Homo sapien
tctcatgaaattacggtcaagctat

SEQ ID NO: 5524726 - DNA, 25 bp, Homo sapien
aaagctataaagataaatgtgacac

SEQ ID NO: 5524727 - DNA, 25 bp, Homo sapien
acgcacaagacacaatattaggtac

SEQ ID NO: 5524728 - DNA, 25 bp, Homo sapien
atttggaccacctaaaacaaggata

SEQ ID NO: 5524729 - DNA, 25 bp, Homo sapien
agcggcgtactacaacaaacacttc

SEQ ID NO: 5524730 - DNA, 25 bp, Homo sapien
ttaggtacagaaaagctataaagat

SEQ ID NO: 5524731 - DNA, 25 bp, Homo sapien
gtgtttgtgttccttgcttgcgccc

SEQ ID NO: 5524732 - DNA, 25 bp, Homo sapien
aataatacagcttcctgagcccacc

SEQ ID NO: 5524733 - DNA, 25 bp, Homo sapien
ttgacagcatggcttttcccggtgt

SEQ ID NO: 5524734 - DNA, 25 bp, Homo sapien
ttcaaggagcagctgttttctgttt

SEQ ID NO: 5524735 - DNA, 25 bp, Homo sapien
gttgtagttacaggtgtccagcagg

SEQ ID NO: 5524736 - DNA, 25 bp, Homo sapien
ggttgagattctgagatgcttgaca

SEQ ID NO: 5524737 - DNA, 25 bp, Homo sapien
tttctgttgccccacagcgccacct

SEQ ID NO: 5524738 - DNA, 25 bp, Homo sapien
aaagactgcctctggggttgagatt

SEQ ID NO: 5524739 - DNA, 25 bp, Homo sapien
ttcccggtgttatgtgtcgtttcta

SEQ ID NO: 5524740 - DNA, 25 bp, Homo sapien
ctgagcccaccccagtccctaaaga

SEQ ID NO: 5524741 - DNA, 25 bp, Homo sapien
gagctgtggaaacactgcgtccttt

SEQ ID NO: 5524742 - DNA, 25 bp, Homo sapien
caaacactgaaaattgagcttctcc

SEQ ID NO: 5524743 - DNA, 25 bp, Homo sapien
aaattggaacgatatgtttgcttgc

SEQ ID NO: 5524744 - DNA, 25 bp, Homo sapien
tcctgcatggtagatccctgttctg

SEQ ID NO: 5524745 - DNA, 25 bp, Homo sapien
gctgatgatctttggttatgcttgc

SEQ ID NO: 5524746 - DNA, 25 bp, Homo sapien
aaaaggaagaagtgagcttctccct

SEQ ID NO: 5524747 - DNA, 25 bp, Homo sapien
tgcaaattcatagttccaaaggctt

SEQ ID NO: 5524748 - DNA, 25 bp, Homo sapien
attgtgcactgagcactgcaaacta

SEQ ID NO: 5524749 - DNA, 25 bp, Homo sapien
gttctctcagccacagcctagattc

SEQ ID NO: 5524750 - DNA, 25 bp, Homo sapien
ttgtgtgagcacaagaagctcctgc

SEQ ID NO: 5524751 - DNA, 25 bp, Homo sapien
ggtccattttagaggcctctggttc

SEQ ID NO: 5524752 - DNA, 25 bp, Homo sapien
aaattcgacaatgtacaatgttccc

SEQ ID NO: 5524753 - DNA, 25 bp, Homo sapien
tcgttattcgcgtctcagagaccgt

SEQ ID NO: 5524754 - DNA, 25 bp, Homo sapien
acggtctctgagacgcgaataacga

SEQ ID NO: 5524755 - DNA, 25 bp, Homo sapien
gaacatctcatgggcccaagtcatc

SEQ ID NO: 5524756 - DNA, 25 bp, Homo sapien
ttacgaactctaagagggctgaaac

SEQ ID NO: 5524757 - DNA, 25 bp, Homo sapien
tgggaggaaagctgcttcaacctga

SEQ ID NO: 5524758 - DNA, 25 bp, Homo sapien
gtcaatggcttggagaacatctcat

SEQ ID NO: 5524759 - DNA, 25 bp, Homo sapien
cacttggagccaccttggtgtgggt

SEQ ID NO: 5524760 - DNA, 25 bp, Homo sapien
gaaaacctcacatcaggctgcatcc

SEQ ID NO: 5524761 - DNA, 25 bp, Homo sapien
agcaatcccaacctggtgctaggtc

SEQ ID NO: 5524762 - DNA, 25 bp, Homo sapien
gactgctgtgcagacccaagcaatc

SEQ ID NO: 5524763 - DNA, 25 bp, Homo sapien
agctgacagtaaatctctgggtttc

SEQ ID NO: 5524764 - DNA, 25 bp, Homo sapien
gttcctctctgtaagggcagtgtga

SEQ ID NO: 5524765 - DNA, 25 bp, Homo sapien
aagagggctgaaacttctgatattc

SEQ ID NO: 5524766 - DNA, 25 bp, Homo sapien
tccagaaaccttcacgaacaatcgt

SEQ ID NO: 5524767 - DNA, 25 bp, Homo sapien
acgattgttcgtgaaggtttctgga

SEQ ID NO: 5524768 - DNA, 25 bp, Homo sapien
aaagaaatagacataactgagctga

SEQ ID NO: 5524769 - DNA, 25 bp, Homo sapien
cctctgaggcttacggtcttggcaa

SEQ ID NO: 5524770 - DNA, 25 bp, Homo sapien
ggccctgatcgaggtcccctcctgg

SEQ ID NO: 5524771 - DNA, 25 bp, Homo sapien
gccaggcaacccgtcagtctgtctc

SEQ ID NO: 5524772 - DNA, 25 bp, Homo sapien
ccgaagcccagacagttcagttggg

SEQ ID NO: 5524773 - DNA, 25 bp, Homo sapien
ggcctgtctgaaccccaccactcac

SEQ ID NO: 5524774 - DNA, 25 bp, Homo sapien
cttggcaaggcagcatcgccttggc

SEQ ID NO: 5524775 - DNA, 25 bp, Homo sapien
ccggacagtccaggcctgtctgaac

SEQ ID NO: 5524776 - DNA, 25 bp, Homo sapien
gctgtttcgtggtctgcgaagagtg

SEQ ID NO: 5524777 - DNA, 25 bp, Homo sapien
taattccataaagggcccagacagc

SEQ ID NO: 5524778 - DNA, 25 bp, Homo sapien
gctgggggttgctccacaccctaaa

SEQ ID NO: 5524779 - DNA, 25 bp, Homo sapien
tctagttccacaaagtgatgggggg

SEQ ID NO: 5524780 - DNA, 25 bp, Homo sapien
cacccagctggtactaagcccttgc

SEQ ID NO: 5524781 - DNA, 25 bp, Homo sapien
gtcataatagggttgcctgccattc

SEQ ID NO: 5524782 - DNA, 25 bp, Homo sapien
aagcccttgcatagatgagaccatc

SEQ ID NO: 5524783 - DNA, 25 bp, Homo sapien
agttgcaaagtcggaatttgatccc

SEQ ID NO: 5524784 - DNA, 25 bp, Homo sapien
ggagggataaaattgcagctttcaa

SEQ ID NO: 5524785 - DNA, 25 bp, Homo sapien
tgatcattggcagaagcctagtcat

SEQ ID NO: 5524786 - DNA, 25 bp, Homo sapien
caagggatcacaggttgagattaaa

SEQ ID NO: 5524787 - DNA, 25 bp, Homo sapien
tgaggctaatagaggtgtagcaact

SEQ ID NO: 5524788 - DNA, 25 bp, Homo sapien
aatgaaataggtacttagccgtccc

SEQ ID NO: 5524789 - DNA, 25 bp, Homo sapien
aatcaagccatgtgcaacgtaggac

SEQ ID NO: 5524790 - DNA, 25 bp, Homo sapien
ttgagcattcagtgggacaatacag

SEQ ID NO: 5524791 - DNA, 25 bp, Homo sapien
cttcacaccaaccggcttccttctg

SEQ ID NO: 5524792 - DNA, 25 bp, Homo sapien
cacaccaaccggcttccttctgatg

SEQ ID NO: 5524793 - DNA, 25 bp, Homo sapien
atgcaccctggcaaatgatcatttt

SEQ ID NO: 5524794 - DNA, 25 bp, Homo sapien
gttttatgcaccctggcaaatgatc

SEQ ID NO: 5524795 - DNA, 25 bp, Homo sapien
aaactgtaagctaaacagatgacac

SEQ ID NO: 5524796 - DNA, 25 bp, Homo sapien
caatatcttgagcattcagtgggac

SEQ ID NO: 5524797 - DNA, 25 bp, Homo sapien
tcatcaaatagggtgttttatgcac

SEQ ID NO: 5524798 - DNA, 25 bp, Homo sapien
ccagttctcatcaaatagggtgttt

SEQ ID NO: 5524799 - DNA, 25 bp, Homo sapien
tttgacaaggattaaaactgtaagc

SEQ ID NO: 5524800 - DNA, 25 bp, Homo sapien
tccttctgatggccccattttcctt

SEQ ID NO: 5524801 - DNA, 25 bp, Homo sapien
acagatcaatcaacaaaagtacaca

SEQ ID NO: 5524802 - DNA, 25 bp, Homo sapien
gggacaatacaggcttgccttgtgc

SEQ ID NO: 5524803 - DNA, 25 bp, Homo sapien
agtgaggtcgaattaaaatcccgta

SEQ ID NO: 5524804 - DNA, 25 bp, Homo sapien
attaactcagagaacaaattatttt

SEQ ID NO: 5524805 - DNA, 25 bp, Homo sapien
tttccctataagtgaggtcgaatta

SEQ ID NO: 5524806 - DNA, 25 bp, Homo sapien
gggctcttcccagacgtctcttcac

SEQ ID NO: 5524807 - DNA, 25 bp, Homo sapien
ccagacgtctcttcacaccaaccgg

SEQ ID NO: 5524808 - DNA, 25 bp, Homo sapien
gagaagcgccatcgcggttttctcc

SEQ ID NO: 5524809 - DNA, 25 bp, Homo sapien
catttcaaatgagaagcgccatcgc

SEQ ID NO: 5524810 - DNA, 25 bp, Homo sapien
ttaatgtaggaagcactaaagtctt

SEQ ID NO: 5524811 - DNA, 25 bp, Homo sapien
ataacaattgctaaacactgtccat

SEQ ID NO: 5524812 - DNA, 25 bp, Homo sapien
cagtcagttcacttgttcctcttcc

SEQ ID NO: 5524813 - DNA, 25 bp, Homo sapien
ggaagaggaacaagtgaactgactg

SEQ ID NO: 5524814 - DNA, 25 bp, Homo sapien
accagaaaaggaatctaaatgttta

SEQ ID NO: 5524815 - DNA, 25 bp, Homo sapien
tttgcaaatctgtagttaattgtac

SEQ ID NO: 5524816 - DNA, 25 bp, Homo sapien
aatctgtgtgatagaaatggagaaa

SEQ ID NO: 5524817 - DNA, 25 bp, Homo sapien
aaatacacatttagggaataataat

SEQ ID NO: 5524818 - DNA, 25 bp, Homo sapien
cacatgccatctgtattgactgaat

SEQ ID NO: 5524819 - DNA, 25 bp, Homo sapien
agacattttgtgcgttaaaaaggaa

SEQ ID NO: 5524820 - DNA, 25 bp, Homo sapien
acaaaaattcttagacagctgcctc

SEQ ID NO: 5524821 - DNA, 25 bp, Homo sapien
agtaggtaatctagaaactatggct

SEQ ID NO: 5524822 - DNA, 25 bp, Homo sapien
actgaataaagcttagtgacattat

SEQ ID NO: 5524823 - DNA, 25 bp, Homo sapien
aatattcaggtagttaaattaacat

SEQ ID NO: 5524824 - DNA, 25 bp, Homo sapien
ttatagaaagacagattgcaaattt

SEQ ID NO: 5524825 - DNA, 25 bp, Homo sapien
ttcaagcagtttggaatgacttgcc

SEQ ID NO: 5524826 - DNA, 25 bp, Homo sapien
gcagtcagcctggattcatatgtct

SEQ ID NO: 5524827 - DNA, 25 bp, Homo sapien
aaagactcagaacaaagtgcttgcc

SEQ ID NO: 5524828 - DNA, 25 bp, Homo sapien
aatgcagacagtttcatgttaagcc

SEQ ID NO: 5524829 - DNA, 25 bp, Homo sapien
gactgtataacaagagcccaagagc

SEQ ID NO: 5524830 - DNA, 25 bp, Homo sapien
ctatgtatttggagataaaagactc

SEQ ID NO: 5524831 - DNA, 25 bp, Homo sapien
aagagcccaagagcaaccattgtct

SEQ ID NO: 5524832 - DNA, 25 bp, Homo sapien
gcttggtttgagacaactatgtatt

SEQ ID NO: 5524833 - DNA, 25 bp, Homo sapien
cagtttatatcaaacgagatgggca

SEQ ID NO: 5524834 - DNA, 25 bp, Homo sapien
cattgtctaacaggtagaaatgcag

SEQ ID NO: 5524835 - DNA, 25 bp, Homo sapien
taaacgtgtagccatatgactgtat

SEQ ID NO: 5524836 - DNA, 25 bp, Homo sapien
ttgggtccccgtgcatgaacatcaa

SEQ ID NO: 5524837 - DNA, 25 bp, Homo sapien
cccccacaccctcacaccccagttc

SEQ ID NO: 5524838 - DNA, 25 bp, Homo sapien
aataactcaatggacaaaaaaactg

SEQ ID NO: 5524839 - DNA, 25 bp, Homo sapien
cattttgactagtggccacgctgtc

SEQ ID NO: 5524840 - DNA, 25 bp, Homo sapien
gcagggctgcagagttcattctttg

SEQ ID NO: 5524841 - DNA, 25 bp, Homo sapien
ggccacgctgtcactttgggtcccc

SEQ ID NO: 5524842 - DNA, 25 bp, Homo sapien
cacaccccagttcataaaggggccc

SEQ ID NO: 5524843 - DNA, 25 bp, Homo sapien
caggtcttctgagtagggcctagag

SEQ ID NO: 5524844 - DNA, 25 bp, Homo sapien
gagggagacttacagtaggtacttg

SEQ ID NO: 5524845 - DNA, 25 bp, Homo sapien
agtcatctcagaaggcctgggtagt

SEQ ID NO: 5524846 - DNA, 25 bp, Homo sapien
gagtacgcatccagattaggaaaac

SEQ ID NO: 5524847 - DNA, 25 bp, Homo sapien
ggaccagtgcactgagtacatggcc

SEQ ID NO: 5524848 - DNA, 25 bp, Homo sapien
tccctccatgagcctggagacccca

SEQ ID NO: 5524849 - DNA, 25 bp, Homo sapien
gcgtggccaagctcttccgcctggc

SEQ ID NO: 5524850 - DNA, 25 bp, Homo sapien
cctgcacattgagggcttcatgggg

SEQ ID NO: 5524851 - DNA, 25 bp, Homo sapien
tgtatgcgtttgtgtgcagctcttc

SEQ ID NO: 5524852 - DNA, 25 bp, Homo sapien
ggactctatcccgctggtggacgac

SEQ ID NO: 5524853 - DNA, 25 bp, Homo sapien
gtacatggccaaggtcattgagaag

SEQ ID NO: 5524854 - DNA, 25 bp, Homo sapien
gtgcagacctacagcgccatagagg

SEQ ID NO: 5524855 - DNA, 25 bp, Homo sapien
ctggtggacgacatccgcttccacg

SEQ ID NO: 5524856 - DNA, 25 bp, Homo sapien
ccaggagctctcttggagacaagca

SEQ ID NO: 5524857 - DNA, 25 bp, Homo sapien
ttggagacaagcatgtgtatgcgtt

SEQ ID NO: 5524858 - DNA, 25 bp, Homo sapien
ctagcttgctacccacgatgaaatc

SEQ ID NO: 5524859 - DNA, 25 bp, Homo sapien
ccaaagacaatgagttaagggagag

SEQ ID NO: 5524860 - DNA, 25 bp, Homo sapien
aaaaagaagtctcagttgcagctat

SEQ ID NO: 5524861 - DNA, 25 bp, Homo sapien
gaacggcggtaacagttattggcaa

SEQ ID NO: 5524862 - DNA, 25 bp, Homo sapien
cacgatgaaatcaacaacctgtatc

SEQ ID NO: 5524863 - DNA, 25 bp, Homo sapien
gtaacagttattggcaaaaagcatg

SEQ ID NO: 5524864 - DNA, 25 bp, Homo sapien
ataggattgatgacgtgctgaaaaa

SEQ ID NO: 5524865 - DNA, 25 bp, Homo sapien
gaaaaatatgaccgacaaggcacct

SEQ ID NO: 5524866 - DNA, 25 bp, Homo sapien
accgacaaggcacctcctggtgtct

SEQ ID NO: 5524867 - DNA, 25 bp, Homo sapien
gcacctcctggtgtctaactccccc

SEQ ID NO: 5524868 - DNA, 25 bp, Homo sapien
tgacgtgctgaaaaatatgaccgac

SEQ ID NO: 5524869 - DNA, 25 bp, Homo sapien
ccaatgtcgccaaagctgaggcgga

SEQ ID NO: 5524870 - DNA, 25 bp, Homo sapien
catgtgtctgtgccgtgcgacatat

SEQ ID NO: 5524871 - DNA, 25 bp, Homo sapien
atcaagaactacatccaaggcatca

SEQ ID NO: 5524872 - DNA, 25 bp, Homo sapien
acccccccaagatacagcagctggt

SEQ ID NO: 5524873 - DNA, 25 bp, Homo sapien
atagcgaaagaacggacacatttca

SEQ ID NO: 5524874 - DNA, 25 bp, Homo sapien
cggtggaagaagatatccccatagc

SEQ ID NO: 5524875 - DNA, 25 bp, Homo sapien
gctcctgaagaaaacgttgaagatc

SEQ ID NO: 5524876 - DNA, 25 bp, Homo sapien
gccccaggaaatcaaagccaatgtc

SEQ ID NO: 5524877 - DNA, 25 bp, Homo sapien
tcaccgtccgcctgaccgaggcgaa

SEQ ID NO: 5524878 - DNA, 25 bp, Homo sapien
agctggtccaggacatcgccagcct

SEQ ID NO: 5524879 - DNA, 25 bp, Homo sapien
acctcgtccaggcaaagaagctggt

SEQ ID NO: 5524880 - DNA, 25 bp, Homo sapien
ccagccccagagatgaacttcctgc

SEQ ID NO: 5524881 - DNA, 25 bp, Homo sapien
gcgccgccaacaacgagttcatcta

SEQ ID NO: 5524882 - DNA, 25 bp, Homo sapien
aagcaggtcataaaaccccggcgta

SEQ ID NO: 5524883 - DNA, 25 bp, Homo sapien
agaactgcatgacaaccaaccagaa

SEQ ID NO: 5524884 - DNA, 25 bp, Homo sapien
gccgccaacaacgagttcatctacc

SEQ ID NO: 5524885 - DNA, 25 bp, Homo sapien
gagatgaacttcctgcccagcgccg

SEQ ID NO: 5524886 - DNA, 25 bp, Homo sapien
atgtgtgcacagtgcaagacggact

SEQ ID NO: 5524887 - DNA, 25 bp, Homo sapien
tacatgtgtgcacagtgcaagacgg

SEQ ID NO: 5524888 - DNA, 25 bp, Homo sapien
caagacggacttcacgtgccgctgg

SEQ ID NO: 5524889 - DNA, 25 bp, Homo sapien
tggtgcagaacctactggagacaca

SEQ ID NO: 5524890 - DNA, 25 bp, Homo sapien
agaacctactggagacacaagcagg

SEQ ID NO: 5524891 - DNA, 25 bp, Homo sapien
tctgtatgccagtacaaagcaaact

SEQ ID NO: 5524892 - DNA, 25 bp, Homo sapien
caaatgtacttgatcacttggcttc

SEQ ID NO: 5524893 - DNA, 25 bp, Homo sapien
ctcttcaaaaaaggaggcagtcttc

SEQ ID NO: 5524894 - DNA, 25 bp, Homo sapien
tccagttaagtttgtgaatgccatc

SEQ ID NO: 5524895 - DNA, 25 bp, Homo sapien
gcaggggttaaaatccactagcagc

SEQ ID NO: 5524896 - DNA, 25 bp, Homo sapien
tgaaaaatcaggattggaagttatc

SEQ ID NO: 5524897 - DNA, 25 bp, Homo sapien
atatgtcttctttaggcaggggtta

SEQ ID NO: 5524898 - DNA, 25 bp, Homo sapien
gttcaaggcaataagtatttgctcc

SEQ ID NO: 5524899 - DNA, 25 bp, Homo sapien
tttgctcccaaatgaagtatatgtc

SEQ ID NO: 5524900 - DNA, 25 bp, Homo sapien
ctctctagatgtgaaggcctgaaaa

SEQ ID NO: 5524901 - DNA, 25 bp, Homo sapien
tgaaagggataaaggttattctaca

SEQ ID NO: 5524902 - DNA, 25 bp, Homo sapien
cttgcgcttgagaccgctgtgattt

SEQ ID NO: 5524903 - DNA, 25 bp, Homo sapien
acagtggcgaccattcgagatagta

SEQ ID NO: 5524904 - DNA, 25 bp, Homo sapien
acgtagaggaaccacagcgttcttg

SEQ ID NO: 5524905 - DNA, 25 bp, Homo sapien
agagcctctcggttgactcgccatc

SEQ ID NO: 5524906 - DNA, 25 bp, Homo sapien
gccatcgaagtgcagtgatggagag

SEQ ID NO: 5524907 - DNA, 25 bp, Homo sapien
tgttacgacgatttgaagcgggtga

SEQ ID NO: 5524908 - DNA, 25 bp, Homo sapien
catcagcctgagcctcttcgcagcc

SEQ ID NO: 5524909 - DNA, 25 bp, Homo sapien
gctcagtcagatcgcaaaggcctta

SEQ ID NO: 5524910 - DNA, 25 bp, Homo sapien
acggaaagcgattacccttgacctc

SEQ ID NO: 5524911 - DNA, 25 bp, Homo sapien
cctcaaattggaagtgttacgacga

SEQ ID NO: 5524912 - DNA, 25 bp, Homo sapien
gaaaggcccacagatgcaactgtca

SEQ ID NO: 5524913 - DNA, 25 bp, Homo sapien
cctcattgctccctctggcctcccc

SEQ ID NO: 5524914 - DNA, 25 bp, Homo sapien
cagccctgcaggtccagaccctgca

SEQ ID NO: 5524915 - DNA, 25 bp, Homo sapien
tcccagacgggtgttttgtctcgaa

SEQ ID NO: 5524916 - DNA, 25 bp, Homo sapien
gtcgatgagtgaacttcagccctgc

SEQ ID NO: 5524917 - DNA, 25 bp, Homo sapien
agagctgggaccacccctcattgct

SEQ ID NO: 5524918 - DNA, 25 bp, Homo sapien
agagggaagtgcctgacatttcaca

SEQ ID NO: 5524919 - DNA, 25 bp, Homo sapien
ggcataccgagtcaatagcagagct

SEQ ID NO: 5524920 - DNA, 25 bp, Homo sapien
gcaagtggggtccttcataagctga

SEQ ID NO: 5524921 - DNA, 25 bp, Homo sapien
tgtctcgaaagaaatgctaccctca

SEQ ID NO: 5524922 - DNA, 25 bp, Homo sapien
agctgaccttggggccttcccagac

SEQ ID NO: 5524923 - DNA, 25 bp, Homo sapien
gcggtaagagaatgtcctaaaggca

SEQ ID NO: 5524924 - DNA, 25 bp, Homo sapien
ccaacaggtaatattgtaaagtaat

SEQ ID NO: 5524925 - DNA, 25 bp, Homo sapien
ttaagacgattaagtagttgctgtc

SEQ ID NO: 5524926 - DNA, 25 bp, Homo sapien
acacagataataaatccaacaggta

SEQ ID NO: 5524927 - DNA, 25 bp, Homo sapien
taagtagttgctgtccactggaaat

SEQ ID NO: 5524928 - DNA, 25 bp, Homo sapien
ttattgaccagtagaatgcatacac

SEQ ID NO: 5524929 - DNA, 25 bp, Homo sapien
taccagatagtaacttaatacagta

SEQ ID NO: 5524930 - DNA, 25 bp, Homo sapien
ctttggcccttcaactaactgattt

SEQ ID NO: 5524931 - DNA, 25 bp, Homo sapien
ctagagtagctagtctccatgacca

SEQ ID NO: 5524932 - DNA, 25 bp, Homo sapien
aacatacagcagatcaccaattcac

SEQ ID NO: 5524933 - DNA, 25 bp, Homo sapien
ttaattgaagttataccagatagta

SEQ ID NO: 5524934 - DNA, 25 bp, Homo sapien
ataaaagtagacttataaggtctta

SEQ ID NO: 5524935 - DNA, 25 bp, Homo sapien
gtctccctagatgattatagcaaag

SEQ ID NO: 5524936 - DNA, 25 bp, Homo sapien
gaaaaagtaacatgtacaatacgtc

SEQ ID NO: 5524937 - DNA, 25 bp, Homo sapien
gatgaagaatttaaacaaagcatgt

SEQ ID NO: 5524938 - DNA, 25 bp, Homo sapien
aagcatgtaaataatttggcaactc

SEQ ID NO: 5524939 - DNA, 25 bp, Homo sapien
atacatgcatgggttgttttggggt

SEQ ID NO: 5524940 - DNA, 25 bp, Homo sapien
aaatccatgatcagcaaacagttgc

SEQ ID NO: 5524941 - DNA, 25 bp, Homo sapien
cctcgtaagaggcatagcattaaaa

SEQ ID NO: 5524942 - DNA, 25 bp, Homo sapien
aaaacaaagatgagtttccaggctc

SEQ ID NO: 5524943 - DNA, 25 bp, Homo sapien
atttggcaactcaaccatgtaactc

SEQ ID NO: 5524944 - DNA, 25 bp, Homo sapien
attctaagttataatgtgggagtat

SEQ ID NO: 5524945 - DNA, 25 bp, Homo sapien
catgtaactcaaacctagtaacagg

SEQ ID NO: 5524946 - DNA, 25 bp, Homo sapien
atccagatgcctgcagatcagctaa

SEQ ID NO: 5524947 - DNA, 25 bp, Homo sapien
cttttctgggaactgggagtttgta

SEQ ID NO: 5524948 - DNA, 25 bp, Homo sapien
caggaaacacactgacagccgtcat

SEQ ID NO: 5524949 - DNA, 25 bp, Homo sapien
tgccaagagtacagaatgaagggca

SEQ ID NO: 5524950 - DNA, 25 bp, Homo sapien
gccgtcatccctggaggaaactgct

SEQ ID NO: 5524951 - DNA, 25 bp, Homo sapien
aggaaactgctcaataaaacggctc

SEQ ID NO: 5524952 - DNA, 25 bp, Homo sapien
aaaccccaggctaacatccagatgc

SEQ ID NO: 5524953 - DNA, 25 bp, Homo sapien
ctatcatcactgagcgaggtggaat

SEQ ID NO: 5524954 - DNA, 25 bp, Homo sapien
cgaggaagctagatactgtaagtgg

SEQ ID NO: 5524955 - DNA, 25 bp, Homo sapien
actggagtggtgcacacatctcatt

SEQ ID NO: 5524956 - DNA, 25 bp, Homo sapien
caggaatgttccagggaaacagact

SEQ ID NO: 5524957 - DNA, 25 bp, Homo sapien
ggccggcaggtccaatcctaccgtg

SEQ ID NO: 5524958 - DNA, 25 bp, Homo sapien
aactgcacatttaggatgacgtccc

SEQ ID NO: 5524959 - DNA, 25 bp, Homo sapien
tccaagcgcaagcctcgtctagttc

SEQ ID NO: 5524960 - DNA, 25 bp, Homo sapien
aggaagagtaactttggcacaagac

SEQ ID NO: 5524961 - DNA, 25 bp, Homo sapien
gcacaagacaaacccgatgcaggca

SEQ ID NO: 5524962 - DNA, 25 bp, Homo sapien
tactccctgagccatgtggccggca

SEQ ID NO: 5524963 - DNA, 25 bp, Homo sapien
tactcaaacaggccaccaaaggagg

SEQ ID NO: 5524964 - DNA, 25 bp, Homo sapien
atgcaaacaagtggccttctgtgcc

SEQ ID NO: 5524965 - DNA, 25 bp, Homo sapien
aagtcactacagaacaaatggcaac

SEQ ID NO: 5524966 - DNA, 25 bp, Homo sapien
agggaatcggctatccaggacattt

SEQ ID NO: 5524967 - DNA, 25 bp, Homo sapien
acgggagagtttcctgccaatgtgc

SEQ ID NO: 5524968 - DNA, 25 bp, Homo sapien
atgcaaaagaaactggcagattatc

SEQ ID NO: 5524969 - DNA, 25 bp, Homo sapien
gtagtgatggagcactgcctcaaac

SEQ ID NO: 5524970 - DNA, 25 bp, Homo sapien
atctctgcttgaaaggagaagactt

SEQ ID NO: 5524971 - DNA, 25 bp, Homo sapien
ctcaggttggagtaatagatttttc

SEQ ID NO: 5524972 - DNA, 25 bp, Homo sapien
tgaggctttaatgatggaggaagaa

SEQ ID NO: 5524973 - DNA, 25 bp, Homo sapien
ggaccatgcccccttgcagcagttc

SEQ ID NO: 5524974 - DNA, 25 bp, Homo sapien
cagaagcatcagatatagcgactag

SEQ ID NO: 5524975 - DNA, 25 bp, Homo sapien
aagcgagttctatgagcctgaggct

SEQ ID NO: 5524976 - DNA, 25 bp, Homo sapien
gcatcaaggtgttgctccagtcggc

SEQ ID NO: 5524977 - DNA, 25 bp, Homo sapien
cgcgcgcagcttctaagtgccagat

SEQ ID NO: 5524978 - DNA, 25 bp, Homo sapien
ggtgggactcaatgttctcgatgcc

SEQ ID NO: 5524979 - DNA, 25 bp, Homo sapien
taaactctgtagtaattccgtcgtc

SEQ ID NO: 5524980 - DNA, 25 bp, Homo sapien
gacgacggaattactacagagttta

SEQ ID NO: 5524981 - DNA, 25 bp, Homo sapien
ggatgccctctgatgtggggctgtg

SEQ ID NO: 5524982 - DNA, 25 bp, Homo sapien
gcaggtatagcagcattgggttttg

SEQ ID NO: 5524983 - DNA, 25 bp, Homo sapien
gagaaaaccatggtgtttcggtctg

SEQ ID NO: 5524984 - DNA, 25 bp, Homo sapien
ctctatgtgactaaaaaatggggat

SEQ ID NO: 5524985 - DNA, 25 bp, Homo sapien
ggtgggaggtattacccaggcttca

SEQ ID NO: 5524986 - DNA, 25 bp, Homo sapien
tgttgtgctctgcaaacgaacgggg

SEQ ID NO: 5524987 - DNA, 25 bp, Homo sapien
ggagacaacctgacagatctgggat

SEQ ID NO: 5524988 - DNA, 25 bp, Homo sapien
gcgatgtaactgtggcaactctgga

SEQ ID NO: 5524989 - DNA, 25 bp, Homo sapien
tgggattagagggatagttaattga

SEQ ID NO: 5524990 - DNA, 25 bp, Homo sapien
tttaggactctgactgacaagaccc

SEQ ID NO: 5524991 - DNA, 25 bp, Homo sapien
cacaaagatcagattggatgccctc

SEQ ID NO: 5524992 - DNA, 25 bp, Homo sapien
agaaacggatctcttaatggggtga

SEQ ID NO: 5524993 - DNA, 25 bp, Homo sapien
ggatgattgttgggactttgcgaat

SEQ ID NO: 5524994 - DNA, 25 bp, Homo sapien
ggcacgcagtcaggactctacagac

SEQ ID NO: 5524995 - DNA, 25 bp, Homo sapien
aaatgaaattagctggagagcgttt

SEQ ID NO: 5524996 - DNA, 25 bp, Homo sapien
tctagcagagtaatcaccaaatgaa

SEQ ID NO: 5524997 - DNA, 25 bp, Homo sapien
gatgtttacgctgtatgccggacgc

SEQ ID NO: 5524998 - DNA, 25 bp, Homo sapien
ccgagagtatcctggagccatctag

SEQ ID NO: 5524999 - DNA, 25 bp, Homo sapien
accagcaccaaggccaacgtgtttt

SEQ ID NO: 5525000 - DNA, 25 bp, Homo sapien
cgaattacctaaacagcccagggcc

SEQ ID NO: 5525001 - DNA, 25 bp, Homo sapien
aaagttcagaaatgtgccagacaga

SEQ ID NO: 5525002 - DNA, 25 bp, Homo sapien
caccttgagtaggaaacaggcttgt

SEQ ID NO: 5525003 - DNA, 25 bp, Homo sapien
ggcgcctccttcgtcagggatgact

SEQ ID NO: 5525004 - DNA, 25 bp, Homo sapien
caccttcccaccggaaagcggtgcc

SEQ ID NO: 5525005 - DNA, 25 bp, Homo sapien
tgtcggaacttctgaccagtgctgt

SEQ ID NO: 5525006 - DNA, 25 bp, Homo sapien
ggtggtcagctgtcggaacttctga

SEQ ID NO: 5525007 - DNA, 25 bp, Homo sapien
acctctagctcagccgaagagggtg

SEQ ID NO: 5525008 - DNA, 25 bp, Homo sapien
caagaactcagacttggtcaccttc

SEQ ID NO: 5525009 - DNA, 25 bp, Homo sapien
ggccttccgctgtgagacctgcggc

SEQ ID NO: 5525010 - DNA, 25 bp, Homo sapien
gcccagccaagacctctagctcagc

SEQ ID NO: 5525011 - DNA, 25 bp, Homo sapien
tgcagcttcgacacgaagcggccca

SEQ ID NO: 5525012 - DNA, 25 bp, Homo sapien
gctcgaggctcccctagagcccagc

SEQ ID NO: 5525013 - DNA, 25 bp, Homo sapien
tgatcagagtgagaacaagaactca

SEQ ID NO: 5525014 - DNA, 25 bp, Homo sapien
cacaagatgttcatagccttgatcc

SEQ ID NO: 5525015 - DNA, 25 bp, Homo sapien
taaaatgaagtttgtaatagatgtg

SEQ ID NO: 5525016 - DNA, 25 bp, Homo sapien
ataagtttggattcactctgatatt

SEQ ID NO: 5525017 - DNA, 25 bp, Homo sapien
gccgctgcctcatccatctctgctc

SEQ ID NO: 5525018 - DNA, 25 bp, Homo sapien
cagtgttgaattgataagtttggat

SEQ ID NO: 5525019 - DNA, 25 bp, Homo sapien
acgtgagtccagaacacatgtttta

SEQ ID NO: 5525020 - DNA, 25 bp, Homo sapien
cacatgttttataagagcataagaa

SEQ ID NO: 5525021 - DNA, 25 bp, Homo sapien
cttgatccattacagccgctgcctc

SEQ ID NO: 5525022 - DNA, 25 bp, Homo sapien
ttaaaaatagcaaagtataaaatga

SEQ ID NO: 5525023 - DNA, 25 bp, Homo sapien
ccaacctcctaaagtgtagagctgt

SEQ ID NO: 5525024 - DNA, 25 bp, Homo sapien
atttgcagacttaacatcctacttc

SEQ ID NO: 5525025 - DNA, 25 bp, Homo sapien
cagggagatactatagcacgactgc

SEQ ID NO: 5525026 - DNA, 25 bp, Homo sapien
tgccttgaagaattgcagcagggag

SEQ ID NO: 5525027 - DNA, 25 bp, Homo sapien
gcgcctggtgatcggctccttacca

SEQ ID NO: 5525028 - DNA, 25 bp, Homo sapien
tggaggatttaagtgccctgtatgc

SEQ ID NO: 5525029 - DNA, 25 bp, Homo sapien
agtaaatagatcttgccctgagcac

SEQ ID NO: 5525030 - DNA, 25 bp, Homo sapien
ccccttcagcatcccgaacagcagc

SEQ ID NO: 5525031 - DNA, 25 bp, Homo sapien
atgaggatgtactgagtaaagatgc

SEQ ID NO: 5525032 - DNA, 25 bp, Homo sapien
tcgccgcacatgtttggaggattta

SEQ ID NO: 5525033 - DNA, 25 bp, Homo sapien
agcacccttcagattaagcgtcagc

SEQ ID NO: 5525034 - DNA, 25 bp, Homo sapien
taaaggctgcatagatgaatggttt

SEQ ID NO: 5525035 - DNA, 25 bp, Homo sapien
ttaccagctcacctctcgccgcaca

SEQ ID NO: 5525036 - DNA, 25 bp, Homo sapien
ccggacacattgggaacttagagca

SEQ ID NO: 5525037 - DNA, 25 bp, Homo sapien
agcccatgcccaggattgttgatca

SEQ ID NO: 5525038 - DNA, 25 bp, Homo sapien
tgggaacttagagcagtgcttggga

SEQ ID NO: 5525039 - DNA, 25 bp, Homo sapien
gattgttgatcagtgctgaaggtcc

SEQ ID NO: 5525040 - DNA, 25 bp, Homo sapien
gttgatcagtgctgaaggtcctgag

SEQ ID NO: 5525041 - DNA, 25 bp, Homo sapien
aacttagagcagtgcttgggacatg

SEQ ID NO: 5525042 - DNA, 25 bp, Homo sapien
ccaattccggacacattgggaactt

SEQ ID NO: 5525043 - DNA, 25 bp, Homo sapien
ggtgaaaactgtcggtcagcccatg

SEQ ID NO: 5525044 - DNA, 25 bp, Homo sapien
tgggtgaaaactgtcggtcagccca

SEQ ID NO: 5525045 - DNA, 25 bp, Homo sapien
cacattgggaacttagagcagtgct

SEQ ID NO: 5525046 - DNA, 25 bp, Homo sapien
atgcccaggattgttgatcagtgct

SEQ ID NO: 5525047 - DNA, 25 bp, Homo sapien
cacattggctgcagtgagatcgtga

SEQ ID NO: 5525048 - DNA, 25 bp, Homo sapien
attccactcataccaagagacaatt

SEQ ID NO: 5525049 - DNA, 25 bp, Homo sapien
gtgagggccctgaccctagaatcaa

SEQ ID NO: 5525050 - DNA, 25 bp, Homo sapien
ttccttaaactagcgtgaagtcgac

SEQ ID NO: 5525051 - DNA, 25 bp, Homo sapien
ctgcagtgagatcgtgacattagga

SEQ ID NO: 5525052 - DNA, 25 bp, Homo sapien
tcgtgacattaggattcctgggagc

SEQ ID NO: 5525053 - DNA, 25 bp, Homo sapien
ctgctgtgtttgtcacattggctgc

SEQ ID NO: 5525054 - DNA, 25 bp, Homo sapien
aactagcgtgaagtcgactttaacc

SEQ ID NO: 5525055 - DNA, 25 bp, Homo sapien
ctctagacttaattactgctgtgtt

SEQ ID NO: 5525056 - DNA, 25 bp, Homo sapien
gcggaatttaagatggctcctccat

SEQ ID NO: 5525057 - DNA, 25 bp, Homo sapien
cgactttaaccttccagcagtgtga

SEQ ID NO: 5525058 - DNA, 25 bp, Homo sapien
aagaccttccaaagagaaaatacat

SEQ ID NO: 5525059 - DNA, 25 bp, Homo sapien
agccaggccttagtcatagatgtcc

SEQ ID NO: 5525060 - DNA, 25 bp, Homo sapien
ctaagtgtccatagaggaagccttt

SEQ ID NO: 5525061 - DNA, 25 bp, Homo sapien
tctgcatggcagaaatgtttgtttc

SEQ ID NO: 5525062 - DNA, 25 bp, Homo sapien
gtgaactggtctcaatactggattc

SEQ ID NO: 5525063 - DNA, 25 bp, Homo sapien
tattacttagggacagaatatggtt

SEQ ID NO: 5525064 - DNA, 25 bp, Homo sapien
ctctccataactaaagccaggcctt

SEQ ID NO: 5525065 - DNA, 25 bp, Homo sapien
aggcagagcagaacaaatctggtat

SEQ ID NO: 5525066 - DNA, 25 bp, Homo sapien
gtgagctggttagcaacaatcagtt

SEQ ID NO: 5525067 - DNA, 25 bp, Homo sapien
tagacgttgattctagatgaggcag

SEQ ID NO: 5525068 - DNA, 25 bp, Homo sapien
actggattcttgtgagctggttagc

SEQ ID NO: 5525069 - DNA, 25 bp, Homo sapien
taataccatatcacttaggaccatc

SEQ ID NO: 5525070 - DNA, 25 bp, Homo sapien
actagacatgaaagtagtcctatcc

SEQ ID NO: 5525071 - DNA, 25 bp, Homo sapien
aagctgtagttgaatataccaaaat

SEQ ID NO: 5525072 - DNA, 25 bp, Homo sapien
caaaataagtcagttgaagaaatct

SEQ ID NO: 5525073 - DNA, 25 bp, Homo sapien
gtaagcttttcacgtgttttggcac

SEQ ID NO: 5525074 - DNA, 25 bp, Homo sapien
agctaaccacaaaagttgcctgtac

SEQ ID NO: 5525075 - DNA, 25 bp, Homo sapien
gataattaacggggaatacagtgta

SEQ ID NO: 5525076 - DNA, 25 bp, Homo sapien
tgatgttacagattcagatgattcc

SEQ ID NO: 5525077 - DNA, 25 bp, Homo sapien
ctccaaacgacaactgatgcctttc

SEQ ID NO: 5525078 - DNA, 25 bp, Homo sapien
taggaccatcaaaaaaatgtgtacc

SEQ ID NO: 5525079 - DNA, 25 bp, Homo sapien
ctacaatctgacttaagggataatt

SEQ ID NO: 5525080 - DNA, 25 bp, Homo sapien
acccaggccaattccctggccatcc

SEQ ID NO: 5525081 - DNA, 25 bp, Homo sapien
atgtgtcagtctcaagtataactac

SEQ ID NO: 5525082 - DNA, 25 bp, Homo sapien
gaagataataacataataaaccaca

SEQ ID NO: 5525083 - DNA, 25 bp, Homo sapien
tggccttcatacataggtcctaaac

SEQ ID NO: 5525084 - DNA, 25 bp, Homo sapien
tgaaatagctatttagaactgcttt

SEQ ID NO: 5525085 - DNA, 25 bp, Homo sapien
acataggtcctaaacccaggccaat

SEQ ID NO: 5525086 - DNA, 25 bp, Homo sapien
gcaaactaggtaactatcaaaaagc

SEQ ID NO: 5525087 - DNA, 25 bp, Homo sapien
tttcctcaagaagataataacataa

SEQ ID NO: 5525088 - DNA, 25 bp, Homo sapien
tagttggcccttctttcagcacttc

SEQ ID NO: 5525089 - DNA, 25 bp, Homo sapien
taatttatggcaaactcaaacattt

SEQ ID NO: 5525090 - DNA, 25 bp, Homo sapien
gctaagtattttgggttgtgatgtt

SEQ ID NO: 5525091 - DNA, 25 bp, Homo sapien
caccttccccacgggctcctgtgcc

SEQ ID NO: 5525092 - DNA, 25 bp, Homo sapien
cttcattcagaggcgaacaccttcc

SEQ ID NO: 5525093 - DNA, 25 bp, Homo sapien
accatgactgttaccagcccctccc

SEQ ID NO: 5525094 - DNA, 25 bp, Homo sapien
accttcacagtaaggcctgcctgcc

SEQ ID NO: 5525095 - DNA, 25 bp, Homo sapien
gtgtcaaacagggactctgaccaac

SEQ ID NO: 5525096 - DNA, 25 bp, Homo sapien
ccatggatcgaataatcattggcac

SEQ ID NO: 5525097 - DNA, 25 bp, Homo sapien
gctttgcaccgctcccccttagggc

SEQ ID NO: 5525098 - DNA, 25 bp, Homo sapien
gctgtcaaggtggtctccatgtgtc

SEQ ID NO: 5525099 - DNA, 25 bp, Homo sapien
acgcacacactgggcatgatgatgg

SEQ ID NO: 5525100 - DNA, 25 bp, Homo sapien
cttcccgatgcttcacccgtggtat

SEQ ID NO: 5525101 - DNA, 25 bp, Homo sapien
gggtttacaggcaggatcctcttcc

SEQ ID NO: 5525102 - DNA, 25 bp, Homo sapien
ttaaaaagattggatgctgaggtca

SEQ ID NO: 5525103 - DNA, 25 bp, Homo sapien
gttttgtgtagatgttatgagtata

SEQ ID NO: 5525104 - DNA, 25 bp, Homo sapien
cagaagaatttcactacacatggtt

SEQ ID NO: 5525105 - DNA, 25 bp, Homo sapien
tgctcagccaaatgagatacaattc

SEQ ID NO: 5525106 - DNA, 25 bp, Homo sapien
tcccagtagacatcactaccctgtg

SEQ ID NO: 5525107 - DNA, 25 bp, Homo sapien
ttgcaatactttaggtccaagtttc

SEQ ID NO: 5525108 - DNA, 25 bp, Homo sapien
tcagaaggatggaaccataccatca

SEQ ID NO: 5525109 - DNA, 25 bp, Homo sapien
ccatcagcaggtctacaaaagaaat

SEQ ID NO: 5525110 - DNA, 25 bp, Homo sapien
tacactcaagacacagtcatgcaca

SEQ ID NO: 5525111 - DNA, 25 bp, Homo sapien
gttatgagtataatcccagtagaca

SEQ ID NO: 5525112 - DNA, 25 bp, Homo sapien
tgacaaaagtaatgctcagccaaat

SEQ ID NO: 5525113 - DNA, 25 bp, Homo sapien
tgttgtgaagctgccaccatgttac

SEQ ID NO: 5525114 - DNA, 25 bp, Homo sapien
actgcatgcatgatcacggttcttg

SEQ ID NO: 5525115 - DNA, 25 bp, Homo sapien
tgcgatgttgtgtgcacagtaaggg

SEQ ID NO: 5525116 - DNA, 25 bp, Homo sapien
aatactggagacatgactgcatgca

SEQ ID NO: 5525117 - DNA, 25 bp, Homo sapien
aggagcattgtgtgactccgcggtg

SEQ ID NO: 5525118 - DNA, 25 bp, Homo sapien
agtaatgtataaagtgccgatgatg

SEQ ID NO: 5525119 - DNA, 25 bp, Homo sapien
aaaaacaaaggtgtgtgcgatgttg

SEQ ID NO: 5525120 - DNA, 25 bp, Homo sapien
gatggtatcagacgtgctgctgttc

SEQ ID NO: 5525121 - DNA, 25 bp, Homo sapien
gactccgcggtggatttccatgcac

SEQ ID NO: 5525122 - DNA, 25 bp, Homo sapien
atgcatctgcccagctgatggtatc

SEQ ID NO: 5525123 - DNA, 25 bp, Homo sapien
gccgatgatgtaacatgcagttgtc

SEQ ID NO: 5525124 - DNA, 25 bp, Homo sapien
atagtactagctagaaatacaaatt

SEQ ID NO: 5525125 - DNA, 25 bp, Homo sapien
attgtgaagttgtgttaaatagtac

SEQ ID NO: 5525126 - DNA, 25 bp, Homo sapien
ttggaatttgtgttgcatgtaaggc

SEQ ID NO: 5525127 - DNA, 25 bp, Homo sapien
tgagaagattggcttgaattagatc

SEQ ID NO: 5525128 - DNA, 25 bp, Homo sapien
gaaatggacttgagaagattggctt

SEQ ID NO: 5525129 - DNA, 25 bp, Homo sapien
ctcttccctgtggcacttgacattt

SEQ ID NO: 5525130 - DNA, 25 bp, Homo sapien
gcctaaagtatggctgggaaatgga

SEQ ID NO: 5525131 - DNA, 25 bp, Homo sapien
ttgatatcaagcaagtggcttcctt

SEQ ID NO: 5525132 - DNA, 25 bp, Homo sapien
ctgccagaggcaaaagatgtttgtt

SEQ ID NO: 5525133 - DNA, 25 bp, Homo sapien
tggccccttgagtactgccagaggc

SEQ ID NO: 5525134 - DNA, 25 bp, Homo sapien
tgcatgtaaggcaatctttcctgtt

SEQ ID NO: 5525135 - DNA, 25 bp, Homo sapien
tgatgaattcacttagatgcgtaca

SEQ ID NO: 5525136 - DNA, 25 bp, Homo sapien
aaatgccccataacaccaacccctc

SEQ ID NO: 5525137 - DNA, 25 bp, Homo sapien
aactcacactaatgaagctgcaatc

SEQ ID NO: 5525138 - DNA, 25 bp, Homo sapien
tttggcagtaaccagactgtcttta

SEQ ID NO: 5525139 - DNA, 25 bp, Homo sapien
aagttgtctaggaagtgaaattgtt

SEQ ID NO: 5525140 - DNA, 25 bp, Homo sapien
actggtctagacatcactccactgc

SEQ ID NO: 5525141 - DNA, 25 bp, Homo sapien
gacccttggccatatgcgtggaatc

SEQ ID NO: 5525142 - DNA, 25 bp, Homo sapien
atatgcgtggaatctgagaatggca

SEQ ID NO: 5525143 - DNA, 25 bp, Homo sapien
tctgagaatggcatctagttggctt

SEQ ID NO: 5525144 - DNA, 25 bp, Homo sapien
tttctggaaattgttgctggtgatg

SEQ ID NO: 5525145 - DNA, 25 bp, Homo sapien
atagaaaattcaagtaaatgcccca

SEQ ID NO: 5525146 - DNA, 25 bp, Homo sapien
gcggagacgaactggcccctttctc

SEQ ID NO: 5525147 - DNA, 25 bp, Homo sapien
gagaaaggggccagttcgtctccgc

SEQ ID NO: 5525148 - DNA, 25 bp, Homo sapien
aggagcatttcctgcaggaggctga

SEQ ID NO: 5525149 - DNA, 25 bp, Homo sapien
gtggaaatcatgagaaaggacttga

SEQ ID NO: 5525150 - DNA, 25 bp, Homo sapien
gcatttcctgcaggaggctgagaag

SEQ ID NO: 5525151 - DNA, 25 bp, Homo sapien
ctgaccgactacaagaagctgcggg

SEQ ID NO: 5525152 - DNA, 25 bp, Homo sapien
cctgggcctcagcatgctgctgcag

SEQ ID NO: 5525153 - DNA, 25 bp, Homo sapien
ggtctgtggaaatcatgagaaagga

SEQ ID NO: 5525154 - DNA, 25 bp, Homo sapien
agaagctgcgggccttctttgtgga

SEQ ID NO: 5525155 - DNA, 25 bp, Homo sapien
ggcaggaggatggatcctcatctcc

SEQ ID NO: 5525156 - DNA, 25 bp, Homo sapien
gctgaccccactgagcggttcaggt

SEQ ID NO: 5525157 - DNA, 25 bp, Homo sapien
gcactgaccgactacaagaagctgc

SEQ ID NO: 5525158 - DNA, 25 bp, Homo sapien
atcatgagaaaggacttgaatgacg

SEQ ID NO: 5525159 - DNA, 25 bp, Homo sapien
aaatttgtaaagcgcttttgcctgt

SEQ ID NO: 5525160 - DNA, 25 bp, Homo sapien
cctccggcgcgcgattatttctcta

SEQ ID NO: 5525161 - DNA, 25 bp, Homo sapien
ttggctcctggactttccctggctc

SEQ ID NO: 5525162 - DNA, 25 bp, Homo sapien
gccgcatgcagttcgtcgtggcggg

SEQ ID NO: 5525163 - DNA, 25 bp, Homo sapien
tcctggactttccctggctccgccg

SEQ ID NO: 5525164 - DNA, 25 bp, Homo sapien
cccggccgcctctgagtttccagcc

SEQ ID NO: 5525165 - DNA, 25 bp, Homo sapien
cggcgcgcgattatttctctagaac

SEQ ID NO: 5525166 - DNA, 25 bp, Homo sapien
cgcttttgcctgtgtgatttcctct

SEQ ID NO: 5525167 - DNA, 25 bp, Homo sapien
gggggtcgatgtctcacttttttgc

SEQ ID NO: 5525168 - DNA, 25 bp, Homo sapien
ggccgcatgcagttcgtcgtggcgg

SEQ ID NO: 5525169 - DNA, 25 bp, Homo sapien
tgcctgtgtgatttcctctgggttt

SEQ ID NO: 5525170 - DNA, 25 bp, Homo sapien
aagagagacgatttaaagatgactg

SEQ ID NO: 5525171 - DNA, 25 bp, Homo sapien
agcagagtgtttataaagagagacg

SEQ ID NO: 5525172 - DNA, 25 bp, Homo sapien
acttagctgacaatgaaggttcaat

SEQ ID NO: 5525173 - DNA, 25 bp, Homo sapien
tactcctctaggaccgaggtgagtt

SEQ ID NO: 5525174 - DNA, 25 bp, Homo sapien
cacaagttagggtcttagaagttgc

SEQ ID NO: 5525175 - DNA, 25 bp, Homo sapien
gaggaagctgagaataataaaggta

SEQ ID NO: 5525176 - DNA, 25 bp, Homo sapien
ggaatctgcatgtgggtgtgtcatg

SEQ ID NO: 5525177 - DNA, 25 bp, Homo sapien
agccttgtacttgctaagggggagg

SEQ ID NO: 5525178 - DNA, 25 bp, Homo sapien
agatgactgaagacagatgttaaat

SEQ ID NO: 5525179 - DNA, 25 bp, Homo sapien
tagaagttgccaagcagtactagga

SEQ ID NO: 5525180 - DNA, 25 bp, Homo sapien
cgaggtgagttaatgcacagccttg

SEQ ID NO: 5525181 - DNA, 25 bp, Homo sapien
gacaccaaagctgaggtccccttga

SEQ ID NO: 5525182 - DNA, 25 bp, Homo sapien
cattgtgacggaaccgacaccaaag

SEQ ID NO: 5525183 - DNA, 25 bp, Homo sapien
ggaaggctggaagtacaccttgttg

SEQ ID NO: 5525184 - DNA, 25 bp, Homo sapien
gaatttgacaggcaagaagatgaca

SEQ ID NO: 5525185 - DNA, 25 bp, Homo sapien
tgtggtcctgaggcacacaggtaat

SEQ ID NO: 5525186 - DNA, 25 bp, Homo sapien
acaggtaatggggccacctgcttga

SEQ ID NO: 5525187 - DNA, 25 bp, Homo sapien
gtgacagaattaaatgaccgggaag

SEQ ID NO: 5525188 - DNA, 25 bp, Homo sapien
gtgacctccccaaaggatggctcca

SEQ ID NO: 5525189 - DNA, 25 bp, Homo sapien
gaccacgctcaatgtggaaggctgg

SEQ ID NO: 5525190 - DNA, 25 bp, Homo sapien
gaaagagccagacttctcagaggtc

SEQ ID NO: 5525191 - DNA, 25 bp, Homo sapien
ttcagtgacgacaggcagttgtcac

SEQ ID NO: 5525192 - DNA, 25 bp, Homo sapien
taaagtccacaagttcatacataac

SEQ ID NO: 5525193 - DNA, 25 bp, Homo sapien
tctaacagcccatatatgttgggtt

SEQ ID NO: 5525194 - DNA, 25 bp, Homo sapien
taccctgaaagacagctgtttagtc

SEQ ID NO: 5525195 - DNA, 25 bp, Homo sapien
tctatacattagcagttctcaacct

SEQ ID NO: 5525196 - DNA, 25 bp, Homo sapien
tgagcactaagcatcctgcagtatt

SEQ ID NO: 5525197 - DNA, 25 bp, Homo sapien
atttttcatagagacggggttttgc

SEQ ID NO: 5525198 - DNA, 25 bp, Homo sapien
gtgcaatggcacgatctctgctcac

SEQ ID NO: 5525199 - DNA, 25 bp, Homo sapien
tctcaacctgcattgtaaagtccac

SEQ ID NO: 5525200 - DNA, 25 bp, Homo sapien
ctgaaagacagctgtttagtcattc

SEQ ID NO: 5525201 - DNA, 25 bp, Homo sapien
tacaattactatctaacagcccata

SEQ ID NO: 5525202 - DNA, 25 bp, Homo sapien
catacataacactgagcactaagca

SEQ ID NO: 5525203 - DNA, 25 bp, Homo sapien
acgatcaaagatacaatgagcatgg

SEQ ID NO: 5525204 - DNA, 25 bp, Homo sapien
atagattaaaagattgagaaatact

SEQ ID NO: 5525205 - DNA, 25 bp, Homo sapien
aatgagcatggtatacttttgggtt

SEQ ID NO: 5525206 - DNA, 25 bp, Homo sapien
atggaaagatacttttggacattac

SEQ ID NO: 5525207 - DNA, 25 bp, Homo sapien
cttgatagtaatgttcctgatagat

SEQ ID NO: 5525208 - DNA, 25 bp, Homo sapien
ccatattctgctgggtccgctgctc

SEQ ID NO: 5525209 - DNA, 25 bp, Homo sapien
gcagccttcagtccaaaaaaagtca

SEQ ID NO: 5525210 - DNA, 25 bp, Homo sapien
ctaccttagttaactggcccattcc

SEQ ID NO: 5525211 - DNA, 25 bp, Homo sapien
aaaaacagaggctcttgcaacagga

SEQ ID NO: 5525212 - DNA, 25 bp, Homo sapien
gctcttgcaacaggagacctgcctc

SEQ ID NO: 5525213 - DNA, 25 bp, Homo sapien
agaaatacttgaagaacgatcaaag

SEQ ID NO: 5525214 - DNA, 25 bp, Homo sapien
gtccagagtagtttgtggagcgatg

SEQ ID NO: 5525215 - DNA, 25 bp, Homo sapien
ttcagtgaacgagataattgggaga

SEQ ID NO: 5525216 - DNA, 25 bp, Homo sapien
ggaggtggcattgtagaaaataaaa

SEQ ID NO: 5525217 - DNA, 25 bp, Homo sapien
aattgggagagacatgtcccagatt

SEQ ID NO: 5525218 - DNA, 25 bp, Homo sapien
atatggctaatcactcagaggtcac

SEQ ID NO: 5525219 - DNA, 25 bp, Homo sapien
tgatgggctctaacagtgcttactg

SEQ ID NO: 5525220 - DNA, 25 bp, Homo sapien
aggctcccctcccgagtcctgagtc

SEQ ID NO: 5525221 - DNA, 25 bp, Homo sapien
aagaaaagttagagtaaggtgaata

SEQ ID NO: 5525222 - DNA, 25 bp, Homo sapien
cccaaaatgaactgaatgagagaga

SEQ ID NO: 5525223 - DNA, 25 bp, Homo sapien
gctcagcgttgggcatcatatggct

SEQ ID NO: 5525224 - DNA, 25 bp, Homo sapien
aatgtctgaggtagagctcagcgtt

SEQ ID NO: 5525225 - DNA, 25 bp, Homo sapien
ttcccgtccagtggtgaccagttac

SEQ ID NO: 5525226 - DNA, 25 bp, Homo sapien
aggagaagtcggtgtttactagtct

SEQ ID NO: 5525227 - DNA, 25 bp, Homo sapien
ccgaaaggttgaaatggtgtttgta

SEQ ID NO: 5525228 - DNA, 25 bp, Homo sapien
agagacctgaagaatatgtgtatgt

SEQ ID NO: 5525229 - DNA, 25 bp, Homo sapien
gcttccaggggcttagagacctgaa

SEQ ID NO: 5525230 - DNA, 25 bp, Homo sapien
tgaagcagcatggttaagcattctt

SEQ ID NO: 5525231 - DNA, 25 bp, Homo sapien
agagacaaatgcatttcaaagggtc

SEQ ID NO: 5525232 - DNA, 25 bp, Homo sapien
tagctctgactctcccgaaaggttg

SEQ ID NO: 5525233 - DNA, 25 bp, Homo sapien
ctcatatgatcacagaggttgggct

SEQ ID NO: 5525234 - DNA, 25 bp, Homo sapien
tacaataactcgctgatggggagaa

SEQ ID NO: 5525235 - DNA, 25 bp, Homo sapien
tctacactgctcagccttggccctc

SEQ ID NO: 5525236 - DNA, 25 bp, Homo sapien
caagtcttcttgctggggcctcatt

SEQ ID NO: 5525237 - DNA, 25 bp, Homo sapien
gaatacaccagaaagttaagcatgc

SEQ ID NO: 5525238 - DNA, 25 bp, Homo sapien
gcgctgtgctggcttctacaccacg

SEQ ID NO: 5525239 - DNA, 25 bp, Homo sapien
tccccatggtatccagagagaagac

SEQ ID NO: 5525240 - DNA, 25 bp, Homo sapien
agccaaggttagggtatatagcctc

SEQ ID NO: 5525241 - DNA, 25 bp, Homo sapien
tcatcctgagtcttcgcgctgtgct

SEQ ID NO: 5525242 - DNA, 25 bp, Homo sapien
cgagcctgtgttcaaggtggtctga

SEQ ID NO: 5525243 - DNA, 25 bp, Homo sapien
ccctgattgggtatgagtatcaccc

SEQ ID NO: 5525244 - DNA, 25 bp, Homo sapien
tatatatcagcgaagaaaggaatac

SEQ ID NO: 5525245 - DNA, 25 bp, Homo sapien
agggttaccaggttcgagcctgtgt

SEQ ID NO: 5525246 - DNA, 25 bp, Homo sapien
aggagtacctaagatcaagcaagtc

SEQ ID NO: 5525247 - DNA, 25 bp, Homo sapien
acaaatacaaagaaccccaagtcca

SEQ ID NO: 5525248 - DNA, 25 bp, Homo sapien
acaataaatgtgttcacgatgcaac

SEQ ID NO: 5525249 - DNA, 25 bp, Homo sapien
gtgacagcacctttttgggacttcc

SEQ ID NO: 5525250 - DNA, 25 bp, Homo sapien
tagaaagagatgtaaaaatctgacc

SEQ ID NO: 5525251 - DNA, 25 bp, Homo sapien
cagaacttaaagtgacagcaccttt

SEQ ID NO: 5525252 - DNA, 25 bp, Homo sapien
atgcaacaaaaagcttaacacaaaa

SEQ ID NO: 5525253 - DNA, 25 bp, Homo sapien
aaatctgacctagttgaacagtctt

SEQ ID NO: 5525254 - DNA, 25 bp, Homo sapien
tacaaatagacaaacaaacacaaat

SEQ ID NO: 5525255 - DNA, 25 bp, Homo sapien
tccaataaggaaggtggttgcttta

SEQ ID NO: 5525256 - DNA, 25 bp, Homo sapien
aatgctgcagcaagtatttacatgt

SEQ ID NO: 5525257 - DNA, 25 bp, Homo sapien
attggaattgcagtgatattaacat

SEQ ID NO: 5525258 - DNA, 25 bp, Homo sapien
cgcagccttagagagcagttcttag

SEQ ID NO: 5525259 - DNA, 25 bp, Homo sapien
aaggcacctgcaatagtagataatt

SEQ ID NO: 5525260 - DNA, 25 bp, Homo sapien
cttagagagcagttcttagaggtct

SEQ ID NO: 5525261 - DNA, 25 bp, Homo sapien
cactcagagagtaagcttgataaac

SEQ ID NO: 5525262 - DNA, 25 bp, Homo sapien
attctgtcactcagagagtaagctt

SEQ ID NO: 5525263 - DNA, 25 bp, Homo sapien
ttggttagtagagttataaatacaa

SEQ ID NO: 5525264 - DNA, 25 bp, Homo sapien
cttacaagtgttgcatatacagttt

SEQ ID NO: 5525265 - DNA, 25 bp, Homo sapien
cagagccctctaccaataaggcacc

SEQ ID NO: 5525266 - DNA, 25 bp, Homo sapien
ttatagtaatggtttattgataggt

SEQ ID NO: 5525267 - DNA, 25 bp, Homo sapien
gtaagcttgataaacataggttgtt

SEQ ID NO: 5525268 - DNA, 25 bp, Homo sapien
ataggtaatttggttagtagagtta

SEQ ID NO: 5525269 - DNA, 25 bp, Homo sapien
aagcgtaatacgcgcacacatgcac

SEQ ID NO: 5525270 - DNA, 25 bp, Homo sapien
acagtgtcaagggttttatacgacc

SEQ ID NO: 5525271 - DNA, 25 bp, Homo sapien
taatgagccaatagttgatcctctc

SEQ ID NO: 5525272 - DNA, 25 bp, Homo sapien
ttgtgaactgaatagtctgggtatt

SEQ ID NO: 5525273 - DNA, 25 bp, Homo sapien
ggggggcttcttgtgaactgaatag

SEQ ID NO: 5525274 - DNA, 25 bp, Homo sapien
tacgaccccaccatgcaagtgacct

SEQ ID NO: 5525275 - DNA, 25 bp, Homo sapien
tggtccacacatagcagacttgcta

SEQ ID NO: 5525276 - DNA, 25 bp, Homo sapien
cacacatacgcacaatgaacacatg

SEQ ID NO: 5525277 - DNA, 25 bp, Homo sapien
atcagaaaatggtctagacagtgtc

SEQ ID NO: 5525278 - DNA, 25 bp, Homo sapien
ccatactaaccacagaagccgaagc

SEQ ID NO: 5525279 - DNA, 25 bp, Homo sapien
tcagaacaaattttagcaagcgtaa

SEQ ID NO: 5525280 - DNA, 25 bp, Homo sapien
caatgcacgtgcattataggggcag

SEQ ID NO: 5525281 - DNA, 25 bp, Homo sapien
ttgttgtcagcaatacagcattttc

SEQ ID NO: 5525282 - DNA, 25 bp, Homo sapien
gggaagggctatattttcactcacc

SEQ ID NO: 5525283 - DNA, 25 bp, Homo sapien
ttcagttgaagactatgcactcctc

SEQ ID NO: 5525284 - DNA, 25 bp, Homo sapien
tggataaagcaaactactatagctc

SEQ ID NO: 5525285 - DNA, 25 bp, Homo sapien
attttagacgagcaggttccagaaa

SEQ ID NO: 5525286 - DNA, 25 bp, Homo sapien
gctagcgagagcatattacaaagca

SEQ ID NO: 5525287 - DNA, 25 bp, Homo sapien
caacaatacacaaaccaggactaaa

SEQ ID NO: 5525288 - DNA, 25 bp, Homo sapien
tgcactcctcagtgtcagacgtgag

SEQ ID NO: 5525289 - DNA, 25 bp, Homo sapien
ctcatgaagtagtcatagcacattc

SEQ ID NO: 5525290 - DNA, 25 bp, Homo sapien
gatattgaatatgctgagtctttac

SEQ ID NO: 5525291 - DNA, 25 bp, Homo sapien
tcacaaaaagtgaaacttggatctc

SEQ ID NO: 5525292 - DNA, 25 bp, Homo sapien
gaagagctgtaccatgtcgtggatt

SEQ ID NO: 5525293 - DNA, 25 bp, Homo sapien
gtagacattactgagaaaactggct

SEQ ID NO: 5525294 - DNA, 25 bp, Homo sapien
ttttagtagacattactgagaaaac

SEQ ID NO: 5525295 - DNA, 25 bp, Homo sapien
agaaaactggctcattatatcacaa

SEQ ID NO: 5525296 - DNA, 25 bp, Homo sapien
ttagaatcatgcaaatattagagaa

SEQ ID NO: 5525297 - DNA, 25 bp, Homo sapien
atgtcgtggattattttaatgtcat

SEQ ID NO: 5525298 - DNA, 25 bp, Homo sapien
atcatgcaaatattagagaaaggtt

SEQ ID NO: 5525299 - DNA, 25 bp, Homo sapien
cttggatctcatatataaaggtgta

SEQ ID NO: 5525300 - DNA, 25 bp, Homo sapien
aatattagagaaaggttaatggctt

SEQ ID NO: 5525301 - DNA, 25 bp, Homo sapien
ataaaattcaaaggaatgccacatt

SEQ ID NO: 5525302 - DNA, 25 bp, Homo sapien
agcacctcgcccaccagcgactcca

SEQ ID NO: 5525303 - DNA, 25 bp, Homo sapien
actacagcagtgccaagtcctccaa

SEQ ID NO: 5525304 - DNA, 25 bp, Homo sapien
catcttgtggctccccagtggtcag

SEQ ID NO: 5525305 - DNA, 25 bp, Homo sapien
cagccgacgaccactatgagtttgc

SEQ ID NO: 5525306 - DNA, 25 bp, Homo sapien
gcgggtacgcatcccagcacaagaa

SEQ ID NO: 5525307 - DNA, 25 bp, Homo sapien
aatggcatcaccagctgccggatgc

SEQ ID NO: 5525308 - DNA, 25 bp, Homo sapien
actgagagtgagccatcttgtggct

SEQ ID NO: 5525309 - DNA, 25 bp, Homo sapien
ccaagtcctccaacgcccggagcac

SEQ ID NO: 5525310 - DNA, 25 bp, Homo sapien
cctcctcctcagccgacgaccacta

SEQ ID NO: 5525311 - DNA, 25 bp, Homo sapien
aaggaggatcacaactacagcagtg

SEQ ID NO: 5525312 - DNA, 25 bp, Homo sapien
actatgagtttgccaccaaggggag

SEQ ID NO: 5525313 - DNA, 25 bp, Homo sapien
tggatgagaacgtcaagtccagctg

SEQ ID NO: 5525314 - DNA, 25 bp, Homo sapien
ggggatgactgtgaatggcttcatc

SEQ ID NO: 5525315 - DNA, 25 bp, Homo sapien
gcgccgctatgacctgcacagctac

SEQ ID NO: 5525316 - DNA, 25 bp, Homo sapien
cttcacggctggccgctatgaggtg

SEQ ID NO: 5525317 - DNA, 25 bp, Homo sapien
tgggcgtcacctacctggatgagaa

SEQ ID NO: 5525318 - DNA, 25 bp, Homo sapien
agtccagctgctcgcccgtctacat

SEQ ID NO: 5525319 - DNA, 25 bp, Homo sapien
gcctgtcccgctaccagctggtctt

SEQ ID NO: 5525320 - DNA, 25 bp, Homo sapien
caccttcgtcagctacttcgggggc

SEQ ID NO: 5525321 - DNA, 25 bp, Homo sapien
ttctacacagcggccatcctgggcc

SEQ ID NO: 5525322 - DNA, 25 bp, Homo sapien
ctggtgttcgcgctgccccacttca

SEQ ID NO: 5525323 - DNA, 25 bp, Homo sapien
agctcctacgacattgccgcctgcc

SEQ ID NO: 5525324 - DNA, 25 bp, Homo sapien
cagctacatggttcccacttgtcat

SEQ ID NO: 5525325 - DNA, 25 bp, Homo sapien
caaggaaaacagcactcagatctat

SEQ ID NO: 5525326 - DNA, 25 bp, Homo sapien
ataatagacaatgcaaggaaaacag

SEQ ID NO: 5525327 - DNA, 25 bp, Homo sapien
cttaaggtagatacatggtttgatt

SEQ ID NO: 5525328 - DNA, 25 bp, Homo sapien
atctaaacaaatacatctcagctac

SEQ ID NO: 5525329 - DNA, 25 bp, Homo sapien
taaaaacaatctgcaaagaaaatag

SEQ ID NO: 5525330 - DNA, 25 bp, Homo sapien
acattaagaaccagtgtagactttt

SEQ ID NO: 5525331 - DNA, 25 bp, Homo sapien
ctagaaatattggtgaagattttct

SEQ ID NO: 5525332 - DNA, 25 bp, Homo sapien
aagaaaatagaaatattacgtgaaa

SEQ ID NO: 5525333 - DNA, 25 bp, Homo sapien
attctcttaggggaaagacaaggta

SEQ ID NO: 5525334 - DNA, 25 bp, Homo sapien
ggtaaaaataatagacaatgcaagg

SEQ ID NO: 5525335 - DNA, 25 bp, Homo sapien
gcccagatacagtgggctcgctggc

SEQ ID NO: 5525336 - DNA, 25 bp, Homo sapien
actttgcctggattcatgaggcctt

SEQ ID NO: 5525337 - DNA, 25 bp, Homo sapien
aagttccagaaccggctccgtagtc

SEQ ID NO: 5525338 - DNA, 25 bp, Homo sapien
gacccagacgctctcttcccgccag

SEQ ID NO: 5525339 - DNA, 25 bp, Homo sapien
tctggccttgggcccagatacagtg

SEQ ID NO: 5525340 - DNA, 25 bp, Homo sapien
cacagcactttgcctggattcatga

SEQ ID NO: 5525341 - DNA, 25 bp, Homo sapien
ttgaatggacccagacgctctcttc

SEQ ID NO: 5525342 - DNA, 25 bp, Homo sapien
ttccagaaccggctccgtagtcagg

SEQ ID NO: 5525343 - DNA, 25 bp, Homo sapien
ttgcctggattcatgaggccttggg

SEQ ID NO: 5525344 - DNA, 25 bp, Homo sapien
ccctctggccttgggcccagataca

SEQ ID NO: 5525345 - DNA, 25 bp, Homo sapien
atggacccagacgctctcttcccgc

SEQ ID NO: 5525346 - DNA, 25 bp, Homo sapien
tgaaagcacatggggtttgtcacta

SEQ ID NO: 5525347 - DNA, 25 bp, Homo sapien
caaagacatgggatgcataccagtt

SEQ ID NO: 5525348 - DNA, 25 bp, Homo sapien
aaaaggggaacattacatgctttaa

SEQ ID NO: 5525349 - DNA, 25 bp, Homo sapien
agctctccagtatccaggcaagtgc

SEQ ID NO: 5525350 - DNA, 25 bp, Homo sapien
gtatacactgtgagagtaggacttg

SEQ ID NO: 5525351 - DNA, 25 bp, Homo sapien
gagagtaggacttgcctgtcgcatt

SEQ ID NO: 5525352 - DNA, 25 bp, Homo sapien
aaaccacataaacacctacacttct

SEQ ID NO: 5525353 - DNA, 25 bp, Homo sapien
aaaatcaatgaaagcacatggggtt

SEQ ID NO: 5525354 - DNA, 25 bp, Homo sapien
aggcaagtgctgccacgtgacagat

SEQ ID NO: 5525355 - DNA, 25 bp, Homo sapien
accagttaagtacgtatccaacaac

SEQ ID NO: 5525356 - DNA, 25 bp, Homo sapien
actagtacccaaagacatgggatgc

SEQ ID NO: 5525357 - DNA, 25 bp, Homo sapien
taagatgactaacgatatgtgtgca

SEQ ID NO: 5525358 - DNA, 25 bp, Homo sapien
ggcacatcgaaagccactgctatac

SEQ ID NO: 5525359 - DNA, 25 bp, Homo sapien
tatgtgtgcagtattctcagtatag

SEQ ID NO: 5525360 - DNA, 25 bp, Homo sapien
tatggataggcattagctacatgat

SEQ ID NO: 5525361 - DNA, 25 bp, Homo sapien
tacatctgtgttgcttgagtgtccc

SEQ ID NO: 5525362 - DNA, 25 bp, Homo sapien
cttgagtgtcccagtatgggaggag

SEQ ID NO: 5525363 - DNA, 25 bp, Homo sapien
ttttacccaggagagcattcatatc

SEQ ID NO: 5525364 - DNA, 25 bp, Homo sapien
actggttctagatgccaacaaaatc

SEQ ID NO: 5525365 - DNA, 25 bp, Homo sapien
tgcgagaatgtgagaatgaaatgca

SEQ ID NO: 5525366 - DNA, 25 bp, Homo sapien
atgcaaaggaggttaattttaccca

SEQ ID NO: 5525367 - DNA, 25 bp, Homo sapien
tcatacaaagtctcagggattcttc

SEQ ID NO: 5525368 - DNA, 25 bp, Homo sapien
agtcaacagatgcccaggctcctac

SEQ ID NO: 5525369 - DNA, 25 bp, Homo sapien
acagggattatgcaggcaaccaaat

SEQ ID NO: 5525370 - DNA, 25 bp, Homo sapien
acatctatatgcagagagccagctc

SEQ ID NO: 5525371 - DNA, 25 bp, Homo sapien
tactactgtgtaagtgagagcaagg

SEQ ID NO: 5525372 - DNA, 25 bp, Homo sapien
catgaacagtggtgctgcaaacacc

SEQ ID NO: 5525373 - DNA, 25 bp, Homo sapien
gcagggaagatgaatatcatgcaat

SEQ ID NO: 5525374 - DNA, 25 bp, Homo sapien
agagcaagggttggttttctgacaa

SEQ ID NO: 5525375 - DNA, 25 bp, Homo sapien
gagccagctctctcggcaagacatt

SEQ ID NO: 5525376 - DNA, 25 bp, Homo sapien
aaatttaaatagagcagggaagatg

SEQ ID NO: 5525377 - DNA, 25 bp, Homo sapien
tcttagcaccctggcataggataac

SEQ ID NO: 5525378 - DNA, 25 bp, Homo sapien
cataggataacagtggaccaccatg

SEQ ID NO: 5525379 - DNA, 25 bp, Homo sapien
gtttcagtcaggccatccctcctcc

SEQ ID NO: 5525380 - DNA, 25 bp, Homo sapien
ttatgctaaataaagacactgagat

SEQ ID NO: 5525381 - DNA, 25 bp, Homo sapien
tcattggctagaaagatgctaaggg

SEQ ID NO: 5525382 - DNA, 25 bp, Homo sapien
ctaaaaagaatgctgctgaaagggg

SEQ ID NO: 5525383 - DNA, 25 bp, Homo sapien
ataaagacactgagataataaattt

SEQ ID NO: 5525384 - DNA, 25 bp, Homo sapien
cagtacctaaatctaaaaagaatgc

SEQ ID NO: 5525385 - DNA, 25 bp, Homo sapien
aggggatgctacagctgtttgtccc

SEQ ID NO: 5525386 - DNA, 25 bp, Homo sapien
gggctcattggctagaaagatgcta

SEQ ID NO: 5525387 - DNA, 25 bp, Homo sapien
tttgtcccctgacagagattccatc

SEQ ID NO: 5525388 - DNA, 25 bp, Homo sapien
gcagaactcactgggattcttcagt

SEQ ID NO: 5525389 - DNA, 25 bp, Homo sapien
gggtttatacaaacttgcaagatac

SEQ ID NO: 5525390 - DNA, 25 bp, Homo sapien
ttttgagccagtgtgacttgtgagg

SEQ ID NO: 5525391 - DNA, 25 bp, Homo sapien
cctcacaagtcacactggctcaaaa

SEQ ID NO: 5525392 - DNA, 25 bp, Homo sapien
tccaagacatctcctgtggcaggga

SEQ ID NO: 5525393 - DNA, 25 bp, Homo sapien
ccaactgaatcttatcccctccatt

SEQ ID NO: 5525394 - DNA, 25 bp, Homo sapien
actgggaatatcagagacaagctat

SEQ ID NO: 5525395 - DNA, 25 bp, Homo sapien
gggaagctactgggaatatcagaga

SEQ ID NO: 5525396 - DNA, 25 bp, Homo sapien
catttatccccctccagacacttct

SEQ ID NO: 5525397 - DNA, 25 bp, Homo sapien
gcaccatctcccttgtgcccaattc

SEQ ID NO: 5525398 - DNA, 25 bp, Homo sapien
gacacttctaatcaagggcaccatc

SEQ ID NO: 5525399 - DNA, 25 bp, Homo sapien
gggcaggctgtatcagtgatatttt

SEQ ID NO: 5525400 - DNA, 25 bp, Homo sapien
cagatggacgcattattttaagact

SEQ ID NO: 5525401 - DNA, 25 bp, Homo sapien
aaaattcttcagatggacgcattat

SEQ ID NO: 5525402 - DNA, 25 bp, Homo sapien
ttaaacaagtgtctctagtccaaga

SEQ ID NO: 5525403 - DNA, 25 bp, Homo sapien
agttcagtactagagaagttctgcc

SEQ ID NO: 5525404 - DNA, 25 bp, Homo sapien
tctgtctcaccatgagagcaggggc

SEQ ID NO: 5525405 - DNA, 25 bp, Homo sapien
ctaaaaagtaaatagagcagtagtc

SEQ ID NO: 5525406 - DNA, 25 bp, Homo sapien
agaatcaaagaagcatattacataa

SEQ ID NO: 5525407 - DNA, 25 bp, Homo sapien
atgagagcaggggctttttcctgtt

SEQ ID NO: 5525408 - DNA, 25 bp, Homo sapien
tatcaaacctcagctcctcccaccc

SEQ ID NO: 5525409 - DNA, 25 bp, Homo sapien
tctagaacaactcagatgtacctca

SEQ ID NO: 5525410 - DNA, 25 bp, Homo sapien
tagagcagtagtcctaggcatttcc

SEQ ID NO: 5525411 - DNA, 25 bp, Homo sapien
aatatatggataagctaaaaagtaa

SEQ ID NO: 5525412 - DNA, 25 bp, Homo sapien
tatcattgctacaagaaagaatcaa

SEQ ID NO: 5525413 - DNA, 25 bp, Homo sapien
gttcagtactagagaaaaaattatc

SEQ ID NO: 5525414 - DNA, 25 bp, Homo sapien
cagcaaagagccgtttaggcaaaac

SEQ ID NO: 5525415 - DNA, 25 bp, Homo sapien
agatcatcagtgggtaacataacgc

SEQ ID NO: 5525416 - DNA, 25 bp, Homo sapien
actagaatagaataacaaaaggtaa

SEQ ID NO: 5525417 - DNA, 25 bp, Homo sapien
aacaaaaggtaagtatccagaatac

SEQ ID NO: 5525418 - DNA, 25 bp, Homo sapien
gacacgctcagtcccaccagtgctc

SEQ ID NO: 5525419 - DNA, 25 bp, Homo sapien
ccagtgctcagagacacacaaactc

SEQ ID NO: 5525420 - DNA, 25 bp, Homo sapien
ggggcagacgttatgaacataaaat

SEQ ID NO: 5525421 - DNA, 25 bp, Homo sapien
catcagcagtgccagacaaagatgc

SEQ ID NO: 5525422 - DNA, 25 bp, Homo sapien
caacaccccacagtgcacaagacgt

SEQ ID NO: 5525423 - DNA, 25 bp, Homo sapien
ataacgcccaagtgggtgactttgc

SEQ ID NO: 5525424 - DNA, 25 bp, Homo sapien
tgcacaagacgtcccacggtgcaca

SEQ ID NO: 5525425 - DNA, 25 bp, Homo sapien
tgacgaccccggaggaccgctgtcg

SEQ ID NO: 5525426 - DNA, 25 bp, Homo sapien
cgacagcggtcctccggggtcgtca

SEQ ID NO: 5525427 - DNA, 25 bp, Homo sapien
ctgacgaccccggaggaccgctgtc

SEQ ID NO: 5525428 - DNA, 25 bp, Homo sapien
gacagcggtcctccggggtcgtcag

SEQ ID NO: 5525429 - DNA, 25 bp, Homo sapien
aagaagatgaacataaccataaaac

SEQ ID NO: 5525430 - DNA, 25 bp, Homo sapien
gttttatggttatgttcatcttctt

SEQ ID NO: 5525431 - DNA, 25 bp, Homo sapien
gagtttaagaccaatctggtcaaca

SEQ ID NO: 5525432 - DNA, 25 bp, Homo sapien
aaattagccagacatggtggcacac

SEQ ID NO: 5525433 - DNA, 25 bp, Homo sapien
gagacagtggttccaaaatacacac

SEQ ID NO: 5525434 - DNA, 25 bp, Homo sapien
atcagaatcaccttagaggccaggt

SEQ ID NO: 5525435 - DNA, 25 bp, Homo sapien
gaggtatgaggatcacctgaaccca

SEQ ID NO: 5525436 - DNA, 25 bp, Homo sapien
ctggtcaacatagtaaaaccctgtc

SEQ ID NO: 5525437 - DNA, 25 bp, Homo sapien
ggtggcacacacttgtagttccagc

SEQ ID NO: 5525438 - DNA, 25 bp, Homo sapien
gatcatctttgagacagaagctttc

SEQ ID NO: 5525439 - DNA, 25 bp, Homo sapien
tttctgtctaggagacagtggttcc

SEQ ID NO: 5525440 - DNA, 25 bp, Homo sapien
cagtggctaacacctgtaaccctag

SEQ ID NO: 5525441 - DNA, 25 bp, Homo sapien
acaccaatgtgatcatctttgagac

SEQ ID NO: 5525442 - DNA, 25 bp, Homo sapien
atgaatcataacagtggacaaaaac

SEQ ID NO: 5525443 - DNA, 25 bp, Homo sapien
ctagaacaacaaggcctcaccatac

SEQ ID NO: 5525444 - DNA, 25 bp, Homo sapien
tgcttgagtggctcttgtaagatac

SEQ ID NO: 5525445 - DNA, 25 bp, Homo sapien
tttccacagagagatatgctttgct

SEQ ID NO: 5525446 - DNA, 25 bp, Homo sapien
accatacatagaagcagagtcttgc

SEQ ID NO: 5525447 - DNA, 25 bp, Homo sapien
atgagaagatgttgacagaaactgt

SEQ ID NO: 5525448 - DNA, 25 bp, Homo sapien
ttggaaggtagtgctactaggctca

SEQ ID NO: 5525449 - DNA, 25 bp, Homo sapien
ggctaaaaccacaagaaatccacac

SEQ ID NO: 5525450 - DNA, 25 bp, Homo sapien
gaaactgagtatttaaggggatgtc

SEQ ID NO: 5525451 - DNA, 25 bp, Homo sapien
gctttgagtgtaaaataccaggcat

SEQ ID NO: 5525452 - DNA, 25 bp, Homo sapien
acctggcatattcaatgaggcatac

SEQ ID NO: 5525453 - DNA, 25 bp, Homo sapien
tcccaaatcagcaccaccctccctc

SEQ ID NO: 5525454 - DNA, 25 bp, Homo sapien
cgacgacgagtctgatgacaccttg

SEQ ID NO: 5525455 - DNA, 25 bp, Homo sapien
ctcaaatatagaagaggaagacagc

SEQ ID NO: 5525456 - DNA, 25 bp, Homo sapien
gaggaagctgataacaatgaagatc

SEQ ID NO: 5525457 - DNA, 25 bp, Homo sapien
ctcccacgacgagtaccaagaaaag

SEQ ID NO: 5525458 - DNA, 25 bp, Homo sapien
gaggaggaggatcttctcatgctga

SEQ ID NO: 5525459 - DNA, 25 bp, Homo sapien
aaagacactctagacaatggcgatt

SEQ ID NO: 5525460 - DNA, 25 bp, Homo sapien
ggggttacatggaaattgaacagtc

SEQ ID NO: 5525461 - DNA, 25 bp, Homo sapien
ggactgattcaccgagcccaaccgt

SEQ ID NO: 5525462 - DNA, 25 bp, Homo sapien
gaagatcctagtatagaggaggagg

SEQ ID NO: 5525463 - DNA, 25 bp, Homo sapien
atggcgattatggagaaccagacta

SEQ ID NO: 5525464 - DNA, 25 bp, Homo sapien
ccagaacaggcgcctgatgtccttg

SEQ ID NO: 5525465 - DNA, 25 bp, Homo sapien
aagaaagctctgatcctctgctccc

SEQ ID NO: 5525466 - DNA, 25 bp, Homo sapien
gcctgatgtccttggagacctcctc

SEQ ID NO: 5525467 - DNA, 25 bp, Homo sapien
tgctcccgccccagctccctgatag

SEQ ID NO: 5525468 - DNA, 25 bp, Homo sapien
accagagtcttccagtgctgggctc

SEQ ID NO: 5525469 - DNA, 25 bp, Homo sapien
ctgggctcataaatagaagtgcttg

SEQ ID NO: 5525470 - DNA, 25 bp, Homo sapien
gaaaaagaaagctctgatcctctgc

SEQ ID NO: 5525471 - DNA, 25 bp, Homo sapien
cagtgctgggctcataaatagaagt

SEQ ID NO: 5525472 - DNA, 25 bp, Homo sapien
ccattcacccaccagagtcttccag

SEQ ID NO: 5525473 - DNA, 25 bp, Homo sapien
cagctccctgatagatttattgcac

SEQ ID NO: 5525474 - DNA, 25 bp, Homo sapien
cacccatgccactcgcccccaaagg

SEQ ID NO: 5525475 - DNA, 25 bp, Homo sapien
gagaaagtgagactcggtgtcatca

SEQ ID NO: 5525476 - DNA, 25 bp, Homo sapien
taattcctttagaaagtggagtcga

SEQ ID NO: 5525477 - DNA, 25 bp, Homo sapien
gtgatcgctctccggccgtccccgg

SEQ ID NO: 5525478 - DNA, 25 bp, Homo sapien
cgaattcataaaagtgatgggggga

SEQ ID NO: 5525479 - DNA, 25 bp, Homo sapien
cctttagaaagtggagtcgaattca

SEQ ID NO: 5525480 - DNA, 25 bp, Homo sapien
aagtggagtcgaattcataaaagtg

SEQ ID NO: 5525481 - DNA, 25 bp, Homo sapien
ccggccactccggtttgtgtttgcc

SEQ ID NO: 5525482 - DNA, 25 bp, Homo sapien
gtgagactcggtgtcatcaccatcc

SEQ ID NO: 5525483 - DNA, 25 bp, Homo sapien
tgtttgccacaagactcataattcc

SEQ ID NO: 5525484 - DNA, 25 bp, Homo sapien
ttcactacctacactgccgctcagc

SEQ ID NO: 5525485 - DNA, 25 bp, Homo sapien
agccccagggagtcttcactaccta

SEQ ID NO: 5525486 - DNA, 25 bp, Homo sapien
gtagcagagtaagcatcatactgtc

SEQ ID NO: 5525487 - DNA, 25 bp, Homo sapien
ttataaacaagaaagcatacattaa

SEQ ID NO: 5525488 - DNA, 25 bp, Homo sapien
aaaaaagtcatttgtgactcctgac

SEQ ID NO: 5525489 - DNA, 25 bp, Homo sapien
catactgtcgttagcagcagcgtgg

SEQ ID NO: 5525490 - DNA, 25 bp, Homo sapien
gcatcatactgtcgttagcagcagc

SEQ ID NO: 5525491 - DNA, 25 bp, Homo sapien
ctcctgacttaaagcgagaacgaac

SEQ ID NO: 5525492 - DNA, 25 bp, Homo sapien
gcgagaacgaacatctccctggacc

SEQ ID NO: 5525493 - DNA, 25 bp, Homo sapien
ctgacttaaagcgagaacgaacatc

SEQ ID NO: 5525494 - DNA, 25 bp, Homo sapien
aaacaagaaagcatacattaattac

SEQ ID NO: 5525495 - DNA, 25 bp, Homo sapien
tttgtgactcctgacttaaagcgag

SEQ ID NO: 5525496 - DNA, 25 bp, Homo sapien
ttaaagcgagaacgaacatctccct

SEQ ID NO: 5525497 - DNA, 25 bp, Homo sapien
gagagcattaaggaaacacacagcc

SEQ ID NO: 5525498 - DNA, 25 bp, Homo sapien
tgttactgacaaaagtggaaaaatc

SEQ ID NO: 5525499 - DNA, 25 bp, Homo sapien
tacaaagccaatgaatgagtcctcc

SEQ ID NO: 5525500 - DNA, 25 bp, Homo sapien
tgagtcctcccatggtgtggcattc

SEQ ID NO: 5525501 - DNA, 25 bp, Homo sapien
caggtaagtagaacgatgagatttg

SEQ ID NO: 5525502 - DNA, 25 bp, Homo sapien
tagaactagaggaatatttgccact

SEQ ID NO: 5525503 - DNA, 25 bp, Homo sapien
cagagaagcagttactagagcactg

SEQ ID NO: 5525504 - DNA, 25 bp, Homo sapien
agtaacgaagaaactgcaaagatac

SEQ ID NO: 5525505 - DNA, 25 bp, Homo sapien
gtagaatgtgctttgacaggtaagt

SEQ ID NO: 5525506 - DNA, 25 bp, Homo sapien
aagatacagatagaaaggtactttt

SEQ ID NO: 5525507 - DNA, 25 bp, Homo sapien
gatgagatttgtacagagaagcagt

SEQ ID NO: 5525508 - DNA, 25 bp, Homo sapien
gagagtgaagacagtaacaactggt

SEQ ID NO: 5525509 - DNA, 25 bp, Homo sapien
gaagcacaggacacatatcagcatc

SEQ ID NO: 5525510 - DNA, 25 bp, Homo sapien
acagttcaggatgtggaagaaatat

SEQ ID NO: 5525511 - DNA, 25 bp, Homo sapien
tcagtcagccccatcgtgcctctgc

SEQ ID NO: 5525512 - DNA, 25 bp, Homo sapien
ccactggccatccaggaagcacagg

SEQ ID NO: 5525513 - DNA, 25 bp, Homo sapien
aatcgtaaacaacggagagtgaaga

SEQ ID NO: 5525514 - DNA, 25 bp, Homo sapien
gagagtccagagaataccacttggc

SEQ ID NO: 5525515 - DNA, 25 bp, Homo sapien
cctgtgttggcaactcgaagctgga

SEQ ID NO: 5525516 - DNA, 25 bp, Homo sapien
tcgaagctggaggtgcctttatatg

SEQ ID NO: 5525517 - DNA, 25 bp, Homo sapien
aaatatgaagtcagtggatgaaggt

SEQ ID NO: 5525518 - DNA, 25 bp, Homo sapien
tgcagacgcaaatgtcatgtgggtt

SEQ ID NO: 5525519 - DNA, 25 bp, Homo sapien
gccccaaactgcacagagcctcggg

SEQ ID NO: 5525520 - DNA, 25 bp, Homo sapien
ctctgcagcagggtttgctaaagtg

SEQ ID NO: 5525521 - DNA, 25 bp, Homo sapien
gctaaagtggatcaacagcaaagcc

SEQ ID NO: 5525522 - DNA, 25 bp, Homo sapien
gcgaaattttggacacatgcggaac

SEQ ID NO: 5525523 - DNA, 25 bp, Homo sapien
ggcaactgaccgcatctgcaggtgg

SEQ ID NO: 5525524 - DNA, 25 bp, Homo sapien
tgctaaacaagccaagatgagcgct

SEQ ID NO: 5525525 - DNA, 25 bp, Homo sapien
catggaagaaaaacaccatcgccac

SEQ ID NO: 5525526 - DNA, 25 bp, Homo sapien
aaacagaggcactgctaaacaagcc

SEQ ID NO: 5525527 - DNA, 25 bp, Homo sapien
ggggcatgtttttcagagcaggcga

SEQ ID NO: 5525528 - DNA, 25 bp, Homo sapien
agtaacagaggaaactctggcccca

SEQ ID NO: 5525529 - DNA, 25 bp, Homo sapien
gtgaagacaagagactcaacaagta

SEQ ID NO: 5525530 - DNA, 25 bp, Homo sapien
aaccagtatattcccgaccgtccag

SEQ ID NO: 5525531 - DNA, 25 bp, Homo sapien
ctggacggtcgggaatatactggtt

SEQ ID NO: 5525532 - DNA, 25 bp, Homo sapien
agaaaatctaacattgcacaaattc

SEQ ID NO: 5525533 - DNA, 25 bp, Homo sapien
aaaggacatttacaaactcgatttc

SEQ ID NO: 5525534 - DNA, 25 bp, Homo sapien
cagtgaaatctggtatcaattaatt

SEQ ID NO: 5525535 - DNA, 25 bp, Homo sapien
tttagcaattaggtaggtcaaatga

SEQ ID NO: 5525536 - DNA, 25 bp, Homo sapien
caagaacttgattgataagaaaatc

SEQ ID NO: 5525537 - DNA, 25 bp, Homo sapien
ctcttaataacagtccaccatatgt

SEQ ID NO: 5525538 - DNA, 25 bp, Homo sapien
ttcctgaatgacttaaaacaaatac

SEQ ID NO: 5525539 - DNA, 25 bp, Homo sapien
acttagaatcaaattcaagaacttg

SEQ ID NO: 5525540 - DNA, 25 bp, Homo sapien
ttcgagactgttataatatgcaact

SEQ ID NO: 5525541 - DNA, 25 bp, Homo sapien
aagtaatatttgttgggcaagtaaa

SEQ ID NO: 5525542 - DNA, 25 bp, Homo sapien
gttgaaactgttccagtgaaatctg

SEQ ID NO: 5525543 - DNA, 25 bp, Homo sapien
gagcctacagtcatcacacgagtaa

SEQ ID NO: 5525544 - DNA, 25 bp, Homo sapien
ttactcgtgtgatgactgtaggctc

SEQ ID NO: 5525545 - DNA, 25 bp, Homo sapien
gaaagtgcatgtaacagtccaattt

SEQ ID NO: 5525546 - DNA, 25 bp, Homo sapien
agtatctctgttgttagtaagtatt

SEQ ID NO: 5525547 - DNA, 25 bp, Homo sapien
cagtttcaactaccaaaacaacgct

SEQ ID NO: 5525548 - DNA, 25 bp, Homo sapien
cttagcagcattgtgaaattccagc

SEQ ID NO: 5525549 - DNA, 25 bp, Homo sapien
tatcgtgaatatacctacaaggcaa

SEQ ID NO: 5525550 - DNA, 25 bp, Homo sapien
ttccaagaaagtgcatgtaacagtc

SEQ ID NO: 5525551 - DNA, 25 bp, Homo sapien
caaggcaaaatgttacgtctcagtt

SEQ ID NO: 5525552 - DNA, 25 bp, Homo sapien
gaaggttgttcaagatgctatactt

SEQ ID NO: 5525553 - DNA, 25 bp, Homo sapien
ttgctcttgtaaggaacatatgtac

SEQ ID NO: 5525554 - DNA, 25 bp, Homo sapien
ctccactgaaggttgttcaagatgc

SEQ ID NO: 5525555 - DNA, 25 bp, Homo sapien
tatatacaagagcatctacattttc

SEQ ID NO: 5525556 - DNA, 25 bp, Homo sapien
gtaacagttacaggacctatctttc

SEQ ID NO: 5525557 - DNA, 25 bp, Homo sapien
aaaagaggatttggggcattattag

SEQ ID NO: 5525558 - DNA, 25 bp, Homo sapien
ttcataggcaaaaacagatccgtgc

SEQ ID NO: 5525559 - DNA, 25 bp, Homo sapien
tgcccagatagcacagcattcctcc

SEQ ID NO: 5525560 - DNA, 25 bp, Homo sapien
atgtcattaagatggagtaaaaaga

SEQ ID NO: 5525561 - DNA, 25 bp, Homo sapien
gggaggcattatttggtgagaatca

SEQ ID NO: 5525562 - DNA, 25 bp, Homo sapien
aatacgtaatatttagcaggatctc

SEQ ID NO: 5525563 - DNA, 25 bp, Homo sapien
tggcttaaactgcagattcctaggc

SEQ ID NO: 5525564 - DNA, 25 bp, Homo sapien
aatgcaaaatgttgtgtcactggct

SEQ ID NO: 5525565 - DNA, 25 bp, Homo sapien
ggcactattaagagaggccaaggaa

SEQ ID NO: 5525566 - DNA, 25 bp, Homo sapien
ttatgaaatgtgcctgaaaaattat

SEQ ID NO: 5525567 - DNA, 25 bp, Homo sapien
acaaagtactttggaggcacagtga

SEQ ID NO: 5525568 - DNA, 25 bp, Homo sapien
gaactaggcatgagtgacaaaaaaa

SEQ ID NO: 5525569 - DNA, 25 bp, Homo sapien
agagaagtcatctgtgagttgggtc

SEQ ID NO: 5525570 - DNA, 25 bp, Homo sapien
atgaataaggcttggccccctgttc

SEQ ID NO: 5525571 - DNA, 25 bp, Homo sapien
gaaggactgcaagcacaaacccatt

SEQ ID NO: 5525572 - DNA, 25 bp, Homo sapien
gccaccaggtgaatagtcaaagaag

SEQ ID NO: 5525573 - DNA, 25 bp, Homo sapien
ctatcaccgaggtatggacaaagta

SEQ ID NO: 5525574 - DNA, 25 bp, Homo sapien
attaacacagaaatgaataaggctt

SEQ ID NO: 5525575 - DNA, 25 bp, Homo sapien
cctgcctagagcattcagggaagac

SEQ ID NO: 5525576 - DNA, 25 bp, Homo sapien
ggggcagacaatcacaaagctacaa

SEQ ID NO: 5525577 - DNA, 25 bp, Homo sapien
ctactgtggaaattaaaggtcttgt

SEQ ID NO: 5525578 - DNA, 25 bp, Homo sapien
cattgggagattattctggattgcc

SEQ ID NO: 5525579 - DNA, 25 bp, Homo sapien
acctgcaacgcaccgctcgcttatt

SEQ ID NO: 5525580 - DNA, 25 bp, Homo sapien
gggctctggctccgttacctgcaac

SEQ ID NO: 5525581 - DNA, 25 bp, Homo sapien
tggctttaaagataggaagtcgtgg

SEQ ID NO: 5525582 - DNA, 25 bp, Homo sapien
gcagcagcaatagtcagtggtttca

SEQ ID NO: 5525583 - DNA, 25 bp, Homo sapien
aaagacatttccatgggccagttcc

SEQ ID NO: 5525584 - DNA, 25 bp, Homo sapien
atgttctgccgtacggacaccgaac

SEQ ID NO: 5525585 - DNA, 25 bp, Homo sapien
tcaagaacagagccaggtggttctt

SEQ ID NO: 5525586 - DNA, 25 bp, Homo sapien
gggccagttccaccgcaagcttctc

SEQ ID NO: 5525587 - DNA, 25 bp, Homo sapien
gacaccgaacgtcccctaagatggc

SEQ ID NO: 5525588 - DNA, 25 bp, Homo sapien
aagcacttaagaataggagaaaccg

SEQ ID NO: 5525589 - DNA, 25 bp, Homo sapien
gcactcaggaagttaggtccggtta

SEQ ID NO: 5525590 - DNA, 25 bp, Homo sapien
gttaggtccggttagcttcacacaa

SEQ ID NO: 5525591 - DNA, 25 bp, Homo sapien
atatatatcgtagagttggtaacac

SEQ ID NO: 5525592 - DNA, 25 bp, Homo sapien
atagctgtcgctttgtaacgtttta

SEQ ID NO: 5525593 - DNA, 25 bp, Homo sapien
tcattttgacacaacacagaaacat

SEQ ID NO: 5525594 - DNA, 25 bp, Homo sapien
gtatgtgacatgtatgagaatctac

SEQ ID NO: 5525595 - DNA, 25 bp, Homo sapien
ataaaaagaaccctgttgtaaatga

SEQ ID NO: 5525596 - DNA, 25 bp, Homo sapien
tcagctacttggcaccagtctcctc

SEQ ID NO: 5525597 - DNA, 25 bp, Homo sapien
aaaacaaatgtaccatagctgtcgc

SEQ ID NO: 5525598 - DNA, 25 bp, Homo sapien
gtagagttggtaacactgctaagat

SEQ ID NO: 5525599 - DNA, 25 bp, Homo sapien
aagatttttacgaacagaatatccc

SEQ ID NO: 5525600 - DNA, 25 bp, Homo sapien
gaactgcggctccatccagacgccg

SEQ ID NO: 5525601 - DNA, 25 bp, Homo sapien
gtgccaactgtcacaccacaactac

SEQ ID NO: 5525602 - DNA, 25 bp, Homo sapien
ggcggcttggattgtcctgtgccaa

SEQ ID NO: 5525603 - DNA, 25 bp, Homo sapien
gggctctacagcaagatgaacggcc

SEQ ID NO: 5525604 - DNA, 25 bp, Homo sapien
cggcaccggccactacctgtgcaac

SEQ ID NO: 5525605 - DNA, 25 bp, Homo sapien
caccaccatccgagcccctactcgc

SEQ ID NO: 5525606 - DNA, 25 bp, Homo sapien
agcgcgtgccttcatcacggcggct

SEQ ID NO: 5525607 - DNA, 25 bp, Homo sapien
ccctactcgccctacgtgggggcgc

SEQ ID NO: 5525608 - DNA, 25 bp, Homo sapien
acccgtgtgcaatgcttgtggactc

SEQ ID NO: 5525609 - DNA, 25 bp, Homo sapien
accttatggcgcagaaacgccgagg

SEQ ID NO: 5525610 - DNA, 25 bp, Homo sapien
ggcccctcatcaagccgcagaagcg

SEQ ID NO: 5525611 - DNA, 25 bp, Homo sapien
cagaggagtgagttttgtgtttctt

SEQ ID NO: 5525612 - DNA, 25 bp, Homo sapien
ttccatggttctgggctggcactta

SEQ ID NO: 5525613 - DNA, 25 bp, Homo sapien
ttggcctggccagaaattctctcta

SEQ ID NO: 5525614 - DNA, 25 bp, Homo sapien
gtttaggaaatcagtctttgggaga

SEQ ID NO: 5525615 - DNA, 25 bp, Homo sapien
atcaattcactgatgcagaggagtg

SEQ ID NO: 5525616 - DNA, 25 bp, Homo sapien
aagaaaggcaagactgccctctagt

SEQ ID NO: 5525617 - DNA, 25 bp, Homo sapien
tggcacttaggaacatgagaaactg

SEQ ID NO: 5525618 - DNA, 25 bp, Homo sapien
cttggcaccactttggggaactgtc

SEQ ID NO: 5525619 - DNA, 25 bp, Homo sapien
tgaataattgaatggaagaaaggca

SEQ ID NO: 5525620 - DNA, 25 bp, Homo sapien
cgatgtctcaggtcagaagttttgc

SEQ ID NO: 5525621 - DNA, 25 bp, Homo sapien
tgtggtcagagataactgttaactt

SEQ ID NO: 5525622 - DNA, 25 bp, Homo sapien
cacaatgattcatggaaagaacatc

SEQ ID NO: 5525623 - DNA, 25 bp, Homo sapien
gttcaaatcaagatagtaacacttc

SEQ ID NO: 5525624 - DNA, 25 bp, Homo sapien
ggaaagaacatcagacttagcacca

SEQ ID NO: 5525625 - DNA, 25 bp, Homo sapien
ataacaatgttgaccttaaaggatt

SEQ ID NO: 5525626 - DNA, 25 bp, Homo sapien
ctagctatacgtcctagaggaaatc

SEQ ID NO: 5525627 - DNA, 25 bp, Homo sapien
atccaggtgctcattacaaatcaga

SEQ ID NO: 5525628 - DNA, 25 bp, Homo sapien
tacaaagctccatctcaaccaccac

SEQ ID NO: 5525629 - DNA, 25 bp, Homo sapien
ttttaattgacatatccaggtgctc

SEQ ID NO: 5525630 - DNA, 25 bp, Homo sapien
agacttagcaccagaaaatttgttc

SEQ ID NO: 5525631 - DNA, 25 bp, Homo sapien
tattgagtaagcttcacaaatgggc

SEQ ID NO: 5525632 - DNA, 25 bp, Homo sapien
acaaatcagagaaccaaagcttcat

SEQ ID NO: 5525633 - DNA, 25 bp, Homo sapien
gctggtaaaggccatgaatactttc

SEQ ID NO: 5525634 - DNA, 25 bp, Homo sapien
ctcacagacacacgtaagtacatat

SEQ ID NO: 5525635 - DNA, 25 bp, Homo sapien
tatatttgccaaaagaactcagctt

SEQ ID NO: 5525636 - DNA, 25 bp, Homo sapien
tctctggtttatactgaatgctggt

SEQ ID NO: 5525637 - DNA, 25 bp, Homo sapien
tccatttcctcatgcagagctcatt

SEQ ID NO: 5525638 - DNA, 25 bp, Homo sapien
ttgccagacttgtataggtttaatc

SEQ ID NO: 5525639 - DNA, 25 bp, Homo sapien
ttacaagctgttcagaataacactc

SEQ ID NO: 5525640 - DNA, 25 bp, Homo sapien
tccagagcccatgatcagaaaagga

SEQ ID NO: 5525641 - DNA, 25 bp, Homo sapien
gttcagaataacactcagacacaca

SEQ ID NO: 5525642 - DNA, 25 bp, Homo sapien
tgaatactttccagagcccatgatc

SEQ ID NO: 5525643 - DNA, 25 bp, Homo sapien
tgcagagctcattgccagacttgta

SEQ ID NO: 5525644 - DNA, 25 bp, Homo sapien
agtaagtatgtctcggtcgccaaag

SEQ ID NO: 5525645 - DNA, 25 bp, Homo sapien
ctttggcgaccgagacatacttact

SEQ ID NO: 5525646 - DNA, 25 bp, Homo sapien
cagtactgaatgcaaaacacaggtc

SEQ ID NO: 5525647 - DNA, 25 bp, Homo sapien
gcacatcagtgagtagcatagttct

SEQ ID NO: 5525648 - DNA, 25 bp, Homo sapien
tctcgccccgagttccccatgattt

SEQ ID NO: 5525649 - DNA, 25 bp, Homo sapien
aagctggtaaaaagagacttatgat

SEQ ID NO: 5525650 - DNA, 25 bp, Homo sapien
aacaaggaccagatcaattgctgag

SEQ ID NO: 5525651 - DNA, 25 bp, Homo sapien
aggagggacaaattcaaccaacgaa

SEQ ID NO: 5525652 - DNA, 25 bp, Homo sapien
aaaaagagaggtgaatcacaccatt

SEQ ID NO: 5525653 - DNA, 25 bp, Homo sapien
tagtatttcttaggcaaggagggac

SEQ ID NO: 5525654 - DNA, 25 bp, Homo sapien
ccaacgaaaagcacatctcgccccg

SEQ ID NO: 5525655 - DNA, 25 bp, Homo sapien
tgttgaagaaagagttatttgtgct

SEQ ID NO: 5525656 - DNA, 25 bp, Homo sapien
taggctactcaagaaacaaaaggga

SEQ ID NO: 5525657 - DNA, 25 bp, Homo sapien
accacagcgacgtaaaatggtgtcc

SEQ ID NO: 5525658 - DNA, 25 bp, Homo sapien
tggtgattttcagggtagaagcatt

SEQ ID NO: 5525659 - DNA, 25 bp, Homo sapien
gcgtgttacgtgttagcaccgcccg

SEQ ID NO: 5525660 - DNA, 25 bp, Homo sapien
agcgacggtcactcccctcggttac

SEQ ID NO: 5525661 - DNA, 25 bp, Homo sapien
gagggctgcgtcttagtcgccctgc

SEQ ID NO: 5525662 - DNA, 25 bp, Homo sapien
ggggaaaaacaagtgacatatctgc

SEQ ID NO: 5525663 - DNA, 25 bp, Homo sapien
ccgcccaaagacacgtccgcggtgt

SEQ ID NO: 5525664 - DNA, 25 bp, Homo sapien
acacacaataagagtgccaagggat

SEQ ID NO: 5525665 - DNA, 25 bp, Homo sapien
gtgaactctctgccccgcgggccca

SEQ ID NO: 5525666 - DNA, 25 bp, Homo sapien
ttcttagctctcgaggtcccgcgtg

SEQ ID NO: 5525667 - DNA, 25 bp, Homo sapien
gctgcaggaaccgtgaactctctgc

SEQ ID NO: 5525668 - DNA, 25 bp, Homo sapien
gatctctttggatggcatgtggtgg

SEQ ID NO: 5525669 - DNA, 25 bp, Homo sapien
aatagtgtataagaacaagttttta

SEQ ID NO: 5525670 - DNA, 25 bp, Homo sapien
agattatgagactgttgcaaacctg

SEQ ID NO: 5525671 - DNA, 25 bp, Homo sapien
ggggaataatgggcaccttgttcac

SEQ ID NO: 5525672 - DNA, 25 bp, Homo sapien
ctgggtaatctgtcaggtgtatgag

SEQ ID NO: 5525673 - DNA, 25 bp, Homo sapien
atgcctagacatgcttccactgtgt

SEQ ID NO: 5525674 - DNA, 25 bp, Homo sapien
gagactgttgcaaacctgggtaatc

SEQ ID NO: 5525675 - DNA, 25 bp, Homo sapien
tttaaaggttatacaggatcagatt

SEQ ID NO: 5525676 - DNA, 25 bp, Homo sapien
aattaaggtatgtgtcactttagac

SEQ ID NO: 5525677 - DNA, 25 bp, Homo sapien
agaaccattcagtagtaatgtaacc

SEQ ID NO: 5525678 - DNA, 25 bp, Homo sapien
gttatacaggatcagattatgagac

SEQ ID NO: 5525679 - DNA, 25 bp, Homo sapien
ccatcacaagctcaacctgggaggc

SEQ ID NO: 5525680 - DNA, 25 bp, Homo sapien
ccccgcactgcatcctacctctccc

SEQ ID NO: 5525681 - DNA, 25 bp, Homo sapien
aaaggattatcaaacgcagacacac

SEQ ID NO: 5525682 - DNA, 25 bp, Homo sapien
tgccaacctcatcccgtgccagtct

SEQ ID NO: 5525683 - DNA, 25 bp, Homo sapien
ccacctcctaagactggatcgcccc

SEQ ID NO: 5525684 - DNA, 25 bp, Homo sapien
cctgggaggcccattcacctctgct

SEQ ID NO: 5525685 - DNA, 25 bp, Homo sapien
catgtcttccaacggttaaagggga

SEQ ID NO: 5525686 - DNA, 25 bp, Homo sapien
ctttctcaggtggaaaggcccattt

SEQ ID NO: 5525687 - DNA, 25 bp, Homo sapien
tacatcacagccctcctgcccggag

SEQ ID NO: 5525688 - DNA, 25 bp, Homo sapien
aggctcgccaggatacatcacagcc

SEQ ID NO: 5525689 - DNA, 25 bp, Homo sapien
aaacgcagacacactcgcctttctc

SEQ ID NO: 5525690 - DNA, 25 bp, Homo sapien
gagcaatcacagggctgtggtgaga

SEQ ID NO: 5525691 - DNA, 25 bp, Homo sapien
ttgccaggcatatcagaaggcactt

SEQ ID NO: 5525692 - DNA, 25 bp, Homo sapien
tgaggtgacacatgtgaaatggtcc

SEQ ID NO: 5525693 - DNA, 25 bp, Homo sapien
acagaacaacgtaggaccatgtctt

SEQ ID NO: 5525694 - DNA, 25 bp, Homo sapien
taacatgaagggtagtattaagtct

SEQ ID NO: 5525695 - DNA, 25 bp, Homo sapien
ctgtgttgtgaccctagcttgctgc

SEQ ID NO: 5525696 - DNA, 25 bp, Homo sapien
agcggatgtaaaataaggtgattga

SEQ ID NO: 5525697 - DNA, 25 bp, Homo sapien
cttagcacagaggcagccagtatta

SEQ ID NO: 5525698 - DNA, 25 bp, Homo sapien
ttaagtctaagcaagaacactgggc

SEQ ID NO: 5525699 - DNA, 25 bp, Homo sapien
ctcctgggagcctgagctctctctg

SEQ ID NO: 5525700 - DNA, 25 bp, Homo sapien
aagcaagctggcgctcgccgatttt

SEQ ID NO: 5525701 - DNA, 25 bp, Homo sapien
cctcagactggtatcatgctagaac

SEQ ID NO: 5525702 - DNA, 25 bp, Homo sapien
gaagaacagtacaaggaactaagac

SEQ ID NO: 5525703 - DNA, 25 bp, Homo sapien
agaggaatacggcaatagttctcca

SEQ ID NO: 5525704 - DNA, 25 bp, Homo sapien
caccctgagcttagcagaggaatac

SEQ ID NO: 5525705 - DNA, 25 bp, Homo sapien
atgcacaatgggccagttgcagtag

SEQ ID NO: 5525706 - DNA, 25 bp, Homo sapien
ctctactaagtcggtggttcaaggg

SEQ ID NO: 5525707 - DNA, 25 bp, Homo sapien
aaggtgatcaaggcaatgcaaatct

SEQ ID NO: 5525708 - DNA, 25 bp, Homo sapien
gaacatgtaatggaatcagtcagcc

SEQ ID NO: 5525709 - DNA, 25 bp, Homo sapien
gtcactactgagaaacaaagcccaa

SEQ ID NO: 5525710 - DNA, 25 bp, Homo sapien
gtaagccagtatacacaggaccctt

SEQ ID NO: 5525711 - DNA, 25 bp, Homo sapien
gttcaaggggaataacctcagactg

SEQ ID NO: 5525712 - DNA, 25 bp, Homo sapien
agttttgtgcaatgtagtctatatt

SEQ ID NO: 5525713 - DNA, 25 bp, Homo sapien
tggacttccccttacatatggtgac

SEQ ID NO: 5525714 - DNA, 25 bp, Homo sapien
ggtgacagagagactgaaacattgt

SEQ ID NO: 5525715 - DNA, 25 bp, Homo sapien
attccaatgctacacaaaacggttc

SEQ ID NO: 5525716 - DNA, 25 bp, Homo sapien
catgtataccactgtttagggaaat

SEQ ID NO: 5525717 - DNA, 25 bp, Homo sapien
caaatcccatcatccacttaggttc

SEQ ID NO: 5525718 - DNA, 25 bp, Homo sapien
actgaaacattgttcacagagaaac

SEQ ID NO: 5525719 - DNA, 25 bp, Homo sapien
tcaaaaggtaagcacctatattttc

SEQ ID NO: 5525720 - DNA, 25 bp, Homo sapien
ttcactactggccccaaatcccatc

SEQ ID NO: 5525721 - DNA, 25 bp, Homo sapien
atacgtattgtgacaaccatatgta

SEQ ID NO: 5525722 - DNA, 25 bp, Homo sapien
aaaacggttctataatacacagctt

SEQ ID NO: 5525723 - DNA, 25 bp, Homo sapien
atcatcgtgttccgaaattagaaaa

SEQ ID NO: 5525724 - DNA, 25 bp, Homo sapien
atcaatagtcataacatcatcgtgt

SEQ ID NO: 5525725 - DNA, 25 bp, Homo sapien
aacacaggtgaagatatttttacaa

SEQ ID NO: 5525726 - DNA, 25 bp, Homo sapien
aagaaacctgtaagactcatatcat

SEQ ID NO: 5525727 - DNA, 25 bp, Homo sapien
gtcaattaggtcaatgtcaggattt

SEQ ID NO: 5525728 - DNA, 25 bp, Homo sapien
atactcctaacacaggtgaagatat

SEQ ID NO: 5525729 - DNA, 25 bp, Homo sapien
atttcacccagaactgctgaattac

SEQ ID NO: 5525730 - DNA, 25 bp, Homo sapien
gctgaattacagaatgaaactcaaa

SEQ ID NO: 5525731 - DNA, 25 bp, Homo sapien
catttgtaacagcatcatgatttgt

SEQ ID NO: 5525732 - DNA, 25 bp, Homo sapien
agtccctgaatccatgtttgagcat

SEQ ID NO: 5525733 - DNA, 25 bp, Homo sapien
tagaaaatgtctaatcagttcatcc

SEQ ID NO: 5525734 - DNA, 25 bp, Homo sapien
tgggtacacatctgccaggtggcat

SEQ ID NO: 5525735 - DNA, 25 bp, Homo sapien
ggtgcactggcaaatgtctaaatca

SEQ ID NO: 5525736 - DNA, 25 bp, Homo sapien
ctctcatggtttggtgcactggcaa

SEQ ID NO: 5525737 - DNA, 25 bp, Homo sapien
ggtggcattaggtcggacaatctct

SEQ ID NO: 5525738 - DNA, 25 bp, Homo sapien
tgcatattgtggctgagtcttgagc

SEQ ID NO: 5525739 - DNA, 25 bp, Homo sapien
cacacaagagctcctgtggacacat

SEQ ID NO: 5525740 - DNA, 25 bp, Homo sapien
gtggacacatgaagagtcacaatat

SEQ ID NO: 5525741 - DNA, 25 bp, Homo sapien
aggggccaaatgtgcctggttccaa

SEQ ID NO: 5525742 - DNA, 25 bp, Homo sapien
aagaagagttccacagtgcagtcac

SEQ ID NO: 5525743 - DNA, 25 bp, Homo sapien
gccctttatgggaaacatggagcta

SEQ ID NO: 5525744 - DNA, 25 bp, Homo sapien
gaaacatggagctacagaaaaatct

SEQ ID NO: 5525745 - DNA, 25 bp, Homo sapien
tgcgttttaggggaatgatgatcca

SEQ ID NO: 5525746 - DNA, 25 bp, Homo sapien
ttgaacctgggaaccttggattgga

SEQ ID NO: 5525747 - DNA, 25 bp, Homo sapien
tgtaaactataaagcgtgggtgtac

SEQ ID NO: 5525748 - DNA, 25 bp, Homo sapien
cggagtgaccttaggcgagtcactc

SEQ ID NO: 5525749 - DNA, 25 bp, Homo sapien
aacttagcagttccccaatccttgg

SEQ ID NO: 5525750 - DNA, 25 bp, Homo sapien
tcttccgggcctagccaccagttgg

SEQ ID NO: 5525751 - DNA, 25 bp, Homo sapien
tccttatgccgccttagtgaggggc

SEQ ID NO: 5525752 - DNA, 25 bp, Homo sapien
tctgcctatcaatgtgtgtggggtt

SEQ ID NO: 5525753 - DNA, 25 bp, Homo sapien
tgtggggttgaaatcgctttgtaaa

SEQ ID NO: 5525754 - DNA, 25 bp, Homo sapien
atggttggttgtgggatttctactt

SEQ ID NO: 5525755 - DNA, 25 bp, Homo sapien
gatgatccatcgctagcaagttttc

SEQ ID NO: 5525756 - DNA, 25 bp, Homo sapien
aacaagcatgatacaatgacaagaa

SEQ ID NO: 5525757 - DNA, 25 bp, Homo sapien
aaggaacgtccacaaataatgcaca

SEQ ID NO: 5525758 - DNA, 25 bp, Homo sapien
aatccagttaacataaagagacaga

SEQ ID NO: 5525759 - DNA, 25 bp, Homo sapien
tcttcctgtgacaaggaacgtccac

SEQ ID NO: 5525760 - DNA, 25 bp, Homo sapien
actgcatagtgtcacgagttagctc

SEQ ID NO: 5525761 - DNA, 25 bp, Homo sapien
acacctagaaatgtcccatggactg

SEQ ID NO: 5525762 - DNA, 25 bp, Homo sapien
gacacaataagacaccatcaggaca

SEQ ID NO: 5525763 - DNA, 25 bp, Homo sapien
cgattccagtacaaagacagagaag

SEQ ID NO: 5525764 - DNA, 25 bp, Homo sapien
gacagaggttgaacaacaggtcttc

SEQ ID NO: 5525765 - DNA, 25 bp, Homo sapien
aggacaagttctgaagatgctgcat

SEQ ID NO: 5525766 - DNA, 25 bp, Homo sapien
tgcaagtagaaatgactctcgggta

SEQ ID NO: 5525767 - DNA, 25 bp, Homo sapien
agttaattaaggtgtaacagtctcc

SEQ ID NO: 5525768 - DNA, 25 bp, Homo sapien
ataatccaaatatctgtgagcctct

SEQ ID NO: 5525769 - DNA, 25 bp, Homo sapien
tcaattccattagagggcgatggcc

SEQ ID NO: 5525770 - DNA, 25 bp, Homo sapien
attcatctagtggtacttggtgctc

SEQ ID NO: 5525771 - DNA, 25 bp, Homo sapien
tggtcccaatgttttaggtcatagc

SEQ ID NO: 5525772 - DNA, 25 bp, Homo sapien
gtgagcctctatttggtcccaatgt

SEQ ID NO: 5525773 - DNA, 25 bp, Homo sapien
caaacagccagagatcaattccatt

SEQ ID NO: 5525774 - DNA, 25 bp, Homo sapien
ggtaaaacttcacatagcgtcttcc

SEQ ID NO: 5525775 - DNA, 25 bp, Homo sapien
acccaccctgtctccttaagaacat

SEQ ID NO: 5525776 - DNA, 25 bp, Homo sapien
gtggtacttggtgctcacagggcac

SEQ ID NO: 5525777 - DNA, 25 bp, Homo sapien
aaatcaaacagccagagatcaattc

SEQ ID NO: 5525778 - DNA, 25 bp, Homo sapien
gaaaggaagtacacccatctgcatt

SEQ ID NO: 5525779 - DNA, 25 bp, Homo sapien
aagaagaaaaagataatgactccct

SEQ ID NO: 5525780 - DNA, 25 bp, Homo sapien
gagaaaggaagtacacccatctgca

SEQ ID NO: 5525781 - DNA, 25 bp, Homo sapien
gataatgactccctgttctgttcac

SEQ ID NO: 5525782 - DNA, 25 bp, Homo sapien
tgatactgctttattgacgttttac

SEQ ID NO: 5525783 - DNA, 25 bp, Homo sapien
accaggacttttgcttcgacggcct

SEQ ID NO: 5525784 - DNA, 25 bp, Homo sapien
gccgcgtggtacagaataaacgtta

SEQ ID NO: 5525785 - DNA, 25 bp, Homo sapien
tctgttcacaggacccccatatctc

SEQ ID NO: 5525786 - DNA, 25 bp, Homo sapien
ttgacgttttacttcctcaccatcc

SEQ ID NO: 5525787 - DNA, 25 bp, Homo sapien
gtaaagaagaaaaagataatgactc

SEQ ID NO: 5525788 - DNA, 25 bp, Homo sapien
ttgcttcgacggcctctcggaagac

SEQ ID NO: 5525789 - DNA, 25 bp, Homo sapien
acctggggtaaaggcagaccgtcga

SEQ ID NO: 5525790 - DNA, 25 bp, Homo sapien
tcgacggtctgcctttaccccaggt

SEQ ID NO: 5525791 - DNA, 25 bp, Homo sapien
gagaggtccgtccccatcttccttc

SEQ ID NO: 5525792 - DNA, 25 bp, Homo sapien
gaaggaagatggggacggacctctc

SEQ ID NO: 5525793 - DNA, 25 bp, Homo sapien
gctactggcttcaattttatggctc

SEQ ID NO: 5525794 - DNA, 25 bp, Homo sapien
agcagatgatttgcataggaattgc

SEQ ID NO: 5525795 - DNA, 25 bp, Homo sapien
tctaagctagacacctcttccctac

SEQ ID NO: 5525796 - DNA, 25 bp, Homo sapien
cgtttgtagttcagttaagcagatg

SEQ ID NO: 5525797 - DNA, 25 bp, Homo sapien
ataacacacctttccgtacagtctt

SEQ ID NO: 5525798 - DNA, 25 bp, Homo sapien
acagtctttggtaggtgatgattca

SEQ ID NO: 5525799 - DNA, 25 bp, Homo sapien
atgaattaatgaaaaacgtttgtag

SEQ ID NO: 5525800 - DNA, 25 bp, Homo sapien
ctacagtaagaaggcctccatattg

SEQ ID NO: 5525801 - DNA, 25 bp, Homo sapien
gttttaagtcttaggatgcggagct

SEQ ID NO: 5525802 - DNA, 25 bp, Homo sapien
ccctgctatgggtaatctcatctag

SEQ ID NO: 5525803 - DNA, 25 bp, Homo sapien
tttacatgtgtgcaaactaaaatgc

SEQ ID NO: 5525804 - DNA, 25 bp, Homo sapien
accgactcattgtggctgacttgta

SEQ ID NO: 5525805 - DNA, 25 bp, Homo sapien
gttaacaccaggagacataatgtca

SEQ ID NO: 5525806 - DNA, 25 bp, Homo sapien
aatgtcacacataggagagatacac

SEQ ID NO: 5525807 - DNA, 25 bp, Homo sapien
aacacagtagttataccgactcatt

SEQ ID NO: 5525808 - DNA, 25 bp, Homo sapien
gacttgtaagcctggccaatggtac

SEQ ID NO: 5525809 - DNA, 25 bp, Homo sapien
tgaatgattggtacagatttctcac

SEQ ID NO: 5525810 - DNA, 25 bp, Homo sapien
cccagtcaaacctttgaggaggagg

SEQ ID NO: 5525811 - DNA, 25 bp, Homo sapien
acataaaagtagaagagtcaaaatt

SEQ ID NO: 5525812 - DNA, 25 bp, Homo sapien
acataggagagatacacccagtcaa

SEQ ID NO: 5525813 - DNA, 25 bp, Homo sapien
aggaggaagcaggtatctcatacca

SEQ ID NO: 5525814 - DNA, 25 bp, Homo sapien
aaaaggagcactcatttcctgtgtt

SEQ ID NO: 5525815 - DNA, 25 bp, Homo sapien
tgtaaccactgcatgaatcagaatg

SEQ ID NO: 5525816 - DNA, 25 bp, Homo sapien
attttccccagtggtgatattttcc

SEQ ID NO: 5525817 - DNA, 25 bp, Homo sapien
atagtaccgtttacacataccactc

SEQ ID NO: 5525818 - DNA, 25 bp, Homo sapien
atacaaccctaacttctaccatccc

SEQ ID NO: 5525819 - DNA, 25 bp, Homo sapien
ccctaacagatgaatacgaacaatg

SEQ ID NO: 5525820 - DNA, 25 bp, Homo sapien
atcacaaccagcacattgtcattgg

SEQ ID NO: 5525821 - DNA, 25 bp, Homo sapien
ccatcattaaaaacgtatcccttcc

SEQ ID NO: 5525822 - DNA, 25 bp, Homo sapien
aaaatgctgcaaatatagtaccgtt

SEQ ID NO: 5525823 - DNA, 25 bp, Homo sapien
aaaataaagactcacaaaatgctgc

SEQ ID NO: 5525824 - DNA, 25 bp, Homo sapien
attgtcattggtgaaatgtgcacat

SEQ ID NO: 5525825 - DNA, 25 bp, Homo sapien
catgaatcagaatgcagaactcatc

SEQ ID NO: 5525826 - DNA, 25 bp, Homo sapien
ctgaataaaggttaagaacaatttg

SEQ ID NO: 5525827 - DNA, 25 bp, Homo sapien
agattgctgaattgagaaccataac

SEQ ID NO: 5525828 - DNA, 25 bp, Homo sapien
taccagtaagttgaccaaatgacac

SEQ ID NO: 5525829 - DNA, 25 bp, Homo sapien
atttagtagggtaagaatatcttct

SEQ ID NO: 5525830 - DNA, 25 bp, Homo sapien
ctccccagtcagaatttaaagatat

SEQ ID NO: 5525831 - DNA, 25 bp, Homo sapien
tgatatgttagttctgtgccagcag

SEQ ID NO: 5525832 - DNA, 25 bp, Homo sapien
tgatttcacagtttcgcaagcagcc

SEQ ID NO: 5525833 - DNA, 25 bp, Homo sapien
tcgcaagcagccagtagattgctga

SEQ ID NO: 5525834 - DNA, 25 bp, Homo sapien
aaccataacaaaaattcactaagac

SEQ ID NO: 5525835 - DNA, 25 bp, Homo sapien
cactaaaatttaaggacactatcac

SEQ ID NO: 5525836 - DNA, 25 bp, Homo sapien
tataaaggcaaaggtaatatatgct

SEQ ID NO: 5525837 - DNA, 25 bp, Homo sapien
taagcaactgaggctctgtagagac

SEQ ID NO: 5525838 - DNA, 25 bp, Homo sapien
gcaaaggagagagtacattccctca

SEQ ID NO: 5525839 - DNA, 25 bp, Homo sapien
tggagatgttcagtcagcaattaga

SEQ ID NO: 5525840 - DNA, 25 bp, Homo sapien
aagtgaggggctaaaaatatagatt

SEQ ID NO: 5525841 - DNA, 25 bp, Homo sapien
cctgcaattttggcacaaggcatgc

SEQ ID NO: 5525842 - DNA, 25 bp, Homo sapien
tcccatggaagtaaacagataataa

SEQ ID NO: 5525843 - DNA, 25 bp, Homo sapien
ggtcagtgatttggcttggctctgc

SEQ ID NO: 5525844 - DNA, 25 bp, Homo sapien
ctgtgtctgggggttaaaatcctaa

SEQ ID NO: 5525845 - DNA, 25 bp, Homo sapien
caatggactgaagccataagcattc

SEQ ID NO: 5525846 - DNA, 25 bp, Homo sapien
aggtgaaaaggtaagcttcctgtgt

SEQ ID NO: 5525847 - DNA, 25 bp, Homo sapien
gtggtaatactgtagatcggcagat

SEQ ID NO: 5525848 - DNA, 25 bp, Homo sapien
attgaagatagacatgtaatcccac

SEQ ID NO: 5525849 - DNA, 25 bp, Homo sapien
aaatctatactgcaaacacaagggc

SEQ ID NO: 5525850 - DNA, 25 bp, Homo sapien
tattatttgaaagaggggttgcatt

SEQ ID NO: 5525851 - DNA, 25 bp, Homo sapien
attttggtaagatcgagcaagaaga

SEQ ID NO: 5525852 - DNA, 25 bp, Homo sapien
tatataagtggaatgacagcaatga

SEQ ID NO: 5525853 - DNA, 25 bp, Homo sapien
agtcgtcatacttaggggtgcttat

SEQ ID NO: 5525854 - DNA, 25 bp, Homo sapien
agcaagaagacacaaatagagaatg

SEQ ID NO: 5525855 - DNA, 25 bp, Homo sapien
ctataaggtacactgcccaagaagc

SEQ ID NO: 5525856 - DNA, 25 bp, Homo sapien
tgaaagaggggttgcattatttgta

SEQ ID NO: 5525857 - DNA, 25 bp, Homo sapien
gaatgacagcaatgatacatgggat

SEQ ID NO: 5525858 - DNA, 25 bp, Homo sapien
gcccaagaagcagtatattattatt

SEQ ID NO: 5525859 - DNA, 25 bp, Homo sapien
aagcagagagccaataagatatata

SEQ ID NO: 5525860 - DNA, 25 bp, Homo sapien
gcaactgcattaggtaagtacatac

SEQ ID NO: 5525861 - DNA, 25 bp, Homo sapien
aaatacaaagcagagagccaataag

SEQ ID NO: 5525862 - DNA, 25 bp, Homo sapien
tcagcagtttacctacccaagatgt

SEQ ID NO: 5525863 - DNA, 25 bp, Homo sapien
ctggaagtgatggtttaggattacc

SEQ ID NO: 5525864 - DNA, 25 bp, Homo sapien
acaagcaaatgcatcctggaaataa

SEQ ID NO: 5525865 - DNA, 25 bp, Homo sapien
acaaagttaccgagatgacaatatc

SEQ ID NO: 5525866 - DNA, 25 bp, Homo sapien
tatgaacacagatcagctctatacc

SEQ ID NO: 5525867 - DNA, 25 bp, Homo sapien
gctgccatgaccaaaacaagcaaat

SEQ ID NO: 5525868 - DNA, 25 bp, Homo sapien
ctgactcttacgtacacactgtgac

SEQ ID NO: 5525869 - DNA, 25 bp, Homo sapien
atgaatactgctggaagtgatggtt

SEQ ID NO: 5525870 - DNA, 25 bp, Homo sapien
tctaagagatatttcccggacaaca

SEQ ID NO: 5525871 - DNA, 25 bp, Homo sapien
tgttgtccgggaaatatctcttaga

SEQ ID NO: 5525872 - DNA, 25 bp, Homo sapien
aaatcctacccaaggcaggaaacac

SEQ ID NO: 5525873 - DNA, 25 bp, Homo sapien
atagtaaggcagacgctgactctga

SEQ ID NO: 5525874 - DNA, 25 bp, Homo sapien
gcaggaaacacaagccttagtccca

SEQ ID NO: 5525875 - DNA, 25 bp, Homo sapien
gggaaaacagacaaggcatactatt

SEQ ID NO: 5525876 - DNA, 25 bp, Homo sapien
tgtaaggcaacatctgcacacctcc

SEQ ID NO: 5525877 - DNA, 25 bp, Homo sapien
aggttaagtgagaagcacccaacat

SEQ ID NO: 5525878 - DNA, 25 bp, Homo sapien
gcctgagactttgcaagcctggaca

SEQ ID NO: 5525879 - DNA, 25 bp, Homo sapien
agtgttgcctgacacaaggggaaat

SEQ ID NO: 5525880 - DNA, 25 bp, Homo sapien
acccaacatgcatagaagaaaatcc

SEQ ID NO: 5525881 - DNA, 25 bp, Homo sapien
gactctgaagtaatctgcctaggtt

SEQ ID NO: 5525882 - DNA, 25 bp, Homo sapien
cttaggaagcacaccacatcaggaa

SEQ ID NO: 5525883 - DNA, 25 bp, Homo sapien
caaggtttggctttcacgcgctcca

SEQ ID NO: 5525884 - DNA, 25 bp, Homo sapien
aagccgccctctgctagggaaaacc

SEQ ID NO: 5525885 - DNA, 25 bp, Homo sapien
caagcccttccgggctggaactggt

SEQ ID NO: 5525886 - DNA, 25 bp, Homo sapien
tattatgcgcccgtctacagggggt

SEQ ID NO: 5525887 - DNA, 25 bp, Homo sapien
gatgacggtgccttcgcagtcaaat

SEQ ID NO: 5525888 - DNA, 25 bp, Homo sapien
aacccctggttctccatgccacacc

SEQ ID NO: 5525889 - DNA, 25 bp, Homo sapien
tatcgtacgccctggtgttggtgtt

SEQ ID NO: 5525890 - DNA, 25 bp, Homo sapien
cacaagaagccttatcctacgtcct

SEQ ID NO: 5525891 - DNA, 25 bp, Homo sapien
cacgcgctccattgccccggcgtgg

SEQ ID NO: 5525892 - DNA, 25 bp, Homo sapien
tccagagatgtagctattatgcgcc

SEQ ID NO: 5525893 - DNA, 25 bp, Homo sapien
ctcgggtgtatcgtacgccctggtg

SEQ ID NO: 5525894 - DNA, 25 bp, Homo sapien
atgtgaaatgttatagacttgcagc

SEQ ID NO: 5525895 - DNA, 25 bp, Homo sapien
tgcatcaaccttctgggtgtgactt

SEQ ID NO: 5525896 - DNA, 25 bp, Homo sapien
tcttcatgtgagattgagcttgcaa

SEQ ID NO: 5525897 - DNA, 25 bp, Homo sapien
catgaaccttccacaatcaagcctg

SEQ ID NO: 5525898 - DNA, 25 bp, Homo sapien
caaagactttatggaaaagagacat

SEQ ID NO: 5525899 - DNA, 25 bp, Homo sapien
gccttgtgatgccaaatctgagagt

SEQ ID NO: 5525900 - DNA, 25 bp, Homo sapien
gccaaatctgagagtttagtctgcc

SEQ ID NO: 5525901 - DNA, 25 bp, Homo sapien
ttatagacttgcagcgtgccgagtt

SEQ ID NO: 5525902 - DNA, 25 bp, Homo sapien
ggtgtgacttgtgagttttggcctt

SEQ ID NO: 5525903 - DNA, 25 bp, Homo sapien
agcgtgccgagttccatcgggtttt

SEQ ID NO: 5525904 - DNA, 25 bp, Homo sapien
catgctggacatgtatggtataatt

SEQ ID NO: 5525905 - DNA, 25 bp, Homo sapien
aagatctgcaagcatagcaaaggtc

SEQ ID NO: 5525906 - DNA, 25 bp, Homo sapien
gttcatgacgtctgaaagaaggcca

SEQ ID NO: 5525907 - DNA, 25 bp, Homo sapien
aaagtaacagcacctagggtcctgt

SEQ ID NO: 5525908 - DNA, 25 bp, Homo sapien
atggacattaaggaaaggtctgcct

SEQ ID NO: 5525909 - DNA, 25 bp, Homo sapien
atgtctgtgagtctagctgatgttc

SEQ ID NO: 5525910 - DNA, 25 bp, Homo sapien
ttcctaagattgggagcaaagtacc

SEQ ID NO: 5525911 - DNA, 25 bp, Homo sapien
aaggtcaggcataaaggaattttct

SEQ ID NO: 5525912 - DNA, 25 bp, Homo sapien
aggtgttgtaattgggagaatactc

SEQ ID NO: 5525913 - DNA, 25 bp, Homo sapien
ttgtgggctgtgagccaagtctaat

SEQ ID NO: 5525914 - DNA, 25 bp, Homo sapien
gtgggatgagactgttttggatctg

SEQ ID NO: 5525915 - DNA, 25 bp, Homo sapien
tctgttctactgtggaagaggagat

SEQ ID NO: 5525916 - DNA, 25 bp, Homo sapien
ctaagggtaaggtacatccccagat

SEQ ID NO: 5525917 - DNA, 25 bp, Homo sapien
ataaactgagctacctgtgcctttt

SEQ ID NO: 5525918 - DNA, 25 bp, Homo sapien
ttattagatgttaagccgaaaatct

SEQ ID NO: 5525919 - DNA, 25 bp, Homo sapien
gataaaatgagtataggccagtctc

SEQ ID NO: 5525920 - DNA, 25 bp, Homo sapien
aaaaaattctgatatgtaggcattc

SEQ ID NO: 5525921 - DNA, 25 bp, Homo sapien
gaaggaaagcattttattgcaaata

SEQ ID NO: 5525922 - DNA, 25 bp, Homo sapien
ttcaacgtataacacacagtaactg

SEQ ID NO: 5525923 - DNA, 25 bp, Homo sapien
tgtgtagttacagctcaaattagaa

SEQ ID NO: 5525924 - DNA, 25 bp, Homo sapien
ttagtgagatattagtgaagacctt

SEQ ID NO: 5525925 - DNA, 25 bp, Homo sapien
taagccgaaaatctagaaactaaca

SEQ ID NO: 5525926 - DNA, 25 bp, Homo sapien
ggtagaaagcaaataaactgagcta

SEQ ID NO: 5525927 - DNA, 25 bp, Homo sapien
tcctggagaactcagaggattttgt

SEQ ID NO: 5525928 - DNA, 25 bp, Homo sapien
ataagatactgctcaaggtttaggc

SEQ ID NO: 5525929 - DNA, 25 bp, Homo sapien
ttagcaaagctattttatggcaaca

SEQ ID NO: 5525930 - DNA, 25 bp, Homo sapien
gacaccacagggttcaaaagtgaac

SEQ ID NO: 5525931 - DNA, 25 bp, Homo sapien
caaggtttaggcttcctggagaact

SEQ ID NO: 5525932 - DNA, 25 bp, Homo sapien
tgttcaaaaggaggtttacattcac

SEQ ID NO: 5525933 - DNA, 25 bp, Homo sapien
aagttaaaagacaccacagggttca

SEQ ID NO: 5525934 - DNA, 25 bp, Homo sapien
taacaatggtcttaggagatgcaaa

SEQ ID NO: 5525935 - DNA, 25 bp, Homo sapien
gagatgcaaagacgaaaaactactt

SEQ ID NO: 5525936 - DNA, 25 bp, Homo sapien
cataattttgctaaccaagggccct

SEQ ID NO: 5525937 - DNA, 25 bp, Homo sapien
cacaaaatagacattgcagtttaca

SEQ ID NO: 5525938 - DNA, 25 bp, Homo sapien
gttagctcggaatacttacattgtt

SEQ ID NO: 5525939 - DNA, 25 bp, Homo sapien
tcatggctgagaacagttagctcgg

SEQ ID NO: 5525940 - DNA, 25 bp, Homo sapien
cgaatgagagctgatagatgctttc

SEQ ID NO: 5525941 - DNA, 25 bp, Homo sapien
ggttccaggaacccaacttgatatc

SEQ ID NO: 5525942 - DNA, 25 bp, Homo sapien
atcagaatccatgggtgctcaagtc

SEQ ID NO: 5525943 - DNA, 25 bp, Homo sapien
ttgacttccacagtgccgagattac

SEQ ID NO: 5525944 - DNA, 25 bp, Homo sapien
cattatagagaatgggttatatggt

SEQ ID NO: 5525945 - DNA, 25 bp, Homo sapien
ggggtctcattggttgctcagcctg

SEQ ID NO: 5525946 - DNA, 25 bp, Homo sapien
gatgctttcttgaaaagggcaatac

SEQ ID NO: 5525947 - DNA, 25 bp, Homo sapien
ttctgagtgagtcacgaatgagagc

SEQ ID NO: 5525948 - DNA, 25 bp, Homo sapien
tcttgaaaagggcaatacagtcatc

SEQ ID NO: 5525949 - DNA, 25 bp, Homo sapien
agtgtaaagaacaacgccaagaaaa

SEQ ID NO: 5525950 - DNA, 25 bp, Homo sapien
ttttcttggcgttgttctttacact

SEQ ID NO: 5525951 - DNA, 25 bp, Homo sapien
acccatccccccaccgtgcaaacat

SEQ ID NO: 5525952 - DNA, 25 bp, Homo sapien
actgcccccatcaaagttatgacac

SEQ ID NO: 5525953 - DNA, 25 bp, Homo sapien
catcaaagttatgacacaaagacac

SEQ ID NO: 5525954 - DNA, 25 bp, Homo sapien
ccagagctctgtggaactcttacaa

SEQ ID NO: 5525955 - DNA, 25 bp, Homo sapien
tggaactcttacaatggcttggatg

SEQ ID NO: 5525956 - DNA, 25 bp, Homo sapien
aggggggtgcaatctgatattttca

SEQ ID NO: 5525957 - DNA, 25 bp, Homo sapien
cctcactgcccccatcaaagttatg

SEQ ID NO: 5525958 - DNA, 25 bp, Homo sapien
aagaccacgaatcctccccaaactc

SEQ ID NO: 5525959 - DNA, 25 bp, Homo sapien
agctctgtggaactcttacaatggc

SEQ ID NO: 5525960 - DNA, 25 bp, Homo sapien
agaatccctatttccacgccctccc

SEQ ID NO: 5525961 - DNA, 25 bp, Homo sapien
acacaaagacacagaatccctattt

SEQ ID NO: 5525962 - DNA, 25 bp, Homo sapien
gagagaggcattctactaaccccac

SEQ ID NO: 5525963 - DNA, 25 bp, Homo sapien
ctagctctctaaaacggtgggggag

SEQ ID NO: 5525964 - DNA, 25 bp, Homo sapien
ccctgccggtccctgttccctcagc

SEQ ID NO: 5525965 - DNA, 25 bp, Homo sapien
gagcatctgcgccgtcactgttggg

SEQ ID NO: 5525966 - DNA, 25 bp, Homo sapien
ttcatcaacactcaaaacagcctct

SEQ ID NO: 5525967 - DNA, 25 bp, Homo sapien
gggcccactgcccatcccaaccctc

SEQ ID NO: 5525968 - DNA, 25 bp, Homo sapien
aatactgtttggcataattgcattg

SEQ ID NO: 5525969 - DNA, 25 bp, Homo sapien
aagaacgacactcgagctaggttcc

SEQ ID NO: 5525970 - DNA, 25 bp, Homo sapien
attaactttcaggggcccactgccc

SEQ ID NO: 5525971 - DNA, 25 bp, Homo sapien
ctttcggaattggaaagaacgacac

SEQ ID NO: 5525972 - DNA, 25 bp, Homo sapien
agactggctgaggcctagctctcta

SEQ ID NO: 5525973 - DNA, 25 bp, Homo sapien
gtgtgggtgaacagctttactctcc

SEQ ID NO: 5525974 - DNA, 25 bp, Homo sapien
aactcggtccaaagggcctattgtc

SEQ ID NO: 5525975 - DNA, 25 bp, Homo sapien
aagggcctattgtctaggaggctct

SEQ ID NO: 5525976 - DNA, 25 bp, Homo sapien
ggacagcacagagttttatccaact

SEQ ID NO: 5525977 - DNA, 25 bp, Homo sapien
tcctaggagcctggaatgtgccagg

SEQ ID NO: 5525978 - DNA, 25 bp, Homo sapien
gcaaaattgagcccacaggaaagaa

SEQ ID NO: 5525979 - DNA, 25 bp, Homo sapien
agatgtccccaaatacccaggctcc

SEQ ID NO: 5525980 - DNA, 25 bp, Homo sapien
ggaaagaaccatacaactgaggcaa

SEQ ID NO: 5525981 - DNA, 25 bp, Homo sapien
caactatgtagggcaaaattgagcc

SEQ ID NO: 5525982 - DNA, 25 bp, Homo sapien
gccagtaaaactcagggtgtctttc

SEQ ID NO: 5525983 - DNA, 25 bp, Homo sapien
cctggaatgtgccaggctccacggg

SEQ ID NO: 5525984 - DNA, 25 bp, Homo sapien
acaaaggaaatacgactggttcgca

SEQ ID NO: 5525985 - DNA, 25 bp, Homo sapien
tcggcttttcgggagcaaccctatc

SEQ ID NO: 5525986 - DNA, 25 bp, Homo sapien
aagatgagcagactgcaagtttgcc

SEQ ID NO: 5525987 - DNA, 25 bp, Homo sapien
gttgggtcaaacggctcctcttctc

SEQ ID NO: 5525988 - DNA, 25 bp, Homo sapien
ctctgcagacgccctaaagagtgtc

SEQ ID NO: 5525989 - DNA, 25 bp, Homo sapien
gctcctccctagatggccagtgcac

SEQ ID NO: 5525990 - DNA, 25 bp, Homo sapien
gcggcaagaacagcgtttccgtcca

SEQ ID NO: 5525991 - DNA, 25 bp, Homo sapien
aaagagtgtctatcggatcaccctc

SEQ ID NO: 5525992 - DNA, 25 bp, Homo sapien
tattgactgtctccacgcgcaccca

SEQ ID NO: 5525993 - DNA, 25 bp, Homo sapien
tggttcgcatctatcaagggttggc

SEQ ID NO: 5525994 - DNA, 25 bp, Homo sapien
caggtcaccagtcagctccagtcct

SEQ ID NO: 5525995 - DNA, 25 bp, Homo sapien
cactccacaaggtcccacagagaac

SEQ ID NO: 5525996 - DNA, 25 bp, Homo sapien
tccacagggaaaatcgctgattccc

SEQ ID NO: 5525997 - DNA, 25 bp, Homo sapien
agagaccaacgtgaaaacaccactc

SEQ ID NO: 5525998 - DNA, 25 bp, Homo sapien
aatgcatgctccagggttcacgatg

SEQ ID NO: 5525999 - DNA, 25 bp, Homo sapien
gctcaattgagccaaagagaccaac

SEQ ID NO: 5526000 - DNA, 25 bp, Homo sapien
gtcccacagagaacctatgcttgct

SEQ ID NO: 5526001 - DNA, 25 bp, Homo sapien
gaatcaaaagggaacttactcacat

SEQ ID NO: 5526002 - DNA, 25 bp, Homo sapien
ttctggcgttggtttgtcttaatcc

SEQ ID NO: 5526003 - DNA, 25 bp, Homo sapien
cacacaggagctatgaaaccacttc

SEQ ID NO: 5526004 - DNA, 25 bp, Homo sapien
aaataagcacaggagaccttctggc

SEQ ID NO: 5526005 - DNA, 25 bp, Homo sapien
ctggcagatgacaacaaaattcttc

SEQ ID NO: 5526006 - DNA, 25 bp, Homo sapien
agctgccctgcacaggagcagaaaa

SEQ ID NO: 5526007 - DNA, 25 bp, Homo sapien
ccggtaagtgctgatacaggatgag

SEQ ID NO: 5526008 - DNA, 25 bp, Homo sapien
ttggtttccccatcgccaggctggc

SEQ ID NO: 5526009 - DNA, 25 bp, Homo sapien
ccaccgtatgctagctgacaagggc

SEQ ID NO: 5526010 - DNA, 25 bp, Homo sapien
tctagaaggccctaaagtggcagag

SEQ ID NO: 5526011 - DNA, 25 bp, Homo sapien
gggagaaaacacttcattgggttca

SEQ ID NO: 5526012 - DNA, 25 bp, Homo sapien
ttgatgaaggcctgaaaacttcccc

SEQ ID NO: 5526013 - DNA, 25 bp, Homo sapien
cagaaaacccatgcctcagagctac

SEQ ID NO: 5526014 - DNA, 25 bp, Homo sapien
gcccaagcactgaccgtccttcccc

SEQ ID NO: 5526015 - DNA, 25 bp, Homo sapien
cctaaggacactgcctctagaaggc

SEQ ID NO: 5526016 - DNA, 25 bp, Homo sapien
ggcagtcacacaccggtaagtgctg

SEQ ID NO: 5526017 - DNA, 25 bp, Homo sapien
attcatctgtgaagccatggtttgc

SEQ ID NO: 5526018 - DNA, 25 bp, Homo sapien
ttctttagggtctagcgcctgccta

SEQ ID NO: 5526019 - DNA, 25 bp, Homo sapien
ttgacttaagtctaaagcgtgtgtt

SEQ ID NO: 5526020 - DNA, 25 bp, Homo sapien
tgcttcgagtgagaagtttgaggaa

SEQ ID NO: 5526021 - DNA, 25 bp, Homo sapien
ttttcacctgctctggactgctctc

SEQ ID NO: 5526022 - DNA, 25 bp, Homo sapien
aaagcgtgtgttagcatctcaccgt

SEQ ID NO: 5526023 - DNA, 25 bp, Homo sapien
gtttgaggaatgctgctttaggcaa

SEQ ID NO: 5526024 - DNA, 25 bp, Homo sapien
tgtgggtctggttatgcaagaacaa

SEQ ID NO: 5526025 - DNA, 25 bp, Homo sapien
taaacatgtaagaaaagttgtagat

SEQ ID NO: 5526026 - DNA, 25 bp, Homo sapien
ttctatcccgggacagatgaatgct

SEQ ID NO: 5526027 - DNA, 25 bp, Homo sapien
ggacacagtgtgcgattctcagtat

SEQ ID NO: 5526028 - DNA, 25 bp, Homo sapien
acgtcgggcgtccaaggtgcggccg

SEQ ID NO: 5526029 - DNA, 25 bp, Homo sapien
cggccgcaccttggacgcccgacgt

SEQ ID NO: 5526030 - DNA, 25 bp, Homo sapien
acagattccaggctggtggatgtgt

SEQ ID NO: 5526031 - DNA, 25 bp, Homo sapien
cccggttagacgctcatctgggcca

SEQ ID NO: 5526032 - DNA, 25 bp, Homo sapien
gtggatgtgtcccctgacaggggtt

SEQ ID NO: 5526033 - DNA, 25 bp, Homo sapien
tgagccccgcaagaactctgcaatg

SEQ ID NO: 5526034 - DNA, 25 bp, Homo sapien
tccagaggaaagcgattctactttc

SEQ ID NO: 5526035 - DNA, 25 bp, Homo sapien
tgcaatgagaactgaaccaacaagg

SEQ ID NO: 5526036 - DNA, 25 bp, Homo sapien
cggagacgttcctctgagccccgca

SEQ ID NO: 5526037 - DNA, 25 bp, Homo sapien
gatgcagcccctagtgaggctcttc

SEQ ID NO: 5526038 - DNA, 25 bp, Homo sapien
gctctggccttccaccgatgacccc

SEQ ID NO: 5526039 - DNA, 25 bp, Homo sapien
atgacccccaaaacgatgcccaggg

SEQ ID NO: 5526040 - DNA, 25 bp, Homo sapien
aagtactgccacagaagtagctcgg

SEQ ID NO: 5526041 - DNA, 25 bp, Homo sapien
cgcgaaacacgtgctctgtgagcag

SEQ ID NO: 5526042 - DNA, 25 bp, Homo sapien
cgcgaacaagtcatcctgtaggtgg

SEQ ID NO: 5526043 - DNA, 25 bp, Homo sapien
ccaggtccgcgaacaagtcatcctg

SEQ ID NO: 5526044 - DNA, 25 bp, Homo sapien
acaagtcatcctgtaggtggagcag

SEQ ID NO: 5526045 - DNA, 25 bp, Homo sapien
gctgttgttgaacaggtagaggatg

SEQ ID NO: 5526046 - DNA, 25 bp, Homo sapien
ggtacaaatgcagcgactgcagccg

SEQ ID NO: 5526047 - DNA, 25 bp, Homo sapien
caggctgttctcctggaggtagagg

SEQ ID NO: 5526048 - DNA, 25 bp, Homo sapien
ggagcaggctgttctcctggaggta

SEQ ID NO: 5526049 - DNA, 25 bp, Homo sapien
ggtccgcgaacaagtcatcctgtag

SEQ ID NO: 5526050 - DNA, 25 bp, Homo sapien
gccaggctgttgttgaacaggtaga

SEQ ID NO: 5526051 - DNA, 25 bp, Homo sapien
gcggtacaaatgcagcgactgcagc

SEQ ID NO: 5526052 - DNA, 25 bp, Homo sapien
ggggactggcctgtactggcctctt

SEQ ID NO: 5526053 - DNA, 25 bp, Homo sapien
ctaccaacccccagatttgcccttc

SEQ ID NO: 5526054 - DNA, 25 bp, Homo sapien
cttcttctaaagacctcggacattc

SEQ ID NO: 5526055 - DNA, 25 bp, Homo sapien
tcctgctgcaagctgcttaccactt

SEQ ID NO: 5526056 - DNA, 25 bp, Homo sapien
gcctgtactggcctcttgccgctgg

SEQ ID NO: 5526057 - DNA, 25 bp, Homo sapien
gcctctaaactggagtggtcagggc

SEQ ID NO: 5526058 - DNA, 25 bp, Homo sapien
tcccctcggcatatgctgaacactc

SEQ ID NO: 5526059 - DNA, 25 bp, Homo sapien
tctagacccaccggattctccatcc

SEQ ID NO: 5526060 - DNA, 25 bp, Homo sapien
agcctgtttcctcccaccctgtgtc

SEQ ID NO: 5526061 - DNA, 25 bp, Homo sapien
agacctcggacattcttgattctcc

SEQ ID NO: 5526062 - DNA, 25 bp, Homo sapien
gctgaacactctagacccaccggat

SEQ ID NO: 5526063 - DNA, 25 bp, Homo sapien
acccctgtgagcaccaaaatgccac

SEQ ID NO: 5526064 - DNA, 25 bp, Homo sapien
cctactccaaggagaggtcagaagg

SEQ ID NO: 5526065 - DNA, 25 bp, Homo sapien
attgactcagggaacataatacaaa

SEQ ID NO: 5526066 - DNA, 25 bp, Homo sapien
gggcacagtgcagaactgatagccc

SEQ ID NO: 5526067 - DNA, 25 bp, Homo sapien
aaatgccacaagcctggtgtgaaac

SEQ ID NO: 5526068 - DNA, 25 bp, Homo sapien
tggtgacctgcgtataaaacctggc

SEQ ID NO: 5526069 - DNA, 25 bp, Homo sapien
attaaaatccgcaccagggcacagt

SEQ ID NO: 5526070 - DNA, 25 bp, Homo sapien
tcagggtgagccctgcatgagaatg

SEQ ID NO: 5526071 - DNA, 25 bp, Homo sapien
ccaccaaggcatacgtggtccgtgg

SEQ ID NO: 5526072 - DNA, 25 bp, Homo sapien
tggggagaaggtcatctttcttccc

SEQ ID NO: 5526073 - DNA, 25 bp, Homo sapien
tgtgaaacaaaaatggtgctgggaa

SEQ ID NO: 5526074 - DNA, 25 bp, Homo sapien
tgacagaataagacattaggcatga

SEQ ID NO: 5526075 - DNA, 25 bp, Homo sapien
tgtgattcaagaggtagtcaacacc

SEQ ID NO: 5526076 - DNA, 25 bp, Homo sapien
tgccagtggttgatagatgtgattc

SEQ ID NO: 5526077 - DNA, 25 bp, Homo sapien
tccagatgactgcatgcgagtgaaa

SEQ ID NO: 5526078 - DNA, 25 bp, Homo sapien
aggcaaacagtgcttcagtccctcc

SEQ ID NO: 5526079 - DNA, 25 bp, Homo sapien
ctcacaagtgttaagccacagatgc

SEQ ID NO: 5526080 - DNA, 25 bp, Homo sapien
caaaatggacaatgaggtaatctaa

SEQ ID NO: 5526081 - DNA, 25 bp, Homo sapien
gcgagtgaaacgcattccaaacatc

SEQ ID NO: 5526082 - DNA, 25 bp, Homo sapien
gtaaacaacatgagtcaaaatggac

SEQ ID NO: 5526083 - DNA, 25 bp, Homo sapien
aaaaatcagggttcactttggtctc

SEQ ID NO: 5526084 - DNA, 25 bp, Homo sapien
ataaaacccagagtgtacagaaagg

SEQ ID NO: 5526085 - DNA, 25 bp, Homo sapien
atgtacggaactggcatgtatagac

SEQ ID NO: 5526086 - DNA, 25 bp, Homo sapien
tatagccatagaaagaggtggatag

SEQ ID NO: 5526087 - DNA, 25 bp, Homo sapien
aaaaaaaggaagctgtaaccataca

SEQ ID NO: 5526088 - DNA, 25 bp, Homo sapien
agtgcaccagatgggttttccagac

SEQ ID NO: 5526089 - DNA, 25 bp, Homo sapien
attttaatggaggtggtttgcttca

SEQ ID NO: 5526090 - DNA, 25 bp, Homo sapien
accagggaggcatcattgctggaat

SEQ ID NO: 5526091 - DNA, 25 bp, Homo sapien
atagaaacaggtccaccatggcaat

SEQ ID NO: 5526092 - DNA, 25 bp, Homo sapien
ctttggaaatggagtatgtacggaa

SEQ ID NO: 5526093 - DNA, 25 bp, Homo sapien
gggaagaagccatttggtgttgcat

SEQ ID NO: 5526094 - DNA, 25 bp, Homo sapien
cactaaagtgacactgctgaggcag

SEQ ID NO: 5526095 - DNA, 25 bp, Homo sapien
acttgagagacaaaaacaagcccca

SEQ ID NO: 5526096 - DNA, 25 bp, Homo sapien
ggaatctttctcctggaatggtgcc

SEQ ID NO: 5526097 - DNA, 25 bp, Homo sapien
ctggacttggcgtcactgtagcctt

SEQ ID NO: 5526098 - DNA, 25 bp, Homo sapien
ccattaggaaatcttcatcgctgcc

SEQ ID NO: 5526099 - DNA, 25 bp, Homo sapien
cgaactgccatagtcactatcgtca

SEQ ID NO: 5526100 - DNA, 25 bp, Homo sapien
cttcatcgctgccggaatctttctc

SEQ ID NO: 5526101 - DNA, 25 bp, Homo sapien
gccggaatctttctcctggaatggt

SEQ ID NO: 5526102 - DNA, 25 bp, Homo sapien
ggaaatcttcatcgctgccggaatc

SEQ ID NO: 5526103 - DNA, 25 bp, Homo sapien
tccattaggaaatcttcatcgctgc

SEQ ID NO: 5526104 - DNA, 25 bp, Homo sapien
ctgtagcctttagtctgggtttggg

SEQ ID NO: 5526105 - DNA, 25 bp, Homo sapien
ttttcgaactgccatagtcactatc

SEQ ID NO: 5526106 - DNA, 25 bp, Homo sapien
tgcctttcactggacttggcgtcac

SEQ ID NO: 5526107 - DNA, 25 bp, Homo sapien
aacacagactttaatggtaacaatt

SEQ ID NO: 5526108 - DNA, 25 bp, Homo sapien
atatttagtgacttgcactgggttc

SEQ ID NO: 5526109 - DNA, 25 bp, Homo sapien
ctaacacagcatgatcagtacctta

SEQ ID NO: 5526110 - DNA, 25 bp, Homo sapien
tacaagtcttatgcagatgtcacta

SEQ ID NO: 5526111 - DNA, 25 bp, Homo sapien
ccattaacagggcaactggacctaa

SEQ ID NO: 5526112 - DNA, 25 bp, Homo sapien
acccctgagaccactagttaactgt

SEQ ID NO: 5526113 - DNA, 25 bp, Homo sapien
ttgcaaactcgcccaggaaaaacaa

SEQ ID NO: 5526114 - DNA, 25 bp, Homo sapien
aagtatacttcaactaagccatttc

SEQ ID NO: 5526115 - DNA, 25 bp, Homo sapien
tcacattgcaaactcgcccaggaaa

SEQ ID NO: 5526116 - DNA, 25 bp, Homo sapien
acagggcaactggacctaattcggt

SEQ ID NO: 5526117 - DNA, 25 bp, Homo sapien
acttaaaagtgtaatcaacaatcat

SEQ ID NO: 5526118 - DNA, 25 bp, Homo sapien
ttatgcccactgaacccacaaaagc

SEQ ID NO: 5526119 - DNA, 25 bp, Homo sapien
ggtcccaaacggctcagttcaagtc

SEQ ID NO: 5526120 - DNA, 25 bp, Homo sapien
taaagtcacacatagggaaatgctt

SEQ ID NO: 5526121 - DNA, 25 bp, Homo sapien
ttacagtataggtcccaaacggctc

SEQ ID NO: 5526122 - DNA, 25 bp, Homo sapien
tgagggtaataagcagcgtacattt

SEQ ID NO: 5526123 - DNA, 25 bp, Homo sapien
gttgccaaagctgagagacatttta

SEQ ID NO: 5526124 - DNA, 25 bp, Homo sapien
ctgaataacagagctgttgtggaat

SEQ ID NO: 5526125 - DNA, 25 bp, Homo sapien
gaatgcaggctacaagacacagtaa

SEQ ID NO: 5526126 - DNA, 25 bp, Homo sapien
ccatcaaagcaagtttcaaggttta

SEQ ID NO: 5526127 - DNA, 25 bp, Homo sapien
tgcttctggaaaattgagggtaata

SEQ ID NO: 5526128 - DNA, 25 bp, Homo sapien
taagatttgaaggttgccaaagctg

SEQ ID NO: 5526129 - DNA, 25 bp, Homo sapien
caaaattctcccatgggcttccccc

SEQ ID NO: 5526130 - DNA, 25 bp, Homo sapien
tctctggatgtgtcttgaggagtgt

SEQ ID NO: 5526131 - DNA, 25 bp, Homo sapien
cagtccccggcactacggtcacatt

SEQ ID NO: 5526132 - DNA, 25 bp, Homo sapien
acagcaacagtctctggatgtgtct

SEQ ID NO: 5526133 - DNA, 25 bp, Homo sapien
gcactacggtcacattggccagaac

SEQ ID NO: 5526134 - DNA, 25 bp, Homo sapien
tggctgccccacccctgtggccttc

SEQ ID NO: 5526135 - DNA, 25 bp, Homo sapien
cggtcacattggccagaacacagaa

SEQ ID NO: 5526136 - DNA, 25 bp, Homo sapien
ccaataaataaggtatgggagactg

SEQ ID NO: 5526137 - DNA, 25 bp, Homo sapien
acacagaactctgcccacagacagc

SEQ ID NO: 5526138 - DNA, 25 bp, Homo sapien
tcccagttctggacagcatcgggtc

SEQ ID NO: 5526139 - DNA, 25 bp, Homo sapien
atcgggtccagccagatccatgctg

SEQ ID NO: 5526140 - DNA, 25 bp, Homo sapien
gtgtgcaaagtgattatatgtaggt

SEQ ID NO: 5526141 - DNA, 25 bp, Homo sapien
tgtcaaagtgctaaggcctatgcgc

SEQ ID NO: 5526142 - DNA, 25 bp, Homo sapien
ctaaggcctatgcgcacaaagattt

SEQ ID NO: 5526143 - DNA, 25 bp, Homo sapien
tttgtcccaacctagaatctgtctc

SEQ ID NO: 5526144 - DNA, 25 bp, Homo sapien
aagtgaataagaattacatacggta

SEQ ID NO: 5526145 - DNA, 25 bp, Homo sapien
tcaacatagaatgagtcagtaaaat

SEQ ID NO: 5526146 - DNA, 25 bp, Homo sapien
aggggtaaccaaatccaagactctg

SEQ ID NO: 5526147 - DNA, 25 bp, Homo sapien
acttctcttagtgctggtgaagggt

SEQ ID NO: 5526148 - DNA, 25 bp, Homo sapien
aagggtgcaatgcagtcacagaatt

SEQ ID NO: 5526149 - DNA, 25 bp, Homo sapien
aaaaaataggtcaaagcacttacag

SEQ ID NO: 5526150 - DNA, 25 bp, Homo sapien
agtcacagaattaagacaggttttt

SEQ ID NO: 5526151 - DNA, 25 bp, Homo sapien
cctcgttcccatctcgcgtctcggg

SEQ ID NO: 5526152 - DNA, 25 bp, Homo sapien
cccgagacgcgagatgggaacgagg

SEQ ID NO: 5526153 - DNA, 25 bp, Homo sapien
caaacaattaagtgaggtagcaagc

SEQ ID NO: 5526154 - DNA, 25 bp, Homo sapien
caactaaagaaaggattcaggctgt

SEQ ID NO: 5526155 - DNA, 25 bp, Homo sapien
atagtgcatcattggggaaaacagt

SEQ ID NO: 5526156 - DNA, 25 bp, Homo sapien
tgcttaaggaatagcaaggccagtg

SEQ ID NO: 5526157 - DNA, 25 bp, Homo sapien
ggaagggcattctaagaaagacaac

SEQ ID NO: 5526158 - DNA, 25 bp, Homo sapien
agctcaatgaaccaaaggaagtgtc

SEQ ID NO: 5526159 - DNA, 25 bp, Homo sapien
aggggccagatcactggaatctaca

SEQ ID NO: 5526160 - DNA, 25 bp, Homo sapien
taagaaagacaacagcatgtgcaaa

SEQ ID NO: 5526161 - DNA, 25 bp, Homo sapien
acagtgggagtatctacctgagaca

SEQ ID NO: 5526162 - DNA, 25 bp, Homo sapien
ggaggtaagtatgaaaagtctgtag

SEQ ID NO: 5526163 - DNA, 25 bp, Homo sapien
ggccagtgtgtcaaaatagtgcatc

SEQ ID NO: 5526164 - DNA, 25 bp, Homo sapien
tgtgggtccaagttgtggacctacc

SEQ ID NO: 5526165 - DNA, 25 bp, Homo sapien
tactttaagaagcttcgcgagctgt

SEQ ID NO: 5526166 - DNA, 25 bp, Homo sapien
aattcctactgtccggctgcgcggc

SEQ ID NO: 5526167 - DNA, 25 bp, Homo sapien
cccgagcgagcaaattcctactgtc

SEQ ID NO: 5526168 - DNA, 25 bp, Homo sapien
ggtttatagtcttacacagccacac

SEQ ID NO: 5526169 - DNA, 25 bp, Homo sapien
ttgcgctactgctgaatgtccgtcc

SEQ ID NO: 5526170 - DNA, 25 bp, Homo sapien
cttttgccgctgacccagagatggc

SEQ ID NO: 5526171 - DNA, 25 bp, Homo sapien
ccttccatgcccgcctggcagaggt

SEQ ID NO: 5526172 - DNA, 25 bp, Homo sapien
aggtcgccccttccatgcccgcctg

SEQ ID NO: 5526173 - DNA, 25 bp, Homo sapien
tgcttcccttaggcatgtgctgtgg

SEQ ID NO: 5526174 - DNA, 25 bp, Homo sapien
gtgctgtggtgcttgaatgttgtac

SEQ ID NO: 5526175 - DNA, 25 bp, Homo sapien
ggcagcagagctattgttactgagc

SEQ ID NO: 5526176 - DNA, 25 bp, Homo sapien
tgcaccttccaaagcccagagtggc

SEQ ID NO: 5526177 - DNA, 25 bp, Homo sapien
gatctatgaatgaacctgaacgtct

SEQ ID NO: 5526178 - DNA, 25 bp, Homo sapien
tgggtgtgcatacggtgcaccttcc

SEQ ID NO: 5526179 - DNA, 25 bp, Homo sapien
gtcttccctggagaaaagcacttgc

SEQ ID NO: 5526180 - DNA, 25 bp, Homo sapien
gctcccagagcacccacttcatacc

SEQ ID NO: 5526181 - DNA, 25 bp, Homo sapien
cgcaggggccctgacttcctcatta

SEQ ID NO: 5526182 - DNA, 25 bp, Homo sapien
aacacaccgccaaggacggaaatta

SEQ ID NO: 5526183 - DNA, 25 bp, Homo sapien
cacccataagttaagagaaaagccc

SEQ ID NO: 5526184 - DNA, 25 bp, Homo sapien
tccagctctgctgaagcacgcaggg

SEQ ID NO: 5526185 - DNA, 25 bp, Homo sapien
ctgcccacggcaccaatggatctat

SEQ ID NO: 5526186 - DNA, 25 bp, Homo sapien
atgagcatggtaaagtaaaacaact

SEQ ID NO: 5526187 - DNA, 25 bp, Homo sapien
aattaggccctaacatagatgcttc

SEQ ID NO: 5526188 - DNA, 25 bp, Homo sapien
tattcacaggtaatgagcatggtaa

SEQ ID NO: 5526189 - DNA, 25 bp, Homo sapien
taatcaactgccccaaaatgaccac

SEQ ID NO: 5526190 - DNA, 25 bp, Homo sapien
gccaaagtaggacatgcttctgaac

SEQ ID NO: 5526191 - DNA, 25 bp, Homo sapien
tgggtactcagagcaacaatgcatg

SEQ ID NO: 5526192 - DNA, 25 bp, Homo sapien
ttgccatatagggccaaagtaggac

SEQ ID NO: 5526193 - DNA, 25 bp, Homo sapien
agttgtaaatcaagaaggtaaggaa

SEQ ID NO: 5526194 - DNA, 25 bp, Homo sapien
acaatgcatgtcagggattattcac

SEQ ID NO: 5526195 - DNA, 25 bp, Homo sapien
cttccagattgggtactcagagcaa

SEQ ID NO: 5526196 - DNA, 25 bp, Homo sapien
agcaaatgaaatatagggaattagc

SEQ ID NO: 5526197 - DNA, 25 bp, Homo sapien
gtggcttttatggaaatcctaggac

SEQ ID NO: 5526198 - DNA, 25 bp, Homo sapien
taggacaaatggaatgtgttcagtt

SEQ ID NO: 5526199 - DNA, 25 bp, Homo sapien
aaatagtggcagaatgagcccaatg

SEQ ID NO: 5526200 - DNA, 25 bp, Homo sapien
atcttcagaggcagcaaaatagtgg

SEQ ID NO: 5526201 - DNA, 25 bp, Homo sapien
ggcggcgccacctccgcctgctgct

SEQ ID NO: 5526202 - DNA, 25 bp, Homo sapien
cctcccacttcccgagctccggcgt

SEQ ID NO: 5526203 - DNA, 25 bp, Homo sapien
atggaaatcctaggacaaatggaat

SEQ ID NO: 5526204 - DNA, 25 bp, Homo sapien
ggcccggcctcatcgtgccggcttc

SEQ ID NO: 5526205 - DNA, 25 bp, Homo sapien
tacaaagaacatcttcagaggcagc

SEQ ID NO: 5526206 - DNA, 25 bp, Homo sapien
aatatggctcaggagactaaccaga

SEQ ID NO: 5526207 - DNA, 25 bp, Homo sapien
cagaaaaatatggctcaggagacta

SEQ ID NO: 5526208 - DNA, 25 bp, Homo sapien
gagaacacaaatgaaagccactttt

SEQ ID NO: 5526209 - DNA, 25 bp, Homo sapien
actgagaatcttccagagaacacaa

SEQ ID NO: 5526210 - DNA, 25 bp, Homo sapien
taatagcaatgggttaatgtatgtc

SEQ ID NO: 5526211 - DNA, 25 bp, Homo sapien
atagcatagtaaatagccaagaaaa

SEQ ID NO: 5526212 - DNA, 25 bp, Homo sapien
ctcaaaaaacataatagggaaccat

SEQ ID NO: 5526213 - DNA, 25 bp, Homo sapien
ataatagggaaccatgaaagacaaa

SEQ ID NO: 5526214 - DNA, 25 bp, Homo sapien
ccctgtctatgggaatgcagttttc

SEQ ID NO: 5526215 - DNA, 25 bp, Homo sapien
aagacaaaaccagtacctcagctca

SEQ ID NO: 5526216 - DNA, 25 bp, Homo sapien
catgcccacaggactactgagaatc

SEQ ID NO: 5526217 - DNA, 25 bp, Homo sapien
attaatgcaccaagtctccctgtct

SEQ ID NO: 5526218 - DNA, 25 bp, Homo sapien
gtcaagaacctactgaggctccata

SEQ ID NO: 5526219 - DNA, 25 bp, Homo sapien
gctgagtctgtgaacagccagactg

SEQ ID NO: 5526220 - DNA, 25 bp, Homo sapien
agaaggaattcagccaagagactaa

SEQ ID NO: 5526221 - DNA, 25 bp, Homo sapien
taagctcctaccatgtgacaaactc

SEQ ID NO: 5526222 - DNA, 25 bp, Homo sapien
ccaggcagcatgcaccccacttctg

SEQ ID NO: 5526223 - DNA, 25 bp, Homo sapien
atgtgacaaactctcctctaggggt

SEQ ID NO: 5526224 - DNA, 25 bp, Homo sapien
atggatttggggtcccaccacagat

SEQ ID NO: 5526225 - DNA, 25 bp, Homo sapien
ggaattcagccaagagactaagcac

SEQ ID NO: 5526226 - DNA, 25 bp, Homo sapien
ttcacttgaggtcatgtggccgtga

SEQ ID NO: 5526227 - DNA, 25 bp, Homo sapien
aacacaaacatggatttggggtccc

SEQ ID NO: 5526228 - DNA, 25 bp, Homo sapien
ccaccacagatgttcctcctccagg

SEQ ID NO: 5526229 - DNA, 25 bp, Homo sapien
attggcagatacactgctgaaagca

SEQ ID NO: 5526230 - DNA, 25 bp, Homo sapien
aaacacatttagacggaactgagga

SEQ ID NO: 5526231 - DNA, 25 bp, Homo sapien
tgctgcgagacagtgcattcctcag

SEQ ID NO: 5526232 - DNA, 25 bp, Homo sapien
acgtcgacccatattgcgagccaac

SEQ ID NO: 5526233 - DNA, 25 bp, Homo sapien
gctttgtaatcaacaggaagggctg

SEQ ID NO: 5526234 - DNA, 25 bp, Homo sapien
gcatatcataggcagctcatggaac

SEQ ID NO: 5526235 - DNA, 25 bp, Homo sapien
gaactggtgtaattgaagcagaaga

SEQ ID NO: 5526236 - DNA, 25 bp, Homo sapien
cactgcaatggcacaccctgggtaa

SEQ ID NO: 5526237 - DNA, 25 bp, Homo sapien
tggtgtccatagtaagacctgtagc

SEQ ID NO: 5526238 - DNA, 25 bp, Homo sapien
tttcactgcgaaaggggatttgaaa

SEQ ID NO: 5526239 - DNA, 25 bp, Homo sapien
ttcctcagtgcaactggagaacaga

SEQ ID NO: 5526240 - DNA, 25 bp, Homo sapien
tgccacaccaatgcagcagtgacac

SEQ ID NO: 5526241 - DNA, 25 bp, Homo sapien
attccttcttcagaggttgccgtga

SEQ ID NO: 5526242 - DNA, 25 bp, Homo sapien
ttgtaaccgtttcagggccagcatg

SEQ ID NO: 5526243 - DNA, 25 bp, Homo sapien
actccaacagccacagcactgatcc

SEQ ID NO: 5526244 - DNA, 25 bp, Homo sapien
cccatcactgaactctacaagactc

SEQ ID NO: 5526245 - DNA, 25 bp, Homo sapien
tcctgggcctgccatccctggtttc

SEQ ID NO: 5526246 - DNA, 25 bp, Homo sapien
agatggggctcaactctgaatgagt

SEQ ID NO: 5526247 - DNA, 25 bp, Homo sapien
gacgcccacagagccactggctcca

SEQ ID NO: 5526248 - DNA, 25 bp, Homo sapien
agccacagcactgatcctgggcctg

SEQ ID NO: 5526249 - DNA, 25 bp, Homo sapien
catgctgttggagaggacactccaa

SEQ ID NO: 5526250 - DNA, 25 bp, Homo sapien
tggagaggacactccaacagccaca

SEQ ID NO: 5526251 - DNA, 25 bp, Homo sapien
aaaattgggatcacactgtactata

SEQ ID NO: 5526252 - DNA, 25 bp, Homo sapien
tctaaatttgaagtcgtaatataca

SEQ ID NO: 5526253 - DNA, 25 bp, Homo sapien
aaaggcagtgttttgtcacggttta

SEQ ID NO: 5526254 - DNA, 25 bp, Homo sapien
tacagtacatccttggtaatacaaa

SEQ ID NO: 5526255 - DNA, 25 bp, Homo sapien
taaattatgcaaagtcttcagaaca

SEQ ID NO: 5526256 - DNA, 25 bp, Homo sapien
cttcagaacaatagacaacaacaaa

SEQ ID NO: 5526257 - DNA, 25 bp, Homo sapien
taaaatcaattgtctactgcacctt

SEQ ID NO: 5526258 - DNA, 25 bp, Homo sapien
gattcttctaggtagcgctgagacc

SEQ ID NO: 5526259 - DNA, 25 bp, Homo sapien
ggacagggagtctcattgtgtttat

SEQ ID NO: 5526260 - DNA, 25 bp, Homo sapien
tatacatatgagaaatggctgggac

SEQ ID NO: 5526261 - DNA, 25 bp, Homo sapien
gctaaataatataaaggcagtgttt

SEQ ID NO: 5526262 - DNA, 25 bp, Homo sapien
tagcgctgagaccaatcccaaatac

SEQ ID NO: 5526263 - DNA, 25 bp, Homo sapien
cctgcatcgtgtgcagggcttccgg

SEQ ID NO: 5526264 - DNA, 25 bp, Homo sapien
catggccatgccagaggtaaaaaaa

SEQ ID NO: 5526265 - DNA, 25 bp, Homo sapien
cagcccgatgctccttcagtgactt

SEQ ID NO: 5526266 - DNA, 25 bp, Homo sapien
gccgagtactcagacgtcctggcca

SEQ ID NO: 5526267 - DNA, 25 bp, Homo sapien
ggccaagtcagcccgatgctccttc

SEQ ID NO: 5526268 - DNA, 25 bp, Homo sapien
tcagtgacttctttgagggcatcgg

SEQ ID NO: 5526269 - DNA, 25 bp, Homo sapien
ccctggccttactgagttggggcac

SEQ ID NO: 5526270 - DNA, 25 bp, Homo sapien
ttctttgagggcatcggcaagaaaa

SEQ ID NO: 5526271 - DNA, 25 bp, Homo sapien
catcctatgcagcagacgccaacga

SEQ ID NO: 5526272 - DNA, 25 bp, Homo sapien
cagcggccaccatggccatgccaga

SEQ ID NO: 5526273 - DNA, 25 bp, Homo sapien
ccgacacccagagcatctcccactt

SEQ ID NO: 5526274 - DNA, 25 bp, Homo sapien
aaatgtagtgaagatggcagatttt

SEQ ID NO: 5526275 - DNA, 25 bp, Homo sapien
tgtagtgaagatggcagatttttgc

SEQ ID NO: 5526276 - DNA, 25 bp, Homo sapien
tctgtcccaccctcctactcccttg

SEQ ID NO: 5526277 - DNA, 25 bp, Homo sapien
agtcatggacaacagtaatacaaac

SEQ ID NO: 5526278 - DNA, 25 bp, Homo sapien
aaaaaaaaagtcatggacaacagta

SEQ ID NO: 5526279 - DNA, 25 bp, Homo sapien
ccagaagaaatgagtcagactagtt

SEQ ID NO: 5526280 - DNA, 25 bp, Homo sapien
tgatgtcacaaggcacaaagacaac

SEQ ID NO: 5526281 - DNA, 25 bp, Homo sapien
ttcagttttgatgtcacaaggcaca

SEQ ID NO: 5526282 - DNA, 25 bp, Homo sapien
tcttatgcagtcgtgtctaatactt

SEQ ID NO: 5526283 - DNA, 25 bp, Homo sapien
gactagttacttcatggccagcccc

SEQ ID NO: 5526284 - DNA, 25 bp, Homo sapien
aggtggccctcacgaagccaacttc

SEQ ID NO: 5526285 - DNA, 25 bp, Homo sapien
tataatacagatttcttaaaactct

SEQ ID NO: 5526286 - DNA, 25 bp, Homo sapien
agagttttaagaaatctgtattata

SEQ ID NO: 5526287 - DNA, 25 bp, Homo sapien
atataatacagatttcttaaaactc

SEQ ID NO: 5526288 - DNA, 25 bp, Homo sapien
gagttttaagaaatctgtattatat

SEQ ID NO: 5526289 - DNA, 25 bp, Homo sapien
tgccttaactgcaccggatggggaa

SEQ ID NO: 5526290 - DNA, 25 bp, Homo sapien
gagaggacagagcaaccttctttgg

SEQ ID NO: 5526291 - DNA, 25 bp, Homo sapien
ttgtccagaccacgtaggaaacgat

SEQ ID NO: 5526292 - DNA, 25 bp, Homo sapien
agatggaggagcctctccccaacaa

SEQ ID NO: 5526293 - DNA, 25 bp, Homo sapien
agaaacacaaggttcagagagatca

SEQ ID NO: 5526294 - DNA, 25 bp, Homo sapien
ggatgggttgtccagtatctgctga

SEQ ID NO: 5526295 - DNA, 25 bp, Homo sapien
tgggttcagagatcaccctgagggg

SEQ ID NO: 5526296 - DNA, 25 bp, Homo sapien
ctcaagcttccacagtgacagaggg

SEQ ID NO: 5526297 - DNA, 25 bp, Homo sapien
ttagtgcctctactaaggggatggg

SEQ ID NO: 5526298 - DNA, 25 bp, Homo sapien
ctagtgctcataccatggtgctggc

SEQ ID NO: 5526299 - DNA, 25 bp, Homo sapien
ctcacagcagccccacattatcacc

SEQ ID NO: 5526300 - DNA, 25 bp, Homo sapien
taaaatagcaccattgggctgactt

SEQ ID NO: 5526301 - DNA, 25 bp, Homo sapien
taatgcaagagaattatgtaaaacc

SEQ ID NO: 5526302 - DNA, 25 bp, Homo sapien
ttaatgcagtatccagtttcaaaat

SEQ ID NO: 5526303 - DNA, 25 bp, Homo sapien
agggtaaactatatggggcagatag

SEQ ID NO: 5526304 - DNA, 25 bp, Homo sapien
atgggctttctttagatgtggagga

SEQ ID NO: 5526305 - DNA, 25 bp, Homo sapien
attcattttcaaggcaaggaagggt

SEQ ID NO: 5526306 - DNA, 25 bp, Homo sapien
aaccaaaatagtacaaatgcctaat

SEQ ID NO: 5526307 - DNA, 25 bp, Homo sapien
ttctttagatgtggaggaaacactg

SEQ ID NO: 5526308 - DNA, 25 bp, Homo sapien
agtacacatgattcacaaaacagta

SEQ ID NO: 5526309 - DNA, 25 bp, Homo sapien
tatggggcagatagaaaaatctttc

SEQ ID NO: 5526310 - DNA, 25 bp, Homo sapien
aggaaacactgcagcccaaaataac

SEQ ID NO: 5526311 - DNA, 25 bp, Homo sapien
agggtccatgctggggacttcacat

SEQ ID NO: 5526312 - DNA, 25 bp, Homo sapien
tggggtgaacctgcaactcactgtg

SEQ ID NO: 5526313 - DNA, 25 bp, Homo sapien
tccccacttcccgcccgccactgac

SEQ ID NO: 5526314 - DNA, 25 bp, Homo sapien
aacagggagtgacatttgttgagga

SEQ ID NO: 5526315 - DNA, 25 bp, Homo sapien
gggattgttctgatctctgggagcc

SEQ ID NO: 5526316 - DNA, 25 bp, Homo sapien
atgcacagagtgaatagaaaaaata

SEQ ID NO: 5526317 - DNA, 25 bp, Homo sapien
atcctgtcaagcgctgggattgttc

SEQ ID NO: 5526318 - DNA, 25 bp, Homo sapien
tgaggacctacgatgtgtcagggtc

SEQ ID NO: 5526319 - DNA, 25 bp, Homo sapien
catgagggctccatgaagccccctt

SEQ ID NO: 5526320 - DNA, 25 bp, Homo sapien
gtactaaacagagtgacaacaggga

SEQ ID NO: 5526321 - DNA, 25 bp, Homo sapien
gatagatagaatgacagatgatgtt

SEQ ID NO: 5526322 - DNA, 25 bp, Homo sapien
ttgagggaagtaggctctccttgaa

SEQ ID NO: 5526323 - DNA, 25 bp, Homo sapien
gaagagtcagtgtgagctttctcca

SEQ ID NO: 5526324 - DNA, 25 bp, Homo sapien
cccagttcagtggatcccgagtgag

SEQ ID NO: 5526325 - DNA, 25 bp, Homo sapien
tcaagcctatcaggcctggagcttc

SEQ ID NO: 5526326 - DNA, 25 bp, Homo sapien
aactcagggatacatggatggagta

SEQ ID NO: 5526327 - DNA, 25 bp, Homo sapien
gctttgaaggatgaataggagcttg

SEQ ID NO: 5526328 - DNA, 25 bp, Homo sapien
tagcaggtattgaagctagggcttt

SEQ ID NO: 5526329 - DNA, 25 bp, Homo sapien
atctagttccaagctgggtgatcct

SEQ ID NO: 5526330 - DNA, 25 bp, Homo sapien
aatggctgcatgaagtagcaggtat

SEQ ID NO: 5526331 - DNA, 25 bp, Homo sapien
ctccttgaaggataagcaatggctg

SEQ ID NO: 5526332 - DNA, 25 bp, Homo sapien
cccaaaggtagtgatgactctgctg

SEQ ID NO: 5526333 - DNA, 25 bp, Homo sapien
aaatgcgcgctcacctggacagcgc

SEQ ID NO: 5526334 - DNA, 25 bp, Homo sapien
gggctgacccgtctccaccgagact

SEQ ID NO: 5526335 - DNA, 25 bp, Homo sapien
tctcgctgcagactaactggcgcca

SEQ ID NO: 5526336 - DNA, 25 bp, Homo sapien
aagacatgcttgatcaacaacccaa

SEQ ID NO: 5526337 - DNA, 25 bp, Homo sapien
ctcgagttctaaggctaagtacggg

SEQ ID NO: 5526338 - DNA, 25 bp, Homo sapien
caccgaccaaactcaagacatgctt

SEQ ID NO: 5526339 - DNA, 25 bp, Homo sapien
ccaccgagactgaacctcgagttct

SEQ ID NO: 5526340 - DNA, 25 bp, Homo sapien
ggggtgtgtgaaccttctcgctgca

SEQ ID NO: 5526341 - DNA, 25 bp, Homo sapien
acttgctacttaggtggcagggaga

SEQ ID NO: 5526342 - DNA, 25 bp, Homo sapien
cttgggagtttgctctcagaaacgc

SEQ ID NO: 5526343 - DNA, 25 bp, Homo sapien
gcccgctgaccaccagaaaaaacac

SEQ ID NO: 5526344 - DNA, 25 bp, Homo sapien
gaagaaattggacaccttagacatt

SEQ ID NO: 5526345 - DNA, 25 bp, Homo sapien
ggctgccgagtactctggcacggta

SEQ ID NO: 5526346 - DNA, 25 bp, Homo sapien
catttgatggaacttgatgtgagct

SEQ ID NO: 5526347 - DNA, 25 bp, Homo sapien
ggcggacctgtcgcgaaatcgcctt

SEQ ID NO: 5526348 - DNA, 25 bp, Homo sapien
tctctggaaaatctcaacttgtacc

SEQ ID NO: 5526349 - DNA, 25 bp, Homo sapien
aactgtcaacattgccggtacactt

SEQ ID NO: 5526350 - DNA, 25 bp, Homo sapien
gaggtaacctccctggtgttcactg

SEQ ID NO: 5526351 - DNA, 25 bp, Homo sapien
atattagtcggaaccaactgtcaac

SEQ ID NO: 5526352 - DNA, 25 bp, Homo sapien
tatattccagaggcaattttaaacc

SEQ ID NO: 5526353 - DNA, 25 bp, Homo sapien
agaaattcctatagaagcatgtcac

SEQ ID NO: 5526354 - DNA, 25 bp, Homo sapien
gctagtaataacaaattggtgtcac

SEQ ID NO: 5526355 - DNA, 25 bp, Homo sapien
ctacaacagcagctctagggaaagg

SEQ ID NO: 5526356 - DNA, 25 bp, Homo sapien
agcttgtgaccagctcaggatggag

SEQ ID NO: 5526357 - DNA, 25 bp, Homo sapien
gggcaggatgaaagttacttgtact

SEQ ID NO: 5526358 - DNA, 25 bp, Homo sapien
cattagtatggaatggactgtggac

SEQ ID NO: 5526359 - DNA, 25 bp, Homo sapien
aaatgagtccgtacctatgcccgca

SEQ ID NO: 5526360 - DNA, 25 bp, Homo sapien
aaacagagagacattgatggatttg

SEQ ID NO: 5526361 - DNA, 25 bp, Homo sapien
gatggatttggagatagagtcaaca

SEQ ID NO: 5526362 - DNA, 25 bp, Homo sapien
tgggcaggtgacttgccattctgtg

SEQ ID NO: 5526363 - DNA, 25 bp, Homo sapien
ctatgtcagatatggtgcaagaaac

SEQ ID NO: 5526364 - DNA, 25 bp, Homo sapien
tgtggacacaggccctaaggatata

SEQ ID NO: 5526365 - DNA, 25 bp, Homo sapien
ggggtcagatgtttgagaatcacct

SEQ ID NO: 5526366 - DNA, 25 bp, Homo sapien
ggttttctacgctgcccttggccac

SEQ ID NO: 5526367 - DNA, 25 bp, Homo sapien
taaataaacttgtgagctggcccca

SEQ ID NO: 5526368 - DNA, 25 bp, Homo sapien
cctcttttgggacaagagccctggt

SEQ ID NO: 5526369 - DNA, 25 bp, Homo sapien
caacccctcctaggaatcacagctc

SEQ ID NO: 5526370 - DNA, 25 bp, Homo sapien
ggcttctcttcgatcatgttgggtt

SEQ ID NO: 5526371 - DNA, 25 bp, Homo sapien
gcagtggccaagttgcgacactgcc

SEQ ID NO: 5526372 - DNA, 25 bp, Homo sapien
atcacagctccccgtactggtgccg

SEQ ID NO: 5526373 - DNA, 25 bp, Homo sapien
tgatgcagattcagggcttctcttc

SEQ ID NO: 5526374 - DNA, 25 bp, Homo sapien
tgcccttggccaccacactgcctgc

SEQ ID NO: 5526375 - DNA, 25 bp, Homo sapien
tgtacggtacgttgttattgatatg

SEQ ID NO: 5526376 - DNA, 25 bp, Homo sapien
ttgggacaagagccctggttttcta

SEQ ID NO: 5526377 - DNA, 25 bp, Homo sapien
tcatgcaaataaatgactgggacac

SEQ ID NO: 5526378 - DNA, 25 bp, Homo sapien
tcagaaagtacatcaaaagacggac

SEQ ID NO: 5526379 - DNA, 25 bp, Homo sapien
acagggatatcaaaggaagtcctac

SEQ ID NO: 5526380 - DNA, 25 bp, Homo sapien
tgcaaaggactgctaatggacttcc

SEQ ID NO: 5526381 - DNA, 25 bp, Homo sapien
ccagaattcagacagcatgctacaa

SEQ ID NO: 5526382 - DNA, 25 bp, Homo sapien
atcaaaagacggacaaaataattta

SEQ ID NO: 5526383 - DNA, 25 bp, Homo sapien
ctacatcataaaaaacgaaagcaac

SEQ ID NO: 5526384 - DNA, 25 bp, Homo sapien
gactgggacactgcagatgtcactg

SEQ ID NO: 5526385 - DNA, 25 bp, Homo sapien
taatggacttccaacagggatatca

SEQ ID NO: 5526386 - DNA, 25 bp, Homo sapien
cttgaattggcaaatgcaaaggact

SEQ ID NO: 5526387 - DNA, 25 bp, Homo sapien
agaggtggaacttaccccagaattc

SEQ ID NO: 5526388 - DNA, 25 bp, Homo sapien
atacagcagcgtcccagacactcta

SEQ ID NO: 5526389 - DNA, 25 bp, Homo sapien
aaacagagcttccagataacattac

SEQ ID NO: 5526390 - DNA, 25 bp, Homo sapien
tggcactgggctaaggctttttact

SEQ ID NO: 5526391 - DNA, 25 bp, Homo sapien
gcagtccaggaaggagccttcctct

SEQ ID NO: 5526392 - DNA, 25 bp, Homo sapien
ccttcctctcaggtcagcccagggc

SEQ ID NO: 5526393 - DNA, 25 bp, Homo sapien
aacagacaacacagagcttcatgac

SEQ ID NO: 5526394 - DNA, 25 bp, Homo sapien
gattggcagtcaacccagggataca

SEQ ID NO: 5526395 - DNA, 25 bp, Homo sapien
cttcatgacggcctcggattggcag

SEQ ID NO: 5526396 - DNA, 25 bp, Homo sapien
taaagtcaagtgaaacaagagattt

SEQ ID NO: 5526397 - DNA, 25 bp, Homo sapien
aggcaacagatacaatttggtagcc

SEQ ID NO: 5526398 - DNA, 25 bp, Homo sapien
gtttctgaggtgctggtcatcattc

SEQ ID NO: 5526399 - DNA, 25 bp, Homo sapien
aacggaaatgtcagaattgtatgga

SEQ ID NO: 5526400 - DNA, 25 bp, Homo sapien
attctgtttcgcagcaaaagtgaag

SEQ ID NO: 5526401 - DNA, 25 bp, Homo sapien
aggcatctctgactgaggtgttttt

SEQ ID NO: 5526402 - DNA, 25 bp, Homo sapien
caaaaggccttatgtgatctgtatc

SEQ ID NO: 5526403 - DNA, 25 bp, Homo sapien
ggctgtgtgcccaaaattctgtttc

SEQ ID NO: 5526404 - DNA, 25 bp, Homo sapien
gaaaatttggaatagtgctgctgcc

SEQ ID NO: 5526405 - DNA, 25 bp, Homo sapien
tctcaatgggaatggtgtaaaaaac

SEQ ID NO: 5526406 - DNA, 25 bp, Homo sapien
aatgtgttagtagtctggctgtgtg

SEQ ID NO: 5526407 - DNA, 25 bp, Homo sapien
ttgaggctccaacctgattagtgca

SEQ ID NO: 5526408 - DNA, 25 bp, Homo sapien
gattagtgcatggtcagccctcaat

SEQ ID NO: 5526409 - DNA, 25 bp, Homo sapien
gtgaagacctgtatgtaaagaaagt

SEQ ID NO: 5526410 - DNA, 25 bp, Homo sapien
gttagggttagtgaacaatgtacac

SEQ ID NO: 5526411 - DNA, 25 bp, Homo sapien
tggactatggattcaaggtacctaa

SEQ ID NO: 5526412 - DNA, 25 bp, Homo sapien
aaatttcataaagcagggactcatc

SEQ ID NO: 5526413 - DNA, 25 bp, Homo sapien
taagattatacaaagcagctcagcc

SEQ ID NO: 5526414 - DNA, 25 bp, Homo sapien
acaatgtacactaggtagaaaatgt

SEQ ID NO: 5526415 - DNA, 25 bp, Homo sapien
acatggcccacttcacgattggact

SEQ ID NO: 5526416 - DNA, 25 bp, Homo sapien
ttattgaaacacagcaagcctattt

SEQ ID NO: 5526417 - DNA, 25 bp, Homo sapien
ctgactcatgttagggttagtgaac

SEQ ID NO: 5526418 - DNA, 25 bp, Homo sapien
ttgcttacgtattgccacatggccc

SEQ ID NO: 5526419 - DNA, 25 bp, Homo sapien
ttaaccattgtgctgagaccaattc

SEQ ID NO: 5526420 - DNA, 25 bp, Homo sapien
agaatcaaggctgagaaccactgat

SEQ ID NO: 5526421 - DNA, 25 bp, Homo sapien
gaccccaaagtcacattctagcagg

SEQ ID NO: 5526422 - DNA, 25 bp, Homo sapien
gatggatggatgctctacagttcca

SEQ ID NO: 5526423 - DNA, 25 bp, Homo sapien
atagggattacagatcacttgcagc

SEQ ID NO: 5526424 - DNA, 25 bp, Homo sapien
gacccaaatgaaaatgcgcaataat

SEQ ID NO: 5526425 - DNA, 25 bp, Homo sapien
acttgcagcacgaacataatgaccc

SEQ ID NO: 5526426 - DNA, 25 bp, Homo sapien
acatgcgaccagaacatgcacagaa

SEQ ID NO: 5526427 - DNA, 25 bp, Homo sapien
tctaccaaaccacagatgcaccaca

SEQ ID NO: 5526428 - DNA, 25 bp, Homo sapien
atgagttcatggactaaccacacac

SEQ ID NO: 5526429 - DNA, 25 bp, Homo sapien
acagttccaataagttaagacccaa

SEQ ID NO: 5526430 - DNA, 25 bp, Homo sapien
taaatcgccaatatcccatctcacc

SEQ ID NO: 5526431 - DNA, 25 bp, Homo sapien
ggaaaggctacaaggcataaatcgc

SEQ ID NO: 5526432 - DNA, 25 bp, Homo sapien
tattcttctgaggtcaagggacacg

SEQ ID NO: 5526433 - DNA, 25 bp, Homo sapien
cgtgtcccttgacctcagaagaata

SEQ ID NO: 5526434 - DNA, 25 bp, Homo sapien
tgtgcttatgcttcagtccaggctg

SEQ ID NO: 5526435 - DNA, 25 bp, Homo sapien
tttcccactctgaggctctggccag

SEQ ID NO: 5526436 - DNA, 25 bp, Homo sapien
gccgaaaagccgcattccctgcctc

SEQ ID NO: 5526437 - DNA, 25 bp, Homo sapien
caagatccggaaagatgaataaaga

SEQ ID NO: 5526438 - DNA, 25 bp, Homo sapien
gatccggaaagatgaataaagacaa

SEQ ID NO: 5526439 - DNA, 25 bp, Homo sapien
actttcccttgactgagagctcctc

SEQ ID NO: 5526440 - DNA, 25 bp, Homo sapien
ggcaggagccatgtcagttctgaag

SEQ ID NO: 5526441 - DNA, 25 bp, Homo sapien
ccctgaaatccttggggtgcctcga

SEQ ID NO: 5526442 - DNA, 25 bp, Homo sapien
gccagggattccctttcccactctg

SEQ ID NO: 5526443 - DNA, 25 bp, Homo sapien
cttgactgagagctcctctaacccc

SEQ ID NO: 5526444 - DNA, 25 bp, Homo sapien
aagagcagtgtgcttatgcttcagt

SEQ ID NO: 5526445 - DNA, 25 bp, Homo sapien
aaagctagctgaatatggatggata

SEQ ID NO: 5526446 - DNA, 25 bp, Homo sapien
ctctataaaaaagggtgttggcaat

SEQ ID NO: 5526447 - DNA, 25 bp, Homo sapien
ggatggatatcctcagtacacaacg

SEQ ID NO: 5526448 - DNA, 25 bp, Homo sapien
tctttgaacagagatgtagcaagcc

SEQ ID NO: 5526449 - DNA, 25 bp, Homo sapien
aaagggtgttggcaattccgtccaa

SEQ ID NO: 5526450 - DNA, 25 bp, Homo sapien
caaagcaccaattcaacaaggcgtt

SEQ ID NO: 5526451 - DNA, 25 bp, Homo sapien
ggcgttgacacacagagattgaaca

SEQ ID NO: 5526452 - DNA, 25 bp, Homo sapien
acaagctctaaggaacagaggaatt

SEQ ID NO: 5526453 - DNA, 25 bp, Homo sapien
gaaggggccatgatgcatgttcatt

SEQ ID NO: 5526454 - DNA, 25 bp, Homo sapien
tcagtacacaacggagcttctcttt

SEQ ID NO: 5526455 - DNA, 25 bp, Homo sapien
aaggtcaagtggagaaccctctata

SEQ ID NO: 5526456 - DNA, 25 bp, Homo sapien
aattccacttgcgccgccgacgcga

SEQ ID NO: 5526457 - DNA, 25 bp, Homo sapien
ggcgtgaaagtaagaattccaggct

SEQ ID NO: 5526458 - DNA, 25 bp, Homo sapien
tgcccttcctatgtggggaccgtcc

SEQ ID NO: 5526459 - DNA, 25 bp, Homo sapien
aaacataagacccagaagaaaaatc

SEQ ID NO: 5526460 - DNA, 25 bp, Homo sapien
cagaagttacagactcgaatgcatc

SEQ ID NO: 5526461 - DNA, 25 bp, Homo sapien
caaacagaaacaagatgaccatgac

SEQ ID NO: 5526462 - DNA, 25 bp, Homo sapien
cttgaaacaatcatgcagaggctcg

SEQ ID NO: 5526463 - DNA, 25 bp, Homo sapien
gagcccgggtcttctgtccgatgtc

SEQ ID NO: 5526464 - DNA, 25 bp, Homo sapien
gacaatgtcaccagcaagagggctg

SEQ ID NO: 5526465 - DNA, 25 bp, Homo sapien
tggctagccaagcaatcacggagaa

SEQ ID NO: 5526466 - DNA, 25 bp, Homo sapien
cttctgagagccttggtccagtttc

SEQ ID NO: 5526467 - DNA, 25 bp, Homo sapien
ctgaaatccatatccagggagacaa

SEQ ID NO: 5526468 - DNA, 25 bp, Homo sapien
aaatatgtaaacagattggtggggc

SEQ ID NO: 5526469 - DNA, 25 bp, Homo sapien
caaacacacaagcacactatgaacc

SEQ ID NO: 5526470 - DNA, 25 bp, Homo sapien
gtttacatgagaaccagaccagcca

SEQ ID NO: 5526471 - DNA, 25 bp, Homo sapien
ggaagccttgtaggcccaacagccc

SEQ ID NO: 5526472 - DNA, 25 bp, Homo sapien
ctgctcaggcccccataggataata

SEQ ID NO: 5526473 - DNA, 25 bp, Homo sapien
acactatgaaccgatggtgctggga

SEQ ID NO: 5526474 - DNA, 25 bp, Homo sapien
cccatcccccaggaggatctaaaac

SEQ ID NO: 5526475 - DNA, 25 bp, Homo sapien
aaggagagaaagtatatgtggtact

SEQ ID NO: 5526476 - DNA, 25 bp, Homo sapien
gtttcctacaggctggatggcatcc

SEQ ID NO: 5526477 - DNA, 25 bp, Homo sapien
aaggagtgggtttacatgagaacca

SEQ ID NO: 5526478 - DNA, 25 bp, Homo sapien
gccgccagtcacctacatgcacatc

SEQ ID NO: 5526479 - DNA, 25 bp, Homo sapien
ccatcccgctgcacgaccacccggg

SEQ ID NO: 5526480 - DNA, 25 bp, Homo sapien
ggcgtgttcctgctcaagagcggca

SEQ ID NO: 5526481 - DNA, 25 bp, Homo sapien
tgttcctgctcaagagcggcacgtc

SEQ ID NO: 5526482 - DNA, 25 bp, Homo sapien
gcccaacctgccgccagtcacctac

SEQ ID NO: 5526483 - DNA, 25 bp, Homo sapien
cctgccgccagtcacctacatgcac

SEQ ID NO: 5526484 - DNA, 25 bp, Homo sapien
atcagctgcatggacaagctagacg

SEQ ID NO: 5526485 - DNA, 25 bp, Homo sapien
agagcggcacgtccatcccgctgca

SEQ ID NO: 5526486 - DNA, 25 bp, Homo sapien
cggcacgtccatcccgctgcacgac

SEQ ID NO: 5526487 - DNA, 25 bp, Homo sapien
aagctgaagagcctcctgacccagc

SEQ ID NO: 5526488 - DNA, 25 bp, Homo sapien
tacatgcacatctacgagacggacg

SEQ ID NO: 5526489 - DNA, 25 bp, Homo sapien
tgaaattgtgagatgttttgcaagc

SEQ ID NO: 5526490 - DNA, 25 bp, Homo sapien
gcgtcgttttcaacagcagtggggc

SEQ ID NO: 5526491 - DNA, 25 bp, Homo sapien
gcagtggggctaattacccggaata

SEQ ID NO: 5526492 - DNA, 25 bp, Homo sapien
agaatgctgttattggggttgtgtg

SEQ ID NO: 5526493 - DNA, 25 bp, Homo sapien
acccggaatacggtctcaccgatgc

SEQ ID NO: 5526494 - DNA, 25 bp, Homo sapien
ttttgctaaattgaaagggaacata

SEQ ID NO: 5526495 - DNA, 25 bp, Homo sapien
tgtttggtttcagtggtccagcttt

SEQ ID NO: 5526496 - DNA, 25 bp, Homo sapien
ttatgctggtaaaacaaatgctgtt

SEQ ID NO: 5526497 - DNA, 25 bp, Homo sapien
agggaacatagatggaattccaaaa

SEQ ID NO: 5526498 - DNA, 25 bp, Homo sapien
ttttatgtggatgaagagcattttt

SEQ ID NO: 5526499 - DNA, 25 bp, Homo sapien
tcaccgatgcagttttcatggacat

SEQ ID NO: 5526500 - DNA, 25 bp, Homo sapien
caacaccaactcagagaccctctcc

SEQ ID NO: 5526501 - DNA, 25 bp, Homo sapien
acttgagctacatgtgagtggtaca

SEQ ID NO: 5526502 - DNA, 25 bp, Homo sapien
cagaacagccacaaaatgacacaga

SEQ ID NO: 5526503 - DNA, 25 bp, Homo sapien
agtctgtaatgctgtgtattccaac

SEQ ID NO: 5526504 - DNA, 25 bp, Homo sapien
tgagtggtacaggtacaacaccaac

SEQ ID NO: 5526505 - DNA, 25 bp, Homo sapien
aagggagacttgcaatttgacagac

SEQ ID NO: 5526506 - DNA, 25 bp, Homo sapien
gatatatagaaactgaagggagact

SEQ ID NO: 5526507 - DNA, 25 bp, Homo sapien
aaggatggcatatgtaaggatcaac

SEQ ID NO: 5526508 - DNA, 25 bp, Homo sapien
aaagaacccaatgttttgcctcagc

SEQ ID NO: 5526509 - DNA, 25 bp, Homo sapien
tgaacgtagaacacaaaagaaccca

SEQ ID NO: 5526510 - DNA, 25 bp, Homo sapien
cacctggtccttcagcagtggcagt

SEQ ID NO: 5526511 - DNA, 25 bp, Homo sapien
ttctgagggaaatgatagcctgaag

SEQ ID NO: 5526512 - DNA, 25 bp, Homo sapien
gcctagaagagacttatgtgggaga

SEQ ID NO: 5526513 - DNA, 25 bp, Homo sapien
aggacaatggttattctgaggcaca

SEQ ID NO: 5526514 - DNA, 25 bp, Homo sapien
gcattacatagctctcgcccccaac

SEQ ID NO: 5526515 - DNA, 25 bp, Homo sapien
ctctttgagaaatgaatgcagtaaa

SEQ ID NO: 5526516 - DNA, 25 bp, Homo sapien
cagaatatactgatgacggattgcc

SEQ ID NO: 5526517 - DNA, 25 bp, Homo sapien
caactaagataacctggaacctatt

SEQ ID NO: 5526518 - DNA, 25 bp, Homo sapien
tagcctgaaggcatgacgttttcaa

SEQ ID NO: 5526519 - DNA, 25 bp, Homo sapien
gctcagtatgtaccccgacagtgcc

SEQ ID NO: 5526520 - DNA, 25 bp, Homo sapien
ctctaaggatatgaacaccaggaca

SEQ ID NO: 5526521 - DNA, 25 bp, Homo sapien
atgacggattgccaaaagagctcat

SEQ ID NO: 5526522 - DNA, 25 bp, Homo sapien
atcgtctacacccgcccgtgctccg

SEQ ID NO: 5526523 - DNA, 25 bp, Homo sapien
ggggagtctgatacacagcagatcg

SEQ ID NO: 5526524 - DNA, 25 bp, Homo sapien
caggtgcacctggtcagtcctctga

SEQ ID NO: 5526525 - DNA, 25 bp, Homo sapien
aaatcaacctgctcaccggggagtc

SEQ ID NO: 5526526 - DNA, 25 bp, Homo sapien
ccaagccagaagaaatcaacctgct

SEQ ID NO: 5526527 - DNA, 25 bp, Homo sapien
gtggaagactttgatgtggagtcca

SEQ ID NO: 5526528 - DNA, 25 bp, Homo sapien
gtggtctacgtggtgcacacctgct

SEQ ID NO: 5526529 - DNA, 25 bp, Homo sapien
ctgtaccaaagaaaacgagaaacaa

SEQ ID NO: 5526530 - DNA, 25 bp, Homo sapien
gctgagaacaacatcgacctggtct

SEQ ID NO: 5526531 - DNA, 25 bp, Homo sapien
agctgagcgtgtacaccacgacgag

SEQ ID NO: 5526532 - DNA, 25 bp, Homo sapien
tgggtcatgtacggcatcgtctaca

SEQ ID NO: 5526533 - DNA, 25 bp, Homo sapien
agttatgggactaagttgatggttc

SEQ ID NO: 5526534 - DNA, 25 bp, Homo sapien
catgctgcattatgacgttttggtc

SEQ ID NO: 5526535 - DNA, 25 bp, Homo sapien
tgttctacatacagtcacatgctgc

SEQ ID NO: 5526536 - DNA, 25 bp, Homo sapien
ggtgtgtggtaggctctagtattta

SEQ ID NO: 5526537 - DNA, 25 bp, Homo sapien
tggtgctcccagaaggttacaatac

SEQ ID NO: 5526538 - DNA, 25 bp, Homo sapien
tgtaagtacattctgtgatgcttgc

SEQ ID NO: 5526539 - DNA, 25 bp, Homo sapien
gcctatggtattcagcaaagtaaca

SEQ ID NO: 5526540 - DNA, 25 bp, Homo sapien
aaatatacagataccattgcattac

SEQ ID NO: 5526541 - DNA, 25 bp, Homo sapien
aatataatggtgctcccagaaggtt

SEQ ID NO: 5526542 - DNA, 25 bp, Homo sapien
ctgtacacgtttgtagtgggagcag

SEQ ID NO: 5526543 - DNA, 25 bp, Homo sapien
tgtgatgcttgcacagcaacaaaat

SEQ ID NO: 5526544 - DNA, 25 bp, Homo sapien
attccctagggtagtgtaggatgga

SEQ ID NO: 5526545 - DNA, 25 bp, Homo sapien
gatgggtttgaggttgtttgactta

SEQ ID NO: 5526546 - DNA, 25 bp, Homo sapien
cagggggatcacagtacattttcca

SEQ ID NO: 5526547 - DNA, 25 bp, Homo sapien
agatggagaatgaatgctacagtat

SEQ ID NO: 5526548 - DNA, 25 bp, Homo sapien
acccctacacaggaagagatgggtt

SEQ ID NO: 5526549 - DNA, 25 bp, Homo sapien
tcaggctgaactccgaaagaaggaa

SEQ ID NO: 5526550 - DNA, 25 bp, Homo sapien
ccccaagttggtgtctggtccagtt

SEQ ID NO: 5526551 - DNA, 25 bp, Homo sapien
ttttccatgcagactaagggtggga

SEQ ID NO: 5526552 - DNA, 25 bp, Homo sapien
gaggccctggcttggacccttattg

SEQ ID NO: 5526553 - DNA, 25 bp, Homo sapien
gaatggggaatccaggtattcccta

SEQ ID NO: 5526554 - DNA, 25 bp, Homo sapien
gaacatctcacaccaaaggcgaggg

SEQ ID NO: 5526555 - DNA, 25 bp, Homo sapien
tttcacagttcagcttgagttgtgg

SEQ ID NO: 5526556 - DNA, 25 bp, Homo sapien
cgcctaggatacagtgttaaaccac

SEQ ID NO: 5526557 - DNA, 25 bp, Homo sapien
tcacccaacaggccagtaattgctc

SEQ ID NO: 5526558 - DNA, 25 bp, Homo sapien
tgtcagttactcagagcaataaaac

SEQ ID NO: 5526559 - DNA, 25 bp, Homo sapien
gtgacgcctttactacaaaaactga

SEQ ID NO: 5526560 - DNA, 25 bp, Homo sapien
gtttgtttgcatgtgacgcctttac

SEQ ID NO: 5526561 - DNA, 25 bp, Homo sapien
aaaatttctaagtgaatcaaaccat

SEQ ID NO: 5526562 - DNA, 25 bp, Homo sapien
tgaatcaaaccatagacacaatccc

SEQ ID NO: 5526563 - DNA, 25 bp, Homo sapien
gaggaaaaaagatcgcctaggatac

SEQ ID NO: 5526564 - DNA, 25 bp, Homo sapien
catagacacaatccctttaaaggtt

SEQ ID NO: 5526565 - DNA, 25 bp, Homo sapien
aaaagatcgcctaggatacagtgtt

SEQ ID NO: 5526566 - DNA, 25 bp, Homo sapien
gacattgatgtggccaaggtcaaca

SEQ ID NO: 5526567 - DNA, 25 bp, Homo sapien
aaacaggctgtgaagaagctgtatg

SEQ ID NO: 5526568 - DNA, 25 bp, Homo sapien
gaaggcatatgttcgactggctcct

SEQ ID NO: 5526569 - DNA, 25 bp, Homo sapien
caccctgattcggcctgatggagag

SEQ ID NO: 5526570 - DNA, 25 bp, Homo sapien
tgggatcatctaaactgagtccagc

SEQ ID NO: 5526571 - DNA, 25 bp, Homo sapien
aagatccgcacgtcacccaccttcc

SEQ ID NO: 5526572 - DNA, 25 bp, Homo sapien
gttaaagccaacaagcaccagatta

SEQ ID NO: 5526573 - DNA, 25 bp, Homo sapien
ctgcccctcctaaagctgaagccaa

SEQ ID NO: 5526574 - DNA, 25 bp, Homo sapien
ccggagacagcccaaatatcctcgg

SEQ ID NO: 5526575 - DNA, 25 bp, Homo sapien
gactggctcctgattacgatgcttt

SEQ ID NO: 5526576 - DNA, 25 bp, Homo sapien
tccgctgaccactgagtctgccatg

SEQ ID NO: 5526577 - DNA, 25 bp, Homo sapien
atttccaaaagacttgcaatggttc

SEQ ID NO: 5526578 - DNA, 25 bp, Homo sapien
gcttgactatttatgaagaaggaac

SEQ ID NO: 5526579 - DNA, 25 bp, Homo sapien
aagaaggaacatgttggattcacac

SEQ ID NO: 5526580 - DNA, 25 bp, Homo sapien
ctgctgccattcaggtccccatccc

SEQ ID NO: 5526581 - DNA, 25 bp, Homo sapien
aaaaaagcacacttgaggagctagg

SEQ ID NO: 5526582 - DNA, 25 bp, Homo sapien
aagacagaccacacaaacaccactg

SEQ ID NO: 5526583 - DNA, 25 bp, Homo sapien
caacttagcatgcctacgttcatac

SEQ ID NO: 5526584 - DNA, 25 bp, Homo sapien
caccactgaaggaacgcttgactat

SEQ ID NO: 5526585 - DNA, 25 bp, Homo sapien
tccccatccccgacgtctaccagac

SEQ ID NO: 5526586 - DNA, 25 bp, Homo sapien
accagacatactgaggctggtgacc

SEQ ID NO: 5526587 - DNA, 25 bp, Homo sapien
atgcaacctgaaagtgaagaatgtt

SEQ ID NO: 5526588 - DNA, 25 bp, Homo sapien
ccacgagtaccgcactctgaggttt

SEQ ID NO: 5526589 - DNA, 25 bp, Homo sapien
tctccgggaaacttgccccgccaca

SEQ ID NO: 5526590 - DNA, 25 bp, Homo sapien
cttcacagtcggctctcagcagctg

SEQ ID NO: 5526591 - DNA, 25 bp, Homo sapien
gtagaactaagctaagcagatggtc

SEQ ID NO: 5526592 - DNA, 25 bp, Homo sapien
tctcggctccagcaccacgagtacc

SEQ ID NO: 5526593 - DNA, 25 bp, Homo sapien
aaaaggcaaaactggttatcctgac

SEQ ID NO: 5526594 - DNA, 25 bp, Homo sapien
gtcttcctgcaaaaagaccgggctg

SEQ ID NO: 5526595 - DNA, 25 bp, Homo sapien
tcctcacagtcctgtccggtggcct

SEQ ID NO: 5526596 - DNA, 25 bp, Homo sapien
gcgtggccagttctttcgaagcctc

SEQ ID NO: 5526597 - DNA, 25 bp, Homo sapien
tcgctcccaacacggagttcctccc

SEQ ID NO: 5526598 - DNA, 25 bp, Homo sapien
ttggagctggttcacagaaaaaagg

SEQ ID NO: 5526599 - DNA, 25 bp, Homo sapien
cgactattagttcataaggtacgtt

SEQ ID NO: 5526600 - DNA, 25 bp, Homo sapien
aacgtaccttatgaactaatagtcg

SEQ ID NO: 5526601 - DNA, 25 bp, Homo sapien
gtcatgaggcagctctgatcacttc

SEQ ID NO: 5526602 - DNA, 25 bp, Homo sapien
tgcatcgcgcctactgtgcgtgtgc

SEQ ID NO: 5526603 - DNA, 25 bp, Homo sapien
tggcactgtgccagtcatgaggcag

SEQ ID NO: 5526604 - DNA, 25 bp, Homo sapien
tgacccactggtgttctgtgcaagg

SEQ ID NO: 5526605 - DNA, 25 bp, Homo sapien
tcacctcgtggaggccttcacagag

SEQ ID NO: 5526606 - DNA, 25 bp, Homo sapien
tgggctgctgaagctatcctcctca

SEQ ID NO: 5526607 - DNA, 25 bp, Homo sapien
ggtgacccctagtgggcagtttgca

SEQ ID NO: 5526608 - DNA, 25 bp, Homo sapien
accctcggttctgagggtacggtga

SEQ ID NO: 5526609 - DNA, 25 bp, Homo sapien
ctgcttctggccctcacctcgtgga

SEQ ID NO: 5526610 - DNA, 25 bp, Homo sapien
catctgctttcctgttgggggtccc

SEQ ID NO: 5526611 - DNA, 25 bp, Homo sapien
atcctcctcaggcctcagggatgac

SEQ ID NO: 5526612 - DNA, 25 bp, Homo sapien
tgtcaaagagacacatacacaaaca

SEQ ID NO: 5526613 - DNA, 25 bp, Homo sapien
agaagcaatggtgcctttggaaagt

SEQ ID NO: 5526614 - DNA, 25 bp, Homo sapien
atgttcagaaggaccccactcttgg

SEQ ID NO: 5526615 - DNA, 25 bp, Homo sapien
ctgtgccatcacataggaccccatg

SEQ ID NO: 5526616 - DNA, 25 bp, Homo sapien
cacagagctggttggctccatggtt

SEQ ID NO: 5526617 - DNA, 25 bp, Homo sapien
tcacccagtgaagaagcaatggtgc

SEQ ID NO: 5526618 - DNA, 25 bp, Homo sapien
tttggaaagtatgtagctcttagtt

SEQ ID NO: 5526619 - DNA, 25 bp, Homo sapien
ttaagtgacacaatagtacaacaat

SEQ ID NO: 5526620 - DNA, 25 bp, Homo sapien
ttttttgaacaagggatgctgcatt

SEQ ID NO: 5526621 - DNA, 25 bp, Homo sapien
tctgctgccgtgtcttgaaattctt

SEQ ID NO: 5526622 - DNA, 25 bp, Homo sapien
tagatggtggcattatgggcaatta

SEQ ID NO: 5526623 - DNA, 25 bp, Homo sapien
ctagggcacccaaacatattaatga

SEQ ID NO: 5526624 - DNA, 25 bp, Homo sapien
agggcagcaaaaccatgaaaccaat

SEQ ID NO: 5526625 - DNA, 25 bp, Homo sapien
gagggcttggctactgcatagcaca

SEQ ID NO: 5526626 - DNA, 25 bp, Homo sapien
ggtttccagagaattaacacagttc

SEQ ID NO: 5526627 - DNA, 25 bp, Homo sapien
cctaagcctagggtgtcaacaagaa

SEQ ID NO: 5526628 - DNA, 25 bp, Homo sapien
atgtccaaggctaatacaccactgc

SEQ ID NO: 5526629 - DNA, 25 bp, Homo sapien
taatttacaagctagggcacccaaa

SEQ ID NO: 5526630 - DNA, 25 bp, Homo sapien
atccccacagacaaccagtccccta

SEQ ID NO: 5526631 - DNA, 25 bp, Homo sapien
agttctctcagcatgtaagagggca

SEQ ID NO: 5526632 - DNA, 25 bp, Homo sapien
tcagctgtttaatcagaatgcctcc

SEQ ID NO: 5526633 - DNA, 25 bp, Homo sapien
ctaatacaccactgcaagggaagaa

SEQ ID NO: 5526634 - DNA, 25 bp, Homo sapien
taacaagcaaggattaaagcaacat

SEQ ID NO: 5526635 - DNA, 25 bp, Homo sapien
tcacgatgatcccctgtccccaaac

SEQ ID NO: 5526636 - DNA, 25 bp, Homo sapien
acctcaatagggcagaatagcagaa

SEQ ID NO: 5526637 - DNA, 25 bp, Homo sapien
tagggtctgataagataagcgtagg

SEQ ID NO: 5526638 - DNA, 25 bp, Homo sapien
tgcatcaggaagtgatgaagaagtt

SEQ ID NO: 5526639 - DNA, 25 bp, Homo sapien
ggctcaaatggcatctagggtctga

SEQ ID NO: 5526640 - DNA, 25 bp, Homo sapien
taagcgtaggtaattgcagataacc

SEQ ID NO: 5526641 - DNA, 25 bp, Homo sapien
cttggcttagtgtttgtagagttta

SEQ ID NO: 5526642 - DNA, 25 bp, Homo sapien
agaaattgattattggaggtgtggg

SEQ ID NO: 5526643 - DNA, 25 bp, Homo sapien
ctgcccaaagaagtaaggggctcaa

SEQ ID NO: 5526644 - DNA, 25 bp, Homo sapien
atcataagtggtgaagaatttgcat

SEQ ID NO: 5526645 - DNA, 25 bp, Homo sapien
caaatctaagacgtggagagatctt

SEQ ID NO: 5526646 - DNA, 25 bp, Homo sapien
agagaaagaaatagatgatgccata

SEQ ID NO: 5526647 - DNA, 25 bp, Homo sapien
tattagtagggtagaaccacgaaga

SEQ ID NO: 5526648 - DNA, 25 bp, Homo sapien
gcagggaatacacagtgtgacagta

SEQ ID NO: 5526649 - DNA, 25 bp, Homo sapien
tgtcaacagacaggcattcaatgca

SEQ ID NO: 5526650 - DNA, 25 bp, Homo sapien
ttagatttatgagacaagagaaaga

SEQ ID NO: 5526651 - DNA, 25 bp, Homo sapien
tggaaaaacatggatagtggatatt

SEQ ID NO: 5526652 - DNA, 25 bp, Homo sapien
gaaatttcagggtgcagaaaacttc

SEQ ID NO: 5526653 - DNA, 25 bp, Homo sapien
aataagcaggttgatggtttagatt

SEQ ID NO: 5526654 - DNA, 25 bp, Homo sapien
gatggaaacacatttgcaggacgaa

SEQ ID NO: 5526655 - DNA, 25 bp, Homo sapien
ccacgaagacaaagaggctttgtgt

SEQ ID NO: 5526656 - DNA, 25 bp, Homo sapien
gaaacaggggtcatattatgttgcc

SEQ ID NO: 5526657 - DNA, 25 bp, Homo sapien
gcctagctggtctagaaatcctggc

SEQ ID NO: 5526658 - DNA, 25 bp, Homo sapien
cagaaaatgatttgtaccttgatga

SEQ ID NO: 5526659 - DNA, 25 bp, Homo sapien
taaggttctggttaactgagattac

SEQ ID NO: 5526660 - DNA, 25 bp, Homo sapien
gaaatcctggcatgaaatgatcctc

SEQ ID NO: 5526661 - DNA, 25 bp, Homo sapien
taaaactgtgtactggaaatcaatt

SEQ ID NO: 5526662 - DNA, 25 bp, Homo sapien
aggcacgagccactactttaattaa

SEQ ID NO: 5526663 - DNA, 25 bp, Homo sapien
agtgtaaggaaaaatctgtaggaga

SEQ ID NO: 5526664 - DNA, 25 bp, Homo sapien
tcaagacttctgagtagccagtgat

SEQ ID NO: 5526665 - DNA, 25 bp, Homo sapien
ttaggtatcaatgctgaagtcagaa

SEQ ID NO: 5526666 - DNA, 25 bp, Homo sapien
agtagccagtgattacaggcacgag

SEQ ID NO: 5526667 - DNA, 25 bp, Homo sapien
tccatcagcacaaaggaactccttg

SEQ ID NO: 5526668 - DNA, 25 bp, Homo sapien
ttcatttgtgtgtatgtaggtccat

SEQ ID NO: 5526669 - DNA, 25 bp, Homo sapien
atacccctgaggtacaaccaagttc

SEQ ID NO: 5526670 - DNA, 25 bp, Homo sapien
aaaggaactccttgcgtcatccctt

SEQ ID NO: 5526671 - DNA, 25 bp, Homo sapien
tccttttcattccagagcagtattc

SEQ ID NO: 5526672 - DNA, 25 bp, Homo sapien
aaatgcgatcatacagtatgtgacc

SEQ ID NO: 5526673 - DNA, 25 bp, Homo sapien
cagtccctatccctggcaaccatta

SEQ ID NO: 5526674 - DNA, 25 bp, Homo sapien
ccccacaccccctccagtccctatc

SEQ ID NO: 5526675 - DNA, 25 bp, Homo sapien
gtatgtgaccatttgagactggttt

SEQ ID NO: 5526676 - DNA, 25 bp, Homo sapien
atagtcatacataccccacaccccc

SEQ ID NO: 5526677 - DNA, 25 bp, Homo sapien
aggtccatacaacttcagcacaggt

SEQ ID NO: 5526678 - DNA, 25 bp, Homo sapien
gtggaaaggtagattctctgctcgc

SEQ ID NO: 5526679 - DNA, 25 bp, Homo sapien
tctaataaagtagggtgactagttc

SEQ ID NO: 5526680 - DNA, 25 bp, Homo sapien
tgtaagtgatggttatttagaaaaa

SEQ ID NO: 5526681 - DNA, 25 bp, Homo sapien
gttacagtgaataacctggacaaaa

SEQ ID NO: 5526682 - DNA, 25 bp, Homo sapien
attagctgtcagatgttatttaccc

SEQ ID NO: 5526683 - DNA, 25 bp, Homo sapien
ctggacaaaatgttgagaagagttg

SEQ ID NO: 5526684 - DNA, 25 bp, Homo sapien
gaaaaactgcatagaaatccaaacc

SEQ ID NO: 5526685 - DNA, 25 bp, Homo sapien
aaccgtattatgtggctaagctatt

SEQ ID NO: 5526686 - DNA, 25 bp, Homo sapien
agggtgactagttcttggattaatc

SEQ ID NO: 5526687 - DNA, 25 bp, Homo sapien
taaatcaactaaagactcatgagat

SEQ ID NO: 5526688 - DNA, 25 bp, Homo sapien
ctctgctcgcacaaccgtattatgt

SEQ ID NO: 5526689 - DNA, 25 bp, Homo sapien
cccctctacggctgagtcctgtgtg

SEQ ID NO: 5526690 - DNA, 25 bp, Homo sapien
cacacaggactcagccgtagagggg

SEQ ID NO: 5526691 - DNA, 25 bp, Homo sapien
cggactgagctatttgccgcctcct

SEQ ID NO: 5526692 - DNA, 25 bp, Homo sapien
ttctctctctaggccggccgagcga

SEQ ID NO: 5526693 - DNA, 25 bp, Homo sapien
gccttgccccagtggggaccatgtc

SEQ ID NO: 5526694 - DNA, 25 bp, Homo sapien
ccaaggagccctgctcccaaggaac

SEQ ID NO: 5526695 - DNA, 25 bp, Homo sapien
tgccttccaaggagccctgctccca

SEQ ID NO: 5526696 - DNA, 25 bp, Homo sapien
gagccctgctcccaaggaacagaca

SEQ ID NO: 5526697 - DNA, 25 bp, Homo sapien
ttttctctctctaggccggccgagc

SEQ ID NO: 5526698 - DNA, 25 bp, Homo sapien
tgcagccttgccccagtggggacca

SEQ ID NO: 5526699 - DNA, 25 bp, Homo sapien
ggggctgctgtctctgctcagcacg

SEQ ID NO: 5526700 - DNA, 25 bp, Homo sapien
gtgcggactgagctatttgccgcct

SEQ ID NO: 5526701 - DNA, 25 bp, Homo sapien
caggctccacttgaaatcgtccttt

SEQ ID NO: 5526702 - DNA, 25 bp, Homo sapien
gctttgtgggagcatttggtcaaac

SEQ ID NO: 5526703 - DNA, 25 bp, Homo sapien
acatccccattggcccatgcggcgg

SEQ ID NO: 5526704 - DNA, 25 bp, Homo sapien
aagagacgctgtgaacccgtcctga

SEQ ID NO: 5526705 - DNA, 25 bp, Homo sapien
gtagatacctagattgcctggaagc

SEQ ID NO: 5526706 - DNA, 25 bp, Homo sapien
tggatttgcctggccagagagtctg

SEQ ID NO: 5526707 - DNA, 25 bp, Homo sapien
tgccaatgtgcacagagaagatcaa

SEQ ID NO: 5526708 - DNA, 25 bp, Homo sapien
tcaggcgcccttgtttgaggtcaga

SEQ ID NO: 5526709 - DNA, 25 bp, Homo sapien
agacagactcccgataggttggttt

SEQ ID NO: 5526710 - DNA, 25 bp, Homo sapien
aagaaaagtatgtaagtgatggatt

SEQ ID NO: 5526711 - DNA, 25 bp, Homo sapien
gaggtcagagtaaacagacagactc

SEQ ID NO: 5526712 - DNA, 25 bp, Homo sapien
gtgttgtgcaaagagggcttatgca

SEQ ID NO: 5526713 - DNA, 25 bp, Homo sapien
gagtatcttgccaggagacaccaga

SEQ ID NO: 5526714 - DNA, 25 bp, Homo sapien
ttgtggccacctacagaacctgccc

SEQ ID NO: 5526715 - DNA, 25 bp, Homo sapien
taagccaactgggcaatgtgggttt

SEQ ID NO: 5526716 - DNA, 25 bp, Homo sapien
ggttccatggaataacgaggtgacc

SEQ ID NO: 5526717 - DNA, 25 bp, Homo sapien
acagacgaggttaagaacccacttc

SEQ ID NO: 5526718 - DNA, 25 bp, Homo sapien
tgctgaagccaactgcagctgaggc

SEQ ID NO: 5526719 - DNA, 25 bp, Homo sapien
tccctcacggttccagagagaagga

SEQ ID NO: 5526720 - DNA, 25 bp, Homo sapien
ggatagaggcctaaggtccatcctt

SEQ ID NO: 5526721 - DNA, 25 bp, Homo sapien
agcagggcctctgacttgtggccac

SEQ ID NO: 5526722 - DNA, 25 bp, Homo sapien
tggccaaggcctgtctatagcttcc

SEQ ID NO: 5526723 - DNA, 25 bp, Homo sapien
aatatcagtaagagccaaggttcca

SEQ ID NO: 5526724 - DNA, 25 bp, Homo sapien
aaatgtagtaataggaaagagtgcc

SEQ ID NO: 5526725 - DNA, 25 bp, Homo sapien
aacacgtccttcaagcgcgagtggc

SEQ ID NO: 5526726 - DNA, 25 bp, Homo sapien
gtgccagggaatcaagactttaagg

SEQ ID NO: 5526727 - DNA, 25 bp, Homo sapien
gggaaagcagctcttcaaacacgtc

SEQ ID NO: 5526728 - DNA, 25 bp, Homo sapien
gtggaaggttatggatgtttgtatc

SEQ ID NO: 5526729 - DNA, 25 bp, Homo sapien
tttgattgggttgttcctgacggag

SEQ ID NO: 5526730 - DNA, 25 bp, Homo sapien
ataacacaaacagcaccgataaaat

SEQ ID NO: 5526731 - DNA, 25 bp, Homo sapien
ttatcttccggagacacgatgctac

SEQ ID NO: 5526732 - DNA, 25 bp, Homo sapien
gagggctgagtgcactttgctactt

SEQ ID NO: 5526733 - DNA, 25 bp, Homo sapien
ttgccactgtctctcccgggacttc

SEQ ID NO: 5526734 - DNA, 25 bp, Homo sapien
tttaaggcagcatcccactgggaaa

SEQ ID NO: 5526735 - DNA, 25 bp, Homo sapien
gcagggaggattaataaatgataaa

SEQ ID NO: 5526736 - DNA, 25 bp, Homo sapien
ctaaaagggacagatctcctagacc

SEQ ID NO: 5526737 - DNA, 25 bp, Homo sapien
tgcaacagcagacactagtaaaaac

SEQ ID NO: 5526738 - DNA, 25 bp, Homo sapien
aattaaaactcaggcaaagaatgtt

SEQ ID NO: 5526739 - DNA, 25 bp, Homo sapien
ataagtaaggtgtctctaaaaggga

SEQ ID NO: 5526740 - DNA, 25 bp, Homo sapien
ggctgaggttggaaactcacagcat

SEQ ID NO: 5526741 - DNA, 25 bp, Homo sapien
atataataatagacacaggcaggga

SEQ ID NO: 5526742 - DNA, 25 bp, Homo sapien
cttctctgcccgcagatgggctgag

SEQ ID NO: 5526743 - DNA, 25 bp, Homo sapien
aatgtagatcactgagccagacagc

SEQ ID NO: 5526744 - DNA, 25 bp, Homo sapien
ctagtaaaaacaaaggcacagtaaa

SEQ ID NO: 5526745 - DNA, 25 bp, Homo sapien
tttgcagcgtagagatatgaatata

SEQ ID NO: 5526746 - DNA, 25 bp, Homo sapien
atcaccccgtccaaaatcgtcgccg

SEQ ID NO: 5526747 - DNA, 25 bp, Homo sapien
cggcgacgattttggacggggtgat

SEQ ID NO: 5526748 - DNA, 25 bp, Homo sapien
gccttcaccatggggctgttaagtc

SEQ ID NO: 5526749 - DNA, 25 bp, Homo sapien
tgacccactgatccatggaaccccc

SEQ ID NO: 5526750 - DNA, 25 bp, Homo sapien
atcccctgagatccccctatagttc

SEQ ID NO: 5526751 - DNA, 25 bp, Homo sapien
tagcacccaagtaatgtatagatta

SEQ ID NO: 5526752 - DNA, 25 bp, Homo sapien
atgtattaagccttcaccatggggc

SEQ ID NO: 5526753 - DNA, 25 bp, Homo sapien
agtgacggctgacccactgatccat

SEQ ID NO: 5526754 - DNA, 25 bp, Homo sapien
acagtcgcacagttggaaagtggta

SEQ ID NO: 5526755 - DNA, 25 bp, Homo sapien
ttggccacagtcgcacagttggaaa

SEQ ID NO: 5526756 - DNA, 25 bp, Homo sapien
tcttaaccatcccctgagatccccc

SEQ ID NO: 5526757 - DNA, 25 bp, Homo sapien
tcagaatgaatgatgcatgctgccc

SEQ ID NO: 5526758 - DNA, 25 bp, Homo sapien
gccaggatgagacgctaattctgac

SEQ ID NO: 5526759 - DNA, 25 bp, Homo sapien
catgtgggcctgaagcatttattgc

SEQ ID NO: 5526760 - DNA, 25 bp, Homo sapien
accagtgattagttgtaagaccttc

SEQ ID NO: 5526761 - DNA, 25 bp, Homo sapien
gagaactaatcagcatcatgtgggc

SEQ ID NO: 5526762 - DNA, 25 bp, Homo sapien
tgaactgaatgaaaactgagaacta

SEQ ID NO: 5526763 - DNA, 25 bp, Homo sapien
ccagaagtctggatgaaaatgagat

SEQ ID NO: 5526764 - DNA, 25 bp, Homo sapien
gaaaatgagatgagactgcaaattt

SEQ ID NO: 5526765 - DNA, 25 bp, Homo sapien
gcaggaatggtggttatattgtgaa

SEQ ID NO: 5526766 - DNA, 25 bp, Homo sapien
aagaccttcggactatgtaactgta

SEQ ID NO: 5526767 - DNA, 25 bp, Homo sapien
atgcctgaagctataagtgagataa

SEQ ID NO: 5526768 - DNA, 25 bp, Homo sapien
gtgagataagagatattccagggtt

SEQ ID NO: 5526769 - DNA, 25 bp, Homo sapien
ttttgttgttaggcagtcaccattt

SEQ ID NO: 5526770 - DNA, 25 bp, Homo sapien
cggagtgactccgcgggacactctc

SEQ ID NO: 5526771 - DNA, 25 bp, Homo sapien
gagagtgtcccgcggagtcactccg

SEQ ID NO: 5526772 - DNA, 25 bp, Homo sapien
aacgactaccacatcttcaaaatag

SEQ ID NO: 5526773 - DNA, 25 bp, Homo sapien
ctattttgaagatgtggtagtcgtt

SEQ ID NO: 5526774 - DNA, 25 bp, Homo sapien
gcagctgaagttatcaagggaattt

SEQ ID NO: 5526775 - DNA, 25 bp, Homo sapien
cttatgctgaccactggagtccatg

SEQ ID NO: 5526776 - DNA, 25 bp, Homo sapien
gtatgggcactgtgcaaagactcca

SEQ ID NO: 5526777 - DNA, 25 bp, Homo sapien
gagtaccttcaccagaaattgtccc

SEQ ID NO: 5526778 - DNA, 25 bp, Homo sapien
tccatagctgtgcctaggagtctag

SEQ ID NO: 5526779 - DNA, 25 bp, Homo sapien
cacaaaggaacaaagcagctataaa

SEQ ID NO: 5526780 - DNA, 25 bp, Homo sapien
aaagtgacagaggcttggctttttt

SEQ ID NO: 5526781 - DNA, 25 bp, Homo sapien
gttcagccaagtcattttcaagtcc

SEQ ID NO: 5526782 - DNA, 25 bp, Homo sapien
gaagaaaagcgtcgctgtgagtacc

SEQ ID NO: 5526783 - DNA, 25 bp, Homo sapien
tgagcctctgcttagtgaaacacaa

SEQ ID NO: 5526784 - DNA, 25 bp, Homo sapien
ttaaaggtctcatcctggagtttga

SEQ ID NO: 5526785 - DNA, 25 bp, Homo sapien
acagtgtagctatgatcatgtactt

SEQ ID NO: 5526786 - DNA, 25 bp, Homo sapien
aaaggccaaggtatagtctagtaac

SEQ ID NO: 5526787 - DNA, 25 bp, Homo sapien
ccaaaagattaagaaaaattcgatg

SEQ ID NO: 5526788 - DNA, 25 bp, Homo sapien
taaaggcagagctcattattaatga

SEQ ID NO: 5526789 - DNA, 25 bp, Homo sapien
tgacagtaccaagcaaacacagttc

SEQ ID NO: 5526790 - DNA, 25 bp, Homo sapien
aatcagttcactgtggtaaaacacc

SEQ ID NO: 5526791 - DNA, 25 bp, Homo sapien
ctagttgtggtggaatgctatccta

SEQ ID NO: 5526792 - DNA, 25 bp, Homo sapien
tcgatgtatattcttgggggaaagg

SEQ ID NO: 5526793 - DNA, 25 bp, Homo sapien
ttattaatgaaatctggaagctggc

SEQ ID NO: 5526794 - DNA, 25 bp, Homo sapien
caccacctaaacatacagtgtagct

SEQ ID NO: 5526795 - DNA, 25 bp, Homo sapien
ggggaaaggcattaaagcctgctca

SEQ ID NO: 5526796 - DNA, 25 bp, Homo sapien
ggagagtagtatcaagtagagactt

SEQ ID NO: 5526797 - DNA, 25 bp, Homo sapien
ttgtgttcaggaagtattagccttt

SEQ ID NO: 5526798 - DNA, 25 bp, Homo sapien
ctgtatggcacaaagtatcaatgat

SEQ ID NO: 5526799 - DNA, 25 bp, Homo sapien
tgatttaactgtggagagtagtatc

SEQ ID NO: 5526800 - DNA, 25 bp, Homo sapien
acagcataatggagataaaaccatt

SEQ ID NO: 5526801 - DNA, 25 bp, Homo sapien
taggtaatgaagcttcatatgccct

SEQ ID NO: 5526802 - DNA, 25 bp, Homo sapien
aattgtcaggtatgcctttgccatt

SEQ ID NO: 5526803 - DNA, 25 bp, Homo sapien
agcaaaaaggtatggagtaaaattg

SEQ ID NO: 5526804 - DNA, 25 bp, Homo sapien
aaggaaaaatacaatccgtgaacac

SEQ ID NO: 5526805 - DNA, 25 bp, Homo sapien
tacctaaccaagagtatcaactaat

SEQ ID NO: 5526806 - DNA, 25 bp, Homo sapien
ccgtgaacacctagatggttctgtt

SEQ ID NO: 5526807 - DNA, 25 bp, Homo sapien
tggttcctgtgaaagtccctggtcc

SEQ ID NO: 5526808 - DNA, 25 bp, Homo sapien
gaactgtgactgaaatcagagctgc

SEQ ID NO: 5526809 - DNA, 25 bp, Homo sapien
cagccaccttgaccttgggtaaaac

SEQ ID NO: 5526810 - DNA, 25 bp, Homo sapien
gcagacaggcttctcagcagaactg

SEQ ID NO: 5526811 - DNA, 25 bp, Homo sapien
tgtctggggcagtgttaactacaca

SEQ ID NO: 5526812 - DNA, 25 bp, Homo sapien
ggcacatcctgacagggtttgcccc

SEQ ID NO: 5526813 - DNA, 25 bp, Homo sapien
aagatcaagaagcttggaaacatcc

SEQ ID NO: 5526814 - DNA, 25 bp, Homo sapien
ggaaacatcccatgggtacaatgtc

SEQ ID NO: 5526815 - DNA, 25 bp, Homo sapien
atctgccaccaacaaccctcccctc

SEQ ID NO: 5526816 - DNA, 25 bp, Homo sapien
taactacacagaggcacatcctgac

SEQ ID NO: 5526817 - DNA, 25 bp, Homo sapien
ctcacccctgccaggggcagacagg

SEQ ID NO: 5526818 - DNA, 25 bp, Homo sapien
ctgctccccacgccatgcggcacat

SEQ ID NO: 5526819 - DNA, 25 bp, Homo sapien
ttgctgtgcctggggtttatggcag

SEQ ID NO: 5526820 - DNA, 25 bp, Homo sapien
gtgcccggtgccatcttccatatcc

SEQ ID NO: 5526821 - DNA, 25 bp, Homo sapien
ttctacctctctcaagcagccgatg

SEQ ID NO: 5526822 - DNA, 25 bp, Homo sapien
ctgtgcccggtgccatcttccatat

SEQ ID NO: 5526823 - DNA, 25 bp, Homo sapien
catatccgggtgctcaataaacttg

SEQ ID NO: 5526824 - DNA, 25 bp, Homo sapien
gcttgctgtgcctggggtttatggc

SEQ ID NO: 5526825 - DNA, 25 bp, Homo sapien
cactcagagacgactatgaggtgag

SEQ ID NO: 5526826 - DNA, 25 bp, Homo sapien
agccaccgctcactcagagacgact

SEQ ID NO: 5526827 - DNA, 25 bp, Homo sapien
tccatatccgggtgctcaataaact

SEQ ID NO: 5526828 - DNA, 25 bp, Homo sapien
tacctctctcaagcagccgatggag

SEQ ID NO: 5526829 - DNA, 25 bp, Homo sapien
ttttagtccaggatacaaatgccta

SEQ ID NO: 5526830 - DNA, 25 bp, Homo sapien
attatgtcctcatggataccggaac

SEQ ID NO: 5526831 - DNA, 25 bp, Homo sapien
cctctgtgatgacaaacccaacctc

SEQ ID NO: 5526832 - DNA, 25 bp, Homo sapien
aaatttgtggtgactgaaaggtaaa

SEQ ID NO: 5526833 - DNA, 25 bp, Homo sapien
tcagtctatggttgctggaacagct

SEQ ID NO: 5526834 - DNA, 25 bp, Homo sapien
gtcctcatggataccggaacaggtc

SEQ ID NO: 5526835 - DNA, 25 bp, Homo sapien
gctggaacagcttctatatagttat

SEQ ID NO: 5526836 - DNA, 25 bp, Homo sapien
aatgcctataaatttgtggtgactg

SEQ ID NO: 5526837 - DNA, 25 bp, Homo sapien
ccggaacaggtcttaaataaatgga

SEQ ID NO: 5526838 - DNA, 25 bp, Homo sapien
gtggtgactgaaaggtaaattatgt

SEQ ID NO: 5526839 - DNA, 25 bp, Homo sapien
cccaccccctctgtgatgacaaacc

SEQ ID NO: 5526840 - DNA, 25 bp, Homo sapien
actagtcctaggttgaaaggacatc

SEQ ID NO: 5526841 - DNA, 25 bp, Homo sapien
atcattgtgacagagatcagattac

SEQ ID NO: 5526842 - DNA, 25 bp, Homo sapien
tgaagcaaacatatgaaagtgagat

SEQ ID NO: 5526843 - DNA, 25 bp, Homo sapien
aaaaaatgaaggttgtcactagtcc

SEQ ID NO: 5526844 - DNA, 25 bp, Homo sapien
aggttgaaaggacatcactcaatac

SEQ ID NO: 5526845 - DNA, 25 bp, Homo sapien
aacatatgaaagtgagatagttctt

SEQ ID NO: 5526846 - DNA, 25 bp, Homo sapien
gacaggataatggcttacatgcacc

SEQ ID NO: 5526847 - DNA, 25 bp, Homo sapien
ctagatacatctaagggtaaattac

SEQ ID NO: 5526848 - DNA, 25 bp, Homo sapien
cagctctgaaaaaatgaaggttgtc

SEQ ID NO: 5526849 - DNA, 25 bp, Homo sapien
agatatttacaaggtcaacagtgac

SEQ ID NO: 5526850 - DNA, 25 bp, Homo sapien
aatcggttcattaagacaggataat

SEQ ID NO: 5526851 - DNA, 25 bp, Homo sapien
aaacatagttacaccacttgcagtt

SEQ ID NO: 5526852 - DNA, 25 bp, Homo sapien
gttaaactaagaatgcaaatgtgta

SEQ ID NO: 5526853 - DNA, 25 bp, Homo sapien
aatgcgatcattgaaaaacatagtt

SEQ ID NO: 5526854 - DNA, 25 bp, Homo sapien
aggaacttaatggtataataggact

SEQ ID NO: 5526855 - DNA, 25 bp, Homo sapien
tataattgctgcataataggaactt

SEQ ID NO: 5526856 - DNA, 25 bp, Homo sapien
taggacttatgtttcaaatgcgatc

SEQ ID NO: 5526857 - DNA, 25 bp, Homo sapien
cacattactataacttgggcagtac

SEQ ID NO: 5526858 - DNA, 25 bp, Homo sapien
ttaaatgttatgatgaagcattaat

SEQ ID NO: 5526859 - DNA, 25 bp, Homo sapien
tgcaaatgtgtaagttaactaccct

SEQ ID NO: 5526860 - DNA, 25 bp, Homo sapien
agtggctttaagtttgaaattctcc

SEQ ID NO: 5526861 - DNA, 25 bp, Homo sapien
cttttagtgtctcaaaaacacccac

SEQ ID NO: 5526862 - DNA, 25 bp, Homo sapien
gctttgtgtttgtgctgaatggagc

SEQ ID NO: 5526863 - DNA, 25 bp, Homo sapien
caggcagtccaatttgtgaaaagaa

SEQ ID NO: 5526864 - DNA, 25 bp, Homo sapien
tgaatggagcaaaagtatataaata

SEQ ID NO: 5526865 - DNA, 25 bp, Homo sapien
acttagacatttggagagttgggtc

SEQ ID NO: 5526866 - DNA, 25 bp, Homo sapien
gtgatatatggccaaaccaaaggtc

SEQ ID NO: 5526867 - DNA, 25 bp, Homo sapien
aagctatcacaacctcagaggctcc

SEQ ID NO: 5526868 - DNA, 25 bp, Homo sapien
tgagcagcagtgattcattccagcc

SEQ ID NO: 5526869 - DNA, 25 bp, Homo sapien
gagagttgggtcactagccattcct

SEQ ID NO: 5526870 - DNA, 25 bp, Homo sapien
atgttattggtattacaggcagtcc

SEQ ID NO: 5526871 - DNA, 25 bp, Homo sapien
ctgacaacaagaaaataccccttcc

SEQ ID NO: 5526872 - DNA, 25 bp, Homo sapien
aagaacctttgacttgagcagcagt

SEQ ID NO: 5526873 - DNA, 25 bp, Homo sapien
aaaacaaagcaaggagctctatttt

SEQ ID NO: 5526874 - DNA, 25 bp, Homo sapien
catattatgaaatgagtgaaaaggg

SEQ ID NO: 5526875 - DNA, 25 bp, Homo sapien
tgctgcttggccataatccactaca

SEQ ID NO: 5526876 - DNA, 25 bp, Homo sapien
gctcactgcttaactggattgtatt

SEQ ID NO: 5526877 - DNA, 25 bp, Homo sapien
tgagtgaaaagggcataataatttt

SEQ ID NO: 5526878 - DNA, 25 bp, Homo sapien
ggaaaacaatgggtgctcactgctt

SEQ ID NO: 5526879 - DNA, 25 bp, Homo sapien
tcaacacggcaatacaaacatatta

SEQ ID NO: 5526880 - DNA, 25 bp, Homo sapien
attccatggggtccacaataaactc

SEQ ID NO: 5526881 - DNA, 25 bp, Homo sapien
tgattaagacttaactagctactgc

SEQ ID NO: 5526882 - DNA, 25 bp, Homo sapien
aaattaacttacagcagaggtgaac

SEQ ID NO: 5526883 - DNA, 25 bp, Homo sapien
tttaatcacattccatggggtccac

SEQ ID NO: 5526884 - DNA, 25 bp, Homo sapien
tctacccgcctaccctgagcaagcg

SEQ ID NO: 5526885 - DNA, 25 bp, Homo sapien
cctgagcaagcgagttgttcctctt

SEQ ID NO: 5526886 - DNA, 25 bp, Homo sapien
tctcccgcccccaaggagacagaga

SEQ ID NO: 5526887 - DNA, 25 bp, Homo sapien
ccgcctaccctgagcaagcgagttg

SEQ ID NO: 5526888 - DNA, 25 bp, Homo sapien
ctgtttattccagcggaagcagccg

SEQ ID NO: 5526889 - DNA, 25 bp, Homo sapien
gggcaggtctgcggttactttcaac

SEQ ID NO: 5526890 - DNA, 25 bp, Homo sapien
cagaagaatgggatgtccttttttc

SEQ ID NO: 5526891 - DNA, 25 bp, Homo sapien
gctgccccacatcagggaccctttc

SEQ ID NO: 5526892 - DNA, 25 bp, Homo sapien
tgctttgctcacagaagaatgggat

SEQ ID NO: 5526893 - DNA, 25 bp, Homo sapien
gagcctgagctgtctccccgtctcc

SEQ ID NO: 5526894 - DNA, 25 bp, Homo sapien
gaaagtgtgctttgctcacagaaga

SEQ ID NO: 5526895 - DNA, 25 bp, Homo sapien
gacgctccctcacccggggtccgac

SEQ ID NO: 5526896 - DNA, 25 bp, Homo sapien
gtcggaccccgggtgagggagcgtc

SEQ ID NO: 5526897 - DNA, 25 bp, Homo sapien
tcacgggttggctgagatataccta

SEQ ID NO: 5526898 - DNA, 25 bp, Homo sapien
agggtaaagaaacttggttgacaga

SEQ ID NO: 5526899 - DNA, 25 bp, Homo sapien
gtgtactctcgttgaatggaaggct

SEQ ID NO: 5526900 - DNA, 25 bp, Homo sapien
agtacgattgagtaaaagtaaagct

SEQ ID NO: 5526901 - DNA, 25 bp, Homo sapien
ttcagcactgtggcaacgtgtactc

SEQ ID NO: 5526902 - DNA, 25 bp, Homo sapien
ccctgggaagagcattacactttca

SEQ ID NO: 5526903 - DNA, 25 bp, Homo sapien
gaatggaaggctatcagaggcctta

SEQ ID NO: 5526904 - DNA, 25 bp, Homo sapien
taaaatgaggggatcaatgtgttac

SEQ ID NO: 5526905 - DNA, 25 bp, Homo sapien
ctactgttttatgagaggcctgtgc

SEQ ID NO: 5526906 - DNA, 25 bp, Homo sapien
cctactcctgatagtgctggtgggg

SEQ ID NO: 5526907 - DNA, 25 bp, Homo sapien
aaaggtcatcagggaaactatctct

SEQ ID NO: 5526908 - DNA, 25 bp, Homo sapien
cgtgcatggagcatctgtgcctcta

SEQ ID NO: 5526909 - DNA, 25 bp, Homo sapien
aatgaaccaaaagaagcacatctca

SEQ ID NO: 5526910 - DNA, 25 bp, Homo sapien
gagggcctgaatacccacacccagc

SEQ ID NO: 5526911 - DNA, 25 bp, Homo sapien
ttattgcagtcatagcccagctctc

SEQ ID NO: 5526912 - DNA, 25 bp, Homo sapien
gggactgaactggaactcaactctt

SEQ ID NO: 5526913 - DNA, 25 bp, Homo sapien
cctctattttgaaacggcaccgtcc

SEQ ID NO: 5526914 - DNA, 25 bp, Homo sapien
gcacttgttccagtgcccggggacc

SEQ ID NO: 5526915 - DNA, 25 bp, Homo sapien
aaaacaacacaggatctcgctaacc

SEQ ID NO: 5526916 - DNA, 25 bp, Homo sapien
gcacatctcaggtgaaggaacaact

SEQ ID NO: 5526917 - DNA, 25 bp, Homo sapien
tgttgtcaagccagaaatgaaccaa

SEQ ID NO: 5526918 - DNA, 25 bp, Homo sapien
tcgctaacctgcgggcaggactaac

SEQ ID NO: 5526919 - DNA, 25 bp, Homo sapien
agcttctaagccacatggaagtgct

SEQ ID NO: 5526920 - DNA, 25 bp, Homo sapien
aaataccatgctgactgcccagttc

SEQ ID NO: 5526921 - DNA, 25 bp, Homo sapien
tttagctgtgattcaggcaagtgac

SEQ ID NO: 5526922 - DNA, 25 bp, Homo sapien
caccaccaggatttgcagagtggcc

SEQ ID NO: 5526923 - DNA, 25 bp, Homo sapien
cagagtggccaatgacagttcacaa

SEQ ID NO: 5526924 - DNA, 25 bp, Homo sapien
aataaatcaggagctgtgagtcctc

SEQ ID NO: 5526925 - DNA, 25 bp, Homo sapien
gacgcctctggatcagcctcctgtc

SEQ ID NO: 5526926 - DNA, 25 bp, Homo sapien
ggcaagtgactagacgcctctggat

SEQ ID NO: 5526927 - DNA, 25 bp, Homo sapien
cagggaaggttggcattgcttatat

SEQ ID NO: 5526928 - DNA, 25 bp, Homo sapien
tccatgaacattactgtggtccact

SEQ ID NO: 5526929 - DNA, 25 bp, Homo sapien
tggaagtgcttcagccaacaaatcc

SEQ ID NO: 5526930 - DNA, 25 bp, Homo sapien
gatctcgctataggggttctcgcta

SEQ ID NO: 5526931 - DNA, 25 bp, Homo sapien
cggcatgatcaccctcaaggtggac

SEQ ID NO: 5526932 - DNA, 25 bp, Homo sapien
cggggcttcgctttcgtccgctttc

SEQ ID NO: 5526933 - DNA, 25 bp, Homo sapien
ggggttctcgctatagccggtctcc

SEQ ID NO: 5526934 - DNA, 25 bp, Homo sapien
cgctatagccggtctccctacagcc

SEQ ID NO: 5526935 - DNA, 25 bp, Homo sapien
cagccgatctcgctataggggttct

SEQ ID NO: 5526936 - DNA, 25 bp, Homo sapien
tcgtccgctttcacgaccggcgcga

SEQ ID NO: 5526937 - DNA, 25 bp, Homo sapien
acctctcccgacagcttgaggcgcg

SEQ ID NO: 5526938 - DNA, 25 bp, Homo sapien
gacctaccgcacctctcccgacagc

SEQ ID NO: 5526939 - DNA, 25 bp, Homo sapien
atctccttacagccggtcgcgctac

SEQ ID NO: 5526940 - DNA, 25 bp, Homo sapien
ccctacagccgatctccttacagcc

SEQ ID NO: 5526941 - DNA, 25 bp, Homo sapien
gtttcggcctagccgcgctctacgc

SEQ ID NO: 5526942 - DNA, 25 bp, Homo sapien
gcaagttcgcgctgctctggtcact

SEQ ID NO: 5526943 - DNA, 25 bp, Homo sapien
tctacgcaccggtgttgctgctgcg

SEQ ID NO: 5526944 - DNA, 25 bp, Homo sapien
ctgggccttcgcagcacgctgctca

SEQ ID NO: 5526945 - DNA, 25 bp, Homo sapien
cttcgcagcacgctgctcacggtgc

SEQ ID NO: 5526946 - DNA, 25 bp, Homo sapien
cgcgcgcgcaagttcgcgctgctct

SEQ ID NO: 5526947 - DNA, 25 bp, Homo sapien
ctgctggctgcactgtgtttcggcc

SEQ ID NO: 5526948 - DNA, 25 bp, Homo sapien
cgctctacgcaccggtgttgctgct

SEQ ID NO: 5526949 - DNA, 25 bp, Homo sapien
cggcccgcgctgctctacatggcag

SEQ ID NO: 5526950 - DNA, 25 bp, Homo sapien
tgcactgtgtttcggcctagccgcg

SEQ ID NO: 5526951 - DNA, 25 bp, Homo sapien
cgctgctctacatggcagcgctggg

SEQ ID NO: 5526952 - DNA, 25 bp, Homo sapien
caaaatcaacaacctacaaatctct

SEQ ID NO: 5526953 - DNA, 25 bp, Homo sapien
cagccgtatagtagtagtaggcggc

SEQ ID NO: 5526954 - DNA, 25 bp, Homo sapien
cgtcttctcgcagccgtatagtagt

SEQ ID NO: 5526955 - DNA, 25 bp, Homo sapien
tgtcgtcttctcgcagccgtatagt

SEQ ID NO: 5526956 - DNA, 25 bp, Homo sapien
attctcttcagaaaaatgaccattt

SEQ ID NO: 5526957 - DNA, 25 bp, Homo sapien
ttctgtcgtcttctcgcagccgtat

SEQ ID NO: 5526958 - DNA, 25 bp, Homo sapien
ataatatatatccccttctgtcgtc

SEQ ID NO: 5526959 - DNA, 25 bp, Homo sapien
gcatttcaagcaaaatattctcttc

SEQ ID NO: 5526960 - DNA, 25 bp, Homo sapien
caacctacaaatctctttcagtcct

SEQ ID NO: 5526961 - DNA, 25 bp, Homo sapien
ctcgcagccgtatagtagtagtagg

SEQ ID NO: 5526962 - DNA, 25 bp, Homo sapien
cttctcgcagccgtatagtagtagt

SEQ ID NO: 5526963 - DNA, 25 bp, Homo sapien
tgttgggtcaactgataagcagtgc

SEQ ID NO: 5526964 - DNA, 25 bp, Homo sapien
tcaatgcagacttgctcccagcatc

SEQ ID NO: 5526965 - DNA, 25 bp, Homo sapien
ggaagaagacatcctcagcccacca

SEQ ID NO: 5526966 - DNA, 25 bp, Homo sapien
gataagcagtgcagactcttcattt

SEQ ID NO: 5526967 - DNA, 25 bp, Homo sapien
tgaccatattgcatcctggacagga

SEQ ID NO: 5526968 - DNA, 25 bp, Homo sapien
caaattccagagaccttgccttcag

SEQ ID NO: 5526969 - DNA, 25 bp, Homo sapien
tatgggaaagtagctattacagacc

SEQ ID NO: 5526970 - DNA, 25 bp, Homo sapien
aaagaagacctttagccactcagtg

SEQ ID NO: 5526971 - DNA, 25 bp, Homo sapien
tttgcatctggcattgtgttgggac

SEQ ID NO: 5526972 - DNA, 25 bp, Homo sapien
cagggttggtagtaaagcaacagaa

SEQ ID NO: 5526973 - DNA, 25 bp, Homo sapien
gtacagacaagagctatatgggaaa

SEQ ID NO: 5526974 - DNA, 25 bp, Homo sapien
taaaagatcataaaagatcagcctc

SEQ ID NO: 5526975 - DNA, 25 bp, Homo sapien
ctgagatttgattgtgttaagtgtc

SEQ ID NO: 5526976 - DNA, 25 bp, Homo sapien
agcatatgacatagaagtctgtttc

SEQ ID NO: 5526977 - DNA, 25 bp, Homo sapien
tgtgggtccctcagattaatccttt

SEQ ID NO: 5526978 - DNA, 25 bp, Homo sapien
tgcttttatagcaggaagtgtgaag

SEQ ID NO: 5526979 - DNA, 25 bp, Homo sapien
agatcagcctcaaaatcacaatgaa

SEQ ID NO: 5526980 - DNA, 25 bp, Homo sapien
tgttaagtgtctgtgggtccctcag

SEQ ID NO: 5526981 - DNA, 25 bp, Homo sapien
tctcaggatgctgtgtaatccaccc

SEQ ID NO: 5526982 - DNA, 25 bp, Homo sapien
tactgtctaaagattcattggtctc

SEQ ID NO: 5526983 - DNA, 25 bp, Homo sapien
gtgctgtaggattacatggccatgc

SEQ ID NO: 5526984 - DNA, 25 bp, Homo sapien
tgtcaaatagcagcaagatgtcttc

SEQ ID NO: 5526985 - DNA, 25 bp, Homo sapien
tttcctgttgggctcacgcaccact

SEQ ID NO: 5526986 - DNA, 25 bp, Homo sapien
cagctctaagccgctggtcgtcctg

SEQ ID NO: 5526987 - DNA, 25 bp, Homo sapien
acgcaccactacgtgccctgcagcc

SEQ ID NO: 5526988 - DNA, 25 bp, Homo sapien
gcttctcgagggttctctgcttcac

SEQ ID NO: 5526989 - DNA, 25 bp, Homo sapien
gattcggggaagtatgcctttcctg

SEQ ID NO: 5526990 - DNA, 25 bp, Homo sapien
ccgagagaactcccacaggctcttc

SEQ ID NO: 5526991 - DNA, 25 bp, Homo sapien
ttcactaactcccgagagaactccc

SEQ ID NO: 5526992 - DNA, 25 bp, Homo sapien
acaggctcttcctgctggtgcaagc

SEQ ID NO: 5526993 - DNA, 25 bp, Homo sapien
cgtcctgcacctggtcctggagatg

SEQ ID NO: 5526994 - DNA, 25 bp, Homo sapien
ccctgcagcctcagctctaagccgc

SEQ ID NO: 5526995 - DNA, 25 bp, Homo sapien
tctgacccagaaccctgaaaagctg

SEQ ID NO: 5526996 - DNA, 25 bp, Homo sapien
gacggtccccgcacactctccggta

SEQ ID NO: 5526997 - DNA, 25 bp, Homo sapien
taccggagagtgtgcggggaccgtc

SEQ ID NO: 5526998 - DNA, 25 bp, Homo sapien
cgtagaccgacggtccccgcacact

SEQ ID NO: 5526999 - DNA, 25 bp, Homo sapien
agtgtgcggggaccgtcggtctacg

SEQ ID NO: 5527000 - DNA, 25 bp, Homo sapien
cagttcacttggaccaacgtggttt

SEQ ID NO: 5527001 - DNA, 25 bp, Homo sapien
gctttgcaagctaatgtaagtacac

SEQ ID NO: 5527002 - DNA, 25 bp, Homo sapien
caaggtcatctgaacgaacatattc

SEQ ID NO: 5527003 - DNA, 25 bp, Homo sapien
accactgcaggaaatgaagtgattc

SEQ ID NO: 5527004 - DNA, 25 bp, Homo sapien
tccgtgaaagaaatgttgaattttc

SEQ ID NO: 5527005 - DNA, 25 bp, Homo sapien
atggaacatgttcagtaactcatac

SEQ ID NO: 5527006 - DNA, 25 bp, Homo sapien
catacacatgtaacacagaagtctg

SEQ ID NO: 5527007 - DNA, 25 bp, Homo sapien
ggggcagtcctttgaactaagattc

SEQ ID NO: 5527008 - DNA, 25 bp, Homo sapien
ctctcaggaaccactgcaggaaatg

SEQ ID NO: 5527009 - DNA, 25 bp, Homo sapien
aatgccagaggctttaacagtttct

SEQ ID NO: 5527010 - DNA, 25 bp, Homo sapien
gaactaaccttcaatgccagaggct

SEQ ID NO: 5527011 - DNA, 25 bp, Homo sapien
tgttacaatgaatgtctgagtatat

SEQ ID NO: 5527012 - DNA, 25 bp, Homo sapien
aaattcaggggcactggagatatat

SEQ ID NO: 5527013 - DNA, 25 bp, Homo sapien
tgctgaacaaaaagtctgcaataaa

SEQ ID NO: 5527014 - DNA, 25 bp, Homo sapien
gagtgggggaaatgattttacatac

SEQ ID NO: 5527015 - DNA, 25 bp, Homo sapien
catgtgattattgaaaccttgtatt

SEQ ID NO: 5527016 - DNA, 25 bp, Homo sapien
tgaaacactaaatgttgctgaacaa

SEQ ID NO: 5527017 - DNA, 25 bp, Homo sapien
ttagtacagtcaatgtggtaaatac

SEQ ID NO: 5527018 - DNA, 25 bp, Homo sapien
catcaaacataaaattcaggggcac

SEQ ID NO: 5527019 - DNA, 25 bp, Homo sapien
agagttcatgaaaatataaagtgtt

SEQ ID NO: 5527020 - DNA, 25 bp, Homo sapien
tcatggttaggttactcccgaaatc

SEQ ID NO: 5527021 - DNA, 25 bp, Homo sapien
actccctccagtgagtgggggaaat

SEQ ID NO: 5527022 - DNA, 25 bp, Homo sapien
gctgggcacagtcagcccttcccgc

SEQ ID NO: 5527023 - DNA, 25 bp, Homo sapien
gtccttctctgatcacactgtggcc

SEQ ID NO: 5527024 - DNA, 25 bp, Homo sapien
tctgactccatcctgggggagcagg

SEQ ID NO: 5527025 - DNA, 25 bp, Homo sapien
cattgaggtgcgttccccactgtct

SEQ ID NO: 5527026 - DNA, 25 bp, Homo sapien
ctctgatcacactgtggccccagct

SEQ ID NO: 5527027 - DNA, 25 bp, Homo sapien
aggaggtggccctctccctatggct

SEQ ID NO: 5527028 - DNA, 25 bp, Homo sapien
ccctctccctatggctgtccttctc

SEQ ID NO: 5527029 - DNA, 25 bp, Homo sapien
acctccattgaggtgcgttccccac

SEQ ID NO: 5527030 - DNA, 25 bp, Homo sapien
ggcatctcgctgaccttgagccggg

SEQ ID NO: 5527031 - DNA, 25 bp, Homo sapien
tggactcgcgtgtagcctctctgga

SEQ ID NO: 5527032 - DNA, 25 bp, Homo sapien
gtgatgggcatctcgctgaccttga

SEQ ID NO: 5527033 - DNA, 25 bp, Homo sapien
ggccagggcaatgttatgcaatcca

SEQ ID NO: 5527034 - DNA, 25 bp, Homo sapien
tattctgtatttaggggaacatctt

SEQ ID NO: 5527035 - DNA, 25 bp, Homo sapien
tctaatcaatagaaatagaagcaac

SEQ ID NO: 5527036 - DNA, 25 bp, Homo sapien
aagccggacaccttcccggctgacc

SEQ ID NO: 5527037 - DNA, 25 bp, Homo sapien
gggtagtgtctgttgtcaaggtcta

SEQ ID NO: 5527038 - DNA, 25 bp, Homo sapien
tgaactgtacagtgtgtgtctattc

SEQ ID NO: 5527039 - DNA, 25 bp, Homo sapien
cagagggccagaatgtcttttcatc

SEQ ID NO: 5527040 - DNA, 25 bp, Homo sapien
tgcaatccagtcatccagaagctgt

SEQ ID NO: 5527041 - DNA, 25 bp, Homo sapien
gttgtcaaggtctaagccggacacc

SEQ ID NO: 5527042 - DNA, 25 bp, Homo sapien
ctgcatcctagtacaatgtgaggcc

SEQ ID NO: 5527043 - DNA, 25 bp, Homo sapien
aaggtgaaaggttagtagatttaga

SEQ ID NO: 5527044 - DNA, 25 bp, Homo sapien
ctgacgtgctcagcttaggagtctc

SEQ ID NO: 5527045 - DNA, 25 bp, Homo sapien
cggtctttctgtctgcggtggaggt

SEQ ID NO: 5527046 - DNA, 25 bp, Homo sapien
tgaaaagttggaagcaccaaacacc

SEQ ID NO: 5527047 - DNA, 25 bp, Homo sapien
cttaggagtctcaggtctccccggg

SEQ ID NO: 5527048 - DNA, 25 bp, Homo sapien
cttgggtccgcccggtctttctgtc

SEQ ID NO: 5527049 - DNA, 25 bp, Homo sapien
tctgttctcggctttgacctgtgac

SEQ ID NO: 5527050 - DNA, 25 bp, Homo sapien
gctgccctgccgccagggcttgagc

SEQ ID NO: 5527051 - DNA, 25 bp, Homo sapien
ctttgacctgtgacctccgaccttc

SEQ ID NO: 5527052 - DNA, 25 bp, Homo sapien
cccaccccagcttctgttctcggct

SEQ ID NO: 5527053 - DNA, 25 bp, Homo sapien
gcagccaccctcttccggggactgg

SEQ ID NO: 5527054 - DNA, 25 bp, Homo sapien
cgcccgatgctcaggcccctctttc

SEQ ID NO: 5527055 - DNA, 25 bp, Homo sapien
tctgccacagtctctctgttgtccc

SEQ ID NO: 5527056 - DNA, 25 bp, Homo sapien
gattctcatcccttacagctgactc

SEQ ID NO: 5527057 - DNA, 25 bp, Homo sapien
acagctgactcttccaggcaatttc

SEQ ID NO: 5527058 - DNA, 25 bp, Homo sapien
attcaaactaatacccatgccgtgt

SEQ ID NO: 5527059 - DNA, 25 bp, Homo sapien
tgtccccacatctacccaacttcct

SEQ ID NO: 5527060 - DNA, 25 bp, Homo sapien
ctcactcatgtttaagatcttgtta

SEQ ID NO: 5527061 - DNA, 25 bp, Homo sapien
ggttggggcaacagattctcactca

SEQ ID NO: 5527062 - DNA, 25 bp, Homo sapien
ttccatagatctgcagtcctgcctc

SEQ ID NO: 5527063 - DNA, 25 bp, Homo sapien
acccaacttcctgtactgttgccct

SEQ ID NO: 5527064 - DNA, 25 bp, Homo sapien
aggcaatttccatagatctgcagtc

SEQ ID NO: 5527065 - DNA, 25 bp, Homo sapien
catgccgtgttttttaccttggatt

SEQ ID NO: 5527066 - DNA, 25 bp, Homo sapien
ctcccacctagaaatgggaagagcc

SEQ ID NO: 5527067 - DNA, 25 bp, Homo sapien
tggtaaaaattaatgagagactgca

SEQ ID NO: 5527068 - DNA, 25 bp, Homo sapien
ggtagactcacatgggccactgaaa

SEQ ID NO: 5527069 - DNA, 25 bp, Homo sapien
ctagctgaagaggatactgaagctg

SEQ ID NO: 5527070 - DNA, 25 bp, Homo sapien
cataagactggcatagatttgaaac

SEQ ID NO: 5527071 - DNA, 25 bp, Homo sapien
aagaggatgaaccaatgaagatact

SEQ ID NO: 5527072 - DNA, 25 bp, Homo sapien
agaggcagattatcagggtaaatga

SEQ ID NO: 5527073 - DNA, 25 bp, Homo sapien
gttagggcaatcctagctgaagagg

SEQ ID NO: 5527074 - DNA, 25 bp, Homo sapien
tggtgggaccaatcagttacagtaa

SEQ ID NO: 5527075 - DNA, 25 bp, Homo sapien
ctgtgaaagttaaaagttagggcaa

SEQ ID NO: 5527076 - DNA, 25 bp, Homo sapien
ggaagagcctaaagatatgggtcat

SEQ ID NO: 5527077 - DNA, 25 bp, Homo sapien
agtaacaaatccgtaaatcacaaac

SEQ ID NO: 5527078 - DNA, 25 bp, Homo sapien
catagtagtaaattcacagtagtga

SEQ ID NO: 5527079 - DNA, 25 bp, Homo sapien
ggtagtgaagtttgagcagtaattt

SEQ ID NO: 5527080 - DNA, 25 bp, Homo sapien
agtttaatggacttgcctgcaggac

SEQ ID NO: 5527081 - DNA, 25 bp, Homo sapien
tctctgctgcaggactatttaaata

SEQ ID NO: 5527082 - DNA, 25 bp, Homo sapien
aatcactttacaatcgcagggtctc

SEQ ID NO: 5527083 - DNA, 25 bp, Homo sapien
tataatgaaatacgaccacaaggtt

SEQ ID NO: 5527084 - DNA, 25 bp, Homo sapien
tctagtaaggcttccagggtagtga

SEQ ID NO: 5527085 - DNA, 25 bp, Homo sapien
acgaccacaaggttacatagtagta

SEQ ID NO: 5527086 - DNA, 25 bp, Homo sapien
catttactctagcgggagaagccag

SEQ ID NO: 5527087 - DNA, 25 bp, Homo sapien
tcagagtcctaaagcaagaaagagt

SEQ ID NO: 5527088 - DNA, 25 bp, Homo sapien
gagttccaaacaaatactacagaca

SEQ ID NO: 5527089 - DNA, 25 bp, Homo sapien
tgtctgtagtatttgtttggaactc

SEQ ID NO: 5527090 - DNA, 25 bp, Homo sapien
ggatcctcgctccgttgcacgggcg

SEQ ID NO: 5527091 - DNA, 25 bp, Homo sapien
ccgcaccctccgagccctcggagcc

SEQ ID NO: 5527092 - DNA, 25 bp, Homo sapien
gcgcggatcctcgctccgttgcacg

SEQ ID NO: 5527093 - DNA, 25 bp, Homo sapien
ctccgagccctcggagccctccagg

SEQ ID NO: 5527094 - DNA, 25 bp, Homo sapien
atgaataaatgaatcgtgtcatctg

SEQ ID NO: 5527095 - DNA, 25 bp, Homo sapien
tgcacgggcgccttaagttattgga

SEQ ID NO: 5527096 - DNA, 25 bp, Homo sapien
ctatgtatttatttcgctggttctt

SEQ ID NO: 5527097 - DNA, 25 bp, Homo sapien
gggcgccttaagttattggactatc

SEQ ID NO: 5527098 - DNA, 25 bp, Homo sapien
attggactatctaatatctatgtat

SEQ ID NO: 5527099 - DNA, 25 bp, Homo sapien
ctgcagcagaagaacttcccgtgcg

SEQ ID NO: 5527100 - DNA, 25 bp, Homo sapien
tatttcgctggttctttgtagtcac

SEQ ID NO: 5527101 - DNA, 25 bp, Homo sapien
ttttgaccaaaaaggcagaagattg

SEQ ID NO: 5527102 - DNA, 25 bp, Homo sapien
gaagcaggggcttttacaaatcttg

SEQ ID NO: 5527103 - DNA, 25 bp, Homo sapien
attgatttaattgaagcaggggctt

SEQ ID NO: 5527104 - DNA, 25 bp, Homo sapien
caaatgaaaccaacctggagagttc

SEQ ID NO: 5527105 - DNA, 25 bp, Homo sapien
gcccgtgaaggtagttgtcctggga

SEQ ID NO: 5527106 - DNA, 25 bp, Homo sapien
gctgctgtgctggcctataacaatc

SEQ ID NO: 5527107 - DNA, 25 bp, Homo sapien
gggaaggattaaatgcattagatgc

SEQ ID NO: 5527108 - DNA, 25 bp, Homo sapien
acccatcacaagagaatgctgctta

SEQ ID NO: 5527109 - DNA, 25 bp, Homo sapien
gtgaaatactatggaaaagcatctc

SEQ ID NO: 5527110 - DNA, 25 bp, Homo sapien
cagatatggctgaacatgatgtgac

SEQ ID NO: 5527111 - DNA, 25 bp, Homo sapien
aaatggtggtgtaaaacccaatatc

SEQ ID NO: 5527112 - DNA, 25 bp, Homo sapien
tgggccccactgatgtgggcaagtc

SEQ ID NO: 5527113 - DNA, 25 bp, Homo sapien
tctacatcgagcggcctgcagatgt

SEQ ID NO: 5527114 - DNA, 25 bp, Homo sapien
actcacacagccttggaacagatgc

SEQ ID NO: 5527115 - DNA, 25 bp, Homo sapien
gcagatgtcgaagagggtttctcta

SEQ ID NO: 5527116 - DNA, 25 bp, Homo sapien
gggccagggttctgtgtccatccct

SEQ ID NO: 5527117 - DNA, 25 bp, Homo sapien
gtgggcaagtctacagtgtgtcgcc

SEQ ID NO: 5527118 - DNA, 25 bp, Homo sapien
gtaccatgggggccctctacatcga

SEQ ID NO: 5527119 - DNA, 25 bp, Homo sapien
agtgatggtagtgggccccactgat

SEQ ID NO: 5527120 - DNA, 25 bp, Homo sapien
gtgttcaaccaaaggtgtgaggtga

SEQ ID NO: 5527121 - DNA, 25 bp, Homo sapien
attaacacctgtggctgggtcaagg

SEQ ID NO: 5527122 - DNA, 25 bp, Homo sapien
tcaactacgcagtgcgtttgggccg

SEQ ID NO: 5527123 - DNA, 25 bp, Homo sapien
ttgatacaactgatgaaccaatatt

SEQ ID NO: 5527124 - DNA, 25 bp, Homo sapien
gaaaaattgagcagatagcacagag

SEQ ID NO: 5527125 - DNA, 25 bp, Homo sapien
agcacagagagctcccacgtactct

SEQ ID NO: 5527126 - DNA, 25 bp, Homo sapien
atgctatgggttttgaccaatgccc

SEQ ID NO: 5527127 - DNA, 25 bp, Homo sapien
ttcagcacacacagtttccccgatt

SEQ ID NO: 5527128 - DNA, 25 bp, Homo sapien
ttagagcaaacgctttgtgctgtac

SEQ ID NO: 5527129 - DNA, 25 bp, Homo sapien
ttgtgctgtacatgctatgggtttt

SEQ ID NO: 5527130 - DNA, 25 bp, Homo sapien
ttaacatctggcatcagtgtggtac

SEQ ID NO: 5527131 - DNA, 25 bp, Homo sapien
ttcccaaggaatagatgatttaatt

SEQ ID NO: 5527132 - DNA, 25 bp, Homo sapien
tcagtgtggtacatttgatacaact

SEQ ID NO: 5527133 - DNA, 25 bp, Homo sapien
tcagtcccatatggtacaaaatacc

SEQ ID NO: 5527134 - DNA, 25 bp, Homo sapien
gcatggggacaaatggctcattttc

SEQ ID NO: 5527135 - DNA, 25 bp, Homo sapien
taaatcattgtaatttgggagcatg

SEQ ID NO: 5527136 - DNA, 25 bp, Homo sapien
gagctattgcattttggaggaaaat

SEQ ID NO: 5527137 - DNA, 25 bp, Homo sapien
aataaacatagaagtagcatactaa

SEQ ID NO: 5527138 - DNA, 25 bp, Homo sapien
tggaggaaaattactatgggaagag

SEQ ID NO: 5527139 - DNA, 25 bp, Homo sapien
gaagtagcatactaaaatgagctgc

SEQ ID NO: 5527140 - DNA, 25 bp, Homo sapien
tttgaaaagggcattcattcccata

SEQ ID NO: 5527141 - DNA, 25 bp, Homo sapien
atatgaatgcacaaagttagtcctt

SEQ ID NO: 5527142 - DNA, 25 bp, Homo sapien
tatgggaagagttggtactcatgaa

SEQ ID NO: 5527143 - DNA, 25 bp, Homo sapien
aatcaaagcgtctgcagttgaggga

SEQ ID NO: 5527144 - DNA, 25 bp, Homo sapien
aaacataaacaagcactacagcact

SEQ ID NO: 5527145 - DNA, 25 bp, Homo sapien
tacaaaagcgttaagagccaggaaa

SEQ ID NO: 5527146 - DNA, 25 bp, Homo sapien
gtttcctgaacactgcaaaacaagc

SEQ ID NO: 5527147 - DNA, 25 bp, Homo sapien
gataacacacgagtcagtgagattc

SEQ ID NO: 5527148 - DNA, 25 bp, Homo sapien
agagccaggaaaatggtgtttcctg

SEQ ID NO: 5527149 - DNA, 25 bp, Homo sapien
tcaatgggcacaacatataagtagt

SEQ ID NO: 5527150 - DNA, 25 bp, Homo sapien
tgaaatgagaagcaatatagcagtc

SEQ ID NO: 5527151 - DNA, 25 bp, Homo sapien
agcagtcaggctatatgcatgattt

SEQ ID NO: 5527152 - DNA, 25 bp, Homo sapien
taccaatacaaaagcgttaagagcc

SEQ ID NO: 5527153 - DNA, 25 bp, Homo sapien
attcacagatgatagtcaatgggca

SEQ ID NO: 5527154 - DNA, 25 bp, Homo sapien
tctgttccagtagttagtgttcata

SEQ ID NO: 5527155 - DNA, 25 bp, Homo sapien
cacccaggcctgatatagctttgat

SEQ ID NO: 5527156 - DNA, 25 bp, Homo sapien
gctttctacggcatcacgtccaacc

SEQ ID NO: 5527157 - DNA, 25 bp, Homo sapien
gctgctcttcatgggcctcacctac

SEQ ID NO: 5527158 - DNA, 25 bp, Homo sapien
aacctggtgctattcctgaacgggg

SEQ ID NO: 5527159 - DNA, 25 bp, Homo sapien
tattcctgaacggggcgccgttctg

SEQ ID NO: 5527160 - DNA, 25 bp, Homo sapien
gccgaccaggttaaagatcgaggtc

SEQ ID NO: 5527161 - DNA, 25 bp, Homo sapien
tcacctacctgggctcgccgttcgg

SEQ ID NO: 5527162 - DNA, 25 bp, Homo sapien
tgctgagcctggcgctctacctgct

SEQ ID NO: 5527163 - DNA, 25 bp, Homo sapien
atcacgtccaacctggtgctattcc

SEQ ID NO: 5527164 - DNA, 25 bp, Homo sapien
aggccaacatcacgcccttcggcgc

SEQ ID NO: 5527165 - DNA, 25 bp, Homo sapien
ctggagcgcgccgctttctacggca

SEQ ID NO: 5527166 - DNA, 25 bp, Homo sapien
catcacgcccttcggcgccgaccag

SEQ ID NO: 5527167 - DNA, 25 bp, Homo sapien
ttcatctgtatgatgagagacttac

SEQ ID NO: 5527168 - DNA, 25 bp, Homo sapien
tagcaatacatacaagtggttttcc

SEQ ID NO: 5527169 - DNA, 25 bp, Homo sapien
ttatagccaaatcatccagttagcc

SEQ ID NO: 5527170 - DNA, 25 bp, Homo sapien
cagagtctactgcgggttttaaata

SEQ ID NO: 5527171 - DNA, 25 bp, Homo sapien
atagctgaaaacctaaggagtgaca

SEQ ID NO: 5527172 - DNA, 25 bp, Homo sapien
ccagttagccaggagtttgatgact

SEQ ID NO: 5527173 - DNA, 25 bp, Homo sapien
gtaactgcaaccaaatagcaataca

SEQ ID NO: 5527174 - DNA, 25 bp, Homo sapien
ttcatgaaatttttagagtagtgtt

SEQ ID NO: 5527175 - DNA, 25 bp, Homo sapien
gtagatatttcgagagacagatgaa

SEQ ID NO: 5527176 - DNA, 25 bp, Homo sapien
taagctccagagtgtaactgcaacc

SEQ ID NO: 5527177 - DNA, 25 bp, Homo sapien
ctaaggagtgacaatagtacatgtg

SEQ ID NO: 5527178 - DNA, 25 bp, Homo sapien
gggagcctaaatcagaggagtattc

SEQ ID NO: 5527179 - DNA, 25 bp, Homo sapien
gcattatatggattagaaaactctc

SEQ ID NO: 5527180 - DNA, 25 bp, Homo sapien
tacacgaagaagtcatcatttgtcc

SEQ ID NO: 5527181 - DNA, 25 bp, Homo sapien
aaacaataaccaagatgataaatac

SEQ ID NO: 5527182 - DNA, 25 bp, Homo sapien
tgtctgtcgtaaattgagtactcac

SEQ ID NO: 5527183 - DNA, 25 bp, Homo sapien
taagatagacaaatgggaatttaaa

SEQ ID NO: 5527184 - DNA, 25 bp, Homo sapien
cacagagcaggatttagacgttttc

SEQ ID NO: 5527185 - DNA, 25 bp, Homo sapien
atgtcccatggttctagcttttctc

SEQ ID NO: 5527186 - DNA, 25 bp, Homo sapien
atcatatgagcaacctgacccattg

SEQ ID NO: 5527187 - DNA, 25 bp, Homo sapien
ttgtagtctgggagcctaaatcaga

SEQ ID NO: 5527188 - DNA, 25 bp, Homo sapien
aagaagcaagaatatcaaatcactc

SEQ ID NO: 5527189 - DNA, 25 bp, Homo sapien
tgggaaagagaaatacatattatcc

SEQ ID NO: 5527190 - DNA, 25 bp, Homo sapien
tgactccttgcagttaaagtttctt

SEQ ID NO: 5527191 - DNA, 25 bp, Homo sapien
catttatcagggagcactaaaagtc

SEQ ID NO: 5527192 - DNA, 25 bp, Homo sapien
atccatccactaaacacactgtcaa

SEQ ID NO: 5527193 - DNA, 25 bp, Homo sapien
acagaacaacagaccaatttccatc

SEQ ID NO: 5527194 - DNA, 25 bp, Homo sapien
ccatcagcattaacagaacaacaga

SEQ ID NO: 5527195 - DNA, 25 bp, Homo sapien
acagaacaactcctgaggcattctc

SEQ ID NO: 5527196 - DNA, 25 bp, Homo sapien
gaagtttccccaaagaagcatccat

SEQ ID NO: 5527197 - DNA, 25 bp, Homo sapien
tccatcacagaacaactcctgaggc

SEQ ID NO: 5527198 - DNA, 25 bp, Homo sapien
aactatggagcttttgtggtgaggt

SEQ ID NO: 5527199 - DNA, 25 bp, Homo sapien
agggagcactaaaagtcactgactc

SEQ ID NO: 5527200 - DNA, 25 bp, Homo sapien
gtcccgaccgccaccccccatccat

SEQ ID NO: 5527201 - DNA, 25 bp, Homo sapien
atggatggggggtggcggtcgggac

SEQ ID NO: 5527202 - DNA, 25 bp, Homo sapien
tgcaaaggaaagcgtttgggctttg

SEQ ID NO: 5527203 - DNA, 25 bp, Homo sapien
ttccagagttgaaagacccataaca

SEQ ID NO: 5527204 - DNA, 25 bp, Homo sapien
cccttctgggaaaaagtgtcagctg

SEQ ID NO: 5527205 - DNA, 25 bp, Homo sapien
gagccagaaagttaataactggtct

SEQ ID NO: 5527206 - DNA, 25 bp, Homo sapien
ccagcacatgctacgactgtccctg

SEQ ID NO: 5527207 - DNA, 25 bp, Homo sapien
gagtcaggcagacccagattcatac

SEQ ID NO: 5527208 - DNA, 25 bp, Homo sapien
agacagctgtctactgcccctaggc

SEQ ID NO: 5527209 - DNA, 25 bp, Homo sapien
tgaagatacaaacaatgtcatggtc

SEQ ID NO: 5527210 - DNA, 25 bp, Homo sapien
gtgtcagctgctgcactaataatcc

SEQ ID NO: 5527211 - DNA, 25 bp, Homo sapien
cctctgtagatgctcagtgaccggg

SEQ ID NO: 5527212 - DNA, 25 bp, Homo sapien
aatacagagaatattgggaataaca

SEQ ID NO: 5527213 - DNA, 25 bp, Homo sapien
agttgtgccatgctatggtcacatc

SEQ ID NO: 5527214 - DNA, 25 bp, Homo sapien
cagggatgggcaacccactccatta

SEQ ID NO: 5527215 - DNA, 25 bp, Homo sapien
agaaatgtaggactggagaaatttc

SEQ ID NO: 5527216 - DNA, 25 bp, Homo sapien
ctcgccaaaagacctgtgggtcact

SEQ ID NO: 5527217 - DNA, 25 bp, Homo sapien
aggccaggcacttgaaaataagaca

SEQ ID NO: 5527218 - DNA, 25 bp, Homo sapien
gcaaatagcaaactcgccaaaagac

SEQ ID NO: 5527219 - DNA, 25 bp, Homo sapien
tgttctaaatgagtcttgcttcccc

SEQ ID NO: 5527220 - DNA, 25 bp, Homo sapien
aataagacatttcagggatgggcaa

SEQ ID NO: 5527221 - DNA, 25 bp, Homo sapien
gtgggtcacttgcccaaatgaggcc

SEQ ID NO: 5527222 - DNA, 25 bp, Homo sapien
gcccaaatgaggcctactgagatga

SEQ ID NO: 5527223 - DNA, 25 bp, Homo sapien
taatgagactgataatgactgaaat

SEQ ID NO: 5527224 - DNA, 25 bp, Homo sapien
cttcctggccagggcattttctctg

SEQ ID NO: 5527225 - DNA, 25 bp, Homo sapien
aagggactgacgcgttcccactttc

SEQ ID NO: 5527226 - DNA, 25 bp, Homo sapien
tctcaggccgacccttctagccggg

SEQ ID NO: 5527227 - DNA, 25 bp, Homo sapien
gactggcttctctcaggccgaccct

SEQ ID NO: 5527228 - DNA, 25 bp, Homo sapien
tttctctgcggccaagcagtgttgg

SEQ ID NO: 5527229 - DNA, 25 bp, Homo sapien
gacccttctagccgggctccggatc

SEQ ID NO: 5527230 - DNA, 25 bp, Homo sapien
ccaccaacgccaacaacaacgtgtc

SEQ ID NO: 5527231 - DNA, 25 bp, Homo sapien
cccgtgccggagacctcaaactccg

SEQ ID NO: 5527232 - DNA, 25 bp, Homo sapien
cggagaacggtgatcatcacacacc

SEQ ID NO: 5527233 - DNA, 25 bp, Homo sapien
gggctccggatcttcctcggcctcg

SEQ ID NO: 5527234 - DNA, 25 bp, Homo sapien
aacgccaacaacaacgtgtcgggag

SEQ ID NO: 5527235 - DNA, 25 bp, Homo sapien
tcctcattgatggagatggtgctgg

SEQ ID NO: 5527236 - DNA, 25 bp, Homo sapien
aggaaatagaatgtagcatagctgg

SEQ ID NO: 5527237 - DNA, 25 bp, Homo sapien
cgaagttatacggaagcgtctcctc

SEQ ID NO: 5527238 - DNA, 25 bp, Homo sapien
atggtgcaactctgggtcccaggaa

SEQ ID NO: 5527239 - DNA, 25 bp, Homo sapien
ctggagatgatcggagaattaatct

SEQ ID NO: 5527240 - DNA, 25 bp, Homo sapien
agagggatatagccagtaccaacgt

SEQ ID NO: 5527241 - DNA, 25 bp, Homo sapien
accaacgtatgctgagcacgctgtc

SEQ ID NO: 5527242 - DNA, 25 bp, Homo sapien
agccgtgactgacgacgaagttata

SEQ ID NO: 5527243 - DNA, 25 bp, Homo sapien
aaagaaagtgttgaagataagctgg

SEQ ID NO: 5527244 - DNA, 25 bp, Homo sapien
gacattaaaggaactagaggctctg

SEQ ID NO: 5527245 - DNA, 25 bp, Homo sapien
atagctggagcacatgaaaaaattg

SEQ ID NO: 5527246 - DNA, 25 bp, Homo sapien
tgtagccctgacatgaaacgcttgc

SEQ ID NO: 5527247 - DNA, 25 bp, Homo sapien
tttgccattgggaggcctgaactaa

SEQ ID NO: 5527248 - DNA, 25 bp, Homo sapien
cagagggaacttctgcccctacttc

SEQ ID NO: 5527249 - DNA, 25 bp, Homo sapien
aggatcccagcctaacagcaacgct

SEQ ID NO: 5527250 - DNA, 25 bp, Homo sapien
cacacaggtacatgtgtatggggac

SEQ ID NO: 5527251 - DNA, 25 bp, Homo sapien
gcttgtcaagaaaaggatccagagg

SEQ ID NO: 5527252 - DNA, 25 bp, Homo sapien
tgtgtatggggaccttcctcttgac

SEQ ID NO: 5527253 - DNA, 25 bp, Homo sapien
gagggaagaaggctcccattctaca

SEQ ID NO: 5527254 - DNA, 25 bp, Homo sapien
tcatgctaaaatgaaagtggagggg

SEQ ID NO: 5527255 - DNA, 25 bp, Homo sapien
ggggagtcagtaaatgtccatctcc

SEQ ID NO: 5527256 - DNA, 25 bp, Homo sapien
ataaatgctgtcctggtagcctttc

SEQ ID NO: 5527257 - DNA, 25 bp, Homo sapien
tgcgtgccatcctggagtgaattaa

SEQ ID NO: 5527258 - DNA, 25 bp, Homo sapien
atatatagagctagcagagctggag

SEQ ID NO: 5527259 - DNA, 25 bp, Homo sapien
gtctctgtttgacagtgggaaagcc

SEQ ID NO: 5527260 - DNA, 25 bp, Homo sapien
gtggaggcatctaggtgattctgaa

SEQ ID NO: 5527261 - DNA, 25 bp, Homo sapien
tgaagtccagactgaatggcattta

SEQ ID NO: 5527262 - DNA, 25 bp, Homo sapien
attagagtccagaatatgcagcttc

SEQ ID NO: 5527263 - DNA, 25 bp, Homo sapien
aaaatgtggtcctgggaccagcagc

SEQ ID NO: 5527264 - DNA, 25 bp, Homo sapien
tctgaagacaagtgatttgaagtcc

SEQ ID NO: 5527265 - DNA, 25 bp, Homo sapien
atgatcctgagttgcttgtgaagtc

SEQ ID NO: 5527266 - DNA, 25 bp, Homo sapien
tgggaaagcctgctagaatgatcct

SEQ ID NO: 5527267 - DNA, 25 bp, Homo sapien
tcctggactctggatctctggaggg

SEQ ID NO: 5527268 - DNA, 25 bp, Homo sapien
tgtccagaatgtactatgcaccctc

SEQ ID NO: 5527269 - DNA, 25 bp, Homo sapien
aagacttctctaagaactgagtccc

SEQ ID NO: 5527270 - DNA, 25 bp, Homo sapien
aaagctgtgtcatgtgtagttaatt

SEQ ID NO: 5527271 - DNA, 25 bp, Homo sapien
tatgaataactatcatggcacacct

SEQ ID NO: 5527272 - DNA, 25 bp, Homo sapien
aactcatcccaggtaactggctgtc

SEQ ID NO: 5527273 - DNA, 25 bp, Homo sapien
ttgcccagatggtcttttgtcctta

SEQ ID NO: 5527274 - DNA, 25 bp, Homo sapien
cctcaagtgaataataatggctctt

SEQ ID NO: 5527275 - DNA, 25 bp, Homo sapien
tggcacacctttacatgacacacat

SEQ ID NO: 5527276 - DNA, 25 bp, Homo sapien
ctatgcaccctcaagaccccatctc

SEQ ID NO: 5527277 - DNA, 25 bp, Homo sapien
atgaactctaagaccaaaagacttc

SEQ ID NO: 5527278 - DNA, 25 bp, Homo sapien
acttaaggtcatgtaaagctgtgtc

SEQ ID NO: 5527279 - DNA, 25 bp, Homo sapien
tgcttctgagattcaacctggttgc

SEQ ID NO: 5527280 - DNA, 25 bp, Homo sapien
gagcagaggaaagtgcataaaatat

SEQ ID NO: 5527281 - DNA, 25 bp, Homo sapien
taagtccttgcccaatcacaacctc

SEQ ID NO: 5527282 - DNA, 25 bp, Homo sapien
accactcaaatatagatgcccaaac

SEQ ID NO: 5527283 - DNA, 25 bp, Homo sapien
ttacaacaagccctgagatagatct

SEQ ID NO: 5527284 - DNA, 25 bp, Homo sapien
attcaacctggttgcatgcggcatc

SEQ ID NO: 5527285 - DNA, 25 bp, Homo sapien
aacagaacagatcagaactccagaa

SEQ ID NO: 5527286 - DNA, 25 bp, Homo sapien
tataaagcaaatcaccataaagatc

SEQ ID NO: 5527287 - DNA, 25 bp, Homo sapien
agtgccaggcatattctacaagctc

SEQ ID NO: 5527288 - DNA, 25 bp, Homo sapien
tgcatgcggcatcggttcatcattc

SEQ ID NO: 5527289 - DNA, 25 bp, Homo sapien
attaaggtcttacaaagtgccaggc

SEQ ID NO: 5527290 - DNA, 25 bp, Homo sapien
aggcaaacttacaatagacaggtgt

SEQ ID NO: 5527291 - DNA, 25 bp, Homo sapien
aggcttcctgttctgagtcttatca

SEQ ID NO: 5527292 - DNA, 25 bp, Homo sapien
tgctcagtcacatgcaggcttcctg

SEQ ID NO: 5527293 - DNA, 25 bp, Homo sapien
gtacaccaacagcctaggcaaactt

SEQ ID NO: 5527294 - DNA, 25 bp, Homo sapien
taaataccaatcaaaggctatcctc

SEQ ID NO: 5527295 - DNA, 25 bp, Homo sapien
ggtgtacaccttagtacaggcaggg

SEQ ID NO: 5527296 - DNA, 25 bp, Homo sapien
ccaaagtcattccacgacaaatgtc

SEQ ID NO: 5527297 - DNA, 25 bp, Homo sapien
gtcacagtcagtagcaaaatgtgct

SEQ ID NO: 5527298 - DNA, 25 bp, Homo sapien
gcagccccaatgtccaaccaagtga

SEQ ID NO: 5527299 - DNA, 25 bp, Homo sapien
tgttagtcctagtgtgtctctctcc

SEQ ID NO: 5527300 - DNA, 25 bp, Homo sapien
tctgggtagcagttaagaacatgaa

SEQ ID NO: 5527301 - DNA, 25 bp, Homo sapien
agctgtgcataaagatctggtgttc

SEQ ID NO: 5527302 - DNA, 25 bp, Homo sapien
tatcgcgtaggtgataatgtgtgga

SEQ ID NO: 5527303 - DNA, 25 bp, Homo sapien
ggggatgccaacacctacaagcttg

SEQ ID NO: 5527304 - DNA, 25 bp, Homo sapien
gcagtttgtgttggcctaaggctgt

SEQ ID NO: 5527305 - DNA, 25 bp, Homo sapien
ggggaggagaactgctcactccttt

SEQ ID NO: 5527306 - DNA, 25 bp, Homo sapien
tggaagattgccagctgtaacggga

SEQ ID NO: 5527307 - DNA, 25 bp, Homo sapien
ctgtaacgggagcatctatgtcttc

SEQ ID NO: 5527308 - DNA, 25 bp, Homo sapien
atcatctacttactagggggggagg

SEQ ID NO: 5527309 - DNA, 25 bp, Homo sapien
tgtggacagagacaactcagctaga

SEQ ID NO: 5527310 - DNA, 25 bp, Homo sapien
cagacaaatgccatgtgaagcccta

SEQ ID NO: 5527311 - DNA, 25 bp, Homo sapien
gtcacaagaggtattaaggtgctgc

SEQ ID NO: 5527312 - DNA, 25 bp, Homo sapien
cacaccggctgctttgccaccatct

SEQ ID NO: 5527313 - DNA, 25 bp, Homo sapien
agaccagagggacaatgttctacta

SEQ ID NO: 5527314 - DNA, 25 bp, Homo sapien
ctggtgttgggaattctgtgcccta

SEQ ID NO: 5527315 - DNA, 25 bp, Homo sapien
gaggaaatcctcaattacgtgctgg

SEQ ID NO: 5527316 - DNA, 25 bp, Homo sapien
tgccctaaagaattccgactcagat

SEQ ID NO: 5527317 - DNA, 25 bp, Homo sapien
acctggaacccaacccagaagtctc

SEQ ID NO: 5527318 - DNA, 25 bp, Homo sapien
ggacgtccccttggagctctgcatc

SEQ ID NO: 5527319 - DNA, 25 bp, Homo sapien
caattacgtgctggtacgagtgcaa

SEQ ID NO: 5527320 - DNA, 25 bp, Homo sapien
tccgactcagatccgaacggggatc

SEQ ID NO: 5527321 - DNA, 25 bp, Homo sapien
actatcccaacgtgcttcagcgcca

SEQ ID NO: 5527322 - DNA, 25 bp, Homo sapien
agtttgacgcatcacgtggcgtgcg

SEQ ID NO: 5527323 - DNA, 25 bp, Homo sapien
taggtgagtcttagtaacaaagctt

SEQ ID NO: 5527324 - DNA, 25 bp, Homo sapien
ggaaatagaatggccctgtttacac

SEQ ID NO: 5527325 - DNA, 25 bp, Homo sapien
tacccagcatcggcgaatgtgctac

SEQ ID NO: 5527326 - DNA, 25 bp, Homo sapien
tctcagactctgcaagtgggagtag

SEQ ID NO: 5527327 - DNA, 25 bp, Homo sapien
tgaggcctccgagttgccgtccatt

SEQ ID NO: 5527328 - DNA, 25 bp, Homo sapien
tggctgcactaacaataggtgagtc

SEQ ID NO: 5527329 - DNA, 25 bp, Homo sapien
gggagtagctggctgtttaacatgc

SEQ ID NO: 5527330 - DNA, 25 bp, Homo sapien
tgtagtacattattggcttgaggcc

SEQ ID NO: 5527331 - DNA, 25 bp, Homo sapien
acatgcgttcagagcactgccaatc

SEQ ID NO: 5527332 - DNA, 25 bp, Homo sapien
cacagctgtaacatgtcagggcctg

SEQ ID NO: 5527333 - DNA, 25 bp, Homo sapien
gagcagagggctacaaatgcctctt

SEQ ID NO: 5527334 - DNA, 25 bp, Homo sapien
tgagaatcctgagggtaaaagagaa

SEQ ID NO: 5527335 - DNA, 25 bp, Homo sapien
atctgttgccccaacctaaggtgac

SEQ ID NO: 5527336 - DNA, 25 bp, Homo sapien
aatagggaaaatgagaactctcttt

SEQ ID NO: 5527337 - DNA, 25 bp, Homo sapien
aaaacacggcatgggtattagtttg

SEQ ID NO: 5527338 - DNA, 25 bp, Homo sapien
tttgatcttatgaagctgaaataac

SEQ ID NO: 5527339 - DNA, 25 bp, Homo sapien
aagatcttaaacatgagtgagaatc

SEQ ID NO: 5527340 - DNA, 25 bp, Homo sapien
tctatggaaattgcctggaagagtc

SEQ ID NO: 5527341 - DNA, 25 bp, Homo sapien
agaggcaggactgcagatctatgga

SEQ ID NO: 5527342 - DNA, 25 bp, Homo sapien
atgggtattagtttgaatagggaaa

SEQ ID NO: 5527343 - DNA, 25 bp, Homo sapien
acatgagtgagaatctgttgcccca

SEQ ID NO: 5527344 - DNA, 25 bp, Homo sapien
aattgcctggaagagtcagctgtaa

SEQ ID NO: 5527345 - DNA, 25 bp, Homo sapien
atgaattagaggacatgccaattac

SEQ ID NO: 5527346 - DNA, 25 bp, Homo sapien
aggcaggtatcaggatccttgcttt

SEQ ID NO: 5527347 - DNA, 25 bp, Homo sapien
tcagctagctagaagaatgaggtaa

SEQ ID NO: 5527348 - DNA, 25 bp, Homo sapien
tggagataatgaaaggaccctttac

SEQ ID NO: 5527349 - DNA, 25 bp, Homo sapien
atgtctgcaagatgtatatgttttc

SEQ ID NO: 5527350 - DNA, 25 bp, Homo sapien
acttagagataagaggaagtcaaga

SEQ ID NO: 5527351 - DNA, 25 bp, Homo sapien
tgtaaaaagaattgcactaggtgtt

SEQ ID NO: 5527352 - DNA, 25 bp, Homo sapien
tttagatgaggttcccataagtaac

SEQ ID NO: 5527353 - DNA, 25 bp, Homo sapien
ttacacagggtactggaattggaag

SEQ ID NO: 5527354 - DNA, 25 bp, Homo sapien
ctaaaggataaacagtatttcaccc

SEQ ID NO: 5527355 - DNA, 25 bp, Homo sapien
taccgccaggttagttcaacacaat

SEQ ID NO: 5527356 - DNA, 25 bp, Homo sapien
tgcaaatatcctaagaaatacaacc

SEQ ID NO: 5527357 - DNA, 25 bp, Homo sapien
aagccatggcatatccagttgatgt

SEQ ID NO: 5527358 - DNA, 25 bp, Homo sapien
atacagtgattaaataagccatggc

SEQ ID NO: 5527359 - DNA, 25 bp, Homo sapien
ttgacattggtgatgctaatagcat

SEQ ID NO: 5527360 - DNA, 25 bp, Homo sapien
aaagatatttattgcagcgtggttt

SEQ ID NO: 5527361 - DNA, 25 bp, Homo sapien
gtacacatatgtgaatagtggtttt

SEQ ID NO: 5527362 - DNA, 25 bp, Homo sapien
aggttaatagaggaaagtacacata

SEQ ID NO: 5527363 - DNA, 25 bp, Homo sapien
gaacaaattatgaatccacctgagt

SEQ ID NO: 5527364 - DNA, 25 bp, Homo sapien
tatgagtagtagaattatagacaat

SEQ ID NO: 5527365 - DNA, 25 bp, Homo sapien
acaaggagtttatattgacattggt

SEQ ID NO: 5527366 - DNA, 25 bp, Homo sapien
aaattgaggcatgctttgaaaggtt

SEQ ID NO: 5527367 - DNA, 25 bp, Homo sapien
tcctctgggatcagacttcggtact

SEQ ID NO: 5527368 - DNA, 25 bp, Homo sapien
catagttacctagggaaggagtgaa

SEQ ID NO: 5527369 - DNA, 25 bp, Homo sapien
agggtccctcactccgtggctctct

SEQ ID NO: 5527370 - DNA, 25 bp, Homo sapien
tctctgtgggacatccagctaaaga

SEQ ID NO: 5527371 - DNA, 25 bp, Homo sapien
gagtgaaagccattgagagtccaca

SEQ ID NO: 5527372 - DNA, 25 bp, Homo sapien
atgctggaacgtctctggaatcttt

SEQ ID NO: 5527373 - DNA, 25 bp, Homo sapien
cttcggtactgtgtcctcagggacc

SEQ ID NO: 5527374 - DNA, 25 bp, Homo sapien
catggccttatgctggaacgtctct

SEQ ID NO: 5527375 - DNA, 25 bp, Homo sapien
tcctggaccatccctgcactcagac

SEQ ID NO: 5527376 - DNA, 25 bp, Homo sapien
ccagccggccctgcatggccttatg

SEQ ID NO: 5527377 - DNA, 25 bp, Homo sapien
gggaagcactatcatccaagggtcc

SEQ ID NO: 5527378 - DNA, 25 bp, Homo sapien
tcaatcccagaggtagactcaaaac

SEQ ID NO: 5527379 - DNA, 25 bp, Homo sapien
ttatcatctgaaggtactgggggat

SEQ ID NO: 5527380 - DNA, 25 bp, Homo sapien
cgagcatgtgtgaagcacagaaatc

SEQ ID NO: 5527381 - DNA, 25 bp, Homo sapien
gcagtcctttccagctgggagcacc

SEQ ID NO: 5527382 - DNA, 25 bp, Homo sapien
tttatgaagcaggatggtttgtgaa

SEQ ID NO: 5527383 - DNA, 25 bp, Homo sapien
tgaaaaactcgtgcagcaaaccacc

SEQ ID NO: 5527384 - DNA, 25 bp, Homo sapien
cagtgaggtctcagacttgaccagt

SEQ ID NO: 5527385 - DNA, 25 bp, Homo sapien
ttagcctgcacgagcatgtgtgaag

SEQ ID NO: 5527386 - DNA, 25 bp, Homo sapien
caggagtagttctagactggaatct

SEQ ID NO: 5527387 - DNA, 25 bp, Homo sapien
taggattaccgtagacccaggagta

SEQ ID NO: 5527388 - DNA, 25 bp, Homo sapien
gatagaagagaattggcagtccttt

SEQ ID NO: 5527389 - DNA, 25 bp, Homo sapien
ttagagttgacaaaagctgactgga

SEQ ID NO: 5527390 - DNA, 25 bp, Homo sapien
tatgctgttaactctgccaaactac

SEQ ID NO: 5527391 - DNA, 25 bp, Homo sapien
tatcatctgtgaattggcaaatatt

SEQ ID NO: 5527392 - DNA, 25 bp, Homo sapien
aaaacaaaaagcagtcttaacacac

SEQ ID NO: 5527393 - DNA, 25 bp, Homo sapien
tacaacttagccatatgaagcataa

SEQ ID NO: 5527394 - DNA, 25 bp, Homo sapien
atagcttatatcaaaaagaacattt

SEQ ID NO: 5527395 - DNA, 25 bp, Homo sapien
aagcagtcttaacacacctcaaatt

SEQ ID NO: 5527396 - DNA, 25 bp, Homo sapien
tttgaaggccttaaatgttatcatc

SEQ ID NO: 5527397 - DNA, 25 bp, Homo sapien
agttgacaaaagctgactggagaaa

SEQ ID NO: 5527398 - DNA, 25 bp, Homo sapien
actattagagttgacaaaagctgac

SEQ ID NO: 5527399 - DNA, 25 bp, Homo sapien
gtttctaaatagttgtgataatttc

SEQ ID NO: 5527400 - DNA, 25 bp, Homo sapien
acacgggctccttggcgcttatagt

SEQ ID NO: 5527401 - DNA, 25 bp, Homo sapien
gggttagggcatgagtatataaaat

SEQ ID NO: 5527402 - DNA, 25 bp, Homo sapien
gttctccagataccctcccagccgc

SEQ ID NO: 5527403 - DNA, 25 bp, Homo sapien
caacgaaaccaaccagcctgtcctt

SEQ ID NO: 5527404 - DNA, 25 bp, Homo sapien
agcacaacgacgtcagaaccaacaa

SEQ ID NO: 5527405 - DNA, 25 bp, Homo sapien
atagaaaccaggaacacagggttag

SEQ ID NO: 5527406 - DNA, 25 bp, Homo sapien
tggcgcttatagtgcaaagaccttc

SEQ ID NO: 5527407 - DNA, 25 bp, Homo sapien
aaagcgtctccaaggtatgaaattc

SEQ ID NO: 5527408 - DNA, 25 bp, Homo sapien
gaaccaacaacgtcagaacccagaa

SEQ ID NO: 5527409 - DNA, 25 bp, Homo sapien
cagaacggaacgtccccaagcttat

SEQ ID NO: 5527410 - DNA, 25 bp, Homo sapien
accttcaggagaagaaacttgggag

SEQ ID NO: 5527411 - DNA, 25 bp, Homo sapien
tactggattatgaactcaaaaccta

SEQ ID NO: 5527412 - DNA, 25 bp, Homo sapien
gtctgcataacatttggctccacac

SEQ ID NO: 5527413 - DNA, 25 bp, Homo sapien
tatacactggtatgggatgagcaga

SEQ ID NO: 5527414 - DNA, 25 bp, Homo sapien
cctatgatccagacatattggcttc

SEQ ID NO: 5527415 - DNA, 25 bp, Homo sapien
aacaccaggaatgggaataatgaca

SEQ ID NO: 5527416 - DNA, 25 bp, Homo sapien
atttggctccacacataggttttat

SEQ ID NO: 5527417 - DNA, 25 bp, Homo sapien
tatatactcatagaaagctgaaagc

SEQ ID NO: 5527418 - DNA, 25 bp, Homo sapien
taatcctgtgagttatccaccattt

SEQ ID NO: 5527419 - DNA, 25 bp, Homo sapien
ttcttgacaaccaaggagtgagtgc

SEQ ID NO: 5527420 - DNA, 25 bp, Homo sapien
atgaaccagtaaaaacaccaggaat

SEQ ID NO: 5527421 - DNA, 25 bp, Homo sapien
agctgaaagctgttattactggatt

SEQ ID NO: 5527422 - DNA, 25 bp, Homo sapien
gggaaagccagcatctgcacactgt

SEQ ID NO: 5527423 - DNA, 25 bp, Homo sapien
atcaacatgacgccgaaacaaggct

SEQ ID NO: 5527424 - DNA, 25 bp, Homo sapien
gattcgcatcagacagctcaagttc

SEQ ID NO: 5527425 - DNA, 25 bp, Homo sapien
gtaagcgctaccactcgccaggcac

SEQ ID NO: 5527426 - DNA, 25 bp, Homo sapien
cttaggactagtaaagccatcactc

SEQ ID NO: 5527427 - DNA, 25 bp, Homo sapien
ctgccagatcctaaggctacgcgct

SEQ ID NO: 5527428 - DNA, 25 bp, Homo sapien
tgaggtaggctttcaggtgacctat

SEQ ID NO: 5527429 - DNA, 25 bp, Homo sapien
ggttgttaacaggtccatgaagagc

SEQ ID NO: 5527430 - DNA, 25 bp, Homo sapien
ctgttgaaacacacccaccctcggc

SEQ ID NO: 5527431 - DNA, 25 bp, Homo sapien
ttaattaagtggcccctgggtctgc

SEQ ID NO: 5527432 - DNA, 25 bp, Homo sapien
caaacgtggcatacaaacgtccgta

SEQ ID NO: 5527433 - DNA, 25 bp, Homo sapien
gagcaacacagcggacatatgatca

SEQ ID NO: 5527434 - DNA, 25 bp, Homo sapien
gtggtgtcttggctgcccaacctcc

SEQ ID NO: 5527435 - DNA, 25 bp, Homo sapien
ttacagacagaatttacaccagggg

SEQ ID NO: 5527436 - DNA, 25 bp, Homo sapien
gcaaggcctgaccatcacaccctca

SEQ ID NO: 5527437 - DNA, 25 bp, Homo sapien
cctccactggtgagacgtaaagttc

SEQ ID NO: 5527438 - DNA, 25 bp, Homo sapien
ttaatttacaaaggatgggagctca

SEQ ID NO: 5527439 - DNA, 25 bp, Homo sapien
ttctcccaagacaagactgccagag

SEQ ID NO: 5527440 - DNA, 25 bp, Homo sapien
ctcatgagagctaccagtcaccagg

SEQ ID NO: 5527441 - DNA, 25 bp, Homo sapien
tatagaaaagcaataaagctccccc

SEQ ID NO: 5527442 - DNA, 25 bp, Homo sapien
gatgttgagttagaaagtcacagcc

SEQ ID NO: 5527443 - DNA, 25 bp, Homo sapien
gagggtggtgctcaaaccaatgtta

SEQ ID NO: 5527444 - DNA, 25 bp, Homo sapien
aggtcaactgctaagatggtccaca

SEQ ID NO: 5527445 - DNA, 25 bp, Homo sapien
agaagatgtgttaggtcaactgcta

SEQ ID NO: 5527446 - DNA, 25 bp, Homo sapien
ttaggaccattagtcacagtggcaa

SEQ ID NO: 5527447 - DNA, 25 bp, Homo sapien
aagatttacagcaatggcaattaac

SEQ ID NO: 5527448 - DNA, 25 bp, Homo sapien
ttagatattgaaaagaagatgtgtt

SEQ ID NO: 5527449 - DNA, 25 bp, Homo sapien
gtcacagtggcaaaagttcttagat

SEQ ID NO: 5527450 - DNA, 25 bp, Homo sapien
ccaactgaagcaatcagagctcacc

SEQ ID NO: 5527451 - DNA, 25 bp, Homo sapien
gatggtccacagtgatccctgcctc

SEQ ID NO: 5527452 - DNA, 25 bp, Homo sapien
atggtaagaagtaaaagatgcttta

SEQ ID NO: 5527453 - DNA, 25 bp, Homo sapien
acaatatagaccaaaagcttcgaat

SEQ ID NO: 5527454 - DNA, 25 bp, Homo sapien
taaaaccgaacgcaaccacagcata

SEQ ID NO: 5527455 - DNA, 25 bp, Homo sapien
tcgggagcctcccagtgactgcggg

SEQ ID NO: 5527456 - DNA, 25 bp, Homo sapien
cccgcagtcactgggaggctcccga

SEQ ID NO: 5527457 - DNA, 25 bp, Homo sapien
tggaagggccacacctaagtcctaa

SEQ ID NO: 5527458 - DNA, 25 bp, Homo sapien
acgtaaaacagtcacaagacagggc

SEQ ID NO: 5527459 - DNA, 25 bp, Homo sapien
ccaaaagtggcccaactcacttctc

SEQ ID NO: 5527460 - DNA, 25 bp, Homo sapien
gcccatcctgcactgtggtcccagc

SEQ ID NO: 5527461 - DNA, 25 bp, Homo sapien
ctgcactgtggtcccagcaagtttc

SEQ ID NO: 5527462 - DNA, 25 bp, Homo sapien
gtcacacctacagcacatctcactc

SEQ ID NO: 5527463 - DNA, 25 bp, Homo sapien
cctaaaatccaggcccaaaagtggc

SEQ ID NO: 5527464 - DNA, 25 bp, Homo sapien
tcctggcaagaagcctgtcccaggc

SEQ ID NO: 5527465 - DNA, 25 bp, Homo sapien
tccaaatccagcttcgtgtcacacc

SEQ ID NO: 5527466 - DNA, 25 bp, Homo sapien
gccatccagacgtaaaacagtcaca

SEQ ID NO: 5527467 - DNA, 25 bp, Homo sapien
gggccatcacggagtgcccatcctg

SEQ ID NO: 5527468 - DNA, 25 bp, Homo sapien
cggactccctcgagagaatgtgcta

SEQ ID NO: 5527469 - DNA, 25 bp, Homo sapien
cgtagacccgtcccagacacgtctt

SEQ ID NO: 5527470 - DNA, 25 bp, Homo sapien
gttggttagcggcttggaagccaag

SEQ ID NO: 5527471 - DNA, 25 bp, Homo sapien
ggactcgggctctgaactcaacagc

SEQ ID NO: 5527472 - DNA, 25 bp, Homo sapien
tggtctgggtctctgcccaccaggc

SEQ ID NO: 5527473 - DNA, 25 bp, Homo sapien
tggatcagattctgggggctcagaa

SEQ ID NO: 5527474 - DNA, 25 bp, Homo sapien
ggggaggtgttcaaagacatctccc

SEQ ID NO: 5527475 - DNA, 25 bp, Homo sapien
tgtcgcccaaactctgcgcggagaa

SEQ ID NO: 5527476 - DNA, 25 bp, Homo sapien
agtccagttcaggctgccgtgcact

SEQ ID NO: 5527477 - DNA, 25 bp, Homo sapien
tggcgtggtttatatgtccgggatc

SEQ ID NO: 5527478 - DNA, 25 bp, Homo sapien
tcagaaacgtcggttgcattgagct

SEQ ID NO: 5527479 - DNA, 25 bp, Homo sapien
ttgtgacatttgaatacccaagctc

SEQ ID NO: 5527480 - DNA, 25 bp, Homo sapien
tatttgattagaaatggactcttcc

SEQ ID NO: 5527481 - DNA, 25 bp, Homo sapien
ctaattctaggagagaatcaccaat

SEQ ID NO: 5527482 - DNA, 25 bp, Homo sapien
tcataaatggaaccaaaaatatagt

SEQ ID NO: 5527483 - DNA, 25 bp, Homo sapien
cttcaaggtccaaaatgatcagaac

SEQ ID NO: 5527484 - DNA, 25 bp, Homo sapien
agctagtaaaacaggtgaattattt

SEQ ID NO: 5527485 - DNA, 25 bp, Homo sapien
caaaatgatcagaacaagaatgaca

SEQ ID NO: 5527486 - DNA, 25 bp, Homo sapien
tttaaggcaggaaaacaatcattat

SEQ ID NO: 5527487 - DNA, 25 bp, Homo sapien
attaatacctgtccagagggaaaca

SEQ ID NO: 5527488 - DNA, 25 bp, Homo sapien
aatgattgtgccttggtacacattt

SEQ ID NO: 5527489 - DNA, 25 bp, Homo sapien
gagggaaacagcctgttataaaagc

SEQ ID NO: 5527490 - DNA, 25 bp, Homo sapien
caagcactttgacggaaaaaggtgg

SEQ ID NO: 5527491 - DNA, 25 bp, Homo sapien
ggagaccagttacagtgtctgcagc

SEQ ID NO: 5527492 - DNA, 25 bp, Homo sapien
tgaaccgtggaacaaccacatggtt

SEQ ID NO: 5527493 - DNA, 25 bp, Homo sapien
aacggtagccagatgaaccgtggaa

SEQ ID NO: 5527494 - DNA, 25 bp, Homo sapien
tgaaagccatagcaagcactttgac

SEQ ID NO: 5527495 - DNA, 25 bp, Homo sapien
cagcagtatgaaactgaagaatatc

SEQ ID NO: 5527496 - DNA, 25 bp, Homo sapien
atgatcttggattagaaaggaggga

SEQ ID NO: 5527497 - DNA, 25 bp, Homo sapien
tacttgtcccagctatgaaagccat

SEQ ID NO: 5527498 - DNA, 25 bp, Homo sapien
tcctgagataggaagtcaacgtgaa

SEQ ID NO: 5527499 - DNA, 25 bp, Homo sapien
acacacggtgtgaagttttacacgc

SEQ ID NO: 5527500 - DNA, 25 bp, Homo sapien
aaaagaggaggtcaagcttgattta

SEQ ID NO: 5527501 - DNA, 25 bp, Homo sapien
ttcctaccctcgggagccgtctgaa

SEQ ID NO: 5527502 - DNA, 25 bp, Homo sapien
gggggcacgcccgtatctctagccc

SEQ ID NO: 5527503 - DNA, 25 bp, Homo sapien
cctctagcactacgacaaacgcggc

SEQ ID NO: 5527504 - DNA, 25 bp, Homo sapien
agctgctattcggggctcccgaggc

SEQ ID NO: 5527505 - DNA, 25 bp, Homo sapien
gtgtttcagattccacggtgggccg

SEQ ID NO: 5527506 - DNA, 25 bp, Homo sapien
tcgggagccgtctgaatttctcctc

SEQ ID NO: 5527507 - DNA, 25 bp, Homo sapien
gtccaagggtatgcacctctagcac

SEQ ID NO: 5527508 - DNA, 25 bp, Homo sapien
ggaaacggtgccccagtttgcattc

SEQ ID NO: 5527509 - DNA, 25 bp, Homo sapien
tcctctgccgagttcctgcgggtgt

SEQ ID NO: 5527510 - DNA, 25 bp, Homo sapien
tctcccagctgctattcggggctcc

SEQ ID NO: 5527511 - DNA, 25 bp, Homo sapien
agtggtcgggtgtttcagattccac

SEQ ID NO: 5527512 - DNA, 25 bp, Homo sapien
tcctggacacacccatcgctgtaac

SEQ ID NO: 5527513 - DNA, 25 bp, Homo sapien
aagcatcaagatgaagcaaatccat

SEQ ID NO: 5527514 - DNA, 25 bp, Homo sapien
gaggtttcagttggcaaggatccct

SEQ ID NO: 5527515 - DNA, 25 bp, Homo sapien
acaaaagcttaacactgggcaaggg

SEQ ID NO: 5527516 - DNA, 25 bp, Homo sapien
caccagtgatgcaaacagtaactac

SEQ ID NO: 5527517 - DNA, 25 bp, Homo sapien
aaaacccccaaagcaccagtgatgc

SEQ ID NO: 5527518 - DNA, 25 bp, Homo sapien
gggaccacaaatgcgtagataccaa

SEQ ID NO: 5527519 - DNA, 25 bp, Homo sapien
cacacccatacaggctggaggtttc

SEQ ID NO: 5527520 - DNA, 25 bp, Homo sapien
gtaagtatcacagatcaccgccctc

SEQ ID NO: 5527521 - DNA, 25 bp, Homo sapien
aggaggaaccacaaagtaagtatca

SEQ ID NO: 5527522 - DNA, 25 bp, Homo sapien
catcaaacgtcaatgaacgctagtt

SEQ ID NO: 5527523 - DNA, 25 bp, Homo sapien
cagcaaaaatggcctgactgtggga

SEQ ID NO: 5527524 - DNA, 25 bp, Homo sapien
atgactcaggctaaccctaagaacc

SEQ ID NO: 5527525 - DNA, 25 bp, Homo sapien
tagcaaaaggaagttaaatactgat

SEQ ID NO: 5527526 - DNA, 25 bp, Homo sapien
tattccctgtggcacgcaagcaaac

SEQ ID NO: 5527527 - DNA, 25 bp, Homo sapien
ctgtgggaagactgttcgttcaaac

SEQ ID NO: 5527528 - DNA, 25 bp, Homo sapien
aacaggtggagtgtactaagtattt

SEQ ID NO: 5527529 - DNA, 25 bp, Homo sapien
tttaaatgcggactgtagaataggt

SEQ ID NO: 5527530 - DNA, 25 bp, Homo sapien
ctgtagaataggtgtagaagttgtt

SEQ ID NO: 5527531 - DNA, 25 bp, Homo sapien
tgcatttgtggagcaaagtactaac

SEQ ID NO: 5527532 - DNA, 25 bp, Homo sapien
tcatggacatcgtaaggctgaccta

SEQ ID NO: 5527533 - DNA, 25 bp, Homo sapien
aggagttgagcccctagatgactca

SEQ ID NO: 5527534 - DNA, 25 bp, Homo sapien
tggagggaaagtgctaaatttctgc

SEQ ID NO: 5527535 - DNA, 25 bp, Homo sapien
gtcagtctgttggcttgtaaaaggc

SEQ ID NO: 5527536 - DNA, 25 bp, Homo sapien
taaatacaatcagcagcaaattctc

SEQ ID NO: 5527537 - DNA, 25 bp, Homo sapien
tttaaaatgtggtgcaccttgcccc

SEQ ID NO: 5527538 - DNA, 25 bp, Homo sapien
tttatcggcagtatgtagtaccttc

SEQ ID NO: 5527539 - DNA, 25 bp, Homo sapien
atgtaggaccaattctggttgagtc

SEQ ID NO: 5527540 - DNA, 25 bp, Homo sapien
ggtgcaccttgcccccgcttctctt

SEQ ID NO: 5527541 - DNA, 25 bp, Homo sapien
tcctaaataaggcaggatatatcca

SEQ ID NO: 5527542 - DNA, 25 bp, Homo sapien
tggcttgtaaaaggctaagaagtgc

SEQ ID NO: 5527543 - DNA, 25 bp, Homo sapien
taaatcttaggaactgtgaacaatc

SEQ ID NO: 5527544 - DNA, 25 bp, Homo sapien
acctataaatttggagggaaagtgc

SEQ ID NO: 5527545 - DNA, 25 bp, Homo sapien
atacaccatcctaaaaaataagcag

SEQ ID NO: 5527546 - DNA, 25 bp, Homo sapien
aattgtcggcaacttactcctttcc

SEQ ID NO: 5527547 - DNA, 25 bp, Homo sapien
gaaagttctgttggggccatcaata

SEQ ID NO: 5527548 - DNA, 25 bp, Homo sapien
ccaaaccaaacatcaatcccccaat

SEQ ID NO: 5527549 - DNA, 25 bp, Homo sapien
gggaaaagtgacaattgtcggcaac

SEQ ID NO: 5527550 - DNA, 25 bp, Homo sapien
catgttactttcttaggagggaaaa

SEQ ID NO: 5527551 - DNA, 25 bp, Homo sapien
aacaatgaaagttaattgaaggaat

SEQ ID NO: 5527552 - DNA, 25 bp, Homo sapien
gttggggccatcaatacaccatcct

SEQ ID NO: 5527553 - DNA, 25 bp, Homo sapien
ggaatgtatgaatggacagcaaaat

SEQ ID NO: 5527554 - DNA, 25 bp, Homo sapien
aaacaaggtccctccagtagtcctc

SEQ ID NO: 5527555 - DNA, 25 bp, Homo sapien
taggtgggaatcttaacatgttact

SEQ ID NO: 5527556 - DNA, 25 bp, Homo sapien
gagagttgcctccttgacccacaag

SEQ ID NO: 5527557 - DNA, 25 bp, Homo sapien
gggccagcagcaactcatagccttc

SEQ ID NO: 5527558 - DNA, 25 bp, Homo sapien
aaataaggcactacatggcagaatt

SEQ ID NO: 5527559 - DNA, 25 bp, Homo sapien
tttcacaggccttgcgtggtaggaa

SEQ ID NO: 5527560 - DNA, 25 bp, Homo sapien
aaggatatcccaaggtttctgctgc

SEQ ID NO: 5527561 - DNA, 25 bp, Homo sapien
ttaaggtactgcagaaaaatcattg

SEQ ID NO: 5527562 - DNA, 25 bp, Homo sapien
gcgtggtaggaattcttggtctagg

SEQ ID NO: 5527563 - DNA, 25 bp, Homo sapien
ttataaaaacaggtactttggcatc

SEQ ID NO: 5527564 - DNA, 25 bp, Homo sapien
tccaagaaatgtaagtgtaccagta

SEQ ID NO: 5527565 - DNA, 25 bp, Homo sapien
atcaaatcagggaatccgtgaggag

SEQ ID NO: 5527566 - DNA, 25 bp, Homo sapien
agagaaacttgtgaaaacttggatt

SEQ ID NO: 5527567 - DNA, 25 bp, Homo sapien
ggaaatgggaaagctgaccctatca

SEQ ID NO: 5527568 - DNA, 25 bp, Homo sapien
gctcagcttggatgccacgtccttc

SEQ ID NO: 5527569 - DNA, 25 bp, Homo sapien
tatcagaagcaaactcctaggtccc

SEQ ID NO: 5527570 - DNA, 25 bp, Homo sapien
cccaagcattgaagggaaatgggaa

SEQ ID NO: 5527571 - DNA, 25 bp, Homo sapien
gggagaaggttcccaagcattgaag

SEQ ID NO: 5527572 - DNA, 25 bp, Homo sapien
aaaacaggacaagaatctccgagac

SEQ ID NO: 5527573 - DNA, 25 bp, Homo sapien
aggatggaagaatctgcaggttctt

SEQ ID NO: 5527574 - DNA, 25 bp, Homo sapien
ccgtgagcagatgcgggtttattat

SEQ ID NO: 5527575 - DNA, 25 bp, Homo sapien
ctggattccagccaagccacaaggt

SEQ ID NO: 5527576 - DNA, 25 bp, Homo sapien
tccaaggtccacagaaatgaaggga

SEQ ID NO: 5527577 - DNA, 25 bp, Homo sapien
tcttgagaagctcagatgcagatgc

SEQ ID NO: 5527578 - DNA, 25 bp, Homo sapien
ttctcattttacagcaaacattgca

SEQ ID NO: 5527579 - DNA, 25 bp, Homo sapien
tgtacaatagaacgactacagtgta

SEQ ID NO: 5527580 - DNA, 25 bp, Homo sapien
cacaccccccacggatggcatttta

SEQ ID NO: 5527581 - DNA, 25 bp, Homo sapien
gccacaccccccacggatggcattt

SEQ ID NO: 5527582 - DNA, 25 bp, Homo sapien
agaacgactacagtgtacatggggg

SEQ ID NO: 5527583 - DNA, 25 bp, Homo sapien
tttttctgtacaatagaacgactac

SEQ ID NO: 5527584 - DNA, 25 bp, Homo sapien
ccccacggatggcattttatgtctt

SEQ ID NO: 5527585 - DNA, 25 bp, Homo sapien
gcctccacccaccctgagtccagca

SEQ ID NO: 5527586 - DNA, 25 bp, Homo sapien
gaatccacagaaaaccacggaccga

SEQ ID NO: 5527587 - DNA, 25 bp, Homo sapien
caatagaacgactacagtgtacatg

SEQ ID NO: 5527588 - DNA, 25 bp, Homo sapien
gccggcattcactctgcccctctgc

SEQ ID NO: 5527589 - DNA, 25 bp, Homo sapien
cgcaccccctgtcgaaacggtggag

SEQ ID NO: 5527590 - DNA, 25 bp, Homo sapien
ctcaaggcttctctggttgagccgc

SEQ ID NO: 5527591 - DNA, 25 bp, Homo sapien
ccgcacatcccgcaccccctgtcga

SEQ ID NO: 5527592 - DNA, 25 bp, Homo sapien
cctgaccgcattctcggggtgtctc

SEQ ID NO: 5527593 - DNA, 25 bp, Homo sapien
gggtttaccacgtagctcagcgcca

SEQ ID NO: 5527594 - DNA, 25 bp, Homo sapien
tgtggtgtgacaccccacgcgtttt

SEQ ID NO: 5527595 - DNA, 25 bp, Homo sapien
ccccacgcgttttgtaggcgcggac

SEQ ID NO: 5527596 - DNA, 25 bp, Homo sapien
gcttctctggttgagccgcacatcc

SEQ ID NO: 5527597 - DNA, 25 bp, Homo sapien
gtctcgcggcccctgaccgcattct

SEQ ID NO: 5527598 - DNA, 25 bp, Homo sapien
gtcggtcactaggagtcctcaaggc

SEQ ID NO: 5527599 - DNA, 25 bp, Homo sapien
cggggtgtctccttgtggtgtgaca

SEQ ID NO: 5527600 - DNA, 25 bp, Homo sapien
acaggaacacaactgcaggaagtta

SEQ ID NO: 5527601 - DNA, 25 bp, Homo sapien
agctggaggatgcttgctctttagg

SEQ ID NO: 5527602 - DNA, 25 bp, Homo sapien
taggaaatgtaaatagtgaccactg

SEQ ID NO: 5527603 - DNA, 25 bp, Homo sapien
ggatccagagttaaacaccaggttc

SEQ ID NO: 5527604 - DNA, 25 bp, Homo sapien
ttgtggtgctgctgagttgcaattc

SEQ ID NO: 5527605 - DNA, 25 bp, Homo sapien
cctgtacagtgaatggatccagagt

SEQ ID NO: 5527606 - DNA, 25 bp, Homo sapien
tagccagcagccttcattgtcttgt

SEQ ID NO: 5527607 - DNA, 25 bp, Homo sapien
aggttctgccagctcactgagaccc

SEQ ID NO: 5527608 - DNA, 25 bp, Homo sapien
ttttgtgttttagaggagaaagtgc

SEQ ID NO: 5527609 - DNA, 25 bp, Homo sapien
actgagacccactgccaactgctcc

SEQ ID NO: 5527610 - DNA, 25 bp, Homo sapien
agtagtagtatggaatttgtctgtc

SEQ ID NO: 5527611 - DNA, 25 bp, Homo sapien
aaatggtcatttttctgaagagaat

SEQ ID NO: 5527612 - DNA, 25 bp, Homo sapien
atcgatgtcgagcgatcatgatgat

SEQ ID NO: 5527613 - DNA, 25 bp, Homo sapien
ttctgaagagaatattttgcttgaa

SEQ ID NO: 5527614 - DNA, 25 bp, Homo sapien
gagatttgtaggttgttgattttgt

SEQ ID NO: 5527615 - DNA, 25 bp, Homo sapien
atgcaaaggactgaaagagatttgt

SEQ ID NO: 5527616 - DNA, 25 bp, Homo sapien
aggactgaaagagatttgtaggttg

SEQ ID NO: 5527617 - DNA, 25 bp, Homo sapien
gactgaaagagatttgtaggttgtt

SEQ ID NO: 5527618 - DNA, 25 bp, Homo sapien
gcttgaaatgcaaaggactgaaaga

SEQ ID NO: 5527619 - DNA, 25 bp, Homo sapien
aggggatatatattatgaaatggtc

SEQ ID NO: 5527620 - DNA, 25 bp, Homo sapien
cgacagaaggggatatatattatga

SEQ ID NO: 5527621 - DNA, 25 bp, Homo sapien
gaagagaatattttgcttgaaatgc

SEQ ID NO: 5527622 - DNA, 25 bp, Homo sapien
acagctccctgggtgcctcaatacc

SEQ ID NO: 5527623 - DNA, 25 bp, Homo sapien
aagagtcccaaacatacaaactgat

SEQ ID NO: 5527624 - DNA, 25 bp, Homo sapien
gaggtagcagcatcacctatttcca

SEQ ID NO: 5527625 - DNA, 25 bp, Homo sapien
tacacctcagacaggaaactggtag

SEQ ID NO: 5527626 - DNA, 25 bp, Homo sapien
aacaagcaaggtgtcatcgtgtatc

SEQ ID NO: 5527627 - DNA, 25 bp, Homo sapien
tgatcacgaagttaacatatacacc

SEQ ID NO: 5527628 - DNA, 25 bp, Homo sapien
atcgtgtatcaagtgtggctgtgag

SEQ ID NO: 5527629 - DNA, 25 bp, Homo sapien
cagcctgcaagtcatctactagatg

SEQ ID NO: 5527630 - DNA, 25 bp, Homo sapien
taactttacataggacaagagtccc

SEQ ID NO: 5527631 - DNA, 25 bp, Homo sapien
cctcaataccggcacccggcagagg

SEQ ID NO: 5527632 - DNA, 25 bp, Homo sapien
aactggtagccaacagcctgcaagt

SEQ ID NO: 5527633 - DNA, 25 bp, Homo sapien
ggacgggcactgctcaagtgctttc

SEQ ID NO: 5527634 - DNA, 25 bp, Homo sapien
cctctggaactccggcctcactggt

SEQ ID NO: 5527635 - DNA, 25 bp, Homo sapien
gtgttgccacaagaaggaagtatta

SEQ ID NO: 5527636 - DNA, 25 bp, Homo sapien
attttagctcaaggtgaaggaggat

SEQ ID NO: 5527637 - DNA, 25 bp, Homo sapien
agcagtgtccttgagatgaggctgc

SEQ ID NO: 5527638 - DNA, 25 bp, Homo sapien
ggcgcttacgtgcaacaagcctggc

SEQ ID NO: 5527639 - DNA, 25 bp, Homo sapien
tggaggacctgacagccaggtctca

SEQ ID NO: 5527640 - DNA, 25 bp, Homo sapien
agaggaacaggattgctgataaaga

SEQ ID NO: 5527641 - DNA, 25 bp, Homo sapien
tgcatctccagcgggcatctgggtg

SEQ ID NO: 5527642 - DNA, 25 bp, Homo sapien
tgctgataaagaagtgtcctgtccc

SEQ ID NO: 5527643 - DNA, 25 bp, Homo sapien
gtggtgagggatttatccagcaagc

SEQ ID NO: 5527644 - DNA, 25 bp, Homo sapien
gctgtggctgaggtttccccagcag

SEQ ID NO: 5527645 - DNA, 25 bp, Homo sapien
cgtgtcatagatactggagaaggag

SEQ ID NO: 5527646 - DNA, 25 bp, Homo sapien
tgctttgtgactgggcttgagaact

SEQ ID NO: 5527647 - DNA, 25 bp, Homo sapien
agaaaacgactggaaagaaacatta

SEQ ID NO: 5527648 - DNA, 25 bp, Homo sapien
gggtagtgtctcatggtacagtgga

SEQ ID NO: 5527649 - DNA, 25 bp, Homo sapien
gtacagtggaaacagctcagtcaca

SEQ ID NO: 5527650 - DNA, 25 bp, Homo sapien
aatatctgtccaaggggtatggttt

SEQ ID NO: 5527651 - DNA, 25 bp, Homo sapien
tctttgcacagtggaacaggagtat

SEQ ID NO: 5527652 - DNA, 25 bp, Homo sapien
cccagcagagtttggtacatggcag

SEQ ID NO: 5527653 - DNA, 25 bp, Homo sapien
tgagaactctgggctgacctataaa

SEQ ID NO: 5527654 - DNA, 25 bp, Homo sapien
taccagcaggactcaagctggaacc

SEQ ID NO: 5527655 - DNA, 25 bp, Homo sapien
ggagctcaacacctacatggaaacc

SEQ ID NO: 5527656 - DNA, 25 bp, Homo sapien
atactcaaggtcaagatgggtttgc

SEQ ID NO: 5527657 - DNA, 25 bp, Homo sapien
gctttcggaataacaaggaacagcc

SEQ ID NO: 5527658 - DNA, 25 bp, Homo sapien
gcacctgactagactgagagccagt

SEQ ID NO: 5527659 - DNA, 25 bp, Homo sapien
ctctgctagtagatatggccccatc

SEQ ID NO: 5527660 - DNA, 25 bp, Homo sapien
ttaaaagtggcaaaattcagggcaa

SEQ ID NO: 5527661 - DNA, 25 bp, Homo sapien
gggattatgaatggaagggtccaaa

SEQ ID NO: 5527662 - DNA, 25 bp, Homo sapien
atcaggaataaagtacagtacccct

SEQ ID NO: 5527663 - DNA, 25 bp, Homo sapien
aatgaatcagaataaatcagctcac

SEQ ID NO: 5527664 - DNA, 25 bp, Homo sapien
ctctggtaataattaggtccccacc

SEQ ID NO: 5527665 - DNA, 25 bp, Homo sapien
ggtcaagatgggtttgcagaaatca

SEQ ID NO: 5527666 - DNA, 25 bp, Homo sapien
tgctgagattgagaagaccttagaa

SEQ ID NO: 5527667 - DNA, 25 bp, Homo sapien
ttagcttcattggggcgtatcactt

SEQ ID NO: 5527668 - DNA, 25 bp, Homo sapien
aaaaactgagatgtgaaatacagac

SEQ ID NO: 5527669 - DNA, 25 bp, Homo sapien
gattgtagttggtaaaaatgcaccc

SEQ ID NO: 5527670 - DNA, 25 bp, Homo sapien
tgatgtgtcttgaacgctgctggga

SEQ ID NO: 5527671 - DNA, 25 bp, Homo sapien
ctagaaaatgaactacttggggaaa

SEQ ID NO: 5527672 - DNA, 25 bp, Homo sapien
gctgctgggaagctctattgctgag

SEQ ID NO: 5527673 - DNA, 25 bp, Homo sapien
cttagaaacggaaggacactcttca

SEQ ID NO: 5527674 - DNA, 25 bp, Homo sapien
tgtgcctgtgtataaatgatgtgtc

SEQ ID NO: 5527675 - DNA, 25 bp, Homo sapien
agagctgtaaaatgtgtttcaccca

SEQ ID NO: 5527676 - DNA, 25 bp, Homo sapien
tttgacaagcatctagaaaatgaac

SEQ ID NO: 5527677 - DNA, 25 bp, Homo sapien
gaacggcactgtcaacctcaaatat

SEQ ID NO: 5527678 - DNA, 25 bp, Homo sapien
atatttgaggttgacagtgccgttc

SEQ ID NO: 5527679 - DNA, 25 bp, Homo sapien
ctcattgtccaggagatgaagacga

SEQ ID NO: 5527680 - DNA, 25 bp, Homo sapien
tgattctccagaacataaggccact

SEQ ID NO: 5527681 - DNA, 25 bp, Homo sapien
agattacaattatgtgtgggccaac

SEQ ID NO: 5527682 - DNA, 25 bp, Homo sapien
aatcacaaacggcgcacattggtat

SEQ ID NO: 5527683 - DNA, 25 bp, Homo sapien
ggaaggtggtatgcaagattacaat

SEQ ID NO: 5527684 - DNA, 25 bp, Homo sapien
ggctcagtggtagcaagctatcctt

SEQ ID NO: 5527685 - DNA, 25 bp, Homo sapien
cccgaccagtttagcaccggcgaac

SEQ ID NO: 5527686 - DNA, 25 bp, Homo sapien
atgaaaactggtgagcctcattgtc

SEQ ID NO: 5527687 - DNA, 25 bp, Homo sapien
aggccactggaatctatagcaaaac

SEQ ID NO: 5527688 - DNA, 25 bp, Homo sapien
atgggagaacaatcgtgagtctttg

SEQ ID NO: 5527689 - DNA, 25 bp, Homo sapien
tgaagacgagactttcaaagatgga

SEQ ID NO: 5527690 - DNA, 25 bp, Homo sapien
ttcgtctatgatgtgaagcctggcg

SEQ ID NO: 5527691 - DNA, 25 bp, Homo sapien
agatctcctgggggctacaccagat

SEQ ID NO: 5527692 - DNA, 25 bp, Homo sapien
gatccccgagcttgagcagtatgac

SEQ ID NO: 5527693 - DNA, 25 bp, Homo sapien
ggtggccaaagctgccttcaagcgc

SEQ ID NO: 5527694 - DNA, 25 bp, Homo sapien
gactacatgtattcggcccagggca

SEQ ID NO: 5527695 - DNA, 25 bp, Homo sapien
aatatacctcaaggcgagagtggag

SEQ ID NO: 5527696 - DNA, 25 bp, Homo sapien
gctacaccagatcgtgaaagccctc

SEQ ID NO: 5527697 - DNA, 25 bp, Homo sapien
ggctgtgaccccgttgggaatatac

SEQ ID NO: 5527698 - DNA, 25 bp, Homo sapien
gcttacatcgatggactggagacag

SEQ ID NO: 5527699 - DNA, 25 bp, Homo sapien
ttcctggtcaacgactgcagcctca

SEQ ID NO: 5527700 - DNA, 25 bp, Homo sapien
cttcaaaactctacggcaccccaac

SEQ ID NO: 5527701 - DNA, 25 bp, Homo sapien
attgggtttctaagctgaaggagtt

SEQ ID NO: 5527702 - DNA, 25 bp, Homo sapien
agaatgaatggctctcaaactgtgg

SEQ ID NO: 5527703 - DNA, 25 bp, Homo sapien
gaatccctagtgaaatggtgccttc

SEQ ID NO: 5527704 - DNA, 25 bp, Homo sapien
aggtatagaataggactccccaagt

SEQ ID NO: 5527705 - DNA, 25 bp, Homo sapien
ctccccaagtaaaccagaatgaatg

SEQ ID NO: 5527706 - DNA, 25 bp, Homo sapien
ttccacagaggaattggccttaatt

SEQ ID NO: 5527707 - DNA, 25 bp, Homo sapien
ccacagatggtgttaatacaagttc

SEQ ID NO: 5527708 - DNA, 25 bp, Homo sapien
agcacagcagtaattaatattgatc

SEQ ID NO: 5527709 - DNA, 25 bp, Homo sapien
tatgccagcaaaacaggtatagaat

SEQ ID NO: 5527710 - DNA, 25 bp, Homo sapien
acgacaggcacaaacttggaaaaat

SEQ ID NO: 5527711 - DNA, 25 bp, Homo sapien
ccatcaccatgatgacgacaggcac

SEQ ID NO: 5527712 - DNA, 25 bp, Homo sapien
ctgtatattgccagagatgaagcca

SEQ ID NO: 5527713 - DNA, 25 bp, Homo sapien
actaaatccaatgctcggcgccacg

SEQ ID NO: 5527714 - DNA, 25 bp, Homo sapien
aattctgatgagtaattggcagtgt

SEQ ID NO: 5527715 - DNA, 25 bp, Homo sapien
gccaggaatttaagcacagttggtc

SEQ ID NO: 5527716 - DNA, 25 bp, Homo sapien
gaatatgaagacagctaagacacaa

SEQ ID NO: 5527717 - DNA, 25 bp, Homo sapien
gatgatgttgaatgtatgtgctggc

SEQ ID NO: 5527718 - DNA, 25 bp, Homo sapien
cattcaagatgtaagatgaaggaga

SEQ ID NO: 5527719 - DNA, 25 bp, Homo sapien
cactacaaaaatagaaagcccgtta

SEQ ID NO: 5527720 - DNA, 25 bp, Homo sapien
ccaaagacttagccagtaacactac

SEQ ID NO: 5527721 - DNA, 25 bp, Homo sapien
attggcagtgttatataggagagtt

SEQ ID NO: 5527722 - DNA, 25 bp, Homo sapien
gtcataaactctcggaatctgctcc

SEQ ID NO: 5527723 - DNA, 25 bp, Homo sapien
gagctgagtcaataggatgtgcaaa

SEQ ID NO: 5527724 - DNA, 25 bp, Homo sapien
cccgatggacataactgcatctgcc

SEQ ID NO: 5527725 - DNA, 25 bp, Homo sapien
aaagcccctgccaaccactctccca

SEQ ID NO: 5527726 - DNA, 25 bp, Homo sapien
cttacaggttgaattgctgccttcc

SEQ ID NO: 5527727 - DNA, 25 bp, Homo sapien
catctgcctggtgtgctgttgtttc

SEQ ID NO: 5527728 - DNA, 25 bp, Homo sapien
gtttccctggtgtctgaacagagtc

SEQ ID NO: 5527729 - DNA, 25 bp, Homo sapien
aaactcgcagacctcagaggcctgg

SEQ ID NO: 5527730 - DNA, 25 bp, Homo sapien
ggcccccgctatttggagctgagtc

SEQ ID NO: 5527731 - DNA, 25 bp, Homo sapien
aacagagtcaggctcctgacaggcc

SEQ ID NO: 5527732 - DNA, 25 bp, Homo sapien
ccctagactaggctaaagcccctgc

SEQ ID NO: 5527733 - DNA, 25 bp, Homo sapien
taggctgtaagttccccgatggaca

SEQ ID NO: 5527734 - DNA, 25 bp, Homo sapien
ttgtacgtttacagtcgcagcacta

SEQ ID NO: 5527735 - DNA, 25 bp, Homo sapien
gggccaggaattggattcagtttac

SEQ ID NO: 5527736 - DNA, 25 bp, Homo sapien
gcatgatggggattgctgcatatca

SEQ ID NO: 5527737 - DNA, 25 bp, Homo sapien
atcagcagttggatgttcttgcctc

SEQ ID NO: 5527738 - DNA, 25 bp, Homo sapien
cgcagcactaaaaatggatgacatc

SEQ ID NO: 5527739 - DNA, 25 bp, Homo sapien
ctagataggttaatgaaaggccttt

SEQ ID NO: 5527740 - DNA, 25 bp, Homo sapien
atactgcaatgttaggggaatgaac

SEQ ID NO: 5527741 - DNA, 25 bp, Homo sapien
ctgcattggggacttctagataggt

SEQ ID NO: 5527742 - DNA, 25 bp, Homo sapien
aatgatgtacaaactaaggactatt

SEQ ID NO: 5527743 - DNA, 25 bp, Homo sapien
agggagagagataataaactatatt

SEQ ID NO: 5527744 - DNA, 25 bp, Homo sapien
ttatttgctctgggggccaggaatt

SEQ ID NO: 5527745 - DNA, 25 bp, Homo sapien
caccccacagacacgctggtggctg

SEQ ID NO: 5527746 - DNA, 25 bp, Homo sapien
gggtgtcgtgttcacgcagcccctt

SEQ ID NO: 5527747 - DNA, 25 bp, Homo sapien
tgcccccgagttcactgcggaaagc

SEQ ID NO: 5527748 - DNA, 25 bp, Homo sapien
agcccggctttaactgctggtcctc

SEQ ID NO: 5527749 - DNA, 25 bp, Homo sapien
cattcgcttcccgctcatgaccatc

SEQ ID NO: 5527750 - DNA, 25 bp, Homo sapien
cgctcatgaccatcgaggagttcgc

SEQ ID NO: 5527751 - DNA, 25 bp, Homo sapien
tcaatgccgttgtccgctggtccga

SEQ ID NO: 5527752 - DNA, 25 bp, Homo sapien
tgaggtgcggctgttcaatgccgtt

SEQ ID NO: 5527753 - DNA, 25 bp, Homo sapien
tggtcctcacgttagtctcactgcc

SEQ ID NO: 5527754 - DNA, 25 bp, Homo sapien
ggatagtgcccccgagttcactgcg

SEQ ID NO: 5527755 - DNA, 25 bp, Homo sapien
tagttgccagcccggctttaactgc

SEQ ID NO: 5527756 - DNA, 25 bp, Homo sapien
tcaaaaccactaggacttggcactt

SEQ ID NO: 5527757 - DNA, 25 bp, Homo sapien
cccgcctccccagtgcatgtcatcc

SEQ ID NO: 5527758 - DNA, 25 bp, Homo sapien
agagcagaccagaggcttctcaaaa

SEQ ID NO: 5527759 - DNA, 25 bp, Homo sapien
ttgaggtccttaagggttgactgtg

SEQ ID NO: 5527760 - DNA, 25 bp, Homo sapien
agtggggtcctcaagcaccttttct

SEQ ID NO: 5527761 - DNA, 25 bp, Homo sapien
aaggtgggcttcacagattcctcca

SEQ ID NO: 5527762 - DNA, 25 bp, Homo sapien
gactttacagagcagaaagagcaga

SEQ ID NO: 5527763 - DNA, 25 bp, Homo sapien
cccgagacctctcctgaaggtgggc

SEQ ID NO: 5527764 - DNA, 25 bp, Homo sapien
tagtaatcgtactaaggggatggct

SEQ ID NO: 5527765 - DNA, 25 bp, Homo sapien
aaggcaagggacatcctagtaatcg

SEQ ID NO: 5527766 - DNA, 25 bp, Homo sapien
ggggactctggcaactaagacttta

SEQ ID NO: 5527767 - DNA, 25 bp, Homo sapien
gaagaaaaagcaacctacaacagtc

SEQ ID NO: 5527768 - DNA, 25 bp, Homo sapien
gatactgtgatgaaagtcaaagatc

SEQ ID NO: 5527769 - DNA, 25 bp, Homo sapien
ttgaatataaaagctagacgaccac

SEQ ID NO: 5527770 - DNA, 25 bp, Homo sapien
ttccacaaatagttgcccaggagga

SEQ ID NO: 5527771 - DNA, 25 bp, Homo sapien
cacgatgaaagaacttgccctctgc

SEQ ID NO: 5527772 - DNA, 25 bp, Homo sapien
gcctgtcaagctagcgtcaaagttc

SEQ ID NO: 5527773 - DNA, 25 bp, Homo sapien
ccctagctgagcaaagaactgaaga

SEQ ID NO: 5527774 - DNA, 25 bp, Homo sapien
gaggggttttgacttggccatctgt

SEQ ID NO: 5527775 - DNA, 25 bp, Homo sapien
ttcatctgaggagacctggcataga

SEQ ID NO: 5527776 - DNA, 25 bp, Homo sapien
tagacgaccacgccaattcaggatt

SEQ ID NO: 5527777 - DNA, 25 bp, Homo sapien
tacaacagtctctggggcttgcact

SEQ ID NO: 5527778 - DNA, 25 bp, Homo sapien
aaacataaaacaaccactccatccc

SEQ ID NO: 5527779 - DNA, 25 bp, Homo sapien
ggtctgtgacactgtgactgaggcc

SEQ ID NO: 5527780 - DNA, 25 bp, Homo sapien
tgtgactgaggcccgtctcctcctg

SEQ ID NO: 5527781 - DNA, 25 bp, Homo sapien
actcctctcaggtaagttcttttct

SEQ ID NO: 5527782 - DNA, 25 bp, Homo sapien
actagtgtccactgtgacaagggtc

SEQ ID NO: 5527783 - DNA, 25 bp, Homo sapien
cttgaagatccacttttccattcct

SEQ ID NO: 5527784 - DNA, 25 bp, Homo sapien
actcatgtgccctgagagacaggct

SEQ ID NO: 5527785 - DNA, 25 bp, Homo sapien
cctctctgtccagtcagcgtccaag

SEQ ID NO: 5527786 - DNA, 25 bp, Homo sapien
gtccactgtgacaagggtctgtgac

SEQ ID NO: 5527787 - DNA, 25 bp, Homo sapien
tgccacgacgactcatgtgccctga

SEQ ID NO: 5527788 - DNA, 25 bp, Homo sapien
aggaatgactagtgtccactgtgac

SEQ ID NO: 5527789 - DNA, 25 bp, Homo sapien
tctgtgggtgagtgaatacactctg

SEQ ID NO: 5527790 - DNA, 25 bp, Homo sapien
ttcaaggctggcatgtccaggagaa

SEQ ID NO: 5527791 - DNA, 25 bp, Homo sapien
cagggctctatttctgtgggtgagt

SEQ ID NO: 5527792 - DNA, 25 bp, Homo sapien
tgcacatcccccattcaaggctggc

SEQ ID NO: 5527793 - DNA, 25 bp, Homo sapien
gagcctcaaaccgcactgcccagtg

SEQ ID NO: 5527794 - DNA, 25 bp, Homo sapien
ttggccctggactagtcccccaagc

SEQ ID NO: 5527795 - DNA, 25 bp, Homo sapien
tactgcttatatggggaagggttat

SEQ ID NO: 5527796 - DNA, 25 bp, Homo sapien
gggggacgccatcctactgcttata

SEQ ID NO: 5527797 - DNA, 25 bp, Homo sapien
ccccacaccctctaggcctccttcc

SEQ ID NO: 5527798 - DNA, 25 bp, Homo sapien
gaatacactctgaaaagcattggat

SEQ ID NO: 5527799 - DNA, 25 bp, Homo sapien
cttcgaagctgccccacaccctcta

SEQ ID NO: 5527800 - DNA, 25 bp, Homo sapien
ttttaaaggagattcccaggagctg

SEQ ID NO: 5527801 - DNA, 25 bp, Homo sapien
ccaggagctgctacatgacacttac

SEQ ID NO: 5527802 - DNA, 25 bp, Homo sapien
ctctagggtgttgtcctcatggtcc

SEQ ID NO: 5527803 - DNA, 25 bp, Homo sapien
atagtctaaatgtaggtgtccaagc

SEQ ID NO: 5527804 - DNA, 25 bp, Homo sapien
cctggaatagaggtcctggtcctct

SEQ ID NO: 5527805 - DNA, 25 bp, Homo sapien
atctgactgctaaaagtggcccagg

SEQ ID NO: 5527806 - DNA, 25 bp, Homo sapien
tttccaggcagcaaaatggaagaag

SEQ ID NO: 5527807 - DNA, 25 bp, Homo sapien
aagaacagagatgacaataggtata

SEQ ID NO: 5527808 - DNA, 25 bp, Homo sapien
ggtccaaaatggtgactggaattcc

SEQ ID NO: 5527809 - DNA, 25 bp, Homo sapien
cccagtcaggtcccatgtaccagtt

SEQ ID NO: 5527810 - DNA, 25 bp, Homo sapien
aaggaggattagacgaatctgactg

SEQ ID NO: 5527811 - DNA, 25 bp, Homo sapien
cacatcgaaacaacctaaaatcatt

SEQ ID NO: 5527812 - DNA, 25 bp, Homo sapien
tatcaggtactagaaaatgtttcca

SEQ ID NO: 5527813 - DNA, 25 bp, Homo sapien
tagaaagcatgcagtcctcaatgta

SEQ ID NO: 5527814 - DNA, 25 bp, Homo sapien
aagaagaacattttgaacacatacc

SEQ ID NO: 5527815 - DNA, 25 bp, Homo sapien
aagctttcatgagaagcagtttttt

SEQ ID NO: 5527816 - DNA, 25 bp, Homo sapien
tgaacacataccgtagttgcaaaac

SEQ ID NO: 5527817 - DNA, 25 bp, Homo sapien
gtatgatacagactagaaagcatgc

SEQ ID NO: 5527818 - DNA, 25 bp, Homo sapien
tagcataaagaaaaagttccttgat

SEQ ID NO: 5527819 - DNA, 25 bp, Homo sapien
ttatcaagtacacatcgaaacaacc

SEQ ID NO: 5527820 - DNA, 25 bp, Homo sapien
taccgtagttgcaaaacaatgatgt

SEQ ID NO: 5527821 - DNA, 25 bp, Homo sapien
ctcgtaagattataccaaagctttc

SEQ ID NO: 5527822 - DNA, 25 bp, Homo sapien
tataacaaaacaaatgagaagataa

SEQ ID NO: 5527823 - DNA, 25 bp, Homo sapien
ttcatcccctaggcatgcacaacca

SEQ ID NO: 5527824 - DNA, 25 bp, Homo sapien
cccagtactgggtagctctagataa

SEQ ID NO: 5527825 - DNA, 25 bp, Homo sapien
tcgggggatctgtccaattcacacc

SEQ ID NO: 5527826 - DNA, 25 bp, Homo sapien
tcaagtcccctctgttaagctgcac

SEQ ID NO: 5527827 - DNA, 25 bp, Homo sapien
tggtgtatggtaatattatgctgcc

SEQ ID NO: 5527828 - DNA, 25 bp, Homo sapien
ctcctggggacttacatagctgttt

SEQ ID NO: 5527829 - DNA, 25 bp, Homo sapien
aattagagtgagtcctgcagatttc

SEQ ID NO: 5527830 - DNA, 25 bp, Homo sapien
attgaagaaagttattcgggggatc

SEQ ID NO: 5527831 - DNA, 25 bp, Homo sapien
tgataaggaactgtaatggcaatta

SEQ ID NO: 5527832 - DNA, 25 bp, Homo sapien
atattatgctgccagaggaaacatt

SEQ ID NO: 5527833 - DNA, 25 bp, Homo sapien
ttcgctttagaacagacaggcaaca

SEQ ID NO: 5527834 - DNA, 25 bp, Homo sapien
cttcaaaggttaacaacagccattg

SEQ ID NO: 5527835 - DNA, 25 bp, Homo sapien
taaatgaacataatactgggagtaa

SEQ ID NO: 5527836 - DNA, 25 bp, Homo sapien
atactgggagtaaaatgcattataa

SEQ ID NO: 5527837 - DNA, 25 bp, Homo sapien
tataagatacagaatggtactgatt

SEQ ID NO: 5527838 - DNA, 25 bp, Homo sapien
tggttatttggtaaaaagtgatctc

SEQ ID NO: 5527839 - DNA, 25 bp, Homo sapien
aacagacaggcaacactataatatc

SEQ ID NO: 5527840 - DNA, 25 bp, Homo sapien
aaaagtggctggttcgctttagaac

SEQ ID NO: 5527841 - DNA, 25 bp, Homo sapien
ctgtctctaaggatagcaaacatat

SEQ ID NO: 5527842 - DNA, 25 bp, Homo sapien
tgttctgagaacatacctgtgcact

SEQ ID NO: 5527843 - DNA, 25 bp, Homo sapien
aagccagattgaaaaagtggctggt

SEQ ID NO: 5527844 - DNA, 25 bp, Homo sapien
aatgacagccccttaagcatgcttc

SEQ ID NO: 5527845 - DNA, 25 bp, Homo sapien
tgtgaatgctggtgagatgcttcat

SEQ ID NO: 5527846 - DNA, 25 bp, Homo sapien
tcagcttggataaccaggctgggct

SEQ ID NO: 5527847 - DNA, 25 bp, Homo sapien
gctcagctcccacaaatgacagccc

SEQ ID NO: 5527848 - DNA, 25 bp, Homo sapien
gtggggccaagagtcacttctaata

SEQ ID NO: 5527849 - DNA, 25 bp, Homo sapien
cagtctggccctgatgctgcaactc

SEQ ID NO: 5527850 - DNA, 25 bp, Homo sapien
tgctgcagccatgcatgtgaatgct

SEQ ID NO: 5527851 - DNA, 25 bp, Homo sapien
gtggcgaggttctatgctgcagcca

SEQ ID NO: 5527852 - DNA, 25 bp, Homo sapien
ctgtcacccagtctgttgctgctcc

SEQ ID NO: 5527853 - DNA, 25 bp, Homo sapien
ggggtctcctgctcagtctggccct

SEQ ID NO: 5527854 - DNA, 25 bp, Homo sapien
gctgcaactctggctccttggctga

SEQ ID NO: 5527855 - DNA, 25 bp, Homo sapien
ttaggttagaattgtacaggatata

SEQ ID NO: 5527856 - DNA, 25 bp, Homo sapien
aaaacaaagcaccaactaagaatgt

SEQ ID NO: 5527857 - DNA, 25 bp, Homo sapien
gaaatgccaatttatggggataatc

SEQ ID NO: 5527858 - DNA, 25 bp, Homo sapien
gggctcaccagactccggagagtca

SEQ ID NO: 5527859 - DNA, 25 bp, Homo sapien
tcagcacaatgaaagtattagaaca

SEQ ID NO: 5527860 - DNA, 25 bp, Homo sapien
taaaggcctaaaagaatgaaatgtg

SEQ ID NO: 5527861 - DNA, 25 bp, Homo sapien
atgtgactatcaaagggttatactt

SEQ ID NO: 5527862 - DNA, 25 bp, Homo sapien
tattagaacatgtggcattgtcaga

SEQ ID NO: 5527863 - DNA, 25 bp, Homo sapien
atttgcaaaagaattaggttagaat

SEQ ID NO: 5527864 - DNA, 25 bp, Homo sapien
atttagtgtaagaccaagtagggct

SEQ ID NO: 5527865 - DNA, 25 bp, Homo sapien
tggcataatgcatgaattgagattc

SEQ ID NO: 5527866 - DNA, 25 bp, Homo sapien
attgactttgccacatagctgaact

SEQ ID NO: 5527867 - DNA, 25 bp, Homo sapien
gcccgctgcatgacccgtctctcct

SEQ ID NO: 5527868 - DNA, 25 bp, Homo sapien
tccgattcacagaggtttcaggggg

SEQ ID NO: 5527869 - DNA, 25 bp, Homo sapien
tgcgtcctgcaccctcctgggccca

SEQ ID NO: 5527870 - DNA, 25 bp, Homo sapien
tggagatgtatggtgtaaaacacac

SEQ ID NO: 5527871 - DNA, 25 bp, Homo sapien
ctcctgggcccacctccgattcaca

SEQ ID NO: 5527872 - DNA, 25 bp, Homo sapien
gggacccaaatcactgctggttttc

SEQ ID NO: 5527873 - DNA, 25 bp, Homo sapien
ctttctgggactatttctgctgcgt

SEQ ID NO: 5527874 - DNA, 25 bp, Homo sapien
acaaaaaagcacaagcccgctgcat

SEQ ID NO: 5527875 - DNA, 25 bp, Homo sapien
ttactggaaaaattcagaggcctaa

SEQ ID NO: 5527876 - DNA, 25 bp, Homo sapien
aaaacacacaaacacacacaaaaaa

SEQ ID NO: 5527877 - DNA, 25 bp, Homo sapien
ttacaagagtgaaagataagttctc

SEQ ID NO: 5527878 - DNA, 25 bp, Homo sapien
tatcaaaacacacggatgcagtacc

SEQ ID NO: 5527879 - DNA, 25 bp, Homo sapien
tactgagaatcgcaccaggcctttc

SEQ ID NO: 5527880 - DNA, 25 bp, Homo sapien
tggcagccacctcatccggaggcta

SEQ ID NO: 5527881 - DNA, 25 bp, Homo sapien
ccagtacttctaggtagggtgggtg

SEQ ID NO: 5527882 - DNA, 25 bp, Homo sapien
aaagagatgtggatatgtggctttt

SEQ ID NO: 5527883 - DNA, 25 bp, Homo sapien
ctagttagttagaaggtgaaggtga

SEQ ID NO: 5527884 - DNA, 25 bp, Homo sapien
ctgtgcccagtggatacaaagtgaa

SEQ ID NO: 5527885 - DNA, 25 bp, Homo sapien
tgtgttactgcacttggggatggag

SEQ ID NO: 5527886 - DNA, 25 bp, Homo sapien
ggatggagatgtttgattcgatgtt

SEQ ID NO: 5527887 - DNA, 25 bp, Homo sapien
aaagtgaaatctagataagggcgtg

SEQ ID NO: 5527888 - DNA, 25 bp, Homo sapien
cagcactccatctgggtcaggacag

SEQ ID NO: 5527889 - DNA, 25 bp, Homo sapien
ggtcaggaattggagctcctgcctg

SEQ ID NO: 5527890 - DNA, 25 bp, Homo sapien
tacacagaattctagctagcagaac

SEQ ID NO: 5527891 - DNA, 25 bp, Homo sapien
gagatgtgagagcagcactccatct

SEQ ID NO: 5527892 - DNA, 25 bp, Homo sapien
tgcattttgagaggacgttctttcc

SEQ ID NO: 5527893 - DNA, 25 bp, Homo sapien
cacttccacacactctggccacccc

SEQ ID NO: 5527894 - DNA, 25 bp, Homo sapien
gccctgctgcccacgatgactggct

SEQ ID NO: 5527895 - DNA, 25 bp, Homo sapien
ttctagctagcagaacacacgagca

SEQ ID NO: 5527896 - DNA, 25 bp, Homo sapien
tggagctcctgcctgtgttcacact

SEQ ID NO: 5527897 - DNA, 25 bp, Homo sapien
tgacggagctagactgtctccgaaa

SEQ ID NO: 5527898 - DNA, 25 bp, Homo sapien
ccccaaattgcaaggtacacagaat

SEQ ID NO: 5527899 - DNA, 25 bp, Homo sapien
aaaggtgacataaaatgtaagttgc

SEQ ID NO: 5527900 - DNA, 25 bp, Homo sapien
tggatcgtagctgcaccagtactcc

SEQ ID NO: 5527901 - DNA, 25 bp, Homo sapien
ttcatagaacccagagagtgataaa

SEQ ID NO: 5527902 - DNA, 25 bp, Homo sapien
ggctgctgtctggatcgtagctgca

SEQ ID NO: 5527903 - DNA, 25 bp, Homo sapien
cagagagtgataaatgagaagtctg

SEQ ID NO: 5527904 - DNA, 25 bp, Homo sapien
gtaagttgcgcaagagttccacaga

SEQ ID NO: 5527905 - DNA, 25 bp, Homo sapien
gagaagtctggataagccatggaat

SEQ ID NO: 5527906 - DNA, 25 bp, Homo sapien
aaggcagcttggtctgttgctcctg

SEQ ID NO: 5527907 - DNA, 25 bp, Homo sapien
cacagatgcaccctctcagaccaag

SEQ ID NO: 5527908 - DNA, 25 bp, Homo sapien
ttactatggttgagggtgtttactc

SEQ ID NO: 5527909 - DNA, 25 bp, Homo sapien
gaattggctgcttaactgagtgaca

SEQ ID NO: 5527910 - DNA, 25 bp, Homo sapien
tctaagacaactagtatctcactag

SEQ ID NO: 5527911 - DNA, 25 bp, Homo sapien
ctagtgagatactagttgtcttaga

SEQ ID NO: 5527912 - DNA, 25 bp, Homo sapien
atgcattaacaggatacaacagttc

SEQ ID NO: 5527913 - DNA, 25 bp, Homo sapien
acgaatgcccttacacagcacagat

SEQ ID NO: 5527914 - DNA, 25 bp, Homo sapien
ttccaaagcggcagaagtattgaag

SEQ ID NO: 5527915 - DNA, 25 bp, Homo sapien
actctaacaagtctgaatggtgcat

SEQ ID NO: 5527916 - DNA, 25 bp, Homo sapien
tcacctaaagagaaaatgcacagat

SEQ ID NO: 5527917 - DNA, 25 bp, Homo sapien
tgggcaaacttggcagtcataaacc

SEQ ID NO: 5527918 - DNA, 25 bp, Homo sapien
aatggtgcataagtacagtaacagc

SEQ ID NO: 5527919 - DNA, 25 bp, Homo sapien
ggagtcacagagcaatatgcattaa

SEQ ID NO: 5527920 - DNA, 25 bp, Homo sapien
agtaacagcatgagtacgaatgccc

SEQ ID NO: 5527921 - DNA, 25 bp, Homo sapien
aaatgcacagatgtatggtggaaaa

SEQ ID NO: 5527922 - DNA, 25 bp, Homo sapien
aacactgaaactactacaggactcc

SEQ ID NO: 5527923 - DNA, 25 bp, Homo sapien
tgaaagcctagcggtcagagcttag

SEQ ID NO: 5527924 - DNA, 25 bp, Homo sapien
agggagtctcctcgccagaaagttc

SEQ ID NO: 5527925 - DNA, 25 bp, Homo sapien
cactgttttcagataggatggggac

SEQ ID NO: 5527926 - DNA, 25 bp, Homo sapien
gggcgtcagctatggtttagcagct

SEQ ID NO: 5527927 - DNA, 25 bp, Homo sapien
acatcacagccgcagcacacaattc

SEQ ID NO: 5527928 - DNA, 25 bp, Homo sapien
ggagactgctctctagcccctgggc

SEQ ID NO: 5527929 - DNA, 25 bp, Homo sapien
tttagcagcttccagcgaccgaaac

SEQ ID NO: 5527930 - DNA, 25 bp, Homo sapien
gcgaccgaaacctacatcacagccg

SEQ ID NO: 5527931 - DNA, 25 bp, Homo sapien
aggcagaagctgttagagactcttc

SEQ ID NO: 5527932 - DNA, 25 bp, Homo sapien
acctggtgctcaatattgggatctc

SEQ ID NO: 5527933 - DNA, 25 bp, Homo sapien
acatatggatgattcaagagggagt

SEQ ID NO: 5527934 - DNA, 25 bp, Homo sapien
tgtggtgaacagatttggtaacttc

SEQ ID NO: 5527935 - DNA, 25 bp, Homo sapien
tctcaggtttgtggtgaacagattt

SEQ ID NO: 5527936 - DNA, 25 bp, Homo sapien
caccacaaactgatatgctagaaat

SEQ ID NO: 5527937 - DNA, 25 bp, Homo sapien
tggaaggagtccatatccagtcacc

SEQ ID NO: 5527938 - DNA, 25 bp, Homo sapien
agaaagtcactgaggcctttgtata

SEQ ID NO: 5527939 - DNA, 25 bp, Homo sapien
attaaatgagacttggaaggagtcc

SEQ ID NO: 5527940 - DNA, 25 bp, Homo sapien
acttaaaacgtaggcattatccaat

SEQ ID NO: 5527941 - DNA, 25 bp, Homo sapien
tgctggtgtccaaatgtccacagtt

SEQ ID NO: 5527942 - DNA, 25 bp, Homo sapien
gacttcatttaatagagaaagactc

SEQ ID NO: 5527943 - DNA, 25 bp, Homo sapien
taaagatgattcgttaggtaaggag

SEQ ID NO: 5527944 - DNA, 25 bp, Homo sapien
tgctttgcaaattgtagatgtccta

SEQ ID NO: 5527945 - DNA, 25 bp, Homo sapien
aggatctcaacacgtaggcatcacc

SEQ ID NO: 5527946 - DNA, 25 bp, Homo sapien
ctccagactccaagcagtgtgagtg

SEQ ID NO: 5527947 - DNA, 25 bp, Homo sapien
caacaacttccttctgcacaacctg

SEQ ID NO: 5527948 - DNA, 25 bp, Homo sapien
aaaactttattgagctcatggagaa

SEQ ID NO: 5527949 - DNA, 25 bp, Homo sapien
ggaccaggatctcaacacgtaggca

SEQ ID NO: 5527950 - DNA, 25 bp, Homo sapien
agactccaagcagtgtgagtgcctg

SEQ ID NO: 5527951 - DNA, 25 bp, Homo sapien
aacctgatcttggacacgggcatca

SEQ ID NO: 5527952 - DNA, 25 bp, Homo sapien
tcatggagaaagtgactccagactc

SEQ ID NO: 5527953 - DNA, 25 bp, Homo sapien
atctcaacacgtaggcatcacccag

SEQ ID NO: 5527954 - DNA, 25 bp, Homo sapien
ttctgcacaacctgatcttggacac

SEQ ID NO: 5527955 - DNA, 25 bp, Homo sapien
gcacaacctgatcttggacacgggc

SEQ ID NO: 5527956 - DNA, 25 bp, Homo sapien
gaagaggtcaatacaggtgacacct

SEQ ID NO: 5527957 - DNA, 25 bp, Homo sapien
gcctccgtaccctgcttccaaggtc

SEQ ID NO: 5527958 - DNA, 25 bp, Homo sapien
aagggggtgtttagagtcacttgta

SEQ ID NO: 5527959 - DNA, 25 bp, Homo sapien
ggtgacacctagtcctgggaggtgg

SEQ ID NO: 5527960 - DNA, 25 bp, Homo sapien
ctggtgattgttcctctgtagcagc

SEQ ID NO: 5527961 - DNA, 25 bp, Homo sapien
ttgtactgcctcattctgtgtcctc

SEQ ID NO: 5527962 - DNA, 25 bp, Homo sapien
gtcctcatttataaagaagggataa

SEQ ID NO: 5527963 - DNA, 25 bp, Homo sapien
attttaggacacacgcctccgtacc

SEQ ID NO: 5527964 - DNA, 25 bp, Homo sapien
cttttataatcagaggggaagaggt

SEQ ID NO: 5527965 - DNA, 25 bp, Homo sapien
aaagaagggataataacacctgccc

SEQ ID NO: 5527966 - DNA, 25 bp, Homo sapien
ctgtaaatacagcatgatcccaatc

SEQ ID NO: 5527967 - DNA, 25 bp, Homo sapien
accccaccaccaacagtgcgcgggt

SEQ ID NO: 5527968 - DNA, 25 bp, Homo sapien
cgcgctggtccaagctgctcatcgc

SEQ ID NO: 5527969 - DNA, 25 bp, Homo sapien
tcggggtcaacacgttctttgccac

SEQ ID NO: 5527970 - DNA, 25 bp, Homo sapien
gcagcatctggctgtgctatgcggc

SEQ ID NO: 5527971 - DNA, 25 bp, Homo sapien
cgcgggcttcgtgaagatccgctgg

SEQ ID NO: 5527972 - DNA, 25 bp, Homo sapien
catcacgtccttcgccgcgggcttc

SEQ ID NO: 5527973 - DNA, 25 bp, Homo sapien
ggtcttccttctggcgcacacgcgc

SEQ ID NO: 5527974 - DNA, 25 bp, Homo sapien
cgcggcagatgctgcctccacgctg

SEQ ID NO: 5527975 - DNA, 25 bp, Homo sapien
ctggtggtctactacgtgcacatcc

SEQ ID NO: 5527976 - DNA, 25 bp, Homo sapien
tctgtgccctggtcttcggggtcaa

SEQ ID NO: 5527977 - DNA, 25 bp, Homo sapien
gccttcgtgctgttccgcggctcct

SEQ ID NO: 5527978 - DNA, 25 bp, Homo sapien
aggagggagctaatccagtaacaaa

SEQ ID NO: 5527979 - DNA, 25 bp, Homo sapien
acaggcattcttaagcgttagtcac

SEQ ID NO: 5527980 - DNA, 25 bp, Homo sapien
cattagttacatgttgtcaaagtcc

SEQ ID NO: 5527981 - DNA, 25 bp, Homo sapien
gagaactgggaatggaattcaaatc

SEQ ID NO: 5527982 - DNA, 25 bp, Homo sapien
tagatatgcacagtgtatttggcac

SEQ ID NO: 5527983 - DNA, 25 bp, Homo sapien
ttaagaaacaaaacgcaatgagaac

SEQ ID NO: 5527984 - DNA, 25 bp, Homo sapien
ttgctatgctccaagctgccatcca

SEQ ID NO: 5527985 - DNA, 25 bp, Homo sapien
gattgactctatgcatggtaccatc

SEQ ID NO: 5527986 - DNA, 25 bp, Homo sapien
accttcctctcaaagacaggcattc

SEQ ID NO: 5527987 - DNA, 25 bp, Homo sapien
tggtaccatcacacagaaggaggag

SEQ ID NO: 5527988 - DNA, 25 bp, Homo sapien
aacatcacaaggatttgattgactc

SEQ ID NO: 5527989 - DNA, 25 bp, Homo sapien
tttcaggaaggttatttgacagatg

SEQ ID NO: 5527990 - DNA, 25 bp, Homo sapien
gcacacatgaaattcctaaggggac

SEQ ID NO: 5527991 - DNA, 25 bp, Homo sapien
gagggagcatgtgaagttcatgatt

SEQ ID NO: 5527992 - DNA, 25 bp, Homo sapien
taaaaacagacccatggcacacatg

SEQ ID NO: 5527993 - DNA, 25 bp, Homo sapien
tctacttgttgtttggcctggattc

SEQ ID NO: 5527994 - DNA, 25 bp, Homo sapien
tgacagatgttaagtctgcagaatg

SEQ ID NO: 5527995 - DNA, 25 bp, Homo sapien
aaataatgaacaacagagctactcc

SEQ ID NO: 5527996 - DNA, 25 bp, Homo sapien
tattgactatgccaggaaaaaattc

SEQ ID NO: 5527997 - DNA, 25 bp, Homo sapien
aacttgactgttacatggacctgtt

SEQ ID NO: 5527998 - DNA, 25 bp, Homo sapien
ttcctaaggggacttgctttgatcc

SEQ ID NO: 5527999 - DNA, 25 bp, Homo sapien
agagcagtaacgtttgttgagggag

SEQ ID NO: 5528000 - DNA, 25 bp, Homo sapien
ctgtagagtggtacaggcttgctat

SEQ ID NO: 5528001 - DNA, 25 bp, Homo sapien
gaacatctgagccatgacagtaagc

SEQ ID NO: 5528002 - DNA, 25 bp, Homo sapien
actgcaattcagggaagtttggggt

SEQ ID NO: 5528003 - DNA, 25 bp, Homo sapien
cgcccgtctgtgcacctgccaaggc

SEQ ID NO: 5528004 - DNA, 25 bp, Homo sapien
tactatggggttgctgtaaatggag

SEQ ID NO: 5528005 - DNA, 25 bp, Homo sapien
taaatggagtttcactgcagctggt

SEQ ID NO: 5528006 - DNA, 25 bp, Homo sapien
tacacttgcagaggctgaatgcttc

SEQ ID NO: 5528007 - DNA, 25 bp, Homo sapien
ttggaaaggagagctcccacttcac

SEQ ID NO: 5528008 - DNA, 25 bp, Homo sapien
ggtgaagatgcgagtgaacatctga

SEQ ID NO: 5528009 - DNA, 25 bp, Homo sapien
aacataagtatggatgtcaggggtg

SEQ ID NO: 5528010 - DNA, 25 bp, Homo sapien
ctgaaaataatgatgtgtccatggc

SEQ ID NO: 5528011 - DNA, 25 bp, Homo sapien
agcttttgtgatgggcgattgagag

SEQ ID NO: 5528012 - DNA, 25 bp, Homo sapien
aaggtcgtgacatgtgctcaccgat

SEQ ID NO: 5528013 - DNA, 25 bp, Homo sapien
aagcgcttccactgcagagagccaa

SEQ ID NO: 5528014 - DNA, 25 bp, Homo sapien
tggccatgcactggcaactgcagcc

SEQ ID NO: 5528015 - DNA, 25 bp, Homo sapien
gggcggtgttatgtcctgagtcaga

SEQ ID NO: 5528016 - DNA, 25 bp, Homo sapien
atccggaaatatggagaccccggga

SEQ ID NO: 5528017 - DNA, 25 bp, Homo sapien
gaagcaggaatcccgagacatcttt

SEQ ID NO: 5528018 - DNA, 25 bp, Homo sapien
ggctgtacagctgcgacatcaccgc

SEQ ID NO: 5528019 - DNA, 25 bp, Homo sapien
gaggacaacgtgatccggaaatatg

SEQ ID NO: 5528020 - DNA, 25 bp, Homo sapien
agtttgataacgatgctgaccccac

SEQ ID NO: 5528021 - DNA, 25 bp, Homo sapien
aaaaggcagcatgttaatacgaagc

SEQ ID NO: 5528022 - DNA, 25 bp, Homo sapien
ttaaatgacttgccccacgtggatt

SEQ ID NO: 5528023 - DNA, 25 bp, Homo sapien
tcggccctgtatgtctatcaagaat

SEQ ID NO: 5528024 - DNA, 25 bp, Homo sapien
accctgtatgtcttctcggccctgt

SEQ ID NO: 5528025 - DNA, 25 bp, Homo sapien
aagcaaccacaggcaatatgtaaac

SEQ ID NO: 5528026 - DNA, 25 bp, Homo sapien
ccactctaagtgccaaagcaaccac

SEQ ID NO: 5528027 - DNA, 25 bp, Homo sapien
gccccacgtggatttcaggcctgtc

SEQ ID NO: 5528028 - DNA, 25 bp, Homo sapien
acatagatgaagattctgcaaactt

SEQ ID NO: 5528029 - DNA, 25 bp, Homo sapien
caggaggccagtttgccaactgctg

SEQ ID NO: 5528030 - DNA, 25 bp, Homo sapien
attgccagatcttgaatatacctta

SEQ ID NO: 5528031 - DNA, 25 bp, Homo sapien
tgaaaaaactgtggcagaaaggtta

SEQ ID NO: 5528032 - DNA, 25 bp, Homo sapien
ttctgggacatagagtttctgttgc

SEQ ID NO: 5528033 - DNA, 25 bp, Homo sapien
ccggctgcgtgatccagcctgtgcc

SEQ ID NO: 5528034 - DNA, 25 bp, Homo sapien
cactcacagggtacgctcatggaga

SEQ ID NO: 5528035 - DNA, 25 bp, Homo sapien
cttccaactgccacctggacgggga

SEQ ID NO: 5528036 - DNA, 25 bp, Homo sapien
gacgaggaccatgcctatgctctgc

SEQ ID NO: 5528037 - DNA, 25 bp, Homo sapien
aggctgccatggcaccgtgcatcat

SEQ ID NO: 5528038 - DNA, 25 bp, Homo sapien
gcaccgtgcatcatctcctcgccca

SEQ ID NO: 5528039 - DNA, 25 bp, Homo sapien
ctgcaacgtcatcgtgaacggcacg

SEQ ID NO: 5528040 - DNA, 25 bp, Homo sapien
ataagtaaaaggaacgttcactcac

SEQ ID NO: 5528041 - DNA, 25 bp, Homo sapien
gcgacaagtcagacccgaaccttaa

SEQ ID NO: 5528042 - DNA, 25 bp, Homo sapien
ccgctcaaaaggaggtgcctccgaa

SEQ ID NO: 5528043 - DNA, 25 bp, Homo sapien
gaggtgcctccgaattagaaatcag

SEQ ID NO: 5528044 - DNA, 25 bp, Homo sapien
agttctaaaagctggtacaggtgac

SEQ ID NO: 5528045 - DNA, 25 bp, Homo sapien
ttttaggcaaagcacacaacttcat

SEQ ID NO: 5528046 - DNA, 25 bp, Homo sapien
ttcaggtaactgggcattttaggca

SEQ ID NO: 5528047 - DNA, 25 bp, Homo sapien
ctgggcattttaggcaaagcacaca

SEQ ID NO: 5528048 - DNA, 25 bp, Homo sapien
aagctggtacaggtgacaaattttg

SEQ ID NO: 5528049 - DNA, 25 bp, Homo sapien
gaggaggataagataaacagttcta

SEQ ID NO: 5528050 - DNA, 25 bp, Homo sapien
ttgttgtatcagaaaaacgacatcc

SEQ ID NO: 5528051 - DNA, 25 bp, Homo sapien
tcatgatgtatcactgaggaggata

SEQ ID NO: 5528052 - DNA, 25 bp, Homo sapien
gagatgggaagtttgtattaagttc

SEQ ID NO: 5528053 - DNA, 25 bp, Homo sapien
agaaaaacgacatcctagactgggc

SEQ ID NO: 5528054 - DNA, 25 bp, Homo sapien
tatcactgaggaggataagataaac

SEQ ID NO: 5528055 - DNA, 25 bp, Homo sapien
tcactttcagtgggacatttgcttt

SEQ ID NO: 5528056 - DNA, 25 bp, Homo sapien
ttacatatggggcaagaaataaatc

SEQ ID NO: 5528057 - DNA, 25 bp, Homo sapien
ccaccctgcaaccaaagaaacaaac

SEQ ID NO: 5528058 - DNA, 25 bp, Homo sapien
tgctgaaaatcacatgcctctaacc

SEQ ID NO: 5528059 - DNA, 25 bp, Homo sapien
ctccatctccaggtacaaaaatccc

SEQ ID NO: 5528060 - DNA, 25 bp, Homo sapien
agtactaatcagataaggaaaaaag

SEQ ID NO: 5528061 - DNA, 25 bp, Homo sapien
caaaacccaaacccacaactcagct

SEQ ID NO: 5528062 - DNA, 25 bp, Homo sapien
atgatctaagacttcctaggatgct

SEQ ID NO: 5528063 - DNA, 25 bp, Homo sapien
gaaaaaagaccctctgtgcacactg

SEQ ID NO: 5528064 - DNA, 25 bp, Homo sapien
tgcaggtcatggttgaaaaatcagg

SEQ ID NO: 5528065 - DNA, 25 bp, Homo sapien
aataagtttgcaagaaatgagactc

SEQ ID NO: 5528066 - DNA, 25 bp, Homo sapien
ttacagacatcgagatataatcaac

SEQ ID NO: 5528067 - DNA, 25 bp, Homo sapien
aagacctcaagactccaagaacagc

SEQ ID NO: 5528068 - DNA, 25 bp, Homo sapien
ttagataatgaggaacacctctttc

SEQ ID NO: 5528069 - DNA, 25 bp, Homo sapien
aaacaggaatatgatagaagctcac

SEQ ID NO: 5528070 - DNA, 25 bp, Homo sapien
aagaaagcaggaaatcaattcacaa

SEQ ID NO: 5528071 - DNA, 25 bp, Homo sapien
cgaaaatgcaaatatgaactaagaa

SEQ ID NO: 5528072 - DNA, 25 bp, Homo sapien
taatcaacttcgtataggctgggcc

SEQ ID NO: 5528073 - DNA, 25 bp, Homo sapien
aaagaaaaagcagtaatgtcacaac

SEQ ID NO: 5528074 - DNA, 25 bp, Homo sapien
tataggctgggccgtttaggttatc

SEQ ID NO: 5528075 - DNA, 25 bp, Homo sapien
tacaaagaccagcaagagtagattt

SEQ ID NO: 5528076 - DNA, 25 bp, Homo sapien
agaagctcacatagagaatgcacat

SEQ ID NO: 5528077 - DNA, 25 bp, Homo sapien
ctgccagtgaaggatatctacaact

SEQ ID NO: 5528078 - DNA, 25 bp, Homo sapien
atatttatggccatcgaggactctc

SEQ ID NO: 5528079 - DNA, 25 bp, Homo sapien
gagctgaccaacctgaactggctgc

SEQ ID NO: 5528080 - DNA, 25 bp, Homo sapien
gtctccagtggactgagtcagtgtt

SEQ ID NO: 5528081 - DNA, 25 bp, Homo sapien
caggaagacgatgacctcgactttt

SEQ ID NO: 5528082 - DNA, 25 bp, Homo sapien
gccagaaagctcaggaattagtgtc

SEQ ID NO: 5528083 - DNA, 25 bp, Homo sapien
catgcctcccagtaagaagccagaa

SEQ ID NO: 5528084 - DNA, 25 bp, Homo sapien
gaggactctccaaccaagcgcctgc

SEQ ID NO: 5528085 - DNA, 25 bp, Homo sapien
acgtaaatgggtccagtcatgcctc

SEQ ID NO: 5528086 - DNA, 25 bp, Homo sapien
agaacttgctgaagagctttgggga

SEQ ID NO: 5528087 - DNA, 25 bp, Homo sapien
catgccctacgatgccaggcagaac

SEQ ID NO: 5528088 - DNA, 25 bp, Homo sapien
ggaaagtaatccaaacagcctgtga

SEQ ID NO: 5528089 - DNA, 25 bp, Homo sapien
tggggggcatcatacctaaagaaga

SEQ ID NO: 5528090 - DNA, 25 bp, Homo sapien
tggccttgggaaaagtctaaacatc

SEQ ID NO: 5528091 - DNA, 25 bp, Homo sapien
aaggcaggcaagaatttttgtccct

SEQ ID NO: 5528092 - DNA, 25 bp, Homo sapien
tataaggattcagctggccttggga

SEQ ID NO: 5528093 - DNA, 25 bp, Homo sapien
aagcaagtttcttggaagggaggct

SEQ ID NO: 5528094 - DNA, 25 bp, Homo sapien
ccaggttctctgagtcaacaccctc

SEQ ID NO: 5528095 - DNA, 25 bp, Homo sapien
ggctttggcaaccctcgcaattcgc

SEQ ID NO: 5528096 - DNA, 25 bp, Homo sapien
ttttgtccctgtcgggagaagagtc

SEQ ID NO: 5528097 - DNA, 25 bp, Homo sapien
ctgtgagctcaggcttcccagttag

SEQ ID NO: 5528098 - DNA, 25 bp, Homo sapien
tggacaccagacacctaagcaagtt

SEQ ID NO: 5528099 - DNA, 25 bp, Homo sapien
gcatcaatgacggagggttatccat

SEQ ID NO: 5528100 - DNA, 25 bp, Homo sapien
agggtgctcaagaggacttcttata

SEQ ID NO: 5528101 - DNA, 25 bp, Homo sapien
acacctatagtcaaagagtggcatg

SEQ ID NO: 5528102 - DNA, 25 bp, Homo sapien
ttgtattggatgctgttaggtgaac

SEQ ID NO: 5528103 - DNA, 25 bp, Homo sapien
aacacaaagcatcaatgacggaggg

SEQ ID NO: 5528104 - DNA, 25 bp, Homo sapien
gccagagaccactagaatcacacct

SEQ ID NO: 5528105 - DNA, 25 bp, Homo sapien
ggttatccataagagggtgctcaag

SEQ ID NO: 5528106 - DNA, 25 bp, Homo sapien
atagtcaaagagtggcatgtaaaga

SEQ ID NO: 5528107 - DNA, 25 bp, Homo sapien
tgtaataaggatgaacacaaagcat

SEQ ID NO: 5528108 - DNA, 25 bp, Homo sapien
agaataccacaggaacaaagcatgc

SEQ ID NO: 5528109 - DNA, 25 bp, Homo sapien
ctgtgccatcttgccagagaccact

SEQ ID NO: 5528110 - DNA, 25 bp, Homo sapien
atgtcacatcagctcattcatgccc

SEQ ID NO: 5528111 - DNA, 25 bp, Homo sapien
aaagaaagaagtggcataatgtcac

SEQ ID NO: 5528112 - DNA, 25 bp, Homo sapien
gcatggagaactaatttggctctat

SEQ ID NO: 5528113 - DNA, 25 bp, Homo sapien
aatgccaagttaataagggagaacc

SEQ ID NO: 5528114 - DNA, 25 bp, Homo sapien
agcttatgagtttatctacgcccac

SEQ ID NO: 5528115 - DNA, 25 bp, Homo sapien
gcaaaacacaaatcttccaatgact

SEQ ID NO: 5528116 - DNA, 25 bp, Homo sapien
tgatcacagatttcaacagagtttt

SEQ ID NO: 5528117 - DNA, 25 bp, Homo sapien
tctgattctcagggcatgaaaacat

SEQ ID NO: 5528118 - DNA, 25 bp, Homo sapien
gcatacaaaagctatgtaaaaatcc

SEQ ID NO: 5528119 - DNA, 25 bp, Homo sapien
cagggcatgaaaacattatgggaaa

SEQ ID NO: 5528120 - DNA, 25 bp, Homo sapien
agagttttaggctgaaaaaaatatc

SEQ ID NO: 5528121 - DNA, 25 bp, Homo sapien
gccctcagtgagataaattagattt

SEQ ID NO: 5528122 - DNA, 25 bp, Homo sapien
ggccaaaccctcacaacccctgatg

SEQ ID NO: 5528123 - DNA, 25 bp, Homo sapien
aagagttccaagttgaagggaaaca

SEQ ID NO: 5528124 - DNA, 25 bp, Homo sapien
tcccaggccgcaccatttctgtcac

SEQ ID NO: 5528125 - DNA, 25 bp, Homo sapien
agcctacaagctggcacttgctaac

SEQ ID NO: 5528126 - DNA, 25 bp, Homo sapien
tctgagttctgtacttcaaccagcc

SEQ ID NO: 5528127 - DNA, 25 bp, Homo sapien
tgcccctctgttggaggcacagttt

SEQ ID NO: 5528128 - DNA, 25 bp, Homo sapien
ctgtcctgggccagggatctctcta

SEQ ID NO: 5528129 - DNA, 25 bp, Homo sapien
ccaagataaaagaatggccaaaccc

SEQ ID NO: 5528130 - DNA, 25 bp, Homo sapien
tggaggcacagttttagaataagga

SEQ ID NO: 5528131 - DNA, 25 bp, Homo sapien
gatctctctacaagagcccctgccc

SEQ ID NO: 5528132 - DNA, 25 bp, Homo sapien
tgaagcaagccaatggcagatcaca

SEQ ID NO: 5528133 - DNA, 25 bp, Homo sapien
atggctgtcccatgtgcccagcaca

SEQ ID NO: 5528134 - DNA, 25 bp, Homo sapien
cgtggccttccacaatcaggagccc

SEQ ID NO: 5528135 - DNA, 25 bp, Homo sapien
tgttcaggtcccttccgtggccttc

SEQ ID NO: 5528136 - DNA, 25 bp, Homo sapien
gtctcgtgccatcgtgttcaggtcc

SEQ ID NO: 5528137 - DNA, 25 bp, Homo sapien
gcctgctggccagactagaaactaa

SEQ ID NO: 5528138 - DNA, 25 bp, Homo sapien
ggcagatcacatggaaagcctgctg

SEQ ID NO: 5528139 - DNA, 25 bp, Homo sapien
ggattagaaattgtacgtgtgtggc

SEQ ID NO: 5528140 - DNA, 25 bp, Homo sapien
tcctaaggctctgcgtatgtgtgta

SEQ ID NO: 5528141 - DNA, 25 bp, Homo sapien
cctcatctgtgggccagaaagacag

SEQ ID NO: 5528142 - DNA, 25 bp, Homo sapien
ggctccactggccactgaagcaagc

SEQ ID NO: 5528143 - DNA, 25 bp, Homo sapien
acaatttcgcgccaaacttgaccgc

SEQ ID NO: 5528144 - DNA, 25 bp, Homo sapien
ggggcggccacaatttcgcgccaaa

SEQ ID NO: 5528145 - DNA, 25 bp, Homo sapien
ctcccgctgctgtcatggttggttc

SEQ ID NO: 5528146 - DNA, 25 bp, Homo sapien
gccaaacttgaccgcgcgttctgct

SEQ ID NO: 5528147 - DNA, 25 bp, Homo sapien
gctcggaggtcctcccgctgctgtc

SEQ ID NO: 5528148 - DNA, 25 bp, Homo sapien
cgctgctgtcatggttggttcgcta

SEQ ID NO: 5528149 - DNA, 25 bp, Homo sapien
ccgcgcgttctgctgtaacgagcgg

SEQ ID NO: 5528150 - DNA, 25 bp, Homo sapien
aacttgaccgcgcgttctgctgtaa

SEQ ID NO: 5528151 - DNA, 25 bp, Homo sapien
gaggtcctcccgctgctgtcatggt

SEQ ID NO: 5528152 - DNA, 25 bp, Homo sapien
tcgcgccaaacttgaccgcgcgttc

SEQ ID NO: 5528153 - DNA, 25 bp, Homo sapien
gaccgcgcgttctgctgtaacgagc

SEQ ID NO: 5528154 - DNA, 25 bp, Homo sapien
agaataccgagaaccccaagttata

SEQ ID NO: 5528155 - DNA, 25 bp, Homo sapien
ccttgttgcccctgctgggtggaac

SEQ ID NO: 5528156 - DNA, 25 bp, Homo sapien
cctgtgtcaggactaaaggaagaat

SEQ ID NO: 5528157 - DNA, 25 bp, Homo sapien
gtgccctcctgctgctacaaagtgc

SEQ ID NO: 5528158 - DNA, 25 bp, Homo sapien
aatggatgcctttcgaaagatatgc

SEQ ID NO: 5528159 - DNA, 25 bp, Homo sapien
atgcttaaagcaagtgccctcctgc

SEQ ID NO: 5528160 - DNA, 25 bp, Homo sapien
agcgccctctggttgctgaaagtga

SEQ ID NO: 5528161 - DNA, 25 bp, Homo sapien
tccatgtcatacacagcaaggggag

SEQ ID NO: 5528162 - DNA, 25 bp, Homo sapien
gctacaaagtgcaaggctgcctgtg

SEQ ID NO: 5528163 - DNA, 25 bp, Homo sapien
cagttagatgacgttggaaatgata

SEQ ID NO: 5528164 - DNA, 25 bp, Homo sapien
cagtagttaagatagtcaatggcat

SEQ ID NO: 5528165 - DNA, 25 bp, Homo sapien
gagaaaagcaaatgtcagctatcat

SEQ ID NO: 5528166 - DNA, 25 bp, Homo sapien
tccagggagacacgtaattcagtct

SEQ ID NO: 5528167 - DNA, 25 bp, Homo sapien
ttaatgactagggcatgaatgatga

SEQ ID NO: 5528168 - DNA, 25 bp, Homo sapien
ttgttttgtctagaggaaaggagag

SEQ ID NO: 5528169 - DNA, 25 bp, Homo sapien
ggtgtgacaccctgctgaccaggat

SEQ ID NO: 5528170 - DNA, 25 bp, Homo sapien
aaaacagtaataatgtcaacgggca

SEQ ID NO: 5528171 - DNA, 25 bp, Homo sapien
aatgagaaaatagatgtcacagtcc

SEQ ID NO: 5528172 - DNA, 25 bp, Homo sapien
tggaccgatatcacgagcaggtttc

SEQ ID NO: 5528173 - DNA, 25 bp, Homo sapien
tgtaaaatgtaaatggaccgatatc

SEQ ID NO: 5528174 - DNA, 25 bp, Homo sapien
tactcaggtttccaggtgtgacacc

SEQ ID NO: 5528175 - DNA, 25 bp, Homo sapien
attccagtggtgcatgtttaatgac

SEQ ID NO: 5528176 - DNA, 25 bp, Homo sapien
gaacgtactactcttcctttagaaa

SEQ ID NO: 5528177 - DNA, 25 bp, Homo sapien
tttctaaaggaagagtagtacgttc

SEQ ID NO: 5528178 - DNA, 25 bp, Homo sapien
cccttttcaggcgcagacaacagaa

SEQ ID NO: 5528179 - DNA, 25 bp, Homo sapien
acggcgtgaataggcagtttcatgt

SEQ ID NO: 5528180 - DNA, 25 bp, Homo sapien
ttggtcattacaaagaagcacgttc

SEQ ID NO: 5528181 - DNA, 25 bp, Homo sapien
ggagaacttagcagaaatcggtacc

SEQ ID NO: 5528182 - DNA, 25 bp, Homo sapien
acagaaagaattacggcgtgaatag

SEQ ID NO: 5528183 - DNA, 25 bp, Homo sapien
acaaagtatagaggaacaacaaaat

SEQ ID NO: 5528184 - DNA, 25 bp, Homo sapien
agcgcgcatgctaactaaagtaacc

SEQ ID NO: 5528185 - DNA, 25 bp, Homo sapien
agcagaaatcggtaccttggtcatt

SEQ ID NO: 5528186 - DNA, 25 bp, Homo sapien
ccataaagcaattcacggatacaga

SEQ ID NO: 5528187 - DNA, 25 bp, Homo sapien
taacaattgcccacagcgcgcatgc

SEQ ID NO: 5528188 - DNA, 25 bp, Homo sapien
gcgcagacaacagaacaaagtatag

SEQ ID NO: 5528189 - DNA, 25 bp, Homo sapien
tactcccctagagctacaggttagc

SEQ ID NO: 5528190 - DNA, 25 bp, Homo sapien
tgaggcactgtgtacaatgaagaat

SEQ ID NO: 5528191 - DNA, 25 bp, Homo sapien
catcgagcaaaaacttgactagaac

SEQ ID NO: 5528192 - DNA, 25 bp, Homo sapien
tgggatagtaattgggtgtttcagg

SEQ ID NO: 5528193 - DNA, 25 bp, Homo sapien
tttgaagcaaacaatgggatagtaa

SEQ ID NO: 5528194 - DNA, 25 bp, Homo sapien
gttttttgcctgccagcatagcttc

SEQ ID NO: 5528195 - DNA, 25 bp, Homo sapien
tttggtaacagcaccctgatttcac

SEQ ID NO: 5528196 - DNA, 25 bp, Homo sapien
tgggtggcttatgaaacctaatccc

SEQ ID NO: 5528197 - DNA, 25 bp, Homo sapien
actagaactagttggggtcaaacaa

SEQ ID NO: 5528198 - DNA, 25 bp, Homo sapien
ttcacgtggtccatcgagcaaaaac

SEQ ID NO: 5528199 - DNA, 25 bp, Homo sapien
acaggttagctctgggcacagtaat

SEQ ID NO: 5528200 - DNA, 25 bp, Homo sapien
cggggtgctcactcaatcttggcta

SEQ ID NO: 5528201 - DNA, 25 bp, Homo sapien
gtctctaacacagatggaagatgtc

SEQ ID NO: 5528202 - DNA, 25 bp, Homo sapien
ttgcctcagtgttgaagccattgaa

SEQ ID NO: 5528203 - DNA, 25 bp, Homo sapien
atcttggctacgtgtacagatgcac

SEQ ID NO: 5528204 - DNA, 25 bp, Homo sapien
aaaagctgaactctagtctgtgtcc

SEQ ID NO: 5528205 - DNA, 25 bp, Homo sapien
tagggtcctctgaaaagcaaattgt

SEQ ID NO: 5528206 - DNA, 25 bp, Homo sapien
agcattacaaatgaagctgtgggag

SEQ ID NO: 5528207 - DNA, 25 bp, Homo sapien
gtgtacagatgcacgcccaagaatc

SEQ ID NO: 5528208 - DNA, 25 bp, Homo sapien
gtccttgagactttgtgctgcgcgg

SEQ ID NO: 5528209 - DNA, 25 bp, Homo sapien
gataaggaacagaagctatccaaac

SEQ ID NO: 5528210 - DNA, 25 bp, Homo sapien
aggaaaatggttgcgtccttgagac

SEQ ID NO: 5528211 - DNA, 25 bp, Homo sapien
aagggacactgcataagaagtaaca

SEQ ID NO: 5528212 - DNA, 25 bp, Homo sapien
tcatatggctagtgagacaacttcc

SEQ ID NO: 5528213 - DNA, 25 bp, Homo sapien
catgtgggaacattcagctggatga

SEQ ID NO: 5528214 - DNA, 25 bp, Homo sapien
cagtccaggagtcagcaacctatgg

SEQ ID NO: 5528215 - DNA, 25 bp, Homo sapien
gagaaggctcaagtgttgacaactg

SEQ ID NO: 5528216 - DNA, 25 bp, Homo sapien
gagacagctgtggctcatatggcta

SEQ ID NO: 5528217 - DNA, 25 bp, Homo sapien
agtcaacaatgataagaagaacagt

SEQ ID NO: 5528218 - DNA, 25 bp, Homo sapien
ttaaataggactgagactgccaaca

SEQ ID NO: 5528219 - DNA, 25 bp, Homo sapien
acttacagttaagtagaagggacac

SEQ ID NO: 5528220 - DNA, 25 bp, Homo sapien
gcactgctacagagttgggtggtaa

SEQ ID NO: 5528221 - DNA, 25 bp, Homo sapien
aaaggctgccgatctcactctgggc

SEQ ID NO: 5528222 - DNA, 25 bp, Homo sapien
aaaagggcaacgattcagtttcacc

SEQ ID NO: 5528223 - DNA, 25 bp, Homo sapien
gatttaaggatgagctttggaggat

SEQ ID NO: 5528224 - DNA, 25 bp, Homo sapien
agaagctggaatgttactttggctc

SEQ ID NO: 5528225 - DNA, 25 bp, Homo sapien
atgtgtacataactcccgcaggatc

SEQ ID NO: 5528226 - DNA, 25 bp, Homo sapien
aataaagatggcaaagcacactttc

SEQ ID NO: 5528227 - DNA, 25 bp, Homo sapien
ccctgtaagcagatgaagttagaag

SEQ ID NO: 5528228 - DNA, 25 bp, Homo sapien
ggatgtactatggaagagatgtgaa

SEQ ID NO: 5528229 - DNA, 25 bp, Homo sapien
cagatctgaagagtctgtgcagccg

SEQ ID NO: 5528230 - DNA, 25 bp, Homo sapien
tccttggttggctcgaatgtgtaca

SEQ ID NO: 5528231 - DNA, 25 bp, Homo sapien
gcactggccacatactatgggtccc

SEQ ID NO: 5528232 - DNA, 25 bp, Homo sapien
atgtgaatgtctgccggtgtgtcaa

SEQ ID NO: 5528233 - DNA, 25 bp, Homo sapien
accattttccaggggtgactgagag

SEQ ID NO: 5528234 - DNA, 25 bp, Homo sapien
actcccaagagacagacgttgatca

SEQ ID NO: 5528235 - DNA, 25 bp, Homo sapien
gaggacaagctcatgaggaactcta

SEQ ID NO: 5528236 - DNA, 25 bp, Homo sapien
cgtgacaaccacaatgtccccaggc

SEQ ID NO: 5528237 - DNA, 25 bp, Homo sapien
cacggagaagccacttaactccctc

SEQ ID NO: 5528238 - DNA, 25 bp, Homo sapien
aatgtccccaggcatcgcccagtgt

SEQ ID NO: 5528239 - DNA, 25 bp, Homo sapien
ggagcaccccccatcgtgacaacca

SEQ ID NO: 5528240 - DNA, 25 bp, Homo sapien
gagcagtgtctctggcctccaccca

SEQ ID NO: 5528241 - DNA, 25 bp, Homo sapien
atgcatgcctcgcttgaggacaagc

SEQ ID NO: 5528242 - DNA, 25 bp, Homo sapien
aaggctgtgtttccacggagaagcc

SEQ ID NO: 5528243 - DNA, 25 bp, Homo sapien
atgaggaactctagctactcccaag

SEQ ID NO: 5528244 - DNA, 25 bp, Homo sapien
cccactatctgagaacggggttgtc

SEQ ID NO: 5528245 - DNA, 25 bp, Homo sapien
tgcaaaaggtagagattagacccca

SEQ ID NO: 5528246 - DNA, 25 bp, Homo sapien
gcctgcgaagactaacgtcacctct

SEQ ID NO: 5528247 - DNA, 25 bp, Homo sapien
gcagagaagttaggagatccatcaa

SEQ ID NO: 5528248 - DNA, 25 bp, Homo sapien
ccgccgagtcattgcctgcgaagac

SEQ ID NO: 5528249 - DNA, 25 bp, Homo sapien
agatccatcaaagcagccagaccac

SEQ ID NO: 5528250 - DNA, 25 bp, Homo sapien
ccaagatcgctgtggaaatgactgg

SEQ ID NO: 5528251 - DNA, 25 bp, Homo sapien
gtggcatcacattccgccgagtcat

SEQ ID NO: 5528252 - DNA, 25 bp, Homo sapien
ctttggcttagggcatccttctccc

SEQ ID NO: 5528253 - DNA, 25 bp, Homo sapien
tcagctgcctcatcatgcaaaaggt

SEQ ID NO: 5528254 - DNA, 25 bp, Homo sapien
cccagaggttacacaacttccccca

SEQ ID NO: 5528255 - DNA, 25 bp, Homo sapien
cgattgagacagcactgaaaatgga

SEQ ID NO: 5528256 - DNA, 25 bp, Homo sapien
tgcccaagtcaacgattgagacagc

SEQ ID NO: 5528257 - DNA, 25 bp, Homo sapien
aacatccgcctggcagtgaaagaag

SEQ ID NO: 5528258 - DNA, 25 bp, Homo sapien
cgtcgaaaggagtcgcatcttctcc

SEQ ID NO: 5528259 - DNA, 25 bp, Homo sapien
tgagcacaacagcaacctggccaat

SEQ ID NO: 5528260 - DNA, 25 bp, Homo sapien
ggtgtgtcgcagcaaacatatgccc

SEQ ID NO: 5528261 - DNA, 25 bp, Homo sapien
tgcactttaccgcggctgtccccgc

SEQ ID NO: 5528262 - DNA, 25 bp, Homo sapien
gtccaaagtcaggcacatcaagggt

SEQ ID NO: 5528263 - DNA, 25 bp, Homo sapien
ggccaatatcttagaggtgtgtcgc

SEQ ID NO: 5528264 - DNA, 25 bp, Homo sapien
caaccctgagcacaacagcaacctg

SEQ ID NO: 5528265 - DNA, 25 bp, Homo sapien
caggacgctgcactttaccgcggct

SEQ ID NO: 5528266 - DNA, 25 bp, Homo sapien
ccttttgagccagccagatcccatg

SEQ ID NO: 5528267 - DNA, 25 bp, Homo sapien
aataaacatgagcacgatgagttgc

SEQ ID NO: 5528268 - DNA, 25 bp, Homo sapien
tgggaaaattccaatggcctcactc

SEQ ID NO: 5528269 - DNA, 25 bp, Homo sapien
tattggaaggatatccatgcgggga

SEQ ID NO: 5528270 - DNA, 25 bp, Homo sapien
ccccacgtctgcatcgcctcctagc

SEQ ID NO: 5528271 - DNA, 25 bp, Homo sapien
tggggtcactgcctgagtatccctc

SEQ ID NO: 5528272 - DNA, 25 bp, Homo sapien
gatgagttgcttattggaaggatat

SEQ ID NO: 5528273 - DNA, 25 bp, Homo sapien
ccaaagggaaaccccgtatccatga

SEQ ID NO: 5528274 - DNA, 25 bp, Homo sapien
ccgtatccatgaaggactcactccc

SEQ ID NO: 5528275 - DNA, 25 bp, Homo sapien
atcagcactgtctagcgccagaact

SEQ ID NO: 5528276 - DNA, 25 bp, Homo sapien
aaatggccccaaataatgtctcagc

SEQ ID NO: 5528277 - DNA, 25 bp, Homo sapien
cgcccaacacttcccagggtgctgc

SEQ ID NO: 5528278 - DNA, 25 bp, Homo sapien
tttatttccgttgtctctctgctgt

SEQ ID NO: 5528279 - DNA, 25 bp, Homo sapien
gctggggtaggactcacccattcta

SEQ ID NO: 5528280 - DNA, 25 bp, Homo sapien
tccctgctccactcccacattatag

SEQ ID NO: 5528281 - DNA, 25 bp, Homo sapien
cagcagctgtgtatttgacaaagtc

SEQ ID NO: 5528282 - DNA, 25 bp, Homo sapien
cttttccagagctgacagcacgggc

SEQ ID NO: 5528283 - DNA, 25 bp, Homo sapien
atagtcctttcctaacacggtcggc

SEQ ID NO: 5528284 - DNA, 25 bp, Homo sapien
cagtgtgcctggcttggcttccctt

SEQ ID NO: 5528285 - DNA, 25 bp, Homo sapien
tctctgctgtgtcgcccaacacttc

SEQ ID NO: 5528286 - DNA, 25 bp, Homo sapien
gctcctgacagccagcagctgtgta

SEQ ID NO: 5528287 - DNA, 25 bp, Homo sapien
gggtgctttgtgtcagtgctgcagc

SEQ ID NO: 5528288 - DNA, 25 bp, Homo sapien
gcctgtgtatacttggccgtgggca

SEQ ID NO: 5528289 - DNA, 25 bp, Homo sapien
ccgtctgcagctacttcagaggagc

SEQ ID NO: 5528290 - DNA, 25 bp, Homo sapien
catgcctgcagaaggactgttgatg

SEQ ID NO: 5528291 - DNA, 25 bp, Homo sapien
aggactgttgatgcgacccaaagat

SEQ ID NO: 5528292 - DNA, 25 bp, Homo sapien
tttaaaatggatgcagccctaactg

SEQ ID NO: 5528293 - DNA, 25 bp, Homo sapien
ggaagagccgtctgcagctacttca

SEQ ID NO: 5528294 - DNA, 25 bp, Homo sapien
tgttgatgcgacccaaagatacagc

SEQ ID NO: 5528295 - DNA, 25 bp, Homo sapien
agcccctcagcttcgcagcctggcg

SEQ ID NO: 5528296 - DNA, 25 bp, Homo sapien
tcagaggagctgtttatccctctcc

SEQ ID NO: 5528297 - DNA, 25 bp, Homo sapien
tctcccagcccctcagcttcgcagc

SEQ ID NO: 5528298 - DNA, 25 bp, Homo sapien
ttatccctctccacgcggggcagac

SEQ ID NO: 5528299 - DNA, 25 bp, Homo sapien
tgcatgcaagtctctctggtcgtat

SEQ ID NO: 5528300 - DNA, 25 bp, Homo sapien
tctggtcgtatttctcttgggtggg

SEQ ID NO: 5528301 - DNA, 25 bp, Homo sapien
aagaagtgtcacataaatggaataa

SEQ ID NO: 5528302 - DNA, 25 bp, Homo sapien
ttgaggttcatccatgtaggcccat

SEQ ID NO: 5528303 - DNA, 25 bp, Homo sapien
ttcgtgcctgtttgcagttgatccc

SEQ ID NO: 5528304 - DNA, 25 bp, Homo sapien
tgtaggcccatgtctcagcagtttc

SEQ ID NO: 5528305 - DNA, 25 bp, Homo sapien
tctcacccccaggcaaacatgaatt

SEQ ID NO: 5528306 - DNA, 25 bp, Homo sapien
gttaggaatgtttgcatgcaagtct

SEQ ID NO: 5528307 - DNA, 25 bp, Homo sapien
tgcagttgatcccactctcaccccc

SEQ ID NO: 5528308 - DNA, 25 bp, Homo sapien
cctggcctagcgtttttgaggttca

SEQ ID NO: 5528309 - DNA, 25 bp, Homo sapien
gctgctcatgcatccgcggttggtg

SEQ ID NO: 5528310 - DNA, 25 bp, Homo sapien
ttggcccttgaacacccggactcaa

SEQ ID NO: 5528311 - DNA, 25 bp, Homo sapien
gccttgatggaggctgagacttttt

SEQ ID NO: 5528312 - DNA, 25 bp, Homo sapien
ggcatgagctgccacgccttgatgg

SEQ ID NO: 5528313 - DNA, 25 bp, Homo sapien
aacatgtgtgtgagtcaatagacct

SEQ ID NO: 5528314 - DNA, 25 bp, Homo sapien
actgtgttgcctaggttggcccttg

SEQ ID NO: 5528315 - DNA, 25 bp, Homo sapien
tgtcgaggaaggatattgtctcggc

SEQ ID NO: 5528316 - DNA, 25 bp, Homo sapien
caggaaacatccacggctgtaagag

SEQ ID NO: 5528317 - DNA, 25 bp, Homo sapien
cagtgaacagactgagtcagcttcc

SEQ ID NO: 5528318 - DNA, 25 bp, Homo sapien
ctcaaagctcaaccagtgaacagac

SEQ ID NO: 5528319 - DNA, 25 bp, Homo sapien
cgtcagggttctcgcacgttgtcga

SEQ ID NO: 5528320 - DNA, 25 bp, Homo sapien
gctgctctccatagccaagtggctg

SEQ ID NO: 5528321 - DNA, 25 bp, Homo sapien
gataatagactcctaggtatttccc

SEQ ID NO: 5528322 - DNA, 25 bp, Homo sapien
ttcctttgtgattgacatgaaaatg

SEQ ID NO: 5528323 - DNA, 25 bp, Homo sapien
cacacaggtactataaagcgtagtc

SEQ ID NO: 5528324 - DNA, 25 bp, Homo sapien
aatatgtatgtgataatagactcct

SEQ ID NO: 5528325 - DNA, 25 bp, Homo sapien
tgtatccagtgttctaggtcccgtc

SEQ ID NO: 5528326 - DNA, 25 bp, Homo sapien
aagaaagtttctgcgtacatattat

SEQ ID NO: 5528327 - DNA, 25 bp, Homo sapien
tgacatgaaaatggttcagcagcgt

SEQ ID NO: 5528328 - DNA, 25 bp, Homo sapien
ttacattacaaggataatatgacaa

SEQ ID NO: 5528329 - DNA, 25 bp, Homo sapien
tgataaaccaacatagctctatttg

SEQ ID NO: 5528330 - DNA, 25 bp, Homo sapien
ctataaagcgtagtctgcaaaataa

SEQ ID NO: 5528331 - DNA, 25 bp, Homo sapien
gttctaggtcccgtcacacaggtac

SEQ ID NO: 5528332 - DNA, 25 bp, Homo sapien
tcagactgctggttcttccggagag

SEQ ID NO: 5528333 - DNA, 25 bp, Homo sapien
tttgtcttttggtgagcagtattgt

SEQ ID NO: 5528334 - DNA, 25 bp, Homo sapien
gggctgaaatagacggaatcagact

SEQ ID NO: 5528335 - DNA, 25 bp, Homo sapien
aatagacggaatcagactgctggtt

SEQ ID NO: 5528336 - DNA, 25 bp, Homo sapien
gcctttgtcttttggtgagcagtat

SEQ ID NO: 5528337 - DNA, 25 bp, Homo sapien
agacggaatcagactgctggttctt

SEQ ID NO: 5528338 - DNA, 25 bp, Homo sapien
ccccctctggacagagggctcggtc

SEQ ID NO: 5528339 - DNA, 25 bp, Homo sapien
cagtattgtgaccgctgtccccctc

SEQ ID NO: 5528340 - DNA, 25 bp, Homo sapien
gtgagcagtattgtgaccgctgtcc

SEQ ID NO: 5528341 - DNA, 25 bp, Homo sapien
gttcttccggagagacaaaagtgaa

SEQ ID NO: 5528342 - DNA, 25 bp, Homo sapien
attgtgaccgctgtccccctctgga

SEQ ID NO: 5528343 - DNA, 25 bp, Homo sapien
gagacaagtttcagtcctcaatgct

SEQ ID NO: 5528344 - DNA, 25 bp, Homo sapien
tttctaagttacaggcagagtggga

SEQ ID NO: 5528345 - DNA, 25 bp, Homo sapien
gatatgtctggctgaagatttgatg

SEQ ID NO: 5528346 - DNA, 25 bp, Homo sapien
aactatgaaaaactgtagactattc

SEQ ID NO: 5528347 - DNA, 25 bp, Homo sapien
tctgaggctagatatgtctggctga

SEQ ID NO: 5528348 - DNA, 25 bp, Homo sapien
tttactagcgagaaatctttgattt

SEQ ID NO: 5528349 - DNA, 25 bp, Homo sapien
tctcaaggtattaactcgcagaccc

SEQ ID NO: 5528350 - DNA, 25 bp, Homo sapien
caggtacaagttttctagctcagac

SEQ ID NO: 5528351 - DNA, 25 bp, Homo sapien
taactcgcagaccctctgggggtag

SEQ ID NO: 5528352 - DNA, 25 bp, Homo sapien
taaacaggctttagtacaacaaata

SEQ ID NO: 5528353 - DNA, 25 bp, Homo sapien
gatgtggttcctccttaagctatgc

SEQ ID NO: 5528354 - DNA, 25 bp, Homo sapien
gccaaggatccctctcgaggggctc

SEQ ID NO: 5528355 - DNA, 25 bp, Homo sapien
caccttgtgctttggtaggggacat

SEQ ID NO: 5528356 - DNA, 25 bp, Homo sapien
agggccaacgtaccttgagagtctg

SEQ ID NO: 5528357 - DNA, 25 bp, Homo sapien
ccagcccaccagctgagtctgccag

SEQ ID NO: 5528358 - DNA, 25 bp, Homo sapien
gcggggaccataccaagaccccaga

SEQ ID NO: 5528359 - DNA, 25 bp, Homo sapien
gcagtgacaactgttcccccagagc

SEQ ID NO: 5528360 - DNA, 25 bp, Homo sapien
cagagtcacagaccgtatcccctcc

SEQ ID NO: 5528361 - DNA, 25 bp, Homo sapien
ccctcccatgccccagatcctgtgc

SEQ ID NO: 5528362 - DNA, 25 bp, Homo sapien
ccacaccactcaggactctggaagg

SEQ ID NO: 5528363 - DNA, 25 bp, Homo sapien
gcatctccctgccaggctgccggac

SEQ ID NO: 5528364 - DNA, 25 bp, Homo sapien
gaggcagcctgatcccaccttgtgc

SEQ ID NO: 5528365 - DNA, 25 bp, Homo sapien
gggtggcagtgtagctgcccatcta

SEQ ID NO: 5528366 - DNA, 25 bp, Homo sapien
tgccatgtgccagacgcatgcatac

SEQ ID NO: 5528367 - DNA, 25 bp, Homo sapien
acagtagctgtgcagaagacaacaa

SEQ ID NO: 5528368 - DNA, 25 bp, Homo sapien
gtgtctgcacaggcctctactaaac

SEQ ID NO: 5528369 - DNA, 25 bp, Homo sapien
aatccagtgttgatagctcagggca

SEQ ID NO: 5528370 - DNA, 25 bp, Homo sapien
agacagcacccattcccacgcctcc

SEQ ID NO: 5528371 - DNA, 25 bp, Homo sapien
cgctgctgacgctgtttgccttgtg

SEQ ID NO: 5528372 - DNA, 25 bp, Homo sapien
ccaacaactgtctgctggggttagc

SEQ ID NO: 5528373 - DNA, 25 bp, Homo sapien
accccacccgattatggagcacatc

SEQ ID NO: 5528374 - DNA, 25 bp, Homo sapien
tgtcgccatgatgtgaaaagaggaa

SEQ ID NO: 5528375 - DNA, 25 bp, Homo sapien
tcccacgcctcctagacactgtgca

SEQ ID NO: 5528376 - DNA, 25 bp, Homo sapien
aaacttggatactgagaactgcttt

SEQ ID NO: 5528377 - DNA, 25 bp, Homo sapien
gaagttgaactaatttgtgagaacc

SEQ ID NO: 5528378 - DNA, 25 bp, Homo sapien
ctatagtacagagattcaccaaatt

SEQ ID NO: 5528379 - DNA, 25 bp, Homo sapien
ttgtgagaatacctatgacctgatc

SEQ ID NO: 5528380 - DNA, 25 bp, Homo sapien
aaactttgtgcactggaaggaaaac

SEQ ID NO: 5528381 - DNA, 25 bp, Homo sapien
aacaggtgaaataaagtcaagcaaa

SEQ ID NO: 5528382 - DNA, 25 bp, Homo sapien
aaacagagacattggttagtaaagc

SEQ ID NO: 5528383 - DNA, 25 bp, Homo sapien
aacgtgggtatatgtttatgaatgc

SEQ ID NO: 5528384 - DNA, 25 bp, Homo sapien
gttactggggaaactttgtgcactg

SEQ ID NO: 5528385 - DNA, 25 bp, Homo sapien
tttatgaatgcaccgggaagttgaa

SEQ ID NO: 5528386 - DNA, 25 bp, Homo sapien
ccaaaaagtaaagaacacaagtcac

SEQ ID NO: 5528387 - DNA, 25 bp, Homo sapien
ataacactacagacagaattaaggg

SEQ ID NO: 5528388 - DNA, 25 bp, Homo sapien
atagtgacagtaagataaaatatgt

SEQ ID NO: 5528389 - DNA, 25 bp, Homo sapien
ataaacaacagggtaaaaaatatgc

SEQ ID NO: 5528390 - DNA, 25 bp, Homo sapien
gattatgcaaaagctgctgaagatt

SEQ ID NO: 5528391 - DNA, 25 bp, Homo sapien
tctcctggattatgcaaaagctgct

SEQ ID NO: 5528392 - DNA, 25 bp, Homo sapien
ctatgaatgggtttaactattacac

SEQ ID NO: 5528393 - DNA, 25 bp, Homo sapien
tggctgacactctattgcaacctat

SEQ ID NO: 5528394 - DNA, 25 bp, Homo sapien
taggattaagaatttagctatctga

SEQ ID NO: 5528395 - DNA, 25 bp, Homo sapien
aggtgttattaaccacaggaaaagc

SEQ ID NO: 5528396 - DNA, 25 bp, Homo sapien
acaatataagttgcttaagagtact

SEQ ID NO: 5528397 - DNA, 25 bp, Homo sapien
ttgatgtatgacacatttggctgac

SEQ ID NO: 5528398 - DNA, 25 bp, Homo sapien
cttataacaaaggctcaaagcaggc

SEQ ID NO: 5528399 - DNA, 25 bp, Homo sapien
gaaacaggacccagatctctaccca

SEQ ID NO: 5528400 - DNA, 25 bp, Homo sapien
aggctaagagtgtgtttctggaaac

SEQ ID NO: 5528401 - DNA, 25 bp, Homo sapien
aatacagaatactacatggattatc

SEQ ID NO: 5528402 - DNA, 25 bp, Homo sapien
caacatgccatgtgcctgtgcaatc

SEQ ID NO: 5528403 - DNA, 25 bp, Homo sapien
cagctaaaaacaacgaagccggtac

SEQ ID NO: 5528404 - DNA, 25 bp, Homo sapien
tcccatttcaggagcaggctaagag

SEQ ID NO: 5528405 - DNA, 25 bp, Homo sapien
ctgtcagagtgaaggctcacaagaa

SEQ ID NO: 5528406 - DNA, 25 bp, Homo sapien
acccaagggcttataacaaaggctc

SEQ ID NO: 5528407 - DNA, 25 bp, Homo sapien
aaactgattatcatggggtgcattt

SEQ ID NO: 5528408 - DNA, 25 bp, Homo sapien
tgacaggaaagtaaagctttgaccc

SEQ ID NO: 5528409 - DNA, 25 bp, Homo sapien
ccttctccaaaagggtctggtggct

SEQ ID NO: 5528410 - DNA, 25 bp, Homo sapien
aggctaacagcccatggacaaagtg

SEQ ID NO: 5528411 - DNA, 25 bp, Homo sapien
aagtggctgtttgcataagggagaa

SEQ ID NO: 5528412 - DNA, 25 bp, Homo sapien
ccaagtgggcattaggttatcagac

SEQ ID NO: 5528413 - DNA, 25 bp, Homo sapien
gaaggcttaagcactggctgccctc

SEQ ID NO: 5528414 - DNA, 25 bp, Homo sapien
gagttcagtggagacctcatgtgac

SEQ ID NO: 5528415 - DNA, 25 bp, Homo sapien
cacgaatcttcccgcaagcctcagc

SEQ ID NO: 5528416 - DNA, 25 bp, Homo sapien
atctcggatctcaaaggtggtcttc

SEQ ID NO: 5528417 - DNA, 25 bp, Homo sapien
ctttaggtgtgaccagatctcggat

SEQ ID NO: 5528418 - DNA, 25 bp, Homo sapien
aagagaatttattgggctgtgtatc

SEQ ID NO: 5528419 - DNA, 25 bp, Homo sapien
ccaggcagctccatgctcacgaatc

SEQ ID NO: 5528420 - DNA, 25 bp, Homo sapien
ctgggaagagggctttccagtttgg

SEQ ID NO: 5528421 - DNA, 25 bp, Homo sapien
ctgaactaaagaaggtagaatgcca

SEQ ID NO: 5528422 - DNA, 25 bp, Homo sapien
taacacccattctacgggcaccttc

SEQ ID NO: 5528423 - DNA, 25 bp, Homo sapien
cgggcaccttcaacactgcactgct

SEQ ID NO: 5528424 - DNA, 25 bp, Homo sapien
agaatgccaggcctttgtaagacct

SEQ ID NO: 5528425 - DNA, 25 bp, Homo sapien
gctcactctgattataacacccatt

SEQ ID NO: 5528426 - DNA, 25 bp, Homo sapien
aagacctgcaaagtccttaagttct

SEQ ID NO: 5528427 - DNA, 25 bp, Homo sapien
ctcaggggtctggtcctgtacagag

SEQ ID NO: 5528428 - DNA, 25 bp, Homo sapien
gcaaagtccttaagttctgaacacc

SEQ ID NO: 5528429 - DNA, 25 bp, Homo sapien
gtcctgtacagaggcctaggaccag

SEQ ID NO: 5528430 - DNA, 25 bp, Homo sapien
ccccagagcaattccccaggatgac

SEQ ID NO: 5528431 - DNA, 25 bp, Homo sapien
tactcaatgagtaaaatatgaacac

SEQ ID NO: 5528432 - DNA, 25 bp, Homo sapien
agctgaacaaacaaactagaataca

SEQ ID NO: 5528433 - DNA, 25 bp, Homo sapien
agaagctgaacaaacaaactagaat

SEQ ID NO: 5528434 - DNA, 25 bp, Homo sapien
aacagggcaatgtagtaccaacaaa

SEQ ID NO: 5528435 - DNA, 25 bp, Homo sapien
gaatatatacaaaacagggcaatgt

SEQ ID NO: 5528436 - DNA, 25 bp, Homo sapien
tgcaagataaaagtgatgtgttggc

SEQ ID NO: 5528437 - DNA, 25 bp, Homo sapien
cagaaaactggaaataagaacagaa

SEQ ID NO: 5528438 - DNA, 25 bp, Homo sapien
gagctgcaagataaaagtgatgtgt

SEQ ID NO: 5528439 - DNA, 25 bp, Homo sapien
agggcaatgtagtaccaacaaaatt

SEQ ID NO: 5528440 - DNA, 25 bp, Homo sapien
tgagtaaaatatgaacacagagaac

SEQ ID NO: 5528441 - DNA, 25 bp, Homo sapien
tcaaacacatatgtaagcacaattt

SEQ ID NO: 5528442 - DNA, 25 bp, Homo sapien
aatgtatagatcgttcaaagccgtc

SEQ ID NO: 5528443 - DNA, 25 bp, Homo sapien
aaaatgccggtccggaagcaagata

SEQ ID NO: 5528444 - DNA, 25 bp, Homo sapien
gagaaaggtgtgtgccctcttcctg

SEQ ID NO: 5528445 - DNA, 25 bp, Homo sapien
gccaagcagccttagccctagtgta

SEQ ID NO: 5528446 - DNA, 25 bp, Homo sapien
cctgattctggagaaaaatgccggt

SEQ ID NO: 5528447 - DNA, 25 bp, Homo sapien
taagccaaactgaagacagacagct

SEQ ID NO: 5528448 - DNA, 25 bp, Homo sapien
gaaatacaggtatcaggatgaagat

SEQ ID NO: 5528449 - DNA, 25 bp, Homo sapien
gacttcagagacactgccaagcagc

SEQ ID NO: 5528450 - DNA, 25 bp, Homo sapien
tgaatacttgggagatttccagcct

SEQ ID NO: 5528451 - DNA, 25 bp, Homo sapien
aagcaagatacccagagagcattgc

SEQ ID NO: 5528452 - DNA, 25 bp, Homo sapien
atgaagtgataggtccagaattggt

SEQ ID NO: 5528453 - DNA, 25 bp, Homo sapien
agagtggacagttggaccttacttt

SEQ ID NO: 5528454 - DNA, 25 bp, Homo sapien
acatggtaacattgactatggagtc

SEQ ID NO: 5528455 - DNA, 25 bp, Homo sapien
gcctctgataggaggacaaccatgc

SEQ ID NO: 5528456 - DNA, 25 bp, Homo sapien
gaggtgctaaattgtctgccattac

SEQ ID NO: 5528457 - DNA, 25 bp, Homo sapien
ttaggatagatcttaagcagtaatc

SEQ ID NO: 5528458 - DNA, 25 bp, Homo sapien
atggagtcttgtgaaagtgtaatgt

SEQ ID NO: 5528459 - DNA, 25 bp, Homo sapien
tgtaatgtgcgatggctatgtagac

SEQ ID NO: 5528460 - DNA, 25 bp, Homo sapien
ttgatgcacaaaatgggactgctga

SEQ ID NO: 5528461 - DNA, 25 bp, Homo sapien
gttggagagttaaatggtctcttcc

SEQ ID NO: 5528462 - DNA, 25 bp, Homo sapien
ctgcggctttaaactgacagtaccc

SEQ ID NO: 5528463 - DNA, 25 bp, Homo sapien
gtcaagcttgaggctgaataaagcc

SEQ ID NO: 5528464 - DNA, 25 bp, Homo sapien
actaaggactagacattttcaagat

SEQ ID NO: 5528465 - DNA, 25 bp, Homo sapien
aaatggtaatcttgcaaaggctcat

SEQ ID NO: 5528466 - DNA, 25 bp, Homo sapien
gctgtataaaattgacataggagtt

SEQ ID NO: 5528467 - DNA, 25 bp, Homo sapien
ttaatgaaaagaagctccaaatcat

SEQ ID NO: 5528468 - DNA, 25 bp, Homo sapien
acgtgttacacaagatggacccaat

SEQ ID NO: 5528469 - DNA, 25 bp, Homo sapien
tctctgccagccacgtgttacacaa

SEQ ID NO: 5528470 - DNA, 25 bp, Homo sapien
aaaggctcatttatagatacatcat

SEQ ID NO: 5528471 - DNA, 25 bp, Homo sapien
aaattgacataggagttaagaagaa

SEQ ID NO: 5528472 - DNA, 25 bp, Homo sapien
tcacttaagcagaaagcaagggtat

SEQ ID NO: 5528473 - DNA, 25 bp, Homo sapien
aagaaatcacttaagcagaaagcaa

SEQ ID NO: 5528474 - DNA, 25 bp, Homo sapien
gaatgccagcagaaactaaggacta

SEQ ID NO: 5528475 - DNA, 25 bp, Homo sapien
gagggagaagtctgtgtctgttttt

SEQ ID NO: 5528476 - DNA, 25 bp, Homo sapien
ttatgagatctctggaatggtatcc

SEQ ID NO: 5528477 - DNA, 25 bp, Homo sapien
tcaccaaggagttaatgaccagact

SEQ ID NO: 5528478 - DNA, 25 bp, Homo sapien
atttggtcaagaactaaaaagtcaa

SEQ ID NO: 5528479 - DNA, 25 bp, Homo sapien
ataaccatataaagagggagaagtc

SEQ ID NO: 5528480 - DNA, 25 bp, Homo sapien
cagataaggactacaattaaccagt

SEQ ID NO: 5528481 - DNA, 25 bp, Homo sapien
aggactaggtaagtcgtaagataac

SEQ ID NO: 5528482 - DNA, 25 bp, Homo sapien
atgaccagactcaaggactaggtaa

SEQ ID NO: 5528483 - DNA, 25 bp, Homo sapien
ttgctgctaaataatggtcccattc

SEQ ID NO: 5528484 - DNA, 25 bp, Homo sapien
attgcaaaaatgagaatagctatgt

SEQ ID NO: 5528485 - DNA, 25 bp, Homo sapien
tatccattggggtctaaatgaggga

SEQ ID NO: 5528486 - DNA, 25 bp, Homo sapien
gagtctgattcaggggccatctttc

SEQ ID NO: 5528487 - DNA, 25 bp, Homo sapien
tcaggggccatctttcaggctagtc

SEQ ID NO: 5528488 - DNA, 25 bp, Homo sapien
gtggttaacagggcttcttcgcagt

SEQ ID NO: 5528489 - DNA, 25 bp, Homo sapien
actgtgggcggtttcaataatattt

SEQ ID NO: 5528490 - DNA, 25 bp, Homo sapien
ttgcatcatatggttcaggcccttc

SEQ ID NO: 5528491 - DNA, 25 bp, Homo sapien
accagatttgaaactgtgggcggtt

SEQ ID NO: 5528492 - DNA, 25 bp, Homo sapien
aattaacagcagagtgtagcatggt

SEQ ID NO: 5528493 - DNA, 25 bp, Homo sapien
attctcagaaagcctagcataaatt

SEQ ID NO: 5528494 - DNA, 25 bp, Homo sapien
gggatagcaacactgccaagtggga

SEQ ID NO: 5528495 - DNA, 25 bp, Homo sapien
gtacattgtaagagcagcaaacctc

SEQ ID NO: 5528496 - DNA, 25 bp, Homo sapien
gccaagtgggaacagcatacttatg

SEQ ID NO: 5528497 - DNA, 25 bp, Homo sapien
aattgataagtaaaatatagtcagc

SEQ ID NO: 5528498 - DNA, 25 bp, Homo sapien
tgctgtgcaaccatcacgaccatcc

SEQ ID NO: 5528499 - DNA, 25 bp, Homo sapien
tccctccagcgtctagcaaccacca

SEQ ID NO: 5528500 - DNA, 25 bp, Homo sapien
ataatggcttatatggagtgtcaac

SEQ ID NO: 5528501 - DNA, 25 bp, Homo sapien
tatataacacacattctggagaggt

SEQ ID NO: 5528502 - DNA, 25 bp, Homo sapien
atggagtgtcaacataaaaacaata

SEQ ID NO: 5528503 - DNA, 25 bp, Homo sapien
tccatcttcaggccactttgcatcc

SEQ ID NO: 5528504 - DNA, 25 bp, Homo sapien
tatagtcagcaatctcacatacgtc

SEQ ID NO: 5528505 - DNA, 25 bp, Homo sapien
cacattctggagaggtgttgctttt

SEQ ID NO: 5528506 - DNA, 25 bp, Homo sapien
ggagaggtgttgcttttggtcttac

SEQ ID NO: 5528507 - DNA, 25 bp, Homo sapien
atgaatctgactaatctaggtactt

SEQ ID NO: 5528508 - DNA, 25 bp, Homo sapien
ttctggccccagccttgtcaggacc

SEQ ID NO: 5528509 - DNA, 25 bp, Homo sapien
ctgaaaagtgcatagtttggggcaa

SEQ ID NO: 5528510 - DNA, 25 bp, Homo sapien
aagtaaagcttacctgaaaagtgca

SEQ ID NO: 5528511 - DNA, 25 bp, Homo sapien
atttctaccccgcacgcagacactc

SEQ ID NO: 5528512 - DNA, 25 bp, Homo sapien
acggaagaatgctggcgtctccgtg

SEQ ID NO: 5528513 - DNA, 25 bp, Homo sapien
tggcgtctccgtgtgtactggttca

SEQ ID NO: 5528514 - DNA, 25 bp, Homo sapien
ctcggccaatatgtccaggaaaact

SEQ ID NO: 5528515 - DNA, 25 bp, Homo sapien
acaagcagctgatgccccagtgatt

SEQ ID NO: 5528516 - DNA, 25 bp, Homo sapien
aggaaaaaacctacagcgaatgttc

SEQ ID NO: 5528517 - DNA, 25 bp, Homo sapien
gggcaatggtatctacatctcccac

SEQ ID NO: 5528518 - DNA, 25 bp, Homo sapien
ttgtcaggaccccctggtgtccaga

SEQ ID NO: 5528519 - DNA, 25 bp, Homo sapien
tgccaaaggatgacagttgcaatcc

SEQ ID NO: 5528520 - DNA, 25 bp, Homo sapien
atctacatgtaaaataggtccccac

SEQ ID NO: 5528521 - DNA, 25 bp, Homo sapien
ttctggcaagatgtcaatctggccc

SEQ ID NO: 5528522 - DNA, 25 bp, Homo sapien
catgtagctcacacaggttccactg

SEQ ID NO: 5528523 - DNA, 25 bp, Homo sapien
cataatgcagcagaacatgtagctc

SEQ ID NO: 5528524 - DNA, 25 bp, Homo sapien
ttccactgagtgtgccaaaggatga

SEQ ID NO: 5528525 - DNA, 25 bp, Homo sapien
caatctggccctttgatgagttccc

SEQ ID NO: 5528526 - DNA, 25 bp, Homo sapien
aggtggaagacacatgtgacaatta

SEQ ID NO: 5528527 - DNA, 25 bp, Homo sapien
aggtccccacataaagatccagatt

SEQ ID NO: 5528528 - DNA, 25 bp, Homo sapien
caatcaaagccccagaagtacttct

SEQ ID NO: 5528529 - DNA, 25 bp, Homo sapien
tagcaataaaggttgataatgtcac

SEQ ID NO: 5528530 - DNA, 25 bp, Homo sapien
gggtgcaggccatgatccccttcac

SEQ ID NO: 5528531 - DNA, 25 bp, Homo sapien
ctcggcccccacacatgaagggctc

SEQ ID NO: 5528532 - DNA, 25 bp, Homo sapien
agccattaggctgagaccagtgcca

SEQ ID NO: 5528533 - DNA, 25 bp, Homo sapien
ctctgccttcagaacaacgggtgga

SEQ ID NO: 5528534 - DNA, 25 bp, Homo sapien
gaccaccaggaacctcttgaggagc

SEQ ID NO: 5528535 - DNA, 25 bp, Homo sapien
ctcggccatgctcgccaggcttttc

SEQ ID NO: 5528536 - DNA, 25 bp, Homo sapien
aggctgagaccagtgccagccctta

SEQ ID NO: 5528537 - DNA, 25 bp, Homo sapien
cccacagaatgggctctgccttcag

SEQ ID NO: 5528538 - DNA, 25 bp, Homo sapien
ttaagaggctcctgctctcgaggga

SEQ ID NO: 5528539 - DNA, 25 bp, Homo sapien
tgctcgccaggcttttcgggctttt

SEQ ID NO: 5528540 - DNA, 25 bp, Homo sapien
atgaagggctcccagaccccccttc

SEQ ID NO: 5528541 - DNA, 25 bp, Homo sapien
atagagaaaatgtgaatttcccaga

SEQ ID NO: 5528542 - DNA, 25 bp, Homo sapien
tttggaaaatacagagaatagagaa

SEQ ID NO: 5528543 - DNA, 25 bp, Homo sapien
caccattccatcctcaccaccggcc

SEQ ID NO: 5528544 - DNA, 25 bp, Homo sapien
aacaacacacagataaccttacagt

SEQ ID NO: 5528545 - DNA, 25 bp, Homo sapien
acatttgtaaaaagcgatttcctcc

SEQ ID NO: 5528546 - DNA, 25 bp, Homo sapien
gtggcccatttcctcgcttacgtcc

SEQ ID NO: 5528547 - DNA, 25 bp, Homo sapien
catggcatgccaaggctgctctgct

SEQ ID NO: 5528548 - DNA, 25 bp, Homo sapien
agaaaaagatgaacccacatttgta

SEQ ID NO: 5528549 - DNA, 25 bp, Homo sapien
cacacaatccaccccatggcatgcc

SEQ ID NO: 5528550 - DNA, 25 bp, Homo sapien
ggcctcccttccgctgagctgtggc

SEQ ID NO: 5528551 - DNA, 25 bp, Homo sapien
ttcccagaatccaacaacacacaga

SEQ ID NO: 5528552 - DNA, 25 bp, Homo sapien
cacctatacaagggtagggttggag

SEQ ID NO: 5528553 - DNA, 25 bp, Homo sapien
cacaagtaaactatcatggactatg

SEQ ID NO: 5528554 - DNA, 25 bp, Homo sapien
atggactatgtaaatgctgtgaaag

SEQ ID NO: 5528555 - DNA, 25 bp, Homo sapien
ccaaggaaccctggtgttaaaggca

SEQ ID NO: 5528556 - DNA, 25 bp, Homo sapien
tgcaagagacatgtgagttgaattc

SEQ ID NO: 5528557 - DNA, 25 bp, Homo sapien
taaatgctgtgaaagaaatgtatgg

SEQ ID NO: 5528558 - DNA, 25 bp, Homo sapien
ctgttaccaagataaagaagctcct

SEQ ID NO: 5528559 - DNA, 25 bp, Homo sapien
ctggtgttaaaggcaaagattaacc

SEQ ID NO: 5528560 - DNA, 25 bp, Homo sapien
agaagctccttcacccaaggaaccc

SEQ ID NO: 5528561 - DNA, 25 bp, Homo sapien
ggtgagggttctccatgcaagagac

SEQ ID NO: 5528562 - DNA, 25 bp, Homo sapien
gtctcaacacagtaggtgagggttc

SEQ ID NO: 5528563 - DNA, 25 bp, Homo sapien
ccttcaatggatgacaggaccctct

SEQ ID NO: 5528564 - DNA, 25 bp, Homo sapien
ttcccataaaagcggtcctgaggta

SEQ ID NO: 5528565 - DNA, 25 bp, Homo sapien
aggaccctctatggctgaaagactc

SEQ ID NO: 5528566 - DNA, 25 bp, Homo sapien
tatgataagtattcaggggtttccc

SEQ ID NO: 5528567 - DNA, 25 bp, Homo sapien
ggacagagaaccgacatgttcccac

SEQ ID NO: 5528568 - DNA, 25 bp, Homo sapien
ttacaagtaccaaaagcagccacaa

SEQ ID NO: 5528569 - DNA, 25 bp, Homo sapien
aatgctaaaactggcaaaaggtccc

SEQ ID NO: 5528570 - DNA, 25 bp, Homo sapien
caaatggctcaagcagttaaaggaa

SEQ ID NO: 5528571 - DNA, 25 bp, Homo sapien
ggtaaaatgtacaaggtgtatcttc

SEQ ID NO: 5528572 - DNA, 25 bp, Homo sapien
gcaaaaggtcccaatggactgatcc

SEQ ID NO: 5528573 - DNA, 25 bp, Homo sapien
gggctacagtggctgaacttctgct

SEQ ID NO: 5528574 - DNA, 25 bp, Homo sapien
caaagtgctatagatgagttaatat

SEQ ID NO: 5528575 - DNA, 25 bp, Homo sapien
tataggataggatatcatgaactac

SEQ ID NO: 5528576 - DNA, 25 bp, Homo sapien
tggtggtgattagttattgcaagac

SEQ ID NO: 5528577 - DNA, 25 bp, Homo sapien
tgcaagactgcttatatagagtaat

SEQ ID NO: 5528578 - DNA, 25 bp, Homo sapien
gagtttgtggaagatgtgaaaattg

SEQ ID NO: 5528579 - DNA, 25 bp, Homo sapien
ccctaaatggagtttgtggaagatg

SEQ ID NO: 5528580 - DNA, 25 bp, Homo sapien
atgattgaaaggacacgttgaagtg

SEQ ID NO: 5528581 - DNA, 25 bp, Homo sapien
atgatttttgctacggccccagctt

SEQ ID NO: 5528582 - DNA, 25 bp, Homo sapien
aaggaaggcaatttattgtagtgaa

SEQ ID NO: 5528583 - DNA, 25 bp, Homo sapien
tttaattggatgattgaaaggacac

SEQ ID NO: 5528584 - DNA, 25 bp, Homo sapien
atggagtaaacttataccagagatt

SEQ ID NO: 5528585 - DNA, 25 bp, Homo sapien
atgataacataactgcaagggggaa

SEQ ID NO: 5528586 - DNA, 25 bp, Homo sapien
agagtaacgaataacctgagacgtc

SEQ ID NO: 5528587 - DNA, 25 bp, Homo sapien
agaaggaaccaacagtgactgtgtt

SEQ ID NO: 5528588 - DNA, 25 bp, Homo sapien
gttgcgtctatgaaaccggtgcacc

SEQ ID NO: 5528589 - DNA, 25 bp, Homo sapien
gccatgatagcaagcgtaagaaaca

SEQ ID NO: 5528590 - DNA, 25 bp, Homo sapien
aaaggcatgaggatgattcttagtt

SEQ ID NO: 5528591 - DNA, 25 bp, Homo sapien
tgtgtacgggtcatgttcctgcaga

SEQ ID NO: 5528592 - DNA, 25 bp, Homo sapien
ctttgcctcagagaacggtcatggg

SEQ ID NO: 5528593 - DNA, 25 bp, Homo sapien
ccaaatactgatgaggctgtggatc

SEQ ID NO: 5528594 - DNA, 25 bp, Homo sapien
tgtcagatacagaaataaaggcatg

SEQ ID NO: 5528595 - DNA, 25 bp, Homo sapien
taggagtagttggatgtgcttatga

SEQ ID NO: 5528596 - DNA, 25 bp, Homo sapien
ctaatgtgttctaactgaagagttt

SEQ ID NO: 5528597 - DNA, 25 bp, Homo sapien
ttgaaagtggaataagcaattcttc

SEQ ID NO: 5528598 - DNA, 25 bp, Homo sapien
agaataatcggtcaaatgaatgttt

SEQ ID NO: 5528599 - DNA, 25 bp, Homo sapien
aggaaaattagaataatcggtcaaa

SEQ ID NO: 5528600 - DNA, 25 bp, Homo sapien
catttggtaccaagtttagaaatgc

SEQ ID NO: 5528601 - DNA, 25 bp, Homo sapien
ttctcatttggggtattgaccttac

SEQ ID NO: 5528602 - DNA, 25 bp, Homo sapien
ccattctcccccatgcaactgttgc

SEQ ID NO: 5528603 - DNA, 25 bp, Homo sapien
gccactgtcacctcatgaaaccctt

SEQ ID NO: 5528604 - DNA, 25 bp, Homo sapien
tgaccttacttgaatgctaacccac

SEQ ID NO: 5528605 - DNA, 25 bp, Homo sapien
tataacaaagcaactgaaaatgtaa

SEQ ID NO: 5528606 - DNA, 25 bp, Homo sapien
aaccggcaaggaaatacagccaatt

SEQ ID NO: 5528607 - DNA, 25 bp, Homo sapien
gtcccatgtgggatcctgtaggatc

SEQ ID NO: 5528608 - DNA, 25 bp, Homo sapien
gcaaggccccccattaagggactgc

SEQ ID NO: 5528609 - DNA, 25 bp, Homo sapien
gagcagtgagatttgccagcactca

SEQ ID NO: 5528610 - DNA, 25 bp, Homo sapien
tcgttttgaatacacaggctgggtc

SEQ ID NO: 5528611 - DNA, 25 bp, Homo sapien
tgccagcactcagggttctaagggt

SEQ ID NO: 5528612 - DNA, 25 bp, Homo sapien
tctaaaacctagctctggccccaac

SEQ ID NO: 5528613 - DNA, 25 bp, Homo sapien
cctgggcctaaacaaacaagagcca

SEQ ID NO: 5528614 - DNA, 25 bp, Homo sapien
atcagcctggcgttcaaagcctttc

SEQ ID NO: 5528615 - DNA, 25 bp, Homo sapien
gctcccaaatgccagagggagcctc

SEQ ID NO: 5528616 - DNA, 25 bp, Homo sapien
cccacctaggtagccgtcccatgtg

SEQ ID NO: 5528617 - DNA, 25 bp, Homo sapien
gcccaccatccctcaaccatcagcc

SEQ ID NO: 5528618 - DNA, 25 bp, Homo sapien
cccaaaccatgggagcgttgaagaa

SEQ ID NO: 5528619 - DNA, 25 bp, Homo sapien
aacggctgagcatgcctaataggaa

SEQ ID NO: 5528620 - DNA, 25 bp, Homo sapien
gcataaatagaggcatgcccccatc

SEQ ID NO: 5528621 - DNA, 25 bp, Homo sapien
caaatttttggattaggggcactca

SEQ ID NO: 5528622 - DNA, 25 bp, Homo sapien
ggaacacactgatgtgacaggttgc

SEQ ID NO: 5528623 - DNA, 25 bp, Homo sapien
aagttaaaacttgaggtgtatccca

SEQ ID NO: 5528624 - DNA, 25 bp, Homo sapien
agaagccaaaagtcagacggtttgt

SEQ ID NO: 5528625 - DNA, 25 bp, Homo sapien
attgaataaaagaaacttgaagtac

SEQ ID NO: 5528626 - DNA, 25 bp, Homo sapien
cacaaaccctggctaggaaatgggc

SEQ ID NO: 5528627 - DNA, 25 bp, Homo sapien
aagaagcttttgagatctgggtgcc

SEQ ID NO: 5528628 - DNA, 25 bp, Homo sapien
acaggttgcctggaccacaaaccct

SEQ ID NO: 5528629 - DNA, 25 bp, Homo sapien
gtctccttctaagagggctccacac

SEQ ID NO: 5528630 - DNA, 25 bp, Homo sapien
gctgtgctcctgacagggctttgtc

SEQ ID NO: 5528631 - DNA, 25 bp, Homo sapien
agggactctgtgcctgcataggctc

SEQ ID NO: 5528632 - DNA, 25 bp, Homo sapien
gtatcaaacgaggataccagccacc

SEQ ID NO: 5528633 - DNA, 25 bp, Homo sapien
gggaaggctctgcatcccaggaaag

SEQ ID NO: 5528634 - DNA, 25 bp, Homo sapien
gtgtccttgagaaagactccatgtc

SEQ ID NO: 5528635 - DNA, 25 bp, Homo sapien
agcctctgggaaaatctggaaattt

SEQ ID NO: 5528636 - DNA, 25 bp, Homo sapien
tccccaagatagactccacctcctc

SEQ ID NO: 5528637 - DNA, 25 bp, Homo sapien
ggctccacacccccagaaagaactc

SEQ ID NO: 5528638 - DNA, 25 bp, Homo sapien
tcactggagacacacagactccacc

SEQ ID NO: 5528639 - DNA, 25 bp, Homo sapien
gggactccttggtcctgagggactc

SEQ ID NO: 5528640 - DNA, 25 bp, Homo sapien
aggacttgggagtgattaaactgtt

SEQ ID NO: 5528641 - DNA, 25 bp, Homo sapien
gtcaagctgctgattaagcggtctc

SEQ ID NO: 5528642 - DNA, 25 bp, Homo sapien
gacttgaaggtcatctgttgcccag

SEQ ID NO: 5528643 - DNA, 25 bp, Homo sapien
cagcacaaagggcctattccttccc

SEQ ID NO: 5528644 - DNA, 25 bp, Homo sapien
cgagaggagagccttcccatctccc

SEQ ID NO: 5528645 - DNA, 25 bp, Homo sapien
aaagtgttaaattcccgagagcctg

SEQ ID NO: 5528646 - DNA, 25 bp, Homo sapien
ttcccatctccccggagagcggagg

SEQ ID NO: 5528647 - DNA, 25 bp, Homo sapien
ttcccgagagcctgtgcttagccaa

SEQ ID NO: 5528648 - DNA, 25 bp, Homo sapien
cttagccaaacacttgtggggcctc

SEQ ID NO: 5528649 - DNA, 25 bp, Homo sapien
cgcgtgaggaagtaaaaaactctgg

SEQ ID NO: 5528650 - DNA, 25 bp, Homo sapien
agaggaacctacaatcgcgtgagga

SEQ ID NO: 5528651 - DNA, 25 bp, Homo sapien
tgggggccaaagatgccccctccca

SEQ ID NO: 5528652 - DNA, 25 bp, Homo sapien
tccagcagtgagtgcctactgtatg

SEQ ID NO: 5528653 - DNA, 25 bp, Homo sapien
agagagactaacggtctcatggggg

SEQ ID NO: 5528654 - DNA, 25 bp, Homo sapien
tcttgctgacggtcaccaggatgca

SEQ ID NO: 5528655 - DNA, 25 bp, Homo sapien
gagtcagtgcctcactccagcagtg

SEQ ID NO: 5528656 - DNA, 25 bp, Homo sapien
ttgcccaaggcggcctctttgggac

SEQ ID NO: 5528657 - DNA, 25 bp, Homo sapien
ctggtcagttccacttccgggctcc

SEQ ID NO: 5528658 - DNA, 25 bp, Homo sapien
gagagggtctccccgactcatctct

SEQ ID NO: 5528659 - DNA, 25 bp, Homo sapien
aggcaaagagagactaacggtctca

SEQ ID NO: 5528660 - DNA, 25 bp, Homo sapien
agtgagtgcctactgtatgcaggta

SEQ ID NO: 5528661 - DNA, 25 bp, Homo sapien
cccgactcatctcttgctgacggtc

SEQ ID NO: 5528662 - DNA, 25 bp, Homo sapien
agcagagtaatgttacatgaggagc

SEQ ID NO: 5528663 - DNA, 25 bp, Homo sapien
gaggagcaattaaatactaaacgtc

SEQ ID NO: 5528664 - DNA, 25 bp, Homo sapien
ctgagtctggggtgtcactccattt

SEQ ID NO: 5528665 - DNA, 25 bp, Homo sapien
gcggggtcttctcagtgtttgggaa

SEQ ID NO: 5528666 - DNA, 25 bp, Homo sapien
gggatgagttggttagtacttagca

SEQ ID NO: 5528667 - DNA, 25 bp, Homo sapien
gcaggcgtctattgcttagggccgt

SEQ ID NO: 5528668 - DNA, 25 bp, Homo sapien
gggtacctgcactggctgcacatct

SEQ ID NO: 5528669 - DNA, 25 bp, Homo sapien
catgcagtgttactggggatgagtt

SEQ ID NO: 5528670 - DNA, 25 bp, Homo sapien
cttgcaacactcccggggtacctgc

SEQ ID NO: 5528671 - DNA, 25 bp, Homo sapien
gcaagcctggaaataccagcgagtg

SEQ ID NO: 5528672 - DNA, 25 bp, Homo sapien
aagggatcaccatcatcagcagcca

SEQ ID NO: 5528673 - DNA, 25 bp, Homo sapien
ggactgtctgctgatggccatacgc

SEQ ID NO: 5528674 - DNA, 25 bp, Homo sapien
tttgagcagcccaggtacctaaagc

SEQ ID NO: 5528675 - DNA, 25 bp, Homo sapien
gtagtttcctgactggaagccacac

SEQ ID NO: 5528676 - DNA, 25 bp, Homo sapien
atggccatacgcagcactggctgtt

SEQ ID NO: 5528677 - DNA, 25 bp, Homo sapien
gaagccacacgtaggtcacttgagt

SEQ ID NO: 5528678 - DNA, 25 bp, Homo sapien
cccttgccttcgggtttggagcagt

SEQ ID NO: 5528679 - DNA, 25 bp, Homo sapien
ccaccaacctgagccatgaaagggc

SEQ ID NO: 5528680 - DNA, 25 bp, Homo sapien
gtaggtcacttgagtagtcaggaag

SEQ ID NO: 5528681 - DNA, 25 bp, Homo sapien
atggctctgacgtccccaagccctc

SEQ ID NO: 5528682 - DNA, 25 bp, Homo sapien
ggctgagcagaaagttaaatggtag

SEQ ID NO: 5528683 - DNA, 25 bp, Homo sapien
agcaaggtcaccaaacttgggttta

SEQ ID NO: 5528684 - DNA, 25 bp, Homo sapien
acttcgccatgtctgaggacgagct

SEQ ID NO: 5528685 - DNA, 25 bp, Homo sapien
gctggactgcctgttggacttctta

SEQ ID NO: 5528686 - DNA, 25 bp, Homo sapien
tcctgagcgagaccattccgattca

SEQ ID NO: 5528687 - DNA, 25 bp, Homo sapien
cggcagccagccatgtcctgcacca

SEQ ID NO: 5528688 - DNA, 25 bp, Homo sapien
actgcaatgtgctgaactgggagca

SEQ ID NO: 5528689 - DNA, 25 bp, Homo sapien
ggcgcggcaacttccccacgctcga

SEQ ID NO: 5528690 - DNA, 25 bp, Homo sapien
gctacaaggacctggacctcatctt

SEQ ID NO: 5528691 - DNA, 25 bp, Homo sapien
gaacaaagagaagatcacaccactc

SEQ ID NO: 5528692 - DNA, 25 bp, Homo sapien
ggcctgcagcccctacatcccccta

SEQ ID NO: 5528693 - DNA, 25 bp, Homo sapien
ggtgggcattgcttggactattgcg

SEQ ID NO: 5528694 - DNA, 25 bp, Homo sapien
cctacatccccctaggcggcgactt

SEQ ID NO: 5528695 - DNA, 25 bp, Homo sapien
atcatcatgacagcaagtaggaaaa

SEQ ID NO: 5528696 - DNA, 25 bp, Homo sapien
aagtgattaactggaagatagcgtc

SEQ ID NO: 5528697 - DNA, 25 bp, Homo sapien
agaagtgtccacgggctcacaattc

SEQ ID NO: 5528698 - DNA, 25 bp, Homo sapien
gattgcgaggaaatcagtgattcag

SEQ ID NO: 5528699 - DNA, 25 bp, Homo sapien
atgttaaatacaagcgaagtgatta

SEQ ID NO: 5528700 - DNA, 25 bp, Homo sapien
gggaggacagatttgacataactgg

SEQ ID NO: 5528701 - DNA, 25 bp, Homo sapien
gtccagcctcacagtttacaggtcc

SEQ ID NO: 5528702 - DNA, 25 bp, Homo sapien
acgcctcctgcaagaagccgatttc

SEQ ID NO: 5528703 - DNA, 25 bp, Homo sapien
ccttgtgccaaggacacccaagggc

SEQ ID NO: 5528704 - DNA, 25 bp, Homo sapien
aagatagcgtctgattgcgaggaaa

SEQ ID NO: 5528705 - DNA, 25 bp, Homo sapien
gctgtatgtgataatgaaagggttt

SEQ ID NO: 5528706 - DNA, 25 bp, Homo sapien
actgtgccctggtgaatgtcaacat

SEQ ID NO: 5528707 - DNA, 25 bp, Homo sapien
cttgtgtagaataggtgcaactgta

SEQ ID NO: 5528708 - DNA, 25 bp, Homo sapien
tctgagaaggaacttgagttgttat

SEQ ID NO: 5528709 - DNA, 25 bp, Homo sapien
gcccacataaatcagtattggcaac

SEQ ID NO: 5528710 - DNA, 25 bp, Homo sapien
gacggcactaagaaacaaagactat

SEQ ID NO: 5528711 - DNA, 25 bp, Homo sapien
aggagcagcagactacagaatctgc

SEQ ID NO: 5528712 - DNA, 25 bp, Homo sapien
ctgtaggaacaagaaggtaatccat

SEQ ID NO: 5528713 - DNA, 25 bp, Homo sapien
tagatgcccaactctgagaaggaac

SEQ ID NO: 5528714 - DNA, 25 bp, Homo sapien
gaaattgtcagggattgactgtgcc

SEQ ID NO: 5528715 - DNA, 25 bp, Homo sapien
ttcctggatacaaatgaatgccact

SEQ ID NO: 5528716 - DNA, 25 bp, Homo sapien
tctttattcaggatatggacggcac

SEQ ID NO: 5528717 - DNA, 25 bp, Homo sapien
cctcgcgctcccagtctgagaccag

SEQ ID NO: 5528718 - DNA, 25 bp, Homo sapien
agctccccagcgtcgtctgctttac

SEQ ID NO: 5528719 - DNA, 25 bp, Homo sapien
gcctcgcgctcccagtctgagacca

SEQ ID NO: 5528720 - DNA, 25 bp, Homo sapien
ccagcgtcgtctgctttacggctgc

SEQ ID NO: 5528721 - DNA, 25 bp, Homo sapien
tcagctccccagcgtcgtctgcttt

SEQ ID NO: 5528722 - DNA, 25 bp, Homo sapien
tcccagtctgagaccagcctgctgg

SEQ ID NO: 5528723 - DNA, 25 bp, Homo sapien
agcgtcgtctgctttacggctgcgc

SEQ ID NO: 5528724 - DNA, 25 bp, Homo sapien
gctcccagtctgagaccagcctgct

SEQ ID NO: 5528725 - DNA, 25 bp, Homo sapien
tccccagcgtcgtctgctttacggc

SEQ ID NO: 5528726 - DNA, 25 bp, Homo sapien
gtcagctccccagcgtcgtctgctt

SEQ ID NO: 5528727 - DNA, 25 bp, Homo sapien
cgtcgtctgctttacggctgcgcgg

SEQ ID NO: 5528728 - DNA, 25 bp, Homo sapien
acctgcccgcgcagtacgtgcgcga

SEQ ID NO: 5528729 - DNA, 25 bp, Homo sapien
cccttctacctgcccgcgcagtacg

SEQ ID NO: 5528730 - DNA, 25 bp, Homo sapien
ctgcccctgtcgcgcagcgactcag

SEQ ID NO: 5528731 - DNA, 25 bp, Homo sapien
gtgcctgctgcccctgtcgcgcagc

SEQ ID NO: 5528732 - DNA, 25 bp, Homo sapien
gcgactcagagaacgtctaagaggc

SEQ ID NO: 5528733 - DNA, 25 bp, Homo sapien
ccaggtccccccatcgggacccgca

SEQ ID NO: 5528734 - DNA, 25 bp, Homo sapien
gccgtcgtctcgcctcccgccggca

SEQ ID NO: 5528735 - DNA, 25 bp, Homo sapien
cctacgactaccggttcgtgagcgc

SEQ ID NO: 5528736 - DNA, 25 bp, Homo sapien
cccctgagccgctcgcctacgacta

SEQ ID NO: 5528737 - DNA, 25 bp, Homo sapien
cggcagcttcaaggcctgcagcgta

SEQ ID NO: 5528738 - DNA, 25 bp, Homo sapien
ctgcccgcctgcctgtacctgcggc

SEQ ID NO: 5528739 - DNA, 25 bp, Homo sapien
tcctatttggtcaggagcccttggc

SEQ ID NO: 5528740 - DNA, 25 bp, Homo sapien
cttcaccactgcccggacaaggcac

SEQ ID NO: 5528741 - DNA, 25 bp, Homo sapien
agccctcttgccagtcccttctctc

SEQ ID NO: 5528742 - DNA, 25 bp, Homo sapien
ttgtttgagtcatctccaccatgcc

SEQ ID NO: 5528743 - DNA, 25 bp, Homo sapien
aggcccctgcaatggccgagtctct

SEQ ID NO: 5528744 - DNA, 25 bp, Homo sapien
gcttacattccggtgaggttgggta

SEQ ID NO: 5528745 - DNA, 25 bp, Homo sapien
agtcgttcagcggagatgcttacat

SEQ ID NO: 5528746 - DNA, 25 bp, Homo sapien
gagtctctgctgcctccgtcgccca

SEQ ID NO: 5528747 - DNA, 25 bp, Homo sapien
tccgtcgcccagcccaacagtttca

SEQ ID NO: 5528748 - DNA, 25 bp, Homo sapien
cagtttcatttcccgggtgggagaa

SEQ ID NO: 5528749 - DNA, 25 bp, Homo sapien
cctctcctcagagtgtccggcagaa

SEQ ID NO: 5528750 - DNA, 25 bp, Homo sapien
agatgttgaaactgaagcccatgag

SEQ ID NO: 5528751 - DNA, 25 bp, Homo sapien
ctgcagtgctatacgtggcagtgcc

SEQ ID NO: 5528752 - DNA, 25 bp, Homo sapien
actgggttagtttgtctccaatatc

SEQ ID NO: 5528753 - DNA, 25 bp, Homo sapien
cttaacaataactaagtgccaggca

SEQ ID NO: 5528754 - DNA, 25 bp, Homo sapien
gaattcagagtattattgcagttgt

SEQ ID NO: 5528755 - DNA, 25 bp, Homo sapien
tgcagttgtaacatatgtgttctac

SEQ ID NO: 5528756 - DNA, 25 bp, Homo sapien
cttccaaacttgcatctgcagacac

SEQ ID NO: 5528757 - DNA, 25 bp, Homo sapien
catatgtgttctacttttagggggc

SEQ ID NO: 5528758 - DNA, 25 bp, Homo sapien
tgaggtaggcaatgttaacatgccc

SEQ ID NO: 5528759 - DNA, 25 bp, Homo sapien
tcccaaggctgcagtgctatacgtg

SEQ ID NO: 5528760 - DNA, 25 bp, Homo sapien
tgcatctgcagacacttacttaaca

SEQ ID NO: 5528761 - DNA, 25 bp, Homo sapien
cgacacgttacgatagacctgaagt

SEQ ID NO: 5528762 - DNA, 25 bp, Homo sapien
acttcaggtctatcgtaacgtgtcg

SEQ ID NO: 5528763 - DNA, 25 bp, Homo sapien
agtagccagcagtcccccctcctac

SEQ ID NO: 5528764 - DNA, 25 bp, Homo sapien
acgtgcccgtgctcatgctgggata

SEQ ID NO: 5528765 - DNA, 25 bp, Homo sapien
tgccactgatcctaagaacagggcc

SEQ ID NO: 5528766 - DNA, 25 bp, Homo sapien
cttgtagaaagaaacctccacttgc

SEQ ID NO: 5528767 - DNA, 25 bp, Homo sapien
aggaagaccccagttcagttgtacc

SEQ ID NO: 5528768 - DNA, 25 bp, Homo sapien
caagggtctctgcagtagccagcag

SEQ ID NO: 5528769 - DNA, 25 bp, Homo sapien
ccagtcttgctggaacaagggtgga

SEQ ID NO: 5528770 - DNA, 25 bp, Homo sapien
ccacttgcagtggagttgtatctcc

SEQ ID NO: 5528771 - DNA, 25 bp, Homo sapien
ttgggcagaaaactcttgtagaaag

SEQ ID NO: 5528772 - DNA, 25 bp, Homo sapien
ggttactcaaatagccaagggtctc

SEQ ID NO: 5528773 - DNA, 25 bp, Homo sapien
agagagaaaagagatacccgtttct

SEQ ID NO: 5528774 - DNA, 25 bp, Homo sapien
agcagcactgttgcaccacaggaac

SEQ ID NO: 5528775 - DNA, 25 bp, Homo sapien
aaggaaaccagcaagaacattcccc

SEQ ID NO: 5528776 - DNA, 25 bp, Homo sapien
cattcaatgatttgggggtgagtga

SEQ ID NO: 5528777 - DNA, 25 bp, Homo sapien
caggagaaccaccaagtcaggtgtc

SEQ ID NO: 5528778 - DNA, 25 bp, Homo sapien
aatgggagtgtttgcacacactgcc

SEQ ID NO: 5528779 - DNA, 25 bp, Homo sapien
tcttgggaaccaaatcctgccctgc

SEQ ID NO: 5528780 - DNA, 25 bp, Homo sapien
tcccattgaaagtagcagaaagcag

SEQ ID NO: 5528781 - DNA, 25 bp, Homo sapien
ccaaaggcaccacctgatgtgggga

SEQ ID NO: 5528782 - DNA, 25 bp, Homo sapien
caggagcaagagataataaacatgt

SEQ ID NO: 5528783 - DNA, 25 bp, Homo sapien
actgaaataggatccaggagcaaga

SEQ ID NO: 5528784 - DNA, 25 bp, Homo sapien
aacacaccaacagcaggagcatttt

SEQ ID NO: 5528785 - DNA, 25 bp, Homo sapien
cggggaccctcagcgctaccttttg

SEQ ID NO: 5528786 - DNA, 25 bp, Homo sapien
ggtgtgagttcccagtgcaccccga

SEQ ID NO: 5528787 - DNA, 25 bp, Homo sapien
gggcagaggcagcacctgctttttc

SEQ ID NO: 5528788 - DNA, 25 bp, Homo sapien
gcgcttgcgctcccggctacatggg

SEQ ID NO: 5528789 - DNA, 25 bp, Homo sapien
actcaacaacctaaggacgcaggag

SEQ ID NO: 5528790 - DNA, 25 bp, Homo sapien
ggccactcccaggatgctgggtctc

SEQ ID NO: 5528791 - DNA, 25 bp, Homo sapien
ggtccgagctcgtccgtagattgga

SEQ ID NO: 5528792 - DNA, 25 bp, Homo sapien
gtagattggaatcgccctgaagatg

SEQ ID NO: 5528793 - DNA, 25 bp, Homo sapien
cctgaagatgtagaccctcaaggga

SEQ ID NO: 5528794 - DNA, 25 bp, Homo sapien
ttccccccgctacacactgggcgcg

SEQ ID NO: 5528795 - DNA, 25 bp, Homo sapien
cagtccacgcactcccggatgcact

SEQ ID NO: 5528796 - DNA, 25 bp, Homo sapien
taatatcagaagagatacggtgcat

SEQ ID NO: 5528797 - DNA, 25 bp, Homo sapien
ggcacggatgttaacatacggtgtc

SEQ ID NO: 5528798 - DNA, 25 bp, Homo sapien
actgtggcacgtatgtgacagaaac

SEQ ID NO: 5528799 - DNA, 25 bp, Homo sapien
aaaaagctaggaatgcgtcagtatc

SEQ ID NO: 5528800 - DNA, 25 bp, Homo sapien
tgcaaagtgtaaagtgaaaccgcac

SEQ ID NO: 5528801 - DNA, 25 bp, Homo sapien
ggaggactcggatagtaaatcactt

SEQ ID NO: 5528802 - DNA, 25 bp, Homo sapien
gaagagctgcaatgtccaagaatca

SEQ ID NO: 5528803 - DNA, 25 bp, Homo sapien
cagggtacaaaaatgatcatgggag

SEQ ID NO: 5528804 - DNA, 25 bp, Homo sapien
atccaacgctgtcagggacagagtc

SEQ ID NO: 5528805 - DNA, 25 bp, Homo sapien
acaaagtacatcaaaaggctcgaac

SEQ ID NO: 5528806 - DNA, 25 bp, Homo sapien
gctggacaggaaacagtttacctcc

SEQ ID NO: 5528807 - DNA, 25 bp, Homo sapien
gatagtaaacatccagtcagataat

SEQ ID NO: 5528808 - DNA, 25 bp, Homo sapien
aatcgaaggtttgtagcaatcccac

SEQ ID NO: 5528809 - DNA, 25 bp, Homo sapien
gtcagataatactacaggcatacac

SEQ ID NO: 5528810 - DNA, 25 bp, Homo sapien
tgttatagcgatctcaatcagtgat

SEQ ID NO: 5528811 - DNA, 25 bp, Homo sapien
acctagcaagtgtatcaactccatt

SEQ ID NO: 5528812 - DNA, 25 bp, Homo sapien
tgtagcaatcccacacctagcaagt

SEQ ID NO: 5528813 - DNA, 25 bp, Homo sapien
gccgatttgtatagagaggaaggca

SEQ ID NO: 5528814 - DNA, 25 bp, Homo sapien
accagacctaagtggttaagacacc

SEQ ID NO: 5528815 - DNA, 25 bp, Homo sapien
tttaaagcaaagatcaaatggtata

SEQ ID NO: 5528816 - DNA, 25 bp, Homo sapien
tctgtcgcattctggtaattctccc

SEQ ID NO: 5528817 - DNA, 25 bp, Homo sapien
cagacatagagggccgatttgtata

SEQ ID NO: 5528818 - DNA, 25 bp, Homo sapien
ctggggtatgcccgatgccccccag

SEQ ID NO: 5528819 - DNA, 25 bp, Homo sapien
agtttcggccctcgtccagtgcatg

SEQ ID NO: 5528820 - DNA, 25 bp, Homo sapien
gcgctgtgccttgtatgccccgtac

SEQ ID NO: 5528821 - DNA, 25 bp, Homo sapien
gctggatttggattcctggaacccc

SEQ ID NO: 5528822 - DNA, 25 bp, Homo sapien
agggcgacctctcaccaacagagct

SEQ ID NO: 5528823 - DNA, 25 bp, Homo sapien
aaaaaatagaatcaagtggtgtgct

SEQ ID NO: 5528824 - DNA, 25 bp, Homo sapien
tggtgtgcttcgccactgagatgat

SEQ ID NO: 5528825 - DNA, 25 bp, Homo sapien
gccccgtacatgtgcctgccctgag

SEQ ID NO: 5528826 - DNA, 25 bp, Homo sapien
tccagtgcatgtgactggtgcaggg

SEQ ID NO: 5528827 - DNA, 25 bp, Homo sapien
tggaaccccctgtacccatgcggtg

SEQ ID NO: 5528828 - DNA, 25 bp, Homo sapien
ggagactgtgtgtatgtcccctccc

SEQ ID NO: 5528829 - DNA, 25 bp, Homo sapien
ctatgacaccacccagatgtccata

SEQ ID NO: 5528830 - DNA, 25 bp, Homo sapien
accaggaagtctctaaaagcaccga

SEQ ID NO: 5528831 - DNA, 25 bp, Homo sapien
gaggtgttggctagttgtctagatc

SEQ ID NO: 5528832 - DNA, 25 bp, Homo sapien
tccacaacaggcagtcacttcagac

SEQ ID NO: 5528833 - DNA, 25 bp, Homo sapien
tctagatccttgagtaactgacctt

SEQ ID NO: 5528834 - DNA, 25 bp, Homo sapien
ttcggaggttaatgctttcggccaa

SEQ ID NO: 5528835 - DNA, 25 bp, Homo sapien
cacagggctttaccatcagcacttc

SEQ ID NO: 5528836 - DNA, 25 bp, Homo sapien
ggagcaaaggcaccagttttcatgc

SEQ ID NO: 5528837 - DNA, 25 bp, Homo sapien
aaagcaccgagactcttcggaggtt

SEQ ID NO: 5528838 - DNA, 25 bp, Homo sapien
attttgcaaagtctattaagctccc

SEQ ID NO: 5528839 - DNA, 25 bp, Homo sapien
ctcctggcctcctgactatgacacc

SEQ ID NO: 5528840 - DNA, 25 bp, Homo sapien
atctgctcatctcccctcccgtccc

SEQ ID NO: 5528841 - DNA, 25 bp, Homo sapien
gtgggtcccatctcacccaggcccc

SEQ ID NO: 5528842 - DNA, 25 bp, Homo sapien
ggtgtcagaatgtcctaagggtttc

SEQ ID NO: 5528843 - DNA, 25 bp, Homo sapien
tcttcccaccagggacgcaactgtc

SEQ ID NO: 5528844 - DNA, 25 bp, Homo sapien
tatgccttgcagatctagcttcacc

SEQ ID NO: 5528845 - DNA, 25 bp, Homo sapien
ccaaggacctactgagatttcgatc

SEQ ID NO: 5528846 - DNA, 25 bp, Homo sapien
tctaagaggcttgcctatgccttgc

SEQ ID NO: 5528847 - DNA, 25 bp, Homo sapien
taagggtttctgtcccggcgctctg

SEQ ID NO: 5528848 - DNA, 25 bp, Homo sapien
acgtccagtaacattaaagaacagc

SEQ ID NO: 5528849 - DNA, 25 bp, Homo sapien
ttcagcaaggtgtcagaatgtccta

SEQ ID NO: 5528850 - DNA, 25 bp, Homo sapien
acatattctgtaaggatccaggttc

SEQ ID NO: 5528851 - DNA, 25 bp, Homo sapien
gccctacacaagcgtccagaggatt

SEQ ID NO: 5528852 - DNA, 25 bp, Homo sapien
gaagggtgattgactccagttcagc

SEQ ID NO: 5528853 - DNA, 25 bp, Homo sapien
tttaaacagtatctggtggggagac

SEQ ID NO: 5528854 - DNA, 25 bp, Homo sapien
gagaggtcagcaaagactcaccctc

SEQ ID NO: 5528855 - DNA, 25 bp, Homo sapien
aggtttaccgtacaaggccctggca

SEQ ID NO: 5528856 - DNA, 25 bp, Homo sapien
caggcctgggactcctttctgccct

SEQ ID NO: 5528857 - DNA, 25 bp, Homo sapien
tggagagttccagcagtttggtgat

SEQ ID NO: 5528858 - DNA, 25 bp, Homo sapien
gtccacagattacatgcagctaggt

SEQ ID NO: 5528859 - DNA, 25 bp, Homo sapien
gacaaaagacatgcctgagagtaga

SEQ ID NO: 5528860 - DNA, 25 bp, Homo sapien
acagggaattcaccccaggccctac

SEQ ID NO: 5528861 - DNA, 25 bp, Homo sapien
cccctctcgaggtaccatgggggac

SEQ ID NO: 5528862 - DNA, 25 bp, Homo sapien
ggctttgctcaataactagatgctc

SEQ ID NO: 5528863 - DNA, 25 bp, Homo sapien
tccacttgggtacttaagcagcctc

SEQ ID NO: 5528864 - DNA, 25 bp, Homo sapien
tctaactcagacttacagtaactgt

SEQ ID NO: 5528865 - DNA, 25 bp, Homo sapien
tatatcttaaacatgtgggaatttc

SEQ ID NO: 5528866 - DNA, 25 bp, Homo sapien
ccagtatgtgaactgtgatagaaat

SEQ ID NO: 5528867 - DNA, 25 bp, Homo sapien
tctttgaataagcgaacaggtaaaa

SEQ ID NO: 5528868 - DNA, 25 bp, Homo sapien
agacatacccccaaagacaagcaat

SEQ ID NO: 5528869 - DNA, 25 bp, Homo sapien
tatattggctatttagaatgagcta

SEQ ID NO: 5528870 - DNA, 25 bp, Homo sapien
tagtaaagactcggatatgatgggg

SEQ ID NO: 5528871 - DNA, 25 bp, Homo sapien
aaaacatgtactgagaagcaaattc

SEQ ID NO: 5528872 - DNA, 25 bp, Homo sapien
aatttaaacgaatatgtagacatac

SEQ ID NO: 5528873 - DNA, 25 bp, Homo sapien
tgcacacatcgttccaatacatgat

SEQ ID NO: 5528874 - DNA, 25 bp, Homo sapien
aaacacaactgaaggccccatgtac

SEQ ID NO: 5528875 - DNA, 25 bp, Homo sapien
ccccaaatccatcaggtctcctgcc

SEQ ID NO: 5528876 - DNA, 25 bp, Homo sapien
cctgtgagattgccactactatccc

SEQ ID NO: 5528877 - DNA, 25 bp, Homo sapien
tgaaggccccatgtaccctccccaa

SEQ ID NO: 5528878 - DNA, 25 bp, Homo sapien
ccacccacaatcaccctgtgagatt

SEQ ID NO: 5528879 - DNA, 25 bp, Homo sapien
ctttctatatgtccacaaggcttac

SEQ ID NO: 5528880 - DNA, 25 bp, Homo sapien
aggcagaatggtgacttgcacacat

SEQ ID NO: 5528881 - DNA, 25 bp, Homo sapien
tccacaaggcttacatgctagacac

SEQ ID NO: 5528882 - DNA, 25 bp, Homo sapien
agaaaatagattactgtgcaaaaca

SEQ ID NO: 5528883 - DNA, 25 bp, Homo sapien
acttcattgaccacccccccaccca

SEQ ID NO: 5528884 - DNA, 25 bp, Homo sapien
tggcaaccctgtgacagctgctaag

SEQ ID NO: 5528885 - DNA, 25 bp, Homo sapien
agctgctaagtcctagaaaacacgt

SEQ ID NO: 5528886 - DNA, 25 bp, Homo sapien
tgggtcatgacctgctttatgtggc

SEQ ID NO: 5528887 - DNA, 25 bp, Homo sapien
gggctccatcaggttctagatcggc

SEQ ID NO: 5528888 - DNA, 25 bp, Homo sapien
gagacattctgcactcgggaattgc

SEQ ID NO: 5528889 - DNA, 25 bp, Homo sapien
tctagatcggcctccgccctccact

SEQ ID NO: 5528890 - DNA, 25 bp, Homo sapien
tgtggaacttgaaggcctctctgca

SEQ ID NO: 5528891 - DNA, 25 bp, Homo sapien
aaaacacgtaacaggacgtgaggtg

SEQ ID NO: 5528892 - DNA, 25 bp, Homo sapien
ctctgcatcttgtcactcgtggccc

SEQ ID NO: 5528893 - DNA, 25 bp, Homo sapien
atcccgcttcagtgggaaacgtgag

SEQ ID NO: 5528894 - DNA, 25 bp, Homo sapien
cgtggcccctgcaccttgggtcatg

SEQ ID NO: 5528895 - DNA, 25 bp, Homo sapien
aaagaacgctcagccccgactgtag

SEQ ID NO: 5528896 - DNA, 25 bp, Homo sapien
aacgatttggccagcgctaacactc

SEQ ID NO: 5528897 - DNA, 25 bp, Homo sapien
gcgatgccctccaaggccgtctctt

SEQ ID NO: 5528898 - DNA, 25 bp, Homo sapien
gattccaggccccgcctgtgagacc

SEQ ID NO: 5528899 - DNA, 25 bp, Homo sapien
aaggccgtctcttagggaggatctt

SEQ ID NO: 5528900 - DNA, 25 bp, Homo sapien
aaaacgcaagcctaggtcttctgtc

SEQ ID NO: 5528901 - DNA, 25 bp, Homo sapien
gcctgtgagaccctggagctcattt

SEQ ID NO: 5528902 - DNA, 25 bp, Homo sapien
gggtcgcagattgcgccaagattcc

SEQ ID NO: 5528903 - DNA, 25 bp, Homo sapien
agtggaacactcacaggatgaccga

SEQ ID NO: 5528904 - DNA, 25 bp, Homo sapien
tttggctgtttgaaagaacgctcag

SEQ ID NO: 5528905 - DNA, 25 bp, Homo sapien
aggagatcattgctggacttaagtg

SEQ ID NO: 5528906 - DNA, 25 bp, Homo sapien
aacagattcaagctttcggacgatc

SEQ ID NO: 5528907 - DNA, 25 bp, Homo sapien
ttcctagaaggacatgaatagtgat

SEQ ID NO: 5528908 - DNA, 25 bp, Homo sapien
acatgaaagccataacccttgggcc

SEQ ID NO: 5528909 - DNA, 25 bp, Homo sapien
aggcagcggaatgaaacattgaatt

SEQ ID NO: 5528910 - DNA, 25 bp, Homo sapien
tggcagggccttttctttgggtggc

SEQ ID NO: 5528911 - DNA, 25 bp, Homo sapien
ttgagcagtcctctcacggctggga

SEQ ID NO: 5528912 - DNA, 25 bp, Homo sapien
tgggagcctctgctgcttccagtta

SEQ ID NO: 5528913 - DNA, 25 bp, Homo sapien
cttcccacatagtgcgtgaggcatg

SEQ ID NO: 5528914 - DNA, 25 bp, Homo sapien
gacatgaatagtgatgtggaggtac

SEQ ID NO: 5528915 - DNA, 25 bp, Homo sapien
ttctattacatgatggaggcagcgg

SEQ ID NO: 5528916 - DNA, 25 bp, Homo sapien
gtcaggcatctacagggtcattcga

SEQ ID NO: 5528917 - DNA, 25 bp, Homo sapien
atgggcaagatgggacatcttccta

SEQ ID NO: 5528918 - DNA, 25 bp, Homo sapien
cgtcaaagagggtcttcccacttcc

SEQ ID NO: 5528919 - DNA, 25 bp, Homo sapien
actgtaataaagcgtcaaagagggt

SEQ ID NO: 5528920 - DNA, 25 bp, Homo sapien
ccaagtcgataggagctcaaattac

SEQ ID NO: 5528921 - DNA, 25 bp, Homo sapien
tggtcactctgaaggtgaagagcca

SEQ ID NO: 5528922 - DNA, 25 bp, Homo sapien
aatagcttgcacatgctggctgggg

SEQ ID NO: 5528923 - DNA, 25 bp, Homo sapien
tgtccacctggtcactggacagcag

SEQ ID NO: 5528924 - DNA, 25 bp, Homo sapien
agcgatccctgagtgctgtgaagtg

SEQ ID NO: 5528925 - DNA, 25 bp, Homo sapien
cacttccagagtctgggaagtggtc

SEQ ID NO: 5528926 - DNA, 25 bp, Homo sapien
cattgccgttcaatacagagaggga

SEQ ID NO: 5528927 - DNA, 25 bp, Homo sapien
agacctaaccacaaaagagaaattc

SEQ ID NO: 5528928 - DNA, 25 bp, Homo sapien
tcagacacaataataaacagtaagc

SEQ ID NO: 5528929 - DNA, 25 bp, Homo sapien
aaataggatttgagacgactagact

SEQ ID NO: 5528930 - DNA, 25 bp, Homo sapien
acatgaaatcacagcaagttaacac

SEQ ID NO: 5528931 - DNA, 25 bp, Homo sapien
ttataacatatgtagaggggaaacc

SEQ ID NO: 5528932 - DNA, 25 bp, Homo sapien
ataataaagagtgaatgtgagtgtg

SEQ ID NO: 5528933 - DNA, 25 bp, Homo sapien
gatgtaacaggaattatagaatagt

SEQ ID NO: 5528934 - DNA, 25 bp, Homo sapien
atttcacatcaaggagaaaagggac

SEQ ID NO: 5528935 - DNA, 25 bp, Homo sapien
tctaaacttaagagtcagacacaat

SEQ ID NO: 5528936 - DNA, 25 bp, Homo sapien
gtagtggcctaaatcatgggtaatc

SEQ ID NO: 5528937 - DNA, 25 bp, Homo sapien
agctgacaaaacttacctcccatga

SEQ ID NO: 5528938 - DNA, 25 bp, Homo sapien
ccttatttaaggaaagaagatacca

SEQ ID NO: 5528939 - DNA, 25 bp, Homo sapien
aaatgtgtttagaagaaggaaattg

SEQ ID NO: 5528940 - DNA, 25 bp, Homo sapien
ctttggtctgaaggcttagtgagag

SEQ ID NO: 5528941 - DNA, 25 bp, Homo sapien
cagtgggggaagacttcctattttc

SEQ ID NO: 5528942 - DNA, 25 bp, Homo sapien
ccaaatgctggcagattatggcatc

SEQ ID NO: 5528943 - DNA, 25 bp, Homo sapien
gatgttatggtgctgagtgacaact

SEQ ID NO: 5528944 - DNA, 25 bp, Homo sapien
aaaaggaaattggctcactgcacta

SEQ ID NO: 5528945 - DNA, 25 bp, Homo sapien
atatactcctacagtgggggaagac

SEQ ID NO: 5528946 - DNA, 25 bp, Homo sapien
tgcacaacttacatatcagggtttc

SEQ ID NO: 5528947 - DNA, 25 bp, Homo sapien
aggacaagatcctgtgtgcgtagac

SEQ ID NO: 5528948 - DNA, 25 bp, Homo sapien
tcactgcactatgtatcaacgcctc

SEQ ID NO: 5528949 - DNA, 25 bp, Homo sapien
gaaggaaattgagtgttgggaatta

SEQ ID NO: 5528950 - DNA, 25 bp, Homo sapien
caaagtaatggacctgaaaagcagg

SEQ ID NO: 5528951 - DNA, 25 bp, Homo sapien
ttcgggtctctagtactgccaccac

SEQ ID NO: 5528952 - DNA, 25 bp, Homo sapien
tcatccaccactggaacgccaaccg

SEQ ID NO: 5528953 - DNA, 25 bp, Homo sapien
cctgatatgcgaatgctgtcctctc

SEQ ID NO: 5528954 - DNA, 25 bp, Homo sapien
tcttaagaatgagaatgacgccatt

SEQ ID NO: 5528955 - DNA, 25 bp, Homo sapien
gctcgcggagaaatttcgacctgat

SEQ ID NO: 5528956 - DNA, 25 bp, Homo sapien
ccgaggatttggagttccatggagt

SEQ ID NO: 5528957 - DNA, 25 bp, Homo sapien
ccggctggacctgttcgagatcagc

SEQ ID NO: 5528958 - DNA, 25 bp, Homo sapien
acaactgaattggaacaaagatgat

SEQ ID NO: 5528959 - DNA, 25 bp, Homo sapien
agaaagaagattggatatagatgag

SEQ ID NO: 5528960 - DNA, 25 bp, Homo sapien
gatgtaatcgaaacgctcgcggaga

SEQ ID NO: 5528961 - DNA, 25 bp, Homo sapien
agcatcactgagagaactctggggc

SEQ ID NO: 5528962 - DNA, 25 bp, Homo sapien
ccatattgcgaaagtcagagagagg

SEQ ID NO: 5528963 - DNA, 25 bp, Homo sapien
ccaggcgaggcctactgcttcctga

SEQ ID NO: 5528964 - DNA, 25 bp, Homo sapien
ccagcacggatcacccattagcatc

SEQ ID NO: 5528965 - DNA, 25 bp, Homo sapien
gcttcctgaggtcactctgtggggc

SEQ ID NO: 5528966 - DNA, 25 bp, Homo sapien
gactgcgttgggtctcaccagctct

SEQ ID NO: 5528967 - DNA, 25 bp, Homo sapien
gtaagcaaatgacttggactgcgtt

SEQ ID NO: 5528968 - DNA, 25 bp, Homo sapien
ggtgagaggtgccaattacaaactc

SEQ ID NO: 5528969 - DNA, 25 bp, Homo sapien
ggtgagtcgtctacacagtgaccca

SEQ ID NO: 5528970 - DNA, 25 bp, Homo sapien
agtcttgaacatggaaatggagctg

SEQ ID NO: 5528971 - DNA, 25 bp, Homo sapien
ttgaaccacatgcagactgggtgag

SEQ ID NO: 5528972 - DNA, 25 bp, Homo sapien
tactgatgacaataagaattaatac

SEQ ID NO: 5528973 - DNA, 25 bp, Homo sapien
agagtacttgaatctgttgagtctg

SEQ ID NO: 5528974 - DNA, 25 bp, Homo sapien
tgtgtattcagatggtactgaactc

SEQ ID NO: 5528975 - DNA, 25 bp, Homo sapien
ttagagtaagcagagtacttgaatc

SEQ ID NO: 5528976 - DNA, 25 bp, Homo sapien
agagatcaggcatattactgtgcac

SEQ ID NO: 5528977 - DNA, 25 bp, Homo sapien
ctagtcaattagagtaagcagagta

SEQ ID NO: 5528978 - DNA, 25 bp, Homo sapien
cacaagttatttttcgacggagatc

SEQ ID NO: 5528979 - DNA, 25 bp, Homo sapien
cgacggagatcaacattacattaac

SEQ ID NO: 5528980 - DNA, 25 bp, Homo sapien
gcaattccaagttacagagacattc

SEQ ID NO: 5528981 - DNA, 25 bp, Homo sapien
cagagacattcacataaagatattc

SEQ ID NO: 5528982 - DNA, 25 bp, Homo sapien
taaataatggctaaatactgatgac

SEQ ID NO: 5528983 - DNA, 25 bp, Homo sapien
aatgacattaagaattggccacata

SEQ ID NO: 5528984 - DNA, 25 bp, Homo sapien
catttcacatggatgtggcagccag

SEQ ID NO: 5528985 - DNA, 25 bp, Homo sapien
aagggatgcaatttattagacacat

SEQ ID NO: 5528986 - DNA, 25 bp, Homo sapien
gtccctgcaggaaattgtgatattt

SEQ ID NO: 5528987 - DNA, 25 bp, Homo sapien
tggcagccagccttggtggtttaaa

SEQ ID NO: 5528988 - DNA, 25 bp, Homo sapien
acaaaatgtgaccatagtaagtgta

SEQ ID NO: 5528989 - DNA, 25 bp, Homo sapien
taagtgccaatggcagaccaggcat

SEQ ID NO: 5528990 - DNA, 25 bp, Homo sapien
ataacagtgacaattgcagagtact

SEQ ID NO: 5528991 - DNA, 25 bp, Homo sapien
agaccaggcatcttgcaaaagttac

SEQ ID NO: 5528992 - DNA, 25 bp, Homo sapien
tgtgctacagtaactttgaggattg

SEQ ID NO: 5528993 - DNA, 25 bp, Homo sapien
ctttacaaccagaggttagagaaag

SEQ ID NO: 5528994 - DNA, 25 bp, Homo sapien
agtggtggcctgattgtcagtcttc

SEQ ID NO: 5528995 - DNA, 25 bp, Homo sapien
ctttcgacaacagtagtagcagcag

SEQ ID NO: 5528996 - DNA, 25 bp, Homo sapien
cgaataccctacagagcggtttggc

SEQ ID NO: 5528997 - DNA, 25 bp, Homo sapien
gtcagcgggcgattttctctgcatc

SEQ ID NO: 5528998 - DNA, 25 bp, Homo sapien
tgcgtttttcaatggcgctggcccc

SEQ ID NO: 5528999 - DNA, 25 bp, Homo sapien
accccgtcctcgctgcagaagaggc

SEQ ID NO: 5529000 - DNA, 25 bp, Homo sapien
cctcttccagaccatcatcagcgac

SEQ ID NO: 5529001 - DNA, 25 bp, Homo sapien
accatcatcagcgacatgaagggga

SEQ ID NO: 5529002 - DNA, 25 bp, Homo sapien
agcgctgcttgtaggcgaataccct

SEQ ID NO: 5529003 - DNA, 25 bp, Homo sapien
ggggagctatccagtttgggaagat

SEQ ID NO: 5529004 - DNA, 25 bp, Homo sapien
gtctctcggaaggtgaaattccttc

SEQ ID NO: 5529005 - DNA, 25 bp, Homo sapien
atcagaagttaagggaggtttgaaa

SEQ ID NO: 5529006 - DNA, 25 bp, Homo sapien
tatacaatcagaagttaagggaggt

SEQ ID NO: 5529007 - DNA, 25 bp, Homo sapien
ctccatctacgaaaggtggcagagt

SEQ ID NO: 5529008 - DNA, 25 bp, Homo sapien
gagaaggagttccatggtacaaact

SEQ ID NO: 5529009 - DNA, 25 bp, Homo sapien
ttaaggcttaaaacatctctgacta

SEQ ID NO: 5529010 - DNA, 25 bp, Homo sapien
caggtgatttcaacatcgtggtgag

SEQ ID NO: 5529011 - DNA, 25 bp, Homo sapien
aagtgaacaaacagatgaacaaatg

SEQ ID NO: 5529012 - DNA, 25 bp, Homo sapien
agagtaactgttagagaaggagttc

SEQ ID NO: 5529013 - DNA, 25 bp, Homo sapien
aaataaggcagagatatcccgtata

SEQ ID NO: 5529014 - DNA, 25 bp, Homo sapien
aggtttgaaataggcactgccacag

SEQ ID NO: 5529015 - DNA, 25 bp, Homo sapien
ccttcttgtcaaaggacaggactgg

SEQ ID NO: 5529016 - DNA, 25 bp, Homo sapien
ggcatttaggccacatacggaaagg

SEQ ID NO: 5529017 - DNA, 25 bp, Homo sapien
aaatgagcagaggtaaatagtcaat

SEQ ID NO: 5529018 - DNA, 25 bp, Homo sapien
ggcagagagattagaatgcaactcc

SEQ ID NO: 5529019 - DNA, 25 bp, Homo sapien
aaaggtgctgcttagatccaaggtg

SEQ ID NO: 5529020 - DNA, 25 bp, Homo sapien
aaggaggtgcaactagacattcttg

SEQ ID NO: 5529021 - DNA, 25 bp, Homo sapien
ttagactaacatctgaaggaaggag

SEQ ID NO: 5529022 - DNA, 25 bp, Homo sapien
acaacagccctacaaggtaggtatt

SEQ ID NO: 5529023 - DNA, 25 bp, Homo sapien
taaaagtgaatgtaagtccatagtc

SEQ ID NO: 5529024 - DNA, 25 bp, Homo sapien
agatccaaggtgctgttttagacta

SEQ ID NO: 5529025 - DNA, 25 bp, Homo sapien
aggaaagaggctcatagagtttata

SEQ ID NO: 5529026 - DNA, 25 bp, Homo sapien
gccccaggtcacatagttgaagcgg

SEQ ID NO: 5529027 - DNA, 25 bp, Homo sapien
ccctacgtctcacctttcaagtggt

SEQ ID NO: 5529028 - DNA, 25 bp, Homo sapien
accacttgaaaggtgagacgtaggg

SEQ ID NO: 5529029 - DNA, 25 bp, Homo sapien
caggacccccatctggggatgtgaa

SEQ ID NO: 5529030 - DNA, 25 bp, Homo sapien
gctgcccacggagtggaatgtattg

SEQ ID NO: 5529031 - DNA, 25 bp, Homo sapien
ggatgaagcgtatgatgcagctcaa

SEQ ID NO: 5529032 - DNA, 25 bp, Homo sapien
cgcgagagacattgatgcattttgc

SEQ ID NO: 5529033 - DNA, 25 bp, Homo sapien
gtacaagtactcggaaggtcagttc

SEQ ID NO: 5529034 - DNA, 25 bp, Homo sapien
gattgttgtgaaacagtgaaggtgc

SEQ ID NO: 5529035 - DNA, 25 bp, Homo sapien
ataagaagttggtgctggcattcag

SEQ ID NO: 5529036 - DNA, 25 bp, Homo sapien
caaagagggccttcccgtgtttgtg

SEQ ID NO: 5529037 - DNA, 25 bp, Homo sapien
agtgctggaaatcagcaggctttga

SEQ ID NO: 5529038 - DNA, 25 bp, Homo sapien
gcacgtgtcctgggtcatgaaactt

SEQ ID NO: 5529039 - DNA, 25 bp, Homo sapien
ggggacagatcagagtttgcatgat

SEQ ID NO: 5529040 - DNA, 25 bp, Homo sapien
gtgtgccaggcagttttgtgaaatt

SEQ ID NO: 5529041 - DNA, 25 bp, Homo sapien
gtagtttctagcttatgaatagcac

SEQ ID NO: 5529042 - DNA, 25 bp, Homo sapien
tgaaacaataagatatctggtgatt

SEQ ID NO: 5529043 - DNA, 25 bp, Homo sapien
acttccagagagtgaatgcccttgt

SEQ ID NO: 5529044 - DNA, 25 bp, Homo sapien
tttagaatgggtctctgaaatcttc

SEQ ID NO: 5529045 - DNA, 25 bp, Homo sapien
agttcacaaggccatgctacttcca

SEQ ID NO: 5529046 - DNA, 25 bp, Homo sapien
aatcgaaattccttattgggtctga

SEQ ID NO: 5529047 - DNA, 25 bp, Homo sapien
aatagcacattcatcaagttggctc

SEQ ID NO: 5529048 - DNA, 25 bp, Homo sapien
aatgcccttgtttagaatgggtctc

SEQ ID NO: 5529049 - DNA, 25 bp, Homo sapien
gtgtgcttgtgtgccaggcagtttt

SEQ ID NO: 5529050 - DNA, 25 bp, Homo sapien
taagaggcatctaggtaattatgat

SEQ ID NO: 5529051 - DNA, 25 bp, Homo sapien
cattcagtaggtcagaaatgagggt

SEQ ID NO: 5529052 - DNA, 25 bp, Homo sapien
tgcagaatgctcaaattagacttat

SEQ ID NO: 5529053 - DNA, 25 bp, Homo sapien
cagccatctctccaggaggctgcca

SEQ ID NO: 5529054 - DNA, 25 bp, Homo sapien
gaagatgctgggtcattcaaaggaa

SEQ ID NO: 5529055 - DNA, 25 bp, Homo sapien
aggaaatgccaaacagctgagcatt

SEQ ID NO: 5529056 - DNA, 25 bp, Homo sapien
gcagcaagagctcacagccatctct

SEQ ID NO: 5529057 - DNA, 25 bp, Homo sapien
tggggaatgacggacttttattatg

SEQ ID NO: 5529058 - DNA, 25 bp, Homo sapien
ggcactagaggtttaagcagcaaga

SEQ ID NO: 5529059 - DNA, 25 bp, Homo sapien
ccaaaataagctgtgtgtgtagggg

SEQ ID NO: 5529060 - DNA, 25 bp, Homo sapien
caaacaaccagcagactcctataca

SEQ ID NO: 5529061 - DNA, 25 bp, Homo sapien
tttccgacaacaaaagggaagatgc

SEQ ID NO: 5529062 - DNA, 25 bp, Homo sapien
ttgtctgctagtagtgttctagatt

SEQ ID NO: 5529063 - DNA, 25 bp, Homo sapien
gatcagtaagtcacagttatctcca

SEQ ID NO: 5529064 - DNA, 25 bp, Homo sapien
tcgctatactgcacttacgctatcc

SEQ ID NO: 5529065 - DNA, 25 bp, Homo sapien
taaacaagccaacatatgaatatat

SEQ ID NO: 5529066 - DNA, 25 bp, Homo sapien
tacgctatccagttgcaggtaattt

SEQ ID NO: 5529067 - DNA, 25 bp, Homo sapien
taggtaaaatctctgaaggatcatc

SEQ ID NO: 5529068 - DNA, 25 bp, Homo sapien
ttcaagtatttgatcagtaagtcac

SEQ ID NO: 5529069 - DNA, 25 bp, Homo sapien
tggtttggagtacaaattagactta

SEQ ID NO: 5529070 - DNA, 25 bp, Homo sapien
attatgggatctcaacaaagggtcg

SEQ ID NO: 5529071 - DNA, 25 bp, Homo sapien
caagaaataggttataggtaaaatc

SEQ ID NO: 5529072 - DNA, 25 bp, Homo sapien
agcctcagtagtagcgaactgcact

SEQ ID NO: 5529073 - DNA, 25 bp, Homo sapien
aggcaagtgggacaggtgggcgtcc

SEQ ID NO: 5529074 - DNA, 25 bp, Homo sapien
ggacgcccacctgtcccacttgcct

SEQ ID NO: 5529075 - DNA, 25 bp, Homo sapien
gcaggaccttgaggaatcagactat

SEQ ID NO: 5529076 - DNA, 25 bp, Homo sapien
ttgagttcctggaagccaggggtca

SEQ ID NO: 5529077 - DNA, 25 bp, Homo sapien
tagcaaacccaatcccagagtaact

SEQ ID NO: 5529078 - DNA, 25 bp, Homo sapien
gaaagtagatgtcttatcctgggtc

SEQ ID NO: 5529079 - DNA, 25 bp, Homo sapien
agccaccatcctgtagagcagcggg

SEQ ID NO: 5529080 - DNA, 25 bp, Homo sapien
ctttgcatgttcccagagtccctcc

SEQ ID NO: 5529081 - DNA, 25 bp, Homo sapien
atcatcgctgttaaggaccctcgga

SEQ ID NO: 5529082 - DNA, 25 bp, Homo sapien
atcccagagtaactggaaaattctc

SEQ ID NO: 5529083 - DNA, 25 bp, Homo sapien
tcctccttcagccatgctggccccg

SEQ ID NO: 5529084 - DNA, 25 bp, Homo sapien
ggaaaattctccatcaggaggcctg

SEQ ID NO: 5529085 - DNA, 25 bp, Homo sapien
gaggggatgcttagcaaacccaatc

SEQ ID NO: 5529086 - DNA, 25 bp, Homo sapien
tctagggtaaatacctaagtgtgga

SEQ ID NO: 5529087 - DNA, 25 bp, Homo sapien
atgttgtagtaagtgtcaataaatc

SEQ ID NO: 5529088 - DNA, 25 bp, Homo sapien
tgtaatgacaggcacatataaaatt

SEQ ID NO: 5529089 - DNA, 25 bp, Homo sapien
ttgctgtgaacatctgagtataggt

SEQ ID NO: 5529090 - DNA, 25 bp, Homo sapien
gctgagtcatatgataaatgtatgg

SEQ ID NO: 5529091 - DNA, 25 bp, Homo sapien
atacctaagtgtggagttgctgagt

SEQ ID NO: 5529092 - DNA, 25 bp, Homo sapien
atgctatataacatactgtagacac

SEQ ID NO: 5529093 - DNA, 25 bp, Homo sapien
tctatagtatgtaatgacaggcaca

SEQ ID NO: 5529094 - DNA, 25 bp, Homo sapien
attgtcacaaggaatatacagtaat

SEQ ID NO: 5529095 - DNA, 25 bp, Homo sapien
tctttatgtctgagcagccctccat

SEQ ID NO: 5529096 - DNA, 25 bp, Homo sapien
gcagccctccatagtattggtgtac

SEQ ID NO: 5529097 - DNA, 25 bp, Homo sapien
ctaatgccagttctgcagatcgctc

SEQ ID NO: 5529098 - DNA, 25 bp, Homo sapien
aaaaaatcggaatagtgcaattacc

SEQ ID NO: 5529099 - DNA, 25 bp, Homo sapien
ttagggtgaaaaagttatctgtatc

SEQ ID NO: 5529100 - DNA, 25 bp, Homo sapien
ctttaaaatgcatcgcggtccaccc

SEQ ID NO: 5529101 - DNA, 25 bp, Homo sapien
tgaagtaaaacaggtacacactaaa

SEQ ID NO: 5529102 - DNA, 25 bp, Homo sapien
tctgcccctctaatgccagttctgc

SEQ ID NO: 5529103 - DNA, 25 bp, Homo sapien
cgcgagttgcaaagtttaaagagaa

SEQ ID NO: 5529104 - DNA, 25 bp, Homo sapien
gttctgcagatcgctcacaccactc

SEQ ID NO: 5529105 - DNA, 25 bp, Homo sapien
tcttctcattcgcgagttgcaaagt

SEQ ID NO: 5529106 - DNA, 25 bp, Homo sapien
tatcagaaaccagatctaaaatgtt

SEQ ID NO: 5529107 - DNA, 25 bp, Homo sapien
aaaggaatccaatggcttagctctt

SEQ ID NO: 5529108 - DNA, 25 bp, Homo sapien
ttctgggacatgctctgtgtgccat

SEQ ID NO: 5529109 - DNA, 25 bp, Homo sapien
cacttaattgtccaggcataaaccc

SEQ ID NO: 5529110 - DNA, 25 bp, Homo sapien
tgtgtgccatcacctaacagtgcag

SEQ ID NO: 5529111 - DNA, 25 bp, Homo sapien
aataaaatgtatggtggtaaattaa

SEQ ID NO: 5529112 - DNA, 25 bp, Homo sapien
acagaaatgttctgggacatgctct

SEQ ID NO: 5529113 - DNA, 25 bp, Homo sapien
acaaagtaactgctaggctctatta

SEQ ID NO: 5529114 - DNA, 25 bp, Homo sapien
gttaccccaccccatgacatacatt

SEQ ID NO: 5529115 - DNA, 25 bp, Homo sapien
gcataaacccccattacagtacgac

SEQ ID NO: 5529116 - DNA, 25 bp, Homo sapien
aagccaaaagagtcacatgctatac

SEQ ID NO: 5529117 - DNA, 25 bp, Homo sapien
agtgcagtaaagactctgttacccc

SEQ ID NO: 5529118 - DNA, 25 bp, Homo sapien
gtgtaaggcacagtaaaaccatatt

SEQ ID NO: 5529119 - DNA, 25 bp, Homo sapien
aggaggatagaaaacttgtaaatga

SEQ ID NO: 5529120 - DNA, 25 bp, Homo sapien
tttaacactgaaggaggatagaaaa

SEQ ID NO: 5529121 - DNA, 25 bp, Homo sapien
tggtggtcccagaagattataaaac

SEQ ID NO: 5529122 - DNA, 25 bp, Homo sapien
tacagatttgtaccccaggaccaac

SEQ ID NO: 5529123 - DNA, 25 bp, Homo sapien
aaagcagaatcaagtaacagttggc

SEQ ID NO: 5529124 - DNA, 25 bp, Homo sapien
cccaggaccaacaggctataccaaa

SEQ ID NO: 5529125 - DNA, 25 bp, Homo sapien
ttggtcaatgatgtaccgcatatac

SEQ ID NO: 5529126 - DNA, 25 bp, Homo sapien
cgcatatacaatggtggtcccagaa

SEQ ID NO: 5529127 - DNA, 25 bp, Homo sapien
tatgctggataacgatgttttggtc

SEQ ID NO: 5529128 - DNA, 25 bp, Homo sapien
cctcttaagaactaaaagcagaatc

SEQ ID NO: 5529129 - DNA, 25 bp, Homo sapien
gtttgtggaagtacatgctatgatg

SEQ ID NO: 5529130 - DNA, 25 bp, Homo sapien
cctacctcgtcacagggatacccac

SEQ ID NO: 5529131 - DNA, 25 bp, Homo sapien
ccttcgcttaaagggaacaccaggc

SEQ ID NO: 5529132 - DNA, 25 bp, Homo sapien
tgtggagccaccttcgcttaaaggg

SEQ ID NO: 5529133 - DNA, 25 bp, Homo sapien
tgttttgccttgaggaagcgacgat

SEQ ID NO: 5529134 - DNA, 25 bp, Homo sapien
catgacaactcaataaagcactgct

SEQ ID NO: 5529135 - DNA, 25 bp, Homo sapien
atttgattaagcttcaggactgttt

SEQ ID NO: 5529136 - DNA, 25 bp, Homo sapien
gccggaccgtcacccgctatcctgc

SEQ ID NO: 5529137 - DNA, 25 bp, Homo sapien
caactctatcgtggtcgtaggaggc

SEQ ID NO: 5529138 - DNA, 25 bp, Homo sapien
caggcccggctttcctacacccagc

SEQ ID NO: 5529139 - DNA, 25 bp, Homo sapien
aggactgttttgtaaagcgaggtgg

SEQ ID NO: 5529140 - DNA, 25 bp, Homo sapien
gtcacagggatacccacccaccatc

SEQ ID NO: 5529141 - DNA, 25 bp, Homo sapien
caatgaaaccacagcacaaagtaac

SEQ ID NO: 5529142 - DNA, 25 bp, Homo sapien
taaagagaatacacatccaatcaac

SEQ ID NO: 5529143 - DNA, 25 bp, Homo sapien
tggtccagtgtgaaacacaaggtac

SEQ ID NO: 5529144 - DNA, 25 bp, Homo sapien
taaagctctgctgatggacttagtt

SEQ ID NO: 5529145 - DNA, 25 bp, Homo sapien
gctgatggacttagttgatggattt

SEQ ID NO: 5529146 - DNA, 25 bp, Homo sapien
tagttattctaaggtggtaagtgtc

SEQ ID NO: 5529147 - DNA, 25 bp, Homo sapien
tcaagaggaataacatggtccagtg

SEQ ID NO: 5529148 - DNA, 25 bp, Homo sapien
ccaatcaactgaaactgtgagcaga

SEQ ID NO: 5529149 - DNA, 25 bp, Homo sapien
aaattgggtagttcaatgaaacatt

SEQ ID NO: 5529150 - DNA, 25 bp, Homo sapien
ctgtgagcagaaagtatgtaacctc

SEQ ID NO: 5529151 - DNA, 25 bp, Homo sapien
aggtggtaagtgtcacaaagttaac

SEQ ID NO: 5529152 - DNA, 25 bp, Homo sapien
gtaaaaagcagcgacatagttcaac

SEQ ID NO: 5529153 - DNA, 25 bp, Homo sapien
gtgactgctttggatcaagacaagt

SEQ ID NO: 5529154 - DNA, 25 bp, Homo sapien
ccacgctacacaaatcatgagaaaa

SEQ ID NO: 5529155 - DNA, 25 bp, Homo sapien
tagcgagattatagacaatcatgtc

SEQ ID NO: 5529156 - DNA, 25 bp, Homo sapien
gtgaaacatgacagattgcccaagt

SEQ ID NO: 5529157 - DNA, 25 bp, Homo sapien
tgattcccagatatgcagggttatc

SEQ ID NO: 5529158 - DNA, 25 bp, Homo sapien
ttacacagagaaattgagcaatgaa

SEQ ID NO: 5529159 - DNA, 25 bp, Homo sapien
acacagtacaaggctagcgagatta

SEQ ID NO: 5529160 - DNA, 25 bp, Homo sapien
tttcagtcacaaaaatggcagtagg

SEQ ID NO: 5529161 - DNA, 25 bp, Homo sapien
atgagaaaaatgagaactgttgtga

SEQ ID NO: 5529162 - DNA, 25 bp, Homo sapien
aatagtcaggagctagattacttcc

SEQ ID NO: 5529163 - DNA, 25 bp, Homo sapien
taatctttgctactctgttaaagag

SEQ ID NO: 5529164 - DNA, 25 bp, Homo sapien
ctctttaacagagtagcaaagatta

SEQ ID NO: 5529165 - DNA, 25 bp, Homo sapien
tttaatctttgctactctgttaaag

SEQ ID NO: 5529166 - DNA, 25 bp, Homo sapien
ctttaacagagtagcaaagattaaa

SEQ ID NO: 5529167 - DNA, 25 bp, Homo sapien
gtcgctgggggcattttcacccaca

SEQ ID NO: 5529168 - DNA, 25 bp, Homo sapien
cctagagagctaatgtagtattggc

SEQ ID NO: 5529169 - DNA, 25 bp, Homo sapien
ggaagcctaggctgcctcaatggag

SEQ ID NO: 5529170 - DNA, 25 bp, Homo sapien
ttgagtgccaactacgttcccagcc

SEQ ID NO: 5529171 - DNA, 25 bp, Homo sapien
ggggaagatctgggcaattttggcc

SEQ ID NO: 5529172 - DNA, 25 bp, Homo sapien
ccaggcactggcaatgcagtgatga

SEQ ID NO: 5529173 - DNA, 25 bp, Homo sapien
gtgatgaacaggatgacaagattca

SEQ ID NO: 5529174 - DNA, 25 bp, Homo sapien
ggggcaggtcatttggaaataaaga

SEQ ID NO: 5529175 - DNA, 25 bp, Homo sapien
cagagctcaagcttagaagccagcc

SEQ ID NO: 5529176 - DNA, 25 bp, Homo sapien
ccatacttaagcaatgggagggaga

SEQ ID NO: 5529177 - DNA, 25 bp, Homo sapien
catgccatcaggggcaccttgtcac

SEQ ID NO: 5529178 - DNA, 25 bp, Homo sapien
ataaacctgctgcggcagactcctc

SEQ ID NO: 5529179 - DNA, 25 bp, Homo sapien
ggtgtagttacgaagcctttcaggc

SEQ ID NO: 5529180 - DNA, 25 bp, Homo sapien
accacaggggaacgatgttcttttc

SEQ ID NO: 5529181 - DNA, 25 bp, Homo sapien
gtcctagaaagttgctggctgactc

SEQ ID NO: 5529182 - DNA, 25 bp, Homo sapien
gacagactttgctgaccacagggga

SEQ ID NO: 5529183 - DNA, 25 bp, Homo sapien
aattaatgatggatggaccctggag

SEQ ID NO: 5529184 - DNA, 25 bp, Homo sapien
ggagggaatctccccagccgacttc

SEQ ID NO: 5529185 - DNA, 25 bp, Homo sapien
cagactcctcagccgatggtggctc

SEQ ID NO: 5529186 - DNA, 25 bp, Homo sapien
ttgaggccttaaaacctgaggctcc

SEQ ID NO: 5529187 - DNA, 25 bp, Homo sapien
tgaaaagaaatgtggcccctttcca

SEQ ID NO: 5529188 - DNA, 25 bp, Homo sapien
gccgacttccactgggctgacagac

SEQ ID NO: 5529189 - DNA, 25 bp, Homo sapien
aacggctacaatctccggaggcacg

SEQ ID NO: 5529190 - DNA, 25 bp, Homo sapien
atctgcgctctgtgcgccaaggagt

SEQ ID NO: 5529191 - DNA, 25 bp, Homo sapien
gggccctacatctgcgctctgtgcg

SEQ ID NO: 5529192 - DNA, 25 bp, Homo sapien
gccgcctctacggtggacacagcgg

SEQ ID NO: 5529193 - DNA, 25 bp, Homo sapien
cggctacaatctccggaggcacgaa

SEQ ID NO: 5529194 - DNA, 25 bp, Homo sapien
cgtcgtagccccaacctcgacggtc

SEQ ID NO: 5529195 - DNA, 25 bp, Homo sapien
aagaacggctacaatctccggaggc

SEQ ID NO: 5529196 - DNA, 25 bp, Homo sapien
aggagttcaagaacggctacaatct

SEQ ID NO: 5529197 - DNA, 25 bp, Homo sapien
tcaagaacggctacaatctccggag

SEQ ID NO: 5529198 - DNA, 25 bp, Homo sapien
acatctgcgctctgtgcgccaagga

SEQ ID NO: 5529199 - DNA, 25 bp, Homo sapien
gagttcaagaacggctacaatctcc

SEQ ID NO: 5529200 - DNA, 25 bp, Homo sapien
agacgatcagggtacttctgtgcaa

SEQ ID NO: 5529201 - DNA, 25 bp, Homo sapien
cagccatggattgcaaagatagacc

SEQ ID NO: 5529202 - DNA, 25 bp, Homo sapien
ctttggacaccttggaaaacaactg

SEQ ID NO: 5529203 - DNA, 25 bp, Homo sapien
gcagccagacagtcttgtggaccac

SEQ ID NO: 5529204 - DNA, 25 bp, Homo sapien
gaagttaatacaagcccgtctgccg

SEQ ID NO: 5529205 - DNA, 25 bp, Homo sapien
aaaccagtattggccagagcacagt

SEQ ID NO: 5529206 - DNA, 25 bp, Homo sapien
ggaaagccgatgacatgtcagacga

SEQ ID NO: 5529207 - DNA, 25 bp, Homo sapien
tctgtgcaaagtaaaagccccgatt

SEQ ID NO: 5529208 - DNA, 25 bp, Homo sapien
cgtctgccgtttaagcgcctgaatc

SEQ ID NO: 5529209 - DNA, 25 bp, Homo sapien
gatttgacagaggactcgaatgagc

SEQ ID NO: 5529210 - DNA, 25 bp, Homo sapien
ttaagaaatagaatcgaaaccagta

SEQ ID NO: 5529211 - DNA, 25 bp, Homo sapien
agtccatttggctgagttctttccc

SEQ ID NO: 5529212 - DNA, 25 bp, Homo sapien
gcatgggaaggtaattggatttcca

SEQ ID NO: 5529213 - DNA, 25 bp, Homo sapien
tcagagcctgatgctaacaaaaaat

SEQ ID NO: 5529214 - DNA, 25 bp, Homo sapien
tccacacaactacatcaagcgcttc

SEQ ID NO: 5529215 - DNA, 25 bp, Homo sapien
aggaagctttgtctgtgttgggaac

SEQ ID NO: 5529216 - DNA, 25 bp, Homo sapien
gggtcaaaggccctagctgatccac

SEQ ID NO: 5529217 - DNA, 25 bp, Homo sapien
gaacagtgagaacctcagtgccaga

SEQ ID NO: 5529218 - DNA, 25 bp, Homo sapien
acacaaaaatgtcagagtctcgcat

SEQ ID NO: 5529219 - DNA, 25 bp, Homo sapien
cctggataaaatgccgtggtaatgc

SEQ ID NO: 5529220 - DNA, 25 bp, Homo sapien
agtaaagacgacactaagctctggt

SEQ ID NO: 5529221 - DNA, 25 bp, Homo sapien
tggtgtaagtccagaagatgttttc

SEQ ID NO: 5529222 - DNA, 25 bp, Homo sapien
ggttgaggttaggcctaggcattac

SEQ ID NO: 5529223 - DNA, 25 bp, Homo sapien
tccatagcaggtaaagcatagaaaa

SEQ ID NO: 5529224 - DNA, 25 bp, Homo sapien
agagtaaagcagaatgtgtcaaatt

SEQ ID NO: 5529225 - DNA, 25 bp, Homo sapien
tcaaaagaagaatcataggtaccaa

SEQ ID NO: 5529226 - DNA, 25 bp, Homo sapien
acagccatggctattgaactacaga

SEQ ID NO: 5529227 - DNA, 25 bp, Homo sapien
tttgggtctctgactgtgaacaaga

SEQ ID NO: 5529228 - DNA, 25 bp, Homo sapien
tgctaattagttagtggggaagtga

SEQ ID NO: 5529229 - DNA, 25 bp, Homo sapien
ggaagtgaagctcatgtttaggcct

SEQ ID NO: 5529230 - DNA, 25 bp, Homo sapien
gtaagttgagatcatgaaacataca

SEQ ID NO: 5529231 - DNA, 25 bp, Homo sapien
ctaggcattacggttaagaaataac

SEQ ID NO: 5529232 - DNA, 25 bp, Homo sapien
actgtgaacaagattgtggaaggtt

SEQ ID NO: 5529233 - DNA, 25 bp, Homo sapien
cattttgagacatcaggtaaacctg

SEQ ID NO: 5529234 - DNA, 25 bp, Homo sapien
taaagtaaggactaaattgtctctc

SEQ ID NO: 5529235 - DNA, 25 bp, Homo sapien
ttaggagtacaacgtaatgaaaata

SEQ ID NO: 5529236 - DNA, 25 bp, Homo sapien
cttaatacaaatggcacatcagcct

SEQ ID NO: 5529237 - DNA, 25 bp, Homo sapien
ttaggcttggggaattcatgtcttt

SEQ ID NO: 5529238 - DNA, 25 bp, Homo sapien
atgtctgttaaaactgttaggtcac

SEQ ID NO: 5529239 - DNA, 25 bp, Homo sapien
ggataagctggattatgtgggatat

SEQ ID NO: 5529240 - DNA, 25 bp, Homo sapien
taggtcacaaagtatgcaaagaaac

SEQ ID NO: 5529241 - DNA, 25 bp, Homo sapien
agaaacagaacaggcaagttgcttt

SEQ ID NO: 5529242 - DNA, 25 bp, Homo sapien
ggggtcagcagaaagcttttctact

SEQ ID NO: 5529243 - DNA, 25 bp, Homo sapien
acatatacagaaaagggataagctg

SEQ ID NO: 5529244 - DNA, 25 bp, Homo sapien
gacactaccaagcaggtcagtcgac

SEQ ID NO: 5529245 - DNA, 25 bp, Homo sapien
agtttctggaccaccgacaaatatc

SEQ ID NO: 5529246 - DNA, 25 bp, Homo sapien
ccagggtcaaactggtcaatgggaa

SEQ ID NO: 5529247 - DNA, 25 bp, Homo sapien
tcctactcggttcggttcagcgctg

SEQ ID NO: 5529248 - DNA, 25 bp, Homo sapien
aagctcccagagtttctggaccacc

SEQ ID NO: 5529249 - DNA, 25 bp, Homo sapien
caaaaaacagaaatacactcagtag

SEQ ID NO: 5529250 - DNA, 25 bp, Homo sapien
agcaaggaattaaacaaaaaacaga

SEQ ID NO: 5529251 - DNA, 25 bp, Homo sapien
gtcagtcgacaaaagcaaggaatta

SEQ ID NO: 5529252 - DNA, 25 bp, Homo sapien
ttactgttatcgctcctgggtcctt

SEQ ID NO: 5529253 - DNA, 25 bp, Homo sapien
cccacagttcacctcagacactacc

SEQ ID NO: 5529254 - DNA, 25 bp, Homo sapien
tggctgtgcgcaacccccacagttc

SEQ ID NO: 5529255 - DNA, 25 bp, Homo sapien
tcacataggaatagccttcaggagg

SEQ ID NO: 5529256 - DNA, 25 bp, Homo sapien
tttaaggagactggaattgaacaaa

SEQ ID NO: 5529257 - DNA, 25 bp, Homo sapien
caggctgctgaagtctgttgcttca

SEQ ID NO: 5529258 - DNA, 25 bp, Homo sapien
gacaacatgagcgagctccctggca

SEQ ID NO: 5529259 - DNA, 25 bp, Homo sapien
tcgctgatttggaaatagtgaaagg

SEQ ID NO: 5529260 - DNA, 25 bp, Homo sapien
aatgccctctgtaccctgctgggtt

SEQ ID NO: 5529261 - DNA, 25 bp, Homo sapien
ctaactgctcccacaaatgccctct

SEQ ID NO: 5529262 - DNA, 25 bp, Homo sapien
gacgtcctggtttcctaactgctcc

SEQ ID NO: 5529263 - DNA, 25 bp, Homo sapien
attagaatatgaggtaattgctctt

SEQ ID NO: 5529264 - DNA, 25 bp, Homo sapien
atagtgaaaggccacccgtaaacaa

SEQ ID NO: 5529265 - DNA, 25 bp, Homo sapien
aagagattatacataagtagctgct

SEQ ID NO: 5529266 - DNA, 25 bp, Homo sapien
gacaaactgggcaaagtagaatctt

SEQ ID NO: 5529267 - DNA, 25 bp, Homo sapien
gaggcagccctaggcagtcatgttt

SEQ ID NO: 5529268 - DNA, 25 bp, Homo sapien
ttttgttccacctgaccctgggcgc

SEQ ID NO: 5529269 - DNA, 25 bp, Homo sapien
tcacttaagagctggctgtctgagc

SEQ ID NO: 5529270 - DNA, 25 bp, Homo sapien
agggagagacagctcatccatactc

SEQ ID NO: 5529271 - DNA, 25 bp, Homo sapien
ccatactctggcccagcagaaactc

SEQ ID NO: 5529272 - DNA, 25 bp, Homo sapien
ttctctggcaggcttcatcggaatc

SEQ ID NO: 5529273 - DNA, 25 bp, Homo sapien
tgctcaattgaggacaaactgggca

SEQ ID NO: 5529274 - DNA, 25 bp, Homo sapien
tctgggcttagacaaaactgctcaa

SEQ ID NO: 5529275 - DNA, 25 bp, Homo sapien
ggaataataagaatagtagctgggc

SEQ ID NO: 5529276 - DNA, 25 bp, Homo sapien
gggtggcatttgggaataataagaa

SEQ ID NO: 5529277 - DNA, 25 bp, Homo sapien
ggctcccctagctggtgtgggttga

SEQ ID NO: 5529278 - DNA, 25 bp, Homo sapien
cataacactgtgtgggcgtcaaagg

SEQ ID NO: 5529279 - DNA, 25 bp, Homo sapien
gagaaggagaatcagcaaatacctt

SEQ ID NO: 5529280 - DNA, 25 bp, Homo sapien
gtgggcctgacaaacagcatggcca

SEQ ID NO: 5529281 - DNA, 25 bp, Homo sapien
cgccacgtggcattgtcctaaccgc

SEQ ID NO: 5529282 - DNA, 25 bp, Homo sapien
gttgagagacacgtcacatggagaa

SEQ ID NO: 5529283 - DNA, 25 bp, Homo sapien
agtgagctcctgaaaagcgcttgct

SEQ ID NO: 5529284 - DNA, 25 bp, Homo sapien
accgcatccctggcggaagaagtgt

SEQ ID NO: 5529285 - DNA, 25 bp, Homo sapien
gaagaagtgtttgcccggtgttgca

SEQ ID NO: 5529286 - DNA, 25 bp, Homo sapien
aacagcatactgtgacgccacgtgg

SEQ ID NO: 5529287 - DNA, 25 bp, Homo sapien
gggtggacatacttggccttgcttt

SEQ ID NO: 5529288 - DNA, 25 bp, Homo sapien
atactatgtacagggcaacaacggt

SEQ ID NO: 5529289 - DNA, 25 bp, Homo sapien
tgcaccacataaaaagaaggcattt

SEQ ID NO: 5529290 - DNA, 25 bp, Homo sapien
gttggtgttcattacaggactaatc

SEQ ID NO: 5529291 - DNA, 25 bp, Homo sapien
attctaagggatagtatagacacta

SEQ ID NO: 5529292 - DNA, 25 bp, Homo sapien
tgggtccatcagaatgtcaagacac

SEQ ID NO: 5529293 - DNA, 25 bp, Homo sapien
tgtacaaatattccgtagtcacgtc

SEQ ID NO: 5529294 - DNA, 25 bp, Homo sapien
gactaaaccacaagtcgaggtgcag

SEQ ID NO: 5529295 - DNA, 25 bp, Homo sapien
ggcaacaacggtcactggcatagtg

SEQ ID NO: 5529296 - DNA, 25 bp, Homo sapien
caattgttgctggtacacaggtgtc

SEQ ID NO: 5529297 - DNA, 25 bp, Homo sapien
gcacaaaagattatgtgactgcatc

SEQ ID NO: 5529298 - DNA, 25 bp, Homo sapien
ctggcatagtgctagttacatgact

SEQ ID NO: 5529299 - DNA, 25 bp, Homo sapien
tagctccataatcagaaatgcgcac

SEQ ID NO: 5529300 - DNA, 25 bp, Homo sapien
gttgtatctacaagtgcaaaactgc

SEQ ID NO: 5529301 - DNA, 25 bp, Homo sapien
gcctgcacttggcgatcccaggagc

SEQ ID NO: 5529302 - DNA, 25 bp, Homo sapien
gcaaaactgcaacacccaaatgttt

SEQ ID NO: 5529303 - DNA, 25 bp, Homo sapien
aacccttgagccagttattccacgc

SEQ ID NO: 5529304 - DNA, 25 bp, Homo sapien
gatgcgatgccgtgcctgcacttgg

SEQ ID NO: 5529305 - DNA, 25 bp, Homo sapien
gttctgataataaaggcacattttc

SEQ ID NO: 5529306 - DNA, 25 bp, Homo sapien
ttccacgctggtaagaccctttcac

SEQ ID NO: 5529307 - DNA, 25 bp, Homo sapien
aaattgggtgtgtcatcttcccctc

SEQ ID NO: 5529308 - DNA, 25 bp, Homo sapien
gaaatgcgcacaccactgttctgat

SEQ ID NO: 5529309 - DNA, 25 bp, Homo sapien
taacaagaagtgcagcattacctaa

SEQ ID NO: 5529310 - DNA, 25 bp, Homo sapien
gcggcatcttgcaccgggacctcaa

SEQ ID NO: 5529311 - DNA, 25 bp, Homo sapien
gcacaccctgttggagccagaagtg

SEQ ID NO: 5529312 - DNA, 25 bp, Homo sapien
atcactgagaacatggaactgaagg

SEQ ID NO: 5529313 - DNA, 25 bp, Homo sapien
gtgcgctactacctgcggcagatcc

SEQ ID NO: 5529314 - DNA, 25 bp, Homo sapien
tccctggcccacatctggaaggccc

SEQ ID NO: 5529315 - DNA, 25 bp, Homo sapien
ctgtcaaagtcatcccgcagagccg

SEQ ID NO: 5529316 - DNA, 25 bp, Homo sapien
ttttcgcaccactttgaggacgctg

SEQ ID NO: 5529317 - DNA, 25 bp, Homo sapien
ctgcagcaccgccacatcgtgcgtt

SEQ ID NO: 5529318 - DNA, 25 bp, Homo sapien
tgaggacgctgacaacatctacatt

SEQ ID NO: 5529319 - DNA, 25 bp, Homo sapien
agaccatctgtggcacccccaacta

SEQ ID NO: 5529320 - DNA, 25 bp, Homo sapien
gcgcgagaagatcctaaatgagatt

SEQ ID NO: 5529321 - DNA, 25 bp, Homo sapien
tttatatggattactgttgtgctgc

SEQ ID NO: 5529322 - DNA, 25 bp, Homo sapien
ggattactgttgtgctgctaaaaac

SEQ ID NO: 5529323 - DNA, 25 bp, Homo sapien
taaaagttatggagacatgggaaaa

SEQ ID NO: 5529324 - DNA, 25 bp, Homo sapien
aaatgttagtaaaagttatggagac

SEQ ID NO: 5529325 - DNA, 25 bp, Homo sapien
gggaatataggccaataccaccaat

SEQ ID NO: 5529326 - DNA, 25 bp, Homo sapien
tcctttcataagcaaactgtatttg

SEQ ID NO: 5529327 - DNA, 25 bp, Homo sapien
ttgtctcattctacatggcagatca

SEQ ID NO: 5529328 - DNA, 25 bp, Homo sapien
atggcagatcaaaaattaatacttc

SEQ ID NO: 5529329 - DNA, 25 bp, Homo sapien
gtcaatgggaatataggccaatacc

SEQ ID NO: 5529330 - DNA, 25 bp, Homo sapien
gtagaccaatttaaaagtatgccac

SEQ ID NO: 5529331 - DNA, 25 bp, Homo sapien
gcatttgtcaatgggaatataggcc

SEQ ID NO: 5529332 - DNA, 25 bp, Homo sapien
gctgtgttcccacgcggcacgtgag

SEQ ID NO: 5529333 - DNA, 25 bp, Homo sapien
caatcgtacgccgtccctgcggcac

SEQ ID NO: 5529334 - DNA, 25 bp, Homo sapien
ccgcagtgcacacctagaatgctgt

SEQ ID NO: 5529335 - DNA, 25 bp, Homo sapien
gctgccagtgtttggacagaaccca

SEQ ID NO: 5529336 - DNA, 25 bp, Homo sapien
cccagagcccgtttgtggctgagtg

SEQ ID NO: 5529337 - DNA, 25 bp, Homo sapien
ttacaccgataacacacaggctgct

SEQ ID NO: 5529338 - DNA, 25 bp, Homo sapien
gcaagatgcaaactaatgagatgta

SEQ ID NO: 5529339 - DNA, 25 bp, Homo sapien
agtgacaacttgttccccgcagtgc

SEQ ID NO: 5529340 - DNA, 25 bp, Homo sapien
taactgtcaggacagtgcgacggta

SEQ ID NO: 5529341 - DNA, 25 bp, Homo sapien
gaaagaactatgcgtcaaccaatcg

SEQ ID NO: 5529342 - DNA, 25 bp, Homo sapien
ggcacgtgagatgcattgccgcttc

SEQ ID NO: 5529343 - DNA, 25 bp, Homo sapien
gacattcggtgcccctgacccgagg

SEQ ID NO: 5529344 - DNA, 25 bp, Homo sapien
cctcgggtcaggggcaccgaatgtc

SEQ ID NO: 5529345 - DNA, 25 bp, Homo sapien
cttcctcctggaccgtgagaagtcg

SEQ ID NO: 5529346 - DNA, 25 bp, Homo sapien
gcaggggccaaatagcaataaatgg

SEQ ID NO: 5529347 - DNA, 25 bp, Homo sapien
ctcctctgccactctgcgggtgggc

SEQ ID NO: 5529348 - DNA, 25 bp, Homo sapien
ctcttcttctaccagaaggccagga

SEQ ID NO: 5529349 - DNA, 25 bp, Homo sapien
tggcccccagccaccctcgctgagg

SEQ ID NO: 5529350 - DNA, 25 bp, Homo sapien
caacctgcctcctctgccactctgc

SEQ ID NO: 5529351 - DNA, 25 bp, Homo sapien
gcggctggccaccatctaccacaac

SEQ ID NO: 5529352 - DNA, 25 bp, Homo sapien
accctcgctgaggacagcatccaag

SEQ ID NO: 5529353 - DNA, 25 bp, Homo sapien
ggaccgtgagaagtcgctcttcttc

SEQ ID NO: 5529354 - DNA, 25 bp, Homo sapien
aggaccttcgccacagagctcaacg

SEQ ID NO: 5529355 - DNA, 25 bp, Homo sapien
cattttctggcaaatggaggcacga

SEQ ID NO: 5529356 - DNA, 25 bp, Homo sapien
gggaggcagcggccgacggcccggt

SEQ ID NO: 5529357 - DNA, 25 bp, Homo sapien
accgggccgtcggccgctgcctccc

SEQ ID NO: 5529358 - DNA, 25 bp, Homo sapien
actgctgcctcacgtccgcgctttc

SEQ ID NO: 5529359 - DNA, 25 bp, Homo sapien
gcgaggacttcgtgctgaccatcac

SEQ ID NO: 5529360 - DNA, 25 bp, Homo sapien
gctgcgtgctctccaaccccgacca

SEQ ID NO: 5529361 - DNA, 25 bp, Homo sapien
atggtgattttgtttaaggggatcc

SEQ ID NO: 5529362 - DNA, 25 bp, Homo sapien
tgcctcacccaggatgagttccacc

SEQ ID NO: 5529363 - DNA, 25 bp, Homo sapien
cacctggttcaacctgcaggcgcgg

SEQ ID NO: 5529364 - DNA, 25 bp, Homo sapien
cgcggaagcgcaagtacttcaagaa

SEQ ID NO: 5529365 - DNA, 25 bp, Homo sapien
cggctggacctggtcatggtgattt

SEQ ID NO: 5529366 - DNA, 25 bp, Homo sapien
ggcgcccagctatgtactccccgta

SEQ ID NO: 5529367 - DNA, 25 bp, Homo sapien
ccacccgttcatcgaggcactgctg

SEQ ID NO: 5529368 - DNA, 25 bp, Homo sapien
actgcctgcgccaggctgacaaggt

SEQ ID NO: 5529369 - DNA, 25 bp, Homo sapien
tatagacgcccattgccctgctgct

SEQ ID NO: 5529370 - DNA, 25 bp, Homo sapien
ctgtgaaaattcaacaagaactcct

SEQ ID NO: 5529371 - DNA, 25 bp, Homo sapien
aaaacagatgcagggcctctaaata

SEQ ID NO: 5529372 - DNA, 25 bp, Homo sapien
gcagagccacctcctatagacgccc

SEQ ID NO: 5529373 - DNA, 25 bp, Homo sapien
tccttggaaactggtattgatattc

SEQ ID NO: 5529374 - DNA, 25 bp, Homo sapien
agcttgcacaagggagctcacttaa

SEQ ID NO: 5529375 - DNA, 25 bp, Homo sapien
tttagtatgctgtatcgtgggctgg

SEQ ID NO: 5529376 - DNA, 25 bp, Homo sapien
aaaagagtactgtattgatttgccc

SEQ ID NO: 5529377 - DNA, 25 bp, Homo sapien
gattttgagggttccagtatttctg

SEQ ID NO: 5529378 - DNA, 25 bp, Homo sapien
agggagctcacttaaaaggagaaat

SEQ ID NO: 5529379 - DNA, 25 bp, Homo sapien
cctgactttggaccaaccccagaac

SEQ ID NO: 5529380 - DNA, 25 bp, Homo sapien
gcggcttctgcgtcgtcactgcttc

SEQ ID NO: 5529381 - DNA, 25 bp, Homo sapien
caaccccacctgaccaagcccggga

SEQ ID NO: 5529382 - DNA, 25 bp, Homo sapien
ccgcgtggagactgatctgttccat

SEQ ID NO: 5529383 - DNA, 25 bp, Homo sapien
accaccaggccctagtctcggtcag

SEQ ID NO: 5529384 - DNA, 25 bp, Homo sapien
tcgtcactgcttcccggcgccattc

SEQ ID NO: 5529385 - DNA, 25 bp, Homo sapien
tctcgacctcgcagagctcctgaca

SEQ ID NO: 5529386 - DNA, 25 bp, Homo sapien
ccaggcaagagaactttgtacccct

SEQ ID NO: 5529387 - DNA, 25 bp, Homo sapien
ttccatccgttagcgcgaggtagca

SEQ ID NO: 5529388 - DNA, 25 bp, Homo sapien
gccattccgaggccgggccttcttc

SEQ ID NO: 5529389 - DNA, 25 bp, Homo sapien
tgtgtggatagactccccagcgttt

SEQ ID NO: 5529390 - DNA, 25 bp, Homo sapien
tcttctgacacgggctccaacccca

SEQ ID NO: 5529391 - DNA, 25 bp, Homo sapien
tattggtgcacagcattgagacacg

SEQ ID NO: 5529392 - DNA, 25 bp, Homo sapien
ggcacagggatcaataaaagactgc

SEQ ID NO: 5529393 - DNA, 25 bp, Homo sapien
ggaggagacatcttgcaccacaagg

SEQ ID NO: 5529394 - DNA, 25 bp, Homo sapien
ggaaatgttctgtgtgacttctggg

SEQ ID NO: 5529395 - DNA, 25 bp, Homo sapien
gagacacggtattcaaatgctggtt

SEQ ID NO: 5529396 - DNA, 25 bp, Homo sapien
taaatgtggccatatgaccaagttc

SEQ ID NO: 5529397 - DNA, 25 bp, Homo sapien
tgtaatgcctagagcttggaggaga

SEQ ID NO: 5529398 - DNA, 25 bp, Homo sapien
tattttcctgggcacagggatcaat

SEQ ID NO: 5529399 - DNA, 25 bp, Homo sapien
atccaacaagtaatcagaatggtaa

SEQ ID NO: 5529400 - DNA, 25 bp, Homo sapien
ataagggacattcactcaaagacat

SEQ ID NO: 5529401 - DNA, 25 bp, Homo sapien
tctgacagcaggatagcagatgtaa

SEQ ID NO: 5529402 - DNA, 25 bp, Homo sapien
taggtatgtaaactagtagacttcc

SEQ ID NO: 5529403 - DNA, 25 bp, Homo sapien
gctttggtccctgaaatgcaggccc

SEQ ID NO: 5529404 - DNA, 25 bp, Homo sapien
gagttatgtgcgtcttcatggaagg

SEQ ID NO: 5529405 - DNA, 25 bp, Homo sapien
tgttgtccctaatggaaagaccaag

SEQ ID NO: 5529406 - DNA, 25 bp, Homo sapien
tgtcctctgaagtaggtatgtaaac

SEQ ID NO: 5529407 - DNA, 25 bp, Homo sapien
caaaaggtctgatgtattttaggcc

SEQ ID NO: 5529408 - DNA, 25 bp, Homo sapien
attctttgccagaaccgggttggga

SEQ ID NO: 5529409 - DNA, 25 bp, Homo sapien
ggccaggcctaatttgctttggtcc

SEQ ID NO: 5529410 - DNA, 25 bp, Homo sapien
aatgcaggcccatggtcatttccat

SEQ ID NO: 5529411 - DNA, 25 bp, Homo sapien
gaaagaccaagtaagagagttatgt

SEQ ID NO: 5529412 - DNA, 25 bp, Homo sapien
tgtaaaacaagacttatgttgtccc

SEQ ID NO: 5529413 - DNA, 25 bp, Homo sapien
ggcggggcacggccagtcgggcttc

SEQ ID NO: 5529414 - DNA, 25 bp, Homo sapien
gaagcccgactggccgtgccccgcc

SEQ ID NO: 5529415 - DNA, 25 bp, Homo sapien
cctcagttaaacagttgggtgctat

SEQ ID NO: 5529416 - DNA, 25 bp, Homo sapien
gatacaactccacatgaaacttgaa

SEQ ID NO: 5529417 - DNA, 25 bp, Homo sapien
tatgttgaaccccaatgcattgaaa

SEQ ID NO: 5529418 - DNA, 25 bp, Homo sapien
gttgggtgctattactaagtctgtc

SEQ ID NO: 5529419 - DNA, 25 bp, Homo sapien
atttgtgccttttatgttgaacccc

SEQ ID NO: 5529420 - DNA, 25 bp, Homo sapien
ttatttatattacaggtgggagaaa

SEQ ID NO: 5529421 - DNA, 25 bp, Homo sapien
accaaacagtgagatacaactccac

SEQ ID NO: 5529422 - DNA, 25 bp, Homo sapien
aaattcagtatgaaacagtacatat

SEQ ID NO: 5529423 - DNA, 25 bp, Homo sapien
aagtaaccaaacagtgagatacaac

SEQ ID NO: 5529424 - DNA, 25 bp, Homo sapien
tttacaatgtggatctacctcagtt

SEQ ID NO: 5529425 - DNA, 25 bp, Homo sapien
tggaggggacccagctttctttaca

SEQ ID NO: 5529426 - DNA, 25 bp, Homo sapien
taaaaattagatatcttccgtctta

SEQ ID NO: 5529427 - DNA, 25 bp, Homo sapien
taagacggaagatatctaattttta

SEQ ID NO: 5529428 - DNA, 25 bp, Homo sapien
agtatcactgtggaaacagagtaat

SEQ ID NO: 5529429 - DNA, 25 bp, Homo sapien
gggtgacaggatcattcgcatccca

SEQ ID NO: 5529430 - DNA, 25 bp, Homo sapien
cctaaaacctagacacagtatcact

SEQ ID NO: 5529431 - DNA, 25 bp, Homo sapien
aagtaacatcaatgaactgtcctcc

SEQ ID NO: 5529432 - DNA, 25 bp, Homo sapien
aaggcacacctgtggaacctctttc

SEQ ID NO: 5529433 - DNA, 25 bp, Homo sapien
ggacagaatcaaggcacacctgtgg

SEQ ID NO: 5529434 - DNA, 25 bp, Homo sapien
gtgcctggcatgagactacagtttc

SEQ ID NO: 5529435 - DNA, 25 bp, Homo sapien
atggggacgctgtgtctcctctctt

SEQ ID NO: 5529436 - DNA, 25 bp, Homo sapien
tgctgtatggaatttgaagcctcaa

SEQ ID NO: 5529437 - DNA, 25 bp, Homo sapien
atcgattgaggattaggttagaagc

SEQ ID NO: 5529438 - DNA, 25 bp, Homo sapien
tcactgggtgctatactcactacct

SEQ ID NO: 5529439 - DNA, 25 bp, Homo sapien
taccagcgtgaacaaccagcatttt

SEQ ID NO: 5529440 - DNA, 25 bp, Homo sapien
ttgtgcctttggaaacggagttcag

SEQ ID NO: 5529441 - DNA, 25 bp, Homo sapien
gattttcaggataaagaagcaaaac

SEQ ID NO: 5529442 - DNA, 25 bp, Homo sapien
atttcaggaggctatgtcattaacc

SEQ ID NO: 5529443 - DNA, 25 bp, Homo sapien
gtagcagagattgcgtgagctacac

SEQ ID NO: 5529444 - DNA, 25 bp, Homo sapien
ctttactaggtctgactggatgctg

SEQ ID NO: 5529445 - DNA, 25 bp, Homo sapien
aagcaccatgctcacagtccggact

SEQ ID NO: 5529446 - DNA, 25 bp, Homo sapien
gcagacatggaatgatggaattaca

SEQ ID NO: 5529447 - DNA, 25 bp, Homo sapien
tggcagcacatatacatgaagcacc

SEQ ID NO: 5529448 - DNA, 25 bp, Homo sapien
aagacatccagaatttcaggaggct

SEQ ID NO: 5529449 - DNA, 25 bp, Homo sapien
catcaaggcttatgggtagcagaga

SEQ ID NO: 5529450 - DNA, 25 bp, Homo sapien
gagcaccaaccatcgagcaaatgaa

SEQ ID NO: 5529451 - DNA, 25 bp, Homo sapien
ctacggcatggtgtgctctgcttat

SEQ ID NO: 5529452 - DNA, 25 bp, Homo sapien
atcagcccctttgagcaccagacct

SEQ ID NO: 5529453 - DNA, 25 bp, Homo sapien
ggccgcgctacaccaacctctcgta

SEQ ID NO: 5529454 - DNA, 25 bp, Homo sapien
gtcaacaaagttcgagtagctatca

SEQ ID NO: 5529455 - DNA, 25 bp, Homo sapien
actgcgcttcagacatgagaacatc

SEQ ID NO: 5529456 - DNA, 25 bp, Homo sapien
aacctctcgtacatcggcgagggcg

SEQ ID NO: 5529457 - DNA, 25 bp, Homo sapien
gaagacacaacacctcagcaatgac

SEQ ID NO: 5529458 - DNA, 25 bp, Homo sapien
gtacaggacctcatggaaacagatc

SEQ ID NO: 5529459 - DNA, 25 bp, Homo sapien
gagaaccctgagggagataaaaatc

SEQ ID NO: 5529460 - DNA, 25 bp, Homo sapien
gcaccagacctactgccagagaacc

SEQ ID NO: 5529461 - DNA, 25 bp, Homo sapien
cgtccgagcccgcgggcggacgtct

SEQ ID NO: 5529462 - DNA, 25 bp, Homo sapien
agacgtccgcccgcgggctcggacg

SEQ ID NO: 5529463 - DNA, 25 bp, Homo sapien
gcgtccgagcccgcgggcggacgtc

SEQ ID NO: 5529464 - DNA, 25 bp, Homo sapien
gacgtccgcccgcgggctcggacgc

SEQ ID NO: 5529465 - DNA, 25 bp, Homo sapien
ggcgtccgagcccgcgggcggacgt

SEQ ID NO: 5529466 - DNA, 25 bp, Homo sapien
acgtccgcccgcgggctcggacgcc

SEQ ID NO: 5529467 - DNA, 25 bp, Homo sapien
gtccgagcccgcgggcggacgtctg

SEQ ID NO: 5529468 - DNA, 25 bp, Homo sapien
cagacgtccgcccgcgggctcggac

SEQ ID NO: 5529469 - DNA, 25 bp, Homo sapien
gtttactgactgacgaaatcattgt

SEQ ID NO: 5529470 - DNA, 25 bp, Homo sapien
acaatgatttcgtcagtcagtaaac

SEQ ID NO: 5529471 - DNA, 25 bp, Homo sapien
aattcagtgataggtctcaagggga

SEQ ID NO: 5529472 - DNA, 25 bp, Homo sapien
tgcggaaggagacatcaataaatat

SEQ ID NO: 5529473 - DNA, 25 bp, Homo sapien
gtctgagtttacagtcaaggggtta

SEQ ID NO: 5529474 - DNA, 25 bp, Homo sapien
acgtgaaacattggaggagtcacag

SEQ ID NO: 5529475 - DNA, 25 bp, Homo sapien
ggagatgggatgccacattcctgag

SEQ ID NO: 5529476 - DNA, 25 bp, Homo sapien
gttgtgaattcagtgataggtctca

SEQ ID NO: 5529477 - DNA, 25 bp, Homo sapien
tgcagtgtcagtgagaatatgtgac

SEQ ID NO: 5529478 - DNA, 25 bp, Homo sapien
aaatacacgtgaaacattggaggag

SEQ ID NO: 5529479 - DNA, 25 bp, Homo sapien
aggagtcacagactgcagtgtcagt

SEQ ID NO: 5529480 - DNA, 25 bp, Homo sapien
aacctttacagcgcccaagggactc

SEQ ID NO: 5529481 - DNA, 25 bp, Homo sapien
acaaagaaatgaatctgcggaagga

SEQ ID NO: 5529482 - DNA, 25 bp, Homo sapien
aaatacaaggtatgaaaattagatt

SEQ ID NO: 5529483 - DNA, 25 bp, Homo sapien
tgaaccaaagcaatattaccaaatg

SEQ ID NO: 5529484 - DNA, 25 bp, Homo sapien
tttagagttatcacatcaagcaagt

SEQ ID NO: 5529485 - DNA, 25 bp, Homo sapien
atttaaaagtggcctcaagtgagta

SEQ ID NO: 5529486 - DNA, 25 bp, Homo sapien
agcttctaaagtagcaaacacaact

SEQ ID NO: 5529487 - DNA, 25 bp, Homo sapien
gcactgaagtataatccgaagagca

SEQ ID NO: 5529488 - DNA, 25 bp, Homo sapien
ataatccgaagagcaagatttagtc

SEQ ID NO: 5529489 - DNA, 25 bp, Homo sapien
tgtgtatcaaaatagccatgtgcgc

SEQ ID NO: 5529490 - DNA, 25 bp, Homo sapien
tcaagcaagtgtaaaatataatagc

SEQ ID NO: 5529491 - DNA, 25 bp, Homo sapien
gaactaaaagaaatgagaaatatac

SEQ ID NO: 5529492 - DNA, 25 bp, Homo sapien
tttagtccagaatatggaaggttct

SEQ ID NO: 5529493 - DNA, 25 bp, Homo sapien
atgaagtgaaaaaaatgggatttaa

SEQ ID NO: 5529494 - DNA, 25 bp, Homo sapien
gttgtgatactaatttgcaaaatgt

SEQ ID NO: 5529495 - DNA, 25 bp, Homo sapien
acatgactgatttcgctgatactac

SEQ ID NO: 5529496 - DNA, 25 bp, Homo sapien
atatgaagtgaaaaaaatgggattt

SEQ ID NO: 5529497 - DNA, 25 bp, Homo sapien
tacaaatataagatactactaaata

SEQ ID NO: 5529498 - DNA, 25 bp, Homo sapien
tattcaaggtataaacatgactgat

SEQ ID NO: 5529499 - DNA, 25 bp, Homo sapien
aacatctacttagcagttgtgatac

SEQ ID NO: 5529500 - DNA, 25 bp, Homo sapien
aaggtataaacatgactgatttcgc

SEQ ID NO: 5529501 - DNA, 25 bp, Homo sapien
taatactcagaaacatctacttagc

SEQ ID NO: 5529502 - DNA, 25 bp, Homo sapien
tttaagtagtgagataatttctatt

SEQ ID NO: 5529503 - DNA, 25 bp, Homo sapien
atcctgcaggtaataacactgattt

SEQ ID NO: 5529504 - DNA, 25 bp, Homo sapien
ttgagaaaaattatgagaatgttag

SEQ ID NO: 5529505 - DNA, 25 bp, Homo sapien
tggagactgtgtacgcagcctcaca

SEQ ID NO: 5529506 - DNA, 25 bp, Homo sapien
acgaagttcagatttcagaggtgga

SEQ ID NO: 5529507 - DNA, 25 bp, Homo sapien
ggctctgaagacaaagcttagattc

SEQ ID NO: 5529508 - DNA, 25 bp, Homo sapien
cacacagtaagtgttcaggaagtgc

SEQ ID NO: 5529509 - DNA, 25 bp, Homo sapien
gatgccgtggtgaaatgtttagatc

SEQ ID NO: 5529510 - DNA, 25 bp, Homo sapien
tattttacagaaagagagattaggg

SEQ ID NO: 5529511 - DNA, 25 bp, Homo sapien
gaatgggcctcccttggcacccaga

SEQ ID NO: 5529512 - DNA, 25 bp, Homo sapien
aaacgttaaaggaggctatttcatc

SEQ ID NO: 5529513 - DNA, 25 bp, Homo sapien
cagcaccactggtaaacgaagttca

SEQ ID NO: 5529514 - DNA, 25 bp, Homo sapien
agtgctgacattatgaagttcaaac

SEQ ID NO: 5529515 - DNA, 25 bp, Homo sapien
gaaactattccgttagactcataat

SEQ ID NO: 5529516 - DNA, 25 bp, Homo sapien
attatgagtctaacggaatagtttc

SEQ ID NO: 5529517 - DNA, 25 bp, Homo sapien
agctggaggttaagtggtcctcgaa

SEQ ID NO: 5529518 - DNA, 25 bp, Homo sapien
tgtacaaaggtgtccccctgaagcc

SEQ ID NO: 5529519 - DNA, 25 bp, Homo sapien
gccgatggtaccagtttcgagtggc

SEQ ID NO: 5529520 - DNA, 25 bp, Homo sapien
gtgcatggaactcgaggcttcactg

SEQ ID NO: 5529521 - DNA, 25 bp, Homo sapien
tgtggtacaaagaagatggaattat

SEQ ID NO: 5529522 - DNA, 25 bp, Homo sapien
ctccggctggccaactccaccgtca

SEQ ID NO: 5529523 - DNA, 25 bp, Homo sapien
ttgacaatgagtgctctggggtgaa

SEQ ID NO: 5529524 - DNA, 25 bp, Homo sapien
agcgaagatgacgccactcactggc

SEQ ID NO: 5529525 - DNA, 25 bp, Homo sapien
gacgagcgagttcaactgactgaca

SEQ ID NO: 5529526 - DNA, 25 bp, Homo sapien
tggggtgaagaaatgttgttcgaat

SEQ ID NO: 5529527 - DNA, 25 bp, Homo sapien
acagaactgcagtctggacagctgg

SEQ ID NO: 5529528 - DNA, 25 bp, Homo sapien
cgaggaagaggtacctcgcgtggta

SEQ ID NO: 5529529 - DNA, 25 bp, Homo sapien
taccacgcgaggtacctcttcctcg

SEQ ID NO: 5529530 - DNA, 25 bp, Homo sapien
aggcatcattataatgggagaggat

SEQ ID NO: 5529531 - DNA, 25 bp, Homo sapien
atcaggttaccccacagacacactt

SEQ ID NO: 5529532 - DNA, 25 bp, Homo sapien
gtcagtgaagatgtacgactacctg

SEQ ID NO: 5529533 - DNA, 25 bp, Homo sapien
gggcttgctgcagaaacctggccta

SEQ ID NO: 5529534 - DNA, 25 bp, Homo sapien
agggagccagatcagacctttagtc

SEQ ID NO: 5529535 - DNA, 25 bp, Homo sapien
gaaccgggatcttacaggagaatta

SEQ ID NO: 5529536 - DNA, 25 bp, Homo sapien
acgactacctgttgggaaggacaaa

SEQ ID NO: 5529537 - DNA, 25 bp, Homo sapien
gagatgagactgtacaagaatattc

SEQ ID NO: 5529538 - DNA, 25 bp, Homo sapien
atttacgggcaatgtcaagctcaaa

SEQ ID NO: 5529539 - DNA, 25 bp, Homo sapien
cctttgatgatacagaaagggagcc

SEQ ID NO: 5529540 - DNA, 25 bp, Homo sapien
gtgatgcagatgaagagcttctgtt

SEQ ID NO: 5529541 - DNA, 25 bp, Homo sapien
actccagttaagttggtgaggttaa

SEQ ID NO: 5529542 - DNA, 25 bp, Homo sapien
aaatataagtggtaccagcaggcac

SEQ ID NO: 5529543 - DNA, 25 bp, Homo sapien
gtgtaggttacaccatggatgttgg

SEQ ID NO: 5529544 - DNA, 25 bp, Homo sapien
atctgtggtcaagtatggaaaaatt

SEQ ID NO: 5529545 - DNA, 25 bp, Homo sapien
accagcaggcactacttcgcatacc

SEQ ID NO: 5529546 - DNA, 25 bp, Homo sapien
tgcaactgcactgcctcaaggacct

SEQ ID NO: 5529547 - DNA, 25 bp, Homo sapien
atagtctagtgaatttccgagagtc

SEQ ID NO: 5529548 - DNA, 25 bp, Homo sapien
aggtaacagcagaaacagatagtct

SEQ ID NO: 5529549 - DNA, 25 bp, Homo sapien
agacttgaagtcccaaagatttccc

SEQ ID NO: 5529550 - DNA, 25 bp, Homo sapien
ggatgttggtgcctcctactggtcc

SEQ ID NO: 5529551 - DNA, 25 bp, Homo sapien
caactagatggcataatcaggtaac

SEQ ID NO: 5529552 - DNA, 25 bp, Homo sapien
ggccagaacttcaccctgcgctgcc

SEQ ID NO: 5529553 - DNA, 25 bp, Homo sapien
aatagcaaacgcttcgactggccca

SEQ ID NO: 5529554 - DNA, 25 bp, Homo sapien
ttcgactggcccagctctaagccct

SEQ ID NO: 5529555 - DNA, 25 bp, Homo sapien
gacgaccacggagcccctttctcat

SEQ ID NO: 5529556 - DNA, 25 bp, Homo sapien
gacaacacaggaaatgataatcact

SEQ ID NO: 5529557 - DNA, 25 bp, Homo sapien
gctgggactgttcgtgaacacctca

SEQ ID NO: 5529558 - DNA, 25 bp, Homo sapien
tcactgccactgtgctggccagcag

SEQ ID NO: 5529559 - DNA, 25 bp, Homo sapien
tctcatgccgcacagaactggacat

SEQ ID NO: 5529560 - DNA, 25 bp, Homo sapien
caaagctcacagttctcggcaggac

SEQ ID NO: 5529561 - DNA, 25 bp, Homo sapien
gcaaggtatctgacaacacaggaaa

SEQ ID NO: 5529562 - DNA, 25 bp, Homo sapien
agctccgaacctttggtgagagaag

SEQ ID NO: 5529563 - DNA, 25 bp, Homo sapien
aaagacagatagctgactggttcat

SEQ ID NO: 5529564 - DNA, 25 bp, Homo sapien
gatgtgaattgttacttcaagtggc

SEQ ID NO: 5529565 - DNA, 25 bp, Homo sapien
cattggaatagttggatccaaacta

SEQ ID NO: 5529566 - DNA, 25 bp, Homo sapien
ttggttttaatgatatggaaacatc

SEQ ID NO: 5529567 - DNA, 25 bp, Homo sapien
ccaaactaataagaataagctgtac

SEQ ID NO: 5529568 - DNA, 25 bp, Homo sapien
agacttacttggaggttaaagcaaa

SEQ ID NO: 5529569 - DNA, 25 bp, Homo sapien
acaggaactagtgctcaatatacat

SEQ ID NO: 5529570 - DNA, 25 bp, Homo sapien
gttgggagttccaagatcccattcc

SEQ ID NO: 5529571 - DNA, 25 bp, Homo sapien
cttttgctgattactctgagatttc

SEQ ID NO: 5529572 - DNA, 25 bp, Homo sapien
caccaaattaaagttgggagttcca

SEQ ID NO: 5529573 - DNA, 25 bp, Homo sapien
gaataagctgtacaggaactagtgc

SEQ ID NO: 5529574 - DNA, 25 bp, Homo sapien
tatatgatgggtccacttgagtctc

SEQ ID NO: 5529575 - DNA, 25 bp, Homo sapien
cttgcccagcctgaccctggggcag

SEQ ID NO: 5529576 - DNA, 25 bp, Homo sapien
ttctcagaagtggtctaaccagccc

SEQ ID NO: 5529577 - DNA, 25 bp, Homo sapien
gtctccttaggcgccccatgaggga

SEQ ID NO: 5529578 - DNA, 25 bp, Homo sapien
cgaggcccagcccccatatatgatg

SEQ ID NO: 5529579 - DNA, 25 bp, Homo sapien
aggaaatagtccagttctcagaagt

SEQ ID NO: 5529580 - DNA, 25 bp, Homo sapien
ccacttgagtctccttaggcgcccc

SEQ ID NO: 5529581 - DNA, 25 bp, Homo sapien
agtcctttattagagcgagagtccc

SEQ ID NO: 5529582 - DNA, 25 bp, Homo sapien
agggaccttgcccagcctgaccctg

SEQ ID NO: 5529583 - DNA, 25 bp, Homo sapien
agcgcccggtttacgcaggaaatag

SEQ ID NO: 5529584 - DNA, 25 bp, Homo sapien
gtcaaatcttgggccgggtccaagc

SEQ ID NO: 5529585 - DNA, 25 bp, Homo sapien
ggcaaggtaataagcaggaataaag

SEQ ID NO: 5529586 - DNA, 25 bp, Homo sapien
cttaaactacagtaaagccaagatt

SEQ ID NO: 5529587 - DNA, 25 bp, Homo sapien
cacttcagacattgaaaagccacac

SEQ ID NO: 5529588 - DNA, 25 bp, Homo sapien
tttgaaactcaagtcacagaactga

SEQ ID NO: 5529589 - DNA, 25 bp, Homo sapien
agcaggaataaagcttccaaaaacc

SEQ ID NO: 5529590 - DNA, 25 bp, Homo sapien
cctggaaggactctttcaggtggac

SEQ ID NO: 5529591 - DNA, 25 bp, Homo sapien
acagaactgactgtgggccacttaa

SEQ ID NO: 5529592 - DNA, 25 bp, Homo sapien
tttccatgaaggacttctcaagggc

SEQ ID NO: 5529593 - DNA, 25 bp, Homo sapien
tggacagtctaacatacatataagc

SEQ ID NO: 5529594 - DNA, 25 bp, Homo sapien
ttcaggtggactaataagcatcatc

SEQ ID NO: 5529595 - DNA, 25 bp, Homo sapien
ttcaactaggatatggggaaaagaa

SEQ ID NO: 5529596 - DNA, 25 bp, Homo sapien
gacctcaggcaaaaccagtgccacc

SEQ ID NO: 5529597 - DNA, 25 bp, Homo sapien
acaactgggtacagaaacaagcttg

SEQ ID NO: 5529598 - DNA, 25 bp, Homo sapien
acttgtttcccattcgagggctgcc

SEQ ID NO: 5529599 - DNA, 25 bp, Homo sapien
tttagcaatgctctgtgctggttgc

SEQ ID NO: 5529600 - DNA, 25 bp, Homo sapien
gccctagcaatgacctcaggcaaaa

SEQ ID NO: 5529601 - DNA, 25 bp, Homo sapien
aagccttagcattactgcctcagcc

SEQ ID NO: 5529602 - DNA, 25 bp, Homo sapien
gctacagctcaacagaagcacttgt

SEQ ID NO: 5529603 - DNA, 25 bp, Homo sapien
ttcctatcagaagaagcctagctac

SEQ ID NO: 5529604 - DNA, 25 bp, Homo sapien
tgctggttgctgttcattcctgccc

SEQ ID NO: 5529605 - DNA, 25 bp, Homo sapien
tagacaatacagggacaactgggta

SEQ ID NO: 5529606 - DNA, 25 bp, Homo sapien
cagatcagctgcctgttcacaacag

SEQ ID NO: 5529607 - DNA, 25 bp, Homo sapien
gcaaacatgcacgcgcagatcaaga

SEQ ID NO: 5529608 - DNA, 25 bp, Homo sapien
ttgttagccaaagactgccactgca

SEQ ID NO: 5529609 - DNA, 25 bp, Homo sapien
ggtccttccactgtgcacctgcgcg

SEQ ID NO: 5529610 - DNA, 25 bp, Homo sapien
tgcatatgagcagtcctggtccttc

SEQ ID NO: 5529611 - DNA, 25 bp, Homo sapien
gtgcaagtgaccatgtgcatcggcg

SEQ ID NO: 5529612 - DNA, 25 bp, Homo sapien
gcgttgctgccgtctgcacacggtc

SEQ ID NO: 5529613 - DNA, 25 bp, Homo sapien
ctggtctgatggaactgtgtattta

SEQ ID NO: 5529614 - DNA, 25 bp, Homo sapien
ctcagttgtcctgccctgtggaatg

SEQ ID NO: 5529615 - DNA, 25 bp, Homo sapien
gctccagacctatgatgacttgtta

SEQ ID NO: 5529616 - DNA, 25 bp, Homo sapien
cccgccagctacaatcccatggtgc

SEQ ID NO: 5529617 - DNA, 25 bp, Homo sapien
acacccgattcctgcccaaacagct

SEQ ID NO: 5529618 - DNA, 25 bp, Homo sapien
ctcccacacttaagtatgaaatagc

SEQ ID NO: 5529619 - DNA, 25 bp, Homo sapien
aattaagattctgagtatgatactg

SEQ ID NO: 5529620 - DNA, 25 bp, Homo sapien
tatattcagggatccaaagagtcag

SEQ ID NO: 5529621 - DNA, 25 bp, Homo sapien
tccatagatctgccaggtgagaatc

SEQ ID NO: 5529622 - DNA, 25 bp, Homo sapien
aaaatgagggcttctctgtgtaaaa

SEQ ID NO: 5529623 - DNA, 25 bp, Homo sapien
atcagaaaggcaaactcttaaaaat

SEQ ID NO: 5529624 - DNA, 25 bp, Homo sapien
tagatctgccaggtgagaatcattc

SEQ ID NO: 5529625 - DNA, 25 bp, Homo sapien
ggtgagaggttagtgccttgtatgt

SEQ ID NO: 5529626 - DNA, 25 bp, Homo sapien
ctgatagtatcatttccggtggaaa

SEQ ID NO: 5529627 - DNA, 25 bp, Homo sapien
atagcagaaagggatgttttgatcc

SEQ ID NO: 5529628 - DNA, 25 bp, Homo sapien
tcttcctttggatcagctcccacac

SEQ ID NO: 5529629 - DNA, 25 bp, Homo sapien
ttccattggcgtctaggcccctatt

SEQ ID NO: 5529630 - DNA, 25 bp, Homo sapien
ctcatctttagtcggcctggtgcgc

SEQ ID NO: 5529631 - DNA, 25 bp, Homo sapien
agggcctgcacctcaaggtaggctt

SEQ ID NO: 5529632 - DNA, 25 bp, Homo sapien
tgttcaaacaaagcttaaagtccca

SEQ ID NO: 5529633 - DNA, 25 bp, Homo sapien
tttagggaaccagactgaatgcttc

SEQ ID NO: 5529634 - DNA, 25 bp, Homo sapien
agctcaattctaccccctggccgac

SEQ ID NO: 5529635 - DNA, 25 bp, Homo sapien
tacaacagggtagtctctcattctc

SEQ ID NO: 5529636 - DNA, 25 bp, Homo sapien
tctaagcgcgatccaaatctgttac

SEQ ID NO: 5529637 - DNA, 25 bp, Homo sapien
accgcaacggccacaactaatttgt

SEQ ID NO: 5529638 - DNA, 25 bp, Homo sapien
tacaagaagcattaaccgcaacggc

SEQ ID NO: 5529639 - DNA, 25 bp, Homo sapien
cacttagagggctatctgtaacatc

SEQ ID NO: 5529640 - DNA, 25 bp, Homo sapien
ctggaggctttagtgaaacagttac

SEQ ID NO: 5529641 - DNA, 25 bp, Homo sapien
tccctgaaggtagggttcctatgtc

SEQ ID NO: 5529642 - DNA, 25 bp, Homo sapien
atggaggatgattctgacagtcttc

SEQ ID NO: 5529643 - DNA, 25 bp, Homo sapien
cccatgtgcttggctgaagtgacag

SEQ ID NO: 5529644 - DNA, 25 bp, Homo sapien
gagaaggatgctttgtgttcggtct

SEQ ID NO: 5529645 - DNA, 25 bp, Homo sapien
ggtctagatgttaactggagaggac

SEQ ID NO: 5529646 - DNA, 25 bp, Homo sapien
acctgggtgaggcatctcactgtgg

SEQ ID NO: 5529647 - DNA, 25 bp, Homo sapien
tgtgggaaacgaatcacattgaaac

SEQ ID NO: 5529648 - DNA, 25 bp, Homo sapien
cctgtggtccttggaacagaagagc

SEQ ID NO: 5529649 - DNA, 25 bp, Homo sapien
atgtcttctggatgagagaaggatg

SEQ ID NO: 5529650 - DNA, 25 bp, Homo sapien
taaagaggagccagatatctgaatt

SEQ ID NO: 5529651 - DNA, 25 bp, Homo sapien
tccgcccggtctcggttgagggcca

SEQ ID NO: 5529652 - DNA, 25 bp, Homo sapien
tggccctcaaccgagaccgggcgga

SEQ ID NO: 5529653 - DNA, 25 bp, Homo sapien
atcgacgtcgtgatccagaagtcca

SEQ ID NO: 5529654 - DNA, 25 bp, Homo sapien
aggcaagaccgaattcagaaggata

SEQ ID NO: 5529655 - DNA, 25 bp, Homo sapien
tcagaaggatatcgacgtcgtgatc

SEQ ID NO: 5529656 - DNA, 25 bp, Homo sapien
tgtgttcaaggcaagaccgaattca

SEQ ID NO: 5529657 - DNA, 25 bp, Homo sapien
gacgtcgtgatccagaagtccagag

SEQ ID NO: 5529658 - DNA, 25 bp, Homo sapien
gttcaaggcaagaccgaattcagaa

SEQ ID NO: 5529659 - DNA, 25 bp, Homo sapien
gaattcagaaggatatcgacgtcgt

SEQ ID NO: 5529660 - DNA, 25 bp, Homo sapien
agaccgaattcagaaggatatcgac

SEQ ID NO: 5529661 - DNA, 25 bp, Homo sapien
tcgtgatccagaagtccagagctga

SEQ ID NO: 5529662 - DNA, 25 bp, Homo sapien
aaggatttatttaatggggatgtgt

SEQ ID NO: 5529663 - DNA, 25 bp, Homo sapien
atatcgacgtcgtgatccagaagtc

SEQ ID NO: 5529664 - DNA, 25 bp, Homo sapien
tgaggtgagtgacttgcataaagtc

SEQ ID NO: 5529665 - DNA, 25 bp, Homo sapien
tggcctgggacagctgtcttttttt

SEQ ID NO: 5529666 - DNA, 25 bp, Homo sapien
atgaggggctctcccaagtaccctt

SEQ ID NO: 5529667 - DNA, 25 bp, Homo sapien
atggacagttttatggaaaaggaga

SEQ ID NO: 5529668 - DNA, 25 bp, Homo sapien
aggtaggtagggttatgtattactg

SEQ ID NO: 5529669 - DNA, 25 bp, Homo sapien
agtcacacagcatgttagtggcttc

SEQ ID NO: 5529670 - DNA, 25 bp, Homo sapien
gctacttggtctaaactaggttctc

SEQ ID NO: 5529671 - DNA, 25 bp, Homo sapien
ttgttatgaccacagcttctgctac

SEQ ID NO: 5529672 - DNA, 25 bp, Homo sapien
gggcagtggtgatttgtaagatttc

SEQ ID NO: 5529673 - DNA, 25 bp, Homo sapien
tctccatgaggggctctcccaagta

SEQ ID NO: 5529674 - DNA, 25 bp, Homo sapien
ggatggagtctctctgcaatggcac

SEQ ID NO: 5529675 - DNA, 25 bp, Homo sapien
agatggcagagtgaccattttgcag

SEQ ID NO: 5529676 - DNA, 25 bp, Homo sapien
agagtcaaggccaaaattgcccaga

SEQ ID NO: 5529677 - DNA, 25 bp, Homo sapien
gttcttcaaggacaatacagggcca

SEQ ID NO: 5529678 - DNA, 25 bp, Homo sapien
ttccaaatgacctgccccaccaacc

SEQ ID NO: 5529679 - DNA, 25 bp, Homo sapien
gggctggcttctaagcttgagctct

SEQ ID NO: 5529680 - DNA, 25 bp, Homo sapien
aagtctcacatctggcaacctcccc

SEQ ID NO: 5529681 - DNA, 25 bp, Homo sapien
cctccattgaggcagcctaggcttc

SEQ ID NO: 5529682 - DNA, 25 bp, Homo sapien
cagggccatgtgtacaaatgctact

SEQ ID NO: 5529683 - DNA, 25 bp, Homo sapien
taagtatggccagaattgtgggtga

SEQ ID NO: 5529684 - DNA, 25 bp, Homo sapien
agtgacaaggtgcccctgatggcat

SEQ ID NO: 5529685 - DNA, 25 bp, Homo sapien
caccgtgctgagccttcaggaggct

SEQ ID NO: 5529686 - DNA, 25 bp, Homo sapien
tatactccctgagattggggtacac

SEQ ID NO: 5529687 - DNA, 25 bp, Homo sapien
agagaaatgcagcccttcgagtaag

SEQ ID NO: 5529688 - DNA, 25 bp, Homo sapien
ggaaggagtggatcttttgcctgtg

SEQ ID NO: 5529689 - DNA, 25 bp, Homo sapien
gagattggggtacacttacaaccag

SEQ ID NO: 5529690 - DNA, 25 bp, Homo sapien
taaataccactgtatggggaccata

SEQ ID NO: 5529691 - DNA, 25 bp, Homo sapien
tttcgtaaactcagagaaatgcagc

SEQ ID NO: 5529692 - DNA, 25 bp, Homo sapien
cagaaaataatgtagtcagaaagct

SEQ ID NO: 5529693 - DNA, 25 bp, Homo sapien
gaagttttgcacattggcaccagac

SEQ ID NO: 5529694 - DNA, 25 bp, Homo sapien
ttcgagtaagttcaggcaaatgagt

SEQ ID NO: 5529695 - DNA, 25 bp, Homo sapien
agtgctgaaaaggtttgctgtcctc

SEQ ID NO: 5529696 - DNA, 25 bp, Homo sapien
gtgaaaagacaaatagtttcagaac

SEQ ID NO: 5529697 - DNA, 25 bp, Homo sapien
tccagaagctaccagcagtctccct

SEQ ID NO: 5529698 - DNA, 25 bp, Homo sapien
cggctgactgcatcgcaggtcaagc

SEQ ID NO: 5529699 - DNA, 25 bp, Homo sapien
acagcaatggccacaacatgatttg

SEQ ID NO: 5529700 - DNA, 25 bp, Homo sapien
tttcagacaaggcgatgtccagaag

SEQ ID NO: 5529701 - DNA, 25 bp, Homo sapien
ggttatgacatgagatgtgtcggtt

SEQ ID NO: 5529702 - DNA, 25 bp, Homo sapien
gtgtcggtttcgatgttcctggggc

SEQ ID NO: 5529703 - DNA, 25 bp, Homo sapien
tattatgaggtacaagtggcaatga

SEQ ID NO: 5529704 - DNA, 25 bp, Homo sapien
aagcttcaccctcaggctggcaatc

SEQ ID NO: 5529705 - DNA, 25 bp, Homo sapien
gttaatcatcaggactgggacccac

SEQ ID NO: 5529706 - DNA, 25 bp, Homo sapien
agtggcaatgaagtagcaatgaaat

SEQ ID NO: 5529707 - DNA, 25 bp, Homo sapien
tctaactaaacaagaagtgcggagg

SEQ ID NO: 5529708 - DNA, 25 bp, Homo sapien
tttggaagaagatgcaataattcac

SEQ ID NO: 5529709 - DNA, 25 bp, Homo sapien
tccccagccaagtaacagggagaaa

SEQ ID NO: 5529710 - DNA, 25 bp, Homo sapien
acaaggagtccattcattggttctc

SEQ ID NO: 5529711 - DNA, 25 bp, Homo sapien
atgcaataattcacacaaggagtcc

SEQ ID NO: 5529712 - DNA, 25 bp, Homo sapien
agaaaaagtactgaggcgactgttt

SEQ ID NO: 5529713 - DNA, 25 bp, Homo sapien
tgtggtttttgttgtggagaaatta

SEQ ID NO: 5529714 - DNA, 25 bp, Homo sapien
ctttgagcatggaagagaatttgtt

SEQ ID NO: 5529715 - DNA, 25 bp, Homo sapien
cacatggaacacttgctttgagcat

SEQ ID NO: 5529716 - DNA, 25 bp, Homo sapien
aaacagaaacactatgagaaatgac

SEQ ID NO: 5529717 - DNA, 25 bp, Homo sapien
tctcgccttgcacaaagggtggact

SEQ ID NO: 5529718 - DNA, 25 bp, Homo sapien
gtactgaggcgactgtttccactat

SEQ ID NO: 5529719 - DNA, 25 bp, Homo sapien
ggtgtcacggtttgatgtcaagggt

SEQ ID NO: 5529720 - DNA, 25 bp, Homo sapien
cactgcaatgtggaataagagagtg

SEQ ID NO: 5529721 - DNA, 25 bp, Homo sapien
gtgtcctaggtcagagtagggaaaa

SEQ ID NO: 5529722 - DNA, 25 bp, Homo sapien
ggtcatcactgaagggtcgcaaata

SEQ ID NO: 5529723 - DNA, 25 bp, Homo sapien
ccaaacactgcaatgtggaataaga

SEQ ID NO: 5529724 - DNA, 25 bp, Homo sapien
gtcgcaaataagggttggatttgga

SEQ ID NO: 5529725 - DNA, 25 bp, Homo sapien
gtcacggtttgatgtcaagggtcac

SEQ ID NO: 5529726 - DNA, 25 bp, Homo sapien
cggatgaccattttaggagtcggat

SEQ ID NO: 5529727 - DNA, 25 bp, Homo sapien
ccccagacccggctggagatctggg

SEQ ID NO: 5529728 - DNA, 25 bp, Homo sapien
ccagccccagacccggctggagatc

SEQ ID NO: 5529729 - DNA, 25 bp, Homo sapien
agtctggagtcggatgaccatttta

SEQ ID NO: 5529730 - DNA, 25 bp, Homo sapien
gactaacagcatggtcctgattacc

SEQ ID NO: 5529731 - DNA, 25 bp, Homo sapien
aaagaaatgacagaagtattataat

SEQ ID NO: 5529732 - DNA, 25 bp, Homo sapien
gtagtgagacactgaacatttcatt

SEQ ID NO: 5529733 - DNA, 25 bp, Homo sapien
ccccacacacatgcagtacattatg

SEQ ID NO: 5529734 - DNA, 25 bp, Homo sapien
ctgatcagactgtagtgagacactg

SEQ ID NO: 5529735 - DNA, 25 bp, Homo sapien
aaagttacacaattaggccaatagc

SEQ ID NO: 5529736 - DNA, 25 bp, Homo sapien
tttaagctaccaagaattcccatac

SEQ ID NO: 5529737 - DNA, 25 bp, Homo sapien
gtacattatgtgacagagagcactc

SEQ ID NO: 5529738 - DNA, 25 bp, Homo sapien
ataacaccaagagttctgatcagac

SEQ ID NO: 5529739 - DNA, 25 bp, Homo sapien
tacactgaagttaacccctgaagct

SEQ ID NO: 5529740 - DNA, 25 bp, Homo sapien
aatggctttaggcctggcttataac

SEQ ID NO: 5529741 - DNA, 25 bp, Homo sapien
tgaactcagggatggctgcatttga

SEQ ID NO: 5529742 - DNA, 25 bp, Homo sapien
caggctctctctgcccactgcccac

SEQ ID NO: 5529743 - DNA, 25 bp, Homo sapien
ggtcccgtcagcatcgcatgaactc

SEQ ID NO: 5529744 - DNA, 25 bp, Homo sapien
ggcagagggccttgttgaatctgaa

SEQ ID NO: 5529745 - DNA, 25 bp, Homo sapien
ttgttgaatctgaactgcagcaagg

SEQ ID NO: 5529746 - DNA, 25 bp, Homo sapien
cggtaagcatgagtgcctgcatatc

SEQ ID NO: 5529747 - DNA, 25 bp, Homo sapien
gcatattgggctggcacatttagtg

SEQ ID NO: 5529748 - DNA, 25 bp, Homo sapien
ctgatgccgattggaaaggatagaa

SEQ ID NO: 5529749 - DNA, 25 bp, Homo sapien
cctcacttatcaggggacaagagct

SEQ ID NO: 5529750 - DNA, 25 bp, Homo sapien
acatttagtggaaccagccagagaa

SEQ ID NO: 5529751 - DNA, 25 bp, Homo sapien
aggatagaatcctagtgagctgccc

SEQ ID NO: 5529752 - DNA, 25 bp, Homo sapien
tgcctaccaaggcctgtcaagaggg

SEQ ID NO: 5529753 - DNA, 25 bp, Homo sapien
ctgtcaagagggtcctcccccatac

SEQ ID NO: 5529754 - DNA, 25 bp, Homo sapien
gtttgcccacaaggttcaagagtga

SEQ ID NO: 5529755 - DNA, 25 bp, Homo sapien
taacagcatgtagggccccatactc

SEQ ID NO: 5529756 - DNA, 25 bp, Homo sapien
agctcaaagcatttaaggcctcctc

SEQ ID NO: 5529757 - DNA, 25 bp, Homo sapien
ttagactgaaggcaaaagctcaaag

SEQ ID NO: 5529758 - DNA, 25 bp, Homo sapien
gttcaagagtgattggctcccagtc

SEQ ID NO: 5529759 - DNA, 25 bp, Homo sapien
acttccctgtggtcagcctaagctc

SEQ ID NO: 5529760 - DNA, 25 bp, Homo sapien
gaactacttggatctaggggttgcc

SEQ ID NO: 5529761 - DNA, 25 bp, Homo sapien
gttgtcagatattagcagtccagat

SEQ ID NO: 5529762 - DNA, 25 bp, Homo sapien
gttgcctgttatttagaagagatcc

SEQ ID NO: 5529763 - DNA, 25 bp, Homo sapien
ttacagagcgtttacaggcaggttt

SEQ ID NO: 5529764 - DNA, 25 bp, Homo sapien
ctggattcccttctgcccggctgcc

SEQ ID NO: 5529765 - DNA, 25 bp, Homo sapien
caggcaggtttcttatcccagggag

SEQ ID NO: 5529766 - DNA, 25 bp, Homo sapien
tacaccaggaacttcccaaatgtcc

SEQ ID NO: 5529767 - DNA, 25 bp, Homo sapien
tgggaggtccatagcctggattccc

SEQ ID NO: 5529768 - DNA, 25 bp, Homo sapien
cccagggctcggtccttttgccgga

SEQ ID NO: 5529769 - DNA, 25 bp, Homo sapien
ggagggacaaaaatgtacttgcaaa

SEQ ID NO: 5529770 - DNA, 25 bp, Homo sapien
ggaaaggttctgggattagcaagaa

SEQ ID NO: 5529771 - DNA, 25 bp, Homo sapien
ggagccacaaacccaatcactggac

SEQ ID NO: 5529772 - DNA, 25 bp, Homo sapien
gattagcaagaaaataggcagatac

SEQ ID NO: 5529773 - DNA, 25 bp, Homo sapien
gtctttcagaagttcacacacactc

SEQ ID NO: 5529774 - DNA, 25 bp, Homo sapien
ataagcacaattatgcatgaggggc

SEQ ID NO: 5529775 - DNA, 25 bp, Homo sapien
catgaggggcatatatgttgtgtct

SEQ ID NO: 5529776 - DNA, 25 bp, Homo sapien
tcaagcacagacaaatacatacttt

SEQ ID NO: 5529777 - DNA, 25 bp, Homo sapien
actaaaggcaatattgtgtgtgtat

SEQ ID NO: 5529778 - DNA, 25 bp, Homo sapien
ccaccatagtatctgagagggagaa

SEQ ID NO: 5529779 - DNA, 25 bp, Homo sapien
tggatgttgacatagaaatgcaaat

SEQ ID NO: 5529780 - DNA, 25 bp, Homo sapien
cacagtaacatggcccccatatctc

SEQ ID NO: 5529781 - DNA, 25 bp, Homo sapien
gcattagcactaaaggcaatattgt

SEQ ID NO: 5529782 - DNA, 25 bp, Homo sapien
ttgtgaattcaccccgagttgtgtt

SEQ ID NO: 5529783 - DNA, 25 bp, Homo sapien
gtacactcagtggcatttatggaaa

SEQ ID NO: 5529784 - DNA, 25 bp, Homo sapien
tcactatacaaaggtaaggctccaa

SEQ ID NO: 5529785 - DNA, 25 bp, Homo sapien
tcaggcaccaagtctgtgggtctca

SEQ ID NO: 5529786 - DNA, 25 bp, Homo sapien
cagaaaactcagaggtcctgataag

SEQ ID NO: 5529787 - DNA, 25 bp, Homo sapien
agggcactggacacatccctggaaa

SEQ ID NO: 5529788 - DNA, 25 bp, Homo sapien
actcagaggtcctgataaggcagtg

SEQ ID NO: 5529789 - DNA, 25 bp, Homo sapien
ctcaaggagagcctccatcccgcag

SEQ ID NO: 5529790 - DNA, 25 bp, Homo sapien
ttccccttcctcaaggagagcctcc

SEQ ID NO: 5529791 - DNA, 25 bp, Homo sapien
ctgctggcccctcccactgtggccc

SEQ ID NO: 5529792 - DNA, 25 bp, Homo sapien
actggacacatccctggaaagcagc

SEQ ID NO: 5529793 - DNA, 25 bp, Homo sapien
cctgctgccacaggtaaagcaaacc

SEQ ID NO: 5529794 - DNA, 25 bp, Homo sapien
tgccacaggtaaagcaaacccatga

SEQ ID NO: 5529795 - DNA, 25 bp, Homo sapien
ctggaaagcagcaacctgctgccac

SEQ ID NO: 5529796 - DNA, 25 bp, Homo sapien
tttaactacatggctgagagagagg

SEQ ID NO: 5529797 - DNA, 25 bp, Homo sapien
ttatgtggcccaacaagaacaagag

SEQ ID NO: 5529798 - DNA, 25 bp, Homo sapien
gattctaagtcctggtggcgagttc

SEQ ID NO: 5529799 - DNA, 25 bp, Homo sapien
aagtgaaaagaaaacctagtgtgcc

SEQ ID NO: 5529800 - DNA, 25 bp, Homo sapien
agaagtggtggtagtagccaaattt

SEQ ID NO: 5529801 - DNA, 25 bp, Homo sapien
tacaatggacaagttggatggttcc

SEQ ID NO: 5529802 - DNA, 25 bp, Homo sapien
ggaaaaacagtgctcggaaagcatc

SEQ ID NO: 5529803 - DNA, 25 bp, Homo sapien
caagagttggacatcaagaagaatg

SEQ ID NO: 5529804 - DNA, 25 bp, Homo sapien
ctaactatgtggaaaggaaaaacag

SEQ ID NO: 5529805 - DNA, 25 bp, Homo sapien
caagaagaatgagagattatggctt

SEQ ID NO: 5529806 - DNA, 25 bp, Homo sapien
gctgaagctgctgaaagatggcaga

SEQ ID NO: 5529807 - DNA, 25 bp, Homo sapien
aaaaacagttgaggactatttctgc

SEQ ID NO: 5529808 - DNA, 25 bp, Homo sapien
cgagtccatgtgtaaagaactggcc

SEQ ID NO: 5529809 - DNA, 25 bp, Homo sapien
gagaacaaagcagggatttcattca

SEQ ID NO: 5529810 - DNA, 25 bp, Homo sapien
aactgaaagaggacgtgcttttgtc

SEQ ID NO: 5529811 - DNA, 25 bp, Homo sapien
aagaaaaagctgcagagatgcataa

SEQ ID NO: 5529812 - DNA, 25 bp, Homo sapien
gtatgaaacagacgtgtttgtcgtc

SEQ ID NO: 5529813 - DNA, 25 bp, Homo sapien
gatgagtgtagatgctgtagaaatt

SEQ ID NO: 5529814 - DNA, 25 bp, Homo sapien
aacaccccgagaactatgatcttgc

SEQ ID NO: 5529815 - DNA, 25 bp, Homo sapien
gtaaagaactggccaagtccaaagc

SEQ ID NO: 5529816 - DNA, 25 bp, Homo sapien
gtttgtcgtcggaactgaaagagga

SEQ ID NO: 5529817 - DNA, 25 bp, Homo sapien
tacaacccaggcaaatcggatgagt

SEQ ID NO: 5529818 - DNA, 25 bp, Homo sapien
agggtccccaaattgatgtgagatt

SEQ ID NO: 5529819 - DNA, 25 bp, Homo sapien
accgtgcagtgccatcttcagaccc

SEQ ID NO: 5529820 - DNA, 25 bp, Homo sapien
aaatgcaaagctccctaaggtcttc

SEQ ID NO: 5529821 - DNA, 25 bp, Homo sapien
gccgttgggttcaccagcctcctat

SEQ ID NO: 5529822 - DNA, 25 bp, Homo sapien
ccttcacatttcagccgttgggttc

SEQ ID NO: 5529823 - DNA, 25 bp, Homo sapien
gagtcactgcagctgtcaccgtgca

SEQ ID NO: 5529824 - DNA, 25 bp, Homo sapien
cacttctaccatgtggggaatgggg

SEQ ID NO: 5529825 - DNA, 25 bp, Homo sapien
tggggggactcaccctaccctctca

SEQ ID NO: 5529826 - DNA, 25 bp, Homo sapien
aatatgtatgatagagtgtgggatt

SEQ ID NO: 5529827 - DNA, 25 bp, Homo sapien
agaggggaaatctgcctccccttct

SEQ ID NO: 5529828 - DNA, 25 bp, Homo sapien
ttaatgtggaatgcaggtaaatatt

SEQ ID NO: 5529829 - DNA, 25 bp, Homo sapien
tggaaaggaaacagctcttgccttc

SEQ ID NO: 5529830 - DNA, 25 bp, Homo sapien
tctgttcccaaggagctgacagtgt

SEQ ID NO: 5529831 - DNA, 25 bp, Homo sapien
tcagggaagtgtcagaaacactgga

SEQ ID NO: 5529832 - DNA, 25 bp, Homo sapien
tcaacaagacgacaaacagaaagat

SEQ ID NO: 5529833 - DNA, 25 bp, Homo sapien
cactggaagtgttatagcatcatct

SEQ ID NO: 5529834 - DNA, 25 bp, Homo sapien
agccctgtggaaccatagcaggagc

SEQ ID NO: 5529835 - DNA, 25 bp, Homo sapien
gaaggtagcaggtatagcttcaggg

SEQ ID NO: 5529836 - DNA, 25 bp, Homo sapien
gggagacctctctaaggagctgacc

SEQ ID NO: 5529837 - DNA, 25 bp, Homo sapien
gccttccagggctattgtaggactc

SEQ ID NO: 5529838 - DNA, 25 bp, Homo sapien
agatagaaaatgttgaatgaagccc

SEQ ID NO: 5529839 - DNA, 25 bp, Homo sapien
tcataagggcaagctcggcccatga

SEQ ID NO: 5529840 - DNA, 25 bp, Homo sapien
agtcccacgttggacgacgtgcaga

SEQ ID NO: 5529841 - DNA, 25 bp, Homo sapien
ctttctcctggtgagatggttgggc

SEQ ID NO: 5529842 - DNA, 25 bp, Homo sapien
ggacgacgaagatgaccttatacgt

SEQ ID NO: 5529843 - DNA, 25 bp, Homo sapien
ccgacacgccagtcccacgttggac

SEQ ID NO: 5529844 - DNA, 25 bp, Homo sapien
agatgaccttatacgtgcactcggc

SEQ ID NO: 5529845 - DNA, 25 bp, Homo sapien
tgtggctctttctcctggtgagatg

SEQ ID NO: 5529846 - DNA, 25 bp, Homo sapien
aggagccaggctggttctctgcaga

SEQ ID NO: 5529847 - DNA, 25 bp, Homo sapien
gcatatcctggagtaacgcgcagtg

SEQ ID NO: 5529848 - DNA, 25 bp, Homo sapien
acgccagtcccacgttggacgacgt

SEQ ID NO: 5529849 - DNA, 25 bp, Homo sapien
ctcggcatatcctggagtaacgcgc

SEQ ID NO: 5529850 - DNA, 25 bp, Homo sapien
tacgtgcactcggcatatcctggag

SEQ ID NO: 5529851 - DNA, 25 bp, Homo sapien
tgcaggcttctttagggaccaagat

SEQ ID NO: 5529852 - DNA, 25 bp, Homo sapien
ccgccctcttcgacctgcctggatt

SEQ ID NO: 5529853 - DNA, 25 bp, Homo sapien
agggcaaacagcgtgtccttcacca

SEQ ID NO: 5529854 - DNA, 25 bp, Homo sapien
ctgctgtagcttttctgagtgcctc

SEQ ID NO: 5529855 - DNA, 25 bp, Homo sapien
tttcgtgcctgggtctgtttgctgg

SEQ ID NO: 5529856 - DNA, 25 bp, Homo sapien
cgcgagggtgtccgccctcttcgac

SEQ ID NO: 5529857 - DNA, 25 bp, Homo sapien
tcatgtaagtgactgctgtagcttt

SEQ ID NO: 5529858 - DNA, 25 bp, Homo sapien
tttctgagtgcctcacaagggcgat

SEQ ID NO: 5529859 - DNA, 25 bp, Homo sapien
ctggatttttgtgctgcagaatggc

SEQ ID NO: 5529860 - DNA, 25 bp, Homo sapien
ctctctgctgatgattctgcccact

SEQ ID NO: 5529861 - DNA, 25 bp, Homo sapien
taacaatggcccgtcaagaagtggg

SEQ ID NO: 5529862 - DNA, 25 bp, Homo sapien
ttcattctgcagatggccccatacc

SEQ ID NO: 5529863 - DNA, 25 bp, Homo sapien
gagaagacccccttggcgaaatata

SEQ ID NO: 5529864 - DNA, 25 bp, Homo sapien
attcagctagaaagtgagaagtttt

SEQ ID NO: 5529865 - DNA, 25 bp, Homo sapien
ccaatcgctgttagagtttgccacc

SEQ ID NO: 5529866 - DNA, 25 bp, Homo sapien
ctgtggataatctaagttggacttt

SEQ ID NO: 5529867 - DNA, 25 bp, Homo sapien
atgggcttcgatatagaaggactgc

SEQ ID NO: 5529868 - DNA, 25 bp, Homo sapien
ttgtctagactaaagaaaggaaagc

SEQ ID NO: 5529869 - DNA, 25 bp, Homo sapien
ggaaagcaggttataaaagccatag

SEQ ID NO: 5529870 - DNA, 25 bp, Homo sapien
gccatagtagccagtccagttcatt

SEQ ID NO: 5529871 - DNA, 25 bp, Homo sapien
ttcccactgagaactgcagcaattt

SEQ ID NO: 5529872 - DNA, 25 bp, Homo sapien
tatgttagaactagcaggacgtagg

SEQ ID NO: 5529873 - DNA, 25 bp, Homo sapien
cccgggctcagtcacccacgccggg

SEQ ID NO: 5529874 - DNA, 25 bp, Homo sapien
ctgctcccacaactgcttgcgacgc

SEQ ID NO: 5529875 - DNA, 25 bp, Homo sapien
gtcctgggaaagttgcttcctgacc

SEQ ID NO: 5529876 - DNA, 25 bp, Homo sapien
ctgagaaagctactgtgcttggggc

SEQ ID NO: 5529877 - DNA, 25 bp, Homo sapien
aaaatacctgcacagagacacagat

SEQ ID NO: 5529878 - DNA, 25 bp, Homo sapien
taaagctggtgataatgatcctaac

SEQ ID NO: 5529879 - DNA, 25 bp, Homo sapien
gatgcacagacacacttctgctccc

SEQ ID NO: 5529880 - DNA, 25 bp, Homo sapien
gggaaaagtaaagctggtgataatg

SEQ ID NO: 5529881 - DNA, 25 bp, Homo sapien
tcattgcaacatggtcccacggagg

SEQ ID NO: 5529882 - DNA, 25 bp, Homo sapien
gattcgacgctgagaaagctactgt

SEQ ID NO: 5529883 - DNA, 25 bp, Homo sapien
acaactgcttgcgacgcaggcaagg

SEQ ID NO: 5529884 - DNA, 25 bp, Homo sapien
ctcatgaggcctacttgttcttgtc

SEQ ID NO: 5529885 - DNA, 25 bp, Homo sapien
ggtggtcataaaactcgtttcaagc

SEQ ID NO: 5529886 - DNA, 25 bp, Homo sapien
ccggtgacaagtttttcatggtggt

SEQ ID NO: 5529887 - DNA, 25 bp, Homo sapien
accaacctgaaacaatagcaagatg

SEQ ID NO: 5529888 - DNA, 25 bp, Homo sapien
cacatatgccggtgacaagtttttc

SEQ ID NO: 5529889 - DNA, 25 bp, Homo sapien
ccaatatccatccctcatgaggcct

SEQ ID NO: 5529890 - DNA, 25 bp, Homo sapien
atttggagggtccggttcttcacaa

SEQ ID NO: 5529891 - DNA, 25 bp, Homo sapien
ctttccaaggagtgtattttcattt

SEQ ID NO: 5529892 - DNA, 25 bp, Homo sapien
agggtggactaggctgatctttcac

SEQ ID NO: 5529893 - DNA, 25 bp, Homo sapien
tgtcaaaacttgagggtggactagg

SEQ ID NO: 5529894 - DNA, 25 bp, Homo sapien
gcatcatcttaagcttgacagtgtc

SEQ ID NO: 5529895 - DNA, 25 bp, Homo sapien
tcaaacatacagattgaggcttcca

SEQ ID NO: 5529896 - DNA, 25 bp, Homo sapien
acaccactgtatcacggcgaatgtc

SEQ ID NO: 5529897 - DNA, 25 bp, Homo sapien
tgcataaatgctatagtgtaaaaaa

SEQ ID NO: 5529898 - DNA, 25 bp, Homo sapien
ataactccatgaattctgtaaacca

SEQ ID NO: 5529899 - DNA, 25 bp, Homo sapien
aacagttcgctacaagtaaatgatt

SEQ ID NO: 5529900 - DNA, 25 bp, Homo sapien
aggcttccagaaattaatccacttg

SEQ ID NO: 5529901 - DNA, 25 bp, Homo sapien
tggcagcgctgccagccattctttg

SEQ ID NO: 5529902 - DNA, 25 bp, Homo sapien
acggcgaatgtcgaacactagagtt

SEQ ID NO: 5529903 - DNA, 25 bp, Homo sapien
aatccacttgaggcgtccacgcgga

SEQ ID NO: 5529904 - DNA, 25 bp, Homo sapien
gaacactagagttacagacgacagg

SEQ ID NO: 5529905 - DNA, 25 bp, Homo sapien
tcagccacctaggagccatccctga

SEQ ID NO: 5529906 - DNA, 25 bp, Homo sapien
cctagtcattggaagtgaagcaggt

SEQ ID NO: 5529907 - DNA, 25 bp, Homo sapien
acccaagacatttctctagggagta

SEQ ID NO: 5529908 - DNA, 25 bp, Homo sapien
ccacaccctctcctacccaagacat

SEQ ID NO: 5529909 - DNA, 25 bp, Homo sapien
ttaatgcttcccctcccaccatccc

SEQ ID NO: 5529910 - DNA, 25 bp, Homo sapien
cttgcccggcccttcctcttaaggc

SEQ ID NO: 5529911 - DNA, 25 bp, Homo sapien
ggcagtttgggctggttccagcctt

SEQ ID NO: 5529912 - DNA, 25 bp, Homo sapien
agttgctgtatttaatgcttcccct

SEQ ID NO: 5529913 - DNA, 25 bp, Homo sapien
tcctcttaaggcagatggtgtggag

SEQ ID NO: 5529914 - DNA, 25 bp, Homo sapien
tgggctggctcctagtcattggaag

SEQ ID NO: 5529915 - DNA, 25 bp, Homo sapien
gtaacatcaaacgcaaggcactggc

SEQ ID NO: 5529916 - DNA, 25 bp, Homo sapien
ggctcctagtcattggaagtgaagc

SEQ ID NO: 5529917 - DNA, 25 bp, Homo sapien
agaacttgacaaaatgagatgcctg

SEQ ID NO: 5529918 - DNA, 25 bp, Homo sapien
tctctcttcacacagggtcagcggt

SEQ ID NO: 5529919 - DNA, 25 bp, Homo sapien
ctttccgcaggaaagggcatttttc

SEQ ID NO: 5529920 - DNA, 25 bp, Homo sapien
ccagggaccttgtgatgatagttgt

SEQ ID NO: 5529921 - DNA, 25 bp, Homo sapien
caggagggcatgaagcctatattgg

SEQ ID NO: 5529922 - DNA, 25 bp, Homo sapien
ttcaagatggcaactgctgtgtcat

SEQ ID NO: 5529923 - DNA, 25 bp, Homo sapien
tcagaggaaactatcttcaggaggg

SEQ ID NO: 5529924 - DNA, 25 bp, Homo sapien
tcccattagatggcagtaacgcacc

SEQ ID NO: 5529925 - DNA, 25 bp, Homo sapien
actaaggcactatagataggcacct

SEQ ID NO: 5529926 - DNA, 25 bp, Homo sapien
aaattacacgatccagccttagtcc

SEQ ID NO: 5529927 - DNA, 25 bp, Homo sapien
ctgacaaactgaacggctaagaact

SEQ ID NO: 5529928 - DNA, 25 bp, Homo sapien
ccctctaggtttgcgttatcgacgt

SEQ ID NO: 5529929 - DNA, 25 bp, Homo sapien
cagtttaccctgagtccctctaggt

SEQ ID NO: 5529930 - DNA, 25 bp, Homo sapien
atccccccggattaaatgtctctcg

SEQ ID NO: 5529931 - DNA, 25 bp, Homo sapien
ctgcagcagccgctacccttaattt

SEQ ID NO: 5529932 - DNA, 25 bp, Homo sapien
aggtttgcgttatcgacgtggtggt

SEQ ID NO: 5529933 - DNA, 25 bp, Homo sapien
tgcgttatcgacgtggtggtagtag

SEQ ID NO: 5529934 - DNA, 25 bp, Homo sapien
tgacctctcatcccctcgcctcccc

SEQ ID NO: 5529935 - DNA, 25 bp, Homo sapien
tcttccctgccagccgtcggaggaa

SEQ ID NO: 5529936 - DNA, 25 bp, Homo sapien
ggagctcctcggcagtttgagtgcc

SEQ ID NO: 5529937 - DNA, 25 bp, Homo sapien
gattaaatgtctctcgggaggcgga

SEQ ID NO: 5529938 - DNA, 25 bp, Homo sapien
accctgagtccctctaggtttgcgt

SEQ ID NO: 5529939 - DNA, 25 bp, Homo sapien
ttgagtatctcttagggattcttcc

SEQ ID NO: 5529940 - DNA, 25 bp, Homo sapien
taacaaaggctgaagagttgccttc

SEQ ID NO: 5529941 - DNA, 25 bp, Homo sapien
tactggcgcttttaaaacacattac

SEQ ID NO: 5529942 - DNA, 25 bp, Homo sapien
cagattttcaggacgagtgaaggag

SEQ ID NO: 5529943 - DNA, 25 bp, Homo sapien
aagagttcaggaaagacaaaaatgc

SEQ ID NO: 5529944 - DNA, 25 bp, Homo sapien
aaagaaactttgaacaatagacgtc

SEQ ID NO: 5529945 - DNA, 25 bp, Homo sapien
aagactgtgtctaagtttatgcctc

SEQ ID NO: 5529946 - DNA, 25 bp, Homo sapien
gaggaaagtgggctctactgaattc

SEQ ID NO: 5529947 - DNA, 25 bp, Homo sapien
attgatccgatggtttactggcgct

SEQ ID NO: 5529948 - DNA, 25 bp, Homo sapien
attggaacaccgtcctttaaggaga

SEQ ID NO: 5529949 - DNA, 25 bp, Homo sapien
tgtaacttgcagattttcaggacga

SEQ ID NO: 5529950 - DNA, 25 bp, Homo sapien
ccttgagttcagtgaggaaaaccac

SEQ ID NO: 5529951 - DNA, 25 bp, Homo sapien
ggaggttcatgaggtgcttcttcaa

SEQ ID NO: 5529952 - DNA, 25 bp, Homo sapien
tgatagggccttgctgcagttctct

SEQ ID NO: 5529953 - DNA, 25 bp, Homo sapien
acggagggtgactccttgagttcag

SEQ ID NO: 5529954 - DNA, 25 bp, Homo sapien
ggtcagccaggagtatgactggcca

SEQ ID NO: 5529955 - DNA, 25 bp, Homo sapien
agcattccacaaaacggggaatctc

SEQ ID NO: 5529956 - DNA, 25 bp, Homo sapien
ggtgcctggcagtggtcagccagga

SEQ ID NO: 5529957 - DNA, 25 bp, Homo sapien
tttgtctaatgggaagctgataggg

SEQ ID NO: 5529958 - DNA, 25 bp, Homo sapien
gagagcaagagcacctgggtgctcc

SEQ ID NO: 5529959 - DNA, 25 bp, Homo sapien
ttgggcaactttacagccaagcccc

SEQ ID NO: 5529960 - DNA, 25 bp, Homo sapien
ccttaggcatccagaagtaggaaac

SEQ ID NO: 5529961 - DNA, 25 bp, Homo sapien
gccgaaggacccagtccactcacac

SEQ ID NO: 5529962 - DNA, 25 bp, Homo sapien
gctgcctgagtgtgcccctcatcct

SEQ ID NO: 5529963 - DNA, 25 bp, Homo sapien
aaaatcacaggccttcagcagcaga

SEQ ID NO: 5529964 - DNA, 25 bp, Homo sapien
caatttaaaaagatgggcaaccgat

SEQ ID NO: 5529965 - DNA, 25 bp, Homo sapien
aatgtggtaaacgatgttgccaatt

SEQ ID NO: 5529966 - DNA, 25 bp, Homo sapien
ctgccctgagccaatgcaggcagtg

SEQ ID NO: 5529967 - DNA, 25 bp, Homo sapien
tggactggttacagcctgtggtacc

SEQ ID NO: 5529968 - DNA, 25 bp, Homo sapien
ctcatcctctgcgacggttgactgc

SEQ ID NO: 5529969 - DNA, 25 bp, Homo sapien
gagctggtcccatccacacgcctgc

SEQ ID NO: 5529970 - DNA, 25 bp, Homo sapien
aaaacaacactgggtggactggtta

SEQ ID NO: 5529971 - DNA, 25 bp, Homo sapien
ttgagtcctggcatccaacggcagg

SEQ ID NO: 5529972 - DNA, 25 bp, Homo sapien
tttgctgtcagcagggcacttaaga

SEQ ID NO: 5529973 - DNA, 25 bp, Homo sapien
gcaagatgtaagggaaatataattc

SEQ ID NO: 5529974 - DNA, 25 bp, Homo sapien
tgtctccagacccactagggtggaa

SEQ ID NO: 5529975 - DNA, 25 bp, Homo sapien
tccccaccttcaccgcatccctttc

SEQ ID NO: 5529976 - DNA, 25 bp, Homo sapien
gcaaatgagcccttgaacagtccta

SEQ ID NO: 5529977 - DNA, 25 bp, Homo sapien
aagagaccctgaggattctgtggag

SEQ ID NO: 5529978 - DNA, 25 bp, Homo sapien
tccctttcagagccagggtcactgc

SEQ ID NO: 5529979 - DNA, 25 bp, Homo sapien
cacagagggagcagccttctcttta

SEQ ID NO: 5529980 - DNA, 25 bp, Homo sapien
cttaggactgactgttcaaaggctc

SEQ ID NO: 5529981 - DNA, 25 bp, Homo sapien
gacaagccatgctgtctccagaccc

SEQ ID NO: 5529982 - DNA, 25 bp, Homo sapien
ttctgtggagtagtttgaaaaccat

SEQ ID NO: 5529983 - DNA, 25 bp, Homo sapien
cgcgacgagtgtgacacatacttca

SEQ ID NO: 5529984 - DNA, 25 bp, Homo sapien
gtcagttcgagttggagatcctgtc

SEQ ID NO: 5529985 - DNA, 25 bp, Homo sapien
gctcagggtccacgcctgtcatcgg

SEQ ID NO: 5529986 - DNA, 25 bp, Homo sapien
gggcgccccctaagcctcctgctcg

SEQ ID NO: 5529987 - DNA, 25 bp, Homo sapien
accgcaaccgcatcgtgctgccttt

SEQ ID NO: 5529988 - DNA, 25 bp, Homo sapien
agtgtgcctcaaggagtatcagtcc

SEQ ID NO: 5529989 - DNA, 25 bp, Homo sapien
tgctctgtgccctgcgagccaaggt

SEQ ID NO: 5529990 - DNA, 25 bp, Homo sapien
tcactcgggcatgatcaaccccagc

SEQ ID NO: 5529991 - DNA, 25 bp, Homo sapien
tcgggggcaacaccttcaacctcaa

SEQ ID NO: 5529992 - DNA, 25 bp, Homo sapien
ctttcagtttcgcctggccgaggtc

SEQ ID NO: 5529993 - DNA, 25 bp, Homo sapien
cctgtccatgcagaacgtgaacggg

SEQ ID NO: 5529994 - DNA, 25 bp, Homo sapien
gcatcacagtaagcatcaagagaac

SEQ ID NO: 5529995 - DNA, 25 bp, Homo sapien
taaaatacgtcacatactttgcatc

SEQ ID NO: 5529996 - DNA, 25 bp, Homo sapien
aagcatcaagagaactaattaacat

SEQ ID NO: 5529997 - DNA, 25 bp, Homo sapien
atgaatcgagcccactatgtatttc

SEQ ID NO: 5529998 - DNA, 25 bp, Homo sapien
cttgcctaatggttaacatacgaac

SEQ ID NO: 5529999 - DNA, 25 bp, Homo sapien
acaggtagaagtagacatatataac

SEQ ID NO: 5530000 - DNA, 25 bp, Homo sapien
cgggggctatgaatcgagcccacta

SEQ ID NO: 5530001 - DNA, 25 bp, Homo sapien
tatgaagagataagttatatatttc

SEQ ID NO: 5530002 - DNA, 25 bp, Homo sapien
tatgataacacaggtagaagtagac

SEQ ID NO: 5530003 - DNA, 25 bp, Homo sapien
cttacgaagaaagaagttatgtctc

SEQ ID NO: 5530004 - DNA, 25 bp, Homo sapien
cctccacctgtatcatcatgacacc

SEQ ID NO: 5530005 - DNA, 25 bp, Homo sapien
aaaagcagcactagtaagtagcagg

SEQ ID NO: 5530006 - DNA, 25 bp, Homo sapien
ctgacgtagatagcacttattcggt

SEQ ID NO: 5530007 - DNA, 25 bp, Homo sapien
tgtcttgtatttcagtagccacgtc

SEQ ID NO: 5530008 - DNA, 25 bp, Homo sapien
acttctgagccaggcgaaatagaaa

SEQ ID NO: 5530009 - DNA, 25 bp, Homo sapien
agtgaggtcgattaaattcggaaca

SEQ ID NO: 5530010 - DNA, 25 bp, Homo sapien
atcatagaagctgtaaaatgcaatc

SEQ ID NO: 5530011 - DNA, 25 bp, Homo sapien
tagtaagtagcaggccttgtcttgt

SEQ ID NO: 5530012 - DNA, 25 bp, Homo sapien
tatgcagagaaagacttaaaaatac

SEQ ID NO: 5530013 - DNA, 25 bp, Homo sapien
ttattcggttttgccaggagctgtg

SEQ ID NO: 5530014 - DNA, 25 bp, Homo sapien
tctcttgccaaattgctgcctgttc

SEQ ID NO: 5530015 - DNA, 25 bp, Homo sapien
gtagccacgtcaaaacttctgagcc

SEQ ID NO: 5530016 - DNA, 25 bp, Homo sapien
ctgaaacatataagaggtggcagca

SEQ ID NO: 5530017 - DNA, 25 bp, Homo sapien
gggcagagagtgtctgaaacatata

SEQ ID NO: 5530018 - DNA, 25 bp, Homo sapien
gataaataaacagcacatcacacac

SEQ ID NO: 5530019 - DNA, 25 bp, Homo sapien
acccttccagtcacaaggctgcccc

SEQ ID NO: 5530020 - DNA, 25 bp, Homo sapien
gctgtctggggctctgatatcccac

SEQ ID NO: 5530021 - DNA, 25 bp, Homo sapien
caggtagagaatgtgtctcccatat

SEQ ID NO: 5530022 - DNA, 25 bp, Homo sapien
tccagttaaaaatgagtctgggcag

SEQ ID NO: 5530023 - DNA, 25 bp, Homo sapien
atgcccccagttcccccgttagcac

SEQ ID NO: 5530024 - DNA, 25 bp, Homo sapien
gagaccctgacactccaggaaggcc

SEQ ID NO: 5530025 - DNA, 25 bp, Homo sapien
gacagccatgccgcaccctgaatgg

SEQ ID NO: 5530026 - DNA, 25 bp, Homo sapien
ccccatggacctcaagctgataaat

SEQ ID NO: 5530027 - DNA, 25 bp, Homo sapien
gccctacctgtgtcccgcctgcggc

SEQ ID NO: 5530028 - DNA, 25 bp, Homo sapien
ggtggtcggcgctcaccatccacca

SEQ ID NO: 5530029 - DNA, 25 bp, Homo sapien
gagccgcgccagttcatctgcaacg

SEQ ID NO: 5530030 - DNA, 25 bp, Homo sapien
ttcatctgcaacgagtgcggcaaga

SEQ ID NO: 5530031 - DNA, 25 bp, Homo sapien
ccagttcatctgcaacgagtgcggc

SEQ ID NO: 5530032 - DNA, 25 bp, Homo sapien
ggtcggcgctcaccatccaccagcg

SEQ ID NO: 5530033 - DNA, 25 bp, Homo sapien
ctggcgagccgcgccagttcatctg

SEQ ID NO: 5530034 - DNA, 25 bp, Homo sapien
agttcatctgcaacgagtgcggcaa

SEQ ID NO: 5530035 - DNA, 25 bp, Homo sapien
gcgccagttcatctgcaacgagtgc

SEQ ID NO: 5530036 - DNA, 25 bp, Homo sapien
gccgcttcagccagaagcccaacct

SEQ ID NO: 5530037 - DNA, 25 bp, Homo sapien
gagcggccctacctgtgtcccgcct

SEQ ID NO: 5530038 - DNA, 25 bp, Homo sapien
agggcttgaaacccttctgggcctc

SEQ ID NO: 5530039 - DNA, 25 bp, Homo sapien
ggatgccaggtgccacccaaatacc

SEQ ID NO: 5530040 - DNA, 25 bp, Homo sapien
agggtgcaggctagtttatcagctt

SEQ ID NO: 5530041 - DNA, 25 bp, Homo sapien
ccccaggagtgctgagtgcactctg

SEQ ID NO: 5530042 - DNA, 25 bp, Homo sapien
tttccataagccaaggatgggagga

SEQ ID NO: 5530043 - DNA, 25 bp, Homo sapien
attcgtcctcctcgggccattgctc

SEQ ID NO: 5530044 - DNA, 25 bp, Homo sapien
ctctgttgccagaaacaaaggatgc

SEQ ID NO: 5530045 - DNA, 25 bp, Homo sapien
ggtggtacagagagcaactttaaaa

SEQ ID NO: 5530046 - DNA, 25 bp, Homo sapien
tttgattccttaggaggcatggggg

SEQ ID NO: 5530047 - DNA, 25 bp, Homo sapien
cgggccattgctccaaccaagtgtc

SEQ ID NO: 5530048 - DNA, 25 bp, Homo sapien
tttccgatgatgtacctgaggttgg

SEQ ID NO: 5530049 - DNA, 25 bp, Homo sapien
gctaaattgtggccaccaaggaggg

SEQ ID NO: 5530050 - DNA, 25 bp, Homo sapien
tggagctggtcaccaccagatgaca

SEQ ID NO: 5530051 - DNA, 25 bp, Homo sapien
tgatgcccagatgttcggcaggatc

SEQ ID NO: 5530052 - DNA, 25 bp, Homo sapien
gcagtgcaggcagtagttttccatc

SEQ ID NO: 5530053 - DNA, 25 bp, Homo sapien
gagcccagagagactttaggacaat

SEQ ID NO: 5530054 - DNA, 25 bp, Homo sapien
caataataggaataaagcaaggccc

SEQ ID NO: 5530055 - DNA, 25 bp, Homo sapien
cagatgacatggctaaattgtggcc

SEQ ID NO: 5530056 - DNA, 25 bp, Homo sapien
ctggaatgcaatagagaatggctaa

SEQ ID NO: 5530057 - DNA, 25 bp, Homo sapien
tctggtgatcctggtagtcaagagg

SEQ ID NO: 5530058 - DNA, 25 bp, Homo sapien
taatcatgatccaagagcccagaga

SEQ ID NO: 5530059 - DNA, 25 bp, Homo sapien
aaggagaatgactttctaggctgcc

SEQ ID NO: 5530060 - DNA, 25 bp, Homo sapien
cccatatggaaatgcatgcctgctc

SEQ ID NO: 5530061 - DNA, 25 bp, Homo sapien
agggctgtctgctggctcactccca

SEQ ID NO: 5530062 - DNA, 25 bp, Homo sapien
ggtttttcctcatgaacaactcctc

SEQ ID NO: 5530063 - DNA, 25 bp, Homo sapien
cacacatctaaaatgagtcagattc

SEQ ID NO: 5530064 - DNA, 25 bp, Homo sapien
aaacgtgtgtacgatctgtagggct

SEQ ID NO: 5530065 - DNA, 25 bp, Homo sapien
ttcaagaatgagcttcactggcttt

SEQ ID NO: 5530066 - DNA, 25 bp, Homo sapien
aatttctagtatattggcataggtt

SEQ ID NO: 5530067 - DNA, 25 bp, Homo sapien
ttgccgcctgttccattgttagttt

SEQ ID NO: 5530068 - DNA, 25 bp, Homo sapien
ttggcataggtttgccgcctgttcc

SEQ ID NO: 5530069 - DNA, 25 bp, Homo sapien
agttttggaaaacgtgtgtacgatc

SEQ ID NO: 5530070 - DNA, 25 bp, Homo sapien
ttgtagttagaattcatgagtgtga

SEQ ID NO: 5530071 - DNA, 25 bp, Homo sapien
gtacaccggcaacatcgagatctcg

SEQ ID NO: 5530072 - DNA, 25 bp, Homo sapien
ctctggtacaccggcaacatcgaga

SEQ ID NO: 5530073 - DNA, 25 bp, Homo sapien
tggatcctctggtacaccggcaaca

SEQ ID NO: 5530074 - DNA, 25 bp, Homo sapien
gtgcagctgcccctacatccgtggc

SEQ ID NO: 5530075 - DNA, 25 bp, Homo sapien
gatcctctggtacaccggcaacatc

SEQ ID NO: 5530076 - DNA, 25 bp, Homo sapien
gctgcccctacatccgtggccagac

SEQ ID NO: 5530077 - DNA, 25 bp, Homo sapien
ccggcaacatcgagatctcgcgcca

SEQ ID NO: 5530078 - DNA, 25 bp, Homo sapien
acctgctcatctactcgggcgcgct

SEQ ID NO: 5530079 - DNA, 25 bp, Homo sapien
tgagatgtgcagctgcccctacatc

SEQ ID NO: 5530080 - DNA, 25 bp, Homo sapien
caacatcgagatctcgcgccaggag

SEQ ID NO: 5530081 - DNA, 25 bp, Homo sapien
gacctgctcatctactcgggcgcgc

SEQ ID NO: 5530082 - DNA, 25 bp, Homo sapien
atgtgcattcaaaagaggcccagga

SEQ ID NO: 5530083 - DNA, 25 bp, Homo sapien
atgtgagaagcgctctaacagcatg

SEQ ID NO: 5530084 - DNA, 25 bp, Homo sapien
catagccggaacaatgaataccgac

SEQ ID NO: 5530085 - DNA, 25 bp, Homo sapien
agtgggaaaaatggaatcataaatg

SEQ ID NO: 5530086 - DNA, 25 bp, Homo sapien
gtctctgtggatgtgcctacggaat

SEQ ID NO: 5530087 - DNA, 25 bp, Homo sapien
accccaactccaaggcccaaggatc

SEQ ID NO: 5530088 - DNA, 25 bp, Homo sapien
aggaaccagtggaccagactgttcc

SEQ ID NO: 5530089 - DNA, 25 bp, Homo sapien
aggatgcagatgaggtgattaattt

SEQ ID NO: 5530090 - DNA, 25 bp, Homo sapien
atgaataccgacgaagtagcaggtg

SEQ ID NO: 5530091 - DNA, 25 bp, Homo sapien
ttgagaacctacagtcagtgggaaa

SEQ ID NO: 5530092 - DNA, 25 bp, Homo sapien
gattaatttgcagccaggagaagtt

SEQ ID NO: 5530093 - DNA, 25 bp, Homo sapien
ggcaccgggtgcctctcacgggggt

SEQ ID NO: 5530094 - DNA, 25 bp, Homo sapien
acccccgtgagaggcacccggtgcc

SEQ ID NO: 5530095 - DNA, 25 bp, Homo sapien
gtcaaatatggaggctgagtccaat

SEQ ID NO: 5530096 - DNA, 25 bp, Homo sapien
aattacaagaggtatttggacaaaa

SEQ ID NO: 5530097 - DNA, 25 bp, Homo sapien
tgtcccatcccttggtgcagttacc

SEQ ID NO: 5530098 - DNA, 25 bp, Homo sapien
tgcaaaagacatactgtaggcagtt

SEQ ID NO: 5530099 - DNA, 25 bp, Homo sapien
taaacagctaaactctgggagaggg

SEQ ID NO: 5530100 - DNA, 25 bp, Homo sapien
taggcagttatagtacagaaaatac

SEQ ID NO: 5530101 - DNA, 25 bp, Homo sapien
ggagaggacatatcttagtgaaaat

SEQ ID NO: 5530102 - DNA, 25 bp, Homo sapien
gcggcaggcttattgcaagagactg

SEQ ID NO: 5530103 - DNA, 25 bp, Homo sapien
atgcagatgagaacaatataaacaa

SEQ ID NO: 5530104 - DNA, 25 bp, Homo sapien
acagactttgattctgcggcaggct

SEQ ID NO: 5530105 - DNA, 25 bp, Homo sapien
aggaagctaccaacgtcacaatgat

SEQ ID NO: 5530106 - DNA, 25 bp, Homo sapien
ttacatgttaggaatgagacagcct

SEQ ID NO: 5530107 - DNA, 25 bp, Homo sapien
tatatgaattctaagcaaggtgttt

SEQ ID NO: 5530108 - DNA, 25 bp, Homo sapien
actctatgacacaaataaggcagac

SEQ ID NO: 5530109 - DNA, 25 bp, Homo sapien
ctcatagctagaaggaaatcatttc

SEQ ID NO: 5530110 - DNA, 25 bp, Homo sapien
ggtgtttattccatgagagggtatc

SEQ ID NO: 5530111 - DNA, 25 bp, Homo sapien
agcctggcaagctcaatttgactat

SEQ ID NO: 5530112 - DNA, 25 bp, Homo sapien
cgcagaggctagacttaaacgtttt

SEQ ID NO: 5530113 - DNA, 25 bp, Homo sapien
gactagagagcagttataaggttac

SEQ ID NO: 5530114 - DNA, 25 bp, Homo sapien
gagcagacagaacagcattagtgtt

SEQ ID NO: 5530115 - DNA, 25 bp, Homo sapien
tacctgtctaccacgcagaggctag

SEQ ID NO: 5530116 - DNA, 25 bp, Homo sapien
tcaaccaaattagaggaggactgag

SEQ ID NO: 5530117 - DNA, 25 bp, Homo sapien
taataataactgaaaaccgtatctt

SEQ ID NO: 5530118 - DNA, 25 bp, Homo sapien
aagatacggttttcagttattatta

SEQ ID NO: 5530119 - DNA, 25 bp, Homo sapien
acctactagcagatgcccggctgaa

SEQ ID NO: 5530120 - DNA, 25 bp, Homo sapien
gcaggccacgtgccccaattgtcgt

SEQ ID NO: 5530121 - DNA, 25 bp, Homo sapien
ggctctactcggtgctgtgctgcac

SEQ ID NO: 5530122 - DNA, 25 bp, Homo sapien
tcagtaagagcctctgctgccggaa

SEQ ID NO: 5530123 - DNA, 25 bp, Homo sapien
cctgcgccagtttccccgctccctc

SEQ ID NO: 5530124 - DNA, 25 bp, Homo sapien
aaggcctccgtgtaccagtgtacta

SEQ ID NO: 5530125 - DNA, 25 bp, Homo sapien
ggccccttccatgagctgacggtgc

SEQ ID NO: 5530126 - DNA, 25 bp, Homo sapien
ttgtcgttgtgagatcagtaagagc

SEQ ID NO: 5530127 - DNA, 25 bp, Homo sapien
agtgtggcttctgcctgcgccagtt

SEQ ID NO: 5530128 - DNA, 25 bp, Homo sapien
cgcccggcagctacagctgcaggag

SEQ ID NO: 5530129 - DNA, 25 bp, Homo sapien
atggtcacttgatgtgcgctggctg

SEQ ID NO: 5530130 - DNA, 25 bp, Homo sapien
actatatcacaacatcagaggcacc

SEQ ID NO: 5530131 - DNA, 25 bp, Homo sapien
tgaaagactgctaacaggtacaaac

SEQ ID NO: 5530132 - DNA, 25 bp, Homo sapien
aggacagaggtttacacaggtttta

SEQ ID NO: 5530133 - DNA, 25 bp, Homo sapien
caagcaccagcttagcacagtattt

SEQ ID NO: 5530134 - DNA, 25 bp, Homo sapien
tgaggattatataaatatgtgagac

SEQ ID NO: 5530135 - DNA, 25 bp, Homo sapien
gtaatatgtatccaagcaccagctt

SEQ ID NO: 5530136 - DNA, 25 bp, Homo sapien
ccaaactgaaagactgctaacaggt

SEQ ID NO: 5530137 - DNA, 25 bp, Homo sapien
taaaacacaagatgctgtaatatgt

SEQ ID NO: 5530138 - DNA, 25 bp, Homo sapien
tatggttcataaggacagaggttta

SEQ ID NO: 5530139 - DNA, 25 bp, Homo sapien
aggtacaaactgaactgaatatttc

SEQ ID NO: 5530140 - DNA, 25 bp, Homo sapien
cagaggcaccatttttgccacagaa

SEQ ID NO: 5530141 - DNA, 25 bp, Homo sapien
ttggatgatgaacaagtcacccaga

SEQ ID NO: 5530142 - DNA, 25 bp, Homo sapien
gacgttgaaacactggctgtgcatt

SEQ ID NO: 5530143 - DNA, 25 bp, Homo sapien
tgcaccgcattagacagtgggctca

SEQ ID NO: 5530144 - DNA, 25 bp, Homo sapien
gtgggctcacacttgattaggatcg

SEQ ID NO: 5530145 - DNA, 25 bp, Homo sapien
gtgtgggaattccagcctcgtccta

SEQ ID NO: 5530146 - DNA, 25 bp, Homo sapien
tttcagaggactgaggtgatgatta

SEQ ID NO: 5530147 - DNA, 25 bp, Homo sapien
tgaggtgatgattaagacccgtgca

SEQ ID NO: 5530148 - DNA, 25 bp, Homo sapien
tgtgcattagtccaggtgtgggaat

SEQ ID NO: 5530149 - DNA, 25 bp, Homo sapien
aaacatttctgggttggcgacgttg

SEQ ID NO: 5530150 - DNA, 25 bp, Homo sapien
gtttagtctcaggcaaggacttgcc

SEQ ID NO: 5530151 - DNA, 25 bp, Homo sapien
agaaagggctgaaaattagcatgac

SEQ ID NO: 5530152 - DNA, 25 bp, Homo sapien
tgtttatatgtgaatagaggcgcat

SEQ ID NO: 5530153 - DNA, 25 bp, Homo sapien
gatgcctagaaaagtgtctgggagg

SEQ ID NO: 5530154 - DNA, 25 bp, Homo sapien
aaaaagagtgaaagatacatatgcc

SEQ ID NO: 5530155 - DNA, 25 bp, Homo sapien
aaggtattaaagatccactaggtga

SEQ ID NO: 5530156 - DNA, 25 bp, Homo sapien
gcaccaagcccaggttgagctttta

SEQ ID NO: 5530157 - DNA, 25 bp, Homo sapien
gggaatgaaaccagattggccacaa

SEQ ID NO: 5530158 - DNA, 25 bp, Homo sapien
tgtttttgctttggaatggtctgga

SEQ ID NO: 5530159 - DNA, 25 bp, Homo sapien
tgccatttaagggaagcacaggaaa

SEQ ID NO: 5530160 - DNA, 25 bp, Homo sapien
aagaatggggactttcactttttgc

SEQ ID NO: 5530161 - DNA, 25 bp, Homo sapien
gaatagaggcgcatagatgcctaga

SEQ ID NO: 5530162 - DNA, 25 bp, Homo sapien
gagatggtgttttgctaagttgccc

SEQ ID NO: 5530163 - DNA, 25 bp, Homo sapien
atccagacctaccgcgatgctgtgg

SEQ ID NO: 5530164 - DNA, 25 bp, Homo sapien
aacaacctgcaactcaagatccgtc

SEQ ID NO: 5530165 - DNA, 25 bp, Homo sapien
caactcaagatccgtctgagcggcg

SEQ ID NO: 5530166 - DNA, 25 bp, Homo sapien
tggactccttaggtgaagccgtgga

SEQ ID NO: 5530167 - DNA, 25 bp, Homo sapien
acccactttgtcgccaacaacctgc

SEQ ID NO: 5530168 - DNA, 25 bp, Homo sapien
cccccgccttctgcccctgcgcggc

SEQ ID NO: 5530169 - DNA, 25 bp, Homo sapien
accgtctgcttcgcggtctgggtgg

SEQ ID NO: 5530170 - DNA, 25 bp, Homo sapien
cgccacggcgaccttacccactttg

SEQ ID NO: 5530171 - DNA, 25 bp, Homo sapien
tgggttgcatccagacctaccgcga

SEQ ID NO: 5530172 - DNA, 25 bp, Homo sapien
ccgcgatgctgtggactccttaggt

SEQ ID NO: 5530173 - DNA, 25 bp, Homo sapien
gggtggaccgtctgcttcgcggtct

SEQ ID NO: 5530174 - DNA, 25 bp, Homo sapien
ttaataatgctgctgctgtacttac

SEQ ID NO: 5530175 - DNA, 25 bp, Homo sapien
tctcacacacacacataacatgtac

SEQ ID NO: 5530176 - DNA, 25 bp, Homo sapien
tgaaatgtgtttgtgtgtgtctctc

SEQ ID NO: 5530177 - DNA, 25 bp, Homo sapien
ctatatgaatagaaatatccacttt

SEQ ID NO: 5530178 - DNA, 25 bp, Homo sapien
atggttttagcatgtagataagtac

SEQ ID NO: 5530179 - DNA, 25 bp, Homo sapien
tgtacatacctgaaactcatactgc

SEQ ID NO: 5530180 - DNA, 25 bp, Homo sapien
gtagataagtacatgagagtaaatc

SEQ ID NO: 5530181 - DNA, 25 bp, Homo sapien
agtacatgagagtaaatcacatttc

SEQ ID NO: 5530182 - DNA, 25 bp, Homo sapien
tgaatattgagcttaaacataaaac

SEQ ID NO: 5530183 - DNA, 25 bp, Homo sapien
tcaatcaccatagaaatacagtatt

SEQ ID NO: 5530184 - DNA, 25 bp, Homo sapien
ttttattcagtaaaagtgccttggc

SEQ ID NO: 5530185 - DNA, 25 bp, Homo sapien
tacaagaagaagaagcacgtcttta

SEQ ID NO: 5530186 - DNA, 25 bp, Homo sapien
ctggaacaacctgtactgtgtgctc

SEQ ID NO: 5530187 - DNA, 25 bp, Homo sapien
atggtgaagctataggaattgactc

SEQ ID NO: 5530188 - DNA, 25 bp, Homo sapien
ttgatttggcattagtggcagggca

SEQ ID NO: 5530189 - DNA, 25 bp, Homo sapien
gaggtgtctccatgacaggaaaccc

SEQ ID NO: 5530190 - DNA, 25 bp, Homo sapien
ggcctttgaaagctcgggttgatgg

SEQ ID NO: 5530191 - DNA, 25 bp, Homo sapien
tttcaaatcaaagaggctgatggtc

SEQ ID NO: 5530192 - DNA, 25 bp, Homo sapien
cacgtctttaagctgaggtgaggcc

SEQ ID NO: 5530193 - DNA, 25 bp, Homo sapien
gccctgagacatgccatctgtgaga

SEQ ID NO: 5530194 - DNA, 25 bp, Homo sapien
gagataccatatcaggatgtgggtg

SEQ ID NO: 5530195 - DNA, 25 bp, Homo sapien
caggaacagtgagctaaccttctac

SEQ ID NO: 5530196 - DNA, 25 bp, Homo sapien
ctgtaaggtttgttcataaggaaaa

SEQ ID NO: 5530197 - DNA, 25 bp, Homo sapien
agcagctaggaacaaaattaacatt

SEQ ID NO: 5530198 - DNA, 25 bp, Homo sapien
atattagaatgatttgcaacatatt

SEQ ID NO: 5530199 - DNA, 25 bp, Homo sapien
attatcaggtagaaaaaaagcaaaa

SEQ ID NO: 5530200 - DNA, 25 bp, Homo sapien
cttgttaaagagattatcaggtaga

SEQ ID NO: 5530201 - DNA, 25 bp, Homo sapien
tgaaaattagaatacttttggcaga

SEQ ID NO: 5530202 - DNA, 25 bp, Homo sapien
ttggcagaaaaattagcagctagga

SEQ ID NO: 5530203 - DNA, 25 bp, Homo sapien
taacagttctgagtacaaataaatt

SEQ ID NO: 5530204 - DNA, 25 bp, Homo sapien
tacttttggcagaaaaattagcagc

SEQ ID NO: 5530205 - DNA, 25 bp, Homo sapien
atgacgtgaataaaaaacttaacta

SEQ ID NO: 5530206 - DNA, 25 bp, Homo sapien
tatagtaaatggttatacatatcag

SEQ ID NO: 5530207 - DNA, 25 bp, Homo sapien
caccacctagaccaagaaaagacat

SEQ ID NO: 5530208 - DNA, 25 bp, Homo sapien
gaactcaatgtggctaaggagaaag

SEQ ID NO: 5530209 - DNA, 25 bp, Homo sapien
aaggaagtgttaagcctacgaacta

SEQ ID NO: 5530210 - DNA, 25 bp, Homo sapien
agaggcattccaaggagaaagaaaa

SEQ ID NO: 5530211 - DNA, 25 bp, Homo sapien
aacatgatatgtgagtagtatgatt

SEQ ID NO: 5530212 - DNA, 25 bp, Homo sapien
atctaaggaatgaagactttgaaat

SEQ ID NO: 5530213 - DNA, 25 bp, Homo sapien
aagaaaagacataagaccaactaat

SEQ ID NO: 5530214 - DNA, 25 bp, Homo sapien
aacaacaataacagagaaaatatac

SEQ ID NO: 5530215 - DNA, 25 bp, Homo sapien
attcagttaggaggtccaaaaggtg

SEQ ID NO: 5530216 - DNA, 25 bp, Homo sapien
ccaactaatgcatatcccaagaggc

SEQ ID NO: 5530217 - DNA, 25 bp, Homo sapien
gctggagcctctaaaagtgccccaa

SEQ ID NO: 5530218 - DNA, 25 bp, Homo sapien
actctgagtgcattatccgtgtttg

SEQ ID NO: 5530219 - DNA, 25 bp, Homo sapien
ccttagtaaactggtaaagactgta

SEQ ID NO: 5530220 - DNA, 25 bp, Homo sapien
cagttatcagtatcaaggttggcaa

SEQ ID NO: 5530221 - DNA, 25 bp, Homo sapien
tacaaaaaatgtactctgagtgcat

SEQ ID NO: 5530222 - DNA, 25 bp, Homo sapien
tgattccttggcttactaaactgta

SEQ ID NO: 5530223 - DNA, 25 bp, Homo sapien
aaaaacacctgaaacatcttaacta

SEQ ID NO: 5530224 - DNA, 25 bp, Homo sapien
ataaagtagtaagcaataaaatcca

SEQ ID NO: 5530225 - DNA, 25 bp, Homo sapien
actggtaaagactgtaagttgatat

SEQ ID NO: 5530226 - DNA, 25 bp, Homo sapien
aattcatcaagaaaatccaagcaaa

SEQ ID NO: 5530227 - DNA, 25 bp, Homo sapien
taagcaataaaatccacatccccac

SEQ ID NO: 5530228 - DNA, 25 bp, Homo sapien
agcaaatttaatcagaaaaaacacc

SEQ ID NO: 5530229 - DNA, 25 bp, Homo sapien
aaggagaaaagttattcaaaatgat

SEQ ID NO: 5530230 - DNA, 25 bp, Homo sapien
aatatggaattaataagctctcgca

SEQ ID NO: 5530231 - DNA, 25 bp, Homo sapien
gcgtcaacatgcattcgtgaaagtc

SEQ ID NO: 5530232 - DNA, 25 bp, Homo sapien
ggtgaactgaaagcgtcaacatgca

SEQ ID NO: 5530233 - DNA, 25 bp, Homo sapien
taaacatgattaggcaagtatattt

SEQ ID NO: 5530234 - DNA, 25 bp, Homo sapien
cccagggcaggcctcctgtcctggg

SEQ ID NO: 5530235 - DNA, 25 bp, Homo sapien
catgcattcgtgaaagtctgggtgc

SEQ ID NO: 5530236 - DNA, 25 bp, Homo sapien
caaaatcacgtgtgctgggttctgc

SEQ ID NO: 5530237 - DNA, 25 bp, Homo sapien
aggctgctggcatgtcacacaaaat

SEQ ID NO: 5530238 - DNA, 25 bp, Homo sapien
agctctcgcattagaagaaaatagg

SEQ ID NO: 5530239 - DNA, 25 bp, Homo sapien
ctaagagtgaagtacattttgttac

SEQ ID NO: 5530240 - DNA, 25 bp, Homo sapien
cagaagctccctgtgagcacagagc

SEQ ID NO: 5530241 - DNA, 25 bp, Homo sapien
tgtagcacaggatgcggtatttcca

SEQ ID NO: 5530242 - DNA, 25 bp, Homo sapien
gtcaccctgtggagaatgcactccc

SEQ ID NO: 5530243 - DNA, 25 bp, Homo sapien
gctgctcagctctcaaagccctgcc

SEQ ID NO: 5530244 - DNA, 25 bp, Homo sapien
gtcgttgccccttggcacccgccga

SEQ ID NO: 5530245 - DNA, 25 bp, Homo sapien
cagccccgttcccaccctccgatca

SEQ ID NO: 5530246 - DNA, 25 bp, Homo sapien
gccccatcccaaagtgagcattttc

SEQ ID NO: 5530247 - DNA, 25 bp, Homo sapien
cgctcctcctggagcgcaacggggt

SEQ ID NO: 5530248 - DNA, 25 bp, Homo sapien
gatcagccaggaacccgctgcttgt

SEQ ID NO: 5530249 - DNA, 25 bp, Homo sapien
tcctgccttggcttgggaagcctta

SEQ ID NO: 5530250 - DNA, 25 bp, Homo sapien
gccgacactgctagtgccccatccc

SEQ ID NO: 5530251 - DNA, 25 bp, Homo sapien
gggtggttcaaggaagcttctacat

SEQ ID NO: 5530252 - DNA, 25 bp, Homo sapien
tctgagtgatctaagttggactaaa

SEQ ID NO: 5530253 - DNA, 25 bp, Homo sapien
cattaaccaggaaatacaagctttt

SEQ ID NO: 5530254 - DNA, 25 bp, Homo sapien
cacccaagtgacacctgcttcgctt

SEQ ID NO: 5530255 - DNA, 25 bp, Homo sapien
tggactaaacaggaggcagtctata

SEQ ID NO: 5530256 - DNA, 25 bp, Homo sapien
ggcagtctatagggaatgtgtattt

SEQ ID NO: 5530257 - DNA, 25 bp, Homo sapien
caaaagctaaacattaaccaggaaa

SEQ ID NO: 5530258 - DNA, 25 bp, Homo sapien
acaggtaatgacactactagttaac

SEQ ID NO: 5530259 - DNA, 25 bp, Homo sapien
gatcccaggaaggatctgagtgatc

SEQ ID NO: 5530260 - DNA, 25 bp, Homo sapien
cttaggtgtgtttaaatagcattac

SEQ ID NO: 5530261 - DNA, 25 bp, Homo sapien
tgtatttttcaagtaggagcatttc

SEQ ID NO: 5530262 - DNA, 25 bp, Homo sapien
aatacccagtggctgggaacctgag

SEQ ID NO: 5530263 - DNA, 25 bp, Homo sapien
tgagagggtctggagatacctcttc

SEQ ID NO: 5530264 - DNA, 25 bp, Homo sapien
tctgccagttaagagcccgtcctga

SEQ ID NO: 5530265 - DNA, 25 bp, Homo sapien
cggctcggcaggccatgtcttttgg

SEQ ID NO: 5530266 - DNA, 25 bp, Homo sapien
tgtcaagagttaagcctcaggaggg

SEQ ID NO: 5530267 - DNA, 25 bp, Homo sapien
ggccaggtgactttcagcacacgca

SEQ ID NO: 5530268 - DNA, 25 bp, Homo sapien
cacgcattcgagtgtgcacgtgcac

SEQ ID NO: 5530269 - DNA, 25 bp, Homo sapien
gagaaaactactcaggggcatactc

SEQ ID NO: 5530270 - DNA, 25 bp, Homo sapien
gagctgctatgggctgcgtcttaga

SEQ ID NO: 5530271 - DNA, 25 bp, Homo sapien
tgaataaaggctttgaggttgcctc

SEQ ID NO: 5530272 - DNA, 25 bp, Homo sapien
ggaaaaagcgcatgcacttgtccca

SEQ ID NO: 5530273 - DNA, 25 bp, Homo sapien
actcggacgaggtgcacttccgtcg

SEQ ID NO: 5530274 - DNA, 25 bp, Homo sapien
cgacggaagtgcacctcgtccgagt

SEQ ID NO: 5530275 - DNA, 25 bp, Homo sapien
tggaggtccgagatgcttctcttcc

SEQ ID NO: 5530276 - DNA, 25 bp, Homo sapien
ttctacagagaaattgagccaggat

SEQ ID NO: 5530277 - DNA, 25 bp, Homo sapien
tcatctatggacagaggatttgtgc

SEQ ID NO: 5530278 - DNA, 25 bp, Homo sapien
gagagaggtaccagtattatgccca

SEQ ID NO: 5530279 - DNA, 25 bp, Homo sapien
agagaaggagtacataaccacccaa

SEQ ID NO: 5530280 - DNA, 25 bp, Homo sapien
tagagtgaatagccatgaccctgag

SEQ ID NO: 5530281 - DNA, 25 bp, Homo sapien
cccaaagtcactagaagaaggtgga

SEQ ID NO: 5530282 - DNA, 25 bp, Homo sapien
atcccagcatgccggtttacaaagc

SEQ ID NO: 5530283 - DNA, 25 bp, Homo sapien
aaaacaaccatatgagagaggtacc

SEQ ID NO: 5530284 - DNA, 25 bp, Homo sapien
gaagggtgaaggaattcatctatgg

SEQ ID NO: 5530285 - DNA, 25 bp, Homo sapien
cgtaacaatagtatgagacaggtat

SEQ ID NO: 5530286 - DNA, 25 bp, Homo sapien
atcagaccgtttgtgggaaaattgt

SEQ ID NO: 5530287 - DNA, 25 bp, Homo sapien
tttcatggagttaaatcagaccgtt

SEQ ID NO: 5530288 - DNA, 25 bp, Homo sapien
actacacagctggtaaaatgtcgtt

SEQ ID NO: 5530289 - DNA, 25 bp, Homo sapien
aatggatgagaatgcttggtgctaa

SEQ ID NO: 5530290 - DNA, 25 bp, Homo sapien
aaataatagaagtgtacaattgtac

SEQ ID NO: 5530291 - DNA, 25 bp, Homo sapien
atctccacgcccctgggatgtatac

SEQ ID NO: 5530292 - DNA, 25 bp, Homo sapien
taaggcagtctaaatagaggatttc

SEQ ID NO: 5530293 - DNA, 25 bp, Homo sapien
cacccccacctgaaacaatagccct

SEQ ID NO: 5530294 - DNA, 25 bp, Homo sapien
acagaaatatgtacaagatcgcatc

SEQ ID NO: 5530295 - DNA, 25 bp, Homo sapien
tttgggttttcagctcaggttacag

SEQ ID NO: 5530296 - DNA, 25 bp, Homo sapien
aaggaaaggatgatgatttgttgtt

SEQ ID NO: 5530297 - DNA, 25 bp, Homo sapien
atagctttgtattaagtgcagtact

SEQ ID NO: 5530298 - DNA, 25 bp, Homo sapien
tctgcagatggataatctggttgag

SEQ ID NO: 5530299 - DNA, 25 bp, Homo sapien
acaaaaagctaccaacaagaagtta

SEQ ID NO: 5530300 - DNA, 25 bp, Homo sapien
tcacaaatagatcacaaaaccaaga

SEQ ID NO: 5530301 - DNA, 25 bp, Homo sapien
tccctgatgtcaaatgtacaaaatt

SEQ ID NO: 5530302 - DNA, 25 bp, Homo sapien
caagaagttaatggtgaagaaaaat

SEQ ID NO: 5530303 - DNA, 25 bp, Homo sapien
ttaggtcactaaagcatgtgtaccc

SEQ ID NO: 5530304 - DNA, 25 bp, Homo sapien
caaaggttaagaactcaaaggttga

SEQ ID NO: 5530305 - DNA, 25 bp, Homo sapien
ataacacaattgagaaatagctttg

SEQ ID NO: 5530306 - DNA, 25 bp, Homo sapien
ttactgtaaaccaagacattcccac

SEQ ID NO: 5530307 - DNA, 25 bp, Homo sapien
tctggttgagataagcattgccatc

SEQ ID NO: 5530308 - DNA, 25 bp, Homo sapien
ttccccaggggaaatcctgctccta

SEQ ID NO: 5530309 - DNA, 25 bp, Homo sapien
gaagatgtcccaggagaacttttcc

SEQ ID NO: 5530310 - DNA, 25 bp, Homo sapien
agcctacgccactcactgcctggtg

SEQ ID NO: 5530311 - DNA, 25 bp, Homo sapien
gcacccaccacctgagcaccctgct

SEQ ID NO: 5530312 - DNA, 25 bp, Homo sapien
aaataggtaccactatggcctctat

SEQ ID NO: 5530313 - DNA, 25 bp, Homo sapien
ggtcatcaaaacggcccagtggcct

SEQ ID NO: 5530314 - DNA, 25 bp, Homo sapien
ggctccagagcctacgccactcact

SEQ ID NO: 5530315 - DNA, 25 bp, Homo sapien
ggctgagtggtttgtccacagtctc

SEQ ID NO: 5530316 - DNA, 25 bp, Homo sapien
tctggtgccagctatgtctggggtg

SEQ ID NO: 5530317 - DNA, 25 bp, Homo sapien
cttagtcttcaaaataggtaccact

SEQ ID NO: 5530318 - DNA, 25 bp, Homo sapien
gtccacagtctcacagctagcaagt

SEQ ID NO: 5530319 - DNA, 25 bp, Homo sapien
taccttcctggccgacaggtgcttc

SEQ ID NO: 5530320 - DNA, 25 bp, Homo sapien
ccccatccctgggagtcagggtgca

SEQ ID NO: 5530321 - DNA, 25 bp, Homo sapien
cattgtgggctgagtgctctttgag

SEQ ID NO: 5530322 - DNA, 25 bp, Homo sapien
ccatgccccttgggtcctgtctgca

SEQ ID NO: 5530323 - DNA, 25 bp, Homo sapien
gcccgcaaaggtttccaagaatctc

SEQ ID NO: 5530324 - DNA, 25 bp, Homo sapien
taagaatgacttatttatggaccct

SEQ ID NO: 5530325 - DNA, 25 bp, Homo sapien
tctgttaataagagtgtgacgctgg

SEQ ID NO: 5530326 - DNA, 25 bp, Homo sapien
caccctcggagtgtccccgtgggtg

SEQ ID NO: 5530327 - DNA, 25 bp, Homo sapien
ggtctccgaaggtggttattgcatc

SEQ ID NO: 5530328 - DNA, 25 bp, Homo sapien
tctgcgtcacattgtgggctgagtg

SEQ ID NO: 5530329 - DNA, 25 bp, Homo sapien
gggtcctgtctgcatggtccatttc

SEQ ID NO: 5530330 - DNA, 25 bp, Homo sapien
gtagcattgagtttgaaatcaggaa

SEQ ID NO: 5530331 - DNA, 25 bp, Homo sapien
atgtgcagtgagtaatatccttgaa

SEQ ID NO: 5530332 - DNA, 25 bp, Homo sapien
tagtatttgcagagaaagaattcac

SEQ ID NO: 5530333 - DNA, 25 bp, Homo sapien
tgttagagctccacagtaatacagc

SEQ ID NO: 5530334 - DNA, 25 bp, Homo sapien
actttaagacagatgatggagattt

SEQ ID NO: 5530335 - DNA, 25 bp, Homo sapien
gcagagggacttcgtgcatgtatca

SEQ ID NO: 5530336 - DNA, 25 bp, Homo sapien
aaggtgtgatgtattcaaagtgctc

SEQ ID NO: 5530337 - DNA, 25 bp, Homo sapien
atgatggagatttatgatgtgcagt

SEQ ID NO: 5530338 - DNA, 25 bp, Homo sapien
caggaaacaaaccatttcaggggaa

SEQ ID NO: 5530339 - DNA, 25 bp, Homo sapien
gggatgttttgatggagtgtgttaa

SEQ ID NO: 5530340 - DNA, 25 bp, Homo sapien
aatacagctcagtaataaatgaact

SEQ ID NO: 5530341 - DNA, 25 bp, Homo sapien
acaaaatctgtaaggcactggttcc

SEQ ID NO: 5530342 - DNA, 25 bp, Homo sapien
ttacaagaggaatcacaattgctaa

SEQ ID NO: 5530343 - DNA, 25 bp, Homo sapien
aatgaatatgtatgactgtaggaac

SEQ ID NO: 5530344 - DNA, 25 bp, Homo sapien
tctcagcgtgttttctaagaagctt

SEQ ID NO: 5530345 - DNA, 25 bp, Homo sapien
tctaaggcaatgtaactactgaaca

SEQ ID NO: 5530346 - DNA, 25 bp, Homo sapien
aggggaatgttaaaacaaagccata

SEQ ID NO: 5530347 - DNA, 25 bp, Homo sapien
tctcagtgccgttccacccacaaac

SEQ ID NO: 5530348 - DNA, 25 bp, Homo sapien
aaagaagaatcagatcagaccaaca

SEQ ID NO: 5530349 - DNA, 25 bp, Homo sapien
cactgctatgtgtctgggttttcta

SEQ ID NO: 5530350 - DNA, 25 bp, Homo sapien
tgaaacagacaacgaaacccctata

SEQ ID NO: 5530351 - DNA, 25 bp, Homo sapien
gatcagaccaacaacataaaacttc

SEQ ID NO: 5530352 - DNA, 25 bp, Homo sapien
ttattagtagctcaaggaaaggcag

SEQ ID NO: 5530353 - DNA, 25 bp, Homo sapien
gtggtaaaatataaagatatgcatt

SEQ ID NO: 5530354 - DNA, 25 bp, Homo sapien
tccacactccaagaatgaggggact

SEQ ID NO: 5530355 - DNA, 25 bp, Homo sapien
gcaagtcccctgtctccacactcca

SEQ ID NO: 5530356 - DNA, 25 bp, Homo sapien
atcattgtaagaggactggttgaga

SEQ ID NO: 5530357 - DNA, 25 bp, Homo sapien
tttggggacatagtcaccagattat

SEQ ID NO: 5530358 - DNA, 25 bp, Homo sapien
cagagggatacatacagcaagatcc

SEQ ID NO: 5530359 - DNA, 25 bp, Homo sapien
aacatgcaaaacaagattatatatc

SEQ ID NO: 5530360 - DNA, 25 bp, Homo sapien
aagatatgcattttggggacatagt

SEQ ID NO: 5530361 - DNA, 25 bp, Homo sapien
cagggtgcttggactgtacctatga

SEQ ID NO: 5530362 - DNA, 25 bp, Homo sapien
aagctggctggtggtatccaatgtt

SEQ ID NO: 5530363 - DNA, 25 bp, Homo sapien
caagaccctaagcgtactgtgatgg

SEQ ID NO: 5530364 - DNA, 25 bp, Homo sapien
tcgtgcccaagctcccagaagataa

SEQ ID NO: 5530365 - DNA, 25 bp, Homo sapien
gtcaacttgactgggtcacagggtg

SEQ ID NO: 5530366 - DNA, 25 bp, Homo sapien
gaattagacagtagaaagaaccaac

SEQ ID NO: 5530367 - DNA, 25 bp, Homo sapien
tatattggggtgcatacaaaaaaac

SEQ ID NO: 5530368 - DNA, 25 bp, Homo sapien
aagaatttggcgtttgtttgcggca

SEQ ID NO: 5530369 - DNA, 25 bp, Homo sapien
tctgaatcaataagcaggaggtggg

SEQ ID NO: 5530370 - DNA, 25 bp, Homo sapien
atgctgctggttcacaggccacact

SEQ ID NO: 5530371 - DNA, 25 bp, Homo sapien
aagaaccaactatgtgctccaagcc

SEQ ID NO: 5530372 - DNA, 25 bp, Homo sapien
attgttcgtgggttcatgcatatgc

SEQ ID NO: 5530373 - DNA, 25 bp, Homo sapien
ggccacactccgagtgacaagaccc

SEQ ID NO: 5530374 - DNA, 25 bp, Homo sapien
agctagctcaagccaagtccagcgg

SEQ ID NO: 5530375 - DNA, 25 bp, Homo sapien
ctgctcagctagctcaagccaagtc

SEQ ID NO: 5530376 - DNA, 25 bp, Homo sapien
gaagggcaaggtccctgtcacctac

SEQ ID NO: 5530377 - DNA, 25 bp, Homo sapien
tgtcacctacttggaactgctcagc

SEQ ID NO: 5530378 - DNA, 25 bp, Homo sapien
tgctctctagccaataaaccgtcct

SEQ ID NO: 5530379 - DNA, 25 bp, Homo sapien
cggccgcagtcttcacctctccaca

SEQ ID NO: 5530380 - DNA, 25 bp, Homo sapien
ttctgcctgcgtttgctctctagcc

SEQ ID NO: 5530381 - DNA, 25 bp, Homo sapien
tagccaataaaccgtccttgtgtgc

SEQ ID NO: 5530382 - DNA, 25 bp, Homo sapien
gaactgctcagctagctcaagccaa

SEQ ID NO: 5530383 - DNA, 25 bp, Homo sapien
ctacttggaactgctcagctagctc

SEQ ID NO: 5530384 - DNA, 25 bp, Homo sapien
atctggtgtttttacttctgcctgc

SEQ ID NO: 5530385 - DNA, 25 bp, Homo sapien
gagcacggaccgcacgagtctcctg

SEQ ID NO: 5530386 - DNA, 25 bp, Homo sapien
caggagactcgtgcggtccgtgctc

SEQ ID NO: 5530387 - DNA, 25 bp, Homo sapien
gatgactcaagagatgcttgtggct

SEQ ID NO: 5530388 - DNA, 25 bp, Homo sapien
gtgtctggctaactggtgataaaac

SEQ ID NO: 5530389 - DNA, 25 bp, Homo sapien
tggggagatgatgactcttgagtct

SEQ ID NO: 5530390 - DNA, 25 bp, Homo sapien
gaaatataattctgggtcgggctag

SEQ ID NO: 5530391 - DNA, 25 bp, Homo sapien
tgatcttcaagacgggaattacttc

SEQ ID NO: 5530392 - DNA, 25 bp, Homo sapien
cagatagcctttgggttgatgactc

SEQ ID NO: 5530393 - DNA, 25 bp, Homo sapien
atgtctgacaatgagtagaggatgc

SEQ ID NO: 5530394 - DNA, 25 bp, Homo sapien
tggcaaattctgagcccgagaggca

SEQ ID NO: 5530395 - DNA, 25 bp, Homo sapien
gctgttaatgttagggactcccctg

SEQ ID NO: 5530396 - DNA, 25 bp, Homo sapien
ttgaaatgaatagctaacctgtgtc

SEQ ID NO: 5530397 - DNA, 25 bp, Homo sapien
ttttgggaagaatgcatagaaatat

SEQ ID NO: 5530398 - DNA, 25 bp, Homo sapien
ctggggctagtaataactgtaagct

SEQ ID NO: 5530399 - DNA, 25 bp, Homo sapien
gaaggctatttcaagtggggacatt

SEQ ID NO: 5530400 - DNA, 25 bp, Homo sapien
gaacagaagagataggattcctgat

SEQ ID NO: 5530401 - DNA, 25 bp, Homo sapien
gagcaggaactaaacctagtgaggt

SEQ ID NO: 5530402 - DNA, 25 bp, Homo sapien
ctatttagtagaggaacacagccaa

SEQ ID NO: 5530403 - DNA, 25 bp, Homo sapien
aacaggtgaatttatcagagtcccc

SEQ ID NO: 5530404 - DNA, 25 bp, Homo sapien
ttgtagtgaactatactggggctag

SEQ ID NO: 5530405 - DNA, 25 bp, Homo sapien
ggtaactgcttgggaacagaagaga

SEQ ID NO: 5530406 - DNA, 25 bp, Homo sapien
ggtaaagcaacaagttgtagtgaac

SEQ ID NO: 5530407 - DNA, 25 bp, Homo sapien
ttgccttctgaatccctgggaggga

SEQ ID NO: 5530408 - DNA, 25 bp, Homo sapien
ggggacatttgagaagagtgtaata

SEQ ID NO: 5530409 - DNA, 25 bp, Homo sapien
ggccgcctacgtgagcctcacggtc

SEQ ID NO: 5530410 - DNA, 25 bp, Homo sapien
ctcacggtcactcaccgggtgcgtt

SEQ ID NO: 5530411 - DNA, 25 bp, Homo sapien
tgcgttatctgaaggactggaagga

SEQ ID NO: 5530412 - DNA, 25 bp, Homo sapien
agctcaaaggtggaaatctgcacac

SEQ ID NO: 5530413 - DNA, 25 bp, Homo sapien
cagatcttagtactgacaggcctct

SEQ ID NO: 5530414 - DNA, 25 bp, Homo sapien
gcctagaagggataccagatcttag

SEQ ID NO: 5530415 - DNA, 25 bp, Homo sapien
gactggaaggacatcacacccaatt

SEQ ID NO: 5530416 - DNA, 25 bp, Homo sapien
cctcaaaaagaggcccatctgcagg

SEQ ID NO: 5530417 - DNA, 25 bp, Homo sapien
ctgaaatcacaagcttcctggggcg

SEQ ID NO: 5530418 - DNA, 25 bp, Homo sapien
tcaaaagtaaatgctcctgggagag

SEQ ID NO: 5530419 - DNA, 25 bp, Homo sapien
gatctgtccacccaatgtcaagctc

SEQ ID NO: 5530420 - DNA, 25 bp, Homo sapien
cctcatccagcaagacaggaggtag

SEQ ID NO: 5530421 - DNA, 25 bp, Homo sapien
caactgcttgcccaaataccccttc

SEQ ID NO: 5530422 - DNA, 25 bp, Homo sapien
aaaatcaaagaaaggttgcagaaca

SEQ ID NO: 5530423 - DNA, 25 bp, Homo sapien
ttgaggaacagtagacaaaagttaa

SEQ ID NO: 5530424 - DNA, 25 bp, Homo sapien
caaatgcgtaaggtatgcaaataac

SEQ ID NO: 5530425 - DNA, 25 bp, Homo sapien
agatgaagggctgaacttccaccta

SEQ ID NO: 5530426 - DNA, 25 bp, Homo sapien
tgatataaaagtagagccacaggag

SEQ ID NO: 5530427 - DNA, 25 bp, Homo sapien
tcagttgagtagatacaaatgcgta

SEQ ID NO: 5530428 - DNA, 25 bp, Homo sapien
aacataatccaaggaagaatatgat

SEQ ID NO: 5530429 - DNA, 25 bp, Homo sapien
aggagagacctcatccagcaagaca

SEQ ID NO: 5530430 - DNA, 25 bp, Homo sapien
ctaaagggtcttgtgtgttatgggg

SEQ ID NO: 5530431 - DNA, 25 bp, Homo sapien
aagagtcaggcttcccacaccagca

SEQ ID NO: 5530432 - DNA, 25 bp, Homo sapien
agtcagtactcagacgcaggcaaga

SEQ ID NO: 5530433 - DNA, 25 bp, Homo sapien
tcacggctcacacaaaccccgaacc

SEQ ID NO: 5530434 - DNA, 25 bp, Homo sapien
ccaaagtgactttcagtgagtggag

SEQ ID NO: 5530435 - DNA, 25 bp, Homo sapien
cagtgtggtgactcaatcacggctc

SEQ ID NO: 5530436 - DNA, 25 bp, Homo sapien
ccattttactggtgtgggagcagag

SEQ ID NO: 5530437 - DNA, 25 bp, Homo sapien
agccaccccaagtaggtaggactac

SEQ ID NO: 5530438 - DNA, 25 bp, Homo sapien
gcactaggcacatctccaagcactt

SEQ ID NO: 5530439 - DNA, 25 bp, Homo sapien
gcaggcaagatcatccaaaattcgc

SEQ ID NO: 5530440 - DNA, 25 bp, Homo sapien
cagagacacaaaaacacgaagtcac

SEQ ID NO: 5530441 - DNA, 25 bp, Homo sapien
tttactgttgtgcaggcctgtggga

SEQ ID NO: 5530442 - DNA, 25 bp, Homo sapien
gggctactgacttaggggagcccga

SEQ ID NO: 5530443 - DNA, 25 bp, Homo sapien
gcagcatcttctacgtcgggaccac

SEQ ID NO: 5530444 - DNA, 25 bp, Homo sapien
gcccgaacgcagctcctcagaagag

SEQ ID NO: 5530445 - DNA, 25 bp, Homo sapien
caacagtatagcagaggacactgag

SEQ ID NO: 5530446 - DNA, 25 bp, Homo sapien
aggacactgagagctatgatgatct

SEQ ID NO: 5530447 - DNA, 25 bp, Homo sapien
gcctccgcctccacaaagcctgaac

SEQ ID NO: 5530448 - DNA, 25 bp, Homo sapien
tgctctcaatgcagcaggtaccggc

SEQ ID NO: 5530449 - DNA, 25 bp, Homo sapien
cggcgtcggtagtaatgccacatct

SEQ ID NO: 5530450 - DNA, 25 bp, Homo sapien
ggatgaatctcacacggaagatctc

SEQ ID NO: 5530451 - DNA, 25 bp, Homo sapien
acagcctcttgcgccaggcggaact

SEQ ID NO: 5530452 - DNA, 25 bp, Homo sapien
gcgcacccggcaatgttccctcgaa

SEQ ID NO: 5530453 - DNA, 25 bp, Homo sapien
atctcagaggaccagagtgactgag

SEQ ID NO: 5530454 - DNA, 25 bp, Homo sapien
cctggctacctttcgcattaggacc

SEQ ID NO: 5530455 - DNA, 25 bp, Homo sapien
ttcgcattaggaccagtctgggttt

SEQ ID NO: 5530456 - DNA, 25 bp, Homo sapien
gcccagtgagagcttctagctgatc

SEQ ID NO: 5530457 - DNA, 25 bp, Homo sapien
ctcttataatggagctgcttttgaa

SEQ ID NO: 5530458 - DNA, 25 bp, Homo sapien
taaatcacgaggatgcccagtgaga

SEQ ID NO: 5530459 - DNA, 25 bp, Homo sapien
tgaaatgctaacagaattcccaagc

SEQ ID NO: 5530460 - DNA, 25 bp, Homo sapien
tgagggtaaagtgtctcacagccca

SEQ ID NO: 5530461 - DNA, 25 bp, Homo sapien
actagacctttgggggactcttata

SEQ ID NO: 5530462 - DNA, 25 bp, Homo sapien
ttttgactaaatcacgaggatgccc

SEQ ID NO: 5530463 - DNA, 25 bp, Homo sapien
cttccctaggaagccctggctacct

SEQ ID NO: 5530464 - DNA, 25 bp, Homo sapien
taaaagacttatatgcaagacccat

SEQ ID NO: 5530465 - DNA, 25 bp, Homo sapien
atgggtcttgcatataagtctttta

SEQ ID NO: 5530466 - DNA, 25 bp, Homo sapien
gtggtaggagcgcttatcctgcgct

SEQ ID NO: 5530467 - DNA, 25 bp, Homo sapien
cgcatctgtttccagggagacgagg

SEQ ID NO: 5530468 - DNA, 25 bp, Homo sapien
aagctggccctgttcctacgcgtct

SEQ ID NO: 5530469 - DNA, 25 bp, Homo sapien
gcttccgctcagcggagaagctggc

SEQ ID NO: 5530470 - DNA, 25 bp, Homo sapien
ctgcccgacccgggacttcgtggta

SEQ ID NO: 5530471 - DNA, 25 bp, Homo sapien
tgtgacttggctcaagcgccactgc

SEQ ID NO: 5530472 - DNA, 25 bp, Homo sapien
catcctcttccggaacgagacggtg

SEQ ID NO: 5530473 - DNA, 25 bp, Homo sapien
ggagcaagtccagcttgaagacgct

SEQ ID NO: 5530474 - DNA, 25 bp, Homo sapien
ttcctacgcgtctacgaggagaagc

SEQ ID NO: 5530475 - DNA, 25 bp, Homo sapien
gacccgagcgacatctacgcggtca

SEQ ID NO: 5530476 - DNA, 25 bp, Homo sapien
aagggtcgcttcctcgtccgcatct

SEQ ID NO: 5530477 - DNA, 25 bp, Homo sapien
taaatggacgttacaggtatgctgt

SEQ ID NO: 5530478 - DNA, 25 bp, Homo sapien
aaaattagggaactctgaacagatt

SEQ ID NO: 5530479 - DNA, 25 bp, Homo sapien
ttcattgtccagaaagcagcaggaa

SEQ ID NO: 5530480 - DNA, 25 bp, Homo sapien
cccagcccttgactctgagacacat

SEQ ID NO: 5530481 - DNA, 25 bp, Homo sapien
ataggtctactgaaaaaccattgta

SEQ ID NO: 5530482 - DNA, 25 bp, Homo sapien
gacagactgagagctatcagcattt

SEQ ID NO: 5530483 - DNA, 25 bp, Homo sapien
tgatgaagctaaaattagggaactc

SEQ ID NO: 5530484 - DNA, 25 bp, Homo sapien
ctgaacagatttgcaggaaaaaatg

SEQ ID NO: 5530485 - DNA, 25 bp, Homo sapien
agcatttgaaggcccagcccttgac

SEQ ID NO: 5530486 - DNA, 25 bp, Homo sapien
tagcttaaaagcatagtgaagatgc

SEQ ID NO: 5530487 - DNA, 25 bp, Homo sapien
ctatgcttgagaagtataggtctac

SEQ ID NO: 5530488 - DNA, 25 bp, Homo sapien
tgcacaaaggctgtattgcagggga

SEQ ID NO: 5530489 - DNA, 25 bp, Homo sapien
gtgcgtcttgcccgccttgccttgc

SEQ ID NO: 5530490 - DNA, 25 bp, Homo sapien
cggcagagaacttgtgcgtcttgcc

SEQ ID NO: 5530491 - DNA, 25 bp, Homo sapien
ggcactctgtggaagctgcagatga

SEQ ID NO: 5530492 - DNA, 25 bp, Homo sapien
cccgccttgccttgccgggaccaca

SEQ ID NO: 5530493 - DNA, 25 bp, Homo sapien
gcagcagttctcatagtaggggtcg

SEQ ID NO: 5530494 - DNA, 25 bp, Homo sapien
atgagagaccagcaatgcatcagct

SEQ ID NO: 5530495 - DNA, 25 bp, Homo sapien
ggcttggcactctgtggaagctgca

SEQ ID NO: 5530496 - DNA, 25 bp, Homo sapien
agtaggggtcgctcttgtcatagag

SEQ ID NO: 5530497 - DNA, 25 bp, Homo sapien
cttgtcatagagcttggcgcaagtg

SEQ ID NO: 5530498 - DNA, 25 bp, Homo sapien
tcagctgcacctgcagtagagcgcg

SEQ ID NO: 5530499 - DNA, 25 bp, Homo sapien
tctacgaatgatcaaatgggatgcc

SEQ ID NO: 5530500 - DNA, 25 bp, Homo sapien
acgaatggctacccaaaggaaacac

SEQ ID NO: 5530501 - DNA, 25 bp, Homo sapien
caccagctcctgggatcagactttc

SEQ ID NO: 5530502 - DNA, 25 bp, Homo sapien
gtaaagggtatctgatcaagccaac

SEQ ID NO: 5530503 - DNA, 25 bp, Homo sapien
taggacccctctttgcccagactac

SEQ ID NO: 5530504 - DNA, 25 bp, Homo sapien
tccacttggatgtcctgaagccacc

SEQ ID NO: 5530505 - DNA, 25 bp, Homo sapien
aatgggatgccagcactcagttatc

SEQ ID NO: 5530506 - DNA, 25 bp, Homo sapien
ccagtcttcactagccacgaatggc

SEQ ID NO: 5530507 - DNA, 25 bp, Homo sapien
catcctactgggaacgacacaccag

SEQ ID NO: 5530508 - DNA, 25 bp, Homo sapien
atctggatgctagttctcatgcctc

SEQ ID NO: 5530509 - DNA, 25 bp, Homo sapien
acaacagtgacggaatgcctccata

SEQ ID NO: 5530510 - DNA, 25 bp, Homo sapien
gctcagcgtccctatcctccatccc

SEQ ID NO: 5530511 - DNA, 25 bp, Homo sapien
cgtccctatcctccatcccgccccg

SEQ ID NO: 5530512 - DNA, 25 bp, Homo sapien
aggctcagcgtccctatcctccatc

SEQ ID NO: 5530513 - DNA, 25 bp, Homo sapien
agcttcccttcccggagcccgcctg

SEQ ID NO: 5530514 - DNA, 25 bp, Homo sapien
gcgctctctccagggtggaacctgg

SEQ ID NO: 5530515 - DNA, 25 bp, Homo sapien
gctgccccccagagcagcatggatg

SEQ ID NO: 5530516 - DNA, 25 bp, Homo sapien
atcctccatcccgccccgggacggc

SEQ ID NO: 5530517 - DNA, 25 bp, Homo sapien
ggaggctcagcgtccctatcctcca

SEQ ID NO: 5530518 - DNA, 25 bp, Homo sapien
gctctctccagggtggaacctgggc

SEQ ID NO: 5530519 - DNA, 25 bp, Homo sapien
tggaggctcagcgtccctatcctcc

SEQ ID NO: 5530520 - DNA, 25 bp, Homo sapien
cgctctctccagggtggaacctggg

SEQ ID NO: 5530521 - DNA, 25 bp, Homo sapien
accaggaacctatggcaagagctgt

SEQ ID NO: 5530522 - DNA, 25 bp, Homo sapien
ccaaccgcaggcatgtacttgggtt

SEQ ID NO: 5530523 - DNA, 25 bp, Homo sapien
tgtaaactacaaccaggaacctatg

SEQ ID NO: 5530524 - DNA, 25 bp, Homo sapien
tctgggtgtgtctgagaacttctaa

SEQ ID NO: 5530525 - DNA, 25 bp, Homo sapien
tgtacttgggttcaaaagaattcaa

SEQ ID NO: 5530526 - DNA, 25 bp, Homo sapien
attgtgttgatagttttggctgccc

SEQ ID NO: 5530527 - DNA, 25 bp, Homo sapien
ggtggtaaaggcagatattgtaaac

SEQ ID NO: 5530528 - DNA, 25 bp, Homo sapien
aagaattcaactttgggaccacaca

SEQ ID NO: 5530529 - DNA, 25 bp, Homo sapien
tatggcaagagctgttaacccttct

SEQ ID NO: 5530530 - DNA, 25 bp, Homo sapien
ttggctgcccttcacctctgggtgt

SEQ ID NO: 5530531 - DNA, 25 bp, Homo sapien
tgcattcaaactggaagtctcattc

SEQ ID NO: 5530532 - DNA, 25 bp, Homo sapien
aatcagcacacaactgtgatggtga

SEQ ID NO: 5530533 - DNA, 25 bp, Homo sapien
ggcatcgccttccctagacacggtt

SEQ ID NO: 5530534 - DNA, 25 bp, Homo sapien
ctgggcaagcagagtgcttcctttt

SEQ ID NO: 5530535 - DNA, 25 bp, Homo sapien
acactgaacacttgcgtgcagacgc

SEQ ID NO: 5530536 - DNA, 25 bp, Homo sapien
gcacgctctgtgtggacgacacgtg

SEQ ID NO: 5530537 - DNA, 25 bp, Homo sapien
gggctgacttcggaactgaagactc

SEQ ID NO: 5530538 - DNA, 25 bp, Homo sapien
ttttccagccccaggcatcgccttc

SEQ ID NO: 5530539 - DNA, 25 bp, Homo sapien
gattgatcctttgacacgcacgctc

SEQ ID NO: 5530540 - DNA, 25 bp, Homo sapien
agacgctcccgaataccgcaggtct

SEQ ID NO: 5530541 - DNA, 25 bp, Homo sapien
gaataccgcaggtcttagccaggca

SEQ ID NO: 5530542 - DNA, 25 bp, Homo sapien
ttccagcctctgggcaagcagagtg

SEQ ID NO: 5530543 - DNA, 25 bp, Homo sapien
actcataacactgagtggggggatt

SEQ ID NO: 5530544 - DNA, 25 bp, Homo sapien
gccgtgaatgaaggaattatttaat

SEQ ID NO: 5530545 - DNA, 25 bp, Homo sapien
tgtgaccctaaactgccatggaaat

SEQ ID NO: 5530546 - DNA, 25 bp, Homo sapien
tacacaaccccaaggtcacagaaga

SEQ ID NO: 5530547 - DNA, 25 bp, Homo sapien
tgagcacagtacttgagaaggactg

SEQ ID NO: 5530548 - DNA, 25 bp, Homo sapien
caaatatttagagtcagaggagttc

SEQ ID NO: 5530549 - DNA, 25 bp, Homo sapien
agaaggactgatagaacccagatga

SEQ ID NO: 5530550 - DNA, 25 bp, Homo sapien
caccgggatcaaacctgtgacccta

SEQ ID NO: 5530551 - DNA, 25 bp, Homo sapien
aaatagcttaaactggggttggaga

SEQ ID NO: 5530552 - DNA, 25 bp, Homo sapien
atgatctccagaacaaggcagatgg

SEQ ID NO: 5530553 - DNA, 25 bp, Homo sapien
cttcaggctgacccacattgtaaac

SEQ ID NO: 5530554 - DNA, 25 bp, Homo sapien
ggtcaacaaactaccacacattcgt

SEQ ID NO: 5530555 - DNA, 25 bp, Homo sapien
acgaatgtgtggtagtttgttgacc

SEQ ID NO: 5530556 - DNA, 25 bp, Homo sapien
tcaatatctgggataaggaagacaa

SEQ ID NO: 5530557 - DNA, 25 bp, Homo sapien
gcacagtctgaagcaagcagagtga

SEQ ID NO: 5530558 - DNA, 25 bp, Homo sapien
gtgatccagtgttactccaggtccc

SEQ ID NO: 5530559 - DNA, 25 bp, Homo sapien
agcagtattatggaacagaagagac

SEQ ID NO: 5530560 - DNA, 25 bp, Homo sapien
tggcaacttgttccaagcgtgggcc

SEQ ID NO: 5530561 - DNA, 25 bp, Homo sapien
cagagtgaaacaagttggcaacttg

SEQ ID NO: 5530562 - DNA, 25 bp, Homo sapien
gatcccatcccagctgtgcacagtc

SEQ ID NO: 5530563 - DNA, 25 bp, Homo sapien
aaggaagacaaagcttaatgacaac

SEQ ID NO: 5530564 - DNA, 25 bp, Homo sapien
tgaaagaataggggtccacatcccc

SEQ ID NO: 5530565 - DNA, 25 bp, Homo sapien
gacaactaaggttctagctgacatc

SEQ ID NO: 5530566 - DNA, 25 bp, Homo sapien
gtgggcctttgcagtctgtgatcca

SEQ ID NO: 5530567 - DNA, 25 bp, Homo sapien
agaagcacttatgatcaaggtcaat

SEQ ID NO: 5530568 - DNA, 25 bp, Homo sapien
ggtcaatgttgaaaaataagtagca

SEQ ID NO: 5530569 - DNA, 25 bp, Homo sapien
cagacctgcagtaaaaattagtgat

SEQ ID NO: 5530570 - DNA, 25 bp, Homo sapien
taaagctcagcagatagaagcactt

SEQ ID NO: 5530571 - DNA, 25 bp, Homo sapien
aaaggattcaaaacagagtttcaat

SEQ ID NO: 5530572 - DNA, 25 bp, Homo sapien
tgaaaaataagtagcacctttggtc

SEQ ID NO: 5530573 - DNA, 25 bp, Homo sapien
tgcataattcagacaagagagattc

SEQ ID NO: 5530574 - DNA, 25 bp, Homo sapien
gaacatggacagggttaaactgcat

SEQ ID NO: 5530575 - DNA, 25 bp, Homo sapien
accataaagtttagctgttgcatat

SEQ ID NO: 5530576 - DNA, 25 bp, Homo sapien
aaacaataaataaagctcagcagat

SEQ ID NO: 5530577 - DNA, 25 bp, Homo sapien
ccaggaagcttaaatacagcatttc

SEQ ID NO: 5530578 - DNA, 25 bp, Homo sapien
tcgtatgttcattattcggcgctaa

SEQ ID NO: 5530579 - DNA, 25 bp, Homo sapien
taaccaaaccatgtgtgagaactgt

SEQ ID NO: 5530580 - DNA, 25 bp, Homo sapien
tttatatccctaaaaggcaatacag

SEQ ID NO: 5530581 - DNA, 25 bp, Homo sapien
atctgttgtgtgttatcacttcgtc

SEQ ID NO: 5530582 - DNA, 25 bp, Homo sapien
aagaggccgtgtaataattcacaac

SEQ ID NO: 5530583 - DNA, 25 bp, Homo sapien
gagaactgttaaattacattccaaa

SEQ ID NO: 5530584 - DNA, 25 bp, Homo sapien
atcacttcgtcgatattgcttcatc

SEQ ID NO: 5530585 - DNA, 25 bp, Homo sapien
atacagaatttataaccaaaccatg

SEQ ID NO: 5530586 - DNA, 25 bp, Homo sapien
gcagcacgttacaaagaggccgtgt

SEQ ID NO: 5530587 - DNA, 25 bp, Homo sapien
tcacaacttttgttagcagccgtta

SEQ ID NO: 5530588 - DNA, 25 bp, Homo sapien
ttaaaaaacatgcagcacgttacaa

SEQ ID NO: 5530589 - DNA, 25 bp, Homo sapien
ggagatgtctggacgtatgtgtgta

SEQ ID NO: 5530590 - DNA, 25 bp, Homo sapien
atgtctggacgtatgtgtgtatgtg

SEQ ID NO: 5530591 - DNA, 25 bp, Homo sapien
attatagtttagtaataggtcaggg

SEQ ID NO: 5530592 - DNA, 25 bp, Homo sapien
ttttcatagaaactgatggttattt

SEQ ID NO: 5530593 - DNA, 25 bp, Homo sapien
aagcagcaatggtttaagcaatttt

SEQ ID NO: 5530594 - DNA, 25 bp, Homo sapien
ggtcaggggtttgagcaacatttta

SEQ ID NO: 5530595 - DNA, 25 bp, Homo sapien
tgattagtattaagcagcaatggtt

SEQ ID NO: 5530596 - DNA, 25 bp, Homo sapien
tactatgggaaattggcttccactt

SEQ ID NO: 5530597 - DNA, 25 bp, Homo sapien
tagcagccgttaagtttgattagta

SEQ ID NO: 5530598 - DNA, 25 bp, Homo sapien
ttattttatgagggagatgtctgga

SEQ ID NO: 5530599 - DNA, 25 bp, Homo sapien
gatggttattttatgagggagatgt

SEQ ID NO: 5530600 - DNA, 25 bp, Homo sapien
atagctgtcaagagtagaaagagac

SEQ ID NO: 5530601 - DNA, 25 bp, Homo sapien
agaaggaagacgtgaatttaccttg

SEQ ID NO: 5530602 - DNA, 25 bp, Homo sapien
atgtacattacgtaggggaaaatac

SEQ ID NO: 5530603 - DNA, 25 bp, Homo sapien
caggaacttaacaggggtctgatta

SEQ ID NO: 5530604 - DNA, 25 bp, Homo sapien
aatactgtggcctaaagacatgtac

SEQ ID NO: 5530605 - DNA, 25 bp, Homo sapien
aaaaattgggcatgtttagtgggaa

SEQ ID NO: 5530606 - DNA, 25 bp, Homo sapien
taaataagtgtgtgagaggtctatt

SEQ ID NO: 5530607 - DNA, 25 bp, Homo sapien
taagctacaatgaccactgccacct

SEQ ID NO: 5530608 - DNA, 25 bp, Homo sapien
ctctgagtgagtgacactttgattc

SEQ ID NO: 5530609 - DNA, 25 bp, Homo sapien
ttctaatagggaaggaaatatagga

SEQ ID NO: 5530610 - DNA, 25 bp, Homo sapien
gaagtaggtaagaatagctgtcaag

SEQ ID NO: 5530611 - DNA, 25 bp, Homo sapien
gtacactgtaaaagatctagaaaac

SEQ ID NO: 5530612 - DNA, 25 bp, Homo sapien
actctaaaagtagagccagggtcct

SEQ ID NO: 5530613 - DNA, 25 bp, Homo sapien
accttgatgcaagttagagtttctt

SEQ ID NO: 5530614 - DNA, 25 bp, Homo sapien
cagaagttgataatgctccgaggaa

SEQ ID NO: 5530615 - DNA, 25 bp, Homo sapien
caaggagaaagatcggaacctttaa

SEQ ID NO: 5530616 - DNA, 25 bp, Homo sapien
cttggagttcttttatacaggattc

SEQ ID NO: 5530617 - DNA, 25 bp, Homo sapien
tatgtatggtcaggacaacagagca

SEQ ID NO: 5530618 - DNA, 25 bp, Homo sapien
tgctccgaggaatcaggtaagtaaa

SEQ ID NO: 5530619 - DNA, 25 bp, Homo sapien
tgtcctgagaatgagatcactccac

SEQ ID NO: 5530620 - DNA, 25 bp, Homo sapien
tctaggacatatgtatggtcaggac

SEQ ID NO: 5530621 - DNA, 25 bp, Homo sapien
gccagggtcctggcaagtaaatgaa

SEQ ID NO: 5530622 - DNA, 25 bp, Homo sapien
aagttcttatagcacaggaccccgg

SEQ ID NO: 5530623 - DNA, 25 bp, Homo sapien
ctgaaaagtggcaatatgacctgtc

SEQ ID NO: 5530624 - DNA, 25 bp, Homo sapien
gagaccagaaatcaagctagccatg

SEQ ID NO: 5530625 - DNA, 25 bp, Homo sapien
gggtgcaccacgtccccttggccaa

SEQ ID NO: 5530626 - DNA, 25 bp, Homo sapien
atacagtgcagagagaagttcttat

SEQ ID NO: 5530627 - DNA, 25 bp, Homo sapien
agcctccaatgcagagaaatggcct

SEQ ID NO: 5530628 - DNA, 25 bp, Homo sapien
cccgggaaggttatgcttagctttg

SEQ ID NO: 5530629 - DNA, 25 bp, Homo sapien
ggaaatagctaagaattgggagaaa

SEQ ID NO: 5530630 - DNA, 25 bp, Homo sapien
ggtggattatgctaggtccttggcc

SEQ ID NO: 5530631 - DNA, 25 bp, Homo sapien
cgggttgggaattttccagaggaga

SEQ ID NO: 5530632 - DNA, 25 bp, Homo sapien
agggagcttgggcatgtcaactccc

SEQ ID NO: 5530633 - DNA, 25 bp, Homo sapien
cattctgatagtgaaagagctttgc

SEQ ID NO: 5530634 - DNA, 25 bp, Homo sapien
ctttacaatgaagaggtatgaggag

SEQ ID NO: 5530635 - DNA, 25 bp, Homo sapien
acactatcaagcgaaatacggtatc

SEQ ID NO: 5530636 - DNA, 25 bp, Homo sapien
atgcatgatggatatgatggactac

SEQ ID NO: 5530637 - DNA, 25 bp, Homo sapien
actgcccacaagctgagaatgaatt

SEQ ID NO: 5530638 - DNA, 25 bp, Homo sapien
ttccttaaaagctgggaaggctgtg

SEQ ID NO: 5530639 - DNA, 25 bp, Homo sapien
gaaggctgtgggtcaattcagctcg

SEQ ID NO: 5530640 - DNA, 25 bp, Homo sapien
gctcgccacctgtttctgtactgcc

SEQ ID NO: 5530641 - DNA, 25 bp, Homo sapien
tgaggagctgctacagaaaccttct

SEQ ID NO: 5530642 - DNA, 25 bp, Homo sapien
aagagtctccaggaatgcattattt

SEQ ID NO: 5530643 - DNA, 25 bp, Homo sapien
ctgacacaagatatatgacattcac

SEQ ID NO: 5530644 - DNA, 25 bp, Homo sapien
tcaggaaagactagagcatccagga

SEQ ID NO: 5530645 - DNA, 25 bp, Homo sapien
atgtgggcctgtaatcaggaaagac

SEQ ID NO: 5530646 - DNA, 25 bp, Homo sapien
gggagttgtgtgagctttgtccttc

SEQ ID NO: 5530647 - DNA, 25 bp, Homo sapien
tcacccaacccatgagaaggggatg

SEQ ID NO: 5530648 - DNA, 25 bp, Homo sapien
gagcacatacaccagaaagaccttc

SEQ ID NO: 5530649 - DNA, 25 bp, Homo sapien
tttgattctgagatgctgggagttg

SEQ ID NO: 5530650 - DNA, 25 bp, Homo sapien
ccatggcagcgaccccttcaaacag

SEQ ID NO: 5530651 - DNA, 25 bp, Homo sapien
ggctggtgctgacagccaaaagcgg

SEQ ID NO: 5530652 - DNA, 25 bp, Homo sapien
atcacaagcactggccaagctgact

SEQ ID NO: 5530653 - DNA, 25 bp, Homo sapien
ccttcccggaagattgtggaaccag

SEQ ID NO: 5530654 - DNA, 25 bp, Homo sapien
aaagtacaggagagactcataactc

SEQ ID NO: 5530655 - DNA, 25 bp, Homo sapien
cagtgctatgggcctctcacaggct

SEQ ID NO: 5530656 - DNA, 25 bp, Homo sapien
ctcacaggctggacttcactctctg

SEQ ID NO: 5530657 - DNA, 25 bp, Homo sapien
atgttgatcctctaaagggcagtgc

SEQ ID NO: 5530658 - DNA, 25 bp, Homo sapien
ggaacttatttgtaatgtcagcctt

SEQ ID NO: 5530659 - DNA, 25 bp, Homo sapien
gctggagtgcaatgagtatcatgca

SEQ ID NO: 5530660 - DNA, 25 bp, Homo sapien
tggagggagacctaacgatctccat

SEQ ID NO: 5530661 - DNA, 25 bp, Homo sapien
ataatatgtagaggtggtttgtttc

SEQ ID NO: 5530662 - DNA, 25 bp, Homo sapien
gtcagccttagccaccccaagcttt

SEQ ID NO: 5530663 - DNA, 25 bp, Homo sapien
tataaaagaataagaatcgacaaaa

SEQ ID NO: 5530664 - DNA, 25 bp, Homo sapien
actggaatcgtttaatgtgtctact

SEQ ID NO: 5530665 - DNA, 25 bp, Homo sapien
agtatcatgcaggctggtttggagg

SEQ ID NO: 5530666 - DNA, 25 bp, Homo sapien
gctttgagcacactgcctggcatgt

SEQ ID NO: 5530667 - DNA, 25 bp, Homo sapien
gtagatacagacagatagaagcttc

SEQ ID NO: 5530668 - DNA, 25 bp, Homo sapien
taatggcttgataagtgtccctgac

SEQ ID NO: 5530669 - DNA, 25 bp, Homo sapien
aagaatctgatgaaataacacgacc

SEQ ID NO: 5530670 - DNA, 25 bp, Homo sapien
acaggatggagcataagtactagat

SEQ ID NO: 5530671 - DNA, 25 bp, Homo sapien
agatgatttggttgaggtagataca

SEQ ID NO: 5530672 - DNA, 25 bp, Homo sapien
ttgtcgctagtttaatgggagcact

SEQ ID NO: 5530673 - DNA, 25 bp, Homo sapien
ttgaagtttgtggacaggtagaaaa

SEQ ID NO: 5530674 - DNA, 25 bp, Homo sapien
gaggcagcatcgatttatgaagact

SEQ ID NO: 5530675 - DNA, 25 bp, Homo sapien
actatacagaggaatgaagatcaca

SEQ ID NO: 5530676 - DNA, 25 bp, Homo sapien
agcacaagaatactgttccctggcc

SEQ ID NO: 5530677 - DNA, 25 bp, Homo sapien
tcagccctcaccgttagccagaccc

SEQ ID NO: 5530678 - DNA, 25 bp, Homo sapien
ctggaccatggtcacagttaacctc

SEQ ID NO: 5530679 - DNA, 25 bp, Homo sapien
aatcagatttgggaacacaacaggc

SEQ ID NO: 5530680 - DNA, 25 bp, Homo sapien
cactttctggagactgagagacagt

SEQ ID NO: 5530681 - DNA, 25 bp, Homo sapien
acacaacaggcttgaacactttctg

SEQ ID NO: 5530682 - DNA, 25 bp, Homo sapien
cagaagccactcaagctggaccatg

SEQ ID NO: 5530683 - DNA, 25 bp, Homo sapien
ggtcacagttaacctcaggcccaac

SEQ ID NO: 5530684 - DNA, 25 bp, Homo sapien
cgctgcctgtgtcgcagcagcccag

SEQ ID NO: 5530685 - DNA, 25 bp, Homo sapien
agagacagttcagagtcagccctca

SEQ ID NO: 5530686 - DNA, 25 bp, Homo sapien
acagggaaggcaaaaaatagcttcc

SEQ ID NO: 5530687 - DNA, 25 bp, Homo sapien
ttgaaaatgtggctgctccagaagc

SEQ ID NO: 5530688 - DNA, 25 bp, Homo sapien
tcttgctcatgggcatctgggttat

SEQ ID NO: 5530689 - DNA, 25 bp, Homo sapien
ttgcttttgtgaatagggttgctat

SEQ ID NO: 5530690 - DNA, 25 bp, Homo sapien
tggattaactgggttatagggtagc

SEQ ID NO: 5530691 - DNA, 25 bp, Homo sapien
cctggtgtacatgtatgagtttctc

SEQ ID NO: 5530692 - DNA, 25 bp, Homo sapien
ggcggttacggtcctactcagagca

SEQ ID NO: 5530693 - DNA, 25 bp, Homo sapien
attagatgatgactctagaggcagg

SEQ ID NO: 5530694 - DNA, 25 bp, Homo sapien
aggctggatatccaggagtccaagg

SEQ ID NO: 5530695 - DNA, 25 bp, Homo sapien
ggttatagggtagctgaatgttcaa

SEQ ID NO: 5530696 - DNA, 25 bp, Homo sapien
tagcctcagcgaatactaagtacta

SEQ ID NO: 5530697 - DNA, 25 bp, Homo sapien
gcaggggaccctctcattttgaatt

SEQ ID NO: 5530698 - DNA, 25 bp, Homo sapien
tcaattagcactaggctggatatcc

SEQ ID NO: 5530699 - DNA, 25 bp, Homo sapien
cagggagcccttgatttgaagatgg

SEQ ID NO: 5530700 - DNA, 25 bp, Homo sapien
cagctccctgctcacatgtcacctc

SEQ ID NO: 5530701 - DNA, 25 bp, Homo sapien
ggtgagggaataccaccatccacac

SEQ ID NO: 5530702 - DNA, 25 bp, Homo sapien
cacggcctctgcattggctgttccc

SEQ ID NO: 5530703 - DNA, 25 bp, Homo sapien
gaggtccaaagtctggctgtctgag

SEQ ID NO: 5530704 - DNA, 25 bp, Homo sapien
agggaaggagggctttcctccatct

SEQ ID NO: 5530705 - DNA, 25 bp, Homo sapien
cctgatttccacacgggtcacaccc

SEQ ID NO: 5530706 - DNA, 25 bp, Homo sapien
tcagcttcagctcaggcttgaggca

SEQ ID NO: 5530707 - DNA, 25 bp, Homo sapien
tcagtggcactggccacctcacggc

SEQ ID NO: 5530708 - DNA, 25 bp, Homo sapien
actagacagaatttggtagccaggg

SEQ ID NO: 5530709 - DNA, 25 bp, Homo sapien
gtggactcattctggtagggaagga

SEQ ID NO: 5530710 - DNA, 25 bp, Homo sapien
acatactggtagatcaagagctttg

SEQ ID NO: 5530711 - DNA, 25 bp, Homo sapien
tccagaaagcagaaatcctagtact

SEQ ID NO: 5530712 - DNA, 25 bp, Homo sapien
atatagtagaagaataaggtgaaga

SEQ ID NO: 5530713 - DNA, 25 bp, Homo sapien
actgggagaatgatgtgaatttatc

SEQ ID NO: 5530714 - DNA, 25 bp, Homo sapien
agagcaccactgaaagccaaggttt

SEQ ID NO: 5530715 - DNA, 25 bp, Homo sapien
caagagctttgagtgagatgtataa

SEQ ID NO: 5530716 - DNA, 25 bp, Homo sapien
cttggacaggggtgttataattcat

SEQ ID NO: 5530717 - DNA, 25 bp, Homo sapien
aagaaagtaagaactctcagaggct

SEQ ID NO: 5530718 - DNA, 25 bp, Homo sapien
cttttctagcagtcttgaggggtgg

SEQ ID NO: 5530719 - DNA, 25 bp, Homo sapien
actggagggagatatcactctcttt

SEQ ID NO: 5530720 - DNA, 25 bp, Homo sapien
ggattctggcaaaatggaaaggtac

SEQ ID NO: 5530721 - DNA, 25 bp, Homo sapien
caatttagcttctacagtaatgtac

SEQ ID NO: 5530722 - DNA, 25 bp, Homo sapien
aaagttctagtttagcagcatgcat

SEQ ID NO: 5530723 - DNA, 25 bp, Homo sapien
acatccatatgcacaaccataaaac

SEQ ID NO: 5530724 - DNA, 25 bp, Homo sapien
ttagcagcatgcatgtatgtattca

SEQ ID NO: 5530725 - DNA, 25 bp, Homo sapien
acaagatatcacaccagtacatttt

SEQ ID NO: 5530726 - DNA, 25 bp, Homo sapien
cattcatacaagatatcacaccagt

SEQ ID NO: 5530727 - DNA, 25 bp, Homo sapien
atgggacttataaaagttatgggga

SEQ ID NO: 5530728 - DNA, 25 bp, Homo sapien
aataaacactatcaaacacccaaat

SEQ ID NO: 5530729 - DNA, 25 bp, Homo sapien
agtgggtttataaatgggacttata

SEQ ID NO: 5530730 - DNA, 25 bp, Homo sapien
caagtacaattttcaaccaagtgct

SEQ ID NO: 5530731 - DNA, 25 bp, Homo sapien
cacacatcactctaacttggacctg

SEQ ID NO: 5530732 - DNA, 25 bp, Homo sapien
caataatcagtatagacagagaaaa

SEQ ID NO: 5530733 - DNA, 25 bp, Homo sapien
atcagtgaatggtttgtaaagctac

SEQ ID NO: 5530734 - DNA, 25 bp, Homo sapien
ggattttcaagactgcaatactgtc

SEQ ID NO: 5530735 - DNA, 25 bp, Homo sapien
tggacagatgtttacagttgaaatc

SEQ ID NO: 5530736 - DNA, 25 bp, Homo sapien
aaagctacaccaatggacagatgtt

SEQ ID NO: 5530737 - DNA, 25 bp, Homo sapien
acaagctcagagtcaagaaaatcta

SEQ ID NO: 5530738 - DNA, 25 bp, Homo sapien
caaaagctagaaatactgatacaag

SEQ ID NO: 5530739 - DNA, 25 bp, Homo sapien
tactgtcagacaaaacaaaagctag

SEQ ID NO: 5530740 - DNA, 25 bp, Homo sapien
tagacagagaaaatgcacttaatct

SEQ ID NO: 5530741 - DNA, 25 bp, Homo sapien
gaaaattgaaataccatagtgatct

SEQ ID NO: 5530742 - DNA, 25 bp, Homo sapien
atgcacaccacagcaataacacaaa

SEQ ID NO: 5530743 - DNA, 25 bp, Homo sapien
actagccctagagaattaacctttc

SEQ ID NO: 5530744 - DNA, 25 bp, Homo sapien
ttctgctcagggtctgcccaaatgc

SEQ ID NO: 5530745 - DNA, 25 bp, Homo sapien
cagactaggtggtccacggtagtga

SEQ ID NO: 5530746 - DNA, 25 bp, Homo sapien
gtaagggaagactagccctagttgc

SEQ ID NO: 5530747 - DNA, 25 bp, Homo sapien
tgcagctgaggcctaggtctaatta

SEQ ID NO: 5530748 - DNA, 25 bp, Homo sapien
cagtaacagctcctcagaaagagtt

SEQ ID NO: 5530749 - DNA, 25 bp, Homo sapien
gtgttgggatccagttctactagcc

SEQ ID NO: 5530750 - DNA, 25 bp, Homo sapien
taattaagagtttggtgttgggatc

SEQ ID NO: 5530751 - DNA, 25 bp, Homo sapien
tattgccccagggtacacagcactg

SEQ ID NO: 5530752 - DNA, 25 bp, Homo sapien
aatgcttttcgggcagtgcagctga

SEQ ID NO: 5530753 - DNA, 25 bp, Homo sapien
gaaagagttacagactaggtggtcc

SEQ ID NO: 5530754 - DNA, 25 bp, Homo sapien
cacttgaattcagcagttcaggacc

SEQ ID NO: 5530755 - DNA, 25 bp, Homo sapien
gtcttctaagacccaaaatgtatac

SEQ ID NO: 5530756 - DNA, 25 bp, Homo sapien
cttaagaaacattttggctaggcat

SEQ ID NO: 5530757 - DNA, 25 bp, Homo sapien
attgactgacatgagtggtataact

SEQ ID NO: 5530758 - DNA, 25 bp, Homo sapien
gtctacaggaatttagtgtcaggtc

SEQ ID NO: 5530759 - DNA, 25 bp, Homo sapien
caagaagcctgattcaaagtagctc

SEQ ID NO: 5530760 - DNA, 25 bp, Homo sapien
ttaacaatggtaatatgcaaataac

SEQ ID NO: 5530761 - DNA, 25 bp, Homo sapien
aatggaagttcttgatctcgatact

SEQ ID NO: 5530762 - DNA, 25 bp, Homo sapien
tcaaagtagctcacatggtaacatt

SEQ ID NO: 5530763 - DNA, 25 bp, Homo sapien
ttaaattggtgtgcaagaagcctga

SEQ ID NO: 5530764 - DNA, 25 bp, Homo sapien
gtgtcaggtcagagttatggtttca

SEQ ID NO: 5530765 - DNA, 25 bp, Homo sapien
gaagacttcctggtgaaggtgactc

SEQ ID NO: 5530766 - DNA, 25 bp, Homo sapien
tgttgtgcatctgagaatgagcttc

SEQ ID NO: 5530767 - DNA, 25 bp, Homo sapien
gaatgagcttctgggatggcattcc

SEQ ID NO: 5530768 - DNA, 25 bp, Homo sapien
gagagagaatgttagatggaaataa

SEQ ID NO: 5530769 - DNA, 25 bp, Homo sapien
gagactgttctggctgttgtgcatc

SEQ ID NO: 5530770 - DNA, 25 bp, Homo sapien
tctagaatgctgcttgagactgttc

SEQ ID NO: 5530771 - DNA, 25 bp, Homo sapien
gagagaacagcatgtatatagcaca

SEQ ID NO: 5530772 - DNA, 25 bp, Homo sapien
tcacaggagacaaaaatggcttaaa

SEQ ID NO: 5530773 - DNA, 25 bp, Homo sapien
tggcttaaaggaagagattcacctg

SEQ ID NO: 5530774 - DNA, 25 bp, Homo sapien
atatagcacaggttgagaagtaaag

SEQ ID NO: 5530775 - DNA, 25 bp, Homo sapien
tgaggaagccctctaatcaggcagg

SEQ ID NO: 5530776 - DNA, 25 bp, Homo sapien
agtccaccctcaagaagagagtgtg

SEQ ID NO: 5530777 - DNA, 25 bp, Homo sapien
cgcatctactggctgagacagcgcc

SEQ ID NO: 5530778 - DNA, 25 bp, Homo sapien
gatgctgtcctgcgaggctaaaatc

SEQ ID NO: 5530779 - DNA, 25 bp, Homo sapien
ccggaagacagtggcatctacttct

SEQ ID NO: 5530780 - DNA, 25 bp, Homo sapien
ctacttctgcatgatcgtcgggagc

SEQ ID NO: 5530781 - DNA, 25 bp, Homo sapien
gagaagatagctgtgtttcgggatg

SEQ ID NO: 5530782 - DNA, 25 bp, Homo sapien
caatctcacaagcgtgaagccggaa

SEQ ID NO: 5530783 - DNA, 25 bp, Homo sapien
agtcaccacgagttcctggccctct

SEQ ID NO: 5530784 - DNA, 25 bp, Homo sapien
tggccctctgggattccgcaaaagg

SEQ ID NO: 5530785 - DNA, 25 bp, Homo sapien
aagggaactcagctgagtgtggttg

SEQ ID NO: 5530786 - DNA, 25 bp, Homo sapien
ccgcaaaagggactatccacggtga

SEQ ID NO: 5530787 - DNA, 25 bp, Homo sapien
gcctggcttcttgcggcgcacagag

SEQ ID NO: 5530788 - DNA, 25 bp, Homo sapien
ctgacagtgcttggccttcactggc

SEQ ID NO: 5530789 - DNA, 25 bp, Homo sapien
ggcaggcactttctcgttaatgggc

SEQ ID NO: 5530790 - DNA, 25 bp, Homo sapien
ttcactggccggcaataagtggcca

SEQ ID NO: 5530791 - DNA, 25 bp, Homo sapien
cagtgggcaggcactttctcgttaa

SEQ ID NO: 5530792 - DNA, 25 bp, Homo sapien
ctggccggcaataagtggccaggtt

SEQ ID NO: 5530793 - DNA, 25 bp, Homo sapien
ccggttctccagctgagaagccttg

SEQ ID NO: 5530794 - DNA, 25 bp, Homo sapien
tggcttcttgcggcgcacagagcag

SEQ ID NO: 5530795 - DNA, 25 bp, Homo sapien
tccccggttctccagctgagaagcc

SEQ ID NO: 5530796 - DNA, 25 bp, Homo sapien
cggcaataagtggccaggtttttcc

SEQ ID NO: 5530797 - DNA, 25 bp, Homo sapien
agtgcttggccttcactggccggca

SEQ ID NO: 5530798 - DNA, 25 bp, Homo sapien
gtcgcagtctgtacccgtaactttt

SEQ ID NO: 5530799 - DNA, 25 bp, Homo sapien
aaaagttacgggtacagactgcgac

SEQ ID NO: 5530800 - DNA, 25 bp, Homo sapien
ctcaaaaaattacaggaggacacag

SEQ ID NO: 5530801 - DNA, 25 bp, Homo sapien
ggctaatccagcttgaattgagact

SEQ ID NO: 5530802 - DNA, 25 bp, Homo sapien
tctctgggattcaagaactcatgac

SEQ ID NO: 5530803 - DNA, 25 bp, Homo sapien
tcaaagaagttgaggaataaagtag

SEQ ID NO: 5530804 - DNA, 25 bp, Homo sapien
tgggaacgaagtatgctgctaaatt

SEQ ID NO: 5530805 - DNA, 25 bp, Homo sapien
agcagattgagagaagttcctaagc

SEQ ID NO: 5530806 - DNA, 25 bp, Homo sapien
tgctgtttttcagaaggcaacgggg

SEQ ID NO: 5530807 - DNA, 25 bp, Homo sapien
acaggaggacacagtattataatta

SEQ ID NO: 5530808 - DNA, 25 bp, Homo sapien
tctaggccaagccaagcagattgag

SEQ ID NO: 5530809 - DNA, 25 bp, Homo sapien
gtctagttgattatgctgagctggc

SEQ ID NO: 5530810 - DNA, 25 bp, Homo sapien
agagaagcaagtgagaacacataat

SEQ ID NO: 5530811 - DNA, 25 bp, Homo sapien
ttaaagaaaggtctcagttaccatc

SEQ ID NO: 5530812 - DNA, 25 bp, Homo sapien
aaaggaacactcaaacagcaaaaac

SEQ ID NO: 5530813 - DNA, 25 bp, Homo sapien
gcaaaaacaaacctcagcttctttc

SEQ ID NO: 5530814 - DNA, 25 bp, Homo sapien
acacataataagttgccaaaggaac

SEQ ID NO: 5530815 - DNA, 25 bp, Homo sapien
gcactgtggcccgcttgtcactgga

SEQ ID NO: 5530816 - DNA, 25 bp, Homo sapien
aatcaacagcacatccatcaagggg

SEQ ID NO: 5530817 - DNA, 25 bp, Homo sapien
tttaggttcaagatacacaggaaga

SEQ ID NO: 5530818 - DNA, 25 bp, Homo sapien
gaaacaatgttttggccctgcttca

SEQ ID NO: 5530819 - DNA, 25 bp, Homo sapien
gaagcacaaggagctcacgttctga

SEQ ID NO: 5530820 - DNA, 25 bp, Homo sapien
gcttgtcactggaagcacaaggagc

SEQ ID NO: 5530821 - DNA, 25 bp, Homo sapien
atttggcaacagaagtatattacaa

SEQ ID NO: 5530822 - DNA, 25 bp, Homo sapien
ggagatgggtaggttctccctccgc

SEQ ID NO: 5530823 - DNA, 25 bp, Homo sapien
gggctctggcctccaatgctgctac

SEQ ID NO: 5530824 - DNA, 25 bp, Homo sapien
cgctccccaactcgagagccaaatc

SEQ ID NO: 5530825 - DNA, 25 bp, Homo sapien
ggcctccaatgctgctacggggccg

SEQ ID NO: 5530826 - DNA, 25 bp, Homo sapien
ctcccccagcccttcgctccccaac

SEQ ID NO: 5530827 - DNA, 25 bp, Homo sapien
aaatccccaagcctgggtatgagaa

SEQ ID NO: 5530828 - DNA, 25 bp, Homo sapien
cctggaaatccccaagcctgggtat

SEQ ID NO: 5530829 - DNA, 25 bp, Homo sapien
ccttcctcttgcccccatcccttct

SEQ ID NO: 5530830 - DNA, 25 bp, Homo sapien
gaggcccagagcatgcctccccaga

SEQ ID NO: 5530831 - DNA, 25 bp, Homo sapien
ccccaactcgagagccaaatctgtg

SEQ ID NO: 5530832 - DNA, 25 bp, Homo sapien
aactcgagagccaaatctgtgaggg

SEQ ID NO: 5530833 - DNA, 25 bp, Homo sapien
atacacaagtccacgggtgttccgc

SEQ ID NO: 5530834 - DNA, 25 bp, Homo sapien
cccatctaagggcactaagtgtcat

SEQ ID NO: 5530835 - DNA, 25 bp, Homo sapien
gaactgcctgctaccagagtcaata

SEQ ID NO: 5530836 - DNA, 25 bp, Homo sapien
tgagcctctctaagctgtgcaggcc

SEQ ID NO: 5530837 - DNA, 25 bp, Homo sapien
ggccgaggcaagatgtatcccatct

SEQ ID NO: 5530838 - DNA, 25 bp, Homo sapien
accaggtgcctgtttccatggagct

SEQ ID NO: 5530839 - DNA, 25 bp, Homo sapien
tagcatttgccaagctgtgagcctc

SEQ ID NO: 5530840 - DNA, 25 bp, Homo sapien
ttacgtcctgtcttcccaaagccta

SEQ ID NO: 5530841 - DNA, 25 bp, Homo sapien
taagtgtcataggccccaaaggctg

SEQ ID NO: 5530842 - DNA, 25 bp, Homo sapien
aactatcattacaagaagtacagga

SEQ ID NO: 5530843 - DNA, 25 bp, Homo sapien
ggctgtggccaaagctatctgaccc

SEQ ID NO: 5530844 - DNA, 25 bp, Homo sapien
tcacagacatttcttggagcagatc

SEQ ID NO: 5530845 - DNA, 25 bp, Homo sapien
ggcggccctccatgtacccctgatt

SEQ ID NO: 5530846 - DNA, 25 bp, Homo sapien
gcagatcccacagcaccgtacagca

SEQ ID NO: 5530847 - DNA, 25 bp, Homo sapien
cccccaccgcttcatctgcagatcc

SEQ ID NO: 5530848 - DNA, 25 bp, Homo sapien
accgtacagcactctggtcccccgt

SEQ ID NO: 5530849 - DNA, 25 bp, Homo sapien
gccaagcatccgatctgaggggcaa

SEQ ID NO: 5530850 - DNA, 25 bp, Homo sapien
tgaggtcacagactggcttagaaac

SEQ ID NO: 5530851 - DNA, 25 bp, Homo sapien
cccctgatttgggggcaatgaaggg

SEQ ID NO: 5530852 - DNA, 25 bp, Homo sapien
aggctgggtctttggcccccatcct

SEQ ID NO: 5530853 - DNA, 25 bp, Homo sapien
agatatatgttggggtgcctccccc

SEQ ID NO: 5530854 - DNA, 25 bp, Homo sapien
cgtgccccctcccccgatgacaagg

SEQ ID NO: 5530855 - DNA, 25 bp, Homo sapien
aacaagtctacggatttgaaatggc

SEQ ID NO: 5530856 - DNA, 25 bp, Homo sapien
tccactgcactgtaactgggggatg

SEQ ID NO: 5530857 - DNA, 25 bp, Homo sapien
gagcaccagacttccaagagttatt

SEQ ID NO: 5530858 - DNA, 25 bp, Homo sapien
ggaacataaccaagtgacaacatac

SEQ ID NO: 5530859 - DNA, 25 bp, Homo sapien
agcaagagtatcaaagaaacaagtc

SEQ ID NO: 5530860 - DNA, 25 bp, Homo sapien
ttgaaatggcatgttgcttgcacta

SEQ ID NO: 5530861 - DNA, 25 bp, Homo sapien
caacatacaaacaagttctagattc

SEQ ID NO: 5530862 - DNA, 25 bp, Homo sapien
acagtgactccataagccagcaaat

SEQ ID NO: 5530863 - DNA, 25 bp, Homo sapien
gggactcagcaacagtgactccata

SEQ ID NO: 5530864 - DNA, 25 bp, Homo sapien
tccaagagttattgggatgtgggag

SEQ ID NO: 5530865 - DNA, 25 bp, Homo sapien
ctagaagaaactaccatttgcaatc

SEQ ID NO: 5530866 - DNA, 25 bp, Homo sapien
aaagccagaggcttcgccccatttc

SEQ ID NO: 5530867 - DNA, 25 bp, Homo sapien
ccacttggctctgcagcaatcccac

SEQ ID NO: 5530868 - DNA, 25 bp, Homo sapien
tcagaatcccagtgtgtcacagcac

SEQ ID NO: 5530869 - DNA, 25 bp, Homo sapien
tgccacccaacagggcacaagacaa

SEQ ID NO: 5530870 - DNA, 25 bp, Homo sapien
gcatctgtacagcacactcgggagt

SEQ ID NO: 5530871 - DNA, 25 bp, Homo sapien
tttaggcccagtggctaccagaaga

SEQ ID NO: 5530872 - DNA, 25 bp, Homo sapien
gcaatcccacccgcaggtttaggcc

SEQ ID NO: 5530873 - DNA, 25 bp, Homo sapien
agctaggacgctcctagggaaaagg

SEQ ID NO: 5530874 - DNA, 25 bp, Homo sapien
gtgtcacagcacaccagctaggacg

SEQ ID NO: 5530875 - DNA, 25 bp, Homo sapien
gtccccatgagtcctgtgggagcac

SEQ ID NO: 5530876 - DNA, 25 bp, Homo sapien
gagggctgaagaaccaataccttgg

SEQ ID NO: 5530877 - DNA, 25 bp, Homo sapien
tcagtgaaaaagacgcagtcctcat

SEQ ID NO: 5530878 - DNA, 25 bp, Homo sapien
taagatcaggaatctatgaggttat

SEQ ID NO: 5530879 - DNA, 25 bp, Homo sapien
aaatgtcggttgtatcaagaccttc

SEQ ID NO: 5530880 - DNA, 25 bp, Homo sapien
tttagaggtctaagactccagcctt

SEQ ID NO: 5530881 - DNA, 25 bp, Homo sapien
gaaacaggctctgttacggcgctgg

SEQ ID NO: 5530882 - DNA, 25 bp, Homo sapien
cagcattaacaggagtaaaatttac

SEQ ID NO: 5530883 - DNA, 25 bp, Homo sapien
taatatgcagtccagttcaccctac

SEQ ID NO: 5530884 - DNA, 25 bp, Homo sapien
cacagtgaaatcatagggtcagtga

SEQ ID NO: 5530885 - DNA, 25 bp, Homo sapien
ataagagctggatgaaactaaatat

SEQ ID NO: 5530886 - DNA, 25 bp, Homo sapien
aacacaaaggtgtcactgctcaggg

SEQ ID NO: 5530887 - DNA, 25 bp, Homo sapien
attgaacactgtatggcatcttgcc

SEQ ID NO: 5530888 - DNA, 25 bp, Homo sapien
tcctgtctcagggtgaggacctgaa

SEQ ID NO: 5530889 - DNA, 25 bp, Homo sapien
ggccattgtaggagatttactgaga

SEQ ID NO: 5530890 - DNA, 25 bp, Homo sapien
gctctgaatcagagagcagtgagac

SEQ ID NO: 5530891 - DNA, 25 bp, Homo sapien
gaaacaatcaaggggcctcgatttc

SEQ ID NO: 5530892 - DNA, 25 bp, Homo sapien
ggagagaacccgaaagatctcagtg

SEQ ID NO: 5530893 - DNA, 25 bp, Homo sapien
ccccaagcaccacgtagggggatta

SEQ ID NO: 5530894 - DNA, 25 bp, Homo sapien
acccgaaagatctcagtggggaaag

SEQ ID NO: 5530895 - DNA, 25 bp, Homo sapien
acagaaatcatcaagagggctcctt

SEQ ID NO: 5530896 - DNA, 25 bp, Homo sapien
gcagtgagacctaagggtccctgat

SEQ ID NO: 5530897 - DNA, 25 bp, Homo sapien
gatttactgagatggtatcgggatg

SEQ ID NO: 5530898 - DNA, 25 bp, Homo sapien
ggtgcagggtgtttcacagaaacaa

SEQ ID NO: 5530899 - DNA, 25 bp, Homo sapien
gtaagcataagtttaagtgacatct

SEQ ID NO: 5530900 - DNA, 25 bp, Homo sapien
attacgtacaaaagaattgctgttt

SEQ ID NO: 5530901 - DNA, 25 bp, Homo sapien
aggatgaaatgtcctattacgtaca

SEQ ID NO: 5530902 - DNA, 25 bp, Homo sapien
gcctacaggtaggaaagttcttgct

SEQ ID NO: 5530903 - DNA, 25 bp, Homo sapien
tgatgtgatgagatgcagaataatt

SEQ ID NO: 5530904 - DNA, 25 bp, Homo sapien
ttgctgtttagaatttgccacaatt

SEQ ID NO: 5530905 - DNA, 25 bp, Homo sapien
catattgagcgattagtctttagtt

SEQ ID NO: 5530906 - DNA, 25 bp, Homo sapien
tagtacagaaatactgtgatgtgat

SEQ ID NO: 5530907 - DNA, 25 bp, Homo sapien
atcagcacagtgcatacaatatgta

SEQ ID NO: 5530908 - DNA, 25 bp, Homo sapien
tattgcctacaggtaggaaagttct

SEQ ID NO: 5530909 - DNA, 25 bp, Homo sapien
atatgaataaatagtacagaaatac

SEQ ID NO: 5530910 - DNA, 25 bp, Homo sapien
tcataaagtcagtgcaataggtaac

SEQ ID NO: 5530911 - DNA, 25 bp, Homo sapien
cccggagggaacatctctcctagcc

SEQ ID NO: 5530912 - DNA, 25 bp, Homo sapien
ttgggagggcattcctagttcttct

SEQ ID NO: 5530913 - DNA, 25 bp, Homo sapien
gggattctgaagcagcccctgaatt

SEQ ID NO: 5530914 - DNA, 25 bp, Homo sapien
aaaggcatgccaggttttccagcac

SEQ ID NO: 5530915 - DNA, 25 bp, Homo sapien
actggttcataaggtttgtggggat

SEQ ID NO: 5530916 - DNA, 25 bp, Homo sapien
aaggatctgggtaagtgctatcaaa

SEQ ID NO: 5530917 - DNA, 25 bp, Homo sapien
aacgtatctggcaaagatgggattc

SEQ ID NO: 5530918 - DNA, 25 bp, Homo sapien
aagggcactggaagagatatcttca

SEQ ID NO: 5530919 - DNA, 25 bp, Homo sapien
accaggtacagccaaggtccctttg

SEQ ID NO: 5530920 - DNA, 25 bp, Homo sapien
agaggcattcaggttggattcaact

SEQ ID NO: 5530921 - DNA, 25 bp, Homo sapien
agctggcgactgcagcctgccttta

SEQ ID NO: 5530922 - DNA, 25 bp, Homo sapien
cgcaaatcgccttgtcctggaaatc

SEQ ID NO: 5530923 - DNA, 25 bp, Homo sapien
gcatccaattcacagcttctagctc

SEQ ID NO: 5530924 - DNA, 25 bp, Homo sapien
ttggaatacttagcaagctggcgac

SEQ ID NO: 5530925 - DNA, 25 bp, Homo sapien
ccaggttctccccgggagaagccgc

SEQ ID NO: 5530926 - DNA, 25 bp, Homo sapien
tttactgagggtacagccctgtaag

SEQ ID NO: 5530927 - DNA, 25 bp, Homo sapien
atggctccaggttctccccgggaga

SEQ ID NO: 5530928 - DNA, 25 bp, Homo sapien
attcccacgtgtaaccagaagcaaa

SEQ ID NO: 5530929 - DNA, 25 bp, Homo sapien
gccctgtaagtgcccaactgcatcc

SEQ ID NO: 5530930 - DNA, 25 bp, Homo sapien
cagcttctagctcaccagtcctctt

SEQ ID NO: 5530931 - DNA, 25 bp, Homo sapien
tagcaggctgtcacgcaaatcgcct

SEQ ID NO: 5530932 - DNA, 25 bp, Homo sapien
gaacaccgaaaaagcgacactgatt

SEQ ID NO: 5530933 - DNA, 25 bp, Homo sapien
tccacacagatgggagcatcgtgga

SEQ ID NO: 5530934 - DNA, 25 bp, Homo sapien
gacactgattgtcgtccacacagat

SEQ ID NO: 5530935 - DNA, 25 bp, Homo sapien
ctctggctcccggccaagaaaaagg

SEQ ID NO: 5530936 - DNA, 25 bp, Homo sapien
tccaacccctctggctcccggccaa

SEQ ID NO: 5530937 - DNA, 25 bp, Homo sapien
ttgtcgtccacacagatgggagcat

SEQ ID NO: 5530938 - DNA, 25 bp, Homo sapien
gggctgctgcagacaatgtcttcac

SEQ ID NO: 5530939 - DNA, 25 bp, Homo sapien
cttcaccacgtctgtggcgaacgcg

SEQ ID NO: 5530940 - DNA, 25 bp, Homo sapien
catctcaggacatgttctgtctggt

SEQ ID NO: 5530941 - DNA, 25 bp, Homo sapien
gacatgttctgtctggtaggacggc

SEQ ID NO: 5530942 - DNA, 25 bp, Homo sapien
caggtcctcagtctcctccaacccc

SEQ ID NO: 5530943 - DNA, 25 bp, Homo sapien
tgtgaccacagatgatgtaactatt

SEQ ID NO: 5530944 - DNA, 25 bp, Homo sapien
tccaagtaataacctggatcaatcc

SEQ ID NO: 5530945 - DNA, 25 bp, Homo sapien
aggatataaaacacatattcagctt

SEQ ID NO: 5530946 - DNA, 25 bp, Homo sapien
ttcagggtgttgtgaccacagatga

SEQ ID NO: 5530947 - DNA, 25 bp, Homo sapien
agcctatagcatctggtctcccatc

SEQ ID NO: 5530948 - DNA, 25 bp, Homo sapien
ctggatcaatcctgcttaagtttcc

SEQ ID NO: 5530949 - DNA, 25 bp, Homo sapien
atattaggcattttcagggtgttgt

SEQ ID NO: 5530950 - DNA, 25 bp, Homo sapien
atttgggctcaaactgcatacatat

SEQ ID NO: 5530951 - DNA, 25 bp, Homo sapien
gaaaagagatagaacttatagtcct

SEQ ID NO: 5530952 - DNA, 25 bp, Homo sapien
actgaacaatgtaaagaaaagagat

SEQ ID NO: 5530953 - DNA, 25 bp, Homo sapien
ttaacttgtgcgtacttatgctttc

SEQ ID NO: 5530954 - DNA, 25 bp, Homo sapien
cacactgaactggcaataacatctt

SEQ ID NO: 5530955 - DNA, 25 bp, Homo sapien
acgcgagcagactaggtcctttctt

SEQ ID NO: 5530956 - DNA, 25 bp, Homo sapien
ctcccccactgaagccatgaactag

SEQ ID NO: 5530957 - DNA, 25 bp, Homo sapien
agcttgaagtggtccatatgtacac

SEQ ID NO: 5530958 - DNA, 25 bp, Homo sapien
atagaaatacacactgaactggcaa

SEQ ID NO: 5530959 - DNA, 25 bp, Homo sapien
gggtgttcataagttccactgtaac

SEQ ID NO: 5530960 - DNA, 25 bp, Homo sapien
taaatctctaggctagggtgttcat

SEQ ID NO: 5530961 - DNA, 25 bp, Homo sapien
agcagcaacaaaaggatgacaaatt

SEQ ID NO: 5530962 - DNA, 25 bp, Homo sapien
gagtacctgcaagtcgcaccactta

SEQ ID NO: 5530963 - DNA, 25 bp, Homo sapien
tgaactagtttcaaaagcagcaaca

SEQ ID NO: 5530964 - DNA, 25 bp, Homo sapien
ccactgtaacttaggatttgctttt

SEQ ID NO: 5530965 - DNA, 25 bp, Homo sapien
ccaccacccctccccggactcactg

SEQ ID NO: 5530966 - DNA, 25 bp, Homo sapien
cagtgagtccggggaggggtggtgg

SEQ ID NO: 5530967 - DNA, 25 bp, Homo sapien
catcagcaactgttttcccagacct

SEQ ID NO: 5530968 - DNA, 25 bp, Homo sapien
gatggttaaaataggacagacagac

SEQ ID NO: 5530969 - DNA, 25 bp, Homo sapien
gcctggaacacatccttcccaagag

SEQ ID NO: 5530970 - DNA, 25 bp, Homo sapien
tccttcccaagagatactgaacctc

SEQ ID NO: 5530971 - DNA, 25 bp, Homo sapien
gtcttaggaaaagaccattgcaggg

SEQ ID NO: 5530972 - DNA, 25 bp, Homo sapien
gagataagtaagatatcagttaaaa

SEQ ID NO: 5530973 - DNA, 25 bp, Homo sapien
aagggatgcccgcagctttcagtat

SEQ ID NO: 5530974 - DNA, 25 bp, Homo sapien
tcattgagggttcttcaaagtgtgg

SEQ ID NO: 5530975 - DNA, 25 bp, Homo sapien
ttacacgacttgtgagataagtaag

SEQ ID NO: 5530976 - DNA, 25 bp, Homo sapien
tcccagacctgacactgccaggtgt

SEQ ID NO: 5530977 - DNA, 25 bp, Homo sapien
tgcaggggcacagtctttcaacccc

SEQ ID NO: 5530978 - DNA, 25 bp, Homo sapien
gtcctggtatggaaacctcagcaga

SEQ ID NO: 5530979 - DNA, 25 bp, Homo sapien
acatgaagaacagccaagacctttt

SEQ ID NO: 5530980 - DNA, 25 bp, Homo sapien
tgagtcagctcagtctagaagggta

SEQ ID NO: 5530981 - DNA, 25 bp, Homo sapien
ggaaattgccagacagctgcaccac

SEQ ID NO: 5530982 - DNA, 25 bp, Homo sapien
tgtgacctgaaagctgccaatgcca

SEQ ID NO: 5530983 - DNA, 25 bp, Homo sapien
tgttgcacgcatgcttgaggaactc

SEQ ID NO: 5530984 - DNA, 25 bp, Homo sapien
agagatgagggacaactttaccatc

SEQ ID NO: 5530985 - DNA, 25 bp, Homo sapien
cacagactgagtcacgtggatgtgg

SEQ ID NO: 5530986 - DNA, 25 bp, Homo sapien
agctctgaaagaagtgttcgactac

SEQ ID NO: 5530987 - DNA, 25 bp, Homo sapien
gtggatgtggttaaagttgtctgca

SEQ ID NO: 5530988 - DNA, 25 bp, Homo sapien
ccctcaaaggatgtgcagtctctca

SEQ ID NO: 5530989 - DNA, 25 bp, Homo sapien
ggtcccctgtgcagcatcagcttat

SEQ ID NO: 5530990 - DNA, 25 bp, Homo sapien
agtgaattgataaaacccgaagctt

SEQ ID NO: 5530991 - DNA, 25 bp, Homo sapien
ttgtgcgcttcctgccttaagtgac

SEQ ID NO: 5530992 - DNA, 25 bp, Homo sapien
taatgttgcaggctaataacctttc

SEQ ID NO: 5530993 - DNA, 25 bp, Homo sapien
tgctgccacaagtcagtttgcaccc

SEQ ID NO: 5530994 - DNA, 25 bp, Homo sapien
gcaacatggcttgggtcccctgtgc

SEQ ID NO: 5530995 - DNA, 25 bp, Homo sapien
agcttaacatggactcaggttcccc

SEQ ID NO: 5530996 - DNA, 25 bp, Homo sapien
aggtgcccaggagctagtatcctta

SEQ ID NO: 5530997 - DNA, 25 bp, Homo sapien
agtagtgcctaatgaaggttgagaa

SEQ ID NO: 5530998 - DNA, 25 bp, Homo sapien
ttaaagaatgggttacaaccatcac

SEQ ID NO: 5530999 - DNA, 25 bp, Homo sapien
ttaagtgacaagtagcaacatggct

SEQ ID NO: 5531000 - DNA, 25 bp, Homo sapien
gtctgaagcatcaaaaaacaacgtt

SEQ ID NO: 5531001 - DNA, 25 bp, Homo sapien
aaaagcattaagagtctgaagcatc

SEQ ID NO: 5531002 - DNA, 25 bp, Homo sapien
tttctaaaagatcggcaaggattgc

SEQ ID NO: 5531003 - DNA, 25 bp, Homo sapien
aagatcggcaaggattgccaatctt

SEQ ID NO: 5531004 - DNA, 25 bp, Homo sapien
actggcaagacgctgtgctaatact

SEQ ID NO: 5531005 - DNA, 25 bp, Homo sapien
atggcctccaacactggcaagacgc

SEQ ID NO: 5531006 - DNA, 25 bp, Homo sapien
taaaaagatgcagctccatgttcat

SEQ ID NO: 5531007 - DNA, 25 bp, Homo sapien
ctgaaataaaagctgccagtcagta

SEQ ID NO: 5531008 - DNA, 25 bp, Homo sapien
taaaagctgccagtcagtaaacact

SEQ ID NO: 5531009 - DNA, 25 bp, Homo sapien
aaaaggtatttctaaaagatcggca

SEQ ID NO: 5531010 - DNA, 25 bp, Homo sapien
aacaacgtttaaaaagatgcagctc

SEQ ID NO: 5531011 - DNA, 25 bp, Homo sapien
atgtgccattgtcaggtgcaaaacc

SEQ ID NO: 5531012 - DNA, 25 bp, Homo sapien
aggaagaaaataacctaacatgttc

SEQ ID NO: 5531013 - DNA, 25 bp, Homo sapien
tctcagtatgtcattgtagcagtcc

SEQ ID NO: 5531014 - DNA, 25 bp, Homo sapien
ggtgcaaaacctggcgactactctg

SEQ ID NO: 5531015 - DNA, 25 bp, Homo sapien
cctaacatgttcaaaagggcaagga

SEQ ID NO: 5531016 - DNA, 25 bp, Homo sapien
aaatggaagcacaataatgatcagc

SEQ ID NO: 5531017 - DNA, 25 bp, Homo sapien
attacacattggtaaggccccagga

SEQ ID NO: 5531018 - DNA, 25 bp, Homo sapien
ctaaaatagaatccacacaggcttc

SEQ ID NO: 5531019 - DNA, 25 bp, Homo sapien
cttgaacctttatgcactgagtgcc

SEQ ID NO: 5531020 - DNA, 25 bp, Homo sapien
gcttaaaggcacgtctagtatacac

SEQ ID NO: 5531021 - DNA, 25 bp, Homo sapien
gtaagtcagtttgtaaagcatgatt

SEQ ID NO: 5531022 - DNA, 25 bp, Homo sapien
cccaagtaaagacgcccaagctaaa

SEQ ID NO: 5531023 - DNA, 25 bp, Homo sapien
cctggatcctctgaaaaccccaagt

SEQ ID NO: 5531024 - DNA, 25 bp, Homo sapien
cctggtacatatctgcacgtaagtc

SEQ ID NO: 5531025 - DNA, 25 bp, Homo sapien
ttcaggtacatccacaagactttgc

SEQ ID NO: 5531026 - DNA, 25 bp, Homo sapien
agtaatgggcatgcttatgtgaatt

SEQ ID NO: 5531027 - DNA, 25 bp, Homo sapien
cgcccaagctaaaatgatgttctcc

SEQ ID NO: 5531028 - DNA, 25 bp, Homo sapien
tgcatacagtgaggttcctggatcc

SEQ ID NO: 5531029 - DNA, 25 bp, Homo sapien
agaaactatgtgacctgcctccaaa

SEQ ID NO: 5531030 - DNA, 25 bp, Homo sapien
cctacatttgaggaaaataagagaa

SEQ ID NO: 5531031 - DNA, 25 bp, Homo sapien
ttaattaatgggagctcagcacaca

SEQ ID NO: 5531032 - DNA, 25 bp, Homo sapien
gtaagtcagttgaagctgtaggttc

SEQ ID NO: 5531033 - DNA, 25 bp, Homo sapien
gctctctctagaatcctcgggcccc

SEQ ID NO: 5531034 - DNA, 25 bp, Homo sapien
tctcacacacgcgagtgttcccagc

SEQ ID NO: 5531035 - DNA, 25 bp, Homo sapien
ctagaatcctcgggcccccactttc

SEQ ID NO: 5531036 - DNA, 25 bp, Homo sapien
catcctaaatctctcacacacgcga

SEQ ID NO: 5531037 - DNA, 25 bp, Homo sapien
cttgcctctgctccgacgccgttgg

SEQ ID NO: 5531038 - DNA, 25 bp, Homo sapien
gaccaccgcgctttcccctcctcag

SEQ ID NO: 5531039 - DNA, 25 bp, Homo sapien
tcctccgttcattttctgcaccctc

SEQ ID NO: 5531040 - DNA, 25 bp, Homo sapien
aggtggttccccagccgctcaaatt

SEQ ID NO: 5531041 - DNA, 25 bp, Homo sapien
aggccagtgcccctggatcttgcct

SEQ ID NO: 5531042 - DNA, 25 bp, Homo sapien
cgctcaaatttccggaccaccgcgc

SEQ ID NO: 5531043 - DNA, 25 bp, Homo sapien
gatcttgcctctgctccgacgccgt

SEQ ID NO: 5531044 - DNA, 25 bp, Homo sapien
gtctcttcgacaaatacctgggagc

SEQ ID NO: 5531045 - DNA, 25 bp, Homo sapien
ggcgggtattcgggtctcttcgaca

SEQ ID NO: 5531046 - DNA, 25 bp, Homo sapien
tgcatcctcatgggttacggtaggg

SEQ ID NO: 5531047 - DNA, 25 bp, Homo sapien
cagcgacttcgctgacggtgtccga

SEQ ID NO: 5531048 - DNA, 25 bp, Homo sapien
tcttcgacaaatacctgggagcagc

SEQ ID NO: 5531049 - DNA, 25 bp, Homo sapien
gcttctgctatcgaccccggcccga

SEQ ID NO: 5531050 - DNA, 25 bp, Homo sapien
gggagcagcgacttcgctgacggtg

SEQ ID NO: 5531051 - DNA, 25 bp, Homo sapien
gccagcctgtaacataaacagctgg

SEQ ID NO: 5531052 - DNA, 25 bp, Homo sapien
gacacggtacagaccttcgtcattc

SEQ ID NO: 5531053 - DNA, 25 bp, Homo sapien
ggcgcctgcatcctcatgggttacg

SEQ ID NO: 5531054 - DNA, 25 bp, Homo sapien
tctccggtctgagggtcctaaggag

SEQ ID NO: 5531055 - DNA, 25 bp, Homo sapien
tacagtgcacaacaaagtgaggaaa

SEQ ID NO: 5531056 - DNA, 25 bp, Homo sapien
caacatgcagttgtggtctttgtta

SEQ ID NO: 5531057 - DNA, 25 bp, Homo sapien
tttaagcaattaagctcagccacct

SEQ ID NO: 5531058 - DNA, 25 bp, Homo sapien
ctaatccaacatgcagttgtggtct

SEQ ID NO: 5531059 - DNA, 25 bp, Homo sapien
tttcattacagtgcacaacaaagtg

SEQ ID NO: 5531060 - DNA, 25 bp, Homo sapien
gaggaaaagtatacagtacatttta

SEQ ID NO: 5531061 - DNA, 25 bp, Homo sapien
tgcacaacaaagtgaggaaaagtat

SEQ ID NO: 5531062 - DNA, 25 bp, Homo sapien
aatatgagacaatctaatccaacat

SEQ ID NO: 5531063 - DNA, 25 bp, Homo sapien
aacccacttattgcagtgacaatgg

SEQ ID NO: 5531064 - DNA, 25 bp, Homo sapien
atgtagtaaaatagcttctaaagct

SEQ ID NO: 5531065 - DNA, 25 bp, Homo sapien
acctgccagaaaatgccaggagtgg

SEQ ID NO: 5531066 - DNA, 25 bp, Homo sapien
tactgaaagttacacacttaggaac

SEQ ID NO: 5531067 - DNA, 25 bp, Homo sapien
ggctgccaccaccaagtaaacaact

SEQ ID NO: 5531068 - DNA, 25 bp, Homo sapien
aacggattttgtacaaggcagccat

SEQ ID NO: 5531069 - DNA, 25 bp, Homo sapien
tgttagtgtctcaacaaggagagca

SEQ ID NO: 5531070 - DNA, 25 bp, Homo sapien
agtaaacaactagaaaaggacagcg

SEQ ID NO: 5531071 - DNA, 25 bp, Homo sapien
tttaagtgacaacatttgagagcta

SEQ ID NO: 5531072 - DNA, 25 bp, Homo sapien
acacttaggaacagtcagaccacag

SEQ ID NO: 5531073 - DNA, 25 bp, Homo sapien
taaaaaccagctcacatcaaaatca

SEQ ID NO: 5531074 - DNA, 25 bp, Homo sapien
aaatcaagacccagttgtaaaaatc

SEQ ID NO: 5531075 - DNA, 25 bp, Homo sapien
cacgagtcgccctcctctggcctgc

SEQ ID NO: 5531076 - DNA, 25 bp, Homo sapien
cagccataaggaatataataaacct

SEQ ID NO: 5531077 - DNA, 25 bp, Homo sapien
gtagaacatttataaggtattggag

SEQ ID NO: 5531078 - DNA, 25 bp, Homo sapien
ctccaataccttataaatgttctac

SEQ ID NO: 5531079 - DNA, 25 bp, Homo sapien
taagaggtatcaaaaaataggagac

SEQ ID NO: 5531080 - DNA, 25 bp, Homo sapien
ctttaaggtaatgctgaaggaatac

SEQ ID NO: 5531081 - DNA, 25 bp, Homo sapien
aaagcatacagaggcactgtctttc

SEQ ID NO: 5531082 - DNA, 25 bp, Homo sapien
aaaaataggagacaaacattgcttg

SEQ ID NO: 5531083 - DNA, 25 bp, Homo sapien
ggtaatgctgaaggaatacatatac

SEQ ID NO: 5531084 - DNA, 25 bp, Homo sapien
atttgaacatgtactgtgacacttt

SEQ ID NO: 5531085 - DNA, 25 bp, Homo sapien
aagatgaaccaggattcaagtttaa

SEQ ID NO: 5531086 - DNA, 25 bp, Homo sapien
aaatacaaaaagcatacagaggcac

SEQ ID NO: 5531087 - DNA, 25 bp, Homo sapien
gattccaccaatgtattagtagata

SEQ ID NO: 5531088 - DNA, 25 bp, Homo sapien
aaaagacataagtttaagaggtatc

SEQ ID NO: 5531089 - DNA, 25 bp, Homo sapien
ttgtgcagtagaattgctatctgat

SEQ ID NO: 5531090 - DNA, 25 bp, Homo sapien
accagctctgcaaattcccatcctc

SEQ ID NO: 5531091 - DNA, 25 bp, Homo sapien
aatagtactggtcgttataatttgc

SEQ ID NO: 5531092 - DNA, 25 bp, Homo sapien
caggagtcatgagatggacatgtta

SEQ ID NO: 5531093 - DNA, 25 bp, Homo sapien
ttgaaagctagaatttaggaattcc

SEQ ID NO: 5531094 - DNA, 25 bp, Homo sapien
ccagaaatgaagcaaatcaacacaa

SEQ ID NO: 5531095 - DNA, 25 bp, Homo sapien
atacagactgtagccatggattttc

SEQ ID NO: 5531096 - DNA, 25 bp, Homo sapien
aatgaaggaaatgtcaccagctctg

SEQ ID NO: 5531097 - DNA, 25 bp, Homo sapien
gttggaaacagtagtatttgaaagc

SEQ ID NO: 5531098 - DNA, 25 bp, Homo sapien
gaggaggtagctactgaaaatgttt

SEQ ID NO: 5531099 - DNA, 25 bp, Homo sapien
ctgtcaaggattcactgttggaaac

SEQ ID NO: 5531100 - DNA, 25 bp, Homo sapien
tttagaaaccagcctttgatctcac

SEQ ID NO: 5531101 - DNA, 25 bp, Homo sapien
tggctgtcccccttgggctctcgtt

SEQ ID NO: 5531102 - DNA, 25 bp, Homo sapien
ttcacaacatgtagatagggccaac

SEQ ID NO: 5531103 - DNA, 25 bp, Homo sapien
cactgaacacatcatgagcatcact

SEQ ID NO: 5531104 - DNA, 25 bp, Homo sapien
aaggtgatatagtttagatgtctct

SEQ ID NO: 5531105 - DNA, 25 bp, Homo sapien
gtagatagggccaacattcacagag

SEQ ID NO: 5531106 - DNA, 25 bp, Homo sapien
aagttctcgtgagatctggctgtcc

SEQ ID NO: 5531107 - DNA, 25 bp, Homo sapien
ccaacagcctaaacagtacgagttc

SEQ ID NO: 5531108 - DNA, 25 bp, Homo sapien
ttcaacacaacagtaagttctcgtg

SEQ ID NO: 5531109 - DNA, 25 bp, Homo sapien
ttcacagaggataagggcatttgta

SEQ ID NO: 5531110 - DNA, 25 bp, Homo sapien
agcatcacttcgggagaaaaccaat

SEQ ID NO: 5531111 - DNA, 25 bp, Homo sapien
ttctcaagagtatcaccaacagcct

SEQ ID NO: 5531112 - DNA, 25 bp, Homo sapien
tctgtatctggagtgttgaatcaac

SEQ ID NO: 5531113 - DNA, 25 bp, Homo sapien
tacttaaaagaggcaaaactggaca

SEQ ID NO: 5531114 - DNA, 25 bp, Homo sapien
caactggacagtacttaaaagaggc

SEQ ID NO: 5531115 - DNA, 25 bp, Homo sapien
agtcaggaggtttcaactggacagt

SEQ ID NO: 5531116 - DNA, 25 bp, Homo sapien
tataactggatgaaagcatctataa

SEQ ID NO: 5531117 - DNA, 25 bp, Homo sapien
tacaactgttggctgaaatatttac

SEQ ID NO: 5531118 - DNA, 25 bp, Homo sapien
tagtttgtgtagtagtacatgagtc

SEQ ID NO: 5531119 - DNA, 25 bp, Homo sapien
ataggcaccctagatgtaaaacttt

SEQ ID NO: 5531120 - DNA, 25 bp, Homo sapien
aaagacaaatgtctgagactgctgt

SEQ ID NO: 5531121 - DNA, 25 bp, Homo sapien
aatataacattctgaaggtaagtat

SEQ ID NO: 5531122 - DNA, 25 bp, Homo sapien
gtagtacatgagtcaggaggtttca

SEQ ID NO: 5531123 - DNA, 25 bp, Homo sapien
atctcagggagaaatcccccacggt

SEQ ID NO: 5531124 - DNA, 25 bp, Homo sapien
gtggagctgtatataggatgctggt

SEQ ID NO: 5531125 - DNA, 25 bp, Homo sapien
aggatggaagagatgagctctttct

SEQ ID NO: 5531126 - DNA, 25 bp, Homo sapien
atgcagctggtcaaagcacacctca

SEQ ID NO: 5531127 - DNA, 25 bp, Homo sapien
taaaagaaaacaagatccagtggaa

SEQ ID NO: 5531128 - DNA, 25 bp, Homo sapien
tccccaagacactgactcggtcctc

SEQ ID NO: 5531129 - DNA, 25 bp, Homo sapien
tccagtggaactaagagaaacagga

SEQ ID NO: 5531130 - DNA, 25 bp, Homo sapien
gagaggagctaattgcatcggtact

SEQ ID NO: 5531131 - DNA, 25 bp, Homo sapien
ggaaaattaccatgaagagaagcac

SEQ ID NO: 5531132 - DNA, 25 bp, Homo sapien
acaggaatgcaatcaagccacatgc

SEQ ID NO: 5531133 - DNA, 25 bp, Homo sapien
gaacggaactaccctgagctcaggt

SEQ ID NO: 5531134 - DNA, 25 bp, Homo sapien
agaaggcagatttcaggatattcac

SEQ ID NO: 5531135 - DNA, 25 bp, Homo sapien
ggcacgttgctaagaaggcagattt

SEQ ID NO: 5531136 - DNA, 25 bp, Homo sapien
gaacacctgaaacctctgggagatc

SEQ ID NO: 5531137 - DNA, 25 bp, Homo sapien
agatgcagagagtacagtagttgta

SEQ ID NO: 5531138 - DNA, 25 bp, Homo sapien
gtgctgccggtctcgcttccggtac

SEQ ID NO: 5531139 - DNA, 25 bp, Homo sapien
gcccattgagagaactcccaggagc

SEQ ID NO: 5531140 - DNA, 25 bp, Homo sapien
agcaggaaaccaaccttaatggctt

SEQ ID NO: 5531141 - DNA, 25 bp, Homo sapien
gtggataagacggcatcaacttgta

SEQ ID NO: 5531142 - DNA, 25 bp, Homo sapien
tctgagttccaaagttggggtcaac

SEQ ID NO: 5531143 - DNA, 25 bp, Homo sapien
cctcataagtggcatatggacaccc

SEQ ID NO: 5531144 - DNA, 25 bp, Homo sapien
ctctctccagtacacgcggcacgtt

SEQ ID NO: 5531145 - DNA, 25 bp, Homo sapien
agattgctcgttagggccccgtggt

SEQ ID NO: 5531146 - DNA, 25 bp, Homo sapien
accacggggccctaacgagcaatct

SEQ ID NO: 5531147 - DNA, 25 bp, Homo sapien
ctcagcaagatcccaagacagtgtg

SEQ ID NO: 5531148 - DNA, 25 bp, Homo sapien
cgggaacgagctattgacacccctt

SEQ ID NO: 5531149 - DNA, 25 bp, Homo sapien
aagacagatcagagaagtcagaact

SEQ ID NO: 5531150 - DNA, 25 bp, Homo sapien
aagggcagaaccatgaagaatttgg

SEQ ID NO: 5531151 - DNA, 25 bp, Homo sapien
cagggactctccatggggagttgtt

SEQ ID NO: 5531152 - DNA, 25 bp, Homo sapien
gtgctccacgaatgactggatggct

SEQ ID NO: 5531153 - DNA, 25 bp, Homo sapien
ggatttggtggagcaacttgcttcc

SEQ ID NO: 5531154 - DNA, 25 bp, Homo sapien
ggttctctgaatgggacagatgccc

SEQ ID NO: 5531155 - DNA, 25 bp, Homo sapien
agtggccatcgcactgccaaggttc

SEQ ID NO: 5531156 - DNA, 25 bp, Homo sapien
ggctggggtttgtcactgtttcgag

SEQ ID NO: 5531157 - DNA, 25 bp, Homo sapien
tataacacaaacgaccaagacagat

SEQ ID NO: 5531158 - DNA, 25 bp, Homo sapien
ttgatgaaccatggatgaaaaggga

SEQ ID NO: 5531159 - DNA, 25 bp, Homo sapien
cagtggtaatgtgatataatggtaa

SEQ ID NO: 5531160 - DNA, 25 bp, Homo sapien
ctaagaggattatgtgtcttgtttc

SEQ ID NO: 5531161 - DNA, 25 bp, Homo sapien
tacatggaaacctacagcctcatta

SEQ ID NO: 5531162 - DNA, 25 bp, Homo sapien
atcaccagtctacagccactatcta

SEQ ID NO: 5531163 - DNA, 25 bp, Homo sapien
tcacagaatttacatggaaacctac

SEQ ID NO: 5531164 - DNA, 25 bp, Homo sapien
gggatcattgatattctagagaatc

SEQ ID NO: 5531165 - DNA, 25 bp, Homo sapien
atataatggtaattcctaagaggat

SEQ ID NO: 5531166 - DNA, 25 bp, Homo sapien
tatggttcttgtaaggatgtttctc

SEQ ID NO: 5531167 - DNA, 25 bp, Homo sapien
tacacttagggaagatataaattat

SEQ ID NO: 5531168 - DNA, 25 bp, Homo sapien
ttataatacgcctcaatgcatgttc

SEQ ID NO: 5531169 - DNA, 25 bp, Homo sapien
aggtaagagcatgaacaaaagcaaa

SEQ ID NO: 5531170 - DNA, 25 bp, Homo sapien
ttttgtaatgcaggtggatctggct

SEQ ID NO: 5531171 - DNA, 25 bp, Homo sapien
ggaatgaatgccccaaggctgctct

SEQ ID NO: 5531172 - DNA, 25 bp, Homo sapien
cgcaggagtgccctgccttgaaggc

SEQ ID NO: 5531173 - DNA, 25 bp, Homo sapien
ggttattaattggaatgaatgcccc

SEQ ID NO: 5531174 - DNA, 25 bp, Homo sapien
gggtccacagtcatgttcacaagcc

SEQ ID NO: 5531175 - DNA, 25 bp, Homo sapien
aagccatctcttccgcaggagtgcc

SEQ ID NO: 5531176 - DNA, 25 bp, Homo sapien
tctcagggcaagatctgttgtgtta

SEQ ID NO: 5531177 - DNA, 25 bp, Homo sapien
gcattttatatgggagctctggggt

SEQ ID NO: 5531178 - DNA, 25 bp, Homo sapien
caaaagcaaagtttagttcctcgaa

SEQ ID NO: 5531179 - DNA, 25 bp, Homo sapien
ctgggtccccagatattctcagggc

SEQ ID NO: 5531180 - DNA, 25 bp, Homo sapien
gtccaccaggtcagggctcacgcag

SEQ ID NO: 5531181 - DNA, 25 bp, Homo sapien
ctgcgtgagccctgacctggtggac

SEQ ID NO: 5531182 - DNA, 25 bp, Homo sapien
aggcgcacctgagaactcacacagg

SEQ ID NO: 5531183 - DNA, 25 bp, Homo sapien
aggcccttcgcctgcagctggcagg

SEQ ID NO: 5531184 - DNA, 25 bp, Homo sapien
gggaaatcttcgcacctcaaggcgc

SEQ ID NO: 5531185 - DNA, 25 bp, Homo sapien
aatcttcgcacctcaaggcgcacct

SEQ ID NO: 5531186 - DNA, 25 bp, Homo sapien
acgccaacttccacccgggaatgct

SEQ ID NO: 5531187 - DNA, 25 bp, Homo sapien
agaaagtttacgggaaatcttcgca

SEQ ID NO: 5531188 - DNA, 25 bp, Homo sapien
tgccccatctgcgagaagcgcttca

SEQ ID NO: 5531189 - DNA, 25 bp, Homo sapien
cgccgccacgccaacttccacccgg

SEQ ID NO: 5531190 - DNA, 25 bp, Homo sapien
ccttcgcctgcagctggcaggactg

SEQ ID NO: 5531191 - DNA, 25 bp, Homo sapien
agtttacgggaaatcttcgcacctc

SEQ ID NO: 5531192 - DNA, 25 bp, Homo sapien
cgcggcactaccgcacacacacggg

SEQ ID NO: 5531193 - DNA, 25 bp, Homo sapien
ggagaattccacaaactacctagcc

SEQ ID NO: 5531194 - DNA, 25 bp, Homo sapien
gagttagaaagtagagtcatgagga

SEQ ID NO: 5531195 - DNA, 25 bp, Homo sapien
taggaagtagggttaatgccctcta

SEQ ID NO: 5531196 - DNA, 25 bp, Homo sapien
aggtaaaaaggcaactgcatcccac

SEQ ID NO: 5531197 - DNA, 25 bp, Homo sapien
aggtttgggtgtcccagaccctgga

SEQ ID NO: 5531198 - DNA, 25 bp, Homo sapien
ttctcatcacaggtaaaaaggcaac

SEQ ID NO: 5531199 - DNA, 25 bp, Homo sapien
cctcacctgcaaaggagaattccac

SEQ ID NO: 5531200 - DNA, 25 bp, Homo sapien
cagagccagaatcctggcaattcac

SEQ ID NO: 5531201 - DNA, 25 bp, Homo sapien
caacacattcatcaacaaggcggtc

SEQ ID NO: 5531202 - DNA, 25 bp, Homo sapien
atcccacatagctctgagggggagg

SEQ ID NO: 5531203 - DNA, 25 bp, Homo sapien
caacaaggcggtcttcaaatcaatc

SEQ ID NO: 5531204 - DNA, 25 bp, Homo sapien
tgtggcagcaacaggtaaacttcaa

SEQ ID NO: 5531205 - DNA, 25 bp, Homo sapien
aaacacagcgaatttcccctccagt

SEQ ID NO: 5531206 - DNA, 25 bp, Homo sapien
agagtcagaagccccaggctccttt

SEQ ID NO: 5531207 - DNA, 25 bp, Homo sapien
gggtcagtgctggcttaacagaaaa

SEQ ID NO: 5531208 - DNA, 25 bp, Homo sapien
ctccccaagtccactgaacaaggct

SEQ ID NO: 5531209 - DNA, 25 bp, Homo sapien
cagcaacaggtaaacttcaagaagg

SEQ ID NO: 5531210 - DNA, 25 bp, Homo sapien
agtgctggcttaacagaaaacacag

SEQ ID NO: 5531211 - DNA, 25 bp, Homo sapien
gccaagaggccctacccgtgtctaa

SEQ ID NO: 5531212 - DNA, 25 bp, Homo sapien
cttaactcaacagctaaaaaatggc

SEQ ID NO: 5531213 - DNA, 25 bp, Homo sapien
aacaaggctagttcctgcaccaccc

SEQ ID NO: 5531214 - DNA, 25 bp, Homo sapien
gcaccacccaggattcaaaggaaag

SEQ ID NO: 5531215 - DNA, 25 bp, Homo sapien
cagaaagactcaaagggaacatata

SEQ ID NO: 5531216 - DNA, 25 bp, Homo sapien
tctcttagacccgggacatgtggga

SEQ ID NO: 5531217 - DNA, 25 bp, Homo sapien
cctgaagatttggtgatccagtttc

SEQ ID NO: 5531218 - DNA, 25 bp, Homo sapien
aatgtggcaatagtgtagctaacac

SEQ ID NO: 5531219 - DNA, 25 bp, Homo sapien
ggtacagacggaataaacacacctc

SEQ ID NO: 5531220 - DNA, 25 bp, Homo sapien
tagctaacactggtacagacggaat

SEQ ID NO: 5531221 - DNA, 25 bp, Homo sapien
attatgaaccagtgagtactgtaat

SEQ ID NO: 5531222 - DNA, 25 bp, Homo sapien
acccacaacaacaaagatcgatcac

SEQ ID NO: 5531223 - DNA, 25 bp, Homo sapien
aagaggcttggtaagtttttgatac

SEQ ID NO: 5531224 - DNA, 25 bp, Homo sapien
aagcatgcttgtgaaagtagacttc

SEQ ID NO: 5531225 - DNA, 25 bp, Homo sapien
agatcgatcacgaaagacaaggcat

SEQ ID NO: 5531226 - DNA, 25 bp, Homo sapien
ttcaataagaaaagctcagcgcact

SEQ ID NO: 5531227 - DNA, 25 bp, Homo sapien
gaaccacaaacaagtatgaggaagt

SEQ ID NO: 5531228 - DNA, 25 bp, Homo sapien
gcctggtggcaaataaaacattgtc

SEQ ID NO: 5531229 - DNA, 25 bp, Homo sapien
atgaggaagtacaagtttatcagta

SEQ ID NO: 5531230 - DNA, 25 bp, Homo sapien
aagagggagccttctctaccaatgc

SEQ ID NO: 5531231 - DNA, 25 bp, Homo sapien
aggagacttcgtttattggagggga

SEQ ID NO: 5531232 - DNA, 25 bp, Homo sapien
tatcagtaacataccaagagggagc

SEQ ID NO: 5531233 - DNA, 25 bp, Homo sapien
ggaaataagtcagtagaaccacaaa

SEQ ID NO: 5531234 - DNA, 25 bp, Homo sapien
cagcgcactacttgtgaaaggcttc

SEQ ID NO: 5531235 - DNA, 25 bp, Homo sapien
agacagtggaaataagatgagtgtt

SEQ ID NO: 5531236 - DNA, 25 bp, Homo sapien
gaacatctgagaggaaataagacag

SEQ ID NO: 5531237 - DNA, 25 bp, Homo sapien
cccgaaggaccaggcggaggcacga

SEQ ID NO: 5531238 - DNA, 25 bp, Homo sapien
tcgtgcctccgcctggtccttcggg

SEQ ID NO: 5531239 - DNA, 25 bp, Homo sapien
caaagaaggaaggacaatgttttta

SEQ ID NO: 5531240 - DNA, 25 bp, Homo sapien
gggcaccagctccagaccaattcct

SEQ ID NO: 5531241 - DNA, 25 bp, Homo sapien
tataaatgtagttcaatattccccc

SEQ ID NO: 5531242 - DNA, 25 bp, Homo sapien
tcagagacaaatagttgtaagaaac

SEQ ID NO: 5531243 - DNA, 25 bp, Homo sapien
tttaagagaaaactattcagagaca

SEQ ID NO: 5531244 - DNA, 25 bp, Homo sapien
agttgtaagaaactcagagtacctc

SEQ ID NO: 5531245 - DNA, 25 bp, Homo sapien
agaaaaacctgaaacaaaatcacta

SEQ ID NO: 5531246 - DNA, 25 bp, Homo sapien
agaagagactccactgtaaccaaag

SEQ ID NO: 5531247 - DNA, 25 bp, Homo sapien
tttcctggcaaaacagaagagactc

SEQ ID NO: 5531248 - DNA, 25 bp, Homo sapien
gcagtacggaaaccacagataaaca

SEQ ID NO: 5531249 - DNA, 25 bp, Homo sapien
atgtatcataggcagtacggaaacc

SEQ ID NO: 5531250 - DNA, 25 bp, Homo sapien
cacctgaatgtgatgaaagtataca

SEQ ID NO: 5531251 - DNA, 25 bp, Homo sapien
agtggtaaaggggcattctatctgc

SEQ ID NO: 5531252 - DNA, 25 bp, Homo sapien
agatggtggttacctcttaggtggg

SEQ ID NO: 5531253 - DNA, 25 bp, Homo sapien
caaaaactggccgaactaaaatcta

SEQ ID NO: 5531254 - DNA, 25 bp, Homo sapien
ctcaaatggttcaggaagaaactac

SEQ ID NO: 5531255 - DNA, 25 bp, Homo sapien
attcaggtatatagtggtaaagggg

SEQ ID NO: 5531256 - DNA, 25 bp, Homo sapien
ggacaagatagagaaggttcttact

SEQ ID NO: 5531257 - DNA, 25 bp, Homo sapien
ttgatttggtggatacaagtgtgtt

SEQ ID NO: 5531258 - DNA, 25 bp, Homo sapien
aagtatacagaaaagcaagaaagtt

SEQ ID NO: 5531259 - DNA, 25 bp, Homo sapien
acttgtattggaacacacctgaatg

SEQ ID NO: 5531260 - DNA, 25 bp, Homo sapien
aaataaaagtcaagatggtggttac

SEQ ID NO: 5531261 - DNA, 25 bp, Homo sapien
ctgttggtcagaaatactggcgtct

SEQ ID NO: 5531262 - DNA, 25 bp, Homo sapien
cgcatcgcccatggttaagaaaatc

SEQ ID NO: 5531263 - DNA, 25 bp, Homo sapien
tcctgccagtgaatgtaggtaaaac

SEQ ID NO: 5531264 - DNA, 25 bp, Homo sapien
gggcagaaagcttgtctcaaccccg

SEQ ID NO: 5531265 - DNA, 25 bp, Homo sapien
ctggcgtctgccccctaaaaagtaa

SEQ ID NO: 5531266 - DNA, 25 bp, Homo sapien
gttctggtgccagaggatattccca

SEQ ID NO: 5531267 - DNA, 25 bp, Homo sapien
ttgccagttgtgctgaagtgttttc

SEQ ID NO: 5531268 - DNA, 25 bp, Homo sapien
cccgacctcctgtctcacgagattc

SEQ ID NO: 5531269 - DNA, 25 bp, Homo sapien
atgtaaggtctcattggagtttgcc

SEQ ID NO: 5531270 - DNA, 25 bp, Homo sapien
gagccacactcaagaatgggcagaa

SEQ ID NO: 5531271 - DNA, 25 bp, Homo sapien
ttccatgtacacaggcgactggagc

SEQ ID NO: 5531272 - DNA, 25 bp, Homo sapien
tcctcagccacggaaatgagagtca

SEQ ID NO: 5531273 - DNA, 25 bp, Homo sapien
gtggtgcagtactatgggaatttca

SEQ ID NO: 5531274 - DNA, 25 bp, Homo sapien
gtatgctgtcctcgtgtgctgcgtg

SEQ ID NO: 5531275 - DNA, 25 bp, Homo sapien
atgctggtcatcgtctggcagtctg

SEQ ID NO: 5531276 - DNA, 25 bp, Homo sapien
gacggcctggtccaatggctcctca

SEQ ID NO: 5531277 - DNA, 25 bp, Homo sapien
gggaatttcagccgcagcgccaaac

SEQ ID NO: 5531278 - DNA, 25 bp, Homo sapien
gaggtctgtgcggccctcaatgtca

SEQ ID NO: 5531279 - DNA, 25 bp, Homo sapien
ctcaatgtcactgtgtccccggggc

SEQ ID NO: 5531280 - DNA, 25 bp, Homo sapien
gccacgtctcccagaaaaggcggaa

SEQ ID NO: 5531281 - DNA, 25 bp, Homo sapien
gtcttgacactgcagccctccgatc

SEQ ID NO: 5531282 - DNA, 25 bp, Homo sapien
aagggcattacgtctgcagagtcca

SEQ ID NO: 5531283 - DNA, 25 bp, Homo sapien
caacaggcaacaccacacctctcac

SEQ ID NO: 5531284 - DNA, 25 bp, Homo sapien
aatgttaacgacagcagacacagga

SEQ ID NO: 5531285 - DNA, 25 bp, Homo sapien
cttgacacacaatgttaacgacagc

SEQ ID NO: 5531286 - DNA, 25 bp, Homo sapien
caaactagtagttacacgatccctt

SEQ ID NO: 5531287 - DNA, 25 bp, Homo sapien
ccgtcacactgataaagtgatgcac

SEQ ID NO: 5531288 - DNA, 25 bp, Homo sapien
aaagtgatgcactcagtactcccta

SEQ ID NO: 5531289 - DNA, 25 bp, Homo sapien
ttgtgcagatttcctttgtggtttg

SEQ ID NO: 5531290 - DNA, 25 bp, Homo sapien
aagcatctcgatgtgcccaggactc

SEQ ID NO: 5531291 - DNA, 25 bp, Homo sapien
gtgtgcacacagacacgagctgttt

SEQ ID NO: 5531292 - DNA, 25 bp, Homo sapien
catcacatgcccagggacaaacgct

SEQ ID NO: 5531293 - DNA, 25 bp, Homo sapien
ttcactacaggtttgcaagccaggc

SEQ ID NO: 5531294 - DNA, 25 bp, Homo sapien
tccgagaggtccgtcgggggcgtag

SEQ ID NO: 5531295 - DNA, 25 bp, Homo sapien
ctacgcccccgacggacctctcgga

SEQ ID NO: 5531296 - DNA, 25 bp, Homo sapien
gacctcataccaggtgggtggatga

SEQ ID NO: 5531297 - DNA, 25 bp, Homo sapien
gcccttgtgccatgactggccccac

SEQ ID NO: 5531298 - DNA, 25 bp, Homo sapien
cctagtgagggtattacagtcatac

SEQ ID NO: 5531299 - DNA, 25 bp, Homo sapien
cccggtcggtctcctgctggccggg

SEQ ID NO: 5531300 - DNA, 25 bp, Homo sapien
accccagcctctagaggtcctggcc

SEQ ID NO: 5531301 - DNA, 25 bp, Homo sapien
tttcagctcttaggccccagaaggc

SEQ ID NO: 5531302 - DNA, 25 bp, Homo sapien
cagaaggcctctaagaatcactagc

SEQ ID NO: 5531303 - DNA, 25 bp, Homo sapien
tgagccctcatcagccgaagccata

SEQ ID NO: 5531304 - DNA, 25 bp, Homo sapien
gtggccacccgctcctgtctgtttc

SEQ ID NO: 5531305 - DNA, 25 bp, Homo sapien
ctttgaacctgaagcttgggcaagg

SEQ ID NO: 5531306 - DNA, 25 bp, Homo sapien
atgggagacaaagccttgatcttca

SEQ ID NO: 5531307 - DNA, 25 bp, Homo sapien
gaggcacggtaacaatgtgtcagat

SEQ ID NO: 5531308 - DNA, 25 bp, Homo sapien
acttgaagaggaggctataccttgt

SEQ ID NO: 5531309 - DNA, 25 bp, Homo sapien
atcatggtacatcagcagcagaact

SEQ ID NO: 5531310 - DNA, 25 bp, Homo sapien
actgagacaccaccttcccaagatc

SEQ ID NO: 5531311 - DNA, 25 bp, Homo sapien
actggaacaaggaccaccttgctcc

SEQ ID NO: 5531312 - DNA, 25 bp, Homo sapien
aactgcattgttctccaagtccctc

SEQ ID NO: 5531313 - DNA, 25 bp, Homo sapien
tgtcagatctccacactgagacacc

SEQ ID NO: 5531314 - DNA, 25 bp, Homo sapien
ttcagacactataagtatgataccc

SEQ ID NO: 5531315 - DNA, 25 bp, Homo sapien
ctccccagaaacaaaccacttagtc

SEQ ID NO: 5531316 - DNA, 25 bp, Homo sapien
gcagcagaactgagacaaaaactgg

SEQ ID NO: 5531317 - DNA, 25 bp, Homo sapien
tagaaattaagagctccccagaaac

SEQ ID NO: 5531318 - DNA, 25 bp, Homo sapien
tgcaggacacgctgcaagtcccttt

SEQ ID NO: 5531319 - DNA, 25 bp, Homo sapien
atgaaagaattaaacctggcaagtc

SEQ ID NO: 5531320 - DNA, 25 bp, Homo sapien
atctgaagacaaagttgcaggacac

SEQ ID NO: 5531321 - DNA, 25 bp, Homo sapien
tcaacacgagaaaagattacaaaac

SEQ ID NO: 5531322 - DNA, 25 bp, Homo sapien
tgagcaaaactcacaaggtagttct

SEQ ID NO: 5531323 - DNA, 25 bp, Homo sapien
tcaggcctggcagtgatatgtattc

SEQ ID NO: 5531324 - DNA, 25 bp, Homo sapien
tcatctagacatgccaatggctact

SEQ ID NO: 5531325 - DNA, 25 bp, Homo sapien
tacttagcctagcagggagttatgg

SEQ ID NO: 5531326 - DNA, 25 bp, Homo sapien
tttgtaggaagcactatctgaagac

SEQ ID NO: 5531327 - DNA, 25 bp, Homo sapien
caagtccctttgcggggagccataa

SEQ ID NO: 5531328 - DNA, 25 bp, Homo sapien
gcagggagaaataacctggtttcta

SEQ ID NO: 5531329 - DNA, 25 bp, Homo sapien
ctgtctcagtgcactcccaggatgg

SEQ ID NO: 5531330 - DNA, 25 bp, Homo sapien
ataggggaaaatcaatcacttcagc

SEQ ID NO: 5531331 - DNA, 25 bp, Homo sapien
ttcccgaatcaacacctcacaggcc

SEQ ID NO: 5531332 - DNA, 25 bp, Homo sapien
caggccttgctttggcaaacggctc

SEQ ID NO: 5531333 - DNA, 25 bp, Homo sapien
aatgtgaggaatatacaagaaagat

SEQ ID NO: 5531334 - DNA, 25 bp, Homo sapien
agagagatgccctaactagagcttt

SEQ ID NO: 5531335 - DNA, 25 bp, Homo sapien
tgtttacccttggggataacagcaa

SEQ ID NO: 5531336 - DNA, 25 bp, Homo sapien
tcaagttgcattccacagaggttcc

SEQ ID NO: 5531337 - DNA, 25 bp, Homo sapien
cccagggcccaatccccaaccctca

SEQ ID NO: 5531338 - DNA, 25 bp, Homo sapien
tctccaagaagactgagtgactgag

SEQ ID NO: 5531339 - DNA, 25 bp, Homo sapien
gcaaacggctcctgatcccagcttc

SEQ ID NO: 5531340 - DNA, 25 bp, Homo sapien
taaaggcaaagtcttagtccccatc

SEQ ID NO: 5531341 - DNA, 25 bp, Homo sapien
cctctctcatcagggaaactggatt

SEQ ID NO: 5531342 - DNA, 25 bp, Homo sapien
tgggttaatcatcgtcttctgtagc

SEQ ID NO: 5531343 - DNA, 25 bp, Homo sapien
aaatggttaacaaaggcacatcaat

SEQ ID NO: 5531344 - DNA, 25 bp, Homo sapien
taatgaacaggctgtttgctttagc

SEQ ID NO: 5531345 - DNA, 25 bp, Homo sapien
attgcatcacttatgaagagatagc

SEQ ID NO: 5531346 - DNA, 25 bp, Homo sapien
tgcacaacagaaaaatgctgggctg

SEQ ID NO: 5531347 - DNA, 25 bp, Homo sapien
aaactggatttgtgtgtctatgtct

SEQ ID NO: 5531348 - DNA, 25 bp, Homo sapien
atgtcatgaaggttaaaggcaaagt

SEQ ID NO: 5531349 - DNA, 25 bp, Homo sapien
tttccaacaaagagtcattcaattc

SEQ ID NO: 5531350 - DNA, 25 bp, Homo sapien
accggatgccctgcctgccttttca

SEQ ID NO: 5531351 - DNA, 25 bp, Homo sapien
agtccccgctagtggtagtatctcg

SEQ ID NO: 5531352 - DNA, 25 bp, Homo sapien
ccccgtgtaaaaagcctccttgtgc

SEQ ID NO: 5531353 - DNA, 25 bp, Homo sapien
gtgtgagctaccgtggatctccttc

SEQ ID NO: 5531354 - DNA, 25 bp, Homo sapien
taagcaaaggctccctcgccctgtg

SEQ ID NO: 5531355 - DNA, 25 bp, Homo sapien
tccctcgccctgtgagggcgagcgg

SEQ ID NO: 5531356 - DNA, 25 bp, Homo sapien
agtggtagtatctcgtaatagcttc

SEQ ID NO: 5531357 - DNA, 25 bp, Homo sapien
aaaagcctccttgtgcaattgtctt

SEQ ID NO: 5531358 - DNA, 25 bp, Homo sapien
agaaaaggatttaagcaaaggctcc

SEQ ID NO: 5531359 - DNA, 25 bp, Homo sapien
atctccttcccttctcttgggggcc

SEQ ID NO: 5531360 - DNA, 25 bp, Homo sapien
atagcttctgtgtgtgagctaccgt

SEQ ID NO: 5531361 - DNA, 25 bp, Homo sapien
gcgccagtccccgctagtggtagta

SEQ ID NO: 5531362 - DNA, 25 bp, Homo sapien
aagtatgaggatgagatcaataagc

SEQ ID NO: 5531363 - DNA, 25 bp, Homo sapien
atcacggtaaaccagagcctgctga

SEQ ID NO: 5531364 - DNA, 25 bp, Homo sapien
tggaggacttcaggaacaagtatga

SEQ ID NO: 5531365 - DNA, 25 bp, Homo sapien
ttacatgaacaacgtagagctggag

SEQ ID NO: 5531366 - DNA, 25 bp, Homo sapien
tgagcccccttaacctggaggtgga

SEQ ID NO: 5531367 - DNA, 25 bp, Homo sapien
caggctgtatacacccaggagaagg

SEQ ID NO: 5531368 - DNA, 25 bp, Homo sapien
ggacaacatgttcgggagctatatc

SEQ ID NO: 5531369 - DNA, 25 bp, Homo sapien
tcaataagcctacagagatggagaa

SEQ ID NO: 5531370 - DNA, 25 bp, Homo sapien
ccttctgcagcagcacaagatggct

SEQ ID NO: 5531371 - DNA, 25 bp, Homo sapien
tcaacaaccttaggcggctgctgga

SEQ ID NO: 5531372 - DNA, 25 bp, Homo sapien
agaaggatgtggatgaaacttacat

SEQ ID NO: 5531373 - DNA, 25 bp, Homo sapien
ccagtagaatacagcaaaaatgata

SEQ ID NO: 5531374 - DNA, 25 bp, Homo sapien
aaaaatgatagattacaagagattg

SEQ ID NO: 5531375 - DNA, 25 bp, Homo sapien
ctagaagttcttcagattgtggaag

SEQ ID NO: 5531376 - DNA, 25 bp, Homo sapien
ctccagaaattcatgcctttgtata

SEQ ID NO: 5531377 - DNA, 25 bp, Homo sapien
gattgtggcttctatcttgctagcg

SEQ ID NO: 5531378 - DNA, 25 bp, Homo sapien
agtgccaagttgtccatccctaagc

SEQ ID NO: 5531379 - DNA, 25 bp, Homo sapien
tttaaccagtagaatacagcaaaaa

SEQ ID NO: 5531380 - DNA, 25 bp, Homo sapien
catgcctttgtataatctcttcccc

SEQ ID NO: 5531381 - DNA, 25 bp, Homo sapien
acataaccagtgccaagttgtccat

SEQ ID NO: 5531382 - DNA, 25 bp, Homo sapien
atagattacaagagattgtggcttc

SEQ ID NO: 5531383 - DNA, 25 bp, Homo sapien
tcagtttagggaaatgtttacagtc

SEQ ID NO: 5531384 - DNA, 25 bp, Homo sapien
tagaaaggacatatgacaagtggta

SEQ ID NO: 5531385 - DNA, 25 bp, Homo sapien
caagtaaacaggatagactgaagac

SEQ ID NO: 5531386 - DNA, 25 bp, Homo sapien
aagacaagcccaaaagcaatgcatc

SEQ ID NO: 5531387 - DNA, 25 bp, Homo sapien
aagctgctgtagtaagacaagccca

SEQ ID NO: 5531388 - DNA, 25 bp, Homo sapien
acaactgagataaatggcataaagc

SEQ ID NO: 5531389 - DNA, 25 bp, Homo sapien
atgtatccaggagtgacgttttcag

SEQ ID NO: 5531390 - DNA, 25 bp, Homo sapien
aaaaatgtttgtgagttgagtggga

SEQ ID NO: 5531391 - DNA, 25 bp, Homo sapien
agatgaggctaaccaacaggaattg

SEQ ID NO: 5531392 - DNA, 25 bp, Homo sapien
ttcaggaagtttaacagcgaagagg

SEQ ID NO: 5531393 - DNA, 25 bp, Homo sapien
agcaccagaaactggaggaacgtta

SEQ ID NO: 5531394 - DNA, 25 bp, Homo sapien
gagatgcacatgcgcagtgatgttc

SEQ ID NO: 5531395 - DNA, 25 bp, Homo sapien
gatagggcacctccccgcttaaggc

SEQ ID NO: 5531396 - DNA, 25 bp, Homo sapien
agaccagagaaatatagaaggggtc

SEQ ID NO: 5531397 - DNA, 25 bp, Homo sapien
atcccttcaaggccaccggttagcg

SEQ ID NO: 5531398 - DNA, 25 bp, Homo sapien
tgatagataacgcatacaaagagta

SEQ ID NO: 5531399 - DNA, 25 bp, Homo sapien
ggatttccgtctgtgatagggcacc

SEQ ID NO: 5531400 - DNA, 25 bp, Homo sapien
ttcgtctcaggtagagaccagagaa

SEQ ID NO: 5531401 - DNA, 25 bp, Homo sapien
acaaagagtagtaaaacgcaaacag

SEQ ID NO: 5531402 - DNA, 25 bp, Homo sapien
ctgggcttcgaccgtcaccttaaag

SEQ ID NO: 5531403 - DNA, 25 bp, Homo sapien
gaaggggtcctcccaactgctccag

SEQ ID NO: 5531404 - DNA, 25 bp, Homo sapien
cagtatgtttacaagcgtgtgtgtt

SEQ ID NO: 5531405 - DNA, 25 bp, Homo sapien
ccgcttaaggcttttcgaggatccc

SEQ ID NO: 5531406 - DNA, 25 bp, Homo sapien
tcgctgcccgagctcttccagggcc

SEQ ID NO: 5531407 - DNA, 25 bp, Homo sapien
acttctaccagaacaaccggcgcta

SEQ ID NO: 5531408 - DNA, 25 bp, Homo sapien
cgctcttcttctgcgcgggcctggc

SEQ ID NO: 5531409 - DNA, 25 bp, Homo sapien
cgtgcgcctggtacttctcgctgcc

SEQ ID NO: 5531410 - DNA, 25 bp, Homo sapien
tccagggcccagtgtacctctacta

SEQ ID NO: 5531411 - DNA, 25 bp, Homo sapien
gccagcatcgcgctgccgctcttct

SEQ ID NO: 5531412 - DNA, 25 bp, Homo sapien
ggcaccggcaactgctcggtgtgcg

SEQ ID NO: 5531413 - DNA, 25 bp, Homo sapien
gcgccaccctgtcaacgagtgcgcc

SEQ ID NO: 5531414 - DNA, 25 bp, Homo sapien
cgccttcactcagcagcgcctcccc

SEQ ID NO: 5531415 - DNA, 25 bp, Homo sapien
ggcctggccttcatcggcctgggcc

SEQ ID NO: 5531416 - DNA, 25 bp, Homo sapien
cctccaacggcatcaaggagctgga

SEQ ID NO: 5531417 - DNA, 25 bp, Homo sapien
cacactctccccacgaaggtatctc

SEQ ID NO: 5531418 - DNA, 25 bp, Homo sapien
tgaattaaaggttcatgaacgctgc

SEQ ID NO: 5531419 - DNA, 25 bp, Homo sapien
cgagatgaaggatacgctgtatttt

SEQ ID NO: 5531420 - DNA, 25 bp, Homo sapien
tcttactctgtgcaaagacgcggca

SEQ ID NO: 5531421 - DNA, 25 bp, Homo sapien
aggttcataatgaattaaaggttca

SEQ ID NO: 5531422 - DNA, 25 bp, Homo sapien
ttactctgtgcaaagacgcggcaaa

SEQ ID NO: 5531423 - DNA, 25 bp, Homo sapien
taatgtccctgcctctaggttcata

SEQ ID NO: 5531424 - DNA, 25 bp, Homo sapien
gtattttttgcctaatgtccctgcc

SEQ ID NO: 5531425 - DNA, 25 bp, Homo sapien
ggtatctctgtgtcttactctgtgc

SEQ ID NO: 5531426 - DNA, 25 bp, Homo sapien
gcacactctccccacgaaggtatct

SEQ ID NO: 5531427 - DNA, 25 bp, Homo sapien
ttaaaggttcatgaacgctgcgaaa

SEQ ID NO: 5531428 - DNA, 25 bp, Homo sapien
aagctgaacagtggttaaaacatcc

SEQ ID NO: 5531429 - DNA, 25 bp, Homo sapien
taacagtcttaatggctagttctta

SEQ ID NO: 5531430 - DNA, 25 bp, Homo sapien
tcttcctgcaaactggtgttttatc

SEQ ID NO: 5531431 - DNA, 25 bp, Homo sapien
tgtcattccataagaaagctgaaca

SEQ ID NO: 5531432 - DNA, 25 bp, Homo sapien
taagcaagggcaaataaatcctcct

SEQ ID NO: 5531433 - DNA, 25 bp, Homo sapien
gcagttcatataagcaagggcaaat

SEQ ID NO: 5531434 - DNA, 25 bp, Homo sapien
agtttatttaagagagcagacaaac

SEQ ID NO: 5531435 - DNA, 25 bp, Homo sapien
ttttactgaattcagcatgggatga

SEQ ID NO: 5531436 - DNA, 25 bp, Homo sapien
ttataattgagaacttaacagtctt

SEQ ID NO: 5531437 - DNA, 25 bp, Homo sapien
aaacatccagtttgcttgaattcct

SEQ ID NO: 5531438 - DNA, 25 bp, Homo sapien
agtttgcttgaattcctgagtgatt

SEQ ID NO: 5531439 - DNA, 25 bp, Homo sapien
aatggtttatagtgaactgtgctct

SEQ ID NO: 5531440 - DNA, 25 bp, Homo sapien
cctactggcctcattcaggacacct

SEQ ID NO: 5531441 - DNA, 25 bp, Homo sapien
gaagtggcccctctgcaacatgtcc

SEQ ID NO: 5531442 - DNA, 25 bp, Homo sapien
tcattaaaatcccagggtgccctgt

SEQ ID NO: 5531443 - DNA, 25 bp, Homo sapien
catgtcctcacagaaacgaaatggt

SEQ ID NO: 5531444 - DNA, 25 bp, Homo sapien
aaacgaaatggtgtgtagcaatcaa

SEQ ID NO: 5531445 - DNA, 25 bp, Homo sapien
gcaatcaacactagaaagtagacct

SEQ ID NO: 5531446 - DNA, 25 bp, Homo sapien
ggtcattgtacagaaagaagtggcc

SEQ ID NO: 5531447 - DNA, 25 bp, Homo sapien
gacacctgcagagagtatgcaaagt

SEQ ID NO: 5531448 - DNA, 25 bp, Homo sapien
tctgtatgtgagatggtcattgtac

SEQ ID NO: 5531449 - DNA, 25 bp, Homo sapien
ctgatcactgatgtcaatgacctac

SEQ ID NO: 5531450 - DNA, 25 bp, Homo sapien
tgtgtgtccctccagatccctctcc

SEQ ID NO: 5531451 - DNA, 25 bp, Homo sapien
ctccagccctagaaacctgagctct

SEQ ID NO: 5531452 - DNA, 25 bp, Homo sapien
ggttgagttcagccaacagatgccc

SEQ ID NO: 5531453 - DNA, 25 bp, Homo sapien
ttggaagcttccatgctgaggtctg

SEQ ID NO: 5531454 - DNA, 25 bp, Homo sapien
tgcaaggtcctcccatccccagtat

SEQ ID NO: 5531455 - DNA, 25 bp, Homo sapien
tgtccttagaatcccatcctcacct

SEQ ID NO: 5531456 - DNA, 25 bp, Homo sapien
gcaaagacctcgatagatggactga

SEQ ID NO: 5531457 - DNA, 25 bp, Homo sapien
atgccaggtgtctcctgtgtgtccc

SEQ ID NO: 5531458 - DNA, 25 bp, Homo sapien
gcagggctgtgatgattcttctacc

SEQ ID NO: 5531459 - DNA, 25 bp, Homo sapien
catcagctgcctggttagcagggct

SEQ ID NO: 5531460 - DNA, 25 bp, Homo sapien
agatgcccctgtaggatttggacac

SEQ ID NO: 5531461 - DNA, 25 bp, Homo sapien
taaaagacacaaaacacagccaatc

SEQ ID NO: 5531462 - DNA, 25 bp, Homo sapien
ataaatggatagatgattgaataat

SEQ ID NO: 5531463 - DNA, 25 bp, Homo sapien
tacagcacataatcatggtaggcac

SEQ ID NO: 5531464 - DNA, 25 bp, Homo sapien
ttctaaagttgagctgaactggtgc

SEQ ID NO: 5531465 - DNA, 25 bp, Homo sapien
acatgcttatgatgccgattgggcc

SEQ ID NO: 5531466 - DNA, 25 bp, Homo sapien
atcccccctagtaaatgtccttgtc

SEQ ID NO: 5531467 - DNA, 25 bp, Homo sapien
ccgattgggcccacaatccccccta

SEQ ID NO: 5531468 - DNA, 25 bp, Homo sapien
cacacgtacagatacacacagatgt

SEQ ID NO: 5531469 - DNA, 25 bp, Homo sapien
actggtgccgttggatgtgattatt

SEQ ID NO: 5531470 - DNA, 25 bp, Homo sapien
aaatccacagatcaacaataaaacc

SEQ ID NO: 5531471 - DNA, 25 bp, Homo sapien
acatgggtgtgtgcacacgtacaga

SEQ ID NO: 5531472 - DNA, 25 bp, Homo sapien
atgtccgtcccttccgatggccgag

SEQ ID NO: 5531473 - DNA, 25 bp, Homo sapien
ctcggccatcggaagggacggacat

SEQ ID NO: 5531474 - DNA, 25 bp, Homo sapien
accatgacatccgccgaagacgtag

SEQ ID NO: 5531475 - DNA, 25 bp, Homo sapien
tcgcttccatctttacgtggagtcc

SEQ ID NO: 5531476 - DNA, 25 bp, Homo sapien
tgtaatcccactaagaaccgccagg

SEQ ID NO: 5531477 - DNA, 25 bp, Homo sapien
ccaagagcctgcagtccctccatct

SEQ ID NO: 5531478 - DNA, 25 bp, Homo sapien
ccagacataaggtaagtatttcacc

SEQ ID NO: 5531479 - DNA, 25 bp, Homo sapien
cgggcgccatctgtccctgattctg

SEQ ID NO: 5531480 - DNA, 25 bp, Homo sapien
ggttcagcaccatgacatccgccga

SEQ ID NO: 5531481 - DNA, 25 bp, Homo sapien
gagacgaaagcggaatcgcttccat

SEQ ID NO: 5531482 - DNA, 25 bp, Homo sapien
ttcatccaaactaacatcctcaatt

SEQ ID NO: 5531483 - DNA, 25 bp, Homo sapien
atctttacgtggagtccgggaaatg

SEQ ID NO: 5531484 - DNA, 25 bp, Homo sapien
gtatttccagacataaggtaagtat

SEQ ID NO: 5531485 - DNA, 25 bp, Homo sapien
ttcactatacaggaatatgtgcaat

SEQ ID NO: 5531486 - DNA, 25 bp, Homo sapien
aggaactattcccaggaggtcatcc

SEQ ID NO: 5531487 - DNA, 25 bp, Homo sapien
ccatgactgacccacacctctccca

SEQ ID NO: 5531488 - DNA, 25 bp, Homo sapien
agaacaaaataatctctgctgagtc

SEQ ID NO: 5531489 - DNA, 25 bp, Homo sapien
tctaacacaatagctagtagcccca

SEQ ID NO: 5531490 - DNA, 25 bp, Homo sapien
aagagaataaagtataccgtgctat

SEQ ID NO: 5531491 - DNA, 25 bp, Homo sapien
atgtgcaatatatagatgtcaagtt

SEQ ID NO: 5531492 - DNA, 25 bp, Homo sapien
gtgaagtggagcagtactgccattt

SEQ ID NO: 5531493 - DNA, 25 bp, Homo sapien
cacagaataatcatttagctgccac

SEQ ID NO: 5531494 - DNA, 25 bp, Homo sapien
gtcactctgactaggaacacataat

SEQ ID NO: 5531495 - DNA, 25 bp, Homo sapien
aatagtcactaggaaggtgaagtgg

SEQ ID NO: 5531496 - DNA, 25 bp, Homo sapien
agatgctggacattgtggatgccat

SEQ ID NO: 5531497 - DNA, 25 bp, Homo sapien
aggaggagaacactcctgagaagag

SEQ ID NO: 5531498 - DNA, 25 bp, Homo sapien
ctactttaccgagaaggaggtccag

SEQ ID NO: 5531499 - DNA, 25 bp, Homo sapien
ccatttaccagatggtggggaatac

SEQ ID NO: 5531500 - DNA, 25 bp, Homo sapien
ttgccatgatggataagaatgccga

SEQ ID NO: 5531501 - DNA, 25 bp, Homo sapien
gcggcaggcttccagaagatctaca

SEQ ID NO: 5531502 - DNA, 25 bp, Homo sapien
aggactgccccagtgggcagctgga

SEQ ID NO: 5531503 - DNA, 25 bp, Homo sapien
ctacgacttggacaatgatggctac

SEQ ID NO: 5531504 - DNA, 25 bp, Homo sapien
ggtgggccttcaagctctacgactt

SEQ ID NO: 5531505 - DNA, 25 bp, Homo sapien
acgggcgaattgagttctccgagtt

SEQ ID NO: 5531506 - DNA, 25 bp, Homo sapien
gtctttgatgaaaacaaggacgggc

SEQ ID NO: 5531507 - DNA, 25 bp, Homo sapien
gatgataacaggcaagcagtagcta

SEQ ID NO: 5531508 - DNA, 25 bp, Homo sapien
agcatcccaggatgataacaggcaa

SEQ ID NO: 5531509 - DNA, 25 bp, Homo sapien
acacacacaaaccttgaagagattt

SEQ ID NO: 5531510 - DNA, 25 bp, Homo sapien
tgaatatacctcaggaaacggtgat

SEQ ID NO: 5531511 - DNA, 25 bp, Homo sapien
gccagatgaacaacctagacagagt

SEQ ID NO: 5531512 - DNA, 25 bp, Homo sapien
ggcaagcagtagctaaaacagatat

SEQ ID NO: 5531513 - DNA, 25 bp, Homo sapien
ggaaacggtgattttacagagcaaa

SEQ ID NO: 5531514 - DNA, 25 bp, Homo sapien
tgtctagcacttcaagcatacatcc

SEQ ID NO: 5531515 - DNA, 25 bp, Homo sapien
acagagcaaacttcagccacatatc

SEQ ID NO: 5531516 - DNA, 25 bp, Homo sapien
aaacagatatgctaccccatggctc

SEQ ID NO: 5531517 - DNA, 25 bp, Homo sapien
attttgggtttgctggctgccagat

SEQ ID NO: 5531518 - DNA, 25 bp, Homo sapien
gcgcgtgtgagcgtgcgagtcccgg

SEQ ID NO: 5531519 - DNA, 25 bp, Homo sapien
ccgggactcgcacgctcacacgcgc

SEQ ID NO: 5531520 - DNA, 25 bp, Homo sapien
acatgtataagtatctgtcataaat

SEQ ID NO: 5531521 - DNA, 25 bp, Homo sapien
atttatgacagatacttatacatgt

SEQ ID NO: 5531522 - DNA, 25 bp, Homo sapien
gctagacagagctgtggatagcttt

SEQ ID NO: 5531523 - DNA, 25 bp, Homo sapien
gccggccacactatgcgcgagccgg

SEQ ID NO: 5531524 - DNA, 25 bp, Homo sapien
ggacccaacaggagcctccattgcc

SEQ ID NO: 5531525 - DNA, 25 bp, Homo sapien
gtgctccgtgccatagaattgttcc

SEQ ID NO: 5531526 - DNA, 25 bp, Homo sapien
tctcgaagagattaacaagtggaca

SEQ ID NO: 5531527 - DNA, 25 bp, Homo sapien
ccaacatgtggtacttcaggctctg

SEQ ID NO: 5531528 - DNA, 25 bp, Homo sapien
ttggaatgtggctgtcaagttcctc

SEQ ID NO: 5531529 - DNA, 25 bp, Homo sapien
aggaaggcattgtaaagctgaaacc

SEQ ID NO: 5531530 - DNA, 25 bp, Homo sapien
ggcaaggaagtttgatgtgctccgt

SEQ ID NO: 5531531 - DNA, 25 bp, Homo sapien
gctttgaaactcagaggaatggact

SEQ ID NO: 5531532 - DNA, 25 bp, Homo sapien
gagcaggctaccaagcagtttctcg

SEQ ID NO: 5531533 - DNA, 25 bp, Homo sapien
agaacaggaagtaattcagcacagc

SEQ ID NO: 5531534 - DNA, 25 bp, Homo sapien
aaccgagcgctgtacattgtcaact

SEQ ID NO: 5531535 - DNA, 25 bp, Homo sapien
gattgccaaatggcagtctggggag

SEQ ID NO: 5531536 - DNA, 25 bp, Homo sapien
gcacagcagaacacgctacccctgt

SEQ ID NO: 5531537 - DNA, 25 bp, Homo sapien
atggaaaaccattttgctgggattc

SEQ ID NO: 5531538 - DNA, 25 bp, Homo sapien
cagggtaacatctctaaccgagcgc

SEQ ID NO: 5531539 - DNA, 25 bp, Homo sapien
cattgtcaactgggggatgtaaaaa

SEQ ID NO: 5531540 - DNA, 25 bp, Homo sapien
gtttcagttttcaagcaggtctggc

SEQ ID NO: 5531541 - DNA, 25 bp, Homo sapien
gggctacacgaccacagtacgtttc

SEQ ID NO: 5531542 - DNA, 25 bp, Homo sapien
tctgtgtgtaacaatgtcgtcatgc

SEQ ID NO: 5531543 - DNA, 25 bp, Homo sapien
cagtacgtttcagcagggtaacatc

SEQ ID NO: 5531544 - DNA, 25 bp, Homo sapien
ttcgccttcttgccgaagcacaagg

SEQ ID NO: 5531545 - DNA, 25 bp, Homo sapien
gccctactacctgggccgcgactac

SEQ ID NO: 5531546 - DNA, 25 bp, Homo sapien
acgcgtacaagtagcctcaggcttt

SEQ ID NO: 5531547 - DNA, 25 bp, Homo sapien
aggccaacgcgtacaagtagcctca

SEQ ID NO: 5531548 - DNA, 25 bp, Homo sapien
ccgcgactacctggagacgctgatg

SEQ ID NO: 5531549 - DNA, 25 bp, Homo sapien
gcatcagcgagatgctccttgggcc

SEQ ID NO: 5531550 - DNA, 25 bp, Homo sapien
agtagcctcaggctttcccaggggc

SEQ ID NO: 5531551 - DNA, 25 bp, Homo sapien
cgactggatccgcatcagcgagatg

SEQ ID NO: 5531552 - DNA, 25 bp, Homo sapien
ccttcttgccgaagcacaaggccaa

SEQ ID NO: 5531553 - DNA, 25 bp, Homo sapien
tggatccgcatcagcgagatgctcc

SEQ ID NO: 5531554 - DNA, 25 bp, Homo sapien
ggcgaggagagtacaataaatttta

SEQ ID NO: 5531555 - DNA, 25 bp, Homo sapien
tgaaatgatgtcatcccgtatcatc

SEQ ID NO: 5531556 - DNA, 25 bp, Homo sapien
atggcctggtgagtatagtcttagt

SEQ ID NO: 5531557 - DNA, 25 bp, Homo sapien
ttttgttgggcagtatgaaatatac

SEQ ID NO: 5531558 - DNA, 25 bp, Homo sapien
tgaaatatacagtcaaggcagattc

SEQ ID NO: 5531559 - DNA, 25 bp, Homo sapien
aaggcagattcgtacagacttgtaa

SEQ ID NO: 5531560 - DNA, 25 bp, Homo sapien
ttttcagtacgaacctgcagcccgg

SEQ ID NO: 5531561 - DNA, 25 bp, Homo sapien
aaaaaatagtggaggcattatttaa

SEQ ID NO: 5531562 - DNA, 25 bp, Homo sapien
ctaatcactgagttaagggaaaaat

SEQ ID NO: 5531563 - DNA, 25 bp, Homo sapien
tacttacaggaatataatgggtatt

SEQ ID NO: 5531564 - DNA, 25 bp, Homo sapien
aacttctaaatggcctggtgagtat

SEQ ID NO: 5531565 - DNA, 25 bp, Homo sapien
ataatgggtattaataacaaaattc

SEQ ID NO: 5531566 - DNA, 25 bp, Homo sapien
ccaatttgccctcacctcaacatgc

SEQ ID NO: 5531567 - DNA, 25 bp, Homo sapien
tttacgacctaagatctacacacct

SEQ ID NO: 5531568 - DNA, 25 bp, Homo sapien
gtttacatacgttgcttcagtcttc

SEQ ID NO: 5531569 - DNA, 25 bp, Homo sapien
tttgaatgcaatataccactgtttt

SEQ ID NO: 5531570 - DNA, 25 bp, Homo sapien
tggaagtgttaccagcagtccacag

SEQ ID NO: 5531571 - DNA, 25 bp, Homo sapien
ctccacaccgaagtgcaaaaccaca

SEQ ID NO: 5531572 - DNA, 25 bp, Homo sapien
tatatgctgtttcactggaagtgtt

SEQ ID NO: 5531573 - DNA, 25 bp, Homo sapien
attaaactgattgtgatgacttttc

SEQ ID NO: 5531574 - DNA, 25 bp, Homo sapien
gcagtccacagaactaatgtgtccc

SEQ ID NO: 5531575 - DNA, 25 bp, Homo sapien
ttgcttcagtcttctcaggtgaaag

SEQ ID NO: 5531576 - DNA, 25 bp, Homo sapien
atgtgtccccacagacttctcaatc

SEQ ID NO: 5531577 - DNA, 25 bp, Homo sapien
taggctccacctcagtagtttgaca

SEQ ID NO: 5531578 - DNA, 25 bp, Homo sapien
tagaatctgtgacatttaacctttc

SEQ ID NO: 5531579 - DNA, 25 bp, Homo sapien
tctggtaacgtttcaggaagtctgg

SEQ ID NO: 5531580 - DNA, 25 bp, Homo sapien
agtttgacaaaggtagaatgagttc

SEQ ID NO: 5531581 - DNA, 25 bp, Homo sapien
tgtatagacattggttagaatctgt

SEQ ID NO: 5531582 - DNA, 25 bp, Homo sapien
ttatttctagtttggaagcagtcct

SEQ ID NO: 5531583 - DNA, 25 bp, Homo sapien
tcgtatgtagaaagttgtcagtttt

SEQ ID NO: 5531584 - DNA, 25 bp, Homo sapien
ttactttgtatttaggctccacctc

SEQ ID NO: 5531585 - DNA, 25 bp, Homo sapien
tggaagcagtcctatttgatgtata

SEQ ID NO: 5531586 - DNA, 25 bp, Homo sapien
tcaggaagtctggtgcatttttatc

SEQ ID NO: 5531587 - DNA, 25 bp, Homo sapien
tagcaatgacagatgaatactattt

SEQ ID NO: 5531588 - DNA, 25 bp, Homo sapien
atccactaggagcattcccctggtt

SEQ ID NO: 5531589 - DNA, 25 bp, Homo sapien
tgctccactttgcatggcctcgacc

SEQ ID NO: 5531590 - DNA, 25 bp, Homo sapien
acatacaaggagatggaaaatgtta

SEQ ID NO: 5531591 - DNA, 25 bp, Homo sapien
cagcatatgtttcaagcagcaggac

SEQ ID NO: 5531592 - DNA, 25 bp, Homo sapien
actgacattctgagtgagagatcat

SEQ ID NO: 5531593 - DNA, 25 bp, Homo sapien
tgcaggatgtctccaccttggcaac

SEQ ID NO: 5531594 - DNA, 25 bp, Homo sapien
ctggccccacatgacagtcctattt

SEQ ID NO: 5531595 - DNA, 25 bp, Homo sapien
tggagcatgtattaacacaggtgaa

SEQ ID NO: 5531596 - DNA, 25 bp, Homo sapien
tcctgtgcattgtggaatgggttta

SEQ ID NO: 5531597 - DNA, 25 bp, Homo sapien
tgtgctgcataggacaaacatattt

SEQ ID NO: 5531598 - DNA, 25 bp, Homo sapien
caatgcattgtagttagctggtgtc

SEQ ID NO: 5531599 - DNA, 25 bp, Homo sapien
gatgctgatgttgccggtctgagaa

SEQ ID NO: 5531600 - DNA, 25 bp, Homo sapien
ttttaacaagttccagtgatgctga

SEQ ID NO: 5531601 - DNA, 25 bp, Homo sapien
attatgatagaaagccagacaaaat

SEQ ID NO: 5531602 - DNA, 25 bp, Homo sapien
tcaaactgatttggtgggtctggtg

SEQ ID NO: 5531603 - DNA, 25 bp, Homo sapien
gcaggattctctgagcctatgggtc

SEQ ID NO: 5531604 - DNA, 25 bp, Homo sapien
gtcaaaaatagcccatcataaatcc

SEQ ID NO: 5531605 - DNA, 25 bp, Homo sapien
gttgccggtctgagaagcatcatga

SEQ ID NO: 5531606 - DNA, 25 bp, Homo sapien
gagaaccactttctggctgggtgtg

SEQ ID NO: 5531607 - DNA, 25 bp, Homo sapien
tcagaggtagaatttgggatttatg

SEQ ID NO: 5531608 - DNA, 25 bp, Homo sapien
ggtgtggtcgcacgcctacaattcc

SEQ ID NO: 5531609 - DNA, 25 bp, Homo sapien
tgtgggttctgagagtgtccatttt

SEQ ID NO: 5531610 - DNA, 25 bp, Homo sapien
agagaatttaatactgtgaccaaaa

SEQ ID NO: 5531611 - DNA, 25 bp, Homo sapien
ttttggtcacagtattaaattctct

SEQ ID NO: 5531612 - DNA, 25 bp, Homo sapien
gggggcacattagcaggctaatcac

SEQ ID NO: 5531613 - DNA, 25 bp, Homo sapien
ttaggatatacaacacagaaagtga

SEQ ID NO: 5531614 - DNA, 25 bp, Homo sapien
caggattccaaatgtcagtgagatt

SEQ ID NO: 5531615 - DNA, 25 bp, Homo sapien
gaacagcctcaatgagtagctcgtt

SEQ ID NO: 5531616 - DNA, 25 bp, Homo sapien
aaataggaatatgaaggaatcttag

SEQ ID NO: 5531617 - DNA, 25 bp, Homo sapien
aaaatacttgaaaggcacacatggc

SEQ ID NO: 5531618 - DNA, 25 bp, Homo sapien
aggccaagtggccacctctaagaat

SEQ ID NO: 5531619 - DNA, 25 bp, Homo sapien
gggtgctctccagtagagaagtgac

SEQ ID NO: 5531620 - DNA, 25 bp, Homo sapien
tggtgacaagtgcaaacaataaggt

SEQ ID NO: 5531621 - DNA, 25 bp, Homo sapien
ctgtctgtaattttggggggcacat

SEQ ID NO: 5531622 - DNA, 25 bp, Homo sapien
atcttaggaagacaataggccaagt

SEQ ID NO: 5531623 - DNA, 25 bp, Homo sapien
agaaggaacgtcgtgatgccttgaa

SEQ ID NO: 5531624 - DNA, 25 bp, Homo sapien
gagatagttattctggcactgctgc

SEQ ID NO: 5531625 - DNA, 25 bp, Homo sapien
ccatcaactcggactttgggagcga

SEQ ID NO: 5531626 - DNA, 25 bp, Homo sapien
tccccatccgcgtcctgggccgcgg

SEQ ID NO: 5531627 - DNA, 25 bp, Homo sapien
ggaagtcgatttgacccggctgtct

SEQ ID NO: 5531628 - DNA, 25 bp, Homo sapien
tgactcactggttgtgtggaaggaa

SEQ ID NO: 5531629 - DNA, 25 bp, Homo sapien
gctgcagcacgacaacattattgcc

SEQ ID NO: 5531630 - DNA, 25 bp, Homo sapien
caggaggaactgcactacatcccca

SEQ ID NO: 5531631 - DNA, 25 bp, Homo sapien
ggagggaacctgtatgacaaaatcc

SEQ ID NO: 5531632 - DNA, 25 bp, Homo sapien
tacgagcgacactgcgattccatca

SEQ ID NO: 5531633 - DNA, 25 bp, Homo sapien
agctggaatattgtaatggagggaa

SEQ ID NO: 5531634 - DNA, 25 bp, Homo sapien
cgaagcccacttcctcccccggcac

SEQ ID NO: 5531635 - DNA, 25 bp, Homo sapien
ccggccaccaagcaagccggcattg

SEQ ID NO: 5531636 - DNA, 25 bp, Homo sapien
gtgctgcccattcagacgggctctc

SEQ ID NO: 5531637 - DNA, 25 bp, Homo sapien
gcggtgctgcccattcagacgggct

SEQ ID NO: 5531638 - DNA, 25 bp, Homo sapien
cccgctggcctcctcccagggcggg

SEQ ID NO: 5531639 - DNA, 25 bp, Homo sapien
cggttcggtgcccttgccctgtccg

SEQ ID NO: 5531640 - DNA, 25 bp, Homo sapien
gctgcccattcagacgggctctctc

SEQ ID NO: 5531641 - DNA, 25 bp, Homo sapien
cccattcagacgggctctctcgtgg

SEQ ID NO: 5531642 - DNA, 25 bp, Homo sapien
tcccccggcaccgtaagctcaagga

SEQ ID NO: 5531643 - DNA, 25 bp, Homo sapien
cttcctcccccggcaccgtaagctc

SEQ ID NO: 5531644 - DNA, 25 bp, Homo sapien
ggtgctgcccattcagacgggctct

SEQ ID NO: 5531645 - DNA, 25 bp, Homo sapien
gaggtatgccattttgaagactgag

SEQ ID NO: 5531646 - DNA, 25 bp, Homo sapien
gttggttctgaacaaataatgagtt

SEQ ID NO: 5531647 - DNA, 25 bp, Homo sapien
attttgaagactgagacgttggagt

SEQ ID NO: 5531648 - DNA, 25 bp, Homo sapien
tatcctagaggataaaggaaatctt

SEQ ID NO: 5531649 - DNA, 25 bp, Homo sapien
aaggaaatctttgggaaagtcagta

SEQ ID NO: 5531650 - DNA, 25 bp, Homo sapien
agaggataaaggaaatctttgggaa

SEQ ID NO: 5531651 - DNA, 25 bp, Homo sapien
atgccattttgaagactgagacgtt

SEQ ID NO: 5531652 - DNA, 25 bp, Homo sapien
tgggaaagtcagtattttatatagc

SEQ ID NO: 5531653 - DNA, 25 bp, Homo sapien
tgagttcttttatttgaggtatgcc

SEQ ID NO: 5531654 - DNA, 25 bp, Homo sapien
aaattaatttggttgctgttggttc

SEQ ID NO: 5531655 - DNA, 25 bp, Homo sapien
ccggtgacttaagagattaaaatta

SEQ ID NO: 5531656 - DNA, 25 bp, Homo sapien
aatgtggcatgttttcttagctgtt

SEQ ID NO: 5531657 - DNA, 25 bp, Homo sapien
atttttatgaatgttaggtgttatg

SEQ ID NO: 5531658 - DNA, 25 bp, Homo sapien
gatgactcatttaaagtagatgcac

SEQ ID NO: 5531659 - DNA, 25 bp, Homo sapien
gggcaagaacataagggaattataa

SEQ ID NO: 5531660 - DNA, 25 bp, Homo sapien
ctgtctactataagagaactaatcc

SEQ ID NO: 5531661 - DNA, 25 bp, Homo sapien
ttgctgcatatagctgcctgtctac

SEQ ID NO: 5531662 - DNA, 25 bp, Homo sapien
tataaaaaccccaagatgactcatt

SEQ ID NO: 5531663 - DNA, 25 bp, Homo sapien
tcctgtgcttacaccaaaaacaaat

SEQ ID NO: 5531664 - DNA, 25 bp, Homo sapien
tgttatttcaagtgtagaggggcaa

SEQ ID NO: 5531665 - DNA, 25 bp, Homo sapien
ttaaagtagatgcacattaaaatac

SEQ ID NO: 5531666 - DNA, 25 bp, Homo sapien
atactatagatctggcatatttcat

SEQ ID NO: 5531667 - DNA, 25 bp, Homo sapien
ggcctgcaaggcttcgctgcagcct

SEQ ID NO: 5531668 - DNA, 25 bp, Homo sapien
gctagcgtctaaagccagagccttc

SEQ ID NO: 5531669 - DNA, 25 bp, Homo sapien
gcggagggtgcacttcgccctcctg

SEQ ID NO: 5531670 - DNA, 25 bp, Homo sapien
acgtggacccagtggtcaatcctgc

SEQ ID NO: 5531671 - DNA, 25 bp, Homo sapien
caatcctgcagagaattcggcggag

SEQ ID NO: 5531672 - DNA, 25 bp, Homo sapien
gctgcagcctactccgccccgtttg

SEQ ID NO: 5531673 - DNA, 25 bp, Homo sapien
ccctgctgtgggaactttgtgaatc

SEQ ID NO: 5531674 - DNA, 25 bp, Homo sapien
tgagtgagtcatccctgcccatctg

SEQ ID NO: 5531675 - DNA, 25 bp, Homo sapien
tgccgctacgtggtcatcggcctgc

SEQ ID NO: 5531676 - DNA, 25 bp, Homo sapien
atccttcgtgcgctaatgggagctg

SEQ ID NO: 5531677 - DNA, 25 bp, Homo sapien
aacacacagcatatttggaagagaa

SEQ ID NO: 5531678 - DNA, 25 bp, Homo sapien
gccccactctgcggacgcagtgggc

SEQ ID NO: 5531679 - DNA, 25 bp, Homo sapien
ctgccccaggcgctgcctgaacttg

SEQ ID NO: 5531680 - DNA, 25 bp, Homo sapien
agacccccctacacctggctgcaga

SEQ ID NO: 5531681 - DNA, 25 bp, Homo sapien
ccccctacacctggctgcagagcga

SEQ ID NO: 5531682 - DNA, 25 bp, Homo sapien
cctgcttgccgtccagttgctggtc

SEQ ID NO: 5531683 - DNA, 25 bp, Homo sapien
cgtccagttgctggtcacccagggg

SEQ ID NO: 5531684 - DNA, 25 bp, Homo sapien
gctccaggctccaccgccccagtga

SEQ ID NO: 5531685 - DNA, 25 bp, Homo sapien
tgcatcacgcctctcgggaaggcca

SEQ ID NO: 5531686 - DNA, 25 bp, Homo sapien
cacacccctgcatcacgcctctcgg

SEQ ID NO: 5531687 - DNA, 25 bp, Homo sapien
acaccctgggcctcacacccctgca

SEQ ID NO: 5531688 - DNA, 25 bp, Homo sapien
ccgaggacacctgcttgccgtccag

SEQ ID NO: 5531689 - DNA, 25 bp, Homo sapien
tataaagtctcacaagggcaaagtc

SEQ ID NO: 5531690 - DNA, 25 bp, Homo sapien
aacactacataaaagctggcgagtt

SEQ ID NO: 5531691 - DNA, 25 bp, Homo sapien
agcatgccacatctgacaagtcaac

SEQ ID NO: 5531692 - DNA, 25 bp, Homo sapien
gaggagaactggtctcatgagatgc

SEQ ID NO: 5531693 - DNA, 25 bp, Homo sapien
gacttgagacaccttgggacacatc

SEQ ID NO: 5531694 - DNA, 25 bp, Homo sapien
ggggccaatcctgagaccatatacc

SEQ ID NO: 5531695 - DNA, 25 bp, Homo sapien
atgagatgctccgtacacccctacc

SEQ ID NO: 5531696 - DNA, 25 bp, Homo sapien
ccaacatcacggacctctcaggagg

SEQ ID NO: 5531697 - DNA, 25 bp, Homo sapien
acacacacaccgtgtgcttggggcc

SEQ ID NO: 5531698 - DNA, 25 bp, Homo sapien
tctttaagcggtgttaggacagaca

SEQ ID NO: 5531699 - DNA, 25 bp, Homo sapien
gcaaagtccatctggggcaacagtt

SEQ ID NO: 5531700 - DNA, 25 bp, Homo sapien
ggggaatctgctactggaaaactca

SEQ ID NO: 5531701 - DNA, 25 bp, Homo sapien
gcaccaagtccaacacgcccacatc

SEQ ID NO: 5531702 - DNA, 25 bp, Homo sapien
gaatgtggtgaagaatgacctgatt

SEQ ID NO: 5531703 - DNA, 25 bp, Homo sapien
acgccagagctggacatgtgtccag

SEQ ID NO: 5531704 - DNA, 25 bp, Homo sapien
gccgacctcctaggggagttctcag

SEQ ID NO: 5531705 - DNA, 25 bp, Homo sapien
ggcatcaacaccgactccctgtacc

SEQ ID NO: 5531706 - DNA, 25 bp, Homo sapien
cacgcccacatcctccgtgccctcg

SEQ ID NO: 5531707 - DNA, 25 bp, Homo sapien
atgacctgattgccaaggtcgacca

SEQ ID NO: 5531708 - DNA, 25 bp, Homo sapien
tgcgcaacgtcagtataggcatggg

SEQ ID NO: 5531709 - DNA, 25 bp, Homo sapien
gggcatcgtgaacaaagctttcggc

SEQ ID NO: 5531710 - DNA, 25 bp, Homo sapien
agcagcccaacccagggcatcgtga

SEQ ID NO: 5531711 - DNA, 25 bp, Homo sapien
aatacagttgggtgtctgctgaatt

SEQ ID NO: 5531712 - DNA, 25 bp, Homo sapien
ttctgaaggtggaatctcctcctct

SEQ ID NO: 5531713 - DNA, 25 bp, Homo sapien
tttaacaccaatagagctgaaagac

SEQ ID NO: 5531714 - DNA, 25 bp, Homo sapien
cggaatctcgccatctaaaccagac

SEQ ID NO: 5531715 - DNA, 25 bp, Homo sapien
aggggatctgtagaaatgtgcaccc

SEQ ID NO: 5531716 - DNA, 25 bp, Homo sapien
aagtggccaccagtactcgatcatt

SEQ ID NO: 5531717 - DNA, 25 bp, Homo sapien
ctgatctgtgtccaagcaactcatc

SEQ ID NO: 5531718 - DNA, 25 bp, Homo sapien
tgtgggaagaaagccaatgcttccc

SEQ ID NO: 5531719 - DNA, 25 bp, Homo sapien
aatagagctgaaagactatgccttt

SEQ ID NO: 5531720 - DNA, 25 bp, Homo sapien
acttaatgttggagaaaagtggcca

SEQ ID NO: 5531721 - DNA, 25 bp, Homo sapien
tatcttacaaggcaaacaccagcag

SEQ ID NO: 5531722 - DNA, 25 bp, Homo sapien
acactccatgaaaggccaaagaaac

SEQ ID NO: 5531723 - DNA, 25 bp, Homo sapien
tgcttgtccgttctgaagatagatc

SEQ ID NO: 5531724 - DNA, 25 bp, Homo sapien
atcttgtctctgaggcttggctctt

SEQ ID NO: 5531725 - DNA, 25 bp, Homo sapien
agaagcttaaataaacaggaaggta

SEQ ID NO: 5531726 - DNA, 25 bp, Homo sapien
aaaactggtatttgacaagtcctgt

SEQ ID NO: 5531727 - DNA, 25 bp, Homo sapien
ttaagaatggacaaatcaacactcc

SEQ ID NO: 5531728 - DNA, 25 bp, Homo sapien
acaggaaggtaagttatatgatgac

SEQ ID NO: 5531729 - DNA, 25 bp, Homo sapien
ctgatttttgggttctccggttgac

SEQ ID NO: 5531730 - DNA, 25 bp, Homo sapien
aaatagaaaggagtacaccttcttc

SEQ ID NO: 5531731 - DNA, 25 bp, Homo sapien
acaagtcctgtaatggtctatcacc

SEQ ID NO: 5531732 - DNA, 25 bp, Homo sapien
aggctactaggtaaaaagaagctta

SEQ ID NO: 5531733 - DNA, 25 bp, Homo sapien
atgggtaaactttgcctgaagcgtg

SEQ ID NO: 5531734 - DNA, 25 bp, Homo sapien
gaacatggagaacttctgcagattt

SEQ ID NO: 5531735 - DNA, 25 bp, Homo sapien
gaatacacatatcagacggaggaac

SEQ ID NO: 5531736 - DNA, 25 bp, Homo sapien
tgaagcgtggacagccttcctcaaa

SEQ ID NO: 5531737 - DNA, 25 bp, Homo sapien
gggagggagagttatctaattgcta

SEQ ID NO: 5531738 - DNA, 25 bp, Homo sapien
gcggtaggtcaccacaaatccctcc

SEQ ID NO: 5531739 - DNA, 25 bp, Homo sapien
ggactgtaatgaacaaggaatattc

SEQ ID NO: 5531740 - DNA, 25 bp, Homo sapien
tgaccaccaagtatctaggagccca

SEQ ID NO: 5531741 - DNA, 25 bp, Homo sapien
ctggtcaaccactgaacatggagaa

SEQ ID NO: 5531742 - DNA, 25 bp, Homo sapien
gacggaggaacttccagagatgttc

SEQ ID NO: 5531743 - DNA, 25 bp, Homo sapien
agtagatgtaacaataaccacagtt

SEQ ID NO: 5531744 - DNA, 25 bp, Homo sapien
gagagggcgggcctccctggcacga

SEQ ID NO: 5531745 - DNA, 25 bp, Homo sapien
tcgtgccagggaggcccgccctctc

SEQ ID NO: 5531746 - DNA, 25 bp, Homo sapien
tttccaaggcacaagagtttaacac

SEQ ID NO: 5531747 - DNA, 25 bp, Homo sapien
ccaggggcccactactcatgttcct

SEQ ID NO: 5531748 - DNA, 25 bp, Homo sapien
cccctgccacttcctgagagccaga

SEQ ID NO: 5531749 - DNA, 25 bp, Homo sapien
cctccaagaccccggaggtgtcctg

SEQ ID NO: 5531750 - DNA, 25 bp, Homo sapien
tctggtcctcagtcctggggtccaa

SEQ ID NO: 5531751 - DNA, 25 bp, Homo sapien
ccttacagcaccgtgggtgagtgtg

SEQ ID NO: 5531752 - DNA, 25 bp, Homo sapien
gagccagaggatctaagactgttac

SEQ ID NO: 5531753 - DNA, 25 bp, Homo sapien
acctgtcccttggaggtagcatggc

SEQ ID NO: 5531754 - DNA, 25 bp, Homo sapien
caggacctccactctccaaaggggt

SEQ ID NO: 5531755 - DNA, 25 bp, Homo sapien
agtttaacacaggccaggctggttc

SEQ ID NO: 5531756 - DNA, 25 bp, Homo sapien
acagctcaggcccttacagcaccgt

SEQ ID NO: 5531757 - DNA, 25 bp, Homo sapien
tttacagcttggaacagactgaact

SEQ ID NO: 5531758 - DNA, 25 bp, Homo sapien
gtagaatttctagagctgaaaaggc

SEQ ID NO: 5531759 - DNA, 25 bp, Homo sapien
tttgagttgatctataccatatacc

SEQ ID NO: 5531760 - DNA, 25 bp, Homo sapien
ttctagagctgaaaaggctagacac

SEQ ID NO: 5531761 - DNA, 25 bp, Homo sapien
tggaacagactgaactatgatacta

SEQ ID NO: 5531762 - DNA, 25 bp, Homo sapien
catgtaacttgaagcagaatggggg

SEQ ID NO: 5531763 - DNA, 25 bp, Homo sapien
aatatataccaacaggaaaatagta

SEQ ID NO: 5531764 - DNA, 25 bp, Homo sapien
tgctctcacagaaagttatataaga

SEQ ID NO: 5531765 - DNA, 25 bp, Homo sapien
ctgaaaaggctagacaccatgtaac

SEQ ID NO: 5531766 - DNA, 25 bp, Homo sapien
ataccaccaagacccataaagcagg

SEQ ID NO: 5531767 - DNA, 25 bp, Homo sapien
caagacccataaagcaggatattac

SEQ ID NO: 5531768 - DNA, 25 bp, Homo sapien
gagagcaatggctcctgcgtgagaa

SEQ ID NO: 5531769 - DNA, 25 bp, Homo sapien
gcgccatttgcaccacctgtcctga

SEQ ID NO: 5531770 - DNA, 25 bp, Homo sapien
tagtcatgtccctccaaggaactgg

SEQ ID NO: 5531771 - DNA, 25 bp, Homo sapien
tgggggccttgtacagcctctaact

SEQ ID NO: 5531772 - DNA, 25 bp, Homo sapien
agtttctgagaccccctctaggaga

SEQ ID NO: 5531773 - DNA, 25 bp, Homo sapien
ggcctcgcagtttctgagaccccct

SEQ ID NO: 5531774 - DNA, 25 bp, Homo sapien
aaaatcgataaattagtcatgtccc

SEQ ID NO: 5531775 - DNA, 25 bp, Homo sapien
ctccaaggaactggcctcgcagttt

SEQ ID NO: 5531776 - DNA, 25 bp, Homo sapien
gtgtacacctcccagcgccatttgc

SEQ ID NO: 5531777 - DNA, 25 bp, Homo sapien
ctgcgtgagaaaattccaggatcca

SEQ ID NO: 5531778 - DNA, 25 bp, Homo sapien
tttacagagacctccgtgtacacct

SEQ ID NO: 5531779 - DNA, 25 bp, Homo sapien
aaccaccggcataagcattcagggc

SEQ ID NO: 5531780 - DNA, 25 bp, Homo sapien
tccaggtaccagtagcaagtcaaga

SEQ ID NO: 5531781 - DNA, 25 bp, Homo sapien
agcagaagtaggcagcattctacat

SEQ ID NO: 5531782 - DNA, 25 bp, Homo sapien
aggtactataggagtctgagtcacc

SEQ ID NO: 5531783 - DNA, 25 bp, Homo sapien
tgatgggcagtttgattcacacagt

SEQ ID NO: 5531784 - DNA, 25 bp, Homo sapien
atgcatgctagaaggtgcaagatga

SEQ ID NO: 5531785 - DNA, 25 bp, Homo sapien
ccggtgccttactgcgtctcgcgag

SEQ ID NO: 5531786 - DNA, 25 bp, Homo sapien
gtcccatggtcaggtgttacatctc

SEQ ID NO: 5531787 - DNA, 25 bp, Homo sapien
ttaactggtcagagggaactcatta

SEQ ID NO: 5531788 - DNA, 25 bp, Homo sapien
tgccacaggtttctaggggtccaat

SEQ ID NO: 5531789 - DNA, 25 bp, Homo sapien
gatgacagtttatgtgggttgaggg

SEQ ID NO: 5531790 - DNA, 25 bp, Homo sapien
aagaacgccacacagtggaaggata

SEQ ID NO: 5531791 - DNA, 25 bp, Homo sapien
caacttcctggttgaagaagaggac

SEQ ID NO: 5531792 - DNA, 25 bp, Homo sapien
tccaaaagaagtgttgaccaggagt

SEQ ID NO: 5531793 - DNA, 25 bp, Homo sapien
gaatgagaatcagcacggagttttc

SEQ ID NO: 5531794 - DNA, 25 bp, Homo sapien
ggagtgagatccaggatgtgaacta

SEQ ID NO: 5531795 - DNA, 25 bp, Homo sapien
ccaccctggagctgcttcagaatcc

SEQ ID NO: 5531796 - DNA, 25 bp, Homo sapien
taagtctcagcgtaatctcgtggcc

SEQ ID NO: 5531797 - DNA, 25 bp, Homo sapien
gaagaaagtcatgcatttacaggat

SEQ ID NO: 5531798 - DNA, 25 bp, Homo sapien
tcacgccatggcacccatcgacgag

SEQ ID NO: 5531799 - DNA, 25 bp, Homo sapien
taatctcgtggccaagatgaagaaa

SEQ ID NO: 5531800 - DNA, 25 bp, Homo sapien
ggataagataaagagtcagcgaatg

SEQ ID NO: 5531801 - DNA, 25 bp, Homo sapien
tggaagcaacttatatatcagtggt

SEQ ID NO: 5531802 - DNA, 25 bp, Homo sapien
aaaacttaaacagttgtgaggatca

SEQ ID NO: 5531803 - DNA, 25 bp, Homo sapien
aagcaggcaggtattgtatgattct

SEQ ID NO: 5531804 - DNA, 25 bp, Homo sapien
atttgggttaacagaaatagagctc

SEQ ID NO: 5531805 - DNA, 25 bp, Homo sapien
atatatcagtggtgaatgtgtaaac

SEQ ID NO: 5531806 - DNA, 25 bp, Homo sapien
gcagctttatttaaaacagcctcac

SEQ ID NO: 5531807 - DNA, 25 bp, Homo sapien
atgtatgcatgagaaccaactaata

SEQ ID NO: 5531808 - DNA, 25 bp, Homo sapien
tagatgaactattgatgtacacaac

SEQ ID NO: 5531809 - DNA, 25 bp, Homo sapien
aaaacagcctcacactggaagcaac

SEQ ID NO: 5531810 - DNA, 25 bp, Homo sapien
atgaaagcaggcaggtattgtatga

SEQ ID NO: 5531811 - DNA, 25 bp, Homo sapien
attatgtattggcttttggctattt

SEQ ID NO: 5531812 - DNA, 25 bp, Homo sapien
ggatgtgatgggtctagtccagttt

SEQ ID NO: 5531813 - DNA, 25 bp, Homo sapien
ttacttgatcttaggaaacagcaca

SEQ ID NO: 5531814 - DNA, 25 bp, Homo sapien
tgatgtaaacggttcgagtgaagaa

SEQ ID NO: 5531815 - DNA, 25 bp, Homo sapien
ttggagacaatcaagtaacaactga

SEQ ID NO: 5531816 - DNA, 25 bp, Homo sapien
gagacacaacaaatgtggccattac

SEQ ID NO: 5531817 - DNA, 25 bp, Homo sapien
tatagaaatacatcggagacacaac

SEQ ID NO: 5531818 - DNA, 25 bp, Homo sapien
cgagtgaagaattaatgcagtaagt

SEQ ID NO: 5531819 - DNA, 25 bp, Homo sapien
tgaaaatgtgaaagtaaccatatct

SEQ ID NO: 5531820 - DNA, 25 bp, Homo sapien
gggagcagagtccgagcttatctaa

SEQ ID NO: 5531821 - DNA, 25 bp, Homo sapien
gatacatatacggctttggagacaa

SEQ ID NO: 5531822 - DNA, 25 bp, Homo sapien
gaatgtggccacaaagctgtggaag

SEQ ID NO: 5531823 - DNA, 25 bp, Homo sapien
acactgggatttacaacatgattac

SEQ ID NO: 5531824 - DNA, 25 bp, Homo sapien
ggtggtggtgatattgcttcttgac

SEQ ID NO: 5531825 - DNA, 25 bp, Homo sapien
acattgtggccttccagagggcaaa

SEQ ID NO: 5531826 - DNA, 25 bp, Homo sapien
cacagtatttggagtaacagtaggt

SEQ ID NO: 5531827 - DNA, 25 bp, Homo sapien
gcttcttgacttacactgggattta

SEQ ID NO: 5531828 - DNA, 25 bp, Homo sapien
taacactcaaggaaatatctgatac

SEQ ID NO: 5531829 - DNA, 25 bp, Homo sapien
atcacaaaatcatagggaggtggtg

SEQ ID NO: 5531830 - DNA, 25 bp, Homo sapien
cagagggcaaagactattattcatc

SEQ ID NO: 5531831 - DNA, 25 bp, Homo sapien
tgaaaacatgaaagttaacaagcat

SEQ ID NO: 5531832 - DNA, 25 bp, Homo sapien
attataacaagctctgcatgatttc

SEQ ID NO: 5531833 - DNA, 25 bp, Homo sapien
tatctgatacagagaattacttcta

SEQ ID NO: 5531834 - DNA, 25 bp, Homo sapien
taagcattaaggagttttgtaactg

SEQ ID NO: 5531835 - DNA, 25 bp, Homo sapien
tattaaatataaaaggtacacagta

SEQ ID NO: 5531836 - DNA, 25 bp, Homo sapien
attcagaaggatctctcatgataat

SEQ ID NO: 5531837 - DNA, 25 bp, Homo sapien
ttaatagagacatgggtatcccttt

SEQ ID NO: 5531838 - DNA, 25 bp, Homo sapien
aactgaatagtggaactcagaaaga

SEQ ID NO: 5531839 - DNA, 25 bp, Homo sapien
gtcaggagggtaagtctctaataga

SEQ ID NO: 5531840 - DNA, 25 bp, Homo sapien
tcagaaagacatcctattcagaagg

SEQ ID NO: 5531841 - DNA, 25 bp, Homo sapien
aaagctgttaatagagacatgggta

SEQ ID NO: 5531842 - DNA, 25 bp, Homo sapien
ctttttatcaggtcaggagggtaag

SEQ ID NO: 5531843 - DNA, 25 bp, Homo sapien
agaactcctccttaagcataactaa

SEQ ID NO: 5531844 - DNA, 25 bp, Homo sapien
taaaggccaaaactgtcttacatta

SEQ ID NO: 5531845 - DNA, 25 bp, Homo sapien
tagagtgtacagttgagttggcata

SEQ ID NO: 5531846 - DNA, 25 bp, Homo sapien
tatgagccagaccctccacactgaa

SEQ ID NO: 5531847 - DNA, 25 bp, Homo sapien
acatcctgggaaatggtgtttacca

SEQ ID NO: 5531848 - DNA, 25 bp, Homo sapien
taaaataaagataagatttaccatc

SEQ ID NO: 5531849 - DNA, 25 bp, Homo sapien
acagttgagttggcatacagcattc

SEQ ID NO: 5531850 - DNA, 25 bp, Homo sapien
gtgcaaccaatccacaggacttttt

SEQ ID NO: 5531851 - DNA, 25 bp, Homo sapien
ttgtgaaatgctatgagccagaccc

SEQ ID NO: 5531852 - DNA, 25 bp, Homo sapien
cataacttaactgtgcaaccaatcc

SEQ ID NO: 5531853 - DNA, 25 bp, Homo sapien
tagtaccgatttacatcctgggaaa

SEQ ID NO: 5531854 - DNA, 25 bp, Homo sapien
aaaggctttgggactctgaagtata

SEQ ID NO: 5531855 - DNA, 25 bp, Homo sapien
ctgaagtataatgtttgtgaaatgc

SEQ ID NO: 5531856 - DNA, 25 bp, Homo sapien
ggggatagccaagtgcccatgataa

SEQ ID NO: 5531857 - DNA, 25 bp, Homo sapien
ttacaatagctaggtttcgtcaggc

SEQ ID NO: 5531858 - DNA, 25 bp, Homo sapien
ctacagataagtgcatgggtaggag

SEQ ID NO: 5531859 - DNA, 25 bp, Homo sapien
gaaaagaataactgaagaaactagc

SEQ ID NO: 5531860 - DNA, 25 bp, Homo sapien
tcatcagttgataacacacctacag

SEQ ID NO: 5531861 - DNA, 25 bp, Homo sapien
attaaactgggcaatacacatattt

SEQ ID NO: 5531862 - DNA, 25 bp, Homo sapien
actgaagaaactagcttacaatagc

SEQ ID NO: 5531863 - DNA, 25 bp, Homo sapien
gctcagaatagtgggctaaactacc

SEQ ID NO: 5531864 - DNA, 25 bp, Homo sapien
aaatggtaatgggtcaaaaactcca

SEQ ID NO: 5531865 - DNA, 25 bp, Homo sapien
agcattcataaaactggacctctct

SEQ ID NO: 5531866 - DNA, 25 bp, Homo sapien
tatctagcttagacagggataggga

SEQ ID NO: 5531867 - DNA, 25 bp, Homo sapien
cagcttctcggactacgtgcagtgc

SEQ ID NO: 5531868 - DNA, 25 bp, Homo sapien
ggcgggctacatcacctacctgtcc

SEQ ID NO: 5531869 - DNA, 25 bp, Homo sapien
tacagacttcgacccccaccacttc

SEQ ID NO: 5531870 - DNA, 25 bp, Homo sapien
ctcaacgccaggcgccgctccttta

SEQ ID NO: 5531871 - DNA, 25 bp, Homo sapien
cccgcagtatcgggacattcgcagg

SEQ ID NO: 5531872 - DNA, 25 bp, Homo sapien
cgtgcagtgcgtcctggccttcacg

SEQ ID NO: 5531873 - DNA, 25 bp, Homo sapien
atgatcctgaccatgctgctgatgc

SEQ ID NO: 5531874 - DNA, 25 bp, Homo sapien
tccacctacgtgtgcctggtgctgc

SEQ ID NO: 5531875 - DNA, 25 bp, Homo sapien
ggtggccaacattttgcggatactc

SEQ ID NO: 5531876 - DNA, 25 bp, Homo sapien
aggcgctttgagtccccgctgctgt

SEQ ID NO: 5531877 - DNA, 25 bp, Homo sapien
tggcagagcgccatcatgatcctga

SEQ ID NO: 5531878 - DNA, 25 bp, Homo sapien
ggaactcaaagcagccgctgatggc

SEQ ID NO: 5531879 - DNA, 25 bp, Homo sapien
cggcctgggtcctgctgtactccca

SEQ ID NO: 5531880 - DNA, 25 bp, Homo sapien
ttgacccaggctgcctatgtgggcg

SEQ ID NO: 5531881 - DNA, 25 bp, Homo sapien
gtcctgctgtactcccagaccgcgc

SEQ ID NO: 5531882 - DNA, 25 bp, Homo sapien
cgagcggctacagccgttgacccag

SEQ ID NO: 5531883 - DNA, 25 bp, Homo sapien
agccgttgacccaggctgcctatgt

SEQ ID NO: 5531884 - DNA, 25 bp, Homo sapien
actcaaagcagccgctgatggcgta

SEQ ID NO: 5531885 - DNA, 25 bp, Homo sapien
agcagccgctgatggcgtactatct

SEQ ID NO: 5531886 - DNA, 25 bp, Homo sapien
cgctgatggcgtactatctgaagtg

SEQ ID NO: 5531887 - DNA, 25 bp, Homo sapien
tacagccgttgacccaggctgccta

SEQ ID NO: 5531888 - DNA, 25 bp, Homo sapien
ggctacagccgttgacccaggctgc

SEQ ID NO: 5531889 - DNA, 25 bp, Homo sapien
tgagggcttaattacgctaagtcat

SEQ ID NO: 5531890 - DNA, 25 bp, Homo sapien
cacatacttgagggcttaattacgc

SEQ ID NO: 5531891 - DNA, 25 bp, Homo sapien
cattggcaacatattagaaaactct

SEQ ID NO: 5531892 - DNA, 25 bp, Homo sapien
gtgacactacaaaaacattggcaac

SEQ ID NO: 5531893 - DNA, 25 bp, Homo sapien
ttagaaaactctgtcccaagtgtac

SEQ ID NO: 5531894 - DNA, 25 bp, Homo sapien
caatctatcttggatggcgaaaccc

SEQ ID NO: 5531895 - DNA, 25 bp, Homo sapien
tctgtcccaagtgtacatcgtatac

SEQ ID NO: 5531896 - DNA, 25 bp, Homo sapien
tggaaggaaaaagtctttggtgaca

SEQ ID NO: 5531897 - DNA, 25 bp, Homo sapien
aaaagacctgtggtgacactacaaa

SEQ ID NO: 5531898 - DNA, 25 bp, Homo sapien
tggcgaaacccagacataaagttac

SEQ ID NO: 5531899 - DNA, 25 bp, Homo sapien
ctataacaaatgggaaaaacacttc

SEQ ID NO: 5531900 - DNA, 25 bp, Homo sapien
attcagtgacaaaaaagagtagatg

SEQ ID NO: 5531901 - DNA, 25 bp, Homo sapien
acaacacaggtgaataatgtgcttg

SEQ ID NO: 5531902 - DNA, 25 bp, Homo sapien
acaaggaagaatctcatggctcatg

SEQ ID NO: 5531903 - DNA, 25 bp, Homo sapien
caagtcaaactaagtgtccagccta

SEQ ID NO: 5531904 - DNA, 25 bp, Homo sapien
tttccgatgagcattgagctctttc

SEQ ID NO: 5531905 - DNA, 25 bp, Homo sapien
cagattgcactccccagcgtggctg

SEQ ID NO: 5531906 - DNA, 25 bp, Homo sapien
tcttttcaaatgtggatgtgagtgg

SEQ ID NO: 5531907 - DNA, 25 bp, Homo sapien
cctcatttgtgaaagtagagttacc

SEQ ID NO: 5531908 - DNA, 25 bp, Homo sapien
aggattaactgtactttgggaacac

SEQ ID NO: 5531909 - DNA, 25 bp, Homo sapien
caaagttcagagataatggatggtg

SEQ ID NO: 5531910 - DNA, 25 bp, Homo sapien
atggatggtgaaaaacacattaggt

SEQ ID NO: 5531911 - DNA, 25 bp, Homo sapien
tgtgtattacttttgaacaaactgt

SEQ ID NO: 5531912 - DNA, 25 bp, Homo sapien
acagtttgttcaaaagtaatacaca

SEQ ID NO: 5531913 - DNA, 25 bp, Homo sapien
caaagaaacagagaattaattacat

SEQ ID NO: 5531914 - DNA, 25 bp, Homo sapien
atgtcatcaagacccatgataaatc

SEQ ID NO: 5531915 - DNA, 25 bp, Homo sapien
agcagttgtatatgtcccttggttt

SEQ ID NO: 5531916 - DNA, 25 bp, Homo sapien
ctcctacgtcttgaaccaaagcagc

SEQ ID NO: 5531917 - DNA, 25 bp, Homo sapien
tgcagtgcctcaaactctgtcccct

SEQ ID NO: 5531918 - DNA, 25 bp, Homo sapien
atgtcccttggtttcacagctcctc

SEQ ID NO: 5531919 - DNA, 25 bp, Homo sapien
ctaacttgggtttggagacctgagt

SEQ ID NO: 5531920 - DNA, 25 bp, Homo sapien
ctgagtgtttggagacacgatgtct

SEQ ID NO: 5531921 - DNA, 25 bp, Homo sapien
gatctacactatactgaatgccaag

SEQ ID NO: 5531922 - DNA, 25 bp, Homo sapien
gagagtagagagattccatcatgtc

SEQ ID NO: 5531923 - DNA, 25 bp, Homo sapien
tctcagacactaacttgggtttgga

SEQ ID NO: 5531924 - DNA, 25 bp, Homo sapien
ggccttcctgcctggacagagttgg

SEQ ID NO: 5531925 - DNA, 25 bp, Homo sapien
aggtcactgctgcagggccttcctg

SEQ ID NO: 5531926 - DNA, 25 bp, Homo sapien
gggagagggctgtatgtccctcacg

SEQ ID NO: 5531927 - DNA, 25 bp, Homo sapien
tgggggccactctctcaacctcagg

SEQ ID NO: 5531928 - DNA, 25 bp, Homo sapien
caggggccttcctgtgcccagcttc

SEQ ID NO: 5531929 - DNA, 25 bp, Homo sapien
agccaggctggctgccagctggttc

SEQ ID NO: 5531930 - DNA, 25 bp, Homo sapien
ctcacgccacactgtgtgtgcagtc

SEQ ID NO: 5531931 - DNA, 25 bp, Homo sapien
cactagaccaccccacagggcatag

SEQ ID NO: 5531932 - DNA, 25 bp, Homo sapien
ggcccactcctgtgaggtcactgct

SEQ ID NO: 5531933 - DNA, 25 bp, Homo sapien
gagcagcacgtatcagctgggctag

SEQ ID NO: 5531934 - DNA, 25 bp, Homo sapien
ctggttccctgccccgtggctgggg

SEQ ID NO: 5531935 - DNA, 25 bp, Homo sapien
gaaggctaaagctgctgcaatggca

SEQ ID NO: 5531936 - DNA, 25 bp, Homo sapien
tgtgcaggctgcgtcttcagcacca

SEQ ID NO: 5531937 - DNA, 25 bp, Homo sapien
ccagcaccgcagattgtgcaggctg

SEQ ID NO: 5531938 - DNA, 25 bp, Homo sapien
ccgtgccacctccctatagcgttgc

SEQ ID NO: 5531939 - DNA, 25 bp, Homo sapien
cagcaccagcacttgaaactgactc

SEQ ID NO: 5531940 - DNA, 25 bp, Homo sapien
agcacggagaagactccctctctcg

SEQ ID NO: 5531941 - DNA, 25 bp, Homo sapien
catcggctatagagcagccacctac

SEQ ID NO: 5531942 - DNA, 25 bp, Homo sapien
cagatacagaagtttacggtgagtt

SEQ ID NO: 5531943 - DNA, 25 bp, Homo sapien
ctccctctctcggaagccggatccc

SEQ ID NO: 5531944 - DNA, 25 bp, Homo sapien
actgggcgctaccaggtgcttctta

SEQ ID NO: 5531945 - DNA, 25 bp, Homo sapien
ttaatgaagaggataactcagaatc

SEQ ID NO: 5531946 - DNA, 25 bp, Homo sapien
accagggctggtccctggagttcag

SEQ ID NO: 5531947 - DNA, 25 bp, Homo sapien
gtgacacttttacagaggaagggct

SEQ ID NO: 5531948 - DNA, 25 bp, Homo sapien
ggagttcagaagactgagcaaacca

SEQ ID NO: 5531949 - DNA, 25 bp, Homo sapien
gcatctgagtcagtgacataggttg

SEQ ID NO: 5531950 - DNA, 25 bp, Homo sapien
gggaggtggtgtgacacttttacag

SEQ ID NO: 5531951 - DNA, 25 bp, Homo sapien
gggtgagcagaccctgcatctgagt

SEQ ID NO: 5531952 - DNA, 25 bp, Homo sapien
tgcccccttcgtgcacggtgtggct

SEQ ID NO: 5531953 - DNA, 25 bp, Homo sapien
cattcttaggtggcttcccgaggga

SEQ ID NO: 5531954 - DNA, 25 bp, Homo sapien
agtgacataggttgttgtgatgggg

SEQ ID NO: 5531955 - DNA, 25 bp, Homo sapien
ttttaatggtgtgatggctacttcc

SEQ ID NO: 5531956 - DNA, 25 bp, Homo sapien
ggaggggtgttacattctgtttggc

SEQ ID NO: 5531957 - DNA, 25 bp, Homo sapien
tagattgtaacaaagtggaacgtac

SEQ ID NO: 5531958 - DNA, 25 bp, Homo sapien
acagatagtagattgtaacaaagtg

SEQ ID NO: 5531959 - DNA, 25 bp, Homo sapien
gcaagacatcacctagctaaaatac

SEQ ID NO: 5531960 - DNA, 25 bp, Homo sapien
aaaagaattaagatacaaatagtat

SEQ ID NO: 5531961 - DNA, 25 bp, Homo sapien
tccacttacccccaagcgccagatc

SEQ ID NO: 5531962 - DNA, 25 bp, Homo sapien
aagactttagaatcctgtgaccaac

SEQ ID NO: 5531963 - DNA, 25 bp, Homo sapien
tgtgaccaactataatttgagcttg

SEQ ID NO: 5531964 - DNA, 25 bp, Homo sapien
atttgagccagttcaaaaaggagaa

SEQ ID NO: 5531965 - DNA, 25 bp, Homo sapien
agtggaacgtacttgcaagacatca

SEQ ID NO: 5531966 - DNA, 25 bp, Homo sapien
tccctatgaggacaaactgaaaaat

SEQ ID NO: 5531967 - DNA, 25 bp, Homo sapien
agcgccagatcttgactgtacagtc

SEQ ID NO: 5531968 - DNA, 25 bp, Homo sapien
tcaataggggaatcaatacaataca

SEQ ID NO: 5531969 - DNA, 25 bp, Homo sapien
ttatattcaataggggaatcaatac

SEQ ID NO: 5531970 - DNA, 25 bp, Homo sapien
cctttgtaacacccccccgctgctg

SEQ ID NO: 5531971 - DNA, 25 bp, Homo sapien
aaaagatatttgaacagctagtcct

SEQ ID NO: 5531972 - DNA, 25 bp, Homo sapien
gagtccatatacagggccagtgtgg

SEQ ID NO: 5531973 - DNA, 25 bp, Homo sapien
atttagaacactcataagcccacct

SEQ ID NO: 5531974 - DNA, 25 bp, Homo sapien
tttgagtgtaaatgtattacagaaa

SEQ ID NO: 5531975 - DNA, 25 bp, Homo sapien
gttctcaatagtttacagtgacatc

SEQ ID NO: 5531976 - DNA, 25 bp, Homo sapien
ataagcccacctacagtatagttat

SEQ ID NO: 5531977 - DNA, 25 bp, Homo sapien
tttaccagagtccatatacagggcc

SEQ ID NO: 5531978 - DNA, 25 bp, Homo sapien
cagctagtcctttgtaacacccccc

SEQ ID NO: 5531979 - DNA, 25 bp, Homo sapien
caggatcttcactggtgaaagaact

SEQ ID NO: 5531980 - DNA, 25 bp, Homo sapien
agttctttcaccagtgaagatcctg

SEQ ID NO: 5531981 - DNA, 25 bp, Homo sapien
agcccctttggaaccaggaggcttc

SEQ ID NO: 5531982 - DNA, 25 bp, Homo sapien
aggaggcttcaccagcctgcacctc

SEQ ID NO: 5531983 - DNA, 25 bp, Homo sapien
agagcccgctgactgacctcaactt

SEQ ID NO: 5531984 - DNA, 25 bp, Homo sapien
tcaacttcaacgagtggaaggagct

SEQ ID NO: 5531985 - DNA, 25 bp, Homo sapien
actccggactcagcagcctggagtc

SEQ ID NO: 5531986 - DNA, 25 bp, Homo sapien
gccgcctcccgcctgcatcagtgtc

SEQ ID NO: 5531987 - DNA, 25 bp, Homo sapien
gtgtctctagttggtgtgctggaac

SEQ ID NO: 5531988 - DNA, 25 bp, Homo sapien
tgcatcagtgtctgtgatccccacc

SEQ ID NO: 5531989 - DNA, 25 bp, Homo sapien
ctggggtctgtgtccctgcacacag

SEQ ID NO: 5531990 - DNA, 25 bp, Homo sapien
atccccacctcccgcgccgctcggg

SEQ ID NO: 5531991 - DNA, 25 bp, Homo sapien
tcctcttctgtggcccctgggtgca

SEQ ID NO: 5531992 - DNA, 25 bp, Homo sapien
acattgtgtgtcaagttggtaaagt

SEQ ID NO: 5531993 - DNA, 25 bp, Homo sapien
ggtggccctgctgttcctcctgcag

SEQ ID NO: 5531994 - DNA, 25 bp, Homo sapien
tcactttatcagtgtgacgggtgat

SEQ ID NO: 5531995 - DNA, 25 bp, Homo sapien
ctcgtgtctgtgtgcacactgctcc

SEQ ID NO: 5531996 - DNA, 25 bp, Homo sapien
agcctggcttgcaaacctgtagtga

SEQ ID NO: 5531997 - DNA, 25 bp, Homo sapien
ttaacattagggagtactgagtgca

SEQ ID NO: 5531998 - DNA, 25 bp, Homo sapien
tgaaagggatcgtgtaactactagt

SEQ ID NO: 5531999 - DNA, 25 bp, Homo sapien
aacctgtagtgaaacagctcgtgtc

SEQ ID NO: 5532000 - DNA, 25 bp, Homo sapien
actgctcctgtgtctgctgtcgtta

SEQ ID NO: 5532001 - DNA, 25 bp, Homo sapien
gtcctgggcacatcgagatgcttta

SEQ ID NO: 5532002 - DNA, 25 bp, Homo sapien
agagaaacttgaaagggatcgtgta

SEQ ID NO: 5532003 - DNA, 25 bp, Homo sapien
ccagttctgggtcatgtgtagctga

SEQ ID NO: 5532004 - DNA, 25 bp, Homo sapien
ctgtttcagtagctcagggcacaaa

SEQ ID NO: 5532005 - DNA, 25 bp, Homo sapien
tgctgtcagtgcgttcttgggaatc

SEQ ID NO: 5532006 - DNA, 25 bp, Homo sapien
aaaatctggcctcccgcatgcgcag

SEQ ID NO: 5532007 - DNA, 25 bp, Homo sapien
ctggcttcacacagataagaaaatc

SEQ ID NO: 5532008 - DNA, 25 bp, Homo sapien
taagcttctaaaggccaaagtattc

SEQ ID NO: 5532009 - DNA, 25 bp, Homo sapien
gggtcatgtgtagctgaagcctgtt

SEQ ID NO: 5532010 - DNA, 25 bp, Homo sapien
ggaatcaggacttttaagtgaaaca

SEQ ID NO: 5532011 - DNA, 25 bp, Homo sapien
accagaggctaaaaaataaggatta

SEQ ID NO: 5532012 - DNA, 25 bp, Homo sapien
taaggattaagttcctaaagcatac

SEQ ID NO: 5532013 - DNA, 25 bp, Homo sapien
aagtgaaacaacgtatagcaaaacc

SEQ ID NO: 5532014 - DNA, 25 bp, Homo sapien
cagcgggccccggctttcctttgct

SEQ ID NO: 5532015 - DNA, 25 bp, Homo sapien
ggactggcaccaacctcagaaagga

SEQ ID NO: 5532016 - DNA, 25 bp, Homo sapien
ctgacaaaatcaccgagccatcgac

SEQ ID NO: 5532017 - DNA, 25 bp, Homo sapien
cgtgctttagacgccggctgacaaa

SEQ ID NO: 5532018 - DNA, 25 bp, Homo sapien
gggtgtcatgccaggattgacccaa

SEQ ID NO: 5532019 - DNA, 25 bp, Homo sapien
ttgagcgcctgccgcgtgctttaga

SEQ ID NO: 5532020 - DNA, 25 bp, Homo sapien
atgtgtgcaaaaaagcgccttgtaa

SEQ ID NO: 5532021 - DNA, 25 bp, Homo sapien
ttgacccaacacaggactcccggaa

SEQ ID NO: 5532022 - DNA, 25 bp, Homo sapien
tccttcagcacgtgtcctgcgggga

SEQ ID NO: 5532023 - DNA, 25 bp, Homo sapien
ctttcgtgttagcactgccgccggg

SEQ ID NO: 5532024 - DNA, 25 bp, Homo sapien
acctgcagtggtggattccttcagc

SEQ ID NO: 5532025 - DNA, 25 bp, Homo sapien
tgccaaaacagtagattcacagttc

SEQ ID NO: 5532026 - DNA, 25 bp, Homo sapien
gagaacactagttggtttgagcctc

SEQ ID NO: 5532027 - DNA, 25 bp, Homo sapien
aataaggggctagcaaattcactat

SEQ ID NO: 5532028 - DNA, 25 bp, Homo sapien
gcgtaagggatccaaatcgtgtagc

SEQ ID NO: 5532029 - DNA, 25 bp, Homo sapien
cagaagaaaatccaggtgtaatttt

SEQ ID NO: 5532030 - DNA, 25 bp, Homo sapien
gactgagacagtaacaaacatcctt

SEQ ID NO: 5532031 - DNA, 25 bp, Homo sapien
actatcagagattaacatgggttat

SEQ ID NO: 5532032 - DNA, 25 bp, Homo sapien
aacagcccatgagaacactagttgg

SEQ ID NO: 5532033 - DNA, 25 bp, Homo sapien
catgggttatgagcaactacagtcc

SEQ ID NO: 5532034 - DNA, 25 bp, Homo sapien
ttgcaaaagctcctgaaataaaacc

SEQ ID NO: 5532035 - DNA, 25 bp, Homo sapien
tttgagcctcaaaagcgtaaatctg

SEQ ID NO: 5532036 - DNA, 25 bp, Homo sapien
atagtagggtaagttgttaagagtg

SEQ ID NO: 5532037 - DNA, 25 bp, Homo sapien
agtgcaacagcactggctctctcca

SEQ ID NO: 5532038 - DNA, 25 bp, Homo sapien
ggtttggtctgggacttccttgctc

SEQ ID NO: 5532039 - DNA, 25 bp, Homo sapien
gcctaacaccagcgtttgaggggct

SEQ ID NO: 5532040 - DNA, 25 bp, Homo sapien
tcaaaataacgccccagataccagc

SEQ ID NO: 5532041 - DNA, 25 bp, Homo sapien
tccagtcaggaggcatagtttttac

SEQ ID NO: 5532042 - DNA, 25 bp, Homo sapien
cattaacttctctggaaagggggga

SEQ ID NO: 5532043 - DNA, 25 bp, Homo sapien
ctgtatggcactggcattgtccctg

SEQ ID NO: 5532044 - DNA, 25 bp, Homo sapien
tttttggaggtgcttaagcagaagc

SEQ ID NO: 5532045 - DNA, 25 bp, Homo sapien
ggaggtaaggcctttgagcccacaa

SEQ ID NO: 5532046 - DNA, 25 bp, Homo sapien
tacagaggtctctgccggctctttc

SEQ ID NO: 5532047 - DNA, 25 bp, Homo sapien
aaaattgtgtttggaagctggactt

SEQ ID NO: 5532048 - DNA, 25 bp, Homo sapien
ttcatgaaagcataccggctatgtc

SEQ ID NO: 5532049 - DNA, 25 bp, Homo sapien
ttaagaagattggagctgctaatgt

SEQ ID NO: 5532050 - DNA, 25 bp, Homo sapien
atataggaaaacagagctttattta

SEQ ID NO: 5532051 - DNA, 25 bp, Homo sapien
tacaaatattggtccctgtggggtc

SEQ ID NO: 5532052 - DNA, 25 bp, Homo sapien
tgtgaaacaatgggaaaccatgaaa

SEQ ID NO: 5532053 - DNA, 25 bp, Homo sapien
gtggggtctcagcagtcataaaaat

SEQ ID NO: 5532054 - DNA, 25 bp, Homo sapien
ctcatgttcatgggaggaaaatcta

SEQ ID NO: 5532055 - DNA, 25 bp, Homo sapien
atttaagcctaatgatgaccagcaa

SEQ ID NO: 5532056 - DNA, 25 bp, Homo sapien
aggcactggttgggttctctcgtgt

SEQ ID NO: 5532057 - DNA, 25 bp, Homo sapien
tgggataaggtttagaactacactg

SEQ ID NO: 5532058 - DNA, 25 bp, Homo sapien
tccgaggaccgcaacgggaggagct

SEQ ID NO: 5532059 - DNA, 25 bp, Homo sapien
agctcctcccgttgcggtcctcgga

SEQ ID NO: 5532060 - DNA, 25 bp, Homo sapien
taagatcccaggaaccttcacccac

SEQ ID NO: 5532061 - DNA, 25 bp, Homo sapien
ccagtactaggcggcgtctagtctt

SEQ ID NO: 5532062 - DNA, 25 bp, Homo sapien
acatcccaggatagctcaaggcaaa

SEQ ID NO: 5532063 - DNA, 25 bp, Homo sapien
tcatggccctggaccctccaccttc

SEQ ID NO: 5532064 - DNA, 25 bp, Homo sapien
caggttgggtcagagctattataaa

SEQ ID NO: 5532065 - DNA, 25 bp, Homo sapien
aactcctgagccagcacagtagaga

SEQ ID NO: 5532066 - DNA, 25 bp, Homo sapien
ccagcacagtagagaccagtactag

SEQ ID NO: 5532067 - DNA, 25 bp, Homo sapien
ccatctatggagaaatcggtttgtc

SEQ ID NO: 5532068 - DNA, 25 bp, Homo sapien
aactcaggttgaggctaagtccttc

SEQ ID NO: 5532069 - DNA, 25 bp, Homo sapien
atagctcaaggcaaaacccgatctt

SEQ ID NO: 5532070 - DNA, 25 bp, Homo sapien
gtgggtttggatcaagtcctgctgc

SEQ ID NO: 5532071 - DNA, 25 bp, Homo sapien
cctgggatttccttgagataaattc

SEQ ID NO: 5532072 - DNA, 25 bp, Homo sapien
aaaacatcacagagtgtccccagtg

SEQ ID NO: 5532073 - DNA, 25 bp, Homo sapien
tcacaatcttaacactcaggaaaac

SEQ ID NO: 5532074 - DNA, 25 bp, Homo sapien
aaatgtaattgtaagactgaatatt

SEQ ID NO: 5532075 - DNA, 25 bp, Homo sapien
cagcatgtgcagcttcacacagatc

SEQ ID NO: 5532076 - DNA, 25 bp, Homo sapien
cttactgaaaacatgcacagagtgt

SEQ ID NO: 5532077 - DNA, 25 bp, Homo sapien
atagaaaaagtagaaatgatcataa

SEQ ID NO: 5532078 - DNA, 25 bp, Homo sapien
caggaaaacaccacttcatgcatgc

SEQ ID NO: 5532079 - DNA, 25 bp, Homo sapien
ataaacagtcccgcactgagcagca

SEQ ID NO: 5532080 - DNA, 25 bp, Homo sapien
tgtttccaggtaaatgtacacaaaa

SEQ ID NO: 5532081 - DNA, 25 bp, Homo sapien
agcttcacacagatccctgggattt

SEQ ID NO: 5532082 - DNA, 25 bp, Homo sapien
ttggagtatttttttgccttgcagt

SEQ ID NO: 5532083 - DNA, 25 bp, Homo sapien
ttaaatatcaggtccaaatgctttt

SEQ ID NO: 5532084 - DNA, 25 bp, Homo sapien
aagtttgatggataatagtgttttc

SEQ ID NO: 5532085 - DNA, 25 bp, Homo sapien
ttgtgactgaagacattgccaactt

SEQ ID NO: 5532086 - DNA, 25 bp, Homo sapien
aaaaagtaaagactggcaaataatc

SEQ ID NO: 5532087 - DNA, 25 bp, Homo sapien
aagactggcaaataatcacaaatgt

SEQ ID NO: 5532088 - DNA, 25 bp, Homo sapien
taaagataaatttttgtggatggaa

SEQ ID NO: 5532089 - DNA, 25 bp, Homo sapien
ttacatagagaaaccttaataagta

SEQ ID NO: 5532090 - DNA, 25 bp, Homo sapien
atattaaggttgcgttggaaatttc

SEQ ID NO: 5532091 - DNA, 25 bp, Homo sapien
aatacttcaatatgtggaaaacttc

SEQ ID NO: 5532092 - DNA, 25 bp, Homo sapien
acaaatgtcagaacattaaagtagc

SEQ ID NO: 5532093 - DNA, 25 bp, Homo sapien
tcctccacactacagggacttgatc

SEQ ID NO: 5532094 - DNA, 25 bp, Homo sapien
tacagggacttgatcttaacaccac

SEQ ID NO: 5532095 - DNA, 25 bp, Homo sapien
acccatagatgtcactagcaccccc

SEQ ID NO: 5532096 - DNA, 25 bp, Homo sapien
ctgcacccaacccacgcccattttt

SEQ ID NO: 5532097 - DNA, 25 bp, Homo sapien
taacaccacagacatggcaagctca

SEQ ID NO: 5532098 - DNA, 25 bp, Homo sapien
ttgcccaaaatcacatgctggatcc

SEQ ID NO: 5532099 - DNA, 25 bp, Homo sapien
gcaccccctcccgcagttctgacaa

SEQ ID NO: 5532100 - DNA, 25 bp, Homo sapien
catgctggatccagaactagagccc

SEQ ID NO: 5532101 - DNA, 25 bp, Homo sapien
aggcttgcagaggttagatcatttg

SEQ ID NO: 5532102 - DNA, 25 bp, Homo sapien
tccagaactagagcccccagtcttg

SEQ ID NO: 5532103 - DNA, 25 bp, Homo sapien
tctcaacctggcactaataacattt

SEQ ID NO: 5532104 - DNA, 25 bp, Homo sapien
aagtcactgtgtatgaatagctccc

SEQ ID NO: 5532105 - DNA, 25 bp, Homo sapien
ggaaatgggaagatagtcactttgc

SEQ ID NO: 5532106 - DNA, 25 bp, Homo sapien
tttcccagggcagttttgttgatcc

SEQ ID NO: 5532107 - DNA, 25 bp, Homo sapien
tgataaccaattacagagaggaaaa

SEQ ID NO: 5532108 - DNA, 25 bp, Homo sapien
aatagctcccacagaagtgccgagt

SEQ ID NO: 5532109 - DNA, 25 bp, Homo sapien
gtgtgtccacacttgggcctgacgt

SEQ ID NO: 5532110 - DNA, 25 bp, Homo sapien
tgggcctgacgttatacttggggaa

SEQ ID NO: 5532111 - DNA, 25 bp, Homo sapien
agggtgttagtcattaagcaaattc

SEQ ID NO: 5532112 - DNA, 25 bp, Homo sapien
ccttcctcatgacctgatgggatgg

SEQ ID NO: 5532113 - DNA, 25 bp, Homo sapien
tccaggtctgatgcttagggtgtta

SEQ ID NO: 5532114 - DNA, 25 bp, Homo sapien
ttattgaaaatgagatgggaaatgg

SEQ ID NO: 5532115 - DNA, 25 bp, Homo sapien
gcccttcacatcgaggatggggctc

SEQ ID NO: 5532116 - DNA, 25 bp, Homo sapien
gcggacaccgacctggagattttaa

SEQ ID NO: 5532117 - DNA, 25 bp, Homo sapien
gtcggaattagcagaacgtttgcgc

SEQ ID NO: 5532118 - DNA, 25 bp, Homo sapien
gtgggaatcagagcaatgcctatgc

SEQ ID NO: 5532119 - DNA, 25 bp, Homo sapien
ggctgctggaataccgcctgaatgc

SEQ ID NO: 5532120 - DNA, 25 bp, Homo sapien
gcctgaatgccttgcgaggactgtg

SEQ ID NO: 5532121 - DNA, 25 bp, Homo sapien
caaggagcctgctgactgtctcaat

SEQ ID NO: 5532122 - DNA, 25 bp, Homo sapien
ctcaaacgccagggcttgttgcagc

SEQ ID NO: 5532123 - DNA, 25 bp, Homo sapien
aactgctgaggtgctattgaactgc

SEQ ID NO: 5532124 - DNA, 25 bp, Homo sapien
gtgatgaggaaactttggccctgct

SEQ ID NO: 5532125 - DNA, 25 bp, Homo sapien
tgagaccaagaacccgtcggaatta

SEQ ID NO: 5532126 - DNA, 25 bp, Homo sapien
ggcttccctaaggagcatggataag

SEQ ID NO: 5532127 - DNA, 25 bp, Homo sapien
gaatgtcaaatgatgcagcaaaggg

SEQ ID NO: 5532128 - DNA, 25 bp, Homo sapien
ccaggcactgtgcttaatcctgaga

SEQ ID NO: 5532129 - DNA, 25 bp, Homo sapien
tgatgcccaagtgtaaataaccagg

SEQ ID NO: 5532130 - DNA, 25 bp, Homo sapien
gaagggaaagacatgaataatcaca

SEQ ID NO: 5532131 - DNA, 25 bp, Homo sapien
ggaaggcacatgatgcccaagtgta

SEQ ID NO: 5532132 - DNA, 25 bp, Homo sapien
aagagacactgtcgctgccccagta

SEQ ID NO: 5532133 - DNA, 25 bp, Homo sapien
cttttgggaacctattaaatgtatg

SEQ ID NO: 5532134 - DNA, 25 bp, Homo sapien
acactgtcgctgccccagtaggact

SEQ ID NO: 5532135 - DNA, 25 bp, Homo sapien
gacatacagccagtagagctggagt

SEQ ID NO: 5532136 - DNA, 25 bp, Homo sapien
catggataagtctaccaggcagagg

SEQ ID NO: 5532137 - DNA, 25 bp, Homo sapien
gacaattcaaagatttatggaggta

SEQ ID NO: 5532138 - DNA, 25 bp, Homo sapien
catcctgtggtcacagtgacaattc

SEQ ID NO: 5532139 - DNA, 25 bp, Homo sapien
ccctgccaagacaaggccatggaat

SEQ ID NO: 5532140 - DNA, 25 bp, Homo sapien
gctgcagttgagacccactaaagta

SEQ ID NO: 5532141 - DNA, 25 bp, Homo sapien
ggaagtcggctgtgtagtcaatttt

SEQ ID NO: 5532142 - DNA, 25 bp, Homo sapien
ttctcctgagtgtcaaatcaaaatt

SEQ ID NO: 5532143 - DNA, 25 bp, Homo sapien
acctataaaatggctaataaaggat

SEQ ID NO: 5532144 - DNA, 25 bp, Homo sapien
tatggaggtaaattgatctgtaatc

SEQ ID NO: 5532145 - DNA, 25 bp, Homo sapien
ttactccctgccaagacaaggccat

SEQ ID NO: 5532146 - DNA, 25 bp, Homo sapien
ttctgaaatgctgcagttgagaccc

SEQ ID NO: 5532147 - DNA, 25 bp, Homo sapien
tggtcattcagtactcataatagac

SEQ ID NO: 5532148 - DNA, 25 bp, Homo sapien
tgctaccaatcccaaggagcaagga

SEQ ID NO: 5532149 - DNA, 25 bp, Homo sapien
tgggccatgacacagtacacgccat

SEQ ID NO: 5532150 - DNA, 25 bp, Homo sapien
tatgctcagtcaggagagcctagga

SEQ ID NO: 5532151 - DNA, 25 bp, Homo sapien
ttcaggcactggctaacttagaagc

SEQ ID NO: 5532152 - DNA, 25 bp, Homo sapien
ggagcaaggagcatcgatgctttga

SEQ ID NO: 5532153 - DNA, 25 bp, Homo sapien
ctctcatcccgggatgtcagtgggc

SEQ ID NO: 5532154 - DNA, 25 bp, Homo sapien
ggtctataggtgctgctctctcatc

SEQ ID NO: 5532155 - DNA, 25 bp, Homo sapien
ttctgaagaaagccatacaacgacg

SEQ ID NO: 5532156 - DNA, 25 bp, Homo sapien
atacaacgacggtttctggtggcaa

SEQ ID NO: 5532157 - DNA, 25 bp, Homo sapien
gtcagtgggctgcctgtttatgctc

SEQ ID NO: 5532158 - DNA, 25 bp, Homo sapien
tgaatagagaatagggacgtatttt

SEQ ID NO: 5532159 - DNA, 25 bp, Homo sapien
aggacattcaccaaagggctgacaa

SEQ ID NO: 5532160 - DNA, 25 bp, Homo sapien
agggcgtggactagatccttactgt

SEQ ID NO: 5532161 - DNA, 25 bp, Homo sapien
ttcatcgacatagaagtccacgaga

SEQ ID NO: 5532162 - DNA, 25 bp, Homo sapien
aaatacacagtatagaacagcactt

SEQ ID NO: 5532163 - DNA, 25 bp, Homo sapien
ctatctgggtacacaggtacaggga

SEQ ID NO: 5532164 - DNA, 25 bp, Homo sapien
tgtgctggtatgcaagacctcttct

SEQ ID NO: 5532165 - DNA, 25 bp, Homo sapien
actgtggctcagaagcatcactgtg

SEQ ID NO: 5532166 - DNA, 25 bp, Homo sapien
gggacagaggtcacaccattcccca

SEQ ID NO: 5532167 - DNA, 25 bp, Homo sapien
agaaatagacacatggagaatagac

SEQ ID NO: 5532168 - DNA, 25 bp, Homo sapien
gctgacaatggttacaaaagggtgc

SEQ ID NO: 5532169 - DNA, 25 bp, Homo sapien
aatagacccttaagccagcagagaa

SEQ ID NO: 5532170 - DNA, 25 bp, Homo sapien
gatgttggaataattaagtaaagac

SEQ ID NO: 5532171 - DNA, 25 bp, Homo sapien
gaagaagataagatgttggaataat

SEQ ID NO: 5532172 - DNA, 25 bp, Homo sapien
aagaagataagatgttggaataatt

SEQ ID NO: 5532173 - DNA, 25 bp, Homo sapien
ggagaaagagattaaatgtatgtga

SEQ ID NO: 5532174 - DNA, 25 bp, Homo sapien
agaagaagataagatgttggaataa

SEQ ID NO: 5532175 - DNA, 25 bp, Homo sapien
aggagaaagagattaaatgtatgtg

SEQ ID NO: 5532176 - DNA, 25 bp, Homo sapien
gaggagaaagagattaaatgtatgt

SEQ ID NO: 5532177 - DNA, 25 bp, Homo sapien
gagaaagagattaaatgtatgtgaa

SEQ ID NO: 5532178 - DNA, 25 bp, Homo sapien
aatgtatgtgaatgttttgcaaaaa

SEQ ID NO: 5532179 - DNA, 25 bp, Homo sapien
gaagataagatgttggaataattaa

SEQ ID NO: 5532180 - DNA, 25 bp, Homo sapien
tggaataattaagtaaagacaaaga

SEQ ID NO: 5532181 - DNA, 25 bp, Homo sapien
aagtagtttcttggcgtgcacgaat

SEQ ID NO: 5532182 - DNA, 25 bp, Homo sapien
ccaggcagaaccatgctaaccttac

SEQ ID NO: 5532183 - DNA, 25 bp, Homo sapien
taaatctggttatatgtgggacttc

SEQ ID NO: 5532184 - DNA, 25 bp, Homo sapien
acctgctagcacagaagcgcagaag

SEQ ID NO: 5532185 - DNA, 25 bp, Homo sapien
caaatcccatgccaaactgtcactt

SEQ ID NO: 5532186 - DNA, 25 bp, Homo sapien
actgtaagtactggctgatattcac

SEQ ID NO: 5532187 - DNA, 25 bp, Homo sapien
aaaatactgacaagcaagtagtttc

SEQ ID NO: 5532188 - DNA, 25 bp, Homo sapien
tatgtgggacttcaacagctcaatt

SEQ ID NO: 5532189 - DNA, 25 bp, Homo sapien
gcgtgcacgaattgcatccagaacc

SEQ ID NO: 5532190 - DNA, 25 bp, Homo sapien
cccaggcagaaccatgctaacctta

SEQ ID NO: 5532191 - DNA, 25 bp, Homo sapien
tttgtgggcacctgctagcacagaa

SEQ ID NO: 5532192 - DNA, 25 bp, Homo sapien
gttaattacttgtcagggaaatgca

SEQ ID NO: 5532193 - DNA, 25 bp, Homo sapien
tcacctcaaaccctctaagactgcc

SEQ ID NO: 5532194 - DNA, 25 bp, Homo sapien
gtatggtccttagaatagcgtcatc

SEQ ID NO: 5532195 - DNA, 25 bp, Homo sapien
ttataaccacaaagagtgtctctgc

SEQ ID NO: 5532196 - DNA, 25 bp, Homo sapien
tactaaggctggacaaatgtgtatc

SEQ ID NO: 5532197 - DNA, 25 bp, Homo sapien
taccaaagaagacagtcaaataacc

SEQ ID NO: 5532198 - DNA, 25 bp, Homo sapien
cacaaaacagacatgtcaagcatcg

SEQ ID NO: 5532199 - DNA, 25 bp, Homo sapien
ctaagactgccaaaagctacgccac

SEQ ID NO: 5532200 - DNA, 25 bp, Homo sapien
tgatatgcagcaatgggagttcatg

SEQ ID NO: 5532201 - DNA, 25 bp, Homo sapien
acgccacaatcaaattctgcaggtt

SEQ ID NO: 5532202 - DNA, 25 bp, Homo sapien
taattggcaatagctactaaggctg

SEQ ID NO: 5532203 - DNA, 25 bp, Homo sapien
acaatgaagtgtaatactcttccct

SEQ ID NO: 5532204 - DNA, 25 bp, Homo sapien
tatgagcttaacaaggctttcaaac

SEQ ID NO: 5532205 - DNA, 25 bp, Homo sapien
tggttgcccatttagcttggattac

SEQ ID NO: 5532206 - DNA, 25 bp, Homo sapien
taatgacatttgaaagatacattca

SEQ ID NO: 5532207 - DNA, 25 bp, Homo sapien
tagagtatccttagaatcaagccat

SEQ ID NO: 5532208 - DNA, 25 bp, Homo sapien
tttacttatgtatatgcactgaacc

SEQ ID NO: 5532209 - DNA, 25 bp, Homo sapien
gctgatggattgcaccctagcagat

SEQ ID NO: 5532210 - DNA, 25 bp, Homo sapien
caaaggtaggaaactctacagtgtt

SEQ ID NO: 5532211 - DNA, 25 bp, Homo sapien
ttaaaacaaatagagtatccttaga

SEQ ID NO: 5532212 - DNA, 25 bp, Homo sapien
tagcagatattacttctggttgccc

SEQ ID NO: 5532213 - DNA, 25 bp, Homo sapien
tcaatcccgtgtagactttaaaaca

SEQ ID NO: 5532214 - DNA, 25 bp, Homo sapien
tgaattttattaggtgtacacagag

SEQ ID NO: 5532215 - DNA, 25 bp, Homo sapien
ttcctggcctttcttggtagttgtc

SEQ ID NO: 5532216 - DNA, 25 bp, Homo sapien
ataaatggaatggaccaaaatcctc

SEQ ID NO: 5532217 - DNA, 25 bp, Homo sapien
agaggccagtacattgatcccacat

SEQ ID NO: 5532218 - DNA, 25 bp, Homo sapien
aagaataacaagaggccagtacatt

SEQ ID NO: 5532219 - DNA, 25 bp, Homo sapien
caagggctgtcatgaagaagattta

SEQ ID NO: 5532220 - DNA, 25 bp, Homo sapien
ccacatagaaagaataacaagaggc

SEQ ID NO: 5532221 - DNA, 25 bp, Homo sapien
gtacacagagttaacaaatatattc

SEQ ID NO: 5532222 - DNA, 25 bp, Homo sapien
atcagctaagcaggccagaattttt

SEQ ID NO: 5532223 - DNA, 25 bp, Homo sapien
catggatgaatgtgttggtttgcct

SEQ ID NO: 5532224 - DNA, 25 bp, Homo sapien
aataaatgaggttcagtttggtctc

SEQ ID NO: 5532225 - DNA, 25 bp, Homo sapien
tgtctttgaaggaaacgttcgcaac

SEQ ID NO: 5532226 - DNA, 25 bp, Homo sapien
cagaccatcccgccttttgaacgcc

SEQ ID NO: 5532227 - DNA, 25 bp, Homo sapien
gcagagcgtggcttacaaagacttt

SEQ ID NO: 5532228 - DNA, 25 bp, Homo sapien
gctgtagcaaagaattataccctcc

SEQ ID NO: 5532229 - DNA, 25 bp, Homo sapien
cagtgatagtacgcgcctggattac

SEQ ID NO: 5532230 - DNA, 25 bp, Homo sapien
gcagagactggaatgttaaatggga

SEQ ID NO: 5532231 - DNA, 25 bp, Homo sapien
cagcaggacacaaatagtacatgtg

SEQ ID NO: 5532232 - DNA, 25 bp, Homo sapien
gttcagaagtagcattcccgtgtac

SEQ ID NO: 5532233 - DNA, 25 bp, Homo sapien
actcacaaatacagtggcagagact

SEQ ID NO: 5532234 - DNA, 25 bp, Homo sapien
gtgttgtcaatttggaagcagttgt

SEQ ID NO: 5532235 - DNA, 25 bp, Homo sapien
cagtgatacccaaagctgagcagag

SEQ ID NO: 5532236 - DNA, 25 bp, Homo sapien
gtctcctccggccgccggccgtccc

SEQ ID NO: 5532237 - DNA, 25 bp, Homo sapien
gggacggccggcggccggaggagac

SEQ ID NO: 5532238 - DNA, 25 bp, Homo sapien
attggagaagttacctgtccccact

SEQ ID NO: 5532239 - DNA, 25 bp, Homo sapien
aggatcttgggaaaacccatggcat

SEQ ID NO: 5532240 - DNA, 25 bp, Homo sapien
cttttgggagtctgttggtaactaa

SEQ ID NO: 5532241 - DNA, 25 bp, Homo sapien
taagtaagtctgtagtcgctctgca

SEQ ID NO: 5532242 - DNA, 25 bp, Homo sapien
tgtccccactatagcagtaaacaaa

SEQ ID NO: 5532243 - DNA, 25 bp, Homo sapien
ttctgagctgtttacaactgaccac

SEQ ID NO: 5532244 - DNA, 25 bp, Homo sapien
aatgagctgactttaaggatcttgg

SEQ ID NO: 5532245 - DNA, 25 bp, Homo sapien
tggtaactaaagatgtcaacaaaga

SEQ ID NO: 5532246 - DNA, 25 bp, Homo sapien
caacaaagaataaattggagaagtt

SEQ ID NO: 5532247 - DNA, 25 bp, Homo sapien
cagcagacctaaaatatccccaagt

SEQ ID NO: 5532248 - DNA, 25 bp, Homo sapien
agaagaaactgtagagtagtaattc

SEQ ID NO: 5532249 - DNA, 25 bp, Homo sapien
aaaggagacacatagtcctagcctc

SEQ ID NO: 5532250 - DNA, 25 bp, Homo sapien
cacagcacacttagggatctgggga

SEQ ID NO: 5532251 - DNA, 25 bp, Homo sapien
gtgcaaggaactgtgcaagatgcta

SEQ ID NO: 5532252 - DNA, 25 bp, Homo sapien
cagcagtcaacaaaggagacacata

SEQ ID NO: 5532253 - DNA, 25 bp, Homo sapien
agagctctaattgtgtgcaaggaac

SEQ ID NO: 5532254 - DNA, 25 bp, Homo sapien
taattatatgtagagtcagtgcctg

SEQ ID NO: 5532255 - DNA, 25 bp, Homo sapien
ctggagtcaaagtgttgagtgtgag

SEQ ID NO: 5532256 - DNA, 25 bp, Homo sapien
gtagagtcagtgcctgaacagttca

SEQ ID NO: 5532257 - DNA, 25 bp, Homo sapien
gtcctagcctcatggaaggtacagc

SEQ ID NO: 5532258 - DNA, 25 bp, Homo sapien
gtagaatctaccccccaggcagaga

SEQ ID NO: 5532259 - DNA, 25 bp, Homo sapien
caagaacatttttcagggtagaatc

SEQ ID NO: 5532260 - DNA, 25 bp, Homo sapien
aaaatggaggactgtttatttcatt

SEQ ID NO: 5532261 - DNA, 25 bp, Homo sapien
gtttgtacagaacagtcatataaaa

SEQ ID NO: 5532262 - DNA, 25 bp, Homo sapien
aagcagagcattatcacaatatgac

SEQ ID NO: 5532263 - DNA, 25 bp, Homo sapien
aaaacattccatgaaagactgcctt

SEQ ID NO: 5532264 - DNA, 25 bp, Homo sapien
ataactaatgacatgcaaacacaat

SEQ ID NO: 5532265 - DNA, 25 bp, Homo sapien
caagctcactgagcagagattctgc

SEQ ID NO: 5532266 - DNA, 25 bp, Homo sapien
ggagggaagctccactaccccatgc

SEQ ID NO: 5532267 - DNA, 25 bp, Homo sapien
aggcttcactgatacatatgggggt

SEQ ID NO: 5532268 - DNA, 25 bp, Homo sapien
acactgtattgagcctgggaaatct

SEQ ID NO: 5532269 - DNA, 25 bp, Homo sapien
gagcctgggaaatcttggcaatatc

SEQ ID NO: 5532270 - DNA, 25 bp, Homo sapien
tcatttacagataggaacaaaggcc

SEQ ID NO: 5532271 - DNA, 25 bp, Homo sapien
ggcagaagatgtgagactctagtct

SEQ ID NO: 5532272 - DNA, 25 bp, Homo sapien
tctaggcttgacttagcgatgggtg

SEQ ID NO: 5532273 - DNA, 25 bp, Homo sapien
tgagctgaaatagccacaggtcacc

SEQ ID NO: 5532274 - DNA, 25 bp, Homo sapien
ctattcatgtggtggcagaagatgt

SEQ ID NO: 5532275 - DNA, 25 bp, Homo sapien
tctagtctccagtcagggaggcttc

SEQ ID NO: 5532276 - DNA, 25 bp, Homo sapien
agggaccagagagagcttttagtcc

SEQ ID NO: 5532277 - DNA, 25 bp, Homo sapien
gacagacactcagaaaaacacccta

SEQ ID NO: 5532278 - DNA, 25 bp, Homo sapien
caccacttggcctgatgtgggactc

SEQ ID NO: 5532279 - DNA, 25 bp, Homo sapien
agcatgtcagcagactcaaacggac

SEQ ID NO: 5532280 - DNA, 25 bp, Homo sapien
agccagcataatttgacagacactc

SEQ ID NO: 5532281 - DNA, 25 bp, Homo sapien
gaaggccaggtctggaagtaaattc

SEQ ID NO: 5532282 - DNA, 25 bp, Homo sapien
ggccctgaaacaagtagttacaatc

SEQ ID NO: 5532283 - DNA, 25 bp, Homo sapien
aaacgagtaacaaataaagcatata

SEQ ID NO: 5532284 - DNA, 25 bp, Homo sapien
caatcctgctatgaaaacgagtaac

SEQ ID NO: 5532285 - DNA, 25 bp, Homo sapien
aagcataccacaagcaccctgactc

SEQ ID NO: 5532286 - DNA, 25 bp, Homo sapien
aactcaggtagtctagctgtgggac

SEQ ID NO: 5532287 - DNA, 25 bp, Homo sapien
aggaaactgagatacagaaaagtta

SEQ ID NO: 5532288 - DNA, 25 bp, Homo sapien
agctgtgggacctaaccatgacact

SEQ ID NO: 5532289 - DNA, 25 bp, Homo sapien
tctaggtttgaattgtgactccagt

SEQ ID NO: 5532290 - DNA, 25 bp, Homo sapien
gaaactggtatcttggccctgaaac

SEQ ID NO: 5532291 - DNA, 25 bp, Homo sapien
aggctctagggataaaaagaaactg

SEQ ID NO: 5532292 - DNA, 25 bp, Homo sapien
catatgacctgagtgaatttgtaca

SEQ ID NO: 5532293 - DNA, 25 bp, Homo sapien
gagtgtgtgtctatgggcttgacct

SEQ ID NO: 5532294 - DNA, 25 bp, Homo sapien
agctgcccctcaggcgtccaggcag

SEQ ID NO: 5532295 - DNA, 25 bp, Homo sapien
aattcagctcacaggcacacttccc

SEQ ID NO: 5532296 - DNA, 25 bp, Homo sapien
ttgcactgtgataagctgcccctca

SEQ ID NO: 5532297 - DNA, 25 bp, Homo sapien
gtatccaagcaggtgttggaggaaa

SEQ ID NO: 5532298 - DNA, 25 bp, Homo sapien
cccaccccctgctgtttaccctgtc

SEQ ID NO: 5532299 - DNA, 25 bp, Homo sapien
tggctcagttctgggctatggtttc

SEQ ID NO: 5532300 - DNA, 25 bp, Homo sapien
gggccctccaagctcacaccccacc

SEQ ID NO: 5532301 - DNA, 25 bp, Homo sapien
gggcctagtatccaagcaggtgttg

SEQ ID NO: 5532302 - DNA, 25 bp, Homo sapien
tctggaaaggccagtcctttaattc

SEQ ID NO: 5532303 - DNA, 25 bp, Homo sapien
tttcttaccagcagagagtgtgtgt

SEQ ID NO: 5532304 - DNA, 25 bp, Homo sapien
catggtaccctgtaaatgtgacctt

SEQ ID NO: 5532305 - DNA, 25 bp, Homo sapien
tagataagatatgggcctgtagtgg

SEQ ID NO: 5532306 - DNA, 25 bp, Homo sapien
tgctggtctccctagaaaaagagtt

SEQ ID NO: 5532307 - DNA, 25 bp, Homo sapien
gtagtgggtagaattgtgtccccca

SEQ ID NO: 5532308 - DNA, 25 bp, Homo sapien
atacatgcaaatgagcaaaaagctt

SEQ ID NO: 5532309 - DNA, 25 bp, Homo sapien
ggtgaactctaatccagtgctggtc

SEQ ID NO: 5532310 - DNA, 25 bp, Homo sapien
aaaagagtttggacacggatacaaa

SEQ ID NO: 5532311 - DNA, 25 bp, Homo sapien
agttatatcaaaagaggtagtaatc

SEQ ID NO: 5532312 - DNA, 25 bp, Homo sapien
ggtctttgcggatgtagtcaagatg

SEQ ID NO: 5532313 - DNA, 25 bp, Homo sapien
gaggtcatattggatcatggtgaac

SEQ ID NO: 5532314 - DNA, 25 bp, Homo sapien
caacatcctagataagatatgggcc

SEQ ID NO: 5532315 - DNA, 25 bp, Homo sapien
ccgtcaccgccatgtgcaagaaatc

SEQ ID NO: 5532316 - DNA, 25 bp, Homo sapien
ggcatttctgccttcatgaactcct

SEQ ID NO: 5532317 - DNA, 25 bp, Homo sapien
gagcatcccgtcaccgccatgtgca

SEQ ID NO: 5532318 - DNA, 25 bp, Homo sapien
tgcaagaaatctggtcttcacccgc

SEQ ID NO: 5532319 - DNA, 25 bp, Homo sapien
gaagctctctagggagcatcccgtc

SEQ ID NO: 5532320 - DNA, 25 bp, Homo sapien
agcaaagaatccacttgaagctctc

SEQ ID NO: 5532321 - DNA, 25 bp, Homo sapien
cacttgaagctctctagggagcatc

SEQ ID NO: 5532322 - DNA, 25 bp, Homo sapien
accgccatgtgcaagaaatctggtc

SEQ ID NO: 5532323 - DNA, 25 bp, Homo sapien
gctctctagggagcatcccgtcacc

SEQ ID NO: 5532324 - DNA, 25 bp, Homo sapien
tcttcacccgcattttagctgtgtt

SEQ ID NO: 5532325 - DNA, 25 bp, Homo sapien
cttgaagctctctagggagcatccc

SEQ ID NO: 5532326 - DNA, 25 bp, Homo sapien
ctggccggcttccttttagtgcccc

SEQ ID NO: 5532327 - DNA, 25 bp, Homo sapien
ttcaaagtgttcacagggtgcgaga

SEQ ID NO: 5532328 - DNA, 25 bp, Homo sapien
ttagtgccccaaatagcagcgctta

SEQ ID NO: 5532329 - DNA, 25 bp, Homo sapien
agatcccggctgcccgacttcattc

SEQ ID NO: 5532330 - DNA, 25 bp, Homo sapien
tccctccacgtctcttggcagagac

SEQ ID NO: 5532331 - DNA, 25 bp, Homo sapien
agcgatgtggaagtcgttcccgctg

SEQ ID NO: 5532332 - DNA, 25 bp, Homo sapien
agcccgttgcttcccccgactcttg

SEQ ID NO: 5532333 - DNA, 25 bp, Homo sapien
caaatagcagcgcttagcccgttgc

SEQ ID NO: 5532334 - DNA, 25 bp, Homo sapien
gaccacgtcggcaaagcctgtggtc

SEQ ID NO: 5532335 - DNA, 25 bp, Homo sapien
atttctcagatcccggctgcccgac

SEQ ID NO: 5532336 - DNA, 25 bp, Homo sapien
tctcacactgcgttctctgcgctcc

SEQ ID NO: 5532337 - DNA, 25 bp, Homo sapien
ggctggaaagagacttcttggttac

SEQ ID NO: 5532338 - DNA, 25 bp, Homo sapien
atcatccaagtacattaagatacat

SEQ ID NO: 5532339 - DNA, 25 bp, Homo sapien
atgcagatgatagattcttggaatc

SEQ ID NO: 5532340 - DNA, 25 bp, Homo sapien
gtcaaagtatgtttaggtgtatgcc

SEQ ID NO: 5532341 - DNA, 25 bp, Homo sapien
tttcttcagatggggatatgcagat

SEQ ID NO: 5532342 - DNA, 25 bp, Homo sapien
caaggcttattgttcactcatcatc

SEQ ID NO: 5532343 - DNA, 25 bp, Homo sapien
tgagattcaggaattctgtcaaagt

SEQ ID NO: 5532344 - DNA, 25 bp, Homo sapien
tcactctggcaggtgaatgatgctt

SEQ ID NO: 5532345 - DNA, 25 bp, Homo sapien
gatatgattccactgtctgatacca

SEQ ID NO: 5532346 - DNA, 25 bp, Homo sapien
ttaacaggtatagatatgattccac

SEQ ID NO: 5532347 - DNA, 25 bp, Homo sapien
gtctgataccagtccaattcttttc

SEQ ID NO: 5532348 - DNA, 25 bp, Homo sapien
tatgaaaatgttggcattaagcctt

SEQ ID NO: 5532349 - DNA, 25 bp, Homo sapien
cttacggactttatggtaggttaca

SEQ ID NO: 5532350 - DNA, 25 bp, Homo sapien
tcccaggaatgctgtcggaactgga

SEQ ID NO: 5532351 - DNA, 25 bp, Homo sapien
tttatgcaaaggaagctatgccatc

SEQ ID NO: 5532352 - DNA, 25 bp, Homo sapien
ctatgaagattccgtacaaactcct

SEQ ID NO: 5532353 - DNA, 25 bp, Homo sapien
aacttggtacagtatgtagtgcctt

SEQ ID NO: 5532354 - DNA, 25 bp, Homo sapien
aatttgtagtgtgaaaaaggcaaac

SEQ ID NO: 5532355 - DNA, 25 bp, Homo sapien
tattgaagataaacttggtacagta

SEQ ID NO: 5532356 - DNA, 25 bp, Homo sapien
tgtcggaactggaccttgatgaagg

SEQ ID NO: 5532357 - DNA, 25 bp, Homo sapien
aatgcaactttgggtgattacttga

SEQ ID NO: 5532358 - DNA, 25 bp, Homo sapien
aaagtaagtaaggcacaaatattga

SEQ ID NO: 5532359 - DNA, 25 bp, Homo sapien
acagagtgtggattccattgtcctc

SEQ ID NO: 5532360 - DNA, 25 bp, Homo sapien
actcagctctcaacaatcccacatc

SEQ ID NO: 5532361 - DNA, 25 bp, Homo sapien
ctctgccttaagacctccgtggaga

SEQ ID NO: 5532362 - DNA, 25 bp, Homo sapien
cgctaattagaaaagtgttcgacac

SEQ ID NO: 5532363 - DNA, 25 bp, Homo sapien
agaggtcataggacactcagctctc

SEQ ID NO: 5532364 - DNA, 25 bp, Homo sapien
aaagtgttcgacacagagtgtggat

SEQ ID NO: 5532365 - DNA, 25 bp, Homo sapien
actggatttgtaacctgaggctgcc

SEQ ID NO: 5532366 - DNA, 25 bp, Homo sapien
ttgtcctcagaaaacccgtcagaag

SEQ ID NO: 5532367 - DNA, 25 bp, Homo sapien
agcaggtagggaaatgatgttcctg

SEQ ID NO: 5532368 - DNA, 25 bp, Homo sapien
taaatgaatatgacttgggttcttc

SEQ ID NO: 5532369 - DNA, 25 bp, Homo sapien
gatgttcctggaagtgcagtcactt

SEQ ID NO: 5532370 - DNA, 25 bp, Homo sapien
caggacaagtatggttctcaaagtg

SEQ ID NO: 5532371 - DNA, 25 bp, Homo sapien
gtgtgatccagggaccaaccctctg

SEQ ID NO: 5532372 - DNA, 25 bp, Homo sapien
tgaactccaatacttcaggacaagt

SEQ ID NO: 5532373 - DNA, 25 bp, Homo sapien
ctgctacacagatgttatttgtccc

SEQ ID NO: 5532374 - DNA, 25 bp, Homo sapien
gcactgtacataatgccctgggaag

SEQ ID NO: 5532375 - DNA, 25 bp, Homo sapien
ggtgacattattgctcccatggcta

SEQ ID NO: 5532376 - DNA, 25 bp, Homo sapien
tccagggaccaaccctctgaggaag

SEQ ID NO: 5532377 - DNA, 25 bp, Homo sapien
cttcaggacaagtatggttctcaaa

SEQ ID NO: 5532378 - DNA, 25 bp, Homo sapien
tgggaagaagttagacatgaactcc

SEQ ID NO: 5532379 - DNA, 25 bp, Homo sapien
ataaaaagcactgtacataatgccc

SEQ ID NO: 5532380 - DNA, 25 bp, Homo sapien
cataatactgctacacagatgttat

SEQ ID NO: 5532381 - DNA, 25 bp, Homo sapien
caaatggcccacaacactgagttag

SEQ ID NO: 5532382 - DNA, 25 bp, Homo sapien
ccagcaccagtcctctggggcacat

SEQ ID NO: 5532383 - DNA, 25 bp, Homo sapien
tgtgccttgctagtcaggggccaaa

SEQ ID NO: 5532384 - DNA, 25 bp, Homo sapien
gggcacatggtttgagctctggact

SEQ ID NO: 5532385 - DNA, 25 bp, Homo sapien
ctggctctgctccctagggtgattc

SEQ ID NO: 5532386 - DNA, 25 bp, Homo sapien
accagctcacattcccgaccccatc

SEQ ID NO: 5532387 - DNA, 25 bp, Homo sapien
cccatcagcttggaagggtgctaga

SEQ ID NO: 5532388 - DNA, 25 bp, Homo sapien
ggtgattctaacagcccagggtcct

SEQ ID NO: 5532389 - DNA, 25 bp, Homo sapien
tgtaaagaaacagtacagccccttc

SEQ ID NO: 5532390 - DNA, 25 bp, Homo sapien
ctagtccccgtgagatgtaaagaaa

SEQ ID NO: 5532391 - DNA, 25 bp, Homo sapien
gagttagtggacaccggctaaatga

SEQ ID NO: 5532392 - DNA, 25 bp, Homo sapien
agaagtattaaaagggagtcagcct

SEQ ID NO: 5532393 - DNA, 25 bp, Homo sapien
agaagagactgttatggcaaacatt

SEQ ID NO: 5532394 - DNA, 25 bp, Homo sapien
atgggataaattggacagaatcagc

SEQ ID NO: 5532395 - DNA, 25 bp, Homo sapien
ccagttcggcagtgtaacctcctct

SEQ ID NO: 5532396 - DNA, 25 bp, Homo sapien
tagtatgaccattgggtgccctctc

SEQ ID NO: 5532397 - DNA, 25 bp, Homo sapien
atccagggtgccaatgtcccagttc

SEQ ID NO: 5532398 - DNA, 25 bp, Homo sapien
ctagggaatgctctctcttggctgc

SEQ ID NO: 5532399 - DNA, 25 bp, Homo sapien
tcttatgtaatagggtagtggtggt

SEQ ID NO: 5532400 - DNA, 25 bp, Homo sapien
gggagaagaccagatcttcagggaa

SEQ ID NO: 5532401 - DNA, 25 bp, Homo sapien
tggctctagcccaaggacccttcca

SEQ ID NO: 5532402 - DNA, 25 bp, Homo sapien
ccttgtatgggaaagcatcacattc

SEQ ID NO: 5532403 - DNA, 25 bp, Homo sapien
ttcctggtgtcagggagattaggaa

SEQ ID NO: 5532404 - DNA, 25 bp, Homo sapien
tgccaaaaacctcaatgaatgctta

SEQ ID NO: 5532405 - DNA, 25 bp, Homo sapien
cagaagacttctgtgctatggagac

SEQ ID NO: 5532406 - DNA, 25 bp, Homo sapien
cctttgacagtccctatgagctggg

SEQ ID NO: 5532407 - DNA, 25 bp, Homo sapien
ataacatgtttggctcagactcccc

SEQ ID NO: 5532408 - DNA, 25 bp, Homo sapien
ttaggttaagaaactagaacagatc

SEQ ID NO: 5532409 - DNA, 25 bp, Homo sapien
tgagccctagattattcctggtgtc

SEQ ID NO: 5532410 - DNA, 25 bp, Homo sapien
gacttggaaagtgacataacatgtt

SEQ ID NO: 5532411 - DNA, 25 bp, Homo sapien
ttctgtgctatggagacttggaaag

SEQ ID NO: 5532412 - DNA, 25 bp, Homo sapien
tcagggagattaggaaacaccttca

SEQ ID NO: 5532413 - DNA, 25 bp, Homo sapien
agactccccgcctataaaatggaac

SEQ ID NO: 5532414 - DNA, 25 bp, Homo sapien
agcctgcagctatcaggaaagaccc

SEQ ID NO: 5532415 - DNA, 25 bp, Homo sapien
cttaaaaagaccaggacatgaaagg

SEQ ID NO: 5532416 - DNA, 25 bp, Homo sapien
tagggaattaagacaatgcagccaa

SEQ ID NO: 5532417 - DNA, 25 bp, Homo sapien
ttctgcagtgtgaaagtaagcaagg

SEQ ID NO: 5532418 - DNA, 25 bp, Homo sapien
tgggagataccccacaggacctgta

SEQ ID NO: 5532419 - DNA, 25 bp, Homo sapien
actgctgcaaaaataatgatgaata

SEQ ID NO: 5532420 - DNA, 25 bp, Homo sapien
ctggaaggcatctgaacgtgtccta

SEQ ID NO: 5532421 - DNA, 25 bp, Homo sapien
cgtgtcctatcctgaggctgcaatc

SEQ ID NO: 5532422 - DNA, 25 bp, Homo sapien
ttgatgcagtttcgttagggaatta

SEQ ID NO: 5532423 - DNA, 25 bp, Homo sapien
taagcatagtgtgtgtagtctggaa

SEQ ID NO: 5532424 - DNA, 25 bp, Homo sapien
aacagctgatcagaggctaaattac

SEQ ID NO: 5532425 - DNA, 25 bp, Homo sapien
ctttggtggcacgtgtctgacgacg

SEQ ID NO: 5532426 - DNA, 25 bp, Homo sapien
cgtcgtcagacacgtgccaccaaag

SEQ ID NO: 5532427 - DNA, 25 bp, Homo sapien
ttaaaaatattgagaactgtactac

SEQ ID NO: 5532428 - DNA, 25 bp, Homo sapien
agctatcagtctcctatacgcatta

SEQ ID NO: 5532429 - DNA, 25 bp, Homo sapien
aagaaatcaaagtacaagtgagaat

SEQ ID NO: 5532430 - DNA, 25 bp, Homo sapien
gagaactgtactactgtgaatatcc

SEQ ID NO: 5532431 - DNA, 25 bp, Homo sapien
tacttacttagagacacatacattc

SEQ ID NO: 5532432 - DNA, 25 bp, Homo sapien
tctcagactgttttccctaagaaac

SEQ ID NO: 5532433 - DNA, 25 bp, Homo sapien
gtttctaaagaaacaatctactatc

SEQ ID NO: 5532434 - DNA, 25 bp, Homo sapien
ttcctcaaattgcctgcccaagaaa

SEQ ID NO: 5532435 - DNA, 25 bp, Homo sapien
gaatgcagagcttctgcccagtttc

SEQ ID NO: 5532436 - DNA, 25 bp, Homo sapien
tcaaagtacaagtgagaatgcagag

SEQ ID NO: 5532437 - DNA, 25 bp, Homo sapien
acaatttctgatagataagaggttt

SEQ ID NO: 5532438 - DNA, 25 bp, Homo sapien
ggtcttccgtccgtagaggcttact

SEQ ID NO: 5532439 - DNA, 25 bp, Homo sapien
agtaagcctctacggacggaagacc

SEQ ID NO: 5532440 - DNA, 25 bp, Homo sapien
gttcctcagtctagcagtgctggct

SEQ ID NO: 5532441 - DNA, 25 bp, Homo sapien
gagctgtcgaagcaaatggttgcat

SEQ ID NO: 5532442 - DNA, 25 bp, Homo sapien
tggcagcttgtttccaagggcaggc

SEQ ID NO: 5532443 - DNA, 25 bp, Homo sapien
gcagggaatcacggtattaacaata

SEQ ID NO: 5532444 - DNA, 25 bp, Homo sapien
aacttctgacagagttgggaaagag

SEQ ID NO: 5532445 - DNA, 25 bp, Homo sapien
caccaagaaagcagaagatatttac

SEQ ID NO: 5532446 - DNA, 25 bp, Homo sapien
aatgaggcaggcacattcacactta

SEQ ID NO: 5532447 - DNA, 25 bp, Homo sapien
tccaaagagcaagagaacttctgac

SEQ ID NO: 5532448 - DNA, 25 bp, Homo sapien
gtgctggcttctcttgggtctctgt

SEQ ID NO: 5532449 - DNA, 25 bp, Homo sapien
acaagtacatttgaggagctgtcga

SEQ ID NO: 5532450 - DNA, 25 bp, Homo sapien
gtctgatttgttaaggccctcggct

SEQ ID NO: 5532451 - DNA, 25 bp, Homo sapien
caatgtgtgctggattattactgac

SEQ ID NO: 5532452 - DNA, 25 bp, Homo sapien
tgtccatgtttgaaatccagatagc

SEQ ID NO: 5532453 - DNA, 25 bp, Homo sapien
tgtagattagaattgatggtccaac

SEQ ID NO: 5532454 - DNA, 25 bp, Homo sapien
gctggtgaagccttagactactatg

SEQ ID NO: 5532455 - DNA, 25 bp, Homo sapien
cctaaagtctagatacagtgggcca

SEQ ID NO: 5532456 - DNA, 25 bp, Homo sapien
gaaggtatctaaggaagtgatattt

SEQ ID NO: 5532457 - DNA, 25 bp, Homo sapien
gctagatcctaggcgtcagagtgaa

SEQ ID NO: 5532458 - DNA, 25 bp, Homo sapien
tggacatctgatactgcagaccagc

SEQ ID NO: 5532459 - DNA, 25 bp, Homo sapien
cagagaaggaaagcataattattaa

SEQ ID NO: 5532460 - DNA, 25 bp, Homo sapien
gcagaccagccttggctagatccta

SEQ ID NO: 5532461 - DNA, 25 bp, Homo sapien
taattgtaaaagccagatatatcac

SEQ ID NO: 5532462 - DNA, 25 bp, Homo sapien
tagaaaagtgacgctgaacaattac

SEQ ID NO: 5532463 - DNA, 25 bp, Homo sapien
gcacttctaagtggagggaagcaaa

SEQ ID NO: 5532464 - DNA, 25 bp, Homo sapien
tatgaagaattcctggcaaattacc

SEQ ID NO: 5532465 - DNA, 25 bp, Homo sapien
ctcaggagtcaaatgtgccttggcc

SEQ ID NO: 5532466 - DNA, 25 bp, Homo sapien
aagacttctgttaactaggcagtgc

SEQ ID NO: 5532467 - DNA, 25 bp, Homo sapien
agctttaacaagtaccccagaggga

SEQ ID NO: 5532468 - DNA, 25 bp, Homo sapien
gaagctgctgtaaagtgtgcagcac

SEQ ID NO: 5532469 - DNA, 25 bp, Homo sapien
cccagagggaacattcgtgctttaa

SEQ ID NO: 5532470 - DNA, 25 bp, Homo sapien
cataatactgtgaagagagcaacac

SEQ ID NO: 5532471 - DNA, 25 bp, Homo sapien
acaaagcttaatccagcccagcata

SEQ ID NO: 5532472 - DNA, 25 bp, Homo sapien
actgtgaagagagcaacacgttttt

SEQ ID NO: 5532473 - DNA, 25 bp, Homo sapien
tctaactacatacgcaaaaacttcc

SEQ ID NO: 5532474 - DNA, 25 bp, Homo sapien
ttacagaggttcggactaacatttc

SEQ ID NO: 5532475 - DNA, 25 bp, Homo sapien
catgtgagagtcttaccactaagcc

SEQ ID NO: 5532476 - DNA, 25 bp, Homo sapien
acccctgccagtgatctggtgatga

SEQ ID NO: 5532477 - DNA, 25 bp, Homo sapien
gtgttttggaagtatgcatgcaggc

SEQ ID NO: 5532478 - DNA, 25 bp, Homo sapien
aagatgtgtcatgaaaacagcccct

SEQ ID NO: 5532479 - DNA, 25 bp, Homo sapien
tgtgtatagcatgtgtattaatgtc

SEQ ID NO: 5532480 - DNA, 25 bp, Homo sapien
tttaaagagccgttgatgcctccag

SEQ ID NO: 5532481 - DNA, 25 bp, Homo sapien
gattagcagtcaatggcaaagaaaa

SEQ ID NO: 5532482 - DNA, 25 bp, Homo sapien
ctgtactgttgggaagttttggaaa

SEQ ID NO: 5532483 - DNA, 25 bp, Homo sapien
gtatgcatgcaggcctataaatgaa

SEQ ID NO: 5532484 - DNA, 25 bp, Homo sapien
tggtccacaggtccactgcagtgca

SEQ ID NO: 5532485 - DNA, 25 bp, Homo sapien
aggacagcctgtgtgatatgcaaaa

SEQ ID NO: 5532486 - DNA, 25 bp, Homo sapien
gcatgcacaccgcacgtgacaatcc

SEQ ID NO: 5532487 - DNA, 25 bp, Homo sapien
gagaagtggctcccaaactcccctg

SEQ ID NO: 5532488 - DNA, 25 bp, Homo sapien
aaggacacagatagagcttgtgctc

SEQ ID NO: 5532489 - DNA, 25 bp, Homo sapien
agggagactccttgcagtgagcttt

SEQ ID NO: 5532490 - DNA, 25 bp, Homo sapien
gctggtgtccagaatgagccagttc

SEQ ID NO: 5532491 - DNA, 25 bp, Homo sapien
atacttacgggtagacagaaagatt

SEQ ID NO: 5532492 - DNA, 25 bp, Homo sapien
gtgctctaggctgcccccctgttcc

SEQ ID NO: 5532493 - DNA, 25 bp, Homo sapien
ttggccattgaagaccctgagagga

SEQ ID NO: 5532494 - DNA, 25 bp, Homo sapien
cctggaactcaggaaaggatactta

SEQ ID NO: 5532495 - DNA, 25 bp, Homo sapien
caggcaggaaatttcaaggatcgtt

SEQ ID NO: 5532496 - DNA, 25 bp, Homo sapien
tttcttacgcctgtgctggctggct

SEQ ID NO: 5532497 - DNA, 25 bp, Homo sapien
taatatggaggttgtaatcactgtc

SEQ ID NO: 5532498 - DNA, 25 bp, Homo sapien
tacttgggtaaaatgctatgtcacc

SEQ ID NO: 5532499 - DNA, 25 bp, Homo sapien
tctgccactgcctcaacccataagc

SEQ ID NO: 5532500 - DNA, 25 bp, Homo sapien
tcaggctcgtgaaacttctcatgct

SEQ ID NO: 5532501 - DNA, 25 bp, Homo sapien
aagagcagtgtaaaccagttgaatc

SEQ ID NO: 5532502 - DNA, 25 bp, Homo sapien
ttgaatccaactgcatcacagtcac

SEQ ID NO: 5532503 - DNA, 25 bp, Homo sapien
aggatcgttaagtttaagatttgcc

SEQ ID NO: 5532504 - DNA, 25 bp, Homo sapien
tgtctcaatggtttcaggctcgtga

SEQ ID NO: 5532505 - DNA, 25 bp, Homo sapien
aagcatgctacagtgcagtccaacc

SEQ ID NO: 5532506 - DNA, 25 bp, Homo sapien
gtctcctaatcatgccctggggccc

SEQ ID NO: 5532507 - DNA, 25 bp, Homo sapien
gccgacagaaagctgcttcccaagc

SEQ ID NO: 5532508 - DNA, 25 bp, Homo sapien
tatccagcaatagtgagatgaaagc

SEQ ID NO: 5532509 - DNA, 25 bp, Homo sapien
tagccctctatggagaggtggtctc

SEQ ID NO: 5532510 - DNA, 25 bp, Homo sapien
tcatcagaggcatcttaagaggcag

SEQ ID NO: 5532511 - DNA, 25 bp, Homo sapien
tcttcatcataggaacgaggaatgt

SEQ ID NO: 5532512 - DNA, 25 bp, Homo sapien
ttccagaacagcctagaggcagcaa

SEQ ID NO: 5532513 - DNA, 25 bp, Homo sapien
gaaggagatcctggtagccctctat

SEQ ID NO: 5532514 - DNA, 25 bp, Homo sapien
cccattctgaaaggactggggtctc

SEQ ID NO: 5532515 - DNA, 25 bp, Homo sapien
aagggagccattctgaaccatgagt

SEQ ID NO: 5532516 - DNA, 25 bp, Homo sapien
tggagtaccaagaaatgtggtggtt

SEQ ID NO: 5532517 - DNA, 25 bp, Homo sapien
gcctgcctcataatctgccctggac

SEQ ID NO: 5532518 - DNA, 25 bp, Homo sapien
tgcttccgaaatccaaggggaacaa

SEQ ID NO: 5532519 - DNA, 25 bp, Homo sapien
ttctacacatattgggtactacgct

SEQ ID NO: 5532520 - DNA, 25 bp, Homo sapien
aggggaacaagaagtacccatctct

SEQ ID NO: 5532521 - DNA, 25 bp, Homo sapien
tgggtactacgctttggcaaaaata

SEQ ID NO: 5532522 - DNA, 25 bp, Homo sapien
aagactctagaagtacaatcgtatc

SEQ ID NO: 5532523 - DNA, 25 bp, Homo sapien
cgtagggtcccattgctttgcttcc

SEQ ID NO: 5532524 - DNA, 25 bp, Homo sapien
ggacttgtcattcccgacaggacac

SEQ ID NO: 5532525 - DNA, 25 bp, Homo sapien
gacaggacacctcaatggacactgc

SEQ ID NO: 5532526 - DNA, 25 bp, Homo sapien
cactgccccaccccattaagactct

SEQ ID NO: 5532527 - DNA, 25 bp, Homo sapien
attaagactctgaagcgtagggtcc

SEQ ID NO: 5532528 - DNA, 25 bp, Homo sapien
aacacaatagatttccattagaacc

SEQ ID NO: 5532529 - DNA, 25 bp, Homo sapien
aatagactactgacacatagcactc

SEQ ID NO: 5532530 - DNA, 25 bp, Homo sapien
gggactaagatgcatacctctatgc

SEQ ID NO: 5532531 - DNA, 25 bp, Homo sapien
ttgacatgttggacttcaccatgca

SEQ ID NO: 5532532 - DNA, 25 bp, Homo sapien
ttggctcacagcaaattctgtctcc

SEQ ID NO: 5532533 - DNA, 25 bp, Homo sapien
cttcaccatgcaagtaaattaatgc

SEQ ID NO: 5532534 - DNA, 25 bp, Homo sapien
cttatgaaccttaaaacacaaagta

SEQ ID NO: 5532535 - DNA, 25 bp, Homo sapien
ttctttggatgaactctgtaaatag

SEQ ID NO: 5532536 - DNA, 25 bp, Homo sapien
tagcactcaaaaagtcttatgaacc

SEQ ID NO: 5532537 - DNA, 25 bp, Homo sapien
gacatagggacaatacagctcatca

SEQ ID NO: 5532538 - DNA, 25 bp, Homo sapien
aactctgtaaatagactactgacac

SEQ ID NO: 5532539 - DNA, 25 bp, Homo sapien
aactaacagtggtttaacaggcttc

SEQ ID NO: 5532540 - DNA, 25 bp, Homo sapien
atagcacccctggacatgaagtaaa

SEQ ID NO: 5532541 - DNA, 25 bp, Homo sapien
aacaagggtcttctcaacggtcact

SEQ ID NO: 5532542 - DNA, 25 bp, Homo sapien
agtagtaaaactctggcacgtgtac

SEQ ID NO: 5532543 - DNA, 25 bp, Homo sapien
tgaagtaaatgaaaggaatacaggc

SEQ ID NO: 5532544 - DNA, 25 bp, Homo sapien
gcacgtgtacagcagccaaattgag

SEQ ID NO: 5532545 - DNA, 25 bp, Homo sapien
acaggcacttaacaatgaaaggttg

SEQ ID NO: 5532546 - DNA, 25 bp, Homo sapien
agatgtaggcaaaagcttcagtaat

SEQ ID NO: 5532547 - DNA, 25 bp, Homo sapien
aaagcaagtttgatatgacaatggc

SEQ ID NO: 5532548 - DNA, 25 bp, Homo sapien
aaggaattgaagctacaaaggaaat

SEQ ID NO: 5532549 - DNA, 25 bp, Homo sapien
ataaaagaccaagatgtaggcaaaa

SEQ ID NO: 5532550 - DNA, 25 bp, Homo sapien
ccggacagatgtttgccggaacggc

SEQ ID NO: 5532551 - DNA, 25 bp, Homo sapien
gccgttccggcaaacatctgtccgg

SEQ ID NO: 5532552 - DNA, 25 bp, Homo sapien
ccaaggttttgaactctttaagaca

SEQ ID NO: 5532553 - DNA, 25 bp, Homo sapien
ttggatcctaagattgggaggctta

SEQ ID NO: 5532554 - DNA, 25 bp, Homo sapien
ctttaagacaaaattccaatgttta

SEQ ID NO: 5532555 - DNA, 25 bp, Homo sapien
tagctgcataggatacaagattgaa

SEQ ID NO: 5532556 - DNA, 25 bp, Homo sapien
tacaagattgaatgagaagtctctg

SEQ ID NO: 5532557 - DNA, 25 bp, Homo sapien
tctactactaaatcccaaggggagc

SEQ ID NO: 5532558 - DNA, 25 bp, Homo sapien
ctactaaatcccaaggggagcccaa

SEQ ID NO: 5532559 - DNA, 25 bp, Homo sapien
atgcatcagtaacctcagtttacca

SEQ ID NO: 5532560 - DNA, 25 bp, Homo sapien
ttctactgcacaattggatcctaag

SEQ ID NO: 5532561 - DNA, 25 bp, Homo sapien
gagaagtctctgaattctactgcac

SEQ ID NO: 5532562 - DNA, 25 bp, Homo sapien
tttacttaaatgtgatgatgcatca

SEQ ID NO: 5532563 - DNA, 25 bp, Homo sapien
gagtttaaaacatgctgagtctgcc

SEQ ID NO: 5532564 - DNA, 25 bp, Homo sapien
tagctgacctaatactgaaggactt

SEQ ID NO: 5532565 - DNA, 25 bp, Homo sapien
ggaatgagaaaaataggcacttaga

SEQ ID NO: 5532566 - DNA, 25 bp, Homo sapien
atgtactagaagacaagaatgttgt

SEQ ID NO: 5532567 - DNA, 25 bp, Homo sapien
acaggatgagtatgatattagtgat

SEQ ID NO: 5532568 - DNA, 25 bp, Homo sapien
gttatgtaggattatgcagagtgaa

SEQ ID NO: 5532569 - DNA, 25 bp, Homo sapien
tgaataacagtgtagggttcacttc

SEQ ID NO: 5532570 - DNA, 25 bp, Homo sapien
ctgccagtaacaacagaactgtgtt

SEQ ID NO: 5532571 - DNA, 25 bp, Homo sapien
tattagtaatacagtgtgaccacaa

SEQ ID NO: 5532572 - DNA, 25 bp, Homo sapien
catcataaaagtaggctgacttctc

SEQ ID NO: 5532573 - DNA, 25 bp, Homo sapien
ttatgcagagtgaaggtgttctata

SEQ ID NO: 5532574 - DNA, 25 bp, Homo sapien
ctgtgcagtaacagagaatactgat

SEQ ID NO: 5532575 - DNA, 25 bp, Homo sapien
taaaataaactgaggcgctacatcc

SEQ ID NO: 5532576 - DNA, 25 bp, Homo sapien
gtggtaccaaggatcgcagttccaa

SEQ ID NO: 5532577 - DNA, 25 bp, Homo sapien
cgcagatctgataacacatattagc

SEQ ID NO: 5532578 - DNA, 25 bp, Homo sapien
ataagtgctcaggctgttatgctaa

SEQ ID NO: 5532579 - DNA, 25 bp, Homo sapien
gaaatagttttcccgcagatctgat

SEQ ID NO: 5532580 - DNA, 25 bp, Homo sapien
atgaaacgagagacataagtgctca

SEQ ID NO: 5532581 - DNA, 25 bp, Homo sapien
tctgtgactgtggtaccaaggatcg

SEQ ID NO: 5532582 - DNA, 25 bp, Homo sapien
taccagaatagtatgattcccatga

SEQ ID NO: 5532583 - DNA, 25 bp, Homo sapien
tatatgatgataggcttttctttgt

SEQ ID NO: 5532584 - DNA, 25 bp, Homo sapien
tgaggcgctacatcctcctgcagga

SEQ ID NO: 5532585 - DNA, 25 bp, Homo sapien
cagccatggcccctccactaacttt

SEQ ID NO: 5532586 - DNA, 25 bp, Homo sapien
cttctgcttgcagggtttgactctc

SEQ ID NO: 5532587 - DNA, 25 bp, Homo sapien
agccgatgaccatggcaggtgtaaa

SEQ ID NO: 5532588 - DNA, 25 bp, Homo sapien
aataagaccttgctccaaacgtggc

SEQ ID NO: 5532589 - DNA, 25 bp, Homo sapien
atggcaggtgtaaataagaccttgc

SEQ ID NO: 5532590 - DNA, 25 bp, Homo sapien
cttggaagcaagttactattacaga

SEQ ID NO: 5532591 - DNA, 25 bp, Homo sapien
tactattacagaacattaggctgca

SEQ ID NO: 5532592 - DNA, 25 bp, Homo sapien
ttgaaattatctccacggtgacttt

SEQ ID NO: 5532593 - DNA, 25 bp, Homo sapien
catcagtgaaatagtccaatgtatc

SEQ ID NO: 5532594 - DNA, 25 bp, Homo sapien
agtatagtttgacctatcagagacc

SEQ ID NO: 5532595 - DNA, 25 bp, Homo sapien
tccacgcattccaaaatagtatagt

SEQ ID NO: 5532596 - DNA, 25 bp, Homo sapien
tgttgaatttgcatggccctggcca

SEQ ID NO: 5532597 - DNA, 25 bp, Homo sapien
tccaggacaactgtgccaggaatta

SEQ ID NO: 5532598 - DNA, 25 bp, Homo sapien
tctcaaagtgccccggtgcttccaa

SEQ ID NO: 5532599 - DNA, 25 bp, Homo sapien
atttcagacatgacgagcagtgctt

SEQ ID NO: 5532600 - DNA, 25 bp, Homo sapien
aagaacaagcactgggtaatgccaa

SEQ ID NO: 5532601 - DNA, 25 bp, Homo sapien
tctagtggttcccaggcaagagaaa

SEQ ID NO: 5532602 - DNA, 25 bp, Homo sapien
gggtaccctgtcacaggctggccct

SEQ ID NO: 5532603 - DNA, 25 bp, Homo sapien
cacaagttaaaactggcaggagctg

SEQ ID NO: 5532604 - DNA, 25 bp, Homo sapien
aagggcagaaacaagatgttgaatt

SEQ ID NO: 5532605 - DNA, 25 bp, Homo sapien
gcaggaaacaccagcctagtgggtg

SEQ ID NO: 5532606 - DNA, 25 bp, Homo sapien
cctggacacaccctagagcacctta

SEQ ID NO: 5532607 - DNA, 25 bp, Homo sapien
tggaagaaaggatttgcagagttca

SEQ ID NO: 5532608 - DNA, 25 bp, Homo sapien
tgaacaaaaacagcacgaatcctct

SEQ ID NO: 5532609 - DNA, 25 bp, Homo sapien
gttttggagaaagctgatcacactc

SEQ ID NO: 5532610 - DNA, 25 bp, Homo sapien
gatcacactcacggtgacaggccat

SEQ ID NO: 5532611 - DNA, 25 bp, Homo sapien
gggtatgacctgctggtagaaatag

SEQ ID NO: 5532612 - DNA, 25 bp, Homo sapien
gtaccaccccttagctcctgcgacc

SEQ ID NO: 5532613 - DNA, 25 bp, Homo sapien
gatagtgtgacatttgggtatgacc

SEQ ID NO: 5532614 - DNA, 25 bp, Homo sapien
gcatgattccctggaagtaagtcac

SEQ ID NO: 5532615 - DNA, 25 bp, Homo sapien
cctgcgacccatgtggttttggaga

SEQ ID NO: 5532616 - DNA, 25 bp, Homo sapien
caggccatggttggaagtaacatgt

SEQ ID NO: 5532617 - DNA, 25 bp, Homo sapien
catggttaacaatagatagtgtgac

SEQ ID NO: 5532618 - DNA, 25 bp, Homo sapien
acccaaatactagtaggaaattaca

SEQ ID NO: 5532619 - DNA, 25 bp, Homo sapien
cctccgccctgccccatgagtagtg

SEQ ID NO: 5532620 - DNA, 25 bp, Homo sapien
cggaccacagggatctgtgcatccg

SEQ ID NO: 5532621 - DNA, 25 bp, Homo sapien
aatatctcagaaaggatgtattgtt

SEQ ID NO: 5532622 - DNA, 25 bp, Homo sapien
atgagtaagcagacaatcttgcacc

SEQ ID NO: 5532623 - DNA, 25 bp, Homo sapien
agggatctgtgcatccgtgagagtt

SEQ ID NO: 5532624 - DNA, 25 bp, Homo sapien
ccccatgagtagtgttaagtgagtc

SEQ ID NO: 5532625 - DNA, 25 bp, Homo sapien
gatggtggcttgcccataagaagct

SEQ ID NO: 5532626 - DNA, 25 bp, Homo sapien
tcacaatgacatgttcccctgcccc

SEQ ID NO: 5532627 - DNA, 25 bp, Homo sapien
ggcccttcctgggtccgcagaacca

SEQ ID NO: 5532628 - DNA, 25 bp, Homo sapien
cattacgacgtgtgtgtgtgtcggc

SEQ ID NO: 5532629 - DNA, 25 bp, Homo sapien
acacagaagtcgtttcgcctgacca

SEQ ID NO: 5532630 - DNA, 25 bp, Homo sapien
tggtcaggcgaaacgacttctgtgt

SEQ ID NO: 5532631 - DNA, 25 bp, Homo sapien
tgtgctgtactttgagactagtctg

SEQ ID NO: 5532632 - DNA, 25 bp, Homo sapien
aggacctgggtctcactaaaataac

SEQ ID NO: 5532633 - DNA, 25 bp, Homo sapien
acagctgaacggcaaaatagttttc

SEQ ID NO: 5532634 - DNA, 25 bp, Homo sapien
cggaggggccttttgcacatttctt

SEQ ID NO: 5532635 - DNA, 25 bp, Homo sapien
tccaattccaggacacagaaacaca

SEQ ID NO: 5532636 - DNA, 25 bp, Homo sapien
catttacaagatatgtgggccacac

SEQ ID NO: 5532637 - DNA, 25 bp, Homo sapien
ggagacgtaagtctaatggcagcca

SEQ ID NO: 5532638 - DNA, 25 bp, Homo sapien
cacacacaacatacagagatctgaa

SEQ ID NO: 5532639 - DNA, 25 bp, Homo sapien
ggacagaacgagtcccacgcatcca

SEQ ID NO: 5532640 - DNA, 25 bp, Homo sapien
taaataggaatcagaaggtctagga

SEQ ID NO: 5532641 - DNA, 25 bp, Homo sapien
tacagagatctgaataggcacagta

SEQ ID NO: 5532642 - DNA, 25 bp, Homo sapien
gctactggacagagcgtatatgtgt

SEQ ID NO: 5532643 - DNA, 25 bp, Homo sapien
ctctccgacctaagccaactgcaac

SEQ ID NO: 5532644 - DNA, 25 bp, Homo sapien
atgggaaaccgagaaatccgtaata

SEQ ID NO: 5532645 - DNA, 25 bp, Homo sapien
cacccaggcaatgccgaccttggga

SEQ ID NO: 5532646 - DNA, 25 bp, Homo sapien
agcagccctgtaaaaatgggaaacc

SEQ ID NO: 5532647 - DNA, 25 bp, Homo sapien
tcaaaaaccagtgggtcttgctcgc

SEQ ID NO: 5532648 - DNA, 25 bp, Homo sapien
tttaatcgatagtgtgagccagaga

SEQ ID NO: 5532649 - DNA, 25 bp, Homo sapien
tcttgctcgctgggcaaggcaaatg

SEQ ID NO: 5532650 - DNA, 25 bp, Homo sapien
gagggggatgtcaaacacatatcat

SEQ ID NO: 5532651 - DNA, 25 bp, Homo sapien
atagcacaggtctacagcgtctaac

SEQ ID NO: 5532652 - DNA, 25 bp, Homo sapien
accttgggagcacagtatctgctac

SEQ ID NO: 5532653 - DNA, 25 bp, Homo sapien
gggaccgcacccacgcgcaccgtcg

SEQ ID NO: 5532654 - DNA, 25 bp, Homo sapien
cgacggtgcgcgtgggtgcggtccc

SEQ ID NO: 5532655 - DNA, 25 bp, Homo sapien
gcacccacgcgcaccgtcgaaaacg

SEQ ID NO: 5532656 - DNA, 25 bp, Homo sapien
cgttttcgacggtgcgcgtgggtgc

SEQ ID NO: 5532657 - DNA, 25 bp, Homo sapien
ttggcccctgactagcaaggcacaa

SEQ ID NO: 5532658 - DNA, 25 bp, Homo sapien
ctcaaaccatgtgccccagaggact

SEQ ID NO: 5532659 - DNA, 25 bp, Homo sapien
ttagaatcaccctagggagcagagc

SEQ ID NO: 5532660 - DNA, 25 bp, Homo sapien
ggaccctgggctgttagaatcaccc

SEQ ID NO: 5532661 - DNA, 25 bp, Homo sapien
gggactagagccagtactgaatggc

SEQ ID NO: 5532662 - DNA, 25 bp, Homo sapien
acaaccctataatggcagaagccct

SEQ ID NO: 5532663 - DNA, 25 bp, Homo sapien
gatctgtatagacaagaaagctggc

SEQ ID NO: 5532664 - DNA, 25 bp, Homo sapien
ctttacatctcacggggactagagc

SEQ ID NO: 5532665 - DNA, 25 bp, Homo sapien
cttgatgggcctctagcacccttcc

SEQ ID NO: 5532666 - DNA, 25 bp, Homo sapien
gagccaggggacattttggcccctg

SEQ ID NO: 5532667 - DNA, 25 bp, Homo sapien
tgggaagtccagagctcaaaccatg

SEQ ID NO: 5532668 - DNA, 25 bp, Homo sapien
tccgtgccacagatctgttggtcac

SEQ ID NO: 5532669 - DNA, 25 bp, Homo sapien
acaagttggagacggtcaattttta

SEQ ID NO: 5532670 - DNA, 25 bp, Homo sapien
gccaaactcattgccatgacaactc

SEQ ID NO: 5532671 - DNA, 25 bp, Homo sapien
aatgacctttgcatcagccaaactc

SEQ ID NO: 5532672 - DNA, 25 bp, Homo sapien
aactctttgtactgtgtccgtgcca

SEQ ID NO: 5532673 - DNA, 25 bp, Homo sapien
aaagggttcactagttaatactcta

SEQ ID NO: 5532674 - DNA, 25 bp, Homo sapien
agtaaaagctcaaaaatgaatgttc

SEQ ID NO: 5532675 - DNA, 25 bp, Homo sapien
caagttcaatagtaaaagctcaaaa

SEQ ID NO: 5532676 - DNA, 25 bp, Homo sapien
gccctttgaccctgcacaatgacct

SEQ ID NO: 5532677 - DNA, 25 bp, Homo sapien
aatgaatgttctactccatgctgaa

SEQ ID NO: 5532678 - DNA, 25 bp, Homo sapien
tcacattgttaatagtaaaggggac

SEQ ID NO: 5532679 - DNA, 25 bp, Homo sapien
agccatcctgtgtgccctcttcccc

SEQ ID NO: 5532680 - DNA, 25 bp, Homo sapien
aggccactgccctaagtgaggatca

SEQ ID NO: 5532681 - DNA, 25 bp, Homo sapien
aggctgagcctcaaaatgaatataa

SEQ ID NO: 5532682 - DNA, 25 bp, Homo sapien
gggagaagcaaatgtgtacaaagaa

SEQ ID NO: 5532683 - DNA, 25 bp, Homo sapien
gtgagaaactaaataaggctgagcc

SEQ ID NO: 5532684 - DNA, 25 bp, Homo sapien
tatgacactatcctgggagaagcaa

SEQ ID NO: 5532685 - DNA, 25 bp, Homo sapien
agcatcgactccaccacagcccact

SEQ ID NO: 5532686 - DNA, 25 bp, Homo sapien
agactgacacaggtatgaaaattcc

SEQ ID NO: 5532687 - DNA, 25 bp, Homo sapien
gtgaggatcagcatcgactccacca

SEQ ID NO: 5532688 - DNA, 25 bp, Homo sapien
agacaattcagacaaggtaatgctc

SEQ ID NO: 5532689 - DNA, 25 bp, Homo sapien
ttaatccacggaagcagtttttcaa

SEQ ID NO: 5532690 - DNA, 25 bp, Homo sapien
cacgcggcccacctgtgcttctggg

SEQ ID NO: 5532691 - DNA, 25 bp, Homo sapien
agaacgtctacccaaaggtaggcag

SEQ ID NO: 5532692 - DNA, 25 bp, Homo sapien
tctggagacttccagaaggacggga

SEQ ID NO: 5532693 - DNA, 25 bp, Homo sapien
gctgcccacatgccactctggagac

SEQ ID NO: 5532694 - DNA, 25 bp, Homo sapien
ccccagagtccgatacactcccctc

SEQ ID NO: 5532695 - DNA, 25 bp, Homo sapien
tctccctgccaagattggggccaag

SEQ ID NO: 5532696 - DNA, 25 bp, Homo sapien
cggttcctggggtctcccctccaga

SEQ ID NO: 5532697 - DNA, 25 bp, Homo sapien
gagaaaagagatcacacgcttttgc

SEQ ID NO: 5532698 - DNA, 25 bp, Homo sapien
taccccctctggctgaggagaaatc

SEQ ID NO: 5532699 - DNA, 25 bp, Homo sapien
gaagggtcaagagaacgtctaccca

SEQ ID NO: 5532700 - DNA, 25 bp, Homo sapien
ttattccttggtgagaaaagagatc

SEQ ID NO: 5532701 - DNA, 25 bp, Homo sapien
cggagatcgagagcccgcctgtcgt

SEQ ID NO: 5532702 - DNA, 25 bp, Homo sapien
acgacaggcgggctctcgatctccg

SEQ ID NO: 5532703 - DNA, 25 bp, Homo sapien
caggtaggaagagcaactccctacc

SEQ ID NO: 5532704 - DNA, 25 bp, Homo sapien
tcaccacacactccagaaaaaaagg

SEQ ID NO: 5532705 - DNA, 25 bp, Homo sapien
gagcaactccctacccttgaggtgg

SEQ ID NO: 5532706 - DNA, 25 bp, Homo sapien
ggaagagcaactccctacccttgag

SEQ ID NO: 5532707 - DNA, 25 bp, Homo sapien
ttttctgtttcaccacacactccag

SEQ ID NO: 5532708 - DNA, 25 bp, Homo sapien
ctccctacccttgaggtggtgggtg

SEQ ID NO: 5532709 - DNA, 25 bp, Homo sapien
caactccctacccttgaggtggtgg

SEQ ID NO: 5532710 - DNA, 25 bp, Homo sapien
aagagcaactccctacccttgaggt

SEQ ID NO: 5532711 - DNA, 25 bp, Homo sapien
ctgtttcaccacacactccagaaaa

SEQ ID NO: 5532712 - DNA, 25 bp, Homo sapien
cacactccagaaaaaaaggaaatgg

SEQ ID NO: 5532713 - DNA, 25 bp, Homo sapien
taggaagagcaactccctacccttg

SEQ ID NO: 5532714 - DNA, 25 bp, Homo sapien
catttaagttacaagggtcactgtc

SEQ ID NO: 5532715 - DNA, 25 bp, Homo sapien
acggcatcttggaaagtaaaaatac

SEQ ID NO: 5532716 - DNA, 25 bp, Homo sapien
ttataataggacaattggtgcatgt

SEQ ID NO: 5532717 - DNA, 25 bp, Homo sapien
tgaaagaaaacatcgagtaaggaaa

SEQ ID NO: 5532718 - DNA, 25 bp, Homo sapien
tggcacacacggcatcttggaaagt

SEQ ID NO: 5532719 - DNA, 25 bp, Homo sapien
actgtcagggtgaaaatatattttg

SEQ ID NO: 5532720 - DNA, 25 bp, Homo sapien
ataggacaattggtgcatgtcacat

SEQ ID NO: 5532721 - DNA, 25 bp, Homo sapien
atttattcttggcacacacggcatc

SEQ ID NO: 5532722 - DNA, 25 bp, Homo sapien
gaatttccagtgattaagtattaac

SEQ ID NO: 5532723 - DNA, 25 bp, Homo sapien
actatccatataagaacaaatacat

SEQ ID NO: 5532724 - DNA, 25 bp, Homo sapien
aaacatcgagtaaggaaaatgaatt

SEQ ID NO: 5532725 - DNA, 25 bp, Homo sapien
gcttcgtcaggtgtaagaagtgcac

SEQ ID NO: 5532726 - DNA, 25 bp, Homo sapien
cctctgcaacaagacctcggagggc

SEQ ID NO: 5532727 - DNA, 25 bp, Homo sapien
gctgccactgcaagttccactggtg

SEQ ID NO: 5532728 - DNA, 25 bp, Homo sapien
gtgggtgctatacaatggaaagatg

SEQ ID NO: 5532729 - DNA, 25 bp, Homo sapien
gagatcgtggaccagtacatctgta

SEQ ID NO: 5532730 - DNA, 25 bp, Homo sapien
ccgactactgcctgcgcaacgagag

SEQ ID NO: 5532731 - DNA, 25 bp, Homo sapien
gccgcttcacccagcccaccccgga

SEQ ID NO: 5532732 - DNA, 25 bp, Homo sapien
gtacatctgtaaatagcccggaggg

SEQ ID NO: 5532733 - DNA, 25 bp, Homo sapien
atacaatggaaagatgaaaatggaa

SEQ ID NO: 5532734 - DNA, 25 bp, Homo sapien
aggagtggactttgctggttctctc

SEQ ID NO: 5532735 - DNA, 25 bp, Homo sapien
atggaaaggaagagcttatttaaga

SEQ ID NO: 5532736 - DNA, 25 bp, Homo sapien
catctgagcaggatagtaaaatcac

SEQ ID NO: 5532737 - DNA, 25 bp, Homo sapien
tttccaagacgtgagaagtgaaaaa

SEQ ID NO: 5532738 - DNA, 25 bp, Homo sapien
tgaatgccatctgagcaggatagta

SEQ ID NO: 5532739 - DNA, 25 bp, Homo sapien
cataaacccaaatgaggatatagtc

SEQ ID NO: 5532740 - DNA, 25 bp, Homo sapien
ggatagtaaaatcactagaatagtc

SEQ ID NO: 5532741 - DNA, 25 bp, Homo sapien
ttttgaatgccatctgagcaggata

SEQ ID NO: 5532742 - DNA, 25 bp, Homo sapien
gtagagcaaaatgatacaatgcacc

SEQ ID NO: 5532743 - DNA, 25 bp, Homo sapien
aatgatacaatgcacccaacccgat

SEQ ID NO: 5532744 - DNA, 25 bp, Homo sapien
tgcacccaacccgatatttacatta

SEQ ID NO: 5532745 - DNA, 25 bp, Homo sapien
gaggatatagtcattgtagagcaaa

SEQ ID NO: 5532746 - DNA, 25 bp, Homo sapien
atttttccaagacgtgagaagtgaa

SEQ ID NO: 5532747 - DNA, 25 bp, Homo sapien
tatcaccaagatcaagaaataaatc

SEQ ID NO: 5532748 - DNA, 25 bp, Homo sapien
ataacgaattaaatgcagaaacctt

SEQ ID NO: 5532749 - DNA, 25 bp, Homo sapien
tagataaaatataaccaccagtgct

SEQ ID NO: 5532750 - DNA, 25 bp, Homo sapien
gaatgtttacaaagtgaacacaccc

SEQ ID NO: 5532751 - DNA, 25 bp, Homo sapien
caccagtgcttgtaatcaaagagta

SEQ ID NO: 5532752 - DNA, 25 bp, Homo sapien
gaaataaatcatgacgtttggagtt

SEQ ID NO: 5532753 - DNA, 25 bp, Homo sapien
taagtcaaagcataaattcagccct

SEQ ID NO: 5532754 - DNA, 25 bp, Homo sapien
ttcagcccctttcagggcagttttc

SEQ ID NO: 5532755 - DNA, 25 bp, Homo sapien
gctgtccagcagtcctcagaacctg

SEQ ID NO: 5532756 - DNA, 25 bp, Homo sapien
agtacacttcggtcttaatggcttc

SEQ ID NO: 5532757 - DNA, 25 bp, Homo sapien
gtaatcaaagagtaagtcaaagcat

SEQ ID NO: 5532758 - DNA, 25 bp, Homo sapien
ccaacgggattcagaaactggttac

SEQ ID NO: 5532759 - DNA, 25 bp, Homo sapien
tgggtcctggtgtttcagctgagtt

SEQ ID NO: 5532760 - DNA, 25 bp, Homo sapien
aaggcggtaccttgactatggtatc

SEQ ID NO: 5532761 - DNA, 25 bp, Homo sapien
acgaggaagtgacgattgacatttt

SEQ ID NO: 5532762 - DNA, 25 bp, Homo sapien
ataaatacttcagcaaggcggtacc

SEQ ID NO: 5532763 - DNA, 25 bp, Homo sapien
gatatcatctaagacacaaggctgt

SEQ ID NO: 5532764 - DNA, 25 bp, Homo sapien
ccataaacacaaagagttattgggc

SEQ ID NO: 5532765 - DNA, 25 bp, Homo sapien
agagtggcatatggaagccattttt

SEQ ID NO: 5532766 - DNA, 25 bp, Homo sapien
aaatatagctggtagtagaggttct

SEQ ID NO: 5532767 - DNA, 25 bp, Homo sapien
aattacattgaggagcatattagct

SEQ ID NO: 5532768 - DNA, 25 bp, Homo sapien
aggggctacactaaaatcagaatta

SEQ ID NO: 5532769 - DNA, 25 bp, Homo sapien
cctcgcacttctgcaccaaggaatt

SEQ ID NO: 5532770 - DNA, 25 bp, Homo sapien
agcaatagtcaagctagcattgttc

SEQ ID NO: 5532771 - DNA, 25 bp, Homo sapien
cgccggccccctcttatgctggtgg

SEQ ID NO: 5532772 - DNA, 25 bp, Homo sapien
aacgtaacatagatgtaacaggaac

SEQ ID NO: 5532773 - DNA, 25 bp, Homo sapien
cagtggtaacaatgatcaacgtaac

SEQ ID NO: 5532774 - DNA, 25 bp, Homo sapien
tctcgaaacgactgtcagtggtaac

SEQ ID NO: 5532775 - DNA, 25 bp, Homo sapien
aaaacggtttgtacaagcaatagtc

SEQ ID NO: 5532776 - DNA, 25 bp, Homo sapien
cacgcctaccaggtctgcaaaatcc

SEQ ID NO: 5532777 - DNA, 25 bp, Homo sapien
taacaggaacatcacgacgttcgac

SEQ ID NO: 5532778 - DNA, 25 bp, Homo sapien
tacaggaaacacaagctacagtgaa

SEQ ID NO: 5532779 - DNA, 25 bp, Homo sapien
ttaggggcctaaatacagccctcgc

SEQ ID NO: 5532780 - DNA, 25 bp, Homo sapien
ccaagaagtcaggaaacaaagtgta

SEQ ID NO: 5532781 - DNA, 25 bp, Homo sapien
aagcgagtacaaaatgagatagagt

SEQ ID NO: 5532782 - DNA, 25 bp, Homo sapien
tacaacattctggggcagcctgaga

SEQ ID NO: 5532783 - DNA, 25 bp, Homo sapien
ctcagatccaagcagggttaaccag

SEQ ID NO: 5532784 - DNA, 25 bp, Homo sapien
actgcatcgggaaaaccacatagat

SEQ ID NO: 5532785 - DNA, 25 bp, Homo sapien
aggcatggaagccaaagtgtaaaca

SEQ ID NO: 5532786 - DNA, 25 bp, Homo sapien
accaaagcacaaacattccagaggc

SEQ ID NO: 5532787 - DNA, 25 bp, Homo sapien
gcttacaagaagaaacgaaagccca

SEQ ID NO: 5532788 - DNA, 25 bp, Homo sapien
gttaaccaggaaaggctgcatttct

SEQ ID NO: 5532789 - DNA, 25 bp, Homo sapien
caagaatgtagtatgtaagcgagta

SEQ ID NO: 5532790 - DNA, 25 bp, Homo sapien
cagcctgagagatgcagactataca

SEQ ID NO: 5532791 - DNA, 25 bp, Homo sapien
ttaatgactcagcctaagaaataaa

SEQ ID NO: 5532792 - DNA, 25 bp, Homo sapien
aaatggcaatttttacatggctcac

SEQ ID NO: 5532793 - DNA, 25 bp, Homo sapien
tacaatagggcttctaaagcctccc

SEQ ID NO: 5532794 - DNA, 25 bp, Homo sapien
atctcctgtctgttaggggtgtggc

SEQ ID NO: 5532795 - DNA, 25 bp, Homo sapien
aagcagcaagtctccccaattcctc

SEQ ID NO: 5532796 - DNA, 25 bp, Homo sapien
gtacatttgattagaaaccacataa

SEQ ID NO: 5532797 - DNA, 25 bp, Homo sapien
ctaaattgctgatattcaacggttt

SEQ ID NO: 5532798 - DNA, 25 bp, Homo sapien
tgatcacataagcagcaagtctccc

SEQ ID NO: 5532799 - DNA, 25 bp, Homo sapien
ttaagaaatattacaatagggcttc

SEQ ID NO: 5532800 - DNA, 25 bp, Homo sapien
aaaaatcaagtatgaaaccaaatta

SEQ ID NO: 5532801 - DNA, 25 bp, Homo sapien
cataacacaggcaacttgtagtttt

SEQ ID NO: 5532802 - DNA, 25 bp, Homo sapien
gtgcccctggcctaaactctgactt

SEQ ID NO: 5532803 - DNA, 25 bp, Homo sapien
aaagagaaactggcacacatgaaat

SEQ ID NO: 5532804 - DNA, 25 bp, Homo sapien
gtcagcctgtgcccctggcctaaac

SEQ ID NO: 5532805 - DNA, 25 bp, Homo sapien
taaggggaattatgagaagattata

SEQ ID NO: 5532806 - DNA, 25 bp, Homo sapien
cactgtgcacctattagtatgtcta

SEQ ID NO: 5532807 - DNA, 25 bp, Homo sapien
acataagaagatataagaccaaaat

SEQ ID NO: 5532808 - DNA, 25 bp, Homo sapien
aacaataagtatttcactgtgcacc

SEQ ID NO: 5532809 - DNA, 25 bp, Homo sapien
aagattataagcttatcacgtgatc

SEQ ID NO: 5532810 - DNA, 25 bp, Homo sapien
ctggcacacatgaaataacacaaac

SEQ ID NO: 5532811 - DNA, 25 bp, Homo sapien
tagtatgtctaacacaatgctaagt

SEQ ID NO: 5532812 - DNA, 25 bp, Homo sapien
acacaatgctaagtaaggggaatta

SEQ ID NO: 5532813 - DNA, 25 bp, Homo sapien
tggaaatttgggctctaacatatgc

SEQ ID NO: 5532814 - DNA, 25 bp, Homo sapien
ttacagcataggggtccaatttagc

SEQ ID NO: 5532815 - DNA, 25 bp, Homo sapien
gtcacatgcaaattcagggagagtt

SEQ ID NO: 5532816 - DNA, 25 bp, Homo sapien
ttaaggcagtgattagaaaaggcct

SEQ ID NO: 5532817 - DNA, 25 bp, Homo sapien
gaaaatatcatgttgtaggttggcc

SEQ ID NO: 5532818 - DNA, 25 bp, Homo sapien
gtgattagaaaaggcctaagaggtg

SEQ ID NO: 5532819 - DNA, 25 bp, Homo sapien
aaacacacaatggaaatttgggctc

SEQ ID NO: 5532820 - DNA, 25 bp, Homo sapien
gtaggaatatggaaagtcatgagac

SEQ ID NO: 5532821 - DNA, 25 bp, Homo sapien
ggagatagcagtccagctgaaattt

SEQ ID NO: 5532822 - DNA, 25 bp, Homo sapien
gatgacagtaatatggcccttgggt

SEQ ID NO: 5532823 - DNA, 25 bp, Homo sapien
ggcctacagcctgatgacagtaata

SEQ ID NO: 5532824 - DNA, 25 bp, Homo sapien
tttcctaacgtggagtgtatgggtc

SEQ ID NO: 5532825 - DNA, 25 bp, Homo sapien
gctgtccctctgcggcaggcagagc

SEQ ID NO: 5532826 - DNA, 25 bp, Homo sapien
tgccttccaccttggagaggaggct

SEQ ID NO: 5532827 - DNA, 25 bp, Homo sapien
ttgaagtgcttcctaggccagtgat

SEQ ID NO: 5532828 - DNA, 25 bp, Homo sapien
aagaggtcctgagaccacgtaccca

SEQ ID NO: 5532829 - DNA, 25 bp, Homo sapien
gccttgtccttagagcactgggggg

SEQ ID NO: 5532830 - DNA, 25 bp, Homo sapien
gggcaggtcgcaaaatctcccagcc

SEQ ID NO: 5532831 - DNA, 25 bp, Homo sapien
ctgaagccagcttgcacaagggctg

SEQ ID NO: 5532832 - DNA, 25 bp, Homo sapien
acctgaaacggctgaagccagcttg

SEQ ID NO: 5532833 - DNA, 25 bp, Homo sapien
gcctagagaccacacctgaaacggc

SEQ ID NO: 5532834 - DNA, 25 bp, Homo sapien
agagcagtcatagacaccatggacc

SEQ ID NO: 5532835 - DNA, 25 bp, Homo sapien
cataagctgaaacctacacagtgct

SEQ ID NO: 5532836 - DNA, 25 bp, Homo sapien
tagtgagtttagaagcacagaggat

SEQ ID NO: 5532837 - DNA, 25 bp, Homo sapien
ttacaataaaaggcatacaggttga

SEQ ID NO: 5532838 - DNA, 25 bp, Homo sapien
ttttaggcatacaggttgattatta

SEQ ID NO: 5532839 - DNA, 25 bp, Homo sapien
cattcgaaaaggtaaatacttagct

SEQ ID NO: 5532840 - DNA, 25 bp, Homo sapien
aaatctcacaaaacatggacagaac

SEQ ID NO: 5532841 - DNA, 25 bp, Homo sapien
aaaacagcttccaaaactagtgagt

SEQ ID NO: 5532842 - DNA, 25 bp, Homo sapien
tggacagaactcataagctgaaacc

SEQ ID NO: 5532843 - DNA, 25 bp, Homo sapien
agaaaagcaaagtgcatacagagat

SEQ ID NO: 5532844 - DNA, 25 bp, Homo sapien
aaagtccatgacaaatagaagttct

SEQ ID NO: 5532845 - DNA, 25 bp, Homo sapien
cacagaggatgcaacataaatatat

SEQ ID NO: 5532846 - DNA, 25 bp, Homo sapien
gatagctactgacaaggagaagcac

SEQ ID NO: 5532847 - DNA, 25 bp, Homo sapien
atggcagatgagatctggaattgtc

SEQ ID NO: 5532848 - DNA, 25 bp, Homo sapien
aaacggaaattggaaattgctcacc

SEQ ID NO: 5532849 - DNA, 25 bp, Homo sapien
gacaaggagaagcacttttctggtt

SEQ ID NO: 5532850 - DNA, 25 bp, Homo sapien
agaaacttagggcaattgggattgg

SEQ ID NO: 5532851 - DNA, 25 bp, Homo sapien
atccctggatcaggacccatgggac

SEQ ID NO: 5532852 - DNA, 25 bp, Homo sapien
gtggctttcttagagatggcagatg

SEQ ID NO: 5532853 - DNA, 25 bp, Homo sapien
ataatactagaagaatgtgaatgag

SEQ ID NO: 5532854 - DNA, 25 bp, Homo sapien
tttgggcagatagctactgacaagg

SEQ ID NO: 5532855 - DNA, 25 bp, Homo sapien
tcccattctcggttctggagcccag

SEQ ID NO: 5532856 - DNA, 25 bp, Homo sapien
ggaagacgccttaggcaactgcctg

SEQ ID NO: 5532857 - DNA, 25 bp, Homo sapien
aagcacagggtttttgcgtgatacc

SEQ ID NO: 5532858 - DNA, 25 bp, Homo sapien
gtaactattgaggcccccgctggct

SEQ ID NO: 5532859 - DNA, 25 bp, Homo sapien
ctctgtcttgtagggctgtatagga

SEQ ID NO: 5532860 - DNA, 25 bp, Homo sapien
aaggtagagaaaatgagtaactatt

SEQ ID NO: 5532861 - DNA, 25 bp, Homo sapien
gacagtccggtcagcagttacctca

SEQ ID NO: 5532862 - DNA, 25 bp, Homo sapien
cccggactcacacttggctcgcacg

SEQ ID NO: 5532863 - DNA, 25 bp, Homo sapien
gtcgggagcatccttagtgccctga

SEQ ID NO: 5532864 - DNA, 25 bp, Homo sapien
gggctgtataggacagtccggtcag

SEQ ID NO: 5532865 - DNA, 25 bp, Homo sapien
gggtctccgccgtcactgtgaaggc

SEQ ID NO: 5532866 - DNA, 25 bp, Homo sapien
agttacctcaagctgagctgggctt

SEQ ID NO: 5532867 - DNA, 25 bp, Homo sapien
gccctgatcaaagatggcggaagac

SEQ ID NO: 5532868 - DNA, 25 bp, Homo sapien
ttcatgacagtgagtggttagacag

SEQ ID NO: 5532869 - DNA, 25 bp, Homo sapien
ggggcttggtgatggccatatcttt

SEQ ID NO: 5532870 - DNA, 25 bp, Homo sapien
ttactagcaatgactggggctcaga

SEQ ID NO: 5532871 - DNA, 25 bp, Homo sapien
gaaaggctgtcagtgagtaagctta

SEQ ID NO: 5532872 - DNA, 25 bp, Homo sapien
ggggaaaagtcagaacttggatcca

SEQ ID NO: 5532873 - DNA, 25 bp, Homo sapien
agggccacagcttaggaacttgctg

SEQ ID NO: 5532874 - DNA, 25 bp, Homo sapien
ctcaggtctggtgtcatcctagggg

SEQ ID NO: 5532875 - DNA, 25 bp, Homo sapien
tgtgggaaacagtcggtatccattg

SEQ ID NO: 5532876 - DNA, 25 bp, Homo sapien
caactcaaaggcaggtcttactagc

SEQ ID NO: 5532877 - DNA, 25 bp, Homo sapien
taatgtatttgtggagagtgaaagg

SEQ ID NO: 5532878 - DNA, 25 bp, Homo sapien
ggtttggcgacttcacgaaggtcac

SEQ ID NO: 5532879 - DNA, 25 bp, Homo sapien
gaaatggtcttgaagaataagtttc

SEQ ID NO: 5532880 - DNA, 25 bp, Homo sapien
aatgatctcacagcctcaaggttgt

SEQ ID NO: 5532881 - DNA, 25 bp, Homo sapien
tcaggattttggagtctgggcaatg

SEQ ID NO: 5532882 - DNA, 25 bp, Homo sapien
ggtgatttatattctggtcaggatt

SEQ ID NO: 5532883 - DNA, 25 bp, Homo sapien
taaagcaattgactaatgatctcac

SEQ ID NO: 5532884 - DNA, 25 bp, Homo sapien
tgaagtggtcaattatgggtaacac

SEQ ID NO: 5532885 - DNA, 25 bp, Homo sapien
cacagcctcaaggttgtatgcaaac

SEQ ID NO: 5532886 - DNA, 25 bp, Homo sapien
tcctaaggaaatctgaaatggtctt

SEQ ID NO: 5532887 - DNA, 25 bp, Homo sapien
atgcaaacctagattagaaatactt

SEQ ID NO: 5532888 - DNA, 25 bp, Homo sapien
tagctgttttgactatgagaacttt

SEQ ID NO: 5532889 - DNA, 25 bp, Homo sapien
atggtaagtaacacaaaaagtgtac

SEQ ID NO: 5532890 - DNA, 25 bp, Homo sapien
caatacacatacccccatgggctgt

SEQ ID NO: 5532891 - DNA, 25 bp, Homo sapien
gaaaaatacggttcaggcaatgatt

SEQ ID NO: 5532892 - DNA, 25 bp, Homo sapien
acgttggctcccctgaggacttcct

SEQ ID NO: 5532893 - DNA, 25 bp, Homo sapien
aacatgatgtgggaattcactgcat

SEQ ID NO: 5532894 - DNA, 25 bp, Homo sapien
ggccccatagaaaccatgaaccttg

SEQ ID NO: 5532895 - DNA, 25 bp, Homo sapien
gctgttctaattcgggggcagccag

SEQ ID NO: 5532896 - DNA, 25 bp, Homo sapien
gatgcctgagaaaaagtcaatctac

SEQ ID NO: 5532897 - DNA, 25 bp, Homo sapien
acactttacaaggaacgttggctcc

SEQ ID NO: 5532898 - DNA, 25 bp, Homo sapien
ccaggaacctagagtacatagtgtg

SEQ ID NO: 5532899 - DNA, 25 bp, Homo sapien
gccagaggtagccaagaactctaag

SEQ ID NO: 5532900 - DNA, 25 bp, Homo sapien
ttgacctctcatgcatctggcccca

SEQ ID NO: 5532901 - DNA, 25 bp, Homo sapien
gagctcactgcaccctgagcggcat

SEQ ID NO: 5532902 - DNA, 25 bp, Homo sapien
ctgtgcacacctggcagcttcacct

SEQ ID NO: 5532903 - DNA, 25 bp, Homo sapien
cagtggtaaagtttaacccaggctc

SEQ ID NO: 5532904 - DNA, 25 bp, Homo sapien
cagcttcacctccccaaacaggccc

SEQ ID NO: 5532905 - DNA, 25 bp, Homo sapien
gtcccccattgccctgacccttgcc

SEQ ID NO: 5532906 - DNA, 25 bp, Homo sapien
ggtcttgctggcttcggttttccca

SEQ ID NO: 5532907 - DNA, 25 bp, Homo sapien
cctgagcggcattgtcccccattgc

SEQ ID NO: 5532908 - DNA, 25 bp, Homo sapien
tccaagtgaggcaaaaaccatgcaa

SEQ ID NO: 5532909 - DNA, 25 bp, Homo sapien
ctggcttcggttttcccaggggagc

SEQ ID NO: 5532910 - DNA, 25 bp, Homo sapien
ccaggggagctcactgcaccctgag

SEQ ID NO: 5532911 - DNA, 25 bp, Homo sapien
ggttttcccaggggagctcactgca

SEQ ID NO: 5532912 - DNA, 25 bp, Homo sapien
agagccagtaaccagcttcctgatt

SEQ ID NO: 5532913 - DNA, 25 bp, Homo sapien
tttagggtgactttgaagaatcaga

SEQ ID NO: 5532914 - DNA, 25 bp, Homo sapien
cagtggtattgcagtaccctggtat

SEQ ID NO: 5532915 - DNA, 25 bp, Homo sapien
acttataaacagtggtattgcagta

SEQ ID NO: 5532916 - DNA, 25 bp, Homo sapien
ttctaataagaaagtacctgctttc

SEQ ID NO: 5532917 - DNA, 25 bp, Homo sapien
actctcagtagagccagtaaccagc

SEQ ID NO: 5532918 - DNA, 25 bp, Homo sapien
tgctttcttaagagaaaaagggata

SEQ ID NO: 5532919 - DNA, 25 bp, Homo sapien
agggataagttaccaaaagcagcac

SEQ ID NO: 5532920 - DNA, 25 bp, Homo sapien
catcagggctccaactctcagtaga

SEQ ID NO: 5532921 - DNA, 25 bp, Homo sapien
tctaaaggcactgtcgtttgcttac

SEQ ID NO: 5532922 - DNA, 25 bp, Homo sapien
cagtagagccagtaaccagcttcct

SEQ ID NO: 5532923 - DNA, 25 bp, Homo sapien
catctaacgggatcttccacattcc

SEQ ID NO: 5532924 - DNA, 25 bp, Homo sapien
tcactaaccagctccattgcatcca

SEQ ID NO: 5532925 - DNA, 25 bp, Homo sapien
tccttcccttcaagtccagtcctgg

SEQ ID NO: 5532926 - DNA, 25 bp, Homo sapien
acttttgcgtcttcctaactgattt

SEQ ID NO: 5532927 - DNA, 25 bp, Homo sapien
attgcatccatctaacgggatcttc

SEQ ID NO: 5532928 - DNA, 25 bp, Homo sapien
tggaatacatgtggaatcttgggat

SEQ ID NO: 5532929 - DNA, 25 bp, Homo sapien
atgtagtgcacgttaaattctttca

SEQ ID NO: 5532930 - DNA, 25 bp, Homo sapien
gaggatgaagtccattaacacagac

SEQ ID NO: 5532931 - DNA, 25 bp, Homo sapien
gtgagtggcaccaaatgtagtgcac

SEQ ID NO: 5532932 - DNA, 25 bp, Homo sapien
tccccatgctccaccataccgggcc

SEQ ID NO: 5532933 - DNA, 25 bp, Homo sapien
tttagataagtcagccctgctcaaa

SEQ ID NO: 5532934 - DNA, 25 bp, Homo sapien
gaggtctagggctaggtcctcccct

SEQ ID NO: 5532935 - DNA, 25 bp, Homo sapien
aggggaggacctagccctagacctc

SEQ ID NO: 5532936 - DNA, 25 bp, Homo sapien
ctggcagttccttatgatagagttt

SEQ ID NO: 5532937 - DNA, 25 bp, Homo sapien
gggagttgtattttcagtcttcgcc

SEQ ID NO: 5532938 - DNA, 25 bp, Homo sapien
gtcctgtgtaaactgctggaagttc

SEQ ID NO: 5532939 - DNA, 25 bp, Homo sapien
cattagaaaatcacagtcagatgtt

SEQ ID NO: 5532940 - DNA, 25 bp, Homo sapien
atgaatatggctttaggcggcagat

SEQ ID NO: 5532941 - DNA, 25 bp, Homo sapien
taggcggcagatgatatacatatct

SEQ ID NO: 5532942 - DNA, 25 bp, Homo sapien
ggaagttcttccacagtcaggtcaa

SEQ ID NO: 5532943 - DNA, 25 bp, Homo sapien
ttcgccaggtcattgagatccatcc

SEQ ID NO: 5532944 - DNA, 25 bp, Homo sapien
aatttatggtgaatgaatatggctt

SEQ ID NO: 5532945 - DNA, 25 bp, Homo sapien
aactctgctggtgatgggagttgta

SEQ ID NO: 5532946 - DNA, 25 bp, Homo sapien
cagcagcagcctagcaactctgctg

SEQ ID NO: 5532947 - DNA, 25 bp, Homo sapien
cagaggctaggttacaaaaaacatc

SEQ ID NO: 5532948 - DNA, 25 bp, Homo sapien
ggtatgacactttcagaggctaggt

SEQ ID NO: 5532949 - DNA, 25 bp, Homo sapien
taggagtctcccacgttgtagttga

SEQ ID NO: 5532950 - DNA, 25 bp, Homo sapien
ttcatgccttgtgtaggagtctccc

SEQ ID NO: 5532951 - DNA, 25 bp, Homo sapien
ccttgccctccggtgttgcttgctc

SEQ ID NO: 5532952 - DNA, 25 bp, Homo sapien
ataactgccatgttgtgagaggccc

SEQ ID NO: 5532953 - DNA, 25 bp, Homo sapien
gtgttgcttgctctggggacaaata

SEQ ID NO: 5532954 - DNA, 25 bp, Homo sapien
cagatgacacttaaaaatgcccacc

SEQ ID NO: 5532955 - DNA, 25 bp, Homo sapien
ttgtagttgacttggtctgtgtgac

SEQ ID NO: 5532956 - DNA, 25 bp, Homo sapien
ttccaggttgtgacagcctccttcc

SEQ ID NO: 5532957 - DNA, 25 bp, Homo sapien
tgtgtgaccaacaaaatacagaatt

SEQ ID NO: 5532958 - DNA, 25 bp, Homo sapien
cctgtggctagaaaacacatctgga

SEQ ID NO: 5532959 - DNA, 25 bp, Homo sapien
cctctctactgtgcagggaaaggag

SEQ ID NO: 5532960 - DNA, 25 bp, Homo sapien
atttacaaaactaccagatggccaa

SEQ ID NO: 5532961 - DNA, 25 bp, Homo sapien
ctgccactaaggagttaagtaaaac

SEQ ID NO: 5532962 - DNA, 25 bp, Homo sapien
gggcggaatagcattgttgttcagc

SEQ ID NO: 5532963 - DNA, 25 bp, Homo sapien
gacacaaaaacagtaaggaattagc

SEQ ID NO: 5532964 - DNA, 25 bp, Homo sapien
cagatgatatagaccaagttgattc

SEQ ID NO: 5532965 - DNA, 25 bp, Homo sapien
gtgtgaatgtcagcataatagatac

SEQ ID NO: 5532966 - DNA, 25 bp, Homo sapien
cacatctggaaaaacacacaattac

SEQ ID NO: 5532967 - DNA, 25 bp, Homo sapien
aaggccatagaaggagctatgcttg

SEQ ID NO: 5532968 - DNA, 25 bp, Homo sapien
tgggaatctagaaaactgccactaa

SEQ ID NO: 5532969 - DNA, 25 bp, Homo sapien
tgttgattggtcagaagacagctca

SEQ ID NO: 5532970 - DNA, 25 bp, Homo sapien
taccagtataccaataggatgtgaa

SEQ ID NO: 5532971 - DNA, 25 bp, Homo sapien
gttcctcaggctggaagaaatgagc

SEQ ID NO: 5532972 - DNA, 25 bp, Homo sapien
ttctgaactgccgtgtaaacctgac

SEQ ID NO: 5532973 - DNA, 25 bp, Homo sapien
gtactttggcctgatgttctgacct

SEQ ID NO: 5532974 - DNA, 25 bp, Homo sapien
gcaagtaatgaaagcgttctcgctt

SEQ ID NO: 5532975 - DNA, 25 bp, Homo sapien
ggggagagcaaattgaaaatgcgta

SEQ ID NO: 5532976 - DNA, 25 bp, Homo sapien
aaacaagggatgagtactttttaga

SEQ ID NO: 5532977 - DNA, 25 bp, Homo sapien
aggatgtgaataatgtgtgtgttga

SEQ ID NO: 5532978 - DNA, 25 bp, Homo sapien
acctttaaggaagcaagagtttgta

SEQ ID NO: 5532979 - DNA, 25 bp, Homo sapien
aatgcgtaaattggaaggcaagttc

SEQ ID NO: 5532980 - DNA, 25 bp, Homo sapien
atcagatcataagcaacaagaaaac

SEQ ID NO: 5532981 - DNA, 25 bp, Homo sapien
cccaagaaagaaccctgaacctgga

SEQ ID NO: 5532982 - DNA, 25 bp, Homo sapien
agaatcatgcaaaatctaaacaaat

SEQ ID NO: 5532983 - DNA, 25 bp, Homo sapien
aatagaaactacaattactgacatt

SEQ ID NO: 5532984 - DNA, 25 bp, Homo sapien
ggaggcagtgtgccctaaaaagcat

SEQ ID NO: 5532985 - DNA, 25 bp, Homo sapien
ttgtaccattaatcacaaagggtaa

SEQ ID NO: 5532986 - DNA, 25 bp, Homo sapien
taaaaagcattgacaatctcattgt

SEQ ID NO: 5532987 - DNA, 25 bp, Homo sapien
ctcattgtcatatacccaagaaaga

SEQ ID NO: 5532988 - DNA, 25 bp, Homo sapien
ggtgatatttctgttaggaggaggc

SEQ ID NO: 5532989 - DNA, 25 bp, Homo sapien
tatatgacaagacacacatcagatc

SEQ ID NO: 5532990 - DNA, 25 bp, Homo sapien
aaagatataaagacctccccctcac

SEQ ID NO: 5532991 - DNA, 25 bp, Homo sapien
ttattgatgtagggcttcctggcag

SEQ ID NO: 5532992 - DNA, 25 bp, Homo sapien
acacagattcccccccagctcggag

SEQ ID NO: 5532993 - DNA, 25 bp, Homo sapien
actcttcacagtacatattccgatc

SEQ ID NO: 5532994 - DNA, 25 bp, Homo sapien
agacagaactttattgatgtagggc

SEQ ID NO: 5532995 - DNA, 25 bp, Homo sapien
ttggggtggatcctccccctagtca

SEQ ID NO: 5532996 - DNA, 25 bp, Homo sapien
tacacaagacagaactttattgatg

SEQ ID NO: 5532997 - DNA, 25 bp, Homo sapien
agattcccccccagctcggagtgga

SEQ ID NO: 5532998 - DNA, 25 bp, Homo sapien
ctccccctagtcaggtcaggggagg

SEQ ID NO: 5532999 - DNA, 25 bp, Homo sapien
ccacctccccacccctactcttcac

SEQ ID NO: 5533000 - DNA, 25 bp, Homo sapien
gcagaccacctccccacccctactc

SEQ ID NO: 5533001 - DNA, 25 bp, Homo sapien
ggtggatcctccccctagtcaggtc

SEQ ID NO: 5533002 - DNA, 25 bp, Homo sapien
tgtctcctagagttttggtcctaag

SEQ ID NO: 5533003 - DNA, 25 bp, Homo sapien
cttaggaccaaaactctaggagaca

SEQ ID NO: 5533004 - DNA, 25 bp, Homo sapien
aactggagtaagttgtggtgttgtt

SEQ ID NO: 5533005 - DNA, 25 bp, Homo sapien
tgcacattggcttgtaactggagta

SEQ ID NO: 5533006 - DNA, 25 bp, Homo sapien
tttgtcgaggcttgactggaacata

SEQ ID NO: 5533007 - DNA, 25 bp, Homo sapien
caggacttcaacttgcaaggggagt

SEQ ID NO: 5533008 - DNA, 25 bp, Homo sapien
agaagcggtagtaaacatttgcctt

SEQ ID NO: 5533009 - DNA, 25 bp, Homo sapien
gactggaacatatggctggaaatta

SEQ ID NO: 5533010 - DNA, 25 bp, Homo sapien
gtttttcctgggaatgagacgatgg

SEQ ID NO: 5533011 - DNA, 25 bp, Homo sapien
aaatgtagctttgggatgaaacttt

SEQ ID NO: 5533012 - DNA, 25 bp, Homo sapien
tgcaaggggagttgatcttgtgttt

SEQ ID NO: 5533013 - DNA, 25 bp, Homo sapien
ggaaattatttgggactgaaagaga

SEQ ID NO: 5533014 - DNA, 25 bp, Homo sapien
tggtcaagtttggggcatttgcaca

SEQ ID NO: 5533015 - DNA, 25 bp, Homo sapien
gtcgtcttctcgcagccgtatagta

SEQ ID NO: 5533016 - DNA, 25 bp, Homo sapien
ctcgcagccgtatagtagtagtagg

SEQ ID NO: 5533017 - DNA, 25 bp, Homo sapien
tcttctcgcagccgtatagtagtag

SEQ ID NO: 5533018 - DNA, 25 bp, Homo sapien
tctcgcagccgtatagtagtagtag

SEQ ID NO: 5533019 - DNA, 25 bp, Homo sapien
gcaaaacattcacatacatttaatc

SEQ ID NO: 5533020 - DNA, 25 bp, Homo sapien
ctgtcgtcttctcgcagccgtatag

SEQ ID NO: 5533021 - DNA, 25 bp, Homo sapien
tcgcagccgtatagtagtagtaggc

SEQ ID NO: 5533022 - DNA, 25 bp, Homo sapien
ttctcgcagccgtatagtagtagta

SEQ ID NO: 5533023 - DNA, 25 bp, Homo sapien
ttctgtcgtcttctcgcagccgtat

SEQ ID NO: 5533024 - DNA, 25 bp, Homo sapien
cttctcgcagccgtatagtagtagt

SEQ ID NO: 5533025 - DNA, 25 bp, Homo sapien
cgtcttctcgcagccgtatagtagt

SEQ ID NO: 5533026 - DNA, 25 bp, Homo sapien
cacccccaacactaggggctccaac

SEQ ID NO: 5533027 - DNA, 25 bp, Homo sapien
caaccctcaacgccaagggcagagt

SEQ ID NO: 5533028 - DNA, 25 bp, Homo sapien
ccaggccatccccaccggaattttc

SEQ ID NO: 5533029 - DNA, 25 bp, Homo sapien
ctgaggacccggctcgtccttccaa

SEQ ID NO: 5533030 - DNA, 25 bp, Homo sapien
gcagagccagctcatgccactctcc

SEQ ID NO: 5533031 - DNA, 25 bp, Homo sapien
tataacatgtcctgagcgaaggtgg

SEQ ID NO: 5533032 - DNA, 25 bp, Homo sapien
cccctgaaatggatggacagggctg

SEQ ID NO: 5533033 - DNA, 25 bp, Homo sapien
aagaacccatgcccgtctccagact

SEQ ID NO: 5533034 - DNA, 25 bp, Homo sapien
ccactctccaagaacccatgcccgt

SEQ ID NO: 5533035 - DNA, 25 bp, Homo sapien
attaaagtgcattgagaagaggtgc

SEQ ID NO: 5533036 - DNA, 25 bp, Homo sapien
gactcttatctcatccccgggagcc

SEQ ID NO: 5533037 - DNA, 25 bp, Homo sapien
ctgcggccaagaataacaatgctaa

SEQ ID NO: 5533038 - DNA, 25 bp, Homo sapien
tggaaagcttgagggaataaaataa

SEQ ID NO: 5533039 - DNA, 25 bp, Homo sapien
gctaattcctggataaggggattta

SEQ ID NO: 5533040 - DNA, 25 bp, Homo sapien
ctaatgttcaaaaccagggcagacc

SEQ ID NO: 5533041 - DNA, 25 bp, Homo sapien
tagaagacagaattaaaaagtgatc

SEQ ID NO: 5533042 - DNA, 25 bp, Homo sapien
gggccagagacccagaatgctttct

SEQ ID NO: 5533043 - DNA, 25 bp, Homo sapien
gcagacccaagccatggaaagcttg

SEQ ID NO: 5533044 - DNA, 25 bp, Homo sapien
taaaataatattctgctgcggccaa

SEQ ID NO: 5533045 - DNA, 25 bp, Homo sapien
ccacaaagaaagaaacaaatgggcc

SEQ ID NO: 5533046 - DNA, 25 bp, Homo sapien
gtgcacttgctgagcttccggcctg

SEQ ID NO: 5533047 - DNA, 25 bp, Homo sapien
cagagccagaccccgtctccacaaa

SEQ ID NO: 5533048 - DNA, 25 bp, Homo sapien
ctgcatcctgcccaatgtggaggcc

SEQ ID NO: 5533049 - DNA, 25 bp, Homo sapien
gttcgccctcctcatcagcacctgc

SEQ ID NO: 5533050 - DNA, 25 bp, Homo sapien
cacttctaccgctccctggtgcgcc

SEQ ID NO: 5533051 - DNA, 25 bp, Homo sapien
gagatcgaggagctccacaagctca

SEQ ID NO: 5533052 - DNA, 25 bp, Homo sapien
agcaacatccacaacctgaactcca

SEQ ID NO: 5533053 - DNA, 25 bp, Homo sapien
cctactcttcctggccgaggtggtg

SEQ ID NO: 5533054 - DNA, 25 bp, Homo sapien
ctccctggtgcgccacaaaacggag

SEQ ID NO: 5533055 - DNA, 25 bp, Homo sapien
atgagcgcatgcacccctacatcga

SEQ ID NO: 5533056 - DNA, 25 bp, Homo sapien
ccgtgcttggcatcctactcttcct

SEQ ID NO: 5533057 - DNA, 25 bp, Homo sapien
ctgaactccatcagcgagtccccgc

SEQ ID NO: 5533058 - DNA, 25 bp, Homo sapien
ggatcaagttcctccccgtggatgc

SEQ ID NO: 5533059 - DNA, 25 bp, Homo sapien
actgtaagccaaacactccttgtgt

SEQ ID NO: 5533060 - DNA, 25 bp, Homo sapien
atcaagccaggatcgtcttcatgtc

SEQ ID NO: 5533061 - DNA, 25 bp, Homo sapien
cagaggcaccaattaaaataacaga

SEQ ID NO: 5533062 - DNA, 25 bp, Homo sapien
cttgctaagtataaactgggatgtt

SEQ ID NO: 5533063 - DNA, 25 bp, Homo sapien
agttttggatgaagctgaagaatac

SEQ ID NO: 5533064 - DNA, 25 bp, Homo sapien
tcagagcctcatgacccatcaagcc

SEQ ID NO: 5533065 - DNA, 25 bp, Homo sapien
ctgtaggctaggctcgtttacctct

SEQ ID NO: 5533066 - DNA, 25 bp, Homo sapien
ttaaagatcacaaacagaggcacca

SEQ ID NO: 5533067 - DNA, 25 bp, Homo sapien
ccccccggacaattcactgtaagcc

SEQ ID NO: 5533068 - DNA, 25 bp, Homo sapien
actccttgtgtgaggcccctacgga

SEQ ID NO: 5533069 - DNA, 25 bp, Homo sapien
acctgtgaatagtcaggtgagggtc

SEQ ID NO: 5533070 - DNA, 25 bp, Homo sapien
aatataggttgaagtcatgactgaa

SEQ ID NO: 5533071 - DNA, 25 bp, Homo sapien
ttcagtcatgacttcaacctatatt

SEQ ID NO: 5533072 - DNA, 25 bp, Homo sapien
acagagagctaatctgcttggggag

SEQ ID NO: 5533073 - DNA, 25 bp, Homo sapien
ttagagtgtgcctatgaagtgccac

SEQ ID NO: 5533074 - DNA, 25 bp, Homo sapien
ctgctaatgaggcactaagtgagag

SEQ ID NO: 5533075 - DNA, 25 bp, Homo sapien
aaaaagaccccagccacactgacag

SEQ ID NO: 5533076 - DNA, 25 bp, Homo sapien
aattccaatagacaagctggaggcc

SEQ ID NO: 5533077 - DNA, 25 bp, Homo sapien
tcctgggaggtactcttaactggta

SEQ ID NO: 5533078 - DNA, 25 bp, Homo sapien
atgcatcaagcaaatgagcagagct

SEQ ID NO: 5533079 - DNA, 25 bp, Homo sapien
tcaagtagtaaaataccaagagcac

SEQ ID NO: 5533080 - DNA, 25 bp, Homo sapien
tgctgaatggccactagtaaaatcc

SEQ ID NO: 5533081 - DNA, 25 bp, Homo sapien
ttaactggtaagctgtcatatcctc

SEQ ID NO: 5533082 - DNA, 25 bp, Homo sapien
gcgggattttgggccttcagctcag

SEQ ID NO: 5533083 - DNA, 25 bp, Homo sapien
tggggagcaacgattcttaggctta

SEQ ID NO: 5533084 - DNA, 25 bp, Homo sapien
attatgagaacaaagaatatggcag

SEQ ID NO: 5533085 - DNA, 25 bp, Homo sapien
cactgccagcagacataaaaatcaa

SEQ ID NO: 5533086 - DNA, 25 bp, Homo sapien
taggcttaagttggatcaagatagc

SEQ ID NO: 5533087 - DNA, 25 bp, Homo sapien
caagtcactgggaacccccaatgcc

SEQ ID NO: 5533088 - DNA, 25 bp, Homo sapien
gacataaaaatcaagtgggaatggc

SEQ ID NO: 5533089 - DNA, 25 bp, Homo sapien
cccaccatcacgccccaggtaaatt

SEQ ID NO: 5533090 - DNA, 25 bp, Homo sapien
ggatcaagatagcattgggtcatgt

SEQ ID NO: 5533091 - DNA, 25 bp, Homo sapien
tactagtagagaaattatgagaaca

SEQ ID NO: 5533092 - DNA, 25 bp, Homo sapien
cttgcatgcccaaaaagtctctgct

SEQ ID NO: 5533093 - DNA, 25 bp, Homo sapien
tggcagtcagtcagaaacacatcac

SEQ ID NO: 5533094 - DNA, 25 bp, Homo sapien
gtagtaaacgaagatagtcccaccc

SEQ ID NO: 5533095 - DNA, 25 bp, Homo sapien
gggtgggactatcttcgtttactac

SEQ ID NO: 5533096 - DNA, 25 bp, Homo sapien
tctttatccgccacgatagggtgct

SEQ ID NO: 5533097 - DNA, 25 bp, Homo sapien
agctcaaaagctcatggcgttctcc

SEQ ID NO: 5533098 - DNA, 25 bp, Homo sapien
taggttcatagttgccagacccttc

SEQ ID NO: 5533099 - DNA, 25 bp, Homo sapien
taaaatagtgaaaaataggtatctc

SEQ ID NO: 5533100 - DNA, 25 bp, Homo sapien
ggtgctctgaaacccggtcctgcag

SEQ ID NO: 5533101 - DNA, 25 bp, Homo sapien
cgagcctctcgcaaaatacacaagc

SEQ ID NO: 5533102 - DNA, 25 bp, Homo sapien
ctcggccttagaatagcaaacgtta

SEQ ID NO: 5533103 - DNA, 25 bp, Homo sapien
aagaaaaaagctgttagtggctctt

SEQ ID NO: 5533104 - DNA, 25 bp, Homo sapien
aagggcaggacgatacattttactt

SEQ ID NO: 5533105 - DNA, 25 bp, Homo sapien
ctaggatagtgaactatgggactac

SEQ ID NO: 5533106 - DNA, 25 bp, Homo sapien
ggtcctgcagacattcccttggccc

SEQ ID NO: 5533107 - DNA, 25 bp, Homo sapien
tggggggtatacattagacatatca

SEQ ID NO: 5533108 - DNA, 25 bp, Homo sapien
tatattgagcaatcgccaaggccta

SEQ ID NO: 5533109 - DNA, 25 bp, Homo sapien
aaagcctaagaatgtatagagctag

SEQ ID NO: 5533110 - DNA, 25 bp, Homo sapien
gaatgactgtcttgaggagcagctt

SEQ ID NO: 5533111 - DNA, 25 bp, Homo sapien
tcacaaaggtgatgaatgactgtct

SEQ ID NO: 5533112 - DNA, 25 bp, Homo sapien
tcgccaaggcctaaagccaactgac

SEQ ID NO: 5533113 - DNA, 25 bp, Homo sapien
taaaaaggatataggaacctgcatt

SEQ ID NO: 5533114 - DNA, 25 bp, Homo sapien
gaggagcagcttaatccgcacacta

SEQ ID NO: 5533115 - DNA, 25 bp, Homo sapien
tggacactgacacattttggggggt

SEQ ID NO: 5533116 - DNA, 25 bp, Homo sapien
ctctgaattaagaactgatggtttc

SEQ ID NO: 5533117 - DNA, 25 bp, Homo sapien
tagacatatcagagcagtgtatttc

SEQ ID NO: 5533118 - DNA, 25 bp, Homo sapien
aagaacagccactgctaggaccatg

SEQ ID NO: 5533119 - DNA, 25 bp, Homo sapien
tgaaagccaaatggcaaggaaatcc

SEQ ID NO: 5533120 - DNA, 25 bp, Homo sapien
gaggcactcaggaactctgatgtca

SEQ ID NO: 5533121 - DNA, 25 bp, Homo sapien
agggaccaacaagaatatatgaggc

SEQ ID NO: 5533122 - DNA, 25 bp, Homo sapien
tcacccctacccagaaagagataag

SEQ ID NO: 5533123 - DNA, 25 bp, Homo sapien
agttgtggccataataagaacagcc

SEQ ID NO: 5533124 - DNA, 25 bp, Homo sapien
aatgaagcctagttgaaggatggag

SEQ ID NO: 5533125 - DNA, 25 bp, Homo sapien
gagttgtggatgttggcctgtccaa

SEQ ID NO: 5533126 - DNA, 25 bp, Homo sapien
gcctgtccaagagtagttgtggcca

SEQ ID NO: 5533127 - DNA, 25 bp, Homo sapien
tgagggacagtgttaatgaagccta

SEQ ID NO: 5533128 - DNA, 25 bp, Homo sapien
gagtggaagggatcttgtacacaaa

SEQ ID NO: 5533129 - DNA, 25 bp, Homo sapien
aacagatcagcctcccacctctctc

SEQ ID NO: 5533130 - DNA, 25 bp, Homo sapien
aggaaaagagtctaattagtggata

SEQ ID NO: 5533131 - DNA, 25 bp, Homo sapien
taaggatttggttggaaagccactg

SEQ ID NO: 5533132 - DNA, 25 bp, Homo sapien
ttgttacagaggaattgtcacattt

SEQ ID NO: 5533133 - DNA, 25 bp, Homo sapien
ttacaatgtgttgtttgggggacat

SEQ ID NO: 5533134 - DNA, 25 bp, Homo sapien
ccgaagtgtaaggtgaatattatct

SEQ ID NO: 5533135 - DNA, 25 bp, Homo sapien
tggtacctgagaagactggaatgaa

SEQ ID NO: 5533136 - DNA, 25 bp, Homo sapien
aagtccaaagtcacacgcttcaagc

SEQ ID NO: 5533137 - DNA, 25 bp, Homo sapien
ggtcaggaattacagcaccgtgctg

SEQ ID NO: 5533138 - DNA, 25 bp, Homo sapien
tattatgagagtcacatgaaccatg

SEQ ID NO: 5533139 - DNA, 25 bp, Homo sapien
ctactgaagtccatgattctggtac

SEQ ID NO: 5533140 - DNA, 25 bp, Homo sapien
gtgtgatgcttggtacagccactcc

SEQ ID NO: 5533141 - DNA, 25 bp, Homo sapien
tctagaaggtaaaatgtgtccatcc

SEQ ID NO: 5533142 - DNA, 25 bp, Homo sapien
tcaaagacccaaaagtatagactat

SEQ ID NO: 5533143 - DNA, 25 bp, Homo sapien
agagaaaggtgcagctaaactgctc

SEQ ID NO: 5533144 - DNA, 25 bp, Homo sapien
aattcttagtctgaagccgaggcac

SEQ ID NO: 5533145 - DNA, 25 bp, Homo sapien
aaagtttggtgaattaagtgagata

SEQ ID NO: 5533146 - DNA, 25 bp, Homo sapien
agccgaggcacttgagtaaagtttt

SEQ ID NO: 5533147 - DNA, 25 bp, Homo sapien
gaaatcctgggattctccgggttgc

SEQ ID NO: 5533148 - DNA, 25 bp, Homo sapien
acaggtacaaagactctgcctagta

SEQ ID NO: 5533149 - DNA, 25 bp, Homo sapien
ctgtgagtgtaagctgccctccttt

SEQ ID NO: 5533150 - DNA, 25 bp, Homo sapien
ttctccgggttgcaacaggatcttg

SEQ ID NO: 5533151 - DNA, 25 bp, Homo sapien
acctgtccgacgaccacatccgggt

SEQ ID NO: 5533152 - DNA, 25 bp, Homo sapien
gagccttccaagagcagcatcatac

SEQ ID NO: 5533153 - DNA, 25 bp, Homo sapien
gggaggtgctgagcctctttgtgca

SEQ ID NO: 5533154 - DNA, 25 bp, Homo sapien
catgatcctagagaactgcagcatc

SEQ ID NO: 5533155 - DNA, 25 bp, Homo sapien
acagcctggtgtccctcgtcctcta

SEQ ID NO: 5533156 - DNA, 25 bp, Homo sapien
gctgcgacacctggacatctcccga

SEQ ID NO: 5533157 - DNA, 25 bp, Homo sapien
cctctcaggcattcagacgagcgac

SEQ ID NO: 5533158 - DNA, 25 bp, Homo sapien
gctggggaacctaatgtccctggac

SEQ ID NO: 5533159 - DNA, 25 bp, Homo sapien
atacctttccgggctctgaagaggc

SEQ ID NO: 5533160 - DNA, 25 bp, Homo sapien
gggcagaccagcattgagccttcca

SEQ ID NO: 5533161 - DNA, 25 bp, Homo sapien
cgggtcatcgtgcagctgcacaagc

SEQ ID NO: 5533162 - DNA, 25 bp, Homo sapien
aagatgcctaagatcagaactcctc

SEQ ID NO: 5533163 - DNA, 25 bp, Homo sapien
tgaaatagagtgtggcctagctttg

SEQ ID NO: 5533164 - DNA, 25 bp, Homo sapien
tcaggatctgtgcaggttggaaatt

SEQ ID NO: 5533165 - DNA, 25 bp, Homo sapien
agatgatcatagccaaaacgtcctc

SEQ ID NO: 5533166 - DNA, 25 bp, Homo sapien
aaacgtcctctgtgtggttggaaga

SEQ ID NO: 5533167 - DNA, 25 bp, Homo sapien
gtgcttaacgatacttggagaccag

SEQ ID NO: 5533168 - DNA, 25 bp, Homo sapien
tggttggaagatgacacctcactca

SEQ ID NO: 5533169 - DNA, 25 bp, Homo sapien
tggagaccagaaccacctacttggc

SEQ ID NO: 5533170 - DNA, 25 bp, Homo sapien
ggatgaaaacgcaaagccctatcac

SEQ ID NO: 5533171 - DNA, 25 bp, Homo sapien
tacttggcttcaggaggacacctta

SEQ ID NO: 5533172 - DNA, 25 bp, Homo sapien
tttccagtgggaagctatctacttt

SEQ ID NO: 5533173 - DNA, 25 bp, Homo sapien
ctctgccagaagaatatggaataac

SEQ ID NO: 5533174 - DNA, 25 bp, Homo sapien
accatcaacgataaaaggcacaata

SEQ ID NO: 5533175 - DNA, 25 bp, Homo sapien
agcacgggatgtaacagccgtggtg

SEQ ID NO: 5533176 - DNA, 25 bp, Homo sapien
cagggcagtcctcatgtttcagtcg

SEQ ID NO: 5533177 - DNA, 25 bp, Homo sapien
tgaggtcgaagatcatgttcccatg

SEQ ID NO: 5533178 - DNA, 25 bp, Homo sapien
gtgcccacgcgggtcctctcattgc

SEQ ID NO: 5533179 - DNA, 25 bp, Homo sapien
tatgatcagcaagcatgaggtcgaa

SEQ ID NO: 5533180 - DNA, 25 bp, Homo sapien
ctcaaggaaatgtcagccaagaatc

SEQ ID NO: 5533181 - DNA, 25 bp, Homo sapien
acctacagagaaagagctttggaca

SEQ ID NO: 5533182 - DNA, 25 bp, Homo sapien
gctgccagctgagttgatgacatgt

SEQ ID NO: 5533183 - DNA, 25 bp, Homo sapien
tcgtgtgactgctgatggcaacatc

SEQ ID NO: 5533184 - DNA, 25 bp, Homo sapien
atgcctcttgaaaaatgattagtat

SEQ ID NO: 5533185 - DNA, 25 bp, Homo sapien
gaaaaccctgtgtctgataagtctc

SEQ ID NO: 5533186 - DNA, 25 bp, Homo sapien
ataagccatgcacttaagcagtatt

SEQ ID NO: 5533187 - DNA, 25 bp, Homo sapien
gctacttagaattacaggggttcac

SEQ ID NO: 5533188 - DNA, 25 bp, Homo sapien
gcaccctcaagatggctaaaatcct

SEQ ID NO: 5533189 - DNA, 25 bp, Homo sapien
atatgtagacaattctgagaacatc

SEQ ID NO: 5533190 - DNA, 25 bp, Homo sapien
tcaaagtaagcaccctcaagatggc

SEQ ID NO: 5533191 - DNA, 25 bp, Homo sapien
caggggttcactgttgtcctcagga

SEQ ID NO: 5533192 - DNA, 25 bp, Homo sapien
aatcctttggcagtgaaaaccctgt

SEQ ID NO: 5533193 - DNA, 25 bp, Homo sapien
aagtctcagagacaaactgctactt

SEQ ID NO: 5533194 - DNA, 25 bp, Homo sapien
cagtttttagcagtcaaagtaagca

SEQ ID NO: 5533195 - DNA, 25 bp, Homo sapien
agccacgggttattatattgggttc

SEQ ID NO: 5533196 - DNA, 25 bp, Homo sapien
tgggttcaccacagttggtcgcaaa

SEQ ID NO: 5533197 - DNA, 25 bp, Homo sapien
ggtcgcaaataaccaaagcacatct

SEQ ID NO: 5533198 - DNA, 25 bp, Homo sapien
taagaatagaagatttatgcatttc

SEQ ID NO: 5533199 - DNA, 25 bp, Homo sapien
tttgaccaatcgtggtgtcaccatc

SEQ ID NO: 5533200 - DNA, 25 bp, Homo sapien
ccagtaatctgggttcaccacagtt

SEQ ID NO: 5533201 - DNA, 25 bp, Homo sapien
gcttttcacagccacgggttattat

SEQ ID NO: 5533202 - DNA, 25 bp, Homo sapien
ataccaacaaagaatacggaagcct

SEQ ID NO: 5533203 - DNA, 25 bp, Homo sapien
ctggtcgggattttacccagtaatc

SEQ ID NO: 5533204 - DNA, 25 bp, Homo sapien
ggcacaataccaacaaagaatacgg

SEQ ID NO: 5533205 - DNA, 25 bp, Homo sapien
gagacatctaaaggaattaaaacca

SEQ ID NO: 5533206 - DNA, 25 bp, Homo sapien
gaaacccagactgtctgagaggccc

SEQ ID NO: 5533207 - DNA, 25 bp, Homo sapien
cccagcattaaccttgggtagaggt

SEQ ID NO: 5533208 - DNA, 25 bp, Homo sapien
cattaaccttgggtagaggttggcg

SEQ ID NO: 5533209 - DNA, 25 bp, Homo sapien
tgagctacactgccctccccagacc

SEQ ID NO: 5533210 - DNA, 25 bp, Homo sapien
gagagtgaaacccagactgtctgag

SEQ ID NO: 5533211 - DNA, 25 bp, Homo sapien
gctacactgccctccccagacccag

SEQ ID NO: 5533212 - DNA, 25 bp, Homo sapien
tgcccacccccagcattaaccttgg

SEQ ID NO: 5533213 - DNA, 25 bp, Homo sapien
ttgcacacacagaggcttctgtctt

SEQ ID NO: 5533214 - DNA, 25 bp, Homo sapien
cgcttgcacacacagaggcttctgt

SEQ ID NO: 5533215 - DNA, 25 bp, Homo sapien
gcaccctggagctgtcaccctcttc

SEQ ID NO: 5533216 - DNA, 25 bp, Homo sapien
tctgagctacactgccctccccaga

SEQ ID NO: 5533217 - DNA, 25 bp, Homo sapien
tcggacaggtgagtacgtcgagggc

SEQ ID NO: 5533218 - DNA, 25 bp, Homo sapien
gccctcgacgtactcacctgtccga

SEQ ID NO: 5533219 - DNA, 25 bp, Homo sapien
aggcctgtgattctccctaggactg

SEQ ID NO: 5533220 - DNA, 25 bp, Homo sapien
gtcccttaagcatgcaggttccttc

SEQ ID NO: 5533221 - DNA, 25 bp, Homo sapien
gtggtcttgtctgccaggcctgtga

SEQ ID NO: 5533222 - DNA, 25 bp, Homo sapien
atccagcggtctattatgagaacac

SEQ ID NO: 5533223 - DNA, 25 bp, Homo sapien
aaaataacaccaaacctcgtgccga

SEQ ID NO: 5533224 - DNA, 25 bp, Homo sapien
aaaagtggcatttgattcctaagct

SEQ ID NO: 5533225 - DNA, 25 bp, Homo sapien
ggaaaatgcttgctgagagaaatga

SEQ ID NO: 5533226 - DNA, 25 bp, Homo sapien
gggaggactgactcacctgtgattt

SEQ ID NO: 5533227 - DNA, 25 bp, Homo sapien
tactactacccaggaaaatgcttgc

SEQ ID NO: 5533228 - DNA, 25 bp, Homo sapien
tattatgagaacacaacacagtcct

SEQ ID NO: 5533229 - DNA, 25 bp, Homo sapien
tatttcaggattagccagggatttt

SEQ ID NO: 5533230 - DNA, 25 bp, Homo sapien
gacaactcttcctggtgcccactgc

SEQ ID NO: 5533231 - DNA, 25 bp, Homo sapien
agccactggctgtacacacctgggc

SEQ ID NO: 5533232 - DNA, 25 bp, Homo sapien
gtaagagtctgaatcctggacgagg

SEQ ID NO: 5533233 - DNA, 25 bp, Homo sapien
gctggcctcctgcagacaactcttc

SEQ ID NO: 5533234 - DNA, 25 bp, Homo sapien
actgccctgccttcgggctgctggc

SEQ ID NO: 5533235 - DNA, 25 bp, Homo sapien
tctcctacagtaagagtctgaatcc

SEQ ID NO: 5533236 - DNA, 25 bp, Homo sapien
gccgcacacacgtcctgctgcacca

SEQ ID NO: 5533237 - DNA, 25 bp, Homo sapien
ggacttccggaccctgctccgaggc

SEQ ID NO: 5533238 - DNA, 25 bp, Homo sapien
gcctggcgtggcccacgttctactc

SEQ ID NO: 5533239 - DNA, 25 bp, Homo sapien
acacacgtcctgctgcaccactgcc

SEQ ID NO: 5533240 - DNA, 25 bp, Homo sapien
gccagcagccgctttcagccactgt

SEQ ID NO: 5533241 - DNA, 25 bp, Homo sapien
ctcatttattggcatggtgtgtttt

SEQ ID NO: 5533242 - DNA, 25 bp, Homo sapien
gaaggtaggatgtgcagctttttct

SEQ ID NO: 5533243 - DNA, 25 bp, Homo sapien
ggatagatgtaacatagatgactgc

SEQ ID NO: 5533244 - DNA, 25 bp, Homo sapien
ttgtactctgaaggtaggatgtgca

SEQ ID NO: 5533245 - DNA, 25 bp, Homo sapien
gtctctgcctcaccataatgctgtt

SEQ ID NO: 5533246 - DNA, 25 bp, Homo sapien
ctccaatcagtgagagtcttgagtc

SEQ ID NO: 5533247 - DNA, 25 bp, Homo sapien
gagagtcttgagtctcagatgtacc

SEQ ID NO: 5533248 - DNA, 25 bp, Homo sapien
ttataagaatgagagaatttgacat

SEQ ID NO: 5533249 - DNA, 25 bp, Homo sapien
tagatgactgcataaaaaagaggca

SEQ ID NO: 5533250 - DNA, 25 bp, Homo sapien
gctttttcttaggcaggatagatgt

SEQ ID NO: 5533251 - DNA, 25 bp, Homo sapien
aaatacaggcaattaattcaacttt

SEQ ID NO: 5533252 - DNA, 25 bp, Homo sapien
caagatattggttagaagtagaaaa

SEQ ID NO: 5533253 - DNA, 25 bp, Homo sapien
tccccagtctcgagacagagcctga

SEQ ID NO: 5533254 - DNA, 25 bp, Homo sapien
cgtgcttctcgaaacaccgcagccc

SEQ ID NO: 5533255 - DNA, 25 bp, Homo sapien
gagacccagcaagactgtattgtcc

SEQ ID NO: 5533256 - DNA, 25 bp, Homo sapien
gggtttagcaaccaagcagccatcc

SEQ ID NO: 5533257 - DNA, 25 bp, Homo sapien
ggttcatcaaggtttgcgcagtgga

SEQ ID NO: 5533258 - DNA, 25 bp, Homo sapien
ttgtcccactgaatgctcaagatat

SEQ ID NO: 5533259 - DNA, 25 bp, Homo sapien
gcgcgaagtagcacgtgcttctcga

SEQ ID NO: 5533260 - DNA, 25 bp, Homo sapien
agggggtagtatttagcctctgtcc

SEQ ID NO: 5533261 - DNA, 25 bp, Homo sapien
gcctcccggcgtctcactgtgtgcc

SEQ ID NO: 5533262 - DNA, 25 bp, Homo sapien
gctagaggatttcaagagacccagc

SEQ ID NO: 5533263 - DNA, 25 bp, Homo sapien
tgagccaccagtacctagccaaagt

SEQ ID NO: 5533264 - DNA, 25 bp, Homo sapien
tggcatgctgaggtaacaactgcag

SEQ ID NO: 5533265 - DNA, 25 bp, Homo sapien
gagcatcgaggtaacagcaaaaatc

SEQ ID NO: 5533266 - DNA, 25 bp, Homo sapien
ttttaatgtgagagtcaaggactac

SEQ ID NO: 5533267 - DNA, 25 bp, Homo sapien
gtagggacagtctatattggccagg

SEQ ID NO: 5533268 - DNA, 25 bp, Homo sapien
tgctgaggtaacaactgcaggagca

SEQ ID NO: 5533269 - DNA, 25 bp, Homo sapien
gatcaatatggcaagctgaagacac

SEQ ID NO: 5533270 - DNA, 25 bp, Homo sapien
ttctgcaagcacaatccactgacat

SEQ ID NO: 5533271 - DNA, 25 bp, Homo sapien
tccaattgggtcaatccagttaacc

SEQ ID NO: 5533272 - DNA, 25 bp, Homo sapien
atgttacctggtctaagaaggaaag

SEQ ID NO: 5533273 - DNA, 25 bp, Homo sapien
ctcacctagggtcagtatgttactt

SEQ ID NO: 5533274 - DNA, 25 bp, Homo sapien
atgacttactggttacaggagcttc

SEQ ID NO: 5533275 - DNA, 25 bp, Homo sapien
ggctgtgtggctatctgcagaagct

SEQ ID NO: 5533276 - DNA, 25 bp, Homo sapien
gcaggacctctccaactcccgggga

SEQ ID NO: 5533277 - DNA, 25 bp, Homo sapien
ggtgctcaaggctcccaatcgtcaa

SEQ ID NO: 5533278 - DNA, 25 bp, Homo sapien
tactggttacaggagcttcagcaga

SEQ ID NO: 5533279 - DNA, 25 bp, Homo sapien
ggtcttgtagccagagataacactg

SEQ ID NO: 5533280 - DNA, 25 bp, Homo sapien
acgcgcgccgctgctacctttacta

SEQ ID NO: 5533281 - DNA, 25 bp, Homo sapien
cagaaaaagccagaaatgtcctagc

SEQ ID NO: 5533282 - DNA, 25 bp, Homo sapien
ggacgcctgcttcagctaccagggc

SEQ ID NO: 5533283 - DNA, 25 bp, Homo sapien
tcctaagggtcttgtagccagagat

SEQ ID NO: 5533284 - DNA, 25 bp, Homo sapien
gctaccgcagccgctggttcgtgtt

SEQ ID NO: 5533285 - DNA, 25 bp, Homo sapien
gggattacaggcatgtaccaccata

SEQ ID NO: 5533286 - DNA, 25 bp, Homo sapien
cctgtgaatagccatttagtctgtt

SEQ ID NO: 5533287 - DNA, 25 bp, Homo sapien
aactataaaaactcttgcatcctac

SEQ ID NO: 5533288 - DNA, 25 bp, Homo sapien
acaatcagtgcccatgtttactttt

SEQ ID NO: 5533289 - DNA, 25 bp, Homo sapien
caaaaatggaatcaactataaaaac

SEQ ID NO: 5533290 - DNA, 25 bp, Homo sapien
ggctggtctttaactgctgacctca

SEQ ID NO: 5533291 - DNA, 25 bp, Homo sapien
ttctgtcaaaacatattgccctagc

SEQ ID NO: 5533292 - DNA, 25 bp, Homo sapien
tttattaaaacaatcagtgcccatg

SEQ ID NO: 5533293 - DNA, 25 bp, Homo sapien
actaaatcttagagagttttctgtc

SEQ ID NO: 5533294 - DNA, 25 bp, Homo sapien
atcagtttcctgtgaatagccattt

SEQ ID NO: 5533295 - DNA, 25 bp, Homo sapien
atgtaccaccatacccggctagttt

SEQ ID NO: 5533296 - DNA, 25 bp, Homo sapien
ctggtttgacagaactaaagaattt

SEQ ID NO: 5533297 - DNA, 25 bp, Homo sapien
aaagatgactcaattcctccgcaga

SEQ ID NO: 5533298 - DNA, 25 bp, Homo sapien
aaaaggtcaaggatataatttctac

SEQ ID NO: 5533299 - DNA, 25 bp, Homo sapien
agtacagttcgtaataggtagggaa

SEQ ID NO: 5533300 - DNA, 25 bp, Homo sapien
aacatcgcttaattccatggctatc

SEQ ID NO: 5533301 - DNA, 25 bp, Homo sapien
tccatggctatcaaagatgactcaa

SEQ ID NO: 5533302 - DNA, 25 bp, Homo sapien
tataaaatcaggactggtgtcactt

SEQ ID NO: 5533303 - DNA, 25 bp, Homo sapien
atgtgtcttttcttcgggcacgtgg

SEQ ID NO: 5533304 - DNA, 25 bp, Homo sapien
gcacttgcagagaaggtaaacattt

SEQ ID NO: 5533305 - DNA, 25 bp, Homo sapien
tctagtaagaacagaaaggttatct

SEQ ID NO: 5533306 - DNA, 25 bp, Homo sapien
tccaggcattgttcaaagtgctttc

SEQ ID NO: 5533307 - DNA, 25 bp, Homo sapien
aatagaactctacaacagctgattc

SEQ ID NO: 5533308 - DNA, 25 bp, Homo sapien
ctgttttcccagccaagccttgttt

SEQ ID NO: 5533309 - DNA, 25 bp, Homo sapien
aagaatccatagagaactggacccc

SEQ ID NO: 5533310 - DNA, 25 bp, Homo sapien
aagagctcaaagggaagtcatttaa

SEQ ID NO: 5533311 - DNA, 25 bp, Homo sapien
aattttccctggggagagacttcac

SEQ ID NO: 5533312 - DNA, 25 bp, Homo sapien
ataattaaagagctcaaagggaagt

SEQ ID NO: 5533313 - DNA, 25 bp, Homo sapien
ctggggagagacttcactactatct

SEQ ID NO: 5533314 - DNA, 25 bp, Homo sapien
tctgctgatggactccatagttctc

SEQ ID NO: 5533315 - DNA, 25 bp, Homo sapien
agcttttttgggtacagaccaggag

SEQ ID NO: 5533316 - DNA, 25 bp, Homo sapien
cctttcttgccggggcattggcctg

SEQ ID NO: 5533317 - DNA, 25 bp, Homo sapien
atagacttgtgagccccatgccttg

SEQ ID NO: 5533318 - DNA, 25 bp, Homo sapien
tccctcctccagcctcgtcgggtcc

SEQ ID NO: 5533319 - DNA, 25 bp, Homo sapien
cgctcaggtccggacgcttgtttat

SEQ ID NO: 5533320 - DNA, 25 bp, Homo sapien
ggctgtttctaggctcccccaagtc

SEQ ID NO: 5533321 - DNA, 25 bp, Homo sapien
gactgctccccctaggggcagagac

SEQ ID NO: 5533322 - DNA, 25 bp, Homo sapien
attcgccccattcaggggctgcact

SEQ ID NO: 5533323 - DNA, 25 bp, Homo sapien
aggagaggccaacaggcctttccct

SEQ ID NO: 5533324 - DNA, 25 bp, Homo sapien
ccccctctgccttagggagcggctg

SEQ ID NO: 5533325 - DNA, 25 bp, Homo sapien
ctttccctagagttgaacctgggcc

SEQ ID NO: 5533326 - DNA, 25 bp, Homo sapien
cggctgggcacccattcgccccatt

SEQ ID NO: 5533327 - DNA, 25 bp, Homo sapien
aggggctgcactttatagacgttcc

SEQ ID NO: 5533328 - DNA, 25 bp, Homo sapien
ccccagaatccttcggggagagtgg

SEQ ID NO: 5533329 - DNA, 25 bp, Homo sapien
catgaggggtttatcccaggatatt

SEQ ID NO: 5533330 - DNA, 25 bp, Homo sapien
caaaagtcataaaaagcaaaagcta

SEQ ID NO: 5533331 - DNA, 25 bp, Homo sapien
acgtggtacagaatccaaaagtcat

SEQ ID NO: 5533332 - DNA, 25 bp, Homo sapien
aaaattattacgtggtacagaatcc

SEQ ID NO: 5533333 - DNA, 25 bp, Homo sapien
ctctggcacccatctgttcttccct

SEQ ID NO: 5533334 - DNA, 25 bp, Homo sapien
ccccactctccacacatcattattc

SEQ ID NO: 5533335 - DNA, 25 bp, Homo sapien
agcttgaagcaaatataaaaatgtt

SEQ ID NO: 5533336 - DNA, 25 bp, Homo sapien
atgaacaagtaaaaacacacacagc

SEQ ID NO: 5533337 - DNA, 25 bp, Homo sapien
ttccctggagtcaaacactattacc

SEQ ID NO: 5533338 - DNA, 25 bp, Homo sapien
tcatatgtaaaccctccccactctc

SEQ ID NO: 5533339 - DNA, 25 bp, Homo sapien
attcattatgatcatgaggggttta

SEQ ID NO: 5533340 - DNA, 25 bp, Homo sapien
aatcacgctgggagtcttaagtaaa

SEQ ID NO: 5533341 - DNA, 25 bp, Homo sapien
aacctgtgtgaaaataaggccagtt

SEQ ID NO: 5533342 - DNA, 25 bp, Homo sapien
aggagagcctgtgtttccagagtca

SEQ ID NO: 5533343 - DNA, 25 bp, Homo sapien
tgcccttgttagcctgcatgtgcag

SEQ ID NO: 5533344 - DNA, 25 bp, Homo sapien
tgtgtgaggcatttgtgttctccac

SEQ ID NO: 5533345 - DNA, 25 bp, Homo sapien
tggccccactcagctgccccgtgtg

SEQ ID NO: 5533346 - DNA, 25 bp, Homo sapien
aggatggacagcatatatatttact

SEQ ID NO: 5533347 - DNA, 25 bp, Homo sapien
tcgcaggagagcctgtgtttccaga

SEQ ID NO: 5533348 - DNA, 25 bp, Homo sapien
ttccagagtcagtgcccttgttagc

SEQ ID NO: 5533349 - DNA, 25 bp, Homo sapien
ttaggaaatcctcccaaggacagtc

SEQ ID NO: 5533350 - DNA, 25 bp, Homo sapien
taaggccagttctcataatcacgct

SEQ ID NO: 5533351 - DNA, 25 bp, Homo sapien
agcaatgaaccacgagggtccttta

SEQ ID NO: 5533352 - DNA, 25 bp, Homo sapien
gattaggacagaatcacagcaagga

SEQ ID NO: 5533353 - DNA, 25 bp, Homo sapien
ggagctgtagaatttgtgtcgatgc

SEQ ID NO: 5533354 - DNA, 25 bp, Homo sapien
caggaggtgtagccctttccatggg

SEQ ID NO: 5533355 - DNA, 25 bp, Homo sapien
gctgtgttctctgaggagctgtaga

SEQ ID NO: 5533356 - DNA, 25 bp, Homo sapien
gccctttccatggggcaaggcttgg

SEQ ID NO: 5533357 - DNA, 25 bp, Homo sapien
tggtaggctgcatggtgcctctgta

SEQ ID NO: 5533358 - DNA, 25 bp, Homo sapien
aagagttcagaatcccctatgggcc

SEQ ID NO: 5533359 - DNA, 25 bp, Homo sapien
gctgatggagatcagagcctctcac

SEQ ID NO: 5533360 - DNA, 25 bp, Homo sapien
gtgtcgatgctctgtgtcctccgtc

SEQ ID NO: 5533361 - DNA, 25 bp, Homo sapien
tccccaaatgagcacatatgcaggg

SEQ ID NO: 5533362 - DNA, 25 bp, Homo sapien
atcgtcacaacaatatagtacaagt

SEQ ID NO: 5533363 - DNA, 25 bp, Homo sapien
acttgtactatattgttgtgacgat

SEQ ID NO: 5533364 - DNA, 25 bp, Homo sapien
acaggagctatgaatcaccccgcct

SEQ ID NO: 5533365 - DNA, 25 bp, Homo sapien
gctgaatgcctttggaacaggagct

SEQ ID NO: 5533366 - DNA, 25 bp, Homo sapien
ttatcatgcatgagagacacaaccc

SEQ ID NO: 5533367 - DNA, 25 bp, Homo sapien
tccattatgatgggagatgctccga

SEQ ID NO: 5533368 - DNA, 25 bp, Homo sapien
atcaccccgcctccagggctaggaa

SEQ ID NO: 5533369 - DNA, 25 bp, Homo sapien
acagagttagcactaccgcactacc

SEQ ID NO: 5533370 - DNA, 25 bp, Homo sapien
atgtcacggagcatgtctggtgttt

SEQ ID NO: 5533371 - DNA, 25 bp, Homo sapien
tttcccaggtcgaatggctgctgaa

SEQ ID NO: 5533372 - DNA, 25 bp, Homo sapien
aacccgcatcaagatcgcccccata

SEQ ID NO: 5533373 - DNA, 25 bp, Homo sapien
agagagatcagcaacacccacgttg

SEQ ID NO: 5533374 - DNA, 25 bp, Homo sapien
aactaaggtataaaacagggctgta

SEQ ID NO: 5533375 - DNA, 25 bp, Homo sapien
ggaaaaacaggcattatcacttaca

SEQ ID NO: 5533376 - DNA, 25 bp, Homo sapien
aaacaccaattacaatgatgaatcc

SEQ ID NO: 5533377 - DNA, 25 bp, Homo sapien
tattcataccagccttcagcatttc

SEQ ID NO: 5533378 - DNA, 25 bp, Homo sapien
ctaaaaccactgatggctcccaatt

SEQ ID NO: 5533379 - DNA, 25 bp, Homo sapien
tggtccatgactgcaaaacattttc

SEQ ID NO: 5533380 - DNA, 25 bp, Homo sapien
tcctggacttgaaggcatctatacc

SEQ ID NO: 5533381 - DNA, 25 bp, Homo sapien
tgcttttggtgaacttggaacatat

SEQ ID NO: 5533382 - DNA, 25 bp, Homo sapien
caattgtgttgaaaagagaacagtt

SEQ ID NO: 5533383 - DNA, 25 bp, Homo sapien
acttacaatctagatacaacgaatc

SEQ ID NO: 5533384 - DNA, 25 bp, Homo sapien
tctaacaggcgctagcttattaatc

SEQ ID NO: 5533385 - DNA, 25 bp, Homo sapien
atctatacctgaaatgggtaacatc

SEQ ID NO: 5533386 - DNA, 25 bp, Homo sapien
catcaatggtttgtcaggaaaaggg

SEQ ID NO: 5533387 - DNA, 25 bp, Homo sapien
tctggggcaacgtttggcctcattg

SEQ ID NO: 5533388 - DNA, 25 bp, Homo sapien
cattaagtaacattctgggggtggg

SEQ ID NO: 5533389 - DNA, 25 bp, Homo sapien
aaagataaaggtaatccctccatac

SEQ ID NO: 5533390 - DNA, 25 bp, Homo sapien
ctttggtggcatctacttggcattc

SEQ ID NO: 5533391 - DNA, 25 bp, Homo sapien
attgcagtcagacttggctgggatc

SEQ ID NO: 5533392 - DNA, 25 bp, Homo sapien
ccaggacactgggctttcacaagcc

SEQ ID NO: 5533393 - DNA, 25 bp, Homo sapien
tcccaggaaatcaccctcccactcc

SEQ ID NO: 5533394 - DNA, 25 bp, Homo sapien
ccactccatgcttgtgggtgagagc

SEQ ID NO: 5533395 - DNA, 25 bp, Homo sapien
taggttaatgtgaaacgcagccatc

SEQ ID NO: 5533396 - DNA, 25 bp, Homo sapien
tcaacatgctggtctgtggcaaagt

SEQ ID NO: 5533397 - DNA, 25 bp, Homo sapien
atgtaaagtgttaccctggagaaaa

SEQ ID NO: 5533398 - DNA, 25 bp, Homo sapien
catgaccaccatgaccagatgttac

SEQ ID NO: 5533399 - DNA, 25 bp, Homo sapien
ctgtagaggcagaatgtttgaatat

SEQ ID NO: 5533400 - DNA, 25 bp, Homo sapien
tcctgcacacagcactaggctccac

SEQ ID NO: 5533401 - DNA, 25 bp, Homo sapien
ctcttcagtgaattaggccaggctt

SEQ ID NO: 5533402 - DNA, 25 bp, Homo sapien
tgctgaacttgaagatggcacacag

SEQ ID NO: 5533403 - DNA, 25 bp, Homo sapien
aatccatcaagacaaccaccaaaat

SEQ ID NO: 5533404 - DNA, 25 bp, Homo sapien
aaaccagagcagcatctggattctc

SEQ ID NO: 5533405 - DNA, 25 bp, Homo sapien
acaaattctatagctggtcctgcac

SEQ ID NO: 5533406 - DNA, 25 bp, Homo sapien
ataataagatcacaaaaccagagca

SEQ ID NO: 5533407 - DNA, 25 bp, Homo sapien
tggatcggtttggtttagcagtaca

SEQ ID NO: 5533408 - DNA, 25 bp, Homo sapien
cccgccctcgcgtcacgtgacgtgg

SEQ ID NO: 5533409 - DNA, 25 bp, Homo sapien
cctcgggacccaccgaggcttccag

SEQ ID NO: 5533410 - DNA, 25 bp, Homo sapien
tgaagacagctgttgtaagcatttc

SEQ ID NO: 5533411 - DNA, 25 bp, Homo sapien
ggctcccacgctcgctcccgagcgc

SEQ ID NO: 5533412 - DNA, 25 bp, Homo sapien
cccacgctcgctcccgagcgcgtcc

SEQ ID NO: 5533413 - DNA, 25 bp, Homo sapien
tgtaagcatttcaggacaatgcacc

SEQ ID NO: 5533414 - DNA, 25 bp, Homo sapien
cgcgtccccgccctcgcgtcacgtg

SEQ ID NO: 5533415 - DNA, 25 bp, Homo sapien
tgcacgagttattgaagacagctgt

SEQ ID NO: 5533416 - DNA, 25 bp, Homo sapien
aacacatatttactgggcgcattct

SEQ ID NO: 5533417 - DNA, 25 bp, Homo sapien
actgggcgcattctatgcacgagtt

SEQ ID NO: 5533418 - DNA, 25 bp, Homo sapien
tgcacctcccttaacaccgagtccg

SEQ ID NO: 5533419 - DNA, 25 bp, Homo sapien
tgcaaagcacactcagatatcctcc

SEQ ID NO: 5533420 - DNA, 25 bp, Homo sapien
attaagccaagtatgcaaagcacac

SEQ ID NO: 5533421 - DNA, 25 bp, Homo sapien
ttgtctcaggtctgcagtgtgtcac

SEQ ID NO: 5533422 - DNA, 25 bp, Homo sapien
gaaagcaataatagagtgccgtggc

SEQ ID NO: 5533423 - DNA, 25 bp, Homo sapien
actcctcagactcaacaggcagctc

SEQ ID NO: 5533424 - DNA, 25 bp, Homo sapien
aaaagtcacccatagcaacaaggct

SEQ ID NO: 5533425 - DNA, 25 bp, Homo sapien
cgtggcgcgcctgcaaaatttatag

SEQ ID NO: 5533426 - DNA, 25 bp, Homo sapien
gcagtgtgtcacatgccagactcct

SEQ ID NO: 5533427 - DNA, 25 bp, Homo sapien
ttcacatggaaatcatcaggatcta

SEQ ID NO: 5533428 - DNA, 25 bp, Homo sapien
aaattcgtggttagattgatgtttc

SEQ ID NO: 5533429 - DNA, 25 bp, Homo sapien
caggcagctctgcacatccacaatc

SEQ ID NO: 5533430 - DNA, 25 bp, Homo sapien
gtgaaacaggtatgggatctcttta

SEQ ID NO: 5533431 - DNA, 25 bp, Homo sapien
taaccagctgtgatccaaaagtgta

SEQ ID NO: 5533432 - DNA, 25 bp, Homo sapien
tctggctcaggaactctgcccccta

SEQ ID NO: 5533433 - DNA, 25 bp, Homo sapien
tgtgggacacacaattagcctatgt

SEQ ID NO: 5533434 - DNA, 25 bp, Homo sapien
agctggacagtaagtcctctggctc

SEQ ID NO: 5533435 - DNA, 25 bp, Homo sapien
agtgtaaaagtgggttgagacctta

SEQ ID NO: 5533436 - DNA, 25 bp, Homo sapien
aaaaagagcagtacccagtgcatat

SEQ ID NO: 5533437 - DNA, 25 bp, Homo sapien
tacctgggaaatactccatggatgc

SEQ ID NO: 5533438 - DNA, 25 bp, Homo sapien
ctctggagaggttctcaaagctgga

SEQ ID NO: 5533439 - DNA, 25 bp, Homo sapien
tgtaattaacggcagtcagtgaaac

SEQ ID NO: 5533440 - DNA, 25 bp, Homo sapien
cctagcatcttgcagtgtgggacac

SEQ ID NO: 5533441 - DNA, 25 bp, Homo sapien
gggcaggcacttgctcctcgtagag

SEQ ID NO: 5533442 - DNA, 25 bp, Homo sapien
cagccttggccaaagataatgcaac

SEQ ID NO: 5533443 - DNA, 25 bp, Homo sapien
gataatgcaactttggcagggctgg

SEQ ID NO: 5533444 - DNA, 25 bp, Homo sapien
ccagggctgaaatcataaccgtcag

SEQ ID NO: 5533445 - DNA, 25 bp, Homo sapien
tagggaagcggcctctttgcattct

SEQ ID NO: 5533446 - DNA, 25 bp, Homo sapien
ggcctgtgaccttgagaacctcatc

SEQ ID NO: 5533447 - DNA, 25 bp, Homo sapien
gcagagtatatgggggcctctgcca

SEQ ID NO: 5533448 - DNA, 25 bp, Homo sapien
tttccttaggaactcaggcctgcgg

SEQ ID NO: 5533449 - DNA, 25 bp, Homo sapien
gaaatcataaccgtcaggcccagcc

SEQ ID NO: 5533450 - DNA, 25 bp, Homo sapien
ataggagctgtagcagagtatatgg

SEQ ID NO: 5533451 - DNA, 25 bp, Homo sapien
tcctccaagcctcttagggaagcgg

SEQ ID NO: 5533452 - DNA, 25 bp, Homo sapien
ttgtggactcctacctatatcgcta

SEQ ID NO: 5533453 - DNA, 25 bp, Homo sapien
aagaaaatctagaaagtatgctcat

SEQ ID NO: 5533454 - DNA, 25 bp, Homo sapien
ttctgttaaaagcgattgtgaaaac

SEQ ID NO: 5533455 - DNA, 25 bp, Homo sapien
tcagctaataacataagcaaatgcc

SEQ ID NO: 5533456 - DNA, 25 bp, Homo sapien
agcgattgtgaaaacttgaactcca

SEQ ID NO: 5533457 - DNA, 25 bp, Homo sapien
tatcgctaaggaatcattcagctaa

SEQ ID NO: 5533458 - DNA, 25 bp, Homo sapien
ttgaactccatgttaggatgactta

SEQ ID NO: 5533459 - DNA, 25 bp, Homo sapien
aattaccgagaaccccatccccata

SEQ ID NO: 5533460 - DNA, 25 bp, Homo sapien
ataattgcaagtcagctatactgtc

SEQ ID NO: 5533461 - DNA, 25 bp, Homo sapien
acttatttagtcaagaggagctctt

SEQ ID NO: 5533462 - DNA, 25 bp, Homo sapien
acccaacctcggcctacaaggacca

SEQ ID NO: 5533463 - DNA, 25 bp, Homo sapien
ccagaagatattacagattgcccaa

SEQ ID NO: 5533464 - DNA, 25 bp, Homo sapien
gtgcagcagaaattggatgatatca

SEQ ID NO: 5533465 - DNA, 25 bp, Homo sapien
tcaaggatcgaattaagagagaaat

SEQ ID NO: 5533466 - DNA, 25 bp, Homo sapien
gattgcccaaggactccagatactc

SEQ ID NO: 5533467 - DNA, 25 bp, Homo sapien
tgaggaaagtcacaacagataaaaa

SEQ ID NO: 5533468 - DNA, 25 bp, Homo sapien
atcaaagaaggagctgaaaatctga

SEQ ID NO: 5533469 - DNA, 25 bp, Homo sapien
tctgagaatgtgagtgctgttcaaa

SEQ ID NO: 5533470 - DNA, 25 bp, Homo sapien
gggagattctgctcacggaactgca

SEQ ID NO: 5533471 - DNA, 25 bp, Homo sapien
ttttcagatacaatggtgcagcaga

SEQ ID NO: 5533472 - DNA, 25 bp, Homo sapien
gaactacatcacaagctgcaggaat

SEQ ID NO: 5533473 - DNA, 25 bp, Homo sapien
aggtgcagagaatatgatacagatg

SEQ ID NO: 5533474 - DNA, 25 bp, Homo sapien
agggaccttccagccctgagggaag

SEQ ID NO: 5533475 - DNA, 25 bp, Homo sapien
tcagtataaagaaggcatgaactcc

SEQ ID NO: 5533476 - DNA, 25 bp, Homo sapien
ggccacctctcacacaaggacagac

SEQ ID NO: 5533477 - DNA, 25 bp, Homo sapien
agcttgcacaagagtctagttattc

SEQ ID NO: 5533478 - DNA, 25 bp, Homo sapien
aaggacagactacttccaagaggtc

SEQ ID NO: 5533479 - DNA, 25 bp, Homo sapien
catgttaagtcagctatgggtgggt

SEQ ID NO: 5533480 - DNA, 25 bp, Homo sapien
acaagaactaaaagatgaaagaaat

SEQ ID NO: 5533481 - DNA, 25 bp, Homo sapien
gctatgggtgggttgtcccacattc

SEQ ID NO: 5533482 - DNA, 25 bp, Homo sapien
ccattcactaagtgtagggagacat

SEQ ID NO: 5533483 - DNA, 25 bp, Homo sapien
ccctgagggaagttccacagttctt

SEQ ID NO: 5533484 - DNA, 25 bp, Homo sapien
gggtgttgggactgtcaaccattca

SEQ ID NO: 5533485 - DNA, 25 bp, Homo sapien
acacaagaaagctagcctgagttca

SEQ ID NO: 5533486 - DNA, 25 bp, Homo sapien
tacacaatacaaatcgcccacaaac

SEQ ID NO: 5533487 - DNA, 25 bp, Homo sapien
tctgtgcttgtgggactgaataatg

SEQ ID NO: 5533488 - DNA, 25 bp, Homo sapien
attcagtcgattgtaaaataaatgt

SEQ ID NO: 5533489 - DNA, 25 bp, Homo sapien
gagaggacatgatatactaaaagat

SEQ ID NO: 5533490 - DNA, 25 bp, Homo sapien
agctagcctgagttcaagtctgaaa

SEQ ID NO: 5533491 - DNA, 25 bp, Homo sapien
gtgggactgaataatgtaatctgcc

SEQ ID NO: 5533492 - DNA, 25 bp, Homo sapien
aaaatcacatcaggaaatacgtatt

SEQ ID NO: 5533493 - DNA, 25 bp, Homo sapien
attcaactgtagtccaaaaactgga

SEQ ID NO: 5533494 - DNA, 25 bp, Homo sapien
ctgccaattttgagaggacatgata

SEQ ID NO: 5533495 - DNA, 25 bp, Homo sapien
gttccccagttattgtacagtacac

SEQ ID NO: 5533496 - DNA, 25 bp, Homo sapien
tctctcactgagctggagtcctgaa

SEQ ID NO: 5533497 - DNA, 25 bp, Homo sapien
gcaccagtacagaaatatggacgcc

SEQ ID NO: 5533498 - DNA, 25 bp, Homo sapien
cgttatgatatcaggtgtcagggaa

SEQ ID NO: 5533499 - DNA, 25 bp, Homo sapien
cgaagcgatccctgaggtcaggttc

SEQ ID NO: 5533500 - DNA, 25 bp, Homo sapien
gagatgccaccagctttcatgaagc

SEQ ID NO: 5533501 - DNA, 25 bp, Homo sapien
caagcggcactcaagtcttcccagt

SEQ ID NO: 5533502 - DNA, 25 bp, Homo sapien
ggtgagtgcctgtgttacatgtcct

SEQ ID NO: 5533503 - DNA, 25 bp, Homo sapien
ttgcaaggagcagaaactctctcac

SEQ ID NO: 5533504 - DNA, 25 bp, Homo sapien
tcccagtgaagatgcttttggttgc

SEQ ID NO: 5533505 - DNA, 25 bp, Homo sapien
tggacgccaataccatgaccctctc

SEQ ID NO: 5533506 - DNA, 25 bp, Homo sapien
tttgcgagaaaccctcatggacaca

SEQ ID NO: 5533507 - DNA, 25 bp, Homo sapien
gattgggataatcaattccggacgc

SEQ ID NO: 5533508 - DNA, 25 bp, Homo sapien
aattccggacgcttggtaccgtgct

SEQ ID NO: 5533509 - DNA, 25 bp, Homo sapien
aatgcagtatcattggaacagggcg

SEQ ID NO: 5533510 - DNA, 25 bp, Homo sapien
aaccttgctaaaatgcagccagtac

SEQ ID NO: 5533511 - DNA, 25 bp, Homo sapien
tgaaaacacaccaagagctgacatc

SEQ ID NO: 5533512 - DNA, 25 bp, Homo sapien
cagggcgcacccttcacacactgat

SEQ ID NO: 5533513 - DNA, 25 bp, Homo sapien
gctacaacaggagcgataacaaaag

SEQ ID NO: 5533514 - DNA, 25 bp, Homo sapien
accgtgctcccacgaaaggctggat

SEQ ID NO: 5533515 - DNA, 25 bp, Homo sapien
acactgatggacacgctacaacagg

SEQ ID NO: 5533516 - DNA, 25 bp, Homo sapien
tgttacgcttcacggttgatcgttt

SEQ ID NO: 5533517 - DNA, 25 bp, Homo sapien
ttggatcccatcagatgttgtctcc

SEQ ID NO: 5533518 - DNA, 25 bp, Homo sapien
cccgtgcttcagccttgcagggaga

SEQ ID NO: 5533519 - DNA, 25 bp, Homo sapien
ggcaacacggttctgagtcaccttc

SEQ ID NO: 5533520 - DNA, 25 bp, Homo sapien
tcacagtctcccagagccgatcgtc

SEQ ID NO: 5533521 - DNA, 25 bp, Homo sapien
gctccaggcaacacggttctgagtc

SEQ ID NO: 5533522 - DNA, 25 bp, Homo sapien
aattttaggtttcatgataagcctc

SEQ ID NO: 5533523 - DNA, 25 bp, Homo sapien
atgataagcctcaagtgtagttgga

SEQ ID NO: 5533524 - DNA, 25 bp, Homo sapien
cagaggatgaaaacacttcacagtc

SEQ ID NO: 5533525 - DNA, 25 bp, Homo sapien
cactcaacaagacactaccagcacc

SEQ ID NO: 5533526 - DNA, 25 bp, Homo sapien
tttgtatgagagagaattcacactc

SEQ ID NO: 5533527 - DNA, 25 bp, Homo sapien
tcaccttctgacacgagctccctct

SEQ ID NO: 5533528 - DNA, 25 bp, Homo sapien
taccagcaccacgtttacagaggat

SEQ ID NO: 5533529 - DNA, 25 bp, Homo sapien
aggagtacccgcggactctgaaaag

SEQ ID NO: 5533530 - DNA, 25 bp, Homo sapien
cttttcagagtccgcgggtactcct

SEQ ID NO: 5533531 - DNA, 25 bp, Homo sapien
tgacaatgagccatcaagaatgggc

SEQ ID NO: 5533532 - DNA, 25 bp, Homo sapien
aaagagaagctcacagaaatgacaa

SEQ ID NO: 5533533 - DNA, 25 bp, Homo sapien
tacaggccattatgaaaagagaagc

SEQ ID NO: 5533534 - DNA, 25 bp, Homo sapien
agatgtctcagcagcagttatggga

SEQ ID NO: 5533535 - DNA, 25 bp, Homo sapien
gggagagatacaagctaacctagga

SEQ ID NO: 5533536 - DNA, 25 bp, Homo sapien
gttcaaaagacaataagccccactc

SEQ ID NO: 5533537 - DNA, 25 bp, Homo sapien
ccctgcctgtggcttgcaggggagg

SEQ ID NO: 5533538 - DNA, 25 bp, Homo sapien
aataaactggttgctttgggtgagg

SEQ ID NO: 5533539 - DNA, 25 bp, Homo sapien
gctacagaaatcacaggttgctgac

SEQ ID NO: 5533540 - DNA, 25 bp, Homo sapien
gggaggttgacgtcaaatgatatca

SEQ ID NO: 5533541 - DNA, 25 bp, Homo sapien
tatgtttaagaagatgagtgcctgg

SEQ ID NO: 5533542 - DNA, 25 bp, Homo sapien
agagactgaggtacccagaccctca

SEQ ID NO: 5533543 - DNA, 25 bp, Homo sapien
ttatcagagagacggattcagatca

SEQ ID NO: 5533544 - DNA, 25 bp, Homo sapien
tttctgcagagatccataatcccac

SEQ ID NO: 5533545 - DNA, 25 bp, Homo sapien
agaaatgggttaattggcatgcaga

SEQ ID NO: 5533546 - DNA, 25 bp, Homo sapien
gaaatgaacattatagggctgactc

SEQ ID NO: 5533547 - DNA, 25 bp, Homo sapien
cttcacaatggtggatttgggggaa

SEQ ID NO: 5533548 - DNA, 25 bp, Homo sapien
cagtgtgtcttagattgccaagtac

SEQ ID NO: 5533549 - DNA, 25 bp, Homo sapien
tgattgtgacatgcaaaatggattc

SEQ ID NO: 5533550 - DNA, 25 bp, Homo sapien
tagggctgactctgacaacatgtac

SEQ ID NO: 5533551 - DNA, 25 bp, Homo sapien
ctgccaacagcattcacgtagttac

SEQ ID NO: 5533552 - DNA, 25 bp, Homo sapien
tgacaacatgtacttggcaggggaa

SEQ ID NO: 5533553 - DNA, 25 bp, Homo sapien
cctgcagcaaacgttaatgagggct

SEQ ID NO: 5533554 - DNA, 25 bp, Homo sapien
aacaaaaggcagtatgtacctaaac

SEQ ID NO: 5533555 - DNA, 25 bp, Homo sapien
attaaatttaatgtgaggctatgtt

SEQ ID NO: 5533556 - DNA, 25 bp, Homo sapien
caaaaagctaaacaaaaggcagtat

SEQ ID NO: 5533557 - DNA, 25 bp, Homo sapien
tccatcaaatcaaaccagtcccccc

SEQ ID NO: 5533558 - DNA, 25 bp, Homo sapien
aatgagggctttgtcttaactaacc

SEQ ID NO: 5533559 - DNA, 25 bp, Homo sapien
tcagttagactgagtaaggaaaaca

SEQ ID NO: 5533560 - DNA, 25 bp, Homo sapien
aggctatgtttgttagttgggaggt

SEQ ID NO: 5533561 - DNA, 25 bp, Homo sapien
ctccgaagtgttattgaagttgcaa

SEQ ID NO: 5533562 - DNA, 25 bp, Homo sapien
tgaagttgcaaaattagcctcagtt

SEQ ID NO: 5533563 - DNA, 25 bp, Homo sapien
tgattgagttttccagcagcccctt

SEQ ID NO: 5533564 - DNA, 25 bp, Homo sapien
cttagttcttcaaagggaagcaact

SEQ ID NO: 5533565 - DNA, 25 bp, Homo sapien
cagacatcacaaatatggtgcagct

SEQ ID NO: 5533566 - DNA, 25 bp, Homo sapien
gtccctgctggattactggccctct

SEQ ID NO: 5533567 - DNA, 25 bp, Homo sapien
atgataccatttgaagccctcacac

SEQ ID NO: 5533568 - DNA, 25 bp, Homo sapien
tccttatgctgagatgttgaactta

SEQ ID NO: 5533569 - DNA, 25 bp, Homo sapien
gccctcacactgggcactggacaga

SEQ ID NO: 5533570 - DNA, 25 bp, Homo sapien
agaattgaagacttatgtggactcc

SEQ ID NO: 5533571 - DNA, 25 bp, Homo sapien
tgtgtacctttacccaagccaagtc

SEQ ID NO: 5533572 - DNA, 25 bp, Homo sapien
atggagtgtagtgttttcttagttc

SEQ ID NO: 5533573 - DNA, 25 bp, Homo sapien
aaaagaatacattatggagtgtagt

SEQ ID NO: 5533574 - DNA, 25 bp, Homo sapien
tgctggagtttaccgagcagcaggg

SEQ ID NO: 5533575 - DNA, 25 bp, Homo sapien
ggcaggatccatgaatgggatggaa

SEQ ID NO: 5533576 - DNA, 25 bp, Homo sapien
gggcctggcctaattaggtgagccc

SEQ ID NO: 5533577 - DNA, 25 bp, Homo sapien
cttgcacggaaaatctgccaatagc

SEQ ID NO: 5533578 - DNA, 25 bp, Homo sapien
tccatgagcttgcagcctcagtgct

SEQ ID NO: 5533579 - DNA, 25 bp, Homo sapien
tgagccccttcaaagagggtcggag

SEQ ID NO: 5533580 - DNA, 25 bp, Homo sapien
agcttttcctctgtgggcctggcct

SEQ ID NO: 5533581 - DNA, 25 bp, Homo sapien
agagattttgcaggtataaagtccc

SEQ ID NO: 5533582 - DNA, 25 bp, Homo sapien
cacgaacagtagtgactaagatggc

SEQ ID NO: 5533583 - DNA, 25 bp, Homo sapien
gaagctggagaacaatccacgaaca

SEQ ID NO: 5533584 - DNA, 25 bp, Homo sapien
cttcccttgagtatgggcaggatcc

SEQ ID NO: 5533585 - DNA, 25 bp, Homo sapien
agttatgctgtgtggcaaaagagat

SEQ ID NO: 5533586 - DNA, 25 bp, Homo sapien
tgatgaaataggtattgtgtaaatc

SEQ ID NO: 5533587 - DNA, 25 bp, Homo sapien
tctctcaagtgtagaggacaagaac

SEQ ID NO: 5533588 - DNA, 25 bp, Homo sapien
ctagagagagttgtaaattatatgt

SEQ ID NO: 5533589 - DNA, 25 bp, Homo sapien
tatgcgttaaacagctagttctctc

SEQ ID NO: 5533590 - DNA, 25 bp, Homo sapien
acaaagagaaactagaatgaagtct

SEQ ID NO: 5533591 - DNA, 25 bp, Homo sapien
actagaatgaagtctgaaaaacaga

SEQ ID NO: 5533592 - DNA, 25 bp, Homo sapien
tgtaatcacctacctagagagagtt

SEQ ID NO: 5533593 - DNA, 25 bp, Homo sapien
tagaggacaagaacttgtgtcagtt

SEQ ID NO: 5533594 - DNA, 25 bp, Homo sapien
cagcatgttatatagtgacactgaa

SEQ ID NO: 5533595 - DNA, 25 bp, Homo sapien
tttgggcaaaaatcatattggtaat

SEQ ID NO: 5533596 - DNA, 25 bp, Homo sapien
aaacagaatcaagtaagacagcatg

SEQ ID NO: 5533597 - DNA, 25 bp, Homo sapien
tctggtcagcagtcctcttacattc

SEQ ID NO: 5533598 - DNA, 25 bp, Homo sapien
ccctgggcccagttctgtcctaagc

SEQ ID NO: 5533599 - DNA, 25 bp, Homo sapien
ctgcggaagaaacatcacgacagag

SEQ ID NO: 5533600 - DNA, 25 bp, Homo sapien
gccttctagtccatcctctggggag

SEQ ID NO: 5533601 - DNA, 25 bp, Homo sapien
tcttgaaggccctctggtcagcagt

SEQ ID NO: 5533602 - DNA, 25 bp, Homo sapien
tgataagtgcagagcctgatctgac

SEQ ID NO: 5533603 - DNA, 25 bp, Homo sapien
gcccaggccttctagtccatcctct

SEQ ID NO: 5533604 - DNA, 25 bp, Homo sapien
gttctgtcctaagctgtggcaggag

SEQ ID NO: 5533605 - DNA, 25 bp, Homo sapien
caaaggacagagagaccctcttgaa

SEQ ID NO: 5533606 - DNA, 25 bp, Homo sapien
agtcctcttacattcaacaggcgca

SEQ ID NO: 5533607 - DNA, 25 bp, Homo sapien
gtgcagagcctgatctgaccacagc

SEQ ID NO: 5533608 - DNA, 25 bp, Homo sapien
ggtgtgtgtttcataaagacgaggt

SEQ ID NO: 5533609 - DNA, 25 bp, Homo sapien
ttgccacaaaggaccggctgataag

SEQ ID NO: 5533610 - DNA, 25 bp, Homo sapien
gttgccacaaaggaccggctgataa

SEQ ID NO: 5533611 - DNA, 25 bp, Homo sapien
tttattccaggtgtgtgtttcataa

SEQ ID NO: 5533612 - DNA, 25 bp, Homo sapien
tgtgtttcataaagacgaggtcctc

SEQ ID NO: 5533613 - DNA, 25 bp, Homo sapien
aaggacagctagtggcacatgcttt

SEQ ID NO: 5533614 - DNA, 25 bp, Homo sapien
ataaagacgaggtcctcaaggacag

SEQ ID NO: 5533615 - DNA, 25 bp, Homo sapien
agtggcacatgctttggtcaagaag

SEQ ID NO: 5533616 - DNA, 25 bp, Homo sapien
acagctagtggcacatgctttggtc

SEQ ID NO: 5533617 - DNA, 25 bp, Homo sapien
aagacgaggtcctcaaggacagcta

SEQ ID NO: 5533618 - DNA, 25 bp, Homo sapien
tcataaagacgaggtcctcaaggac

SEQ ID NO: 5533619 - DNA, 25 bp, Homo sapien
aaaacaagtgaaataccatgcgttc

SEQ ID NO: 5533620 - DNA, 25 bp, Homo sapien
acttgtacataaacagcaggcttcc

SEQ ID NO: 5533621 - DNA, 25 bp, Homo sapien
ctgactcagagtttggaacaagtag

SEQ ID NO: 5533622 - DNA, 25 bp, Homo sapien
ggcttagaaagcagagaaacaattc

SEQ ID NO: 5533623 - DNA, 25 bp, Homo sapien
tgaggtagctatgggtcacctgtac

SEQ ID NO: 5533624 - DNA, 25 bp, Homo sapien
gaaaacgcaaagacagtacgtctgc

SEQ ID NO: 5533625 - DNA, 25 bp, Homo sapien
ctgtgtctggattttatggctgtac

SEQ ID NO: 5533626 - DNA, 25 bp, Homo sapien
acattttagtgacagtgaggtagct

SEQ ID NO: 5533627 - DNA, 25 bp, Homo sapien
tctcaggtgaatggcttagaaagca

SEQ ID NO: 5533628 - DNA, 25 bp, Homo sapien
ccagtgatgctcaggaaagctggtg

SEQ ID NO: 5533629 - DNA, 25 bp, Homo sapien
aagctggtggctgttatcgtacatc

SEQ ID NO: 5533630 - DNA, 25 bp, Homo sapien
ccctgaggaaatacttgagccactc

SEQ ID NO: 5533631 - DNA, 25 bp, Homo sapien
ttgggtgtattaagcctcaggaaac

SEQ ID NO: 5533632 - DNA, 25 bp, Homo sapien
agtctcaggatataggctgaggtcc

SEQ ID NO: 5533633 - DNA, 25 bp, Homo sapien
aggctgaggtccagacatgaaaaaa

SEQ ID NO: 5533634 - DNA, 25 bp, Homo sapien
aaagccccagaaagcctatggcaaa

SEQ ID NO: 5533635 - DNA, 25 bp, Homo sapien
catgaaaaaataacacccacagtgg

SEQ ID NO: 5533636 - DNA, 25 bp, Homo sapien
cagggggcacagaagtattttccct

SEQ ID NO: 5533637 - DNA, 25 bp, Homo sapien
tgaccaaggttaaatgaagttagga

SEQ ID NO: 5533638 - DNA, 25 bp, Homo sapien
actgggattagggtatctggtatta

SEQ ID NO: 5533639 - DNA, 25 bp, Homo sapien
ttcagaactcccatagcccttgcta

SEQ ID NO: 5533640 - DNA, 25 bp, Homo sapien
ggaatgactcaatgtgaccaaggtt

SEQ ID NO: 5533641 - DNA, 25 bp, Homo sapien
attccaggatggcccacactgcatc

SEQ ID NO: 5533642 - DNA, 25 bp, Homo sapien
cagtcagtatcattccaggatggcc

SEQ ID NO: 5533643 - DNA, 25 bp, Homo sapien
gcagattccagtgatgtgaaagaac

SEQ ID NO: 5533644 - DNA, 25 bp, Homo sapien
gagaaacacagacacatttgaaaca

SEQ ID NO: 5533645 - DNA, 25 bp, Homo sapien
caggaataattaatcagtcagtatc

SEQ ID NO: 5533646 - DNA, 25 bp, Homo sapien
tagacagataaaattagcaaggaga

SEQ ID NO: 5533647 - DNA, 25 bp, Homo sapien
acattcctcggatgccacacggctt

SEQ ID NO: 5533648 - DNA, 25 bp, Homo sapien
acggcttaagccagtccataggtaa

SEQ ID NO: 5533649 - DNA, 25 bp, Homo sapien
aaaagtgaattgaacaatgaggtac

SEQ ID NO: 5533650 - DNA, 25 bp, Homo sapien
ataggtaaagcaagaattctccctt

SEQ ID NO: 5533651 - DNA, 25 bp, Homo sapien
aattagcaaggagattaaggtaaaa

SEQ ID NO: 5533652 - DNA, 25 bp, Homo sapien
tggcacttaaaaagtgaacagcact

SEQ ID NO: 5533653 - DNA, 25 bp, Homo sapien
caaccctcctgctgatagcaactgc

SEQ ID NO: 5533654 - DNA, 25 bp, Homo sapien
ccctgagtaagggatatgttgagat

SEQ ID NO: 5533655 - DNA, 25 bp, Homo sapien
aagatggatttaactctacagctag

SEQ ID NO: 5533656 - DNA, 25 bp, Homo sapien
actataaacaagtggaaagtagagg

SEQ ID NO: 5533657 - DNA, 25 bp, Homo sapien
gcacttcacatgataccgggatttc

SEQ ID NO: 5533658 - DNA, 25 bp, Homo sapien
tagcaactgcaaactctgaacaaat

SEQ ID NO: 5533659 - DNA, 25 bp, Homo sapien
gcacacagatatcagaccaaccctc

SEQ ID NO: 5533660 - DNA, 25 bp, Homo sapien
ggcaaagtagcacacagatatcaga

SEQ ID NO: 5533661 - DNA, 25 bp, Homo sapien
gtgaacagcactggctcaatgtctc

SEQ ID NO: 5533662 - DNA, 25 bp, Homo sapien
cagaaggggcagacttccttctgcc

SEQ ID NO: 5533663 - DNA, 25 bp, Homo sapien
gcatgcacaagctaagctcagaccc

SEQ ID NO: 5533664 - DNA, 25 bp, Homo sapien
atgcacaagctaagctcagaccctt

SEQ ID NO: 5533665 - DNA, 25 bp, Homo sapien
ttgcatgcacaagctaagctcagac

SEQ ID NO: 5533666 - DNA, 25 bp, Homo sapien
aaacaaaggagaaaaactagctgaa

SEQ ID NO: 5533667 - DNA, 25 bp, Homo sapien
ttgaagacatactgttccaatactc

SEQ ID NO: 5533668 - DNA, 25 bp, Homo sapien
aaaggagaaaaactagctgaacttc

SEQ ID NO: 5533669 - DNA, 25 bp, Homo sapien
aaccttgcatgcacaagctaagctc

SEQ ID NO: 5533670 - DNA, 25 bp, Homo sapien
gctcagacccttaaaaaccagatag

SEQ ID NO: 5533671 - DNA, 25 bp, Homo sapien
ttaaaaaccagatagaaattgacaa

SEQ ID NO: 5533672 - DNA, 25 bp, Homo sapien
agtcaaacaaaggagaaaaactagc

SEQ ID NO: 5533673 - DNA, 25 bp, Homo sapien
caaaggagaaaaactagctgaactt

SEQ ID NO: 5533674 - DNA, 25 bp, Homo sapien
gctggccctggagtctctatctttc

SEQ ID NO: 5533675 - DNA, 25 bp, Homo sapien
accagaggcaagactcaaccaaatg

SEQ ID NO: 5533676 - DNA, 25 bp, Homo sapien
aaccaaatggtgctgcatcctgacc

SEQ ID NO: 5533677 - DNA, 25 bp, Homo sapien
gacagcaactgtgcctctgctccca

SEQ ID NO: 5533678 - DNA, 25 bp, Homo sapien
caaccaggctcctacctggaggggc

SEQ ID NO: 5533679 - DNA, 25 bp, Homo sapien
tccccagacaaaggtgactgtcgca

SEQ ID NO: 5533680 - DNA, 25 bp, Homo sapien
ggaaggacaaggctttgagtatgtc

SEQ ID NO: 5533681 - DNA, 25 bp, Homo sapien
ttgccctggccctgatcctatctcc

SEQ ID NO: 5533682 - DNA, 25 bp, Homo sapien
ttctccggctgcaacactgcctatc

SEQ ID NO: 5533683 - DNA, 25 bp, Homo sapien
ttcaccaggtgcatccaagtggaag

SEQ ID NO: 5533684 - DNA, 25 bp, Homo sapien
caacccagaagaagtcggtctgtct

SEQ ID NO: 5533685 - DNA, 25 bp, Homo sapien
tgtgttcgtcgacccactatgtttg

SEQ ID NO: 5533686 - DNA, 25 bp, Homo sapien
caaacatagtgggtcgacgaacaca

SEQ ID NO: 5533687 - DNA, 25 bp, Homo sapien
cttcaagagagaacaaaaaatcttt

SEQ ID NO: 5533688 - DNA, 25 bp, Homo sapien
gcattgggattggtaaactagagac

SEQ ID NO: 5533689 - DNA, 25 bp, Homo sapien
gtcccagaagccctacatttgatga

SEQ ID NO: 5533690 - DNA, 25 bp, Homo sapien
atggtttgagaatcgtgtaactttc

SEQ ID NO: 5533691 - DNA, 25 bp, Homo sapien
aactttcatatgcctgggggacatg

SEQ ID NO: 5533692 - DNA, 25 bp, Homo sapien
tctcaggagaaaagatctaacacgg

SEQ ID NO: 5533693 - DNA, 25 bp, Homo sapien
ccaggccaactggaattatctctcc

SEQ ID NO: 5533694 - DNA, 25 bp, Homo sapien
acatttgatgaagtttgagtgggac

SEQ ID NO: 5533695 - DNA, 25 bp, Homo sapien
tctgccacatagccattgaacttaa

SEQ ID NO: 5533696 - DNA, 25 bp, Homo sapien
tctaacacggggatatggtttgaga

SEQ ID NO: 5533697 - DNA, 25 bp, Homo sapien
cgcctgggaagaatcaccatcctca

SEQ ID NO: 5533698 - DNA, 25 bp, Homo sapien
ggtgacaactccaaagtcagtctaa

SEQ ID NO: 5533699 - DNA, 25 bp, Homo sapien
ttagactgactttggagttgtcacc

SEQ ID NO: 5533700 - DNA, 25 bp, Homo sapien
cgcagtgcaccctgctgaaggatgg

SEQ ID NO: 5533701 - DNA, 25 bp, Homo sapien
gacccttgtgccagtagccatgcta

SEQ ID NO: 5533702 - DNA, 25 bp, Homo sapien
ggcagtggacctgatggctacactg

SEQ ID NO: 5533703 - DNA, 25 bp, Homo sapien
ggcacagcttctaagtgtcagagtc

SEQ ID NO: 5533704 - DNA, 25 bp, Homo sapien
aatgcagaccgaacagtagccttaa

SEQ ID NO: 5533705 - DNA, 25 bp, Homo sapien
atggggtgctcccttccagagcctg

SEQ ID NO: 5533706 - DNA, 25 bp, Homo sapien
catagacaaccgatggtgtggttat

SEQ ID NO: 5533707 - DNA, 25 bp, Homo sapien
aatcactacagagctaaggggtgag

SEQ ID NO: 5533708 - DNA, 25 bp, Homo sapien
ggtgagagcacactctgcctgttct

SEQ ID NO: 5533709 - DNA, 25 bp, Homo sapien
tacactgagcgacagatgcttcatc

SEQ ID NO: 5533710 - DNA, 25 bp, Homo sapien
aggggtccctgttgctcaggtccaa

SEQ ID NO: 5533711 - DNA, 25 bp, Homo sapien
ggctgccactgtggagcagttcgtt

SEQ ID NO: 5533712 - DNA, 25 bp, Homo sapien
cctcggcgtccaacctggacctggg

SEQ ID NO: 5533713 - DNA, 25 bp, Homo sapien
accttctgtaagagatgtggcgttc

SEQ ID NO: 5533714 - DNA, 25 bp, Homo sapien
aagaagcagaatagacacttcattg

SEQ ID NO: 5533715 - DNA, 25 bp, Homo sapien
cggcagaagcttacctccgagggtg

SEQ ID NO: 5533716 - DNA, 25 bp, Homo sapien
gtgccgccaagctcctgctagacac

SEQ ID NO: 5533717 - DNA, 25 bp, Homo sapien
cagttcgttttgaagtttgggcctc

SEQ ID NO: 5533718 - DNA, 25 bp, Homo sapien
agacacctttgaataccagggcctg

SEQ ID NO: 5533719 - DNA, 25 bp, Homo sapien
gaataccagggcctggtgaagcaca

SEQ ID NO: 5533720 - DNA, 25 bp, Homo sapien
gtttgggcctcagcagacttgcata

SEQ ID NO: 5533721 - DNA, 25 bp, Homo sapien
ctcacaaagcccagcataccttctg

SEQ ID NO: 5533722 - DNA, 25 bp, Homo sapien
tgaggggatatttcctgccacaggg

SEQ ID NO: 5533723 - DNA, 25 bp, Homo sapien
gtagaagggtatagaagacccatct

SEQ ID NO: 5533724 - DNA, 25 bp, Homo sapien
taatattggattccccactaggcac

SEQ ID NO: 5533725 - DNA, 25 bp, Homo sapien
tgttgcctctgctcttggtatcatc

SEQ ID NO: 5533726 - DNA, 25 bp, Homo sapien
attgcaaagattttatttagcggct

SEQ ID NO: 5533727 - DNA, 25 bp, Homo sapien
cagagttccgtgcataagggcaaat

SEQ ID NO: 5533728 - DNA, 25 bp, Homo sapien
tccccactaggcacataaatacatt

SEQ ID NO: 5533729 - DNA, 25 bp, Homo sapien
ctacaacacctcaaaaccagaaact

SEQ ID NO: 5533730 - DNA, 25 bp, Homo sapien
tatagaagacccatctgcaattccc

SEQ ID NO: 5533731 - DNA, 25 bp, Homo sapien
gcattctaggtcaggtgtctggatc

SEQ ID NO: 5533732 - DNA, 25 bp, Homo sapien
caggtgtctggatccggcacctgga

SEQ ID NO: 5533733 - DNA, 25 bp, Homo sapien
tacaacaccttccagagaggcggtc

SEQ ID NO: 5533734 - DNA, 25 bp, Homo sapien
ccggaggcgttttgaatggcctaca

SEQ ID NO: 5533735 - DNA, 25 bp, Homo sapien
caatagagcaaaacaaaccatggat

SEQ ID NO: 5533736 - DNA, 25 bp, Homo sapien
tgacccaccttcacaggcacgacgc

SEQ ID NO: 5533737 - DNA, 25 bp, Homo sapien
gcacttggtttgcgacactccggag

SEQ ID NO: 5533738 - DNA, 25 bp, Homo sapien
gagaaggaagccctctcaccctttg

SEQ ID NO: 5533739 - DNA, 25 bp, Homo sapien
ggtctgggcctgatttggtctcttt

SEQ ID NO: 5533740 - DNA, 25 bp, Homo sapien
tgccctcgacaagccatggtggggc

SEQ ID NO: 5533741 - DNA, 25 bp, Homo sapien
acaacctcagggcccctccgcactt

SEQ ID NO: 5533742 - DNA, 25 bp, Homo sapien
ttgacgtacacattgcacccaagta

SEQ ID NO: 5533743 - DNA, 25 bp, Homo sapien
gcctccctgaccccgtctgtcccac

SEQ ID NO: 5533744 - DNA, 25 bp, Homo sapien
tccttatccttggcagggtgagcga

SEQ ID NO: 5533745 - DNA, 25 bp, Homo sapien
aacagaagtgaatatgtcgcagtac

SEQ ID NO: 5533746 - DNA, 25 bp, Homo sapien
tcctgcaaacctagaggctctcagt

SEQ ID NO: 5533747 - DNA, 25 bp, Homo sapien
ggcagcacatgagctagacaactgt

SEQ ID NO: 5533748 - DNA, 25 bp, Homo sapien
aatttcccagggtcgataaagacta

SEQ ID NO: 5533749 - DNA, 25 bp, Homo sapien
catgggcctccaaactacaagaagt

SEQ ID NO: 5533750 - DNA, 25 bp, Homo sapien
tccctcccaagaatgactcacccac

SEQ ID NO: 5533751 - DNA, 25 bp, Homo sapien
gtctcccagtgctgggtggaaagta

SEQ ID NO: 5533752 - DNA, 25 bp, Homo sapien
caagaagtacacaggccccaagtta

SEQ ID NO: 5533753 - DNA, 25 bp, Homo sapien
aaacctaagaacagccaagtgcatt

SEQ ID NO: 5533754 - DNA, 25 bp, Homo sapien
cacctgcaggcctccaacagaagtg

SEQ ID NO: 5533755 - DNA, 25 bp, Homo sapien
ccgtgtttcaaatgtatgcagatgc

SEQ ID NO: 5533756 - DNA, 25 bp, Homo sapien
ggagataccgattgaggggatttta

SEQ ID NO: 5533757 - DNA, 25 bp, Homo sapien
ttaatggcccaatgtacaccagccc

SEQ ID NO: 5533758 - DNA, 25 bp, Homo sapien
cattccacctgtagaccatgggctc

SEQ ID NO: 5533759 - DNA, 25 bp, Homo sapien
atacatgcttgaaaacactggaaat

SEQ ID NO: 5533760 - DNA, 25 bp, Homo sapien
ggggccttccagatgacacaagtca

SEQ ID NO: 5533761 - DNA, 25 bp, Homo sapien
acactggaaatacctgatgtgagag

SEQ ID NO: 5533762 - DNA, 25 bp, Homo sapien
gaatcttcaaggaattactagcacc

SEQ ID NO: 5533763 - DNA, 25 bp, Homo sapien
aagtcattattagcaaggaacaagc

SEQ ID NO: 5533764 - DNA, 25 bp, Homo sapien
gctcactcccaagtggtggtcattc

SEQ ID NO: 5533765 - DNA, 25 bp, Homo sapien
gccctatgctgagcacaggaaccag

SEQ ID NO: 5533766 - DNA, 25 bp, Homo sapien
ggttacttagcagctccaggaacag

SEQ ID NO: 5533767 - DNA, 25 bp, Homo sapien
agctcactgtgcagtcccagcagca

SEQ ID NO: 5533768 - DNA, 25 bp, Homo sapien
aacagctcactgtgcagtcccagca

SEQ ID NO: 5533769 - DNA, 25 bp, Homo sapien
acacgccgtacttggtggccagtct

SEQ ID NO: 5533770 - DNA, 25 bp, Homo sapien
tgatgaacttgtcgaagacagcggc

SEQ ID NO: 5533771 - DNA, 25 bp, Homo sapien
gctccccgcagtacaggtacctgat

SEQ ID NO: 5533772 - DNA, 25 bp, Homo sapien
gaatacccggacctcatcggtgccc

SEQ ID NO: 5533773 - DNA, 25 bp, Homo sapien
ctcgctctggttacttagcagctcc

SEQ ID NO: 5533774 - DNA, 25 bp, Homo sapien
cggtcagctccccgcagtacaggta

SEQ ID NO: 5533775 - DNA, 25 bp, Homo sapien
gcgtggaatacccggacctcatcgg

SEQ ID NO: 5533776 - DNA, 25 bp, Homo sapien
ggtacctgatgaacttgtcgaagac

SEQ ID NO: 5533777 - DNA, 25 bp, Homo sapien
ctctgctaaagtaactcatagatcc

SEQ ID NO: 5533778 - DNA, 25 bp, Homo sapien
atacctaaaaataagtctgcacatc

SEQ ID NO: 5533779 - DNA, 25 bp, Homo sapien
gcttacctcagtgtgttgttaaatc

SEQ ID NO: 5533780 - DNA, 25 bp, Homo sapien
gtaatcagtgagatgatgaattatc

SEQ ID NO: 5533781 - DNA, 25 bp, Homo sapien
tccacacatttgaagacacaagatt

SEQ ID NO: 5533782 - DNA, 25 bp, Homo sapien
ttcacattggggtcatcattcagca

SEQ ID NO: 5533783 - DNA, 25 bp, Homo sapien
gtcaacatagtgcacaattcaaatc

SEQ ID NO: 5533784 - DNA, 25 bp, Homo sapien
cattagccccgaaatgtgggttcaa

SEQ ID NO: 5533785 - DNA, 25 bp, Homo sapien
aggtaagtgtttccaggtggtgtcc

SEQ ID NO: 5533786 - DNA, 25 bp, Homo sapien
actcatagatccagaaataaacact

SEQ ID NO: 5533787 - DNA, 25 bp, Homo sapien
cagcaagatgctaatcattgtgatt

SEQ ID NO: 5533788 - DNA, 25 bp, Homo sapien
ctggaaaactctactgtacacctct

SEQ ID NO: 5533789 - DNA, 25 bp, Homo sapien
aggagacaggtgggttcttatattt

SEQ ID NO: 5533790 - DNA, 25 bp, Homo sapien
gctttacgtgctaggtgtggtttct

SEQ ID NO: 5533791 - DNA, 25 bp, Homo sapien
acaaaaacagttagcaaagtggtat

SEQ ID NO: 5533792 - DNA, 25 bp, Homo sapien
cttcctctgcatcgaaccagcgacc

SEQ ID NO: 5533793 - DNA, 25 bp, Homo sapien
cccaagacggacctccacatcggga

SEQ ID NO: 5533794 - DNA, 25 bp, Homo sapien
gcgacctgggtgcctccccacccaa

SEQ ID NO: 5533795 - DNA, 25 bp, Homo sapien
agccgcagccaccttctccccgaag

SEQ ID NO: 5533796 - DNA, 25 bp, Homo sapien
ttgcattttaacaggagacaggtgg

SEQ ID NO: 5533797 - DNA, 25 bp, Homo sapien
gttgtgatactgcatgtcatgtagc

SEQ ID NO: 5533798 - DNA, 25 bp, Homo sapien
ttttcagggctttacgtgctaggtg

SEQ ID NO: 5533799 - DNA, 25 bp, Homo sapien
tgggcaaaggcactaatcaaaactg

SEQ ID NO: 5533800 - DNA, 25 bp, Homo sapien
gccaagcagccatggatggattact

SEQ ID NO: 5533801 - DNA, 25 bp, Homo sapien
agagttcttggaaaacaatacgggc

SEQ ID NO: 5533802 - DNA, 25 bp, Homo sapien
acagaatggccacagcttgaagatg

SEQ ID NO: 5533803 - DNA, 25 bp, Homo sapien
tgcccagtctgctagttcttaggtc

SEQ ID NO: 5533804 - DNA, 25 bp, Homo sapien
aagttcaatgagacacaagggattt

SEQ ID NO: 5533805 - DNA, 25 bp, Homo sapien
cccataaaggaacaaaatattctgc

SEQ ID NO: 5533806 - DNA, 25 bp, Homo sapien
actgtgaaaggaaaggtttgaatta

SEQ ID NO: 5533807 - DNA, 25 bp, Homo sapien
acaacatgtgatttagcgtagtctg

SEQ ID NO: 5533808 - DNA, 25 bp, Homo sapien
gaattaaggaaaaagttcaatgaga

SEQ ID NO: 5533809 - DNA, 25 bp, Homo sapien
tacatgtaagttgcttgctgtgtcc

SEQ ID NO: 5533810 - DNA, 25 bp, Homo sapien
tgacccacagccatccttgcagctc

SEQ ID NO: 5533811 - DNA, 25 bp, Homo sapien
cagctctgcgccataactggggaga

SEQ ID NO: 5533812 - DNA, 25 bp, Homo sapien
acaacgtgccagaactggatccgga

SEQ ID NO: 5533813 - DNA, 25 bp, Homo sapien
cgcaacagctgcggcgttacaaaca

SEQ ID NO: 5533814 - DNA, 25 bp, Homo sapien
ttcacccaagtgcatgactgcggga

SEQ ID NO: 5533815 - DNA, 25 bp, Homo sapien
aggaatgactttggtcgcagcctct

SEQ ID NO: 5533816 - DNA, 25 bp, Homo sapien
ggtcagccacggagaaattaatgac

SEQ ID NO: 5533817 - DNA, 25 bp, Homo sapien
aatttgaatccgaagcagtgtcctt

SEQ ID NO: 5533818 - DNA, 25 bp, Homo sapien
ttccccctcgcaacagctgcggcgt

SEQ ID NO: 5533819 - DNA, 25 bp, Homo sapien
gacaagtcacaggtgcaacaacgtg

SEQ ID NO: 5533820 - DNA, 25 bp, Homo sapien
taattccagccacaaggtaggcagc

SEQ ID NO: 5533821 - DNA, 25 bp, Homo sapien
tcctagtcccccacatccaaagccc

SEQ ID NO: 5533822 - DNA, 25 bp, Homo sapien
actaaggatggctgattccccaagg

SEQ ID NO: 5533823 - DNA, 25 bp, Homo sapien
atccaaagcccctcagcctgccttg

SEQ ID NO: 5533824 - DNA, 25 bp, Homo sapien
ctgctggaggaacacgtcatatcag

SEQ ID NO: 5533825 - DNA, 25 bp, Homo sapien
ccttgcagaccaatgggctccatgt

SEQ ID NO: 5533826 - DNA, 25 bp, Homo sapien
aggattgtccctatgtcttggcccc

SEQ ID NO: 5533827 - DNA, 25 bp, Homo sapien
gccgaaaggatgtcactaaggatgg

SEQ ID NO: 5533828 - DNA, 25 bp, Homo sapien
ctccccacgacacccatgagccgaa

SEQ ID NO: 5533829 - DNA, 25 bp, Homo sapien
cgtcatatcagatgagaggaagatg

SEQ ID NO: 5533830 - DNA, 25 bp, Homo sapien
tgtgcagactgatgattttatatgt

SEQ ID NO: 5533831 - DNA, 25 bp, Homo sapien
gcagaaacctgcaccaaggattgtc

SEQ ID NO: 5533832 - DNA, 25 bp, Homo sapien
agtgtgcaaatactgaaacctgttt

SEQ ID NO: 5533833 - DNA, 25 bp, Homo sapien
gaggctcagaaaaatagatagagca

SEQ ID NO: 5533834 - DNA, 25 bp, Homo sapien
cgttctaatgctgtaagacctctac

SEQ ID NO: 5533835 - DNA, 25 bp, Homo sapien
aggcaaagtttagctcgtctggttt

SEQ ID NO: 5533836 - DNA, 25 bp, Homo sapien
aatatctattttgaggggttgttct

SEQ ID NO: 5533837 - DNA, 25 bp, Homo sapien
atagatagagcacatgtaaacttcc

SEQ ID NO: 5533838 - DNA, 25 bp, Homo sapien
tagacacactaggcaaagtttagct

SEQ ID NO: 5533839 - DNA, 25 bp, Homo sapien
cctgcgtctcctaaaaaatggttgt

SEQ ID NO: 5533840 - DNA, 25 bp, Homo sapien
gggttgttctcagcccaccattggt

SEQ ID NO: 5533841 - DNA, 25 bp, Homo sapien
tagatggtctatacagatacgtgaa

SEQ ID NO: 5533842 - DNA, 25 bp, Homo sapien
tatgccctggtattcctgcgtctcc

SEQ ID NO: 5533843 - DNA, 25 bp, Homo sapien
ccttccctatccggctgctggagcc

SEQ ID NO: 5533844 - DNA, 25 bp, Homo sapien
ggagaggtctcaagatgcccttggt

SEQ ID NO: 5533845 - DNA, 25 bp, Homo sapien
gagctaggatgcctcgcctcttcct

SEQ ID NO: 5533846 - DNA, 25 bp, Homo sapien
tgtaccgctcaccacatgagaagtg

SEQ ID NO: 5533847 - DNA, 25 bp, Homo sapien
tgtgctctgctcacctgtaccgctc

SEQ ID NO: 5533848 - DNA, 25 bp, Homo sapien
cccttggtgcttctgattggccagg

SEQ ID NO: 5533849 - DNA, 25 bp, Homo sapien
gttgtaatggctagaaatcttagac

SEQ ID NO: 5533850 - DNA, 25 bp, Homo sapien
tgcagctgttgcagccttccggcct

SEQ ID NO: 5533851 - DNA, 25 bp, Homo sapien
gggctccttcctgttactgactcac

SEQ ID NO: 5533852 - DNA, 25 bp, Homo sapien
ctgttgcagccttccggcctgaggg

SEQ ID NO: 5533853 - DNA, 25 bp, Homo sapien
taatggcattgccgcagtccaaggg

SEQ ID NO: 5533854 - DNA, 25 bp, Homo sapien
tgcttgtgagagatgcttgctttcc

SEQ ID NO: 5533855 - DNA, 25 bp, Homo sapien
aaacaaaggcctcgagccagcttct

SEQ ID NO: 5533856 - DNA, 25 bp, Homo sapien
tgataacaccaagagagacccaaat

SEQ ID NO: 5533857 - DNA, 25 bp, Homo sapien
gtgggaaagttgaaacgatatgtgc

SEQ ID NO: 5533858 - DNA, 25 bp, Homo sapien
agtaagggatcatgcctcatcaaac

SEQ ID NO: 5533859 - DNA, 25 bp, Homo sapien
tctctaagaaatataaatcaaggtc

SEQ ID NO: 5533860 - DNA, 25 bp, Homo sapien
actaatacttgggtgggaaagttga

SEQ ID NO: 5533861 - DNA, 25 bp, Homo sapien
taatgactcttggcagaaagcaaaa

SEQ ID NO: 5533862 - DNA, 25 bp, Homo sapien
acagtaatgaaacaaaggcctcgag

SEQ ID NO: 5533863 - DNA, 25 bp, Homo sapien
aatcttggagattaaatgttgcccc

SEQ ID NO: 5533864 - DNA, 25 bp, Homo sapien
aaatcgcagccttgggcaattaatc

SEQ ID NO: 5533865 - DNA, 25 bp, Homo sapien
acgaacctgaaggccaaagtgttga

SEQ ID NO: 5533866 - DNA, 25 bp, Homo sapien
gatgccaagaatgatctcaagagca

SEQ ID NO: 5533867 - DNA, 25 bp, Homo sapien
catagccgatgactactcagatccc

SEQ ID NO: 5533868 - DNA, 25 bp, Homo sapien
cggtcccagcataaaggtatccagt

SEQ ID NO: 5533869 - DNA, 25 bp, Homo sapien
aagcctatcaaacatgggagccctg

SEQ ID NO: 5533870 - DNA, 25 bp, Homo sapien
gagtgctggctacatggagccctat

SEQ ID NO: 5533871 - DNA, 25 bp, Homo sapien
gagccctgagttctgcgggatccta

SEQ ID NO: 5533872 - DNA, 25 bp, Homo sapien
ggaaagtgtccggtcccagcataaa

SEQ ID NO: 5533873 - DNA, 25 bp, Homo sapien
tgacagaatttcagaggcaggaaag

SEQ ID NO: 5533874 - DNA, 25 bp, Homo sapien
aagcggcagtcatccccctcacctt

SEQ ID NO: 5533875 - DNA, 25 bp, Homo sapien
gcacagtttaatggcaacgagaagc

SEQ ID NO: 5533876 - DNA, 25 bp, Homo sapien
gtatagcatttaagaggacaggctc

SEQ ID NO: 5533877 - DNA, 25 bp, Homo sapien
acctcagccacctgggacttcgacg

SEQ ID NO: 5533878 - DNA, 25 bp, Homo sapien
gcctggtgccagtgctgaacactgc

SEQ ID NO: 5533879 - DNA, 25 bp, Homo sapien
tgcactcacagcttggtaaggcagt

SEQ ID NO: 5533880 - DNA, 25 bp, Homo sapien
cctccttactgtggaccaggcctgg

SEQ ID NO: 5533881 - DNA, 25 bp, Homo sapien
actggctgtgaatctttgggcaggt

SEQ ID NO: 5533882 - DNA, 25 bp, Homo sapien
tcgtcgcgccctctcctagccacac

SEQ ID NO: 5533883 - DNA, 25 bp, Homo sapien
gacaggctctagaggcagatacctg

SEQ ID NO: 5533884 - DNA, 25 bp, Homo sapien
tctctccagagtcagtggcctttcc

SEQ ID NO: 5533885 - DNA, 25 bp, Homo sapien
gagacaacgataacgaaaccttggc

SEQ ID NO: 5533886 - DNA, 25 bp, Homo sapien
cagaactgcatgagatctccgggca

SEQ ID NO: 5533887 - DNA, 25 bp, Homo sapien
aggagactgatcccgcgtagtccaa

SEQ ID NO: 5533888 - DNA, 25 bp, Homo sapien
tcatctagaatgacggcgattccga

SEQ ID NO: 5533889 - DNA, 25 bp, Homo sapien
gtttcttaatcagtgccatgccagg

SEQ ID NO: 5533890 - DNA, 25 bp, Homo sapien
gctgcctctgaagctcgcttggtcc

SEQ ID NO: 5533891 - DNA, 25 bp, Homo sapien
ggcaaataactgatgaccaggcggc

SEQ ID NO: 5533892 - DNA, 25 bp, Homo sapien
gggtgcatctgtcgtgagaattccc

SEQ ID NO: 5533893 - DNA, 25 bp, Homo sapien
gtagtccaaggcattggctcccctg

SEQ ID NO: 5533894 - DNA, 25 bp, Homo sapien
gctgggaaggtaattgaatactcga

SEQ ID NO: 5533895 - DNA, 25 bp, Homo sapien
gttctgctccgtgagtgtctggcac

SEQ ID NO: 5533896 - DNA, 25 bp, Homo sapien
cgggaaggtgtagatcatctagaat

SEQ ID NO: 5533897 - DNA, 25 bp, Homo sapien
tctgtgacaggcccatcaattttga

SEQ ID NO: 5533898 - DNA, 25 bp, Homo sapien
atgggttagatgccaagctcactac

SEQ ID NO: 5533899 - DNA, 25 bp, Homo sapien
gtgataggcatagggacacattact

SEQ ID NO: 5533900 - DNA, 25 bp, Homo sapien
atgtgtagaggtaacagcccttatc

SEQ ID NO: 5533901 - DNA, 25 bp, Homo sapien
cattactcaaatggatctggaatcc

SEQ ID NO: 5533902 - DNA, 25 bp, Homo sapien
gtgactgtgtggctgtgatttaatc

SEQ ID NO: 5533903 - DNA, 25 bp, Homo sapien
gtttaattggtgactgtgtggctgt

SEQ ID NO: 5533904 - DNA, 25 bp, Homo sapien
taagtttccagggagctatgggtta

SEQ ID NO: 5533905 - DNA, 25 bp, Homo sapien
taattgccaacagcacccccagctc

SEQ ID NO: 5533906 - DNA, 25 bp, Homo sapien
tttggagataagtgcaccagagtta

SEQ ID NO: 5533907 - DNA, 25 bp, Homo sapien
cctgggaactggctgccattattgt

SEQ ID NO: 5533908 - DNA, 25 bp, Homo sapien
tggatgagtggctataatggacata

SEQ ID NO: 5533909 - DNA, 25 bp, Homo sapien
cggtctgtctacgtgggtcgtcgac

SEQ ID NO: 5533910 - DNA, 25 bp, Homo sapien
gtcgacgacccacgtagacagaccg

SEQ ID NO: 5533911 - DNA, 25 bp, Homo sapien
aaaagcgaagtcctctatatcaccc

SEQ ID NO: 5533912 - DNA, 25 bp, Homo sapien
aggacagaggtctcagctcacatca

SEQ ID NO: 5533913 - DNA, 25 bp, Homo sapien
gatcacctgaattagggcaagtccc

SEQ ID NO: 5533914 - DNA, 25 bp, Homo sapien
ctatctagaatccacggggtctggg

SEQ ID NO: 5533915 - DNA, 25 bp, Homo sapien
cacccacaaggtccttcgggaacta

SEQ ID NO: 5533916 - DNA, 25 bp, Homo sapien
tcccagagtcaaatttgggggtgcc

SEQ ID NO: 5533917 - DNA, 25 bp, Homo sapien
ctcagggcctttgcgcatgccattc

SEQ ID NO: 5533918 - DNA, 25 bp, Homo sapien
accagataggatttggctgagtctc

SEQ ID NO: 5533919 - DNA, 25 bp, Homo sapien
gaacacatgggcacatttcagcctc

SEQ ID NO: 5533920 - DNA, 25 bp, Homo sapien
cacctcactcagagcaaaagcgaag

SEQ ID NO: 5533921 - DNA, 25 bp, Homo sapien
aggcacaccagcatcgctgcatttc

SEQ ID NO: 5533922 - DNA, 25 bp, Homo sapien
ttatggttcttgaagactgatgtcc

SEQ ID NO: 5533923 - DNA, 25 bp, Homo sapien
ttcccaaacactggttactgcagca

SEQ ID NO: 5533924 - DNA, 25 bp, Homo sapien
agactgatgtcctttcccaaacact

SEQ ID NO: 5533925 - DNA, 25 bp, Homo sapien
cctcgcttactgtcatgtgcactac

SEQ ID NO: 5533926 - DNA, 25 bp, Homo sapien
gtagattgtctgaataggcatcctc

SEQ ID NO: 5533927 - DNA, 25 bp, Homo sapien
aatagtttctagaatggcaaaattg

SEQ ID NO: 5533928 - DNA, 25 bp, Homo sapien
actgcagcagcatttttaatgtgta

SEQ ID NO: 5533929 - DNA, 25 bp, Homo sapien
caaattgcaatttggaaacctactg

SEQ ID NO: 5533930 - DNA, 25 bp, Homo sapien
tcttcaatatgtgatggtacaggaa

SEQ ID NO: 5533931 - DNA, 25 bp, Homo sapien
tacccaaaacctcgcttactgtcat

SEQ ID NO: 5533932 - DNA, 25 bp, Homo sapien
aaacctactgtattgaaattctgtc

SEQ ID NO: 5533933 - DNA, 25 bp, Homo sapien
tctgtgccctagtcctagacacaca

SEQ ID NO: 5533934 - DNA, 25 bp, Homo sapien
ccctggctgaagagtctgctttaaa

SEQ ID NO: 5533935 - DNA, 25 bp, Homo sapien
ccattcttgccctctggagaagtgg

SEQ ID NO: 5533936 - DNA, 25 bp, Homo sapien
aacaagacagatgagctcctgcctg

SEQ ID NO: 5533937 - DNA, 25 bp, Homo sapien
gagcaggggtttttaggcactttca

SEQ ID NO: 5533938 - DNA, 25 bp, Homo sapien
caggtgttcttcgttctggcccttc

SEQ ID NO: 5533939 - DNA, 25 bp, Homo sapien
agagagaagcagtagatacactcct

SEQ ID NO: 5533940 - DNA, 25 bp, Homo sapien
agacacacattagactcagggagtt

SEQ ID NO: 5533941 - DNA, 25 bp, Homo sapien
aagtggttcctgcagtgtagagata

SEQ ID NO: 5533942 - DNA, 25 bp, Homo sapien
ctttcagtattctcaggtgttcttc

SEQ ID NO: 5533943 - DNA, 25 bp, Homo sapien
aagagtctgctttaaatgggaaaac

SEQ ID NO: 5533944 - DNA, 25 bp, Homo sapien
attaaacgtgtcagcattagtattt

SEQ ID NO: 5533945 - DNA, 25 bp, Homo sapien
tgttgttaattgaatgtaaaggtag

SEQ ID NO: 5533946 - DNA, 25 bp, Homo sapien
tacgtacctaatttactgcagtggc

SEQ ID NO: 5533947 - DNA, 25 bp, Homo sapien
tacagatttagaaataaaatgctga

SEQ ID NO: 5533948 - DNA, 25 bp, Homo sapien
aagcacattgattagtaggcctctc

SEQ ID NO: 5533949 - DNA, 25 bp, Homo sapien
aaactgctggaatttaaaacacaat

SEQ ID NO: 5533950 - DNA, 25 bp, Homo sapien
ttagtagttacattaagagattacc

SEQ ID NO: 5533951 - DNA, 25 bp, Homo sapien
ctcccatactcagataaagaaaaat

SEQ ID NO: 5533952 - DNA, 25 bp, Homo sapien
tgaatgtaaaggtagtttgtttctc

SEQ ID NO: 5533953 - DNA, 25 bp, Homo sapien
taagagattaccatgtctcaagagc

SEQ ID NO: 5533954 - DNA, 25 bp, Homo sapien
ctcccccactctgaggcgctctgca

SEQ ID NO: 5533955 - DNA, 25 bp, Homo sapien
gtccaggtcatcggactccacctcc

SEQ ID NO: 5533956 - DNA, 25 bp, Homo sapien
tgagcaggtgggtgttttttacctc

SEQ ID NO: 5533957 - DNA, 25 bp, Homo sapien
tttagttccaggccctacgagcagt

SEQ ID NO: 5533958 - DNA, 25 bp, Homo sapien
gtggctcctacctggctcaggtacc

SEQ ID NO: 5533959 - DNA, 25 bp, Homo sapien
ccacaccctcccagttccgcctccg

SEQ ID NO: 5533960 - DNA, 25 bp, Homo sapien
cctctgcctccgtcacaggtgagtt

SEQ ID NO: 5533961 - DNA, 25 bp, Homo sapien
acctcctctcctaggtgagtggcgg

SEQ ID NO: 5533962 - DNA, 25 bp, Homo sapien
acctcacctggtagactcagtctcg

SEQ ID NO: 5533963 - DNA, 25 bp, Homo sapien
gttcctgggccagtctcccgaaatc

SEQ ID NO: 5533964 - DNA, 25 bp, Homo sapien
ctcccgaaatcaaaaggcgctccgg

SEQ ID NO: 5533965 - DNA, 25 bp, Homo sapien
acaggtgagtttagttccaggccct

SEQ ID NO: 5533966 - DNA, 25 bp, Homo sapien
aggtcgacatcaacggtaaaggtca

SEQ ID NO: 5533967 - DNA, 25 bp, Homo sapien
tgacctttaccgttgatgtcgacct

SEQ ID NO: 5533968 - DNA, 25 bp, Homo sapien
cctcgtggggtgtaagacccacttg

SEQ ID NO: 5533969 - DNA, 25 bp, Homo sapien
tgaggccctggagcttcagtgcctc

SEQ ID NO: 5533970 - DNA, 25 bp, Homo sapien
gggaacgactgtcccgagcaagata

SEQ ID NO: 5533971 - DNA, 25 bp, Homo sapien
gataggctcccccagcgctcctgga

SEQ ID NO: 5533972 - DNA, 25 bp, Homo sapien
tcctacgtgttggccctgaggccct

SEQ ID NO: 5533973 - DNA, 25 bp, Homo sapien
cggtcactgtgcgtggctcactttt

SEQ ID NO: 5533974 - DNA, 25 bp, Homo sapien
acttcaaccacgtggagcttccatg

SEQ ID NO: 5533975 - DNA, 25 bp, Homo sapien
gacccacttgctgttgcccccggac

SEQ ID NO: 5533976 - DNA, 25 bp, Homo sapien
gggagaagattaacatcctgtcggg

SEQ ID NO: 5533977 - DNA, 25 bp, Homo sapien
gcagaagtgtgcctcctacgtgttg

SEQ ID NO: 5533978 - DNA, 25 bp, Homo sapien
gcttcagtgcctcactcacaccggt

SEQ ID NO: 5533979 - DNA, 25 bp, Homo sapien
ctcctcaccccccagagggaagcag

SEQ ID NO: 5533980 - DNA, 25 bp, Homo sapien
tgctcctcaggtcagtcccctggac

SEQ ID NO: 5533981 - DNA, 25 bp, Homo sapien
agtcccctggacatgcaggcgctta

SEQ ID NO: 5533982 - DNA, 25 bp, Homo sapien
catcccaacactgctcttgccgccc

SEQ ID NO: 5533983 - DNA, 25 bp, Homo sapien
tgtgtgagctgcacgagaactttca

SEQ ID NO: 5533984 - DNA, 25 bp, Homo sapien
gagccttgaggtccaacctctggtc

SEQ ID NO: 5533985 - DNA, 25 bp, Homo sapien
gccagacccctcttggaagggactc

SEQ ID NO: 5533986 - DNA, 25 bp, Homo sapien
actgccttgtcgtcacgtgagaaaa

SEQ ID NO: 5533987 - DNA, 25 bp, Homo sapien
gtggtgtgaatgatgccacagcacc

SEQ ID NO: 5533988 - DNA, 25 bp, Homo sapien
ctgaattcagagcgttaagagaagc

SEQ ID NO: 5533989 - DNA, 25 bp, Homo sapien
gcaggcgcttagcactgcacggtga

SEQ ID NO: 5533990 - DNA, 25 bp, Homo sapien
ttcccgtacacaacaacagcatatt

SEQ ID NO: 5533991 - DNA, 25 bp, Homo sapien
atagtcatttgggttgattaccatc

SEQ ID NO: 5533992 - DNA, 25 bp, Homo sapien
tgtcctgtgccccatctagtacctt

SEQ ID NO: 5533993 - DNA, 25 bp, Homo sapien
ctagtaccttaagacaatcagtgat

SEQ ID NO: 5533994 - DNA, 25 bp, Homo sapien
tatatagaggactgtctcattctgc

SEQ ID NO: 5533995 - DNA, 25 bp, Homo sapien
cagaagaaacaataagaagtaaatc

SEQ ID NO: 5533996 - DNA, 25 bp, Homo sapien
atctttacgctatgataaccaagta

SEQ ID NO: 5533997 - DNA, 25 bp, Homo sapien
cttggctgtaccttcacaaatattc

SEQ ID NO: 5533998 - DNA, 25 bp, Homo sapien
aatctttcgtcctgtcctgtgcccc

SEQ ID NO: 5533999 - DNA, 25 bp, Homo sapien
aatcagtgatagtagtttcttggct

SEQ ID NO: 5534000 - DNA, 25 bp, Homo sapien
caacagcatattatagacaacattc

SEQ ID NO: 5534001 - DNA, 25 bp, Homo sapien
tcatcaaaatatcacgcaaacactt

SEQ ID NO: 5534002 - DNA, 25 bp, Homo sapien
tagtgatgccagtagttcatgccat

SEQ ID NO: 5534003 - DNA, 25 bp, Homo sapien
acctcagcaaaatttggggtgggaa

SEQ ID NO: 5534004 - DNA, 25 bp, Homo sapien
ccttgagcttatggcagatttgcac

SEQ ID NO: 5534005 - DNA, 25 bp, Homo sapien
tcatgccatcacaggtagaagagat

SEQ ID NO: 5534006 - DNA, 25 bp, Homo sapien
ctagacatgaaaactaagctcaatc

SEQ ID NO: 5534007 - DNA, 25 bp, Homo sapien
aaatttaccccaagcatacaactct

SEQ ID NO: 5534008 - DNA, 25 bp, Homo sapien
gtagatgatggtatatttaaattcc

SEQ ID NO: 5534009 - DNA, 25 bp, Homo sapien
tgctttgtgccaccagaaagtcagc

SEQ ID NO: 5534010 - DNA, 25 bp, Homo sapien
gggtgggaattagactctgtttatc

SEQ ID NO: 5534011 - DNA, 25 bp, Homo sapien
tagaagagatggttggctaattcca

SEQ ID NO: 5534012 - DNA, 25 bp, Homo sapien
gtgttgaatagtgttcagacgacag

SEQ ID NO: 5534013 - DNA, 25 bp, Homo sapien
cgagatggagctaccatgatggttt

SEQ ID NO: 5534014 - DNA, 25 bp, Homo sapien
atctgaagatagacagatatgtgag

SEQ ID NO: 5534015 - DNA, 25 bp, Homo sapien
ttacaaacgagatggagctaccatg

SEQ ID NO: 5534016 - DNA, 25 bp, Homo sapien
ttgcccacaaccaggttcatcagca

SEQ ID NO: 5534017 - DNA, 25 bp, Homo sapien
aaggtggcctataagtaaattgtat

SEQ ID NO: 5534018 - DNA, 25 bp, Homo sapien
atagaaattgccaaaggagccactt

SEQ ID NO: 5534019 - DNA, 25 bp, Homo sapien
agacaagaattcaattgcccacaac

SEQ ID NO: 5534020 - DNA, 25 bp, Homo sapien
tcttctgagtatttgagagggagaa

SEQ ID NO: 5534021 - DNA, 25 bp, Homo sapien
aacatttcccagtgaagccatgatt

SEQ ID NO: 5534022 - DNA, 25 bp, Homo sapien
taacgctgtaataaaaccactttgc

SEQ ID NO: 5534023 - DNA, 25 bp, Homo sapien
gcttgtgagcagggtgctatttgag

SEQ ID NO: 5534024 - DNA, 25 bp, Homo sapien
gaccatccatgaaggcaaacggtgg

SEQ ID NO: 5534025 - DNA, 25 bp, Homo sapien
gcactgagccgcaccaacctcaagg

SEQ ID NO: 5534026 - DNA, 25 bp, Homo sapien
cggctacccgctcaccgaggacatg

SEQ ID NO: 5534027 - DNA, 25 bp, Homo sapien
gactacgcgcactgcctgccctact

SEQ ID NO: 5534028 - DNA, 25 bp, Homo sapien
ctgcgcattcctggaggccacgcag

SEQ ID NO: 5534029 - DNA, 25 bp, Homo sapien
gtggagtatgtcaagaatggccaga

SEQ ID NO: 5534030 - DNA, 25 bp, Homo sapien
cgaggacatgaatggcttccagcag

SEQ ID NO: 5534031 - DNA, 25 bp, Homo sapien
caaccacccgctgcactgcgcattc

SEQ ID NO: 5534032 - DNA, 25 bp, Homo sapien
ttcggctggatggacatgaccatcc

SEQ ID NO: 5534033 - DNA, 25 bp, Homo sapien
tgccatggtctacgtccgtgggcac

SEQ ID NO: 5534034 - DNA, 25 bp, Homo sapien
gagtgagccagacctgttgaacttg

SEQ ID NO: 5534035 - DNA, 25 bp, Homo sapien
aggagggcattaaagttaagcaaat

SEQ ID NO: 5534036 - DNA, 25 bp, Homo sapien
accaggacaatcatctcaggacagc

SEQ ID NO: 5534037 - DNA, 25 bp, Homo sapien
tccctctcaggagagcatggctgat

SEQ ID NO: 5534038 - DNA, 25 bp, Homo sapien
tcaggacagcatggtcaatgtgttc

SEQ ID NO: 5534039 - DNA, 25 bp, Homo sapien
tgggaaatcttcctaggagggcatt

SEQ ID NO: 5534040 - DNA, 25 bp, Homo sapien
tattttgattgaagggaggaaagta

SEQ ID NO: 5534041 - DNA, 25 bp, Homo sapien
ttcatctcaggatggcatggccgat

SEQ ID NO: 5534042 - DNA, 25 bp, Homo sapien
gaccttagatgaatagagaggagtg

SEQ ID NO: 5534043 - DNA, 25 bp, Homo sapien
ctcaagacagcatggccaatgtgtt

SEQ ID NO: 5534044 - DNA, 25 bp, Homo sapien
tcattcgtctcaggacagcatggcc

SEQ ID NO: 5534045 - DNA, 25 bp, Homo sapien
tctcagatggccgttctgcaggttg

SEQ ID NO: 5534046 - DNA, 25 bp, Homo sapien
gaggaggtgctcagtatatcacagc

SEQ ID NO: 5534047 - DNA, 25 bp, Homo sapien
atcctaaccacaccaagccttgctg

SEQ ID NO: 5534048 - DNA, 25 bp, Homo sapien
taagcacctgtgcagtgactgagtg

SEQ ID NO: 5534049 - DNA, 25 bp, Homo sapien
tttattctctctagaggaggtgctc

SEQ ID NO: 5534050 - DNA, 25 bp, Homo sapien
gcgaggagactgcatattccctgcc

SEQ ID NO: 5534051 - DNA, 25 bp, Homo sapien
gctgagacctctgagcaatcccacc

SEQ ID NO: 5534052 - DNA, 25 bp, Homo sapien
tgcccaatctggcttcacggcggcg

SEQ ID NO: 5534053 - DNA, 25 bp, Homo sapien
gagcaatcccaccaggagatacagt

SEQ ID NO: 5534054 - DNA, 25 bp, Homo sapien
tcgggtgcttgccacagctcagcac

SEQ ID NO: 5534055 - DNA, 25 bp, Homo sapien
gccgcctctcggctaagcacctgtg

SEQ ID NO: 5534056 - DNA, 25 bp, Homo sapien
atgcggcttggaccattgatgcctg

SEQ ID NO: 5534057 - DNA, 25 bp, Homo sapien
cagttcccttttgaggagccccctc

SEQ ID NO: 5534058 - DNA, 25 bp, Homo sapien
ttgccctccctaagagcagcctctc

SEQ ID NO: 5534059 - DNA, 25 bp, Homo sapien
ccaccagatatgggaagacaaatgg

SEQ ID NO: 5534060 - DNA, 25 bp, Homo sapien
ggttgctttgaggccactgtatggt

SEQ ID NO: 5534061 - DNA, 25 bp, Homo sapien
tgtgctcccaggagatacagcatca

SEQ ID NO: 5534062 - DNA, 25 bp, Homo sapien
gcttcaccttcttagggagccgccg

SEQ ID NO: 5534063 - DNA, 25 bp, Homo sapien
tggagaaaggacctgtcttaggatg

SEQ ID NO: 5534064 - DNA, 25 bp, Homo sapien
agacactggctgcccccgaaccttt

SEQ ID NO: 5534065 - DNA, 25 bp, Homo sapien
atacagcatcaaatggcgtggagaa

SEQ ID NO: 5534066 - DNA, 25 bp, Homo sapien
gaggctcctgggtagacctcctctt

SEQ ID NO: 5534067 - DNA, 25 bp, Homo sapien
tgggaccatccttatatagttagtt

SEQ ID NO: 5534068 - DNA, 25 bp, Homo sapien
tctagaaagtcttagttcacaatac

SEQ ID NO: 5534069 - DNA, 25 bp, Homo sapien
tgcacacgtattacaaacaagcttc

SEQ ID NO: 5534070 - DNA, 25 bp, Homo sapien
cggtggcttaatctcagctcagtgc

SEQ ID NO: 5534071 - DNA, 25 bp, Homo sapien
tgaataagtaaaattctagaaagtc

SEQ ID NO: 5534072 - DNA, 25 bp, Homo sapien
cttagttcacaatacagagataatt

SEQ ID NO: 5534073 - DNA, 25 bp, Homo sapien
tttcttgggaacggaatcttgctct

SEQ ID NO: 5534074 - DNA, 25 bp, Homo sapien
tccttttgacacagctgggaccatc

SEQ ID NO: 5534075 - DNA, 25 bp, Homo sapien
gggaacggaatcttgctctgtcgcc

SEQ ID NO: 5534076 - DNA, 25 bp, Homo sapien
ttaagtacagaatgaataagtaaaa

SEQ ID NO: 5534077 - DNA, 25 bp, Homo sapien
gccttaaaataattgtgttcacctc

SEQ ID NO: 5534078 - DNA, 25 bp, Homo sapien
taatacaccaaactgcacaccaacc

SEQ ID NO: 5534079 - DNA, 25 bp, Homo sapien
gcaagctaagaaccactgacctata

SEQ ID NO: 5534080 - DNA, 25 bp, Homo sapien
aaggtccatggagcaattgaaaata

SEQ ID NO: 5534081 - DNA, 25 bp, Homo sapien
attctacagagaagactaaagagag

SEQ ID NO: 5534082 - DNA, 25 bp, Homo sapien
actgtaagttacctgaaataaggaa

SEQ ID NO: 5534083 - DNA, 25 bp, Homo sapien
gtcagaacaaagcctcaaatgcaga

SEQ ID NO: 5534084 - DNA, 25 bp, Homo sapien
aattaaaaagcaagctaagaaccac

SEQ ID NO: 5534085 - DNA, 25 bp, Homo sapien
gagaggtttaagtggtctgcccatg

SEQ ID NO: 5534086 - DNA, 25 bp, Homo sapien
ctaaaacatctgggggtatgtgcaa

SEQ ID NO: 5534087 - DNA, 25 bp, Homo sapien
ctaacaccaggtccagtcttaccca

SEQ ID NO: 5534088 - DNA, 25 bp, Homo sapien
ccagcattactatagtgcctagcac

SEQ ID NO: 5534089 - DNA, 25 bp, Homo sapien
tttgataatttggaacattggcaat

SEQ ID NO: 5534090 - DNA, 25 bp, Homo sapien
ggctgaggagctatactaagtatct

SEQ ID NO: 5534091 - DNA, 25 bp, Homo sapien
gttgtgctagcagttggaaatgtac

SEQ ID NO: 5534092 - DNA, 25 bp, Homo sapien
tagacataaatgtgtagaagaccat

SEQ ID NO: 5534093 - DNA, 25 bp, Homo sapien
aggttatggctgaggagctatacta

SEQ ID NO: 5534094 - DNA, 25 bp, Homo sapien
aacagaatagaaagatgatcgatag

SEQ ID NO: 5534095 - DNA, 25 bp, Homo sapien
ggagaagaaaggcaatccttcgttg

SEQ ID NO: 5534096 - DNA, 25 bp, Homo sapien
tgcctgttgaggcctgaaagagaga

SEQ ID NO: 5534097 - DNA, 25 bp, Homo sapien
gtgtagaagaccataccatacagcg

SEQ ID NO: 5534098 - DNA, 25 bp, Homo sapien
cattggcaatgaatacagtgcctgt

SEQ ID NO: 5534099 - DNA, 25 bp, Homo sapien
ttagtgcctgaaaaataagccattt

SEQ ID NO: 5534100 - DNA, 25 bp, Homo sapien
ttaacaaggcaactaccaactctct

SEQ ID NO: 5534101 - DNA, 25 bp, Homo sapien
agagagttggtagttgccttgttaa

SEQ ID NO: 5534102 - DNA, 25 bp, Homo sapien
tattctgggcaccgaaatataggag

SEQ ID NO: 5534103 - DNA, 25 bp, Homo sapien
agactatgttaggatgttgcttacc

SEQ ID NO: 5534104 - DNA, 25 bp, Homo sapien
actgtaccagtgactgataacatcc

SEQ ID NO: 5534105 - DNA, 25 bp, Homo sapien
ctgacaaagatgccacaattaatgc

SEQ ID NO: 5534106 - DNA, 25 bp, Homo sapien
caaaagactgtgtgccaagtgctat

SEQ ID NO: 5534107 - DNA, 25 bp, Homo sapien
acctgaggataggctatactctacg

SEQ ID NO: 5534108 - DNA, 25 bp, Homo sapien
agggaataagaccaagttcctgttc

SEQ ID NO: 5534109 - DNA, 25 bp, Homo sapien
cacattctaaggtacccaaaagccc

SEQ ID NO: 5534110 - DNA, 25 bp, Homo sapien
tgtaagagatgtcaagaaatagact

SEQ ID NO: 5534111 - DNA, 25 bp, Homo sapien
actgattgtgcacaaggtcatccac

SEQ ID NO: 5534112 - DNA, 25 bp, Homo sapien
aatacaacatgcagactatgcgtac

SEQ ID NO: 5534113 - DNA, 25 bp, Homo sapien
atggaacaagaaaagtgctattagc

SEQ ID NO: 5534114 - DNA, 25 bp, Homo sapien
acagcaacatgcacaatggtacata

SEQ ID NO: 5534115 - DNA, 25 bp, Homo sapien
gagtgactatcaaaaacagcaacat

SEQ ID NO: 5534116 - DNA, 25 bp, Homo sapien
aaaggaggaaagaccctattgctat

SEQ ID NO: 5534117 - DNA, 25 bp, Homo sapien
ttaaacacaacagtaaaatggcagt

SEQ ID NO: 5534118 - DNA, 25 bp, Homo sapien
gtttgaatggaacaagaaaagtgct

SEQ ID NO: 5534119 - DNA, 25 bp, Homo sapien
atgcacaaaatggaattatatcaac

SEQ ID NO: 5534120 - DNA, 25 bp, Homo sapien
atggtacatatgcacaaaatggaat

SEQ ID NO: 5534121 - DNA, 25 bp, Homo sapien
tacattcattaaaagagtgactatc

SEQ ID NO: 5534122 - DNA, 25 bp, Homo sapien
acagtaaaatggcagtgttgtaatt

SEQ ID NO: 5534123 - DNA, 25 bp, Homo sapien
gaaaagtgctattagcccaagcttc

SEQ ID NO: 5534124 - DNA, 25 bp, Homo sapien
gtacaactgcacaccggcacacact

SEQ ID NO: 5534125 - DNA, 25 bp, Homo sapien
ctcaaaccgagtcaacccaaagttc

SEQ ID NO: 5534126 - DNA, 25 bp, Homo sapien
gaacattaagacgctttgctgcttc

SEQ ID NO: 5534127 - DNA, 25 bp, Homo sapien
gaggagagtctcgaaacaattatca

SEQ ID NO: 5534128 - DNA, 25 bp, Homo sapien
accaaagagaggcgttttgaacatt

SEQ ID NO: 5534129 - DNA, 25 bp, Homo sapien
agccgcgggaaatcttctttgacac

SEQ ID NO: 5534130 - DNA, 25 bp, Homo sapien
tacagccagtaaacatggaccagaa

SEQ ID NO: 5534131 - DNA, 25 bp, Homo sapien
acacgtaacaggaacaccaacctct

SEQ ID NO: 5534132 - DNA, 25 bp, Homo sapien
tgcgatgtggagtataaaaatggta

SEQ ID NO: 5534133 - DNA, 25 bp, Homo sapien
accaacctcttcagccgcgggaaat

SEQ ID NO: 5534134 - DNA, 25 bp, Homo sapien
ggaccagaaagacacgtacaactgc

SEQ ID NO: 5534135 - DNA, 25 bp, Homo sapien
cgggcactagaatgacccctgcaca

SEQ ID NO: 5534136 - DNA, 25 bp, Homo sapien
catgcatcctctagagcaaaaggga

SEQ ID NO: 5534137 - DNA, 25 bp, Homo sapien
gcagacctcctagcaaactgggctt

SEQ ID NO: 5534138 - DNA, 25 bp, Homo sapien
gttttcagtaagcagacctcctagc

SEQ ID NO: 5534139 - DNA, 25 bp, Homo sapien
actgggcttttactcctgtgggctc

SEQ ID NO: 5534140 - DNA, 25 bp, Homo sapien
cacacggacactcaagctggattag

SEQ ID NO: 5534141 - DNA, 25 bp, Homo sapien
gaatgtcaccagagctgcaaaagcc

SEQ ID NO: 5534142 - DNA, 25 bp, Homo sapien
tggattagtgactgagcaaatgtgc

SEQ ID NO: 5534143 - DNA, 25 bp, Homo sapien
gctagagcaaaaagatgatgccaac

SEQ ID NO: 5534144 - DNA, 25 bp, Homo sapien
gccaacacaccgggcactagaatga

SEQ ID NO: 5534145 - DNA, 25 bp, Homo sapien
cctgcacatgcagaacacacggaca

SEQ ID NO: 5534146 - DNA, 25 bp, Homo sapien
gggcagccacaaaaacttgaatttc

SEQ ID NO: 5534147 - DNA, 25 bp, Homo sapien
gcctaattctccctgaggggcagcc

SEQ ID NO: 5534148 - DNA, 25 bp, Homo sapien
ggtagccagcagagcctcttagcag

SEQ ID NO: 5534149 - DNA, 25 bp, Homo sapien
gacactggctagtacatgggtagcc

SEQ ID NO: 5534150 - DNA, 25 bp, Homo sapien
agcctagcacccatgcaggacactg

SEQ ID NO: 5534151 - DNA, 25 bp, Homo sapien
acaacactagcagatgttggggctc

SEQ ID NO: 5534152 - DNA, 25 bp, Homo sapien
taccataatgagaaatgaacaaaag

SEQ ID NO: 5534153 - DNA, 25 bp, Homo sapien
ccagcatcagaatgcagagatggat

SEQ ID NO: 5534154 - DNA, 25 bp, Homo sapien
ctcttagcagaggcaaaatcaattg

SEQ ID NO: 5534155 - DNA, 25 bp, Homo sapien
cctgagttacaaatcacctaagcac

SEQ ID NO: 5534156 - DNA, 25 bp, Homo sapien
gttttacagtgagatgacaaagttc

SEQ ID NO: 5534157 - DNA, 25 bp, Homo sapien
gaggcgtggagctatttcctatgac

SEQ ID NO: 5534158 - DNA, 25 bp, Homo sapien
caatccccggcagctctctcagagg

SEQ ID NO: 5534159 - DNA, 25 bp, Homo sapien
cagaaagaagaggttctcacccata

SEQ ID NO: 5534160 - DNA, 25 bp, Homo sapien
ctgaaattgaagtgtctgtctctgc

SEQ ID NO: 5534161 - DNA, 25 bp, Homo sapien
ctcttcggctgccccaatccccggc

SEQ ID NO: 5534162 - DNA, 25 bp, Homo sapien
atggacaagccaagtgtatgctgga

SEQ ID NO: 5534163 - DNA, 25 bp, Homo sapien
gcagctctctcagaggcgtggagct

SEQ ID NO: 5534164 - DNA, 25 bp, Homo sapien
agatgatgattataatggacaagcc

SEQ ID NO: 5534165 - DNA, 25 bp, Homo sapien
aaggaatatcagaaggctactaagt

SEQ ID NO: 5534166 - DNA, 25 bp, Homo sapien
tcgtatgctaggagatgtacgtgta

SEQ ID NO: 5534167 - DNA, 25 bp, Homo sapien
caagtgtatgctggaaaaagttgga

SEQ ID NO: 5534168 - DNA, 25 bp, Homo sapien
tgcccggatagcgtttgaacgaaac

SEQ ID NO: 5534169 - DNA, 25 bp, Homo sapien
gtttcgttcaaacgctatccgggca

SEQ ID NO: 5534170 - DNA, 25 bp, Homo sapien
acatgtggatataaatagaagccgg

SEQ ID NO: 5534171 - DNA, 25 bp, Homo sapien
agaagtggaagaagctcttgtcttg

SEQ ID NO: 5534172 - DNA, 25 bp, Homo sapien
tactttctgggaagaagcatagtcc

SEQ ID NO: 5534173 - DNA, 25 bp, Homo sapien
gcatagtccgtgctcacactggata

SEQ ID NO: 5534174 - DNA, 25 bp, Homo sapien
tggctggccagaattccatgaatgg

SEQ ID NO: 5534175 - DNA, 25 bp, Homo sapien
ggctgtcagaaattggggctttttg

SEQ ID NO: 5534176 - DNA, 25 bp, Homo sapien
gggaaagctgccatggctgtcagaa

SEQ ID NO: 5534177 - DNA, 25 bp, Homo sapien
ttgaagaaaagcttgtgtaggcatc

SEQ ID NO: 5534178 - DNA, 25 bp, Homo sapien
tcaattgaattcgtggtggtttctc

SEQ ID NO: 5534179 - DNA, 25 bp, Homo sapien
ggtgcccgagtgatctggggcttta

SEQ ID NO: 5534180 - DNA, 25 bp, Homo sapien
ctggattggctgttcttagcagtgc

SEQ ID NO: 5534181 - DNA, 25 bp, Homo sapien
gagagcaaaaacataggagcaatac

SEQ ID NO: 5534182 - DNA, 25 bp, Homo sapien
ctttaatgaatggaagtgggctttg

SEQ ID NO: 5534183 - DNA, 25 bp, Homo sapien
gcaataccaggtatagatgggcaga

SEQ ID NO: 5534184 - DNA, 25 bp, Homo sapien
aggccctattgagaagctggaagtg

SEQ ID NO: 5534185 - DNA, 25 bp, Homo sapien
gggggatacattggcagaacccaca

SEQ ID NO: 5534186 - DNA, 25 bp, Homo sapien
gaggggtcatcacagttgttggtta

SEQ ID NO: 5534187 - DNA, 25 bp, Homo sapien
agaagagtgttaaaccaaacaggtc

SEQ ID NO: 5534188 - DNA, 25 bp, Homo sapien
tatttattaacagaggggtcatcac

SEQ ID NO: 5534189 - DNA, 25 bp, Homo sapien
tgggagcaataagatggccctctga

SEQ ID NO: 5534190 - DNA, 25 bp, Homo sapien
agtgggctttgtgagactaaaaaca

SEQ ID NO: 5534191 - DNA, 25 bp, Homo sapien
catgaagattacactgaggccctat

SEQ ID NO: 5534192 - DNA, 25 bp, Homo sapien
tacaagcacactgacgttatctagc

SEQ ID NO: 5534193 - DNA, 25 bp, Homo sapien
agtctaaaacagagcgatgtgcatc

SEQ ID NO: 5534194 - DNA, 25 bp, Homo sapien
gtgtactttatgcgtggcctgagac

SEQ ID NO: 5534195 - DNA, 25 bp, Homo sapien
cgaatttcctggaagtaatgagtgt

SEQ ID NO: 5534196 - DNA, 25 bp, Homo sapien
atgcgtggcctgagacaattcttat

SEQ ID NO: 5534197 - DNA, 25 bp, Homo sapien
tccagaggaaaaattcctgactcac

SEQ ID NO: 5534198 - DNA, 25 bp, Homo sapien
gactgggtcccaagttacaagcaca

SEQ ID NO: 5534199 - DNA, 25 bp, Homo sapien
gactgaagaagcagacatatagcac

SEQ ID NO: 5534200 - DNA, 25 bp, Homo sapien
atgtgcatcataagagatagcctat

SEQ ID NO: 5534201 - DNA, 25 bp, Homo sapien
gatagcctatcagatccctaggccc

SEQ ID NO: 5534202 - DNA, 25 bp, Homo sapien
ataaaattagtgtagagaaaccata

SEQ ID NO: 5534203 - DNA, 25 bp, Homo sapien
gagattgagcaagaaccttagtggg

SEQ ID NO: 5534204 - DNA, 25 bp, Homo sapien
aacaattcaggttttctagggagat

SEQ ID NO: 5534205 - DNA, 25 bp, Homo sapien
cttaaactccgtggcttgtgctttc

SEQ ID NO: 5534206 - DNA, 25 bp, Homo sapien
tcaggctgccttcttaaactccgtg

SEQ ID NO: 5534207 - DNA, 25 bp, Homo sapien
ctacttggctgactctgcagcgccc

SEQ ID NO: 5534208 - DNA, 25 bp, Homo sapien
acccctcttcagccccccgccttca

SEQ ID NO: 5534209 - DNA, 25 bp, Homo sapien
ccgccgcctcctcctacgtggttcc

SEQ ID NO: 5534210 - DNA, 25 bp, Homo sapien
ccttccttggctacttggctgactc

SEQ ID NO: 5534211 - DNA, 25 bp, Homo sapien
gttcgagcccgtggctgctctgttt

SEQ ID NO: 5534212 - DNA, 25 bp, Homo sapien
gtggtgatcgagactctgccagaaa

SEQ ID NO: 5534213 - DNA, 25 bp, Homo sapien
tgactgaaagggatgaaacaattca

SEQ ID NO: 5534214 - DNA, 25 bp, Homo sapien
gcaatgggtgcctgccccttccctg

SEQ ID NO: 5534215 - DNA, 25 bp, Homo sapien
ctgcagcacctcccctaggcctaca

SEQ ID NO: 5534216 - DNA, 25 bp, Homo sapien
tcaggcaggagcttttgccccctgc

SEQ ID NO: 5534217 - DNA, 25 bp, Homo sapien
attttgacccaggagctacccagga

SEQ ID NO: 5534218 - DNA, 25 bp, Homo sapien
tgccagctactgggcctccacattt

SEQ ID NO: 5534219 - DNA, 25 bp, Homo sapien
agtctatgttaagggatgtatctgt

SEQ ID NO: 5534220 - DNA, 25 bp, Homo sapien
tatttctgcctcgggccaagcacgg

SEQ ID NO: 5534221 - DNA, 25 bp, Homo sapien
aaacttccagacccaagcatcctcc

SEQ ID NO: 5534222 - DNA, 25 bp, Homo sapien
gcaatggcgcaatctacggttaaca

SEQ ID NO: 5534223 - DNA, 25 bp, Homo sapien
atatataatgtgtgggcctggttct

SEQ ID NO: 5534224 - DNA, 25 bp, Homo sapien
gcctggttcttgagcctgcagcacc

SEQ ID NO: 5534225 - DNA, 25 bp, Homo sapien
ccgacagcggagtatctgatctaat

SEQ ID NO: 5534226 - DNA, 25 bp, Homo sapien
cggacagctccagaccacctacaga

SEQ ID NO: 5534227 - DNA, 25 bp, Homo sapien
tgcaaggatcagcacccagtgtaga

SEQ ID NO: 5534228 - DNA, 25 bp, Homo sapien
tgttcgctaaatggcaaaatagggg

SEQ ID NO: 5534229 - DNA, 25 bp, Homo sapien
agtgtagaaactgacttgtaccccg

SEQ ID NO: 5534230 - DNA, 25 bp, Homo sapien
aaggccgaaacgctaacagccatct

SEQ ID NO: 5534231 - DNA, 25 bp, Homo sapien
atccccaccgtgagatggtagaaag

SEQ ID NO: 5534232 - DNA, 25 bp, Homo sapien
cgaaggtatgcaatgcgatcccaac

SEQ ID NO: 5534233 - DNA, 25 bp, Homo sapien
acagaaagaaagtctcaggccatta

SEQ ID NO: 5534234 - DNA, 25 bp, Homo sapien
tgcagtctcgattgtaatgaacctc

SEQ ID NO: 5534235 - DNA, 25 bp, Homo sapien
tgaacctcagctgaatgtgccgaca

SEQ ID NO: 5534236 - DNA, 25 bp, Homo sapien
agaccttagccaccggaacaaagaa

SEQ ID NO: 5534237 - DNA, 25 bp, Homo sapien
cgggatgggcgttttattgatcaga

SEQ ID NO: 5534238 - DNA, 25 bp, Homo sapien
ccgagtaccaggctccaggcctttg

SEQ ID NO: 5534239 - DNA, 25 bp, Homo sapien
ctataaacgttgatctccggagggc

SEQ ID NO: 5534240 - DNA, 25 bp, Homo sapien
gaggagcccgctataaacgttgatc

SEQ ID NO: 5534241 - DNA, 25 bp, Homo sapien
ccaggctccaggcctttgaaagcgc

SEQ ID NO: 5534242 - DNA, 25 bp, Homo sapien
gggcgttttattgatcagatgtgtc

SEQ ID NO: 5534243 - DNA, 25 bp, Homo sapien
aagaggagcccgctataaacgttga

SEQ ID NO: 5534244 - DNA, 25 bp, Homo sapien
gaggcctggtcttgcccgctccttt

SEQ ID NO: 5534245 - DNA, 25 bp, Homo sapien
ggtcggctgcgctgttttccggtga

SEQ ID NO: 5534246 - DNA, 25 bp, Homo sapien
ccggcccagatgaagaccttagcca

SEQ ID NO: 5534247 - DNA, 25 bp, Homo sapien
aacacagctaccacagctggccccg

SEQ ID NO: 5534248 - DNA, 25 bp, Homo sapien
cccaacagctccaacccgggtggtg

SEQ ID NO: 5534249 - DNA, 25 bp, Homo sapien
ccccagtctctgggacactgcaggg

SEQ ID NO: 5534250 - DNA, 25 bp, Homo sapien
atgcctcgttggcccagatggtgag

SEQ ID NO: 5534251 - DNA, 25 bp, Homo sapien
tccacaggctcggccttcccatcct

SEQ ID NO: 5534252 - DNA, 25 bp, Homo sapien
ctctcagcttctggggaacctgcta

SEQ ID NO: 5534253 - DNA, 25 bp, Homo sapien
tgcagccagtccttgtggctcaggg

SEQ ID NO: 5534254 - DNA, 25 bp, Homo sapien
cggtctgggtaccaatgcctcgttg

SEQ ID NO: 5534255 - DNA, 25 bp, Homo sapien
ggccttgtggggcagcttcttatgc

SEQ ID NO: 5534256 - DNA, 25 bp, Homo sapien
cccctcaaccctccatggctgatct

SEQ ID NO: 5534257 - DNA, 25 bp, Homo sapien
gtgccaggcttcccaacagctccaa

SEQ ID NO: 5534258 - DNA, 25 bp, Homo sapien
tggaggccttctgtgcccagctcag

SEQ ID NO: 5534259 - DNA, 25 bp, Homo sapien
tgggagtttttaagaaggaatgtgc

SEQ ID NO: 5534260 - DNA, 25 bp, Homo sapien
tcaatgtgtctagtgcttgctggcc

SEQ ID NO: 5534261 - DNA, 25 bp, Homo sapien
gttttgcagaggcattcaatgtgtc

SEQ ID NO: 5534262 - DNA, 25 bp, Homo sapien
cagcagttactaccacagagccttc

SEQ ID NO: 5534263 - DNA, 25 bp, Homo sapien
atggccaaaacgattgtggcaggtc

SEQ ID NO: 5534264 - DNA, 25 bp, Homo sapien
tcaagagttctttggtgaagccatc

SEQ ID NO: 5534265 - DNA, 25 bp, Homo sapien
gctcagagttctgcaccacgccagg

SEQ ID NO: 5534266 - DNA, 25 bp, Homo sapien
tagtactatgtggaaagggtttgca

SEQ ID NO: 5534267 - DNA, 25 bp, Homo sapien
tggttggagaaaaccatggccaaaa

SEQ ID NO: 5534268 - DNA, 25 bp, Homo sapien
gtggcaggtctcaatcttgggagtt

SEQ ID NO: 5534269 - DNA, 25 bp, Homo sapien
attggtctaacctgagtagcccact

SEQ ID NO: 5534270 - DNA, 25 bp, Homo sapien
atcacatttctgggcagaaggtgga

SEQ ID NO: 5534271 - DNA, 25 bp, Homo sapien
cagcagcctagctcaagggataata

SEQ ID NO: 5534272 - DNA, 25 bp, Homo sapien
tggcatgacacaccacagcagcatt

SEQ ID NO: 5534273 - DNA, 25 bp, Homo sapien
aatttttgttgttgactggagctgg

SEQ ID NO: 5534274 - DNA, 25 bp, Homo sapien
agctctgcagaaagaagctccttcc

SEQ ID NO: 5534275 - DNA, 25 bp, Homo sapien
ctgttcattggaggtggtatcatca

SEQ ID NO: 5534276 - DNA, 25 bp, Homo sapien
tgaatcaacctcaggcagcagccta

SEQ ID NO: 5534277 - DNA, 25 bp, Homo sapien
ctcaagggataataaactatgaccc

SEQ ID NO: 5534278 - DNA, 25 bp, Homo sapien
tgagccctgtggttctgaagtcatt

SEQ ID NO: 5534279 - DNA, 25 bp, Homo sapien
ggagctgggatgttgaatcaacctc

SEQ ID NO: 5534280 - DNA, 25 bp, Homo sapien
gaacaggacaatgaaattctgaaca

SEQ ID NO: 5534281 - DNA, 25 bp, Homo sapien
aagtgaagatattgtctgatcagac

SEQ ID NO: 5534282 - DNA, 25 bp, Homo sapien
tgtttacaccaaaagataaatggaa

SEQ ID NO: 5534283 - DNA, 25 bp, Homo sapien
attggtgggcttttaaaagaggctc

SEQ ID NO: 5534284 - DNA, 25 bp, Homo sapien
aataatgataagctccctacttctc

SEQ ID NO: 5534285 - DNA, 25 bp, Homo sapien
atgggctgaatgtttctgtcccctc

SEQ ID NO: 5534286 - DNA, 25 bp, Homo sapien
tcactggggtggaatcctcaatgaa

SEQ ID NO: 5534287 - DNA, 25 bp, Homo sapien
tctcatcctgctatgggctgaatgt

SEQ ID NO: 5534288 - DNA, 25 bp, Homo sapien
aaaagaggctccagagagattactt

SEQ ID NO: 5534289 - DNA, 25 bp, Homo sapien
gaacataacttaaaagtgaagatat

SEQ ID NO: 5534290 - DNA, 25 bp, Homo sapien
ggctccagagagattacttgttcct

SEQ ID NO: 5534291 - DNA, 25 bp, Homo sapien
aggttcaaagaacttcagggctgca

SEQ ID NO: 5534292 - DNA, 25 bp, Homo sapien
aaagctcagaggctgtaactgacac

SEQ ID NO: 5534293 - DNA, 25 bp, Homo sapien
ccaaatcagtggcctcctacaaatt

SEQ ID NO: 5534294 - DNA, 25 bp, Homo sapien
aaaacagcaagtgggatatacagtt

SEQ ID NO: 5534295 - DNA, 25 bp, Homo sapien
atgattcagtaattggacagccctc

SEQ ID NO: 5534296 - DNA, 25 bp, Homo sapien
aagaacttcagggctgcagtgtact

SEQ ID NO: 5534297 - DNA, 25 bp, Homo sapien
gtactcagagagaatttagggacag

SEQ ID NO: 5534298 - DNA, 25 bp, Homo sapien
acagtttaactggattgccttatct

SEQ ID NO: 5534299 - DNA, 25 bp, Homo sapien
tttcagtagggatttagtgctttta

SEQ ID NO: 5534300 - DNA, 25 bp, Homo sapien
ctgttggttacatcataggagccta

SEQ ID NO: 5534301 - DNA, 25 bp, Homo sapien
cataggagcctaggccaaatcagtg

SEQ ID NO: 5534302 - DNA, 25 bp, Homo sapien
cctttgtccagatagggaaacaggg

SEQ ID NO: 5534303 - DNA, 25 bp, Homo sapien
caggaaccctcagaggtcagagctg

SEQ ID NO: 5534304 - DNA, 25 bp, Homo sapien
aaggctgtgacagaacaacagcttt

SEQ ID NO: 5534305 - DNA, 25 bp, Homo sapien
tcaaggcgtgttcaatgctaaatgc

SEQ ID NO: 5534306 - DNA, 25 bp, Homo sapien
agacatacaaaggctgtgacagaac

SEQ ID NO: 5534307 - DNA, 25 bp, Homo sapien
acactgactggcaggacttaaaatc

SEQ ID NO: 5534308 - DNA, 25 bp, Homo sapien
ttgctgagcccaggaaccctcagag

SEQ ID NO: 5534309 - DNA, 25 bp, Homo sapien
ttaaaatcagagtagcatggcatca

SEQ ID NO: 5534310 - DNA, 25 bp, Homo sapien
ctttgatccaatatagcctgcgttc

SEQ ID NO: 5534311 - DNA, 25 bp, Homo sapien
agcctgcgttcaaattgtggttccc

SEQ ID NO: 5534312 - DNA, 25 bp, Homo sapien
ctaccagctgttgcttgctgagccc

SEQ ID NO: 5534313 - DNA, 25 bp, Homo sapien
accctggtcagcaagccccttgcat

SEQ ID NO: 5534314 - DNA, 25 bp, Homo sapien
ggcccatgccactcccaccctggtc

SEQ ID NO: 5534315 - DNA, 25 bp, Homo sapien
ctgtcttccttgctgggcaggcgag

SEQ ID NO: 5534316 - DNA, 25 bp, Homo sapien
cagggaagcacgtttgtggttctag

SEQ ID NO: 5534317 - DNA, 25 bp, Homo sapien
ggcaggcgttgatcgagtctgtttt

SEQ ID NO: 5534318 - DNA, 25 bp, Homo sapien
ctcctgttgggaacatggtccctgg

SEQ ID NO: 5534319 - DNA, 25 bp, Homo sapien
ggtcaccaagtgatgccctccctga

SEQ ID NO: 5534320 - DNA, 25 bp, Homo sapien
ctaacttggatgtggttcccccgct

SEQ ID NO: 5534321 - DNA, 25 bp, Homo sapien
tggttcccccgctaggcggtcacca

SEQ ID NO: 5534322 - DNA, 25 bp, Homo sapien
ttttccatgcacaaggcccctaact

SEQ ID NO: 5534323 - DNA, 25 bp, Homo sapien
ggccaagcccaagggtctgtcttcc

SEQ ID NO: 5534324 - DNA, 25 bp, Homo sapien
tacaatctcggtgacgataggtggg

SEQ ID NO: 5534325 - DNA, 25 bp, Homo sapien
tgcctgtgggaccttggtcaagcca

SEQ ID NO: 5534326 - DNA, 25 bp, Homo sapien
gaagattcgggctgctgtctctcta

SEQ ID NO: 5534327 - DNA, 25 bp, Homo sapien
agggcctaccatgttctgagtgatc

SEQ ID NO: 5534328 - DNA, 25 bp, Homo sapien
tgtcacccaggaaaattcgcctgtg

SEQ ID NO: 5534329 - DNA, 25 bp, Homo sapien
gggaagcgctggaatgtccctttcc

SEQ ID NO: 5534330 - DNA, 25 bp, Homo sapien
tgccctgtgcgacacgcccagggaa

SEQ ID NO: 5534331 - DNA, 25 bp, Homo sapien
gagactgggttttgcagccagatat

SEQ ID NO: 5534332 - DNA, 25 bp, Homo sapien
ttgcagccagatattgggttacaat

SEQ ID NO: 5534333 - DNA, 25 bp, Homo sapien
tcaagccatttcaacgtgccgagcc

SEQ ID NO: 5534334 - DNA, 25 bp, Homo sapien
aacctgtaacccgttgtgcatgtat

SEQ ID NO: 5534335 - DNA, 25 bp, Homo sapien
gcacagaccctcaaatgtgaggtgc

SEQ ID NO: 5534336 - DNA, 25 bp, Homo sapien
tcttgccttgtcacctgcataatcc

SEQ ID NO: 5534337 - DNA, 25 bp, Homo sapien
agatgtggccttactatgttgctcc

SEQ ID NO: 5534338 - DNA, 25 bp, Homo sapien
tgtacagatgtggccttactatgtt

SEQ ID NO: 5534339 - DNA, 25 bp, Homo sapien
caaaggtggtgttcaaagttgattt

SEQ ID NO: 5534340 - DNA, 25 bp, Homo sapien
tactatgttgctccggttagtctcg

SEQ ID NO: 5534341 - DNA, 25 bp, Homo sapien
gagatatacccatgatggacagccc

SEQ ID NO: 5534342 - DNA, 25 bp, Homo sapien
tctagactgaatagcacagaccctc

SEQ ID NO: 5534343 - DNA, 25 bp, Homo sapien
catccaactctgattctagactgaa

SEQ ID NO: 5534344 - DNA, 25 bp, Homo sapien
ccccaaaggtggtgttcaaagttga

SEQ ID NO: 5534345 - DNA, 25 bp, Homo sapien
tcctggaatccagagatatacccat

SEQ ID NO: 5534346 - DNA, 25 bp, Homo sapien
ggggtgagcacttcctgactctcgc

SEQ ID NO: 5534347 - DNA, 25 bp, Homo sapien
agcaccgggaagaattaaccggtgc

SEQ ID NO: 5534348 - DNA, 25 bp, Homo sapien
cacagaggccctaaatgtctcgagg

SEQ ID NO: 5534349 - DNA, 25 bp, Homo sapien
tcttcacctgtggcgatcgacgcag

SEQ ID NO: 5534350 - DNA, 25 bp, Homo sapien
ttcctcccttcggcccggcacacac

SEQ ID NO: 5534351 - DNA, 25 bp, Homo sapien
cggtgcctaagttttcaatcggatc

SEQ ID NO: 5534352 - DNA, 25 bp, Homo sapien
caagcctgggtgtgctaagaattga

SEQ ID NO: 5534353 - DNA, 25 bp, Homo sapien
actctcgcattgtccacgcaccgcc

SEQ ID NO: 5534354 - DNA, 25 bp, Homo sapien
gtgtgctaagaattgaggctctctc

SEQ ID NO: 5534355 - DNA, 25 bp, Homo sapien
caagcaagccaaaaaattaaagagc

SEQ ID NO: 5534356 - DNA, 25 bp, Homo sapien
gtctcgaggcctcttcacctgtggc

SEQ ID NO: 5534357 - DNA, 25 bp, Homo sapien
tgggcctcagtgtcgtcacccgtca

SEQ ID NO: 5534358 - DNA, 25 bp, Homo sapien
aagaccctgcctttaaggggctgtg

SEQ ID NO: 5534359 - DNA, 25 bp, Homo sapien
agtgtacccaagtaaccagcgtggc

SEQ ID NO: 5534360 - DNA, 25 bp, Homo sapien
ctgttcccacacagcacccccagcg

SEQ ID NO: 5534361 - DNA, 25 bp, Homo sapien
cagaaagaccctgcctttaaggggc

SEQ ID NO: 5534362 - DNA, 25 bp, Homo sapien
ctcggccagccccttcagctctctg

SEQ ID NO: 5534363 - DNA, 25 bp, Homo sapien
gggccctgatgatcttgcagaccct

SEQ ID NO: 5534364 - DNA, 25 bp, Homo sapien
atgatcttgcagaccctgcagccac

SEQ ID NO: 5534365 - DNA, 25 bp, Homo sapien
gagggcctgtgctctgttcccacac

SEQ ID NO: 5534366 - DNA, 25 bp, Homo sapien
ccctgcctttaaggggctgtggaac

SEQ ID NO: 5534367 - DNA, 25 bp, Homo sapien
tgtcgtcacccgtcaaacggggaca

SEQ ID NO: 5534368 - DNA, 25 bp, Homo sapien
ccccgcccacatttgagtgagagaa

SEQ ID NO: 5534369 - DNA, 25 bp, Homo sapien
tggacgatttgcagacctcccctcc

SEQ ID NO: 5534370 - DNA, 25 bp, Homo sapien
aagggggcatgacactttttctttg

SEQ ID NO: 5534371 - DNA, 25 bp, Homo sapien
tagcaccagagttggacgatttgca

SEQ ID NO: 5534372 - DNA, 25 bp, Homo sapien
gccattagcaccagagttggacgat

SEQ ID NO: 5534373 - DNA, 25 bp, Homo sapien
aggaagaccccccgccattcattcc

SEQ ID NO: 5534374 - DNA, 25 bp, Homo sapien
agaccccccgccattcattcctccc

SEQ ID NO: 5534375 - DNA, 25 bp, Homo sapien
tttgagtgagagaaacttattgctc

SEQ ID NO: 5534376 - DNA, 25 bp, Homo sapien
cttctgcattgggcggttcatgcac

SEQ ID NO: 5534377 - DNA, 25 bp, Homo sapien
gaagacccgccattagcaccagagt

SEQ ID NO: 5534378 - DNA, 25 bp, Homo sapien
ttcattcctccccaatcgccccgcc

SEQ ID NO: 5534379 - DNA, 25 bp, Homo sapien
tacagcaggcacggcttactactga

SEQ ID NO: 5534380 - DNA, 25 bp, Homo sapien
cctacccctgtgggccaatgagaac

SEQ ID NO: 5534381 - DNA, 25 bp, Homo sapien
aggtgttttgcagggtatccagaat

SEQ ID NO: 5534382 - DNA, 25 bp, Homo sapien
aatcagactggggtctccacacttc

SEQ ID NO: 5534383 - DNA, 25 bp, Homo sapien
tctcaaaacactgaaccgaggagca

SEQ ID NO: 5534384 - DNA, 25 bp, Homo sapien
tgatcgctgaatactttagggcaaa

SEQ ID NO: 5534385 - DNA, 25 bp, Homo sapien
agctagaagctaaagacctggtctc

SEQ ID NO: 5534386 - DNA, 25 bp, Homo sapien
agtggaatgaggaaggattattcaa

SEQ ID NO: 5534387 - DNA, 25 bp, Homo sapien
atgctattggggaatgcaaaaggca

SEQ ID NO: 5534388 - DNA, 25 bp, Homo sapien
tgttaacacagggttcaaaggcagg

SEQ ID NO: 5534389 - DNA, 25 bp, Homo sapien
aaagcaagcccctttgctgggaggg

SEQ ID NO: 5534390 - DNA, 25 bp, Homo sapien
ccacatgcactgatgtattggaatt

SEQ ID NO: 5534391 - DNA, 25 bp, Homo sapien
acttcggaagcctagaaccttctcc

SEQ ID NO: 5534392 - DNA, 25 bp, Homo sapien
cataccactctcactctgcacgttc

SEQ ID NO: 5534393 - DNA, 25 bp, Homo sapien
aaataccatagaaacgcttgaaagt

SEQ ID NO: 5534394 - DNA, 25 bp, Homo sapien
gacagcaaacagaacttcaggtagc

SEQ ID NO: 5534395 - DNA, 25 bp, Homo sapien
tgctttaaggagacattggatgtgc

SEQ ID NO: 5534396 - DNA, 25 bp, Homo sapien
acaatgaggatgtttttcaggattc

SEQ ID NO: 5534397 - DNA, 25 bp, Homo sapien
caggctattaatacagatgtgtgct

SEQ ID NO: 5534398 - DNA, 25 bp, Homo sapien
tgctccacagctgacaaataccata

SEQ ID NO: 5534399 - DNA, 25 bp, Homo sapien
gacattggatgtgcaaaagcctgtg

SEQ ID NO: 5534400 - DNA, 25 bp, Homo sapien
cttcaggtagcttacaggaaaattc

SEQ ID NO: 5534401 - DNA, 25 bp, Homo sapien
attcagtcatcaccccccaaaatgc

SEQ ID NO: 5534402 - DNA, 25 bp, Homo sapien
ctctgctctttgagaaagggcacac

SEQ ID NO: 5534403 - DNA, 25 bp, Homo sapien
tactactgttagatcccaggaattc

SEQ ID NO: 5534404 - DNA, 25 bp, Homo sapien
acaccatgcgctcggcaaccattca

SEQ ID NO: 5534405 - DNA, 25 bp, Homo sapien
atgcgctcggcaaccattcaaatgc

SEQ ID NO: 5534406 - DNA, 25 bp, Homo sapien
tctcagttatggaggacatcgtctc

SEQ ID NO: 5534407 - DNA, 25 bp, Homo sapien
aggacatcgtctcattagggaactt

SEQ ID NO: 5534408 - DNA, 25 bp, Homo sapien
aatgtttgcataatgacatagcttt

SEQ ID NO: 5534409 - DNA, 25 bp, Homo sapien
tcattaataatcatccttggctttc

SEQ ID NO: 5534410 - DNA, 25 bp, Homo sapien
ccattcaaatgcaggaattaagcag

SEQ ID NO: 5534411 - DNA, 25 bp, Homo sapien
ttgcagaagttgccataaatgtttg

SEQ ID NO: 5534412 - DNA, 25 bp, Homo sapien
tctgataaaagtggttagactaccc

SEQ ID NO: 5534413 - DNA, 25 bp, Homo sapien
ctgattatccatgtgtactgctgac

SEQ ID NO: 5534414 - DNA, 25 bp, Homo sapien
gtgagattaaaatagcatgcagaca

SEQ ID NO: 5534415 - DNA, 25 bp, Homo sapien
aagacctaaggtatatggaaaactg

SEQ ID NO: 5534416 - DNA, 25 bp, Homo sapien
gtatcaggaactcttgctaccaagt

SEQ ID NO: 5534417 - DNA, 25 bp, Homo sapien
taaggacaaacgatcaagacctaag

SEQ ID NO: 5534418 - DNA, 25 bp, Homo sapien
ctgctcagctagagtgagaccacag

SEQ ID NO: 5534419 - DNA, 25 bp, Homo sapien
ttgctttaactgtgtctgtggtatt

SEQ ID NO: 5534420 - DNA, 25 bp, Homo sapien
attagagtgcagtatgcttggtttc

SEQ ID NO: 5534421 - DNA, 25 bp, Homo sapien
ttacagtaaaatattagagtgcagt

SEQ ID NO: 5534422 - DNA, 25 bp, Homo sapien
actgtctatactcatgctgatcccc

SEQ ID NO: 5534423 - DNA, 25 bp, Homo sapien
gctgggcggtgatgtcacctgatta

SEQ ID NO: 5534424 - DNA, 25 bp, Homo sapien
attgtattagaaatgcaggctatac

SEQ ID NO: 5534425 - DNA, 25 bp, Homo sapien
gcggtagtgccttcccaaacagagc

SEQ ID NO: 5534426 - DNA, 25 bp, Homo sapien
ggaaaagtctccgattactatcact

SEQ ID NO: 5534427 - DNA, 25 bp, Homo sapien
ctgattagcataacagcattgtatt

SEQ ID NO: 5534428 - DNA, 25 bp, Homo sapien
ctatcacttgaaaaggctagcgcgc

SEQ ID NO: 5534429 - DNA, 25 bp, Homo sapien
cccgcgcggctcattcactctctag

SEQ ID NO: 5534430 - DNA, 25 bp, Homo sapien
ttagaaatgcaggctataccacgag

SEQ ID NO: 5534431 - DNA, 25 bp, Homo sapien
cactctctagcgtctgctgaggtaa

SEQ ID NO: 5534432 - DNA, 25 bp, Homo sapien
tgagcctcatgtaacggaaaagtct

SEQ ID NO: 5534433 - DNA, 25 bp, Homo sapien
tctagcgtctgctgaggtaacgcgg

SEQ ID NO: 5534434 - DNA, 25 bp, Homo sapien
tgcttcacgctgcagtacgctgccc

SEQ ID NO: 5534435 - DNA, 25 bp, Homo sapien
gagatcatgtgcaaaatccgcgagg

SEQ ID NO: 5534436 - DNA, 25 bp, Homo sapien
attctgtacatgatgctgtcggggc

SEQ ID NO: 5534437 - DNA, 25 bp, Homo sapien
atgcagacgccctgcttcacgctgc

SEQ ID NO: 5534438 - DNA, 25 bp, Homo sapien
tacgacgagtcctgcgacctctgga

SEQ ID NO: 5534439 - DNA, 25 bp, Homo sapien
ggcgcttctcccttgacggggaggc

SEQ ID NO: 5534440 - DNA, 25 bp, Homo sapien
gtgcccatgcagacgccctgcttca

SEQ ID NO: 5534441 - DNA, 25 bp, Homo sapien
cgccctgcttcacgctgcagtacgc

SEQ ID NO: 5534442 - DNA, 25 bp, Homo sapien
gcttctcccttgacggggaggcctg

SEQ ID NO: 5534443 - DNA, 25 bp, Homo sapien
agcctgggcgtcattctgtacatga

SEQ ID NO: 5534444 - DNA, 25 bp, Homo sapien
ggccgagatcatgtgcaaaatccgc

SEQ ID NO: 5534445 - DNA, 25 bp, Homo sapien
cgtacagtgcgtttctcgacaaatc

SEQ ID NO: 5534446 - DNA, 25 bp, Homo sapien
atttactctgaaccaaaaaggccag

SEQ ID NO: 5534447 - DNA, 25 bp, Homo sapien
caaaaaggccagttgccaaggtaac

SEQ ID NO: 5534448 - DNA, 25 bp, Homo sapien
gaccaatcagatttattcgtaaagc

SEQ ID NO: 5534449 - DNA, 25 bp, Homo sapien
ctctgaaccaaaaaggccagttgcc

SEQ ID NO: 5534450 - DNA, 25 bp, Homo sapien
atggcaaagcatttcacgtacagtg

SEQ ID NO: 5534451 - DNA, 25 bp, Homo sapien
aaaaaagtctttcgtacaagatggc

SEQ ID NO: 5534452 - DNA, 25 bp, Homo sapien
ctttcgtacaagatggcaaagcatt

SEQ ID NO: 5534453 - DNA, 25 bp, Homo sapien
tgcgtttctcgacaaatcccagggg

SEQ ID NO: 5534454 - DNA, 25 bp, Homo sapien
cagttgccaaggtaactctgacacc

SEQ ID NO: 5534455 - DNA, 25 bp, Homo sapien
aactctgacaccatgtgactggggc

SEQ ID NO: 5534456 - DNA, 25 bp, Homo sapien
tcccaggacactacaaacgcttgat

SEQ ID NO: 5534457 - DNA, 25 bp, Homo sapien
actcctcaaaggcgcgccactttct

SEQ ID NO: 5534458 - DNA, 25 bp, Homo sapien
ccagacgccgtagtcgctacacgtc

SEQ ID NO: 5534459 - DNA, 25 bp, Homo sapien
ttctcatcgaagtgccagatcccag

SEQ ID NO: 5534460 - DNA, 25 bp, Homo sapien
cgccgccactctcaaaccccccgac

SEQ ID NO: 5534461 - DNA, 25 bp, Homo sapien
ctttctcctcggttggagggaagag

SEQ ID NO: 5534462 - DNA, 25 bp, Homo sapien
tcgccgctctccgtcgcgttcggtg

SEQ ID NO: 5534463 - DNA, 25 bp, Homo sapien
tcgctacacgtcacttccgggggag

SEQ ID NO: 5534464 - DNA, 25 bp, Homo sapien
ccagcaaacccgggtttggtgtggc

SEQ ID NO: 5534465 - DNA, 25 bp, Homo sapien
ttggggccgtcacagctttctcatc

SEQ ID NO: 5534466 - DNA, 25 bp, Homo sapien
ctgttggtgctaagctttggcgaga

SEQ ID NO: 5534467 - DNA, 25 bp, Homo sapien
aaaagtctgagcaccacaacaaatc

SEQ ID NO: 5534468 - DNA, 25 bp, Homo sapien
atatcttaaatgacagtgaaataat

SEQ ID NO: 5534469 - DNA, 25 bp, Homo sapien
ctgttgacaattaaggggtacaata

SEQ ID NO: 5534470 - DNA, 25 bp, Homo sapien
tgagacttcattatatggggcttgc

SEQ ID NO: 5534471 - DNA, 25 bp, Homo sapien
tcaatgtcaggcaaatcaagagatc

SEQ ID NO: 5534472 - DNA, 25 bp, Homo sapien
tgctgaagtcaatgtcaggcaaatc

SEQ ID NO: 5534473 - DNA, 25 bp, Homo sapien
agcacctgtataaaaaagtctgagc

SEQ ID NO: 5534474 - DNA, 25 bp, Homo sapien
gaagccagctactttcatataccct

SEQ ID NO: 5534475 - DNA, 25 bp, Homo sapien
ctggaaattcagactatttggctaa

SEQ ID NO: 5534476 - DNA, 25 bp, Homo sapien
atacataggataaaacactagcacc

SEQ ID NO: 5534477 - DNA, 25 bp, Homo sapien
tgggaaatgtttctgggaatgatca

SEQ ID NO: 5534478 - DNA, 25 bp, Homo sapien
cagtcgacacaaacaaacatggaga

SEQ ID NO: 5534479 - DNA, 25 bp, Homo sapien
ctcagcaacaagacattggcaacaa

SEQ ID NO: 5534480 - DNA, 25 bp, Homo sapien
actcactctgcaacagtcgacacaa

SEQ ID NO: 5534481 - DNA, 25 bp, Homo sapien
ggaccatcggtccgcgttggtctgt

SEQ ID NO: 5534482 - DNA, 25 bp, Homo sapien
gcactaaacacaagaaacaacaggc

SEQ ID NO: 5534483 - DNA, 25 bp, Homo sapien
caagacattggcaacaagtgagaaa

SEQ ID NO: 5534484 - DNA, 25 bp, Homo sapien
agaggcacacaaactgtccaacagc

SEQ ID NO: 5534485 - DNA, 25 bp, Homo sapien
tggatggcatctgaatagagtgttc

SEQ ID NO: 5534486 - DNA, 25 bp, Homo sapien
gtacaaatatacacagtggaccctc

SEQ ID NO: 5534487 - DNA, 25 bp, Homo sapien
gagaaaagaatatggaccatcggtc

SEQ ID NO: 5534488 - DNA, 25 bp, Homo sapien
cagtggaccctccatccatctggcc

SEQ ID NO: 5534489 - DNA, 25 bp, Homo sapien
cagcttaactctagaagggacctct

SEQ ID NO: 5534490 - DNA, 25 bp, Homo sapien
cagctactgagctgcgttccgggag

SEQ ID NO: 5534491 - DNA, 25 bp, Homo sapien
gcagcagcagatgtacagctactga

SEQ ID NO: 5534492 - DNA, 25 bp, Homo sapien
gcagagtatctccagatcccccgcc

SEQ ID NO: 5534493 - DNA, 25 bp, Homo sapien
gcttagtgaccagcacccgctcacg

SEQ ID NO: 5534494 - DNA, 25 bp, Homo sapien
ccgtggggcaccttaccacccctga

SEQ ID NO: 5534495 - DNA, 25 bp, Homo sapien
ccgccagcaaccattacggtctgtc

SEQ ID NO: 5534496 - DNA, 25 bp, Homo sapien
tgaacgccagttacagctggacaac

SEQ ID NO: 5534497 - DNA, 25 bp, Homo sapien
tgcacaaccgccaaaatgacgtcca

SEQ ID NO: 5534498 - DNA, 25 bp, Homo sapien
tcctgaccgtgacctttgataccgt

SEQ ID NO: 5534499 - DNA, 25 bp, Homo sapien
accgtcagcggctctgccatgttgc

SEQ ID NO: 5534500 - DNA, 25 bp, Homo sapien
agagtggctgatggcggtgtcgcga

SEQ ID NO: 5534501 - DNA, 25 bp, Homo sapien
tcgcgacaccgccatcagccactct

SEQ ID NO: 5534502 - DNA, 25 bp, Homo sapien
aggtctgtagatgccacacacaggt

SEQ ID NO: 5534503 - DNA, 25 bp, Homo sapien
agctccagttttatgcttgactttg

SEQ ID NO: 5534504 - DNA, 25 bp, Homo sapien
tatctgtgggaatatttataagttt

SEQ ID NO: 5534505 - DNA, 25 bp, Homo sapien
ctaaggtctgtagatgccacacaca

SEQ ID NO: 5534506 - DNA, 25 bp, Homo sapien
gggtagctgataactttggcagtgc

SEQ ID NO: 5534507 - DNA, 25 bp, Homo sapien
acatggcaaatgcttaataaatggt

SEQ ID NO: 5534508 - DNA, 25 bp, Homo sapien
atatttgattctaggaagagtagat

SEQ ID NO: 5534509 - DNA, 25 bp, Homo sapien
caagtcttcctgtatggaggtcttc

SEQ ID NO: 5534510 - DNA, 25 bp, Homo sapien
tatgggtagctgataactttggcag

SEQ ID NO: 5534511 - DNA, 25 bp, Homo sapien
cttgactttgtctatctgtgggaat

SEQ ID NO: 5534512 - DNA, 25 bp, Homo sapien
atgatctaaggtctgtagatgccac

SEQ ID NO: 5534513 - DNA, 25 bp, Homo sapien
ggaagctgagattggtatatgacaa

SEQ ID NO: 5534514 - DNA, 25 bp, Homo sapien
cagcctcccaattccgggcagaccc

SEQ ID NO: 5534515 - DNA, 25 bp, Homo sapien
cacactggaacatatcaagaccggt

SEQ ID NO: 5534516 - DNA, 25 bp, Homo sapien
caagaccggttaacaaagctacagg

SEQ ID NO: 5534517 - DNA, 25 bp, Homo sapien
ctgaggaacatgcagctgccaaatg

SEQ ID NO: 5534518 - DNA, 25 bp, Homo sapien
ctggccccttccggcctgaagctgc

SEQ ID NO: 5534519 - DNA, 25 bp, Homo sapien
ccgcgccatgtccacccctccgttg

SEQ ID NO: 5534520 - DNA, 25 bp, Homo sapien
gtgtaccgcaccatggagatcttcc

SEQ ID NO: 5534521 - DNA, 25 bp, Homo sapien
gtgcaggacatcgtgtaccgcacca

SEQ ID NO: 5534522 - DNA, 25 bp, Homo sapien
gggcagacccctgacacctgctgtc

SEQ ID NO: 5534523 - DNA, 25 bp, Homo sapien
aaatgcaatgaaaactgtggtggga

SEQ ID NO: 5534524 - DNA, 25 bp, Homo sapien
tcctgggcatgcaccctagagaaac

SEQ ID NO: 5534525 - DNA, 25 bp, Homo sapien
atgtacgtccacctgccccacgagc

SEQ ID NO: 5534526 - DNA, 25 bp, Homo sapien
gttccaggaacagatgtacgtccac

SEQ ID NO: 5534527 - DNA, 25 bp, Homo sapien
catcccctatgacgcaggaaggaga

SEQ ID NO: 5534528 - DNA, 25 bp, Homo sapien
ccctagagaaacctcgccaagatgt

SEQ ID NO: 5534529 - DNA, 25 bp, Homo sapien
gctcttaggggcagacaatactttt

SEQ ID NO: 5534530 - DNA, 25 bp, Homo sapien
acagaacgcacataagcaaacgctc

SEQ ID NO: 5534531 - DNA, 25 bp, Homo sapien
accgtgttctcgggcctgcagttgg

SEQ ID NO: 5534532 - DNA, 25 bp, Homo sapien
agaggcactcctcacccacatcccc

SEQ ID NO: 5534533 - DNA, 25 bp, Homo sapien
ccagcgatcctcacaccgtgttctc

SEQ ID NO: 5534534 - DNA, 25 bp, Homo sapien
ttataaagcttcactggagaggcac

SEQ ID NO: 5534535 - DNA, 25 bp, Homo sapien
agtcaagaattcaaaagaaaaatcc

SEQ ID NO: 5534536 - DNA, 25 bp, Homo sapien
aaggatgtgtttatttacaagatac

SEQ ID NO: 5534537 - DNA, 25 bp, Homo sapien
atttaataggaattaaagtgcttaa

SEQ ID NO: 5534538 - DNA, 25 bp, Homo sapien
atactttcacacttgagtcaactgt

SEQ ID NO: 5534539 - DNA, 25 bp, Homo sapien
caaaagaaaaatccagatacgctta

SEQ ID NO: 5534540 - DNA, 25 bp, Homo sapien
attccaaaaacatacattctcaaac

SEQ ID NO: 5534541 - DNA, 25 bp, Homo sapien
agctagaaaagaaaaattacttgtg

SEQ ID NO: 5534542 - DNA, 25 bp, Homo sapien
tctcaaacttatcagtcaagaattc

SEQ ID NO: 5534543 - DNA, 25 bp, Homo sapien
acattcacatagctagaaaagaaaa

SEQ ID NO: 5534544 - DNA, 25 bp, Homo sapien
tgagtcaactgtaaaattccaaaaa

SEQ ID NO: 5534545 - DNA, 25 bp, Homo sapien
ttttgagtcgaagtcttgctctgtc

SEQ ID NO: 5534546 - DNA, 25 bp, Homo sapien
acagctatattccaggaagaagtgg

SEQ ID NO: 5534547 - DNA, 25 bp, Homo sapien
gtgagaaatactacagctatattcc

SEQ ID NO: 5534548 - DNA, 25 bp, Homo sapien
ctttgctagccacaaaagtagtatt

SEQ ID NO: 5534549 - DNA, 25 bp, Homo sapien
aaatagatgcacaacctttgctagc

SEQ ID NO: 5534550 - DNA, 25 bp, Homo sapien
tcagagcttgaaaaaaggtaactac

SEQ ID NO: 5534551 - DNA, 25 bp, Homo sapien
caatagagcaggtgttacttatctc

SEQ ID NO: 5534552 - DNA, 25 bp, Homo sapien
ctgtatgacagacatcagtagtgtc

SEQ ID NO: 5534553 - DNA, 25 bp, Homo sapien
tagggtttgttgtaatagtgaatca

SEQ ID NO: 5534554 - DNA, 25 bp, Homo sapien
aatagtgaatcaatagagcaggtgt

SEQ ID NO: 5534555 - DNA, 25 bp, Homo sapien
atgaaacattaacctgaataactgc

SEQ ID NO: 5534556 - DNA, 25 bp, Homo sapien
cttaagtctaacacgtaatctgaac

SEQ ID NO: 5534557 - DNA, 25 bp, Homo sapien
agtgtcaaatctcacagataaggcc

SEQ ID NO: 5534558 - DNA, 25 bp, Homo sapien
tatcagacgtgacaaagatttgagt

SEQ ID NO: 5534559 - DNA, 25 bp, Homo sapien
tttacatgacaaaaagtgagttata

SEQ ID NO: 5534560 - DNA, 25 bp, Homo sapien
gttatgtgggtagtacaacttgagt

SEQ ID NO: 5534561 - DNA, 25 bp, Homo sapien
acaaaaacttagtgtcaaatctcac

SEQ ID NO: 5534562 - DNA, 25 bp, Homo sapien
atattttcagttatgtgggtagtac

SEQ ID NO: 5534563 - DNA, 25 bp, Homo sapien
aatctcacagataaggccaaatggc

SEQ ID NO: 5534564 - DNA, 25 bp, Homo sapien
gaagattataatatcagacgtgaca

SEQ ID NO: 5534565 - DNA, 25 bp, Homo sapien
atttgcctggacaacttgggtttgt

SEQ ID NO: 5534566 - DNA, 25 bp, Homo sapien
aaaaggactagtataatttccaatc

SEQ ID NO: 5534567 - DNA, 25 bp, Homo sapien
taaaaaacttacatagaagattata

SEQ ID NO: 5534568 - DNA, 25 bp, Homo sapien
gaatgatacggcatatttgggggac

SEQ ID NO: 5534569 - DNA, 25 bp, Homo sapien
tttaatacctcgaggagggtgtgag

SEQ ID NO: 5534570 - DNA, 25 bp, Homo sapien
aattataagattgtagggaactggg

SEQ ID NO: 5534571 - DNA, 25 bp, Homo sapien
gattgtgctgatgatcgcataactc

SEQ ID NO: 5534572 - DNA, 25 bp, Homo sapien
gtgctgggctacaggattcagtaaa

SEQ ID NO: 5534573 - DNA, 25 bp, Homo sapien
taaagttattgatgagattggctgc

SEQ ID NO: 5534574 - DNA, 25 bp, Homo sapien
cacacatatagattagcgtaaccac

SEQ ID NO: 5534575 - DNA, 25 bp, Homo sapien
tggctgcattgtggattctgaaata

SEQ ID NO: 5534576 - DNA, 25 bp, Homo sapien
ggcttgatgaggacagagtctattt

SEQ ID NO: 5534577 - DNA, 25 bp, Homo sapien
gtgtacacagtacagttgacttttt

SEQ ID NO: 5534578 - DNA, 25 bp, Homo sapien
ttttagagaacccctgagtgctggg

SEQ ID NO: 5534579 - DNA, 25 bp, Homo sapien
acgtggatgtgtacagaaaccgttc

SEQ ID NO: 5534580 - DNA, 25 bp, Homo sapien
acgtcctgcattatggtacagcttc

SEQ ID NO: 5534581 - DNA, 25 bp, Homo sapien
tcacccgtgaagtgcacgtggatgt

SEQ ID NO: 5534582 - DNA, 25 bp, Homo sapien
ataaagtagcagacagacactgttt

SEQ ID NO: 5534583 - DNA, 25 bp, Homo sapien
aagtaggtactagaactgatcaccc

SEQ ID NO: 5534584 - DNA, 25 bp, Homo sapien
agaaaccgttctaaggctgtattcc

SEQ ID NO: 5534585 - DNA, 25 bp, Homo sapien
tgtgacaatacagtggaactattcc

SEQ ID NO: 5534586 - DNA, 25 bp, Homo sapien
ctagaacctcagaaagtgcaaacac

SEQ ID NO: 5534587 - DNA, 25 bp, Homo sapien
ttgaagcaagtatgtccagtcacac

SEQ ID NO: 5534588 - DNA, 25 bp, Homo sapien
cacaccaaaactgacgtcctgcatt

SEQ ID NO: 5534589 - DNA, 25 bp, Homo sapien
tcagggtatgtatcaaattgggaaa

SEQ ID NO: 5534590 - DNA, 25 bp, Homo sapien
acgtgagcttctcccgggcttccgt

SEQ ID NO: 5534591 - DNA, 25 bp, Homo sapien
gatgacaacagcaacgacctgctgc

SEQ ID NO: 5534592 - DNA, 25 bp, Homo sapien
cgcacttccgcaatgagatcggggg

SEQ ID NO: 5534593 - DNA, 25 bp, Homo sapien
ctcggtgttggaagttcccaaggag

SEQ ID NO: 5534594 - DNA, 25 bp, Homo sapien
ccaattacttcggcgtggatgagaa

SEQ ID NO: 5534595 - DNA, 25 bp, Homo sapien
taccgcaccaacgccagcatctcgg

SEQ ID NO: 5534596 - DNA, 25 bp, Homo sapien
ccagcacagaggacctaaactgcaa

SEQ ID NO: 5534597 - DNA, 25 bp, Homo sapien
aggattacttcgtgggcaaagaaca

SEQ ID NO: 5534598 - DNA, 25 bp, Homo sapien
tgctcagctgcccgcacttccgcaa

SEQ ID NO: 5534599 - DNA, 25 bp, Homo sapien
ctaaactgcaaggagaacttggagc

SEQ ID NO: 5534600 - DNA, 25 bp, Homo sapien
gcgcccgctactaccaggattactt

SEQ ID NO: 5534601 - DNA, 25 bp, Homo sapien
gttgctaagccggagccatttcagc

SEQ ID NO: 5534602 - DNA, 25 bp, Homo sapien
cagctgtcagagttggtcctggctg

SEQ ID NO: 5534603 - DNA, 25 bp, Homo sapien
agacttccccctagagtggtggtcc

SEQ ID NO: 5534604 - DNA, 25 bp, Homo sapien
ggggcagggctgacttttctcctac

SEQ ID NO: 5534605 - DNA, 25 bp, Homo sapien
gcttgagggaaaaagatcctgtcta

SEQ ID NO: 5534606 - DNA, 25 bp, Homo sapien
tctcctacaggaggaacaatgtggg

SEQ ID NO: 5534607 - DNA, 25 bp, Homo sapien
ggggctcatatccagggacccaaaa

SEQ ID NO: 5534608 - DNA, 25 bp, Homo sapien
gccatcttggagaagctccaggggc

SEQ ID NO: 5534609 - DNA, 25 bp, Homo sapien
agttaaccatggacagtgaggtttc

SEQ ID NO: 5534610 - DNA, 25 bp, Homo sapien
tgtgtaggaggttccacattggagg

SEQ ID NO: 5534611 - DNA, 25 bp, Homo sapien
ggctcctcaagataacggcgagtcc

SEQ ID NO: 5534612 - DNA, 25 bp, Homo sapien
cctgaagatgtagaccctcaaggga

SEQ ID NO: 5534613 - DNA, 25 bp, Homo sapien
cggggaccctcagcgctaccttttg

SEQ ID NO: 5534614 - DNA, 25 bp, Homo sapien
actcaacaacctaaggacgcaggag

SEQ ID NO: 5534615 - DNA, 25 bp, Homo sapien
ggagtcagagcgtggatttttgtat

SEQ ID NO: 5534616 - DNA, 25 bp, Homo sapien
gtagattggaatcgccctgaagatg

SEQ ID NO: 5534617 - DNA, 25 bp, Homo sapien
ccttccatctacgctcgggaggcct

SEQ ID NO: 5534618 - DNA, 25 bp, Homo sapien
ggtccgagctcgtccgtagattgga

SEQ ID NO: 5534619 - DNA, 25 bp, Homo sapien
ggccactcccaggatgctgggtctc

SEQ ID NO: 5534620 - DNA, 25 bp, Homo sapien
gcgcttgcgctcccggctacatggg

SEQ ID NO: 5534621 - DNA, 25 bp, Homo sapien
gggaggcctgacgcgtctcctccat

SEQ ID NO: 5534622 - DNA, 25 bp, Homo sapien
cagtccacgcactcccggatgcact

SEQ ID NO: 5534623 - DNA, 25 bp, Homo sapien
tctgataccactacacctgagttcg

SEQ ID NO: 5534624 - DNA, 25 bp, Homo sapien
tgaaagtgaagctgatacaagtttt

SEQ ID NO: 5534625 - DNA, 25 bp, Homo sapien
caggttttaagaataatgttatgat

SEQ ID NO: 5534626 - DNA, 25 bp, Homo sapien
tcgatgccagcatggtttgaaagtg

SEQ ID NO: 5534627 - DNA, 25 bp, Homo sapien
catggtttgaaagtgaagctgatac

SEQ ID NO: 5534628 - DNA, 25 bp, Homo sapien
taggttaacattagacaactacatc

SEQ ID NO: 5534629 - DNA, 25 bp, Homo sapien
aaggatgttaaaaaactatagtatg

SEQ ID NO: 5534630 - DNA, 25 bp, Homo sapien
taagttgatattaaaaacacattgg

SEQ ID NO: 5534631 - DNA, 25 bp, Homo sapien
tatagtatgaagaatgtaataatat

SEQ ID NO: 5534632 - DNA, 25 bp, Homo sapien
ccactacacctgagttcgatgccag

SEQ ID NO: 5534633 - DNA, 25 bp, Homo sapien
gtatatgagaaatcacaccaagctc

SEQ ID NO: 5534634 - DNA, 25 bp, Homo sapien
gcctgctgtagggcagttcacgttc

SEQ ID NO: 5534635 - DNA, 25 bp, Homo sapien
acgttctggagtcgttcagcaccac

SEQ ID NO: 5534636 - DNA, 25 bp, Homo sapien
ggtcatataatcaaggtggctggcc

SEQ ID NO: 5534637 - DNA, 25 bp, Homo sapien
tgggtctggaacagtcctggtttat

SEQ ID NO: 5534638 - DNA, 25 bp, Homo sapien
ctgaacaataaggtaaaagcatttc

SEQ ID NO: 5534639 - DNA, 25 bp, Homo sapien
gcaggttaggtgagcttactgaatc

SEQ ID NO: 5534640 - DNA, 25 bp, Homo sapien
ttgactgtagaagatgcctgctgta

SEQ ID NO: 5534641 - DNA, 25 bp, Homo sapien
tgcgaactctttgaccggaggaagg

SEQ ID NO: 5534642 - DNA, 25 bp, Homo sapien
tccaggagacctcagcttgactgta

SEQ ID NO: 5534643 - DNA, 25 bp, Homo sapien
caggtgcttgtaacctccaggagac

SEQ ID NO: 5534644 - DNA, 25 bp, Homo sapien
gcataaatagaatagcacggccttt

SEQ ID NO: 5534645 - DNA, 25 bp, Homo sapien
cagactgctctaagggcaaacacga

SEQ ID NO: 5534646 - DNA, 25 bp, Homo sapien
gggcaggattaaacgacttcacacc

SEQ ID NO: 5534647 - DNA, 25 bp, Homo sapien
ttccgcttcacgcccagactgctct

SEQ ID NO: 5534648 - DNA, 25 bp, Homo sapien
cccaggtgctccaagctctccagag

SEQ ID NO: 5534649 - DNA, 25 bp, Homo sapien
tacctccggcccactctggttgctc

SEQ ID NO: 5534650 - DNA, 25 bp, Homo sapien
ccaccttcgagattggccgcagatg

SEQ ID NO: 5534651 - DNA, 25 bp, Homo sapien
aggccagcctcacacagtagcgaat

SEQ ID NO: 5534652 - DNA, 25 bp, Homo sapien
ccttacgcattagcgggcaggatta

SEQ ID NO: 5534653 - DNA, 25 bp, Homo sapien
cagtaacccagaagaagatgacggg

SEQ ID NO: 5534654 - DNA, 25 bp, Homo sapien
ttcacaccacgaggtgcaagactgg

SEQ ID NO: 5534655 - DNA, 25 bp, Homo sapien
acacggtggaaagtccttacgcatt

SEQ ID NO: 5534656 - DNA, 25 bp, Homo sapien
caatctcagaacagatagaaccatt

SEQ ID NO: 5534657 - DNA, 25 bp, Homo sapien
ccgtccacagctgattgtgtgcttc

SEQ ID NO: 5534658 - DNA, 25 bp, Homo sapien
ttaagatggaaatcagtgtgtatct

SEQ ID NO: 5534659 - DNA, 25 bp, Homo sapien
agcgttcttagcacatgtgaaagct

SEQ ID NO: 5534660 - DNA, 25 bp, Homo sapien
tgtgaaagcttaacatgaactcttc

SEQ ID NO: 5534661 - DNA, 25 bp, Homo sapien
tatccggcactattaagatggaaat

SEQ ID NO: 5534662 - DNA, 25 bp, Homo sapien
aatagctcagtgtcattggtgtttt

SEQ ID NO: 5534663 - DNA, 25 bp, Homo sapien
atcaccagcacacactgatccaaga

SEQ ID NO: 5534664 - DNA, 25 bp, Homo sapien
tagggggattttgacctctccctca

SEQ ID NO: 5534665 - DNA, 25 bp, Homo sapien
ttccccgtgattcctggggcaggag

SEQ ID NO: 5534666 - DNA, 25 bp, Homo sapien
aatcagtgtgtatctttcagcgttc

SEQ ID NO: 5534667 - DNA, 25 bp, Homo sapien
agtttatttgtgggtagaatggttg

SEQ ID NO: 5534668 - DNA, 25 bp, Homo sapien
atggttggaagtagcatgctcaaga

SEQ ID NO: 5534669 - DNA, 25 bp, Homo sapien
gtttgatggaaacagctgtccctct

SEQ ID NO: 5534670 - DNA, 25 bp, Homo sapien
gtaggaattgtttggcttaatagtc

SEQ ID NO: 5534671 - DNA, 25 bp, Homo sapien
aaagtcatgcatctgattgatcacc

SEQ ID NO: 5534672 - DNA, 25 bp, Homo sapien
cagagcacagctcctccgtaatcct

SEQ ID NO: 5534673 - DNA, 25 bp, Homo sapien
tgatcaccatatatgctcccagagc

SEQ ID NO: 5534674 - DNA, 25 bp, Homo sapien
cagaaggtatgaaggtgaacattta

SEQ ID NO: 5534675 - DNA, 25 bp, Homo sapien
catgccctcgtctcaggtgaagctg

SEQ ID NO: 5534676 - DNA, 25 bp, Homo sapien
cagtgctagcattgttgattccttg

SEQ ID NO: 5534677 - DNA, 25 bp, Homo sapien
ctgatgttcccagagtcatgccctc

SEQ ID NO: 5534678 - DNA, 25 bp, Homo sapien
ttcctctcccgatcctgaccctgcc

SEQ ID NO: 5534679 - DNA, 25 bp, Homo sapien
aacctgactgcaatttgggggtagg

SEQ ID NO: 5534680 - DNA, 25 bp, Homo sapien
ttcaacccctactgcggagaccagg

SEQ ID NO: 5534681 - DNA, 25 bp, Homo sapien
ggagaccagggccccactatcctta

SEQ ID NO: 5534682 - DNA, 25 bp, Homo sapien
tccggtccccttggataatgcttta

SEQ ID NO: 5534683 - DNA, 25 bp, Homo sapien
gtgagcggtgtctaccgccgtgcag

SEQ ID NO: 5534684 - DNA, 25 bp, Homo sapien
atattggatatagttcaacccctac

SEQ ID NO: 5534685 - DNA, 25 bp, Homo sapien
gcctctgggacctgactctgtctcc

SEQ ID NO: 5534686 - DNA, 25 bp, Homo sapien
gcgggcctagccatgattctacttc

SEQ ID NO: 5534687 - DNA, 25 bp, Homo sapien
ccccgctcccatcttggtgtcaccc

SEQ ID NO: 5534688 - DNA, 25 bp, Homo sapien
cctgaccctgccgcctggttctgag

SEQ ID NO: 5534689 - DNA, 25 bp, Homo sapien
ctcacacctgcgacaatactggata

SEQ ID NO: 5534690 - DNA, 25 bp, Homo sapien
ttccgtaactacacagtgatctact

SEQ ID NO: 5534691 - DNA, 25 bp, Homo sapien
tagtcatgaagttacatctcagttc

SEQ ID NO: 5534692 - DNA, 25 bp, Homo sapien
tttggtgacatgctctgcaaaactg

SEQ ID NO: 5534693 - DNA, 25 bp, Homo sapien
ggatgaggacttttacaatctgcac

SEQ ID NO: 5534694 - DNA, 25 bp, Homo sapien
ttgagaacataactgactaggtgta

SEQ ID NO: 5534695 - DNA, 25 bp, Homo sapien
gactaggtgtagaattgtggcaaag

SEQ ID NO: 5534696 - DNA, 25 bp, Homo sapien
tgctgacaggtaacaccacattgcc

SEQ ID NO: 5534697 - DNA, 25 bp, Homo sapien
atttctgctggtttgtgttggtggg

SEQ ID NO: 5534698 - DNA, 25 bp, Homo sapien
gcaagacatctttgagtagagatcc

SEQ ID NO: 5534699 - DNA, 25 bp, Homo sapien
tgtggcaaagggtaattatattcaa

SEQ ID NO: 5534700 - DNA, 25 bp, Homo sapien
ttctaatgtacaatccgcggctctt

SEQ ID NO: 5534701 - DNA, 25 bp, Homo sapien
cgcggcgcaaagccaggctttctaa

SEQ ID NO: 5534702 - DNA, 25 bp, Homo sapien
tcattttataggtgtggaaagggag

SEQ ID NO: 5534703 - DNA, 25 bp, Homo sapien
aggcgggtttttactctcaaggagc

SEQ ID NO: 5534704 - DNA, 25 bp, Homo sapien
ttcaacaaattcgagcgcctggcag

SEQ ID NO: 5534705 - DNA, 25 bp, Homo sapien
acgtttgcataggacttcacagttc

SEQ ID NO: 5534706 - DNA, 25 bp, Homo sapien
ggccctgcaccaagcctagggtgat

SEQ ID NO: 5534707 - DNA, 25 bp, Homo sapien
gattgcgaaaggaaacatctcacgt

SEQ ID NO: 5534708 - DNA, 25 bp, Homo sapien
ccccgtgcctttggacgggtgagga

SEQ ID NO: 5534709 - DNA, 25 bp, Homo sapien
gctctgaagctcagagcgagacggc

SEQ ID NO: 5534710 - DNA, 25 bp, Homo sapien
ttaagcaggctttgagcagttcatc

SEQ ID NO: 5534711 - DNA, 25 bp, Homo sapien
acactgcgctaaaagtgaggcatgg

SEQ ID NO: 5534712 - DNA, 25 bp, Homo sapien
aggagaagcggatttaccactagta

SEQ ID NO: 5534713 - DNA, 25 bp, Homo sapien
gagaccaagacaggaggtcttaagt

SEQ ID NO: 5534714 - DNA, 25 bp, Homo sapien
cttggaatatacacagggcaatttg

SEQ ID NO: 5534715 - DNA, 25 bp, Homo sapien
cagggcaatttgtgtaggatcacac

SEQ ID NO: 5534716 - DNA, 25 bp, Homo sapien
tccccgctaccccagaactgcacgt

SEQ ID NO: 5534717 - DNA, 25 bp, Homo sapien
tggccctacaaacccagatcgtccc

SEQ ID NO: 5534718 - DNA, 25 bp, Homo sapien
tcgagatcagcttagacaacatagc

SEQ ID NO: 5534719 - DNA, 25 bp, Homo sapien
aggcccctaacttgcaggacctgcc

SEQ ID NO: 5534720 - DNA, 25 bp, Homo sapien
gaactgcacgtgtttctggccctac

SEQ ID NO: 5534721 - DNA, 25 bp, Homo sapien
caagatgctgcctctacaaacacac

SEQ ID NO: 5534722 - DNA, 25 bp, Homo sapien
ttttctttgcgtgtgggcctgctga

SEQ ID NO: 5534723 - DNA, 25 bp, Homo sapien
tccctcccaaacattcacggttgct

SEQ ID NO: 5534724 - DNA, 25 bp, Homo sapien
aatgaaggcaaagtcctatattttg

SEQ ID NO: 5534725 - DNA, 25 bp, Homo sapien
tgaggactcaagacacttgtgaaac

SEQ ID NO: 5534726 - DNA, 25 bp, Homo sapien
aacacgtcttttatcaggtctttcc

SEQ ID NO: 5534727 - DNA, 25 bp, Homo sapien
acccacacctaattccacagcattt

SEQ ID NO: 5534728 - DNA, 25 bp, Homo sapien
attcacggttgctttacccacacct

SEQ ID NO: 5534729 - DNA, 25 bp, Homo sapien
ttcagctttagtagaatgaggactc

SEQ ID NO: 5534730 - DNA, 25 bp, Homo sapien
tttgatgtcaggataagaccttttc

SEQ ID NO: 5534731 - DNA, 25 bp, Homo sapien
gtgggcctgctgatgcaggctgcac

SEQ ID NO: 5534732 - DNA, 25 bp, Homo sapien
acaagttttggaacaaatacaactg

SEQ ID NO: 5534733 - DNA, 25 bp, Homo sapien
ttgctgcgtcgatcgccacaggtga

SEQ ID NO: 5534734 - DNA, 25 bp, Homo sapien
cctcgagacatttagggcctctgtg

SEQ ID NO: 5534735 - DNA, 25 bp, Homo sapien
gcgagcgccaacttcctccccgacg

SEQ ID NO: 5534736 - DNA, 25 bp, Homo sapien
ttagcacacccaggcttgctgcgtc

SEQ ID NO: 5534737 - DNA, 25 bp, Homo sapien
aattcttcccggtgctccaaggcca

SEQ ID NO: 5534738 - DNA, 25 bp, Homo sapien
agcccgcgccccacactctgagggg

SEQ ID NO: 5534739 - DNA, 25 bp, Homo sapien
gccccacactctgaggggctcccgg

SEQ ID NO: 5534740 - DNA, 25 bp, Homo sapien
caattcttagcacacccaggcttgc

SEQ ID NO: 5534741 - DNA, 25 bp, Homo sapien
gagaagaatgatccgattgaaaact

SEQ ID NO: 5534742 - DNA, 25 bp, Homo sapien
gaaggagagagagcctcaattctta

SEQ ID NO: 5534743 - DNA, 25 bp, Homo sapien
cgattgaaaacttaggcaccggtta

SEQ ID NO: 5534744 - DNA, 25 bp, Homo sapien
agcaagagacctaagtgtgatcaag

SEQ ID NO: 5534745 - DNA, 25 bp, Homo sapien
atgggaaagcaaggacatatatctt

SEQ ID NO: 5534746 - DNA, 25 bp, Homo sapien
cacttaagaaccatgggaaagcaag

SEQ ID NO: 5534747 - DNA, 25 bp, Homo sapien
ggagttacaagcagtgggattgttt

SEQ ID NO: 5534748 - DNA, 25 bp, Homo sapien
agtaggtatttaaagctgtctggtc

SEQ ID NO: 5534749 - DNA, 25 bp, Homo sapien
gtacacactgccaggagttacaagc

SEQ ID NO: 5534750 - DNA, 25 bp, Homo sapien
gattgggttcagtgatgacagagta

SEQ ID NO: 5534751 - DNA, 25 bp, Homo sapien
tcagccttgagaaacacaaaccacc

SEQ ID NO: 5534752 - DNA, 25 bp, Homo sapien
gtgatggagacacatatggaaataa

SEQ ID NO: 5534753 - DNA, 25 bp, Homo sapien
tagtgtgagatttccgacatgcacc

SEQ ID NO: 5534754 - DNA, 25 bp, Homo sapien
atttgacaagtaaacggatgaattc

SEQ ID NO: 5534755 - DNA, 25 bp, Homo sapien
taccttgctctgagcacggagagcc

SEQ ID NO: 5534756 - DNA, 25 bp, Homo sapien
ggttgaattcaaagtcccagaaggc

SEQ ID NO: 5534757 - DNA, 25 bp, Homo sapien
accctccgcgcatagggtccttggt

SEQ ID NO: 5534758 - DNA, 25 bp, Homo sapien
ctggagcgctcacctggttgaattc

SEQ ID NO: 5534759 - DNA, 25 bp, Homo sapien
gccaccctccgcgcatagggtcctt

SEQ ID NO: 5534760 - DNA, 25 bp, Homo sapien
aaaagtagggccttgctcctctacc

SEQ ID NO: 5534761 - DNA, 25 bp, Homo sapien
cgtgaagccggccccttacattttg

SEQ ID NO: 5534762 - DNA, 25 bp, Homo sapien
cggccccttacattttgcgaagtgc

SEQ ID NO: 5534763 - DNA, 25 bp, Homo sapien
ccccaaaagtagggccttgctcctc

SEQ ID NO: 5534764 - DNA, 25 bp, Homo sapien
cctctaccttgctctgagcacggag

SEQ ID NO: 5534765 - DNA, 25 bp, Homo sapien
tacattttgcgaagtgcattatagt

SEQ ID NO: 5534766 - DNA, 25 bp, Homo sapien
aaacactcagaacttctccatgtgt

SEQ ID NO: 5534767 - DNA, 25 bp, Homo sapien
ggaacctcatctgggactatcggcc

SEQ ID NO: 5534768 - DNA, 25 bp, Homo sapien
tcactcacatctcatgggtgatccc

SEQ ID NO: 5534769 - DNA, 25 bp, Homo sapien
tcatctgggactatcggccaaaaca

SEQ ID NO: 5534770 - DNA, 25 bp, Homo sapien
tctcatgggtgatcccagctgttgc

SEQ ID NO: 5534771 - DNA, 25 bp, Homo sapien
tctgggcttcctagaagacactgtt

SEQ ID NO: 5534772 - DNA, 25 bp, Homo sapien
ccatgtgtctgggcttcctagaaga

SEQ ID NO: 5534773 - DNA, 25 bp, Homo sapien
tcccagctgttgctggaacctcatc

SEQ ID NO: 5534774 - DNA, 25 bp, Homo sapien
gggactatcggccaaaacactcaga

SEQ ID NO: 5534775 - DNA, 25 bp, Homo sapien
acttctccatgtgtctgggcttcct

SEQ ID NO: 5534776 - DNA, 25 bp, Homo sapien
gttgctggaacctcatctgggacta

SEQ ID NO: 5534777 - DNA, 25 bp, Homo sapien
acctctcaatggtccggggtgtcac

SEQ ID NO: 5534778 - DNA, 25 bp, Homo sapien
gtgacaccccggaccattgagaggt

SEQ ID NO: 5534779 - DNA, 25 bp, Homo sapien
gtcttgtgagaccaagcacagatct

SEQ ID NO: 5534780 - DNA, 25 bp, Homo sapien
agtctcagtcttgcctccagtcacc

SEQ ID NO: 5534781 - DNA, 25 bp, Homo sapien
atcatgaaagatcagagctgcaggg

SEQ ID NO: 5534782 - DNA, 25 bp, Homo sapien
atggaagtagttgggcctaattcac

SEQ ID NO: 5534783 - DNA, 25 bp, Homo sapien
agggcctttagggagtctaaggcag

SEQ ID NO: 5534784 - DNA, 25 bp, Homo sapien
ttgaaaagaacacaccctatcccat

SEQ ID NO: 5534785 - DNA, 25 bp, Homo sapien
tcaggaaaggaactggtctcaagta

SEQ ID NO: 5534786 - DNA, 25 bp, Homo sapien
tttgctaagatccaagagaccagac

SEQ ID NO: 5534787 - DNA, 25 bp, Homo sapien
taacttcgcaacacacaactgaccc

SEQ ID NO: 5534788 - DNA, 25 bp, Homo sapien
accttagcaaggctcagtctcagtc

SEQ ID NO: 5534789 - DNA, 25 bp, Homo sapien
gcagggctctaaatggaagtagttg

SEQ ID NO: 5534790 - DNA, 25 bp, Homo sapien
caactgaagctgagctcaggaatgc

SEQ ID NO: 5534791 - DNA, 25 bp, Homo sapien
ggtatcagagtcatcaaaaggggaa

SEQ ID NO: 5534792 - DNA, 25 bp, Homo sapien
cagggtgctgacccaccatccaact

SEQ ID NO: 5534793 - DNA, 25 bp, Homo sapien
agctcaggaatgcctaagacaactc

SEQ ID NO: 5534794 - DNA, 25 bp, Homo sapien
ctggtgacttctggtgaatctagac

SEQ ID NO: 5534795 - DNA, 25 bp, Homo sapien
tcactgagacagaccttctggtgac

SEQ ID NO: 5534796 - DNA, 25 bp, Homo sapien
tggtaagtttgatggccctgcctac

SEQ ID NO: 5534797 - DNA, 25 bp, Homo sapien
gtaagacacacaataagagctataa

SEQ ID NO: 5534798 - DNA, 25 bp, Homo sapien
gtaacactgaaacacaaaatgcaac

SEQ ID NO: 5534799 - DNA, 25 bp, Homo sapien
ctagtatgttcagaaacgcagggtg

SEQ ID NO: 5534800 - DNA, 25 bp, Homo sapien
aatacataataagcaagagaaatac

SEQ ID NO: 5534801 - DNA, 25 bp, Homo sapien
agcaaactgtgcactttgatatatc

SEQ ID NO: 5534802 - DNA, 25 bp, Homo sapien
aagggcatcccctgaatggcccaga

SEQ ID NO: 5534803 - DNA, 25 bp, Homo sapien
gcgtccaggcactctggtctgggtg

SEQ ID NO: 5534804 - DNA, 25 bp, Homo sapien
cagcctagaatgattggcaagtaac

SEQ ID NO: 5534805 - DNA, 25 bp, Homo sapien
aggaaaataatcagatttgtttgga

SEQ ID NO: 5534806 - DNA, 25 bp, Homo sapien
gtaacacagttactatgaaacccaa

SEQ ID NO: 5534807 - DNA, 25 bp, Homo sapien
ttctgcatgtccacaaagggcatcc

SEQ ID NO: 5534808 - DNA, 25 bp, Homo sapien
catattacttcatacagcaaactgt

SEQ ID NO: 5534809 - DNA, 25 bp, Homo sapien
ttacatcagcctagaatgattggca

SEQ ID NO: 5534810 - DNA, 25 bp, Homo sapien
cacaaagggcatcccctgaatggcc

SEQ ID NO: 5534811 - DNA, 25 bp, Homo sapien
atgaaacccaaattgttacaaaatg

SEQ ID NO: 5534812 - DNA, 25 bp, Homo sapien
cacagtaaagaatggcatagagaag

SEQ ID NO: 5534813 - DNA, 25 bp, Homo sapien
ggaagggaatcaaactagcatttat

SEQ ID NO: 5534814 - DNA, 25 bp, Homo sapien
cataggtacaagataaatgaagctc

SEQ ID NO: 5534815 - DNA, 25 bp, Homo sapien
ggagagagacctgagttaacagaaa

SEQ ID NO: 5534816 - DNA, 25 bp, Homo sapien
aaatagggtgaattaacataggtac

SEQ ID NO: 5534817 - DNA, 25 bp, Homo sapien
gcatggcttcccagttggaccagtt

SEQ ID NO: 5534818 - DNA, 25 bp, Homo sapien
tctctactctaagtgcagacgcaca

SEQ ID NO: 5534819 - DNA, 25 bp, Homo sapien
gacagaagggttgacctctacacag

SEQ ID NO: 5534820 - DNA, 25 bp, Homo sapien
atagagaatctcctgtcatgaaccc

SEQ ID NO: 5534821 - DNA, 25 bp, Homo sapien
acgataaagggaggaacctctttgc

SEQ ID NO: 5534822 - DNA, 25 bp, Homo sapien
actcaaaattaaggtaatggtggtg

SEQ ID NO: 5534823 - DNA, 25 bp, Homo sapien
aagagaatggctaaaaagtcccagc

SEQ ID NO: 5534824 - DNA, 25 bp, Homo sapien
cccaacgcattcactgcccacagtc

SEQ ID NO: 5534825 - DNA, 25 bp, Homo sapien
cggacaggctgaaagtaccattgta

SEQ ID NO: 5534826 - DNA, 25 bp, Homo sapien
tacataattcggacaggctgaaagt

SEQ ID NO: 5534827 - DNA, 25 bp, Homo sapien
atgctgtgctgtagatctcaacaaa

SEQ ID NO: 5534828 - DNA, 25 bp, Homo sapien
ggtttcaacagacggcttcagtggt

SEQ ID NO: 5534829 - DNA, 25 bp, Homo sapien
gtcccagcaggtttcaacagacggc

SEQ ID NO: 5534830 - DNA, 25 bp, Homo sapien
ccctgtagattccaaggcagctccc

SEQ ID NO: 5534831 - DNA, 25 bp, Homo sapien
acggcttcagtggttgtcccatcac

SEQ ID NO: 5534832 - DNA, 25 bp, Homo sapien
gtaaaatgggaactgcatgaatacc

SEQ ID NO: 5534833 - DNA, 25 bp, Homo sapien
gctcacaacatagtccctctgcccc

SEQ ID NO: 5534834 - DNA, 25 bp, Homo sapien
gacactgaaataattaaggctgtgg

SEQ ID NO: 5534835 - DNA, 25 bp, Homo sapien
ttacaaaacgacattgtgtgcatac

SEQ ID NO: 5534836 - DNA, 25 bp, Homo sapien
ggcagaccagcaagacactgaaata

SEQ ID NO: 5534837 - DNA, 25 bp, Homo sapien
tatggggaaacctgtccacttatga

SEQ ID NO: 5534838 - DNA, 25 bp, Homo sapien
gcgatggtccctatggggaaacctg

SEQ ID NO: 5534839 - DNA, 25 bp, Homo sapien
ctgtagcagtaacaagacagcaggt

SEQ ID NO: 5534840 - DNA, 25 bp, Homo sapien
aacccagaagatacacttaaggcag

SEQ ID NO: 5534841 - DNA, 25 bp, Homo sapien
agacagcaggtcatcactttacaac

SEQ ID NO: 5534842 - DNA, 25 bp, Homo sapien
atatgtatatgtgcgatggtcccta

SEQ ID NO: 5534843 - DNA, 25 bp, Homo sapien
tgtgagatgtacattttgaagtttc

SEQ ID NO: 5534844 - DNA, 25 bp, Homo sapien
acaagcctgatggaagtatgtactt

SEQ ID NO: 5534845 - DNA, 25 bp, Homo sapien
agccgttcacggggtggtcacccac

SEQ ID NO: 5534846 - DNA, 25 bp, Homo sapien
gtgggtgaccaccccgtgaacggct

SEQ ID NO: 5534847 - DNA, 25 bp, Homo sapien
catgaattgcctggagagttgtgtc

SEQ ID NO: 5534848 - DNA, 25 bp, Homo sapien
taagagccttaacggtgaagcgctc

SEQ ID NO: 5534849 - DNA, 25 bp, Homo sapien
gtagcagactccataacggggttta

SEQ ID NO: 5534850 - DNA, 25 bp, Homo sapien
aagcgctctgcaagaaacaggaaat

SEQ ID NO: 5534851 - DNA, 25 bp, Homo sapien
tttcctcctcaggcggacgaagtga

SEQ ID NO: 5534852 - DNA, 25 bp, Homo sapien
ctggttactccggttcaaggctacg

SEQ ID NO: 5534853 - DNA, 25 bp, Homo sapien
gtttagcgggtttccattcggcaga

SEQ ID NO: 5534854 - DNA, 25 bp, Homo sapien
ttacaatcgccagctactaagagcc

SEQ ID NO: 5534855 - DNA, 25 bp, Homo sapien
tcatgaagcggaaaatgtgctttac

SEQ ID NO: 5534856 - DNA, 25 bp, Homo sapien
gaaacaggaaatcgtcaacacactt

SEQ ID NO: 5534857 - DNA, 25 bp, Homo sapien
aacacaagaagagcactgtattttc

SEQ ID NO: 5534858 - DNA, 25 bp, Homo sapien
gatactctaagcagccagaccagga

SEQ ID NO: 5534859 - DNA, 25 bp, Homo sapien
aatgatcaaaagaacatgaagtctg

SEQ ID NO: 5534860 - DNA, 25 bp, Homo sapien
atgcctgatacaacacgtggtatac

SEQ ID NO: 5534861 - DNA, 25 bp, Homo sapien
gcgtaagcagcatgttaatcgataa

SEQ ID NO: 5534862 - DNA, 25 bp, Homo sapien
atgagaattaataccacaagcaatg

SEQ ID NO: 5534863 - DNA, 25 bp, Homo sapien
atgatgcatgcaatctttggaacaa

SEQ ID NO: 5534864 - DNA, 25 bp, Homo sapien
agagtatgctcaagtagtaggtatc

SEQ ID NO: 5534865 - DNA, 25 bp, Homo sapien
actgaaaggtaacatccccatttat

SEQ ID NO: 5534866 - DNA, 25 bp, Homo sapien
gcagccagaccaggacaattgataa

SEQ ID NO: 5534867 - DNA, 25 bp, Homo sapien
atctcaacaagacaggggagtaaaa

SEQ ID NO: 5534868 - DNA, 25 bp, Homo sapien
ttaagatctggtcaatgctcacaat

SEQ ID NO: 5534869 - DNA, 25 bp, Homo sapien
tagagggacttctgctgagatcata

SEQ ID NO: 5534870 - DNA, 25 bp, Homo sapien
gtctattgcagggacagatgatctc

SEQ ID NO: 5534871 - DNA, 25 bp, Homo sapien
cgtctgggatgcacactacctcagc

SEQ ID NO: 5534872 - DNA, 25 bp, Homo sapien
aactaaaccagggttggtgagaaga

SEQ ID NO: 5534873 - DNA, 25 bp, Homo sapien
aaagaaagaattgtaagtgaagaag

SEQ ID NO: 5534874 - DNA, 25 bp, Homo sapien
agtgagttatttgaggttccccaga

SEQ ID NO: 5534875 - DNA, 25 bp, Homo sapien
tcagctagctgttggtaagaaaatt

SEQ ID NO: 5534876 - DNA, 25 bp, Homo sapien
gaatgagaacatgtcagtgataaca

SEQ ID NO: 5534877 - DNA, 25 bp, Homo sapien
aaaattactaagctatggggtggta

SEQ ID NO: 5534878 - DNA, 25 bp, Homo sapien
gggtgaactgtgtagtgacatccat

SEQ ID NO: 5534879 - DNA, 25 bp, Homo sapien
ctatcacagatgtcaggggtgaact

SEQ ID NO: 5534880 - DNA, 25 bp, Homo sapien
gctggaaccagaagctgttagatgt

SEQ ID NO: 5534881 - DNA, 25 bp, Homo sapien
taggctccagactgagggtctgtct

SEQ ID NO: 5534882 - DNA, 25 bp, Homo sapien
ggaaatttagctaaagagtgagggc

SEQ ID NO: 5534883 - DNA, 25 bp, Homo sapien
attaagaagtagagaatcccagcta

SEQ ID NO: 5534884 - DNA, 25 bp, Homo sapien
gatgtggctctggttacccccctcc

SEQ ID NO: 5534885 - DNA, 25 bp, Homo sapien
tcagctggactggccgcctttgttg

SEQ ID NO: 5534886 - DNA, 25 bp, Homo sapien
gaatgatttgtccaaggtgagcggt

SEQ ID NO: 5534887 - DNA, 25 bp, Homo sapien
aagggcttctaggaatcccccagct

SEQ ID NO: 5534888 - DNA, 25 bp, Homo sapien
atcttcacagggcatggttagtgcg

SEQ ID NO: 5534889 - DNA, 25 bp, Homo sapien
gcttcctcgataaaggatgtggctc

SEQ ID NO: 5534890 - DNA, 25 bp, Homo sapien
aagatcgacctgggctatgtagaga

SEQ ID NO: 5534891 - DNA, 25 bp, Homo sapien
atgatgggcatgaatctagaaacat

SEQ ID NO: 5534892 - DNA, 25 bp, Homo sapien
tccgttgtatattcaggaggggaca

SEQ ID NO: 5534893 - DNA, 25 bp, Homo sapien
taaaacatacgagtactgtacacgc

SEQ ID NO: 5534894 - DNA, 25 bp, Homo sapien
acgagtactgtacacgcaagcatgc

SEQ ID NO: 5534895 - DNA, 25 bp, Homo sapien
cttcagcctgccattgttatagttc

SEQ ID NO: 5534896 - DNA, 25 bp, Homo sapien
gaataattatcagactagaaccttc

SEQ ID NO: 5534897 - DNA, 25 bp, Homo sapien
ctgaaagtctcaggtatcccccggg

SEQ ID NO: 5534898 - DNA, 25 bp, Homo sapien
gtctgagtgaggctgtcactctagc

SEQ ID NO: 5534899 - DNA, 25 bp, Homo sapien
cgcaagcatgcatcccctgagtctg

SEQ ID NO: 5534900 - DNA, 25 bp, Homo sapien
ttatcgcgcactctggccttgtata

SEQ ID NO: 5534901 - DNA, 25 bp, Homo sapien
tcgacatgtgtctagctgattaaaa

SEQ ID NO: 5534902 - DNA, 25 bp, Homo sapien
ggagagaacatgagtcctatgaggc

SEQ ID NO: 5534903 - DNA, 25 bp, Homo sapien
agagtgaggccgtagcctaaatcaa

SEQ ID NO: 5534904 - DNA, 25 bp, Homo sapien
agaagtaggaggctcatgactatga

SEQ ID NO: 5534905 - DNA, 25 bp, Homo sapien
aaagagaacgaggcttccttgctct

SEQ ID NO: 5534906 - DNA, 25 bp, Homo sapien
ctatgaggcacttggccctgcccag

SEQ ID NO: 5534907 - DNA, 25 bp, Homo sapien
agccctctggaggtaatgaggtgaa

SEQ ID NO: 5534908 - DNA, 25 bp, Homo sapien
ggacaaagggcaagtaccctgccca

SEQ ID NO: 5534909 - DNA, 25 bp, Homo sapien
tcctcttagggtggccatagagagt

SEQ ID NO: 5534910 - DNA, 25 bp, Homo sapien
ggagtccttggcaggagtgaatata

SEQ ID NO: 5534911 - DNA, 25 bp, Homo sapien
tatgatagtgaaggaaactcatgtc

SEQ ID NO: 5534912 - DNA, 25 bp, Homo sapien
tcatgtccaggaaaggtcctaggtg

SEQ ID NO: 5534913 - DNA, 25 bp, Homo sapien
taagcatatattaagagaagcctca

SEQ ID NO: 5534914 - DNA, 25 bp, Homo sapien
aacagcagagcttaggctgctcagg

SEQ ID NO: 5534915 - DNA, 25 bp, Homo sapien
ggtgagctcacctctttggcagcat

SEQ ID NO: 5534916 - DNA, 25 bp, Homo sapien
gtaacctgctcctggaattgagttc

SEQ ID NO: 5534917 - DNA, 25 bp, Homo sapien
gagaagcctcagatgtagaatacag

SEQ ID NO: 5534918 - DNA, 25 bp, Homo sapien
agaactactctccctaggcaggggc

SEQ ID NO: 5534919 - DNA, 25 bp, Homo sapien
gagaggagaacctacctgctaacca

SEQ ID NO: 5534920 - DNA, 25 bp, Homo sapien
tttaatgcagacaaggtgaattagc

SEQ ID NO: 5534921 - DNA, 25 bp, Homo sapien
attgagttcatccagagaactactc

SEQ ID NO: 5534922 - DNA, 25 bp, Homo sapien
ggtgaattagcaaccatagcatggc

SEQ ID NO: 5534923 - DNA, 25 bp, Homo sapien
gagcttaggctgctcaggtgagctc

SEQ ID NO: 5534924 - DNA, 25 bp, Homo sapien
tcagcgttctccagtggggagactg

SEQ ID NO: 5534925 - DNA, 25 bp, Homo sapien
gaagcaagagactgaagactttttc

SEQ ID NO: 5534926 - DNA, 25 bp, Homo sapien
aaacctagccaaaagtggtctctcc

SEQ ID NO: 5534927 - DNA, 25 bp, Homo sapien
cctttgccagctagactccagtcct

SEQ ID NO: 5534928 - DNA, 25 bp, Homo sapien
gcccatgttgctgactctgccttgc

SEQ ID NO: 5534929 - DNA, 25 bp, Homo sapien
ttcgtggaaaccatatggcaggaag

SEQ ID NO: 5534930 - DNA, 25 bp, Homo sapien
gactctcaggccttcgtggaaacca

SEQ ID NO: 5534931 - DNA, 25 bp, Homo sapien
aatgactggtgtttttaggagtggg

SEQ ID NO: 5534932 - DNA, 25 bp, Homo sapien
aagacagttgtacagctgactctca

SEQ ID NO: 5534933 - DNA, 25 bp, Homo sapien
ttgctttgcaggcagaagcaagaga

SEQ ID NO: 5534934 - DNA, 25 bp, Homo sapien
gcactggattcaacactggatccca

SEQ ID NO: 5534935 - DNA, 25 bp, Homo sapien
aatcaaaggtggaattgctaaggag

SEQ ID NO: 5534936 - DNA, 25 bp, Homo sapien
aaggagtccagacaatcaaaggtgg

SEQ ID NO: 5534937 - DNA, 25 bp, Homo sapien
taaaccagataatggcaagccagag

SEQ ID NO: 5534938 - DNA, 25 bp, Homo sapien
aatcataaaggattcagagggacta

SEQ ID NO: 5534939 - DNA, 25 bp, Homo sapien
aattgtacatggcacaaggagtcca

SEQ ID NO: 5534940 - DNA, 25 bp, Homo sapien
acagacatagaaagacaattaacaa

SEQ ID NO: 5534941 - DNA, 25 bp, Homo sapien
ttgcaccatctcaagggccctaaat

SEQ ID NO: 5534942 - DNA, 25 bp, Homo sapien
gaagatcagaagggtctagacatat

SEQ ID NO: 5534943 - DNA, 25 bp, Homo sapien
ttatctagagtccaggcaaccagac

SEQ ID NO: 5534944 - DNA, 25 bp, Homo sapien
aaggaaggatgactgtccatcagtg

SEQ ID NO: 5534945 - DNA, 25 bp, Homo sapien
acacagaagcaagttacagacatag

SEQ ID NO: 5534946 - DNA, 25 bp, Homo sapien
caccagacaatggctaccgtcctgc

SEQ ID NO: 5534947 - DNA, 25 bp, Homo sapien
ttgcagtgacaggtaccactggagg

SEQ ID NO: 5534948 - DNA, 25 bp, Homo sapien
accagggacctgaaccctggggtca

SEQ ID NO: 5534949 - DNA, 25 bp, Homo sapien
accgtcctgcccagagacaaagcat

SEQ ID NO: 5534950 - DNA, 25 bp, Homo sapien
acccacccaagtacaaggctcagtc

SEQ ID NO: 5534951 - DNA, 25 bp, Homo sapien
gctccaagaagctcagtgccaaagg

SEQ ID NO: 5534952 - DNA, 25 bp, Homo sapien
cgaaggcttagggctcttagcttgc

SEQ ID NO: 5534953 - DNA, 25 bp, Homo sapien
agctagccaaagtgatgctgaccct

SEQ ID NO: 5534954 - DNA, 25 bp, Homo sapien
aggtcaaggttaaatcagaaggtgg

SEQ ID NO: 5534955 - DNA, 25 bp, Homo sapien
ggtgcgtgtgttatcagggcagtaa

SEQ ID NO: 5534956 - DNA, 25 bp, Homo sapien
tccgaaactcccacctgagggcata

SEQ ID NO: 5534957 - DNA, 25 bp, Homo sapien
ctgctggaaaagtagaatcaagtct

SEQ ID NO: 5534958 - DNA, 25 bp, Homo sapien
tacagagctgtgtcatgccatcctt

SEQ ID NO: 5534959 - DNA, 25 bp, Homo sapien
aaggtgcatttctttacagagctgt

SEQ ID NO: 5534960 - DNA, 25 bp, Homo sapien
aaaggaaatcctaagaaggtgcatt

SEQ ID NO: 5534961 - DNA, 25 bp, Homo sapien
actgtgccactaattaaaggaaatc

SEQ ID NO: 5534962 - DNA, 25 bp, Homo sapien
ccaggtaccacaacagtaacagaac

SEQ ID NO: 5534963 - DNA, 25 bp, Homo sapien
agtgaccgtgctttatcagagctgt

SEQ ID NO: 5534964 - DNA, 25 bp, Homo sapien
tgaagaacagtgagtacctagaact

SEQ ID NO: 5534965 - DNA, 25 bp, Homo sapien
attatagatataggacagtactgta

SEQ ID NO: 5534966 - DNA, 25 bp, Homo sapien
atggagtgtgctggatgtctctata

SEQ ID NO: 5534967 - DNA, 25 bp, Homo sapien
catcctttgggccctctgctggaaa

SEQ ID NO: 5534968 - DNA, 25 bp, Homo sapien
gaaaacgaagagttctaatagattt

SEQ ID NO: 5534969 - DNA, 25 bp, Homo sapien
aaatctattagaactcttcgttttc

SEQ ID NO: 5534970 - DNA, 25 bp, Homo sapien
gaggcctgtctgcgttggttgctta

SEQ ID NO: 5534971 - DNA, 25 bp, Homo sapien
tctcctttcactagcccaggtgggc

SEQ ID NO: 5534972 - DNA, 25 bp, Homo sapien
gcaaaggtgtttgtcaatgatatcc

SEQ ID NO: 5534973 - DNA, 25 bp, Homo sapien
actcttagctgaggcctgtctgcgt

SEQ ID NO: 5534974 - DNA, 25 bp, Homo sapien
ttctctacttttggagcgacggctc

SEQ ID NO: 5534975 - DNA, 25 bp, Homo sapien
tcacgaatacaaagaaactggcaaa

SEQ ID NO: 5534976 - DNA, 25 bp, Homo sapien
ttgtcaatgatatccctgcctcctc

SEQ ID NO: 5534977 - DNA, 25 bp, Homo sapien
taatagcacaaaaaatcacgaatac

SEQ ID NO: 5534978 - DNA, 25 bp, Homo sapien
aacatataactgcgtcgtgccgaat

SEQ ID NO: 5534979 - DNA, 25 bp, Homo sapien
ttccccccaaacatataactgcgtc

SEQ ID NO: 5534980 - DNA, 25 bp, Homo sapien
tgataaaacaatcgcaaagaggttc

SEQ ID NO: 5534981 - DNA, 25 bp, Homo sapien
tagggccctgatttgctgggcagtt

SEQ ID NO: 5534982 - DNA, 25 bp, Homo sapien
tatgtagcagggaaaatatatatct

SEQ ID NO: 5534983 - DNA, 25 bp, Homo sapien
tctaccaactgtttagggccctgat

SEQ ID NO: 5534984 - DNA, 25 bp, Homo sapien
accacctaccttacagtgagggcta

SEQ ID NO: 5534985 - DNA, 25 bp, Homo sapien
aatgctctctagaaacctaaccacc

SEQ ID NO: 5534986 - DNA, 25 bp, Homo sapien
gttactgatagggatacatgctctt

SEQ ID NO: 5534987 - DNA, 25 bp, Homo sapien
ggtagccagttgaatttatggaatc

SEQ ID NO: 5534988 - DNA, 25 bp, Homo sapien
ttacagtgagggctatacatggtag

SEQ ID NO: 5534989 - DNA, 25 bp, Homo sapien
attgtctctaaattgtgggtctatt

SEQ ID NO: 5534990 - DNA, 25 bp, Homo sapien
tcatttgggttaatatggctcttca

SEQ ID NO: 5534991 - DNA, 25 bp, Homo sapien
aacaaaggagataaatctagtatac

SEQ ID NO: 5534992 - DNA, 25 bp, Homo sapien
tttaaaaatgatcaatgggaagtat

SEQ ID NO: 5534993 - DNA, 25 bp, Homo sapien
aattccagctattcgggaggctgag

SEQ ID NO: 5534994 - DNA, 25 bp, Homo sapien
ggaggcagatagatcacttgaggcc

SEQ ID NO: 5534995 - DNA, 25 bp, Homo sapien
gccgggtacgatgacttgtctgcaa

SEQ ID NO: 5534996 - DNA, 25 bp, Homo sapien
ttgtctgcaatcccagactttggga

SEQ ID NO: 5534997 - DNA, 25 bp, Homo sapien
gagttagagatcagcctggccaata

SEQ ID NO: 5534998 - DNA, 25 bp, Homo sapien
gtggtggtgcatgcccgtaattcca

SEQ ID NO: 5534999 - DNA, 25 bp, Homo sapien
taaaatctgcatagttgtatcaatt

SEQ ID NO: 5535000 - DNA, 25 bp, Homo sapien
aacacaatatccaatcagaagcctt

SEQ ID NO: 5535001 - DNA, 25 bp, Homo sapien
atgatcaatgggaagtatttttctc

SEQ ID NO: 5535002 - DNA, 25 bp, Homo sapien
tagttttgcatatgtatgctggttt

SEQ ID NO: 5535003 - DNA, 25 bp, Homo sapien
cttccccctcttaaaatggcagtga

SEQ ID NO: 5535004 - DNA, 25 bp, Homo sapien
tttccctaagtggttcaatgcagaa

SEQ ID NO: 5535005 - DNA, 25 bp, Homo sapien
gcaaccacaaagcacttgtaaactt

SEQ ID NO: 5535006 - DNA, 25 bp, Homo sapien
actgcatatcagtacatgacattca

SEQ ID NO: 5535007 - DNA, 25 bp, Homo sapien
tcttaaaatggcagtgagtatacat

SEQ ID NO: 5535008 - DNA, 25 bp, Homo sapien
tgagtatacattagtgcaaccacaa

SEQ ID NO: 5535009 - DNA, 25 bp, Homo sapien
gaaaaacaataagctactgcatatc

SEQ ID NO: 5535010 - DNA, 25 bp, Homo sapien
ctggctccaaggcctttcttgggcc

SEQ ID NO: 5535011 - DNA, 25 bp, Homo sapien
tcaatgcagaacacttgggaagtta

SEQ ID NO: 5535012 - DNA, 25 bp, Homo sapien
ttcaatgaaaaagtagaccatctaa

SEQ ID NO: 5535013 - DNA, 25 bp, Homo sapien
agaacacttgggaagttaagcatat

SEQ ID NO: 5535014 - DNA, 25 bp, Homo sapien
gggatcttaccctccgggtcctgtc

SEQ ID NO: 5535015 - DNA, 25 bp, Homo sapien
gacaggacccggagggtaagatccc

SEQ ID NO: 5535016 - DNA, 25 bp, Homo sapien
tcgaggaagtcccgccgttggagtc

SEQ ID NO: 5535017 - DNA, 25 bp, Homo sapien
gactccaacggcgggacttcctcga

SEQ ID NO: 5535018 - DNA, 25 bp, Homo sapien
tcttgatgtgaggccataagcagaa

SEQ ID NO: 5535019 - DNA, 25 bp, Homo sapien
gtcttctgagtcaggaaaacctggg

SEQ ID NO: 5535020 - DNA, 25 bp, Homo sapien
aggaaaaagctcagtcttctgagtc

SEQ ID NO: 5535021 - DNA, 25 bp, Homo sapien
gaaccaagcagactcaaggcccttg

SEQ ID NO: 5535022 - DNA, 25 bp, Homo sapien
cataagcagaaccaagcagactcaa

SEQ ID NO: 5535023 - DNA, 25 bp, Homo sapien
ggactacagacatggactagctcca

SEQ ID NO: 5535024 - DNA, 25 bp, Homo sapien
gagtaactaggaccataagtgtaca

SEQ ID NO: 5535025 - DNA, 25 bp, Homo sapien
ggttgcttggacacaattagctatt

SEQ ID NO: 5535026 - DNA, 25 bp, Homo sapien
ataagtgtacaccaccatgactggc

SEQ ID NO: 5535027 - DNA, 25 bp, Homo sapien
ggagtcttgtgatattgcccagcct

SEQ ID NO: 5535028 - DNA, 25 bp, Homo sapien
tcaaggcccttggttgcttggacac

SEQ ID NO: 5535029 - DNA, 25 bp, Homo sapien
cgagcactcggccgagctcgtctag

SEQ ID NO: 5535030 - DNA, 25 bp, Homo sapien
aggcgcccgcattttctggccgcgc

SEQ ID NO: 5535031 - DNA, 25 bp, Homo sapien
gccgttcagaaaatagtgaggcaac

SEQ ID NO: 5535032 - DNA, 25 bp, Homo sapien
ggcctcctccaccgcggcacggagg

SEQ ID NO: 5535033 - DNA, 25 bp, Homo sapien
gtcccggcctcgagcactcggccga

SEQ ID NO: 5535034 - DNA, 25 bp, Homo sapien
cgccccccttgcgggccactttggc

SEQ ID NO: 5535035 - DNA, 25 bp, Homo sapien
ctttggcctcctccaccgcggcacg

SEQ ID NO: 5535036 - DNA, 25 bp, Homo sapien
gagctgtcggccgttcagaaaatag

SEQ ID NO: 5535037 - DNA, 25 bp, Homo sapien
aacagcgtctttaatgggccccgcc

SEQ ID NO: 5535038 - DNA, 25 bp, Homo sapien
cgggccaattctccgagcagcgcag

SEQ ID NO: 5535039 - DNA, 25 bp, Homo sapien
gcattttctggccgcgccaggtaga

SEQ ID NO: 5535040 - DNA, 25 bp, Homo sapien
agacacaaaggttgatttcaaactt

SEQ ID NO: 5535041 - DNA, 25 bp, Homo sapien
aagtttgaaatcaacctttgtgtct

SEQ ID NO: 5535042 - DNA, 25 bp, Homo sapien
tcttcgatttaggggcctgactccc

SEQ ID NO: 5535043 - DNA, 25 bp, Homo sapien
accgcacgcccgttccttcgcccta

SEQ ID NO: 5535044 - DNA, 25 bp, Homo sapien
ctcgtcgaatcgcaaacgcataggc

SEQ ID NO: 5535045 - DNA, 25 bp, Homo sapien
gagccgccaaccgatcgctcgatcg

SEQ ID NO: 5535046 - DNA, 25 bp, Homo sapien
ggcgcgccagggcttcttcgattta

SEQ ID NO: 5535047 - DNA, 25 bp, Homo sapien
ccgagttctgcgtacgagaagaaag

SEQ ID NO: 5535048 - DNA, 25 bp, Homo sapien
accgatcgctcgatcgaccgcacgc

SEQ ID NO: 5535049 - DNA, 25 bp, Homo sapien
cgcccgttccttcgccctaccagac

SEQ ID NO: 5535050 - DNA, 25 bp, Homo sapien
gcaccgcagctaccgtcccggctgc

SEQ ID NO: 5535051 - DNA, 25 bp, Homo sapien
cgactcctcgtcgaatcgcaaacgc

SEQ ID NO: 5535052 - DNA, 25 bp, Homo sapien
cgaccacccggacgactcctcgtcg

SEQ ID NO: 5535053 - DNA, 25 bp, Homo sapien
ggccgagccaatgccagtgacatca

SEQ ID NO: 5535054 - DNA, 25 bp, Homo sapien
tggaaaaccgaagctgaagttctct

SEQ ID NO: 5535055 - DNA, 25 bp, Homo sapien
ctcttttgccataggaacgagcgca

SEQ ID NO: 5535056 - DNA, 25 bp, Homo sapien
cgagcgcttgctttcggaacgccct

SEQ ID NO: 5535057 - DNA, 25 bp, Homo sapien
gcaactgactaggaaagatgtgtcc

SEQ ID NO: 5535058 - DNA, 25 bp, Homo sapien
tcggaacgcccttgtgattggccga

SEQ ID NO: 5535059 - DNA, 25 bp, Homo sapien
gtagcgtttgcaggaagtcacttaa

SEQ ID NO: 5535060 - DNA, 25 bp, Homo sapien
gtcccaaagctccgcaagctggaac

SEQ ID NO: 5535061 - DNA, 25 bp, Homo sapien
tcgcgtttacaagtgtcgagcgctt

SEQ ID NO: 5535062 - DNA, 25 bp, Homo sapien
acttttgattggaaggctggttgct

SEQ ID NO: 5535063 - DNA, 25 bp, Homo sapien
aaaatacaaagatgtgtccagtttc

SEQ ID NO: 5535064 - DNA, 25 bp, Homo sapien
ttgtagtggttctggctttaagcct

SEQ ID NO: 5535065 - DNA, 25 bp, Homo sapien
ggagcaacctgagctcaccgtccct

SEQ ID NO: 5535066 - DNA, 25 bp, Homo sapien
gggaaaaagaggtttgctccagcaa

SEQ ID NO: 5535067 - DNA, 25 bp, Homo sapien
atatctcaagagtctgtggcctcac

SEQ ID NO: 5535068 - DNA, 25 bp, Homo sapien
aagagaaccccctaaagccctgctc

SEQ ID NO: 5535069 - DNA, 25 bp, Homo sapien
aaggatggacgccccattaagggct

SEQ ID NO: 5535070 - DNA, 25 bp, Homo sapien
cgacctcgaagcaatggcctagaat

SEQ ID NO: 5535071 - DNA, 25 bp, Homo sapien
ccattaagggctcaatggtgcagct

SEQ ID NO: 5535072 - DNA, 25 bp, Homo sapien
ggcttagagggactcctgaatgtac

SEQ ID NO: 5535073 - DNA, 25 bp, Homo sapien
cagactttgggggttcaaatggtct

SEQ ID NO: 5535074 - DNA, 25 bp, Homo sapien
ggcaacacagccaggaaatgattca

SEQ ID NO: 5535075 - DNA, 25 bp, Homo sapien
aggtgatctcattcggaaacaggtc

SEQ ID NO: 5535076 - DNA, 25 bp, Homo sapien
gatctcataatggtaaggatgggga

SEQ ID NO: 5535077 - DNA, 25 bp, Homo sapien
ggacgaggccatcctggatttgagg

SEQ ID NO: 5535078 - DNA, 25 bp, Homo sapien
tggtcaagaaacaccagggattcgg

SEQ ID NO: 5535079 - DNA, 25 bp, Homo sapien
ttgcctggagcttcaaaggtgatct

SEQ ID NO: 5535080 - DNA, 25 bp, Homo sapien
ggtcacttccaggcactgggtgtcc

SEQ ID NO: 5535081 - DNA, 25 bp, Homo sapien
gccctcagccagtatgcctgggcct

SEQ ID NO: 5535082 - DNA, 25 bp, Homo sapien
ggcctcaagtccagtgagagtgtcc

SEQ ID NO: 5535083 - DNA, 25 bp, Homo sapien
ctgggtgtcctggaatcccgcctag

SEQ ID NO: 5535084 - DNA, 25 bp, Homo sapien
gtagtagctgaatattgtccccctc

SEQ ID NO: 5535085 - DNA, 25 bp, Homo sapien
agtgcgtctgccctccgtagtagct

SEQ ID NO: 5535086 - DNA, 25 bp, Homo sapien
aaatatggacctcaaaaatacgaat

SEQ ID NO: 5535087 - DNA, 25 bp, Homo sapien
attcgtatttttgaggtccatattt

SEQ ID NO: 5535088 - DNA, 25 bp, Homo sapien
cctgtaggacagcatcgttgaaaca

SEQ ID NO: 5535089 - DNA, 25 bp, Homo sapien
gggaggccttccaggtatctttgct

SEQ ID NO: 5535090 - DNA, 25 bp, Homo sapien
agaactaccattgcagtggctgctc

SEQ ID NO: 5535091 - DNA, 25 bp, Homo sapien
cactgatctgttttgaggagcacat

SEQ ID NO: 5535092 - DNA, 25 bp, Homo sapien
tgggtatccctagcacctgtaggac

SEQ ID NO: 5535093 - DNA, 25 bp, Homo sapien
cctgcccccttctggatacgctgcc

SEQ ID NO: 5535094 - DNA, 25 bp, Homo sapien
cagctctgccctagagcacaacctc

SEQ ID NO: 5535095 - DNA, 25 bp, Homo sapien
agcgacgccaacaacgcaagaatcg

SEQ ID NO: 5535096 - DNA, 25 bp, Homo sapien
gacaaggaagatgcactgatctgtt

SEQ ID NO: 5535097 - DNA, 25 bp, Homo sapien
tcctttctagatcagagctcagctc

SEQ ID NO: 5535098 - DNA, 25 bp, Homo sapien
gcatcgttgaaacattaggggtgct

SEQ ID NO: 5535099 - DNA, 25 bp, Homo sapien
gatgaggtagagaaatcattgcacg

SEQ ID NO: 5535100 - DNA, 25 bp, Homo sapien
gtatttgtatagaaaccaactagct

SEQ ID NO: 5535101 - DNA, 25 bp, Homo sapien
gcgggctgaacccctcccaacagcc

SEQ ID NO: 5535102 - DNA, 25 bp, Homo sapien
tcatccagcaagacattcgaatatg

SEQ ID NO: 5535103 - DNA, 25 bp, Homo sapien
gaaatcattgcacgcacggagactc

SEQ ID NO: 5535104 - DNA, 25 bp, Homo sapien
tctggttctgtgacacaaagctgtt

SEQ ID NO: 5535105 - DNA, 25 bp, Homo sapien
gctagcagacatttttggtctgcct

SEQ ID NO: 5535106 - DNA, 25 bp, Homo sapien
ttctcctctactgcccctcagaaga

SEQ ID NO: 5535107 - DNA, 25 bp, Homo sapien
gtagagaaatcattgcacgcacgga

SEQ ID NO: 5535108 - DNA, 25 bp, Homo sapien
ataaatacattctccacagtccctc

SEQ ID NO: 5535109 - DNA, 25 bp, Homo sapien
ctcccaacagccctttctcctctac

SEQ ID NO: 5535110 - DNA, 25 bp, Homo sapien
gttgacagccccgtgacccttcaga

SEQ ID NO: 5535111 - DNA, 25 bp, Homo sapien
ccgtgacccttcagaaccaggcatt

SEQ ID NO: 5535112 - DNA, 25 bp, Homo sapien
gagtaaggaacacctgttgacagcc

SEQ ID NO: 5535113 - DNA, 25 bp, Homo sapien
tggtgccaactattagaaatgggaa

SEQ ID NO: 5535114 - DNA, 25 bp, Homo sapien
taagtgcagtgaattatggaaagct

SEQ ID NO: 5535115 - DNA, 25 bp, Homo sapien
ggcattggttagaggacactgtttt

SEQ ID NO: 5535116 - DNA, 25 bp, Homo sapien
tatgatataatagatgaagggtatg

SEQ ID NO: 5535117 - DNA, 25 bp, Homo sapien
atggaaagctaacttaaaggtttga

SEQ ID NO: 5535118 - DNA, 25 bp, Homo sapien
tcaattatgagtaaggaacacctgt

SEQ ID NO: 5535119 - DNA, 25 bp, Homo sapien
gttgtataggcattggttagaggac

SEQ ID NO: 5535120 - DNA, 25 bp, Homo sapien
agatgaagggtatgtctacactata

SEQ ID NO: 5535121 - DNA, 25 bp, Homo sapien
ctccttcgtactacccgcatcgaca

SEQ ID NO: 5535122 - DNA, 25 bp, Homo sapien
tgtcgatgcgggtagtacgaaggag

SEQ ID NO: 5535123 - DNA, 25 bp, Homo sapien
gggctgcagtgaccgtctgcttgtt

SEQ ID NO: 5535124 - DNA, 25 bp, Homo sapien
ataaaaaggccaatggctggcaaga

SEQ ID NO: 5535125 - DNA, 25 bp, Homo sapien
gatcaggcactgaataaaaaggcca

SEQ ID NO: 5535126 - DNA, 25 bp, Homo sapien
gagtaggcatgtggagcattgcctt

SEQ ID NO: 5535127 - DNA, 25 bp, Homo sapien
tcctccccaggtgctcttggcaaag

SEQ ID NO: 5535128 - DNA, 25 bp, Homo sapien
gcagccaaagagtggacttactcac

SEQ ID NO: 5535129 - DNA, 25 bp, Homo sapien
gcttagttagcaccagtctcctccc

SEQ ID NO: 5535130 - DNA, 25 bp, Homo sapien
cactgcaaatagaaaggtatgggta

SEQ ID NO: 5535131 - DNA, 25 bp, Homo sapien
tccccgtgcagctcggattgggaaa

SEQ ID NO: 5535132 - DNA, 25 bp, Homo sapien
tgggtagaccttgcaccagctgcag

SEQ ID NO: 5535133 - DNA, 25 bp, Homo sapien
ttgcctttctaaggtagaggggcca

SEQ ID NO: 5535134 - DNA, 25 bp, Homo sapien
gacacctgtgtgagacccaggtcgg

SEQ ID NO: 5535135 - DNA, 25 bp, Homo sapien
gcgcggcacagacctcctaacttgg

SEQ ID NO: 5535136 - DNA, 25 bp, Homo sapien
tggcaccctgagaaacctgagtgtg

SEQ ID NO: 5535137 - DNA, 25 bp, Homo sapien
gaatccaccatgtcgtgctgagcgc

SEQ ID NO: 5535138 - DNA, 25 bp, Homo sapien
agcgctggcattcttgtcctggcac

SEQ ID NO: 5535139 - DNA, 25 bp, Homo sapien
agtctcaacagctaaggttgggagt

SEQ ID NO: 5535140 - DNA, 25 bp, Homo sapien
attccacctagaagcctgagctggc

SEQ ID NO: 5535141 - DNA, 25 bp, Homo sapien
caggcctcactcagaggcatgaggt

SEQ ID NO: 5535142 - DNA, 25 bp, Homo sapien
cctgagaaacctgagtgtgtagggt

SEQ ID NO: 5535143 - DNA, 25 bp, Homo sapien
gcattcttgtcctggcacctggggc

SEQ ID NO: 5535144 - DNA, 25 bp, Homo sapien
gcatccccacgctggtctgggacac

SEQ ID NO: 5535145 - DNA, 25 bp, Homo sapien
atgcacaaacatcctcaaagagttg

SEQ ID NO: 5535146 - DNA, 25 bp, Homo sapien
tcacaatgccgtcctatgcacaaac

SEQ ID NO: 5535147 - DNA, 25 bp, Homo sapien
ttaactgatgttacagagagctgtg

SEQ ID NO: 5535148 - DNA, 25 bp, Homo sapien
gccagagataggtcctgttttgtta

SEQ ID NO: 5535149 - DNA, 25 bp, Homo sapien
gttgaggcagctgattttaactgat

SEQ ID NO: 5535150 - DNA, 25 bp, Homo sapien
agccctctggatggcaaccaaacaa

SEQ ID NO: 5535151 - DNA, 25 bp, Homo sapien
ataaaatcaagcccaccaaaataat

SEQ ID NO: 5535152 - DNA, 25 bp, Homo sapien
caagtttgaaaagtaaggtggtctg

SEQ ID NO: 5535153 - DNA, 25 bp, Homo sapien
ccagccttcttaacagaggtatgcc

SEQ ID NO: 5535154 - DNA, 25 bp, Homo sapien
ttagtaagactgccatttccctatg

SEQ ID NO: 5535155 - DNA, 25 bp, Homo sapien
gagagctgtgatagcaagaatcaag

SEQ ID NO: 5535156 - DNA, 25 bp, Homo sapien
aactcatttaagcctcaccagaacc

SEQ ID NO: 5535157 - DNA, 25 bp, Homo sapien
agtagttagatgcttataaatatat

SEQ ID NO: 5535158 - DNA, 25 bp, Homo sapien
ataaaagggaagtaatttatgataa

SEQ ID NO: 5535159 - DNA, 25 bp, Homo sapien
aatacaacatgatacaataacataa

SEQ ID NO: 5535160 - DNA, 25 bp, Homo sapien
tgtaccagatcctgttctaggcact

SEQ ID NO: 5535161 - DNA, 25 bp, Homo sapien
aaaatggaaaggcttgagtatgatt

SEQ ID NO: 5535162 - DNA, 25 bp, Homo sapien
attatactagaattagcaaagtagt

SEQ ID NO: 5535163 - DNA, 25 bp, Homo sapien
tagaattagcaaagtagttagatgc

SEQ ID NO: 5535164 - DNA, 25 bp, Homo sapien
ccagaacctttatatggtagaaagt

SEQ ID NO: 5535165 - DNA, 25 bp, Homo sapien
tggaaaggcttgagtatgattatac

SEQ ID NO: 5535166 - DNA, 25 bp, Homo sapien
atttacactgtaccagatcctgttc

SEQ ID NO: 5535167 - DNA, 25 bp, Homo sapien
gcgctggaatgaaagatttgcttac

SEQ ID NO: 5535168 - DNA, 25 bp, Homo sapien
tggtatatttggagttggctgcttc

SEQ ID NO: 5535169 - DNA, 25 bp, Homo sapien
tccacatatgggttagtagtagtat

SEQ ID NO: 5535170 - DNA, 25 bp, Homo sapien
acaaaacaactgcctggacagtgcc

SEQ ID NO: 5535171 - DNA, 25 bp, Homo sapien
tccctgctggaaatagtggtataaa

SEQ ID NO: 5535172 - DNA, 25 bp, Homo sapien
gagatgacttggaaaacaccagaaa

SEQ ID NO: 5535173 - DNA, 25 bp, Homo sapien
attttcacgcaccatctgagatgac

SEQ ID NO: 5535174 - DNA, 25 bp, Homo sapien
caggctggcaaatgacaaatgaaaa

SEQ ID NO: 5535175 - DNA, 25 bp, Homo sapien
ctcccaacataccccaggctggcaa

SEQ ID NO: 5535176 - DNA, 25 bp, Homo sapien
aatcggagagatgctagtaaacatt

SEQ ID NO: 5535177 - DNA, 25 bp, Homo sapien
ggacagtgcctatttctacagccat

SEQ ID NO: 5535178 - DNA, 25 bp, Homo sapien
cacaagggaaatgtgtaggtagttt

SEQ ID NO: 5535179 - DNA, 25 bp, Homo sapien
aataacagttgccccctatgagcat

SEQ ID NO: 5535180 - DNA, 25 bp, Homo sapien
ggtggagttgtatcttcagggcaga

SEQ ID NO: 5535181 - DNA, 25 bp, Homo sapien
gtattgatgcatacaaatatcacat

SEQ ID NO: 5535182 - DNA, 25 bp, Homo sapien
tatgagcatctcacgataaatccct

SEQ ID NO: 5535183 - DNA, 25 bp, Homo sapien
tcttcagggcagattcctaacagtg

SEQ ID NO: 5535184 - DNA, 25 bp, Homo sapien
gttgctgttctgagacctgtctttc

SEQ ID NO: 5535185 - DNA, 25 bp, Homo sapien
gcaagtagcggtaaacatcatccat

SEQ ID NO: 5535186 - DNA, 25 bp, Homo sapien
tctttgtcagcaagtagcggtaaac

SEQ ID NO: 5535187 - DNA, 25 bp, Homo sapien
atatactgagtattaaaaaacagaa

SEQ ID NO: 5535188 - DNA, 25 bp, Homo sapien
ttttaataggtggagttgtatcttc

SEQ ID NO: 5535189 - DNA, 25 bp, Homo sapien
gcccaggtgcccctcctgtctcacc

SEQ ID NO: 5535190 - DNA, 25 bp, Homo sapien
cagtgcctctggttcatgtgaattc

SEQ ID NO: 5535191 - DNA, 25 bp, Homo sapien
catggtacccaacaggtggtttttc

SEQ ID NO: 5535192 - DNA, 25 bp, Homo sapien
gttacatgggtagattttggaaggc

SEQ ID NO: 5535193 - DNA, 25 bp, Homo sapien
gatctgggttagcgttcatagtgca

SEQ ID NO: 5535194 - DNA, 25 bp, Homo sapien
tcacctgtctagtgatctccagtgc

SEQ ID NO: 5535195 - DNA, 25 bp, Homo sapien
cactcaaacagtaagcatggtaccc

SEQ ID NO: 5535196 - DNA, 25 bp, Homo sapien
ttagggtttggcactttcacgtata

SEQ ID NO: 5535197 - DNA, 25 bp, Homo sapien
tttggagggctctatgtcattttat

SEQ ID NO: 5535198 - DNA, 25 bp, Homo sapien
ttcatagtgcaaagttctctcgttc

SEQ ID NO: 5535199 - DNA, 25 bp, Homo sapien
atgtgaattcaatgtgtagctgcca

SEQ ID NO: 5535200 - DNA, 25 bp, Homo sapien
taaacgaatgaccagacactaaaat

SEQ ID NO: 5535201 - DNA, 25 bp, Homo sapien
aagtattgtgtggttatggatcgtt

SEQ ID NO: 5535202 - DNA, 25 bp, Homo sapien
gagacagctgctgacaaagtatgtt

SEQ ID NO: 5535203 - DNA, 25 bp, Homo sapien
cactgaatagttacagctgtgcact

SEQ ID NO: 5535204 - DNA, 25 bp, Homo sapien
gatgagacacgtaacaacactgaat

SEQ ID NO: 5535205 - DNA, 25 bp, Homo sapien
agcacatagcaaatagtctagatga

SEQ ID NO: 5535206 - DNA, 25 bp, Homo sapien
attggatgagagatgtgtctgatct

SEQ ID NO: 5535207 - DNA, 25 bp, Homo sapien
gatcgtttacagcagtgtatgaaac

SEQ ID NO: 5535208 - DNA, 25 bp, Homo sapien
tctagatgaacagatgagacacgta

SEQ ID NO: 5535209 - DNA, 25 bp, Homo sapien
ctaaaaagaaaattggatgagagat

SEQ ID NO: 5535210 - DNA, 25 bp, Homo sapien
ctccccaataaaagatgaaactcaa

SEQ ID NO: 5535211 - DNA, 25 bp, Homo sapien
ccggggtttatgtcctcgctgggga

SEQ ID NO: 5535212 - DNA, 25 bp, Homo sapien
gccgcgctgacctttgcccgatgtc

SEQ ID NO: 5535213 - DNA, 25 bp, Homo sapien
agaagacaccaaattatgccgctgc

SEQ ID NO: 5535214 - DNA, 25 bp, Homo sapien
tgaccctggacagtctagaagacac

SEQ ID NO: 5535215 - DNA, 25 bp, Homo sapien
agtgagcccttacaggtcgccttcg

SEQ ID NO: 5535216 - DNA, 25 bp, Homo sapien
gagctgtgggccttcatcactggct

SEQ ID NO: 5535217 - DNA, 25 bp, Homo sapien
acaggagactctctgaagaccagca

SEQ ID NO: 5535218 - DNA, 25 bp, Homo sapien
gcttcagtgatggctggcctctgct

SEQ ID NO: 5535219 - DNA, 25 bp, Homo sapien
ttcccaagacggggtctgcatattt

SEQ ID NO: 5535220 - DNA, 25 bp, Homo sapien
tccggagaaaaatcgtgaccctgga

SEQ ID NO: 5535221 - DNA, 25 bp, Homo sapien
tacacctacgtgactgtcggagagc

SEQ ID NO: 5535222 - DNA, 25 bp, Homo sapien
tggacttcatcctttgcggcggctc

SEQ ID NO: 5535223 - DNA, 25 bp, Homo sapien
gagcctggcccatcttcctattccc

SEQ ID NO: 5535224 - DNA, 25 bp, Homo sapien
agaactgttgtagaaagctgcctta

SEQ ID NO: 5535225 - DNA, 25 bp, Homo sapien
gaggagattaccagagaagttgctt

SEQ ID NO: 5535226 - DNA, 25 bp, Homo sapien
ggattgcctcaaatctgagtggact

SEQ ID NO: 5535227 - DNA, 25 bp, Homo sapien
gctgtgatatatcctgcagggcttt

SEQ ID NO: 5535228 - DNA, 25 bp, Homo sapien
cagtgctttgccccaggattgcctc

SEQ ID NO: 5535229 - DNA, 25 bp, Homo sapien
cctattcccacgtgtagctagtgtc

SEQ ID NO: 5535230 - DNA, 25 bp, Homo sapien
gttctgtgttctgaaatcctgggta

SEQ ID NO: 5535231 - DNA, 25 bp, Homo sapien
tagttggcttgacaaagcataattc

SEQ ID NO: 5535232 - DNA, 25 bp, Homo sapien
gtgtagctagtgtctagtgtcagct

SEQ ID NO: 5535233 - DNA, 25 bp, Homo sapien
agacatccaggtagcgatatgcctg

SEQ ID NO: 5535234 - DNA, 25 bp, Homo sapien
ttcttagaccaaccatcagccattc

SEQ ID NO: 5535235 - DNA, 25 bp, Homo sapien
gagtgaaggagtgccatatctatcc

SEQ ID NO: 5535236 - DNA, 25 bp, Homo sapien
gagaggaatctaacaaactggtggg

SEQ ID NO: 5535237 - DNA, 25 bp, Homo sapien
tggctctttcattaggggatcctca

SEQ ID NO: 5535238 - DNA, 25 bp, Homo sapien
gggagggaatctaaagctctgactt

SEQ ID NO: 5535239 - DNA, 25 bp, Homo sapien
tctggtcctgaaatgtggccatctc

SEQ ID NO: 5535240 - DNA, 25 bp, Homo sapien
ggggtcaccagtcagaatagagact

SEQ ID NO: 5535241 - DNA, 25 bp, Homo sapien
agcgatatgcctgtagtgattagac

SEQ ID NO: 5535242 - DNA, 25 bp, Homo sapien
aggaaatacctggaaccttcagttc

SEQ ID NO: 5535243 - DNA, 25 bp, Homo sapien
tgtcaggctgttgacccgcagcatg

SEQ ID NO: 5535244 - DNA, 25 bp, Homo sapien
tgtctgatcgccctgcctgcctgca

SEQ ID NO: 5535245 - DNA, 25 bp, Homo sapien
tcaatggtacctgactgggttcctc

SEQ ID NO: 5535246 - DNA, 25 bp, Homo sapien
ctggaatcttctcctagggccctct

SEQ ID NO: 5535247 - DNA, 25 bp, Homo sapien
gatgttgtgggagactctgccatca

SEQ ID NO: 5535248 - DNA, 25 bp, Homo sapien
tgatgtggagacactgatgttgtgg

SEQ ID NO: 5535249 - DNA, 25 bp, Homo sapien
tggcgtgctgacaaagattctctac

SEQ ID NO: 5535250 - DNA, 25 bp, Homo sapien
gtttgcagccaatgtctgatcgccc

SEQ ID NO: 5535251 - DNA, 25 bp, Homo sapien
tgccatcaggacctgtccgggcaag

SEQ ID NO: 5535252 - DNA, 25 bp, Homo sapien
ctgcctgcctgcagcaaggactctg

SEQ ID NO: 5535253 - DNA, 25 bp, Homo sapien
ccactgtcggacctggtgatgtgga

SEQ ID NO: 5535254 - DNA, 25 bp, Homo sapien
tgttgctggtcagctaggttaggtg

SEQ ID NO: 5535255 - DNA, 25 bp, Homo sapien
cttgcagctgattttgtgggagttt

SEQ ID NO: 5535256 - DNA, 25 bp, Homo sapien
ggttcagcttcggtcactcgtccca

SEQ ID NO: 5535257 - DNA, 25 bp, Homo sapien
ggcactttacagcaaaacaattagc

SEQ ID NO: 5535258 - DNA, 25 bp, Homo sapien
caccacgtggaatatcacaggaagg

SEQ ID NO: 5535259 - DNA, 25 bp, Homo sapien
gttctggacttgtaggaacatgtgg

SEQ ID NO: 5535260 - DNA, 25 bp, Homo sapien
tttggcaagggttgttctggacttg

SEQ ID NO: 5535261 - DNA, 25 bp, Homo sapien
gctgttgtgggttcagcttcggtca

SEQ ID NO: 5535262 - DNA, 25 bp, Homo sapien
gtgttttggaacaggtatacagctc

SEQ ID NO: 5535263 - DNA, 25 bp, Homo sapien
catccagagggatttacttgcagct

SEQ ID NO: 5535264 - DNA, 25 bp, Homo sapien
ttaattcacagaaacattggcactt

SEQ ID NO: 5535265 - DNA, 25 bp, Homo sapien
cttgtgcagtaagtacagcttcaac

SEQ ID NO: 5535266 - DNA, 25 bp, Homo sapien
atgacatcagtgagcttgttccctc

SEQ ID NO: 5535267 - DNA, 25 bp, Homo sapien
taagttactgaagacaataggcata

SEQ ID NO: 5535268 - DNA, 25 bp, Homo sapien
ttgaggtgctcccagtctgctctgc

SEQ ID NO: 5535269 - DNA, 25 bp, Homo sapien
gcaaaggtttagagctcaaggtcta

SEQ ID NO: 5535270 - DNA, 25 bp, Homo sapien
atataagcatgaggattgaggtgct

SEQ ID NO: 5535271 - DNA, 25 bp, Homo sapien
cgtgtccttgtaaacccccagggca

SEQ ID NO: 5535272 - DNA, 25 bp, Homo sapien
ataaagagtgttgcactcgtgtcct

SEQ ID NO: 5535273 - DNA, 25 bp, Homo sapien
taaaagggatcaggattataacaaa

SEQ ID NO: 5535274 - DNA, 25 bp, Homo sapien
aggagcccatcaacattgctaaggc

SEQ ID NO: 5535275 - DNA, 25 bp, Homo sapien
gctcatactggctgtaaacctcccc

SEQ ID NO: 5535276 - DNA, 25 bp, Homo sapien
tccagtgctacaaggagcccatcaa

SEQ ID NO: 5535277 - DNA, 25 bp, Homo sapien
tccgcctgcaaaggctgtggaaaga

SEQ ID NO: 5535278 - DNA, 25 bp, Homo sapien
ccggctccctcccttctctgcagac

SEQ ID NO: 5535279 - DNA, 25 bp, Homo sapien
attccgatattccgcctgcaaaggc

SEQ ID NO: 5535280 - DNA, 25 bp, Homo sapien
ggcgcctggacccactttattccga

SEQ ID NO: 5535281 - DNA, 25 bp, Homo sapien
gcggccacctccaatgccgcgcggg

SEQ ID NO: 5535282 - DNA, 25 bp, Homo sapien
gttagccgtttccgcctgacaagcc

SEQ ID NO: 5535283 - DNA, 25 bp, Homo sapien
ccaacctttcgggccaagtcagacg

SEQ ID NO: 5535284 - DNA, 25 bp, Homo sapien
tttccgcctgacaagcctggcgcag

SEQ ID NO: 5535285 - DNA, 25 bp, Homo sapien
gccttctcctctccggcggccacct

SEQ ID NO: 5535286 - DNA, 25 bp, Homo sapien
aaggctgggtctgttttgctgacca

SEQ ID NO: 5535287 - DNA, 25 bp, Homo sapien
ggcctcttgcattagccgcggtggg

SEQ ID NO: 5535288 - DNA, 25 bp, Homo sapien
caaatgccagaacttacagatgaat

SEQ ID NO: 5535289 - DNA, 25 bp, Homo sapien
ccctgcagctattcagcgagaggca

SEQ ID NO: 5535290 - DNA, 25 bp, Homo sapien
tgcttccttgagaaacctggtccgg

SEQ ID NO: 5535291 - DNA, 25 bp, Homo sapien
gcacttaggagccgaggtttctctt

SEQ ID NO: 5535292 - DNA, 25 bp, Homo sapien
acctggtccggatataaaagcacat

SEQ ID NO: 5535293 - DNA, 25 bp, Homo sapien
actgtagctgttggttcctaaggct

SEQ ID NO: 5535294 - DNA, 25 bp, Homo sapien
cttcagaaattagaggtggaaaagg

SEQ ID NO: 5535295 - DNA, 25 bp, Homo sapien
ctgtcacatagcaggccccctgcag

SEQ ID NO: 5535296 - DNA, 25 bp, Homo sapien
agtaaaaactggacagacacaccct

SEQ ID NO: 5535297 - DNA, 25 bp, Homo sapien
aggtggaaaaggattacctcattcc

SEQ ID NO: 5535298 - DNA, 25 bp, Homo sapien
cagcctgaagatgaagtgatatatt

SEQ ID NO: 5535299 - DNA, 25 bp, Homo sapien
tggggttaggaaccctccatgttca

SEQ ID NO: 5535300 - DNA, 25 bp, Homo sapien
actgcctgctcgtcaccaccatgtg

SEQ ID NO: 5535301 - DNA, 25 bp, Homo sapien
accaacttgatgatacctgggggag

SEQ ID NO: 5535302 - DNA, 25 bp, Homo sapien
cccaccctagggctccatcagcctc

SEQ ID NO: 5535303 - DNA, 25 bp, Homo sapien
gctgtgacccccatgttgccagagg

SEQ ID NO: 5535304 - DNA, 25 bp, Homo sapien
tttacaagagtactgcctgctcgtc

SEQ ID NO: 5535305 - DNA, 25 bp, Homo sapien
gggtctcgggcctcacattgacttc

SEQ ID NO: 5535306 - DNA, 25 bp, Homo sapien
cctccatgttcaacaggggccctca

SEQ ID NO: 5535307 - DNA, 25 bp, Homo sapien
cctgccctatgccttggggcctggc

SEQ ID NO: 5535308 - DNA, 25 bp, Homo sapien
ctgctgttcctggtcaagcccagcc

SEQ ID NO: 5535309 - DNA, 25 bp, Homo sapien
gggccctcaccgcttgaggggtctc

SEQ ID NO: 5535310 - DNA, 25 bp, Homo sapien
agtgttacaagaagagatggtttct

SEQ ID NO: 5535311 - DNA, 25 bp, Homo sapien
gtatgaagggaatcttgggctttaa

SEQ ID NO: 5535312 - DNA, 25 bp, Homo sapien
gcagatgacattgaagcggatgctc

SEQ ID NO: 5535313 - DNA, 25 bp, Homo sapien
gtttcttgctacggaggagttctcc

SEQ ID NO: 5535314 - DNA, 25 bp, Homo sapien
acaagtccacagaacagagtgttac

SEQ ID NO: 5535315 - DNA, 25 bp, Homo sapien
ctgatggtagtgaaaacaagtccac

SEQ ID NO: 5535316 - DNA, 25 bp, Homo sapien
tttggtcacacaggtatgaagggaa

SEQ ID NO: 5535317 - DNA, 25 bp, Homo sapien
ttaaatacaatgtggaggcagatga

SEQ ID NO: 5535318 - DNA, 25 bp, Homo sapien
taaaaagaagttgcagaaacatgga

SEQ ID NO: 5535319 - DNA, 25 bp, Homo sapien
tgcagaaacatggatttggtcacac

SEQ ID NO: 5535320 - DNA, 25 bp, Homo sapien
cacaatgttggcagtatagagcagg

SEQ ID NO: 5535321 - DNA, 25 bp, Homo sapien
cactcggatgcccctcacggttctg

SEQ ID NO: 5535322 - DNA, 25 bp, Homo sapien
aatgtgtcttaggtggttgtcagct

SEQ ID NO: 5535323 - DNA, 25 bp, Homo sapien
ggacgcctgtgctcacccactcgga

SEQ ID NO: 5535324 - DNA, 25 bp, Homo sapien
agaaaagccaccactaacagcaacc

SEQ ID NO: 5535325 - DNA, 25 bp, Homo sapien
gggctggtcaagtgctagaccttca

SEQ ID NO: 5535326 - DNA, 25 bp, Homo sapien
aaacacccggaatagctcccgtcag

SEQ ID NO: 5535327 - DNA, 25 bp, Homo sapien
ttgcacaaagtcactcttggtggac

SEQ ID NO: 5535328 - DNA, 25 bp, Homo sapien
caggcggctcttcagcggacgcctg

SEQ ID NO: 5535329 - DNA, 25 bp, Homo sapien
ctcccgtcagtctaagcctcaagcc

SEQ ID NO: 5535330 - DNA, 25 bp, Homo sapien
agcagggtccggtttgctgttcatt

SEQ ID NO: 5535331 - DNA, 25 bp, Homo sapien
ggggctacacaaagtgagaagaaaa

SEQ ID NO: 5535332 - DNA, 25 bp, Homo sapien
gtggctggatgacaacagcttgacg

SEQ ID NO: 5535333 - DNA, 25 bp, Homo sapien
ccagtgaagccattcgagggctgag

SEQ ID NO: 5535334 - DNA, 25 bp, Homo sapien
agggctgagtgctttgcagtctttg

SEQ ID NO: 5535335 - DNA, 25 bp, Homo sapien
tactcagttgccagaagatgcattt

SEQ ID NO: 5535336 - DNA, 25 bp, Homo sapien
atctgcccaccctacaggcgctgac

SEQ ID NO: 5535337 - DNA, 25 bp, Homo sapien
ccaagcgctggatatcagtatgaac

SEQ ID NO: 5535338 - DNA, 25 bp, Homo sapien
gaaggacttgttcagttacggcatc

SEQ ID NO: 5535339 - DNA, 25 bp, Homo sapien
agtccccgaggacagttttgaagga

SEQ ID NO: 5535340 - DNA, 25 bp, Homo sapien
tgtgcaccccctcagcaatctgccc

SEQ ID NO: 5535341 - DNA, 25 bp, Homo sapien
gcgctgaccctggctctcaacaaga

SEQ ID NO: 5535342 - DNA, 25 bp, Homo sapien
ggccttgtctgggttgaaagaactc

SEQ ID NO: 5535343 - DNA, 25 bp, Homo sapien
ctcttctgccgccagaaggcgaagg

SEQ ID NO: 5535344 - DNA, 25 bp, Homo sapien
cttgatgacaaatgaccaatcctct

SEQ ID NO: 5535345 - DNA, 25 bp, Homo sapien
gtattacagacgacttgatgacaaa

SEQ ID NO: 5535346 - DNA, 25 bp, Homo sapien
cccttctattctccagcgcagctcc

SEQ ID NO: 5535347 - DNA, 25 bp, Homo sapien
aaaataaaattcagtgtgccccacc

SEQ ID NO: 5535348 - DNA, 25 bp, Homo sapien
tctaaaaaggcatgaatgactaaat

SEQ ID NO: 5535349 - DNA, 25 bp, Homo sapien
agtgctcaggctcagtgcatgagag

SEQ ID NO: 5535350 - DNA, 25 bp, Homo sapien
atacacattccctggctgagctccc

SEQ ID NO: 5535351 - DNA, 25 bp, Homo sapien
gctgagctcccagaaattggacttc

SEQ ID NO: 5535352 - DNA, 25 bp, Homo sapien
cacttatcagagtaacctagggggc

SEQ ID NO: 5535353 - DNA, 25 bp, Homo sapien
gtgcatgagagcagcgctctctgac

SEQ ID NO: 5535354 - DNA, 25 bp, Homo sapien
tgggtgattggtgccaaaaagagta

SEQ ID NO: 5535355 - DNA, 25 bp, Homo sapien
taagggctcatagatcttgggttcc

SEQ ID NO: 5535356 - DNA, 25 bp, Homo sapien
tctggttgttgattcactgggtgat

SEQ ID NO: 5535357 - DNA, 25 bp, Homo sapien
atggtatggacattgaagacagcat

SEQ ID NO: 5535358 - DNA, 25 bp, Homo sapien
ataacaagtctaatggtatggacat

SEQ ID NO: 5535359 - DNA, 25 bp, Homo sapien
tgaatcacagaagtcagtgttacac

SEQ ID NO: 5535360 - DNA, 25 bp, Homo sapien
acaatgagggtaatttgtttgcaac

SEQ ID NO: 5535361 - DNA, 25 bp, Homo sapien
tgaagacagcattgtcctgggctcc

SEQ ID NO: 5535362 - DNA, 25 bp, Homo sapien
aaaggcctggtttcatctagagttc

SEQ ID NO: 5535363 - DNA, 25 bp, Homo sapien
attagcagaaacaatgacatttgca

SEQ ID NO: 5535364 - DNA, 25 bp, Homo sapien
gggctccattgttgggaaaggcctg

SEQ ID NO: 5535365 - DNA, 25 bp, Homo sapien
gactcttcgacaattggacacaaaa

SEQ ID NO: 5535366 - DNA, 25 bp, Homo sapien
ttttgtgtccaattgtcgaagagtc

SEQ ID NO: 5535367 - DNA, 25 bp, Homo sapien
ctattttaaagactttggaccagat

SEQ ID NO: 5535368 - DNA, 25 bp, Homo sapien
agaacttaaaacacctcagaaccta

SEQ ID NO: 5535369 - DNA, 25 bp, Homo sapien
tactctgtgtcaagtcctgtaccag

SEQ ID NO: 5535370 - DNA, 25 bp, Homo sapien
attgtctggaatactccaaatttcc

SEQ ID NO: 5535371 - DNA, 25 bp, Homo sapien
ccatgaaatctaaatgagggagaaa

SEQ ID NO: 5535372 - DNA, 25 bp, Homo sapien
ttacagtctagcataagaacttaaa

SEQ ID NO: 5535373 - DNA, 25 bp, Homo sapien
gcactgaggatacaagaataaataa

SEQ ID NO: 5535374 - DNA, 25 bp, Homo sapien
tcagaacctactgagaaaagtttct

SEQ ID NO: 5535375 - DNA, 25 bp, Homo sapien
gaaaagtttctgggtatctagtata

SEQ ID NO: 5535376 - DNA, 25 bp, Homo sapien
tgggtatctagtatattgtctggaa

SEQ ID NO: 5535377 - DNA, 25 bp, Homo sapien
tgaacaactactctgtgtcaagtcc

SEQ ID NO: 5535378 - DNA, 25 bp, Homo sapien
gagcaatatccactgcacaacatgc

SEQ ID NO: 5535379 - DNA, 25 bp, Homo sapien
catgatctagtatttgtgaggtgcc

SEQ ID NO: 5535380 - DNA, 25 bp, Homo sapien
gatggaaatatacatagcaagtctt

SEQ ID NO: 5535381 - DNA, 25 bp, Homo sapien
tgaggtgccaactaagagaaatata

SEQ ID NO: 5535382 - DNA, 25 bp, Homo sapien
tgcagctattaaccagcagcgtctg

SEQ ID NO: 5535383 - DNA, 25 bp, Homo sapien
accagcagcgtctgacatgatctag

SEQ ID NO: 5535384 - DNA, 25 bp, Homo sapien
taaaggcactgctctatggttattc

SEQ ID NO: 5535385 - DNA, 25 bp, Homo sapien
acatagcaagtcttagcagggagaa

SEQ ID NO: 5535386 - DNA, 25 bp, Homo sapien
acacacttccatgagcaatatccac

SEQ ID NO: 5535387 - DNA, 25 bp, Homo sapien
tgttcagaaacttgaaaagactatt

SEQ ID NO: 5535388 - DNA, 25 bp, Homo sapien
gcacaacatgccttcctgcagctat

SEQ ID NO: 5535389 - DNA, 25 bp, Homo sapien
tttgcataaattgggataaatcacc

SEQ ID NO: 5535390 - DNA, 25 bp, Homo sapien
tcaggccacgtccccacctcctcga

SEQ ID NO: 5535391 - DNA, 25 bp, Homo sapien
attgggataaatcacctggaggaat

SEQ ID NO: 5535392 - DNA, 25 bp, Homo sapien
aaggctgtaaatcaccattgcatgc

SEQ ID NO: 5535393 - DNA, 25 bp, Homo sapien
ttgataaatacagagacatcgccgg

SEQ ID NO: 5535394 - DNA, 25 bp, Homo sapien
agttcttttcaccaggcaaacggaa

SEQ ID NO: 5535395 - DNA, 25 bp, Homo sapien
cccacctcctcgaagcctccaagct

SEQ ID NO: 5535396 - DNA, 25 bp, Homo sapien
tgctgctgttaggaaacggttacca

SEQ ID NO: 5535397 - DNA, 25 bp, Homo sapien
aagcctccaagctgctgttaatgtc

SEQ ID NO: 5535398 - DNA, 25 bp, Homo sapien
aatcaccattgcatgcatggcctgc

SEQ ID NO: 5535399 - DNA, 25 bp, Homo sapien
atcacctggaggaattacacgtaaa

SEQ ID NO: 5535400 - DNA, 25 bp, Homo sapien
atcatagctgtgtatatatagaaaa

SEQ ID NO: 5535401 - DNA, 25 bp, Homo sapien
tcaaaacagaggttcaatttttata

SEQ ID NO: 5535402 - DNA, 25 bp, Homo sapien
aaaggaaggtcatgtgtgctcattt

SEQ ID NO: 5535403 - DNA, 25 bp, Homo sapien
ggaaaagttctgaaatacacactat

SEQ ID NO: 5535404 - DNA, 25 bp, Homo sapien
ggtactatccaaggttttaagcatc

SEQ ID NO: 5535405 - DNA, 25 bp, Homo sapien
cattagaattcacttgactaggggc

SEQ ID NO: 5535406 - DNA, 25 bp, Homo sapien
cttgaccccagagtggtaccacttc

SEQ ID NO: 5535407 - DNA, 25 bp, Homo sapien
ccagagtggtaccacttcctggaaa

SEQ ID NO: 5535408 - DNA, 25 bp, Homo sapien
tgaaatacacactattctaagcaac

SEQ ID NO: 5535409 - DNA, 25 bp, Homo sapien
ctcttgaccccagagtggtaccact

SEQ ID NO: 5535410 - DNA, 25 bp, Homo sapien
cctcccatcctcagtttcagtcaac

SEQ ID NO: 5535411 - DNA, 25 bp, Homo sapien
catgagtaaagtcaaaagtaaaaac

SEQ ID NO: 5535412 - DNA, 25 bp, Homo sapien
tccctgattccccttgcagggcgtg

SEQ ID NO: 5535413 - DNA, 25 bp, Homo sapien
tgtggctcacctgttcagtagcccc

SEQ ID NO: 5535414 - DNA, 25 bp, Homo sapien
ttataggatgtggtcaaagcaatga

SEQ ID NO: 5535415 - DNA, 25 bp, Homo sapien
aaggagaacaagatttataggatgt

SEQ ID NO: 5535416 - DNA, 25 bp, Homo sapien
ataaattaacaacgaaagaggagca

SEQ ID NO: 5535417 - DNA, 25 bp, Homo sapien
gcagaaaccccttgcgagaggggga

SEQ ID NO: 5535418 - DNA, 25 bp, Homo sapien
aaaactgaatgtataaacaaattgg

SEQ ID NO: 5535419 - DNA, 25 bp, Homo sapien
agacagctggagtgttaaccagctc

SEQ ID NO: 5535420 - DNA, 25 bp, Homo sapien
gcaatgaaacggaagagttccctga

SEQ ID NO: 5535421 - DNA, 25 bp, Homo sapien
acctgttcagtagccccctctgcag

SEQ ID NO: 5535422 - DNA, 25 bp, Homo sapien
ctaagtgactaagctgactgggtgt

SEQ ID NO: 5535423 - DNA, 25 bp, Homo sapien
agggatgtatgttggcaatggtcca

SEQ ID NO: 5535424 - DNA, 25 bp, Homo sapien
agtctaggaggatttattaagtacc

SEQ ID NO: 5535425 - DNA, 25 bp, Homo sapien
atctgtcaaataggggtgatcctgt

SEQ ID NO: 5535426 - DNA, 25 bp, Homo sapien
gttctgagaattatgagacgtctac

SEQ ID NO: 5535427 - DNA, 25 bp, Homo sapien
gagttgctcaggaagaaacgtaaat

SEQ ID NO: 5535428 - DNA, 25 bp, Homo sapien
tgctcctaatctagtaaaaggggaa

SEQ ID NO: 5535429 - DNA, 25 bp, Homo sapien
agacgtctacgtgatgaggtttgag

SEQ ID NO: 5535430 - DNA, 25 bp, Homo sapien
ataacgtataatagtctgtgcctgt

SEQ ID NO: 5535431 - DNA, 25 bp, Homo sapien
ctctcaaggtctttgaaagtgggga

SEQ ID NO: 5535432 - DNA, 25 bp, Homo sapien
agtgtacacagcttggaagtgaaaa

SEQ ID NO: 5535433 - DNA, 25 bp, Homo sapien
gtgctgatttgacaacaaggaaggc

SEQ ID NO: 5535434 - DNA, 25 bp, Homo sapien
ctctgaagacaatcagaggcctgcc

SEQ ID NO: 5535435 - DNA, 25 bp, Homo sapien
tccaaatagatgagaagttccttcc

SEQ ID NO: 5535436 - DNA, 25 bp, Homo sapien
gtggttgtgagaaaactaaagagaa

SEQ ID NO: 5535437 - DNA, 25 bp, Homo sapien
gttccagcactgtccttaggcctct

SEQ ID NO: 5535438 - DNA, 25 bp, Homo sapien
agcgggacctcagagaatcatttcc

SEQ ID NO: 5535439 - DNA, 25 bp, Homo sapien
taagaagtatgcacaagaataccta

SEQ ID NO: 5535440 - DNA, 25 bp, Homo sapien
ataaactggtggtacgttatgacag

SEQ ID NO: 5535441 - DNA, 25 bp, Homo sapien
taaaactctttccagcgggacctca

SEQ ID NO: 5535442 - DNA, 25 bp, Homo sapien
aggaaggcattttggccagagtaaa

SEQ ID NO: 5535443 - DNA, 25 bp, Homo sapien
ctaacttgttggaactgatgcactt

SEQ ID NO: 5535444 - DNA, 25 bp, Homo sapien
cgggacacttaggacgtgacacagg

SEQ ID NO: 5535445 - DNA, 25 bp, Homo sapien
cctgtgtcacgtcctaagtgtcccg

SEQ ID NO: 5535446 - DNA, 25 bp, Homo sapien
atcacgtgacacgccagtgacacag

SEQ ID NO: 5535447 - DNA, 25 bp, Homo sapien
cggggccacccatcttgtcctctgc

SEQ ID NO: 5535448 - DNA, 25 bp, Homo sapien
tccatttgcaagttggtcaccaata

SEQ ID NO: 5535449 - DNA, 25 bp, Homo sapien
agcaaacacggctacatcacgtgac

SEQ ID NO: 5535450 - DNA, 25 bp, Homo sapien
agatggacacgcagtgtgcttcatg

SEQ ID NO: 5535451 - DNA, 25 bp, Homo sapien
acatcatgtgtacacgctcagggcg

SEQ ID NO: 5535452 - DNA, 25 bp, Homo sapien
atgtgtacacgctcagggcgtggca

SEQ ID NO: 5535453 - DNA, 25 bp, Homo sapien
gagctctagaaaccaacggagaaac

SEQ ID NO: 5535454 - DNA, 25 bp, Homo sapien
ctgtcccctctgagaaggggaggga

SEQ ID NO: 5535455 - DNA, 25 bp, Homo sapien
gactctgagggctaacagaaatggg

SEQ ID NO: 5535456 - DNA, 25 bp, Homo sapien
ccaggagtcctgtcccctctgagaa

SEQ ID NO: 5535457 - DNA, 25 bp, Homo sapien
aaagcacaagaactgccaagatgat

SEQ ID NO: 5535458 - DNA, 25 bp, Homo sapien
tgattttggtaccttgtgttgcatt

SEQ ID NO: 5535459 - DNA, 25 bp, Homo sapien
accatgtaaccaaggaaatttgttc

SEQ ID NO: 5535460 - DNA, 25 bp, Homo sapien
cacttacaatctgaacgctaaaggg

SEQ ID NO: 5535461 - DNA, 25 bp, Homo sapien
aataactagtttaagtctccatttc

SEQ ID NO: 5535462 - DNA, 25 bp, Homo sapien
ctcccgcgaataaagacacacttac

SEQ ID NO: 5535463 - DNA, 25 bp, Homo sapien
tgcaacttacttaacagaccaaaat

SEQ ID NO: 5535464 - DNA, 25 bp, Homo sapien
gtggcctcccgcgaataaagacaca

SEQ ID NO: 5535465 - DNA, 25 bp, Homo sapien
ggtactgtagtacatcaaatactcc

SEQ ID NO: 5535466 - DNA, 25 bp, Homo sapien
cacaagaactgccaagatgatcatt

SEQ ID NO: 5535467 - DNA, 25 bp, Homo sapien
tacatcaaatactccacacactgtg

SEQ ID NO: 5535468 - DNA, 25 bp, Homo sapien
gcattcgcccgatcccagcctcaca

SEQ ID NO: 5535469 - DNA, 25 bp, Homo sapien
aaaaggacagattcatttggggttc

SEQ ID NO: 5535470 - DNA, 25 bp, Homo sapien
ccgcattcgcccgatcccagcctca

SEQ ID NO: 5535471 - DNA, 25 bp, Homo sapien
cctcccacacttacgaaggaaatgc

SEQ ID NO: 5535472 - DNA, 25 bp, Homo sapien
ggacagattcatttggggttcagcc

SEQ ID NO: 5535473 - DNA, 25 bp, Homo sapien
accttgaggttcatcaagttcatcc

SEQ ID NO: 5535474 - DNA, 25 bp, Homo sapien
caagttcatcccattaaaacctccc

SEQ ID NO: 5535475 - DNA, 25 bp, Homo sapien
tggggttcagcctcatgccccccac

SEQ ID NO: 5535476 - DNA, 25 bp, Homo sapien
acacccaagactttgtggctaagag

SEQ ID NO: 5535477 - DNA, 25 bp, Homo sapien
gactttgtggctaagagaatcaggc

SEQ ID NO: 5535478 - DNA, 25 bp, Homo sapien
gcccccagagaccctcccacactta

SEQ ID NO: 5535479 - DNA, 25 bp, Homo sapien
gttctgcgcgtcatttccggtcccg

SEQ ID NO: 5535480 - DNA, 25 bp, Homo sapien
gcccgccagcgtccctttgttgtga

SEQ ID NO: 5535481 - DNA, 25 bp, Homo sapien
tgcgcgtcatttccggtcccgcggg

SEQ ID NO: 5535482 - DNA, 25 bp, Homo sapien
gggttctgcgcgtcatttccggtcc

SEQ ID NO: 5535483 - DNA, 25 bp, Homo sapien
gcgcgccgtgtttctcctcccgtct

SEQ ID NO: 5535484 - DNA, 25 bp, Homo sapien
cgtttccccggctccgtggctctgg

SEQ ID NO: 5535485 - DNA, 25 bp, Homo sapien
cgcgtcatttccggtcccgcgggcg

SEQ ID NO: 5535486 - DNA, 25 bp, Homo sapien
gcgtttccccggctccgtggctctg

SEQ ID NO: 5535487 - DNA, 25 bp, Homo sapien
tctcctcccgtctgcctggagtaga

SEQ ID NO: 5535488 - DNA, 25 bp, Homo sapien
agcgtccctttgttgtgaaggcgcc

SEQ ID NO: 5535489 - DNA, 25 bp, Homo sapien
cgtccctttgttgtgaaggcgccgg

SEQ ID NO: 5535490 - DNA, 25 bp, Homo sapien
ctggatcctcccgtccgagtcccga

SEQ ID NO: 5535491 - DNA, 25 bp, Homo sapien
gcctgattctcttagccacaaagtc

SEQ ID NO: 5535492 - DNA, 25 bp, Homo sapien
tgatgaacctcaaggtggcctgatt

SEQ ID NO: 5535493 - DNA, 25 bp, Homo sapien
atcctcccgtccgagtcccgagcat

SEQ ID NO: 5535494 - DNA, 25 bp, Homo sapien
ggaggttttaatgggatgaacttga

SEQ ID NO: 5535495 - DNA, 25 bp, Homo sapien
ctcttagccacaaagtcttgggtgt

SEQ ID NO: 5535496 - DNA, 25 bp, Homo sapien
tgaacttgatgaacctcaaggtggc

SEQ ID NO: 5535497 - DNA, 25 bp, Homo sapien
tccgagtcccgagcatcccattgta

SEQ ID NO: 5535498 - DNA, 25 bp, Homo sapien
ggctcgcagtcactggatcctcccg

SEQ ID NO: 5535499 - DNA, 25 bp, Homo sapien
cgcagtcactggatcctcccgtccg

SEQ ID NO: 5535500 - DNA, 25 bp, Homo sapien
agccacaaagtcttgggtgtggggg

SEQ ID NO: 5535501 - DNA, 25 bp, Homo sapien
caagttcggttaaagaaaacatctg

SEQ ID NO: 5535502 - DNA, 25 bp, Homo sapien
tatatttacagacaagttcggttaa

SEQ ID NO: 5535503 - DNA, 25 bp, Homo sapien
cggtaagttgcatgctaagttaatt

SEQ ID NO: 5535504 - DNA, 25 bp, Homo sapien
aaaacatctggtaaatatggcagtt

SEQ ID NO: 5535505 - DNA, 25 bp, Homo sapien
ctggatatgagagctgccaagctcc

SEQ ID NO: 5535506 - DNA, 25 bp, Homo sapien
gatgagttccgtcttagtggcttat

SEQ ID NO: 5535507 - DNA, 25 bp, Homo sapien
ttgagagacaactcacgtcccaagt

SEQ ID NO: 5535508 - DNA, 25 bp, Homo sapien
ccatgatcaatccccagctgtgctt

SEQ ID NO: 5535509 - DNA, 25 bp, Homo sapien
ggcttattctggatatgagagctgc

SEQ ID NO: 5535510 - DNA, 25 bp, Homo sapien
ggtgattgatgagttccgtcttagt

SEQ ID NO: 5535511 - DNA, 25 bp, Homo sapien
actactgtgctttgagagacaactc

SEQ ID NO: 5535512 - DNA, 25 bp, Homo sapien
gcagccctacccggggctcaacaca

SEQ ID NO: 5535513 - DNA, 25 bp, Homo sapien
cggatattaaaaggagcgttgctgg

SEQ ID NO: 5535514 - DNA, 25 bp, Homo sapien
tcaaaaagccacgtcgtgctgctgc

SEQ ID NO: 5535515 - DNA, 25 bp, Homo sapien
atccggatattaaaaggagcgttgc

SEQ ID NO: 5535516 - DNA, 25 bp, Homo sapien
acatccggatattaaaaggagcgtt

SEQ ID NO: 5535517 - DNA, 25 bp, Homo sapien
aaagccacgtcgtgctgctgctgga

SEQ ID NO: 5535518 - DNA, 25 bp, Homo sapien
tctccgggctctcctttcaaaaagc

SEQ ID NO: 5535519 - DNA, 25 bp, Homo sapien
tggacatccggatattaaaaggagc

SEQ ID NO: 5535520 - DNA, 25 bp, Homo sapien
tgtggctctggacatccggatatta

SEQ ID NO: 5535521 - DNA, 25 bp, Homo sapien
gccctacccggggctcaacacacag

SEQ ID NO: 5535522 - DNA, 25 bp, Homo sapien
attaaaaggagcgttgctggaaaaa

SEQ ID NO: 5535523 - DNA, 25 bp, Homo sapien
gagggcctgagaaaccacatccttt

SEQ ID NO: 5535524 - DNA, 25 bp, Homo sapien
ttatagccatcgagggcctgagaaa

SEQ ID NO: 5535525 - DNA, 25 bp, Homo sapien
gactcccacgtaggggctgatattc

SEQ ID NO: 5535526 - DNA, 25 bp, Homo sapien
ctgatagctgaggcctaatctggag

SEQ ID NO: 5535527 - DNA, 25 bp, Homo sapien
aggcatcgtgaagaactccatccaa

SEQ ID NO: 5535528 - DNA, 25 bp, Homo sapien
atgaattctttgggatgggagaaga

SEQ ID NO: 5535529 - DNA, 25 bp, Homo sapien
aaaaatcactgatagctgaggccta

SEQ ID NO: 5535530 - DNA, 25 bp, Homo sapien
atccaacttaaacgaccagtctgtc

SEQ ID NO: 5535531 - DNA, 25 bp, Homo sapien
tcataaaccaagtcctgggaggcat

SEQ ID NO: 5535532 - DNA, 25 bp, Homo sapien
cagaggaaatgaactgtaggatgaa

SEQ ID NO: 5535533 - DNA, 25 bp, Homo sapien
gggctgatattccagatgaattctt

SEQ ID NO: 5535534 - DNA, 25 bp, Homo sapien
cccacaagccccacaaacaagtcat

SEQ ID NO: 5535535 - DNA, 25 bp, Homo sapien
cgcagggccatgtcacttaaggaaa

SEQ ID NO: 5535536 - DNA, 25 bp, Homo sapien
aagggacccagatgatgaaatcatt

SEQ ID NO: 5535537 - DNA, 25 bp, Homo sapien
tggggccgatgtatgtgcccctccc

SEQ ID NO: 5535538 - DNA, 25 bp, Homo sapien
ttctcagctttgcaacgcagggcca

SEQ ID NO: 5535539 - DNA, 25 bp, Homo sapien
caggagatgttagaatcctggggcc

SEQ ID NO: 5535540 - DNA, 25 bp, Homo sapien
aactgatataaaccaaagggaccca

SEQ ID NO: 5535541 - DNA, 25 bp, Homo sapien
gaaatcattggctcagtgtgttccc

SEQ ID NO: 5535542 - DNA, 25 bp, Homo sapien
ctagaattgtagtcacctgccgaat

SEQ ID NO: 5535543 - DNA, 25 bp, Homo sapien
atgtaggcatgccacacagcaaacc

SEQ ID NO: 5535544 - DNA, 25 bp, Homo sapien
tcctcacagggtcaacaaaacaatc

SEQ ID NO: 5535545 - DNA, 25 bp, Homo sapien
ggagtgataaacagtatgggactac

SEQ ID NO: 5535546 - DNA, 25 bp, Homo sapien
acagtgatgaaacccggacatgaat

SEQ ID NO: 5535547 - DNA, 25 bp, Homo sapien
ctgcacagaaaatagtaacacactt

SEQ ID NO: 5535548 - DNA, 25 bp, Homo sapien
ttgttaggcgaaattaagcgaaatc

SEQ ID NO: 5535549 - DNA, 25 bp, Homo sapien
aaatataaattaatggccgggtgcg

SEQ ID NO: 5535550 - DNA, 25 bp, Homo sapien
gccttcaaattgtgatggagtgata

SEQ ID NO: 5535551 - DNA, 25 bp, Homo sapien
tgttagggtaaaaatcatgggtcag

SEQ ID NO: 5535552 - DNA, 25 bp, Homo sapien
ggggggatgatatgtatcgtactga

SEQ ID NO: 5535553 - DNA, 25 bp, Homo sapien
ggtggttaagagagttgaactccat

SEQ ID NO: 5535554 - DNA, 25 bp, Homo sapien
tgtagaagttataattcctgcccac

SEQ ID NO: 5535555 - DNA, 25 bp, Homo sapien
ggaaactctcatggctgttagggta

SEQ ID NO: 5535556 - DNA, 25 bp, Homo sapien
ccaccgcattccgggtggatggaga

SEQ ID NO: 5535557 - DNA, 25 bp, Homo sapien
gctgcatcggctcaacatccccaac

SEQ ID NO: 5535558 - DNA, 25 bp, Homo sapien
cccagactcgctgcagctgagctgg

SEQ ID NO: 5535559 - DNA, 25 bp, Homo sapien
tcaccattgaatcccaggtgcaccc

SEQ ID NO: 5535560 - DNA, 25 bp, Homo sapien
ccactcctacgtgttccgcgtgcgg

SEQ ID NO: 5535561 - DNA, 25 bp, Homo sapien
agcgtgagggtgtcatcaccattga

SEQ ID NO: 5535562 - DNA, 25 bp, Homo sapien
gggccagccaccgcattccgggtgg

SEQ ID NO: 5535563 - DNA, 25 bp, Homo sapien
cccgctggtgttcactgccctgagc

SEQ ID NO: 5535564 - DNA, 25 bp, Homo sapien
atccccaaccctgcccagacctcgg

SEQ ID NO: 5535565 - DNA, 25 bp, Homo sapien
gccctacaagttcaaggtgcaggcc

SEQ ID NO: 5535566 - DNA, 25 bp, Homo sapien
cctcctgcccaaccactcctacgtg

SEQ ID NO: 5535567 - DNA, 25 bp, Homo sapien
gtcaccgcagctcttgattccgaaa

SEQ ID NO: 5535568 - DNA, 25 bp, Homo sapien
gccccagccccgtcatcctgagtgg

SEQ ID NO: 5535569 - DNA, 25 bp, Homo sapien
cagctctatgcccagagaagccagg

SEQ ID NO: 5535570 - DNA, 25 bp, Homo sapien
ccggtaataccatgtgctggtgaga

SEQ ID NO: 5535571 - DNA, 25 bp, Homo sapien
cgcagctcttgattccgaaaggaca

SEQ ID NO: 5535572 - DNA, 25 bp, Homo sapien
tgcccactcccagctctatgcccag

SEQ ID NO: 5535573 - DNA, 25 bp, Homo sapien
ggtgagaacgtccccgtgtccttca

SEQ ID NO: 5535574 - DNA, 25 bp, Homo sapien
cgtgtccttcagaggacagtcttgc

SEQ ID NO: 5535575 - DNA, 25 bp, Homo sapien
ctgacccaactgcccactcccagct

SEQ ID NO: 5535576 - DNA, 25 bp, Homo sapien
aataccatgtgctggtgagaacgtc

SEQ ID NO: 5535577 - DNA, 25 bp, Homo sapien
cagccctaagaacagcaactcccga

SEQ ID NO: 5535578 - DNA, 25 bp, Homo sapien
cttgtctcatcccagcctcaacacc

SEQ ID NO: 5535579 - DNA, 25 bp, Homo sapien
tggaaagctcatgcaagtacgcagc

SEQ ID NO: 5535580 - DNA, 25 bp, Homo sapien
gaacatctccggggccacagatgtc

SEQ ID NO: 5535581 - DNA, 25 bp, Homo sapien
tctgccagaaagcctcctggggtca

SEQ ID NO: 5535582 - DNA, 25 bp, Homo sapien
acactcctggtacagtgaggatgga

SEQ ID NO: 5535583 - DNA, 25 bp, Homo sapien
aggtaaaatcggatctgggcccttg

SEQ ID NO: 5535584 - DNA, 25 bp, Homo sapien
gaggaagtcccttagaaagaggctg

SEQ ID NO: 5535585 - DNA, 25 bp, Homo sapien
agcctcaacacccatcctatctgcc

SEQ ID NO: 5535586 - DNA, 25 bp, Homo sapien
gtccaaggtaaaatcggatctgggc

SEQ ID NO: 5535587 - DNA, 25 bp, Homo sapien
tcctatctgccaggcgcagaagagc

SEQ ID NO: 5535588 - DNA, 25 bp, Homo sapien
ggggccacagatgtcatccaaaggt

SEQ ID NO: 5535589 - DNA, 25 bp, Homo sapien
ttcaaaattgctgttaaaggccaac

SEQ ID NO: 5535590 - DNA, 25 bp, Homo sapien
atatgcaagagtggcacatatcaaa

SEQ ID NO: 5535591 - DNA, 25 bp, Homo sapien
tcccatgagataatcatcaccttgc

SEQ ID NO: 5535592 - DNA, 25 bp, Homo sapien
actcaatggcacagcatcctctaat

SEQ ID NO: 5535593 - DNA, 25 bp, Homo sapien
ctaaaggtcctggatgccactagaa

SEQ ID NO: 5535594 - DNA, 25 bp, Homo sapien
ctgccacaaaagcagatctttgtca

SEQ ID NO: 5535595 - DNA, 25 bp, Homo sapien
cattggttcagatccaacgtaagtt

SEQ ID NO: 5535596 - DNA, 25 bp, Homo sapien
actgagatgtatatgcaagagtggc

SEQ ID NO: 5535597 - DNA, 25 bp, Homo sapien
atgcctccctaaaggtcctggatgc

SEQ ID NO: 5535598 - DNA, 25 bp, Homo sapien
acataaccagaagacccagttttca

SEQ ID NO: 5535599 - DNA, 25 bp, Homo sapien
gaaaaaacccactcgctgaaacagc

SEQ ID NO: 5535600 - DNA, 25 bp, Homo sapien
gcaacggcttagacttctatgggcc

SEQ ID NO: 5535601 - DNA, 25 bp, Homo sapien
cggcttagacttctatgggccgggc

SEQ ID NO: 5535602 - DNA, 25 bp, Homo sapien
aacggcttagacttctatgggccgg

SEQ ID NO: 5535603 - DNA, 25 bp, Homo sapien
cgatgatgacctggatgccaccaag

SEQ ID NO: 5535604 - DNA, 25 bp, Homo sapien
actctccgggcttcctgtcgggagc

SEQ ID NO: 5535605 - DNA, 25 bp, Homo sapien
gggcgactctccgggcttcctgtcg

SEQ ID NO: 5535606 - DNA, 25 bp, Homo sapien
gccagcttcccgtggtccgcctttg

SEQ ID NO: 5535607 - DNA, 25 bp, Homo sapien
cagcttcccgtggtccgcctttggg

SEQ ID NO: 5535608 - DNA, 25 bp, Homo sapien
atgatgacctggatgccaccaagga

SEQ ID NO: 5535609 - DNA, 25 bp, Homo sapien
gcgactgcaacggcttagacttcta

SEQ ID NO: 5535610 - DNA, 25 bp, Homo sapien
cgactctccgggcttcctgtcggga

SEQ ID NO: 5535611 - DNA, 25 bp, Homo sapien
aggacaccccggttcactgagggtg

SEQ ID NO: 5535612 - DNA, 25 bp, Homo sapien
agtaagttagctctgcaggtgtgga

SEQ ID NO: 5535613 - DNA, 25 bp, Homo sapien
ccacctggtataagtacgggcagag

SEQ ID NO: 5535614 - DNA, 25 bp, Homo sapien
gggcagggatcccacctggtataag

SEQ ID NO: 5535615 - DNA, 25 bp, Homo sapien
tgaactgtgttgacatgaggaaagg

SEQ ID NO: 5535616 - DNA, 25 bp, Homo sapien
tattgtgaactgtgttgacatgagg

SEQ ID NO: 5535617 - DNA, 25 bp, Homo sapien
gcccacagtaagtcgccgtctggca

SEQ ID NO: 5535618 - DNA, 25 bp, Homo sapien
caggtgtggaccccaagaccacaca

SEQ ID NO: 5535619 - DNA, 25 bp, Homo sapien
gtaagtcgccgtctggcagtaagtt

SEQ ID NO: 5535620 - DNA, 25 bp, Homo sapien
cgccgtctggcagtaagttagctct

SEQ ID NO: 5535621 - DNA, 25 bp, Homo sapien
gacaccccggttcactgagggtggc

SEQ ID NO: 5535622 - DNA, 25 bp, Homo sapien
caaatcacagagacgttaggaaagg

SEQ ID NO: 5535623 - DNA, 25 bp, Homo sapien
gaagggtttcacatcacagactgtc

SEQ ID NO: 5535624 - DNA, 25 bp, Homo sapien
ttttgggccactgaaggtttgtgac

SEQ ID NO: 5535625 - DNA, 25 bp, Homo sapien
ccatctgctgccattcaaaaggaat

SEQ ID NO: 5535626 - DNA, 25 bp, Homo sapien
gaagctcccaaatcacagagacgtt

SEQ ID NO: 5535627 - DNA, 25 bp, Homo sapien
ccactgaaggtttgtgacccacagc

SEQ ID NO: 5535628 - DNA, 25 bp, Homo sapien
attccttgggaatttacagaactcc

SEQ ID NO: 5535629 - DNA, 25 bp, Homo sapien
aggatcgggaaatcttgctagcttg

SEQ ID NO: 5535630 - DNA, 25 bp, Homo sapien
acagaactccagctcagaagctccc

SEQ ID NO: 5535631 - DNA, 25 bp, Homo sapien
agacccaccaccaataccctgctta

SEQ ID NO: 5535632 - DNA, 25 bp, Homo sapien
tcccaaccgcccagctaggcttcct

SEQ ID NO: 5535633 - DNA, 25 bp, Homo sapien
ttgaagatgtaatatacgtacttac

SEQ ID NO: 5535634 - DNA, 25 bp, Homo sapien
taaagacaagagatacaattcttca

SEQ ID NO: 5535635 - DNA, 25 bp, Homo sapien
attaatgaccaagttgtatccattc

SEQ ID NO: 5535636 - DNA, 25 bp, Homo sapien
tattctgtaaagagtcaagtagtaa

SEQ ID NO: 5535637 - DNA, 25 bp, Homo sapien
tttaggtgctgtgacaaaattgaag

SEQ ID NO: 5535638 - DNA, 25 bp, Homo sapien
gtacttacataatgagagaaagcaa

SEQ ID NO: 5535639 - DNA, 25 bp, Homo sapien
aagacagaaacctaagaagcatcct

SEQ ID NO: 5535640 - DNA, 25 bp, Homo sapien
tttgccaggacaacataaaggtctt

SEQ ID NO: 5535641 - DNA, 25 bp, Homo sapien
actgataaatcaatgtagctaatta

SEQ ID NO: 5535642 - DNA, 25 bp, Homo sapien
ctctatccttccgccccagttaggg

SEQ ID NO: 5535643 - DNA, 25 bp, Homo sapien
tcacccaagatgcttaagacagaaa

SEQ ID NO: 5535644 - DNA, 25 bp, Homo sapien
tccaccgtgaccccaacctctcctg

SEQ ID NO: 5535645 - DNA, 25 bp, Homo sapien
cgtgaccccaacctctcctgtcccc

SEQ ID NO: 5535646 - DNA, 25 bp, Homo sapien
ccaccgtgaccccaacctctcctgt

SEQ ID NO: 5535647 - DNA, 25 bp, Homo sapien
gcactgggacctggatttgtttttc

SEQ ID NO: 5535648 - DNA, 25 bp, Homo sapien
caccgtgaccccaacctctcctgtc

SEQ ID NO: 5535649 - DNA, 25 bp, Homo sapien
accgtgaccccaacctctcctgtcc

SEQ ID NO: 5535650 - DNA, 25 bp, Homo sapien
cttcctccttccaccgtgaccccaa

SEQ ID NO: 5535651 - DNA, 25 bp, Homo sapien
ctccttccaccgtgaccccaacctc

SEQ ID NO: 5535652 - DNA, 25 bp, Homo sapien
tgaccccaacctctcctgtcccctc

SEQ ID NO: 5535653 - DNA, 25 bp, Homo sapien
ccgtgaccccaacctctcctgtccc

SEQ ID NO: 5535654 - DNA, 25 bp, Homo sapien
ggctgtagtgggctctcttcctcct

SEQ ID NO: 5535655 - DNA, 25 bp, Homo sapien
acaaagtatcgagtttgggagaatc

SEQ ID NO: 5535656 - DNA, 25 bp, Homo sapien
gtagaataatgtacagcatgagcca

SEQ ID NO: 5535657 - DNA, 25 bp, Homo sapien
gtttgggagaatccacatcagtgac

SEQ ID NO: 5535658 - DNA, 25 bp, Homo sapien
agaaagacctggaaatagccctgaa

SEQ ID NO: 5535659 - DNA, 25 bp, Homo sapien
aaacataaaagactgtgtaagttcc

SEQ ID NO: 5535660 - DNA, 25 bp, Homo sapien
gtgacattgagggctataaaaaaac

SEQ ID NO: 5535661 - DNA, 25 bp, Homo sapien
gccaaagatgactgccacgcaccaa

SEQ ID NO: 5535662 - DNA, 25 bp, Homo sapien
aggcacggtgtgtcacagatgtgct

SEQ ID NO: 5535663 - DNA, 25 bp, Homo sapien
gagaagtaagtggtaacatagtgtt

SEQ ID NO: 5535664 - DNA, 25 bp, Homo sapien
gaatgcattcactgttggtgggttt

SEQ ID NO: 5535665 - DNA, 25 bp, Homo sapien
gtttaaaggtagagattctggaatc

SEQ ID NO: 5535666 - DNA, 25 bp, Homo sapien
gatagatacaaggcgtgtaaggata

SEQ ID NO: 5535667 - DNA, 25 bp, Homo sapien
atatttaggggaaaatctacacagt

SEQ ID NO: 5535668 - DNA, 25 bp, Homo sapien
gcttaaggtgctgaaatactgaggt

SEQ ID NO: 5535669 - DNA, 25 bp, Homo sapien
agctaagaaagccatatttagggga

SEQ ID NO: 5535670 - DNA, 25 bp, Homo sapien
tactgaggtactagtcaggaacctt

SEQ ID NO: 5535671 - DNA, 25 bp, Homo sapien
ataaagataaataaatgcccatcac

SEQ ID NO: 5535672 - DNA, 25 bp, Homo sapien
gttgactagttgtgtcagaccctac

SEQ ID NO: 5535673 - DNA, 25 bp, Homo sapien
actggctaattcacaggaagacttt

SEQ ID NO: 5535674 - DNA, 25 bp, Homo sapien
ccaaatctatgccaaggttcctgct

SEQ ID NO: 5535675 - DNA, 25 bp, Homo sapien
tgtttggaaagctgattaaggcatt

SEQ ID NO: 5535676 - DNA, 25 bp, Homo sapien
ctggccaaaagatataggtgtcttg

SEQ ID NO: 5535677 - DNA, 25 bp, Homo sapien
tagacattatacagagaagcaaaac

SEQ ID NO: 5535678 - DNA, 25 bp, Homo sapien
agacaaacaaaatagtatcacagtg

SEQ ID NO: 5535679 - DNA, 25 bp, Homo sapien
ggtgtcatacaaagattgctctcta

SEQ ID NO: 5535680 - DNA, 25 bp, Homo sapien
ttgggcatacatattcccgaagttt

SEQ ID NO: 5535681 - DNA, 25 bp, Homo sapien
atcttggggcttaaattcattggac

SEQ ID NO: 5535682 - DNA, 25 bp, Homo sapien
tattccagttaggaatgggcgcact

SEQ ID NO: 5535683 - DNA, 25 bp, Homo sapien
aatgtatttagctgtatcttggggc

SEQ ID NO: 5535684 - DNA, 25 bp, Homo sapien
tctggaaattgcatcacaatgctat

SEQ ID NO: 5535685 - DNA, 25 bp, Homo sapien
atcgtacccatgtccagagctttct

SEQ ID NO: 5535686 - DNA, 25 bp, Homo sapien
cacaatacacggagacacaagttta

SEQ ID NO: 5535687 - DNA, 25 bp, Homo sapien
agagaagcaaaacacatcgtaccca

SEQ ID NO: 5535688 - DNA, 25 bp, Homo sapien
cccgaaagcggactaaacctgatat

SEQ ID NO: 5535689 - DNA, 25 bp, Homo sapien
agagaacatgcacagtcataccgcc

SEQ ID NO: 5535690 - DNA, 25 bp, Homo sapien
ggcagctggactaagatctggaatg

SEQ ID NO: 5535691 - DNA, 25 bp, Homo sapien
tataataatggggctgttaaccagt

SEQ ID NO: 5535692 - DNA, 25 bp, Homo sapien
cctttaaaaggcatcaggctgaaca

SEQ ID NO: 5535693 - DNA, 25 bp, Homo sapien
aataacactatgaggacagtggcac

SEQ ID NO: 5535694 - DNA, 25 bp, Homo sapien
ggaaaagcttgtcggatgaacatct

SEQ ID NO: 5535695 - DNA, 25 bp, Homo sapien
tagaatgcatgtggcttgagagaaa

SEQ ID NO: 5535696 - DNA, 25 bp, Homo sapien
aaatgatcaagacagtacaagtttc

SEQ ID NO: 5535697 - DNA, 25 bp, Homo sapien
gcatgcagatattcccgaaagcgga

SEQ ID NO: 5535698 - DNA, 25 bp, Homo sapien
tcttactggaagggcctgaaaattc

SEQ ID NO: 5535699 - DNA, 25 bp, Homo sapien
tctaatggtactctggattcagggc

SEQ ID NO: 5535700 - DNA, 25 bp, Homo sapien
caggtgtggtccggtttacttaatc

SEQ ID NO: 5535701 - DNA, 25 bp, Homo sapien
tacagcaaattaaaggacccagaaa

SEQ ID NO: 5535702 - DNA, 25 bp, Homo sapien
acaacttattagaagggactagagt

SEQ ID NO: 5535703 - DNA, 25 bp, Homo sapien
tggatggggcctatagctatactta

SEQ ID NO: 5535704 - DNA, 25 bp, Homo sapien
gaggtggattggaactaatgccatg

SEQ ID NO: 5535705 - DNA, 25 bp, Homo sapien
gatggtatgacaaggcaacactgta

SEQ ID NO: 5535706 - DNA, 25 bp, Homo sapien
atcctgtaccaaatggggaagaatt

SEQ ID NO: 5535707 - DNA, 25 bp, Homo sapien
agtgacctgggtacaccaatcggaa

SEQ ID NO: 5535708 - DNA, 25 bp, Homo sapien
cagaaagctggatccaatagtgacc

SEQ ID NO: 5535709 - DNA, 25 bp, Homo sapien
acttaatcaggacatgggcctaaga

SEQ ID NO: 5535710 - DNA, 25 bp, Homo sapien
gcatctactaaggagccagagtgtg

SEQ ID NO: 5535711 - DNA, 25 bp, Homo sapien
gccagagtgtgcgcatttcagagca

SEQ ID NO: 5535712 - DNA, 25 bp, Homo sapien
cctgcgctacctggaccggtacagg

SEQ ID NO: 5535713 - DNA, 25 bp, Homo sapien
catttcagagcatgggattgatcgg

SEQ ID NO: 5535714 - DNA, 25 bp, Homo sapien
cacagctccagaggcccacactgtg

SEQ ID NO: 5535715 - DNA, 25 bp, Homo sapien
gcaagagtaaagacacagctccaga

SEQ ID NO: 5535716 - DNA, 25 bp, Homo sapien
cagtcatgagcccacctatggcatc

SEQ ID NO: 5535717 - DNA, 25 bp, Homo sapien
gtgtgcgcatttcagagcatgggat

SEQ ID NO: 5535718 - DNA, 25 bp, Homo sapien
agggacagtcatgagcccacctatg

SEQ ID NO: 5535719 - DNA, 25 bp, Homo sapien
cagaggcccacactgtggggtctgg

SEQ ID NO: 5535720 - DNA, 25 bp, Homo sapien
cacctatggcatctactaaggagcc

SEQ ID NO: 5535721 - DNA, 25 bp, Homo sapien
tataggagtcagttagaattgtttc

SEQ ID NO: 5535722 - DNA, 25 bp, Homo sapien
tggctgcatataggagtcagttaga

SEQ ID NO: 5535723 - DNA, 25 bp, Homo sapien
gctctgcaccatcctcgctgtttcc

SEQ ID NO: 5535724 - DNA, 25 bp, Homo sapien
gatgggccactggagtctcaataaa

SEQ ID NO: 5535725 - DNA, 25 bp, Homo sapien
cagtggccgccccccacgttgttga

SEQ ID NO: 5535726 - DNA, 25 bp, Homo sapien
cgccccccacgttgttgaatgtcca

SEQ ID NO: 5535727 - DNA, 25 bp, Homo sapien
tggagtctcaataaagctctgcacc

SEQ ID NO: 5535728 - DNA, 25 bp, Homo sapien
atttaaatgccacaggaaacaaact

SEQ ID NO: 5535729 - DNA, 25 bp, Homo sapien
tccagaaattgctaagaacagtgcc

SEQ ID NO: 5535730 - DNA, 25 bp, Homo sapien
gtgtatgtgtggaaaatggtgttca

SEQ ID NO: 5535731 - DNA, 25 bp, Homo sapien
aggcatgattccaactggctgcata

SEQ ID NO: 5535732 - DNA, 25 bp, Homo sapien
atataataaggatataaggaaaata

SEQ ID NO: 5535733 - DNA, 25 bp, Homo sapien
acactgagcagtattgacgcaaatt

SEQ ID NO: 5535734 - DNA, 25 bp, Homo sapien
agctacgttattactagaagagtcc

SEQ ID NO: 5535735 - DNA, 25 bp, Homo sapien
tcctgtcacctgctagggatgtctt

SEQ ID NO: 5535736 - DNA, 25 bp, Homo sapien
ggcctaggctagtgtgtttgtcttg

SEQ ID NO: 5535737 - DNA, 25 bp, Homo sapien
cctgaccctgcataggcctaggcta

SEQ ID NO: 5535738 - DNA, 25 bp, Homo sapien
atatgatggtggccccacagattat

SEQ ID NO: 5535739 - DNA, 25 bp, Homo sapien
tttaaatatggcacactgagcagta

SEQ ID NO: 5535740 - DNA, 25 bp, Homo sapien
tgtaaccatgtttcggtcaatgtac

SEQ ID NO: 5535741 - DNA, 25 bp, Homo sapien
atggagttgaaaaattcctgtcacc

SEQ ID NO: 5535742 - DNA, 25 bp, Homo sapien
gctagggatgtcttgatcctgaccc

SEQ ID NO: 5535743 - DNA, 25 bp, Homo sapien
ttttggtgcacctgtcatgtgagca

SEQ ID NO: 5535744 - DNA, 25 bp, Homo sapien
aagttcatatagaatcagctgagct

SEQ ID NO: 5535745 - DNA, 25 bp, Homo sapien
gtacataggaaggtattacttgttc

SEQ ID NO: 5535746 - DNA, 25 bp, Homo sapien
gtcatgtgagcagtatgaactctac

SEQ ID NO: 5535747 - DNA, 25 bp, Homo sapien
tcagagttttgagtgtgtgaattac

SEQ ID NO: 5535748 - DNA, 25 bp, Homo sapien
cataggcagaattgagttatgggga

SEQ ID NO: 5535749 - DNA, 25 bp, Homo sapien
aagttctactgggtagtgatgttgt

SEQ ID NO: 5535750 - DNA, 25 bp, Homo sapien
cagctgagctttcagaaatggtgaa

SEQ ID NO: 5535751 - DNA, 25 bp, Homo sapien
ggagagcggcctagtaataattggt

SEQ ID NO: 5535752 - DNA, 25 bp, Homo sapien
aaagggtggtaatagtcataactta

SEQ ID NO: 5535753 - DNA, 25 bp, Homo sapien
actccaagtgagtccataggcagaa

SEQ ID NO: 5535754 - DNA, 25 bp, Homo sapien
tttatagcatagtggtcaggagtta

SEQ ID NO: 5535755 - DNA, 25 bp, Homo sapien
agtatagatgctgtcactgtgagag

SEQ ID NO: 5535756 - DNA, 25 bp, Homo sapien
gaaaattagtttgacatgtggtgac

SEQ ID NO: 5535757 - DNA, 25 bp, Homo sapien
gtttagcacagtggctagcaatagc

SEQ ID NO: 5535758 - DNA, 25 bp, Homo sapien
gtggtcaggagttaaacctacattc

SEQ ID NO: 5535759 - DNA, 25 bp, Homo sapien
tctaccaaggaagatctagtttaaa

SEQ ID NO: 5535760 - DNA, 25 bp, Homo sapien
aaacctagtaggggacatgtcccaa

SEQ ID NO: 5535761 - DNA, 25 bp, Homo sapien
agattctattattcaggcaggcttt

SEQ ID NO: 5535762 - DNA, 25 bp, Homo sapien
gcagggaaaatagaagttctatagc

SEQ ID NO: 5535763 - DNA, 25 bp, Homo sapien
cactgtgagagactacagaaagcag

SEQ ID NO: 5535764 - DNA, 25 bp, Homo sapien
cattttctaggtagtggctttgggc

SEQ ID NO: 5535765 - DNA, 25 bp, Homo sapien
ccaatggctcaccaggctggtggct

SEQ ID NO: 5535766 - DNA, 25 bp, Homo sapien
attttatttggggaattaattagca

SEQ ID NO: 5535767 - DNA, 25 bp, Homo sapien
gtggctttctcgtccccaaatggga

SEQ ID NO: 5535768 - DNA, 25 bp, Homo sapien
aggaagttaaggcatctgttcatgt

SEQ ID NO: 5535769 - DNA, 25 bp, Homo sapien
gctcaccaggctggtggctccagga

SEQ ID NO: 5535770 - DNA, 25 bp, Homo sapien
tccaggaagttaaggcatctgttca

SEQ ID NO: 5535771 - DNA, 25 bp, Homo sapien
atggctcaccaggctggtggctcca

SEQ ID NO: 5535772 - DNA, 25 bp, Homo sapien
catctgttcatgtgtcaggggaagg

SEQ ID NO: 5535773 - DNA, 25 bp, Homo sapien
aatggttttgtggctttctcgtccc

SEQ ID NO: 5535774 - DNA, 25 bp, Homo sapien
gctccaggaagttaaggcatctgtt

SEQ ID NO: 5535775 - DNA, 25 bp, Homo sapien
tgccaccctgccgcaggccgtacca

SEQ ID NO: 5535776 - DNA, 25 bp, Homo sapien
ctggggtcgttctggctttttgtta

SEQ ID NO: 5535777 - DNA, 25 bp, Homo sapien
gaaaccatctggcccaactagcctc

SEQ ID NO: 5535778 - DNA, 25 bp, Homo sapien
gagcgagaggaatgtccatttctta

SEQ ID NO: 5535779 - DNA, 25 bp, Homo sapien
gaggcagagacactcgcttaagatc

SEQ ID NO: 5535780 - DNA, 25 bp, Homo sapien
gatcacaggcttagtgtgaggacga

SEQ ID NO: 5535781 - DNA, 25 bp, Homo sapien
cagggtctgtccaccatagaatgtc

SEQ ID NO: 5535782 - DNA, 25 bp, Homo sapien
tgttagaaacttggtctgagatgtt

SEQ ID NO: 5535783 - DNA, 25 bp, Homo sapien
ccaactagcctcaactgacagctga

SEQ ID NO: 5535784 - DNA, 25 bp, Homo sapien
gaggacgagcttgaaatcccagtct

SEQ ID NO: 5535785 - DNA, 25 bp, Homo sapien
actagcctttaacctgtgggagcgg

SEQ ID NO: 5535786 - DNA, 25 bp, Homo sapien
atgtcttcctctactggggtcgttc

SEQ ID NO: 5535787 - DNA, 25 bp, Homo sapien
gagcttaatatagttggggaggcaa

SEQ ID NO: 5535788 - DNA, 25 bp, Homo sapien
aaggaggctggattctgatctatga

SEQ ID NO: 5535789 - DNA, 25 bp, Homo sapien
ggtcagcactgacaatggcctcata

SEQ ID NO: 5535790 - DNA, 25 bp, Homo sapien
ctggcagtgtaatgttgagcaagtt

SEQ ID NO: 5535791 - DNA, 25 bp, Homo sapien
ttagaatgaagagattcgggtgtta

SEQ ID NO: 5535792 - DNA, 25 bp, Homo sapien
ccgtgtgggatcatttagaagctac

SEQ ID NO: 5535793 - DNA, 25 bp, Homo sapien
aagaaatgagatgattggttcaact

SEQ ID NO: 5535794 - DNA, 25 bp, Homo sapien
gctgtgagttcagaaaagatgtttc

SEQ ID NO: 5535795 - DNA, 25 bp, Homo sapien
gttgagcaagttactacctaggcct

SEQ ID NO: 5535796 - DNA, 25 bp, Homo sapien
gggaggcaactataaagaaatgaga

SEQ ID NO: 5535797 - DNA, 25 bp, Homo sapien
gttaagaaatgtaaggcatgtgtcc

SEQ ID NO: 5535798 - DNA, 25 bp, Homo sapien
caaaacagtaaaatgcacctatggt

SEQ ID NO: 5535799 - DNA, 25 bp, Homo sapien
ccaaaaatgaaaatacaaaacagta

SEQ ID NO: 5535800 - DNA, 25 bp, Homo sapien
cagcacaacactcatcatactcatc

SEQ ID NO: 5535801 - DNA, 25 bp, Homo sapien
gcaaaagcaaacagcacaacactca

SEQ ID NO: 5535802 - DNA, 25 bp, Homo sapien
aacaagcatgctagcctataatgaa

SEQ ID NO: 5535803 - DNA, 25 bp, Homo sapien
tattatactgcaaaagcaaacagca

SEQ ID NO: 5535804 - DNA, 25 bp, Homo sapien
tgaaggaatgaaagtcagattaaaa

SEQ ID NO: 5535805 - DNA, 25 bp, Homo sapien
gaatactgaaggaatgaaagtcaga

SEQ ID NO: 5535806 - DNA, 25 bp, Homo sapien
atgacagtctttaaaacaagcatgc

SEQ ID NO: 5535807 - DNA, 25 bp, Homo sapien
atctgctgtgtatactacctccaaa

SEQ ID NO: 5535808 - DNA, 25 bp, Homo sapien
ttaatacactagaatgacagtcttt

SEQ ID NO: 5535809 - DNA, 25 bp, Homo sapien
aaaaaaagaccatgaaatcgcagac

SEQ ID NO: 5535810 - DNA, 25 bp, Homo sapien
agaagaatttaccatgacagtttag

SEQ ID NO: 5535811 - DNA, 25 bp, Homo sapien
gagccccagtagatcttgttccttc

SEQ ID NO: 5535812 - DNA, 25 bp, Homo sapien
ggtgagaaaggagttcttcaagaag

SEQ ID NO: 5535813 - DNA, 25 bp, Homo sapien
gacagtttaggtcaagaaaggcaga

SEQ ID NO: 5535814 - DNA, 25 bp, Homo sapien
tcaagaagaattttaaggagcccca

SEQ ID NO: 5535815 - DNA, 25 bp, Homo sapien
gcagacttgtcatggcttgtggcga

SEQ ID NO: 5535816 - DNA, 25 bp, Homo sapien
tgccctttgagttgcttgtgctgtt

SEQ ID NO: 5535817 - DNA, 25 bp, Homo sapien
ctactccaaggtgagaaaggagttc

SEQ ID NO: 5535818 - DNA, 25 bp, Homo sapien
taagacctatagattgtgggcattc

SEQ ID NO: 5535819 - DNA, 25 bp, Homo sapien
attttgagtcataatcagaaagtct

SEQ ID NO: 5535820 - DNA, 25 bp, Homo sapien
gtagaaacggatgcacagaatatcc

SEQ ID NO: 5535821 - DNA, 25 bp, Homo sapien
aggccgatttagaggatccgtagaa

SEQ ID NO: 5535822 - DNA, 25 bp, Homo sapien
agtcttctctatgtagcaggccctc

SEQ ID NO: 5535823 - DNA, 25 bp, Homo sapien
cagtatggagcagacagtcctcttg

SEQ ID NO: 5535824 - DNA, 25 bp, Homo sapien
taataaacatgctaacagtaagaac

SEQ ID NO: 5535825 - DNA, 25 bp, Homo sapien
cctggctgaaaacaaaggccgattt

SEQ ID NO: 5535826 - DNA, 25 bp, Homo sapien
agagagccctgataaagtaataaac

SEQ ID NO: 5535827 - DNA, 25 bp, Homo sapien
gggcagtttgcggtaactactccca

SEQ ID NO: 5535828 - DNA, 25 bp, Homo sapien
aggacacagctgggcactaaatcct

SEQ ID NO: 5535829 - DNA, 25 bp, Homo sapien
gtcctcttgcaaaacccgatttagc

SEQ ID NO: 5535830 - DNA, 25 bp, Homo sapien
gcaggccctccatatacgcgggttc

SEQ ID NO: 5535831 - DNA, 25 bp, Homo sapien
cccacccggtcaacacacctcgcat

SEQ ID NO: 5535832 - DNA, 25 bp, Homo sapien
cacctcgcataaatgcagacatgcc

SEQ ID NO: 5535833 - DNA, 25 bp, Homo sapien
aaaggctgtctcagtgaaatacatt

SEQ ID NO: 5535834 - DNA, 25 bp, Homo sapien
aaatgtagacatgtaagacacaggg

SEQ ID NO: 5535835 - DNA, 25 bp, Homo sapien
tgctgtatgtacaaaaggctgtctc

SEQ ID NO: 5535836 - DNA, 25 bp, Homo sapien
ggcgaatctcagtcctagctccctc

SEQ ID NO: 5535837 - DNA, 25 bp, Homo sapien
ttttgatgtggttggttttgctctt

SEQ ID NO: 5535838 - DNA, 25 bp, Homo sapien
tttcactactgggaggtaggtaatc

SEQ ID NO: 5535839 - DNA, 25 bp, Homo sapien
attttacacaggcgaatctcagtcc

SEQ ID NO: 5535840 - DNA, 25 bp, Homo sapien
ctgggaggtaggtaatctcagtata

SEQ ID NO: 5535841 - DNA, 25 bp, Homo sapien
ttgaaatctgtaaacagcaccctgc

SEQ ID NO: 5535842 - DNA, 25 bp, Homo sapien
ttagctctttggtaccaggggcaag

SEQ ID NO: 5535843 - DNA, 25 bp, Homo sapien
agaaattcttgtctgtggggctgac

SEQ ID NO: 5535844 - DNA, 25 bp, Homo sapien
gatggattccatggcccagactgag

SEQ ID NO: 5535845 - DNA, 25 bp, Homo sapien
cccagactgagtaatgtcggggcaa

SEQ ID NO: 5535846 - DNA, 25 bp, Homo sapien
acattgagcaactaacccgcatttc

SEQ ID NO: 5535847 - DNA, 25 bp, Homo sapien
ccagggaaagtgacccacatctgtc

SEQ ID NO: 5535848 - DNA, 25 bp, Homo sapien
ccaggcccctgaagcctggaagggg

SEQ ID NO: 5535849 - DNA, 25 bp, Homo sapien
gtcagtagcatagggtgttgctgtg

SEQ ID NO: 5535850 - DNA, 25 bp, Homo sapien
gttgctgtgtttattggatggattc

SEQ ID NO: 5535851 - DNA, 25 bp, Homo sapien
ccgtgggactttgcatacattgagc

SEQ ID NO: 5535852 - DNA, 25 bp, Homo sapien
gaacaacaggacaagtgctctagaa

SEQ ID NO: 5535853 - DNA, 25 bp, Homo sapien
gacgcctgttattgtaggacgtgtc

SEQ ID NO: 5535854 - DNA, 25 bp, Homo sapien
caatgctatgtgaaatcagccaaga

SEQ ID NO: 5535855 - DNA, 25 bp, Homo sapien
acagaaaggaagccatgaatactgg

SEQ ID NO: 5535856 - DNA, 25 bp, Homo sapien
ggaaaacagtagatggatccagtga

SEQ ID NO: 5535857 - DNA, 25 bp, Homo sapien
cacattctgactccatctgcggcct

SEQ ID NO: 5535858 - DNA, 25 bp, Homo sapien
acctttggcggtgacattattttct

SEQ ID NO: 5535859 - DNA, 25 bp, Homo sapien
acattgccaggctaaaatcaggaag

SEQ ID NO: 5535860 - DNA, 25 bp, Homo sapien
ttaaggacacttacattgccaggct

SEQ ID NO: 5535861 - DNA, 25 bp, Homo sapien
gccaagagaaagcagatcccttctc

SEQ ID NO: 5535862 - DNA, 25 bp, Homo sapien
gcaattaccgtagcagaagtctgtc

SEQ ID NO: 5535863 - DNA, 25 bp, Homo sapien
aaacagatcctacaaaacgtgactc

SEQ ID NO: 5535864 - DNA, 25 bp, Homo sapien
tgcactaaagaaaggcagatgcaga

SEQ ID NO: 5535865 - DNA, 25 bp, Homo sapien
gcatttgtgcctatagtaaaacctc

SEQ ID NO: 5535866 - DNA, 25 bp, Homo sapien
accctgcactaaagaaaggcagatg

SEQ ID NO: 5535867 - DNA, 25 bp, Homo sapien
tcacaatcatgagcagcattatcta

SEQ ID NO: 5535868 - DNA, 25 bp, Homo sapien
acagtgggactgacactaccctgca

SEQ ID NO: 5535869 - DNA, 25 bp, Homo sapien
tgtgacttggttaacgcagaatgca

SEQ ID NO: 5535870 - DNA, 25 bp, Homo sapien
acagacaagttgtttaagtacacta

SEQ ID NO: 5535871 - DNA, 25 bp, Homo sapien
tcctcaggctcacagttaacaaccc

SEQ ID NO: 5535872 - DNA, 25 bp, Homo sapien
gcagcattatctaacctaagggaaa

SEQ ID NO: 5535873 - DNA, 25 bp, Homo sapien
ggttaacgcagaatgcaaactttgg

SEQ ID NO: 5535874 - DNA, 25 bp, Homo sapien
taattgtgacttggttaacgcagaa

SEQ ID NO: 5535875 - DNA, 25 bp, Homo sapien
tataggcaatcataggcaaatttat

SEQ ID NO: 5535876 - DNA, 25 bp, Homo sapien
tagggaaatggatatgctcagttta

SEQ ID NO: 5535877 - DNA, 25 bp, Homo sapien
aaaagttcgaaggcacaatgtttgc

SEQ ID NO: 5535878 - DNA, 25 bp, Homo sapien
ttattccagggctctgaaggcatct

SEQ ID NO: 5535879 - DNA, 25 bp, Homo sapien
atgtttgcaagaatgtagggaaatg

SEQ ID NO: 5535880 - DNA, 25 bp, Homo sapien
ctcattgacaggaagaccctccttc

SEQ ID NO: 5535881 - DNA, 25 bp, Homo sapien
aattcaagaggactgatgataactt

SEQ ID NO: 5535882 - DNA, 25 bp, Homo sapien
cccagctaggattattccagggctc

SEQ ID NO: 5535883 - DNA, 25 bp, Homo sapien
tcagaggccaaaaagttcgaaggca

SEQ ID NO: 5535884 - DNA, 25 bp, Homo sapien
ggccagagttgttttcatgtcccat

SEQ ID NO: 5535885 - DNA, 25 bp, Homo sapien
tcacaccatgcaacagcccccagca

SEQ ID NO: 5535886 - DNA, 25 bp, Homo sapien
tggggacgaggaattcgaaattcca

SEQ ID NO: 5535887 - DNA, 25 bp, Homo sapien
taccctttcaagccctcagcgatcc

SEQ ID NO: 5535888 - DNA, 25 bp, Homo sapien
tatatgaatatggctgaggcgaaca

SEQ ID NO: 5535889 - DNA, 25 bp, Homo sapien
cacacaccaagccttggggacgagg

SEQ ID NO: 5535890 - DNA, 25 bp, Homo sapien
gaaattccaccaatcacgcctcctc

SEQ ID NO: 5535891 - DNA, 25 bp, Homo sapien
gccggatgtactgctaccctttcaa

SEQ ID NO: 5535892 - DNA, 25 bp, Homo sapien
ccagggaagtgaattcacaccccag

SEQ ID NO: 5535893 - DNA, 25 bp, Homo sapien
gccctcagcgatccattgccttccc

SEQ ID NO: 5535894 - DNA, 25 bp, Homo sapien
cttcgctgccagtgagcagacattc

SEQ ID NO: 5535895 - DNA, 25 bp, Homo sapien
gctgaggcgaacaatgcgttcttcg

SEQ ID NO: 5535896 - DNA, 25 bp, Homo sapien
tgagcagacattccacacaccaagc

SEQ ID NO: 5535897 - DNA, 25 bp, Homo sapien
aaaggttatgaaacatatcatggta

SEQ ID NO: 5535898 - DNA, 25 bp, Homo sapien
atctacacatacagaaagaagcagt

SEQ ID NO: 5535899 - DNA, 25 bp, Homo sapien
tggaataaacagtgagcatatctgg

SEQ ID NO: 5535900 - DNA, 25 bp, Homo sapien
aacttccaaagcttcgtcttgtgtt

SEQ ID NO: 5535901 - DNA, 25 bp, Homo sapien
acatacagaaagaagcagttctcac

SEQ ID NO: 5535902 - DNA, 25 bp, Homo sapien
tgacctagaccagtttgcatgattc

SEQ ID NO: 5535903 - DNA, 25 bp, Homo sapien
atggtaatgacagatgcaagttatt

SEQ ID NO: 5535904 - DNA, 25 bp, Homo sapien
tgatttggttgcactttagacattt

SEQ ID NO: 5535905 - DNA, 25 bp, Homo sapien
tttaggtttttggctgagtactgga

SEQ ID NO: 5535906 - DNA, 25 bp, Homo sapien
ggggctgacctagaccagtttgcat

SEQ ID NO: 5535907 - DNA, 25 bp, Homo sapien
ttaagctccatgtgcatataaaggt

SEQ ID NO: 5535908 - DNA, 25 bp, Homo sapien
gcagtgacagagatttgctacatcc

SEQ ID NO: 5535909 - DNA, 25 bp, Homo sapien
gcaaatctagaagtaccagaatgtc

SEQ ID NO: 5535910 - DNA, 25 bp, Homo sapien
tcaaagttctcaagcagtgacagag

SEQ ID NO: 5535911 - DNA, 25 bp, Homo sapien
agtaaaaaatatgtcgtaaagtgct

SEQ ID NO: 5535912 - DNA, 25 bp, Homo sapien
ataacagaatagacatggagcagat

SEQ ID NO: 5535913 - DNA, 25 bp, Homo sapien
ttcaagcttgtgtgtacctgtaacc

SEQ ID NO: 5535914 - DNA, 25 bp, Homo sapien
aagtctgcaaaactgccacaagctc

SEQ ID NO: 5535915 - DNA, 25 bp, Homo sapien
tattgacatactgaaattggcatac

SEQ ID NO: 5535916 - DNA, 25 bp, Homo sapien
tctatggctgataagatgctctaca

SEQ ID NO: 5535917 - DNA, 25 bp, Homo sapien
tggagcagatccctcagaaatcagt

SEQ ID NO: 5535918 - DNA, 25 bp, Homo sapien
gtaaagtgctgaagtcatgtaagtc

SEQ ID NO: 5535919 - DNA, 25 bp, Homo sapien
gcggatcgtttcgcaactgcttgcc

SEQ ID NO: 5535920 - DNA, 25 bp, Homo sapien
catttcccggccccctcttcttgag

SEQ ID NO: 5535921 - DNA, 25 bp, Homo sapien
cctgctccagtgcggatcgtttcgc

SEQ ID NO: 5535922 - DNA, 25 bp, Homo sapien
cgtctgctcgcttctggtccgtcgc

SEQ ID NO: 5535923 - DNA, 25 bp, Homo sapien
ttcttgagtactttaccccctgcat

SEQ ID NO: 5535924 - DNA, 25 bp, Homo sapien
agccgcgcgtctgctcgcttctggt

SEQ ID NO: 5535925 - DNA, 25 bp, Homo sapien
aactgcttgccactcgtcccgtgcc

SEQ ID NO: 5535926 - DNA, 25 bp, Homo sapien
tcgcttctggtccgtcgcgctccca

SEQ ID NO: 5535927 - DNA, 25 bp, Homo sapien
ttgccactcgtcccgtgcctggctg

SEQ ID NO: 5535928 - DNA, 25 bp, Homo sapien
ccagtgcggatcgtttcgcaactgc

SEQ ID NO: 5535929 - DNA, 25 bp, Homo sapien
cctcctgctccagtgcggatcgttt

SEQ ID NO: 5535930 - DNA, 25 bp, Homo sapien
cacccataagcatggtgagctcctg

SEQ ID NO: 5535931 - DNA, 25 bp, Homo sapien
atctgacagcgtagataaaagagga

SEQ ID NO: 5535932 - DNA, 25 bp, Homo sapien
aatgagcttgggtttaaaaagtgct

SEQ ID NO: 5535933 - DNA, 25 bp, Homo sapien
ttaaaagcagtaagcagttttcatc

SEQ ID NO: 5535934 - DNA, 25 bp, Homo sapien
tctgcagtcattcaggaggtcctgt

SEQ ID NO: 5535935 - DNA, 25 bp, Homo sapien
gctctcataaggtcagccaaagccc

SEQ ID NO: 5535936 - DNA, 25 bp, Homo sapien
gctcactgagaacccagctttgaac

SEQ ID NO: 5535937 - DNA, 25 bp, Homo sapien
gaagtgtggtgatgcatctaacacc

SEQ ID NO: 5535938 - DNA, 25 bp, Homo sapien
tcagccaaagccccttaagaaggta

SEQ ID NO: 5535939 - DNA, 25 bp, Homo sapien
ttgaatgctagagcatctcccaggt

SEQ ID NO: 5535940 - DNA, 25 bp, Homo sapien
attcaggaggtcctgtgaagtgtgg

SEQ ID NO: 5535941 - DNA, 25 bp, Homo sapien
taggtcgcaaccttcagaaccccag

SEQ ID NO: 5535942 - DNA, 25 bp, Homo sapien
aggatgtggaccctctggccaattt

SEQ ID NO: 5535943 - DNA, 25 bp, Homo sapien
ccccaggaagatcagctttaggaac

SEQ ID NO: 5535944 - DNA, 25 bp, Homo sapien
gggcagtggttcctagaatttggtc

SEQ ID NO: 5535945 - DNA, 25 bp, Homo sapien
gccaatttccaggccacggtgaggc

SEQ ID NO: 5535946 - DNA, 25 bp, Homo sapien
ggacgtcacaatggcaaagagccta

SEQ ID NO: 5535947 - DNA, 25 bp, Homo sapien
tttgatctctgcagcactggcggtg

SEQ ID NO: 5535948 - DNA, 25 bp, Homo sapien
cagccctaggcctcagggcatcacc

SEQ ID NO: 5535949 - DNA, 25 bp, Homo sapien
aggtgaaaagggcagttcccatcat

SEQ ID NO: 5535950 - DNA, 25 bp, Homo sapien
ctttaggaactccctggcaggtgaa

SEQ ID NO: 5535951 - DNA, 25 bp, Homo sapien
gagctgggcatgtccaaagaagctc

SEQ ID NO: 5535952 - DNA, 25 bp, Homo sapien
ttcaagtacaccatctcaagctcat

SEQ ID NO: 5535953 - DNA, 25 bp, Homo sapien
acaaaacttaagatttcccagcctg

SEQ ID NO: 5535954 - DNA, 25 bp, Homo sapien
tgaacaaattagcagtatattaccc

SEQ ID NO: 5535955 - DNA, 25 bp, Homo sapien
cctctggctcagatatgaacttgct

SEQ ID NO: 5535956 - DNA, 25 bp, Homo sapien
ttagtacagggcattttattccgac

SEQ ID NO: 5535957 - DNA, 25 bp, Homo sapien
aacctgatcttgaaacggtcctttc

SEQ ID NO: 5535958 - DNA, 25 bp, Homo sapien
ctcatggctttatctagtgtccttc

SEQ ID NO: 5535959 - DNA, 25 bp, Homo sapien
agttgcacagatttagggatgagaa

SEQ ID NO: 5535960 - DNA, 25 bp, Homo sapien
cagagagttcaaggatttgtcttaa

SEQ ID NO: 5535961 - DNA, 25 bp, Homo sapien
aagaaataaataatgagtgtgttat

SEQ ID NO: 5535962 - DNA, 25 bp, Homo sapien
aactccctgtgaggtgagttgcaca

SEQ ID NO: 5535963 - DNA, 25 bp, Homo sapien
taatcctgttccagggcagtcacta

SEQ ID NO: 5535964 - DNA, 25 bp, Homo sapien
accggtaggcctggcagtaattttc

SEQ ID NO: 5535965 - DNA, 25 bp, Homo sapien
ttggtgaatctggtttggattgccc

SEQ ID NO: 5535966 - DNA, 25 bp, Homo sapien
cctgagccaccgacatcccctctca

SEQ ID NO: 5535967 - DNA, 25 bp, Homo sapien
agtctgtgacgacggaacgtatttt

SEQ ID NO: 5535968 - DNA, 25 bp, Homo sapien
tctcctgagatataagggaagccca

SEQ ID NO: 5535969 - DNA, 25 bp, Homo sapien
tctttgtgtgaaaattaccagctta

SEQ ID NO: 5535970 - DNA, 25 bp, Homo sapien
gttagctaagtttaggagtagagtc

SEQ ID NO: 5535971 - DNA, 25 bp, Homo sapien
aacctgacacagcctcctttaatcc

SEQ ID NO: 5535972 - DNA, 25 bp, Homo sapien
ggcatttgcaagatagttagttagc

SEQ ID NO: 5535973 - DNA, 25 bp, Homo sapien
gatgctactggccagccaccggtag

SEQ ID NO: 5535974 - DNA, 25 bp, Homo sapien
taaaaaacgaatgatgaatggtgtc

SEQ ID NO: 5535975 - DNA, 25 bp, Homo sapien
tcctgtggataaaaggccaacctac

SEQ ID NO: 5535976 - DNA, 25 bp, Homo sapien
tcccgtttaatgagagccagtgagt

SEQ ID NO: 5535977 - DNA, 25 bp, Homo sapien
gggagcaacatgaatgatgccagga

SEQ ID NO: 5535978 - DNA, 25 bp, Homo sapien
cacggcacccagggaatctgcatta

SEQ ID NO: 5535979 - DNA, 25 bp, Homo sapien
ggcaaaagagcctcattagggagct

SEQ ID NO: 5535980 - DNA, 25 bp, Homo sapien
gcaaattaaattggacgctggggga

SEQ ID NO: 5535981 - DNA, 25 bp, Homo sapien
gtctatggctgctgtttggggattc

SEQ ID NO: 5535982 - DNA, 25 bp, Homo sapien
gtgtggtgagcaacagctcccctaa

SEQ ID NO: 5535983 - DNA, 25 bp, Homo sapien
acttactcaagtcctcggaggggca

SEQ ID NO: 5535984 - DNA, 25 bp, Homo sapien
taatcctctgggcaagaatggttct

SEQ ID NO: 5535985 - DNA, 25 bp, Homo sapien
ttatgtgccccatagccaagagagg

SEQ ID NO: 5535986 - DNA, 25 bp, Homo sapien
tgagataatcaagcggtttttgtca

SEQ ID NO: 5535987 - DNA, 25 bp, Homo sapien
tcaggtcaacagctttagcccattc

SEQ ID NO: 5535988 - DNA, 25 bp, Homo sapien
caaggaggatatcatcaaatctgac

SEQ ID NO: 5535989 - DNA, 25 bp, Homo sapien
atctggaaagcctttgaaactgttc

SEQ ID NO: 5535990 - DNA, 25 bp, Homo sapien
gaggtggtttatgtgccccatagcc

SEQ ID NO: 5535991 - DNA, 25 bp, Homo sapien
tgtgcaccaaggaggatatcatcaa

SEQ ID NO: 5535992 - DNA, 25 bp, Homo sapien
cccattccacatgatattggctgtg

SEQ ID NO: 5535993 - DNA, 25 bp, Homo sapien
gtgtcctcttgaacccatatctatc

SEQ ID NO: 5535994 - DNA, 25 bp, Homo sapien
gcccacttgatcgtggtggagaagc

SEQ ID NO: 5535995 - DNA, 25 bp, Homo sapien
ctaagcacagtattcagctgtgtcc

SEQ ID NO: 5535996 - DNA, 25 bp, Homo sapien
tacaggcactactcaatgtggtccg

SEQ ID NO: 5535997 - DNA, 25 bp, Homo sapien
atgaccccacgagagaattattaac

SEQ ID NO: 5535998 - DNA, 25 bp, Homo sapien
tgagaccggcatggtgatttcttta

SEQ ID NO: 5535999 - DNA, 25 bp, Homo sapien
ggagggtataagagtcctttgcgaa

SEQ ID NO: 5536000 - DNA, 25 bp, Homo sapien
aggtgaagccttaggtaacaaagcc

SEQ ID NO: 5536001 - DNA, 25 bp, Homo sapien
aatgtggtccgcacaatgaccccac

SEQ ID NO: 5536002 - DNA, 25 bp, Homo sapien
ccagtaataaaatgagagcttagaa

SEQ ID NO: 5536003 - DNA, 25 bp, Homo sapien
agtcctttgcgaagagaaacatttc

SEQ ID NO: 5536004 - DNA, 25 bp, Homo sapien
tttttgtcggcaacacctacacaca

SEQ ID NO: 5536005 - DNA, 25 bp, Homo sapien
tatgtgtcacctcaagggaaagtta

SEQ ID NO: 5536006 - DNA, 25 bp, Homo sapien
taccgtgtagccagcactgttttac

SEQ ID NO: 5536007 - DNA, 25 bp, Homo sapien
tgcctagtatctgggaaacagggtg

SEQ ID NO: 5536008 - DNA, 25 bp, Homo sapien
agtcaagtgtattggtgaagaaacc

SEQ ID NO: 5536009 - DNA, 25 bp, Homo sapien
cagagctcaataaggtacaaaagga

SEQ ID NO: 5536010 - DNA, 25 bp, Homo sapien
cattgaaatttctggtgtgcgaggg

SEQ ID NO: 5536011 - DNA, 25 bp, Homo sapien
gaaaccaagtatgaaagcatcagac

SEQ ID NO: 5536012 - DNA, 25 bp, Homo sapien
acagcaaccagtactcaacaagcag

SEQ ID NO: 5536013 - DNA, 25 bp, Homo sapien
gtttggggagtattgatttgcagtt

SEQ ID NO: 5536014 - DNA, 25 bp, Homo sapien
aaacagggtggtgattttgctttat

SEQ ID NO: 5536015 - DNA, 25 bp, Homo sapien
tatgatccagttaatggtgagtcac

SEQ ID NO: 5536016 - DNA, 25 bp, Homo sapien
atattatgtacaacgctggcggaaa

SEQ ID NO: 5536017 - DNA, 25 bp, Homo sapien
tacaaaaggaagttacctctgtgac

SEQ ID NO: 5536018 - DNA, 25 bp, Homo sapien
aaatatgaaatatgtaaagtgtcac

SEQ ID NO: 5536019 - DNA, 25 bp, Homo sapien
aaacaactgtgtatacctccagact

SEQ ID NO: 5536020 - DNA, 25 bp, Homo sapien
tacttgaccaaatgcttaattacct

SEQ ID NO: 5536021 - DNA, 25 bp, Homo sapien
atttacaatagtatcacacttccta

SEQ ID NO: 5536022 - DNA, 25 bp, Homo sapien
acagtatataacattaagcacaatt

SEQ ID NO: 5536023 - DNA, 25 bp, Homo sapien
aaccagcctgcaaataataacagta

SEQ ID NO: 5536024 - DNA, 25 bp, Homo sapien
aagaattaaaaccagcctgcaaata

SEQ ID NO: 5536025 - DNA, 25 bp, Homo sapien
atacctccagactatatgaaaaata

SEQ ID NO: 5536026 - DNA, 25 bp, Homo sapien
ttacaatttgtacagaggaagggac

SEQ ID NO: 5536027 - DNA, 25 bp, Homo sapien
tgaaatatgtaaagtgtcacgtttt

SEQ ID NO: 5536028 - DNA, 25 bp, Homo sapien
gaggaagggacatacaatatctaat

SEQ ID NO: 5536029 - DNA, 25 bp, Homo sapien
agggcaaagtagtgagaatcatgcc

SEQ ID NO: 5536030 - DNA, 25 bp, Homo sapien
gcccaaatgttggctagatggaaca

SEQ ID NO: 5536031 - DNA, 25 bp, Homo sapien
cattcagctgatagtggcgttttcc

SEQ ID NO: 5536032 - DNA, 25 bp, Homo sapien
tgttatcagaagatacaaggggaag

SEQ ID NO: 5536033 - DNA, 25 bp, Homo sapien
tggacaaagtggaaatggccacatt

SEQ ID NO: 5536034 - DNA, 25 bp, Homo sapien
tgggcctccgaaagttgcataaacc

SEQ ID NO: 5536035 - DNA, 25 bp, Homo sapien
aataaacaatcaattcaggggcttc

SEQ ID NO: 5536036 - DNA, 25 bp, Homo sapien
agatggaacagaagtgactcaatct

SEQ ID NO: 5536037 - DNA, 25 bp, Homo sapien
gcataagattaaagggctctgctgg

SEQ ID NO: 5536038 - DNA, 25 bp, Homo sapien
caaatacaaaatcaggagtcacccc

SEQ ID NO: 5536039 - DNA, 25 bp, Homo sapien
gtcctccaagcgactacagggcaaa

SEQ ID NO: 5536040 - DNA, 25 bp, Homo sapien
tctgcgagccaaaagcctatttcct

SEQ ID NO: 5536041 - DNA, 25 bp, Homo sapien
gaaaccaagactgagggtgtatgca

SEQ ID NO: 5536042 - DNA, 25 bp, Homo sapien
agagctgggtttgcagccacacttt

SEQ ID NO: 5536043 - DNA, 25 bp, Homo sapien
gacaggcattgaaagtcacacaggc

SEQ ID NO: 5536044 - DNA, 25 bp, Homo sapien
agagattcagagcagattgacacct

SEQ ID NO: 5536045 - DNA, 25 bp, Homo sapien
accaccccacgaggtgcgcatattc

SEQ ID NO: 5536046 - DNA, 25 bp, Homo sapien
tccatcactgacacaaagaggaggg

SEQ ID NO: 5536047 - DNA, 25 bp, Homo sapien
aacttgcccactgtggagtgaggtt

SEQ ID NO: 5536048 - DNA, 25 bp, Homo sapien
ttcccagccaaatcggacaggcatt

SEQ ID NO: 5536049 - DNA, 25 bp, Homo sapien
ggctgctgacaccctccaagagact

SEQ ID NO: 5536050 - DNA, 25 bp, Homo sapien
aacagtatgtagccctggggatcta

SEQ ID NO: 5536051 - DNA, 25 bp, Homo sapien
aggggcacaaaacagccttcaggtt

SEQ ID NO: 5536052 - DNA, 25 bp, Homo sapien
tatgaagctgtatcatcagtttaac

SEQ ID NO: 5536053 - DNA, 25 bp, Homo sapien
acaggcatggactaaaaaatacaga

SEQ ID NO: 5536054 - DNA, 25 bp, Homo sapien
attgacaatccattagctgacctaa

SEQ ID NO: 5536055 - DNA, 25 bp, Homo sapien
taatgttaaggcaatgacaaataac

SEQ ID NO: 5536056 - DNA, 25 bp, Homo sapien
ggggagtcattggtagatagtcttt

SEQ ID NO: 5536057 - DNA, 25 bp, Homo sapien
ataacctggtaagtattctaaacaa

SEQ ID NO: 5536058 - DNA, 25 bp, Homo sapien
caaatacacacgactttagcaaaag

SEQ ID NO: 5536059 - DNA, 25 bp, Homo sapien
ctgacctaaaatcttatgaagctgt

SEQ ID NO: 5536060 - DNA, 25 bp, Homo sapien
atagctaagaaaaaggcagtcgatt

SEQ ID NO: 5536061 - DNA, 25 bp, Homo sapien
atacttataatacaggcatggacta

SEQ ID NO: 5536062 - DNA, 25 bp, Homo sapien
cctggaagttggaagttctacctat

SEQ ID NO: 5536063 - DNA, 25 bp, Homo sapien
tgaatgtgaagcatgttcaatgtac

SEQ ID NO: 5536064 - DNA, 25 bp, Homo sapien
gaagcatgttcaatgtactcgttgt

SEQ ID NO: 5536065 - DNA, 25 bp, Homo sapien
gatttctgttacaaagcctggaagt

SEQ ID NO: 5536066 - DNA, 25 bp, Homo sapien
ggatttgaggattaggcttgctact

SEQ ID NO: 5536067 - DNA, 25 bp, Homo sapien
gctactgagtctttaatatgatttc

SEQ ID NO: 5536068 - DNA, 25 bp, Homo sapien
tgaggattaggcttgctactgagtc

SEQ ID NO: 5536069 - DNA, 25 bp, Homo sapien
ttgcaatgctcagaatacaggtggc

SEQ ID NO: 5536070 - DNA, 25 bp, Homo sapien
tacacatgaggattatcaggttaac

SEQ ID NO: 5536071 - DNA, 25 bp, Homo sapien
taaataagtttacacatgaggatta

SEQ ID NO: 5536072 - DNA, 25 bp, Homo sapien
attatcaggttaacagatgggggat

SEQ ID NO: 5536073 - DNA, 25 bp, Homo sapien
aaggttgaggtctttccaggtcttc

SEQ ID NO: 5536074 - DNA, 25 bp, Homo sapien
ctccctatgcccctcgctgggccca

SEQ ID NO: 5536075 - DNA, 25 bp, Homo sapien
gtagagacaagaccattgaagcaaa

SEQ ID NO: 5536076 - DNA, 25 bp, Homo sapien
cagggatcctcttcaggatgctggt

SEQ ID NO: 5536077 - DNA, 25 bp, Homo sapien
atttggtttcctactgggcgctcgg

SEQ ID NO: 5536078 - DNA, 25 bp, Homo sapien
aacccctttgcatgagggaggacat

SEQ ID NO: 5536079 - DNA, 25 bp, Homo sapien
ctgggcccaaagtgatgtatgttat

SEQ ID NO: 5536080 - DNA, 25 bp, Homo sapien
tggcacccagtagacacacaacaaa

SEQ ID NO: 5536081 - DNA, 25 bp, Homo sapien
aatatacaatccacaagggcagggg

SEQ ID NO: 5536082 - DNA, 25 bp, Homo sapien
cattttagctgagtagagacaagac

SEQ ID NO: 5536083 - DNA, 25 bp, Homo sapien
tgctatgattggagtccagccccaa

SEQ ID NO: 5536084 - DNA, 25 bp, Homo sapien
aacagcaagccactagttgacagtt

SEQ ID NO: 5536085 - DNA, 25 bp, Homo sapien
gctagcccctgaagcgtggattact

SEQ ID NO: 5536086 - DNA, 25 bp, Homo sapien
tatgtgatgagaattcggaaaaagt

SEQ ID NO: 5536087 - DNA, 25 bp, Homo sapien
ctcactcagagaagtacagtccaac

SEQ ID NO: 5536088 - DNA, 25 bp, Homo sapien
ggactcaaagtggaactgtggcttt

SEQ ID NO: 5536089 - DNA, 25 bp, Homo sapien
ttcggaaaaagtctagaagctacta

SEQ ID NO: 5536090 - DNA, 25 bp, Homo sapien
gtgtccttccaggggtcctcacagc

SEQ ID NO: 5536091 - DNA, 25 bp, Homo sapien
gtttccgaagatgcgctgtttgggg

SEQ ID NO: 5536092 - DNA, 25 bp, Homo sapien
tggaagtcagcgtcggccttcacta

SEQ ID NO: 5536093 - DNA, 25 bp, Homo sapien
taagcaaccttaaaacagcatgaaa

SEQ ID NO: 5536094 - DNA, 25 bp, Homo sapien
tccgccttgcctcacatactgggcc

SEQ ID NO: 5536095 - DNA, 25 bp, Homo sapien
gccagttaaaaccatcagcagaaac

SEQ ID NO: 5536096 - DNA, 25 bp, Homo sapien
cattgctgaagcaaaggtctcctcc

SEQ ID NO: 5536097 - DNA, 25 bp, Homo sapien
attccctggacccacatctgtagga

SEQ ID NO: 5536098 - DNA, 25 bp, Homo sapien
caacagacctaaggaaatgaagcag

SEQ ID NO: 5536099 - DNA, 25 bp, Homo sapien
gcatacctgaatgggttgtaatgac

SEQ ID NO: 5536100 - DNA, 25 bp, Homo sapien
acagaaaacacaacagacctaagga

SEQ ID NO: 5536101 - DNA, 25 bp, Homo sapien
agccaggatccatcacagtaaaccc

SEQ ID NO: 5536102 - DNA, 25 bp, Homo sapien
tctcctcctagagggatagccagga

SEQ ID NO: 5536103 - DNA, 25 bp, Homo sapien
tattaactgttcctgctgggttgga

SEQ ID NO: 5536104 - DNA, 25 bp, Homo sapien
taaaaaaaagacaggctcagttcta

SEQ ID NO: 5536105 - DNA, 25 bp, Homo sapien
agagatgtctagtagaagccccact

SEQ ID NO: 5536106 - DNA, 25 bp, Homo sapien
tcaccctggtgcagtcacagacatg

SEQ ID NO: 5536107 - DNA, 25 bp, Homo sapien
cagacatggtcccctttcctcccgc

SEQ ID NO: 5536108 - DNA, 25 bp, Homo sapien
ccctctacctggcagaatgggccat

SEQ ID NO: 5536109 - DNA, 25 bp, Homo sapien
tcgagaacccggcagccttctctca

SEQ ID NO: 5536110 - DNA, 25 bp, Homo sapien
tcccacgacatcacaggcctggtca

SEQ ID NO: 5536111 - DNA, 25 bp, Homo sapien
attgctggactgactctctcgccct

SEQ ID NO: 5536112 - DNA, 25 bp, Homo sapien
ctggtcacatgagatgctgccctct

SEQ ID NO: 5536113 - DNA, 25 bp, Homo sapien
tctccgagagcacagccatcatctc

SEQ ID NO: 5536114 - DNA, 25 bp, Homo sapien
ggcctgagatgagtgtctttcatgc

SEQ ID NO: 5536115 - DNA, 25 bp, Homo sapien
gccaggactgtcctagagcttggca

SEQ ID NO: 5536116 - DNA, 25 bp, Homo sapien
tcgggaggctcagtcacactctccg

SEQ ID NO: 5536117 - DNA, 25 bp, Homo sapien
cacagaaagatgtgggtcgttctga

SEQ ID NO: 5536118 - DNA, 25 bp, Homo sapien
ttagaagctcctgagacccgcctga

SEQ ID NO: 5536119 - DNA, 25 bp, Homo sapien
acaagaaatagaagagcgttcattt

SEQ ID NO: 5536120 - DNA, 25 bp, Homo sapien
tggcaaaagtaattggcttggtaat

SEQ ID NO: 5536121 - DNA, 25 bp, Homo sapien
ggggaaattgtgcccacgcttgtcc

SEQ ID NO: 5536122 - DNA, 25 bp, Homo sapien
ctttgccccatcaggcggcagtgat

SEQ ID NO: 5536123 - DNA, 25 bp, Homo sapien
ttaaaacacagaagagtaagaaatg

SEQ ID NO: 5536124 - DNA, 25 bp, Homo sapien
tgtccactctcaggagagccatgcg

SEQ ID NO: 5536125 - DNA, 25 bp, Homo sapien
ggggtcagcgcaagacctaatgaca

SEQ ID NO: 5536126 - DNA, 25 bp, Homo sapien
gagacccgcctgaagatcagggtgt

SEQ ID NO: 5536127 - DNA, 25 bp, Homo sapien
tgatgggacccagcccgctttgata

SEQ ID NO: 5536128 - DNA, 25 bp, Homo sapien
ttgtgacccaggacactgtgtatcc

SEQ ID NO: 5536129 - DNA, 25 bp, Homo sapien
aaaatggttccatagcgaagtgagg

SEQ ID NO: 5536130 - DNA, 25 bp, Homo sapien
ctgatggagaaaatatggctgattc

SEQ ID NO: 5536131 - DNA, 25 bp, Homo sapien
gatagggactcaggatgattatgga

SEQ ID NO: 5536132 - DNA, 25 bp, Homo sapien
aacaacagacttatgggcaactatc

SEQ ID NO: 5536133 - DNA, 25 bp, Homo sapien
ggcagaagggatccaggtatttctg

SEQ ID NO: 5536134 - DNA, 25 bp, Homo sapien
aaatggttagaagctggtcacatgg

SEQ ID NO: 5536135 - DNA, 25 bp, Homo sapien
cagttgtaaaggttgttggataggg

SEQ ID NO: 5536136 - DNA, 25 bp, Homo sapien
tgggatacagacagagccccaaaca

SEQ ID NO: 5536137 - DNA, 25 bp, Homo sapien
caaaagcacgttttagtgagactgc

SEQ ID NO: 5536138 - DNA, 25 bp, Homo sapien
taaagacagtaatgccttgtgaccc

SEQ ID NO: 5536139 - DNA, 25 bp, Homo sapien
gcatgctgaagtaaatggaaacacc

SEQ ID NO: 5536140 - DNA, 25 bp, Homo sapien
cctgctcagagggatcagcatttca

SEQ ID NO: 5536141 - DNA, 25 bp, Homo sapien
agagccacaaaatggagaacctgct

SEQ ID NO: 5536142 - DNA, 25 bp, Homo sapien
tcaggaggtgcccaagttatatcca

SEQ ID NO: 5536143 - DNA, 25 bp, Homo sapien
aatgtacgcaccaggctggaaattc

SEQ ID NO: 5536144 - DNA, 25 bp, Homo sapien
agagaagcatataagaaggcctttt

SEQ ID NO: 5536145 - DNA, 25 bp, Homo sapien
attaagatcatcagagaagcatata

SEQ ID NO: 5536146 - DNA, 25 bp, Homo sapien
tacagatgaattaggtcagaaggaa

SEQ ID NO: 5536147 - DNA, 25 bp, Homo sapien
ctaaagacatgtgtgaaaaattacc

SEQ ID NO: 5536148 - DNA, 25 bp, Homo sapien
ggtgggaatctgctagacagatgca

SEQ ID NO: 5536149 - DNA, 25 bp, Homo sapien
ggaaattctagagaagggtcttgcc

SEQ ID NO: 5536150 - DNA, 25 bp, Homo sapien
actaagaagtatagttaatgcatac

SEQ ID NO: 5536151 - DNA, 25 bp, Homo sapien
aacttggcaaaaacactgcagagga

SEQ ID NO: 5536152 - DNA, 25 bp, Homo sapien
ttaaccagcgaaaaatttatctcac

SEQ ID NO: 5536153 - DNA, 25 bp, Homo sapien
aatgcatacacatgaagtgtgacaa

SEQ ID NO: 5536154 - DNA, 25 bp, Homo sapien
gaaaaacaggcttggcgtaagcatt

SEQ ID NO: 5536155 - DNA, 25 bp, Homo sapien
atctaaaacaataaccgataaagct

SEQ ID NO: 5536156 - DNA, 25 bp, Homo sapien
aatcttagagatggctattagagcc

SEQ ID NO: 5536157 - DNA, 25 bp, Homo sapien
atgaagtgtgacaaaacttggcaaa

SEQ ID NO: 5536158 - DNA, 25 bp, Homo sapien
ttagagccaagtctgctgaaaacat

SEQ ID NO: 5536159 - DNA, 25 bp, Homo sapien
ggcgtaagcattttgctcagcatgc

SEQ ID NO: 5536160 - DNA, 25 bp, Homo sapien
actgcagaggaaagtttgatttttt

SEQ ID NO: 5536161 - DNA, 25 bp, Homo sapien
caggcccaacatggggtctaaaggt

SEQ ID NO: 5536162 - DNA, 25 bp, Homo sapien
gaggcatcatgtttaggcaggacaa

SEQ ID NO: 5536163 - DNA, 25 bp, Homo sapien
taggcaggacaatgttctgagacat

SEQ ID NO: 5536164 - DNA, 25 bp, Homo sapien
agcagaatgtccgaggcatcatgtt

SEQ ID NO: 5536165 - DNA, 25 bp, Homo sapien
gtgacccctcagtgttggatttcct

SEQ ID NO: 5536166 - DNA, 25 bp, Homo sapien
gggaatgggatatgcctttggacta

SEQ ID NO: 5536167 - DNA, 25 bp, Homo sapien
gtaagatccaggtgctttccgtccc

SEQ ID NO: 5536168 - DNA, 25 bp, Homo sapien
ttctagattgcccctgcagactcac

SEQ ID NO: 5536169 - DNA, 25 bp, Homo sapien
tccttgtgctgcaggtagcaagaca

SEQ ID NO: 5536170 - DNA, 25 bp, Homo sapien
gaagtcaagagacaaaagagctcaa

SEQ ID NO: 5536171 - DNA, 25 bp, Homo sapien
tagggaagaggacactttttctaga

SEQ ID NO: 5536172 - DNA, 25 bp, Homo sapien
tagtctatccacacaatgggatgtg

SEQ ID NO: 5536173 - DNA, 25 bp, Homo sapien
aatgtagggggaactataataaaga

SEQ ID NO: 5536174 - DNA, 25 bp, Homo sapien
aaccgcatgcaatatgtttagatcc

SEQ ID NO: 5536175 - DNA, 25 bp, Homo sapien
ggaattcaagaacactctgggccac

SEQ ID NO: 5536176 - DNA, 25 bp, Homo sapien
aacaggcttaatatatcaaccgcat

SEQ ID NO: 5536177 - DNA, 25 bp, Homo sapien
acaagtatgtttgtaaaacggtatc

SEQ ID NO: 5536178 - DNA, 25 bp, Homo sapien
aaaacggtatccagaagacaaagga

SEQ ID NO: 5536179 - DNA, 25 bp, Homo sapien
ctgattccagaaaagcaagtgtaaa

SEQ ID NO: 5536180 - DNA, 25 bp, Homo sapien
tgacatagaaagaaatttagccatt

SEQ ID NO: 5536181 - DNA, 25 bp, Homo sapien
cacacaatgggatgtggtgatttaa

SEQ ID NO: 5536182 - DNA, 25 bp, Homo sapien
tcaacataacagtggcatgtgaacc

SEQ ID NO: 5536183 - DNA, 25 bp, Homo sapien
agaagccatgtcacacagattacag

SEQ ID NO: 5536184 - DNA, 25 bp, Homo sapien
ttgcattgaattggaattaacacct

SEQ ID NO: 5536185 - DNA, 25 bp, Homo sapien
tataaaaagtgcagtagtcattact

SEQ ID NO: 5536186 - DNA, 25 bp, Homo sapien
aatatcccaaccacagaagacagct

SEQ ID NO: 5536187 - DNA, 25 bp, Homo sapien
tttacaaagtaatatcccaaccaca

SEQ ID NO: 5536188 - DNA, 25 bp, Homo sapien
tgtcacacagattacagagctattt

SEQ ID NO: 5536189 - DNA, 25 bp, Homo sapien
atgaaagcaagatttactacatatt

SEQ ID NO: 5536190 - DNA, 25 bp, Homo sapien
tattgagtaggcatcaaagcttctc

SEQ ID NO: 5536191 - DNA, 25 bp, Homo sapien
tcaaagcttctctctgtgtcaggta

SEQ ID NO: 5536192 - DNA, 25 bp, Homo sapien
tccaagaatggaccggattgaaaag

SEQ ID NO: 5536193 - DNA, 25 bp, Homo sapien
ttcttctccaagaatggaccggatt

SEQ ID NO: 5536194 - DNA, 25 bp, Homo sapien
tgaaacacagtgaccttaagccacc

SEQ ID NO: 5536195 - DNA, 25 bp, Homo sapien
taacctagactaagacatccatttc

SEQ ID NO: 5536196 - DNA, 25 bp, Homo sapien
atggcctagccctgcacacaggagg

SEQ ID NO: 5536197 - DNA, 25 bp, Homo sapien
tatgacaaaaatagtaacctagact

SEQ ID NO: 5536198 - DNA, 25 bp, Homo sapien
agcagatgtgtcaagccacaagatt

SEQ ID NO: 5536199 - DNA, 25 bp, Homo sapien
tctcttcaccatgcagagggatggc

SEQ ID NO: 5536200 - DNA, 25 bp, Homo sapien
ggtctaggtaacaatccccagctgc

SEQ ID NO: 5536201 - DNA, 25 bp, Homo sapien
ccagccccgcatggcattacagtat

SEQ ID NO: 5536202 - DNA, 25 bp, Homo sapien
ggagggtcagtctcactgtaccttc

SEQ ID NO: 5536203 - DNA, 25 bp, Homo sapien
atttcagtcagcagatgtgtcaagc

SEQ ID NO: 5536204 - DNA, 25 bp, Homo sapien
gagaagagagaacactatatggtac

SEQ ID NO: 5536205 - DNA, 25 bp, Homo sapien
aacaattcaagacgatctaaacatt

SEQ ID NO: 5536206 - DNA, 25 bp, Homo sapien
tccccctgttggcctgagagcagga

SEQ ID NO: 5536207 - DNA, 25 bp, Homo sapien
acagaaagacctaaaccacagtttc

SEQ ID NO: 5536208 - DNA, 25 bp, Homo sapien
cctgagagcaggataacactgcctg

SEQ ID NO: 5536209 - DNA, 25 bp, Homo sapien
atttctagcacattctgtgagggct

SEQ ID NO: 5536210 - DNA, 25 bp, Homo sapien
atgtaatggcattccacagaaagac

SEQ ID NO: 5536211 - DNA, 25 bp, Homo sapien
ttgaacttaagctgaggaaaagaag

SEQ ID NO: 5536212 - DNA, 25 bp, Homo sapien
attagggttcaaatctagaaaatta

SEQ ID NO: 5536213 - DNA, 25 bp, Homo sapien
gactaatataaagatgtaatggcat

SEQ ID NO: 5536214 - DNA, 25 bp, Homo sapien
tacaaaggctagctgcatgccattc

SEQ ID NO: 5536215 - DNA, 25 bp, Homo sapien
taacactgcctgagactaacaattc

SEQ ID NO: 5536216 - DNA, 25 bp, Homo sapien
gcttcttcacccatgtgcacgtgcc

SEQ ID NO: 5536217 - DNA, 25 bp, Homo sapien
ttctcttccggcagctctgaggacc

SEQ ID NO: 5536218 - DNA, 25 bp, Homo sapien
tattgttgcttgtgttggaaggcga

SEQ ID NO: 5536219 - DNA, 25 bp, Homo sapien
agagcagaaaaagattgtagctgta

SEQ ID NO: 5536220 - DNA, 25 bp, Homo sapien
caggttgtattaggcatgtggtgat

SEQ ID NO: 5536221 - DNA, 25 bp, Homo sapien
tttgaggcctccatcaagaaggaaa

SEQ ID NO: 5536222 - DNA, 25 bp, Homo sapien
ctgttgcgagtaagtgtgtctgcag

SEQ ID NO: 5536223 - DNA, 25 bp, Homo sapien
gtacaactgctgaggttttgaggcc

SEQ ID NO: 5536224 - DNA, 25 bp, Homo sapien
gagagcccagattgcaggtctgttg

SEQ ID NO: 5536225 - DNA, 25 bp, Homo sapien
tctgaggaccgtagactaaacttta

SEQ ID NO: 5536226 - DNA, 25 bp, Homo sapien
ggggttataggagcttacagtgaac

SEQ ID NO: 5536227 - DNA, 25 bp, Homo sapien
catgggctgtcagaaacccactagc

SEQ ID NO: 5536228 - DNA, 25 bp, Homo sapien
gtatttaagacacaggagagatgac

SEQ ID NO: 5536229 - DNA, 25 bp, Homo sapien
agagatgaccaacaacagacatgta

SEQ ID NO: 5536230 - DNA, 25 bp, Homo sapien
agatacagtagtttcagggcattcc

SEQ ID NO: 5536231 - DNA, 25 bp, Homo sapien
gtttcagggcattcccatgggctgt

SEQ ID NO: 5536232 - DNA, 25 bp, Homo sapien
gaaaacaaaacatggaacctcatcg

SEQ ID NO: 5536233 - DNA, 25 bp, Homo sapien
acatccagtgtaaaacggttcctct

SEQ ID NO: 5536234 - DNA, 25 bp, Homo sapien
ctcaggtgctgtcatttaaataagt

SEQ ID NO: 5536235 - DNA, 25 bp, Homo sapien
gctgaccctgagtgcattcgctatc

SEQ ID NO: 5536236 - DNA, 25 bp, Homo sapien
tggaacctcatcgaaaacaaacatc

SEQ ID NO: 5536237 - DNA, 25 bp, Homo sapien
acccactagcccaaacactatgctc

SEQ ID NO: 5536238 - DNA, 25 bp, Homo sapien
atagaaaaacagagaaagctcctga

SEQ ID NO: 5536239 - DNA, 25 bp, Homo sapien
caaaacaaagtgacattgccttaaa

SEQ ID NO: 5536240 - DNA, 25 bp, Homo sapien
tttcacctgaaagaacaagcgagca

SEQ ID NO: 5536241 - DNA, 25 bp, Homo sapien
aagctagctcaattctaagacagaa

SEQ ID NO: 5536242 - DNA, 25 bp, Homo sapien
aaaaacagagaaagctcctgaaaga

SEQ ID NO: 5536243 - DNA, 25 bp, Homo sapien
ttcacaaagggcaataacaaaatag

SEQ ID NO: 5536244 - DNA, 25 bp, Homo sapien
attttcatttggttgcaggcacaga

SEQ ID NO: 5536245 - DNA, 25 bp, Homo sapien
aaatatatagaggtatcaatagaaa

SEQ ID NO: 5536246 - DNA, 25 bp, Homo sapien
acaaagggcaataacaaaatagtaa

SEQ ID NO: 5536247 - DNA, 25 bp, Homo sapien
agctcctgaaagaactcactatatt

SEQ ID NO: 5536248 - DNA, 25 bp, Homo sapien
gcaggcacagaaattgactcaagct

SEQ ID NO: 5536249 - DNA, 25 bp, Homo sapien
agacctaccataaagtttctgtgat

SEQ ID NO: 5536250 - DNA, 25 bp, Homo sapien
tgtgatgtattgtcttccagttgca

SEQ ID NO: 5536251 - DNA, 25 bp, Homo sapien
ttggtgttgcttggaaggcatccat

SEQ ID NO: 5536252 - DNA, 25 bp, Homo sapien
ataacacttttccccagacctacca

SEQ ID NO: 5536253 - DNA, 25 bp, Homo sapien
ttgcattcttcgtatgtaatcatat

SEQ ID NO: 5536254 - DNA, 25 bp, Homo sapien
ataaaaattactgagttgcatcaat

SEQ ID NO: 5536255 - DNA, 25 bp, Homo sapien
ttgcttggaaggcatccatacctgc

SEQ ID NO: 5536256 - DNA, 25 bp, Homo sapien
gtcttccagttgcaataaaaattac

SEQ ID NO: 5536257 - DNA, 25 bp, Homo sapien
gccaaagacaaactatttcatcatt

SEQ ID NO: 5536258 - DNA, 25 bp, Homo sapien
tggaaggcatccatacctgcatttt

SEQ ID NO: 5536259 - DNA, 25 bp, Homo sapien
tgtaatcatattgccaaagacaaac

SEQ ID NO: 5536260 - DNA, 25 bp, Homo sapien
taagtgtacctgtgtcaaatccgca

SEQ ID NO: 5536261 - DNA, 25 bp, Homo sapien
acatttaaagcttggtcggtgacct

SEQ ID NO: 5536262 - DNA, 25 bp, Homo sapien
atccgcacaggactcaatatagcaa

SEQ ID NO: 5536263 - DNA, 25 bp, Homo sapien
acgagcacagctaagaacagagtga

SEQ ID NO: 5536264 - DNA, 25 bp, Homo sapien
gccagcaattatcccatgggcccta

SEQ ID NO: 5536265 - DNA, 25 bp, Homo sapien
agacctcggagtactgctaagtgta

SEQ ID NO: 5536266 - DNA, 25 bp, Homo sapien
ccctgcaagatgagtttttggagat

SEQ ID NO: 5536267 - DNA, 25 bp, Homo sapien
ttggagataaatgaaataactggac

SEQ ID NO: 5536268 - DNA, 25 bp, Homo sapien
atatagttgattggaatgaggtttt

SEQ ID NO: 5536269 - DNA, 25 bp, Homo sapien
tcacacaagtaacaccacagcagac

SEQ ID NO: 5536270 - DNA, 25 bp, Homo sapien
ctgaggcagctacagattgccctgc

SEQ ID NO: 5536271 - DNA, 25 bp, Homo sapien
tttgccagttggtgctggcgtagag

SEQ ID NO: 5536272 - DNA, 25 bp, Homo sapien
aagcagaaaggcgtctagaaaatta

SEQ ID NO: 5536273 - DNA, 25 bp, Homo sapien
ctgggtggactttttagtgaacgta

SEQ ID NO: 5536274 - DNA, 25 bp, Homo sapien
tagaaggttttgccagttggtgctg

SEQ ID NO: 5536275 - DNA, 25 bp, Homo sapien
gagcaccccaccgttgcactggatg

SEQ ID NO: 5536276 - DNA, 25 bp, Homo sapien
cactggatgtagctaccccggcttg

SEQ ID NO: 5536277 - DNA, 25 bp, Homo sapien
tctccgagtagaatagcgctctctc

SEQ ID NO: 5536278 - DNA, 25 bp, Homo sapien
gctggagttcgatgggattaacttc

SEQ ID NO: 5536279 - DNA, 25 bp, Homo sapien
gtcccggcttacaactagaggtgtc

SEQ ID NO: 5536280 - DNA, 25 bp, Homo sapien
aactagaggtgtcgcacacacccac

SEQ ID NO: 5536281 - DNA, 25 bp, Homo sapien
ctaccccggcttgtggtcaatagag

SEQ ID NO: 5536282 - DNA, 25 bp, Homo sapien
tctggtgcagtataggcacacctag

SEQ ID NO: 5536283 - DNA, 25 bp, Homo sapien
tgagaaataggcactggcaatttac

SEQ ID NO: 5536284 - DNA, 25 bp, Homo sapien
gggccacgtcagtctttgcgatcac

SEQ ID NO: 5536285 - DNA, 25 bp, Homo sapien
ccctctacataacaagcgggtggac

SEQ ID NO: 5536286 - DNA, 25 bp, Homo sapien
cgtgttgtgtggtgtctccagccac

SEQ ID NO: 5536287 - DNA, 25 bp, Homo sapien
cggtatgaaaggttgaatgctctag

SEQ ID NO: 5536288 - DNA, 25 bp, Homo sapien
ttcacgattgactgttttgggcttc

SEQ ID NO: 5536289 - DNA, 25 bp, Homo sapien
ctccagccacgcactcagctcaatc

SEQ ID NO: 5536290 - DNA, 25 bp, Homo sapien
agatgccttagcaagggtccgtgtt

SEQ ID NO: 5536291 - DNA, 25 bp, Homo sapien
cccacctgatcggcttagagttcac

SEQ ID NO: 5536292 - DNA, 25 bp, Homo sapien
agagatgccggctttcccacctgat

SEQ ID NO: 5536293 - DNA, 25 bp, Homo sapien
ggtgcggcgctttccgcgtccttta

SEQ ID NO: 5536294 - DNA, 25 bp, Homo sapien
agctccatgaacctagcggagccgc

SEQ ID NO: 5536295 - DNA, 25 bp, Homo sapien
ctccgcgcaaagcgggttaaaagtc

SEQ ID NO: 5536296 - DNA, 25 bp, Homo sapien
cctttctcgccgaccgcacaggcgc

SEQ ID NO: 5536297 - DNA, 25 bp, Homo sapien
gcggagccgcctagtaccctttctc

SEQ ID NO: 5536298 - DNA, 25 bp, Homo sapien
cctcggcccgacccacgcgccgagg

SEQ ID NO: 5536299 - DNA, 25 bp, Homo sapien
tgaacctagcggagccgcctagtac

SEQ ID NO: 5536300 - DNA, 25 bp, Homo sapien
tcggcccagctcagctccatgaacc

SEQ ID NO: 5536301 - DNA, 25 bp, Homo sapien
cctagtaccctttctcgccgaccgc

SEQ ID NO: 5536302 - DNA, 25 bp, Homo sapien
cccctcggcccagctcagctccatg

SEQ ID NO: 5536303 - DNA, 25 bp, Homo sapien
cctttaagacgagtttgaccgaggc

SEQ ID NO: 5536304 - DNA, 25 bp, Homo sapien
agtttgaagttcagtggttgaggtc

SEQ ID NO: 5536305 - DNA, 25 bp, Homo sapien
gtaggatctgataaggtgtgatgtc

SEQ ID NO: 5536306 - DNA, 25 bp, Homo sapien
gaacaaatctcacagggaatgcgct

SEQ ID NO: 5536307 - DNA, 25 bp, Homo sapien
ttccaagttcaaaggctagcagggt

SEQ ID NO: 5536308 - DNA, 25 bp, Homo sapien
ggtccctcaaggctagagggtggca

SEQ ID NO: 5536309 - DNA, 25 bp, Homo sapien
aggtcagtagctcactcgtaggatc

SEQ ID NO: 5536310 - DNA, 25 bp, Homo sapien
taggttcacaatgcttaaggagggg

SEQ ID NO: 5536311 - DNA, 25 bp, Homo sapien
agaagctgtccaatgcaacggagat

SEQ ID NO: 5536312 - DNA, 25 bp, Homo sapien
gctgacagagtgtagcttgccacag

SEQ ID NO: 5536313 - DNA, 25 bp, Homo sapien
caacggagattcacagagacatata

SEQ ID NO: 5536314 - DNA, 25 bp, Homo sapien
ttgctcaattaggatggaagcaggc

SEQ ID NO: 5536315 - DNA, 25 bp, Homo sapien
gcagtctgtcagtcggtaaaaagtc

SEQ ID NO: 5536316 - DNA, 25 bp, Homo sapien
aaaagtcccgcagcctgtcaggtga

SEQ ID NO: 5536317 - DNA, 25 bp, Homo sapien
gggacccatcgtctccgtgtggcac

SEQ ID NO: 5536318 - DNA, 25 bp, Homo sapien
tccgacgcctctcggtgcccctctg

SEQ ID NO: 5536319 - DNA, 25 bp, Homo sapien
gtgccgtcgctcttcccgccgcact

SEQ ID NO: 5536320 - DNA, 25 bp, Homo sapien
ggctcatccaccaccgcaagcacgc

SEQ ID NO: 5536321 - DNA, 25 bp, Homo sapien
ctccttctctgagtcggcgctggag

SEQ ID NO: 5536322 - DNA, 25 bp, Homo sapien
tgagcaactctcagcagagcgtgca

SEQ ID NO: 5536323 - DNA, 25 bp, Homo sapien
gccaaatcaaatagaaagcttactt

SEQ ID NO: 5536324 - DNA, 25 bp, Homo sapien
cggcccttgccctttgacctcgctc

SEQ ID NO: 5536325 - DNA, 25 bp, Homo sapien
cttctcgcacccctggcagtctgtc

SEQ ID NO: 5536326 - DNA, 25 bp, Homo sapien
agaccgatgaactttgaggtcaggc

SEQ ID NO: 5536327 - DNA, 25 bp, Homo sapien
ttagctggtccttgtttaagattct

SEQ ID NO: 5536328 - DNA, 25 bp, Homo sapien
ccccgcaggtcttagctggtccttg

SEQ ID NO: 5536329 - DNA, 25 bp, Homo sapien
tcctggtcccataaattatgtgctc

SEQ ID NO: 5536330 - DNA, 25 bp, Homo sapien
gcgaaaccatgtccccgcaggtctt

SEQ ID NO: 5536331 - DNA, 25 bp, Homo sapien
caattatttgcgaaaccatgtcccc

SEQ ID NO: 5536332 - DNA, 25 bp, Homo sapien
actttcagagatcaaagcgggaaga

SEQ ID NO: 5536333 - DNA, 25 bp, Homo sapien
caaacaaaaagaccgatgaactttg

SEQ ID NO: 5536334 - DNA, 25 bp, Homo sapien
gttaaaacatgaactttagctgggc

SEQ ID NO: 5536335 - DNA, 25 bp, Homo sapien
atgtgtactaaagcattacctattt

SEQ ID NO: 5536336 - DNA, 25 bp, Homo sapien
gctgcctcgcttcaaatcctggtcc

SEQ ID NO: 5536337 - DNA, 25 bp, Homo sapien
ccacaggtaaaacttctgcagtgac

SEQ ID NO: 5536338 - DNA, 25 bp, Homo sapien
aggctactgattcagcaatagagac

SEQ ID NO: 5536339 - DNA, 25 bp, Homo sapien
gacacaagagggttcccatagcctc

SEQ ID NO: 5536340 - DNA, 25 bp, Homo sapien
tgaggcctctatctgagttagattt

SEQ ID NO: 5536341 - DNA, 25 bp, Homo sapien
tccaaacaatgttgaggtatttcca

SEQ ID NO: 5536342 - DNA, 25 bp, Homo sapien
ttcccaggataaagcctgcagggtt

SEQ ID NO: 5536343 - DNA, 25 bp, Homo sapien
gcctgcagggttttgcccagattac

SEQ ID NO: 5536344 - DNA, 25 bp, Homo sapien
atttgagagcacatgacacaagagg

SEQ ID NO: 5536345 - DNA, 25 bp, Homo sapien
gcagtgacttccaggctactgattc

SEQ ID NO: 5536346 - DNA, 25 bp, Homo sapien
ttcttagttcttggcccgctcattc

SEQ ID NO: 5536347 - DNA, 25 bp, Homo sapien
accaaagtgaactctcattgaatgc

SEQ ID NO: 5536348 - DNA, 25 bp, Homo sapien
gagatggcatggaccgtgcctttca

SEQ ID NO: 5536349 - DNA, 25 bp, Homo sapien
tcctctgcagacggtttggagtgag

SEQ ID NO: 5536350 - DNA, 25 bp, Homo sapien
gtaccagttgcaaactgtggggtcc

SEQ ID NO: 5536351 - DNA, 25 bp, Homo sapien
cctcaaagactggcacttgtgcagg

SEQ ID NO: 5536352 - DNA, 25 bp, Homo sapien
ctactggaaagagtacatacaggcg

SEQ ID NO: 5536353 - DNA, 25 bp, Homo sapien
tctcccaggggctgtctctacctca

SEQ ID NO: 5536354 - DNA, 25 bp, Homo sapien
ttccctagcgctgcgtgaacccaga

SEQ ID NO: 5536355 - DNA, 25 bp, Homo sapien
agaggcctttctgatgaaggtggcc

SEQ ID NO: 5536356 - DNA, 25 bp, Homo sapien
tttcatttcaggagacgtggttgta

SEQ ID NO: 5536357 - DNA, 25 bp, Homo sapien
gtccaggaatacaactcgaacccca

SEQ ID NO: 5536358 - DNA, 25 bp, Homo sapien
gggtgcacaacggagctatttttcc

SEQ ID NO: 5536359 - DNA, 25 bp, Homo sapien
ctcgaaggcccgtctcggaccgaag

SEQ ID NO: 5536360 - DNA, 25 bp, Homo sapien
cttcggtccgagacgggccttcgag

SEQ ID NO: 5536361 - DNA, 25 bp, Homo sapien
gctgcagattcagctgtcggcgcag

SEQ ID NO: 5536362 - DNA, 25 bp, Homo sapien
agccctaccggctgcagattcagct

SEQ ID NO: 5536363 - DNA, 25 bp, Homo sapien
cagccacacgctcgagttccagagt

SEQ ID NO: 5536364 - DNA, 25 bp, Homo sapien
atcggcaagcagccctaccggctgc

SEQ ID NO: 5536365 - DNA, 25 bp, Homo sapien
acgatctgtaccgctacaagccgct

SEQ ID NO: 5536366 - DNA, 25 bp, Homo sapien
accggctgcagattcagctgtcggc

SEQ ID NO: 5536367 - DNA, 25 bp, Homo sapien
gtaccgctacaagccgctaagctcc

SEQ ID NO: 5536368 - DNA, 25 bp, Homo sapien
gctacaagccgctaagctccagcgc

SEQ ID NO: 5536369 - DNA, 25 bp, Homo sapien
cgagttccagagtctagaggacctg

SEQ ID NO: 5536370 - DNA, 25 bp, Homo sapien
tggtcaacgatctgtaccgctacaa

SEQ ID NO: 5536371 - DNA, 25 bp, Homo sapien
ttccagagtctagaggacctgatca

SEQ ID NO: 5536372 - DNA, 25 bp, Homo sapien
gctgggagcttatctccgagagcgt

SEQ ID NO: 5536373 - DNA, 25 bp, Homo sapien
ggagcattgtcaggatagatggtga

SEQ ID NO: 5536374 - DNA, 25 bp, Homo sapien
gaaaaacagcatgaaatggagcatt

SEQ ID NO: 5536375 - DNA, 25 bp, Homo sapien
tagatggtgactctgtggaaaaaca

SEQ ID NO: 5536376 - DNA, 25 bp, Homo sapien
aacagaatctggagtcccaagacct

SEQ ID NO: 5536377 - DNA, 25 bp, Homo sapien
cctgtcccgtgtatgatggtgtgca

SEQ ID NO: 5536378 - DNA, 25 bp, Homo sapien
ggagtctgttagctggaggcttcta

SEQ ID NO: 5536379 - DNA, 25 bp, Homo sapien
atgagcaagtagtcatgcaggaaat

SEQ ID NO: 5536380 - DNA, 25 bp, Homo sapien
ttgaaactttccactgaggccacct

SEQ ID NO: 5536381 - DNA, 25 bp, Homo sapien
gctggaatggacagaatacagcagg

SEQ ID NO: 5536382 - DNA, 25 bp, Homo sapien
gctgccctgccagtgaaaccaaacc

SEQ ID NO: 5536383 - DNA, 25 bp, Homo sapien
aacaattggctaaaagaatcatctt

SEQ ID NO: 5536384 - DNA, 25 bp, Homo sapien
cagcagtcggtacaagtcacatttc

SEQ ID NO: 5536385 - DNA, 25 bp, Homo sapien
tgaacctaaagaatgctgacttttc

SEQ ID NO: 5536386 - DNA, 25 bp, Homo sapien
acatttccagagttaggcagtattc

SEQ ID NO: 5536387 - DNA, 25 bp, Homo sapien
tttgccatgaggccacattcagctg

SEQ ID NO: 5536388 - DNA, 25 bp, Homo sapien
ttgtaaacaattggctaaaagaatc

SEQ ID NO: 5536389 - DNA, 25 bp, Homo sapien
tcaagacaacttcagcagtcggtac

SEQ ID NO: 5536390 - DNA, 25 bp, Homo sapien
tctcaaacatcaagacaacttcagc

SEQ ID NO: 5536391 - DNA, 25 bp, Homo sapien
cagagttaggcagtattctacactt

SEQ ID NO: 5536392 - DNA, 25 bp, Homo sapien
acatgatcttgaacagctcctgtac

SEQ ID NO: 5536393 - DNA, 25 bp, Homo sapien
ttctatagcagagcattatattttg

SEQ ID NO: 5536394 - DNA, 25 bp, Homo sapien
taataataaggccagggtcctagga

SEQ ID NO: 5536395 - DNA, 25 bp, Homo sapien
tgttccatggacccagactgcactc

SEQ ID NO: 5536396 - DNA, 25 bp, Homo sapien
tcctaggactgatcattgcgagggc

SEQ ID NO: 5536397 - DNA, 25 bp, Homo sapien
tatgctgacagtgggttaacagagt

SEQ ID NO: 5536398 - DNA, 25 bp, Homo sapien
gtggtagatggatgaaaacaaatct

SEQ ID NO: 5536399 - DNA, 25 bp, Homo sapien
tagaagattggagaagtatcatgta

SEQ ID NO: 5536400 - DNA, 25 bp, Homo sapien
gaaaagaaatcccacgtatgctgac

SEQ ID NO: 5536401 - DNA, 25 bp, Homo sapien
tcccgctggtcacaagctagggtac

SEQ ID NO: 5536402 - DNA, 25 bp, Homo sapien
ataaagctataataaaggccctgat

SEQ ID NO: 5536403 - DNA, 25 bp, Homo sapien
ctaggaaatgcattagtagactatc

SEQ ID NO: 5536404 - DNA, 25 bp, Homo sapien
aagaaaaactgggatctaggaaatg

SEQ ID NO: 5536405 - DNA, 25 bp, Homo sapien
caccccgtcgtctctctcccagtcc

SEQ ID NO: 5536406 - DNA, 25 bp, Homo sapien
ggactgggagagagacgacggggtg

SEQ ID NO: 5536407 - DNA, 25 bp, Homo sapien
ggcagaaatcagtgatggcatagcc

SEQ ID NO: 5536408 - DNA, 25 bp, Homo sapien
ctcctagcaaagccccgtgcatgga

SEQ ID NO: 5536409 - DNA, 25 bp, Homo sapien
ttctcaggactggtgctctccgaag

SEQ ID NO: 5536410 - DNA, 25 bp, Homo sapien
tcaactcccagagagtgaacatccc

SEQ ID NO: 5536411 - DNA, 25 bp, Homo sapien
ggaaattgagagtagtagcaagtga

SEQ ID NO: 5536412 - DNA, 25 bp, Homo sapien
gcttctggggatgatcctgtcctct

SEQ ID NO: 5536413 - DNA, 25 bp, Homo sapien
tggcatagccgcgccaccatgacca

SEQ ID NO: 5536414 - DNA, 25 bp, Homo sapien
gcagcccatttccccgagtcgccca

SEQ ID NO: 5536415 - DNA, 25 bp, Homo sapien
aggaattggatgactcactgagctc

SEQ ID NO: 5536416 - DNA, 25 bp, Homo sapien
agctcctgacaagtagtaggctcgg

SEQ ID NO: 5536417 - DNA, 25 bp, Homo sapien
atggacagggcatccatgccatcca

SEQ ID NO: 5536418 - DNA, 25 bp, Homo sapien
gaaaggattactatcaaagactgga

SEQ ID NO: 5536419 - DNA, 25 bp, Homo sapien
acatggaatcagagggctttttggt

SEQ ID NO: 5536420 - DNA, 25 bp, Homo sapien
ttcaaggctcttagagtcgctgttc

SEQ ID NO: 5536421 - DNA, 25 bp, Homo sapien
aaagactggaaatgtcccttttcta

SEQ ID NO: 5536422 - DNA, 25 bp, Homo sapien
agttacaatttgaggggattttcta

SEQ ID NO: 5536423 - DNA, 25 bp, Homo sapien
aagttgagcaaaattaaccttactc

SEQ ID NO: 5536424 - DNA, 25 bp, Homo sapien
ttcagtccagtctccttaaccatcc

SEQ ID NO: 5536425 - DNA, 25 bp, Homo sapien
tttctaccagactttcaaggctctt

SEQ ID NO: 5536426 - DNA, 25 bp, Homo sapien
gtaatcatgtgatgcctgagaccag

SEQ ID NO: 5536427 - DNA, 25 bp, Homo sapien
tctaactataaaacaagggctttca

SEQ ID NO: 5536428 - DNA, 25 bp, Homo sapien
tgcctgagaccagatcctgaatttc

SEQ ID NO: 5536429 - DNA, 25 bp, Homo sapien
gagataagcataaggcatcctgtct

SEQ ID NO: 5536430 - DNA, 25 bp, Homo sapien
gcatcctgtctgtgcccactccacc

SEQ ID NO: 5536431 - DNA, 25 bp, Homo sapien
accccctggaatgtgctagagataa

SEQ ID NO: 5536432 - DNA, 25 bp, Homo sapien
ccttgttgttgggctactgagcact

SEQ ID NO: 5536433 - DNA, 25 bp, Homo sapien
ggacctcctgacttgagacagattc

SEQ ID NO: 5536434 - DNA, 25 bp, Homo sapien
cgcagaatgaggacctcctgacttg

SEQ ID NO: 5536435 - DNA, 25 bp, Homo sapien
ccactccaccctggttgggagtcgc

SEQ ID NO: 5536436 - DNA, 25 bp, Homo sapien
ttccaattcagatcctggagctggg

SEQ ID NO: 5536437 - DNA, 25 bp, Homo sapien
aatactggcttggacacactggatt

SEQ ID NO: 5536438 - DNA, 25 bp, Homo sapien
gctgggcctgctactcacctcccca

SEQ ID NO: 5536439 - DNA, 25 bp, Homo sapien
tggattccaggtgcaggaaccctgg

SEQ ID NO: 5536440 - DNA, 25 bp, Homo sapien
gcctcctccgctgaccacaggcctc

SEQ ID NO: 5536441 - DNA, 25 bp, Homo sapien
aggctgaacaagacatgaaggttag

SEQ ID NO: 5536442 - DNA, 25 bp, Homo sapien
tggtccctccattggtaagagcccc

SEQ ID NO: 5536443 - DNA, 25 bp, Homo sapien
agagccccacatactaacaccttcc

SEQ ID NO: 5536444 - DNA, 25 bp, Homo sapien
caggggtccttgtggatcactatct

SEQ ID NO: 5536445 - DNA, 25 bp, Homo sapien
gaaggttagtacagtgttaacagcc

SEQ ID NO: 5536446 - DNA, 25 bp, Homo sapien
cacaggcctcatgagccatgctcgt

SEQ ID NO: 5536447 - DNA, 25 bp, Homo sapien
ccaccaatggcactggccagtcaga

SEQ ID NO: 5536448 - DNA, 25 bp, Homo sapien
gttaacagccaacagatcaagaatc

SEQ ID NO: 5536449 - DNA, 25 bp, Homo sapien
cagcgcctgttcagaggccaccaat

SEQ ID NO: 5536450 - DNA, 25 bp, Homo sapien
ctggccagtcagatgcctcctccgc

SEQ ID NO: 5536451 - DNA, 25 bp, Homo sapien
tctgttgtccccctgcctggtcctc

SEQ ID NO: 5536452 - DNA, 25 bp, Homo sapien
gcgggtgtgcctgtccctccagata

SEQ ID NO: 5536453 - DNA, 25 bp, Homo sapien
attggctgatgctcctctaattccc

SEQ ID NO: 5536454 - DNA, 25 bp, Homo sapien
cttctccctggtccttgctgaaaga

SEQ ID NO: 5536455 - DNA, 25 bp, Homo sapien
agttataggtggatgtgccaagatg

SEQ ID NO: 5536456 - DNA, 25 bp, Homo sapien
tctgagccttgcttggttgtcagag

SEQ ID NO: 5536457 - DNA, 25 bp, Homo sapien
gctggtgaacttggtcttcagctat

SEQ ID NO: 5536458 - DNA, 25 bp, Homo sapien
gtccctccagatagtgctctgtttc

SEQ ID NO: 5536459 - DNA, 25 bp, Homo sapien
gtgccagttataggtggatgtgcca

SEQ ID NO: 5536460 - DNA, 25 bp, Homo sapien
gggttgttttgctatggccttagcc

SEQ ID NO: 5536461 - DNA, 25 bp, Homo sapien
gacctgcttgcattggctgatgctc

SEQ ID NO: 5536462 - DNA, 25 bp, Homo sapien
tgcttaaagatgcagtatgctattc

SEQ ID NO: 5536463 - DNA, 25 bp, Homo sapien
tggcacacagaaggttaacaactat

SEQ ID NO: 5536464 - DNA, 25 bp, Homo sapien
agctgttagaaatggcatagactac

SEQ ID NO: 5536465 - DNA, 25 bp, Homo sapien
aagagtttttggcacacagaaggtt

SEQ ID NO: 5536466 - DNA, 25 bp, Homo sapien
tagatgaagctatgaaaaccattgc

SEQ ID NO: 5536467 - DNA, 25 bp, Homo sapien
aagactagtcaccaatcaaaggagg

SEQ ID NO: 5536468 - DNA, 25 bp, Homo sapien
atattttctgggatgagccctggaa

SEQ ID NO: 5536469 - DNA, 25 bp, Homo sapien
aaggtggagatataccaaaaaagac

SEQ ID NO: 5536470 - DNA, 25 bp, Homo sapien
ttagaacacagtataaccaggttaa

SEQ ID NO: 5536471 - DNA, 25 bp, Homo sapien
gagaaaatgagagacatgttagaac

SEQ ID NO: 5536472 - DNA, 25 bp, Homo sapien
caaaggaggtttattattcaagcac

SEQ ID NO: 5536473 - DNA, 25 bp, Homo sapien
gtggcaggcagtagactttccctac

SEQ ID NO: 5536474 - DNA, 25 bp, Homo sapien
gcacaagaaatagtgtgaaccacca

SEQ ID NO: 5536475 - DNA, 25 bp, Homo sapien
atcactacagaggctactcgggtgg

SEQ ID NO: 5536476 - DNA, 25 bp, Homo sapien
ttggtaggacaaagccagtgtctta

SEQ ID NO: 5536477 - DNA, 25 bp, Homo sapien
taaaaacaaccttgggtgctgcacc

SEQ ID NO: 5536478 - DNA, 25 bp, Homo sapien
gcccaatgagggaattccccagcac

SEQ ID NO: 5536479 - DNA, 25 bp, Homo sapien
gagtggcaagtcaggacttcacaaa

SEQ ID NO: 5536480 - DNA, 25 bp, Homo sapien
ctaggcagatggacactggcctttt

SEQ ID NO: 5536481 - DNA, 25 bp, Homo sapien
ctgtgtgcattggcatctcgtgggg

SEQ ID NO: 5536482 - DNA, 25 bp, Homo sapien
agctgagattggagacaagtcctta

SEQ ID NO: 5536483 - DNA, 25 bp, Homo sapien
agaggcactgcctcagctgagattg

SEQ ID NO: 5536484 - DNA, 25 bp, Homo sapien
aattcagtaagcagataagaggaaa

SEQ ID NO: 5536485 - DNA, 25 bp, Homo sapien
accttggcaattttgagtagggtca

SEQ ID NO: 5536486 - DNA, 25 bp, Homo sapien
gccctcacccgatttcagctctccc

SEQ ID NO: 5536487 - DNA, 25 bp, Homo sapien
attactgtagtactggacatttccc

SEQ ID NO: 5536488 - DNA, 25 bp, Homo sapien
agtacaaattcgtcacatagccctc

SEQ ID NO: 5536489 - DNA, 25 bp, Homo sapien
ctccatttcgggatcccacccggga

SEQ ID NO: 5536490 - DNA, 25 bp, Homo sapien
tagatccacagtaaagttgcaaaga

SEQ ID NO: 5536491 - DNA, 25 bp, Homo sapien
attttgctcctggggttatggtgct

SEQ ID NO: 5536492 - DNA, 25 bp, Homo sapien
ttagtctcctctcgtccgtgacggc

SEQ ID NO: 5536493 - DNA, 25 bp, Homo sapien
tgagtagggtcaagtgttttgtaga

SEQ ID NO: 5536494 - DNA, 25 bp, Homo sapien
gtccgtgacggcatctctttccttg

SEQ ID NO: 5536495 - DNA, 25 bp, Homo sapien
taatacccggttgctatacacaaac

SEQ ID NO: 5536496 - DNA, 25 bp, Homo sapien
tgaacttgacagaataaacctcatc

SEQ ID NO: 5536497 - DNA, 25 bp, Homo sapien
ttctataagaaatactcagtagcaa

SEQ ID NO: 5536498 - DNA, 25 bp, Homo sapien
attaagatttggacatactagaccc

SEQ ID NO: 5536499 - DNA, 25 bp, Homo sapien
ggacatactagacccttactgtaac

SEQ ID NO: 5536500 - DNA, 25 bp, Homo sapien
agaatgaacttgaacttgacagaat

SEQ ID NO: 5536501 - DNA, 25 bp, Homo sapien
gaaacacttgtgcttttgcctacac

SEQ ID NO: 5536502 - DNA, 25 bp, Homo sapien
tcgaatacattgctagcttgaagcc

SEQ ID NO: 5536503 - DNA, 25 bp, Homo sapien
aatctgaaaactgtaattcgaatac

SEQ ID NO: 5536504 - DNA, 25 bp, Homo sapien
tactgtaactctacgtatgaacgac

SEQ ID NO: 5536505 - DNA, 25 bp, Homo sapien
cgtatgaacgacatagaattcagtt

SEQ ID NO: 5536506 - DNA, 25 bp, Homo sapien
ctgtaaaatttgcttctcggagatg

SEQ ID NO: 5536507 - DNA, 25 bp, Homo sapien
gataaacagtctacagcagtgtttt

SEQ ID NO: 5536508 - DNA, 25 bp, Homo sapien
gttgttctcgtcaactggggaactg

SEQ ID NO: 5536509 - DNA, 25 bp, Homo sapien
tcacatttgcaggctgaagggatgt

SEQ ID NO: 5536510 - DNA, 25 bp, Homo sapien
atcttgattacaagtccttgccatt

SEQ ID NO: 5536511 - DNA, 25 bp, Homo sapien
aatttgcttctcggagatggagctt

SEQ ID NO: 5536512 - DNA, 25 bp, Homo sapien
agttccaacatcagttgttacctct

SEQ ID NO: 5536513 - DNA, 25 bp, Homo sapien
tatcacatttgcaggctgaagggat

SEQ ID NO: 5536514 - DNA, 25 bp, Homo sapien
tgcttctcggagatggagctttcaa

SEQ ID NO: 5536515 - DNA, 25 bp, Homo sapien
tcggagatggagctttcaaatttgg

SEQ ID NO: 5536516 - DNA, 25 bp, Homo sapien
ggcagttatcacatttgcaggctga

SEQ ID NO: 5536517 - DNA, 25 bp, Homo sapien
taaaaatgaagcagcaggctttgac

SEQ ID NO: 5536518 - DNA, 25 bp, Homo sapien
aaatgagcaagaaaatcgcccagct

SEQ ID NO: 5536519 - DNA, 25 bp, Homo sapien
tataaaagcaaagtaacagaggagc

SEQ ID NO: 5536520 - DNA, 25 bp, Homo sapien
agcagcaggctttgacagaatttga

SEQ ID NO: 5536521 - DNA, 25 bp, Homo sapien
ggagatgcacctgaaaatgagcaag

SEQ ID NO: 5536522 - DNA, 25 bp, Homo sapien
gagctagaccttagaagaaagattc

SEQ ID NO: 5536523 - DNA, 25 bp, Homo sapien
ggcggccaaattcgcgccctcgccg

SEQ ID NO: 5536524 - DNA, 25 bp, Homo sapien
aaaatgatgagcatgaatctgcaat

SEQ ID NO: 5536525 - DNA, 25 bp, Homo sapien
gactacagccaggagatgcacctga

SEQ ID NO: 5536526 - DNA, 25 bp, Homo sapien
aagccctcaaagatgctcatgaaga

SEQ ID NO: 5536527 - DNA, 25 bp, Homo sapien
gtaacagaggagctagaccttagaa

SEQ ID NO: 5536528 - DNA, 25 bp, Homo sapien
gttcctgagcccaccgcaggctgaa

SEQ ID NO: 5536529 - DNA, 25 bp, Homo sapien
ccgggctcgtcgctttctccatccc

SEQ ID NO: 5536530 - DNA, 25 bp, Homo sapien
tcttctgcgtttggagttgctcccc

SEQ ID NO: 5536531 - DNA, 25 bp, Homo sapien
gcgaagacccaaggaccactcttct

SEQ ID NO: 5536532 - DNA, 25 bp, Homo sapien
ggccgcagcttgcctgcgcgctctg

SEQ ID NO: 5536533 - DNA, 25 bp, Homo sapien
ggcaacgccaagcctgagtcctttc

SEQ ID NO: 5536534 - DNA, 25 bp, Homo sapien
caactcgcgagcaaagtttggtgga

SEQ ID NO: 5536535 - DNA, 25 bp, Homo sapien
gcgcgctctgagccttcgcaactcg

SEQ ID NO: 5536536 - DNA, 25 bp, Homo sapien
gcgggcgtcatgcccgcgctcctcc

SEQ ID NO: 5536537 - DNA, 25 bp, Homo sapien
ttctccatcccgacccacgcggggc

SEQ ID NO: 5536538 - DNA, 25 bp, Homo sapien
cctcggttcctgagcccaccgcagg

SEQ ID NO: 5536539 - DNA, 25 bp, Homo sapien
gcaggtaaagctttgtccatgggtg

SEQ ID NO: 5536540 - DNA, 25 bp, Homo sapien
ctgatgctgtgaaagactctacctc

SEQ ID NO: 5536541 - DNA, 25 bp, Homo sapien
aagtgctgccctgctaaccactgcc

SEQ ID NO: 5536542 - DNA, 25 bp, Homo sapien
ttgtccatgggtgctaagctcagga

SEQ ID NO: 5536543 - DNA, 25 bp, Homo sapien
accaatgagggacgctgcctctttg

SEQ ID NO: 5536544 - DNA, 25 bp, Homo sapien
atgagacaactagttcctgccaagc

SEQ ID NO: 5536545 - DNA, 25 bp, Homo sapien
acagacagtgttgtagacaagacat

SEQ ID NO: 5536546 - DNA, 25 bp, Homo sapien
ctggtggtccagctcctagagatac

SEQ ID NO: 5536547 - DNA, 25 bp, Homo sapien
aaataatagcaaagaatgagacaac

SEQ ID NO: 5536548 - DNA, 25 bp, Homo sapien
acagaatgactgcctcctggtggtc

SEQ ID NO: 5536549 - DNA, 25 bp, Homo sapien
gacgctgcctctttggggatttctc

SEQ ID NO: 5536550 - DNA, 25 bp, Homo sapien
tgtatggaaccgtaaacttgcaata

SEQ ID NO: 5536551 - DNA, 25 bp, Homo sapien
attagtggtgtggacccccccacac

SEQ ID NO: 5536552 - DNA, 25 bp, Homo sapien
gaggttcggtacgagccatctcgaa

SEQ ID NO: 5536553 - DNA, 25 bp, Homo sapien
ttcatcctccgcggagctacaggct

SEQ ID NO: 5536554 - DNA, 25 bp, Homo sapien
atcggcagatgtattggtccagccc

SEQ ID NO: 5536555 - DNA, 25 bp, Homo sapien
gagaacctgcgggcaggctttcatc

SEQ ID NO: 5536556 - DNA, 25 bp, Homo sapien
tcaccactccaggagaacctgcggg

SEQ ID NO: 5536557 - DNA, 25 bp, Homo sapien
tgtcgcctgccattcggccagggca

SEQ ID NO: 5536558 - DNA, 25 bp, Homo sapien
gcccccttccgacagaggctcacca

SEQ ID NO: 5536559 - DNA, 25 bp, Homo sapien
gccgcagagccatccgccttctgtc

SEQ ID NO: 5536560 - DNA, 25 bp, Homo sapien
gagccatctcgaatggaagaagaag

SEQ ID NO: 5536561 - DNA, 25 bp, Homo sapien
tctgtgccactcatgttgcagcatt

SEQ ID NO: 5536562 - DNA, 25 bp, Homo sapien
catctgatccatagtaatttagtac

SEQ ID NO: 5536563 - DNA, 25 bp, Homo sapien
ctgtgtactcccctctgtgccactc

SEQ ID NO: 5536564 - DNA, 25 bp, Homo sapien
aatcagtacataaattaattcaact

SEQ ID NO: 5536565 - DNA, 25 bp, Homo sapien
gctgtattcagatcaccaccttccc

SEQ ID NO: 5536566 - DNA, 25 bp, Homo sapien
tttcataatagctcatccacttaac

SEQ ID NO: 5536567 - DNA, 25 bp, Homo sapien
aaactgctgctgtattcagatcacc

SEQ ID NO: 5536568 - DNA, 25 bp, Homo sapien
tccccacaccaaattaattgctctc

SEQ ID NO: 5536569 - DNA, 25 bp, Homo sapien
aaacggaacactttcaaactgctgc

SEQ ID NO: 5536570 - DNA, 25 bp, Homo sapien
taattgctctctctgtgtactcccc

SEQ ID NO: 5536571 - DNA, 25 bp, Homo sapien
atgttgcagcattatccatggctct

SEQ ID NO: 5536572 - DNA, 25 bp, Homo sapien
aacagggcagcttctgcttcatgcc

SEQ ID NO: 5536573 - DNA, 25 bp, Homo sapien
gtgaatgcacaggctttcaaaggtg

SEQ ID NO: 5536574 - DNA, 25 bp, Homo sapien
gcctctcttcggaaaggtcagccct

SEQ ID NO: 5536575 - DNA, 25 bp, Homo sapien
gtgcagcctgccatttccaacccca

SEQ ID NO: 5536576 - DNA, 25 bp, Homo sapien
cttaataccaacatgcagatccacc

SEQ ID NO: 5536577 - DNA, 25 bp, Homo sapien
tgattgtattctgcaaggtggggaa

SEQ ID NO: 5536578 - DNA, 25 bp, Homo sapien
aaggtgaatgtgcagcctgccattt

SEQ ID NO: 5536579 - DNA, 25 bp, Homo sapien
ctgccgttgtaaatgatcacaaaac

SEQ ID NO: 5536580 - DNA, 25 bp, Homo sapien
ttcattgtcaagtgaatgcacaggc

SEQ ID NO: 5536581 - DNA, 25 bp, Homo sapien
gtggggaatagccaactaccttcta

SEQ ID NO: 5536582 - DNA, 25 bp, Homo sapien
catgcagatccacctgagaatcact

SEQ ID NO: 5536583 - DNA, 25 bp, Homo sapien
ataagaagcatgatctcaatagacc

SEQ ID NO: 5536584 - DNA, 25 bp, Homo sapien
ggaagacagtgagctctcaccctaa

SEQ ID NO: 5536585 - DNA, 25 bp, Homo sapien
ttaccctagggggaactgatctatg

SEQ ID NO: 5536586 - DNA, 25 bp, Homo sapien
tgttgtcagggataatttgaggagg

SEQ ID NO: 5536587 - DNA, 25 bp, Homo sapien
cttagaactaggtgttgtcagggat

SEQ ID NO: 5536588 - DNA, 25 bp, Homo sapien
gtgtgattatgaaaggtgaagttga

SEQ ID NO: 5536589 - DNA, 25 bp, Homo sapien
atgagggatgattccaggcgtttta

SEQ ID NO: 5536590 - DNA, 25 bp, Homo sapien
tttgaggagggcttagtcttcagaa

SEQ ID NO: 5536591 - DNA, 25 bp, Homo sapien
cttgatgagagttgtacgaagatgg

SEQ ID NO: 5536592 - DNA, 25 bp, Homo sapien
ctaacccccaagatactgtgttctc

SEQ ID NO: 5536593 - DNA, 25 bp, Homo sapien
gggaaggctgcagataccattctaa

SEQ ID NO: 5536594 - DNA, 25 bp, Homo sapien
tagaggcatgtcacatggagtccat

SEQ ID NO: 5536595 - DNA, 25 bp, Homo sapien
cataaacagtcccaaaacagtgcgc

SEQ ID NO: 5536596 - DNA, 25 bp, Homo sapien
aagtgacagaagcaagtaaaattgc

SEQ ID NO: 5536597 - DNA, 25 bp, Homo sapien
cgtccttaactcaaggtggaagcaa

SEQ ID NO: 5536598 - DNA, 25 bp, Homo sapien
tggaagcaactggcaaactcaagaa

SEQ ID NO: 5536599 - DNA, 25 bp, Homo sapien
atgaacagatcgtaaagtgacagaa

SEQ ID NO: 5536600 - DNA, 25 bp, Homo sapien
tcccaaaacagtgcgctgaagagaa

SEQ ID NO: 5536601 - DNA, 25 bp, Homo sapien
aggtgaagatgagacacgtccttaa

SEQ ID NO: 5536602 - DNA, 25 bp, Homo sapien
atggtttgttgtcctgatggtgcac

SEQ ID NO: 5536603 - DNA, 25 bp, Homo sapien
aagagaagaaaggtgcttctgcaag

SEQ ID NO: 5536604 - DNA, 25 bp, Homo sapien
atattacacagttagagaagggaga

SEQ ID NO: 5536605 - DNA, 25 bp, Homo sapien
gagaacaggaatcaccatcagcttg

SEQ ID NO: 5536606 - DNA, 25 bp, Homo sapien
tatgtcctatagcacaaatcacttt

SEQ ID NO: 5536607 - DNA, 25 bp, Homo sapien
actagaaagaacataaactccttaa

SEQ ID NO: 5536608 - DNA, 25 bp, Homo sapien
taggtgagcaataaagattgggcaa

SEQ ID NO: 5536609 - DNA, 25 bp, Homo sapien
tttgaatcatgtgcaggtgcttaat

SEQ ID NO: 5536610 - DNA, 25 bp, Homo sapien
ataaataagtgattgatcctgctcc

SEQ ID NO: 5536611 - DNA, 25 bp, Homo sapien
atttggtctcctggttaactgggga

SEQ ID NO: 5536612 - DNA, 25 bp, Homo sapien
cctaccactcctaccaccaagtccc

SEQ ID NO: 5536613 - DNA, 25 bp, Homo sapien
gccataatctaagccacttccctgc

SEQ ID NO: 5536614 - DNA, 25 bp, Homo sapien
cttctgagaacaggaatcaccatca

SEQ ID NO: 5536615 - DNA, 25 bp, Homo sapien
taggggccgtcttatccttctttga

SEQ ID NO: 5536616 - DNA, 25 bp, Homo sapien
ctgctcaaacccagggccctgctca

SEQ ID NO: 5536617 - DNA, 25 bp, Homo sapien
cttcagagcagcaggacacctgctc

SEQ ID NO: 5536618 - DNA, 25 bp, Homo sapien
atgtcagccccctgcgctgcacgga

SEQ ID NO: 5536619 - DNA, 25 bp, Homo sapien
ggccttccccctggccgagtggcag

SEQ ID NO: 5536620 - DNA, 25 bp, Homo sapien
gccacagtcgctggacctgttgctc

SEQ ID NO: 5536621 - DNA, 25 bp, Homo sapien
gtcgctggacctgttgctctgcatc

SEQ ID NO: 5536622 - DNA, 25 bp, Homo sapien
aaacccagggccctgctcatcacct

SEQ ID NO: 5536623 - DNA, 25 bp, Homo sapien
ggacacctgctcaaacccagggccc

SEQ ID NO: 5536624 - DNA, 25 bp, Homo sapien
tgctctgcatcaacatggcccatgt

SEQ ID NO: 5536625 - DNA, 25 bp, Homo sapien
atcctgccacagtcgctggacctgt

SEQ ID NO: 5536626 - DNA, 25 bp, Homo sapien
caacatggcccatgtcagccccctg

SEQ ID NO: 5536627 - DNA, 25 bp, Homo sapien
acccggcttacatggccgacgtggg

SEQ ID NO: 5536628 - DNA, 25 bp, Homo sapien
atgaacggcatcaaccggccgctca

SEQ ID NO: 5536629 - DNA, 25 bp, Homo sapien
gagtgggcctctcctgtgccaactg

SEQ ID NO: 5536630 - DNA, 25 bp, Homo sapien
cttcgcgggctcctactccagcccc

SEQ ID NO: 5536631 - DNA, 25 bp, Homo sapien
tcctgtgccaactgccagaccacca

SEQ ID NO: 5536632 - DNA, 25 bp, Homo sapien
taccacaagatgaacggcatcaacc

SEQ ID NO: 5536633 - DNA, 25 bp, Homo sapien
aaccggccgctcatcaagcctcagc

SEQ ID NO: 5536634 - DNA, 25 bp, Homo sapien
ctcatcaagcctcagcgccggctgt

SEQ ID NO: 5536635 - DNA, 25 bp, Homo sapien
gtgtcaactgtggggctatgtccac

SEQ ID NO: 5536636 - DNA, 25 bp, Homo sapien
gacgacttctcagaaggcagagagt

SEQ ID NO: 5536637 - DNA, 25 bp, Homo sapien
tgcaacgcctgcggcctctaccaca

SEQ ID NO: 5536638 - DNA, 25 bp, Homo sapien
atgtagggagctaatgtgttcacta

SEQ ID NO: 5536639 - DNA, 25 bp, Homo sapien
cagggtcgcagcatctacactcact

SEQ ID NO: 5536640 - DNA, 25 bp, Homo sapien
cccagaccagatcagtgggctaagg

SEQ ID NO: 5536641 - DNA, 25 bp, Homo sapien
agactgcgtcccatgtagggagcta

SEQ ID NO: 5536642 - DNA, 25 bp, Homo sapien
tagctattgcttctcgcagggtcgc

SEQ ID NO: 5536643 - DNA, 25 bp, Homo sapien
cctgaaagtagatcccaaggccaga

SEQ ID NO: 5536644 - DNA, 25 bp, Homo sapien
cagcaaagacagtaagccaatcctc

SEQ ID NO: 5536645 - DNA, 25 bp, Homo sapien
attggaagcgaatccatcgcccatc

SEQ ID NO: 5536646 - DNA, 25 bp, Homo sapien
ttctgtcttggttaagggcagagac

SEQ ID NO: 5536647 - DNA, 25 bp, Homo sapien
ggctaagggtttgtcaaaggcagaa

SEQ ID NO: 5536648 - DNA, 25 bp, Homo sapien
gggggctttgtcattggaagcgaat

SEQ ID NO: 5536649 - DNA, 25 bp, Homo sapien
gctgaggcctgaagtcataaccaga

SEQ ID NO: 5536650 - DNA, 25 bp, Homo sapien
cataaccagacctggggcactcaga

SEQ ID NO: 5536651 - DNA, 25 bp, Homo sapien
gtgtgcacagaactcagaagtcaga

SEQ ID NO: 5536652 - DNA, 25 bp, Homo sapien
acagaacctttcagcccattggcaa

SEQ ID NO: 5536653 - DNA, 25 bp, Homo sapien
accactgaacagtgacagaaccttt

SEQ ID NO: 5536654 - DNA, 25 bp, Homo sapien
gcgattgcagagctcatagacgtga

SEQ ID NO: 5536655 - DNA, 25 bp, Homo sapien
agctcatagacgtgatgaagaccag

SEQ ID NO: 5536656 - DNA, 25 bp, Homo sapien
actgcagagcgattgcagagctcat

SEQ ID NO: 5536657 - DNA, 25 bp, Homo sapien
gcagcggctctggcttctgctgtga

SEQ ID NO: 5536658 - DNA, 25 bp, Homo sapien
gaactcagaagtcagaccactgaac

SEQ ID NO: 5536659 - DNA, 25 bp, Homo sapien
gtggagactccctctgtttggtccc

SEQ ID NO: 5536660 - DNA, 25 bp, Homo sapien
tcgtgttaagaatgaataggctggg

SEQ ID NO: 5536661 - DNA, 25 bp, Homo sapien
ggtgtttggattagtgttgatgctc

SEQ ID NO: 5536662 - DNA, 25 bp, Homo sapien
aacaatgcctgactccagtggtccc

SEQ ID NO: 5536663 - DNA, 25 bp, Homo sapien
ccacagcaattaagggtcatgataa

SEQ ID NO: 5536664 - DNA, 25 bp, Homo sapien
ttctgaaagatgaacggatctgctg

SEQ ID NO: 5536665 - DNA, 25 bp, Homo sapien
atggccccaaagtgcggtgtttgga

SEQ ID NO: 5536666 - DNA, 25 bp, Homo sapien
tataccactcacaatcaggacacta

SEQ ID NO: 5536667 - DNA, 25 bp, Homo sapien
atagacaaattaatcacaagccctc

SEQ ID NO: 5536668 - DNA, 25 bp, Homo sapien
ttggaggcatataccttaaagcacc

SEQ ID NO: 5536669 - DNA, 25 bp, Homo sapien
aggtcattcgaggtatatcaggctg

SEQ ID NO: 5536670 - DNA, 25 bp, Homo sapien
ttaatattggatagttggaggcata

SEQ ID NO: 5536671 - DNA, 25 bp, Homo sapien
tagagtctgaagatgctcatggtaa

SEQ ID NO: 5536672 - DNA, 25 bp, Homo sapien
ataaaaagacagattccgtttgctc

SEQ ID NO: 5536673 - DNA, 25 bp, Homo sapien
gagagagcatgtcagtgttacgttt

SEQ ID NO: 5536674 - DNA, 25 bp, Homo sapien
gtttgctctggactgtgttagctgc

SEQ ID NO: 5536675 - DNA, 25 bp, Homo sapien
ttttcagcacatctcagtcagcttc

SEQ ID NO: 5536676 - DNA, 25 bp, Homo sapien
aaaacagtctttgagagagcatgtc

SEQ ID NO: 5536677 - DNA, 25 bp, Homo sapien
aaccgcctggaagaaagctttccta

SEQ ID NO: 5536678 - DNA, 25 bp, Homo sapien
gtaagccatgagactaaccgcctgg

SEQ ID NO: 5536679 - DNA, 25 bp, Homo sapien
ggtaaatgcagattatagagctaac

SEQ ID NO: 5536680 - DNA, 25 bp, Homo sapien
tggactgtgttagctgcagtgcgga

SEQ ID NO: 5536681 - DNA, 25 bp, Homo sapien
agacagtgaagcttagctgagattc

SEQ ID NO: 5536682 - DNA, 25 bp, Homo sapien
cagaggaatggcctgccaccgttaa

SEQ ID NO: 5536683 - DNA, 25 bp, Homo sapien
gatgagacgatgagatgttacctcc

SEQ ID NO: 5536684 - DNA, 25 bp, Homo sapien
acaggaaaatgtgtatagatatgcc

SEQ ID NO: 5536685 - DNA, 25 bp, Homo sapien
ctcaacgcgattcactcagacttcc

SEQ ID NO: 5536686 - DNA, 25 bp, Homo sapien
tgcgacctgcctttgtgtgcgggtg

SEQ ID NO: 5536687 - DNA, 25 bp, Homo sapien
ggccgagttgcaacttcgcgacact

SEQ ID NO: 5536688 - DNA, 25 bp, Homo sapien
gagccgcaaaaccaggaactggtga

SEQ ID NO: 5536689 - DNA, 25 bp, Homo sapien
ttatgtactaatgtggaaccagctc

SEQ ID NO: 5536690 - DNA, 25 bp, Homo sapien
cactccactggagtgcgatgagacg

SEQ ID NO: 5536691 - DNA, 25 bp, Homo sapien
gtgggcagcatggcaattcctagta

SEQ ID NO: 5536692 - DNA, 25 bp, Homo sapien
gccaccgttaaaaagagcaaagctg

SEQ ID NO: 5536693 - DNA, 25 bp, Homo sapien
cctgttgtgcagactatacccacta

SEQ ID NO: 5536694 - DNA, 25 bp, Homo sapien
acagtcagcactcaaaatatcagca

SEQ ID NO: 5536695 - DNA, 25 bp, Homo sapien
acagagagtcaggtatgctatttgc

SEQ ID NO: 5536696 - DNA, 25 bp, Homo sapien
tatgctatttgctatgggaaagtgt

SEQ ID NO: 5536697 - DNA, 25 bp, Homo sapien
atattttgagaactctggaataaaa

SEQ ID NO: 5536698 - DNA, 25 bp, Homo sapien
ccactatttaagaggagagctggaa

SEQ ID NO: 5536699 - DNA, 25 bp, Homo sapien
atgggaaagtgtatattcctgccat

SEQ ID NO: 5536700 - DNA, 25 bp, Homo sapien
ccgtaaccccaaccactcaggaggc

SEQ ID NO: 5536701 - DNA, 25 bp, Homo sapien
atcaaagtaattacagtcagcactc

SEQ ID NO: 5536702 - DNA, 25 bp, Homo sapien
attcctgccatggttcctgttgtgc

SEQ ID NO: 5536703 - DNA, 25 bp, Homo sapien
ttagcacagagagtcaggtatgcta

SEQ ID NO: 5536704 - DNA, 25 bp, Homo sapien
ctgtagacacgggacccttttttga

SEQ ID NO: 5536705 - DNA, 25 bp, Homo sapien
gtgattgagctgcgagcatctctcc

SEQ ID NO: 5536706 - DNA, 25 bp, Homo sapien
tttctttagggtctggtagcatcat

SEQ ID NO: 5536707 - DNA, 25 bp, Homo sapien
tggttagttacaagcagtctagtgc

SEQ ID NO: 5536708 - DNA, 25 bp, Homo sapien
tccgacaaatgtttgggatccagtt

SEQ ID NO: 5536709 - DNA, 25 bp, Homo sapien
ttgagagtgctggtttccgacaaat

SEQ ID NO: 5536710 - DNA, 25 bp, Homo sapien
tagaagcagcaacaatcatcttggt

SEQ ID NO: 5536711 - DNA, 25 bp, Homo sapien
ttgggatccagttggaaaggttcca

SEQ ID NO: 5536712 - DNA, 25 bp, Homo sapien
ggtagcatcatgactgggacacttt

SEQ ID NO: 5536713 - DNA, 25 bp, Homo sapien
gtgtagggtatggcaccccttgcat

SEQ ID NO: 5536714 - DNA, 25 bp, Homo sapien
ctatagacccctgtgattgagctgc

SEQ ID NO: 5536715 - DNA, 25 bp, Homo sapien
aagtttgacagtgtatgttgtgttc

SEQ ID NO: 5536716 - DNA, 25 bp, Homo sapien
gacagttgtgttagaaacaggctac

SEQ ID NO: 5536717 - DNA, 25 bp, Homo sapien
atccaagtttagtgacagtttgctc

SEQ ID NO: 5536718 - DNA, 25 bp, Homo sapien
tggatttcaggattatgacagttgt

SEQ ID NO: 5536719 - DNA, 25 bp, Homo sapien
gaacattagaggtacgactttatta

SEQ ID NO: 5536720 - DNA, 25 bp, Homo sapien
tcagattctcaaagggcttataacc

SEQ ID NO: 5536721 - DNA, 25 bp, Homo sapien
ttggatccctgatgtaaagtttgac

SEQ ID NO: 5536722 - DNA, 25 bp, Homo sapien
ctaggacccagagcttcatgtgttt

SEQ ID NO: 5536723 - DNA, 25 bp, Homo sapien
ttcctaggagatgatccacagcttt

SEQ ID NO: 5536724 - DNA, 25 bp, Homo sapien
catgtgtttaaatagggaatcttcc

SEQ ID NO: 5536725 - DNA, 25 bp, Homo sapien
tatgtctgagttatgttggatccct

SEQ ID NO: 5536726 - DNA, 25 bp, Homo sapien
atttcagccgtagatgagttgttgt

SEQ ID NO: 5536727 - DNA, 25 bp, Homo sapien
acaaacttaaaggacacactacact

SEQ ID NO: 5536728 - DNA, 25 bp, Homo sapien
ccagttgtctggcttcttaaggaag

SEQ ID NO: 5536729 - DNA, 25 bp, Homo sapien
aagaatttgtaacgtgaacattcac

SEQ ID NO: 5536730 - DNA, 25 bp, Homo sapien
tcagcaaaagcttgtccacgcatat

SEQ ID NO: 5536731 - DNA, 25 bp, Homo sapien
gtcatggatggagagaaatctctac

SEQ ID NO: 5536732 - DNA, 25 bp, Homo sapien
agcaattggcatatagaaaagtaga

SEQ ID NO: 5536733 - DNA, 25 bp, Homo sapien
aaggaagaattgtatgtcatggatg

SEQ ID NO: 5536734 - DNA, 25 bp, Homo sapien
tggctgttttaagatcaaagcgtcc

SEQ ID NO: 5536735 - DNA, 25 bp, Homo sapien
gtagatgagttgttgtggctgtttt

SEQ ID NO: 5536736 - DNA, 25 bp, Homo sapien
tttatatataggagtgccagttgtc

SEQ ID NO: 5536737 - DNA, 25 bp, Homo sapien
acagtctgcctaacagggccattgc

SEQ ID NO: 5536738 - DNA, 25 bp, Homo sapien
agaaaatctgaatgtccttggtgtc

SEQ ID NO: 5536739 - DNA, 25 bp, Homo sapien
ccacttaggatagatgaagcaaacc

SEQ ID NO: 5536740 - DNA, 25 bp, Homo sapien
cattgctaccaactgtggagccagc

SEQ ID NO: 5536741 - DNA, 25 bp, Homo sapien
gtggagccagctcttagactgaggt

SEQ ID NO: 5536742 - DNA, 25 bp, Homo sapien
gtaaggtctgaacattgggtgtttc

SEQ ID NO: 5536743 - DNA, 25 bp, Homo sapien
taagtaagaatagcagaagtcgttt

SEQ ID NO: 5536744 - DNA, 25 bp, Homo sapien
tatgaaaataggtataggaaagaaa

SEQ ID NO: 5536745 - DNA, 25 bp, Homo sapien
aaagaaaggagttcgtgcttaactc

SEQ ID NO: 5536746 - DNA, 25 bp, Homo sapien
tgccaatgcagaaaaacagacaaat

SEQ ID NO: 5536747 - DNA, 25 bp, Homo sapien
ctgaagacatgaggtgctatcactg

SEQ ID NO: 5536748 - DNA, 25 bp, Homo sapien
atctactcagaggtccgctagagct

SEQ ID NO: 5536749 - DNA, 25 bp, Homo sapien
ctgtgtgtgtcatgctgagtcagca

SEQ ID NO: 5536750 - DNA, 25 bp, Homo sapien
atggagatatgcgcacatgagcatg

SEQ ID NO: 5536751 - DNA, 25 bp, Homo sapien
ggagagctattagcagctccgtgct

SEQ ID NO: 5536752 - DNA, 25 bp, Homo sapien
tctgcataaatgagaatacaagatc

SEQ ID NO: 5536753 - DNA, 25 bp, Homo sapien
ggtctttcagtggtatggaaggtca

SEQ ID NO: 5536754 - DNA, 25 bp, Homo sapien
gtcaacaggggacaagtcattctca

SEQ ID NO: 5536755 - DNA, 25 bp, Homo sapien
ccgctagagctcacaaactaaggca

SEQ ID NO: 5536756 - DNA, 25 bp, Homo sapien
aagcaaacatgcattaatggagagc

SEQ ID NO: 5536757 - DNA, 25 bp, Homo sapien
ctgtacaatgatggagatatgcgca

SEQ ID NO: 5536758 - DNA, 25 bp, Homo sapien
ttagtttagcacctcctggcagttc

SEQ ID NO: 5536759 - DNA, 25 bp, Homo sapien
tctactgtaaactcataaaagcctt

SEQ ID NO: 5536760 - DNA, 25 bp, Homo sapien
catactgtacgcatgtcgcagggtt

SEQ ID NO: 5536761 - DNA, 25 bp, Homo sapien
atttgcgcagaccattttaagattt

SEQ ID NO: 5536762 - DNA, 25 bp, Homo sapien
ttgtgcatgtactgctaaacaattc

SEQ ID NO: 5536763 - DNA, 25 bp, Homo sapien
ttcccaagtgtagttagagaatagg

SEQ ID NO: 5536764 - DNA, 25 bp, Homo sapien
gtcgcagggttaagtatgatgcaga

SEQ ID NO: 5536765 - DNA, 25 bp, Homo sapien
cttaacagactggaacgaaacattt

SEQ ID NO: 5536766 - DNA, 25 bp, Homo sapien
atgcccggggaaatttcatagctat

SEQ ID NO: 5536767 - DNA, 25 bp, Homo sapien
ttgttcactaagaggaccttttcta

SEQ ID NO: 5536768 - DNA, 25 bp, Homo sapien
caaagaatctagtaaaatattgtgc

SEQ ID NO: 5536769 - DNA, 25 bp, Homo sapien
atgatgcagaggttaaagtctgttt

SEQ ID NO: 5536770 - DNA, 25 bp, Homo sapien
gatctcaacggtcctgccctcggtc

SEQ ID NO: 5536771 - DNA, 25 bp, Homo sapien
caggcaccgcacgcgcttcgtattt

SEQ ID NO: 5536772 - DNA, 25 bp, Homo sapien
tatttcagaaggcgctgcgttccct

SEQ ID NO: 5536773 - DNA, 25 bp, Homo sapien
gtacccactgccgctgcgcagcggg

SEQ ID NO: 5536774 - DNA, 25 bp, Homo sapien
tgctctaccgggagcacctgaatcc

SEQ ID NO: 5536775 - DNA, 25 bp, Homo sapien
gacttgcggaagtccaggactcttc

SEQ ID NO: 5536776 - DNA, 25 bp, Homo sapien
agcccgagtgatactgctgtgctct

SEQ ID NO: 5536777 - DNA, 25 bp, Homo sapien
atcccgactccagaactggcggcgt

SEQ ID NO: 5536778 - DNA, 25 bp, Homo sapien
gggaaggaagctaagatcctacagc

SEQ ID NO: 5536779 - DNA, 25 bp, Homo sapien
tcttcgttcgctggctgaccgagtg

SEQ ID NO: 5536780 - DNA, 25 bp, Homo sapien
gatcctacagcacttcggagacggg

SEQ ID NO: 5536781 - DNA, 25 bp, Homo sapien
gttatcaagaaaacgctaatgaaat

SEQ ID NO: 5536782 - DNA, 25 bp, Homo sapien
aatccacccacagctgaatttattc

SEQ ID NO: 5536783 - DNA, 25 bp, Homo sapien
agttacaacactttaagacagcgtt

SEQ ID NO: 5536784 - DNA, 25 bp, Homo sapien
cacgcatgcatgtaggaactagcta

SEQ ID NO: 5536785 - DNA, 25 bp, Homo sapien
attcagggtgtaaacatatattttc

SEQ ID NO: 5536786 - DNA, 25 bp, Homo sapien
aatgttaaaagaattgacttgaatg

SEQ ID NO: 5536787 - DNA, 25 bp, Homo sapien
tctgcatatacttgtgcacgcatgc

SEQ ID NO: 5536788 - DNA, 25 bp, Homo sapien
gacttgaatgttatatttaggtttc

SEQ ID NO: 5536789 - DNA, 25 bp, Homo sapien
tgtgtgtgtctgcatatacttgtgc

SEQ ID NO: 5536790 - DNA, 25 bp, Homo sapien
tagttcacatagattactgatttgt

SEQ ID NO: 5536791 - DNA, 25 bp, Homo sapien
atgcatgtaggaactagctaatttt

SEQ ID NO: 5536792 - DNA, 25 bp, Homo sapien
tacactctatgtactacccacccat

SEQ ID NO: 5536793 - DNA, 25 bp, Homo sapien
ctgggctgtgaatcatttctttgtc

SEQ ID NO: 5536794 - DNA, 25 bp, Homo sapien
aatggtgtggttttctgagtactgt

SEQ ID NO: 5536795 - DNA, 25 bp, Homo sapien
tttgtcggtatgtaataggtgttgg

SEQ ID NO: 5536796 - DNA, 25 bp, Homo sapien
tgatgaaatcttgtgtgatctgctc

SEQ ID NO: 5536797 - DNA, 25 bp, Homo sapien
gatgtcatagttacagtagtcctgc

SEQ ID NO: 5536798 - DNA, 25 bp, Homo sapien
catgggaaactgtggtcaaaaatat

SEQ ID NO: 5536799 - DNA, 25 bp, Homo sapien
agtagctcatcctaagaacctggtt

SEQ ID NO: 5536800 - DNA, 25 bp, Homo sapien
ccagaataagtaaagtttgagatac

SEQ ID NO: 5536801 - DNA, 25 bp, Homo sapien
gaaaaaatccactacagcagaatta

SEQ ID NO: 5536802 - DNA, 25 bp, Homo sapien
gcagaattatgcttcaggttcctac

SEQ ID NO: 5536803 - DNA, 25 bp, Homo sapien
tgttgctcaaatgccaaggtgtgtc

SEQ ID NO: 5536804 - DNA, 25 bp, Homo sapien
tggccaccactctgaagcaagctca

SEQ ID NO: 5536805 - DNA, 25 bp, Homo sapien
atggtgctggtatcaaggctcagat

SEQ ID NO: 5536806 - DNA, 25 bp, Homo sapien
agagagttctcctcgccaagccctc

SEQ ID NO: 5536807 - DNA, 25 bp, Homo sapien
ctgccagcatccatcgtcgagttcc

SEQ ID NO: 5536808 - DNA, 25 bp, Homo sapien
gaatacctgaaagacacgctgcaga

SEQ ID NO: 5536809 - DNA, 25 bp, Homo sapien
tgctggccagaaaggcaactattca

SEQ ID NO: 5536810 - DNA, 25 bp, Homo sapien
tacactttgccagaaggactgctgc

SEQ ID NO: 5536811 - DNA, 25 bp, Homo sapien
acgctgcagaaatggatccacatgt

SEQ ID NO: 5536812 - DNA, 25 bp, Homo sapien
caaggtgtgtctgaccaagctgtgg

SEQ ID NO: 5536813 - DNA, 25 bp, Homo sapien
tcatgtacgtgaagagcatgaaggg

SEQ ID NO: 5536814 - DNA, 25 bp, Homo sapien
ggctggaggtacaatgctccaaacc

SEQ ID NO: 5536815 - DNA, 25 bp, Homo sapien
tgcaattagatacaaggagacagaa

SEQ ID NO: 5536816 - DNA, 25 bp, Homo sapien
ttttctctcaagagggaagaggaag

SEQ ID NO: 5536817 - DNA, 25 bp, Homo sapien
gaaatgtgagataattggcagaata

SEQ ID NO: 5536818 - DNA, 25 bp, Homo sapien
ctgaagcagaagagttttaattgct

SEQ ID NO: 5536819 - DNA, 25 bp, Homo sapien
aaaccatgcaaatgagaggtggaaa

SEQ ID NO: 5536820 - DNA, 25 bp, Homo sapien
ccttagagtctatggctggaggtac

SEQ ID NO: 5536821 - DNA, 25 bp, Homo sapien
accagctactctatcttaggagcct

SEQ ID NO: 5536822 - DNA, 25 bp, Homo sapien
ggtggaaagacaagtccatcatctg

SEQ ID NO: 5536823 - DNA, 25 bp, Homo sapien
atatgttgtcagttattccagagcc

SEQ ID NO: 5536824 - DNA, 25 bp, Homo sapien
aatgagagtgacactgcactgaaat

SEQ ID NO: 5536825 - DNA, 25 bp, Homo sapien
aatgaagatagagaacagagctctt

SEQ ID NO: 5536826 - DNA, 25 bp, Homo sapien
gtggtgaactcagagcaagaacttc

SEQ ID NO: 5536827 - DNA, 25 bp, Homo sapien
aaaaacatgtggtgaactcagagca

SEQ ID NO: 5536828 - DNA, 25 bp, Homo sapien
aagcctgtactaccacacactaagc

SEQ ID NO: 5536829 - DNA, 25 bp, Homo sapien
gtgtggtaagagtatttcttgttgt

SEQ ID NO: 5536830 - DNA, 25 bp, Homo sapien
gatagagaacagagctcttggtttt

SEQ ID NO: 5536831 - DNA, 25 bp, Homo sapien
aattacaaaaacatgtggtgaactc

SEQ ID NO: 5536832 - DNA, 25 bp, Homo sapien
ctgtacacagaaaattctaagtata

SEQ ID NO: 5536833 - DNA, 25 bp, Homo sapien
attgaacactgcagatattaccggt

SEQ ID NO: 5536834 - DNA, 25 bp, Homo sapien
ctcttggttttttgaacagtgtggt

SEQ ID NO: 5536835 - DNA, 25 bp, Homo sapien
agagcaagaacttcaagcctgtact

SEQ ID NO: 5536836 - DNA, 25 bp, Homo sapien
gcttggatgtggtaccattgaatac

SEQ ID NO: 5536837 - DNA, 25 bp, Homo sapien
ttaattaggtttagacaaagtcatg

SEQ ID NO: 5536838 - DNA, 25 bp, Homo sapien
atcagtgttgattatggtaagcata

SEQ ID NO: 5536839 - DNA, 25 bp, Homo sapien
agggccctcatcaacggaattagtg

SEQ ID NO: 5536840 - DNA, 25 bp, Homo sapien
ttggcagcactaggaaactagttaa

SEQ ID NO: 5536841 - DNA, 25 bp, Homo sapien
ttcatatgttaaagccctaccccac

SEQ ID NO: 5536842 - DNA, 25 bp, Homo sapien
ttaaaacaatgtacatcagtgttga

SEQ ID NO: 5536843 - DNA, 25 bp, Homo sapien
tacaagacttgcttggatgtggtac

SEQ ID NO: 5536844 - DNA, 25 bp, Homo sapien
aatcagataggtttctgtgtaaaat

SEQ ID NO: 5536845 - DNA, 25 bp, Homo sapien
ttagacaaagtcatgagcatagggc

SEQ ID NO: 5536846 - DNA, 25 bp, Homo sapien
ttaaagccctaccccacaatgtgac

SEQ ID NO: 5536847 - DNA, 25 bp, Homo sapien
tcagcaagctgtagagatggtatta

SEQ ID NO: 5536848 - DNA, 25 bp, Homo sapien
ggagctcagagacttaaaatgactc

SEQ ID NO: 5536849 - DNA, 25 bp, Homo sapien
gctttatttgaggacgagcgctcac

SEQ ID NO: 5536850 - DNA, 25 bp, Homo sapien
tcactccaatgaaacccatgaccac

SEQ ID NO: 5536851 - DNA, 25 bp, Homo sapien
aggattaccagggtagaaatgggta

SEQ ID NO: 5536852 - DNA, 25 bp, Homo sapien
gccttgtgcccctagaactgggctg

SEQ ID NO: 5536853 - DNA, 25 bp, Homo sapien
agcaggtaactaggagtatccctac

SEQ ID NO: 5536854 - DNA, 25 bp, Homo sapien
ttcaatacagatggggaaagataat

SEQ ID NO: 5536855 - DNA, 25 bp, Homo sapien
tctgtgatccttaaagcatctcagc

SEQ ID NO: 5536856 - DNA, 25 bp, Homo sapien
ctcccagaacaaagccaagactttg

SEQ ID NO: 5536857 - DNA, 25 bp, Homo sapien
acaagaggaaacgttaataccattc

SEQ ID NO: 5536858 - DNA, 25 bp, Homo sapien
cacttgcgtccacgaaagcagcgtg

SEQ ID NO: 5536859 - DNA, 25 bp, Homo sapien
tgcgcaccatttccgctgtgggggc

SEQ ID NO: 5536860 - DNA, 25 bp, Homo sapien
tcttccaacgaaatcccagagcagc

SEQ ID NO: 5536861 - DNA, 25 bp, Homo sapien
ggggcattcgtacaagtttccgctg

SEQ ID NO: 5536862 - DNA, 25 bp, Homo sapien
acccgcgcgacacttctgcaatctg

SEQ ID NO: 5536863 - DNA, 25 bp, Homo sapien
cgcaccctgccttcacgcccggttc

SEQ ID NO: 5536864 - DNA, 25 bp, Homo sapien
gggagcccgcaagtctctccagatc

SEQ ID NO: 5536865 - DNA, 25 bp, Homo sapien
cagtcaagaagtcgcacgccttttg

SEQ ID NO: 5536866 - DNA, 25 bp, Homo sapien
aagggccagagtctcacacttgcct

SEQ ID NO: 5536867 - DNA, 25 bp, Homo sapien
ccatcttcccactcgcgcaacgcac

SEQ ID NO: 5536868 - DNA, 25 bp, Homo sapien
ttcttacaaataaagggccagagtc

SEQ ID NO: 5536869 - DNA, 25 bp, Homo sapien
cccccagggaagtctataccttaga

SEQ ID NO: 5536870 - DNA, 25 bp, Homo sapien
aagagtcaacagaactatactggaa

SEQ ID NO: 5536871 - DNA, 25 bp, Homo sapien
ttcctccaacctgagattaagattt

SEQ ID NO: 5536872 - DNA, 25 bp, Homo sapien
caggatgtatgagcttttgagaaat

SEQ ID NO: 5536873 - DNA, 25 bp, Homo sapien
atgatgtgtgcttgccaaaggatat

SEQ ID NO: 5536874 - DNA, 25 bp, Homo sapien
gagcttttgagaaatgctgactttc

SEQ ID NO: 5536875 - DNA, 25 bp, Homo sapien
acatggcaattaatcaacttgaagt

SEQ ID NO: 5536876 - DNA, 25 bp, Homo sapien
cctagagtgaagcatttttgacgtg

SEQ ID NO: 5536877 - DNA, 25 bp, Homo sapien
ccttagagtttgcctgtacagtcct

SEQ ID NO: 5536878 - DNA, 25 bp, Homo sapien
tagaaacagaatgtaacttgctgat

SEQ ID NO: 5536879 - DNA, 25 bp, Homo sapien
tcagcaagttaggtgtatgtacagt

SEQ ID NO: 5536880 - DNA, 25 bp, Homo sapien
aacttgtcaagcaacccgaaaggct

SEQ ID NO: 5536881 - DNA, 25 bp, Homo sapien
attaccgaggaaaagaatcaataca

SEQ ID NO: 5536882 - DNA, 25 bp, Homo sapien
caggagtgacactaatcatggtctg

SEQ ID NO: 5536883 - DNA, 25 bp, Homo sapien
gtactctggcctggaacactgagca

SEQ ID NO: 5536884 - DNA, 25 bp, Homo sapien
ggtctgaaccctgccaatggaactt

SEQ ID NO: 5536885 - DNA, 25 bp, Homo sapien
taacacaggttaacatggcacatgg

SEQ ID NO: 5536886 - DNA, 25 bp, Homo sapien
ctaagggctgcccaagcaacttgtc

SEQ ID NO: 5536887 - DNA, 25 bp, Homo sapien
atggtctggaagctagcctatcgca

SEQ ID NO: 5536888 - DNA, 25 bp, Homo sapien
gagaatatggaagacataaatctgc

SEQ ID NO: 5536889 - DNA, 25 bp, Homo sapien
gaaagacagcaaagtgtccctccct

SEQ ID NO: 5536890 - DNA, 25 bp, Homo sapien
acccgaaaggctgcacctgatttgc

SEQ ID NO: 5536891 - DNA, 25 bp, Homo sapien
ccagatacgaatcctttgacagttc

SEQ ID NO: 5536892 - DNA, 25 bp, Homo sapien
agtgtaaagggatcttgagaccaaa

SEQ ID NO: 5536893 - DNA, 25 bp, Homo sapien
ttgagaccaaaagttttgagaattg

SEQ ID NO: 5536894 - DNA, 25 bp, Homo sapien
acttttgaagagtgtaaagggatct

SEQ ID NO: 5536895 - DNA, 25 bp, Homo sapien
attaagctaaatgttaaagagattt

SEQ ID NO: 5536896 - DNA, 25 bp, Homo sapien
caatgacttttgtatgaggttcttt

SEQ ID NO: 5536897 - DNA, 25 bp, Homo sapien
tacagaagccatgtttttatgcatc

SEQ ID NO: 5536898 - DNA, 25 bp, Homo sapien
tcaatagatttaacccacatacatg

SEQ ID NO: 5536899 - DNA, 25 bp, Homo sapien
catgaaaactctttggggttctcac

SEQ ID NO: 5536900 - DNA, 25 bp, Homo sapien
ttgacagttccatgcattgcaaaca

SEQ ID NO: 5536901 - DNA, 25 bp, Homo sapien
attgctgttctaatgcatggctgtc

SEQ ID NO: 5536902 - DNA, 25 bp, Homo sapien
gagacgctggaagttaagcaatact

SEQ ID NO: 5536903 - DNA, 25 bp, Homo sapien
aatccatccctcttgtcggggacct

SEQ ID NO: 5536904 - DNA, 25 bp, Homo sapien
actgcaggcaagcacattgaagaaa

SEQ ID NO: 5536905 - DNA, 25 bp, Homo sapien
aagccaggctatcttccaaggaagg

SEQ ID NO: 5536906 - DNA, 25 bp, Homo sapien
acagacactacacaaggagacgctg

SEQ ID NO: 5536907 - DNA, 25 bp, Homo sapien
cccatgtggaatctgtgagtgtcct

SEQ ID NO: 5536908 - DNA, 25 bp, Homo sapien
cagacaggatttcagttccgggagg

SEQ ID NO: 5536909 - DNA, 25 bp, Homo sapien
caagcacattgaagaaagacactgg

SEQ ID NO: 5536910 - DNA, 25 bp, Homo sapien
gcagaaaactagcagacgtcagctc

SEQ ID NO: 5536911 - DNA, 25 bp, Homo sapien
tcctgggcacagacactacacaagg

SEQ ID NO: 5536912 - DNA, 25 bp, Homo sapien
ccagagcctccctcgaaggttctct

SEQ ID NO: 5536913 - DNA, 25 bp, Homo sapien
ttttggtaatacagattgattcttc

SEQ ID NO: 5536914 - DNA, 25 bp, Homo sapien
taacaaaacgatgtcagttatccgt

SEQ ID NO: 5536915 - DNA, 25 bp, Homo sapien
cctatgctaaaaactgataagtgat

SEQ ID NO: 5536916 - DNA, 25 bp, Homo sapien
attgccgctctggcagtagtgagct

SEQ ID NO: 5536917 - DNA, 25 bp, Homo sapien
agtagtgagctatgatacagttaac

SEQ ID NO: 5536918 - DNA, 25 bp, Homo sapien
aatggctgccagcaaccaaattgta

SEQ ID NO: 5536919 - DNA, 25 bp, Homo sapien
tcccctccttagtggtcagctactc

SEQ ID NO: 5536920 - DNA, 25 bp, Homo sapien
atcaagaaacccagaatggctgcca

SEQ ID NO: 5536921 - DNA, 25 bp, Homo sapien
gtcagctactccatgagaccaccat

SEQ ID NO: 5536922 - DNA, 25 bp, Homo sapien
taatcaggtggcttaataacttttg

SEQ ID NO: 5536923 - DNA, 25 bp, Homo sapien
ctaaaatcaagaaacccagaatggc

SEQ ID NO: 5536924 - DNA, 25 bp, Homo sapien
ggccttagaagccggcagcaattca

SEQ ID NO: 5536925 - DNA, 25 bp, Homo sapien
tccattcgtcagccccacaagtccc

SEQ ID NO: 5536926 - DNA, 25 bp, Homo sapien
ctacaatagtaggataagtggagag

SEQ ID NO: 5536927 - DNA, 25 bp, Homo sapien
gatacagtagtgagttaggcacgat

SEQ ID NO: 5536928 - DNA, 25 bp, Homo sapien
taggtccgtggagtttgttgttgaa

SEQ ID NO: 5536929 - DNA, 25 bp, Homo sapien
attccaaggaccagggattactcac

SEQ ID NO: 5536930 - DNA, 25 bp, Homo sapien
tgctctgtatcccagccaaggagct

SEQ ID NO: 5536931 - DNA, 25 bp, Homo sapien
aaggtgttttgttagagtcagagac

SEQ ID NO: 5536932 - DNA, 25 bp, Homo sapien
agactaaaagtaagccaccgtctac

SEQ ID NO: 5536933 - DNA, 25 bp, Homo sapien
tccgccagagtttgctccgcccttt

SEQ ID NO: 5536934 - DNA, 25 bp, Homo sapien
ccggcagcaattcactaaaagatcc

SEQ ID NO: 5536935 - DNA, 25 bp, Homo sapien
gaagctacttaggggcatacattac

SEQ ID NO: 5536936 - DNA, 25 bp, Homo sapien
aggagggacagatgattatttcgtt

SEQ ID NO: 5536937 - DNA, 25 bp, Homo sapien
cggacacagtgattcgaagctactt

SEQ ID NO: 5536938 - DNA, 25 bp, Homo sapien
gagggctgatgagtcaaacatccct

SEQ ID NO: 5536939 - DNA, 25 bp, Homo sapien
agcatgctgggcaccgatctctttg

SEQ ID NO: 5536940 - DNA, 25 bp, Homo sapien
cggaagttctgaatcaagaggagtg

SEQ ID NO: 5536941 - DNA, 25 bp, Homo sapien
tgaatttatagagctgaggaagtgg

SEQ ID NO: 5536942 - DNA, 25 bp, Homo sapien
acccaaggcgtatacctgccctgtt

SEQ ID NO: 5536943 - DNA, 25 bp, Homo sapien
aagacgaaaactctgcggaagttct

SEQ ID NO: 5536944 - DNA, 25 bp, Homo sapien
gtggctgaaagctaggaagtttcaa

SEQ ID NO: 5536945 - DNA, 25 bp, Homo sapien
agtgaatgagagccacaagtctgaa

SEQ ID NO: 5536946 - DNA, 25 bp, Homo sapien
acaggacaactctcttcacacaagg

SEQ ID NO: 5536947 - DNA, 25 bp, Homo sapien
ctaaaatgaggctaaataggaaagg

SEQ ID NO: 5536948 - DNA, 25 bp, Homo sapien
ctacatgtgttgactgcattctaaa

SEQ ID NO: 5536949 - DNA, 25 bp, Homo sapien
tctctgaagcacatcactttcctat

SEQ ID NO: 5536950 - DNA, 25 bp, Homo sapien
taggaaaggtgccattagctctgag

SEQ ID NO: 5536951 - DNA, 25 bp, Homo sapien
aaggaggaacccttctctgaagcac

SEQ ID NO: 5536952 - DNA, 25 bp, Homo sapien
gaaggagcacaggacaactctcttc

SEQ ID NO: 5536953 - DNA, 25 bp, Homo sapien
gaggctaaataggaaaggtgccatt

SEQ ID NO: 5536954 - DNA, 25 bp, Homo sapien
tgactgcattctaaaatgaggctaa

SEQ ID NO: 5536955 - DNA, 25 bp, Homo sapien
cctcaacattaaggaggaacccttc

SEQ ID NO: 5536956 - DNA, 25 bp, Homo sapien
attagctctgagtgattaaagccat

SEQ ID NO: 5536957 - DNA, 25 bp, Homo sapien
aaaacactattgtatggcactgagt

SEQ ID NO: 5536958 - DNA, 25 bp, Homo sapien
ctgtaaaatcttaactgggacattc

SEQ ID NO: 5536959 - DNA, 25 bp, Homo sapien
aactgggacattctatatagaacac

SEQ ID NO: 5536960 - DNA, 25 bp, Homo sapien
tgtagattcagataacctgtaaacc

SEQ ID NO: 5536961 - DNA, 25 bp, Homo sapien
cataacttaaaaggccaaacctgag

SEQ ID NO: 5536962 - DNA, 25 bp, Homo sapien
attaaaggtcttcagccataactta

SEQ ID NO: 5536963 - DNA, 25 bp, Homo sapien
tatcacaactgcatagcaaaatcat

SEQ ID NO: 5536964 - DNA, 25 bp, Homo sapien
tgcatagcaaaatcatgtccagata

SEQ ID NO: 5536965 - DNA, 25 bp, Homo sapien
catttcaaaatacacgttactccac

SEQ ID NO: 5536966 - DNA, 25 bp, Homo sapien
aggccaaacctgaggaattagaatt

SEQ ID NO: 5536967 - DNA, 25 bp, Homo sapien
acacgttactccactttgaataccc

SEQ ID NO: 5536968 - DNA, 25 bp, Homo sapien
ggaagtcacgtaacaaagatggttc

SEQ ID NO: 5536969 - DNA, 25 bp, Homo sapien
atgatatacatcagggctcctccct

SEQ ID NO: 5536970 - DNA, 25 bp, Homo sapien
attactgtggtctaggaactgtgag

SEQ ID NO: 5536971 - DNA, 25 bp, Homo sapien
aaacctcaggaatggcccctctcca

SEQ ID NO: 5536972 - DNA, 25 bp, Homo sapien
gaactgtgagttcatgatatacatc

SEQ ID NO: 5536973 - DNA, 25 bp, Homo sapien
tcttagtgtcctgttgggggataag

SEQ ID NO: 5536974 - DNA, 25 bp, Homo sapien
gagatctcacattttggaagtcacg

SEQ ID NO: 5536975 - DNA, 25 bp, Homo sapien
ctctcctcacaaatcaggccaatga

SEQ ID NO: 5536976 - DNA, 25 bp, Homo sapien
tctagcttctccgataaaggccccc

SEQ ID NO: 5536977 - DNA, 25 bp, Homo sapien
cagtgacagcaatgagatctcacat

SEQ ID NO: 5536978 - DNA, 25 bp, Homo sapien
aggccaatgaggtcagttcctgagt

SEQ ID NO: 5536979 - DNA, 25 bp, Homo sapien
ttaaccaagaagttgcagttcgtgc

SEQ ID NO: 5536980 - DNA, 25 bp, Homo sapien
tggtggggcagcattctgctctcca

SEQ ID NO: 5536981 - DNA, 25 bp, Homo sapien
ttcagagctatatgtgcgagataac

SEQ ID NO: 5536982 - DNA, 25 bp, Homo sapien
tccaaaagagatgccaggctcactt

SEQ ID NO: 5536983 - DNA, 25 bp, Homo sapien
tgtgcgagataactgccaccctttc

SEQ ID NO: 5536984 - DNA, 25 bp, Homo sapien
atctaaagaatatgaggaggctaat

SEQ ID NO: 5536985 - DNA, 25 bp, Homo sapien
aaagccactgtgttggtttggattc

SEQ ID NO: 5536986 - DNA, 25 bp, Homo sapien
ctctccaccgtggccttacggggtg

SEQ ID NO: 5536987 - DNA, 25 bp, Homo sapien
tgcgccggttcctacgagcggcgcc

SEQ ID NO: 5536988 - DNA, 25 bp, Homo sapien
cagttcgtgcaaatcagttggggtg

SEQ ID NO: 5536989 - DNA, 25 bp, Homo sapien
gtctctgcagtacatgcgaacggct

SEQ ID NO: 5536990 - DNA, 25 bp, Homo sapien
gacgatggcgctgctcgccttgctg

SEQ ID NO: 5536991 - DNA, 25 bp, Homo sapien
atactgcgttatagcggccgtgaaa

SEQ ID NO: 5536992 - DNA, 25 bp, Homo sapien
gagtgtggtgtcatgtttgtgagag

SEQ ID NO: 5536993 - DNA, 25 bp, Homo sapien
tccgctggttgtgcagcgatggaga

SEQ ID NO: 5536994 - DNA, 25 bp, Homo sapien
cactttcgagtgccagaacccaagg

SEQ ID NO: 5536995 - DNA, 25 bp, Homo sapien
gtgagagagaaaacactttcgagtg

SEQ ID NO: 5536996 - DNA, 25 bp, Homo sapien
aaatggacagagccatactgcgtta

SEQ ID NO: 5536997 - DNA, 25 bp, Homo sapien
agacgccaacctgactgcgagacaa

SEQ ID NO: 5536998 - DNA, 25 bp, Homo sapien
gcagtgctccgctggttgtgcagcg

SEQ ID NO: 5536999 - DNA, 25 bp, Homo sapien
gggtgacaatagagtgtggtgtcat

SEQ ID NO: 5537000 - DNA, 25 bp, Homo sapien
tatagcggccgtgaaaatatttcca

SEQ ID NO: 5537001 - DNA, 25 bp, Homo sapien
ggtggtcgccttccaccgcggcaac

SEQ ID NO: 5537002 - DNA, 25 bp, Homo sapien
caccgcggcaacttccgtgagctct

SEQ ID NO: 5537003 - DNA, 25 bp, Homo sapien
ctctacaagatcctggagagccacc

SEQ ID NO: 5537004 - DNA, 25 bp, Homo sapien
ttccactgccgcgcaccatctggga

SEQ ID NO: 5537005 - DNA, 25 bp, Homo sapien
ggcaaatatcgggtgcgccgaaaat

SEQ ID NO: 5537006 - DNA, 25 bp, Homo sapien
gggtgcgccgaaaatttccactgcc

SEQ ID NO: 5537007 - DNA, 25 bp, Homo sapien
gtcgatgctgccgtcgtttggcttt

SEQ ID NO: 5537008 - DNA, 25 bp, Homo sapien
gtttggctttacgcaggagcaagtg

SEQ ID NO: 5537009 - DNA, 25 bp, Homo sapien
tgggcaggttcctgtggtcactgcc

SEQ ID NO: 5537010 - DNA, 25 bp, Homo sapien
ggagagccaccagttctcgcctcac

SEQ ID NO: 5537011 - DNA, 25 bp, Homo sapien
gcaggccccagccatgtcgatgctg

SEQ ID NO: 5537012 - DNA, 25 bp, Homo sapien
gcctttgcacgctgattagagttac

SEQ ID NO: 5537013 - DNA, 25 bp, Homo sapien
tcaatgttccagtggcgtgagacaa

SEQ ID NO: 5537014 - DNA, 25 bp, Homo sapien
tctaaggagataggtctacagaaat

SEQ ID NO: 5537015 - DNA, 25 bp, Homo sapien
aggtgcagtcaggaacctcacatcc

SEQ ID NO: 5537016 - DNA, 25 bp, Homo sapien
gcgtgcaaagcaacagtgtttccta

SEQ ID NO: 5537017 - DNA, 25 bp, Homo sapien
acaccccaaagagccgatgttattt

SEQ ID NO: 5537018 - DNA, 25 bp, Homo sapien
caaagttcaagtccgcaaaaaatgc

SEQ ID NO: 5537019 - DNA, 25 bp, Homo sapien
atcctagggtctgtctgggttcaat

SEQ ID NO: 5537020 - DNA, 25 bp, Homo sapien
ctacagaaatagacacgtggctctg

SEQ ID NO: 5537021 - DNA, 25 bp, Homo sapien
acagtgcaaacctctcacagcgtgc

SEQ ID NO: 5537022 - DNA, 25 bp, Homo sapien
aatgcatgtacaaatctaaggagat

SEQ ID NO: 5537023 - DNA, 25 bp, Homo sapien
ccactgtagttaagagctcctgttc

SEQ ID NO: 5537024 - DNA, 25 bp, Homo sapien
acttgatcacggtgagaacacaggg

SEQ ID NO: 5537025 - DNA, 25 bp, Homo sapien
agggttcccagaagaacgagtctgg

SEQ ID NO: 5537026 - DNA, 25 bp, Homo sapien
ttcaagtcctgactcagccacttcc

SEQ ID NO: 5537027 - DNA, 25 bp, Homo sapien
gcctttggagaagctattcagccac

SEQ ID NO: 5537028 - DNA, 25 bp, Homo sapien
tagttgtgtgagtttcagaaaaaaa

SEQ ID NO: 5537029 - DNA, 25 bp, Homo sapien
gaagaacgagtctggtttctgaggc

SEQ ID NO: 5537030 - DNA, 25 bp, Homo sapien
gaattttagtgcagcctcaggccaa

SEQ ID NO: 5537031 - DNA, 25 bp, Homo sapien
gcaaacaggatgctcgaccctaagt

SEQ ID NO: 5537032 - DNA, 25 bp, Homo sapien
acaatctctaggttaggagggagtg

SEQ ID NO: 5537033 - DNA, 25 bp, Homo sapien
ctcaggccaatcttggtcctgggag

SEQ ID NO: 5537034 - DNA, 25 bp, Homo sapien
ttcagtaaagagaacatccagccag

SEQ ID NO: 5537035 - DNA, 25 bp, Homo sapien
cccttcatttacagagtgggcagcc

SEQ ID NO: 5537036 - DNA, 25 bp, Homo sapien
gcagcctctgtgcttggccagactc

SEQ ID NO: 5537037 - DNA, 25 bp, Homo sapien
agaatacatgaaagctataggtgac

SEQ ID NO: 5537038 - DNA, 25 bp, Homo sapien
cctccaggatgtcatcagaggcacc

SEQ ID NO: 5537039 - DNA, 25 bp, Homo sapien
gaggcacccacattcttccacgatc

SEQ ID NO: 5537040 - DNA, 25 bp, Homo sapien
acacacagactactttggagaatac

SEQ ID NO: 5537041 - DNA, 25 bp, Homo sapien
gtgcaggcaaatccagtctccctcc

SEQ ID NO: 5537042 - DNA, 25 bp, Homo sapien
agccttccagagtgcaggcaaatcc

SEQ ID NO: 5537043 - DNA, 25 bp, Homo sapien
ggtgggcagagcaactttgcccctc

SEQ ID NO: 5537044 - DNA, 25 bp, Homo sapien
ctttatggtgatctaggagcactct

SEQ ID NO: 5537045 - DNA, 25 bp, Homo sapien
ctttttgttggttagaagatagctt

SEQ ID NO: 5537046 - DNA, 25 bp, Homo sapien
aagatagcttttacggttgggttca

SEQ ID NO: 5537047 - DNA, 25 bp, Homo sapien
aaccagggacaaattattgagtatt

SEQ ID NO: 5537048 - DNA, 25 bp, Homo sapien
ttacaaatgcagcttcttaaggcct

SEQ ID NO: 5537049 - DNA, 25 bp, Homo sapien
aataatgaaacacaagtttacaaat

SEQ ID NO: 5537050 - DNA, 25 bp, Homo sapien
taacaacagccaacatctgtgtgac

SEQ ID NO: 5537051 - DNA, 25 bp, Homo sapien
acacaggttgaaggttaagctattt

SEQ ID NO: 5537052 - DNA, 25 bp, Homo sapien
taaatgtcacacaggttgaaggtta

SEQ ID NO: 5537053 - DNA, 25 bp, Homo sapien
tgtcacacaggttgaaggttaagct

SEQ ID NO: 5537054 - DNA, 25 bp, Homo sapien
gtacacaaagcacatactatttata

SEQ ID NO: 5537055 - DNA, 25 bp, Homo sapien
cagccaacatctgtgtgactcattc

SEQ ID NO: 5537056 - DNA, 25 bp, Homo sapien
caagcagttgtggaaactgtagcgc

SEQ ID NO: 5537057 - DNA, 25 bp, Homo sapien
gttggacaagtagtatcagatattc

SEQ ID NO: 5537058 - DNA, 25 bp, Homo sapien
cctactattgatagggacatgggca

SEQ ID NO: 5537059 - DNA, 25 bp, Homo sapien
aagtgtcctgataaagggcaagtga

SEQ ID NO: 5537060 - DNA, 25 bp, Homo sapien
ggcaagtgacctcagctggtaagtg

SEQ ID NO: 5537061 - DNA, 25 bp, Homo sapien
ttgatgccctgtagaaatgttggac

SEQ ID NO: 5537062 - DNA, 25 bp, Homo sapien
agctggtaagtggtaaatgatttga

SEQ ID NO: 5537063 - DNA, 25 bp, Homo sapien
tagcgcactggatagccatgcctca

SEQ ID NO: 5537064 - DNA, 25 bp, Homo sapien
aacaaggcagctactatctcagccc

SEQ ID NO: 5537065 - DNA, 25 bp, Homo sapien
atgatttgagtgtcagggaaactat

SEQ ID NO: 5537066 - DNA, 25 bp, Homo sapien
gaataggaaaacaacagtgcaagtg

SEQ ID NO: 5537067 - DNA, 25 bp, Homo sapien
ggatgtgaaggttctgattgaaaca

SEQ ID NO: 5537068 - DNA, 25 bp, Homo sapien
aattataatgacgaattggggctga

SEQ ID NO: 5537069 - DNA, 25 bp, Homo sapien
ttaaggcttcttgcaagaatccttt

SEQ ID NO: 5537070 - DNA, 25 bp, Homo sapien
atggagcttagattctagtggacac

SEQ ID NO: 5537071 - DNA, 25 bp, Homo sapien
attccagggaagccactatttctta

SEQ ID NO: 5537072 - DNA, 25 bp, Homo sapien
gaattggggctgagctcactaaaat

SEQ ID NO: 5537073 - DNA, 25 bp, Homo sapien
tattgcttattggatgtgaaggttc

SEQ ID NO: 5537074 - DNA, 25 bp, Homo sapien
gatcatgcagcagtaaacaatgttc

SEQ ID NO: 5537075 - DNA, 25 bp, Homo sapien
agtaaacaatgttcctgcatggagc

SEQ ID NO: 5537076 - DNA, 25 bp, Homo sapien
ttgttcaaggtcacgatcatgcagc

SEQ ID NO: 5537077 - DNA, 25 bp, Homo sapien
tagtggacacagattttgtcatgtc

SEQ ID NO: 5537078 - DNA, 25 bp, Homo sapien
catgataattcacagaggtgagggg

SEQ ID NO: 5537079 - DNA, 25 bp, Homo sapien
gatgtctgagagccctttgtccctg

SEQ ID NO: 5537080 - DNA, 25 bp, Homo sapien
cttggaggcatgctactctgtcacc

SEQ ID NO: 5537081 - DNA, 25 bp, Homo sapien
gacccaagatgtctgagagcccttt

SEQ ID NO: 5537082 - DNA, 25 bp, Homo sapien
accggaaacatcttagacttggatc

SEQ ID NO: 5537083 - DNA, 25 bp, Homo sapien
aatacatgaatctgaagcctgtgtt

SEQ ID NO: 5537084 - DNA, 25 bp, Homo sapien
tttgtccctggcagctcaccggaaa

SEQ ID NO: 5537085 - DNA, 25 bp, Homo sapien
ttggcaaaataacattaatagcatc

SEQ ID NO: 5537086 - DNA, 25 bp, Homo sapien
agaggtgataagagaacaacatcat

SEQ ID NO: 5537087 - DNA, 25 bp, Homo sapien
tgcacagtgaatcaactcggggaca

SEQ ID NO: 5537088 - DNA, 25 bp, Homo sapien
gacttggatcccgttcaaagcccac

SEQ ID NO: 5537089 - DNA, 25 bp, Homo sapien
tctttgtgaatagaaactggatgcc

SEQ ID NO: 5537090 - DNA, 25 bp, Homo sapien
gggagtaggcaagcacttccactag

SEQ ID NO: 5537091 - DNA, 25 bp, Homo sapien
ttaaaagatggactggagctttttc

SEQ ID NO: 5537092 - DNA, 25 bp, Homo sapien
aggacttacctgtcctaggggagta

SEQ ID NO: 5537093 - DNA, 25 bp, Homo sapien
gcccaaaagattgaggattagactt

SEQ ID NO: 5537094 - DNA, 25 bp, Homo sapien
atgcttggttggcccttataaaact

SEQ ID NO: 5537095 - DNA, 25 bp, Homo sapien
ccctgactccatgcttggttggccc

SEQ ID NO: 5537096 - DNA, 25 bp, Homo sapien
acttacctgtcctaggggagtaggc

SEQ ID NO: 5537097 - DNA, 25 bp, Homo sapien
ttgtggccctcgatcctatttttcc

SEQ ID NO: 5537098 - DNA, 25 bp, Homo sapien
catctttttttgtggccctcgatcc

SEQ ID NO: 5537099 - DNA, 25 bp, Homo sapien
aggcaagcacttccactagggaggg

SEQ ID NO: 5537100 - DNA, 25 bp, Homo sapien
acagttccatgggctgtacaggaag

SEQ ID NO: 5537101 - DNA, 25 bp, Homo sapien
cttacagccatggcagaaggcaaaa

SEQ ID NO: 5537102 - DNA, 25 bp, Homo sapien
gtgaagtgccagatctcatgagaac

SEQ ID NO: 5537103 - DNA, 25 bp, Homo sapien
atcagttgacagttgtactaggatt

SEQ ID NO: 5537104 - DNA, 25 bp, Homo sapien
ctccacatggccaaagcaggagcaa

SEQ ID NO: 5537105 - DNA, 25 bp, Homo sapien
ggggagtgagcactccacatggcca

SEQ ID NO: 5537106 - DNA, 25 bp, Homo sapien
tcactacatgatcaaatagattgtt

SEQ ID NO: 5537107 - DNA, 25 bp, Homo sapien
taggatttacattaggaatcactac

SEQ ID NO: 5537108 - DNA, 25 bp, Homo sapien
aagaggtttagttggctcacagttc

SEQ ID NO: 5537109 - DNA, 25 bp, Homo sapien
ataaaaagtgcctgagactcggtaa

SEQ ID NO: 5537110 - DNA, 25 bp, Homo sapien
gaagcatggcactggtatctgatgg

SEQ ID NO: 5537111 - DNA, 25 bp, Homo sapien
acaggacttattcatgtagggatcc

SEQ ID NO: 5537112 - DNA, 25 bp, Homo sapien
gagtcttaatagcatggtggagtgg

SEQ ID NO: 5537113 - DNA, 25 bp, Homo sapien
tcacaagaggagacctgaatactct

SEQ ID NO: 5537114 - DNA, 25 bp, Homo sapien
gacgatgtgcttccttgggccatct

SEQ ID NO: 5537115 - DNA, 25 bp, Homo sapien
gcagtctaggacagctatacaaagc

SEQ ID NO: 5537116 - DNA, 25 bp, Homo sapien
taatagggctgtccaacatttggtc

SEQ ID NO: 5537117 - DNA, 25 bp, Homo sapien
aaccaaacatagaaagagatgccat

SEQ ID NO: 5537118 - DNA, 25 bp, Homo sapien
gagatgccatgataagacttgttgc

SEQ ID NO: 5537119 - DNA, 25 bp, Homo sapien
tctaagtggaaaagctagtagttct

SEQ ID NO: 5537120 - DNA, 25 bp, Homo sapien
cactatgtagttaacgatgccagac

SEQ ID NO: 5537121 - DNA, 25 bp, Homo sapien
agaggacatttctgcagtctaggac

SEQ ID NO: 5537122 - DNA, 25 bp, Homo sapien
attcatctgtagtaagtgctaagta

SEQ ID NO: 5537123 - DNA, 25 bp, Homo sapien
ataatgagattgcctccgtagagta

SEQ ID NO: 5537124 - DNA, 25 bp, Homo sapien
ttgaaaatgtaggcatttgaaatta

SEQ ID NO: 5537125 - DNA, 25 bp, Homo sapien
gtacattatagatacttgcacctac

SEQ ID NO: 5537126 - DNA, 25 bp, Homo sapien
ttgcataagttgtaatttgtaagat

SEQ ID NO: 5537127 - DNA, 25 bp, Homo sapien
catatgcacataaactggctataac

SEQ ID NO: 5537128 - DNA, 25 bp, Homo sapien
tccattttatggtcagtaatatgtc

SEQ ID NO: 5537129 - DNA, 25 bp, Homo sapien
aagataccaattaacaatgcaaagt

SEQ ID NO: 5537130 - DNA, 25 bp, Homo sapien
acaggtgaaaaataacagacataac

SEQ ID NO: 5537131 - DNA, 25 bp, Homo sapien
tgaaattaagtagtctacagcattc

SEQ ID NO: 5537132 - DNA, 25 bp, Homo sapien
gaacaaaaacacttataaaagcatc

SEQ ID NO: 5537133 - DNA, 25 bp, Homo sapien
aagacagcaagaattcatccctcac

SEQ ID NO: 5537134 - DNA, 25 bp, Homo sapien
atgtatgcttccaagagtgaggggt

SEQ ID NO: 5537135 - DNA, 25 bp, Homo sapien
gatgtagggtatattcaggtgactt

SEQ ID NO: 5537136 - DNA, 25 bp, Homo sapien
gcaggatgctttatgggtcagtgtt

SEQ ID NO: 5537137 - DNA, 25 bp, Homo sapien
aaactctgcaacatggggtagaatg

SEQ ID NO: 5537138 - DNA, 25 bp, Homo sapien
gggcaatgagatgaaatttgaatgc

SEQ ID NO: 5537139 - DNA, 25 bp, Homo sapien
tagtagatctgggtaacgcattcat

SEQ ID NO: 5537140 - DNA, 25 bp, Homo sapien
ggcatgaacccaacctccagagatc

SEQ ID NO: 5537141 - DNA, 25 bp, Homo sapien
gtttggaaagtattgatgtagggta

SEQ ID NO: 5537142 - DNA, 25 bp, Homo sapien
agtcatcggttgaggattgcacctg

SEQ ID NO: 5537143 - DNA, 25 bp, Homo sapien
ttctcccgaaaagtgggcaatgaga

SEQ ID NO: 5537144 - DNA, 25 bp, Homo sapien
tacagaccattgacttgagaaatac

SEQ ID NO: 5537145 - DNA, 25 bp, Homo sapien
gatgaggtgctcaagtatggcattc

SEQ ID NO: 5537146 - DNA, 25 bp, Homo sapien
gtatggcattctgtctcattaagac

SEQ ID NO: 5537147 - DNA, 25 bp, Homo sapien
tgctccaggacctccatattcttta

SEQ ID NO: 5537148 - DNA, 25 bp, Homo sapien
ttgagaaatacagttcgatgacatt

SEQ ID NO: 5537149 - DNA, 25 bp, Homo sapien
tgtagaggataaaatataaattgtt

SEQ ID NO: 5537150 - DNA, 25 bp, Homo sapien
gggaaaagaacagtgctgctctaag

SEQ ID NO: 5537151 - DNA, 25 bp, Homo sapien
aatacgataattatgtagaggataa

SEQ ID NO: 5537152 - DNA, 25 bp, Homo sapien
caatttgagcaaaagatgaggtgct

SEQ ID NO: 5537153 - DNA, 25 bp, Homo sapien
tagatttggaggcaccgcccattga

SEQ ID NO: 5537154 - DNA, 25 bp, Homo sapien
aattgttcacttaggagattaatac

SEQ ID NO: 5537155 - DNA, 25 bp, Homo sapien
acttgtaggtgtttgtgttccagac

SEQ ID NO: 5537156 - DNA, 25 bp, Homo sapien
tacaccaaccatgcagaccaaggag

SEQ ID NO: 5537157 - DNA, 25 bp, Homo sapien
catccctcaaggtggaagataaatc

SEQ ID NO: 5537158 - DNA, 25 bp, Homo sapien
acactgttggcatataggtatatac

SEQ ID NO: 5537159 - DNA, 25 bp, Homo sapien
tgagatctgattgtcaagaaccagc

SEQ ID NO: 5537160 - DNA, 25 bp, Homo sapien
tgtgttccagacaagaaaactcccc

SEQ ID NO: 5537161 - DNA, 25 bp, Homo sapien
tttcaaagggttgatgagatctgat

SEQ ID NO: 5537162 - DNA, 25 bp, Homo sapien
gcacatacgggtgtacactgttggc

SEQ ID NO: 5537163 - DNA, 25 bp, Homo sapien
ggagctgtgctgcccagaacatttc

SEQ ID NO: 5537164 - DNA, 25 bp, Homo sapien
atttaggtatatcccaagcctcccc

SEQ ID NO: 5537165 - DNA, 25 bp, Homo sapien
tctggcacaagctatccaatgaatt

SEQ ID NO: 5537166 - DNA, 25 bp, Homo sapien
ctcaaaagttcccctagagactaac

SEQ ID NO: 5537167 - DNA, 25 bp, Homo sapien
acagagtatacttgcagttttgttc

SEQ ID NO: 5537168 - DNA, 25 bp, Homo sapien
tatgtaccagaatcgccttgagtgc

SEQ ID NO: 5537169 - DNA, 25 bp, Homo sapien
caacagtagaccaatcagctgaggt

SEQ ID NO: 5537170 - DNA, 25 bp, Homo sapien
gctgctttgtcagggcaagagagta

SEQ ID NO: 5537171 - DNA, 25 bp, Homo sapien
gttcctgaccaacagtagaccaatc

SEQ ID NO: 5537172 - DNA, 25 bp, Homo sapien
acgcacaacagtgccacacttaagc

SEQ ID NO: 5537173 - DNA, 25 bp, Homo sapien
tagcatttgtgaagaggtaaacgta

SEQ ID NO: 5537174 - DNA, 25 bp, Homo sapien
cagctgaggtctgaaccctaattat

SEQ ID NO: 5537175 - DNA, 25 bp, Homo sapien
agaatcgccttgagtgcttgttagc

SEQ ID NO: 5537176 - DNA, 25 bp, Homo sapien
aagacacctcacacacgcacaacag

SEQ ID NO: 5537177 - DNA, 25 bp, Homo sapien
gggctcaggtcgcgccttcagttag

SEQ ID NO: 5537178 - DNA, 25 bp, Homo sapien
gtccctctctgggtgtagagcggta

SEQ ID NO: 5537179 - DNA, 25 bp, Homo sapien
agagcggtatttaagggtgacactc

SEQ ID NO: 5537180 - DNA, 25 bp, Homo sapien
tcggatcccagctggcccagacttg

SEQ ID NO: 5537181 - DNA, 25 bp, Homo sapien
cctgcaagaaccttctgacccattg

SEQ ID NO: 5537182 - DNA, 25 bp, Homo sapien
aagttcaacagcagtcttagcctac

SEQ ID NO: 5537183 - DNA, 25 bp, Homo sapien
tactcctgccagtaaataggcactc

SEQ ID NO: 5537184 - DNA, 25 bp, Homo sapien
ctgtcttcagaggtgtattcgtccc

SEQ ID NO: 5537185 - DNA, 25 bp, Homo sapien
cgccttcagttagcgctcagcctgc

SEQ ID NO: 5537186 - DNA, 25 bp, Homo sapien
agacttgctctgaagtaggaggaac

SEQ ID NO: 5537187 - DNA, 25 bp, Homo sapien
gcttgcggtttctggtcggatccca

SEQ ID NO: 5537188 - DNA, 25 bp, Homo sapien
tcagcaagcaagtgtaaaaacctca

SEQ ID NO: 5537189 - DNA, 25 bp, Homo sapien
aaaatcaacgctaaggaaaatatac

SEQ ID NO: 5537190 - DNA, 25 bp, Homo sapien
tttcattgcatctgagcaccaggga

SEQ ID NO: 5537191 - DNA, 25 bp, Homo sapien
attctacagcaacattcgaggtggc

SEQ ID NO: 5537192 - DNA, 25 bp, Homo sapien
ttcgaggtggcttactgcaacaaac

SEQ ID NO: 5537193 - DNA, 25 bp, Homo sapien
ataagatgtttaatgatgaagtcaa

SEQ ID NO: 5537194 - DNA, 25 bp, Homo sapien
tggcagttcaggtcaccagtccctt

SEQ ID NO: 5537195 - DNA, 25 bp, Homo sapien
tggaacattactaggcaggaaggaa

SEQ ID NO: 5537196 - DNA, 25 bp, Homo sapien
cctagccatagatttgttgcctcac

SEQ ID NO: 5537197 - DNA, 25 bp, Homo sapien
tacagtcaaagcaaattacatcatt

SEQ ID NO: 5537198 - DNA, 25 bp, Homo sapien
tggggtaaagctggaacattactag

SEQ ID NO: 5537199 - DNA, 25 bp, Homo sapien
gagtgtaaagagatggcaaaacaca

SEQ ID NO: 5537200 - DNA, 25 bp, Homo sapien
aatgtgaagattaaggtaaactgaa

SEQ ID NO: 5537201 - DNA, 25 bp, Homo sapien
ttgaagtaggctcattccagaatgc

SEQ ID NO: 5537202 - DNA, 25 bp, Homo sapien
ggggcaggtcaagcttatgattcaa

SEQ ID NO: 5537203 - DNA, 25 bp, Homo sapien
tcccaaggtgtaaaaatgtgaagat

SEQ ID NO: 5537204 - DNA, 25 bp, Homo sapien
aaagagatggcaaaacacagataaa

SEQ ID NO: 5537205 - DNA, 25 bp, Homo sapien
aagtgatatactggaattgaaaata

SEQ ID NO: 5537206 - DNA, 25 bp, Homo sapien
ttaaggtaaactgaatgtcgaggag

SEQ ID NO: 5537207 - DNA, 25 bp, Homo sapien
tcgaggatgagaaatttacattaac

SEQ ID NO: 5537208 - DNA, 25 bp, Homo sapien
aacatccaaaaagcctctgggggca

SEQ ID NO: 5537209 - DNA, 25 bp, Homo sapien
ttatcttaaacccagcgatgcttgc

SEQ ID NO: 5537210 - DNA, 25 bp, Homo sapien
aaggaccccctgagaacagttgctt

SEQ ID NO: 5537211 - DNA, 25 bp, Homo sapien
tgtgtaaatggcttcccaaggtcac

SEQ ID NO: 5537212 - DNA, 25 bp, Homo sapien
atgtgaaccagaggcttgaggtttt

SEQ ID NO: 5537213 - DNA, 25 bp, Homo sapien
ggagaaactgagacccatatgtgta

SEQ ID NO: 5537214 - DNA, 25 bp, Homo sapien
caggctgcctggatcatagactgat

SEQ ID NO: 5537215 - DNA, 25 bp, Homo sapien
atcaggaaagctaaacaaaagtcat

SEQ ID NO: 5537216 - DNA, 25 bp, Homo sapien
cctcacacccccactgggagcagcg

SEQ ID NO: 5537217 - DNA, 25 bp, Homo sapien
ggaaaggtcactcagatgtgaacca

SEQ ID NO: 5537218 - DNA, 25 bp, Homo sapien
caagaccagccgaaatgttcctctc

SEQ ID NO: 5537219 - DNA, 25 bp, Homo sapien
gcccccaccccaagcacctgatttc

SEQ ID NO: 5537220 - DNA, 25 bp, Homo sapien
tgtccaaagaagtgggttaaggtca

SEQ ID NO: 5537221 - DNA, 25 bp, Homo sapien
tgacagcacgtccccaagctcagtg

SEQ ID NO: 5537222 - DNA, 25 bp, Homo sapien
aagaaaggaagtagcctgctccttc

SEQ ID NO: 5537223 - DNA, 25 bp, Homo sapien
atttgcacgtcaagaaaggaagtag

SEQ ID NO: 5537224 - DNA, 25 bp, Homo sapien
gaagctggacttaaggatcccccaa

SEQ ID NO: 5537225 - DNA, 25 bp, Homo sapien
cccagagactactaggagaacttgg

SEQ ID NO: 5537226 - DNA, 25 bp, Homo sapien
gagaacttggtcctatcgctgcccc

SEQ ID NO: 5537227 - DNA, 25 bp, Homo sapien
attagaaacctcccacccagcgaag

SEQ ID NO: 5537228 - DNA, 25 bp, Homo sapien
taaaacagtcattcacgggacccac

SEQ ID NO: 5537229 - DNA, 25 bp, Homo sapien
tcctgcagcgtcctgctggtgtgac

SEQ ID NO: 5537230 - DNA, 25 bp, Homo sapien
ctcagggaacccacatgggtactct

SEQ ID NO: 5537231 - DNA, 25 bp, Homo sapien
cagcgaagggataagcttctcaact

SEQ ID NO: 5537232 - DNA, 25 bp, Homo sapien
gctacatcaagaccaccacccggca

SEQ ID NO: 5537233 - DNA, 25 bp, Homo sapien
cctaatcagagccccaggatcaaga

SEQ ID NO: 5537234 - DNA, 25 bp, Homo sapien
gcagctcagctcgcccaatcactcc

SEQ ID NO: 5537235 - DNA, 25 bp, Homo sapien
caccccctgctacatcaagaccacc

SEQ ID NO: 5537236 - DNA, 25 bp, Homo sapien
ccaatcactccccgtctcagtcccc

SEQ ID NO: 5537237 - DNA, 25 bp, Homo sapien
ccgctcatcaccccctgctacatca

SEQ ID NO: 5537238 - DNA, 25 bp, Homo sapien
ggtccagaactgccctggcctccgt

SEQ ID NO: 5537239 - DNA, 25 bp, Homo sapien
gtctcagtcccctaatcagagcccc

SEQ ID NO: 5537240 - DNA, 25 bp, Homo sapien
gcggatggcttccagaacgtgttca

SEQ ID NO: 5537241 - DNA, 25 bp, Homo sapien
gaaccctccctgagccgagggtcca

SEQ ID NO: 5537242 - DNA, 25 bp, Homo sapien
gctccgcgcacctgctggagcgcgg

SEQ ID NO: 5537243 - DNA, 25 bp, Homo sapien
agaacagtttgggagctgactctcc

SEQ ID NO: 5537244 - DNA, 25 bp, Homo sapien
gcagatgagagttagggctaaatta

SEQ ID NO: 5537245 - DNA, 25 bp, Homo sapien
caagtggcattgatagtacacaggc

SEQ ID NO: 5537246 - DNA, 25 bp, Homo sapien
ttccaggaccttgcacatgggagat

SEQ ID NO: 5537247 - DNA, 25 bp, Homo sapien
tgagacggcatggaccctgtcttat

SEQ ID NO: 5537248 - DNA, 25 bp, Homo sapien
ttgggaaatggaacctctagacagt

SEQ ID NO: 5537249 - DNA, 25 bp, Homo sapien
caaggaaaggcaacccaccctattg

SEQ ID NO: 5537250 - DNA, 25 bp, Homo sapien
gtgaatgcttgggttcaagtggcat

SEQ ID NO: 5537251 - DNA, 25 bp, Homo sapien
agggctaaattaaccagggcagaag

SEQ ID NO: 5537252 - DNA, 25 bp, Homo sapien
ctctgctctggaacagttaggccta

SEQ ID NO: 5537253 - DNA, 25 bp, Homo sapien
acatgggagatgctcagtaagtatt

SEQ ID NO: 5537254 - DNA, 25 bp, Homo sapien
ttatctgatcatgggccaggcttgg

SEQ ID NO: 5537255 - DNA, 25 bp, Homo sapien
gaggtgagcattggcactttaccca

SEQ ID NO: 5537256 - DNA, 25 bp, Homo sapien
cctccgggagatcaccctccgctag

SEQ ID NO: 5537257 - DNA, 25 bp, Homo sapien
gacgtgtgcaaatgtccatgccacc

SEQ ID NO: 5537258 - DNA, 25 bp, Homo sapien
ccgctagcacttccagaggcgacga

SEQ ID NO: 5537259 - DNA, 25 bp, Homo sapien
gagctgtcgagattgcccttgtgct

SEQ ID NO: 5537260 - DNA, 25 bp, Homo sapien
tacccaggagtcatcggccttctag

SEQ ID NO: 5537261 - DNA, 25 bp, Homo sapien
tcacagaaccagccgttagtcagac

SEQ ID NO: 5537262 - DNA, 25 bp, Homo sapien
acctctctgggaaagtggtttgtgc

SEQ ID NO: 5537263 - DNA, 25 bp, Homo sapien
ggacgctgaggctcaagttcacaga

SEQ ID NO: 5537264 - DNA, 25 bp, Homo sapien
tccagctccatgcatgagtgggaac

SEQ ID NO: 5537265 - DNA, 25 bp, Homo sapien
tttgaaacgcaacaaaaagagacga

SEQ ID NO: 5537266 - DNA, 25 bp, Homo sapien
atgttcatgcgtgaaagtgtgaagg

SEQ ID NO: 5537267 - DNA, 25 bp, Homo sapien
actccaagataggtaaacgcctttg

SEQ ID NO: 5537268 - DNA, 25 bp, Homo sapien
ctatcaaggtcagaaatgttagatc

SEQ ID NO: 5537269 - DNA, 25 bp, Homo sapien
tggtgacccagtaaggtgcttctgg

SEQ ID NO: 5537270 - DNA, 25 bp, Homo sapien
gtgaaagtgtgaaggtcactagctt

SEQ ID NO: 5537271 - DNA, 25 bp, Homo sapien
aaacagtcaaaatgtaaccaaccta

SEQ ID NO: 5537272 - DNA, 25 bp, Homo sapien
gccaaagcactgtaaattaaatgac

SEQ ID NO: 5537273 - DNA, 25 bp, Homo sapien
aaagagacgatgatcttatgagctc

SEQ ID NO: 5537274 - DNA, 25 bp, Homo sapien
aaatgtagagtgtaaataggttggt

SEQ ID NO: 5537275 - DNA, 25 bp, Homo sapien
taagttctgtactgatgacaccctt

SEQ ID NO: 5537276 - DNA, 25 bp, Homo sapien
attttgcccctctgcagtcaggccc

SEQ ID NO: 5537277 - DNA, 25 bp, Homo sapien
aggtaccacagttgctcacgggttc

SEQ ID NO: 5537278 - DNA, 25 bp, Homo sapien
gaattgtcctgtgagtgactcccgc

SEQ ID NO: 5537279 - DNA, 25 bp, Homo sapien
gggcacttctgccccgacagaggca

SEQ ID NO: 5537280 - DNA, 25 bp, Homo sapien
gacagaggcagcccacattttgccc

SEQ ID NO: 5537281 - DNA, 25 bp, Homo sapien
taaggctcacccgttttcgatgtac

SEQ ID NO: 5537282 - DNA, 25 bp, Homo sapien
tggtactgctgagttgtaggttgtg

SEQ ID NO: 5537283 - DNA, 25 bp, Homo sapien
ccagcgtccagcccttggtactgct

SEQ ID NO: 5537284 - DNA, 25 bp, Homo sapien
ccgcaggatggagacttttgtgtct

SEQ ID NO: 5537285 - DNA, 25 bp, Homo sapien
gatgtacagccgacgacttggtaag

SEQ ID NO: 5537286 - DNA, 25 bp, Homo sapien
agctttgcgtcctccagaattgtcc

SEQ ID NO: 5537287 - DNA, 25 bp, Homo sapien
cagctcctgctgaccacgatgtcgg

SEQ ID NO: 5537288 - DNA, 25 bp, Homo sapien
gtgcagccggatgctttgtgaaatt

SEQ ID NO: 5537289 - DNA, 25 bp, Homo sapien
gaggttttaaatacttggcatgagg

SEQ ID NO: 5537290 - DNA, 25 bp, Homo sapien
gggcatttcaatccgggtgtgtttc

SEQ ID NO: 5537291 - DNA, 25 bp, Homo sapien
atctctgcttctctccctgccccag

SEQ ID NO: 5537292 - DNA, 25 bp, Homo sapien
gctgcttctcctagggtcgggtcag

SEQ ID NO: 5537293 - DNA, 25 bp, Homo sapien
acggctttccccagctcgcgctgcg

SEQ ID NO: 5537294 - DNA, 25 bp, Homo sapien
tcctgctgaccacgatgtcgggtaa

SEQ ID NO: 5537295 - DNA, 25 bp, Homo sapien
caatccgggtgtgtttccacggctt

SEQ ID NO: 5537296 - DNA, 25 bp, Homo sapien
tttaaatacttggcatgagggggaa

SEQ ID NO: 5537297 - DNA, 25 bp, Homo sapien
tcgggtaactcggctgcttctccta

SEQ ID NO: 5537298 - DNA, 25 bp, Homo sapien
tcacaagccccatccgcgaaaattc

SEQ ID NO: 5537299 - DNA, 25 bp, Homo sapien
tcctgagaccgttgcagctcttttc

SEQ ID NO: 5537300 - DNA, 25 bp, Homo sapien
tcactcttcgtgctgttcccgctgc

SEQ ID NO: 5537301 - DNA, 25 bp, Homo sapien
ttggccttggtgtcgtcgttcttcc

SEQ ID NO: 5537302 - DNA, 25 bp, Homo sapien
gattctgttcgccctcaggtcgctg

SEQ ID NO: 5537303 - DNA, 25 bp, Homo sapien
ggacgccaacgacagctcactcttc

SEQ ID NO: 5537304 - DNA, 25 bp, Homo sapien
tatcaggtggatattaaagcctctg

SEQ ID NO: 5537305 - DNA, 25 bp, Homo sapien
atcaacgataacgctccggaactga

SEQ ID NO: 5537306 - DNA, 25 bp, Homo sapien
tccggaactgaccatggcttcattc

SEQ ID NO: 5537307 - DNA, 25 bp, Homo sapien
ttttcagcattcaagaccgcgattc

SEQ ID NO: 5537308 - DNA, 25 bp, Homo sapien
tacaggtggtagatatcaacgataa

SEQ ID NO: 5537309 - DNA, 25 bp, Homo sapien
catcgtctctgcactgcgaaggcat

SEQ ID NO: 5537310 - DNA, 25 bp, Homo sapien
ggaaatctgtccactcggaatacct

SEQ ID NO: 5537311 - DNA, 25 bp, Homo sapien
acctagactaggagctttatcaggt

SEQ ID NO: 5537312 - DNA, 25 bp, Homo sapien
atctgttatgaaacgaaacaccccc

SEQ ID NO: 5537313 - DNA, 25 bp, Homo sapien
gagaatcactgtgggcgtccattct

SEQ ID NO: 5537314 - DNA, 25 bp, Homo sapien
caccactgagatactaactagacct

SEQ ID NO: 5537315 - DNA, 25 bp, Homo sapien
taggaagactctcaaaggcaaatcc

SEQ ID NO: 5537316 - DNA, 25 bp, Homo sapien
gccgggccccctgtgcctctagtat

SEQ ID NO: 5537317 - DNA, 25 bp, Homo sapien
tccagtgatggtaagagatctgtta

SEQ ID NO: 5537318 - DNA, 25 bp, Homo sapien
caaaggcaaatccctgatcccccgc

SEQ ID NO: 5537319 - DNA, 25 bp, Homo sapien
tgcgaaggcatttggtagcctcacc

SEQ ID NO: 5537320 - DNA, 25 bp, Homo sapien
gcactgccttggagctttgtggagc

SEQ ID NO: 5537321 - DNA, 25 bp, Homo sapien
acccttccccaagtccacgcggaca

SEQ ID NO: 5537322 - DNA, 25 bp, Homo sapien
aaaacaccacaaattctatcttctt

SEQ ID NO: 5537323 - DNA, 25 bp, Homo sapien
cactttggcaacaggacttttattc

SEQ ID NO: 5537324 - DNA, 25 bp, Homo sapien
gggtcagggatatttatggtctcat

SEQ ID NO: 5537325 - DNA, 25 bp, Homo sapien
gccctgggcatccacacatcatttg

SEQ ID NO: 5537326 - DNA, 25 bp, Homo sapien
gtcaaaatgagcagagtgtgacaaa

SEQ ID NO: 5537327 - DNA, 25 bp, Homo sapien
cgcacccttcccaagggagagggag

SEQ ID NO: 5537328 - DNA, 25 bp, Homo sapien
ccacgcggacacagctctagttttc

SEQ ID NO: 5537329 - DNA, 25 bp, Homo sapien
ctgagtataaccaaaaataggtatt

SEQ ID NO: 5537330 - DNA, 25 bp, Homo sapien
cagagtgtgacaaaacccaagtaag

SEQ ID NO: 5537331 - DNA, 25 bp, Homo sapien
atgtctctacatacagaagtaactc

SEQ ID NO: 5537332 - DNA, 25 bp, Homo sapien
ggtgagaagtggaactctgtgtcaa

SEQ ID NO: 5537333 - DNA, 25 bp, Homo sapien
aaattggccttgctagttttgtggc

SEQ ID NO: 5537334 - DNA, 25 bp, Homo sapien
taaaactctaggacatctcattgac

SEQ ID NO: 5537335 - DNA, 25 bp, Homo sapien
tgagaacatgtgccccagtaactcc

SEQ ID NO: 5537336 - DNA, 25 bp, Homo sapien
agctctgtaatgtcaccctatgcat

SEQ ID NO: 5537337 - DNA, 25 bp, Homo sapien
cttactgttggagatttagggtgtt

SEQ ID NO: 5537338 - DNA, 25 bp, Homo sapien
aataacagtaatatatgtgaccatc

SEQ ID NO: 5537339 - DNA, 25 bp, Homo sapien
gtgttgtaatgaatagctctgtaat

SEQ ID NO: 5537340 - DNA, 25 bp, Homo sapien
agttttgtggcatagttgttatagt

SEQ ID NO: 5537341 - DNA, 25 bp, Homo sapien
tgcataagtatggtgactgtttctc

SEQ ID NO: 5537342 - DNA, 25 bp, Homo sapien
aaaatcaaagattaacctatgccat

SEQ ID NO: 5537343 - DNA, 25 bp, Homo sapien
aagctcagttgataaatgaacataa

SEQ ID NO: 5537344 - DNA, 25 bp, Homo sapien
tgtttaaatgcgccaagtccctacg

SEQ ID NO: 5537345 - DNA, 25 bp, Homo sapien
ccagaatgaaaaaggctagtattaa

SEQ ID NO: 5537346 - DNA, 25 bp, Homo sapien
ttcttgagtcaaattgaaacctttc

SEQ ID NO: 5537347 - DNA, 25 bp, Homo sapien
acctatgccatctgatccatgcagc

SEQ ID NO: 5537348 - DNA, 25 bp, Homo sapien
aatgcgccaagtccctacgcacctt

SEQ ID NO: 5537349 - DNA, 25 bp, Homo sapien
tagtatgtatgagcaaaatactgtt

SEQ ID NO: 5537350 - DNA, 25 bp, Homo sapien
gatccatgcagcaagtgataaattc

SEQ ID NO: 5537351 - DNA, 25 bp, Homo sapien
agggggaaaaattggatctcattcc

SEQ ID NO: 5537352 - DNA, 25 bp, Homo sapien
aaaacaggcaacatcaaaaaagctc

SEQ ID NO: 5537353 - DNA, 25 bp, Homo sapien
aaagagagcattattggaagaatga

SEQ ID NO: 5537354 - DNA, 25 bp, Homo sapien
gagagaaaaatcaaggcacatattg

SEQ ID NO: 5537355 - DNA, 25 bp, Homo sapien
ctgatgaatgaggatgttaattaca

SEQ ID NO: 5537356 - DNA, 25 bp, Homo sapien
agaagggatactgcacaaatgctgt

SEQ ID NO: 5537357 - DNA, 25 bp, Homo sapien
ttgaacctccattgagagaaaaatc

SEQ ID NO: 5537358 - DNA, 25 bp, Homo sapien
ctcagaaagaaacctatagttcaac

SEQ ID NO: 5537359 - DNA, 25 bp, Homo sapien
aatgctgtgtggacttaccagcttt

SEQ ID NO: 5537360 - DNA, 25 bp, Homo sapien
attgaaagtggtaatggttttgaaa

SEQ ID NO: 5537361 - DNA, 25 bp, Homo sapien
ttaacattttacacagaagggatac

SEQ ID NO: 5537362 - DNA, 25 bp, Homo sapien
gcttttgatcttttgcaggaagttc

SEQ ID NO: 5537363 - DNA, 25 bp, Homo sapien
aaaaatacatctcagaaagaaacct

SEQ ID NO: 5537364 - DNA, 25 bp, Homo sapien
tcgtctgtcccctggagttagcagc

SEQ ID NO: 5537365 - DNA, 25 bp, Homo sapien
ggctcttggctcatggctctggacc

SEQ ID NO: 5537366 - DNA, 25 bp, Homo sapien
cgtccaggcgatcttccctgccggg

SEQ ID NO: 5537367 - DNA, 25 bp, Homo sapien
gatgctggctccacgtccaggcgat

SEQ ID NO: 5537368 - DNA, 25 bp, Homo sapien
ccttcgtctgtcccctggagttagc

SEQ ID NO: 5537369 - DNA, 25 bp, Homo sapien
ctggctccacgtccaggcgatcttc

SEQ ID NO: 5537370 - DNA, 25 bp, Homo sapien
ccagtctgaacactttagttatgga

SEQ ID NO: 5537371 - DNA, 25 bp, Homo sapien
ccaaagatgtcccttcgtctgtccc

SEQ ID NO: 5537372 - DNA, 25 bp, Homo sapien
gtctgtcccctggagttagcagcgt

SEQ ID NO: 5537373 - DNA, 25 bp, Homo sapien
ggtgatgctcccagcgagctccaga

SEQ ID NO: 5537374 - DNA, 25 bp, Homo sapien
ccacgtccaggcgatcttccctgcc

SEQ ID NO: 5537375 - DNA, 25 bp, Homo sapien
gtgacctgatgtgtcacgaggccct

SEQ ID NO: 5537376 - DNA, 25 bp, Homo sapien
gcgtggtccttgcaccgtcccatcg

SEQ ID NO: 5537377 - DNA, 25 bp, Homo sapien
cctcccccagaaagaggagttagag

SEQ ID NO: 5537378 - DNA, 25 bp, Homo sapien
tgacccgtgtgatagaaagcaggga

SEQ ID NO: 5537379 - DNA, 25 bp, Homo sapien
tggtctttgggccagtgtgtacctt

SEQ ID NO: 5537380 - DNA, 25 bp, Homo sapien
tctgctctgagagctgccttgtgac

SEQ ID NO: 5537381 - DNA, 25 bp, Homo sapien
tccactgcagtgtgtgtgccttctg

SEQ ID NO: 5537382 - DNA, 25 bp, Homo sapien
ccgtggcacggtttcctggtctttg

SEQ ID NO: 5537383 - DNA, 25 bp, Homo sapien
tgtagtcttaggtaactgaaagttc

SEQ ID NO: 5537384 - DNA, 25 bp, Homo sapien
gaactgtgtacaaataaggtgactg

SEQ ID NO: 5537385 - DNA, 25 bp, Homo sapien
cagtgtgtaccttggagtgacttcc

SEQ ID NO: 5537386 - DNA, 25 bp, Homo sapien
ctggatgacagatcttggtgatgct

SEQ ID NO: 5537387 - DNA, 25 bp, Homo sapien
attacagaaacggatatcagaccac

SEQ ID NO: 5537388 - DNA, 25 bp, Homo sapien
gggaaaataccactggcagcacaat

SEQ ID NO: 5537389 - DNA, 25 bp, Homo sapien
ggcaaaaccactggtgcacagagga

SEQ ID NO: 5537390 - DNA, 25 bp, Homo sapien
atcagaccacaatagaaaagacatt

SEQ ID NO: 5537391 - DNA, 25 bp, Homo sapien
agtcatgacattaacaacaccaaca

SEQ ID NO: 5537392 - DNA, 25 bp, Homo sapien
tggtgatgctagccaaaaaaaatta

SEQ ID NO: 5537393 - DNA, 25 bp, Homo sapien
agcctggtctagaatgtttaatcac

SEQ ID NO: 5537394 - DNA, 25 bp, Homo sapien
attcacataggactagaggaaaatc

SEQ ID NO: 5537395 - DNA, 25 bp, Homo sapien
aaggtggacattccatgagcatgtt

SEQ ID NO: 5537396 - DNA, 25 bp, Homo sapien
tgcacagaggacaacaaactgatct

SEQ ID NO: 5537397 - DNA, 25 bp, Homo sapien
acttcataagcatagtcctagtcat

SEQ ID NO: 5537398 - DNA, 25 bp, Homo sapien
aagtatgatagtaacacagtaatat

SEQ ID NO: 5537399 - DNA, 25 bp, Homo sapien
atatgctcaaaaactctctgggata

SEQ ID NO: 5537400 - DNA, 25 bp, Homo sapien
agtaaatttgccataggtgcctatg

SEQ ID NO: 5537401 - DNA, 25 bp, Homo sapien
tgacaatgtggggaacaaacttaaa

SEQ ID NO: 5537402 - DNA, 25 bp, Homo sapien
gcacaatgaaatgttgttcaaggtc

SEQ ID NO: 5537403 - DNA, 25 bp, Homo sapien
gctacaggacctaagcaagtctgtt

SEQ ID NO: 5537404 - DNA, 25 bp, Homo sapien
tataaataagggcaggaaatgctaa

SEQ ID NO: 5537405 - DNA, 25 bp, Homo sapien
actgtttagatctgctggtgacatt

SEQ ID NO: 5537406 - DNA, 25 bp, Homo sapien
agaaagagcctttgagaaacatgca

SEQ ID NO: 5537407 - DNA, 25 bp, Homo sapien
atagcctaaaagatggaaactggtt

SEQ ID NO: 5537408 - DNA, 25 bp, Homo sapien
gtgccggtacaacgctctgaaaaat

SEQ ID NO: 5537409 - DNA, 25 bp, Homo sapien
tccgggcctagcctttgccagtgag

SEQ ID NO: 5537410 - DNA, 25 bp, Homo sapien
agccactggaacttgtcctcaccca

SEQ ID NO: 5537411 - DNA, 25 bp, Homo sapien
tgtcccaaaatccagcgcctagggt

SEQ ID NO: 5537412 - DNA, 25 bp, Homo sapien
cccaaaatccagcgcctagggtgct

SEQ ID NO: 5537413 - DNA, 25 bp, Homo sapien
tgctccgggcctagcctttgccagt

SEQ ID NO: 5537414 - DNA, 25 bp, Homo sapien
atatatataaagtgccggtacaacg

SEQ ID NO: 5537415 - DNA, 25 bp, Homo sapien
ccggtacaacgctctgaaaaatagt

SEQ ID NO: 5537416 - DNA, 25 bp, Homo sapien
gggcctagcctttgccagtgaggtc

SEQ ID NO: 5537417 - DNA, 25 bp, Homo sapien
acgctctgaaaaatagttttgtccc

SEQ ID NO: 5537418 - DNA, 25 bp, Homo sapien
aagtgccggtacaacgctctgaaaa

SEQ ID NO: 5537419 - DNA, 25 bp, Homo sapien
ctgtaaaacagagtcccagcttccc

SEQ ID NO: 5537420 - DNA, 25 bp, Homo sapien
gtggagactggtcccttcagtgtgc

SEQ ID NO: 5537421 - DNA, 25 bp, Homo sapien
tggcccaagtctggaccaatgacca

SEQ ID NO: 5537422 - DNA, 25 bp, Homo sapien
atcaatctatgctggctggagggat

SEQ ID NO: 5537423 - DNA, 25 bp, Homo sapien
accagtggtttgtccaggctccagt

SEQ ID NO: 5537424 - DNA, 25 bp, Homo sapien
gggatgttaaagtgcttggtggaga

SEQ ID NO: 5537425 - DNA, 25 bp, Homo sapien
acttgcaaggaagttacaaggtccc

SEQ ID NO: 5537426 - DNA, 25 bp, Homo sapien
caggggccaaaaaccttgccctctc

SEQ ID NO: 5537427 - DNA, 25 bp, Homo sapien
acataaaaccgtgacaggatagctc

SEQ ID NO: 5537428 - DNA, 25 bp, Homo sapien
cccaggacatggctaaacctctctc

SEQ ID NO: 5537429 - DNA, 25 bp, Homo sapien
ggaacaaagagaaaactgtggtctc

SEQ ID NO: 5537430 - DNA, 25 bp, Homo sapien
aaagtggccactctataccaaagcc

SEQ ID NO: 5537431 - DNA, 25 bp, Homo sapien
ctggcctaaatacggagatgcgtac

SEQ ID NO: 5537432 - DNA, 25 bp, Homo sapien
tactcctcttggttggggtttcata

SEQ ID NO: 5537433 - DNA, 25 bp, Homo sapien
cgtacaaagaagacctaggatcaca

SEQ ID NO: 5537434 - DNA, 25 bp, Homo sapien
tcttccaggtcctagagaaagtggc

SEQ ID NO: 5537435 - DNA, 25 bp, Homo sapien
atttcgtgggtaccaacagccttgg

SEQ ID NO: 5537436 - DNA, 25 bp, Homo sapien
aaagaaatcacctggaggctgacat

SEQ ID NO: 5537437 - DNA, 25 bp, Homo sapien
aggtgtgagaagtgtccattactat

SEQ ID NO: 5537438 - DNA, 25 bp, Homo sapien
ttgaccagaagcatagagaaaacta

SEQ ID NO: 5537439 - DNA, 25 bp, Homo sapien
ctacatagtcgagtacccaccaggg

SEQ ID NO: 5537440 - DNA, 25 bp, Homo sapien
ccaggaggcagatctggcctaaata

SEQ ID NO: 5537441 - DNA, 25 bp, Homo sapien
tgtgagtgtgagtatgtgttcatgc

SEQ ID NO: 5537442 - DNA, 25 bp, Homo sapien
cacactgaggtctctcctatcacct

SEQ ID NO: 5537443 - DNA, 25 bp, Homo sapien
aatttgggtttgcacagaaaagaat

SEQ ID NO: 5537444 - DNA, 25 bp, Homo sapien
ttgcacagaaaagaataaacagaat

SEQ ID NO: 5537445 - DNA, 25 bp, Homo sapien
gatgaggacaagccttacaatggtg

SEQ ID NO: 5537446 - DNA, 25 bp, Homo sapien
ccttacaatggtgtgtgagtgtgag

SEQ ID NO: 5537447 - DNA, 25 bp, Homo sapien
tcacatccctgtgtctgagtgttgt

SEQ ID NO: 5537448 - DNA, 25 bp, Homo sapien
tgaccccaaccatctccaccgcagt

SEQ ID NO: 5537449 - DNA, 25 bp, Homo sapien
ttcctctaagaacagcacacagctc

SEQ ID NO: 5537450 - DNA, 25 bp, Homo sapien
tctccaccgcagttggactgacagg

SEQ ID NO: 5537451 - DNA, 25 bp, Homo sapien
tcaccttgacaatggggatttgacc

SEQ ID NO: 5537452 - DNA, 25 bp, Homo sapien
tcagttccctaggaaaaggcagcag

SEQ ID NO: 5537453 - DNA, 25 bp, Homo sapien
catcttaaggccaggtaaatgcatc

SEQ ID NO: 5537454 - DNA, 25 bp, Homo sapien
cactgaacagagactcccgtgagga

SEQ ID NO: 5537455 - DNA, 25 bp, Homo sapien
tgaggaatctgtaagaggctatctt

SEQ ID NO: 5537456 - DNA, 25 bp, Homo sapien
taccaggctgcatcagagcgcctgc

SEQ ID NO: 5537457 - DNA, 25 bp, Homo sapien
aggaggaaagctatccaaggcttca

SEQ ID NO: 5537458 - DNA, 25 bp, Homo sapien
tgacaagaaagtattgcacaggagg

SEQ ID NO: 5537459 - DNA, 25 bp, Homo sapien
cacctgaaaacagccctgactggcg

SEQ ID NO: 5537460 - DNA, 25 bp, Homo sapien
cacttcccattgcagcaggagcatc

SEQ ID NO: 5537461 - DNA, 25 bp, Homo sapien
gaggaacaataatcagtgccacatc

SEQ ID NO: 5537462 - DNA, 25 bp, Homo sapien
ctggtaaaggagaaatgaatacatt

SEQ ID NO: 5537463 - DNA, 25 bp, Homo sapien
ttagcattgggtccctggtcccacc

SEQ ID NO: 5537464 - DNA, 25 bp, Homo sapien
ttctgtcgtcttctcgcagccgtat

SEQ ID NO: 5537465 - DNA, 25 bp, Homo sapien
tctcgcagccgtatagtagtagtag

SEQ ID NO: 5537466 - DNA, 25 bp, Homo sapien
ttattagcattgggtccctggtccc

SEQ ID NO: 5537467 - DNA, 25 bp, Homo sapien
atcccttcccaccccttctgtcgtc

SEQ ID NO: 5537468 - DNA, 25 bp, Homo sapien
gcattgggtccctggtcccaccacc

SEQ ID NO: 5537469 - DNA, 25 bp, Homo sapien
cctggtcccaccacccattcccctc

SEQ ID NO: 5537470 - DNA, 25 bp, Homo sapien
cgtcttctcgcagccgtatagtagt

SEQ ID NO: 5537471 - DNA, 25 bp, Homo sapien
cagtctttattagcattgggtccct

SEQ ID NO: 5537472 - DNA, 25 bp, Homo sapien
cccattcccctccacgtaccatccc

SEQ ID NO: 5537473 - DNA, 25 bp, Homo sapien
cccctccacgtaccatcccttccca

SEQ ID NO: 5537474 - DNA, 25 bp, Homo sapien
gttataaatgtagtaaggcaggtcc

SEQ ID NO: 5537475 - DNA, 25 bp, Homo sapien
tgacgcggagctcgtcgcatttgtt

SEQ ID NO: 5537476 - DNA, 25 bp, Homo sapien
gcacggtgcccctgacgcacatcta

SEQ ID NO: 5537477 - DNA, 25 bp, Homo sapien
cggctgcactcgctgccgcagcact

SEQ ID NO: 5537478 - DNA, 25 bp, Homo sapien
cgcacatctagcgccttcgggacgc

SEQ ID NO: 5537479 - DNA, 25 bp, Homo sapien
tgacgcgtgtcccccactcaccttc

SEQ ID NO: 5537480 - DNA, 25 bp, Homo sapien
cacttttgtataccggccggcgcgc

SEQ ID NO: 5537481 - DNA, 25 bp, Homo sapien
aaggcaggtccaagcacttacaagt

SEQ ID NO: 5537482 - DNA, 25 bp, Homo sapien
tttatcacctacggaggaagcggaa

SEQ ID NO: 5537483 - DNA, 25 bp, Homo sapien
ggcgctgacaccagacttgggtttt

SEQ ID NO: 5537484 - DNA, 25 bp, Homo sapien
aggaagcggaaagcgttttctttgc

SEQ ID NO: 5537485 - DNA, 25 bp, Homo sapien
tattatgaagtgactcatcatagca

SEQ ID NO: 5537486 - DNA, 25 bp, Homo sapien
tgctatgatgagtcacttcataata

SEQ ID NO: 5537487 - DNA, 25 bp, Homo sapien
ttggaggagttattaataaattgtc

SEQ ID NO: 5537488 - DNA, 25 bp, Homo sapien
atgggaacgaattttgttcagcaac

SEQ ID NO: 5537489 - DNA, 25 bp, Homo sapien
gcagaacaattcggtgcccgctgcc

SEQ ID NO: 5537490 - DNA, 25 bp, Homo sapien
aaggcagatgtgaaaagtagttgca

SEQ ID NO: 5537491 - DNA, 25 bp, Homo sapien
gcagcctccgccacttgcccttgac

SEQ ID NO: 5537492 - DNA, 25 bp, Homo sapien
gcggctccctgctcgcgcttcactc

SEQ ID NO: 5537493 - DNA, 25 bp, Homo sapien
tacacttccgccgaagcctacgaac

SEQ ID NO: 5537494 - DNA, 25 bp, Homo sapien
acccacagaggttttggaggagtta

SEQ ID NO: 5537495 - DNA, 25 bp, Homo sapien
ccgaagcctacgaacttgccaaccg

SEQ ID NO: 5537496 - DNA, 25 bp, Homo sapien
cttgccaaccggaaacaaatgggaa

SEQ ID NO: 5537497 - DNA, 25 bp, Homo sapien
agtagttgcagaacaattcggtgcc

SEQ ID NO: 5537498 - DNA, 25 bp, Homo sapien
ggaattctgctgcaacaaatcccag

SEQ ID NO: 5537499 - DNA, 25 bp, Homo sapien
aagcaactgtccaggctaacggtgc

SEQ ID NO: 5537500 - DNA, 25 bp, Homo sapien
caaccctatcgatgccataagcaac

SEQ ID NO: 5537501 - DNA, 25 bp, Homo sapien
tgtcttgcccataatgcactctgcc

SEQ ID NO: 5537502 - DNA, 25 bp, Homo sapien
gctgatcatcagatagaggaattct

SEQ ID NO: 5537503 - DNA, 25 bp, Homo sapien
cccaaatgctattcaagagagatac

SEQ ID NO: 5537504 - DNA, 25 bp, Homo sapien
caaatcccagaatattatccaaccc

SEQ ID NO: 5537505 - DNA, 25 bp, Homo sapien
aggctaacggtgctttgctgttgta

SEQ ID NO: 5537506 - DNA, 25 bp, Homo sapien
aatatcgaaaacctttgtcttgccc

SEQ ID NO: 5537507 - DNA, 25 bp, Homo sapien
tgcactctgcctaatctacccaatc

SEQ ID NO: 5537508 - DNA, 25 bp, Homo sapien
ttaatgtgagatgctaataacagga

SEQ ID NO: 5537509 - DNA, 25 bp, Homo sapien
aaggtatcagcaaatgtagcactcc

SEQ ID NO: 5537510 - DNA, 25 bp, Homo sapien
ccccagtggaccccaagatattcct

SEQ ID NO: 5537511 - DNA, 25 bp, Homo sapien
tgccattccagaggatctaagcttc

SEQ ID NO: 5537512 - DNA, 25 bp, Homo sapien
tcagtctgatgtccacagcacaccc

SEQ ID NO: 5537513 - DNA, 25 bp, Homo sapien
tagtgaatgatgataagtggaaaga

SEQ ID NO: 5537514 - DNA, 25 bp, Homo sapien
gtccacagcacacccgggttgatca

SEQ ID NO: 5537515 - DNA, 25 bp, Homo sapien
ttcccagcaaagtgccctagacagc

SEQ ID NO: 5537516 - DNA, 25 bp, Homo sapien
ccctagacagctagcccccagtgga

SEQ ID NO: 5537517 - DNA, 25 bp, Homo sapien
ttgatcacaggtagacccagaaagg

SEQ ID NO: 5537518 - DNA, 25 bp, Homo sapien
agagcccagatgtggtctcagaagt

SEQ ID NO: 5537519 - DNA, 25 bp, Homo sapien
cataaaaaagggtgtctatattccc

SEQ ID NO: 5537520 - DNA, 25 bp, Homo sapien
ttttgcatatggacagacaggttcg

SEQ ID NO: 5537521 - DNA, 25 bp, Homo sapien
gggaatcaaacggtcctgcaccctc

SEQ ID NO: 5537522 - DNA, 25 bp, Homo sapien
ctgaacaccaagtgcgtggtggaga

SEQ ID NO: 5537523 - DNA, 25 bp, Homo sapien
tttccatgatgggccatgctgagca

SEQ ID NO: 5537524 - DNA, 25 bp, Homo sapien
tgtcggataccaaggtaaaagttgc

SEQ ID NO: 5537525 - DNA, 25 bp, Homo sapien
cttctaacaccaaacagggagaaag

SEQ ID NO: 5537526 - DNA, 25 bp, Homo sapien
gcgcagccaacatgtcggataccaa

SEQ ID NO: 5537527 - DNA, 25 bp, Homo sapien
tacgctggtcaagaagtggttttca

SEQ ID NO: 5537528 - DNA, 25 bp, Homo sapien
cgagaactggaactgaacaccaagt

SEQ ID NO: 5537529 - DNA, 25 bp, Homo sapien
ttataatgagaaagttcgggatctt

SEQ ID NO: 5537530 - DNA, 25 bp, Homo sapien
tttcaggggtataatgcgtgtattt

SEQ ID NO: 5537531 - DNA, 25 bp, Homo sapien
agatgttggtctcagctcctaggct

SEQ ID NO: 5537532 - DNA, 25 bp, Homo sapien
agctcagtcatcggtgcttgtgggc

SEQ ID NO: 5537533 - DNA, 25 bp, Homo sapien
gtttgatccaggccttgactctctc

SEQ ID NO: 5537534 - DNA, 25 bp, Homo sapien
ttgatacacttggatgcaactttac

SEQ ID NO: 5537535 - DNA, 25 bp, Homo sapien
tctgagcttgaagttgctaggactt

SEQ ID NO: 5537536 - DNA, 25 bp, Homo sapien
tcaaacttgtgtgctgaagagactc

SEQ ID NO: 5537537 - DNA, 25 bp, Homo sapien
taggctgaattcagcagatcggccc

SEQ ID NO: 5537538 - DNA, 25 bp, Homo sapien
ttgtgggctttgtttgatccaggcc

SEQ ID NO: 5537539 - DNA, 25 bp, Homo sapien
ttcagcagatcggcccatgaaaaat

SEQ ID NO: 5537540 - DNA, 25 bp, Homo sapien
tgctgaagagactcagatgttggtc

SEQ ID NO: 5537541 - DNA, 25 bp, Homo sapien
ctgccacccgtagttctgagcttga

SEQ ID NO: 5537542 - DNA, 25 bp, Homo sapien
tatgaactctacatggcaacgctcc

SEQ ID NO: 5537543 - DNA, 25 bp, Homo sapien
aatgatagactcagaagtgaactgg

SEQ ID NO: 5537544 - DNA, 25 bp, Homo sapien
gtctttgaagatatttgtaacagtt

SEQ ID NO: 5537545 - DNA, 25 bp, Homo sapien
tagactcagaagtgaactggagatg

SEQ ID NO: 5537546 - DNA, 25 bp, Homo sapien
ggatgctcgtgacagccacaaaagc

SEQ ID NO: 5537547 - DNA, 25 bp, Homo sapien
catggcaacgctcctggagtcccag

SEQ ID NO: 5537548 - DNA, 25 bp, Homo sapien
aattgatgaaaaccgacttactctt

SEQ ID NO: 5537549 - DNA, 25 bp, Homo sapien
tcttctggctcaactcaaggcgctg

SEQ ID NO: 5537550 - DNA, 25 bp, Homo sapien
ccagcagttcaacagactgcacgtc

SEQ ID NO: 5537551 - DNA, 25 bp, Homo sapien
tgcagcacagtacgaggctcttctg

SEQ ID NO: 5537552 - DNA, 25 bp, Homo sapien
aaaaaagttaaggatgaatatgaac

SEQ ID NO: 5537553 - DNA, 25 bp, Homo sapien
ggcagtcttgcttgccgccgagcct

SEQ ID NO: 5537554 - DNA, 25 bp, Homo sapien
ggcggcttgaccttgaacgagccct

SEQ ID NO: 5537555 - DNA, 25 bp, Homo sapien
gctggagcccggcctctttgagccg

SEQ ID NO: 5537556 - DNA, 25 bp, Homo sapien
ccccgccgctgcgaatttctcccgg

SEQ ID NO: 5537557 - DNA, 25 bp, Homo sapien
gcttgaccttgaacgagcccttgag

SEQ ID NO: 5537558 - DNA, 25 bp, Homo sapien
gcgggcacgcaatctgcctccgtcc

SEQ ID NO: 5537559 - DNA, 25 bp, Homo sapien
cccctgtaccccgccgctgcgaatt

SEQ ID NO: 5537560 - DNA, 25 bp, Homo sapien
gcaatctgcctccgtccttcttcac

SEQ ID NO: 5537561 - DNA, 25 bp, Homo sapien
ggaggcggcagtcttgcttgccgcc

SEQ ID NO: 5537562 - DNA, 25 bp, Homo sapien
cccggcctctttgagccgccgccgg

SEQ ID NO: 5537563 - DNA, 25 bp, Homo sapien
cccgccggagcctccgtactgcggg

SEQ ID NO: 5537564 - DNA, 25 bp, Homo sapien
tttactttaagatagttattccatg

SEQ ID NO: 5537565 - DNA, 25 bp, Homo sapien
catggaataactatcttaaagtaaa

SEQ ID NO: 5537566 - DNA, 25 bp, Homo sapien
aggccccaagctcaccatgaaggat

SEQ ID NO: 5537567 - DNA, 25 bp, Homo sapien
ctcgcacgaatttcagacctcccac

SEQ ID NO: 5537568 - DNA, 25 bp, Homo sapien
ctctcaacattaggcaaagggtctc

SEQ ID NO: 5537569 - DNA, 25 bp, Homo sapien
ttaaagaagtacgtgtgtgacttac

SEQ ID NO: 5537570 - DNA, 25 bp, Homo sapien
taagtgtccacagtagaccagccct

SEQ ID NO: 5537571 - DNA, 25 bp, Homo sapien
gaccagccctgctcaggcttggatt

SEQ ID NO: 5537572 - DNA, 25 bp, Homo sapien
cgacaccgttccacggcaaaagccc

SEQ ID NO: 5537573 - DNA, 25 bp, Homo sapien
ggctactggccacatgctcaccgac

SEQ ID NO: 5537574 - DNA, 25 bp, Homo sapien
tatgttgaagactctggctactggc

SEQ ID NO: 5537575 - DNA, 25 bp, Homo sapien
ttggggtccacaactaagtgtccac

SEQ ID NO: 5537576 - DNA, 25 bp, Homo sapien
aaggatacagccacacccttggttc

SEQ ID NO: 5537577 - DNA, 25 bp, Homo sapien
ttaagacacatgttgaatatctgta

SEQ ID NO: 5537578 - DNA, 25 bp, Homo sapien
ctcaaaatgtggtctacggattcac

SEQ ID NO: 5537579 - DNA, 25 bp, Homo sapien
atatacctccaccaaaatgatccgc

SEQ ID NO: 5537580 - DNA, 25 bp, Homo sapien
ggtctacggattcactggggattcc

SEQ ID NO: 5537581 - DNA, 25 bp, Homo sapien
gtttgagaaccaatgatatcaataa

SEQ ID NO: 5537582 - DNA, 25 bp, Homo sapien
tccgccacagcaatcaaatgtgttt

SEQ ID NO: 5537583 - DNA, 25 bp, Homo sapien
ataaaccagtggctctcaaaatgtg

SEQ ID NO: 5537584 - DNA, 25 bp, Homo sapien
tccaccaaaatgatccgccacagca

SEQ ID NO: 5537585 - DNA, 25 bp, Homo sapien
tcgacaattctcctaatgtggccca

SEQ ID NO: 5537586 - DNA, 25 bp, Homo sapien
atgtgtagccctcgacaattctcct

SEQ ID NO: 5537587 - DNA, 25 bp, Homo sapien
gaccccctgcgctagaaagtactta

SEQ ID NO: 5537588 - DNA, 25 bp, Homo sapien
tgtaaaaagagactgacgatgtcta

SEQ ID NO: 5537589 - DNA, 25 bp, Homo sapien
ggatacacatgcattttcagttcac

SEQ ID NO: 5537590 - DNA, 25 bp, Homo sapien
atgcatgtggcaaaaatgcacacag

SEQ ID NO: 5537591 - DNA, 25 bp, Homo sapien
aatgcacacagtacagaggatattc

SEQ ID NO: 5537592 - DNA, 25 bp, Homo sapien
gttctcagaccaggcaactcttcct

SEQ ID NO: 5537593 - DNA, 25 bp, Homo sapien
tgaaagtatgcttcctcaccccaca

SEQ ID NO: 5537594 - DNA, 25 bp, Homo sapien
tgtaggtttagttcatgcatgtggc

SEQ ID NO: 5537595 - DNA, 25 bp, Homo sapien
tcctgccaggaaactattactttga

SEQ ID NO: 5537596 - DNA, 25 bp, Homo sapien
ctcaccccacagcccttcctttccc

SEQ ID NO: 5537597 - DNA, 25 bp, Homo sapien
agtcaccccagaggttaagagatgg

SEQ ID NO: 5537598 - DNA, 25 bp, Homo sapien
agagatggctctccaacgctccagc

SEQ ID NO: 5537599 - DNA, 25 bp, Homo sapien
tcccggacttcaggtgaagtggagg

SEQ ID NO: 5537600 - DNA, 25 bp, Homo sapien
ctttaggaccccttgatgggcagga

SEQ ID NO: 5537601 - DNA, 25 bp, Homo sapien
gcaggacggcccgattccaactctg

SEQ ID NO: 5537602 - DNA, 25 bp, Homo sapien
tctggagccagtaaacaatatcacc

SEQ ID NO: 5537603 - DNA, 25 bp, Homo sapien
ggctactaccagtgcgtggccacca

SEQ ID NO: 5537604 - DNA, 25 bp, Homo sapien
gacacgacagacactggctactacc

SEQ ID NO: 5537605 - DNA, 25 bp, Homo sapien
cggaagacagaatatggttcacgac

SEQ ID NO: 5537606 - DNA, 25 bp, Homo sapien
aacgggatgaagaccattaccgcca

SEQ ID NO: 5537607 - DNA, 25 bp, Homo sapien
gtggctaaagaatgatgccccggtg

SEQ ID NO: 5537608 - DNA, 25 bp, Homo sapien
ggctgggtccaacgcacagcccaaa

SEQ ID NO: 5537609 - DNA, 25 bp, Homo sapien
ggttcacgactgcgaatccaggacc

SEQ ID NO: 5537610 - DNA, 25 bp, Homo sapien
gatggaggataagtcatttagcctt

SEQ ID NO: 5537611 - DNA, 25 bp, Homo sapien
ttttcttattcaagggagaggagaa

SEQ ID NO: 5537612 - DNA, 25 bp, Homo sapien
gtaatagaaagatattagacagttc

SEQ ID NO: 5537613 - DNA, 25 bp, Homo sapien
atttaagaagaccaggggctgttat

SEQ ID NO: 5537614 - DNA, 25 bp, Homo sapien
ggggctgttataactgatggaggat

SEQ ID NO: 5537615 - DNA, 25 bp, Homo sapien
gtgcatatatgcaacaagaaagcat

SEQ ID NO: 5537616 - DNA, 25 bp, Homo sapien
aagaaggaaactactttaagtgatc

SEQ ID NO: 5537617 - DNA, 25 bp, Homo sapien
aaatttcaggcattcgaccactctc

SEQ ID NO: 5537618 - DNA, 25 bp, Homo sapien
tagacagttcataggaatggaaaac

SEQ ID NO: 5537619 - DNA, 25 bp, Homo sapien
gtctgttgaacagaagaatatgaac

SEQ ID NO: 5537620 - DNA, 25 bp, Homo sapien
agtctagaaagcaacaaaaagtggg

SEQ ID NO: 5537621 - DNA, 25 bp, Homo sapien
aacttctgacaccaccaggagctga

SEQ ID NO: 5537622 - DNA, 25 bp, Homo sapien
ttgaaggcttaaacccatattgtaa

SEQ ID NO: 5537623 - DNA, 25 bp, Homo sapien
aggagctgactcacacctgaactga

SEQ ID NO: 5537624 - DNA, 25 bp, Homo sapien
acactgcacactgccagaacctccc

SEQ ID NO: 5537625 - DNA, 25 bp, Homo sapien
ccctgaaccctattgagttttctcc

SEQ ID NO: 5537626 - DNA, 25 bp, Homo sapien
ttgatgacctttggtgtggttcatc

SEQ ID NO: 5537627 - DNA, 25 bp, Homo sapien
gtaaacttctgacaccaccaggagc

SEQ ID NO: 5537628 - DNA, 25 bp, Homo sapien
gatatccgcaatcatgtaaacttct

SEQ ID NO: 5537629 - DNA, 25 bp, Homo sapien
acactgccagaacctccctgaaccc

SEQ ID NO: 5537630 - DNA, 25 bp, Homo sapien
tttcacactgcacactgccagaacc

SEQ ID NO: 5537631 - DNA, 25 bp, Homo sapien
ctgaactgaacaccattgaaggctt

SEQ ID NO: 5537632 - DNA, 25 bp, Homo sapien
ctgatagggaggtgtttctttctga

SEQ ID NO: 5537633 - DNA, 25 bp, Homo sapien
gaagcaatcttaccttagaaggccc

SEQ ID NO: 5537634 - DNA, 25 bp, Homo sapien
ccctctcatcggggtagctgatagg

SEQ ID NO: 5537635 - DNA, 25 bp, Homo sapien
atttaaaagttgggataaacatggc

SEQ ID NO: 5537636 - DNA, 25 bp, Homo sapien
atggagaatcatgatagaacataaa

SEQ ID NO: 5537637 - DNA, 25 bp, Homo sapien
taatgaagatgatattctaaggttc

SEQ ID NO: 5537638 - DNA, 25 bp, Homo sapien
atgaggaagttggatttcatcagct

SEQ ID NO: 5537639 - DNA, 25 bp, Homo sapien
attggcaataaagacaggttgagag

SEQ ID NO: 5537640 - DNA, 25 bp, Homo sapien
tcattggtaaaatgaggaagttgga

SEQ ID NO: 5537641 - DNA, 25 bp, Homo sapien
ggttgagaggcaaaattagacccat

SEQ ID NO: 5537642 - DNA, 25 bp, Homo sapien
tagaaggcccagtagtttgtaataa

SEQ ID NO: 5537643 - DNA, 25 bp, Homo sapien
gttaattgtcctagagtggcagatg

SEQ ID NO: 5537644 - DNA, 25 bp, Homo sapien
gtaggatattagcttgggaaacagg

SEQ ID NO: 5537645 - DNA, 25 bp, Homo sapien
gaagcaacagcaagaccactactat

SEQ ID NO: 5537646 - DNA, 25 bp, Homo sapien
ggagatgcagctcgtttaccagccc

SEQ ID NO: 5537647 - DNA, 25 bp, Homo sapien
taattgagtctctaggaaaggaggg

SEQ ID NO: 5537648 - DNA, 25 bp, Homo sapien
agatggtctgctagaacaagtattc

SEQ ID NO: 5537649 - DNA, 25 bp, Homo sapien
ttatcatagaagcaacagcaagacc

SEQ ID NO: 5537650 - DNA, 25 bp, Homo sapien
tcacagctatggtgagaaaggaatg

SEQ ID NO: 5537651 - DNA, 25 bp, Homo sapien
actccaagtatgggtaaaggataaa

SEQ ID NO: 5537652 - DNA, 25 bp, Homo sapien
ttcaatcacaagtgaggagatgcag

SEQ ID NO: 5537653 - DNA, 25 bp, Homo sapien
cagaaacaacgatgaatgatgcaaa

SEQ ID NO: 5537654 - DNA, 25 bp, Homo sapien
agtcaccccagattaggcacatgcc

SEQ ID NO: 5537655 - DNA, 25 bp, Homo sapien
ttaacgactggctgaataatgagca

SEQ ID NO: 5537656 - DNA, 25 bp, Homo sapien
aagtgtggagttctcctggagaaat

SEQ ID NO: 5537657 - DNA, 25 bp, Homo sapien
gcatctcagagacacttgttgaatg

SEQ ID NO: 5537658 - DNA, 25 bp, Homo sapien
cagtctacactcagtgcaaagggtt

SEQ ID NO: 5537659 - DNA, 25 bp, Homo sapien
gagaagatattgtgcaagtgtggag

SEQ ID NO: 5537660 - DNA, 25 bp, Homo sapien
tcaaaatccagtaggaaggacaaat

SEQ ID NO: 5537661 - DNA, 25 bp, Homo sapien
tttgggtaagacagtagctccctta

SEQ ID NO: 5537662 - DNA, 25 bp, Homo sapien
ctaggttagagtcctgtcaccagag

SEQ ID NO: 5537663 - DNA, 25 bp, Homo sapien
gtcaccagagattgatcacacttga

SEQ ID NO: 5537664 - DNA, 25 bp, Homo sapien
catggtatgtcacagaactacagtc

SEQ ID NO: 5537665 - DNA, 25 bp, Homo sapien
aacaaaagaatttccagaatggagt

SEQ ID NO: 5537666 - DNA, 25 bp, Homo sapien
gtaggtgctgaataagtatctgctg

SEQ ID NO: 5537667 - DNA, 25 bp, Homo sapien
gccagagagattgtttgcctgcctt

SEQ ID NO: 5537668 - DNA, 25 bp, Homo sapien
aagtatctgctgactgaatggggtg

SEQ ID NO: 5537669 - DNA, 25 bp, Homo sapien
tgttcaggacccagcccattcatgt

SEQ ID NO: 5537670 - DNA, 25 bp, Homo sapien
tccattcctagagtagccctgtctc

SEQ ID NO: 5537671 - DNA, 25 bp, Homo sapien
aaattgtgttgccagagagattgtt

SEQ ID NO: 5537672 - DNA, 25 bp, Homo sapien
cagaatggagtcaaaccctttattc

SEQ ID NO: 5537673 - DNA, 25 bp, Homo sapien
ttagagacatatgcctgaagggaaa

SEQ ID NO: 5537674 - DNA, 25 bp, Homo sapien
agactaggcagaaacaaaaagatct

SEQ ID NO: 5537675 - DNA, 25 bp, Homo sapien
agtaactgaaacacaggtgcagagc

SEQ ID NO: 5537676 - DNA, 25 bp, Homo sapien
aatggctggactccccacaatttca

SEQ ID NO: 5537677 - DNA, 25 bp, Homo sapien
aaatgtgagaagcttactggcaact

SEQ ID NO: 5537678 - DNA, 25 bp, Homo sapien
actatcaggtccaggaattgcaggg

SEQ ID NO: 5537679 - DNA, 25 bp, Homo sapien
ggccagcagaaagtcattgcctccc

SEQ ID NO: 5537680 - DNA, 25 bp, Homo sapien
ccaaactgttggaagaacgaatgag

SEQ ID NO: 5537681 - DNA, 25 bp, Homo sapien
cctcaaaggataggactcactttcc

SEQ ID NO: 5537682 - DNA, 25 bp, Homo sapien
cacgctgactcgaagacttgacatc

SEQ ID NO: 5537683 - DNA, 25 bp, Homo sapien
aagaacgaatgagtcacgctgactc

SEQ ID NO: 5537684 - DNA, 25 bp, Homo sapien
gggagagcagtcttaaatgaagagt

SEQ ID NO: 5537685 - DNA, 25 bp, Homo sapien
aggctgacagctgtggtgtcactca

SEQ ID NO: 5537686 - DNA, 25 bp, Homo sapien
tccaggcaaatgtgtcttggttggg

SEQ ID NO: 5537687 - DNA, 25 bp, Homo sapien
caagaggtgagcacttaacaataga

SEQ ID NO: 5537688 - DNA, 25 bp, Homo sapien
tggacgcagtgcttcggactgcttc

SEQ ID NO: 5537689 - DNA, 25 bp, Homo sapien
gcctcgtctttcgtcgccccgtgcc

SEQ ID NO: 5537690 - DNA, 25 bp, Homo sapien
aagagaaaggcattatgattccatt

SEQ ID NO: 5537691 - DNA, 25 bp, Homo sapien
tccattgccgaaaaacaaaaagatc

SEQ ID NO: 5537692 - DNA, 25 bp, Homo sapien
catttcggctcgtgccgtgcggatg

SEQ ID NO: 5537693 - DNA, 25 bp, Homo sapien
cttactgaggaagaaattgttgacc

SEQ ID NO: 5537694 - DNA, 25 bp, Homo sapien
ttcggactgcttcgcaaggaagcgg

SEQ ID NO: 5537695 - DNA, 25 bp, Homo sapien
attgttgacctaagagaaaggcatt

SEQ ID NO: 5537696 - DNA, 25 bp, Homo sapien
attttagaacatgctcaagaggtga

SEQ ID NO: 5537697 - DNA, 25 bp, Homo sapien
gcggaggatccaagtattttagaac

SEQ ID NO: 5537698 - DNA, 25 bp, Homo sapien
caccaagtgaattagtgaacactgg

SEQ ID NO: 5537699 - DNA, 25 bp, Homo sapien
tccaacaaggctagtgatttcagtg

SEQ ID NO: 5537700 - DNA, 25 bp, Homo sapien
gtgatatggagaattggccaacacc

SEQ ID NO: 5537701 - DNA, 25 bp, Homo sapien
ctggaggcagaattcggttccctca

SEQ ID NO: 5537702 - DNA, 25 bp, Homo sapien
tggccaacaccaagtgaattagtga

SEQ ID NO: 5537703 - DNA, 25 bp, Homo sapien
ccctggaccaaaaagcctccccagc

SEQ ID NO: 5537704 - DNA, 25 bp, Homo sapien
gatttcagtgatatggagaattggc

SEQ ID NO: 5537705 - DNA, 25 bp, Homo sapien
gacaaagaaatccaacaaggctagt

SEQ ID NO: 5537706 - DNA, 25 bp, Homo sapien
tccccagcacctgtccccagacacg

SEQ ID NO: 5537707 - DNA, 25 bp, Homo sapien
aggaaagctcaagacaaagaaatcc

SEQ ID NO: 5537708 - DNA, 25 bp, Homo sapien
cctgtccccagacacgacaggtccg

SEQ ID NO: 5537709 - DNA, 25 bp, Homo sapien
gttggacagaccagggttttgagaa

SEQ ID NO: 5537710 - DNA, 25 bp, Homo sapien
agaaaagctgggaagtcactatctt

SEQ ID NO: 5537711 - DNA, 25 bp, Homo sapien
ggacagacacctgaaggatacagta

SEQ ID NO: 5537712 - DNA, 25 bp, Homo sapien
gccagaccacaaaactagctaggac

SEQ ID NO: 5537713 - DNA, 25 bp, Homo sapien
tgatggtagctatgcctccagattc

SEQ ID NO: 5537714 - DNA, 25 bp, Homo sapien
ctcagctattaggggtgctttgggg

SEQ ID NO: 5537715 - DNA, 25 bp, Homo sapien
acagtaaagtatggtggttagtgta

SEQ ID NO: 5537716 - DNA, 25 bp, Homo sapien
tcaggagcacaggcttgtagttgga

SEQ ID NO: 5537717 - DNA, 25 bp, Homo sapien
ggttagtgtagctgtgatggtagct

SEQ ID NO: 5537718 - DNA, 25 bp, Homo sapien
catctctacaatggagcaagcctgc

SEQ ID NO: 5537719 - DNA, 25 bp, Homo sapien
taggcttagggtaagcagaatagtg

SEQ ID NO: 5537720 - DNA, 25 bp, Homo sapien
ctgctgtccagaataccaccaagat

SEQ ID NO: 5537721 - DNA, 25 bp, Homo sapien
tgccctcctgctccgcaaagggacc

SEQ ID NO: 5537722 - DNA, 25 bp, Homo sapien
tagcacctcaagacgtctgtgatgt

SEQ ID NO: 5537723 - DNA, 25 bp, Homo sapien
ctgtgaaatgggacacagagatcca

SEQ ID NO: 5537724 - DNA, 25 bp, Homo sapien
ccccatcttctagcaggcggcagta

SEQ ID NO: 5537725 - DNA, 25 bp, Homo sapien
cgcaaagggaccttgcttctgctgg

SEQ ID NO: 5537726 - DNA, 25 bp, Homo sapien
cctgctgagcactttagctgggcga

SEQ ID NO: 5537727 - DNA, 25 bp, Homo sapien
gtaggtggcaatctctgtgaaatgg

SEQ ID NO: 5537728 - DNA, 25 bp, Homo sapien
gcgctgctgacctgctgagcacttt

SEQ ID NO: 5537729 - DNA, 25 bp, Homo sapien
tgggtgttggtcttttggatgcttt

SEQ ID NO: 5537730 - DNA, 25 bp, Homo sapien
caggactcaggttttgccgaggtcc

SEQ ID NO: 5537731 - DNA, 25 bp, Homo sapien
gtggatggacctatgtacagtttat

SEQ ID NO: 5537732 - DNA, 25 bp, Homo sapien
ctcctcccaaggccaccctaaaggc

SEQ ID NO: 5537733 - DNA, 25 bp, Homo sapien
gtgggggacgcttttcacctctctc

SEQ ID NO: 5537734 - DNA, 25 bp, Homo sapien
actgccagccccctagtgggggacg

SEQ ID NO: 5537735 - DNA, 25 bp, Homo sapien
ggtgtctggatttgtctgggaaacc

SEQ ID NO: 5537736 - DNA, 25 bp, Homo sapien
accctaaaggctggtgtctggattt

SEQ ID NO: 5537737 - DNA, 25 bp, Homo sapien
aagatattttatgtggatggaccta

SEQ ID NO: 5537738 - DNA, 25 bp, Homo sapien
ggttgggaggctctatctagttctc

SEQ ID NO: 5537739 - DNA, 25 bp, Homo sapien
catttctaaatcagggttgggaggc

SEQ ID NO: 5537740 - DNA, 25 bp, Homo sapien
taaacctgtcaaaacaagctagttc

SEQ ID NO: 5537741 - DNA, 25 bp, Homo sapien
attcataggatgtgaaataaacctg

SEQ ID NO: 5537742 - DNA, 25 bp, Homo sapien
agaggccaaaggaatgtccatttgc

SEQ ID NO: 5537743 - DNA, 25 bp, Homo sapien
taaatgtagtcataggggactgagg

SEQ ID NO: 5537744 - DNA, 25 bp, Homo sapien
taaatgtgatcaggactataatatt

SEQ ID NO: 5537745 - DNA, 25 bp, Homo sapien
ctccagtctggtgccaggtagtgga

SEQ ID NO: 5537746 - DNA, 25 bp, Homo sapien
attgctggcatctgtgctaagcttt

SEQ ID NO: 5537747 - DNA, 25 bp, Homo sapien
tggctttggccagtagctaaagtgc

SEQ ID NO: 5537748 - DNA, 25 bp, Homo sapien
cagttattatagggcttttggggaa

SEQ ID NO: 5537749 - DNA, 25 bp, Homo sapien
ttacagtggcaaaaataatgacatg

SEQ ID NO: 5537750 - DNA, 25 bp, Homo sapien
agtagctaaagtgcaagactgaatt

SEQ ID NO: 5537751 - DNA, 25 bp, Homo sapien
ataatgacatgtagcaaagattttc

SEQ ID NO: 5537752 - DNA, 25 bp, Homo sapien
ggtggccttgaagaggccaaaggaa

SEQ ID NO: 5537753 - DNA, 25 bp, Homo sapien
ccgccgcgtctgcaccatcccgcga

SEQ ID NO: 5537754 - DNA, 25 bp, Homo sapien
tctggatgatataaatattgaccgc

SEQ ID NO: 5537755 - DNA, 25 bp, Homo sapien
ataaatattgaccgcacactcctgc

SEQ ID NO: 5537756 - DNA, 25 bp, Homo sapien
tgccaaatttgggcggcctcgcccg

SEQ ID NO: 5537757 - DNA, 25 bp, Homo sapien
gtcccaagagcgcagtggccttggg

SEQ ID NO: 5537758 - DNA, 25 bp, Homo sapien
cacactcctgcttgctccgggtttt

SEQ ID NO: 5537759 - DNA, 25 bp, Homo sapien
tttattgccaaatttgggcggcctc

SEQ ID NO: 5537760 - DNA, 25 bp, Homo sapien
cccgcgatggcgtttctcgtgtttt

SEQ ID NO: 5537761 - DNA, 25 bp, Homo sapien
ttttctctggggtcccaagagcgca

SEQ ID NO: 5537762 - DNA, 25 bp, Homo sapien
cttgctccgggttttctctggggtc

SEQ ID NO: 5537763 - DNA, 25 bp, Homo sapien
ctgcaccatcccgcgatggcgtttc

SEQ ID NO: 5537764 - DNA, 25 bp, Homo sapien
ccaaggccactgcgctcttgggacc

SEQ ID NO: 5537765 - DNA, 25 bp, Homo sapien
cgctcttgggaccccagagaaaacc

SEQ ID NO: 5537766 - DNA, 25 bp, Homo sapien
gagggcaggaccctcacctctcccc

SEQ ID NO: 5537767 - DNA, 25 bp, Homo sapien
agcaggagtgtgcggtcaatattta

SEQ ID NO: 5537768 - DNA, 25 bp, Homo sapien
ctcacctctcccccaaggccactgc

SEQ ID NO: 5537769 - DNA, 25 bp, Homo sapien
atccagaaaagaaaaacacgagaaa

SEQ ID NO: 5537770 - DNA, 25 bp, Homo sapien
gcgaggccgcccaaatttggcaata

SEQ ID NO: 5537771 - DNA, 25 bp, Homo sapien
ggagtgtgcggtcaatatttatatc

SEQ ID NO: 5537772 - DNA, 25 bp, Homo sapien
ctcccccaaggccactgcgctcttg

SEQ ID NO: 5537773 - DNA, 25 bp, Homo sapien
tatatcatccagaaaagaaaaacac

SEQ ID NO: 5537774 - DNA, 25 bp, Homo sapien
tggcaataaataaagcttgggaagc

SEQ ID NO: 5537775 - DNA, 25 bp, Homo sapien
gcgcagctcacgcagctcaacatcc

SEQ ID NO: 5537776 - DNA, 25 bp, Homo sapien
gcgccccgaaaggtcacctcactca

SEQ ID NO: 5537777 - DNA, 25 bp, Homo sapien
ggtgtgctaaaggctgccctccaca

SEQ ID NO: 5537778 - DNA, 25 bp, Homo sapien
cgctccaactccaacatccactctc

SEQ ID NO: 5537779 - DNA, 25 bp, Homo sapien
ctgaaaatatcggggaggttttctc

SEQ ID NO: 5537780 - DNA, 25 bp, Homo sapien
gctcaacatcctgccgggcaccagc

SEQ ID NO: 5537781 - DNA, 25 bp, Homo sapien
gccttcacagcagtctggatgcggg

SEQ ID NO: 5537782 - DNA, 25 bp, Homo sapien
cgcagccgccttcacagcagtctgg

SEQ ID NO: 5537783 - DNA, 25 bp, Homo sapien
cccagacgcctgatattgaagtaaa

SEQ ID NO: 5537784 - DNA, 25 bp, Homo sapien
cactcagcaccactcaagaccaaat

SEQ ID NO: 5537785 - DNA, 25 bp, Homo sapien
gctactgccaacctcgctccaactc

SEQ ID NO: 5537786 - DNA, 25 bp, Homo sapien
gctgctgtggagtcttgcacatccc

SEQ ID NO: 5537787 - DNA, 25 bp, Homo sapien
tgagaccctgttgaagccatcagca

SEQ ID NO: 5537788 - DNA, 25 bp, Homo sapien
atgcacacctgtgcacgcctggcag

SEQ ID NO: 5537789 - DNA, 25 bp, Homo sapien
gaggctgtgatatgtccccccacct

SEQ ID NO: 5537790 - DNA, 25 bp, Homo sapien
gccacagggcagcatattaatgggg

SEQ ID NO: 5537791 - DNA, 25 bp, Homo sapien
gcatgccagggtacaccaatgcaca

SEQ ID NO: 5537792 - DNA, 25 bp, Homo sapien
gcacaccagggtacaccaatggatg

SEQ ID NO: 5537793 - DNA, 25 bp, Homo sapien
acaacgcatgaatcaggagatgtag

SEQ ID NO: 5537794 - DNA, 25 bp, Homo sapien
gccagggcacatcagtgcacacctg

SEQ ID NO: 5537795 - DNA, 25 bp, Homo sapien
catattaatggggcactgatggaaa

SEQ ID NO: 5537796 - DNA, 25 bp, Homo sapien
ttgaaacctatgaaacaacgcatga

SEQ ID NO: 5537797 - DNA, 25 bp, Homo sapien
gtagacaataagaaacgcatgaggg

SEQ ID NO: 5537798 - DNA, 25 bp, Homo sapien
tcacacaagagatggcatggtgtag

SEQ ID NO: 5537799 - DNA, 25 bp, Homo sapien
aaaccttttggagacaccattctgc

SEQ ID NO: 5537800 - DNA, 25 bp, Homo sapien
tggtgtagtgtagcagaatcatgag

SEQ ID NO: 5537801 - DNA, 25 bp, Homo sapien
ttgtggcagcaactggaaacctttt

SEQ ID NO: 5537802 - DNA, 25 bp, Homo sapien
aaaaataggacaacacatgtaggca

SEQ ID NO: 5537803 - DNA, 25 bp, Homo sapien
gcatgagggatgacatagtcctcca

SEQ ID NO: 5537804 - DNA, 25 bp, Homo sapien
tcataatgccaaagtggcactattc

SEQ ID NO: 5537805 - DNA, 25 bp, Homo sapien
taccaagcagttcttgtggcagcaa

SEQ ID NO: 5537806 - DNA, 25 bp, Homo sapien
acatgtaggcaataccaagcagttc

SEQ ID NO: 5537807 - DNA, 25 bp, Homo sapien
cagaatcatgagctgccaggaaatt

SEQ ID NO: 5537808 - DNA, 25 bp, Homo sapien
tggcggtgaagcttgttgaccgttg

SEQ ID NO: 5537809 - DNA, 25 bp, Homo sapien
tccaatgtatagaccagtgtatgtt

SEQ ID NO: 5537810 - DNA, 25 bp, Homo sapien
agcattcagtctgagctgggtgagg

SEQ ID NO: 5537811 - DNA, 25 bp, Homo sapien
actcagaagctaaacaagagccagc

SEQ ID NO: 5537812 - DNA, 25 bp, Homo sapien
tggctccccaggaaacgaatgggaa

SEQ ID NO: 5537813 - DNA, 25 bp, Homo sapien
ctgaattcagatactggtcagcatc

SEQ ID NO: 5537814 - DNA, 25 bp, Homo sapien
gcatctgaagaaacgacaaagctct

SEQ ID NO: 5537815 - DNA, 25 bp, Homo sapien
tcttcacccgtgctgggccttccgg

SEQ ID NO: 5537816 - DNA, 25 bp, Homo sapien
cgtgcaaatgccctgaaacaaaaac

SEQ ID NO: 5537817 - DNA, 25 bp, Homo sapien
gtgtatgttggtataaatctgcccc

SEQ ID NO: 5537818 - DNA, 25 bp, Homo sapien
tgaccgttgtccaaaaacagagtgg

SEQ ID NO: 5537819 - DNA, 25 bp, Homo sapien
tagattggacgactgattattggac

SEQ ID NO: 5537820 - DNA, 25 bp, Homo sapien
tatctgatatggaaggactctgaat

SEQ ID NO: 5537821 - DNA, 25 bp, Homo sapien
gtggcatgatgggctcatgaaccca

SEQ ID NO: 5537822 - DNA, 25 bp, Homo sapien
tgcattatcaggaagatcaaggcag

SEQ ID NO: 5537823 - DNA, 25 bp, Homo sapien
agtgatccaacaaagaagtggcatg

SEQ ID NO: 5537824 - DNA, 25 bp, Homo sapien
ggagtgaagtttaatgttgccaatg

SEQ ID NO: 5537825 - DNA, 25 bp, Homo sapien
attattggacagaatggcatcttgt

SEQ ID NO: 5537826 - DNA, 25 bp, Homo sapien
tttgatgatagacaagcaaggtgca

SEQ ID NO: 5537827 - DNA, 25 bp, Homo sapien
cttgtcaacacctgcggtctcctgc

SEQ ID NO: 5537828 - DNA, 25 bp, Homo sapien
aaaatttagtgaggtgcccaaagtg

SEQ ID NO: 5537829 - DNA, 25 bp, Homo sapien
gttgccaatggaggtatgtggttca

SEQ ID NO: 5537830 - DNA, 25 bp, Homo sapien
ccttctggttgtctttgcgtgggag

SEQ ID NO: 5537831 - DNA, 25 bp, Homo sapien
agggagcccctgaggctacttacct

SEQ ID NO: 5537832 - DNA, 25 bp, Homo sapien
aggcttgtccttctggttgtctttg

SEQ ID NO: 5537833 - DNA, 25 bp, Homo sapien
aagatgaacgtttattagcacacct

SEQ ID NO: 5537834 - DNA, 25 bp, Homo sapien
cttccagaaagcagcagtatccagg

SEQ ID NO: 5537835 - DNA, 25 bp, Homo sapien
ctgaggctacttacctgaccccggg

SEQ ID NO: 5537836 - DNA, 25 bp, Homo sapien
tgacttcaggctcagttttccaggg

SEQ ID NO: 5537837 - DNA, 25 bp, Homo sapien
gcccctgaggctacttacctgaccc

SEQ ID NO: 5537838 - DNA, 25 bp, Homo sapien
acagccttccagaaagcagcagtat

SEQ ID NO: 5537839 - DNA, 25 bp, Homo sapien
tgctttcatggagagcgcctgaaca

SEQ ID NO: 5537840 - DNA, 25 bp, Homo sapien
gcctgaacagaagctctggccaagg

SEQ ID NO: 5537841 - DNA, 25 bp, Homo sapien
ttgagacatagccccataagtagag

SEQ ID NO: 5537842 - DNA, 25 bp, Homo sapien
gaatggtaactgcaactagtctttc

SEQ ID NO: 5537843 - DNA, 25 bp, Homo sapien
tcagagctcaccagagaatggtaac

SEQ ID NO: 5537844 - DNA, 25 bp, Homo sapien
taaatagttatgagcgactgagggt

SEQ ID NO: 5537845 - DNA, 25 bp, Homo sapien
ttgtaaaaagccagtcagagctcac

SEQ ID NO: 5537846 - DNA, 25 bp, Homo sapien
cttcctctctcaaggccaggctctc

SEQ ID NO: 5537847 - DNA, 25 bp, Homo sapien
tggcttcggggaatttgagatagca

SEQ ID NO: 5537848 - DNA, 25 bp, Homo sapien
gttccctagaagttctgagagggca

SEQ ID NO: 5537849 - DNA, 25 bp, Homo sapien
tggaacagaaaaggaatcaacataa

SEQ ID NO: 5537850 - DNA, 25 bp, Homo sapien
aaagatgaacttagtggctgacttc

SEQ ID NO: 5537851 - DNA, 25 bp, Homo sapien
ataagctggttacaagtggctgagc

SEQ ID NO: 5537852 - DNA, 25 bp, Homo sapien
ccctgtcctgaagcagccaagggag

SEQ ID NO: 5537853 - DNA, 25 bp, Homo sapien
catgtagatgctgtgatgcgcagtg

SEQ ID NO: 5537854 - DNA, 25 bp, Homo sapien
ggaaccgttcaatgagcagacagga

SEQ ID NO: 5537855 - DNA, 25 bp, Homo sapien
gttactaaagagtcagaaaagggca

SEQ ID NO: 5537856 - DNA, 25 bp, Homo sapien
ggagggagagaattgctcccctcat

SEQ ID NO: 5537857 - DNA, 25 bp, Homo sapien
gtaagatgtaaagagatgtaaaata

SEQ ID NO: 5537858 - DNA, 25 bp, Homo sapien
aatgtgatagattcggccagagtta

SEQ ID NO: 5537859 - DNA, 25 bp, Homo sapien
ggagaggaagatatctgttgccaat

SEQ ID NO: 5537860 - DNA, 25 bp, Homo sapien
gggcttaaaatgactgaagaaccac

SEQ ID NO: 5537861 - DNA, 25 bp, Homo sapien
ccccgtgagtcacaccctggagatt

SEQ ID NO: 5537862 - DNA, 25 bp, Homo sapien
ttgccaatgctggggtgttggttta

SEQ ID NO: 5537863 - DNA, 25 bp, Homo sapien
ttggaggatttctaacagctctcag

SEQ ID NO: 5537864 - DNA, 25 bp, Homo sapien
gttgagaaacatgaatccaaggatc

SEQ ID NO: 5537865 - DNA, 25 bp, Homo sapien
aacagaggcttaagagcagtttttc

SEQ ID NO: 5537866 - DNA, 25 bp, Homo sapien
tcaaagtgtgataatggaaaataaa

SEQ ID NO: 5537867 - DNA, 25 bp, Homo sapien
cctgcacaggtggctgttgtagaaa

SEQ ID NO: 5537868 - DNA, 25 bp, Homo sapien
tctggtgcccttttcagaagaccaa

SEQ ID NO: 5537869 - DNA, 25 bp, Homo sapien
caccttggagttctactgctgtgtc

SEQ ID NO: 5537870 - DNA, 25 bp, Homo sapien
ctgctgtgtcagttaacagaggctt

SEQ ID NO: 5537871 - DNA, 25 bp, Homo sapien
gtcatcttgagcagaagctaccaac

SEQ ID NO: 5537872 - DNA, 25 bp, Homo sapien
gttgtagaaatgcagcgtttacctg

SEQ ID NO: 5537873 - DNA, 25 bp, Homo sapien
tctcagattaggagctcctggtggg

SEQ ID NO: 5537874 - DNA, 25 bp, Homo sapien
gttctgacactaacaagcaatatcc

SEQ ID NO: 5537875 - DNA, 25 bp, Homo sapien
ctagctgcgtaatttgtggggctca

SEQ ID NO: 5537876 - DNA, 25 bp, Homo sapien
ctacacagcattagataatagccca

SEQ ID NO: 5537877 - DNA, 25 bp, Homo sapien
aagcccaggactagctgcgtaattt

SEQ ID NO: 5537878 - DNA, 25 bp, Homo sapien
atgtctacctgtctgagcaatggat

SEQ ID NO: 5537879 - DNA, 25 bp, Homo sapien
atcaagagagatcctgcccaatttc

SEQ ID NO: 5537880 - DNA, 25 bp, Homo sapien
agactaaaagtctagggatatgatc

SEQ ID NO: 5537881 - DNA, 25 bp, Homo sapien
ataacgaagctggatctcatgctcc

SEQ ID NO: 5537882 - DNA, 25 bp, Homo sapien
tctcaagtagagaataacgaagctg

SEQ ID NO: 5537883 - DNA, 25 bp, Homo sapien
tgtctgagcaatggattagaaacat

SEQ ID NO: 5537884 - DNA, 25 bp, Homo sapien
gaagagaaagcagactaaaagtcta

SEQ ID NO: 5537885 - DNA, 25 bp, Homo sapien
agcaagcgcaagaagtccttcctgc

SEQ ID NO: 5537886 - DNA, 25 bp, Homo sapien
gtgtccgtggccttcccgatcacca

SEQ ID NO: 5537887 - DNA, 25 bp, Homo sapien
ggggcaacctcacgcgccctccagg

SEQ ID NO: 5537888 - DNA, 25 bp, Homo sapien
ctcacctcgaagccaacatgaagga

SEQ ID NO: 5537889 - DNA, 25 bp, Homo sapien
gctgctcactggtttcgtgggcaac

SEQ ID NO: 5537890 - DNA, 25 bp, Homo sapien
ggctctctggacgccatcccctcct

SEQ ID NO: 5537891 - DNA, 25 bp, Homo sapien
gcacccgcctcaaccactcctacac

SEQ ID NO: 5537892 - DNA, 25 bp, Homo sapien
accaccccggtcgtcatcgtcgtgt

SEQ ID NO: 5537893 - DNA, 25 bp, Homo sapien
atgctgctcgtgtcgcgcagctacc

SEQ ID NO: 5537894 - DNA, 25 bp, Homo sapien
ggcaacgcactggccatgctgctcg

SEQ ID NO: 5537895 - DNA, 25 bp, Homo sapien
gcgctcaccgacctggtcgggcagc

SEQ ID NO: 5537896 - DNA, 25 bp, Homo sapien
tagggatgtaaatgaaactgcgtga

SEQ ID NO: 5537897 - DNA, 25 bp, Homo sapien
gtaaatgaaactgcgtgataagccc

SEQ ID NO: 5537898 - DNA, 25 bp, Homo sapien
tgttttagggtgatcatagaaatga

SEQ ID NO: 5537899 - DNA, 25 bp, Homo sapien
cacgctcaagtaaatggcagtgggg

SEQ ID NO: 5537900 - DNA, 25 bp, Homo sapien
cacaagttagtcacagtggcctgca

SEQ ID NO: 5537901 - DNA, 25 bp, Homo sapien
cttactggtgtttaattgcagacat

SEQ ID NO: 5537902 - DNA, 25 bp, Homo sapien
tcctatgcatggtgaatttgagttc

SEQ ID NO: 5537903 - DNA, 25 bp, Homo sapien
atggaaggcaaagaatctctcgtgt

SEQ ID NO: 5537904 - DNA, 25 bp, Homo sapien
gcgtgataagccctgcaagtcattc

SEQ ID NO: 5537905 - DNA, 25 bp, Homo sapien
catattgagaattcaaaccagagag

SEQ ID NO: 5537906 - DNA, 25 bp, Homo sapien
tgtgtaaagttgcattatggaaggc

SEQ ID NO: 5537907 - DNA, 25 bp, Homo sapien
acatagtcccattctgaggcacagg

SEQ ID NO: 5537908 - DNA, 25 bp, Homo sapien
aacaaagtagtacagattgggtggc

SEQ ID NO: 5537909 - DNA, 25 bp, Homo sapien
gctggaaatccaagacgaaatgtca

SEQ ID NO: 5537910 - DNA, 25 bp, Homo sapien
attgggttggtttctctgagacctc

SEQ ID NO: 5537911 - DNA, 25 bp, Homo sapien
tggcagtactgctggtaggaaccag

SEQ ID NO: 5537912 - DNA, 25 bp, Homo sapien
agcttggcctaagagctagagttgg

SEQ ID NO: 5537913 - DNA, 25 bp, Homo sapien
ataagggcataagtcaatttggatc

SEQ ID NO: 5537914 - DNA, 25 bp, Homo sapien
cagctgaggccagactccaattcta

SEQ ID NO: 5537915 - DNA, 25 bp, Homo sapien
atgcatttcagaggacacaagtggt

SEQ ID NO: 5537916 - DNA, 25 bp, Homo sapien
ttcctctgtgagtgtaagtggccaa

SEQ ID NO: 5537917 - DNA, 25 bp, Homo sapien
gtcaatttggatcagggttcacagt

SEQ ID NO: 5537918 - DNA, 25 bp, Homo sapien
ccgctctgttaggttgcatggagaa

SEQ ID NO: 5537919 - DNA, 25 bp, Homo sapien
gagagcagaggccatatcttacata

SEQ ID NO: 5537920 - DNA, 25 bp, Homo sapien
gttcaggctctatcccagaccgctc

SEQ ID NO: 5537921 - DNA, 25 bp, Homo sapien
gaggttcaggttacacagatggttt

SEQ ID NO: 5537922 - DNA, 25 bp, Homo sapien
gcattgtgcaaagattaactgtgat

SEQ ID NO: 5537923 - DNA, 25 bp, Homo sapien
ctgaaccttgcctgttgggccccaa

SEQ ID NO: 5537924 - DNA, 25 bp, Homo sapien
gcatggagaatgcgatgcattgtgc

SEQ ID NO: 5537925 - DNA, 25 bp, Homo sapien
gtctactacaggagaaataaggagc

SEQ ID NO: 5537926 - DNA, 25 bp, Homo sapien
actgacgacaaatcctaagtgcgtt

SEQ ID NO: 5537927 - DNA, 25 bp, Homo sapien
agaaataaggagcagcttagcttgc

SEQ ID NO: 5537928 - DNA, 25 bp, Homo sapien
ttagcttgctaaaaagtgaacacat

SEQ ID NO: 5537929 - DNA, 25 bp, Homo sapien
ttacttcaagaaagaggcagtagag

SEQ ID NO: 5537930 - DNA, 25 bp, Homo sapien
aagaaagcaagccagacttaagctt

SEQ ID NO: 5537931 - DNA, 25 bp, Homo sapien
gtagaagtggcaatgctgtaacctg

SEQ ID NO: 5537932 - DNA, 25 bp, Homo sapien
attgacaactgaagtgatggtgtgg

SEQ ID NO: 5537933 - DNA, 25 bp, Homo sapien
ctgtaacctggtgcctgctgctgtg

SEQ ID NO: 5537934 - DNA, 25 bp, Homo sapien
atgcacacgtgtgctgctgaggtga

SEQ ID NO: 5537935 - DNA, 25 bp, Homo sapien
ccttgagtagcagctgaggtcattg

SEQ ID NO: 5537936 - DNA, 25 bp, Homo sapien
gtagagtaacggagtcctctggtct

SEQ ID NO: 5537937 - DNA, 25 bp, Homo sapien
aaaaatgacaaacgtagaagtggca

SEQ ID NO: 5537938 - DNA, 25 bp, Homo sapien
acagaacacacagatatatgcacac

SEQ ID NO: 5537939 - DNA, 25 bp, Homo sapien
aggcagtagagttgctggttcttaa

SEQ ID NO: 5537940 - DNA, 25 bp, Homo sapien
ataaatgtctggagccaaccttggc

SEQ ID NO: 5537941 - DNA, 25 bp, Homo sapien
accttggcagttatagcaggagaac

SEQ ID NO: 5537942 - DNA, 25 bp, Homo sapien
tgaaagtctgatatttgctgatggc

SEQ ID NO: 5537943 - DNA, 25 bp, Homo sapien
caaaaggcaaaataggattgccctg

SEQ ID NO: 5537944 - DNA, 25 bp, Homo sapien
tgccctgtattgatgtagaaatgtc

SEQ ID NO: 5537945 - DNA, 25 bp, Homo sapien
tctgtgacaagataagcctcctgct

SEQ ID NO: 5537946 - DNA, 25 bp, Homo sapien
cagagcttgtatggtttgctgggtc

SEQ ID NO: 5537947 - DNA, 25 bp, Homo sapien
tttgctgatggcagaatgattattc

SEQ ID NO: 5537948 - DNA, 25 bp, Homo sapien
gtgtagagtagattgtctggtgctc

SEQ ID NO: 5537949 - DNA, 25 bp, Homo sapien
taagggatagtagcaggtcttactt

SEQ ID NO: 5537950 - DNA, 25 bp, Homo sapien
agttatagcaggagaacactgtctt

SEQ ID NO: 5537951 - DNA, 25 bp, Homo sapien
gaccagggacccaatgctaataaag

SEQ ID NO: 5537952 - DNA, 25 bp, Homo sapien
cagggacccaatgctaataaagact

SEQ ID NO: 5537953 - DNA, 25 bp, Homo sapien
cccaatgctaataaagactggactg

SEQ ID NO: 5537954 - DNA, 25 bp, Homo sapien
acccaatgctaataaagactggact

SEQ ID NO: 5537955 - DNA, 25 bp, Homo sapien
ggaccagggacccaatgctaataaa

SEQ ID NO: 5537956 - DNA, 25 bp, Homo sapien
ccagggacccaatgctaataaagac

SEQ ID NO: 5537957 - DNA, 25 bp, Homo sapien
ggacccaatgctaataaagactgga

SEQ ID NO: 5537958 - DNA, 25 bp, Homo sapien
accagggacccaatgctaataaaga

SEQ ID NO: 5537959 - DNA, 25 bp, Homo sapien
agggacccaatgctaataaagactg

SEQ ID NO: 5537960 - DNA, 25 bp, Homo sapien
gggaccagggacccaatgctaataa

SEQ ID NO: 5537961 - DNA, 25 bp, Homo sapien
gacccaatgctaataaagactggac

SEQ ID NO: 5537962 - DNA, 25 bp, Homo sapien
ggtgtcaaaagtataaaggcagcag

SEQ ID NO: 5537963 - DNA, 25 bp, Homo sapien
tcctggcctaaacatcgcaatgatc

SEQ ID NO: 5537964 - DNA, 25 bp, Homo sapien
acaatcatgagaaatcctggcctaa

SEQ ID NO: 5537965 - DNA, 25 bp, Homo sapien
gcaactgtggattttaatgcagcac

SEQ ID NO: 5537966 - DNA, 25 bp, Homo sapien
gggcattgagtcctctgagtagttc

SEQ ID NO: 5537967 - DNA, 25 bp, Homo sapien
aaggcagcaggttcagccccttaaa

SEQ ID NO: 5537968 - DNA, 25 bp, Homo sapien
tcccttactggaaatagcgcattcc

SEQ ID NO: 5537969 - DNA, 25 bp, Homo sapien
aacatcgcaatgatcaatcccctac

SEQ ID NO: 5537970 - DNA, 25 bp, Homo sapien
cctacatgttagggcattgagtcct

SEQ ID NO: 5537971 - DNA, 25 bp, Homo sapien
cacaaagaaatcaagtataacgctg

SEQ ID NO: 5537972 - DNA, 25 bp, Homo sapien
aacgctgactatgcagagtcactgt

SEQ ID NO: 5537973 - DNA, 25 bp, Homo sapien
taattgttagggagtgctgttttat

SEQ ID NO: 5537974 - DNA, 25 bp, Homo sapien
caggacataaaataaggacaaaaac

SEQ ID NO: 5537975 - DNA, 25 bp, Homo sapien
aatcatgtgtgcattatccgggaat

SEQ ID NO: 5537976 - DNA, 25 bp, Homo sapien
gttcagcattaaaggagggaacttc

SEQ ID NO: 5537977 - DNA, 25 bp, Homo sapien
taaactccagaaaaatcaatggtga

SEQ ID NO: 5537978 - DNA, 25 bp, Homo sapien
cctctacaggccaataagaatacat

SEQ ID NO: 5537979 - DNA, 25 bp, Homo sapien
tccgggaatgctaacagtattgaac

SEQ ID NO: 5537980 - DNA, 25 bp, Homo sapien
taaatgactcaggctgcagttttac

SEQ ID NO: 5537981 - DNA, 25 bp, Homo sapien
aggagggaacttcataaacattgat

SEQ ID NO: 5537982 - DNA, 25 bp, Homo sapien
catacacagaaattagggcttatat

SEQ ID NO: 5537983 - DNA, 25 bp, Homo sapien
ttacagaaaacattcagaaatcatg

SEQ ID NO: 5537984 - DNA, 25 bp, Homo sapien
tcttcaatgaggccatcaggagaca

SEQ ID NO: 5537985 - DNA, 25 bp, Homo sapien
ggtgagatcaaggtatcctctggga

SEQ ID NO: 5537986 - DNA, 25 bp, Homo sapien
atcaggagacattctggcaaatagc

SEQ ID NO: 5537987 - DNA, 25 bp, Homo sapien
tctatgtcaggtattgtgctaggtg

SEQ ID NO: 5537988 - DNA, 25 bp, Homo sapien
tagggtctcctgcaaatgtggtaac

SEQ ID NO: 5537989 - DNA, 25 bp, Homo sapien
acaaactacaaatcttcagggcacc

SEQ ID NO: 5537990 - DNA, 25 bp, Homo sapien
gccagaagaaaccctagtacaatcc

SEQ ID NO: 5537991 - DNA, 25 bp, Homo sapien
tcagggcaccagcatctggctcata

SEQ ID NO: 5537992 - DNA, 25 bp, Homo sapien
aggaaagtacggttcatgccgactc

SEQ ID NO: 5537993 - DNA, 25 bp, Homo sapien
aaccctgccaagttaagactatccc

SEQ ID NO: 5537994 - DNA, 25 bp, Homo sapien
tctggcaaatagcttggtgagatca

SEQ ID NO: 5537995 - DNA, 25 bp, Homo sapien
agttggtttgctaccacataaagcc

SEQ ID NO: 5537996 - DNA, 25 bp, Homo sapien
tgcataatgaatgtaaaagggaaat

SEQ ID NO: 5537997 - DNA, 25 bp, Homo sapien
aaagtagaagcaagaatcagttggt

SEQ ID NO: 5537998 - DNA, 25 bp, Homo sapien
aaagccatgctgtttttggtcaaac

SEQ ID NO: 5537999 - DNA, 25 bp, Homo sapien
tggtgtgatcctggttaaaatggat

SEQ ID NO: 5538000 - DNA, 25 bp, Homo sapien
tcactttaggatatattcacattgt

SEQ ID NO: 5538001 - DNA, 25 bp, Homo sapien
gtagaagcaagaatcagttggtttg

SEQ ID NO: 5538002 - DNA, 25 bp, Homo sapien
attgttttggtgaatttgctgaatt

SEQ ID NO: 5538003 - DNA, 25 bp, Homo sapien
ttttggtcaaactgtgtaaactgga

SEQ ID NO: 5538004 - DNA, 25 bp, Homo sapien
gtgatcctggttaaaatggatgatt

SEQ ID NO: 5538005 - DNA, 25 bp, Homo sapien
tgctaccacataaagccatgctgtt

SEQ ID NO: 5538006 - DNA, 25 bp, Homo sapien
cagccccgtccacttccccggtgga

SEQ ID NO: 5538007 - DNA, 25 bp, Homo sapien
cggtggattcttctccgttccccgc

SEQ ID NO: 5538008 - DNA, 25 bp, Homo sapien
tgcggccactctagtcgacccacgc

SEQ ID NO: 5538009 - DNA, 25 bp, Homo sapien
caactgctgtctagaaaaccgagga

SEQ ID NO: 5538010 - DNA, 25 bp, Homo sapien
caggtgaagctcctttccgccgtca

SEQ ID NO: 5538011 - DNA, 25 bp, Homo sapien
ctgctgtctagaaaaccgaggaaag

SEQ ID NO: 5538012 - DNA, 25 bp, Homo sapien
cacttccccggtggattcttctccg

SEQ ID NO: 5538013 - DNA, 25 bp, Homo sapien
ccccacaactgctgtctagaaaacc

SEQ ID NO: 5538014 - DNA, 25 bp, Homo sapien
ctgtctagaaaaccgaggaaagtga

SEQ ID NO: 5538015 - DNA, 25 bp, Homo sapien
gaccagcgaaaaagctccatgctct

SEQ ID NO: 5538016 - DNA, 25 bp, Homo sapien
acggcaaggattcaaccccacaact

SEQ ID NO: 5538017 - DNA, 25 bp, Homo sapien
tcattggtagatacaccattccgcc

SEQ ID NO: 5538018 - DNA, 25 bp, Homo sapien
aaaaaaggaagtttcaggtgataca

SEQ ID NO: 5538019 - DNA, 25 bp, Homo sapien
aggtgatacaagatgtcctgccatc

SEQ ID NO: 5538020 - DNA, 25 bp, Homo sapien
ccgaggcccacccagtccatctgtt

SEQ ID NO: 5538021 - DNA, 25 bp, Homo sapien
atcctgtgggacgtttgcgaatttt

SEQ ID NO: 5538022 - DNA, 25 bp, Homo sapien
tgcatctcaagccacccgtacccga

SEQ ID NO: 5538023 - DNA, 25 bp, Homo sapien
tcacacccaccacctagcggcgaaa

SEQ ID NO: 5538024 - DNA, 25 bp, Homo sapien
tatgtacccagaaactcaatacttc

SEQ ID NO: 5538025 - DNA, 25 bp, Homo sapien
tcacacctgaaggatggttgtccac

SEQ ID NO: 5538026 - DNA, 25 bp, Homo sapien
acactcaggacagtattatgtaccc

SEQ ID NO: 5538027 - DNA, 25 bp, Homo sapien
aaacttaaaggccgcaaaagactca

SEQ ID NO: 5538028 - DNA, 25 bp, Homo sapien
ggtcacctatgaggagtaagaagac

SEQ ID NO: 5538029 - DNA, 25 bp, Homo sapien
gaaacggtagactgaacagtggtca

SEQ ID NO: 5538030 - DNA, 25 bp, Homo sapien
ttttaagacagaatgttgccgggta

SEQ ID NO: 5538031 - DNA, 25 bp, Homo sapien
caggtgatctgtctcgtgattcgcc

SEQ ID NO: 5538032 - DNA, 25 bp, Homo sapien
ccctctcttgcccaggtgatctgtc

SEQ ID NO: 5538033 - DNA, 25 bp, Homo sapien
atctggaggtctgtagcctgcttta

SEQ ID NO: 5538034 - DNA, 25 bp, Homo sapien
gccaccaatttaggatctggaggtc

SEQ ID NO: 5538035 - DNA, 25 bp, Homo sapien
ttggctgaataaatggtttgctaag

SEQ ID NO: 5538036 - DNA, 25 bp, Homo sapien
tgctaagcaaagagtagacatatgt

SEQ ID NO: 5538037 - DNA, 25 bp, Homo sapien
taaaaatgcctttagatggcctaca

SEQ ID NO: 5538038 - DNA, 25 bp, Homo sapien
gcagtaggggttcctggtcaatttg

SEQ ID NO: 5538039 - DNA, 25 bp, Homo sapien
tcctcacatccagcccccagactac

SEQ ID NO: 5538040 - DNA, 25 bp, Homo sapien
ccagactaccgctcatgggctcagg

SEQ ID NO: 5538041 - DNA, 25 bp, Homo sapien
gtcccaaacataagcaagagatgga

SEQ ID NO: 5538042 - DNA, 25 bp, Homo sapien
agagagtctctgtcccattgggttc

SEQ ID NO: 5538043 - DNA, 25 bp, Homo sapien
attacagattaaaagagaaacacac

SEQ ID NO: 5538044 - DNA, 25 bp, Homo sapien
ggaagggaccaatgtccagcaagtg

SEQ ID NO: 5538045 - DNA, 25 bp, Homo sapien
tcctagccaactcagaactcctcac

SEQ ID NO: 5538046 - DNA, 25 bp, Homo sapien
cagcaagtggactttgccccatgtc

SEQ ID NO: 5538047 - DNA, 25 bp, Homo sapien
ttggcacttgggagacactcaaaaa

SEQ ID NO: 5538048 - DNA, 25 bp, Homo sapien
tcaagccagtaaaaagccagagaag

SEQ ID NO: 5538049 - DNA, 25 bp, Homo sapien
tttggacaaacaagtgaatgtgagc

SEQ ID NO: 5538050 - DNA, 25 bp, Homo sapien
ctgagatgcgtggacattctatgac

SEQ ID NO: 5538051 - DNA, 25 bp, Homo sapien
ctttccattgtcctgccggggtctc

SEQ ID NO: 5538052 - DNA, 25 bp, Homo sapien
atagactactctgagatgcgtggac

SEQ ID NO: 5538053 - DNA, 25 bp, Homo sapien
cctataagcagtgataggtgaggaa

SEQ ID NO: 5538054 - DNA, 25 bp, Homo sapien
tatgacatagtcgcgcatcagatac

SEQ ID NO: 5538055 - DNA, 25 bp, Homo sapien
tctagagccagaaaaatggcaacag

SEQ ID NO: 5538056 - DNA, 25 bp, Homo sapien
gggctgagtgacatgaaagcatttg

SEQ ID NO: 5538057 - DNA, 25 bp, Homo sapien
gagattagttggtagagaaataaga

SEQ ID NO: 5538058 - DNA, 25 bp, Homo sapien
aaaagcctggggtattgttacttga

SEQ ID NO: 5538059 - DNA, 25 bp, Homo sapien
ctgcagctacagaaaaagtcctttc

SEQ ID NO: 5538060 - DNA, 25 bp, Homo sapien
aaagaagcatgtccggaggcttttt

SEQ ID NO: 5538061 - DNA, 25 bp, Homo sapien
catggactctaaagtgctaccaatg

SEQ ID NO: 5538062 - DNA, 25 bp, Homo sapien
tcccctagcaccgggctcctggtgg

SEQ ID NO: 5538063 - DNA, 25 bp, Homo sapien
gggctcctggtggacagccttagaa

SEQ ID NO: 5538064 - DNA, 25 bp, Homo sapien
tcccctgccgctcagtcaggcctgg

SEQ ID NO: 5538065 - DNA, 25 bp, Homo sapien
tacaatcaaacccacgggccgtgct

SEQ ID NO: 5538066 - DNA, 25 bp, Homo sapien
gtggcccccactgtctggctgctcg

SEQ ID NO: 5538067 - DNA, 25 bp, Homo sapien
gcctggggatgcttcccctagcacc

SEQ ID NO: 5538068 - DNA, 25 bp, Homo sapien
ctctctggccatttagtgggggaag

SEQ ID NO: 5538069 - DNA, 25 bp, Homo sapien
ccagtggaacagagtaatacaatca

SEQ ID NO: 5538070 - DNA, 25 bp, Homo sapien
gagaacagtcccaggccctgtcctc

SEQ ID NO: 5538071 - DNA, 25 bp, Homo sapien
atggagagaagcatcctgattgaga

SEQ ID NO: 5538072 - DNA, 25 bp, Homo sapien
gccacgaactacatggagtttccaa

SEQ ID NO: 5538073 - DNA, 25 bp, Homo sapien
atcctagcgacaagaaaccagctca

SEQ ID NO: 5538074 - DNA, 25 bp, Homo sapien
gctcaaggcactccacaggtcaatc

SEQ ID NO: 5538075 - DNA, 25 bp, Homo sapien
tcctggaataaaccatcctagcgac

SEQ ID NO: 5538076 - DNA, 25 bp, Homo sapien
cctagcaacatggaacatgacttcc

SEQ ID NO: 5538077 - DNA, 25 bp, Homo sapien
agaaaccagctcaaaaaaggaggaa

SEQ ID NO: 5538078 - DNA, 25 bp, Homo sapien
tgagccttcctagtaacgtgagacc

SEQ ID NO: 5538079 - DNA, 25 bp, Homo sapien
taacattaagagaaaagagatagga

SEQ ID NO: 5538080 - DNA, 25 bp, Homo sapien
actcagcactcagagtcttggacac

SEQ ID NO: 5538081 - DNA, 25 bp, Homo sapien
acgtgagacctgaatttcctggaat

SEQ ID NO: 5538082 - DNA, 25 bp, Homo sapien
taagtctggagccctcagaatcatc

SEQ ID NO: 5538083 - DNA, 25 bp, Homo sapien
ctttgctacatggttgtagaacaca

SEQ ID NO: 5538084 - DNA, 25 bp, Homo sapien
gacgctggccctttgctacatggtt

SEQ ID NO: 5538085 - DNA, 25 bp, Homo sapien
gcgctgccactcgcgctggagtttg

SEQ ID NO: 5538086 - DNA, 25 bp, Homo sapien
atcgagttccttgaaacgagttctc

SEQ ID NO: 5538087 - DNA, 25 bp, Homo sapien
ggagacgctggccctttgctacatg

SEQ ID NO: 5538088 - DNA, 25 bp, Homo sapien
tgaaacgagttctcaggagttggtg

SEQ ID NO: 5538089 - DNA, 25 bp, Homo sapien
ccttgaaacgagttctcaggagttg

SEQ ID NO: 5538090 - DNA, 25 bp, Homo sapien
tccccggaaacatcgagttccttga

SEQ ID NO: 5538091 - DNA, 25 bp, Homo sapien
gggccgccttttgttggcgccacgc

SEQ ID NO: 5538092 - DNA, 25 bp, Homo sapien
aacatcgagttccttgaaacgagtt

SEQ ID NO: 5538093 - DNA, 25 bp, Homo sapien
aaacgagttctcaggagttggtgga

SEQ ID NO: 5538094 - DNA, 25 bp, Homo sapien
ggccggcttgcacctgctctgtcac

SEQ ID NO: 5538095 - DNA, 25 bp, Homo sapien
gtctggaaaatgtctgggccattcc

SEQ ID NO: 5538096 - DNA, 25 bp, Homo sapien
tagaagtagatacagcttagagagc

SEQ ID NO: 5538097 - DNA, 25 bp, Homo sapien
acagcttagagagccaaggtaacaa

SEQ ID NO: 5538098 - DNA, 25 bp, Homo sapien
gctctcaccgaacagagtgcgttcc

SEQ ID NO: 5538099 - DNA, 25 bp, Homo sapien
gaactgaacggccacactcctgcag

SEQ ID NO: 5538100 - DNA, 25 bp, Homo sapien
cctaaagggaggctctaactcatga

SEQ ID NO: 5538101 - DNA, 25 bp, Homo sapien
actcttaggacagaagaggtctgga

SEQ ID NO: 5538102 - DNA, 25 bp, Homo sapien
ggagtcaatgcgagctgagttgctc

SEQ ID NO: 5538103 - DNA, 25 bp, Homo sapien
ctggtacttttgagggagtcagaag

SEQ ID NO: 5538104 - DNA, 25 bp, Homo sapien
ctcatttcacggaggaggaaatggg

SEQ ID NO: 5538105 - DNA, 25 bp, Homo sapien
gatgcctgtcttgttagtgttctcc

SEQ ID NO: 5538106 - DNA, 25 bp, Homo sapien
gtaaacaaactgatcctaaccattc

SEQ ID NO: 5538107 - DNA, 25 bp, Homo sapien
taagtctctagaacccaatgtcttc

SEQ ID NO: 5538108 - DNA, 25 bp, Homo sapien
gcatagcctgtaagtctctagaacc

SEQ ID NO: 5538109 - DNA, 25 bp, Homo sapien
atgagaaactacaagcatagcctgt

SEQ ID NO: 5538110 - DNA, 25 bp, Homo sapien
agaacataatgatcactaaagttgt

SEQ ID NO: 5538111 - DNA, 25 bp, Homo sapien
ttggtattaccatcagatgcctgtc

SEQ ID NO: 5538112 - DNA, 25 bp, Homo sapien
tctatggaataagctttcaatcagt

SEQ ID NO: 5538113 - DNA, 25 bp, Homo sapien
ctcttctgtacccaggttcagacta

SEQ ID NO: 5538114 - DNA, 25 bp, Homo sapien
tcttcacacaaataacctcaccttc

SEQ ID NO: 5538115 - DNA, 25 bp, Homo sapien
acaaaaggaaggtaaatatgagaaa

SEQ ID NO: 5538116 - DNA, 25 bp, Homo sapien
aaccagtgcccctcccttcgccagt

SEQ ID NO: 5538117 - DNA, 25 bp, Homo sapien
gaaacaacataaccagtgcccctcc

SEQ ID NO: 5538118 - DNA, 25 bp, Homo sapien
atagagccataaagaaagcaaagcg

SEQ ID NO: 5538119 - DNA, 25 bp, Homo sapien
agcaaagcgcagaaatgttggattt

SEQ ID NO: 5538120 - DNA, 25 bp, Homo sapien
ctcccttcgccagtgcaaaggcagc

SEQ ID NO: 5538121 - DNA, 25 bp, Homo sapien
gttggatttgaatctgacactggag

SEQ ID NO: 5538122 - DNA, 25 bp, Homo sapien
aggactgtcgaatggaaacaacata

SEQ ID NO: 5538123 - DNA, 25 bp, Homo sapien
gaatggaaacaacataaccagtgcc

SEQ ID NO: 5538124 - DNA, 25 bp, Homo sapien
tgaagaatagagccataaagaaagc

SEQ ID NO: 5538125 - DNA, 25 bp, Homo sapien
attctccatggccagtgaggaagtc

SEQ ID NO: 5538126 - DNA, 25 bp, Homo sapien
aagtcttgaagaatagagccataaa

SEQ ID NO: 5538127 - DNA, 25 bp, Homo sapien
tccaatcagatgaaaacgttgcttc

SEQ ID NO: 5538128 - DNA, 25 bp, Homo sapien
ggttcaagagctaagactgaaggtg

SEQ ID NO: 5538129 - DNA, 25 bp, Homo sapien
gaggatgagcacgccactgctctca

SEQ ID NO: 5538130 - DNA, 25 bp, Homo sapien
tttcctgaaggtagtagcatatctt

SEQ ID NO: 5538131 - DNA, 25 bp, Homo sapien
caggatttaatcagctcaggtcaag

SEQ ID NO: 5538132 - DNA, 25 bp, Homo sapien
actgaaggtgagaagctcaaacttt

SEQ ID NO: 5538133 - DNA, 25 bp, Homo sapien
tgcactaacatcactgaatcggttg

SEQ ID NO: 5538134 - DNA, 25 bp, Homo sapien
gcccagtaaaggctaccagaggatg

SEQ ID NO: 5538135 - DNA, 25 bp, Homo sapien
ctaactttttgatgtggctgcttcc

SEQ ID NO: 5538136 - DNA, 25 bp, Homo sapien
caaaagcctgtttctggatgcacta

SEQ ID NO: 5538137 - DNA, 25 bp, Homo sapien
tccttccagtgggctgacacagatt

SEQ ID NO: 5538138 - DNA, 25 bp, Homo sapien
gtcatcgatctcgccgtggactgga

SEQ ID NO: 5538139 - DNA, 25 bp, Homo sapien
cgagaccacttttgaggacagagac

SEQ ID NO: 5538140 - DNA, 25 bp, Homo sapien
acaccatcgactggctaagggaaaa

SEQ ID NO: 5538141 - DNA, 25 bp, Homo sapien
ctggtatagccatgagcagtgttgc

SEQ ID NO: 5538142 - DNA, 25 bp, Homo sapien
tggatttcctcgatgagccgttccc

SEQ ID NO: 5538143 - DNA, 25 bp, Homo sapien
tgtaattagcatggtcaatgcggga

SEQ ID NO: 5538144 - DNA, 25 bp, Homo sapien
agccgttccctgatgtggggacgta

SEQ ID NO: 5538145 - DNA, 25 bp, Homo sapien
gttgctggacttctaacgagaccac

SEQ ID NO: 5538146 - DNA, 25 bp, Homo sapien
caaggagtccatatgggagttcatc

SEQ ID NO: 5538147 - DNA, 25 bp, Homo sapien
gggagttcatcaagagcctgctgga

SEQ ID NO: 5538148 - DNA, 25 bp, Homo sapien
ggacgtatgaggacttccacaccat

SEQ ID NO: 5538149 - DNA, 25 bp, Homo sapien
tggatgtgcccagagttacttctgt

SEQ ID NO: 5538150 - DNA, 25 bp, Homo sapien
cacagttgcgattccatgagtagct

SEQ ID NO: 5538151 - DNA, 25 bp, Homo sapien
atgtaaactgcagaagtcagagcaa

SEQ ID NO: 5538152 - DNA, 25 bp, Homo sapien
tgtggccaggtgctcgctggccatc

SEQ ID NO: 5538153 - DNA, 25 bp, Homo sapien
caagtgctggtttctagttctgaac

SEQ ID NO: 5538154 - DNA, 25 bp, Homo sapien
gtgctcgctggccatcacagttgcg

SEQ ID NO: 5538155 - DNA, 25 bp, Homo sapien
gttctgaacatcaactaaagagttt

SEQ ID NO: 5538156 - DNA, 25 bp, Homo sapien
tgagtagctgctttatgactgcttt

SEQ ID NO: 5538157 - DNA, 25 bp, Homo sapien
aatgacagcaatttataacaagttc

SEQ ID NO: 5538158 - DNA, 25 bp, Homo sapien
tgaacagattaaagatttgtgtagt

SEQ ID NO: 5538159 - DNA, 25 bp, Homo sapien
aagaagaacaccaacagtagcatga

SEQ ID NO: 5538160 - DNA, 25 bp, Homo sapien
tggagatagagctctggcttattta

SEQ ID NO: 5538161 - DNA, 25 bp, Homo sapien
acaggctgacagtcaagaaataggc

SEQ ID NO: 5538162 - DNA, 25 bp, Homo sapien
ggagaattgctggagggcaattcga

SEQ ID NO: 5538163 - DNA, 25 bp, Homo sapien
aaggagttgatgaaaccaaattatg

SEQ ID NO: 5538164 - DNA, 25 bp, Homo sapien
attagtgggaacactgtggtatttc

SEQ ID NO: 5538165 - DNA, 25 bp, Homo sapien
taaaaaatagcattagtgggaacac

SEQ ID NO: 5538166 - DNA, 25 bp, Homo sapien
aatagcattgatgatttgcaccatt

SEQ ID NO: 5538167 - DNA, 25 bp, Homo sapien
cagctaagagaaaatagttacttgt

SEQ ID NO: 5538168 - DNA, 25 bp, Homo sapien
agaggatagttgtagagaagtattt

SEQ ID NO: 5538169 - DNA, 25 bp, Homo sapien
tgtagtttcaagagaacaggctgac

SEQ ID NO: 5538170 - DNA, 25 bp, Homo sapien
tcatccactaccagctaagagaaaa

SEQ ID NO: 5538171 - DNA, 25 bp, Homo sapien
gtcctaaacttaacatgaaagtatc

SEQ ID NO: 5538172 - DNA, 25 bp, Homo sapien
ttcaaatcacaaacgtaaaatcaat

SEQ ID NO: 5538173 - DNA, 25 bp, Homo sapien
agggaacagaggtgctatttactat

SEQ ID NO: 5538174 - DNA, 25 bp, Homo sapien
gattcaaatcacttaaggagcatac

SEQ ID NO: 5538175 - DNA, 25 bp, Homo sapien
ttcccagagttggaaaatcatttac

SEQ ID NO: 5538176 - DNA, 25 bp, Homo sapien
taaccaattaagacaaaacattctc

SEQ ID NO: 5538177 - DNA, 25 bp, Homo sapien
taaggagcatacacaagattagtcc

SEQ ID NO: 5538178 - DNA, 25 bp, Homo sapien
ttttcatgagctaagttaaatattc

SEQ ID NO: 5538179 - DNA, 25 bp, Homo sapien
atattatggatttgaattattgcat

SEQ ID NO: 5538180 - DNA, 25 bp, Homo sapien
aattctacacattcccagagttgga

SEQ ID NO: 5538181 - DNA, 25 bp, Homo sapien
ttcaaattggaatcataagcttttt

SEQ ID NO: 5538182 - DNA, 25 bp, Homo sapien
tcaaaatagtccagctagagaaagg

SEQ ID NO: 5538183 - DNA, 25 bp, Homo sapien
attcccagtcagcaataaagaaggt

SEQ ID NO: 5538184 - DNA, 25 bp, Homo sapien
gagacagtcaagaattttaggagct

SEQ ID NO: 5538185 - DNA, 25 bp, Homo sapien
ctttgagaggacattcccagtcagc

SEQ ID NO: 5538186 - DNA, 25 bp, Homo sapien
acgacagaagggtataatcaaaata

SEQ ID NO: 5538187 - DNA, 25 bp, Homo sapien
attttaggagctttgagaggacatt

SEQ ID NO: 5538188 - DNA, 25 bp, Homo sapien
ggagctttgagaggacattcccagt

SEQ ID NO: 5538189 - DNA, 25 bp, Homo sapien
acagaagggtataatcaaaatagtc

SEQ ID NO: 5538190 - DNA, 25 bp, Homo sapien
tgagaggacattcccagtcagcaat

SEQ ID NO: 5538191 - DNA, 25 bp, Homo sapien
tcccagtcagcaataaagaaggtgg

SEQ ID NO: 5538192 - DNA, 25 bp, Homo sapien
agaattttaggagctttgagaggac

SEQ ID NO: 5538193 - DNA, 25 bp, Homo sapien
tttaaagcatgaagaagacaaggaa

SEQ ID NO: 5538194 - DNA, 25 bp, Homo sapien
tgtgggagctttgccataggtagat

SEQ ID NO: 5538195 - DNA, 25 bp, Homo sapien
cacagctcagtgaagatgaagttac

SEQ ID NO: 5538196 - DNA, 25 bp, Homo sapien
cacaccaacttgtaggctgtgggag

SEQ ID NO: 5538197 - DNA, 25 bp, Homo sapien
tttaactgggattgctccctccctc

SEQ ID NO: 5538198 - DNA, 25 bp, Homo sapien
aaaacaagagtcaaggctcacacca

SEQ ID NO: 5538199 - DNA, 25 bp, Homo sapien
tgtaccaggtagaggacattattat

SEQ ID NO: 5538200 - DNA, 25 bp, Homo sapien
aggtagatacaatgtagaagtatac

SEQ ID NO: 5538201 - DNA, 25 bp, Homo sapien
tactatcagccactagtgaactctt

SEQ ID NO: 5538202 - DNA, 25 bp, Homo sapien
attcaaaggattatgcacagctcag

SEQ ID NO: 5538203 - DNA, 25 bp, Homo sapien
tactgttaaaggggaattgcacatt

SEQ ID NO: 5538204 - DNA, 25 bp, Homo sapien
ggcatggggatccatttacaccgcc

SEQ ID NO: 5538205 - DNA, 25 bp, Homo sapien
agctctctgggatggtgcctcccaa

SEQ ID NO: 5538206 - DNA, 25 bp, Homo sapien
tgaagatgtccagagacagcactca

SEQ ID NO: 5538207 - DNA, 25 bp, Homo sapien
gtcctgccatcgtagtcactgtctc

SEQ ID NO: 5538208 - DNA, 25 bp, Homo sapien
atctgaacacaggatggctcctggc

SEQ ID NO: 5538209 - DNA, 25 bp, Homo sapien
gacggtgctcacaaaatgctccaga

SEQ ID NO: 5538210 - DNA, 25 bp, Homo sapien
cttctggtacctagtggatgtcttc

SEQ ID NO: 5538211 - DNA, 25 bp, Homo sapien
tttcttgacatgaatgaggcatcag

SEQ ID NO: 5538212 - DNA, 25 bp, Homo sapien
cttccccatcgcagctgttcccggc

SEQ ID NO: 5538213 - DNA, 25 bp, Homo sapien
agggggtttagtgcctccagtaaga

SEQ ID NO: 5538214 - DNA, 25 bp, Homo sapien
tcctgagaagattctgggctgaaga

SEQ ID NO: 5538215 - DNA, 25 bp, Homo sapien
actaatcaaggcctgtattcctccc

SEQ ID NO: 5538216 - DNA, 25 bp, Homo sapien
caacctcacacccaggaacccattc

SEQ ID NO: 5538217 - DNA, 25 bp, Homo sapien
tttaggtttgtagtcacagcctgtt

SEQ ID NO: 5538218 - DNA, 25 bp, Homo sapien
tcccccttgagtcaaagcccatggg

SEQ ID NO: 5538219 - DNA, 25 bp, Homo sapien
agtcgaactaacttcctgtgccgga

SEQ ID NO: 5538220 - DNA, 25 bp, Homo sapien
attcaaggaccacagagtttacacc

SEQ ID NO: 5538221 - DNA, 25 bp, Homo sapien
gaatagcttaaggagagactcacca

SEQ ID NO: 5538222 - DNA, 25 bp, Homo sapien
tcaccccgagaactgagcttgaaat

SEQ ID NO: 5538223 - DNA, 25 bp, Homo sapien
ccggaagcttttgtctgtctcagtg

SEQ ID NO: 5538224 - DNA, 25 bp, Homo sapien
accaactacccagaagccaggaata

SEQ ID NO: 5538225 - DNA, 25 bp, Homo sapien
cccaggaggcatgcaatatttacca

SEQ ID NO: 5538226 - DNA, 25 bp, Homo sapien
tcagcaacctggaggagttccctcc

SEQ ID NO: 5538227 - DNA, 25 bp, Homo sapien
cgccccagcctcacgctgtctgatc

SEQ ID NO: 5538228 - DNA, 25 bp, Homo sapien
cctgcggaaagaattcgtaccgttc

SEQ ID NO: 5538229 - DNA, 25 bp, Homo sapien
agcctcacgctgtctgatccgccaa

SEQ ID NO: 5538230 - DNA, 25 bp, Homo sapien
agaattcgtaccgttcctgttgaac

SEQ ID NO: 5538231 - DNA, 25 bp, Homo sapien
gcgcgcagccagcttttccctccga

SEQ ID NO: 5538232 - DNA, 25 bp, Homo sapien
cagcttttccctccgaccgaggccc

SEQ ID NO: 5538233 - DNA, 25 bp, Homo sapien
cgcagccagcttttccctccgaccg

SEQ ID NO: 5538234 - DNA, 25 bp, Homo sapien
tggaggagttccctcccgtaggctc

SEQ ID NO: 5538235 - DNA, 25 bp, Homo sapien
tgatccgccaaacctcagcaacctg

SEQ ID NO: 5538236 - DNA, 25 bp, Homo sapien
cacgctgtctgatccgccaaacctc

SEQ ID NO: 5538237 - DNA, 25 bp, Homo sapien
ctgataacctggtgcttcatgcccc

SEQ ID NO: 5538238 - DNA, 25 bp, Homo sapien
aagaggaagtttttggacacagatc

SEQ ID NO: 5538239 - DNA, 25 bp, Homo sapien
gtgctaactatggagaaaagtgcct

SEQ ID NO: 5538240 - DNA, 25 bp, Homo sapien
ttgtgcctatgataggaagcctccc

SEQ ID NO: 5538241 - DNA, 25 bp, Homo sapien
gtggtattagagacgctgaaagcac

SEQ ID NO: 5538242 - DNA, 25 bp, Homo sapien
tggacgggttttatgatcagcaagt

SEQ ID NO: 5538243 - DNA, 25 bp, Homo sapien
atggtcccagggaaatctcgatctg

SEQ ID NO: 5538244 - DNA, 25 bp, Homo sapien
gtagccatgagcaggctcttggtgc

SEQ ID NO: 5538245 - DNA, 25 bp, Homo sapien
ggcggcctgtgattgacagaaagag

SEQ ID NO: 5538246 - DNA, 25 bp, Homo sapien
tggacacagatctggctcacgattc

SEQ ID NO: 5538247 - DNA, 25 bp, Homo sapien
ttggttagctgaagcacaagttcct

SEQ ID NO: 5538248 - DNA, 25 bp, Homo sapien
gcagcgggcaccgaattgttctgca

SEQ ID NO: 5538249 - DNA, 25 bp, Homo sapien
ttgtagttgctgaacaaaattcgtt

SEQ ID NO: 5538250 - DNA, 25 bp, Homo sapien
cacatctgccttttgtagttgctga

SEQ ID NO: 5538251 - DNA, 25 bp, Homo sapien
cgttcgtcctcagcacaacgagcgg

SEQ ID NO: 5538252 - DNA, 25 bp, Homo sapien
gttgctgaacaaaattcgttcccat

SEQ ID NO: 5538253 - DNA, 25 bp, Homo sapien
ccgacgcccgagctccaaggctcgg

SEQ ID NO: 5538254 - DNA, 25 bp, Homo sapien
cccgagctccaaggctcggcccacg

SEQ ID NO: 5538255 - DNA, 25 bp, Homo sapien
catttgtttccggttggcaagttcg

SEQ ID NO: 5538256 - DNA, 25 bp, Homo sapien
agcgccgttcgtcctcagcacaacg

SEQ ID NO: 5538257 - DNA, 25 bp, Homo sapien
gggcaccgaattgttctgcaactac

SEQ ID NO: 5538258 - DNA, 25 bp, Homo sapien
agcgggcaccgaattgttctgcaac

SEQ ID NO: 5538259 - DNA, 25 bp, Homo sapien
aatgaactcccacgtaacaagcttc

SEQ ID NO: 5538260 - DNA, 25 bp, Homo sapien
taggaaaaacagtctaatgaactcc

SEQ ID NO: 5538261 - DNA, 25 bp, Homo sapien
gttggtatgtagcatggatgacttt

SEQ ID NO: 5538262 - DNA, 25 bp, Homo sapien
caacaaggaattatgtgtgaatctg

SEQ ID NO: 5538263 - DNA, 25 bp, Homo sapien
gtgaagtctgtggctcaggaaacta

SEQ ID NO: 5538264 - DNA, 25 bp, Homo sapien
aaggcatcctcttgaagcagtgctc

SEQ ID NO: 5538265 - DNA, 25 bp, Homo sapien
tggaaaaatgactcaaggcatcctc

SEQ ID NO: 5538266 - DNA, 25 bp, Homo sapien
attcccagtgtaacggggactgtag

SEQ ID NO: 5538267 - DNA, 25 bp, Homo sapien
aactattaactcaggaaggggacaa

SEQ ID NO: 5538268 - DNA, 25 bp, Homo sapien
ggactcagcatacactggaggaaag

SEQ ID NO: 5538269 - DNA, 25 bp, Homo sapien
aagcagtgctcagattgtaggactc

SEQ ID NO: 5538270 - DNA, 25 bp, Homo sapien
gcctcccaaccaccatttctgctgt

SEQ ID NO: 5538271 - DNA, 25 bp, Homo sapien
atcttaatatagtgtggaattttat

SEQ ID NO: 5538272 - DNA, 25 bp, Homo sapien
gctgtgtccttaggatgtgcagtaa

SEQ ID NO: 5538273 - DNA, 25 bp, Homo sapien
taatactgtaccacattcctgctca

SEQ ID NO: 5538274 - DNA, 25 bp, Homo sapien
ttagcatccaaaaatgtggaaggcc

SEQ ID NO: 5538275 - DNA, 25 bp, Homo sapien
gtttatgttatagaatggctttatt

SEQ ID NO: 5538276 - DNA, 25 bp, Homo sapien
tatatgcattatgtgcaggtatgat

SEQ ID NO: 5538277 - DNA, 25 bp, Homo sapien
ataactgcctattgcctgttctatt

SEQ ID NO: 5538278 - DNA, 25 bp, Homo sapien
tcccccagcgtgaaatgtatccatt

SEQ ID NO: 5538279 - DNA, 25 bp, Homo sapien
gtgcagtaaaaaatatagacctaac

SEQ ID NO: 5538280 - DNA, 25 bp, Homo sapien
tatgtgcaggtatgatattttcttc

SEQ ID NO: 5538281 - DNA, 25 bp, Homo sapien
tagctggactattttgattataccc

SEQ ID NO: 5538282 - DNA, 25 bp, Homo sapien
agctcctaaaattcttgactgtctc

SEQ ID NO: 5538283 - DNA, 25 bp, Homo sapien
tattgctgactgggaatgtcctctc

SEQ ID NO: 5538284 - DNA, 25 bp, Homo sapien
gcctagtatgaaaatatacccaata

SEQ ID NO: 5538285 - DNA, 25 bp, Homo sapien
ctcgcagccgtatagtagtagtagg

SEQ ID NO: 5538286 - DNA, 25 bp, Homo sapien
gccgtatagtagtagtaggcggccg

SEQ ID NO: 5538287 - DNA, 25 bp, Homo sapien
ttctgtcgtcttctcgcagccgtat

SEQ ID NO: 5538288 - DNA, 25 bp, Homo sapien
ttttgcctttctctagctggactat

SEQ ID NO: 5538289 - DNA, 25 bp, Homo sapien
tatgaaaatatacccaataccacct

SEQ ID NO: 5538290 - DNA, 25 bp, Homo sapien
actgggaatgtcctctcaaagctcc

SEQ ID NO: 5538291 - DNA, 25 bp, Homo sapien
tctttattgctgactgggaatgtcc

SEQ ID NO: 5538292 - DNA, 25 bp, Homo sapien
tggttccggtcagttcagaggattt

SEQ ID NO: 5538293 - DNA, 25 bp, Homo sapien
cgaacacagctaaggcctcgctgcc

SEQ ID NO: 5538294 - DNA, 25 bp, Homo sapien
ccctcgtgatgtttacagcttgctg

SEQ ID NO: 5538295 - DNA, 25 bp, Homo sapien
gcccagccataacccactcagtgac

SEQ ID NO: 5538296 - DNA, 25 bp, Homo sapien
atcacaagtgtcctgcaaaaatgcc

SEQ ID NO: 5538297 - DNA, 25 bp, Homo sapien
actcagtgacagacgaacacagcta

SEQ ID NO: 5538298 - DNA, 25 bp, Homo sapien
cattgccaaaaaacaacccattgag

SEQ ID NO: 5538299 - DNA, 25 bp, Homo sapien
taagaaatatgtacagctacccctg

SEQ ID NO: 5538300 - DNA, 25 bp, Homo sapien
ggcgagcacacggtctcttcccctg

SEQ ID NO: 5538301 - DNA, 25 bp, Homo sapien
ctcgctgccagccttctgacggcgg

SEQ ID NO: 5538302 - DNA, 25 bp, Homo sapien
ttttcaggcactatgtttgagaaca

SEQ ID NO: 5538303 - DNA, 25 bp, Homo sapien
ctccctagaatggagcgctgaagtt

SEQ ID NO: 5538304 - DNA, 25 bp, Homo sapien
tcaggcaggtttccatgactctccc

SEQ ID NO: 5538305 - DNA, 25 bp, Homo sapien
atcaccaaataaagcacgttaggcc

SEQ ID NO: 5538306 - DNA, 25 bp, Homo sapien
cccaacactgagcaactgcagggaa

SEQ ID NO: 5538307 - DNA, 25 bp, Homo sapien
ttacagcgctgattgcaagattctt

SEQ ID NO: 5538308 - DNA, 25 bp, Homo sapien
aaggcatggatattctcaggcaggt

SEQ ID NO: 5538309 - DNA, 25 bp, Homo sapien
tgaggccctcttgtaaaggaaccac

SEQ ID NO: 5538310 - DNA, 25 bp, Homo sapien
gctgtggggctcgttcccaacactg

SEQ ID NO: 5538311 - DNA, 25 bp, Homo sapien
acgttaggccattacagcaagctct

SEQ ID NO: 5538312 - DNA, 25 bp, Homo sapien
actcgctccagacctcaggatccac

SEQ ID NO: 5538313 - DNA, 25 bp, Homo sapien
aaactcatcgaataggctggaggga

SEQ ID NO: 5538314 - DNA, 25 bp, Homo sapien
taaactgtatagatgatagagagag

SEQ ID NO: 5538315 - DNA, 25 bp, Homo sapien
tactgaaagttgacactataggatt

SEQ ID NO: 5538316 - DNA, 25 bp, Homo sapien
atttgctaaggatgaacaagacaca

SEQ ID NO: 5538317 - DNA, 25 bp, Homo sapien
taccttgatggaagtccacaccaat

SEQ ID NO: 5538318 - DNA, 25 bp, Homo sapien
aagatctagattggtccatagttat

SEQ ID NO: 5538319 - DNA, 25 bp, Homo sapien
aaaagcaactaatttcgaatcatct

SEQ ID NO: 5538320 - DNA, 25 bp, Homo sapien
tatcagcaggaaatttcacctaccc

SEQ ID NO: 5538321 - DNA, 25 bp, Homo sapien
gacatgacaagaagaacatgaagaa

SEQ ID NO: 5538322 - DNA, 25 bp, Homo sapien
tcaaattggctggtacttcatctgc

SEQ ID NO: 5538323 - DNA, 25 bp, Homo sapien
ggtttcaaccaatttagcactgccc

SEQ ID NO: 5538324 - DNA, 25 bp, Homo sapien
cactataggatttggctgacatgac

SEQ ID NO: 5538325 - DNA, 25 bp, Homo sapien
agttaggcaagaacataaaaaccac

SEQ ID NO: 5538326 - DNA, 25 bp, Homo sapien
taaataggaccttgcagtactcatc

SEQ ID NO: 5538327 - DNA, 25 bp, Homo sapien
gccacactccagctaagaaaagtct

SEQ ID NO: 5538328 - DNA, 25 bp, Homo sapien
cttaacaagaagtcacgacagattt

SEQ ID NO: 5538329 - DNA, 25 bp, Homo sapien
ataaatcaatcgggtcacgtaactc

SEQ ID NO: 5538330 - DNA, 25 bp, Homo sapien
gtggatggagtggattccatgaaca

SEQ ID NO: 5538331 - DNA, 25 bp, Homo sapien
ctcctgggttaagcatacaagttat

SEQ ID NO: 5538332 - DNA, 25 bp, Homo sapien
acgacagatttgtgcagcctgctgg

SEQ ID NO: 5538333 - DNA, 25 bp, Homo sapien
ttcctgatctcaaagccacactcca

SEQ ID NO: 5538334 - DNA, 25 bp, Homo sapien
gggtaatggtacgtggcttcttcac

SEQ ID NO: 5538335 - DNA, 25 bp, Homo sapien
acagtgaagaagttcggaactcagc

SEQ ID NO: 5538336 - DNA, 25 bp, Homo sapien
aaatgagaaaggccaggatcctttt

SEQ ID NO: 5538337 - DNA, 25 bp, Homo sapien
aaagaacattgatggggattcactg

SEQ ID NO: 5538338 - DNA, 25 bp, Homo sapien
cctgtcttcaagagtaaaggtgaac

SEQ ID NO: 5538339 - DNA, 25 bp, Homo sapien
ctgccaaagacgaaacaactgactt

SEQ ID NO: 5538340 - DNA, 25 bp, Homo sapien
taggtagaagacattaaaatcacag

SEQ ID NO: 5538341 - DNA, 25 bp, Homo sapien
acaggtttatgaagaatctctgctc

SEQ ID NO: 5538342 - DNA, 25 bp, Homo sapien
caaactgagaagaataaagccacat

SEQ ID NO: 5538343 - DNA, 25 bp, Homo sapien
gagtaaaggtgaacacttacagctc

SEQ ID NO: 5538344 - DNA, 25 bp, Homo sapien
tgtctaaaattcgtagggcaacttc

SEQ ID NO: 5538345 - DNA, 25 bp, Homo sapien
gctcattggaatgaaatgcagtcat

SEQ ID NO: 5538346 - DNA, 25 bp, Homo sapien
ttcactgtaaagttggcagaggctg

SEQ ID NO: 5538347 - DNA, 25 bp, Homo sapien
atttctagactaaggcaatgctttt

SEQ ID NO: 5538348 - DNA, 25 bp, Homo sapien
tggtctacagattacctgcagccaa

SEQ ID NO: 5538349 - DNA, 25 bp, Homo sapien
tctaaaactaaatgataggtacaat

SEQ ID NO: 5538350 - DNA, 25 bp, Homo sapien
tctatgccacctatgtgacatgtct

SEQ ID NO: 5538351 - DNA, 25 bp, Homo sapien
agaagtacagaaatggttgagctga

SEQ ID NO: 5538352 - DNA, 25 bp, Homo sapien
ggttgagctgaagaagttaaagaat

SEQ ID NO: 5538353 - DNA, 25 bp, Homo sapien
tccttcagcatggtctacagattac

SEQ ID NO: 5538354 - DNA, 25 bp, Homo sapien
caagctagtcacctggacaaaatgt

SEQ ID NO: 5538355 - DNA, 25 bp, Homo sapien
ctgattcatagtagagaagtacaga

SEQ ID NO: 5538356 - DNA, 25 bp, Homo sapien
cctgcagccaaaccacatgaagtga

SEQ ID NO: 5538357 - DNA, 25 bp, Homo sapien
ccggaagtgtgaaattttattattc

SEQ ID NO: 5538358 - DNA, 25 bp, Homo sapien
accttacagggtgatgactaatata

SEQ ID NO: 5538359 - DNA, 25 bp, Homo sapien
gccagcagtagaactgaagcctgta

SEQ ID NO: 5538360 - DNA, 25 bp, Homo sapien
acaaatccaatggtggccagcagta

SEQ ID NO: 5538361 - DNA, 25 bp, Homo sapien
ggaataatgggaataatatgtcatc

SEQ ID NO: 5538362 - DNA, 25 bp, Homo sapien
ggaaggccatagactaagcccacct

SEQ ID NO: 5538363 - DNA, 25 bp, Homo sapien
agcccaccactctcattccagatgc

SEQ ID NO: 5538364 - DNA, 25 bp, Homo sapien
attccagatgccctaagcctgggtc

SEQ ID NO: 5538365 - DNA, 25 bp, Homo sapien
agaagaaaatgcagtctcccatcca

SEQ ID NO: 5538366 - DNA, 25 bp, Homo sapien
ggacacatgtggtcaatacacatcc

SEQ ID NO: 5538367 - DNA, 25 bp, Homo sapien
tgccctaagcctgggtctggacaca

SEQ ID NO: 5538368 - DNA, 25 bp, Homo sapien
agcttcagttcaagcaggagtgggg

SEQ ID NO: 5538369 - DNA, 25 bp, Homo sapien
ggctcctggatgtagctaaccgtgc

SEQ ID NO: 5538370 - DNA, 25 bp, Homo sapien
aagtagactgttagcataataaagc

SEQ ID NO: 5538371 - DNA, 25 bp, Homo sapien
cctcattttggcctgggagttcatc

SEQ ID NO: 5538372 - DNA, 25 bp, Homo sapien
gggagttcatcaaagcctaagcggc

SEQ ID NO: 5538373 - DNA, 25 bp, Homo sapien
gcctaagcggctggattctgttttt

SEQ ID NO: 5538374 - DNA, 25 bp, Homo sapien
cacactggggtaccagtgtaggagg

SEQ ID NO: 5538375 - DNA, 25 bp, Homo sapien
cagaaagacaaaagtatcaatgatc

SEQ ID NO: 5538376 - DNA, 25 bp, Homo sapien
ctaaggcagcagtggctgtacttcg

SEQ ID NO: 5538377 - DNA, 25 bp, Homo sapien
tagctaaccgtgcggcagcacctaa

SEQ ID NO: 5538378 - DNA, 25 bp, Homo sapien
agagcttctgagaaatctggcactc

SEQ ID NO: 5538379 - DNA, 25 bp, Homo sapien
gtacttcgaggaatgtagagcttct

SEQ ID NO: 5538380 - DNA, 25 bp, Homo sapien
gggagtaacctgagggtgattgtct

SEQ ID NO: 5538381 - DNA, 25 bp, Homo sapien
agacaatcaccctcaggttactccc

SEQ ID NO: 5538382 - DNA, 25 bp, Homo sapien
agccttacgggagactctgccctca

SEQ ID NO: 5538383 - DNA, 25 bp, Homo sapien
agcctctatgagaaagcaggccttc

SEQ ID NO: 5538384 - DNA, 25 bp, Homo sapien
acagcaagaaggaagcctctatgag

SEQ ID NO: 5538385 - DNA, 25 bp, Homo sapien
ggcacaagggagcttgtttgttcct

SEQ ID NO: 5538386 - DNA, 25 bp, Homo sapien
atgaggagactaccctggtgctatg

SEQ ID NO: 5538387 - DNA, 25 bp, Homo sapien
cgtatataaagcaatggaagtggca

SEQ ID NO: 5538388 - DNA, 25 bp, Homo sapien
ggtaaagaccttgacatgaggagac

SEQ ID NO: 5538389 - DNA, 25 bp, Homo sapien
gatggcattaggaggttaagcctta

SEQ ID NO: 5538390 - DNA, 25 bp, Homo sapien
cctggtgctatggaatgaacgttgt

SEQ ID NO: 5538391 - DNA, 25 bp, Homo sapien
ctcaccatgcgaagacacagcaaga

SEQ ID NO: 5538392 - DNA, 25 bp, Homo sapien
tcctaaccctcaaggtgatggcatt

SEQ ID NO: 5538393 - DNA, 25 bp, Homo sapien
gctggctgaaaatactgggcaaaaa

SEQ ID NO: 5538394 - DNA, 25 bp, Homo sapien
acagtccctgaatggccacggatgt

SEQ ID NO: 5538395 - DNA, 25 bp, Homo sapien
ttaggaaccatagtgcttcaggctc

SEQ ID NO: 5538396 - DNA, 25 bp, Homo sapien
tgggagtcagcccgacccattaaca

SEQ ID NO: 5538397 - DNA, 25 bp, Homo sapien
gcaggctccggaggatatttcaatt

SEQ ID NO: 5538398 - DNA, 25 bp, Homo sapien
tcagttagccacacggctggctgct

SEQ ID NO: 5538399 - DNA, 25 bp, Homo sapien
tgaggattgttcagggtatgcattg

SEQ ID NO: 5538400 - DNA, 25 bp, Homo sapien
gtcctgtcctggccgagttaactgc

SEQ ID NO: 5538401 - DNA, 25 bp, Homo sapien
cctggggctgttgacctattctgag

SEQ ID NO: 5538402 - DNA, 25 bp, Homo sapien
cctatgaagctaaaacacaccacac

SEQ ID NO: 5538403 - DNA, 25 bp, Homo sapien
gctggctgctttttaggagtctgga

SEQ ID NO: 5538404 - DNA, 25 bp, Homo sapien
tcaacatctcagtgctgctcaggtt

SEQ ID NO: 5538405 - DNA, 25 bp, Homo sapien
ctgtttcacggaaaagaaatatgga

SEQ ID NO: 5538406 - DNA, 25 bp, Homo sapien
tggggcctcaacacactgcccaggc

SEQ ID NO: 5538407 - DNA, 25 bp, Homo sapien
agcaacattcagggcattgtggctg

SEQ ID NO: 5538408 - DNA, 25 bp, Homo sapien
aaatagagaagttttattaagtgaa

SEQ ID NO: 5538409 - DNA, 25 bp, Homo sapien
ggctgttcacaggcaccatcatagc

SEQ ID NO: 5538410 - DNA, 25 bp, Homo sapien
agaaatatggaacagtttcaacatc

SEQ ID NO: 5538411 - DNA, 25 bp, Homo sapien
tgccacaatgccctgtaaaggactc

SEQ ID NO: 5538412 - DNA, 25 bp, Homo sapien
gctgctcaggtttaagaaaagcaac

SEQ ID NO: 5538413 - DNA, 25 bp, Homo sapien
agaaaagcaacattcagggcattgt

SEQ ID NO: 5538414 - DNA, 25 bp, Homo sapien
tgtaaaggactcagatcccaaaaag

SEQ ID NO: 5538415 - DNA, 25 bp, Homo sapien
ttggactctcttaggtgggctgcaa

SEQ ID NO: 5538416 - DNA, 25 bp, Homo sapien
ccagttcctataaaacaccaccagg

SEQ ID NO: 5538417 - DNA, 25 bp, Homo sapien
ataataaggctatttgtccacccac

SEQ ID NO: 5538418 - DNA, 25 bp, Homo sapien
gaagacactcaaaaagccatgtttc

SEQ ID NO: 5538419 - DNA, 25 bp, Homo sapien
tgtgactgcatctgtgaatgaagac

SEQ ID NO: 5538420 - DNA, 25 bp, Homo sapien
actgcatctgtgaatgaagacactc

SEQ ID NO: 5538421 - DNA, 25 bp, Homo sapien
caacttaggttaataataaggctat

SEQ ID NO: 5538422 - DNA, 25 bp, Homo sapien
aagagtattaatattttgtgactgc

SEQ ID NO: 5538423 - DNA, 25 bp, Homo sapien
tgtgaatgaagacactcaaaaagcc

SEQ ID NO: 5538424 - DNA, 25 bp, Homo sapien
cctgaggtgctcttttaccatggac

SEQ ID NO: 5538425 - DNA, 25 bp, Homo sapien
ttttaccatggacgtggacaaagga

SEQ ID NO: 5538426 - DNA, 25 bp, Homo sapien
tctgtaaagccttagactgggagtc

SEQ ID NO: 5538427 - DNA, 25 bp, Homo sapien
ccagtacccaaggaagccatgcttg

SEQ ID NO: 5538428 - DNA, 25 bp, Homo sapien
ggcatgtgcagagtacctagcttcc

SEQ ID NO: 5538429 - DNA, 25 bp, Homo sapien
tgttgctaccgctttaggctcctcc

SEQ ID NO: 5538430 - DNA, 25 bp, Homo sapien
cacctcactacactgggctgcctcc

SEQ ID NO: 5538431 - DNA, 25 bp, Homo sapien
aggagacgggtttgagtctaactca

SEQ ID NO: 5538432 - DNA, 25 bp, Homo sapien
aaaacaacccatgtagggcatgtgc

SEQ ID NO: 5538433 - DNA, 25 bp, Homo sapien
ggttgcaggacacttaggactttgc

SEQ ID NO: 5538434 - DNA, 25 bp, Homo sapien
gggtcaggaagagagtctctgtaaa

SEQ ID NO: 5538435 - DNA, 25 bp, Homo sapien
ccagcaagcactatgtagccaggta

SEQ ID NO: 5538436 - DNA, 25 bp, Homo sapien
ggggataatctacgcttcgaggctg

SEQ ID NO: 5538437 - DNA, 25 bp, Homo sapien
tattacatgtaatgatgcacgttat

SEQ ID NO: 5538438 - DNA, 25 bp, Homo sapien
ttgaatcacaaggttcctatgtcta

SEQ ID NO: 5538439 - DNA, 25 bp, Homo sapien
tagttaattgaaatactagtggaac

SEQ ID NO: 5538440 - DNA, 25 bp, Homo sapien
ggcccacttgactcactgaacttta

SEQ ID NO: 5538441 - DNA, 25 bp, Homo sapien
tctctttgcagccaagacctgtttt

SEQ ID NO: 5538442 - DNA, 25 bp, Homo sapien
tttcctgcaaagacaactctataac

SEQ ID NO: 5538443 - DNA, 25 bp, Homo sapien
tagtgtgaggaaataatagttaatt

SEQ ID NO: 5538444 - DNA, 25 bp, Homo sapien
tttagactaccaggagaaactgaat

SEQ ID NO: 5538445 - DNA, 25 bp, Homo sapien
atgtctatgcatacttgggaactta

SEQ ID NO: 5538446 - DNA, 25 bp, Homo sapien
tacatgtgtatacactgctgttgcc

SEQ ID NO: 5538447 - DNA, 25 bp, Homo sapien
tacttgggaacttagtgtgaggaaa

SEQ ID NO: 5538448 - DNA, 25 bp, Homo sapien
agcaggagccagacttcttggtcct

SEQ ID NO: 5538449 - DNA, 25 bp, Homo sapien
atcaaaagagcatgagttcagacag

SEQ ID NO: 5538450 - DNA, 25 bp, Homo sapien
atgcatggttcaaagctggatacac

SEQ ID NO: 5538451 - DNA, 25 bp, Homo sapien
ctagaaccatgtgcgatactggggg

SEQ ID NO: 5538452 - DNA, 25 bp, Homo sapien
agtgtctagctaacagcagatgctc

SEQ ID NO: 5538453 - DNA, 25 bp, Homo sapien
agaatgaggcattaaaaccacctgc

SEQ ID NO: 5538454 - DNA, 25 bp, Homo sapien
ccttcacaggcatgtagaaaagcag

SEQ ID NO: 5538455 - DNA, 25 bp, Homo sapien
ttcaaccagcaatcactgggggaag

SEQ ID NO: 5538456 - DNA, 25 bp, Homo sapien
ttagcagaacttaaggcaggcctta

SEQ ID NO: 5538457 - DNA, 25 bp, Homo sapien
ggaagggaaacctgtccatataaga

SEQ ID NO: 5538458 - DNA, 25 bp, Homo sapien
aatagcacttagaatgaggcattaa

SEQ ID NO: 5538459 - DNA, 25 bp, Homo sapien
agccagtaatagcaccgtcacctcc

SEQ ID NO: 5538460 - DNA, 25 bp, Homo sapien
tggggtcacgtatcaacaaggaaaa

SEQ ID NO: 5538461 - DNA, 25 bp, Homo sapien
gcaatcttttaatggcaggacccta

SEQ ID NO: 5538462 - DNA, 25 bp, Homo sapien
ggcaggaccctaacaatgtgctggg

SEQ ID NO: 5538463 - DNA, 25 bp, Homo sapien
atctgtgaaagccagtaatagcacc

SEQ ID NO: 5538464 - DNA, 25 bp, Homo sapien
aagaggaaaagtccctcagagttag

SEQ ID NO: 5538465 - DNA, 25 bp, Homo sapien
gtaaggtatgttcatgggcactgat

SEQ ID NO: 5538466 - DNA, 25 bp, Homo sapien
gccctgtcagaagagtccttgcctt

SEQ ID NO: 5538467 - DNA, 25 bp, Homo sapien
cttggagtgaagttaacacaacaat

SEQ ID NO: 5538468 - DNA, 25 bp, Homo sapien
ctgaggggcaactcattgacaactc

SEQ ID NO: 5538469 - DNA, 25 bp, Homo sapien
atgacaacaatagcaaaactgaggt

SEQ ID NO: 5538470 - DNA, 25 bp, Homo sapien
tccgtagttcaagtgagcagaatac

SEQ ID NO: 5538471 - DNA, 25 bp, Homo sapien
aagaagagtagaatttagagacaaa

SEQ ID NO: 5538472 - DNA, 25 bp, Homo sapien
tacaggctcagcttccttccagggc

SEQ ID NO: 5538473 - DNA, 25 bp, Homo sapien
tcacgtgaaataggtagctaccctg

SEQ ID NO: 5538474 - DNA, 25 bp, Homo sapien
ttgaagagttggccacttgctagtg

SEQ ID NO: 5538475 - DNA, 25 bp, Homo sapien
tccagggctagatacctcttcagga

SEQ ID NO: 5538476 - DNA, 25 bp, Homo sapien
ttagagacaagtgaaaccccaacac

SEQ ID NO: 5538477 - DNA, 25 bp, Homo sapien
gaaagagcccagctggtatctcgtt

SEQ ID NO: 5538478 - DNA, 25 bp, Homo sapien
gccctggcagagatacagtgccagc

SEQ ID NO: 5538479 - DNA, 25 bp, Homo sapien
gctagtggtcagaatagtaaggagc

SEQ ID NO: 5538480 - DNA, 25 bp, Homo sapien
gaatactgaggcctttcacgtgaaa

SEQ ID NO: 5538481 - DNA, 25 bp, Homo sapien
cttaccaagcccagaaatattcccc

SEQ ID NO: 5538482 - DNA, 25 bp, Homo sapien
ggctctgatcccagtgaggtgctct

SEQ ID NO: 5538483 - DNA, 25 bp, Homo sapien
tcattgccactaagtcaggggcctt

SEQ ID NO: 5538484 - DNA, 25 bp, Homo sapien
taagtcaggggccttgcacgtatta

SEQ ID NO: 5538485 - DNA, 25 bp, Homo sapien
gtgttctgggtagaaggtcccaaga

SEQ ID NO: 5538486 - DNA, 25 bp, Homo sapien
cattggacctgtggattaattcatc

SEQ ID NO: 5538487 - DNA, 25 bp, Homo sapien
ctggcacgccgttgttagttatcct

SEQ ID NO: 5538488 - DNA, 25 bp, Homo sapien
atccacccgatggcctggctctgat

SEQ ID NO: 5538489 - DNA, 25 bp, Homo sapien
ggcagggacctggcttacttaccaa

SEQ ID NO: 5538490 - DNA, 25 bp, Homo sapien
gacagactcatggttcaggacaatc

SEQ ID NO: 5538491 - DNA, 25 bp, Homo sapien
aggtcccaagaggttccgttctcaa

SEQ ID NO: 5538492 - DNA, 25 bp, Homo sapien
aggccctctccgcgtggctagaggt

SEQ ID NO: 5538493 - DNA, 25 bp, Homo sapien
cacctcctcacaggagagcgcctcg

SEQ ID NO: 5538494 - DNA, 25 bp, Homo sapien
ggacctcgacactcctgcaggccag

SEQ ID NO: 5538495 - DNA, 25 bp, Homo sapien
gtccaaatccttgcagaggtgcgcc

SEQ ID NO: 5538496 - DNA, 25 bp, Homo sapien
ggctagaggtagccaaagacattga

SEQ ID NO: 5538497 - DNA, 25 bp, Homo sapien
tcccatgcgcacacaaacggaagag

SEQ ID NO: 5538498 - DNA, 25 bp, Homo sapien
aggtaaacagatgcgtctctctggc

SEQ ID NO: 5538499 - DNA, 25 bp, Homo sapien
cccagcttccaaggctgcaaggctg

SEQ ID NO: 5538500 - DNA, 25 bp, Homo sapien
gcacaccttctgccccaggccgtcc

SEQ ID NO: 5538501 - DNA, 25 bp, Homo sapien
acaactgagattggctcgcagagtg

SEQ ID NO: 5538502 - DNA, 25 bp, Homo sapien
aggaagggcaacatcccagtaccta

SEQ ID NO: 5538503 - DNA, 25 bp, Homo sapien
ctgaagcaggtgtcaggacattcag

SEQ ID NO: 5538504 - DNA, 25 bp, Homo sapien
gtgattagcaggtggacctaaccag

SEQ ID NO: 5538505 - DNA, 25 bp, Homo sapien
cacatgctaaaagatgagagaagtc

SEQ ID NO: 5538506 - DNA, 25 bp, Homo sapien
aggaaataacattcaggctggagtc

SEQ ID NO: 5538507 - DNA, 25 bp, Homo sapien
ataggtaccagcagatgagttagat

SEQ ID NO: 5538508 - DNA, 25 bp, Homo sapien
ttacagaggagatgagtgttttgaa

SEQ ID NO: 5538509 - DNA, 25 bp, Homo sapien
aggacattcagagcaaagtggatta

SEQ ID NO: 5538510 - DNA, 25 bp, Homo sapien
aggctggagtctgaatcttgagctc

SEQ ID NO: 5538511 - DNA, 25 bp, Homo sapien
gagggttttgtggatgtgattagca

SEQ ID NO: 5538512 - DNA, 25 bp, Homo sapien
gggtggcataggtagttgtacttat

SEQ ID NO: 5538513 - DNA, 25 bp, Homo sapien
gttagatgtagggatacagatggaa

SEQ ID NO: 5538514 - DNA, 25 bp, Homo sapien
agacatacacaaaagccctaagaat

SEQ ID NO: 5538515 - DNA, 25 bp, Homo sapien
actgtatacagacatagcctaagtc

SEQ ID NO: 5538516 - DNA, 25 bp, Homo sapien
aaaagagagtgtaaaacaactagta

SEQ ID NO: 5538517 - DNA, 25 bp, Homo sapien
atcattgactaaatgcttaagtgcc

SEQ ID NO: 5538518 - DNA, 25 bp, Homo sapien
ctgaaaatgaaaataaattaattac

SEQ ID NO: 5538519 - DNA, 25 bp, Homo sapien
aagaaaagagagtgtaaaacaacta

SEQ ID NO: 5538520 - DNA, 25 bp, Homo sapien
acatagcctaagtcaacaatcaaat

SEQ ID NO: 5538521 - DNA, 25 bp, Homo sapien
cctaagaataagaaaagagagtgta

SEQ ID NO: 5538522 - DNA, 25 bp, Homo sapien
acacaaaagccctaagaataagaaa

SEQ ID NO: 5538523 - DNA, 25 bp, Homo sapien
aataaaacataactgcatgcatata

SEQ ID NO: 5538524 - DNA, 25 bp, Homo sapien
ttggttactgtatacagacatagcc

SEQ ID NO: 5538525 - DNA, 25 bp, Homo sapien
taacaactgaaagggtcaaagaaga

SEQ ID NO: 5538526 - DNA, 25 bp, Homo sapien
atacatgagcacatatctatagatc

SEQ ID NO: 5538527 - DNA, 25 bp, Homo sapien
caggtcagttataaagtgtattaca

SEQ ID NO: 5538528 - DNA, 25 bp, Homo sapien
caattagcattataggctcagtctt

SEQ ID NO: 5538529 - DNA, 25 bp, Homo sapien
ataaaaaagccatttgatcattcca

SEQ ID NO: 5538530 - DNA, 25 bp, Homo sapien
ttctctggaaaaagaccaccataaa

SEQ ID NO: 5538531 - DNA, 25 bp, Homo sapien
aaaaagtcctgtagtttcaattagc

SEQ ID NO: 5538532 - DNA, 25 bp, Homo sapien
acacaaaatataccagttacaactc

SEQ ID NO: 5538533 - DNA, 25 bp, Homo sapien
attacagagattgttagaaccttct

SEQ ID NO: 5538534 - DNA, 25 bp, Homo sapien
aaaatgtaacaactgaaagggtcaa

SEQ ID NO: 5538535 - DNA, 25 bp, Homo sapien
caaagaagaaagacagtaaaaagtc

SEQ ID NO: 5538536 - DNA, 25 bp, Homo sapien
gtatattttgtaggacacatttaat

SEQ ID NO: 5538537 - DNA, 25 bp, Homo sapien
attaaatgtgtcctacaaaatatac

SEQ ID NO: 5538538 - DNA, 25 bp, Homo sapien
cactgacaaacactgagttggtgcc

SEQ ID NO: 5538539 - DNA, 25 bp, Homo sapien
aaaaatctgagcagcaatttgaacc

SEQ ID NO: 5538540 - DNA, 25 bp, Homo sapien
tggaaaaacaaacactgacaaacac

SEQ ID NO: 5538541 - DNA, 25 bp, Homo sapien
gacaaacactgagttggtgcctggc

SEQ ID NO: 5538542 - DNA, 25 bp, Homo sapien
tccacacgtgtacactggcagctac

SEQ ID NO: 5538543 - DNA, 25 bp, Homo sapien
aataaaatggggtccacacgtgtac

SEQ ID NO: 5538544 - DNA, 25 bp, Homo sapien
gaggctgaggaaagcagcattttca

SEQ ID NO: 5538545 - DNA, 25 bp, Homo sapien
catgtgcagtttaattgtggggagg

SEQ ID NO: 5538546 - DNA, 25 bp, Homo sapien
tggcagctacagtaaatttaaaaat

SEQ ID NO: 5538547 - DNA, 25 bp, Homo sapien
ttttttagagaccatgtgcagttta

SEQ ID NO: 5538548 - DNA, 25 bp, Homo sapien
agagaccatgtgcagtttaattgtg

SEQ ID NO: 5538549 - DNA, 25 bp, Homo sapien
tgaccttatgaatccgcagaccctt

SEQ ID NO: 5538550 - DNA, 25 bp, Homo sapien
gtccccagttgaattcactagctgc

SEQ ID NO: 5538551 - DNA, 25 bp, Homo sapien
cccatgggcaactgtgatttgaaaa

SEQ ID NO: 5538552 - DNA, 25 bp, Homo sapien
aacaacgagcctgaaatctccagct

SEQ ID NO: 5538553 - DNA, 25 bp, Homo sapien
gatggcagcagaaacaccctgcttt

SEQ ID NO: 5538554 - DNA, 25 bp, Homo sapien
aacaaagaccctctccccagtcatc

SEQ ID NO: 5538555 - DNA, 25 bp, Homo sapien
atccgcagacccttaacaacgagcc

SEQ ID NO: 5538556 - DNA, 25 bp, Homo sapien
ctcttttgcagctagggtacaggta

SEQ ID NO: 5538557 - DNA, 25 bp, Homo sapien
agggtacaggtatgtgacctttccc

SEQ ID NO: 5538558 - DNA, 25 bp, Homo sapien
ccctcatcagacacacccatgggca

SEQ ID NO: 5538559 - DNA, 25 bp, Homo sapien
ttgaaaacacataaagtgaagaagc

SEQ ID NO: 5538560 - DNA, 25 bp, Homo sapien
cctttatcctaacttcttacaatag

SEQ ID NO: 5538561 - DNA, 25 bp, Homo sapien
ctattgtaagaagttaggataaagg

SEQ ID NO: 5538562 - DNA, 25 bp, Homo sapien
cccaaccttgctagactgctggtct

SEQ ID NO: 5538563 - DNA, 25 bp, Homo sapien
ttctaggaatgtaggagccttttat

SEQ ID NO: 5538564 - DNA, 25 bp, Homo sapien
aggagcaggttaatgttagctatag

SEQ ID NO: 5538565 - DNA, 25 bp, Homo sapien
ttaggaagttccatggttggcaaac

SEQ ID NO: 5538566 - DNA, 25 bp, Homo sapien
tttgggatgtgtctgtttaacaggc

SEQ ID NO: 5538567 - DNA, 25 bp, Homo sapien
tttcagaagtaaggaaccctcatta

SEQ ID NO: 5538568 - DNA, 25 bp, Homo sapien
tgtagaagcatatcctctgaggcaa

SEQ ID NO: 5538569 - DNA, 25 bp, Homo sapien
gttagctatagaagcactgtcactc

SEQ ID NO: 5538570 - DNA, 25 bp, Homo sapien
tcatgtaatgcccccaccctggaat

SEQ ID NO: 5538571 - DNA, 25 bp, Homo sapien
gaagacagttgttgattggttggct

SEQ ID NO: 5538572 - DNA, 25 bp, Homo sapien
tagttggttagtttgtagaagcata

SEQ ID NO: 5538573 - DNA, 25 bp, Homo sapien
tagggtgacttcttaatatggatac

SEQ ID NO: 5538574 - DNA, 25 bp, Homo sapien
gaaaattgagcatagaaatgaagaa

SEQ ID NO: 5538575 - DNA, 25 bp, Homo sapien
agtttagattatagggtgacttctt

SEQ ID NO: 5538576 - DNA, 25 bp, Homo sapien
actaatctcatggttgtgttacccc

SEQ ID NO: 5538577 - DNA, 25 bp, Homo sapien
cttagtttacttcaacggagcaggt

SEQ ID NO: 5538578 - DNA, 25 bp, Homo sapien
caaaaaattgagacaggttccaaac

SEQ ID NO: 5538579 - DNA, 25 bp, Homo sapien
ggcgatgaaagagtaaatgattaag

SEQ ID NO: 5538580 - DNA, 25 bp, Homo sapien
taaggtgtcaaattatgtgctagcc

SEQ ID NO: 5538581 - DNA, 25 bp, Homo sapien
tgtatgataatgggacaaaaaaatt

SEQ ID NO: 5538582 - DNA, 25 bp, Homo sapien
ggaaggaaaagatagtacagattct

SEQ ID NO: 5538583 - DNA, 25 bp, Homo sapien
aaaaagtattagaaaattgagcata

SEQ ID NO: 5538584 - DNA, 25 bp, Homo sapien
tggcattgcctaactacaagaggtt

SEQ ID NO: 5538585 - DNA, 25 bp, Homo sapien
agcagatagatacatgatgagctgt

SEQ ID NO: 5538586 - DNA, 25 bp, Homo sapien
agtcaggtcccttctaaacagcgac

SEQ ID NO: 5538587 - DNA, 25 bp, Homo sapien
tggagggtcatgcagaactttttac

SEQ ID NO: 5538588 - DNA, 25 bp, Homo sapien
taggaaaaagctaaagttatgaagc

SEQ ID NO: 5538589 - DNA, 25 bp, Homo sapien
tggaacatcttgctttcaggtcacc

SEQ ID NO: 5538590 - DNA, 25 bp, Homo sapien
ttatgaagctccaaggtaatctaac

SEQ ID NO: 5538591 - DNA, 25 bp, Homo sapien
tctaaacagcgacctaaggacccag

SEQ ID NO: 5538592 - DNA, 25 bp, Homo sapien
ctgcaagtccatcagcactccagtc

SEQ ID NO: 5538593 - DNA, 25 bp, Homo sapien
taaggacccaggttgcatccgtctt

SEQ ID NO: 5538594 - DNA, 25 bp, Homo sapien
gtcaccatgacaggcaaaagaaaac

SEQ ID NO: 5538595 - DNA, 25 bp, Homo sapien
tgcatctgtccgcagtggagtttac

SEQ ID NO: 5538596 - DNA, 25 bp, Homo sapien
tctgccataggacagagctagaaac

SEQ ID NO: 5538597 - DNA, 25 bp, Homo sapien
atcatgctgagcactgtggcacagc

SEQ ID NO: 5538598 - DNA, 25 bp, Homo sapien
agcctaggagctgagctctcagtgg

SEQ ID NO: 5538599 - DNA, 25 bp, Homo sapien
gttcccagtggcactggacccggga

SEQ ID NO: 5538600 - DNA, 25 bp, Homo sapien
ggaagaagtgagtctctggctctca

SEQ ID NO: 5538601 - DNA, 25 bp, Homo sapien
agcacttcggttattgtggggtgga

SEQ ID NO: 5538602 - DNA, 25 bp, Homo sapien
cgggcaggagcttcccaccttctca

SEQ ID NO: 5538603 - DNA, 25 bp, Homo sapien
ggcacagcaaactggatctggtgct

SEQ ID NO: 5538604 - DNA, 25 bp, Homo sapien
agagtttcctctggtgggagttggt

SEQ ID NO: 5538605 - DNA, 25 bp, Homo sapien
atccatgagtggggctccatggaag

SEQ ID NO: 5538606 - DNA, 25 bp, Homo sapien
ggtgcccagtccccatggaccttgc

SEQ ID NO: 5538607 - DNA, 25 bp, Homo sapien
acagacaaccaaagaaagaatggcc

SEQ ID NO: 5538608 - DNA, 25 bp, Homo sapien
ccactcccaagacgacaccatcagg

SEQ ID NO: 5538609 - DNA, 25 bp, Homo sapien
agtgaccacatgacggccacatgga

SEQ ID NO: 5538610 - DNA, 25 bp, Homo sapien
cagtccccatggaccttgcgcaggg

SEQ ID NO: 5538611 - DNA, 25 bp, Homo sapien
cctgactcgtccctgggcttttccc

SEQ ID NO: 5538612 - DNA, 25 bp, Homo sapien
caggttcctccactcccaagacgac

SEQ ID NO: 5538613 - DNA, 25 bp, Homo sapien
ggggctgcaaagagctgcagccacg

SEQ ID NO: 5538614 - DNA, 25 bp, Homo sapien
gcgcagggcaatgcccaaaagtgac

SEQ ID NO: 5538615 - DNA, 25 bp, Homo sapien
gggcagagctctcccctgactcgtc

SEQ ID NO: 5538616 - DNA, 25 bp, Homo sapien
agtcactcataagcttaagaaaaga

SEQ ID NO: 5538617 - DNA, 25 bp, Homo sapien
gttgacttccaaggcagaaagagta

SEQ ID NO: 5538618 - DNA, 25 bp, Homo sapien
cacgggataggatcaattctaagac

SEQ ID NO: 5538619 - DNA, 25 bp, Homo sapien
tggctcttttaggagtagggttgga

SEQ ID NO: 5538620 - DNA, 25 bp, Homo sapien
gtcacaggaaaagatcagaaaagta

SEQ ID NO: 5538621 - DNA, 25 bp, Homo sapien
ggcagaaagagtaaacagccttctc

SEQ ID NO: 5538622 - DNA, 25 bp, Homo sapien
gagagtgtaggatgtttacagtatc

SEQ ID NO: 5538623 - DNA, 25 bp, Homo sapien
gacctcagaaacaaacacgggatag

SEQ ID NO: 5538624 - DNA, 25 bp, Homo sapien
ttacagtatctgtcgctcagtgctc

SEQ ID NO: 5538625 - DNA, 25 bp, Homo sapien
tcgctcagtgctctctaggatgggg

SEQ ID NO: 5538626 - DNA, 25 bp, Homo sapien
tttccacagctgagagtgtaggatg

SEQ ID NO: 5538627 - DNA, 25 bp, Homo sapien
tacttgggactaaattatggctctt

SEQ ID NO: 5538628 - DNA, 25 bp, Homo sapien
ggctggctactgacggtcctgatta

SEQ ID NO: 5538629 - DNA, 25 bp, Homo sapien
acgatgaaactgaaacggctcacag

SEQ ID NO: 5538630 - DNA, 25 bp, Homo sapien
caaccagtggtataacacaggagac

SEQ ID NO: 5538631 - DNA, 25 bp, Homo sapien
cacaggagactacacacaagccata

SEQ ID NO: 5538632 - DNA, 25 bp, Homo sapien
tcaaaactgggtacaggtcaaggaa

SEQ ID NO: 5538633 - DNA, 25 bp, Homo sapien
ttggagaagtacaaaggtatcattg

SEQ ID NO: 5538634 - DNA, 25 bp, Homo sapien
ctcagaggtgacataccaacccttc

SEQ ID NO: 5538635 - DNA, 25 bp, Homo sapien
aagccatatgaataccaggagcgat

SEQ ID NO: 5538636 - DNA, 25 bp, Homo sapien
ttcaagagatggaacaaataaatcc

SEQ ID NO: 5538637 - DNA, 25 bp, Homo sapien
aagagcaaaaaatgtaatcagggcc

SEQ ID NO: 5538638 - DNA, 25 bp, Homo sapien
ggagcgatcactgtcttggaggctg

SEQ ID NO: 5538639 - DNA, 25 bp, Homo sapien
aggagatgcaggatttcaatcagcg

SEQ ID NO: 5538640 - DNA, 25 bp, Homo sapien
cttgtctcagaatgatgagcccctc

SEQ ID NO: 5538641 - DNA, 25 bp, Homo sapien
tcaatcagcgatatccagtcagtgg

SEQ ID NO: 5538642 - DNA, 25 bp, Homo sapien
agaaaagggctaatttgcataaagg

SEQ ID NO: 5538643 - DNA, 25 bp, Homo sapien
aatagggatgaaaacttgtactacc

SEQ ID NO: 5538644 - DNA, 25 bp, Homo sapien
ataactagcagtaatcatcacacat

SEQ ID NO: 5538645 - DNA, 25 bp, Homo sapien
tgcataaaggatcagccactcactc

SEQ ID NO: 5538646 - DNA, 25 bp, Homo sapien
acactggtcttaagaagatacagaa

SEQ ID NO: 5538647 - DNA, 25 bp, Homo sapien
taagaatttatataggcacaactcc

SEQ ID NO: 5538648 - DNA, 25 bp, Homo sapien
cagtcagtggactaaactagttaat

SEQ ID NO: 5538649 - DNA, 25 bp, Homo sapien
atctaatgccatctaccagcctatc

SEQ ID NO: 5538650 - DNA, 25 bp, Homo sapien
tccaatcttgagaccacccaggctg

SEQ ID NO: 5538651 - DNA, 25 bp, Homo sapien
ggctgctaatccaatcttgagacca

SEQ ID NO: 5538652 - DNA, 25 bp, Homo sapien
ggtcagtatctactctgcctggaga

SEQ ID NO: 5538653 - DNA, 25 bp, Homo sapien
ctttatgtggtgtgacaccagggat

SEQ ID NO: 5538654 - DNA, 25 bp, Homo sapien
tgctaatccaatcttgagaccaccc

SEQ ID NO: 5538655 - DNA, 25 bp, Homo sapien
gggatgagctctgagcatctgtcgc

SEQ ID NO: 5538656 - DNA, 25 bp, Homo sapien
aatccaatcttgagaccacccaggc

SEQ ID NO: 5538657 - DNA, 25 bp, Homo sapien
agtatctactctgcctggagacatc

SEQ ID NO: 5538658 - DNA, 25 bp, Homo sapien
gctctgagcatctgtcgcgatgggc

SEQ ID NO: 5538659 - DNA, 25 bp, Homo sapien
atgagctctgagcatctgtcgcgat

SEQ ID NO: 5538660 - DNA, 25 bp, Homo sapien
tatgtggtgtgacaccagggatgag

SEQ ID NO: 5538661 - DNA, 25 bp, Homo sapien
ttggtcccaaacgtctctgagcctc

SEQ ID NO: 5538662 - DNA, 25 bp, Homo sapien
catatttaaatagaagggaccaggg

SEQ ID NO: 5538663 - DNA, 25 bp, Homo sapien
agtccgttcacggtgtcctgggatc

SEQ ID NO: 5538664 - DNA, 25 bp, Homo sapien
gcggaggattgtttccctgcacccc

SEQ ID NO: 5538665 - DNA, 25 bp, Homo sapien
tctacctctccacgtggcgggagca

SEQ ID NO: 5538666 - DNA, 25 bp, Homo sapien
gcggccgactttcagcttgacctga

SEQ ID NO: 5538667 - DNA, 25 bp, Homo sapien
cactccttaaaaacgcgaaagtcaa

SEQ ID NO: 5538668 - DNA, 25 bp, Homo sapien
caggcggtgcttaatcacgtagacc

SEQ ID NO: 5538669 - DNA, 25 bp, Homo sapien
ctgtgtgatctcggttggtcccaaa

SEQ ID NO: 5538670 - DNA, 25 bp, Homo sapien
accagggctcaatgctgcttggccc

SEQ ID NO: 5538671 - DNA, 25 bp, Homo sapien
atctagaaaagtgtatgcaaaatat

SEQ ID NO: 5538672 - DNA, 25 bp, Homo sapien
tagagaaagtacaacaaacgttcac

SEQ ID NO: 5538673 - DNA, 25 bp, Homo sapien
tgtctcattcaggatggaggagaaa

SEQ ID NO: 5538674 - DNA, 25 bp, Homo sapien
aggaattttcctatgagactctgtc

SEQ ID NO: 5538675 - DNA, 25 bp, Homo sapien
tttgagttagctaaagaatgcagga

SEQ ID NO: 5538676 - DNA, 25 bp, Homo sapien
tctgccccactagcttacaactcac

SEQ ID NO: 5538677 - DNA, 25 bp, Homo sapien
aaaatgagaaaccccatggagattc

SEQ ID NO: 5538678 - DNA, 25 bp, Homo sapien
tagctaaagaatgcaggaattttcc

SEQ ID NO: 5538679 - DNA, 25 bp, Homo sapien
gttatcagtaggaaaatgagaaacc

SEQ ID NO: 5538680 - DNA, 25 bp, Homo sapien
ttattaaccatgtgacctcggacac

SEQ ID NO: 5538681 - DNA, 25 bp, Homo sapien
gacctcggacacatgttacttaacc

SEQ ID NO: 5538682 - DNA, 25 bp, Homo sapien
agatgtgagtcctgggtccacttct

SEQ ID NO: 5538683 - DNA, 25 bp, Homo sapien
actcgcctgtctctctgagggggac

SEQ ID NO: 5538684 - DNA, 25 bp, Homo sapien
tgctccttctgacccgcgtgctgcg

SEQ ID NO: 5538685 - DNA, 25 bp, Homo sapien
tccgttctctggtcaccagcaggtc

SEQ ID NO: 5538686 - DNA, 25 bp, Homo sapien
gggcttctttgtgcaggatggtgac

SEQ ID NO: 5538687 - DNA, 25 bp, Homo sapien
ctctccccctccccgtctgcaagca

SEQ ID NO: 5538688 - DNA, 25 bp, Homo sapien
gacgggacagaactcgcctgtctct

SEQ ID NO: 5538689 - DNA, 25 bp, Homo sapien
ggcgcgcacccagaaatgttcttcc

SEQ ID NO: 5538690 - DNA, 25 bp, Homo sapien
ggcttctcggagtccctcctgggtc

SEQ ID NO: 5538691 - DNA, 25 bp, Homo sapien
ctgggtctctggctcagagcctctc

SEQ ID NO: 5538692 - DNA, 25 bp, Homo sapien
gaaactaaatgccaagtgtcctcgg

SEQ ID NO: 5538693 - DNA, 25 bp, Homo sapien
cccgtctgcaagcaaagacctgggg

SEQ ID NO: 5538694 - DNA, 25 bp, Homo sapien
gtccccgagtcccaggcttacatgg

SEQ ID NO: 5538695 - DNA, 25 bp, Homo sapien
caggcttacatggacctcttggcat

SEQ ID NO: 5538696 - DNA, 25 bp, Homo sapien
ctcagaatggcccttggtgctgcag

SEQ ID NO: 5538697 - DNA, 25 bp, Homo sapien
tccctcaaaggattcgggagctggt

SEQ ID NO: 5538698 - DNA, 25 bp, Homo sapien
gcacccacccaccgtggtacagcgc

SEQ ID NO: 5538699 - DNA, 25 bp, Homo sapien
gcaggaccctgccatctatgactcc

SEQ ID NO: 5538700 - DNA, 25 bp, Homo sapien
cagatcctcagaatggcccttggtg

SEQ ID NO: 5538701 - DNA, 25 bp, Homo sapien
aagatggctgacaaaatcctccctc

SEQ ID NO: 5538702 - DNA, 25 bp, Homo sapien
gggcactggatgactctccaggtgc

SEQ ID NO: 5538703 - DNA, 25 bp, Homo sapien
cttcagcacccacccaccgtggtac

SEQ ID NO: 5538704 - DNA, 25 bp, Homo sapien
gaggaagatggctgacaaaatcctc

SEQ ID NO: 5538705 - DNA, 25 bp, Homo sapien
tcttacatccaatgagagcgctgcc

SEQ ID NO: 5538706 - DNA, 25 bp, Homo sapien
ttaatttagagcatttgaagtataa

SEQ ID NO: 5538707 - DNA, 25 bp, Homo sapien
gagatagaggaaatatgtcaacatt

SEQ ID NO: 5538708 - DNA, 25 bp, Homo sapien
ccaatattcaataaaagggtcatta

SEQ ID NO: 5538709 - DNA, 25 bp, Homo sapien
gtggatcagatagaaaaggatttct

SEQ ID NO: 5538710 - DNA, 25 bp, Homo sapien
taaaaggcttttgacatactgtata

SEQ ID NO: 5538711 - DNA, 25 bp, Homo sapien
tgcatagaggtcatgaaattgaacc

SEQ ID NO: 5538712 - DNA, 25 bp, Homo sapien
gcgctgcctgcatagaggtcatgaa

SEQ ID NO: 5538713 - DNA, 25 bp, Homo sapien
tctatgagatagaggaaatatgtca

SEQ ID NO: 5538714 - DNA, 25 bp, Homo sapien
ctccatgtggatcagatagaaaagg

SEQ ID NO: 5538715 - DNA, 25 bp, Homo sapien
aatgtgtctctgttgcacaactgca

SEQ ID NO: 5538716 - DNA, 25 bp, Homo sapien
ctggtcacacgttggcagcattgag

SEQ ID NO: 5538717 - DNA, 25 bp, Homo sapien
cacagtcttttgaaacccaggggcc

SEQ ID NO: 5538718 - DNA, 25 bp, Homo sapien
gagaaggatctgcatctggtcacac

SEQ ID NO: 5538719 - DNA, 25 bp, Homo sapien
caaactatggcaaaaagagtggctt

SEQ ID NO: 5538720 - DNA, 25 bp, Homo sapien
agggcagctcacagcaaagttcaca

SEQ ID NO: 5538721 - DNA, 25 bp, Homo sapien
agagagaagcctgttgagctacaga

SEQ ID NO: 5538722 - DNA, 25 bp, Homo sapien
cagggctgctgtcatgtcatgtcca

SEQ ID NO: 5538723 - DNA, 25 bp, Homo sapien
tccccgtagtcagtgagtggggaaa

SEQ ID NO: 5538724 - DNA, 25 bp, Homo sapien
atgtccaggcttgactggagaagga

SEQ ID NO: 5538725 - DNA, 25 bp, Homo sapien
cctctcccatcacagggcagctcac

SEQ ID NO: 5538726 - DNA, 25 bp, Homo sapien
agagtggcttacaagcagaagactt

SEQ ID NO: 5538727 - DNA, 25 bp, Homo sapien
acaggtgaggtttgatactgcagct

SEQ ID NO: 5538728 - DNA, 25 bp, Homo sapien
gtccatagaatcaaacaggtgaggt

SEQ ID NO: 5538729 - DNA, 25 bp, Homo sapien
agggaatggttatgttgcctggctt

SEQ ID NO: 5538730 - DNA, 25 bp, Homo sapien
cagtactgacttcaaccccaggctc

SEQ ID NO: 5538731 - DNA, 25 bp, Homo sapien
atctctgctgctagagggaatggtt

SEQ ID NO: 5538732 - DNA, 25 bp, Homo sapien
tggatagtctgtaagatggccttgc

SEQ ID NO: 5538733 - DNA, 25 bp, Homo sapien
tgttgcctggcttaaatggaaggaa

SEQ ID NO: 5538734 - DNA, 25 bp, Homo sapien
tgactgggcttgtgaccatctctgc

SEQ ID NO: 5538735 - DNA, 25 bp, Homo sapien
catgccaccaaacacaaggttcttc

SEQ ID NO: 5538736 - DNA, 25 bp, Homo sapien
cagtttactggaagcctcagcccca

SEQ ID NO: 5538737 - DNA, 25 bp, Homo sapien
agcaaggaagctacagtttactgga

SEQ ID NO: 5538738 - DNA, 25 bp, Homo sapien
ctgtaagttgggaagtaaaatagag

SEQ ID NO: 5538739 - DNA, 25 bp, Homo sapien
acaaaacaaactagtgaagcacctt

SEQ ID NO: 5538740 - DNA, 25 bp, Homo sapien
cagggtacatagaaatacatagatc

SEQ ID NO: 5538741 - DNA, 25 bp, Homo sapien
tcctagaactgttgagaatcatgtt

SEQ ID NO: 5538742 - DNA, 25 bp, Homo sapien
gccgtgtcaaggtgtatagctatcc

SEQ ID NO: 5538743 - DNA, 25 bp, Homo sapien
tatcctggggcctcaaaatgtagaa

SEQ ID NO: 5538744 - DNA, 25 bp, Homo sapien
gtttacacttaagatggctagaagc

SEQ ID NO: 5538745 - DNA, 25 bp, Homo sapien
aaataaaaggatatcctggggcctc

SEQ ID NO: 5538746 - DNA, 25 bp, Homo sapien
ggctagaagcttagttacagggtac

SEQ ID NO: 5538747 - DNA, 25 bp, Homo sapien
cactaaggaattcccactgtgactt

SEQ ID NO: 5538748 - DNA, 25 bp, Homo sapien
actggatctctgccgtgtcaaggtg

SEQ ID NO: 5538749 - DNA, 25 bp, Homo sapien
gcccactggttgaaaaggctggctt

SEQ ID NO: 5538750 - DNA, 25 bp, Homo sapien
ctggccagtcactttggtcatgaac

SEQ ID NO: 5538751 - DNA, 25 bp, Homo sapien
tggagcacctcaaggccaatctgtg

SEQ ID NO: 5538752 - DNA, 25 bp, Homo sapien
ttgaggcatacccaggataagaact

SEQ ID NO: 5538753 - DNA, 25 bp, Homo sapien
tgtgattaatgagaactgttgagtt

SEQ ID NO: 5538754 - DNA, 25 bp, Homo sapien
agtaaggtagaacctggcctgtcta

SEQ ID NO: 5538755 - DNA, 25 bp, Homo sapien
atttgaataaggattttggagcacc

SEQ ID NO: 5538756 - DNA, 25 bp, Homo sapien
ctctactatagccagggattcccac

SEQ ID NO: 5538757 - DNA, 25 bp, Homo sapien
gttgagttacttggcttggtgtcac

SEQ ID NO: 5538758 - DNA, 25 bp, Homo sapien
aatgtgatatgttacggttgaggca

SEQ ID NO: 5538759 - DNA, 25 bp, Homo sapien
tgtgtgcagagatattgattcctca

SEQ ID NO: 5538760 - DNA, 25 bp, Homo sapien
agccggagcttttctgtgctgtggg

SEQ ID NO: 5538761 - DNA, 25 bp, Homo sapien
cctggcccccctggccatcccctcg

SEQ ID NO: 5538762 - DNA, 25 bp, Homo sapien
cgtcggcctctcccactctgcggtg

SEQ ID NO: 5538763 - DNA, 25 bp, Homo sapien
ccgctcatctcacctcctgcttttc

SEQ ID NO: 5538764 - DNA, 25 bp, Homo sapien
ctgcttttccaggcctttccgttcc

SEQ ID NO: 5538765 - DNA, 25 bp, Homo sapien
gggggcaggaaattctgtattgctg

SEQ ID NO: 5538766 - DNA, 25 bp, Homo sapien
gggagcgtcggcctctcccactctg

SEQ ID NO: 5538767 - DNA, 25 bp, Homo sapien
ggagccggagcttttctgtgctgtg

SEQ ID NO: 5538768 - DNA, 25 bp, Homo sapien
ctctcccactctgcggtggagtcgg

SEQ ID NO: 5538769 - DNA, 25 bp, Homo sapien
caggcctttccgttccgaacgtcca

SEQ ID NO: 5538770 - DNA, 25 bp, Homo sapien
ggctcggctcctcggtgcatgagga

SEQ ID NO: 5538771 - DNA, 25 bp, Homo sapien
taggaacaagacagagtatcccctt

SEQ ID NO: 5538772 - DNA, 25 bp, Homo sapien
taggagataggctacagaatgatta

SEQ ID NO: 5538773 - DNA, 25 bp, Homo sapien
tatgtttatttaggagataggctac

SEQ ID NO: 5538774 - DNA, 25 bp, Homo sapien
ttactctgctaggtataaggaatac

SEQ ID NO: 5538775 - DNA, 25 bp, Homo sapien
tggcaagaaagctatgagactttac

SEQ ID NO: 5538776 - DNA, 25 bp, Homo sapien
cccttgagggttacactttagtggc

SEQ ID NO: 5538777 - DNA, 25 bp, Homo sapien
gaacaacgagttccttggcaagaaa

SEQ ID NO: 5538778 - DNA, 25 bp, Homo sapien
tctttgggtagtccctgcaggtgaa

SEQ ID NO: 5538779 - DNA, 25 bp, Homo sapien
taaggaatacaactaggaacaagac

SEQ ID NO: 5538780 - DNA, 25 bp, Homo sapien
tgtctcagaacttaggaacaacgag

SEQ ID NO: 5538781 - DNA, 25 bp, Homo sapien
tagtggcaataaatgagtagaccat

SEQ ID NO: 5538782 - DNA, 25 bp, Homo sapien
cagatgaaattccagtccccggcca

SEQ ID NO: 5538783 - DNA, 25 bp, Homo sapien
tcctcctcccttcacaaatagaaac

SEQ ID NO: 5538784 - DNA, 25 bp, Homo sapien
agcccgcctctgccttcctcctccc

SEQ ID NO: 5538785 - DNA, 25 bp, Homo sapien
caggggcagtcattcagatgaaatt

SEQ ID NO: 5538786 - DNA, 25 bp, Homo sapien
attcagatgaaattccagtccccgg

SEQ ID NO: 5538787 - DNA, 25 bp, Homo sapien
cctcccttcacaaatagaaacggaa

SEQ ID NO: 5538788 - DNA, 25 bp, Homo sapien
aaattccagtccccggccagagaca

SEQ ID NO: 5538789 - DNA, 25 bp, Homo sapien
tcagatgaaattccagtccccggcc

SEQ ID NO: 5538790 - DNA, 25 bp, Homo sapien
gacaccagcccgcctctgccttcct

SEQ ID NO: 5538791 - DNA, 25 bp, Homo sapien
ggctacttctgcgctcccccgaggc

SEQ ID NO: 5538792 - DNA, 25 bp, Homo sapien
ggcggctacttctgcgctcccccga

SEQ ID NO: 5538793 - DNA, 25 bp, Homo sapien
acaaaaaaggatcaactgtaggttc

SEQ ID NO: 5538794 - DNA, 25 bp, Homo sapien
agagttatatggagataaaagaccc

SEQ ID NO: 5538795 - DNA, 25 bp, Homo sapien
ataaagcacttgcaaaacatgcatt

SEQ ID NO: 5538796 - DNA, 25 bp, Homo sapien
ttcagaagagagaagcatactcaag

SEQ ID NO: 5538797 - DNA, 25 bp, Homo sapien
cagaggattccttgaccagcacatc

SEQ ID NO: 5538798 - DNA, 25 bp, Homo sapien
gtaggttccagacatcaaagttctc

SEQ ID NO: 5538799 - DNA, 25 bp, Homo sapien
gaaaaccacactgattgctctaagc

SEQ ID NO: 5538800 - DNA, 25 bp, Homo sapien
caaaggtcttaggtcagattcccta

SEQ ID NO: 5538801 - DNA, 25 bp, Homo sapien
gaagagagaagcatactcaaggtct

SEQ ID NO: 5538802 - DNA, 25 bp, Homo sapien
gataaaagacccaaaatacaattca

SEQ ID NO: 5538803 - DNA, 25 bp, Homo sapien
agtgtccataattctcagaggattc

SEQ ID NO: 5538804 - DNA, 25 bp, Homo sapien
aacagcaatgaggccttagacttac

SEQ ID NO: 5538805 - DNA, 25 bp, Homo sapien
gacaattcagcttaaaaacatcccc

SEQ ID NO: 5538806 - DNA, 25 bp, Homo sapien
aaattggtataggttaatagtacac

SEQ ID NO: 5538807 - DNA, 25 bp, Homo sapien
gtcagtgagaaagttaacagttaca

SEQ ID NO: 5538808 - DNA, 25 bp, Homo sapien
aaaaagatattgcagattccattca

SEQ ID NO: 5538809 - DNA, 25 bp, Homo sapien
tgtaactagaaaaatctcctggtaa

SEQ ID NO: 5538810 - DNA, 25 bp, Homo sapien
tcagttgtctgcatgcatgtgaatt

SEQ ID NO: 5538811 - DNA, 25 bp, Homo sapien
gagcattcagagtcataatatggtc

SEQ ID NO: 5538812 - DNA, 25 bp, Homo sapien
atatactaggcttccatgcaggttt

SEQ ID NO: 5538813 - DNA, 25 bp, Homo sapien
tagggtctcccatggaaaaagatat

SEQ ID NO: 5538814 - DNA, 25 bp, Homo sapien
agttccgcagcaagacaattcagct

SEQ ID NO: 5538815 - DNA, 25 bp, Homo sapien
gagatctcctagcctgcaaggtaga

SEQ ID NO: 5538816 - DNA, 25 bp, Homo sapien
ttcaaaacagctacaggaactgcag

SEQ ID NO: 5538817 - DNA, 25 bp, Homo sapien
aggcaccacatatgtgtgaggccac

SEQ ID NO: 5538818 - DNA, 25 bp, Homo sapien
ttggtatctgccaagggcttccttg

SEQ ID NO: 5538819 - DNA, 25 bp, Homo sapien
cattaggctgctgattgtaagttat

SEQ ID NO: 5538820 - DNA, 25 bp, Homo sapien
caggaactgcaggcaccacatatgt

SEQ ID NO: 5538821 - DNA, 25 bp, Homo sapien
cagaactgccagtaatggtgacttg

SEQ ID NO: 5538822 - DNA, 25 bp, Homo sapien
ggggtatgaggcactgaccccttta

SEQ ID NO: 5538823 - DNA, 25 bp, Homo sapien
atttcaccctagtagggggtatgag

SEQ ID NO: 5538824 - DNA, 25 bp, Homo sapien
tgctttagagcagagttaatacctc

SEQ ID NO: 5538825 - DNA, 25 bp, Homo sapien
gcaaggtagaattctgggatcagtt

SEQ ID NO: 5538826 - DNA, 25 bp, Homo sapien
actcataccggccacagacgagttt

SEQ ID NO: 5538827 - DNA, 25 bp, Homo sapien
aagcccgtcacacctccgccgggac

SEQ ID NO: 5538828 - DNA, 25 bp, Homo sapien
cgggacttagtctagacaaaccacc

SEQ ID NO: 5538829 - DNA, 25 bp, Homo sapien
ccgacgggcatcacgtctgcccgcg

SEQ ID NO: 5538830 - DNA, 25 bp, Homo sapien
gacgacccccagccaggctcttctc

SEQ ID NO: 5538831 - DNA, 25 bp, Homo sapien
caaagttatttccgtgcgcccggcg

SEQ ID NO: 5538832 - DNA, 25 bp, Homo sapien
gcccgtcgccccatccgccttatcg

SEQ ID NO: 5538833 - DNA, 25 bp, Homo sapien
cgccccccagcacttccgattccca

SEQ ID NO: 5538834 - DNA, 25 bp, Homo sapien
ccgattcccaacgcgcttgagtttc

SEQ ID NO: 5538835 - DNA, 25 bp, Homo sapien
ggcccactccccgacgggcatcacg

SEQ ID NO: 5538836 - DNA, 25 bp, Homo sapien
aaaccacctcaggtccgctgcaggg

SEQ ID NO: 5538837 - DNA, 25 bp, Homo sapien
cataaaatggctgcagacagttgtt

SEQ ID NO: 5538838 - DNA, 25 bp, Homo sapien
tgttgtctaacaggtaagaaatgaa

SEQ ID NO: 5538839 - DNA, 25 bp, Homo sapien
cctgcctgtccttggggattctact

SEQ ID NO: 5538840 - DNA, 25 bp, Homo sapien
ctccatgcagcagttgctgggtccc

SEQ ID NO: 5538841 - DNA, 25 bp, Homo sapien
gccatcttgatgctgaggtttcctg

SEQ ID NO: 5538842 - DNA, 25 bp, Homo sapien
ggaaagggcttctgatggctttgca

SEQ ID NO: 5538843 - DNA, 25 bp, Homo sapien
gacagtgtttgtattgaggaccttc

SEQ ID NO: 5538844 - DNA, 25 bp, Homo sapien
cttcttcctgtgtgggagcccatag

SEQ ID NO: 5538845 - DNA, 25 bp, Homo sapien
ttgcacaagcttacctgtgggtttc

SEQ ID NO: 5538846 - DNA, 25 bp, Homo sapien
ggtgagatcaggttgtttgtggtaa

SEQ ID NO: 5538847 - DNA, 25 bp, Homo sapien
attgaactattgactgggccccaga

SEQ ID NO: 5538848 - DNA, 25 bp, Homo sapien
tacgaagatcaaataggctacgtgc

SEQ ID NO: 5538849 - DNA, 25 bp, Homo sapien
gctacgtgcatctaaagggctgtgc

SEQ ID NO: 5538850 - DNA, 25 bp, Homo sapien
gagcccagaagattgcacccctaaa

SEQ ID NO: 5538851 - DNA, 25 bp, Homo sapien
ggcttggttgctaaggcccactgac

SEQ ID NO: 5538852 - DNA, 25 bp, Homo sapien
actgccaaattgggacagaagtaat

SEQ ID NO: 5538853 - DNA, 25 bp, Homo sapien
aagtgacccttggaatggatgctca

SEQ ID NO: 5538854 - DNA, 25 bp, Homo sapien
aggaggttacttggacaaagcaaag

SEQ ID NO: 5538855 - DNA, 25 bp, Homo sapien
acgaacaaagaagtagcattaagtg

SEQ ID NO: 5538856 - DNA, 25 bp, Homo sapien
ctgattcgggtactctgtgtgggag

SEQ ID NO: 5538857 - DNA, 25 bp, Homo sapien
gagcacggtctacactggagtttgt

SEQ ID NO: 5538858 - DNA, 25 bp, Homo sapien
accttacagggctgatacgaagatc

SEQ ID NO: 5538859 - DNA, 25 bp, Homo sapien
gtttgaattaaagtccgcagcatac

SEQ ID NO: 5538860 - DNA, 25 bp, Homo sapien
agatgaccttaactgaggtggttac

SEQ ID NO: 5538861 - DNA, 25 bp, Homo sapien
aggccaagctcggtagatgacctta

SEQ ID NO: 5538862 - DNA, 25 bp, Homo sapien
acaggagatagtggtaccaaaaaca

SEQ ID NO: 5538863 - DNA, 25 bp, Homo sapien
cttccatctgaacacagggcatgac

SEQ ID NO: 5538864 - DNA, 25 bp, Homo sapien
acttggaaaagtgcattgctttgtc

SEQ ID NO: 5538865 - DNA, 25 bp, Homo sapien
accaaaaacagataaccacgcaaac

SEQ ID NO: 5538866 - DNA, 25 bp, Homo sapien
acacagggcatgacaaagctcattt

SEQ ID NO: 5538867 - DNA, 25 bp, Homo sapien
caacattattgggaaggccaagctc

SEQ ID NO: 5538868 - DNA, 25 bp, Homo sapien
aaatcatggcaagaaactccttcag

SEQ ID NO: 5538869 - DNA, 25 bp, Homo sapien
gaggtggttacagcattgttcccgg

SEQ ID NO: 5538870 - DNA, 25 bp, Homo sapien
acagttggcaacacgattggctgct

SEQ ID NO: 5538871 - DNA, 25 bp, Homo sapien
ggtggacgccaaacagttggcaaca

SEQ ID NO: 5538872 - DNA, 25 bp, Homo sapien
ttccgcccctcagaagcatggcggc

SEQ ID NO: 5538873 - DNA, 25 bp, Homo sapien
attttcgccgcaagtcagggccata

SEQ ID NO: 5538874 - DNA, 25 bp, Homo sapien
acaagtcccgaagggacactgtgac

SEQ ID NO: 5538875 - DNA, 25 bp, Homo sapien
agaaaacttttattagctggagagg

SEQ ID NO: 5538876 - DNA, 25 bp, Homo sapien
gggaaaggacttgccagattttcgc

SEQ ID NO: 5538877 - DNA, 25 bp, Homo sapien
agcgtcccacacaagtcccgaaggg

SEQ ID NO: 5538878 - DNA, 25 bp, Homo sapien
gcataacaaggcctcccaaccgaag

SEQ ID NO: 5538879 - DNA, 25 bp, Homo sapien
gccatgagccgatgtgttttggagc

SEQ ID NO: 5538880 - DNA, 25 bp, Homo sapien
gacactgtgacgccgcgctactgaa

SEQ ID NO: 5538881 - DNA, 25 bp, Homo sapien
ttgtaaatggaaccatcaccacagc

SEQ ID NO: 5538882 - DNA, 25 bp, Homo sapien
tcatttttgagaagtcacgggaggt

SEQ ID NO: 5538883 - DNA, 25 bp, Homo sapien
tacaatgacttgaaacaaagaaaga

SEQ ID NO: 5538884 - DNA, 25 bp, Homo sapien
actgatgacgcttatgcaaggatat

SEQ ID NO: 5538885 - DNA, 25 bp, Homo sapien
accatgttaagttacagttgtacac

SEQ ID NO: 5538886 - DNA, 25 bp, Homo sapien
caaggatataactatgtaaggattt

SEQ ID NO: 5538887 - DNA, 25 bp, Homo sapien
aaataccgtaaatcaagacaatgtt

SEQ ID NO: 5538888 - DNA, 25 bp, Homo sapien
aaatatattcacagctggacaaaaa

SEQ ID NO: 5538889 - DNA, 25 bp, Homo sapien
tcaccacagcagtgtatgtgactac

SEQ ID NO: 5538890 - DNA, 25 bp, Homo sapien
gggaggtgtcagtctcttaccaaca

SEQ ID NO: 5538891 - DNA, 25 bp, Homo sapien
ttagagatcttcacaaaaatacttc

SEQ ID NO: 5538892 - DNA, 25 bp, Homo sapien
aaagattcaggcagcttaaaacctt

SEQ ID NO: 5538893 - DNA, 25 bp, Homo sapien
accacagtgccaatgcttgtcagac

SEQ ID NO: 5538894 - DNA, 25 bp, Homo sapien
taatacagattaaaagcctttctta

SEQ ID NO: 5538895 - DNA, 25 bp, Homo sapien
agaaaggaaactctgtgactaattt

SEQ ID NO: 5538896 - DNA, 25 bp, Homo sapien
caggcagcttaaaaccttagtgctt

SEQ ID NO: 5538897 - DNA, 25 bp, Homo sapien
caactacctgcttttaatgactcac

SEQ ID NO: 5538898 - DNA, 25 bp, Homo sapien
actggagaataatgaagaagttcac

SEQ ID NO: 5538899 - DNA, 25 bp, Homo sapien
gttgcgcagaaaggaaactctgtga

SEQ ID NO: 5538900 - DNA, 25 bp, Homo sapien
ttgactttccagtcctgtgactttc

SEQ ID NO: 5538901 - DNA, 25 bp, Homo sapien
tagtagagagtcagaatctctggac

SEQ ID NO: 5538902 - DNA, 25 bp, Homo sapien
tttgagaatttcacagggatgtttt

SEQ ID NO: 5538903 - DNA, 25 bp, Homo sapien
taaacatgactttgtgcactgaaga

SEQ ID NO: 5538904 - DNA, 25 bp, Homo sapien
agtatggcttcgcattgcacagtgg

SEQ ID NO: 5538905 - DNA, 25 bp, Homo sapien
caagcaagacttatggaaaatttcc

SEQ ID NO: 5538906 - DNA, 25 bp, Homo sapien
gtgcactgaagaagtatggcttcgc

SEQ ID NO: 5538907 - DNA, 25 bp, Homo sapien
cactgaactttgaaactactgtagc

SEQ ID NO: 5538908 - DNA, 25 bp, Homo sapien
atggaaaatttcctgggtccacaac

SEQ ID NO: 5538909 - DNA, 25 bp, Homo sapien
gcaaatgttacataagttgtttcct

SEQ ID NO: 5538910 - DNA, 25 bp, Homo sapien
ctttgtgcactgaagaagtatggct

SEQ ID NO: 5538911 - DNA, 25 bp, Homo sapien
atcacattgttatcaagcaagactt

SEQ ID NO: 5538912 - DNA, 25 bp, Homo sapien
tcctgggtccacaacactgaacttt

SEQ ID NO: 5538913 - DNA, 25 bp, Homo sapien
tttacataaaggtagcaaatgttac

SEQ ID NO: 5538914 - DNA, 25 bp, Homo sapien
ttccaatctgggcaaagtgatgtcg

SEQ ID NO: 5538915 - DNA, 25 bp, Homo sapien
tccacgggtcctgtgactcagatca

SEQ ID NO: 5538916 - DNA, 25 bp, Homo sapien
cctcggcacccacggtgctgagtgt

SEQ ID NO: 5538917 - DNA, 25 bp, Homo sapien
gtgcacaagtcaggcactgtgacag

SEQ ID NO: 5538918 - DNA, 25 bp, Homo sapien
gtgatgtcggtggtccagaccaaac

SEQ ID NO: 5538919 - DNA, 25 bp, Homo sapien
actcgcatgctgaagactgcagccg

SEQ ID NO: 5538920 - DNA, 25 bp, Homo sapien
ctcccagccactgtgaaggtggcct

SEQ ID NO: 5538921 - DNA, 25 bp, Homo sapien
cagacttcagcagtcacaggccagg

SEQ ID NO: 5538922 - DNA, 25 bp, Homo sapien
accatggctgtgacacctggcacta

SEQ ID NO: 5538923 - DNA, 25 bp, Homo sapien
gtgagcaaccctgccactcgcatgc

SEQ ID NO: 5538924 - DNA, 25 bp, Homo sapien
cgggtaccaccatcgtgaagaccat

SEQ ID NO: 5538925 - DNA, 25 bp, Homo sapien
gcagaagaaggaattaattagaact

SEQ ID NO: 5538926 - DNA, 25 bp, Homo sapien
gtctcatggtcagaatgtggcagaa

SEQ ID NO: 5538927 - DNA, 25 bp, Homo sapien
tgtgcgttcacccccactgcaagcc

SEQ ID NO: 5538928 - DNA, 25 bp, Homo sapien
gactcaagggcatcgtaataggttt

SEQ ID NO: 5538929 - DNA, 25 bp, Homo sapien
tctcagtgcttgactcaagggcatc

SEQ ID NO: 5538930 - DNA, 25 bp, Homo sapien
tggggaactccaaagtctgctaaga

SEQ ID NO: 5538931 - DNA, 25 bp, Homo sapien
cactgcaagccgcgtctcatggtca

SEQ ID NO: 5538932 - DNA, 25 bp, Homo sapien
taattgggtaacgtatctcagtgct

SEQ ID NO: 5538933 - DNA, 25 bp, Homo sapien
aggtttccatactgcagaagaagga

SEQ ID NO: 5538934 - DNA, 25 bp, Homo sapien
attgcccctggtttcctccgtcctc

SEQ ID NO: 5538935 - DNA, 25 bp, Homo sapien
agggaccctcctttccacaggcaaa

SEQ ID NO: 5538936 - DNA, 25 bp, Homo sapien
agtgcctctgataggtacaggacac

SEQ ID NO: 5538937 - DNA, 25 bp, Homo sapien
caggacacatgtatggcagtgctgg

SEQ ID NO: 5538938 - DNA, 25 bp, Homo sapien
tgttccaaaactgccctagtgcctc

SEQ ID NO: 5538939 - DNA, 25 bp, Homo sapien
tgaactcactagtcaggggattttc

SEQ ID NO: 5538940 - DNA, 25 bp, Homo sapien
tgcgtctaattcactggtccagctc

SEQ ID NO: 5538941 - DNA, 25 bp, Homo sapien
gctccaagaagaaaatggctatctc

SEQ ID NO: 5538942 - DNA, 25 bp, Homo sapien
tggttggtggttattgtcaagccat

SEQ ID NO: 5538943 - DNA, 25 bp, Homo sapien
tcttgtgggctccaaagccaaccac

SEQ ID NO: 5538944 - DNA, 25 bp, Homo sapien
agggtacaggctacagctggcctga

SEQ ID NO: 5538945 - DNA, 25 bp, Homo sapien
aagccaaccacagaaagacaagttt

SEQ ID NO: 5538946 - DNA, 25 bp, Homo sapien
gattttcaaaagggtacaggctaca

SEQ ID NO: 5538947 - DNA, 25 bp, Homo sapien
ttcaggtcttaggtagaagaatatt

SEQ ID NO: 5538948 - DNA, 25 bp, Homo sapien
agggacatgtgaagatgtattgccc

SEQ ID NO: 5538949 - DNA, 25 bp, Homo sapien
gacttgttcaagagctagatagcca

SEQ ID NO: 5538950 - DNA, 25 bp, Homo sapien
tacttcgccaacatttcaggtctta

SEQ ID NO: 5538951 - DNA, 25 bp, Homo sapien
atatgaataagggacatgtgaagat

SEQ ID NO: 5538952 - DNA, 25 bp, Homo sapien
tgcttagcatatgaataagggacat

SEQ ID NO: 5538953 - DNA, 25 bp, Homo sapien
caagagctagatagccacttcttac

SEQ ID NO: 5538954 - DNA, 25 bp, Homo sapien
gtgaagatgtattgcccatggattc

SEQ ID NO: 5538955 - DNA, 25 bp, Homo sapien
acacatcaaaggatttttatgactt

SEQ ID NO: 5538956 - DNA, 25 bp, Homo sapien
tgagacagaatgttcagagaaatat

SEQ ID NO: 5538957 - DNA, 25 bp, Homo sapien
actttgaccaaaattggaacaacat

SEQ ID NO: 5538958 - DNA, 25 bp, Homo sapien
aagggaacaagttgagctatgactt

SEQ ID NO: 5538959 - DNA, 25 bp, Homo sapien
tagatttgccatagagtacactgcc

SEQ ID NO: 5538960 - DNA, 25 bp, Homo sapien
tagggagtattctaataagctagtt

SEQ ID NO: 5538961 - DNA, 25 bp, Homo sapien
accattgagaccgtgaagatacttt

SEQ ID NO: 5538962 - DNA, 25 bp, Homo sapien
aacatagccaaaatgtgagtggttg

SEQ ID NO: 5538963 - DNA, 25 bp, Homo sapien
atgtgagtggttgaatatgattaaa

SEQ ID NO: 5538964 - DNA, 25 bp, Homo sapien
taagtgaggaaatcaaagtgctatt

SEQ ID NO: 5538965 - DNA, 25 bp, Homo sapien
gatctgctgcagagcagtaagggaa

SEQ ID NO: 5538966 - DNA, 25 bp, Homo sapien
aaaaggcttataaaacagagtaatc

SEQ ID NO: 5538967 - DNA, 25 bp, Homo sapien
tgtgaacttggaagcacaccaatct

SEQ ID NO: 5538968 - DNA, 25 bp, Homo sapien
aagtgctattacgaagttcaagatc

SEQ ID NO: 5538969 - DNA, 25 bp, Homo sapien
cattcagaaaaccgtgagtagaggt

SEQ ID NO: 5538970 - DNA, 25 bp, Homo sapien
aggaggtttcctggttggattcttc

SEQ ID NO: 5538971 - DNA, 25 bp, Homo sapien
catcccgcttgaatacctctgcctc

SEQ ID NO: 5538972 - DNA, 25 bp, Homo sapien
ggcagtcctttggcacagagagccc

SEQ ID NO: 5538973 - DNA, 25 bp, Homo sapien
attctaatagcaagtgttcctccct

SEQ ID NO: 5538974 - DNA, 25 bp, Homo sapien
tgcctccaggcaaattccccccttc

SEQ ID NO: 5538975 - DNA, 25 bp, Homo sapien
gacagtgatgagcagtttgttcctg

SEQ ID NO: 5538976 - DNA, 25 bp, Homo sapien
gattcttcagtgcgttttggtgggg

SEQ ID NO: 5538977 - DNA, 25 bp, Homo sapien
agtggtgtgttcaggaggtttcctg

SEQ ID NO: 5538978 - DNA, 25 bp, Homo sapien
ctgcagctcaggtaccagacagtga

SEQ ID NO: 5538979 - DNA, 25 bp, Homo sapien
gagtagaggtcccattctggctgtc

SEQ ID NO: 5538980 - DNA, 25 bp, Homo sapien
gagaagccgccagctttcaggtcca

SEQ ID NO: 5538981 - DNA, 25 bp, Homo sapien
ggcttcaggtctttggaaggcttgg

SEQ ID NO: 5538982 - DNA, 25 bp, Homo sapien
gtagcacatgaccgtgtccttgggc

SEQ ID NO: 5538983 - DNA, 25 bp, Homo sapien
gcgtcgcccaagaacatggcgtgct

SEQ ID NO: 5538984 - DNA, 25 bp, Homo sapien
ctcatctcggcgccaccataccagt

SEQ ID NO: 5538985 - DNA, 25 bp, Homo sapien
aggcggaagacctgctctcccttct

SEQ ID NO: 5538986 - DNA, 25 bp, Homo sapien
ccgccagctttcaggtccagcagct

SEQ ID NO: 5538987 - DNA, 25 bp, Homo sapien
gggccagtgttgcgtcctcatctcg

SEQ ID NO: 5538988 - DNA, 25 bp, Homo sapien
gcgcgaagtcgctccgccttgcgta

SEQ ID NO: 5538989 - DNA, 25 bp, Homo sapien
cgcggtagcacatgaccgtgtcctt

SEQ ID NO: 5538990 - DNA, 25 bp, Homo sapien
cccttctgattgcggatggagaagc

SEQ ID NO: 5538991 - DNA, 25 bp, Homo sapien
ggctcagtaaacagggcttgagcgc

SEQ ID NO: 5538992 - DNA, 25 bp, Homo sapien
cagccccgcaccccaacagcttgcg

SEQ ID NO: 5538993 - DNA, 25 bp, Homo sapien
gggcctgttgcgtcctcccagcctc

SEQ ID NO: 5538994 - DNA, 25 bp, Homo sapien
tctgttttccctcactcgccagccc

SEQ ID NO: 5538995 - DNA, 25 bp, Homo sapien
gcttgaaggcgacttagcgccacct

SEQ ID NO: 5538996 - DNA, 25 bp, Homo sapien
ccgcaccccaacagcttgcgctgga

SEQ ID NO: 5538997 - DNA, 25 bp, Homo sapien
acctttccgtctgctggtcgggccg

SEQ ID NO: 5538998 - DNA, 25 bp, Homo sapien
tcacatcacaagaccttgagccagg

SEQ ID NO: 5538999 - DNA, 25 bp, Homo sapien
agcgccacctttccgtctgctggtc

SEQ ID NO: 5539000 - DNA, 25 bp, Homo sapien
agcctttgctcgatgagggctgcag

SEQ ID NO: 5539001 - DNA, 25 bp, Homo sapien
cccgcccaggctcagtaaacagggc

SEQ ID NO: 5539002 - DNA, 25 bp, Homo sapien
gtagatcgaagtaaagctctcggtc

SEQ ID NO: 5539003 - DNA, 25 bp, Homo sapien
cgaagtaaagctctcggtcaagttc

SEQ ID NO: 5539004 - DNA, 25 bp, Homo sapien
ttgttactaagagaaagctggtcac

SEQ ID NO: 5539005 - DNA, 25 bp, Homo sapien
tccccactgtagatcgaagtaaagc

SEQ ID NO: 5539006 - DNA, 25 bp, Homo sapien
catcttcaacaatcctggctcttgc

SEQ ID NO: 5539007 - DNA, 25 bp, Homo sapien
ggactgtgccccttctccccactgt

SEQ ID NO: 5539008 - DNA, 25 bp, Homo sapien
agctggtcacagtacactataatct

SEQ ID NO: 5539009 - DNA, 25 bp, Homo sapien
ttttaggaggtgcttctgcagaaac

SEQ ID NO: 5539010 - DNA, 25 bp, Homo sapien
atgagactcccaggggtccttggga

SEQ ID NO: 5539011 - DNA, 25 bp, Homo sapien
caatcctggctcttgctgaagtaga

SEQ ID NO: 5539012 - DNA, 25 bp, Homo sapien
ggattttaggaggtgcttctgcaga

SEQ ID NO: 5539013 - DNA, 25 bp, Homo sapien
ttctcagaggcagtctgggttgaga

SEQ ID NO: 5539014 - DNA, 25 bp, Homo sapien
gttccctccgcaggcctcgagttac

SEQ ID NO: 5539015 - DNA, 25 bp, Homo sapien
tccccggaaagctagccagtgggga

SEQ ID NO: 5539016 - DNA, 25 bp, Homo sapien
gccagggcatcagctcttcacaccc

SEQ ID NO: 5539017 - DNA, 25 bp, Homo sapien
ggtgactcttgcggcctccctcatc

SEQ ID NO: 5539018 - DNA, 25 bp, Homo sapien
agaaccccagaatcctggcccagcc

SEQ ID NO: 5539019 - DNA, 25 bp, Homo sapien
gaaaacgcaagccctgcacctccaa

SEQ ID NO: 5539020 - DNA, 25 bp, Homo sapien
gagctcctgcgcatcctgtgaagcc

SEQ ID NO: 5539021 - DNA, 25 bp, Homo sapien
atgcgctctgtagcctggagagctc

SEQ ID NO: 5539022 - DNA, 25 bp, Homo sapien
ttagagagaagtgaactcaacagac

SEQ ID NO: 5539023 - DNA, 25 bp, Homo sapien
gggtccaagacagccaatccctctt

SEQ ID NO: 5539024 - DNA, 25 bp, Homo sapien
tatacagagtttgtgaaatctacac

SEQ ID NO: 5539025 - DNA, 25 bp, Homo sapien
aggtaccagaaggatgccattaacc

SEQ ID NO: 5539026 - DNA, 25 bp, Homo sapien
tttagaagcatgacatctcaaatcc

SEQ ID NO: 5539027 - DNA, 25 bp, Homo sapien
tggtagcctgtgtgtatgaaacatc

SEQ ID NO: 5539028 - DNA, 25 bp, Homo sapien
aaaagcttcagatagacccacatac

SEQ ID NO: 5539029 - DNA, 25 bp, Homo sapien
aaattcaaaatagaacccagatcaa

SEQ ID NO: 5539030 - DNA, 25 bp, Homo sapien
taggtctctgaaggagaaaaattca

SEQ ID NO: 5539031 - DNA, 25 bp, Homo sapien
tataggtagcttcgataaaagcttc

SEQ ID NO: 5539032 - DNA, 25 bp, Homo sapien
aagtagttcttgcacataaatgtta

SEQ ID NO: 5539033 - DNA, 25 bp, Homo sapien
tgcctacttaggtctctgaaggaga

SEQ ID NO: 5539034 - DNA, 25 bp, Homo sapien
acatagaaaactctcgttggtagcc

SEQ ID NO: 5539035 - DNA, 25 bp, Homo sapien
atcccactgggtttaagagcatctt

SEQ ID NO: 5539036 - DNA, 25 bp, Homo sapien
atgaaaaagcctaatgcgcattaat

SEQ ID NO: 5539037 - DNA, 25 bp, Homo sapien
tccttaaaggccatatcactccatt

SEQ ID NO: 5539038 - DNA, 25 bp, Homo sapien
aaataatggatgggttactatgagc

SEQ ID NO: 5539039 - DNA, 25 bp, Homo sapien
aagagcatcttgaatgtataatcct

SEQ ID NO: 5539040 - DNA, 25 bp, Homo sapien
gagcaatttcgctttcagaaccccc

SEQ ID NO: 5539041 - DNA, 25 bp, Homo sapien
tggatgggttactatgagcaatttc

SEQ ID NO: 5539042 - DNA, 25 bp, Homo sapien
gtgcaaatgccagggttggttttta

SEQ ID NO: 5539043 - DNA, 25 bp, Homo sapien
taatgcgcattaatgaggttgaaga

SEQ ID NO: 5539044 - DNA, 25 bp, Homo sapien
agctttgcttgtattgtgaagattt

SEQ ID NO: 5539045 - DNA, 25 bp, Homo sapien
aaagaaagaaattagtacatcattt

SEQ ID NO: 5539046 - DNA, 25 bp, Homo sapien
tctgaggctagccctccagagatct

SEQ ID NO: 5539047 - DNA, 25 bp, Homo sapien
cctgcaccgcattgctggctgagca

SEQ ID NO: 5539048 - DNA, 25 bp, Homo sapien
tctaaagcagaactggctggtcaat

SEQ ID NO: 5539049 - DNA, 25 bp, Homo sapien
caaactggctggccctgtaaccaat

SEQ ID NO: 5539050 - DNA, 25 bp, Homo sapien
aaacagttgtctggggcaaatagtt

SEQ ID NO: 5539051 - DNA, 25 bp, Homo sapien
gaggaagtccaagcagccatatgga

SEQ ID NO: 5539052 - DNA, 25 bp, Homo sapien
ctggtcaatccatagaaggaagggg

SEQ ID NO: 5539053 - DNA, 25 bp, Homo sapien
catctgccatgctatgaggaagtcc

SEQ ID NO: 5539054 - DNA, 25 bp, Homo sapien
cagagatctagcttatgtggtcctt

SEQ ID NO: 5539055 - DNA, 25 bp, Homo sapien
ccattccagggctccatccaatacc

SEQ ID NO: 5539056 - DNA, 25 bp, Homo sapien
tggacacagcataaacagcgacata

SEQ ID NO: 5539057 - DNA, 25 bp, Homo sapien
aagacgaagaacatggatgataaca

SEQ ID NO: 5539058 - DNA, 25 bp, Homo sapien
agaacatggatgataacacctttgc

SEQ ID NO: 5539059 - DNA, 25 bp, Homo sapien
ttctgacgttccgatgactggcaac

SEQ ID NO: 5539060 - DNA, 25 bp, Homo sapien
tcctgatgtccaggagtcagtgggt

SEQ ID NO: 5539061 - DNA, 25 bp, Homo sapien
ctgagggcactttctgggccaacaa

SEQ ID NO: 5539062 - DNA, 25 bp, Homo sapien
gggccaacaaccacggccgcaacta

SEQ ID NO: 5539063 - DNA, 25 bp, Homo sapien
ggccccagatgacacttcaggtttc

SEQ ID NO: 5539064 - DNA, 25 bp, Homo sapien
acggccgcaactacacagtcctgct

SEQ ID NO: 5539065 - DNA, 25 bp, Homo sapien
tacacagtcctgctccggatcgcac

SEQ ID NO: 5539066 - DNA, 25 bp, Homo sapien
gagtcagtgggtccactggtagccc

SEQ ID NO: 5539067 - DNA, 25 bp, Homo sapien
gtccatggccccagatgacacttca

SEQ ID NO: 5539068 - DNA, 25 bp, Homo sapien
gacaaaaggtggacaataatcaatt

SEQ ID NO: 5539069 - DNA, 25 bp, Homo sapien
cagtaccctttaaagcttctgtttc

SEQ ID NO: 5539070 - DNA, 25 bp, Homo sapien
atcataaggactagcgatggtaaca

SEQ ID NO: 5539071 - DNA, 25 bp, Homo sapien
gaacaagctgtccacatacagcatt

SEQ ID NO: 5539072 - DNA, 25 bp, Homo sapien
ttaccgatgttatcaaactgagaca

SEQ ID NO: 5539073 - DNA, 25 bp, Homo sapien
tcagaaagttatgtggatgactata

SEQ ID NO: 5539074 - DNA, 25 bp, Homo sapien
gttttcagaaagttatgtggatgac

SEQ ID NO: 5539075 - DNA, 25 bp, Homo sapien
ctgagaatctgaactgaacaagctg

SEQ ID NO: 5539076 - DNA, 25 bp, Homo sapien
cacataggcaatatcatctagacta

SEQ ID NO: 5539077 - DNA, 25 bp, Homo sapien
gagacccaatgacaaaaggtggaca

SEQ ID NO: 5539078 - DNA, 25 bp, Homo sapien
taattgagacccaatgacaaaaggt

SEQ ID NO: 5539079 - DNA, 25 bp, Homo sapien
tgggccagcttgtcggtatcatggt

SEQ ID NO: 5539080 - DNA, 25 bp, Homo sapien
cgtccgcctcgtccatcgcttcggc

SEQ ID NO: 5539081 - DNA, 25 bp, Homo sapien
gcatctgctggagcccaatgctggt

SEQ ID NO: 5539082 - DNA, 25 bp, Homo sapien
gtccatcgcttcggcctccaccttc

SEQ ID NO: 5539083 - DNA, 25 bp, Homo sapien
ggcaccctcccgccctgtgtcgtcc

SEQ ID NO: 5539084 - DNA, 25 bp, Homo sapien
ccaccttctttggcggctctcggag

SEQ ID NO: 5539085 - DNA, 25 bp, Homo sapien
ccagcttgtcggtatcatggtggtg

SEQ ID NO: 5539086 - DNA, 25 bp, Homo sapien
tgctggcctcttcgccagcctcggc

SEQ ID NO: 5539087 - DNA, 25 bp, Homo sapien
tcgtgcatctgctggagcccaatgc

SEQ ID NO: 5539088 - DNA, 25 bp, Homo sapien
accctcccgccctgtgtcgtcccag

SEQ ID NO: 5539089 - DNA, 25 bp, Homo sapien
ctcgagccacgctccttcccgctcc

SEQ ID NO: 5539090 - DNA, 25 bp, Homo sapien
caccctagaaagtgacacatcctcc

SEQ ID NO: 5539091 - DNA, 25 bp, Homo sapien
ctggaatataagtggagccacacta

SEQ ID NO: 5539092 - DNA, 25 bp, Homo sapien
atttgtgcaaatggagggcacttga

SEQ ID NO: 5539093 - DNA, 25 bp, Homo sapien
taagcacttgtacaaaggaacacac

SEQ ID NO: 5539094 - DNA, 25 bp, Homo sapien
tcactttggcacgagtcttaggagg

SEQ ID NO: 5539095 - DNA, 25 bp, Homo sapien
agcagaactgcttttggagtgagtt

SEQ ID NO: 5539096 - DNA, 25 bp, Homo sapien
gtggagccacactacagaccaaact

SEQ ID NO: 5539097 - DNA, 25 bp, Homo sapien
agcagatggcagatctctgagcaga

SEQ ID NO: 5539098 - DNA, 25 bp, Homo sapien
agaccaaactgaggtccaggacctg

SEQ ID NO: 5539099 - DNA, 25 bp, Homo sapien
gagggcacttgagtgcagacaatta

SEQ ID NO: 5539100 - DNA, 25 bp, Homo sapien
aggctcttgccaaaagcaggggtta

SEQ ID NO: 5539101 - DNA, 25 bp, Homo sapien
acactctatgtgaatggtctacttc

SEQ ID NO: 5539102 - DNA, 25 bp, Homo sapien
taatttgaggcctaggaaaatattc

SEQ ID NO: 5539103 - DNA, 25 bp, Homo sapien
tttcaggttcctaggggcattagaa

SEQ ID NO: 5539104 - DNA, 25 bp, Homo sapien
tcacagcaaaagccgactgaatagc

SEQ ID NO: 5539105 - DNA, 25 bp, Homo sapien
atccagggtatgtggagatactgta

SEQ ID NO: 5539106 - DNA, 25 bp, Homo sapien
aggggcattagaaacctaaggtcac

SEQ ID NO: 5539107 - DNA, 25 bp, Homo sapien
atttggtgcccctttgggtctactg

SEQ ID NO: 5539108 - DNA, 25 bp, Homo sapien
atccctaggatgctgtccttcagga

SEQ ID NO: 5539109 - DNA, 25 bp, Homo sapien
agccgactgaatagccagttcaacc

SEQ ID NO: 5539110 - DNA, 25 bp, Homo sapien
ccagagtcacaaccttggaggtcgt

SEQ ID NO: 5539111 - DNA, 25 bp, Homo sapien
aaccaaagaattctaccagagtcac

SEQ ID NO: 5539112 - DNA, 25 bp, Homo sapien
cctggacagggctcattaaaccttc

SEQ ID NO: 5539113 - DNA, 25 bp, Homo sapien
ctggacagggctcattaaaccttcc

SEQ ID NO: 5539114 - DNA, 25 bp, Homo sapien
ccctggacagggctcattaaacctt

SEQ ID NO: 5539115 - DNA, 25 bp, Homo sapien
agggccctggacagggctcattaaa

SEQ ID NO: 5539116 - DNA, 25 bp, Homo sapien
tggacagggctcattaaaccttcct

SEQ ID NO: 5539117 - DNA, 25 bp, Homo sapien
gggccctggacagggctcattaaac

SEQ ID NO: 5539118 - DNA, 25 bp, Homo sapien
ggccctggacagggctcattaaacc

SEQ ID NO: 5539119 - DNA, 25 bp, Homo sapien
gccctggacagggctcattaaacct

SEQ ID NO: 5539120 - DNA, 25 bp, Homo sapien
tatgttcttctcagggtaggaagca

SEQ ID NO: 5539121 - DNA, 25 bp, Homo sapien
tcactcttggtgcccacgctggagt

SEQ ID NO: 5539122 - DNA, 25 bp, Homo sapien
ggagtttcactcttggtgcccacgc

SEQ ID NO: 5539123 - DNA, 25 bp, Homo sapien
catttctccatgtgggtcaggctgg

SEQ ID NO: 5539124 - DNA, 25 bp, Homo sapien
agcaaaaataacagaatacagcact

SEQ ID NO: 5539125 - DNA, 25 bp, Homo sapien
ggtctcgaactggcgaccccagtgg

SEQ ID NO: 5539126 - DNA, 25 bp, Homo sapien
ctgtgctccagtctgggcgaaagac

SEQ ID NO: 5539127 - DNA, 25 bp, Homo sapien
gtattgttagtagagacggcatttc

SEQ ID NO: 5539128 - DNA, 25 bp, Homo sapien
aggcagaaagacaacagctgtatta

SEQ ID NO: 5539129 - DNA, 25 bp, Homo sapien
ggtaggaagcaaaaataacagaata

SEQ ID NO: 5539130 - DNA, 25 bp, Homo sapien
tctcgaactggcgaccccagtggat

SEQ ID NO: 5539131 - DNA, 25 bp, Homo sapien
tataagtcgcataacctggaaaatt

SEQ ID NO: 5539132 - DNA, 25 bp, Homo sapien
ctttactgaaagacaactggctcaa

SEQ ID NO: 5539133 - DNA, 25 bp, Homo sapien
gacaactggctcaaataggaacaat

SEQ ID NO: 5539134 - DNA, 25 bp, Homo sapien
ctggaaaattaggttaaagcccata

SEQ ID NO: 5539135 - DNA, 25 bp, Homo sapien
tggctcaaataggaacaatagtaat

SEQ ID NO: 5539136 - DNA, 25 bp, Homo sapien
aatagtaattagactccccagatag

SEQ ID NO: 5539137 - DNA, 25 bp, Homo sapien
aaggtcttatagatcttaaagtact

SEQ ID NO: 5539138 - DNA, 25 bp, Homo sapien
cccatatacagaaattgatgaattc

SEQ ID NO: 5539139 - DNA, 25 bp, Homo sapien
ttaaagcccatatacagaaattgat

SEQ ID NO: 5539140 - DNA, 25 bp, Homo sapien
ttggtcacagtgctttataagtcgc

SEQ ID NO: 5539141 - DNA, 25 bp, Homo sapien
gaaagacaactggctcaaataggaa

SEQ ID NO: 5539142 - DNA, 25 bp, Homo sapien
caccgagggcaaagcataatttccc

SEQ ID NO: 5539143 - DNA, 25 bp, Homo sapien
ctctttatggcaaatgatacagttt

SEQ ID NO: 5539144 - DNA, 25 bp, Homo sapien
acgttcatggggaaaattatgacta

SEQ ID NO: 5539145 - DNA, 25 bp, Homo sapien
caagtgtagtttacaagcaagtcat

SEQ ID NO: 5539146 - DNA, 25 bp, Homo sapien
taccaccaagcctacacctctctgt

SEQ ID NO: 5539147 - DNA, 25 bp, Homo sapien
ataaagtagtggtctcaagtgtagt

SEQ ID NO: 5539148 - DNA, 25 bp, Homo sapien
gcagtctaactttgtgatgtcctcc

SEQ ID NO: 5539149 - DNA, 25 bp, Homo sapien
tagaaatgattgatatttgggaatc

SEQ ID NO: 5539150 - DNA, 25 bp, Homo sapien
cctgacctgtgtgccctttgcagtc

SEQ ID NO: 5539151 - DNA, 25 bp, Homo sapien
gatgtcctcccaccgagggcaaagc

SEQ ID NO: 5539152 - DNA, 25 bp, Homo sapien
tgtgacaggaggttcatcgtctctg

SEQ ID NO: 5539153 - DNA, 25 bp, Homo sapien
taagaattggctatacagtatttgc

SEQ ID NO: 5539154 - DNA, 25 bp, Homo sapien
acagagagtaagaactgactcatat

SEQ ID NO: 5539155 - DNA, 25 bp, Homo sapien
ccatgttgacagaaatatctctagt

SEQ ID NO: 5539156 - DNA, 25 bp, Homo sapien
gactcatatactcacagccagcttt

SEQ ID NO: 5539157 - DNA, 25 bp, Homo sapien
ctgcaggtcaccactgttctgaatc

SEQ ID NO: 5539158 - DNA, 25 bp, Homo sapien
atttttgaggtttacccatgttgac

SEQ ID NO: 5539159 - DNA, 25 bp, Homo sapien
atatagtatttagccatgacaaaaa

SEQ ID NO: 5539160 - DNA, 25 bp, Homo sapien
tgcatcctttccccaatctcagttg

SEQ ID NO: 5539161 - DNA, 25 bp, Homo sapien
tcacagccagctttatcaaatttta

SEQ ID NO: 5539162 - DNA, 25 bp, Homo sapien
tgcatgttttgaaattgtacgttat

SEQ ID NO: 5539163 - DNA, 25 bp, Homo sapien
agttgtctttctccctgcaggtcac

SEQ ID NO: 5539164 - DNA, 25 bp, Homo sapien
gtggccctactcaatcacacccgag

SEQ ID NO: 5539165 - DNA, 25 bp, Homo sapien
ctcgggtgtgattgagtagggccac

SEQ ID NO: 5539166 - DNA, 25 bp, Homo sapien
cttttctccacctcaaggggctacg

SEQ ID NO: 5539167 - DNA, 25 bp, Homo sapien
ggataccataacctacagtgtagcc

SEQ ID NO: 5539168 - DNA, 25 bp, Homo sapien
aggcaggaattgggcttcctagcct

SEQ ID NO: 5539169 - DNA, 25 bp, Homo sapien
gataacaggttatttgcccaaagtc

SEQ ID NO: 5539170 - DNA, 25 bp, Homo sapien
gacacagcgccatccctggccagta

SEQ ID NO: 5539171 - DNA, 25 bp, Homo sapien
acagatgagttcagtagacagccaa

SEQ ID NO: 5539172 - DNA, 25 bp, Homo sapien
ggcttcctagcctggagtccttttc

SEQ ID NO: 5539173 - DNA, 25 bp, Homo sapien
ccaaagtcataaggtgaagtagagg

SEQ ID NO: 5539174 - DNA, 25 bp, Homo sapien
ctcggtactgaaacagccctaggag

SEQ ID NO: 5539175 - DNA, 25 bp, Homo sapien
acgaagcacagatgagttcagtaga

SEQ ID NO: 5539176 - DNA, 25 bp, Homo sapien
agagctgggttaagccatcaccttt

SEQ ID NO: 5539177 - DNA, 25 bp, Homo sapien
ttgcccggaaagtctctggagcaag

SEQ ID NO: 5539178 - DNA, 25 bp, Homo sapien
catctgggattttagcagtaatgct

SEQ ID NO: 5539179 - DNA, 25 bp, Homo sapien
agcagtaatgctaacttctataggt

SEQ ID NO: 5539180 - DNA, 25 bp, Homo sapien
agggattgatgctctgtctaaactc

SEQ ID NO: 5539181 - DNA, 25 bp, Homo sapien
tcccttgcccggaaagtctctggag

SEQ ID NO: 5539182 - DNA, 25 bp, Homo sapien
agttctcccttgcccggaaagtctc

SEQ ID NO: 5539183 - DNA, 25 bp, Homo sapien
tctagttgttttaagatgaaagttc

SEQ ID NO: 5539184 - DNA, 25 bp, Homo sapien
gacaacggcatccgactgcactcgc

SEQ ID NO: 5539185 - DNA, 25 bp, Homo sapien
aaactctacaaaagtacagtcctac

SEQ ID NO: 5539186 - DNA, 25 bp, Homo sapien
aagatgaaagttcccagttctccct

SEQ ID NO: 5539187 - DNA, 25 bp, Homo sapien
ggagaagggattgatgctctgtcta

SEQ ID NO: 5539188 - DNA, 25 bp, Homo sapien
gagccccacctggtggcaacaggca

SEQ ID NO: 5539189 - DNA, 25 bp, Homo sapien
gggcactcacatcgcgacaacactc

SEQ ID NO: 5539190 - DNA, 25 bp, Homo sapien
gcctcactaacgtcacgtggggcgc

SEQ ID NO: 5539191 - DNA, 25 bp, Homo sapien
tttccaggacaggcacctgcccttt

SEQ ID NO: 5539192 - DNA, 25 bp, Homo sapien
gcgagtttggtattccccctggtga

SEQ ID NO: 5539193 - DNA, 25 bp, Homo sapien
ccctggtgaaccatgactaggcttc

SEQ ID NO: 5539194 - DNA, 25 bp, Homo sapien
gggcaaatcctaagctgggcactca

SEQ ID NO: 5539195 - DNA, 25 bp, Homo sapien
agcggtagaggcctctcctgtttcc

SEQ ID NO: 5539196 - DNA, 25 bp, Homo sapien
cttcctagggcctgaggtcacttca

SEQ ID NO: 5539197 - DNA, 25 bp, Homo sapien
ctgccagtaaagcaggtgaacagga

SEQ ID NO: 5539198 - DNA, 25 bp, Homo sapien
caattactaccgatctgcagggcga

SEQ ID NO: 5539199 - DNA, 25 bp, Homo sapien
ctgatttgctttaaagattggtggc

SEQ ID NO: 5539200 - DNA, 25 bp, Homo sapien
taacaggccactttaatattaatac

SEQ ID NO: 5539201 - DNA, 25 bp, Homo sapien
tacattattgggaaaattacagttc

SEQ ID NO: 5539202 - DNA, 25 bp, Homo sapien
gctttaaagattggtggcattgcac

SEQ ID NO: 5539203 - DNA, 25 bp, Homo sapien
aaaatcagctagagatggtacattt

SEQ ID NO: 5539204 - DNA, 25 bp, Homo sapien
gattggtggcattgcacaggctata

SEQ ID NO: 5539205 - DNA, 25 bp, Homo sapien
actgaaaatcagctagagatggtac

SEQ ID NO: 5539206 - DNA, 25 bp, Homo sapien
tttaattagaactctgatttgcttt

SEQ ID NO: 5539207 - DNA, 25 bp, Homo sapien
tgcacaggctatattacaccctctt

SEQ ID NO: 5539208 - DNA, 25 bp, Homo sapien
ttggaactgaaaatcagctagagat

SEQ ID NO: 5539209 - DNA, 25 bp, Homo sapien
tattgggaaaattacagttctgtat

SEQ ID NO: 5539210 - DNA, 25 bp, Homo sapien
cttctggttagagttatgggaagcg

SEQ ID NO: 5539211 - DNA, 25 bp, Homo sapien
attcacccccagctgccatccccgt

SEQ ID NO: 5539212 - DNA, 25 bp, Homo sapien
gttcgctgcgcgtgcacattccgca

SEQ ID NO: 5539213 - DNA, 25 bp, Homo sapien
gcacattccgcactctcaacgccct

SEQ ID NO: 5539214 - DNA, 25 bp, Homo sapien
ccccaatgtggaattgagggtcatt

SEQ ID NO: 5539215 - DNA, 25 bp, Homo sapien
cgtgggccagcactgcctctttctc

SEQ ID NO: 5539216 - DNA, 25 bp, Homo sapien
ccgaggagtttcgcagaatcaactt

SEQ ID NO: 5539217 - DNA, 25 bp, Homo sapien
gcggcaagaaaaatgccagccagaa

SEQ ID NO: 5539218 - DNA, 25 bp, Homo sapien
cgcggttatggacaccaagaagaaa

SEQ ID NO: 5539219 - DNA, 25 bp, Homo sapien
agaagaaaaaagatgtttccagccc

SEQ ID NO: 5539220 - DNA, 25 bp, Homo sapien
gcactctcaacgccctgcgagcgcc

SEQ ID NO: 5539221 - DNA, 25 bp, Homo sapien
cgcttatgccaaatggaagatagaa

SEQ ID NO: 5539222 - DNA, 25 bp, Homo sapien
aggacacctctttccaaacagtgcc

SEQ ID NO: 5539223 - DNA, 25 bp, Homo sapien
gtgagcaaaagatcttgaaagcaaa

SEQ ID NO: 5539224 - DNA, 25 bp, Homo sapien
tgaaagcaaaaagcactaattagtt

SEQ ID NO: 5539225 - DNA, 25 bp, Homo sapien
acatcccctcagttgcagtgaattg

SEQ ID NO: 5539226 - DNA, 25 bp, Homo sapien
gagagttgagtttaacaatcctagc

SEQ ID NO: 5539227 - DNA, 25 bp, Homo sapien
cataccccccttaggcaggttggct

SEQ ID NO: 5539228 - DNA, 25 bp, Homo sapien
aaacaaacatcgaaacgcttatgcc

SEQ ID NO: 5539229 - DNA, 25 bp, Homo sapien
tcatatcacctcagccaactgtggc

SEQ ID NO: 5539230 - DNA, 25 bp, Homo sapien
tggtaagtggtttcaattgtccttc

SEQ ID NO: 5539231 - DNA, 25 bp, Homo sapien
gcagtgaattgtgagcaaaagatct

SEQ ID NO: 5539232 - DNA, 25 bp, Homo sapien
agaccacgttttcctggggacaggc

SEQ ID NO: 5539233 - DNA, 25 bp, Homo sapien
atctgcaatctgactttgggaaggc

SEQ ID NO: 5539234 - DNA, 25 bp, Homo sapien
caaatgccgctggtttgctctgaat

SEQ ID NO: 5539235 - DNA, 25 bp, Homo sapien
cctctcctcaggtcaggaagagggg

SEQ ID NO: 5539236 - DNA, 25 bp, Homo sapien
ccacagctgagaccacgttttcctg

SEQ ID NO: 5539237 - DNA, 25 bp, Homo sapien
cggagacccccaacaaatgccgctg

SEQ ID NO: 5539238 - DNA, 25 bp, Homo sapien
ctgaattccccaaaggcccagaacg

SEQ ID NO: 5539239 - DNA, 25 bp, Homo sapien
ccattccccgcccggacacaatggc

SEQ ID NO: 5539240 - DNA, 25 bp, Homo sapien
gccctgcacaaagactgggtgaggg

SEQ ID NO: 5539241 - DNA, 25 bp, Homo sapien
cgctgggcctctcctcaggtcagga

SEQ ID NO: 5539242 - DNA, 25 bp, Homo sapien
tcctccattccccgcccggacacaa

SEQ ID NO: 5539243 - DNA, 25 bp, Homo sapien
gcaatgccagaacttcaacagagcc

SEQ ID NO: 5539244 - DNA, 25 bp, Homo sapien
atggacagtttaattaggaagcttc

SEQ ID NO: 5539245 - DNA, 25 bp, Homo sapien
tattactgagtcgacacaggatgtc

SEQ ID NO: 5539246 - DNA, 25 bp, Homo sapien
ggtcagaaagcatgagacagtttct

SEQ ID NO: 5539247 - DNA, 25 bp, Homo sapien
aatggaggagttgacttagaccttc

SEQ ID NO: 5539248 - DNA, 25 bp, Homo sapien
caggatgtcaccagtgagcctcatc

SEQ ID NO: 5539249 - DNA, 25 bp, Homo sapien
tccatggtaccagtggttgaggatg

SEQ ID NO: 5539250 - DNA, 25 bp, Homo sapien
tcaacagagcctaaaggtctgggga

SEQ ID NO: 5539251 - DNA, 25 bp, Homo sapien
agggacaggtcttccatggtaccag

SEQ ID NO: 5539252 - DNA, 25 bp, Homo sapien
gaagggtctcataagcaatgccaga

SEQ ID NO: 5539253 - DNA, 25 bp, Homo sapien
tagaataacagaggaagtcccagtt

SEQ ID NO: 5539254 - DNA, 25 bp, Homo sapien
aattactcagataaaagaactcatt

SEQ ID NO: 5539255 - DNA, 25 bp, Homo sapien
tggttagtaagatggagttgatcct

SEQ ID NO: 5539256 - DNA, 25 bp, Homo sapien
ggacactagcataaatggttagccc

SEQ ID NO: 5539257 - DNA, 25 bp, Homo sapien
cctaatgaagtttaaagaccagaga

SEQ ID NO: 5539258 - DNA, 25 bp, Homo sapien
aggaatacaaacaggcaattatgac

SEQ ID NO: 5539259 - DNA, 25 bp, Homo sapien
tatgacacagaatactaagccttat

SEQ ID NO: 5539260 - DNA, 25 bp, Homo sapien
tgggcatgacctgagcaggatatta

SEQ ID NO: 5539261 - DNA, 25 bp, Homo sapien
tacatagggaatcaaatggttagta

SEQ ID NO: 5539262 - DNA, 25 bp, Homo sapien
gacctgagcaggatattaagacttc

SEQ ID NO: 5539263 - DNA, 25 bp, Homo sapien
cagggatcttctgacacatgtatct

SEQ ID NO: 5539264 - DNA, 25 bp, Homo sapien
atgtgtacgatgtgcaggtttctta

SEQ ID NO: 5539265 - DNA, 25 bp, Homo sapien
tgcctgtacccgtatttatacttat

SEQ ID NO: 5539266 - DNA, 25 bp, Homo sapien
ataagtataaatacgggtacaggca

SEQ ID NO: 5539267 - DNA, 25 bp, Homo sapien
ggctctcgacaaagagcccaggacc

SEQ ID NO: 5539268 - DNA, 25 bp, Homo sapien
gggctctcgacaaagagcccaggac

SEQ ID NO: 5539269 - DNA, 25 bp, Homo sapien
ctcactaccaagttcgtgtcgctgc

SEQ ID NO: 5539270 - DNA, 25 bp, Homo sapien
accaagttcgtgtcgctgctgcagg

SEQ ID NO: 5539271 - DNA, 25 bp, Homo sapien
cgcccgcgtggcttctgtctccggg

SEQ ID NO: 5539272 - DNA, 25 bp, Homo sapien
cctggggctgctcactaccaagttc

SEQ ID NO: 5539273 - DNA, 25 bp, Homo sapien
gcgttctggatctcaaagcggtgag

SEQ ID NO: 5539274 - DNA, 25 bp, Homo sapien
cccgcgtggcttctgtctccgggcg

SEQ ID NO: 5539275 - DNA, 25 bp, Homo sapien
actaccaagttcgtgtcgctgctgc

SEQ ID NO: 5539276 - DNA, 25 bp, Homo sapien
gttctggatctcaaagcggtgagct

SEQ ID NO: 5539277 - DNA, 25 bp, Homo sapien
cacgctgggctctcgacaaagagcc

SEQ ID NO: 5539278 - DNA, 25 bp, Homo sapien
cttaggtgatattgggtcacgatcc

SEQ ID NO: 5539279 - DNA, 25 bp, Homo sapien
gatttcagtgtcacagctgggagcc

SEQ ID NO: 5539280 - DNA, 25 bp, Homo sapien
tgcacggatggcattgtgattccca

SEQ ID NO: 5539281 - DNA, 25 bp, Homo sapien
ttttgccaagggcacgtctagcatg

SEQ ID NO: 5539282 - DNA, 25 bp, Homo sapien
agctgggagcccatagtcaattctg

SEQ ID NO: 5539283 - DNA, 25 bp, Homo sapien
tctagcatgtctcccagaaatgggc

SEQ ID NO: 5539284 - DNA, 25 bp, Homo sapien
ggagcctcaaggaatctggtttcag

SEQ ID NO: 5539285 - DNA, 25 bp, Homo sapien
ccatacccaggaactagctagaagg

SEQ ID NO: 5539286 - DNA, 25 bp, Homo sapien
cagcataaacatgatgatggatttc

SEQ ID NO: 5539287 - DNA, 25 bp, Homo sapien
tttctgtaaatagaggtctgtgggg

SEQ ID NO: 5539288 - DNA, 25 bp, Homo sapien
taacagagtaagcaaaatttcagaa

SEQ ID NO: 5539289 - DNA, 25 bp, Homo sapien
tggtgttggtggatgattatttgta

SEQ ID NO: 5539290 - DNA, 25 bp, Homo sapien
atatgttgatggacaaatacgggga

SEQ ID NO: 5539291 - DNA, 25 bp, Homo sapien
cctgatgattcctgaacttaccagc

SEQ ID NO: 5539292 - DNA, 25 bp, Homo sapien
cttaaagacagaaaactcctaataa

SEQ ID NO: 5539293 - DNA, 25 bp, Homo sapien
aaatctggtctgcactcctactttc

SEQ ID NO: 5539294 - DNA, 25 bp, Homo sapien
catttaacatagaagttaggggaaa

SEQ ID NO: 5539295 - DNA, 25 bp, Homo sapien
gacaatggttaataactagtgactc

SEQ ID NO: 5539296 - DNA, 25 bp, Homo sapien
atctagggtcaaatgcatgcatatc

SEQ ID NO: 5539297 - DNA, 25 bp, Homo sapien
agggagcttccagtgcagaaatcta

SEQ ID NO: 5539298 - DNA, 25 bp, Homo sapien
aatggtggcatttaacatagaagtt

SEQ ID NO: 5539299 - DNA, 25 bp, Homo sapien
taataaatatctagggtcaaatgca

SEQ ID NO: 5539300 - DNA, 25 bp, Homo sapien
aggtgagtctgaaccaatagaaagc

SEQ ID NO: 5539301 - DNA, 25 bp, Homo sapien
gtgtatagtaccagaagcaaggtct

SEQ ID NO: 5539302 - DNA, 25 bp, Homo sapien
agaaagcaaacatgtgcagatatcc

SEQ ID NO: 5539303 - DNA, 25 bp, Homo sapien
tggtatggccaaaagtcagagttaa

SEQ ID NO: 5539304 - DNA, 25 bp, Homo sapien
gcttccagaatggggcttaagtacc

SEQ ID NO: 5539305 - DNA, 25 bp, Homo sapien
gggagagctagaaagttgctaactg

SEQ ID NO: 5539306 - DNA, 25 bp, Homo sapien
gctacccgtcttaggcagcaacagc

SEQ ID NO: 5539307 - DNA, 25 bp, Homo sapien
cttctcgcaactgaaggaaggctga

SEQ ID NO: 5539308 - DNA, 25 bp, Homo sapien
gatgagcaaaacattgggccacttc

SEQ ID NO: 5539309 - DNA, 25 bp, Homo sapien
acaagactgctcatgcaagtcgggg

SEQ ID NO: 5539310 - DNA, 25 bp, Homo sapien
aggctgctgcaagtcattgagtgac

SEQ ID NO: 5539311 - DNA, 25 bp, Homo sapien
cagtcatgaaatgagtgcgtaccga

SEQ ID NO: 5539312 - DNA, 25 bp, Homo sapien
gtttggacgactgcggaattttctc

SEQ ID NO: 5539313 - DNA, 25 bp, Homo sapien
gtgccgacatagtgtctgcagtccc

SEQ ID NO: 5539314 - DNA, 25 bp, Homo sapien
acagagaatctcattgtgccgacat

SEQ ID NO: 5539315 - DNA, 25 bp, Homo sapien
gccgcctgggatgttcagtcatgaa

SEQ ID NO: 5539316 - DNA, 25 bp, Homo sapien
gatccagatggcagtgtcctgctac

SEQ ID NO: 5539317 - DNA, 25 bp, Homo sapien
agagccccagcaatatgaagtacag

SEQ ID NO: 5539318 - DNA, 25 bp, Homo sapien
gcatagccacgaagtgatgcctctc

SEQ ID NO: 5539319 - DNA, 25 bp, Homo sapien
ctgccacagactgctgaagagttgg

SEQ ID NO: 5539320 - DNA, 25 bp, Homo sapien
acctcaaacgctggcagtacgtgga

SEQ ID NO: 5539321 - DNA, 25 bp, Homo sapien
ctgaagagttggcggccaatctcac

SEQ ID NO: 5539322 - DNA, 25 bp, Homo sapien
gattatggttactacagcttacaaa

SEQ ID NO: 5539323 - DNA, 25 bp, Homo sapien
tttgtaagctgtagtaaccataatc

SEQ ID NO: 5539324 - DNA, 25 bp, Homo sapien
atccatcctattaaagccactctcc

SEQ ID NO: 5539325 - DNA, 25 bp, Homo sapien
ggcatccttgagggaaccttgttgc

SEQ ID NO: 5539326 - DNA, 25 bp, Homo sapien
ttcctcacagggtatggcatccttg

SEQ ID NO: 5539327 - DNA, 25 bp, Homo sapien
tcacagggtatggcatccttgaggg

SEQ ID NO: 5539328 - DNA, 25 bp, Homo sapien
accttgttgcgacactttgccaaag

SEQ ID NO: 5539329 - DNA, 25 bp, Homo sapien
tgactcctgcaggctggcaatctct

SEQ ID NO: 5539330 - DNA, 25 bp, Homo sapien
gagggaaccttgttgcgacactttg

SEQ ID NO: 5539331 - DNA, 25 bp, Homo sapien
ggtatggcatccttgagggaacctt

SEQ ID NO: 5539332 - DNA, 25 bp, Homo sapien
tggtttcgtttctgtaccccatcca

SEQ ID NO: 5539333 - DNA, 25 bp, Homo sapien
ggagcaccctccacccggagaggga

SEQ ID NO: 5539334 - DNA, 25 bp, Homo sapien
ggcaatctctccgggagcaccctcc

SEQ ID NO: 5539335 - DNA, 25 bp, Homo sapien
ggccagtggttaccaaagccaagga

SEQ ID NO: 5539336 - DNA, 25 bp, Homo sapien
ccaagaaggtagtgtgaaaatatta

SEQ ID NO: 5539337 - DNA, 25 bp, Homo sapien
ccagtggttaccaaagccaaggaga

SEQ ID NO: 5539338 - DNA, 25 bp, Homo sapien
tctggaattccgagtgtgaactttc

SEQ ID NO: 5539339 - DNA, 25 bp, Homo sapien
ctggccatggactgctctggaattc

SEQ ID NO: 5539340 - DNA, 25 bp, Homo sapien
gtgtgaactttcagccaagaaggta

SEQ ID NO: 5539341 - DNA, 25 bp, Homo sapien
gtgtgaaaatattactgtgaggttt

SEQ ID NO: 5539342 - DNA, 25 bp, Homo sapien
ggactgctctggaattccgagtgtg

SEQ ID NO: 5539343 - DNA, 25 bp, Homo sapien
acctgcatggtgacagctactgagg

SEQ ID NO: 5539344 - DNA, 25 bp, Homo sapien
ggtaacctgcatggtgacagctact

SEQ ID NO: 5539345 - DNA, 25 bp, Homo sapien
actttcagccaagaaggtagtgtga

SEQ ID NO: 5539346 - DNA, 25 bp, Homo sapien
gctcttcgtgggctcttactgttgc

SEQ ID NO: 5539347 - DNA, 25 bp, Homo sapien
caggtaaagttcttagaagaggtct

SEQ ID NO: 5539348 - DNA, 25 bp, Homo sapien
gaatgaactaccaaccgcagctctt

SEQ ID NO: 5539349 - DNA, 25 bp, Homo sapien
tctgtacaatgggtgttgtgaggat

SEQ ID NO: 5539350 - DNA, 25 bp, Homo sapien
agggctgtccagaatgaactaccaa

SEQ ID NO: 5539351 - DNA, 25 bp, Homo sapien
gcgtgccaagacgcttccctgccct

SEQ ID NO: 5539352 - DNA, 25 bp, Homo sapien
ggacagcgacagtccccagcaacaa

SEQ ID NO: 5539353 - DNA, 25 bp, Homo sapien
tttcctagctgtgtaacctcggaga

SEQ ID NO: 5539354 - DNA, 25 bp, Homo sapien
tactgctcagcgctgcctgacaacc

SEQ ID NO: 5539355 - DNA, 25 bp, Homo sapien
agaagtcacttaaccactcgctgcc

SEQ ID NO: 5539356 - DNA, 25 bp, Homo sapien
tcagtgagctgaaacaggtaaagtt

SEQ ID NO: 5539357 - DNA, 25 bp, Homo sapien
cgccgcctttggatcccgcggactc

SEQ ID NO: 5539358 - DNA, 25 bp, Homo sapien
tggtcatacagctttcaaatgttgc

SEQ ID NO: 5539359 - DNA, 25 bp, Homo sapien
gttgcttaacgaacagatagcattt

SEQ ID NO: 5539360 - DNA, 25 bp, Homo sapien
gactcagtattaaagtgcgcgtccc

SEQ ID NO: 5539361 - DNA, 25 bp, Homo sapien
agccagctctctcttgcttcgcgtc

SEQ ID NO: 5539362 - DNA, 25 bp, Homo sapien
ataatcagaggaaagactcagtatt

SEQ ID NO: 5539363 - DNA, 25 bp, Homo sapien
attaaagtgcgcgtcccatcattgc

SEQ ID NO: 5539364 - DNA, 25 bp, Homo sapien
gaacagtgctcgttcgttcgcaggg

SEQ ID NO: 5539365 - DNA, 25 bp, Homo sapien
ttctaaccacgaacagtgctcgttc

SEQ ID NO: 5539366 - DNA, 25 bp, Homo sapien
ccatcattgcaaccgggccctcggg

SEQ ID NO: 5539367 - DNA, 25 bp, Homo sapien
tcttgcttcgcgtccggctctcagg

SEQ ID NO: 5539368 - DNA, 25 bp, Homo sapien
tgcgaccgcagagagtaccgtgggt

SEQ ID NO: 5539369 - DNA, 25 bp, Homo sapien
acccacggtactctctgcggtcgca

SEQ ID NO: 5539370 - DNA, 25 bp, Homo sapien
tgagaatctgccatgcaacacaggt

SEQ ID NO: 5539371 - DNA, 25 bp, Homo sapien
gccaggaagcctcctaggttccctg

SEQ ID NO: 5539372 - DNA, 25 bp, Homo sapien
tcagctgaccacagtaaggagagaa

SEQ ID NO: 5539373 - DNA, 25 bp, Homo sapien
gctagtgatgaaagtgcaagttaag

SEQ ID NO: 5539374 - DNA, 25 bp, Homo sapien
gccttagtggttatgatgtcagctg

SEQ ID NO: 5539375 - DNA, 25 bp, Homo sapien
taagagattcaaggaaaaggtcaca

SEQ ID NO: 5539376 - DNA, 25 bp, Homo sapien
caacacaggtagaaagaattataag

SEQ ID NO: 5539377 - DNA, 25 bp, Homo sapien
aggttccctgaaatcgtgggcaaag

SEQ ID NO: 5539378 - DNA, 25 bp, Homo sapien
aaggagagaatgtctggttgaattt

SEQ ID NO: 5539379 - DNA, 25 bp, Homo sapien
tgatgggtcaaataatcggagattc

SEQ ID NO: 5539380 - DNA, 25 bp, Homo sapien
tcagcccatctgggaagtacggatg

SEQ ID NO: 5539381 - DNA, 25 bp, Homo sapien
ctttaggaattcagcacgaattggc

SEQ ID NO: 5539382 - DNA, 25 bp, Homo sapien
tttgatcctttgctactcaggtgta

SEQ ID NO: 5539383 - DNA, 25 bp, Homo sapien
tactcaggtgtagatgaggttttcc

SEQ ID NO: 5539384 - DNA, 25 bp, Homo sapien
gtagcaacagtcacctttgatcctt

SEQ ID NO: 5539385 - DNA, 25 bp, Homo sapien
agagggttgtagcaacagtcacctt

SEQ ID NO: 5539386 - DNA, 25 bp, Homo sapien
ggctaatcaaaggctgaggtgaatt

SEQ ID NO: 5539387 - DNA, 25 bp, Homo sapien
gctgaggtgaattggtaccccatgc

SEQ ID NO: 5539388 - DNA, 25 bp, Homo sapien
ctggatgaaagatttggtccgtggc

SEQ ID NO: 5539389 - DNA, 25 bp, Homo sapien
acagcaaaagcaggggtttattaaa

SEQ ID NO: 5539390 - DNA, 25 bp, Homo sapien
aaacagcaaaagcaggggtttatta

SEQ ID NO: 5539391 - DNA, 25 bp, Homo sapien
atgaaagatttggtccgtggctaat

SEQ ID NO: 5539392 - DNA, 25 bp, Homo sapien
gcttatgctccctgcgatggctggc

SEQ ID NO: 5539393 - DNA, 25 bp, Homo sapien
tgcctgtctcagtgcttatgctccc

SEQ ID NO: 5539394 - DNA, 25 bp, Homo sapien
atacacatcataagagaatagatac

SEQ ID NO: 5539395 - DNA, 25 bp, Homo sapien
gagttgcaaggctgccagcctggct

SEQ ID NO: 5539396 - DNA, 25 bp, Homo sapien
tacttctgacattaggtgggggaat

SEQ ID NO: 5539397 - DNA, 25 bp, Homo sapien
tgctccacaccccagaatgttccta

SEQ ID NO: 5539398 - DNA, 25 bp, Homo sapien
cgggcaggcacgtgtgcctgtctca

SEQ ID NO: 5539399 - DNA, 25 bp, Homo sapien
gcatgtgacactcccttcctgctcc

SEQ ID NO: 5539400 - DNA, 25 bp, Homo sapien
acctccgtgtggggtttaataggca

SEQ ID NO: 5539401 - DNA, 25 bp, Homo sapien
ggctgccagcctggctacgatagcc

SEQ ID NO: 5539402 - DNA, 25 bp, Homo sapien
gttcttccccagggagttgcaaggc

SEQ ID NO: 5539403 - DNA, 25 bp, Homo sapien
caggtgtggaatgctcacagttgtc

SEQ ID NO: 5539404 - DNA, 25 bp, Homo sapien
atgatgaaaaccctattgctgctac

SEQ ID NO: 5539405 - DNA, 25 bp, Homo sapien
tgtaagtgatccacggtccaggtgt

SEQ ID NO: 5539406 - DNA, 25 bp, Homo sapien
ctcagaaacgagactgagacctagg

SEQ ID NO: 5539407 - DNA, 25 bp, Homo sapien
tatacaaaggtgatgagaaaaaatc

SEQ ID NO: 5539408 - DNA, 25 bp, Homo sapien
tgagattgttacagaggctcccgtt

SEQ ID NO: 5539409 - DNA, 25 bp, Homo sapien
agggatcgacgtatcacggtgatta

SEQ ID NO: 5539410 - DNA, 25 bp, Homo sapien
cgtcttaggtgatgacacaaatgcc

SEQ ID NO: 5539411 - DNA, 25 bp, Homo sapien
tcctcaacactgcgggaatcctgga

SEQ ID NO: 5539412 - DNA, 25 bp, Homo sapien
caaactccgggcatacaataaaaat

SEQ ID NO: 5539413 - DNA, 25 bp, Homo sapien
ctggaggaacgaagtaattcacaaa

SEQ ID NO: 5539414 - DNA, 25 bp, Homo sapien
gtacaaacatttatgcggtaggctc

SEQ ID NO: 5539415 - DNA, 25 bp, Homo sapien
accaggctgtttggagatcctcatc

SEQ ID NO: 5539416 - DNA, 25 bp, Homo sapien
caataactacaaaaggcaatgattc

SEQ ID NO: 5539417 - DNA, 25 bp, Homo sapien
gactaaaaagaattccaccaggctg

SEQ ID NO: 5539418 - DNA, 25 bp, Homo sapien
gccatcgggctcccagttagaccct

SEQ ID NO: 5539419 - DNA, 25 bp, Homo sapien
ccaggtgtcaggaaacagactaaaa

SEQ ID NO: 5539420 - DNA, 25 bp, Homo sapien
tgcttgggagcccattcgcatgagg

SEQ ID NO: 5539421 - DNA, 25 bp, Homo sapien
aatacattgaaccaagggatcctcc

SEQ ID NO: 5539422 - DNA, 25 bp, Homo sapien
cccttcaaggcagacgttcagtaca

SEQ ID NO: 5539423 - DNA, 25 bp, Homo sapien
ttcaaaagcggggcttcatctgcaa

SEQ ID NO: 5539424 - DNA, 25 bp, Homo sapien
tgcacttaggtaccaggtgtcagga

SEQ ID NO: 5539425 - DNA, 25 bp, Homo sapien
tagggtcgtggtgccttctggacac

SEQ ID NO: 5539426 - DNA, 25 bp, Homo sapien
gtgtccagaaggcaccacgacccta

SEQ ID NO: 5539427 - DNA, 25 bp, Homo sapien
aacagctcttggctgctacagacgc

SEQ ID NO: 5539428 - DNA, 25 bp, Homo sapien
gtaaaggaacctggcctggtatcag

SEQ ID NO: 5539429 - DNA, 25 bp, Homo sapien
tttgagaactctggagtaaaggaac

SEQ ID NO: 5539430 - DNA, 25 bp, Homo sapien
tgactgctgctcaccagccgtgcaa

SEQ ID NO: 5539431 - DNA, 25 bp, Homo sapien
accagccgtgcaatcctgagcaagt

SEQ ID NO: 5539432 - DNA, 25 bp, Homo sapien
cactaaggagtcagttgaaaatgtc

SEQ ID NO: 5539433 - DNA, 25 bp, Homo sapien
tctaaagactaaagaagacgtgaga

SEQ ID NO: 5539434 - DNA, 25 bp, Homo sapien
cctaacacagccacggattccgact

SEQ ID NO: 5539435 - DNA, 25 bp, Homo sapien
ccgactcagcggcccgctagcatgg

SEQ ID NO: 5539436 - DNA, 25 bp, Homo sapien
agggacctttgattgtgtggaagct

SEQ ID NO: 5539437 - DNA, 25 bp, Homo sapien
ccgtccatgacaatgcagagcttgc

SEQ ID NO: 5539438 - DNA, 25 bp, Homo sapien
ccgatcttgattggactgaagacag

SEQ ID NO: 5539439 - DNA, 25 bp, Homo sapien
tgtagcccagccaataagttctgac

SEQ ID NO: 5539440 - DNA, 25 bp, Homo sapien
taattcagagggtctgctgagagaa

SEQ ID NO: 5539441 - DNA, 25 bp, Homo sapien
cttaggcaggttagttcaaagctac

SEQ ID NO: 5539442 - DNA, 25 bp, Homo sapien
tgaaggctgtaacatctgtcacccc

SEQ ID NO: 5539443 - DNA, 25 bp, Homo sapien
aggagttgcttatgtgctgtagccc

SEQ ID NO: 5539444 - DNA, 25 bp, Homo sapien
tgtcaccccatgatcaccaggattg

SEQ ID NO: 5539445 - DNA, 25 bp, Homo sapien
tcaacccggttaatgctcgaggagg

SEQ ID NO: 5539446 - DNA, 25 bp, Homo sapien
caccaggattggtctgagtaacttt

SEQ ID NO: 5539447 - DNA, 25 bp, Homo sapien
gaggggataagctgtcacttctccg

SEQ ID NO: 5539448 - DNA, 25 bp, Homo sapien
actttgcttccttgggtggggatcg

SEQ ID NO: 5539449 - DNA, 25 bp, Homo sapien
cagcccccgtctcgggccgtgcgac

SEQ ID NO: 5539450 - DNA, 25 bp, Homo sapien
gtcgcacggcccgagacgggggctg

SEQ ID NO: 5539451 - DNA, 25 bp, Homo sapien
gctgacagcccccgtctcgggccgt

SEQ ID NO: 5539452 - DNA, 25 bp, Homo sapien
acggcccgagacgggggctgtcagc

SEQ ID NO: 5539453 - DNA, 25 bp, Homo sapien
gcccgctgacagcccccgtctcggg

SEQ ID NO: 5539454 - DNA, 25 bp, Homo sapien
cccgagacgggggctgtcagcgggc

SEQ ID NO: 5539455 - DNA, 25 bp, Homo sapien
aaggaggcaatataaccattttaac

SEQ ID NO: 5539456 - DNA, 25 bp, Homo sapien
ctcacagacagtaattagaacccct

SEQ ID NO: 5539457 - DNA, 25 bp, Homo sapien
ctgactaggatacttcacaggtctt

SEQ ID NO: 5539458 - DNA, 25 bp, Homo sapien
acaaagtagtaactctcacagacag

SEQ ID NO: 5539459 - DNA, 25 bp, Homo sapien
ccaacacaatactgaagcagaaacc

SEQ ID NO: 5539460 - DNA, 25 bp, Homo sapien
ttataatacagaaccaacacaatac

SEQ ID NO: 5539461 - DNA, 25 bp, Homo sapien
gcccctccacatatagcaacttaca

SEQ ID NO: 5539462 - DNA, 25 bp, Homo sapien
gaacccctgtcctacatgcccctcc

SEQ ID NO: 5539463 - DNA, 25 bp, Homo sapien
cacaatattcaaggaaatcagtgct

SEQ ID NO: 5539464 - DNA, 25 bp, Homo sapien
gctgtggtaaacaaaagagatctac

SEQ ID NO: 5539465 - DNA, 25 bp, Homo sapien
ttttggtctattaaggtgcaattta

SEQ ID NO: 5539466 - DNA, 25 bp, Homo sapien
ataaagtccaattagctaggggcag

SEQ ID NO: 5539467 - DNA, 25 bp, Homo sapien
agtccccaagtgataccaatgctgc

SEQ ID NO: 5539468 - DNA, 25 bp, Homo sapien
atggaggatcatgcaagaaatgttt

SEQ ID NO: 5539469 - DNA, 25 bp, Homo sapien
tcctggatacgaccgtccaaccagc

SEQ ID NO: 5539470 - DNA, 25 bp, Homo sapien
tttatggggcaagcctggattccta

SEQ ID NO: 5539471 - DNA, 25 bp, Homo sapien
cctacattaagaaaacggcaggcag

SEQ ID NO: 5539472 - DNA, 25 bp, Homo sapien
gagtagggaaatgtccctggctgga

SEQ ID NO: 5539473 - DNA, 25 bp, Homo sapien
tggtagacacctagcagtctctgcc

SEQ ID NO: 5539474 - DNA, 25 bp, Homo sapien
ctttaagaaccacgggcctacatta

SEQ ID NO: 5539475 - DNA, 25 bp, Homo sapien
gcagagatcctcagacacaaggtca

SEQ ID NO: 5539476 - DNA, 25 bp, Homo sapien
aaaggaagacttagtcctcacggtc

SEQ ID NO: 5539477 - DNA, 25 bp, Homo sapien
ctcttatctgactgatctgcgaagt

SEQ ID NO: 5539478 - DNA, 25 bp, Homo sapien
ctcactttggggaatttaatgcttt

SEQ ID NO: 5539479 - DNA, 25 bp, Homo sapien
gatgttgctgcttccgaaggcttag

SEQ ID NO: 5539480 - DNA, 25 bp, Homo sapien
ctttttgtgtgcgtgatctagggga

SEQ ID NO: 5539481 - DNA, 25 bp, Homo sapien
gctccaactagctctcagctgaatt

SEQ ID NO: 5539482 - DNA, 25 bp, Homo sapien
atctgcgaagtctgatgcttctgcc

SEQ ID NO: 5539483 - DNA, 25 bp, Homo sapien
tcctcgcctcctctcgtgtccctct

SEQ ID NO: 5539484 - DNA, 25 bp, Homo sapien
cccccaacccctctgtcctcctcac

SEQ ID NO: 5539485 - DNA, 25 bp, Homo sapien
aggagacaccccagagctccaacta

SEQ ID NO: 5539486 - DNA, 25 bp, Homo sapien
ctgactgatctgcgaagtctgatgc

SEQ ID NO: 5539487 - DNA, 25 bp, Homo sapien
gaagtctgatgcttctgccagaggg

SEQ ID NO: 5539488 - DNA, 25 bp, Homo sapien
ttcagggttttaagagtcagtgctc

SEQ ID NO: 5539489 - DNA, 25 bp, Homo sapien
aaatgtggttgagtgtgcctaaatt

SEQ ID NO: 5539490 - DNA, 25 bp, Homo sapien
gcaccggtcagcaatcagctgcatc

SEQ ID NO: 5539491 - DNA, 25 bp, Homo sapien
tgaagcagcgcttgcagatgtacaa

SEQ ID NO: 5539492 - DNA, 25 bp, Homo sapien
gggacaagagagagttaacatctag

SEQ ID NO: 5539493 - DNA, 25 bp, Homo sapien
aaagctaagtcctgggttccgtctg

SEQ ID NO: 5539494 - DNA, 25 bp, Homo sapien
gatgtacaactcgcagcaccggtca

SEQ ID NO: 5539495 - DNA, 25 bp, Homo sapien
gaacacccgatcgcagagggtaatt

SEQ ID NO: 5539496 - DNA, 25 bp, Homo sapien
acgatgcggtaatgaatccagcaga

SEQ ID NO: 5539497 - DNA, 25 bp, Homo sapien
aagggcaaagtgagttaatgtgtag

SEQ ID NO: 5539498 - DNA, 25 bp, Homo sapien
tggaaaaagccatggtgtgtggttt

SEQ ID NO: 5539499 - DNA, 25 bp, Homo sapien
gaacgtcgctctaggcgcggggggg

SEQ ID NO: 5539500 - DNA, 25 bp, Homo sapien
cccccccgcgcctagagcgacgttc

SEQ ID NO: 5539501 - DNA, 25 bp, Homo sapien
tccggcactgcgttctggtgctgct

SEQ ID NO: 5539502 - DNA, 25 bp, Homo sapien
ctcacctgcttcctcacccggacca

SEQ ID NO: 5539503 - DNA, 25 bp, Homo sapien
cgcggcgctgctcccccttctgccg

SEQ ID NO: 5539504 - DNA, 25 bp, Homo sapien
gctgagcgtgtgttcgcacagcttg

SEQ ID NO: 5539505 - DNA, 25 bp, Homo sapien
ccctggctgcctttgtcctcgccct

SEQ ID NO: 5539506 - DNA, 25 bp, Homo sapien
cttcctcacccggaccaagcgggga

SEQ ID NO: 5539507 - DNA, 25 bp, Homo sapien
cgctgctcccccttctgccgggcgc

SEQ ID NO: 5539508 - DNA, 25 bp, Homo sapien
ccccctcttcagcatcgcctgtgcc

SEQ ID NO: 5539509 - DNA, 25 bp, Homo sapien
ggctccggcactgcgttctggtgct

SEQ ID NO: 5539510 - DNA, 25 bp, Homo sapien
gagcgtgtgttcgcacagcttgagc

SEQ ID NO: 5539511 - DNA, 25 bp, Homo sapien
gcacagcttgagccccctcttcagc

SEQ ID NO: 5539512 - DNA, 25 bp, Homo sapien
ctgaaattcagcatccctgaaattc

SEQ ID NO: 5539513 - DNA, 25 bp, Homo sapien
acacagcaagacccccatctccaca

SEQ ID NO: 5539514 - DNA, 25 bp, Homo sapien
cagcctaaacaacacagcaagaccc

SEQ ID NO: 5539515 - DNA, 25 bp, Homo sapien
caataacaactacaggcaagggtca

SEQ ID NO: 5539516 - DNA, 25 bp, Homo sapien
aggagttcaggaccagcctaaacaa

SEQ ID NO: 5539517 - DNA, 25 bp, Homo sapien
ttaaagaaatacatctacatagtaa

SEQ ID NO: 5539518 - DNA, 25 bp, Homo sapien
aggcaagggtcaacaatttagctcc

SEQ ID NO: 5539519 - DNA, 25 bp, Homo sapien
tataatttactgagaggccaaggca

SEQ ID NO: 5539520 - DNA, 25 bp, Homo sapien
ctacaggcaagggtcaacaatttag

SEQ ID NO: 5539521 - DNA, 25 bp, Homo sapien
tacttctgaaccaataacaactaca

SEQ ID NO: 5539522 - DNA, 25 bp, Homo sapien
ctgagtaaattatacagaagtgctc

SEQ ID NO: 5539523 - DNA, 25 bp, Homo sapien
aggatgttagaattatacagagtgg

SEQ ID NO: 5539524 - DNA, 25 bp, Homo sapien
tagtggccagactcaaatggcttcc

SEQ ID NO: 5539525 - DNA, 25 bp, Homo sapien
gctgatgagatgtctagtggccaga

SEQ ID NO: 5539526 - DNA, 25 bp, Homo sapien
ctcagaccccacatttctcagcttc

SEQ ID NO: 5539527 - DNA, 25 bp, Homo sapien
ctcagcttcctctatgccatgctcc

SEQ ID NO: 5539528 - DNA, 25 bp, Homo sapien
gaacaggttcggtcaaactgccatt

SEQ ID NO: 5539529 - DNA, 25 bp, Homo sapien
gggtcatggggcatctcttcacaca

SEQ ID NO: 5539530 - DNA, 25 bp, Homo sapien
ttcacacaagtggctgatgagatgt

SEQ ID NO: 5539531 - DNA, 25 bp, Homo sapien
agcctctacccttgtgaacaggttc

SEQ ID NO: 5539532 - DNA, 25 bp, Homo sapien
acaagtttcgttagaaatcagcctc

SEQ ID NO: 5539533 - DNA, 25 bp, Homo sapien
ggcatgggaatatttgttttgctgc

SEQ ID NO: 5539534 - DNA, 25 bp, Homo sapien
agtgagtcactcagcctgcaaatgc

SEQ ID NO: 5539535 - DNA, 25 bp, Homo sapien
ctcagcaataaccatggaagcccac

SEQ ID NO: 5539536 - DNA, 25 bp, Homo sapien
accacctacgttcgtgggccactgg

SEQ ID NO: 5539537 - DNA, 25 bp, Homo sapien
gtgggccactggtaccaattgtgcc

SEQ ID NO: 5539538 - DNA, 25 bp, Homo sapien
tgccaattttaggctgagatggagt

SEQ ID NO: 5539539 - DNA, 25 bp, Homo sapien
ttgagacacccaaatcacccaccag

SEQ ID NO: 5539540 - DNA, 25 bp, Homo sapien
tggacagccttcttgtgccagggac

SEQ ID NO: 5539541 - DNA, 25 bp, Homo sapien
ttgcaggacgtcaatccaactcagc

SEQ ID NO: 5539542 - DNA, 25 bp, Homo sapien
cacccaccagtcattgcgttcccct

SEQ ID NO: 5539543 - DNA, 25 bp, Homo sapien
tgccacctatccaccagggatgggg

SEQ ID NO: 5539544 - DNA, 25 bp, Homo sapien
cagggactgtctgtgccacctatcc

SEQ ID NO: 5539545 - DNA, 25 bp, Homo sapien
ccaaggccaagtacagagcctattc

SEQ ID NO: 5539546 - DNA, 25 bp, Homo sapien
tacactattgtttgcccaaggccaa

SEQ ID NO: 5539547 - DNA, 25 bp, Homo sapien
ctccaataagcaactagagggcaga

SEQ ID NO: 5539548 - DNA, 25 bp, Homo sapien
gtttgcccaaggccaagtacagagc

SEQ ID NO: 5539549 - DNA, 25 bp, Homo sapien
tatcagaatgtactatgctcactcc

SEQ ID NO: 5539550 - DNA, 25 bp, Homo sapien
tgattgggataagttctatgctcac

SEQ ID NO: 5539551 - DNA, 25 bp, Homo sapien
tctaattaagcagtcaccaaccttt

SEQ ID NO: 5539552 - DNA, 25 bp, Homo sapien
atcaaatctgattgggataagttct

SEQ ID NO: 5539553 - DNA, 25 bp, Homo sapien
atgttctggattctagctcttgtac

SEQ ID NO: 5539554 - DNA, 25 bp, Homo sapien
gcaactagagggcagactgtatatt

SEQ ID NO: 5539555 - DNA, 25 bp, Homo sapien
agggactggctttgtgaaagacagt

SEQ ID NO: 5539556 - DNA, 25 bp, Homo sapien
attactggaggctattgcttcccac

SEQ ID NO: 5539557 - DNA, 25 bp, Homo sapien
acatcattcatggagacagctttct

SEQ ID NO: 5539558 - DNA, 25 bp, Homo sapien
cagagtttctcaaggtgactggact

SEQ ID NO: 5539559 - DNA, 25 bp, Homo sapien
tctagagatgtgagaaatacaaatt

SEQ ID NO: 5539560 - DNA, 25 bp, Homo sapien
acatagtgttttgcagagtgtggtc

SEQ ID NO: 5539561 - DNA, 25 bp, Homo sapien
gtagagcacactttgcaaacgctgt

SEQ ID NO: 5539562 - DNA, 25 bp, Homo sapien
aaggtgactggactatggacacttt

SEQ ID NO: 5539563 - DNA, 25 bp, Homo sapien
cagagtgtggtccaaagaacctgaa

SEQ ID NO: 5539564 - DNA, 25 bp, Homo sapien
tgatcggcctactacgctgggatat

SEQ ID NO: 5539565 - DNA, 25 bp, Homo sapien
ccaaagaacctgaatcctgcaagac

SEQ ID NO: 5539566 - DNA, 25 bp, Homo sapien
ctgctgttttggtgtccagtgggag

SEQ ID NO: 5539567 - DNA, 25 bp, Homo sapien
tattcctacataacaaattgccaca

SEQ ID NO: 5539568 - DNA, 25 bp, Homo sapien
cttatctggagactggagatgaatg

SEQ ID NO: 5539569 - DNA, 25 bp, Homo sapien
atgaatgagcttatgggctgaattc

SEQ ID NO: 5539570 - DNA, 25 bp, Homo sapien
agcaggcttaagtgagttctcggct

SEQ ID NO: 5539571 - DNA, 25 bp, Homo sapien
gtcagaagtccaagcaggcttaagt

SEQ ID NO: 5539572 - DNA, 25 bp, Homo sapien
tgagttctcggcttagggtctcaca

SEQ ID NO: 5539573 - DNA, 25 bp, Homo sapien
ctggattcaaagtgttggccaggct

SEQ ID NO: 5539574 - DNA, 25 bp, Homo sapien
gggctgaattcagttcccgtggctg

SEQ ID NO: 5539575 - DNA, 25 bp, Homo sapien
caagcctatgaatgagcttatgggc

SEQ ID NO: 5539576 - DNA, 25 bp, Homo sapien
gagatgaatgcctttccaagcctat

SEQ ID NO: 5539577 - DNA, 25 bp, Homo sapien
ggtctcacaaggctggattcaaagt

SEQ ID NO: 5539578 - DNA, 25 bp, Homo sapien
atgtatgcagccgttaatgtatttc

SEQ ID NO: 5539579 - DNA, 25 bp, Homo sapien
cacattctcggattcccgcggccgc

SEQ ID NO: 5539580 - DNA, 25 bp, Homo sapien
cgcttgccggttccaacgagttttc

SEQ ID NO: 5539581 - DNA, 25 bp, Homo sapien
atttagtaaagtgagaactggaaac

SEQ ID NO: 5539582 - DNA, 25 bp, Homo sapien
aagtgagaactggaaacagcttaac

SEQ ID NO: 5539583 - DNA, 25 bp, Homo sapien
ggcgagagaaggtcgcattttgcct

SEQ ID NO: 5539584 - DNA, 25 bp, Homo sapien
actcactcgacggaatgtatgcagc

SEQ ID NO: 5539585 - DNA, 25 bp, Homo sapien
cgcattttgcctgccggagctaggg

SEQ ID NO: 5539586 - DNA, 25 bp, Homo sapien
ctttcgcaattcggagtacaaacga

SEQ ID NO: 5539587 - DNA, 25 bp, Homo sapien
acagcttaacgtccagggtaagtta

SEQ ID NO: 5539588 - DNA, 25 bp, Homo sapien
atttccagtgaacatacagtacttt

SEQ ID NO: 5539589 - DNA, 25 bp, Homo sapien
taaagtataaccattacttgtatca

SEQ ID NO: 5539590 - DNA, 25 bp, Homo sapien
tgatacaagtaatggttatacttta

SEQ ID NO: 5539591 - DNA, 25 bp, Homo sapien
gcacatccttgcctggtcgttccac

SEQ ID NO: 5539592 - DNA, 25 bp, Homo sapien
ctcctcctcattagcggtggtcttc

SEQ ID NO: 5539593 - DNA, 25 bp, Homo sapien
gtgtccagagctggcagtgacattg

SEQ ID NO: 5539594 - DNA, 25 bp, Homo sapien
aaccaatacagatgctgacactggg

SEQ ID NO: 5539595 - DNA, 25 bp, Homo sapien
attcagagagcttggcacattacgg

SEQ ID NO: 5539596 - DNA, 25 bp, Homo sapien
agggtagagacgctcctcctcatta

SEQ ID NO: 5539597 - DNA, 25 bp, Homo sapien
gtgacattgtaaatttgatcgcggc

SEQ ID NO: 5539598 - DNA, 25 bp, Homo sapien
ttgatcgcggcttaaattccacctg

SEQ ID NO: 5539599 - DNA, 25 bp, Homo sapien
cttggcacattacggaagacacagg

SEQ ID NO: 5539600 - DNA, 25 bp, Homo sapien
aaagtaagtgtccagagctggcagt

SEQ ID NO: 5539601 - DNA, 25 bp, Homo sapien
tgagacatatggctttttgcagact

SEQ ID NO: 5539602 - DNA, 25 bp, Homo sapien
cggcccgctcacctctcggaatctc

SEQ ID NO: 5539603 - DNA, 25 bp, Homo sapien
gaattcgggccgctctctagtccct

SEQ ID NO: 5539604 - DNA, 25 bp, Homo sapien
gtgacagaattcgggccgctctcta

SEQ ID NO: 5539605 - DNA, 25 bp, Homo sapien
tctagtcccttgtaaaagacctgaa

SEQ ID NO: 5539606 - DNA, 25 bp, Homo sapien
tactggacatgttcctgtcgcggcc

SEQ ID NO: 5539607 - DNA, 25 bp, Homo sapien
cctctcggaatctcgcctgccggga

SEQ ID NO: 5539608 - DNA, 25 bp, Homo sapien
cggcgcgcttgctcgccccttctcc

SEQ ID NO: 5539609 - DNA, 25 bp, Homo sapien
acatgggatggatactggacatgtt

SEQ ID NO: 5539610 - DNA, 25 bp, Homo sapien
agtccttactacccagctgtggtgg

SEQ ID NO: 5539611 - DNA, 25 bp, Homo sapien
aagacctgaaaaaatcggacaccca

SEQ ID NO: 5539612 - DNA, 25 bp, Homo sapien
tctccgtcggcgcagccctcgacgg

SEQ ID NO: 5539613 - DNA, 25 bp, Homo sapien
tggggatatgcgtcctcactccgca

SEQ ID NO: 5539614 - DNA, 25 bp, Homo sapien
gctgcgaggcctgccttgcctcacc

SEQ ID NO: 5539615 - DNA, 25 bp, Homo sapien
gatataaagtttcagctgcgaggcc

SEQ ID NO: 5539616 - DNA, 25 bp, Homo sapien
ttccaggggccacccatctaaggac

SEQ ID NO: 5539617 - DNA, 25 bp, Homo sapien
gtcctcactccgcagccagcagtgg

SEQ ID NO: 5539618 - DNA, 25 bp, Homo sapien
acttaagtgtgcatatgtgtagggg

SEQ ID NO: 5539619 - DNA, 25 bp, Homo sapien
cagggaaaatgctcgacaacaccca

SEQ ID NO: 5539620 - DNA, 25 bp, Homo sapien
tgtcagcatgccccctcattctccc

SEQ ID NO: 5539621 - DNA, 25 bp, Homo sapien
gtatgtacaggtggtccagccacaa

SEQ ID NO: 5539622 - DNA, 25 bp, Homo sapien
ggtggtccagccacaatgagactgt

SEQ ID NO: 5539623 - DNA, 25 bp, Homo sapien
cccatctaaggacagtggggatatg

SEQ ID NO: 5539624 - DNA, 25 bp, Homo sapien
tccatctcagcaaggagagtttacc

SEQ ID NO: 5539625 - DNA, 25 bp, Homo sapien
aaagccaagaataaactaaggacga

SEQ ID NO: 5539626 - DNA, 25 bp, Homo sapien
taggtgaagaagcttgtaagaaaat

SEQ ID NO: 5539627 - DNA, 25 bp, Homo sapien
gcaaggagagtttaccaataaggac

SEQ ID NO: 5539628 - DNA, 25 bp, Homo sapien
ggagaacagaagccgcatacctgta

SEQ ID NO: 5539629 - DNA, 25 bp, Homo sapien
gagggagatgaacactaaaaaactg

SEQ ID NO: 5539630 - DNA, 25 bp, Homo sapien
agttaactgaaaagataggtgaaga

SEQ ID NO: 5539631 - DNA, 25 bp, Homo sapien
aatgtaagggataaaataagctttc

SEQ ID NO: 5539632 - DNA, 25 bp, Homo sapien
atggatgactaaacaaaactaattc

SEQ ID NO: 5539633 - DNA, 25 bp, Homo sapien
tctgcttgagataaaatggatgact

SEQ ID NO: 5539634 - DNA, 25 bp, Homo sapien
tctcagctagaatcagcagagggag

SEQ ID NO: 5539635 - DNA, 25 bp, Homo sapien
agtaacttgcacaagggcacacagc

SEQ ID NO: 5539636 - DNA, 25 bp, Homo sapien
tgtgggggtgcttccatatctcatt

SEQ ID NO: 5539637 - DNA, 25 bp, Homo sapien
gctctgagggtcctcctgctggagc

SEQ ID NO: 5539638 - DNA, 25 bp, Homo sapien
actgctctgcgcttccacgaggctc

SEQ ID NO: 5539639 - DNA, 25 bp, Homo sapien
gttatggaagctgaaacacagagag

SEQ ID NO: 5539640 - DNA, 25 bp, Homo sapien
atccttgttgccgagggctctgagg

SEQ ID NO: 5539641 - DNA, 25 bp, Homo sapien
tccacgaggctccactggacctttc

SEQ ID NO: 5539642 - DNA, 25 bp, Homo sapien
gctctgttgggaaaacgtgctaata

SEQ ID NO: 5539643 - DNA, 25 bp, Homo sapien
tcggcccctagaactccctcctgtc

SEQ ID NO: 5539644 - DNA, 25 bp, Homo sapien
tctcattgaaccccccatgggctct

SEQ ID NO: 5539645 - DNA, 25 bp, Homo sapien
gaaaacgcccaccaacatccagctt

SEQ ID NO: 5539646 - DNA, 25 bp, Homo sapien
tcaagacaaatgtttgaaccattag

SEQ ID NO: 5539647 - DNA, 25 bp, Homo sapien
agcaaccttggttttggtgaattaa

SEQ ID NO: 5539648 - DNA, 25 bp, Homo sapien
atggaatgctagccaatctaaaatt

SEQ ID NO: 5539649 - DNA, 25 bp, Homo sapien
acagcatgccaaacatatcacattg

SEQ ID NO: 5539650 - DNA, 25 bp, Homo sapien
ggcagacttgttgccagttagcaac

SEQ ID NO: 5539651 - DNA, 25 bp, Homo sapien
ccaatgtggtatcaaaaagcctttc

SEQ ID NO: 5539652 - DNA, 25 bp, Homo sapien
gtcttcagctgattaccaatgtggt

SEQ ID NO: 5539653 - DNA, 25 bp, Homo sapien
ttcaaaggaagcataccaatatact

SEQ ID NO: 5539654 - DNA, 25 bp, Homo sapien
tgatttggaaaactactcaagaagt

SEQ ID NO: 5539655 - DNA, 25 bp, Homo sapien
ttgacagataaatggaatgctagcc

SEQ ID NO: 5539656 - DNA, 25 bp, Homo sapien
ctcaagaagtaagctgcatgttggc

SEQ ID NO: 5539657 - DNA, 25 bp, Homo sapien
taaaaaacttgaaatgctcgccaaa

SEQ ID NO: 5539658 - DNA, 25 bp, Homo sapien
ctgttgatctatttgaggtcttttg

SEQ ID NO: 5539659 - DNA, 25 bp, Homo sapien
cccctccatccaggatatggaatcc

SEQ ID NO: 5539660 - DNA, 25 bp, Homo sapien
tatgctttgaaaactccatccctcc

SEQ ID NO: 5539661 - DNA, 25 bp, Homo sapien
tgtccttgaatttgggttttccaca

SEQ ID NO: 5539662 - DNA, 25 bp, Homo sapien
gctcgccaaatgtccccatgggatt

SEQ ID NO: 5539663 - DNA, 25 bp, Homo sapien
cagtgacaatacccattaatgaatc

SEQ ID NO: 5539664 - DNA, 25 bp, Homo sapien
cttattaaatagagcagttcttgcc

SEQ ID NO: 5539665 - DNA, 25 bp, Homo sapien
atttttgaccaaaagtaaggtgata

SEQ ID NO: 5539666 - DNA, 25 bp, Homo sapien
caaaagtaaggtgataactgaagaa

SEQ ID NO: 5539667 - DNA, 25 bp, Homo sapien
ctgtctttagctagccaaattgtcc

SEQ ID NO: 5539668 - DNA, 25 bp, Homo sapien
taattttggtattggcgacgaccgc

SEQ ID NO: 5539669 - DNA, 25 bp, Homo sapien
gttctgtgttataacctagagctac

SEQ ID NO: 5539670 - DNA, 25 bp, Homo sapien
cagggaattcttcagccagagtctc

SEQ ID NO: 5539671 - DNA, 25 bp, Homo sapien
taagagatttacaagaatggagttc

SEQ ID NO: 5539672 - DNA, 25 bp, Homo sapien
tattgactgtggttatcgtgtttcc

SEQ ID NO: 5539673 - DNA, 25 bp, Homo sapien
tctgccaccttgtggttgttctgtg

SEQ ID NO: 5539674 - DNA, 25 bp, Homo sapien
tcaatggaatgtggccttggtcttt

SEQ ID NO: 5539675 - DNA, 25 bp, Homo sapien
aaagaagcaactaagagatttacaa

SEQ ID NO: 5539676 - DNA, 25 bp, Homo sapien
cagagtctctttagccaggtgtggc

SEQ ID NO: 5539677 - DNA, 25 bp, Homo sapien
ttaaaggacgtaagtcacacatatt

SEQ ID NO: 5539678 - DNA, 25 bp, Homo sapien
ggaagatgaaataaagaagcaacta

SEQ ID NO: 5539679 - DNA, 25 bp, Homo sapien
caggtctctgaccacagcactgaat

SEQ ID NO: 5539680 - DNA, 25 bp, Homo sapien
tcatacgatgaggaccagcttcttg

SEQ ID NO: 5539681 - DNA, 25 bp, Homo sapien
gcaaatcttgaaagagatagggaag

SEQ ID NO: 5539682 - DNA, 25 bp, Homo sapien
ctcctgttaggacatatggcttcac

SEQ ID NO: 5539683 - DNA, 25 bp, Homo sapien
ctgagtcattcagagaaggagaatt

SEQ ID NO: 5539684 - DNA, 25 bp, Homo sapien
cagataagtcagagagacagttgga

SEQ ID NO: 5539685 - DNA, 25 bp, Homo sapien
gaaggagaattaatagcactgagtt

SEQ ID NO: 5539686 - DNA, 25 bp, Homo sapien
gatgatggttttgtcgaccagctgc

SEQ ID NO: 5539687 - DNA, 25 bp, Homo sapien
ccccctatagggtaccctgagtcat

SEQ ID NO: 5539688 - DNA, 25 bp, Homo sapien
actgagttggtgatgaagctcctgt

SEQ ID NO: 5539689 - DNA, 25 bp, Homo sapien
gacagttggacgtcttgagcaaatc

SEQ ID NO: 5539690 - DNA, 25 bp, Homo sapien
ccaagtgattcacatgtgggcacat

SEQ ID NO: 5539691 - DNA, 25 bp, Homo sapien
tttcagacagagcagcatctcagag

SEQ ID NO: 5539692 - DNA, 25 bp, Homo sapien
ccgggagacctacatctgctgctct

SEQ ID NO: 5539693 - DNA, 25 bp, Homo sapien
ttgactaatggcccagggaacaatg

SEQ ID NO: 5539694 - DNA, 25 bp, Homo sapien
cacgaggctcacctgtctgcccatc

SEQ ID NO: 5539695 - DNA, 25 bp, Homo sapien
ggagcagcggctaattcacaatttc

SEQ ID NO: 5539696 - DNA, 25 bp, Homo sapien
ccaacacacgattattgggggcgca

SEQ ID NO: 5539697 - DNA, 25 bp, Homo sapien
gggaacaatggagagatacccaaca

SEQ ID NO: 5539698 - DNA, 25 bp, Homo sapien
aggcagttctcgggagtgcttctgc

SEQ ID NO: 5539699 - DNA, 25 bp, Homo sapien
ttcatggaacttgcctgacaccccc

SEQ ID NO: 5539700 - DNA, 25 bp, Homo sapien
agtgcttctgcgtgtgtgatatgcc

SEQ ID NO: 5539701 - DNA, 25 bp, Homo sapien
tagagctcagacttggtaataaaac

SEQ ID NO: 5539702 - DNA, 25 bp, Homo sapien
gcaggtctgagagtccccagtatct

SEQ ID NO: 5539703 - DNA, 25 bp, Homo sapien
tgggtgccttcagacgctcctgcac

SEQ ID NO: 5539704 - DNA, 25 bp, Homo sapien
aaacaacgagcccaccgcctgcttt

SEQ ID NO: 5539705 - DNA, 25 bp, Homo sapien
aggtcagacatggctgtgatgccac

SEQ ID NO: 5539706 - DNA, 25 bp, Homo sapien
tgctcagcagtgtttgtgaataacc

SEQ ID NO: 5539707 - DNA, 25 bp, Homo sapien
ccaggagccaggctcacttgtgacg

SEQ ID NO: 5539708 - DNA, 25 bp, Homo sapien
agtcttggcatgccagtagccggct

SEQ ID NO: 5539709 - DNA, 25 bp, Homo sapien
acagttaaggttatcagagagtcac

SEQ ID NO: 5539710 - DNA, 25 bp, Homo sapien
ttagtgagcttgttgcaaactggct

SEQ ID NO: 5539711 - DNA, 25 bp, Homo sapien
gagccattgatgaaaacaacgagcc

SEQ ID NO: 5539712 - DNA, 25 bp, Homo sapien
ccggacttggtttacgaatacagtg

SEQ ID NO: 5539713 - DNA, 25 bp, Homo sapien
tctggctttagcgcctgtgcctttc

SEQ ID NO: 5539714 - DNA, 25 bp, Homo sapien
gaccagttggacggccttctggctt

SEQ ID NO: 5539715 - DNA, 25 bp, Homo sapien
acagtgtacgaggttaagatatgat

SEQ ID NO: 5539716 - DNA, 25 bp, Homo sapien
ggccatcatgccgtgaccggacttg

SEQ ID NO: 5539717 - DNA, 25 bp, Homo sapien
atggccaccgtgtcctgaactccct

SEQ ID NO: 5539718 - DNA, 25 bp, Homo sapien
atagccacggtggttagtttaacat

SEQ ID NO: 5539719 - DNA, 25 bp, Homo sapien
ttcagtgtggtaagcttggcaccta

SEQ ID NO: 5539720 - DNA, 25 bp, Homo sapien
ggcacctactcatggccaccgtgtc

SEQ ID NO: 5539721 - DNA, 25 bp, Homo sapien
gagtgctctgtgcagcccctccaag

SEQ ID NO: 5539722 - DNA, 25 bp, Homo sapien
cgtcgccaggaaattcagtgtggta

SEQ ID NO: 5539723 - DNA, 25 bp, Homo sapien
aggggagttactacggtagtgcata

SEQ ID NO: 5539724 - DNA, 25 bp, Homo sapien
acggcagtgcccatttaaaagtggc

SEQ ID NO: 5539725 - DNA, 25 bp, Homo sapien
agctaacacaggagtttttgaacac

SEQ ID NO: 5539726 - DNA, 25 bp, Homo sapien
aaaataagctgcataggaacaattt

SEQ ID NO: 5539727 - DNA, 25 bp, Homo sapien
ggcttgcagtgtggtttctgcggcc

SEQ ID NO: 5539728 - DNA, 25 bp, Homo sapien
attgcctgtcatgcctgcggcctgc

SEQ ID NO: 5539729 - DNA, 25 bp, Homo sapien
ctgcggcctgcaatagtaacattta

SEQ ID NO: 5539730 - DNA, 25 bp, Homo sapien
aaagtccaaagagacaccaactttg

SEQ ID NO: 5539731 - DNA, 25 bp, Homo sapien
gaccacagtgatacattcagaagcc

SEQ ID NO: 5539732 - DNA, 25 bp, Homo sapien
gggattcacattaccacggcagtgc

SEQ ID NO: 5539733 - DNA, 25 bp, Homo sapien
gttttaaggctgtagtagctgatac

SEQ ID NO: 5539734 - DNA, 25 bp, Homo sapien
cagtagccacacatggctgggtggc

SEQ ID NO: 5539735 - DNA, 25 bp, Homo sapien
atacctggtgtttcagagtcatgac

SEQ ID NO: 5539736 - DNA, 25 bp, Homo sapien
aaagtccactcttgtaggtgatgtt

SEQ ID NO: 5539737 - DNA, 25 bp, Homo sapien
aagttgttgtcctcttccatgcttc

SEQ ID NO: 5539738 - DNA, 25 bp, Homo sapien
cttgtaggtgatgttaagaatgcaa

SEQ ID NO: 5539739 - DNA, 25 bp, Homo sapien
ttccatgcttcatacctggtgtttc

SEQ ID NO: 5539740 - DNA, 25 bp, Homo sapien
gacacacttggtttggctacatctc

SEQ ID NO: 5539741 - DNA, 25 bp, Homo sapien
ctacatctcagtagccacacatggc

SEQ ID NO: 5539742 - DNA, 25 bp, Homo sapien
tgtggacagcatggacctaaagtcc

SEQ ID NO: 5539743 - DNA, 25 bp, Homo sapien
agagtcatgacacacttggtttggc

SEQ ID NO: 5539744 - DNA, 25 bp, Homo sapien
agccacacatggctgggtggctgct

SEQ ID NO: 5539745 - DNA, 25 bp, Homo sapien
gaaggtgcagatgtagcacaacgat

SEQ ID NO: 5539746 - DNA, 25 bp, Homo sapien
taagttgcctattcacccaggtgac

SEQ ID NO: 5539747 - DNA, 25 bp, Homo sapien
aacgatgagttaagattccgcacgc

SEQ ID NO: 5539748 - DNA, 25 bp, Homo sapien
aatgtgttccggacacctggacgca

SEQ ID NO: 5539749 - DNA, 25 bp, Homo sapien
agaacggactcagctaagtttatta

SEQ ID NO: 5539750 - DNA, 25 bp, Homo sapien
gggtgttcctccagcgcaagttccg

SEQ ID NO: 5539751 - DNA, 25 bp, Homo sapien
agattccgcacgcaggtaacaagga

SEQ ID NO: 5539752 - DNA, 25 bp, Homo sapien
ctctgccagaggtactggaaggttt

SEQ ID NO: 5539753 - DNA, 25 bp, Homo sapien
aacacagggaggcccatctaagttg

SEQ ID NO: 5539754 - DNA, 25 bp, Homo sapien
ctggaaggtttcaaaggcagaaaaa

SEQ ID NO: 5539755 - DNA, 25 bp, Homo sapien
aaggagggtatggtatatctctgcc

SEQ ID NO: 5539756 - DNA, 25 bp, Homo sapien
ctctgcactggtcgtacaggatgag

SEQ ID NO: 5539757 - DNA, 25 bp, Homo sapien
ctccactaggaagcattcgagggga

SEQ ID NO: 5539758 - DNA, 25 bp, Homo sapien
tgctatgaacttaatgcgccacccc

SEQ ID NO: 5539759 - DNA, 25 bp, Homo sapien
ttagcattgaaaggagttaaattgc

SEQ ID NO: 5539760 - DNA, 25 bp, Homo sapien
gaggggcttctctgttagcagctgt

SEQ ID NO: 5539761 - DNA, 25 bp, Homo sapien
atgcgccacccctagtaaaccatta

SEQ ID NO: 5539762 - DNA, 25 bp, Homo sapien
tcgaggggatcgtttctctgcactg

SEQ ID NO: 5539763 - DNA, 25 bp, Homo sapien
aaggcacgatcaacaaaaaatttct

SEQ ID NO: 5539764 - DNA, 25 bp, Homo sapien
tacaggatgaggggcttctctgtta

SEQ ID NO: 5539765 - DNA, 25 bp, Homo sapien
caggcctgtttcccactttgacccg

SEQ ID NO: 5539766 - DNA, 25 bp, Homo sapien
atgaccttagttcaaaggcacgatc

SEQ ID NO: 5539767 - DNA, 25 bp, Homo sapien
ctccgcgaaaatagtttgtttaatg

SEQ ID NO: 5539768 - DNA, 25 bp, Homo sapien
ggtatttgcggcgtcagtctttttc

SEQ ID NO: 5539769 - DNA, 25 bp, Homo sapien
caaaagttggactaaatgcctagtt

SEQ ID NO: 5539770 - DNA, 25 bp, Homo sapien
ggagaggaaagagtcttcaacataa

SEQ ID NO: 5539771 - DNA, 25 bp, Homo sapien
tgtaaaacgctgtcaaaagttggac

SEQ ID NO: 5539772 - DNA, 25 bp, Homo sapien
agaaaaaccactcccagtccccagc

SEQ ID NO: 5539773 - DNA, 25 bp, Homo sapien
cctctggccgcctaggctcagcggc

SEQ ID NO: 5539774 - DNA, 25 bp, Homo sapien
tggcagtttggtatttgcggcgtca

SEQ ID NO: 5539775 - DNA, 25 bp, Homo sapien
ttgtcactgacacaaaggaagtgcc

SEQ ID NO: 5539776 - DNA, 25 bp, Homo sapien
atgtgaacttgtagctgtaaaacgc

SEQ ID NO: 5539777 - DNA, 25 bp, Homo sapien
tttttatgggcattgacaaatctgt

SEQ ID NO: 5539778 - DNA, 25 bp, Homo sapien
gctgagatcctacggaagcagcaga

SEQ ID NO: 5539779 - DNA, 25 bp, Homo sapien
gccacagaaagctggtagctactat

SEQ ID NO: 5539780 - DNA, 25 bp, Homo sapien
cactagaactagaattgcactatcc

SEQ ID NO: 5539781 - DNA, 25 bp, Homo sapien
cactctctggagtgctcaatagcca

SEQ ID NO: 5539782 - DNA, 25 bp, Homo sapien
tcagttcctcagtcacacaagccac

SEQ ID NO: 5539783 - DNA, 25 bp, Homo sapien
cggaagcagcagaactatagttacc

SEQ ID NO: 5539784 - DNA, 25 bp, Homo sapien
ttctgaggctaaatgtaaagaaggg

SEQ ID NO: 5539785 - DNA, 25 bp, Homo sapien
gactaactgggtcatgctgagatcc

SEQ ID NO: 5539786 - DNA, 25 bp, Homo sapien
actgaacagcaccgatatggaacat

SEQ ID NO: 5539787 - DNA, 25 bp, Homo sapien
ttatcacctgctgtgctggcctggg

SEQ ID NO: 5539788 - DNA, 25 bp, Homo sapien
tgagttactagccatatgtgcccgc

SEQ ID NO: 5539789 - DNA, 25 bp, Homo sapien
gctttcccagggtggaaccatcaga

SEQ ID NO: 5539790 - DNA, 25 bp, Homo sapien
agctggacatgtggctacacctcag

SEQ ID NO: 5539791 - DNA, 25 bp, Homo sapien
actgacacattgctggctccagggg

SEQ ID NO: 5539792 - DNA, 25 bp, Homo sapien
tcaggttctttcatagacaagttac

SEQ ID NO: 5539793 - DNA, 25 bp, Homo sapien
actgtcagccgtgctgggtatcttt

SEQ ID NO: 5539794 - DNA, 25 bp, Homo sapien
taatggacaagaacccagaatgaag

SEQ ID NO: 5539795 - DNA, 25 bp, Homo sapien
cagcagcaccatgcgcacccataga

SEQ ID NO: 5539796 - DNA, 25 bp, Homo sapien
ccaggccatggtgggtatttttaat

SEQ ID NO: 5539797 - DNA, 25 bp, Homo sapien
gtcatctggtttggcaggatggaag

SEQ ID NO: 5539798 - DNA, 25 bp, Homo sapien
accatgcgcacccatagaaggggta

SEQ ID NO: 5539799 - DNA, 25 bp, Homo sapien
ccagaatgaagatctacagaggctt

SEQ ID NO: 5539800 - DNA, 25 bp, Homo sapien
gttctgcattctatgggggccctag

SEQ ID NO: 5539801 - DNA, 25 bp, Homo sapien
tgcctcctcgggctcagtcacacag

SEQ ID NO: 5539802 - DNA, 25 bp, Homo sapien
gcagttgcatggacagctttccttg

SEQ ID NO: 5539803 - DNA, 25 bp, Homo sapien
atggacagctttccttgtgagccac

SEQ ID NO: 5539804 - DNA, 25 bp, Homo sapien
caaaggttggaagagacctttagaa

SEQ ID NO: 5539805 - DNA, 25 bp, Homo sapien
cagtgctcactgggattttgctcac

SEQ ID NO: 5539806 - DNA, 25 bp, Homo sapien
gtccctctggacatactgctgcctg

SEQ ID NO: 5539807 - DNA, 25 bp, Homo sapien
cctcccctctcccagagggggcggc

SEQ ID NO: 5539808 - DNA, 25 bp, Homo sapien
gacatactgctgcctggccacaccc

SEQ ID NO: 5539809 - DNA, 25 bp, Homo sapien
aactcaacagagcaaattggccgca

SEQ ID NO: 5539810 - DNA, 25 bp, Homo sapien
tggaagagacctttagaacagctgg

SEQ ID NO: 5539811 - DNA, 25 bp, Homo sapien
gacggatattgaaaggccggtgtct

SEQ ID NO: 5539812 - DNA, 25 bp, Homo sapien
ttcaagggtcacaaactgctcacga

SEQ ID NO: 5539813 - DNA, 25 bp, Homo sapien
aaagaacatgactgaaacacaaggc

SEQ ID NO: 5539814 - DNA, 25 bp, Homo sapien
aggaaagaaaacgaatcagaactac

SEQ ID NO: 5539815 - DNA, 25 bp, Homo sapien
agatacaggaccaggcctggtgtct

SEQ ID NO: 5539816 - DNA, 25 bp, Homo sapien
ggccacagaaaggctgaaagcttgt

SEQ ID NO: 5539817 - DNA, 25 bp, Homo sapien
aaacccagtcctgtgctccggggtc

SEQ ID NO: 5539818 - DNA, 25 bp, Homo sapien
cccacgtagtcctgaaaactgcaac

SEQ ID NO: 5539819 - DNA, 25 bp, Homo sapien
cagtcccggtctcagccctcggggg

SEQ ID NO: 5539820 - DNA, 25 bp, Homo sapien
tccagttgcacaggtcagcgtctta

SEQ ID NO: 5539821 - DNA, 25 bp, Homo sapien
cagaactacaaccctcggtgccagc

SEQ ID NO: 5539822 - DNA, 25 bp, Homo sapien
tacaccccaaggtgagctgtaagac

SEQ ID NO: 5539823 - DNA, 25 bp, Homo sapien
ttgtttaatgagtggttcagccatc

SEQ ID NO: 5539824 - DNA, 25 bp, Homo sapien
gttaaacatggtaagactgaggttc

SEQ ID NO: 5539825 - DNA, 25 bp, Homo sapien
agactggccaattctttgaagacct

SEQ ID NO: 5539826 - DNA, 25 bp, Homo sapien
taaaggcatatcgtacatggcaatg

SEQ ID NO: 5539827 - DNA, 25 bp, Homo sapien
tgaggttctgcaggattaaagtcag

SEQ ID NO: 5539828 - DNA, 25 bp, Homo sapien
ttgcctagcaccacagtggagagtc

SEQ ID NO: 5539829 - DNA, 25 bp, Homo sapien
aaagtcagattaagggtacagaaag

SEQ ID NO: 5539830 - DNA, 25 bp, Homo sapien
acagtggagagtcatctacacccca

SEQ ID NO: 5539831 - DNA, 25 bp, Homo sapien
atatacagtgtaggataaaggcata

SEQ ID NO: 5539832 - DNA, 25 bp, Homo sapien
gggtacagaaagcacaccttgatac

SEQ ID NO: 5539833 - DNA, 25 bp, Homo sapien
tgaagacagccaagcccctctttgg

SEQ ID NO: 5539834 - DNA, 25 bp, Homo sapien
cacctgcaacacagcatgtcatcca

SEQ ID NO: 5539835 - DNA, 25 bp, Homo sapien
agacccctgaccctgtccaccgttc

SEQ ID NO: 5539836 - DNA, 25 bp, Homo sapien
tcatcacaccgaaaaagaccagaga

SEQ ID NO: 5539837 - DNA, 25 bp, Homo sapien
gagtctctgcaaccagagagacccc

SEQ ID NO: 5539838 - DNA, 25 bp, Homo sapien
tctgttgccaaagccaaatgacatt

SEQ ID NO: 5539839 - DNA, 25 bp, Homo sapien
tggtggcatttcccaatcctgagtc

SEQ ID NO: 5539840 - DNA, 25 bp, Homo sapien
cccctctttggcccagacctggtcc

SEQ ID NO: 5539841 - DNA, 25 bp, Homo sapien
catgctcaccttggatgcgaacatc

SEQ ID NO: 5539842 - DNA, 25 bp, Homo sapien
ttccatgctaggcactggaagccaa

SEQ ID NO: 5539843 - DNA, 25 bp, Homo sapien
gcccatacacagccccttcaccccc

SEQ ID NO: 5539844 - DNA, 25 bp, Homo sapien
aagttttcagtagggaggtaacatg

SEQ ID NO: 5539845 - DNA, 25 bp, Homo sapien
aggagaccagttagagaattgttgc

SEQ ID NO: 5539846 - DNA, 25 bp, Homo sapien
ttcccccgaagatgggtcatgggga

SEQ ID NO: 5539847 - DNA, 25 bp, Homo sapien
tgaaagaggaaaagtaagttagtca

SEQ ID NO: 5539848 - DNA, 25 bp, Homo sapien
gatcagaagagatatgaataaagtc

SEQ ID NO: 5539849 - DNA, 25 bp, Homo sapien
ggaggtaacatggtccagtcactct

SEQ ID NO: 5539850 - DNA, 25 bp, Homo sapien
cacaactgcagagtctggaatgctc

SEQ ID NO: 5539851 - DNA, 25 bp, Homo sapien
cttgtggaagttggaaattgatcag

SEQ ID NO: 5539852 - DNA, 25 bp, Homo sapien
gttgcaatggcctagatagtggttc

SEQ ID NO: 5539853 - DNA, 25 bp, Homo sapien
ttgtgaagcagttcctgaaagagga

SEQ ID NO: 5539854 - DNA, 25 bp, Homo sapien
atgaataaagtcaggagaccagtta

SEQ ID NO: 5539855 - DNA, 25 bp, Homo sapien
ctgtctctatcttccagggcagcca

SEQ ID NO: 5539856 - DNA, 25 bp, Homo sapien
gcccaaatgctacaggcagggatca

SEQ ID NO: 5539857 - DNA, 25 bp, Homo sapien
aactctgagtcccacctcctgccag

SEQ ID NO: 5539858 - DNA, 25 bp, Homo sapien
tgttcacacctccaccatctcagcc

SEQ ID NO: 5539859 - DNA, 25 bp, Homo sapien
tggactggaatattctgttcacacc

SEQ ID NO: 5539860 - DNA, 25 bp, Homo sapien
atccctaccacagaggacactggac

SEQ ID NO: 5539861 - DNA, 25 bp, Homo sapien
tccccatccctaccacagaggacac

SEQ ID NO: 5539862 - DNA, 25 bp, Homo sapien
ccacctcagctccgcgaagtgctag

SEQ ID NO: 5539863 - DNA, 25 bp, Homo sapien
ctactgggttctggtgatccacctc

SEQ ID NO: 5539864 - DNA, 25 bp, Homo sapien
aggacactggactggaatattctgt

SEQ ID NO: 5539865 - DNA, 25 bp, Homo sapien
tgaactactgggttctggtgatcca

SEQ ID NO: 5539866 - DNA, 25 bp, Homo sapien
tacaaggcacaaaaagtgtggtatg

SEQ ID NO: 5539867 - DNA, 25 bp, Homo sapien
caaaaagtgtggtatgaagccaagg

SEQ ID NO: 5539868 - DNA, 25 bp, Homo sapien
gaatcacttgaaagaacacccccac

SEQ ID NO: 5539869 - DNA, 25 bp, Homo sapien
tgtcaaattaagtgttcagccctgc

SEQ ID NO: 5539870 - DNA, 25 bp, Homo sapien
ggcttgctcagtccttcagcttcat

SEQ ID NO: 5539871 - DNA, 25 bp, Homo sapien
agtccatccaagtttactgtacaac

SEQ ID NO: 5539872 - DNA, 25 bp, Homo sapien
agccaaggctatgcttcattcaacc

SEQ ID NO: 5539873 - DNA, 25 bp, Homo sapien
tgcaaactcgacataaaacatccaa

SEQ ID NO: 5539874 - DNA, 25 bp, Homo sapien
atgggaggtacgcaagtacttcata

SEQ ID NO: 5539875 - DNA, 25 bp, Homo sapien
tacattgataatacaaggcacaaaa

SEQ ID NO: 5539876 - DNA, 25 bp, Homo sapien
acaatataacagagctgtttggcat

SEQ ID NO: 5539877 - DNA, 25 bp, Homo sapien
tcggctgttcactggctgtgtgttc

SEQ ID NO: 5539878 - DNA, 25 bp, Homo sapien
ccaggcagccactgcttgcagctca

SEQ ID NO: 5539879 - DNA, 25 bp, Homo sapien
agtcactgtccaagctcggctgttc

SEQ ID NO: 5539880 - DNA, 25 bp, Homo sapien
gtcagaagcttggagtcactgtcca

SEQ ID NO: 5539881 - DNA, 25 bp, Homo sapien
taaatgagttaagatctgaaaaatg

SEQ ID NO: 5539882 - DNA, 25 bp, Homo sapien
aatagcatccatcttacagggttat

SEQ ID NO: 5539883 - DNA, 25 bp, Homo sapien
cttctaggtcgtggtttgtagcaca

SEQ ID NO: 5539884 - DNA, 25 bp, Homo sapien
ctaaactcagtctcacagctccctt

SEQ ID NO: 5539885 - DNA, 25 bp, Homo sapien
cagctcatggaacattcactgcctc

SEQ ID NO: 5539886 - DNA, 25 bp, Homo sapien
gctgcctccacaggacagtgttgtg

SEQ ID NO: 5539887 - DNA, 25 bp, Homo sapien
tacccagcatattgacccccagcct

SEQ ID NO: 5539888 - DNA, 25 bp, Homo sapien
aatgtgaaaacttgggttcaaggaa

SEQ ID NO: 5539889 - DNA, 25 bp, Homo sapien
gcagagaaaagctttcctaatcatc

SEQ ID NO: 5539890 - DNA, 25 bp, Homo sapien
ttaacatttggctgtgcaacccttt

SEQ ID NO: 5539891 - DNA, 25 bp, Homo sapien
aaaataacgtcacttcttcagcttt

SEQ ID NO: 5539892 - DNA, 25 bp, Homo sapien
agcactaagctgttcataatgtacc

SEQ ID NO: 5539893 - DNA, 25 bp, Homo sapien
gaaaattctgtttgagccagtggtt

SEQ ID NO: 5539894 - DNA, 25 bp, Homo sapien
ataaattactcaacagcactaagct

SEQ ID NO: 5539895 - DNA, 25 bp, Homo sapien
aagaataaagactgagaattatagg

SEQ ID NO: 5539896 - DNA, 25 bp, Homo sapien
tgttcataatgtaccaggctgagaa

SEQ ID NO: 5539897 - DNA, 25 bp, Homo sapien
aaaagttatgcaaatctctaatgtg

SEQ ID NO: 5539898 - DNA, 25 bp, Homo sapien
agactgagaattataggtaagaggg

SEQ ID NO: 5539899 - DNA, 25 bp, Homo sapien
tatctaaggaacttggtcccacgcc

SEQ ID NO: 5539900 - DNA, 25 bp, Homo sapien
gagcacaagaacagaagttgcatgg

SEQ ID NO: 5539901 - DNA, 25 bp, Homo sapien
ctcgaatgccctctgcggcgaagat

SEQ ID NO: 5539902 - DNA, 25 bp, Homo sapien
agcgccacctggatgaatcacttcc

SEQ ID NO: 5539903 - DNA, 25 bp, Homo sapien
gaatttgaaaacagcaggagcacaa

SEQ ID NO: 5539904 - DNA, 25 bp, Homo sapien
cgaagatccctcctagcgccacctg

SEQ ID NO: 5539905 - DNA, 25 bp, Homo sapien
cagagcagttcactctagggtgtcc

SEQ ID NO: 5539906 - DNA, 25 bp, Homo sapien
ccgtccagacccttaccatggggcc

SEQ ID NO: 5539907 - DNA, 25 bp, Homo sapien
gttgcatggatgtctagagttgtca

SEQ ID NO: 5539908 - DNA, 25 bp, Homo sapien
aggtagcaagcaagtagcaactttg

SEQ ID NO: 5539909 - DNA, 25 bp, Homo sapien
gcaaccaaacacaaccaggggtagc

SEQ ID NO: 5539910 - DNA, 25 bp, Homo sapien
gctggccgcaggaatctttcccctt

SEQ ID NO: 5539911 - DNA, 25 bp, Homo sapien
gcccacatcgcccagatgaggaagg

SEQ ID NO: 5539912 - DNA, 25 bp, Homo sapien
catgatacagctctagggcgaattc

SEQ ID NO: 5539913 - DNA, 25 bp, Homo sapien
ctcgggccaagtttgcttttgttgc

SEQ ID NO: 5539914 - DNA, 25 bp, Homo sapien
ccattttcgcggtgaacgacctcgg

SEQ ID NO: 5539915 - DNA, 25 bp, Homo sapien
cccctgtcgtcgcctctgcggtcgg

SEQ ID NO: 5539916 - DNA, 25 bp, Homo sapien
gggcactttccccaaagcgctggcc

SEQ ID NO: 5539917 - DNA, 25 bp, Homo sapien
tgaaagaaaatacatgatacagctc

SEQ ID NO: 5539918 - DNA, 25 bp, Homo sapien
aatcggggaagaagtttctctaatc

SEQ ID NO: 5539919 - DNA, 25 bp, Homo sapien
gggcagctccaagtcatgagtgtgc

SEQ ID NO: 5539920 - DNA, 25 bp, Homo sapien
tgggctcaaaccgtacagaagtcat

SEQ ID NO: 5539921 - DNA, 25 bp, Homo sapien
tctacagtgtcattatggttcatct

SEQ ID NO: 5539922 - DNA, 25 bp, Homo sapien
aagctaaagggatagtaagaaatgt

SEQ ID NO: 5539923 - DNA, 25 bp, Homo sapien
agactcttgttaaggatggagacta

SEQ ID NO: 5539924 - DNA, 25 bp, Homo sapien
ccatccagagagtataaaaagattt

SEQ ID NO: 5539925 - DNA, 25 bp, Homo sapien
gccatcaaacaaaaacctaagtcac

SEQ ID NO: 5539926 - DNA, 25 bp, Homo sapien
tcacattacatacttcaacagaacc

SEQ ID NO: 5539927 - DNA, 25 bp, Homo sapien
gatgtgtgtcactttgtaatggatg

SEQ ID NO: 5539928 - DNA, 25 bp, Homo sapien
tgtaatggatgttgtatctggcttt

SEQ ID NO: 5539929 - DNA, 25 bp, Homo sapien
tatcatgtttaaaaaggccttctcc

SEQ ID NO: 5539930 - DNA, 25 bp, Homo sapien
aaacagccatccaaagatgtgtgtc

SEQ ID NO: 5539931 - DNA, 25 bp, Homo sapien
aggataagctaaagggatagtaaga

SEQ ID NO: 5539932 - DNA, 25 bp, Homo sapien
gggctgaagttctcgaaaggccaag

SEQ ID NO: 5539933 - DNA, 25 bp, Homo sapien
tgaagttctcgaaaggccaagaaga

SEQ ID NO: 5539934 - DNA, 25 bp, Homo sapien
agggcacaggatcgactttttcgcc

SEQ ID NO: 5539935 - DNA, 25 bp, Homo sapien
ccagacaggagaaaatattgtgaga

SEQ ID NO: 5539936 - DNA, 25 bp, Homo sapien
tgggtttcagatacaggagaccaga

SEQ ID NO: 5539937 - DNA, 25 bp, Homo sapien
gactcacccaggctgtgtgtgtcct

SEQ ID NO: 5539938 - DNA, 25 bp, Homo sapien
tgcctgtgctcagggcacaggatcg

SEQ ID NO: 5539939 - DNA, 25 bp, Homo sapien
gctcgcacctcaggactgcctgtgc

SEQ ID NO: 5539940 - DNA, 25 bp, Homo sapien
cagtcactgtaggttaatttgcatc

SEQ ID NO: 5539941 - DNA, 25 bp, Homo sapien
acaggagaaaatattgtgagatggg

SEQ ID NO: 5539942 - DNA, 25 bp, Homo sapien
ggagatcccgtagcagtgggtttca

SEQ ID NO: 5539943 - DNA, 25 bp, Homo sapien
tttgcttgttaatactgctcccctc

SEQ ID NO: 5539944 - DNA, 25 bp, Homo sapien
taggatctataattgtaactgtgga

SEQ ID NO: 5539945 - DNA, 25 bp, Homo sapien
ttttggttccagactggccagctta

SEQ ID NO: 5539946 - DNA, 25 bp, Homo sapien
tgttgtgcatttggtgacatgtatt

SEQ ID NO: 5539947 - DNA, 25 bp, Homo sapien
ggtgacatgtatttgcaagattagg

SEQ ID NO: 5539948 - DNA, 25 bp, Homo sapien
tggccagcttatattgaaacaaaac

SEQ ID NO: 5539949 - DNA, 25 bp, Homo sapien
aactgtggaaatcatagaaggcatt

SEQ ID NO: 5539950 - DNA, 25 bp, Homo sapien
tgaaacaaaacacctcgaccccaga

SEQ ID NO: 5539951 - DNA, 25 bp, Homo sapien
gaccccagacaataattccaggcat

SEQ ID NO: 5539952 - DNA, 25 bp, Homo sapien
tccctgcaagaagattatacaagtt

SEQ ID NO: 5539953 - DNA, 25 bp, Homo sapien
ttgttctcagaagtgatagaaagga

SEQ ID NO: 5539954 - DNA, 25 bp, Homo sapien
cttccacataagtaaggccatatgc

SEQ ID NO: 5539955 - DNA, 25 bp, Homo sapien
cccatgaacacaatagtttccagtc

SEQ ID NO: 5539956 - DNA, 25 bp, Homo sapien
cttccgcatcagataagaccaagtt

SEQ ID NO: 5539957 - DNA, 25 bp, Homo sapien
caagaacaggctgaaaactgccatg

SEQ ID NO: 5539958 - DNA, 25 bp, Homo sapien
tctaggcccgattttcccctgaatc

SEQ ID NO: 5539959 - DNA, 25 bp, Homo sapien
ttcccatcataactagtcaacccag

SEQ ID NO: 5539960 - DNA, 25 bp, Homo sapien
gtcaacccagtgtaaattctaggcc

SEQ ID NO: 5539961 - DNA, 25 bp, Homo sapien
aaaaagaaagactgatattattcca

SEQ ID NO: 5539962 - DNA, 25 bp, Homo sapien
gccatatgcaaacaagaaagagaac

SEQ ID NO: 5539963 - DNA, 25 bp, Homo sapien
gaaagagaacacccaaaattgcagt

SEQ ID NO: 5539964 - DNA, 25 bp, Homo sapien
ttctctagggaacatatttaacact

SEQ ID NO: 5539965 - DNA, 25 bp, Homo sapien
tgttggacaatttctgggaatcagt

SEQ ID NO: 5539966 - DNA, 25 bp, Homo sapien
tgaaaaagtctttgcaatactggtt

SEQ ID NO: 5539967 - DNA, 25 bp, Homo sapien
tagcagcagctatgtgataaacaaa

SEQ ID NO: 5539968 - DNA, 25 bp, Homo sapien
catgcctagaaaccaagcagcctgg

SEQ ID NO: 5539969 - DNA, 25 bp, Homo sapien
caaaccagagtgtacattttagcta

SEQ ID NO: 5539970 - DNA, 25 bp, Homo sapien
agctgggtctcgacttggcaaaatt

SEQ ID NO: 5539971 - DNA, 25 bp, Homo sapien
ttgaaatgtcacacaagccagaaat

SEQ ID NO: 5539972 - DNA, 25 bp, Homo sapien
agaaatgtcagcacaaaccagagtg

SEQ ID NO: 5539973 - DNA, 25 bp, Homo sapien
gtgtttatttagccatgaaaaagtc

SEQ ID NO: 5539974 - DNA, 25 bp, Homo sapien
gcaatactggtttaggtgagaggtt

SEQ ID NO: 5539975 - DNA, 25 bp, Homo sapien
aaaaacacatgcctagaaaccaagc

SEQ ID NO: 5539976 - DNA, 25 bp, Homo sapien
gaaagcaaacttcagacttcatgat

SEQ ID NO: 5539977 - DNA, 25 bp, Homo sapien
gaaaggacttgctttacaggtggtc

SEQ ID NO: 5539978 - DNA, 25 bp, Homo sapien
tataaagcaatgaaccaaaacaact

SEQ ID NO: 5539979 - DNA, 25 bp, Homo sapien
aaaaaagaacaggtttggcattcaa

SEQ ID NO: 5539980 - DNA, 25 bp, Homo sapien
cataatgtgaatatagcagttgctc

SEQ ID NO: 5539981 - DNA, 25 bp, Homo sapien
tgtaacatggtttgggatgtgcagt

SEQ ID NO: 5539982 - DNA, 25 bp, Homo sapien
tttaaaaaacaagtgagtagaatca

SEQ ID NO: 5539983 - DNA, 25 bp, Homo sapien
gcttgaaagaatattggacacagta

SEQ ID NO: 5539984 - DNA, 25 bp, Homo sapien
gatgtgcagtgaaacttgaaaggac

SEQ ID NO: 5539985 - DNA, 25 bp, Homo sapien
aagtgagtagaatcagagtaaatat

SEQ ID NO: 5539986 - DNA, 25 bp, Homo sapien
tacaggtggtccctcttctggctgg

SEQ ID NO: 5539987 - DNA, 25 bp, Homo sapien
tcaactaatcatgcaggaagtggcg

SEQ ID NO: 5539988 - DNA, 25 bp, Homo sapien
ggggtacataatgaaggatgctgta

SEQ ID NO: 5539989 - DNA, 25 bp, Homo sapien
tgctgtacctgaaaggaaaagggca

SEQ ID NO: 5539990 - DNA, 25 bp, Homo sapien
tgaaggtgaaccctgggtcatcctc

SEQ ID NO: 5539991 - DNA, 25 bp, Homo sapien
aaatcctcgaggaacaaggtgtatt

SEQ ID NO: 5539992 - DNA, 25 bp, Homo sapien
gggcagccaataggcccttgagcgc

SEQ ID NO: 5539993 - DNA, 25 bp, Homo sapien
ccggatacattgtaccctgggggta

SEQ ID NO: 5539994 - DNA, 25 bp, Homo sapien
cctgtggaaacagtgtcaggatgtg

SEQ ID NO: 5539995 - DNA, 25 bp, Homo sapien
tcctcgctgtattcaggcggcgctg

SEQ ID NO: 5539996 - DNA, 25 bp, Homo sapien
gcgctgcaaaggcttctgggcagcc

SEQ ID NO: 5539997 - DNA, 25 bp, Homo sapien
ggcgcggacctatgtgcgtccctta

SEQ ID NO: 5539998 - DNA, 25 bp, Homo sapien
aaaatggtgatggatgtaacaagtt

SEQ ID NO: 5539999 - DNA, 25 bp, Homo sapien
gatgtaacaagttgcatgtctgggc

SEQ ID NO: 5540000 - DNA, 25 bp, Homo sapien
ccggtgagtccaacctcaggaactg

SEQ ID NO: 5540001 - DNA, 25 bp, Homo sapien
ggtgatggatgtaacaagttgcatg

SEQ ID NO: 5540002 - DNA, 25 bp, Homo sapien
gtaacaagttgcatgtctgggcttt

SEQ ID NO: 5540003 - DNA, 25 bp, Homo sapien
ttcaaaaatggtgatggatgtaaca

SEQ ID NO: 5540004 - DNA, 25 bp, Homo sapien
ttcagtgtattaattgtgcgatctt

SEQ ID NO: 5540005 - DNA, 25 bp, Homo sapien
aagaatacaatggctaattaaatcc

SEQ ID NO: 5540006 - DNA, 25 bp, Homo sapien
gtgcgatcttttaaaatagctgtat

SEQ ID NO: 5540007 - DNA, 25 bp, Homo sapien
gagtccaacctcaggaactgtcctt

SEQ ID NO: 5540008 - DNA, 25 bp, Homo sapien
atgtctgggctttatttcagtgtat

SEQ ID NO: 5540009 - DNA, 25 bp, Homo sapien
accggacaccgaggtttcacctcca

SEQ ID NO: 5540010 - DNA, 25 bp, Homo sapien
ccatgaagagcctcaatggagatgc

SEQ ID NO: 5540011 - DNA, 25 bp, Homo sapien
agccagccacctctaagtcgccgct

SEQ ID NO: 5540012 - DNA, 25 bp, Homo sapien
taccccaaaccaggcctgctcatcc

SEQ ID NO: 5540013 - DNA, 25 bp, Homo sapien
ggcccattctcctgtagggacgccc

SEQ ID NO: 5540014 - DNA, 25 bp, Homo sapien
cccaccagcactggtttggagcaac

SEQ ID NO: 5540015 - DNA, 25 bp, Homo sapien
gccacctctaagtcgccgctgggac

SEQ ID NO: 5540016 - DNA, 25 bp, Homo sapien
gggtccagaaaactgaatcccacca

SEQ ID NO: 5540017 - DNA, 25 bp, Homo sapien
ccgcccgcctccattccttgacttc

SEQ ID NO: 5540018 - DNA, 25 bp, Homo sapien
aagagcctcaatggagatgccacat

SEQ ID NO: 5540019 - DNA, 25 bp, Homo sapien
agggattccatgaagagcctcaatg

SEQ ID NO: 5540020 - DNA, 25 bp, Homo sapien
accttatgaagaatgagcagatgga

SEQ ID NO: 5540021 - DNA, 25 bp, Homo sapien
aacatggaagaaatcggaaaataga

SEQ ID NO: 5540022 - DNA, 25 bp, Homo sapien
caaacacagatgcatgggattagga

SEQ ID NO: 5540023 - DNA, 25 bp, Homo sapien
ggtttggggcattccctggaatcca

SEQ ID NO: 5540024 - DNA, 25 bp, Homo sapien
gcagatgacctgtgagccaacctta

SEQ ID NO: 5540025 - DNA, 25 bp, Homo sapien
tcaaggtacctgaagcatcagtttc

SEQ ID NO: 5540026 - DNA, 25 bp, Homo sapien
caggacccctaacagccccattgac

SEQ ID NO: 5540027 - DNA, 25 bp, Homo sapien
gaagacggagaagatgaccttctca

SEQ ID NO: 5540028 - DNA, 25 bp, Homo sapien
caagggggaagtgatgtcttcttaa

SEQ ID NO: 5540029 - DNA, 25 bp, Homo sapien
tccaggacagccactgcctaagcat

SEQ ID NO: 5540030 - DNA, 25 bp, Homo sapien
ggaaaaggaaagctcaaatgagatg

SEQ ID NO: 5540031 - DNA, 25 bp, Homo sapien
agtaggacacctccgatggagcttt

SEQ ID NO: 5540032 - DNA, 25 bp, Homo sapien
cataggctgcctatgatgaaggacc

SEQ ID NO: 5540033 - DNA, 25 bp, Homo sapien
tctgatgcctccagtaggacacctc

SEQ ID NO: 5540034 - DNA, 25 bp, Homo sapien
catgaaatcgtgaaataagacaaga

SEQ ID NO: 5540035 - DNA, 25 bp, Homo sapien
gaatagtgtttcagctgtaggccat

SEQ ID NO: 5540036 - DNA, 25 bp, Homo sapien
ttgacctgaagtactaagctaattg

SEQ ID NO: 5540037 - DNA, 25 bp, Homo sapien
cactggaagaccaaacaaggttttc

SEQ ID NO: 5540038 - DNA, 25 bp, Homo sapien
taagatgcatctcgcataggctgcc

SEQ ID NO: 5540039 - DNA, 25 bp, Homo sapien
agagtgctgagtttaaaagttgacc

SEQ ID NO: 5540040 - DNA, 25 bp, Homo sapien
gaaggaccgtgcacctccactccaa

SEQ ID NO: 5540041 - DNA, 25 bp, Homo sapien
ttgatttctgagcagcgaaagctcc

SEQ ID NO: 5540042 - DNA, 25 bp, Homo sapien
cctgcgaaagtgccttctaggtgct

SEQ ID NO: 5540043 - DNA, 25 bp, Homo sapien
accaggcgctctaccgccaacgctg

SEQ ID NO: 5540044 - DNA, 25 bp, Homo sapien
caacagcgctctcaatcccttcgtc

SEQ ID NO: 5540045 - DNA, 25 bp, Homo sapien
cagggtctgtccagatcacaagggg

SEQ ID NO: 5540046 - DNA, 25 bp, Homo sapien
gccaacgctggccccaccctcatta

SEQ ID NO: 5540047 - DNA, 25 bp, Homo sapien
tctgtcgctaaggcgcaacctccag

SEQ ID NO: 5540048 - DNA, 25 bp, Homo sapien
gcgatggccaacagcgctctcaatc

SEQ ID NO: 5540049 - DNA, 25 bp, Homo sapien
tcattatcaccatgctcggcgggaa

SEQ ID NO: 5540050 - DNA, 25 bp, Homo sapien
tgccttctaggtgcttggtggtcag

SEQ ID NO: 5540051 - DNA, 25 bp, Homo sapien
tcagagacgggtcatctgtcgctaa

SEQ ID NO: 5540052 - DNA, 25 bp, Homo sapien
ctgccttgctcctgcgaaagtgcct

SEQ ID NO: 5540053 - DNA, 25 bp, Homo sapien
gttcctggagctgtcggtattctcg

SEQ ID NO: 5540054 - DNA, 25 bp, Homo sapien
ttgttggttaaccttaccacatatc

SEQ ID NO: 5540055 - DNA, 25 bp, Homo sapien
aggggttctggtgcaacttgttcct

SEQ ID NO: 5540056 - DNA, 25 bp, Homo sapien
cttaggtttatccacgtttctcgtg

SEQ ID NO: 5540057 - DNA, 25 bp, Homo sapien
ctgtcggtattctcggagtagcatc

SEQ ID NO: 5540058 - DNA, 25 bp, Homo sapien
tggagctgtcggtattctcggagta

SEQ ID NO: 5540059 - DNA, 25 bp, Homo sapien
aggctgcttcaccacagtcaaagga

SEQ ID NO: 5540060 - DNA, 25 bp, Homo sapien
acgtttctcgtgacctcccccatgc

SEQ ID NO: 5540061 - DNA, 25 bp, Homo sapien
tgcttcaccacagtcaaaggaggca

SEQ ID NO: 5540062 - DNA, 25 bp, Homo sapien
acatatcatctcgtgaccaggttac

SEQ ID NO: 5540063 - DNA, 25 bp, Homo sapien
ctcgtgaccaggttacaatatagga

SEQ ID NO: 5540064 - DNA, 25 bp, Homo sapien
gctgcactccgcagctcgcaggtct

SEQ ID NO: 5540065 - DNA, 25 bp, Homo sapien
tctccagctgcactccgcagctcgc

SEQ ID NO: 5540066 - DNA, 25 bp, Homo sapien
agcgctgttccgactccgggagtta

SEQ ID NO: 5540067 - DNA, 25 bp, Homo sapien
gcaggtctccagggcataactttca

SEQ ID NO: 5540068 - DNA, 25 bp, Homo sapien
gcagtttcaaaccatcggcagagct

SEQ ID NO: 5540069 - DNA, 25 bp, Homo sapien
ttcaaaccatcggcagagctgattg

SEQ ID NO: 5540070 - DNA, 25 bp, Homo sapien
cagagctgattgggttgaatttgaa

SEQ ID NO: 5540071 - DNA, 25 bp, Homo sapien
actccgggagttattctggaggcct

SEQ ID NO: 5540072 - DNA, 25 bp, Homo sapien
gcccagcgctgttccgactccggga

SEQ ID NO: 5540073 - DNA, 25 bp, Homo sapien
attgggttgaatttgaagccaggag

SEQ ID NO: 5540074 - DNA, 25 bp, Homo sapien
gcataactttcagacttcggggcgg

SEQ ID NO: 5540075 - DNA, 25 bp, Homo sapien
acccttaactcttagacagcggctc

SEQ ID NO: 5540076 - DNA, 25 bp, Homo sapien
gaggggtctttcttggtgtgtaaca

SEQ ID NO: 5540077 - DNA, 25 bp, Homo sapien
tggtgtgtaacatactcattgattc

SEQ ID NO: 5540078 - DNA, 25 bp, Homo sapien
tgggatccacatgagcacagacatg

SEQ ID NO: 5540079 - DNA, 25 bp, Homo sapien
atccacatgagcacagacatggtcc

SEQ ID NO: 5540080 - DNA, 25 bp, Homo sapien
cacctgacctttgactccatgtatt

SEQ ID NO: 5540081 - DNA, 25 bp, Homo sapien
gcctcgattctgggaggttctggga

SEQ ID NO: 5540082 - DNA, 25 bp, Homo sapien
ggtgagtgcagaacctctgccgtga

SEQ ID NO: 5540083 - DNA, 25 bp, Homo sapien
gaacctctgccgtgagcctcgattc

SEQ ID NO: 5540084 - DNA, 25 bp, Homo sapien
aggcacctgcgtttgcattttcatc

SEQ ID NO: 5540085 - DNA, 25 bp, Homo sapien
acagcggctctcattaagcaaaagg

SEQ ID NO: 5540086 - DNA, 25 bp, Homo sapien
ttgcttgcttcagggctaggcttac

SEQ ID NO: 5540087 - DNA, 25 bp, Homo sapien
gaacaagacagacgttaaaagagga

SEQ ID NO: 5540088 - DNA, 25 bp, Homo sapien
aaagaggaaatgattgactatatag

SEQ ID NO: 5540089 - DNA, 25 bp, Homo sapien
tggcttgtctgacagctgcatgtct

SEQ ID NO: 5540090 - DNA, 25 bp, Homo sapien
tagccttggcctttactcagtagtc

SEQ ID NO: 5540091 - DNA, 25 bp, Homo sapien
tttactcagtagtcaaggaaatggc

SEQ ID NO: 5540092 - DNA, 25 bp, Homo sapien
atctggaagctcagtctctctaacc

SEQ ID NO: 5540093 - DNA, 25 bp, Homo sapien
taaaaagagaacaagacagacgtta

SEQ ID NO: 5540094 - DNA, 25 bp, Homo sapien
atacatatgtggtgggtaaaaagag

SEQ ID NO: 5540095 - DNA, 25 bp, Homo sapien
tctgctaagaaattgatgttaatcc

SEQ ID NO: 5540096 - DNA, 25 bp, Homo sapien
gtcaaggaaatggctatgcaatctg

SEQ ID NO: 5540097 - DNA, 25 bp, Homo sapien
tattaactggaagttcacaggcttc

SEQ ID NO: 5540098 - DNA, 25 bp, Homo sapien
tgagagtaaacaatgaccgtcccag

SEQ ID NO: 5540099 - DNA, 25 bp, Homo sapien
cattgcagcaaacttagaaaatgca

SEQ ID NO: 5540100 - DNA, 25 bp, Homo sapien
taagtggtctattaactggaagttc

SEQ ID NO: 5540101 - DNA, 25 bp, Homo sapien
cacacctgttagattctcagcctcc

SEQ ID NO: 5540102 - DNA, 25 bp, Homo sapien
ttcagtagcagaattggtcacacct

SEQ ID NO: 5540103 - DNA, 25 bp, Homo sapien
tataacgtgtgaagcgttcccccaa

SEQ ID NO: 5540104 - DNA, 25 bp, Homo sapien
aaggcaaacacatactattgagagt

SEQ ID NO: 5540105 - DNA, 25 bp, Homo sapien
acactaactgctagctaccctacac

SEQ ID NO: 5540106 - DNA, 25 bp, Homo sapien
accctacacagctgttgtttctcgc

SEQ ID NO: 5540107 - DNA, 25 bp, Homo sapien
aaacaatgaccgtcccaggctttcc

SEQ ID NO: 5540108 - DNA, 25 bp, Homo sapien
acattctatgagccaggagaagaga

SEQ ID NO: 5540109 - DNA, 25 bp, Homo sapien
ggaatcttagaaaatggagccgtac

SEQ ID NO: 5540110 - DNA, 25 bp, Homo sapien
aatggagccgtacgctatacgactt

SEQ ID NO: 5540111 - DNA, 25 bp, Homo sapien
ctgggttttatctgaatggcgctga

SEQ ID NO: 5540112 - DNA, 25 bp, Homo sapien
cctctatcgggacacagcagttttt

SEQ ID NO: 5540113 - DNA, 25 bp, Homo sapien
attctgccaagtgcactgaggaagg

SEQ ID NO: 5540114 - DNA, 25 bp, Homo sapien
atgttgctattgcaggacggacctg

SEQ ID NO: 5540115 - DNA, 25 bp, Homo sapien
ccctctcacaggactgtggcccatc

SEQ ID NO: 5540116 - DNA, 25 bp, Homo sapien
tgcacgacacatggaaattggacta

SEQ ID NO: 5540117 - DNA, 25 bp, Homo sapien
acgtattcctgcaagccgggctatg

SEQ ID NO: 5540118 - DNA, 25 bp, Homo sapien
gagggatgagaaagtttatctgccc

SEQ ID NO: 5540119 - DNA, 25 bp, Homo sapien
tgaaagccatagatgtccaaacaca

SEQ ID NO: 5540120 - DNA, 25 bp, Homo sapien
aaatgatatgaatgcagagaaagga

SEQ ID NO: 5540121 - DNA, 25 bp, Homo sapien
ttcaactcaaaactgctagcaattt

SEQ ID NO: 5540122 - DNA, 25 bp, Homo sapien
ttgtaagtatatgggtctgaaaggg

SEQ ID NO: 5540123 - DNA, 25 bp, Homo sapien
actgaatcatgacaacccaatggtc

SEQ ID NO: 5540124 - DNA, 25 bp, Homo sapien
gtctgaaagggccattataaatgtt

SEQ ID NO: 5540125 - DNA, 25 bp, Homo sapien
tctgctgagtttttgttacggtacc

SEQ ID NO: 5540126 - DNA, 25 bp, Homo sapien
catatgtaggtagttatacaatgtc

SEQ ID NO: 5540127 - DNA, 25 bp, Homo sapien
agagaaaggatgaatcaaaaccact

SEQ ID NO: 5540128 - DNA, 25 bp, Homo sapien
aaatggcattcaaaaatggtccctc

SEQ ID NO: 5540129 - DNA, 25 bp, Homo sapien
gatgtcaactctgaaaatggcattc

SEQ ID NO: 5540130 - DNA, 25 bp, Homo sapien
tgacttcgaagttaggacagcatgg

SEQ ID NO: 5540131 - DNA, 25 bp, Homo sapien
ggcaagagctacatgaaaaataggc

SEQ ID NO: 5540132 - DNA, 25 bp, Homo sapien
actacttcaaaccacatcagggctt

SEQ ID NO: 5540133 - DNA, 25 bp, Homo sapien
caccagtttaccgcatgggttggag

SEQ ID NO: 5540134 - DNA, 25 bp, Homo sapien
catgaaaaataggctcacaggcagc

SEQ ID NO: 5540135 - DNA, 25 bp, Homo sapien
gccttgggcaccaccagtttaccgc

SEQ ID NO: 5540136 - DNA, 25 bp, Homo sapien
acaatgtctatgagaacatggactt

SEQ ID NO: 5540137 - DNA, 25 bp, Homo sapien
gagtagctatgacaatgaggagttt

SEQ ID NO: 5540138 - DNA, 25 bp, Homo sapien
caatgaggagttttaagagtgagaa

SEQ ID NO: 5540139 - DNA, 25 bp, Homo sapien
taggctttcgtggacttctggaagt

SEQ ID NO: 5540140 - DNA, 25 bp, Homo sapien
catcagggcttttggcaagagctac

SEQ ID NO: 5540141 - DNA, 25 bp, Homo sapien
ggcagcaccagaactggtcggtgat

SEQ ID NO: 5540142 - DNA, 25 bp, Homo sapien
ctcgacagcacgacactgccttcat

SEQ ID NO: 5540143 - DNA, 25 bp, Homo sapien
aggtagtttcctgttgttgggatcc

SEQ ID NO: 5540144 - DNA, 25 bp, Homo sapien
tcagttgaaatcgtctccaggtacc

SEQ ID NO: 5540145 - DNA, 25 bp, Homo sapien
gcatcacggccctggtcgtgccagg

SEQ ID NO: 5540146 - DNA, 25 bp, Homo sapien
tcgtctccaggtacctctgcgcgcg

SEQ ID NO: 5540147 - DNA, 25 bp, Homo sapien
tgttgggatccacctttctctcgac

SEQ ID NO: 5540148 - DNA, 25 bp, Homo sapien
tttctctcgacagcacgacactgcc

SEQ ID NO: 5540149 - DNA, 25 bp, Homo sapien
actggtcggtgatttaggtagtttc

SEQ ID NO: 5540150 - DNA, 25 bp, Homo sapien
tcggctttccctgctcaggagcctc

SEQ ID NO: 5540151 - DNA, 25 bp, Homo sapien
tgctcaggagcctcgtgtctttctc

SEQ ID NO: 5540152 - DNA, 25 bp, Homo sapien
acatgttgacggacagcatataatc

SEQ ID NO: 5540153 - DNA, 25 bp, Homo sapien
acaactgcagtgagatccaagtgtg

SEQ ID NO: 5540154 - DNA, 25 bp, Homo sapien
ccctgtggccacccagtagctttta

SEQ ID NO: 5540155 - DNA, 25 bp, Homo sapien
cgtggctcagtatgagttgagtacc

SEQ ID NO: 5540156 - DNA, 25 bp, Homo sapien
tcagccacgatcctctggagagaga

SEQ ID NO: 5540157 - DNA, 25 bp, Homo sapien
attgttaagttgaaagtagccgtgg

SEQ ID NO: 5540158 - DNA, 25 bp, Homo sapien
gtgaggattgaaggattagttgtaa

SEQ ID NO: 5540159 - DNA, 25 bp, Homo sapien
ctgggcagggtgatttccactcaaa

SEQ ID NO: 5540160 - DNA, 25 bp, Homo sapien
gaaggggacataactgccctgtggc

SEQ ID NO: 5540161 - DNA, 25 bp, Homo sapien
gcctggagactagaaagacttttgg

SEQ ID NO: 5540162 - DNA, 25 bp, Homo sapien
agcagcattccatggtgcctcagcc

SEQ ID NO: 5540163 - DNA, 25 bp, Homo sapien
ttcaactgagtaaatatctaaatat

SEQ ID NO: 5540164 - DNA, 25 bp, Homo sapien
ttgtaagtcttcgtgctgttgtaaa

SEQ ID NO: 5540165 - DNA, 25 bp, Homo sapien
tttcagaggcttcctagtccttggg

SEQ ID NO: 5540166 - DNA, 25 bp, Homo sapien
caccccccacgttttcaactgagta

SEQ ID NO: 5540167 - DNA, 25 bp, Homo sapien
ttgaggtcgtggttttccacgcgat

SEQ ID NO: 5540168 - DNA, 25 bp, Homo sapien
ctgttgtaaaaattgaggtcgtggt

SEQ ID NO: 5540169 - DNA, 25 bp, Homo sapien
aaacttccaagcccatttcagaggc

SEQ ID NO: 5540170 - DNA, 25 bp, Homo sapien
tttccacgcgatttggctggcgaag

SEQ ID NO: 5540171 - DNA, 25 bp, Homo sapien
tttgcttgctatccagatcctgggt

SEQ ID NO: 5540172 - DNA, 25 bp, Homo sapien
cgtgctgttgtaaaaattgaggtcg

SEQ ID NO: 5540173 - DNA, 25 bp, Homo sapien
tacgctcacttgtaagtcttcgtgc

SEQ ID NO: 5540174 - DNA, 25 bp, Homo sapien
aggaagcattcttggacagagagtc

SEQ ID NO: 5540175 - DNA, 25 bp, Homo sapien
ccctgcaagacaggaagcattcttg

SEQ ID NO: 5540176 - DNA, 25 bp, Homo sapien
ttatctcagagcacaaaccctaaaa

SEQ ID NO: 5540177 - DNA, 25 bp, Homo sapien
caagactcactagcccctgcaagac

SEQ ID NO: 5540178 - DNA, 25 bp, Homo sapien
tttgcaactctgagagacaatatca

SEQ ID NO: 5540179 - DNA, 25 bp, Homo sapien
tttccctctctgtagtgtgtgtttg

SEQ ID NO: 5540180 - DNA, 25 bp, Homo sapien
acagagagtctgcaaatgagtttcc

SEQ ID NO: 5540181 - DNA, 25 bp, Homo sapien
acacaaatgtgagcataacataaac

SEQ ID NO: 5540182 - DNA, 25 bp, Homo sapien
taacataaacacacccaagactcac

SEQ ID NO: 5540183 - DNA, 25 bp, Homo sapien
tttgggattggttatgttctctcgc

SEQ ID NO: 5540184 - DNA, 25 bp, Homo sapien
ttcaggacaatcctgggtcgcggta

SEQ ID NO: 5540185 - DNA, 25 bp, Homo sapien
acttaatatagtgtcattgagattt

SEQ ID NO: 5540186 - DNA, 25 bp, Homo sapien
atcgtcccagaaatttcccttgggc

SEQ ID NO: 5540187 - DNA, 25 bp, Homo sapien
aattgctgtgtaatagtccatagtc

SEQ ID NO: 5540188 - DNA, 25 bp, Homo sapien
acccaccacggtctccatcaaaata

SEQ ID NO: 5540189 - DNA, 25 bp, Homo sapien
atatgtctatacccaccacggtctc

SEQ ID NO: 5540190 - DNA, 25 bp, Homo sapien
gtccatagtctgaatataccacaat

SEQ ID NO: 5540191 - DNA, 25 bp, Homo sapien
cttggtgaattttgtatatgtctat

SEQ ID NO: 5540192 - DNA, 25 bp, Homo sapien
cttcctcatcaaggctgaatagtat

SEQ ID NO: 5540193 - DNA, 25 bp, Homo sapien
aatggaaccataaacagccctcttg

SEQ ID NO: 5540194 - DNA, 25 bp, Homo sapien
tacaaacatttgagttctgtcctcc

SEQ ID NO: 5540195 - DNA, 25 bp, Homo sapien
aatcttagggtacaccttggtgaat

SEQ ID NO: 5540196 - DNA, 25 bp, Homo sapien
gctacacgctcaaatgtgcagatga

SEQ ID NO: 5540197 - DNA, 25 bp, Homo sapien
gtgatgcaacagatatatagccctt

SEQ ID NO: 5540198 - DNA, 25 bp, Homo sapien
tgtttggcttattgtgtgatgcaac

SEQ ID NO: 5540199 - DNA, 25 bp, Homo sapien
gtcatgttgtgtttggacttggggt

SEQ ID NO: 5540200 - DNA, 25 bp, Homo sapien
ttactaattgataagcagcagcttc

SEQ ID NO: 5540201 - DNA, 25 bp, Homo sapien
acaaagctgaacatccaaggagtta

SEQ ID NO: 5540202 - DNA, 25 bp, Homo sapien
tgtttccatgagtattgcaggtaat

SEQ ID NO: 5540203 - DNA, 25 bp, Homo sapien
ttcgtgttgtaaatcagactccagc

SEQ ID NO: 5540204 - DNA, 25 bp, Homo sapien
gcattgttgataaagccagtccctt

SEQ ID NO: 5540205 - DNA, 25 bp, Homo sapien
gacttatgtaagcgtgatttcaaac

SEQ ID NO: 5540206 - DNA, 25 bp, Homo sapien
gcagcagccatgtcagctacacgct

SEQ ID NO: 5540207 - DNA, 25 bp, Homo sapien
ttgaatccctccaaggcagaagctc

SEQ ID NO: 5540208 - DNA, 25 bp, Homo sapien
gtgcaggtccaaagctggaatagtt

SEQ ID NO: 5540209 - DNA, 25 bp, Homo sapien
acagctcgtacccaaggaacatggc

SEQ ID NO: 5540210 - DNA, 25 bp, Homo sapien
cacctggtggagagtctttctcttc

SEQ ID NO: 5540211 - DNA, 25 bp, Homo sapien
tgaccaatggtcagttgaatccctc

SEQ ID NO: 5540212 - DNA, 25 bp, Homo sapien
ctggaatagttggtgatcagttgac

SEQ ID NO: 5540213 - DNA, 25 bp, Homo sapien
tttgaaacttagagccaactccagc

SEQ ID NO: 5540214 - DNA, 25 bp, Homo sapien
cagtgagtttacaatggccatgggg

SEQ ID NO: 5540215 - DNA, 25 bp, Homo sapien
ggctgaaagcccacctggtggagag

SEQ ID NO: 5540216 - DNA, 25 bp, Homo sapien
gaccctggcgcttatgggctcgtca

SEQ ID NO: 5540217 - DNA, 25 bp, Homo sapien
ttgacctgttaatgggatgagaccc

SEQ ID NO: 5540218 - DNA, 25 bp, Homo sapien
ggctagttagtgtccagagcctggc

SEQ ID NO: 5540219 - DNA, 25 bp, Homo sapien
gggatccctggaaaacatctggcat

SEQ ID NO: 5540220 - DNA, 25 bp, Homo sapien
tctttagaaagccatggagaaactg

SEQ ID NO: 5540221 - DNA, 25 bp, Homo sapien
aagtacagagtaagcaattagtgtg

SEQ ID NO: 5540222 - DNA, 25 bp, Homo sapien
tatggaggtaatgtttgattcttca

SEQ ID NO: 5540223 - DNA, 25 bp, Homo sapien
gccctctagaggcaattgggttaat

SEQ ID NO: 5540224 - DNA, 25 bp, Homo sapien
aagcactgcctccatagaccaattc

SEQ ID NO: 5540225 - DNA, 25 bp, Homo sapien
atgtagaatgctgttatgtgtctcc

SEQ ID NO: 5540226 - DNA, 25 bp, Homo sapien
gcatccagcaagtcttgacccctct

SEQ ID NO: 5540227 - DNA, 25 bp, Homo sapien
aaggatgaggtgactgttcacaatc

SEQ ID NO: 5540228 - DNA, 25 bp, Homo sapien
tattagaaggcagattttattgatt

SEQ ID NO: 5540229 - DNA, 25 bp, Homo sapien
caaattgctagtgagaatgagagat

SEQ ID NO: 5540230 - DNA, 25 bp, Homo sapien
ttcatacagatgtccagacagggga

SEQ ID NO: 5540231 - DNA, 25 bp, Homo sapien
tggaaggcaaacacatcacgtctgc

SEQ ID NO: 5540232 - DNA, 25 bp, Homo sapien
ggggaccagaagtctcaggtctgag

SEQ ID NO: 5540233 - DNA, 25 bp, Homo sapien
gtatgactttggcagagcagctctt

SEQ ID NO: 5540234 - DNA, 25 bp, Homo sapien
ctttgcatgggttagacctggaagg

SEQ ID NO: 5540235 - DNA, 25 bp, Homo sapien
gttggctggtgcttctccgtcttca

SEQ ID NO: 5540236 - DNA, 25 bp, Homo sapien
tgtgtctccaagaagggtatgactt

SEQ ID NO: 5540237 - DNA, 25 bp, Homo sapien
cctggaagcccctcacgtctgtagc

SEQ ID NO: 5540238 - DNA, 25 bp, Homo sapien
gttcccaggaggctttgcatgggtt

SEQ ID NO: 5540239 - DNA, 25 bp, Homo sapien
gataagacgagccctgaagcatttt

SEQ ID NO: 5540240 - DNA, 25 bp, Homo sapien
acaggcatatgtaaatctcgaatcc

SEQ ID NO: 5540241 - DNA, 25 bp, Homo sapien
agaaaaaatggctagaaggcaattt

SEQ ID NO: 5540242 - DNA, 25 bp, Homo sapien
ggtaaaaaagcagtatggccatatt

SEQ ID NO: 5540243 - DNA, 25 bp, Homo sapien
tacaagtgtgccagtcatcctctac

SEQ ID NO: 5540244 - DNA, 25 bp, Homo sapien
gaaatggaataaaaaatacagcctc

SEQ ID NO: 5540245 - DNA, 25 bp, Homo sapien
gaggaaaatgtaatccagagttgtt

SEQ ID NO: 5540246 - DNA, 25 bp, Homo sapien
ctcccagagaatcaaacgggtaggg

SEQ ID NO: 5540247 - DNA, 25 bp, Homo sapien
ctgagggttttcagttgagaggaaa

SEQ ID NO: 5540248 - DNA, 25 bp, Homo sapien
gaggagcaccatgcctcccagagaa

SEQ ID NO: 5540249 - DNA, 25 bp, Homo sapien
tgcgatcagttcacagagagcatgt

SEQ ID NO: 5540250 - DNA, 25 bp, Homo sapien
ctggacaagtcatacaaaaggattc

SEQ ID NO: 5540251 - DNA, 25 bp, Homo sapien
ggcacatgtggataagtagaatgtt

SEQ ID NO: 5540252 - DNA, 25 bp, Homo sapien
acaacatgtatggcaggtgatgata

SEQ ID NO: 5540253 - DNA, 25 bp, Homo sapien
gagcagtggtagagaatatacttct

SEQ ID NO: 5540254 - DNA, 25 bp, Homo sapien
atttctgcagagacctaaatggcac

SEQ ID NO: 5540255 - DNA, 25 bp, Homo sapien
cctaaatggcacatcttggcacatg

SEQ ID NO: 5540256 - DNA, 25 bp, Homo sapien
cactgctgcacacaacatgtatggc

SEQ ID NO: 5540257 - DNA, 25 bp, Homo sapien
ttggataaatggtcaaacgattttc

SEQ ID NO: 5540258 - DNA, 25 bp, Homo sapien
tgttttgggccatgcatttcattcc

SEQ ID NO: 5540259 - DNA, 25 bp, Homo sapien
taacacattccaaaagcgagcatat

SEQ ID NO: 5540260 - DNA, 25 bp, Homo sapien
ggcaggtgatgataccaaacagcta

SEQ ID NO: 5540261 - DNA, 25 bp, Homo sapien
atggatcatcttaattgggttcaat

SEQ ID NO: 5540262 - DNA, 25 bp, Homo sapien
cagggtacaaggctgttttttcttc

SEQ ID NO: 5540263 - DNA, 25 bp, Homo sapien
ttctgtgacctgaagcatagattac

SEQ ID NO: 5540264 - DNA, 25 bp, Homo sapien
aatggtgcgaagctgtgtttaatgc

SEQ ID NO: 5540265 - DNA, 25 bp, Homo sapien
gtaaggacagagtcttagcagcttc

SEQ ID NO: 5540266 - DNA, 25 bp, Homo sapien
ttgtgaacaatggccctagagtatt

SEQ ID NO: 5540267 - DNA, 25 bp, Homo sapien
aaataaacagctcctggcagctctt

SEQ ID NO: 5540268 - DNA, 25 bp, Homo sapien
ccaggatgttttcagatgagtttgt

SEQ ID NO: 5540269 - DNA, 25 bp, Homo sapien
ctgagtttattcaatggtgcgaagc

SEQ ID NO: 5540270 - DNA, 25 bp, Homo sapien
tatgcattggcttgttgctgagttt

SEQ ID NO: 5540271 - DNA, 25 bp, Homo sapien
gctacagattgcagcagagaatacc

SEQ ID NO: 5540272 - DNA, 25 bp, Homo sapien
cagagttggaaggacaatgtccaga

SEQ ID NO: 5540273 - DNA, 25 bp, Homo sapien
aaatgactgcaaaccagagagcgat

SEQ ID NO: 5540274 - DNA, 25 bp, Homo sapien
gaaggtcgatagcagcatcctccag

SEQ ID NO: 5540275 - DNA, 25 bp, Homo sapien
gaaactgcaatatacagagaggtga

SEQ ID NO: 5540276 - DNA, 25 bp, Homo sapien
ggcagcttgcagcggacaataaata

SEQ ID NO: 5540277 - DNA, 25 bp, Homo sapien
gcacgccttccctgcgcggtgtctc

SEQ ID NO: 5540278 - DNA, 25 bp, Homo sapien
ccagagagcgatttttgttggagtt

SEQ ID NO: 5540279 - DNA, 25 bp, Homo sapien
ttaattgttgaggcagtaatacttg

SEQ ID NO: 5540280 - DNA, 25 bp, Homo sapien
ctaggtcacgtgagtcacggaaggt

SEQ ID NO: 5540281 - DNA, 25 bp, Homo sapien
attggtgtactaggtcacgtgagtc

SEQ ID NO: 5540282 - DNA, 25 bp, Homo sapien
tcctccagaactgcgagcaaggcag

SEQ ID NO: 5540283 - DNA, 25 bp, Homo sapien
agagaggtgaaataaatagcttata

SEQ ID NO: 5540284 - DNA, 25 bp, Homo sapien
acccgtgtcggtgtgcagtgcacag

SEQ ID NO: 5540285 - DNA, 25 bp, Homo sapien
ctgtgcactgcacaccgacacgggt

SEQ ID NO: 5540286 - DNA, 25 bp, Homo sapien
cagaaactcagaatgaatcatatga

SEQ ID NO: 5540287 - DNA, 25 bp, Homo sapien
tgggtcccaggacaaatagacatag

SEQ ID NO: 5540288 - DNA, 25 bp, Homo sapien
agtggctactgtgttagagcagttc

SEQ ID NO: 5540289 - DNA, 25 bp, Homo sapien
tgaagtcatcgtctataaggcaata

SEQ ID NO: 5540290 - DNA, 25 bp, Homo sapien
tagggctgcatattttatgggtccc

SEQ ID NO: 5540291 - DNA, 25 bp, Homo sapien
tcatgtaagcctttgaaatctggtg

SEQ ID NO: 5540292 - DNA, 25 bp, Homo sapien
catatgaattaaacattggacaatg

SEQ ID NO: 5540293 - DNA, 25 bp, Homo sapien
taaggcaatatgaaagctgatctga

SEQ ID NO: 5540294 - DNA, 25 bp, Homo sapien
ttagagcagttctagaacaaaggag

SEQ ID NO: 5540295 - DNA, 25 bp, Homo sapien
atagtctgaaagaatgatctcagtc

SEQ ID NO: 5540296 - DNA, 25 bp, Homo sapien
gtacatcctgatttggaataaccac

SEQ ID NO: 5540297 - DNA, 25 bp, Homo sapien
catgacagatataaactgctgcagt

SEQ ID NO: 5540298 - DNA, 25 bp, Homo sapien
tatcatagaaaggtgttaagcaaac

SEQ ID NO: 5540299 - DNA, 25 bp, Homo sapien
tttacaccatatgaccgggcacttc

SEQ ID NO: 5540300 - DNA, 25 bp, Homo sapien
ttgcctcaggagttatatacatatc

SEQ ID NO: 5540301 - DNA, 25 bp, Homo sapien
gaccgggcacttctgttgcctcagg

SEQ ID NO: 5540302 - DNA, 25 bp, Homo sapien
acaaaattaaaagacatactacaag

SEQ ID NO: 5540303 - DNA, 25 bp, Homo sapien
ctgctgcagttgatcagtgaacatt

SEQ ID NO: 5540304 - DNA, 25 bp, Homo sapien
ttgcacacgaatttcaatccccatt

SEQ ID NO: 5540305 - DNA, 25 bp, Homo sapien
acatatcagtttgcacacgaatttc

SEQ ID NO: 5540306 - DNA, 25 bp, Homo sapien
taaaacagttgataacacattgaac

SEQ ID NO: 5540307 - DNA, 25 bp, Homo sapien
tgcagtggattaaaacatgacagat

SEQ ID NO: 5540308 - DNA, 25 bp, Homo sapien
tgaaagccagaaaatctaattatgc

SEQ ID NO: 5540309 - DNA, 25 bp, Homo sapien
aaataacaaagtttgctgtgattgc

SEQ ID NO: 5540310 - DNA, 25 bp, Homo sapien
tagtctatactagcatagagtagct

SEQ ID NO: 5540311 - DNA, 25 bp, Homo sapien
tttgggcttctaagacacatgggaa

SEQ ID NO: 5540312 - DNA, 25 bp, Homo sapien
aatacattcagattacacagatccc

SEQ ID NO: 5540313 - DNA, 25 bp, Homo sapien
catctcactgactttgggcttctaa

SEQ ID NO: 5540314 - DNA, 25 bp, Homo sapien
aatcaaacagtagagctaaagttat

SEQ ID NO: 5540315 - DNA, 25 bp, Homo sapien
tacacagatcccttatgaattacta

SEQ ID NO: 5540316 - DNA, 25 bp, Homo sapien
aaaattattggtgtatagtctatac

SEQ ID NO: 5540317 - DNA, 25 bp, Homo sapien
atgctatagcccaactacctaatgc

SEQ ID NO: 5540318 - DNA, 25 bp, Homo sapien
agaaaaatacatcctagaactcatt

SEQ ID NO: 5540319 - DNA, 25 bp, Homo sapien
acaggagaggatccccgttcttcaa

SEQ ID NO: 5540320 - DNA, 25 bp, Homo sapien
actgagcgttggtggttcttcccaa

SEQ ID NO: 5540321 - DNA, 25 bp, Homo sapien
ggccacaccaccctggggtgctcat

SEQ ID NO: 5540322 - DNA, 25 bp, Homo sapien
gggtcaaccccaggagtatttgcag

SEQ ID NO: 5540323 - DNA, 25 bp, Homo sapien
gtataaaggcgtgggtctttctgtc

SEQ ID NO: 5540324 - DNA, 25 bp, Homo sapien
agggaaggcattgccgactagataa

SEQ ID NO: 5540325 - DNA, 25 bp, Homo sapien
ccataatgaacttgaaaggacggga

SEQ ID NO: 5540326 - DNA, 25 bp, Homo sapien
ggggtgctcattgacagagctgcca

SEQ ID NO: 5540327 - DNA, 25 bp, Homo sapien
gactagataaccgtgtgagcttgga

SEQ ID NO: 5540328 - DNA, 25 bp, Homo sapien
tctcccggcctgccaggtctctggg

SEQ ID NO: 5540329 - DNA, 25 bp, Homo sapien
gaaaggaatttctcccggcctgcca

SEQ ID NO: 5540330 - DNA, 25 bp, Homo sapien
agtaatgtatagctacctctacaca

SEQ ID NO: 5540331 - DNA, 25 bp, Homo sapien
cattcctctgaagactataaaagtc

SEQ ID NO: 5540332 - DNA, 25 bp, Homo sapien
acttgaaaaacaaaacgctattctc

SEQ ID NO: 5540333 - DNA, 25 bp, Homo sapien
aaaactttaagctgcacttgcaacc

SEQ ID NO: 5540334 - DNA, 25 bp, Homo sapien
gacccagataggtgcccatgaaata

SEQ ID NO: 5540335 - DNA, 25 bp, Homo sapien
ccctgctttaggagaaaacaagaaa

SEQ ID NO: 5540336 - DNA, 25 bp, Homo sapien
acatataatgtagttggcttggtaa

SEQ ID NO: 5540337 - DNA, 25 bp, Homo sapien
actcacatttaccaaggacagaatc

SEQ ID NO: 5540338 - DNA, 25 bp, Homo sapien
ttaccaaggacagaatcatctcttt

SEQ ID NO: 5540339 - DNA, 25 bp, Homo sapien
cagataggtgcccatgaaataaaac

SEQ ID NO: 5540340 - DNA, 25 bp, Homo sapien
atgtagttggcttggtaaatagttt

SEQ ID NO: 5540341 - DNA, 25 bp, Homo sapien
caggcagactcacatggagactgtg

SEQ ID NO: 5540342 - DNA, 25 bp, Homo sapien
gtacatcattgtttagtctgcattt

SEQ ID NO: 5540343 - DNA, 25 bp, Homo sapien
gtgcacttgatacacctggtcaggc

SEQ ID NO: 5540344 - DNA, 25 bp, Homo sapien
ctttgtgcacttgatacacctggtc

SEQ ID NO: 5540345 - DNA, 25 bp, Homo sapien
gatacacctggtcaggcagactcac

SEQ ID NO: 5540346 - DNA, 25 bp, Homo sapien
cctaacaaaggtagaataggaggtg

SEQ ID NO: 5540347 - DNA, 25 bp, Homo sapien
tcctttgctatgatcttgttatgtc

SEQ ID NO: 5540348 - DNA, 25 bp, Homo sapien
acaaagttggccttgagggttttga

SEQ ID NO: 5540349 - DNA, 25 bp, Homo sapien
tggttcatttcctaacaaaggtaga

SEQ ID NO: 5540350 - DNA, 25 bp, Homo sapien
ttgatacacctggtcaggcagactc

SEQ ID NO: 5540351 - DNA, 25 bp, Homo sapien
tgatcttgttatgtcatggttcatt

SEQ ID NO: 5540352 - DNA, 25 bp, Homo sapien
gtcttcagtgtacagcatggtttta

SEQ ID NO: 5540353 - DNA, 25 bp, Homo sapien
ttcactatgagtagatgaccacatc

SEQ ID NO: 5540354 - DNA, 25 bp, Homo sapien
ctgtgtcatgttagttgctgctgcc

SEQ ID NO: 5540355 - DNA, 25 bp, Homo sapien
gagaatacagttatatggtggcgtt

SEQ ID NO: 5540356 - DNA, 25 bp, Homo sapien
ttttgccacctgagaatacagttat

SEQ ID NO: 5540357 - DNA, 25 bp, Homo sapien
gtgaggttcccaatgtttcgtccag

SEQ ID NO: 5540358 - DNA, 25 bp, Homo sapien
cttatagaagagatcatgccctttt

SEQ ID NO: 5540359 - DNA, 25 bp, Homo sapien
aagtcaggtgactcttaggccacaa

SEQ ID NO: 5540360 - DNA, 25 bp, Homo sapien
ttgtgaaatgttatgcctatgttgc

SEQ ID NO: 5540361 - DNA, 25 bp, Homo sapien
atggtggcgttttggtaagtaaatg

SEQ ID NO: 5540362 - DNA, 25 bp, Homo sapien
ttgtttgactctgggttttgccacc

SEQ ID NO: 5540363 - DNA, 25 bp, Homo sapien
ttcacaaaggaaactgtatggtaaa

SEQ ID NO: 5540364 - DNA, 25 bp, Homo sapien
ccatgcaaacagagactaccgaaat

SEQ ID NO: 5540365 - DNA, 25 bp, Homo sapien
tgaaaaatacaatacacagcagaga

SEQ ID NO: 5540366 - DNA, 25 bp, Homo sapien
gaggcccagttagaagtggaaaata

SEQ ID NO: 5540367 - DNA, 25 bp, Homo sapien
tgagatatttggctaggatagatcc

SEQ ID NO: 5540368 - DNA, 25 bp, Homo sapien
gtatggtaaatgtaactgagatatt

SEQ ID NO: 5540369 - DNA, 25 bp, Homo sapien
tctgtcaaagaagattcacctctct

SEQ ID NO: 5540370 - DNA, 25 bp, Homo sapien
aacagcatcatgaataagggctatt

SEQ ID NO: 5540371 - DNA, 25 bp, Homo sapien
tcagataaaacatgtgcagaatttc

SEQ ID NO: 5540372 - DNA, 25 bp, Homo sapien
ctaggatagatcctgagaaaagaga

SEQ ID NO: 5540373 - DNA, 25 bp, Homo sapien
gtggaaaatacaaagtctgtcaaag

SEQ ID NO: 5540374 - DNA, 25 bp, Homo sapien
ggcattggcagtcctagcaccacac

SEQ ID NO: 5540375 - DNA, 25 bp, Homo sapien
actcttctttgggcatgagaccagt

SEQ ID NO: 5540376 - DNA, 25 bp, Homo sapien
cagccccattggtaccagaagtctc

SEQ ID NO: 5540377 - DNA, 25 bp, Homo sapien
cagcaagttaatggtgaaggtttta

SEQ ID NO: 5540378 - DNA, 25 bp, Homo sapien
ggttgggatgacatgcattgccctg

SEQ ID NO: 5540379 - DNA, 25 bp, Homo sapien
tgacatgcattgccctgcagggtgc

SEQ ID NO: 5540380 - DNA, 25 bp, Homo sapien
tgagcatggcaacagatcctatggt

SEQ ID NO: 5540381 - DNA, 25 bp, Homo sapien
ttgtcccttgggcctggcattggca

SEQ ID NO: 5540382 - DNA, 25 bp, Homo sapien
caccatctctagaagaagcagaagc

SEQ ID NO: 5540383 - DNA, 25 bp, Homo sapien
gccagccatgagaacaaaaagctct

SEQ ID NO: 5540384 - DNA, 25 bp, Homo sapien
accagaagtctcatatgctagtcct

SEQ ID NO: 5540385 - DNA, 25 bp, Homo sapien
catcctacagtggtacaggatatat

SEQ ID NO: 5540386 - DNA, 25 bp, Homo sapien
ggggtacacaatgatatttccatac

SEQ ID NO: 5540387 - DNA, 25 bp, Homo sapien
agtggtacaggatatattaaacaat

SEQ ID NO: 5540388 - DNA, 25 bp, Homo sapien
attgtgtgcctagtatggtgcgaga

SEQ ID NO: 5540389 - DNA, 25 bp, Homo sapien
tattcatggggtacacaatgatatt

SEQ ID NO: 5540390 - DNA, 25 bp, Homo sapien
agacagcacaggtacagagattgtg

SEQ ID NO: 5540391 - DNA, 25 bp, Homo sapien
caggtacagagattgtgtgcctagt

SEQ ID NO: 5540392 - DNA, 25 bp, Homo sapien
agagattgtgtgcctagtatggtgc

SEQ ID NO: 5540393 - DNA, 25 bp, Homo sapien
tacagtggtacaggatatattaaac

SEQ ID NO: 5540394 - DNA, 25 bp, Homo sapien
tttccatacatataatgtgtagtga

SEQ ID NO: 5540395 - DNA, 25 bp, Homo sapien
agcacaggtacagagattgtgtgcc

SEQ ID NO: 5540396 - DNA, 25 bp, Homo sapien
ggtcctgctgtggtcatcttggtga

SEQ ID NO: 5540397 - DNA, 25 bp, Homo sapien
agctactggccaagatcagacgtcg

SEQ ID NO: 5540398 - DNA, 25 bp, Homo sapien
gggttgttagaggactgtgtcatcc

SEQ ID NO: 5540399 - DNA, 25 bp, Homo sapien
tattccaaaaatagtgccgggtggc

SEQ ID NO: 5540400 - DNA, 25 bp, Homo sapien
caagctcattacatctgccagggcc

SEQ ID NO: 5540401 - DNA, 25 bp, Homo sapien
gccgagcttgaggccacatgtgaag

SEQ ID NO: 5540402 - DNA, 25 bp, Homo sapien
cagccttttcctgggatgcagtgaa

SEQ ID NO: 5540403 - DNA, 25 bp, Homo sapien
tgaactcgatgggcccctcctgtgc

SEQ ID NO: 5540404 - DNA, 25 bp, Homo sapien
gtgactcggtcacagcagctactgg

SEQ ID NO: 5540405 - DNA, 25 bp, Homo sapien
tgaggggctgttcaccaccatcctc

SEQ ID NO: 5540406 - DNA, 25 bp, Homo sapien
gccttcacgacgtgactgctggacc

SEQ ID NO: 5540407 - DNA, 25 bp, Homo sapien
tgtttctataagagtagtttctaag

SEQ ID NO: 5540408 - DNA, 25 bp, Homo sapien
cttagaaactactcttatagaaaca

SEQ ID NO: 5540409 - DNA, 25 bp, Homo sapien
tggtctcttgggcaacatttttggc

SEQ ID NO: 5540410 - DNA, 25 bp, Homo sapien
tcccctcaccccatattccatcacc

SEQ ID NO: 5540411 - DNA, 25 bp, Homo sapien
caagtttgggcattttggcagtagc

SEQ ID NO: 5540412 - DNA, 25 bp, Homo sapien
tttggcagtagctgtatgggagaaa

SEQ ID NO: 5540413 - DNA, 25 bp, Homo sapien
gaggccaagggctttctggccatct

SEQ ID NO: 5540414 - DNA, 25 bp, Homo sapien
ctagggctgcctggtcagtcccagg

SEQ ID NO: 5540415 - DNA, 25 bp, Homo sapien
ctgcctggtcagtcccaggtgaggc

SEQ ID NO: 5540416 - DNA, 25 bp, Homo sapien
caccccaaagagctcctgccctctc

SEQ ID NO: 5540417 - DNA, 25 bp, Homo sapien
agtttgggcaacatttggcccaagt

SEQ ID NO: 5540418 - DNA, 25 bp, Homo sapien
cctcctctgctctgggtggtaaggg

SEQ ID NO: 5540419 - DNA, 25 bp, Homo sapien
tcccacagccatgaagggtgaaagg

SEQ ID NO: 5540420 - DNA, 25 bp, Homo sapien
gcggacccgaacggtccctctcgca

SEQ ID NO: 5540421 - DNA, 25 bp, Homo sapien
ggagcccagctccatacgttcggcc

SEQ ID NO: 5540422 - DNA, 25 bp, Homo sapien
ccacctccgccggctaagcccggag

SEQ ID NO: 5540423 - DNA, 25 bp, Homo sapien
tctcgcaaccgatctgctggctggg

SEQ ID NO: 5540424 - DNA, 25 bp, Homo sapien
tagaagccttaagaggctgcccagc

SEQ ID NO: 5540425 - DNA, 25 bp, Homo sapien
gggatgcgaattcctagaagcctta

SEQ ID NO: 5540426 - DNA, 25 bp, Homo sapien
gaggttccggctcacacaccccctc

SEQ ID NO: 5540427 - DNA, 25 bp, Homo sapien
ttcgtatccccaagaatgctggagg

SEQ ID NO: 5540428 - DNA, 25 bp, Homo sapien
cgaacggtccctctcgcaaccgatc

SEQ ID NO: 5540429 - DNA, 25 bp, Homo sapien
ccagcgttggaagttcgtatcccca

SEQ ID NO: 5540430 - DNA, 25 bp, Homo sapien
agctccatacgttcggccaccccag

SEQ ID NO: 5540431 - DNA, 25 bp, Homo sapien
cctccaacggcctctgtgtgtgcgt

SEQ ID NO: 5540432 - DNA, 25 bp, Homo sapien
cagaagccctccaacggcctctgtg

SEQ ID NO: 5540433 - DNA, 25 bp, Homo sapien
gagagaaccatagcaccagaacttt

SEQ ID NO: 5540434 - DNA, 25 bp, Homo sapien
cctctgtgtgtgcgtcagagagaac

SEQ ID NO: 5540435 - DNA, 25 bp, Homo sapien
caaaacagtaggcaagaaaataaaa

SEQ ID NO: 5540436 - DNA, 25 bp, Homo sapien
aatgtctggtttatactagaacagt

SEQ ID NO: 5540437 - DNA, 25 bp, Homo sapien
tggcgcctcaattacagtcacagat

SEQ ID NO: 5540438 - DNA, 25 bp, Homo sapien
agtcacagattaaaagtggagtttt

SEQ ID NO: 5540439 - DNA, 25 bp, Homo sapien
ctcctgcctccttaactccgtagtc

SEQ ID NO: 5540440 - DNA, 25 bp, Homo sapien
ttctctagcaaaacagtaggcaaga

SEQ ID NO: 5540441 - DNA, 25 bp, Homo sapien
catttgtatagacctctggcgcctc

SEQ ID NO: 5540442 - DNA, 25 bp, Homo sapien
accgggaagactgtgctccaaatta

SEQ ID NO: 5540443 - DNA, 25 bp, Homo sapien
ctaaaccagaaacacctgcgttttg

SEQ ID NO: 5540444 - DNA, 25 bp, Homo sapien
ttcatccagggcagctgttttaaaa

SEQ ID NO: 5540445 - DNA, 25 bp, Homo sapien
gtggctgtctctgccgcacgtgatc

SEQ ID NO: 5540446 - DNA, 25 bp, Homo sapien
tgcatagatcatcagcacgaggcag

SEQ ID NO: 5540447 - DNA, 25 bp, Homo sapien
tcaggcttacgtggtctggtcctca

SEQ ID NO: 5540448 - DNA, 25 bp, Homo sapien
gccttggcatgtctaggcaccggga

SEQ ID NO: 5540449 - DNA, 25 bp, Homo sapien
gcacgtgatctacataacgccatgc

SEQ ID NO: 5540450 - DNA, 25 bp, Homo sapien
agtcaggatccactcaggcttacgt

SEQ ID NO: 5540451 - DNA, 25 bp, Homo sapien
ctgcgttttgaaacaggtggtcagg

SEQ ID NO: 5540452 - DNA, 25 bp, Homo sapien
agaagacacgaaaacacattccgcc

SEQ ID NO: 5540453 - DNA, 25 bp, Homo sapien
gcccaataaacaccgtggactccca

SEQ ID NO: 5540454 - DNA, 25 bp, Homo sapien
tcctttccagacagatgagagaggg

SEQ ID NO: 5540455 - DNA, 25 bp, Homo sapien
cagctttgccgctgagtgtaggaaa

SEQ ID NO: 5540456 - DNA, 25 bp, Homo sapien
agggtgcagtctttactccctaacc

SEQ ID NO: 5540457 - DNA, 25 bp, Homo sapien
tcctgcagctttgccgctgagtgta

SEQ ID NO: 5540458 - DNA, 25 bp, Homo sapien
caccaccaggaccatgtagggtgca

SEQ ID NO: 5540459 - DNA, 25 bp, Homo sapien
cgaaaaaggtgctacctcctttcca

SEQ ID NO: 5540460 - DNA, 25 bp, Homo sapien
tgcaaattcctttactgttatcccc

SEQ ID NO: 5540461 - DNA, 25 bp, Homo sapien
ccaccaccaggaccatgtagggtgc

SEQ ID NO: 5540462 - DNA, 25 bp, Homo sapien
aggaccatgtagggtgcagtcttta

SEQ ID NO: 5540463 - DNA, 25 bp, Homo sapien
gtggcccaataaacaccgtggactc

SEQ ID NO: 5540464 - DNA, 25 bp, Homo sapien
gaggagttaaaggccctgtgatgaa

SEQ ID NO: 5540465 - DNA, 25 bp, Homo sapien
tcgtaaagatctgtggcgtgattac

SEQ ID NO: 5540466 - DNA, 25 bp, Homo sapien
gtggaattgccaggtcacgtgcatt

SEQ ID NO: 5540467 - DNA, 25 bp, Homo sapien
atggccctctagaaaggtgacacca

SEQ ID NO: 5540468 - DNA, 25 bp, Homo sapien
cgggccgagggtaacttctcctcca

SEQ ID NO: 5540469 - DNA, 25 bp, Homo sapien
acatagcaggagcttcgtaaagatc

SEQ ID NO: 5540470 - DNA, 25 bp, Homo sapien
cttttaaaaggctgcatagggagct

SEQ ID NO: 5540471 - DNA, 25 bp, Homo sapien
cactaggtttcaggatggccacttt

SEQ ID NO: 5540472 - DNA, 25 bp, Homo sapien
ccaggtcacagcaacactaggtttc

SEQ ID NO: 5540473 - DNA, 25 bp, Homo sapien
cgtgattacatggtgccagatggcc

SEQ ID NO: 5540474 - DNA, 25 bp, Homo sapien
ggagctctggtggcacaatgaatta

SEQ ID NO: 5540475 - DNA, 25 bp, Homo sapien
ctagtcaccaccgctgagatgtgtt

SEQ ID NO: 5540476 - DNA, 25 bp, Homo sapien
gtcaccaccgctgagatgtgttctg

SEQ ID NO: 5540477 - DNA, 25 bp, Homo sapien
aaggacaccccaaatggttctgagg

SEQ ID NO: 5540478 - DNA, 25 bp, Homo sapien
atatagatatctggtaaggagagct

SEQ ID NO: 5540479 - DNA, 25 bp, Homo sapien
aggactagtcaccaccgctgagatg

SEQ ID NO: 5540480 - DNA, 25 bp, Homo sapien
tggtgaaactgaatatatacaaata

SEQ ID NO: 5540481 - DNA, 25 bp, Homo sapien
agggaatcaatgggactccagttcg

SEQ ID NO: 5540482 - DNA, 25 bp, Homo sapien
atagatatctggtaaggagagctga

SEQ ID NO: 5540483 - DNA, 25 bp, Homo sapien
aatatatagatatctggtaaggaga

SEQ ID NO: 5540484 - DNA, 25 bp, Homo sapien
aaagcatatgggcaaagcttccaca

SEQ ID NO: 5540485 - DNA, 25 bp, Homo sapien
tcaatgggactccagttcgatgact

SEQ ID NO: 5540486 - DNA, 25 bp, Homo sapien
gtcctggtgcttctgcaagcgccaa

SEQ ID NO: 5540487 - DNA, 25 bp, Homo sapien
caggctaaactgacctcgccgacgg

SEQ ID NO: 5540488 - DNA, 25 bp, Homo sapien
gcagctaccagccgcttggagcggg

SEQ ID NO: 5540489 - DNA, 25 bp, Homo sapien
tactagcagctaccagccgcttgga

SEQ ID NO: 5540490 - DNA, 25 bp, Homo sapien
agttcaggcagaataccatttttta

SEQ ID NO: 5540491 - DNA, 25 bp, Homo sapien
aaccatggacctggtagttcaggca

SEQ ID NO: 5540492 - DNA, 25 bp, Homo sapien
gccagaagtctgaattactagcagc

SEQ ID NO: 5540493 - DNA, 25 bp, Homo sapien
tttggaaagatcgtcctggtgcttc

SEQ ID NO: 5540494 - DNA, 25 bp, Homo sapien
ttccacggtccagtacaggctaaac

SEQ ID NO: 5540495 - DNA, 25 bp, Homo sapien
tccccattccacagaccgcagcaga

SEQ ID NO: 5540496 - DNA, 25 bp, Homo sapien
ttctgcaagcgccaaaagcaaacca

SEQ ID NO: 5540497 - DNA, 25 bp, Homo sapien
aaatggaccaataagccaaactatc

SEQ ID NO: 5540498 - DNA, 25 bp, Homo sapien
atgcagacctttagagttaagcctt

SEQ ID NO: 5540499 - DNA, 25 bp, Homo sapien
gggaggtttagtggtgcatttctcc

SEQ ID NO: 5540500 - DNA, 25 bp, Homo sapien
agaaaatcaaagggctagtagaaac

SEQ ID NO: 5540501 - DNA, 25 bp, Homo sapien
agcagggtacccccaaagatgttcc

SEQ ID NO: 5540502 - DNA, 25 bp, Homo sapien
agacatatgcatccccacacacgcc

SEQ ID NO: 5540503 - DNA, 25 bp, Homo sapien
tatgcacaaacgtggattatcgcac

SEQ ID NO: 5540504 - DNA, 25 bp, Homo sapien
agatatgagagtaatgagagacatt

SEQ ID NO: 5540505 - DNA, 25 bp, Homo sapien
aagaaaaggggcaactttctgtcca

SEQ ID NO: 5540506 - DNA, 25 bp, Homo sapien
ggagagaattcagccgaagatatga

SEQ ID NO: 5540507 - DNA, 25 bp, Homo sapien
attatcgcacagactgggaggttta

SEQ ID NO: 5540508 - DNA, 25 bp, Homo sapien
tgagcaacagggatttgatgatgcc

SEQ ID NO: 5540509 - DNA, 25 bp, Homo sapien
attctgaaaggtagttaaagagtaa

SEQ ID NO: 5540510 - DNA, 25 bp, Homo sapien
tatgttaaaagttgggatattctga

SEQ ID NO: 5540511 - DNA, 25 bp, Homo sapien
tgaagcaagtcactacaaccagcct

SEQ ID NO: 5540512 - DNA, 25 bp, Homo sapien
ggatttgatgatgccacaccaggaa

SEQ ID NO: 5540513 - DNA, 25 bp, Homo sapien
ctaattagtgggtttgagcaacagg

SEQ ID NO: 5540514 - DNA, 25 bp, Homo sapien
gataagaatgagctaattagtgggt

SEQ ID NO: 5540515 - DNA, 25 bp, Homo sapien
aggaagaccctcaatcagtgcccat

SEQ ID NO: 5540516 - DNA, 25 bp, Homo sapien
agatgaaatgtaggagacacagtat

SEQ ID NO: 5540517 - DNA, 25 bp, Homo sapien
aacaatgcaagtgtaaactaacagc

SEQ ID NO: 5540518 - DNA, 25 bp, Homo sapien
gtaggagacacagtatgagatcttc

SEQ ID NO: 5540519 - DNA, 25 bp, Homo sapien
cagcagccgccaccaatgctccttt

SEQ ID NO: 5540520 - DNA, 25 bp, Homo sapien
cattccccgtgtcttcccagcagcc

SEQ ID NO: 5540521 - DNA, 25 bp, Homo sapien
aacacgcatgtttcagggctcctca

SEQ ID NO: 5540522 - DNA, 25 bp, Homo sapien
gtgtagatagtcgccggcctttcct

SEQ ID NO: 5540523 - DNA, 25 bp, Homo sapien
cagcgctcccagtaaaagctgcagg

SEQ ID NO: 5540524 - DNA, 25 bp, Homo sapien
catcttgtgcagtaaaacacgcatg

SEQ ID NO: 5540525 - DNA, 25 bp, Homo sapien
aggctggcgctcagcgctcccagta

SEQ ID NO: 5540526 - DNA, 25 bp, Homo sapien
ctctcttagggccgatcttagcgag

SEQ ID NO: 5540527 - DNA, 25 bp, Homo sapien
accccgactggcctagactccattc

SEQ ID NO: 5540528 - DNA, 25 bp, Homo sapien
cagggctcctcactgcaacacgtgc

SEQ ID NO: 5540529 - DNA, 25 bp, Homo sapien
tgacgctttgtgctgcggaagcaaa

SEQ ID NO: 5540530 - DNA, 25 bp, Homo sapien
tgcccaagagaagccacccttcagg

SEQ ID NO: 5540531 - DNA, 25 bp, Homo sapien
accgcagctgaaccaacggtttccc

SEQ ID NO: 5540532 - DNA, 25 bp, Homo sapien
caccagcctttgcgaccagaccaga

SEQ ID NO: 5540533 - DNA, 25 bp, Homo sapien
gcacccccttcccaggaaccgcagc

SEQ ID NO: 5540534 - DNA, 25 bp, Homo sapien
tcacaagtaggcacgtcgtccataa

SEQ ID NO: 5540535 - DNA, 25 bp, Homo sapien
cttcaggagagagtttctgagtttc

SEQ ID NO: 5540536 - DNA, 25 bp, Homo sapien
agtttcatgaacttggggaacattc

SEQ ID NO: 5540537 - DNA, 25 bp, Homo sapien
ccagaagaccatgtagcaccaaaaa

SEQ ID NO: 5540538 - DNA, 25 bp, Homo sapien
gagccaccccacaatgggaagaacc

SEQ ID NO: 5540539 - DNA, 25 bp, Homo sapien
tgccggttctccgcagcacgagtca

SEQ ID NO: 5540540 - DNA, 25 bp, Homo sapien
aaaaagatagctgcaaagcggaata

SEQ ID NO: 5540541 - DNA, 25 bp, Homo sapien
gtctcttgcagaagcccggtattct

SEQ ID NO: 5540542 - DNA, 25 bp, Homo sapien
gtattctgggtgaacagacacgtgc

SEQ ID NO: 5540543 - DNA, 25 bp, Homo sapien
tcactcagcagctacttggcaaggc

SEQ ID NO: 5540544 - DNA, 25 bp, Homo sapien
cttcctctgcggatcccatggggtt

SEQ ID NO: 5540545 - DNA, 25 bp, Homo sapien
ggtgcgccggatcttgctttccttt

SEQ ID NO: 5540546 - DNA, 25 bp, Homo sapien
gcccgttggtgccagactctggatg

SEQ ID NO: 5540547 - DNA, 25 bp, Homo sapien
gggtggcgtcatgtgcccattcact

SEQ ID NO: 5540548 - DNA, 25 bp, Homo sapien
acgtgcaccccatgagtgccaaggc

SEQ ID NO: 5540549 - DNA, 25 bp, Homo sapien
gggggcattctaggcctgcttcctc

SEQ ID NO: 5540550 - DNA, 25 bp, Homo sapien
gttgaagaagtggccagtacttcct

SEQ ID NO: 5540551 - DNA, 25 bp, Homo sapien
ccatggggttttgctcgccctgagg

SEQ ID NO: 5540552 - DNA, 25 bp, Homo sapien
cagaggatactataactagcaagtt

SEQ ID NO: 5540553 - DNA, 25 bp, Homo sapien
ttcaaacatcagtgagttcaaggtt

SEQ ID NO: 5540554 - DNA, 25 bp, Homo sapien
taaagtcagtagccaagaaattttc

SEQ ID NO: 5540555 - DNA, 25 bp, Homo sapien
ttgaaattcaatatggctaagccag

SEQ ID NO: 5540556 - DNA, 25 bp, Homo sapien
tcaaatcagacaggaaactagtcac

SEQ ID NO: 5540557 - DNA, 25 bp, Homo sapien
atggatcagcttactcagaggatac

SEQ ID NO: 5540558 - DNA, 25 bp, Homo sapien
tttgccaaaagatggatcagcttac

SEQ ID NO: 5540559 - DNA, 25 bp, Homo sapien
gtacaggttagctgggtcctctact

SEQ ID NO: 5540560 - DNA, 25 bp, Homo sapien
ccaggctgtgaacgccatgaaagtc

SEQ ID NO: 5540561 - DNA, 25 bp, Homo sapien
tcaagtgtatcaggattgtgggtac

SEQ ID NO: 5540562 - DNA, 25 bp, Homo sapien
agttcaaggttaaagatgacgtggg

SEQ ID NO: 5540563 - DNA, 25 bp, Homo sapien
taccacaccccatgagggaagctct

SEQ ID NO: 5540564 - DNA, 25 bp, Homo sapien
actagggacaatacagaacccattc

SEQ ID NO: 5540565 - DNA, 25 bp, Homo sapien
gagactgcacctgatggaaaagata

SEQ ID NO: 5540566 - DNA, 25 bp, Homo sapien
catagcttccaagagacatgctgac

SEQ ID NO: 5540567 - DNA, 25 bp, Homo sapien
tttctacagggctgacattgtggca

SEQ ID NO: 5540568 - DNA, 25 bp, Homo sapien
gagggaagctctaaatagccaacac

SEQ ID NO: 5540569 - DNA, 25 bp, Homo sapien
gaaaggcagaatgagtgcttcagaa

SEQ ID NO: 5540570 - DNA, 25 bp, Homo sapien
atgtagagaatgtagccattgtagc

SEQ ID NO: 5540571 - DNA, 25 bp, Homo sapien
attgtagcagcttgtgttgtcacgc

SEQ ID NO: 5540572 - DNA, 25 bp, Homo sapien
ttgaggtactctgcacatacgcacc

SEQ ID NO: 5540573 - DNA, 25 bp, Homo sapien
tatctggcctttgcatggagtgacc

SEQ ID NO: 5540574 - DNA, 25 bp, Homo sapien
cttgaataccagggtgaatggaaac

SEQ ID NO: 5540575 - DNA, 25 bp, Homo sapien
tgagaaagtcctatccaactgcaac

SEQ ID NO: 5540576 - DNA, 25 bp, Homo sapien
tctctggggtgacttcatcatagac

SEQ ID NO: 5540577 - DNA, 25 bp, Homo sapien
aatggaaacccaagattcacgagac

SEQ ID NO: 5540578 - DNA, 25 bp, Homo sapien
ttcagtatggcctaagtgtcctaaa

SEQ ID NO: 5540579 - DNA, 25 bp, Homo sapien
ttgcctgaagctctggcagatgaca

SEQ ID NO: 5540580 - DNA, 25 bp, Homo sapien
gattcacgagacattgtagctattc

SEQ ID NO: 5540581 - DNA, 25 bp, Homo sapien
tgacagtgttcagctgagaaagtcc

SEQ ID NO: 5540582 - DNA, 25 bp, Homo sapien
actgtggaaatttggtgcacgacac

SEQ ID NO: 5540583 - DNA, 25 bp, Homo sapien
ttggcaacagaatcgtgtacgctgc

SEQ ID NO: 5540584 - DNA, 25 bp, Homo sapien
gtctggggtttcatctgttctgggt

SEQ ID NO: 5540585 - DNA, 25 bp, Homo sapien
ggacagaaacaggagtgcctcctgc

SEQ ID NO: 5540586 - DNA, 25 bp, Homo sapien
tgccttcattttccagcccacagcc

SEQ ID NO: 5540587 - DNA, 25 bp, Homo sapien
gtcttcatatgccaacaggggcgct

SEQ ID NO: 5540588 - DNA, 25 bp, Homo sapien
ctgggtcttcatatgccaacagggg

SEQ ID NO: 5540589 - DNA, 25 bp, Homo sapien
aggcagatccctgaaggtcagcact

SEQ ID NO: 5540590 - DNA, 25 bp, Homo sapien
agcctgggtctcagggatcttgagg

SEQ ID NO: 5540591 - DNA, 25 bp, Homo sapien
cctcctgctgtgccaggcccatggg

SEQ ID NO: 5540592 - DNA, 25 bp, Homo sapien
aggggcgctcttgacactgtgcctt

SEQ ID NO: 5540593 - DNA, 25 bp, Homo sapien
tccagcccacagcctgggtctcagg

SEQ ID NO: 5540594 - DNA, 25 bp, Homo sapien
tgaaggtcagcactcctgggtcttc

SEQ ID NO: 5540595 - DNA, 25 bp, Homo sapien
gggcttgggaataaacatgatctat

SEQ ID NO: 5540596 - DNA, 25 bp, Homo sapien
cttttctatttgagtggagggagag

SEQ ID NO: 5540597 - DNA, 25 bp, Homo sapien
ctaattaataagagtgtcacaaatc

SEQ ID NO: 5540598 - DNA, 25 bp, Homo sapien
tgtatgcttctttcaaggctttctc

SEQ ID NO: 5540599 - DNA, 25 bp, Homo sapien
actgtagcctaataccttctttctc

SEQ ID NO: 5540600 - DNA, 25 bp, Homo sapien
aggcaaggattgggctctgttttat

SEQ ID NO: 5540601 - DNA, 25 bp, Homo sapien
ataagagtgtcacaaatcatttgga

SEQ ID NO: 5540602 - DNA, 25 bp, Homo sapien
tgcaaatccttagatcaacagctta

SEQ ID NO: 5540603 - DNA, 25 bp, Homo sapien
tccctaagatattaataaagctaac

SEQ ID NO: 5540604 - DNA, 25 bp, Homo sapien
catctctcttataaactgtagccta

SEQ ID NO: 5540605 - DNA, 25 bp, Homo sapien
ctccaaatgtgaccccttttgaccc

SEQ ID NO: 5540606 - DNA, 25 bp, Homo sapien
aaagctaactagttttggctcagat

SEQ ID NO: 5540607 - DNA, 25 bp, Homo sapien
attggacaaccatgagtgaccttca

SEQ ID NO: 5540608 - DNA, 25 bp, Homo sapien
actaccagtagttggaaaaactatc

SEQ ID NO: 5540609 - DNA, 25 bp, Homo sapien
cattcagcaatgatggagaagatga

SEQ ID NO: 5540610 - DNA, 25 bp, Homo sapien
attgcggtaaagagattaaaactat

SEQ ID NO: 5540611 - DNA, 25 bp, Homo sapien
gctcagaccaccagggagaatttca

SEQ ID NO: 5540612 - DNA, 25 bp, Homo sapien
cagggagaatttcaggataactgtc

SEQ ID NO: 5540613 - DNA, 25 bp, Homo sapien
agtcagtaaatgtgctcagaccacc

SEQ ID NO: 5540614 - DNA, 25 bp, Homo sapien
tctggacaaaagaccaatgatggtc

SEQ ID NO: 5540615 - DNA, 25 bp, Homo sapien
ttcatgcttcatggacaaggatttc

SEQ ID NO: 5540616 - DNA, 25 bp, Homo sapien
cctcaatgccaaggattcaaataac

SEQ ID NO: 5540617 - DNA, 25 bp, Homo sapien
agaggaggctccatcccatctggac

SEQ ID NO: 5540618 - DNA, 25 bp, Homo sapien
accagccaaactgggtcgtgtgtgt

SEQ ID NO: 5540619 - DNA, 25 bp, Homo sapien
gagttccagcgttggttgtggagta

SEQ ID NO: 5540620 - DNA, 25 bp, Homo sapien
tgccgcatccggtttaggggcggca

SEQ ID NO: 5540621 - DNA, 25 bp, Homo sapien
cagcagtagcacctgtttggtcctc

SEQ ID NO: 5540622 - DNA, 25 bp, Homo sapien
caattaggcacactctggaggtggt

SEQ ID NO: 5540623 - DNA, 25 bp, Homo sapien
ctgcgcgtttgcccagtacagcttg

SEQ ID NO: 5540624 - DNA, 25 bp, Homo sapien
ctcaggtctgtatgctcagcagcac

SEQ ID NO: 5540625 - DNA, 25 bp, Homo sapien
agcgtggatgaattgtaagtccccc

SEQ ID NO: 5540626 - DNA, 25 bp, Homo sapien
aggtggtgatgcaatgcaaagaaat

SEQ ID NO: 5540627 - DNA, 25 bp, Homo sapien
ttgatgggatttcaacagcgtggat

SEQ ID NO: 5540628 - DNA, 25 bp, Homo sapien
gagagaaaaggctgcaccagccaaa

SEQ ID NO: 5540629 - DNA, 25 bp, Homo sapien
ttatcgtaagcgtttaagaggcaac

SEQ ID NO: 5540630 - DNA, 25 bp, Homo sapien
tcagtcctagacacgcagcattact

SEQ ID NO: 5540631 - DNA, 25 bp, Homo sapien
gaaaggaaatctatgcatggtgtct

SEQ ID NO: 5540632 - DNA, 25 bp, Homo sapien
gtccctggagctacactggatattt

SEQ ID NO: 5540633 - DNA, 25 bp, Homo sapien
ttacacagaagttgtcagacaccac

SEQ ID NO: 5540634 - DNA, 25 bp, Homo sapien
tagctcagttttgcaaagggggaga

SEQ ID NO: 5540635 - DNA, 25 bp, Homo sapien
aggtttttcccaaggtcagccagcc

SEQ ID NO: 5540636 - DNA, 25 bp, Homo sapien
tgtagaagaataaaagtgatgtccc

SEQ ID NO: 5540637 - DNA, 25 bp, Homo sapien
aagaggcaacagtgaaatatccatt

SEQ ID NO: 5540638 - DNA, 25 bp, Homo sapien
tgcccagacaccacacagtagatct

SEQ ID NO: 5540639 - DNA, 25 bp, Homo sapien
tcagccccatggcaaggtagaaaaa

SEQ ID NO: 5540640 - DNA, 25 bp, Homo sapien
gagggactaggacactgtttagaag

SEQ ID NO: 5540641 - DNA, 25 bp, Homo sapien
cttgaggttgtgattaaacaatccc

SEQ ID NO: 5540642 - DNA, 25 bp, Homo sapien
cagtaagaacctacaaacgtgtttg

SEQ ID NO: 5540643 - DNA, 25 bp, Homo sapien
aaacaatccccaactcgtcttcatc

SEQ ID NO: 5540644 - DNA, 25 bp, Homo sapien
tctggtccagtaagaacctacaaac

SEQ ID NO: 5540645 - DNA, 25 bp, Homo sapien
cactaaatacactgaccttcgctga

SEQ ID NO: 5540646 - DNA, 25 bp, Homo sapien
tcaaaatgcactcaaggagagggaa

SEQ ID NO: 5540647 - DNA, 25 bp, Homo sapien
caggtggctacagaagccagctctt

SEQ ID NO: 5540648 - DNA, 25 bp, Homo sapien
cactgtttagaaggggtaattacac

SEQ ID NO: 5540649 - DNA, 25 bp, Homo sapien
cttcgctgaaaaatagaagggacag

SEQ ID NO: 5540650 - DNA, 25 bp, Homo sapien
gccagctcttaccccttttgccgtc

SEQ ID NO: 5540651 - DNA, 25 bp, Homo sapien
tcccaaagaggatttaaacagtcca

SEQ ID NO: 5540652 - DNA, 25 bp, Homo sapien
gctggacctatgagtggcctctcta

SEQ ID NO: 5540653 - DNA, 25 bp, Homo sapien
atatccagatactgagggctgcaac

SEQ ID NO: 5540654 - DNA, 25 bp, Homo sapien
gaggccagcagctggacctatgagt

SEQ ID NO: 5540655 - DNA, 25 bp, Homo sapien
gagggctgcaacaagaagcctcttt

SEQ ID NO: 5540656 - DNA, 25 bp, Homo sapien
gggctggagcaaatgtcccaattcc

SEQ ID NO: 5540657 - DNA, 25 bp, Homo sapien
tctggtcatgttcacagctagggct

SEQ ID NO: 5540658 - DNA, 25 bp, Homo sapien
tttaaacagtccagaaagcagggat

SEQ ID NO: 5540659 - DNA, 25 bp, Homo sapien
gaagaggggatgagtacattcccca

SEQ ID NO: 5540660 - DNA, 25 bp, Homo sapien
caattccagtgaaggctttggagag

SEQ ID NO: 5540661 - DNA, 25 bp, Homo sapien
gctttccacagccatgtcaacagtc

SEQ ID NO: 5540662 - DNA, 25 bp, Homo sapien
gcaccctttacgcgctgagatgaaa

SEQ ID NO: 5540663 - DNA, 25 bp, Homo sapien
ttctgggaatgtggaatttcaattc

SEQ ID NO: 5540664 - DNA, 25 bp, Homo sapien
tacacaagtcaaagctagtttctgc

SEQ ID NO: 5540665 - DNA, 25 bp, Homo sapien
aggaacttattactagaggagcagc

SEQ ID NO: 5540666 - DNA, 25 bp, Homo sapien
gtggtttgcttgttgtggcttctgc

SEQ ID NO: 5540667 - DNA, 25 bp, Homo sapien
ttttgttgagactaagagcttatta

SEQ ID NO: 5540668 - DNA, 25 bp, Homo sapien
tgtaaatggtagtagtgtggaaact

SEQ ID NO: 5540669 - DNA, 25 bp, Homo sapien
aggagcagctgagtgttaaattctg

SEQ ID NO: 5540670 - DNA, 25 bp, Homo sapien
ttgacagtgcatcgttacacaagtc

SEQ ID NO: 5540671 - DNA, 25 bp, Homo sapien
gaggagttaatgtggatttctgcca

SEQ ID NO: 5540672 - DNA, 25 bp, Homo sapien
aaaggaactactgatattcttgggc

SEQ ID NO: 5540673 - DNA, 25 bp, Homo sapien
aagcaggaagcatgatcatactctc

SEQ ID NO: 5540674 - DNA, 25 bp, Homo sapien
ctgaatctggcaaacatgagcatgt

SEQ ID NO: 5540675 - DNA, 25 bp, Homo sapien
taccaacccatgaacaagtgatctt

SEQ ID NO: 5540676 - DNA, 25 bp, Homo sapien
tacaggtgttccacagcaggtaagt

SEQ ID NO: 5540677 - DNA, 25 bp, Homo sapien
agattcaaatgcagctcgggattac

SEQ ID NO: 5540678 - DNA, 25 bp, Homo sapien
aacttattagctagggccaggtttc

SEQ ID NO: 5540679 - DNA, 25 bp, Homo sapien
gtagagatgcttccatgggtcccaa

SEQ ID NO: 5540680 - DNA, 25 bp, Homo sapien
caggtttcaggaggccactgaatct

SEQ ID NO: 5540681 - DNA, 25 bp, Homo sapien
tttgcttgatgagttaaagtgggta

SEQ ID NO: 5540682 - DNA, 25 bp, Homo sapien
gctttagaaaaaagctggggctcag

SEQ ID NO: 5540683 - DNA, 25 bp, Homo sapien
ggggctcagaatataagatccagat

SEQ ID NO: 5540684 - DNA, 25 bp, Homo sapien
atgcaccagtgttggctcatatccc

SEQ ID NO: 5540685 - DNA, 25 bp, Homo sapien
cacctaggcttcctacagtgctggg

SEQ ID NO: 5540686 - DNA, 25 bp, Homo sapien
gctaagttttgaacccagggatgta

SEQ ID NO: 5540687 - DNA, 25 bp, Homo sapien
ataaaataaatcagcagacaaaggc

SEQ ID NO: 5540688 - DNA, 25 bp, Homo sapien
ctaccatcggaaacagcaactgcta

SEQ ID NO: 5540689 - DNA, 25 bp, Homo sapien
gcccacgaagacttggagtcctcgt

SEQ ID NO: 5540690 - DNA, 25 bp, Homo sapien
cacctgcctgcccacgaagacttgg

SEQ ID NO: 5540691 - DNA, 25 bp, Homo sapien
agacaaaggctttgtaagtctgtta

SEQ ID NO: 5540692 - DNA, 25 bp, Homo sapien
aaagtagtagtcatgcaccagtgtt

SEQ ID NO: 5540693 - DNA, 25 bp, Homo sapien
acccagcctggagctaagttttgaa

SEQ ID NO: 5540694 - DNA, 25 bp, Homo sapien
agcaactgctaaggtatcatggaat

SEQ ID NO: 5540695 - DNA, 25 bp, Homo sapien
aacaatcagacttgacaaagatgac

SEQ ID NO: 5540696 - DNA, 25 bp, Homo sapien
ttagagcataattgttaaaatcttc

SEQ ID NO: 5540697 - DNA, 25 bp, Homo sapien
ttgtcatgttccatcttagagcata

SEQ ID NO: 5540698 - DNA, 25 bp, Homo sapien
agttaaagcagagtaacgttggaaa

SEQ ID NO: 5540699 - DNA, 25 bp, Homo sapien
attcacatactcaacaatcagactt

SEQ ID NO: 5540700 - DNA, 25 bp, Homo sapien
gacatatttgtagttaaagcagagt

SEQ ID NO: 5540701 - DNA, 25 bp, Homo sapien
ggggtgatcccagtgactcctaaat

SEQ ID NO: 5540702 - DNA, 25 bp, Homo sapien
aacattgagccaaaaacatccattc

SEQ ID NO: 5540703 - DNA, 25 bp, Homo sapien
gagccaaaaacatccattcacatac

SEQ ID NO: 5540704 - DNA, 25 bp, Homo sapien
ctctaacattgagccaaaaacatcc

SEQ ID NO: 5540705 - DNA, 25 bp, Homo sapien
tgtagttaaagcagagtaacgttgg

SEQ ID NO: 5540706 - DNA, 25 bp, Homo sapien
tggtaaccaagaatcagtgagaagc

SEQ ID NO: 5540707 - DNA, 25 bp, Homo sapien
tcaactcaaattagccttaagcccc

SEQ ID NO: 5540708 - DNA, 25 bp, Homo sapien
tggtggaaagaccctgccaattttg

SEQ ID NO: 5540709 - DNA, 25 bp, Homo sapien
tactagacagctgccatagtcttac

SEQ ID NO: 5540710 - DNA, 25 bp, Homo sapien
gtgagaagcacttgtactagacagc

SEQ ID NO: 5540711 - DNA, 25 bp, Homo sapien
tacagtaattacaagtagtgtcacc

SEQ ID NO: 5540712 - DNA, 25 bp, Homo sapien
aggctcgcctttgcaggcaaggcaa

SEQ ID NO: 5540713 - DNA, 25 bp, Homo sapien
tagtgtcaccatcagtgacaagggc

SEQ ID NO: 5540714 - DNA, 25 bp, Homo sapien
tactatcagccatcaaaaagaatga

SEQ ID NO: 5540715 - DNA, 25 bp, Homo sapien
ccacagcataggaatccgttcatct

SEQ ID NO: 5540716 - DNA, 25 bp, Homo sapien
atctgagtgttctgccaaaaaatac

SEQ ID NO: 5540717 - DNA, 25 bp, Homo sapien
caaactccttaagagacatgggcac

SEQ ID NO: 5540718 - DNA, 25 bp, Homo sapien
atcgcctggtcctttagtgcctact

SEQ ID NO: 5540719 - DNA, 25 bp, Homo sapien
caatcctagaaacgtgaaggagcag

SEQ ID NO: 5540720 - DNA, 25 bp, Homo sapien
ttatgatttgttctgggaggagtag

SEQ ID NO: 5540721 - DNA, 25 bp, Homo sapien
acttggtgtaagttatcgcctggtc

SEQ ID NO: 5540722 - DNA, 25 bp, Homo sapien
taaatgttgccgggtccatgaattc

SEQ ID NO: 5540723 - DNA, 25 bp, Homo sapien
catcgtcgagatacataactggaac

SEQ ID NO: 5540724 - DNA, 25 bp, Homo sapien
cctttagggactgtgactgtgtcac

SEQ ID NO: 5540725 - DNA, 25 bp, Homo sapien
gaatccagagtgatgtgtatgggtc

SEQ ID NO: 5540726 - DNA, 25 bp, Homo sapien
tgtgtgagaaaatctgtgatgacct

SEQ ID NO: 5540727 - DNA, 25 bp, Homo sapien
tcatagtctggcaaaggtagagtga

SEQ ID NO: 5540728 - DNA, 25 bp, Homo sapien
tacgcccgacccgtttcgcgggagc

SEQ ID NO: 5540729 - DNA, 25 bp, Homo sapien
gctcccgcgaaacgggtcgggcgta

SEQ ID NO: 5540730 - DNA, 25 bp, Homo sapien
aggatgggtgtttattgggattaac

SEQ ID NO: 5540731 - DNA, 25 bp, Homo sapien
ttttgtagccccctggcagatggga

SEQ ID NO: 5540732 - DNA, 25 bp, Homo sapien
tgccgcactcgctacagccagggca

SEQ ID NO: 5540733 - DNA, 25 bp, Homo sapien
ctcccatcagccagaattgcccatc

SEQ ID NO: 5540734 - DNA, 25 bp, Homo sapien
aggccacctgctgccgcactcgcta

SEQ ID NO: 5540735 - DNA, 25 bp, Homo sapien
acacttgtgaaaagatggtggagag

SEQ ID NO: 5540736 - DNA, 25 bp, Homo sapien
ggagagggcagtcaactgctatgtg

SEQ ID NO: 5540737 - DNA, 25 bp, Homo sapien
ctgctatgtggcccaagaatgcctc

SEQ ID NO: 5540738 - DNA, 25 bp, Homo sapien
ctgccataaagctgcctaggtgcct

SEQ ID NO: 5540739 - DNA, 25 bp, Homo sapien
gcctaggtgcctgacccaggctgca

SEQ ID NO: 5540740 - DNA, 25 bp, Homo sapien
ggtggtgcatctccgcctgccataa

SEQ ID NO: 5540741 - DNA, 25 bp, Homo sapien
ttcagaactacccctaggcaaattc

SEQ ID NO: 5540742 - DNA, 25 bp, Homo sapien
tacatgcaagaaaaacacaagcgat

SEQ ID NO: 5540743 - DNA, 25 bp, Homo sapien
ttgaaaaattgattaatgtgaagaa

SEQ ID NO: 5540744 - DNA, 25 bp, Homo sapien
ggtttgttaccagttagctatataa

SEQ ID NO: 5540745 - DNA, 25 bp, Homo sapien
gacagctagtttaaggtagaagacc

SEQ ID NO: 5540746 - DNA, 25 bp, Homo sapien
aagaaaaacacaagcgatgttcatc

SEQ ID NO: 5540747 - DNA, 25 bp, Homo sapien
tagaagaccttcataatccaattac

SEQ ID NO: 5540748 - DNA, 25 bp, Homo sapien
aatagaaactacatgcaagaaaaac

SEQ ID NO: 5540749 - DNA, 25 bp, Homo sapien
atgaagccaaaacattaacaccatt

SEQ ID NO: 5540750 - DNA, 25 bp, Homo sapien
atataacctagagccaatcaatctc

SEQ ID NO: 5540751 - DNA, 25 bp, Homo sapien
ttgagtttaaagttgacagctagtt

SEQ ID NO: 5540752 - DNA, 25 bp, Homo sapien
tttcatctgaagcaaacggcaagga

SEQ ID NO: 5540753 - DNA, 25 bp, Homo sapien
gtttctaaaactcaggccctgcttg

SEQ ID NO: 5540754 - DNA, 25 bp, Homo sapien
aagcaaacggcaaggatttggtata

SEQ ID NO: 5540755 - DNA, 25 bp, Homo sapien
gctggcccacggtgggcatctgtta

SEQ ID NO: 5540756 - DNA, 25 bp, Homo sapien
aggttacctaaaactcatgaagtcc

SEQ ID NO: 5540757 - DNA, 25 bp, Homo sapien
aggcatgaggactactaccagtttc

SEQ ID NO: 5540758 - DNA, 25 bp, Homo sapien
actgaatttcaccaaggccagtttc

SEQ ID NO: 5540759 - DNA, 25 bp, Homo sapien
ggtgggcatctgttaccggcctact

SEQ ID NO: 5540760 - DNA, 25 bp, Homo sapien
ttggtgagttaaccactcgtgctgc

SEQ ID NO: 5540761 - DNA, 25 bp, Homo sapien
ccactcgtgctgctgtgcatgtgga

SEQ ID NO: 5540762 - DNA, 25 bp, Homo sapien
aaggccagtttcttggtgagttaac

SEQ ID NO: 5540763 - DNA, 25 bp, Homo sapien
ggaagaggggcacctttctcatcac

SEQ ID NO: 5540764 - DNA, 25 bp, Homo sapien
gtattagtgtcgcaagcacaggagt

SEQ ID NO: 5540765 - DNA, 25 bp, Homo sapien
tggagagaacagtattagtgtcgca

SEQ ID NO: 5540766 - DNA, 25 bp, Homo sapien
agtcagaggtaacaaaggcatatat

SEQ ID NO: 5540767 - DNA, 25 bp, Homo sapien
tgcctaccttttgggctggggaaga

SEQ ID NO: 5540768 - DNA, 25 bp, Homo sapien
gcctgtccaaaatgaaccacgcaac

SEQ ID NO: 5540769 - DNA, 25 bp, Homo sapien
ggtaggctacaggttcacagcttca

SEQ ID NO: 5540770 - DNA, 25 bp, Homo sapien
gtctttaagcgacgtgagtcagagg

SEQ ID NO: 5540771 - DNA, 25 bp, Homo sapien
caggaagcatgagtcgctgaattgg

SEQ ID NO: 5540772 - DNA, 25 bp, Homo sapien
ttctggagcagtgttcacaacggga

SEQ ID NO: 5540773 - DNA, 25 bp, Homo sapien
taccgaacaaaggtgctccggtgca

SEQ ID NO: 5540774 - DNA, 25 bp, Homo sapien
aaaaggcagccttgtgttcccactt

SEQ ID NO: 5540775 - DNA, 25 bp, Homo sapien
ttcaggtgagcacctgtagctggca

SEQ ID NO: 5540776 - DNA, 25 bp, Homo sapien
gaagtgggaatgcacactccatctg

SEQ ID NO: 5540777 - DNA, 25 bp, Homo sapien
ggcgctgccattgcaggaagacaaa

SEQ ID NO: 5540778 - DNA, 25 bp, Homo sapien
gtttcacgctaggctgaaagtggca

SEQ ID NO: 5540779 - DNA, 25 bp, Homo sapien
aagagactgtctagagagtaacgtg

SEQ ID NO: 5540780 - DNA, 25 bp, Homo sapien
cccacttcagagccccaacttctcc

SEQ ID NO: 5540781 - DNA, 25 bp, Homo sapien
cattccagggtaccataaagggaag

SEQ ID NO: 5540782 - DNA, 25 bp, Homo sapien
agggttaatatggtctggcttgctt

SEQ ID NO: 5540783 - DNA, 25 bp, Homo sapien
gggcagctccatcattccagggtac

SEQ ID NO: 5540784 - DNA, 25 bp, Homo sapien
agaaatatacaacctcggcgctgcc

SEQ ID NO: 5540785 - DNA, 25 bp, Homo sapien
gctggtcactcatcaatcacagggc

SEQ ID NO: 5540786 - DNA, 25 bp, Homo sapien
ctgagttaggtcacaatagcaaaga

SEQ ID NO: 5540787 - DNA, 25 bp, Homo sapien
tagcaaagagacctcaatagctcac

SEQ ID NO: 5540788 - DNA, 25 bp, Homo sapien
cttgctggcaagtcttaatgtaaga

SEQ ID NO: 5540789 - DNA, 25 bp, Homo sapien
gcgcacagagtgttatttgctgacc

SEQ ID NO: 5540790 - DNA, 25 bp, Homo sapien
ttaagccagtcaaagttcatgtctc

SEQ ID NO: 5540791 - DNA, 25 bp, Homo sapien
gttggagatgtgcagattttggaaa

SEQ ID NO: 5540792 - DNA, 25 bp, Homo sapien
gtatagagttcagagctgatcgaac

SEQ ID NO: 5540793 - DNA, 25 bp, Homo sapien
ctttaacagcgaagtcagaagttgt

SEQ ID NO: 5540794 - DNA, 25 bp, Homo sapien
gaatttcagccagtaagaatgggaa

SEQ ID NO: 5540795 - DNA, 25 bp, Homo sapien
ctccacacatggctggtcactcatc

SEQ ID NO: 5540796 - DNA, 25 bp, Homo sapien
cctaggagtgggtcctcccattttc

SEQ ID NO: 5540797 - DNA, 25 bp, Homo sapien
ttccaggcgaggtcaacatcgttta

SEQ ID NO: 5540798 - DNA, 25 bp, Homo sapien
tctcactccaaacggagagagactg

SEQ ID NO: 5540799 - DNA, 25 bp, Homo sapien
cccatactctcctaggagtgggtcc

SEQ ID NO: 5540800 - DNA, 25 bp, Homo sapien
ccttcagccctgagagctgtcggga

SEQ ID NO: 5540801 - DNA, 25 bp, Homo sapien
caacatcgtttagcaagcagagtga

SEQ ID NO: 5540802 - DNA, 25 bp, Homo sapien
tcccattttccaggcgaggtcaaca

SEQ ID NO: 5540803 - DNA, 25 bp, Homo sapien
ccctcagctgtgctgatgagagggg

SEQ ID NO: 5540804 - DNA, 25 bp, Homo sapien
tataagcagcacccttggcggtttt

SEQ ID NO: 5540805 - DNA, 25 bp, Homo sapien
cttctcaatgagatgcccctcccac

SEQ ID NO: 5540806 - DNA, 25 bp, Homo sapien
tgcttgtaaaaatgccttgagaccc

SEQ ID NO: 5540807 - DNA, 25 bp, Homo sapien
ggtctggcagatttgagttcggata

SEQ ID NO: 5540808 - DNA, 25 bp, Homo sapien
accaaaaataagcagcccactcctc

SEQ ID NO: 5540809 - DNA, 25 bp, Homo sapien
ggcagcagctgttggcttcatagct

SEQ ID NO: 5540810 - DNA, 25 bp, Homo sapien
ctgcacacaggcacctactggtata

SEQ ID NO: 5540811 - DNA, 25 bp, Homo sapien
gcggagcacacctaatggcttccct

SEQ ID NO: 5540812 - DNA, 25 bp, Homo sapien
acagctagctcatgccagcactggc

SEQ ID NO: 5540813 - DNA, 25 bp, Homo sapien
gagttcggatagagttgccatcact

SEQ ID NO: 5540814 - DNA, 25 bp, Homo sapien
aatatgccattagagccccagtttc

SEQ ID NO: 5540815 - DNA, 25 bp, Homo sapien
gaaaagatgaatgaacaagtcccca

SEQ ID NO: 5540816 - DNA, 25 bp, Homo sapien
tgtctggagctgcacgcgttaatat

SEQ ID NO: 5540817 - DNA, 25 bp, Homo sapien
gttttcagttcaagacagctagctc

SEQ ID NO: 5540818 - DNA, 25 bp, Homo sapien
gtcttatattctttgttttaatact

SEQ ID NO: 5540819 - DNA, 25 bp, Homo sapien
agtattaaaacaaagaatataagac

SEQ ID NO: 5540820 - DNA, 25 bp, Homo sapien
ccgtcttatattctttgttttaata

SEQ ID NO: 5540821 - DNA, 25 bp, Homo sapien
tattaaaacaaagaatataagacgg

SEQ ID NO: 5540822 - DNA, 25 bp, Homo sapien
gtagttagcgactgcgctagaggcc

SEQ ID NO: 5540823 - DNA, 25 bp, Homo sapien
ggaactatgctaggccccagtgtgt

SEQ ID NO: 5540824 - DNA, 25 bp, Homo sapien
ggaaaagtgaacagtgcctgctttt

SEQ ID NO: 5540825 - DNA, 25 bp, Homo sapien
gactgggccactcttggttgtttgt

SEQ ID NO: 5540826 - DNA, 25 bp, Homo sapien
cccagcagagtagttagcgactgcg

SEQ ID NO: 5540827 - DNA, 25 bp, Homo sapien
cacagccaaggagttaatagggtgt

SEQ ID NO: 5540828 - DNA, 25 bp, Homo sapien
ggagaaaaaggccctgaattgcact

SEQ ID NO: 5540829 - DNA, 25 bp, Homo sapien
agctcctggcataggcaggaactat

SEQ ID NO: 5540830 - DNA, 25 bp, Homo sapien
agatttgagactgagctagatgtgg

SEQ ID NO: 5540831 - DNA, 25 bp, Homo sapien
gtttattgaggttgcaacagaggaa

SEQ ID NO: 5540832 - DNA, 25 bp, Homo sapien
aacagaggaaggccattaagaataa

SEQ ID NO: 5540833 - DNA, 25 bp, Homo sapien
tatatcattgacaccgagcggctgg

SEQ ID NO: 5540834 - DNA, 25 bp, Homo sapien
gctcccactccggcctctggcggac

SEQ ID NO: 5540835 - DNA, 25 bp, Homo sapien
tgcacaccgctgatgaaccccttca

SEQ ID NO: 5540836 - DNA, 25 bp, Homo sapien
ggggtccatcaatcgcagccagccc

SEQ ID NO: 5540837 - DNA, 25 bp, Homo sapien
gccctcctggaccaggtggacatca

SEQ ID NO: 5540838 - DNA, 25 bp, Homo sapien
tgggatcagcgtctacatagcgtat

SEQ ID NO: 5540839 - DNA, 25 bp, Homo sapien
ggtgaccctcgctgggatcagcgtc

SEQ ID NO: 5540840 - DNA, 25 bp, Homo sapien
tgccgctcagcctgatcctgatggt

SEQ ID NO: 5540841 - DNA, 25 bp, Homo sapien
gtggacatcagcttcggctggtccc

SEQ ID NO: 5540842 - DNA, 25 bp, Homo sapien
gggacatttgtgattctgctgccgc

SEQ ID NO: 5540843 - DNA, 25 bp, Homo sapien
atcggcacggacttctggtatatca

SEQ ID NO: 5540844 - DNA, 25 bp, Homo sapien
gaaataaatgtgtataaagacaagc

SEQ ID NO: 5540845 - DNA, 25 bp, Homo sapien
tgaaggtaatcagaatatgtcaccc

SEQ ID NO: 5540846 - DNA, 25 bp, Homo sapien
tgccttcggacacctaaaattgctt

SEQ ID NO: 5540847 - DNA, 25 bp, Homo sapien
cagaatgctgtgtactgaagcaatc

SEQ ID NO: 5540848 - DNA, 25 bp, Homo sapien
cccacggtttcttgccttcggacac

SEQ ID NO: 5540849 - DNA, 25 bp, Homo sapien
taattcagagccacagtgctaaagc

SEQ ID NO: 5540850 - DNA, 25 bp, Homo sapien
attagtgacaaatgaaagtaaaatc

SEQ ID NO: 5540851 - DNA, 25 bp, Homo sapien
cttaccagctcagggatgtcagcag

SEQ ID NO: 5540852 - DNA, 25 bp, Homo sapien
acagtgctaaagcatgaagccatgc

SEQ ID NO: 5540853 - DNA, 25 bp, Homo sapien
ttaccggagaccattcttaccagct

SEQ ID NO: 5540854 - DNA, 25 bp, Homo sapien
tataaagacaagcttctgaaggtaa

SEQ ID NO: 5540855 - DNA, 25 bp, Homo sapien
cctgtggatactggtgctgctttcc

SEQ ID NO: 5540856 - DNA, 25 bp, Homo sapien
atgttgcactatgcaggggatgtgt

SEQ ID NO: 5540857 - DNA, 25 bp, Homo sapien
gaatgcaggcttttttgagtggccc

SEQ ID NO: 5540858 - DNA, 25 bp, Homo sapien
aattgggtctaacaaggtcctcctg

SEQ ID NO: 5540859 - DNA, 25 bp, Homo sapien
aacaacaagtgttcagaatgcaggc

SEQ ID NO: 5540860 - DNA, 25 bp, Homo sapien
ttgttgggtccatatactagttctc

SEQ ID NO: 5540861 - DNA, 25 bp, Homo sapien
gtagtaaagaattggagttgttgac

SEQ ID NO: 5540862 - DNA, 25 bp, Homo sapien
gtgttcactagatgccatatggctt

SEQ ID NO: 5540863 - DNA, 25 bp, Homo sapien
tgacgaccagaagcaccaaatacta

SEQ ID NO: 5540864 - DNA, 25 bp, Homo sapien
agtggcccttgagaactccatggat

SEQ ID NO: 5540865 - DNA, 25 bp, Homo sapien
gtgaagaaaatgcagtgaataatac

SEQ ID NO: 5540866 - DNA, 25 bp, Homo sapien
ctctcagccctgtccttccccagag

SEQ ID NO: 5540867 - DNA, 25 bp, Homo sapien
ctcctctcccccaaagcctgtgctc

SEQ ID NO: 5540868 - DNA, 25 bp, Homo sapien
ctttttagaatatgactcggtccca

SEQ ID NO: 5540869 - DNA, 25 bp, Homo sapien
acagaaacacttggggatttgccaa

SEQ ID NO: 5540870 - DNA, 25 bp, Homo sapien
ccaaaggtcccagcacttgctctca

SEQ ID NO: 5540871 - DNA, 25 bp, Homo sapien
ttactcctgacaagctccccagggg

SEQ ID NO: 5540872 - DNA, 25 bp, Homo sapien
caaggacacgcagctcaagtctgtt

SEQ ID NO: 5540873 - DNA, 25 bp, Homo sapien
atgtcctcctcctgttctggggacc

SEQ ID NO: 5540874 - DNA, 25 bp, Homo sapien
aatatgactcggtcccaaaggtccc

SEQ ID NO: 5540875 - DNA, 25 bp, Homo sapien
acgcagctcaagtctgttctgtagc

SEQ ID NO: 5540876 - DNA, 25 bp, Homo sapien
tcctgttactcctgacaagctcccc

SEQ ID NO: 5540877 - DNA, 25 bp, Homo sapien
gtggagtgattcctgtgtggccatc

SEQ ID NO: 5540878 - DNA, 25 bp, Homo sapien
tgtatctggaggaaatcagttgcaa

SEQ ID NO: 5540879 - DNA, 25 bp, Homo sapien
gcctgaagctcttgatgctggtggc

SEQ ID NO: 5540880 - DNA, 25 bp, Homo sapien
ccctcaccagagccacgctcctcca

SEQ ID NO: 5540881 - DNA, 25 bp, Homo sapien
gggctgtaatgtttcgagatccttc

SEQ ID NO: 5540882 - DNA, 25 bp, Homo sapien
gttgcaaggcatcagagcataagtg

SEQ ID NO: 5540883 - DNA, 25 bp, Homo sapien
agcataagtgtgggtctcacctcca

SEQ ID NO: 5540884 - DNA, 25 bp, Homo sapien
gcttcagttgaagcccgtgccttgc

SEQ ID NO: 5540885 - DNA, 25 bp, Homo sapien
gctgaggcctccacagtttcaccct

SEQ ID NO: 5540886 - DNA, 25 bp, Homo sapien
ctgccccagggtatagcttgggcac

SEQ ID NO: 5540887 - DNA, 25 bp, Homo sapien
cagagggacaagaggtttccctgtg

SEQ ID NO: 5540888 - DNA, 25 bp, Homo sapien
tcacatccagcatgagtgactcatt

SEQ ID NO: 5540889 - DNA, 25 bp, Homo sapien
gtttggtttgtttggacctagtgca

SEQ ID NO: 5540890 - DNA, 25 bp, Homo sapien
tattacagcttaagatatgtcccat

SEQ ID NO: 5540891 - DNA, 25 bp, Homo sapien
ttgtttggacctagtgcataagctc

SEQ ID NO: 5540892 - DNA, 25 bp, Homo sapien
attaaacataagagggaagctttag

SEQ ID NO: 5540893 - DNA, 25 bp, Homo sapien
ttagactcgaatctcactgtgaaac

SEQ ID NO: 5540894 - DNA, 25 bp, Homo sapien
ctgtgaaacagcagaactgtgggtt

SEQ ID NO: 5540895 - DNA, 25 bp, Homo sapien
aattatgtcacatccagcatgagtg

SEQ ID NO: 5540896 - DNA, 25 bp, Homo sapien
agaaacagccagatttattacagct

SEQ ID NO: 5540897 - DNA, 25 bp, Homo sapien
agcagaactgtgggtttgtaaagtg

SEQ ID NO: 5540898 - DNA, 25 bp, Homo sapien
agtgcataagctcagtccagaatcc

SEQ ID NO: 5540899 - DNA, 25 bp, Homo sapien
ggataacaatggagaccttgattcc

SEQ ID NO: 5540900 - DNA, 25 bp, Homo sapien
caaggatatagcaagactttcccct

SEQ ID NO: 5540901 - DNA, 25 bp, Homo sapien
atacttgaaacagagaacacaggtc

SEQ ID NO: 5540902 - DNA, 25 bp, Homo sapien
agtgacattcacagttacagcaggt

SEQ ID NO: 5540903 - DNA, 25 bp, Homo sapien
ggctaagtaaaaacatctatggggc

SEQ ID NO: 5540904 - DNA, 25 bp, Homo sapien
tatttgtccttgtgtgctagtcttt

SEQ ID NO: 5540905 - DNA, 25 bp, Homo sapien
ttagagaagtcatttaccaaaacta

SEQ ID NO: 5540906 - DNA, 25 bp, Homo sapien
acatctatggggctaggataacaat

SEQ ID NO: 5540907 - DNA, 25 bp, Homo sapien
gaacacaggtctactcagaagaatt

SEQ ID NO: 5540908 - DNA, 25 bp, Homo sapien
cctggctcaaggatatagcaagact

SEQ ID NO: 5540909 - DNA, 25 bp, Homo sapien
tgtggcaaagcacaaccagaaaaga

SEQ ID NO: 5540910 - DNA, 25 bp, Homo sapien
gattagaggtactatgaaatgcatc

SEQ ID NO: 5540911 - DNA, 25 bp, Homo sapien
attgcactagggaacagtcactgtt

SEQ ID NO: 5540912 - DNA, 25 bp, Homo sapien
tctgacccaagtagtaatgattttc

SEQ ID NO: 5540913 - DNA, 25 bp, Homo sapien
agggtaagagaacacatgccatcta

SEQ ID NO: 5540914 - DNA, 25 bp, Homo sapien
ttcctgaaagagcagcttaagcaag

SEQ ID NO: 5540915 - DNA, 25 bp, Homo sapien
ttgtgaagcagagtgtcataaatct

SEQ ID NO: 5540916 - DNA, 25 bp, Homo sapien
ggccgtgagatacaggttttatttg

SEQ ID NO: 5540917 - DNA, 25 bp, Homo sapien
agcagcttaagcaagatatgtgggc

SEQ ID NO: 5540918 - DNA, 25 bp, Homo sapien
aggagcaaaaaccatagacctaagc

SEQ ID NO: 5540919 - DNA, 25 bp, Homo sapien
tgtgtgtgtacaagtatatgatgaa

SEQ ID NO: 5540920 - DNA, 25 bp, Homo sapien
ggggagtatttgacagagtaattgc

SEQ ID NO: 5540921 - DNA, 25 bp, Homo sapien
gatactcattgtggaaataagttcc

SEQ ID NO: 5540922 - DNA, 25 bp, Homo sapien
aggtagtgccagtaggatgttgata

SEQ ID NO: 5540923 - DNA, 25 bp, Homo sapien
ggccagagccagttgcttggtattc

SEQ ID NO: 5540924 - DNA, 25 bp, Homo sapien
aaagcctaggtgagatctggccttg

SEQ ID NO: 5540925 - DNA, 25 bp, Homo sapien
tgggggtggtccattgcttccccca

SEQ ID NO: 5540926 - DNA, 25 bp, Homo sapien
gtaaccatcaaaggagaaaatgggc

SEQ ID NO: 5540927 - DNA, 25 bp, Homo sapien
tcctatcttagtggaaggaaggcct

SEQ ID NO: 5540928 - DNA, 25 bp, Homo sapien
gatgttgatacgatacgagaagggg

SEQ ID NO: 5540929 - DNA, 25 bp, Homo sapien
caaagccgcatctaaagtcccctcc

SEQ ID NO: 5540930 - DNA, 25 bp, Homo sapien
gactgaatacaaggctagcatggtg

SEQ ID NO: 5540931 - DNA, 25 bp, Homo sapien
acctcgaaccctaatgactgaatac

SEQ ID NO: 5540932 - DNA, 25 bp, Homo sapien
ttcagtgtagtcggattcccgggga

SEQ ID NO: 5540933 - DNA, 25 bp, Homo sapien
tgctgccccctatcggtggtgagaa

SEQ ID NO: 5540934 - DNA, 25 bp, Homo sapien
aatattccaggactacgcagtagcc

SEQ ID NO: 5540935 - DNA, 25 bp, Homo sapien
acgactctctaagaacatgggtttc

SEQ ID NO: 5540936 - DNA, 25 bp, Homo sapien
cgcaggacacctgctgccccctatc

SEQ ID NO: 5540937 - DNA, 25 bp, Homo sapien
gcccaccctttgcacagggcaagcc

SEQ ID NO: 5540938 - DNA, 25 bp, Homo sapien
gctgtacgctaagtttaggggcagg

SEQ ID NO: 5540939 - DNA, 25 bp, Homo sapien
caactggaagaggccttttgaaaaa

SEQ ID NO: 5540940 - DNA, 25 bp, Homo sapien
acgcagtagccagacgactctctaa

SEQ ID NO: 5540941 - DNA, 25 bp, Homo sapien
tcggtggtgagaacaataacccgaa

SEQ ID NO: 5540942 - DNA, 25 bp, Homo sapien
tgccccaaacgttcagtgtagtcgg

SEQ ID NO: 5540943 - DNA, 25 bp, Homo sapien
ggtggagatacagcagaattttatt

SEQ ID NO: 5540944 - DNA, 25 bp, Homo sapien
ggatcgaaccctaggcttgagcatg

SEQ ID NO: 5540945 - DNA, 25 bp, Homo sapien
tttacagcgaacatggtattacttt

SEQ ID NO: 5540946 - DNA, 25 bp, Homo sapien
agttctggcactgtggaattttatc

SEQ ID NO: 5540947 - DNA, 25 bp, Homo sapien
cccggatgacttttagttctggcac

SEQ ID NO: 5540948 - DNA, 25 bp, Homo sapien
gaaggaaatgcaccaagttcgtgaa

SEQ ID NO: 5540949 - DNA, 25 bp, Homo sapien
gcggctgtgatgacgcctgtatctt

SEQ ID NO: 5540950 - DNA, 25 bp, Homo sapien
atttatgaacgaagccagctgctct

SEQ ID NO: 5540951 - DNA, 25 bp, Homo sapien
gatgatgaattctgagtggttataa

SEQ ID NO: 5540952 - DNA, 25 bp, Homo sapien
ataaatattcaggcacgcgaagagg

SEQ ID NO: 5540953 - DNA, 25 bp, Homo sapien
caagttcgtgaacccggatgacttt

SEQ ID NO: 5540954 - DNA, 25 bp, Homo sapien
atatttaaaaggtctgctgagttgg

SEQ ID NO: 5540955 - DNA, 25 bp, Homo sapien
tgctgagttggaattgtgacagacc

SEQ ID NO: 5540956 - DNA, 25 bp, Homo sapien
gtgacagaccacattgttgactcta

SEQ ID NO: 5540957 - DNA, 25 bp, Homo sapien
acccacttcaccaccactaccatcc

SEQ ID NO: 5540958 - DNA, 25 bp, Homo sapien
acaaggcaacaggtaaacatttgtt

SEQ ID NO: 5540959 - DNA, 25 bp, Homo sapien
tgagtagtgttaattacaaggcaac

SEQ ID NO: 5540960 - DNA, 25 bp, Homo sapien
tctagattgaattggaagggaagaa

SEQ ID NO: 5540961 - DNA, 25 bp, Homo sapien
tatagttgggagagttttgacaaat

SEQ ID NO: 5540962 - DNA, 25 bp, Homo sapien
acctgaacagccatccctagtcaac

SEQ ID NO: 5540963 - DNA, 25 bp, Homo sapien
taccatcctgatatagtgtgtgtcc

SEQ ID NO: 5540964 - DNA, 25 bp, Homo sapien
atgtgaaatgaattaggatatcctc

SEQ ID NO: 5540965 - DNA, 25 bp, Homo sapien
ggggctcctccttgcagatgctccc

SEQ ID NO: 5540966 - DNA, 25 bp, Homo sapien
ttcccgcagggatcctctcagctgc

SEQ ID NO: 5540967 - DNA, 25 bp, Homo sapien
ctccccacagtgctccctggactct

SEQ ID NO: 5540968 - DNA, 25 bp, Homo sapien
tccaaatccatgagtcccagggcag

SEQ ID NO: 5540969 - DNA, 25 bp, Homo sapien
tcagaaacaactcagatcagatcgc

SEQ ID NO: 5540970 - DNA, 25 bp, Homo sapien
gggggcacccctgtccatgggtgga

SEQ ID NO: 5540971 - DNA, 25 bp, Homo sapien
gggtgagttcagctctaaggagctc

SEQ ID NO: 5540972 - DNA, 25 bp, Homo sapien
ccgtgtggccacaactccaaatcca

SEQ ID NO: 5540973 - DNA, 25 bp, Homo sapien
caggcccgcaattgccccattccac

SEQ ID NO: 5540974 - DNA, 25 bp, Homo sapien
tccttgcagatgctcccgccacgga

SEQ ID NO: 5540975 - DNA, 25 bp, Homo sapien
tgcagccctcaaccgtgtggccaca

SEQ ID NO: 5540976 - DNA, 25 bp, Homo sapien
cccctcgactcaccggccctcgcgg

SEQ ID NO: 5540977 - DNA, 25 bp, Homo sapien
ccgcgagggccggtgagtcgagggg

SEQ ID NO: 5540978 - DNA, 25 bp, Homo sapien
ctcgtctccggtcgcgagggctgca

SEQ ID NO: 5540979 - DNA, 25 bp, Homo sapien
tgcagccctcgcgaccggagacgag

SEQ ID NO: 5540980 - DNA, 25 bp, Homo sapien
acaaggtcatccgagagaaactact

SEQ ID NO: 5540981 - DNA, 25 bp, Homo sapien
agtagtttctctcggatgaccttgt

SEQ ID NO: 5540982 - DNA, 25 bp, Homo sapien
cattagtatctcaggcaccatgggt

SEQ ID NO: 5540983 - DNA, 25 bp, Homo sapien
aactatatatgttctggggaggata

SEQ ID NO: 5540984 - DNA, 25 bp, Homo sapien
tttagattgtcaagaaaagtgggcc

SEQ ID NO: 5540985 - DNA, 25 bp, Homo sapien
ggccagaggccccacctcacactag

SEQ ID NO: 5540986 - DNA, 25 bp, Homo sapien
acaaagtaatgaaccctcagcctcc

SEQ ID NO: 5540987 - DNA, 25 bp, Homo sapien
cttcgggattcttcttagggcctcc

SEQ ID NO: 5540988 - DNA, 25 bp, Homo sapien
tcacactaggacggcaattgcctct

SEQ ID NO: 5540989 - DNA, 25 bp, Homo sapien
aagaagtgtagttgggtcattgtga

SEQ ID NO: 5540990 - DNA, 25 bp, Homo sapien
ataggcataggcacattgaagacca

SEQ ID NO: 5540991 - DNA, 25 bp, Homo sapien
attgtgaatggatgtttagattgtc

SEQ ID NO: 5540992 - DNA, 25 bp, Homo sapien
gctctgtctaccagggtgaatttcc

SEQ ID NO: 5540993 - DNA, 25 bp, Homo sapien
aggaagttaggaagttcaaatggct

SEQ ID NO: 5540994 - DNA, 25 bp, Homo sapien
gacagctgaaattgatcacagtaac

SEQ ID NO: 5540995 - DNA, 25 bp, Homo sapien
ctcagataaggaatcatgctagatc

SEQ ID NO: 5540996 - DNA, 25 bp, Homo sapien
caaagcatgcggtacaaaatgtgca

SEQ ID NO: 5540997 - DNA, 25 bp, Homo sapien
ctttgtgcagggggtcctctataaa

SEQ ID NO: 5540998 - DNA, 25 bp, Homo sapien
cacttaggacagcagttactgaagc

SEQ ID NO: 5540999 - DNA, 25 bp, Homo sapien
aaaagtcgatcccaaagcatgcggt

SEQ ID NO: 5541000 - DNA, 25 bp, Homo sapien
tagatacaagtgggataaaagtcga

SEQ ID NO: 5541001 - DNA, 25 bp, Homo sapien
aagagaggcaaagcaggctttttga

SEQ ID NO: 5541002 - DNA, 25 bp, Homo sapien
cacaatacagtcactagtagacagc

SEQ ID NO: 5541003 - DNA, 25 bp, Homo sapien
aacacaaactagtcaagagaggcaa

SEQ ID NO: 5541004 - DNA, 25 bp, Homo sapien
ctagttgtactgcaccagcaaatcc

SEQ ID NO: 5541005 - DNA, 25 bp, Homo sapien
ctattaagcctagttgtactgcacc

SEQ ID NO: 5541006 - DNA, 25 bp, Homo sapien
agttgtactgcaccagcaaatccat

SEQ ID NO: 5541007 - DNA, 25 bp, Homo sapien
taagcctagttgtactgcaccagca

SEQ ID NO: 5541008 - DNA, 25 bp, Homo sapien
gttgtactgcaccagcaaatccatg

SEQ ID NO: 5541009 - DNA, 25 bp, Homo sapien
gcctagttgtactgcaccagcaaat

SEQ ID NO: 5541010 - DNA, 25 bp, Homo sapien
ttaagcctagttgtactgcaccagc

SEQ ID NO: 5541011 - DNA, 25 bp, Homo sapien
tccctattaagcctagttgtactgc

SEQ ID NO: 5541012 - DNA, 25 bp, Homo sapien
attaagcctagttgtactgcaccag

SEQ ID NO: 5541013 - DNA, 25 bp, Homo sapien
aagcctagttgtactgcaccagcaa

SEQ ID NO: 5541014 - DNA, 25 bp, Homo sapien
cctagttgtactgcaccagcaaatc

SEQ ID NO: 5541015 - DNA, 25 bp, Homo sapien
tttcaaccaaaaagcgactctctta

SEQ ID NO: 5541016 - DNA, 25 bp, Homo sapien
aataaaaacatggtggtctggatag

SEQ ID NO: 5541017 - DNA, 25 bp, Homo sapien
tatacaaggcatattgaaataagta

SEQ ID NO: 5541018 - DNA, 25 bp, Homo sapien
cttgctcagcctagaaatacttttc

SEQ ID NO: 5541019 - DNA, 25 bp, Homo sapien
attacaggcatgagctaccttgctc

SEQ ID NO: 5541020 - DNA, 25 bp, Homo sapien
aacatggtggtctggatagacttta

SEQ ID NO: 5541021 - DNA, 25 bp, Homo sapien
cactgtaaataaaaacatggtggtc

SEQ ID NO: 5541022 - DNA, 25 bp, Homo sapien
gaaataagtaacatcagaattatac

SEQ ID NO: 5541023 - DNA, 25 bp, Homo sapien
ttttgtagagatgaggtctcactat

SEQ ID NO: 5541024 - DNA, 25 bp, Homo sapien
tcactaaaacagaattatttcccac

SEQ ID NO: 5541025 - DNA, 25 bp, Homo sapien
taaacagctaatatatacaaggcat

SEQ ID NO: 5541026 - DNA, 25 bp, Homo sapien
ctgcagaatggcatgtgtgagtgta

SEQ ID NO: 5541027 - DNA, 25 bp, Homo sapien
acctgaacgaaccaagcgtagtgat

SEQ ID NO: 5541028 - DNA, 25 bp, Homo sapien
gaaaagaatagcagtagcaacagag

SEQ ID NO: 5541029 - DNA, 25 bp, Homo sapien
gtagtgatcctaggaggctgttatc

SEQ ID NO: 5541030 - DNA, 25 bp, Homo sapien
agtagactaaaaagagtaccctaga

SEQ ID NO: 5541031 - DNA, 25 bp, Homo sapien
ctatgactgatgttctaggagagaa

SEQ ID NO: 5541032 - DNA, 25 bp, Homo sapien
tcctagaaccagctgaatttgccaa

SEQ ID NO: 5541033 - DNA, 25 bp, Homo sapien
aacagaggcaaactggcctatgact

SEQ ID NO: 5541034 - DNA, 25 bp, Homo sapien
aatcaatgaataatctgcagaatgg

SEQ ID NO: 5541035 - DNA, 25 bp, Homo sapien
agagtaccctagaaatgacctttac

SEQ ID NO: 5541036 - DNA, 25 bp, Homo sapien
gtctttgccagtagggtggaaagaa

SEQ ID NO: 5541037 - DNA, 25 bp, Homo sapien
tccgtcacaccctggcgcccctctt

SEQ ID NO: 5541038 - DNA, 25 bp, Homo sapien
aagaggggcgccagggtgtgacgga

SEQ ID NO: 5541039 - DNA, 25 bp, Homo sapien
cctttgagcatctcctgccccagga

SEQ ID NO: 5541040 - DNA, 25 bp, Homo sapien
ctccctggcaagcatttccagtctc

SEQ ID NO: 5541041 - DNA, 25 bp, Homo sapien
ctatgtgggctcagcttcacccttc

SEQ ID NO: 5541042 - DNA, 25 bp, Homo sapien
ctcctgtctcctgggtgaaaactgg

SEQ ID NO: 5541043 - DNA, 25 bp, Homo sapien
ttgcatgttaggaaaggctcactac

SEQ ID NO: 5541044 - DNA, 25 bp, Homo sapien
gccctttaggagccctgggatagtg

SEQ ID NO: 5541045 - DNA, 25 bp, Homo sapien
tctcttgtgtggcatcgtcctgggg

SEQ ID NO: 5541046 - DNA, 25 bp, Homo sapien
gtcatgttgacctttgagcatctcc

SEQ ID NO: 5541047 - DNA, 25 bp, Homo sapien
agtcatgtttagccctttaggagcc

SEQ ID NO: 5541048 - DNA, 25 bp, Homo sapien
aaaactggagccccggttctagctc

SEQ ID NO: 5541049 - DNA, 25 bp, Homo sapien
gctgcagacagcatgagatgcttct

SEQ ID NO: 5541050 - DNA, 25 bp, Homo sapien
tacaggccacaccttttccccttca

SEQ ID NO: 5541051 - DNA, 25 bp, Homo sapien
gcagcacaaggcaacctcctcctgg

SEQ ID NO: 5541052 - DNA, 25 bp, Homo sapien
agtatagggagtcaggatcctacaa

SEQ ID NO: 5541053 - DNA, 25 bp, Homo sapien
tattgctatgagatcagcagtgacc

SEQ ID NO: 5541054 - DNA, 25 bp, Homo sapien
ccaactcctgctgagggtctcactg

SEQ ID NO: 5541055 - DNA, 25 bp, Homo sapien
gtgaaacatcagcagcacaaggcaa

SEQ ID NO: 5541056 - DNA, 25 bp, Homo sapien
agagccaggggtatacatgtcctga

SEQ ID NO: 5541057 - DNA, 25 bp, Homo sapien
gagatcagcagtgacctttggttgt

SEQ ID NO: 5541058 - DNA, 25 bp, Homo sapien
tagtaattgtgggaaatctgtaacc

SEQ ID NO: 5541059 - DNA, 25 bp, Homo sapien
ttaaaacagatgagaagtataggga

SEQ ID NO: 5541060 - DNA, 25 bp, Homo sapien
atctgtaaccacatgtaggccaggc

SEQ ID NO: 5541061 - DNA, 25 bp, Homo sapien
gttttggcctgacattagaatattt

SEQ ID NO: 5541062 - DNA, 25 bp, Homo sapien
catataaccagaaaagttactgtgg

SEQ ID NO: 5541063 - DNA, 25 bp, Homo sapien
catcaggttcaacttccacgttatc

SEQ ID NO: 5541064 - DNA, 25 bp, Homo sapien
agttactgtggtaagtaacagcatg

SEQ ID NO: 5541065 - DNA, 25 bp, Homo sapien
ttatcttgaaggcgtagaaaagcag

SEQ ID NO: 5541066 - DNA, 25 bp, Homo sapien
aaggcgtagaaaagcagcgtttttc

SEQ ID NO: 5541067 - DNA, 25 bp, Homo sapien
ttgctgtacatgatttgcaggtcaa

SEQ ID NO: 5541068 - DNA, 25 bp, Homo sapien
tccacgttatctgaatgagcttccc

SEQ ID NO: 5541069 - DNA, 25 bp, Homo sapien
agaaggcctgagatgatcattctcc

SEQ ID NO: 5541070 - DNA, 25 bp, Homo sapien
gatttgcaggtcaatatgtcatttc

SEQ ID NO: 5541071 - DNA, 25 bp, Homo sapien
ctaagaaccatgtagttccctgctc

SEQ ID NO: 5541072 - DNA, 25 bp, Homo sapien
tattctggatggtgaaagtagatgg

SEQ ID NO: 5541073 - DNA, 25 bp, Homo sapien
agatgtaaaagtagtctgaaaattt

SEQ ID NO: 5541074 - DNA, 25 bp, Homo sapien
gatctgcacagagtattgaacatta

SEQ ID NO: 5541075 - DNA, 25 bp, Homo sapien
attgatacgatgagttaacagatgt

SEQ ID NO: 5541076 - DNA, 25 bp, Homo sapien
ttggatgtctgtaaaagtcttatgc

SEQ ID NO: 5541077 - DNA, 25 bp, Homo sapien
tgtgtagccttcttaggacagattt

SEQ ID NO: 5541078 - DNA, 25 bp, Homo sapien
gtttcaaatgaacaggtcctaatca

SEQ ID NO: 5541079 - DNA, 25 bp, Homo sapien
cactagtgagaaaaactcgtgcatc

SEQ ID NO: 5541080 - DNA, 25 bp, Homo sapien
tatcgcctggtgtaccattggtatt

SEQ ID NO: 5541081 - DNA, 25 bp, Homo sapien
gggaaatattcaggggatcagtgtt

SEQ ID NO: 5541082 - DNA, 25 bp, Homo sapien
aagatatgctaatgagaaagaggga

SEQ ID NO: 5541083 - DNA, 25 bp, Homo sapien
ggggtcctgaaggcctttgatcttg

SEQ ID NO: 5541084 - DNA, 25 bp, Homo sapien
ttctcccatggtaactgagcagttc

SEQ ID NO: 5541085 - DNA, 25 bp, Homo sapien
tgccttaaaggagcttagaatctac

SEQ ID NO: 5541086 - DNA, 25 bp, Homo sapien
gcccaaggacagccagcctttcttc

SEQ ID NO: 5541087 - DNA, 25 bp, Homo sapien
attcaggaatggaaatttcatgctt

SEQ ID NO: 5541088 - DNA, 25 bp, Homo sapien
cctttggacgtggataatgcttgac

SEQ ID NO: 5541089 - DNA, 25 bp, Homo sapien
gtgttgataggggatttgtcacttt

SEQ ID NO: 5541090 - DNA, 25 bp, Homo sapien
gaggctgagtgctaacagtagtcag

SEQ ID NO: 5541091 - DNA, 25 bp, Homo sapien
tggggtcctactgagttggaagttc

SEQ ID NO: 5541092 - DNA, 25 bp, Homo sapien
gacagataaaatgcaattactgcct

SEQ ID NO: 5541093 - DNA, 25 bp, Homo sapien
gctaacagtagtcagaaaaggagcc

SEQ ID NO: 5541094 - DNA, 25 bp, Homo sapien
tgatcttcatacctttccctggacc

SEQ ID NO: 5541095 - DNA, 25 bp, Homo sapien
ttagtctgaaccatagctgggctgc

SEQ ID NO: 5541096 - DNA, 25 bp, Homo sapien
tgggctgcagtaccctacgctgcca

SEQ ID NO: 5541097 - DNA, 25 bp, Homo sapien
gtattttagcatggctgtcaaggaa

SEQ ID NO: 5541098 - DNA, 25 bp, Homo sapien
gtggccatgactacccgtggtacca

SEQ ID NO: 5541099 - DNA, 25 bp, Homo sapien
caaggtaagtattttagcatggctg

SEQ ID NO: 5541100 - DNA, 25 bp, Homo sapien
tctcggcttttagtctgaaccatag

SEQ ID NO: 5541101 - DNA, 25 bp, Homo sapien
gaccacaggcgtttctcggctttta

SEQ ID NO: 5541102 - DNA, 25 bp, Homo sapien
catacctttccctggaccacaggcg

SEQ ID NO: 5541103 - DNA, 25 bp, Homo sapien
tctgaaccatagctgggctgcagta

SEQ ID NO: 5541104 - DNA, 25 bp, Homo sapien
cccgtggtaccaatctcagtcttaa

SEQ ID NO: 5541105 - DNA, 25 bp, Homo sapien
tagaatattcttaagtcactgtccc

SEQ ID NO: 5541106 - DNA, 25 bp, Homo sapien
ccaggtgtgtagcaaagtccacatg

SEQ ID NO: 5541107 - DNA, 25 bp, Homo sapien
tgatagaattctggtcatcagatgt

SEQ ID NO: 5541108 - DNA, 25 bp, Homo sapien
ttgtaagagctcagcatcccagggg

SEQ ID NO: 5541109 - DNA, 25 bp, Homo sapien
aaagcttagcttatgtccaaggtaa

SEQ ID NO: 5541110 - DNA, 25 bp, Homo sapien
aagctcaggcttttcgttcattaac

SEQ ID NO: 5541111 - DNA, 25 bp, Homo sapien
ctgttgatttcgagttgtaagagct

SEQ ID NO: 5541112 - DNA, 25 bp, Homo sapien
gcatttcctgtccaccgccggttta

SEQ ID NO: 5541113 - DNA, 25 bp, Homo sapien
aggggcatcttcttgactgtggcat

SEQ ID NO: 5541114 - DNA, 25 bp, Homo sapien
gatgtactgcaatggaacaaaactc

SEQ ID NO: 5541115 - DNA, 25 bp, Homo sapien
agagctattgcttttgcagcggttt

SEQ ID NO: 5541116 - DNA, 25 bp, Homo sapien
tcctgtagcttccgagtcctggtgg

SEQ ID NO: 5541117 - DNA, 25 bp, Homo sapien
gttgaacagataaatacgaaactgc

SEQ ID NO: 5541118 - DNA, 25 bp, Homo sapien
agcttggatcctagcatgactatac

SEQ ID NO: 5541119 - DNA, 25 bp, Homo sapien
ggagaattgccagacttgtggtacc

SEQ ID NO: 5541120 - DNA, 25 bp, Homo sapien
aggacacgaccctcaaccgttgctc

SEQ ID NO: 5541121 - DNA, 25 bp, Homo sapien
atgactatacattgtgacatggtca

SEQ ID NO: 5541122 - DNA, 25 bp, Homo sapien
agataaatacgaaactgccatcatc

SEQ ID NO: 5541123 - DNA, 25 bp, Homo sapien
tactcacgctgattgttgaacagat

SEQ ID NO: 5541124 - DNA, 25 bp, Homo sapien
ccgttgctcctgtagcttccgagtc

SEQ ID NO: 5541125 - DNA, 25 bp, Homo sapien
tggattagaccaactggagaattgc

SEQ ID NO: 5541126 - DNA, 25 bp, Homo sapien
ttgtggtaccaattatatcatctca

SEQ ID NO: 5541127 - DNA, 25 bp, Homo sapien
aaaaaagcctaagtagtagtatcaa

SEQ ID NO: 5541128 - DNA, 25 bp, Homo sapien
tttatatcatcaagacgtgcgtcaa

SEQ ID NO: 5541129 - DNA, 25 bp, Homo sapien
aaggtcagacctatgttgttcaatg

SEQ ID NO: 5541130 - DNA, 25 bp, Homo sapien
acaatgattactagtacagtttgcc

SEQ ID NO: 5541131 - DNA, 25 bp, Homo sapien
caatatagcaagtaaggacaaaaaa

SEQ ID NO: 5541132 - DNA, 25 bp, Homo sapien
tgctctaaaaagggttaagtatgaa

SEQ ID NO: 5541133 - DNA, 25 bp, Homo sapien
aaaagggtggaacaatataatagac

SEQ ID NO: 5541134 - DNA, 25 bp, Homo sapien
ggtggtcttgctgtgtatggaagaa

SEQ ID NO: 5541135 - DNA, 25 bp, Homo sapien
aagacgtgcgtcaatatagcaagta

SEQ ID NO: 5541136 - DNA, 25 bp, Homo sapien
tgatccacaggggtctgttgaccat

SEQ ID NO: 5541137 - DNA, 25 bp, Homo sapien
taatgattaggtgctactggttttc

SEQ ID NO: 5541138 - DNA, 25 bp, Homo sapien
agggtgccccgtctgacacccctgg

SEQ ID NO: 5541139 - DNA, 25 bp, Homo sapien
cgaaaggatactgtgaaatcactaa

SEQ ID NO: 5541140 - DNA, 25 bp, Homo sapien
gcgaaaggatactgtgaaatcacta

SEQ ID NO: 5541141 - DNA, 25 bp, Homo sapien
ccccgtctgacacccctggggttgc

SEQ ID NO: 5541142 - DNA, 25 bp, Homo sapien
cccgtctgacacccctggggttgct

SEQ ID NO: 5541143 - DNA, 25 bp, Homo sapien
cgtctgacacccctggggttgctga

SEQ ID NO: 5541144 - DNA, 25 bp, Homo sapien
ctgtgaaatcactaattaactaata

SEQ ID NO: 5541145 - DNA, 25 bp, Homo sapien
tgcgaaaggatactgtgaaatcact

SEQ ID NO: 5541146 - DNA, 25 bp, Homo sapien
gtctgacacccctggggttgctgag

SEQ ID NO: 5541147 - DNA, 25 bp, Homo sapien
cctgcgaaaggatactgtgaaatca

SEQ ID NO: 5541148 - DNA, 25 bp, Homo sapien
ccgtctgacacccctggggttgctg

SEQ ID NO: 5541149 - DNA, 25 bp, Homo sapien
gtgcattctagtctaagttggggaa

SEQ ID NO: 5541150 - DNA, 25 bp, Homo sapien
ctattttagattgaggaagcctgca

SEQ ID NO: 5541151 - DNA, 25 bp, Homo sapien
ttagattgaggaagcctgcacaaca

SEQ ID NO: 5541152 - DNA, 25 bp, Homo sapien
cagagccacttcagtgatcgtggcc

SEQ ID NO: 5541153 - DNA, 25 bp, Homo sapien
tctctttactgtagaaaggcagaaa

SEQ ID NO: 5541154 - DNA, 25 bp, Homo sapien
atgaatgaaggccacccgtgctatt

SEQ ID NO: 5541155 - DNA, 25 bp, Homo sapien
tggggaattagttgtttcaaatctc

SEQ ID NO: 5541156 - DNA, 25 bp, Homo sapien
atagtcctatccaatgtgctctgcc

SEQ ID NO: 5541157 - DNA, 25 bp, Homo sapien
aaacaagcccatttttacaggtaca

SEQ ID NO: 5541158 - DNA, 25 bp, Homo sapien
caatgtgctctgccttggctgcatt

SEQ ID NO: 5541159 - DNA, 25 bp, Homo sapien
tcagtgatcgtggccatgaatgaag

SEQ ID NO: 5541160 - DNA, 25 bp, Homo sapien
gactggtcgctccctaggcctgtta

SEQ ID NO: 5541161 - DNA, 25 bp, Homo sapien
cacattacctaaaagagaccccctc

SEQ ID NO: 5541162 - DNA, 25 bp, Homo sapien
acgttcaagtacaccaggttgttgc

SEQ ID NO: 5541163 - DNA, 25 bp, Homo sapien
aatgggaccctaaatcctctgacag

SEQ ID NO: 5541164 - DNA, 25 bp, Homo sapien
ctcctctgggaacgttcaagtacac

SEQ ID NO: 5541165 - DNA, 25 bp, Homo sapien
ctgttaacctgtcaggctgagattc

SEQ ID NO: 5541166 - DNA, 25 bp, Homo sapien
tagagaaatggttcctgaaagtatc

SEQ ID NO: 5541167 - DNA, 25 bp, Homo sapien
gtaaaccttagacacatgccattaa

SEQ ID NO: 5541168 - DNA, 25 bp, Homo sapien
tgacatcgtcaagcacacattacct

SEQ ID NO: 5541169 - DNA, 25 bp, Homo sapien
ccctgccaccatctggactggtcgc

SEQ ID NO: 5541170 - DNA, 25 bp, Homo sapien
ctgacagaactgtaaaatctcctct

SEQ ID NO: 5541171 - DNA, 25 bp, Homo sapien
atagaacgtgttcaaatcctctgtt

SEQ ID NO: 5541172 - DNA, 25 bp, Homo sapien
ccagggtgtcttgagtgctgtaact

SEQ ID NO: 5541173 - DNA, 25 bp, Homo sapien
aacccattggcctgaagcttatatc

SEQ ID NO: 5541174 - DNA, 25 bp, Homo sapien
gaagcttatatctcaggcctatgcc

SEQ ID NO: 5541175 - DNA, 25 bp, Homo sapien
tgctgtaactcccaagcactgggct

SEQ ID NO: 5541176 - DNA, 25 bp, Homo sapien
ttgaatatttggaattggagaagcc

SEQ ID NO: 5541177 - DNA, 25 bp, Homo sapien
caagcactgggctagcctgacttct

SEQ ID NO: 5541178 - DNA, 25 bp, Homo sapien
aacagcccataaaaacccattggcc

SEQ ID NO: 5541179 - DNA, 25 bp, Homo sapien
tagtaaaaccatgtctgcatagaac

SEQ ID NO: 5541180 - DNA, 25 bp, Homo sapien
aataaggtaacagcaaatctatagt

SEQ ID NO: 5541181 - DNA, 25 bp, Homo sapien
taaatgtaaaagatgctgtctccat

SEQ ID NO: 5541182 - DNA, 25 bp, Homo sapien
tgggcaggacttgacttagcattat

SEQ ID NO: 5541183 - DNA, 25 bp, Homo sapien
ccctgttgccagttagagaggtgag

SEQ ID NO: 5541184 - DNA, 25 bp, Homo sapien
gagaggtgagaatgtttggactcta

SEQ ID NO: 5541185 - DNA, 25 bp, Homo sapien
ttatccaagcaccagtccaagtggg

SEQ ID NO: 5541186 - DNA, 25 bp, Homo sapien
ctaaatgtgaatgtatgagctgggg

SEQ ID NO: 5541187 - DNA, 25 bp, Homo sapien
ctaactcaccgattgctttgcagac

SEQ ID NO: 5541188 - DNA, 25 bp, Homo sapien
catcctaaatgaggaggtaacaggg

SEQ ID NO: 5541189 - DNA, 25 bp, Homo sapien
gtccaagtggggttccctgttgcca

SEQ ID NO: 5541190 - DNA, 25 bp, Homo sapien
gagatcgtggattacatgggctcct

SEQ ID NO: 5541191 - DNA, 25 bp, Homo sapien
ctctggtgatgttcctaagaccctt

SEQ ID NO: 5541192 - DNA, 25 bp, Homo sapien
attcacggaacagagatcgtggatt

SEQ ID NO: 5541193 - DNA, 25 bp, Homo sapien
taagtcaggaaacactaagcctcgt

SEQ ID NO: 5541194 - DNA, 25 bp, Homo sapien
acaaaaaagtgaaatccttctgcct

SEQ ID NO: 5541195 - DNA, 25 bp, Homo sapien
tgcctgcaggtatgtgtactgtttc

SEQ ID NO: 5541196 - DNA, 25 bp, Homo sapien
tgatgtgtaataagtcaggaaacac

SEQ ID NO: 5541197 - DNA, 25 bp, Homo sapien
acatcctcagataagacccacccac

SEQ ID NO: 5541198 - DNA, 25 bp, Homo sapien
aagctctcggaactggtgacagtga

SEQ ID NO: 5541199 - DNA, 25 bp, Homo sapien
gcaattctagccgtggaatggaagc

SEQ ID NO: 5541200 - DNA, 25 bp, Homo sapien
ttgcaggatttggctgtttcctcac

SEQ ID NO: 5541201 - DNA, 25 bp, Homo sapien
gtttcctcaccactgcgcccctgac

SEQ ID NO: 5541202 - DNA, 25 bp, Homo sapien
gtgcccccacatctggataccttac

SEQ ID NO: 5541203 - DNA, 25 bp, Homo sapien
aggaaacagcccctgacagcttgca

SEQ ID NO: 5541204 - DNA, 25 bp, Homo sapien
ttgtaccccaggcctcctagaggac

SEQ ID NO: 5541205 - DNA, 25 bp, Homo sapien
cagattctattgttgggtgggaaat

SEQ ID NO: 5541206 - DNA, 25 bp, Homo sapien
ttggatactacacacctgctcagac

SEQ ID NO: 5541207 - DNA, 25 bp, Homo sapien
aggttaaaagaaagaatggtctgta

SEQ ID NO: 5541208 - DNA, 25 bp, Homo sapien
gaaggaacaaacaactctcagtggt

SEQ ID NO: 5541209 - DNA, 25 bp, Homo sapien
cctagaggactcctgcagattctat

SEQ ID NO: 5541210 - DNA, 25 bp, Homo sapien
atcttgccttcaagtgagaaggaac

SEQ ID NO: 5541211 - DNA, 25 bp, Homo sapien
agtctcagtctgctataggtatttg

SEQ ID NO: 5541212 - DNA, 25 bp, Homo sapien
ctgagtaaacatttgtggtgctgtc

SEQ ID NO: 5541213 - DNA, 25 bp, Homo sapien
tgggaaatagtgttggaatgtgttt

SEQ ID NO: 5541214 - DNA, 25 bp, Homo sapien
gcttttatatgctggctgtgaaggt

SEQ ID NO: 5541215 - DNA, 25 bp, Homo sapien
aggatgtcactatggcactgttgtc

SEQ ID NO: 5541216 - DNA, 25 bp, Homo sapien
gaggggactcaccatgaatatctgg

SEQ ID NO: 5541217 - DNA, 25 bp, Homo sapien
atgtcattagaatgcagacggaggg

SEQ ID NO: 5541218 - DNA, 25 bp, Homo sapien
attgagaaaggagtagttttctatc

SEQ ID NO: 5541219 - DNA, 25 bp, Homo sapien
aagacacaggtaatgcacgacattg

SEQ ID NO: 5541220 - DNA, 25 bp, Homo sapien
aacaaaatgtagacaaagtgaactc

SEQ ID NO: 5541221 - DNA, 25 bp, Homo sapien
ttgcaagcagattccctgttggatt

SEQ ID NO: 5541222 - DNA, 25 bp, Homo sapien
tggggttgattcccagatgtgtgtt

SEQ ID NO: 5541223 - DNA, 25 bp, Homo sapien
taagagtatacttgaatcagacatt

SEQ ID NO: 5541224 - DNA, 25 bp, Homo sapien
cccatatctggaagggcactatatt

SEQ ID NO: 5541225 - DNA, 25 bp, Homo sapien
gggaggagccatagattcctggtta

SEQ ID NO: 5541226 - DNA, 25 bp, Homo sapien
acgacgacggcccactggactaggt

SEQ ID NO: 5541227 - DNA, 25 bp, Homo sapien
acctagtccagtgggccgtcgtcgt

SEQ ID NO: 5541228 - DNA, 25 bp, Homo sapien
gagcatgctaaaacagtccaagacc

SEQ ID NO: 5541229 - DNA, 25 bp, Homo sapien
cctctgcctgcaacactcttccctg

SEQ ID NO: 5541230 - DNA, 25 bp, Homo sapien
taagagatacataggaattataatc

SEQ ID NO: 5541231 - DNA, 25 bp, Homo sapien
taggttactgctaatgtggtggaag

SEQ ID NO: 5541232 - DNA, 25 bp, Homo sapien
aggatgaaatctgagagccctggaa

SEQ ID NO: 5541233 - DNA, 25 bp, Homo sapien
ccaagaccttctgcaattactcctc

SEQ ID NO: 5541234 - DNA, 25 bp, Homo sapien
gacgccaggccctctgacctccttt

SEQ ID NO: 5541235 - DNA, 25 bp, Homo sapien
tcccaccctggagcatgctaaaaca

SEQ ID NO: 5541236 - DNA, 25 bp, Homo sapien
acacagtaaaactattaagagatac

SEQ ID NO: 5541237 - DNA, 25 bp, Homo sapien
agaaaggagaaacagttatctatac

SEQ ID NO: 5541238 - DNA, 25 bp, Homo sapien
cttctgtgtgtgaatacatgcaata

SEQ ID NO: 5541239 - DNA, 25 bp, Homo sapien
aggcccagcacaaactccccttgta

SEQ ID NO: 5541240 - DNA, 25 bp, Homo sapien
actccccttgtagccctgttccttc

SEQ ID NO: 5541241 - DNA, 25 bp, Homo sapien
cgcctcgctgcttgcatgcggcggg

SEQ ID NO: 5541242 - DNA, 25 bp, Homo sapien
gtccagttccagtccacagcctggg

SEQ ID NO: 5541243 - DNA, 25 bp, Homo sapien
tcaggccgttagcttctcacccagc

SEQ ID NO: 5541244 - DNA, 25 bp, Homo sapien
gttagcttctcacccagctgccctg

SEQ ID NO: 5541245 - DNA, 25 bp, Homo sapien
tgttccttcaggccgttagcttctc

SEQ ID NO: 5541246 - DNA, 25 bp, Homo sapien
ccttcaggccgttagcttctcaccc

SEQ ID NO: 5541247 - DNA, 25 bp, Homo sapien
cctcgcctcgctgcttgcatgcggc

SEQ ID NO: 5541248 - DNA, 25 bp, Homo sapien
gcctcagcgcgacctcgcctcgctg

SEQ ID NO: 5541249 - DNA, 25 bp, Homo sapien
agcgcgacctcgcctcgctgcttgc

SEQ ID NO: 5541250 - DNA, 25 bp, Homo sapien
caaataaaatggagggattcagatt

SEQ ID NO: 5541251 - DNA, 25 bp, Homo sapien
gttgaagctggtttcagaaaagccc

SEQ ID NO: 5541252 - DNA, 25 bp, Homo sapien
cccaccacgccctacaagctcactc

SEQ ID NO: 5541253 - DNA, 25 bp, Homo sapien
gaaaactccgtgaactctctggcaa

SEQ ID NO: 5541254 - DNA, 25 bp, Homo sapien
tctttagtcagcatgcggggtaaga

SEQ ID NO: 5541255 - DNA, 25 bp, Homo sapien
aacagtcaacaataaggcaaggaag

SEQ ID NO: 5541256 - DNA, 25 bp, Homo sapien
tgcaaatgcctaagtcccaccacgc

SEQ ID NO: 5541257 - DNA, 25 bp, Homo sapien
tctaaacactgtctgcaaatgccta

SEQ ID NO: 5541258 - DNA, 25 bp, Homo sapien
gaaacatgccaaagatagacaccca

SEQ ID NO: 5541259 - DNA, 25 bp, Homo sapien
cctcagagcagctccgcaaggctta

SEQ ID NO: 5541260 - DNA, 25 bp, Homo sapien
atgctcacataacaggaaacatgcc

SEQ ID NO: 5541261 - DNA, 25 bp, Homo sapien
aggatcagatggctacctggtgtct

SEQ ID NO: 5541262 - DNA, 25 bp, Homo sapien
tttcatgtaagtcggaccaacagag

SEQ ID NO: 5541263 - DNA, 25 bp, Homo sapien
ctaggggataccatcgtctttggcc

SEQ ID NO: 5541264 - DNA, 25 bp, Homo sapien
ctgcccagttagtttgctcagggag

SEQ ID NO: 5541265 - DNA, 25 bp, Homo sapien
gtcttcagacacagctcaggactcc

SEQ ID NO: 5541266 - DNA, 25 bp, Homo sapien
agtttcatgctaggaatcgggattt

SEQ ID NO: 5541267 - DNA, 25 bp, Homo sapien
gtctcacggcactgtgcaacagggc

SEQ ID NO: 5541268 - DNA, 25 bp, Homo sapien
tcactgaaaaccaatcagcagctcc

SEQ ID NO: 5541269 - DNA, 25 bp, Homo sapien
gtgcaacagggccatcactgaaaac

SEQ ID NO: 5541270 - DNA, 25 bp, Homo sapien
agcagctccaaacgtgatctcacag

SEQ ID NO: 5541271 - DNA, 25 bp, Homo sapien
tggccatggagctaagtctcacggc

SEQ ID NO: 5541272 - DNA, 25 bp, Homo sapien
gctgatgcacttccaaggaaaaggc

SEQ ID NO: 5541273 - DNA, 25 bp, Homo sapien
cagaaaaaccctgcaaggcagcctg

SEQ ID NO: 5541274 - DNA, 25 bp, Homo sapien
tgtgaaaaacttgacaaagatatac

SEQ ID NO: 5541275 - DNA, 25 bp, Homo sapien
agtggaccagccatattccctgcaa

SEQ ID NO: 5541276 - DNA, 25 bp, Homo sapien
cattaaacagagtccgtggtgacag

SEQ ID NO: 5541277 - DNA, 25 bp, Homo sapien
gccaagtccagctgagacattaaac

SEQ ID NO: 5541278 - DNA, 25 bp, Homo sapien
gaggatagatccagctccccctgct

SEQ ID NO: 5541279 - DNA, 25 bp, Homo sapien
gccatgtgcaaatccacccaagtgg

SEQ ID NO: 5541280 - DNA, 25 bp, Homo sapien
catgtacaggatggccatgtgcaaa

SEQ ID NO: 5541281 - DNA, 25 bp, Homo sapien
tgaggctgcctagagccaatgcctc

SEQ ID NO: 5541282 - DNA, 25 bp, Homo sapien
gaataaaataacaaccatctgagct

SEQ ID NO: 5541283 - DNA, 25 bp, Homo sapien
cacgcagctcgccaagctgaccttc

SEQ ID NO: 5541284 - DNA, 25 bp, Homo sapien
ggctccacgcagctcgccaagctga

SEQ ID NO: 5541285 - DNA, 25 bp, Homo sapien
gacgcgcccttcaccctcacgtggt

SEQ ID NO: 5541286 - DNA, 25 bp, Homo sapien
ccaagctgaccttcaggaagttcga

SEQ ID NO: 5541287 - DNA, 25 bp, Homo sapien
ctgaccttcaggaagttcgacgcgc

SEQ ID NO: 5541288 - DNA, 25 bp, Homo sapien
cggtcctgacccttaccaaagtgga

SEQ ID NO: 5541289 - DNA, 25 bp, Homo sapien
gaagttcgacgcgcccttcaccctc

SEQ ID NO: 5541290 - DNA, 25 bp, Homo sapien
tgccaccaactggaactttttattc

SEQ ID NO: 5541291 - DNA, 25 bp, Homo sapien
tgcaacagtccggtcctgaccctta

SEQ ID NO: 5541292 - DNA, 25 bp, Homo sapien
agctgaccttcaggaagttcgacgc

SEQ ID NO: 5541293 - DNA, 25 bp, Homo sapien
gcccttcaccctcacgtggtttgcc

SEQ ID NO: 5541294 - DNA, 25 bp, Homo sapien
ccaggtaaaaccttatcacgggcgc

SEQ ID NO: 5541295 - DNA, 25 bp, Homo sapien
caggtctatcctggaagaagttcca

SEQ ID NO: 5541296 - DNA, 25 bp, Homo sapien
cagtctttggtagatgagtggctgg

SEQ ID NO: 5541297 - DNA, 25 bp, Homo sapien
gctctctaacgtgcaaggcaggagc

SEQ ID NO: 5541298 - DNA, 25 bp, Homo sapien
gtcgtagcctcggacggtttctgag

SEQ ID NO: 5541299 - DNA, 25 bp, Homo sapien
aagttccagggcagcttctgtgagt

SEQ ID NO: 5541300 - DNA, 25 bp, Homo sapien
ggtttctgagcgttggtgtttggca

SEQ ID NO: 5541301 - DNA, 25 bp, Homo sapien
gtaccggctctctaacgtgcaaggc

SEQ ID NO: 5541302 - DNA, 25 bp, Homo sapien
gtccgcccccagtcgtagcctcgga

SEQ ID NO: 5541303 - DNA, 25 bp, Homo sapien
ggctggatagctacaagcaagacca

SEQ ID NO: 5541304 - DNA, 25 bp, Homo sapien
ttcccacctgcatgtaccggctctc

SEQ ID NO: 5541305 - DNA, 25 bp, Homo sapien
ggtctccgaatttcggcctgggtcg

SEQ ID NO: 5541306 - DNA, 25 bp, Homo sapien
cgacccaggccgaaattcggagacc

SEQ ID NO: 5541307 - DNA, 25 bp, Homo sapien
gacgtgtaagcacagcccctcatgt

SEQ ID NO: 5541308 - DNA, 25 bp, Homo sapien
ctgaatagccagataatagggttcc

SEQ ID NO: 5541309 - DNA, 25 bp, Homo sapien
aaggatagcagatgaagcattgttc

SEQ ID NO: 5541310 - DNA, 25 bp, Homo sapien
caggagagatgctgactaaatgtgt

SEQ ID NO: 5541311 - DNA, 25 bp, Homo sapien
atctatagtgaaatggggaagtatt

SEQ ID NO: 5541312 - DNA, 25 bp, Homo sapien
aggaggaccccaaacttgttcagta

SEQ ID NO: 5541313 - DNA, 25 bp, Homo sapien
ctgttggggctgaaatctatagtga

SEQ ID NO: 5541314 - DNA, 25 bp, Homo sapien
aattctgtactcgtgctggggaagt

SEQ ID NO: 5541315 - DNA, 25 bp, Homo sapien
ttcagataagaaagctttggggtat

SEQ ID NO: 5541316 - DNA, 25 bp, Homo sapien
tggggggataatcagcttcttgtca

SEQ ID NO: 5541317 - DNA, 25 bp, Homo sapien
cagcagatattatgccagggcagag

SEQ ID NO: 5541318 - DNA, 25 bp, Homo sapien
cttactctagggaatgtgattctac

SEQ ID NO: 5541319 - DNA, 25 bp, Homo sapien
tgcatgaccttcagtgagtcctccc

SEQ ID NO: 5541320 - DNA, 25 bp, Homo sapien
aaacacaacccggcctaggaaatca

SEQ ID NO: 5541321 - DNA, 25 bp, Homo sapien
gtgacagatgtcactgtaggttcca

SEQ ID NO: 5541322 - DNA, 25 bp, Homo sapien
cctttccaaataggccccaggctcc

SEQ ID NO: 5541323 - DNA, 25 bp, Homo sapien
cccaggctccatgagaatgtgggtc

SEQ ID NO: 5541324 - DNA, 25 bp, Homo sapien
tcatttcaataaactgcagcagctg

SEQ ID NO: 5541325 - DNA, 25 bp, Homo sapien
gggggtgcattgcatgaccttcagt

SEQ ID NO: 5541326 - DNA, 25 bp, Homo sapien
aggtggtgctgacgattcattgtga

SEQ ID NO: 5541327 - DNA, 25 bp, Homo sapien
tgagaatgtgggtcatatctgttta

SEQ ID NO: 5541328 - DNA, 25 bp, Homo sapien
gtcctccctacctctgccccaggcc

SEQ ID NO: 5541329 - DNA, 25 bp, Homo sapien
gctgaaagcaggaagaagctttctc

SEQ ID NO: 5541330 - DNA, 25 bp, Homo sapien
agagacagaggctgccactgattct

SEQ ID NO: 5541331 - DNA, 25 bp, Homo sapien
agcctgaagctctgatggatgctct

SEQ ID NO: 5541332 - DNA, 25 bp, Homo sapien
gcacttggaacaacaaggtgaagat

SEQ ID NO: 5541333 - DNA, 25 bp, Homo sapien
gaagatgacagagagtcccacatct

SEQ ID NO: 5541334 - DNA, 25 bp, Homo sapien
tctaccatggaaaaggcaatggtcc

SEQ ID NO: 5541335 - DNA, 25 bp, Homo sapien
ggtacctgtgagtcattgcagagtt

SEQ ID NO: 5541336 - DNA, 25 bp, Homo sapien
agcataaaggaatgactactgagcc

SEQ ID NO: 5541337 - DNA, 25 bp, Homo sapien
aaagtgccagagacctaagtccatt

SEQ ID NO: 5541338 - DNA, 25 bp, Homo sapien
gatggatgctctgagttgagacttt

SEQ ID NO: 5541339 - DNA, 25 bp, Homo sapien
ttgtcagtcacgcagctgaaagcag

SEQ ID NO: 5541340 - DNA, 25 bp, Homo sapien
gaattggcctttgtatctctgatgc

SEQ ID NO: 5541341 - DNA, 25 bp, Homo sapien
ctgtgagccccataagggcaaggag

SEQ ID NO: 5541342 - DNA, 25 bp, Homo sapien
ttgagtggctatggcgtcattcaca

SEQ ID NO: 5541343 - DNA, 25 bp, Homo sapien
ccctgctagactgtgagccccataa

SEQ ID NO: 5541344 - DNA, 25 bp, Homo sapien
atgaataatgccacaactaactgct

SEQ ID NO: 5541345 - DNA, 25 bp, Homo sapien
tgttgtagactataaataaatgatg

SEQ ID NO: 5541346 - DNA, 25 bp, Homo sapien
gctgcgttgtgccttgttgagtggc

SEQ ID NO: 5541347 - DNA, 25 bp, Homo sapien
gggcaaggagcttattgaattggcc

SEQ ID NO: 5541348 - DNA, 25 bp, Homo sapien
ataacctcacttgctgcgttgtgcc

SEQ ID NO: 5541349 - DNA, 25 bp, Homo sapien
tgcttcactacagatcagtttcccc

SEQ ID NO: 5541350 - DNA, 25 bp, Homo sapien
tccacccagaaattatcattgcttc

SEQ ID NO: 5541351 - DNA, 25 bp, Homo sapien
tgctcaatgtggggttatgttgcat

SEQ ID NO: 5541352 - DNA, 25 bp, Homo sapien
gaaatcagtactccgcatgcgctcc

SEQ ID NO: 5541353 - DNA, 25 bp, Homo sapien
cactcaaacggaatcgaagcctttt

SEQ ID NO: 5541354 - DNA, 25 bp, Homo sapien
agtctgatcagtggcgatgctagat

SEQ ID NO: 5541355 - DNA, 25 bp, Homo sapien
acatagtttggttgtggaaggtata

SEQ ID NO: 5541356 - DNA, 25 bp, Homo sapien
gtggatgcgtgaatattttagtgtg

SEQ ID NO: 5541357 - DNA, 25 bp, Homo sapien
ttctagggcctgcacagatctctgg

SEQ ID NO: 5541358 - DNA, 25 bp, Homo sapien
caagcttgtgcactgtggatgcgtg

SEQ ID NO: 5541359 - DNA, 25 bp, Homo sapien
aactgtgaagaataatggtcttgtc

SEQ ID NO: 5541360 - DNA, 25 bp, Homo sapien
aaggctgcctctgggtccattctgt

SEQ ID NO: 5541361 - DNA, 25 bp, Homo sapien
cagaacacacagccctggccccttt

SEQ ID NO: 5541362 - DNA, 25 bp, Homo sapien
caaaggtctgcatcagtgctggctg

SEQ ID NO: 5541363 - DNA, 25 bp, Homo sapien
gtgtctactgcacgggacggtgcag

SEQ ID NO: 5541364 - DNA, 25 bp, Homo sapien
gtgctattcagtgtgaggggcattt

SEQ ID NO: 5541365 - DNA, 25 bp, Homo sapien
tgaatatcttacagacagcggccac

SEQ ID NO: 5541366 - DNA, 25 bp, Homo sapien
gccaccgtgtctactgcacgggact

SEQ ID NO: 5541367 - DNA, 25 bp, Homo sapien
acggtgcaggtctgactgtcttaga

SEQ ID NO: 5541368 - DNA, 25 bp, Homo sapien
cggcgagggtctgaatatctcagac

SEQ ID NO: 5541369 - DNA, 25 bp, Homo sapien
tctactgcacgggactgaatatttt

SEQ ID NO: 5541370 - DNA, 25 bp, Homo sapien
gtggacaatctatcagctaggtgct

SEQ ID NO: 5541371 - DNA, 25 bp, Homo sapien
ttgatccgtgttaggaattatccac

SEQ ID NO: 5541372 - DNA, 25 bp, Homo sapien
tggctactgctcaggatggtgcagg

SEQ ID NO: 5541373 - DNA, 25 bp, Homo sapien
atctcttgattgatgacaaaggaac

SEQ ID NO: 5541374 - DNA, 25 bp, Homo sapien
gggtagacacaaaactacaggtcaa

SEQ ID NO: 5541375 - DNA, 25 bp, Homo sapien
gacaaaggaacaattaaactggctg

SEQ ID NO: 5541376 - DNA, 25 bp, Homo sapien
aaaatcagactagaaagtgaagagg

SEQ ID NO: 5541377 - DNA, 25 bp, Homo sapien
aggaaggggttcctagtactgcaat

SEQ ID NO: 5541378 - DNA, 25 bp, Homo sapien
tggagttgtgtataagggtagacac

SEQ ID NO: 5541379 - DNA, 25 bp, Homo sapien
atagtcagtcttcaggatgtgctta

SEQ ID NO: 5541380 - DNA, 25 bp, Homo sapien
agtactgcaattcgggaaatttctc

SEQ ID NO: 5541381 - DNA, 25 bp, Homo sapien
cctacaggggattgtgttttgtcac

SEQ ID NO: 5541382 - DNA, 25 bp, Homo sapien
tcaggatgtgcttatgcaggattcc

SEQ ID NO: 5541383 - DNA, 25 bp, Homo sapien
tacaggtcaagtggtagccatgaaa

SEQ ID NO: 5541384 - DNA, 25 bp, Homo sapien
ttatatcaagctaaggaacatcctc

SEQ ID NO: 5541385 - DNA, 25 bp, Homo sapien
cgcggggctcctaacattgtatcaa

SEQ ID NO: 5541386 - DNA, 25 bp, Homo sapien
ccctggtcctcaggcagtgatggag

SEQ ID NO: 5541387 - DNA, 25 bp, Homo sapien
tgtgccatgatgttatccgtcaagt

SEQ ID NO: 5541388 - DNA, 25 bp, Homo sapien
actagtggcctggttataaatcaat

SEQ ID NO: 5541389 - DNA, 25 bp, Homo sapien
aatctaaggaaagtaacattatatc

SEQ ID NO: 5541390 - DNA, 25 bp, Homo sapien
tgttcttggtcatcagtagatacat

SEQ ID NO: 5541391 - DNA, 25 bp, Homo sapien
ttagcttgcttaggtttaacccagc

SEQ ID NO: 5541392 - DNA, 25 bp, Homo sapien
ttccttgcttatttcgcggggctcc

SEQ ID NO: 5541393 - DNA, 25 bp, Homo sapien
ggcagcaaaggaggcttgtttttgc

SEQ ID NO: 5541394 - DNA, 25 bp, Homo sapien
aggaggacttccgacccttctccca

SEQ ID NO: 5541395 - DNA, 25 bp, Homo sapien
cgtaccaccgcctccgcgtcgtggg

SEQ ID NO: 5541396 - DNA, 25 bp, Homo sapien
aaaaaagctcaagcttgggcgtttg

SEQ ID NO: 5541397 - DNA, 25 bp, Homo sapien
ggttgggggtcatccttcatccttc

SEQ ID NO: 5541398 - DNA, 25 bp, Homo sapien
ccaaaccctgcgcccaaggcgagag

SEQ ID NO: 5541399 - DNA, 25 bp, Homo sapien
gctgatgctccaggaaccagacctg

SEQ ID NO: 5541400 - DNA, 25 bp, Homo sapien
ggggagcgcgttcaccttcatcgct

SEQ ID NO: 5541401 - DNA, 25 bp, Homo sapien
attccttggaattgacagctgagcc

SEQ ID NO: 5541402 - DNA, 25 bp, Homo sapien
gggcgaggttgccctggcttctatc

SEQ ID NO: 5541403 - DNA, 25 bp, Homo sapien
gggggaggatgccttttgattctcc

SEQ ID NO: 5541404 - DNA, 25 bp, Homo sapien
cgcgtgggtcgaaccctacgaattc

SEQ ID NO: 5541405 - DNA, 25 bp, Homo sapien
ggcgtttgaggaatcgtaccaccgc

SEQ ID NO: 5541406 - DNA, 25 bp, Homo sapien
tcgtgcagcccaaacccttgccttc

SEQ ID NO: 5541407 - DNA, 25 bp, Homo sapien
tatgacctgaggaatatcgtgcagc

SEQ ID NO: 5541408 - DNA, 25 bp, Homo sapien
ggcgatgcaccactaatgagaatac

SEQ ID NO: 5541409 - DNA, 25 bp, Homo sapien
cgagagcctcactggttcccaggac

SEQ ID NO: 5541410 - DNA, 25 bp, Homo sapien
ttttccagtatggatggcgatgcac

SEQ ID NO: 5541411 - DNA, 25 bp, Homo sapien
aaaccgtaccctgatgggcaactgg

SEQ ID NO: 5541412 - DNA, 25 bp, Homo sapien
ggcagccttgttaatgcagatggcc

SEQ ID NO: 5541413 - DNA, 25 bp, Homo sapien
caactggaaccaggaaagatatgac

SEQ ID NO: 5541414 - DNA, 25 bp, Homo sapien
acacatagatttaagcgagagcctc

SEQ ID NO: 5541415 - DNA, 25 bp, Homo sapien
aagtgtggacagattggaataatat

SEQ ID NO: 5541416 - DNA, 25 bp, Homo sapien
ggacatcaacctgaactggatcctc

SEQ ID NO: 5541417 - DNA, 25 bp, Homo sapien
gctggcttgccaattgagagcaaac

SEQ ID NO: 5541418 - DNA, 25 bp, Homo sapien
atctcagggctttgtgaaaatgaaa

SEQ ID NO: 5541419 - DNA, 25 bp, Homo sapien
aagcattgctgatactaccctggtc

SEQ ID NO: 5541420 - DNA, 25 bp, Homo sapien
tgaaggtgtattgctggcttgccaa

SEQ ID NO: 5541421 - DNA, 25 bp, Homo sapien
acaatcagtgtaatgtcatcaatgt

SEQ ID NO: 5541422 - DNA, 25 bp, Homo sapien
ggctggagggttgatatattcctga

SEQ ID NO: 5541423 - DNA, 25 bp, Homo sapien
gaaaaggtgatcaagatgcctgcaa

SEQ ID NO: 5541424 - DNA, 25 bp, Homo sapien
aactaaattataacagggctggagg

SEQ ID NO: 5541425 - DNA, 25 bp, Homo sapien
accctggtctgccgtccacactcac

SEQ ID NO: 5541426 - DNA, 25 bp, Homo sapien
ggggaatgctgaatctcagggcttt

SEQ ID NO: 5541427 - DNA, 25 bp, Homo sapien
gagagcaaaccatcacacaaaacca

SEQ ID NO: 5541428 - DNA, 25 bp, Homo sapien
aggctgagcttttgaacttctgggt

SEQ ID NO: 5541429 - DNA, 25 bp, Homo sapien
tttttcctggtgacaaaggctgagc

SEQ ID NO: 5541430 - DNA, 25 bp, Homo sapien
gttgtgccgaataatggctttgctc

SEQ ID NO: 5541431 - DNA, 25 bp, Homo sapien
taaagtaaaatgatagctggggaac

SEQ ID NO: 5541432 - DNA, 25 bp, Homo sapien
taatgaggacgtgcatctttaggtc

SEQ ID NO: 5541433 - DNA, 25 bp, Homo sapien
tataggattctaggaaatagattcc

SEQ ID NO: 5541434 - DNA, 25 bp, Homo sapien
cccttgacactaacagagaacactg

SEQ ID NO: 5541435 - DNA, 25 bp, Homo sapien
agtacctccccattgtgtggatccc

SEQ ID NO: 5541436 - DNA, 25 bp, Homo sapien
aacagaatacctggttgtgccgaat

SEQ ID NO: 5541437 - DNA, 25 bp, Homo sapien
ttggcttggttctcttaaatggttc

SEQ ID NO: 5541438 - DNA, 25 bp, Homo sapien
gtggatcccacagatatgaagtcag

SEQ ID NO: 5541439 - DNA, 25 bp, Homo sapien
tgtgtattgtcttgtgccattctgc

SEQ ID NO: 5541440 - DNA, 25 bp, Homo sapien
tctccactcgtaaacaatttcctat

SEQ ID NO: 5541441 - DNA, 25 bp, Homo sapien
aaaacctcagcctacaaagactctc

SEQ ID NO: 5541442 - DNA, 25 bp, Homo sapien
gcctacaaagactctcagaaatgcc

SEQ ID NO: 5541443 - DNA, 25 bp, Homo sapien
taatatgagaatcagatccctagat

SEQ ID NO: 5541444 - DNA, 25 bp, Homo sapien
acctatactattaaactcaaccttg

SEQ ID NO: 5541445 - DNA, 25 bp, Homo sapien
cagaaatgccaaagattttcaagga

SEQ ID NO: 5541446 - DNA, 25 bp, Homo sapien
aaaagatgtttcaatggcaatactt

SEQ ID NO: 5541447 - DNA, 25 bp, Homo sapien
tcctctaatatgagaatcagatccc

SEQ ID NO: 5541448 - DNA, 25 bp, Homo sapien
aaattggagaaaatgtgtattgtct

SEQ ID NO: 5541449 - DNA, 25 bp, Homo sapien
caccaaccaaaatttaccatatgta

SEQ ID NO: 5541450 - DNA, 25 bp, Homo sapien
aagcagaaatcgggacatctggatt

SEQ ID NO: 5541451 - DNA, 25 bp, Homo sapien
atctctctgttgttggtctctgttc

SEQ ID NO: 5541452 - DNA, 25 bp, Homo sapien
cctggccaaactcccaaaagccaaa

SEQ ID NO: 5541453 - DNA, 25 bp, Homo sapien
atgactgatattgcccttgactgaa

SEQ ID NO: 5541454 - DNA, 25 bp, Homo sapien
tgggtgattttggggattcctctca

SEQ ID NO: 5541455 - DNA, 25 bp, Homo sapien
ctctgttctgaaaactggtggggtg

SEQ ID NO: 5541456 - DNA, 25 bp, Homo sapien
aaagccaaacatgtcacggaatgac

SEQ ID NO: 5541457 - DNA, 25 bp, Homo sapien
atctctcagcaagcagaaatcggga

SEQ ID NO: 5541458 - DNA, 25 bp, Homo sapien
ctgaaacccatccaaccctaaaatc

SEQ ID NO: 5541459 - DNA, 25 bp, Homo sapien
ccaatttggccgtgacctaggctgg

SEQ ID NO: 5541460 - DNA, 25 bp, Homo sapien
atcgggacatctggattctagaccc

SEQ ID NO: 5541461 - DNA, 25 bp, Homo sapien
ctcctctcttgcggttggctgcttc

SEQ ID NO: 5541462 - DNA, 25 bp, Homo sapien
tttgtgtaagttgctgatcctccag

SEQ ID NO: 5541463 - DNA, 25 bp, Homo sapien
ttagatccgggcaattatagccacc

SEQ ID NO: 5541464 - DNA, 25 bp, Homo sapien
catgactgatagataaatgaccatt

SEQ ID NO: 5541465 - DNA, 25 bp, Homo sapien
cttctggcctagtgatgtggcattt

SEQ ID NO: 5541466 - DNA, 25 bp, Homo sapien
aacaaaccaaggctgttgatccctg

SEQ ID NO: 5541467 - DNA, 25 bp, Homo sapien
aagggaggagcctttagtgcttttg

SEQ ID NO: 5541468 - DNA, 25 bp, Homo sapien
tgatatggaccaaagtacagtgttc

SEQ ID NO: 5541469 - DNA, 25 bp, Homo sapien
gtgaatctaagtatcagcccatggc

SEQ ID NO: 5541470 - DNA, 25 bp, Homo sapien
aatgcatgttatgccagggaaggaa

SEQ ID NO: 5541471 - DNA, 25 bp, Homo sapien
tatagccaccaagatgatatggacc

SEQ ID NO: 5541472 - DNA, 25 bp, Homo sapien
ccatgttggtgccaaggacttgcga

SEQ ID NO: 5541473 - DNA, 25 bp, Homo sapien
ttgtacgcagtttaaagatggtggg

SEQ ID NO: 5541474 - DNA, 25 bp, Homo sapien
ttaaagaataaggagcatttgaatc

SEQ ID NO: 5541475 - DNA, 25 bp, Homo sapien
taaaaatgttatccagcctgaccaa

SEQ ID NO: 5541476 - DNA, 25 bp, Homo sapien
tgtgtgtgttgcttccccaccctga

SEQ ID NO: 5541477 - DNA, 25 bp, Homo sapien
gaatctcttggaaaaggccatgaag

SEQ ID NO: 5541478 - DNA, 25 bp, Homo sapien
aagcagtcaaaaagaagtcctccat

SEQ ID NO: 5541479 - DNA, 25 bp, Homo sapien
tactactcaggacaagtatgccccg

SEQ ID NO: 5541480 - DNA, 25 bp, Homo sapien
gacaccatggcttactactcaggac

SEQ ID NO: 5541481 - DNA, 25 bp, Homo sapien
tggggacagactttgcctctaccta

SEQ ID NO: 5541482 - DNA, 25 bp, Homo sapien
gtatgccccgctcagggtgtgattt

SEQ ID NO: 5541483 - DNA, 25 bp, Homo sapien
gaagaagactctgtcaagactctca

SEQ ID NO: 5541484 - DNA, 25 bp, Homo sapien
tgctattgttctgcacgaggctggg

SEQ ID NO: 5541485 - DNA, 25 bp, Homo sapien
cagtggcttgctgagcccacctgct

SEQ ID NO: 5541486 - DNA, 25 bp, Homo sapien
gagaaactagaacagaagatgtgca

SEQ ID NO: 5541487 - DNA, 25 bp, Homo sapien
gcctgaagctcagcgtgaagtctga

SEQ ID NO: 5541488 - DNA, 25 bp, Homo sapien
acctggagtaattgtgcctgaagct

SEQ ID NO: 5541489 - DNA, 25 bp, Homo sapien
cccactgagacccatgcagagtttc

SEQ ID NO: 5541490 - DNA, 25 bp, Homo sapien
ttccaggtgtgcactggaagtgagg

SEQ ID NO: 5541491 - DNA, 25 bp, Homo sapien
cccgaagaacaggtgatatcggggg

SEQ ID NO: 5541492 - DNA, 25 bp, Homo sapien
gcctcactctccagggcctcatgcc

SEQ ID NO: 5541493 - DNA, 25 bp, Homo sapien
cagcataccctgcccctggatggga

SEQ ID NO: 5541494 - DNA, 25 bp, Homo sapien
gtcccccaagagagcatttggcaat

SEQ ID NO: 5541495 - DNA, 25 bp, Homo sapien
tgagactgctggtttagaacagtgg

SEQ ID NO: 5541496 - DNA, 25 bp, Homo sapien
catcctgctagggccccagcaaatt

SEQ ID NO: 5541497 - DNA, 25 bp, Homo sapien
gaatacagtgtggtgcccttgcatc

SEQ ID NO: 5541498 - DNA, 25 bp, Homo sapien
cacggtgaaaatggacagttaactt

SEQ ID NO: 5541499 - DNA, 25 bp, Homo sapien
cctcctaaaatgcacaggacaggcc

SEQ ID NO: 5541500 - DNA, 25 bp, Homo sapien
aaagggtcttaggacctcagtggtc

SEQ ID NO: 5541501 - DNA, 25 bp, Homo sapien
cctcagtggtccatggagaccatgc

SEQ ID NO: 5541502 - DNA, 25 bp, Homo sapien
gtaagtacaaatgtcgacacggtga

SEQ ID NO: 5541503 - DNA, 25 bp, Homo sapien
tggagaccatgctttgagactgctg

SEQ ID NO: 5541504 - DNA, 25 bp, Homo sapien
agggcatatactactggtaggggcc

SEQ ID NO: 5541505 - DNA, 25 bp, Homo sapien
caggcctctgtccctggcggccatc

SEQ ID NO: 5541506 - DNA, 25 bp, Homo sapien
gctgactaaactggaggctgaatac

SEQ ID NO: 5541507 - DNA, 25 bp, Homo sapien
ggagcagcccagactcaaggctgac

SEQ ID NO: 5541508 - DNA, 25 bp, Homo sapien
atttttcagtgggacagaaaggaga

SEQ ID NO: 5541509 - DNA, 25 bp, Homo sapien
tctcaagctgtgagaatgtgcgcag

SEQ ID NO: 5541510 - DNA, 25 bp, Homo sapien
acgcataaaacaccaggtgcgggag

SEQ ID NO: 5541511 - DNA, 25 bp, Homo sapien
ggaagcaggatggatacacatatat

SEQ ID NO: 5541512 - DNA, 25 bp, Homo sapien
gctcccgcccctgggcttgaggatg

SEQ ID NO: 5541513 - DNA, 25 bp, Homo sapien
tttgaccagcaatgatagactcttc

SEQ ID NO: 5541514 - DNA, 25 bp, Homo sapien
ccacaaagggaatgggtctgtttta

SEQ ID NO: 5541515 - DNA, 25 bp, Homo sapien
ctgaataccgtggaggtccacatgc

SEQ ID NO: 5541516 - DNA, 25 bp, Homo sapien
tgtttactaagggtgacagaaaata

SEQ ID NO: 5541517 - DNA, 25 bp, Homo sapien
ttgttgcaaaacagtagcacaggta

SEQ ID NO: 5541518 - DNA, 25 bp, Homo sapien
gatcccaacctggtaagtggaatgg

SEQ ID NO: 5541519 - DNA, 25 bp, Homo sapien
cagaactagcagcaggctctatggt

SEQ ID NO: 5541520 - DNA, 25 bp, Homo sapien
agtggaatgggttacttttatgtac

SEQ ID NO: 5541521 - DNA, 25 bp, Homo sapien
ttccataagcggatgtcctgtttac

SEQ ID NO: 5541522 - DNA, 25 bp, Homo sapien
actgttcaccccatagatgcgtaat

SEQ ID NO: 5541523 - DNA, 25 bp, Homo sapien
ttacaatgcgcataacagatttatc

SEQ ID NO: 5541524 - DNA, 25 bp, Homo sapien
agtattctcattggccagagagaac

SEQ ID NO: 5541525 - DNA, 25 bp, Homo sapien
ggtgacagaaaatagccccagagta

SEQ ID NO: 5541526 - DNA, 25 bp, Homo sapien
gtagcacaggtaatccgaatcattc

SEQ ID NO: 5541527 - DNA, 25 bp, Homo sapien
ccgagggagtcttgcacaaatcttg

SEQ ID NO: 5541528 - DNA, 25 bp, Homo sapien
gggtgtcaccaaggagaaatcttat

SEQ ID NO: 5541529 - DNA, 25 bp, Homo sapien
gggacgcttgcaggttccttgcagc

SEQ ID NO: 5541530 - DNA, 25 bp, Homo sapien
agcggcgaagctgatcttgccttct

SEQ ID NO: 5541531 - DNA, 25 bp, Homo sapien
tctggttatcaaagaggtcatctac

SEQ ID NO: 5541532 - DNA, 25 bp, Homo sapien
cgggctgagttgcagactttgtcat

SEQ ID NO: 5541533 - DNA, 25 bp, Homo sapien
ggtgcgggacccttgctcccaatcc

SEQ ID NO: 5541534 - DNA, 25 bp, Homo sapien
tgatgtgcttatcgccctaggtgat

SEQ ID NO: 5541535 - DNA, 25 bp, Homo sapien
gctccacggctggctttcgcagagc

SEQ ID NO: 5541536 - DNA, 25 bp, Homo sapien
cacaaatcttgcgccacgccgccgt

SEQ ID NO: 5541537 - DNA, 25 bp, Homo sapien
tcatctacgtcaacccttgggtgtc

SEQ ID NO: 5541538 - DNA, 25 bp, Homo sapien
gtcgtacgggggtctgtcgcgccga

SEQ ID NO: 5541539 - DNA, 25 bp, Homo sapien
tcggcgcgacagacccccgtacgac

SEQ ID NO: 5541540 - DNA, 25 bp, Homo sapien
ggtcgtacgggggtctgtcgcgccg

SEQ ID NO: 5541541 - DNA, 25 bp, Homo sapien
cggcgcgacagacccccgtacgacc

SEQ ID NO: 5541542 - DNA, 25 bp, Homo sapien
ctaaagggatctgcttaaagtttta

SEQ ID NO: 5541543 - DNA, 25 bp, Homo sapien
ccccaccctgccactcttgacattc

SEQ ID NO: 5541544 - DNA, 25 bp, Homo sapien
actgtgcgttttagaagagagcctt

SEQ ID NO: 5541545 - DNA, 25 bp, Homo sapien
gggcccttgtacaaccgacagctct

SEQ ID NO: 5541546 - DNA, 25 bp, Homo sapien
atttattctgcttcgagggtcccca

SEQ ID NO: 5541547 - DNA, 25 bp, Homo sapien
ttgattgcagatttttttggcgcgc

SEQ ID NO: 5541548 - DNA, 25 bp, Homo sapien
atagaaagcttcaatagaactgttt

SEQ ID NO: 5541549 - DNA, 25 bp, Homo sapien
gatttttttggcgcgctgccccctc

SEQ ID NO: 5541550 - DNA, 25 bp, Homo sapien
aagagagcctttttctaaagggatc

SEQ ID NO: 5541551 - DNA, 25 bp, Homo sapien
tctgagtgaattacagacaacctat

SEQ ID NO: 5541552 - DNA, 25 bp, Homo sapien
actcttgacattccactgtgcgttt

SEQ ID NO: 5541553 - DNA, 25 bp, Homo sapien
acaagtttggttctaggcactctgc

SEQ ID NO: 5541554 - DNA, 25 bp, Homo sapien
gtgagacataatggaatcaggcttc

SEQ ID NO: 5541555 - DNA, 25 bp, Homo sapien
agaggcctttgactggtccccagtg

SEQ ID NO: 5541556 - DNA, 25 bp, Homo sapien
gcagtgctccagtggtacagaagtg

SEQ ID NO: 5541557 - DNA, 25 bp, Homo sapien
ctttaaggagatcgtcgtcactgac

SEQ ID NO: 5541558 - DNA, 25 bp, Homo sapien
accttctgaacatcggctctggccc

SEQ ID NO: 5541559 - DNA, 25 bp, Homo sapien
tgtgtgtgatcttgaagggaacaga

SEQ ID NO: 5541560 - DNA, 25 bp, Homo sapien
ggtgctgaagtgtgatgtgactcag

SEQ ID NO: 5541561 - DNA, 25 bp, Homo sapien
cagtggtgacctatgtgtgtgatct

SEQ ID NO: 5541562 - DNA, 25 bp, Homo sapien
gcagaaagccagattcttaagcacc

SEQ ID NO: 5541563 - DNA, 25 bp, Homo sapien
actactcagaccagaacctgcagga

SEQ ID NO: 5541564 - DNA, 25 bp, Homo sapien
ttacaacatactgaagaataatgct

SEQ ID NO: 5541565 - DNA, 25 bp, Homo sapien
tatatctgctatccacccaaacatt

SEQ ID NO: 5541566 - DNA, 25 bp, Homo sapien
gactgattctattaacgattccttc

SEQ ID NO: 5541567 - DNA, 25 bp, Homo sapien
gctaagactacacaagaaagtgttt

SEQ ID NO: 5541568 - DNA, 25 bp, Homo sapien
agctctactaagtaccttaaggatc

SEQ ID NO: 5541569 - DNA, 25 bp, Homo sapien
gacatagtattaagttacagtaaac

SEQ ID NO: 5541570 - DNA, 25 bp, Homo sapien
aaactcagaagcattcaatatgatc

SEQ ID NO: 5541571 - DNA, 25 bp, Homo sapien
tccttgtggaattattggtttcagg

SEQ ID NO: 5541572 - DNA, 25 bp, Homo sapien
aacagaagactttcaaaatgtagtt

SEQ ID NO: 5541573 - DNA, 25 bp, Homo sapien
tgaaatatgaaaactcagcttctaa

SEQ ID NO: 5541574 - DNA, 25 bp, Homo sapien
tactgaagaataatgctaagactac

SEQ ID NO: 5541575 - DNA, 25 bp, Homo sapien
agatgcctagcccgaccttcctcac

SEQ ID NO: 5541576 - DNA, 25 bp, Homo sapien
tccagttactgggagtcagcaaaga

SEQ ID NO: 5541577 - DNA, 25 bp, Homo sapien
ccccccatcagtggacaaggggaga

SEQ ID NO: 5541578 - DNA, 25 bp, Homo sapien
atgagaaactcagggacttgtacag

SEQ ID NO: 5541579 - DNA, 25 bp, Homo sapien
cgcccagaacctgtacgagaagaca

SEQ ID NO: 5541580 - DNA, 25 bp, Homo sapien
gcccgctgtagatgagaaactcagg

SEQ ID NO: 5541581 - DNA, 25 bp, Homo sapien
gagaagacatacctgcccgctgtag

SEQ ID NO: 5541582 - DNA, 25 bp, Homo sapien
ctatgggcacacgactcctcccagc

SEQ ID NO: 5541583 - DNA, 25 bp, Homo sapien
taacagccagaccccccatcagtgg

SEQ ID NO: 5541584 - DNA, 25 bp, Homo sapien
gatcccccaggttcagactgagctc

SEQ ID NO: 5541585 - DNA, 25 bp, Homo sapien
ccttcccagtagctcttgcatcctc

SEQ ID NO: 5541586 - DNA, 25 bp, Homo sapien
tcaagttgcttctcatggatggcac

SEQ ID NO: 5541587 - DNA, 25 bp, Homo sapien
gactcagtccagccaacatttaatg

SEQ ID NO: 5541588 - DNA, 25 bp, Homo sapien
cttttctgaggactcaaggtgccaa

SEQ ID NO: 5541589 - DNA, 25 bp, Homo sapien
gcttctcatggatggcactgctttt

SEQ ID NO: 5541590 - DNA, 25 bp, Homo sapien
agggacttgtacagcaaaagcacag

SEQ ID NO: 5541591 - DNA, 25 bp, Homo sapien
aggggctgactcagtccagccaaca

SEQ ID NO: 5541592 - DNA, 25 bp, Homo sapien
gatggcactgcttttctgaggactc

SEQ ID NO: 5541593 - DNA, 25 bp, Homo sapien
acttgtacagcaaaagcacagcagc

SEQ ID NO: 5541594 - DNA, 25 bp, Homo sapien
ggagctctaacccatgggtccatgg

SEQ ID NO: 5541595 - DNA, 25 bp, Homo sapien
ccatgagcacttacacaggcatttt

SEQ ID NO: 5541596 - DNA, 25 bp, Homo sapien
tgtatggagctctaacccatgggtc

SEQ ID NO: 5541597 - DNA, 25 bp, Homo sapien
aaggaagagttcctgtcctgaagct

SEQ ID NO: 5541598 - DNA, 25 bp, Homo sapien
aacactcactcatcaagcaccttcc

SEQ ID NO: 5541599 - DNA, 25 bp, Homo sapien
acctagtgctgggagttcagttctt

SEQ ID NO: 5541600 - DNA, 25 bp, Homo sapien
tatttagctctagggagaggactag

SEQ ID NO: 5541601 - DNA, 25 bp, Homo sapien
tttctggtgtggccttgtagctagt

SEQ ID NO: 5541602 - DNA, 25 bp, Homo sapien
gggctcgcatgcaccctgctccctt

SEQ ID NO: 5541603 - DNA, 25 bp, Homo sapien
agtgcctgggcacaggtgtttttct

SEQ ID NO: 5541604 - DNA, 25 bp, Homo sapien
aaacttgaccaaggaagagttcctg

SEQ ID NO: 5541605 - DNA, 25 bp, Homo sapien
gtttaagctcctcccagtagattcc

SEQ ID NO: 5541606 - DNA, 25 bp, Homo sapien
agttagggaaccatatttgagactt

SEQ ID NO: 5541607 - DNA, 25 bp, Homo sapien
ggccttgtagctagtgcctgggcac

SEQ ID NO: 5541608 - DNA, 25 bp, Homo sapien
gtggtggccacttatcctgcaggag

SEQ ID NO: 5541609 - DNA, 25 bp, Homo sapien
ctgaccacaaaatgcaactgccaag

SEQ ID NO: 5541610 - DNA, 25 bp, Homo sapien
ctgccaagaatggcagatgagggat

SEQ ID NO: 5541611 - DNA, 25 bp, Homo sapien
cagtcttgtgtcctggagcagattg

SEQ ID NO: 5541612 - DNA, 25 bp, Homo sapien
tcagaactctgccccattggtggtc

SEQ ID NO: 5541613 - DNA, 25 bp, Homo sapien
cttggagcctcctgcagtgagtaga

SEQ ID NO: 5541614 - DNA, 25 bp, Homo sapien
cccaagaagaggcattcttaggcat

SEQ ID NO: 5541615 - DNA, 25 bp, Homo sapien
ggccagtggtagtttgagcttggta

SEQ ID NO: 5541616 - DNA, 25 bp, Homo sapien
gtgagtagagccaagtttcctgact

SEQ ID NO: 5541617 - DNA, 25 bp, Homo sapien
gtggctggtccacgtgtttctgccc

SEQ ID NO: 5541618 - DNA, 25 bp, Homo sapien
ttccttgaatggatgaggttggtgg

SEQ ID NO: 5541619 - DNA, 25 bp, Homo sapien
gcccagatgccgccatgctgttcac

SEQ ID NO: 5541620 - DNA, 25 bp, Homo sapien
ggacctcccagtgcagtgacctggc

SEQ ID NO: 5541621 - DNA, 25 bp, Homo sapien
agcgtgttgtctgtgcagagcgctg

SEQ ID NO: 5541622 - DNA, 25 bp, Homo sapien
aatgatcctgacgctcctgagggct

SEQ ID NO: 5541623 - DNA, 25 bp, Homo sapien
ggaggcctaaccagagttgaaaatg

SEQ ID NO: 5541624 - DNA, 25 bp, Homo sapien
ctcctccagcttcgcagcagccagg

SEQ ID NO: 5541625 - DNA, 25 bp, Homo sapien
agttgaaaatgatcctgacgctcct

SEQ ID NO: 5541626 - DNA, 25 bp, Homo sapien
tggcatctcagcccacgcagtcctc

SEQ ID NO: 5541627 - DNA, 25 bp, Homo sapien
tgccactaggtgttactgtggggcc

SEQ ID NO: 5541628 - DNA, 25 bp, Homo sapien
gaaggcaaggttgccactaggtgtt

SEQ ID NO: 5541629 - DNA, 25 bp, Homo sapien
acccttcaaagggtggcatctcagc

SEQ ID NO: 5541630 - DNA, 25 bp, Homo sapien
atgcaggtgacattaagtaagtccc

SEQ ID NO: 5541631 - DNA, 25 bp, Homo sapien
gtggtagaaataagtagtagaacga

SEQ ID NO: 5541632 - DNA, 25 bp, Homo sapien
tgtaggagctactatcaacacctca

SEQ ID NO: 5541633 - DNA, 25 bp, Homo sapien
taggaagctcggagctaaaaacagg

SEQ ID NO: 5541634 - DNA, 25 bp, Homo sapien
gactgtagaagatggtgttcccatc

SEQ ID NO: 5541635 - DNA, 25 bp, Homo sapien
tgttcccatcgccaggttacccaac

SEQ ID NO: 5541636 - DNA, 25 bp, Homo sapien
agggtttgaaaccagggtgatcaat

SEQ ID NO: 5541637 - DNA, 25 bp, Homo sapien
gcatgattccaaaggcagtgttctc

SEQ ID NO: 5541638 - DNA, 25 bp, Homo sapien
ctccccctcagcttacacaccccgt

SEQ ID NO: 5541639 - DNA, 25 bp, Homo sapien
gctggcctggagcaagttacttaac

SEQ ID NO: 5541640 - DNA, 25 bp, Homo sapien
gtaagtcccaactaggaagctcgga

SEQ ID NO: 5541641 - DNA, 25 bp, Homo sapien
actcgctgggcctctccttcgcttc

SEQ ID NO: 5541642 - DNA, 25 bp, Homo sapien
ataacccccagagacaggctggggc

SEQ ID NO: 5541643 - DNA, 25 bp, Homo sapien
cccgccgcacacgccctattcagca

SEQ ID NO: 5541644 - DNA, 25 bp, Homo sapien
acagcaaggtgcacctcaagcagaa

SEQ ID NO: 5541645 - DNA, 25 bp, Homo sapien
gaccacccagtgaataggcactacc

SEQ ID NO: 5541646 - DNA, 25 bp, Homo sapien
cactaccctgggattcaagacagtc

SEQ ID NO: 5541647 - DNA, 25 bp, Homo sapien
acccttgtcagccgcgctttggggg

SEQ ID NO: 5541648 - DNA, 25 bp, Homo sapien
gggggaagtcttctgagaccaccca

SEQ ID NO: 5541649 - DNA, 25 bp, Homo sapien
cggctcaagggcctcggcttttact

SEQ ID NO: 5541650 - DNA, 25 bp, Homo sapien
ctattcagcaccagctccgcggaca

SEQ ID NO: 5541651 - DNA, 25 bp, Homo sapien
ggtccaggcgctgtcacccttgtca

SEQ ID NO: 5541652 - DNA, 25 bp, Homo sapien
tggttgttgtgatgctcctacttcc

SEQ ID NO: 5541653 - DNA, 25 bp, Homo sapien
tagactgtgcatagctactagctgt

SEQ ID NO: 5541654 - DNA, 25 bp, Homo sapien
tgggaacaaaataagatatctaatc

SEQ ID NO: 5541655 - DNA, 25 bp, Homo sapien
ggatcatggtgcaggctagtaatag

SEQ ID NO: 5541656 - DNA, 25 bp, Homo sapien
ctgagccattgctgatagactgtgc

SEQ ID NO: 5541657 - DNA, 25 bp, Homo sapien
tgcagtggatcttgggaacaaaata

SEQ ID NO: 5541658 - DNA, 25 bp, Homo sapien
ggctagtaataggattcagaattgc

SEQ ID NO: 5541659 - DNA, 25 bp, Homo sapien
gaatagaggttcactgagccattgc

SEQ ID NO: 5541660 - DNA, 25 bp, Homo sapien
tatatcgaccatgtaagggattcta

SEQ ID NO: 5541661 - DNA, 25 bp, Homo sapien
ttcatagggaagtgaatgtaaccag

SEQ ID NO: 5541662 - DNA, 25 bp, Homo sapien
tcaaagtgctctgaaatcatccctc

SEQ ID NO: 5541663 - DNA, 25 bp, Homo sapien
tattccagcataaacacagtgctcc

SEQ ID NO: 5541664 - DNA, 25 bp, Homo sapien
gttaaaagaccaacgtgtgtggatc

SEQ ID NO: 5541665 - DNA, 25 bp, Homo sapien
tcaacagagctttaaattacggcag

SEQ ID NO: 5541666 - DNA, 25 bp, Homo sapien
acttatcaagcaaagatttgaaaat

SEQ ID NO: 5541667 - DNA, 25 bp, Homo sapien
ttgtgtgttcccagcaccggaaggt

SEQ ID NO: 5541668 - DNA, 25 bp, Homo sapien
gctttaaattacggcagcaagtcca

SEQ ID NO: 5541669 - DNA, 25 bp, Homo sapien
cacacctttcagaccgaacctactc

SEQ ID NO: 5541670 - DNA, 25 bp, Homo sapien
tttgagttgcttgcaggatgaaaat

SEQ ID NO: 5541671 - DNA, 25 bp, Homo sapien
agcaccggaaggtctcagacttcat

SEQ ID NO: 5541672 - DNA, 25 bp, Homo sapien
cgtgtgtggatcaaatataaaggcc

SEQ ID NO: 5541673 - DNA, 25 bp, Homo sapien
tcagcacggttaaaagaccaacgtg

SEQ ID NO: 5541674 - DNA, 25 bp, Homo sapien
ttgatggtgacaaagtgatattaat

SEQ ID NO: 5541675 - DNA, 25 bp, Homo sapien
ctggactgagcttatgcactaggtc

SEQ ID NO: 5541676 - DNA, 25 bp, Homo sapien
accaaaccaaaatgagtcactcatg

SEQ ID NO: 5541677 - DNA, 25 bp, Homo sapien
ccactttacaaacccacagttctgc

SEQ ID NO: 5541678 - DNA, 25 bp, Homo sapien
ggattctggactgagcttatgcact

SEQ ID NO: 5541679 - DNA, 25 bp, Homo sapien
tgcactaggtccaaacaaaccaaac

SEQ ID NO: 5541680 - DNA, 25 bp, Homo sapien
ttgtagcctaaagcttccctcttat

SEQ ID NO: 5541681 - DNA, 25 bp, Homo sapien
cactcatgctggatgtgacataatt

SEQ ID NO: 5541682 - DNA, 25 bp, Homo sapien
tgtttcacagtgagattcgagtcta

SEQ ID NO: 5541683 - DNA, 25 bp, Homo sapien
gtgagattcgagtctaaataagtac

SEQ ID NO: 5541684 - DNA, 25 bp, Homo sapien
gagaaattgttaaattagttgtagc

SEQ ID NO: 5541685 - DNA, 25 bp, Homo sapien
tttctaatgagcacaacaaaaagct

SEQ ID NO: 5541686 - DNA, 25 bp, Homo sapien
tacgaaggataaacacacgctaagt

SEQ ID NO: 5541687 - DNA, 25 bp, Homo sapien
ttgaatgaatacgaaggataaacac

SEQ ID NO: 5541688 - DNA, 25 bp, Homo sapien
cctgtttaaggccttgagagggaga

SEQ ID NO: 5541689 - DNA, 25 bp, Homo sapien
atgcagtttcaaagtcttcgacaat

SEQ ID NO: 5541690 - DNA, 25 bp, Homo sapien
caaaaagctccaatgtcacaatcta

SEQ ID NO: 5541691 - DNA, 25 bp, Homo sapien
acgctaagtttgaaatgagaaatcc

SEQ ID NO: 5541692 - DNA, 25 bp, Homo sapien
gctacacaggctgagtttcagaccc

SEQ ID NO: 5541693 - DNA, 25 bp, Homo sapien
gaaaagtaaacattggctataatca

SEQ ID NO: 5541694 - DNA, 25 bp, Homo sapien
aggcaaacaatgagaaccccagatg

SEQ ID NO: 5541695 - DNA, 25 bp, Homo sapien
aatgagaaccccagatgtgaaaggg

SEQ ID NO: 5541696 - DNA, 25 bp, Homo sapien
tggcatgagtcttattaaaacttat

SEQ ID NO: 5541697 - DNA, 25 bp, Homo sapien
ataagttttaataagactcatgcca

SEQ ID NO: 5541698 - DNA, 25 bp, Homo sapien
attgagagtcagaagctatgtagga

SEQ ID NO: 5541699 - DNA, 25 bp, Homo sapien
gcatagatccttgtgtcggccaggc

SEQ ID NO: 5541700 - DNA, 25 bp, Homo sapien
tttacaccctgagccacgacatctg

SEQ ID NO: 5541701 - DNA, 25 bp, Homo sapien
ggcagtaccactcagcgacagaaaa

SEQ ID NO: 5541702 - DNA, 25 bp, Homo sapien
ggcctgactctggcacataggtggg

SEQ ID NO: 5541703 - DNA, 25 bp, Homo sapien
ggctggcagagaatccccaatacac

SEQ ID NO: 5541704 - DNA, 25 bp, Homo sapien
agtaggtgcttgacaaatgatggta

SEQ ID NO: 5541705 - DNA, 25 bp, Homo sapien
acgacatctggactaggcagtacca

SEQ ID NO: 5541706 - DNA, 25 bp, Homo sapien
aagaggaaatagatgctgccattct

SEQ ID NO: 5541707 - DNA, 25 bp, Homo sapien
gttaaaaaggcagtgacacaccaca

SEQ ID NO: 5541708 - DNA, 25 bp, Homo sapien
cttctttgcaggaatggatgagaat

SEQ ID NO: 5541709 - DNA, 25 bp, Homo sapien
gtgatgcctcccacatcggcctgct

SEQ ID NO: 5541710 - DNA, 25 bp, Homo sapien
gcctcatgtgagaccacagggtttg

SEQ ID NO: 5541711 - DNA, 25 bp, Homo sapien
tcctccctgcctcatgtgagaccac

SEQ ID NO: 5541712 - DNA, 25 bp, Homo sapien
gcctcccacatcggcctgcttgggg

SEQ ID NO: 5541713 - DNA, 25 bp, Homo sapien
tggacagtggggactttccttctct

SEQ ID NO: 5541714 - DNA, 25 bp, Homo sapien
ctgcctcatgtgagaccacagggtt

SEQ ID NO: 5541715 - DNA, 25 bp, Homo sapien
gccattttcaaatttcctccctgcc

SEQ ID NO: 5541716 - DNA, 25 bp, Homo sapien
ccttctctctgtgatgggtttttgc

SEQ ID NO: 5541717 - DNA, 25 bp, Homo sapien
ctctctgtgatgggtttttgcacgg

SEQ ID NO: 5541718 - DNA, 25 bp, Homo sapien
tcatgtgagaccacagggtttggag

SEQ ID NO: 5541719 - DNA, 25 bp, Homo sapien
gcagttggaacccacgtgtggtgat

SEQ ID NO: 5541720 - DNA, 25 bp, Homo sapien
ataacatagattgaagcctcccctt

SEQ ID NO: 5541721 - DNA, 25 bp, Homo sapien
gttattcaaatgagagtcacgcttt

SEQ ID NO: 5541722 - DNA, 25 bp, Homo sapien
gcttccaacagacagtccctctcat

SEQ ID NO: 5541723 - DNA, 25 bp, Homo sapien
ttcatgagatctacttggtttaccc

SEQ ID NO: 5541724 - DNA, 25 bp, Homo sapien
taaagccttaacaatgcctactttc

SEQ ID NO: 5541725 - DNA, 25 bp, Homo sapien
gccaatagattgagaatttctggtt

SEQ ID NO: 5541726 - DNA, 25 bp, Homo sapien
ttagatagtgtattatgcttccaac

SEQ ID NO: 5541727 - DNA, 25 bp, Homo sapien
actgttaacatggaataaacacaat

SEQ ID NO: 5541728 - DNA, 25 bp, Homo sapien
ctaacccaataacctgtcccgttgc

SEQ ID NO: 5541729 - DNA, 25 bp, Homo sapien
cctgtcccgttgccaatagattgag

SEQ ID NO: 5541730 - DNA, 25 bp, Homo sapien
agactgctaatatcaaaggagaatt

SEQ ID NO: 5541731 - DNA, 25 bp, Homo sapien
gggatttggaccctgaggtcagacc

SEQ ID NO: 5541732 - DNA, 25 bp, Homo sapien
gggtgaccgatggcttcagttccct

SEQ ID NO: 5541733 - DNA, 25 bp, Homo sapien
cttgggtcctgcaatctccagggct

SEQ ID NO: 5541734 - DNA, 25 bp, Homo sapien
atccatcctgccagctccttgggtc

SEQ ID NO: 5541735 - DNA, 25 bp, Homo sapien
tgctggcctcccaataaagctggac

SEQ ID NO: 5541736 - DNA, 25 bp, Homo sapien
cccaagtccacctgcctatccatcc

SEQ ID NO: 5541737 - DNA, 25 bp, Homo sapien
aggtcagaccaacttcagccgtggc

SEQ ID NO: 5541738 - DNA, 25 bp, Homo sapien
gttaaggacaagttctctgagttct

SEQ ID NO: 5541739 - DNA, 25 bp, Homo sapien
gtggctgcctgagacctcaataccc

SEQ ID NO: 5541740 - DNA, 25 bp, Homo sapien
tcagttccctgaaagactactggag

SEQ ID NO: 5541741 - DNA, 25 bp, Homo sapien
gactactggagcaccgttaaggaca

SEQ ID NO: 5541742 - DNA, 25 bp, Homo sapien
accccacatccctcccggctgtagc

SEQ ID NO: 5541743 - DNA, 25 bp, Homo sapien
gtaataacacggggttcatgtggga

SEQ ID NO: 5541744 - DNA, 25 bp, Homo sapien
gaacatcgatactatggagagtctc

SEQ ID NO: 5541745 - DNA, 25 bp, Homo sapien
tgaggaactgaaagctatgttggtg

SEQ ID NO: 5541746 - DNA, 25 bp, Homo sapien
cggctgtagccaagaactattcggt

SEQ ID NO: 5541747 - DNA, 25 bp, Homo sapien
cagcctacacttgccaaccaacccc

SEQ ID NO: 5541748 - DNA, 25 bp, Homo sapien
accatagccctccggccggccttaa

SEQ ID NO: 5541749 - DNA, 25 bp, Homo sapien
ctggaagatttgtaataacacgggg

SEQ ID NO: 5541750 - DNA, 25 bp, Homo sapien
gttggtgtttgctgaacatcgatac

SEQ ID NO: 5541751 - DNA, 25 bp, Homo sapien
gcggtacctagtagctgataaatac

SEQ ID NO: 5541752 - DNA, 25 bp, Homo sapien
cttctgtcttttctggcgccctggg

SEQ ID NO: 5541753 - DNA, 25 bp, Homo sapien
gactactaagaatccctgtgccttc

SEQ ID NO: 5541754 - DNA, 25 bp, Homo sapien
ttccatccaggtagtagccgaagat

SEQ ID NO: 5541755 - DNA, 25 bp, Homo sapien
gggatgcctagtggcactcttcttg

SEQ ID NO: 5541756 - DNA, 25 bp, Homo sapien
agtagccgaagatgtaaatgtgaca

SEQ ID NO: 5541757 - DNA, 25 bp, Homo sapien
acacttgtaatctgaggagccttcc

SEQ ID NO: 5541758 - DNA, 25 bp, Homo sapien
gagggctcatttggagacatgactg

SEQ ID NO: 5541759 - DNA, 25 bp, Homo sapien
tcctcctcatcgtcagagggctcat

SEQ ID NO: 5541760 - DNA, 25 bp, Homo sapien
gtaaatgtgacattcccagaggtgc

SEQ ID NO: 5541761 - DNA, 25 bp, Homo sapien
agtaacagatattgtacaaagacat

SEQ ID NO: 5541762 - DNA, 25 bp, Homo sapien
aactgttcacagagtctacacttgt

SEQ ID NO: 5541763 - DNA, 25 bp, Homo sapien
cttgggccatttggttcctgagggg

SEQ ID NO: 5541764 - DNA, 25 bp, Homo sapien
ctcttcttacaacgaatgggacccc

SEQ ID NO: 5541765 - DNA, 25 bp, Homo sapien
gaggtgaaggccaacacatatgaaa

SEQ ID NO: 5541766 - DNA, 25 bp, Homo sapien
gcttggacgaaccttgacaggatgg

SEQ ID NO: 5541767 - DNA, 25 bp, Homo sapien
agaaaacgcctgtgttccaccgttc

SEQ ID NO: 5541768 - DNA, 25 bp, Homo sapien
aggcagctacggcttcctcccggaa

SEQ ID NO: 5541769 - DNA, 25 bp, Homo sapien
gggtgcagcgaactttccagagcac

SEQ ID NO: 5541770 - DNA, 25 bp, Homo sapien
cacatatgaaaagtactggccattt

SEQ ID NO: 5541771 - DNA, 25 bp, Homo sapien
actacatcggatctcggcttggacg

SEQ ID NO: 5541772 - DNA, 25 bp, Homo sapien
ggaactcctgtgcagctgacgacaa

SEQ ID NO: 5541773 - DNA, 25 bp, Homo sapien
atgggaccccttagaggaagtgata

SEQ ID NO: 5541774 - DNA, 25 bp, Homo sapien
tttgaaaaaggctgttgctgaaatt

SEQ ID NO: 5541775 - DNA, 25 bp, Homo sapien
tagtttcaggaatcccccaaatcac

SEQ ID NO: 5541776 - DNA, 25 bp, Homo sapien
tagtttaaagccaggagactgataa

SEQ ID NO: 5541777 - DNA, 25 bp, Homo sapien
agacaggaagacatatgagcaataa

SEQ ID NO: 5541778 - DNA, 25 bp, Homo sapien
tgacttggagatgcaacaaaaacac

SEQ ID NO: 5541779 - DNA, 25 bp, Homo sapien
ttaaatggttcaagatgtaacaact

SEQ ID NO: 5541780 - DNA, 25 bp, Homo sapien
atgctaaatgaaatatatctgctcc

SEQ ID NO: 5541781 - DNA, 25 bp, Homo sapien
ttatggtggaaacacaggaacaaat

SEQ ID NO: 5541782 - DNA, 25 bp, Homo sapien
tatgttcgatactaaggaaaaacta

SEQ ID NO: 5541783 - DNA, 25 bp, Homo sapien
attgagtagctgtgatatgttcgat

SEQ ID NO: 5541784 - DNA, 25 bp, Homo sapien
agactgataaaagggctcagggttt

SEQ ID NO: 5541785 - DNA, 25 bp, Homo sapien
ctttgacatgcgttgtagagtggga

SEQ ID NO: 5541786 - DNA, 25 bp, Homo sapien
tcagcttttatagtgaggtgcgggg

SEQ ID NO: 5541787 - DNA, 25 bp, Homo sapien
agaatccatgggaagtctgcaggat

SEQ ID NO: 5541788 - DNA, 25 bp, Homo sapien
gcaaggtttgcaccatggcagattc

SEQ ID NO: 5541789 - DNA, 25 bp, Homo sapien
caggtttctggcaaatgctgggtgg

SEQ ID NO: 5541790 - DNA, 25 bp, Homo sapien
tgggtggcatcctggcatcattaca

SEQ ID NO: 5541791 - DNA, 25 bp, Homo sapien
aggaaccaagtgaaaccaaatggcc

SEQ ID NO: 5541792 - DNA, 25 bp, Homo sapien
aatggccagatgtacggccaaggtc

SEQ ID NO: 5541793 - DNA, 25 bp, Homo sapien
agattctccgaacagagcagagcgt

SEQ ID NO: 5541794 - DNA, 25 bp, Homo sapien
atcattacaactggaggttaggagc

SEQ ID NO: 5541795 - DNA, 25 bp, Homo sapien
gcaggcaacgaaagaatccattcta

SEQ ID NO: 5541796 - DNA, 25 bp, Homo sapien
gtttgctgaggtgcttacagaatcc

SEQ ID NO: 5541797 - DNA, 25 bp, Homo sapien
agccggcacaagacccgaggtgtgt

SEQ ID NO: 5541798 - DNA, 25 bp, Homo sapien
acacacctcgggtcttgtgccggct

SEQ ID NO: 5541799 - DNA, 25 bp, Homo sapien
gaggggtcaggcccagtttaataca

SEQ ID NO: 5541800 - DNA, 25 bp, Homo sapien
ggcaggaacagagttcaaaaccaag

SEQ ID NO: 5541801 - DNA, 25 bp, Homo sapien
caccacctcccccacctgcagtctc

SEQ ID NO: 5541802 - DNA, 25 bp, Homo sapien
taatacacagaacaagttaattcac

SEQ ID NO: 5541803 - DNA, 25 bp, Homo sapien
tcctggattaggggacatcccccca

SEQ ID NO: 5541804 - DNA, 25 bp, Homo sapien
cgaacaacaaacacacacaaccaca

SEQ ID NO: 5541805 - DNA, 25 bp, Homo sapien
aaaccaaggttcacatcatgcagta

SEQ ID NO: 5541806 - DNA, 25 bp, Homo sapien
aacagagttcaaaaccaaggttcac

SEQ ID NO: 5541807 - DNA, 25 bp, Homo sapien
cacgccccctcactcccccaaaatg

SEQ ID NO: 5541808 - DNA, 25 bp, Homo sapien
ctcccccaaaatggccagcgagggg

SEQ ID NO: 5541809 - DNA, 25 bp, Homo sapien
gtggcggagtctgtgcttctcattc

SEQ ID NO: 5541810 - DNA, 25 bp, Homo sapien
aaatcagaagacgtcagacaaggaa

SEQ ID NO: 5541811 - DNA, 25 bp, Homo sapien
gaagaagcatactaatccaaatcct

SEQ ID NO: 5541812 - DNA, 25 bp, Homo sapien
gaaaataagcacatcctttggatcc

SEQ ID NO: 5541813 - DNA, 25 bp, Homo sapien
ttggctctggtaccgtagtttcctc

SEQ ID NO: 5541814 - DNA, 25 bp, Homo sapien
gaaaggagtctttatttgagaaagc

SEQ ID NO: 5541815 - DNA, 25 bp, Homo sapien
tgagaaagcaaagaaattcagtgaa

SEQ ID NO: 5541816 - DNA, 25 bp, Homo sapien
agcactacagcgagaaatataaata

SEQ ID NO: 5541817 - DNA, 25 bp, Homo sapien
tggggcagctgtcttctcgcaaatc

SEQ ID NO: 5541818 - DNA, 25 bp, Homo sapien
ctgagacaatcatagggccatagta

SEQ ID NO: 5541819 - DNA, 25 bp, Homo sapien
ggatccattgatctggtcaagttct

SEQ ID NO: 5541820 - DNA, 25 bp, Homo sapien
taaaagctggtttggctctggtacc

SEQ ID NO: 5541821 - DNA, 25 bp, Homo sapien
tggccgtaccgggatcttgtggacg

SEQ ID NO: 5541822 - DNA, 25 bp, Homo sapien
cgtccacaagatcccggtacggcca

SEQ ID NO: 5541823 - DNA, 25 bp, Homo sapien
tgctttaagcccaagcacggagtcc

SEQ ID NO: 5541824 - DNA, 25 bp, Homo sapien
ccgcgttccttcccagcctcagccc

SEQ ID NO: 5541825 - DNA, 25 bp, Homo sapien
ccagagctgtgggttcgagttctgg

SEQ ID NO: 5541826 - DNA, 25 bp, Homo sapien
aggaacacacacgcccaccacaatg

SEQ ID NO: 5541827 - DNA, 25 bp, Homo sapien
ccatctttctgctgtaggctgggct

SEQ ID NO: 5541828 - DNA, 25 bp, Homo sapien
ggatcatggagaaaggtccttgtct

SEQ ID NO: 5541829 - DNA, 25 bp, Homo sapien
catttctcaggaggtgattcaggaa

SEQ ID NO: 5541830 - DNA, 25 bp, Homo sapien
caatgactccactgggaccttgaac

SEQ ID NO: 5541831 - DNA, 25 bp, Homo sapien
agggcaacaaatatccggcacatcc

SEQ ID NO: 5541832 - DNA, 25 bp, Homo sapien
ctccccgtccgcgttccttcccagc

SEQ ID NO: 5541833 - DNA, 25 bp, Homo sapien
attcaggaacttagggcaacaaata

SEQ ID NO: 5541834 - DNA, 25 bp, Homo sapien
gggcagtcgccctatctggagcgag

SEQ ID NO: 5541835 - DNA, 25 bp, Homo sapien
ggggaaacagcatccataggaacca

SEQ ID NO: 5541836 - DNA, 25 bp, Homo sapien
tatcccgcccatcatcccagtactc

SEQ ID NO: 5541837 - DNA, 25 bp, Homo sapien
cttggcttcggaaacgcagatcaag

SEQ ID NO: 5541838 - DNA, 25 bp, Homo sapien
aggcggcagacatcaatccagttgg

SEQ ID NO: 5541839 - DNA, 25 bp, Homo sapien
cccctcgtttgggacgctagagggc

SEQ ID NO: 5541840 - DNA, 25 bp, Homo sapien
tccgcattctgcaggtgcagggact

SEQ ID NO: 5541841 - DNA, 25 bp, Homo sapien
ctccggcttgactaggtccgactgc

SEQ ID NO: 5541842 - DNA, 25 bp, Homo sapien
gagcgagaggtatccgcattctgca

SEQ ID NO: 5541843 - DNA, 25 bp, Homo sapien
gatcaagtgtatttcaggcggcaga

SEQ ID NO: 5541844 - DNA, 25 bp, Homo sapien
gcagggactgtgatccagcaccctg

SEQ ID NO: 5541845 - DNA, 25 bp, Homo sapien
agtagagccacttgtgtatcagacc

SEQ ID NO: 5541846 - DNA, 25 bp, Homo sapien
tttcagcaacgtcggcatctccaaa

SEQ ID NO: 5541847 - DNA, 25 bp, Homo sapien
cctgtgccagcctgttcacccttct

SEQ ID NO: 5541848 - DNA, 25 bp, Homo sapien
atacactacaacagaagtagagcca

SEQ ID NO: 5541849 - DNA, 25 bp, Homo sapien
aataaaagctgccctgatgtttgtc

SEQ ID NO: 5541850 - DNA, 25 bp, Homo sapien
cgtggcaggagcatcaatacatata

SEQ ID NO: 5541851 - DNA, 25 bp, Homo sapien
ggaatggccttccaggactagacac

SEQ ID NO: 5541852 - DNA, 25 bp, Homo sapien
aggacccaaacagcagcctatccca

SEQ ID NO: 5541853 - DNA, 25 bp, Homo sapien
agcacctaaccctcagatcagccct

SEQ ID NO: 5541854 - DNA, 25 bp, Homo sapien
gtatcagacctgttttgccacccac

SEQ ID NO: 5541855 - DNA, 25 bp, Homo sapien
actggccaactacatgcagggacag

SEQ ID NO: 5541856 - DNA, 25 bp, Homo sapien
tctagcctatagagtaaaaggaagc

SEQ ID NO: 5541857 - DNA, 25 bp, Homo sapien
atcaacacagaaacataggaatgga

SEQ ID NO: 5541858 - DNA, 25 bp, Homo sapien
gtattgcatagctagtagcagagat

SEQ ID NO: 5541859 - DNA, 25 bp, Homo sapien
cttcaagcactgtgcagagcctccc

SEQ ID NO: 5541860 - DNA, 25 bp, Homo sapien
tggagagtgagcatttagcatttct

SEQ ID NO: 5541861 - DNA, 25 bp, Homo sapien
tgggaatctacactatcaggaatgc

SEQ ID NO: 5541862 - DNA, 25 bp, Homo sapien
ggatcagccacccagcagtgaatac

SEQ ID NO: 5541863 - DNA, 25 bp, Homo sapien
tcacatgacaaaaaggctagagatc

SEQ ID NO: 5541864 - DNA, 25 bp, Homo sapien
ggaatggaaggattaagtggccttc

SEQ ID NO: 5541865 - DNA, 25 bp, Homo sapien
aggttccatagccagccttagctgc

SEQ ID NO: 5541866 - DNA, 25 bp, Homo sapien
gcccccaagactcacaatgcaatac

SEQ ID NO: 5541867 - DNA, 25 bp, Homo sapien
gaagcacaatgctttggactgtgat

SEQ ID NO: 5541868 - DNA, 25 bp, Homo sapien
tttggactgtgatttgagatttaga

SEQ ID NO: 5541869 - DNA, 25 bp, Homo sapien
gaaggaaaactgaccagagtagact

SEQ ID NO: 5541870 - DNA, 25 bp, Homo sapien
ctttagaaacttgagtagaaggaaa

SEQ ID NO: 5541871 - DNA, 25 bp, Homo sapien
agccttcaagatagaagatgccctt

SEQ ID NO: 5541872 - DNA, 25 bp, Homo sapien
caggctttagtgtttagggagagaa

SEQ ID NO: 5541873 - DNA, 25 bp, Homo sapien
atctggggaaataaatttaggcaaa

SEQ ID NO: 5541874 - DNA, 25 bp, Homo sapien
ctgaccagagtagactgcttcctta

SEQ ID NO: 5541875 - DNA, 25 bp, Homo sapien
gatatattattgaggcttagaatcc

SEQ ID NO: 5541876 - DNA, 25 bp, Homo sapien
agaaagtgtgggttaatagccttca

SEQ ID NO: 5541877 - DNA, 25 bp, Homo sapien
aggaaagaaaagtctaactagagct

SEQ ID NO: 5541878 - DNA, 25 bp, Homo sapien
actgacacctcagggtcgtggaggt

SEQ ID NO: 5541879 - DNA, 25 bp, Homo sapien
ggagccagtgctgccactgacacct

SEQ ID NO: 5541880 - DNA, 25 bp, Homo sapien
tctgagagtcattgacctggaggtc

SEQ ID NO: 5541881 - DNA, 25 bp, Homo sapien
attattcttgagggttctggagctg

SEQ ID NO: 5541882 - DNA, 25 bp, Homo sapien
ctgttgcagtttgaggttcctggag

SEQ ID NO: 5541883 - DNA, 25 bp, Homo sapien
gtgctgctgttctagtttgagagtc

SEQ ID NO: 5541884 - DNA, 25 bp, Homo sapien
ttctagtttgagagtcatggagctg

SEQ ID NO: 5541885 - DNA, 25 bp, Homo sapien
ccagaggaacaggtgctcctgttgc

SEQ ID NO: 5541886 - DNA, 25 bp, Homo sapien
catgagaagggattattcttgaggg

SEQ ID NO: 5541887 - DNA, 25 bp, Homo sapien
ttgtcatagttcaagggtcaggaag

SEQ ID NO: 5541888 - DNA, 25 bp, Homo sapien
ctcacatctgagggttttagagctg

SEQ ID NO: 5541889 - DNA, 25 bp, Homo sapien
tacagtgttgatcaatgcatcagtt

SEQ ID NO: 5541890 - DNA, 25 bp, Homo sapien
tatgcttatgtggttgttcagtttg

SEQ ID NO: 5541891 - DNA, 25 bp, Homo sapien
tttctgacccactgctaactgtagc

SEQ ID NO: 5541892 - DNA, 25 bp, Homo sapien
actgtcacgtaggtttgctgccttc

SEQ ID NO: 5541893 - DNA, 25 bp, Homo sapien
tttaattgcgggaatataataatat

SEQ ID NO: 5541894 - DNA, 25 bp, Homo sapien
ttcagtaatagcattgccttgagct

SEQ ID NO: 5541895 - DNA, 25 bp, Homo sapien
aataatattgggactgtttcacagc

SEQ ID NO: 5541896 - DNA, 25 bp, Homo sapien
aggaattaactggcattgggaacat

SEQ ID NO: 5541897 - DNA, 25 bp, Homo sapien
taagagacttgtgagcaaaacatac

SEQ ID NO: 5541898 - DNA, 25 bp, Homo sapien
atcagttaagaaataatgccacctc

SEQ ID NO: 5541899 - DNA, 25 bp, Homo sapien
tgctgccttcagaataccgcaattt

SEQ ID NO: 5541900 - DNA, 25 bp, Homo sapien
atacggtattggaaattttgaatgt

SEQ ID NO: 5541901 - DNA, 25 bp, Homo sapien
aagagtttacggtggaagaatccac

SEQ ID NO: 5541902 - DNA, 25 bp, Homo sapien
gatttgtaacaaaggactgtatggt

SEQ ID NO: 5541903 - DNA, 25 bp, Homo sapien
ttgaagccatagtctgtgatagtaa

SEQ ID NO: 5541904 - DNA, 25 bp, Homo sapien
acaaatatcactaaaaatacggtat

SEQ ID NO: 5541905 - DNA, 25 bp, Homo sapien
tacgtcacaaattaagacgctaatt

SEQ ID NO: 5541906 - DNA, 25 bp, Homo sapien
tattacaatgaacatgagtattctg

SEQ ID NO: 5541907 - DNA, 25 bp, Homo sapien
acaaaattaacaaaacaggagcctc

SEQ ID NO: 5541908 - DNA, 25 bp, Homo sapien
aaaatgaacattggccctttatgac

SEQ ID NO: 5541909 - DNA, 25 bp, Homo sapien
caggagcctctaagcataataacta

SEQ ID NO: 5541910 - DNA, 25 bp, Homo sapien
taacaaaggactgtatggtaggtac

SEQ ID NO: 5541911 - DNA, 25 bp, Homo sapien
tctgtaatacagcccacttaagttc

SEQ ID NO: 5541912 - DNA, 25 bp, Homo sapien
taagttcaagtactactctggccac

SEQ ID NO: 5541913 - DNA, 25 bp, Homo sapien
cccaaagaggctatacacaagagta

SEQ ID NO: 5541914 - DNA, 25 bp, Homo sapien
agagtaaacctcatgaatggacttg

SEQ ID NO: 5541915 - DNA, 25 bp, Homo sapien
actctggccacgtagtagcctcaca

SEQ ID NO: 5541916 - DNA, 25 bp, Homo sapien
taccgatatggtgacattatgtgta

SEQ ID NO: 5541917 - DNA, 25 bp, Homo sapien
gcaaccactttgaatgacagcattg

SEQ ID NO: 5541918 - DNA, 25 bp, Homo sapien
gaatggacttggagtgagcatttga

SEQ ID NO: 5541919 - DNA, 25 bp, Homo sapien
tatacacaagagtagagtaaacctc

SEQ ID NO: 5541920 - DNA, 25 bp, Homo sapien
ctacaacatccccaaagaggctata

SEQ ID NO: 5541921 - DNA, 25 bp, Homo sapien
tgaacaacctcaagttaccgatatg

SEQ ID NO: 5541922 - DNA, 25 bp, Homo sapien
gtagagaagggtgctgtatttattc

SEQ ID NO: 5541923 - DNA, 25 bp, Homo sapien
tctgagcctactgttttggatagcc

SEQ ID NO: 5541924 - DNA, 25 bp, Homo sapien
ttaagccaaagcagccaactacaat

SEQ ID NO: 5541925 - DNA, 25 bp, Homo sapien
acaactaattgggtaacacttcttc

SEQ ID NO: 5541926 - DNA, 25 bp, Homo sapien
ggagaaaagcgtggcctattaactg

SEQ ID NO: 5541927 - DNA, 25 bp, Homo sapien
aactggtgcagttagtgtgctaggt

SEQ ID NO: 5541928 - DNA, 25 bp, Homo sapien
tttgaactcttcagccaatggctct

SEQ ID NO: 5541929 - DNA, 25 bp, Homo sapien
ttagtgtgctaggtgccaaatggaa

SEQ ID NO: 5541930 - DNA, 25 bp, Homo sapien
attgaacttaaggataaagtgcttt

SEQ ID NO: 5541931 - DNA, 25 bp, Homo sapien
aagcgtggcctattaactggtgcag

SEQ ID NO: 5541932 - DNA, 25 bp, Homo sapien
tggcgtgctttggcagtccccatac

SEQ ID NO: 5541933 - DNA, 25 bp, Homo sapien
aagtggccccgggtaagccatataa

SEQ ID NO: 5541934 - DNA, 25 bp, Homo sapien
tctcagacatctgtgcctaccacct

SEQ ID NO: 5541935 - DNA, 25 bp, Homo sapien
aacaaggctgtggatcaaacagcgg

SEQ ID NO: 5541936 - DNA, 25 bp, Homo sapien
gagtaaggaagcagtttggtacttc

SEQ ID NO: 5541937 - DNA, 25 bp, Homo sapien
accagctcctaagggactgggagaa

SEQ ID NO: 5541938 - DNA, 25 bp, Homo sapien
ttccttttggtgtgagaggccacag

SEQ ID NO: 5541939 - DNA, 25 bp, Homo sapien
gttcctaagggactctctaaccagc

SEQ ID NO: 5541940 - DNA, 25 bp, Homo sapien
cttccagactgaggttaaagctctc

SEQ ID NO: 5541941 - DNA, 25 bp, Homo sapien
acaatgggattaagattagtacaat

SEQ ID NO: 5541942 - DNA, 25 bp, Homo sapien
aaagtgcctggctcacaccaagtat

SEQ ID NO: 5541943 - DNA, 25 bp, Homo sapien
accacctagactacactaccctctc

SEQ ID NO: 5541944 - DNA, 25 bp, Homo sapien
tccaggcttagctactcccatttcc

SEQ ID NO: 5541945 - DNA, 25 bp, Homo sapien
aggaccacatgtctgagtacagccc

SEQ ID NO: 5541946 - DNA, 25 bp, Homo sapien
acacttgaaactagactacttgctc

SEQ ID NO: 5541947 - DNA, 25 bp, Homo sapien
cttggacccatgagtaggatagata

SEQ ID NO: 5541948 - DNA, 25 bp, Homo sapien
agtacagccccatgcaagtcgcatc

SEQ ID NO: 5541949 - DNA, 25 bp, Homo sapien
attataatacctaggaccacatgtc

SEQ ID NO: 5541950 - DNA, 25 bp, Homo sapien
aggatagatagtccagaataaaacc

SEQ ID NO: 5541951 - DNA, 25 bp, Homo sapien
tagaaataaagtactcagcactgtt

SEQ ID NO: 5541952 - DNA, 25 bp, Homo sapien
ttcctgttaatctggggacaatccc

SEQ ID NO: 5541953 - DNA, 25 bp, Homo sapien
caaggaagatagtcacttgggaagg

SEQ ID NO: 5541954 - DNA, 25 bp, Homo sapien
gaataaaaccagtatcgtgtgatgt

SEQ ID NO: 5541955 - DNA, 25 bp, Homo sapien
ggagtacgacgtacttcccgaccat

SEQ ID NO: 5541956 - DNA, 25 bp, Homo sapien
atggtcgggaagtacgtcgtactcc

SEQ ID NO: 5541957 - DNA, 25 bp, Homo sapien
gtcttcctttggcatgggatgggga

SEQ ID NO: 5541958 - DNA, 25 bp, Homo sapien
gctgaaaacataacccactctgtcc

SEQ ID NO: 5541959 - DNA, 25 bp, Homo sapien
acccactctgtcctggaggcactgg

SEQ ID NO: 5541960 - DNA, 25 bp, Homo sapien
acaacgcaccagacactcacagcaa

SEQ ID NO: 5541961 - DNA, 25 bp, Homo sapien
ggatggagctgaaaacataacccac

SEQ ID NO: 5541962 - DNA, 25 bp, Homo sapien
gacactcacagcaaggatggagctg

SEQ ID NO: 5541963 - DNA, 25 bp, Homo sapien
ccagacactcacagcaaggatggag

SEQ ID NO: 5541964 - DNA, 25 bp, Homo sapien
actcacagcaaggatggagctgaaa

SEQ ID NO: 5541965 - DNA, 25 bp, Homo sapien
gcaccagacactcacagcaaggatg

SEQ ID NO: 5541966 - DNA, 25 bp, Homo sapien
ggagggtcttcctttggcatgggat

SEQ ID NO: 5541967 - DNA, 25 bp, Homo sapien
acactcacagcaaggatggagctga

SEQ ID NO: 5541968 - DNA, 25 bp, Homo sapien
atacacactatcatggataaaggat

SEQ ID NO: 5541969 - DNA, 25 bp, Homo sapien
atcctttatccatgatagtgtgtat

SEQ ID NO: 5541970 - DNA, 25 bp, Homo sapien
actattcaaatgaaggaaacgaagt

SEQ ID NO: 5541971 - DNA, 25 bp, Homo sapien
tgagacaacgaactccaagtgcgga

SEQ ID NO: 5541972 - DNA, 25 bp, Homo sapien
cagtgcactgcctaatgagacaacg

SEQ ID NO: 5541973 - DNA, 25 bp, Homo sapien
taaagttcacagtaccctcgcaatt

SEQ ID NO: 5541974 - DNA, 25 bp, Homo sapien
cagtaggtaaaatacgtaaagttca

SEQ ID NO: 5541975 - DNA, 25 bp, Homo sapien
ctgaagtactgtatgttgaagtaac

SEQ ID NO: 5541976 - DNA, 25 bp, Homo sapien
aatacaggaattacagaagaagaca

SEQ ID NO: 5541977 - DNA, 25 bp, Homo sapien
tccaagtgcggaccttttgagttta

SEQ ID NO: 5541978 - DNA, 25 bp, Homo sapien
atctgatgcatagcaggtactattc

SEQ ID NO: 5541979 - DNA, 25 bp, Homo sapien
gtgtgaaatctcaggatatagtgtc

SEQ ID NO: 5541980 - DNA, 25 bp, Homo sapien
gacaaccctggctttaaactgtgcc

SEQ ID NO: 5541981 - DNA, 25 bp, Homo sapien
tgtcgacccgggaatcgcggtcgac

SEQ ID NO: 5541982 - DNA, 25 bp, Homo sapien
gtcgaccgcgattcccgggtcgaca

SEQ ID NO: 5541983 - DNA, 25 bp, Homo sapien
gtctactggaagattggctcccttg

SEQ ID NO: 5541984 - DNA, 25 bp, Homo sapien
caggcagcccttggaagtttgctct

SEQ ID NO: 5541985 - DNA, 25 bp, Homo sapien
aaattgcctggcctaagaagtattc

SEQ ID NO: 5541986 - DNA, 25 bp, Homo sapien
tcaagtagatattccctggcaggct

SEQ ID NO: 5541987 - DNA, 25 bp, Homo sapien
cttggactcacttgaagatgataac

SEQ ID NO: 5541988 - DNA, 25 bp, Homo sapien
attggctcccttgatgatggcattg

SEQ ID NO: 5541989 - DNA, 25 bp, Homo sapien
gctgctcatggtagactggaaccac

SEQ ID NO: 5541990 - DNA, 25 bp, Homo sapien
ctctgtgaaagaggatcaagtagat

SEQ ID NO: 5541991 - DNA, 25 bp, Homo sapien
ctgtagttctcactccaggagcccc

SEQ ID NO: 5541992 - DNA, 25 bp, Homo sapien
ggtgtctgctgggccaatgcaatta

SEQ ID NO: 5541993 - DNA, 25 bp, Homo sapien
ctggaaacagcaggtctgtagttct

SEQ ID NO: 5541994 - DNA, 25 bp, Homo sapien
gacagcgttgatctgaaatcgcatc

SEQ ID NO: 5541995 - DNA, 25 bp, Homo sapien
cagagaaagcacttactaaaggggt

SEQ ID NO: 5541996 - DNA, 25 bp, Homo sapien
actaaaggggtatacttgattccac

SEQ ID NO: 5541997 - DNA, 25 bp, Homo sapien
gcaaacacacccatagctcacaggc

SEQ ID NO: 5541998 - DNA, 25 bp, Homo sapien
gctcacaggccaatgcctaaatatc

SEQ ID NO: 5541999 - DNA, 25 bp, Homo sapien
cattgcaggcaccttcagagaaagc

SEQ ID NO: 5542000 - DNA, 25 bp, Homo sapien
accatactggacagcgttgatctga

SEQ ID NO: 5542001 - DNA, 25 bp, Homo sapien
ataaccatgtgtgtccggtggctac

SEQ ID NO: 5542002 - DNA, 25 bp, Homo sapien
catctgcgaaagcacctgcaacttc

SEQ ID NO: 5542003 - DNA, 25 bp, Homo sapien
cagcatatttgcagagatccccatc

SEQ ID NO: 5542004 - DNA, 25 bp, Homo sapien
gcagcacacctgaggctcatctgcg

SEQ ID NO: 5542005 - DNA, 25 bp, Homo sapien
gtggtaagcactatgctgagagttt

SEQ ID NO: 5542006 - DNA, 25 bp, Homo sapien
attacagaggtaattagttgcatac

SEQ ID NO: 5542007 - DNA, 25 bp, Homo sapien
gtggccagttagctcagttggttag

SEQ ID NO: 5542008 - DNA, 25 bp, Homo sapien
acttggatacaaggcattgttatgc

SEQ ID NO: 5542009 - DNA, 25 bp, Homo sapien
attgagaaagttatgtggtaagcac

SEQ ID NO: 5542010 - DNA, 25 bp, Homo sapien
agaataaagaatcatgtggccagtt

SEQ ID NO: 5542011 - DNA, 25 bp, Homo sapien
ttctagagtgcttgctttgaaccac

SEQ ID NO: 5542012 - DNA, 25 bp, Homo sapien
gtaaggtaatagctggacttgaacc

SEQ ID NO: 5542013 - DNA, 25 bp, Homo sapien
gttggttagagtgtggagctcataa

SEQ ID NO: 5542014 - DNA, 25 bp, Homo sapien
gggtggaagccaacactacatgact

SEQ ID NO: 5542015 - DNA, 25 bp, Homo sapien
gtgcctgctcatattggggtggaag

SEQ ID NO: 5542016 - DNA, 25 bp, Homo sapien
actccagaaaggagacttcagatct

SEQ ID NO: 5542017 - DNA, 25 bp, Homo sapien
ggagcacgagagctgttcctagtca

SEQ ID NO: 5542018 - DNA, 25 bp, Homo sapien
ggagccccaagccttctgggctttg

SEQ ID NO: 5542019 - DNA, 25 bp, Homo sapien
ttgacacccgaagccaaaacattct

SEQ ID NO: 5542020 - DNA, 25 bp, Homo sapien
tcgagttaagaattatcccagaatc

SEQ ID NO: 5542021 - DNA, 25 bp, Homo sapien
cagaatccagctcaatggctgggag

SEQ ID NO: 5542022 - DNA, 25 bp, Homo sapien
cttctgaagtctaaagtgtaggcac

SEQ ID NO: 5542023 - DNA, 25 bp, Homo sapien
gccgtgccccagtccctcgtagcaa

SEQ ID NO: 5542024 - DNA, 25 bp, Homo sapien
gtccctcgtagcaagccctgaggcg

SEQ ID NO: 5542025 - DNA, 25 bp, Homo sapien
tctaaagtgtaggcactgcagcagt

SEQ ID NO: 5542026 - DNA, 25 bp, Homo sapien
acgtggctctagaaaggccagcatt

SEQ ID NO: 5542027 - DNA, 25 bp, Homo sapien
ggcctgctccctcaggaacagctcc

SEQ ID NO: 5542028 - DNA, 25 bp, Homo sapien
tccagcaccaataaagaggcatctt

SEQ ID NO: 5542029 - DNA, 25 bp, Homo sapien
ctcaggaacagctccagcaccaata

SEQ ID NO: 5542030 - DNA, 25 bp, Homo sapien
caccaataaagaggcatcttaccac

SEQ ID NO: 5542031 - DNA, 25 bp, Homo sapien
gctccagcaccaataaagaggcatc

SEQ ID NO: 5542032 - DNA, 25 bp, Homo sapien
ctgctccctcaggaacagctccagc

SEQ ID NO: 5542033 - DNA, 25 bp, Homo sapien
catggcctgctccctcaggaacagc

SEQ ID NO: 5542034 - DNA, 25 bp, Homo sapien
agagtatcccccgcaggcggaagta

SEQ ID NO: 5542035 - DNA, 25 bp, Homo sapien
gagggtcccatggcctgctccctca

SEQ ID NO: 5542036 - DNA, 25 bp, Homo sapien
gctccctcaggaacagctccagcac

SEQ ID NO: 5542037 - DNA, 25 bp, Homo sapien
acagctccagcaccaataaagaggc

SEQ ID NO: 5542038 - DNA, 25 bp, Homo sapien
atgagtcatggaaaggccatgtgca

SEQ ID NO: 5542039 - DNA, 25 bp, Homo sapien
tagcagtgacagtaaagcaaaccca

SEQ ID NO: 5542040 - DNA, 25 bp, Homo sapien
gcacagcgctcctggaatgctcaga

SEQ ID NO: 5542041 - DNA, 25 bp, Homo sapien
gtgactgatgttcaccgtggggtga

SEQ ID NO: 5542042 - DNA, 25 bp, Homo sapien
ggtcatctcggtgcactgagctgta

SEQ ID NO: 5542043 - DNA, 25 bp, Homo sapien
gtgcaagggaaagaccttgaggtta

SEQ ID NO: 5542044 - DNA, 25 bp, Homo sapien
agaggggttggttgtaaacatcctc

SEQ ID NO: 5542045 - DNA, 25 bp, Homo sapien
gcactgagctgtacacaccagggac

SEQ ID NO: 5542046 - DNA, 25 bp, Homo sapien
accttgtcctggtttggcagctgcc

SEQ ID NO: 5542047 - DNA, 25 bp, Homo sapien
ccttgaggttatctccggagagggg

SEQ ID NO: 5542048 - DNA, 25 bp, Homo sapien
gccctgagccatagtctcccccggt

SEQ ID NO: 5542049 - DNA, 25 bp, Homo sapien
tgcattacagagcatttggtaaact

SEQ ID NO: 5542050 - DNA, 25 bp, Homo sapien
agggatagcccttcaaaatgcatta

SEQ ID NO: 5542051 - DNA, 25 bp, Homo sapien
acacattgaagactgaactgaaggc

SEQ ID NO: 5542052 - DNA, 25 bp, Homo sapien
gtgatatcagatagctgtgttcagc

SEQ ID NO: 5542053 - DNA, 25 bp, Homo sapien
catttgtttggtgggaaatgatggt

SEQ ID NO: 5542054 - DNA, 25 bp, Homo sapien
ctgaactgaaggccgcactctttct

SEQ ID NO: 5542055 - DNA, 25 bp, Homo sapien
caggtggggctcccacttgctggaa

SEQ ID NO: 5542056 - DNA, 25 bp, Homo sapien
tcccatcactgctggaagctcagtt

SEQ ID NO: 5542057 - DNA, 25 bp, Homo sapien
ttcagcggttgcaaacaaatgaaga

SEQ ID NO: 5542058 - DNA, 25 bp, Homo sapien
tggatgagcttgcaggttcctgtca

SEQ ID NO: 5542059 - DNA, 25 bp, Homo sapien
atttatataggattgtagagtttgc

SEQ ID NO: 5542060 - DNA, 25 bp, Homo sapien
aagaacttattgcacagggcgaatt

SEQ ID NO: 5542061 - DNA, 25 bp, Homo sapien
aggaaatacagagctatgaaacaac

SEQ ID NO: 5542062 - DNA, 25 bp, Homo sapien
aaaatgggaagatatacatgttgtg

SEQ ID NO: 5542063 - DNA, 25 bp, Homo sapien
gcgtgccggaaagtatgttatgcat

SEQ ID NO: 5542064 - DNA, 25 bp, Homo sapien
gtaaaaaatccctgagctgccctac

SEQ ID NO: 5542065 - DNA, 25 bp, Homo sapien
catacggagaaagtatcagcaactt

SEQ ID NO: 5542066 - DNA, 25 bp, Homo sapien
atctgctgtatcttggacgagacta

SEQ ID NO: 5542067 - DNA, 25 bp, Homo sapien
gatgtgaagaatccagagaagatca

SEQ ID NO: 5542068 - DNA, 25 bp, Homo sapien
aaaggagcagactattttaaaaagc

SEQ ID NO: 5542069 - DNA, 25 bp, Homo sapien
gataaatgaaaatggccaattcttt

SEQ ID NO: 5542070 - DNA, 25 bp, Homo sapien
atttgtaatgaaagagctagaagct

SEQ ID NO: 5542071 - DNA, 25 bp, Homo sapien
ctgtgagaggaactataattcaaac

SEQ ID NO: 5542072 - DNA, 25 bp, Homo sapien
cttgcaggaatatatacatcccagc

SEQ ID NO: 5542073 - DNA, 25 bp, Homo sapien
aaaagacagcctagcgcacatacaa

SEQ ID NO: 5542074 - DNA, 25 bp, Homo sapien
gtgcagctaggaagattatacccag

SEQ ID NO: 5542075 - DNA, 25 bp, Homo sapien
agtcattgaaaagagtgagtaaaac

SEQ ID NO: 5542076 - DNA, 25 bp, Homo sapien
cactggtgaactgtattgtagactg

SEQ ID NO: 5542077 - DNA, 25 bp, Homo sapien
tttgaatggatgactcctctgatac

SEQ ID NO: 5542078 - DNA, 25 bp, Homo sapien
gaaacaacacacatactgctcccat

SEQ ID NO: 5542079 - DNA, 25 bp, Homo sapien
aacatatcggatactgcagtggaag

SEQ ID NO: 5542080 - DNA, 25 bp, Homo sapien
tactgcagtggaagaactgtgtttt

SEQ ID NO: 5542081 - DNA, 25 bp, Homo sapien
catccagcaatgtgaagccatttcc

SEQ ID NO: 5542082 - DNA, 25 bp, Homo sapien
tgaatggaaataacataatgctgtc

SEQ ID NO: 5542083 - DNA, 25 bp, Homo sapien
gcagtgttctgcattggtgccccca

SEQ ID NO: 5542084 - DNA, 25 bp, Homo sapien
caagaacagatgaagggttaatact

SEQ ID NO: 5542085 - DNA, 25 bp, Homo sapien
gatgagcctgtttacacacaaactc

SEQ ID NO: 5542086 - DNA, 25 bp, Homo sapien
cctttaggactcagtgcagtgttct

SEQ ID NO: 5542087 - DNA, 25 bp, Homo sapien
ttggtgcccccacaacatgtccatc

SEQ ID NO: 5542088 - DNA, 25 bp, Homo sapien
taagtaatagtgaatggaaataaca

SEQ ID NO: 5542089 - DNA, 25 bp, Homo sapien
cactcacaagtcagtctggggcatt

SEQ ID NO: 5542090 - DNA, 25 bp, Homo sapien
ccccaaccagtttcaagaacagatg

SEQ ID NO: 5542091 - DNA, 25 bp, Homo sapien
ctgaaacccagagactctgccctca

SEQ ID NO: 5542092 - DNA, 25 bp, Homo sapien
tctggggcattgcctataaggctcc

SEQ ID NO: 5542093 - DNA, 25 bp, Homo sapien
ggaattttagtgaagtataagccat

SEQ ID NO: 5542094 - DNA, 25 bp, Homo sapien
atgatgagtaactgttgacaaagta

SEQ ID NO: 5542095 - DNA, 25 bp, Homo sapien
ctatgtgactctacaggctactagt

SEQ ID NO: 5542096 - DNA, 25 bp, Homo sapien
ctcacagttgattagcctttgtttc

SEQ ID NO: 5542097 - DNA, 25 bp, Homo sapien
tgcttgcgccacccaaagaattcac

SEQ ID NO: 5542098 - DNA, 25 bp, Homo sapien
gtcctaacatctatgcttgcgccac

SEQ ID NO: 5542099 - DNA, 25 bp, Homo sapien
ataagccattaatgatgagtaactg

SEQ ID NO: 5542100 - DNA, 25 bp, Homo sapien
catgagaaaatgattgttcctttac

SEQ ID NO: 5542101 - DNA, 25 bp, Homo sapien
gttgacaaagtattcagaaacgatt

SEQ ID NO: 5542102 - DNA, 25 bp, Homo sapien
acaggctactagttggttttccatg

SEQ ID NO: 5542103 - DNA, 25 bp, Homo sapien
cagaaacgatttacaaaatggacat

SEQ ID NO: 5542104 - DNA, 25 bp, Homo sapien
ggtctgggaatgcaggtattcaaga

SEQ ID NO: 5542105 - DNA, 25 bp, Homo sapien
ttcatgtcaggcaaagacaccctgt

SEQ ID NO: 5542106 - DNA, 25 bp, Homo sapien
taagaattattccctgccagtgaga

SEQ ID NO: 5542107 - DNA, 25 bp, Homo sapien
ccaaactccaaagtagtgccttcag

SEQ ID NO: 5542108 - DNA, 25 bp, Homo sapien
aagtagtgccttcagaaacagttcc

SEQ ID NO: 5542109 - DNA, 25 bp, Homo sapien
tgcaggtattcaagacataaaaagt

SEQ ID NO: 5542110 - DNA, 25 bp, Homo sapien
ttatatttgcgtaaagacttggaga

SEQ ID NO: 5542111 - DNA, 25 bp, Homo sapien
gacaccctgttgtccacacaccctc

SEQ ID NO: 5542112 - DNA, 25 bp, Homo sapien
tttgccacacagccttgtaagaatt

SEQ ID NO: 5542113 - DNA, 25 bp, Homo sapien
cagaaacagttccttgaatgacttt

SEQ ID NO: 5542114 - DNA, 25 bp, Homo sapien
ccctcaccccgcactctcccacact

SEQ ID NO: 5542115 - DNA, 25 bp, Homo sapien
tgtttccagggttcagccatggcag

SEQ ID NO: 5542116 - DNA, 25 bp, Homo sapien
gttgtacaggccaggaaattcactt

SEQ ID NO: 5542117 - DNA, 25 bp, Homo sapien
tgaaacctctgagcaggggttgtac

SEQ ID NO: 5542118 - DNA, 25 bp, Homo sapien
tgtctctcaggagggtaaacaatgg

SEQ ID NO: 5542119 - DNA, 25 bp, Homo sapien
gggcaaaggtcgttaacagcttctg

SEQ ID NO: 5542120 - DNA, 25 bp, Homo sapien
tgctgcctgccaggattgatgtagg

SEQ ID NO: 5542121 - DNA, 25 bp, Homo sapien
tcatttccagtcagtggcccctgtg

SEQ ID NO: 5542122 - DNA, 25 bp, Homo sapien
gtctgggccacaatcagaagtcctt

SEQ ID NO: 5542123 - DNA, 25 bp, Homo sapien
gtctgtctcctgggatatccgggcc

SEQ ID NO: 5542124 - DNA, 25 bp, Homo sapien
gagactgtatttgcagtgaaacctc

SEQ ID NO: 5542125 - DNA, 25 bp, Homo sapien
gatcatttctgtcaagggtctgggc

SEQ ID NO: 5542126 - DNA, 25 bp, Homo sapien
gtgaatccgaagggcatgatcttcc

SEQ ID NO: 5542127 - DNA, 25 bp, Homo sapien
acgggcctcaggcaaaaatgccctt

SEQ ID NO: 5542128 - DNA, 25 bp, Homo sapien
caggagggttgtataacaagtagtg

SEQ ID NO: 5542129 - DNA, 25 bp, Homo sapien
tgaagactgccaaacagcccagaag

SEQ ID NO: 5542130 - DNA, 25 bp, Homo sapien
gcatctgcataatcaggagggttgt

SEQ ID NO: 5542131 - DNA, 25 bp, Homo sapien
gatttggcaaatatgtgggtagctt

SEQ ID NO: 5542132 - DNA, 25 bp, Homo sapien
ggcaaaaatgcccttcgagtgaatc

SEQ ID NO: 5542133 - DNA, 25 bp, Homo sapien
agaaggaagcaaagcatctgcataa

SEQ ID NO: 5542134 - DNA, 25 bp, Homo sapien
caggctgatagctttgaagactgcc

SEQ ID NO: 5542135 - DNA, 25 bp, Homo sapien
tctgattgctacctgatggccattc

SEQ ID NO: 5542136 - DNA, 25 bp, Homo sapien
taggcatgacgagtcatttgaggtc

SEQ ID NO: 5542137 - DNA, 25 bp, Homo sapien
ggcctgtgacctcacgaggccagcc

SEQ ID NO: 5542138 - DNA, 25 bp, Homo sapien
gtccttgccacccgctcgccactct

SEQ ID NO: 5542139 - DNA, 25 bp, Homo sapien
agttgggcaaaatacttaacgctcc

SEQ ID NO: 5542140 - DNA, 25 bp, Homo sapien
gtgcgctgtcccgccatggtctgac

SEQ ID NO: 5542141 - DNA, 25 bp, Homo sapien
tgcgctttcctcccgcagccccggc

SEQ ID NO: 5542142 - DNA, 25 bp, Homo sapien
gccccacctcgtaagggcctgtgac

SEQ ID NO: 5542143 - DNA, 25 bp, Homo sapien
gaaggccatgtgtcccacggctttg

SEQ ID NO: 5542144 - DNA, 25 bp, Homo sapien
ctcaataatggacagcagctcgaag

SEQ ID NO: 5542145 - DNA, 25 bp, Homo sapien
ggctcctgtccgtgcgctttcctcc

SEQ ID NO: 5542146 - DNA, 25 bp, Homo sapien
tgtatttatcgtatgcagttgggca

SEQ ID NO: 5542147 - DNA, 25 bp, Homo sapien
ccgggattccgccctccgtccttgc

SEQ ID NO: 5542148 - DNA, 25 bp, Homo sapien
cccagcctgcatgggtttcctcggc

SEQ ID NO: 5542149 - DNA, 25 bp, Homo sapien
gtgccatgagcccagggctccgtgg

SEQ ID NO: 5542150 - DNA, 25 bp, Homo sapien
ccctcctgtgtcctgcctgcttgtg

SEQ ID NO: 5542151 - DNA, 25 bp, Homo sapien
tgccatgagcccagggctccgtggg

SEQ ID NO: 5542152 - DNA, 25 bp, Homo sapien
aggaaaatgcccggcctcacagagt

SEQ ID NO: 5542153 - DNA, 25 bp, Homo sapien
ctgaggaaaatgcccggcctcacag

SEQ ID NO: 5542154 - DNA, 25 bp, Homo sapien
catgggtttcctcggcaaggacaag

SEQ ID NO: 5542155 - DNA, 25 bp, Homo sapien
gtgggcagtgccatccctcctgtgt

SEQ ID NO: 5542156 - DNA, 25 bp, Homo sapien
acctgggcccatcacaggaatggtg

SEQ ID NO: 5542157 - DNA, 25 bp, Homo sapien
agcacctgggcccatcacaggaatg

SEQ ID NO: 5542158 - DNA, 25 bp, Homo sapien
cctgcatgggtttcctcggcaagga

SEQ ID NO: 5542159 - DNA, 25 bp, Homo sapien
tgaattcgagcagtagtagtagtag

SEQ ID NO: 5542160 - DNA, 25 bp, Homo sapien
cagtctttcttggcagcagctttcc

SEQ ID NO: 5542161 - DNA, 25 bp, Homo sapien
tgtccccgtacatcgttagaagctt

SEQ ID NO: 5542162 - DNA, 25 bp, Homo sapien
gaggggctcagtctttcttggcagc

SEQ ID NO: 5542163 - DNA, 25 bp, Homo sapien
tggcagcagctttcctcatgtcccc

SEQ ID NO: 5542164 - DNA, 25 bp, Homo sapien
ccgtacatcgttagaagcttgaatt

SEQ ID NO: 5542165 - DNA, 25 bp, Homo sapien
tccccgtacatcgttagaagcttga

SEQ ID NO: 5542166 - DNA, 25 bp, Homo sapien
tagaagcttgaattcgagcagtagt

SEQ ID NO: 5542167 - DNA, 25 bp, Homo sapien
atgtccccgtacatcgttagaagct

SEQ ID NO: 5542168 - DNA, 25 bp, Homo sapien
gttctttatttcagggagagggcag

SEQ ID NO: 5542169 - DNA, 25 bp, Homo sapien
tcgttagaagcttgaattcgagcag

SEQ ID NO: 5542170 - DNA, 25 bp, Homo sapien
ttacctgttagctccctgtggggca

SEQ ID NO: 5542171 - DNA, 25 bp, Homo sapien
cagggctatagcagaaagaacttta

SEQ ID NO: 5542172 - DNA, 25 bp, Homo sapien
ccaacaagaccgccccagggctata

SEQ ID NO: 5542173 - DNA, 25 bp, Homo sapien
aagaggcccactagagggcccatca

SEQ ID NO: 5542174 - DNA, 25 bp, Homo sapien
gcagctgatgcataggactaccgca

SEQ ID NO: 5542175 - DNA, 25 bp, Homo sapien
aggcggggtattcccactcaccagc

SEQ ID NO: 5542176 - DNA, 25 bp, Homo sapien
tggagccatcccttcggagccaaca

SEQ ID NO: 5542177 - DNA, 25 bp, Homo sapien
ccagccctagctgtcccatggggaa

SEQ ID NO: 5542178 - DNA, 25 bp, Homo sapien
ctgggaagagctcccctccacagct

SEQ ID NO: 5542179 - DNA, 25 bp, Homo sapien
agtgccaggaccagcctgtaccttg

SEQ ID NO: 5542180 - DNA, 25 bp, Homo sapien
aggcccggactcaccaacttgccac

SEQ ID NO: 5542181 - DNA, 25 bp, Homo sapien
gccggacctgagggattcctttgat

SEQ ID NO: 5542182 - DNA, 25 bp, Homo sapien
tccagcccctgctatgaacccagcc

SEQ ID NO: 5542183 - DNA, 25 bp, Homo sapien
tctctttgtgtgagcggaacaagga

SEQ ID NO: 5542184 - DNA, 25 bp, Homo sapien
gccctctgtttgggctgagcgggga

SEQ ID NO: 5542185 - DNA, 25 bp, Homo sapien
caagcatgtgttttacctggcaagc

SEQ ID NO: 5542186 - DNA, 25 bp, Homo sapien
aggggatcacaggaaatgatctcct

SEQ ID NO: 5542187 - DNA, 25 bp, Homo sapien
cctttgatggcgggctctctttgtg

SEQ ID NO: 5542188 - DNA, 25 bp, Homo sapien
atgatctcctctagaaaagacaaag

SEQ ID NO: 5542189 - DNA, 25 bp, Homo sapien
gatgttcccccaactgtccagcccc

SEQ ID NO: 5542190 - DNA, 25 bp, Homo sapien
cctgccgcaagacacaggtaagatg

SEQ ID NO: 5542191 - DNA, 25 bp, Homo sapien
tttacctggcaagcctgccgcaaga

SEQ ID NO: 5542192 - DNA, 25 bp, Homo sapien
acaggagtctcctagggacccgacc

SEQ ID NO: 5542193 - DNA, 25 bp, Homo sapien
ggtcgggtccctaggagactcctgt

SEQ ID NO: 5542194 - DNA, 25 bp, Homo sapien
ctgacaaccacaagtggaaacttgc

SEQ ID NO: 5542195 - DNA, 25 bp, Homo sapien
gattcccgatgtgccaggattctcc

SEQ ID NO: 5542196 - DNA, 25 bp, Homo sapien
agaccacagtttggcaattggaagc

SEQ ID NO: 5542197 - DNA, 25 bp, Homo sapien
agtggaaacttgcatggacaacctg

SEQ ID NO: 5542198 - DNA, 25 bp, Homo sapien
aaactctaggcattaaatacttttc

SEQ ID NO: 5542199 - DNA, 25 bp, Homo sapien
aaggaaagattcccgatgtgccagg

SEQ ID NO: 5542200 - DNA, 25 bp, Homo sapien
caccctgatcttggagtcatctggg

SEQ ID NO: 5542201 - DNA, 25 bp, Homo sapien
tctcctgggtgactccctgtatatc

SEQ ID NO: 5542202 - DNA, 25 bp, Homo sapien
ggatgctcacactgatatcaacact

SEQ ID NO: 5542203 - DNA, 25 bp, Homo sapien
gggtccaccctgatcttggagtcat

SEQ ID NO: 5542204 - DNA, 25 bp, Homo sapien
aattggaagcatctctggccatgcc

SEQ ID NO: 5542205 - DNA, 25 bp, Homo sapien
ggattatggggacctgccctttgct

SEQ ID NO: 5542206 - DNA, 25 bp, Homo sapien
aaaggctggtctgcttgagaaactt

SEQ ID NO: 5542207 - DNA, 25 bp, Homo sapien
agcgccaagtccagaaccataggga

SEQ ID NO: 5542208 - DNA, 25 bp, Homo sapien
gaaccatagggattattggagctcc

SEQ ID NO: 5542209 - DNA, 25 bp, Homo sapien
tgagaaacttaaagaacaagagtgt

SEQ ID NO: 5542210 - DNA, 25 bp, Homo sapien
gctgacatccctaatgacagtccct

SEQ ID NO: 5542211 - DNA, 25 bp, Homo sapien
ggggacctgccctttgctgacatcc

SEQ ID NO: 5542212 - DNA, 25 bp, Homo sapien
cctttctcaaagggacagccacgag

SEQ ID NO: 5542213 - DNA, 25 bp, Homo sapien
tggaagaaggccctacagtattgag

SEQ ID NO: 5542214 - DNA, 25 bp, Homo sapien
ttaaagaacaagagtgtgatgtgaa

SEQ ID NO: 5542215 - DNA, 25 bp, Homo sapien
gccctacagtattgagaaaggctgg

SEQ ID NO: 5542216 - DNA, 25 bp, Homo sapien
gaggctgcaacacaaagatagtact

SEQ ID NO: 5542217 - DNA, 25 bp, Homo sapien
gttggttgtccagcaaatggcaaac

SEQ ID NO: 5542218 - DNA, 25 bp, Homo sapien
aaaagagaagaatgtaaacgtaatc

SEQ ID NO: 5542219 - DNA, 25 bp, Homo sapien
ttcatagaaaagagaagaatgtaaa

SEQ ID NO: 5542220 - DNA, 25 bp, Homo sapien
caccctctaagaccaatgcatgaac

SEQ ID NO: 5542221 - DNA, 25 bp, Homo sapien
tctctaatcaaaggagcaacccggg

SEQ ID NO: 5542222 - DNA, 25 bp, Homo sapien
gtcaccacacaaacgtatgtaaacc

SEQ ID NO: 5542223 - DNA, 25 bp, Homo sapien
acacattgttgttggttgaggctgc

SEQ ID NO: 5542224 - DNA, 25 bp, Homo sapien
ccaatgcatgaactaaattcggtac

SEQ ID NO: 5542225 - DNA, 25 bp, Homo sapien
catgagagccatgtgaacacttctg

SEQ ID NO: 5542226 - DNA, 25 bp, Homo sapien
taatttaaaagtacatgagagccat

SEQ ID NO: 5542227 - DNA, 25 bp, Homo sapien
gtccccgtacatcgttagaagcttg

SEQ ID NO: 5542228 - DNA, 25 bp, Homo sapien
gtgctttatttccatgtccccgtac

SEQ ID NO: 5542229 - DNA, 25 bp, Homo sapien
cgttagaagcttgaattcgagcagt

SEQ ID NO: 5542230 - DNA, 25 bp, Homo sapien
tagaagcttgaattcgagcagtagt

SEQ ID NO: 5542231 - DNA, 25 bp, Homo sapien
catgtccccgtacatcgttagaagc

SEQ ID NO: 5542232 - DNA, 25 bp, Homo sapien
ccgtacatcgttagaagcttgaatt

SEQ ID NO: 5542233 - DNA, 25 bp, Homo sapien
aagcttgaattcgagcagtagtagt

SEQ ID NO: 5542234 - DNA, 25 bp, Homo sapien
cttgaattcgagcagtagtagtagt

SEQ ID NO: 5542235 - DNA, 25 bp, Homo sapien
catcgttagaagcttgaattcgagc

SEQ ID NO: 5542236 - DNA, 25 bp, Homo sapien
tgaattcgagcagtagtagtagtag

SEQ ID NO: 5542237 - DNA, 25 bp, Homo sapien
ggcagcgctgggtgctttatttcca

SEQ ID NO: 5542238 - DNA, 25 bp, Homo sapien
caagttttccaaagcgccccctctc

SEQ ID NO: 5542239 - DNA, 25 bp, Homo sapien
acgtctgcggcctctggtcttttcc

SEQ ID NO: 5542240 - DNA, 25 bp, Homo sapien
attaaggttatgtttggcgggtaca

SEQ ID NO: 5542241 - DNA, 25 bp, Homo sapien
agaaatttagcaaaccagactgggc

SEQ ID NO: 5542242 - DNA, 25 bp, Homo sapien
agttatggggaaaaacatcttgtaa

SEQ ID NO: 5542243 - DNA, 25 bp, Homo sapien
gcgcacatggtcatccggcgaatca

SEQ ID NO: 5542244 - DNA, 25 bp, Homo sapien
gggggacatcctgacctttctacac

SEQ ID NO: 5542245 - DNA, 25 bp, Homo sapien
ctcggaaactgggttctgttctgac

SEQ ID NO: 5542246 - DNA, 25 bp, Homo sapien
tcccaactccagactgggaggagac

SEQ ID NO: 5542247 - DNA, 25 bp, Homo sapien
gcgggtacagtcttgagcgcacatg

SEQ ID NO: 5542248 - DNA, 25 bp, Homo sapien
atccggcgaatcagccaagttttcc

SEQ ID NO: 5542249 - DNA, 25 bp, Homo sapien
tactgtagctaaatgtacctgagac

SEQ ID NO: 5542250 - DNA, 25 bp, Homo sapien
aatggagtggtctgggtttccttta

SEQ ID NO: 5542251 - DNA, 25 bp, Homo sapien
ttgtgacccaataggctgaagaagt

SEQ ID NO: 5542252 - DNA, 25 bp, Homo sapien
ccttatgagattgagaatggagtgg

SEQ ID NO: 5542253 - DNA, 25 bp, Homo sapien
tcgcatgaaaattaggccccttgtg

SEQ ID NO: 5542254 - DNA, 25 bp, Homo sapien
ttcctttagaggggcagattattcc

SEQ ID NO: 5542255 - DNA, 25 bp, Homo sapien
ttccctcagggctgttcgcatgaaa

SEQ ID NO: 5542256 - DNA, 25 bp, Homo sapien
gggaatgggagcactctgtcttctt

SEQ ID NO: 5542257 - DNA, 25 bp, Homo sapien
tataaagatataccaagggccattc

SEQ ID NO: 5542258 - DNA, 25 bp, Homo sapien
aaaaggtaaagcagttgagattctc

SEQ ID NO: 5542259 - DNA, 25 bp, Homo sapien
attcagtacatcaggaaagtggcag

SEQ ID NO: 5542260 - DNA, 25 bp, Homo sapien
accccagacagaacacatagagctg

SEQ ID NO: 5542261 - DNA, 25 bp, Homo sapien
ggtatctgcagattggtgccaacac

SEQ ID NO: 5542262 - DNA, 25 bp, Homo sapien
ctcgcaatggaaaccccaatgggga

SEQ ID NO: 5542263 - DNA, 25 bp, Homo sapien
aggcatcttaccatggctggggaat

SEQ ID NO: 5542264 - DNA, 25 bp, Homo sapien
aaagaagtagctttctggaccaacc

SEQ ID NO: 5542265 - DNA, 25 bp, Homo sapien
gggtcttttgcgaaagggattgcag

SEQ ID NO: 5542266 - DNA, 25 bp, Homo sapien
ctcttctccgtctttggggccccat

SEQ ID NO: 5542267 - DNA, 25 bp, Homo sapien
cacggggatgagctcttctccgtct

SEQ ID NO: 5542268 - DNA, 25 bp, Homo sapien
ggattgcaggttcagaaggcatctt

SEQ ID NO: 5542269 - DNA, 25 bp, Homo sapien
catagagctgtgaatgaagatccag

SEQ ID NO: 5542270 - DNA, 25 bp, Homo sapien
ttctgggccaactttgctcgcaatg

SEQ ID NO: 5542271 - DNA, 25 bp, Homo sapien
ttgaaataaccctacagaggaggaa

SEQ ID NO: 5542272 - DNA, 25 bp, Homo sapien
acagtcacggagtgtgatatgtagg

SEQ ID NO: 5542273 - DNA, 25 bp, Homo sapien
agaatgtgttctcttaagtacagtc

SEQ ID NO: 5542274 - DNA, 25 bp, Homo sapien
ttcattatgaaatgtgtcatcactt

SEQ ID NO: 5542275 - DNA, 25 bp, Homo sapien
ttagtgacatttgaaataaccctac

SEQ ID NO: 5542276 - DNA, 25 bp, Homo sapien
ggtgatagcagaagagctgttactt

SEQ ID NO: 5542277 - DNA, 25 bp, Homo sapien
aattgaggaaagacaggtcacattt

SEQ ID NO: 5542278 - DNA, 25 bp, Homo sapien
tcttaagtacagtcacggagtgtga

SEQ ID NO: 5542279 - DNA, 25 bp, Homo sapien
cagcatccctggtgatagcagaaga

SEQ ID NO: 5542280 - DNA, 25 bp, Homo sapien
attaagattagggatttaatcctac

SEQ ID NO: 5542281 - DNA, 25 bp, Homo sapien
agctcagtcaatccacctgcatcag

SEQ ID NO: 5542282 - DNA, 25 bp, Homo sapien
cctgtgccatactgatgccactgtt

SEQ ID NO: 5542283 - DNA, 25 bp, Homo sapien
ttcccagtgatcgttggccatgagg

SEQ ID NO: 5542284 - DNA, 25 bp, Homo sapien
ttatcgattctaaatttgagggcct

SEQ ID NO: 5542285 - DNA, 25 bp, Homo sapien
aaaagtcctgctagtgatcaacaac

SEQ ID NO: 5542286 - DNA, 25 bp, Homo sapien
caaggctcatgaagttcgcattcag

SEQ ID NO: 5542287 - DNA, 25 bp, Homo sapien
aggagtgaccaacgtcaaaccaggt

SEQ ID NO: 5542288 - DNA, 25 bp, Homo sapien
aagcccctttgcattgaagaggttg

SEQ ID NO: 5542289 - DNA, 25 bp, Homo sapien
gaaaatcagtaatctcaaaagtcct

SEQ ID NO: 5542290 - DNA, 25 bp, Homo sapien
gatcattgctacctccctgtgccat

SEQ ID NO: 5542291 - DNA, 25 bp, Homo sapien
ttaaatgcaaagcagccatcgcctg

SEQ ID NO: 5542292 - DNA, 25 bp, Homo sapien
actaatggaagacaaaaccagcagg

SEQ ID NO: 5542293 - DNA, 25 bp, Homo sapien
tcactaaagactgttccagcttgac

SEQ ID NO: 5542294 - DNA, 25 bp, Homo sapien
gtgccagaccagtcacagaacacta

SEQ ID NO: 5542295 - DNA, 25 bp, Homo sapien
gttgtactcagtgcagaattcccta

SEQ ID NO: 5542296 - DNA, 25 bp, Homo sapien
ctttgtcaacaaaagtagggtgcca

SEQ ID NO: 5542297 - DNA, 25 bp, Homo sapien
agtgacatgacttttagaccccttc

SEQ ID NO: 5542298 - DNA, 25 bp, Homo sapien
ttctaacaggttgtcattcagcttc

SEQ ID NO: 5542299 - DNA, 25 bp, Homo sapien
acagaatcttgagttggaaacagcc

SEQ ID NO: 5542300 - DNA, 25 bp, Homo sapien
taaaagaggtaagctgtgttcacta

SEQ ID NO: 5542301 - DNA, 25 bp, Homo sapien
ttcagtagaaaccagcagttttaaa

SEQ ID NO: 5542302 - DNA, 25 bp, Homo sapien
tggaaacagcccaaagaaataatcc

SEQ ID NO: 5542303 - DNA, 25 bp, Homo sapien
tctgctaagccatgttcaaacagct

SEQ ID NO: 5542304 - DNA, 25 bp, Homo sapien
cgaatgccgggggttccgacggcat

SEQ ID NO: 5542305 - DNA, 25 bp, Homo sapien
atgccgtcggaacccccggcattcg

SEQ ID NO: 5542306 - DNA, 25 bp, Homo sapien
gtttgtccacccctagaagacaggg

SEQ ID NO: 5542307 - DNA, 25 bp, Homo sapien
ccctgtcttctaggggtggacaaac

SEQ ID NO: 5542308 - DNA, 25 bp, Homo sapien
atttttcatttgcagccagaggaaa

SEQ ID NO: 5542309 - DNA, 25 bp, Homo sapien
cattgtgaatgtcagaaccacagtc

SEQ ID NO: 5542310 - DNA, 25 bp, Homo sapien
ggaacgggagaacatcatttcagtg

SEQ ID NO: 5542311 - DNA, 25 bp, Homo sapien
taaataggaagcctgaaaggtctag

SEQ ID NO: 5542312 - DNA, 25 bp, Homo sapien
tgtcagaaccacagtcaggaatgtt

SEQ ID NO: 5542313 - DNA, 25 bp, Homo sapien
atatggaccatttttaacagatctt

SEQ ID NO: 5542314 - DNA, 25 bp, Homo sapien
ttgatatataactgggtcataaaat

SEQ ID NO: 5542315 - DNA, 25 bp, Homo sapien
ggtgtactcgagataaatgtataaa

SEQ ID NO: 5542316 - DNA, 25 bp, Homo sapien
tctcagtctttaaatggcttctctc

SEQ ID NO: 5542317 - DNA, 25 bp, Homo sapien
aaaatgtgctggccgattcgcatct

SEQ ID NO: 5542318 - DNA, 25 bp, Homo sapien
aaataacactggaagtaattgaata

SEQ ID NO: 5542319 - DNA, 25 bp, Homo sapien
atcaaataaaagagtgtcagcataa

SEQ ID NO: 5542320 - DNA, 25 bp, Homo sapien
ttactctgaccaaggagcacacaaa

SEQ ID NO: 5542321 - DNA, 25 bp, Homo sapien
aaaccaatgatgatgtttcatgaag

SEQ ID NO: 5542322 - DNA, 25 bp, Homo sapien
acagattggatttatgattgctcat

SEQ ID NO: 5542323 - DNA, 25 bp, Homo sapien
tatttactctgaccaaggagcacac

SEQ ID NO: 5542324 - DNA, 25 bp, Homo sapien
agaaatctgggctatttactctgac

SEQ ID NO: 5542325 - DNA, 25 bp, Homo sapien
aaaagagtgtcagcataaaccaatg

SEQ ID NO: 5542326 - DNA, 25 bp, Homo sapien
gagatgaaagatgacgtcagtgttc

SEQ ID NO: 5542327 - DNA, 25 bp, Homo sapien
ttgtacatgaacatagtttatttac

SEQ ID NO: 5542328 - DNA, 25 bp, Homo sapien
attagtggagtaacagattggattt

SEQ ID NO: 5542329 - DNA, 25 bp, Homo sapien
gtcagtgttctattagtggagtaac

SEQ ID NO: 5542330 - DNA, 25 bp, Homo sapien
aggccgtactgctgcccaagaagac

SEQ ID NO: 5542331 - DNA, 25 bp, Homo sapien
gagtacttgactgccgagatcctgg

SEQ ID NO: 5542332 - DNA, 25 bp, Homo sapien
gcggtgctcgagtacttgactgccg

SEQ ID NO: 5542333 - DNA, 25 bp, Homo sapien
tccgcaagggcaactattcggagcg

SEQ ID NO: 5542334 - DNA, 25 bp, Homo sapien
gccgagatcctggagcttgccggca

SEQ ID NO: 5542335 - DNA, 25 bp, Homo sapien
cgcgacaacaagaagacgcgcatca

SEQ ID NO: 5542336 - DNA, 25 bp, Homo sapien
gactcggaaatgtccggtcgtggta

SEQ ID NO: 5542337 - DNA, 25 bp, Homo sapien
gcatcatcccgcgccacctgcagct

SEQ ID NO: 5542338 - DNA, 25 bp, Homo sapien
tttgatggacataaaggctcttttc

SEQ ID NO: 5542339 - DNA, 25 bp, Homo sapien
aaggctaagtcgcgctcgtcgcgcg

SEQ ID NO: 5542340 - DNA, 25 bp, Homo sapien
gtggcgtcctgcccaacatccaggc

SEQ ID NO: 5542341 - DNA, 25 bp, Homo sapien
gggtccccagcacgtctgactgggt

SEQ ID NO: 5542342 - DNA, 25 bp, Homo sapien
caccattaagggtcccagagctgtc

SEQ ID NO: 5542343 - DNA, 25 bp, Homo sapien
ctgccaccattaagggtcccagagc

SEQ ID NO: 5542344 - DNA, 25 bp, Homo sapien
tccccagcacgtctgactgggtcac

SEQ ID NO: 5542345 - DNA, 25 bp, Homo sapien
ctgtccagggcctgtctccaccttc

SEQ ID NO: 5542346 - DNA, 25 bp, Homo sapien
ctgctgccaccattaagggtcccag

SEQ ID NO: 5542347 - DNA, 25 bp, Homo sapien
gcccacacaatgaggcctatgactg

SEQ ID NO: 5542348 - DNA, 25 bp, Homo sapien
ccattaagggtcccagagctgtcca

SEQ ID NO: 5542349 - DNA, 25 bp, Homo sapien
tccaccttcaagagtcatcctgccc

SEQ ID NO: 5542350 - DNA, 25 bp, Homo sapien
ccacacaatgaggcctatgactggg

SEQ ID NO: 5542351 - DNA, 25 bp, Homo sapien
tgtccagggcctgtctccaccttca

SEQ ID NO: 5542352 - DNA, 25 bp, Homo sapien
tgagattagtaatgtgctgaggcta

SEQ ID NO: 5542353 - DNA, 25 bp, Homo sapien
agcaggaacaaactgagattagtaa

SEQ ID NO: 5542354 - DNA, 25 bp, Homo sapien
gtatacagtcaaacacaaaactttc

SEQ ID NO: 5542355 - DNA, 25 bp, Homo sapien
atcacatccctgggtcaaggtgctc

SEQ ID NO: 5542356 - DNA, 25 bp, Homo sapien
tggagaggataggatatcatcagtt

SEQ ID NO: 5542357 - DNA, 25 bp, Homo sapien
tttcctggaataggagcttggagag

SEQ ID NO: 5542358 - DNA, 25 bp, Homo sapien
ttggacaagcaggtgttcatgctgt

SEQ ID NO: 5542359 - DNA, 25 bp, Homo sapien
tgtgctgaggctaattggacaagca

SEQ ID NO: 5542360 - DNA, 25 bp, Homo sapien
atgctgtcaccatgatgaaccactt

SEQ ID NO: 5542361 - DNA, 25 bp, Homo sapien
tgaaccacttagcttgaacaaacac

SEQ ID NO: 5542362 - DNA, 25 bp, Homo sapien
ctgtattatttaggagttgtgggtt

SEQ ID NO: 5542363 - DNA, 25 bp, Homo sapien
aacttgaaagcctcctagaagaaaa

SEQ ID NO: 5542364 - DNA, 25 bp, Homo sapien
aaaggaactgagaagaactacatat

SEQ ID NO: 5542365 - DNA, 25 bp, Homo sapien
tttgtccataagacgaagggccaaa

SEQ ID NO: 5542366 - DNA, 25 bp, Homo sapien
tgctatgttagacgatgtaaaaatt

SEQ ID NO: 5542367 - DNA, 25 bp, Homo sapien
tttcctccagaattgatcaagacaa

SEQ ID NO: 5542368 - DNA, 25 bp, Homo sapien
atcaacctgaaactccagaacaccc

SEQ ID NO: 5542369 - DNA, 25 bp, Homo sapien
tctatcgctgcaaaccagtgaaatc

SEQ ID NO: 5542370 - DNA, 25 bp, Homo sapien
ccagaacacccagaagtaacttcac

SEQ ID NO: 5542371 - DNA, 25 bp, Homo sapien
gtcaaaaatgaagaggtaaagaata

SEQ ID NO: 5542372 - DNA, 25 bp, Homo sapien
caatggcctccttcagttgggacat

SEQ ID NO: 5542373 - DNA, 25 bp, Homo sapien
agttgggacatggtcttaaagactt

SEQ ID NO: 5542374 - DNA, 25 bp, Homo sapien
atgccatcattttagagaggccatc

SEQ ID NO: 5542375 - DNA, 25 bp, Homo sapien
cactgggacactggagtgtacttct

SEQ ID NO: 5542376 - DNA, 25 bp, Homo sapien
actctgtgtatggctggctcctcct

SEQ ID NO: 5542377 - DNA, 25 bp, Homo sapien
tcccagactaaagctatccgcccac

SEQ ID NO: 5542378 - DNA, 25 bp, Homo sapien
agtcagatcccagcctaaatgccat

SEQ ID NO: 5542379 - DNA, 25 bp, Homo sapien
agaggccatctctgaccgcacaatc

SEQ ID NO: 5542380 - DNA, 25 bp, Homo sapien
tccattagtggccccactgggacac

SEQ ID NO: 5542381 - DNA, 25 bp, Homo sapien
atcttctagagtagtgcctaacact

SEQ ID NO: 5542382 - DNA, 25 bp, Homo sapien
ccgcacaatctagatacccagtcac

SEQ ID NO: 5542383 - DNA, 25 bp, Homo sapien
aaatcagcagttgaaatcagtcttt

SEQ ID NO: 5542384 - DNA, 25 bp, Homo sapien
tgatggagttgtggttgcctctcta

SEQ ID NO: 5542385 - DNA, 25 bp, Homo sapien
cgccgaggcaccttacagtcctact

SEQ ID NO: 5542386 - DNA, 25 bp, Homo sapien
ttatggtggatgccaatgaagttcc

SEQ ID NO: 5542387 - DNA, 25 bp, Homo sapien
cattggacctggtattgtgctttcc

SEQ ID NO: 5542388 - DNA, 25 bp, Homo sapien
gaccgaccatgtcaccagattgatc

SEQ ID NO: 5542389 - DNA, 25 bp, Homo sapien
ctacttggactgaacaggcctgatg

SEQ ID NO: 5542390 - DNA, 25 bp, Homo sapien
tactcctccaacaccaatcatccca

SEQ ID NO: 5542391 - DNA, 25 bp, Homo sapien
aagaaagcaggatggactatcatta

SEQ ID NO: 5542392 - DNA, 25 bp, Homo sapien
aatcatcccagacgatcatccactc

SEQ ID NO: 5542393 - DNA, 25 bp, Homo sapien
attcccaattccctgggaggaggct

SEQ ID NO: 5542394 - DNA, 25 bp, Homo sapien
atgctagatgaaaaacgtgttatgg

SEQ ID NO: 5542395 - DNA, 25 bp, Homo sapien
ccattgctggacctgcgatgtccgg

SEQ ID NO: 5542396 - DNA, 25 bp, Homo sapien
acctaggaagaaccttcagaaatcc

SEQ ID NO: 5542397 - DNA, 25 bp, Homo sapien
gtaaatgcacttaaattgaccccac

SEQ ID NO: 5542398 - DNA, 25 bp, Homo sapien
cttggcattgggctaccactgccac

SEQ ID NO: 5542399 - DNA, 25 bp, Homo sapien
gcagtaagggcacatcattacctag

SEQ ID NO: 5542400 - DNA, 25 bp, Homo sapien
atagcttgggagttgtttatgcttc

SEQ ID NO: 5542401 - DNA, 25 bp, Homo sapien
tcctctgcaaaagacggcctgtttc

SEQ ID NO: 5542402 - DNA, 25 bp, Homo sapien
agctggacagataataacagaaccc

SEQ ID NO: 5542403 - DNA, 25 bp, Homo sapien
atgatgtgaaatagctcagcaatgt

SEQ ID NO: 5542404 - DNA, 25 bp, Homo sapien
actgccactgtgatgctgagtctgg

SEQ ID NO: 5542405 - DNA, 25 bp, Homo sapien
gccagaagtagttgacaggccctaa

SEQ ID NO: 5542406 - DNA, 25 bp, Homo sapien
ctgagtctggtgtcagcagtgaaga

SEQ ID NO: 5542407 - DNA, 25 bp, Homo sapien
tatagtgtgtgccctcctgagtacc

SEQ ID NO: 5542408 - DNA, 25 bp, Homo sapien
aatgagacattgaattttatgcagc

SEQ ID NO: 5542409 - DNA, 25 bp, Homo sapien
atttttgaacaagcataaaggtgcc

SEQ ID NO: 5542410 - DNA, 25 bp, Homo sapien
tcctgagtaccccaggaaatagaag

SEQ ID NO: 5542411 - DNA, 25 bp, Homo sapien
cccaagttatctatagtgtgtgccc

SEQ ID NO: 5542412 - DNA, 25 bp, Homo sapien
ctgacgaacatcagatccaactggc

SEQ ID NO: 5542413 - DNA, 25 bp, Homo sapien
aggaaatagaagtaaagaactgacg

SEQ ID NO: 5542414 - DNA, 25 bp, Homo sapien
gatatctggactcgctagacttggt

SEQ ID NO: 5542415 - DNA, 25 bp, Homo sapien
aacccatccgttagcaaacttacac

SEQ ID NO: 5542416 - DNA, 25 bp, Homo sapien
tatctgtgggatttaaaaacttcaa

SEQ ID NO: 5542417 - DNA, 25 bp, Homo sapien
tagaagtaaagaactgacgaacatc

SEQ ID NO: 5542418 - DNA, 25 bp, Homo sapien
ttacgtgctagaccttatttgtttc

SEQ ID NO: 5542419 - DNA, 25 bp, Homo sapien
gaaacaaataaggtctagcacgtaa

SEQ ID NO: 5542420 - DNA, 25 bp, Homo sapien
tagtacaccacctcagccaagttgc

SEQ ID NO: 5542421 - DNA, 25 bp, Homo sapien
tggccaagacttacctgcagtaccc

SEQ ID NO: 5542422 - DNA, 25 bp, Homo sapien
taggcagttcatctactagcatacc

SEQ ID NO: 5542423 - DNA, 25 bp, Homo sapien
gcagtaccccagagaaaagaattta

SEQ ID NO: 5542424 - DNA, 25 bp, Homo sapien
ctggaaccaaagatcaagaaactgt

SEQ ID NO: 5542425 - DNA, 25 bp, Homo sapien
tattcccaagtgctgtttcccctcc

SEQ ID NO: 5542426 - DNA, 25 bp, Homo sapien
ctaaagctacagaaggagataatac

SEQ ID NO: 5542427 - DNA, 25 bp, Homo sapien
gttgcaaaagccacttggaaactgg

SEQ ID NO: 5542428 - DNA, 25 bp, Homo sapien
tcccctccagaactgcgacagagac

SEQ ID NO: 5542429 - DNA, 25 bp, Homo sapien
gaggctggttcctcttctggtgcct

SEQ ID NO: 5542430 - DNA, 25 bp, Homo sapien
agagactacatggggtagaactctt

SEQ ID NO: 5542431 - DNA, 25 bp, Homo sapien
tccttctggggcttccttaccatgc

SEQ ID NO: 5542432 - DNA, 25 bp, Homo sapien
ctcatggtctttagaaacatccttc

SEQ ID NO: 5542433 - DNA, 25 bp, Homo sapien
atgctgttaggtgtacatgttttcc

SEQ ID NO: 5542434 - DNA, 25 bp, Homo sapien
atacgtttcaactggttgtggcagc

SEQ ID NO: 5542435 - DNA, 25 bp, Homo sapien
ccggtttactattaaggacattaca

SEQ ID NO: 5542436 - DNA, 25 bp, Homo sapien
caaaggctatcgatgaacaccagat

SEQ ID NO: 5542437 - DNA, 25 bp, Homo sapien
tcaggtttcagactccctcatggtc

SEQ ID NO: 5542438 - DNA, 25 bp, Homo sapien
atagacaccccaagtgaaagagaag

SEQ ID NO: 5542439 - DNA, 25 bp, Homo sapien
agtccttggcatgatttcaggtttc

SEQ ID NO: 5542440 - DNA, 25 bp, Homo sapien
ggacattacaaaggctatcgatgaa

SEQ ID NO: 5542441 - DNA, 25 bp, Homo sapien
tggcagcatcagatagacaccccaa

SEQ ID NO: 5542442 - DNA, 25 bp, Homo sapien
ccagccgtgctcctgacagcgtttg

SEQ ID NO: 5542443 - DNA, 25 bp, Homo sapien
ctgaccacacgtgtgtccgtgccgg

SEQ ID NO: 5542444 - DNA, 25 bp, Homo sapien
attgccaccgtggacatctccgcag

SEQ ID NO: 5542445 - DNA, 25 bp, Homo sapien
gtgaggcctttgtcagctcttctcc

SEQ ID NO: 5542446 - DNA, 25 bp, Homo sapien
tctgggctgcctacacagttcacgc

SEQ ID NO: 5542447 - DNA, 25 bp, Homo sapien
tgtattccagggcaactccaacaac

SEQ ID NO: 5542448 - DNA, 25 bp, Homo sapien
gggcagccacctctgaccacacgtg

SEQ ID NO: 5542449 - DNA, 25 bp, Homo sapien
tcgtgggcttagacacctacgtgga

SEQ ID NO: 5542450 - DNA, 25 bp, Homo sapien
acgctaacatcgtggctgttgatgc

SEQ ID NO: 5542451 - DNA, 25 bp, Homo sapien
gtgggccagccacttagtgcacttc

SEQ ID NO: 5542452 - DNA, 25 bp, Homo sapien
tgatgccacgtgttgtgaggccttt

SEQ ID NO: 5542453 - DNA, 25 bp, Homo sapien
caccatcaccgctgggtccaaagtg

SEQ ID NO: 5542454 - DNA, 25 bp, Homo sapien
cagagccaggaaaactttgaagcct

SEQ ID NO: 5542455 - DNA, 25 bp, Homo sapien
ggcaagtaccaactgcagagccagg

SEQ ID NO: 5542456 - DNA, 25 bp, Homo sapien
tgatccaaaacgaattcacggtggg

SEQ ID NO: 5542457 - DNA, 25 bp, Homo sapien
gaatgggaagcacttcaagttcacc

SEQ ID NO: 5542458 - DNA, 25 bp, Homo sapien
catgagtttctccggcaagtaccaa

SEQ ID NO: 5542459 - DNA, 25 bp, Homo sapien
tcgtgcagaatgggaagcacttcaa

SEQ ID NO: 5542460 - DNA, 25 bp, Homo sapien
caagttcaccatcaccgctgggtcc

SEQ ID NO: 5542461 - DNA, 25 bp, Homo sapien
gtccaaagtgatccaaaacgaattc

SEQ ID NO: 5542462 - DNA, 25 bp, Homo sapien
agagggagctctattgccaccatga

SEQ ID NO: 5542463 - DNA, 25 bp, Homo sapien
tcatgaaggcaatcggtctgccgga

SEQ ID NO: 5542464 - DNA, 25 bp, Homo sapien
tctgggagatactgatgtaggatta

SEQ ID NO: 5542465 - DNA, 25 bp, Homo sapien
taggctgtaacaagttctgggagat

SEQ ID NO: 5542466 - DNA, 25 bp, Homo sapien
atcactatgcagggtgcgctcaatg

SEQ ID NO: 5542467 - DNA, 25 bp, Homo sapien
tggaaacagccaattggtagctctt

SEQ ID NO: 5542468 - DNA, 25 bp, Homo sapien
ttcccttgaacacagcctcggcatc

SEQ ID NO: 5542469 - DNA, 25 bp, Homo sapien
cttaagatcttggagagaatggaat

SEQ ID NO: 5542470 - DNA, 25 bp, Homo sapien
cctaaaatgaaaggggctaatggaa

SEQ ID NO: 5542471 - DNA, 25 bp, Homo sapien
gctacaactaggcattggaaacagc

SEQ ID NO: 5542472 - DNA, 25 bp, Homo sapien
tccacatcgctgggttaggctgtaa

SEQ ID NO: 5542473 - DNA, 25 bp, Homo sapien
cagagtacatatgcgagataaaacc

SEQ ID NO: 5542474 - DNA, 25 bp, Homo sapien
ctaatgtgggaacagcaaattctac

SEQ ID NO: 5542475 - DNA, 25 bp, Homo sapien
agtacacccaattaaagatgcagtt

SEQ ID NO: 5542476 - DNA, 25 bp, Homo sapien
tgttgtttgttggagaaaatgaacc

SEQ ID NO: 5542477 - DNA, 25 bp, Homo sapien
ctccgcttcccaagcagctgggacc

SEQ ID NO: 5542478 - DNA, 25 bp, Homo sapien
ttcccaagcagctgggaccacagat

SEQ ID NO: 5542479 - DNA, 25 bp, Homo sapien
tttgttggagaaaatgaaccataaa

SEQ ID NO: 5542480 - DNA, 25 bp, Homo sapien
tcaaatgctggagctcaagcaatcc

SEQ ID NO: 5542481 - DNA, 25 bp, Homo sapien
actgcaccttcaaatgctggagctc

SEQ ID NO: 5542482 - DNA, 25 bp, Homo sapien
tataaaataagaagaaatagacttg

SEQ ID NO: 5542483 - DNA, 25 bp, Homo sapien
atttctgactctgccatgaattttt

SEQ ID NO: 5542484 - DNA, 25 bp, Homo sapien
gtgcagtggtgcaaccacagctcac

SEQ ID NO: 5542485 - DNA, 25 bp, Homo sapien
gaagaaatagacttgttggctgttt

SEQ ID NO: 5542486 - DNA, 25 bp, Homo sapien
atttggtgtttgtctgaagaaagga

SEQ ID NO: 5542487 - DNA, 25 bp, Homo sapien
tctaagtcagcctctagtcgtggtt

SEQ ID NO: 5542488 - DNA, 25 bp, Homo sapien
agtcagcctctagtcgtggttcatc

SEQ ID NO: 5542489 - DNA, 25 bp, Homo sapien
ccataatgcagcagtatggagggag

SEQ ID NO: 5542490 - DNA, 25 bp, Homo sapien
aaatggggatagtcttcatgaccac

SEQ ID NO: 5542491 - DNA, 25 bp, Homo sapien
ctctggtccttctgtctggtggcac

SEQ ID NO: 5542492 - DNA, 25 bp, Homo sapien
ggattttatggagaaatggggatag

SEQ ID NO: 5542493 - DNA, 25 bp, Homo sapien
gctgtatgactgttacttgaccttc

SEQ ID NO: 5542494 - DNA, 25 bp, Homo sapien
tctggtggcacttagagtcttttgt

SEQ ID NO: 5542495 - DNA, 25 bp, Homo sapien
agggacttttctagctgtatgactg

SEQ ID NO: 5542496 - DNA, 25 bp, Homo sapien
gtcttttgtgccataatgcagcagt

SEQ ID NO: 5542497 - DNA, 25 bp, Homo sapien
tgtgatcaccaaccagccagaaatt

SEQ ID NO: 5542498 - DNA, 25 bp, Homo sapien
gtgtgcaaagtgcctattggatgcc

SEQ ID NO: 5542499 - DNA, 25 bp, Homo sapien
gaaattgctgaggcacttctgggag

SEQ ID NO: 5542500 - DNA, 25 bp, Homo sapien
gcgtgggagtcctgactcagtcctg

SEQ ID NO: 5542501 - DNA, 25 bp, Homo sapien
ggaaggttgagaaaatatgtgtgca

SEQ ID NO: 5542502 - DNA, 25 bp, Homo sapien
gtccaggcaagagcttaaactccta

SEQ ID NO: 5542503 - DNA, 25 bp, Homo sapien
ggctgtgatcctgagctccgagact

SEQ ID NO: 5542504 - DNA, 25 bp, Homo sapien
acaatggtatgtctgcctccctgcc

SEQ ID NO: 5542505 - DNA, 25 bp, Homo sapien
ctccgagactttcgaggaaataccc

SEQ ID NO: 5542506 - DNA, 25 bp, Homo sapien
atccatggctacctgggcatcgtgg

SEQ ID NO: 5542507 - DNA, 25 bp, Homo sapien
gggccaacttaaggagtccaggcaa

SEQ ID NO: 5542508 - DNA, 25 bp, Homo sapien
gcttctgaggcttctgctgtaaatc

SEQ ID NO: 5542509 - DNA, 25 bp, Homo sapien
aactgttgacactcgggccctttga

SEQ ID NO: 5542510 - DNA, 25 bp, Homo sapien
attgttagtaattctgggacaggtt

SEQ ID NO: 5542511 - DNA, 25 bp, Homo sapien
ccgccttgctgcaacagagaggaaa

SEQ ID NO: 5542512 - DNA, 25 bp, Homo sapien
ctgggacaggttattaaaggattta

SEQ ID NO: 5542513 - DNA, 25 bp, Homo sapien
tgttagaaagattgtagcgttttac

SEQ ID NO: 5542514 - DNA, 25 bp, Homo sapien
cacagctggacataattctaggaaa

SEQ ID NO: 5542515 - DNA, 25 bp, Homo sapien
agaggaaatgcccatgtccacagct

SEQ ID NO: 5542516 - DNA, 25 bp, Homo sapien
tgcctgacttctaaaggagcgggcc

SEQ ID NO: 5542517 - DNA, 25 bp, Homo sapien
gcatgccaaaggagaactgaattag

SEQ ID NO: 5542518 - DNA, 25 bp, Homo sapien
aggaggttgagagcttcgcctctct

SEQ ID NO: 5542519 - DNA, 25 bp, Homo sapien
cttcctccgtacactacattgggta

SEQ ID NO: 5542520 - DNA, 25 bp, Homo sapien
tacccaatgtagtgtacggaggaag

SEQ ID NO: 5542521 - DNA, 25 bp, Homo sapien
gttcgagagatctttcagaatggcc

SEQ ID NO: 5542522 - DNA, 25 bp, Homo sapien
tgggagttggattctgttcgagaga

SEQ ID NO: 5542523 - DNA, 25 bp, Homo sapien
gagatgaaaggaacatgcttaaggt

SEQ ID NO: 5542524 - DNA, 25 bp, Homo sapien
tttcaccatgagtgggtgcccattt

SEQ ID NO: 5542525 - DNA, 25 bp, Homo sapien
aaaggaggtcttatctatgggaact

SEQ ID NO: 5542526 - DNA, 25 bp, Homo sapien
aagaactgcaaagtgaaacaaaagg

SEQ ID NO: 5542527 - DNA, 25 bp, Homo sapien
ttaagcaaatcctctgggagttgga

SEQ ID NO: 5542528 - DNA, 25 bp, Homo sapien
cagaatggccatgtcagagatgaaa

SEQ ID NO: 5542529 - DNA, 25 bp, Homo sapien
ctggtgtgaatagagccagcaaagg

SEQ ID NO: 5542530 - DNA, 25 bp, Homo sapien
agacgatgacagccttggacttcaa

SEQ ID NO: 5542531 - DNA, 25 bp, Homo sapien
acctccgtgcttctcagacagtgcc

SEQ ID NO: 5542532 - DNA, 25 bp, Homo sapien
gctatggggctgcaatcaacaatgc

SEQ ID NO: 5542533 - DNA, 25 bp, Homo sapien
tcagtacactgtggtgtcagatatc

SEQ ID NO: 5542534 - DNA, 25 bp, Homo sapien
atcaacaatgccaaggtcacccctg

SEQ ID NO: 5542535 - DNA, 25 bp, Homo sapien
gtttgtgaaggctaaagccctggga

SEQ ID NO: 5542536 - DNA, 25 bp, Homo sapien
tttctgctgtaatgggttgtaaagc

SEQ ID NO: 5542537 - DNA, 25 bp, Homo sapien
tcaatcctagagacttacataaacc

SEQ ID NO: 5542538 - DNA, 25 bp, Homo sapien
atcaacagtgagaagtttgtgaagg

SEQ ID NO: 5542539 - DNA, 25 bp, Homo sapien
ggtcacccctggttcgacttgtgct

SEQ ID NO: 5542540 - DNA, 25 bp, Homo sapien
agaaaatgcaagttttgtctgagtc

SEQ ID NO: 5542541 - DNA, 25 bp, Homo sapien
aaccaggtgacaaagtaattccact

SEQ ID NO: 5542542 - DNA, 25 bp, Homo sapien
gcaggagcttccagaatcataggta

SEQ ID NO: 5542543 - DNA, 25 bp, Homo sapien
gaaactgcattggcatgaggtttgc

SEQ ID NO: 5542544 - DNA, 25 bp, Homo sapien
ctgcaggaggaaattgatgcagttt

SEQ ID NO: 5542545 - DNA, 25 bp, Homo sapien
acagagcctgagaagttcctccctg

SEQ ID NO: 5542546 - DNA, 25 bp, Homo sapien
ggtggtgaatgaaacgctcagatta

SEQ ID NO: 5542547 - DNA, 25 bp, Homo sapien
caaaagaaactgagtcccacaaagc

SEQ ID NO: 5542548 - DNA, 25 bp, Homo sapien
acccaaagtactggacagagcctga

SEQ ID NO: 5542549 - DNA, 25 bp, Homo sapien
tatgagacttgagagggtctgcaaa

SEQ ID NO: 5542550 - DNA, 25 bp, Homo sapien
acaccctttggaagtggacccagaa

SEQ ID NO: 5542551 - DNA, 25 bp, Homo sapien
atctggagctcgtggcccaatcaat

SEQ ID NO: 5542552 - DNA, 25 bp, Homo sapien
gctggctatgaaaccacgagcagtg

SEQ ID NO: 5542553 - DNA, 25 bp, Homo sapien
agatgttgagatcaatgggatgttc

SEQ ID NO: 5542554 - DNA, 25 bp, Homo sapien
tcaagctgtattagtcgacaggacc

SEQ ID NO: 5542555 - DNA, 25 bp, Homo sapien
gacagataggcatggacccttcaag

SEQ ID NO: 5542556 - DNA, 25 bp, Homo sapien
taggcatggacccttcaagtggaca

SEQ ID NO: 5542557 - DNA, 25 bp, Homo sapien
tcaagtggacagcttgtgtcaggag

SEQ ID NO: 5542558 - DNA, 25 bp, Homo sapien
gtcgtccttgatcagaagggtgatc

SEQ ID NO: 5542559 - DNA, 25 bp, Homo sapien
gcatggacccttcaagtggacagct

SEQ ID NO: 5542560 - DNA, 25 bp, Homo sapien
acatttcaggacagataggcatgga

SEQ ID NO: 5542561 - DNA, 25 bp, Homo sapien
tagtcgacaggaccatttacatttc

SEQ ID NO: 5542562 - DNA, 25 bp, Homo sapien
caggggccattggaccctacagtca

SEQ ID NO: 5542563 - DNA, 25 bp, Homo sapien
ccattggaccctacagtcaagctgt

SEQ ID NO: 5542564 - DNA, 25 bp, Homo sapien
tttacatttcaggacagataggcat

SEQ ID NO: 5542565 - DNA, 25 bp, Homo sapien
aactggctaaatttattgacaaatc

SEQ ID NO: 5542566 - DNA, 25 bp, Homo sapien
aaaaaggagtctatcgactacaaac

SEQ ID NO: 5542567 - DNA, 25 bp, Homo sapien
ttacacaaatgaaaaacactttctc

SEQ ID NO: 5542568 - DNA, 25 bp, Homo sapien
actcagaacaaaaaaatctagtatt

SEQ ID NO: 5542569 - DNA, 25 bp, Homo sapien
ttgatgggtttaattcatgactata

SEQ ID NO: 5542570 - DNA, 25 bp, Homo sapien
tcttaaaggaatcaatcatctttcc

SEQ ID NO: 5542571 - DNA, 25 bp, Homo sapien
tgctaagatcaggattgaaaaacac

SEQ ID NO: 5542572 - DNA, 25 bp, Homo sapien
ctttgggatttgaagaattggtctt

SEQ ID NO: 5542573 - DNA, 25 bp, Homo sapien
taataatatgctaagatcaggattg

SEQ ID NO: 5542574 - DNA, 25 bp, Homo sapien
attggtcttcaaaaaggagtctatc

SEQ ID NO: 5542575 - DNA, 25 bp, Homo sapien
tatcgactacaaactaactggctaa

SEQ ID NO: 5542576 - DNA, 25 bp, Homo sapien
tctgcatgccccaggggcctcagga

SEQ ID NO: 5542577 - DNA, 25 bp, Homo sapien
cgcactttacccccacccctgctgc

SEQ ID NO: 5542578 - DNA, 25 bp, Homo sapien
gccacagccctgttctctccaccac

SEQ ID NO: 5542579 - DNA, 25 bp, Homo sapien
gcctcaggaagcccctgaccaggaa

SEQ ID NO: 5542580 - DNA, 25 bp, Homo sapien
gctcccacccagcgtgtcaccagtg

SEQ ID NO: 5542581 - DNA, 25 bp, Homo sapien
cccacccagcgtgtcaccagtgctg

SEQ ID NO: 5542582 - DNA, 25 bp, Homo sapien
aaaccctggcctctgcatgccccag

SEQ ID NO: 5542583 - DNA, 25 bp, Homo sapien
tcatgctcccacccagcgtgtcacc

SEQ ID NO: 5542584 - DNA, 25 bp, Homo sapien
ggggcctcatgctcccacccagcgt

SEQ ID NO: 5542585 - DNA, 25 bp, Homo sapien
atgtatttgggaactacattaaact

SEQ ID NO: 5542586 - DNA, 25 bp, Homo sapien
tttacccccacccctgctgcaaggc

SEQ ID NO: 5542587 - DNA, 25 bp, Homo sapien
acaaagacatcgattgatatgcttc

SEQ ID NO: 5542588 - DNA, 25 bp, Homo sapien
agcaaagccatccccgctcctggtt

SEQ ID NO: 5542589 - DNA, 25 bp, Homo sapien
atgatatagctttgccatgtggcag

SEQ ID NO: 5542590 - DNA, 25 bp, Homo sapien
cgctcctggttggtcacagaatgac

SEQ ID NO: 5542591 - DNA, 25 bp, Homo sapien
gatgagatggtttctagagatggtt

SEQ ID NO: 5542592 - DNA, 25 bp, Homo sapien
aacttacaggtcctgctgaaactgc

SEQ ID NO: 5542593 - DNA, 25 bp, Homo sapien
tggctgccagaatctagagcaaagc

SEQ ID NO: 5542594 - DNA, 25 bp, Homo sapien
tacatgtctagagaacactgtgctc

SEQ ID NO: 5542595 - DNA, 25 bp, Homo sapien
ttatggataaagatgagatggtttc

SEQ ID NO: 5542596 - DNA, 25 bp, Homo sapien
agagatggtttctactggctgccag

SEQ ID NO: 5542597 - DNA, 25 bp, Homo sapien
acagaatgactgacaaagacatcga

SEQ ID NO: 5542598 - DNA, 25 bp, Homo sapien
ggccacactcccgacgcccgggtgg

SEQ ID NO: 5542599 - DNA, 25 bp, Homo sapien
ccacccgggcgtcgggagtgtggcc

SEQ ID NO: 5542600 - DNA, 25 bp, Homo sapien
cggccacactcccgacgcccgggtg

SEQ ID NO: 5542601 - DNA, 25 bp, Homo sapien
cacccgggcgtcgggagtgtggccg

SEQ ID NO: 5542602 - DNA, 25 bp, Homo sapien
ccacactcccggactaaggcccaac

SEQ ID NO: 5542603 - DNA, 25 bp, Homo sapien
gttgggccttagtccgggagtgtgg

SEQ ID NO: 5542604 - DNA, 25 bp, Homo sapien
atggaagatctaacttaacttgact

SEQ ID NO: 5542605 - DNA, 25 bp, Homo sapien
agtcaagttaagttagatcttccat

SEQ ID NO: 5542606 - DNA, 25 bp, Homo sapien
tggggaataagcataaccctgagat

SEQ ID NO: 5542607 - DNA, 25 bp, Homo sapien
tctgagtcataaccagcctggcagt

SEQ ID NO: 5542608 - DNA, 25 bp, Homo sapien
aggcagaaaagattatatgtcatac

SEQ ID NO: 5542609 - DNA, 25 bp, Homo sapien
tatgatggcctagatgcagagaaaa

SEQ ID NO: 5542610 - DNA, 25 bp, Homo sapien
cagcctggcagtatgatggcctaga

SEQ ID NO: 5542611 - DNA, 25 bp, Homo sapien
gatgcagagaaaacagctccttggt

SEQ ID NO: 5542612 - DNA, 25 bp, Homo sapien
caatgaagaggcaatgtccatctca

SEQ ID NO: 5542613 - DNA, 25 bp, Homo sapien
tcttactactgatgagaacattatc

SEQ ID NO: 5542614 - DNA, 25 bp, Homo sapien
gctccttggtgaattgataagtaaa

SEQ ID NO: 5542615 - DNA, 25 bp, Homo sapien
caatttaaagttacggaatctacca

SEQ ID NO: 5542616 - DNA, 25 bp, Homo sapien
gtcatacctccattggggaataagc

SEQ ID NO: 5542617 - DNA, 25 bp, Homo sapien
cccagaggtccgtagtgccgctacg

SEQ ID NO: 5542618 - DNA, 25 bp, Homo sapien
cgtagcggcactacggacctctggg

SEQ ID NO: 5542619 - DNA, 25 bp, Homo sapien
ggtcacccgcttcttggcgcgctcc

SEQ ID NO: 5542620 - DNA, 25 bp, Homo sapien
cgtggctgtccagccgcatggcatg

SEQ ID NO: 5542621 - DNA, 25 bp, Homo sapien
ggcacagtcgcagcgcttccgatct

SEQ ID NO: 5542622 - DNA, 25 bp, Homo sapien
caccaggaaggtcacccgcttcttg

SEQ ID NO: 5542623 - DNA, 25 bp, Homo sapien
tctggtcccgcactctggcgcgggt

SEQ ID NO: 5542624 - DNA, 25 bp, Homo sapien
ggcggcctgtctggtcccgcactct

SEQ ID NO: 5542625 - DNA, 25 bp, Homo sapien
tccgatctgctaggtcgggtatggg

SEQ ID NO: 5542626 - DNA, 25 bp, Homo sapien
ggcctgtctggtcccgcactctggc

SEQ ID NO: 5542627 - DNA, 25 bp, Homo sapien
ccaccacggtgctcaggtggtaggg

SEQ ID NO: 5542628 - DNA, 25 bp, Homo sapien
gcgcttccgatctgctaggtcgggt

SEQ ID NO: 5542629 - DNA, 25 bp, Homo sapien
gcgccaccacggtgctcaggtggta

SEQ ID NO: 5542630 - DNA, 25 bp, Homo sapien
ctgcgagcctcgagactgttccgcc

SEQ ID NO: 5542631 - DNA, 25 bp, Homo sapien
ggcggaacagtctcgaggctcgcag

SEQ ID NO: 5542632 - DNA, 25 bp, Homo sapien
cgaggaggtggtattcgccgagaag

SEQ ID NO: 5542633 - DNA, 25 bp, Homo sapien
cttctcggcgaataccacctcctcg

SEQ ID NO: 5542634 - DNA, 25 bp, Homo sapien
ccgtcgttgccttcgagggtggtga

SEQ ID NO: 5542635 - DNA, 25 bp, Homo sapien
tcaccaccctcgaaggcaacgacgg

SEQ ID NO: 5542636 - DNA, 25 bp, Homo sapien
tgtagattcttcaacaggggctgtt

SEQ ID NO: 5542637 - DNA, 25 bp, Homo sapien
gcatctgggctgctgtggaatattg

SEQ ID NO: 5542638 - DNA, 25 bp, Homo sapien
cagatgagggtgttgttccacttgc

SEQ ID NO: 5542639 - DNA, 25 bp, Homo sapien
ttcaacgatgcctgagcttgtggtg

SEQ ID NO: 5542640 - DNA, 25 bp, Homo sapien
gtgctgtgtcagttgaacctgggct

SEQ ID NO: 5542641 - DNA, 25 bp, Homo sapien
cagtgttgtatccgttgagcctggg

SEQ ID NO: 5542642 - DNA, 25 bp, Homo sapien
tggacgcgtgtagatgcttcaacga

SEQ ID NO: 5542643 - DNA, 25 bp, Homo sapien
gctggcaggtaacagtgttgtatcc

SEQ ID NO: 5542644 - DNA, 25 bp, Homo sapien
gaaggcggtagattctccctgaagt

SEQ ID NO: 5542645 - DNA, 25 bp, Homo sapien
gtggaaggttgtagattcttgacca

SEQ ID NO: 5542646 - DNA, 25 bp, Homo sapien
agattcttgaccaaaggataaggct

SEQ ID NO: 5542647 - DNA, 25 bp, Homo sapien
tccgtctacacgtggcgtcggagag

SEQ ID NO: 5542648 - DNA, 25 bp, Homo sapien
ctctccgacgccacgtgtagacgga

SEQ ID NO: 5542649 - DNA, 25 bp, Homo sapien
gacttatattagttttgttacaaat

SEQ ID NO: 5542650 - DNA, 25 bp, Homo sapien
atttgtaacaaaactaatataagtc

SEQ ID NO: 5542651 - DNA, 25 bp, Homo sapien
tgacttatattagttttgttacaaa

SEQ ID NO: 5542652 - DNA, 25 bp, Homo sapien
tttgtaacaaaactaatataagtca

SEQ ID NO: 5542653 - DNA, 25 bp, Homo sapien
atgacttatattagttttgttacaa

SEQ ID NO: 5542654 - DNA, 25 bp, Homo sapien
ttgtaacaaaactaatataagtcat

SEQ ID NO: 5542655 - DNA, 25 bp, Homo sapien
aatgacttatattagttttgttaca

SEQ ID NO: 5542656 - DNA, 25 bp, Homo sapien
tgtaacaaaactaatataagtcatt

SEQ ID NO: 5542657 - DNA, 25 bp, Homo sapien
tgttttcttcctgcggaggcgaagg

SEQ ID NO: 5542658 - DNA, 25 bp, Homo sapien
gccctgcttcaaacatttgggtttc

SEQ ID NO: 5542659 - DNA, 25 bp, Homo sapien
gaagatgatttacttggagaagatt

SEQ ID NO: 5542660 - DNA, 25 bp, Homo sapien
cgcccggcttcgcctctgcctcctg

SEQ ID NO: 5542661 - DNA, 25 bp, Homo sapien
cgtgtttgcgttgcacgcccaccgc

SEQ ID NO: 5542662 - DNA, 25 bp, Homo sapien
cgcctcccggcctccatcatcccag

SEQ ID NO: 5542663 - DNA, 25 bp, Homo sapien
gcggccatgttgcggtagtttgttg

SEQ ID NO: 5542664 - DNA, 25 bp, Homo sapien
gtgactgccgcgtgtttgcgttgca

SEQ ID NO: 5542665 - DNA, 25 bp, Homo sapien
cttccctgtcctccgtcacccgtac

SEQ ID NO: 5542666 - DNA, 25 bp, Homo sapien
ctccatcatcccagggtgcaccgcg

SEQ ID NO: 5542667 - DNA, 25 bp, Homo sapien
ccagtttgataagcctggcgcggaa

SEQ ID NO: 5542668 - DNA, 25 bp, Homo sapien
tgaaaaacaacgctaaacgactttg

SEQ ID NO: 5542669 - DNA, 25 bp, Homo sapien
caaagtcgtttagcgttgtttttca

SEQ ID NO: 5542670 - DNA, 25 bp, Homo sapien
atctgaagtatgaaagttgtcttta

SEQ ID NO: 5542671 - DNA, 25 bp, Homo sapien
ccaggccatggcacatagatatatt

SEQ ID NO: 5542672 - DNA, 25 bp, Homo sapien
ccacagatattttgagctaaacccc

SEQ ID NO: 5542673 - DNA, 25 bp, Homo sapien
ttaaatagtaaaagcaccacaatct

SEQ ID NO: 5542674 - DNA, 25 bp, Homo sapien
tgaggatgctgtcaatgctgaattt

SEQ ID NO: 5542675 - DNA, 25 bp, Homo sapien
ctccctgttctgccccctcccctca

SEQ ID NO: 5542676 - DNA, 25 bp, Homo sapien
caggcttcccaggccatggcacata

SEQ ID NO: 5542677 - DNA, 25 bp, Homo sapien
agaattattaattgaggatgctgtc

SEQ ID NO: 5542678 - DNA, 25 bp, Homo sapien
tatagttcagccttcacaatcccat

SEQ ID NO: 5542679 - DNA, 25 bp, Homo sapien
gcaggatggatataaagaatgtaat

SEQ ID NO: 5542680 - DNA, 25 bp, Homo sapien
tttcttaaggtggactcttgagtat

SEQ ID NO: 5542681 - DNA, 25 bp, Homo sapien
gaaaagtatctgaccacaaagactc

SEQ ID NO: 5542682 - DNA, 25 bp, Homo sapien
gagtctttgtggtcagatacttttc

SEQ ID NO: 5542683 - DNA, 25 bp, Homo sapien
gtcgacctctcggggctcgggacag

SEQ ID NO: 5542684 - DNA, 25 bp, Homo sapien
ctgtcccgagccccgagaggtcgac

SEQ ID NO: 5542685 - DNA, 25 bp, Homo sapien
cactgaaccggttgaggagttagac

SEQ ID NO: 5542686 - DNA, 25 bp, Homo sapien
gtctaactcctcaaccggttcagtg

SEQ ID NO: 5542687 - DNA, 25 bp, Homo sapien
ccccacaggccacgcgccgggcgac

SEQ ID NO: 5542688 - DNA, 25 bp, Homo sapien
gtcgcccggcgcgtggcctgtgggg

SEQ ID NO: 5542689 - DNA, 25 bp, Homo sapien
gtcgtacccccacaggccacgcgcc

SEQ ID NO: 5542690 - DNA, 25 bp, Homo sapien
ggcgcgtggcctgtgggggtacgac

SEQ ID NO: 5542691 - DNA, 25 bp, Homo sapien
gagtcccggacggaggtcatgaccc

SEQ ID NO: 5542692 - DNA, 25 bp, Homo sapien
gggtcatgacctccgtccgggactc

SEQ ID NO: 5542693 - DNA, 25 bp, Homo sapien
cacaggccacgcgccgggcgaccgc

SEQ ID NO: 5542694 - DNA, 25 bp, Homo sapien
gcggtcgcccggcgcgtggcctgtg

SEQ ID NO: 5542695 - DNA, 25 bp, Homo sapien
cagttccgttttctagggggagctg

SEQ ID NO: 5542696 - DNA, 25 bp, Homo sapien
ggagctggtaacactgcagtatggc

SEQ ID NO: 5542697 - DNA, 25 bp, Homo sapien
ttcatccctcccaaagcagaagttt

SEQ ID NO: 5542698 - DNA, 25 bp, Homo sapien
ataaactgaagtaccccaatggctg

SEQ ID NO: 5542699 - DNA, 25 bp, Homo sapien
aaatgaccccaaaactcagaaagca

SEQ ID NO: 5542700 - DNA, 25 bp, Homo sapien
ttgctgtggttggtggataaatcaa

SEQ ID NO: 5542701 - DNA, 25 bp, Homo sapien
atcagaaaagacttgagatattctc

SEQ ID NO: 5542702 - DNA, 25 bp, Homo sapien
attgataagcaatgaaatgacccca

SEQ ID NO: 5542703 - DNA, 25 bp, Homo sapien
caaagtgggtaaaccctctaggtgc

SEQ ID NO: 5542704 - DNA, 25 bp, Homo sapien
gcatatggttactacagaagcatta

SEQ ID NO: 5542705 - DNA, 25 bp, Homo sapien
tgagaatgagaaaagaatgtctgac

SEQ ID NO: 5542706 - DNA, 25 bp, Homo sapien
attacaaaagtacggatctcaacac

SEQ ID NO: 5542707 - DNA, 25 bp, Homo sapien
ccagtatgaaagttatttgagggca

SEQ ID NO: 5542708 - DNA, 25 bp, Homo sapien
ttatgattagcaggtaaaggtagca

SEQ ID NO: 5542709 - DNA, 25 bp, Homo sapien
catgaaactgcaatacactggctcc

SEQ ID NO: 5542710 - DNA, 25 bp, Homo sapien
caggtaaaggtagcatgaaactgca

SEQ ID NO: 5542711 - DNA, 25 bp, Homo sapien
tgcttggtggtctgattacaaaagt

SEQ ID NO: 5542712 - DNA, 25 bp, Homo sapien
gagggggcatctaattcagaacatg

SEQ ID NO: 5542713 - DNA, 25 bp, Homo sapien
aatgaaaccaatgttgatgtacagc

SEQ ID NO: 5542714 - DNA, 25 bp, Homo sapien
ccaggctacaaactatacaacatca

SEQ ID NO: 5542715 - DNA, 25 bp, Homo sapien
tttttgggtgtaaggctagtatcat

SEQ ID NO: 5542716 - DNA, 25 bp, Homo sapien
gatgtacagcaatgtggctggaatt

SEQ ID NO: 5542717 - DNA, 25 bp, Homo sapien
tggaaacttgtagaaaagccttctc

SEQ ID NO: 5542718 - DNA, 25 bp, Homo sapien
cccagcctaactatgaggtgattta

SEQ ID NO: 5542719 - DNA, 25 bp, Homo sapien
gccaggatgatctcagtcccctgac

SEQ ID NO: 5542720 - DNA, 25 bp, Homo sapien
atgaggtgatttaaggaaagtaatg

SEQ ID NO: 5542721 - DNA, 25 bp, Homo sapien
ccttatatgctggagagtaaactgc

SEQ ID NO: 5542722 - DNA, 25 bp, Homo sapien
agatagttttgggtaaagtttgcac

SEQ ID NO: 5542723 - DNA, 25 bp, Homo sapien
atgtaactagctcaaacagtgattt

SEQ ID NO: 5542724 - DNA, 25 bp, Homo sapien
tgggaaggtgcacttaaatgccctg

SEQ ID NO: 5542725 - DNA, 25 bp, Homo sapien
ggagggaatcatgcaagatagtttt

SEQ ID NO: 5542726 - DNA, 25 bp, Homo sapien
gagtaaactgccagtaacagtacat

SEQ ID NO: 5542727 - DNA, 25 bp, Homo sapien
caaggaatatatttaggagggaatc

SEQ ID NO: 5542728 - DNA, 25 bp, Homo sapien
aagtgactgacctccagccatagcc

SEQ ID NO: 5542729 - DNA, 25 bp, Homo sapien
ttatgccataaagtgactgacctcc

SEQ ID NO: 5542730 - DNA, 25 bp, Homo sapien
tttttcaggtataacataagatttc

SEQ ID NO: 5542731 - DNA, 25 bp, Homo sapien
tagatgccaataaatgcacaatttg

SEQ ID NO: 5542732 - DNA, 25 bp, Homo sapien
ataagatttctagccaaaggaaaat

SEQ ID NO: 5542733 - DNA, 25 bp, Homo sapien
acaatttgaattgaaaacagtcttt

SEQ ID NO: 5542734 - DNA, 25 bp, Homo sapien
gctgtgatttggtattatgtggtat

SEQ ID NO: 5542735 - DNA, 25 bp, Homo sapien
gacctccagccatagccaagatctc

SEQ ID NO: 5542736 - DNA, 25 bp, Homo sapien
cagccatagccaagatctcactttc

SEQ ID NO: 5542737 - DNA, 25 bp, Homo sapien
tgtgctctaaccaaaatcatgctag

SEQ ID NO: 5542738 - DNA, 25 bp, Homo sapien
atcatgctagatttagatgccaata

SEQ ID NO: 5542739 - DNA, 25 bp, Homo sapien
gagaacgtccgtgctgaaggattaa

SEQ ID NO: 5542740 - DNA, 25 bp, Homo sapien
agagctgggtgtagctactgtttct

SEQ ID NO: 5542741 - DNA, 25 bp, Homo sapien
gagacactcagaaagtcaagcaagc

SEQ ID NO: 5542742 - DNA, 25 bp, Homo sapien
aatgacaggcccttgtgccagagag

SEQ ID NO: 5542743 - DNA, 25 bp, Homo sapien
actgcaagtttggtccacggacaac

SEQ ID NO: 5542744 - DNA, 25 bp, Homo sapien
gcaagaactgagatgtgtctcgagc

SEQ ID NO: 5542745 - DNA, 25 bp, Homo sapien
gaaggattaatagatagccgggtat

SEQ ID NO: 5542746 - DNA, 25 bp, Homo sapien
cggacaacatggacctcatggaatc

SEQ ID NO: 5542747 - DNA, 25 bp, Homo sapien
gggtatcctggaaaagtttgtgtgc

SEQ ID NO: 5542748 - DNA, 25 bp, Homo sapien
tcaggctgggttttacgtgcttttg

SEQ ID NO: 5542749 - DNA, 25 bp, Homo sapien
aaggctctggccaaatgggatcatt

SEQ ID NO: 5542750 - DNA, 25 bp, Homo sapien
cataaatattagtacgaattcagat

SEQ ID NO: 5542751 - DNA, 25 bp, Homo sapien
atctgaattcgtactaatatttatg

SEQ ID NO: 5542752 - DNA, 25 bp, Homo sapien
gacgtacgtacgctccggccacgga

SEQ ID NO: 5542753 - DNA, 25 bp, Homo sapien
tccgtggccggagcgtacgtacgtc

SEQ ID NO: 5542754 - DNA, 25 bp, Homo sapien
aacttgacaagaacgtttattatgt

SEQ ID NO: 5542755 - DNA, 25 bp, Homo sapien
acataataaacgttcttgtcaagtt

SEQ ID NO: 5542756 - DNA, 25 bp, Homo sapien
gatggtgaagctgaagtactgcttc

SEQ ID NO: 5542757 - DNA, 25 bp, Homo sapien
cggcgtcttcgcgctcacgctgctg

SEQ ID NO: 5542758 - DNA, 25 bp, Homo sapien
tctacataccggccaccccctcgga

SEQ ID NO: 5542759 - DNA, 25 bp, Homo sapien
ttcttcgtcatgagctgcctgctgc

SEQ ID NO: 5542760 - DNA, 25 bp, Homo sapien
agcttcaccgaccctgggatcctgc

SEQ ID NO: 5542761 - DNA, 25 bp, Homo sapien
gcaatcgcttctactgcggcggccg

SEQ ID NO: 5542762 - DNA, 25 bp, Homo sapien
ctgcagacaagcttcaccgaccctg

SEQ ID NO: 5542763 - DNA, 25 bp, Homo sapien
tcccgggtcgcaatcgcttctactg

SEQ ID NO: 5542764 - DNA, 25 bp, Homo sapien
ctggagaaacagatcgacaacacag

SEQ ID NO: 5542765 - DNA, 25 bp, Homo sapien
aacacaggcagttctacataccggc

SEQ ID NO: 5542766 - DNA, 25 bp, Homo sapien
ggctcgcaagctgacccttgccatc

SEQ ID NO: 5542767 - DNA, 25 bp, Homo sapien
gtgtggacagacagtacagtcttct

SEQ ID NO: 5542768 - DNA, 25 bp, Homo sapien
cctgtacaccagttctccaatagat

SEQ ID NO: 5542769 - DNA, 25 bp, Homo sapien
aaagtgctgcacataaattgccatt

SEQ ID NO: 5542770 - DNA, 25 bp, Homo sapien
tttaagattagcaaagagctttaca

SEQ ID NO: 5542771 - DNA, 25 bp, Homo sapien
gaagaacattagggatgcttttatt

SEQ ID NO: 5542772 - DNA, 25 bp, Homo sapien
aaaaatacaagcaatgaacatattc

SEQ ID NO: 5542773 - DNA, 25 bp, Homo sapien
ccaacccacacctgcttcctgctgc

SEQ ID NO: 5542774 - DNA, 25 bp, Homo sapien
gctttacaaccaacccacacctgct

SEQ ID NO: 5542775 - DNA, 25 bp, Homo sapien
tgaacatattcagccaaagattttt

SEQ ID NO: 5542776 - DNA, 25 bp, Homo sapien
caaactgactagaggaagaacatta

SEQ ID NO: 5542777 - DNA, 25 bp, Homo sapien
cacagtaagaaaatgttcctcctgt

SEQ ID NO: 5542778 - DNA, 25 bp, Homo sapien
tccaggaatctgctttcgaacccaa

SEQ ID NO: 5542779 - DNA, 25 bp, Homo sapien
ggcacacgggtctttgagcttgctc

SEQ ID NO: 5542780 - DNA, 25 bp, Homo sapien
tcacaggatatcccaattggaaagc

SEQ ID NO: 5542781 - DNA, 25 bp, Homo sapien
tcggacagcctgccaatcatatcac

SEQ ID NO: 5542782 - DNA, 25 bp, Homo sapien
tgactggtttccagattgggccggg

SEQ ID NO: 5542783 - DNA, 25 bp, Homo sapien
ccaaagttgggggtatccaccaaca

SEQ ID NO: 5542784 - DNA, 25 bp, Homo sapien
taagtgtaactactcggacagcctg

SEQ ID NO: 5542785 - DNA, 25 bp, Homo sapien
cactttctaacctatccggggctgt

SEQ ID NO: 5542786 - DNA, 25 bp, Homo sapien
aaaagcctgactggtttccagattg

SEQ ID NO: 5542787 - DNA, 25 bp, Homo sapien
tttgaacttccaggaatctgctttc

SEQ ID NO: 5542788 - DNA, 25 bp, Homo sapien
gtaactactcggacagcctgccaat

SEQ ID NO: 5542789 - DNA, 25 bp, Homo sapien
cggcgctcctaacgcccgcctgcgg

SEQ ID NO: 5542790 - DNA, 25 bp, Homo sapien
ccgcaggcgggcgttaggagcgccg

SEQ ID NO: 5542791 - DNA, 25 bp, Homo sapien
actcctacggatcccagactgaagc

SEQ ID NO: 5542792 - DNA, 25 bp, Homo sapien
agagacacaaaccgctgaagcctat

SEQ ID NO: 5542793 - DNA, 25 bp, Homo sapien
cagatccttagggcacagagatgaa

SEQ ID NO: 5542794 - DNA, 25 bp, Homo sapien
agagacccacctacaaaaagaggat

SEQ ID NO: 5542795 - DNA, 25 bp, Homo sapien
ggaatttacaaaggaagtgagctac

SEQ ID NO: 5542796 - DNA, 25 bp, Homo sapien
aaagaggattggtcatagcagatcc

SEQ ID NO: 5542797 - DNA, 25 bp, Homo sapien
tggagacgtttcagaagttctcaca

SEQ ID NO: 5542798 - DNA, 25 bp, Homo sapien
tcaatacttaagccagagacccacc

SEQ ID NO: 5542799 - DNA, 25 bp, Homo sapien
cagagatgaaccccaaatccaggtg

SEQ ID NO: 5542800 - DNA, 25 bp, Homo sapien
agactgaagcaggaatttacaaagg

SEQ ID NO: 5542801 - DNA, 25 bp, Homo sapien
aggaagtgagctactactggcttga

SEQ ID NO: 5542802 - DNA, 25 bp, Homo sapien
gcctcaccctacctgcggccgctca

SEQ ID NO: 5542803 - DNA, 25 bp, Homo sapien
gccagggtgcgcgcttaccctgggc

SEQ ID NO: 5542804 - DNA, 25 bp, Homo sapien
gctgcattaccgccagaatggtgcc

SEQ ID NO: 5542805 - DNA, 25 bp, Homo sapien
caactcttctcggaggagcctggtg

SEQ ID NO: 5542806 - DNA, 25 bp, Homo sapien
cggccgctcacgctgcattaccgcc

SEQ ID NO: 5542807 - DNA, 25 bp, Homo sapien
gctggaagctgagactcatcctcat

SEQ ID NO: 5542808 - DNA, 25 bp, Homo sapien
ggtccctagcagctgtagaccagga

SEQ ID NO: 5542809 - DNA, 25 bp, Homo sapien
tttccatgcaaccacgggcaggaag

SEQ ID NO: 5542810 - DNA, 25 bp, Homo sapien
cttcatgaagacgcatgacagcgtg

SEQ ID NO: 5542811 - DNA, 25 bp, Homo sapien
gcatgacagcgtgaccgttctctta

SEQ ID NO: 5542812 - DNA, 25 bp, Homo sapien
tggaccagcctgggctctcgctgga

SEQ ID NO: 5542813 - DNA, 25 bp, Homo sapien
cataaaattggaagatgagaactat

SEQ ID NO: 5542814 - DNA, 25 bp, Homo sapien
cgctctttgggccttctggaaaacc

SEQ ID NO: 5542815 - DNA, 25 bp, Homo sapien
tcagtgagtcttaatcagaaccaac

SEQ ID NO: 5542816 - DNA, 25 bp, Homo sapien
cagctcaagagcactggatctcagt

SEQ ID NO: 5542817 - DNA, 25 bp, Homo sapien
cacttggcagagattagcagcattg

SEQ ID NO: 5542818 - DNA, 25 bp, Homo sapien
tggggtgcccggcaccgctctttgg

SEQ ID NO: 5542819 - DNA, 25 bp, Homo sapien
ggccgagtttctgacagcgtgtgtg

SEQ ID NO: 5542820 - DNA, 25 bp, Homo sapien
agatgagaactatacagaagaagag

SEQ ID NO: 5542821 - DNA, 25 bp, Homo sapien
ccaggagtgtgagtcttaacaatca

SEQ ID NO: 5542822 - DNA, 25 bp, Homo sapien
cacaacaatgaaaacagtggcggca

SEQ ID NO: 5542823 - DNA, 25 bp, Homo sapien
acaatcacaacgagaacacaacaat

SEQ ID NO: 5542824 - DNA, 25 bp, Homo sapien
ccccaaatcggaagaatagaataaa

SEQ ID NO: 5542825 - DNA, 25 bp, Homo sapien
cccttcggtgtcaaatgatacagaa

SEQ ID NO: 5542826 - DNA, 25 bp, Homo sapien
ttgagaaaaagcatgccatgagtct

SEQ ID NO: 5542827 - DNA, 25 bp, Homo sapien
taatcctgtgcaaactatgtaatac

SEQ ID NO: 5542828 - DNA, 25 bp, Homo sapien
tcctatatgttgactgagatacttt

SEQ ID NO: 5542829 - DNA, 25 bp, Homo sapien
gccagaagttagaaggacattggaa

SEQ ID NO: 5542830 - DNA, 25 bp, Homo sapien
ttagcaaacaaaatacaagtaaaca

SEQ ID NO: 5542831 - DNA, 25 bp, Homo sapien
cctaagcagtagtaatcagaatatt

SEQ ID NO: 5542832 - DNA, 25 bp, Homo sapien
ctgcaaacttattgggggtaattta

SEQ ID NO: 5542833 - DNA, 25 bp, Homo sapien
atgatacagaaatggcactggtttc

SEQ ID NO: 5542834 - DNA, 25 bp, Homo sapien
tgatgaatgaagtggttaccatatt

SEQ ID NO: 5542835 - DNA, 25 bp, Homo sapien
gagaaagctcaaaatatcaagtaac

SEQ ID NO: 5542836 - DNA, 25 bp, Homo sapien
atgctattataggaaatgtactttc

SEQ ID NO: 5542837 - DNA, 25 bp, Homo sapien
agttttaactgtccatggtaagtac

SEQ ID NO: 5542838 - DNA, 25 bp, Homo sapien
tcaatggcactatcactcaaaaaga

SEQ ID NO: 5542839 - DNA, 25 bp, Homo sapien
tgccatgccttacacacactaagac

SEQ ID NO: 5542840 - DNA, 25 bp, Homo sapien
aaaatagcagatacaaagttggctg

SEQ ID NO: 5542841 - DNA, 25 bp, Homo sapien
tacatgcaaacagtactatgctatt

SEQ ID NO: 5542842 - DNA, 25 bp, Homo sapien
gtaagtacagttctagtgaccacaa

SEQ ID NO: 5542843 - DNA, 25 bp, Homo sapien
tgaagctctgctcgtactaaaaata

SEQ ID NO: 5542844 - DNA, 25 bp, Homo sapien
agtgaccacaattatgaagctctgc

SEQ ID NO: 5542845 - DNA, 25 bp, Homo sapien
cagatacaaagttggctgccatgcc

SEQ ID NO: 5542846 - DNA, 25 bp, Homo sapien
cctaatcacctggtgcccgaggagc

SEQ ID NO: 5542847 - DNA, 25 bp, Homo sapien
cggggcagagcaatttgtcaatgtt

SEQ ID NO: 5542848 - DNA, 25 bp, Homo sapien
cactcaggatcccagactgcaggag

SEQ ID NO: 5542849 - DNA, 25 bp, Homo sapien
cggggtaactccagagtcaagcaag

SEQ ID NO: 5542850 - DNA, 25 bp, Homo sapien
tcccagacgttccctgcaggctgtt

SEQ ID NO: 5542851 - DNA, 25 bp, Homo sapien
cgagatgaacccacaggacactcag

SEQ ID NO: 5542852 - DNA, 25 bp, Homo sapien
gcgcctgtcccaagcctgagtttcc

SEQ ID NO: 5542853 - DNA, 25 bp, Homo sapien
tatctgttgtgaagctggttctccc

SEQ ID NO: 5542854 - DNA, 25 bp, Homo sapien
gcaggctgtttatgcagcgcccatc

SEQ ID NO: 5542855 - DNA, 25 bp, Homo sapien
ggagtcctccttggcagcccagtct

SEQ ID NO: 5542856 - DNA, 25 bp, Homo sapien
agcacagatgggttcccagcagctt

SEQ ID NO: 5542857 - DNA, 25 bp, Homo sapien
gacggggggccaccgaggcgccctg

SEQ ID NO: 5542858 - DNA, 25 bp, Homo sapien
cagggcgcctcggtggccccccgtc

SEQ ID NO: 5542859 - DNA, 25 bp, Homo sapien
gtcctgcgacccgggccgcccttcg

SEQ ID NO: 5542860 - DNA, 25 bp, Homo sapien
cgaagggcggcccgggtcgcaggac

SEQ ID NO: 5542861 - DNA, 25 bp, Homo sapien
taagtatctgaaaacatgaatagag

SEQ ID NO: 5542862 - DNA, 25 bp, Homo sapien
ctctattcatgttttcagatactta

SEQ ID NO: 5542863 - DNA, 25 bp, Homo sapien
tttaagtatctgaaaacatgaatag

SEQ ID NO: 5542864 - DNA, 25 bp, Homo sapien
ctattcatgttttcagatacttaaa

SEQ ID NO: 5542865 - DNA, 25 bp, Homo sapien
attaacggtaggcgactaataaata

SEQ ID NO: 5542866 - DNA, 25 bp, Homo sapien
actcgagagagacggcttttctaag

SEQ ID NO: 5542867 - DNA, 25 bp, Homo sapien
tcgagagagacggcttttctaagga

SEQ ID NO: 5542868 - DNA, 25 bp, Homo sapien
agcccacctcgcctagatgggggag

SEQ ID NO: 5542869 - DNA, 25 bp, Homo sapien
acggtaggcgactaataaatacatt

SEQ ID NO: 5542870 - DNA, 25 bp, Homo sapien
cggcttttctaaggagggcctggga

SEQ ID NO: 5542871 - DNA, 25 bp, Homo sapien
ttattaaaccaacaagtcactcttc

SEQ ID NO: 5542872 - DNA, 25 bp, Homo sapien
aattacagttaatatggggtgggca

SEQ ID NO: 5542873 - DNA, 25 bp, Homo sapien
agagacggcttttctaaggagggcc

SEQ ID NO: 5542874 - DNA, 25 bp, Homo sapien
acgcccgagcccacctcgcctagat

SEQ ID NO: 5542875 - DNA, 25 bp, Homo sapien
tacattatggcagccaataaattat

SEQ ID NO: 5542876 - DNA, 25 bp, Homo sapien
gtggctacagctcgtgtctggctta

SEQ ID NO: 5542877 - DNA, 25 bp, Homo sapien
ttacagttggaaccaggagttcatg

SEQ ID NO: 5542878 - DNA, 25 bp, Homo sapien
gcctgtgactgattcaagagtaggt

SEQ ID NO: 5542879 - DNA, 25 bp, Homo sapien
tgtccttacagtgtgaaccaggggt

SEQ ID NO: 5542880 - DNA, 25 bp, Homo sapien
ctcaaaccagaataggctcagagag

SEQ ID NO: 5542881 - DNA, 25 bp, Homo sapien
tacgtatggagaaacctataggcta

SEQ ID NO: 5542882 - DNA, 25 bp, Homo sapien
gaaacagagtttgaagtgctgctgc

SEQ ID NO: 5542883 - DNA, 25 bp, Homo sapien
caggctacagctgagtagtgtgtcc

SEQ ID NO: 5542884 - DNA, 25 bp, Homo sapien
acttacagtatgtaaggaggcggct

SEQ ID NO: 5542885 - DNA, 25 bp, Homo sapien
aagagtaggttacagtgtccacaca

SEQ ID NO: 5542886 - DNA, 25 bp, Homo sapien
gttgcccatgctgagtagtctgtcc

SEQ ID NO: 5542887 - DNA, 25 bp, Homo sapien
actgagtacactgaacaacacgcca

SEQ ID NO: 5542888 - DNA, 25 bp, Homo sapien
gcccctccaggcagccaagataggg

SEQ ID NO: 5542889 - DNA, 25 bp, Homo sapien
tagaggggtgtagtattatgacaaa

SEQ ID NO: 5542890 - DNA, 25 bp, Homo sapien
aatgtcaagggccataggctgaatg

SEQ ID NO: 5542891 - DNA, 25 bp, Homo sapien
ggcccagacctggccaaatgggttc

SEQ ID NO: 5542892 - DNA, 25 bp, Homo sapien
tgacggtaacctgcagccaaatgtc

SEQ ID NO: 5542893 - DNA, 25 bp, Homo sapien
tcttaaagcatcaggccaacacgga

SEQ ID NO: 5542894 - DNA, 25 bp, Homo sapien
ctgtgatgaccccagccgtgttctg

SEQ ID NO: 5542895 - DNA, 25 bp, Homo sapien
ggagctcttccaggggtaaagaatc

SEQ ID NO: 5542896 - DNA, 25 bp, Homo sapien
ctaatacataggcagacttggggaa

SEQ ID NO: 5542897 - DNA, 25 bp, Homo sapien
aacaacacgccatcaaagcaggttc

SEQ ID NO: 5542898 - DNA, 25 bp, Homo sapien
tgagggactccctatttccagtgat

SEQ ID NO: 5542899 - DNA, 25 bp, Homo sapien
atcactggaaatagggagtccctca

SEQ ID NO: 5542900 - DNA, 25 bp, Homo sapien
cacaagcactacacaagggttccaa

SEQ ID NO: 5542901 - DNA, 25 bp, Homo sapien
aaaacaaaagaatgacaaacgataa

SEQ ID NO: 5542902 - DNA, 25 bp, Homo sapien
cacagcaatgcatgattttaccttc

SEQ ID NO: 5542903 - DNA, 25 bp, Homo sapien
tggcaggacaaagcataattgaatc

SEQ ID NO: 5542904 - DNA, 25 bp, Homo sapien
ttgcttgaagatacatatgtctgct

SEQ ID NO: 5542905 - DNA, 25 bp, Homo sapien
aacgataaaaaacaatcagaataac

SEQ ID NO: 5542906 - DNA, 25 bp, Homo sapien
ctcaaaaacagaacccggtgaaagc

SEQ ID NO: 5542907 - DNA, 25 bp, Homo sapien
cacatacatggcagttgaaacatag

SEQ ID NO: 5542908 - DNA, 25 bp, Homo sapien
atctgcaccaacacctgatgttctc

SEQ ID NO: 5542909 - DNA, 25 bp, Homo sapien
caggaagtggcctaaaagaatgttt

SEQ ID NO: 5542910 - DNA, 25 bp, Homo sapien
tgaaacatagattttggcaggacaa

SEQ ID NO: 5542911 - DNA, 25 bp, Homo sapien
actcacgggagccaatctccccctc

SEQ ID NO: 5542912 - DNA, 25 bp, Homo sapien
tgatgcaattatacaggcagggtac

SEQ ID NO: 5542913 - DNA, 25 bp, Homo sapien
tgcttacaaagtctgccccatcccc

SEQ ID NO: 5542914 - DNA, 25 bp, Homo sapien
gtagcttgggtctgagttatagttt

SEQ ID NO: 5542915 - DNA, 25 bp, Homo sapien
caaccttgtagcttgggtctgagtt

SEQ ID NO: 5542916 - DNA, 25 bp, Homo sapien
caaccaaaattccaaccttgtagct

SEQ ID NO: 5542917 - DNA, 25 bp, Homo sapien
attatacaggcagggtacttaaaaa

SEQ ID NO: 5542918 - DNA, 25 bp, Homo sapien
tctacaggactatcggatacctagc

SEQ ID NO: 5542919 - DNA, 25 bp, Homo sapien
agcatatgcttacaaagtctgcccc

SEQ ID NO: 5542920 - DNA, 25 bp, Homo sapien
ggactatcggatacctagcatatgc

SEQ ID NO: 5542921 - DNA, 25 bp, Homo sapien
cctgactcacgggagccaatctccc

SEQ ID NO: 5542922 - DNA, 25 bp, Homo sapien
tcacatgattgcaaatccggttgtt

SEQ ID NO: 5542923 - DNA, 25 bp, Homo sapien
aagatatatcagccaacactgcaac

SEQ ID NO: 5542924 - DNA, 25 bp, Homo sapien
taaaaagctagcatgaaaaagatga

SEQ ID NO: 5542925 - DNA, 25 bp, Homo sapien
ataatcacagcaccagttacacttc

SEQ ID NO: 5542926 - DNA, 25 bp, Homo sapien
atgaaaaagatgaagtacaactaac

SEQ ID NO: 5542927 - DNA, 25 bp, Homo sapien
cttctaaatgaatccactgtccttt

SEQ ID NO: 5542928 - DNA, 25 bp, Homo sapien
ctgttaagatgtttaaactgagaga

SEQ ID NO: 5542929 - DNA, 25 bp, Homo sapien
attcagcagctgaccatgacaagag

SEQ ID NO: 5542930 - DNA, 25 bp, Homo sapien
cttcaagtaaattcagcagctgacc

SEQ ID NO: 5542931 - DNA, 25 bp, Homo sapien
gcttaacacttgataataaaggcat

SEQ ID NO: 5542932 - DNA, 25 bp, Homo sapien
cactgcaactgctcaccatgaattt

SEQ ID NO: 5542933 - DNA, 25 bp, Homo sapien
taactcccgacatctggtgatctgt

SEQ ID NO: 5542934 - DNA, 25 bp, Homo sapien
ccaagcaactcccaagatgcaaatc

SEQ ID NO: 5542935 - DNA, 25 bp, Homo sapien
tcaaggacaggacactattaacagt

SEQ ID NO: 5542936 - DNA, 25 bp, Homo sapien
ggaaactagagacgcgctgtcttag

SEQ ID NO: 5542937 - DNA, 25 bp, Homo sapien
gttaaattcaaggacaggacactat

SEQ ID NO: 5542938 - DNA, 25 bp, Homo sapien
aagaactatgcaaacaatatgttgg

SEQ ID NO: 5542939 - DNA, 25 bp, Homo sapien
gacgcgctgtcttagcttaggatgc

SEQ ID NO: 5542940 - DNA, 25 bp, Homo sapien
tgcaaatcaaaatatggaaatgtta

SEQ ID NO: 5542941 - DNA, 25 bp, Homo sapien
gacagaagaggatcccaaattccaa

SEQ ID NO: 5542942 - DNA, 25 bp, Homo sapien
tgtatggacctttatgaatctgtgg

SEQ ID NO: 5542943 - DNA, 25 bp, Homo sapien
tagcttaggatgccataaaactacc

SEQ ID NO: 5542944 - DNA, 25 bp, Homo sapien
agtgatggagcaaactttaatagtg

SEQ ID NO: 5542945 - DNA, 25 bp, Homo sapien
actaaaaatgaagtatgccaaatca

SEQ ID NO: 5542946 - DNA, 25 bp, Homo sapien
agttccagggacagctgttgctttg

SEQ ID NO: 5542947 - DNA, 25 bp, Homo sapien
gcaaagttgtgatgtaaagtagtat

SEQ ID NO: 5542948 - DNA, 25 bp, Homo sapien
gattaaaaactacgacttcagaaga

SEQ ID NO: 5542949 - DNA, 25 bp, Homo sapien
taagtacagatgtccccaaattatc

SEQ ID NO: 5542950 - DNA, 25 bp, Homo sapien
ctttaatagtgcacaacctcatagc

SEQ ID NO: 5542951 - DNA, 25 bp, Homo sapien
aacaagggcctaatgtccaaagtta

SEQ ID NO: 5542952 - DNA, 25 bp, Homo sapien
atcccaaaacgtagttcagctagtt

SEQ ID NO: 5542953 - DNA, 25 bp, Homo sapien
tagttgttcaaaatctcagccatgc

SEQ ID NO: 5542954 - DNA, 25 bp, Homo sapien
tctcagccatgcaaagttgtgatgt

SEQ ID NO: 5542955 - DNA, 25 bp, Homo sapien
gaagacacagtcacccaacaggctg

SEQ ID NO: 5542956 - DNA, 25 bp, Homo sapien
gatgagtttcacaacatgaggatta

SEQ ID NO: 5542957 - DNA, 25 bp, Homo sapien
tgtaaagtcagtaatgccacttggc

SEQ ID NO: 5542958 - DNA, 25 bp, Homo sapien
tatgccaccgaaaaccagtcaaagc

SEQ ID NO: 5542959 - DNA, 25 bp, Homo sapien
ttgagaagtgtcagcagtcacatga

SEQ ID NO: 5542960 - DNA, 25 bp, Homo sapien
gagaggctgactttcaaacaactgt

SEQ ID NO: 5542961 - DNA, 25 bp, Homo sapien
gtgtaacaccccagagcagctgtac

SEQ ID NO: 5542962 - DNA, 25 bp, Homo sapien
ttaaaatgaacgatgaagcacaaaa

SEQ ID NO: 5542963 - DNA, 25 bp, Homo sapien
gctgtacaatgaatgacatagaatc

SEQ ID NO: 5542964 - DNA, 25 bp, Homo sapien
cgatgaagcacaaaatccagcctca

SEQ ID NO: 5542965 - DNA, 25 bp, Homo sapien
ctagacaaagattaggaaaaaatta

SEQ ID NO: 5542966 - DNA, 25 bp, Homo sapien
gtccgtagacgtgccgacaacttgg

SEQ ID NO: 5542967 - DNA, 25 bp, Homo sapien
ccaagttgtcggcacgtctacggac

SEQ ID NO: 5542968 - DNA, 25 bp, Homo sapien
tggacactacttacagcagcaacac

SEQ ID NO: 5542969 - DNA, 25 bp, Homo sapien
tcaaatgggcttatggacactactt

SEQ ID NO: 5542970 - DNA, 25 bp, Homo sapien
atttgttactgataattagccctac

SEQ ID NO: 5542971 - DNA, 25 bp, Homo sapien
tatgtggccaactatatgagtaatt

SEQ ID NO: 5542972 - DNA, 25 bp, Homo sapien
tgagtagatttattgccaatgatgc

SEQ ID NO: 5542973 - DNA, 25 bp, Homo sapien
aatacagtcaaatgggcttatggac

SEQ ID NO: 5542974 - DNA, 25 bp, Homo sapien
ataattagccctacttgctggtttc

SEQ ID NO: 5542975 - DNA, 25 bp, Homo sapien
aacttgtaatacagtcaaatgggct

SEQ ID NO: 5542976 - DNA, 25 bp, Homo sapien
aaatgactgagatttatgtaaatgt

SEQ ID NO: 5542977 - DNA, 25 bp, Homo sapien
acagcagcaacacttcacttcacac

SEQ ID NO: 5542978 - DNA, 25 bp, Homo sapien
cccctgcaagtctgtttattggttt

SEQ ID NO: 5542979 - DNA, 25 bp, Homo sapien
aaatcatagacaataacattaacac

SEQ ID NO: 5542980 - DNA, 25 bp, Homo sapien
atcagcagatggatgttactaacac

SEQ ID NO: 5542981 - DNA, 25 bp, Homo sapien
tctagtaccagatccaatgcctcct

SEQ ID NO: 5542982 - DNA, 25 bp, Homo sapien
aagagaacactcattgggaacagtt

SEQ ID NO: 5542983 - DNA, 25 bp, Homo sapien
taaaatgctttgatagctacaatca

SEQ ID NO: 5542984 - DNA, 25 bp, Homo sapien
aatcagcaagagaacactcattggg

SEQ ID NO: 5542985 - DNA, 25 bp, Homo sapien
aattgcatgttaagtaaaccagttg

SEQ ID NO: 5542986 - DNA, 25 bp, Homo sapien
taaaaatatcagaggttcacagttt

SEQ ID NO: 5542987 - DNA, 25 bp, Homo sapien
attaaacctgtatctaaatgcagca

SEQ ID NO: 5542988 - DNA, 25 bp, Homo sapien
ttctgtgatactacggaatgaaaaa

SEQ ID NO: 5542989 - DNA, 25 bp, Homo sapien
atgcctccttgatcagcagatggat

SEQ ID NO: 5542990 - DNA, 25 bp, Homo sapien
acctttaagtgcagtggcctctgag

SEQ ID NO: 5542991 - DNA, 25 bp, Homo sapien
cagccctctggctgacagagtccag

SEQ ID NO: 5542992 - DNA, 25 bp, Homo sapien
ccctcaatctgcagacatgggtctc

SEQ ID NO: 5542993 - DNA, 25 bp, Homo sapien
agcccagcaatgccaagcagtgtct

SEQ ID NO: 5542994 - DNA, 25 bp, Homo sapien
ttttgtgacagcccagcaatgccaa

SEQ ID NO: 5542995 - DNA, 25 bp, Homo sapien
gacctcacctttaagtgcagtggcc

SEQ ID NO: 5542996 - DNA, 25 bp, Homo sapien
caggcaggttttgaacacctggcct

SEQ ID NO: 5542997 - DNA, 25 bp, Homo sapien
gctgctcaccttggccgagaacagg

SEQ ID NO: 5542998 - DNA, 25 bp, Homo sapien
cagatcccagttttgtgacagccca

SEQ ID NO: 5542999 - DNA, 25 bp, Homo sapien
cgagaacaggtcctcagatcccagt

SEQ ID NO: 5543000 - DNA, 25 bp, Homo sapien
gacctgagcctccgaaccctcaatc

SEQ ID NO: 5543001 - DNA, 25 bp, Homo sapien
aactgatgattaaatggaaaaggtc

SEQ ID NO: 5543002 - DNA, 25 bp, Homo sapien
caccccacccaaaatcaccaacaca

SEQ ID NO: 5543003 - DNA, 25 bp, Homo sapien
tctactatataaagtgagagccctt

SEQ ID NO: 5543004 - DNA, 25 bp, Homo sapien
caagaaaagcaatgttcatgggatc

SEQ ID NO: 5543005 - DNA, 25 bp, Homo sapien
ttgcaggagccttcagtccaattat

SEQ ID NO: 5543006 - DNA, 25 bp, Homo sapien
gaagaggctagagaagtcccttttg

SEQ ID NO: 5543007 - DNA, 25 bp, Homo sapien
atggaaaaggtcttgcaaatgtccc

SEQ ID NO: 5543008 - DNA, 25 bp, Homo sapien
tcatgggatcctgacaaatctacta

SEQ ID NO: 5543009 - DNA, 25 bp, Homo sapien
aatgggattcactaagtacaagtct

SEQ ID NO: 5543010 - DNA, 25 bp, Homo sapien
acaatcaaacccatcacaccccacc

SEQ ID NO: 5543011 - DNA, 25 bp, Homo sapien
tacattatcgaagaggctagagaag

SEQ ID NO: 5543012 - DNA, 25 bp, Homo sapien
tgctacaggaatagatttacttttc

SEQ ID NO: 5543013 - DNA, 25 bp, Homo sapien
catgaaccaataataatccggatgg

SEQ ID NO: 5543014 - DNA, 25 bp, Homo sapien
aataacaaggtatatgtctttgacc

SEQ ID NO: 5543015 - DNA, 25 bp, Homo sapien
gatgatagtatcgaagagttgtagc

SEQ ID NO: 5543016 - DNA, 25 bp, Homo sapien
tcccctgctcaggataaccagctat

SEQ ID NO: 5543017 - DNA, 25 bp, Homo sapien
taaactgagtaaattagcgattgta

SEQ ID NO: 5543018 - DNA, 25 bp, Homo sapien
agcgattgtacagacgagcacttca

SEQ ID NO: 5543019 - DNA, 25 bp, Homo sapien
tttgttgagagtttgttccacatat

SEQ ID NO: 5543020 - DNA, 25 bp, Homo sapien
ataatccggatggaaaaactgatct

SEQ ID NO: 5543021 - DNA, 25 bp, Homo sapien
attggaaaagatgtcaaatattgat

SEQ ID NO: 5543022 - DNA, 25 bp, Homo sapien
tcaagtattcttgcctgctggagac

SEQ ID NO: 5543023 - DNA, 25 bp, Homo sapien
gctgtcttgtctgtcactgggcgcc

SEQ ID NO: 5543024 - DNA, 25 bp, Homo sapien
tcttggaatgcattcagaggcagag

SEQ ID NO: 5543025 - DNA, 25 bp, Homo sapien
ggatttggtatggccagatgtggca

SEQ ID NO: 5543026 - DNA, 25 bp, Homo sapien
gctgtcacagcatcccctccctttc

SEQ ID NO: 5543027 - DNA, 25 bp, Homo sapien
cttctcttcagatgaggagccgagg

SEQ ID NO: 5543028 - DNA, 25 bp, Homo sapien
gaccacgagggacttgccctttctc

SEQ ID NO: 5543029 - DNA, 25 bp, Homo sapien
gccactggttatcgaggtgcttggg

SEQ ID NO: 5543030 - DNA, 25 bp, Homo sapien
tcctgaagcatgcgatggatttggt

SEQ ID NO: 5543031 - DNA, 25 bp, Homo sapien
tcatgaaacattagagccagagcaa

SEQ ID NO: 5543032 - DNA, 25 bp, Homo sapien
tcctttagccagggctgccccagct

SEQ ID NO: 5543033 - DNA, 25 bp, Homo sapien
tagagccagagcaacttagcagtta

SEQ ID NO: 5543034 - DNA, 25 bp, Homo sapien
tatcaaatagcatagaaaccacttc

SEQ ID NO: 5543035 - DNA, 25 bp, Homo sapien
tcaaaaagcaatggtatttgcctgc

SEQ ID NO: 5543036 - DNA, 25 bp, Homo sapien
catgacagctgaacattactgatta

SEQ ID NO: 5543037 - DNA, 25 bp, Homo sapien
actgattatcaaatagcatagaaac

SEQ ID NO: 5543038 - DNA, 25 bp, Homo sapien
aggcactcaaaaagcaatggtattt

SEQ ID NO: 5543039 - DNA, 25 bp, Homo sapien
ccagtaaagtactatcatgacagct

SEQ ID NO: 5543040 - DNA, 25 bp, Homo sapien
gagatgggtctgcaaccagtaaagt

SEQ ID NO: 5543041 - DNA, 25 bp, Homo sapien
ctgtatccctgtcagttatgatttc

SEQ ID NO: 5543042 - DNA, 25 bp, Homo sapien
ttaaaataagtgatagtagcatttc

SEQ ID NO: 5543043 - DNA, 25 bp, Homo sapien
aggcacaattataaactgcactagt

SEQ ID NO: 5543044 - DNA, 25 bp, Homo sapien
tgaaagattttaaaagtaggcacaa

SEQ ID NO: 5543045 - DNA, 25 bp, Homo sapien
agagagcaatgagtaagcactaatg

SEQ ID NO: 5543046 - DNA, 25 bp, Homo sapien
taaaaagagaatccagatctagttc

SEQ ID NO: 5543047 - DNA, 25 bp, Homo sapien
aggtttgaagggtacactgattgta

SEQ ID NO: 5543048 - DNA, 25 bp, Homo sapien
aacactggcgtggcataatataagc

SEQ ID NO: 5543049 - DNA, 25 bp, Homo sapien
aatataagccacgcaaaatgcttcc

SEQ ID NO: 5543050 - DNA, 25 bp, Homo sapien
acttcaacagtaacactggcgtggc

SEQ ID NO: 5543051 - DNA, 25 bp, Homo sapien
cagcctgagtaaactgaacgctctg

SEQ ID NO: 5543052 - DNA, 25 bp, Homo sapien
gcctgagttactaaaaagagaatcc

SEQ ID NO: 5543053 - DNA, 25 bp, Homo sapien
acttaaaaacctaaggcacagagaa

SEQ ID NO: 5543054 - DNA, 25 bp, Homo sapien
acatctgactggaggcaagatgaga

SEQ ID NO: 5543055 - DNA, 25 bp, Homo sapien
agaaggttaaataacatgcctgagt

SEQ ID NO: 5543056 - DNA, 25 bp, Homo sapien
gtgctgatttcagggtacaggacac

SEQ ID NO: 5543057 - DNA, 25 bp, Homo sapien
ccagagaatatgcgagtgagtatgg

SEQ ID NO: 5543058 - DNA, 25 bp, Homo sapien
gtcgcgcctggatcaccccttcttt

SEQ ID NO: 5543059 - DNA, 25 bp, Homo sapien
gtgccgtctgaagccacaccagtca

SEQ ID NO: 5543060 - DNA, 25 bp, Homo sapien
cccctatgtaaccagagagcgggat

SEQ ID NO: 5543061 - DNA, 25 bp, Homo sapien
gtgtatcctttgcgtggttggtgcc

SEQ ID NO: 5543062 - DNA, 25 bp, Homo sapien
aattctggagaagcgacatatcata

SEQ ID NO: 5543063 - DNA, 25 bp, Homo sapien
acaggacactgttggctttagagac

SEQ ID NO: 5543064 - DNA, 25 bp, Homo sapien
gggccggtgtttctgtgctgatttc

SEQ ID NO: 5543065 - DNA, 25 bp, Homo sapien
ttcacatttcaggacgacgagaagc

SEQ ID NO: 5543066 - DNA, 25 bp, Homo sapien
gggtccctcaggccgctgacattca

SEQ ID NO: 5543067 - DNA, 25 bp, Homo sapien
aaacattgtcaacaaaggaaaagat

SEQ ID NO: 5543068 - DNA, 25 bp, Homo sapien
caaaccataagcatagttttgtgca

SEQ ID NO: 5543069 - DNA, 25 bp, Homo sapien
ggtgagatatctgaaaattgccatt

SEQ ID NO: 5543070 - DNA, 25 bp, Homo sapien
acagaccagatataaaaatgcaaag

SEQ ID NO: 5543071 - DNA, 25 bp, Homo sapien
aaagatatggtaaggtgagatatct

SEQ ID NO: 5543072 - DNA, 25 bp, Homo sapien
tatggtaaggtgagatatctgaaaa

SEQ ID NO: 5543073 - DNA, 25 bp, Homo sapien
cagtgattaaatgcatgcagtgaaa

SEQ ID NO: 5543074 - DNA, 25 bp, Homo sapien
caatgcttgcctatttgaaatgccc

SEQ ID NO: 5543075 - DNA, 25 bp, Homo sapien
gaaatgcccataataacaaatcaaa

SEQ ID NO: 5543076 - DNA, 25 bp, Homo sapien
atatagtatcacagtgcgattataa

SEQ ID NO: 5543077 - DNA, 25 bp, Homo sapien
atcaaacattaagtaatacagtgat

SEQ ID NO: 5543078 - DNA, 25 bp, Homo sapien
aggctctgaatccaggttagaggtc

SEQ ID NO: 5543079 - DNA, 25 bp, Homo sapien
aaataaaagcacggaccaatgaggt

SEQ ID NO: 5543080 - DNA, 25 bp, Homo sapien
actcaaagaagacaccaaggttata

SEQ ID NO: 5543081 - DNA, 25 bp, Homo sapien
gtaataccagattccagattccctc

SEQ ID NO: 5543082 - DNA, 25 bp, Homo sapien
gctgctccagtgtatgaattgagat

SEQ ID NO: 5543083 - DNA, 25 bp, Homo sapien
gattccctctcggcctctaaggctc

SEQ ID NO: 5543084 - DNA, 25 bp, Homo sapien
tagtctaaatacaagcaacgtactt

SEQ ID NO: 5543085 - DNA, 25 bp, Homo sapien
caaagtcctatcaagcatggctctg

SEQ ID NO: 5543086 - DNA, 25 bp, Homo sapien
tacctaggatctcagtaataccaga

SEQ ID NO: 5543087 - DNA, 25 bp, Homo sapien
atactgtccaggcaactcaaagaag

SEQ ID NO: 5543088 - DNA, 25 bp, Homo sapien
ggaaagactgccaggctggttcttt

SEQ ID NO: 5543089 - DNA, 25 bp, Homo sapien
gcgcttaataagatcaagcagcaga

SEQ ID NO: 5543090 - DNA, 25 bp, Homo sapien
aatgtacgtgcaaacatagcaaatt

SEQ ID NO: 5543091 - DNA, 25 bp, Homo sapien
atcaaaacaaatgtaatgtacgtgc

SEQ ID NO: 5543092 - DNA, 25 bp, Homo sapien
aagaataaacaacagtaacaccacc

SEQ ID NO: 5543093 - DNA, 25 bp, Homo sapien
cttgtggcagactcaattttgaagc

SEQ ID NO: 5543094 - DNA, 25 bp, Homo sapien
ttgaagctaaatatttgggtcaccc

SEQ ID NO: 5543095 - DNA, 25 bp, Homo sapien
tactaatgacaggtcttgcgcttaa

SEQ ID NO: 5543096 - DNA, 25 bp, Homo sapien
attgacaatggaaagggtttctgtt

SEQ ID NO: 5543097 - DNA, 25 bp, Homo sapien
catgtttagatgagcttagaaagct

SEQ ID NO: 5543098 - DNA, 25 bp, Homo sapien
ccataagcaagtttagatctccctc

SEQ ID NO: 5543099 - DNA, 25 bp, Homo sapien
agtaaattgtcgagccttatgtgac

SEQ ID NO: 5543100 - DNA, 25 bp, Homo sapien
taaaggcagttgtgagcttaagtta

SEQ ID NO: 5543101 - DNA, 25 bp, Homo sapien
tcagcgtaattgaaccagatgtttt

SEQ ID NO: 5543102 - DNA, 25 bp, Homo sapien
ataggatcctacaagggaatatgtt

SEQ ID NO: 5543103 - DNA, 25 bp, Homo sapien
agtagataagtaccataaccttgtc

SEQ ID NO: 5543104 - DNA, 25 bp, Homo sapien
ttactggcccacatgtagtcagagt

SEQ ID NO: 5543105 - DNA, 25 bp, Homo sapien
tgatgctctgataataggatcctac

SEQ ID NO: 5543106 - DNA, 25 bp, Homo sapien
gcaaagtttataactgtggatgtga

SEQ ID NO: 5543107 - DNA, 25 bp, Homo sapien
atttacatggaaacagcagcccttt

SEQ ID NO: 5543108 - DNA, 25 bp, Homo sapien
acatgtagtcagagttcagcgtaat

SEQ ID NO: 5543109 - DNA, 25 bp, Homo sapien
aattaactatagggccatgctgtga

SEQ ID NO: 5543110 - DNA, 25 bp, Homo sapien
atttggcaacccaagttgctgactt

SEQ ID NO: 5543111 - DNA, 25 bp, Homo sapien
tgaaagcctggtaagtgttggtaaa

SEQ ID NO: 5543112 - DNA, 25 bp, Homo sapien
aaggccgaaaaacaagacattgctg

SEQ ID NO: 5543113 - DNA, 25 bp, Homo sapien
gaaagactgaaattccccaccaatc

SEQ ID NO: 5543114 - DNA, 25 bp, Homo sapien
aaacaagaatcccaacatggcaccc

SEQ ID NO: 5543115 - DNA, 25 bp, Homo sapien
ccaatctgagactgtatgcgagttt

SEQ ID NO: 5543116 - DNA, 25 bp, Homo sapien
aagaatgggcaccaagcctcgataa

SEQ ID NO: 5543117 - DNA, 25 bp, Homo sapien
ctccttaatgggacctcgaaggccg

SEQ ID NO: 5543118 - DNA, 25 bp, Homo sapien
ttgcggtaggcagatgctccttaat

SEQ ID NO: 5543119 - DNA, 25 bp, Homo sapien
aacatggcacccaatagacctccac

SEQ ID NO: 5543120 - DNA, 25 bp, Homo sapien
cgatggtaattcagatgggcacctc

SEQ ID NO: 5543121 - DNA, 25 bp, Homo sapien
tgtggtcttgaagcaatgtctgaac

SEQ ID NO: 5543122 - DNA, 25 bp, Homo sapien
aggcacactacctaggagtcaacct

SEQ ID NO: 5543123 - DNA, 25 bp, Homo sapien
tgcaagcaactgatctttataggtc

SEQ ID NO: 5543124 - DNA, 25 bp, Homo sapien
tcctgagactcttgcaagcaactga

SEQ ID NO: 5543125 - DNA, 25 bp, Homo sapien
atcagtccaatgacagccacaagtg

SEQ ID NO: 5543126 - DNA, 25 bp, Homo sapien
cagaaagctttcttagcagccctct

SEQ ID NO: 5543127 - DNA, 25 bp, Homo sapien
tttataggtcatgcctcaaattccc

SEQ ID NO: 5543128 - DNA, 25 bp, Homo sapien
ccaattgatgtcatctgggcaaatc

SEQ ID NO: 5543129 - DNA, 25 bp, Homo sapien
caggcatgagctgccatatctggcc

SEQ ID NO: 5543130 - DNA, 25 bp, Homo sapien
gatgtcatctgggcaaatcagtcca

SEQ ID NO: 5543131 - DNA, 25 bp, Homo sapien
agccctcttggtcactaggcacact

SEQ ID NO: 5543132 - DNA, 25 bp, Homo sapien
agccacaagtggtcagaaagctttc

SEQ ID NO: 5543133 - DNA, 25 bp, Homo sapien
atggtaatttagtcgtagtagtgat

SEQ ID NO: 5543134 - DNA, 25 bp, Homo sapien
atcactactacgactaaattaccat

SEQ ID NO: 5543135 - DNA, 25 bp, Homo sapien
accactctcaaggagcaccagggga

SEQ ID NO: 5543136 - DNA, 25 bp, Homo sapien
tcccctggtgctccttgagagtggt

SEQ ID NO: 5543137 - DNA, 25 bp, Homo sapien
taccgtccgcggaccgtagacaccc

SEQ ID NO: 5543138 - DNA, 25 bp, Homo sapien
gggtgtctacggtccgcggacggta

SEQ ID NO: 5543139 - DNA, 25 bp, Homo sapien
gagttatgtgctcaagtcctggtgg

SEQ ID NO: 5543140 - DNA, 25 bp, Homo sapien
tgaagatcaggctaacacacccctc

SEQ ID NO: 5543141 - DNA, 25 bp, Homo sapien
agcctcctagatcagacatagagtt

SEQ ID NO: 5543142 - DNA, 25 bp, Homo sapien
agccttaggttaaaatacgagatgc

SEQ ID NO: 5543143 - DNA, 25 bp, Homo sapien
ggtgtgattttatgggaggctcttc

SEQ ID NO: 5543144 - DNA, 25 bp, Homo sapien
attatgatggtttgagtctagcttt

SEQ ID NO: 5543145 - DNA, 25 bp, Homo sapien
ctgtctggagaaattaccaagtccc

SEQ ID NO: 5543146 - DNA, 25 bp, Homo sapien
ctgtacttttaggtgctgggctcaa

SEQ ID NO: 5543147 - DNA, 25 bp, Homo sapien
ccctctgtccagtcgtgtgtgggag

SEQ ID NO: 5543148 - DNA, 25 bp, Homo sapien
gtctgctgtggtcattaacgggaag

SEQ ID NO: 5543149 - DNA, 25 bp, Homo sapien
gcagcagcaaaccctaagcacagaa

SEQ ID NO: 5543150 - DNA, 25 bp, Homo sapien
tgctgtgaatgacagctgagggaat

SEQ ID NO: 5543151 - DNA, 25 bp, Homo sapien
atggcttggtaagttggttagtgct

SEQ ID NO: 5543152 - DNA, 25 bp, Homo sapien
ggagaaagaaattgtgcaaactgaa

SEQ ID NO: 5543153 - DNA, 25 bp, Homo sapien
gtgtcagcttacaaaagagtagggc

SEQ ID NO: 5543154 - DNA, 25 bp, Homo sapien
aggtgggccaaagctaataaacatt

SEQ ID NO: 5543155 - DNA, 25 bp, Homo sapien
attgttatcatggcacagggtggtt

SEQ ID NO: 5543156 - DNA, 25 bp, Homo sapien
ttcagtgctgattaggacctgtctc

SEQ ID NO: 5543157 - DNA, 25 bp, Homo sapien
aatccagggaaaaatctgtagctcc

SEQ ID NO: 5543158 - DNA, 25 bp, Homo sapien
aattaccagaagaccgagtagcatg

SEQ ID NO: 5543159 - DNA, 25 bp, Homo sapien
gatgctggtgatagaacaagattgt

SEQ ID NO: 5543160 - DNA, 25 bp, Homo sapien
agggaatgtcaccaagcagtattaa

SEQ ID NO: 5543161 - DNA, 25 bp, Homo sapien
tggtcggatccttgagcattactaa

SEQ ID NO: 5543162 - DNA, 25 bp, Homo sapien
agaacccctcactttggaaacacgc

SEQ ID NO: 5543163 - DNA, 25 bp, Homo sapien
gataggacgcagaacccctcacttt

SEQ ID NO: 5543164 - DNA, 25 bp, Homo sapien
ataattactctgaatggtcggatcc

SEQ ID NO: 5543165 - DNA, 25 bp, Homo sapien
aaaaagccagcatcatcggtagtgt

SEQ ID NO: 5543166 - DNA, 25 bp, Homo sapien
catctccttgataggacgcagaacc

SEQ ID NO: 5543167 - DNA, 25 bp, Homo sapien
gaaacacgcaaatatggtcctcagt

SEQ ID NO: 5543168 - DNA, 25 bp, Homo sapien
catcggtagtgtagtcagtagttta

SEQ ID NO: 5543169 - DNA, 25 bp, Homo sapien
gcctggattatagaacaatacatgt

SEQ ID NO: 5543170 - DNA, 25 bp, Homo sapien
aacaatacatgtgaaaccgaactgc

SEQ ID NO: 5543171 - DNA, 25 bp, Homo sapien
atgtgaaaccgaactgcgattgctc

SEQ ID NO: 5543172 - DNA, 25 bp, Homo sapien
acggttttgactgtgaattgtaccc

SEQ ID NO: 5543173 - DNA, 25 bp, Homo sapien
gggtacaattcacagtcaaaaccgt

SEQ ID NO: 5543174 - DNA, 25 bp, Homo sapien
tcttttaagtgaaatttggattgct

SEQ ID NO: 5543175 - DNA, 25 bp, Homo sapien
aggttgatcatgggaatatgcagaa

SEQ ID NO: 5543176 - DNA, 25 bp, Homo sapien
tgctcacaaagcactaggaaatgtc

SEQ ID NO: 5543177 - DNA, 25 bp, Homo sapien
aggagtttccctattttggtgttca

SEQ ID NO: 5543178 - DNA, 25 bp, Homo sapien
aaaaacatagtccagagcatgggca

SEQ ID NO: 5543179 - DNA, 25 bp, Homo sapien
tgttcagcttgaaaaaggacttgtc

SEQ ID NO: 5543180 - DNA, 25 bp, Homo sapien
ttggattgctcacaaagcactagga

SEQ ID NO: 5543181 - DNA, 25 bp, Homo sapien
atgtgcattgaaaataaggttgatc

SEQ ID NO: 5543182 - DNA, 25 bp, Homo sapien
gaaaataaggttgatcatgggaata

SEQ ID NO: 5543183 - DNA, 25 bp, Homo sapien
tataagagatcaattattgtcagtc

SEQ ID NO: 5543184 - DNA, 25 bp, Homo sapien
caaaatttaagtaatgtgcattgaa

SEQ ID NO: 5543185 - DNA, 25 bp, Homo sapien
ggcccctggatgctcatctctcagc

SEQ ID NO: 5543186 - DNA, 25 bp, Homo sapien
tgggctatgagtccagtggtaattt

SEQ ID NO: 5543187 - DNA, 25 bp, Homo sapien
tggggttcccgaatggtccttcatg

SEQ ID NO: 5543188 - DNA, 25 bp, Homo sapien
tttagtaggcagtcactccatttgt

SEQ ID NO: 5543189 - DNA, 25 bp, Homo sapien
gatatacccccgtgctggtagagcc

SEQ ID NO: 5543190 - DNA, 25 bp, Homo sapien
tctggatgtttgtcagtgggattcc

SEQ ID NO: 5543191 - DNA, 25 bp, Homo sapien
cgtgctggtagagccagactcatct

SEQ ID NO: 5543192 - DNA, 25 bp, Homo sapien
aagacaagtctcaggtctggatgtt

SEQ ID NO: 5543193 - DNA, 25 bp, Homo sapien
caggctcagggtaataaaaaatctt

SEQ ID NO: 5543194 - DNA, 25 bp, Homo sapien
ccatttgtgtttagcatgcaagccc

SEQ ID NO: 5543195 - DNA, 25 bp, Homo sapien
ttagatgctttttgccagaggcccc

SEQ ID NO: 5543196 - DNA, 25 bp, Homo sapien
tacttcccaggtgcccttgtcccac

SEQ ID NO: 5543197 - DNA, 25 bp, Homo sapien
ccgtcatctttacttcccaggtgcc

SEQ ID NO: 5543198 - DNA, 25 bp, Homo sapien
catataaggctttggtacagcaccg

SEQ ID NO: 5543199 - DNA, 25 bp, Homo sapien
aggtgcccttgtcccacagtcccca

SEQ ID NO: 5543200 - DNA, 25 bp, Homo sapien
agggagctcctcacagacaggttat

SEQ ID NO: 5543201 - DNA, 25 bp, Homo sapien
taaggctttggtacagcaccgattt

SEQ ID NO: 5543202 - DNA, 25 bp, Homo sapien
acagacaggttatacagagtgtaga

SEQ ID NO: 5543203 - DNA, 25 bp, Homo sapien
atctgggtttccttgcaggtctgct

SEQ ID NO: 5543204 - DNA, 25 bp, Homo sapien
tccccaagacccagcccaggcttgg

SEQ ID NO: 5543205 - DNA, 25 bp, Homo sapien
tgtcccccatcctcaccgtcatctt

SEQ ID NO: 5543206 - DNA, 25 bp, Homo sapien
acccataccataaagtcagctgccc

SEQ ID NO: 5543207 - DNA, 25 bp, Homo sapien
catgaaggtctaaatgtaagatgac

SEQ ID NO: 5543208 - DNA, 25 bp, Homo sapien
taagaagtcttaaatctggaacatt

SEQ ID NO: 5543209 - DNA, 25 bp, Homo sapien
aataaggaaaaattgcccatgatgc

SEQ ID NO: 5543210 - DNA, 25 bp, Homo sapien
gatgctgagataataccagtgtttt

SEQ ID NO: 5543211 - DNA, 25 bp, Homo sapien
cttaaaagtgagaattgacaatcta

SEQ ID NO: 5543212 - DNA, 25 bp, Homo sapien
ttgcccatgatgctgagataatacc

SEQ ID NO: 5543213 - DNA, 25 bp, Homo sapien
gaattgacaatctaaaagcatctct

SEQ ID NO: 5543214 - DNA, 25 bp, Homo sapien
tgtttcctggctactagaaagaaat

SEQ ID NO: 5543215 - DNA, 25 bp, Homo sapien
attggcatgtaataaggaaaaattg

SEQ ID NO: 5543216 - DNA, 25 bp, Homo sapien
ctaaatgtaagatgactgtaggact

SEQ ID NO: 5543217 - DNA, 25 bp, Homo sapien
catatcaccctaccatgaaggtcta

SEQ ID NO: 5543218 - DNA, 25 bp, Homo sapien
tcagattttggaaagacaagaacta

SEQ ID NO: 5543219 - DNA, 25 bp, Homo sapien
ctatgggtaaaaacgtcctagaatc

SEQ ID NO: 5543220 - DNA, 25 bp, Homo sapien
gtgatctattcacaaggagaaactc

SEQ ID NO: 5543221 - DNA, 25 bp, Homo sapien
ggagaaactctagcgactgccttga

SEQ ID NO: 5543222 - DNA, 25 bp, Homo sapien
tgatacaacataccccagaaagatt

SEQ ID NO: 5543223 - DNA, 25 bp, Homo sapien
tcattaaaatgctagagtgatctat

SEQ ID NO: 5543224 - DNA, 25 bp, Homo sapien
tcacaaggagaaactctagcgactg

SEQ ID NO: 5543225 - DNA, 25 bp, Homo sapien
taaaaacgtcctagaatcagggatc

SEQ ID NO: 5543226 - DNA, 25 bp, Homo sapien
cccagttctgagcaaaaaaaagaat

SEQ ID NO: 5543227 - DNA, 25 bp, Homo sapien
aacccttggctacccagttctgagc

SEQ ID NO: 5543228 - DNA, 25 bp, Homo sapien
ttggaaagacaagaactatgggtaa

SEQ ID NO: 5543229 - DNA, 25 bp, Homo sapien
tggaaaggacaaaatatgtggttac

SEQ ID NO: 5543230 - DNA, 25 bp, Homo sapien
ggaaggacaactaataagacaggta

SEQ ID NO: 5543231 - DNA, 25 bp, Homo sapien
cagggtagtcaagccaaatagtctc

SEQ ID NO: 5543232 - DNA, 25 bp, Homo sapien
ggaccagaaatgtacagataagaac

SEQ ID NO: 5543233 - DNA, 25 bp, Homo sapien
aaaagcaaacttgagacaccctcct

SEQ ID NO: 5543234 - DNA, 25 bp, Homo sapien
actgcactatgaaatatgaccaaac

SEQ ID NO: 5543235 - DNA, 25 bp, Homo sapien
tatgaaggaatcagtgacatggaaa

SEQ ID NO: 5543236 - DNA, 25 bp, Homo sapien
aatcaagaacaaagcctagaagaaa

SEQ ID NO: 5543237 - DNA, 25 bp, Homo sapien
gacaggtattggaccagaaatgtac

SEQ ID NO: 5543238 - DNA, 25 bp, Homo sapien
tgaagtagcaccttaacactggctc

SEQ ID NO: 5543239 - DNA, 25 bp, Homo sapien
cacaatatacagggtagtcaagcca

SEQ ID NO: 5543240 - DNA, 25 bp, Homo sapien
tgtgatacaaccataccatgaaatg

SEQ ID NO: 5543241 - DNA, 25 bp, Homo sapien
ggaggtccagaatacaatgcaaagt

SEQ ID NO: 5543242 - DNA, 25 bp, Homo sapien
ccatgtattaatgcaagaggaggtc

SEQ ID NO: 5543243 - DNA, 25 bp, Homo sapien
tacaaatgtgtgggtattcatatat

SEQ ID NO: 5543244 - DNA, 25 bp, Homo sapien
ggtccagaatacaatgcaaagtgaa

SEQ ID NO: 5543245 - DNA, 25 bp, Homo sapien
agacacacaccaaattaagttattc

SEQ ID NO: 5543246 - DNA, 25 bp, Homo sapien
tcaatagagttataatgtatgtgtt

SEQ ID NO: 5543247 - DNA, 25 bp, Homo sapien
gaatgattggagacaaatttgcatc

SEQ ID NO: 5543248 - DNA, 25 bp, Homo sapien
tgtaatcagatcaatagagttataa

SEQ ID NO: 5543249 - DNA, 25 bp, Homo sapien
aaataggcacttttgtaatcagatc

SEQ ID NO: 5543250 - DNA, 25 bp, Homo sapien
aatttgcatcaataggtgaatcatt

SEQ ID NO: 5543251 - DNA, 25 bp, Homo sapien
tattgagaaatcgaaggaacggtag

SEQ ID NO: 5543252 - DNA, 25 bp, Homo sapien
ctaccgttccttcgatttctcaata

SEQ ID NO: 5543253 - DNA, 25 bp, Homo sapien
gccttacactacctctccacctcca

SEQ ID NO: 5543254 - DNA, 25 bp, Homo sapien
gtcttgaggaccatgctccagaact

SEQ ID NO: 5543255 - DNA, 25 bp, Homo sapien
gatctaagagttaaagtgttaatac

SEQ ID NO: 5543256 - DNA, 25 bp, Homo sapien
gccaccatgattgttattaagtagc

SEQ ID NO: 5543257 - DNA, 25 bp, Homo sapien
atggctgttgtccaccctgacttgc

SEQ ID NO: 5543258 - DNA, 25 bp, Homo sapien
gttgataaacagttgtgccttacac

SEQ ID NO: 5543259 - DNA, 25 bp, Homo sapien
cacgtgtctggcctgaaatacttag

SEQ ID NO: 5543260 - DNA, 25 bp, Homo sapien
atgacttgctacagcctcgaccccc

SEQ ID NO: 5543261 - DNA, 25 bp, Homo sapien
tgctccagaactatggctgttgtcc

SEQ ID NO: 5543262 - DNA, 25 bp, Homo sapien
cttagataccagttgataaacagtt

SEQ ID NO: 5543263 - DNA, 25 bp, Homo sapien
catacaaaaggtagtcttgaggacc

SEQ ID NO: 5543264 - DNA, 25 bp, Homo sapien
agcatcagagcacagagcccttctg

SEQ ID NO: 5543265 - DNA, 25 bp, Homo sapien
acaacaggtatcatttgctaggaag

SEQ ID NO: 5543266 - DNA, 25 bp, Homo sapien
aattaatgtaatagctaagtaaact

SEQ ID NO: 5543267 - DNA, 25 bp, Homo sapien
agcgagcaagaacttagacacactc

SEQ ID NO: 5543268 - DNA, 25 bp, Homo sapien
acagaaacaactctttcagcgctca

SEQ ID NO: 5543269 - DNA, 25 bp, Homo sapien
ctttaaagcgagcaagaacttagac

SEQ ID NO: 5543270 - DNA, 25 bp, Homo sapien
tgaaccacatcgataatcatgatct

SEQ ID NO: 5543271 - DNA, 25 bp, Homo sapien
atctataatttctagtagcagcttc

SEQ ID NO: 5543272 - DNA, 25 bp, Homo sapien
tgctcattggagtttcccagggatt

SEQ ID NO: 5543273 - DNA, 25 bp, Homo sapien
ctggtcttaaactcgagttcaagcc

SEQ ID NO: 5543274 - DNA, 25 bp, Homo sapien
acttagacacactcctgaagcatca

SEQ ID NO: 5543275 - DNA, 25 bp, Homo sapien
aaggactctggcttaatcgtccagg

SEQ ID NO: 5543276 - DNA, 25 bp, Homo sapien
cctggacgattaagccagagtcctt

SEQ ID NO: 5543277 - DNA, 25 bp, Homo sapien
ggacaaagattagaaaccgcagctc

SEQ ID NO: 5543278 - DNA, 25 bp, Homo sapien
gggaacactagaggtcatttggttc

SEQ ID NO: 5543279 - DNA, 25 bp, Homo sapien
ctaagtcagtactcaagcaccatac

SEQ ID NO: 5543280 - DNA, 25 bp, Homo sapien
gccaagtgacaggtccacagtctca

SEQ ID NO: 5543281 - DNA, 25 bp, Homo sapien
gtagaggaagcctttcatgctgtac

SEQ ID NO: 5543282 - DNA, 25 bp, Homo sapien
ttgttttaaacagctggaagtcacc

SEQ ID NO: 5543283 - DNA, 25 bp, Homo sapien
gtgctaaatgtgctatgccttacac

SEQ ID NO: 5543284 - DNA, 25 bp, Homo sapien
tgccttacacatagaggacacaatt

SEQ ID NO: 5543285 - DNA, 25 bp, Homo sapien
tgtaaggtgcttagtgtgcttatgt

SEQ ID NO: 5543286 - DNA, 25 bp, Homo sapien
ccacagtctcatagggagtaaggga

SEQ ID NO: 5543287 - DNA, 25 bp, Homo sapien
ggcagcgtgctttgagaagctccta

SEQ ID NO: 5543288 - DNA, 25 bp, Homo sapien
gagaaggtaacattaagtttggcac

SEQ ID NO: 5543289 - DNA, 25 bp, Homo sapien
agcaggttgcttgaagatgcaacaa

SEQ ID NO: 5543290 - DNA, 25 bp, Homo sapien
tatgactagctgagtagcaacagca

SEQ ID NO: 5543291 - DNA, 25 bp, Homo sapien
tccctctggctgagctatgactagc

SEQ ID NO: 5543292 - DNA, 25 bp, Homo sapien
tctaaaatgtacaagtgactgactc

SEQ ID NO: 5543293 - DNA, 25 bp, Homo sapien
tgagtagcaacagcagagtgctgaa

SEQ ID NO: 5543294 - DNA, 25 bp, Homo sapien
ttgaagtaacatagttgagaaatac

SEQ ID NO: 5543295 - DNA, 25 bp, Homo sapien
atctttagcagagaaggtaacatta

SEQ ID NO: 5543296 - DNA, 25 bp, Homo sapien
tgcactgtaacagtctggagagcag

SEQ ID NO: 5543297 - DNA, 25 bp, Homo sapien
tttcaaggttgatgatcagaatcat

SEQ ID NO: 5543298 - DNA, 25 bp, Homo sapien
attgaatcagaagtgccattaccac

SEQ ID NO: 5543299 - DNA, 25 bp, Homo sapien
atgcatgtgcatcagtaacttttat

SEQ ID NO: 5543300 - DNA, 25 bp, Homo sapien
gaaacttaaattcaccagaacacag

SEQ ID NO: 5543301 - DNA, 25 bp, Homo sapien
acatgtcaacatcagttcaatttcc

SEQ ID NO: 5543302 - DNA, 25 bp, Homo sapien
ttagtgttagatttgcaacaacatt

SEQ ID NO: 5543303 - DNA, 25 bp, Homo sapien
ctcctgggcatgcatacatgtcaac

SEQ ID NO: 5543304 - DNA, 25 bp, Homo sapien
tgagccactgcacccagtcaaaaat

SEQ ID NO: 5543305 - DNA, 25 bp, Homo sapien
accagaacacagaatcaccagagtc

SEQ ID NO: 5543306 - DNA, 25 bp, Homo sapien
ggctcactgcaacctgcccctcctt

SEQ ID NO: 5543307 - DNA, 25 bp, Homo sapien
atttcctgtccagggtacacaatga

SEQ ID NO: 5543308 - DNA, 25 bp, Homo sapien
cacagaatcaccagagtcccaggtt

SEQ ID NO: 5543309 - DNA, 25 bp, Homo sapien
ctcctgtccttgtgatctacccgcc

SEQ ID NO: 5543310 - DNA, 25 bp, Homo sapien
attcaaaccgtaagtcctctttctc

SEQ ID NO: 5543311 - DNA, 25 bp, Homo sapien
gagaaagaggacttacggtttgaat

SEQ ID NO: 5543312 - DNA, 25 bp, Homo sapien
aatgtcagtcagaagaaagcaaaga

SEQ ID NO: 5543313 - DNA, 25 bp, Homo sapien
gatgctcctagtgagaggcagtaat

SEQ ID NO: 5543314 - DNA, 25 bp, Homo sapien
tttcctgggcaagaataccaaagaa

SEQ ID NO: 5543315 - DNA, 25 bp, Homo sapien
atctggtgctggtcagaactcttgt

SEQ ID NO: 5543316 - DNA, 25 bp, Homo sapien
tcctggaaagttgagatcactcttc

SEQ ID NO: 5543317 - DNA, 25 bp, Homo sapien
tcacagtgaattcagcaccacggac

SEQ ID NO: 5543318 - DNA, 25 bp, Homo sapien
aataatggtaaataaatgatgctcc

SEQ ID NO: 5543319 - DNA, 25 bp, Homo sapien
tgggggaacataagagattcctgta

SEQ ID NO: 5543320 - DNA, 25 bp, Homo sapien
aggagcctactgaaaaaccacctgc

SEQ ID NO: 5543321 - DNA, 25 bp, Homo sapien
aaaggagagcactgaagcttatctg

SEQ ID NO: 5543322 - DNA, 25 bp, Homo sapien
taccaaagaaactacctcgcagatt

SEQ ID NO: 5543323 - DNA, 25 bp, Homo sapien
ggtcaaaacgttgattatgaaaata

SEQ ID NO: 5543324 - DNA, 25 bp, Homo sapien
tattttcataatcaacgttttgacc

SEQ ID NO: 5543325 - DNA, 25 bp, Homo sapien
ttcagaaccatagcagaaaaacctc

SEQ ID NO: 5543326 - DNA, 25 bp, Homo sapien
tgcccagctgcagatggatgattta

SEQ ID NO: 5543327 - DNA, 25 bp, Homo sapien
atgcccacttgcaaggtgactgtcc

SEQ ID NO: 5543328 - DNA, 25 bp, Homo sapien
ttcaagaagccaaagtactactaag

SEQ ID NO: 5543329 - DNA, 25 bp, Homo sapien
agtagtggttaactgggaatatata

SEQ ID NO: 5543330 - DNA, 25 bp, Homo sapien
gggtggagagtctattgtaaagata

SEQ ID NO: 5543331 - DNA, 25 bp, Homo sapien
tccagcagggatactatggtagtgg

SEQ ID NO: 5543332 - DNA, 25 bp, Homo sapien
tctatcaggtaaatggttcagaacc

SEQ ID NO: 5543333 - DNA, 25 bp, Homo sapien
taaaaagggttatggcattagctcc

SEQ ID NO: 5543334 - DNA, 25 bp, Homo sapien
tactaaggcattcataaaaagctcc

SEQ ID NO: 5543335 - DNA, 25 bp, Homo sapien
atcaccttgccaatgggtggagagt

SEQ ID NO: 5543336 - DNA, 25 bp, Homo sapien
atgctttgaagcaggctagactgga

SEQ ID NO: 5543337 - DNA, 25 bp, Homo sapien
tgccaagagccagatgaatagttca

SEQ ID NO: 5543338 - DNA, 25 bp, Homo sapien
agcactagagattgtcctatgtgac

SEQ ID NO: 5543339 - DNA, 25 bp, Homo sapien
ggagctggactttagtggataggtc

SEQ ID NO: 5543340 - DNA, 25 bp, Homo sapien
tacaccaagcaatttacaagatagt

SEQ ID NO: 5543341 - DNA, 25 bp, Homo sapien
gtggataggtcggattctgaaaaat

SEQ ID NO: 5543342 - DNA, 25 bp, Homo sapien
aaatgggagcaattagaaaacttcc

SEQ ID NO: 5543343 - DNA, 25 bp, Homo sapien
acaagatagttgagcagatctaagg

SEQ ID NO: 5543344 - DNA, 25 bp, Homo sapien
aaagataatcaacatgccaagagcc

SEQ ID NO: 5543345 - DNA, 25 bp, Homo sapien
agcacattttaggaagagcaacagc

SEQ ID NO: 5543346 - DNA, 25 bp, Homo sapien
cttacggcctatcaagtgttgtttc

SEQ ID NO: 5543347 - DNA, 25 bp, Homo sapien
accccacagtgggagtttgagaaaa

SEQ ID NO: 5543348 - DNA, 25 bp, Homo sapien
acagagaaatcacaccagaaataaa

SEQ ID NO: 5543349 - DNA, 25 bp, Homo sapien
tatataaataaggacacaacccaac

SEQ ID NO: 5543350 - DNA, 25 bp, Homo sapien
aggacacaacccaacaaaatggaaa

SEQ ID NO: 5543351 - DNA, 25 bp, Homo sapien
aaggtaagacagagaaatcacacca

SEQ ID NO: 5543352 - DNA, 25 bp, Homo sapien
tcatttagaaggtaagacagagaaa

SEQ ID NO: 5543353 - DNA, 25 bp, Homo sapien
aataatacatagagcaatttggtta

SEQ ID NO: 5543354 - DNA, 25 bp, Homo sapien
tatctaggaaactatagaatctgac

SEQ ID NO: 5543355 - DNA, 25 bp, Homo sapien
gtgtccctctgtgtaggtgaaattc

SEQ ID NO: 5543356 - DNA, 25 bp, Homo sapien
agtacatgagcatagagattctaca

SEQ ID NO: 5543357 - DNA, 25 bp, Homo sapien
gaaaagaagccagttctgaagtatt

SEQ ID NO: 5543358 - DNA, 25 bp, Homo sapien
ctacactgtgggtttagtcctcaaa

SEQ ID NO: 5543359 - DNA, 25 bp, Homo sapien
gtggaagaatattcagtgacatgga

SEQ ID NO: 5543360 - DNA, 25 bp, Homo sapien
cattaaaatcgtgttgtggaagaat

SEQ ID NO: 5543361 - DNA, 25 bp, Homo sapien
acactgtaaactgggtcttggctgt

SEQ ID NO: 5543362 - DNA, 25 bp, Homo sapien
gctgattgaagaacagaacttgggc

SEQ ID NO: 5543363 - DNA, 25 bp, Homo sapien
ggtggtttgatgctaatgaactctc

SEQ ID NO: 5543364 - DNA, 25 bp, Homo sapien
atcgagatacatagggataatgggt

SEQ ID NO: 5543365 - DNA, 25 bp, Homo sapien
ctgttaggtactagacactgtaaac

SEQ ID NO: 5543366 - DNA, 25 bp, Homo sapien
atctctccagcatgtgtgtaaagac

SEQ ID NO: 5543367 - DNA, 25 bp, Homo sapien
gaacttgggccacacttctagatgc

SEQ ID NO: 5543368 - DNA, 25 bp, Homo sapien
agtgaaacgtgtcaagagtctgtta

SEQ ID NO: 5543369 - DNA, 25 bp, Homo sapien
attgaaaccttggcctcttgggttc

SEQ ID NO: 5543370 - DNA, 25 bp, Homo sapien
ggcaacagagggtcacatcttacca

SEQ ID NO: 5543371 - DNA, 25 bp, Homo sapien
ttaccaacgcctccaaagcaccatg

SEQ ID NO: 5543372 - DNA, 25 bp, Homo sapien
aagcaccatggtgccacctcccata

SEQ ID NO: 5543373 - DNA, 25 bp, Homo sapien
tcaatcccttcaacaagcccctgcc

SEQ ID NO: 5543374 - DNA, 25 bp, Homo sapien
tcaacaagcccctgccatctactcc

SEQ ID NO: 5543375 - DNA, 25 bp, Homo sapien
cccaccactggtttatgggcatagg

SEQ ID NO: 5543376 - DNA, 25 bp, Homo sapien
tgggtgcaacaaatcatgactcatt

SEQ ID NO: 5543377 - DNA, 25 bp, Homo sapien
caacttgatgggatatgaaatattt

SEQ ID NO: 5543378 - DNA, 25 bp, Homo sapien
ttacaccgaagattcatcctcaacc

SEQ ID NO: 5543379 - DNA, 25 bp, Homo sapien
aagccagtcaggtgtagtgcttctc

SEQ ID NO: 5543380 - DNA, 25 bp, Homo sapien
cacccggctctggtctgggtctgaa

SEQ ID NO: 5543381 - DNA, 25 bp, Homo sapien
acaatttccctagcagaacagcctg

SEQ ID NO: 5543382 - DNA, 25 bp, Homo sapien
ttactagctgggttatcctggaggg

SEQ ID NO: 5543383 - DNA, 25 bp, Homo sapien
tttaaacctagcacacagaaaggca

SEQ ID NO: 5543384 - DNA, 25 bp, Homo sapien
gttcatctataaactgcaaggctgt

SEQ ID NO: 5543385 - DNA, 25 bp, Homo sapien
atgtagcaacattaacttcaggtca

SEQ ID NO: 5543386 - DNA, 25 bp, Homo sapien
tcccgttacggtataagcagcagca

SEQ ID NO: 5543387 - DNA, 25 bp, Homo sapien
cattctatctgctaccctggtgcct

SEQ ID NO: 5543388 - DNA, 25 bp, Homo sapien
atcctggagggtatagtaacacctc

SEQ ID NO: 5543389 - DNA, 25 bp, Homo sapien
tggacaaaacacccggctctggtct

SEQ ID NO: 5543390 - DNA, 25 bp, Homo sapien
gctgtattgagcataatgtagcaac

SEQ ID NO: 5543391 - DNA, 25 bp, Homo sapien
tcacaattaaataagcaaaaccttc

SEQ ID NO: 5543392 - DNA, 25 bp, Homo sapien
tggttgacacatttaaaaattgtaa

SEQ ID NO: 5543393 - DNA, 25 bp, Homo sapien
aacaaagaaaaatgagctcacaatt

SEQ ID NO: 5543394 - DNA, 25 bp, Homo sapien
aaaaaaatttgccgggcacagtggc

SEQ ID NO: 5543395 - DNA, 25 bp, Homo sapien
ggctgacacattttaaaagattaat

SEQ ID NO: 5543396 - DNA, 25 bp, Homo sapien
gtaacaaagaaaaatgagctcacaa

SEQ ID NO: 5543397 - DNA, 25 bp, Homo sapien
aagtaacaaagaaaaatgagctcac

SEQ ID NO: 5543398 - DNA, 25 bp, Homo sapien
aaaagtaacaaagaaaaatgagctc

SEQ ID NO: 5543399 - DNA, 25 bp, Homo sapien
ataagcaaaaccttctgtaaaggta

SEQ ID NO: 5543400 - DNA, 25 bp, Homo sapien
aagaaaaatgagctcacaattaaat

SEQ ID NO: 5543401 - DNA, 25 bp, Homo sapien
acaaaagtaacaaagaaaaatgagc

SEQ ID NO: 5543402 - DNA, 25 bp, Homo sapien
agactgggcatactagtgaaaaccc

SEQ ID NO: 5543403 - DNA, 25 bp, Homo sapien
tttaggtgacactagacatcatctt

SEQ ID NO: 5543404 - DNA, 25 bp, Homo sapien
attctagaacccaggatctacctga

SEQ ID NO: 5543405 - DNA, 25 bp, Homo sapien
tctgtgaatatctgtggaatgatac

SEQ ID NO: 5543406 - DNA, 25 bp, Homo sapien
aaaaaaacagcaacgtacatgtcac

SEQ ID NO: 5543407 - DNA, 25 bp, Homo sapien
aatgttgagctactcaggaacctga

SEQ ID NO: 5543408 - DNA, 25 bp, Homo sapien
ttgcatcccttagccacaggcataa

SEQ ID NO: 5543409 - DNA, 25 bp, Homo sapien
tccacaagtgtagactgacaacata

SEQ ID NO: 5543410 - DNA, 25 bp, Homo sapien
tatgtggatcttgaataaagctgaa

SEQ ID NO: 5543411 - DNA, 25 bp, Homo sapien
gcataaggcagaacacagatatttc

SEQ ID NO: 5543412 - DNA, 25 bp, Homo sapien
cccaggacttggagtccagactggg

SEQ ID NO: 5543413 - DNA, 25 bp, Homo sapien
tcccacagggggtgtccgaccccag

SEQ ID NO: 5543414 - DNA, 25 bp, Homo sapien
ctggggtcggacaccccctgtggga

SEQ ID NO: 5543415 - DNA, 25 bp, Homo sapien
aaagcctgtaacgtttgaaagccta

SEQ ID NO: 5543416 - DNA, 25 bp, Homo sapien
ctgaagcttcaggacttggagaaag

SEQ ID NO: 5543417 - DNA, 25 bp, Homo sapien
tctggccttgggattccaggagttg

SEQ ID NO: 5543418 - DNA, 25 bp, Homo sapien
cacacacacgaaaagcctgtaacgt

SEQ ID NO: 5543419 - DNA, 25 bp, Homo sapien
aaatatttaatagagggacacccac

SEQ ID NO: 5543420 - DNA, 25 bp, Homo sapien
tctctcctggacctaagacaccctc

SEQ ID NO: 5543421 - DNA, 25 bp, Homo sapien
tgaaagcctaaaatgtaggagttcc

SEQ ID NO: 5543422 - DNA, 25 bp, Homo sapien
gagttgcaaagtggctgtctgagtt

SEQ ID NO: 5543423 - DNA, 25 bp, Homo sapien
ttggcctctgactgagagttatacc

SEQ ID NO: 5543424 - DNA, 25 bp, Homo sapien
agggacacccaccctcaatgcgggt

SEQ ID NO: 5543425 - DNA, 25 bp, Homo sapien
ttagcaacaagaattcagtgcctat

SEQ ID NO: 5543426 - DNA, 25 bp, Homo sapien
gaagtgacgtcaaagaattcgtagg

SEQ ID NO: 5543427 - DNA, 25 bp, Homo sapien
cctacgaattctttgacgtcacttc

SEQ ID NO: 5543428 - DNA, 25 bp, Homo sapien
tttccatcctaccagcagcagtgtg

SEQ ID NO: 5543429 - DNA, 25 bp, Homo sapien
agcccagaaccatcttcccctgttg

SEQ ID NO: 5543430 - DNA, 25 bp, Homo sapien
tggtcagtctccagctaacctctca

SEQ ID NO: 5543431 - DNA, 25 bp, Homo sapien
agtgtgtaagatgggctatttgttc

SEQ ID NO: 5543432 - DNA, 25 bp, Homo sapien
tctctcctccaccgggactgctggt

SEQ ID NO: 5543433 - DNA, 25 bp, Homo sapien
ggaatgactgctccactccacactc

SEQ ID NO: 5543434 - DNA, 25 bp, Homo sapien
ggccataccttccctgcagatctcc

SEQ ID NO: 5543435 - DNA, 25 bp, Homo sapien
cctaccagcagcagtgtgtaagatg

SEQ ID NO: 5543436 - DNA, 25 bp, Homo sapien
atccaccccagaattgctctctttc

SEQ ID NO: 5543437 - DNA, 25 bp, Homo sapien
agccttcaggactgatctgccattt

SEQ ID NO: 5543438 - DNA, 25 bp, Homo sapien
ctcttagctctgttgcccactttcc

SEQ ID NO: 5543439 - DNA, 25 bp, Homo sapien
tacagaatggtgaagcatatgatat

SEQ ID NO: 5543440 - DNA, 25 bp, Homo sapien
gaaggagaacaatcagccctgtgag

SEQ ID NO: 5543441 - DNA, 25 bp, Homo sapien
agcaacaatgcagaggccctttaca

SEQ ID NO: 5543442 - DNA, 25 bp, Homo sapien
tgactctgaaaaatgaaggagtggg

SEQ ID NO: 5543443 - DNA, 25 bp, Homo sapien
aaccagagactcagacaaagaaaat

SEQ ID NO: 5543444 - DNA, 25 bp, Homo sapien
ctctgagtgctccagctagaaggaa

SEQ ID NO: 5543445 - DNA, 25 bp, Homo sapien
tgaacatcctgcagggtggattctc

SEQ ID NO: 5543446 - DNA, 25 bp, Homo sapien
gcaggggaccttatgccagcctgtt

SEQ ID NO: 5543447 - DNA, 25 bp, Homo sapien
tgggtgagcctctgattcctttgac

SEQ ID NO: 5543448 - DNA, 25 bp, Homo sapien
gtgccattcatagacaaaggagtgt

SEQ ID NO: 5543449 - DNA, 25 bp, Homo sapien
atgccagcctgttgctgacggagaa

SEQ ID NO: 5543450 - DNA, 25 bp, Homo sapien
tgtaaacatgaagtaaacacacatc

SEQ ID NO: 5543451 - DNA, 25 bp, Homo sapien
gtggcacaaagcggaatttttacaa

SEQ ID NO: 5543452 - DNA, 25 bp, Homo sapien
attgtaagttatggttttggctgat

SEQ ID NO: 5543453 - DNA, 25 bp, Homo sapien
tcttgggcaatagcaattggaaaaa

SEQ ID NO: 5543454 - DNA, 25 bp, Homo sapien
gcaacatacaatacaaatagtccct

SEQ ID NO: 5543455 - DNA, 25 bp, Homo sapien
acaatcatgacctgtggcacaaagc

SEQ ID NO: 5543456 - DNA, 25 bp, Homo sapien
tgttccacagaaacctaagaatggt

SEQ ID NO: 5543457 - DNA, 25 bp, Homo sapien
cctaagaatggtaaagcatatccaa

SEQ ID NO: 5543458 - DNA, 25 bp, Homo sapien
attcaaggtttggaagaagtgtctt

SEQ ID NO: 5543459 - DNA, 25 bp, Homo sapien
tggaaagcaattcttgggcaatagc

SEQ ID NO: 5543460 - DNA, 25 bp, Homo sapien
acaatatgtgcatggaaagcaattc

SEQ ID NO: 5543461 - DNA, 25 bp, Homo sapien
cttaagtggcacttgaatggctcac

SEQ ID NO: 5543462 - DNA, 25 bp, Homo sapien
cacacaattgtggctcctggagtcc

SEQ ID NO: 5543463 - DNA, 25 bp, Homo sapien
cagcattcatcttggtgggggactg

SEQ ID NO: 5543464 - DNA, 25 bp, Homo sapien
agctctagagtgcctgtggtaataa

SEQ ID NO: 5543465 - DNA, 25 bp, Homo sapien
agggtaaacggagctcgcattttac

SEQ ID NO: 5543466 - DNA, 25 bp, Homo sapien
agactagcctactgagcacaacata

SEQ ID NO: 5543467 - DNA, 25 bp, Homo sapien
ttgcaaggcatgaagcttgaccaaa

SEQ ID NO: 5543468 - DNA, 25 bp, Homo sapien
cacccaacagaagcctagtgcctac

SEQ ID NO: 5543469 - DNA, 25 bp, Homo sapien
caccagagctggtgacactttcacc

SEQ ID NO: 5543470 - DNA, 25 bp, Homo sapien
caactagcgaaattcaaggactggg

SEQ ID NO: 5543471 - DNA, 25 bp, Homo sapien
ttaccgtgggtaaatataaatgcac

SEQ ID NO: 5543472 - DNA, 25 bp, Homo sapien
gcccggagccggtcggcctgaacca

SEQ ID NO: 5543473 - DNA, 25 bp, Homo sapien
tggttcaggccgaccggctccgggc

SEQ ID NO: 5543474 - DNA, 25 bp, Homo sapien
atatgggatttacaaaaagagtgat

SEQ ID NO: 5543475 - DNA, 25 bp, Homo sapien
ataaaggaatggttttcaagtgccc

SEQ ID NO: 5543476 - DNA, 25 bp, Homo sapien
ggtgggttgtgctaaaagtccatct

SEQ ID NO: 5543477 - DNA, 25 bp, Homo sapien
aaaagagtgatgattgcctagttat

SEQ ID NO: 5543478 - DNA, 25 bp, Homo sapien
cgaagatatatcttagcggtgtgcc

SEQ ID NO: 5543479 - DNA, 25 bp, Homo sapien
agcgtcagtaagagttaagcaagtt

SEQ ID NO: 5543480 - DNA, 25 bp, Homo sapien
ggggcttgctgtagaagtcctaaca

SEQ ID NO: 5543481 - DNA, 25 bp, Homo sapien
tgtaagacacttatgcatggcatgg

SEQ ID NO: 5543482 - DNA, 25 bp, Homo sapien
agctttgcacaggctggctcttcgc

SEQ ID NO: 5543483 - DNA, 25 bp, Homo sapien
ccttggtggtataaatgattctgca

SEQ ID NO: 5543484 - DNA, 25 bp, Homo sapien
gcggtgtgccttacgtagccttggt

SEQ ID NO: 5543485 - DNA, 25 bp, Homo sapien
tgcagctctggtaaaagctccatac

SEQ ID NO: 5543486 - DNA, 25 bp, Homo sapien
attccccaacgaaacaggggcacag

SEQ ID NO: 5543487 - DNA, 25 bp, Homo sapien
ccagctccatggtacccttgaaaac

SEQ ID NO: 5543488 - DNA, 25 bp, Homo sapien
gtcttacgtatacatggggtgctgg

SEQ ID NO: 5543489 - DNA, 25 bp, Homo sapien
gtgctggcacaggtgcctccagata

SEQ ID NO: 5543490 - DNA, 25 bp, Homo sapien
gtagttcctaagtctgggcgcttgc

SEQ ID NO: 5543491 - DNA, 25 bp, Homo sapien
agaacagcaaagtctgtggtgtttt

SEQ ID NO: 5543492 - DNA, 25 bp, Homo sapien
gggcacaggctgcgtttgcagctct

SEQ ID NO: 5543493 - DNA, 25 bp, Homo sapien
agctccatacccagagcagtgtctc

SEQ ID NO: 5543494 - DNA, 25 bp, Homo sapien
tgggcgcttgcaaagagcttgcaat

SEQ ID NO: 5543495 - DNA, 25 bp, Homo sapien
cagctccctggtgaagtcttacgta

SEQ ID NO: 5543496 - DNA, 25 bp, Homo sapien
ttagccaagaggagtaatttttgaa

SEQ ID NO: 5543497 - DNA, 25 bp, Homo sapien
gtttataagacgacttgccaagtat

SEQ ID NO: 5543498 - DNA, 25 bp, Homo sapien
accattataaaatctcagaagggag

SEQ ID NO: 5543499 - DNA, 25 bp, Homo sapien
attggtggtttataagacgacttgc

SEQ ID NO: 5543500 - DNA, 25 bp, Homo sapien
ttaagaggctattattggtggttta

SEQ ID NO: 5543501 - DNA, 25 bp, Homo sapien
atttttaagaggctattattggtgg

SEQ ID NO: 5543502 - DNA, 25 bp, Homo sapien
cttgccaagtatatttgggataacc

SEQ ID NO: 5543503 - DNA, 25 bp, Homo sapien
tgttagccaagaggagtaatttttg

SEQ ID NO: 5543504 - DNA, 25 bp, Homo sapien
agccaaggaaatgcactcctccatg

SEQ ID NO: 5543505 - DNA, 25 bp, Homo sapien
atttgggataaccataagaaatacc

SEQ ID NO: 5543506 - DNA, 25 bp, Homo sapien
aatagccaaggaaatgcactcctcc

SEQ ID NO: 5543507 - DNA, 25 bp, Homo sapien
ggtcgacgaaagaagccatacccac

SEQ ID NO: 5543508 - DNA, 25 bp, Homo sapien
gtgggtatggcttctttcgtcgacc

SEQ ID NO: 5543509 - DNA, 25 bp, Homo sapien
attacctgaaaaaagttgaatacta

SEQ ID NO: 5543510 - DNA, 25 bp, Homo sapien
gaagcagaatcattactaacaattt

SEQ ID NO: 5543511 - DNA, 25 bp, Homo sapien
ttcaaagatacagctgtttagtaaa

SEQ ID NO: 5543512 - DNA, 25 bp, Homo sapien
agtttagtgaaacaaacatagcatc

SEQ ID NO: 5543513 - DNA, 25 bp, Homo sapien
ctagtccccagagtgatggtattag

SEQ ID NO: 5543514 - DNA, 25 bp, Homo sapien
tttttccagcatctatggcagttca

SEQ ID NO: 5543515 - DNA, 25 bp, Homo sapien
ggagggtgattcagtcatgagaatt

SEQ ID NO: 5543516 - DNA, 25 bp, Homo sapien
tgaccatagttattgaagcagaatc

SEQ ID NO: 5543517 - DNA, 25 bp, Homo sapien
atgctgacacctagtccccagagtg

SEQ ID NO: 5543518 - DNA, 25 bp, Homo sapien
tccaaaattcacatgctgacaccta

SEQ ID NO: 5543519 - DNA, 25 bp, Homo sapien
aaattacagggttcactaaaaatga

SEQ ID NO: 5543520 - DNA, 25 bp, Homo sapien
taatgtgctgtgaatgtccaggatg

SEQ ID NO: 5543521 - DNA, 25 bp, Homo sapien
tctgcgttgaataaatttgggaaat

SEQ ID NO: 5543522 - DNA, 25 bp, Homo sapien
tagaatactactttcaagggatgta

SEQ ID NO: 5543523 - DNA, 25 bp, Homo sapien
tgtagaaaagagctctgcgttgaat

SEQ ID NO: 5543524 - DNA, 25 bp, Homo sapien
aagttagatgcaaaaaggtttctcc

SEQ ID NO: 5543525 - DNA, 25 bp, Homo sapien
tgaggcaccgcgccctagaatacta

SEQ ID NO: 5543526 - DNA, 25 bp, Homo sapien
ccatggctcatgaacagtcttataa

SEQ ID NO: 5543527 - DNA, 25 bp, Homo sapien
ttcgccccttgccctctctcctttc

SEQ ID NO: 5543528 - DNA, 25 bp, Homo sapien
tccatttcctcccttcgccccttgc

SEQ ID NO: 5543529 - DNA, 25 bp, Homo sapien
actttcaagggatgtagaaaagagc

SEQ ID NO: 5543530 - DNA, 25 bp, Homo sapien
atgtgctgtgaatgtccaggatggg

SEQ ID NO: 5543531 - DNA, 25 bp, Homo sapien
ctatacaggacctcagatagagatc

SEQ ID NO: 5543532 - DNA, 25 bp, Homo sapien
cagccaatgaaacctttaagaatga

SEQ ID NO: 5543533 - DNA, 25 bp, Homo sapien
atgttgctgacaaagtaccaggagc

SEQ ID NO: 5543534 - DNA, 25 bp, Homo sapien
ctaacccccatctctaaatgatccc

SEQ ID NO: 5543535 - DNA, 25 bp, Homo sapien
aggacctcagatagagatcatggtt

SEQ ID NO: 5543536 - DNA, 25 bp, Homo sapien
ttcctctctccagtgagtatgcaaa

SEQ ID NO: 5543537 - DNA, 25 bp, Homo sapien
gatcatggttgataaggaatcagat

SEQ ID NO: 5543538 - DNA, 25 bp, Homo sapien
tgataaggaatcagataaactctct

SEQ ID NO: 5543539 - DNA, 25 bp, Homo sapien
tttaagaatgaaagcagtatgttgc

SEQ ID NO: 5543540 - DNA, 25 bp, Homo sapien
aaatgatcccactatacaggacctc

SEQ ID NO: 5543541 - DNA, 25 bp, Homo sapien
ctgtgtgcagatgttatcttaggac

SEQ ID NO: 5543542 - DNA, 25 bp, Homo sapien
gtagacaacctgctagaagtgtttg

SEQ ID NO: 5543543 - DNA, 25 bp, Homo sapien
ttgtgagcacattccctcggccttc

SEQ ID NO: 5543544 - DNA, 25 bp, Homo sapien
tgaataggttttgagttggatggag

SEQ ID NO: 5543545 - DNA, 25 bp, Homo sapien
atagggagttgtgagcacattccct

SEQ ID NO: 5543546 - DNA, 25 bp, Homo sapien
atggagtagacaacctgctagaagt

SEQ ID NO: 5543547 - DNA, 25 bp, Homo sapien
cttgaccagtgtctttggcattttc

SEQ ID NO: 5543548 - DNA, 25 bp, Homo sapien
tcctctgagttttggtctcccctgc

SEQ ID NO: 5543549 - DNA, 25 bp, Homo sapien
gaagtgtttgaatgcctcctctgag

SEQ ID NO: 5543550 - DNA, 25 bp, Homo sapien
cctgcagcaccgcccatctcttgga

SEQ ID NO: 5543551 - DNA, 25 bp, Homo sapien
ggagctgagagtaaacttgaccagt

SEQ ID NO: 5543552 - DNA, 25 bp, Homo sapien
cattcctaataagaggccccctcac

SEQ ID NO: 5543553 - DNA, 25 bp, Homo sapien
ccactaatacctgaaatatggagta

SEQ ID NO: 5543554 - DNA, 25 bp, Homo sapien
ctgggaaatcatcctatgaatctgc

SEQ ID NO: 5543555 - DNA, 25 bp, Homo sapien
ataaagaaatgtcacacgtacacac

SEQ ID NO: 5543556 - DNA, 25 bp, Homo sapien
tgagatatgcaaaccagacagactt

SEQ ID NO: 5543557 - DNA, 25 bp, Homo sapien
atgaatctgctctgaccaatatggt

SEQ ID NO: 5543558 - DNA, 25 bp, Homo sapien
aagcacatttagaccaacatgggta

SEQ ID NO: 5543559 - DNA, 25 bp, Homo sapien
aaaggtcatatcaaagcaggtaaaa

SEQ ID NO: 5543560 - DNA, 25 bp, Homo sapien
gaccaacatgggtatgtaaatttac

SEQ ID NO: 5543561 - DNA, 25 bp, Homo sapien
atatggagtaaccaagtaacaaatt

SEQ ID NO: 5543562 - DNA, 25 bp, Homo sapien
cacacagaaaggtcatatcaaagca

SEQ ID NO: 5543563 - DNA, 25 bp, Homo sapien
ttagcgtggctactagatcttaaat

SEQ ID NO: 5543564 - DNA, 25 bp, Homo sapien
gatggtcccttcaggcgtgtgaatc

SEQ ID NO: 5543565 - DNA, 25 bp, Homo sapien
atggcttggatgtggctttgtctga

SEQ ID NO: 5543566 - DNA, 25 bp, Homo sapien
ctagaatgccagcccaggacatcta

SEQ ID NO: 5543567 - DNA, 25 bp, Homo sapien
actgagagaccaagggatccttttt

SEQ ID NO: 5543568 - DNA, 25 bp, Homo sapien
gtctgaggctgatttccaacgtggc

SEQ ID NO: 5543569 - DNA, 25 bp, Homo sapien
ccatagaaagaatctgagcttgctc

SEQ ID NO: 5543570 - DNA, 25 bp, Homo sapien
aggatgattgccaaagaaaatggtc

SEQ ID NO: 5543571 - DNA, 25 bp, Homo sapien
gactggcatgtcagaagctagaatg

SEQ ID NO: 5543572 - DNA, 25 bp, Homo sapien
tgaagtcaggaggataaatcttacc

SEQ ID NO: 5543573 - DNA, 25 bp, Homo sapien
gtgtgaatctatgggtttgactggc

SEQ ID NO: 5543574 - DNA, 25 bp, Homo sapien
tccaccaccatagggaacccaaggc

SEQ ID NO: 5543575 - DNA, 25 bp, Homo sapien
caaaattggaacactaggcaaaacc

SEQ ID NO: 5543576 - DNA, 25 bp, Homo sapien
caatgttacgcttctgaggtcttcc

SEQ ID NO: 5543577 - DNA, 25 bp, Homo sapien
ttcttatctcaggaggtggtgacac

SEQ ID NO: 5543578 - DNA, 25 bp, Homo sapien
cggaacacttcacatgtaaggcaac

SEQ ID NO: 5543579 - DNA, 25 bp, Homo sapien
acacgtcgacgaaactccagaaaat

SEQ ID NO: 5543580 - DNA, 25 bp, Homo sapien
ctggaggatgaccatgggtctccag

SEQ ID NO: 5543581 - DNA, 25 bp, Homo sapien
aatggcataccacacgtcgacgaaa

SEQ ID NO: 5543582 - DNA, 25 bp, Homo sapien
caattcgaaacagaacaaaagaggg

SEQ ID NO: 5543583 - DNA, 25 bp, Homo sapien
caaaagagggcttgaataccatttc

SEQ ID NO: 5543584 - DNA, 25 bp, Homo sapien
cttatgacattcagcgcatcgcgtt

SEQ ID NO: 5543585 - DNA, 25 bp, Homo sapien
catgggtctccagataatggcatac

SEQ ID NO: 5543586 - DNA, 25 bp, Homo sapien
gctccactcaggagcagacgtgcat

SEQ ID NO: 5543587 - DNA, 25 bp, Homo sapien
caggaaacttgtacacggaaacacc

SEQ ID NO: 5543588 - DNA, 25 bp, Homo sapien
agatgtctcatcctggaacacaagc

SEQ ID NO: 5543589 - DNA, 25 bp, Homo sapien
aagtacacggtttcacatgggcaca

SEQ ID NO: 5543590 - DNA, 25 bp, Homo sapien
cagacacacactcaagtacacggtt

SEQ ID NO: 5543591 - DNA, 25 bp, Homo sapien
tccctcacaggaaacttgtacacgg

SEQ ID NO: 5543592 - DNA, 25 bp, Homo sapien
gtagacagacacataaccgcctgca

SEQ ID NO: 5543593 - DNA, 25 bp, Homo sapien
aaaataacatgaaaactctccagtt

SEQ ID NO: 5543594 - DNA, 25 bp, Homo sapien
ctatgccctcacgcagggcagacac

SEQ ID NO: 5543595 - DNA, 25 bp, Homo sapien
ctggaacacaagctccactcaggag

SEQ ID NO: 5543596 - DNA, 25 bp, Homo sapien
cacgctcacctccagatgtctcatc

SEQ ID NO: 5543597 - DNA, 25 bp, Homo sapien
acacaacccagcctgtcagtaagtc

SEQ ID NO: 5543598 - DNA, 25 bp, Homo sapien
ctcctatcttagtggccgaaggtgg

SEQ ID NO: 5543599 - DNA, 25 bp, Homo sapien
ctgggatccagtcatgtgctccacc

SEQ ID NO: 5543600 - DNA, 25 bp, Homo sapien
gcactttgggtctgagattaggagc

SEQ ID NO: 5543601 - DNA, 25 bp, Homo sapien
gatgcccaagtctgatgagacacac

SEQ ID NO: 5543602 - DNA, 25 bp, Homo sapien
tctagactcaaaggctctgtgcagg

SEQ ID NO: 5543603 - DNA, 25 bp, Homo sapien
tggccatgtctgaaccccgctccta

SEQ ID NO: 5543604 - DNA, 25 bp, Homo sapien
tctccccagccacttgcctagcacc

SEQ ID NO: 5543605 - DNA, 25 bp, Homo sapien
gcccccaggctgctacccttggttc

SEQ ID NO: 5543606 - DNA, 25 bp, Homo sapien
cctaaccagaatagatgaggcagca

SEQ ID NO: 5543607 - DNA, 25 bp, Homo sapien
aggcggagactgagtcattaaacgt

SEQ ID NO: 5543608 - DNA, 25 bp, Homo sapien
cagaaagtacatccagacaaactac

SEQ ID NO: 5543609 - DNA, 25 bp, Homo sapien
tgcattagtaaaagcaggtaaggag

SEQ ID NO: 5543610 - DNA, 25 bp, Homo sapien
gtatatcacaccatgagaacaccat

SEQ ID NO: 5543611 - DNA, 25 bp, Homo sapien
taataatcccacccatgagccaacc

SEQ ID NO: 5543612 - DNA, 25 bp, Homo sapien
agtgtaacatgaatgaagtagagta

SEQ ID NO: 5543613 - DNA, 25 bp, Homo sapien
tactataaggaacactaataatccc

SEQ ID NO: 5543614 - DNA, 25 bp, Homo sapien
aaatgagaaacatcacaagccaaac

SEQ ID NO: 5543615 - DNA, 25 bp, Homo sapien
attgttggatgttttcttggggata

SEQ ID NO: 5543616 - DNA, 25 bp, Homo sapien
tctaaaatggagtctggtcataata

SEQ ID NO: 5543617 - DNA, 25 bp, Homo sapien
tcttggggataaatgcattagtaaa

SEQ ID NO: 5543618 - DNA, 25 bp, Homo sapien
ttaaggcccttttcgatgcagattt

SEQ ID NO: 5543619 - DNA, 25 bp, Homo sapien
gttttgaacagacttgagtaccttc

SEQ ID NO: 5543620 - DNA, 25 bp, Homo sapien
attgaccatagtgtattggcgtaat

SEQ ID NO: 5543621 - DNA, 25 bp, Homo sapien
cactggaattttaatggggattgta

SEQ ID NO: 5543622 - DNA, 25 bp, Homo sapien
tggcgtaatttgtttctggactttc

SEQ ID NO: 5543623 - DNA, 25 bp, Homo sapien
gactaattttgggagtaatgccatc

SEQ ID NO: 5543624 - DNA, 25 bp, Homo sapien
agtttctgtaaaagggtcactggaa

SEQ ID NO: 5543625 - DNA, 25 bp, Homo sapien
attctagggtcagcttttcagtttc

SEQ ID NO: 5543626 - DNA, 25 bp, Homo sapien
gagtaccttcagtaacttgcaatcc

SEQ ID NO: 5543627 - DNA, 25 bp, Homo sapien
atatggtatgaagtacaggtacaaa

SEQ ID NO: 5543628 - DNA, 25 bp, Homo sapien
tataccagcacaacactgttttgat

SEQ ID NO: 5543629 - DNA, 25 bp, Homo sapien
agcactattagttgaagacactgtt

SEQ ID NO: 5543630 - DNA, 25 bp, Homo sapien
aaggaatatatatgtgtacttcacc

SEQ ID NO: 5543631 - DNA, 25 bp, Homo sapien
ggtgaagtacacatatatattcctt

SEQ ID NO: 5543632 - DNA, 25 bp, Homo sapien
ccactggacgccttggtgtgggacc

SEQ ID NO: 5543633 - DNA, 25 bp, Homo sapien
ggtcccacaccaaggcgtccagtgg

SEQ ID NO: 5543634 - DNA, 25 bp, Homo sapien
ggaggctctcaaggacttctgatgc

SEQ ID NO: 5543635 - DNA, 25 bp, Homo sapien
gccctctcagcactcatagcattcc

SEQ ID NO: 5543636 - DNA, 25 bp, Homo sapien
ccttaacacatcactcaagagtcta

SEQ ID NO: 5543637 - DNA, 25 bp, Homo sapien
tgtctagtagagtgcctgggacata

SEQ ID NO: 5543638 - DNA, 25 bp, Homo sapien
aattgctctatacgtggcagatgtt

SEQ ID NO: 5543639 - DNA, 25 bp, Homo sapien
ctaaactgtatgaagtgtctagtag

SEQ ID NO: 5543640 - DNA, 25 bp, Homo sapien
ctaagtggatcaacccaaggtatgt

SEQ ID NO: 5543641 - DNA, 25 bp, Homo sapien
attatctgaggttcctaagtggatc

SEQ ID NO: 5543642 - DNA, 25 bp, Homo sapien
ttctcagttcataatagcccccatc

SEQ ID NO: 5543643 - DNA, 25 bp, Homo sapien
aagagtctacatgatttggccccaa

SEQ ID NO: 5543644 - DNA, 25 bp, Homo sapien
cctgctcctgccttgatctacaccc

SEQ ID NO: 5543645 - DNA, 25 bp, Homo sapien
gttcacctgggtcttattgaagaaa

SEQ ID NO: 5543646 - DNA, 25 bp, Homo sapien
tttcttcaataagacccaggtgaac

SEQ ID NO: 5543647 - DNA, 25 bp, Homo sapien
gcacccagccgcctttagatatttc

SEQ ID NO: 5543648 - DNA, 25 bp, Homo sapien
agttaccataggacccagcaatttc

SEQ ID NO: 5543649 - DNA, 25 bp, Homo sapien
aactcaaattccttagctgcctgcc

SEQ ID NO: 5543650 - DNA, 25 bp, Homo sapien
tgctctcctcgttcaccaaaataaa

SEQ ID NO: 5543651 - DNA, 25 bp, Homo sapien
tggcagttcctcaaaaaggtaaatg

SEQ ID NO: 5543652 - DNA, 25 bp, Homo sapien
ctatgaaaaacagtttggcagttcc

SEQ ID NO: 5543653 - DNA, 25 bp, Homo sapien
tagatatttctaaaatggtgcagcc

SEQ ID NO: 5543654 - DNA, 25 bp, Homo sapien
aggtagtaggtttctctatgaaatc

SEQ ID NO: 5543655 - DNA, 25 bp, Homo sapien
agctgcctgccatacccagtcccct

SEQ ID NO: 5543656 - DNA, 25 bp, Homo sapien
agcaatttcactcctaggtagtagg

SEQ ID NO: 5543657 - DNA, 25 bp, Homo sapien
gagccactgcacccagccgccttta

SEQ ID NO: 5543658 - DNA, 25 bp, Homo sapien
gaaaggcacaaatccaagcgtccta

SEQ ID NO: 5543659 - DNA, 25 bp, Homo sapien
tacccagagcattgacataggagtc

SEQ ID NO: 5543660 - DNA, 25 bp, Homo sapien
tggaaagactgccattgaccttacc

SEQ ID NO: 5543661 - DNA, 25 bp, Homo sapien
gctccaccagaggcagtcacttttc

SEQ ID NO: 5543662 - DNA, 25 bp, Homo sapien
acttctgtggagaatcactggattt

SEQ ID NO: 5543663 - DNA, 25 bp, Homo sapien
gctccgtgtatcaggagtttgctcc

SEQ ID NO: 5543664 - DNA, 25 bp, Homo sapien
aacagtggacttttgagcgatcatt

SEQ ID NO: 5543665 - DNA, 25 bp, Homo sapien
aacaggtttccaggacagtttagcc

SEQ ID NO: 5543666 - DNA, 25 bp, Homo sapien
agcgatcattggaagtacccagagc

SEQ ID NO: 5543667 - DNA, 25 bp, Homo sapien
acccagttgtgtcactcaagccgtt

SEQ ID NO: 5543668 - DNA, 25 bp, Homo sapien
ccctcgtgccctacccaatgggtcc

SEQ ID NO: 5543669 - DNA, 25 bp, Homo sapien
tcttaaataaggggccttggctgga

SEQ ID NO: 5543670 - DNA, 25 bp, Homo sapien
ccactgaaagggaaataggttgtgg

SEQ ID NO: 5543671 - DNA, 25 bp, Homo sapien
ttcatgaaacagagcacctagttct

SEQ ID NO: 5543672 - DNA, 25 bp, Homo sapien
aagtagggcatcatacaccaaggat

SEQ ID NO: 5543673 - DNA, 25 bp, Homo sapien
atggttttcagagcgcacaaagatc

SEQ ID NO: 5543674 - DNA, 25 bp, Homo sapien
gcggttgaaaggtctactgctccta

SEQ ID NO: 5543675 - DNA, 25 bp, Homo sapien
tgggatcatgtgacaatgatacgcc

SEQ ID NO: 5543676 - DNA, 25 bp, Homo sapien
ccatcctattgagggcggttgaaag

SEQ ID NO: 5543677 - DNA, 25 bp, Homo sapien
gggtaatagtcaaacactgggcact

SEQ ID NO: 5543678 - DNA, 25 bp, Homo sapien
ggccctagggaataagatacaggag

SEQ ID NO: 5543679 - DNA, 25 bp, Homo sapien
ccagtgtgatcatcgcaccagggta

SEQ ID NO: 5543680 - DNA, 25 bp, Homo sapien
ggcctgggcaatgtttcagtgagct

SEQ ID NO: 5543681 - DNA, 25 bp, Homo sapien
ggcaagaactaaacggaggccaata

SEQ ID NO: 5543682 - DNA, 25 bp, Homo sapien
gcgtatgcagacagcatggaaaact

SEQ ID NO: 5543683 - DNA, 25 bp, Homo sapien
cacagggaaaattgttgaccatgga

SEQ ID NO: 5543684 - DNA, 25 bp, Homo sapien
ggagattcaggagccattggcaaga

SEQ ID NO: 5543685 - DNA, 25 bp, Homo sapien
tgttaaacagtctccggtgcccaag

SEQ ID NO: 5543686 - DNA, 25 bp, Homo sapien
ccatggaaatggaaccttcagtgtg

SEQ ID NO: 5543687 - DNA, 25 bp, Homo sapien
tcagtgagcttggtaccaccctcca

SEQ ID NO: 5543688 - DNA, 25 bp, Homo sapien
gctggccaacatcacggagattcag

SEQ ID NO: 5543689 - DNA, 25 bp, Homo sapien
gtggtgcactcaaggatcatcagtc

SEQ ID NO: 5543690 - DNA, 25 bp, Homo sapien
atggaaaacttttgggattggctgg

SEQ ID NO: 5543691 - DNA, 25 bp, Homo sapien
tcaaaggcgacgatgacgtcttcgt

SEQ ID NO: 5543692 - DNA, 25 bp, Homo sapien
tatccgccgtatgcaggcggcggtg

SEQ ID NO: 5543693 - DNA, 25 bp, Homo sapien
ttcgcaggaaagacaacaaatacta

SEQ ID NO: 5543694 - DNA, 25 bp, Homo sapien
cggcagccacaggaaaacctgttcg

SEQ ID NO: 5543695 - DNA, 25 bp, Homo sapien
tgcaccatgcctgcgacaccctgga

SEQ ID NO: 5543696 - DNA, 25 bp, Homo sapien
gagctctacccgatcgacgacgtct

SEQ ID NO: 5543697 - DNA, 25 bp, Homo sapien
ctagaatttctggctgaccggcagc

SEQ ID NO: 5543698 - DNA, 25 bp, Homo sapien
acggcaaggccagctatccgccgta

SEQ ID NO: 5543699 - DNA, 25 bp, Homo sapien
ggccctggaagtggacattcctcta

SEQ ID NO: 5543700 - DNA, 25 bp, Homo sapien
cacgagggcttcaagactttcggca

SEQ ID NO: 5543701 - DNA, 25 bp, Homo sapien
agtggctggacatctactgccccca

SEQ ID NO: 5543702 - DNA, 25 bp, Homo sapien
aaaagaatagctgtgatgcatacat

SEQ ID NO: 5543703 - DNA, 25 bp, Homo sapien
acacctggctgccttttaactgttc

SEQ ID NO: 5543704 - DNA, 25 bp, Homo sapien
tccttgacctatctcagtgctggga

SEQ ID NO: 5543705 - DNA, 25 bp, Homo sapien
ttttgtgtgcactaaaaataccaac

SEQ ID NO: 5543706 - DNA, 25 bp, Homo sapien
gataagcaaactctacagttaaaac

SEQ ID NO: 5543707 - DNA, 25 bp, Homo sapien
catacatagttggaaaatgcataag

SEQ ID NO: 5543708 - DNA, 25 bp, Homo sapien
atgtgaaatgaaatggcatgaagac

SEQ ID NO: 5543709 - DNA, 25 bp, Homo sapien
aagaaaactgtagctataactcaga

SEQ ID NO: 5543710 - DNA, 25 bp, Homo sapien
aaatctacaaagtaccatgtgaaat

SEQ ID NO: 5543711 - DNA, 25 bp, Homo sapien
aagcgattctgctccctcggccttc

SEQ ID NO: 5543712 - DNA, 25 bp, Homo sapien
ggcatgaagacaacagtaagaaaac

SEQ ID NO: 5543713 - DNA, 25 bp, Homo sapien
ataccatgggctaatgttcagaccc

SEQ ID NO: 5543714 - DNA, 25 bp, Homo sapien
caactgagatgaatgcagctggaat

SEQ ID NO: 5543715 - DNA, 25 bp, Homo sapien
gccagagtgggtgtgaatttcactc

SEQ ID NO: 5543716 - DNA, 25 bp, Homo sapien
ggccttttcagttcctggggctctc

SEQ ID NO: 5543717 - DNA, 25 bp, Homo sapien
cactgcgcctgttcccaggaagctc

SEQ ID NO: 5543718 - DNA, 25 bp, Homo sapien
gtatggccaagaaataccatgggct

SEQ ID NO: 5543719 - DNA, 25 bp, Homo sapien
ggaagctcagagtctctcacaggcc

SEQ ID NO: 5543720 - DNA, 25 bp, Homo sapien
ctgctcctgtgggaaatcagaaaga

SEQ ID NO: 5543721 - DNA, 25 bp, Homo sapien
agccagcagacaacaccaactgaga

SEQ ID NO: 5543722 - DNA, 25 bp, Homo sapien
gaatggcacaggtcagtatggccaa

SEQ ID NO: 5543723 - DNA, 25 bp, Homo sapien
acccatggtatgaaagccagagtgg

SEQ ID NO: 5543724 - DNA, 25 bp, Homo sapien
atacggcaggaaacacaatccctca

SEQ ID NO: 5543725 - DNA, 25 bp, Homo sapien
ccccaatctggcttcgggatcccgc

SEQ ID NO: 5543726 - DNA, 25 bp, Homo sapien
tcatttacggttccgcgcctagccc

SEQ ID NO: 5543727 - DNA, 25 bp, Homo sapien
tgtgaagcgaacatgtaatcactac

SEQ ID NO: 5543728 - DNA, 25 bp, Homo sapien
cgggatcccgcatctcatgcagggt

SEQ ID NO: 5543729 - DNA, 25 bp, Homo sapien
agttcctggcacaagacatattcct

SEQ ID NO: 5543730 - DNA, 25 bp, Homo sapien
tcactacactacagaaacccctcac

SEQ ID NO: 5543731 - DNA, 25 bp, Homo sapien
tttgagtgataaatacggcaggaaa

SEQ ID NO: 5543732 - DNA, 25 bp, Homo sapien
caagaccctagggacccccaatctg

SEQ ID NO: 5543733 - DNA, 25 bp, Homo sapien
gcccgtgtgtgggattctccctgct

SEQ ID NO: 5543734 - DNA, 25 bp, Homo sapien
gttgatgatgaaaggtcccaaacct

SEQ ID NO: 5543735 - DNA, 25 bp, Homo sapien
agaagatgaaactgccaggaaggag

SEQ ID NO: 5543736 - DNA, 25 bp, Homo sapien
ctccttcctggcagtttcatcttct

SEQ ID NO: 5543737 - DNA, 25 bp, Homo sapien
caggtgatctgcccatctcgacccc

SEQ ID NO: 5543738 - DNA, 25 bp, Homo sapien
ctccctgctctctattgcctgctct

SEQ ID NO: 5543739 - DNA, 25 bp, Homo sapien
gtgcaacaaatatgacaaaattccc

SEQ ID NO: 5543740 - DNA, 25 bp, Homo sapien
gcccatctcgaccccccaaagtgct

SEQ ID NO: 5543741 - DNA, 25 bp, Homo sapien
tccagatgctacttagcctttcctc

SEQ ID NO: 5543742 - DNA, 25 bp, Homo sapien
tgcctgctcttcctcaccacatccc

SEQ ID NO: 5543743 - DNA, 25 bp, Homo sapien
gcccaccaccacgcgcaactaattt

SEQ ID NO: 5543744 - DNA, 25 bp, Homo sapien
ccggctgaggatagacatttttaat

SEQ ID NO: 5543745 - DNA, 25 bp, Homo sapien
ctataaaaaggaataatacaccctc

SEQ ID NO: 5543746 - DNA, 25 bp, Homo sapien
tgaaagtccttccttgctgtgcaac

SEQ ID NO: 5543747 - DNA, 25 bp, Homo sapien
acagagatactgtgaagaaacacca

SEQ ID NO: 5543748 - DNA, 25 bp, Homo sapien
atactaaggtaaagaaactgtggaa

SEQ ID NO: 5543749 - DNA, 25 bp, Homo sapien
ttccacagtttctttaccttagtat

SEQ ID NO: 5543750 - DNA, 25 bp, Homo sapien
aactgtggattattacaaggatctc

SEQ ID NO: 5543751 - DNA, 25 bp, Homo sapien
ccagcctggctactctagatcctca

SEQ ID NO: 5543752 - DNA, 25 bp, Homo sapien
ttatgttggagttatagagaagtgg

SEQ ID NO: 5543753 - DNA, 25 bp, Homo sapien
tttggtgagctactaaactataatc

SEQ ID NO: 5543754 - DNA, 25 bp, Homo sapien
ccctctttgttacctccagcctggc

SEQ ID NO: 5543755 - DNA, 25 bp, Homo sapien
acaaggatctcctaactggcctcta

SEQ ID NO: 5543756 - DNA, 25 bp, Homo sapien
ttagccttgtcacacttgagagatt

SEQ ID NO: 5543757 - DNA, 25 bp, Homo sapien
gaaagcacaactctaataatgacac

SEQ ID NO: 5543758 - DNA, 25 bp, Homo sapien
gctggtaaatacaagctacgtactt

SEQ ID NO: 5543759 - DNA, 25 bp, Homo sapien
tactttaaagtagagtactcctgcc

SEQ ID NO: 5543760 - DNA, 25 bp, Homo sapien
gccctcagcctggtatacaactttc

SEQ ID NO: 5543761 - DNA, 25 bp, Homo sapien
agatgaactttgtccgagccgccaa

SEQ ID NO: 5543762 - DNA, 25 bp, Homo sapien
gaacagcgtgtcccacaaagaacag

SEQ ID NO: 5543763 - DNA, 25 bp, Homo sapien
gggatgatgatgtgcctgcagatat

SEQ ID NO: 5543764 - DNA, 25 bp, Homo sapien
tggagggcgcctcaacttcaactac

SEQ ID NO: 5543765 - DNA, 25 bp, Homo sapien
acaggatctttgtagagcagcttgt

SEQ ID NO: 5543766 - DNA, 25 bp, Homo sapien
cctgcagatatggttgcagaagaat

SEQ ID NO: 5543767 - DNA, 25 bp, Homo sapien
atcgtgcaaaacgtgcaagagtgtc

SEQ ID NO: 5543768 - DNA, 25 bp, Homo sapien
aggtcctggtgcacaaaatagtcca

SEQ ID NO: 5543769 - DNA, 25 bp, Homo sapien
gagaaactgccagatgaagtggttc

SEQ ID NO: 5543770 - DNA, 25 bp, Homo sapien
ctcttacttgctggaacaggatctt

SEQ ID NO: 5543771 - DNA, 25 bp, Homo sapien
tcttttgccgaaaagaacagcgtgt

SEQ ID NO: 5543772 - DNA, 25 bp, Homo sapien
gtagacaagcaggatgccaatcaaa

SEQ ID NO: 5543773 - DNA, 25 bp, Homo sapien
gacaacaatgatcagagctaccact

SEQ ID NO: 5543774 - DNA, 25 bp, Homo sapien
ttgatgtatgtgagcaaagattgct

SEQ ID NO: 5543775 - DNA, 25 bp, Homo sapien
acatcagacatgataggcaaagacc

SEQ ID NO: 5543776 - DNA, 25 bp, Homo sapien
tggggtttctatatggaagtcaggc

SEQ ID NO: 5543777 - DNA, 25 bp, Homo sapien
atcgaaccaagtgcctacatcagac

SEQ ID NO: 5543778 - DNA, 25 bp, Homo sapien
cgaaacgtatctagctgacggcagc

SEQ ID NO: 5543779 - DNA, 25 bp, Homo sapien
aataagcaggaaatctccagacaat

SEQ ID NO: 5543780 - DNA, 25 bp, Homo sapien
tcaccctggaaatgcttggggtttc

SEQ ID NO: 5543781 - DNA, 25 bp, Homo sapien
aagtcaggcgaatggaatattaata

SEQ ID NO: 5543782 - DNA, 25 bp, Homo sapien
gctgacggcagcttgtcttgtttcc

SEQ ID NO: 5543783 - DNA, 25 bp, Homo sapien
tgtcctctgctgcctagcacagggc

SEQ ID NO: 5543784 - DNA, 25 bp, Homo sapien
tctgcaagtaagcctggactcagca

SEQ ID NO: 5543785 - DNA, 25 bp, Homo sapien
gactcagcagcggtccacctatgtt

SEQ ID NO: 5543786 - DNA, 25 bp, Homo sapien
tttaccacaccgtgaggtgcctgca

SEQ ID NO: 5543787 - DNA, 25 bp, Homo sapien
gaggtgcctgcacacagtgacctta

SEQ ID NO: 5543788 - DNA, 25 bp, Homo sapien
caagtatcttgacatgggttaaatt

SEQ ID NO: 5543789 - DNA, 25 bp, Homo sapien
aattaatagaacctgtggatggggc

SEQ ID NO: 5543790 - DNA, 25 bp, Homo sapien
ggcctggccagcatagatctctgca

SEQ ID NO: 5543791 - DNA, 25 bp, Homo sapien
ctcacaggctggaattaatagaacc

SEQ ID NO: 5543792 - DNA, 25 bp, Homo sapien
agattagtgtaagtgcctgtcctcc

SEQ ID NO: 5543793 - DNA, 25 bp, Homo sapien
gatggggctgctcctttaccacacc

SEQ ID NO: 5543794 - DNA, 25 bp, Homo sapien
tgcccgctgtggggcttacccttaa

SEQ ID NO: 5543795 - DNA, 25 bp, Homo sapien
aggtatgcggattcatggcaagcaa

SEQ ID NO: 5543796 - DNA, 25 bp, Homo sapien
agggacacttaactggggtcacagt

SEQ ID NO: 5543797 - DNA, 25 bp, Homo sapien
gggatatggcccttggtccttgccc

SEQ ID NO: 5543798 - DNA, 25 bp, Homo sapien
atgcttaaagtccacccttggctcc

SEQ ID NO: 5543799 - DNA, 25 bp, Homo sapien
ccaggctgtttgtgctgcccgctgt

SEQ ID NO: 5543800 - DNA, 25 bp, Homo sapien
ggggtcacagtgtattccaaggtat

SEQ ID NO: 5543801 - DNA, 25 bp, Homo sapien
gtgtgatcagtgctgtgacagaagc

SEQ ID NO: 5543802 - DNA, 25 bp, Homo sapien
aaggccatagagagtttgtgcatat

SEQ ID NO: 5543803 - DNA, 25 bp, Homo sapien
ctgggtacaaagtcacttgggatat

SEQ ID NO: 5543804 - DNA, 25 bp, Homo sapien
gagtgggaacttgacccaggtctgg

SEQ ID NO: 5543805 - DNA, 25 bp, Homo sapien
gctgggtggaccagcagcattttct

SEQ ID NO: 5543806 - DNA, 25 bp, Homo sapien
tcactcagactgtgttggaagggga

SEQ ID NO: 5543807 - DNA, 25 bp, Homo sapien
tcttaaaggtactgggcatacttcc

SEQ ID NO: 5543808 - DNA, 25 bp, Homo sapien
agttaagaaggaacacttggatgac

SEQ ID NO: 5543809 - DNA, 25 bp, Homo sapien
attcccaagaaagcatgtcgcctac

SEQ ID NO: 5543810 - DNA, 25 bp, Homo sapien
tcaaggtgtacttcagaccagcttc

SEQ ID NO: 5543811 - DNA, 25 bp, Homo sapien
gagagcatgttaagcgaacctgtac

SEQ ID NO: 5543812 - DNA, 25 bp, Homo sapien
tttaagtagtcagagctcgctgggt

SEQ ID NO: 5543813 - DNA, 25 bp, Homo sapien
cccagcgaaaaaaatgataacggac

SEQ ID NO: 5543814 - DNA, 25 bp, Homo sapien
acacttggatgactatggagaagca

SEQ ID NO: 5543815 - DNA, 25 bp, Homo sapien
aatggaaaaacgataaacaaggtgc

SEQ ID NO: 5543816 - DNA, 25 bp, Homo sapien
agtaaaagtaagtgaaaatgatggg

SEQ ID NO: 5543817 - DNA, 25 bp, Homo sapien
atagctagttaaaacaataagtatc

SEQ ID NO: 5543818 - DNA, 25 bp, Homo sapien
tttgaccgtggcaaagtgtacagta

SEQ ID NO: 5543819 - DNA, 25 bp, Homo sapien
ttaagaggtagaaatgaaaaatgaa

SEQ ID NO: 5543820 - DNA, 25 bp, Homo sapien
gacagggcctaagatagcttctagc

SEQ ID NO: 5543821 - DNA, 25 bp, Homo sapien
gtggcaaagtgtacagtagattttc

SEQ ID NO: 5543822 - DNA, 25 bp, Homo sapien
acagacctagaaccgtggcatgttt

SEQ ID NO: 5543823 - DNA, 25 bp, Homo sapien
aaaatgatggggaatatagtattgg

SEQ ID NO: 5543824 - DNA, 25 bp, Homo sapien
ttacttgatatggaaaattacgctt

SEQ ID NO: 5543825 - DNA, 25 bp, Homo sapien
tacgctttataggtggaaaagtagc

SEQ ID NO: 5543826 - DNA, 25 bp, Homo sapien
tgcttttactatgcaggagagagtt

SEQ ID NO: 5543827 - DNA, 25 bp, Homo sapien
aatcagagctgatcccgtcatcggg

SEQ ID NO: 5543828 - DNA, 25 bp, Homo sapien
cccgatgacgggatcagctctgatt

SEQ ID NO: 5543829 - DNA, 25 bp, Homo sapien
aggtagtattacaaacacaaaagtc

SEQ ID NO: 5543830 - DNA, 25 bp, Homo sapien
aatagctgttttcggataatctcct

SEQ ID NO: 5543831 - DNA, 25 bp, Homo sapien
ataggagatcagtaacactcgaaat

SEQ ID NO: 5543832 - DNA, 25 bp, Homo sapien
atgcctgttggataatgtaagaaaa

SEQ ID NO: 5543833 - DNA, 25 bp, Homo sapien
taagttggttgaatcctgggagata

SEQ ID NO: 5543834 - DNA, 25 bp, Homo sapien
taggtaaatgtaatgaaatctctgt

SEQ ID NO: 5543835 - DNA, 25 bp, Homo sapien
agggataaaagaggtagtattacaa

SEQ ID NO: 5543836 - DNA, 25 bp, Homo sapien
aacattggaacatcaatgcacaatg

SEQ ID NO: 5543837 - DNA, 25 bp, Homo sapien
ggaggctcatgtaacataggagatc

SEQ ID NO: 5543838 - DNA, 25 bp, Homo sapien
acagagaatttcatcagtagaaaac

SEQ ID NO: 5543839 - DNA, 25 bp, Homo sapien
atgcacaatgattacaggaggctca

SEQ ID NO: 5543840 - DNA, 25 bp, Homo sapien
tggccataacataatctctgatctt

SEQ ID NO: 5543841 - DNA, 25 bp, Homo sapien
ttcacaggattatacatagaattct

SEQ ID NO: 5543842 - DNA, 25 bp, Homo sapien
cctcattcatggccataacataatc

SEQ ID NO: 5543843 - DNA, 25 bp, Homo sapien
tcatacacaataaatcattagcatt

SEQ ID NO: 5543844 - DNA, 25 bp, Homo sapien
cttataaaggacatgctcactgtag

SEQ ID NO: 5543845 - DNA, 25 bp, Homo sapien
agttattgacaatgcaggtcaggcc

SEQ ID NO: 5543846 - DNA, 25 bp, Homo sapien
ttgacaatgcaggtcaggcctcatt

SEQ ID NO: 5543847 - DNA, 25 bp, Homo sapien
caacactacaaattttcacaggatt

SEQ ID NO: 5543848 - DNA, 25 bp, Homo sapien
tgttttcaggaatttacgcaatcat

SEQ ID NO: 5543849 - DNA, 25 bp, Homo sapien
atagaattctaaagcaaaataatcc

SEQ ID NO: 5543850 - DNA, 25 bp, Homo sapien
ctgatctttccagtccctacaacac

SEQ ID NO: 5543851 - DNA, 25 bp, Homo sapien
tgttttgacatgaattaaagtaaat

SEQ ID NO: 5543852 - DNA, 25 bp, Homo sapien
cagactgtcatgctaattaaaaggc

SEQ ID NO: 5543853 - DNA, 25 bp, Homo sapien
aattaaaaggcacagatacatctta

SEQ ID NO: 5543854 - DNA, 25 bp, Homo sapien
tttaattcaaagactaagatccata

SEQ ID NO: 5543855 - DNA, 25 bp, Homo sapien
cttttaataaagcagactgtcatgc

SEQ ID NO: 5543856 - DNA, 25 bp, Homo sapien
aagcaaaatatactagtaatgatgt

SEQ ID NO: 5543857 - DNA, 25 bp, Homo sapien
tagtaatgatgttaattgtagtttt

SEQ ID NO: 5543858 - DNA, 25 bp, Homo sapien
tactgactgtaaataagacagcatc

SEQ ID NO: 5543859 - DNA, 25 bp, Homo sapien
actaagatccatatgaagtgtgctg

SEQ ID NO: 5543860 - DNA, 25 bp, Homo sapien
agatatgatcataaagttacaatta

SEQ ID NO: 5543861 - DNA, 25 bp, Homo sapien
aagtgtgctggatcaaatagccttt

SEQ ID NO: 5543862 - DNA, 25 bp, Homo sapien
tttccaggtggcttagttaatggga

SEQ ID NO: 5543863 - DNA, 25 bp, Homo sapien
tgttgtccaatctgttctcaaactc

SEQ ID NO: 5543864 - DNA, 25 bp, Homo sapien
ttcggcacattcactgggcccaaca

SEQ ID NO: 5543865 - DNA, 25 bp, Homo sapien
cactgggcccaacagtgagattgaa

SEQ ID NO: 5543866 - DNA, 25 bp, Homo sapien
aagttgggaaatgcctcacgccata

SEQ ID NO: 5543867 - DNA, 25 bp, Homo sapien
atgggaataaaccttggctttaata

SEQ ID NO: 5543868 - DNA, 25 bp, Homo sapien
gggaaatgcctcacgccataaatac

SEQ ID NO: 5543869 - DNA, 25 bp, Homo sapien
gacgatgggtgccagttcttcggca

SEQ ID NO: 5543870 - DNA, 25 bp, Homo sapien
caggtggcttagttaatgggaataa

SEQ ID NO: 5543871 - DNA, 25 bp, Homo sapien
agttcttcggcacattcactgggcc

SEQ ID NO: 5543872 - DNA, 25 bp, Homo sapien
taaatactaattgatgatgagccta

SEQ ID NO: 5543873 - DNA, 25 bp, Homo sapien
gcactcaggctgaatgcttagttta

SEQ ID NO: 5543874 - DNA, 25 bp, Homo sapien
ataggtttgggtatgtggcattcta

SEQ ID NO: 5543875 - DNA, 25 bp, Homo sapien
gttggttactggtagctgacagaaa

SEQ ID NO: 5543876 - DNA, 25 bp, Homo sapien
atattttggcgaggtttactgcatg

SEQ ID NO: 5543877 - DNA, 25 bp, Homo sapien
aaggactccccgactggcacaattt

SEQ ID NO: 5543878 - DNA, 25 bp, Homo sapien
tttaaggctatgagaatagtgccag

SEQ ID NO: 5543879 - DNA, 25 bp, Homo sapien
tatgcaatgaaaaaggctgtgagga

SEQ ID NO: 5543880 - DNA, 25 bp, Homo sapien
aaaggctgtgaggaaatacacaaaa

SEQ ID NO: 5543881 - DNA, 25 bp, Homo sapien
tttactgcatggtgatcaaaggact

SEQ ID NO: 5543882 - DNA, 25 bp, Homo sapien
ctgacagaaatgtttgcaaagcata

SEQ ID NO: 5543883 - DNA, 25 bp, Homo sapien
atgagaatagtgccagctgtctccc

SEQ ID NO: 5543884 - DNA, 25 bp, Homo sapien
ttaaataaattgcccagttactgaa

SEQ ID NO: 5543885 - DNA, 25 bp, Homo sapien
tgttaatagtatgttggcaagttga

SEQ ID NO: 5543886 - DNA, 25 bp, Homo sapien
tcttagcatgcagataacttatatc

SEQ ID NO: 5543887 - DNA, 25 bp, Homo sapien
actgtctgttgaaaaaggaataaat

SEQ ID NO: 5543888 - DNA, 25 bp, Homo sapien
tagtttgaaattattgagtgcttcc

SEQ ID NO: 5543889 - DNA, 25 bp, Homo sapien
atttagaacaacttgccaacaatac

SEQ ID NO: 5543890 - DNA, 25 bp, Homo sapien
aacttgccaacaatacaaacagaaa

SEQ ID NO: 5543891 - DNA, 25 bp, Homo sapien
actttgtccctacacatgtggctga

SEQ ID NO: 5543892 - DNA, 25 bp, Homo sapien
gcccagttactgaatcagaagcatt

SEQ ID NO: 5543893 - DNA, 25 bp, Homo sapien
tgttggcaagttgatttagaacaac

SEQ ID NO: 5543894 - DNA, 25 bp, Homo sapien
tatggagcctatctaataatatact

SEQ ID NO: 5543895 - DNA, 25 bp, Homo sapien
atggaaataagcacccttgggacca

SEQ ID NO: 5543896 - DNA, 25 bp, Homo sapien
tctgaggccagcacactttcaacac

SEQ ID NO: 5543897 - DNA, 25 bp, Homo sapien
gtctatgaccactgcctctgaaggc

SEQ ID NO: 5543898 - DNA, 25 bp, Homo sapien
tgttacgaggtttcctgagagtagc

SEQ ID NO: 5543899 - DNA, 25 bp, Homo sapien
caattaccagtgaaagaagcactcc

SEQ ID NO: 5543900 - DNA, 25 bp, Homo sapien
accagctctgagggtagcacccttt

SEQ ID NO: 5543901 - DNA, 25 bp, Homo sapien
cagcaccacacgtgtgaccagctct

SEQ ID NO: 5543902 - DNA, 25 bp, Homo sapien
tgtctgtgtcaatgcccatggaaat

SEQ ID NO: 5543903 - DNA, 25 bp, Homo sapien
tgtcaactacgagtgaaagaagcac

SEQ ID NO: 5543904 - DNA, 25 bp, Homo sapien
gcctagtgaaggaagcactccatta

SEQ ID NO: 5543905 - DNA, 25 bp, Homo sapien
tcctgagagtagcaccccttccata

SEQ ID NO: 5543906 - DNA, 25 bp, Homo sapien
actgattacaaaagtgtaaacagac

SEQ ID NO: 5543907 - DNA, 25 bp, Homo sapien
atggaaagatcattattggtcataa

SEQ ID NO: 5543908 - DNA, 25 bp, Homo sapien
gtataagctacaaacaggaatattt

SEQ ID NO: 5543909 - DNA, 25 bp, Homo sapien
ttaagaggattaaattagcagtatt

SEQ ID NO: 5543910 - DNA, 25 bp, Homo sapien
ttagatacttagggttggaacacat

SEQ ID NO: 5543911 - DNA, 25 bp, Homo sapien
tgatctgagcatggttcccctctct

SEQ ID NO: 5543912 - DNA, 25 bp, Homo sapien
gcgccgaactcctgccgtcaagtga

SEQ ID NO: 5543913 - DNA, 25 bp, Homo sapien
ctcttctgattaagagagaaagaag

SEQ ID NO: 5543914 - DNA, 25 bp, Homo sapien
cacacccagcccctttaaagattct

SEQ ID NO: 5543915 - DNA, 25 bp, Homo sapien
attaacacaaatatggaaagatcat

SEQ ID NO: 5543916 - DNA, 25 bp, Homo sapien
ccaattggattttaggataacttct

SEQ ID NO: 5543917 - DNA, 25 bp, Homo sapien
ccgtgcacagacatacttggagttg

SEQ ID NO: 5543918 - DNA, 25 bp, Homo sapien
tccctaaaggatcattggttttgct

SEQ ID NO: 5543919 - DNA, 25 bp, Homo sapien
tgctggacacatgatggtttacaac

SEQ ID NO: 5543920 - DNA, 25 bp, Homo sapien
catacttggagttgagtaaagggag

SEQ ID NO: 5543921 - DNA, 25 bp, Homo sapien
gtgctttcgcattgagcatgctttc

SEQ ID NO: 5543922 - DNA, 25 bp, Homo sapien
gaggaacacctcaatatgtaaacag

SEQ ID NO: 5543923 - DNA, 25 bp, Homo sapien
gtacttgagccctacctggtgttcc

SEQ ID NO: 5543924 - DNA, 25 bp, Homo sapien
ggtagcaacttttgaaagaagcatt

SEQ ID NO: 5543925 - DNA, 25 bp, Homo sapien
atcttagaagccttggtagcaactt

SEQ ID NO: 5543926 - DNA, 25 bp, Homo sapien
acagtttccctaacacagcgagttc

SEQ ID NO: 5543927 - DNA, 25 bp, Homo sapien
tcagaagcaaatcttagtgacttta

SEQ ID NO: 5543928 - DNA, 25 bp, Homo sapien
caaggcaattagaagtaataaaaga

SEQ ID NO: 5543929 - DNA, 25 bp, Homo sapien
gaatgtggaaatcagactagaaatt

SEQ ID NO: 5543930 - DNA, 25 bp, Homo sapien
ttgaataactcaaatagtctggaaa

SEQ ID NO: 5543931 - DNA, 25 bp, Homo sapien
acaagggatatgtgaaacttctgac

SEQ ID NO: 5543932 - DNA, 25 bp, Homo sapien
gtcgctactaaaacattatggctat

SEQ ID NO: 5543933 - DNA, 25 bp, Homo sapien
tctggaaagcccaaaatgaagcatc

SEQ ID NO: 5543934 - DNA, 25 bp, Homo sapien
aataaaagaatgtcgctactaaaac

SEQ ID NO: 5543935 - DNA, 25 bp, Homo sapien
aaatgtttgatacaagggatatgtg

SEQ ID NO: 5543936 - DNA, 25 bp, Homo sapien
aatcaacttaatgaatgtggaaatc

SEQ ID NO: 5543937 - DNA, 25 bp, Homo sapien
ttcagtaaagacaagagcagaatag

SEQ ID NO: 5543938 - DNA, 25 bp, Homo sapien
gtgccgggccataacaatgcatttt

SEQ ID NO: 5543939 - DNA, 25 bp, Homo sapien
ggtgcacaccaccacactggactca

SEQ ID NO: 5543940 - DNA, 25 bp, Homo sapien
gggcttaggtggtcttcccacctca

SEQ ID NO: 5543941 - DNA, 25 bp, Homo sapien
ccatgttgcccaggttggactcctg

SEQ ID NO: 5543942 - DNA, 25 bp, Homo sapien
atgcagagtatgcaagcctcagtgg

SEQ ID NO: 5543943 - DNA, 25 bp, Homo sapien
ccaggttggactcctgagctcaggg

SEQ ID NO: 5543944 - DNA, 25 bp, Homo sapien
tgcaatgcagagtatgcaagcctca

SEQ ID NO: 5543945 - DNA, 25 bp, Homo sapien
aagcctcagtgggtcacaggcatat

SEQ ID NO: 5543946 - DNA, 25 bp, Homo sapien
gcctcagtgggtcacaggcatatgg

SEQ ID NO: 5543947 - DNA, 25 bp, Homo sapien
acataattgcaatgcagagtatgca

SEQ ID NO: 5543948 - DNA, 25 bp, Homo sapien
tgagactggatctcactctgttgcc

SEQ ID NO: 5543949 - DNA, 25 bp, Homo sapien
accacaggtgcacaccaccacactg

SEQ ID NO: 5543950 - DNA, 25 bp, Homo sapien
agatagctggatacctggagaaatt

SEQ ID NO: 5543951 - DNA, 25 bp, Homo sapien
gtggtgttgtagcggacattactac

SEQ ID NO: 5543952 - DNA, 25 bp, Homo sapien
cctctgaaaaggtagaagaggtatc

SEQ ID NO: 5543953 - DNA, 25 bp, Homo sapien
ctctacatggacatacggtaagctc

SEQ ID NO: 5543954 - DNA, 25 bp, Homo sapien
tccgcttagccataggaccacagga

SEQ ID NO: 5543955 - DNA, 25 bp, Homo sapien
ggactggtcaatgtgacatgggact

SEQ ID NO: 5543956 - DNA, 25 bp, Homo sapien
tgactcacagcttgtggccgtgtcc

SEQ ID NO: 5543957 - DNA, 25 bp, Homo sapien
tatctcaggttgaaggtgcgttaca

SEQ ID NO: 5543958 - DNA, 25 bp, Homo sapien
tagagtgcttcacaggaccgcacac

SEQ ID NO: 5543959 - DNA, 25 bp, Homo sapien
cggtaagctctatctggtcagttgc

SEQ ID NO: 5543960 - DNA, 25 bp, Homo sapien
accaccattccgggagcgtggtgtt

SEQ ID NO: 5543961 - DNA, 25 bp, Homo sapien
ggccattgagatgtccccaagccca

SEQ ID NO: 5543962 - DNA, 25 bp, Homo sapien
ccatctcagtctgttggggagtacc

SEQ ID NO: 5543963 - DNA, 25 bp, Homo sapien
ctgaggtatctccaagcccagccca

SEQ ID NO: 5543964 - DNA, 25 bp, Homo sapien
ggtcccaaaacctagcccagccatc

SEQ ID NO: 5543965 - DNA, 25 bp, Homo sapien
caagcccctggggtaacctcaaatc

SEQ ID NO: 5543966 - DNA, 25 bp, Homo sapien
ccattagggagtacccaaccctggc

SEQ ID NO: 5543967 - DNA, 25 bp, Homo sapien
accaatcaatggctaactgggggtc

SEQ ID NO: 5543968 - DNA, 25 bp, Homo sapien
agcctagcccagccatctcaagccc

SEQ ID NO: 5543969 - DNA, 25 bp, Homo sapien
agtggcctcagaccaaggtcaccaa

SEQ ID NO: 5543970 - DNA, 25 bp, Homo sapien
ggagtacccaatgctggctcagcca

SEQ ID NO: 5543971 - DNA, 25 bp, Homo sapien
cgaggacacccatcaaggaccttta

SEQ ID NO: 5543972 - DNA, 25 bp, Homo sapien
atcgtgcagagccagactataaact

SEQ ID NO: 5543973 - DNA, 25 bp, Homo sapien
agtcttatctaacggtgcagcggct

SEQ ID NO: 5543974 - DNA, 25 bp, Homo sapien
cagactttgaatttagaggagggca

SEQ ID NO: 5543975 - DNA, 25 bp, Homo sapien
cttcaggatactgtgttggaaggcg

SEQ ID NO: 5543976 - DNA, 25 bp, Homo sapien
gggtacatagctcaggcaaacagac

SEQ ID NO: 5543977 - DNA, 25 bp, Homo sapien
gagtgaaaatgggcgatatcatgaa

SEQ ID NO: 5543978 - DNA, 25 bp, Homo sapien
aaggggatgagactgcttatccaac

SEQ ID NO: 5543979 - DNA, 25 bp, Homo sapien
ccagaagatgatgggaaatattgca

SEQ ID NO: 5543980 - DNA, 25 bp, Homo sapien
tgcagcagttgcagcttcctgtgcc

SEQ ID NO: 5543981 - DNA, 25 bp, Homo sapien
atggaggtccctctacaatggttcc

SEQ ID NO: 5543982 - DNA, 25 bp, Homo sapien
ggcaggccagtgattgcctcaccat

SEQ ID NO: 5543983 - DNA, 25 bp, Homo sapien
tccagacaggcggattcagcctgca

SEQ ID NO: 5543984 - DNA, 25 bp, Homo sapien
atccaggttgtaacaaagaggtgac

SEQ ID NO: 5543985 - DNA, 25 bp, Homo sapien
gaaagagaaaataccgtctgaagtc

SEQ ID NO: 5543986 - DNA, 25 bp, Homo sapien
ctcaagtgagacactagagagagta

SEQ ID NO: 5543987 - DNA, 25 bp, Homo sapien
cacaggttcctgagtgtgcagtcag

SEQ ID NO: 5543988 - DNA, 25 bp, Homo sapien
caaagaggtgaccatggcgtttatt

SEQ ID NO: 5543989 - DNA, 25 bp, Homo sapien
tggtgcattgatacgttaggcggag

SEQ ID NO: 5543990 - DNA, 25 bp, Homo sapien
gaggagtaccatctgccagagtctt

SEQ ID NO: 5543991 - DNA, 25 bp, Homo sapien
acgcatgtgggcatcatatccaggt

SEQ ID NO: 5543992 - DNA, 25 bp, Homo sapien
agtgcccagtgcacggtgctgggca

SEQ ID NO: 5543993 - DNA, 25 bp, Homo sapien
ttccggagttgtgagctccagatcc

SEQ ID NO: 5543994 - DNA, 25 bp, Homo sapien
gtttattttgtagcattcaacaaat

SEQ ID NO: 5543995 - DNA, 25 bp, Homo sapien
atttgttgaatgctacaaaataaac

SEQ ID NO: 5543996 - DNA, 25 bp, Homo sapien
ggtctctccacgttgccagactggt

SEQ ID NO: 5543997 - DNA, 25 bp, Homo sapien
ctgatggccatgtgaactaaacaat

SEQ ID NO: 5543998 - DNA, 25 bp, Homo sapien
agcaagccattttccatacctatcc

SEQ ID NO: 5543999 - DNA, 25 bp, Homo sapien
tgcagcagtaagtcattggaatgtc

SEQ ID NO: 5544000 - DNA, 25 bp, Homo sapien
tgaaattagatggtggtctctccac

SEQ ID NO: 5544001 - DNA, 25 bp, Homo sapien
tgtagttctactgatggccatgtga

SEQ ID NO: 5544002 - DNA, 25 bp, Homo sapien
caccccccgcattgcaggacagggt

SEQ ID NO: 5544003 - DNA, 25 bp, Homo sapien
tttggtgctttgtcatgcagcagta

SEQ ID NO: 5544004 - DNA, 25 bp, Homo sapien
gtcattggaatgtcccccctcccac

SEQ ID NO: 5544005 - DNA, 25 bp, Homo sapien
ctcaagctcttggactcaggcgatt

SEQ ID NO: 5544006 - DNA, 25 bp, Homo sapien
cctcccaccccccgcattgcaggac

SEQ ID NO: 5544007 - DNA, 25 bp, Homo sapien
gtattactgagtaaagcagggtgct

SEQ ID NO: 5544008 - DNA, 25 bp, Homo sapien
gagaagtgagagtcttgacatgcgt

SEQ ID NO: 5544009 - DNA, 25 bp, Homo sapien
tgggaaactaaaaagcgattcatca

SEQ ID NO: 5544010 - DNA, 25 bp, Homo sapien
gtatctccgcggatctaccccagcc

SEQ ID NO: 5544011 - DNA, 25 bp, Homo sapien
ctggtaactggaaaatgacagttcc

SEQ ID NO: 5544012 - DNA, 25 bp, Homo sapien
tatgattggttctcttgggtggata

SEQ ID NO: 5544013 - DNA, 25 bp, Homo sapien
gttgtctacaacacgccttggggaa

SEQ ID NO: 5544014 - DNA, 25 bp, Homo sapien
atgctcaaatgggcccgttgtctac

SEQ ID NO: 5544015 - DNA, 25 bp, Homo sapien
catgccatgtgaagctgttcggtgg

SEQ ID NO: 5544016 - DNA, 25 bp, Homo sapien
tcctgggcgtgatcacaagtctaca

SEQ ID NO: 5544017 - DNA, 25 bp, Homo sapien
tgggtggatatttgtccggaatggg

SEQ ID NO: 5544018 - DNA, 25 bp, Homo sapien
atcactgtacctgggccttatcccc

SEQ ID NO: 5544019 - DNA, 25 bp, Homo sapien
aagggtaaaacaggatatcgctata

SEQ ID NO: 5544020 - DNA, 25 bp, Homo sapien
aggatagaactcacttagatgcata

SEQ ID NO: 5544021 - DNA, 25 bp, Homo sapien
acagtaacgtaagagttctaacttc

SEQ ID NO: 5544022 - DNA, 25 bp, Homo sapien
gtggacataaacagtaacgtaagag

SEQ ID NO: 5544023 - DNA, 25 bp, Homo sapien
tgcatttgaaaattctgggactact

SEQ ID NO: 5544024 - DNA, 25 bp, Homo sapien
tgcatattagggtcattgaagtact

SEQ ID NO: 5544025 - DNA, 25 bp, Homo sapien
aattgatcaagggtaaaacaggata

SEQ ID NO: 5544026 - DNA, 25 bp, Homo sapien
acctacaaattgagagaaaccacat

SEQ ID NO: 5544027 - DNA, 25 bp, Homo sapien
tttcaaagctctcccaagtgatttt

SEQ ID NO: 5544028 - DNA, 25 bp, Homo sapien
attaaactagaacagatcaaaagcc

SEQ ID NO: 5544029 - DNA, 25 bp, Homo sapien
attagatagaactctcggaagggtg

SEQ ID NO: 5544030 - DNA, 25 bp, Homo sapien
ctaagcaacttcgagacaggcaatg

SEQ ID NO: 5544031 - DNA, 25 bp, Homo sapien
atcagtaggtagttggatacgtgag

SEQ ID NO: 5544032 - DNA, 25 bp, Homo sapien
tgtccaagcagaataatcagtaggt

SEQ ID NO: 5544033 - DNA, 25 bp, Homo sapien
aaagacacagtgaccattcatagtt

SEQ ID NO: 5544034 - DNA, 25 bp, Homo sapien
agtgccaagcatacggtatggtaac

SEQ ID NO: 5544035 - DNA, 25 bp, Homo sapien
aaagagaatgagttcaactcaggcc

SEQ ID NO: 5544036 - DNA, 25 bp, Homo sapien
aaacacaatgaatgtgggagagaaa

SEQ ID NO: 5544037 - DNA, 25 bp, Homo sapien
aatttaaaatggctgatgtatgtcc

SEQ ID NO: 5544038 - DNA, 25 bp, Homo sapien
tgaactgacttaaccaggagatttc

SEQ ID NO: 5544039 - DNA, 25 bp, Homo sapien
gtgctatggatgcaggtgtgcatta

SEQ ID NO: 5544040 - DNA, 25 bp, Homo sapien
tctgatccatgaatatgggatgtat

SEQ ID NO: 5544041 - DNA, 25 bp, Homo sapien
attaatttgaacagaccttggtttc

SEQ ID NO: 5544042 - DNA, 25 bp, Homo sapien
gaccatctaacctaaaccatcttcc

SEQ ID NO: 5544043 - DNA, 25 bp, Homo sapien
tgttgcatagatcgtagaaatgctc

SEQ ID NO: 5544044 - DNA, 25 bp, Homo sapien
ttgcctgtcctactcaccatgaatt

SEQ ID NO: 5544045 - DNA, 25 bp, Homo sapien
ttattaaagaatgactccctccatc

SEQ ID NO: 5544046 - DNA, 25 bp, Homo sapien
aatggaggctccatgaacacagcca

SEQ ID NO: 5544047 - DNA, 25 bp, Homo sapien
atattggactgcctgatattgttgc

SEQ ID NO: 5544048 - DNA, 25 bp, Homo sapien
aaagaaaaagagacatttatgagac

SEQ ID NO: 5544049 - DNA, 25 bp, Homo sapien
aacaaaatgttgagtcttctgatcc

SEQ ID NO: 5544050 - DNA, 25 bp, Homo sapien
tccatgaacacagccacctttgcct

SEQ ID NO: 5544051 - DNA, 25 bp, Homo sapien
ggaattacaggtgtatgcccccacg

SEQ ID NO: 5544052 - DNA, 25 bp, Homo sapien
agctaccgcacccagtctaccctca

SEQ ID NO: 5544053 - DNA, 25 bp, Homo sapien
acattctaacagtatacataaacac

SEQ ID NO: 5544054 - DNA, 25 bp, Homo sapien
gagcatgtatttagactccagtatc

SEQ ID NO: 5544055 - DNA, 25 bp, Homo sapien
agtttgcatgattatggagcatgta

SEQ ID NO: 5544056 - DNA, 25 bp, Homo sapien
caaagtattttgggggaaccagatc

SEQ ID NO: 5544057 - DNA, 25 bp, Homo sapien
tccagtatcagattagggatgacga

SEQ ID NO: 5544058 - DNA, 25 bp, Homo sapien
gggattacaggtatgagctaccgca

SEQ ID NO: 5544059 - DNA, 25 bp, Homo sapien
gtgtatgcccccacgcccggctaat

SEQ ID NO: 5544060 - DNA, 25 bp, Homo sapien
caatatcctatgagtagctggaatt

SEQ ID NO: 5544061 - DNA, 25 bp, Homo sapien
tggagcacaatggcacgatctcaac

SEQ ID NO: 5544062 - DNA, 25 bp, Homo sapien
tgagttgacctgaatgcctgctgag

SEQ ID NO: 5544063 - DNA, 25 bp, Homo sapien
gaggtcgtcttgggatccctactgc

SEQ ID NO: 5544064 - DNA, 25 bp, Homo sapien
gccctgggctggtccttagccagtc

SEQ ID NO: 5544065 - DNA, 25 bp, Homo sapien
ggcggtgcccttgccacacccacct

SEQ ID NO: 5544066 - DNA, 25 bp, Homo sapien
taggggtttgctcatcaaggagctt

SEQ ID NO: 5544067 - DNA, 25 bp, Homo sapien
aaaggctaagtatgtgttgatgatc

SEQ ID NO: 5544068 - DNA, 25 bp, Homo sapien
gcaagcagtgcccctccatcagagg

SEQ ID NO: 5544069 - DNA, 25 bp, Homo sapien
tctccctgtgaaggaaacccattct

SEQ ID NO: 5544070 - DNA, 25 bp, Homo sapien
cccacctaatttgcagggcgaggga

SEQ ID NO: 5544071 - DNA, 25 bp, Homo sapien
ctttcagaggcaagtttctccctgt

SEQ ID NO: 5544072 - DNA, 25 bp, Homo sapien
ttagccagtctgcctgagttgacct

SEQ ID NO: 5544073 - DNA, 25 bp, Homo sapien
aaattaaagagctgggctacataat

SEQ ID NO: 5544074 - DNA, 25 bp, Homo sapien
taaaaagaagcctgtagataagaca

SEQ ID NO: 5544075 - DNA, 25 bp, Homo sapien
tacaagaaacagttcactgagaggg

SEQ ID NO: 5544076 - DNA, 25 bp, Homo sapien
agaaagttattgtagacctggaaac

SEQ ID NO: 5544077 - DNA, 25 bp, Homo sapien
gagtgacaactcaaggtccagcatg

SEQ ID NO: 5544078 - DNA, 25 bp, Homo sapien
tcaaggcggtgatatcattagatgt

SEQ ID NO: 5544079 - DNA, 25 bp, Homo sapien
tagataagacatcaatccaggaatc

SEQ ID NO: 5544080 - DNA, 25 bp, Homo sapien
cagcatgtgaccgtagatgtagaac

SEQ ID NO: 5544081 - DNA, 25 bp, Homo sapien
tggagtttcggtagatggcactctt

SEQ ID NO: 5544082 - DNA, 25 bp, Homo sapien
tcctgaggagctgtcctttagcctc

SEQ ID NO: 5544083 - DNA, 25 bp, Homo sapien
gaactctgcaccaaagaagccattc

SEQ ID NO: 5544084 - DNA, 25 bp, Homo sapien
attcgactgacccaggccatgctca

SEQ ID NO: 5544085 - DNA, 25 bp, Homo sapien
gtccgtggacatggattacaagcac

SEQ ID NO: 5544086 - DNA, 25 bp, Homo sapien
tttacttgaaaggcaaaggccgcat

SEQ ID NO: 5544087 - DNA, 25 bp, Homo sapien
aactgccgtcgtcctgcctccctgt

SEQ ID NO: 5544088 - DNA, 25 bp, Homo sapien
tcacgtccggagtaacactacatac

SEQ ID NO: 5544089 - DNA, 25 bp, Homo sapien
cagttcacctgaaacgcctcgtctc

SEQ ID NO: 5544090 - DNA, 25 bp, Homo sapien
gcctactgcagtccctgagttagtc

SEQ ID NO: 5544091 - DNA, 25 bp, Homo sapien
ctgcatgagctgcagtccgtggaca

SEQ ID NO: 5544092 - DNA, 25 bp, Homo sapien
tacaagcacttgtgggtctgtggct

SEQ ID NO: 5544093 - DNA, 25 bp, Homo sapien
ctactgccggtagtgtcccttctct

SEQ ID NO: 5544094 - DNA, 25 bp, Homo sapien
gtcccttctctgcgagtgagggggg

SEQ ID NO: 5544095 - DNA, 25 bp, Homo sapien
ctgcaccgcgaagcctggcccgtgc

SEQ ID NO: 5544096 - DNA, 25 bp, Homo sapien
gcacgggccaggcttcgcggtgcag

SEQ ID NO: 5544097 - DNA, 25 bp, Homo sapien
actggcgccgcgcaccccgtccagc

SEQ ID NO: 5544098 - DNA, 25 bp, Homo sapien
gctggacggggtgcgcggcgccagt

SEQ ID NO: 5544099 - DNA, 25 bp, Homo sapien
tgtgatacaaagcttgggaacacct

SEQ ID NO: 5544100 - DNA, 25 bp, Homo sapien
tgggaacacctctagagagatgtcc

SEQ ID NO: 5544101 - DNA, 25 bp, Homo sapien
tcctctgacttctgaaaaggggaaa

SEQ ID NO: 5544102 - DNA, 25 bp, Homo sapien
aagcagaaaagggagttctataaac

SEQ ID NO: 5544103 - DNA, 25 bp, Homo sapien
aagaaggaacagataaccttatgac

SEQ ID NO: 5544104 - DNA, 25 bp, Homo sapien
cttttaacccctgagcaaatgtctc

SEQ ID NO: 5544105 - DNA, 25 bp, Homo sapien
ttccaacgtgagtcatacagtaact

SEQ ID NO: 5544106 - DNA, 25 bp, Homo sapien
ccttatgacaagcagaaaagggagt

SEQ ID NO: 5544107 - DNA, 25 bp, Homo sapien
ccacaccatgcctacagaaggcttt

SEQ ID NO: 5544108 - DNA, 25 bp, Homo sapien
agagatgtccaaaagaaggaacaga

SEQ ID NO: 5544109 - DNA, 25 bp, Homo sapien
taaaagaatctgtgatacaaagctt

SEQ ID NO: 5544110 - DNA, 25 bp, Homo sapien
cagttcctcgtccactgtgacacct

SEQ ID NO: 5544111 - DNA, 25 bp, Homo sapien
aggtgtcacagtggacgaggaactg

SEQ ID NO: 5544112 - DNA, 25 bp, Homo sapien
gctactcaatcaccaagagccagat

SEQ ID NO: 5544113 - DNA, 25 bp, Homo sapien
ttcagtggttgttagtagtagattc

SEQ ID NO: 5544114 - DNA, 25 bp, Homo sapien
tagagtttagcaagaagtgtcattt

SEQ ID NO: 5544115 - DNA, 25 bp, Homo sapien
cagacggcactgttataaatggttt

SEQ ID NO: 5544116 - DNA, 25 bp, Homo sapien
ggcaaatgggatacctggttcagac

SEQ ID NO: 5544117 - DNA, 25 bp, Homo sapien
cctctgcaagagttaaagtagctaa

SEQ ID NO: 5544118 - DNA, 25 bp, Homo sapien
aaatatagcatagtcctggtgcctc

SEQ ID NO: 5544119 - DNA, 25 bp, Homo sapien
taatgtcagcagatatgtacttgtc

SEQ ID NO: 5544120 - DNA, 25 bp, Homo sapien
agatatagaggacctcctgagactc

SEQ ID NO: 5544121 - DNA, 25 bp, Homo sapien
ttagaactgcagtatagtagaggag

SEQ ID NO: 5544122 - DNA, 25 bp, Homo sapien
aaaaaacatggcttgcagttactgc

SEQ ID NO: 5544123 - DNA, 25 bp, Homo sapien
actctgcacactgaccgagcggcag

SEQ ID NO: 5544124 - DNA, 25 bp, Homo sapien
attagcatgtcattaaaagtggtta

SEQ ID NO: 5544125 - DNA, 25 bp, Homo sapien
catatgatggcaagttggccccaag

SEQ ID NO: 5544126 - DNA, 25 bp, Homo sapien
tatatctgaataacccgtcccctaa

SEQ ID NO: 5544127 - DNA, 25 bp, Homo sapien
tctgcgtgactgttttgacacagaa

SEQ ID NO: 5544128 - DNA, 25 bp, Homo sapien
tgcacttaccaaatgaaaaatcaca

SEQ ID NO: 5544129 - DNA, 25 bp, Homo sapien
caagcggctgcactctgcacactga

SEQ ID NO: 5544130 - DNA, 25 bp, Homo sapien
ccaagggcagttcccgttgctctca

SEQ ID NO: 5544131 - DNA, 25 bp, Homo sapien
ttgacacagaaaacgtggtaggcaa

SEQ ID NO: 5544132 - DNA, 25 bp, Homo sapien
tcgcttttctcatcacagtgctgtc

SEQ ID NO: 5544133 - DNA, 25 bp, Homo sapien
aagtcagaaagttgaaataagttgt

SEQ ID NO: 5544134 - DNA, 25 bp, Homo sapien
acacgaggaaaggctgtccctttta

SEQ ID NO: 5544135 - DNA, 25 bp, Homo sapien
cataacagggtttagacagagaaac

SEQ ID NO: 5544136 - DNA, 25 bp, Homo sapien
ttccaggggacatatagctactgaa

SEQ ID NO: 5544137 - DNA, 25 bp, Homo sapien
gaagaggtcaactacagggtactca

SEQ ID NO: 5544138 - DNA, 25 bp, Homo sapien
gagcatctcctgtgagtcagccatg

SEQ ID NO: 5544139 - DNA, 25 bp, Homo sapien
ctctcccaactgggaaacaggggaa

SEQ ID NO: 5544140 - DNA, 25 bp, Homo sapien
tgttctcagaatccatgaaaggcca

SEQ ID NO: 5544141 - DNA, 25 bp, Homo sapien
atgaattagtgtgaagaccatgttc

SEQ ID NO: 5544142 - DNA, 25 bp, Homo sapien
cccatcagagcaacataaaggggtc

SEQ ID NO: 5544143 - DNA, 25 bp, Homo sapien
ctccatcagataggttaggagggga

SEQ ID NO: 5544144 - DNA, 25 bp, Homo sapien
gggaagggagccaacccaatatata

SEQ ID NO: 5544145 - DNA, 25 bp, Homo sapien
aaactagccatgattcaaaggttca

SEQ ID NO: 5544146 - DNA, 25 bp, Homo sapien
atagaagagtacccgatgcattgtt

SEQ ID NO: 5544147 - DNA, 25 bp, Homo sapien
acggatcatgtacaaagcaacagga

SEQ ID NO: 5544148 - DNA, 25 bp, Homo sapien
taagatttattgaatgagaactgca

SEQ ID NO: 5544149 - DNA, 25 bp, Homo sapien
aggagtttgagacatttcatggtat

SEQ ID NO: 5544150 - DNA, 25 bp, Homo sapien
attagttccatgagaacggggactt

SEQ ID NO: 5544151 - DNA, 25 bp, Homo sapien
tataaggccatttgaataacggatc

SEQ ID NO: 5544152 - DNA, 25 bp, Homo sapien
acaatatggtgccactagacacgtc

SEQ ID NO: 5544153 - DNA, 25 bp, Homo sapien
gaagttcgtgcttctggccaggtgc

SEQ ID NO: 5544154 - DNA, 25 bp, Homo sapien
aaactgcaagcagtaaaggttgtgc

SEQ ID NO: 5544155 - DNA, 25 bp, Homo sapien
aaggttgtgcaggtgatattcagta

SEQ ID NO: 5544156 - DNA, 25 bp, Homo sapien
gaggcgtgcgtctcaaatgcccgct

SEQ ID NO: 5544157 - DNA, 25 bp, Homo sapien
agcgggcatttgagacgcacgcctc

SEQ ID NO: 5544158 - DNA, 25 bp, Homo sapien
atcatttgaacccaggaagtggagg

SEQ ID NO: 5544159 - DNA, 25 bp, Homo sapien
gtaacgtggcgaaacccaatctcta

SEQ ID NO: 5544160 - DNA, 25 bp, Homo sapien
aaaatacaaaaatagtcccagccac

SEQ ID NO: 5544161 - DNA, 25 bp, Homo sapien
caacacagcgagactccgactcggg

SEQ ID NO: 5544162 - DNA, 25 bp, Homo sapien
gagccgagatcctgtcactgcactc

SEQ ID NO: 5544163 - DNA, 25 bp, Homo sapien
cgggtagctggcactatagctcctg

SEQ ID NO: 5544164 - DNA, 25 bp, Homo sapien
tataaaaattagtggccaggcatgc

SEQ ID NO: 5544165 - DNA, 25 bp, Homo sapien
cttgctctgtagctcaggctggagc

SEQ ID NO: 5544166 - DNA, 25 bp, Homo sapien
tctcaggttcaagtaattatcccac

SEQ ID NO: 5544167 - DNA, 25 bp, Homo sapien
ctaccttggagcaaagaaagtagga

SEQ ID NO: 5544168 - DNA, 25 bp, Homo sapien
ctgtaatcccagcacgttgcgaggc

SEQ ID NO: 5544169 - DNA, 25 bp, Homo sapien
ggcagctgaacctcaccatccggat

SEQ ID NO: 5544170 - DNA, 25 bp, Homo sapien
atgacgtcaaccgtcggcagctgaa

SEQ ID NO: 5544171 - DNA, 25 bp, Homo sapien
aaaactatatggtgagaatgcgact

SEQ ID NO: 5544172 - DNA, 25 bp, Homo sapien
ttgagacatctcactgtacccccaa

SEQ ID NO: 5544173 - DNA, 25 bp, Homo sapien
ggtgagaatgcgactctatgacgtc

SEQ ID NO: 5544174 - DNA, 25 bp, Homo sapien
tttgacaaatagtgagaactctgaa

SEQ ID NO: 5544175 - DNA, 25 bp, Homo sapien
ggtatcgctggagaatttccccctc

SEQ ID NO: 5544176 - DNA, 25 bp, Homo sapien
tccctaccctagctagagagaaaga

SEQ ID NO: 5544177 - DNA, 25 bp, Homo sapien
atcttctttaggggtatcgctggag

SEQ ID NO: 5544178 - DNA, 25 bp, Homo sapien
caccatccggattgtgtgtcgagca

SEQ ID NO: 5544179 - DNA, 25 bp, Homo sapien
ctctctagtgtgattccaggccttc
